United States Patent Application Publication US 2015/0141320 A1 - sequence listing, part 35

SEQ ID NO: 1319344 - DNA, 15 bp, Homo sapiens
ggagtgtgcaccctt

SEQ ID NO: 1319345 - DNA, 15 bp, Homo sapiens
tggagtgtgcaccct

SEQ ID NO: 1319346 - DNA, 15 bp, Homo sapiens
ttggagtgtgcaccc

SEQ ID NO: 1319347 - DNA, 15 bp, Homo sapiens
cttggagtgtgcacc

SEQ ID NO: 1319348 - DNA, 15 bp, Homo sapiens
acttggagtgtgcac

SEQ ID NO: 1319349 - DNA, 15 bp, Homo sapiens
gacttggagtgtgca

SEQ ID NO: 1319350 - DNA, 15 bp, Homo sapiens
tgacttggagtgtgc

SEQ ID NO: 1319351 - DNA, 15 bp, Homo sapiens
ttgacttggagtgtg

SEQ ID NO: 1319352 - DNA, 15 bp, Homo sapiens
gttgacttggagtgt

SEQ ID NO: 1319353 - DNA, 15 bp, Homo sapiens
tgttgacttggagtg

SEQ ID NO: 1319354 - DNA, 15 bp, Homo sapiens
ttgttgacttggagt

SEQ ID NO: 1319355 - DNA, 15 bp, Homo sapiens
gttgttgacttggag

SEQ ID NO: 1319356 - DNA, 15 bp, Homo sapiens
agttgttgacttgga

SEQ ID NO: 1319357 - DNA, 15 bp, Homo sapiens
gagttgttgacttgg

SEQ ID NO: 1319358 - DNA, 15 bp, Homo sapiens
tgagttgttgacttg

SEQ ID NO: 1319359 - DNA, 15 bp, Homo sapiens
gtgagttgttgactt

SEQ ID NO: 1319360 - DNA, 15 bp, Homo sapiens
ggtgagttgttgact

SEQ ID NO: 1319361 - DNA, 15 bp, Homo sapiens
cggtgagttgttgac

SEQ ID NO: 1319362 - DNA, 15 bp, Homo sapiens
acggtgagttgttga

SEQ ID NO: 1319363 - DNA, 15 bp, Homo sapiens
cacggtgagttgttg

SEQ ID NO: 1319364 - DNA, 15 bp, Homo sapiens
acacggtgagttgtt

SEQ ID NO: 1319365 - DNA, 15 bp, Homo sapiens
cacacggtgagttgt

SEQ ID NO: 1319366 - DNA, 15 bp, Homo sapiens
gcacacggtgagttg

SEQ ID NO: 1319367 - DNA, 15 bp, Homo sapiens
tgcacacggtgagtt

SEQ ID NO: 1319368 - DNA, 15 bp, Homo sapiens
ctgcacacggtgagt

SEQ ID NO: 1319369 - DNA, 15 bp, Homo sapiens
gctgcacacggtgag

SEQ ID NO: 1319370 - DNA, 15 bp, Homo sapiens
tgctgcacacggtga

SEQ ID NO: 1319371 - DNA, 15 bp, Homo sapiens
gtgctgcacacggtg

SEQ ID NO: 1319372 - DNA, 15 bp, Homo sapiens
ggtgctgcacacggt

SEQ ID NO: 1319373 - DNA, 15 bp, Homo sapiens
aggtgctgcacacgg

SEQ ID NO: 1319374 - DNA, 15 bp, Homo sapiens
aaggtgctgcacacg

SEQ ID NO: 1319375 - DNA, 15 bp, Homo sapiens
gaaggtgctgcacac

SEQ ID NO: 1319376 - DNA, 15 bp, Homo sapiens
ggaaggtgctgcaca

SEQ ID NO: 1319377 - DNA, 15 bp, Homo sapiens
aggaaggtgctgcac

SEQ ID NO: 1319378 - DNA, 15 bp, Homo sapiens
gaggaaggtgctgca

SEQ ID NO: 1319379 - DNA, 15 bp, Homo sapiens
tgaggaaggtgctgc

SEQ ID NO: 1319380 - DNA, 15 bp, Homo sapiens
gtgaggaaggtgctg

SEQ ID NO: 1319381 - DNA, 15 bp, Homo sapiens
tgtgaggaaggtgct

SEQ ID NO: 1319382 - DNA, 15 bp, Homo sapiens
gtgtgaggaaggtgc

SEQ ID NO: 1319383 - DNA, 15 bp, Homo sapiens
tgtgtgaggaaggtg

SEQ ID NO: 1319384 - DNA, 15 bp, Homo sapiens
atgtgtgaggaaggt

SEQ ID NO: 1319385 - DNA, 15 bp, Homo sapiens
aatgtgtgaggaagg

SEQ ID NO: 1319386 - DNA, 15 bp, Homo sapiens
aaaatgtgtgaggaa

SEQ ID NO: 1319387 - DNA, 15 bp, Homo sapiens
caaaatgtgtgagga

SEQ ID NO: 1319388 - DNA, 15 bp, Homo sapiens
gcaaaatgtgtgagg

SEQ ID NO: 1319389 - DNA, 15 bp, Homo sapiens
agcaaaatgtgtgag

SEQ ID NO: 1319390 - DNA, 15 bp, Homo sapiens
aagcaaaatgtgtga

SEQ ID NO: 1319391 - DNA, 15 bp, Homo sapiens
aaagcaaaatgtgtg

SEQ ID NO: 1319392 - DNA, 15 bp, Homo sapiens
caaagcaaaatgtgt

SEQ ID NO: 1319393 - DNA, 15 bp, Homo sapiens
gcaaagcaaaatgtg

SEQ ID NO: 1319394 - DNA, 15 bp, Homo sapiens
agcaaagcaaaatgt

SEQ ID NO: 1319395 - DNA, 15 bp, Homo sapiens
aagcaaagcaaaatg

SEQ ID NO: 1319396 - DNA, 15 bp, Homo sapiens
aaagcaaagcaaaat

SEQ ID NO: 1319397 - DNA, 15 bp, Homo sapiens
acagaaagcaaagca

SEQ ID NO: 1319398 - DNA, 15 bp, Homo sapiens
gacagaaagcaaagc

SEQ ID NO: 1319399 - DNA, 15 bp, Homo sapiens
tgacagaaagcaaag

SEQ ID NO: 1319400 - DNA, 15 bp, Homo sapiens
gtgacagaaagcaaa

SEQ ID NO: 1319401 - DNA, 15 bp, Homo sapiens
tgtgacagaaagcaa

SEQ ID NO: 1319402 - DNA, 15 bp, Homo sapiens
ctgtgacagaaagca

SEQ ID NO: 1319403 - DNA, 15 bp, Homo sapiens
cctgtgacagaaagc

SEQ ID NO: 1319404 - DNA, 15 bp, Homo sapiens
tcctgtgacagaaag

SEQ ID NO: 1319405 - DNA, 15 bp, Homo sapiens
gtcctgtgacagaaa

SEQ ID NO: 1319406 - DNA, 15 bp, Homo sapiens
ggtcctgtgacagaa

SEQ ID NO: 1319407 - DNA, 15 bp, Homo sapiens
tggtcctgtgacaga

SEQ ID NO: 1319408 - DNA, 15 bp, Homo sapiens
atggtcctgtgacag

SEQ ID NO: 1319409 - DNA, 15 bp, Homo sapiens
gatggtcctgtgaca

SEQ ID NO: 1319410 - DNA, 15 bp, Homo sapiens
tgatggtcctgtgac

SEQ ID NO: 1319411 - DNA, 15 bp, Homo sapiens
ctgatggtcctgtga

SEQ ID NO: 1319412 - DNA, 15 bp, Homo sapiens
tctgatggtcctgtg

SEQ ID NO: 1319413 - DNA, 15 bp, Homo sapiens
gtctgatggtcctgt

SEQ ID NO: 1319414 - DNA, 15 bp, Homo sapiens
cgtctgatggtcctg

SEQ ID NO: 1319415 - DNA, 15 bp, Homo sapiens
acgtctgatggtcct

SEQ ID NO: 1319416 - DNA, 15 bp, Homo sapiens
tacgtctgatggtcc

SEQ ID NO: 1319417 - DNA, 15 bp, Homo sapiens
ctacgtctgatggtc

SEQ ID NO: 1319418 - DNA, 15 bp, Homo sapiens
tctacgtctgatggt

SEQ ID NO: 1319419 - DNA, 15 bp, Homo sapiens
ttctacgtctgatgg

SEQ ID NO: 1319420 - DNA, 15 bp, Homo sapiens
gttctacgtctgatg

SEQ ID NO: 1319421 - DNA, 15 bp, Homo sapiens
cgttctacgtctgat

SEQ ID NO: 1319422 - DNA, 15 bp, Homo sapiens
acgttctacgtctga

SEQ ID NO: 1319423 - DNA, 15 bp, Homo sapiens
gacgttctacgtctg

SEQ ID NO: 1319424 - DNA, 15 bp, Homo sapiens
ggacgttctacgtct

SEQ ID NO: 1319425 - DNA, 15 bp, Homo sapiens
aggacgttctacgtc

SEQ ID NO: 1319426 - DNA, 15 bp, Homo sapiens
caggacgttctacgt

SEQ ID NO: 1319427 - DNA, 15 bp, Homo sapiens
tcaggacgttctacg

SEQ ID NO: 1319428 - DNA, 15 bp, Homo sapiens
gtcaggacgttctac

SEQ ID NO: 1319429 - DNA, 15 bp, Homo sapiens
agtcaggacgttcta

SEQ ID NO: 1319430 - DNA, 15 bp, Homo sapiens
gagtcaggacgttct

SEQ ID NO: 1319431 - DNA, 15 bp, Homo sapiens
agagtcaggacgttc

SEQ ID NO: 1319432 - DNA, 15 bp, Homo sapiens
gagagtcaggacgtt

SEQ ID NO: 1319433 - DNA, 15 bp, Homo sapiens
ggagagtcaggacgt

SEQ ID NO: 1319434 - DNA, 15 bp, Homo sapiens
aggagagtcaggacg

SEQ ID NO: 1319435 - DNA, 15 bp, Homo sapiens
caggagagtcaggac

SEQ ID NO: 1319436 - DNA, 15 bp, Homo sapiens
tcaggagagtcagga

SEQ ID NO: 1319437 - DNA, 15 bp, Homo sapiens
ttcaggagagtcagg

SEQ ID NO: 1319438 - DNA, 15 bp, Homo sapiens
attcaggagagtcag

SEQ ID NO: 1319439 - DNA, 15 bp, Homo sapiens
aattcaggagagtca

SEQ ID NO: 1319440 - DNA, 15 bp, Homo sapiens
taattcaggagagtc

SEQ ID NO: 1319441 - DNA, 15 bp, Homo sapiens
gtaattcaggagagt

SEQ ID NO: 1319442 - DNA, 15 bp, Homo sapiens
agtaattcaggagag

SEQ ID NO: 1319443 - DNA, 15 bp, Homo sapiens
tagtaattcaggaga

SEQ ID NO: 1319444 - DNA, 15 bp, Homo sapiens
ctagtaattcaggag

SEQ ID NO: 1319445 - DNA, 15 bp, Homo sapiens
tctagtaattcagga

SEQ ID NO: 1319446 - DNA, 15 bp, Homo sapiens
ttctagtaattcagg

SEQ ID NO: 1319447 - DNA, 15 bp, Homo sapiens
attctagtaattcag

SEQ ID NO: 1319448 - DNA, 15 bp, Homo sapiens
cattctagtaattca

SEQ ID NO: 1319449 - DNA, 15 bp, Homo sapiens
acattctagtaattc

SEQ ID NO: 1319450 - DNA, 15 bp, Homo sapiens
gacattctagtaatt

SEQ ID NO: 1319451 - DNA, 15 bp, Homo sapiens
tgacattctagtaat

SEQ ID NO: 1319452 - DNA, 15 bp, Homo sapiens
ctgacattctagtaa

SEQ ID NO: 1319453 - DNA, 15 bp, Homo sapiens
gctgacattctagta

SEQ ID NO: 1319454 - DNA, 15 bp, Homo sapiens
tgctgacattctagt

SEQ ID NO: 1319455 - DNA, 15 bp, Homo sapiens
ttgctgacattctag

SEQ ID NO: 1319456 - DNA, 15 bp, Homo sapiens
gttgctgacattcta

SEQ ID NO: 1319457 - DNA, 15 bp, Homo sapiens
tgttgctgacattct

SEQ ID NO: 1319458 - DNA, 15 bp, Homo sapiens
ttgttgctgacattc

SEQ ID NO: 1319459 - DNA, 15 bp, Homo sapiens
tttgttgctgacatt

SEQ ID NO: 1319460 - DNA, 15 bp, Homo sapiens
gtttgttgctgacat

SEQ ID NO: 1319461 - DNA, 15 bp, Homo sapiens
agtttgttgctgaca

SEQ ID NO: 1319462 - DNA, 15 bp, Homo sapiens
gagtttgttgctgac

SEQ ID NO: 1319463 - DNA, 15 bp, Homo sapiens
tgagtttgttgctga

SEQ ID NO: 1319464 - DNA, 15 bp, Homo sapiens
gtgagtttgttgctg

SEQ ID NO: 1319465 - DNA, 15 bp, Homo sapiens
tgtgagtttgttgct

SEQ ID NO: 1319466 - DNA, 15 bp, Homo sapiens
ttgtgagtttgttgc

SEQ ID NO: 1319467 - DNA, 15 bp, Homo sapiens
tttgtgagtttgttg

SEQ ID NO: 1319468 - DNA, 15 bp, Homo sapiens
ctttgtgagtttgtt

SEQ ID NO: 1319469 - DNA, 15 bp, Homo sapiens
actttgtgagtttgt

SEQ ID NO: 1319470 - DNA, 15 bp, Homo sapiens
tactttgtgagtttg

SEQ ID NO: 1319471 - DNA, 15 bp, Homo sapiens
ctactttgtgagttt

SEQ ID NO: 1319472 - DNA, 15 bp, Homo sapiens
tctactttgtgagtt

SEQ ID NO: 1319473 - DNA, 15 bp, Homo sapiens
atctactttgtgagt

SEQ ID NO: 1319474 - DNA, 15 bp, Homo sapiens
aatctactttgtgag

SEQ ID NO: 1319475 - DNA, 15 bp, Homo sapiens
taatctactttgtga

SEQ ID NO: 1319476 - DNA, 15 bp, Homo sapiens
ctaatctactttgtg

SEQ ID NO: 1319477 - DNA, 15 bp, Homo sapiens
tctaatctactttgt

SEQ ID NO: 1319478 - DNA, 15 bp, Homo sapiens
ctctaatctactttg

SEQ ID NO: 1319479 - DNA, 15 bp, Homo sapiens
cctctaatctacttt

SEQ ID NO: 1319480 - DNA, 15 bp, Homo sapiens
ccctctaatctactt

SEQ ID NO: 1319481 - DNA, 15 bp, Homo sapiens
accctctaatctact

SEQ ID NO: 1319482 - DNA, 15 bp, Homo sapiens
taccctctaatctac

SEQ ID NO: 1319483 - DNA, 15 bp, Homo sapiens
ctaccctctaatcta

SEQ ID NO: 1319484 - DNA, 15 bp, Homo sapiens
cctaccctctaatct

SEQ ID NO: 1319485 - DNA, 15 bp, Homo sapiens
tcctaccctctaatc

SEQ ID NO: 1319486 - DNA, 15 bp, Homo sapiens
ttcctaccctctaat

SEQ ID NO: 1319487 - DNA, 15 bp, Homo sapiens
attcctaccctctaa

SEQ ID NO: 1319488 - DNA, 15 bp, Homo sapiens
tattcctaccctcta

SEQ ID NO: 1319489 - DNA, 15 bp, Homo sapiens
ctattcctaccctct

SEQ ID NO: 1319490 - DNA, 15 bp, Homo sapiens
tctattcctaccctc

SEQ ID NO: 1319491 - DNA, 15 bp, Homo sapiens
atctattcctaccct

SEQ ID NO: 1319492 - DNA, 15 bp, Homo sapiens
tatctattcctaccc

SEQ ID NO: 1319493 - DNA, 15 bp, Homo sapiens
gtatctattcctacc

SEQ ID NO: 1319494 - DNA, 15 bp, Homo sapiens
tgtatctattcctac

SEQ ID NO: 1319495 - DNA, 15 bp, Homo sapiens
atgtatctattccta

SEQ ID NO: 1319496 - DNA, 15 bp, Homo sapiens
tatgtatctattcct

SEQ ID NO: 1319497 - DNA, 15 bp, Homo sapiens
ttatgtatctattcc

SEQ ID NO: 1319498 - DNA, 15 bp, Homo sapiens
tttatgtatctattc

SEQ ID NO: 1319499 - DNA, 15 bp, Homo sapiens
atttatgtatctatt

SEQ ID NO: 1319500 - DNA, 15 bp, Homo sapiens
aatttatgtatctat

SEQ ID NO: 1319501 - DNA, 15 bp, Homo sapiens
aaatttatgtatcta

SEQ ID NO: 1319502 - DNA, 15 bp, Homo sapiens
aaaatttatgtatct

SEQ ID NO: 1319503 - DNA, 15 bp, Homo sapiens
aaaaatttatgtatc

SEQ ID NO: 1319504 - DNA, 15 bp, Homo sapiens
taaaaatttatgtat

SEQ ID NO: 1319505 - DNA, 15 bp, Homo sapiens
ttaaaaatttatgta

SEQ ID NO: 1319506 - DNA, 15 bp, Homo sapiens
tttaaaaatttatgt

SEQ ID NO: 1319507 - DNA, 15 bp, Homo sapiens
ttttaaaaatttatg

SEQ ID NO: 1319508 - DNA, 15 bp, Homo sapiens
tttttaaaaatttat

SEQ ID NO: 1319509 - DNA, 15 bp, Homo sapiens
gtttttaaaaattta

SEQ ID NO: 1319510 - DNA, 15 bp, Homo sapiens
ggtttttaaaaattt

SEQ ID NO: 1319511 - DNA, 15 bp, Homo sapiens
aggtttttaaaaatt

SEQ ID NO: 1319512 - DNA, 15 bp, Homo sapiens
gcaggtttttaaaaa

SEQ ID NO: 1319513 - DNA, 15 bp, Homo sapiens
ggcaggtttttaaaa

SEQ ID NO: 1319514 - DNA, 15 bp, Homo sapiens
tggcaggtttttaaa

SEQ ID NO: 1319515 - DNA, 15 bp, Homo sapiens
gattggcaggttttt

SEQ ID NO: 1319516 - DNA, 15 bp, Homo sapiens
tgattggcaggtttt

SEQ ID NO: 1319517 - DNA, 15 bp, Homo sapiens
atgattggcaggttt

SEQ ID NO: 1319518 - DNA, 15 bp, Homo sapiens
tatgattggcaggtt

SEQ ID NO: 1319519 - DNA, 15 bp, Homo sapiens
gtatgattggcaggt

SEQ ID NO: 1319520 - DNA, 15 bp, Homo sapiens
agtatgattggcagg

SEQ ID NO: 1319521 - DNA, 15 bp, Homo sapiens
cagtatgattggcag

SEQ ID NO: 1319522 - DNA, 15 bp, Homo sapiens
acagtatgattggca

SEQ ID NO: 1319523 - DNA, 15 bp, Homo sapiens
aacagtatgattggc

SEQ ID NO: 1319524 - DNA, 15 bp, Homo sapiens
aaacagtatgattgg

SEQ ID NO: 1319525 - DNA, 15 bp, Homo sapiens
aaaacagtatgattg

SEQ ID NO: 1319526 - DNA, 15 bp, Homo sapiens
gaaaacagtatgatt

SEQ ID NO: 1319527 - DNA, 15 bp, Homo sapiens
agaaaacagtatgat

SEQ ID NO: 1319528 - DNA, 15 bp, Homo sapiens
tagaaaacagtatga

SEQ ID NO: 1319529 - DNA, 15 bp, Homo sapiens
ctagaaaacagtatg

SEQ ID NO: 1319530 - DNA, 15 bp, Homo sapiens
tctagaaaacagtat

SEQ ID NO: 1319531 - DNA, 15 bp, Homo sapiens
gtctagaaaacagta

SEQ ID NO: 1319532 - DNA, 15 bp, Homo sapiens
tgtctagaaaacagt

SEQ ID NO: 1319533 - DNA, 15 bp, Homo sapiens
ctgtctagaaaacag

SEQ ID NO: 1319534 - DNA, 15 bp, Homo sapiens
actgtctagaaaaca

SEQ ID NO: 1319535 - DNA, 15 bp, Homo sapiens
tactgtctagaaaac

SEQ ID NO: 1319536 - DNA, 15 bp, Homo sapiens
ttactgtctagaaaa

SEQ ID NO: 1319537 - DNA, 15 bp, Homo sapiens
attactgtctagaaa

SEQ ID NO: 1319538 - DNA, 15 bp, Homo sapiens
tattactgtctagaa

SEQ ID NO: 1319539 - DNA, 15 bp, Homo sapiens
atattactgtctaga

SEQ ID NO: 1319540 - DNA, 15 bp, Homo sapiens
tatattactgtctag

SEQ ID NO: 1319541 - DNA, 15 bp, Homo sapiens
ttatattactgtcta

SEQ ID NO: 1319542 - DNA, 15 bp, Homo sapiens
attatattactgtct

SEQ ID NO: 1319543 - DNA, 15 bp, Homo sapiens
tattatattactgtc

SEQ ID NO: 1319544 - DNA, 15 bp, Homo sapiens
ttattatattactgt

SEQ ID NO: 1319545 - DNA, 15 bp, Homo sapiens
cttattatattactg

SEQ ID NO: 1319546 - DNA, 15 bp, Homo sapiens
tcttattatattact

SEQ ID NO: 1319547 - DNA, 15 bp, Homo sapiens
ttcttattatattac

SEQ ID NO: 1319548 - DNA, 15 bp, Homo sapiens
gttcttattatatta

SEQ ID NO: 1319549 - DNA, 15 bp, Homo sapiens
tgttcttattatatt

SEQ ID NO: 1319550 - DNA, 15 bp, Homo sapiens
atgttcttattatat

SEQ ID NO: 1319551 - DNA, 15 bp, Homo sapiens
catgttcttattata

SEQ ID NO: 1319552 - DNA, 15 bp, Homo sapiens
tcatgttcttattat

SEQ ID NO: 1319553 - DNA, 15 bp, Homo sapiens
ctcatgttcttatta

SEQ ID NO: 1319554 - DNA, 15 bp, Homo sapiens
cctcatgttcttatt

SEQ ID NO: 1319555 - DNA, 15 bp, Homo sapiens
gcctcatgttcttat

SEQ ID NO: 1319556 - DNA, 15 bp, Homo sapiens
tgcctcatgttctta

SEQ ID NO: 1319557 - DNA, 15 bp, Homo sapiens
ctgcctcatgttctt

SEQ ID NO: 1319558 - DNA, 15 bp, Homo sapiens
cctgcctcatgttct

SEQ ID NO: 1319559 - DNA, 15 bp, Homo sapiens
tcctgcctcatgttc

SEQ ID NO: 1319560 - DNA, 15 bp, Homo sapiens
gtcctgcctcatgtt

SEQ ID NO: 1319561 - DNA, 15 bp, Homo sapiens
tgtcctgcctcatgt

SEQ ID NO: 1319562 - DNA, 15 bp, Homo sapiens
atgtcctgcctcatg

SEQ ID NO: 1319563 - DNA, 15 bp, Homo sapiens
gatgtcctgcctcat

SEQ ID NO: 1319564 - DNA, 15 bp, Homo sapiens
ggatgtcctgcctca

SEQ ID NO: 1319565 - DNA, 15 bp, Homo sapiens
tggatgtcctgcctc

SEQ ID NO: 1319566 - DNA, 15 bp, Homo sapiens
gtggatgtcctgcct

SEQ ID NO: 1319567 - DNA, 15 bp, Homo sapiens
tgtggatgtcctgcc

SEQ ID NO: 1319568 - DNA, 15 bp, Homo sapiens
ttgtggatgtcctgc

SEQ ID NO: 1319569 - DNA, 15 bp, Homo sapiens
tttgtggatgtcctg

SEQ ID NO: 1319570 - DNA, 15 bp, Homo sapiens
atttgtggatgtcct

SEQ ID NO: 1319571 - DNA, 15 bp, Homo sapiens
tatttgtggatgtcc

SEQ ID NO: 1319572 - DNA, 15 bp, Homo sapiens
ctatttgtggatgtc

SEQ ID NO: 1319573 - DNA, 15 bp, Homo sapiens
actatttgtggatgt

SEQ ID NO: 1319574 - DNA, 15 bp, Homo sapiens
tactatttgtggatg

SEQ ID NO: 1319575 - DNA, 15 bp, Homo sapiens
ctactatttgtggat

SEQ ID NO: 1319576 - DNA, 15 bp, Homo sapiens
tctactatttgtgga

SEQ ID NO: 1319577 - DNA, 15 bp, Homo sapiens
ctctactatttgtgg

SEQ ID NO: 1319578 - DNA, 15 bp, Homo sapiens
tctctactatttgtg

SEQ ID NO: 1319579 - DNA, 15 bp, Homo sapiens
ttctctactatttgt

SEQ ID NO: 1319580 - DNA, 15 bp, Homo sapiens
attctctactatttg

SEQ ID NO: 1319581 - DNA, 15 bp, Homo sapiens
tattctctactattt

SEQ ID NO: 1319582 - DNA, 15 bp, Homo sapiens
ttattctctactatt

SEQ ID NO: 1319583 - DNA, 15 bp, Homo sapiens
attattctctactat

SEQ ID NO: 1319584 - DNA, 15 bp, Homo sapiens
aattattctctacta

SEQ ID NO: 1319585 - DNA, 15 bp, Homo sapiens
taattattctctact

SEQ ID NO: 1319586 - DNA, 15 bp, Homo sapiens
ttaattattctctac

SEQ ID NO: 1319587 - DNA, 15 bp, Homo sapiens
attaattattctcta

SEQ ID NO: 1319588 - DNA, 15 bp, Homo sapiens
tattaattattctct

SEQ ID NO: 1319589 - DNA, 15 bp, Homo sapiens
ctattaattattctc

SEQ ID NO: 1319590 - DNA, 15 bp, Homo sapiens
actattaattattct

SEQ ID NO: 1319591 - DNA, 15 bp, Homo sapiens
gactattaattattc

SEQ ID NO: 1319592 - DNA, 15 bp, Homo sapiens
ggactattaattatt

SEQ ID NO: 1319593 - DNA, 15 bp, Homo sapiens
tggactattaattat

SEQ ID NO: 1319594 - DNA, 15 bp, Homo sapiens
ctggactattaatta

SEQ ID NO: 1319595 - DNA, 15 bp, Homo sapiens
tctggactattaatt

SEQ ID NO: 1319596 - DNA, 15 bp, Homo sapiens
ttctggactattaat

SEQ ID NO: 1319597 - DNA, 15 bp, Homo sapiens
gttctggactattaa

SEQ ID NO: 1319598 - DNA, 15 bp, Homo sapiens
agttctggactatta

SEQ ID NO: 1319599 - DNA, 15 bp, Homo sapiens
cagttctggactatt

SEQ ID NO: 1319600 - DNA, 15 bp, Homo sapiens
gcagttctggactat

SEQ ID NO: 1319601 - DNA, 15 bp, Homo sapiens
ggcagttctggacta

SEQ ID NO: 1319602 - DNA, 15 bp, Homo sapiens
tggcagttctggact

SEQ ID NO: 1319603 - DNA, 15 bp, Homo sapiens
ttggcagttctggac

SEQ ID NO: 1319604 - DNA, 15 bp, Homo sapiens
tttggcagttctgga

SEQ ID NO: 1319605 - DNA, 15 bp, Homo sapiens
atttggcagttctgg

SEQ ID NO: 1319606 - DNA, 15 bp, Homo sapiens
tatttggcagttctg

SEQ ID NO: 1319607 - DNA, 15 bp, Homo sapiens
ctatttggcagttct

SEQ ID NO: 1319608 - DNA, 15 bp, Homo sapiens
cctatttggcagttc

SEQ ID NO: 1319609 - DNA, 15 bp, Homo sapiens
tcctatttggcagtt

SEQ ID NO: 1319610 - DNA, 15 bp, Homo sapiens
ttcctatttggcagt

SEQ ID NO: 1319611 - DNA, 15 bp, Homo sapiens
attcctatttggcag

SEQ ID NO: 1319612 - DNA, 15 bp, Homo sapiens
aattcctatttggca

SEQ ID NO: 1319613 - DNA, 15 bp, Homo sapiens
gaattcctatttggc

SEQ ID NO: 1319614 - DNA, 15 bp, Homo sapiens
ggaattcctatttgg

SEQ ID NO: 1319615 - DNA, 15 bp, Homo sapiens
gggaattcctatttg

SEQ ID NO: 1319616 - DNA, 15 bp, Homo sapiens
ggggaattcctattt

SEQ ID NO: 1319617 - DNA, 15 bp, Homo sapiens
aggggaattcctatt

SEQ ID NO: 1319618 - DNA, 15 bp, Homo sapiens
aaggggaattcctat

SEQ ID NO: 1319619 - DNA, 15 bp, Homo sapiens
taaggggaattccta

SEQ ID NO: 1319620 - DNA, 15 bp, Homo sapiens
ataaggggaattcct

SEQ ID NO: 1319621 - DNA, 15 bp, Homo sapiens
cataaggggaattcc

SEQ ID NO: 1319622 - DNA, 15 bp, Homo sapiens
tcataaggggaattc

SEQ ID NO: 1319623 - DNA, 15 bp, Homo sapiens
ttcataaggggaatt

SEQ ID NO: 1319624 - DNA, 15 bp, Homo sapiens
tttcataaggggaat

SEQ ID NO: 1319625 - DNA, 15 bp, Homo sapiens
ttttcataaggggaa

SEQ ID NO: 1319626 - DNA, 15 bp, Homo sapiens
gttttcataagggga

SEQ ID NO: 1319627 - DNA, 15 bp, Homo sapiens
tgttttcataagggg

SEQ ID NO: 1319628 - DNA, 15 bp, Homo sapiens
gtgttttcataaggg

SEQ ID NO: 1319629 - DNA, 15 bp, Homo sapiens
ggtgttttcataagg

SEQ ID NO: 1319630 - DNA, 15 bp, Homo sapiens
gggtgttttcataag

SEQ ID NO: 1319631 - DNA, 15 bp, Homo sapiens
agggtgttttcataa

SEQ ID NO: 1319632 - DNA, 15 bp, Homo sapiens
aagggtgttttcata

SEQ ID NO: 1319633 - DNA, 15 bp, Homo sapiens
caagggtgttttcat

SEQ ID NO: 1319634 - DNA, 15 bp, Homo sapiens
gcaagggtgttttca

SEQ ID NO: 1319635 - DNA, 15 bp, Homo sapiens
tgcaagggtgttttc

SEQ ID NO: 1319636 - DNA, 15 bp, Homo sapiens
ctgcaagggtgtttt

SEQ ID NO: 1319637 - DNA, 15 bp, Homo sapiens
gctgcaagggtgttt

SEQ ID NO: 1319638 - DNA, 15 bp, Homo sapiens
agctgcaagggtgtt

SEQ ID NO: 1319639 - DNA, 15 bp, Homo sapiens
tagctgcaagggtgt

SEQ ID NO: 1319640 - DNA, 15 bp, Homo sapiens
ttagctgcaagggtg

SEQ ID NO: 1319641 - DNA, 15 bp, Homo sapiens
attagctgcaagggt

SEQ ID NO: 1319642 - DNA, 15 bp, Homo sapiens
gattagctgcaaggg

SEQ ID NO: 1319643 - DNA, 15 bp, Homo sapiens
tgattagctgcaagg

SEQ ID NO: 1319644 - DNA, 15 bp, Homo sapiens
ctgattagctgcaag

SEQ ID NO: 1319645 - DNA, 15 bp, Homo sapiens
cctgattagctgcaa

SEQ ID NO: 1319646 - DNA, 15 bp, Homo sapiens
acctgattagctgca

SEQ ID NO: 1319647 - DNA, 15 bp, Homo sapiens
tacctgattagctgc

SEQ ID NO: 1319648 - DNA, 15 bp, Homo sapiens
ctacctgattagctg

SEQ ID NO: 1319649 - DNA, 15 bp, Homo sapiens
gctacctgattagct

SEQ ID NO: 1319650 - DNA, 15 bp, Homo sapiens
ggctacctgattagc

SEQ ID NO: 1319651 - DNA, 15 bp, Homo sapiens
gggctacctgattag

SEQ ID NO: 1319652 - DNA, 15 bp, Homo sapiens
agggctacctgatta

SEQ ID NO: 1319653 - DNA, 15 bp, Homo sapiens
aagggctacctgatt

SEQ ID NO: 1319654 - DNA, 15 bp, Homo sapiens
caagggctacctgat

SEQ ID NO: 1319655 - DNA, 15 bp, Homo sapiens
acaagggctacctga

SEQ ID NO: 1319656 - DNA, 15 bp, Homo sapiens
aacaagggctacctg

SEQ ID NO: 1319657 - DNA, 15 bp, Homo sapiens
aaacaagggctacct

SEQ ID NO: 1319658 - DNA, 15 bp, Homo sapiens
taaacaagggctacc

SEQ ID NO: 1319659 - DNA, 15 bp, Homo sapiens
ctaaacaagggctac

SEQ ID NO: 1319660 - DNA, 15 bp, Homo sapiens
tctaaacaagggcta

SEQ ID NO: 1319661 - DNA, 15 bp, Homo sapiens
ttctaaacaagggct

SEQ ID NO: 1319662 - DNA, 15 bp, Homo sapiens
tttctaaacaagggc

SEQ ID NO: 1319663 - DNA, 15 bp, Homo sapiens
gtttctaaacaaggg

SEQ ID NO: 1319664 - DNA, 15 bp, Homo sapiens
ggtttctaaacaagg

SEQ ID NO: 1319665 - DNA, 15 bp, Homo sapiens
tggtttctaaacaag

SEQ ID NO: 1319666 - DNA, 15 bp, Homo sapiens
ttggtttctaaacaa

SEQ ID NO: 1319667 - DNA, 15 bp, Homo sapiens
attggtttctaaaca

SEQ ID NO: 1319668 - DNA, 15 bp, Homo sapiens
aattggtttctaaac

SEQ ID NO: 1319669 - DNA, 15 bp, Homo sapiens
taattggtttctaaa

SEQ ID NO: 1319670 - DNA, 15 bp, Homo sapiens
ctaattggtttctaa

SEQ ID NO: 1319671 - DNA, 15 bp, Homo sapiens
gctaattggtttcta

SEQ ID NO: 1319672 - DNA, 15 bp, Homo sapiens
tgctaattggtttct

SEQ ID NO: 1319673 - DNA, 15 bp, Homo sapiens
gtgctaattggtttc

SEQ ID NO: 1319674 - DNA, 15 bp, Homo sapiens
agtgctaattggttt

SEQ ID NO: 1319675 - DNA, 15 bp, Homo sapiens
gagtgctaattggtt

SEQ ID NO: 1319676 - DNA, 15 bp, Homo sapiens
tgagtgctaattggt

SEQ ID NO: 1319677 - DNA, 15 bp, Homo sapiens
atgagtgctaattgg

SEQ ID NO: 1319678 - DNA, 15 bp, Homo sapiens
tatgagtgctaattg

SEQ ID NO: 1319679 - DNA, 15 bp, Homo sapiens
ttatgagtgctaatt

SEQ ID NO: 1319680 - DNA, 15 bp, Homo sapiens
tttatgagtgctaat

SEQ ID NO: 1319681 - DNA, 15 bp, Homo sapiens
ttttatgagtgctaa

SEQ ID NO: 1319682 - DNA, 15 bp, Homo sapiens
attttatgagtgcta

SEQ ID NO: 1319683 - DNA, 15 bp, Homo sapiens
tattttatgagtgct

SEQ ID NO: 1319684 - DNA, 15 bp, Homo sapiens
atattttatgagtgc

SEQ ID NO: 1319685 - DNA, 15 bp, Homo sapiens
aatattttatgagtg

SEQ ID NO: 1319686 - DNA, 15 bp, Homo sapiens
aaatattttatgagt

SEQ ID NO: 1319687 - DNA, 15 bp, Homo sapiens
caaatattttatgag

SEQ ID NO: 1319688 - DNA, 15 bp, Homo sapiens
acaaatattttatga

SEQ ID NO: 1319689 - DNA, 15 bp, Homo sapiens
tacaaatattttatg

SEQ ID NO: 1319690 - DNA, 15 bp, Homo sapiens
gtacaaatattttat

SEQ ID NO: 1319691 - DNA, 15 bp, Homo sapiens
tgtacaaatatttta

SEQ ID NO: 1319692 - DNA, 15 bp, Homo sapiens
ttgtacaaatatttt

SEQ ID NO: 1319693 - DNA, 15 bp, Homo sapiens
cttgtacaaatattt

SEQ ID NO: 1319694 - DNA, 15 bp, Homo sapiens
ccttgtacaaatatt

SEQ ID NO: 1319695 - DNA, 15 bp, Homo sapiens
tccttgtacaaatat

SEQ ID NO: 1319696 - DNA, 15 bp, Homo sapiens
ctccttgtacaaata

SEQ ID NO: 1319697 - DNA, 15 bp, Homo sapiens
actccttgtacaaat

SEQ ID NO: 1319698 - DNA, 15 bp, Homo sapiens
cactccttgtacaaa

SEQ ID NO: 1319699 - DNA, 15 bp, Homo sapiens
tcactccttgtacaa

SEQ ID NO: 1319700 - DNA, 15 bp, Homo sapiens
ctcactccttgtaca

SEQ ID NO: 1319701 - DNA, 15 bp, Homo sapiens
actcactccttgtac

SEQ ID NO: 1319702 - DNA, 15 bp, Homo sapiens
cactcactccttgta

SEQ ID NO: 1319703 - DNA, 15 bp, Homo sapiens
ccactcactccttgt

SEQ ID NO: 1319704 - DNA, 15 bp, Homo sapiens
cccactcactccttg

SEQ ID NO: 1319705 - DNA, 15 bp, Homo sapiens
ccccactcactcctt

SEQ ID NO: 1319706 - DNA, 15 bp, Homo sapiens
cccccactcactcct

SEQ ID NO: 1319707 - DNA, 15 bp, Homo sapiens
tcccccactcactcc

SEQ ID NO: 1319708 - DNA, 15 bp, Homo sapiens
ctcccccactcactc

SEQ ID NO: 1319709 - DNA, 15 bp, Homo sapiens
tctcccccactcact

SEQ ID NO: 1319710 - DNA, 15 bp, Homo sapiens
ttctcccccactcac

SEQ ID NO: 1319711 - DNA, 15 bp, Homo sapiens
tttctcccccactca

SEQ ID NO: 1319712 - DNA, 15 bp, Homo sapiens
atttctcccccactc

SEQ ID NO: 1319713 - DNA, 15 bp, Homo sapiens
catttctcccccact

SEQ ID NO: 1319714 - DNA, 15 bp, Homo sapiens
tcatttctcccccac

SEQ ID NO: 1319715 - DNA, 15 bp, Homo sapiens
ctcatttctccccca

SEQ ID NO: 1319716 - DNA, 15 bp, Homo sapiens
gctcatttctccccc

SEQ ID NO: 1319717 - DNA, 15 bp, Homo sapiens
tgctcatttctcccc

SEQ ID NO: 1319718 - DNA, 15 bp, Homo sapiens
gtgctcatttctccc

SEQ ID NO: 1319719 - DNA, 15 bp, Homo sapiens
tgtgctcatttctcc

SEQ ID NO: 1319720 - DNA, 15 bp, Homo sapiens
ttgtgctcatttctc

SEQ ID NO: 1319721 - DNA, 15 bp, Homo sapiens
attgtgctcatttct

SEQ ID NO: 1319722 - DNA, 15 bp, Homo sapiens
tattgtgctcatttc

SEQ ID NO: 1319723 - DNA, 15 bp, Homo sapiens
atattgtgctcattt

SEQ ID NO: 1319724 - DNA, 15 bp, Homo sapiens
catattgtgctcatt

SEQ ID NO: 1319725 - DNA, 15 bp, Homo sapiens
ccatattgtgctcat

SEQ ID NO: 1319726 - DNA, 15 bp, Homo sapiens
cccatattgtgctca

SEQ ID NO: 1319727 - DNA, 15 bp, Homo sapiens
acccatattgtgctc

SEQ ID NO: 1319728 - DNA, 15 bp, Homo sapiens
aacccatattgtgct

SEQ ID NO: 1319729 - DNA, 15 bp, Homo sapiens
gaacccatattgtgc

SEQ ID NO: 1319730 - DNA, 15 bp, Homo sapiens
agaacccatattgtg

SEQ ID NO: 1319731 - DNA, 15 bp, Homo sapiens
cagaacccatattgt

SEQ ID NO: 1319732 - DNA, 15 bp, Homo sapiens
gcagaacccatattg

SEQ ID NO: 1319733 - DNA, 15 bp, Homo sapiens
ggcagaacccatatt

SEQ ID NO: 1319734 - DNA, 15 bp, Homo sapiens
tggcagaacccatat

SEQ ID NO: 1319735 - DNA, 15 bp, Homo sapiens
atggcagaacccata

SEQ ID NO: 1319736 - DNA, 15 bp, Homo sapiens
gatggcagaacccat

SEQ ID NO: 1319737 - DNA, 15 bp, Homo sapiens
tgatggcagaaccca

SEQ ID NO: 1319738 - DNA, 15 bp, Homo sapiens
ttgatggcagaaccc

SEQ ID NO: 1319739 - DNA, 15 bp, Homo sapiens
attgatggcagaacc

SEQ ID NO: 1319740 - DNA, 15 bp, Homo sapiens
gattgatggcagaac

SEQ ID NO: 1319741 - DNA, 15 bp, Homo sapiens
tgattgatggcagaa

SEQ ID NO: 1319742 - DNA, 15 bp, Homo sapiens
ctgattgatggcaga

SEQ ID NO: 1319743 - DNA, 15 bp, Homo sapiens
gctgattgatggcag

SEQ ID NO: 1319744 - DNA, 15 bp, Homo sapiens
agctgattgatggca

SEQ ID NO: 1319745 - DNA, 15 bp, Homo sapiens
aagctgattgatggc

SEQ ID NO: 1319746 - DNA, 15 bp, Homo sapiens
taagctgattgatgg

SEQ ID NO: 1319747 - DNA, 15 bp, Homo sapiens
ataagctgattgatg

SEQ ID NO: 1319748 - DNA, 15 bp, Homo sapiens
tataagctgattgat

SEQ ID NO: 1319749 - DNA, 15 bp, Homo sapiens
ttataagctgattga

SEQ ID NO: 1319750 - DNA, 15 bp, Homo sapiens
attataagctgattg

SEQ ID NO: 1319751 - DNA, 15 bp, Homo sapiens
tattataagctgatt

SEQ ID NO: 1319752 - DNA, 15 bp, Homo sapiens
gtattataagctgat

SEQ ID NO: 1319753 - DNA, 15 bp, Homo sapiens
tgtattataagctga

SEQ ID NO: 1319754 - DNA, 15 bp, Homo sapiens
ttgtattataagctg

SEQ ID NO: 1319755 - DNA, 15 bp, Homo sapiens
gttgtattataagct

SEQ ID NO: 1319756 - DNA, 15 bp, Homo sapiens
agttgtattataagc

SEQ ID NO: 1319757 - DNA, 15 bp, Homo sapiens
tagttgtattataag

SEQ ID NO: 1319758 - DNA, 15 bp, Homo sapiens
ttagttgtattataa

SEQ ID NO: 1319759 - DNA, 15 bp, Homo sapiens
tttagttgtattata

SEQ ID NO: 1319760 - DNA, 15 bp, Homo sapiens
ctttagttgtattat

SEQ ID NO: 1319761 - DNA, 15 bp, Homo sapiens
tctttagttgtatta

SEQ ID NO: 1319762 - DNA, 15 bp, Homo sapiens
ttctttagttgtatt

SEQ ID NO: 1319763 - DNA, 15 bp, Homo sapiens
tttctttagttgtat

SEQ ID NO: 1319764 - DNA, 15 bp, Homo sapiens
ctttctttagttgta

SEQ ID NO: 1319765 - DNA, 15 bp, Homo sapiens
tctttctttagttgt

SEQ ID NO: 1319766 - DNA, 15 bp, Homo sapiens
ttctttctttagttg

SEQ ID NO: 1319767 - DNA, 15 bp, Homo sapiens
tttctttctttagtt

SEQ ID NO: 1319768 - DNA, 15 bp, Homo sapiens
ttttctttctttagt

SEQ ID NO: 1319769 - DNA, 15 bp, Homo sapiens
gttttctttctttag

SEQ ID NO: 1319770 - DNA, 15 bp, Homo sapiens
tgttttctttcttta

SEQ ID NO: 1319771 - DNA, 15 bp, Homo sapiens
atgttttctttcttt

SEQ ID NO: 1319772 - DNA, 15 bp, Homo sapiens
catgttttctttctt

SEQ ID NO: 1319773 - DNA, 15 bp, Homo sapiens
gcatgttttctttct

SEQ ID NO: 1319774 - DNA, 15 bp, Homo sapiens
agcatgttttctttc

SEQ ID NO: 1319775 - DNA, 15 bp, Homo sapiens
gagcatgttttcttt

SEQ ID NO: 1319776 - DNA, 15 bp, Homo sapiens
ttgagcatgttttct

SEQ ID NO: 1319777 - DNA, 15 bp, Homo sapiens
tttgagcatgttttc

SEQ ID NO: 1319778 - DNA, 15 bp, Homo sapiens
ctttgagcatgtttt

SEQ ID NO: 1319779 - DNA, 15 bp, Homo sapiens
gctttgagcatgttt

SEQ ID NO: 1319780 - DNA, 15 bp, Homo sapiens
tgctttgagcatgtt

SEQ ID NO: 1319781 - DNA, 15 bp, Homo sapiens
gtgctttgagcatgt

SEQ ID NO: 1319782 - DNA, 15 bp, Homo sapiens
ggtgctttgagcatg

SEQ ID NO: 1319783 - DNA, 15 bp, Homo sapiens
tggtgctttgagcat

SEQ ID NO: 1319784 - DNA, 15 bp, Homo sapiens
atggtgctttgagca

SEQ ID NO: 1319785 - DNA, 15 bp, Homo sapiens
aatggtgctttgagc

SEQ ID NO: 1319786 - DNA, 15 bp, Homo sapiens
taatggtgctttgag

SEQ ID NO: 1319787 - DNA, 15 bp, Homo sapiens
ctaatggtgctttga

SEQ ID NO: 1319788 - DNA, 15 bp, Homo sapiens
tctaatggtgctttg

SEQ ID NO: 1319789 - DNA, 15 bp, Homo sapiens
ctctaatggtgcttt

SEQ ID NO: 1319790 - DNA, 15 bp, Homo sapiens
tctctaatggtgctt

SEQ ID NO: 1319791 - DNA, 15 bp, Homo sapiens
ttctctaatggtgct

SEQ ID NO: 1319792 - DNA, 15 bp, Homo sapiens
tttctctaatggtgc

SEQ ID NO: 1319793 - DNA, 15 bp, Homo sapiens
ctttctctaatggtg

SEQ ID NO: 1319794 - DNA, 15 bp, Homo sapiens
cctttctctaatggt

SEQ ID NO: 1319795 - DNA, 15 bp, Homo sapiens
ccctttctctaatgg

SEQ ID NO: 1319796 - DNA, 15 bp, Homo sapiens
accctttctctaatg

SEQ ID NO: 1319797 - DNA, 15 bp, Homo sapiens
caccctttctctaat

SEQ ID NO: 1319798 - DNA, 15 bp, Homo sapiens
tcaccctttctctaa

SEQ ID NO: 1319799 - DNA, 15 bp, Homo sapiens
ctcaccctttctcta

SEQ ID NO: 1319800 - DNA, 15 bp, Homo sapiens
gctcaccctttctct

SEQ ID NO: 1319801 - DNA, 15 bp, Homo sapiens
ggctcaccctttctc

SEQ ID NO: 1319802 - DNA, 15 bp, Homo sapiens
gggctcaccctttct

SEQ ID NO: 1319803 - DNA, 15 bp, Homo sapiens
agggctcaccctttc

SEQ ID NO: 1319804 - DNA, 15 bp, Homo sapiens
tagggctcacccttt

SEQ ID NO: 1319805 - DNA, 15 bp, Homo sapiens
ttagggctcaccctt

SEQ ID NO: 1319806 - DNA, 15 bp, Homo sapiens
attagggctcaccct

SEQ ID NO: 1319807 - DNA, 15 bp, Homo sapiens
cattagggctcaccc

SEQ ID NO: 1319808 - DNA, 15 bp, Homo sapiens
tcattagggctcacc

SEQ ID NO: 1319809 - DNA, 15 bp, Homo sapiens
gtcattagggctcac

SEQ ID NO: 1319810 - DNA, 15 bp, Homo sapiens
tgtcattagggctca

SEQ ID NO: 1319811 - DNA, 15 bp, Homo sapiens
atgtcattagggctc

SEQ ID NO: 1319812 - DNA, 15 bp, Homo sapiens
tatgtcattagggct

SEQ ID NO: 1319813 - DNA, 15 bp, Homo sapiens
ctatgtcattagggc

SEQ ID NO: 1319814 - DNA, 15 bp, Homo sapiens
actatgtcattaggg

SEQ ID NO: 1319815 - DNA, 15 bp, Homo sapiens
aactatgtcattagg

SEQ ID NO: 1319816 - DNA, 15 bp, Homo sapiens
aaactatgtcattag

SEQ ID NO: 1319817 - DNA, 15 bp, Homo sapiens
gaaactatgtcatta

SEQ ID NO: 1319818 - DNA, 15 bp, Homo sapiens
tgaaactatgtcatt

SEQ ID NO: 1319819 - DNA, 15 bp, Homo sapiens
gtgaaactatgtcat

SEQ ID NO: 1319820 - DNA, 15 bp, Homo sapiens
tgtgaaactatgtca

SEQ ID NO: 1319821 - DNA, 15 bp, Homo sapiens
atgtgaaactatgtc

SEQ ID NO: 1319822 - DNA, 15 bp, Homo sapiens
aatgtgaaactatgt

SEQ ID NO: 1319823 - DNA, 15 bp, Homo sapiens
gaatgtgaaactatg

SEQ ID NO: 1319824 - DNA, 15 bp, Homo sapiens
ttgaatgtgaaacta

SEQ ID NO: 1319825 - DNA, 15 bp, Homo sapiens
attgaatgtgaaact

SEQ ID NO: 1319826 - DNA, 15 bp, Homo sapiens
tattgaatgtgaaac

SEQ ID NO: 1319827 - DNA, 15 bp, Homo sapiens
atattgaatgtgaaa

SEQ ID NO: 1319828 - DNA, 15 bp, Homo sapiens
catattgaatgtgaa

SEQ ID NO: 1319829 - DNA, 15 bp, Homo sapiens
ccatattgaatgtga

SEQ ID NO: 1319830 - DNA, 15 bp, Homo sapiens
accatattgaatgtg

SEQ ID NO: 1319831 - DNA, 15 bp, Homo sapiens
taccatattgaatgt

SEQ ID NO: 1319832 - DNA, 15 bp, Homo sapiens
ctaccatattgaatg

SEQ ID NO: 1319833 - DNA, 15 bp, Homo sapiens
cctaccatattgaat

SEQ ID NO: 1319834 - DNA, 15 bp, Homo sapiens
tcctaccatattgaa

SEQ ID NO: 1319835 - DNA, 15 bp, Homo sapiens
ctcctaccatattga

SEQ ID NO: 1319836 - DNA, 15 bp, Homo sapiens
actcctaccatattg

SEQ ID NO: 1319837 - DNA, 15 bp, Homo sapiens
aactcctaccatatt

SEQ ID NO: 1319838 - DNA, 15 bp, Homo sapiens
caactcctaccatat

SEQ ID NO: 1319839 - DNA, 15 bp, Homo sapiens
tcaactcctaccata

SEQ ID NO: 1319840 - DNA, 15 bp, Homo sapiens
ttcaactcctaccat

SEQ ID NO: 1319841 - DNA, 15 bp, Homo sapiens
tttcaactcctacca

SEQ ID NO: 1319842 - DNA, 15 bp, Homo sapiens
gtttcaactcctacc

SEQ ID NO: 1319843 - DNA, 15 bp, Homo sapiens
tgtttcaactcctac

SEQ ID NO: 1319844 - DNA, 15 bp, Homo sapiens
ttgtttcaactccta

SEQ ID NO: 1319845 - DNA, 15 bp, Homo sapiens
cttgtttcaactcct

SEQ ID NO: 1319846 - DNA, 15 bp, Homo sapiens
ccttgtttcaactcc

SEQ ID NO: 1319847 - DNA, 15 bp, Homo sapiens
cccttgtttcaactc

SEQ ID NO: 1319848 - DNA, 15 bp, Homo sapiens
tcccttgtttcaact

SEQ ID NO: 1319849 - DNA, 15 bp, Homo sapiens
ctcccttgtttcaac

SEQ ID NO: 1319850 - DNA, 15 bp, Homo sapiens
tctcccttgtttcaa

SEQ ID NO: 1319851 - DNA, 15 bp, Homo sapiens
ttctcccttgtttca

SEQ ID NO: 1319852 - DNA, 15 bp, Homo sapiens
tttctcccttgtttc

SEQ ID NO: 1319853 - DNA, 15 bp, Homo sapiens
atttctcccttgttt

SEQ ID NO: 1319854 - DNA, 15 bp, Homo sapiens
catttctcccttgtt

SEQ ID NO: 1319855 - DNA, 15 bp, Homo sapiens
gcatttctcccttgt

SEQ ID NO: 1319856 - DNA, 15 bp, Homo sapiens
agcatttctcccttg

SEQ ID NO: 1319857 - DNA, 15 bp, Homo sapiens
cagcatttctccctt

SEQ ID NO: 1319858 - DNA, 15 bp, Homo sapiens
acagcatttctccct

SEQ ID NO: 1319859 - DNA, 15 bp, Homo sapiens
cacagcatttctccc

SEQ ID NO: 1319860 - DNA, 15 bp, Homo sapiens
ccacagcatttctcc

SEQ ID NO: 1319861 - DNA, 15 bp, Homo sapiens
accacagcatttctc

SEQ ID NO: 1319862 - DNA, 15 bp, Homo sapiens
aaccacagcatttct

SEQ ID NO: 1319863 - DNA, 15 bp, Homo sapiens
aaaccacagcatttc

SEQ ID NO: 1319864 - DNA, 15 bp, Homo sapiens
caaaccacagcattt

SEQ ID NO: 1319865 - DNA, 15 bp, Homo sapiens
tcaaaccacagcatt

SEQ ID NO: 1319866 - DNA, 15 bp, Homo sapiens
ttcaaaccacagcat

SEQ ID NO: 1319867 - DNA, 15 bp, Homo sapiens
cttcaaaccacagca

SEQ ID NO: 1319868 - DNA, 15 bp, Homo sapiens
acttcaaaccacagc

SEQ ID NO: 1319869 - DNA, 15 bp, Homo sapiens
cacttcaaaccacag

SEQ ID NO: 1319870 - DNA, 15 bp, Homo sapiens
ccacttcaaaccaca

SEQ ID NO: 1319871 - DNA, 15 bp, Homo sapiens
accacttcaaaccac

SEQ ID NO: 1319872 - DNA, 15 bp, Homo sapiens
aaccacttcaaacca

SEQ ID NO: 1319873 - DNA, 15 bp, Homo sapiens
gaaccacttcaaacc

SEQ ID NO: 1319874 - DNA, 15 bp, Homo sapiens
tgaaccacttcaaac

SEQ ID NO: 1319875 - DNA, 15 bp, Homo sapiens
ttgaaccacttcaaa

SEQ ID NO: 1319876 - DNA, 15 bp, Homo sapiens
gttgaaccacttcaa

SEQ ID NO: 1319877 - DNA, 15 bp, Homo sapiens
tgttgaaccacttca

SEQ ID NO: 1319878 - DNA, 15 bp, Homo sapiens
ttgttgaaccacttc

SEQ ID NO: 1319879 - DNA, 15 bp, Homo sapiens
cttgttgaaccactt

SEQ ID NO: 1319880 - DNA, 15 bp, Homo sapiens
ccttgttgaaccact

SEQ ID NO: 1319881 - DNA, 15 bp, Homo sapiens
accttgttgaaccac

SEQ ID NO: 1319882 - DNA, 15 bp, Homo sapiens
taccttgttgaacca

SEQ ID NO: 1319883 - DNA, 15 bp, Homo sapiens
ctaccttgttgaacc

SEQ ID NO: 1319884 - DNA, 15 bp, Homo sapiens
cctaccttgttgaac

SEQ ID NO: 1319885 - DNA, 15 bp, Homo sapiens
tcctaccttgttgaa

SEQ ID NO: 1319886 - DNA, 15 bp, Homo sapiens
atcctaccttgttga

SEQ ID NO: 1319887 - DNA, 15 bp, Homo sapiens
aatcctaccttgttg

SEQ ID NO: 1319888 - DNA, 15 bp, Homo sapiens
aaatcctaccttgtt

SEQ ID NO: 1319889 - DNA, 15 bp, Homo sapiens
gaaatcctaccttgt

SEQ ID NO: 1319890 - DNA, 15 bp, Homo sapiens
agaaatcctaccttg

SEQ ID NO: 1319891 - DNA, 15 bp, Homo sapiens
tagaaatcctacctt

SEQ ID NO: 1319892 - DNA, 15 bp, Homo sapiens
ctagaaatcctacct

SEQ ID NO: 1319893 - DNA, 15 bp, Homo sapiens
tctagaaatcctacc

SEQ ID NO: 1319894 - DNA, 15 bp, Homo sapiens
ctctagaaatcctac

SEQ ID NO: 1319895 - DNA, 15 bp, Homo sapiens
tctctagaaatccta

SEQ ID NO: 1319896 - DNA, 15 bp, Homo sapiens
ttctctagaaatcct

SEQ ID NO: 1319897 - DNA, 15 bp, Homo sapiens
tttctctagaaatcc

SEQ ID NO: 1319898 - DNA, 15 bp, Homo sapiens
ctttctctagaaatc

SEQ ID NO: 1319899 - DNA, 15 bp, Homo sapiens
cctttctctagaaat

SEQ ID NO: 1319900 - DNA, 15 bp, Homo sapiens
ccctttctctagaaa

SEQ ID NO: 1319901 - DNA, 15 bp, Homo sapiens
cccctttctctagaa

SEQ ID NO: 1319902 - DNA, 15 bp, Homo sapiens
ccccctttctctaga

SEQ ID NO: 1319903 - DNA, 15 bp, Homo sapiens
cccccctttctctag

SEQ ID NO: 1319904 - DNA, 15 bp, Homo sapiens
acccccctttctcta

SEQ ID NO: 1319905 - DNA, 15 bp, Homo sapiens
aacccccctttctct

SEQ ID NO: 1319906 - DNA, 15 bp, Homo sapiens
aaacccccctttctc

SEQ ID NO: 1319907 - DNA, 15 bp, Homo sapiens
taaacccccctttct

SEQ ID NO: 1319908 - DNA, 15 bp, Homo sapiens
ctaaacccccctttc

SEQ ID NO: 1319909 - DNA, 15 bp, Homo sapiens
cctaaaccccccttt

SEQ ID NO: 1319910 - DNA, 15 bp, Homo sapiens
tcctaaacccccctt

SEQ ID NO: 1319911 - DNA, 15 bp, Homo sapiens
ctcctaaacccccct

SEQ ID NO: 1319912 - DNA, 15 bp, Homo sapiens
actcctaaacccccc

SEQ ID NO: 1319913 - DNA, 15 bp, Homo sapiens
aactcctaaaccccc

SEQ ID NO: 1319914 - DNA, 15 bp, Homo sapiens
taactcctaaacccc

SEQ ID NO: 1319915 - DNA, 15 bp, Homo sapiens
ctaactcctaaaccc

SEQ ID NO: 1319916 - DNA, 15 bp, Homo sapiens
tctaactcctaaacc

SEQ ID NO: 1319917 - DNA, 15 bp, Homo sapiens
atctaactcctaaac

SEQ ID NO: 1319918 - DNA, 15 bp, Homo sapiens
tatctaactcctaaa

SEQ ID NO: 1319919 - DNA, 15 bp, Homo sapiens
ttatctaactcctaa

SEQ ID NO: 1319920 - DNA, 15 bp, Homo sapiens
cttatctaactccta

SEQ ID NO: 1319921 - DNA, 15 bp, Homo sapiens
acttatctaactcct

SEQ ID NO: 1319922 - DNA, 15 bp, Homo sapiens
tacttatctaactcc

SEQ ID NO: 1319923 - DNA, 15 bp, Homo sapiens
ctacttatctaactc

SEQ ID NO: 1319924 - DNA, 15 bp, Homo sapiens
tctacttatctaact

SEQ ID NO: 1319925 - DNA, 15 bp, Homo sapiens
ctctacttatctaac

SEQ ID NO: 1319926 - DNA, 15 bp, Homo sapiens
cctctacttatctaa

SEQ ID NO: 1319927 - DNA, 15 bp, Homo sapiens
tcctctacttatcta

SEQ ID NO: 1319928 - DNA, 15 bp, Homo sapiens
atcctctacttatct

SEQ ID NO: 1319929 - DNA, 15 bp, Homo sapiens
gatcctctacttatc

SEQ ID NO: 1319930 - DNA, 15 bp, Homo sapiens
tgatcctctacttat

SEQ ID NO: 1319931 - DNA, 15 bp, Homo sapiens
ctgatcctctactta

SEQ ID NO: 1319932 - DNA, 15 bp, Homo sapiens
gctgatcctctactt

SEQ ID NO: 1319933 - DNA, 15 bp, Homo sapiens
tgctgatcctctact

SEQ ID NO: 1319934 - DNA, 15 bp, Homo sapiens
atgctgatcctctac

SEQ ID NO: 1319935 - DNA, 15 bp, Homo sapiens
aatgctgatcctcta

SEQ ID NO: 1319936 - DNA, 15 bp, Homo sapiens
gaatgctgatcctct

SEQ ID NO: 1319937 - DNA, 15 bp, Homo sapiens
agaatgctgatcctc

SEQ ID NO: 1319938 - DNA, 15 bp, Homo sapiens
tagaatgctgatcct

SEQ ID NO: 1319939 - DNA, 15 bp, Homo sapiens
ctagaatgctgatcc

SEQ ID NO: 1319940 - DNA, 15 bp, Homo sapiens
cctagaatgctgatc

SEQ ID NO: 1319941 - DNA, 15 bp, Homo sapiens
acctagaatgctgat

SEQ ID NO: 1319942 - DNA, 15 bp, Homo sapiens
tacctagaatgctga

SEQ ID NO: 1319943 - DNA, 15 bp, Homo sapiens
atacctagaatgctg

SEQ ID NO: 1319944 - DNA, 15 bp, Homo sapiens
catacctagaatgct

SEQ ID NO: 1319945 - DNA, 15 bp, Homo sapiens
tcatacctagaatgc

SEQ ID NO: 1319946 - DNA, 15 bp, Homo sapiens
ttcatacctagaatg

SEQ ID NO: 1319947 - DNA, 15 bp, Homo sapiens
cttcatacctagaat

SEQ ID NO: 1319948 - DNA, 15 bp, Homo sapiens
ccttcatacctagaa

SEQ ID NO: 1319949 - DNA, 15 bp, Homo sapiens
gccttcatacctaga

SEQ ID NO: 1319950 - DNA, 15 bp, Homo sapiens
tgccttcatacctag

SEQ ID NO: 1319951 - DNA, 15 bp, Homo sapiens
ctgccttcataccta

SEQ ID NO: 1319952 - DNA, 15 bp, Homo sapiens
cctgccttcatacct

SEQ ID NO: 1319953 - DNA, 15 bp, Homo sapiens
tcctgccttcatacc

SEQ ID NO: 1319954 - DNA, 15 bp, Homo sapiens
atcctgccttcatac

SEQ ID NO: 1319955 - DNA, 15 bp, Homo sapiens
aatcctgccttcata

SEQ ID NO: 1319956 - DNA, 15 bp, Homo sapiens
taatcctgccttcat

SEQ ID NO: 1319957 - DNA, 15 bp, Homo sapiens
ataatcctgccttca

SEQ ID NO: 1319958 - DNA, 15 bp, Homo sapiens
gataatcctgccttc

SEQ ID NO: 1319959 - DNA, 15 bp, Homo sapiens
agataatcctgcctt

SEQ ID NO: 1319960 - DNA, 15 bp, Homo sapiens
cagataatcctgcct

SEQ ID NO: 1319961 - DNA, 15 bp, Homo sapiens
ccagataatcctgcc

SEQ ID NO: 1319962 - DNA, 15 bp, Homo sapiens
gccagataatcctgc

SEQ ID NO: 1319963 - DNA, 15 bp, Homo sapiens
tgccagataatcctg

SEQ ID NO: 1319964 - DNA, 15 bp, Homo sapiens
atgccagataatcct

SEQ ID NO: 1319965 - DNA, 15 bp, Homo sapiens
catgccagataatcc

SEQ ID NO: 1319966 - DNA, 15 bp, Homo sapiens
acatgccagataatc

SEQ ID NO: 1319967 - DNA, 15 bp, Homo sapiens
cacatgccagataat

SEQ ID NO: 1319968 - DNA, 15 bp, Homo sapiens
ccacatgccagataa

SEQ ID NO: 1319969 - DNA, 15 bp, Homo sapiens
gccacatgccagata

SEQ ID NO: 1319970 - DNA, 15 bp, Homo sapiens
tgccacatgccagat

SEQ ID NO: 1319971 - DNA, 15 bp, Homo sapiens
ctgccacatgccaga

SEQ ID NO: 1319972 - DNA, 15 bp, Homo sapiens
cctgccacatgccag

SEQ ID NO: 1319973 - DNA, 15 bp, Homo sapiens
ccctgccacatgcca

SEQ ID NO: 1319974 - DNA, 15 bp, Homo sapiens
accctgccacatgcc

SEQ ID NO: 1319975 - DNA, 15 bp, Homo sapiens
caccctgccacatgc

SEQ ID NO: 1319976 - DNA, 15 bp, Homo sapiens
tcaccctgccacatg

SEQ ID NO: 1319977 - DNA, 15 bp, Homo sapiens
ttcaccctgccacat

SEQ ID NO: 1319978 - DNA, 15 bp, Homo sapiens
attcaccctgccaca

SEQ ID NO: 1319979 - DNA, 15 bp, Homo sapiens
cattcaccctgccac

SEQ ID NO: 1319980 - DNA, 15 bp, Homo sapiens
tcattcaccctgcca

SEQ ID NO: 1319981 - DNA, 15 bp, Homo sapiens
atcattcaccctgcc

SEQ ID NO: 1319982 - DNA, 15 bp, Homo sapiens
catcattcaccctgc

SEQ ID NO: 1319983 - DNA, 15 bp, Homo sapiens
acatcattcaccctg

SEQ ID NO: 1319984 - DNA, 15 bp, Homo sapiens
aacatcattcaccct

SEQ ID NO: 1319985 - DNA, 15 bp, Homo sapiens
taacatcattcaccc

SEQ ID NO: 1319986 - DNA, 15 bp, Homo sapiens
ttaacatcattcacc

SEQ ID NO: 1319987 - DNA, 15 bp, Homo sapiens
attaacatcattcac

SEQ ID NO: 1319988 - DNA, 15 bp, Homo sapiens
gattaacatcattca

SEQ ID NO: 1319989 - DNA, 15 bp, Homo sapiens
tgattaacatcattc

SEQ ID NO: 1319990 - DNA, 15 bp, Homo sapiens
ctgattaacatcatt

SEQ ID NO: 1319991 - DNA, 15 bp, Homo sapiens
actgattaacatcat

SEQ ID NO: 1319992 - DNA, 15 bp, Homo sapiens
tactgattaacatca

SEQ ID NO: 1319993 - DNA, 15 bp, Homo sapiens
ttactgattaacatc

SEQ ID NO: 1319994 - DNA, 15 bp, Homo sapiens
gttactgattaacat

SEQ ID NO: 1319995 - DNA, 15 bp, Homo sapiens
agttactgattaaca

SEQ ID NO: 1319996 - DNA, 15 bp, Homo sapiens
cagttactgattaac

SEQ ID NO: 1319997 - DNA, 15 bp, Homo sapiens
gcagttactgattaa

SEQ ID NO: 1319998 - DNA, 15 bp, Homo sapiens
agcagttactgatta

SEQ ID NO: 1319999 - DNA, 15 bp, Homo sapiens
tagcagttactgatt

SEQ ID NO: 1320000 - DNA, 15 bp, Homo sapiens
ttagcagttactgat

SEQ ID NO: 1320001 - DNA, 15 bp, Homo sapiens
attagcagttactga

SEQ ID NO: 1320002 - DNA, 15 bp, Homo sapiens
aattagcagttactg

SEQ ID NO: 1320003 - DNA, 15 bp, Homo sapiens
caattagcagttact

SEQ ID NO: 1320004 - DNA, 15 bp, Homo sapiens
tcaattagcagttac

SEQ ID NO: 1320005 - DNA, 15 bp, Homo sapiens
atcaattagcagtta

SEQ ID NO: 1320006 - DNA, 15 bp, Homo sapiens
tatcaattagcagtt

SEQ ID NO: 1320007 - DNA, 15 bp, Homo sapiens
atatcaattagcagt

SEQ ID NO: 1320008 - DNA, 15 bp, Homo sapiens
aatatcaattagcag

SEQ ID NO: 1320009 - DNA, 15 bp, Homo sapiens
aaatatcaattagca

SEQ ID NO: 1320010 - DNA, 15 bp, Homo sapiens
taaatatcaattagc

SEQ ID NO: 1320011 - DNA, 15 bp, Homo sapiens
agtaaatatcaatta

SEQ ID NO: 1320012 - DNA, 15 bp, Homo sapiens
cagtaaatatcaatt

SEQ ID NO: 1320013 - DNA, 15 bp, Homo sapiens
tcagtaaatatcaat

SEQ ID NO: 1320014 - DNA, 15 bp, Homo sapiens
ctcagtaaatatcaa

SEQ ID NO: 1320015 - DNA, 15 bp, Homo sapiens
gctcagtaaatatca

SEQ ID NO: 1320016 - DNA, 15 bp, Homo sapiens
tgctcagtaaatatc

SEQ ID NO: 1320017 - DNA, 15 bp, Homo sapiens
ctgctcagtaaatat

SEQ ID NO: 1320018 - DNA, 15 bp, Homo sapiens
gctgctcagtaaata

SEQ ID NO: 1320019 - DNA, 15 bp, Homo sapiens
agctgctcagtaaat

SEQ ID NO: 1320020 - DNA, 15 bp, Homo sapiens
cagctgctcagtaaa

SEQ ID NO: 1320021 - DNA, 15 bp, Homo sapiens
gcagctgctcagtaa

SEQ ID NO: 1320022 - DNA, 15 bp, Homo sapiens
agcagctgctcagta

SEQ ID NO: 1320023 - DNA, 15 bp, Homo sapiens
cagcagctgctcagt

SEQ ID NO: 1320024 - DNA, 15 bp, Homo sapiens
acagcagctgctcag

SEQ ID NO: 1320025 - DNA, 15 bp, Homo sapiens
cacagcagctgctca

SEQ ID NO: 1320026 - DNA, 15 bp, Homo sapiens
acacagcagctgctc

SEQ ID NO: 1320027 - DNA, 15 bp, Homo sapiens
gacacagcagctgct

SEQ ID NO: 1320028 - DNA, 15 bp, Homo sapiens
ggacacagcagctgc

SEQ ID NO: 1320029 - DNA, 15 bp, Homo sapiens
aggacacagcagctg

SEQ ID NO: 1320030 - DNA, 15 bp, Homo sapiens
gaggacacagcagct

SEQ ID NO: 1320031 - DNA, 15 bp, Homo sapiens
tgaggacacagcagc

SEQ ID NO: 1320032 - DNA, 15 bp, Homo sapiens
gtgaggacacagcag

SEQ ID NO: 1320033 - DNA, 15 bp, Homo sapiens
cgtgaggacacagca

SEQ ID NO: 1320034 - DNA, 15 bp, Homo sapiens
tcgtgaggacacagc

SEQ ID NO: 1320035 - DNA, 15 bp, Homo sapiens
atcgtgaggacacag

SEQ ID NO: 1320036 - DNA, 15 bp, Homo sapiens
catcgtgaggacaca

SEQ ID NO: 1320037 - DNA, 15 bp, Homo sapiens
ccatcgtgaggacac

SEQ ID NO: 1320038 - DNA, 15 bp, Homo sapiens
accatcgtgaggaca

SEQ ID NO: 1320039 - DNA, 15 bp, Homo sapiens
taccatcgtgaggac

SEQ ID NO: 1320040 - DNA, 15 bp, Homo sapiens
ttaccatcgtgagga

SEQ ID NO: 1320041 - DNA, 15 bp, Homo sapiens
cttaccatcgtgagg

SEQ ID NO: 1320042 - DNA, 15 bp, Homo sapiens
tcttaccatcgtgag

SEQ ID NO: 1320043 - DNA, 15 bp, Homo sapiens
gtcttaccatcgtga

SEQ ID NO: 1320044 - DNA, 15 bp, Homo sapiens
agtcttaccatcgtg

SEQ ID NO: 1320045 - DNA, 15 bp, Homo sapiens
tagtcttaccatcgt

SEQ ID NO: 1320046 - DNA, 15 bp, Homo sapiens
atagtcttaccatcg

SEQ ID NO: 1320047 - DNA, 15 bp, Homo sapiens
aatagtcttaccatc

SEQ ID NO: 1320048 - DNA, 15 bp, Homo sapiens
taatagtcttaccat

SEQ ID NO: 1320049 - DNA, 15 bp, Homo sapiens
ctaatagtcttacca

SEQ ID NO: 1320050 - DNA, 15 bp, Homo sapiens
tctaatagtcttacc

SEQ ID NO: 1320051 - DNA, 15 bp, Homo sapiens
ctctaatagtcttac

SEQ ID NO: 1320052 - DNA, 15 bp, Homo sapiens
cctctaatagtctta

SEQ ID NO: 1320053 - DNA, 15 bp, Homo sapiens
tcctctaatagtctt

SEQ ID NO: 1320054 - DNA, 15 bp, Homo sapiens
ttcctctaatagtct

SEQ ID NO: 1320055 - DNA, 15 bp, Homo sapiens
cttcctctaatagtc

SEQ ID NO: 1320056 - DNA, 15 bp, Homo sapiens
tcttcctctaatagt

SEQ ID NO: 1320057 - DNA, 15 bp, Homo sapiens
gtcttcctctaatag

SEQ ID NO: 1320058 - DNA, 15 bp, Homo sapiens
tgtcttcctctaata

SEQ ID NO: 1320059 - DNA, 15 bp, Homo sapiens
ctgtcttcctctaat

SEQ ID NO: 1320060 - DNA, 15 bp, Homo sapiens
gctgtcttcctctaa

SEQ ID NO: 1320061 - DNA, 15 bp, Homo sapiens
ggctgtcttcctcta

SEQ ID NO: 1320062 - DNA, 15 bp, Homo sapiens
gggctgtcttcctct

SEQ ID NO: 1320063 - DNA, 15 bp, Homo sapiens
tgggctgtcttcctc

SEQ ID NO: 1320064 - DNA, 15 bp, Homo sapiens
gtgggctgtcttcct

SEQ ID NO: 1320065 - DNA, 15 bp, Homo sapiens
ggtgggctgtcttcc

SEQ ID NO: 1320066 - DNA, 15 bp, Homo sapiens
aggtgggctgtcttc

SEQ ID NO: 1320067 - DNA, 15 bp, Homo sapiens
caggtgggctgtctt

SEQ ID NO: 1320068 - DNA, 15 bp, Homo sapiens
ggcaggtgggctgtc

SEQ ID NO: 1320069 - DNA, 15 bp, Homo sapiens
taggcaggtgggctg

SEQ ID NO: 1320070 - DNA, 15 bp, Homo sapiens
ttaggcaggtgggct

SEQ ID NO: 1320071 - DNA, 15 bp, Homo sapiens
gttaggcaggtgggc

SEQ ID NO: 1320072 - DNA, 15 bp, Homo sapiens
agttaggcaggtggg

SEQ ID NO: 1320073 - DNA, 15 bp, Homo sapiens
cagttaggcaggtgg

SEQ ID NO: 1320074 - DNA, 15 bp, Homo sapiens
ccagttaggcaggtg

SEQ ID NO: 1320075 - DNA, 15 bp, Homo sapiens
cccagttaggcaggt

SEQ ID NO: 1320076 - DNA, 15 bp, Homo sapiens
tcccagttaggcagg

SEQ ID NO: 1320077 - DNA, 15 bp, Homo sapiens
ttcccagttaggcag

SEQ ID NO: 1320078 - DNA, 15 bp, Homo sapiens
gttcccagttaggca

SEQ ID NO: 1320079 - DNA, 15 bp, Homo sapiens
tgttcccagttaggc

SEQ ID NO: 1320080 - DNA, 15 bp, Homo sapiens
gtgttcccagttagg

SEQ ID NO: 1320081 - DNA, 15 bp, Homo sapiens
tgtgttcccagttag

SEQ ID NO: 1320082 - DNA, 15 bp, Homo sapiens
ttgtgttcccagtta

SEQ ID NO: 1320083 - DNA, 15 bp, Homo sapiens
cttgtgttcccagtt

SEQ ID NO: 1320084 - DNA, 15 bp, Homo sapiens
ccttgtgttcccagt

SEQ ID NO: 1320085 - DNA, 15 bp, Homo sapiens
gccttgtgttcccag

SEQ ID NO: 1320086 - DNA, 15 bp, Homo sapiens
tgccttgtgttccca

SEQ ID NO: 1320087 - DNA, 15 bp, Homo sapiens
gtgccttgtgttccc

SEQ ID NO: 1320088 - DNA, 15 bp, Homo sapiens
tgtgccttgtgttcc

SEQ ID NO: 1320089 - DNA, 15 bp, Homo sapiens
gtgtgccttgtgttc

SEQ ID NO: 1320090 - DNA, 15 bp, Homo sapiens
tgtgtgccttgtgtt

SEQ ID NO: 1320091 - DNA, 15 bp, Homo sapiens
atgtgtgccttgtgt

SEQ ID NO: 1320092 - DNA, 15 bp, Homo sapiens
tatgtgtgccttgtg

SEQ ID NO: 1320093 - DNA, 15 bp, Homo sapiens
atatgtgtgccttgt

SEQ ID NO: 1320094 - DNA, 15 bp, Homo sapiens
tatatgtgtgccttg

SEQ ID NO: 1320095 - DNA, 15 bp, Homo sapiens
atatatgtgtgcctt

SEQ ID NO: 1320096 - DNA, 15 bp, Homo sapiens
aatatatgtgtgcct

SEQ ID NO: 1320097 - DNA, 15 bp, Homo sapiens
caatatatgtgtgcc

SEQ ID NO: 1320098 - DNA, 15 bp, Homo sapiens
ccaatatatgtgtgc

SEQ ID NO: 1320099 - DNA, 15 bp, Homo sapiens
tccaatatatgtgtg

SEQ ID NO: 1320100 - DNA, 15 bp, Homo sapiens
ttccaatatatgtgt

SEQ ID NO: 1320101 - DNA, 15 bp, Homo sapiens
tttccaatatatgtg

SEQ ID NO: 1320102 - DNA, 15 bp, Homo sapiens
ctttccaatatatgt

SEQ ID NO: 1320103 - DNA, 15 bp, Homo sapiens
tctttccaatatatg

SEQ ID NO: 1320104 - DNA, 15 bp, Homo sapiens
atctttccaatatat

SEQ ID NO: 1320105 - DNA, 15 bp, Homo sapiens
gatctttccaatata

SEQ ID NO: 1320106 - DNA, 15 bp, Homo sapiens
tgatctttccaatat

SEQ ID NO: 1320107 - DNA, 15 bp, Homo sapiens
atgatctttccaata

SEQ ID NO: 1320108 - DNA, 15 bp, Homo sapiens
catgatctttccaat

SEQ ID NO: 1320109 - DNA, 15 bp, Homo sapiens
acatgatctttccaa

SEQ ID NO: 1320110 - DNA, 15 bp, Homo sapiens
aacatgatctttcca

SEQ ID NO: 1320111 - DNA, 15 bp, Homo sapiens
caacatgatctttcc

SEQ ID NO: 1320112 - DNA, 15 bp, Homo sapiens
gcaacatgatctttc

SEQ ID NO: 1320113 - DNA, 15 bp, Homo sapiens
tgcaacatgatcttt

SEQ ID NO: 1320114 - DNA, 15 bp, Homo sapiens
gtgcaacatgatctt

SEQ ID NO: 1320115 - DNA, 15 bp, Homo sapiens
tgtgcaacatgatct

SEQ ID NO: 1320116 - DNA, 15 bp, Homo sapiens
ttgtgcaacatgatc

SEQ ID NO: 1320117 - DNA, 15 bp, Homo sapiens
tttgtgcaacatgat

SEQ ID NO: 1320118 - DNA, 15 bp, Homo sapiens
ttttgtgcaacatga

SEQ ID NO: 1320119 - DNA, 15 bp, Homo sapiens
gttttgtgcaacatg

SEQ ID NO: 1320120 - DNA, 15 bp, Homo sapiens
tgttttgtgcaacat

SEQ ID NO: 1320121 - DNA, 15 bp, Homo sapiens
ctgttttgtgcaaca

SEQ ID NO: 1320122 - DNA, 15 bp, Homo sapiens
cctgttttgtgcaac

SEQ ID NO: 1320123 - DNA, 15 bp, Homo sapiens
acctgttttgtgcaa

SEQ ID NO: 1320124 - DNA, 15 bp, Homo sapiens
cacctgttttgtgca

SEQ ID NO: 1320125 - DNA, 15 bp, Homo sapiens
acacctgttttgtgc

SEQ ID NO: 1320126 - DNA, 15 bp, Homo sapiens
aacacctgttttgtg

SEQ ID NO: 1320127 - DNA, 15 bp, Homo sapiens
gaacacctgttttgt

SEQ ID NO: 1320128 - DNA, 15 bp, Homo sapiens
tgaacacctgttttg

SEQ ID NO: 1320129 - DNA, 15 bp, Homo sapiens
ttgaacacctgtttt

SEQ ID NO: 1320130 - DNA, 15 bp, Homo sapiens
attgaacacctgttt

SEQ ID NO: 1320131 - DNA, 15 bp, Homo sapiens
aaattatttattgaa

SEQ ID NO: 1320132 - DNA, 15 bp, Homo sapiens
aaaattatttattga

SEQ ID NO: 1320133 - DNA, 15 bp, Homo sapiens
aaaaattatttattg

SEQ ID NO: 1320134 - DNA, 15 bp, Homo sapiens
caaaaattatttatt

SEQ ID NO: 1320135 - DNA, 15 bp, Homo sapiens
tcaaaaattatttat

SEQ ID NO: 1320136 - DNA, 15 bp, Homo sapiens
ttcaaaaattattta

SEQ ID NO: 1320137 - DNA, 15 bp, Homo sapiens
attcaaaaattattt

SEQ ID NO: 1320138 - DNA, 15 bp, Homo sapiens
tattcaaaaattatt

SEQ ID NO: 1320139 - DNA, 15 bp, Homo sapiens
ttattcaaaaattat

SEQ ID NO: 1320140 - DNA, 15 bp, Homo sapiens
tttattcaaaaatta

SEQ ID NO: 1320141 - DNA, 15 bp, Homo sapiens
atttattcaaaaatt

SEQ ID NO: 1320142 - DNA, 15 bp, Homo sapiens
catttattcaaaaat

SEQ ID NO: 1320143 - DNA, 15 bp, Homo sapiens
acatttattcaaaaa

SEQ ID NO: 1320144 - DNA, 15 bp, Homo sapiens
cacatttattcaaaa

SEQ ID NO: 1320145 - DNA, 15 bp, Homo sapiens
tcacatttattcaaa

SEQ ID NO: 1320146 - DNA, 15 bp, Homo sapiens
ttcacatttattcaa

SEQ ID NO: 1320147 - DNA, 15 bp, Homo sapiens
gttcacatttattca

SEQ ID NO: 1320148 - DNA, 15 bp, Homo sapiens
tgttcacatttattc

SEQ ID NO: 1320149 - DNA, 15 bp, Homo sapiens
gtgttcacatttatt

SEQ ID NO: 1320150 - DNA, 15 bp, Homo sapiens
agtgttcacatttat

SEQ ID NO: 1320151 - DNA, 15 bp, Homo sapiens
cagtgttcacattta

SEQ ID NO: 1320152 - DNA, 15 bp, Homo sapiens
tcagtgttcacattt

SEQ ID NO: 1320153 - DNA, 15 bp, Homo sapiens
ttcagtgttcacatt

SEQ ID NO: 1320154 - DNA, 15 bp, Homo sapiens
attcagtgttcacat

SEQ ID NO: 1320155 - DNA, 15 bp, Homo sapiens
tattcagtgttcaca

SEQ ID NO: 1320156 - DNA, 15 bp, Homo sapiens
ctattcagtgttcac

SEQ ID NO: 1320157 - DNA, 15 bp, Homo sapiens
gctattcagtgttca

SEQ ID NO: 1320158 - DNA, 15 bp, Homo sapiens
tgctattcagtgttc

SEQ ID NO: 1320159 - DNA, 15 bp, Homo sapiens
ttgctattcagtgtt

SEQ ID NO: 1320160 - DNA, 15 bp, Homo sapiens
tttgctattcagtgt

SEQ ID NO: 1320161 - DNA, 15 bp, Homo sapiens
atttgctattcagtg

SEQ ID NO: 1320162 - DNA, 15 bp, Homo sapiens
tatttgctattcagt

SEQ ID NO: 1320163 - DNA, 15 bp, Homo sapiens
ttatttgctattcag

SEQ ID NO: 1320164 - DNA, 15 bp, Homo sapiens
tttatttgctattca

SEQ ID NO: 1320165 - DNA, 15 bp, Homo sapiens
atttatttgctattc

SEQ ID NO: 1320166 - DNA, 15 bp, Homo sapiens
catttatttgctatt

SEQ ID NO: 1320167 - DNA, 15 bp, Homo sapiens
acatttatttgctat

SEQ ID NO: 1320168 - DNA, 15 bp, Homo sapiens
aacatttatttgcta

SEQ ID NO: 1320169 - DNA, 15 bp, Homo sapiens
taacatttatttgct

SEQ ID NO: 1320170 - DNA, 15 bp, Homo sapiens
ataacatttatttgc

SEQ ID NO: 1320171 - DNA, 15 bp, Homo sapiens
tataacatttatttg

SEQ ID NO: 1320172 - DNA, 15 bp, Homo sapiens
ctataacatttattt

SEQ ID NO: 1320173 - DNA, 15 bp, Homo sapiens
tctataacatttatt

SEQ ID NO: 1320174 - DNA, 15 bp, Homo sapiens
atctataacatttat

SEQ ID NO: 1320175 - DNA, 15 bp, Homo sapiens
gatctataacattta

SEQ ID NO: 1320176 - DNA, 15 bp, Homo sapiens
cgatctataacattt

SEQ ID NO: 1320177 - DNA, 15 bp, Homo sapiens
acgatctataacatt

SEQ ID NO: 1320178 - DNA, 15 bp, Homo sapiens
tacgatctataacat

SEQ ID NO: 1320179 - DNA, 15 bp, Homo sapiens
ttacgatctataaca

SEQ ID NO: 1320180 - DNA, 15 bp, Homo sapiens
attacgatctataac

SEQ ID NO: 1320181 - DNA, 15 bp, Homo sapiens
tattacgatctataa

SEQ ID NO: 1320182 - DNA, 15 bp, Homo sapiens
ctattacgatctata

SEQ ID NO: 1320183 - DNA, 15 bp, Homo sapiens
actattacgatctat

SEQ ID NO: 1320184 - DNA, 15 bp, Homo sapiens
aactattacgatcta

SEQ ID NO: 1320185 - DNA, 15 bp, Homo sapiens
caactattacgatct

SEQ ID NO: 1320186 - DNA, 15 bp, Homo sapiens
acaactattacgatc

SEQ ID NO: 1320187 - DNA, 15 bp, Homo sapiens
tacaactattacgat

SEQ ID NO: 1320188 - DNA, 15 bp, Homo sapiens
ctacaactattacga

SEQ ID NO: 1320189 - DNA, 15 bp, Homo sapiens
tctacaactattacg

SEQ ID NO: 1320190 - DNA, 15 bp, Homo sapiens
ttctacaactattac

SEQ ID NO: 1320191 - DNA, 15 bp, Homo sapiens
cttctacaactatta

SEQ ID NO: 1320192 - DNA, 15 bp, Homo sapiens
tcttctacaactatt

SEQ ID NO: 1320193 - DNA, 15 bp, Homo sapiens
atcttctacaactat

SEQ ID NO: 1320194 - DNA, 15 bp, Homo sapiens
aatcttctacaacta

SEQ ID NO: 1320195 - DNA, 15 bp, Homo sapiens
caatcttctacaact

SEQ ID NO: 1320196 - DNA, 15 bp, Homo sapiens
ccaatcttctacaac

SEQ ID NO: 1320197 - DNA, 15 bp, Homo sapiens
accaatcttctacaa

SEQ ID NO: 1320198 - DNA, 15 bp, Homo sapiens
aaccaatcttctaca

SEQ ID NO: 1320199 - DNA, 15 bp, Homo sapiens
caaccaatcttctac

SEQ ID NO: 1320200 - DNA, 15 bp, Homo sapiens
ccaaccaatcttcta

SEQ ID NO: 1320201 - DNA, 15 bp, Homo sapiens
cccaaccaatcttct

SEQ ID NO: 1320202 - DNA, 15 bp, Homo sapiens
tcccaaccaatcttc

SEQ ID NO: 1320203 - DNA, 15 bp, Homo sapiens
atcccaaccaatctt

SEQ ID NO: 1320204 - DNA, 15 bp, Homo sapiens
aatcccaaccaatct

SEQ ID NO: 1320205 - DNA, 15 bp, Homo sapiens
caatcccaaccaatc

SEQ ID NO: 1320206 - DNA, 15 bp, Homo sapiens
acaatcccaaccaat

SEQ ID NO: 1320207 - DNA, 15 bp, Homo sapiens
tacaatcccaaccaa

SEQ ID NO: 1320208 - DNA, 15 bp, Homo sapiens
ctacaatcccaacca

SEQ ID NO: 1320209 - DNA, 15 bp, Homo sapiens
cctacaatcccaacc

SEQ ID NO: 1320210 - DNA, 15 bp, Homo sapiens
ccctacaatcccaac

SEQ ID NO: 1320211 - DNA, 15 bp, Homo sapiens
tccctacaatcccaa

SEQ ID NO: 1320212 - DNA, 15 bp, Homo sapiens
gtccctacaatccca

SEQ ID NO: 1320213 - DNA, 15 bp, Homo sapiens
agtccctacaatccc

SEQ ID NO: 1320214 - DNA, 15 bp, Homo sapiens
cagtccctacaatcc

SEQ ID NO: 1320215 - DNA, 15 bp, Homo sapiens
ccagtccctacaatc

SEQ ID NO: 1320216 - DNA, 15 bp, Homo sapiens
tccagtccctacaat

SEQ ID NO: 1320217 - DNA, 15 bp, Homo sapiens
atccagtccctacaa

SEQ ID NO: 1320218 - DNA, 15 bp, Homo sapiens
catccagtccctaca

SEQ ID NO: 1320219 - DNA, 15 bp, Homo sapiens
acatccagtccctac

SEQ ID NO: 1320220 - DNA, 15 bp, Homo sapiens
cacatccagtcccta

SEQ ID NO: 1320221 - DNA, 15 bp, Homo sapiens
ccacatccagtccct

SEQ ID NO: 1320222 - DNA, 15 bp, Homo sapiens
cccacatccagtccc

SEQ ID NO: 1320223 - DNA, 15 bp, Homo sapiens
ccccacatccagtcc

SEQ ID NO: 1320224 - DNA, 15 bp, Homo sapiens
gccccacatccagtc

SEQ ID NO: 1320225 - DNA, 15 bp, Homo sapiens
tgccccacatccagt

SEQ ID NO: 1320226 - DNA, 15 bp, Homo sapiens
ttgccccacatccag

SEQ ID NO: 1320227 - DNA, 15 bp, Homo sapiens
attgccccacatcca

SEQ ID NO: 1320228 - DNA, 15 bp, Homo sapiens
cattgccccacatcc

SEQ ID NO: 1320229 - DNA, 15 bp, Homo sapiens
ccattgccccacatc

SEQ ID NO: 1320230 - DNA, 15 bp, Homo sapiens
gccattgccccacat

SEQ ID NO: 1320231 - DNA, 15 bp, Homo sapiens
agccattgccccaca

SEQ ID NO: 1320232 - DNA, 15 bp, Homo sapiens
cagccattgccccac

SEQ ID NO: 1320233 - DNA, 15 bp, Homo sapiens
acagccattgcccca

SEQ ID NO: 1320234 - DNA, 15 bp, Homo sapiens
cacagccattgcccc

SEQ ID NO: 1320235 - DNA, 15 bp, Homo sapiens
ccacagccattgccc

SEQ ID NO: 1320236 - DNA, 15 bp, Homo sapiens
cccacagccattgcc

SEQ ID NO: 1320237 - DNA, 15 bp, Homo sapiens
acccacagccattgc

SEQ ID NO: 1320238 - DNA, 15 bp, Homo sapiens
gacccacagccattg

SEQ ID NO: 1320239 - DNA, 15 bp, Homo sapiens
agacccacagccatt

SEQ ID NO: 1320240 - DNA, 15 bp, Homo sapiens
tagacccacagccat

SEQ ID NO: 1320241 - DNA, 15 bp, Homo sapiens
ctagacccacagcca

SEQ ID NO: 1320242 - DNA, 15 bp, Homo sapiens
tctagacccacagcc

SEQ ID NO: 1320243 - DNA, 15 bp, Homo sapiens
ctctagacccacagc

SEQ ID NO: 1320244 - DNA, 15 bp, Homo sapiens
actctagacccacag

SEQ ID NO: 1320245 - DNA, 15 bp, Homo sapiens
tactctagacccaca

SEQ ID NO: 1320246 - DNA, 15 bp, Homo sapiens
atactctagacccac

SEQ ID NO: 1320247 - DNA, 15 bp, Homo sapiens
tatactctagaccca

SEQ ID NO: 1320248 - DNA, 15 bp, Homo sapiens
atatactctagaccc

SEQ ID NO: 1320249 - DNA, 15 bp, Homo sapiens
aatatactctagacc

SEQ ID NO: 1320250 - DNA, 15 bp, Homo sapiens
gaatatactctagac

SEQ ID NO: 1320251 - DNA, 15 bp, Homo sapiens
tgaatatactctaga

SEQ ID NO: 1320252 - DNA, 15 bp, Homo sapiens
atgaatatactctag

SEQ ID NO: 1320253 - DNA, 15 bp, Homo sapiens
aatgaatatactcta

SEQ ID NO: 1320254 - DNA, 15 bp, Homo sapiens
caatgaatatactct

SEQ ID NO: 1320255 - DNA, 15 bp, Homo sapiens
acaatgaatatactc

SEQ ID NO: 1320256 - DNA, 15 bp, Homo sapiens
cacaatgaatatact

SEQ ID NO: 1320257 - DNA, 15 bp, Homo sapiens
gcacaatgaatatac

SEQ ID NO: 1320258 - DNA, 15 bp, Homo sapiens
actgcacaatgaata

SEQ ID NO: 1320259 - DNA, 15 bp, Homo sapiens
cactgcacaatgaat

SEQ ID NO: 1320260 - DNA, 15 bp, Homo sapiens
ccactgcacaatgaa

SEQ ID NO: 1320261 - DNA, 15 bp, Homo sapiens
tccactgcacaatga

SEQ ID NO: 1320262 - DNA, 15 bp, Homo sapiens
gtccactgcacaatg

SEQ ID NO: 1320263 - DNA, 15 bp, Homo sapiens
tgtccactgcacaat

SEQ ID NO: 1320264 - DNA, 15 bp, Homo sapiens
gtgtccactgcacaa

SEQ ID NO: 1320265 - DNA, 15 bp, Homo sapiens
tgtgtccactgcaca

SEQ ID NO: 1320266 - DNA, 15 bp, Homo sapiens
gtgtgtccactgcac

SEQ ID NO: 1320267 - DNA, 15 bp, Homo sapiens
tgtgtgtccactgca

SEQ ID NO: 1320268 - DNA, 15 bp, Homo sapiens
gtgtgtgtccactgc

SEQ ID NO: 1320269 - DNA, 15 bp, Homo sapiens
ggtgtgtgtccactg

SEQ ID NO: 1320270 - DNA, 15 bp, Homo sapiens
aggtgtgtgtccact

SEQ ID NO: 1320271 - DNA, 15 bp, Homo sapiens
taggtgtgtgtccac

SEQ ID NO: 1320272 - DNA, 15 bp, Homo sapiens
ttaggtgtgtgtcca

SEQ ID NO: 1320273 - DNA, 15 bp, Homo sapiens
attaggtgtgtgtcc

SEQ ID NO: 1320274 - DNA, 15 bp, Homo sapiens
gattaggtgtgtgtc

SEQ ID NO: 1320275 - DNA, 15 bp, Homo sapiens
agattaggtgtgtgt

SEQ ID NO: 1320276 - DNA, 15 bp, Homo sapiens
cagattaggtgtgtg

SEQ ID NO: 1320277 - DNA, 15 bp, Homo sapiens
acagattaggtgtgt

SEQ ID NO: 1320278 - DNA, 15 bp, Homo sapiens
gacagattaggtgtg

SEQ ID NO: 1320279 - DNA, 15 bp, Homo sapiens
ggacagattaggtgt

SEQ ID NO: 1320280 - DNA, 15 bp, Homo sapiens
aggacagattaggtg

SEQ ID NO: 1320281 - DNA, 15 bp, Homo sapiens
gaggacagattaggt

SEQ ID NO: 1320282 - DNA, 15 bp, Homo sapiens
tgaggacagattagg

SEQ ID NO: 1320283 - DNA, 15 bp, Homo sapiens
ttgaggacagattag

SEQ ID NO: 1320284 - DNA, 15 bp, Homo sapiens
cttgaggacagatta

SEQ ID NO: 1320285 - DNA, 15 bp, Homo sapiens
ccttgaggacagatt

SEQ ID NO: 1320286 - DNA, 15 bp, Homo sapiens
tccttgaggacagat

SEQ ID NO: 1320287 - DNA, 15 bp, Homo sapiens
gtccttgaggacaga

SEQ ID NO: 1320288 - DNA, 15 bp, Homo sapiens
tgtccttgaggacag

SEQ ID NO: 1320289 - DNA, 15 bp, Homo sapiens
ctgtccttgaggaca

SEQ ID NO: 1320290 - DNA, 15 bp, Homo sapiens
tctgtccttgaggac

SEQ ID NO: 1320291 - DNA, 15 bp, Homo sapiens
ttctgtccttgagga

SEQ ID NO: 1320292 - DNA, 15 bp, Homo sapiens
gttctgtccttgagg

SEQ ID NO: 1320293 - DNA, 15 bp, Homo sapiens
ggttctgtccttgag

SEQ ID NO: 1320294 - DNA, 15 bp, Homo sapiens
tggttctgtccttga

SEQ ID NO: 1320295 - DNA, 15 bp, Homo sapiens
atggttctgtccttg

SEQ ID NO: 1320296 - DNA, 15 bp, Homo sapiens
catggttctgtcctt

SEQ ID NO: 1320297 - DNA, 15 bp, Homo sapiens
acatggttctgtcct

SEQ ID NO: 1320298 - DNA, 15 bp, Homo sapiens
cacatggttctgtcc

SEQ ID NO: 1320299 - DNA, 15 bp, Homo sapiens
ccacatggttctgtc

SEQ ID NO: 1320300 - DNA, 15 bp, Homo sapiens
tccacatggttctgt

SEQ ID NO: 1320301 - DNA, 15 bp, Homo sapiens
ctccacatggttctg

SEQ ID NO: 1320302 - DNA, 15 bp, Homo sapiens
cctccacatggttct

SEQ ID NO: 1320303 - DNA, 15 bp, Homo sapiens
tcctccacatggttc

SEQ ID NO: 1320304 - DNA, 15 bp, Homo sapiens
ttcctccacatggtt

SEQ ID NO: 1320305 - DNA, 15 bp, Homo sapiens
attcctccacatggt

SEQ ID NO: 1320306 - DNA, 15 bp, Homo sapiens
tattcctccacatgg

SEQ ID NO: 1320307 - DNA, 15 bp, Homo sapiens
ctattcctccacatg

SEQ ID NO: 1320308 - DNA, 15 bp, Homo sapiens
cctattcctccacat

SEQ ID NO: 1320309 - DNA, 15 bp, Homo sapiens
tcctattcctccaca

SEQ ID NO: 1320310 - DNA, 15 bp, Homo sapiens
ttcctattcctccac

SEQ ID NO: 1320311 - DNA, 15 bp, Homo sapiens
tttcctattcctcca

SEQ ID NO: 1320312 - DNA, 15 bp, Homo sapiens
ttttcctattcctcc

SEQ ID NO: 1320313 - DNA, 15 bp, Homo sapiens
gttttcctattcctc

SEQ ID NO: 1320314 - DNA, 15 bp, Homo sapiens
tgttttcctattcct

SEQ ID NO: 1320315 - DNA, 15 bp, Homo sapiens
ttgttttcctattcc

SEQ ID NO: 1320316 - DNA, 15 bp, Homo sapiens
cttgttttcctattc

SEQ ID NO: 1320317 - DNA, 15 bp, Homo sapiens
tcttgttttcctatt

SEQ ID NO: 1320318 - DNA, 15 bp, Homo sapiens
ctcttgttttcctat

SEQ ID NO: 1320319 - DNA, 15 bp, Homo sapiens
tctcttgttttccta

SEQ ID NO: 1320320 - DNA, 15 bp, Homo sapiens
ttctcttgttttcct

SEQ ID NO: 1320321 - DNA, 15 bp, Homo sapiens
cttctcttgttttcc

SEQ ID NO: 1320322 - DNA, 15 bp, Homo sapiens
gcttctcttgttttc

SEQ ID NO: 1320323 - DNA, 15 bp, Homo sapiens
tgcttctcttgtttt

SEQ ID NO: 1320324 - DNA, 15 bp, Homo sapiens
ctgcttctcttgttt

SEQ ID NO: 1320325 - DNA, 15 bp, Homo sapiens
cctgcttctcttgtt

SEQ ID NO: 1320326 - DNA, 15 bp, Homo sapiens
gcctgcttctcttgt

SEQ ID NO: 1320327 - DNA, 15 bp, Homo sapiens
tgcctgcttctcttg

SEQ ID NO: 1320328 - DNA, 15 bp, Homo sapiens
ttgcctgcttctctt

SEQ ID NO: 1320329 - DNA, 15 bp, Homo sapiens
cttgcctgcttctct

SEQ ID NO: 1320330 - DNA, 15 bp, Homo sapiens
tcttgcctgcttctc

SEQ ID NO: 1320331 - DNA, 15 bp, Homo sapiens
ttcttgcctgcttct

SEQ ID NO: 1320332 - DNA, 15 bp, Homo sapiens
cttcttgcctgcttc

SEQ ID NO: 1320333 - DNA, 15 bp, Homo sapiens
gcttcttgcctgctt

SEQ ID NO: 1320334 - DNA, 15 bp, Homo sapiens
cgcttcttgcctgct

SEQ ID NO: 1320335 - DNA, 15 bp, Homo sapiens
ccgcttcttgcctgc

SEQ ID NO: 1320336 - DNA, 15 bp, Homo sapiens
tccgcttcttgcctg

SEQ ID NO: 1320337 - DNA, 15 bp, Homo sapiens
ctccgcttcttgcct

SEQ ID NO: 1320338 - DNA, 15 bp, Homo sapiens
cctccgcttcttgcc

SEQ ID NO: 1320339 - DNA, 15 bp, Homo sapiens
gcctccgcttcttgc

SEQ ID NO: 1320340 - DNA, 15 bp, Homo sapiens
tgcctccgcttcttg

SEQ ID NO: 1320341 - DNA, 15 bp, Homo sapiens
ctgcctccgcttctt

SEQ ID NO: 1320342 - DNA, 15 bp, Homo sapiens
actgcctccgcttct

SEQ ID NO: 1320343 - DNA, 15 bp, Homo sapiens
cactgcctccgcttc

SEQ ID NO: 1320344 - DNA, 15 bp, Homo sapiens
tcactgcctccgctt

SEQ ID NO: 1320345 - DNA, 15 bp, Homo sapiens
ctcactgcctccgct

SEQ ID NO: 1320346 - DNA, 15 bp, Homo sapiens
actcactgcctccgc

SEQ ID NO: 1320347 - DNA, 15 bp, Homo sapiens
tactcactgcctccg

SEQ ID NO: 1320348 - DNA, 15 bp, Homo sapiens
gtactcactgcctcc

SEQ ID NO: 1320349 - DNA, 15 bp, Homo sapiens
tgtactcactgcctc

SEQ ID NO: 1320350 - DNA, 15 bp, Homo sapiens
ctgtactcactgcct

SEQ ID NO: 1320351 - DNA, 15 bp, Homo sapiens
gctgtactcactgcc

SEQ ID NO: 1320352 - DNA, 15 bp, Homo sapiens
tgctgtactcactgc

SEQ ID NO: 1320353 - DNA, 15 bp, Homo sapiens
ctgctgtactcactg

SEQ ID NO: 1320354 - DNA, 15 bp, Homo sapiens
gctgctgtactcact

SEQ ID NO: 1320355 - DNA, 15 bp, Homo sapiens
agctgctgtactcac

SEQ ID NO: 1320356 - DNA, 15 bp, Homo sapiens
tagctgctgtactca

SEQ ID NO: 1320357 - DNA, 15 bp, Homo sapiens
ttagctgctgtactc

SEQ ID NO: 1320358 - DNA, 15 bp, Homo sapiens
cttagctgctgtact

SEQ ID NO: 1320359 - DNA, 15 bp, Homo sapiens
tcttagctgctgtac

SEQ ID NO: 1320360 - DNA, 15 bp, Homo sapiens
ttcttagctgctgta

SEQ ID NO: 1320361 - DNA, 15 bp, Homo sapiens
tttcttagctgctgt

SEQ ID NO: 1320362 - DNA, 15 bp, Homo sapiens
atttcttagctgctg

SEQ ID NO: 1320363 - DNA, 15 bp, Homo sapiens
catttcttagctgct

SEQ ID NO: 1320364 - DNA, 15 bp, Homo sapiens
acatttcttagctgc

SEQ ID NO: 1320365 - DNA, 15 bp, Homo sapiens
aacatttcttagctg

SEQ ID NO: 1320366 - DNA, 15 bp, Homo sapiens
taacatttcttagct

SEQ ID NO: 1320367 - DNA, 15 bp, Homo sapiens
gtaacatttcttagc

SEQ ID NO: 1320368 - DNA, 15 bp, Homo sapiens
tgtaacatttcttag

SEQ ID NO: 1320369 - DNA, 15 bp, Homo sapiens
atgtaacatttctta

SEQ ID NO: 1320370 - DNA, 15 bp, Homo sapiens
aatgtaacatttctt

SEQ ID NO: 1320371 - DNA, 15 bp, Homo sapiens
caatgtaacatttct

SEQ ID NO: 1320372 - DNA, 15 bp, Homo sapiens
ccaatgtaacatttc

SEQ ID NO: 1320373 - DNA, 15 bp, Homo sapiens
cccaatgtaacattt

SEQ ID NO: 1320374 - DNA, 15 bp, Homo sapiens
acccaatgtaacatt

SEQ ID NO: 1320375 - DNA, 15 bp, Homo sapiens
aacccaatgtaacat

SEQ ID NO: 1320376 - DNA, 15 bp, Homo sapiens
gaacccaatgtaaca

SEQ ID NO: 1320377 - DNA, 15 bp, Homo sapiens
tgaacccaatgtaac

SEQ ID NO: 1320378 - DNA, 15 bp, Homo sapiens
atgaacccaatgtaa

SEQ ID NO: 1320379 - DNA, 15 bp, Homo sapiens
gatgaacccaatgta

SEQ ID NO: 1320380 - DNA, 15 bp, Homo sapiens
ggatgaacccaatgt

SEQ ID NO: 1320381 - DNA, 15 bp, Homo sapiens
tggatgaacccaatg

SEQ ID NO: 1320382 - DNA, 15 bp, Homo sapiens
ctggatgaacccaat

SEQ ID NO: 1320383 - DNA, 15 bp, Homo sapiens
tctggatgaacccaa

SEQ ID NO: 1320384 - DNA, 15 bp, Homo sapiens
ctctggatgaaccca

SEQ ID NO: 1320385 - DNA, 15 bp, Homo sapiens
gctctggatgaaccc

SEQ ID NO: 1320386 - DNA, 15 bp, Homo sapiens
tgctctggatgaacc

SEQ ID NO: 1320387 - DNA, 15 bp, Homo sapiens
ttgctctggatgaac

SEQ ID NO: 1320388 - DNA, 15 bp, Homo sapiens
cttgctctggatgaa

SEQ ID NO: 1320389 - DNA, 15 bp, Homo sapiens
tcttgctctggatga

SEQ ID NO: 1320390 - DNA, 15 bp, Homo sapiens
ttcttgctctggatg

SEQ ID NO: 1320391 - DNA, 15 bp, Homo sapiens
tttcttgctctggat

SEQ ID NO: 1320392 - DNA, 15 bp, Homo sapiens
ttttcttgctctgga

SEQ ID NO: 1320393 - DNA, 15 bp, Homo sapiens
cttttcttgctctgg

SEQ ID NO: 1320394 - DNA, 15 bp, Homo sapiens
gcttttcttgctctg

SEQ ID NO: 1320395 - DNA, 15 bp, Homo sapiens
agcttttcttgctct

SEQ ID NO: 1320396 - DNA, 15 bp, Homo sapiens
cagcttttcttgctc

SEQ ID NO: 1320397 - DNA, 15 bp, Homo sapiens
tcagcttttcttgct

SEQ ID NO: 1320398 - DNA, 15 bp, Homo sapiens
ctcagcttttcttgc

SEQ ID NO: 1320399 - DNA, 15 bp, Homo sapiens
tctcagcttttcttg

SEQ ID NO: 1320400 - DNA, 15 bp, Homo sapiens
ctctcagcttttctt

SEQ ID NO: 1320401 - DNA, 15 bp, Homo sapiens
gctctcagcttttct

SEQ ID NO: 1320402 - DNA, 15 bp, Homo sapiens
agctctcagcttttc

SEQ ID NO: 1320403 - DNA, 15 bp, Homo sapiens
cagctctcagctttt

SEQ ID NO: 1320404 - DNA, 15 bp, Homo sapiens
acagctctcagcttt

SEQ ID NO: 1320405 - DNA, 15 bp, Homo sapiens
gacagctctcagctt

SEQ ID NO: 1320406 - DNA, 15 bp, Homo sapiens
ggacagctctcagct

SEQ ID NO: 1320407 - DNA, 15 bp, Homo sapiens
cggacagctctcagc

SEQ ID NO: 1320408 - DNA, 15 bp, Homo sapiens
acggacagctctcag

SEQ ID NO: 1320409 - DNA, 15 bp, Homo sapiens
cacggacagctctca

SEQ ID NO: 1320410 - DNA, 15 bp, Homo sapiens
tcacggacagctctc

SEQ ID NO: 1320411 - DNA, 15 bp, Homo sapiens
ctcacggacagctct

SEQ ID NO: 1320412 - DNA, 15 bp, Homo sapiens
cctcacggacagctc

SEQ ID NO: 1320413 - DNA, 15 bp, Homo sapiens
ccctcacggacagct

SEQ ID NO: 1320414 - DNA, 15 bp, Homo sapiens
tccctcacggacagc

SEQ ID NO: 1320415 - DNA, 15 bp, Homo sapiens
ttccctcacggacag

SEQ ID NO: 1320416 - DNA, 15 bp, Homo sapiens
cttccctcacggaca

SEQ ID NO: 1320417 - DNA, 15 bp, Homo sapiens
ccttccctcacggac

SEQ ID NO: 1320418 - DNA, 15 bp, Homo sapiens
gccttccctcacgga

SEQ ID NO: 1320419 - DNA, 15 bp, Homo sapiens
ggccttccctcacgg

SEQ ID NO: 1320420 - DNA, 15 bp, Homo sapiens
tggccttccctcacg

SEQ ID NO: 1320421 - DNA, 15 bp, Homo sapiens
gtggccttccctcac

SEQ ID NO: 1320422 - DNA, 15 bp, Homo sapiens
tgtggccttccctca

SEQ ID NO: 1320423 - DNA, 15 bp, Homo sapiens
gtgtggccttccctc

SEQ ID NO: 1320424 - DNA, 15 bp, Homo sapiens
tgtgtggccttccct

SEQ ID NO: 1320425 - DNA, 15 bp, Homo sapiens
ctgtgtggccttccc

SEQ ID NO: 1320426 - DNA, 15 bp, Homo sapiens
cctgtgtggccttcc

SEQ ID NO: 1320427 - DNA, 15 bp, Homo sapiens
gcctgtgtggccttc

SEQ ID NO: 1320428 - DNA, 15 bp, Homo sapiens
tgcctgtgtggcctt

SEQ ID NO: 1320429 - DNA, 15 bp, Homo sapiens
ttgcctgtgtggcct

SEQ ID NO: 1320430 - DNA, 15 bp, Homo sapiens
cttgcctgtgtggcc

SEQ ID NO: 1320431 - DNA, 15 bp, Homo sapiens
tcttgcctgtgtggc

SEQ ID NO: 1320432 - DNA, 15 bp, Homo sapiens
ctcttgcctgtgtgg

SEQ ID NO: 1320433 - DNA, 15 bp, Homo sapiens
cctcttgcctgtgtg

SEQ ID NO: 1320434 - DNA, 15 bp, Homo sapiens
tcctcttgcctgtgt

SEQ ID NO: 1320435 - DNA, 15 bp, Homo sapiens
ctcctcttgcctgtg

SEQ ID NO: 1320436 - DNA, 15 bp, Homo sapiens
actcctcttgcctgt

SEQ ID NO: 1320437 - DNA, 15 bp, Homo sapiens
cactcctcttgcctg

SEQ ID NO: 1320438 - DNA, 15 bp, Homo sapiens
ccactcctcttgcct

SEQ ID NO: 1320439 - DNA, 15 bp, Homo sapiens
cccactcctcttgcc

SEQ ID NO: 1320440 - DNA, 15 bp, Homo sapiens
tcccactcctcttgc

SEQ ID NO: 1320441 - DNA, 15 bp, Homo sapiens
gtcccactcctcttg

SEQ ID NO: 1320442 - DNA, 15 bp, Homo sapiens
tgtcccactcctctt

SEQ ID NO: 1320443 - DNA, 15 bp, Homo sapiens
ctgtcccactcctct

SEQ ID NO: 1320444 - DNA, 15 bp, Homo sapiens
cctgtcccactcctc

SEQ ID NO: 1320445 - DNA, 15 bp, Homo sapiens
ccctgtcccactcct

SEQ ID NO: 1320446 - DNA, 15 bp, Homo sapiens
cccctgtcccactcc

SEQ ID NO: 1320447 - DNA, 15 bp, Homo sapiens
tcccctgtcccactc

SEQ ID NO: 1320448 - DNA, 15 bp, Homo sapiens
ctcccctgtcccact

SEQ ID NO: 1320449 - DNA, 15 bp, Homo sapiens
actcccctgtcccac

SEQ ID NO: 1320450 - DNA, 15 bp, Homo sapiens
tactcccctgtccca

SEQ ID NO: 1320451 - DNA, 15 bp, Homo sapiens
ttactcccctgtccc

SEQ ID NO: 1320452 - DNA, 15 bp, Homo sapiens
tttactcccctgtcc

SEQ ID NO: 1320453 - DNA, 15 bp, Homo sapiens
ctttactcccctgtc

SEQ ID NO: 1320454 - DNA, 15 bp, Homo sapiens
cctttactcccctgt

SEQ ID NO: 1320455 - DNA, 15 bp, Homo sapiens
actcctttactcccc

SEQ ID NO: 1320456 - DNA, 15 bp, Homo sapiens
cactcctttactccc

SEQ ID NO: 1320457 - DNA, 15 bp, Homo sapiens
ccactcctttactcc

SEQ ID NO: 1320458 - DNA, 15 bp, Homo sapiens
cccactcctttactc

SEQ ID NO: 1320459 - DNA, 15 bp, Homo sapiens
gcccactcctttact

SEQ ID NO: 1320460 - DNA, 15 bp, Homo sapiens
agcccactcctttac

SEQ ID NO: 1320461 - DNA, 15 bp, Homo sapiens
tagcccactccttta

SEQ ID NO: 1320462 - DNA, 15 bp, Homo sapiens
gtagcccactccttt

SEQ ID NO: 1320463 - DNA, 15 bp, Homo sapiens
tgtagcccactcctt

SEQ ID NO: 1320464 - DNA, 15 bp, Homo sapiens
ttgtagcccactcct

SEQ ID NO: 1320465 - DNA, 15 bp, Homo sapiens
gttgtagcccactcc

SEQ ID NO: 1320466 - DNA, 15 bp, Homo sapiens
tgttgtagcccactc

SEQ ID NO: 1320467 - DNA, 15 bp, Homo sapiens
ctgttgtagcccact

SEQ ID NO: 1320468 - DNA, 15 bp, Homo sapiens
cctgttgtagcccac

SEQ ID NO: 1320469 - DNA, 15 bp, Homo sapiens
gcctgttgtagccca

SEQ ID NO: 1320470 - DNA, 15 bp, Homo sapiens
ggcctgttgtagccc

SEQ ID NO: 1320471 - DNA, 15 bp, Homo sapiens
gggcctgttgtagcc

SEQ ID NO: 1320472 - DNA, 15 bp, Homo sapiens
agggcctgttgtagc

SEQ ID NO: 1320473 - DNA, 15 bp, Homo sapiens
cagggcctgttgtag

SEQ ID NO: 1320474 - DNA, 15 bp, Homo sapiens
gcagggcctgttgta

SEQ ID NO: 1320475 - DNA, 15 bp, Homo sapiens
tgcagggcctgttgt

SEQ ID NO: 1320476 - DNA, 15 bp, Homo sapiens
ctgcagggcctgttg

SEQ ID NO: 1320477 - DNA, 15 bp, Homo sapiens
tctgcagggcctgtt

SEQ ID NO: 1320478 - DNA, 15 bp, Homo sapiens
atctgcagggcctgt

SEQ ID NO: 1320479 - DNA, 15 bp, Homo sapiens
catctgcagggcctg

SEQ ID NO: 1320480 - DNA, 15 bp, Homo sapiens
acatctgcagggcct

SEQ ID NO: 1320481 - DNA, 15 bp, Homo sapiens
cacatctgcagggcc

SEQ ID NO: 1320482 - DNA, 15 bp, Homo sapiens
ccacatctgcagggc

SEQ ID NO: 1320483 - DNA, 15 bp, Homo sapiens
tccacatctgcaggg

SEQ ID NO: 1320484 - DNA, 15 bp, Homo sapiens
ttccacatctgcagg

SEQ ID NO: 1320485 - DNA, 15 bp, Homo sapiens
cttccacatctgcag

SEQ ID NO: 1320486 - DNA, 15 bp, Homo sapiens
gcttccacatctgca

SEQ ID NO: 1320487 - DNA, 15 bp, Homo sapiens
ggcttccacatctgc

SEQ ID NO: 1320488 - DNA, 15 bp, Homo sapiens
tggcttccacatctg

SEQ ID NO: 1320489 - DNA, 15 bp, Homo sapiens
ctggcttccacatct

SEQ ID NO: 1320490 - DNA, 15 bp, Homo sapiens
tctggcttccacatc

SEQ ID NO: 1320491 - DNA, 15 bp, Homo sapiens
gtctggcttccacat

SEQ ID NO: 1320492 - DNA, 15 bp, Homo sapiens
ggtctggcttccaca

SEQ ID NO: 1320493 - DNA, 15 bp, Homo sapiens
gggtctggcttccac

SEQ ID NO: 1320494 - DNA, 15 bp, Homo sapiens
tgggtctggcttcca

SEQ ID NO: 1320495 - DNA, 15 bp, Homo sapiens
gtgggtctggcttcc

SEQ ID NO: 1320496 - DNA, 15 bp, Homo sapiens
tgtgggtctggcttc

SEQ ID NO: 1320497 - DNA, 15 bp, Homo sapiens
ctgtgggtctggctt

SEQ ID NO: 1320498 - DNA, 15 bp, Homo sapiens
tctgtgggtctggct

SEQ ID NO: 1320499 - DNA, 15 bp, Homo sapiens
ctctgtgggtctggc

SEQ ID NO: 1320500 - DNA, 15 bp, Homo sapiens
cctctgtgggtctgg

SEQ ID NO: 1320501 - DNA, 15 bp, Homo sapiens
gcctctgtgggtctg

SEQ ID NO: 1320502 - DNA, 15 bp, Homo sapiens
tgcctctgtgggtct

SEQ ID NO: 1320503 - DNA, 15 bp, Homo sapiens
gtgcctctgtgggtc

SEQ ID NO: 1320504 - DNA, 15 bp, Homo sapiens
agtgcctctgtgggt

SEQ ID NO: 1320505 - DNA, 15 bp, Homo sapiens
aagtgcctctgtggg

SEQ ID NO: 1320506 - DNA, 15 bp, Homo sapiens
taagtgcctctgtgg

SEQ ID NO: 1320507 - DNA, 15 bp, Homo sapiens
ctaagtgcctctgtg

SEQ ID NO: 1320508 - DNA, 15 bp, Homo sapiens
tctaagtgcctctgt

SEQ ID NO: 1320509 - DNA, 15 bp, Homo sapiens
ttctaagtgcctctg

SEQ ID NO: 1320510 - DNA, 15 bp, Homo sapiens
tttctaagtgcctct

SEQ ID NO: 1320511 - DNA, 15 bp, Homo sapiens
ctttctaagtgcctc

SEQ ID NO: 1320512 - DNA, 15 bp, Homo sapiens
actttctaagtgcct

SEQ ID NO: 1320513 - DNA, 15 bp, Homo sapiens
cactttctaagtgcc

SEQ ID NO: 1320514 - DNA, 15 bp, Homo sapiens
tcactttctaagtgc

SEQ ID NO: 1320515 - DNA, 15 bp, Homo sapiens
ctcactttctaagtg

SEQ ID NO: 1320516 - DNA, 15 bp, Homo sapiens
cctcactttctaagt

SEQ ID NO: 1320517 - DNA, 15 bp, Homo sapiens
tcctcactttctaag

SEQ ID NO: 1320518 - DNA, 15 bp, Homo sapiens
atcctcactttctaa

SEQ ID NO: 1320519 - DNA, 15 bp, Homo sapiens
gatcctcactttcta

SEQ ID NO: 1320520 - DNA, 15 bp, Homo sapiens
ggatcctcactttct

SEQ ID NO: 1320521 - DNA, 15 bp, Homo sapiens
aggatcctcactttc

SEQ ID NO: 1320522 - DNA, 15 bp, Homo sapiens
caggatcctcacttt

SEQ ID NO: 1320523 - DNA, 15 bp, Homo sapiens
ccaggatcctcactt

SEQ ID NO: 1320524 - DNA, 15 bp, Homo sapiens
tccaggatcctcact

SEQ ID NO: 1320525 - DNA, 15 bp, Homo sapiens
atccaggatcctcac

SEQ ID NO: 1320526 - DNA, 15 bp, Homo sapiens
catccaggatcctca

SEQ ID NO: 1320527 - DNA, 15 bp, Homo sapiens
tcatccaggatcctc

SEQ ID NO: 1320528 - DNA, 15 bp, Homo sapiens
ttcatccaggatcct

SEQ ID NO: 1320529 - DNA, 15 bp, Homo sapiens
attcatccaggatcc

SEQ ID NO: 1320530 - DNA, 15 bp, Homo sapiens
aattcatccaggatc

SEQ ID NO: 1320531 - DNA, 15 bp, Homo sapiens
taattcatccaggat

SEQ ID NO: 1320532 - DNA, 15 bp, Homo sapiens
ataattcatccagga

SEQ ID NO: 1320533 - DNA, 15 bp, Homo sapiens
aataattcatccagg

SEQ ID NO: 1320534 - DNA, 15 bp, Homo sapiens
aaataattcatccag

SEQ ID NO: 1320535 - DNA, 15 bp, Homo sapiens
aaaataattcatcca

SEQ ID NO: 1320536 - DNA, 15 bp, Homo sapiens
taaaataattcatcc

SEQ ID NO: 1320537 - DNA, 15 bp, Homo sapiens
ctaaaataattcatc

SEQ ID NO: 1320538 - DNA, 15 bp, Homo sapiens
cctaaaataattcat

SEQ ID NO: 1320539 - DNA, 15 bp, Homo sapiens
ccctaaaataattca

SEQ ID NO: 1320540 - DNA, 15 bp, Homo sapiens
tccctaaaataattc

SEQ ID NO: 1320541 - DNA, 15 bp, Homo sapiens
ctccctaaaataatt

SEQ ID NO: 1320542 - DNA, 15 bp, Homo sapiens
tctccctaaaataat

SEQ ID NO: 1320543 - DNA, 15 bp, Homo sapiens
ttctccctaaaataa

SEQ ID NO: 1320544 - DNA, 15 bp, Homo sapiens
tttctccctaaaata

SEQ ID NO: 1320545 - DNA, 15 bp, Homo sapiens
ctttctccctaaaat

SEQ ID NO: 1320546 - DNA, 15 bp, Homo sapiens
actttctccctaaaa

SEQ ID NO: 1320547 - DNA, 15 bp, Homo sapiens
cactttctccctaaa

SEQ ID NO: 1320548 - DNA, 15 bp, Homo sapiens
acactttctccctaa

SEQ ID NO: 1320549 - DNA, 15 bp, Homo sapiens
tacactttctcccta

SEQ ID NO: 1320550 - DNA, 15 bp, Homo sapiens
ctacactttctccct

SEQ ID NO: 1320551 - DNA, 15 bp, Homo sapiens
cctacactttctccc

SEQ ID NO: 1320552 - DNA, 15 bp, Homo sapiens
acctacactttctcc

SEQ ID NO: 1320553 - DNA, 15 bp, Homo sapiens
aacctacactttctc

SEQ ID NO: 1320554 - DNA, 15 bp, Homo sapiens
aaacctacactttct

SEQ ID NO: 1320555 - DNA, 15 bp, Homo sapiens
taaacctacactttc

SEQ ID NO: 1320556 - DNA, 15 bp, Homo sapiens
ctaaacctacacttt

SEQ ID NO: 1320557 - DNA, 15 bp, Homo sapiens
tctaaacctacactt

SEQ ID NO: 1320558 - DNA, 15 bp, Homo sapiens
atctaaacctacact

SEQ ID NO: 1320559 - DNA, 15 bp, Homo sapiens
gatctaaacctacac

SEQ ID NO: 1320560 - DNA, 15 bp, Homo sapiens
tgatctaaacctaca

SEQ ID NO: 1320561 - DNA, 15 bp, Homo sapiens
ctgatctaaacctac

SEQ ID NO: 1320562 - DNA, 15 bp, Homo sapiens
gctgatctaaaccta

SEQ ID NO: 1320563 - DNA, 15 bp, Homo sapiens
agctgatctaaacct

SEQ ID NO: 1320564 - DNA, 15 bp, Homo sapiens
cagctgatctaaacc

SEQ ID NO: 1320565 - DNA, 15 bp, Homo sapiens
ccagctgatctaaac

SEQ ID NO: 1320566 - DNA, 15 bp, Homo sapiens
gccagctgatctaaa

SEQ ID NO: 1320567 - DNA, 15 bp, Homo sapiens
tgccagctgatctaa

SEQ ID NO: 1320568 - DNA, 15 bp, Homo sapiens
ctgccagctgatcta

SEQ ID NO: 1320569 - DNA, 15 bp, Homo sapiens
tctgccagctgatct

SEQ ID NO: 1320570 - DNA, 15 bp, Homo sapiens
atctgccagctgatc

SEQ ID NO: 1320571 - DNA, 15 bp, Homo sapiens
catctgccagctgat

SEQ ID NO: 1320572 - DNA, 15 bp, Homo sapiens
acatctgccagctga

SEQ ID NO: 1320573 - DNA, 15 bp, Homo sapiens
cacatctgccagctg

SEQ ID NO: 1320574 - DNA, 15 bp, Homo sapiens
acacatctgccagct

SEQ ID NO: 1320575 - DNA, 15 bp, Homo sapiens
aacacatctgccagc

SEQ ID NO: 1320576 - DNA, 15 bp, Homo sapiens
aaacacatctgccag

SEQ ID NO: 1320577 - DNA, 15 bp, Homo sapiens
caaacacatctgcca

SEQ ID NO: 1320578 - DNA, 15 bp, Homo sapiens
acaaacacatctgcc

SEQ ID NO: 1320579 - DNA, 15 bp, Homo sapiens
cacaaacacatctgc

SEQ ID NO: 1320580 - DNA, 15 bp, Homo sapiens
ccacaaacacatctg

SEQ ID NO: 1320581 - DNA, 15 bp, Homo sapiens
cccacaaacacatct

SEQ ID NO: 1320582 - DNA, 15 bp, Homo sapiens
gcccacaaacacatc

SEQ ID NO: 1320583 - DNA, 15 bp, Homo sapiens
agcccacaaacacat

SEQ ID NO: 1320584 - DNA, 15 bp, Homo sapiens
tagcccacaaacaca

SEQ ID NO: 1320585 - DNA, 15 bp, Homo sapiens
gtagcccacaaacac

SEQ ID NO: 1320586 - DNA, 15 bp, Homo sapiens
tgtagcccacaaaca

SEQ ID NO: 1320587 - DNA, 15 bp, Homo sapiens
ctgtagcccacaaac

SEQ ID NO: 1320588 - DNA, 15 bp, Homo sapiens
gctgtagcccacaaa

SEQ ID NO: 1320589 - DNA, 15 bp, Homo sapiens
ggctgtagcccacaa

SEQ ID NO: 1320590 - DNA, 15 bp, Homo sapiens
tggctgtagcccaca

SEQ ID NO: 1320591 - DNA, 15 bp, Homo sapiens
ttggctgtagcccac

SEQ ID NO: 1320592 - DNA, 15 bp, Homo sapiens
cttggctgtagccca

SEQ ID NO: 1320593 - DNA, 15 bp, Homo sapiens
acttggctgtagccc

SEQ ID NO: 1320594 - DNA, 15 bp, Homo sapiens
aacttggctgtagcc

SEQ ID NO: 1320595 - DNA, 15 bp, Homo sapiens
aaacttggctgtagc

SEQ ID NO: 1320596 - DNA, 15 bp, Homo sapiens
aaaacttggctgtag

SEQ ID NO: 1320597 - DNA, 15 bp, Homo sapiens
aaaaacttggctgta

SEQ ID NO: 1320598 - DNA, 15 bp, Homo sapiens
gaaaaacttggctgt

SEQ ID NO: 1320599 - DNA, 15 bp, Homo sapiens
tgaaaaacttggctg

SEQ ID NO: 1320600 - DNA, 15 bp, Homo sapiens
ctgaaaaacttggct

SEQ ID NO: 1320601 - DNA, 15 bp, Homo sapiens
cctgaaaaacttggc

SEQ ID NO: 1320602 - DNA, 15 bp, Homo sapiens
tcctgaaaaacttgg

SEQ ID NO: 1320603 - DNA, 15 bp, Homo sapiens
gtcctgaaaaacttg

SEQ ID NO: 1320604 - DNA, 15 bp, Homo sapiens
agtcctgaaaaactt

SEQ ID NO: 1320605 - DNA, 15 bp, Homo sapiens
tagtcctgaaaaact

SEQ ID NO: 1320606 - DNA, 15 bp, Homo sapiens
ttagtcctgaaaaac

SEQ ID NO: 1320607 - DNA, 15 bp, Homo sapiens
cttagtcctgaaaaa

SEQ ID NO: 1320608 - DNA, 15 bp, Homo sapiens
tcttagtcctgaaaa

SEQ ID NO: 1320609 - DNA, 15 bp, Homo sapiens
ttcttagtcctgaaa

SEQ ID NO: 1320610 - DNA, 15 bp, Homo sapiens
cttcttagtcctgaa

SEQ ID NO: 1320611 - DNA, 15 bp, Homo sapiens
ccttcttagtcctga

SEQ ID NO: 1320612 - DNA, 15 bp, Homo sapiens
tccttcttagtcctg

SEQ ID NO: 1320613 - DNA, 15 bp, Homo sapiens
ctccttcttagtcct

SEQ ID NO: 1320614 - DNA, 15 bp, Homo sapiens
gctccttcttagtcc

SEQ ID NO: 1320615 - DNA, 15 bp, Homo sapiens
tgctccttcttagtc

SEQ ID NO: 1320616 - DNA, 15 bp, Homo sapiens
ttgctccttcttagt

SEQ ID NO: 1320617 - DNA, 15 bp, Homo sapiens
tttgctccttcttag

SEQ ID NO: 1320618 - DNA, 15 bp, Homo sapiens
ttttgctccttctta

SEQ ID NO: 1320619 - DNA, 15 bp, Homo sapiens
attttgctccttctt

SEQ ID NO: 1320620 - DNA, 15 bp, Homo sapiens
tattttgctccttct

SEQ ID NO: 1320621 - DNA, 15 bp, Homo sapiens
ttattttgctccttc

SEQ ID NO: 1320622 - DNA, 15 bp, Homo sapiens
cttattttgctcctt

SEQ ID NO: 1320623 - DNA, 15 bp, Homo sapiens
acttattttgctcct

SEQ ID NO: 1320624 - DNA, 15 bp, Homo sapiens
tacttattttgctcc

SEQ ID NO: 1320625 - DNA, 15 bp, Homo sapiens
ctacttattttgctc

SEQ ID NO: 1320626 - DNA, 15 bp, Homo sapiens
tctacttattttgct

SEQ ID NO: 1320627 - DNA, 15 bp, Homo sapiens
ttctacttattttgc

SEQ ID NO: 1320628 - DNA, 15 bp, Homo sapiens
gttctacttattttg

SEQ ID NO: 1320629 - DNA, 15 bp, Homo sapiens
agttctacttatttt

SEQ ID NO: 1320630 - DNA, 15 bp, Homo sapiens
aagttctacttattt

SEQ ID NO: 1320631 - DNA, 15 bp, Homo sapiens
gaagttctacttatt

SEQ ID NO: 1320632 - DNA, 15 bp, Homo sapiens
agaagttctacttat

SEQ ID NO: 1320633 - DNA, 15 bp, Homo sapiens
aagaagttctactta

SEQ ID NO: 1320634 - DNA, 15 bp, Homo sapiens
caagaagttctactt

SEQ ID NO: 1320635 - DNA, 15 bp, Homo sapiens
ccaagaagttctact

SEQ ID NO: 1320636 - DNA, 15 bp, Homo sapiens
cccaagaagttctac

SEQ ID NO: 1320637 - DNA, 15 bp, Homo sapiens
tcccaagaagttcta

SEQ ID NO: 1320638 - DNA, 15 bp, Homo sapiens
gtcccaagaagttct

SEQ ID NO: 1320639 - DNA, 15 bp, Homo sapiens
tgtcccaagaagttc

SEQ ID NO: 1320640 - DNA, 15 bp, Homo sapiens
ctgtcccaagaagtt

SEQ ID NO: 1320641 - DNA, 15 bp, Homo sapiens
cctgtcccaagaagt

SEQ ID NO: 1320642 - DNA, 15 bp, Homo sapiens
tcctgtcccaagaag

SEQ ID NO: 1320643 - DNA, 15 bp, Homo sapiens
ctcctgtcccaagaa

SEQ ID NO: 1320644 - DNA, 15 bp, Homo sapiens
tctcctgtcccaaga

SEQ ID NO: 1320645 - DNA, 15 bp, Homo sapiens
atctcctgtcccaag

SEQ ID NO: 1320646 - DNA, 15 bp, Homo sapiens
gatctcctgtcccaa

SEQ ID NO: 1320647 - DNA, 15 bp, Homo sapiens
agatctcctgtccca

SEQ ID NO: 1320648 - DNA, 15 bp, Homo sapiens
tagatctcctgtccc

SEQ ID NO: 1320649 - DNA, 15 bp, Homo sapiens
ctagatctcctgtcc

SEQ ID NO: 1320650 - DNA, 15 bp, Homo sapiens
cctagatctcctgtc

SEQ ID NO: 1320651 - DNA, 15 bp, Homo sapiens
ccctagatctcctgt

SEQ ID NO: 1320652 - DNA, 15 bp, Homo sapiens
accctagatctcctg

SEQ ID NO: 1320653 - DNA, 15 bp, Homo sapiens
taccctagatctcct

SEQ ID NO: 1320654 - DNA, 15 bp, Homo sapiens
gtaccctagatctcc

SEQ ID NO: 1320655 - DNA, 15 bp, Homo sapiens
agtaccctagatctc

SEQ ID NO: 1320656 - DNA, 15 bp, Homo sapiens
gagtaccctagatct

SEQ ID NO: 1320657 - DNA, 15 bp, Homo sapiens
ggagtaccctagatc

SEQ ID NO: 1320658 - DNA, 15 bp, Homo sapiens
tggagtaccctagat

SEQ ID NO: 1320659 - DNA, 15 bp, Homo sapiens
ctggagtaccctaga

SEQ ID NO: 1320660 - DNA, 15 bp, Homo sapiens
tctggagtaccctag

SEQ ID NO: 1320661 - DNA, 15 bp, Homo sapiens
ttctggagtacccta

SEQ ID NO: 1320662 - DNA, 15 bp, Homo sapiens
gttctggagtaccct

SEQ ID NO: 1320663 - DNA, 15 bp, Homo sapiens
ggttctggagtaccc

SEQ ID NO: 1320664 - DNA, 15 bp, Homo sapiens
tggttctggagtacc

SEQ ID NO: 1320665 - DNA, 15 bp, Homo sapiens
ctggttctggagtac

SEQ ID NO: 1320666 - DNA, 15 bp, Homo sapiens
cctggttctggagta

SEQ ID NO: 1320667 - DNA, 15 bp, Homo sapiens
ccctggttctggagt

SEQ ID NO: 1320668 - DNA, 15 bp, Homo sapiens
tccctggttctggag

SEQ ID NO: 1320669 - DNA, 15 bp, Homo sapiens
ttccctggttctgga

SEQ ID NO: 1320670 - DNA, 15 bp, Homo sapiens
tttccctggttctgg

SEQ ID NO: 1320671 - DNA, 15 bp, Homo sapiens
atttccctggttctg

SEQ ID NO: 1320672 - DNA, 15 bp, Homo sapiens
catttccctggttct

SEQ ID NO: 1320673 - DNA, 15 bp, Homo sapiens
tcatttccctggttc

SEQ ID NO: 1320674 - DNA, 15 bp, Homo sapiens
ctcatttccctggtt

SEQ ID NO: 1320675 - DNA, 15 bp, Homo sapiens
tctcatttccctggt

SEQ ID NO: 1320676 - DNA, 15 bp, Homo sapiens
ttctcatttccctgg

SEQ ID NO: 1320677 - DNA, 15 bp, Homo sapiens
tttctcatttccctg

SEQ ID NO: 1320678 - DNA, 15 bp, Homo sapiens
gtttctcatttccct

SEQ ID NO: 1320679 - DNA, 15 bp, Homo sapiens
tgtttctcatttccc

SEQ ID NO: 1320680 - DNA, 15 bp, Homo sapiens
ttgtttctcatttcc

SEQ ID NO: 1320681 - DNA, 15 bp, Homo sapiens
cttgtttctcatttc

SEQ ID NO: 1320682 - DNA, 15 bp, Homo sapiens
tcttgtttctcattt

SEQ ID NO: 1320683 - DNA, 15 bp, Homo sapiens
ctcttgtttctcatt

SEQ ID NO: 1320684 - DNA, 15 bp, Homo sapiens
cctcttgtttctcat

SEQ ID NO: 1320685 - DNA, 15 bp, Homo sapiens
ccctcttgtttctca

SEQ ID NO: 1320686 - DNA, 15 bp, Homo sapiens
cccctcttgtttctc

SEQ ID NO: 1320687 - DNA, 15 bp, Homo sapiens
tcccctcttgtttct

SEQ ID NO: 1320688 - DNA, 15 bp, Homo sapiens
ttcccctcttgtttc

SEQ ID NO: 1320689 - DNA, 15 bp, Homo sapiens
attcccctcttgttt

SEQ ID NO: 1320690 - DNA, 15 bp, Homo sapiens
aattcccctcttgtt

SEQ ID NO: 1320691 - DNA, 15 bp, Homo sapiens
aaattcccctcttgt

SEQ ID NO: 1320692 - DNA, 15 bp, Homo sapiens
aaaattcccctcttg

SEQ ID NO: 1320693 - DNA, 15 bp, Homo sapiens
taaaattcccctctt

SEQ ID NO: 1320694 - DNA, 15 bp, Homo sapiens
ttaaaattcccctct

SEQ ID NO: 1320695 - DNA, 15 bp, Homo sapiens
cttaaaattcccctc

SEQ ID NO: 1320696 - DNA, 15 bp, Homo sapiens
tcttaaaattcccct

SEQ ID NO: 1320697 - DNA, 15 bp, Homo sapiens
ttcttaaaattcccc

SEQ ID NO: 1320698 - DNA, 15 bp, Homo sapiens
tttcttaaaattccc

SEQ ID NO: 1320699 - DNA, 15 bp, Homo sapiens
ctttcttaaaattcc

SEQ ID NO: 1320700 - DNA, 15 bp, Homo sapiens
tctttcttaaaattc

SEQ ID NO: 1320701 - DNA, 15 bp, Homo sapiens
ctctttcttaaaatt

SEQ ID NO: 1320702 - DNA, 15 bp, Homo sapiens
tctctttcttaaaat

SEQ ID NO: 1320703 - DNA, 15 bp, Homo sapiens
ctctctttcttaaaa

SEQ ID NO: 1320704 - DNA, 15 bp, Homo sapiens
cctctctttcttaaa

SEQ ID NO: 1320705 - DNA, 15 bp, Homo sapiens
ccctctctttcttaa

SEQ ID NO: 1320706 - DNA, 15 bp, Homo sapiens
tccctctctttctta

SEQ ID NO: 1320707 - DNA, 15 bp, Homo sapiens
ttccctctctttctt

SEQ ID NO: 1320708 - DNA, 15 bp, Homo sapiens
cttccctctctttct

SEQ ID NO: 1320709 - DNA, 15 bp, Homo sapiens
tcttccctctctttc

SEQ ID NO: 1320710 - DNA, 15 bp, Homo sapiens
atcttccctctcttt

SEQ ID NO: 1320711 - DNA, 15 bp, Homo sapiens
gatcttccctctctt

SEQ ID NO: 1320712 - DNA, 15 bp, Homo sapiens
tgatcttccctctct

SEQ ID NO: 1320713 - DNA, 15 bp, Homo sapiens
atgatcttccctctc

SEQ ID NO: 1320714 - DNA, 15 bp, Homo sapiens
gatgatcttccctct

SEQ ID NO: 1320715 - DNA, 15 bp, Homo sapiens
agatgatcttccctc

SEQ ID NO: 1320716 - DNA, 15 bp, Homo sapiens
tagatgatcttccct

SEQ ID NO: 1320717 - DNA, 15 bp, Homo sapiens
atagatgatcttccc

SEQ ID NO: 1320718 - DNA, 15 bp, Homo sapiens
catagatgatcttcc

SEQ ID NO: 1320719 - DNA, 15 bp, Homo sapiens
tcatagatgatcttc

SEQ ID NO: 1320720 - DNA, 15 bp, Homo sapiens
ctcatagatgatctt

SEQ ID NO: 1320721 - DNA, 15 bp, Homo sapiens
cctcatagatgatct

SEQ ID NO: 1320722 - DNA, 15 bp, Homo sapiens
acctcatagatgatc

SEQ ID NO: 1320723 - DNA, 15 bp, Homo sapiens
aacctcatagatgat

SEQ ID NO: 1320724 - DNA, 15 bp, Homo sapiens
caacctcatagatga

SEQ ID NO: 1320725 - DNA, 15 bp, Homo sapiens
ccaacctcatagatg

SEQ ID NO: 1320726 - DNA, 15 bp, Homo sapiens
tccaacctcatagat

SEQ ID NO: 1320727 - DNA, 15 bp, Homo sapiens
ctccaacctcataga

SEQ ID NO: 1320728 - DNA, 15 bp, Homo sapiens
tctccaacctcatag

SEQ ID NO: 1320729 - DNA, 15 bp, Homo sapiens
atctccaacctcata

SEQ ID NO: 1320730 - DNA, 15 bp, Homo sapiens
catctccaacctcat

SEQ ID NO: 1320731 - DNA, 15 bp, Homo sapiens
tcatctccaacctca

SEQ ID NO: 1320732 - DNA, 15 bp, Homo sapiens
ttcatctccaacctc

SEQ ID NO: 1320733 - DNA, 15 bp, Homo sapiens
tttcatctccaacct

SEQ ID NO: 1320734 - DNA, 15 bp, Homo sapiens
ctttcatctccaacc

SEQ ID NO: 1320735 - DNA, 15 bp, Homo sapiens
cctttcatctccaac

SEQ ID NO: 1320736 - DNA, 15 bp, Homo sapiens
acctttcatctccaa

SEQ ID NO: 1320737 - DNA, 15 bp, Homo sapiens
cacctttcatctcca

SEQ ID NO: 1320738 - DNA, 15 bp, Homo sapiens
acacctttcatctcc

SEQ ID NO: 1320739 - DNA, 15 bp, Homo sapiens
aacacctttcatctc

SEQ ID NO: 1320740 - DNA, 15 bp, Homo sapiens
caacacctttcatct

SEQ ID NO: 1320741 - DNA, 15 bp, Homo sapiens
ccaacacctttcatc

SEQ ID NO: 1320742 - DNA, 15 bp, Homo sapiens
tccaacacctttcat

SEQ ID NO: 1320743 - DNA, 15 bp, Homo sapiens
ctccaacacctttca

SEQ ID NO: 1320744 - DNA, 15 bp, Homo sapiens
tctccaacacctttc

SEQ ID NO: 1320745 - DNA, 15 bp, Homo sapiens
atctccaacaccttt

SEQ ID NO: 1320746 - DNA, 15 bp, Homo sapiens
accatctccaacacc

SEQ ID NO: 1320747 - DNA, 15 bp, Homo sapiens
caccatctccaacac

SEQ ID NO: 1320748 - DNA, 15 bp, Homo sapiens
tcaccatctccaaca

SEQ ID NO: 1320749 - DNA, 15 bp, Homo sapiens
ctcaccatctccaac

SEQ ID NO: 1320750 - DNA, 15 bp, Homo sapiens
cctcaccatctccaa

SEQ ID NO: 1320751 - DNA, 15 bp, Homo sapiens
gcctcaccatctcca

SEQ ID NO: 1320752 - DNA, 15 bp, Homo sapiens
tgcctcaccatctcc

SEQ ID NO: 1320753 - DNA, 15 bp, Homo sapiens
gtgcctcaccatctc

SEQ ID NO: 1320754 - DNA, 15 bp, Homo sapiens
tgtgcctcaccatct

SEQ ID NO: 1320755 - DNA, 15 bp, Homo sapiens
ttgtgcctcaccatc

SEQ ID NO: 1320756 - DNA, 15 bp, Homo sapiens
cttgtgcctcaccat

SEQ ID NO: 1320757 - DNA, 15 bp, Homo sapiens
acttgtgcctcacca

SEQ ID NO: 1320758 - DNA, 15 bp, Homo sapiens
gacttgtgcctcacc

SEQ ID NO: 1320759 - DNA, 15 bp, Homo sapiens
tgacttgtgcctcac

SEQ ID NO: 1320760 - DNA, 15 bp, Homo sapiens
ttgacttgtgcctca

SEQ ID NO: 1320761 - DNA, 15 bp, Homo sapiens
tttgacttgtgcctc

SEQ ID NO: 1320762 - DNA, 15 bp, Homo sapiens
ttttgacttgtgcct

SEQ ID NO: 1320763 - DNA, 15 bp, Homo sapiens
cttttgacttgtgcc

SEQ ID NO: 1320764 - DNA, 15 bp, Homo sapiens
tcttttgacttgtgc

SEQ ID NO: 1320765 - DNA, 15 bp, Homo sapiens
gtcttttgacttgtg

SEQ ID NO: 1320766 - DNA, 15 bp, Homo sapiens
agtcttttgacttgt

SEQ ID NO: 1320767 - DNA, 15 bp, Homo sapiens
gagtcttttgacttg

SEQ ID NO: 1320768 - DNA, 15 bp, Homo sapiens
tgagtcttttgactt

SEQ ID NO: 1320769 - DNA, 15 bp, Homo sapiens
gtgagtcttttgact

SEQ ID NO: 1320770 - DNA, 15 bp, Homo sapiens
agtgagtcttttgac

SEQ ID NO: 1320771 - DNA, 15 bp, Homo sapiens
gagtgagtcttttga

SEQ ID NO: 1320772 - DNA, 15 bp, Homo sapiens
cgagtgagtcttttg

SEQ ID NO: 1320773 - DNA, 15 bp, Homo sapiens
tcgagtgagtctttt

SEQ ID NO: 1320774 - DNA, 15 bp, Homo sapiens
ttcgagtgagtcttt

SEQ ID NO: 1320775 - DNA, 15 bp, Homo sapiens
cttcgagtgagtctt

SEQ ID NO: 1320776 - DNA, 15 bp, Homo sapiens
ccttcgagtgagtct

SEQ ID NO: 1320777 - DNA, 15 bp, Homo sapiens
cccttcgagtgagtc

SEQ ID NO: 1320778 - DNA, 15 bp, Homo sapiens
gcccttcgagtgagt

SEQ ID NO: 1320779 - DNA, 15 bp, Homo sapiens
tgcccttcgagtgag

SEQ ID NO: 1320780 - DNA, 15 bp, Homo sapiens
ctgcccttcgagtga

SEQ ID NO: 1320781 - DNA, 15 bp, Homo sapiens
cctgcccttcgagtg

SEQ ID NO: 1320782 - DNA, 15 bp, Homo sapiens
tcctgcccttcgagt

SEQ ID NO: 1320783 - DNA, 15 bp, Homo sapiens
ttcctgcccttcgag

SEQ ID NO: 1320784 - DNA, 15 bp, Homo sapiens
gttcctgcccttcga

SEQ ID NO: 1320785 - DNA, 15 bp, Homo sapiens
agttcctgcccttcg

SEQ ID NO: 1320786 - DNA, 15 bp, Homo sapiens
gagttcctgcccttc

SEQ ID NO: 1320787 - DNA, 15 bp, Homo sapiens
agagttcctgccctt

SEQ ID NO: 1320788 - DNA, 15 bp, Homo sapiens
cagagttcctgccct

SEQ ID NO: 1320789 - DNA, 15 bp, Homo sapiens
gcagagttcctgccc

SEQ ID NO: 1320790 - DNA, 15 bp, Homo sapiens
agcagagttcctgcc

SEQ ID NO: 1320791 - DNA, 15 bp, Homo sapiens
aagcagagttcctgc

SEQ ID NO: 1320792 - DNA, 15 bp, Homo sapiens
taagcagagttcctg

SEQ ID NO: 1320793 - DNA, 15 bp, Homo sapiens
ataagcagagttcct

SEQ ID NO: 1320794 - DNA, 15 bp, Homo sapiens
aataagcagagttcc

SEQ ID NO: 1320795 - DNA, 15 bp, Homo sapiens
aaataagcagagttc

SEQ ID NO: 1320796 - DNA, 15 bp, Homo sapiens
caaataagcagagtt

SEQ ID NO: 1320797 - DNA, 15 bp, Homo sapiens
acaaataagcagagt

SEQ ID NO: 1320798 - DNA, 15 bp, Homo sapiens
gacaaataagcagag

SEQ ID NO: 1320799 - DNA, 15 bp, Homo sapiens
ggacaaataagcaga

SEQ ID NO: 1320800 - DNA, 15 bp, Homo sapiens
tggacaaataagcag

SEQ ID NO: 1320801 - DNA, 15 bp, Homo sapiens
atggacaaataagca

SEQ ID NO: 1320802 - DNA, 15 bp, Homo sapiens
tatggacaaataagc

SEQ ID NO: 1320803 - DNA, 15 bp, Homo sapiens
atatggacaaataag

SEQ ID NO: 1320804 - DNA, 15 bp, Homo sapiens
aatatggacaaataa

SEQ ID NO: 1320805 - DNA, 15 bp, Homo sapiens
gaatatggacaaata

SEQ ID NO: 1320806 - DNA, 15 bp, Homo sapiens
ggaatatggacaaat

SEQ ID NO: 1320807 - DNA, 15 bp, Homo sapiens
gggaatatggacaaa

SEQ ID NO: 1320808 - DNA, 15 bp, Homo sapiens
tgggaatatggacaa

SEQ ID NO: 1320809 - DNA, 15 bp, Homo sapiens
ctgggaatatggaca

SEQ ID NO: 1320810 - DNA, 15 bp, Homo sapiens
tctgggaatatggac

SEQ ID NO: 1320811 - DNA, 15 bp, Homo sapiens
ctctgggaatatgga

SEQ ID NO: 1320812 - DNA, 15 bp, Homo sapiens
actctgggaatatgg

SEQ ID NO: 1320813 - DNA, 15 bp, Homo sapiens
aactctgggaatatg

SEQ ID NO: 1320814 - DNA, 15 bp, Homo sapiens
aaactctgggaatat

SEQ ID NO: 1320815 - DNA, 15 bp, Homo sapiens
caaactctgggaata

SEQ ID NO: 1320816 - DNA, 15 bp, Homo sapiens
acaaactctgggaat

SEQ ID NO: 1320817 - DNA, 15 bp, Homo sapiens
gacaaactctgggaa

SEQ ID NO: 1320818 - DNA, 15 bp, Homo sapiens
tgacaaactctggga

SEQ ID NO: 1320819 - DNA, 15 bp, Homo sapiens
atgacaaactctggg

SEQ ID NO: 1320820 - DNA, 15 bp, Homo sapiens
catgacaaactctgg

SEQ ID NO: 1320821 - DNA, 15 bp, Homo sapiens
tcatgacaaactctg

SEQ ID NO: 1320822 - DNA, 15 bp, Homo sapiens
ctcatgacaaactct

SEQ ID NO: 1320823 - DNA, 15 bp, Homo sapiens
cctcatgacaaactc

SEQ ID NO: 1320824 - DNA, 15 bp, Homo sapiens
acctcatgacaaact

SEQ ID NO: 1320825 - DNA, 15 bp, Homo sapiens
gacctcatgacaaac

SEQ ID NO: 1320826 - DNA, 15 bp, Homo sapiens
agacctcatgacaaa

SEQ ID NO: 1320827 - DNA, 15 bp, Homo sapiens
cagacctcatgacaa

SEQ ID NO: 1320828 - DNA, 15 bp, Homo sapiens
ccagacctcatgaca

SEQ ID NO: 1320829 - DNA, 15 bp, Homo sapiens
gccagacctcatgac

SEQ ID NO: 1320830 - DNA, 15 bp, Homo sapiens
ggccagacctcatga

SEQ ID NO: 1320831 - DNA, 15 bp, Homo sapiens
gggccagacctcatg

SEQ ID NO: 1320832 - DNA, 15 bp, Homo sapiens
tgggccagacctcat

SEQ ID NO: 1320833 - DNA, 15 bp, Homo sapiens
gtgggccagacctca

SEQ ID NO: 1320834 - DNA, 15 bp, Homo sapiens
cgtgggccagacctc

SEQ ID NO: 1320835 - DNA, 15 bp, Homo sapiens
acgtgggccagacct

SEQ ID NO: 1320836 - DNA, 15 bp, Homo sapiens
cacgtgggccagacc

SEQ ID NO: 1320837 - DNA, 15 bp, Homo sapiens
ccacgtgggccagac

SEQ ID NO: 1320838 - DNA, 15 bp, Homo sapiens
cccacgtgggccaga

SEQ ID NO: 1320839 - DNA, 15 bp, Homo sapiens
gcccacgtgggccag

SEQ ID NO: 1320840 - DNA, 15 bp, Homo sapiens
tgcccacgtgggcca

SEQ ID NO: 1320841 - DNA, 15 bp, Homo sapiens
ctgcccacgtgggcc

SEQ ID NO: 1320842 - DNA, 15 bp, Homo sapiens
actgcccacgtgggc

SEQ ID NO: 1320843 - DNA, 15 bp, Homo sapiens
gactgcccacgtggg

SEQ ID NO: 1320844 - DNA, 15 bp, Homo sapiens
tgactgcccacgtgg

SEQ ID NO: 1320845 - DNA, 15 bp, Homo sapiens
gtgactgcccacgtg

SEQ ID NO: 1320846 - DNA, 15 bp, Homo sapiens
agtgactgcccacgt

SEQ ID NO: 1320847 - DNA, 15 bp, Homo sapiens
gagtgactgcccacg

SEQ ID NO: 1320848 - DNA, 15 bp, Homo sapiens
cgagtgactgcccac

SEQ ID NO: 1320849 - DNA, 15 bp, Homo sapiens
ccgagtgactgccca

SEQ ID NO: 1320850 - DNA, 15 bp, Homo sapiens
gccgagtgactgccc

SEQ ID NO: 1320851 - DNA, 15 bp, Homo sapiens
ggccgagtgactgcc

SEQ ID NO: 1320852 - DNA, 15 bp, Homo sapiens
tggccgagtgactgc

SEQ ID NO: 1320853 - DNA, 15 bp, Homo sapiens
gtggccgagtgactg

SEQ ID NO: 1320854 - DNA, 15 bp, Homo sapiens
agtggccgagtgact

SEQ ID NO: 1320855 - DNA, 15 bp, Homo sapiens
tagtggccgagtgac

SEQ ID NO: 1320856 - DNA, 15 bp, Homo sapiens
atagtggccgagtga

SEQ ID NO: 1320857 - DNA, 15 bp, Homo sapiens
catagtggccgagtg

SEQ ID NO: 1320858 - DNA, 15 bp, Homo sapiens
acatagtggccgagt

SEQ ID NO: 1320859 - DNA, 15 bp, Homo sapiens
tacatagtggccgag

SEQ ID NO: 1320860 - DNA, 15 bp, Homo sapiens
atacatagtggccga

SEQ ID NO: 1320861 - DNA, 15 bp, Homo sapiens
gatacatagtggccg

SEQ ID NO: 1320862 - DNA, 15 bp, Homo sapiens
tgatacatagtggcc

SEQ ID NO: 1320863 - DNA, 15 bp, Homo sapiens
gtgatacatagtggc

SEQ ID NO: 1320864 - DNA, 15 bp, Homo sapiens
agtgatacatagtgg

SEQ ID NO: 1320865 - DNA, 15 bp, Homo sapiens
cagtgatacatagtg

SEQ ID NO: 1320866 - DNA, 15 bp, Homo sapiens
acagtgatacatagt

SEQ ID NO: 1320867 - DNA, 15 bp, Homo sapiens
cacagtgatacatag

SEQ ID NO: 1320868 - DNA, 15 bp, Homo sapiens
ccacagtgatacata

SEQ ID NO: 1320869 - DNA, 15 bp, Homo sapiens
gccacagtgatacat

SEQ ID NO: 1320870 - DNA, 15 bp, Homo sapiens
agccacagtgataca

SEQ ID NO: 1320871 - DNA, 15 bp, Homo sapiens
cagccacagtgatac

SEQ ID NO: 1320872 - DNA, 15 bp, Homo sapiens
gcagccacagtgata

SEQ ID NO: 1320873 - DNA, 15 bp, Homo sapiens
ggcagccacagtgat

SEQ ID NO: 1320874 - DNA, 15 bp, Homo sapiens
tggcagccacagtga

SEQ ID NO: 1320875 - DNA, 15 bp, Homo sapiens
atggcagccacagtg

SEQ ID NO: 1320876 - DNA, 15 bp, Homo sapiens
catggcagccacagt

SEQ ID NO: 1320877 - DNA, 15 bp, Homo sapiens
ccatggcagccacag

SEQ ID NO: 1320878 - DNA, 15 bp, Homo sapiens
accatggcagccaca

SEQ ID NO: 1320879 - DNA, 15 bp, Homo sapiens
caccatggcagccac

SEQ ID NO: 1320880 - DNA, 15 bp, Homo sapiens
ccaccatggcagcca

SEQ ID NO: 1320881 - DNA, 15 bp, Homo sapiens
tccaccatggcagcc

SEQ ID NO: 1320882 - DNA, 15 bp, Homo sapiens
atccaccatggcagc

SEQ ID NO: 1320883 - DNA, 15 bp, Homo sapiens
catccaccatggcag

SEQ ID NO: 1320884 - DNA, 15 bp, Homo sapiens
ccatccaccatggca

SEQ ID NO: 1320885 - DNA, 15 bp, Homo sapiens
tccatccaccatggc

SEQ ID NO: 1320886 - DNA, 15 bp, Homo sapiens
ctccatccaccatgg

SEQ ID NO: 1320887 - DNA, 15 bp, Homo sapiens
cctccatccaccatg

SEQ ID NO: 1320888 - DNA, 15 bp, Homo sapiens
gcctccatccaccat

SEQ ID NO: 1320889 - DNA, 15 bp, Homo sapiens
agcctccatccacca

SEQ ID NO: 1320890 - DNA, 15 bp, Homo sapiens
cagcctccatccacc

SEQ ID NO: 1320891 - DNA, 15 bp, Homo sapiens
ccagcctccatccac

SEQ ID NO: 1320892 - DNA, 15 bp, Homo sapiens
tccagcctccatcca

SEQ ID NO: 1320893 - DNA, 15 bp, Homo sapiens
gtccagcctccatcc

SEQ ID NO: 1320894 - DNA, 15 bp, Homo sapiens
tgtccagcctccatc

SEQ ID NO: 1320895 - DNA, 15 bp, Homo sapiens
ctgtccagcctccat

SEQ ID NO: 1320896 - DNA, 15 bp, Homo sapiens
tctgtccagcctcca

SEQ ID NO: 1320897 - DNA, 15 bp, Homo sapiens
ttctgtccagcctcc

SEQ ID NO: 1320898 - DNA, 15 bp, Homo sapiens
gttctgtccagcctc

SEQ ID NO: 1320899 - DNA, 15 bp, Homo sapiens
ggttctgtccagcct

SEQ ID NO: 1320900 - DNA, 15 bp, Homo sapiens
aggttctgtccagcc

SEQ ID NO: 1320901 - DNA, 15 bp, Homo sapiens
caggttctgtccagc

SEQ ID NO: 1320902 - DNA, 15 bp, Homo sapiens
acaggttctgtccag

SEQ ID NO: 1320903 - DNA, 15 bp, Homo sapiens
cacaggttctgtcca

SEQ ID NO: 1320904 - DNA, 15 bp, Homo sapiens
ccacaggttctgtcc

SEQ ID NO: 1320905 - DNA, 15 bp, Homo sapiens
accacaggttctgtc

SEQ ID NO: 1320906 - DNA, 15 bp, Homo sapiens
caccacaggttctgt

SEQ ID NO: 1320907 - DNA, 15 bp, Homo sapiens
tcaccacaggttctg

SEQ ID NO: 1320908 - DNA, 15 bp, Homo sapiens
atcaccacaggttct

SEQ ID NO: 1320909 - DNA, 15 bp, Homo sapiens
gatcaccacaggttc

SEQ ID NO: 1320910 - DNA, 15 bp, Homo sapiens
cgatcaccacaggtt

SEQ ID NO: 1320911 - DNA, 15 bp, Homo sapiens
ccgatcaccacaggt

SEQ ID NO: 1320912 - DNA, 15 bp, Homo sapiens
gccgatcaccacagg

SEQ ID NO: 1320913 - DNA, 15 bp, Homo sapiens
tgccgatcaccacag

SEQ ID NO: 1320914 - DNA, 15 bp, Homo sapiens
ctgccgatcaccaca

SEQ ID NO: 1320915 - DNA, 15 bp, Homo sapiens
actgccgatcaccac

SEQ ID NO: 1320916 - DNA, 15 bp, Homo sapiens
gactgccgatcacca

SEQ ID NO: 1320917 - DNA, 15 bp, Homo sapiens
agactgccgatcacc

SEQ ID NO: 1320918 - DNA, 15 bp, Homo sapiens
aagactgccgatcac

SEQ ID NO: 1320919 - DNA, 15 bp, Homo sapiens
aaagactgccgatca

SEQ ID NO: 1320920 - DNA, 15 bp, Homo sapiens
gaaagactgccgatc

SEQ ID NO: 1320921 - DNA, 15 bp, Homo sapiens
agaaagactgccgat

SEQ ID NO: 1320922 - DNA, 15 bp, Homo sapiens
cagaaagactgccga

SEQ ID NO: 1320923 - DNA, 15 bp, Homo sapiens
ccagaaagactgccg

SEQ ID NO: 1320924 - DNA, 15 bp, Homo sapiens
tccagaaagactgcc

SEQ ID NO: 1320925 - DNA, 15 bp, Homo sapiens
ctccagaaagactgc

SEQ ID NO: 1320926 - DNA, 15 bp, Homo sapiens
cctccagaaagactg

SEQ ID NO: 1320927 - DNA, 15 bp, Homo sapiens
tcctccagaaagact

SEQ ID NO: 1320928 - DNA, 15 bp, Homo sapiens
gtcctccagaaagac

SEQ ID NO: 1320929 - DNA, 15 bp, Homo sapiens
agtcctccagaaaga

SEQ ID NO: 1320930 - DNA, 15 bp, Homo sapiens
gagtcctccagaaag

SEQ ID NO: 1320931 - DNA, 15 bp, Homo sapiens
tgagtcctccagaaa

SEQ ID NO: 1320932 - DNA, 15 bp, Homo sapiens
gtgagtcctccagaa

SEQ ID NO: 1320933 - DNA, 15 bp, Homo sapiens
ggtgagtcctccaga

SEQ ID NO: 1320934 - DNA, 15 bp, Homo sapiens
tggtgagtcctccag

SEQ ID NO: 1320935 - DNA, 15 bp, Homo sapiens
ctggtgagtcctcca

SEQ ID NO: 1320936 - DNA, 15 bp, Homo sapiens
cctggtgagtcctcc

SEQ ID NO: 1320937 - DNA, 15 bp, Homo sapiens
ccctggtgagtcctc

SEQ ID NO: 1320938 - DNA, 15 bp, Homo sapiens
tccctggtgagtcct

SEQ ID NO: 1320939 - DNA, 15 bp, Homo sapiens
ctccctggtgagtcc

SEQ ID NO: 1320940 - DNA, 15 bp, Homo sapiens
cctccctggtgagtc

SEQ ID NO: 1320941 - DNA, 15 bp, Homo sapiens
ccctccctggtgagt

SEQ ID NO: 1320942 - DNA, 15 bp, Homo sapiens
cccctccctggtgag

SEQ ID NO: 1320943 - DNA, 15 bp, Homo sapiens
acccctccctggtga

SEQ ID NO: 1320944 - DNA, 15 bp, Homo sapiens
gacccctccctggtg

SEQ ID NO: 1320945 - DNA, 15 bp, Homo sapiens
agacccctccctggt

SEQ ID NO: 1320946 - DNA, 15 bp, Homo sapiens
gagacccctccctgg

SEQ ID NO: 1320947 - DNA, 15 bp, Homo sapiens
tgagacccctccctg

SEQ ID NO: 1320948 - DNA, 15 bp, Homo sapiens
ctgagacccctccct

SEQ ID NO: 1320949 - DNA, 15 bp, Homo sapiens
cctgagacccctccc

SEQ ID NO: 1320950 - DNA, 15 bp, Homo sapiens
ccctgagacccctcc

SEQ ID NO: 1320951 - DNA, 15 bp, Homo sapiens
accctgagacccctc

SEQ ID NO: 1320952 - DNA, 15 bp, Homo sapiens
caccctgagacccct

SEQ ID NO: 1320953 - DNA, 15 bp, Homo sapiens
ccaccctgagacccc

SEQ ID NO: 1320954 - DNA, 15 bp, Homo sapiens
cccaccctgagaccc

SEQ ID NO: 1320955 - DNA, 15 bp, Homo sapiens
gcccaccctgagacc

SEQ ID NO: 1320956 - DNA, 15 bp, Homo sapiens
tgcccaccctgagac

SEQ ID NO: 1320957 - DNA, 15 bp, Homo sapiens
atgcccaccctgaga

SEQ ID NO: 1320958 - DNA, 15 bp, Homo sapiens
gatgcccaccctgag

SEQ ID NO: 1320959 - DNA, 15 bp, Homo sapiens
agatgcccaccctga

SEQ ID NO: 1320960 - DNA, 15 bp, Homo sapiens
gagatgcccaccctg

SEQ ID NO: 1320961 - DNA, 15 bp, Homo sapiens
ggagatgcccaccct

SEQ ID NO: 1320962 - DNA, 15 bp, Homo sapiens
aggagatgcccaccc

SEQ ID NO: 1320963 - DNA, 15 bp, Homo sapiens
aaggagatgcccacc

SEQ ID NO: 1320964 - DNA, 15 bp, Homo sapiens
aaaggagatgcccac

SEQ ID NO: 1320965 - DNA, 15 bp, Homo sapiens
gaaaggagatgccca

SEQ ID NO: 1320966 - DNA, 15 bp, Homo sapiens
tgaaaggagatgccc

SEQ ID NO: 1320967 - DNA, 15 bp, Homo sapiens
gtgaaaggagatgcc

SEQ ID NO: 1320968 - DNA, 15 bp, Homo sapiens
ggtgaaaggagatgc

SEQ ID NO: 1320969 - DNA, 15 bp, Homo sapiens
aggtgaaaggagatg

SEQ ID NO: 1320970 - DNA, 15 bp, Homo sapiens
aaggtgaaaggagat

SEQ ID NO: 1320971 - DNA, 15 bp, Homo sapiens
gaaggtgaaaggaga

SEQ ID NO: 1320972 - DNA, 15 bp, Homo sapiens
ggaaggtgaaaggag

SEQ ID NO: 1320973 - DNA, 15 bp, Homo sapiens
aggaaggtgaaagga

SEQ ID NO: 1320974 - DNA, 15 bp, Homo sapiens
caggaaggtgaaagg

SEQ ID NO: 1320975 - DNA, 15 bp, Homo sapiens
acaggaaggtgaaag

SEQ ID NO: 1320976 - DNA, 15 bp, Homo sapiens
cacaggaaggtgaaa

SEQ ID NO: 1320977 - DNA, 15 bp, Homo sapiens
gcacaggaaggtgaa

SEQ ID NO: 1320978 - DNA, 15 bp, Homo sapiens
tgcacaggaaggtga

SEQ ID NO: 1320979 - DNA, 15 bp, Homo sapiens
atgcacaggaaggtg

SEQ ID NO: 1320980 - DNA, 15 bp, Homo sapiens
catgcacaggaaggt

SEQ ID NO: 1320981 - DNA, 15 bp, Homo sapiens
acatgcacaggaagg

SEQ ID NO: 1320982 - DNA, 15 bp, Homo sapiens
gacatgcacaggaag

SEQ ID NO: 1320983 - DNA, 15 bp, Homo sapiens
tgacatgcacaggaa

SEQ ID NO: 1320984 - DNA, 15 bp, Homo sapiens
gtgacatgcacagga

SEQ ID NO: 1320985 - DNA, 15 bp, Homo sapiens
agtgacatgcacagg

SEQ ID NO: 1320986 - DNA, 15 bp, Homo sapiens
cagtgacatgcacag

SEQ ID NO: 1320987 - DNA, 15 bp, Homo sapiens
gcagtgacatgcaca

SEQ ID NO: 1320988 - DNA, 15 bp, Homo sapiens
tgcagtgacatgcac

SEQ ID NO: 1320989 - DNA, 15 bp, Homo sapiens
gtgcagtgacatgca

SEQ ID NO: 1320990 - DNA, 15 bp, Homo sapiens
agtgcagtgacatgc

SEQ ID NO: 1320991 - DNA, 15 bp, Homo sapiens
cagtgcagtgacatg

SEQ ID NO: 1320992 - DNA, 15 bp, Homo sapiens
acagtgcagtgacat

SEQ ID NO: 1320993 - DNA, 15 bp, Homo sapiens
aacagtgcagtgaca

SEQ ID NO: 1320994 - DNA, 15 bp, Homo sapiens
gaacagtgcagtgac

SEQ ID NO: 1320995 - DNA, 15 bp, Homo sapiens
agaacagtgcagtga

SEQ ID NO: 1320996 - DNA, 15 bp, Homo sapiens
aagaacagtgcagtg

SEQ ID NO: 1320997 - DNA, 15 bp, Homo sapiens
gaagaacagtgcagt

SEQ ID NO: 1320998 - DNA, 15 bp, Homo sapiens
agaagaacagtgcag

SEQ ID NO: 1320999 - DNA, 15 bp, Homo sapiens
aagaagaacagtgca

SEQ ID NO: 1321000 - DNA, 15 bp, Homo sapiens
gaagaagaacagtgc

SEQ ID NO: 1321001 - DNA, 15 bp, Homo sapiens
ggaagaagaacagtg

SEQ ID NO: 1321002 - DNA, 15 bp, Homo sapiens
gggaagaagaacagt

SEQ ID NO: 1321003 - DNA, 15 bp, Homo sapiens
agggaagaagaacag

SEQ ID NO: 1321004 - DNA, 15 bp, Homo sapiens
gagggaagaagaaca

SEQ ID NO: 1321005 - DNA, 15 bp, Homo sapiens
ggagggaagaagaac

SEQ ID NO: 1321006 - DNA, 15 bp, Homo sapiens
gggagggaagaagaa

SEQ ID NO: 1321007 - DNA, 15 bp, Homo sapiens
agggagggaagaaga

SEQ ID NO: 1321008 - DNA, 15 bp, Homo sapiens
tcagggagggaagaa

SEQ ID NO: 1321009 - DNA, 15 bp, Homo sapiens
ttcagggagggaaga

SEQ ID NO: 1321010 - DNA, 15 bp, Homo sapiens
gttcagggagggaag

SEQ ID NO: 1321011 - DNA, 15 bp, Homo sapiens
tgttcagggagggaa

SEQ ID NO: 1321012 - DNA, 15 bp, Homo sapiens
ctgttcagggaggga

SEQ ID NO: 1321013 - DNA, 15 bp, Homo sapiens
gctgttcagggaggg

SEQ ID NO: 1321014 - DNA, 15 bp, Homo sapiens
tgctgttcagggagg

SEQ ID NO: 1321015 - DNA, 15 bp, Homo sapiens
gtgctgttcagggag

SEQ ID NO: 1321016 - DNA, 15 bp, Homo sapiens
tgtgctgttcaggga

SEQ ID NO: 1321017 - DNA, 15 bp, Homo sapiens
gtgtgctgttcaggg

SEQ ID NO: 1321018 - DNA, 15 bp, Homo sapiens
tgtgtgctgttcagg

SEQ ID NO: 1321019 - DNA, 15 bp, Homo sapiens
gtgtgtgctgttcag

SEQ ID NO: 1321020 - DNA, 15 bp, Homo sapiens
tgtgtgtgctgttca

SEQ ID NO: 1321021 - DNA, 15 bp, Homo sapiens
gtgtgtgtgctgttc

SEQ ID NO: 1321022 - DNA, 15 bp, Homo sapiens
agtgtgtgtgctgtt

SEQ ID NO: 1321023 - DNA, 15 bp, Homo sapiens
cagtgtgtgtgctgt

SEQ ID NO: 1321024 - DNA, 15 bp, Homo sapiens
gcagtgtgtgtgctg

SEQ ID NO: 1321025 - DNA, 15 bp, Homo sapiens
tgcagtgtgtgtgct

SEQ ID NO: 1321026 - DNA, 15 bp, Homo sapiens
atgcagtgtgtgtgc

SEQ ID NO: 1321027 - DNA, 15 bp, Homo sapiens
gatgcagtgtgtgtg

SEQ ID NO: 1321028 - DNA, 15 bp, Homo sapiens
ggatgcagtgtgtgt

SEQ ID NO: 1321029 - DNA, 15 bp, Homo sapiens
aggatgcagtgtgtg

SEQ ID NO: 1321030 - DNA, 15 bp, Homo sapiens
aaggatgcagtgtgt

SEQ ID NO: 1321031 - DNA, 15 bp, Homo sapiens
taaggatgcagtgtg

SEQ ID NO: 1321032 - DNA, 15 bp, Homo sapiens
ctaaggatgcagtgt

SEQ ID NO: 1321033 - DNA, 15 bp, Homo sapiens
actaaggatgcagtg

SEQ ID NO: 1321034 - DNA, 15 bp, Homo sapiens
aactaaggatgcagt

SEQ ID NO: 1321035 - DNA, 15 bp, Homo sapiens
aaactaaggatgcag

SEQ ID NO: 1321036 - DNA, 15 bp, Homo sapiens
gaaactaaggatgca

SEQ ID NO: 1321037 - DNA, 15 bp, Homo sapiens
tgaaactaaggatgc

SEQ ID NO: 1321038 - DNA, 15 bp, Homo sapiens
ctgaaactaaggatg

SEQ ID NO: 1321039 - DNA, 15 bp, Homo sapiens
cctgaaactaaggat

SEQ ID NO: 1321040 - DNA, 15 bp, Homo sapiens
ccctgaaactaagga

SEQ ID NO: 1321041 - DNA, 15 bp, Homo sapiens
cccctgaaactaagg

SEQ ID NO: 1321042 - DNA, 15 bp, Homo sapiens
acccctgaaactaag

SEQ ID NO: 1321043 - DNA, 15 bp, Homo sapiens
gacccctgaaactaa

SEQ ID NO: 1321044 - DNA, 15 bp, Homo sapiens
agacccctgaaacta

SEQ ID NO: 1321045 - DNA, 15 bp, Homo sapiens
cagacccctgaaact

SEQ ID NO: 1321046 - DNA, 15 bp, Homo sapiens
tcagacccctgaaac

SEQ ID NO: 1321047 - DNA, 15 bp, Homo sapiens
ttcagacccctgaaa

SEQ ID NO: 1321048 - DNA, 15 bp, Homo sapiens
tttcagacccctgaa

SEQ ID NO: 1321049 - DNA, 15 bp, Homo sapiens
ttttcagacccctga

SEQ ID NO: 1321050 - DNA, 15 bp, Homo sapiens
gttttcagacccctg

SEQ ID NO: 1321051 - DNA, 15 bp, Homo sapiens
tgttttcagacccct

SEQ ID NO: 1321052 - DNA, 15 bp, Homo sapiens
ttgttttcagacccc

SEQ ID NO: 1321053 - DNA, 15 bp, Homo sapiens
tttgttttcagaccc

SEQ ID NO: 1321054 - DNA, 15 bp, Homo sapiens
atttgttttcagacc

SEQ ID NO: 1321055 - DNA, 15 bp, Homo sapiens
catttgttttcagac

SEQ ID NO: 1321056 - DNA, 15 bp, Homo sapiens
gcatttgttttcaga

SEQ ID NO: 1321057 - DNA, 15 bp, Homo sapiens
agcatttgttttcag

SEQ ID NO: 1321058 - DNA, 15 bp, Homo sapiens
tagcatttgttttca

SEQ ID NO: 1321059 - DNA, 15 bp, Homo sapiens
gtagcatttgttttc

SEQ ID NO: 1321060 - DNA, 15 bp, Homo sapiens
cgtagcatttgtttt

SEQ ID NO: 1321061 - DNA, 15 bp, Homo sapiens
tcgtagcatttgttt

SEQ ID NO: 1321062 - DNA, 15 bp, Homo sapiens
gtcgtagcatttgtt

SEQ ID NO: 1321063 - DNA, 15 bp, Homo sapiens
ggtcgtagcatttgt

SEQ ID NO: 1321064 - DNA, 15 bp, Homo sapiens
tggtcgtagcatttg

SEQ ID NO: 1321065 - DNA, 15 bp, Homo sapiens
gtggtcgtagcattt

SEQ ID NO: 1321066 - DNA, 15 bp, Homo sapiens
ggtggtcgtagcatt

SEQ ID NO: 1321067 - DNA, 15 bp, Homo sapiens
aggtggtcgtagcat

SEQ ID NO: 1321068 - DNA, 15 bp, Homo sapiens
aaggtggtcgtagca

SEQ ID NO: 1321069 - DNA, 15 bp, Homo sapiens
caaggtggtcgtagc

SEQ ID NO: 1321070 - DNA, 15 bp, Homo sapiens
gcaaggtggtcgtag

SEQ ID NO: 1321071 - DNA, 15 bp, Homo sapiens
agcaaggtggtcgta

SEQ ID NO: 1321072 - DNA, 15 bp, Homo sapiens
aagcaaggtggtcgt

SEQ ID NO: 1321073 - DNA, 15 bp, Homo sapiens
aaagcaaggtggtcg

SEQ ID NO: 1321074 - DNA, 15 bp, Homo sapiens
caaagcaaggtggtc

SEQ ID NO: 1321075 - DNA, 15 bp, Homo sapiens
ccaaagcaaggtggt

SEQ ID NO: 1321076 - DNA, 15 bp, Homo sapiens
accaaagcaaggtgg

SEQ ID NO: 1321077 - DNA, 15 bp, Homo sapiens
caccaaagcaaggtg

SEQ ID NO: 1321078 - DNA, 15 bp, Homo sapiens
ccaccaaagcaaggt

SEQ ID NO: 1321079 - DNA, 15 bp, Homo sapiens
gccaccaaagcaagg

SEQ ID NO: 1321080 - DNA, 15 bp, Homo sapiens
agccaccaaagcaag

SEQ ID NO: 1321081 - DNA, 15 bp, Homo sapiens
aagccaccaaagcaa

SEQ ID NO: 1321082 - DNA, 15 bp, Homo sapiens
aaagccaccaaagca

SEQ ID NO: 1321083 - DNA, 15 bp, Homo sapiens
gaaaagccaccaaag

SEQ ID NO: 1321084 - DNA, 15 bp, Homo sapiens
agaaaagccaccaaa

SEQ ID NO: 1321085 - DNA, 15 bp, Homo sapiens
cagaaaagccaccaa

SEQ ID NO: 1321086 - DNA, 15 bp, Homo sapiens
tcagaaaagccacca

SEQ ID NO: 1321087 - DNA, 15 bp, Homo sapiens
ttcagaaaagccacc

SEQ ID NO: 1321088 - DNA, 15 bp, Homo sapiens
gttcagaaaagccac

SEQ ID NO: 1321089 - DNA, 15 bp, Homo sapiens
tgttcagaaaagcca

SEQ ID NO: 1321090 - DNA, 15 bp, Homo sapiens
ctgttcagaaaagcc

SEQ ID NO: 1321091 - DNA, 15 bp, Homo sapiens
cctgttcagaaaagc

SEQ ID NO: 1321092 - DNA, 15 bp, Homo sapiens
gcctgttcagaaaag

SEQ ID NO: 1321093 - DNA, 15 bp, Homo sapiens
tgcctgttcagaaaa

SEQ ID NO: 1321094 - DNA, 15 bp, Homo sapiens
atgcctgttcagaaa

SEQ ID NO: 1321095 - DNA, 15 bp, Homo sapiens
aatgcctgttcagaa

SEQ ID NO: 1321096 - DNA, 15 bp, Homo sapiens
caatgcctgttcaga

SEQ ID NO: 1321097 - DNA, 15 bp, Homo sapiens
acaatgcctgttcag

SEQ ID NO: 1321098 - DNA, 15 bp, Homo sapiens
cacaatgcctgttca

SEQ ID NO: 1321099 - DNA, 15 bp, Homo sapiens
tcacaatgcctgttc

SEQ ID NO: 1321100 - DNA, 15 bp, Homo sapiens
ctcacaatgcctgtt

SEQ ID NO: 1321101 - DNA, 15 bp, Homo sapiens
tctcacaatgcctgt

SEQ ID NO: 1321102 - DNA, 15 bp, Homo sapiens
ttctcacaatgcctg

SEQ ID NO: 1321103 - DNA, 15 bp, Homo sapiens
cttctcacaatgcct

SEQ ID NO: 1321104 - DNA, 15 bp, Homo sapiens
tcttctcacaatgcc

SEQ ID NO: 1321105 - DNA, 15 bp, Homo sapiens
ctcttctcacaatgc

SEQ ID NO: 1321106 - DNA, 15 bp, Homo sapiens
tctcttctcacaatg

SEQ ID NO: 1321107 - DNA, 15 bp, Homo sapiens
atctcttctcacaat

SEQ ID NO: 1321108 - DNA, 15 bp, Homo sapiens
catctcttctcacaa

SEQ ID NO: 1321109 - DNA, 15 bp, Homo sapiens
acatctcttctcaca

SEQ ID NO: 1321110 - DNA, 15 bp, Homo sapiens
aacatctcttctcac

SEQ ID NO: 1321111 - DNA, 15 bp, Homo sapiens
gaacatctcttctca

SEQ ID NO: 1321112 - DNA, 15 bp, Homo sapiens
agaacatctcttctc

SEQ ID NO: 1321113 - DNA, 15 bp, Homo sapiens
cagaacatctcttct

SEQ ID NO: 1321114 - DNA, 15 bp, Homo sapiens
ccagaacatctcttc

SEQ ID NO: 1321115 - DNA, 15 bp, Homo sapiens
gccagaacatctctt

SEQ ID NO: 1321116 - DNA, 15 bp, Homo sapiens
ggccagaacatctct

SEQ ID NO: 1321117 - DNA, 15 bp, Homo sapiens
tggccagaacatctc

SEQ ID NO: 1321118 - DNA, 15 bp, Homo sapiens
ctggccagaacatct

SEQ ID NO: 1321119 - DNA, 15 bp, Homo sapiens
cctggccagaacatc

SEQ ID NO: 1321120 - DNA, 15 bp, Homo sapiens
acctggccagaacat

SEQ ID NO: 1321121 - DNA, 15 bp, Homo sapiens
cacctggccagaaca

SEQ ID NO: 1321122 - DNA, 15 bp, Homo sapiens
tcacctggccagaac

SEQ ID NO: 1321123 - DNA, 15 bp, Homo sapiens
ttcacctggccagaa

SEQ ID NO: 1321124 - DNA, 15 bp, Homo sapiens
tttcacctggccaga

SEQ ID NO: 1321125 - DNA, 15 bp, Homo sapiens
ctttcacctggccag

SEQ ID NO: 1321126 - DNA, 15 bp, Homo sapiens
actttcacctggcca

SEQ ID NO: 1321127 - DNA, 15 bp, Homo sapiens
cactttcacctggcc

SEQ ID NO: 1321128 - DNA, 15 bp, Homo sapiens
ccactttcacctggc

SEQ ID NO: 1321129 - DNA, 15 bp, Homo sapiens
tccactttcacctgg

SEQ ID NO: 1321130 - DNA, 15 bp, Homo sapiens
gtccactttcacctg

SEQ ID NO: 1321131 - DNA, 15 bp, Homo sapiens
agtccactttcacct

SEQ ID NO: 1321132 - DNA, 15 bp, Homo sapiens
aagtccactttcacc

SEQ ID NO: 1321133 - DNA, 15 bp, Homo sapiens
aaagtccactttcac

SEQ ID NO: 1321134 - DNA, 15 bp, Homo sapiens
taaagtccactttca

SEQ ID NO: 1321135 - DNA, 15 bp, Homo sapiens
ataaagtccactttc

SEQ ID NO: 1321136 - DNA, 15 bp, Homo sapiens
aataaagtccacttt

SEQ ID NO: 1321137 - DNA, 15 bp, Homo sapiens
aaataaagtccactt

SEQ ID NO: 1321138 - DNA, 15 bp, Homo sapiens
aaaataaagtccact

SEQ ID NO: 1321139 - DNA, 15 bp, Homo sapiens
aaaaataaagtccac

SEQ ID NO: 1321140 - DNA, 15 bp, Homo sapiens
taaaaataaagtcca

SEQ ID NO: 1321141 - DNA, 15 bp, Homo sapiens
ctaaaaataaagtcc

SEQ ID NO: 1321142 - DNA, 15 bp, Homo sapiens
cctaaaaataaagtc

SEQ ID NO: 1321143 - DNA, 15 bp, Homo sapiens
acctaaaaataaagt

SEQ ID NO: 1321144 - DNA, 15 bp, Homo sapiens
tacctaaaaataaag

SEQ ID NO: 1321145 - DNA, 15 bp, Homo sapiens
ctacctaaaaataaa

SEQ ID NO: 1321146 - DNA, 15 bp, Homo sapiens
cctacctaaaaataa

SEQ ID NO: 1321147 - DNA, 15 bp, Homo sapiens
acctacctaaaaata

SEQ ID NO: 1321148 - DNA, 15 bp, Homo sapiens
aacctacctaaaaat

SEQ ID NO: 1321149 - DNA, 15 bp, Homo sapiens
aaacctacctaaaaa

SEQ ID NO: 1321150 - DNA, 15 bp, Homo sapiens
aaaacctacctaaaa

SEQ ID NO: 1321151 - DNA, 15 bp, Homo sapiens
aaaaacctacctaaa

SEQ ID NO: 1321152 - DNA, 15 bp, Homo sapiens
gaaaaacctacctaa

SEQ ID NO: 1321153 - DNA, 15 bp, Homo sapiens
tgaaaaacctaccta

SEQ ID NO: 1321154 - DNA, 15 bp, Homo sapiens
ctgaaaaacctacct

SEQ ID NO: 1321155 - DNA, 15 bp, Homo sapiens
actgaaaaacctacc

SEQ ID NO: 1321156 - DNA, 15 bp, Homo sapiens
aactgaaaaacctac

SEQ ID NO: 1321157 - DNA, 15 bp, Homo sapiens
aaactgaaaaaccta

SEQ ID NO: 1321158 - DNA, 15 bp, Homo sapiens
taaactgaaaaacct

SEQ ID NO: 1321159 - DNA, 15 bp, Homo sapiens
ctaaactgaaaaacc

SEQ ID NO: 1321160 - DNA, 15 bp, Homo sapiens
tctaaactgaaaaac

SEQ ID NO: 1321161 - DNA, 15 bp, Homo sapiens
ttctaaactgaaaaa

SEQ ID NO: 1321162 - DNA, 15 bp, Homo sapiens
tttctaaactgaaaa

SEQ ID NO: 1321163 - DNA, 15 bp, Homo sapiens
ctttctaaactgaaa

SEQ ID NO: 1321164 - DNA, 15 bp, Homo sapiens
cctttctaaactgaa

SEQ ID NO: 1321165 - DNA, 15 bp, Homo sapiens
acctttctaaactga

SEQ ID NO: 1321166 - DNA, 15 bp, Homo sapiens
aacctttctaaactg

SEQ ID NO: 1321167 - DNA, 15 bp, Homo sapiens
aaacctttctaaact

SEQ ID NO: 1321168 - DNA, 15 bp, Homo sapiens
gaaacctttctaaac

SEQ ID NO: 1321169 - DNA, 15 bp, Homo sapiens
ggaaacctttctaaa

SEQ ID NO: 1321170 - DNA, 15 bp, Homo sapiens
aggaaacctttctaa

SEQ ID NO: 1321171 - DNA, 15 bp, Homo sapiens
aaggaaacctttcta

SEQ ID NO: 1321172 - DNA, 15 bp, Homo sapiens
aaaggaaacctttct

SEQ ID NO: 1321173 - DNA, 15 bp, Homo sapiens
caaaggaaacctttc

SEQ ID NO: 1321174 - DNA, 15 bp, Homo sapiens
gcaaaggaaaccttt

SEQ ID NO: 1321175 - DNA, 15 bp, Homo sapiens
agcaaaggaaacctt

SEQ ID NO: 1321176 - DNA, 15 bp, Homo sapiens
aagcaaaggaaacct

SEQ ID NO: 1321177 - DNA, 15 bp, Homo sapiens
taagcaaaggaaacc

SEQ ID NO: 1321178 - DNA, 15 bp, Homo sapiens
ataagcaaaggaaac

SEQ ID NO: 1321179 - DNA, 15 bp, Homo sapiens
gataagcaaaggaaa

SEQ ID NO: 1321180 - DNA, 15 bp, Homo sapiens
ggataagcaaaggaa

SEQ ID NO: 1321181 - DNA, 15 bp, Homo sapiens
gggataagcaaagga

SEQ ID NO: 1321182 - DNA, 15 bp, Homo sapiens
agggataagcaaagg

SEQ ID NO: 1321183 - DNA, 15 bp, Homo sapiens
aagggataagcaaag

SEQ ID NO: 1321184 - DNA, 15 bp, Homo sapiens
caagggataagcaaa

SEQ ID NO: 1321185 - DNA, 15 bp, Homo sapiens
tcaagggataagcaa

SEQ ID NO: 1321186 - DNA, 15 bp, Homo sapiens
ctcaagggataagca

SEQ ID NO: 1321187 - DNA, 15 bp, Homo sapiens
cctcaagggataagc

SEQ ID NO: 1321188 - DNA, 15 bp, Homo sapiens
tcctcaagggataag

SEQ ID NO: 1321189 - DNA, 15 bp, Homo sapiens
gtcctcaagggataa

SEQ ID NO: 1321190 - DNA, 15 bp, Homo sapiens
agtcctcaagggata

SEQ ID NO: 1321191 - DNA, 15 bp, Homo sapiens
aagtcctcaagggat

SEQ ID NO: 1321192 - DNA, 15 bp, Homo sapiens
gaagtcctcaaggga

SEQ ID NO: 1321193 - DNA, 15 bp, Homo sapiens
agaagtcctcaaggg

SEQ ID NO: 1321194 - DNA, 15 bp, Homo sapiens
cagaagtcctcaagg

SEQ ID NO: 1321195 - DNA, 15 bp, Homo sapiens
acagaagtcctcaag

SEQ ID NO: 1321196 - DNA, 15 bp, Homo sapiens
cacagaagtcctcaa

SEQ ID NO: 1321197 - DNA, 15 bp, Homo sapiens
gcacagaagtcctca

SEQ ID NO: 1321198 - DNA, 15 bp, Homo sapiens
agcacagaagtcctc

SEQ ID NO: 1321199 - DNA, 15 bp, Homo sapiens
cagcacagaagtcct

SEQ ID NO: 1321200 - DNA, 15 bp, Homo sapiens
gcagcacagaagtcc

SEQ ID NO: 1321201 - DNA, 15 bp, Homo sapiens
agcagcacagaagtc

SEQ ID NO: 1321202 - DNA, 15 bp, Homo sapiens
cagcagcacagaagt

SEQ ID NO: 1321203 - DNA, 15 bp, Homo sapiens
gcagcagcacagaag

SEQ ID NO: 1321204 - DNA, 15 bp, Homo sapiens
agcagcagcacagaa

SEQ ID NO: 1321205 - DNA, 15 bp, Homo sapiens
aagcagcagcacaga

SEQ ID NO: 1321206 - DNA, 15 bp, Homo sapiens
gaagcagcagcacag

SEQ ID NO: 1321207 - DNA, 15 bp, Homo sapiens
agaagcagcagcaca

SEQ ID NO: 1321208 - DNA, 15 bp, Homo sapiens
gagaagcagcagcac

SEQ ID NO: 1321209 - DNA, 15 bp, Homo sapiens
ggagaagcagcagca

SEQ ID NO: 1321210 - DNA, 15 bp, Homo sapiens
aggagaagcagcagc

SEQ ID NO: 1321211 - DNA, 15 bp, Homo sapiens
gaggagaagcagcag

SEQ ID NO: 1321212 - DNA, 15 bp, Homo sapiens
ggaggagaagcagca

SEQ ID NO: 1321213 - DNA, 15 bp, Homo sapiens
tggaggagaagcagc

SEQ ID NO: 1321214 - DNA, 15 bp, Homo sapiens
atggaggagaagcag

SEQ ID NO: 1321215 - DNA, 15 bp, Homo sapiens
gatggaggagaagca

SEQ ID NO: 1321216 - DNA, 15 bp, Homo sapiens
agatggaggagaagc

SEQ ID NO: 1321217 - DNA, 15 bp, Homo sapiens
aagatggaggagaag

SEQ ID NO: 1321218 - DNA, 15 bp, Homo sapiens
caagatggaggagaa

SEQ ID NO: 1321219 - DNA, 15 bp, Homo sapiens
gcaagatggaggaga

SEQ ID NO: 1321220 - DNA, 15 bp, Homo sapiens
agcaagatggaggag

SEQ ID NO: 1321221 - DNA, 15 bp, Homo sapiens
tagcaagatggagga

SEQ ID NO: 1321222 - DNA, 15 bp, Homo sapiens
ctagcaagatggagg

SEQ ID NO: 1321223 - DNA, 15 bp, Homo sapiens
actagcaagatggag

SEQ ID NO: 1321224 - DNA, 15 bp, Homo sapiens
aactagcaagatgga

SEQ ID NO: 1321225 - DNA, 15 bp, Homo sapiens
taactagcaagatgg

SEQ ID NO: 1321226 - DNA, 15 bp, Homo sapiens
ttaactagcaagatg

SEQ ID NO: 1321227 - DNA, 15 bp, Homo sapiens
gttaactagcaagat

SEQ ID NO: 1321228 - DNA, 15 bp, Homo sapiens
tgttaactagcaaga

SEQ ID NO: 1321229 - DNA, 15 bp, Homo sapiens
ctgttaactagcaag

SEQ ID NO: 1321230 - DNA, 15 bp, Homo sapiens
tctgttaactagcaa

SEQ ID NO: 1321231 - DNA, 15 bp, Homo sapiens
ttctgttaactagca

SEQ ID NO: 1321232 - DNA, 15 bp, Homo sapiens
gttctgttaactagc

SEQ ID NO: 1321233 - DNA, 15 bp, Homo sapiens
tgttctgttaactag

SEQ ID NO: 1321234 - DNA, 15 bp, Homo sapiens
ctgttctgttaacta

SEQ ID NO: 1321235 - DNA, 15 bp, Homo sapiens
cctgttctgttaact

SEQ ID NO: 1321236 - DNA, 15 bp, Homo sapiens
ccctgttctgttaac

SEQ ID NO: 1321237 - DNA, 15 bp, Homo sapiens
cccctgttctgttaa

SEQ ID NO: 1321238 - DNA, 15 bp, Homo sapiens
gcccctgttctgtta

SEQ ID NO: 1321239 - DNA, 15 bp, Homo sapiens
tgcccctgttctgtt

SEQ ID NO: 1321240 - DNA, 15 bp, Homo sapiens
ctgcccctgttctgt

SEQ ID NO: 1321241 - DNA, 15 bp, Homo sapiens
tctgcccctgttctg

SEQ ID NO: 1321242 - DNA, 15 bp, Homo sapiens
ttctgcccctgttct

SEQ ID NO: 1321243 - DNA, 15 bp, Homo sapiens
cttctgcccctgttc

SEQ ID NO: 1321244 - DNA, 15 bp, Homo sapiens
acttctgcccctgtt

SEQ ID NO: 1321245 - DNA, 15 bp, Homo sapiens
cacttctgcccctgt

SEQ ID NO: 1321246 - DNA, 15 bp, Homo sapiens
gtcacttctgcccct

SEQ ID NO: 1321247 - DNA, 15 bp, Homo sapiens
tgtcacttctgcccc

SEQ ID NO: 1321248 - DNA, 15 bp, Homo sapiens
gtgtcacttctgccc

SEQ ID NO: 1321249 - DNA, 15 bp, Homo sapiens
ggtgtcacttctgcc

SEQ ID NO: 1321250 - DNA, 15 bp, Homo sapiens
tggtgtcacttctgc

SEQ ID NO: 1321251 - DNA, 15 bp, Homo sapiens
ttggtgtcacttctg

SEQ ID NO: 1321252 - DNA, 15 bp, Homo sapiens
attggtgtcacttct

SEQ ID NO: 1321253 - DNA, 15 bp, Homo sapiens
cattggtgtcacttc

SEQ ID NO: 1321254 - DNA, 15 bp, Homo sapiens
gcattggtgtcactt

SEQ ID NO: 1321255 - DNA, 15 bp, Homo sapiens
agcattggtgtcact

SEQ ID NO: 1321256 - DNA, 15 bp, Homo sapiens
gagcattggtgtcac

SEQ ID NO: 1321257 - DNA, 15 bp, Homo sapiens
agagcattggtgtca

SEQ ID NO: 1321258 - DNA, 15 bp, Homo sapiens
gagagcattggtgtc

SEQ ID NO: 1321259 - DNA, 15 bp, Homo sapiens
cgagagcattggtgt

SEQ ID NO: 1321260 - DNA, 15 bp, Homo sapiens
ccgagagcattggtg

SEQ ID NO: 1321261 - DNA, 15 bp, Homo sapiens
gccgagagcattggt

SEQ ID NO: 1321262 - DNA, 15 bp, Homo sapiens
ggccgagagcattgg

SEQ ID NO: 1321263 - DNA, 15 bp, Homo sapiens
tggccgagagcattg

SEQ ID NO: 1321264 - DNA, 15 bp, Homo sapiens
atggccgagagcatt

SEQ ID NO: 1321265 - DNA, 15 bp, Homo sapiens
catggccgagagcat

SEQ ID NO: 1321266 - DNA, 15 bp, Homo sapiens
gcatggccgagagca

SEQ ID NO: 1321267 - DNA, 15 bp, Homo sapiens
ggcatggccgagagc

SEQ ID NO: 1321268 - DNA, 15 bp, Homo sapiens
aggcatggccgagag

SEQ ID NO: 1321269 - DNA, 15 bp, Homo sapiens
caggcatggccgaga

SEQ ID NO: 1321270 - DNA, 15 bp, Homo sapiens
gcaggcatggccgag

SEQ ID NO: 1321271 - DNA, 15 bp, Homo sapiens
ggcaggcatggccga

SEQ ID NO: 1321272 - DNA, 15 bp, Homo sapiens
aggcaggcatggccg

SEQ ID NO: 1321273 - DNA, 15 bp, Homo sapiens
aaggcaggcatggcc

SEQ ID NO: 1321274 - DNA, 15 bp, Homo sapiens
caaggcaggcatggc

SEQ ID NO: 1321275 - DNA, 15 bp, Homo sapiens
ccaaggcaggcatgg

SEQ ID NO: 1321276 - DNA, 15 bp, Homo sapiens
cccaaggcaggcatg

SEQ ID NO: 1321277 - DNA, 15 bp, Homo sapiens
tcccaaggcaggcat

SEQ ID NO: 1321278 - DNA, 15 bp, Homo sapiens
ttcccaaggcaggca

SEQ ID NO: 1321279 - DNA, 15 bp, Homo sapiens
cttcccaaggcaggc

SEQ ID NO: 1321280 - DNA, 15 bp, Homo sapiens
gcttcccaaggcagg

SEQ ID NO: 1321281 - DNA, 15 bp, Homo sapiens
tgcttcccaaggcag

SEQ ID NO: 1321282 - DNA, 15 bp, Homo sapiens
gtgcttcccaaggca

SEQ ID NO: 1321283 - DNA, 15 bp, Homo sapiens
agtgcttcccaaggc

SEQ ID NO: 1321284 - DNA, 15 bp, Homo sapiens
tagtgcttcccaagg

SEQ ID NO: 1321285 - DNA, 15 bp, Homo sapiens
gtagtgcttcccaag

SEQ ID NO: 1321286 - DNA, 15 bp, Homo sapiens
ggtagtgcttcccaa

SEQ ID NO: 1321287 - DNA, 15 bp, Homo sapiens
cggtagtgcttccca

SEQ ID NO: 1321288 - DNA, 15 bp, Homo sapiens
ccggtagtgcttccc

SEQ ID NO: 1321289 - DNA, 15 bp, Homo sapiens
cccggtagtgcttcc

SEQ ID NO: 1321290 - DNA, 15 bp, Homo sapiens
gcccggtagtgcttc

SEQ ID NO: 1321291 - DNA, 15 bp, Homo sapiens
ggcccggtagtgctt

SEQ ID NO: 1321292 - DNA, 15 bp, Homo sapiens
gggcccggtagtgct

SEQ ID NO: 1321293 - DNA, 15 bp, Homo sapiens
ggggcccggtagtgc

SEQ ID NO: 1321294 - DNA, 15 bp, Homo sapiens
tggggcccggtagtg

SEQ ID NO: 1321295 - DNA, 15 bp, Homo sapiens
gtggggcccggtagt

SEQ ID NO: 1321296 - DNA, 15 bp, Homo sapiens
agtggggcccggtag

SEQ ID NO: 1321297 - DNA, 15 bp, Homo sapiens
cagtggggcccggta

SEQ ID NO: 1321298 - DNA, 15 bp, Homo sapiens
acagtggggcccggt

SEQ ID NO: 1321299 - DNA, 15 bp, Homo sapiens
aacagtggggcccgg

SEQ ID NO: 1321300 - DNA, 15 bp, Homo sapiens
aaacagtggggcccg

SEQ ID NO: 1321301 - DNA, 15 bp, Homo sapiens
taaacagtggggccc

SEQ ID NO: 1321302 - DNA, 15 bp, Homo sapiens
ctaaacagtggggcc

SEQ ID NO: 1321303 - DNA, 15 bp, Homo sapiens
tctaaacagtggggc

SEQ ID NO: 1321304 - DNA, 15 bp, Homo sapiens
ttctaaacagtgggg

SEQ ID NO: 1321305 - DNA, 15 bp, Homo sapiens
attctaaacagtggg

SEQ ID NO: 1321306 - DNA, 15 bp, Homo sapiens
gattctaaacagtgg

SEQ ID NO: 1321307 - DNA, 15 bp, Homo sapiens
agattctaaacagtg

SEQ ID NO: 1321308 - DNA, 15 bp, Homo sapiens
aagattctaaacagt

SEQ ID NO: 1321309 - DNA, 15 bp, Homo sapiens
taagattctaaacag

SEQ ID NO: 1321310 - DNA, 15 bp, Homo sapiens
ctaagattctaaaca

SEQ ID NO: 1321311 - DNA, 15 bp, Homo sapiens
tctaagattctaaac

SEQ ID NO: 1321312 - DNA, 15 bp, Homo sapiens
atctaagattctaaa

SEQ ID NO: 1321313 - DNA, 15 bp, Homo sapiens
catctaagattctaa

SEQ ID NO: 1321314 - DNA, 15 bp, Homo sapiens
ccatctaagattcta

SEQ ID NO: 1321315 - DNA, 15 bp, Homo sapiens
tccatctaagattct

SEQ ID NO: 1321316 - DNA, 15 bp, Homo sapiens
ttccatctaagattc

SEQ ID NO: 1321317 - DNA, 15 bp, Homo sapiens
tttccatctaagatt

SEQ ID NO: 1321318 - DNA, 15 bp, Homo sapiens
atttccatctaagat

SEQ ID NO: 1321319 - DNA, 15 bp, Homo sapiens
catttccatctaaga

SEQ ID NO: 1321320 - DNA, 15 bp, Homo sapiens
acatttccatctaag

SEQ ID NO: 1321321 - DNA, 15 bp, Homo sapiens
tacatttccatctaa

SEQ ID NO: 1321322 - DNA, 15 bp, Homo sapiens
gtacatttccatcta

SEQ ID NO: 1321323 - DNA, 15 bp, Homo sapiens
tgtacatttccatct

SEQ ID NO: 1321324 - DNA, 15 bp, Homo sapiens
gtgtacatttccatc

SEQ ID NO: 1321325 - DNA, 15 bp, Homo sapiens
tgtgtacatttccat

SEQ ID NO: 1321326 - DNA, 15 bp, Homo sapiens
ttgtgtacatttcca

SEQ ID NO: 1321327 - DNA, 15 bp, Homo sapiens
cttgtgtacatttcc

SEQ ID NO: 1321328 - DNA, 15 bp, Homo sapiens
ccttgtgtacatttc

SEQ ID NO: 1321329 - DNA, 15 bp, Homo sapiens
gccttgtgtacattt

SEQ ID NO: 1321330 - DNA, 15 bp, Homo sapiens
tgccttgtgtacatt

SEQ ID NO: 1321331 - DNA, 15 bp, Homo sapiens
atgccttgtgtacat

SEQ ID NO: 1321332 - DNA, 15 bp, Homo sapiens
aatgccttgtgtaca

SEQ ID NO: 1321333 - DNA, 15 bp, Homo sapiens
caatgccttgtgtac

SEQ ID NO: 1321334 - DNA, 15 bp, Homo sapiens
tcaatgccttgtgta

SEQ ID NO: 1321335 - DNA, 15 bp, Homo sapiens
gtcaatgccttgtgt

SEQ ID NO: 1321336 - DNA, 15 bp, Homo sapiens
tgtcaatgccttgtg

SEQ ID NO: 1321337 - DNA, 15 bp, Homo sapiens
gtgtcaatgccttgt

SEQ ID NO: 1321338 - DNA, 15 bp, Homo sapiens
tgtgtcaatgccttg

SEQ ID NO: 1321339 - DNA, 15 bp, Homo sapiens
gtgtgtcaatgcctt

SEQ ID NO: 1321340 - DNA, 15 bp, Homo sapiens
cgtgtgtcaatgcct

SEQ ID NO: 1321341 - DNA, 15 bp, Homo sapiens
gcgtgtgtcaatgcc

SEQ ID NO: 1321342 - DNA, 15 bp, Homo sapiens
ggcgtgtgtcaatgc

SEQ ID NO: 1321343 - DNA, 15 bp, Homo sapiens
aggcgtgtgtcaatg

SEQ ID NO: 1321344 - DNA, 15 bp, Homo sapiens
caggcgtgtgtcaat

SEQ ID NO: 1321345 - DNA, 15 bp, Homo sapiens
gcaggcgtgtgtcaa

SEQ ID NO: 1321346 - DNA, 15 bp, Homo sapiens
cgcaggcgtgtgtca

SEQ ID NO: 1321347 - DNA, 15 bp, Homo sapiens
ccgcaggcgtgtgtc

SEQ ID NO: 1321348 - DNA, 15 bp, Homo sapiens
cccgcaggcgtgtgt

SEQ ID NO: 1321349 - DNA, 15 bp, Homo sapiens
tcccgcaggcgtgtg

SEQ ID NO: 1321350 - DNA, 15 bp, Homo sapiens
ctcccgcaggcgtgt

SEQ ID NO: 1321351 - DNA, 15 bp, Homo sapiens
actcccgcaggcgtg

SEQ ID NO: 1321352 - DNA, 15 bp, Homo sapiens
cactcccgcaggcgt

SEQ ID NO: 1321353 - DNA, 15 bp, Homo sapiens
tcactcccgcaggcg

SEQ ID NO: 1321354 - DNA, 15 bp, Homo sapiens
gtcactcccgcaggc

SEQ ID NO: 1321355 - DNA, 15 bp, Homo sapiens
ggtcactcccgcagg

SEQ ID NO: 1321356 - DNA, 15 bp, Homo sapiens
gggtcactcccgcag

SEQ ID NO: 1321357 - DNA, 15 bp, Homo sapiens
tgggtcactcccgca

SEQ ID NO: 1321358 - DNA, 15 bp, Homo sapiens
ctgggtcactcccgc

SEQ ID NO: 1321359 - DNA, 15 bp, Homo sapiens
actgggtcactcccg

SEQ ID NO: 1321360 - DNA, 15 bp, Homo sapiens
cactgggtcactccc

SEQ ID NO: 1321361 - DNA, 15 bp, Homo sapiens
gcactgggtcactcc

SEQ ID NO: 1321362 - DNA, 15 bp, Homo sapiens
agcactgggtcactc

SEQ ID NO: 1321363 - DNA, 15 bp, Homo sapiens
aagcactgggtcact

SEQ ID NO: 1321364 - DNA, 15 bp, Homo sapiens
gaagcactgggtcac

SEQ ID NO: 1321365 - DNA, 15 bp, Homo sapiens
ggaagcactgggtca

SEQ ID NO: 1321366 - DNA, 15 bp, Homo sapiens
gggaagcactgggtc

SEQ ID NO: 1321367 - DNA, 15 bp, Homo sapiens
agggaagcactgggt

SEQ ID NO: 1321368 - DNA, 15 bp, Homo sapiens
gagggaagcactggg

SEQ ID NO: 1321369 - DNA, 15 bp, Homo sapiens
ggagggaagcactgg

SEQ ID NO: 1321370 - DNA, 15 bp, Homo sapiens
gggagggaagcactg

SEQ ID NO: 1321371 - DNA, 15 bp, Homo sapiens
tgggagggaagcact

SEQ ID NO: 1321372 - DNA, 15 bp, Homo sapiens
atgggagggaagcac

SEQ ID NO: 1321373 - DNA, 15 bp, Homo sapiens
catgggagggaagca

SEQ ID NO: 1321374 - DNA, 15 bp, Homo sapiens
ccatgggagggaagc

SEQ ID NO: 1321375 - DNA, 15 bp, Homo sapiens
cccatgggagggaag

SEQ ID NO: 1321376 - DNA, 15 bp, Homo sapiens
tcccatgggagggaa

SEQ ID NO: 1321377 - DNA, 15 bp, Homo sapiens
gtcccatgggaggga

SEQ ID NO: 1321378 - DNA, 15 bp, Homo sapiens
agtcccatgggaggg

SEQ ID NO: 1321379 - DNA, 15 bp, Homo sapiens
gagtcccatgggagg

SEQ ID NO: 1321380 - DNA, 15 bp, Homo sapiens
tgagtcccatgggag

SEQ ID NO: 1321381 - DNA, 15 bp, Homo sapiens
ctgagtcccatggga

SEQ ID NO: 1321382 - DNA, 15 bp, Homo sapiens
cctgagtcccatggg

SEQ ID NO: 1321383 - DNA, 15 bp, Homo sapiens
ccctgagtcccatgg

SEQ ID NO: 1321384 - DNA, 15 bp, Homo sapiens
accctgagtcccatg

SEQ ID NO: 1321385 - DNA, 15 bp, Homo sapiens
gaccctgagtcccat

SEQ ID NO: 1321386 - DNA, 15 bp, Homo sapiens
tgaccctgagtccca

SEQ ID NO: 1321387 - DNA, 15 bp, Homo sapiens
ctgaccctgagtccc

SEQ ID NO: 1321388 - DNA, 15 bp, Homo sapiens
gctgaccctgagtcc

SEQ ID NO: 1321389 - DNA, 15 bp, Homo sapiens
cgctgaccctgagtc

SEQ ID NO: 1321390 - DNA, 15 bp, Homo sapiens
acgctgaccctgagt

SEQ ID NO: 1321391 - DNA, 15 bp, Homo sapiens
cacgctgaccctgag

SEQ ID NO: 1321392 - DNA, 15 bp, Homo sapiens
ccacgctgaccctga

SEQ ID NO: 1321393 - DNA, 15 bp, Homo sapiens
cccacgctgaccctg

SEQ ID NO: 1321394 - DNA, 15 bp, Homo sapiens
tcccacgctgaccct

SEQ ID NO: 1321395 - DNA, 15 bp, Homo sapiens
ttcccacgctgaccc

SEQ ID NO: 1321396 - DNA, 15 bp, Homo sapiens
cttcccacgctgacc

SEQ ID NO: 1321397 - DNA, 15 bp, Homo sapiens
ccttcccacgctgac

SEQ ID NO: 1321398 - DNA, 15 bp, Homo sapiens
gccttcccacgctga

SEQ ID NO: 1321399 - DNA, 15 bp, Homo sapiens
tgccttcccacgctg

SEQ ID NO: 1321400 - DNA, 15 bp, Homo sapiens
ctgccttcccacgct

SEQ ID NO: 1321401 - DNA, 15 bp, Homo sapiens
gctgccttcccacgc

SEQ ID NO: 1321402 - DNA, 15 bp, Homo sapiens
agctgccttcccacg

SEQ ID NO: 1321403 - DNA, 15 bp, Homo sapiens
cagctgccttcccac

SEQ ID NO: 1321404 - DNA, 15 bp, Homo sapiens
ccagctgccttccca

SEQ ID NO: 1321405 - DNA, 15 bp, Homo sapiens
gccagctgccttccc

SEQ ID NO: 1321406 - DNA, 15 bp, Homo sapiens
tgccagctgccttcc

SEQ ID NO: 1321407 - DNA, 15 bp, Homo sapiens
ctgccagctgccttc

SEQ ID NO: 1321408 - DNA, 15 bp, Homo sapiens
cctgccagctgcctt

SEQ ID NO: 1321409 - DNA, 15 bp, Homo sapiens
ccctgccagctgcct

SEQ ID NO: 1321410 - DNA, 15 bp, Homo sapiens
tccctgccagctgcc

SEQ ID NO: 1321411 - DNA, 15 bp, Homo sapiens
gtccctgccagctgc

SEQ ID NO: 1321412 - DNA, 15 bp, Homo sapiens
tgtccctgccagctg

SEQ ID NO: 1321413 - DNA, 15 bp, Homo sapiens
ctgtccctgccagct

SEQ ID NO: 1321414 - DNA, 15 bp, Homo sapiens
cctgtccctgccagc

SEQ ID NO: 1321415 - DNA, 15 bp, Homo sapiens
tcctgtccctgccag

SEQ ID NO: 1321416 - DNA, 15 bp, Homo sapiens
ctcctgtccctgcca

SEQ ID NO: 1321417 - DNA, 15 bp, Homo sapiens
gctcctgtccctgcc

SEQ ID NO: 1321418 - DNA, 15 bp, Homo sapiens
ggctcctgtccctgc

SEQ ID NO: 1321419 - DNA, 15 bp, Homo sapiens
gggctcctgtccctg

SEQ ID NO: 1321420 - DNA, 15 bp, Homo sapiens
ggggctcctgtccct

SEQ ID NO: 1321421 - DNA, 15 bp, Homo sapiens
cggggctcctgtccc

SEQ ID NO: 1321422 - DNA, 15 bp, Homo sapiens
gcggggctcctgtcc

SEQ ID NO: 1321423 - DNA, 15 bp, Homo sapiens
ggcggggctcctgtc

SEQ ID NO: 1321424 - DNA, 15 bp, Homo sapiens
gggcggggctcctgt

SEQ ID NO: 1321425 - DNA, 15 bp, Homo sapiens
cgggcggggctcctg

SEQ ID NO: 1321426 - DNA, 15 bp, Homo sapiens
gcgggcggggctcct

SEQ ID NO: 1321427 - DNA, 15 bp, Homo sapiens
tgcgggcggggctcc

SEQ ID NO: 1321428 - DNA, 15 bp, Homo sapiens
ttgcgggcggggctc

SEQ ID NO: 1321429 - DNA, 15 bp, Homo sapiens
cttgcgggcggggct

SEQ ID NO: 1321430 - DNA, 15 bp, Homo sapiens
ccttgcgggcggggc

SEQ ID NO: 1321431 - DNA, 15 bp, Homo sapiens
accttgcgggcgggg

SEQ ID NO: 1321432 - DNA, 15 bp, Homo sapiens
caccttgcgggcggg

SEQ ID NO: 1321433 - DNA, 15 bp, Homo sapiens
ccaccttgcgggcgg

SEQ ID NO: 1321434 - DNA, 15 bp, Homo sapiens
tccaccttgcgggcg

SEQ ID NO: 1321435 - DNA, 15 bp, Homo sapiens
gtccaccttgcgggc

SEQ ID NO: 1321436 - DNA, 15 bp, Homo sapiens
agtccaccttgcggg

SEQ ID NO: 1321437 - DNA, 15 bp, Homo sapiens
cagtccaccttgcgg

SEQ ID NO: 1321438 - DNA, 15 bp, Homo sapiens
tcagtccaccttgcg

SEQ ID NO: 1321439 - DNA, 15 bp, Homo sapiens
ctcagtccaccttgc

SEQ ID NO: 1321440 - DNA, 15 bp, Homo sapiens
gctcagtccaccttg

SEQ ID NO: 1321441 - DNA, 15 bp, Homo sapiens
ggctcagtccacctt

SEQ ID NO: 1321442 - DNA, 15 bp, Homo sapiens
aggctcagtccacct

SEQ ID NO: 1321443 - DNA, 15 bp, Homo sapiens
gaggctcagtccacc

SEQ ID NO: 1321444 - DNA, 15 bp, Homo sapiens
tgaggctcagtccac

SEQ ID NO: 1321445 - DNA, 15 bp, Homo sapiens
gtgaggctcagtcca

SEQ ID NO: 1321446 - DNA, 15 bp, Homo sapiens
agtgaggctcagtcc

SEQ ID NO: 1321447 - DNA, 15 bp, Homo sapiens
aagtgaggctcagtc

SEQ ID NO: 1321448 - DNA, 15 bp, Homo sapiens
gaagtgaggctcagt

SEQ ID NO: 1321449 - DNA, 15 bp, Homo sapiens
ggaagtgaggctcag

SEQ ID NO: 1321450 - DNA, 15 bp, Homo sapiens
tggaagtgaggctca

SEQ ID NO: 1321451 - DNA, 15 bp, Homo sapiens
gtggaagtgaggctc

SEQ ID NO: 1321452 - DNA, 15 bp, Homo sapiens
tgtggaagtgaggct

SEQ ID NO: 1321453 - DNA, 15 bp, Homo sapiens
gtgtggaagtgaggc

SEQ ID NO: 1321454 - DNA, 15 bp, Homo sapiens
tgtgtggaagtgagg

SEQ ID NO: 1321455 - DNA, 15 bp, Homo sapiens
ttgtgtggaagtgag

SEQ ID NO: 1321456 - DNA, 15 bp, Homo sapiens
tttgtgtggaagtga

SEQ ID NO: 1321457 - DNA, 15 bp, Homo sapiens
ttttgtgtggaagtg

SEQ ID NO: 1321458 - DNA, 15 bp, Homo sapiens
gttttgtgtggaagt

SEQ ID NO: 1321459 - DNA, 15 bp, Homo sapiens
ggttttgtgtggaag

SEQ ID NO: 1321460 - DNA, 15 bp, Homo sapiens
tggttttgtgtggaa

SEQ ID NO: 1321461 - DNA, 15 bp, Homo sapiens
ctggttttgtgtgga

SEQ ID NO: 1321462 - DNA, 15 bp, Homo sapiens
tctggttttgtgtgg

SEQ ID NO: 1321463 - DNA, 15 bp, Homo sapiens
ctctggttttgtgtg

SEQ ID NO: 1321464 - DNA, 15 bp, Homo sapiens
actctggttttgtgt

SEQ ID NO: 1321465 - DNA, 15 bp, Homo sapiens
gactctggttttgtg

SEQ ID NO: 1321466 - DNA, 15 bp, Homo sapiens
ggactctggttttgt

SEQ ID NO: 1321467 - DNA, 15 bp, Homo sapiens
gggactctggttttg

SEQ ID NO: 1321468 - DNA, 15 bp, Homo sapiens
tgggactctggtttt

SEQ ID NO: 1321469 - DNA, 15 bp, Homo sapiens
atgggactctggttt

SEQ ID NO: 1321470 - DNA, 15 bp, Homo sapiens
gatgggactctggtt

SEQ ID NO: 1321471 - DNA, 15 bp, Homo sapiens
agatgggactctggt

SEQ ID NO: 1321472 - DNA, 15 bp, Homo sapiens
cagatgggactctgg

SEQ ID NO: 1321473 - DNA, 15 bp, Homo sapiens
gcagatgggactctg

SEQ ID NO: 1321474 - DNA, 15 bp, Homo sapiens
ggcagatgggactct

SEQ ID NO: 1321475 - DNA, 15 bp, Homo sapiens
gggcagatgggactc

SEQ ID NO: 1321476 - DNA, 15 bp, Homo sapiens
ggggcagatgggact

SEQ ID NO: 1321477 - DNA, 15 bp, Homo sapiens
tggggcagatgggac

SEQ ID NO: 1321478 - DNA, 15 bp, Homo sapiens
ctggggcagatggga

SEQ ID NO: 1321479 - DNA, 15 bp, Homo sapiens
tctggggcagatggg

SEQ ID NO: 1321480 - DNA, 15 bp, Homo sapiens
ctctggggcagatgg

SEQ ID NO: 1321481 - DNA, 15 bp, Homo sapiens
gctctggggcagatg

SEQ ID NO: 1321482 - DNA, 15 bp, Homo sapiens
cgctctggggcagat

SEQ ID NO: 1321483 - DNA, 15 bp, Homo sapiens
gcgctctggggcaga

SEQ ID NO: 1321484 - DNA, 15 bp, Homo sapiens
agcgctctggggcag

SEQ ID NO: 1321485 - DNA, 15 bp, Homo sapiens
gagcgctctggggca

SEQ ID NO: 1321486 - DNA, 15 bp, Homo sapiens
cgagcgctctggggc

SEQ ID NO: 1321487 - DNA, 15 bp, Homo sapiens
gcgagcgctctgggg

SEQ ID NO: 1321488 - DNA, 15 bp, Homo sapiens
agcgagcgctctggg

SEQ ID NO: 1321489 - DNA, 15 bp, Homo sapiens
gagcgagcgctctgg

SEQ ID NO: 1321490 - DNA, 15 bp, Homo sapiens
agagcgagcgctctg

SEQ ID NO: 1321491 - DNA, 15 bp, Homo sapiens
gagagcgagcgctct

SEQ ID NO: 1321492 - DNA, 15 bp, Homo sapiens
ggagagcgagcgctc

SEQ ID NO: 1321493 - DNA, 15 bp, Homo sapiens
aggagagcgagcgct

SEQ ID NO: 1321494 - DNA, 15 bp, Homo sapiens
gaggagagcgagcgc

SEQ ID NO: 1321495 - DNA, 15 bp, Homo sapiens
ggaggagagcgagcg

SEQ ID NO: 1321496 - DNA, 15 bp, Homo sapiens
gggaggagagcgagc

SEQ ID NO: 1321497 - DNA, 15 bp, Homo sapiens
ggggaggagagcgag

SEQ ID NO: 1321498 - DNA, 15 bp, Homo sapiens
aggggaggagagcga

SEQ ID NO: 1321499 - DNA, 15 bp, Homo sapiens
aaggggaggagagcg

SEQ ID NO: 1321500 - DNA, 15 bp, Homo sapiens
gaaggggaggagagc

SEQ ID NO: 1321501 - DNA, 15 bp, Homo sapiens
ggaaggggaggagag

SEQ ID NO: 1321502 - DNA, 15 bp, Homo sapiens
aggaaggggaggaga

SEQ ID NO: 1321503 - DNA, 15 bp, Homo sapiens
aaggaaggggaggag

SEQ ID NO: 1321504 - DNA, 15 bp, Homo sapiens
gaaggaaggggagga

SEQ ID NO: 1321505 - DNA, 15 bp, Homo sapiens
ggaaggaaggggagg

SEQ ID NO: 1321506 - DNA, 15 bp, Homo sapiens
cggaaggaaggggag

SEQ ID NO: 1321507 - DNA, 15 bp, Homo sapiens
gcggaaggaagggga

SEQ ID NO: 1321508 - DNA, 15 bp, Homo sapiens
agcggaaggaagggg

SEQ ID NO: 1321509 - DNA, 15 bp, Homo sapiens
gagcggaaggaaggg

SEQ ID NO: 1321510 - DNA, 15 bp, Homo sapiens
tgagcggaaggaagg

SEQ ID NO: 1321511 - DNA, 15 bp, Homo sapiens
ttgagcggaaggaag

SEQ ID NO: 1321512 - DNA, 15 bp, Homo sapiens
attgagcggaaggaa

SEQ ID NO: 1321513 - DNA, 15 bp, Homo sapiens
cattgagcggaagga

SEQ ID NO: 1321514 - DNA, 15 bp, Homo sapiens
gcattgagcggaagg

SEQ ID NO: 1321515 - DNA, 15 bp, Homo sapiens
tgcattgagcggaag

SEQ ID NO: 1321516 - DNA, 15 bp, Homo sapiens
ctgcattgagcggaa

SEQ ID NO: 1321517 - DNA, 15 bp, Homo sapiens
gctgcattgagcgga

SEQ ID NO: 1321518 - DNA, 15 bp, Homo sapiens
ggctgcattgagcgg

SEQ ID NO: 1321519 - DNA, 15 bp, Homo sapiens
aggctgcattgagcg

SEQ ID NO: 1321520 - DNA, 15 bp, Homo sapiens
caggctgcattgagc

SEQ ID NO: 1321521 - DNA, 15 bp, Homo sapiens
tcaggctgcattgag

SEQ ID NO: 1321522 - DNA, 15 bp, Homo sapiens
gtcaggctgcattga

SEQ ID NO: 1321523 - DNA, 15 bp, Homo sapiens
tgtcaggctgcattg

SEQ ID NO: 1321524 - DNA, 15 bp, Homo sapiens
gtgtcaggctgcatt

SEQ ID NO: 1321525 - DNA, 15 bp, Homo sapiens
cgtgtcaggctgcat

SEQ ID NO: 1321526 - DNA, 15 bp, Homo sapiens
gcgtgtcaggctgca

SEQ ID NO: 1321527 - DNA, 15 bp, Homo sapiens
ggcgtgtcaggctgc

SEQ ID NO: 1321528 - DNA, 15 bp, Homo sapiens
aggcgtgtcaggctg

SEQ ID NO: 1321529 - DNA, 15 bp, Homo sapiens
aaggcgtgtcaggct

SEQ ID NO: 1321530 - DNA, 15 bp, Homo sapiens
aaaggcgtgtcaggc

SEQ ID NO: 1321531 - DNA, 15 bp, Homo sapiens
caaaggcgtgtcagg

SEQ ID NO: 1321532 - DNA, 15 bp, Homo sapiens
tcaaaggcgtgtcag

SEQ ID NO: 1321533 - DNA, 15 bp, Homo sapiens
gtcaaaggcgtgtca

SEQ ID NO: 1321534 - DNA, 15 bp, Homo sapiens
ggtcaaaggcgtgtc

SEQ ID NO: 1321535 - DNA, 15 bp, Homo sapiens
tggtcaaaggcgtgt

SEQ ID NO: 1321536 - DNA, 15 bp, Homo sapiens
ctggtcaaaggcgtg

SEQ ID NO: 1321537 - DNA, 15 bp, Homo sapiens
tctggtcaaaggcgt

SEQ ID NO: 1321538 - DNA, 15 bp, Homo sapiens
ttctggtcaaaggcg

SEQ ID NO: 1321539 - DNA, 15 bp, Homo sapiens
gttctggtcaaaggc

SEQ ID NO: 1321540 - DNA, 15 bp, Homo sapiens
agttctggtcaaagg

SEQ ID NO: 1321541 - DNA, 15 bp, Homo sapiens
cagttctggtcaaag

SEQ ID NO: 1321542 - DNA, 15 bp, Homo sapiens
gcagttctggtcaaa

SEQ ID NO: 1321543 - DNA, 15 bp, Homo sapiens
tgcagttctggtcaa

SEQ ID NO: 1321544 - DNA, 15 bp, Homo sapiens
ttgcagttctggtca

SEQ ID NO: 1321545 - DNA, 15 bp, Homo sapiens
gttgcagttctggtc

SEQ ID NO: 1321546 - DNA, 15 bp, Homo sapiens
tgttgcagttctggt

SEQ ID NO: 1321547 - DNA, 15 bp, Homo sapiens
atgttgcagttctgg

SEQ ID NO: 1321548 - DNA, 15 bp, Homo sapiens
aatgttgcagttctg

SEQ ID NO: 1321549 - DNA, 15 bp, Homo sapiens
aaatgttgcagttct

SEQ ID NO: 1321550 - DNA, 15 bp, Homo sapiens
gaaatgttgcagttc

SEQ ID NO: 1321551 - DNA, 15 bp, Homo sapiens
tgaaatgttgcagtt

SEQ ID NO: 1321552 - DNA, 15 bp, Homo sapiens
ttgaaatgttgcagt

SEQ ID NO: 1321553 - DNA, 15 bp, Homo sapiens
tttgaaatgttgcag

SEQ ID NO: 1321554 - DNA, 15 bp, Homo sapiens
gtttgaaatgttgca

SEQ ID NO: 1321555 - DNA, 15 bp, Homo sapiens
tgtttgaaatgttgc

SEQ ID NO: 1321556 - DNA, 15 bp, Homo sapiens
gtgtttgaaatgttg

SEQ ID NO: 1321557 - DNA, 15 bp, Homo sapiens
tgtgtttgaaatgtt

SEQ ID NO: 1321558 - DNA, 15 bp, Homo sapiens
ttgtgtttgaaatgt

SEQ ID NO: 1321559 - DNA, 15 bp, Homo sapiens
tttgtgtttgaaatg

SEQ ID NO: 1321560 - DNA, 15 bp, Homo sapiens
gtttgtgtttgaaat

SEQ ID NO: 1321561 - DNA, 15 bp, Homo sapiens
ggtttgtgtttgaaa

SEQ ID NO: 1321562 - DNA, 15 bp, Homo sapiens
gggtttgtgtttgaa

SEQ ID NO: 1321563 - DNA, 15 bp, Homo sapiens
tgggtttgtgtttga

SEQ ID NO: 1321564 - DNA, 15 bp, Homo sapiens
ctgggtttgtgtttg

SEQ ID NO: 1321565 - DNA, 15 bp, Homo sapiens
tctgggtttgtgttt

SEQ ID NO: 1321566 - DNA, 15 bp, Homo sapiens
atctgggtttgtgtt

SEQ ID NO: 1321567 - DNA, 15 bp, Homo sapiens
gatctgggtttgtgt

SEQ ID NO: 1321568 - DNA, 15 bp, Homo sapiens
agatctgggtttgtg

SEQ ID NO: 1321569 - DNA, 15 bp, Homo sapiens
cagatctgggtttgt

SEQ ID NO: 1321570 - DNA, 15 bp, Homo sapiens
acagatctgggtttg

SEQ ID NO: 1321571 - DNA, 15 bp, Homo sapiens
aacagatctgggttt

SEQ ID NO: 1321572 - DNA, 15 bp, Homo sapiens
caacagatctgggtt

SEQ ID NO: 1321573 - DNA, 15 bp, Homo sapiens
ccaacagatctgggt

SEQ ID NO: 1321574 - DNA, 15 bp, Homo sapiens
cccaacagatctggg

SEQ ID NO: 1321575 - DNA, 15 bp, Homo sapiens
tcccaacagatctgg

SEQ ID NO: 1321576 - DNA, 15 bp, Homo sapiens
ttcccaacagatctg

SEQ ID NO: 1321577 - DNA, 15 bp, Homo sapiens
tttcccaacagatct

SEQ ID NO: 1321578 - DNA, 15 bp, Homo sapiens
atttcccaacagatc

SEQ ID NO: 1321579 - DNA, 15 bp, Homo sapiens
gatttcccaacagat

SEQ ID NO: 1321580 - DNA, 15 bp, Homo sapiens
ggatttcccaacaga

SEQ ID NO: 1321581 - DNA, 15 bp, Homo sapiens
aggatttcccaacag

SEQ ID NO: 1321582 - DNA, 15 bp, Homo sapiens
taggatttcccaaca

SEQ ID NO: 1321583 - DNA, 15 bp, Homo sapiens
ttaggatttcccaac

SEQ ID NO: 1321584 - DNA, 15 bp, Homo sapiens
attaggatttcccaa

SEQ ID NO: 1321585 - DNA, 15 bp, Homo sapiens
aattaggatttccca

SEQ ID NO: 1321586 - DNA, 15 bp, Homo sapiens
taattaggatttccc

SEQ ID NO: 1321587 - DNA, 15 bp, Homo sapiens
ttaattaggatttcc

SEQ ID NO: 1321588 - DNA, 15 bp, Homo sapiens
tttaattaggatttc

SEQ ID NO: 1321589 - DNA, 15 bp, Homo sapiens
ttttaattaggattt

SEQ ID NO: 1321590 - DNA, 15 bp, Homo sapiens
tttttaattaggatt

SEQ ID NO: 1321591 - DNA, 15 bp, Homo sapiens
gtttttaattaggat

SEQ ID NO: 1321592 - DNA, 15 bp, Homo sapiens
cgtttttaattagga

SEQ ID NO: 1321593 - DNA, 15 bp, Homo sapiens
acgtttttaattagg

SEQ ID NO: 1321594 - DNA, 15 bp, Homo sapiens
aacgtttttaattag

SEQ ID NO: 1321595 - DNA, 15 bp, Homo sapiens
caacgtttttaatta

SEQ ID NO: 1321596 - DNA, 15 bp, Homo sapiens
gcaacgtttttaatt

SEQ ID NO: 1321597 - DNA, 15 bp, Homo sapiens
tgcaacgtttttaat

SEQ ID NO: 1321598 - DNA, 15 bp, Homo sapiens
atgcaacgtttttaa

SEQ ID NO: 1321599 - DNA, 15 bp, Homo sapiens
aatgcaacgttttta

SEQ ID NO: 1321600 - DNA, 15 bp, Homo sapiens
gaatgcaacgttttt

SEQ ID NO: 1321601 - DNA, 15 bp, Homo sapiens
ggaatgcaacgtttt

SEQ ID NO: 1321602 - DNA, 15 bp, Homo sapiens
gggaatgcaacgttt

SEQ ID NO: 1321603 - DNA, 15 bp, Homo sapiens
tgggaatgcaacgtt

SEQ ID NO: 1321604 - DNA, 15 bp, Homo sapiens
ctgggaatgcaacgt

SEQ ID NO: 1321605 - DNA, 15 bp, Homo sapiens
cctgggaatgcaacg

SEQ ID NO: 1321606 - DNA, 15 bp, Homo sapiens
acctgggaatgcaac

SEQ ID NO: 1321607 - DNA, 15 bp, Homo sapiens
cacctgggaatgcaa

SEQ ID NO: 1321608 - DNA, 15 bp, Homo sapiens
ccacctgggaatgca

SEQ ID NO: 1321609 - DNA, 15 bp, Homo sapiens
gccacctgggaatgc

SEQ ID NO: 1321610 - DNA, 15 bp, Homo sapiens
tgccacctgggaatg

SEQ ID NO: 1321611 - DNA, 15 bp, Homo sapiens
gtgccacctgggaat

SEQ ID NO: 1321612 - DNA, 15 bp, Homo sapiens
tgtgccacctgggaa

SEQ ID NO: 1321613 - DNA, 15 bp, Homo sapiens
ttgtgccacctggga

SEQ ID NO: 1321614 - DNA, 15 bp, Homo sapiens
attgtgccacctggg

SEQ ID NO: 1321615 - DNA, 15 bp, Homo sapiens
gattgtgccacctgg

SEQ ID NO: 1321616 - DNA, 15 bp, Homo sapiens
tgattgtgccacctg

SEQ ID NO: 1321617 - DNA, 15 bp, Homo sapiens
gtgattgtgccacct

SEQ ID NO: 1321618 - DNA, 15 bp, Homo sapiens
tgtgattgtgccacc

SEQ ID NO: 1321619 - DNA, 15 bp, Homo sapiens
atgtgattgtgccac

SEQ ID NO: 1321620 - DNA, 15 bp, Homo sapiens
gatgtgattgtgcca

SEQ ID NO: 1321621 - DNA, 15 bp, Homo sapiens
ggatgtgattgtgcc

SEQ ID NO: 1321622 - DNA, 15 bp, Homo sapiens
aggatgtgattgtgc

SEQ ID NO: 1321623 - DNA, 15 bp, Homo sapiens
caggatgtgattgtg

SEQ ID NO: 1321624 - DNA, 15 bp, Homo sapiens
gcaggatgtgattgt

SEQ ID NO: 1321625 - DNA, 15 bp, Homo sapiens
ggcaggatgtgattg

SEQ ID NO: 1321626 - DNA, 15 bp, Homo sapiens
aggcaggatgtgatt

SEQ ID NO: 1321627 - DNA, 15 bp, Homo sapiens
taggcaggatgtgat

SEQ ID NO: 1321628 - DNA, 15 bp, Homo sapiens
ttaggcaggatgtga

SEQ ID NO: 1321629 - DNA, 15 bp, Homo sapiens
tttaggcaggatgtg

SEQ ID NO: 1321630 - DNA, 15 bp, Homo sapiens
ttttaggcaggatgt

SEQ ID NO: 1321631 - DNA, 15 bp, Homo sapiens
gttttaggcaggatg

SEQ ID NO: 1321632 - DNA, 15 bp, Homo sapiens
agttttaggcaggat

SEQ ID NO: 1321633 - DNA, 15 bp, Homo sapiens
aagttttaggcagga

SEQ ID NO: 1321634 - DNA, 15 bp, Homo sapiens
gaagttttaggcagg

SEQ ID NO: 1321635 - DNA, 15 bp, Homo sapiens
agaagttttaggcag

SEQ ID NO: 1321636 - DNA, 15 bp, Homo sapiens
cagaagttttaggca

SEQ ID NO: 1321637 - DNA, 15 bp, Homo sapiens
ccagaagttttaggc

SEQ ID NO: 1321638 - DNA, 15 bp, Homo sapiens
gccagaagttttagg

SEQ ID NO: 1321639 - DNA, 15 bp, Homo sapiens
ggccagaagttttag

SEQ ID NO: 1321640 - DNA, 15 bp, Homo sapiens
gggccagaagtttta

SEQ ID NO: 1321641 - DNA, 15 bp, Homo sapiens
tgggccagaagtttt

SEQ ID NO: 1321642 - DNA, 15 bp, Homo sapiens
gtgggccagaagttt

SEQ ID NO: 1321643 - DNA, 15 bp, Homo sapiens
tgtgggccagaagtt

SEQ ID NO: 1321644 - DNA, 15 bp, Homo sapiens
atgtgggccagaagt

SEQ ID NO: 1321645 - DNA, 15 bp, Homo sapiens
gatgtgggccagaag

SEQ ID NO: 1321646 - DNA, 15 bp, Homo sapiens
ggatgtgggccagaa

SEQ ID NO: 1321647 - DNA, 15 bp, Homo sapiens
gggatgtgggccaga

SEQ ID NO: 1321648 - DNA, 15 bp, Homo sapiens
tgggatgtgggccag

SEQ ID NO: 1321649 - DNA, 15 bp, Homo sapiens
gtgggatgtgggcca

SEQ ID NO: 1321650 - DNA, 15 bp, Homo sapiens
ggtgggatgtgggcc

SEQ ID NO: 1321651 - DNA, 15 bp, Homo sapiens
tggtgggatgtgggc

SEQ ID NO: 1321652 - DNA, 15 bp, Homo sapiens
gtggtgggatgtggg

SEQ ID NO: 1321653 - DNA, 15 bp, Homo sapiens
ggtggtgggatgtgg

SEQ ID NO: 1321654 - DNA, 15 bp, Homo sapiens
gggtggtgggatgtg

SEQ ID NO: 1321655 - DNA, 15 bp, Homo sapiens
tgggtggtgggatgt

SEQ ID NO: 1321656 - DNA, 15 bp, Homo sapiens
atctgggtggtggga

SEQ ID NO: 1321657 - DNA, 15 bp, Homo sapiens
catctgggtggtggg

SEQ ID NO: 1321658 - DNA, 15 bp, Homo sapiens
acatctgggtggtgg

SEQ ID NO: 1321659 - DNA, 15 bp, Homo sapiens
aacatctgggtggtg

SEQ ID NO: 1321660 - DNA, 15 bp, Homo sapiens
caacatctgggtggt

SEQ ID NO: 1321661 - DNA, 15 bp, Homo sapiens
tcaacatctgggtgg

SEQ ID NO: 1321662 - DNA, 15 bp, Homo sapiens
ttcaacatctgggtg

SEQ ID NO: 1321663 - DNA, 15 bp, Homo sapiens
tttcaacatctgggt

SEQ ID NO: 1321664 - DNA, 15 bp, Homo sapiens
ttttcaacatctggg

SEQ ID NO: 1321665 - DNA, 15 bp, Homo sapiens
cttttcaacatctgg

SEQ ID NO: 1321666 - DNA, 15 bp, Homo sapiens
tcttttcaacatctg

SEQ ID NO: 1321667 - DNA, 15 bp, Homo sapiens
ttcttttcaacatct

SEQ ID NO: 1321668 - DNA, 15 bp, Homo sapiens
tttcttttcaacatc

SEQ ID NO: 1321669 - DNA, 15 bp, Homo sapiens
gtttcttttcaacat

SEQ ID NO: 1321670 - DNA, 15 bp, Homo sapiens
ggtttcttttcaaca

SEQ ID NO: 1321671 - DNA, 15 bp, Homo sapiens
aggtttcttttcaac

SEQ ID NO: 1321672 - DNA, 15 bp, Homo sapiens
aaggtttcttttcaa

SEQ ID NO: 1321673 - DNA, 15 bp, Homo sapiens
aaaggtttcttttca

SEQ ID NO: 1321674 - DNA, 15 bp, Homo sapiens
gaaaggtttcttttc

SEQ ID NO: 1321675 - DNA, 15 bp, Homo sapiens
agaaaggtttctttt

SEQ ID NO: 1321676 - DNA, 15 bp, Homo sapiens
gagaaaggtttcttt

SEQ ID NO: 1321677 - DNA, 15 bp, Homo sapiens
agagaaaggtttctt

SEQ ID NO: 1321678 - DNA, 15 bp, Homo sapiens
cagagaaaggtttct

SEQ ID NO: 1321679 - DNA, 15 bp, Homo sapiens
gcagagaaaggtttc

SEQ ID NO: 1321680 - DNA, 15 bp, Homo sapiens
agcagagaaaggttt

SEQ ID NO: 1321681 - DNA, 15 bp, Homo sapiens
aagcagagaaaggtt

SEQ ID NO: 1321682 - DNA, 15 bp, Homo sapiens
taagcagagaaaggt

SEQ ID NO: 1321683 - DNA, 15 bp, Homo sapiens
ttaagcagagaaagg

SEQ ID NO: 1321684 - DNA, 15 bp, Homo sapiens
gttaagcagagaaag

SEQ ID NO: 1321685 - DNA, 15 bp, Homo sapiens
tgttaagcagagaaa

SEQ ID NO: 1321686 - DNA, 15 bp, Homo sapiens
gtgttaagcagagaa

SEQ ID NO: 1321687 - DNA, 15 bp, Homo sapiens
ggtgttaagcagaga

SEQ ID NO: 1321688 - DNA, 15 bp, Homo sapiens
tggtgttaagcagag

SEQ ID NO: 1321689 - DNA, 15 bp, Homo sapiens
ttggtgttaagcaga

SEQ ID NO: 1321690 - DNA, 15 bp, Homo sapiens
tttggtgttaagcag

SEQ ID NO: 1321691 - DNA, 15 bp, Homo sapiens
ttttggtgttaagca

SEQ ID NO: 1321692 - DNA, 15 bp, Homo sapiens
gttttggtgttaagc

SEQ ID NO: 1321693 - DNA, 15 bp, Homo sapiens
ggttttggtgttaag

SEQ ID NO: 1321694 - DNA, 15 bp, Homo sapiens
aggttttggtgttaa

SEQ ID NO: 1321695 - DNA, 15 bp, Homo sapiens
caggttttggtgtta

SEQ ID NO: 1321696 - DNA, 15 bp, Homo sapiens
gcaggttttggtgtt

SEQ ID NO: 1321697 - DNA, 15 bp, Homo sapiens
tgcaggttttggtgt

SEQ ID NO: 1321698 - DNA, 15 bp, Homo sapiens
gtgcaggttttggtg

SEQ ID NO: 1321699 - DNA, 15 bp, Homo sapiens
agtgcaggttttggt

SEQ ID NO: 1321700 - DNA, 15 bp, Homo sapiens
aagtgcaggttttgg

SEQ ID NO: 1321701 - DNA, 15 bp, Homo sapiens
gaagtgcaggttttg

SEQ ID NO: 1321702 - DNA, 15 bp, Homo sapiens
tgaagtgcaggtttt

SEQ ID NO: 1321703 - DNA, 15 bp, Homo sapiens
ttgaagtgcaggttt

SEQ ID NO: 1321704 - DNA, 15 bp, Homo sapiens
cttgaagtgcaggtt

SEQ ID NO: 1321705 - DNA, 15 bp, Homo sapiens
ccttgaagtgcaggt

SEQ ID NO: 1321706 - DNA, 15 bp, Homo sapiens
accttgaagtgcagg

SEQ ID NO: 1321707 - DNA, 15 bp, Homo sapiens
aaccttgaagtgcag

SEQ ID NO: 1321708 - DNA, 15 bp, Homo sapiens
aaaccttgaagtgca

SEQ ID NO: 1321709 - DNA, 15 bp, Homo sapiens
gaaaccttgaagtgc

SEQ ID NO: 1321710 - DNA, 15 bp, Homo sapiens
agaaaccttgaagtg

SEQ ID NO: 1321711 - DNA, 15 bp, Homo sapiens
aagaaaccttgaagt

SEQ ID NO: 1321712 - DNA, 15 bp, Homo sapiens
aaagaaaccttgaag

SEQ ID NO: 1321713 - DNA, 15 bp, Homo sapiens
taaagaaaccttgaa

SEQ ID NO: 1321714 - DNA, 15 bp, Homo sapiens
ctaaagaaaccttga

SEQ ID NO: 1321715 - DNA, 15 bp, Homo sapiens
cctaaagaaaccttg

SEQ ID NO: 1321716 - DNA, 15 bp, Homo sapiens
ccctaaagaaacctt

SEQ ID NO: 1321717 - DNA, 15 bp, Homo sapiens
cccctaaagaaacct

SEQ ID NO: 1321718 - DNA, 15 bp, Homo sapiens
tcccctaaagaaacc

SEQ ID NO: 1321719 - DNA, 15 bp, Homo sapiens
gtcccctaaagaaac

SEQ ID NO: 1321720 - DNA, 15 bp, Homo sapiens
tgtcccctaaagaaa

SEQ ID NO: 1321721 - DNA, 15 bp, Homo sapiens
ttgtcccctaaagaa

SEQ ID NO: 1321722 - DNA, 15 bp, Homo sapiens
tttgtcccctaaaga

SEQ ID NO: 1321723 - DNA, 15 bp, Homo sapiens
ctttgtcccctaaag

SEQ ID NO: 1321724 - DNA, 15 bp, Homo sapiens
tctttgtcccctaaa

SEQ ID NO: 1321725 - DNA, 15 bp, Homo sapiens
ttctttgtcccctaa

SEQ ID NO: 1321726 - DNA, 15 bp, Homo sapiens
tttctttgtccccta

SEQ ID NO: 1321727 - DNA, 15 bp, Homo sapiens
ttttctttgtcccct

SEQ ID NO: 1321728 - DNA, 15 bp, Homo sapiens
tttttctttgtcccc

SEQ ID NO: 1321729 - DNA, 15 bp, Homo sapiens
ttttttctttgtccc

SEQ ID NO: 1321730 - DNA, 15 bp, Homo sapiens
tttttttctttgtcc

SEQ ID NO: 1321731 - DNA, 15 bp, Homo sapiens
ttttttttctttgtc

SEQ ID NO: 1321732 - DNA, 15 bp, Homo sapiens
ctttttttttctttg

SEQ ID NO: 1321733 - DNA, 15 bp, Homo sapiens
actttttttttcttt

SEQ ID NO: 1321734 - DNA, 15 bp, Homo sapiens
tactttttttttctt

SEQ ID NO: 1321735 - DNA, 15 bp, Homo sapiens
gtactttttttttct

SEQ ID NO: 1321736 - DNA, 15 bp, Homo sapiens
tgtactttttttttc

SEQ ID NO: 1321737 - DNA, 15 bp, Homo sapiens
gtgtacttttttttt

SEQ ID NO: 1321738 - DNA, 15 bp, Homo sapiens
tgtgtactttttttt

SEQ ID NO: 1321739 - DNA, 15 bp, Homo sapiens
gtgtgtacttttttt

SEQ ID NO: 1321740 - DNA, 15 bp, Homo sapiens
tgtgtgtactttttt

SEQ ID NO: 1321741 - DNA, 15 bp, Homo sapiens
atgtgtgtacttttt

SEQ ID NO: 1321742 - DNA, 15 bp, Homo sapiens
catgtgtgtactttt

SEQ ID NO: 1321743 - DNA, 15 bp, Homo sapiens
gcatgtgtgtacttt

SEQ ID NO: 1321744 - DNA, 15 bp, Homo sapiens
tgcatgtgtgtactt

SEQ ID NO: 1321745 - DNA, 15 bp, Homo sapiens
ctgcatgtgtgtact

SEQ ID NO: 1321746 - DNA, 15 bp, Homo sapiens
tctgcatgtgtgtac

SEQ ID NO: 1321747 - DNA, 15 bp, Homo sapiens
ctctgcatgtgtgta

SEQ ID NO: 1321748 - DNA, 15 bp, Homo sapiens
actctgcatgtgtgt

SEQ ID NO: 1321749 - DNA, 15 bp, Homo sapiens
aactctgcatgtgtg

SEQ ID NO: 1321750 - DNA, 15 bp, Homo sapiens
gaactctgcatgtgt

SEQ ID NO: 1321751 - DNA, 15 bp, Homo sapiens
tgaactctgcatgtg

SEQ ID NO: 1321752 - DNA, 15 bp, Homo sapiens
ctgaactctgcatgt

SEQ ID NO: 1321753 - DNA, 15 bp, Homo sapiens
gctgaactctgcatg

SEQ ID NO: 1321754 - DNA, 15 bp, Homo sapiens
ggctgaactctgcat

SEQ ID NO: 1321755 - DNA, 15 bp, Homo sapiens
aggctgaactctgca

SEQ ID NO: 1321756 - DNA, 15 bp, Homo sapiens
taggctgaactctgc

SEQ ID NO: 1321757 - DNA, 15 bp, Homo sapiens
gtaggctgaactctg

SEQ ID NO: 1321758 - DNA, 15 bp, Homo sapiens
tgtaggctgaactct

SEQ ID NO: 1321759 - DNA, 15 bp, Homo sapiens
atgtaggctgaactc

SEQ ID NO: 1321760 - DNA, 15 bp, Homo sapiens
catgtaggctgaact

SEQ ID NO: 1321761 - DNA, 15 bp, Homo sapiens
acatgtaggctgaac

SEQ ID NO: 1321762 - DNA, 15 bp, Homo sapiens
aacatgtaggctgaa

SEQ ID NO: 1321763 - DNA, 15 bp, Homo sapiens
gaacatgtaggctga

SEQ ID NO: 1321764 - DNA, 15 bp, Homo sapiens
tgaacatgtaggctg

SEQ ID NO: 1321765 - DNA, 15 bp, Homo sapiens
atgaacatgtaggct

SEQ ID NO: 1321766 - DNA, 15 bp, Homo sapiens
aatgaacatgtaggc

SEQ ID NO: 1321767 - DNA, 15 bp, Homo sapiens
caatgaacatgtagg

SEQ ID NO: 1321768 - DNA, 15 bp, Homo sapiens
ctcaatgaacatgta

SEQ ID NO: 1321769 - DNA, 15 bp, Homo sapiens
cctcaatgaacatgt

SEQ ID NO: 1321770 - DNA, 15 bp, Homo sapiens
tcctcaatgaacatg

SEQ ID NO: 1321771 - DNA, 15 bp, Homo sapiens
ttcctcaatgaacat

SEQ ID NO: 1321772 - DNA, 15 bp, Homo sapiens
tttcctcaatgaaca

SEQ ID NO: 1321773 - DNA, 15 bp, Homo sapiens
ttttcctcaatgaac

SEQ ID NO: 1321774 - DNA, 15 bp, Homo sapiens
tttttcctcaatgaa

SEQ ID NO: 1321775 - DNA, 15 bp, Homo sapiens
ctttttcctcaatga

SEQ ID NO: 1321776 - DNA, 15 bp, Homo sapiens
tctttttcctcaatg

SEQ ID NO: 1321777 - DNA, 15 bp, Homo sapiens
ctctttttcctcaat

SEQ ID NO: 1321778 - DNA, 15 bp, Homo sapiens
gctctttttcctcaa

SEQ ID NO: 1321779 - DNA, 15 bp, Homo sapiens
cgctctttttcctca

SEQ ID NO: 1321780 - DNA, 15 bp, Homo sapiens
acgctctttttcctc

SEQ ID NO: 1321781 - DNA, 15 bp, Homo sapiens
cacgctctttttcct

SEQ ID NO: 1321782 - DNA, 15 bp, Homo sapiens
ccacgctctttttcc

SEQ ID NO: 1321783 - DNA, 15 bp, Homo sapiens
gccacgctctttttc

SEQ ID NO: 1321784 - DNA, 15 bp, Homo sapiens
agccacgctcttttt

SEQ ID NO: 1321785 - DNA, 15 bp, Homo sapiens
aagccacgctctttt

SEQ ID NO: 1321786 - DNA, 15 bp, Homo sapiens
taagccacgctcttt

SEQ ID NO: 1321787 - DNA, 15 bp, Homo sapiens
ataagccacgctctt

SEQ ID NO: 1321788 - DNA, 15 bp, Homo sapiens
aataagccacgctct

SEQ ID NO: 1321789 - DNA, 15 bp, Homo sapiens
gaataagccacgctc

SEQ ID NO: 1321790 - DNA, 15 bp, Homo sapiens
tgaataagccacgct

SEQ ID NO: 1321791 - DNA, 15 bp, Homo sapiens
atgaataagccacgc

SEQ ID NO: 1321792 - DNA, 15 bp, Homo sapiens
gatgaataagccacg

SEQ ID NO: 1321793 - DNA, 15 bp, Homo sapiens
agatgaataagccac

SEQ ID NO: 1321794 - DNA, 15 bp, Homo sapiens
aagatgaataagcca

SEQ ID NO: 1321795 - DNA, 15 bp, Homo sapiens
aaagatgaataagcc

SEQ ID NO: 1321796 - DNA, 15 bp, Homo sapiens
gaaagatgaataagc

SEQ ID NO: 1321797 - DNA, 15 bp, Homo sapiens
tgaaagatgaataag

SEQ ID NO: 1321798 - DNA, 15 bp, Homo sapiens
ttgaaagatgaataa

SEQ ID NO: 1321799 - DNA, 15 bp, Homo sapiens
attgaaagatgaata

SEQ ID NO: 1321800 - DNA, 15 bp, Homo sapiens
gattgaaagatgaat

SEQ ID NO: 1321801 - DNA, 15 bp, Homo sapiens
agattgaaagatgaa

SEQ ID NO: 1321802 - DNA, 15 bp, Homo sapiens
aagattgaaagatga

SEQ ID NO: 1321803 - DNA, 15 bp, Homo sapiens
aaagattgaaagatg

SEQ ID NO: 1321804 - DNA, 15 bp, Homo sapiens
aaaagattgaaagat

SEQ ID NO: 1321805 - DNA, 15 bp, Homo sapiens
caaaagattgaaaga

SEQ ID NO: 1321806 - DNA, 15 bp, Homo sapiens
tcaaaagattgaaag

SEQ ID NO: 1321807 - DNA, 15 bp, Homo sapiens
atcaaaagattgaaa

SEQ ID NO: 1321808 - DNA, 15 bp, Homo sapiens
aatcaaaagattgaa

SEQ ID NO: 1321809 - DNA, 15 bp, Homo sapiens
caatcaaaagattga

SEQ ID NO: 1321810 - DNA, 15 bp, Homo sapiens
acaatcaaaagattg

SEQ ID NO: 1321811 - DNA, 15 bp, Homo sapiens
aacaatcaaaagatt

SEQ ID NO: 1321812 - DNA, 15 bp, Homo sapiens
caacaatcaaaagat

SEQ ID NO: 1321813 - DNA, 15 bp, Homo sapiens
ccaacaatcaaaaga

SEQ ID NO: 1321814 - DNA, 15 bp, Homo sapiens
gccaacaatcaaaag

SEQ ID NO: 1321815 - DNA, 15 bp, Homo sapiens
tgccaacaatcaaaa

SEQ ID NO: 1321816 - DNA, 15 bp, Homo sapiens
atgccaacaatcaaa

SEQ ID NO: 1321817 - DNA, 15 bp, Homo sapiens
aatgccaacaatcaa

SEQ ID NO: 1321818 - DNA, 15 bp, Homo sapiens
taatgccaacaatca

SEQ ID NO: 1321819 - DNA, 15 bp, Homo sapiens
ataatgccaacaatc

SEQ ID NO: 1321820 - DNA, 15 bp, Homo sapiens
cataatgccaacaat

SEQ ID NO: 1321821 - DNA, 15 bp, Homo sapiens
tcataatgccaacaa

SEQ ID NO: 1321822 - DNA, 15 bp, Homo sapiens
atcataatgccaaca

SEQ ID NO: 1321823 - DNA, 15 bp, Homo sapiens
aatcataatgccaac

SEQ ID NO: 1321824 - DNA, 15 bp, Homo sapiens
taatcataatgccaa

SEQ ID NO: 1321825 - DNA, 15 bp, Homo sapiens
ataatcataatgcca

SEQ ID NO: 1321826 - DNA, 15 bp, Homo sapiens
cataatcataatgcc

SEQ ID NO: 1321827 - DNA, 15 bp, Homo sapiens
tcataatcataatgc

SEQ ID NO: 1321828 - DNA, 15 bp, Homo sapiens
atcataatcataatg

SEQ ID NO: 1321829 - DNA, 15 bp, Homo sapiens
aatcataatcataat

SEQ ID NO: 1321830 - DNA, 15 bp, Homo sapiens
taatcataatcataa

SEQ ID NO: 1321831 - DNA, 15 bp, Homo sapiens
ataatcataatcata

SEQ ID NO: 1321832 - DNA, 15 bp, Homo sapiens
cataatcataatcat

SEQ ID NO: 1321833 - DNA, 15 bp, Homo sapiens
tcataatcataatca

SEQ ID NO: 1321834 - DNA, 15 bp, Homo sapiens
atcataatcataatc

SEQ ID NO: 1321835 - DNA, 15 bp, Homo sapiens
ttaatcataatcata

SEQ ID NO: 1321836 - DNA, 15 bp, Homo sapiens
attaatcataatcat

SEQ ID NO: 1321837 - DNA, 15 bp, Homo sapiens
aattaatcataatca

SEQ ID NO: 1321838 - DNA, 15 bp, Homo sapiens
taattaatcataatc

SEQ ID NO: 1321839 - DNA, 15 bp, Homo sapiens
gtaattaatcataat

SEQ ID NO: 1321840 - DNA, 15 bp, Homo sapiens
agtaattaatcataa

SEQ ID NO: 1321841 - DNA, 15 bp, Homo sapiens
gagtaattaatcata

SEQ ID NO: 1321842 - DNA, 15 bp, Homo sapiens
agagtaattaatcat

SEQ ID NO: 1321843 - DNA, 15 bp, Homo sapiens
cagagtaattaatca

SEQ ID NO: 1321844 - DNA, 15 bp, Homo sapiens
tcagagtaattaatc

SEQ ID NO: 1321845 - DNA, 15 bp, Homo sapiens
gtcagagtaattaat

SEQ ID NO: 1321846 - DNA, 15 bp, Homo sapiens
ggtcagagtaattaa

SEQ ID NO: 1321847 - DNA, 15 bp, Homo sapiens
aggtcagagtaatta

SEQ ID NO: 1321848 - DNA, 15 bp, Homo sapiens
caggtcagagtaatt

SEQ ID NO: 1321849 - DNA, 15 bp, Homo sapiens
tcaggtcagagtaat

SEQ ID NO: 1321850 - DNA, 15 bp, Homo sapiens
gtcaggtcagagtaa

SEQ ID NO: 1321851 - DNA, 15 bp, Homo sapiens
tgtcaggtcagagta

SEQ ID NO: 1321852 - DNA, 15 bp, Homo sapiens
ctgtcaggtcagagt

SEQ ID NO: 1321853 - DNA, 15 bp, Homo sapiens
cctgtcaggtcagag

SEQ ID NO: 1321854 - DNA, 15 bp, Homo sapiens
tcctgtcaggtcaga

SEQ ID NO: 1321855 - DNA, 15 bp, Homo sapiens
ttcctgtcaggtcag

SEQ ID NO: 1321856 - DNA, 15 bp, Homo sapiens
attcctgtcaggtca

SEQ ID NO: 1321857 - DNA, 15 bp, Homo sapiens
aattcctgtcaggtc

SEQ ID NO: 1321858 - DNA, 15 bp, Homo sapiens
caattcctgtcaggt

SEQ ID NO: 1321859 - DNA, 15 bp, Homo sapiens
tcaattcctgtcagg

SEQ ID NO: 1321860 - DNA, 15 bp, Homo sapiens
ttcaattcctgtcag

SEQ ID NO: 1321861 - DNA, 15 bp, Homo sapiens
cttcaattcctgtca

SEQ ID NO: 1321862 - DNA, 15 bp, Homo sapiens
tcttcaattcctgtc

SEQ ID NO: 1321863 - DNA, 15 bp, Homo sapiens
ttcttcaattcctgt

SEQ ID NO: 1321864 - DNA, 15 bp, Homo sapiens
cttcttcaattcctg

SEQ ID NO: 1321865 - DNA, 15 bp, Homo sapiens
tcttcttcaattcct

SEQ ID NO: 1321866 - DNA, 15 bp, Homo sapiens
ctcttcttcaattcc

SEQ ID NO: 1321867 - DNA, 15 bp, Homo sapiens
tctcttcttcaattc

SEQ ID NO: 1321868 - DNA, 15 bp, Homo sapiens
gtctcttcttcaatt

SEQ ID NO: 1321869 - DNA, 15 bp, Homo sapiens
agtctcttcttcaat

SEQ ID NO: 1321870 - DNA, 15 bp, Homo sapiens
tagtctcttcttcaa

SEQ ID NO: 1321871 - DNA, 15 bp, Homo sapiens
atagtctcttcttca

SEQ ID NO: 1321872 - DNA, 15 bp, Homo sapiens
tatagtctcttcttc

SEQ ID NO: 1321873 - DNA, 15 bp, Homo sapiens
atatagtctcttctt

SEQ ID NO: 1321874 - DNA, 15 bp, Homo sapiens
catatagtctcttct

SEQ ID NO: 1321875 - DNA, 15 bp, Homo sapiens
gcatatagtctcttc

SEQ ID NO: 1321876 - DNA, 15 bp, Homo sapiens
agcatatagtctctt

SEQ ID NO: 1321877 - DNA, 15 bp, Homo sapiens
cagcatatagtctct

SEQ ID NO: 1321878 - DNA, 15 bp, Homo sapiens
ccagcatatagtctc

SEQ ID NO: 1321879 - DNA, 15 bp, Homo sapiens
accagcatatagtct

SEQ ID NO: 1321880 - DNA, 15 bp, Homo sapiens
caccagcatatagtc

SEQ ID NO: 1321881 - DNA, 15 bp, Homo sapiens
gcaccagcatatagt

SEQ ID NO: 1321882 - DNA, 15 bp, Homo sapiens
agcaccagcatatag

SEQ ID NO: 1321883 - DNA, 15 bp, Homo sapiens
gagcaccagcatata

SEQ ID NO: 1321884 - DNA, 15 bp, Homo sapiens
agagcaccagcatat

SEQ ID NO: 1321885 - DNA, 15 bp, Homo sapiens
cagagcaccagcata

SEQ ID NO: 1321886 - DNA, 15 bp, Homo sapiens
tcagagcaccagcat

SEQ ID NO: 1321887 - DNA, 15 bp, Homo sapiens
ttcagagcaccagca

SEQ ID NO: 1321888 - DNA, 15 bp, Homo sapiens
tttcagagcaccagc

SEQ ID NO: 1321889 - DNA, 15 bp, Homo sapiens
atttcagagcaccag

SEQ ID NO: 1321890 - DNA, 15 bp, Homo sapiens
catttcagagcacca

SEQ ID NO: 1321891 - DNA, 15 bp, Homo sapiens
tcatttcagagcacc

SEQ ID NO: 1321892 - DNA, 15 bp, Homo sapiens
atcatttcagagcac

SEQ ID NO: 1321893 - DNA, 15 bp, Homo sapiens
gatcatttcagagca

SEQ ID NO: 1321894 - DNA, 15 bp, Homo sapiens
agatcatttcagagc

SEQ ID NO: 1321895 - DNA, 15 bp, Homo sapiens
tagatcatttcagag

SEQ ID NO: 1321896 - DNA, 15 bp, Homo sapiens
gtagatcatttcaga

SEQ ID NO: 1321897 - DNA, 15 bp, Homo sapiens
ggtagatcatttcag

SEQ ID NO: 1321898 - DNA, 15 bp, Homo sapiens
gggtagatcatttca

SEQ ID NO: 1321899 - DNA, 15 bp, Homo sapiens
tgggtagatcatttc

SEQ ID NO: 1321900 - DNA, 15 bp, Homo sapiens
ttgggtagatcattt

SEQ ID NO: 1321901 - DNA, 15 bp, Homo sapiens
gttgggtagatcatt

SEQ ID NO: 1321902 - DNA, 15 bp, Homo sapiens
agttgggtagatcat

SEQ ID NO: 1321903 - DNA, 15 bp, Homo sapiens
gagttgggtagatca

SEQ ID NO: 1321904 - DNA, 15 bp, Homo sapiens
agagttgggtagatc

SEQ ID NO: 1321905 - DNA, 15 bp, Homo sapiens
cagagttgggtagat

SEQ ID NO: 1321906 - DNA, 15 bp, Homo sapiens
acagagttgggtaga

SEQ ID NO: 1321907 - DNA, 15 bp, Homo sapiens
gacagagttgggtag

SEQ ID NO: 1321908 - DNA, 15 bp, Homo sapiens
tgacagagttgggta

SEQ ID NO: 1321909 - DNA, 15 bp, Homo sapiens
atgacagagttgggt

SEQ ID NO: 1321910 - DNA, 15 bp, Homo sapiens
gatgacagagttggg

SEQ ID NO: 1321911 - DNA, 15 bp, Homo sapiens
agatgacagagttgg

SEQ ID NO: 1321912 - DNA, 15 bp, Homo sapiens
cagatgacagagttg

SEQ ID NO: 1321913 - DNA, 15 bp, Homo sapiens
acagatgacagagtt

SEQ ID NO: 1321914 - DNA, 15 bp, Homo sapiens
tacagatgacagagt

SEQ ID NO: 1321915 - DNA, 15 bp, Homo sapiens
ttacagatgacagag

SEQ ID NO: 1321916 - DNA, 15 bp, Homo sapiens
gttacagatgacaga

SEQ ID NO: 1321917 - DNA, 15 bp, Homo sapiens
tgttacagatgacag

SEQ ID NO: 1321918 - DNA, 15 bp, Homo sapiens
ttgttacagatgaca

SEQ ID NO: 1321919 - DNA, 15 bp, Homo sapiens
gttgttacagatgac

SEQ ID NO: 1321920 - DNA, 15 bp, Homo sapiens
ggttgttacagatga

SEQ ID NO: 1321921 - DNA, 15 bp, Homo sapiens
tggttgttacagatg

SEQ ID NO: 1321922 - DNA, 15 bp, Homo sapiens
ctggttgttacagat

SEQ ID NO: 1321923 - DNA, 15 bp, Homo sapiens
actggttgttacaga

SEQ ID NO: 1321924 - DNA, 15 bp, Homo sapiens
cactggttgttacag

SEQ ID NO: 1321925 - DNA, 15 bp, Homo sapiens
tcactggttgttaca

SEQ ID NO: 1321926 - DNA, 15 bp, Homo sapiens
atcactggttgttac

SEQ ID NO: 1321927 - DNA, 15 bp, Homo sapiens
tatcactggttgtta

SEQ ID NO: 1321928 - DNA, 15 bp, Homo sapiens
ttatcactggttgtt

SEQ ID NO: 1321929 - DNA, 15 bp, Homo sapiens
gttatcactggttgt

SEQ ID NO: 1321930 - DNA, 15 bp, Homo sapiens
agttatcactggttg

SEQ ID NO: 1321931 - DNA, 15 bp, Homo sapiens
gagttatcactggtt

SEQ ID NO: 1321932 - DNA, 15 bp, Homo sapiens
agagttatcactggt

SEQ ID NO: 1321933 - DNA, 15 bp, Homo sapiens
gagagttatcactgg

SEQ ID NO: 1321934 - DNA, 15 bp, Homo sapiens
agagagttatcactg

SEQ ID NO: 1321935 - DNA, 15 bp, Homo sapiens
aagagagttatcact

SEQ ID NO: 1321936 - DNA, 15 bp, Homo sapiens
caagagagttatcac

SEQ ID NO: 1321937 - DNA, 15 bp, Homo sapiens
acaagagagttatca

SEQ ID NO: 1321938 - DNA, 15 bp, Homo sapiens
gacaagagagttatc

SEQ ID NO: 1321939 - DNA, 15 bp, Homo sapiens
agacaagagagttat

SEQ ID NO: 1321940 - DNA, 15 bp, Homo sapiens
aagacaagagagtta

SEQ ID NO: 1321941 - DNA, 15 bp, Homo sapiens
caagacaagagagtt

SEQ ID NO: 1321942 - DNA, 15 bp, Homo sapiens
acaagacaagagagt

SEQ ID NO: 1321943 - DNA, 15 bp, Homo sapiens
tacaagacaagagag

SEQ ID NO: 1321944 - DNA, 15 bp, Homo sapiens
ttacaagacaagaga

SEQ ID NO: 1321945 - DNA, 15 bp, Homo sapiens
tttacaagacaagag

SEQ ID NO: 1321946 - DNA, 15 bp, Homo sapiens
ttttacaagacaaga

SEQ ID NO: 1321947 - DNA, 15 bp, Homo sapiens
tttttacaagacaag

SEQ ID NO: 1321948 - DNA, 15 bp, Homo sapiens
ctttttacaagacaa

SEQ ID NO: 1321949 - DNA, 15 bp, Homo sapiens
cctttttacaagaca

SEQ ID NO: 1321950 - DNA, 15 bp, Homo sapiens
ccctttttacaagac

SEQ ID NO: 1321951 - DNA, 15 bp, Homo sapiens
accctttttacaaga

SEQ ID NO: 1321952 - DNA, 15 bp, Homo sapiens
aaccctttttacaag

SEQ ID NO: 1321953 - DNA, 15 bp, Homo sapiens
aaaccctttttacaa

SEQ ID NO: 1321954 - DNA, 15 bp, Homo sapiens
caaaccctttttaca

SEQ ID NO: 1321955 - DNA, 15 bp, Homo sapiens
acaaaccctttttac

SEQ ID NO: 1321956 - DNA, 15 bp, Homo sapiens
tacaaacccttttta

SEQ ID NO: 1321957 - DNA, 15 bp, Homo sapiens
gtacaaacccttttt

SEQ ID NO: 1321958 - DNA, 15 bp, Homo sapiens
tgtacaaaccctttt

SEQ ID NO: 1321959 - DNA, 15 bp, Homo sapiens
atgtacaaacccttt

SEQ ID NO: 1321960 - DNA, 15 bp, Homo sapiens
tatgtacaaaccctt

SEQ ID NO: 1321961 - DNA, 15 bp, Homo sapiens
ttatgtacaaaccct

SEQ ID NO: 1321962 - DNA, 15 bp, Homo sapiens
gttatgtacaaaccc

SEQ ID NO: 1321963 - DNA, 15 bp, Homo sapiens
agttatgtacaaacc

SEQ ID NO: 1321964 - DNA, 15 bp, Homo sapiens
aagttatgtacaaac

SEQ ID NO: 1321965 - DNA, 15 bp, Homo sapiens
caagttatgtacaaa

SEQ ID NO: 1321966 - DNA, 15 bp, Homo sapiens
acaagttatgtacaa

SEQ ID NO: 1321967 - DNA, 15 bp, Homo sapiens
tacaagttatgtaca

SEQ ID NO: 1321968 - DNA, 15 bp, Homo sapiens
gtacaagttatgtac

SEQ ID NO: 1321969 - DNA, 15 bp, Homo sapiens
tgtacaagttatgta

SEQ ID NO: 1321970 - DNA, 15 bp, Homo sapiens
atgtacaagttatgt

SEQ ID NO: 1321971 - DNA, 15 bp, Homo sapiens
catgtacaagttatg

SEQ ID NO: 1321972 - DNA, 15 bp, Homo sapiens
ccatgtacaagttat

SEQ ID NO: 1321973 - DNA, 15 bp, Homo sapiens
accatgtacaagtta

SEQ ID NO: 1321974 - DNA, 15 bp, Homo sapiens
aaccatgtacaagtt

SEQ ID NO: 1321975 - DNA, 15 bp, Homo sapiens
aaaccatgtacaagt

SEQ ID NO: 1321976 - DNA, 15 bp, Homo sapiens
gaaaccatgtacaag

SEQ ID NO: 1321977 - DNA, 15 bp, Homo sapiens
tgaaaccatgtacaa

SEQ ID NO: 1321978 - DNA, 15 bp, Homo sapiens
atgaaaccatgtaca

SEQ ID NO: 1321979 - DNA, 15 bp, Homo sapiens
aatgaaaccatgtac

SEQ ID NO: 1321980 - DNA, 15 bp, Homo sapiens
aaatgaaaccatgta

SEQ ID NO: 1321981 - DNA, 15 bp, Homo sapiens
aaaatgaaaccatgt

SEQ ID NO: 1321982 - DNA, 15 bp, Homo sapiens
caaaatgaaaccatg

SEQ ID NO: 1321983 - DNA, 15 bp, Homo sapiens
acaaaatgaaaccat

SEQ ID NO: 1321984 - DNA, 15 bp, Homo sapiens
tacaaaatgaaacca

SEQ ID NO: 1321985 - DNA, 15 bp, Homo sapiens
atacaaaatgaaacc

SEQ ID NO: 1321986 - DNA, 15 bp, Homo sapiens
aatacaaaatgaaac

SEQ ID NO: 1321987 - DNA, 15 bp, Homo sapiens
aaatacaaaatgaaa

SEQ ID NO: 1321988 - DNA, 15 bp, Homo sapiens
aaaatacaaaatgaa

SEQ ID NO: 1321989 - DNA, 15 bp, Homo sapiens
aaaaatacaaaatga

SEQ ID NO: 1321990 - DNA, 15 bp, Homo sapiens
gaaaaatacaaaatg

SEQ ID NO: 1321991 - DNA, 15 bp, Homo sapiens
cgaaaaatacaaaat

SEQ ID NO: 1321992 - DNA, 15 bp, Homo sapiens
gcgaaaaatacaaaa

SEQ ID NO: 1321993 - DNA, 15 bp, Homo sapiens
tgcgaaaaatacaaa

SEQ ID NO: 1321994 - DNA, 15 bp, Homo sapiens
ctgcgaaaaatacaa

SEQ ID NO: 1321995 - DNA, 15 bp, Homo sapiens
tctgcgaaaaataca

SEQ ID NO: 1321996 - DNA, 15 bp, Homo sapiens
atctgcgaaaaatac

SEQ ID NO: 1321997 - DNA, 15 bp, Homo sapiens
aatctgcgaaaaata

SEQ ID NO: 1321998 - DNA, 15 bp, Homo sapiens
taatctgcgaaaaat

SEQ ID NO: 1321999 - DNA, 15 bp, Homo sapiens
ttaatctgcgaaaaa

SEQ ID NO: 1322000 - DNA, 15 bp, Homo sapiens
tttaatctgcgaaaa

SEQ ID NO: 1322001 - DNA, 15 bp, Homo sapiens
ttttaatctgcgaaa

SEQ ID NO: 1322002 - DNA, 15 bp, Homo sapiens
tttttaatctgcgaa

SEQ ID NO: 1322003 - DNA, 15 bp, Homo sapiens
atttttaatctgcga

SEQ ID NO: 1322004 - DNA, 15 bp, Homo sapiens
aatttttaatctgcg

SEQ ID NO: 1322005 - DNA, 15 bp, Homo sapiens
aaatttttaatctgc

SEQ ID NO: 1322006 - DNA, 15 bp, Homo sapiens
taaatttttaatctg

SEQ ID NO: 1322007 - DNA, 15 bp, Homo sapiens
ataaatttttaatct

SEQ ID NO: 1322008 - DNA, 15 bp, Homo sapiens
cataaatttttaatc

SEQ ID NO: 1322009 - DNA, 15 bp, Homo sapiens
acataaatttttaat

SEQ ID NO: 1322010 - DNA, 15 bp, Homo sapiens
tacataaatttttaa

SEQ ID NO: 1322011 - DNA, 15 bp, Homo sapiens
atacataaattttta

SEQ ID NO: 1322012 - DNA, 15 bp, Homo sapiens
aatacataaattttt

SEQ ID NO: 1322013 - DNA, 15 bp, Homo sapiens
aaatacataaatttt

SEQ ID NO: 1322014 - DNA, 15 bp, Homo sapiens
caaatacataaattt

SEQ ID NO: 1322015 - DNA, 15 bp, Homo sapiens
acaaatacataaatt

SEQ ID NO: 1322016 - DNA, 15 bp, Homo sapiens
cacaaatacataaat

SEQ ID NO: 1322017 - DNA, 15 bp, Homo sapiens
acacaaatacataaa

SEQ ID NO: 1322018 - DNA, 15 bp, Homo sapiens
aacacaaatacataa

SEQ ID NO: 1322019 - DNA, 15 bp, Homo sapiens
gaacacaaatacata

SEQ ID NO: 1322020 - DNA, 15 bp, Homo sapiens
agaacacaaatacat

SEQ ID NO: 1322021 - DNA, 15 bp, Homo sapiens
tagaacacaaataca

SEQ ID NO: 1322022 - DNA, 15 bp, Homo sapiens
ttagaacacaaatac

SEQ ID NO: 1322023 - DNA, 15 bp, Homo sapiens
tttagaacacaaata

SEQ ID NO: 1322024 - DNA, 15 bp, Homo sapiens
ttttagaacacaaat

SEQ ID NO: 1322025 - DNA, 15 bp, Homo sapiens
gttttagaacacaaa

SEQ ID NO: 1322026 - DNA, 15 bp, Homo sapiens
tgttttagaacacaa

SEQ ID NO: 1322027 - DNA, 15 bp, Homo sapiens
ttgttttagaacaca

SEQ ID NO: 1322028 - DNA, 15 bp, Homo sapiens
cttgttttagaacac

SEQ ID NO: 1322029 - DNA, 15 bp, Homo sapiens
ccttgttttagaaca

SEQ ID NO: 1322030 - DNA, 15 bp, Homo sapiens
tccttgttttagaac

SEQ ID NO: 1322031 - DNA, 15 bp, Homo sapiens
ctccttgttttagaa

SEQ ID NO: 1322032 - DNA, 15 bp, Homo sapiens
actccttgttttaga

SEQ ID NO: 1322033 - DNA, 15 bp, Homo sapiens
cactccttgttttag

SEQ ID NO: 1322034 - DNA, 15 bp, Homo sapiens
acactccttgtttta

SEQ ID NO: 1322035 - DNA, 15 bp, Homo sapiens
aacactccttgtttt

SEQ ID NO: 1322036 - DNA, 15 bp, Homo sapiens
aaacactccttgttt

SEQ ID NO: 1322037 - DNA, 15 bp, Homo sapiens
gaaacactccttgtt

SEQ ID NO: 1322038 - DNA, 15 bp, Homo sapiens
agaaacactccttgt

SEQ ID NO: 1322039 - DNA, 15 bp, Homo sapiens
aagaaacactccttg

SEQ ID NO: 1322040 - DNA, 15 bp, Homo sapiens
caagaaacactcctt

SEQ ID NO: 1322041 - DNA, 15 bp, Homo sapiens
acaagaaacactcct

SEQ ID NO: 1322042 - DNA, 15 bp, Homo sapiens
cacaagaaacactcc

SEQ ID NO: 1322043 - DNA, 15 bp, Homo sapiens
acacaagaaacactc

SEQ ID NO: 1322044 - DNA, 15 bp, Homo sapiens
gacacaagaaacact

SEQ ID NO: 1322045 - DNA, 15 bp, Homo sapiens
agacacaagaaacac

SEQ ID NO: 1322046 - DNA, 15 bp, Homo sapiens
aagacacaagaaaca

SEQ ID NO: 1322047 - DNA, 15 bp, Homo sapiens
aaagacacaagaaac

SEQ ID NO: 1322048 - DNA, 15 bp, Homo sapiens
caaagacacaagaaa

SEQ ID NO: 1322049 - DNA, 15 bp, Homo sapiens
acaaagacacaagaa

SEQ ID NO: 1322050 - DNA, 15 bp, Homo sapiens
tacaaagacacaaga

SEQ ID NO: 1322051 - DNA, 15 bp, Homo sapiens
ctacaaagacacaag

SEQ ID NO: 1322052 - DNA, 15 bp, Homo sapiens
gctacaaagacacaa

SEQ ID NO: 1322053 - DNA, 15 bp, Homo sapiens
tgctacaaagacaca

SEQ ID NO: 1322054 - DNA, 15 bp, Homo sapiens
ctgctacaaagacac

SEQ ID NO: 1322055 - DNA, 15 bp, Homo sapiens
actgctacaaagaca

SEQ ID NO: 1322056 - DNA, 15 bp, Homo sapiens
aactgctacaaagac

SEQ ID NO: 1322057 - DNA, 15 bp, Homo sapiens
taactgctacaaaga

SEQ ID NO: 1322058 - DNA, 15 bp, Homo sapiens
gtaactgctacaaag

SEQ ID NO: 1322059 - DNA, 15 bp, Homo sapiens
tgtaactgctacaaa

SEQ ID NO: 1322060 - DNA, 15 bp, Homo sapiens
atgtaactgctacaa

SEQ ID NO: 1322061 - DNA, 15 bp, Homo sapiens
catgtaactgctaca

SEQ ID NO: 1322062 - DNA, 15 bp, Homo sapiens
gcatgtaactgctac

SEQ ID NO: 1322063 - DNA, 15 bp, Homo sapiens
ggcatgtaactgcta

SEQ ID NO: 1322064 - DNA, 15 bp, Homo sapiens
tggcatgtaactgct

SEQ ID NO: 1322065 - DNA, 15 bp, Homo sapiens
atggcatgtaactgc

SEQ ID NO: 1322066 - DNA, 15 bp, Homo sapiens
catggcatgtaactg

SEQ ID NO: 1322067 - DNA, 15 bp, Homo sapiens
ccatggcatgtaact

SEQ ID NO: 1322068 - DNA, 15 bp, Homo sapiens
cccatggcatgtaac

SEQ ID NO: 1322069 - DNA, 15 bp, Homo sapiens
ccccatggcatgtaa

SEQ ID NO: 1322070 - DNA, 15 bp, Homo sapiens
cccccatggcatgta

SEQ ID NO: 1322071 - DNA, 15 bp, Homo sapiens
acccccatggcatgt

SEQ ID NO: 1322072 - DNA, 15 bp, Homo sapiens
cacccccatggcatg

SEQ ID NO: 1322073 - DNA, 15 bp, Homo sapiens
tcacccccatggcat

SEQ ID NO: 1322074 - DNA, 15 bp, Homo sapiens
ctcacccccatggca

SEQ ID NO: 1322075 - DNA, 15 bp, Homo sapiens
tctcacccccatggc

SEQ ID NO: 1322076 - DNA, 15 bp, Homo sapiens
ctctcacccccatgg

SEQ ID NO: 1322077 - DNA, 15 bp, Homo sapiens
cctctcacccccatg

SEQ ID NO: 1322078 - DNA, 15 bp, Homo sapiens
acctctcacccccat

SEQ ID NO: 1322079 - DNA, 15 bp, Homo sapiens
cacctctcaccccca

SEQ ID NO: 1322080 - DNA, 15 bp, Homo sapiens
tcacctctcaccccc

SEQ ID NO: 1322081 - DNA, 15 bp, Homo sapiens
ctcacctctcacccc

SEQ ID NO: 1322082 - DNA, 15 bp, Homo sapiens
gctcacctctcaccc

SEQ ID NO: 1322083 - DNA, 15 bp, Homo sapiens
agctcacctctcacc

SEQ ID NO: 1322084 - DNA, 15 bp, Homo sapiens
cagctcacctctcac

SEQ ID NO: 1322085 - DNA, 15 bp, Homo sapiens
ccagctcacctctca

SEQ ID NO: 1322086 - DNA, 15 bp, Homo sapiens
cccagctcacctctc

SEQ ID NO: 1322087 - DNA, 15 bp, Homo sapiens
ccccagctcacctct

SEQ ID NO: 1322088 - DNA, 15 bp, Homo sapiens
tccccagctcacctc

SEQ ID NO: 1322089 - DNA, 15 bp, Homo sapiens
atccccagctcacct

SEQ ID NO: 1322090 - DNA, 15 bp, Homo sapiens
catccccagctcacc

SEQ ID NO: 1322091 - DNA, 15 bp, Homo sapiens
ccatccccagctcac

SEQ ID NO: 1322092 - DNA, 15 bp, Homo sapiens
accatccccagctca

SEQ ID NO: 1322093 - DNA, 15 bp, Homo sapiens
caccatccccagctc

SEQ ID NO: 1322094 - DNA, 15 bp, Homo sapiens
tcaccatccccagct

SEQ ID NO: 1322095 - DNA, 15 bp, Homo sapiens
ctcaccatccccagc

SEQ ID NO: 1322096 - DNA, 15 bp, Homo sapiens
cctcaccatccccag

SEQ ID NO: 1322097 - DNA, 15 bp, Homo sapiens
acctcaccatcccca

SEQ ID NO: 1322098 - DNA, 15 bp, Homo sapiens
gacctcaccatcccc

SEQ ID NO: 1322099 - DNA, 15 bp, Homo sapiens
ggacctcaccatccc

SEQ ID NO: 1322100 - DNA, 15 bp, Homo sapiens
gggacctcaccatcc

SEQ ID NO: 1322101 - DNA, 15 bp, Homo sapiens
agggacctcaccatc

SEQ ID NO: 1322102 - DNA, 15 bp, Homo sapiens
cagggacctcaccat

SEQ ID NO: 1322103 - DNA, 15 bp, Homo sapiens
tcagggacctcacca

SEQ ID NO: 1322104 - DNA, 15 bp, Homo sapiens
ctcagggacctcacc

SEQ ID NO: 1322105 - DNA, 15 bp, Homo sapiens
actcagggacctcac

SEQ ID NO: 1322106 - DNA, 15 bp, Homo sapiens
aactcagggacctca

SEQ ID NO: 1322107 - DNA, 15 bp, Homo sapiens
gaactcagggacctc

SEQ ID NO: 1322108 - DNA, 15 bp, Homo sapiens
agaactcagggacct

SEQ ID NO: 1322109 - DNA, 15 bp, Homo sapiens
tagaactcagggacc

SEQ ID NO: 1322110 - DNA, 15 bp, Homo sapiens
ttagaactcagggac

SEQ ID NO: 1322111 - DNA, 15 bp, Homo sapiens
tgattagaactcagg

SEQ ID NO: 1322112 - DNA, 15 bp, Homo sapiens
ctgattagaactcag

SEQ ID NO: 1322113 - DNA, 15 bp, Homo sapiens
cctgattagaactca

SEQ ID NO: 1322114 - DNA, 15 bp, Homo sapiens
gcctgattagaactc

SEQ ID NO: 1322115 - DNA, 15 bp, Homo sapiens
tgcctgattagaact

SEQ ID NO: 1322116 - DNA, 15 bp, Homo sapiens
ctgcctgattagaac

SEQ ID NO: 1322117 - DNA, 15 bp, Homo sapiens
gctgcctgattagaa

SEQ ID NO: 1322118 - DNA, 15 bp, Homo sapiens
agctgcctgattaga

SEQ ID NO: 1322119 - DNA, 15 bp, Homo sapiens
aagctgcctgattag

SEQ ID NO: 1322120 - DNA, 15 bp, Homo sapiens
aaagctgcctgatta

SEQ ID NO: 1322121 - DNA, 15 bp, Homo sapiens
aaaagctgcctgatt

SEQ ID NO: 1322122 - DNA, 15 bp, Homo sapiens
caaaagctgcctgat

SEQ ID NO: 1322123 - DNA, 15 bp, Homo sapiens
acaaaagctgcctga

SEQ ID NO: 1322124 - DNA, 15 bp, Homo sapiens
gacaaaagctgcctg

SEQ ID NO: 1322125 - DNA, 15 bp, Homo sapiens
agacaaaagctgcct

SEQ ID NO: 1322126 - DNA, 15 bp, Homo sapiens
gagacaaaagctgcc

SEQ ID NO: 1322127 - DNA, 15 bp, Homo sapiens
ggagacaaaagctgc

SEQ ID NO: 1322128 - DNA, 15 bp, Homo sapiens
aggagacaaaagctg

SEQ ID NO: 1322129 - DNA, 15 bp, Homo sapiens
gaggagacaaaagct

SEQ ID NO: 1322130 - DNA, 15 bp, Homo sapiens
ggaggagacaaaagc

SEQ ID NO: 1322131 - DNA, 15 bp, Homo sapiens
gggaggagacaaaag

SEQ ID NO: 1322132 - DNA, 15 bp, Homo sapiens
agggaggagacaaaa

SEQ ID NO: 1322133 - DNA, 15 bp, Homo sapiens
aagggaggagacaaa

SEQ ID NO: 1322134 - DNA, 15 bp, Homo sapiens
gaagggaggagacaa

SEQ ID NO: 1322135 - DNA, 15 bp, Homo sapiens
tgaagggaggagaca

SEQ ID NO: 1322136 - DNA, 15 bp, Homo sapiens
atgaagggaggagac

SEQ ID NO: 1322137 - DNA, 15 bp, Homo sapiens
catgaagggaggaga

SEQ ID NO: 1322138 - DNA, 15 bp, Homo sapiens
gcatgaagggaggag

SEQ ID NO: 1322139 - DNA, 15 bp, Homo sapiens
agcatgaagggagga

SEQ ID NO: 1322140 - DNA, 15 bp, Homo sapiens
gagcatgaagggagg

SEQ ID NO: 1322141 - DNA, 15 bp, Homo sapiens
ggagcatgaagggag

SEQ ID NO: 1322142 - DNA, 15 bp, Homo sapiens
aggagcatgaaggga

SEQ ID NO: 1322143 - DNA, 15 bp, Homo sapiens
gaggagcatgaaggg

SEQ ID NO: 1322144 - DNA, 15 bp, Homo sapiens
ggaggagcatgaagg

SEQ ID NO: 1322145 - DNA, 15 bp, Homo sapiens
tggaggagcatgaag

SEQ ID NO: 1322146 - DNA, 15 bp, Homo sapiens
atggaggagcatgaa

SEQ ID NO: 1322147 - DNA, 15 bp, Homo sapiens
catggaggagcatga

SEQ ID NO: 1322148 - DNA, 15 bp, Homo sapiens
tcatggaggagcatg

SEQ ID NO: 1322149 - DNA, 15 bp, Homo sapiens
ttcatggaggagcat

SEQ ID NO: 1322150 - DNA, 15 bp, Homo sapiens
cttcatggaggagca

SEQ ID NO: 1322151 - DNA, 15 bp, Homo sapiens
ccttcatggaggagc

SEQ ID NO: 1322152 - DNA, 15 bp, Homo sapiens
gccttcatggaggag

SEQ ID NO: 1322153 - DNA, 15 bp, Homo sapiens
tgccttcatggagga

SEQ ID NO: 1322154 - DNA, 15 bp, Homo sapiens
ttgccttcatggagg

SEQ ID NO: 1322155 - DNA, 15 bp, Homo sapiens
tttgccttcatggag

SEQ ID NO: 1322156 - DNA, 15 bp, Homo sapiens
ctttgccttcatgga

SEQ ID NO: 1322157 - DNA, 15 bp, Homo sapiens
actttgccttcatgg

SEQ ID NO: 1322158 - DNA, 15 bp, Homo sapiens
aactttgccttcatg

SEQ ID NO: 1322159 - DNA, 15 bp, Homo sapiens
caactttgccttcat

SEQ ID NO: 1322160 - DNA, 15 bp, Homo sapiens
acaactttgccttca

SEQ ID NO: 1322161 - DNA, 15 bp, Homo sapiens
cacaactttgccttc

SEQ ID NO: 1322162 - DNA, 15 bp, Homo sapiens
ccacaactttgcctt

SEQ ID NO: 1322163 - DNA, 15 bp, Homo sapiens
tccacaactttgcct

SEQ ID NO: 1322164 - DNA, 15 bp, Homo sapiens
atccacaactttgcc

SEQ ID NO: 1322165 - DNA, 15 bp, Homo sapiens
aatccacaactttgc

SEQ ID NO: 1322166 - DNA, 15 bp, Homo sapiens
caatccacaactttg

SEQ ID NO: 1322167 - DNA, 15 bp, Homo sapiens
tcaatccacaacttt

SEQ ID NO: 1322168 - DNA, 15 bp, Homo sapiens
atcaatccacaactt

SEQ ID NO: 1322169 - DNA, 15 bp, Homo sapiens
aatcaatccacaact

SEQ ID NO: 1322170 - DNA, 15 bp, Homo sapiens
caatcaatccacaac

SEQ ID NO: 1322171 - DNA, 15 bp, Homo sapiens
tcaatcaatccacaa

SEQ ID NO: 1322172 - DNA, 15 bp, Homo sapiens
ttcaatcaatccaca

SEQ ID NO: 1322173 - DNA, 15 bp, Homo sapiens
tttcaatcaatccac

SEQ ID NO: 1322174 - DNA, 15 bp, Homo sapiens
gtttcaatcaatcca

SEQ ID NO: 1322175 - DNA, 15 bp, Homo sapiens
ggtttcaatcaatcc

SEQ ID NO: 1322176 - DNA, 15 bp, Homo sapiens
tggtttcaatcaatc

SEQ ID NO: 1322177 - DNA, 15 bp, Homo sapiens
atggtttcaatcaat

SEQ ID NO: 1322178 - DNA, 15 bp, Homo sapiens
catggtttcaatcaa

SEQ ID NO: 1322179 - DNA, 15 bp, Homo sapiens
tcatggtttcaatca

SEQ ID NO: 1322180 - DNA, 15 bp, Homo sapiens
ctcatggtttcaatc

SEQ ID NO: 1322181 - DNA, 15 bp, Homo sapiens
gctcatggtttcaat

SEQ ID NO: 1322182 - DNA, 15 bp, Homo sapiens
agctcatggtttcaa

SEQ ID NO: 1322183 - DNA, 15 bp, Homo sapiens
aagctcatggtttca

SEQ ID NO: 1322184 - DNA, 15 bp, Homo sapiens
gaagctcatggtttc

SEQ ID NO: 1322185 - DNA, 15 bp, Homo sapiens
ggaagctcatggttt

SEQ ID NO: 1322186 - DNA, 15 bp, Homo sapiens
gggaagctcatggtt

SEQ ID NO: 1322187 - DNA, 15 bp, Homo sapiens
agggaagctcatggt

SEQ ID NO: 1322188 - DNA, 15 bp, Homo sapiens
aagggaagctcatgg

SEQ ID NO: 1322189 - DNA, 15 bp, Homo sapiens
aaagggaagctcatg

SEQ ID NO: 1322190 - DNA, 15 bp, Homo sapiens
caaagggaagctcat

SEQ ID NO: 1322191 - DNA, 15 bp, Homo sapiens
gcaaagggaagctca

SEQ ID NO: 1322192 - DNA, 15 bp, Homo sapiens
tgcaaagggaagctc

SEQ ID NO: 1322193 - DNA, 15 bp, Homo sapiens
ctgcaaagggaagct

SEQ ID NO: 1322194 - DNA, 15 bp, Homo sapiens
gctgcaaagggaagc

SEQ ID NO: 1322195 - DNA, 15 bp, Homo sapiens
agctgcaaagggaag

SEQ ID NO: 1322196 - DNA, 15 bp, Homo sapiens
aagctgcaaagggaa

SEQ ID NO: 1322197 - DNA, 15 bp, Homo sapiens
gaagctgcaaaggga

SEQ ID NO: 1322198 - DNA, 15 bp, Homo sapiens
cgaagctgcaaaggg

SEQ ID NO: 1322199 - DNA, 15 bp, Homo sapiens
tcgaagctgcaaagg

SEQ ID NO: 1322200 - DNA, 15 bp, Homo sapiens
ctcgaagctgcaaag

SEQ ID NO: 1322201 - DNA, 15 bp, Homo sapiens
actcgaagctgcaaa

SEQ ID NO: 1322202 - DNA, 15 bp, Homo sapiens
cactcgaagctgcaa

SEQ ID NO: 1322203 - DNA, 15 bp, Homo sapiens
gcactcgaagctgca

SEQ ID NO: 1322204 - DNA, 15 bp, Homo sapiens
tgcactcgaagctgc

SEQ ID NO: 1322205 - DNA, 15 bp, Homo sapiens
ttgcactcgaagctg

SEQ ID NO: 1322206 - DNA, 15 bp, Homo sapiens
tttgcactcgaagct

SEQ ID NO: 1322207 - DNA, 15 bp, Homo sapiens
atttgcactcgaagc

SEQ ID NO: 1322208 - DNA, 15 bp, Homo sapiens
tatttgcactcgaag

SEQ ID NO: 1322209 - DNA, 15 bp, Homo sapiens
ctatttgcactcgaa

SEQ ID NO: 1322210 - DNA, 15 bp, Homo sapiens
tctatttgcactcga

SEQ ID NO: 1322211 - DNA, 15 bp, Homo sapiens
gtctatttgcactcg

SEQ ID NO: 1322212 - DNA, 15 bp, Homo sapiens
ggtctatttgcactc

SEQ ID NO: 1322213 - DNA, 15 bp, Homo sapiens
aggtctatttgcact

SEQ ID NO: 1322214 - DNA, 15 bp, Homo sapiens
gaggtctatttgcac

SEQ ID NO: 1322215 - DNA, 15 bp, Homo sapiens
ggaggtctatttgca

SEQ ID NO: 1322216 - DNA, 15 bp, Homo sapiens
gggaggtctatttgc

SEQ ID NO: 1322217 - DNA, 15 bp, Homo sapiens
ggggaggtctatttg

SEQ ID NO: 1322218 - DNA, 15 bp, Homo sapiens
tggggaggtctattt

SEQ ID NO: 1322219 - DNA, 15 bp, Homo sapiens
gtggggaggtctatt

SEQ ID NO: 1322220 - DNA, 15 bp, Homo sapiens
ggtggggaggtctat

SEQ ID NO: 1322221 - DNA, 15 bp, Homo sapiens
aggtggggaggtcta

SEQ ID NO: 1322222 - DNA, 15 bp, Homo sapiens
gaggtggggaggtct

SEQ ID NO: 1322223 - DNA, 15 bp, Homo sapiens
ggaggtggggaggtc

SEQ ID NO: 1322224 - DNA, 15 bp, Homo sapiens
tggaggtggggaggt

SEQ ID NO: 1322225 - DNA, 15 bp, Homo sapiens
atggaggtggggagg

SEQ ID NO: 1322226 - DNA, 15 bp, Homo sapiens
catggaggtggggag

SEQ ID NO: 1322227 - DNA, 15 bp, Homo sapiens
ccatggaggtgggga

SEQ ID NO: 1322228 - DNA, 15 bp, Homo sapiens
accatggaggtgggg

SEQ ID NO: 1322229 - DNA, 15 bp, Homo sapiens
gaccatggaggtggg

SEQ ID NO: 1322230 - DNA, 15 bp, Homo sapiens
agaccatggaggtgg

SEQ ID NO: 1322231 - DNA, 15 bp, Homo sapiens
aagaccatggaggtg

SEQ ID NO: 1322232 - DNA, 15 bp, Homo sapiens
gaagaccatggaggt

SEQ ID NO: 1322233 - DNA, 15 bp, Homo sapiens
tgaagaccatggagg

SEQ ID NO: 1322234 - DNA, 15 bp, Homo sapiens
ttgaagaccatggag

SEQ ID NO: 1322235 - DNA, 15 bp, Homo sapiens
cttgaagaccatgga

SEQ ID NO: 1322236 - DNA, 15 bp, Homo sapiens
ccttgaagaccatgg

SEQ ID NO: 1322237 - DNA, 15 bp, Homo sapiens
tccttgaagaccatg

SEQ ID NO: 1322238 - DNA, 15 bp, Homo sapiens
ctccttgaagaccat

SEQ ID NO: 1322239 - DNA, 15 bp, Homo sapiens
gctccttgaagacca

SEQ ID NO: 1322240 - DNA, 15 bp, Homo sapiens
ggctccttgaagacc

SEQ ID NO: 1322241 - DNA, 15 bp, Homo sapiens
tggctccttgaagac

SEQ ID NO: 1322242 - DNA, 15 bp, Homo sapiens
ctggctccttgaaga

SEQ ID NO: 1322243 - DNA, 15 bp, Homo sapiens
actggctccttgaag

SEQ ID NO: 1322244 - DNA, 15 bp, Homo sapiens
gactggctccttgaa

SEQ ID NO: 1322245 - DNA, 15 bp, Homo sapiens
tgactggctccttga

SEQ ID NO: 1322246 - DNA, 15 bp, Homo sapiens
ctgactggctccttg

SEQ ID NO: 1322247 - DNA, 15 bp, Homo sapiens
actgactggctcctt

SEQ ID NO: 1322248 - DNA, 15 bp, Homo sapiens
cactgactggctcct

SEQ ID NO: 1322249 - DNA, 15 bp, Homo sapiens
ccactgactggctcc

SEQ ID NO: 1322250 - DNA, 15 bp, Homo sapiens
cccactgactggctc

SEQ ID NO: 1322251 - DNA, 15 bp, Homo sapiens
acccactgactggct

SEQ ID NO: 1322252 - DNA, 15 bp, Homo sapiens
cacccactgactggc

SEQ ID NO: 1322253 - DNA, 15 bp, Homo sapiens
gcacccactgactgg

SEQ ID NO: 1322254 - DNA, 15 bp, Homo sapiens
agcacccactgactg

SEQ ID NO: 1322255 - DNA, 15 bp, Homo sapiens
cagcacccactgact

SEQ ID NO: 1322256 - DNA, 15 bp, Homo sapiens
gcagcacccactgac

SEQ ID NO: 1322257 - DNA, 15 bp, Homo sapiens
ggcagcacccactga

SEQ ID NO: 1322258 - DNA, 15 bp, Homo sapiens
gggcagcacccactg

SEQ ID NO: 1322259 - DNA, 15 bp, Homo sapiens
tgggcagcacccact

SEQ ID NO: 1322260 - DNA, 15 bp, Homo sapiens
ttgggcagcacccac

SEQ ID NO: 1322261 - DNA, 15 bp, Homo sapiens
cttgggcagcaccca

SEQ ID NO: 1322262 - DNA, 15 bp, Homo sapiens
tcttgggcagcaccc

SEQ ID NO: 1322263 - DNA, 15 bp, Homo sapiens
gtcttgggcagcacc

SEQ ID NO: 1322264 - DNA, 15 bp, Homo sapiens
agtcttgggcagcac

SEQ ID NO: 1322265 - DNA, 15 bp, Homo sapiens
cagtcttgggcagca

SEQ ID NO: 1322266 - DNA, 15 bp, Homo sapiens
gcagtcttgggcagc

SEQ ID NO: 1322267 - DNA, 15 bp, Homo sapiens
tgcagtcttgggcag

SEQ ID NO: 1322268 - DNA, 15 bp, Homo sapiens
ttgcagtcttgggca

SEQ ID NO: 1322269 - DNA, 15 bp, Homo sapiens
attgcagtcttgggc

SEQ ID NO: 1322270 - DNA, 15 bp, Homo sapiens
tattgcagtcttggg

SEQ ID NO: 1322271 - DNA, 15 bp, Homo sapiens
ctattgcagtcttgg

SEQ ID NO: 1322272 - DNA, 15 bp, Homo sapiens
cctattgcagtcttg

SEQ ID NO: 1322273 - DNA, 15 bp, Homo sapiens
gcctattgcagtctt

SEQ ID NO: 1322274 - DNA, 15 bp, Homo sapiens
tgcctattgcagtct

SEQ ID NO: 1322275 - DNA, 15 bp, Homo sapiens
gtgcctattgcagtc

SEQ ID NO: 1322276 - DNA, 15 bp, Homo sapiens
cgtgcctattgcagt

SEQ ID NO: 1322277 - DNA, 15 bp, Homo sapiens
ccgtgcctattgcag

SEQ ID NO: 1322278 - DNA, 15 bp, Homo sapiens
gccgtgcctattgca

SEQ ID NO: 1322279 - DNA, 15 bp, Homo sapiens
tgccgtgcctattgc

SEQ ID NO: 1322280 - DNA, 15 bp, Homo sapiens
ctgccgtgcctattg

SEQ ID NO: 1322281 - DNA, 15 bp, Homo sapiens
tctgccgtgcctatt

SEQ ID NO: 1322282 - DNA, 15 bp, Homo sapiens
ctctgccgtgcctat

SEQ ID NO: 1322283 - DNA, 15 bp, Homo sapiens
tctctgccgtgccta

SEQ ID NO: 1322284 - DNA, 15 bp, Homo sapiens
ctctctgccgtgcct

SEQ ID NO: 1322285 - DNA, 15 bp, Homo sapiens
cctctctgccgtgcc

SEQ ID NO: 1322286 - DNA, 15 bp, Homo sapiens
tcctctctgccgtgc

SEQ ID NO: 1322287 - DNA, 15 bp, Homo sapiens
ttcctctctgccgtg

SEQ ID NO: 1322288 - DNA, 15 bp, Homo sapiens
cttcctctctgccgt

SEQ ID NO: 1322289 - DNA, 15 bp, Homo sapiens
tcttcctctctgccg

SEQ ID NO: 1322290 - DNA, 15 bp, Homo sapiens
ctcttcctctctgcc

SEQ ID NO: 1322291 - DNA, 15 bp, Homo sapiens
gctcttcctctctgc

SEQ ID NO: 1322292 - DNA, 15 bp, Homo sapiens
agctcttcctctctg

SEQ ID NO: 1322293 - DNA, 15 bp, Homo sapiens
cagctcttcctctct

SEQ ID NO: 1322294 - DNA, 15 bp, Homo sapiens
gcagctcttcctctc

SEQ ID NO: 1322295 - DNA, 15 bp, Homo sapiens
agcagctcttcctct

SEQ ID NO: 1322296 - DNA, 15 bp, Homo sapiens
cagcagctcttcctc

SEQ ID NO: 1322297 - DNA, 15 bp, Homo sapiens
acagcagctcttcct

SEQ ID NO: 1322298 - DNA, 15 bp, Homo sapiens
gacagcagctcttcc

SEQ ID NO: 1322299 - DNA, 15 bp, Homo sapiens
tgacagcagctcttc

SEQ ID NO: 1322300 - DNA, 15 bp, Homo sapiens
atgacagcagctctt

SEQ ID NO: 1322301 - DNA, 15 bp, Homo sapiens
aatgacagcagctct

SEQ ID NO: 1322302 - DNA, 15 bp, Homo sapiens
gaatgacagcagctc

SEQ ID NO: 1322303 - DNA, 15 bp, Homo sapiens
tgaatgacagcagct

SEQ ID NO: 1322304 - DNA, 15 bp, Homo sapiens
ttgaatgacagcagc

SEQ ID NO: 1322305 - DNA, 15 bp, Homo sapiens
gttgaatgacagcag

SEQ ID NO: 1322306 - DNA, 15 bp, Homo sapiens
cgttgaatgacagca

SEQ ID NO: 1322307 - DNA, 15 bp, Homo sapiens
acgttgaatgacagc

SEQ ID NO: 1322308 - DNA, 15 bp, Homo sapiens
cacgttgaatgacag

SEQ ID NO: 1322309 - DNA, 15 bp, Homo sapiens
ccacgttgaatgaca

SEQ ID NO: 1322310 - DNA, 15 bp, Homo sapiens
accacgttgaatgac

SEQ ID NO: 1322311 - DNA, 15 bp, Homo sapiens
caccacgttgaatga

SEQ ID NO: 1322312 - DNA, 15 bp, Homo sapiens
gcaccacgttgaatg

SEQ ID NO: 1322313 - DNA, 15 bp, Homo sapiens
ggcaccacgttgaat

SEQ ID NO: 1322314 - DNA, 15 bp, Homo sapiens
aggcaccacgttgaa

SEQ ID NO: 1322315 - DNA, 15 bp, Homo sapiens
caggcaccacgttga

SEQ ID NO: 1322316 - DNA, 15 bp, Homo sapiens
tcaggcaccacgttg

SEQ ID NO: 1322317 - DNA, 15 bp, Homo sapiens
ctcaggcaccacgtt

SEQ ID NO: 1322318 - DNA, 15 bp, Homo sapiens
tctcaggcaccacgt

SEQ ID NO: 1322319 - DNA, 15 bp, Homo sapiens
ctctcaggcaccacg

SEQ ID NO: 1322320 - DNA, 15 bp, Homo sapiens
gctctcaggcaccac

SEQ ID NO: 1322321 - DNA, 15 bp, Homo sapiens
ggctctcaggcacca

SEQ ID NO: 1322322 - DNA, 15 bp, Homo sapiens
gggctctcaggcacc

SEQ ID NO: 1322323 - DNA, 15 bp, Homo sapiens
agggctctcaggcac

SEQ ID NO: 1322324 - DNA, 15 bp, Homo sapiens
tagggctctcaggca

SEQ ID NO: 1322325 - DNA, 15 bp, Homo sapiens
gtagggctctcaggc

SEQ ID NO: 1322326 - DNA, 15 bp, Homo sapiens
cgtagggctctcagg

SEQ ID NO: 1322327 - DNA, 15 bp, Homo sapiens
gcgtagggctctcag

SEQ ID NO: 1322328 - DNA, 15 bp, Homo sapiens
tgcgtagggctctca

SEQ ID NO: 1322329 - DNA, 15 bp, Homo sapiens
ctgcgtagggctctc

SEQ ID NO: 1322330 - DNA, 15 bp, Homo sapiens
gctgcgtagggctct

SEQ ID NO: 1322331 - DNA, 15 bp, Homo sapiens
ggctgcgtagggctc

SEQ ID NO: 1322332 - DNA, 15 bp, Homo sapiens
tggctgcgtagggct

SEQ ID NO: 1322333 - DNA, 15 bp, Homo sapiens
gtggctgcgtagggc

SEQ ID NO: 1322334 - DNA, 15 bp, Homo sapiens
tgtggctgcgtaggg

SEQ ID NO: 1322335 - DNA, 15 bp, Homo sapiens
gtgtggctgcgtagg

SEQ ID NO: 1322336 - DNA, 15 bp, Homo sapiens
agtgtggctgcgtag

SEQ ID NO: 1322337 - DNA, 15 bp, Homo sapiens
cagtgtggctgcgta

SEQ ID NO: 1322338 - DNA, 15 bp, Homo sapiens
ccagtgtggctgcgt

SEQ ID NO: 1322339 - DNA, 15 bp, Homo sapiens
cccagtgtggctgcg

SEQ ID NO: 1322340 - DNA, 15 bp, Homo sapiens
ccccagtgtggctgc

SEQ ID NO: 1322341 - DNA, 15 bp, Homo sapiens
gccccagtgtggctg

SEQ ID NO: 1322342 - DNA, 15 bp, Homo sapiens
ggccccagtgtggct

SEQ ID NO: 1322343 - DNA, 15 bp, Homo sapiens
tggccccagtgtggc

SEQ ID NO: 1322344 - DNA, 15 bp, Homo sapiens
ttggccccagtgtgg

SEQ ID NO: 1322345 - DNA, 15 bp, Homo sapiens
attggccccagtgtg

SEQ ID NO: 1322346 - DNA, 15 bp, Homo sapiens
cattggccccagtgt

SEQ ID NO: 1322347 - DNA, 15 bp, Homo sapiens
ccattggccccagtg

SEQ ID NO: 1322348 - DNA, 15 bp, Homo sapiens
cccattggccccagt

SEQ ID NO: 1322349 - DNA, 15 bp, Homo sapiens
tcccattggccccag

SEQ ID NO: 1322350 - DNA, 15 bp, Homo sapiens
gtcccattggcccca

SEQ ID NO: 1322351 - DNA, 15 bp, Homo sapiens
tgtcccattggcccc

SEQ ID NO: 1322352 - DNA, 15 bp, Homo sapiens
ctgtcccattggccc

SEQ ID NO: 1322353 - DNA, 15 bp, Homo sapiens
cctgtcccattggcc

SEQ ID NO: 1322354 - DNA, 15 bp, Homo sapiens
acctgtcccattggc

SEQ ID NO: 1322355 - DNA, 15 bp, Homo sapiens
cacctgtcccattgg

SEQ ID NO: 1322356 - DNA, 15 bp, Homo sapiens
gcacctgtcccattg

SEQ ID NO: 1322357 - DNA, 15 bp, Homo sapiens
agcacctgtcccatt

SEQ ID NO: 1322358 - DNA, 15 bp, Homo sapiens
gagcacctgtcccat

SEQ ID NO: 1322359 - DNA, 15 bp, Homo sapiens
ggagcacctgtccca

SEQ ID NO: 1322360 - DNA, 15 bp, Homo sapiens
aggagcacctgtccc

SEQ ID NO: 1322361 - DNA, 15 bp, Homo sapiens
caggagcacctgtcc

SEQ ID NO: 1322362 - DNA, 15 bp, Homo sapiens
gcaggagcacctgtc

SEQ ID NO: 1322363 - DNA, 15 bp, Homo sapiens
tgcaggagcacctgt

SEQ ID NO: 1322364 - DNA, 15 bp, Homo sapiens
ctgcaggagcacctg

SEQ ID NO: 1322365 - DNA, 15 bp, Homo sapiens
tctgcaggagcacct

SEQ ID NO: 1322366 - DNA, 15 bp, Homo sapiens
ttctgcaggagcacc

SEQ ID NO: 1322367 - DNA, 15 bp, Homo sapiens
cttctgcaggagcac

SEQ ID NO: 1322368 - DNA, 15 bp, Homo sapiens
ccttctgcaggagca

SEQ ID NO: 1322369 - DNA, 15 bp, Homo sapiens
gccttctgcaggagc

SEQ ID NO: 1322370 - DNA, 15 bp, Homo sapiens
agccttctgcaggag

SEQ ID NO: 1322371 - DNA, 15 bp, Homo sapiens
gagccttctgcagga

SEQ ID NO: 1322372 - DNA, 15 bp, Homo sapiens
ggagccttctgcagg

SEQ ID NO: 1322373 - DNA, 15 bp, Homo sapiens
tggagccttctgcag

SEQ ID NO: 1322374 - DNA, 15 bp, Homo sapiens
ctggagccttctgca

SEQ ID NO: 1322375 - DNA, 15 bp, Homo sapiens
gctggagccttctgc

SEQ ID NO: 1322376 - DNA, 15 bp, Homo sapiens
tgctggagccttctg

SEQ ID NO: 1322377 - DNA, 15 bp, Homo sapiens
ttgctggagccttct

SEQ ID NO: 1322378 - DNA, 15 bp, Homo sapiens
cttgctggagccttc

SEQ ID NO: 1322379 - DNA, 15 bp, Homo sapiens
gcttgctggagcctt

SEQ ID NO: 1322380 - DNA, 15 bp, Homo sapiens
ggcttgctggagcct

SEQ ID NO: 1322381 - DNA, 15 bp, Homo sapiens
cggcttgctggagcc

SEQ ID NO: 1322382 - DNA, 15 bp, Homo sapiens
ccggcttgctggagc

SEQ ID NO: 1322383 - DNA, 15 bp, Homo sapiens
gccggcttgctggag

SEQ ID NO: 1322384 - DNA, 15 bp, Homo sapiens
ggccggcttgctgga

SEQ ID NO: 1322385 - DNA, 15 bp, Homo sapiens
tggccggcttgctgg

SEQ ID NO: 1322386 - DNA, 15 bp, Homo sapiens
gtggccggcttgctg

SEQ ID NO: 1322387 - DNA, 15 bp, Homo sapiens
agtggccggcttgct

SEQ ID NO: 1322388 - DNA, 15 bp, Homo sapiens
tagtggccggcttgc

SEQ ID NO: 1322389 - DNA, 15 bp, Homo sapiens
ttagtggccggcttg

SEQ ID NO: 1322390 - DNA, 15 bp, Homo sapiens
tttagtggccggctt

SEQ ID NO: 1322391 - DNA, 15 bp, Homo sapiens
ctttagtggccggct

SEQ ID NO: 1322392 - DNA, 15 bp, Homo sapiens
tctttagtggccggc

SEQ ID NO: 1322393 - DNA, 15 bp, Homo sapiens
ttctttagtggccgg

SEQ ID NO: 1322394 - DNA, 15 bp, Homo sapiens
tttctttagtggccg

SEQ ID NO: 1322395 - DNA, 15 bp, Homo sapiens
atttctttagtggcc

SEQ ID NO: 1322396 - DNA, 15 bp, Homo sapiens
catttctttagtggc

SEQ ID NO: 1322397 - DNA, 15 bp, Homo sapiens
gcatttctttagtgg

SEQ ID NO: 1322398 - DNA, 15 bp, Homo sapiens
tgcatttctttagtg

SEQ ID NO: 1322399 - DNA, 15 bp, Homo sapiens
gtgcatttctttagt

SEQ ID NO: 1322400 - DNA, 15 bp, Homo sapiens
tgtgcatttctttag

SEQ ID NO: 1322401 - DNA, 15 bp, Homo sapiens
ctgtgcatttcttta

SEQ ID NO: 1322402 - DNA, 15 bp, Homo sapiens
gctgtgcatttcttt

SEQ ID NO: 1322403 - DNA, 15 bp, Homo sapiens
tgctgtgcatttctt

SEQ ID NO: 1322404 - DNA, 15 bp, Homo sapiens
atgctgtgcatttct

SEQ ID NO: 1322405 - DNA, 15 bp, Homo sapiens
aatgctgtgcatttc

SEQ ID NO: 1322406 - DNA, 15 bp, Homo sapiens
gaatgctgtgcattt

SEQ ID NO: 1322407 - DNA, 15 bp, Homo sapiens
tgaatgctgtgcatt

SEQ ID NO: 1322408 - DNA, 15 bp, Homo sapiens
ctgaatgctgtgcat

SEQ ID NO: 1322409 - DNA, 15 bp, Homo sapiens
actgaatgctgtgca

SEQ ID NO: 1322410 - DNA, 15 bp, Homo sapiens
tactgaatgctgtgc

SEQ ID NO: 1322411 - DNA, 15 bp, Homo sapiens
ctactgaatgctgtg

SEQ ID NO: 1322412 - DNA, 15 bp, Homo sapiens
cctactgaatgctgt

SEQ ID NO: 1322413 - DNA, 15 bp, Homo sapiens
acctactgaatgctg

SEQ ID NO: 1322414 - DNA, 15 bp, Homo sapiens
gacctactgaatgct

SEQ ID NO: 1322415 - DNA, 15 bp, Homo sapiens
ggacctactgaatgc

SEQ ID NO: 1322416 - DNA, 15 bp, Homo sapiens
aggacctactgaatg

SEQ ID NO: 1322417 - DNA, 15 bp, Homo sapiens
aaggacctactgaat

SEQ ID NO: 1322418 - DNA, 15 bp, Homo sapiens
caaggacctactgaa

SEQ ID NO: 1322419 - DNA, 15 bp, Homo sapiens
tcaaggacctactga

SEQ ID NO: 1322420 - DNA, 15 bp, Homo sapiens
ttcaaggacctactg

SEQ ID NO: 1322421 - DNA, 15 bp, Homo sapiens
tttcaaggacctact

SEQ ID NO: 1322422 - DNA, 15 bp, Homo sapiens
ttttcaaggacctac

SEQ ID NO: 1322423 - DNA, 15 bp, Homo sapiens
cttttcaaggaccta

SEQ ID NO: 1322424 - DNA, 15 bp, Homo sapiens
gcttttcaaggacct

SEQ ID NO: 1322425 - DNA, 15 bp, Homo sapiens
agcttttcaaggacc

SEQ ID NO: 1322426 - DNA, 15 bp, Homo sapiens
tagcttttcaaggac

SEQ ID NO: 1322427 - DNA, 15 bp, Homo sapiens
ttagcttttcaagga

SEQ ID NO: 1322428 - DNA, 15 bp, Homo sapiens
tttagcttttcaagg

SEQ ID NO: 1322429 - DNA, 15 bp, Homo sapiens
ctttagcttttcaag

SEQ ID NO: 1322430 - DNA, 15 bp, Homo sapiens
gctttagcttttcaa

SEQ ID NO: 1322431 - DNA, 15 bp, Homo sapiens
tgctttagcttttca

SEQ ID NO: 1322432 - DNA, 15 bp, Homo sapiens
atgctttagcttttc

SEQ ID NO: 1322433 - DNA, 15 bp, Homo sapiens
aatgctttagctttt

SEQ ID NO: 1322434 - DNA, 15 bp, Homo sapiens
aaatgctttagcttt

SEQ ID NO: 1322435 - DNA, 15 bp, Homo sapiens
gaaatgctttagctt

SEQ ID NO: 1322436 - DNA, 15 bp, Homo sapiens
agaaatgctttagct

SEQ ID NO: 1322437 - DNA, 15 bp, Homo sapiens
gagaaatgctttagc

SEQ ID NO: 1322438 - DNA, 15 bp, Homo sapiens
ggagaaatgctttag

SEQ ID NO: 1322439 - DNA, 15 bp, Homo sapiens
gggagaaatgcttta

SEQ ID NO: 1322440 - DNA, 15 bp, Homo sapiens
ggggagaaatgcttt

SEQ ID NO: 1322441 - DNA, 15 bp, Homo sapiens
aggggagaaatgctt

SEQ ID NO: 1322442 - DNA, 15 bp, Homo sapiens
gaggggagaaatgct

SEQ ID NO: 1322443 - DNA, 15 bp, Homo sapiens
tgaggggagaaatgc

SEQ ID NO: 1322444 - DNA, 15 bp, Homo sapiens
ctgaggggagaaatg

SEQ ID NO: 1322445 - DNA, 15 bp, Homo sapiens
gctgaggggagaaat

SEQ ID NO: 1322446 - DNA, 15 bp, Homo sapiens
ggctgaggggagaaa

SEQ ID NO: 1322447 - DNA, 15 bp, Homo sapiens
tggctgaggggagaa

SEQ ID NO: 1322448 - DNA, 15 bp, Homo sapiens
gtggctgaggggaga

SEQ ID NO: 1322449 - DNA, 15 bp, Homo sapiens
ggtggctgaggggag

SEQ ID NO: 1322450 - DNA, 15 bp, Homo sapiens
gggtggctgagggga

SEQ ID NO: 1322451 - DNA, 15 bp, Homo sapiens
tgggtggctgagggg

SEQ ID NO: 1322452 - DNA, 15 bp, Homo sapiens
gtgggtggctgaggg

SEQ ID NO: 1322453 - DNA, 15 bp, Homo sapiens
agtgggtggctgagg

SEQ ID NO: 1322454 - DNA, 15 bp, Homo sapiens
gagtgggtggctgag

SEQ ID NO: 1322455 - DNA, 15 bp, Homo sapiens
agagtgggtggctga

SEQ ID NO: 1322456 - DNA, 15 bp, Homo sapiens
gagagtgggtggctg

SEQ ID NO: 1322457 - DNA, 15 bp, Homo sapiens
tgagagtgggtggct

SEQ ID NO: 1322458 - DNA, 15 bp, Homo sapiens
ttgagagtgggtggc

SEQ ID NO: 1322459 - DNA, 15 bp, Homo sapiens
cttgagagtgggtgg

SEQ ID NO: 1322460 - DNA, 15 bp, Homo sapiens
gcttgagagtgggtg

SEQ ID NO: 1322461 - DNA, 15 bp, Homo sapiens
agcttgagagtgggt

SEQ ID NO: 1322462 - DNA, 15 bp, Homo sapiens
tagcttgagagtggg

SEQ ID NO: 1322463 - DNA, 15 bp, Homo sapiens
ctagcttgagagtgg

SEQ ID NO: 1322464 - DNA, 15 bp, Homo sapiens
actagcttgagagtg

SEQ ID NO: 1322465 - DNA, 15 bp, Homo sapiens
aactagcttgagagt

SEQ ID NO: 1322466 - DNA, 15 bp, Homo sapiens
taactagcttgagag

SEQ ID NO: 1322467 - DNA, 15 bp, Homo sapiens
gtaactagcttgaga

SEQ ID NO: 1322468 - DNA, 15 bp, Homo sapiens
ggtaactagcttgag

SEQ ID NO: 1322469 - DNA, 15 bp, Homo sapiens
tggtaactagcttga

SEQ ID NO: 1322470 - DNA, 15 bp, Homo sapiens
atggtaactagcttg

SEQ ID NO: 1322471 - DNA, 15 bp, Homo sapiens
aatggtaactagctt

SEQ ID NO: 1322472 - DNA, 15 bp, Homo sapiens
aaatggtaactagct

SEQ ID NO: 1322473 - DNA, 15 bp, Homo sapiens
gaaatggtaactagc

SEQ ID NO: 1322474 - DNA, 15 bp, Homo sapiens
ggaaatggtaactag

SEQ ID NO: 1322475 - DNA, 15 bp, Homo sapiens
aggaaatggtaacta

SEQ ID NO: 1322476 - DNA, 15 bp, Homo sapiens
caggaaatggtaact

SEQ ID NO: 1322477 - DNA, 15 bp, Homo sapiens
gcaggaaatggtaac

SEQ ID NO: 1322478 - DNA, 15 bp, Homo sapiens
ggcaggaaatggtaa

SEQ ID NO: 1322479 - DNA, 15 bp, Homo sapiens
tggcaggaaatggta

SEQ ID NO: 1322480 - DNA, 15 bp, Homo sapiens
atggcaggaaatggt

SEQ ID NO: 1322481 - DNA, 15 bp, Homo sapiens
aatggcaggaaatgg

SEQ ID NO: 1322482 - DNA, 15 bp, Homo sapiens
aaatggcaggaaatg

SEQ ID NO: 1322483 - DNA, 15 bp, Homo sapiens
caaatggcaggaaat

SEQ ID NO: 1322484 - DNA, 15 bp, Homo sapiens
gcaaatggcaggaaa

SEQ ID NO: 1322485 - DNA, 15 bp, Homo sapiens
tgcaaatggcaggaa

SEQ ID NO: 1322486 - DNA, 15 bp, Homo sapiens
gtgcaaatggcagga

SEQ ID NO: 1322487 - DNA, 15 bp, Homo sapiens
tgtgcaaatggcagg

SEQ ID NO: 1322488 - DNA, 15 bp, Homo sapiens
ctgtgcaaatggcag

SEQ ID NO: 1322489 - DNA, 15 bp, Homo sapiens
tctgtgcaaatggca

SEQ ID NO: 1322490 - DNA, 15 bp, Homo sapiens
gtctgtgcaaatggc

SEQ ID NO: 1322491 - DNA, 15 bp, Homo sapiens
tgtctgtgcaaatgg

SEQ ID NO: 1322492 - DNA, 15 bp, Homo sapiens
ttgtctgtgcaaatg

SEQ ID NO: 1322493 - DNA, 15 bp, Homo sapiens
tttgtctgtgcaaat

SEQ ID NO: 1322494 - DNA, 15 bp, Homo sapiens
atttgtctgtgcaaa

SEQ ID NO: 1322495 - DNA, 15 bp, Homo sapiens
catttgtctgtgcaa

SEQ ID NO: 1322496 - DNA, 15 bp, Homo sapiens
ccatttgtctgtgca

SEQ ID NO: 1322497 - DNA, 15 bp, Homo sapiens
accatttgtctgtgc

SEQ ID NO: 1322498 - DNA, 15 bp, Homo sapiens
caccatttgtctgtg

SEQ ID NO: 1322499 - DNA, 15 bp, Homo sapiens
acaccatttgtctgt

SEQ ID NO: 1322500 - DNA, 15 bp, Homo sapiens
aacaccatttgtctg

SEQ ID NO: 1322501 - DNA, 15 bp, Homo sapiens
gaacaccatttgtct

SEQ ID NO: 1322502 - DNA, 15 bp, Homo sapiens
agaacaccatttgtc

SEQ ID NO: 1322503 - DNA, 15 bp, Homo sapiens
aagaacaccatttgt

SEQ ID NO: 1322504 - DNA, 15 bp, Homo sapiens
aaagaacaccatttg

SEQ ID NO: 1322505 - DNA, 15 bp, Homo sapiens
gaaagaacaccattt

SEQ ID NO: 1322506 - DNA, 15 bp, Homo sapiens
ggaaagaacaccatt

SEQ ID NO: 1322507 - DNA, 15 bp, Homo sapiens
gggaaagaacaccat

SEQ ID NO: 1322508 - DNA, 15 bp, Homo sapiens
ggggaaagaacacca

SEQ ID NO: 1322509 - DNA, 15 bp, Homo sapiens
aggggaaagaacacc

SEQ ID NO: 1322510 - DNA, 15 bp, Homo sapiens
caggggaaagaacac

SEQ ID NO: 1322511 - DNA, 15 bp, Homo sapiens
gcaggggaaagaaca

SEQ ID NO: 1322512 - DNA, 15 bp, Homo sapiens
tgcaggggaaagaac

SEQ ID NO: 1322513 - DNA, 15 bp, Homo sapiens
atgcaggggaaagaa

SEQ ID NO: 1322514 - DNA, 15 bp, Homo sapiens
aatgcaggggaaaga

SEQ ID NO: 1322515 - DNA, 15 bp, Homo sapiens
aaatgcaggggaaag

SEQ ID NO: 1322516 - DNA, 15 bp, Homo sapiens
taaatgcaggggaaa

SEQ ID NO: 1322517 - DNA, 15 bp, Homo sapiens
ctaaatgcaggggaa

SEQ ID NO: 1322518 - DNA, 15 bp, Homo sapiens
gctaaatgcagggga

SEQ ID NO: 1322519 - DNA, 15 bp, Homo sapiens
agctaaatgcagggg

SEQ ID NO: 1322520 - DNA, 15 bp, Homo sapiens
aagctaaatgcaggg

SEQ ID NO: 1322521 - DNA, 15 bp, Homo sapiens
taagctaaatgcagg

SEQ ID NO: 1322522 - DNA, 15 bp, Homo sapiens
ataagctaaatgcag

SEQ ID NO: 1322523 - DNA, 15 bp, Homo sapiens
gataagctaaatgca

SEQ ID NO: 1322524 - DNA, 15 bp, Homo sapiens
tgataagctaaatgc

SEQ ID NO: 1322525 - DNA, 15 bp, Homo sapiens
ttgataagctaaatg

SEQ ID NO: 1322526 - DNA, 15 bp, Homo sapiens
tttgataagctaaat

SEQ ID NO: 1322527 - DNA, 15 bp, Homo sapiens
ttttgataagctaaa

SEQ ID NO: 1322528 - DNA, 15 bp, Homo sapiens
gttttgataagctaa

SEQ ID NO: 1322529 - DNA, 15 bp, Homo sapiens
ggttttgataagcta

SEQ ID NO: 1322530 - DNA, 15 bp, Homo sapiens
gggttttgataagct

SEQ ID NO: 1322531 - DNA, 15 bp, Homo sapiens
tgggttttgataagc

SEQ ID NO: 1322532 - DNA, 15 bp, Homo sapiens
ctgggttttgataag

SEQ ID NO: 1322533 - DNA, 15 bp, Homo sapiens
cctgggttttgataa

SEQ ID NO: 1322534 - DNA, 15 bp, Homo sapiens
tcctgggttttgata

SEQ ID NO: 1322535 - DNA, 15 bp, Homo sapiens
gtcctgggttttgat

SEQ ID NO: 1322536 - DNA, 15 bp, Homo sapiens
tgtcctgggttttga

SEQ ID NO: 1322537 - DNA, 15 bp, Homo sapiens
ttgtcctgggttttg

SEQ ID NO: 1322538 - DNA, 15 bp, Homo sapiens
attgtcctgggtttt

SEQ ID NO: 1322539 - DNA, 15 bp, Homo sapiens
cattgtcctgggttt

SEQ ID NO: 1322540 - DNA, 15 bp, Homo sapiens
acattgtcctgggtt

SEQ ID NO: 1322541 - DNA, 15 bp, Homo sapiens
cacattgtcctgggt

SEQ ID NO: 1322542 - DNA, 15 bp, Homo sapiens
acacattgtcctggg

SEQ ID NO: 1322543 - DNA, 15 bp, Homo sapiens
aacacattgtcctgg

SEQ ID NO: 1322544 - DNA, 15 bp, Homo sapiens
taacacattgtcctg

SEQ ID NO: 1322545 - DNA, 15 bp, Homo sapiens
ttaacacattgtcct

SEQ ID NO: 1322546 - DNA, 15 bp, Homo sapiens
tttaacacattgtcc

SEQ ID NO: 1322547 - DNA, 15 bp, Homo sapiens
ctttaacacattgtc

SEQ ID NO: 1322548 - DNA, 15 bp, Homo sapiens
cctttaacacattgt

SEQ ID NO: 1322549 - DNA, 15 bp, Homo sapiens
acctttaacacattg

SEQ ID NO: 1322550 - DNA, 15 bp, Homo sapiens
aacctttaacacatt

SEQ ID NO: 1322551 - DNA, 15 bp, Homo sapiens
aaacctttaacacat

SEQ ID NO: 1322552 - DNA, 15 bp, Homo sapiens
taaacctttaacaca

SEQ ID NO: 1322553 - DNA, 15 bp, Homo sapiens
ttaaacctttaacac

SEQ ID NO: 1322554 - DNA, 15 bp, Homo sapiens
gttaaacctttaaca

SEQ ID NO: 1322555 - DNA, 15 bp, Homo sapiens
agttaaacctttaac

SEQ ID NO: 1322556 - DNA, 15 bp, Homo sapiens
gagttaaacctttaa

SEQ ID NO: 1322557 - DNA, 15 bp, Homo sapiens
tgagttaaaccttta

SEQ ID NO: 1322558 - DNA, 15 bp, Homo sapiens
atgagttaaaccttt

SEQ ID NO: 1322559 - DNA, 15 bp, Homo sapiens
gatgagttaaacctt

SEQ ID NO: 1322560 - DNA, 15 bp, Homo sapiens
ggatgagttaaacct

SEQ ID NO: 1322561 - DNA, 15 bp, Homo sapiens
aggatgagttaaacc

SEQ ID NO: 1322562 - DNA, 15 bp, Homo sapiens
caggatgagttaaac

SEQ ID NO: 1322563 - DNA, 15 bp, Homo sapiens
gcaggatgagttaaa

SEQ ID NO: 1322564 - DNA, 15 bp, Homo sapiens
agcaggatgagttaa

SEQ ID NO: 1322565 - DNA, 15 bp, Homo sapiens
gagcaggatgagtta

SEQ ID NO: 1322566 - DNA, 15 bp, Homo sapiens
ggagcaggatgagtt

SEQ ID NO: 1322567 - DNA, 15 bp, Homo sapiens
tggagcaggatgagt

SEQ ID NO: 1322568 - DNA, 15 bp, Homo sapiens
gtggagcaggatgag

SEQ ID NO: 1322569 - DNA, 15 bp, Homo sapiens
cgtggagcaggatga

SEQ ID NO: 1322570 - DNA, 15 bp, Homo sapiens
gcgtggagcaggatg

SEQ ID NO: 1322571 - DNA, 15 bp, Homo sapiens
agcgtggagcaggat

SEQ ID NO: 1322572 - DNA, 15 bp, Homo sapiens
gagcgtggagcagga

SEQ ID NO: 1322573 - DNA, 15 bp, Homo sapiens
tgagcgtggagcagg

SEQ ID NO: 1322574 - DNA, 15 bp, Homo sapiens
atgagcgtggagcag

SEQ ID NO: 1322575 - DNA, 15 bp, Homo sapiens
gatgagcgtggagca

SEQ ID NO: 1322576 - DNA, 15 bp, Homo sapiens
ggatgagcgtggagc

SEQ ID NO: 1322577 - DNA, 15 bp, Homo sapiens
gggatgagcgtggag

SEQ ID NO: 1322578 - DNA, 15 bp, Homo sapiens
ggggatgagcgtgga

SEQ ID NO: 1322579 - DNA, 15 bp, Homo sapiens
tggggatgagcgtgg

SEQ ID NO: 1322580 - DNA, 15 bp, Homo sapiens
ttggggatgagcgtg

SEQ ID NO: 1322581 - DNA, 15 bp, Homo sapiens
gttggggatgagcgt

SEQ ID NO: 1322582 - DNA, 15 bp, Homo sapiens
tgttggggatgagcg

SEQ ID NO: 1322583 - DNA, 15 bp, Homo sapiens
ctgttggggatgagc

SEQ ID NO: 1322584 - DNA, 15 bp, Homo sapiens
cctgttggggatgag

SEQ ID NO: 1322585 - DNA, 15 bp, Homo sapiens
ccctgttggggatga

SEQ ID NO: 1322586 - DNA, 15 bp, Homo sapiens
gccctgttggggatg

SEQ ID NO: 1322587 - DNA, 15 bp, Homo sapiens
tgccctgttggggat

SEQ ID NO: 1322588 - DNA, 15 bp, Homo sapiens
ttgccctgttgggga

SEQ ID NO: 1322589 - DNA, 15 bp, Homo sapiens
gttgccctgttgggg

SEQ ID NO: 1322590 - DNA, 15 bp, Homo sapiens
tgttgccctgttggg

SEQ ID NO: 1322591 - DNA, 15 bp, Homo sapiens
ctgttgccctgttgg

SEQ ID NO: 1322592 - DNA, 15 bp, Homo sapiens
tctgttgccctgttg

SEQ ID NO: 1322593 - DNA, 15 bp, Homo sapiens
atctgttgccctgtt

SEQ ID NO: 1322594 - DNA, 15 bp, Homo sapiens
catctgttgccctgt

SEQ ID NO: 1322595 - DNA, 15 bp, Homo sapiens
ccatctgttgccctg

SEQ ID NO: 1322596 - DNA, 15 bp, Homo sapiens
tccatctgttgccct

SEQ ID NO: 1322597 - DNA, 15 bp, Homo sapiens
ttccatctgttgccc

SEQ ID NO: 1322598 - DNA, 15 bp, Homo sapiens
gttccatctgttgcc

SEQ ID NO: 1322599 - DNA, 15 bp, Homo sapiens
agttccatctgttgc

SEQ ID NO: 1322600 - DNA, 15 bp, Homo sapiens
aagttccatctgttg

SEQ ID NO: 1322601 - DNA, 15 bp, Homo sapiens
aaagttccatctgtt

SEQ ID NO: 1322602 - DNA, 15 bp, Homo sapiens
aaaagttccatctgt

SEQ ID NO: 1322603 - DNA, 15 bp, Homo sapiens
taaaagttccatctg

SEQ ID NO: 1322604 - DNA, 15 bp, Homo sapiens
ttaaaagttccatct

SEQ ID NO: 1322605 - DNA, 15 bp, Homo sapiens
tttaaaagttccatc

SEQ ID NO: 1322606 - DNA, 15 bp, Homo sapiens
ttttaaaagttccat

SEQ ID NO: 1322607 - DNA, 15 bp, Homo sapiens
cttttaaaagttcca

SEQ ID NO: 1322608 - DNA, 15 bp, Homo sapiens
gcttttaaaagttcc

SEQ ID NO: 1322609 - DNA, 15 bp, Homo sapiens
ggcttttaaaagttc

SEQ ID NO: 1322610 - DNA, 15 bp, Homo sapiens
tggcttttaaaagtt

SEQ ID NO: 1322611 - DNA, 15 bp, Homo sapiens
ttggcttttaaaagt

SEQ ID NO: 1322612 - DNA, 15 bp, Homo sapiens
tttggcttttaaaag

SEQ ID NO: 1322613 - DNA, 15 bp, Homo sapiens
ttttggcttttaaaa

SEQ ID NO: 1322614 - DNA, 15 bp, Homo sapiens
tttttggcttttaaa

SEQ ID NO: 1322615 - DNA, 15 bp, Homo sapiens
ttttttggcttttaa

SEQ ID NO: 1322616 - DNA, 15 bp, Homo sapiens
tttttttggctttta

SEQ ID NO: 1322617 - DNA, 15 bp, Homo sapiens
ttttttttggctttt

SEQ ID NO: 1322618 - DNA, 15 bp, Homo sapiens
tttttttttggcttt

SEQ ID NO: 1322619 - DNA, 15 bp, Homo sapiens
ttttttttttggctt

SEQ ID NO: 1322620 - DNA, 15 bp, Homo sapiens
tttttttttttggct

SEQ ID NO: 1322621 - DNA, 15 bp, Homo sapiens
agggctttttttttt

SEQ ID NO: 1322622 - DNA, 15 bp, Homo sapiens
aagggcttttttttt

SEQ ID NO: 1322623 - DNA, 15 bp, Homo sapiens
taagggctttttttt

SEQ ID NO: 1322624 - DNA, 15 bp, Homo sapiens
ttaagggcttttttt

SEQ ID NO: 1322625 - DNA, 15 bp, Homo sapiens
ttttaagggcttttt

SEQ ID NO: 1322626 - DNA, 15 bp, Homo sapiens
tttttaagggctttt

SEQ ID NO: 1322627 - DNA, 15 bp, Homo sapiens
atttttaagggcttt

SEQ ID NO: 1322628 - DNA, 15 bp, Homo sapiens
catttttaagggctt

SEQ ID NO: 1322629 - DNA, 15 bp, Homo sapiens
tcatttttaagggct

SEQ ID NO: 1322630 - DNA, 15 bp, Homo sapiens
ttcatttttaagggc

SEQ ID NO: 1322631 - DNA, 15 bp, Homo sapiens
attcatttttaaggg

SEQ ID NO: 1322632 - DNA, 15 bp, Homo sapiens
cattcatttttaagg

SEQ ID NO: 1322633 - DNA, 15 bp, Homo sapiens
acattcatttttaag

SEQ ID NO: 1322634 - DNA, 15 bp, Homo sapiens
aacattcatttttaa

SEQ ID NO: 1322635 - DNA, 15 bp, Homo sapiens
caacattcattttta

SEQ ID NO: 1322636 - DNA, 15 bp, Homo sapiens
gcaacattcattttt

SEQ ID NO: 1322637 - DNA, 15 bp, Homo sapiens
ggcaacattcatttt

SEQ ID NO: 1322638 - DNA, 15 bp, Homo sapiens
tggcaacattcattt

SEQ ID NO: 1322639 - DNA, 15 bp, Homo sapiens
atggcaacattcatt

SEQ ID NO: 1322640 - DNA, 15 bp, Homo sapiens
catggcaacattcat

SEQ ID NO: 1322641 - DNA, 15 bp, Homo sapiens
acatggcaacattca

SEQ ID NO: 1322642 - DNA, 15 bp, Homo sapiens
aacatggcaacattc

SEQ ID NO: 1322643 - DNA, 15 bp, Homo sapiens
caacatggcaacatt

SEQ ID NO: 1322644 - DNA, 15 bp, Homo sapiens
ccaacatggcaacat

SEQ ID NO: 1322645 - DNA, 15 bp, Homo sapiens
cccaacatggcaaca

SEQ ID NO: 1322646 - DNA, 15 bp, Homo sapiens
gcccaacatggcaac

SEQ ID NO: 1322647 - DNA, 15 bp, Homo sapiens
ggcccaacatggcaa

SEQ ID NO: 1322648 - DNA, 15 bp, Homo sapiens
tggcccaacatggca

SEQ ID NO: 1322649 - DNA, 15 bp, Homo sapiens
atggcccaacatggc

SEQ ID NO: 1322650 - DNA, 15 bp, Homo sapiens
catggcccaacatgg

SEQ ID NO: 1322651 - DNA, 15 bp, Homo sapiens
gcatggcccaacatg

SEQ ID NO: 1322652 - DNA, 15 bp, Homo sapiens
agcatggcccaacat

SEQ ID NO: 1322653 - DNA, 15 bp, Homo sapiens
gagcatggcccaaca

SEQ ID NO: 1322654 - DNA, 15 bp, Homo sapiens
agagcatggcccaac

SEQ ID NO: 1322655 - DNA, 15 bp, Homo sapiens
tagagcatggcccaa

SEQ ID NO: 1322656 - DNA, 15 bp, Homo sapiens
ttagagcatggccca

SEQ ID NO: 1322657 - DNA, 15 bp, Homo sapiens
tttagagcatggccc

SEQ ID NO: 1322658 - DNA, 15 bp, Homo sapiens
gtttagagcatggcc

SEQ ID NO: 1322659 - DNA, 15 bp, Homo sapiens
ggtttagagcatggc

SEQ ID NO: 1322660 - DNA, 15 bp, Homo sapiens
aggtttagagcatgg

SEQ ID NO: 1322661 - DNA, 15 bp, Homo sapiens
aaggtttagagcatg

SEQ ID NO: 1322662 - DNA, 15 bp, Homo sapiens
gaaggtttagagcat

SEQ ID NO: 1322663 - DNA, 15 bp, Homo sapiens
agaaggtttagagca

SEQ ID NO: 1322664 - DNA, 15 bp, Homo sapiens
aagaaggtttagagc

SEQ ID NO: 1322665 - DNA, 15 bp, Homo sapiens
gaagaaggtttagag

SEQ ID NO: 1322666 - DNA, 15 bp, Homo sapiens
tgaagaaggtttaga

SEQ ID NO: 1322667 - DNA, 15 bp, Homo sapiens
ctgaagaaggtttag

SEQ ID NO: 1322668 - DNA, 15 bp, Homo sapiens
tctgaagaaggttta

SEQ ID NO: 1322669 - DNA, 15 bp, Homo sapiens
ttctgaagaaggttt

SEQ ID NO: 1322670 - DNA, 15 bp, Homo sapiens
gttctgaagaaggtt

SEQ ID NO: 1322671 - DNA, 15 bp, Homo sapiens
ggttctgaagaaggt

SEQ ID NO: 1322672 - DNA, 15 bp, Homo sapiens
aggttctgaagaagg

SEQ ID NO: 1322673 - DNA, 15 bp, Homo sapiens
aaggttctgaagaag

SEQ ID NO: 1322674 - DNA, 15 bp, Homo sapiens
gaaggttctgaagaa

SEQ ID NO: 1322675 - DNA, 15 bp, Homo sapiens
tgaaggttctgaaga

SEQ ID NO: 1322676 - DNA, 15 bp, Homo sapiens
ctgaaggttctgaag

SEQ ID NO: 1322677 - DNA, 15 bp, Homo sapiens
tctgaaggttctgaa

SEQ ID NO: 1322678 - DNA, 15 bp, Homo sapiens
ctctgaaggttctga

SEQ ID NO: 1322679 - DNA, 15 bp, Homo sapiens
actctgaaggttctg

SEQ ID NO: 1322680 - DNA, 15 bp, Homo sapiens
aactctgaaggttct

SEQ ID NO: 1322681 - DNA, 15 bp, Homo sapiens
aaactctgaaggttc

SEQ ID NO: 1322682 - DNA, 15 bp, Homo sapiens
caaactctgaaggtt

SEQ ID NO: 1322683 - DNA, 15 bp, Homo sapiens
gcaaactctgaaggt

SEQ ID NO: 1322684 - DNA, 15 bp, Homo sapiens
tgcaaactctgaagg

SEQ ID NO: 1322685 - DNA, 15 bp, Homo sapiens
gtgcaaactctgaag

SEQ ID NO: 1322686 - DNA, 15 bp, Homo sapiens
agtgcaaactctgaa

SEQ ID NO: 1322687 - DNA, 15 bp, Homo sapiens
gagtgcaaactctga

SEQ ID NO: 1322688 - DNA, 15 bp, Homo sapiens
agagtgcaaactctg

SEQ ID NO: 1322689 - DNA, 15 bp, Homo sapiens
aagagtgcaaactct

SEQ ID NO: 1322690 - DNA, 15 bp, Homo sapiens
aaagagtgcaaactc

SEQ ID NO: 1322691 - DNA, 15 bp, Homo sapiens
aaaagagtgcaaact

SEQ ID NO: 1322692 - DNA, 15 bp, Homo sapiens
gaaaagagtgcaaac

SEQ ID NO: 1322693 - DNA, 15 bp, Homo sapiens
tgaaaagagtgcaaa

SEQ ID NO: 1322694 - DNA, 15 bp, Homo sapiens
ctgaaaagagtgcaa

SEQ ID NO: 1322695 - DNA, 15 bp, Homo sapiens
cctgaaaagagtgca

SEQ ID NO: 1322696 - DNA, 15 bp, Homo sapiens
ccctgaaaagagtgc

SEQ ID NO: 1322697 - DNA, 15 bp, Homo sapiens
cccctgaaaagagtg

SEQ ID NO: 1322698 - DNA, 15 bp, Homo sapiens
gcccctgaaaagagt

SEQ ID NO: 1322699 - DNA, 15 bp, Homo sapiens
ggcccctgaaaagag

SEQ ID NO: 1322700 - DNA, 15 bp, Homo sapiens
aggcccctgaaaaga

SEQ ID NO: 1322701 - DNA, 15 bp, Homo sapiens
caggcccctgaaaag

SEQ ID NO: 1322702 - DNA, 15 bp, Homo sapiens
ccaggcccctgaaaa

SEQ ID NO: 1322703 - DNA, 15 bp, Homo sapiens
tccaggcccctgaaa

SEQ ID NO: 1322704 - DNA, 15 bp, Homo sapiens
gtccaggcccctgaa

SEQ ID NO: 1322705 - DNA, 15 bp, Homo sapiens
agtccaggcccctga

SEQ ID NO: 1322706 - DNA, 15 bp, Homo sapiens
gagtccaggcccctg

SEQ ID NO: 1322707 - DNA, 15 bp, Homo sapiens
ggagtccaggcccct

SEQ ID NO: 1322708 - DNA, 15 bp, Homo sapiens
gggagtccaggcccc

SEQ ID NO: 1322709 - DNA, 15 bp, Homo sapiens
tgggagtccaggccc

SEQ ID NO: 1322710 - DNA, 15 bp, Homo sapiens
ttgggagtccaggcc

SEQ ID NO: 1322711 - DNA, 15 bp, Homo sapiens
cttgggagtccaggc

SEQ ID NO: 1322712 - DNA, 15 bp, Homo sapiens
tcttgggagtccagg

SEQ ID NO: 1322713 - DNA, 15 bp, Homo sapiens
ctcttgggagtccag

SEQ ID NO: 1322714 - DNA, 15 bp, Homo sapiens
actcttgggagtcca

SEQ ID NO: 1322715 - DNA, 15 bp, Homo sapiens
tactcttgggagtcc

SEQ ID NO: 1322716 - DNA, 15 bp, Homo sapiens
ttactcttgggagtc

SEQ ID NO: 1322717 - DNA, 15 bp, Homo sapiens
tttactcttgggagt

SEQ ID NO: 1322718 - DNA, 15 bp, Homo sapiens
ctttactcttgggag

SEQ ID NO: 1322719 - DNA, 15 bp, Homo sapiens
gctttactcttggga

SEQ ID NO: 1322720 - DNA, 15 bp, Homo sapiens
agctttactcttggg

SEQ ID NO: 1322721 - DNA, 15 bp, Homo sapiens
cagctttactcttgg

SEQ ID NO: 1322722 - DNA, 15 bp, Homo sapiens
ccagctttactcttg

SEQ ID NO: 1322723 - DNA, 15 bp, Homo sapiens
accagctttactctt

SEQ ID NO: 1322724 - DNA, 15 bp, Homo sapiens
gaccagctttactct

SEQ ID NO: 1322725 - DNA, 15 bp, Homo sapiens
ggaccagctttactc

SEQ ID NO: 1322726 - DNA, 15 bp, Homo sapiens
tggaccagctttact

SEQ ID NO: 1322727 - DNA, 15 bp, Homo sapiens
ctggaccagctttac

SEQ ID NO: 1322728 - DNA, 15 bp, Homo sapiens
gctggaccagcttta

SEQ ID NO: 1322729 - DNA, 15 bp, Homo sapiens
ggctggaccagcttt

SEQ ID NO: 1322730 - DNA, 15 bp, Homo sapiens
aggctggaccagctt

SEQ ID NO: 1322731 - DNA, 15 bp, Homo sapiens
taggctggaccagct

SEQ ID NO: 1322732 - DNA, 15 bp, Homo sapiens
ctaggctggaccagc

SEQ ID NO: 1322733 - DNA, 15 bp, Homo sapiens
tctaggctggaccag

SEQ ID NO: 1322734 - DNA, 15 bp, Homo sapiens
ctctaggctggacca

SEQ ID NO: 1322735 - DNA, 15 bp, Homo sapiens
tctctaggctggacc

SEQ ID NO: 1322736 - DNA, 15 bp, Homo sapiens
ttctctaggctggac

SEQ ID NO: 1322737 - DNA, 15 bp, Homo sapiens
tttctctaggctgga

SEQ ID NO: 1322738 - DNA, 15 bp, Homo sapiens
ctttctctaggctgg

SEQ ID NO: 1322739 - DNA, 15 bp, Homo sapiens
cctttctctaggctg

SEQ ID NO: 1322740 - DNA, 15 bp, Homo sapiens
ccctttctctaggct

SEQ ID NO: 1322741 - DNA, 15 bp, Homo sapiens
tccctttctctaggc

SEQ ID NO: 1322742 - DNA, 15 bp, Homo sapiens
ttccctttctctagg

SEQ ID NO: 1322743 - DNA, 15 bp, Homo sapiens
cttccctttctctag

SEQ ID NO: 1322744 - DNA, 15 bp, Homo sapiens
ccttccctttctcta

SEQ ID NO: 1322745 - DNA, 15 bp, Homo sapiens
tccttccctttctct

SEQ ID NO: 1322746 - DNA, 15 bp, Homo sapiens
atccttccctttctc

SEQ ID NO: 1322747 - DNA, 15 bp, Homo sapiens
gatccttccctttct

SEQ ID NO: 1322748 - DNA, 15 bp, Homo sapiens
agatccttccctttc

SEQ ID NO: 1322749 - DNA, 15 bp, Homo sapiens
cagatccttcccttt

SEQ ID NO: 1322750 - DNA, 15 bp, Homo sapiens
ccagatccttccctt

SEQ ID NO: 1322751 - DNA, 15 bp, Homo sapiens
tccagatccttccct

SEQ ID NO: 1322752 - DNA, 15 bp, Homo sapiens
ctccagatccttccc

SEQ ID NO: 1322753 - DNA, 15 bp, Homo sapiens
tctccagatccttcc

SEQ ID NO: 1322754 - DNA, 15 bp, Homo sapiens
ttctccagatccttc

SEQ ID NO: 1322755 - DNA, 15 bp, Homo sapiens
attctccagatcctt

SEQ ID NO: 1322756 - DNA, 15 bp, Homo sapiens
cattctccagatcct

SEQ ID NO: 1322757 - DNA, 15 bp, Homo sapiens
ccattctccagatcc

SEQ ID NO: 1322758 - DNA, 15 bp, Homo sapiens
cccattctccagatc

SEQ ID NO: 1322759 - DNA, 15 bp, Homo sapiens
tcccattctccagat

SEQ ID NO: 1322760 - DNA, 15 bp, Homo sapiens
ttcccattctccaga

SEQ ID NO: 1322761 - DNA, 15 bp, Homo sapiens
tttcccattctccag

SEQ ID NO: 1322762 - DNA, 15 bp, Homo sapiens
ttttcccattctcca

SEQ ID NO: 1322763 - DNA, 15 bp, Homo sapiens
tttttcccattctcc

SEQ ID NO: 1322764 - DNA, 15 bp, Homo sapiens
ctttttcccattctc

SEQ ID NO: 1322765 - DNA, 15 bp, Homo sapiens
gctttttcccattct

SEQ ID NO: 1322766 - DNA, 15 bp, Homo sapiens
ggctttttcccattc

SEQ ID NO: 1322767 - DNA, 15 bp, Homo sapiens
tggctttttcccatt

SEQ ID NO: 1322768 - DNA, 15 bp, Homo sapiens
atggctttttcccat

SEQ ID NO: 1322769 - DNA, 15 bp, Homo sapiens
gatggctttttccca

SEQ ID NO: 1322770 - DNA, 15 bp, Homo sapiens
ggatggctttttccc

SEQ ID NO: 1322771 - DNA, 15 bp, Homo sapiens
tggatggctttttcc

SEQ ID NO: 1322772 - DNA, 15 bp, Homo sapiens
ttggatggctttttc

SEQ ID NO: 1322773 - DNA, 15 bp, Homo sapiens
cttggatggcttttt

SEQ ID NO: 1322774 - DNA, 15 bp, Homo sapiens
ccttggatggctttt

SEQ ID NO: 1322775 - DNA, 15 bp, Homo sapiens
gccttggatggcttt

SEQ ID NO: 1322776 - DNA, 15 bp, Homo sapiens
tgccttggatggctt

SEQ ID NO: 1322777 - DNA, 15 bp, Homo sapiens
atgccttggatggct

SEQ ID NO: 1322778 - DNA, 15 bp, Homo sapiens
tatgccttggatggc

SEQ ID NO: 1322779 - DNA, 15 bp, Homo sapiens
gtatgccttggatgg

SEQ ID NO: 1322780 - DNA, 15 bp, Homo sapiens
tgtatgccttggatg

SEQ ID NO: 1322781 - DNA, 15 bp, Homo sapiens
ctgtatgccttggat

SEQ ID NO: 1322782 - DNA, 15 bp, Homo sapiens
tctgtatgccttgga

SEQ ID NO: 1322783 - DNA, 15 bp, Homo sapiens
atctgtatgccttgg

SEQ ID NO: 1322784 - DNA, 15 bp, Homo sapiens
catctgtatgccttg

SEQ ID NO: 1322785 - DNA, 15 bp, Homo sapiens
acatctgtatgcctt

SEQ ID NO: 1322786 - DNA, 15 bp, Homo sapiens
tacatctgtatgcct

SEQ ID NO: 1322787 - DNA, 15 bp, Homo sapiens
ttacatctgtatgcc

SEQ ID NO: 1322788 - DNA, 15 bp, Homo sapiens
attacatctgtatgc

SEQ ID NO: 1322789 - DNA, 15 bp, Homo sapiens
cattacatctgtatg

SEQ ID NO: 1322790 - DNA, 15 bp, Homo sapiens
acattacatctgtat

SEQ ID NO: 1322791 - DNA, 15 bp, Homo sapiens
cacattacatctgta

SEQ ID NO: 1322792 - DNA, 15 bp, Homo sapiens
gcacattacatctgt

SEQ ID NO: 1322793 - DNA, 15 bp, Homo sapiens
tgcacattacatctg

SEQ ID NO: 1322794 - DNA, 15 bp, Homo sapiens
ctgcacattacatct

SEQ ID NO: 1322795 - DNA, 15 bp, Homo sapiens
tctgcacattacatc

SEQ ID NO: 1322796 - DNA, 15 bp, Homo sapiens
ttctgcacattacat

SEQ ID NO: 1322797 - DNA, 15 bp, Homo sapiens
attctgcacattaca

SEQ ID NO: 1322798 - DNA, 15 bp, Homo sapiens
cattctgcacattac

SEQ ID NO: 1322799 - DNA, 15 bp, Homo sapiens
acattctgcacatta

SEQ ID NO: 1322800 - DNA, 15 bp, Homo sapiens
tacattctgcacatt

SEQ ID NO: 1322801 - DNA, 15 bp, Homo sapiens
atacattctgcacat

SEQ ID NO: 1322802 - DNA, 15 bp, Homo sapiens
aatacattctgcaca

SEQ ID NO: 1322803 - DNA, 15 bp, Homo sapiens
caatacattctgcac

SEQ ID NO: 1322804 - DNA, 15 bp, Homo sapiens
tcaatacattctgca

SEQ ID NO: 1322805 - DNA, 15 bp, Homo sapiens
ctcaatacattctgc

SEQ ID NO: 1322806 - DNA, 15 bp, Homo sapiens
tctcaatacattctg

SEQ ID NO: 1322807 - DNA, 15 bp, Homo sapiens
atctcaatacattct

SEQ ID NO: 1322808 - DNA, 15 bp, Homo sapiens
aatctcaatacattc

SEQ ID NO: 1322809 - DNA, 15 bp, Homo sapiens
aaatctcaatacatt

SEQ ID NO: 1322810 - DNA, 15 bp, Homo sapiens
taaatctcaatacat

SEQ ID NO: 1322811 - DNA, 15 bp, Homo sapiens
ttaaatctcaataca

SEQ ID NO: 1322812 - DNA, 15 bp, Homo sapiens
attaaatctcaatac

SEQ ID NO: 1322813 - DNA, 15 bp, Homo sapiens
cattaaatctcaata

SEQ ID NO: 1322814 - DNA, 15 bp, Homo sapiens
acattaaatctcaat

SEQ ID NO: 1322815 - DNA, 15 bp, Homo sapiens
tacattaaatctcaa

SEQ ID NO: 1322816 - DNA, 15 bp, Homo sapiens
atacattaaatctca

SEQ ID NO: 1322817 - DNA, 15 bp, Homo sapiens
aatacattaaatctc

SEQ ID NO: 1322818 - DNA, 15 bp, Homo sapiens
gaatacattaaatct

SEQ ID NO: 1322819 - DNA, 15 bp, Homo sapiens
agaatacattaaatc

SEQ ID NO: 1322820 - DNA, 15 bp, Homo sapiens
tagaatacattaaat

SEQ ID NO: 1322821 - DNA, 15 bp, Homo sapiens
ctagaatacattaaa

SEQ ID NO: 1322822 - DNA, 15 bp, Homo sapiens
tctagaatacattaa

SEQ ID NO: 1322823 - DNA, 15 bp, Homo sapiens
ctctagaatacatta

SEQ ID NO: 1322824 - DNA, 15 bp, Homo sapiens
tctctagaatacatt

SEQ ID NO: 1322825 - DNA, 15 bp, Homo sapiens
atctctagaatacat

SEQ ID NO: 1322826 - DNA, 15 bp, Homo sapiens
aatctctagaataca

SEQ ID NO: 1322827 - DNA, 15 bp, Homo sapiens
caatctctagaatac

SEQ ID NO: 1322828 - DNA, 15 bp, Homo sapiens
acaatctctagaata

SEQ ID NO: 1322829 - DNA, 15 bp, Homo sapiens
gacaatctctagaat

SEQ ID NO: 1322830 - DNA, 15 bp, Homo sapiens
agacaatctctagaa

SEQ ID NO: 1322831 - DNA, 15 bp, Homo sapiens
gagacaatctctaga

SEQ ID NO: 1322832 - DNA, 15 bp, Homo sapiens
tgagacaatctctag

SEQ ID NO: 1322833 - DNA, 15 bp, Homo sapiens
atgagacaatctcta

SEQ ID NO: 1322834 - DNA, 15 bp, Homo sapiens
aatgagacaatctct

SEQ ID NO: 1322835 - DNA, 15 bp, Homo sapiens
aaatgagacaatctc

SEQ ID NO: 1322836 - DNA, 15 bp, Homo sapiens
caaatgagacaatct

SEQ ID NO: 1322837 - DNA, 15 bp, Homo sapiens
gcaaatgagacaatc

SEQ ID NO: 1322838 - DNA, 15 bp, Homo sapiens
agcaaatgagacaat

SEQ ID NO: 1322839 - DNA, 15 bp, Homo sapiens
gagcaaatgagacaa

SEQ ID NO: 1322840 - DNA, 15 bp, Homo sapiens
tgagcaaatgagaca

SEQ ID NO: 1322841 - DNA, 15 bp, Homo sapiens
atgagcaaatgagac

SEQ ID NO: 1322842 - DNA, 15 bp, Homo sapiens
aatgagcaaatgaga

SEQ ID NO: 1322843 - DNA, 15 bp, Homo sapiens
taatgagcaaatgag

SEQ ID NO: 1322844 - DNA, 15 bp, Homo sapiens
ctaatgagcaaatga

SEQ ID NO: 1322845 - DNA, 15 bp, Homo sapiens
gctaatgagcaaatg

SEQ ID NO: 1322846 - DNA, 15 bp, Homo sapiens
ggctaatgagcaaat

SEQ ID NO: 1322847 - DNA, 15 bp, Homo sapiens
tggctaatgagcaaa

SEQ ID NO: 1322848 - DNA, 15 bp, Homo sapiens
ttggctaatgagcaa

SEQ ID NO: 1322849 - DNA, 15 bp, Homo sapiens
tttggctaatgagca

SEQ ID NO: 1322850 - DNA, 15 bp, Homo sapiens
atttggctaatgagc

SEQ ID NO: 1322851 - DNA, 15 bp, Homo sapiens
tatttggctaatgag

SEQ ID NO: 1322852 - DNA, 15 bp, Homo sapiens
atatttggctaatga

SEQ ID NO: 1322853 - DNA, 15 bp, Homo sapiens
aatatttggctaatg

SEQ ID NO: 1322854 - DNA, 15 bp, Homo sapiens
aaatatttggctaat

SEQ ID NO: 1322855 - DNA, 15 bp, Homo sapiens
taaatatttggctaa

SEQ ID NO: 1322856 - DNA, 15 bp, Homo sapiens
agtaaatatttggct

SEQ ID NO: 1322857 - DNA, 15 bp, Homo sapiens
cagtaaatatttggc

SEQ ID NO: 1322858 - DNA, 15 bp, Homo sapiens
tcagtaaatatttgg

SEQ ID NO: 1322859 - DNA, 15 bp, Homo sapiens
ttcagtaaatatttg

SEQ ID NO: 1322860 - DNA, 15 bp, Homo sapiens
attcagtaaatattt

SEQ ID NO: 1322861 - DNA, 15 bp, Homo sapiens
tattcagtaaatatt

SEQ ID NO: 1322862 - DNA, 15 bp, Homo sapiens
ctattcagtaaatat

SEQ ID NO: 1322863 - DNA, 15 bp, Homo sapiens
gctattcagtaaata

SEQ ID NO: 1322864 - DNA, 15 bp, Homo sapiens
agctattcagtaaat

SEQ ID NO: 1322865 - DNA, 15 bp, Homo sapiens
tagctattcagtaaa

SEQ ID NO: 1322866 - DNA, 15 bp, Homo sapiens
atagctattcagtaa

SEQ ID NO: 1322867 - DNA, 15 bp, Homo sapiens
aatagctattcagta

SEQ ID NO: 1322868 - DNA, 15 bp, Homo sapiens
taatagctattcagt

SEQ ID NO: 1322869 - DNA, 15 bp, Homo sapiens
ataatagctattcag

SEQ ID NO: 1322870 - DNA, 15 bp, Homo sapiens
cataatagctattca

SEQ ID NO: 1322871 - DNA, 15 bp, Homo sapiens
acataatagctattc

SEQ ID NO: 1322872 - DNA, 15 bp, Homo sapiens
aacataatagctatt

SEQ ID NO: 1322873 - DNA, 15 bp, Homo sapiens
taacataatagctat

SEQ ID NO: 1322874 - DNA, 15 bp, Homo sapiens
ttaacataatagcta

SEQ ID NO: 1322875 - DNA, 15 bp, Homo sapiens
gttaacataatagct

SEQ ID NO: 1322876 - DNA, 15 bp, Homo sapiens
tgttaacataatagc

SEQ ID NO: 1322877 - DNA, 15 bp, Homo sapiens
ctgttaacataatag

SEQ ID NO: 1322878 - DNA, 15 bp, Homo sapiens
actgttaacataata

SEQ ID NO: 1322879 - DNA, 15 bp, Homo sapiens
gactgttaacataat

SEQ ID NO: 1322880 - DNA, 15 bp, Homo sapiens
ggactgttaacataa

SEQ ID NO: 1322881 - DNA, 15 bp, Homo sapiens
aggactgttaacata

SEQ ID NO: 1322882 - DNA, 15 bp, Homo sapiens
gaggactgttaacat

SEQ ID NO: 1322883 - DNA, 15 bp, Homo sapiens
agaggactgttaaca

SEQ ID NO: 1322884 - DNA, 15 bp, Homo sapiens
cagaggactgttaac

SEQ ID NO: 1322885 - DNA, 15 bp, Homo sapiens
gcagaggactgttaa

SEQ ID NO: 1322886 - DNA, 15 bp, Homo sapiens
agcagaggactgtta

SEQ ID NO: 1322887 - DNA, 15 bp, Homo sapiens
cagcagaggactgtt

SEQ ID NO: 1322888 - DNA, 15 bp, Homo sapiens
ccagcagaggactgt

SEQ ID NO: 1322889 - DNA, 15 bp, Homo sapiens
cccagcagaggactg

SEQ ID NO: 1322890 - DNA, 15 bp, Homo sapiens
tcccagcagaggact

SEQ ID NO: 1322891 - DNA, 15 bp, Homo sapiens
ctcccagcagaggac

SEQ ID NO: 1322892 - DNA, 15 bp, Homo sapiens
gctcccagcagagga

SEQ ID NO: 1322893 - DNA, 15 bp, Homo sapiens
agctcccagcagagg

SEQ ID NO: 1322894 - DNA, 15 bp, Homo sapiens
cagctcccagcagag

SEQ ID NO: 1322895 - DNA, 15 bp, Homo sapiens
ccagctcccagcaga

SEQ ID NO: 1322896 - DNA, 15 bp, Homo sapiens
cccagctcccagcag

SEQ ID NO: 1322897 - DNA, 15 bp, Homo sapiens
tcccagctcccagca

SEQ ID NO: 1322898 - DNA, 15 bp, Homo sapiens
ttcccagctcccagc

SEQ ID NO: 1322899 - DNA, 15 bp, Homo sapiens
tttcccagctcccag

SEQ ID NO: 1322900 - DNA, 15 bp, Homo sapiens
gttttcccagctccc

SEQ ID NO: 1322901 - DNA, 15 bp, Homo sapiens
tgttttcccagctcc

SEQ ID NO: 1322902 - DNA, 15 bp, Homo sapiens
ttgttttcccagctc

SEQ ID NO: 1322903 - DNA, 15 bp, Homo sapiens
gttgttttcccagct

SEQ ID NO: 1322904 - DNA, 15 bp, Homo sapiens
tgttgttttcccagc

SEQ ID NO: 1322905 - DNA, 15 bp, Homo sapiens
ctgttgttttcccag

SEQ ID NO: 1322906 - DNA, 15 bp, Homo sapiens
actgttgttttccca

SEQ ID NO: 1322907 - DNA, 15 bp, Homo sapiens
cactgttgttttccc

SEQ ID NO: 1322908 - DNA, 15 bp, Homo sapiens
tcactgttgttttcc

SEQ ID NO: 1322909 - DNA, 15 bp, Homo sapiens
ctcactgttgttttc

SEQ ID NO: 1322910 - DNA, 15 bp, Homo sapiens
cctcactgttgtttt

SEQ ID NO: 1322911 - DNA, 15 bp, Homo sapiens
tcctcactgttgttt

SEQ ID NO: 1322912 - DNA, 15 bp, Homo sapiens
ttcctcactgttgtt

SEQ ID NO: 1322913 - DNA, 15 bp, Homo sapiens
attcctcactgttgt

SEQ ID NO: 1322914 - DNA, 15 bp, Homo sapiens
aattcctcactgttg

SEQ ID NO: 1322915 - DNA, 15 bp, Homo sapiens
gaattcctcactgtt

SEQ ID NO: 1322916 - DNA, 15 bp, Homo sapiens
agaattcctcactgt

SEQ ID NO: 1322917 - DNA, 15 bp, Homo sapiens
tagaattcctcactg

SEQ ID NO: 1322918 - DNA, 15 bp, Homo sapiens
atagaattcctcact

SEQ ID NO: 1322919 - DNA, 15 bp, Homo sapiens
catagaattcctcac

SEQ ID NO: 1322920 - DNA, 15 bp, Homo sapiens
tcatagaattcctca

SEQ ID NO: 1322921 - DNA, 15 bp, Homo sapiens
atcatagaattcctc

SEQ ID NO: 1322922 - DNA, 15 bp, Homo sapiens
aatcatagaattcct

SEQ ID NO: 1322923 - DNA, 15 bp, Homo sapiens
gaatcatagaattcc

SEQ ID NO: 1322924 - DNA, 15 bp, Homo sapiens
ggaatcatagaattc

SEQ ID NO: 1322925 - DNA, 15 bp, Homo sapiens
tggaatcatagaatt

SEQ ID NO: 1322926 - DNA, 15 bp, Homo sapiens
ctggaatcatagaat

SEQ ID NO: 1322927 - DNA, 15 bp, Homo sapiens
actggaatcatagaa

SEQ ID NO: 1322928 - DNA, 15 bp, Homo sapiens
aactggaatcataga

SEQ ID NO: 1322929 - DNA, 15 bp, Homo sapiens
gaactggaatcatag

SEQ ID NO: 1322930 - DNA, 15 bp, Homo sapiens
agaactggaatcata

SEQ ID NO: 1322931 - DNA, 15 bp, Homo sapiens
gagaactggaatcat

SEQ ID NO: 1322932 - DNA, 15 bp, Homo sapiens
ggagaactggaatca

SEQ ID NO: 1322933 - DNA, 15 bp, Homo sapiens
tggagaactggaatc

SEQ ID NO: 1322934 - DNA, 15 bp, Homo sapiens
ctggagaactggaat

SEQ ID NO: 1322935 - DNA, 15 bp, Homo sapiens
actggagaactggaa

SEQ ID NO: 1322936 - DNA, 15 bp, Homo sapiens
gactggagaactgga

SEQ ID NO: 1322937 - DNA, 15 bp, Homo sapiens
agactggagaactgg

SEQ ID NO: 1322938 - DNA, 15 bp, Homo sapiens
cagactggagaactg

SEQ ID NO: 1322939 - DNA, 15 bp, Homo sapiens
ccagactggagaact

SEQ ID NO: 1322940 - DNA, 15 bp, Homo sapiens
cccagactggagaac

SEQ ID NO: 1322941 - DNA, 15 bp, Homo sapiens
ccccagactggagaa

SEQ ID NO: 1322942 - DNA, 15 bp, Homo sapiens
cccccagactggaga

SEQ ID NO: 1322943 - DNA, 15 bp, Homo sapiens
tcccccagactggag

SEQ ID NO: 1322944 - DNA, 15 bp, Homo sapiens
ctcccccagactgga

SEQ ID NO: 1322945 - DNA, 15 bp, Homo sapiens
cctcccccagactgg

SEQ ID NO: 1322946 - DNA, 15 bp, Homo sapiens
ccctcccccagactg

SEQ ID NO: 1322947 - DNA, 15 bp, Homo sapiens
accctcccccagact

SEQ ID NO: 1322948 - DNA, 15 bp, Homo sapiens
aaccctcccccagac

SEQ ID NO: 1322949 - DNA, 15 bp, Homo sapiens
caaccctcccccaga

SEQ ID NO: 1322950 - DNA, 15 bp, Homo sapiens
ccaaccctcccccag

SEQ ID NO: 1322951 - DNA, 15 bp, Homo sapiens
cccaaccctccccca

SEQ ID NO: 1322952 - DNA, 15 bp, Homo sapiens
tcccaaccctccccc

SEQ ID NO: 1322953 - DNA, 15 bp, Homo sapiens
atcccaaccctcccc

SEQ ID NO: 1322954 - DNA, 15 bp, Homo sapiens
gatcccaaccctccc

SEQ ID NO: 1322955 - DNA, 15 bp, Homo sapiens
tgatcccaaccctcc

SEQ ID NO: 1322956 - DNA, 15 bp, Homo sapiens
ttgatcccaaccctc

SEQ ID NO: 1322957 - DNA, 15 bp, Homo sapiens
gttgatcccaaccct

SEQ ID NO: 1322958 - DNA, 15 bp, Homo sapiens
tgttgatcccaaccc

SEQ ID NO: 1322959 - DNA, 15 bp, Homo sapiens
ttgttgatcccaacc

SEQ ID NO: 1322960 - DNA, 15 bp, Homo sapiens
tttgttgatcccaac

SEQ ID NO: 1322961 - DNA, 15 bp, Homo sapiens
atttgttgatcccaa

SEQ ID NO: 1322962 - DNA, 15 bp, Homo sapiens
tatttgttgatccca

SEQ ID NO: 1322963 - DNA, 15 bp, Homo sapiens
ttatttgttgatccc

SEQ ID NO: 1322964 - DNA, 15 bp, Homo sapiens
tttatttgttgatcc

SEQ ID NO: 1322965 - DNA, 15 bp, Homo sapiens
gtttatttgttgatc

SEQ ID NO: 1322966 - DNA, 15 bp, Homo sapiens
tgtttatttgttgat

SEQ ID NO: 1322967 - DNA, 15 bp, Homo sapiens
ctgtttatttgttga

SEQ ID NO: 1322968 - DNA, 15 bp, Homo sapiens
cctgtttatttgttg

SEQ ID NO: 1322969 - DNA, 15 bp, Homo sapiens
acctgtttatttgtt

SEQ ID NO: 1322970 - DNA, 15 bp, Homo sapiens
cacctgtttatttgt

SEQ ID NO: 1322971 - DNA, 15 bp, Homo sapiens
tcacctgtttatttg

SEQ ID NO: 1322972 - DNA, 15 bp, Homo sapiens
atcacctgtttattt

SEQ ID NO: 1322973 - DNA, 15 bp, Homo sapiens
tatcacctgtttatt

SEQ ID NO: 1322974 - DNA, 15 bp, Homo sapiens
ctatcacctgtttat

SEQ ID NO: 1322975 - DNA, 15 bp, Homo sapiens
actatcacctgttta

SEQ ID NO: 1322976 - DNA, 15 bp, Homo sapiens
gactatcacctgttt

SEQ ID NO: 1322977 - DNA, 15 bp, Homo sapiens
tgactatcacctgtt

SEQ ID NO: 1322978 - DNA, 15 bp, Homo sapiens
atgactatcacctgt

SEQ ID NO: 1322979 - DNA, 15 bp, Homo sapiens
catgactatcacctg

SEQ ID NO: 1322980 - DNA, 15 bp, Homo sapiens
acatgactatcacct

SEQ ID NO: 1322981 - DNA, 15 bp, Homo sapiens
tacatgactatcacc

SEQ ID NO: 1322982 - DNA, 15 bp, Homo sapiens
atacatgactatcac

SEQ ID NO: 1322983 - DNA, 15 bp, Homo sapiens
aatacatgactatca

SEQ ID NO: 1322984 - DNA, 15 bp, Homo sapiens
taatacatgactatc

SEQ ID NO: 1322985 - DNA, 15 bp, Homo sapiens
ttaatacatgactat

SEQ ID NO: 1322986 - DNA, 15 bp, Homo sapiens
tttaatacatgacta

SEQ ID NO: 1322987 - DNA, 15 bp, Homo sapiens
ttttaatacatgact

SEQ ID NO: 1322988 - DNA, 15 bp, Homo sapiens
tttttaatacatgac

SEQ ID NO: 1322989 - DNA, 15 bp, Homo sapiens
atttttaatacatga

SEQ ID NO: 1322990 - DNA, 15 bp, Homo sapiens
aatttttaatacatg

SEQ ID NO: 1322991 - DNA, 15 bp, Homo sapiens
caatttttaatacat

SEQ ID NO: 1322992 - DNA, 15 bp, Homo sapiens
tcaatttttaataca

SEQ ID NO: 1322993 - DNA, 15 bp, Homo sapiens
atcaatttttaatac

SEQ ID NO: 1322994 - DNA, 15 bp, Homo sapiens
gatcaatttttaata

SEQ ID NO: 1322995 - DNA, 15 bp, Homo sapiens
agatcaatttttaat

SEQ ID NO: 1322996 - DNA, 15 bp, Homo sapiens
cagatcaatttttaa

SEQ ID NO: 1322997 - DNA, 15 bp, Homo sapiens
gcagatcaattttta

SEQ ID NO: 1322998 - DNA, 15 bp, Homo sapiens
tgcagatcaattttt

SEQ ID NO: 1322999 - DNA, 15 bp, Homo sapiens
ctgcagatcaatttt

SEQ ID NO: 1323000 - DNA, 15 bp, Homo sapiens
cctgcagatcaattt

SEQ ID NO: 1323001 - DNA, 15 bp, Homo sapiens
ccctgcagatcaatt

SEQ ID NO: 1323002 - DNA, 15 bp, Homo sapiens
cccctgcagatcaat

SEQ ID NO: 1323003 - DNA, 15 bp, Homo sapiens
tcccctgcagatcaa

SEQ ID NO: 1323004 - DNA, 15 bp, Homo sapiens
ttcccctgcagatca

SEQ ID NO: 1323005 - DNA, 15 bp, Homo sapiens
tttcccctgcagatc

SEQ ID NO: 1323006 - DNA, 15 bp, Homo sapiens
ctttcccctgcagat

SEQ ID NO: 1323007 - DNA, 15 bp, Homo sapiens
gctttcccctgcaga

SEQ ID NO: 1323008 - DNA, 15 bp, Homo sapiens
tgctttcccctgcag

SEQ ID NO: 1323009 - DNA, 15 bp, Homo sapiens
gtgctttcccctgca

SEQ ID NO: 1323010 - DNA, 15 bp, Homo sapiens
tgtgctttcccctgc

SEQ ID NO: 1323011 - DNA, 15 bp, Homo sapiens
ctgtgctttcccctg

SEQ ID NO: 1323012 - DNA, 15 bp, Homo sapiens
actgtgctttcccct

SEQ ID NO: 1323013 - DNA, 15 bp, Homo sapiens
aactgtgctttcccc

SEQ ID NO: 1323014 - DNA, 15 bp, Homo sapiens
aaactgtgctttccc

SEQ ID NO: 1323015 - DNA, 15 bp, Homo sapiens
caaactgtgctttcc

SEQ ID NO: 1323016 - DNA, 15 bp, Homo sapiens
gcaaactgtgctttc

SEQ ID NO: 1323017 - DNA, 15 bp, Homo sapiens
ggcaaactgtgcttt

SEQ ID NO: 1323018 - DNA, 15 bp, Homo sapiens
tggcaaactgtgctt

SEQ ID NO: 1323019 - DNA, 15 bp, Homo sapiens
atggcaaactgtgct

SEQ ID NO: 1323020 - DNA, 15 bp, Homo sapiens
aatggcaaactgtgc

SEQ ID NO: 1323021 - DNA, 15 bp, Homo sapiens
caatggcaaactgtg

SEQ ID NO: 1323022 - DNA, 15 bp, Homo sapiens
ccaatggcaaactgt

SEQ ID NO: 1323023 - DNA, 15 bp, Homo sapiens
cccaatggcaaactg

SEQ ID NO: 1323024 - DNA, 15 bp, Homo sapiens
tcccaatggcaaact

SEQ ID NO: 1323025 - DNA, 15 bp, Homo sapiens
ttcccaatggcaaac

SEQ ID NO: 1323026 - DNA, 15 bp, Homo sapiens
gttcccaatggcaaa

SEQ ID NO: 1323027 - DNA, 15 bp, Homo sapiens
tgttcccaatggcaa

SEQ ID NO: 1323028 - DNA, 15 bp, Homo sapiens
gtgttcccaatggca

SEQ ID NO: 1323029 - DNA, 15 bp, Homo sapiens
tgtgttcccaatggc

SEQ ID NO: 1323030 - DNA, 15 bp, Homo sapiens
atgtgttcccaatgg

SEQ ID NO: 1323031 - DNA, 15 bp, Homo sapiens
gatgtgttcccaatg

SEQ ID NO: 1323032 - DNA, 15 bp, Homo sapiens
tgatgtgttcccaat

SEQ ID NO: 1323033 - DNA, 15 bp, Homo sapiens
ctgatgtgttcccaa

SEQ ID NO: 1323034 - DNA, 15 bp, Homo sapiens
tctgatgtgttccca

SEQ ID NO: 1323035 - DNA, 15 bp, Homo sapiens
ctctgatgtgttccc

SEQ ID NO: 1323036 - DNA, 15 bp, Homo sapiens
cctctgatgtgttcc

SEQ ID NO: 1323037 - DNA, 15 bp, Homo sapiens
gcctctgatgtgttc

SEQ ID NO: 1323038 - DNA, 15 bp, Homo sapiens
cgcctctgatgtgtt

SEQ ID NO: 1323039 - DNA, 15 bp, Homo sapiens
gcgcctctgatgtgt

SEQ ID NO: 1323040 - DNA, 15 bp, Homo sapiens
tgcgcctctgatgtg

SEQ ID NO: 1323041 - DNA, 15 bp, Homo sapiens
gtgcgcctctgatgt

SEQ ID NO: 1323042 - DNA, 15 bp, Homo sapiens
agtgcgcctctgatg

SEQ ID NO: 1323043 - DNA, 15 bp, Homo sapiens
aagtgcgcctctgat

SEQ ID NO: 1323044 - DNA, 15 bp, Homo sapiens
taagtgcgcctctga

SEQ ID NO: 1323045 - DNA, 15 bp, Homo sapiens
ctaagtgcgcctctg

SEQ ID NO: 1323046 - DNA, 15 bp, Homo sapiens
gctaagtgcgcctct

SEQ ID NO: 1323047 - DNA, 15 bp, Homo sapiens
agctaagtgcgcctc

SEQ ID NO: 1323048 - DNA, 15 bp, Homo sapiens
tagctaagtgcgcct

SEQ ID NO: 1323049 - DNA, 15 bp, Homo sapiens
atagctaagtgcgcc

SEQ ID NO: 1323050 - DNA, 15 bp, Homo sapiens
aatagctaagtgcgc

SEQ ID NO: 1323051 - DNA, 15 bp, Homo sapiens
aaatagctaagtgcg

SEQ ID NO: 1323052 - DNA, 15 bp, Homo sapiens
caaatagctaagtgc

SEQ ID NO: 1323053 - DNA, 15 bp, Homo sapiens
tcaaatagctaagtg

SEQ ID NO: 1323054 - DNA, 15 bp, Homo sapiens
ttcaaatagctaagt

SEQ ID NO: 1323055 - DNA, 15 bp, Homo sapiens
cttcaaatagctaag

SEQ ID NO: 1323056 - DNA, 15 bp, Homo sapiens
tcttcaaatagctaa

SEQ ID NO: 1323057 - DNA, 15 bp, Homo sapiens
ctcttcaaatagcta

SEQ ID NO: 1323058 - DNA, 15 bp, Homo sapiens
tctcttcaaatagct

SEQ ID NO: 1323059 - DNA, 15 bp, Homo sapiens
ttctcttcaaatagc

SEQ ID NO: 1323060 - DNA, 15 bp, Homo sapiens
cttctcttcaaatag

SEQ ID NO: 1323061 - DNA, 15 bp, Homo sapiens
acttctcttcaaata

SEQ ID NO: 1323062 - DNA, 15 bp, Homo sapiens
tacttctcttcaaat

SEQ ID NO: 1323063 - DNA, 15 bp, Homo sapiens
atacttctcttcaaa

SEQ ID NO: 1323064 - DNA, 15 bp, Homo sapiens
tatacttctcttcaa

SEQ ID NO: 1323065 - DNA, 15 bp, Homo sapiens
gtatacttctcttca

SEQ ID NO: 1323066 - DNA, 15 bp, Homo sapiens
ggtatacttctcttc

SEQ ID NO: 1323067 - DNA, 15 bp, Homo sapiens
tggtatacttctctt

SEQ ID NO: 1323068 - DNA, 15 bp, Homo sapiens
ttggtatacttctct

SEQ ID NO: 1323069 - DNA, 15 bp, Homo sapiens
gttggtatacttctc

SEQ ID NO: 1323070 - DNA, 15 bp, Homo sapiens
agttggtatacttct

SEQ ID NO: 1323071 - DNA, 15 bp, Homo sapiens
cagttggtatacttc

SEQ ID NO: 1323072 - DNA, 15 bp, Homo sapiens
tcagttggtatactt

SEQ ID NO: 1323073 - DNA, 15 bp, Homo sapiens
atcagttggtatact

SEQ ID NO: 1323074 - DNA, 15 bp, Homo sapiens
tatcagttggtatac

SEQ ID NO: 1323075 - DNA, 15 bp, Homo sapiens
ctatcagttggtata

SEQ ID NO: 1323076 - DNA, 15 bp, Homo sapiens
tctatcagttggtat

SEQ ID NO: 1323077 - DNA, 15 bp, Homo sapiens
atctatcagttggta

SEQ ID NO: 1323078 - DNA, 15 bp, Homo sapiens
tatctatcagttggt

SEQ ID NO: 1323079 - DNA, 15 bp, Homo sapiens
atatctatcagttgg

SEQ ID NO: 1323080 - DNA, 15 bp, Homo sapiens
aatatctatcagttg

SEQ ID NO: 1323081 - DNA, 15 bp, Homo sapiens
aaatatctatcagtt

SEQ ID NO: 1323082 - DNA, 15 bp, Homo sapiens
aaaatatctatcagt

SEQ ID NO: 1323083 - DNA, 15 bp, Homo sapiens
taaaatatctatcag

SEQ ID NO: 1323084 - DNA, 15 bp, Homo sapiens
ttaaaatatctatca

SEQ ID NO: 1323085 - DNA, 15 bp, Homo sapiens
tttaaaatatctatc

SEQ ID NO: 1323086 - DNA, 15 bp, Homo sapiens
ttttaaaatatctat

SEQ ID NO: 1323087 - DNA, 15 bp, Homo sapiens
tttttaaaatatcta

SEQ ID NO: 1323088 - DNA, 15 bp, Homo sapiens
ttttttaaaatatct

SEQ ID NO: 1323089 - DNA, 15 bp, Homo sapiens
tttttttaaaatatc

SEQ ID NO: 1323090 - DNA, 15 bp, Homo sapiens
gtttttttaaaatat

SEQ ID NO: 1323091 - DNA, 15 bp, Homo sapiens
tgtttttttaaaata

SEQ ID NO: 1323092 - DNA, 15 bp, Homo sapiens
ttgtttttttaaaat

SEQ ID NO: 1323093 - DNA, 15 bp, Homo sapiens
tttgtttttttaaaa

SEQ ID NO: 1323094 - DNA, 15 bp, Homo sapiens
atttgtttttttaaa

SEQ ID NO: 1323095 - DNA, 15 bp, Homo sapiens
gatttgtttttttaa

SEQ ID NO: 1323096 - DNA, 15 bp, Homo sapiens
ggatttgttttttta

SEQ ID NO: 1323097 - DNA, 15 bp, Homo sapiens
gggatttgttttttt

SEQ ID NO: 1323098 - DNA, 15 bp, Homo sapiens
ggggatttgtttttt

SEQ ID NO: 1323099 - DNA, 15 bp, Homo sapiens
gggggatttgttttt

SEQ ID NO: 1323100 - DNA, 15 bp, Homo sapiens
agggggatttgtttt

SEQ ID NO: 1323101 - DNA, 15 bp, Homo sapiens
aagggggatttgttt

SEQ ID NO: 1323102 - DNA, 15 bp, Homo sapiens
gaagggggatttgtt

SEQ ID NO: 1323103 - DNA, 15 bp, Homo sapiens
agaagggggatttgt

SEQ ID NO: 1323104 - DNA, 15 bp, Homo sapiens
tagaagggggatttg

SEQ ID NO: 1323105 - DNA, 15 bp, Homo sapiens
gtagaagggggattt

SEQ ID NO: 1323106 - DNA, 15 bp, Homo sapiens
ggtagaagggggatt

SEQ ID NO: 1323107 - DNA, 15 bp, Homo sapiens
aggtagaagggggat

SEQ ID NO: 1323108 - DNA, 15 bp, Homo sapiens
taggtagaaggggga

SEQ ID NO: 1323109 - DNA, 15 bp, Homo sapiens
ttaggtagaaggggg

SEQ ID NO: 1323110 - DNA, 15 bp, Homo sapiens
cttaggtagaagggg

SEQ ID NO: 1323111 - DNA, 15 bp, Homo sapiens
acttaggtagaaggg

SEQ ID NO: 1323112 - DNA, 15 bp, Homo sapiens
gacttaggtagaagg

SEQ ID NO: 1323113 - DNA, 15 bp, Homo sapiens
tgacttaggtagaag

SEQ ID NO: 1323114 - DNA, 15 bp, Homo sapiens
ctgacttaggtagaa

SEQ ID NO: 1323115 - DNA, 15 bp, Homo sapiens
actgacttaggtaga

SEQ ID NO: 1323116 - DNA, 15 bp, Homo sapiens
tactgacttaggtag

SEQ ID NO: 1323117 - DNA, 15 bp, Homo sapiens
atactgacttaggta

SEQ ID NO: 1323118 - DNA, 15 bp, Homo sapiens
tatactgacttaggt

SEQ ID NO: 1323119 - DNA, 15 bp, Homo sapiens
ttatactgacttagg

SEQ ID NO: 1323120 - DNA, 15 bp, Homo sapiens
cttatactgacttag

SEQ ID NO: 1323121 - DNA, 15 bp, Homo sapiens
gcttatactgactta

SEQ ID NO: 1323122 - DNA, 15 bp, Homo sapiens
ggcttatactgactt

SEQ ID NO: 1323123 - DNA, 15 bp, Homo sapiens
gggcttatactgact

SEQ ID NO: 1323124 - DNA, 15 bp, Homo sapiens
agggcttatactgac

SEQ ID NO: 1323125 - DNA, 15 bp, Homo sapiens
tagggcttatactga

SEQ ID NO: 1323126 - DNA, 15 bp, Homo sapiens
ttagggcttatactg

SEQ ID NO: 1323127 - DNA, 15 bp, Homo sapiens
gttagggcttatact

SEQ ID NO: 1323128 - DNA, 15 bp, Homo sapiens
agttagggcttatac

SEQ ID NO: 1323129 - DNA, 15 bp, Homo sapiens
cagttagggcttata

SEQ ID NO: 1323130 - DNA, 15 bp, Homo sapiens
ccagttagggcttat

SEQ ID NO: 1323131 - DNA, 15 bp, Homo sapiens
tccagttagggctta

SEQ ID NO: 1323132 - DNA, 15 bp, Homo sapiens
ttccagttagggctt

SEQ ID NO: 1323133 - DNA, 15 bp, Homo sapiens
gttccagttagggct

SEQ ID NO: 1323134 - DNA, 15 bp, Homo sapiens
agttccagttagggc

SEQ ID NO: 1323135 - DNA, 15 bp, Homo sapiens
aagttccagttaggg

SEQ ID NO: 1323136 - DNA, 15 bp, Homo sapiens
taagttccagttagg

SEQ ID NO: 1323137 - DNA, 15 bp, Homo sapiens
ataagttccagttag

SEQ ID NO: 1323138 - DNA, 15 bp, Homo sapiens
aataagttccagtta

SEQ ID NO: 1323139 - DNA, 15 bp, Homo sapiens
aaataagttccagtt

SEQ ID NO: 1323140 - DNA, 15 bp, Homo sapiens
gaaataagttccagt

SEQ ID NO: 1323141 - DNA, 15 bp, Homo sapiens
ggaaataagttccag

SEQ ID NO: 1323142 - DNA, 15 bp, Homo sapiens
tggaaataagttcca

SEQ ID NO: 1323143 - DNA, 15 bp, Homo sapiens
ctggaaataagttcc

SEQ ID NO: 1323144 - DNA, 15 bp, Homo sapiens
actggaaataagttc

SEQ ID NO: 1323145 - DNA, 15 bp, Homo sapiens
cactggaaataagtt

SEQ ID NO: 1323146 - DNA, 15 bp, Homo sapiens
ccactggaaataagt

SEQ ID NO: 1323147 - DNA, 15 bp, Homo sapiens
accactggaaataag

SEQ ID NO: 1323148 - DNA, 15 bp, Homo sapiens
gaccactggaaataa

SEQ ID NO: 1323149 - DNA, 15 bp, Homo sapiens
tgaccactggaaata

SEQ ID NO: 1323150 - DNA, 15 bp, Homo sapiens
ctgaccactggaaat

SEQ ID NO: 1323151 - DNA, 15 bp, Homo sapiens
gctgaccactggaaa

SEQ ID NO: 1323152 - DNA, 15 bp, Homo sapiens
tgctgaccactggaa

SEQ ID NO: 1323153 - DNA, 15 bp, Homo sapiens
ttgctgaccactgga

SEQ ID NO: 1323154 - DNA, 15 bp, Homo sapiens
tttgctgaccactgg

SEQ ID NO: 1323155 - DNA, 15 bp, Homo sapiens
atttgctgaccactg

SEQ ID NO: 1323156 - DNA, 15 bp, Homo sapiens
catttgctgaccact

SEQ ID NO: 1323157 - DNA, 15 bp, Homo sapiens
gcatttgctgaccac

SEQ ID NO: 1323158 - DNA, 15 bp, Homo sapiens
tgcatttgctgacca

SEQ ID NO: 1323159 - DNA, 15 bp, Homo sapiens
ctgcatttgctgacc

SEQ ID NO: 1323160 - DNA, 15 bp, Homo sapiens
cctgcatttgctgac

SEQ ID NO: 1323161 - DNA, 15 bp, Homo sapiens
acctgcatttgctga

SEQ ID NO: 1323162 - DNA, 15 bp, Homo sapiens
aacctgcatttgctg

SEQ ID NO: 1323163 - DNA, 15 bp, Homo sapiens
aaacctgcatttgct

SEQ ID NO: 1323164 - DNA, 15 bp, Homo sapiens
taaacctgcatttgc

SEQ ID NO: 1323165 - DNA, 15 bp, Homo sapiens
gtaaacctgcatttg

SEQ ID NO: 1323166 - DNA, 15 bp, Homo sapiens
ggtaaacctgcattt

SEQ ID NO: 1323167 - DNA, 15 bp, Homo sapiens
aggtaaacctgcatt

SEQ ID NO: 1323168 - DNA, 15 bp, Homo sapiens
caggtaaacctgcat

SEQ ID NO: 1323169 - DNA, 15 bp, Homo sapiens
acaggtaaacctgca

SEQ ID NO: 1323170 - DNA, 15 bp, Homo sapiens
gacaggtaaacctgc

SEQ ID NO: 1323171 - DNA, 15 bp, Homo sapiens
tgacaggtaaacctg

SEQ ID NO: 1323172 - DNA, 15 bp, Homo sapiens
ctgacaggtaaacct

SEQ ID NO: 1323173 - DNA, 15 bp, Homo sapiens
tctgacaggtaaacc

SEQ ID NO: 1323174 - DNA, 15 bp, Homo sapiens
ttctgacaggtaaac

SEQ ID NO: 1323175 - DNA, 15 bp, Homo sapiens
attctgacaggtaaa

SEQ ID NO: 1323176 - DNA, 15 bp, Homo sapiens
cattctgacaggtaa

SEQ ID NO: 1323177 - DNA, 15 bp, Homo sapiens
acattctgacaggta

SEQ ID NO: 1323178 - DNA, 15 bp, Homo sapiens
cacattctgacaggt

SEQ ID NO: 1323179 - DNA, 15 bp, Homo sapiens
gcacattctgacagg

SEQ ID NO: 1323180 - DNA, 15 bp, Homo sapiens
ggcacattctgacag

SEQ ID NO: 1323181 - DNA, 15 bp, Homo sapiens
tggcacattctgaca

SEQ ID NO: 1323182 - DNA, 15 bp, Homo sapiens
ctggcacattctgac

SEQ ID NO: 1323183 - DNA, 15 bp, Homo sapiens
actggcacattctga

SEQ ID NO: 1323184 - DNA, 15 bp, Homo sapiens
aactggcacattctg

SEQ ID NO: 1323185 - DNA, 15 bp, Homo sapiens
gaactggcacattct

SEQ ID NO: 1323186 - DNA, 15 bp, Homo sapiens
ggaactggcacattc

SEQ ID NO: 1323187 - DNA, 15 bp, Homo sapiens
aggaactggcacatt

SEQ ID NO: 1323188 - DNA, 15 bp, Homo sapiens
caggaactggcacat

SEQ ID NO: 1323189 - DNA, 15 bp, Homo sapiens
tcaggaactggcaca

SEQ ID NO: 1323190 - DNA, 15 bp, Homo sapiens
gtcaggaactggcac

SEQ ID NO: 1323191 - DNA, 15 bp, Homo sapiens
agtcaggaactggca

SEQ ID NO: 1323192 - DNA, 15 bp, Homo sapiens
cagtcaggaactggc

SEQ ID NO: 1323193 - DNA, 15 bp, Homo sapiens
acagtcaggaactgg

SEQ ID NO: 1323194 - DNA, 15 bp, Homo sapiens
gacagtcaggaactg

SEQ ID NO: 1323195 - DNA, 15 bp, Homo sapiens
ggacagtcaggaact

SEQ ID NO: 1323196 - DNA, 15 bp, Homo sapiens
aggacagtcaggaac

SEQ ID NO: 1323197 - DNA, 15 bp, Homo sapiens
aaggacagtcaggaa

SEQ ID NO: 1323198 - DNA, 15 bp, Homo sapiens
aaaggacagtcagga

SEQ ID NO: 1323199 - DNA, 15 bp, Homo sapiens
caaaggacagtcagg

SEQ ID NO: 1323200 - DNA, 15 bp, Homo sapiens
gcaaaggacagtcag

SEQ ID NO: 1323201 - DNA, 15 bp, Homo sapiens
tgcaaaggacagtca

SEQ ID NO: 1323202 - DNA, 15 bp, Homo sapiens
gtgcaaaggacagtc

SEQ ID NO: 1323203 - DNA, 15 bp, Homo sapiens
agtgcaaaggacagt

SEQ ID NO: 1323204 - DNA, 15 bp, Homo sapiens
gagtgcaaaggacag

SEQ ID NO: 1323205 - DNA, 15 bp, Homo sapiens
ggagtgcaaaggaca

SEQ ID NO: 1323206 - DNA, 15 bp, Homo sapiens
tggagtgcaaaggac

SEQ ID NO: 1323207 - DNA, 15 bp, Homo sapiens
ctggagtgcaaagga

SEQ ID NO: 1323208 - DNA, 15 bp, Homo sapiens
actggagtgcaaagg

SEQ ID NO: 1323209 - DNA, 15 bp, Homo sapiens
aactggagtgcaaag

SEQ ID NO: 1323210 - DNA, 15 bp, Homo sapiens
aaactggagtgcaaa

SEQ ID NO: 1323211 - DNA, 15 bp, Homo sapiens
gaaactggagtgcaa

SEQ ID NO: 1323212 - DNA, 15 bp, Homo sapiens
agaaactggagtgca

SEQ ID NO: 1323213 - DNA, 15 bp, Homo sapiens
gagaaactggagtgc

SEQ ID NO: 1323214 - DNA, 15 bp, Homo sapiens
tgagaaactggagtg

SEQ ID NO: 1323215 - DNA, 15 bp, Homo sapiens
ttgagaaactggagt

SEQ ID NO: 1323216 - DNA, 15 bp, Homo sapiens
gttgagaaactggag

SEQ ID NO: 1323217 - DNA, 15 bp, Homo sapiens
agttgagaaactgga

SEQ ID NO: 1323218 - DNA, 15 bp, Homo sapiens
aagttgagaaactgg

SEQ ID NO: 1323219 - DNA, 15 bp, Homo sapiens
caagttgagaaactg

SEQ ID NO: 1323220 - DNA, 15 bp, Homo sapiens
gcaagttgagaaact

SEQ ID NO: 1323221 - DNA, 15 bp, Homo sapiens
ggcaagttgagaaac

SEQ ID NO: 1323222 - DNA, 15 bp, Homo sapiens
aggcaagttgagaaa

SEQ ID NO: 1323223 - DNA, 15 bp, Homo sapiens
aaggcaagttgagaa

SEQ ID NO: 1323224 - DNA, 15 bp, Homo sapiens
gaaggcaagttgaga

SEQ ID NO: 1323225 - DNA, 15 bp, Homo sapiens
agaaggcaagttgag

SEQ ID NO: 1323226 - DNA, 15 bp, Homo sapiens
gagaaggcaagttga

SEQ ID NO: 1323227 - DNA, 15 bp, Homo sapiens
ggagaaggcaagttg

SEQ ID NO: 1323228 - DNA, 15 bp, Homo sapiens
tggagaaggcaagtt

SEQ ID NO: 1323229 - DNA, 15 bp, Homo sapiens
ttggagaaggcaagt

SEQ ID NO: 1323230 - DNA, 15 bp, Homo sapiens
attggagaaggcaag

SEQ ID NO: 1323231 - DNA, 15 bp, Homo sapiens
tattggagaaggcaa

SEQ ID NO: 1323232 - DNA, 15 bp, Homo sapiens
atattggagaaggca

SEQ ID NO: 1323233 - DNA, 15 bp, Homo sapiens
aatattggagaaggc

SEQ ID NO: 1323234 - DNA, 15 bp, Homo sapiens
aaatattggagaagg

SEQ ID NO: 1323235 - DNA, 15 bp, Homo sapiens
caaatattggagaag

SEQ ID NO: 1323236 - DNA, 15 bp, Homo sapiens
gcaaatattggagaa

SEQ ID NO: 1323237 - DNA, 15 bp, Homo sapiens
agcaaatattggaga

SEQ ID NO: 1323238 - DNA, 15 bp, Homo sapiens
tagcaaatattggag

SEQ ID NO: 1323239 - DNA, 15 bp, Homo sapiens
ttagcaaatattgga

SEQ ID NO: 1323240 - DNA, 15 bp, Homo sapiens
gttagcaaatattgg

SEQ ID NO: 1323241 - DNA, 15 bp, Homo sapiens
tgttagcaaatattg

SEQ ID NO: 1323242 - DNA, 15 bp, Homo sapiens
ttgttagcaaatatt

SEQ ID NO: 1323243 - DNA, 15 bp, Homo sapiens
tttgttagcaaatat

SEQ ID NO: 1323244 - DNA, 15 bp, Homo sapiens
atttgttagcaaata

SEQ ID NO: 1323245 - DNA, 15 bp, Homo sapiens
gatttgttagcaaat

SEQ ID NO: 1323246 - DNA, 15 bp, Homo sapiens
agatttgttagcaaa

SEQ ID NO: 1323247 - DNA, 15 bp, Homo sapiens
cagatttgttagcaa

SEQ ID NO: 1323248 - DNA, 15 bp, Homo sapiens
tcagatttgttagca

SEQ ID NO: 1323249 - DNA, 15 bp, Homo sapiens
ttcagatttgttagc

SEQ ID NO: 1323250 - DNA, 15 bp, Homo sapiens
attcagatttgttag

SEQ ID NO: 1323251 - DNA, 15 bp, Homo sapiens
cattcagatttgtta

SEQ ID NO: 1323252 - DNA, 15 bp, Homo sapiens
acattcagatttgtt

SEQ ID NO: 1323253 - DNA, 15 bp, Homo sapiens
aacattcagatttgt

SEQ ID NO: 1323254 - DNA, 15 bp, Homo sapiens
caacattcagatttg

SEQ ID NO: 1323255 - DNA, 15 bp, Homo sapiens
acaacattcagattt

SEQ ID NO: 1323256 - DNA, 15 bp, Homo sapiens
aacaacattcagatt

SEQ ID NO: 1323257 - DNA, 15 bp, Homo sapiens
caacaacattcagat

SEQ ID NO: 1323258 - DNA, 15 bp, Homo sapiens
ccaacaacattcaga

SEQ ID NO: 1323259 - DNA, 15 bp, Homo sapiens
cccaacaacattcag

SEQ ID NO: 1323260 - DNA, 15 bp, Homo sapiens
ccccaacaacattca

SEQ ID NO: 1323261 - DNA, 15 bp, Homo sapiens
tccccaacaacattc

SEQ ID NO: 1323262 - DNA, 15 bp, Homo sapiens
ttccccaacaacatt

SEQ ID NO: 1323263 - DNA, 15 bp, Homo sapiens
attccccaacaacat

SEQ ID NO: 1323264 - DNA, 15 bp, Homo sapiens
cattccccaacaaca

SEQ ID NO: 1323265 - DNA, 15 bp, Homo sapiens
acattccccaacaac

SEQ ID NO: 1323266 - DNA, 15 bp, Homo sapiens
tacattccccaacaa

SEQ ID NO: 1323267 - DNA, 15 bp, Homo sapiens
ttacattccccaaca

SEQ ID NO: 1323268 - DNA, 15 bp, Homo sapiens
attacattccccaac

SEQ ID NO: 1323269 - DNA, 15 bp, Homo sapiens
aattacattccccaa

SEQ ID NO: 1323270 - DNA, 15 bp, Homo sapiens
caattacattcccca

SEQ ID NO: 1323271 - DNA, 15 bp, Homo sapiens
gcaattacattcccc

SEQ ID NO: 1323272 - DNA, 15 bp, Homo sapiens
tgcaattacattccc

SEQ ID NO: 1323273 - DNA, 15 bp, Homo sapiens
ctgcaattacattcc

SEQ ID NO: 1323274 - DNA, 15 bp, Homo sapiens
tctgcaattacattc

SEQ ID NO: 1323275 - DNA, 15 bp, Homo sapiens
ctctgcaattacatt

SEQ ID NO: 1323276 - DNA, 15 bp, Homo sapiens
gctctgcaattacat

SEQ ID NO: 1323277 - DNA, 15 bp, Homo sapiens
tgctctgcaattaca

SEQ ID NO: 1323278 - DNA, 15 bp, Homo sapiens
atgctctgcaattac

SEQ ID NO: 1323279 - DNA, 15 bp, Homo sapiens
tatgctctgcaatta

SEQ ID NO: 1323280 - DNA, 15 bp, Homo sapiens
atatgctctgcaatt

SEQ ID NO: 1323281 - DNA, 15 bp, Homo sapiens
catatgctctgcaat

SEQ ID NO: 1323282 - DNA, 15 bp, Homo sapiens
ccatatgctctgcaa

SEQ ID NO: 1323283 - DNA, 15 bp, Homo sapiens
accatatgctctgca

SEQ ID NO: 1323284 - DNA, 15 bp, Homo sapiens
gaccatatgctctgc

SEQ ID NO: 1323285 - DNA, 15 bp, Homo sapiens
ggaccatatgctctg

SEQ ID NO: 1323286 - DNA, 15 bp, Homo sapiens
gggaccatatgctct

SEQ ID NO: 1323287 - DNA, 15 bp, Homo sapiens
ggggaccatatgctc

SEQ ID NO: 1323288 - DNA, 15 bp, Homo sapiens
tggggaccatatgct

SEQ ID NO: 1323289 - DNA, 15 bp, Homo sapiens
atggggaccatatgc

SEQ ID NO: 1323290 - DNA, 15 bp, Homo sapiens
aatggggaccatatg

SEQ ID NO: 1323291 - DNA, 15 bp, Homo sapiens
taatggggaccatat

SEQ ID NO: 1323292 - DNA, 15 bp, Homo sapiens
ctaatggggaccata

SEQ ID NO: 1323293 - DNA, 15 bp, Homo sapiens
actaatggggaccat

SEQ ID NO: 1323294 - DNA, 15 bp, Homo sapiens
aactaatggggacca

SEQ ID NO: 1323295 - DNA, 15 bp, Homo sapiens
taactaatggggacc

SEQ ID NO: 1323296 - DNA, 15 bp, Homo sapiens
ctaactaatggggac

SEQ ID NO: 1323297 - DNA, 15 bp, Homo sapiens
cctaactaatgggga

SEQ ID NO: 1323298 - DNA, 15 bp, Homo sapiens
gcctaactaatgggg

SEQ ID NO: 1323299 - DNA, 15 bp, Homo sapiens
tgcctaactaatggg

SEQ ID NO: 1323300 - DNA, 15 bp, Homo sapiens
ttgcctaactaatgg

SEQ ID NO: 1323301 - DNA, 15 bp, Homo sapiens
tttgcctaactaatg

SEQ ID NO: 1323302 - DNA, 15 bp, Homo sapiens
gtttgcctaactaat

SEQ ID NO: 1323303 - DNA, 15 bp, Homo sapiens
agtttgcctaactaa

SEQ ID NO: 1323304 - DNA, 15 bp, Homo sapiens
gagtttgcctaacta

SEQ ID NO: 1323305 - DNA, 15 bp, Homo sapiens
ggagtttgcctaact

SEQ ID NO: 1323306 - DNA, 15 bp, Homo sapiens
tggagtttgcctaac

SEQ ID NO: 1323307 - DNA, 15 bp, Homo sapiens
gtggagtttgcctaa

SEQ ID NO: 1323308 - DNA, 15 bp, Homo sapiens
agtggagtttgccta

SEQ ID NO: 1323309 - DNA, 15 bp, Homo sapiens
cagtggagtttgcct

SEQ ID NO: 1323310 - DNA, 15 bp, Homo sapiens
gcagtggagtttgcc

SEQ ID NO: 1323311 - DNA, 15 bp, Homo sapiens
ggcagtggagtttgc

SEQ ID NO: 1323312 - DNA, 15 bp, Homo sapiens
tggcagtggagtttg

SEQ ID NO: 1323313 - DNA, 15 bp, Homo sapiens
ttggcagtggagttt

SEQ ID NO: 1323314 - DNA, 15 bp, Homo sapiens
tttggcagtggagtt

SEQ ID NO: 1323315 - DNA, 15 bp, Homo sapiens
atttggcagtggagt

SEQ ID NO: 1323316 - DNA, 15 bp, Homo sapiens
aatttggcagtggag

SEQ ID NO: 1323317 - DNA, 15 bp, Homo sapiens
gaatttggcagtgga

SEQ ID NO: 1323318 - DNA, 15 bp, Homo sapiens
tgaatttggcagtgg

SEQ ID NO: 1323319 - DNA, 15 bp, Homo sapiens
ctgaatttggcagtg

SEQ ID NO: 1323320 - DNA, 15 bp, Homo sapiens
gctgaatttggcagt

SEQ ID NO: 1323321 - DNA, 15 bp, Homo sapiens
agctgaatttggcag

SEQ ID NO: 1323322 - DNA, 15 bp, Homo sapiens
gagctgaatttggca

SEQ ID NO: 1323323 - DNA, 15 bp, Homo sapiens
ggagctgaatttggc

SEQ ID NO: 1323324 - DNA, 15 bp, Homo sapiens
tggagctgaatttgg

SEQ ID NO: 1323325 - DNA, 15 bp, Homo sapiens
ttggagctgaatttg

SEQ ID NO: 1323326 - DNA, 15 bp, Homo sapiens
cttggagctgaattt

SEQ ID NO: 1323327 - DNA, 15 bp, Homo sapiens
ccttggagctgaatt

SEQ ID NO: 1323328 - DNA, 15 bp, Homo sapiens
tccttggagctgaat

SEQ ID NO: 1323329 - DNA, 15 bp, Homo sapiens
ttccttggagctgaa

SEQ ID NO: 1323330 - DNA, 15 bp, Homo sapiens
cttccttggagctga

SEQ ID NO: 1323331 - DNA, 15 bp, Homo sapiens
ccttccttggagctg

SEQ ID NO: 1323332 - DNA, 15 bp, Homo sapiens
tccttccttggagct

SEQ ID NO: 1323333 - DNA, 15 bp, Homo sapiens
ctccttccttggagc

SEQ ID NO: 1323334 - DNA, 15 bp, Homo sapiens
actccttccttggag

SEQ ID NO: 1323335 - DNA, 15 bp, Homo sapiens
gactccttccttgga

SEQ ID NO: 1323336 - DNA, 15 bp, Homo sapiens
agactccttccttgg

SEQ ID NO: 1323337 - DNA, 15 bp, Homo sapiens
cagactccttccttg

SEQ ID NO: 1323338 - DNA, 15 bp, Homo sapiens
gcagactccttcctt

SEQ ID NO: 1323339 - DNA, 15 bp, Homo sapiens
cgcagactccttcct

SEQ ID NO: 1323340 - DNA, 15 bp, Homo sapiens
acgcagactccttcc

SEQ ID NO: 1323341 - DNA, 15 bp, Homo sapiens
tacgcagactccttc

SEQ ID NO: 1323342 - DNA, 15 bp, Homo sapiens
ttacgcagactcctt

SEQ ID NO: 1323343 - DNA, 15 bp, Homo sapiens
tttacgcagactcct

SEQ ID NO: 1323344 - DNA, 15 bp, Homo sapiens
ctttacgcagactcc

SEQ ID NO: 1323345 - DNA, 15 bp, Homo sapiens
cctttacgcagactc

SEQ ID NO: 1323346 - DNA, 15 bp, Homo sapiens
tcctttacgcagact

SEQ ID NO: 1323347 - DNA, 15 bp, Homo sapiens
atcctttacgcagac

SEQ ID NO: 1323348 - DNA, 15 bp, Homo sapiens
catcctttacgcaga

SEQ ID NO: 1323349 - DNA, 15 bp, Homo sapiens
tcatcctttacgcag

SEQ ID NO: 1323350 - DNA, 15 bp, Homo sapiens
ttcatcctttacgca

SEQ ID NO: 1323351 - DNA, 15 bp, Homo sapiens
cttcatcctttacgc

SEQ ID NO: 1323352 - DNA, 15 bp, Homo sapiens
acttcatcctttacg

SEQ ID NO: 1323353 - DNA, 15 bp, Homo sapiens
tacttcatcctttac

SEQ ID NO: 1323354 - DNA, 15 bp, Homo sapiens
atacttcatccttta

SEQ ID NO: 1323355 - DNA, 15 bp, Homo sapiens
aatacttcatccttt

SEQ ID NO: 1323356 - DNA, 15 bp, Homo sapiens
taatacttcatcctt

SEQ ID NO: 1323357 - DNA, 15 bp, Homo sapiens
ctaatacttcatcct

SEQ ID NO: 1323358 - DNA, 15 bp, Homo sapiens
cctaatacttcatcc

SEQ ID NO: 1323359 - DNA, 15 bp, Homo sapiens
tcctaatacttcatc

SEQ ID NO: 1323360 - DNA, 15 bp, Homo sapiens
ttcctaatacttcat

SEQ ID NO: 1323361 - DNA, 15 bp, Homo sapiens
tttcctaatacttca

SEQ ID NO: 1323362 - DNA, 15 bp, Homo sapiens
ttttcctaatacttc

SEQ ID NO: 1323363 - DNA, 15 bp, Homo sapiens
gttttcctaatactt

SEQ ID NO: 1323364 - DNA, 15 bp, Homo sapiens
tgttttcctaatact

SEQ ID NO: 1323365 - DNA, 15 bp, Homo sapiens
atgttttcctaatac

SEQ ID NO: 1323366 - DNA, 15 bp, Homo sapiens
gatgttttcctaata

SEQ ID NO: 1323367 - DNA, 15 bp, Homo sapiens
cgatgttttcctaat

SEQ ID NO: 1323368 - DNA, 15 bp, Homo sapiens
tcgatgttttcctaa

SEQ ID NO: 1323369 - DNA, 15 bp, Homo sapiens
gtcgatgttttccta

SEQ ID NO: 1323370 - DNA, 15 bp, Homo sapiens
tgtcgatgttttcct

SEQ ID NO: 1323371 - DNA, 15 bp, Homo sapiens
ctgtcgatgttttcc

SEQ ID NO: 1323372 - DNA, 15 bp, Homo sapiens
actgtcgatgttttc

SEQ ID NO: 1323373 - DNA, 15 bp, Homo sapiens
cactgtcgatgtttt

SEQ ID NO: 1323374 - DNA, 15 bp, Homo sapiens
tcactgtcgatgttt

SEQ ID NO: 1323375 - DNA, 15 bp, Homo sapiens
gtcactgtcgatgtt

SEQ ID NO: 1323376 - DNA, 15 bp, Homo sapiens
tgtcactgtcgatgt

SEQ ID NO: 1323377 - DNA, 15 bp, Homo sapiens
ctgtcactgtcgatg

SEQ ID NO: 1323378 - DNA, 15 bp, Homo sapiens
tctgtcactgtcgat

SEQ ID NO: 1323379 - DNA, 15 bp, Homo sapiens
ctctgtcactgtcga

SEQ ID NO: 1323380 - DNA, 15 bp, Homo sapiens
tctctgtcactgtcg

SEQ ID NO: 1323381 - DNA, 15 bp, Homo sapiens
ttctctgtcactgtc

SEQ ID NO: 1323382 - DNA, 15 bp, Homo sapiens
cttctctgtcactgt

SEQ ID NO: 1323383 - DNA, 15 bp, Homo sapiens
ccttctctgtcactg

SEQ ID NO: 1323384 - DNA, 15 bp, Homo sapiens
gccttctctgtcact

SEQ ID NO: 1323385 - DNA, 15 bp, Homo sapiens
tgccttctctgtcac

SEQ ID NO: 1323386 - DNA, 15 bp, Homo sapiens
ttgccttctctgtca

SEQ ID NO: 1323387 - DNA, 15 bp, Homo sapiens
tttgccttctctgtc

SEQ ID NO: 1323388 - DNA, 15 bp, Homo sapiens
atttgccttctctgt

SEQ ID NO: 1323389 - DNA, 15 bp, Homo sapiens
tatttgccttctctg

SEQ ID NO: 1323390 - DNA, 15 bp, Homo sapiens
atatttgccttctct

SEQ ID NO: 1323391 - DNA, 15 bp, Homo sapiens
tatatttgccttctc

SEQ ID NO: 1323392 - DNA, 15 bp, Homo sapiens
ttatatttgccttct

SEQ ID NO: 1323393 - DNA, 15 bp, Homo sapiens
cttatatttgccttc

SEQ ID NO: 1323394 - DNA, 15 bp, Homo sapiens
tcttatatttgcctt

SEQ ID NO: 1323395 - DNA, 15 bp, Homo sapiens
ctcttatatttgcct

SEQ ID NO: 1323396 - DNA, 15 bp, Homo sapiens
tctcttatatttgcc

SEQ ID NO: 1323397 - DNA, 15 bp, Homo sapiens
atctcttatatttgc

SEQ ID NO: 1323398 - DNA, 15 bp, Homo sapiens
catctcttatatttg

SEQ ID NO: 1323399 - DNA, 15 bp, Homo sapiens
tcatctcttatattt

SEQ ID NO: 1323400 - DNA, 15 bp, Homo sapiens
ctcatctcttatatt

SEQ ID NO: 1323401 - DNA, 15 bp, Homo sapiens
tctcatctcttatat

SEQ ID NO: 1323402 - DNA, 15 bp, Homo sapiens
gtctcatctcttata

SEQ ID NO: 1323403 - DNA, 15 bp, Homo sapiens
tgtctcatctcttat

SEQ ID NO: 1323404 - DNA, 15 bp, Homo sapiens
ctgtctcatctctta

SEQ ID NO: 1323405 - DNA, 15 bp, Homo sapiens
actgtctcatctctt

SEQ ID NO: 1323406 - DNA, 15 bp, Homo sapiens
cactgtctcatctct

SEQ ID NO: 1323407 - DNA, 15 bp, Homo sapiens
tcactgtctcatctc

SEQ ID NO: 1323408 - DNA, 15 bp, Homo sapiens
ctcactgtctcatct

SEQ ID NO: 1323409 - DNA, 15 bp, Homo sapiens
actcactgtctcatc

SEQ ID NO: 1323410 - DNA, 15 bp, Homo sapiens
aactcactgtctcat

SEQ ID NO: 1323411 - DNA, 15 bp, Homo sapiens
aaactcactgtctca

SEQ ID NO: 1323412 - DNA, 15 bp, Homo sapiens
gaaactcactgtctc

SEQ ID NO: 1323413 - DNA, 15 bp, Homo sapiens
tgaaactcactgtct

SEQ ID NO: 1323414 - DNA, 15 bp, Homo sapiens
ttgaaactcactgtc

SEQ ID NO: 1323415 - DNA, 15 bp, Homo sapiens
tttgaaactcactgt

SEQ ID NO: 1323416 - DNA, 15 bp, Homo sapiens
ttttgaaactcactg

SEQ ID NO: 1323417 - DNA, 15 bp, Homo sapiens
cttttgaaactcact

SEQ ID NO: 1323418 - DNA, 15 bp, Homo sapiens
tcttttgaaactcac

SEQ ID NO: 1323419 - DNA, 15 bp, Homo sapiens
ctcttttgaaactca

SEQ ID NO: 1323420 - DNA, 15 bp, Homo sapiens
gctcttttgaaactc

SEQ ID NO: 1323421 - DNA, 15 bp, Homo sapiens
tgctcttttgaaact

SEQ ID NO: 1323422 - DNA, 15 bp, Homo sapiens
ctgctcttttgaaac

SEQ ID NO: 1323423 - DNA, 15 bp, Homo sapiens
cctgctcttttgaaa

SEQ ID NO: 1323424 - DNA, 15 bp, Homo sapiens
gcctgctcttttgaa

SEQ ID NO: 1323425 - DNA, 15 bp, Homo sapiens
agcctgctcttttga

SEQ ID NO: 1323426 - DNA, 15 bp, Homo sapiens
gagcctgctcttttg

SEQ ID NO: 1323427 - DNA, 15 bp, Homo sapiens
cgagcctgctctttt

SEQ ID NO: 1323428 - DNA, 15 bp, Homo sapiens
ccgagcctgctcttt

SEQ ID NO: 1323429 - DNA, 15 bp, Homo sapiens
gccgagcctgctctt

SEQ ID NO: 1323430 - DNA, 15 bp, Homo sapiens
tgccgagcctgctct

SEQ ID NO: 1323431 - DNA, 15 bp, Homo sapiens
ttgccgagcctgctc

SEQ ID NO: 1323432 - DNA, 15 bp, Homo sapiens
tttgccgagcctgct

SEQ ID NO: 1323433 - DNA, 15 bp, Homo sapiens
gtttgccgagcctgc

SEQ ID NO: 1323434 - DNA, 15 bp, Homo sapiens
ggtttgccgagcctg

SEQ ID NO: 1323435 - DNA, 15 bp, Homo sapiens
gggtttgccgagcct

SEQ ID NO: 1323436 - DNA, 15 bp, Homo sapiens
tgggtttgccgagcc

SEQ ID NO: 1323437 - DNA, 15 bp, Homo sapiens
ctgggtttgccgagc

SEQ ID NO: 1323438 - DNA, 15 bp, Homo sapiens
gctgggtttgccgag

SEQ ID NO: 1323439 - DNA, 15 bp, Homo sapiens
tgctgggtttgccga

SEQ ID NO: 1323440 - DNA, 15 bp, Homo sapiens
gtgctgggtttgccg

SEQ ID NO: 1323441 - DNA, 15 bp, Homo sapiens
tgtgctgggtttgcc

SEQ ID NO: 1323442 - DNA, 15 bp, Homo sapiens
ttgtgctgggtttgc

SEQ ID NO: 1323443 - DNA, 15 bp, Homo sapiens
attgtgctgggtttg

SEQ ID NO: 1323444 - DNA, 15 bp, Homo sapiens
cattgtgctgggttt

SEQ ID NO: 1323445 - DNA, 15 bp, Homo sapiens
tcattgtgctgggtt

SEQ ID NO: 1323446 - DNA, 15 bp, Homo sapiens
ttcattgtgctgggt

SEQ ID NO: 1323447 - DNA, 15 bp, Homo sapiens
attcattgtgctggg

SEQ ID NO: 1323448 - DNA, 15 bp, Homo sapiens
cattcattgtgctgg

SEQ ID NO: 1323449 - DNA, 15 bp, Homo sapiens
acattcattgtgctg

SEQ ID NO: 1323450 - DNA, 15 bp, Homo sapiens
cacattcattgtgct

SEQ ID NO: 1323451 - DNA, 15 bp, Homo sapiens
ccacattcattgtgc

SEQ ID NO: 1323452 - DNA, 15 bp, Homo sapiens
tccacattcattgtg

SEQ ID NO: 1323453 - DNA, 15 bp, Homo sapiens
ttccacattcattgt

SEQ ID NO: 1323454 - DNA, 15 bp, Homo sapiens
gttccacattcattg

SEQ ID NO: 1323455 - DNA, 15 bp, Homo sapiens
tgttccacattcatt

SEQ ID NO: 1323456 - DNA, 15 bp, Homo sapiens
atgttccacattcat

SEQ ID NO: 1323457 - DNA, 15 bp, Homo sapiens
tatgttccacattca

SEQ ID NO: 1323458 - DNA, 15 bp, Homo sapiens
ttatgttccacattc

SEQ ID NO: 1323459 - DNA, 15 bp, Homo sapiens
attatgttccacatt

SEQ ID NO: 1323460 - DNA, 15 bp, Homo sapiens
aattatgttccacat

SEQ ID NO: 1323461 - DNA, 15 bp, Homo sapiens
aaattatgttccaca

SEQ ID NO: 1323462 - DNA, 15 bp, Homo sapiens
aaaattatgttccac

SEQ ID NO: 1323463 - DNA, 15 bp, Homo sapiens
gaaaattatgttcca

SEQ ID NO: 1323464 - DNA, 15 bp, Homo sapiens
ggaaaattatgttcc

SEQ ID NO: 1323465 - DNA, 15 bp, Homo sapiens
tggaaaattatgttc

SEQ ID NO: 1323466 - DNA, 15 bp, Homo sapiens
atggaaaattatgtt

SEQ ID NO: 1323467 - DNA, 15 bp, Homo sapiens
aatggaaaattatgt

SEQ ID NO: 1323468 - DNA, 15 bp, Homo sapiens
aaatggaaaattatg

SEQ ID NO: 1323469 - DNA, 15 bp, Homo sapiens
caaatggaaaattat

SEQ ID NO: 1323470 - DNA, 15 bp, Homo sapiens
acaaatggaaaatta

SEQ ID NO: 1323471 - DNA, 15 bp, Homo sapiens
aacaaatggaaaatt

SEQ ID NO: 1323472 - DNA, 15 bp, Homo sapiens
caacaaatggaaaat

SEQ ID NO: 1323473 - DNA, 15 bp, Homo sapiens
tcaacaaatggaaaa

SEQ ID NO: 1323474 - DNA, 15 bp, Homo sapiens
ctcaacaaatggaaa

SEQ ID NO: 1323475 - DNA, 15 bp, Homo sapiens
tctcaacaaatggaa

SEQ ID NO: 1323476 - DNA, 15 bp, Homo sapiens
ttctcaacaaatgga

SEQ ID NO: 1323477 - DNA, 15 bp, Homo sapiens
tttctcaacaaatgg

SEQ ID NO: 1323478 - DNA, 15 bp, Homo sapiens
ttttctcaacaaatg

SEQ ID NO: 1323479 - DNA, 15 bp, Homo sapiens
gttttctcaacaaat

SEQ ID NO: 1323480 - DNA, 15 bp, Homo sapiens
tgttttctcaacaaa

SEQ ID NO: 1323481 - DNA, 15 bp, Homo sapiens
ttgttttctcaacaa

SEQ ID NO: 1323482 - DNA, 15 bp, Homo sapiens
attgttttctcaaca

SEQ ID NO: 1323483 - DNA, 15 bp, Homo sapiens
tattgttttctcaac

SEQ ID NO: 1323484 - DNA, 15 bp, Homo sapiens
atattgttttctcaa

SEQ ID NO: 1323485 - DNA, 15 bp, Homo sapiens
tatattgttttctca

SEQ ID NO: 1323486 - DNA, 15 bp, Homo sapiens
atatattgttttctc

SEQ ID NO: 1323487 - DNA, 15 bp, Homo sapiens
catatattgttttct

SEQ ID NO: 1323488 - DNA, 15 bp, Homo sapiens
acatatattgttttc

SEQ ID NO: 1323489 - DNA, 15 bp, Homo sapiens
cacatatattgtttt

SEQ ID NO: 1323490 - DNA, 15 bp, Homo sapiens
tcacatatattgttt

SEQ ID NO: 1323491 - DNA, 15 bp, Homo sapiens
ttcacatatattgtt

SEQ ID NO: 1323492 - DNA, 15 bp, Homo sapiens
attcacatatattgt

SEQ ID NO: 1323493 - DNA, 15 bp, Homo sapiens
aattcacatatattg

SEQ ID NO: 1323494 - DNA, 15 bp, Homo sapiens
aaattcacatatatt

SEQ ID NO: 1323495 - DNA, 15 bp, Homo sapiens
caaattcacatatat

SEQ ID NO: 1323496 - DNA, 15 bp, Homo sapiens
acaaattcacatata

SEQ ID NO: 1323497 - DNA, 15 bp, Homo sapiens
tacaaattcacatat

SEQ ID NO: 1323498 - DNA, 15 bp, Homo sapiens
gtacaaattcacata

SEQ ID NO: 1323499 - DNA, 15 bp, Homo sapiens
agtacaaattcacat

SEQ ID NO: 1323500 - DNA, 15 bp, Homo sapiens
tagtacaaattcaca

SEQ ID NO: 1323501 - DNA, 15 bp, Homo sapiens
ttagtacaaattcac

SEQ ID NO: 1323502 - DNA, 15 bp, Homo sapiens
tttagtacaaattca

SEQ ID NO: 1323503 - DNA, 15 bp, Homo sapiens
ttttagtacaaattc

SEQ ID NO: 1323504 - DNA, 15 bp, Homo sapiens
attttagtacaaatt

SEQ ID NO: 1323505 - DNA, 15 bp, Homo sapiens
gattttagtacaaat

SEQ ID NO: 1323506 - DNA, 15 bp, Homo sapiens
agattttagtacaaa

SEQ ID NO: 1323507 - DNA, 15 bp, Homo sapiens
gagattttagtacaa

SEQ ID NO: 1323508 - DNA, 15 bp, Homo sapiens
ggagattttagtaca

SEQ ID NO: 1323509 - DNA, 15 bp, Homo sapiens
gggagattttagtac

SEQ ID NO: 1323510 - DNA, 15 bp, Homo sapiens
agggagattttagta

SEQ ID NO: 1323511 - DNA, 15 bp, Homo sapiens
cagggagattttagt

SEQ ID NO: 1323512 - DNA, 15 bp, Homo sapiens
acagggagattttag

SEQ ID NO: 1323513 - DNA, 15 bp, Homo sapiens
tacagggagatttta

SEQ ID NO: 1323514 - DNA, 15 bp, Homo sapiens
ctacagggagatttt

SEQ ID NO: 1323515 - DNA, 15 bp, Homo sapiens
gctacagggagattt

SEQ ID NO: 1323516 - DNA, 15 bp, Homo sapiens
tgctacagggagatt

SEQ ID NO: 1323517 - DNA, 15 bp, Homo sapiens
ttgctacagggagat

SEQ ID NO: 1323518 - DNA, 15 bp, Homo sapiens
tttgctacagggaga

SEQ ID NO: 1323519 - DNA, 15 bp, Homo sapiens
ttttgctacagggag

SEQ ID NO: 1323520 - DNA, 15 bp, Homo sapiens
tttttgctacaggga

SEQ ID NO: 1323521 - DNA, 15 bp, Homo sapiens
atttttgctacaggg

SEQ ID NO: 1323522 - DNA, 15 bp, Homo sapiens
gatttttgctacagg

SEQ ID NO: 1323523 - DNA, 15 bp, Homo sapiens
tgatttttgctacag

SEQ ID NO: 1323524 - DNA, 15 bp, Homo sapiens
ttgatttttgctaca

SEQ ID NO: 1323525 - DNA, 15 bp, Homo sapiens
tttgatttttgctac

SEQ ID NO: 1323526 - DNA, 15 bp, Homo sapiens
ctttgatttttgcta

SEQ ID NO: 1323527 - DNA, 15 bp, Homo sapiens
actttgatttttgct

SEQ ID NO: 1323528 - DNA, 15 bp, Homo sapiens
tactttgatttttgc

SEQ ID NO: 1323529 - DNA, 15 bp, Homo sapiens
ctactttgatttttg

SEQ ID NO: 1323530 - DNA, 15 bp, Homo sapiens
tctactttgattttt

SEQ ID NO: 1323531 - DNA, 15 bp, Homo sapiens
gtctactttgatttt

SEQ ID NO: 1323532 - DNA, 15 bp, Homo sapiens
ggtctactttgattt

SEQ ID NO: 1323533 - DNA, 15 bp, Homo sapiens
tggtctactttgatt

SEQ ID NO: 1323534 - DNA, 15 bp, Homo sapiens
atggtctactttgat

SEQ ID NO: 1323535 - DNA, 15 bp, Homo sapiens
aatggtctactttga

SEQ ID NO: 1323536 - DNA, 15 bp, Homo sapiens
gaatggtctactttg

SEQ ID NO: 1323537 - DNA, 15 bp, Homo sapiens
tgaatggtctacttt

SEQ ID NO: 1323538 - DNA, 15 bp, Homo sapiens
gtgaatggtctactt

SEQ ID NO: 1323539 - DNA, 15 bp, Homo sapiens
ggtgaatggtctact

SEQ ID NO: 1323540 - DNA, 15 bp, Homo sapiens
tggtgaatggtctac

SEQ ID NO: 1323541 - DNA, 15 bp, Homo sapiens
ctggtgaatggtcta

SEQ ID NO: 1323542 - DNA, 15 bp, Homo sapiens
tctggtgaatggtct

SEQ ID NO: 1323543 - DNA, 15 bp, Homo sapiens
ttctggtgaatggtc

SEQ ID NO: 1323544 - DNA, 15 bp, Homo sapiens
attctggtgaatggt

SEQ ID NO: 1323545 - DNA, 15 bp, Homo sapiens
gattctggtgaatgg

SEQ ID NO: 1323546 - DNA, 15 bp, Homo sapiens
tgattctggtgaatg

SEQ ID NO: 1323547 - DNA, 15 bp, Homo sapiens
ttgattctggtgaat

SEQ ID NO: 1323548 - DNA, 15 bp, Homo sapiens
attgattctggtgaa

SEQ ID NO: 1323549 - DNA, 15 bp, Homo sapiens
cattgattctggtga

SEQ ID NO: 1323550 - DNA, 15 bp, Homo sapiens
acattgattctggtg

SEQ ID NO: 1323551 - DNA, 15 bp, Homo sapiens
aacattgattctggt

SEQ ID NO: 1323552 - DNA, 15 bp, Homo sapiens
taacattgattctgg

SEQ ID NO: 1323553 - DNA, 15 bp, Homo sapiens
ttaacattgattctg

SEQ ID NO: 1323554 - DNA, 15 bp, Homo sapiens
gttaacattgattct

SEQ ID NO: 1323555 - DNA, 15 bp, Homo sapiens
agttaacattgattc

SEQ ID NO: 1323556 - DNA, 15 bp, Homo sapiens
cagttaacattgatt

SEQ ID NO: 1323557 - DNA, 15 bp, Homo sapiens
gcagttaacattgat

SEQ ID NO: 1323558 - DNA, 15 bp, Homo sapiens
agcagttaacattga

SEQ ID NO: 1323559 - DNA, 15 bp, Homo sapiens
aagcagttaacattg

SEQ ID NO: 1323560 - DNA, 15 bp, Homo sapiens
aaagcagttaacatt

SEQ ID NO: 1323561 - DNA, 15 bp, Homo sapiens
caaagcagttaacat

SEQ ID NO: 1323562 - DNA, 15 bp, Homo sapiens
gcaaagcagttaaca

SEQ ID NO: 1323563 - DNA, 15 bp, Homo sapiens
tgcaaagcagttaac

SEQ ID NO: 1323564 - DNA, 15 bp, Homo sapiens
ttgcaaagcagttaa

SEQ ID NO: 1323565 - DNA, 15 bp, Homo sapiens
attgcaaagcagtta

SEQ ID NO: 1323566 - DNA, 15 bp, Homo sapiens
cattgcaaagcagtt

SEQ ID NO: 1323567 - DNA, 15 bp, Homo sapiens
acattgcaaagcagt

SEQ ID NO: 1323568 - DNA, 15 bp, Homo sapiens
gacattgcaaagcag

SEQ ID NO: 1323569 - DNA, 15 bp, Homo sapiens
tgacattgcaaagca

SEQ ID NO: 1323570 - DNA, 15 bp, Homo sapiens
ctgacattgcaaagc

SEQ ID NO: 1323571 - DNA, 15 bp, Homo sapiens
tctgacattgcaaag

SEQ ID NO: 1323572 - DNA, 15 bp, Homo sapiens
atctgacattgcaaa

SEQ ID NO: 1323573 - DNA, 15 bp, Homo sapiens
tatctgacattgcaa

SEQ ID NO: 1323574 - DNA, 15 bp, Homo sapiens
ttatctgacattgca

SEQ ID NO: 1323575 - DNA, 15 bp, Homo sapiens
cttatctgacattgc

SEQ ID NO: 1323576 - DNA, 15 bp, Homo sapiens
tcttatctgacattg

SEQ ID NO: 1323577 - DNA, 15 bp, Homo sapiens
atcttatctgacatt

SEQ ID NO: 1323578 - DNA, 15 bp, Homo sapiens
tatcttatctgacat

SEQ ID NO: 1323579 - DNA, 15 bp, Homo sapiens
ctatcttatctgaca

SEQ ID NO: 1323580 - DNA, 15 bp, Homo sapiens
tctatcttatctgac

SEQ ID NO: 1323581 - DNA, 15 bp, Homo sapiens
atctatcttatctga

SEQ ID NO: 1323582 - DNA, 15 bp, Homo sapiens
aatctatcttatctg

SEQ ID NO: 1323583 - DNA, 15 bp, Homo sapiens
gaatctatcttatct

SEQ ID NO: 1323584 - DNA, 15 bp, Homo sapiens
agaatctatcttatc

SEQ ID NO: 1323585 - DNA, 15 bp, Homo sapiens
cagaatctatcttat

SEQ ID NO: 1323586 - DNA, 15 bp, Homo sapiens
gcagaatctatctta

SEQ ID NO: 1323587 - DNA, 15 bp, Homo sapiens
agcagaatctatctt

SEQ ID NO: 1323588 - DNA, 15 bp, Homo sapiens
aagcagaatctatct

SEQ ID NO: 1323589 - DNA, 15 bp, Homo sapiens
caagcagaatctatc

SEQ ID NO: 1323590 - DNA, 15 bp, Homo sapiens
ccaagcagaatctat

SEQ ID NO: 1323591 - DNA, 15 bp, Homo sapiens
cccaagcagaatcta

SEQ ID NO: 1323592 - DNA, 15 bp, Homo sapiens
tcccaagcagaatct

SEQ ID NO: 1323593 - DNA, 15 bp, Homo sapiens
ctcccaagcagaatc

SEQ ID NO: 1323594 - DNA, 15 bp, Homo sapiens
tctcccaagcagaat

SEQ ID NO: 1323595 - DNA, 15 bp, Homo sapiens
ttctcccaagcagaa

SEQ ID NO: 1323596 - DNA, 15 bp, Homo sapiens
tttctcccaagcaga

SEQ ID NO: 1323597 - DNA, 15 bp, Homo sapiens
ttttctcccaagcag

SEQ ID NO: 1323598 - DNA, 15 bp, Homo sapiens
tttttctcccaagca

SEQ ID NO: 1323599 - DNA, 15 bp, Homo sapiens
gtttttctcccaagc

SEQ ID NO: 1323600 - DNA, 15 bp, Homo sapiens
tgtttttctcccaag

SEQ ID NO: 1323601 - DNA, 15 bp, Homo sapiens
atgtttttctcccaa

SEQ ID NO: 1323602 - DNA, 15 bp, Homo sapiens
catgtttttctccca

SEQ ID NO: 1323603 - DNA, 15 bp, Homo sapiens
ccatgtttttctccc

SEQ ID NO: 1323604 - DNA, 15 bp, Homo sapiens
cccatgtttttctcc

SEQ ID NO: 1323605 - DNA, 15 bp, Homo sapiens
acccatgtttttctc

SEQ ID NO: 1323606 - DNA, 15 bp, Homo sapiens
cacccatgtttttct

SEQ ID NO: 1323607 - DNA, 15 bp, Homo sapiens
ccacccatgtttttc

SEQ ID NO: 1323608 - DNA, 15 bp, Homo sapiens
tccacccatgttttt

SEQ ID NO: 1323609 - DNA, 15 bp, Homo sapiens
ttccacccatgtttt

SEQ ID NO: 1323610 - DNA, 15 bp, Homo sapiens
gttccacccatgttt

SEQ ID NO: 1323611 - DNA, 15 bp, Homo sapiens
tgttccacccatgtt

SEQ ID NO: 1323612 - DNA, 15 bp, Homo sapiens
ctgttccacccatgt

SEQ ID NO: 1323613 - DNA, 15 bp, Homo sapiens
tctgttccacccatg

SEQ ID NO: 1323614 - DNA, 15 bp, Homo sapiens
ttctgttccacccat

SEQ ID NO: 1323615 - DNA, 15 bp, Homo sapiens
attctgttccaccca

SEQ ID NO: 1323616 - DNA, 15 bp, Homo sapiens
tattctgttccaccc

SEQ ID NO: 1323617 - DNA, 15 bp, Homo sapiens
ctattctgttccacc

SEQ ID NO: 1323618 - DNA, 15 bp, Homo sapiens
tctattctgttccac

SEQ ID NO: 1323619 - DNA, 15 bp, Homo sapiens
ctctattctgttcca

SEQ ID NO: 1323620 - DNA, 15 bp, Homo sapiens
tctctattctgttcc

SEQ ID NO: 1323621 - DNA, 15 bp, Homo sapiens
ctctctattctgttc

SEQ ID NO: 1323622 - DNA, 15 bp, Homo sapiens
actctctattctgtt

SEQ ID NO: 1323623 - DNA, 15 bp, Homo sapiens
gactctctattctgt

SEQ ID NO: 1323624 - DNA, 15 bp, Homo sapiens
agactctctattctg

SEQ ID NO: 1323625 - DNA, 15 bp, Homo sapiens
cagactctctattct

SEQ ID NO: 1323626 - DNA, 15 bp, Homo sapiens
gcagactctctattc

SEQ ID NO: 1323627 - DNA, 15 bp, Homo sapiens
agcagactctctatt

SEQ ID NO: 1323628 - DNA, 15 bp, Homo sapiens
tagcagactctctat

SEQ ID NO: 1323629 - DNA, 15 bp, Homo sapiens
ttagcagactctcta

SEQ ID NO: 1323630 - DNA, 15 bp, Homo sapiens
cttagcagactctct

SEQ ID NO: 1323631 - DNA, 15 bp, Homo sapiens
ccttagcagactctc

SEQ ID NO: 1323632 - DNA, 15 bp, Homo sapiens
tccttagcagactct

SEQ ID NO: 1323633 - DNA, 15 bp, Homo sapiens
ttccttagcagactc

SEQ ID NO: 1323634 - DNA, 15 bp, Homo sapiens
tttccttagcagact

SEQ ID NO: 1323635 - DNA, 15 bp, Homo sapiens
atttccttagcagac

SEQ ID NO: 1323636 - DNA, 15 bp, Homo sapiens
tatttccttagcaga

SEQ ID NO: 1323637 - DNA, 15 bp, Homo sapiens
ttatttccttagcag

SEQ ID NO: 1323638 - DNA, 15 bp, Homo sapiens
tttatttccttagca

SEQ ID NO: 1323639 - DNA, 15 bp, Homo sapiens
ctttatttccttagc

SEQ ID NO: 1323640 - DNA, 15 bp, Homo sapiens
gctttatttccttag

SEQ ID NO: 1323641 - DNA, 15 bp, Homo sapiens
tgctttatttcctta

SEQ ID NO: 1323642 - DNA, 15 bp, Homo sapiens
ttgctttatttcctt

SEQ ID NO: 1323643 - DNA, 15 bp, Homo sapiens
cttgctttatttcct

SEQ ID NO: 1323644 - DNA, 15 bp, Homo sapiens
tcttgctttatttcc

SEQ ID NO: 1323645 - DNA, 15 bp, Homo sapiens
ctcttgctttatttc

SEQ ID NO: 1323646 - DNA, 15 bp, Homo sapiens
actcttgctttattt

SEQ ID NO: 1323647 - DNA, 15 bp, Homo sapiens
cactcttgctttatt

SEQ ID NO: 1323648 - DNA, 15 bp, Homo sapiens
tcactcttgctttat

SEQ ID NO: 1323649 - DNA, 15 bp, Homo sapiens
gtcactcttgcttta

SEQ ID NO: 1323650 - DNA, 15 bp, Homo sapiens
tgtcactcttgcttt

SEQ ID NO: 1323651 - DNA, 15 bp, Homo sapiens
atgtcactcttgctt

SEQ ID NO: 1323652 - DNA, 15 bp, Homo sapiens
gatgtcactcttgct

SEQ ID NO: 1323653 - DNA, 15 bp, Homo sapiens
tgatgtcactcttgc

SEQ ID NO: 1323654 - DNA, 15 bp, Homo sapiens
ttgatgtcactcttg

SEQ ID NO: 1323655 - DNA, 15 bp, Homo sapiens
tttgatgtcactctt

SEQ ID NO: 1323656 - DNA, 15 bp, Homo sapiens
ttttgatgtcactct

SEQ ID NO: 1323657 - DNA, 15 bp, Homo sapiens
attttgatgtcactc

SEQ ID NO: 1323658 - DNA, 15 bp, Homo sapiens
cattttgatgtcact

SEQ ID NO: 1323659 - DNA, 15 bp, Homo sapiens
acattttgatgtcac

SEQ ID NO: 1323660 - DNA, 15 bp, Homo sapiens
tacattttgatgtca

SEQ ID NO: 1323661 - DNA, 15 bp, Homo sapiens
ttacattttgatgtc

SEQ ID NO: 1323662 - DNA, 15 bp, Homo sapiens
tttacattttgatgt

SEQ ID NO: 1323663 - DNA, 15 bp, Homo sapiens
atttacattttgatg

SEQ ID NO: 1323664 - DNA, 15 bp, Homo sapiens
tatttacattttgat

SEQ ID NO: 1323665 - DNA, 15 bp, Homo sapiens
gtatttacattttga

SEQ ID NO: 1323666 - DNA, 15 bp, Homo sapiens
tgtatttacattttg

SEQ ID NO: 1323667 - DNA, 15 bp, Homo sapiens
ctgtatttacatttt

SEQ ID NO: 1323668 - DNA, 15 bp, Homo sapiens
tctgtatttacattt

SEQ ID NO: 1323669 - DNA, 15 bp, Homo sapiens
gtctgtatttacatt

SEQ ID NO: 1323670 - DNA, 15 bp, Homo sapiens
agtctgtatttacat

SEQ ID NO: 1323671 - DNA, 15 bp, Homo sapiens
aagtctgtatttaca

SEQ ID NO: 1323672 - DNA, 15 bp, Homo sapiens
taagtctgtatttac

SEQ ID NO: 1323673 - DNA, 15 bp, Homo sapiens
ttaagtctgtattta

SEQ ID NO: 1323674 - DNA, 15 bp, Homo sapiens
gttaagtctgtattt

SEQ ID NO: 1323675 - DNA, 15 bp, Homo sapiens
cgttaagtctgtatt

SEQ ID NO: 1323676 - DNA, 15 bp, Homo sapiens
gcgttaagtctgtat

SEQ ID NO: 1323677 - DNA, 15 bp, Homo sapiens
agcgttaagtctgta

SEQ ID NO: 1323678 - DNA, 15 bp, Homo sapiens
tagcgttaagtctgt

SEQ ID NO: 1323679 - DNA, 15 bp, Homo sapiens
atagcgttaagtctg

SEQ ID NO: 1323680 - DNA, 15 bp, Homo sapiens
aatagcgttaagtct

SEQ ID NO: 1323681 - DNA, 15 bp, Homo sapiens
aaatagcgttaagtc

SEQ ID NO: 1323682 - DNA, 15 bp, Homo sapiens
aaaatagcgttaagt

SEQ ID NO: 1323683 - DNA, 15 bp, Homo sapiens
taaaatagcgttaag

SEQ ID NO: 1323684 - DNA, 15 bp, Homo sapiens
ttaaaatagcgttaa

SEQ ID NO: 1323685 - DNA, 15 bp, Homo sapiens
tttaaaatagcgtta

SEQ ID NO: 1323686 - DNA, 15 bp, Homo sapiens
atttaaaatagcgtt

SEQ ID NO: 1323687 - DNA, 15 bp, Homo sapiens
catttaaaatagcgt

SEQ ID NO: 1323688 - DNA, 15 bp, Homo sapiens
acatttaaaatagcg

SEQ ID NO: 1323689 - DNA, 15 bp, Homo sapiens
aacatttaaaatagc

SEQ ID NO: 1323690 - DNA, 15 bp, Homo sapiens
taacatttaaaatag

SEQ ID NO: 1323691 - DNA, 15 bp, Homo sapiens
gtaacatttaaaata

SEQ ID NO: 1323692 - DNA, 15 bp, Homo sapiens
agtaacatttaaaat

SEQ ID NO: 1323693 - DNA, 15 bp, Homo sapiens
cagtaacatttaaaa

SEQ ID NO: 1323694 - DNA, 15 bp, Homo sapiens
ccagtaacatttaaa

SEQ ID NO: 1323695 - DNA, 15 bp, Homo sapiens
tccagtaacatttaa

SEQ ID NO: 1323696 - DNA, 15 bp, Homo sapiens
gtccagtaacattta

SEQ ID NO: 1323697 - DNA, 15 bp, Homo sapiens
ggtccagtaacattt

SEQ ID NO: 1323698 - DNA, 15 bp, Homo sapiens
tggtccagtaacatt

SEQ ID NO: 1323699 - DNA, 15 bp, Homo sapiens
ctggtccagtaacat

SEQ ID NO: 1323700 - DNA, 15 bp, Homo sapiens
gctggtccagtaaca

SEQ ID NO: 1323701 - DNA, 15 bp, Homo sapiens
ggctggtccagtaac

SEQ ID NO: 1323702 - DNA, 15 bp, Homo sapiens
aggctggtccagtaa

SEQ ID NO: 1323703 - DNA, 15 bp, Homo sapiens
aaggctggtccagta

SEQ ID NO: 1323704 - DNA, 15 bp, Homo sapiens
aaaggctggtccagt

SEQ ID NO: 1323705 - DNA, 15 bp, Homo sapiens
caaaggctggtccag

SEQ ID NO: 1323706 - DNA, 15 bp, Homo sapiens
tcaaaggctggtcca

SEQ ID NO: 1323707 - DNA, 15 bp, Homo sapiens
ctcaaaggctggtcc

SEQ ID NO: 1323708 - DNA, 15 bp, Homo sapiens
tctcaaaggctggtc

SEQ ID NO: 1323709 - DNA, 15 bp, Homo sapiens
ctctcaaaggctggt

SEQ ID NO: 1323710 - DNA, 15 bp, Homo sapiens
cctctcaaaggctgg

SEQ ID NO: 1323711 - DNA, 15 bp, Homo sapiens
tcctctcaaaggctg

SEQ ID NO: 1323712 - DNA, 15 bp, Homo sapiens
ctcctctcaaaggct

SEQ ID NO: 1323713 - DNA, 15 bp, Homo sapiens
tctcctctcaaaggc

SEQ ID NO: 1323714 - DNA, 15 bp, Homo sapiens
ttctcctctcaaagg

SEQ ID NO: 1323715 - DNA, 15 bp, Homo sapiens
tttctcctctcaaag

SEQ ID NO: 1323716 - DNA, 15 bp, Homo sapiens
gtttctcctctcaaa

SEQ ID NO: 1323717 - DNA, 15 bp, Homo sapiens
tgtttctcctctcaa

SEQ ID NO: 1323718 - DNA, 15 bp, Homo sapiens
ctgtttctcctctca

SEQ ID NO: 1323719 - DNA, 15 bp, Homo sapiens
tctgtttctcctctc

SEQ ID NO: 1323720 - DNA, 15 bp, Homo sapiens
ttctgtttctcctct

SEQ ID NO: 1323721 - DNA, 15 bp, Homo sapiens
attctgtttctcctc

SEQ ID NO: 1323722 - DNA, 15 bp, Homo sapiens
gattctgtttctcct

SEQ ID NO: 1323723 - DNA, 15 bp, Homo sapiens
agattctgtttctcc

SEQ ID NO: 1323724 - DNA, 15 bp, Homo sapiens
gagattctgtttctc

SEQ ID NO: 1323725 - DNA, 15 bp, Homo sapiens
tgagattctgtttct

SEQ ID NO: 1323726 - DNA, 15 bp, Homo sapiens
atgagattctgtttc

SEQ ID NO: 1323727 - DNA, 15 bp, Homo sapiens
catgagattctgttt

SEQ ID NO: 1323728 - DNA, 15 bp, Homo sapiens
gcatgagattctgtt

SEQ ID NO: 1323729 - DNA, 15 bp, Homo sapiens
agcatgagattctgt

SEQ ID NO: 1323730 - DNA, 15 bp, Homo sapiens
aagcatgagattctg

SEQ ID NO: 1323731 - DNA, 15 bp, Homo sapiens
taagcatgagattct

SEQ ID NO: 1323732 - DNA, 15 bp, Homo sapiens
ttaagcatgagattc

SEQ ID NO: 1323733 - DNA, 15 bp, Homo sapiens
attaagcatgagatt

SEQ ID NO: 1323734 - DNA, 15 bp, Homo sapiens
tattaagcatgagat

SEQ ID NO: 1323735 - DNA, 15 bp, Homo sapiens
ttattaagcatgaga

SEQ ID NO: 1323736 - DNA, 15 bp, Homo sapiens
gttattaagcatgag

SEQ ID NO: 1323737 - DNA, 15 bp, Homo sapiens
ggttattaagcatga

SEQ ID NO: 1323738 - DNA, 15 bp, Homo sapiens
aggttattaagcatg

SEQ ID NO: 1323739 - DNA, 15 bp, Homo sapiens
gaggttattaagcat

SEQ ID NO: 1323740 - DNA, 15 bp, Homo sapiens
agaggttattaagca

SEQ ID NO: 1323741 - DNA, 15 bp, Homo sapiens
gagaggttattaagc

SEQ ID NO: 1323742 - DNA, 15 bp, Homo sapiens
tgagaggttattaag

SEQ ID NO: 1323743 - DNA, 15 bp, Homo sapiens
gtgagaggttattaa

SEQ ID NO: 1323744 - DNA, 15 bp, Homo sapiens
tgtgagaggttatta

SEQ ID NO: 1323745 - DNA, 15 bp, Homo sapiens
atgtgagaggttatt

SEQ ID NO: 1323746 - DNA, 15 bp, Homo sapiens
aatgtgagaggttat

SEQ ID NO: 1323747 - DNA, 15 bp, Homo sapiens
gaatgtgagaggtta

SEQ ID NO: 1323748 - DNA, 15 bp, Homo sapiens
tgaatgtgagaggtt

SEQ ID NO: 1323749 - DNA, 15 bp, Homo sapiens
ctgaatgtgagaggt

SEQ ID NO: 1323750 - DNA, 15 bp, Homo sapiens
tctgaatgtgagagg

SEQ ID NO: 1323751 - DNA, 15 bp, Homo sapiens
ctctgaatgtgagag

SEQ ID NO: 1323752 - DNA, 15 bp, Homo sapiens
tctctgaatgtgaga

SEQ ID NO: 1323753 - DNA, 15 bp, Homo sapiens
ctctctgaatgtgag

SEQ ID NO: 1323754 - DNA, 15 bp, Homo sapiens
actctctgaatgtga

SEQ ID NO: 1323755 - DNA, 15 bp, Homo sapiens
tactctctgaatgtg

SEQ ID NO: 1323756 - DNA, 15 bp, Homo sapiens
atactctctgaatgt

SEQ ID NO: 1323757 - DNA, 15 bp, Homo sapiens
tatactctctgaatg

SEQ ID NO: 1323758 - DNA, 15 bp, Homo sapiens
ttatactctctgaat

SEQ ID NO: 1323759 - DNA, 15 bp, Homo sapiens
tttatactctctgaa

SEQ ID NO: 1323760 - DNA, 15 bp, Homo sapiens
ttttatactctctga

SEQ ID NO: 1323761 - DNA, 15 bp, Homo sapiens
tttttatactctctg

SEQ ID NO: 1323762 - DNA, 15 bp, Homo sapiens
gtttttatactctct

SEQ ID NO: 1323763 - DNA, 15 bp, Homo sapiens
cgtttttatactctc

SEQ ID NO: 1323764 - DNA, 15 bp, Homo sapiens
acgtttttatactct

SEQ ID NO: 1323765 - DNA, 15 bp, Homo sapiens
tacgtttttatactc

SEQ ID NO: 1323766 - DNA, 15 bp, Homo sapiens
ctacgtttttatact

SEQ ID NO: 1323767 - DNA, 15 bp, Homo sapiens
cctacgtttttatac

SEQ ID NO: 1323768 - DNA, 15 bp, Homo sapiens
gcctacgtttttata

SEQ ID NO: 1323769 - DNA, 15 bp, Homo sapiens
agcctacgtttttat

SEQ ID NO: 1323770 - DNA, 15 bp, Homo sapiens
tttgggacctacgaa

SEQ ID NO: 1323771 - DNA, 15 bp, Homo sapiens
ctttgggacctacga

SEQ ID NO: 1323772 - DNA, 15 bp, Homo sapiens
actttgggacctacg

SEQ ID NO: 1323773 - DNA, 15 bp, Homo sapiens
cactttgggacctac

SEQ ID NO: 1323774 - DNA, 15 bp, Homo sapiens
ccactttgggaccta

SEQ ID NO: 1323775 - DNA, 15 bp, Homo sapiens
gccactttgggacct

SEQ ID NO: 1323776 - DNA, 15 bp, Homo sapiens
tgccactttgggacc

SEQ ID NO: 1323777 - DNA, 15 bp, Homo sapiens
atgccactttgggac

SEQ ID NO: 1323778 - DNA, 15 bp, Homo sapiens
aatgccactttggga

SEQ ID NO: 1323779 - DNA, 15 bp, Homo sapiens
aaatgccactttggg

SEQ ID NO: 1323780 - DNA, 15 bp, Homo sapiens
gaaatgccactttgg

SEQ ID NO: 1323781 - DNA, 15 bp, Homo sapiens
agaaatgccactttg

SEQ ID NO: 1323782 - DNA, 15 bp, Homo sapiens
aagaaatgccacttt

SEQ ID NO: 1323783 - DNA, 15 bp, Homo sapiens
caagaaatgccactt

SEQ ID NO: 1323784 - DNA, 15 bp, Homo sapiens
acaagaaatgccact

SEQ ID NO: 1323785 - DNA, 15 bp, Homo sapiens
cacaagaaatgccac

SEQ ID NO: 1323786 - DNA, 15 bp, Homo sapiens
acacaagaaatgcca

SEQ ID NO: 1323787 - DNA, 15 bp, Homo sapiens
aacacaagaaatgcc

SEQ ID NO: 1323788 - DNA, 15 bp, Homo sapiens
gaacacaagaaatgc

SEQ ID NO: 1323789 - DNA, 15 bp, Homo sapiens
agaacacaagaaatg

SEQ ID NO: 1323790 - DNA, 15 bp, Homo sapiens
cagaacacaagaaat

SEQ ID NO: 1323791 - DNA, 15 bp, Homo sapiens
tcagaacacaagaaa

SEQ ID NO: 1323792 - DNA, 15 bp, Homo sapiens
ctcagaacacaagaa

SEQ ID NO: 1323793 - DNA, 15 bp, Homo sapiens
actcagaacacaaga

SEQ ID NO: 1323794 - DNA, 15 bp, Homo sapiens
gactcagaacacaag

SEQ ID NO: 1323795 - DNA, 15 bp, Homo sapiens
ggactcagaacacaa

SEQ ID NO: 1323796 - DNA, 15 bp, Homo sapiens
gggactcagaacaca

SEQ ID NO: 1323797 - DNA, 15 bp, Homo sapiens
tgggactcagaacac

SEQ ID NO: 1323798 - DNA, 15 bp, Homo sapiens
gtgggactcagaaca

SEQ ID NO: 1323799 - DNA, 15 bp, Homo sapiens
tgtgggactcagaac

SEQ ID NO: 1323800 - DNA, 15 bp, Homo sapiens
ttgtgggactcagaa

SEQ ID NO: 1323801 - DNA, 15 bp, Homo sapiens
cttgtgggactcaga

SEQ ID NO: 1323802 - DNA, 15 bp, Homo sapiens
gcttgtgggactcag

SEQ ID NO: 1323803 - DNA, 15 bp, Homo sapiens
ggcttgtgggactca

SEQ ID NO: 1323804 - DNA, 15 bp, Homo sapiens
gggcttgtgggactc

SEQ ID NO: 1323805 - DNA, 15 bp, Homo sapiens
agggcttgtgggact

SEQ ID NO: 1323806 - DNA, 15 bp, Homo sapiens
tagggcttgtgggac

SEQ ID NO: 1323807 - DNA, 15 bp, Homo sapiens
ttagggcttgtggga

SEQ ID NO: 1323808 - DNA, 15 bp, Homo sapiens
gttagggcttgtggg

SEQ ID NO: 1323809 - DNA, 15 bp, Homo sapiens
tgttagggcttgtgg

SEQ ID NO: 1323810 - DNA, 15 bp, Homo sapiens
ttgttagggcttgtg

SEQ ID NO: 1323811 - DNA, 15 bp, Homo sapiens
gttgttagggcttgt

SEQ ID NO: 1323812 - DNA, 15 bp, Homo sapiens
tgttgttagggcttg

SEQ ID NO: 1323813 - DNA, 15 bp, Homo sapiens
ctgttgttagggctt

SEQ ID NO: 1323814 - DNA, 15 bp, Homo sapiens
gctgttgttagggct

SEQ ID NO: 1323815 - DNA, 15 bp, Homo sapiens
agctgttgttagggc

SEQ ID NO: 1323816 - DNA, 15 bp, Homo sapiens
aagctgttgttaggg

SEQ ID NO: 1323817 - DNA, 15 bp, Homo sapiens
aaagctgttgttagg

SEQ ID NO: 1323818 - DNA, 15 bp, Homo sapiens
gaaagctgttgttag

SEQ ID NO: 1323819 - DNA, 15 bp, Homo sapiens
agaaagctgttgtta

SEQ ID NO: 1323820 - DNA, 15 bp, Homo sapiens
gagaaagctgttgtt

SEQ ID NO: 1323821 - DNA, 15 bp, Homo sapiens
agagaaagctgttgt

SEQ ID NO: 1323822 - DNA, 15 bp, Homo sapiens
gagagaaagctgttg

SEQ ID NO: 1323823 - DNA, 15 bp, Homo sapiens
agagagaaagctgtt

SEQ ID NO: 1323824 - DNA, 15 bp, Homo sapiens
gagagagaaagctgt

SEQ ID NO: 1323825 - DNA, 15 bp, Homo sapiens
agagagagaaagctg

SEQ ID NO: 1323826 - DNA, 15 bp, Homo sapiens
aagagagagaaagct

SEQ ID NO: 1323827 - DNA, 15 bp, Homo sapiens
caagagagagaaagc

SEQ ID NO: 1323828 - DNA, 15 bp, Homo sapiens
gcaagagagagaaag

SEQ ID NO: 1323829 - DNA, 15 bp, Homo sapiens
agcaagagagagaaa

SEQ ID NO: 1323830 - DNA, 15 bp, Homo sapiens
gagcaagagagagaa

SEQ ID NO: 1323831 - DNA, 15 bp, Homo sapiens
agagcaagagagaga

SEQ ID NO: 1323832 - DNA, 15 bp, Homo sapiens
gagagcaagagagag

SEQ ID NO: 1323833 - DNA, 15 bp, Homo sapiens
agagagcaagagaga

SEQ ID NO: 1323834 - DNA, 15 bp, Homo sapiens
gagagagcaagagag

SEQ ID NO: 1323835 - DNA, 15 bp, Homo sapiens
agagagagcaagaga

SEQ ID NO: 1323836 - DNA, 15 bp, Homo sapiens
gagagagagcaagag

SEQ ID NO: 1323837 - DNA, 15 bp, Homo sapiens
tgagagagagcaaga

SEQ ID NO: 1323838 - DNA, 15 bp, Homo sapiens
gtgagagagagcaag

SEQ ID NO: 1323839 - DNA, 15 bp, Homo sapiens
agtgagagagagcaa

SEQ ID NO: 1323840 - DNA, 15 bp, Homo sapiens
gagtgagagagagca

SEQ ID NO: 1323841 - DNA, 15 bp, Homo sapiens
tgagtgagagagagc

SEQ ID NO: 1323842 - DNA, 15 bp, Homo sapiens
gtgagtgagagagag

SEQ ID NO: 1323843 - DNA, 15 bp, Homo sapiens
tagtgagtgagagag

SEQ ID NO: 1323844 - DNA, 15 bp, Homo sapiens
ttagtgagtgagaga

SEQ ID NO: 1323845 - DNA, 15 bp, Homo sapiens
cttagtgagtgagag

SEQ ID NO: 1323846 - DNA, 15 bp, Homo sapiens
ccttagtgagtgaga

SEQ ID NO: 1323847 - DNA, 15 bp, Homo sapiens
gccttagtgagtgag

SEQ ID NO: 1323848 - DNA, 15 bp, Homo sapiens
agccttagtgagtga

SEQ ID NO: 1323849 - DNA, 15 bp, Homo sapiens
gagccttagtgagtg

SEQ ID NO: 1323850 - DNA, 15 bp, Homo sapiens
tgagccttagtgagt

SEQ ID NO: 1323851 - DNA, 15 bp, Homo sapiens
ttgagccttagtgag

SEQ ID NO: 1323852 - DNA, 15 bp, Homo sapiens
cttgagccttagtga

SEQ ID NO: 1323853 - DNA, 15 bp, Homo sapiens
acttgagccttagtg

SEQ ID NO: 1323854 - DNA, 15 bp, Homo sapiens
gacttgagccttagt

SEQ ID NO: 1323855 - DNA, 15 bp, Homo sapiens
tgacttgagccttag

SEQ ID NO: 1323856 - DNA, 15 bp, Homo sapiens
ctgacttgagcctta

SEQ ID NO: 1323857 - DNA, 15 bp, Homo sapiens
cctgacttgagcctt

SEQ ID NO: 1323858 - DNA, 15 bp, Homo sapiens
gcctgacttgagcct

SEQ ID NO: 1323859 - DNA, 15 bp, Homo sapiens
ggcctgacttgagcc

SEQ ID NO: 1323860 - DNA, 15 bp, Homo sapiens
aggcctgacttgagc

SEQ ID NO: 1323861 - DNA, 15 bp, Homo sapiens
caggcctgacttgag

SEQ ID NO: 1323862 - DNA, 15 bp, Homo sapiens
ccaggcctgacttga

SEQ ID NO: 1323863 - DNA, 15 bp, Homo sapiens
cccaggcctgacttg

SEQ ID NO: 1323864 - DNA, 15 bp, Homo sapiens
tcccaggcctgactt

SEQ ID NO: 1323865 - DNA, 15 bp, Homo sapiens
gtcccaggcctgact

SEQ ID NO: 1323866 - DNA, 15 bp, Homo sapiens
tgtcccaggcctgac

SEQ ID NO: 1323867 - DNA, 15 bp, Homo sapiens
ctgtcccaggcctga

SEQ ID NO: 1323868 - DNA, 15 bp, Homo sapiens
cctgtcccaggcctg

SEQ ID NO: 1323869 - DNA, 15 bp, Homo sapiens
ccctgtcccaggcct

SEQ ID NO: 1323870 - DNA, 15 bp, Homo sapiens
aaccctgtcccaggc

SEQ ID NO: 1323871 - DNA, 15 bp, Homo sapiens
caaccctgtcccagg

SEQ ID NO: 1323872 - DNA, 15 bp, Homo sapiens
tcaaccctgtcccag

SEQ ID NO: 1323873 - DNA, 15 bp, Homo sapiens
ctcaaccctgtccca

SEQ ID NO: 1323874 - DNA, 15 bp, Homo sapiens
gctcaaccctgtccc

SEQ ID NO: 1323875 - DNA, 15 bp, Homo sapiens
tgctcaaccctgtcc

SEQ ID NO: 1323876 - DNA, 15 bp, Homo sapiens
ttgctcaaccctgtc

SEQ ID NO: 1323877 - DNA, 15 bp, Homo sapiens
attgctcaaccctgt

SEQ ID NO: 1323878 - DNA, 15 bp, Homo sapiens
aattgctcaaccctg

SEQ ID NO: 1323879 - DNA, 15 bp, Homo sapiens
caattgctcaaccct

SEQ ID NO: 1323880 - DNA, 15 bp, Homo sapiens
gcaattgctcaaccc

SEQ ID NO: 1323881 - DNA, 15 bp, Homo sapiens
ggcaattgctcaacc

SEQ ID NO: 1323882 - DNA, 15 bp, Homo sapiens
tggcaattgctcaac

SEQ ID NO: 1323883 - DNA, 15 bp, Homo sapiens
ttggcaattgctcaa

SEQ ID NO: 1323884 - DNA, 15 bp, Homo sapiens
gttggcaattgctca

SEQ ID NO: 1323885 - DNA, 15 bp, Homo sapiens
ggttggcaattgctc

SEQ ID NO: 1323886 - DNA, 15 bp, Homo sapiens
aggttggcaattgct

SEQ ID NO: 1323887 - DNA, 15 bp, Homo sapiens
caggttggcaattgc

SEQ ID NO: 1323888 - DNA, 15 bp, Homo sapiens
acaggttggcaattg

SEQ ID NO: 1323889 - DNA, 15 bp, Homo sapiens
gacaggttggcaatt

SEQ ID NO: 1323890 - DNA, 15 bp, Homo sapiens
tgacaggttggcaat

SEQ ID NO: 1323891 - DNA, 15 bp, Homo sapiens
gtgacaggttggcaa

SEQ ID NO: 1323892 - DNA, 15 bp, Homo sapiens
ggtgacaggttggca

SEQ ID NO: 1323893 - DNA, 15 bp, Homo sapiens
tggtgacaggttggc

SEQ ID NO: 1323894 - DNA, 15 bp, Homo sapiens
atggtgacaggttgg

SEQ ID NO: 1323895 - DNA, 15 bp, Homo sapiens
gatggtgacaggttg

SEQ ID NO: 1323896 - DNA, 15 bp, Homo sapiens
agatggtgacaggtt

SEQ ID NO: 1323897 - DNA, 15 bp, Homo sapiens
gagatggtgacaggt

SEQ ID NO: 1323898 - DNA, 15 bp, Homo sapiens
ggagatggtgacagg

SEQ ID NO: 1323899 - DNA, 15 bp, Homo sapiens
gggagatggtgacag

SEQ ID NO: 1323900 - DNA, 15 bp, Homo sapiens
tgggagatggtgaca

SEQ ID NO: 1323901 - DNA, 15 bp, Homo sapiens
gtgggagatggtgac

SEQ ID NO: 1323902 - DNA, 15 bp, Homo sapiens
agtgggagatggtga

SEQ ID NO: 1323903 - DNA, 15 bp, Homo sapiens
aagtgggagatggtg

SEQ ID NO: 1323904 - DNA, 15 bp, Homo sapiens
gaagtgggagatggt

SEQ ID NO: 1323905 - DNA, 15 bp, Homo sapiens
agaagtgggagatgg

SEQ ID NO: 1323906 - DNA, 15 bp, Homo sapiens
tagaagtgggagatg

SEQ ID NO: 1323907 - DNA, 15 bp, Homo sapiens
atagaagtgggagat

SEQ ID NO: 1323908 - DNA, 15 bp, Homo sapiens
catagaagtgggaga

SEQ ID NO: 1323909 - DNA, 15 bp, Homo sapiens
tcatagaagtgggag

SEQ ID NO: 1323910 - DNA, 15 bp, Homo sapiens
atcatagaagtggga

SEQ ID NO: 1323911 - DNA, 15 bp, Homo sapiens
catcatagaagtggg

SEQ ID NO: 1323912 - DNA, 15 bp, Homo sapiens
acatcatagaagtgg

SEQ ID NO: 1323913 - DNA, 15 bp, Homo sapiens
aacatcatagaagtg

SEQ ID NO: 1323914 - DNA, 15 bp, Homo sapiens
caacatcatagaagt

SEQ ID NO: 1323915 - DNA, 15 bp, Homo sapiens
gcaacatcatagaag

SEQ ID NO: 1323916 - DNA, 15 bp, Homo sapiens
ggcaacatcatagaa

SEQ ID NO: 1323917 - DNA, 15 bp, Homo sapiens
tggcaacatcataga

SEQ ID NO: 1323918 - DNA, 15 bp, Homo sapiens
atggcaacatcatag

SEQ ID NO: 1323919 - DNA, 15 bp, Homo sapiens
gatggcaacatcata

SEQ ID NO: 1323920 - DNA, 15 bp, Homo sapiens
agatggcaacatcat

SEQ ID NO: 1323921 - DNA, 15 bp, Homo sapiens
gagatggcaacatca

SEQ ID NO: 1323922 - DNA, 15 bp, Homo sapiens
agagatggcaacatc

SEQ ID NO: 1323923 - DNA, 15 bp, Homo sapiens
tagagatggcaacat

SEQ ID NO: 1323924 - DNA, 15 bp, Homo sapiens
atagagatggcaaca

SEQ ID NO: 1323925 - DNA, 15 bp, Homo sapiens
gatagagatggcaac

SEQ ID NO: 1323926 - DNA, 15 bp, Homo sapiens
ggatagagatggcaa

SEQ ID NO: 1323927 - DNA, 15 bp, Homo sapiens
tggatagagatggca

SEQ ID NO: 1323928 - DNA, 15 bp, Homo sapiens
gtggatagagatggc

SEQ ID NO: 1323929 - DNA, 15 bp, Homo sapiens
ggtggatagagatgg

SEQ ID NO: 1323930 - DNA, 15 bp, Homo sapiens
aggtggatagagatg

SEQ ID NO: 1323931 - DNA, 15 bp, Homo sapiens
caggtggatagagat

SEQ ID NO: 1323932 - DNA, 15 bp, Homo sapiens
acaggtggatagaga

SEQ ID NO: 1323933 - DNA, 15 bp, Homo sapiens
aacaggtggatagag

SEQ ID NO: 1323934 - DNA, 15 bp, Homo sapiens
gaacaggtggataga

SEQ ID NO: 1323935 - DNA, 15 bp, Homo sapiens
agaacaggtggatag

SEQ ID NO: 1323936 - DNA, 15 bp, Homo sapiens
cagaacaggtggata

SEQ ID NO: 1323937 - DNA, 15 bp, Homo sapiens
ccagaacaggtggat

SEQ ID NO: 1323938 - DNA, 15 bp, Homo sapiens
accagaacaggtgga

SEQ ID NO: 1323939 - DNA, 15 bp, Homo sapiens
gaccagaacaggtgg

SEQ ID NO: 1323940 - DNA, 15 bp, Homo sapiens
ggaccagaacaggtg

SEQ ID NO: 1323941 - DNA, 15 bp, Homo sapiens
gggaccagaacaggt

SEQ ID NO: 1323942 - DNA, 15 bp, Homo sapiens
ggggaccagaacagg

SEQ ID NO: 1323943 - DNA, 15 bp, Homo sapiens
tggggaccagaacag

SEQ ID NO: 1323944 - DNA, 15 bp, Homo sapiens
ttggggaccagaaca

SEQ ID NO: 1323945 - DNA, 15 bp, Homo sapiens
tttggggaccagaac

SEQ ID NO: 1323946 - DNA, 15 bp, Homo sapiens
gtttggggaccagaa

SEQ ID NO: 1323947 - DNA, 15 bp, Homo sapiens
agtttggggaccaga

SEQ ID NO: 1323948 - DNA, 15 bp, Homo sapiens
aagtttggggaccag

SEQ ID NO: 1323949 - DNA, 15 bp, Homo sapiens
aaagtttggggacca

SEQ ID NO: 1323950 - DNA, 15 bp, Homo sapiens
caaagtttggggacc

SEQ ID NO: 1323951 - DNA, 15 bp, Homo sapiens
acaaagtttggggac

SEQ ID NO: 1323952 - DNA, 15 bp, Homo sapiens
cacaaagtttgggga

SEQ ID NO: 1323953 - DNA, 15 bp, Homo sapiens
gcacaaagtttgggg

SEQ ID NO: 1323954 - DNA, 15 bp, Homo sapiens
agcacaaagtttggg

SEQ ID NO: 1323955 - DNA, 15 bp, Homo sapiens
aagcacaaagtttgg

SEQ ID NO: 1323956 - DNA, 15 bp, Homo sapiens
taagcacaaagtttg

SEQ ID NO: 1323957 - DNA, 15 bp, Homo sapiens
ataagcacaaagttt

SEQ ID NO: 1323958 - DNA, 15 bp, Homo sapiens
tataagcacaaagtt

SEQ ID NO: 1323959 - DNA, 15 bp, Homo sapiens
ctataagcacaaagt

SEQ ID NO: 1323960 - DNA, 15 bp, Homo sapiens
tctataagcacaaag

SEQ ID NO: 1323961 - DNA, 15 bp, Homo sapiens
atctataagcacaaa

SEQ ID NO: 1323962 - DNA, 15 bp, Homo sapiens
tatctataagcacaa

SEQ ID NO: 1323963 - DNA, 15 bp, Homo sapiens
gtatctataagcaca

SEQ ID NO: 1323964 - DNA, 15 bp, Homo sapiens
tgtatctataagcac

SEQ ID NO: 1323965 - DNA, 15 bp, Homo sapiens
ctgtatctataagca

SEQ ID NO: 1323966 - DNA, 15 bp, Homo sapiens
actgtatctataagc

SEQ ID NO: 1323967 - DNA, 15 bp, Homo sapiens
gactgtatctataag

SEQ ID NO: 1323968 - DNA, 15 bp, Homo sapiens
agactgtatctataa

SEQ ID NO: 1323969 - DNA, 15 bp, Homo sapiens
gagactgtatctata

SEQ ID NO: 1323970 - DNA, 15 bp, Homo sapiens
ggagactgtatctat

SEQ ID NO: 1323971 - DNA, 15 bp, Homo sapiens
gggagactgtatcta

SEQ ID NO: 1323972 - DNA, 15 bp, Homo sapiens
agggagactgtatct

SEQ ID NO: 1323973 - DNA, 15 bp, Homo sapiens
aagggagactgtatc

SEQ ID NO: 1323974 - DNA, 15 bp, Homo sapiens
taagggagactgtat

SEQ ID NO: 1323975 - DNA, 15 bp, Homo sapiens
ataagggagactgta

SEQ ID NO: 1323976 - DNA, 15 bp, Homo sapiens
tataagggagactgt

SEQ ID NO: 1323977 - DNA, 15 bp, Homo sapiens
gtataagggagactg

SEQ ID NO: 1323978 - DNA, 15 bp, Homo sapiens
ggtataagggagact

SEQ ID NO: 1323979 - DNA, 15 bp, Homo sapiens
aggtataagggagac

SEQ ID NO: 1323980 - DNA, 15 bp, Homo sapiens
caggtataagggaga

SEQ ID NO: 1323981 - DNA, 15 bp, Homo sapiens
acaggtataagggag

SEQ ID NO: 1323982 - DNA, 15 bp, Homo sapiens
gacaggtataaggga

SEQ ID NO: 1323983 - DNA, 15 bp, Homo sapiens
ggacaggtataaggg

SEQ ID NO: 1323984 - DNA, 15 bp, Homo sapiens
tggacaggtataagg

SEQ ID NO: 1323985 - DNA, 15 bp, Homo sapiens
atggacaggtataag

SEQ ID NO: 1323986 - DNA, 15 bp, Homo sapiens
aatggacaggtataa

SEQ ID NO: 1323987 - DNA, 15 bp, Homo sapiens
gaatggacaggtata

SEQ ID NO: 1323988 - DNA, 15 bp, Homo sapiens
tgaatggacaggtat

SEQ ID NO: 1323989 - DNA, 15 bp, Homo sapiens
atgaatggacaggta

SEQ ID NO: 1323990 - DNA, 15 bp, Homo sapiens
catgaatggacaggt

SEQ ID NO: 1323991 - DNA, 15 bp, Homo sapiens
tcatgaatggacagg

SEQ ID NO: 1323992 - DNA, 15 bp, Homo sapiens
ttcatgaatggacag

SEQ ID NO: 1323993 - DNA, 15 bp, Homo sapiens
tttcatgaatggaca

SEQ ID NO: 1323994 - DNA, 15 bp, Homo sapiens
ttttcatgaatggac

SEQ ID NO: 1323995 - DNA, 15 bp, Homo sapiens
tttttcatgaatgga

SEQ ID NO: 1323996 - DNA, 15 bp, Homo sapiens
atttttcatgaatgg

SEQ ID NO: 1323997 - DNA, 15 bp, Homo sapiens
catttttcatgaatg

SEQ ID NO: 1323998 - DNA, 15 bp, Homo sapiens
tcatttttcatgaat

SEQ ID NO: 1323999 - DNA, 15 bp, Homo sapiens
gtcatttttcatgaa

SEQ ID NO: 1324000 - DNA, 15 bp, Homo sapiens
tgtcatttttcatga

SEQ ID NO: 1324001 - DNA, 15 bp, Homo sapiens
atgtcatttttcatg

SEQ ID NO: 1324002 - DNA, 15 bp, Homo sapiens
gatgtcatttttcat

SEQ ID NO: 1324003 - DNA, 15 bp, Homo sapiens
agatgtcatttttca

SEQ ID NO: 1324004 - DNA, 15 bp, Homo sapiens
cagatgtcatttttc

SEQ ID NO: 1324005 - DNA, 15 bp, Homo sapiens
ccagatgtcattttt

SEQ ID NO: 1324006 - DNA, 15 bp, Homo sapiens
cccagatgtcatttt

SEQ ID NO: 1324007 - DNA, 15 bp, Homo sapiens
gcccagatgtcattt

SEQ ID NO: 1324008 - DNA, 15 bp, Homo sapiens
tgcccagatgtcatt

SEQ ID NO: 1324009 - DNA, 15 bp, Homo sapiens
atgcccagatgtcat

SEQ ID NO: 1324010 - DNA, 15 bp, Homo sapiens
catgcccagatgtca

SEQ ID NO: 1324011 - DNA, 15 bp, Homo sapiens
ccatgcccagatgtc

SEQ ID NO: 1324012 - DNA, 15 bp, Homo sapiens
cccatgcccagatgt

SEQ ID NO: 1324013 - DNA, 15 bp, Homo sapiens
acccatgcccagatg

SEQ ID NO: 1324014 - DNA, 15 bp, Homo sapiens
cacccatgcccagat

SEQ ID NO: 1324015 - DNA, 15 bp, Homo sapiens
acacccatgcccaga

SEQ ID NO: 1324016 - DNA, 15 bp, Homo sapiens
cacacccatgcccag

SEQ ID NO: 1324017 - DNA, 15 bp, Homo sapiens
ccacacccatgccca

SEQ ID NO: 1324018 - DNA, 15 bp, Homo sapiens
accacacccatgccc

SEQ ID NO: 1324019 - DNA, 15 bp, Homo sapiens
aaccacacccatgcc

SEQ ID NO: 1324020 - DNA, 15 bp, Homo sapiens
gaaccacacccatgc

SEQ ID NO: 1324021 - DNA, 15 bp, Homo sapiens
tgaaccacacccatg

SEQ ID NO: 1324022 - DNA, 15 bp, Homo sapiens
ctgaaccacacccat

SEQ ID NO: 1324023 - DNA, 15 bp, Homo sapiens
cctgaaccacaccca

SEQ ID NO: 1324024 - DNA, 15 bp, Homo sapiens
ccctgaaccacaccc

SEQ ID NO: 1324025 - DNA, 15 bp, Homo sapiens
cccctgaaccacacc

SEQ ID NO: 1324026 - DNA, 15 bp, Homo sapiens
acccctgaaccacac

SEQ ID NO: 1324027 - DNA, 15 bp, Homo sapiens
tacccctgaaccaca

SEQ ID NO: 1324028 - DNA, 15 bp, Homo sapiens
ctacccctgaaccac

SEQ ID NO: 1324029 - DNA, 15 bp, Homo sapiens
tctacccctgaacca

SEQ ID NO: 1324030 - DNA, 15 bp, Homo sapiens
ctctacccctgaacc

SEQ ID NO: 1324031 - DNA, 15 bp, Homo sapiens
tctctacccctgaac

SEQ ID NO: 1324032 - DNA, 15 bp, Homo sapiens
ttctctacccctgaa

SEQ ID NO: 1324033 - DNA, 15 bp, Homo sapiens
attctctacccctga

SEQ ID NO: 1324034 - DNA, 15 bp, Homo sapiens
tattctctacccctg

SEQ ID NO: 1324035 - DNA, 15 bp, Homo sapiens
ttattctctacccct

SEQ ID NO: 1324036 - DNA, 15 bp, Homo sapiens
tttattctctacccc

SEQ ID NO: 1324037 - DNA, 15 bp, Homo sapiens
ttttattctctaccc

SEQ ID NO: 1324038 - DNA, 15 bp, Homo sapiens
gttttattctctacc

SEQ ID NO: 1324039 - DNA, 15 bp, Homo sapiens
tgttttattctctac

SEQ ID NO: 1324040 - DNA, 15 bp, Homo sapiens
ctgttttattctcta

SEQ ID NO: 1324041 - DNA, 15 bp, Homo sapiens
cctgttttattctct

SEQ ID NO: 1324042 - DNA, 15 bp, Homo sapiens
acctgttttattctc

SEQ ID NO: 1324043 - DNA, 15 bp, Homo sapiens
gacctgttttattct

SEQ ID NO: 1324044 - DNA, 15 bp, Homo sapiens
agacctgttttattc

SEQ ID NO: 1324045 - DNA, 15 bp, Homo sapiens
cagacctgttttatt

SEQ ID NO: 1324046 - DNA, 15 bp, Homo sapiens
gcagacctgttttat

SEQ ID NO: 1324047 - DNA, 15 bp, Homo sapiens
ggcagacctgtttta

SEQ ID NO: 1324048 - DNA, 15 bp, Homo sapiens
gggcagacctgtttt

SEQ ID NO: 1324049 - DNA, 15 bp, Homo sapiens
tgggcagacctgttt

SEQ ID NO: 1324050 - DNA, 15 bp, Homo sapiens
atgggcagacctgtt

SEQ ID NO: 1324051 - DNA, 15 bp, Homo sapiens
tatgggcagacctgt

SEQ ID NO: 1324052 - DNA, 15 bp, Homo sapiens
ctatgggcagacctg

SEQ ID NO: 1324053 - DNA, 15 bp, Homo sapiens
gctatgggcagacct

SEQ ID NO: 1324054 - DNA, 15 bp, Homo sapiens
tgctatgggcagacc

SEQ ID NO: 1324055 - DNA, 15 bp, Homo sapiens
ctgctatgggcagac

SEQ ID NO: 1324056 - DNA, 15 bp, Homo sapiens
tctgctatgggcaga

SEQ ID NO: 1324057 - DNA, 15 bp, Homo sapiens
ctctgctatgggcag

SEQ ID NO: 1324058 - DNA, 15 bp, Homo sapiens
cctctgctatgggca

SEQ ID NO: 1324059 - DNA, 15 bp, Homo sapiens
gcctctgctatgggc

SEQ ID NO: 1324060 - DNA, 15 bp, Homo sapiens
cgcctctgctatggg

SEQ ID NO: 1324061 - DNA, 15 bp, Homo sapiens
ccgcctctgctatgg

SEQ ID NO: 1324062 - DNA, 15 bp, Homo sapiens
tccgcctctgctatg

SEQ ID NO: 1324063 - DNA, 15 bp, Homo sapiens
gtccgcctctgctat

SEQ ID NO: 1324064 - DNA, 15 bp, Homo sapiens
agtccgcctctgcta

SEQ ID NO: 1324065 - DNA, 15 bp, Homo sapiens
gagtccgcctctgct

SEQ ID NO: 1324066 - DNA, 15 bp, Homo sapiens
agagtccgcctctgc

SEQ ID NO: 1324067 - DNA, 15 bp, Homo sapiens
cagagtccgcctctg

SEQ ID NO: 1324068 - DNA, 15 bp, Homo sapiens
gcagagtccgcctct

SEQ ID NO: 1324069 - DNA, 15 bp, Homo sapiens
ggcagagtccgcctc

SEQ ID NO: 1324070 - DNA, 15 bp, Homo sapiens
aggcagagtccgcct

SEQ ID NO: 1324071 - DNA, 15 bp, Homo sapiens
aaggcagagtccgcc

SEQ ID NO: 1324072 - DNA, 15 bp, Homo sapiens
gaaggcagagtccgc

SEQ ID NO: 1324073 - DNA, 15 bp, Homo sapiens
ggaaggcagagtccg

SEQ ID NO: 1324074 - DNA, 15 bp, Homo sapiens
cggaaggcagagtcc

SEQ ID NO: 1324075 - DNA, 15 bp, Homo sapiens
gcggaaggcagagtc

SEQ ID NO: 1324076 - DNA, 15 bp, Homo sapiens
agcggaaggcagagt

SEQ ID NO: 1324077 - DNA, 15 bp, Homo sapiens
tagcggaaggcagag

SEQ ID NO: 1324078 - DNA, 15 bp, Homo sapiens
ttagcggaaggcaga

SEQ ID NO: 1324079 - DNA, 15 bp, Homo sapiens
tttagcggaaggcag

SEQ ID NO: 1324080 - DNA, 15 bp, Homo sapiens
gtttagcggaaggca

SEQ ID NO: 1324081 - DNA, 15 bp, Homo sapiens
tgtttagcggaaggc

SEQ ID NO: 1324082 - DNA, 15 bp, Homo sapiens
gtgtttagcggaagg

SEQ ID NO: 1324083 - DNA, 15 bp, Homo sapiens
tgtgtttagcggaag

SEQ ID NO: 1324084 - DNA, 15 bp, Homo sapiens
ttgtgtttagcggaa

SEQ ID NO: 1324085 - DNA, 15 bp, Homo sapiens
tttgtgtttagcgga

SEQ ID NO: 1324086 - DNA, 15 bp, Homo sapiens
gtttgtgtttagcgg

SEQ ID NO: 1324087 - DNA, 15 bp, Homo sapiens
tgtttgtgtttagcg

SEQ ID NO: 1324088 - DNA, 15 bp, Homo sapiens
ttgtttgtgtttagc

SEQ ID NO: 1324089 - DNA, 15 bp, Homo sapiens
cttgtttgtgtttag

SEQ ID NO: 1324090 - DNA, 15 bp, Homo sapiens
gcttgtttgtgttta

SEQ ID NO: 1324091 - DNA, 15 bp, Homo sapiens
tgcttgtttgtgttt

SEQ ID NO: 1324092 - DNA, 15 bp, Homo sapiens
atgcttgtttgtgtt

SEQ ID NO: 1324093 - DNA, 15 bp, Homo sapiens
catgcttgtttgtgt

SEQ ID NO: 1324094 - DNA, 15 bp, Homo sapiens
gcatgcttgtttgtg

SEQ ID NO: 1324095 - DNA, 15 bp, Homo sapiens
tgcatgcttgtttgt

SEQ ID NO: 1324096 - DNA, 15 bp, Homo sapiens
ctgcatgcttgtttg

SEQ ID NO: 1324097 - DNA, 15 bp, Homo sapiens
cctgcatgcttgttt

SEQ ID NO: 1324098 - DNA, 15 bp, Homo sapiens
ccctgcatgcttgtt

SEQ ID NO: 1324099 - DNA, 15 bp, Homo sapiens
tccctgcatgcttgt

SEQ ID NO: 1324100 - DNA, 15 bp, Homo sapiens
ttccctgcatgcttg

SEQ ID NO: 1324101 - DNA, 15 bp, Homo sapiens
cttccctgcatgctt

SEQ ID NO: 1324102 - DNA, 15 bp, Homo sapiens
gcttccctgcatgct

SEQ ID NO: 1324103 - DNA, 15 bp, Homo sapiens
tgcttccctgcatgc

SEQ ID NO: 1324104 - DNA, 15 bp, Homo sapiens
ttgcttccctgcatg

SEQ ID NO: 1324105 - DNA, 15 bp, Homo sapiens
cttgcttccctgcat

SEQ ID NO: 1324106 - DNA, 15 bp, Homo sapiens
acttgcttccctgca

SEQ ID NO: 1324107 - DNA, 15 bp, Homo sapiens
tacttgcttccctgc

SEQ ID NO: 1324108 - DNA, 15 bp, Homo sapiens
gtacttgcttccctg

SEQ ID NO: 1324109 - DNA, 15 bp, Homo sapiens
ggtacttgcttccct

SEQ ID NO: 1324110 - DNA, 15 bp, Homo sapiens
gggtacttgcttccc

SEQ ID NO: 1324111 - DNA, 15 bp, Homo sapiens
agggtacttgcttcc

SEQ ID NO: 1324112 - DNA, 15 bp, Homo sapiens
aagggtacttgcttc

SEQ ID NO: 1324113 - DNA, 15 bp, Homo sapiens
gaagggtacttgctt

SEQ ID NO: 1324114 - DNA, 15 bp, Homo sapiens
agaagggtacttgct

SEQ ID NO: 1324115 - DNA, 15 bp, Homo sapiens
aagaagggtacttgc

SEQ ID NO: 1324116 - DNA, 15 bp, Homo sapiens
taagaagggtacttg

SEQ ID NO: 1324117 - DNA, 15 bp, Homo sapiens
ttaagaagggtactt

SEQ ID NO: 1324118 - DNA, 15 bp, Homo sapiens
tttaagaagggtact

SEQ ID NO: 1324119 - DNA, 15 bp, Homo sapiens
atttaagaagggtac

SEQ ID NO: 1324120 - DNA, 15 bp, Homo sapiens
tatttaagaagggta

SEQ ID NO: 1324121 - DNA, 15 bp, Homo sapiens
atatttaagaagggt

SEQ ID NO: 1324122 - DNA, 15 bp, Homo sapiens
gatatttaagaaggg

SEQ ID NO: 1324123 - DNA, 15 bp, Homo sapiens
agatatttaagaagg

SEQ ID NO: 1324124 - DNA, 15 bp, Homo sapiens
cagatatttaagaag

SEQ ID NO: 1324125 - DNA, 15 bp, Homo sapiens
tcagatatttaagaa

SEQ ID NO: 1324126 - DNA, 15 bp, Homo sapiens
gtcagatatttaaga

SEQ ID NO: 1324127 - DNA, 15 bp, Homo sapiens
tgtcagatatttaag

SEQ ID NO: 1324128 - DNA, 15 bp, Homo sapiens
ttgtcagatatttaa

SEQ ID NO: 1324129 - DNA, 15 bp, Homo sapiens
gttgtcagatattta

SEQ ID NO: 1324130 - DNA, 15 bp, Homo sapiens
tgttgtcagatattt

SEQ ID NO: 1324131 - DNA, 15 bp, Homo sapiens
atgttgtcagatatt

SEQ ID NO: 1324132 - DNA, 15 bp, Homo sapiens
catgttgtcagatat

SEQ ID NO: 1324133 - DNA, 15 bp, Homo sapiens
ccatgttgtcagata

SEQ ID NO: 1324134 - DNA, 15 bp, Homo sapiens
gccatgttgtcagat

SEQ ID NO: 1324135 - DNA, 15 bp, Homo sapiens
agccatgttgtcaga

SEQ ID NO: 1324136 - DNA, 15 bp, Homo sapiens
aagccatgttgtcag

SEQ ID NO: 1324137 - DNA, 15 bp, Homo sapiens
aaagccatgttgtca

SEQ ID NO: 1324138 - DNA, 15 bp, Homo sapiens
caaagccatgttgtc

SEQ ID NO: 1324139 - DNA, 15 bp, Homo sapiens
tcaaagccatgttgt

SEQ ID NO: 1324140 - DNA, 15 bp, Homo sapiens
atcaaagccatgttg

SEQ ID NO: 1324141 - DNA, 15 bp, Homo sapiens
catcaaagccatgtt

SEQ ID NO: 1324142 - DNA, 15 bp, Homo sapiens
tcatcaaagccatgt

SEQ ID NO: 1324143 - DNA, 15 bp, Homo sapiens
ttcatcaaagccatg

SEQ ID NO: 1324144 - DNA, 15 bp, Homo sapiens
tttcatcaaagccat

SEQ ID NO: 1324145 - DNA, 15 bp, Homo sapiens
atttcatcaaagcca

SEQ ID NO: 1324146 - DNA, 15 bp, Homo sapiens
gatttcatcaaagcc

SEQ ID NO: 1324147 - DNA, 15 bp, Homo sapiens
agatttcatcaaagc

SEQ ID NO: 1324148 - DNA, 15 bp, Homo sapiens
tagatttcatcaaag

SEQ ID NO: 1324149 - DNA, 15 bp, Homo sapiens
atagatttcatcaaa

SEQ ID NO: 1324150 - DNA, 15 bp, Homo sapiens
gatagatttcatcaa

SEQ ID NO: 1324151 - DNA, 15 bp, Homo sapiens
ggatagatttcatca

SEQ ID NO: 1324152 - DNA, 15 bp, Homo sapiens
gggatagatttcatc

SEQ ID NO: 1324153 - DNA, 15 bp, Homo sapiens
cgggatagatttcat

SEQ ID NO: 1324154 - DNA, 15 bp, Homo sapiens
tcgggatagatttca

SEQ ID NO: 1324155 - DNA, 15 bp, Homo sapiens
gtcgggatagatttc

SEQ ID NO: 1324156 - DNA, 15 bp, Homo sapiens
agtcgggatagattt

SEQ ID NO: 1324157 - DNA, 15 bp, Homo sapiens
aagtcgggatagatt

SEQ ID NO: 1324158 - DNA, 15 bp, Homo sapiens
taagtcgggatagat

SEQ ID NO: 1324159 - DNA, 15 bp, Homo sapiens
ctaagtcgggataga

SEQ ID NO: 1324160 - DNA, 15 bp, Homo sapiens
gctaagtcgggatag

SEQ ID NO: 1324161 - DNA, 15 bp, Homo sapiens
ggctaagtcgggata

SEQ ID NO: 1324162 - DNA, 15 bp, Homo sapiens
tggctaagtcgggat

SEQ ID NO: 1324163 - DNA, 15 bp, Homo sapiens
atggctaagtcggga

SEQ ID NO: 1324164 - DNA, 15 bp, Homo sapiens
tatggctaagtcggg

SEQ ID NO: 1324165 - DNA, 15 bp, Homo sapiens
ttatggctaagtcgg

SEQ ID NO: 1324166 - DNA, 15 bp, Homo sapiens
gttatggctaagtcg

SEQ ID NO: 1324167 - DNA, 15 bp, Homo sapiens
ggttatggctaagtc

SEQ ID NO: 1324168 - DNA, 15 bp, Homo sapiens
aggttatggctaagt

SEQ ID NO: 1324169 - DNA, 15 bp, Homo sapiens
taggttatggctaag

SEQ ID NO: 1324170 - DNA, 15 bp, Homo sapiens
ctaggttatggctaa

SEQ ID NO: 1324171 - DNA, 15 bp, Homo sapiens
tctaggttatggcta

SEQ ID NO: 1324172 - DNA, 15 bp, Homo sapiens
ttctaggttatggct

SEQ ID NO: 1324173 - DNA, 15 bp, Homo sapiens
tttctaggttatggc

SEQ ID NO: 1324174 - DNA, 15 bp, Homo sapiens
ttttctaggttatgg

SEQ ID NO: 1324175 - DNA, 15 bp, Homo sapiens
gttttctaggttatg

SEQ ID NO: 1324176 - DNA, 15 bp, Homo sapiens
agttttctaggttat

SEQ ID NO: 1324177 - DNA, 15 bp, Homo sapiens
cagttttctaggtta

SEQ ID NO: 1324178 - DNA, 15 bp, Homo sapiens
acagttttctaggtt

SEQ ID NO: 1324179 - DNA, 15 bp, Homo sapiens
tacagttttctaggt

SEQ ID NO: 1324180 - DNA, 15 bp, Homo sapiens
atacagttttctagg

SEQ ID NO: 1324181 - DNA, 15 bp, Homo sapiens
tatacagttttctag

SEQ ID NO: 1324182 - DNA, 15 bp, Homo sapiens
ctatacagttttcta

SEQ ID NO: 1324183 - DNA, 15 bp, Homo sapiens
gctatacagttttct

SEQ ID NO: 1324184 - DNA, 15 bp, Homo sapiens
ggctatacagttttc

SEQ ID NO: 1324185 - DNA, 15 bp, Homo sapiens
aggctatacagtttt

SEQ ID NO: 1324186 - DNA, 15 bp, Homo sapiens
aaggctatacagttt

SEQ ID NO: 1324187 - DNA, 15 bp, Homo sapiens
aaaggctatacagtt

SEQ ID NO: 1324188 - DNA, 15 bp, Homo sapiens
gaaaggctatacagt

SEQ ID NO: 1324189 - DNA, 15 bp, Homo sapiens
agaaaggctatacag

SEQ ID NO: 1324190 - DNA, 15 bp, Homo sapiens
tagaaaggctataca

SEQ ID NO: 1324191 - DNA, 15 bp, Homo sapiens
ctagaaaggctatac

SEQ ID NO: 1324192 - DNA, 15 bp, Homo sapiens
tctagaaaggctata

SEQ ID NO: 1324193 - DNA, 15 bp, Homo sapiens
ttctagaaaggctat

SEQ ID NO: 1324194 - DNA, 15 bp, Homo sapiens
tttctagaaaggcta

SEQ ID NO: 1324195 - DNA, 15 bp, Homo sapiens
ttttctagaaaggct

SEQ ID NO: 1324196 - DNA, 15 bp, Homo sapiens
tttttctagaaaggc

SEQ ID NO: 1324197 - DNA, 15 bp, Homo sapiens
atttttctagaaagg

SEQ ID NO: 1324198 - DNA, 15 bp, Homo sapiens
catttttctagaaag

SEQ ID NO: 1324199 - DNA, 15 bp, Homo sapiens
acatttttctagaaa

SEQ ID NO: 1324200 - DNA, 15 bp, Homo sapiens
aacatttttctagaa

SEQ ID NO: 1324201 - DNA, 15 bp, Homo sapiens
aaacatttttctaga

SEQ ID NO: 1324202 - DNA, 15 bp, Homo sapiens
aaaacatttttctag

SEQ ID NO: 1324203 - DNA, 15 bp, Homo sapiens
aaaaacatttttcta

SEQ ID NO: 1324204 - DNA, 15 bp, Homo sapiens
caaaaacatttttct

SEQ ID NO: 1324205 - DNA, 15 bp, Homo sapiens
tcaaaaacatttttc

SEQ ID NO: 1324206 - DNA, 15 bp, Homo sapiens
ttcaaaaacattttt

SEQ ID NO: 1324207 - DNA, 15 bp, Homo sapiens
tttcaaaaacatttt

SEQ ID NO: 1324208 - DNA, 15 bp, Homo sapiens
atttcaaaaacattt

SEQ ID NO: 1324209 - DNA, 15 bp, Homo sapiens
catttcaaaaacatt

SEQ ID NO: 1324210 - DNA, 15 bp, Homo sapiens
gcatttcaaaaacat

SEQ ID NO: 1324211 - DNA, 15 bp, Homo sapiens
agcatttcaaaaaca

SEQ ID NO: 1324212 - DNA, 15 bp, Homo sapiens
gagcatttcaaaaac

SEQ ID NO: 1324213 - DNA, 15 bp, Homo sapiens
tgagcatttcaaaaa

SEQ ID NO: 1324214 - DNA, 15 bp, Homo sapiens
ctgagcatttcaaaa

SEQ ID NO: 1324215 - DNA, 15 bp, Homo sapiens
gctgagcatttcaaa

SEQ ID NO: 1324216 - DNA, 15 bp, Homo sapiens
tgctgagcatttcaa

SEQ ID NO: 1324217 - DNA, 15 bp, Homo sapiens
atgctgagcatttca

SEQ ID NO: 1324218 - DNA, 15 bp, Homo sapiens
gatgctgagcatttc

SEQ ID NO: 1324219 - DNA, 15 bp, Homo sapiens
tgatgctgagcattt

SEQ ID NO: 1324220 - DNA, 15 bp, Homo sapiens
gtgatgctgagcatt

SEQ ID NO: 1324221 - DNA, 15 bp, Homo sapiens
agtgatgctgagcat

SEQ ID NO: 1324222 - DNA, 15 bp, Homo sapiens
tagtgatgctgagca

SEQ ID NO: 1324223 - DNA, 15 bp, Homo sapiens
ttagtgatgctgagc

SEQ ID NO: 1324224 - DNA, 15 bp, Homo sapiens
attagtgatgctgag

SEQ ID NO: 1324225 - DNA, 15 bp, Homo sapiens
gattagtgatgctga

SEQ ID NO: 1324226 - DNA, 15 bp, Homo sapiens
tgattagtgatgctg

SEQ ID NO: 1324227 - DNA, 15 bp, Homo sapiens
atgattagtgatgct

SEQ ID NO: 1324228 - DNA, 15 bp, Homo sapiens
gatgattagtgatgc

SEQ ID NO: 1324229 - DNA, 15 bp, Homo sapiens
tgatgattagtgatg

SEQ ID NO: 1324230 - DNA, 15 bp, Homo sapiens
ctgatgattagtgat

SEQ ID NO: 1324231 - DNA, 15 bp, Homo sapiens
aatttgcatttctct

SEQ ID NO: 1324232 - DNA, 15 bp, Homo sapiens
taatttgcatttctc

SEQ ID NO: 1324233 - DNA, 15 bp, Homo sapiens
ttaatttgcatttct

SEQ ID NO: 1324234 - DNA, 15 bp, Homo sapiens
tttaatttgcatttc

SEQ ID NO: 1324235 - DNA, 15 bp, Homo sapiens
gtttaatttgcattt

SEQ ID NO: 1324236 - DNA, 15 bp, Homo sapiens
ggtttaatttgcatt

SEQ ID NO: 1324237 - DNA, 15 bp, Homo sapiens
tggtttaatttgcat

SEQ ID NO: 1324238 - DNA, 15 bp, Homo sapiens
gtggtttaatttgca

SEQ ID NO: 1324239 - DNA, 15 bp, Homo sapiens
tgtggtttaatttgc

SEQ ID NO: 1324240 - DNA, 15 bp, Homo sapiens
ttgtggtttaatttg

SEQ ID NO: 1324241 - DNA, 15 bp, Homo sapiens
attgtggtttaattt

SEQ ID NO: 1324242 - DNA, 15 bp, Homo sapiens
cattgtggtttaatt

SEQ ID NO: 1324243 - DNA, 15 bp, Homo sapiens
tcattgtggtttaat

SEQ ID NO: 1324244 - DNA, 15 bp, Homo sapiens
ctcattgtggtttaa

SEQ ID NO: 1324245 - DNA, 15 bp, Homo sapiens
tctcattgtggttta

SEQ ID NO: 1324246 - DNA, 15 bp, Homo sapiens
atctcattgtggttt

SEQ ID NO: 1324247 - DNA, 15 bp, Homo sapiens
catctcattgtggtt

SEQ ID NO: 1324248 - DNA, 15 bp, Homo sapiens
acatctcattgtggt

SEQ ID NO: 1324249 - DNA, 15 bp, Homo sapiens
gacatctcattgtgg

SEQ ID NO: 1324250 - DNA, 15 bp, Homo sapiens
tgacatctcattgtg

SEQ ID NO: 1324251 - DNA, 15 bp, Homo sapiens
gtgacatctcattgt

SEQ ID NO: 1324252 - DNA, 15 bp, Homo sapiens
ggtgacatctcattg

SEQ ID NO: 1324253 - DNA, 15 bp, Homo sapiens
aggtgacatctcatt

SEQ ID NO: 1324254 - DNA, 15 bp, Homo sapiens
gaggtgacatctcat

SEQ ID NO: 1324255 - DNA, 15 bp, Homo sapiens
cgaggtgacatctca

SEQ ID NO: 1324256 - DNA, 15 bp, Homo sapiens
acgaggtgacatctc

SEQ ID NO: 1324257 - DNA, 15 bp, Homo sapiens
tacgaggtgacatct

SEQ ID NO: 1324258 - DNA, 15 bp, Homo sapiens
gtacgaggtgacatc

SEQ ID NO: 1324259 - DNA, 15 bp, Homo sapiens
ggtacgaggtgacat

SEQ ID NO: 1324260 - DNA, 15 bp, Homo sapiens
tggtacgaggtgaca

SEQ ID NO: 1324261 - DNA, 15 bp, Homo sapiens
ctggtacgaggtgac

SEQ ID NO: 1324262 - DNA, 15 bp, Homo sapiens
actggtacgaggtga

SEQ ID NO: 1324263 - DNA, 15 bp, Homo sapiens
gactggtacgaggtg

SEQ ID NO: 1324264 - DNA, 15 bp, Homo sapiens
tgactggtacgaggt

SEQ ID NO: 1324265 - DNA, 15 bp, Homo sapiens
ctgactggtacgagg

SEQ ID NO: 1324266 - DNA, 15 bp, Homo sapiens
tctgactggtacgag

SEQ ID NO: 1324267 - DNA, 15 bp, Homo sapiens
ttctgactggtacga

SEQ ID NO: 1324268 - DNA, 15 bp, Homo sapiens
attctgactggtacg

SEQ ID NO: 1324269 - DNA, 15 bp, Homo sapiens
tattctgactggtac

SEQ ID NO: 1324270 - DNA, 15 bp, Homo sapiens
ctattctgactggta

SEQ ID NO: 1324271 - DNA, 15 bp, Homo sapiens
gctattctgactggt

SEQ ID NO: 1324272 - DNA, 15 bp, Homo sapiens
agctattctgactgg

SEQ ID NO: 1324273 - DNA, 15 bp, Homo sapiens
tagctattctgactg

SEQ ID NO: 1324274 - DNA, 15 bp, Homo sapiens
atagctattctgact

SEQ ID NO: 1324275 - DNA, 15 bp, Homo sapiens
aatagctattctgac

SEQ ID NO: 1324276 - DNA, 15 bp, Homo sapiens
taatagctattctga

SEQ ID NO: 1324277 - DNA, 15 bp, Homo sapiens
gtaatagctattctg

SEQ ID NO: 1324278 - DNA, 15 bp, Homo sapiens
agtaatagctattct

SEQ ID NO: 1324279 - DNA, 15 bp, Homo sapiens
tagtaatagctattc

SEQ ID NO: 1324280 - DNA, 15 bp, Homo sapiens
ttagtaatagctatt

SEQ ID NO: 1324281 - DNA, 15 bp, Homo sapiens
tttagtaatagctat

SEQ ID NO: 1324282 - DNA, 15 bp, Homo sapiens
ttttagtaatagcta

SEQ ID NO: 1324283 - DNA, 15 bp, Homo sapiens
tttttagtaatagct

SEQ ID NO: 1324284 - DNA, 15 bp, Homo sapiens
ctttttagtaatagc

SEQ ID NO: 1324285 - DNA, 15 bp, Homo sapiens
actttttagtaatag

SEQ ID NO: 1324286 - DNA, 15 bp, Homo sapiens
tactttttagtaata

SEQ ID NO: 1324287 - DNA, 15 bp, Homo sapiens
ttactttttagtaat

SEQ ID NO: 1324288 - DNA, 15 bp, Homo sapiens
tttactttttagtaa

SEQ ID NO: 1324289 - DNA, 15 bp, Homo sapiens
ttttactttttagta

SEQ ID NO: 1324290 - DNA, 15 bp, Homo sapiens
tttttactttttagt

SEQ ID NO: 1324291 - DNA, 15 bp, Homo sapiens
ttttttactttttag

SEQ ID NO: 1324292 - DNA, 15 bp, Homo sapiens
tttttttacttttta

SEQ ID NO: 1324293 - DNA, 15 bp, Homo sapiens
atttttttacttttt

SEQ ID NO: 1324294 - DNA, 15 bp, Homo sapiens
tatttttttactttt

SEQ ID NO: 1324295 - DNA, 15 bp, Homo sapiens
ttatttttttacttt

SEQ ID NO: 1324296 - DNA, 15 bp, Homo sapiens
gttatttttttactt

SEQ ID NO: 1324297 - DNA, 15 bp, Homo sapiens
tgttatttttttact

SEQ ID NO: 1324298 - DNA, 15 bp, Homo sapiens
ctgttatttttttac

SEQ ID NO: 1324299 - DNA, 15 bp, Homo sapiens
tctgttattttttta

SEQ ID NO: 1324300 - DNA, 15 bp, Homo sapiens
atctgttattttttt

SEQ ID NO: 1324301 - DNA, 15 bp, Homo sapiens
catctgttatttttt

SEQ ID NO: 1324302 - DNA, 15 bp, Homo sapiens
gcatctgttattttt

SEQ ID NO: 1324303 - DNA, 15 bp, Homo sapiens
agcatctgttatttt

SEQ ID NO: 1324304 - DNA, 15 bp, Homo sapiens
cagcatctgttattt

SEQ ID NO: 1324305 - DNA, 15 bp, Homo sapiens
ccagcatctgttatt

SEQ ID NO: 1324306 - DNA, 15 bp, Homo sapiens
gccagcatctgttat

SEQ ID NO: 1324307 - DNA, 15 bp, Homo sapiens
tgccagcatctgtta

SEQ ID NO: 1324308 - DNA, 15 bp, Homo sapiens
ttgccagcatctgtt

SEQ ID NO: 1324309 - DNA, 15 bp, Homo sapiens
cttgccagcatctgt

SEQ ID NO: 1324310 - DNA, 15 bp, Homo sapiens
ccttgccagcatctg

SEQ ID NO: 1324311 - DNA, 15 bp, Homo sapiens
gccttgccagcatct

SEQ ID NO: 1324312 - DNA, 15 bp, Homo sapiens
agccttgccagcatc

SEQ ID NO: 1324313 - DNA, 15 bp, Homo sapiens
cagccttgccagcat

SEQ ID NO: 1324314 - DNA, 15 bp, Homo sapiens
gcagccttgccagca

SEQ ID NO: 1324315 - DNA, 15 bp, Homo sapiens
tgcagccttgccagc

SEQ ID NO: 1324316 - DNA, 15 bp, Homo sapiens
ctgcagccttgccag

SEQ ID NO: 1324317 - DNA, 15 bp, Homo sapiens
tctgcagccttgcca

SEQ ID NO: 1324318 - DNA, 15 bp, Homo sapiens
ctctgcagccttgcc

SEQ ID NO: 1324319 - DNA, 15 bp, Homo sapiens
tctctgcagccttgc

SEQ ID NO: 1324320 - DNA, 15 bp, Homo sapiens
ttctctgcagccttg

SEQ ID NO: 1324321 - DNA, 15 bp, Homo sapiens
tttctctgcagcctt

SEQ ID NO: 1324322 - DNA, 15 bp, Homo sapiens
ttttctctgcagcct

SEQ ID NO: 1324323 - DNA, 15 bp, Homo sapiens
cttttctctgcagcc

SEQ ID NO: 1324324 - DNA, 15 bp, Homo sapiens
ccttttctctgcagc

SEQ ID NO: 1324325 - DNA, 15 bp, Homo sapiens
cccttttctctgcag

SEQ ID NO: 1324326 - DNA, 15 bp, Homo sapiens
tcccttttctctgca

SEQ ID NO: 1324327 - DNA, 15 bp, Homo sapiens
ttcccttttctctgc

SEQ ID NO: 1324328 - DNA, 15 bp, Homo sapiens
attcccttttctctg

SEQ ID NO: 1324329 - DNA, 15 bp, Homo sapiens
cattcccttttctct

SEQ ID NO: 1324330 - DNA, 15 bp, Homo sapiens
gcattcccttttctc

SEQ ID NO: 1324331 - DNA, 15 bp, Homo sapiens
agcattcccttttct

SEQ ID NO: 1324332 - DNA, 15 bp, Homo sapiens
aagcattcccttttc

SEQ ID NO: 1324333 - DNA, 15 bp, Homo sapiens
aaagcattccctttt

SEQ ID NO: 1324334 - DNA, 15 bp, Homo sapiens
aaaagcattcccttt

SEQ ID NO: 1324335 - DNA, 15 bp, Homo sapiens
taaaagcattccctt

SEQ ID NO: 1324336 - DNA, 15 bp, Homo sapiens
gtaaaagcattccct

SEQ ID NO: 1324337 - DNA, 15 bp, Homo sapiens
tgtaaaagcattccc

SEQ ID NO: 1324338 - DNA, 15 bp, Homo sapiens
gtgtaaaagcattcc

SEQ ID NO: 1324339 - DNA, 15 bp, Homo sapiens
agtgtaaaagcattc

SEQ ID NO: 1324340 - DNA, 15 bp, Homo sapiens
cagtgtaaaagcatt

SEQ ID NO: 1324341 - DNA, 15 bp, Homo sapiens
acagtgtaaaagcat

SEQ ID NO: 1324342 - DNA, 15 bp, Homo sapiens
aacagtgtaaaagca

SEQ ID NO: 1324343 - DNA, 15 bp, Homo sapiens
tccaccaacagtgta

SEQ ID NO: 1324344 - DNA, 15 bp, Homo sapiens
ttccaccaacagtgt

SEQ ID NO: 1324345 - DNA, 15 bp, Homo sapiens
tttccaccaacagtg

SEQ ID NO: 1324346 - DNA, 15 bp, Homo sapiens
atttccaccaacagt

SEQ ID NO: 1324347 - DNA, 15 bp, Homo sapiens
tatttccaccaacag

SEQ ID NO: 1324348 - DNA, 15 bp, Homo sapiens
atatttccaccaaca

SEQ ID NO: 1324349 - DNA, 15 bp, Homo sapiens
tatatttccaccaac

SEQ ID NO: 1324350 - DNA, 15 bp, Homo sapiens
ttatatttccaccaa

SEQ ID NO: 1324351 - DNA, 15 bp, Homo sapiens
tttatatttccacca

SEQ ID NO: 1324352 - DNA, 15 bp, Homo sapiens
atttatatttccacc

SEQ ID NO: 1324353 - DNA, 15 bp, Homo sapiens
aatttatatttccac

SEQ ID NO: 1324354 - DNA, 15 bp, Homo sapiens
taatttatatttcca

SEQ ID NO: 1324355 - DNA, 15 bp, Homo sapiens
ttaatttatatttcc

SEQ ID NO: 1324356 - DNA, 15 bp, Homo sapiens
attaatttatatttc

SEQ ID NO: 1324357 - DNA, 15 bp, Homo sapiens
aattaatttatattt

SEQ ID NO: 1324358 - DNA, 15 bp, Homo sapiens
aaattaatttatatt

SEQ ID NO: 1324359 - DNA, 15 bp, Homo sapiens
taaattaatttatat

SEQ ID NO: 1324360 - DNA, 15 bp, Homo sapiens
ctaaattaatttata

SEQ ID NO: 1324361 - DNA, 15 bp, Homo sapiens
gctaaattaatttat

SEQ ID NO: 1324362 - DNA, 15 bp, Homo sapiens
ggctaaattaattta

SEQ ID NO: 1324363 - DNA, 15 bp, Homo sapiens
gggctaaattaattt

SEQ ID NO: 1324364 - DNA, 15 bp, Homo sapiens
ggggctaaattaatt

SEQ ID NO: 1324365 - DNA, 15 bp, Homo sapiens
aggggctaaattaat

SEQ ID NO: 1324366 - DNA, 15 bp, Homo sapiens
caggggctaaattaa

SEQ ID NO: 1324367 - DNA, 15 bp, Homo sapiens
acaggggctaaatta

SEQ ID NO: 1324368 - DNA, 15 bp, Homo sapiens
cacaggggctaaatt

SEQ ID NO: 1324369 - DNA, 15 bp, Homo sapiens
ccacaggggctaaat

SEQ ID NO: 1324370 - DNA, 15 bp, Homo sapiens
tccacaggggctaaa

SEQ ID NO: 1324371 - DNA, 15 bp, Homo sapiens
ttccacaggggctaa

SEQ ID NO: 1324372 - DNA, 15 bp, Homo sapiens
tttccacaggggcta

SEQ ID NO: 1324373 - DNA, 15 bp, Homo sapiens
ctttccacaggggct

SEQ ID NO: 1324374 - DNA, 15 bp, Homo sapiens
gctttccacaggggc

SEQ ID NO: 1324375 - DNA, 15 bp, Homo sapiens
tgctttccacagggg

SEQ ID NO: 1324376 - DNA, 15 bp, Homo sapiens
gtgctttccacaggg

SEQ ID NO: 1324377 - DNA, 15 bp, Homo sapiens
agtgctttccacagg

SEQ ID NO: 1324378 - DNA, 15 bp, Homo sapiens
aagtgctttccacag

SEQ ID NO: 1324379 - DNA, 15 bp, Homo sapiens
aaagtgctttccaca

SEQ ID NO: 1324380 - DNA, 15 bp, Homo sapiens
caaagtgctttccac

SEQ ID NO: 1324381 - DNA, 15 bp, Homo sapiens
ccaaagtgctttcca

SEQ ID NO: 1324382 - DNA, 15 bp, Homo sapiens
tccaaagtgctttcc

SEQ ID NO: 1324383 - DNA, 15 bp, Homo sapiens
ctccaaagtgctttc

SEQ ID NO: 1324384 - DNA, 15 bp, Homo sapiens
tctccaaagtgcttt

SEQ ID NO: 1324385 - DNA, 15 bp, Homo sapiens
atctccaaagtgctt

SEQ ID NO: 1324386 - DNA, 15 bp, Homo sapiens
aatctccaaagtgct

SEQ ID NO: 1324387 - DNA, 15 bp, Homo sapiens
aaatctccaaagtgc

SEQ ID NO: 1324388 - DNA, 15 bp, Homo sapiens
gaaatctccaaagtg

SEQ ID NO: 1324389 - DNA, 15 bp, Homo sapiens
agaaatctccaaagt

SEQ ID NO: 1324390 - DNA, 15 bp, Homo sapiens
aagaaatctccaaag

SEQ ID NO: 1324391 - DNA, 15 bp, Homo sapiens
taagaaatctccaaa

SEQ ID NO: 1324392 - DNA, 15 bp, Homo sapiens
ttaagaaatctccaa

SEQ ID NO: 1324393 - DNA, 15 bp, Homo sapiens
tttaagaaatctcca

SEQ ID NO: 1324394 - DNA, 15 bp, Homo sapiens
atttaagaaatctcc

SEQ ID NO: 1324395 - DNA, 15 bp, Homo sapiens
tatttaagaaatctc

SEQ ID NO: 1324396 - DNA, 15 bp, Homo sapiens
ttatttaagaaatct

SEQ ID NO: 1324397 - DNA, 15 bp, Homo sapiens
gttatttaagaaatc

SEQ ID NO: 1324398 - DNA, 15 bp, Homo sapiens
agttatttaagaaat

SEQ ID NO: 1324399 - DNA, 15 bp, Homo sapiens
tagttatttaagaaa

SEQ ID NO: 1324400 - DNA, 15 bp, Homo sapiens
ttagttatttaagaa

SEQ ID NO: 1324401 - DNA, 15 bp, Homo sapiens
tttagttatttaaga

SEQ ID NO: 1324402 - DNA, 15 bp, Homo sapiens
ttttagttatttaag

SEQ ID NO: 1324403 - DNA, 15 bp, Homo sapiens
tttttagttatttaa

SEQ ID NO: 1324404 - DNA, 15 bp, Homo sapiens
atttttagttattta

SEQ ID NO: 1324405 - DNA, 15 bp, Homo sapiens
tatttttagttattt

SEQ ID NO: 1324406 - DNA, 15 bp, Homo sapiens
ctatttttagttatt

SEQ ID NO: 1324407 - DNA, 15 bp, Homo sapiens
tctatttttagttat

SEQ ID NO: 1324408 - DNA, 15 bp, Homo sapiens
ttctatttttagtta

SEQ ID NO: 1324409 - DNA, 15 bp, Homo sapiens
gttctatttttagtt

SEQ ID NO: 1324410 - DNA, 15 bp, Homo sapiens
ggttctatttttagt

SEQ ID NO: 1324411 - DNA, 15 bp, Homo sapiens
tggttctatttttag

SEQ ID NO: 1324412 - DNA, 15 bp, Homo sapiens
atggttctattttta

SEQ ID NO: 1324413 - DNA, 15 bp, Homo sapiens
gatggttctattttt

SEQ ID NO: 1324414 - DNA, 15 bp, Homo sapiens
tgatggttctatttt

SEQ ID NO: 1324415 - DNA, 15 bp, Homo sapiens
atgatggttctattt

SEQ ID NO: 1324416 - DNA, 15 bp, Homo sapiens
aatgatggttctatt

SEQ ID NO: 1324417 - DNA, 15 bp, Homo sapiens
aaatgatggttctat

SEQ ID NO: 1324418 - DNA, 15 bp, Homo sapiens
caaatgatggttcta

SEQ ID NO: 1324419 - DNA, 15 bp, Homo sapiens
tcaaatgatggttct

SEQ ID NO: 1324420 - DNA, 15 bp, Homo sapiens
gtcaaatgatggttc

SEQ ID NO: 1324421 - DNA, 15 bp, Homo sapiens
ggtcaaatgatggtt

SEQ ID NO: 1324422 - DNA, 15 bp, Homo sapiens
gggtcaaatgatggt

SEQ ID NO: 1324423 - DNA, 15 bp, Homo sapiens
tgggtcaaatgatgg

SEQ ID NO: 1324424 - DNA, 15 bp, Homo sapiens
ctgggtcaaatgatg

SEQ ID NO: 1324425 - DNA, 15 bp, Homo sapiens
gctgggtcaaatgat

SEQ ID NO: 1324426 - DNA, 15 bp, Homo sapiens
tgctgggtcaaatga

SEQ ID NO: 1324427 - DNA, 15 bp, Homo sapiens
ttgctgggtcaaatg

SEQ ID NO: 1324428 - DNA, 15 bp, Homo sapiens
attgctgggtcaaat

SEQ ID NO: 1324429 - DNA, 15 bp, Homo sapiens
gattgctgggtcaaa

SEQ ID NO: 1324430 - DNA, 15 bp, Homo sapiens
ggattgctgggtcaa

SEQ ID NO: 1324431 - DNA, 15 bp, Homo sapiens
gggattgctgggtca

SEQ ID NO: 1324432 - DNA, 15 bp, Homo sapiens
tgggattgctgggtc

SEQ ID NO: 1324433 - DNA, 15 bp, Homo sapiens
gtgggattgctgggt

SEQ ID NO: 1324434 - DNA, 15 bp, Homo sapiens
agtgggattgctggg

SEQ ID NO: 1324435 - DNA, 15 bp, Homo sapiens
cagcagtgggattgc

SEQ ID NO: 1324436 - DNA, 15 bp, Homo sapiens
ccagcagtgggattg

SEQ ID NO: 1324437 - DNA, 15 bp, Homo sapiens
tccagcagtgggatt

SEQ ID NO: 1324438 - DNA, 15 bp, Homo sapiens
atccagcagtgggat

SEQ ID NO: 1324439 - DNA, 15 bp, Homo sapiens
catccagcagtggga

SEQ ID NO: 1324440 - DNA, 15 bp, Homo sapiens
gcatccagcagtggg

SEQ ID NO: 1324441 - DNA, 15 bp, Homo sapiens
tgcatccagcagtgg

SEQ ID NO: 1324442 - DNA, 15 bp, Homo sapiens
atgcatccagcagtg

SEQ ID NO: 1324443 - DNA, 15 bp, Homo sapiens
tatgcatccagcagt

SEQ ID NO: 1324444 - DNA, 15 bp, Homo sapiens
gtatgcatccagcag

SEQ ID NO: 1324445 - DNA, 15 bp, Homo sapiens
tgtatgcatccagca

SEQ ID NO: 1324446 - DNA, 15 bp, Homo sapiens
gtgtatgcatccagc

SEQ ID NO: 1324447 - DNA, 15 bp, Homo sapiens
tgtgtatgcatccag

SEQ ID NO: 1324448 - DNA, 15 bp, Homo sapiens
ttgtgtatgcatcca

SEQ ID NO: 1324449 - DNA, 15 bp, Homo sapiens
tttgtgtatgcatcc

SEQ ID NO: 1324450 - DNA, 15 bp, Homo sapiens
ctttgtgtatgcatc

SEQ ID NO: 1324451 - DNA, 15 bp, Homo sapiens
cctttgtgtatgcat

SEQ ID NO: 1324452 - DNA, 15 bp, Homo sapiens
tcctttgtgtatgca

SEQ ID NO: 1324453 - DNA, 15 bp, Homo sapiens
ttcctttgtgtatgc

SEQ ID NO: 1324454 - DNA, 15 bp, Homo sapiens
tttcctttgtgtatg

SEQ ID NO: 1324455 - DNA, 15 bp, Homo sapiens
ttttcctttgtgtat

SEQ ID NO: 1324456 - DNA, 15 bp, Homo sapiens
attttcctttgtgta

SEQ ID NO: 1324457 - DNA, 15 bp, Homo sapiens
tattttcctttgtgt

SEQ ID NO: 1324458 - DNA, 15 bp, Homo sapiens
ttattttcctttgtg

SEQ ID NO: 1324459 - DNA, 15 bp, Homo sapiens
tttattttcctttgt

SEQ ID NO: 1324460 - DNA, 15 bp, Homo sapiens
ctttattttcctttg

SEQ ID NO: 1324461 - DNA, 15 bp, Homo sapiens
actttattttccttt

SEQ ID NO: 1324462 - DNA, 15 bp, Homo sapiens
tactttattttcctt

SEQ ID NO: 1324463 - DNA, 15 bp, Homo sapiens
atactttattttcct

SEQ ID NO: 1324464 - DNA, 15 bp, Homo sapiens
aatactttattttcc

SEQ ID NO: 1324465 - DNA, 15 bp, Homo sapiens
gaatactttattttc

SEQ ID NO: 1324466 - DNA, 15 bp, Homo sapiens
agaatactttatttt

SEQ ID NO: 1324467 - DNA, 15 bp, Homo sapiens
tagaatactttattt

SEQ ID NO: 1324468 - DNA, 15 bp, Homo sapiens
gtagaatactttatt

SEQ ID NO: 1324469 - DNA, 15 bp, Homo sapiens
ggtagaatactttat

SEQ ID NO: 1324470 - DNA, 15 bp, Homo sapiens
tggtagaatacttta

SEQ ID NO: 1324471 - DNA, 15 bp, Homo sapiens
atggtagaatacttt

SEQ ID NO: 1324472 - DNA, 15 bp, Homo sapiens
tatggtagaatactt

SEQ ID NO: 1324473 - DNA, 15 bp, Homo sapiens
ttatggtagaatact

SEQ ID NO: 1324474 - DNA, 15 bp, Homo sapiens
tttatggtagaatac

SEQ ID NO: 1324475 - DNA, 15 bp, Homo sapiens
ctttatggtagaata

SEQ ID NO: 1324476 - DNA, 15 bp, Homo sapiens
tctttatggtagaat

SEQ ID NO: 1324477 - DNA, 15 bp, Homo sapiens
ctctttatggtagaa

SEQ ID NO: 1324478 - DNA, 15 bp, Homo sapiens
tctctttatggtaga

SEQ ID NO: 1324479 - DNA, 15 bp, Homo sapiens
gtctctttatggtag

SEQ ID NO: 1324480 - DNA, 15 bp, Homo sapiens
ggtctctttatggta

SEQ ID NO: 1324481 - DNA, 15 bp, Homo sapiens
aggtctctttatggt

SEQ ID NO: 1324482 - DNA, 15 bp, Homo sapiens
caggtctctttatgg

SEQ ID NO: 1324483 - DNA, 15 bp, Homo sapiens
gcaggtctctttatg

SEQ ID NO: 1324484 - DNA, 15 bp, Homo sapiens
tgcaggtctctttat

SEQ ID NO: 1324485 - DNA, 15 bp, Homo sapiens
gtgcaggtctcttta

SEQ ID NO: 1324486 - DNA, 15 bp, Homo sapiens
agtgcaggtctcttt

SEQ ID NO: 1324487 - DNA, 15 bp, Homo sapiens
aagtgcaggtctctt

SEQ ID NO: 1324488 - DNA, 15 bp, Homo sapiens
caagtgcaggtctct

SEQ ID NO: 1324489 - DNA, 15 bp, Homo sapiens
acaagtgcaggtctc

SEQ ID NO: 1324490 - DNA, 15 bp, Homo sapiens
tacaagtgcaggtct

SEQ ID NO: 1324491 - DNA, 15 bp, Homo sapiens
gtacaagtgcaggtc

SEQ ID NO: 1324492 - DNA, 15 bp, Homo sapiens
tgtacaagtgcaggt

SEQ ID NO: 1324493 - DNA, 15 bp, Homo sapiens
atgtacaagtgcagg

SEQ ID NO: 1324494 - DNA, 15 bp, Homo sapiens
aatgtacaagtgcag

SEQ ID NO: 1324495 - DNA, 15 bp, Homo sapiens
aaatgtacaagtgca

SEQ ID NO: 1324496 - DNA, 15 bp, Homo sapiens
taaatgtacaagtgc

SEQ ID NO: 1324497 - DNA, 15 bp, Homo sapiens
ataaatgtacaagtg

SEQ ID NO: 1324498 - DNA, 15 bp, Homo sapiens
aataaatgtacaagt

SEQ ID NO: 1324499 - DNA, 15 bp, Homo sapiens
caataaatgtacaag

SEQ ID NO: 1324500 - DNA, 15 bp, Homo sapiens
gcaataaatgtacaa

SEQ ID NO: 1324501 - DNA, 15 bp, Homo sapiens
ggcaataaatgtaca

SEQ ID NO: 1324502 - DNA, 15 bp, Homo sapiens
cggcaataaatgtac

SEQ ID NO: 1324503 - DNA, 15 bp, Homo sapiens
gcggcaataaatgta

SEQ ID NO: 1324504 - DNA, 15 bp, Homo sapiens
tgcggcaataaatgt

SEQ ID NO: 1324505 - DNA, 15 bp, Homo sapiens
gtgcggcaataaatg

SEQ ID NO: 1324506 - DNA, 15 bp, Homo sapiens
agtgcggcaataaat

SEQ ID NO: 1324507 - DNA, 15 bp, Homo sapiens
tagtgcggcaataaa

SEQ ID NO: 1324508 - DNA, 15 bp, Homo sapiens
atagtgcggcaataa

SEQ ID NO: 1324509 - DNA, 15 bp, Homo sapiens
aatagtgcggcaata

SEQ ID NO: 1324510 - DNA, 15 bp, Homo sapiens
gaatagtgcggcaat

SEQ ID NO: 1324511 - DNA, 15 bp, Homo sapiens
tgaatagtgcggcaa

SEQ ID NO: 1324512 - DNA, 15 bp, Homo sapiens
gtgaatagtgcggca

SEQ ID NO: 1324513 - DNA, 15 bp, Homo sapiens
tgtgaatagtgcggc

SEQ ID NO: 1324514 - DNA, 15 bp, Homo sapiens
ttgtgaatagtgcgg

SEQ ID NO: 1324515 - DNA, 15 bp, Homo sapiens
attgtgaatagtgcg

SEQ ID NO: 1324516 - DNA, 15 bp, Homo sapiens
cctttgctattgtga

SEQ ID NO: 1324517 - DNA, 15 bp, Homo sapiens
acctttgctattgtg

SEQ ID NO: 1324518 - DNA, 15 bp, Homo sapiens
cacctttgctattgt

SEQ ID NO: 1324519 - DNA, 15 bp, Homo sapiens
acacctttgctattg

SEQ ID NO: 1324520 - DNA, 15 bp, Homo sapiens
cacacctttgctatt

SEQ ID NO: 1324521 - DNA, 15 bp, Homo sapiens
ccacacctttgctat

SEQ ID NO: 1324522 - DNA, 15 bp, Homo sapiens
tccacacctttgcta

SEQ ID NO: 1324523 - DNA, 15 bp, Homo sapiens
ttccacacctttgct

SEQ ID NO: 1324524 - DNA, 15 bp, Homo sapiens
tttccacacctttgc

SEQ ID NO: 1324525 - DNA, 15 bp, Homo sapiens
gtttccacacctttg

SEQ ID NO: 1324526 - DNA, 15 bp, Homo sapiens
tgtttccacaccttt

SEQ ID NO: 1324527 - DNA, 15 bp, Homo sapiens
ttgtttccacacctt

SEQ ID NO: 1324528 - DNA, 15 bp, Homo sapiens
gttgtttccacacct

SEQ ID NO: 1324529 - DNA, 15 bp, Homo sapiens
ggttgtttccacacc

SEQ ID NO: 1324530 - DNA, 15 bp, Homo sapiens
aggttgtttccacac

SEQ ID NO: 1324531 - DNA, 15 bp, Homo sapiens
aaggttgtttccaca

SEQ ID NO: 1324532 - DNA, 15 bp, Homo sapiens
caaggttgtttccac

SEQ ID NO: 1324533 - DNA, 15 bp, Homo sapiens
ccaaggttgtttcca

SEQ ID NO: 1324534 - DNA, 15 bp, Homo sapiens
accaaggttgtttcc

SEQ ID NO: 1324535 - DNA, 15 bp, Homo sapiens
caccaaggttgtttc

SEQ ID NO: 1324536 - DNA, 15 bp, Homo sapiens
gcaccaaggttgttt

SEQ ID NO: 1324537 - DNA, 15 bp, Homo sapiens
ggcaccaaggttgtt

SEQ ID NO: 1324538 - DNA, 15 bp, Homo sapiens
gggcaccaaggttgt

SEQ ID NO: 1324539 - DNA, 15 bp, Homo sapiens
tgggcaccaaggttg

SEQ ID NO: 1324540 - DNA, 15 bp, Homo sapiens
ttgggcaccaaggtt

SEQ ID NO: 1324541 - DNA, 15 bp, Homo sapiens
gttgggcaccaaggt

SEQ ID NO: 1324542 - DNA, 15 bp, Homo sapiens
tgttgggcaccaagg

SEQ ID NO: 1324543 - DNA, 15 bp, Homo sapiens
ttgttgggcaccaag

SEQ ID NO: 1324544 - DNA, 15 bp, Homo sapiens
gttgttgggcaccaa

SEQ ID NO: 1324545 - DNA, 15 bp, Homo sapiens
tgttgttgggcacca

SEQ ID NO: 1324546 - DNA, 15 bp, Homo sapiens
ctgttgttgggcacc

SEQ ID NO: 1324547 - DNA, 15 bp, Homo sapiens
gctgttgttgggcac

SEQ ID NO: 1324548 - DNA, 15 bp, Homo sapiens
tgctgttgttgggca

SEQ ID NO: 1324549 - DNA, 15 bp, Homo sapiens
ctgctgttgttgggc

SEQ ID NO: 1324550 - DNA, 15 bp, Homo sapiens
tctgctgttgttggg

SEQ ID NO: 1324551 - DNA, 15 bp, Homo sapiens
atctgctgttgttgg

SEQ ID NO: 1324552 - DNA, 15 bp, Homo sapiens
aatctgctgttgttg

SEQ ID NO: 1324553 - DNA, 15 bp, Homo sapiens
taatctgctgttgtt

SEQ ID NO: 1324554 - DNA, 15 bp, Homo sapiens
ctaatctgctgttgt

SEQ ID NO: 1324555 - DNA, 15 bp, Homo sapiens
tctaatctgctgttg

SEQ ID NO: 1324556 - DNA, 15 bp, Homo sapiens
atctaatctgctgtt

SEQ ID NO: 1324557 - DNA, 15 bp, Homo sapiens
tatctaatctgctgt

SEQ ID NO: 1324558 - DNA, 15 bp, Homo sapiens
ttatctaatctgctg

SEQ ID NO: 1324559 - DNA, 15 bp, Homo sapiens
tttatctaatctgct

SEQ ID NO: 1324560 - DNA, 15 bp, Homo sapiens
ctttatctaatctgc

SEQ ID NO: 1324561 - DNA, 15 bp, Homo sapiens
tctttatctaatctg

SEQ ID NO: 1324562 - DNA, 15 bp, Homo sapiens
gtctttatctaatct

SEQ ID NO: 1324563 - DNA, 15 bp, Homo sapiens
tgtctttatctaatc

SEQ ID NO: 1324564 - DNA, 15 bp, Homo sapiens
ctgtctttatctaat

SEQ ID NO: 1324565 - DNA, 15 bp, Homo sapiens
actgtctttatctaa

SEQ ID NO: 1324566 - DNA, 15 bp, Homo sapiens
cactgtctttatcta

SEQ ID NO: 1324567 - DNA, 15 bp, Homo sapiens
acactgtctttatct

SEQ ID NO: 1324568 - DNA, 15 bp, Homo sapiens
cacactgtctttatc

SEQ ID NO: 1324569 - DNA, 15 bp, Homo sapiens
gcacactgtctttat

SEQ ID NO: 1324570 - DNA, 15 bp, Homo sapiens
agcacactgtcttta

SEQ ID NO: 1324571 - DNA, 15 bp, Homo sapiens
tagcacactgtcttt

SEQ ID NO: 1324572 - DNA, 15 bp, Homo sapiens
gtagcacactgtctt

SEQ ID NO: 1324573 - DNA, 15 bp, Homo sapiens
cgtagcacactgtct

SEQ ID NO: 1324574 - DNA, 15 bp, Homo sapiens
acgtagcacactgtc

SEQ ID NO: 1324575 - DNA, 15 bp, Homo sapiens
tacgtagcacactgt

SEQ ID NO: 1324576 - DNA, 15 bp, Homo sapiens
atacgtagcacactg

SEQ ID NO: 1324577 - DNA, 15 bp, Homo sapiens
tatacgtagcacact

SEQ ID NO: 1324578 - DNA, 15 bp, Homo sapiens
gtatacgtagcacac

SEQ ID NO: 1324579 - DNA, 15 bp, Homo sapiens
tgtatacgtagcaca

SEQ ID NO: 1324580 - DNA, 15 bp, Homo sapiens
gtgtatacgtagcac

SEQ ID NO: 1324581 - DNA, 15 bp, Homo sapiens
ggtgtatacgtagca

SEQ ID NO: 1324582 - DNA, 15 bp, Homo sapiens
aggtgtatacgtagc

SEQ ID NO: 1324583 - DNA, 15 bp, Homo sapiens
aaggtgtatacgtag

SEQ ID NO: 1324584 - DNA, 15 bp, Homo sapiens
caaggtgtatacgta

SEQ ID NO: 1324585 - DNA, 15 bp, Homo sapiens
ccaaggtgtatacgt

SEQ ID NO: 1324586 - DNA, 15 bp, Homo sapiens
tccaaggtgtatacg

SEQ ID NO: 1324587 - DNA, 15 bp, Homo sapiens
ttccaaggtgtatac

SEQ ID NO: 1324588 - DNA, 15 bp, Homo sapiens
attccaaggtgtata

SEQ ID NO: 1324589 - DNA, 15 bp, Homo sapiens
tattccaaggtgtat

SEQ ID NO: 1324590 - DNA, 15 bp, Homo sapiens
atattccaaggtgta

SEQ ID NO: 1324591 - DNA, 15 bp, Homo sapiens
taatattccaaggtg

SEQ ID NO: 1324592 - DNA, 15 bp, Homo sapiens
gtaatattccaaggt

SEQ ID NO: 1324593 - DNA, 15 bp, Homo sapiens
tgtaatattccaagg

SEQ ID NO: 1324594 - DNA, 15 bp, Homo sapiens
gtgtaatattccaag

SEQ ID NO: 1324595 - DNA, 15 bp, Homo sapiens
tgtgtaatattccaa

SEQ ID NO: 1324596 - DNA, 15 bp, Homo sapiens
ctgtgtaatattcca

SEQ ID NO: 1324597 - DNA, 15 bp, Homo sapiens
gctgtgtaatattcc

SEQ ID NO: 1324598 - DNA, 15 bp, Homo sapiens
ggctgtgtaatattc

SEQ ID NO: 1324599 - DNA, 15 bp, Homo sapiens
tggctgtgtaatatt

SEQ ID NO: 1324600 - DNA, 15 bp, Homo sapiens
atggctgtgtaatat

SEQ ID NO: 1324601 - DNA, 15 bp, Homo sapiens
tatggctgtgtaata

SEQ ID NO: 1324602 - DNA, 15 bp, Homo sapiens
ttatggctgtgtaat

SEQ ID NO: 1324603 - DNA, 15 bp, Homo sapiens
gttatggctgtgtaa

SEQ ID NO: 1324604 - DNA, 15 bp, Homo sapiens
tgttatggctgtgta

SEQ ID NO: 1324605 - DNA, 15 bp, Homo sapiens
ttgttatggctgtgt

SEQ ID NO: 1324606 - DNA, 15 bp, Homo sapiens
tttgttatggctgtg

SEQ ID NO: 1324607 - DNA, 15 bp, Homo sapiens
ctttgttatggctgt

SEQ ID NO: 1324608 - DNA, 15 bp, Homo sapiens
cctttgttatggctg

SEQ ID NO: 1324609 - DNA, 15 bp, Homo sapiens
tcctttgttatggct

SEQ ID NO: 1324610 - DNA, 15 bp, Homo sapiens
atcctttgttatggc

SEQ ID NO: 1324611 - DNA, 15 bp, Homo sapiens
catcctttgttatgg

SEQ ID NO: 1324612 - DNA, 15 bp, Homo sapiens
tcatcctttgttatg

SEQ ID NO: 1324613 - DNA, 15 bp, Homo sapiens
ttcatcctttgttat

SEQ ID NO: 1324614 - DNA, 15 bp, Homo sapiens
tttcatcctttgtta

SEQ ID NO: 1324615 - DNA, 15 bp, Homo sapiens
atttcatcctttgtt

SEQ ID NO: 1324616 - DNA, 15 bp, Homo sapiens
gatttcatcctttgt

SEQ ID NO: 1324617 - DNA, 15 bp, Homo sapiens
tgatttcatcctttg

SEQ ID NO: 1324618 - DNA, 15 bp, Homo sapiens
atgatttcatccttt

SEQ ID NO: 1324619 - DNA, 15 bp, Homo sapiens
acatgatttcatcct

SEQ ID NO: 1324620 - DNA, 15 bp, Homo sapiens
gacatgatttcatcc

SEQ ID NO: 1324621 - DNA, 15 bp, Homo sapiens
ggacatgatttcatc

SEQ ID NO: 1324622 - DNA, 15 bp, Homo sapiens
aggacatgatttcat

SEQ ID NO: 1324623 - DNA, 15 bp, Homo sapiens
aaggacatgatttca

SEQ ID NO: 1324624 - DNA, 15 bp, Homo sapiens
aaaggacatgatttc

SEQ ID NO: 1324625 - DNA, 15 bp, Homo sapiens
taaaggacatgattt

SEQ ID NO: 1324626 - DNA, 15 bp, Homo sapiens
gtaaaggacatgatt

SEQ ID NO: 1324627 - DNA, 15 bp, Homo sapiens
tgtaaaggacatgat

SEQ ID NO: 1324628 - DNA, 15 bp, Homo sapiens
ctgtaaaggacatga

SEQ ID NO: 1324629 - DNA, 15 bp, Homo sapiens
gctgtaaaggacatg

SEQ ID NO: 1324630 - DNA, 15 bp, Homo sapiens
tgctgtaaaggacat

SEQ ID NO: 1324631 - DNA, 15 bp, Homo sapiens
ttgctgtaaaggaca

SEQ ID NO: 1324632 - DNA, 15 bp, Homo sapiens
cttgctgtaaaggac

SEQ ID NO: 1324633 - DNA, 15 bp, Homo sapiens
tcttgctgtaaagga

SEQ ID NO: 1324634 - DNA, 15 bp, Homo sapiens
atcttgctgtaaagg

SEQ ID NO: 1324635 - DNA, 15 bp, Homo sapiens
catcttgctgtaaag

SEQ ID NO: 1324636 - DNA, 15 bp, Homo sapiens
ccatcttgctgtaaa

SEQ ID NO: 1324637 - DNA, 15 bp, Homo sapiens
tccatcttgctgtaa

SEQ ID NO: 1324638 - DNA, 15 bp, Homo sapiens
atccatcttgctgta

SEQ ID NO: 1324639 - DNA, 15 bp, Homo sapiens
tatccatcttgctgt

SEQ ID NO: 1324640 - DNA, 15 bp, Homo sapiens
gtatccatcttgctg

SEQ ID NO: 1324641 - DNA, 15 bp, Homo sapiens
tgtatccatcttgct

SEQ ID NO: 1324642 - DNA, 15 bp, Homo sapiens
ctgtatccatcttgc

SEQ ID NO: 1324643 - DNA, 15 bp, Homo sapiens
gctgtatccatcttg

SEQ ID NO: 1324644 - DNA, 15 bp, Homo sapiens
agctgtatccatctt

SEQ ID NO: 1324645 - DNA, 15 bp, Homo sapiens
cagctgtatccatct

SEQ ID NO: 1324646 - DNA, 15 bp, Homo sapiens
ccagctgtatccatc

SEQ ID NO: 1324647 - DNA, 15 bp, Homo sapiens
tccagctgtatccat

SEQ ID NO: 1324648 - DNA, 15 bp, Homo sapiens
ctccagctgtatcca

SEQ ID NO: 1324649 - DNA, 15 bp, Homo sapiens
cctccagctgtatcc

SEQ ID NO: 1324650 - DNA, 15 bp, Homo sapiens
gcctccagctgtatc

SEQ ID NO: 1324651 - DNA, 15 bp, Homo sapiens
ggcctccagctgtat

SEQ ID NO: 1324652 - DNA, 15 bp, Homo sapiens
tggcctccagctgta

SEQ ID NO: 1324653 - DNA, 15 bp, Homo sapiens
atggcctccagctgt

SEQ ID NO: 1324654 - DNA, 15 bp, Homo sapiens
aatggcctccagctg

SEQ ID NO: 1324655 - DNA, 15 bp, Homo sapiens
taatggcctccagct

SEQ ID NO: 1324656 - DNA, 15 bp, Homo sapiens
ataatggcctccagc

SEQ ID NO: 1324657 - DNA, 15 bp, Homo sapiens
cataatggcctccag

SEQ ID NO: 1324658 - DNA, 15 bp, Homo sapiens
gcataatggcctcca

SEQ ID NO: 1324659 - DNA, 15 bp, Homo sapiens
agcataatggcctcc

SEQ ID NO: 1324660 - DNA, 15 bp, Homo sapiens
tagcataatggcctc

SEQ ID NO: 1324661 - DNA, 15 bp, Homo sapiens
ttagcataatggcct

SEQ ID NO: 1324662 - DNA, 15 bp, Homo sapiens
cttagcataatggcc

SEQ ID NO: 1324663 - DNA, 15 bp, Homo sapiens
gcttagcataatggc

SEQ ID NO: 1324664 - DNA, 15 bp, Homo sapiens
tgcttagcataatgg

SEQ ID NO: 1324665 - DNA, 15 bp, Homo sapiens
ttgcttagcataatg

SEQ ID NO: 1324666 - DNA, 15 bp, Homo sapiens
tttgcttagcataat

SEQ ID NO: 1324667 - DNA, 15 bp, Homo sapiens
atttgcttagcataa

SEQ ID NO: 1324668 - DNA, 15 bp, Homo sapiens
aatttgcttagcata

SEQ ID NO: 1324669 - DNA, 15 bp, Homo sapiens
taatttgcttagcat

SEQ ID NO: 1324670 - DNA, 15 bp, Homo sapiens
ttaatttgcttagca

SEQ ID NO: 1324671 - DNA, 15 bp, Homo sapiens
attaatttgcttagc

SEQ ID NO: 1324672 - DNA, 15 bp, Homo sapiens
cattaatttgcttag

SEQ ID NO: 1324673 - DNA, 15 bp, Homo sapiens
gcattaatttgctta

SEQ ID NO: 1324674 - DNA, 15 bp, Homo sapiens
cgcattaatttgctt

SEQ ID NO: 1324675 - DNA, 15 bp, Homo sapiens
ccgcattaatttgct

SEQ ID NO: 1324676 - DNA, 15 bp, Homo sapiens
tccgcattaatttgc

SEQ ID NO: 1324677 - DNA, 15 bp, Homo sapiens
ttccgcattaatttg

SEQ ID NO: 1324678 - DNA, 15 bp, Homo sapiens
tttccgcattaattt

SEQ ID NO: 1324679 - DNA, 15 bp, Homo sapiens
gtttccgcattaatt

SEQ ID NO: 1324680 - DNA, 15 bp, Homo sapiens
tgtttccgcattaat

SEQ ID NO: 1324681 - DNA, 15 bp, Homo sapiens
ctgtttccgcattaa

SEQ ID NO: 1324682 - DNA, 15 bp, Homo sapiens
tctgtttccgcatta

SEQ ID NO: 1324683 - DNA, 15 bp, Homo sapiens
ttctgtttccgcatt

SEQ ID NO: 1324684 - DNA, 15 bp, Homo sapiens
tttctgtttccgcat

SEQ ID NO: 1324685 - DNA, 15 bp, Homo sapiens
ttttctgtttccgca

SEQ ID NO: 1324686 - DNA, 15 bp, Homo sapiens
gttttctgtttccgc

SEQ ID NO: 1324687 - DNA, 15 bp, Homo sapiens
ggttttctgtttccg

SEQ ID NO: 1324688 - DNA, 15 bp, Homo sapiens
ttggttttctgtttc

SEQ ID NO: 1324689 - DNA, 15 bp, Homo sapiens
tttggttttctgttt

SEQ ID NO: 1324690 - DNA, 15 bp, Homo sapiens
atttggttttctgtt

SEQ ID NO: 1324691 - DNA, 15 bp, Homo sapiens
tatttggttttctgt

SEQ ID NO: 1324692 - DNA, 15 bp, Homo sapiens
atatttggttttctg

SEQ ID NO: 1324693 - DNA, 15 bp, Homo sapiens
gatatttggttttct

SEQ ID NO: 1324694 - DNA, 15 bp, Homo sapiens
tgatatttggttttc

SEQ ID NO: 1324695 - DNA, 15 bp, Homo sapiens
gtgatatttggtttt

SEQ ID NO: 1324696 - DNA, 15 bp, Homo sapiens
tgtgatatttggttt

SEQ ID NO: 1324697 - DNA, 15 bp, Homo sapiens
atgtgatatttggtt

SEQ ID NO: 1324698 - DNA, 15 bp, Homo sapiens
catgtgatatttggt

SEQ ID NO: 1324699 - DNA, 15 bp, Homo sapiens
acatgtgatatttgg

SEQ ID NO: 1324700 - DNA, 15 bp, Homo sapiens
aacatgtgatatttg

SEQ ID NO: 1324701 - DNA, 15 bp, Homo sapiens
gaacatgtgatattt

SEQ ID NO: 1324702 - DNA, 15 bp, Homo sapiens
agaacatgtgatatt

SEQ ID NO: 1324703 - DNA, 15 bp, Homo sapiens
gagaacatgtgatat

SEQ ID NO: 1324704 - DNA, 15 bp, Homo sapiens
tgagaacatgtgata

SEQ ID NO: 1324705 - DNA, 15 bp, Homo sapiens
gtgagaacatgtgat

SEQ ID NO: 1324706 - DNA, 15 bp, Homo sapiens
agtgagaacatgtga

SEQ ID NO: 1324707 - DNA, 15 bp, Homo sapiens
gaagtgagaacatgt

SEQ ID NO: 1324708 - DNA, 15 bp, Homo sapiens
agaagtgagaacatg

SEQ ID NO: 1324709 - DNA, 15 bp, Homo sapiens
tagaagtgagaacat

SEQ ID NO: 1324710 - DNA, 15 bp, Homo sapiens
ttagaagtgagaaca

SEQ ID NO: 1324711 - DNA, 15 bp, Homo sapiens
cttagaagtgagaac

SEQ ID NO: 1324712 - DNA, 15 bp, Homo sapiens
acttagaagtgagaa

SEQ ID NO: 1324713 - DNA, 15 bp, Homo sapiens
cacttagaagtgaga

SEQ ID NO: 1324714 - DNA, 15 bp, Homo sapiens
ccacttagaagtgag

SEQ ID NO: 1324715 - DNA, 15 bp, Homo sapiens
cccacttagaagtga

SEQ ID NO: 1324716 - DNA, 15 bp, Homo sapiens
tcccacttagaagtg

SEQ ID NO: 1324717 - DNA, 15 bp, Homo sapiens
ctcccacttagaagt

SEQ ID NO: 1324718 - DNA, 15 bp, Homo sapiens
gctcccacttagaag

SEQ ID NO: 1324719 - DNA, 15 bp, Homo sapiens
agctcccacttagaa

SEQ ID NO: 1324720 - DNA, 15 bp, Homo sapiens
tagctcccacttaga

SEQ ID NO: 1324721 - DNA, 15 bp, Homo sapiens
ttagctcccacttag

SEQ ID NO: 1324722 - DNA, 15 bp, Homo sapiens
attagctcccactta

SEQ ID NO: 1324723 - DNA, 15 bp, Homo sapiens
gattagctcccactt

SEQ ID NO: 1324724 - DNA, 15 bp, Homo sapiens
ggattagctcccact

SEQ ID NO: 1324725 - DNA, 15 bp, Homo sapiens
gggattagctcccac

SEQ ID NO: 1324726 - DNA, 15 bp, Homo sapiens
ggggattagctccca

SEQ ID NO: 1324727 - DNA, 15 bp, Homo sapiens
cggggattagctccc

SEQ ID NO: 1324728 - DNA, 15 bp, Homo sapiens
ccggggattagctcc

SEQ ID NO: 1324729 - DNA, 15 bp, Homo sapiens
cccggggattagctc

SEQ ID NO: 1324730 - DNA, 15 bp, Homo sapiens
acccggggattagct

SEQ ID NO: 1324731 - DNA, 15 bp, Homo sapiens
tacccggggattagc

SEQ ID NO: 1324732 - DNA, 15 bp, Homo sapiens
ctacccggggattag

SEQ ID NO: 1324733 - DNA, 15 bp, Homo sapiens
tctacccggggatta

SEQ ID NO: 1324734 - DNA, 15 bp, Homo sapiens
gtctacccggggatt

SEQ ID NO: 1324735 - DNA, 15 bp, Homo sapiens
tgtctacccggggat

SEQ ID NO: 1324736 - DNA, 15 bp, Homo sapiens
gtgtctacccgggga

SEQ ID NO: 1324737 - DNA, 15 bp, Homo sapiens
tgtgtctacccgggg

SEQ ID NO: 1324738 - DNA, 15 bp, Homo sapiens
ctgtgtctacccggg

SEQ ID NO: 1324739 - DNA, 15 bp, Homo sapiens
tctgtgtctacccgg

SEQ ID NO: 1324740 - DNA, 15 bp, Homo sapiens
gtctgtgtctacccg

SEQ ID NO: 1324741 - DNA, 15 bp, Homo sapiens
tgtctgtgtctaccc

SEQ ID NO: 1324742 - DNA, 15 bp, Homo sapiens
atgtctgtgtctacc

SEQ ID NO: 1324743 - DNA, 15 bp, Homo sapiens
tatgtctgtgtctac

SEQ ID NO: 1324744 - DNA, 15 bp, Homo sapiens
ttatgtctgtgtcta

SEQ ID NO: 1324745 - DNA, 15 bp, Homo sapiens
tttatgtctgtgtct

SEQ ID NO: 1324746 - DNA, 15 bp, Homo sapiens
ctttatgtctgtgtc

SEQ ID NO: 1324747 - DNA, 15 bp, Homo sapiens
tctttatgtctgtgt

SEQ ID NO: 1324748 - DNA, 15 bp, Homo sapiens
gtctttatgtctgtg

SEQ ID NO: 1324749 - DNA, 15 bp, Homo sapiens
tgtctttatgtctgt

SEQ ID NO: 1324750 - DNA, 15 bp, Homo sapiens
ctgtctttatgtctg

SEQ ID NO: 1324751 - DNA, 15 bp, Homo sapiens
cctgtctttatgtct

SEQ ID NO: 1324752 - DNA, 15 bp, Homo sapiens
tcctgtctttatgtc

SEQ ID NO: 1324753 - DNA, 15 bp, Homo sapiens
ttcctgtctttatgt

SEQ ID NO: 1324754 - DNA, 15 bp, Homo sapiens
attcctgtctttatg

SEQ ID NO: 1324755 - DNA, 15 bp, Homo sapiens
tattcctgtctttat

SEQ ID NO: 1324756 - DNA, 15 bp, Homo sapiens
ttattcctgtcttta

SEQ ID NO: 1324757 - DNA, 15 bp, Homo sapiens
attattcctgtcttt

SEQ ID NO: 1324758 - DNA, 15 bp, Homo sapiens
tattattcctgtctt

SEQ ID NO: 1324759 - DNA, 15 bp, Homo sapiens
ctattattcctgtct

SEQ ID NO: 1324760 - DNA, 15 bp, Homo sapiens
tctattattcctgtc

SEQ ID NO: 1324761 - DNA, 15 bp, Homo sapiens
atctattattcctgt

SEQ ID NO: 1324762 - DNA, 15 bp, Homo sapiens
tatctattattcctg

SEQ ID NO: 1324763 - DNA, 15 bp, Homo sapiens
gtatctattattcct

SEQ ID NO: 1324764 - DNA, 15 bp, Homo sapiens
agtatctattattcc

SEQ ID NO: 1324765 - DNA, 15 bp, Homo sapiens
cagtatctattattc

SEQ ID NO: 1324766 - DNA, 15 bp, Homo sapiens
ccagtatctattatt

SEQ ID NO: 1324767 - DNA, 15 bp, Homo sapiens
cccagtatctattat

SEQ ID NO: 1324768 - DNA, 15 bp, Homo sapiens
ccccagtatctatta

SEQ ID NO: 1324769 - DNA, 15 bp, Homo sapiens
tccccagtatctatt

SEQ ID NO: 1324770 - DNA, 15 bp, Homo sapiens
gtccccagtatctat

SEQ ID NO: 1324771 - DNA, 15 bp, Homo sapiens
agtccccagtatcta

SEQ ID NO: 1324772 - DNA, 15 bp, Homo sapiens
gagtccccagtatct

SEQ ID NO: 1324773 - DNA, 15 bp, Homo sapiens
ggagtccccagtatc

SEQ ID NO: 1324774 - DNA, 15 bp, Homo sapiens
tggagtccccagtat

SEQ ID NO: 1324775 - DNA, 15 bp, Homo sapiens
ttggagtccccagta

SEQ ID NO: 1324776 - DNA, 15 bp, Homo sapiens
tttggagtccccagt

SEQ ID NO: 1324777 - DNA, 15 bp, Homo sapiens
ttttggagtccccag

SEQ ID NO: 1324778 - DNA, 15 bp, Homo sapiens
cttttggagtcccca

SEQ ID NO: 1324779 - DNA, 15 bp, Homo sapiens
ccttttggagtcccc

SEQ ID NO: 1324780 - DNA, 15 bp, Homo sapiens
tccttttggagtccc

SEQ ID NO: 1324781 - DNA, 15 bp, Homo sapiens
ttccttttggagtcc

SEQ ID NO: 1324782 - DNA, 15 bp, Homo sapiens
cttccttttggagtc

SEQ ID NO: 1324783 - DNA, 15 bp, Homo sapiens
ccttccttttggagt

SEQ ID NO: 1324784 - DNA, 15 bp, Homo sapiens
tccttccttttggag

SEQ ID NO: 1324785 - DNA, 15 bp, Homo sapiens
ctccttccttttgga

SEQ ID NO: 1324786 - DNA, 15 bp, Homo sapiens
cctccttccttttgg

SEQ ID NO: 1324787 - DNA, 15 bp, Homo sapiens
ccctccttccttttg

SEQ ID NO: 1324788 - DNA, 15 bp, Homo sapiens
tccctccttcctttt

SEQ ID NO: 1324789 - DNA, 15 bp, Homo sapiens
ctccctccttccttt

SEQ ID NO: 1324790 - DNA, 15 bp, Homo sapiens
actccctccttcctt

SEQ ID NO: 1324791 - DNA, 15 bp, Homo sapiens
cactccctccttcct

SEQ ID NO: 1324792 - DNA, 15 bp, Homo sapiens
ccactccctccttcc

SEQ ID NO: 1324793 - DNA, 15 bp, Homo sapiens
cccactccctccttc

SEQ ID NO: 1324794 - DNA, 15 bp, Homo sapiens
ccccactccctcctt

SEQ ID NO: 1324795 - DNA, 15 bp, Homo sapiens
gccccactccctcct

SEQ ID NO: 1324796 - DNA, 15 bp, Homo sapiens
tgccccactccctcc

SEQ ID NO: 1324797 - DNA, 15 bp, Homo sapiens
ttgccccactccctc

SEQ ID NO: 1324798 - DNA, 15 bp, Homo sapiens
tttgccccactccct

SEQ ID NO: 1324799 - DNA, 15 bp, Homo sapiens
ctttgccccactccc

SEQ ID NO: 1324800 - DNA, 15 bp, Homo sapiens
cctttgccccactcc

SEQ ID NO: 1324801 - DNA, 15 bp, Homo sapiens
gcctttgccccactc

SEQ ID NO: 1324802 - DNA, 15 bp, Homo sapiens
agcctttgccccact

SEQ ID NO: 1324803 - DNA, 15 bp, Homo sapiens
cagcctttgccccac

SEQ ID NO: 1324804 - DNA, 15 bp, Homo sapiens
tcagcctttgcccca

SEQ ID NO: 1324805 - DNA, 15 bp, Homo sapiens
ttcagcctttgcccc

SEQ ID NO: 1324806 - DNA, 15 bp, Homo sapiens
tttcagcctttgccc

SEQ ID NO: 1324807 - DNA, 15 bp, Homo sapiens
ttttcagcctttgcc

SEQ ID NO: 1324808 - DNA, 15 bp, Homo sapiens
attttcagcctttgc

SEQ ID NO: 1324809 - DNA, 15 bp, Homo sapiens
gattttcagcctttg

SEQ ID NO: 1324810 - DNA, 15 bp, Homo sapiens
agattttcagccttt

SEQ ID NO: 1324811 - DNA, 15 bp, Homo sapiens
aagattttcagcctt

SEQ ID NO: 1324812 - DNA, 15 bp, Homo sapiens
gaagattttcagcct

SEQ ID NO: 1324813 - DNA, 15 bp, Homo sapiens
agaagattttcagcc

SEQ ID NO: 1324814 - DNA, 15 bp, Homo sapiens
aagaagattttcagc

SEQ ID NO: 1324815 - DNA, 15 bp, Homo sapiens
aaagaagattttcag

SEQ ID NO: 1324816 - DNA, 15 bp, Homo sapiens
aaaagaagattttca

SEQ ID NO: 1324817 - DNA, 15 bp, Homo sapiens
aaaaagaagattttc

SEQ ID NO: 1324818 - DNA, 15 bp, Homo sapiens
caaaaagaagatttt

SEQ ID NO: 1324819 - DNA, 15 bp, Homo sapiens
ccaaaaagaagattt

SEQ ID NO: 1324820 - DNA, 15 bp, Homo sapiens
cccaaaaagaagatt

SEQ ID NO: 1324821 - DNA, 15 bp, Homo sapiens
acccaaaaagaagat

SEQ ID NO: 1324822 - DNA, 15 bp, Homo sapiens
tacccaaaaagaaga

SEQ ID NO: 1324823 - DNA, 15 bp, Homo sapiens
gtacccaaaaagaag

SEQ ID NO: 1324824 - DNA, 15 bp, Homo sapiens
agtacccaaaaagaa

SEQ ID NO: 1324825 - DNA, 15 bp, Homo sapiens
tagtacccaaaaaga

SEQ ID NO: 1324826 - DNA, 15 bp, Homo sapiens
atagtacccaaaaag

SEQ ID NO: 1324827 - DNA, 15 bp, Homo sapiens
catagtacccaaaaa

SEQ ID NO: 1324828 - DNA, 15 bp, Homo sapiens
acatagtacccaaaa

SEQ ID NO: 1324829 - DNA, 15 bp, Homo sapiens
aacatagtacccaaa

SEQ ID NO: 1324830 - DNA, 15 bp, Homo sapiens
gaacatagtacccaa

SEQ ID NO: 1324831 - DNA, 15 bp, Homo sapiens
tgaacatagtaccca

SEQ ID NO: 1324832 - DNA, 15 bp, Homo sapiens
gtgaacatagtaccc

SEQ ID NO: 1324833 - DNA, 15 bp, Homo sapiens
agtgaacatagtacc

SEQ ID NO: 1324834 - DNA, 15 bp, Homo sapiens
gagtgaacatagtac

SEQ ID NO: 1324835 - DNA, 15 bp, Homo sapiens
agagtgaacatagta

SEQ ID NO: 1324836 - DNA, 15 bp, Homo sapiens
tagagtgaacatagt

SEQ ID NO: 1324837 - DNA, 15 bp, Homo sapiens
atagagtgaacatag

SEQ ID NO: 1324838 - DNA, 15 bp, Homo sapiens
gatagagtgaacata

SEQ ID NO: 1324839 - DNA, 15 bp, Homo sapiens
tgatagagtgaacat

SEQ ID NO: 1324840 - DNA, 15 bp, Homo sapiens
ctgatagagtgaaca

SEQ ID NO: 1324841 - DNA, 15 bp, Homo sapiens
actgatagagtgaac

SEQ ID NO: 1324842 - DNA, 15 bp, Homo sapiens
cactgatagagtgaa

SEQ ID NO: 1324843 - DNA, 15 bp, Homo sapiens
tcactgatagagtga

SEQ ID NO: 1324844 - DNA, 15 bp, Homo sapiens
atcactgatagagtg

SEQ ID NO: 1324845 - DNA, 15 bp, Homo sapiens
catcactgatagagt

SEQ ID NO: 1324846 - DNA, 15 bp, Homo sapiens
ccatcactgatagag

SEQ ID NO: 1324847 - DNA, 15 bp, Homo sapiens
cccatcactgataga

SEQ ID NO: 1324848 - DNA, 15 bp, Homo sapiens
tcccatcactgatag

SEQ ID NO: 1324849 - DNA, 15 bp, Homo sapiens
atcccatcactgata

SEQ ID NO: 1324850 - DNA, 15 bp, Homo sapiens
gatcccatcactgat

SEQ ID NO: 1324851 - DNA, 15 bp, Homo sapiens
tgatcccatcactga

SEQ ID NO: 1324852 - DNA, 15 bp, Homo sapiens
ttgatcccatcactg

SEQ ID NO: 1324853 - DNA, 15 bp, Homo sapiens
attgatcccatcact

SEQ ID NO: 1324854 - DNA, 15 bp, Homo sapiens
tattgatcccatcac

SEQ ID NO: 1324855 - DNA, 15 bp, Homo sapiens
ctattgatcccatca

SEQ ID NO: 1324856 - DNA, 15 bp, Homo sapiens
tctattgatcccatc

SEQ ID NO: 1324857 - DNA, 15 bp, Homo sapiens
ttctattgatcccat

SEQ ID NO: 1324858 - DNA, 15 bp, Homo sapiens
cttctattgatccca

SEQ ID NO: 1324859 - DNA, 15 bp, Homo sapiens
gcttctattgatccc

SEQ ID NO: 1324860 - DNA, 15 bp, Homo sapiens
agcttctattgatcc

SEQ ID NO: 1324861 - DNA, 15 bp, Homo sapiens
gagcttctattgatc

SEQ ID NO: 1324862 - DNA, 15 bp, Homo sapiens
tgagcttctattgat

SEQ ID NO: 1324863 - DNA, 15 bp, Homo sapiens
ttgagcttctattga

SEQ ID NO: 1324864 - DNA, 15 bp, Homo sapiens
tttgagcttctattg

SEQ ID NO: 1324865 - DNA, 15 bp, Homo sapiens
gtttgagcttctatt

SEQ ID NO: 1324866 - DNA, 15 bp, Homo sapiens
cgtttgagcttctat

SEQ ID NO: 1324867 - DNA, 15 bp, Homo sapiens
acgtttgagcttcta

SEQ ID NO: 1324868 - DNA, 15 bp, Homo sapiens
gacgtttgagcttct

SEQ ID NO: 1324869 - DNA, 15 bp, Homo sapiens
tgacgtttgagcttc

SEQ ID NO: 1324870 - DNA, 15 bp, Homo sapiens
ctgacgtttgagctt

SEQ ID NO: 1324871 - DNA, 15 bp, Homo sapiens
gctgacgtttgagct

SEQ ID NO: 1324872 - DNA, 15 bp, Homo sapiens
tgctgacgtttgagc

SEQ ID NO: 1324873 - DNA, 15 bp, Homo sapiens
atgctgacgtttgag

SEQ ID NO: 1324874 - DNA, 15 bp, Homo sapiens
gatgctgacgtttga

SEQ ID NO: 1324875 - DNA, 15 bp, Homo sapiens
tgatgctgacgtttg

SEQ ID NO: 1324876 - DNA, 15 bp, Homo sapiens
gtgatgctgacgttt

SEQ ID NO: 1324877 - DNA, 15 bp, Homo sapiens
cgtgatgctgacgtt

SEQ ID NO: 1324878 - DNA, 15 bp, Homo sapiens
gcgtgatgctgacgt

SEQ ID NO: 1324879 - DNA, 15 bp, Homo sapiens
tgcgtgatgctgacg

SEQ ID NO: 1324880 - DNA, 15 bp, Homo sapiens
atgcgtgatgctgac

SEQ ID NO: 1324881 - DNA, 15 bp, Homo sapiens
aatgcgtgatgctga

SEQ ID NO: 1324882 - DNA, 15 bp, Homo sapiens
taatgcgtgatgctg

SEQ ID NO: 1324883 - DNA, 15 bp, Homo sapiens
gtaatgcgtgatgct

SEQ ID NO: 1324884 - DNA, 15 bp, Homo sapiens
tgtaatgcgtgatgc

SEQ ID NO: 1324885 - DNA, 15 bp, Homo sapiens
gtgtaatgcgtgatg

SEQ ID NO: 1324886 - DNA, 15 bp, Homo sapiens
ggtgtaatgcgtgat

SEQ ID NO: 1324887 - DNA, 15 bp, Homo sapiens
gggtgtaatgcgtga

SEQ ID NO: 1324888 - DNA, 15 bp, Homo sapiens
agggtgtaatgcgtg

SEQ ID NO: 1324889 - DNA, 15 bp, Homo sapiens
gagggtgtaatgcgt

SEQ ID NO: 1324890 - DNA, 15 bp, Homo sapiens
tgagggtgtaatgcg

SEQ ID NO: 1324891 - DNA, 15 bp, Homo sapiens
gtgagggtgtaatgc

SEQ ID NO: 1324892 - DNA, 15 bp, Homo sapiens
tgtgagggtgtaatg

SEQ ID NO: 1324893 - DNA, 15 bp, Homo sapiens
ttgtgagggtgtaat

SEQ ID NO: 1324894 - DNA, 15 bp, Homo sapiens
gttgtgagggtgtaa

SEQ ID NO: 1324895 - DNA, 15 bp, Homo sapiens
tgttgtgagggtgta

SEQ ID NO: 1324896 - DNA, 15 bp, Homo sapiens
ttgttgtgagggtgt

SEQ ID NO: 1324897 - DNA, 15 bp, Homo sapiens
tttgttgtgagggtg

SEQ ID NO: 1324898 - DNA, 15 bp, Homo sapiens
gtttgttgtgagggt

SEQ ID NO: 1324899 - DNA, 15 bp, Homo sapiens
ggtttgttgtgaggg

SEQ ID NO: 1324900 - DNA, 15 bp, Homo sapiens
aggtttgttgtgagg

SEQ ID NO: 1324901 - DNA, 15 bp, Homo sapiens
caggtttgttgtgag

SEQ ID NO: 1324902 - DNA, 15 bp, Homo sapiens
gcaggtttgttgtga

SEQ ID NO: 1324903 - DNA, 15 bp, Homo sapiens
tgcaggtttgttgtg

SEQ ID NO: 1324904 - DNA, 15 bp, Homo sapiens
gtgcaggtttgttgt

SEQ ID NO: 1324905 - DNA, 15 bp, Homo sapiens
cgtgcaggtttgttg

SEQ ID NO: 1324906 - DNA, 15 bp, Homo sapiens
cacgtgcaggtttgt

SEQ ID NO: 1324907 - DNA, 15 bp, Homo sapiens
acacgtgcaggtttg

SEQ ID NO: 1324908 - DNA, 15 bp, Homo sapiens
tacacgtgcaggttt

SEQ ID NO: 1324909 - DNA, 15 bp, Homo sapiens
atacacgtgcaggtt

SEQ ID NO: 1324910 - DNA, 15 bp, Homo sapiens
gatacacgtgcaggt

SEQ ID NO: 1324911 - DNA, 15 bp, Homo sapiens
ggatacacgtgcagg

SEQ ID NO: 1324912 - DNA, 15 bp, Homo sapiens
gggatacacgtgcag

SEQ ID NO: 1324913 - DNA, 15 bp, Homo sapiens
ggggatacacgtgca

SEQ ID NO: 1324914 - DNA, 15 bp, Homo sapiens
gggggatacacgtgc

SEQ ID NO: 1324915 - DNA, 15 bp, Homo sapiens
cgggggatacacgtg

SEQ ID NO: 1324916 - DNA, 15 bp, Homo sapiens
tcgggggatacacgt

SEQ ID NO: 1324917 - DNA, 15 bp, Homo sapiens
ttcgggggatacacg

SEQ ID NO: 1324918 - DNA, 15 bp, Homo sapiens
attcgggggatacac

SEQ ID NO: 1324919 - DNA, 15 bp, Homo sapiens
gattcgggggataca

SEQ ID NO: 1324920 - DNA, 15 bp, Homo sapiens
agattcgggggatac

SEQ ID NO: 1324921 - DNA, 15 bp, Homo sapiens
tagattcgggggata

SEQ ID NO: 1324922 - DNA, 15 bp, Homo sapiens
atagattcgggggat

SEQ ID NO: 1324923 - DNA, 15 bp, Homo sapiens
tatagattcggggga

SEQ ID NO: 1324924 - DNA, 15 bp, Homo sapiens
ttatagattcggggg

SEQ ID NO: 1324925 - DNA, 15 bp, Homo sapiens
attatagattcgggg

SEQ ID NO: 1324926 - DNA, 15 bp, Homo sapiens
aattatagattcggg

SEQ ID NO: 1324927 - DNA, 15 bp, Homo sapiens
taattatagattcgg

SEQ ID NO: 1324928 - DNA, 15 bp, Homo sapiens
ttaattatagattcg

SEQ ID NO: 1324929 - DNA, 15 bp, Homo sapiens
tttaattatagattc

SEQ ID NO: 1324930 - DNA, 15 bp, Homo sapiens
ttttaattatagatt

SEQ ID NO: 1324931 - DNA, 15 bp, Homo sapiens
attttaattatagat

SEQ ID NO: 1324932 - DNA, 15 bp, Homo sapiens
aattttaattataga

SEQ ID NO: 1324933 - DNA, 15 bp, Homo sapiens
gaattttaattatag

SEQ ID NO: 1324934 - DNA, 15 bp, Homo sapiens
tgaattttaattata

SEQ ID NO: 1324935 - DNA, 15 bp, Homo sapiens
ttgaattttaattat

SEQ ID NO: 1324936 - DNA, 15 bp, Homo sapiens
cttgaattttaatta

SEQ ID NO: 1324937 - DNA, 15 bp, Homo sapiens
tcttgaattttaatt

SEQ ID NO: 1324938 - DNA, 15 bp, Homo sapiens
ttcttgaattttaat

SEQ ID NO: 1324939 - DNA, 15 bp, Homo sapiens
tttcttgaattttaa

SEQ ID NO: 1324940 - DNA, 15 bp, Homo sapiens
ctttcttgaatttta

SEQ ID NO: 1324941 - DNA, 15 bp, Homo sapiens
tctttcttgaatttt

SEQ ID NO: 1324942 - DNA, 15 bp, Homo sapiens
ttctttcttgaattt

SEQ ID NO: 1324943 - DNA, 15 bp, Homo sapiens
tttctttcttgaatt

SEQ ID NO: 1324944 - DNA, 15 bp, Homo sapiens
ttttctttcttgaat

SEQ ID NO: 1324945 - DNA, 15 bp, Homo sapiens
cttttctttcttgaa

SEQ ID NO: 1324946 - DNA, 15 bp, Homo sapiens
acttttctttcttga

SEQ ID NO: 1324947 - DNA, 15 bp, Homo sapiens
cacttttctttcttg

SEQ ID NO: 1324948 - DNA, 15 bp, Homo sapiens
acacttttctttctt

SEQ ID NO: 1324949 - DNA, 15 bp, Homo sapiens
aacacttttctttct

SEQ ID NO: 1324950 - DNA, 15 bp, Homo sapiens
aaacacttttctttc

SEQ ID NO: 1324951 - DNA, 15 bp, Homo sapiens
taaaacacttttctt

SEQ ID NO: 1324952 - DNA, 15 bp, Homo sapiens
ataaaacacttttct

SEQ ID NO: 1324953 - DNA, 15 bp, Homo sapiens
cataaaacacttttc

SEQ ID NO: 1324954 - DNA, 15 bp, Homo sapiens
acataaaacactttt

SEQ ID NO: 1324955 - DNA, 15 bp, Homo sapiens
tacataaaacacttt

SEQ ID NO: 1324956 - DNA, 15 bp, Homo sapiens
gtacataaaacactt

SEQ ID NO: 1324957 - DNA, 15 bp, Homo sapiens
tgtacataaaacact

SEQ ID NO: 1324958 - DNA, 15 bp, Homo sapiens
ttgtacataaaacac

SEQ ID NO: 1324959 - DNA, 15 bp, Homo sapiens
gttgtacataaaaca

SEQ ID NO: 1324960 - DNA, 15 bp, Homo sapiens
agttgtacataaaac

SEQ ID NO: 1324961 - DNA, 15 bp, Homo sapiens
cagttgtacataaaa

SEQ ID NO: 1324962 - DNA, 15 bp, Homo sapiens
acagttgtacataaa

SEQ ID NO: 1324963 - DNA, 15 bp, Homo sapiens
cacagttgtacataa

SEQ ID NO: 1324964 - DNA, 15 bp, Homo sapiens
tcacagttgtacata

SEQ ID NO: 1324965 - DNA, 15 bp, Homo sapiens
ttcacagttgtacat

SEQ ID NO: 1324966 - DNA, 15 bp, Homo sapiens
tttcacagttgtaca

SEQ ID NO: 1324967 - DNA, 15 bp, Homo sapiens
gtttcacagttgtac

SEQ ID NO: 1324968 - DNA, 15 bp, Homo sapiens
agtttcacagttgta

SEQ ID NO: 1324969 - DNA, 15 bp, Homo sapiens
tagtttcacagttgt

SEQ ID NO: 1324970 - DNA, 15 bp, Homo sapiens
atagtttcacagttg

SEQ ID NO: 1324971 - DNA, 15 bp, Homo sapiens
tatagtttcacagtt

SEQ ID NO: 1324972 - DNA, 15 bp, Homo sapiens
ttatagtttcacagt

SEQ ID NO: 1324973 - DNA, 15 bp, Homo sapiens
attatagtttcacag

SEQ ID NO: 1324974 - DNA, 15 bp, Homo sapiens
tattatagtttcaca

SEQ ID NO: 1324975 - DNA, 15 bp, Homo sapiens
atattatagtttcac

SEQ ID NO: 1324976 - DNA, 15 bp, Homo sapiens
tatattatagtttca

SEQ ID NO: 1324977 - DNA, 15 bp, Homo sapiens
atatattatagtttc

SEQ ID NO: 1324978 - DNA, 15 bp, Homo sapiens
gatatattatagttt

SEQ ID NO: 1324979 - DNA, 15 bp, Homo sapiens
tgatatattatagtt

SEQ ID NO: 1324980 - DNA, 15 bp, Homo sapiens
ttgatatattatagt

SEQ ID NO: 1324981 - DNA, 15 bp, Homo sapiens
attgatatattatag

SEQ ID NO: 1324982 - DNA, 15 bp, Homo sapiens
aattgatatattata

SEQ ID NO: 1324983 - DNA, 15 bp, Homo sapiens
aaattgatatattat

SEQ ID NO: 1324984 - DNA, 15 bp, Homo sapiens
taaattgatatatta

SEQ ID NO: 1324985 - DNA, 15 bp, Homo sapiens
ttaaattgatatatt

SEQ ID NO: 1324986 - DNA, 15 bp, Homo sapiens
tttaaattgatatat

SEQ ID NO: 1324987 - DNA, 15 bp, Homo sapiens
ctttaaattgatata

SEQ ID NO: 1324988 - DNA, 15 bp, Homo sapiens
tctttaaattgatat

SEQ ID NO: 1324989 - DNA, 15 bp, Homo sapiens
ttctttaaattgata

SEQ ID NO: 1324990 - DNA, 15 bp, Homo sapiens
cttctttaaattgat

SEQ ID NO: 1324991 - DNA, 15 bp, Homo sapiens
tcttctttaaattga

SEQ ID NO: 1324992 - DNA, 15 bp, Homo sapiens
ttcttctttaaattg

SEQ ID NO: 1324993 - DNA, 15 bp, Homo sapiens
tttcttctttaaatt

SEQ ID NO: 1324994 - DNA, 15 bp, Homo sapiens
ttttcttctttaaat

SEQ ID NO: 1324995 - DNA, 15 bp, Homo sapiens
tttttcttctttaaa

SEQ ID NO: 1324996 - DNA, 15 bp, Homo sapiens
atttttcttctttaa

SEQ ID NO: 1324997 - DNA, 15 bp, Homo sapiens
catttttcttcttta

SEQ ID NO: 1324998 - DNA, 15 bp, Homo sapiens
acatttttcttcttt

SEQ ID NO: 1324999 - DNA, 15 bp, Homo sapiens
aacatttttcttctt

SEQ ID NO: 1325000 - DNA, 15 bp, Homo sapiens
aaacatttttcttct

SEQ ID NO: 1325001 - DNA, 15 bp, Homo sapiens
gaaacatttttcttc

SEQ ID NO: 1325002 - DNA, 15 bp, Homo sapiens
tgaaacatttttctt

SEQ ID NO: 1325003 - DNA, 15 bp, Homo sapiens
atgaaacatttttct

SEQ ID NO: 1325004 - DNA, 15 bp, Homo sapiens
catgaaacatttttc

SEQ ID NO: 1325005 - DNA, 15 bp, Homo sapiens
ccatgaaacattttt

SEQ ID NO: 1325006 - DNA, 15 bp, Homo sapiens
gccatgaaacatttt

SEQ ID NO: 1325007 - DNA, 15 bp, Homo sapiens
tgccatgaaacattt

SEQ ID NO: 1325008 - DNA, 15 bp, Homo sapiens
atgccatgaaacatt

SEQ ID NO: 1325009 - DNA, 15 bp, Homo sapiens
catgccatgaaacat

SEQ ID NO: 1325010 - DNA, 15 bp, Homo sapiens
ccatgccatgaaaca

SEQ ID NO: 1325011 - DNA, 15 bp, Homo sapiens
cccatgccatgaaac

SEQ ID NO: 1325012 - DNA, 15 bp, Homo sapiens
tcccatgccatgaaa

SEQ ID NO: 1325013 - DNA, 15 bp, Homo sapiens
ttcccatgccatgaa

SEQ ID NO: 1325014 - DNA, 15 bp, Homo sapiens
tttcccatgccatga

SEQ ID NO: 1325015 - DNA, 15 bp, Homo sapiens
ttttcccatgccatg

SEQ ID NO: 1325016 - DNA, 15 bp, Homo sapiens
attttcccatgccat

SEQ ID NO: 1325017 - DNA, 15 bp, Homo sapiens
cattttcccatgcca

SEQ ID NO: 1325018 - DNA, 15 bp, Homo sapiens
tcattttcccatgcc

SEQ ID NO: 1325019 - DNA, 15 bp, Homo sapiens
atcattttcccatgc

SEQ ID NO: 1325020 - DNA, 15 bp, Homo sapiens
aatcattttcccatg

SEQ ID NO: 1325021 - DNA, 15 bp, Homo sapiens
taatcattttcccat

SEQ ID NO: 1325022 - DNA, 15 bp, Homo sapiens
ataatcattttccca

SEQ ID NO: 1325023 - DNA, 15 bp, Homo sapiens
tataatcattttccc

SEQ ID NO: 1325024 - DNA, 15 bp, Homo sapiens
ttataatcattttcc

SEQ ID NO: 1325025 - DNA, 15 bp, Homo sapiens
attataatcattttc

SEQ ID NO: 1325026 - DNA, 15 bp, Homo sapiens
tattataatcatttt

SEQ ID NO: 1325027 - DNA, 15 bp, Homo sapiens
atattataatcattt

SEQ ID NO: 1325028 - DNA, 15 bp, Homo sapiens
aatattataatcatt

SEQ ID NO: 1325029 - DNA, 15 bp, Homo sapiens
gaatattataatcat

SEQ ID NO: 1325030 - DNA, 15 bp, Homo sapiens
agaatattataatca

SEQ ID NO: 1325031 - DNA, 15 bp, Homo sapiens
cagaatattataatc

SEQ ID NO: 1325032 - DNA, 15 bp, Homo sapiens
acagaatattataat

SEQ ID NO: 1325033 - DNA, 15 bp, Homo sapiens
aacagaatattataa

SEQ ID NO: 1325034 - DNA, 15 bp, Homo sapiens
taacagaatattata

SEQ ID NO: 1325035 - DNA, 15 bp, Homo sapiens
ataacagaatattat

SEQ ID NO: 1325036 - DNA, 15 bp, Homo sapiens
cataacagaatatta

SEQ ID NO: 1325037 - DNA, 15 bp, Homo sapiens
acataacagaatatt

SEQ ID NO: 1325038 - DNA, 15 bp, Homo sapiens
tacataacagaatat

SEQ ID NO: 1325039 - DNA, 15 bp, Homo sapiens
ttacataacagaata

SEQ ID NO: 1325040 - DNA, 15 bp, Homo sapiens
tttacataacagaat

SEQ ID NO: 1325041 - DNA, 15 bp, Homo sapiens
ttttacataacagaa

SEQ ID NO: 1325042 - DNA, 15 bp, Homo sapiens
tttttacataacaga

SEQ ID NO: 1325043 - DNA, 15 bp, Homo sapiens
ttttttacataacag

SEQ ID NO: 1325044 - DNA, 15 bp, Homo sapiens
cttttttacataaca

SEQ ID NO: 1325045 - DNA, 15 bp, Homo sapiens
gcttttttacataac

SEQ ID NO: 1325046 - DNA, 15 bp, Homo sapiens
cgcttttttacataa

SEQ ID NO: 1325047 - DNA, 15 bp, Homo sapiens
tcgcttttttacata

SEQ ID NO: 1325048 - DNA, 15 bp, Homo sapiens
ctcgcttttttacat

SEQ ID NO: 1325049 - DNA, 15 bp, Homo sapiens
tctcgcttttttaca

SEQ ID NO: 1325050 - DNA, 15 bp, Homo sapiens
ctctcgcttttttac

SEQ ID NO: 1325051 - DNA, 15 bp, Homo sapiens
tctctcgctttttta

SEQ ID NO: 1325052 - DNA, 15 bp, Homo sapiens
atctctcgctttttt

SEQ ID NO: 1325053 - DNA, 15 bp, Homo sapiens
aatctctcgcttttt

SEQ ID NO: 1325054 - DNA, 15 bp, Homo sapiens
aaatctctcgctttt

SEQ ID NO: 1325055 - DNA, 15 bp, Homo sapiens
aaaatctctcgcttt

SEQ ID NO: 1325056 - DNA, 15 bp, Homo sapiens
aaaaatctctcgctt

SEQ ID NO: 1325057 - DNA, 15 bp, Homo sapiens
aaaaaatctctcgct

SEQ ID NO: 1325058 - DNA, 15 bp, Homo sapiens
aaaaaaatctctcgc

SEQ ID NO: 1325059 - DNA, 15 bp, Homo sapiens
aaaaaaaatctctcg

SEQ ID NO: 1325060 - DNA, 15 bp, Homo sapiens
gaaaaaaaatctctc

SEQ ID NO: 1325061 - DNA, 15 bp, Homo sapiens
ggaaaaaaaatctct

SEQ ID NO: 1325062 - DNA, 15 bp, Homo sapiens
gggaaaaaaaatctc

SEQ ID NO: 1325063 - DNA, 15 bp, Homo sapiens
cgggaaaaaaaatct

SEQ ID NO: 1325064 - DNA, 15 bp, Homo sapiens
tcgggaaaaaaaatc

SEQ ID NO: 1325065 - DNA, 15 bp, Homo sapiens
ttcgggaaaaaaaat

SEQ ID NO: 1325066 - DNA, 15 bp, Homo sapiens
tttcgggaaaaaaaa

SEQ ID NO: 1325067 - DNA, 15 bp, Homo sapiens
ttttcgggaaaaaaa

SEQ ID NO: 1325068 - DNA, 15 bp, Homo sapiens
gttttcgggaaaaaa

SEQ ID NO: 1325069 - DNA, 15 bp, Homo sapiens
ggttttcgggaaaaa

SEQ ID NO: 1325070 - DNA, 15 bp, Homo sapiens
tggttttcgggaaaa

SEQ ID NO: 1325071 - DNA, 15 bp, Homo sapiens
ttggttttcgggaaa

SEQ ID NO: 1325072 - DNA, 15 bp, Homo sapiens
tttggttttcgggaa

SEQ ID NO: 1325073 - DNA, 15 bp, Homo sapiens
ctttggttttcggga

SEQ ID NO: 1325074 - DNA, 15 bp, Homo sapiens
gctttggttttcggg

SEQ ID NO: 1325075 - DNA, 15 bp, Homo sapiens
tgctttggttttcgg

SEQ ID NO: 1325076 - DNA, 15 bp, Homo sapiens
gtgctttggttttcg

SEQ ID NO: 1325077 - DNA, 15 bp, Homo sapiens
cgtgctttggttttc

SEQ ID NO: 1325078 - DNA, 15 bp, Homo sapiens
tcgtgctttggtttt

SEQ ID NO: 1325079 - DNA, 15 bp, Homo sapiens
atcgtgctttggttt

SEQ ID NO: 1325080 - DNA, 15 bp, Homo sapiens
catcgtgctttggtt

SEQ ID NO: 1325081 - DNA, 15 bp, Homo sapiens
tcatcgtgctttggt

SEQ ID NO: 1325082 - DNA, 15 bp, Homo sapiens
gtcatcgtgctttgg

SEQ ID NO: 1325083 - DNA, 15 bp, Homo sapiens
tgtcatcgtgctttg

SEQ ID NO: 1325084 - DNA, 15 bp, Homo sapiens
ttgtcatcgtgcttt

SEQ ID NO: 1325085 - DNA, 15 bp, Homo sapiens
gttgtcatcgtgctt

SEQ ID NO: 1325086 - DNA, 15 bp, Homo sapiens
tgttgtcatcgtgct

SEQ ID NO: 1325087 - DNA, 15 bp, Homo sapiens
ttgttgtcatcgtgc

SEQ ID NO: 1325088 - DNA, 15 bp, Homo sapiens
tttgttgtcatcgtg

SEQ ID NO: 1325089 - DNA, 15 bp, Homo sapiens
ttttgttgtcatcgt

SEQ ID NO: 1325090 - DNA, 15 bp, Homo sapiens
gttttgttgtcatcg

SEQ ID NO: 1325091 - DNA, 15 bp, Homo sapiens
ggttttgttgtcatc

SEQ ID NO: 1325092 - DNA, 15 bp, Homo sapiens
cggttttgttgtcat

SEQ ID NO: 1325093 - DNA, 15 bp, Homo sapiens
gcggttttgttgtca

SEQ ID NO: 1325094 - DNA, 15 bp, Homo sapiens
tgcggttttgttgtc

SEQ ID NO: 1325095 - DNA, 15 bp, Homo sapiens
ttgcggttttgttgt

SEQ ID NO: 1325096 - DNA, 15 bp, Homo sapiens
cttgcggttttgttg

SEQ ID NO: 1325097 - DNA, 15 bp, Homo sapiens
tcttgcggttttgtt

SEQ ID NO: 1325098 - DNA, 15 bp, Homo sapiens
atcttgcggttttgt

SEQ ID NO: 1325099 - DNA, 15 bp, Homo sapiens
gatcttgcggttttg

SEQ ID NO: 1325100 - DNA, 15 bp, Homo sapiens
agatcttgcggtttt

SEQ ID NO: 1325101 - DNA, 15 bp, Homo sapiens
aagatcttgcggttt

SEQ ID NO: 1325102 - DNA, 15 bp, Homo sapiens
aaagatcttgcggtt

SEQ ID NO: 1325103 - DNA, 15 bp, Homo sapiens
caaagatcttgcggt

SEQ ID NO: 1325104 - DNA, 15 bp, Homo sapiens
acaaagatcttgcgg

SEQ ID NO: 1325105 - DNA, 15 bp, Homo sapiens
aacaaagatcttgcg

SEQ ID NO: 1325106 - DNA, 15 bp, Homo sapiens
aaacaaagatcttgc

SEQ ID NO: 1325107 - DNA, 15 bp, Homo sapiens
taaacaaagatcttg

SEQ ID NO: 1325108 - DNA, 15 bp, Homo sapiens
ataaacaaagatctt

SEQ ID NO: 1325109 - DNA, 15 bp, Homo sapiens
aataaacaaagatct

SEQ ID NO: 1325110 - DNA, 15 bp, Homo sapiens
gaataaacaaagatc

SEQ ID NO: 1325111 - DNA, 15 bp, Homo sapiens
ggaataaacaaagat

SEQ ID NO: 1325112 - DNA, 15 bp, Homo sapiens
aggaataaacaaaga

SEQ ID NO: 1325113 - DNA, 15 bp, Homo sapiens
gaggaataaacaaag

SEQ ID NO: 1325114 - DNA, 15 bp, Homo sapiens
ggaggaataaacaaa

SEQ ID NO: 1325115 - DNA, 15 bp, Homo sapiens
aggaggaataaacaa

SEQ ID NO: 1325116 - DNA, 15 bp, Homo sapiens
caggaggaataaaca

SEQ ID NO: 1325117 - DNA, 15 bp, Homo sapiens
ccaggaggaataaac

SEQ ID NO: 1325118 - DNA, 15 bp, Homo sapiens
gccaggaggaataaa

SEQ ID NO: 1325119 - DNA, 15 bp, Homo sapiens
cgccaggaggaataa

SEQ ID NO: 1325120 - DNA, 15 bp, Homo sapiens
gcgccaggaggaata

SEQ ID NO: 1325121 - DNA, 15 bp, Homo sapiens
agcgccaggaggaat

SEQ ID NO: 1325122 - DNA, 15 bp, Homo sapiens
tagcgccaggaggaa

SEQ ID NO: 1325123 - DNA, 15 bp, Homo sapiens
ctagcgccaggagga

SEQ ID NO: 1325124 - DNA, 15 bp, Homo sapiens
tctagcgccaggagg

SEQ ID NO: 1325125 - DNA, 15 bp, Homo sapiens
ctctagcgccaggag

SEQ ID NO: 1325126 - DNA, 15 bp, Homo sapiens
tctctagcgccagga

SEQ ID NO: 1325127 - DNA, 15 bp, Homo sapiens
atctctagcgccagg

SEQ ID NO: 1325128 - DNA, 15 bp, Homo sapiens
catctctagcgccag

SEQ ID NO: 1325129 - DNA, 15 bp, Homo sapiens
gcatctctagcgcca

SEQ ID NO: 1325130 - DNA, 15 bp, Homo sapiens
cgcatctctagcgcc

SEQ ID NO: 1325131 - DNA, 15 bp, Homo sapiens
ccgcatctctagcgc

SEQ ID NO: 1325132 - DNA, 15 bp, Homo sapiens
gccgcatctctagcg

SEQ ID NO: 1325133 - DNA, 15 bp, Homo sapiens
tgccgcatctctagc

SEQ ID NO: 1325134 - DNA, 15 bp, Homo sapiens
ctgccgcatctctag

SEQ ID NO: 1325135 - DNA, 15 bp, Homo sapiens
actgccgcatctcta

SEQ ID NO: 1325136 - DNA, 15 bp, Homo sapiens
cactgccgcatctct

SEQ ID NO: 1325137 - DNA, 15 bp, Homo sapiens
tcactgccgcatctc

SEQ ID NO: 1325138 - DNA, 15 bp, Homo sapiens
ttcactgccgcatct

SEQ ID NO: 1325139 - DNA, 15 bp, Homo sapiens
attcactgccgcatc

SEQ ID NO: 1325140 - DNA, 15 bp, Homo sapiens
tattcactgccgcat

SEQ ID NO: 1325141 - DNA, 15 bp, Homo sapiens
ttattcactgccgca

SEQ ID NO: 1325142 - DNA, 15 bp, Homo sapiens
cttattcactgccgc

SEQ ID NO: 1325143 - DNA, 15 bp, Homo sapiens
tcttattcactgccg

SEQ ID NO: 1325144 - DNA, 15 bp, Homo sapiens
ttcttattcactgcc

SEQ ID NO: 1325145 - DNA, 15 bp, Homo sapiens
gttcttattcactgc

SEQ ID NO: 1325146 - DNA, 15 bp, Homo sapiens
cgttcttattcactg

SEQ ID NO: 1325147 - DNA, 15 bp, Homo sapiens
ccgttcttattcact

SEQ ID NO: 1325148 - DNA, 15 bp, Homo sapiens
accgttcttattcac

SEQ ID NO: 1325149 - DNA, 15 bp, Homo sapiens
aaccgttcttattca

SEQ ID NO: 1325150 - DNA, 15 bp, Homo sapiens
gaaccgttcttattc

SEQ ID NO: 1325151 - DNA, 15 bp, Homo sapiens
ggaaccgttcttatt

SEQ ID NO: 1325152 - DNA, 15 bp, Homo sapiens
tggaaccgttcttat

SEQ ID NO: 1325153 - DNA, 15 bp, Homo sapiens
ctggaaccgttctta

SEQ ID NO: 1325154 - DNA, 15 bp, Homo sapiens
actggaaccgttctt

SEQ ID NO: 1325155 - DNA, 15 bp, Homo sapiens
gactggaaccgttct

SEQ ID NO: 1325156 - DNA, 15 bp, Homo sapiens
ggactggaaccgttc

SEQ ID NO: 1325157 - DNA, 15 bp, Homo sapiens
gggactggaaccgtt

SEQ ID NO: 1325158 - DNA, 15 bp, Homo sapiens
agggactggaaccgt

SEQ ID NO: 1325159 - DNA, 15 bp, Homo sapiens
cagggactggaaccg

SEQ ID NO: 1325160 - DNA, 15 bp, Homo sapiens
tcagggactggaacc

SEQ ID NO: 1325161 - DNA, 15 bp, Homo sapiens
atcagggactggaac

SEQ ID NO: 1325162 - DNA, 15 bp, Homo sapiens
aatcagggactggaa

SEQ ID NO: 1325163 - DNA, 15 bp, Homo sapiens
aaatcagggactgga

SEQ ID NO: 1325164 - DNA, 15 bp, Homo sapiens
aaaatcagggactgg

SEQ ID NO: 1325165 - DNA, 15 bp, Homo sapiens
taaaatcagggactg

SEQ ID NO: 1325166 - DNA, 15 bp, Homo sapiens
ctaaaatcagggact

SEQ ID NO: 1325167 - DNA, 15 bp, Homo sapiens
tctaaaatcagggac

SEQ ID NO: 1325168 - DNA, 15 bp, Homo sapiens
ctctaaaatcaggga

SEQ ID NO: 1325169 - DNA, 15 bp, Homo sapiens
tctctaaaatcaggg

SEQ ID NO: 1325170 - DNA, 15 bp, Homo sapiens
ctctctaaaatcagg

SEQ ID NO: 1325171 - DNA, 15 bp, Homo sapiens
gctctctaaaatcag

SEQ ID NO: 1325172 - DNA, 15 bp, Homo sapiens
agctctctaaaatca

SEQ ID NO: 1325173 - DNA, 15 bp, Homo sapiens
aagctctctaaaatc

SEQ ID NO: 1325174 - DNA, 15 bp, Homo sapiens
taagctctctaaaat

SEQ ID NO: 1325175 - DNA, 15 bp, Homo sapiens
gtaagctctctaaaa

SEQ ID NO: 1325176 - DNA, 15 bp, Homo sapiens
ggtaagctctctaaa

SEQ ID NO: 1325177 - DNA, 15 bp, Homo sapiens
gggtaagctctctaa

SEQ ID NO: 1325178 - DNA, 15 bp, Homo sapiens
agggtaagctctcta

SEQ ID NO: 1325179 - DNA, 15 bp, Homo sapiens
aagggtaagctctct

SEQ ID NO: 1325180 - DNA, 15 bp, Homo sapiens
caagggtaagctctc

SEQ ID NO: 1325181 - DNA, 15 bp, Homo sapiens
ccaagggtaagctct

SEQ ID NO: 1325182 - DNA, 15 bp, Homo sapiens
cccaagggtaagctc

SEQ ID NO: 1325183 - DNA, 15 bp, Homo sapiens
acccaagggtaagct

SEQ ID NO: 1325184 - DNA, 15 bp, Homo sapiens
aacccaagggtaagc

SEQ ID NO: 1325185 - DNA, 15 bp, Homo sapiens
taacccaagggtaag

SEQ ID NO: 1325186 - DNA, 15 bp, Homo sapiens
ctaacccaagggtaa

SEQ ID NO: 1325187 - DNA, 15 bp, Homo sapiens
cctaacccaagggta

SEQ ID NO: 1325188 - DNA, 15 bp, Homo sapiens
tcctaacccaagggt

SEQ ID NO: 1325189 - DNA, 15 bp, Homo sapiens
ctcctaacccaaggg

SEQ ID NO: 1325190 - DNA, 15 bp, Homo sapiens
tctcctaacccaagg

SEQ ID NO: 1325191 - DNA, 15 bp, Homo sapiens
gtctcctaacccaag

SEQ ID NO: 1325192 - DNA, 15 bp, Homo sapiens
tgtctcctaacccaa

SEQ ID NO: 1325193 - DNA, 15 bp, Homo sapiens
atgtctcctaaccca

SEQ ID NO: 1325194 - DNA, 15 bp, Homo sapiens
catgtctcctaaccc

SEQ ID NO: 1325195 - DNA, 15 bp, Homo sapiens
acatgtctcctaacc

SEQ ID NO: 1325196 - DNA, 15 bp, Homo sapiens
aacatgtctcctaac

SEQ ID NO: 1325197 - DNA, 15 bp, Homo sapiens
taacatgtctcctaa

SEQ ID NO: 1325198 - DNA, 15 bp, Homo sapiens
ttaacatgtctccta

SEQ ID NO: 1325199 - DNA, 15 bp, Homo sapiens
attaacatgtctcct

SEQ ID NO: 1325200 - DNA, 15 bp, Homo sapiens
cattaacatgtctcc

SEQ ID NO: 1325201 - DNA, 15 bp, Homo sapiens
ccattaacatgtctc

SEQ ID NO: 1325202 - DNA, 15 bp, Homo sapiens
tccattaacatgtct

SEQ ID NO: 1325203 - DNA, 15 bp, Homo sapiens
ctccattaacatgtc

SEQ ID NO: 1325204 - DNA, 15 bp, Homo sapiens
cctccattaacatgt

SEQ ID NO: 1325205 - DNA, 15 bp, Homo sapiens
tcctccattaacatg

SEQ ID NO: 1325206 - DNA, 15 bp, Homo sapiens
atcctccattaacat

SEQ ID NO: 1325207 - DNA, 15 bp, Homo sapiens
catcctccattaaca

SEQ ID NO: 1325208 - DNA, 15 bp, Homo sapiens
gcatcctccattaac

SEQ ID NO: 1325209 - DNA, 15 bp, Homo sapiens
tgcatcctccattaa

SEQ ID NO: 1325210 - DNA, 15 bp, Homo sapiens
gtgcatcctccatta

SEQ ID NO: 1325211 - DNA, 15 bp, Homo sapiens
tgtgcatcctccatt

SEQ ID NO: 1325212 - DNA, 15 bp, Homo sapiens
atgtgcatcctccat

SEQ ID NO: 1325213 - DNA, 15 bp, Homo sapiens
tattcatgtgcatcc

SEQ ID NO: 1325214 - DNA, 15 bp, Homo sapiens
ttattcatgtgcatc

SEQ ID NO: 1325215 - DNA, 15 bp, Homo sapiens
tttattcatgtgcat

SEQ ID NO: 1325216 - DNA, 15 bp, Homo sapiens
atttattcatgtgca

SEQ ID NO: 1325217 - DNA, 15 bp, Homo sapiens
catttattcatgtgc

SEQ ID NO: 1325218 - DNA, 15 bp, Homo sapiens
acatttattcatgtg

SEQ ID NO: 1325219 - DNA, 15 bp, Homo sapiens
aacatttattcatgt

SEQ ID NO: 1325220 - DNA, 15 bp, Homo sapiens
taacatttattcatg

SEQ ID NO: 1325221 - DNA, 15 bp, Homo sapiens
ttaacatttattcat

SEQ ID NO: 1325222 - DNA, 15 bp, Homo sapiens
tttaacatttattca

SEQ ID NO: 1325223 - DNA, 15 bp, Homo sapiens
atttaacatttattc

SEQ ID NO: 1325224 - DNA, 15 bp, Homo sapiens
aatttaacatttatt

SEQ ID NO: 1325225 - DNA, 15 bp, Homo sapiens
taatttaacatttat

SEQ ID NO: 1325226 - DNA, 15 bp, Homo sapiens
gtaatttaacattta

SEQ ID NO: 1325227 - DNA, 15 bp, Homo sapiens
tgtaatttaacattt

SEQ ID NO: 1325228 - DNA, 15 bp, Homo sapiens
ctgtaatttaacatt

SEQ ID NO: 1325229 - DNA, 15 bp, Homo sapiens
cctgtaatttaacat

SEQ ID NO: 1325230 - DNA, 15 bp, Homo sapiens
gcctgtaatttaaca

SEQ ID NO: 1325231 - DNA, 15 bp, Homo sapiens
cgcctgtaatttaac

SEQ ID NO: 1325232 - DNA, 15 bp, Homo sapiens
ccgcctgtaatttaa

SEQ ID NO: 1325233 - DNA, 15 bp, Homo sapiens
tccgcctgtaattta

SEQ ID NO: 1325234 - DNA, 15 bp, Homo sapiens
ctccgcctgtaattt

SEQ ID NO: 1325235 - DNA, 15 bp, Homo sapiens
cctccgcctgtaatt

SEQ ID NO: 1325236 - DNA, 15 bp, Homo sapiens
tcctccgcctgtaat

SEQ ID NO: 1325237 - DNA, 15 bp, Homo sapiens
ttcctccgcctgtaa

SEQ ID NO: 1325238 - DNA, 15 bp, Homo sapiens
cttcctccgcctgta

SEQ ID NO: 1325239 - DNA, 15 bp, Homo sapiens
acttcctccgcctgt

SEQ ID NO: 1325240 - DNA, 15 bp, Homo sapiens
cacttcctccgcctg

SEQ ID NO: 1325241 - DNA, 15 bp, Homo sapiens
acacttcctccgcct

SEQ ID NO: 1325242 - DNA, 15 bp, Homo sapiens
aacacttcctccgcc

SEQ ID NO: 1325243 - DNA, 15 bp, Homo sapiens
gaacacttcctccgc

SEQ ID NO: 1325244 - DNA, 15 bp, Homo sapiens
agaacacttcctccg

SEQ ID NO: 1325245 - DNA, 15 bp, Homo sapiens
cagaacacttcctcc

SEQ ID NO: 1325246 - DNA, 15 bp, Homo sapiens
gcagaacacttcctc

SEQ ID NO: 1325247 - DNA, 15 bp, Homo sapiens
tgcagaacacttcct

SEQ ID NO: 1325248 - DNA, 15 bp, Homo sapiens
ctgcagaacacttcc

SEQ ID NO: 1325249 - DNA, 15 bp, Homo sapiens
tctgcagaacacttc

SEQ ID NO: 1325250 - DNA, 15 bp, Homo sapiens
ttctgcagaacactt

SEQ ID NO: 1325251 - DNA, 15 bp, Homo sapiens
cttctgcagaacact

SEQ ID NO: 1325252 - DNA, 15 bp, Homo sapiens
tcttctgcagaacac

SEQ ID NO: 1325253 - DNA, 15 bp, Homo sapiens
ctcttctgcagaaca

SEQ ID NO: 1325254 - DNA, 15 bp, Homo sapiens
cctcttctgcagaac

SEQ ID NO: 1325255 - DNA, 15 bp, Homo sapiens
gcctcttctgcagaa

SEQ ID NO: 1325256 - DNA, 15 bp, Homo sapiens
tgcctcttctgcaga

SEQ ID NO: 1325257 - DNA, 15 bp, Homo sapiens
atgcctcttctgcag

SEQ ID NO: 1325258 - DNA, 15 bp, Homo sapiens
catgcctcttctgca

SEQ ID NO: 1325259 - DNA, 15 bp, Homo sapiens
gcatgcctcttctgc

SEQ ID NO: 1325260 - DNA, 15 bp, Homo sapiens
cgcatgcctcttctg

SEQ ID NO: 1325261 - DNA, 15 bp, Homo sapiens
ccgcatgcctcttct

SEQ ID NO: 1325262 - DNA, 15 bp, Homo sapiens
accgcatgcctcttc

SEQ ID NO: 1325263 - DNA, 15 bp, Homo sapiens
caccgcatgcctctt

SEQ ID NO: 1325264 - DNA, 15 bp, Homo sapiens
gcaccgcatgcctct

SEQ ID NO: 1325265 - DNA, 15 bp, Homo sapiens
agcaccgcatgcctc

SEQ ID NO: 1325266 - DNA, 15 bp, Homo sapiens
gagcaccgcatgcct

SEQ ID NO: 1325267 - DNA, 15 bp, Homo sapiens
ggagcaccgcatgcc

SEQ ID NO: 1325268 - DNA, 15 bp, Homo sapiens
gggagcaccgcatgc

SEQ ID NO: 1325269 - DNA, 15 bp, Homo sapiens
tgggagcaccgcatg

SEQ ID NO: 1325270 - DNA, 15 bp, Homo sapiens
ctgggagcaccgcat

SEQ ID NO: 1325271 - DNA, 15 bp, Homo sapiens
gctgggagcaccgca

SEQ ID NO: 1325272 - DNA, 15 bp, Homo sapiens
tgctgggagcaccgc

SEQ ID NO: 1325273 - DNA, 15 bp, Homo sapiens
atgctgggagcaccg

SEQ ID NO: 1325274 - DNA, 15 bp, Homo sapiens
catgctgggagcacc

SEQ ID NO: 1325275 - DNA, 15 bp, Homo sapiens
gcatgctgggagcac

SEQ ID NO: 1325276 - DNA, 15 bp, Homo sapiens
cgcatgctgggagca

SEQ ID NO: 1325277 - DNA, 15 bp, Homo sapiens
ccgcatgctgggagc

SEQ ID NO: 1325278 - DNA, 15 bp, Homo sapiens
tccgcatgctgggag

SEQ ID NO: 1325279 - DNA, 15 bp, Homo sapiens
ttccgcatgctggga

SEQ ID NO: 1325280 - DNA, 15 bp, Homo sapiens
cttccgcatgctggg

SEQ ID NO: 1325281 - DNA, 15 bp, Homo sapiens
gcttccgcatgctgg

SEQ ID NO: 1325282 - DNA, 15 bp, Homo sapiens
tgcttccgcatgctg

SEQ ID NO: 1325283 - DNA, 15 bp, Homo sapiens
ctgcttccgcatgct

SEQ ID NO: 1325284 - DNA, 15 bp, Homo sapiens
tctgcttccgcatgc

SEQ ID NO: 1325285 - DNA, 15 bp, Homo sapiens
ctctgcttccgcatg

SEQ ID NO: 1325286 - DNA, 15 bp, Homo sapiens
gctctgcttccgcat

SEQ ID NO: 1325287 - DNA, 15 bp, Homo sapiens
agctctgcttccgca

SEQ ID NO: 1325288 - DNA, 15 bp, Homo sapiens
aagctctgcttccgc

SEQ ID NO: 1325289 - DNA, 15 bp, Homo sapiens
gaagctctgcttccg

SEQ ID NO: 1325290 - DNA, 15 bp, Homo sapiens
ggaagctctgcttcc

SEQ ID NO: 1325291 - DNA, 15 bp, Homo sapiens
cggaagctctgcttc

SEQ ID NO: 1325292 - DNA, 15 bp, Homo sapiens
gcggaagctctgctt

SEQ ID NO: 1325293 - DNA, 15 bp, Homo sapiens
ggcggaagctctgct

SEQ ID NO: 1325294 - DNA, 15 bp, Homo sapiens
aggcggaagctctgc

SEQ ID NO: 1325295 - DNA, 15 bp, Homo sapiens
caggcggaagctctg

SEQ ID NO: 1325296 - DNA, 15 bp, Homo sapiens
ccaggcggaagctct

SEQ ID NO: 1325297 - DNA, 15 bp, Homo sapiens
gccaggcggaagctc

SEQ ID NO: 1325298 - DNA, 15 bp, Homo sapiens
ggccaggcggaagct

SEQ ID NO: 1325299 - DNA, 15 bp, Homo sapiens
gggccaggcggaagc

SEQ ID NO: 1325300 - DNA, 15 bp, Homo sapiens
tgggccaggcggaag

SEQ ID NO: 1325301 - DNA, 15 bp, Homo sapiens
ctgggccaggcggaa

SEQ ID NO: 1325302 - DNA, 15 bp, Homo sapiens
cctgggccaggcgga

SEQ ID NO: 1325303 - DNA, 15 bp, Homo sapiens
tcctgggccaggcgg

SEQ ID NO: 1325304 - DNA, 15 bp, Homo sapiens
ctcctgggccaggcg

SEQ ID NO: 1325305 - DNA, 15 bp, Homo sapiens
cctcctgggccaggc

SEQ ID NO: 1325306 - DNA, 15 bp, Homo sapiens
gcctcctgggccagg

SEQ ID NO: 1325307 - DNA, 15 bp, Homo sapiens
cgcctcctgggccag

SEQ ID NO: 1325308 - DNA, 15 bp, Homo sapiens
gcgcctcctgggcca

SEQ ID NO: 1325309 - DNA, 15 bp, Homo sapiens
cgcgcctcctgggcc

SEQ ID NO: 1325310 - DNA, 15 bp, Homo sapiens
ccgcgcctcctgggc

SEQ ID NO: 1325311 - DNA, 15 bp, Homo sapiens
tccgcgcctcctggg

SEQ ID NO: 1325312 - DNA, 15 bp, Homo sapiens
ctccgcgcctcctgg

SEQ ID NO: 1325313 - DNA, 15 bp, Homo sapiens
tctccgcgcctcctg

SEQ ID NO: 1325314 - DNA, 15 bp, Homo sapiens
ctctccgcgcctcct

SEQ ID NO: 1325315 - DNA, 15 bp, Homo sapiens
actctccgcgcctcc

SEQ ID NO: 1325316 - DNA, 15 bp, Homo sapiens
cactctccgcgcctc

SEQ ID NO: 1325317 - DNA, 15 bp, Homo sapiens
ccactctccgcgcct

SEQ ID NO: 1325318 - DNA, 15 bp, Homo sapiens
gccactctccgcgcc

SEQ ID NO: 1325319 - DNA, 15 bp, Homo sapiens
agccactctccgcgc

SEQ ID NO: 1325320 - DNA, 15 bp, Homo sapiens
tagccactctccgcg

SEQ ID NO: 1325321 - DNA, 15 bp, Homo sapiens
ttagccactctccgc

SEQ ID NO: 1325322 - DNA, 15 bp, Homo sapiens
cttagccactctccg

SEQ ID NO: 1325323 - DNA, 15 bp, Homo sapiens
ccttagccactctcc

SEQ ID NO: 1325324 - DNA, 15 bp, Homo sapiens
cccttagccactctc

SEQ ID NO: 1325325 - DNA, 15 bp, Homo sapiens
ccccttagccactct

SEQ ID NO: 1325326 - DNA, 15 bp, Homo sapiens
gccccttagccactc

SEQ ID NO: 1325327 - DNA, 15 bp, Homo sapiens
agccccttagccact

SEQ ID NO: 1325328 - DNA, 15 bp, Homo sapiens
cagccccttagccac

SEQ ID NO: 1325329 - DNA, 15 bp, Homo sapiens
ccagccccttagcca

SEQ ID NO: 1325330 - DNA, 15 bp, Homo sapiens
cccagccccttagcc

SEQ ID NO: 1325331 - DNA, 15 bp, Homo sapiens
ccccagccccttagc

SEQ ID NO: 1325332 - DNA, 15 bp, Homo sapiens
cccccagccccttag

SEQ ID NO: 1325333 - DNA, 15 bp, Homo sapiens
gcccccagcccctta

SEQ ID NO: 1325334 - DNA, 15 bp, Homo sapiens
cgcccccagcccctt

SEQ ID NO: 1325335 - DNA, 15 bp, Homo sapiens
tcgcccccagcccct

SEQ ID NO: 1325336 - DNA, 15 bp, Homo sapiens
ctcgcccccagcccc

SEQ ID NO: 1325337 - DNA, 15 bp, Homo sapiens
cctcgcccccagccc

SEQ ID NO: 1325338 - DNA, 15 bp, Homo sapiens
ccctcgcccccagcc

SEQ ID NO: 1325339 - DNA, 15 bp, Homo sapiens
tccctcgcccccagc

SEQ ID NO: 1325340 - DNA, 15 bp, Homo sapiens
ttccctcgcccccag

SEQ ID NO: 1325341 - DNA, 15 bp, Homo sapiens
cttccctcgccccca

SEQ ID NO: 1325342 - DNA, 15 bp, Homo sapiens
ccttccctcgccccc

SEQ ID NO: 1325343 - DNA, 15 bp, Homo sapiens
gccttccctcgcccc

SEQ ID NO: 1325344 - DNA, 15 bp, Homo sapiens
ggccttccctcgccc

SEQ ID NO: 1325345 - DNA, 15 bp, Homo sapiens
gggccttccctcgcc

SEQ ID NO: 1325346 - DNA, 15 bp, Homo sapiens
ggggccttccctcgc

SEQ ID NO: 1325347 - DNA, 15 bp, Homo sapiens
tggggccttccctcg

SEQ ID NO: 1325348 - DNA, 15 bp, Homo sapiens
ctggggccttccctc

SEQ ID NO: 1325349 - DNA, 15 bp, Homo sapiens
gctggggccttccct

SEQ ID NO: 1325350 - DNA, 15 bp, Homo sapiens
cgctggggccttccc

SEQ ID NO: 1325351 - DNA, 15 bp, Homo sapiens
ccgctggggccttcc

SEQ ID NO: 1325352 - DNA, 15 bp, Homo sapiens
cccgctggggccttc

SEQ ID NO: 1325353 - DNA, 15 bp, Homo sapiens
ccccgctggggcctt

SEQ ID NO: 1325354 - DNA, 15 bp, Homo sapiens
tccccgctggggcct

SEQ ID NO: 1325355 - DNA, 15 bp, Homo sapiens
ctccccgctggggcc

SEQ ID NO: 1325356 - DNA, 15 bp, Homo sapiens
actccccgctggggc

SEQ ID NO: 1325357 - DNA, 15 bp, Homo sapiens
gactccccgctgggg

SEQ ID NO: 1325358 - DNA, 15 bp, Homo sapiens
ggactccccgctggg

SEQ ID NO: 1325359 - DNA, 15 bp, Homo sapiens
aggactccccgctgg

SEQ ID NO: 1325360 - DNA, 15 bp, Homo sapiens
caggactccccgctg

SEQ ID NO: 1325361 - DNA, 15 bp, Homo sapiens
acaggactccccgct

SEQ ID NO: 1325362 - DNA, 15 bp, Homo sapiens
cacaggactccccgc

SEQ ID NO: 1325363 - DNA, 15 bp, Homo sapiens
ccacaggactccccg

SEQ ID NO: 1325364 - DNA, 15 bp, Homo sapiens
tccacaggactcccc

SEQ ID NO: 1325365 - DNA, 15 bp, Homo sapiens
ttccacaggactccc

SEQ ID NO: 1325366 - DNA, 15 bp, Homo sapiens
cttccacaggactcc

SEQ ID NO: 1325367 - DNA, 15 bp, Homo sapiens
tcttccacaggactc

SEQ ID NO: 1325368 - DNA, 15 bp, Homo sapiens
ctcttccacaggact

SEQ ID NO: 1325369 - DNA, 15 bp, Homo sapiens
cctcttccacaggac

SEQ ID NO: 1325370 - DNA, 15 bp, Homo sapiens
tcctcttccacagga

SEQ ID NO: 1325371 - DNA, 15 bp, Homo sapiens
ttcctcttccacagg

SEQ ID NO: 1325372 - DNA, 15 bp, Homo sapiens
cttcctcttccacag

SEQ ID NO: 1325373 - DNA, 15 bp, Homo sapiens
tcttcctcttccaca

SEQ ID NO: 1325374 - DNA, 15 bp, Homo sapiens
ctcttcctcttccac

SEQ ID NO: 1325375 - DNA, 15 bp, Homo sapiens
gctcttcctcttcca

SEQ ID NO: 1325376 - DNA, 15 bp, Homo sapiens
agctcttcctcttcc

SEQ ID NO: 1325377 - DNA, 15 bp, Homo sapiens
cagctcttcctcttc

SEQ ID NO: 1325378 - DNA, 15 bp, Homo sapiens
ccagctcttcctctt

SEQ ID NO: 1325379 - DNA, 15 bp, Homo sapiens
gccagctcttcctct

SEQ ID NO: 1325380 - DNA, 15 bp, Homo sapiens
ggccagctcttcctc

SEQ ID NO: 1325381 - DNA, 15 bp, Homo sapiens
tggccagctcttcct

SEQ ID NO: 1325382 - DNA, 15 bp, Homo sapiens
ctggccagctcttcc

SEQ ID NO: 1325383 - DNA, 15 bp, Homo sapiens
cctggccagctcttc

SEQ ID NO: 1325384 - DNA, 15 bp, Homo sapiens
tcctggccagctctt

SEQ ID NO: 1325385 - DNA, 15 bp, Homo sapiens
ctcctggccagctct

SEQ ID NO: 1325386 - DNA, 15 bp, Homo sapiens
cctcctggccagctc

SEQ ID NO: 1325387 - DNA, 15 bp, Homo sapiens
gcctcctggccagct

SEQ ID NO: 1325388 - DNA, 15 bp, Homo sapiens
tgcctcctggccagc

SEQ ID NO: 1325389 - DNA, 15 bp, Homo sapiens
ttgcctcctggccag

SEQ ID NO: 1325390 - DNA, 15 bp, Homo sapiens
cttgcctcctggcca

SEQ ID NO: 1325391 - DNA, 15 bp, Homo sapiens
ccttgcctcctggcc

SEQ ID NO: 1325392 - DNA, 15 bp, Homo sapiens
tccttgcctcctggc

SEQ ID NO: 1325393 - DNA, 15 bp, Homo sapiens
gtccttgcctcctgg

SEQ ID NO: 1325394 - DNA, 15 bp, Homo sapiens
tgtccttgcctcctg

SEQ ID NO: 1325395 - DNA, 15 bp, Homo sapiens
ctgtccttgcctcct

SEQ ID NO: 1325396 - DNA, 15 bp, Homo sapiens
tctgtccttgcctcc

SEQ ID NO: 1325397 - DNA, 15 bp, Homo sapiens
ctctgtccttgcctc

SEQ ID NO: 1325398 - DNA, 15 bp, Homo sapiens
cctctgtccttgcct

SEQ ID NO: 1325399 - DNA, 15 bp, Homo sapiens
tcctctgtccttgcc

SEQ ID NO: 1325400 - DNA, 15 bp, Homo sapiens
ctcctctgtccttgc

SEQ ID NO: 1325401 - DNA, 15 bp, Homo sapiens
tctcctctgtccttg

SEQ ID NO: 1325402 - DNA, 15 bp, Homo sapiens
atgtctcctctgtcc

SEQ ID NO: 1325403 - DNA, 15 bp, Homo sapiens
catgtctcctctgtc

SEQ ID NO: 1325404 - DNA, 15 bp, Homo sapiens
acatgtctcctctgt

SEQ ID NO: 1325405 - DNA, 15 bp, Homo sapiens
cacatgtctcctctg

SEQ ID NO: 1325406 - DNA, 15 bp, Homo sapiens
gcacatgtctcctct

SEQ ID NO: 1325407 - DNA, 15 bp, Homo sapiens
ggcacatgtctcctc

SEQ ID NO: 1325408 - DNA, 15 bp, Homo sapiens
tggcacatgtctcct

SEQ ID NO: 1325409 - DNA, 15 bp, Homo sapiens
atggcacatgtctcc

SEQ ID NO: 1325410 - DNA, 15 bp, Homo sapiens
catggcacatgtctc

SEQ ID NO: 1325411 - DNA, 15 bp, Homo sapiens
ccatggcacatgtct

SEQ ID NO: 1325412 - DNA, 15 bp, Homo sapiens
tccatggcacatgtc

SEQ ID NO: 1325413 - DNA, 15 bp, Homo sapiens
ttccatggcacatgt

SEQ ID NO: 1325414 - DNA, 15 bp, Homo sapiens
cttccatggcacatg

SEQ ID NO: 1325415 - DNA, 15 bp, Homo sapiens
ccttccatggcacat

SEQ ID NO: 1325416 - DNA, 15 bp, Homo sapiens
tccttccatggcaca

SEQ ID NO: 1325417 - DNA, 15 bp, Homo sapiens
ctccttccatggcac

SEQ ID NO: 1325418 - DNA, 15 bp, Homo sapiens
tctccttccatggca

SEQ ID NO: 1325419 - DNA, 15 bp, Homo sapiens
ctctccttccatggc

SEQ ID NO: 1325420 - DNA, 15 bp, Homo sapiens
cctctccttccatgg

SEQ ID NO: 1325421 - DNA, 15 bp, Homo sapiens
ccctctccttccatg

SEQ ID NO: 1325422 - DNA, 15 bp, Homo sapiens
gccctctccttccat

SEQ ID NO: 1325423 - DNA, 15 bp, Homo sapiens
tgccctctccttcca

SEQ ID NO: 1325424 - DNA, 15 bp, Homo sapiens
gtgccctctccttcc

SEQ ID NO: 1325425 - DNA, 15 bp, Homo sapiens
tgtgccctctccttc

SEQ ID NO: 1325426 - DNA, 15 bp, Homo sapiens
atgtgccctctcctt

SEQ ID NO: 1325427 - DNA, 15 bp, Homo sapiens
catgtgccctctcct

SEQ ID NO: 1325428 - DNA, 15 bp, Homo sapiens
gcatgtgccctctcc

SEQ ID NO: 1325429 - DNA, 15 bp, Homo sapiens
agcatgtgccctctc

SEQ ID NO: 1325430 - DNA, 15 bp, Homo sapiens
aagcatgtgccctct

SEQ ID NO: 1325431 - DNA, 15 bp, Homo sapiens
gaagcatgtgccctc

SEQ ID NO: 1325432 - DNA, 15 bp, Homo sapiens
ggaagcatgtgccct

SEQ ID NO: 1325433 - DNA, 15 bp, Homo sapiens
aggaagcatgtgccc

SEQ ID NO: 1325434 - DNA, 15 bp, Homo sapiens
aaggaagcatgtgcc

SEQ ID NO: 1325435 - DNA, 15 bp, Homo sapiens
aaaggaagcatgtgc

SEQ ID NO: 1325436 - DNA, 15 bp, Homo sapiens
taaaggaagcatgtg

SEQ ID NO: 1325437 - DNA, 15 bp, Homo sapiens
ataaaggaagcatgt

SEQ ID NO: 1325438 - DNA, 15 bp, Homo sapiens
cataaaggaagcatg

SEQ ID NO: 1325439 - DNA, 15 bp, Homo sapiens
acataaaggaagcat

SEQ ID NO: 1325440 - DNA, 15 bp, Homo sapiens
cacataaaggaagca

SEQ ID NO: 1325441 - DNA, 15 bp, Homo sapiens
acacataaaggaagc

SEQ ID NO: 1325442 - DNA, 15 bp, Homo sapiens
cacacataaaggaag

SEQ ID NO: 1325443 - DNA, 15 bp, Homo sapiens
acacacataaaggaa

SEQ ID NO: 1325444 - DNA, 15 bp, Homo sapiens
aacacacataaagga

SEQ ID NO: 1325445 - DNA, 15 bp, Homo sapiens
caacacacataaagg

SEQ ID NO: 1325446 - DNA, 15 bp, Homo sapiens
tcaacacacataaag

SEQ ID NO: 1325447 - DNA, 15 bp, Homo sapiens
ttcaacacacataaa

SEQ ID NO: 1325448 - DNA, 15 bp, Homo sapiens
tttcaacacacataa

SEQ ID NO: 1325449 - DNA, 15 bp, Homo sapiens
ttttcaacacacata

SEQ ID NO: 1325450 - DNA, 15 bp, Homo sapiens
cttttcaacacacat

SEQ ID NO: 1325451 - DNA, 15 bp, Homo sapiens
ccttttcaacacaca

SEQ ID NO: 1325452 - DNA, 15 bp, Homo sapiens
gccttttcaacacac

SEQ ID NO: 1325453 - DNA, 15 bp, Homo sapiens
ggccttttcaacaca

SEQ ID NO: 1325454 - DNA, 15 bp, Homo sapiens
tggccttttcaacac

SEQ ID NO: 1325455 - DNA, 15 bp, Homo sapiens
gtggccttttcaaca

SEQ ID NO: 1325456 - DNA, 15 bp, Homo sapiens
ggtggccttttcaac

SEQ ID NO: 1325457 - DNA, 15 bp, Homo sapiens
tggtggccttttcaa

SEQ ID NO: 1325458 - DNA, 15 bp, Homo sapiens
gtggtggccttttca

SEQ ID NO: 1325459 - DNA, 15 bp, Homo sapiens
ggtggtggccttttc

SEQ ID NO: 1325460 - DNA, 15 bp, Homo sapiens
tggtggtggcctttt

SEQ ID NO: 1325461 - DNA, 15 bp, Homo sapiens
gtggtggtggccttt

SEQ ID NO: 1325462 - DNA, 15 bp, Homo sapiens
agtggtggtggcctt

SEQ ID NO: 1325463 - DNA, 15 bp, Homo sapiens
gagtggtggtggcct

SEQ ID NO: 1325464 - DNA, 15 bp, Homo sapiens
agagtggtggtggcc

SEQ ID NO: 1325465 - DNA, 15 bp, Homo sapiens
aagagtggtggtggc

SEQ ID NO: 1325466 - DNA, 15 bp, Homo sapiens
taagagtggtggtgg

SEQ ID NO: 1325467 - DNA, 15 bp, Homo sapiens
gtaagagtggtggtg

SEQ ID NO: 1325468 - DNA, 15 bp, Homo sapiens
tgtaagagtggtggt

SEQ ID NO: 1325469 - DNA, 15 bp, Homo sapiens
ctgtaagagtggtgg

SEQ ID NO: 1325470 - DNA, 15 bp, Homo sapiens
gctgtaagagtggtg

SEQ ID NO: 1325471 - DNA, 15 bp, Homo sapiens
tgctgtaagagtggt

SEQ ID NO: 1325472 - DNA, 15 bp, Homo sapiens
ttgctgtaagagtgg

SEQ ID NO: 1325473 - DNA, 15 bp, Homo sapiens
gttgctgtaagagtg

SEQ ID NO: 1325474 - DNA, 15 bp, Homo sapiens
agttgctgtaagagt

SEQ ID NO: 1325475 - DNA, 15 bp, Homo sapiens
gagttgctgtaagag

SEQ ID NO: 1325476 - DNA, 15 bp, Homo sapiens
agagttgctgtaaga

SEQ ID NO: 1325477 - DNA, 15 bp, Homo sapiens
gagagttgctgtaag

SEQ ID NO: 1325478 - DNA, 15 bp, Homo sapiens
agagagttgctgtaa

SEQ ID NO: 1325479 - DNA, 15 bp, Homo sapiens
gagagagttgctgta

SEQ ID NO: 1325480 - DNA, 15 bp, Homo sapiens
agagagagttgctgt

SEQ ID NO: 1325481 - DNA, 15 bp, Homo sapiens
cagagagagttgctg

SEQ ID NO: 1325482 - DNA, 15 bp, Homo sapiens
tcagagagagttgct

SEQ ID NO: 1325483 - DNA, 15 bp, Homo sapiens
ctcagagagagttgc

SEQ ID NO: 1325484 - DNA, 15 bp, Homo sapiens
gctcagagagagttg

SEQ ID NO: 1325485 - DNA, 15 bp, Homo sapiens
tgctcagagagagtt

SEQ ID NO: 1325486 - DNA, 15 bp, Homo sapiens
ctgctcagagagagt

SEQ ID NO: 1325487 - DNA, 15 bp, Homo sapiens
actgctcagagagag

SEQ ID NO: 1325488 - DNA, 15 bp, Homo sapiens
cactgctcagagaga

SEQ ID NO: 1325489 - DNA, 15 bp, Homo sapiens
tcactgctcagagag

SEQ ID NO: 1325490 - DNA, 15 bp, Homo sapiens
ctcactgctcagaga

SEQ ID NO: 1325491 - DNA, 15 bp, Homo sapiens
cctcactgctcagag

SEQ ID NO: 1325492 - DNA, 15 bp, Homo sapiens
gcctcactgctcaga

SEQ ID NO: 1325493 - DNA, 15 bp, Homo sapiens
agcctcactgctcag

SEQ ID NO: 1325494 - DNA, 15 bp, Homo sapiens
tagcctcactgctca

SEQ ID NO: 1325495 - DNA, 15 bp, Homo sapiens
ttagcctcactgctc

SEQ ID NO: 1325496 - DNA, 15 bp, Homo sapiens
gttagcctcactgct

SEQ ID NO: 1325497 - DNA, 15 bp, Homo sapiens
tgttagcctcactgc

SEQ ID NO: 1325498 - DNA, 15 bp, Homo sapiens
gtgttagcctcactg

SEQ ID NO: 1325499 - DNA, 15 bp, Homo sapiens
agtgttagcctcact

SEQ ID NO: 1325500 - DNA, 15 bp, Homo sapiens
cagtgttagcctcac

SEQ ID NO: 1325501 - DNA, 15 bp, Homo sapiens
acagtgttagcctca

SEQ ID NO: 1325502 - DNA, 15 bp, Homo sapiens
tacagtgttagcctc

SEQ ID NO: 1325503 - DNA, 15 bp, Homo sapiens
gtacagtgttagcct

SEQ ID NO: 1325504 - DNA, 15 bp, Homo sapiens
ggtacagtgttagcc

SEQ ID NO: 1325505 - DNA, 15 bp, Homo sapiens
aggtacagtgttagc

SEQ ID NO: 1325506 - DNA, 15 bp, Homo sapiens
gaggtacagtgttag

SEQ ID NO: 1325507 - DNA, 15 bp, Homo sapiens
tgaggtacagtgtta

SEQ ID NO: 1325508 - DNA, 15 bp, Homo sapiens
atgaggtacagtgtt

SEQ ID NO: 1325509 - DNA, 15 bp, Homo sapiens
gatgaggtacagtgt

SEQ ID NO: 1325510 - DNA, 15 bp, Homo sapiens
agatgaggtacagtg

SEQ ID NO: 1325511 - DNA, 15 bp, Homo sapiens
aagatgaggtacagt

SEQ ID NO: 1325512 - DNA, 15 bp, Homo sapiens
gaagatgaggtacag

SEQ ID NO: 1325513 - DNA, 15 bp, Homo sapiens
agaagatgaggtaca

SEQ ID NO: 1325514 - DNA, 15 bp, Homo sapiens
gagaagatgaggtac

SEQ ID NO: 1325515 - DNA, 15 bp, Homo sapiens
ggagaagatgaggta

SEQ ID NO: 1325516 - DNA, 15 bp, Homo sapiens
gggagaagatgaggt

SEQ ID NO: 1325517 - DNA, 15 bp, Homo sapiens
agggagaagatgagg

SEQ ID NO: 1325518 - DNA, 15 bp, Homo sapiens
cagggagaagatgag

SEQ ID NO: 1325519 - DNA, 15 bp, Homo sapiens
gcagggagaagatga

SEQ ID NO: 1325520 - DNA, 15 bp, Homo sapiens
tgcagggagaagatg

SEQ ID NO: 1325521 - DNA, 15 bp, Homo sapiens
gtgcagggagaagat

SEQ ID NO: 1325522 - DNA, 15 bp, Homo sapiens
agtgcagggagaaga

SEQ ID NO: 1325523 - DNA, 15 bp, Homo sapiens
aagtgcagggagaag

SEQ ID NO: 1325524 - DNA, 15 bp, Homo sapiens
gaagtgcagggagaa

SEQ ID NO: 1325525 - DNA, 15 bp, Homo sapiens
ggaagtgcagggaga

SEQ ID NO: 1325526 - DNA, 15 bp, Homo sapiens
tggaagtgcagggag

SEQ ID NO: 1325527 - DNA, 15 bp, Homo sapiens
gtggaagtgcaggga

SEQ ID NO: 1325528 - DNA, 15 bp, Homo sapiens
tgtggaagtgcaggg

SEQ ID NO: 1325529 - DNA, 15 bp, Homo sapiens
atgtggaagtgcagg

SEQ ID NO: 1325530 - DNA, 15 bp, Homo sapiens
gatgtggaagtgcag

SEQ ID NO: 1325531 - DNA, 15 bp, Homo sapiens
tgatgtggaagtgca

SEQ ID NO: 1325532 - DNA, 15 bp, Homo sapiens
atgatgtggaagtgc

SEQ ID NO: 1325533 - DNA, 15 bp, Homo sapiens
catgatgtggaagtg

SEQ ID NO: 1325534 - DNA, 15 bp, Homo sapiens
gcatgatgtggaagt

SEQ ID NO: 1325535 - DNA, 15 bp, Homo sapiens
ggcatgatgtggaag

SEQ ID NO: 1325536 - DNA, 15 bp, Homo sapiens
tggcatgatgtggaa

SEQ ID NO: 1325537 - DNA, 15 bp, Homo sapiens
gtggcatgatgtgga

SEQ ID NO: 1325538 - DNA, 15 bp, Homo sapiens
agtggcatgatgtgg

SEQ ID NO: 1325539 - DNA, 15 bp, Homo sapiens
aagtggcatgatgtg

SEQ ID NO: 1325540 - DNA, 15 bp, Homo sapiens
aaagtggcatgatgt

SEQ ID NO: 1325541 - DNA, 15 bp, Homo sapiens
gaaagtggcatgatg

SEQ ID NO: 1325542 - DNA, 15 bp, Homo sapiens
ggaaagtggcatgat

SEQ ID NO: 1325543 - DNA, 15 bp, Homo sapiens
gggaaagtggcatga

SEQ ID NO: 1325544 - DNA, 15 bp, Homo sapiens
tgggaaagtggcatg

SEQ ID NO: 1325545 - DNA, 15 bp, Homo sapiens
gtgggaaagtggcat

SEQ ID NO: 1325546 - DNA, 15 bp, Homo sapiens
tgtgggaaagtggca

SEQ ID NO: 1325547 - DNA, 15 bp, Homo sapiens
ctgtgggaaagtggc

SEQ ID NO: 1325548 - DNA, 15 bp, Homo sapiens
tctgtgggaaagtgg

SEQ ID NO: 1325549 - DNA, 15 bp, Homo sapiens
ctctgtgggaaagtg

SEQ ID NO: 1325550 - DNA, 15 bp, Homo sapiens
gctctgtgggaaagt

SEQ ID NO: 1325551 - DNA, 15 bp, Homo sapiens
agctctgtgggaaag

SEQ ID NO: 1325552 - DNA, 15 bp, Homo sapiens
cagctctgtgggaaa

SEQ ID NO: 1325553 - DNA, 15 bp, Homo sapiens
ccagctctgtgggaa

SEQ ID NO: 1325554 - DNA, 15 bp, Homo sapiens
cccagctctgtggga

SEQ ID NO: 1325555 - DNA, 15 bp, Homo sapiens
tcccagctctgtggg

SEQ ID NO: 1325556 - DNA, 15 bp, Homo sapiens
atcccagctctgtgg

SEQ ID NO: 1325557 - DNA, 15 bp, Homo sapiens
catcccagctctgtg

SEQ ID NO: 1325558 - DNA, 15 bp, Homo sapiens
tcatcccagctctgt

SEQ ID NO: 1325559 - DNA, 15 bp, Homo sapiens
atcatcccagctctg

SEQ ID NO: 1325560 - DNA, 15 bp, Homo sapiens
aatcatcccagctct

SEQ ID NO: 1325561 - DNA, 15 bp, Homo sapiens
aaatcatcccagctc

SEQ ID NO: 1325562 - DNA, 15 bp, Homo sapiens
caaatcatcccagct

SEQ ID NO: 1325563 - DNA, 15 bp, Homo sapiens
gcaaatcatcccagc

SEQ ID NO: 1325564 - DNA, 15 bp, Homo sapiens
tgcaaatcatcccag

SEQ ID NO: 1325565 - DNA, 15 bp, Homo sapiens
gtgcaaatcatccca

SEQ ID NO: 1325566 - DNA, 15 bp, Homo sapiens
agtgcaaatcatccc

SEQ ID NO: 1325567 - DNA, 15 bp, Homo sapiens
tagtgcaaatcatcc

SEQ ID NO: 1325568 - DNA, 15 bp, Homo sapiens
ttagtgcaaatcatc

SEQ ID NO: 1325569 - DNA, 15 bp, Homo sapiens
cttagtgcaaatcat

SEQ ID NO: 1325570 - DNA, 15 bp, Homo sapiens
ccttagtgcaaatca

SEQ ID NO: 1325571 - DNA, 15 bp, Homo sapiens
tccttagtgcaaatc

SEQ ID NO: 1325572 - DNA, 15 bp, Homo sapiens
ttccttagtgcaaat

SEQ ID NO: 1325573 - DNA, 15 bp, Homo sapiens
tttccttagtgcaaa

SEQ ID NO: 1325574 - DNA, 15 bp, Homo sapiens
ttttccttagtgcaa

SEQ ID NO: 1325575 - DNA, 15 bp, Homo sapiens
tttttccttagtgca

SEQ ID NO: 1325576 - DNA, 15 bp, Homo sapiens
ctttttccttagtgc

SEQ ID NO: 1325577 - DNA, 15 bp, Homo sapiens
gctttttccttagtg

SEQ ID NO: 1325578 - DNA, 15 bp, Homo sapiens
tgctttttccttagt

SEQ ID NO: 1325579 - DNA, 15 bp, Homo sapiens
atgctttttccttag

SEQ ID NO: 1325580 - DNA, 15 bp, Homo sapiens
aatgctttttcctta

SEQ ID NO: 1325581 - DNA, 15 bp, Homo sapiens
aaatgctttttcctt

SEQ ID NO: 1325582 - DNA, 15 bp, Homo sapiens
aaaatgctttttcct

SEQ ID NO: 1325583 - DNA, 15 bp, Homo sapiens
aaaaatgctttttcc

SEQ ID NO: 1325584 - DNA, 15 bp, Homo sapiens
aaaaaatgctttttc

SEQ ID NO: 1325585 - DNA, 15 bp, Homo sapiens
aaaaaaatgcttttt

SEQ ID NO: 1325586 - DNA, 15 bp, Homo sapiens
taaaaaaatgctttt

SEQ ID NO: 1325587 - DNA, 15 bp, Homo sapiens
ttaaaaaaatgcttt

SEQ ID NO: 1325588 - DNA, 15 bp, Homo sapiens
tttaaaaaaatgctt

SEQ ID NO: 1325589 - DNA, 15 bp, Homo sapiens
ttttaaaaaaatgct

SEQ ID NO: 1325590 - DNA, 15 bp, Homo sapiens
tttttaaaaaaatgc

SEQ ID NO: 1325591 - DNA, 15 bp, Homo sapiens
ttttttaaaaaaatg

SEQ ID NO: 1325592 - DNA, 15 bp, Homo sapiens
gtttttttaaaaaaa

SEQ ID NO: 1325593 - DNA, 15 bp, Homo sapiens
ggtttttttaaaaaa

SEQ ID NO: 1325594 - DNA, 15 bp, Homo sapiens
tggtttttttaaaaa

SEQ ID NO: 1325595 - DNA, 15 bp, Homo sapiens
ttggtttttttaaaa

SEQ ID NO: 1325596 - DNA, 15 bp, Homo sapiens
gttggtttttttaaa

SEQ ID NO: 1325597 - DNA, 15 bp, Homo sapiens
ggttggtttttttaa

SEQ ID NO: 1325598 - DNA, 15 bp, Homo sapiens
aggttggttttttta

SEQ ID NO: 1325599 - DNA, 15 bp, Homo sapiens
aaggttggttttttt

SEQ ID NO: 1325600 - DNA, 15 bp, Homo sapiens
taaggttggtttttt

SEQ ID NO: 1325601 - DNA, 15 bp, Homo sapiens
gtaaggttggttttt

SEQ ID NO: 1325602 - DNA, 15 bp, Homo sapiens
ggtaaggttggtttt

SEQ ID NO: 1325603 - DNA, 15 bp, Homo sapiens
tggtaaggttggttt

SEQ ID NO: 1325604 - DNA, 15 bp, Homo sapiens
gtggtaaggttggtt

SEQ ID NO: 1325605 - DNA, 15 bp, Homo sapiens
tgtggtaaggttggt

SEQ ID NO: 1325606 - DNA, 15 bp, Homo sapiens
gtgtggtaaggttgg

SEQ ID NO: 1325607 - DNA, 15 bp, Homo sapiens
tgtgtggtaaggttg

SEQ ID NO: 1325608 - DNA, 15 bp, Homo sapiens
ctgtgtggtaaggtt

SEQ ID NO: 1325609 - DNA, 15 bp, Homo sapiens
tctgtgtggtaaggt

SEQ ID NO: 1325610 - DNA, 15 bp, Homo sapiens
gtctgtgtggtaagg

SEQ ID NO: 1325611 - DNA, 15 bp, Homo sapiens
tgtctgtgtggtaag

SEQ ID NO: 1325612 - DNA, 15 bp, Homo sapiens
ctgtctgtgtggtaa

SEQ ID NO: 1325613 - DNA, 15 bp, Homo sapiens
tctgtctgtgtggta

SEQ ID NO: 1325614 - DNA, 15 bp, Homo sapiens
gtctgtctgtgtggt

SEQ ID NO: 1325615 - DNA, 15 bp, Homo sapiens
tgtctgtctgtgtgg

SEQ ID NO: 1325616 - DNA, 15 bp, Homo sapiens
ctgtctgtctgtgtg

SEQ ID NO: 1325617 - DNA, 15 bp, Homo sapiens
gctgtctgtctgtgt

SEQ ID NO: 1325618 - DNA, 15 bp, Homo sapiens
tgctgtctgtctgtg

SEQ ID NO: 1325619 - DNA, 15 bp, Homo sapiens
ctgctgtctgtctgt

SEQ ID NO: 1325620 - DNA, 15 bp, Homo sapiens
cctgctgtctgtctg

SEQ ID NO: 1325621 - DNA, 15 bp, Homo sapiens
ccctgctgtctgtct

SEQ ID NO: 1325622 - DNA, 15 bp, Homo sapiens
gccctgctgtctgtc

SEQ ID NO: 1325623 - DNA, 15 bp, Homo sapiens
agccctgctgtctgt

SEQ ID NO: 1325624 - DNA, 15 bp, Homo sapiens
cagccctgctgtctg

SEQ ID NO: 1325625 - DNA, 15 bp, Homo sapiens
acagccctgctgtct

SEQ ID NO: 1325626 - DNA, 15 bp, Homo sapiens
aacagccctgctgtc

SEQ ID NO: 1325627 - DNA, 15 bp, Homo sapiens
aaacagccctgctgt

SEQ ID NO: 1325628 - DNA, 15 bp, Homo sapiens
taaacagccctgctg

SEQ ID NO: 1325629 - DNA, 15 bp, Homo sapiens
ataaacagccctgct

SEQ ID NO: 1325630 - DNA, 15 bp, Homo sapiens
aataaacagccctgc

SEQ ID NO: 1325631 - DNA, 15 bp, Homo sapiens
aaataaacagccctg

SEQ ID NO: 1325632 - DNA, 15 bp, Homo sapiens
taaataaacagccct

SEQ ID NO: 1325633 - DNA, 15 bp, Homo sapiens
ataaataaacagccc

SEQ ID NO: 1325634 - DNA, 15 bp, Homo sapiens
aataaataaacagcc

SEQ ID NO: 1325635 - DNA, 15 bp, Homo sapiens
aaataaataaacagc

SEQ ID NO: 1325636 - DNA, 15 bp, Homo sapiens
taaataaataaacag

SEQ ID NO: 1325637 - DNA, 15 bp, Homo sapiens
ataaataaataaaca

SEQ ID NO: 1325638 - DNA, 15 bp, Homo sapiens
cataaataaataaac

SEQ ID NO: 1325639 - DNA, 15 bp, Homo sapiens
gcataaataaataaa

SEQ ID NO: 1325640 - DNA, 15 bp, Homo sapiens
agcataaataaataa

SEQ ID NO: 1325641 - DNA, 15 bp, Homo sapiens
gagcataaataaata

SEQ ID NO: 1325642 - DNA, 15 bp, Homo sapiens
ggagcataaataaat

SEQ ID NO: 1325643 - DNA, 15 bp, Homo sapiens
aggagcataaataaa

SEQ ID NO: 1325644 - DNA, 15 bp, Homo sapiens
gaggagcataaataa

SEQ ID NO: 1325645 - DNA, 15 bp, Homo sapiens
agaggagcataaata

SEQ ID NO: 1325646 - DNA, 15 bp, Homo sapiens
aagaggagcataaat

SEQ ID NO: 1325647 - DNA, 15 bp, Homo sapiens
aaagaggagcataaa

SEQ ID NO: 1325648 - DNA, 15 bp, Homo sapiens
caaagaggagcataa

SEQ ID NO: 1325649 - DNA, 15 bp, Homo sapiens
acaaagaggagcata

SEQ ID NO: 1325650 - DNA, 15 bp, Homo sapiens
gacaaagaggagcat

SEQ ID NO: 1325651 - DNA, 15 bp, Homo sapiens
agacaaagaggagca

SEQ ID NO: 1325652 - DNA, 15 bp, Homo sapiens
gagacaaagaggagc

SEQ ID NO: 1325653 - DNA, 15 bp, Homo sapiens
tgagacaaagaggag

SEQ ID NO: 1325654 - DNA, 15 bp, Homo sapiens
ttgagacaaagagga

SEQ ID NO: 1325655 - DNA, 15 bp, Homo sapiens
tttgagacaaagagg

SEQ ID NO: 1325656 - DNA, 15 bp, Homo sapiens
ctttgagacaaagag

SEQ ID NO: 1325657 - DNA, 15 bp, Homo sapiens
tctttgagacaaaga

SEQ ID NO: 1325658 - DNA, 15 bp, Homo sapiens
ctctttgagacaaag

SEQ ID NO: 1325659 - DNA, 15 bp, Homo sapiens
cctctttgagacaaa

SEQ ID NO: 1325660 - DNA, 15 bp, Homo sapiens
tcctctttgagacaa

SEQ ID NO: 1325661 - DNA, 15 bp, Homo sapiens
atcctctttgagaca

SEQ ID NO: 1325662 - DNA, 15 bp, Homo sapiens
aatcctctttgagac

SEQ ID NO: 1325663 - DNA, 15 bp, Homo sapiens
aaatcctctttgaga

SEQ ID NO: 1325664 - DNA, 15 bp, Homo sapiens
aaaatcctctttgag

SEQ ID NO: 1325665 - DNA, 15 bp, Homo sapiens
gaaaatcctctttga

SEQ ID NO: 1325666 - DNA, 15 bp, Homo sapiens
tgaaaatcctctttg

SEQ ID NO: 1325667 - DNA, 15 bp, Homo sapiens
ttgaaaatcctcttt

SEQ ID NO: 1325668 - DNA, 15 bp, Homo sapiens
cttgaaaatcctctt

SEQ ID NO: 1325669 - DNA, 15 bp, Homo sapiens
cagacacggtccctt

SEQ ID NO: 1325670 - DNA, 15 bp, Homo sapiens
tcagacacggtccct

SEQ ID NO: 1325671 - DNA, 15 bp, Homo sapiens
ctcagacacggtccc

SEQ ID NO: 1325672 - DNA, 15 bp, Homo sapiens
actcagacacggtcc

SEQ ID NO: 1325673 - DNA, 15 bp, Homo sapiens
gactcagacacggtc

SEQ ID NO: 1325674 - DNA, 15 bp, Homo sapiens
tgactcagacacggt

SEQ ID NO: 1325675 - DNA, 15 bp, Homo sapiens
gtgactcagacacgg

SEQ ID NO: 1325676 - DNA, 15 bp, Homo sapiens
ggtgactcagacacg

SEQ ID NO: 1325677 - DNA, 15 bp, Homo sapiens
aggtgactcagacac

SEQ ID NO: 1325678 - DNA, 15 bp, Homo sapiens
gaggtgactcagaca

SEQ ID NO: 1325679 - DNA, 15 bp, Homo sapiens
cgaggtgactcagac

SEQ ID NO: 1325680 - DNA, 15 bp, Homo sapiens
ccgaggtgactcaga

SEQ ID NO: 1325681 - DNA, 15 bp, Homo sapiens
gccgaggtgactcag

SEQ ID NO: 1325682 - DNA, 15 bp, Homo sapiens
tgccgaggtgactca

SEQ ID NO: 1325683 - DNA, 15 bp, Homo sapiens
gtgccgaggtgactc

SEQ ID NO: 1325684 - DNA, 15 bp, Homo sapiens
tgtgccgaggtgact

SEQ ID NO: 1325685 - DNA, 15 bp, Homo sapiens
ctgtgccgaggtgac

SEQ ID NO: 1325686 - DNA, 15 bp, Homo sapiens
actgtgccgaggtga

SEQ ID NO: 1325687 - DNA, 15 bp, Homo sapiens
cactgtgccgaggtg

SEQ ID NO: 1325688 - DNA, 15 bp, Homo sapiens
ccactgtgccgaggt

SEQ ID NO: 1325689 - DNA, 15 bp, Homo sapiens
accactgtgccgagg

SEQ ID NO: 1325690 - DNA, 15 bp, Homo sapiens
caccactgtgccgag

SEQ ID NO: 1325691 - DNA, 15 bp, Homo sapiens
acaccactgtgccga

SEQ ID NO: 1325692 - DNA, 15 bp, Homo sapiens
tacaccactgtgccg

SEQ ID NO: 1325693 - DNA, 15 bp, Homo sapiens
atacaccactgtgcc

SEQ ID NO: 1325694 - DNA, 15 bp, Homo sapiens
gatacaccactgtgc

SEQ ID NO: 1325695 - DNA, 15 bp, Homo sapiens
ggatacaccactgtg

SEQ ID NO: 1325696 - DNA, 15 bp, Homo sapiens
tggatacaccactgt

SEQ ID NO: 1325697 - DNA, 15 bp, Homo sapiens
ctggatacaccactg

SEQ ID NO: 1325698 - DNA, 15 bp, Homo sapiens
tctggatacaccact

SEQ ID NO: 1325699 - DNA, 15 bp, Homo sapiens
ctctggatacaccac

SEQ ID NO: 1325700 - DNA, 15 bp, Homo sapiens
gctctggatacacca

SEQ ID NO: 1325701 - DNA, 15 bp, Homo sapiens
ggctctggatacacc

SEQ ID NO: 1325702 - DNA, 15 bp, Homo sapiens
aggctctggatacac

SEQ ID NO: 1325703 - DNA, 15 bp, Homo sapiens
gaggctctggataca

SEQ ID NO: 1325704 - DNA, 15 bp, Homo sapiens
agaggctctggatac

SEQ ID NO: 1325705 - DNA, 15 bp, Homo sapiens
cagaggctctggata

SEQ ID NO: 1325706 - DNA, 15 bp, Homo sapiens
gcagaggctctggat

SEQ ID NO: 1325707 - DNA, 15 bp, Homo sapiens
tgcagaggctctgga

SEQ ID NO: 1325708 - DNA, 15 bp, Homo sapiens
atgcagaggctctgg

SEQ ID NO: 1325709 - DNA, 15 bp, Homo sapiens
tatgcagaggctctg

SEQ ID NO: 1325710 - DNA, 15 bp, Homo sapiens
ctatgcagaggctct

SEQ ID NO: 1325711 - DNA, 15 bp, Homo sapiens
gctatgcagaggctc

SEQ ID NO: 1325712 - DNA, 15 bp, Homo sapiens
tgctatgcagaggct

SEQ ID NO: 1325713 - DNA, 15 bp, Homo sapiens
ttgctatgcagaggc

SEQ ID NO: 1325714 - DNA, 15 bp, Homo sapiens
cttgctatgcagagg

SEQ ID NO: 1325715 - DNA, 15 bp, Homo sapiens
acttgctatgcagag

SEQ ID NO: 1325716 - DNA, 15 bp, Homo sapiens
cacttgctatgcaga

SEQ ID NO: 1325717 - DNA, 15 bp, Homo sapiens
gcacttgctatgcag

SEQ ID NO: 1325718 - DNA, 15 bp, Homo sapiens
agcacttgctatgca

SEQ ID NO: 1325719 - DNA, 15 bp, Homo sapiens
cagcacttgctatgc

SEQ ID NO: 1325720 - DNA, 15 bp, Homo sapiens
ccagcacttgctatg

SEQ ID NO: 1325721 - DNA, 15 bp, Homo sapiens
cccagcacttgctat

SEQ ID NO: 1325722 - DNA, 15 bp, Homo sapiens
tcccagcacttgcta

SEQ ID NO: 1325723 - DNA, 15 bp, Homo sapiens
atcccagcacttgct

SEQ ID NO: 1325724 - DNA, 15 bp, Homo sapiens
catcccagcacttgc

SEQ ID NO: 1325725 - DNA, 15 bp, Homo sapiens
acatcccagcacttg

SEQ ID NO: 1325726 - DNA, 15 bp, Homo sapiens
gacatcccagcactt

SEQ ID NO: 1325727 - DNA, 15 bp, Homo sapiens
agacatcccagcact

SEQ ID NO: 1325728 - DNA, 15 bp, Homo sapiens
cagacatcccagcac

SEQ ID NO: 1325729 - DNA, 15 bp, Homo sapiens
acagacatcccagca

SEQ ID NO: 1325730 - DNA, 15 bp, Homo sapiens
cacagacatcccagc

SEQ ID NO: 1325731 - DNA, 15 bp, Homo sapiens
tcacagacatcccag

SEQ ID NO: 1325732 - DNA, 15 bp, Homo sapiens
ttcacagacatccca

SEQ ID NO: 1325733 - DNA, 15 bp, Homo sapiens
gttcacagacatccc

SEQ ID NO: 1325734 - DNA, 15 bp, Homo sapiens
cgttcacagacatcc

SEQ ID NO: 1325735 - DNA, 15 bp, Homo sapiens
gcgttcacagacatc

SEQ ID NO: 1325736 - DNA, 15 bp, Homo sapiens
tgcgttcacagacat

SEQ ID NO: 1325737 - DNA, 15 bp, Homo sapiens
gtgcgttcacagaca

SEQ ID NO: 1325738 - DNA, 15 bp, Homo sapiens
tgtgcgttcacagac

SEQ ID NO: 1325739 - DNA, 15 bp, Homo sapiens
ctgtgcgttcacaga

SEQ ID NO: 1325740 - DNA, 15 bp, Homo sapiens
gctgtgcgttcacag

SEQ ID NO: 1325741 - DNA, 15 bp, Homo sapiens
agctgtgcgttcaca

SEQ ID NO: 1325742 - DNA, 15 bp, Homo sapiens
aagctgtgcgttcac

SEQ ID NO: 1325743 - DNA, 15 bp, Homo sapiens
gaagctgtgcgttca

SEQ ID NO: 1325744 - DNA, 15 bp, Homo sapiens
cgaagctgtgcgttc

SEQ ID NO: 1325745 - DNA, 15 bp, Homo sapiens
gcgaagctgtgcgtt

SEQ ID NO: 1325746 - DNA, 15 bp, Homo sapiens
agcgaagctgtgcgt

SEQ ID NO: 1325747 - DNA, 15 bp, Homo sapiens
tagcgaagctgtgcg

SEQ ID NO: 1325748 - DNA, 15 bp, Homo sapiens
ctagcgaagctgtgc

SEQ ID NO: 1325749 - DNA, 15 bp, Homo sapiens
cctagcgaagctgtg

SEQ ID NO: 1325750 - DNA, 15 bp, Homo sapiens
tcctagcgaagctgt

SEQ ID NO: 1325751 - DNA, 15 bp, Homo sapiens
gtcctagcgaagctg

SEQ ID NO: 1325752 - DNA, 15 bp, Homo sapiens
agtcctagcgaagct

SEQ ID NO: 1325753 - DNA, 15 bp, Homo sapiens
cagtcctagcgaagc

SEQ ID NO: 1325754 - DNA, 15 bp, Homo sapiens
tcagtcctagcgaag

SEQ ID NO: 1325755 - DNA, 15 bp, Homo sapiens
ctcagtcctagcgaa

SEQ ID NO: 1325756 - DNA, 15 bp, Homo sapiens
tctcagtcctagcga

SEQ ID NO: 1325757 - DNA, 15 bp, Homo sapiens
ctctcagtcctagcg

SEQ ID NO: 1325758 - DNA, 15 bp, Homo sapiens
actctcagtcctagc

SEQ ID NO: 1325759 - DNA, 15 bp, Homo sapiens
cactctcagtcctag

SEQ ID NO: 1325760 - DNA, 15 bp, Homo sapiens
tcactctcagtccta

SEQ ID NO: 1325761 - DNA, 15 bp, Homo sapiens
gtcactctcagtcct

SEQ ID NO: 1325762 - DNA, 15 bp, Homo sapiens
agtcactctcagtcc

SEQ ID NO: 1325763 - DNA, 15 bp, Homo sapiens
tagtcactctcagtc

SEQ ID NO: 1325764 - DNA, 15 bp, Homo sapiens
ttagtcactctcagt

SEQ ID NO: 1325765 - DNA, 15 bp, Homo sapiens
gttagtcactctcag

SEQ ID NO: 1325766 - DNA, 15 bp, Homo sapiens
tgttagtcactctca

SEQ ID NO: 1325767 - DNA, 15 bp, Homo sapiens
gtgttagtcactctc

SEQ ID NO: 1325768 - DNA, 15 bp, Homo sapiens
ggtgttagtcactct

SEQ ID NO: 1325769 - DNA, 15 bp, Homo sapiens
gggtgttagtcactc

SEQ ID NO: 1325770 - DNA, 15 bp, Homo sapiens
tgggtgttagtcact

SEQ ID NO: 1325771 - DNA, 15 bp, Homo sapiens
atgggtgttagtcac

SEQ ID NO: 1325772 - DNA, 15 bp, Homo sapiens
gatgggtgttagtca

SEQ ID NO: 1325773 - DNA, 15 bp, Homo sapiens
ggatgggtgttagtc

SEQ ID NO: 1325774 - DNA, 15 bp, Homo sapiens
gggatgggtgttagt

SEQ ID NO: 1325775 - DNA, 15 bp, Homo sapiens
agggatgggtgttag

SEQ ID NO: 1325776 - DNA, 15 bp, Homo sapiens
cagggatgggtgtta

SEQ ID NO: 1325777 - DNA, 15 bp, Homo sapiens
gcagggatgggtgtt

SEQ ID NO: 1325778 - DNA, 15 bp, Homo sapiens
tgcagggatgggtgt

SEQ ID NO: 1325779 - DNA, 15 bp, Homo sapiens
ctgcagggatgggtg

SEQ ID NO: 1325780 - DNA, 15 bp, Homo sapiens
gctgcagggatgggt

SEQ ID NO: 1325781 - DNA, 15 bp, Homo sapiens
tgctgcagggatggg

SEQ ID NO: 1325782 - DNA, 15 bp, Homo sapiens
gtgctgcagggatgg

SEQ ID NO: 1325783 - DNA, 15 bp, Homo sapiens
agtgctgcagggatg

SEQ ID NO: 1325784 - DNA, 15 bp, Homo sapiens
gagtgctgcagggat

SEQ ID NO: 1325785 - DNA, 15 bp, Homo sapiens
tgagtgctgcaggga

SEQ ID NO: 1325786 - DNA, 15 bp, Homo sapiens
ctgagtgctgcaggg

SEQ ID NO: 1325787 - DNA, 15 bp, Homo sapiens
tctgagtgctgcagg

SEQ ID NO: 1325788 - DNA, 15 bp, Homo sapiens
ctctgagtgctgcag

SEQ ID NO: 1325789 - DNA, 15 bp, Homo sapiens
tctctgagtgctgca

SEQ ID NO: 1325790 - DNA, 15 bp, Homo sapiens
ctctctgagtgctgc

SEQ ID NO: 1325791 - DNA, 15 bp, Homo sapiens
cctctctgagtgctg

SEQ ID NO: 1325792 - DNA, 15 bp, Homo sapiens
gcctctctgagtgct

SEQ ID NO: 1325793 - DNA, 15 bp, Homo sapiens
tgcctctctgagtgc

SEQ ID NO: 1325794 - DNA, 15 bp, Homo sapiens
gtgcctctctgagtg

SEQ ID NO: 1325795 - DNA, 15 bp, Homo sapiens
tgtgcctctctgagt

SEQ ID NO: 1325796 - DNA, 15 bp, Homo sapiens
gtgtgcctctctgag

SEQ ID NO: 1325797 - DNA, 15 bp, Homo sapiens
tgtgtgcctctctga

SEQ ID NO: 1325798 - DNA, 15 bp, Homo sapiens
gtgtgtgcctctctg

SEQ ID NO: 1325799 - DNA, 15 bp, Homo sapiens
tgtgtgtgcctctct

SEQ ID NO: 1325800 - DNA, 15 bp, Homo sapiens
ctgtgtgtgcctctc

SEQ ID NO: 1325801 - DNA, 15 bp, Homo sapiens
cctgtgtgtgcctct

SEQ ID NO: 1325802 - DNA, 15 bp, Homo sapiens
ccctgtgtgtgcctc

SEQ ID NO: 1325803 - DNA, 15 bp, Homo sapiens
cccctgtgtgtgcct

SEQ ID NO: 1325804 - DNA, 15 bp, Homo sapiens
gcccctgtgtgtgcc

SEQ ID NO: 1325805 - DNA, 15 bp, Homo sapiens
agcccctgtgtgtgc

SEQ ID NO: 1325806 - DNA, 15 bp, Homo sapiens
gagcccctgtgtgtg

SEQ ID NO: 1325807 - DNA, 15 bp, Homo sapiens
tgagcccctgtgtgt

SEQ ID NO: 1325808 - DNA, 15 bp, Homo sapiens
ttgagcccctgtgtg

SEQ ID NO: 1325809 - DNA, 15 bp, Homo sapiens
cttgagcccctgtgt

SEQ ID NO: 1325810 - DNA, 15 bp, Homo sapiens
tcttgagcccctgtg

SEQ ID NO: 1325811 - DNA, 15 bp, Homo sapiens
gtcttgagcccctgt

SEQ ID NO: 1325812 - DNA, 15 bp, Homo sapiens
agtcttgagcccctg

SEQ ID NO: 1325813 - DNA, 15 bp, Homo sapiens
gagtcttgagcccct

SEQ ID NO: 1325814 - DNA, 15 bp, Homo sapiens
tgagtcttgagcccc

SEQ ID NO: 1325815 - DNA, 15 bp, Homo sapiens
ctgagtcttgagccc

SEQ ID NO: 1325816 - DNA, 15 bp, Homo sapiens
actgagtcttgagcc

SEQ ID NO: 1325817 - DNA, 15 bp, Homo sapiens
aactgagtcttgagc

SEQ ID NO: 1325818 - DNA, 15 bp, Homo sapiens
caactgagtcttgag

SEQ ID NO: 1325819 - DNA, 15 bp, Homo sapiens
gcaactgagtcttga

SEQ ID NO: 1325820 - DNA, 15 bp, Homo sapiens
ggcaactgagtcttg

SEQ ID NO: 1325821 - DNA, 15 bp, Homo sapiens
tggcaactgagtctt

SEQ ID NO: 1325822 - DNA, 15 bp, Homo sapiens
ttggcaactgagtct

SEQ ID NO: 1325823 - DNA, 15 bp, Homo sapiens
attggcaactgagtc

SEQ ID NO: 1325824 - DNA, 15 bp, Homo sapiens
aattggcaactgagt

SEQ ID NO: 1325825 - DNA, 15 bp, Homo sapiens
aaattggcaactgag

SEQ ID NO: 1325826 - DNA, 15 bp, Homo sapiens
caaattggcaactga

SEQ ID NO: 1325827 - DNA, 15 bp, Homo sapiens
tcaaattggcaactg

SEQ ID NO: 1325828 - DNA, 15 bp, Homo sapiens
atcaaattggcaact

SEQ ID NO: 1325829 - DNA, 15 bp, Homo sapiens
aatcaaattggcaac

SEQ ID NO: 1325830 - DNA, 15 bp, Homo sapiens
aaatcaaattggcaa

SEQ ID NO: 1325831 - DNA, 15 bp, Homo sapiens
taaatcaaattggca

SEQ ID NO: 1325832 - DNA, 15 bp, Homo sapiens
ataaatcaaattggc

SEQ ID NO: 1325833 - DNA, 15 bp, Homo sapiens
cataaatcaaattgg

SEQ ID NO: 1325834 - DNA, 15 bp, Homo sapiens
ccataaatcaaattg

SEQ ID NO: 1325835 - DNA, 15 bp, Homo sapiens
cccataaatcaaatt

SEQ ID NO: 1325836 - DNA, 15 bp, Homo sapiens
tcccataaatcaaat

SEQ ID NO: 1325837 - DNA, 15 bp, Homo sapiens
gtcccataaatcaaa

SEQ ID NO: 1325838 - DNA, 15 bp, Homo sapiens
agtcccataaatcaa

SEQ ID NO: 1325839 - DNA, 15 bp, Homo sapiens
aagtcccataaatca

SEQ ID NO: 1325840 - DNA, 15 bp, Homo sapiens
taagtcccataaatc

SEQ ID NO: 1325841 - DNA, 15 bp, Homo sapiens
ataagtcccataaat

SEQ ID NO: 1325842 - DNA, 15 bp, Homo sapiens
aataagtcccataaa

SEQ ID NO: 1325843 - DNA, 15 bp, Homo sapiens
taataagtcccataa

SEQ ID NO: 1325844 - DNA, 15 bp, Homo sapiens
ataataagtcccata

SEQ ID NO: 1325845 - DNA, 15 bp, Homo sapiens
gataataagtcccat

SEQ ID NO: 1325846 - DNA, 15 bp, Homo sapiens
ggataataagtccca

SEQ ID NO: 1325847 - DNA, 15 bp, Homo sapiens
gggataataagtccc

SEQ ID NO: 1325848 - DNA, 15 bp, Homo sapiens
tgggataataagtcc

SEQ ID NO: 1325849 - DNA, 15 bp, Homo sapiens
ttgggataataagtc

SEQ ID NO: 1325850 - DNA, 15 bp, Homo sapiens
cttgggataataagt

SEQ ID NO: 1325851 - DNA, 15 bp, Homo sapiens
acttgggataataag

SEQ ID NO: 1325852 - DNA, 15 bp, Homo sapiens
cacttgggataataa

SEQ ID NO: 1325853 - DNA, 15 bp, Homo sapiens
acacttgggataata

SEQ ID NO: 1325854 - DNA, 15 bp, Homo sapiens
gacacttgggataat

SEQ ID NO: 1325855 - DNA, 15 bp, Homo sapiens
tgacacttgggataa

SEQ ID NO: 1325856 - DNA, 15 bp, Homo sapiens
ctgacacttgggata

SEQ ID NO: 1325857 - DNA, 15 bp, Homo sapiens
gctgacacttgggat

SEQ ID NO: 1325858 - DNA, 15 bp, Homo sapiens
tgctgacacttggga

SEQ ID NO: 1325859 - DNA, 15 bp, Homo sapiens
ctgctgacacttggg

SEQ ID NO: 1325860 - DNA, 15 bp, Homo sapiens
tctgctgacacttgg

SEQ ID NO: 1325861 - DNA, 15 bp, Homo sapiens
ctctgctgacacttg

SEQ ID NO: 1325862 - DNA, 15 bp, Homo sapiens
tctctgctgacactt

SEQ ID NO: 1325863 - DNA, 15 bp, Homo sapiens
ctctctgctgacact

SEQ ID NO: 1325864 - DNA, 15 bp, Homo sapiens
cctctctgctgacac

SEQ ID NO: 1325865 - DNA, 15 bp, Homo sapiens
tcctctctgctgaca

SEQ ID NO: 1325866 - DNA, 15 bp, Homo sapiens
ctcctctctgctgac

SEQ ID NO: 1325867 - DNA, 15 bp, Homo sapiens
tctcctctctgctga

SEQ ID NO: 1325868 - DNA, 15 bp, Homo sapiens
atctcctctctgctg

SEQ ID NO: 1325869 - DNA, 15 bp, Homo sapiens
tatctcctctctgct

SEQ ID NO: 1325870 - DNA, 15 bp, Homo sapiens
atatctcctctctgc

SEQ ID NO: 1325871 - DNA, 15 bp, Homo sapiens
aatatctcctctctg

SEQ ID NO: 1325872 - DNA, 15 bp, Homo sapiens
caatatctcctctct

SEQ ID NO: 1325873 - DNA, 15 bp, Homo sapiens
tcaatatctcctctc

SEQ ID NO: 1325874 - DNA, 15 bp, Homo sapiens
atcaatatctcctct

SEQ ID NO: 1325875 - DNA, 15 bp, Homo sapiens
aatcaatatctcctc

SEQ ID NO: 1325876 - DNA, 15 bp, Homo sapiens
gaatcaatatctcct

SEQ ID NO: 1325877 - DNA, 15 bp, Homo sapiens
tgaatcaatatctcc

SEQ ID NO: 1325878 - DNA, 15 bp, Homo sapiens
ctgaatcaatatctc

SEQ ID NO: 1325879 - DNA, 15 bp, Homo sapiens
tctgaatcaatatct

SEQ ID NO: 1325880 - DNA, 15 bp, Homo sapiens
ttctgaatcaatatc

SEQ ID NO: 1325881 - DNA, 15 bp, Homo sapiens
tttctgaatcaatat

SEQ ID NO: 1325882 - DNA, 15 bp, Homo sapiens
ctttctgaatcaata

SEQ ID NO: 1325883 - DNA, 15 bp, Homo sapiens
tctttctgaatcaat

SEQ ID NO: 1325884 - DNA, 15 bp, Homo sapiens
gtctttctgaatcaa

SEQ ID NO: 1325885 - DNA, 15 bp, Homo sapiens
agtctttctgaatca

SEQ ID NO: 1325886 - DNA, 15 bp, Homo sapiens
aagtctttctgaatc

SEQ ID NO: 1325887 - DNA, 15 bp, Homo sapiens
taagtctttctgaat

SEQ ID NO: 1325888 - DNA, 15 bp, Homo sapiens
ttaagtctttctgaa

SEQ ID NO: 1325889 - DNA, 15 bp, Homo sapiens
tttaagtctttctga

SEQ ID NO: 1325890 - DNA, 15 bp, Homo sapiens
atttaagtctttctg

SEQ ID NO: 1325891 - DNA, 15 bp, Homo sapiens
tatttaagtctttct

SEQ ID NO: 1325892 - DNA, 15 bp, Homo sapiens
ttatttaagtctttc

SEQ ID NO: 1325893 - DNA, 15 bp, Homo sapiens
tttatttaagtcttt

SEQ ID NO: 1325894 - DNA, 15 bp, Homo sapiens
gtttatttaagtctt

SEQ ID NO: 1325895 - DNA, 15 bp, Homo sapiens
tgtttatttaagtct

SEQ ID NO: 1325896 - DNA, 15 bp, Homo sapiens
ttgtttatttaagtc

SEQ ID NO: 1325897 - DNA, 15 bp, Homo sapiens
cttgtttatttaagt

SEQ ID NO: 1325898 - DNA, 15 bp, Homo sapiens
gcttgtttatttaag

SEQ ID NO: 1325899 - DNA, 15 bp, Homo sapiens
tgcttgtttatttaa

SEQ ID NO: 1325900 - DNA, 15 bp, Homo sapiens
ctgcttgtttattta

SEQ ID NO: 1325901 - DNA, 15 bp, Homo sapiens
cctgcttgtttattt

SEQ ID NO: 1325902 - DNA, 15 bp, Homo sapiens
acctgcttgtttatt

SEQ ID NO: 1325903 - DNA, 15 bp, Homo sapiens
cacctgcttgtttat

SEQ ID NO: 1325904 - DNA, 15 bp, Homo sapiens
gcacctgcttgttta

SEQ ID NO: 1325905 - DNA, 15 bp, Homo sapiens
tgcacctgcttgttt

SEQ ID NO: 1325906 - DNA, 15 bp, Homo sapiens
atgcacctgcttgtt

SEQ ID NO: 1325907 - DNA, 15 bp, Homo sapiens
tatgcacctgcttgt

SEQ ID NO: 1325908 - DNA, 15 bp, Homo sapiens
ttatgcacctgcttg

SEQ ID NO: 1325909 - DNA, 15 bp, Homo sapiens
attatgcacctgctt

SEQ ID NO: 1325910 - DNA, 15 bp, Homo sapiens
gattatgcacctgct

SEQ ID NO: 1325911 - DNA, 15 bp, Homo sapiens
ggattatgcacctgc

SEQ ID NO: 1325912 - DNA, 15 bp, Homo sapiens
tggattatgcacctg

SEQ ID NO: 1325913 - DNA, 15 bp, Homo sapiens
ctggattatgcacct

SEQ ID NO: 1325914 - DNA, 15 bp, Homo sapiens
tctggattatgcacc

SEQ ID NO: 1325915 - DNA, 15 bp, Homo sapiens
ctctggattatgcac

SEQ ID NO: 1325916 - DNA, 15 bp, Homo sapiens
tctctggattatgca

SEQ ID NO: 1325917 - DNA, 15 bp, Homo sapiens
ctctctggattatgc

SEQ ID NO: 1325918 - DNA, 15 bp, Homo sapiens
cctctctggattatg

SEQ ID NO: 1325919 - DNA, 15 bp, Homo sapiens
ccctctctggattat

SEQ ID NO: 1325920 - DNA, 15 bp, Homo sapiens
cccctctctggatta

SEQ ID NO: 1325921 - DNA, 15 bp, Homo sapiens
acccctctctggatt

SEQ ID NO: 1325922 - DNA, 15 bp, Homo sapiens
tacccctctctggat

SEQ ID NO: 1325923 - DNA, 15 bp, Homo sapiens
gtacccctctctgga

SEQ ID NO: 1325924 - DNA, 15 bp, Homo sapiens
tgtacccctctctgg

SEQ ID NO: 1325925 - DNA, 15 bp, Homo sapiens
ctgtacccctctctg

SEQ ID NO: 1325926 - DNA, 15 bp, Homo sapiens
tctgtacccctctct

SEQ ID NO: 1325927 - DNA, 15 bp, Homo sapiens
gtctgtacccctctc

SEQ ID NO: 1325928 - DNA, 15 bp, Homo sapiens
agtctgtacccctct

SEQ ID NO: 1325929 - DNA, 15 bp, Homo sapiens
cagtctgtacccctc

SEQ ID NO: 1325930 - DNA, 15 bp, Homo sapiens
tcagtctgtacccct

SEQ ID NO: 1325931 - DNA, 15 bp, Homo sapiens
ctcagtctgtacccc

SEQ ID NO: 1325932 - DNA, 15 bp, Homo sapiens
gctcagtctgtaccc

SEQ ID NO: 1325933 - DNA, 15 bp, Homo sapiens
agctcagtctgtacc

SEQ ID NO: 1325934 - DNA, 15 bp, Homo sapiens
cagctcagtctgtac

SEQ ID NO: 1325935 - DNA, 15 bp, Homo sapiens
tcagctcagtctgta

SEQ ID NO: 1325936 - DNA, 15 bp, Homo sapiens
ctcagctcagtctgt

SEQ ID NO: 1325937 - DNA, 15 bp, Homo sapiens
cctcagctcagtctg

SEQ ID NO: 1325938 - DNA, 15 bp, Homo sapiens
ccctcagctcagtct

SEQ ID NO: 1325939 - DNA, 15 bp, Homo sapiens
accctcagctcagtc

SEQ ID NO: 1325940 - DNA, 15 bp, Homo sapiens
caccctcagctcagt

SEQ ID NO: 1325941 - DNA, 15 bp, Homo sapiens
acaccctcagctcag

SEQ ID NO: 1325942 - DNA, 15 bp, Homo sapiens
gacaccctcagctca

SEQ ID NO: 1325943 - DNA, 15 bp, Homo sapiens
agacaccctcagctc

SEQ ID NO: 1325944 - DNA, 15 bp, Homo sapiens
cagacaccctcagct

SEQ ID NO: 1325945 - DNA, 15 bp, Homo sapiens
ccagacaccctcagc

SEQ ID NO: 1325946 - DNA, 15 bp, Homo sapiens
tccagacaccctcag

SEQ ID NO: 1325947 - DNA, 15 bp, Homo sapiens
ttccagacaccctca

SEQ ID NO: 1325948 - DNA, 15 bp, Homo sapiens
tttccagacaccctc

SEQ ID NO: 1325949 - DNA, 15 bp, Homo sapiens
ctttccagacaccct

SEQ ID NO: 1325950 - DNA, 15 bp, Homo sapiens
gctttccagacaccc

SEQ ID NO: 1325951 - DNA, 15 bp, Homo sapiens
tgctttccagacacc

SEQ ID NO: 1325952 - DNA, 15 bp, Homo sapiens
ctgctttccagacac

SEQ ID NO: 1325953 - DNA, 15 bp, Homo sapiens
actgctttccagaca

SEQ ID NO: 1325954 - DNA, 15 bp, Homo sapiens
cactgctttccagac

SEQ ID NO: 1325955 - DNA, 15 bp, Homo sapiens
ccactgctttccaga

SEQ ID NO: 1325956 - DNA, 15 bp, Homo sapiens
tccactgctttccag

SEQ ID NO: 1325957 - DNA, 15 bp, Homo sapiens
ttccactgctttcca

SEQ ID NO: 1325958 - DNA, 15 bp, Homo sapiens
cttccactgctttcc

SEQ ID NO: 1325959 - DNA, 15 bp, Homo sapiens
gcttccactgctttc

SEQ ID NO: 1325960 - DNA, 15 bp, Homo sapiens
tgcttccactgcttt

SEQ ID NO: 1325961 - DNA, 15 bp, Homo sapiens
ctgcttccactgctt

SEQ ID NO: 1325962 - DNA, 15 bp, Homo sapiens
tctgcttccactgct

SEQ ID NO: 1325963 - DNA, 15 bp, Homo sapiens
gtctgcttccactgc

SEQ ID NO: 1325964 - DNA, 15 bp, Homo sapiens
tgtctgcttccactg

SEQ ID NO: 1325965 - DNA, 15 bp, Homo sapiens
atgtctgcttccact

SEQ ID NO: 1325966 - DNA, 15 bp, Homo sapiens
gatgtctgcttccac

SEQ ID NO: 1325967 - DNA, 15 bp, Homo sapiens
tgatgtctgcttcca

SEQ ID NO: 1325968 - DNA, 15 bp, Homo sapiens
atgatgtctgcttcc

SEQ ID NO: 1325969 - DNA, 15 bp, Homo sapiens
catgatgtctgcttc

SEQ ID NO: 1325970 - DNA, 15 bp, Homo sapiens
tcatgatgtctgctt

SEQ ID NO: 1325971 - DNA, 15 bp, Homo sapiens
ttcatgatgtctgct

SEQ ID NO: 1325972 - DNA, 15 bp, Homo sapiens
cttcatgatgtctgc

SEQ ID NO: 1325973 - DNA, 15 bp, Homo sapiens
tcttcatgatgtctg

SEQ ID NO: 1325974 - DNA, 15 bp, Homo sapiens
ttcttcatgatgtct

SEQ ID NO: 1325975 - DNA, 15 bp, Homo sapiens
tttcttcatgatgtc

SEQ ID NO: 1325976 - DNA, 15 bp, Homo sapiens
gtttcttcatgatgt

SEQ ID NO: 1325977 - DNA, 15 bp, Homo sapiens
ggtttcttcatgatg

SEQ ID NO: 1325978 - DNA, 15 bp, Homo sapiens
aggtttcttcatgat

SEQ ID NO: 1325979 - DNA, 15 bp, Homo sapiens
caggtttcttcatga

SEQ ID NO: 1325980 - DNA, 15 bp, Homo sapiens
ccaggtttcttcatg

SEQ ID NO: 1325981 - DNA, 15 bp, Homo sapiens
cccaggtttcttcat

SEQ ID NO: 1325982 - DNA, 15 bp, Homo sapiens
ccccaggtttcttca

SEQ ID NO: 1325983 - DNA, 15 bp, Homo sapiens
accccaggtttcttc

SEQ ID NO: 1325984 - DNA, 15 bp, Homo sapiens
gaccccaggtttctt

SEQ ID NO: 1325985 - DNA, 15 bp, Homo sapiens
agaccccaggtttct

SEQ ID NO: 1325986 - DNA, 15 bp, Homo sapiens
gagaccccaggtttc

SEQ ID NO: 1325987 - DNA, 15 bp, Homo sapiens
agagaccccaggttt

SEQ ID NO: 1325988 - DNA, 15 bp, Homo sapiens
aagagaccccaggtt

SEQ ID NO: 1325989 - DNA, 15 bp, Homo sapiens
caagagaccccaggt

SEQ ID NO: 1325990 - DNA, 15 bp, Homo sapiens
tcaagagaccccagg

SEQ ID NO: 1325991 - DNA, 15 bp, Homo sapiens
ttcaagagaccccag

SEQ ID NO: 1325992 - DNA, 15 bp, Homo sapiens
tttcaagagacccca

SEQ ID NO: 1325993 - DNA, 15 bp, Homo sapiens
ttttcaagagacccc

SEQ ID NO: 1325994 - DNA, 15 bp, Homo sapiens
gttttcaagagaccc

SEQ ID NO: 1325995 - DNA, 15 bp, Homo sapiens
agttttcaagagacc

SEQ ID NO: 1325996 - DNA, 15 bp, Homo sapiens
cagttttcaagagac

SEQ ID NO: 1325997 - DNA, 15 bp, Homo sapiens
gcagttttcaagaga

SEQ ID NO: 1325998 - DNA, 15 bp, Homo sapiens
agcagttttcaagag

SEQ ID NO: 1325999 - DNA, 15 bp, Homo sapiens
gagcagttttcaaga

SEQ ID NO: 1326000 - DNA, 15 bp, Homo sapiens
ggagcagttttcaag

SEQ ID NO: 1326001 - DNA, 15 bp, Homo sapiens
gggagcagttttcaa

SEQ ID NO: 1326002 - DNA, 15 bp, Homo sapiens
tgggagcagttttca

SEQ ID NO: 1326003 - DNA, 15 bp, Homo sapiens
ttgggagcagttttc

SEQ ID NO: 1326004 - DNA, 15 bp, Homo sapiens
cttgggagcagtttt

SEQ ID NO: 1326005 - DNA, 15 bp, Homo sapiens
ccttgggagcagttt

SEQ ID NO: 1326006 - DNA, 15 bp, Homo sapiens
cccttgggagcagtt

SEQ ID NO: 1326007 - DNA, 15 bp, Homo sapiens
tcccttgggagcagt

SEQ ID NO: 1326008 - DNA, 15 bp, Homo sapiens
ctcccttgggagcag

SEQ ID NO: 1326009 - DNA, 15 bp, Homo sapiens
actcccttgggagca

SEQ ID NO: 1326010 - DNA, 15 bp, Homo sapiens
gactcccttgggagc

SEQ ID NO: 1326011 - DNA, 15 bp, Homo sapiens
tgactcccttgggag

SEQ ID NO: 1326012 - DNA, 15 bp, Homo sapiens
atgactcccttggga

SEQ ID NO: 1326013 - DNA, 15 bp, Homo sapiens
catgactcccttggg

SEQ ID NO: 1326014 - DNA, 15 bp, Homo sapiens
ccatgactcccttgg

SEQ ID NO: 1326015 - DNA, 15 bp, Homo sapiens
cccatgactcccttg

SEQ ID NO: 1326016 - DNA, 15 bp, Homo sapiens
ccccatgactccctt

SEQ ID NO: 1326017 - DNA, 15 bp, Homo sapiens
accccatgactccct

SEQ ID NO: 1326018 - DNA, 15 bp, Homo sapiens
caccccatgactccc

SEQ ID NO: 1326019 - DNA, 15 bp, Homo sapiens
tcaccccatgactcc

SEQ ID NO: 1326020 - DNA, 15 bp, Homo sapiens
gtcaccccatgactc

SEQ ID NO: 1326021 - DNA, 15 bp, Homo sapiens
tgtcaccccatgact

SEQ ID NO: 1326022 - DNA, 15 bp, Homo sapiens
ctgtcaccccatgac

SEQ ID NO: 1326023 - DNA, 15 bp, Homo sapiens
tctgtcaccccatga

SEQ ID NO: 1326024 - DNA, 15 bp, Homo sapiens
ctctgtcaccccatg

SEQ ID NO: 1326025 - DNA, 15 bp, Homo sapiens
cctctgtcaccccat

SEQ ID NO: 1326026 - DNA, 15 bp, Homo sapiens
ccctctgtcacccca

SEQ ID NO: 1326027 - DNA, 15 bp, Homo sapiens
cccctctgtcacccc

SEQ ID NO: 1326028 - DNA, 15 bp, Homo sapiens
gcccctctgtcaccc

SEQ ID NO: 1326029 - DNA, 15 bp, Homo sapiens
tgcccctctgtcacc

SEQ ID NO: 1326030 - DNA, 15 bp, Homo sapiens
ctgcccctctgtcac

SEQ ID NO: 1326031 - DNA, 15 bp, Homo sapiens
cctgcccctctgtca

SEQ ID NO: 1326032 - DNA, 15 bp, Homo sapiens
ccctgcccctctgtc

SEQ ID NO: 1326033 - DNA, 15 bp, Homo sapiens
tccctgcccctctgt

SEQ ID NO: 1326034 - DNA, 15 bp, Homo sapiens
gtccctgcccctctg

SEQ ID NO: 1326035 - DNA, 15 bp, Homo sapiens
cgtccctgcccctct

SEQ ID NO: 1326036 - DNA, 15 bp, Homo sapiens
ccgtccctgcccctc

SEQ ID NO: 1326037 - DNA, 15 bp, Homo sapiens
cccgtccctgcccct

SEQ ID NO: 1326038 - DNA, 15 bp, Homo sapiens
gcccgtccctgcccc

SEQ ID NO: 1326039 - DNA, 15 bp, Homo sapiens
agcccgtccctgccc

SEQ ID NO: 1326040 - DNA, 15 bp, Homo sapiens
cagcccgtccctgcc

SEQ ID NO: 1326041 - DNA, 15 bp, Homo sapiens
acagcccgtccctgc

SEQ ID NO: 1326042 - DNA, 15 bp, Homo sapiens
cacagcccgtccctg

SEQ ID NO: 1326043 - DNA, 15 bp, Homo sapiens
ccacagcccgtccct

SEQ ID NO: 1326044 - DNA, 15 bp, Homo sapiens
tccacagcccgtccc

SEQ ID NO: 1326045 - DNA, 15 bp, Homo sapiens
ctccacagcccgtcc

SEQ ID NO: 1326046 - DNA, 15 bp, Homo sapiens
actccacagcccgtc

SEQ ID NO: 1326047 - DNA, 15 bp, Homo sapiens
gactccacagcccgt

SEQ ID NO: 1326048 - DNA, 15 bp, Homo sapiens
tgactccacagcccg

SEQ ID NO: 1326049 - DNA, 15 bp, Homo sapiens
ctgactccacagccc

SEQ ID NO: 1326050 - DNA, 15 bp, Homo sapiens
gctgactccacagcc

SEQ ID NO: 1326051 - DNA, 15 bp, Homo sapiens
cgctgactccacagc

SEQ ID NO: 1326052 - DNA, 15 bp, Homo sapiens
ccgctgactccacag

SEQ ID NO: 1326053 - DNA, 15 bp, Homo sapiens
cccgctgactccaca

SEQ ID NO: 1326054 - DNA, 15 bp, Homo sapiens
gcccgctgactccac

SEQ ID NO: 1326055 - DNA, 15 bp, Homo sapiens
tgcccgctgactcca

SEQ ID NO: 1326056 - DNA, 15 bp, Homo sapiens
gtgcccgctgactcc

SEQ ID NO: 1326057 - DNA, 15 bp, Homo sapiens
tgtgcccgctgactc

SEQ ID NO: 1326058 - DNA, 15 bp, Homo sapiens
ctgtgcccgctgact

SEQ ID NO: 1326059 - DNA, 15 bp, Homo sapiens
cctgtgcccgctgac

SEQ ID NO: 1326060 - DNA, 15 bp, Homo sapiens
acctgtgcccgctga

SEQ ID NO: 1326061 - DNA, 15 bp, Homo sapiens
cacctgtgcccgctg

SEQ ID NO: 1326062 - DNA, 15 bp, Homo sapiens
gcacctgtgcccgct

SEQ ID NO: 1326063 - DNA, 15 bp, Homo sapiens
tgcacctgtgcccgc

SEQ ID NO: 1326064 - DNA, 15 bp, Homo sapiens
gtgcacctgtgcccg

SEQ ID NO: 1326065 - DNA, 15 bp, Homo sapiens
agtgcacctgtgccc

SEQ ID NO: 1326066 - DNA, 15 bp, Homo sapiens
gagtgcacctgtgcc

SEQ ID NO: 1326067 - DNA, 15 bp, Homo sapiens
ggagtgcacctgtgc

SEQ ID NO: 1326068 - DNA, 15 bp, Homo sapiens
tggagtgcacctgtg

SEQ ID NO: 1326069 - DNA, 15 bp, Homo sapiens
ctggagtgcacctgt

SEQ ID NO: 1326070 - DNA, 15 bp, Homo sapiens
cctggagtgcacctg

SEQ ID NO: 1326071 - DNA, 15 bp, Homo sapiens
gcctggagtgcacct

SEQ ID NO: 1326072 - DNA, 15 bp, Homo sapiens
agcctggagtgcacc

SEQ ID NO: 1326073 - DNA, 15 bp, Homo sapiens
gagcctggagtgcac

SEQ ID NO: 1326074 - DNA, 15 bp, Homo sapiens
ggagcctggagtgca

SEQ ID NO: 1326075 - DNA, 15 bp, Homo sapiens
tggagcctggagtgc

SEQ ID NO: 1326076 - DNA, 15 bp, Homo sapiens
atggagcctggagtg

SEQ ID NO: 1326077 - DNA, 15 bp, Homo sapiens
gatggagcctggagt

SEQ ID NO: 1326078 - DNA, 15 bp, Homo sapiens
tgatggagcctggag

SEQ ID NO: 1326079 - DNA, 15 bp, Homo sapiens
gtgatggagcctgga

SEQ ID NO: 1326080 - DNA, 15 bp, Homo sapiens
tgtgatggagcctgg

SEQ ID NO: 1326081 - DNA, 15 bp, Homo sapiens
atgtgatggagcctg

SEQ ID NO: 1326082 - DNA, 15 bp, Homo sapiens
gatgtgatggagcct

SEQ ID NO: 1326083 - DNA, 15 bp, Homo sapiens
tgatgtgatggagcc

SEQ ID NO: 1326084 - DNA, 15 bp, Homo sapiens
gtgatgtgatggagc

SEQ ID NO: 1326085 - DNA, 15 bp, Homo sapiens
tgtgatgtgatggag

SEQ ID NO: 1326086 - DNA, 15 bp, Homo sapiens
gtgtgatgtgatgga

SEQ ID NO: 1326087 - DNA, 15 bp, Homo sapiens
cgtgtgatgtgatgg

SEQ ID NO: 1326088 - DNA, 15 bp, Homo sapiens
gcgtgtgatgtgatg

SEQ ID NO: 1326089 - DNA, 15 bp, Homo sapiens
agcgtgtgatgtgat

SEQ ID NO: 1326090 - DNA, 15 bp, Homo sapiens
tagcgtgtgatgtga

SEQ ID NO: 1326091 - DNA, 15 bp, Homo sapiens
ctagcgtgtgatgtg

SEQ ID NO: 1326092 - DNA, 15 bp, Homo sapiens
cctagcgtgtgatgt

SEQ ID NO: 1326093 - DNA, 15 bp, Homo sapiens
ccctagcgtgtgatg

SEQ ID NO: 1326094 - DNA, 15 bp, Homo sapiens
cccctagcgtgtgat

SEQ ID NO: 1326095 - DNA, 15 bp, Homo sapiens
gcccctagcgtgtga

SEQ ID NO: 1326096 - DNA, 15 bp, Homo sapiens
cgcccctagcgtgtg

SEQ ID NO: 1326097 - DNA, 15 bp, Homo sapiens
acgcccctagcgtgt

SEQ ID NO: 1326098 - DNA, 15 bp, Homo sapiens
cacgcccctagcgtg

SEQ ID NO: 1326099 - DNA, 15 bp, Homo sapiens
tcacgcccctagcgt

SEQ ID NO: 1326100 - DNA, 15 bp, Homo sapiens
gtcacgcccctagcg

SEQ ID NO: 1326101 - DNA, 15 bp, Homo sapiens
ggtcacgcccctagc

SEQ ID NO: 1326102 - DNA, 15 bp, Homo sapiens
aggtcacgcccctag

SEQ ID NO: 1326103 - DNA, 15 bp, Homo sapiens
aaggtcacgccccta

SEQ ID NO: 1326104 - DNA, 15 bp, Homo sapiens
caaggtcacgcccct

SEQ ID NO: 1326105 - DNA, 15 bp, Homo sapiens
ccaaggtcacgcccc

SEQ ID NO: 1326106 - DNA, 15 bp, Homo sapiens
cccaaggtcacgccc

SEQ ID NO: 1326107 - DNA, 15 bp, Homo sapiens
tcccaaggtcacgcc

SEQ ID NO: 1326108 - DNA, 15 bp, Homo sapiens
ttcccaaggtcacgc

SEQ ID NO: 1326109 - DNA, 15 bp, Homo sapiens
tttcccaaggtcacg

SEQ ID NO: 1326110 - DNA, 15 bp, Homo sapiens
ttttcccaaggtcac

SEQ ID NO: 1326111 - DNA, 15 bp, Homo sapiens
attttcccaaggtca

SEQ ID NO: 1326112 - DNA, 15 bp, Homo sapiens
gattttcccaaggtc

SEQ ID NO: 1326113 - DNA, 15 bp, Homo sapiens
tgattttcccaaggt

SEQ ID NO: 1326114 - DNA, 15 bp, Homo sapiens
gtgattttcccaagg

SEQ ID NO: 1326115 - DNA, 15 bp, Homo sapiens
agtgattttcccaag

SEQ ID NO: 1326116 - DNA, 15 bp, Homo sapiens
aagtgattttcccaa

SEQ ID NO: 1326117 - DNA, 15 bp, Homo sapiens
aaagtgattttccca

SEQ ID NO: 1326118 - DNA, 15 bp, Homo sapiens
caaagtgattttccc

SEQ ID NO: 1326119 - DNA, 15 bp, Homo sapiens
gcaaagtgattttcc

SEQ ID NO: 1326120 - DNA, 15 bp, Homo sapiens
ggcaaagtgattttc

SEQ ID NO: 1326121 - DNA, 15 bp, Homo sapiens
aggcaaagtgatttt

SEQ ID NO: 1326122 - DNA, 15 bp, Homo sapiens
aaggcaaagtgattt

SEQ ID NO: 1326123 - DNA, 15 bp, Homo sapiens
caaggcaaagtgatt

SEQ ID NO: 1326124 - DNA, 15 bp, Homo sapiens
acaaggcaaagtgat

SEQ ID NO: 1326125 - DNA, 15 bp, Homo sapiens
cacaaggcaaagtga

SEQ ID NO: 1326126 - DNA, 15 bp, Homo sapiens
gcacaaggcaaagtg

SEQ ID NO: 1326127 - DNA, 15 bp, Homo sapiens
agcacaaggcaaagt

SEQ ID NO: 1326128 - DNA, 15 bp, Homo sapiens
aagcacaaggcaaag

SEQ ID NO: 1326129 - DNA, 15 bp, Homo sapiens
aaagcacaaggcaaa

SEQ ID NO: 1326130 - DNA, 15 bp, Homo sapiens
aaaagcacaaggcaa

SEQ ID NO: 1326131 - DNA, 15 bp, Homo sapiens
taaaagcacaaggca

SEQ ID NO: 1326132 - DNA, 15 bp, Homo sapiens
gtaaaagcacaaggc

SEQ ID NO: 1326133 - DNA, 15 bp, Homo sapiens
tgtaaaagcacaagg

SEQ ID NO: 1326134 - DNA, 15 bp, Homo sapiens
ctgtaaaagcacaag

SEQ ID NO: 1326135 - DNA, 15 bp, Homo sapiens
tctgtaaaagcacaa

SEQ ID NO: 1326136 - DNA, 15 bp, Homo sapiens
ttctgtaaaagcaca

SEQ ID NO: 1326137 - DNA, 15 bp, Homo sapiens
tttctgtaaaagcac

SEQ ID NO: 1326138 - DNA, 15 bp, Homo sapiens
ctttctgtaaaagca

SEQ ID NO: 1326139 - DNA, 15 bp, Homo sapiens
tctttctgtaaaagc

SEQ ID NO: 1326140 - DNA, 15 bp, Homo sapiens
ttctttctgtaaaag

SEQ ID NO: 1326141 - DNA, 15 bp, Homo sapiens
gttctttctgtaaaa

SEQ ID NO: 1326142 - DNA, 15 bp, Homo sapiens
tgttctttctgtaaa

SEQ ID NO: 1326143 - DNA, 15 bp, Homo sapiens
ttgttctttctgtaa

SEQ ID NO: 1326144 - DNA, 15 bp, Homo sapiens
cttgttctttctgta

SEQ ID NO: 1326145 - DNA, 15 bp, Homo sapiens
ccttgttctttctgt

SEQ ID NO: 1326146 - DNA, 15 bp, Homo sapiens
gccttgttctttctg

SEQ ID NO: 1326147 - DNA, 15 bp, Homo sapiens
ggccttgttctttct

SEQ ID NO: 1326148 - DNA, 15 bp, Homo sapiens
aggccttgttctttc

SEQ ID NO: 1326149 - DNA, 15 bp, Homo sapiens
aaggccttgttcttt

SEQ ID NO: 1326150 - DNA, 15 bp, Homo sapiens
aaaggccttgttctt

SEQ ID NO: 1326151 - DNA, 15 bp, Homo sapiens
aaaaggccttgttct

SEQ ID NO: 1326152 - DNA, 15 bp, Homo sapiens
caaaaggccttgttc

SEQ ID NO: 1326153 - DNA, 15 bp, Homo sapiens
acaaaaggccttgtt

SEQ ID NO: 1326154 - DNA, 15 bp, Homo sapiens
cacaaaaggccttgt

SEQ ID NO: 1326155 - DNA, 15 bp, Homo sapiens
ccacaaaaggccttg

SEQ ID NO: 1326156 - DNA, 15 bp, Homo sapiens
cccacaaaaggcctt

SEQ ID NO: 1326157 - DNA, 15 bp, Homo sapiens
ccccacaaaaggcct

SEQ ID NO: 1326158 - DNA, 15 bp, Homo sapiens
cccccacaaaaggcc

SEQ ID NO: 1326159 - DNA, 15 bp, Homo sapiens
tcccccacaaaaggc

SEQ ID NO: 1326160 - DNA, 15 bp, Homo sapiens
atcccccacaaaagg

SEQ ID NO: 1326161 - DNA, 15 bp, Homo sapiens
aatcccccacaaaag

SEQ ID NO: 1326162 - DNA, 15 bp, Homo sapiens
caatcccccacaaaa

SEQ ID NO: 1326163 - DNA, 15 bp, Homo sapiens
acaatcccccacaaa

SEQ ID NO: 1326164 - DNA, 15 bp, Homo sapiens
cacaatcccccacaa

SEQ ID NO: 1326165 - DNA, 15 bp, Homo sapiens
ccacaatcccccaca

SEQ ID NO: 1326166 - DNA, 15 bp, Homo sapiens
tccacaatcccccac

SEQ ID NO: 1326167 - DNA, 15 bp, Homo sapiens
ctccacaatccccca

SEQ ID NO: 1326168 - DNA, 15 bp, Homo sapiens
tctccacaatccccc

SEQ ID NO: 1326169 - DNA, 15 bp, Homo sapiens
ctctccacaatcccc

SEQ ID NO: 1326170 - DNA, 15 bp, Homo sapiens
cctctccacaatccc

SEQ ID NO: 1326171 - DNA, 15 bp, Homo sapiens
tcctctccacaatcc

SEQ ID NO: 1326172 - DNA, 15 bp, Homo sapiens
ttcctctccacaatc

SEQ ID NO: 1326173 - DNA, 15 bp, Homo sapiens
attcctctccacaat

SEQ ID NO: 1326174 - DNA, 15 bp, Homo sapiens
cattcctctccacaa

SEQ ID NO: 1326175 - DNA, 15 bp, Homo sapiens
acattcctctccaca

SEQ ID NO: 1326176 - DNA, 15 bp, Homo sapiens
gacattcctctccac

SEQ ID NO: 1326177 - DNA, 15 bp, Homo sapiens
ggacattcctctcca

SEQ ID NO: 1326178 - DNA, 15 bp, Homo sapiens
tggacattcctctcc

SEQ ID NO: 1326179 - DNA, 15 bp, Homo sapiens
atggacattcctctc

SEQ ID NO: 1326180 - DNA, 15 bp, Homo sapiens
catggacattcctct

SEQ ID NO: 1326181 - DNA, 15 bp, Homo sapiens
acatggacattcctc

SEQ ID NO: 1326182 - DNA, 15 bp, Homo sapiens
cacatggacattcct

SEQ ID NO: 1326183 - DNA, 15 bp, Homo sapiens
acacatggacattcc

SEQ ID NO: 1326184 - DNA, 15 bp, Homo sapiens
tacacatggacattc

SEQ ID NO: 1326185 - DNA, 15 bp, Homo sapiens
atacacatggacatt

SEQ ID NO: 1326186 - DNA, 15 bp, Homo sapiens
catacacatggacat

SEQ ID NO: 1326187 - DNA, 15 bp, Homo sapiens
acatacacatggaca

SEQ ID NO: 1326188 - DNA, 15 bp, Homo sapiens
cacatacacatggac

SEQ ID NO: 1326189 - DNA, 15 bp, Homo sapiens
acacatacacatgga

SEQ ID NO: 1326190 - DNA, 15 bp, Homo sapiens
tacacatacacatgg

SEQ ID NO: 1326191 - DNA, 15 bp, Homo sapiens
atacacatacacatg

SEQ ID NO: 1326192 - DNA, 15 bp, Homo sapiens
atacatacacataca

SEQ ID NO: 1326193 - DNA, 15 bp, Homo sapiens
aatacatacacatac

SEQ ID NO: 1326194 - DNA, 15 bp, Homo sapiens
caatacatacacata

SEQ ID NO: 1326195 - DNA, 15 bp, Homo sapiens
gcaatacatacacat

SEQ ID NO: 1326196 - DNA, 15 bp, Homo sapiens
tgcaatacatacaca

SEQ ID NO: 1326197 - DNA, 15 bp, Homo sapiens
atgcaatacatacac

SEQ ID NO: 1326198 - DNA, 15 bp, Homo sapiens
tatgcaatacataca

SEQ ID NO: 1326199 - DNA, 15 bp, Homo sapiens
atatgcaatacatac

SEQ ID NO: 1326200 - DNA, 15 bp, Homo sapiens
gatatgcaatacata

SEQ ID NO: 1326201 - DNA, 15 bp, Homo sapiens
agatatgcaatacat

SEQ ID NO: 1326202 - DNA, 15 bp, Homo sapiens
tagatatgcaataca

SEQ ID NO: 1326203 - DNA, 15 bp, Homo sapiens
atagatatgcaatac

SEQ ID NO: 1326204 - DNA, 15 bp, Homo sapiens
catagatatgcaata

SEQ ID NO: 1326205 - DNA, 15 bp, Homo sapiens
acatagatatgcaat

SEQ ID NO: 1326206 - DNA, 15 bp, Homo sapiens
cacatagatatgcaa

SEQ ID NO: 1326207 - DNA, 15 bp, Homo sapiens
ccacatagatatgca

SEQ ID NO: 1326208 - DNA, 15 bp, Homo sapiens
accacatagatatgc

SEQ ID NO: 1326209 - DNA, 15 bp, Homo sapiens
gaccacatagatatg

SEQ ID NO: 1326210 - DNA, 15 bp, Homo sapiens
tgaccacatagatat

SEQ ID NO: 1326211 - DNA, 15 bp, Homo sapiens
atgaccacatagata

SEQ ID NO: 1326212 - DNA, 15 bp, Homo sapiens
aatgaccacatagat

SEQ ID NO: 1326213 - DNA, 15 bp, Homo sapiens
gaatgaccacataga

SEQ ID NO: 1326214 - DNA, 15 bp, Homo sapiens
ggaatgaccacatag

SEQ ID NO: 1326215 - DNA, 15 bp, Homo sapiens
gggaatgaccacata

SEQ ID NO: 1326216 - DNA, 15 bp, Homo sapiens
agggaatgaccacat

SEQ ID NO: 1326217 - DNA, 15 bp, Homo sapiens
cagggaatgaccaca

SEQ ID NO: 1326218 - DNA, 15 bp, Homo sapiens
ccagggaatgaccac

SEQ ID NO: 1326219 - DNA, 15 bp, Homo sapiens
accagggaatgacca

SEQ ID NO: 1326220 - DNA, 15 bp, Homo sapiens
taccagggaatgacc

SEQ ID NO: 1326221 - DNA, 15 bp, Homo sapiens
gtaccagggaatgac

SEQ ID NO: 1326222 - DNA, 15 bp, Homo sapiens
tgtaccagggaatga

SEQ ID NO: 1326223 - DNA, 15 bp, Homo sapiens
atgtaccagggaatg

SEQ ID NO: 1326224 - DNA, 15 bp, Homo sapiens
tatgtaccagggaat

SEQ ID NO: 1326225 - DNA, 15 bp, Homo sapiens
ctatgtaccagggaa

SEQ ID NO: 1326226 - DNA, 15 bp, Homo sapiens
actatgtaccaggga

SEQ ID NO: 1326227 - DNA, 15 bp, Homo sapiens
tactatgtaccaggg

SEQ ID NO: 1326228 - DNA, 15 bp, Homo sapiens
ctactatgtaccagg

SEQ ID NO: 1326229 - DNA, 15 bp, Homo sapiens
cctactatgtaccag

SEQ ID NO: 1326230 - DNA, 15 bp, Homo sapiens
acctactatgtacca

SEQ ID NO: 1326231 - DNA, 15 bp, Homo sapiens
agcacctactatgta

SEQ ID NO: 1326232 - DNA, 15 bp, Homo sapiens
aagcacctactatgt

SEQ ID NO: 1326233 - DNA, 15 bp, Homo sapiens
gaagcacctactatg

SEQ ID NO: 1326234 - DNA, 15 bp, Homo sapiens
tgaagcacctactat

SEQ ID NO: 1326235 - DNA, 15 bp, Homo sapiens
atgaagcacctacta

SEQ ID NO: 1326236 - DNA, 15 bp, Homo sapiens
tatgaagcacctact

SEQ ID NO: 1326237 - DNA, 15 bp, Homo sapiens
ttatgaagcacctac

SEQ ID NO: 1326238 - DNA, 15 bp, Homo sapiens
tttatgaagcaccta

SEQ ID NO: 1326239 - DNA, 15 bp, Homo sapiens
gtttatgaagcacct

SEQ ID NO: 1326240 - DNA, 15 bp, Homo sapiens
tgtttatgaagcacc

SEQ ID NO: 1326241 - DNA, 15 bp, Homo sapiens
ttgtttatgaagcac

SEQ ID NO: 1326242 - DNA, 15 bp, Homo sapiens
tttgtttatgaagca

SEQ ID NO: 1326243 - DNA, 15 bp, Homo sapiens
ttttgtttatgaagc

SEQ ID NO: 1326244 - DNA, 15 bp, Homo sapiens
tttttgtttatgaag

SEQ ID NO: 1326245 - DNA, 15 bp, Homo sapiens
atttttgtttatgaa

SEQ ID NO: 1326246 - DNA, 15 bp, Homo sapiens
tatttttgtttatga

SEQ ID NO: 1326247 - DNA, 15 bp, Homo sapiens
gtatttttgtttatg

SEQ ID NO: 1326248 - DNA, 15 bp, Homo sapiens
ggtatttttgtttat

SEQ ID NO: 1326249 - DNA, 15 bp, Homo sapiens
gggtatttttgttta

SEQ ID NO: 1326250 - DNA, 15 bp, Homo sapiens
agggtatttttgttt

SEQ ID NO: 1326251 - DNA, 15 bp, Homo sapiens
gagggtatttttgtt

SEQ ID NO: 1326252 - DNA, 15 bp, Homo sapiens
ggagggtatttttgt

SEQ ID NO: 1326253 - DNA, 15 bp, Homo sapiens
gggagggtatttttg

SEQ ID NO: 1326254 - DNA, 15 bp, Homo sapiens
tgggagggtattttt

SEQ ID NO: 1326255 - DNA, 15 bp, Homo sapiens
atgggagggtatttt

SEQ ID NO: 1326256 - DNA, 15 bp, Homo sapiens
tatgggagggtattt

SEQ ID NO: 1326257 - DNA, 15 bp, Homo sapiens
atatgggagggtatt

SEQ ID NO: 1326258 - DNA, 15 bp, Homo sapiens
gatatgggagggtat

SEQ ID NO: 1326259 - DNA, 15 bp, Homo sapiens
tgatatgggagggta

SEQ ID NO: 1326260 - DNA, 15 bp, Homo sapiens
gtgatatgggagggt

SEQ ID NO: 1326261 - DNA, 15 bp, Homo sapiens
agtgatatgggaggg

SEQ ID NO: 1326262 - DNA, 15 bp, Homo sapiens
cagtgatatgggagg

SEQ ID NO: 1326263 - DNA, 15 bp, Homo sapiens
gcagtgatatgggag

SEQ ID NO: 1326264 - DNA, 15 bp, Homo sapiens
ggcagtgatatggga

SEQ ID NO: 1326265 - DNA, 15 bp, Homo sapiens
gggcagtgatatggg

SEQ ID NO: 1326266 - DNA, 15 bp, Homo sapiens
agggcagtgatatgg

SEQ ID NO: 1326267 - DNA, 15 bp, Homo sapiens
aagggcagtgatatg

SEQ ID NO: 1326268 - DNA, 15 bp, Homo sapiens
gaagggcagtgatat

SEQ ID NO: 1326269 - DNA, 15 bp, Homo sapiens
agaagggcagtgata

SEQ ID NO: 1326270 - DNA, 15 bp, Homo sapiens
tagaagggcagtgat

SEQ ID NO: 1326271 - DNA, 15 bp, Homo sapiens
atagaagggcagtga

SEQ ID NO: 1326272 - DNA, 15 bp, Homo sapiens
aatagaagggcagtg

SEQ ID NO: 1326273 - DNA, 15 bp, Homo sapiens
gaatagaagggcagt

SEQ ID NO: 1326274 - DNA, 15 bp, Homo sapiens
ggaatagaagggcag

SEQ ID NO: 1326275 - DNA, 15 bp, Homo sapiens
tggaatagaagggca

SEQ ID NO: 1326276 - DNA, 15 bp, Homo sapiens
atggaatagaagggc

SEQ ID NO: 1326277 - DNA, 15 bp, Homo sapiens
aatggaatagaaggg

SEQ ID NO: 1326278 - DNA, 15 bp, Homo sapiens
aaatggaatagaagg

SEQ ID NO: 1326279 - DNA, 15 bp, Homo sapiens
caaatggaatagaag

SEQ ID NO: 1326280 - DNA, 15 bp, Homo sapiens
acaaatggaatagaa

SEQ ID NO: 1326281 - DNA, 15 bp, Homo sapiens
cacaaatggaataga

SEQ ID NO: 1326282 - DNA, 15 bp, Homo sapiens
gcacaaatggaatag

SEQ ID NO: 1326283 - DNA, 15 bp, Homo sapiens
ggcacaaatggaata

SEQ ID NO: 1326284 - DNA, 15 bp, Homo sapiens
tggcacaaatggaat

SEQ ID NO: 1326285 - DNA, 15 bp, Homo sapiens
atggcacaaatggaa

SEQ ID NO: 1326286 - DNA, 15 bp, Homo sapiens
tatggcacaaatgga

SEQ ID NO: 1326287 - DNA, 15 bp, Homo sapiens
ctatggcacaaatgg

SEQ ID NO: 1326288 - DNA, 15 bp, Homo sapiens
actatggcacaaatg

SEQ ID NO: 1326289 - DNA, 15 bp, Homo sapiens
cactatggcacaaat

SEQ ID NO: 1326290 - DNA, 15 bp, Homo sapiens
acactatggcacaaa

SEQ ID NO: 1326291 - DNA, 15 bp, Homo sapiens
cacactatggcacaa

SEQ ID NO: 1326292 - DNA, 15 bp, Homo sapiens
acacactatggcaca

SEQ ID NO: 1326293 - DNA, 15 bp, Homo sapiens
cacacactatggcac

SEQ ID NO: 1326294 - DNA, 15 bp, Homo sapiens
tcacacactatggca

SEQ ID NO: 1326295 - DNA, 15 bp, Homo sapiens
gtcacacactatggc

SEQ ID NO: 1326296 - DNA, 15 bp, Homo sapiens
ggtcacacactatgg

SEQ ID NO: 1326297 - DNA, 15 bp, Homo sapiens
aggtcacacactatg

SEQ ID NO: 1326298 - DNA, 15 bp, Homo sapiens
taggtcacacactat

SEQ ID NO: 1326299 - DNA, 15 bp, Homo sapiens
ttaggtcacacacta

SEQ ID NO: 1326300 - DNA, 15 bp, Homo sapiens
cttaggtcacacact

SEQ ID NO: 1326301 - DNA, 15 bp, Homo sapiens
tcttaggtcacacac

SEQ ID NO: 1326302 - DNA, 15 bp, Homo sapiens
ctcttaggtcacaca

SEQ ID NO: 1326303 - DNA, 15 bp, Homo sapiens
actcttaggtcacac

SEQ ID NO: 1326304 - DNA, 15 bp, Homo sapiens
tactcttaggtcaca

SEQ ID NO: 1326305 - DNA, 15 bp, Homo sapiens
ctactcttaggtcac

SEQ ID NO: 1326306 - DNA, 15 bp, Homo sapiens
tctactcttaggtca

SEQ ID NO: 1326307 - DNA, 15 bp, Homo sapiens
atctactcttaggtc

SEQ ID NO: 1326308 - DNA, 15 bp, Homo sapiens
tatctactcttaggt

SEQ ID NO: 1326309 - DNA, 15 bp, Homo sapiens
ttatctactcttagg

SEQ ID NO: 1326310 - DNA, 15 bp, Homo sapiens
tttatctactcttag

SEQ ID NO: 1326311 - DNA, 15 bp, Homo sapiens
ctttatctactctta

SEQ ID NO: 1326312 - DNA, 15 bp, Homo sapiens
gctttatctactctt

SEQ ID NO: 1326313 - DNA, 15 bp, Homo sapiens
tgctttatctactct

SEQ ID NO: 1326314 - DNA, 15 bp, Homo sapiens
gtgctttatctactc

SEQ ID NO: 1326315 - DNA, 15 bp, Homo sapiens
agtgctttatctact

SEQ ID NO: 1326316 - DNA, 15 bp, Homo sapiens
aagtgctttatctac

SEQ ID NO: 1326317 - DNA, 15 bp, Homo sapiens
aaagtgctttatcta

SEQ ID NO: 1326318 - DNA, 15 bp, Homo sapiens
aaaagtgctttatct

SEQ ID NO: 1326319 - DNA, 15 bp, Homo sapiens
aaaaagtgctttatc

SEQ ID NO: 1326320 - DNA, 15 bp, Homo sapiens
aaaaaagtgctttat

SEQ ID NO: 1326321 - DNA, 15 bp, Homo sapiens
aaaaaaagtgcttta

SEQ ID NO: 1326322 - DNA, 15 bp, Homo sapiens
caaaaaaagtgcttt

SEQ ID NO: 1326323 - DNA, 15 bp, Homo sapiens
acaaaaaaagtgctt

SEQ ID NO: 1326324 - DNA, 15 bp, Homo sapiens
aacaaaaaaagtgct

SEQ ID NO: 1326325 - DNA, 15 bp, Homo sapiens
aaacaaaaaaagtgc

SEQ ID NO: 1326326 - DNA, 15 bp, Homo sapiens
caaacaaaaaaagtg

SEQ ID NO: 1326327 - DNA, 15 bp, Homo sapiens
acaaacaaaaaaagt

SEQ ID NO: 1326328 - DNA, 15 bp, Homo sapiens
caaaacaaacaaaca

SEQ ID NO: 1326329 - DNA, 15 bp, Homo sapiens
ccaaaacaaacaaac

SEQ ID NO: 1326330 - DNA, 15 bp, Homo sapiens
accaaaacaaacaaa

SEQ ID NO: 1326331 - DNA, 15 bp, Homo sapiens
aaccaaaacaaacaa

SEQ ID NO: 1326332 - DNA, 15 bp, Homo sapiens
aaaccaaaacaaaca

SEQ ID NO: 1326333 - DNA, 15 bp, Homo sapiens
taaaccaaaacaaac

SEQ ID NO: 1326334 - DNA, 15 bp, Homo sapiens
ctaaaccaaaacaaa

SEQ ID NO: 1326335 - DNA, 15 bp, Homo sapiens
tctaaaccaaaacaa

SEQ ID NO: 1326336 - DNA, 15 bp, Homo sapiens
atctaaaccaaaaca

SEQ ID NO: 1326337 - DNA, 15 bp, Homo sapiens
catctaaaccaaaac

SEQ ID NO: 1326338 - DNA, 15 bp, Homo sapiens
ccatctaaaccaaaa

SEQ ID NO: 1326339 - DNA, 15 bp, Homo sapiens
tccatctaaaccaaa

SEQ ID NO: 1326340 - DNA, 15 bp, Homo sapiens
ctccatctaaaccaa

SEQ ID NO: 1326341 - DNA, 15 bp, Homo sapiens
actccatctaaacca

SEQ ID NO: 1326342 - DNA, 15 bp, Homo sapiens
gactccatctaaacc

SEQ ID NO: 1326343 - DNA, 15 bp, Homo sapiens
agactccatctaaac

SEQ ID NO: 1326344 - DNA, 15 bp, Homo sapiens
gagactccatctaaa

SEQ ID NO: 1326345 - DNA, 15 bp, Homo sapiens
tgagactccatctaa

SEQ ID NO: 1326346 - DNA, 15 bp, Homo sapiens
gtgagactccatcta

SEQ ID NO: 1326347 - DNA, 15 bp, Homo sapiens
tgagattgagccact

SEQ ID NO: 1326348 - DNA, 15 bp, Homo sapiens
ctgagattgagccac

SEQ ID NO: 1326349 - DNA, 15 bp, Homo sapiens
gctgagattgagcca

SEQ ID NO: 1326350 - DNA, 15 bp, Homo sapiens
agctgagattgagcc

SEQ ID NO: 1326351 - DNA, 15 bp, Homo sapiens
gagctgagattgagc

SEQ ID NO: 1326352 - DNA, 15 bp, Homo sapiens
tgagctgagattgag

SEQ ID NO: 1326353 - DNA, 15 bp, Homo sapiens
gtgagctgagattga

SEQ ID NO: 1326354 - DNA, 15 bp, Homo sapiens
cgcagtgagctgaga

SEQ ID NO: 1326355 - DNA, 15 bp, Homo sapiens
tcgcagtgagctgag

SEQ ID NO: 1326356 - DNA, 15 bp, Homo sapiens
gtcgcagtgagctga

SEQ ID NO: 1326357 - DNA, 15 bp, Homo sapiens
ggtcgcagtgagctg

SEQ ID NO: 1326358 - DNA, 15 bp, Homo sapiens
aggtcgcagtgagct

SEQ ID NO: 1326359 - DNA, 15 bp, Homo sapiens
cggaggtcgcagtga

SEQ ID NO: 1326360 - DNA, 15 bp, Homo sapiens
gcggaggtcgcagtg

SEQ ID NO: 1326361 - DNA, 15 bp, Homo sapiens
ggcggaggtcgcagt

SEQ ID NO: 1326362 - DNA, 15 bp, Homo sapiens
aggcggaggtcgcag

SEQ ID NO: 1326363 - DNA, 15 bp, Homo sapiens
gaggcggaggtcgca

SEQ ID NO: 1326364 - DNA, 15 bp, Homo sapiens
ggaggcggaggtcgc

SEQ ID NO: 1326365 - DNA, 15 bp, Homo sapiens
aggaggcggaggtcg

SEQ ID NO: 1326366 - DNA, 15 bp, Homo sapiens
caggaggcggaggtc

SEQ ID NO: 1326367 - DNA, 15 bp, Homo sapiens
aaatcacttgaatcc

SEQ ID NO: 1326368 - DNA, 15 bp, Homo sapiens
aaaatcacttgaatc

SEQ ID NO: 1326369 - DNA, 15 bp, Homo sapiens
gaaaatcacttgaat

SEQ ID NO: 1326370 - DNA, 15 bp, Homo sapiens
tgaaaatcacttgaa

SEQ ID NO: 1326371 - DNA, 15 bp, Homo sapiens
atgaaaatcacttga

SEQ ID NO: 1326372 - DNA, 15 bp, Homo sapiens
catgaaaatcacttg

SEQ ID NO: 1326373 - DNA, 15 bp, Homo sapiens
gcatgaaaatcactt

SEQ ID NO: 1326374 - DNA, 15 bp, Homo sapiens
ggcatgaaaatcact

SEQ ID NO: 1326375 - DNA, 15 bp, Homo sapiens
aggcatgaaaatcac

SEQ ID NO: 1326376 - DNA, 15 bp, Homo sapiens
gaggcatgaaaatca

SEQ ID NO: 1326377 - DNA, 15 bp, Homo sapiens
cgaggcatgaaaatc

SEQ ID NO: 1326378 - DNA, 15 bp, Homo sapiens
ccgaggcatgaaaat

SEQ ID NO: 1326379 - DNA, 15 bp, Homo sapiens
gccgaggcatgaaaa

SEQ ID NO: 1326380 - DNA, 15 bp, Homo sapiens
agccgaggcatgaaa

SEQ ID NO: 1326381 - DNA, 15 bp, Homo sapiens
aagccgaggcatgaa

SEQ ID NO: 1326382 - DNA, 15 bp, Homo sapiens
gaagccgaggcatga

SEQ ID NO: 1326383 - DNA, 15 bp, Homo sapiens
ggaagccgaggcatg

SEQ ID NO: 1326384 - DNA, 15 bp, Homo sapiens
gggaagccgaggcat

SEQ ID NO: 1326385 - DNA, 15 bp, Homo sapiens
ctgggaagccgaggc

SEQ ID NO: 1326386 - DNA, 15 bp, Homo sapiens
tctgggaagccgagg

SEQ ID NO: 1326387 - DNA, 15 bp, Homo sapiens
ttctgggaagccgag

SEQ ID NO: 1326388 - DNA, 15 bp, Homo sapiens
attctgggaagccga

SEQ ID NO: 1326389 - DNA, 15 bp, Homo sapiens
tattctgggaagccg

SEQ ID NO: 1326390 - DNA, 15 bp, Homo sapiens
ctattctgggaagcc

SEQ ID NO: 1326391 - DNA, 15 bp, Homo sapiens
gctattctgggaagc

SEQ ID NO: 1326392 - DNA, 15 bp, Homo sapiens
agctattctgggaag

SEQ ID NO: 1326393 - DNA, 15 bp, Homo sapiens
cagctattctgggaa

SEQ ID NO: 1326394 - DNA, 15 bp, Homo sapiens
ccagctattctggga

SEQ ID NO: 1326395 - DNA, 15 bp, Homo sapiens
cccagctattctggg

SEQ ID NO: 1326396 - DNA, 15 bp, Homo sapiens
ataatcccagctatt

SEQ ID NO: 1326397 - DNA, 15 bp, Homo sapiens
tataatcccagctat

SEQ ID NO: 1326398 - DNA, 15 bp, Homo sapiens
gtgcctataatccca

SEQ ID NO: 1326399 - DNA, 15 bp, Homo sapiens
ggtgcctataatccc

SEQ ID NO: 1326400 - DNA, 15 bp, Homo sapiens
aggtgcctataatcc

SEQ ID NO: 1326401 - DNA, 15 bp, Homo sapiens
caggtgcctataatc

SEQ ID NO: 1326402 - DNA, 15 bp, Homo sapiens
gcaggtgcctataat

SEQ ID NO: 1326403 - DNA, 15 bp, Homo sapiens
ggcaggtgcctataa

SEQ ID NO: 1326404 - DNA, 15 bp, Homo sapiens
tggcaggtgcctata

SEQ ID NO: 1326405 - DNA, 15 bp, Homo sapiens
atggcaggtgcctat

SEQ ID NO: 1326406 - DNA, 15 bp, Homo sapiens
gatggcaggtgccta

SEQ ID NO: 1326407 - DNA, 15 bp, Homo sapiens
cgatggcaggtgcct

SEQ ID NO: 1326408 - DNA, 15 bp, Homo sapiens
acgatggcaggtgcc

SEQ ID NO: 1326409 - DNA, 15 bp, Homo sapiens
cacgatggcaggtgc

SEQ ID NO: 1326410 - DNA, 15 bp, Homo sapiens
gcacgatggcaggtg

SEQ ID NO: 1326411 - DNA, 15 bp, Homo sapiens
ggcacgatggcaggt

SEQ ID NO: 1326412 - DNA, 15 bp, Homo sapiens
gggcacgatggcagg

SEQ ID NO: 1326413 - DNA, 15 bp, Homo sapiens
tgggcacgatggcag

SEQ ID NO: 1326414 - DNA, 15 bp, Homo sapiens
ctgggcacgatggca

SEQ ID NO: 1326415 - DNA, 15 bp, Homo sapiens
gctgggcacgatggc

SEQ ID NO: 1326416 - DNA, 15 bp, Homo sapiens
agctgggcacgatgg

SEQ ID NO: 1326417 - DNA, 15 bp, Homo sapiens
tagctgggcacgatg

SEQ ID NO: 1326418 - DNA, 15 bp, Homo sapiens
ttagctgggcacgat

SEQ ID NO: 1326419 - DNA, 15 bp, Homo sapiens
attagctgggcacga

SEQ ID NO: 1326420 - DNA, 15 bp, Homo sapiens
aattagctgggcacg

SEQ ID NO: 1326421 - DNA, 15 bp, Homo sapiens
gtttctactaaaaat

SEQ ID NO: 1326422 - DNA, 15 bp, Homo sapiens
cgaaaccccgtttct

SEQ ID NO: 1326423 - DNA, 15 bp, Homo sapiens
gcgaaaccccgtttc

SEQ ID NO: 1326424 - DNA, 15 bp, Homo sapiens
ggcgaaaccccgttt

SEQ ID NO: 1326425 - DNA, 15 bp, Homo sapiens
tggcgaaaccccgtt

SEQ ID NO: 1326426 - DNA, 15 bp, Homo sapiens
atggcgaaaccccgt

SEQ ID NO: 1326427 - DNA, 15 bp, Homo sapiens
catggcgaaaccccg

SEQ ID NO: 1326428 - DNA, 15 bp, Homo sapiens
tagttcgagaccagc

SEQ ID NO: 1326429 - DNA, 15 bp, Homo sapiens
gtagttcgagaccag

SEQ ID NO: 1326430 - DNA, 15 bp, Homo sapiens
agtagttcgagacca

SEQ ID NO: 1326431 - DNA, 15 bp, Homo sapiens
cagtagttcgagacc

SEQ ID NO: 1326432 - DNA, 15 bp, Homo sapiens
ccagtagttcgagac

SEQ ID NO: 1326433 - DNA, 15 bp, Homo sapiens
gccagtagttcgaga

SEQ ID NO: 1326434 - DNA, 15 bp, Homo sapiens
ggccagtagttcgag

SEQ ID NO: 1326435 - DNA, 15 bp, Homo sapiens
aggccagtagttcga

SEQ ID NO: 1326436 - DNA, 15 bp, Homo sapiens
gaggccagtagttcg

SEQ ID NO: 1326437 - DNA, 15 bp, Homo sapiens
tgaggccagtagttc

SEQ ID NO: 1326438 - DNA, 15 bp, Homo sapiens
ttgaggccagtagtt

SEQ ID NO: 1326439 - DNA, 15 bp, Homo sapiens
tttgaggccagtagt

SEQ ID NO: 1326440 - DNA, 15 bp, Homo sapiens
atttgaggccagtag

SEQ ID NO: 1326441 - DNA, 15 bp, Homo sapiens
catttgaggccagta

SEQ ID NO: 1326442 - DNA, 15 bp, Homo sapiens
tcatttgaggccagt

SEQ ID NO: 1326443 - DNA, 15 bp, Homo sapiens
ttcatttgaggccag

SEQ ID NO: 1326444 - DNA, 15 bp, Homo sapiens
gttcatttgaggcca

SEQ ID NO: 1326445 - DNA, 15 bp, Homo sapiens
ggttcatttgaggcc

SEQ ID NO: 1326446 - DNA, 15 bp, Homo sapiens
cggttcatttgaggc

SEQ ID NO: 1326447 - DNA, 15 bp, Homo sapiens
gcggttcatttgagg

SEQ ID NO: 1326448 - DNA, 15 bp, Homo sapiens
ggcggttcatttgag

SEQ ID NO: 1326449 - DNA, 15 bp, Homo sapiens
aggcggttcatttga

SEQ ID NO: 1326450 - DNA, 15 bp, Homo sapiens
caggcggttcatttg

SEQ ID NO: 1326451 - DNA, 15 bp, Homo sapiens
gcaggcggttcattt

SEQ ID NO: 1326452 - DNA, 15 bp, Homo sapiens
ggcaggcggttcatt

SEQ ID NO: 1326453 - DNA, 15 bp, Homo sapiens
aggcaggcggttcat

SEQ ID NO: 1326454 - DNA, 15 bp, Homo sapiens
aaggcaggcggttca

SEQ ID NO: 1326455 - DNA, 15 bp, Homo sapiens
caaggcaggcggttc

SEQ ID NO: 1326456 - DNA, 15 bp, Homo sapiens
ccaaggcaggcggtt

SEQ ID NO: 1326457 - DNA, 15 bp, Homo sapiens
accaaggcaggcggt

SEQ ID NO: 1326458 - DNA, 15 bp, Homo sapiens
gaccaaggcaggcgg

SEQ ID NO: 1326459 - DNA, 15 bp, Homo sapiens
agaccaaggcaggcg

SEQ ID NO: 1326460 - DNA, 15 bp, Homo sapiens
gagaccaaggcaggc

SEQ ID NO: 1326461 - DNA, 15 bp, Homo sapiens
cgagaccaaggcagg

SEQ ID NO: 1326462 - DNA, 15 bp, Homo sapiens
tcgagaccaaggcag

SEQ ID NO: 1326463 - DNA, 15 bp, Homo sapiens
ttcgagaccaaggca

SEQ ID NO: 1326464 - DNA, 15 bp, Homo sapiens
tttcgagaccaaggc

SEQ ID NO: 1326465 - DNA, 15 bp, Homo sapiens
ttttcgagaccaagg

SEQ ID NO: 1326466 - DNA, 15 bp, Homo sapiens
cttttcgagaccaag

SEQ ID NO: 1326467 - DNA, 15 bp, Homo sapiens
acttttcgagaccaa

SEQ ID NO: 1326468 - DNA, 15 bp, Homo sapiens
cacttttcgagacca

SEQ ID NO: 1326469 - DNA, 15 bp, Homo sapiens
gcacttttcgagacc

SEQ ID NO: 1326470 - DNA, 15 bp, Homo sapiens
agcacttttcgagac

SEQ ID NO: 1326471 - DNA, 15 bp, Homo sapiens
tagcacttttcgaga

SEQ ID NO: 1326472 - DNA, 15 bp, Homo sapiens
ctagcacttttcgag

SEQ ID NO: 1326473 - DNA, 15 bp, Homo sapiens
cctagcacttttcga

SEQ ID NO: 1326474 - DNA, 15 bp, Homo sapiens
tcctagcacttttcg

SEQ ID NO: 1326475 - DNA, 15 bp, Homo sapiens
atcctagcacttttc

SEQ ID NO: 1326476 - DNA, 15 bp, Homo sapiens
aatcctagcactttt

SEQ ID NO: 1326477 - DNA, 15 bp, Homo sapiens
agggcatggtggctc

SEQ ID NO: 1326478 - DNA, 15 bp, Homo sapiens
tagggcatggtggct

SEQ ID NO: 1326479 - DNA, 15 bp, Homo sapiens
gtagggcatggtggc

SEQ ID NO: 1326480 - DNA, 15 bp, Homo sapiens
ggtagggcatggtgg

SEQ ID NO: 1326481 - DNA, 15 bp, Homo sapiens
aggtagggcatggtg

SEQ ID NO: 1326482 - DNA, 15 bp, Homo sapiens
taggtagggcatggt

SEQ ID NO: 1326483 - DNA, 15 bp, Homo sapiens
ctaggtagggcatgg

SEQ ID NO: 1326484 - DNA, 15 bp, Homo sapiens
tctaggtagggcatg

SEQ ID NO: 1326485 - DNA, 15 bp, Homo sapiens
atctaggtagggcat

SEQ ID NO: 1326486 - DNA, 15 bp, Homo sapiens
tatctaggtagggca

SEQ ID NO: 1326487 - DNA, 15 bp, Homo sapiens
ttatctaggtagggc

SEQ ID NO: 1326488 - DNA, 15 bp, Homo sapiens
tttatctaggtaggg

SEQ ID NO: 1326489 - DNA, 15 bp, Homo sapiens
ctttatctaggtagg

SEQ ID NO: 1326490 - DNA, 15 bp, Homo sapiens
gctttatctaggtag

SEQ ID NO: 1326491 - DNA, 15 bp, Homo sapiens
tgctttatctaggta

SEQ ID NO: 1326492 - DNA, 15 bp, Homo sapiens
atgctttatctaggt

SEQ ID NO: 1326493 - DNA, 15 bp, Homo sapiens
aatgctttatctagg

SEQ ID NO: 1326494 - DNA, 15 bp, Homo sapiens
aaatgctttatctag

SEQ ID NO: 1326495 - DNA, 15 bp, Homo sapiens
gaaatgctttatcta

SEQ ID NO: 1326496 - DNA, 15 bp, Homo sapiens
agaaatgctttatct

SEQ ID NO: 1326497 - DNA, 15 bp, Homo sapiens
tagaaatgctttatc

SEQ ID NO: 1326498 - DNA, 15 bp, Homo sapiens
ttagaaatgctttat

SEQ ID NO: 1326499 - DNA, 15 bp, Homo sapiens
tttagaaatgcttta

SEQ ID NO: 1326500 - DNA, 15 bp, Homo sapiens
gtttagaaatgcttt

SEQ ID NO: 1326501 - DNA, 15 bp, Homo sapiens
agtttagaaatgctt

SEQ ID NO: 1326502 - DNA, 15 bp, Homo sapiens
gagtttagaaatgct

SEQ ID NO: 1326503 - DNA, 15 bp, Homo sapiens
agagtttagaaatgc

SEQ ID NO: 1326504 - DNA, 15 bp, Homo sapiens
gagagtttagaaatg

SEQ ID NO: 1326505 - DNA, 15 bp, Homo sapiens
ggagagtttagaaat

SEQ ID NO: 1326506 - DNA, 15 bp, Homo sapiens
aggagagtttagaaa

SEQ ID NO: 1326507 - DNA, 15 bp, Homo sapiens
caggagagtttagaa

SEQ ID NO: 1326508 - DNA, 15 bp, Homo sapiens
acaggagagtttaga

SEQ ID NO: 1326509 - DNA, 15 bp, Homo sapiens
tacaggagagtttag

SEQ ID NO: 1326510 - DNA, 15 bp, Homo sapiens
ttacaggagagttta

SEQ ID NO: 1326511 - DNA, 15 bp, Homo sapiens
gttacaggagagttt

SEQ ID NO: 1326512 - DNA, 15 bp, Homo sapiens
tgttacaggagagtt

SEQ ID NO: 1326513 - DNA, 15 bp, Homo sapiens
gtgttacaggagagt

SEQ ID NO: 1326514 - DNA, 15 bp, Homo sapiens
agtgttacaggagag

SEQ ID NO: 1326515 - DNA, 15 bp, Homo sapiens
gagtgttacaggaga

SEQ ID NO: 1326516 - DNA, 15 bp, Homo sapiens
ggagtgttacaggag

SEQ ID NO: 1326517 - DNA, 15 bp, Homo sapiens
tggagtgttacagga

SEQ ID NO: 1326518 - DNA, 15 bp, Homo sapiens
atggagtgttacagg

SEQ ID NO: 1326519 - DNA, 15 bp, Homo sapiens
tatggagtgttacag

SEQ ID NO: 1326520 - DNA, 15 bp, Homo sapiens
atatggagtgttaca

SEQ ID NO: 1326521 - DNA, 15 bp, Homo sapiens
tatatggagtgttac

SEQ ID NO: 1326522 - DNA, 15 bp, Homo sapiens
ctatatggagtgtta

SEQ ID NO: 1326523 - DNA, 15 bp, Homo sapiens
gctatatggagtgtt

SEQ ID NO: 1326524 - DNA, 15 bp, Homo sapiens
tgctatatggagtgt

SEQ ID NO: 1326525 - DNA, 15 bp, Homo sapiens
ttgctatatggagtg

SEQ ID NO: 1326526 - DNA, 15 bp, Homo sapiens
gattgctatatggag

SEQ ID NO: 1326527 - DNA, 15 bp, Homo sapiens
agattgctatatgga

SEQ ID NO: 1326528 - DNA, 15 bp, Homo sapiens
gagattgctatatgg

SEQ ID NO: 1326529 - DNA, 15 bp, Homo sapiens
tgagattgctatatg

SEQ ID NO: 1326530 - DNA, 15 bp, Homo sapiens
ctgagattgctatat

SEQ ID NO: 1326531 - DNA, 15 bp, Homo sapiens
cctgagattgctata

SEQ ID NO: 1326532 - DNA, 15 bp, Homo sapiens
acctgagattgctat

SEQ ID NO: 1326533 - DNA, 15 bp, Homo sapiens
cacctgagattgcta

SEQ ID NO: 1326534 - DNA, 15 bp, Homo sapiens
acacctgagattgct

SEQ ID NO: 1326535 - DNA, 15 bp, Homo sapiens
aacacctgagattgc

SEQ ID NO: 1326536 - DNA, 15 bp, Homo sapiens
aaacacctgagattg

SEQ ID NO: 1326537 - DNA, 15 bp, Homo sapiens
aaaacacctgagatt

SEQ ID NO: 1326538 - DNA, 15 bp, Homo sapiens
taaaacacctgagat

SEQ ID NO: 1326539 - DNA, 15 bp, Homo sapiens
ttaaaacacctgaga

SEQ ID NO: 1326540 - DNA, 15 bp, Homo sapiens
attaaaacacctgag

SEQ ID NO: 1326541 - DNA, 15 bp, Homo sapiens
aattaaaacacctga

SEQ ID NO: 1326542 - DNA, 15 bp, Homo sapiens
gaattaaaacacctg

SEQ ID NO: 1326543 - DNA, 15 bp, Homo sapiens
agaattaaaacacct

SEQ ID NO: 1326544 - DNA, 15 bp, Homo sapiens
gagaattaaaacacc

SEQ ID NO: 1326545 - DNA, 15 bp, Homo sapiens
tgagaattaaaacac

SEQ ID NO: 1326546 - DNA, 15 bp, Homo sapiens
gtgagaattaaaaca

SEQ ID NO: 1326547 - DNA, 15 bp, Homo sapiens
agtgagaattaaaac

SEQ ID NO: 1326548 - DNA, 15 bp, Homo sapiens
cagtgagaattaaaa

SEQ ID NO: 1326549 - DNA, 15 bp, Homo sapiens
ccagtgagaattaaa

SEQ ID NO: 1326550 - DNA, 15 bp, Homo sapiens
accagtgagaattaa

SEQ ID NO: 1326551 - DNA, 15 bp, Homo sapiens
aaccagtgagaatta

SEQ ID NO: 1326552 - DNA, 15 bp, Homo sapiens
aaaccagtgagaatt

SEQ ID NO: 1326553 - DNA, 15 bp, Homo sapiens
taaaccagtgagaat

SEQ ID NO: 1326554 - DNA, 15 bp, Homo sapiens
ttaaaccagtgagaa

SEQ ID NO: 1326555 - DNA, 15 bp, Homo sapiens
attaaaccagtgaga

SEQ ID NO: 1326556 - DNA, 15 bp, Homo sapiens
gattaaaccagtgag

SEQ ID NO: 1326557 - DNA, 15 bp, Homo sapiens
ggattaaaccagtga

SEQ ID NO: 1326558 - DNA, 15 bp, Homo sapiens
aggattaaaccagtg

SEQ ID NO: 1326559 - DNA, 15 bp, Homo sapiens
taggattaaaccagt

SEQ ID NO: 1326560 - DNA, 15 bp, Homo sapiens
gtaggattaaaccag

SEQ ID NO: 1326561 - DNA, 15 bp, Homo sapiens
ggtaggattaaacca

SEQ ID NO: 1326562 - DNA, 15 bp, Homo sapiens
tggtaggattaaacc

SEQ ID NO: 1326563 - DNA, 15 bp, Homo sapiens
gtggtaggattaaac

SEQ ID NO: 1326564 - DNA, 15 bp, Homo sapiens
agtggtaggattaaa

SEQ ID NO: 1326565 - DNA, 15 bp, Homo sapiens
tagtggtaggattaa

SEQ ID NO: 1326566 - DNA, 15 bp, Homo sapiens
atagtggtaggatta

SEQ ID NO: 1326567 - DNA, 15 bp, Homo sapiens
gatagtggtaggatt

SEQ ID NO: 1326568 - DNA, 15 bp, Homo sapiens
tgatagtggtaggat

SEQ ID NO: 1326569 - DNA, 15 bp, Homo sapiens
gtgatagtggtagga

SEQ ID NO: 1326570 - DNA, 15 bp, Homo sapiens
ggtgatagtggtagg

SEQ ID NO: 1326571 - DNA, 15 bp, Homo sapiens
tggtgatagtggtag

SEQ ID NO: 1326572 - DNA, 15 bp, Homo sapiens
ctggtgatagtggta

SEQ ID NO: 1326573 - DNA, 15 bp, Homo sapiens
gctggtgatagtggt

SEQ ID NO: 1326574 - DNA, 15 bp, Homo sapiens
tgctggtgatagtgg

SEQ ID NO: 1326575 - DNA, 15 bp, Homo sapiens
ttgctggtgatagtg

SEQ ID NO: 1326576 - DNA, 15 bp, Homo sapiens
gttgctggtgatagt

SEQ ID NO: 1326577 - DNA, 15 bp, Homo sapiens
agttgctggtgatag

SEQ ID NO: 1326578 - DNA, 15 bp, Homo sapiens
cagttgctggtgata

SEQ ID NO: 1326579 - DNA, 15 bp, Homo sapiens
acagttgctggtgat

SEQ ID NO: 1326580 - DNA, 15 bp, Homo sapiens
tacagttgctggtga

SEQ ID NO: 1326581 - DNA, 15 bp, Homo sapiens
ttacagttgctggtg

SEQ ID NO: 1326582 - DNA, 15 bp, Homo sapiens
gttacagttgctggt

SEQ ID NO: 1326583 - DNA, 15 bp, Homo sapiens
tgttacagttgctgg

SEQ ID NO: 1326584 - DNA, 15 bp, Homo sapiens
ctgttacagttgctg

SEQ ID NO: 1326585 - DNA, 15 bp, Homo sapiens
actgttacagttgct

SEQ ID NO: 1326586 - DNA, 15 bp, Homo sapiens
gactgttacagttgc

SEQ ID NO: 1326587 - DNA, 15 bp, Homo sapiens
ggactgttacagttg

SEQ ID NO: 1326588 - DNA, 15 bp, Homo sapiens
gggactgttacagtt

SEQ ID NO: 1326589 - DNA, 15 bp, Homo sapiens
ggggactgttacagt

SEQ ID NO: 1326590 - DNA, 15 bp, Homo sapiens
gggggactgttacag

SEQ ID NO: 1326591 - DNA, 15 bp, Homo sapiens
agggggactgttaca

SEQ ID NO: 1326592 - DNA, 15 bp, Homo sapiens
aagggggactgttac

SEQ ID NO: 1326593 - DNA, 15 bp, Homo sapiens
aaagggggactgtta

SEQ ID NO: 1326594 - DNA, 15 bp, Homo sapiens
caaagggggactgtt

SEQ ID NO: 1326595 - DNA, 15 bp, Homo sapiens
tcaaagggggactgt

SEQ ID NO: 1326596 - DNA, 15 bp, Homo sapiens
ttcaaagggggactg

SEQ ID NO: 1326597 - DNA, 15 bp, Homo sapiens
tttcaaagggggact

SEQ ID NO: 1326598 - DNA, 15 bp, Homo sapiens
atttcaaagggggac

SEQ ID NO: 1326599 - DNA, 15 bp, Homo sapiens
gatttcaaaggggga

SEQ ID NO: 1326600 - DNA, 15 bp, Homo sapiens
tgatttcaaaggggg

SEQ ID NO: 1326601 - DNA, 15 bp, Homo sapiens
gtgatttcaaagggg

SEQ ID NO: 1326602 - DNA, 15 bp, Homo sapiens
agtgatttcaaaggg

SEQ ID NO: 1326603 - DNA, 15 bp, Homo sapiens
aagtgatttcaaagg

SEQ ID NO: 1326604 - DNA, 15 bp, Homo sapiens
caagtgatttcaaag

SEQ ID NO: 1326605 - DNA, 15 bp, Homo sapiens
gcaagtgatttcaaa

SEQ ID NO: 1326606 - DNA, 15 bp, Homo sapiens
tgcaagtgatttcaa

SEQ ID NO: 1326607 - DNA, 15 bp, Homo sapiens
ttgcaagtgatttca

SEQ ID NO: 1326608 - DNA, 15 bp, Homo sapiens
cttgcaagtgatttc

SEQ ID NO: 1326609 - DNA, 15 bp, Homo sapiens
acttgcaagtgattt

SEQ ID NO: 1326610 - DNA, 15 bp, Homo sapiens
cacttgcaagtgatt

SEQ ID NO: 1326611 - DNA, 15 bp, Homo sapiens
acacttgcaagtgat

SEQ ID NO: 1326612 - DNA, 15 bp, Homo sapiens
cacacttgcaagtga

SEQ ID NO: 1326613 - DNA, 15 bp, Homo sapiens
acacacttgcaagtg

SEQ ID NO: 1326614 - DNA, 15 bp, Homo sapiens
aacacacttgcaagt

SEQ ID NO: 1326615 - DNA, 15 bp, Homo sapiens
gaacacacttgcaag

SEQ ID NO: 1326616 - DNA, 15 bp, Homo sapiens
ggaacacacttgcaa

SEQ ID NO: 1326617 - DNA, 15 bp, Homo sapiens
tggaacacacttgca

SEQ ID NO: 1326618 - DNA, 15 bp, Homo sapiens
ctggaacacacttgc

SEQ ID NO: 1326619 - DNA, 15 bp, Homo sapiens
actggaacacacttg

SEQ ID NO: 1326620 - DNA, 15 bp, Homo sapiens
aactggaacacactt

SEQ ID NO: 1326621 - DNA, 15 bp, Homo sapiens
taactggaacacact

SEQ ID NO: 1326622 - DNA, 15 bp, Homo sapiens
gtaactggaacacac

SEQ ID NO: 1326623 - DNA, 15 bp, Homo sapiens
agtaactggaacaca

SEQ ID NO: 1326624 - DNA, 15 bp, Homo sapiens
tagtaactggaacac

SEQ ID NO: 1326625 - DNA, 15 bp, Homo sapiens
atagtaactggaaca

SEQ ID NO: 1326626 - DNA, 15 bp, Homo sapiens
catagtaactggaac

SEQ ID NO: 1326627 - DNA, 15 bp, Homo sapiens
tcatagtaactggaa

SEQ ID NO: 1326628 - DNA, 15 bp, Homo sapiens
gtcatagtaactgga

SEQ ID NO: 1326629 - DNA, 15 bp, Homo sapiens
agtcatagtaactgg

SEQ ID NO: 1326630 - DNA, 15 bp, Homo sapiens
cagtcatagtaactg

SEQ ID NO: 1326631 - DNA, 15 bp, Homo sapiens
gcagtcatagtaact

SEQ ID NO: 1326632 - DNA, 15 bp, Homo sapiens
tgcagtcatagtaac

SEQ ID NO: 1326633 - DNA, 15 bp, Homo sapiens
atgcagtcatagtaa

SEQ ID NO: 1326634 - DNA, 15 bp, Homo sapiens
tatgcagtcatagta

SEQ ID NO: 1326635 - DNA, 15 bp, Homo sapiens
ttatgcagtcatagt

SEQ ID NO: 1326636 - DNA, 15 bp, Homo sapiens
gttatgcagtcatag

SEQ ID NO: 1326637 - DNA, 15 bp, Homo sapiens
tgttatgcagtcata

SEQ ID NO: 1326638 - DNA, 15 bp, Homo sapiens
ttgttatgcagtcat

SEQ ID NO: 1326639 - DNA, 15 bp, Homo sapiens
tttgttatgcagtca

SEQ ID NO: 1326640 - DNA, 15 bp, Homo sapiens
atttgttatgcagtc

SEQ ID NO: 1326641 - DNA, 15 bp, Homo sapiens
aatttgttatgcagt

SEQ ID NO: 1326642 - DNA, 15 bp, Homo sapiens
taatttgttatgcag

SEQ ID NO: 1326643 - DNA, 15 bp, Homo sapiens
gtaatttgttatgca

SEQ ID NO: 1326644 - DNA, 15 bp, Homo sapiens
ggtaatttgttatgc

SEQ ID NO: 1326645 - DNA, 15 bp, Homo sapiens
gggtaatttgttatg

SEQ ID NO: 1326646 - DNA, 15 bp, Homo sapiens
ggggtaatttgttat

SEQ ID NO: 1326647 - DNA, 15 bp, Homo sapiens
tggggtaatttgtta

SEQ ID NO: 1326648 - DNA, 15 bp, Homo sapiens
ttggggtaatttgtt

SEQ ID NO: 1326649 - DNA, 15 bp, Homo sapiens
tttggggtaatttgt

SEQ ID NO: 1326650 - DNA, 15 bp, Homo sapiens
ttttggggtaatttg

SEQ ID NO: 1326651 - DNA, 15 bp, Homo sapiens
gttttggggtaattt

SEQ ID NO: 1326652 - DNA, 15 bp, Homo sapiens
cgttttggggtaatt

SEQ ID NO: 1326653 - DNA, 15 bp, Homo sapiens
gcgttttggggtaat

SEQ ID NO: 1326654 - DNA, 15 bp, Homo sapiens
tgcgttttggggtaa

SEQ ID NO: 1326655 - DNA, 15 bp, Homo sapiens
ctgcgttttggggta

SEQ ID NO: 1326656 - DNA, 15 bp, Homo sapiens
cctgcgttttggggt

SEQ ID NO: 1326657 - DNA, 15 bp, Homo sapiens
ccctgcgttttgggg

SEQ ID NO: 1326658 - DNA, 15 bp, Homo sapiens
cccctgcgttttggg

SEQ ID NO: 1326659 - DNA, 15 bp, Homo sapiens
gcccctgcgttttgg

SEQ ID NO: 1326660 - DNA, 15 bp, Homo sapiens
tgcccctgcgttttg

SEQ ID NO: 1326661 - DNA, 15 bp, Homo sapiens
atgcccctgcgtttt

SEQ ID NO: 1326662 - DNA, 15 bp, Homo sapiens
catgcccctgcgttt

SEQ ID NO: 1326663 - DNA, 15 bp, Homo sapiens
tcatgcccctgcgtt

SEQ ID NO: 1326664 - DNA, 15 bp, Homo sapiens
ttcatgcccctgcgt

SEQ ID NO: 1326665 - DNA, 15 bp, Homo sapiens
tttcatgcccctgcg

SEQ ID NO: 1326666 - DNA, 15 bp, Homo sapiens
gtttcatgcccctgc

SEQ ID NO: 1326667 - DNA, 15 bp, Homo sapiens
tgtttcatgcccctg

SEQ ID NO: 1326668 - DNA, 15 bp, Homo sapiens
atgtttcatgcccct

SEQ ID NO: 1326669 - DNA, 15 bp, Homo sapiens
aatgtttcatgcccc

SEQ ID NO: 1326670 - DNA, 15 bp, Homo sapiens
taatgtttcatgccc

SEQ ID NO: 1326671 - DNA, 15 bp, Homo sapiens
ctaatgtttcatgcc

SEQ ID NO: 1326672 - DNA, 15 bp, Homo sapiens
actaatgtttcatgc

SEQ ID NO: 1326673 - DNA, 15 bp, Homo sapiens
aactaatgtttcatg

SEQ ID NO: 1326674 - DNA, 15 bp, Homo sapiens
aaactaatgtttcat

SEQ ID NO: 1326675 - DNA, 15 bp, Homo sapiens
aaaactaatgtttca

SEQ ID NO: 1326676 - DNA, 15 bp, Homo sapiens
aaaaactaatgtttc

SEQ ID NO: 1326677 - DNA, 15 bp, Homo sapiens
aaaaaactaatgttt

SEQ ID NO: 1326678 - DNA, 15 bp, Homo sapiens
aaaaaaactaatgtt

SEQ ID NO: 1326679 - DNA, 15 bp, Homo sapiens
gaaaaaaactaatgt

SEQ ID NO: 1326680 - DNA, 15 bp, Homo sapiens
agaaaaaaactaatg

SEQ ID NO: 1326681 - DNA, 15 bp, Homo sapiens
aagaaaaaaactaat

SEQ ID NO: 1326682 - DNA, 15 bp, Homo sapiens
gaagaaaaaaactaa

SEQ ID NO: 1326683 - DNA, 15 bp, Homo sapiens
agaagaaaaaaacta

SEQ ID NO: 1326684 - DNA, 15 bp, Homo sapiens
gagaagaaaaaaact

SEQ ID NO: 1326685 - DNA, 15 bp, Homo sapiens
cgagaagaaaaaaac

SEQ ID NO: 1326686 - DNA, 15 bp, Homo sapiens
acgagaagaaaaaaa

SEQ ID NO: 1326687 - DNA, 15 bp, Homo sapiens
cacgagaagaaaaaa

SEQ ID NO: 1326688 - DNA, 15 bp, Homo sapiens
ccacgagaagaaaaa

SEQ ID NO: 1326689 - DNA, 15 bp, Homo sapiens
tccacgagaagaaaa

SEQ ID NO: 1326690 - DNA, 15 bp, Homo sapiens
atccacgagaagaaa

SEQ ID NO: 1326691 - DNA, 15 bp, Homo sapiens
aatccacgagaagaa

SEQ ID NO: 1326692 - DNA, 15 bp, Homo sapiens
aaatccacgagaaga

SEQ ID NO: 1326693 - DNA, 15 bp, Homo sapiens
aaaatccacgagaag

SEQ ID NO: 1326694 - DNA, 15 bp, Homo sapiens
caaaatccacgagaa

SEQ ID NO: 1326695 - DNA, 15 bp, Homo sapiens
acaaaatccacgaga

SEQ ID NO: 1326696 - DNA, 15 bp, Homo sapiens
cacaaaatccacgag

SEQ ID NO: 1326697 - DNA, 15 bp, Homo sapiens
ccacaaaatccacga

SEQ ID NO: 1326698 - DNA, 15 bp, Homo sapiens
gccacaaaatccacg

SEQ ID NO: 1326699 - DNA, 15 bp, Homo sapiens
agccacaaaatccac

SEQ ID NO: 1326700 - DNA, 15 bp, Homo sapiens
gagccacaaaatcca

SEQ ID NO: 1326701 - DNA, 15 bp, Homo sapiens
agagccacaaaatcc

SEQ ID NO: 1326702 - DNA, 15 bp, Homo sapiens
cagagccacaaaatc

SEQ ID NO: 1326703 - DNA, 15 bp, Homo sapiens
ccagagccacaaaat

SEQ ID NO: 1326704 - DNA, 15 bp, Homo sapiens
tccagagccacaaaa

SEQ ID NO: 1326705 - DNA, 15 bp, Homo sapiens
attccagagccacaa

SEQ ID NO: 1326706 - DNA, 15 bp, Homo sapiens
aattccagagccaca

SEQ ID NO: 1326707 - DNA, 15 bp, Homo sapiens
gaattccagagccac

SEQ ID NO: 1326708 - DNA, 15 bp, Homo sapiens
tgaattccagagcca

SEQ ID NO: 1326709 - DNA, 15 bp, Homo sapiens
ctgaattccagagcc

SEQ ID NO: 1326710 - DNA, 15 bp, Homo sapiens
tctgaattccagagc

SEQ ID NO: 1326711 - DNA, 15 bp, Homo sapiens
ctctgaattccagag

SEQ ID NO: 1326712 - DNA, 15 bp, Homo sapiens
tctctgaattccaga

SEQ ID NO: 1326713 - DNA, 15 bp, Homo sapiens
ctctctgaattccag

SEQ ID NO: 1326714 - DNA, 15 bp, Homo sapiens
tctctctgaattcca

SEQ ID NO: 1326715 - DNA, 15 bp, Homo sapiens
ctctctctgaattcc

SEQ ID NO: 1326716 - DNA, 15 bp, Homo sapiens
gctctctctgaattc

SEQ ID NO: 1326717 - DNA, 15 bp, Homo sapiens
tgctctctctgaatt

SEQ ID NO: 1326718 - DNA, 15 bp, Homo sapiens
gtgctctctctgaat

SEQ ID NO: 1326719 - DNA, 15 bp, Homo sapiens
tgtgctctctctgaa

SEQ ID NO: 1326720 - DNA, 15 bp, Homo sapiens
ctgtgctctctctga

SEQ ID NO: 1326721 - DNA, 15 bp, Homo sapiens
tctgtgctctctctg

SEQ ID NO: 1326722 - DNA, 15 bp, Homo sapiens
ctctgtgctctctct

SEQ ID NO: 1326723 - DNA, 15 bp, Homo sapiens
gctctgtgctctctc

SEQ ID NO: 1326724 - DNA, 15 bp, Homo sapiens
tgctctgtgctctct

SEQ ID NO: 1326725 - DNA, 15 bp, Homo sapiens
ctgctctgtgctctc

SEQ ID NO: 1326726 - DNA, 15 bp, Homo sapiens
cctgctctgtgctct

SEQ ID NO: 1326727 - DNA, 15 bp, Homo sapiens
acctgctctgtgctc

SEQ ID NO: 1326728 - DNA, 15 bp, Homo sapiens
cacctgctctgtgct

SEQ ID NO: 1326729 - DNA, 15 bp, Homo sapiens
ccacctgctctgtgc

SEQ ID NO: 1326730 - DNA, 15 bp, Homo sapiens
cccacctgctctgtg

SEQ ID NO: 1326731 - DNA, 15 bp, Homo sapiens
gcccacctgctctgt

SEQ ID NO: 1326732 - DNA, 15 bp, Homo sapiens
agcccacctgctctg

SEQ ID NO: 1326733 - DNA, 15 bp, Homo sapiens
cagcccacctgctct

SEQ ID NO: 1326734 - DNA, 15 bp, Homo sapiens
acagcccacctgctc

SEQ ID NO: 1326735 - DNA, 15 bp, Homo sapiens
gacagcccacctgct

SEQ ID NO: 1326736 - DNA, 15 bp, Homo sapiens
agacagcccacctgc

SEQ ID NO: 1326737 - DNA, 15 bp, Homo sapiens
gagacagcccacctg

SEQ ID NO: 1326738 - DNA, 15 bp, Homo sapiens
agagacagcccacct

SEQ ID NO: 1326739 - DNA, 15 bp, Homo sapiens
cagagacagcccacc

SEQ ID NO: 1326740 - DNA, 15 bp, Homo sapiens
gcagagacagcccac

SEQ ID NO: 1326741 - DNA, 15 bp, Homo sapiens
agcagagacagccca

SEQ ID NO: 1326742 - DNA, 15 bp, Homo sapiens
gagcagagacagccc

SEQ ID NO: 1326743 - DNA, 15 bp, Homo sapiens
ggagcagagacagcc

SEQ ID NO: 1326744 - DNA, 15 bp, Homo sapiens
tggagcagagacagc

SEQ ID NO: 1326745 - DNA, 15 bp, Homo sapiens
gtggagcagagacag

SEQ ID NO: 1326746 - DNA, 15 bp, Homo sapiens
tgtggagcagagaca

SEQ ID NO: 1326747 - DNA, 15 bp, Homo sapiens
atgtggagcagagac

SEQ ID NO: 1326748 - DNA, 15 bp, Homo sapiens
aatgtggagcagaga

SEQ ID NO: 1326749 - DNA, 15 bp, Homo sapiens
gaatgtggagcagag

SEQ ID NO: 1326750 - DNA, 15 bp, Homo sapiens
agaatgtggagcaga

SEQ ID NO: 1326751 - DNA, 15 bp, Homo sapiens
gagaatgtggagcag

SEQ ID NO: 1326752 - DNA, 15 bp, Homo sapiens
agagaatgtggagca

SEQ ID NO: 1326753 - DNA, 15 bp, Homo sapiens
cagagaatgtggagc

SEQ ID NO: 1326754 - DNA, 15 bp, Homo sapiens
tcagagaatgtggag

SEQ ID NO: 1326755 - DNA, 15 bp, Homo sapiens
ctcagagaatgtgga

SEQ ID NO: 1326756 - DNA, 15 bp, Homo sapiens
cctcagagaatgtgg

SEQ ID NO: 1326757 - DNA, 15 bp, Homo sapiens
gcctcagagaatgtg

SEQ ID NO: 1326758 - DNA, 15 bp, Homo sapiens
ggcctcagagaatgt

SEQ ID NO: 1326759 - DNA, 15 bp, Homo sapiens
aggcctcagagaatg

SEQ ID NO: 1326760 - DNA, 15 bp, Homo sapiens
gaggcctcagagaat

SEQ ID NO: 1326761 - DNA, 15 bp, Homo sapiens
tgaggcctcagagaa

SEQ ID NO: 1326762 - DNA, 15 bp, Homo sapiens
ctgaggcctcagaga

SEQ ID NO: 1326763 - DNA, 15 bp, Homo sapiens
gctgaggcctcagag

SEQ ID NO: 1326764 - DNA, 15 bp, Homo sapiens
agctgaggcctcaga

SEQ ID NO: 1326765 - DNA, 15 bp, Homo sapiens
cagctgaggcctcag

SEQ ID NO: 1326766 - DNA, 15 bp, Homo sapiens
ccagctgaggcctca

SEQ ID NO: 1326767 - DNA, 15 bp, Homo sapiens
cccagctgaggcctc

SEQ ID NO: 1326768 - DNA, 15 bp, Homo sapiens
tcccagctgaggcct

SEQ ID NO: 1326769 - DNA, 15 bp, Homo sapiens
ctcccagctgaggcc

SEQ ID NO: 1326770 - DNA, 15 bp, Homo sapiens
cctcccagctgaggc

SEQ ID NO: 1326771 - DNA, 15 bp, Homo sapiens
gcctcccagctgagg

SEQ ID NO: 1326772 - DNA, 15 bp, Homo sapiens
agcctcccagctgag

SEQ ID NO: 1326773 - DNA, 15 bp, Homo sapiens
cagcctcccagctga

SEQ ID NO: 1326774 - DNA, 15 bp, Homo sapiens
ccagcctcccagctg

SEQ ID NO: 1326775 - DNA, 15 bp, Homo sapiens
gccagcctcccagct

SEQ ID NO: 1326776 - DNA, 15 bp, Homo sapiens
tgccagcctcccagc

SEQ ID NO: 1326777 - DNA, 15 bp, Homo sapiens
ctgccagcctcccag

SEQ ID NO: 1326778 - DNA, 15 bp, Homo sapiens
cctgccagcctccca

SEQ ID NO: 1326779 - DNA, 15 bp, Homo sapiens
gcctgccagcctccc

SEQ ID NO: 1326780 - DNA, 15 bp, Homo sapiens
agcctgccagcctcc

SEQ ID NO: 1326781 - DNA, 15 bp, Homo sapiens
cagcctgccagcctc

SEQ ID NO: 1326782 - DNA, 15 bp, Homo sapiens
cccagcctgccagcc

SEQ ID NO: 1326783 - DNA, 15 bp, Homo sapiens
ccccagcctgccagc

SEQ ID NO: 1326784 - DNA, 15 bp, Homo sapiens
cccccagcctgccag

SEQ ID NO: 1326785 - DNA, 15 bp, Homo sapiens
gcccccagcctgcca

SEQ ID NO: 1326786 - DNA, 15 bp, Homo sapiens
agcccccagcctgcc

SEQ ID NO: 1326787 - DNA, 15 bp, Homo sapiens
cagcccccagcctgc

SEQ ID NO: 1326788 - DNA, 15 bp, Homo sapiens
ccagcccccagcctg

SEQ ID NO: 1326789 - DNA, 15 bp, Homo sapiens
tccagcccccagcct

SEQ ID NO: 1326790 - DNA, 15 bp, Homo sapiens
ttccagcccccagcc

SEQ ID NO: 1326791 - DNA, 15 bp, Homo sapiens
gttccagcccccagc

SEQ ID NO: 1326792 - DNA, 15 bp, Homo sapiens
agttccagcccccag

SEQ ID NO: 1326793 - DNA, 15 bp, Homo sapiens
cagttccagccccca

SEQ ID NO: 1326794 - DNA, 15 bp, Homo sapiens
acagttccagccccc

SEQ ID NO: 1326795 - DNA, 15 bp, Homo sapiens
gacagttccagcccc

SEQ ID NO: 1326796 - DNA, 15 bp, Homo sapiens
agacagttccagccc

SEQ ID NO: 1326797 - DNA, 15 bp, Homo sapiens
cagacagttccagcc

SEQ ID NO: 1326798 - DNA, 15 bp, Homo sapiens
gcagacagttccagc

SEQ ID NO: 1326799 - DNA, 15 bp, Homo sapiens
tgcagacagttccag

SEQ ID NO: 1326800 - DNA, 15 bp, Homo sapiens
ctgcagacagttcca

SEQ ID NO: 1326801 - DNA, 15 bp, Homo sapiens
cctgcagacagttcc

SEQ ID NO: 1326802 - DNA, 15 bp, Homo sapiens
gcctgcagacagttc

SEQ ID NO: 1326803 - DNA, 15 bp, Homo sapiens
agcctgcagacagtt

SEQ ID NO: 1326804 - DNA, 15 bp, Homo sapiens
aagcctgcagacagt

SEQ ID NO: 1326805 - DNA, 15 bp, Homo sapiens
caagcctgcagacag

SEQ ID NO: 1326806 - DNA, 15 bp, Homo sapiens
acaagcctgcagaca

SEQ ID NO: 1326807 - DNA, 15 bp, Homo sapiens
aacaagcctgcagac

SEQ ID NO: 1326808 - DNA, 15 bp, Homo sapiens
gaacaagcctgcaga

SEQ ID NO: 1326809 - DNA, 15 bp, Homo sapiens
agaacaagcctgcag

SEQ ID NO: 1326810 - DNA, 15 bp, Homo sapiens
gagaacaagcctgca

SEQ ID NO: 1326811 - DNA, 15 bp, Homo sapiens
agagaacaagcctgc

SEQ ID NO: 1326812 - DNA, 15 bp, Homo sapiens
gagagaacaagcctg

SEQ ID NO: 1326813 - DNA, 15 bp, Homo sapiens
ggagagaacaagcct

SEQ ID NO: 1326814 - DNA, 15 bp, Homo sapiens
gggagagaacaagcc

SEQ ID NO: 1326815 - DNA, 15 bp, Homo sapiens
tgggagagaacaagc

SEQ ID NO: 1326816 - DNA, 15 bp, Homo sapiens
atgggagagaacaag

SEQ ID NO: 1326817 - DNA, 15 bp, Homo sapiens
catgggagagaacaa

SEQ ID NO: 1326818 - DNA, 15 bp, Homo sapiens
gcatgggagagaaca

SEQ ID NO: 1326819 - DNA, 15 bp, Homo sapiens
ggcatgggagagaac

SEQ ID NO: 1326820 - DNA, 15 bp, Homo sapiens
gggcatgggagagaa

SEQ ID NO: 1326821 - DNA, 15 bp, Homo sapiens
cgggcatgggagaga

SEQ ID NO: 1326822 - DNA, 15 bp, Homo sapiens
ccgggcatgggagag

SEQ ID NO: 1326823 - DNA, 15 bp, Homo sapiens
accgggcatgggaga

SEQ ID NO: 1326824 - DNA, 15 bp, Homo sapiens
caccgggcatgggag

SEQ ID NO: 1326825 - DNA, 15 bp, Homo sapiens
tcaccgggcatggga

SEQ ID NO: 1326826 - DNA, 15 bp, Homo sapiens
ctcaccgggcatggg

SEQ ID NO: 1326827 - DNA, 15 bp, Homo sapiens
tctcaccgggcatgg

SEQ ID NO: 1326828 - DNA, 15 bp, Homo sapiens
atctcaccgggcatg

SEQ ID NO: 1326829 - DNA, 15 bp, Homo sapiens
aatctcaccgggcat

SEQ ID NO: 1326830 - DNA, 15 bp, Homo sapiens
aaatctcaccgggca

SEQ ID NO: 1326831 - DNA, 15 bp, Homo sapiens
caaatctcaccgggc

SEQ ID NO: 1326832 - DNA, 15 bp, Homo sapiens
gcaaatctcaccggg

SEQ ID NO: 1326833 - DNA, 15 bp, Homo sapiens
agcaaatctcaccgg

SEQ ID NO: 1326834 - DNA, 15 bp, Homo sapiens
tagcaaatctcaccg

SEQ ID NO: 1326835 - DNA, 15 bp, Homo sapiens
ctagcaaatctcacc

SEQ ID NO: 1326836 - DNA, 15 bp, Homo sapiens
gctagcaaatctcac

SEQ ID NO: 1326837 - DNA, 15 bp, Homo sapiens
agctagcaaatctca

SEQ ID NO: 1326838 - DNA, 15 bp, Homo sapiens
cagctagcaaatctc

SEQ ID NO: 1326839 - DNA, 15 bp, Homo sapiens
acagctagcaaatct

SEQ ID NO: 1326840 - DNA, 15 bp, Homo sapiens
aacagctagcaaatc

SEQ ID NO: 1326841 - DNA, 15 bp, Homo sapiens
caacagctagcaaat

SEQ ID NO: 1326842 - DNA, 15 bp, Homo sapiens
ccaacagctagcaaa

SEQ ID NO: 1326843 - DNA, 15 bp, Homo sapiens
gccaacagctagcaa

SEQ ID NO: 1326844 - DNA, 15 bp, Homo sapiens
agccaacagctagca

SEQ ID NO: 1326845 - DNA, 15 bp, Homo sapiens
cagccaacagctagc

SEQ ID NO: 1326846 - DNA, 15 bp, Homo sapiens
tcagccaacagctag

SEQ ID NO: 1326847 - DNA, 15 bp, Homo sapiens
ctcagccaacagcta

SEQ ID NO: 1326848 - DNA, 15 bp, Homo sapiens
tctcagccaacagct

SEQ ID NO: 1326849 - DNA, 15 bp, Homo sapiens
atctcagccaacagc

SEQ ID NO: 1326850 - DNA, 15 bp, Homo sapiens
gatctcagccaacag

SEQ ID NO: 1326851 - DNA, 15 bp, Homo sapiens
agatctcagccaaca

SEQ ID NO: 1326852 - DNA, 15 bp, Homo sapiens
cagatctcagccaac

SEQ ID NO: 1326853 - DNA, 15 bp, Homo sapiens
tcagatctcagccaa

SEQ ID NO: 1326854 - DNA, 15 bp, Homo sapiens
ctcagatctcagcca

SEQ ID NO: 1326855 - DNA, 15 bp, Homo sapiens
gctcagatctcagcc

SEQ ID NO: 1326856 - DNA, 15 bp, Homo sapiens
agctcagatctcagc

SEQ ID NO: 1326857 - DNA, 15 bp, Homo sapiens
cagctcagatctcag

SEQ ID NO: 1326858 - DNA, 15 bp, Homo sapiens
tcagctcagatctca

SEQ ID NO: 1326859 - DNA, 15 bp, Homo sapiens
ctcagctcagatctc

SEQ ID NO: 1326860 - DNA, 15 bp, Homo sapiens
cctcagctcagatct

SEQ ID NO: 1326861 - DNA, 15 bp, Homo sapiens
gcctcagctcagatc

SEQ ID NO: 1326862 - DNA, 15 bp, Homo sapiens
agcctcagctcagat

SEQ ID NO: 1326863 - DNA, 15 bp, Homo sapiens
cagcctcagctcaga

SEQ ID NO: 1326864 - DNA, 15 bp, Homo sapiens
acagcctcagctcag

SEQ ID NO: 1326865 - DNA, 15 bp, Homo sapiens
gacagcctcagctca

SEQ ID NO: 1326866 - DNA, 15 bp, Homo sapiens
tgacagcctcagctc

SEQ ID NO: 1326867 - DNA, 15 bp, Homo sapiens
ctgacagcctcagct

SEQ ID NO: 1326868 - DNA, 15 bp, Homo sapiens
gctgacagcctcagc

SEQ ID NO: 1326869 - DNA, 15 bp, Homo sapiens
agctgacagcctcag

SEQ ID NO: 1326870 - DNA, 15 bp, Homo sapiens
cagctgacagcctca

SEQ ID NO: 1326871 - DNA, 15 bp, Homo sapiens
ccagctgacagcctc

SEQ ID NO: 1326872 - DNA, 15 bp, Homo sapiens
tccagctgacagcct

SEQ ID NO: 1326873 - DNA, 15 bp, Homo sapiens
ctccagctgacagcc

SEQ ID NO: 1326874 - DNA, 15 bp, Homo sapiens
gctccagctgacagc

SEQ ID NO: 1326875 - DNA, 15 bp, Homo sapiens
tgctccagctgacag

SEQ ID NO: 1326876 - DNA, 15 bp, Homo sapiens
gtgctccagctgaca

SEQ ID NO: 1326877 - DNA, 15 bp, Homo sapiens
cgtgctccagctgac

SEQ ID NO: 1326878 - DNA, 15 bp, Homo sapiens
ccgtgctccagctga

SEQ ID NO: 1326879 - DNA, 15 bp, Homo sapiens
cccgtgctccagctg

SEQ ID NO: 1326880 - DNA, 15 bp, Homo sapiens
ccccgtgctccagct

SEQ ID NO: 1326881 - DNA, 15 bp, Homo sapiens
gccccgtgctccagc

SEQ ID NO: 1326882 - DNA, 15 bp, Homo sapiens
ggccccgtgctccag

SEQ ID NO: 1326883 - DNA, 15 bp, Homo sapiens
aggccccgtgctcca

SEQ ID NO: 1326884 - DNA, 15 bp, Homo sapiens
gaggccccgtgctcc

SEQ ID NO: 1326885 - DNA, 15 bp, Homo sapiens
cgaggccccgtgctc

SEQ ID NO: 1326886 - DNA, 15 bp, Homo sapiens
ccgaggccccgtgct

SEQ ID NO: 1326887 - DNA, 15 bp, Homo sapiens
gccgaggccccgtgc

SEQ ID NO: 1326888 - DNA, 15 bp, Homo sapiens
agccgaggccccgtg

SEQ ID NO: 1326889 - DNA, 15 bp, Homo sapiens
aagccgaggccccgt

SEQ ID NO: 1326890 - DNA, 15 bp, Homo sapiens
gaagccgaggccccg

SEQ ID NO: 1326891 - DNA, 15 bp, Homo sapiens
ggaagccgaggcccc

SEQ ID NO: 1326892 - DNA, 15 bp, Homo sapiens
aggaagccgaggccc

SEQ ID NO: 1326893 - DNA, 15 bp, Homo sapiens
taggaagccgaggcc

SEQ ID NO: 1326894 - DNA, 15 bp, Homo sapiens
gtaggaagccgaggc

SEQ ID NO: 1326895 - DNA, 15 bp, Homo sapiens
tgtaggaagccgagg

SEQ ID NO: 1326896 - DNA, 15 bp, Homo sapiens
ttgtaggaagccgag

SEQ ID NO: 1326897 - DNA, 15 bp, Homo sapiens
gttgtaggaagccga

SEQ ID NO: 1326898 - DNA, 15 bp, Homo sapiens
tgttgtaggaagccg

SEQ ID NO: 1326899 - DNA, 15 bp, Homo sapiens
atgttgtaggaagcc

SEQ ID NO: 1326900 - DNA, 15 bp, Homo sapiens
catgttgtaggaagc

SEQ ID NO: 1326901 - DNA, 15 bp, Homo sapiens
ccatgttgtaggaag

SEQ ID NO: 1326902 - DNA, 15 bp, Homo sapiens
accatgttgtaggaa

SEQ ID NO: 1326903 - DNA, 15 bp, Homo sapiens
caccatgttgtagga

SEQ ID NO: 1326904 - DNA, 15 bp, Homo sapiens
ccaccatgttgtagg

SEQ ID NO: 1326905 - DNA, 15 bp, Homo sapiens
gccaccatgttgtag

SEQ ID NO: 1326906 - DNA, 15 bp, Homo sapiens
agccaccatgttgta

SEQ ID NO: 1326907 - DNA, 15 bp, Homo sapiens
cagccaccatgttgt

SEQ ID NO: 1326908 - DNA, 15 bp, Homo sapiens
ccagccaccatgttg

SEQ ID NO: 1326909 - DNA, 15 bp, Homo sapiens
accagccaccatgtt

SEQ ID NO: 1326910 - DNA, 15 bp, Homo sapiens
aaccagccaccatgt

SEQ ID NO: 1326911 - DNA, 15 bp, Homo sapiens
gaaccagccaccatg

SEQ ID NO: 1326912 - DNA, 15 bp, Homo sapiens
ggaaccagccaccat

SEQ ID NO: 1326913 - DNA, 15 bp, Homo sapiens
gggaaccagccacca

SEQ ID NO: 1326914 - DNA, 15 bp, Homo sapiens
tgggaaccagccacc

SEQ ID NO: 1326915 - DNA, 15 bp, Homo sapiens
ctgggaaccagccac

SEQ ID NO: 1326916 - DNA, 15 bp, Homo sapiens
cctgggaaccagcca

SEQ ID NO: 1326917 - DNA, 15 bp, Homo sapiens
acctgggaaccagcc

SEQ ID NO: 1326918 - DNA, 15 bp, Homo sapiens
tacctgggaaccagc

SEQ ID NO: 1326919 - DNA, 15 bp, Homo sapiens
gtacctgggaaccag

SEQ ID NO: 1326920 - DNA, 15 bp, Homo sapiens
atgtacctgggaacc

SEQ ID NO: 1326921 - DNA, 15 bp, Homo sapiens
catgtacctgggaac

SEQ ID NO: 1326922 - DNA, 15 bp, Homo sapiens
acatgtacctgggaa

SEQ ID NO: 1326923 - DNA, 15 bp, Homo sapiens
gacatgtacctggga

SEQ ID NO: 1326924 - DNA, 15 bp, Homo sapiens
ggacatgtacctggg

SEQ ID NO: 1326925 - DNA, 15 bp, Homo sapiens
gggacatgtacctgg

SEQ ID NO: 1326926 - DNA, 15 bp, Homo sapiens
cgggacatgtacctg

SEQ ID NO: 1326927 - DNA, 15 bp, Homo sapiens
tcgggacatgtacct

SEQ ID NO: 1326928 - DNA, 15 bp, Homo sapiens
ctcgggacatgtacc

SEQ ID NO: 1326929 - DNA, 15 bp, Homo sapiens
tctcgggacatgtac

SEQ ID NO: 1326930 - DNA, 15 bp, Homo sapiens
ctctcgggacatgta

SEQ ID NO: 1326931 - DNA, 15 bp, Homo sapiens
gctctcgggacatgt

SEQ ID NO: 1326932 - DNA, 15 bp, Homo sapiens
cgctctcgggacatg

SEQ ID NO: 1326933 - DNA, 15 bp, Homo sapiens
acgctctcgggacat

SEQ ID NO: 1326934 - DNA, 15 bp, Homo sapiens
cacgctctcgggaca

SEQ ID NO: 1326935 - DNA, 15 bp, Homo sapiens
acacgctctcgggac

SEQ ID NO: 1326936 - DNA, 15 bp, Homo sapiens
cacacgctctcggga

SEQ ID NO: 1326937 - DNA, 15 bp, Homo sapiens
ccacacgctctcggg

SEQ ID NO: 1326938 - DNA, 15 bp, Homo sapiens
cccacacgctctcgg

SEQ ID NO: 1326939 - DNA, 15 bp, Homo sapiens
ccccacacgctctcg

SEQ ID NO: 1326940 - DNA, 15 bp, Homo sapiens
cccccacacgctctc

SEQ ID NO: 1326941 - DNA, 15 bp, Homo sapiens
ccccccacacgctct

SEQ ID NO: 1326942 - DNA, 15 bp, Homo sapiens
tccccccacacgctc

SEQ ID NO: 1326943 - DNA, 15 bp, Homo sapiens
ttccccccacacgct

SEQ ID NO: 1326944 - DNA, 15 bp, Homo sapiens
gttccccccacacgc

SEQ ID NO: 1326945 - DNA, 15 bp, Homo sapiens
agttccccccacacg

SEQ ID NO: 1326946 - DNA, 15 bp, Homo sapiens
gagttccccccacac

SEQ ID NO: 1326947 - DNA, 15 bp, Homo sapiens
cgagttccccccaca

SEQ ID NO: 1326948 - DNA, 15 bp, Homo sapiens
tcgagttccccccac

SEQ ID NO: 1326949 - DNA, 15 bp, Homo sapiens
ctcgagttcccccca

SEQ ID NO: 1326950 - DNA, 15 bp, Homo sapiens
gctcgagttcccccc

SEQ ID NO: 1326951 - DNA, 15 bp, Homo sapiens
ggctcgagttccccc

SEQ ID NO: 1326952 - DNA, 15 bp, Homo sapiens
gggctcgagttcccc

SEQ ID NO: 1326953 - DNA, 15 bp, Homo sapiens
ggggctcgagttccc

SEQ ID NO: 1326954 - DNA, 15 bp, Homo sapiens
gggggctcgagttcc

SEQ ID NO: 1326955 - DNA, 15 bp, Homo sapiens
cgggggctcgagttc

SEQ ID NO: 1326956 - DNA, 15 bp, Homo sapiens
acgggggctcgagtt

SEQ ID NO: 1326957 - DNA, 15 bp, Homo sapiens
gacgggggctcgagt

SEQ ID NO: 1326958 - DNA, 15 bp, Homo sapiens
agacgggggctcgag

SEQ ID NO: 1326959 - DNA, 15 bp, Homo sapiens
tagacgggggctcga

SEQ ID NO: 1326960 - DNA, 15 bp, Homo sapiens
atagacgggggctcg

SEQ ID NO: 1326961 - DNA, 15 bp, Homo sapiens
catagacgggggctc

SEQ ID NO: 1326962 - DNA, 15 bp, Homo sapiens
tcatagacgggggct

SEQ ID NO: 1326963 - DNA, 15 bp, Homo sapiens
gtcatagacgggggc

SEQ ID NO: 1326964 - DNA, 15 bp, Homo sapiens
agtcatagacggggg

SEQ ID NO: 1326965 - DNA, 15 bp, Homo sapiens
aagtcatagacgggg

SEQ ID NO: 1326966 - DNA, 15 bp, Homo sapiens
taagtcatagacggg

SEQ ID NO: 1326967 - DNA, 15 bp, Homo sapiens
ctaagtcatagacgg

SEQ ID NO: 1326968 - DNA, 15 bp, Homo sapiens
gctaagtcatagacg

SEQ ID NO: 1326969 - DNA, 15 bp, Homo sapiens
ggctaagtcatagac

SEQ ID NO: 1326970 - DNA, 15 bp, Homo sapiens
aggctaagtcataga

SEQ ID NO: 1326971 - DNA, 15 bp, Homo sapiens
aaggctaagtcatag

SEQ ID NO: 1326972 - DNA, 15 bp, Homo sapiens
caaggctaagtcata

SEQ ID NO: 1326973 - DNA, 15 bp, Homo sapiens
tcaaggctaagtcat

SEQ ID NO: 1326974 - DNA, 15 bp, Homo sapiens
ttcaaggctaagtca

SEQ ID NO: 1326975 - DNA, 15 bp, Homo sapiens
gttcaaggctaagtc

SEQ ID NO: 1326976 - DNA, 15 bp, Homo sapiens
tgttcaaggctaagt

SEQ ID NO: 1326977 - DNA, 15 bp, Homo sapiens
atgttcaaggctaag

SEQ ID NO: 1326978 - DNA, 15 bp, Homo sapiens
gatgttcaaggctaa

SEQ ID NO: 1326979 - DNA, 15 bp, Homo sapiens
cgatgttcaaggcta

SEQ ID NO: 1326980 - DNA, 15 bp, Homo sapiens
acgatgttcaaggct

SEQ ID NO: 1326981 - DNA, 15 bp, Homo sapiens
cacgatgttcaaggc

SEQ ID NO: 1326982 - DNA, 15 bp, Homo sapiens
gcacgatgttcaagg

SEQ ID NO: 1326983 - DNA, 15 bp, Homo sapiens
agcacgatgttcaag

SEQ ID NO: 1326984 - DNA, 15 bp, Homo sapiens
cagcacgatgttcaa

SEQ ID NO: 1326985 - DNA, 15 bp, Homo sapiens
acagcacgatgttca

SEQ ID NO: 1326986 - DNA, 15 bp, Homo sapiens
cacagcacgatgttc

SEQ ID NO: 1326987 - DNA, 15 bp, Homo sapiens
acacagcacgatgtt

SEQ ID NO: 1326988 - DNA, 15 bp, Homo sapiens
gacacagcacgatgt

SEQ ID NO: 1326989 - DNA, 15 bp, Homo sapiens
ggacacagcacgatg

SEQ ID NO: 1326990 - DNA, 15 bp, Homo sapiens
aggacacagcacgat

SEQ ID NO: 1326991 - DNA, 15 bp, Homo sapiens
aaggacacagcacga

SEQ ID NO: 1326992 - DNA, 15 bp, Homo sapiens
gaaggacacagcacg

SEQ ID NO: 1326993 - DNA, 15 bp, Homo sapiens
agaaggacacagcac

SEQ ID NO: 1326994 - DNA, 15 bp, Homo sapiens
tagaaggacacagca

SEQ ID NO: 1326995 - DNA, 15 bp, Homo sapiens
gtagaaggacacagc

SEQ ID NO: 1326996 - DNA, 15 bp, Homo sapiens
ggtagaaggacacag

SEQ ID NO: 1326997 - DNA, 15 bp, Homo sapiens
tggtagaaggacaca

SEQ ID NO: 1326998 - DNA, 15 bp, Homo sapiens
atggtagaaggacac

SEQ ID NO: 1326999 - DNA, 15 bp, Homo sapiens
tatggtagaaggaca

SEQ ID NO: 1327000 - DNA, 15 bp, Homo sapiens
atatggtagaaggac

SEQ ID NO: 1327001 - DNA, 15 bp, Homo sapiens
aatatggtagaagga

SEQ ID NO: 1327002 - DNA, 15 bp, Homo sapiens
gaatatggtagaagg

SEQ ID NO: 1327003 - DNA, 15 bp, Homo sapiens
agaatatggtagaag

SEQ ID NO: 1327004 - DNA, 15 bp, Homo sapiens
tagaatatggtagaa

SEQ ID NO: 1327005 - DNA, 15 bp, Homo sapiens
gtagaatatggtaga

SEQ ID NO: 1327006 - DNA, 15 bp, Homo sapiens
agtagaatatggtag

SEQ ID NO: 1327007 - DNA, 15 bp, Homo sapiens
tagtagaatatggta

SEQ ID NO: 1327008 - DNA, 15 bp, Homo sapiens
atagtagaatatggt

SEQ ID NO: 1327009 - DNA, 15 bp, Homo sapiens
aatagtagaatatgg

SEQ ID NO: 1327010 - DNA, 15 bp, Homo sapiens
caatagtagaatatg

SEQ ID NO: 1327011 - DNA, 15 bp, Homo sapiens
tcaatagtagaatat

SEQ ID NO: 1327012 - DNA, 15 bp, Homo sapiens
ctcaatagtagaata

SEQ ID NO: 1327013 - DNA, 15 bp, Homo sapiens
cctcaatagtagaat

SEQ ID NO: 1327014 - DNA, 15 bp, Homo sapiens
gcctcaatagtagaa

SEQ ID NO: 1327015 - DNA, 15 bp, Homo sapiens
ggcctcaatagtaga

SEQ ID NO: 1327016 - DNA, 15 bp, Homo sapiens
gggcctcaatagtag

SEQ ID NO: 1327017 - DNA, 15 bp, Homo sapiens
agggcctcaatagta

SEQ ID NO: 1327018 - DNA, 15 bp, Homo sapiens
aagggcctcaatagt

SEQ ID NO: 1327019 - DNA, 15 bp, Homo sapiens
taagggcctcaatag

SEQ ID NO: 1327020 - DNA, 15 bp, Homo sapiens
gtaagggcctcaata

SEQ ID NO: 1327021 - DNA, 15 bp, Homo sapiens
cgtaagggcctcaat

SEQ ID NO: 1327022 - DNA, 15 bp, Homo sapiens
tcgtaagggcctcaa

SEQ ID NO: 1327023 - DNA, 15 bp, Homo sapiens
ttcgtaagggcctca

SEQ ID NO: 1327024 - DNA, 15 bp, Homo sapiens
cttcgtaagggcctc

SEQ ID NO: 1327025 - DNA, 15 bp, Homo sapiens
gcttcgtaagggcct

SEQ ID NO: 1327026 - DNA, 15 bp, Homo sapiens
agcttcgtaagggcc

SEQ ID NO: 1327027 - DNA, 15 bp, Homo sapiens
gagcttcgtaagggc

SEQ ID NO: 1327028 - DNA, 15 bp, Homo sapiens
ggagcttcgtaaggg

SEQ ID NO: 1327029 - DNA, 15 bp, Homo sapiens
tggagcttcgtaagg

SEQ ID NO: 1327030 - DNA, 15 bp, Homo sapiens
gtggagcttcgtaag

SEQ ID NO: 1327031 - DNA, 15 bp, Homo sapiens
ggtggagcttcgtaa

SEQ ID NO: 1327032 - DNA, 15 bp, Homo sapiens
gggtggagcttcgta

SEQ ID NO: 1327033 - DNA, 15 bp, Homo sapiens
tgggtggagcttcgt

SEQ ID NO: 1327034 - DNA, 15 bp, Homo sapiens
ctgggtggagcttcg

SEQ ID NO: 1327035 - DNA, 15 bp, Homo sapiens
cctgggtggagcttc

SEQ ID NO: 1327036 - DNA, 15 bp, Homo sapiens
ccctgggtggagctt

SEQ ID NO: 1327037 - DNA, 15 bp, Homo sapiens
accctgggtggagct

SEQ ID NO: 1327038 - DNA, 15 bp, Homo sapiens
caccctgggtggagc

SEQ ID NO: 1327039 - DNA, 15 bp, Homo sapiens
tcaccctgggtggag

SEQ ID NO: 1327040 - DNA, 15 bp, Homo sapiens
ttcaccctgggtgga

SEQ ID NO: 1327041 - DNA, 15 bp, Homo sapiens
cttcaccctgggtgg

SEQ ID NO: 1327042 - DNA, 15 bp, Homo sapiens
ccttcaccctgggtg

SEQ ID NO: 1327043 - DNA, 15 bp, Homo sapiens
cccttcaccctgggt

SEQ ID NO: 1327044 - DNA, 15 bp, Homo sapiens
ccccttcaccctggg

SEQ ID NO: 1327045 - DNA, 15 bp, Homo sapiens
tccccttcaccctgg

SEQ ID NO: 1327046 - DNA, 15 bp, Homo sapiens
ttccccttcaccctg

SEQ ID NO: 1327047 - DNA, 15 bp, Homo sapiens
cttccccttcaccct

SEQ ID NO: 1327048 - DNA, 15 bp, Homo sapiens
tcttccccttcaccc

SEQ ID NO: 1327049 - DNA, 15 bp, Homo sapiens
ctcttccccttcacc

SEQ ID NO: 1327050 - DNA, 15 bp, Homo sapiens
tctcttccccttcac

SEQ ID NO: 1327051 - DNA, 15 bp, Homo sapiens
gtctcttccccttca

SEQ ID NO: 1327052 - DNA, 15 bp, Homo sapiens
tgtctcttccccttc

SEQ ID NO: 1327053 - DNA, 15 bp, Homo sapiens
atgtctcttcccctt

SEQ ID NO: 1327054 - DNA, 15 bp, Homo sapiens
gatgtctcttcccct

SEQ ID NO: 1327055 - DNA, 15 bp, Homo sapiens
tgatgtctcttcccc

SEQ ID NO: 1327056 - DNA, 15 bp, Homo sapiens
ttgatgtctcttccc

SEQ ID NO: 1327057 - DNA, 15 bp, Homo sapiens
attgatgtctcttcc

SEQ ID NO: 1327058 - DNA, 15 bp, Homo sapiens
cattgatgtctcttc

SEQ ID NO: 1327059 - DNA, 15 bp, Homo sapiens
gcattgatgtctctt

SEQ ID NO: 1327060 - DNA, 15 bp, Homo sapiens
ggcattgatgtctct

SEQ ID NO: 1327061 - DNA, 15 bp, Homo sapiens
gggcattgatgtctc

SEQ ID NO: 1327062 - DNA, 15 bp, Homo sapiens
ggggcattgatgtct

SEQ ID NO: 1327063 - DNA, 15 bp, Homo sapiens
aggggcattgatgtc

SEQ ID NO: 1327064 - DNA, 15 bp, Homo sapiens
gaggggcattgatgt

SEQ ID NO: 1327065 - DNA, 15 bp, Homo sapiens
agaggggcattgatg

SEQ ID NO: 1327066 - DNA, 15 bp, Homo sapiens
aagaggggcattgat

SEQ ID NO: 1327067 - DNA, 15 bp, Homo sapiens
caagaggggcattga

SEQ ID NO: 1327068 - DNA, 15 bp, Homo sapiens
tcaagaggggcattg

SEQ ID NO: 1327069 - DNA, 15 bp, Homo sapiens
atcaagaggggcatt

SEQ ID NO: 1327070 - DNA, 15 bp, Homo sapiens
catcaagaggggcat

SEQ ID NO: 1327071 - DNA, 15 bp, Homo sapiens
ccatcaagaggggca

SEQ ID NO: 1327072 - DNA, 15 bp, Homo sapiens
accatcaagaggggc

SEQ ID NO: 1327073 - DNA, 15 bp, Homo sapiens
caccatcaagagggg

SEQ ID NO: 1327074 - DNA, 15 bp, Homo sapiens
ccaccatcaagaggg

SEQ ID NO: 1327075 - DNA, 15 bp, Homo sapiens
tccaccatcaagagg

SEQ ID NO: 1327076 - DNA, 15 bp, Homo sapiens
ctccaccatcaagag

SEQ ID NO: 1327077 - DNA, 15 bp, Homo sapiens
actccaccatcaaga

SEQ ID NO: 1327078 - DNA, 15 bp, Homo sapiens
cactccaccatcaag

SEQ ID NO: 1327079 - DNA, 15 bp, Homo sapiens
acactccaccatcaa

SEQ ID NO: 1327080 - DNA, 15 bp, Homo sapiens
aacactccaccatca

SEQ ID NO: 1327081 - DNA, 15 bp, Homo sapiens
caacactccaccatc

SEQ ID NO: 1327082 - DNA, 15 bp, Homo sapiens
tcaacactccaccat

SEQ ID NO: 1327083 - DNA, 15 bp, Homo sapiens
atcaacactccacca

SEQ ID NO: 1327084 - DNA, 15 bp, Homo sapiens
catcaacactccacc

SEQ ID NO: 1327085 - DNA, 15 bp, Homo sapiens
gcatcaacactccac

SEQ ID NO: 1327086 - DNA, 15 bp, Homo sapiens
ggcatcaacactcca

SEQ ID NO: 1327087 - DNA, 15 bp, Homo sapiens
tggcatcaacactcc

SEQ ID NO: 1327088 - DNA, 15 bp, Homo sapiens
gtggcatcaacactc

SEQ ID NO: 1327089 - DNA, 15 bp, Homo sapiens
tgtggcatcaacact

SEQ ID NO: 1327090 - DNA, 15 bp, Homo sapiens
gtgtggcatcaacac

SEQ ID NO: 1327091 - DNA, 15 bp, Homo sapiens
agtgtggcatcaaca

SEQ ID NO: 1327092 - DNA, 15 bp, Homo sapiens
cagtgtggcatcaac

SEQ ID NO: 1327093 - DNA, 15 bp, Homo sapiens
acagtgtggcatcaa

SEQ ID NO: 1327094 - DNA, 15 bp, Homo sapiens
cacagtgtggcatca

SEQ ID NO: 1327095 - DNA, 15 bp, Homo sapiens
tcacagtgtggcatc

SEQ ID NO: 1327096 - DNA, 15 bp, Homo sapiens
ttcacagtgtggcat

SEQ ID NO: 1327097 - DNA, 15 bp, Homo sapiens
tttcacagtgtggca

SEQ ID NO: 1327098 - DNA, 15 bp, Homo sapiens
ttttcacagtgtggc

SEQ ID NO: 1327099 - DNA, 15 bp, Homo sapiens
cttttcacagtgtgg

SEQ ID NO: 1327100 - DNA, 15 bp, Homo sapiens
ccttttcacagtgtg

SEQ ID NO: 1327101 - DNA, 15 bp, Homo sapiens
cccttttcacagtgt

SEQ ID NO: 1327102 - DNA, 15 bp, Homo sapiens
gcccttttcacagtg

SEQ ID NO: 1327103 - DNA, 15 bp, Homo sapiens
tgcccttttcacagt

SEQ ID NO: 1327104 - DNA, 15 bp, Homo sapiens
gtgcccttttcacag

SEQ ID NO: 1327105 - DNA, 15 bp, Homo sapiens
tgtgcccttttcaca

SEQ ID NO: 1327106 - DNA, 15 bp, Homo sapiens
atgtgcccttttcac

SEQ ID NO: 1327107 - DNA, 15 bp, Homo sapiens
catgtgcccttttca

SEQ ID NO: 1327108 - DNA, 15 bp, Homo sapiens
ccatgtgcccttttc

SEQ ID NO: 1327109 - DNA, 15 bp, Homo sapiens
tccatgtgccctttt

SEQ ID NO: 1327110 - DNA, 15 bp, Homo sapiens
ttccatgtgcccttt

SEQ ID NO: 1327111 - DNA, 15 bp, Homo sapiens
attccatgtgccctt

SEQ ID NO: 1327112 - DNA, 15 bp, Homo sapiens
cattccatgtgccct

SEQ ID NO: 1327113 - DNA, 15 bp, Homo sapiens
ccattccatgtgccc

SEQ ID NO: 1327114 - DNA, 15 bp, Homo sapiens
cccattccatgtgcc

SEQ ID NO: 1327115 - DNA, 15 bp, Homo sapiens
tcccattccatgtgc

SEQ ID NO: 1327116 - DNA, 15 bp, Homo sapiens
ttcccattccatgtg

SEQ ID NO: 1327117 - DNA, 15 bp, Homo sapiens
cttcccattccatgt

SEQ ID NO: 1327118 - DNA, 15 bp, Homo sapiens
acttcccattccatg

SEQ ID NO: 1327119 - DNA, 15 bp, Homo sapiens
tacttcccattccat

SEQ ID NO: 1327120 - DNA, 15 bp, Homo sapiens
atacttcccattcca

SEQ ID NO: 1327121 - DNA, 15 bp, Homo sapiens
aatacttcccattcc

SEQ ID NO: 1327122 - DNA, 15 bp, Homo sapiens
aaatacttcccattc

SEQ ID NO: 1327123 - DNA, 15 bp, Homo sapiens
caaatacttcccatt

SEQ ID NO: 1327124 - DNA, 15 bp, Homo sapiens
ccaaatacttcccat

SEQ ID NO: 1327125 - DNA, 15 bp, Homo sapiens
accaaatacttccca

SEQ ID NO: 1327126 - DNA, 15 bp, Homo sapiens
caccaaatacttccc

SEQ ID NO: 1327127 - DNA, 15 bp, Homo sapiens
acaccaaatacttcc

SEQ ID NO: 1327128 - DNA, 15 bp, Homo sapiens
cacaccaaatacttc

SEQ ID NO: 1327129 - DNA, 15 bp, Homo sapiens
tcacaccaaatactt

SEQ ID NO: 1327130 - DNA, 15 bp, Homo sapiens
gtcacaccaaatact

SEQ ID NO: 1327131 - DNA, 15 bp, Homo sapiens
ggtcacaccaaatac

SEQ ID NO: 1327132 - DNA, 15 bp, Homo sapiens
tggtcacaccaaata

SEQ ID NO: 1327133 - DNA, 15 bp, Homo sapiens
atggtcacaccaaat

SEQ ID NO: 1327134 - DNA, 15 bp, Homo sapiens
gatggtcacaccaaa

SEQ ID NO: 1327135 - DNA, 15 bp, Homo sapiens
agatggtcacaccaa

SEQ ID NO: 1327136 - DNA, 15 bp, Homo sapiens
aagatggtcacacca

SEQ ID NO: 1327137 - DNA, 15 bp, Homo sapiens
aaagatggtcacacc

SEQ ID NO: 1327138 - DNA, 15 bp, Homo sapiens
caaagatggtcacac

SEQ ID NO: 1327139 - DNA, 15 bp, Homo sapiens
ccaaagatggtcaca

SEQ ID NO: 1327140 - DNA, 15 bp, Homo sapiens
tccaaagatggtcac

SEQ ID NO: 1327141 - DNA, 15 bp, Homo sapiens
ttccaaagatggtca

SEQ ID NO: 1327142 - DNA, 15 bp, Homo sapiens
tttccaaagatggtc

SEQ ID NO: 1327143 - DNA, 15 bp, Homo sapiens
ctttccaaagatggt

SEQ ID NO: 1327144 - DNA, 15 bp, Homo sapiens
cctttccaaagatgg

SEQ ID NO: 1327145 - DNA, 15 bp, Homo sapiens
tcctttccaaagatg

SEQ ID NO: 1327146 - DNA, 15 bp, Homo sapiens
gtcctttccaaagat

SEQ ID NO: 1327147 - DNA, 15 bp, Homo sapiens
tgtcctttccaaaga

SEQ ID NO: 1327148 - DNA, 15 bp, Homo sapiens
ttgtcctttccaaag

SEQ ID NO: 1327149 - DNA, 15 bp, Homo sapiens
attgtcctttccaaa

SEQ ID NO: 1327150 - DNA, 15 bp, Homo sapiens
gattgtcctttccaa

SEQ ID NO: 1327151 - DNA, 15 bp, Homo sapiens
agattgtcctttcca

SEQ ID NO: 1327152 - DNA, 15 bp, Homo sapiens
gagattgtcctttcc

SEQ ID NO: 1327153 - DNA, 15 bp, Homo sapiens
ggagattgtcctttc

SEQ ID NO: 1327154 - DNA, 15 bp, Homo sapiens
tggagattgtccttt

SEQ ID NO: 1327155 - DNA, 15 bp, Homo sapiens
atggagattgtcctt

SEQ ID NO: 1327156 - DNA, 15 bp, Homo sapiens
tatggagattgtcct

SEQ ID NO: 1327157 - DNA, 15 bp, Homo sapiens
gtatggagattgtcc

SEQ ID NO: 1327158 - DNA, 15 bp, Homo sapiens
agtatggagattgtc

SEQ ID NO: 1327159 - DNA, 15 bp, Homo sapiens
tagtatggagattgt

SEQ ID NO: 1327160 - DNA, 15 bp, Homo sapiens
atagtatggagattg

SEQ ID NO: 1327161 - DNA, 15 bp, Homo sapiens
catagtatggagatt

SEQ ID NO: 1327162 - DNA, 15 bp, Homo sapiens
acatagtatggagat

SEQ ID NO: 1327163 - DNA, 15 bp, Homo sapiens
cacatagtatggaga

SEQ ID NO: 1327164 - DNA, 15 bp, Homo sapiens
acacatagtatggag

SEQ ID NO: 1327165 - DNA, 15 bp, Homo sapiens
gacacatagtatgga

SEQ ID NO: 1327166 - DNA, 15 bp, Homo sapiens
tgacacatagtatgg

SEQ ID NO: 1327167 - DNA, 15 bp, Homo sapiens
ctgacacatagtatg

SEQ ID NO: 1327168 - DNA, 15 bp, Homo sapiens
cctgacacatagtat

SEQ ID NO: 1327169 - DNA, 15 bp, Homo sapiens
acctgacacatagta

SEQ ID NO: 1327170 - DNA, 15 bp, Homo sapiens
tacctgacacatagt

SEQ ID NO: 1327171 - DNA, 15 bp, Homo sapiens
ctacctgacacatag

SEQ ID NO: 1327172 - DNA, 15 bp, Homo sapiens
gctacctgacacata

SEQ ID NO: 1327173 - DNA, 15 bp, Homo sapiens
agctacctgacacat

SEQ ID NO: 1327174 - DNA, 15 bp, Homo sapiens
aagctacctgacaca

SEQ ID NO: 1327175 - DNA, 15 bp, Homo sapiens
taagctacctgacac

SEQ ID NO: 1327176 - DNA, 15 bp, Homo sapiens
ctaagctacctgaca

SEQ ID NO: 1327177 - DNA, 15 bp, Homo sapiens
cctaagctacctgac

SEQ ID NO: 1327178 - DNA, 15 bp, Homo sapiens
acctaagctacctga

SEQ ID NO: 1327179 - DNA, 15 bp, Homo sapiens
cacctaagctacctg

SEQ ID NO: 1327180 - DNA, 15 bp, Homo sapiens
tcacctaagctacct

SEQ ID NO: 1327181 - DNA, 15 bp, Homo sapiens
atcacctaagctacc

SEQ ID NO: 1327182 - DNA, 15 bp, Homo sapiens
gatcacctaagctac

SEQ ID NO: 1327183 - DNA, 15 bp, Homo sapiens
agatcacctaagcta

SEQ ID NO: 1327184 - DNA, 15 bp, Homo sapiens
gagatcacctaagct

SEQ ID NO: 1327185 - DNA, 15 bp, Homo sapiens
agagatcacctaagc

SEQ ID NO: 1327186 - DNA, 15 bp, Homo sapiens
gagagatcacctaag

SEQ ID NO: 1327187 - DNA, 15 bp, Homo sapiens
tgagagatcacctaa

SEQ ID NO: 1327188 - DNA, 15 bp, Homo sapiens
atgagagatcaccta

SEQ ID NO: 1327189 - DNA, 15 bp, Homo sapiens
aatgagagatcacct

SEQ ID NO: 1327190 - DNA, 15 bp, Homo sapiens
gaatgagagatcacc

SEQ ID NO: 1327191 - DNA, 15 bp, Homo sapiens
ggaatgagagatcac

SEQ ID NO: 1327192 - DNA, 15 bp, Homo sapiens
aggaatgagagatca

SEQ ID NO: 1327193 - DNA, 15 bp, Homo sapiens
gaggaatgagagatc

SEQ ID NO: 1327194 - DNA, 15 bp, Homo sapiens
tgaggaatgagagat

SEQ ID NO: 1327195 - DNA, 15 bp, Homo sapiens
ttgaggaatgagaga

SEQ ID NO: 1327196 - DNA, 15 bp, Homo sapiens
tttgaggaatgagag

SEQ ID NO: 1327197 - DNA, 15 bp, Homo sapiens
ttttgaggaatgaga

SEQ ID NO: 1327198 - DNA, 15 bp, Homo sapiens
tttttgaggaatgag

SEQ ID NO: 1327199 - DNA, 15 bp, Homo sapiens
gtttttgaggaatga

SEQ ID NO: 1327200 - DNA, 15 bp, Homo sapiens
tgtttttgaggaatg

SEQ ID NO: 1327201 - DNA, 15 bp, Homo sapiens
gtgtttttgaggaat

SEQ ID NO: 1327202 - DNA, 15 bp, Homo sapiens
agtgtttttgaggaa

SEQ ID NO: 1327203 - DNA, 15 bp, Homo sapiens
cagtgtttttgagga

SEQ ID NO: 1327204 - DNA, 15 bp, Homo sapiens
tcagtgtttttgagg

SEQ ID NO: 1327205 - DNA, 15 bp, Homo sapiens
ctcagtgtttttgag

SEQ ID NO: 1327206 - DNA, 15 bp, Homo sapiens
cctcagtgtttttga

SEQ ID NO: 1327207 - DNA, 15 bp, Homo sapiens
ccctcagtgtttttg

SEQ ID NO: 1327208 - DNA, 15 bp, Homo sapiens
cccctcagtgttttt

SEQ ID NO: 1327209 - DNA, 15 bp, Homo sapiens
gcccctcagtgtttt

SEQ ID NO: 1327210 - DNA, 15 bp, Homo sapiens
agcccctcagtgttt

SEQ ID NO: 1327211 - DNA, 15 bp, Homo sapiens
tagcccctcagtgtt

SEQ ID NO: 1327212 - DNA, 15 bp, Homo sapiens
ctagcccctcagtgt

SEQ ID NO: 1327213 - DNA, 15 bp, Homo sapiens
cctagcccctcagtg

SEQ ID NO: 1327214 - DNA, 15 bp, Homo sapiens
acctagcccctcagt

SEQ ID NO: 1327215 - DNA, 15 bp, Homo sapiens
tacctagcccctcag

SEQ ID NO: 1327216 - DNA, 15 bp, Homo sapiens
atacctagcccctca

SEQ ID NO: 1327217 - DNA, 15 bp, Homo sapiens
tatacctagcccctc

SEQ ID NO: 1327218 - DNA, 15 bp, Homo sapiens
ttatacctagcccct

SEQ ID NO: 1327219 - DNA, 15 bp, Homo sapiens
attatacctagcccc

SEQ ID NO: 1327220 - DNA, 15 bp, Homo sapiens
aattatacctagccc

SEQ ID NO: 1327221 - DNA, 15 bp, Homo sapiens
taattatacctagcc

SEQ ID NO: 1327222 - DNA, 15 bp, Homo sapiens
ataattatacctagc

SEQ ID NO: 1327223 - DNA, 15 bp, Homo sapiens
gataattatacctag

SEQ ID NO: 1327224 - DNA, 15 bp, Homo sapiens
agataattataccta

SEQ ID NO: 1327225 - DNA, 15 bp, Homo sapiens
gagataattatacct

SEQ ID NO: 1327226 - DNA, 15 bp, Homo sapiens
agagataattatacc

SEQ ID NO: 1327227 - DNA, 15 bp, Homo sapiens
tagagataattatac

SEQ ID NO: 1327228 - DNA, 15 bp, Homo sapiens
atagagataattata

SEQ ID NO: 1327229 - DNA, 15 bp, Homo sapiens
aatagagataattat

SEQ ID NO: 1327230 - DNA, 15 bp, Homo sapiens
aaatagagataatta

SEQ ID NO: 1327231 - DNA, 15 bp, Homo sapiens
aaaatagagataatt

SEQ ID NO: 1327232 - DNA, 15 bp, Homo sapiens
taaaatagagataat

SEQ ID NO: 1327233 - DNA, 15 bp, Homo sapiens
ctaaaatagagataa

SEQ ID NO: 1327234 - DNA, 15 bp, Homo sapiens
tctaaaatagagata

SEQ ID NO: 1327235 - DNA, 15 bp, Homo sapiens
ctctaaaatagagat

SEQ ID NO: 1327236 - DNA, 15 bp, Homo sapiens
tctctaaaatagaga

SEQ ID NO: 1327237 - DNA, 15 bp, Homo sapiens
gtctctaaaatagag

SEQ ID NO: 1327238 - DNA, 15 bp, Homo sapiens
tgtctctaaaataga

SEQ ID NO: 1327239 - DNA, 15 bp, Homo sapiens
ctgtctctaaaatag

SEQ ID NO: 1327240 - DNA, 15 bp, Homo sapiens
tctgtctctaaaata

SEQ ID NO: 1327241 - DNA, 15 bp, Homo sapiens
gtctgtctctaaaat

SEQ ID NO: 1327242 - DNA, 15 bp, Homo sapiens
tgtctgtctctaaaa

SEQ ID NO: 1327243 - DNA, 15 bp, Homo sapiens
ttgtctgtctctaaa

SEQ ID NO: 1327244 - DNA, 15 bp, Homo sapiens
tttgtctgtctctaa

SEQ ID NO: 1327245 - DNA, 15 bp, Homo sapiens
gtttgtctgtctcta

SEQ ID NO: 1327246 - DNA, 15 bp, Homo sapiens
agtttgtctgtctct

SEQ ID NO: 1327247 - DNA, 15 bp, Homo sapiens
cagtttgtctgtctc

SEQ ID NO: 1327248 - DNA, 15 bp, Homo sapiens
tcagtttgtctgtct

SEQ ID NO: 1327249 - DNA, 15 bp, Homo sapiens
ttcagtttgtctgtc

SEQ ID NO: 1327250 - DNA, 15 bp, Homo sapiens
cttcagtttgtctgt

SEQ ID NO: 1327251 - DNA, 15 bp, Homo sapiens
gcttcagtttgtctg

SEQ ID NO: 1327252 - DNA, 15 bp, Homo sapiens
agcttcagtttgtct

SEQ ID NO: 1327253 - DNA, 15 bp, Homo sapiens
aagcttcagtttgtc

SEQ ID NO: 1327254 - DNA, 15 bp, Homo sapiens
taagcttcagtttgt

SEQ ID NO: 1327255 - DNA, 15 bp, Homo sapiens
ctaagcttcagtttg

SEQ ID NO: 1327256 - DNA, 15 bp, Homo sapiens
tctaagcttcagttt

SEQ ID NO: 1327257 - DNA, 15 bp, Homo sapiens
ctctaagcttcagtt

SEQ ID NO: 1327258 - DNA, 15 bp, Homo sapiens
tctctaagcttcagt

SEQ ID NO: 1327259 - DNA, 15 bp, Homo sapiens
ctctctaagcttcag

SEQ ID NO: 1327260 - DNA, 15 bp, Homo sapiens
cctctctaagcttca

SEQ ID NO: 1327261 - DNA, 15 bp, Homo sapiens
gcctctctaagcttc

SEQ ID NO: 1327262 - DNA, 15 bp, Homo sapiens
tgcctctctaagctt

SEQ ID NO: 1327263 - DNA, 15 bp, Homo sapiens
ttgcctctctaagct

SEQ ID NO: 1327264 - DNA, 15 bp, Homo sapiens
tttgcctctctaagc

SEQ ID NO: 1327265 - DNA, 15 bp, Homo sapiens
ctttgcctctctaag

SEQ ID NO: 1327266 - DNA, 15 bp, Homo sapiens
actttgcctctctaa

SEQ ID NO: 1327267 - DNA, 15 bp, Homo sapiens
tactttgcctctcta

SEQ ID NO: 1327268 - DNA, 15 bp, Homo sapiens
ttactttgcctctct

SEQ ID NO: 1327269 - DNA, 15 bp, Homo sapiens
tatgttctagtctct

SEQ ID NO: 1327270 - DNA, 15 bp, Homo sapiens
ctatgttctagtctc

SEQ ID NO: 1327271 - DNA, 15 bp, Homo sapiens
tctatgttctagtct

SEQ ID NO: 1327272 - DNA, 15 bp, Homo sapiens
gtctatgttctagtc

SEQ ID NO: 1327273 - DNA, 15 bp, Homo sapiens
tgtctatgttctagt

SEQ ID NO: 1327274 - DNA, 15 bp, Homo sapiens
atgtctatgttctag

SEQ ID NO: 1327275 - DNA, 15 bp, Homo sapiens
gatgtctatgttcta

SEQ ID NO: 1327276 - DNA, 15 bp, Homo sapiens
agatgtctatgttct

SEQ ID NO: 1327277 - DNA, 15 bp, Homo sapiens
aagatgtctatgttc

SEQ ID NO: 1327278 - DNA, 15 bp, Homo sapiens
caagatgtctatgtt

SEQ ID NO: 1327279 - DNA, 15 bp, Homo sapiens
ccaagatgtctatgt

SEQ ID NO: 1327280 - DNA, 15 bp, Homo sapiens
cccaagatgtctatg

SEQ ID NO: 1327281 - DNA, 15 bp, Homo sapiens
ccccaagatgtctat

SEQ ID NO: 1327282 - DNA, 15 bp, Homo sapiens
cccccaagatgtcta

SEQ ID NO: 1327283 - DNA, 15 bp, Homo sapiens
ccccccaagatgtct

SEQ ID NO: 1327284 - DNA, 15 bp, Homo sapiens
gccccccaagatgtc

SEQ ID NO: 1327285 - DNA, 15 bp, Homo sapiens
ggccccccaagatgt

SEQ ID NO: 1327286 - DNA, 15 bp, Homo sapiens
tggccccccaagatg

SEQ ID NO: 1327287 - DNA, 15 bp, Homo sapiens
atggccccccaagat

SEQ ID NO: 1327288 - DNA, 15 bp, Homo sapiens
aatggccccccaaga

SEQ ID NO: 1327289 - DNA, 15 bp, Homo sapiens
taatggccccccaag

SEQ ID NO: 1327290 - DNA, 15 bp, Homo sapiens
gtaatggccccccaa

SEQ ID NO: 1327291 - DNA, 15 bp, Homo sapiens
agtaatggcccccca

SEQ ID NO: 1327292 - DNA, 15 bp, Homo sapiens
cagtaatggcccccc

SEQ ID NO: 1327293 - DNA, 15 bp, Homo sapiens
tcagtaatggccccc

SEQ ID NO: 1327294 - DNA, 15 bp, Homo sapiens
ctcagtaatggcccc

SEQ ID NO: 1327295 - DNA, 15 bp, Homo sapiens
gctcagtaatggccc

SEQ ID NO: 1327296 - DNA, 15 bp, Homo sapiens
ggctcagtaatggcc

SEQ ID NO: 1327297 - DNA, 15 bp, Homo sapiens
aggctcagtaatggc

SEQ ID NO: 1327298 - DNA, 15 bp, Homo sapiens
taggctcagtaatgg

SEQ ID NO: 1327299 - DNA, 15 bp, Homo sapiens
ataggctcagtaatg

SEQ ID NO: 1327300 - DNA, 15 bp, Homo sapiens
aataggctcagtaat

SEQ ID NO: 1327301 - DNA, 15 bp, Homo sapiens
taataggctcagtaa

SEQ ID NO: 1327302 - DNA, 15 bp, Homo sapiens
gtaataggctcagta

SEQ ID NO: 1327303 - DNA, 15 bp, Homo sapiens
tgtaataggctcagt

SEQ ID NO: 1327304 - DNA, 15 bp, Homo sapiens
atgtaataggctcag

SEQ ID NO: 1327305 - DNA, 15 bp, Homo sapiens
tatgtaataggctca

SEQ ID NO: 1327306 - DNA, 15 bp, Homo sapiens
gtatgtaataggctc

SEQ ID NO: 1327307 - DNA, 15 bp, Homo sapiens
agtatgtaataggct

SEQ ID NO: 1327308 - DNA, 15 bp, Homo sapiens
cagtatgtaataggc

SEQ ID NO: 1327309 - DNA, 15 bp, Homo sapiens
acagtatgtaatagg

SEQ ID NO: 1327310 - DNA, 15 bp, Homo sapiens
cacagtatgtaatag

SEQ ID NO: 1327311 - DNA, 15 bp, Homo sapiens
acacagtatgtaata

SEQ ID NO: 1327312 - DNA, 15 bp, Homo sapiens
cacacagtatgtaat

SEQ ID NO: 1327313 - DNA, 15 bp, Homo sapiens
tcacacagtatgtaa

SEQ ID NO: 1327314 - DNA, 15 bp, Homo sapiens
gtcacacagtatgta

SEQ ID NO: 1327315 - DNA, 15 bp, Homo sapiens
ggtcacacagtatgt

SEQ ID NO: 1327316 - DNA, 15 bp, Homo sapiens
aggtcacacagtatg

SEQ ID NO: 1327317 - DNA, 15 bp, Homo sapiens
taggtcacacagtat

SEQ ID NO: 1327318 - DNA, 15 bp, Homo sapiens
ctaggtcacacagta

SEQ ID NO: 1327319 - DNA, 15 bp, Homo sapiens
cctaggtcacacagt

SEQ ID NO: 1327320 - DNA, 15 bp, Homo sapiens
ccctaggtcacacag

SEQ ID NO: 1327321 - DNA, 15 bp, Homo sapiens
gccctaggtcacaca

SEQ ID NO: 1327322 - DNA, 15 bp, Homo sapiens
tgccctaggtcacac

SEQ ID NO: 1327323 - DNA, 15 bp, Homo sapiens
ttgccctaggtcaca

SEQ ID NO: 1327324 - DNA, 15 bp, Homo sapiens
cttgccctaggtcac

SEQ ID NO: 1327325 - DNA, 15 bp, Homo sapiens
acttgccctaggtca

SEQ ID NO: 1327326 - DNA, 15 bp, Homo sapiens
gacttgccctaggtc

SEQ ID NO: 1327327 - DNA, 15 bp, Homo sapiens
tgacttgccctaggt

SEQ ID NO: 1327328 - DNA, 15 bp, Homo sapiens
gtgacttgccctagg

SEQ ID NO: 1327329 - DNA, 15 bp, Homo sapiens
agtgacttgccctag

SEQ ID NO: 1327330 - DNA, 15 bp, Homo sapiens
aagtgacttgcccta

SEQ ID NO: 1327331 - DNA, 15 bp, Homo sapiens
aaagtgacttgccct

SEQ ID NO: 1327332 - DNA, 15 bp, Homo sapiens
taaagtgacttgccc

SEQ ID NO: 1327333 - DNA, 15 bp, Homo sapiens
gtaaagtgacttgcc

SEQ ID NO: 1327334 - DNA, 15 bp, Homo sapiens
ggtaaagtgacttgc

SEQ ID NO: 1327335 - DNA, 15 bp, Homo sapiens
aggtaaagtgacttg

SEQ ID NO: 1327336 - DNA, 15 bp, Homo sapiens
gaggtaaagtgactt

SEQ ID NO: 1327337 - DNA, 15 bp, Homo sapiens
agaggtaaagtgact

SEQ ID NO: 1327338 - DNA, 15 bp, Homo sapiens
gagaggtaaagtgac

SEQ ID NO: 1327339 - DNA, 15 bp, Homo sapiens
agagaggtaaagtga

SEQ ID NO: 1327340 - DNA, 15 bp, Homo sapiens
cagagaggtaaagtg

SEQ ID NO: 1327341 - DNA, 15 bp, Homo sapiens
tcagagaggtaaagt

SEQ ID NO: 1327342 - DNA, 15 bp, Homo sapiens
ctcagagaggtaaag

SEQ ID NO: 1327343 - DNA, 15 bp, Homo sapiens
gctcagagaggtaaa

SEQ ID NO: 1327344 - DNA, 15 bp, Homo sapiens
ggctcagagaggtaa

SEQ ID NO: 1327345 - DNA, 15 bp, Homo sapiens
cggctcagagaggta

SEQ ID NO: 1327346 - DNA, 15 bp, Homo sapiens
acggctcagagaggt

SEQ ID NO: 1327347 - DNA, 15 bp, Homo sapiens
tacggctcagagagg

SEQ ID NO: 1327348 - DNA, 15 bp, Homo sapiens
ctacggctcagagag

SEQ ID NO: 1327349 - DNA, 15 bp, Homo sapiens
cctacggctcagaga

SEQ ID NO: 1327350 - DNA, 15 bp, Homo sapiens
acctacggctcagag

SEQ ID NO: 1327351 - DNA, 15 bp, Homo sapiens
gacctacggctcaga

SEQ ID NO: 1327352 - DNA, 15 bp, Homo sapiens
agacctacggctcag

SEQ ID NO: 1327353 - DNA, 15 bp, Homo sapiens
aagacctacggctca

SEQ ID NO: 1327354 - DNA, 15 bp, Homo sapiens
aaagacctacggctc

SEQ ID NO: 1327355 - DNA, 15 bp, Homo sapiens
aaaagacctacggct

SEQ ID NO: 1327356 - DNA, 15 bp, Homo sapiens
taaaagacctacggc

SEQ ID NO: 1327357 - DNA, 15 bp, Homo sapiens
ataaaagacctacgg

SEQ ID NO: 1327358 - DNA, 15 bp, Homo sapiens
gataaaagacctacg

SEQ ID NO: 1327359 - DNA, 15 bp, Homo sapiens
agataaaagacctac

SEQ ID NO: 1327360 - DNA, 15 bp, Homo sapiens
cagataaaagaccta

SEQ ID NO: 1327361 - DNA, 15 bp, Homo sapiens
gcagataaaagacct

SEQ ID NO: 1327362 - DNA, 15 bp, Homo sapiens
tgcagataaaagacc

SEQ ID NO: 1327363 - DNA, 15 bp, Homo sapiens
ttgcagataaaagac

SEQ ID NO: 1327364 - DNA, 15 bp, Homo sapiens
attgcagataaaaga

SEQ ID NO: 1327365 - DNA, 15 bp, Homo sapiens
aattgcagataaaag

SEQ ID NO: 1327366 - DNA, 15 bp, Homo sapiens
caattgcagataaaa

SEQ ID NO: 1327367 - DNA, 15 bp, Homo sapiens
gcaattgcagataaa

SEQ ID NO: 1327368 - DNA, 15 bp, Homo sapiens
ggcaattgcagataa

SEQ ID NO: 1327369 - DNA, 15 bp, Homo sapiens
aggcaattgcagata

SEQ ID NO: 1327370 - DNA, 15 bp, Homo sapiens
gaggcaattgcagat

SEQ ID NO: 1327371 - DNA, 15 bp, Homo sapiens
agaggcaattgcaga

SEQ ID NO: 1327372 - DNA, 15 bp, Homo sapiens
gagaggcaattgcag

SEQ ID NO: 1327373 - DNA, 15 bp, Homo sapiens
tgagaggcaattgca

SEQ ID NO: 1327374 - DNA, 15 bp, Homo sapiens
ttgagaggcaattgc

SEQ ID NO: 1327375 - DNA, 15 bp, Homo sapiens
attgagaggcaattg

SEQ ID NO: 1327376 - DNA, 15 bp, Homo sapiens
aattgagaggcaatt

SEQ ID NO: 1327377 - DNA, 15 bp, Homo sapiens
caattgagaggcaat

SEQ ID NO: 1327378 - DNA, 15 bp, Homo sapiens
gcaattgagaggcaa

SEQ ID NO: 1327379 - DNA, 15 bp, Homo sapiens
tgcaattgagaggca

SEQ ID NO: 1327380 - DNA, 15 bp, Homo sapiens
gtgcaattgagaggc

SEQ ID NO: 1327381 - DNA, 15 bp, Homo sapiens
tgtgcaattgagagg

SEQ ID NO: 1327382 - DNA, 15 bp, Homo sapiens
ctgtgcaattgagag

SEQ ID NO: 1327383 - DNA, 15 bp, Homo sapiens
cctgtgcaattgaga

SEQ ID NO: 1327384 - DNA, 15 bp, Homo sapiens
ccctgtgcaattgag

SEQ ID NO: 1327385 - DNA, 15 bp, Homo sapiens
tccctgtgcaattga

SEQ ID NO: 1327386 - DNA, 15 bp, Homo sapiens
ttccctgtgcaattg

SEQ ID NO: 1327387 - DNA, 15 bp, Homo sapiens
cttccctgtgcaatt

SEQ ID NO: 1327388 - DNA, 15 bp, Homo sapiens
ccttccctgtgcaat

SEQ ID NO: 1327389 - DNA, 15 bp, Homo sapiens
gccttccctgtgcaa

SEQ ID NO: 1327390 - DNA, 15 bp, Homo sapiens
agccttccctgtgca

SEQ ID NO: 1327391 - DNA, 15 bp, Homo sapiens
aagccttccctgtgc

SEQ ID NO: 1327392 - DNA, 15 bp, Homo sapiens
taagccttccctgtg

SEQ ID NO: 1327393 - DNA, 15 bp, Homo sapiens
gtaagccttccctgt

SEQ ID NO: 1327394 - DNA, 15 bp, Homo sapiens
tgtaagccttccctg

SEQ ID NO: 1327395 - DNA, 15 bp, Homo sapiens
atgtaagccttccct

SEQ ID NO: 1327396 - DNA, 15 bp, Homo sapiens
catgtaagccttccc

SEQ ID NO: 1327397 - DNA, 15 bp, Homo sapiens
ccatgtaagccttcc

SEQ ID NO: 1327398 - DNA, 15 bp, Homo sapiens
cccatgtaagccttc

SEQ ID NO: 1327399 - DNA, 15 bp, Homo sapiens
ccccatgtaagcctt

SEQ ID NO: 1327400 - DNA, 15 bp, Homo sapiens
accccatgtaagcct

SEQ ID NO: 1327401 - DNA, 15 bp, Homo sapiens
gaccccatgtaagcc

SEQ ID NO: 1327402 - DNA, 15 bp, Homo sapiens
ggaccccatgtaagc

SEQ ID NO: 1327403 - DNA, 15 bp, Homo sapiens
tggaccccatgtaag

SEQ ID NO: 1327404 - DNA, 15 bp, Homo sapiens
ttggaccccatgtaa

SEQ ID NO: 1327405 - DNA, 15 bp, Homo sapiens
tttggaccccatgta

SEQ ID NO: 1327406 - DNA, 15 bp, Homo sapiens
ttttggaccccatgt

SEQ ID NO: 1327407 - DNA, 15 bp, Homo sapiens
tttttggaccccatg

SEQ ID NO: 1327408 - DNA, 15 bp, Homo sapiens
ctttttggaccccat

SEQ ID NO: 1327409 - DNA, 15 bp, Homo sapiens
gctttttggacccca

SEQ ID NO: 1327410 - DNA, 15 bp, Homo sapiens
tgctttttggacccc

SEQ ID NO: 1327411 - DNA, 15 bp, Homo sapiens
ttgctttttggaccc

SEQ ID NO: 1327412 - DNA, 15 bp, Homo sapiens
cttgctttttggacc

SEQ ID NO: 1327413 - DNA, 15 bp, Homo sapiens
tcttgctttttggac

SEQ ID NO: 1327414 - DNA, 15 bp, Homo sapiens
gtcttgctttttgga

SEQ ID NO: 1327415 - DNA, 15 bp, Homo sapiens
agtcttgctttttgg

SEQ ID NO: 1327416 - DNA, 15 bp, Homo sapiens
aagtcttgctttttg

SEQ ID NO: 1327417 - DNA, 15 bp, Homo sapiens
gaagtcttgcttttt

SEQ ID NO: 1327418 - DNA, 15 bp, Homo sapiens
agaagtcttgctttt

SEQ ID NO: 1327419 - DNA, 15 bp, Homo sapiens
cagaagtcttgcttt

SEQ ID NO: 1327420 - DNA, 15 bp, Homo sapiens
ccagaagtcttgctt

SEQ ID NO: 1327421 - DNA, 15 bp, Homo sapiens
tccagaagtcttgct

SEQ ID NO: 1327422 - DNA, 15 bp, Homo sapiens
ttccagaagtcttgc

SEQ ID NO: 1327423 - DNA, 15 bp, Homo sapiens
cttccagaagtcttg

SEQ ID NO: 1327424 - DNA, 15 bp, Homo sapiens
acttccagaagtctt

SEQ ID NO: 1327425 - DNA, 15 bp, Homo sapiens
aacttccagaagtct

SEQ ID NO: 1327426 - DNA, 15 bp, Homo sapiens
caacttccagaagtc

SEQ ID NO: 1327427 - DNA, 15 bp, Homo sapiens
gcaacttccagaagt

SEQ ID NO: 1327428 - DNA, 15 bp, Homo sapiens
tgcaacttccagaag

SEQ ID NO: 1327429 - DNA, 15 bp, Homo sapiens
ttgcaacttccagaa

SEQ ID NO: 1327430 - DNA, 15 bp, Homo sapiens
tttgcaacttccaga

SEQ ID NO: 1327431 - DNA, 15 bp, Homo sapiens
ctttgcaacttccag

SEQ ID NO: 1327432 - DNA, 15 bp, Homo sapiens
gctttgcaacttcca

SEQ ID NO: 1327433 - DNA, 15 bp, Homo sapiens
agctttgcaacttcc

SEQ ID NO: 1327434 - DNA, 15 bp, Homo sapiens
gagctttgcaacttc

SEQ ID NO: 1327435 - DNA, 15 bp, Homo sapiens
ggagctttgcaactt

SEQ ID NO: 1327436 - DNA, 15 bp, Homo sapiens
tggagctttgcaact

SEQ ID NO: 1327437 - DNA, 15 bp, Homo sapiens
ttggagctttgcaac

SEQ ID NO: 1327438 - DNA, 15 bp, Homo sapiens
tttggagctttgcaa

SEQ ID NO: 1327439 - DNA, 15 bp, Homo sapiens
atttggagctttgca

SEQ ID NO: 1327440 - DNA, 15 bp, Homo sapiens
tatttggagctttgc

SEQ ID NO: 1327441 - DNA, 15 bp, Homo sapiens
atatttggagctttg

SEQ ID NO: 1327442 - DNA, 15 bp, Homo sapiens
tatatttggagcttt

SEQ ID NO: 1327443 - DNA, 15 bp, Homo sapiens
ttatatttggagctt

SEQ ID NO: 1327444 - DNA, 15 bp, Homo sapiens
tttatatttggagct

SEQ ID NO: 1327445 - DNA, 15 bp, Homo sapiens
gtttatatttggagc

SEQ ID NO: 1327446 - DNA, 15 bp, Homo sapiens
tgtttatatttggag

SEQ ID NO: 1327447 - DNA, 15 bp, Homo sapiens
ttgtttatatttgga

SEQ ID NO: 1327448 - DNA, 15 bp, Homo sapiens
cttgtttatatttgg

SEQ ID NO: 1327449 - DNA, 15 bp, Homo sapiens
tcttgtttatatttg

SEQ ID NO: 1327450 - DNA, 15 bp, Homo sapiens
ctcttgtttatattt

SEQ ID NO: 1327451 - DNA, 15 bp, Homo sapiens
actcttgtttatatt

SEQ ID NO: 1327452 - DNA, 15 bp, Homo sapiens
cactcttgtttatat

SEQ ID NO: 1327453 - DNA, 15 bp, Homo sapiens
tcactcttgtttata

SEQ ID NO: 1327454 - DNA, 15 bp, Homo sapiens
atcactcttgtttat

SEQ ID NO: 1327455 - DNA, 15 bp, Homo sapiens
tatcactcttgttta

SEQ ID NO: 1327456 - DNA, 15 bp, Homo sapiens
atatcactcttgttt

SEQ ID NO: 1327457 - DNA, 15 bp, Homo sapiens
aatatcactcttgtt

SEQ ID NO: 1327458 - DNA, 15 bp, Homo sapiens
taatatcactcttgt

SEQ ID NO: 1327459 - DNA, 15 bp, Homo sapiens
ttaatatcactcttg

SEQ ID NO: 1327460 - DNA, 15 bp, Homo sapiens
attaatatcactctt

SEQ ID NO: 1327461 - DNA, 15 bp, Homo sapiens
tattaatatcactct

SEQ ID NO: 1327462 - DNA, 15 bp, Homo sapiens
ctattaatatcactc

SEQ ID NO: 1327463 - DNA, 15 bp, Homo sapiens
actattaatatcact

SEQ ID NO: 1327464 - DNA, 15 bp, Homo sapiens
aactattaatatcac

SEQ ID NO: 1327465 - DNA, 15 bp, Homo sapiens
caactattaatatca

SEQ ID NO: 1327466 - DNA, 15 bp, Homo sapiens
tcaactattaatatc

SEQ ID NO: 1327467 - DNA, 15 bp, Homo sapiens
ctcaactattaatat

SEQ ID NO: 1327468 - DNA, 15 bp, Homo sapiens
actcaactattaata

SEQ ID NO: 1327469 - DNA, 15 bp, Homo sapiens
tactcaactattaat

SEQ ID NO: 1327470 - DNA, 15 bp, Homo sapiens
gtactcaactattaa

SEQ ID NO: 1327471 - DNA, 15 bp, Homo sapiens
ggtactcaactatta

SEQ ID NO: 1327472 - DNA, 15 bp, Homo sapiens
aggtactcaactatt

SEQ ID NO: 1327473 - DNA, 15 bp, Homo sapiens
aaggtactcaactat

SEQ ID NO: 1327474 - DNA, 15 bp, Homo sapiens
gaaggtactcaacta

SEQ ID NO: 1327475 - DNA, 15 bp, Homo sapiens
ggaaggtactcaact

SEQ ID NO: 1327476 - DNA, 15 bp, Homo sapiens
gggaaggtactcaac

SEQ ID NO: 1327477 - DNA, 15 bp, Homo sapiens
ggggaaggtactcaa

SEQ ID NO: 1327478 - DNA, 15 bp, Homo sapiens
aggggaaggtactca

SEQ ID NO: 1327479 - DNA, 15 bp, Homo sapiens
gaggggaaggtactc

SEQ ID NO: 1327480 - DNA, 15 bp, Homo sapiens
agaggggaaggtact

SEQ ID NO: 1327481 - DNA, 15 bp, Homo sapiens
gagaggggaaggtac

SEQ ID NO: 1327482 - DNA, 15 bp, Homo sapiens
tgagaggggaaggta

SEQ ID NO: 1327483 - DNA, 15 bp, Homo sapiens
gtgagaggggaaggt

SEQ ID NO: 1327484 - DNA, 15 bp, Homo sapiens
ggtgagaggggaagg

SEQ ID NO: 1327485 - DNA, 15 bp, Homo sapiens
aggtgagaggggaag

SEQ ID NO: 1327486 - DNA, 15 bp, Homo sapiens
caggtgagaggggaa

SEQ ID NO: 1327487 - DNA, 15 bp, Homo sapiens
acaggtgagagggga

SEQ ID NO: 1327488 - DNA, 15 bp, Homo sapiens
gacaggtgagagggg

SEQ ID NO: 1327489 - DNA, 15 bp, Homo sapiens
ggacaggtgagaggg

SEQ ID NO: 1327490 - DNA, 15 bp, Homo sapiens
aggacaggtgagagg

SEQ ID NO: 1327491 - DNA, 15 bp, Homo sapiens
gaggacaggtgagag

SEQ ID NO: 1327492 - DNA, 15 bp, Homo sapiens
agaggacaggtgaga

SEQ ID NO: 1327493 - DNA, 15 bp, Homo sapiens
gagaggacaggtgag

SEQ ID NO: 1327494 - DNA, 15 bp, Homo sapiens
agagaggacaggtga

SEQ ID NO: 1327495 - DNA, 15 bp, Homo sapiens
aagagaggacaggtg

SEQ ID NO: 1327496 - DNA, 15 bp, Homo sapiens
aaagagaggacaggt

SEQ ID NO: 1327497 - DNA, 15 bp, Homo sapiens
gaaagagaggacagg

SEQ ID NO: 1327498 - DNA, 15 bp, Homo sapiens
agaaagagaggacag

SEQ ID NO: 1327499 - DNA, 15 bp, Homo sapiens
cagaaagagaggaca

SEQ ID NO: 1327500 - DNA, 15 bp, Homo sapiens
acagaaagagaggac

SEQ ID NO: 1327501 - DNA, 15 bp, Homo sapiens
cacagaaagagagga

SEQ ID NO: 1327502 - DNA, 15 bp, Homo sapiens
ccacagaaagagagg

SEQ ID NO: 1327503 - DNA, 15 bp, Homo sapiens
tccacagaaagagag

SEQ ID NO: 1327504 - DNA, 15 bp, Homo sapiens
atccacagaaagaga

SEQ ID NO: 1327505 - DNA, 15 bp, Homo sapiens
gatccacagaaagag

SEQ ID NO: 1327506 - DNA, 15 bp, Homo sapiens
tgatccacagaaaga

SEQ ID NO: 1327507 - DNA, 15 bp, Homo sapiens
gtgatccacagaaag

SEQ ID NO: 1327508 - DNA, 15 bp, Homo sapiens
ggtgatccacagaaa

SEQ ID NO: 1327509 - DNA, 15 bp, Homo sapiens
aggtgatccacagaa

SEQ ID NO: 1327510 - DNA, 15 bp, Homo sapiens
caggtgatccacaga

SEQ ID NO: 1327511 - DNA, 15 bp, Homo sapiens
acaggtgatccacag

SEQ ID NO: 1327512 - DNA, 15 bp, Homo sapiens
cacaggtgatccaca

SEQ ID NO: 1327513 - DNA, 15 bp, Homo sapiens
tcacaggtgatccac

SEQ ID NO: 1327514 - DNA, 15 bp, Homo sapiens
ttcacaggtgatcca

SEQ ID NO: 1327515 - DNA, 15 bp, Homo sapiens
gttcacaggtgatcc

SEQ ID NO: 1327516 - DNA, 15 bp, Homo sapiens
agttcacaggtgatc

SEQ ID NO: 1327517 - DNA, 15 bp, Homo sapiens
cagttcacaggtgat

SEQ ID NO: 1327518 - DNA, 15 bp, Homo sapiens
ccagttcacaggtga

SEQ ID NO: 1327519 - DNA, 15 bp, Homo sapiens
cccagttcacaggtg

SEQ ID NO: 1327520 - DNA, 15 bp, Homo sapiens
gcccagttcacaggt

SEQ ID NO: 1327521 - DNA, 15 bp, Homo sapiens
agcccagttcacagg

SEQ ID NO: 1327522 - DNA, 15 bp, Homo sapiens
cagcccagttcacag

SEQ ID NO: 1327523 - DNA, 15 bp, Homo sapiens
tcagcccagttcaca

SEQ ID NO: 1327524 - DNA, 15 bp, Homo sapiens
atcagcccagttcac

SEQ ID NO: 1327525 - DNA, 15 bp, Homo sapiens
gatcagcccagttca

SEQ ID NO: 1327526 - DNA, 15 bp, Homo sapiens
agatcagcccagttc

SEQ ID NO: 1327527 - DNA, 15 bp, Homo sapiens
gagatcagcccagtt

SEQ ID NO: 1327528 - DNA, 15 bp, Homo sapiens
tgagatcagcccagt

SEQ ID NO: 1327529 - DNA, 15 bp, Homo sapiens
gtgagatcagcccag

SEQ ID NO: 1327530 - DNA, 15 bp, Homo sapiens
agtgagatcagccca

SEQ ID NO: 1327531 - DNA, 15 bp, Homo sapiens
aagtgagatcagccc

SEQ ID NO: 1327532 - DNA, 15 bp, Homo sapiens
gaagtgagatcagcc

SEQ ID NO: 1327533 - DNA, 15 bp, Homo sapiens
agaagtgagatcagc

SEQ ID NO: 1327534 - DNA, 15 bp, Homo sapiens
cagaagtgagatcag

SEQ ID NO: 1327535 - DNA, 15 bp, Homo sapiens
acagaagtgagatca

SEQ ID NO: 1327536 - DNA, 15 bp, Homo sapiens
aacagaagtgagatc

SEQ ID NO: 1327537 - DNA, 15 bp, Homo sapiens
aaacagaagtgagat

SEQ ID NO: 1327538 - DNA, 15 bp, Homo sapiens
caaacagaagtgaga

SEQ ID NO: 1327539 - DNA, 15 bp, Homo sapiens
gcaaacagaagtgag

SEQ ID NO: 1327540 - DNA, 15 bp, Homo sapiens
agcaaacagaagtga

SEQ ID NO: 1327541 - DNA, 15 bp, Homo sapiens
aagcaaacagaagtg

SEQ ID NO: 1327542 - DNA, 15 bp, Homo sapiens
gaagcaaacagaagt

SEQ ID NO: 1327543 - DNA, 15 bp, Homo sapiens
agaagcaaacagaag

SEQ ID NO: 1327544 - DNA, 15 bp, Homo sapiens
cagaagcaaacagaa

SEQ ID NO: 1327545 - DNA, 15 bp, Homo sapiens
acagaagcaaacaga

SEQ ID NO: 1327546 - DNA, 15 bp, Homo sapiens
cacagaagcaaacag

SEQ ID NO: 1327547 - DNA, 15 bp, Homo sapiens
ccacagaagcaaaca

SEQ ID NO: 1327548 - DNA, 15 bp, Homo sapiens
tccacagaagcaaac

SEQ ID NO: 1327549 - DNA, 15 bp, Homo sapiens
gtccacagaagcaaa

SEQ ID NO: 1327550 - DNA, 15 bp, Homo sapiens
ggtccacagaagcaa

SEQ ID NO: 1327551 - DNA, 15 bp, Homo sapiens
aggtccacagaagca

SEQ ID NO: 1327552 - DNA, 15 bp, Homo sapiens
taggtccacagaagc

SEQ ID NO: 1327553 - DNA, 15 bp, Homo sapiens
ctaggtccacagaag

SEQ ID NO: 1327554 - DNA, 15 bp, Homo sapiens
tctaggtccacagaa

SEQ ID NO: 1327555 - DNA, 15 bp, Homo sapiens
ttctaggtccacaga

SEQ ID NO: 1327556 - DNA, 15 bp, Homo sapiens
tttctaggtccacag

SEQ ID NO: 1327557 - DNA, 15 bp, Homo sapiens
atttctaggtccaca

SEQ ID NO: 1327558 - DNA, 15 bp, Homo sapiens
catttctaggtccac

SEQ ID NO: 1327559 - DNA, 15 bp, Homo sapiens
tcatttctaggtcca

SEQ ID NO: 1327560 - DNA, 15 bp, Homo sapiens
atcatttctaggtcc

SEQ ID NO: 1327561 - DNA, 15 bp, Homo sapiens
gatcatttctaggtc

SEQ ID NO: 1327562 - DNA, 15 bp, Homo sapiens
tgatcatttctaggt

SEQ ID NO: 1327563 - DNA, 15 bp, Homo sapiens
gtgatcatttctagg

SEQ ID NO: 1327564 - DNA, 15 bp, Homo sapiens
agtgatcatttctag

SEQ ID NO: 1327565 - DNA, 15 bp, Homo sapiens
cagtgatcatttcta

SEQ ID NO: 1327566 - DNA, 15 bp, Homo sapiens
gcagtgatcatttct

SEQ ID NO: 1327567 - DNA, 15 bp, Homo sapiens
ggcagtgatcatttc

SEQ ID NO: 1327568 - DNA, 15 bp, Homo sapiens
gggcagtgatcattt

SEQ ID NO: 1327569 - DNA, 15 bp, Homo sapiens
ggggcagtgatcatt

SEQ ID NO: 1327570 - DNA, 15 bp, Homo sapiens
gggggcagtgatcat

SEQ ID NO: 1327571 - DNA, 15 bp, Homo sapiens
tgggggcagtgatca

SEQ ID NO: 1327572 - DNA, 15 bp, Homo sapiens
ctgggggcagtgatc

SEQ ID NO: 1327573 - DNA, 15 bp, Homo sapiens
actgggggcagtgat

SEQ ID NO: 1327574 - DNA, 15 bp, Homo sapiens
cactgggggcagtga

SEQ ID NO: 1327575 - DNA, 15 bp, Homo sapiens
tcactgggggcagtg

SEQ ID NO: 1327576 - DNA, 15 bp, Homo sapiens
ttcactgggggcagt

SEQ ID NO: 1327577 - DNA, 15 bp, Homo sapiens
attcactgggggcag

SEQ ID NO: 1327578 - DNA, 15 bp, Homo sapiens
tattcactgggggca

SEQ ID NO: 1327579 - DNA, 15 bp, Homo sapiens
atattcactgggggc

SEQ ID NO: 1327580 - DNA, 15 bp, Homo sapiens
catattcactggggg

SEQ ID NO: 1327581 - DNA, 15 bp, Homo sapiens
ccatattcactgggg

SEQ ID NO: 1327582 - DNA, 15 bp, Homo sapiens
accatattcactggg

SEQ ID NO: 1327583 - DNA, 15 bp, Homo sapiens
caccatattcactgg

SEQ ID NO: 1327584 - DNA, 15 bp, Homo sapiens
tcaccatattcactg

SEQ ID NO: 1327585 - DNA, 15 bp, Homo sapiens
ttcaccatattcact

SEQ ID NO: 1327586 - DNA, 15 bp, Homo sapiens
cttcaccatattcac

SEQ ID NO: 1327587 - DNA, 15 bp, Homo sapiens
tcttcaccatattca

SEQ ID NO: 1327588 - DNA, 15 bp, Homo sapiens
ttcttcaccatattc

SEQ ID NO: 1327589 - DNA, 15 bp, Homo sapiens
cttcttcaccatatt

SEQ ID NO: 1327590 - DNA, 15 bp, Homo sapiens
gcttcttcaccatat

SEQ ID NO: 1327591 - DNA, 15 bp, Homo sapiens
agcttcttcaccata

SEQ ID NO: 1327592 - DNA, 15 bp, Homo sapiens
cagcttcttcaccat

SEQ ID NO: 1327593 - DNA, 15 bp, Homo sapiens
ccagcttcttcacca

SEQ ID NO: 1327594 - DNA, 15 bp, Homo sapiens
accagcttcttcacc

SEQ ID NO: 1327595 - DNA, 15 bp, Homo sapiens
caccagcttcttcac

SEQ ID NO: 1327596 - DNA, 15 bp, Homo sapiens
tcaccagcttcttca

SEQ ID NO: 1327597 - DNA, 15 bp, Homo sapiens
atcaccagcttcttc

SEQ ID NO: 1327598 - DNA, 15 bp, Homo sapiens
catcaccagcttctt

SEQ ID NO: 1327599 - DNA, 15 bp, Homo sapiens
ccatcaccagcttct

SEQ ID NO: 1327600 - DNA, 15 bp, Homo sapiens
gccatcaccagcttc

SEQ ID NO: 1327601 - DNA, 15 bp, Homo sapiens
ggccatcaccagctt

SEQ ID NO: 1327602 - DNA, 15 bp, Homo sapiens
gggccatcaccagct

SEQ ID NO: 1327603 - DNA, 15 bp, Homo sapiens
tgggccatcaccagc

SEQ ID NO: 1327604 - DNA, 15 bp, Homo sapiens
ctgggccatcaccag

SEQ ID NO: 1327605 - DNA, 15 bp, Homo sapiens
tctgggccatcacca

SEQ ID NO: 1327606 - DNA, 15 bp, Homo sapiens
ttctgggccatcacc

SEQ ID NO: 1327607 - DNA, 15 bp, Homo sapiens
cttctgggccatcac

SEQ ID NO: 1327608 - DNA, 15 bp, Homo sapiens
gcttctgggccatca

SEQ ID NO: 1327609 - DNA, 15 bp, Homo sapiens
cgcttctgggccatc

SEQ ID NO: 1327610 - DNA, 15 bp, Homo sapiens
ccgcttctgggccat

SEQ ID NO: 1327611 - DNA, 15 bp, Homo sapiens
cccgcttctgggcca

SEQ ID NO: 1327612 - DNA, 15 bp, Homo sapiens
ccccgcttctgggcc

SEQ ID NO: 1327613 - DNA, 15 bp, Homo sapiens
tccccgcttctgggc

SEQ ID NO: 1327614 - DNA, 15 bp, Homo sapiens
ctccccgcttctggg

SEQ ID NO: 1327615 - DNA, 15 bp, Homo sapiens
tctccccgcttctgg

SEQ ID NO: 1327616 - DNA, 15 bp, Homo sapiens
ctctccccgcttctg

SEQ ID NO: 1327617 - DNA, 15 bp, Homo sapiens
tctctccccgcttct

SEQ ID NO: 1327618 - DNA, 15 bp, Homo sapiens
gtctctccccgcttc

SEQ ID NO: 1327619 - DNA, 15 bp, Homo sapiens
tgtctctccccgctt

SEQ ID NO: 1327620 - DNA, 15 bp, Homo sapiens
gtgtctctccccgct

SEQ ID NO: 1327621 - DNA, 15 bp, Homo sapiens
cgtgtctctccccgc

SEQ ID NO: 1327622 - DNA, 15 bp, Homo sapiens
tcgtgtctctccccg

SEQ ID NO: 1327623 - DNA, 15 bp, Homo sapiens
ctcgtgtctctcccc

SEQ ID NO: 1327624 - DNA, 15 bp, Homo sapiens
gctcgtgtctctccc

SEQ ID NO: 1327625 - DNA, 15 bp, Homo sapiens
ggctcgtgtctctcc

SEQ ID NO: 1327626 - DNA, 15 bp, Homo sapiens
gggctcgtgtctctc

SEQ ID NO: 1327627 - DNA, 15 bp, Homo sapiens
agggctcgtgtctct

SEQ ID NO: 1327628 - DNA, 15 bp, Homo sapiens
aagggctcgtgtctc

SEQ ID NO: 1327629 - DNA, 15 bp, Homo sapiens
aaagggctcgtgtct

SEQ ID NO: 1327630 - DNA, 15 bp, Homo sapiens
caaagggctcgtgtc

SEQ ID NO: 1327631 - DNA, 15 bp, Homo sapiens
gcaaagggctcgtgt

SEQ ID NO: 1327632 - DNA, 15 bp, Homo sapiens
ggcaaagggctcgtg

SEQ ID NO: 1327633 - DNA, 15 bp, Homo sapiens
aggcaaagggctcgt

SEQ ID NO: 1327634 - DNA, 15 bp, Homo sapiens
caggcaaagggctcg

SEQ ID NO: 1327635 - DNA, 15 bp, Homo sapiens
ccaggcaaagggctc

SEQ ID NO: 1327636 - DNA, 15 bp, Homo sapiens
cccaggcaaagggct

SEQ ID NO: 1327637 - DNA, 15 bp, Homo sapiens
acccaggcaaagggc

SEQ ID NO: 1327638 - DNA, 15 bp, Homo sapiens
cacccaggcaaaggg

SEQ ID NO: 1327639 - DNA, 15 bp, Homo sapiens
acacccaggcaaagg

SEQ ID NO: 1327640 - DNA, 15 bp, Homo sapiens
tacacccaggcaaag

SEQ ID NO: 1327641 - DNA, 15 bp, Homo sapiens
ttacacccaggcaaa

SEQ ID NO: 1327642 - DNA, 15 bp, Homo sapiens
gttacacccaggcaa

SEQ ID NO: 1327643 - DNA, 15 bp, Homo sapiens
ggttacacccaggca

SEQ ID NO: 1327644 - DNA, 15 bp, Homo sapiens
tggttacacccaggc

SEQ ID NO: 1327645 - DNA, 15 bp, Homo sapiens
atggttacacccagg

SEQ ID NO: 1327646 - DNA, 15 bp, Homo sapiens
catggttacacccag

SEQ ID NO: 1327647 - DNA, 15 bp, Homo sapiens
ccatggttacaccca

SEQ ID NO: 1327648 - DNA, 15 bp, Homo sapiens
accatggttacaccc

SEQ ID NO: 1327649 - DNA, 15 bp, Homo sapiens
caccatggttacacc

SEQ ID NO: 1327650 - DNA, 15 bp, Homo sapiens
ccaccatggttacac

SEQ ID NO: 1327651 - DNA, 15 bp, Homo sapiens
accaccatggttaca

SEQ ID NO: 1327652 - DNA, 15 bp, Homo sapiens
caccaccatggttac

SEQ ID NO: 1327653 - DNA, 15 bp, Homo sapiens
acaccaccatggtta

SEQ ID NO: 1327654 - DNA, 15 bp, Homo sapiens
cacaccaccatggtt

SEQ ID NO: 1327655 - DNA, 15 bp, Homo sapiens
acacaccaccatggt

SEQ ID NO: 1327656 - DNA, 15 bp, Homo sapiens
cacacaccaccatgg

SEQ ID NO: 1327657 - DNA, 15 bp, Homo sapiens
gcacacaccaccatg

SEQ ID NO: 1327658 - DNA, 15 bp, Homo sapiens
ggcacacaccaccat

SEQ ID NO: 1327659 - DNA, 15 bp, Homo sapiens
cggcacacaccacca

SEQ ID NO: 1327660 - DNA, 15 bp, Homo sapiens
acggcacacaccacc

SEQ ID NO: 1327661 - DNA, 15 bp, Homo sapiens
gacggcacacaccac

SEQ ID NO: 1327662 - DNA, 15 bp, Homo sapiens
tgacggcacacacca

SEQ ID NO: 1327663 - DNA, 15 bp, Homo sapiens
atgacggcacacacc

SEQ ID NO: 1327664 - DNA, 15 bp, Homo sapiens
gatgacggcacacac

SEQ ID NO: 1327665 - DNA, 15 bp, Homo sapiens
tgatgacggcacaca

SEQ ID NO: 1327666 - DNA, 15 bp, Homo sapiens
gtgatgacggcacac

SEQ ID NO: 1327667 - DNA, 15 bp, Homo sapiens
ggtgatgacggcaca

SEQ ID NO: 1327668 - DNA, 15 bp, Homo sapiens
aggtgatgacggcac

SEQ ID NO: 1327669 - DNA, 15 bp, Homo sapiens
taggtgatgacggca

SEQ ID NO: 1327670 - DNA, 15 bp, Homo sapiens
gtaggtgatgacggc

SEQ ID NO: 1327671 - DNA, 15 bp, Homo sapiens
agtaggtgatgacgg

SEQ ID NO: 1327672 - DNA, 15 bp, Homo sapiens
tagtaggtgatgacg

SEQ ID NO: 1327673 - DNA, 15 bp, Homo sapiens
gtagtaggtgatgac

SEQ ID NO: 1327674 - DNA, 15 bp, Homo sapiens
tgtagtaggtgatga

SEQ ID NO: 1327675 - DNA, 15 bp, Homo sapiens
atgtagtaggtgatg

SEQ ID NO: 1327676 - DNA, 15 bp, Homo sapiens
gatgtagtaggtgat

SEQ ID NO: 1327677 - DNA, 15 bp, Homo sapiens
ggatgtagtaggtga

SEQ ID NO: 1327678 - DNA, 15 bp, Homo sapiens
aggatgtagtaggtg

SEQ ID NO: 1327679 - DNA, 15 bp, Homo sapiens
caggatgtagtaggt

SEQ ID NO: 1327680 - DNA, 15 bp, Homo sapiens
ccaggatgtagtagg

SEQ ID NO: 1327681 - DNA, 15 bp, Homo sapiens
accaggatgtagtag

SEQ ID NO: 1327682 - DNA, 15 bp, Homo sapiens
gaccaggatgtagta

SEQ ID NO: 1327683 - DNA, 15 bp, Homo sapiens
tgaccaggatgtagt

SEQ ID NO: 1327684 - DNA, 15 bp, Homo sapiens
gtgaccaggatgtag

SEQ ID NO: 1327685 - DNA, 15 bp, Homo sapiens
cgtgaccaggatgta

SEQ ID NO: 1327686 - DNA, 15 bp, Homo sapiens
tcgtgaccaggatgt

SEQ ID NO: 1327687 - DNA, 15 bp, Homo sapiens
gtcgtgaccaggatg

SEQ ID NO: 1327688 - DNA, 15 bp, Homo sapiens
agtcgtgaccaggat

SEQ ID NO: 1327689 - DNA, 15 bp, Homo sapiens
cagtcgtgaccagga

SEQ ID NO: 1327690 - DNA, 15 bp, Homo sapiens
acagtcgtgaccagg

SEQ ID NO: 1327691 - DNA, 15 bp, Homo sapiens
cacagtcgtgaccag

SEQ ID NO: 1327692 - DNA, 15 bp, Homo sapiens
gcacagtcgtgacca

SEQ ID NO: 1327693 - DNA, 15 bp, Homo sapiens
agcacagtcgtgacc

SEQ ID NO: 1327694 - DNA, 15 bp, Homo sapiens
cagcacagtcgtgac

SEQ ID NO: 1327695 - DNA, 15 bp, Homo sapiens
gcagcacagtcgtga

SEQ ID NO: 1327696 - DNA, 15 bp, Homo sapiens
ggcagcacagtcgtg

SEQ ID NO: 1327697 - DNA, 15 bp, Homo sapiens
gggcagcacagtcgt

SEQ ID NO: 1327698 - DNA, 15 bp, Homo sapiens
ggggcagcacagtcg

SEQ ID NO: 1327699 - DNA, 15 bp, Homo sapiens
aggggcagcacagtc

SEQ ID NO: 1327700 - DNA, 15 bp, Homo sapiens
gaggggcagcacagt

SEQ ID NO: 1327701 - DNA, 15 bp, Homo sapiens
agaggggcagcacag

SEQ ID NO: 1327702 - DNA, 15 bp, Homo sapiens
tagaggggcagcaca

SEQ ID NO: 1327703 - DNA, 15 bp, Homo sapiens
gtagaggggcagcac

SEQ ID NO: 1327704 - DNA, 15 bp, Homo sapiens
ggtagaggggcagca

SEQ ID NO: 1327705 - DNA, 15 bp, Homo sapiens
tggtagaggggcagc

SEQ ID NO: 1327706 - DNA, 15 bp, Homo sapiens
ctggtagaggggcag

SEQ ID NO: 1327707 - DNA, 15 bp, Homo sapiens
tctggtagaggggca

SEQ ID NO: 1327708 - DNA, 15 bp, Homo sapiens
ttctggtagaggggc

SEQ ID NO: 1327709 - DNA, 15 bp, Homo sapiens
tttctggtagagggg

SEQ ID NO: 1327710 - DNA, 15 bp, Homo sapiens
ttttctggtagaggg

SEQ ID NO: 1327711 - DNA, 15 bp, Homo sapiens
cttttctggtagagg

SEQ ID NO: 1327712 - DNA, 15 bp, Homo sapiens
ccttttctggtagag

SEQ ID NO: 1327713 - DNA, 15 bp, Homo sapiens
gtaccttttctggta

SEQ ID NO: 1327714 - DNA, 15 bp, Homo sapiens
agtaccttttctggt

SEQ ID NO: 1327715 - DNA, 15 bp, Homo sapiens
cagtaccttttctgg

SEQ ID NO: 1327716 - DNA, 15 bp, Homo sapiens
tcagtaccttttctg

SEQ ID NO: 1327717 - DNA, 15 bp, Homo sapiens
ctcagtaccttttct

SEQ ID NO: 1327718 - DNA, 15 bp, Homo sapiens
gctcagtaccttttc

SEQ ID NO: 1327719 - DNA, 15 bp, Homo sapiens
agctcagtacctttt

SEQ ID NO: 1327720 - DNA, 15 bp, Homo sapiens
gagctcagtaccttt

SEQ ID NO: 1327721 - DNA, 15 bp, Homo sapiens
agagctcagtacctt

SEQ ID NO: 1327722 - DNA, 15 bp, Homo sapiens
gagagctcagtacct

SEQ ID NO: 1327723 - DNA, 15 bp, Homo sapiens
ggagagctcagtacc

SEQ ID NO: 1327724 - DNA, 15 bp, Homo sapiens
gggagagctcagtac

SEQ ID NO: 1327725 - DNA, 15 bp, Homo sapiens
cgggagagctcagta

SEQ ID NO: 1327726 - DNA, 15 bp, Homo sapiens
ccgggagagctcagt

SEQ ID NO: 1327727 - DNA, 15 bp, Homo sapiens
gccgggagagctcag

SEQ ID NO: 1327728 - DNA, 15 bp, Homo sapiens
ggccgggagagctca

SEQ ID NO: 1327729 - DNA, 15 bp, Homo sapiens
aggccgggagagctc

SEQ ID NO: 1327730 - DNA, 15 bp, Homo sapiens
caggccgggagagct

SEQ ID NO: 1327731 - DNA, 15 bp, Homo sapiens
gcaggccgggagagc

SEQ ID NO: 1327732 - DNA, 15 bp, Homo sapiens
ggcaggccgggagag

SEQ ID NO: 1327733 - DNA, 15 bp, Homo sapiens
gggcaggccgggaga

SEQ ID NO: 1327734 - DNA, 15 bp, Homo sapiens
tgggcaggccgggag

SEQ ID NO: 1327735 - DNA, 15 bp, Homo sapiens
gtgggcaggccggga

SEQ ID NO: 1327736 - DNA, 15 bp, Homo sapiens
ggtgggcaggccggg

SEQ ID NO: 1327737 - DNA, 15 bp, Homo sapiens
gggtgggcaggccgg

SEQ ID NO: 1327738 - DNA, 15 bp, Homo sapiens
ggggtgggcaggccg

SEQ ID NO: 1327739 - DNA, 15 bp, Homo sapiens
gggggtgggcaggcc

SEQ ID NO: 1327740 - DNA, 15 bp, Homo sapiens
ggggggtgggcaggc

SEQ ID NO: 1327741 - DNA, 15 bp, Homo sapiens
tggggggtgggcagg

SEQ ID NO: 1327742 - DNA, 15 bp, Homo sapiens
ttggggggtgggcag

SEQ ID NO: 1327743 - DNA, 15 bp, Homo sapiens
gttggggggtgggca

SEQ ID NO: 1327744 - DNA, 15 bp, Homo sapiens
ggttggggggtgggc

SEQ ID NO: 1327745 - DNA, 15 bp, Homo sapiens
gggttggggggtggg

SEQ ID NO: 1327746 - DNA, 15 bp, Homo sapiens
agggttggggggtgg

SEQ ID NO: 1327747 - DNA, 15 bp, Homo sapiens
gagggttggggggtg

SEQ ID NO: 1327748 - DNA, 15 bp, Homo sapiens
agagggttggggggt

SEQ ID NO: 1327749 - DNA, 15 bp, Homo sapiens
gagagggttgggggg

SEQ ID NO: 1327750 - DNA, 15 bp, Homo sapiens
ggagagggttggggg

SEQ ID NO: 1327751 - DNA, 15 bp, Homo sapiens
aggagagggttgggg

SEQ ID NO: 1327752 - DNA, 15 bp, Homo sapiens
taggagagggttggg

SEQ ID NO: 1327753 - DNA, 15 bp, Homo sapiens
ttaggagagggttgg

SEQ ID NO: 1327754 - DNA, 15 bp, Homo sapiens
cttaggagagggttg

SEQ ID NO: 1327755 - DNA, 15 bp, Homo sapiens
ccttaggagagggtt

SEQ ID NO: 1327756 - DNA, 15 bp, Homo sapiens
cccttaggagagggt

SEQ ID NO: 1327757 - DNA, 15 bp, Homo sapiens
acccttaggagaggg

SEQ ID NO: 1327758 - DNA, 15 bp, Homo sapiens
gacccttaggagagg

SEQ ID NO: 1327759 - DNA, 15 bp, Homo sapiens
agacccttaggagag

SEQ ID NO: 1327760 - DNA, 15 bp, Homo sapiens
cagacccttaggaga

SEQ ID NO: 1327761 - DNA, 15 bp, Homo sapiens
ccagacccttaggag

SEQ ID NO: 1327762 - DNA, 15 bp, Homo sapiens
gccagacccttagga

SEQ ID NO: 1327763 - DNA, 15 bp, Homo sapiens
tgccagacccttagg

SEQ ID NO: 1327764 - DNA, 15 bp, Homo sapiens
atgccagacccttag

SEQ ID NO: 1327765 - DNA, 15 bp, Homo sapiens
gatgccagaccctta

SEQ ID NO: 1327766 - DNA, 15 bp, Homo sapiens
agatgccagaccctt

SEQ ID NO: 1327767 - DNA, 15 bp, Homo sapiens
cagatgccagaccct

SEQ ID NO: 1327768 - DNA, 15 bp, Homo sapiens
acagatgccagaccc

SEQ ID NO: 1327769 - DNA, 15 bp, Homo sapiens
tacagatgccagacc

SEQ ID NO: 1327770 - DNA, 15 bp, Homo sapiens
ttacagatgccagac

SEQ ID NO: 1327771 - DNA, 15 bp, Homo sapiens
cttacagatgccaga

SEQ ID NO: 1327772 - DNA, 15 bp, Homo sapiens
ccttacagatgccag

SEQ ID NO: 1327773 - DNA, 15 bp, Homo sapiens
tccttacagatgcca

SEQ ID NO: 1327774 - DNA, 15 bp, Homo sapiens
ttccttacagatgcc

SEQ ID NO: 1327775 - DNA, 15 bp, Homo sapiens
gttccttacagatgc

SEQ ID NO: 1327776 - DNA, 15 bp, Homo sapiens
ggttccttacagatg

SEQ ID NO: 1327777 - DNA, 15 bp, Homo sapiens
gggttccttacagat

SEQ ID NO: 1327778 - DNA, 15 bp, Homo sapiens
agggttccttacaga

SEQ ID NO: 1327779 - DNA, 15 bp, Homo sapiens
cagggttccttacag

SEQ ID NO: 1327780 - DNA, 15 bp, Homo sapiens
ccagggttccttaca

SEQ ID NO: 1327781 - DNA, 15 bp, Homo sapiens
gccagggttccttac

SEQ ID NO: 1327782 - DNA, 15 bp, Homo sapiens
ggccagggttcctta

SEQ ID NO: 1327783 - DNA, 15 bp, Homo sapiens
aggccagggttcctt

SEQ ID NO: 1327784 - DNA, 15 bp, Homo sapiens
aaggccagggttcct

SEQ ID NO: 1327785 - DNA, 15 bp, Homo sapiens
gaaggccagggttcc

SEQ ID NO: 1327786 - DNA, 15 bp, Homo sapiens
agaaggccagggttc

SEQ ID NO: 1327787 - DNA, 15 bp, Homo sapiens
tagaaggccagggtt

SEQ ID NO: 1327788 - DNA, 15 bp, Homo sapiens
gtagaaggccagggt

SEQ ID NO: 1327789 - DNA, 15 bp, Homo sapiens
agtagaaggccaggg

SEQ ID NO: 1327790 - DNA, 15 bp, Homo sapiens
gagtagaaggccagg

SEQ ID NO: 1327791 - DNA, 15 bp, Homo sapiens
tgagtagaaggccag

SEQ ID NO: 1327792 - DNA, 15 bp, Homo sapiens
gtgagtagaaggcca

SEQ ID NO: 1327793 - DNA, 15 bp, Homo sapiens
ggtgagtagaaggcc

SEQ ID NO: 1327794 - DNA, 15 bp, Homo sapiens
gggtgagtagaaggc

SEQ ID NO: 1327795 - DNA, 15 bp, Homo sapiens
ggggtgagtagaagg

SEQ ID NO: 1327796 - DNA, 15 bp, Homo sapiens
aggggtgagtagaag

SEQ ID NO: 1327797 - DNA, 15 bp, Homo sapiens
gaggggtgagtagaa

SEQ ID NO: 1327798 - DNA, 15 bp, Homo sapiens
agaggggtgagtaga

SEQ ID NO: 1327799 - DNA, 15 bp, Homo sapiens
gagaggggtgagtag

SEQ ID NO: 1327800 - DNA, 15 bp, Homo sapiens
ggagaggggtgagta

SEQ ID NO: 1327801 - DNA, 15 bp, Homo sapiens
aggagaggggtgagt

SEQ ID NO: 1327802 - DNA, 15 bp, Homo sapiens
aaggagaggggtgag

SEQ ID NO: 1327803 - DNA, 15 bp, Homo sapiens
caaggagaggggtga

SEQ ID NO: 1327804 - DNA, 15 bp, Homo sapiens
tcaaggagaggggtg

SEQ ID NO: 1327805 - DNA, 15 bp, Homo sapiens
gtcaaggagaggggt

SEQ ID NO: 1327806 - DNA, 15 bp, Homo sapiens
ggtcaaggagagggg

SEQ ID NO: 1327807 - DNA, 15 bp, Homo sapiens
gggtcaaggagaggg

SEQ ID NO: 1327808 - DNA, 15 bp, Homo sapiens
agggtcaaggagagg

SEQ ID NO: 1327809 - DNA, 15 bp, Homo sapiens
gagggtcaaggagag

SEQ ID NO: 1327810 - DNA, 15 bp, Homo sapiens
tgagggtcaaggaga

SEQ ID NO: 1327811 - DNA, 15 bp, Homo sapiens
atgagggtcaaggag

SEQ ID NO: 1327812 - DNA, 15 bp, Homo sapiens
aatgagggtcaagga

SEQ ID NO: 1327813 - DNA, 15 bp, Homo sapiens
gaatgagggtcaagg

SEQ ID NO: 1327814 - DNA, 15 bp, Homo sapiens
tgaatgagggtcaag

SEQ ID NO: 1327815 - DNA, 15 bp, Homo sapiens
ttgaatgagggtcaa

SEQ ID NO: 1327816 - DNA, 15 bp, Homo sapiens
cttgaatgagggtca

SEQ ID NO: 1327817 - DNA, 15 bp, Homo sapiens
ccttgaatgagggtc

SEQ ID NO: 1327818 - DNA, 15 bp, Homo sapiens
gccttgaatgagggt

SEQ ID NO: 1327819 - DNA, 15 bp, Homo sapiens
tgccttgaatgaggg

SEQ ID NO: 1327820 - DNA, 15 bp, Homo sapiens
ctgccttgaatgagg

SEQ ID NO: 1327821 - DNA, 15 bp, Homo sapiens
gctgccttgaatgag

SEQ ID NO: 1327822 - DNA, 15 bp, Homo sapiens
tgctgccttgaatga

SEQ ID NO: 1327823 - DNA, 15 bp, Homo sapiens
ctgctgccttgaatg

SEQ ID NO: 1327824 - DNA, 15 bp, Homo sapiens
cctgctgccttgaat

SEQ ID NO: 1327825 - DNA, 15 bp, Homo sapiens
ccctgctgccttgaa

SEQ ID NO: 1327826 - DNA, 15 bp, Homo sapiens
accctgctgccttga

SEQ ID NO: 1327827 - DNA, 15 bp, Homo sapiens
gaccctgctgccttg

SEQ ID NO: 1327828 - DNA, 15 bp, Homo sapiens
tgaccctgctgcctt

SEQ ID NO: 1327829 - DNA, 15 bp, Homo sapiens
ttgaccctgctgcct

SEQ ID NO: 1327830 - DNA, 15 bp, Homo sapiens
cttgaccctgctgcc

SEQ ID NO: 1327831 - DNA, 15 bp, Homo sapiens
tcttgaccctgctgc

SEQ ID NO: 1327832 - DNA, 15 bp, Homo sapiens
gtcttgaccctgctg

SEQ ID NO: 1327833 - DNA, 15 bp, Homo sapiens
cgtcttgaccctgct

SEQ ID NO: 1327834 - DNA, 15 bp, Homo sapiens
tcgtcttgaccctgc

SEQ ID NO: 1327835 - DNA, 15 bp, Homo sapiens
atcgtcttgaccctg

SEQ ID NO: 1327836 - DNA, 15 bp, Homo sapiens
catcgtcttgaccct

SEQ ID NO: 1327837 - DNA, 15 bp, Homo sapiens
gcatcgtcttgaccc

SEQ ID NO: 1327838 - DNA, 15 bp, Homo sapiens
agcatcgtcttgacc

SEQ ID NO: 1327839 - DNA, 15 bp, Homo sapiens
gagcatcgtcttgac

SEQ ID NO: 1327840 - DNA, 15 bp, Homo sapiens
tgagcatcgtcttga

SEQ ID NO: 1327841 - DNA, 15 bp, Homo sapiens
atgagcatcgtcttg

SEQ ID NO: 1327842 - DNA, 15 bp, Homo sapiens
aatgagcatcgtctt

SEQ ID NO: 1327843 - DNA, 15 bp, Homo sapiens
gaatgagcatcgtct

SEQ ID NO: 1327844 - DNA, 15 bp, Homo sapiens
agaatgagcatcgtc

SEQ ID NO: 1327845 - DNA, 15 bp, Homo sapiens
aagaatgagcatcgt

SEQ ID NO: 1327846 - DNA, 15 bp, Homo sapiens
taagaatgagcatcg

SEQ ID NO: 1327847 - DNA, 15 bp, Homo sapiens
ctaagaatgagcatc

SEQ ID NO: 1327848 - DNA, 15 bp, Homo sapiens
cctaagaatgagcat

SEQ ID NO: 1327849 - DNA, 15 bp, Homo sapiens
acctaagaatgagca

SEQ ID NO: 1327850 - DNA, 15 bp, Homo sapiens
aacctaagaatgagc

SEQ ID NO: 1327851 - DNA, 15 bp, Homo sapiens
gaacctaagaatgag

SEQ ID NO: 1327852 - DNA, 15 bp, Homo sapiens
agaacctaagaatga

SEQ ID NO: 1327853 - DNA, 15 bp, Homo sapiens
tagaacctaagaatg

SEQ ID NO: 1327854 - DNA, 15 bp, Homo sapiens
ctagaacctaagaat

SEQ ID NO: 1327855 - DNA, 15 bp, Homo sapiens
cctagaacctaagaa

SEQ ID NO: 1327856 - DNA, 15 bp, Homo sapiens
ccctagaacctaaga

SEQ ID NO: 1327857 - DNA, 15 bp, Homo sapiens
accctagaacctaag

SEQ ID NO: 1327858 - DNA, 15 bp, Homo sapiens
aaccctagaacctaa

SEQ ID NO: 1327859 - DNA, 15 bp, Homo sapiens
gaaccctagaaccta

SEQ ID NO: 1327860 - DNA, 15 bp, Homo sapiens
tgaaccctagaacct

SEQ ID NO: 1327861 - DNA, 15 bp, Homo sapiens
ttgaaccctagaacc

SEQ ID NO: 1327862 - DNA, 15 bp, Homo sapiens
cttgaaccctagaac

SEQ ID NO: 1327863 - DNA, 15 bp, Homo sapiens
acttgaaccctagaa

SEQ ID NO: 1327864 - DNA, 15 bp, Homo sapiens
cacttgaaccctaga

SEQ ID NO: 1327865 - DNA, 15 bp, Homo sapiens
gcacttgaaccctag

SEQ ID NO: 1327866 - DNA, 15 bp, Homo sapiens
tgcacttgaacccta

SEQ ID NO: 1327867 - DNA, 15 bp, Homo sapiens
ctgcacttgaaccct

SEQ ID NO: 1327868 - DNA, 15 bp, Homo sapiens
cctgcacttgaaccc

SEQ ID NO: 1327869 - DNA, 15 bp, Homo sapiens
ccctgcacttgaacc

SEQ ID NO: 1327870 - DNA, 15 bp, Homo sapiens
tccctgcacttgaac

SEQ ID NO: 1327871 - DNA, 15 bp, Homo sapiens
ttccctgcacttgaa

SEQ ID NO: 1327872 - DNA, 15 bp, Homo sapiens
cttccctgcacttga

SEQ ID NO: 1327873 - DNA, 15 bp, Homo sapiens
ccttccctgcacttg

SEQ ID NO: 1327874 - DNA, 15 bp, Homo sapiens
accttccctgcactt

SEQ ID NO: 1327875 - DNA, 15 bp, Homo sapiens
taccttccctgcact

SEQ ID NO: 1327876 - DNA, 15 bp, Homo sapiens
ctaccttccctgcac

SEQ ID NO: 1327877 - DNA, 15 bp, Homo sapiens
cctaccttccctgca

SEQ ID NO: 1327878 - DNA, 15 bp, Homo sapiens
tcctaccttccctgc

SEQ ID NO: 1327879 - DNA, 15 bp, Homo sapiens
atcctaccttccctg

SEQ ID NO: 1327880 - DNA, 15 bp, Homo sapiens
catcctaccttccct

SEQ ID NO: 1327881 - DNA, 15 bp, Homo sapiens
tcatcctaccttccc

SEQ ID NO: 1327882 - DNA, 15 bp, Homo sapiens
ttcatcctaccttcc

SEQ ID NO: 1327883 - DNA, 15 bp, Homo sapiens
gttcatcctaccttc

SEQ ID NO: 1327884 - DNA, 15 bp, Homo sapiens
agttcatcctacctt

SEQ ID NO: 1327885 - DNA, 15 bp, Homo sapiens
cagttcatcctacct

SEQ ID NO: 1327886 - DNA, 15 bp, Homo sapiens
tcagttcatcctacc

SEQ ID NO: 1327887 - DNA, 15 bp, Homo sapiens
ctcagttcatcctac

SEQ ID NO: 1327888 - DNA, 15 bp, Homo sapiens
gctcagttcatccta

SEQ ID NO: 1327889 - DNA, 15 bp, Homo sapiens
ggctcagttcatcct

SEQ ID NO: 1327890 - DNA, 15 bp, Homo sapiens
gggctcagttcatcc

SEQ ID NO: 1327891 - DNA, 15 bp, Homo sapiens
ggggctcagttcatc

SEQ ID NO: 1327892 - DNA, 15 bp, Homo sapiens
tggggctcagttcat

SEQ ID NO: 1327893 - DNA, 15 bp, Homo sapiens
gtggggctcagttca

SEQ ID NO: 1327894 - DNA, 15 bp, Homo sapiens
agtggggctcagttc

SEQ ID NO: 1327895 - DNA, 15 bp, Homo sapiens
cagtggggctcagtt

SEQ ID NO: 1327896 - DNA, 15 bp, Homo sapiens
ccagtggggctcagt

SEQ ID NO: 1327897 - DNA, 15 bp, Homo sapiens
accagtggggctcag

SEQ ID NO: 1327898 - DNA, 15 bp, Homo sapiens
gaccagtggggctca

SEQ ID NO: 1327899 - DNA, 15 bp, Homo sapiens
agaccagtggggctc

SEQ ID NO: 1327900 - DNA, 15 bp, Homo sapiens
cagaccagtggggct

SEQ ID NO: 1327901 - DNA, 15 bp, Homo sapiens
tcagaccagtggggc

SEQ ID NO: 1327902 - DNA, 15 bp, Homo sapiens
ctcagaccagtgggg

SEQ ID NO: 1327903 - DNA, 15 bp, Homo sapiens
tctcagaccagtggg

SEQ ID NO: 1327904 - DNA, 15 bp, Homo sapiens
atctcagaccagtgg

SEQ ID NO: 1327905 - DNA, 15 bp, Homo sapiens
aatctcagaccagtg

SEQ ID NO: 1327906 - DNA, 15 bp, Homo sapiens
gaatctcagaccagt

SEQ ID NO: 1327907 - DNA, 15 bp, Homo sapiens
agaatctcagaccag

SEQ ID NO: 1327908 - DNA, 15 bp, Homo sapiens
tagaatctcagacca

SEQ ID NO: 1327909 - DNA, 15 bp, Homo sapiens
ctagaatctcagacc

SEQ ID NO: 1327910 - DNA, 15 bp, Homo sapiens
cctagaatctcagac

SEQ ID NO: 1327911 - DNA, 15 bp, Homo sapiens
tcctagaatctcaga

SEQ ID NO: 1327912 - DNA, 15 bp, Homo sapiens
gtcctagaatctcag

SEQ ID NO: 1327913 - DNA, 15 bp, Homo sapiens
ggtcctagaatctca

SEQ ID NO: 1327914 - DNA, 15 bp, Homo sapiens
aggtcctagaatctc

SEQ ID NO: 1327915 - DNA, 15 bp, Homo sapiens
caggtcctagaatct

SEQ ID NO: 1327916 - DNA, 15 bp, Homo sapiens
ccaggtcctagaatc

SEQ ID NO: 1327917 - DNA, 15 bp, Homo sapiens
accaggtcctagaat

SEQ ID NO: 1327918 - DNA, 15 bp, Homo sapiens
caccaggtcctagaa

SEQ ID NO: 1327919 - DNA, 15 bp, Homo sapiens
ccaccaggtcctaga

SEQ ID NO: 1327920 - DNA, 15 bp, Homo sapiens
accaccaggtcctag

SEQ ID NO: 1327921 - DNA, 15 bp, Homo sapiens
taccaccaggtccta

SEQ ID NO: 1327922 - DNA, 15 bp, Homo sapiens
ttaccaccaggtcct

SEQ ID NO: 1327923 - DNA, 15 bp, Homo sapiens
gttaccaccaggtcc

SEQ ID NO: 1327924 - DNA, 15 bp, Homo sapiens
tgttaccaccaggtc

SEQ ID NO: 1327925 - DNA, 15 bp, Homo sapiens
ctgttaccaccaggt

SEQ ID NO: 1327926 - DNA, 15 bp, Homo sapiens
tctgttaccaccagg

SEQ ID NO: 1327927 - DNA, 15 bp, Homo sapiens
gtctgttaccaccag

SEQ ID NO: 1327928 - DNA, 15 bp, Homo sapiens
tgtctgttaccacca

SEQ ID NO: 1327929 - DNA, 15 bp, Homo sapiens
gtgtctgttaccacc

SEQ ID NO: 1327930 - DNA, 15 bp, Homo sapiens
tgtgtctgttaccac

SEQ ID NO: 1327931 - DNA, 15 bp, Homo sapiens
atgtgtctgttacca

SEQ ID NO: 1327932 - DNA, 15 bp, Homo sapiens
catgtgtctgttacc

SEQ ID NO: 1327933 - DNA, 15 bp, Homo sapiens
tcatgtgtctgttac

SEQ ID NO: 1327934 - DNA, 15 bp, Homo sapiens
atcatgtgtctgtta

SEQ ID NO: 1327935 - DNA, 15 bp, Homo sapiens
gatcatgtgtctgtt

SEQ ID NO: 1327936 - DNA, 15 bp, Homo sapiens
agatcatgtgtctgt

SEQ ID NO: 1327937 - DNA, 15 bp, Homo sapiens
tagatcatgtgtctg

SEQ ID NO: 1327938 - DNA, 15 bp, Homo sapiens
ctagatcatgtgtct

SEQ ID NO: 1327939 - DNA, 15 bp, Homo sapiens
cctagatcatgtgtc

SEQ ID NO: 1327940 - DNA, 15 bp, Homo sapiens
tcctagatcatgtgt

SEQ ID NO: 1327941 - DNA, 15 bp, Homo sapiens
gtcctagatcatgtg

SEQ ID NO: 1327942 - DNA, 15 bp, Homo sapiens
cgtcctagatcatgt

SEQ ID NO: 1327943 - DNA, 15 bp, Homo sapiens
acgtcctagatcatg

SEQ ID NO: 1327944 - DNA, 15 bp, Homo sapiens
cacgtcctagatcat

SEQ ID NO: 1327945 - DNA, 15 bp, Homo sapiens
ccacgtcctagatca

SEQ ID NO: 1327946 - DNA, 15 bp, Homo sapiens
accacgtcctagatc

SEQ ID NO: 1327947 - DNA, 15 bp, Homo sapiens
caccacgtcctagat

SEQ ID NO: 1327948 - DNA, 15 bp, Homo sapiens
ccaccacgtcctaga

SEQ ID NO: 1327949 - DNA, 15 bp, Homo sapiens
accaccacgtcctag

SEQ ID NO: 1327950 - DNA, 15 bp, Homo sapiens
taccaccacgtccta

SEQ ID NO: 1327951 - DNA, 15 bp, Homo sapiens
ttaccaccacgtcct

SEQ ID NO: 1327952 - DNA, 15 bp, Homo sapiens
gttaccaccacgtcc

SEQ ID NO: 1327953 - DNA, 15 bp, Homo sapiens
tgttaccaccacgtc

SEQ ID NO: 1327954 - DNA, 15 bp, Homo sapiens
ctgttaccaccacgt

SEQ ID NO: 1327955 - DNA, 15 bp, Homo sapiens
tctgttaccaccacg

SEQ ID NO: 1327956 - DNA, 15 bp, Homo sapiens
gtctgttaccaccac

SEQ ID NO: 1327957 - DNA, 15 bp, Homo sapiens
catcatgtgtctgtt

SEQ ID NO: 1327958 - DNA, 15 bp, Homo sapiens
gcatcatgtgtctgt

SEQ ID NO: 1327959 - DNA, 15 bp, Homo sapiens
ggcatcatgtgtctg

SEQ ID NO: 1327960 - DNA, 15 bp, Homo sapiens
gggcatcatgtgtct

SEQ ID NO: 1327961 - DNA, 15 bp, Homo sapiens
agggcatcatgtgtc

SEQ ID NO: 1327962 - DNA, 15 bp, Homo sapiens
aagggcatcatgtgt

SEQ ID NO: 1327963 - DNA, 15 bp, Homo sapiens
gaagggcatcatgtg

SEQ ID NO: 1327964 - DNA, 15 bp, Homo sapiens
agaagggcatcatgt

SEQ ID NO: 1327965 - DNA, 15 bp, Homo sapiens
gagaagggcatcatg

SEQ ID NO: 1327966 - DNA, 15 bp, Homo sapiens
tgagaagggcatcat

SEQ ID NO: 1327967 - DNA, 15 bp, Homo sapiens
ctgagaagggcatca

SEQ ID NO: 1327968 - DNA, 15 bp, Homo sapiens
tctgagaagggcatc

SEQ ID NO: 1327969 - DNA, 15 bp, Homo sapiens
ttctgagaagggcat

SEQ ID NO: 1327970 - DNA, 15 bp, Homo sapiens
cttctgagaagggca

SEQ ID NO: 1327971 - DNA, 15 bp, Homo sapiens
tcttctgagaagggc

SEQ ID NO: 1327972 - DNA, 15 bp, Homo sapiens
ttcttctgagaaggg

SEQ ID NO: 1327973 - DNA, 15 bp, Homo sapiens
tttcttctgagaagg

SEQ ID NO: 1327974 - DNA, 15 bp, Homo sapiens
atttcttctgagaag

SEQ ID NO: 1327975 - DNA, 15 bp, Homo sapiens
tatttcttctgagaa

SEQ ID NO: 1327976 - DNA, 15 bp, Homo sapiens
ctatttcttctgaga

SEQ ID NO: 1327977 - DNA, 15 bp, Homo sapiens
gctatttcttctgag

SEQ ID NO: 1327978 - DNA, 15 bp, Homo sapiens
tgctatttcttctga

SEQ ID NO: 1327979 - DNA, 15 bp, Homo sapiens
ttgctatttcttctg

SEQ ID NO: 1327980 - DNA, 15 bp, Homo sapiens
tttgctatttcttct

SEQ ID NO: 1327981 - DNA, 15 bp, Homo sapiens
ctttgctatttcttc

SEQ ID NO: 1327982 - DNA, 15 bp, Homo sapiens
tctttgctatttctt

SEQ ID NO: 1327983 - DNA, 15 bp, Homo sapiens
ttctttgctatttct

SEQ ID NO: 1327984 - DNA, 15 bp, Homo sapiens
attctttgctatttc

SEQ ID NO: 1327985 - DNA, 15 bp, Homo sapiens
gattctttgctattt

SEQ ID NO: 1327986 - DNA, 15 bp, Homo sapiens
tgattctttgctatt

SEQ ID NO: 1327987 - DNA, 15 bp, Homo sapiens
ctgattctttgctat

SEQ ID NO: 1327988 - DNA, 15 bp, Homo sapiens
tctgattctttgcta

SEQ ID NO: 1327989 - DNA, 15 bp, Homo sapiens
ctctgattctttgct

SEQ ID NO: 1327990 - DNA, 15 bp, Homo sapiens
gctctgattctttgc

SEQ ID NO: 1327991 - DNA, 15 bp, Homo sapiens
tgctctgattctttg

SEQ ID NO: 1327992 - DNA, 15 bp, Homo sapiens
ttgctctgattcttt

SEQ ID NO: 1327993 - DNA, 15 bp, Homo sapiens
tttgctctgattctt

SEQ ID NO: 1327994 - DNA, 15 bp, Homo sapiens
ctttgctctgattct

SEQ ID NO: 1327995 - DNA, 15 bp, Homo sapiens
cctttgctctgattc

SEQ ID NO: 1327996 - DNA, 15 bp, Homo sapiens
acctttgctctgatt

SEQ ID NO: 1327997 - DNA, 15 bp, Homo sapiens
aacctttgctctgat

SEQ ID NO: 1327998 - DNA, 15 bp, Homo sapiens
gaacctttgctctga

SEQ ID NO: 1327999 - DNA, 15 bp, Homo sapiens
ggaacctttgctctg

SEQ ID NO: 1328000 - DNA, 15 bp, Homo sapiens
tggaacctttgctct

SEQ ID NO: 1328001 - DNA, 15 bp, Homo sapiens
ctggaacctttgctc

SEQ ID NO: 1328002 - DNA, 15 bp, Homo sapiens
actggaacctttgct

SEQ ID NO: 1328003 - DNA, 15 bp, Homo sapiens
cactggaacctttgc

SEQ ID NO: 1328004 - DNA, 15 bp, Homo sapiens
gcactggaacctttg

SEQ ID NO: 1328005 - DNA, 15 bp, Homo sapiens
tgcactggaaccttt

SEQ ID NO: 1328006 - DNA, 15 bp, Homo sapiens
ttgcactggaacctt

SEQ ID NO: 1328007 - DNA, 15 bp, Homo sapiens
cttgcactggaacct

SEQ ID NO: 1328008 - DNA, 15 bp, Homo sapiens
acttgcactggaacc

SEQ ID NO: 1328009 - DNA, 15 bp, Homo sapiens
aacttgcactggaac

SEQ ID NO: 1328010 - DNA, 15 bp, Homo sapiens
aaacttgcactggaa

SEQ ID NO: 1328011 - DNA, 15 bp, Homo sapiens
caaacttgcactgga

SEQ ID NO: 1328012 - DNA, 15 bp, Homo sapiens
tcaaacttgcactgg

SEQ ID NO: 1328013 - DNA, 15 bp, Homo sapiens
atcaaacttgcactg

SEQ ID NO: 1328014 - DNA, 15 bp, Homo sapiens
gatcaaacttgcact

SEQ ID NO: 1328015 - DNA, 15 bp, Homo sapiens
ggatcaaacttgcac

SEQ ID NO: 1328016 - DNA, 15 bp, Homo sapiens
gggatcaaacttgca

SEQ ID NO: 1328017 - DNA, 15 bp, Homo sapiens
tgggatcaaacttgc

SEQ ID NO: 1328018 - DNA, 15 bp, Homo sapiens
ctgggatcaaacttg

SEQ ID NO: 1328019 - DNA, 15 bp, Homo sapiens
cctgggatcaaactt

SEQ ID NO: 1328020 - DNA, 15 bp, Homo sapiens
tcctgggatcaaact

SEQ ID NO: 1328021 - DNA, 15 bp, Homo sapiens
ctcctgggatcaaac

SEQ ID NO: 1328022 - DNA, 15 bp, Homo sapiens
cctcctgggatcaaa

SEQ ID NO: 1328023 - DNA, 15 bp, Homo sapiens
tcctcctgggatcaa

SEQ ID NO: 1328024 - DNA, 15 bp, Homo sapiens
ttcctcctgggatca

SEQ ID NO: 1328025 - DNA, 15 bp, Homo sapiens
attcctcctgggatc

SEQ ID NO: 1328026 - DNA, 15 bp, Homo sapiens
gattcctcctgggat

SEQ ID NO: 1328027 - DNA, 15 bp, Homo sapiens
tgattcctcctggga

SEQ ID NO: 1328028 - DNA, 15 bp, Homo sapiens
ctgattcctcctggg

SEQ ID NO: 1328029 - DNA, 15 bp, Homo sapiens
tctgattcctcctgg

SEQ ID NO: 1328030 - DNA, 15 bp, Homo sapiens
ctctgattcctcctg

SEQ ID NO: 1328031 - DNA, 15 bp, Homo sapiens
tctctgattcctcct

SEQ ID NO: 1328032 - DNA, 15 bp, Homo sapiens
ttctctgattcctcc

SEQ ID NO: 1328033 - DNA, 15 bp, Homo sapiens
attctctgattcctc

SEQ ID NO: 1328034 - DNA, 15 bp, Homo sapiens
aattctctgattcct

SEQ ID NO: 1328035 - DNA, 15 bp, Homo sapiens
caattctctgattcc

SEQ ID NO: 1328036 - DNA, 15 bp, Homo sapiens
gcaattctctgattc

SEQ ID NO: 1328037 - DNA, 15 bp, Homo sapiens
tgcaattctctgatt

SEQ ID NO: 1328038 - DNA, 15 bp, Homo sapiens
ctgcaattctctgat

SEQ ID NO: 1328039 - DNA, 15 bp, Homo sapiens
tctgcaattctctga

SEQ ID NO: 1328040 - DNA, 15 bp, Homo sapiens
atctgcaattctctg

SEQ ID NO: 1328041 - DNA, 15 bp, Homo sapiens
catctgcaattctct

SEQ ID NO: 1328042 - DNA, 15 bp, Homo sapiens
acatctgcaattctc

SEQ ID NO: 1328043 - DNA, 15 bp, Homo sapiens
aacatctgcaattct

SEQ ID NO: 1328044 - DNA, 15 bp, Homo sapiens
aaacatctgcaattc

SEQ ID NO: 1328045 - DNA, 15 bp, Homo sapiens
taaacatctgcaatt

SEQ ID NO: 1328046 - DNA, 15 bp, Homo sapiens
gtaaacatctgcaat

SEQ ID NO: 1328047 - DNA, 15 bp, Homo sapiens
tgtaaacatctgcaa

SEQ ID NO: 1328048 - DNA, 15 bp, Homo sapiens
ctgtaaacatctgca

SEQ ID NO: 1328049 - DNA, 15 bp, Homo sapiens
gctgtaaacatctgc

SEQ ID NO: 1328050 - DNA, 15 bp, Homo sapiens
agctgtaaacatctg

SEQ ID NO: 1328051 - DNA, 15 bp, Homo sapiens
gagctgtaaacatct

SEQ ID NO: 1328052 - DNA, 15 bp, Homo sapiens
tgagctgtaaacatc

SEQ ID NO: 1328053 - DNA, 15 bp, Homo sapiens
ctgagctgtaaacat

SEQ ID NO: 1328054 - DNA, 15 bp, Homo sapiens
gctgagctgtaaaca

SEQ ID NO: 1328055 - DNA, 15 bp, Homo sapiens
agctgagctgtaaac

SEQ ID NO: 1328056 - DNA, 15 bp, Homo sapiens
cagctgagctgtaaa

SEQ ID NO: 1328057 - DNA, 15 bp, Homo sapiens
gcagctgagctgtaa

SEQ ID NO: 1328058 - DNA, 15 bp, Homo sapiens
tgcagctgagctgta

SEQ ID NO: 1328059 - DNA, 15 bp, Homo sapiens
atgcagctgagctgt

SEQ ID NO: 1328060 - DNA, 15 bp, Homo sapiens
tatgcagctgagctg

SEQ ID NO: 1328061 - DNA, 15 bp, Homo sapiens
ttatgcagctgagct

SEQ ID NO: 1328062 - DNA, 15 bp, Homo sapiens
attatgcagctgagc

SEQ ID NO: 1328063 - DNA, 15 bp, Homo sapiens
aattatgcagctgag

SEQ ID NO: 1328064 - DNA, 15 bp, Homo sapiens
gaattatgcagctga

SEQ ID NO: 1328065 - DNA, 15 bp, Homo sapiens
agaattatgcagctg

SEQ ID NO: 1328066 - DNA, 15 bp, Homo sapiens
gagaattatgcagct

SEQ ID NO: 1328067 - DNA, 15 bp, Homo sapiens
agagaattatgcagc

SEQ ID NO: 1328068 - DNA, 15 bp, Homo sapiens
gagagaattatgcag

SEQ ID NO: 1328069 - DNA, 15 bp, Homo sapiens
ggagagaattatgca

SEQ ID NO: 1328070 - DNA, 15 bp, Homo sapiens
gggagagaattatgc

SEQ ID NO: 1328071 - DNA, 15 bp, Homo sapiens
ggggagagaattatg

SEQ ID NO: 1328072 - DNA, 15 bp, Homo sapiens
aggggagagaattat

SEQ ID NO: 1328073 - DNA, 15 bp, Homo sapiens
gaggggagagaatta

SEQ ID NO: 1328074 - DNA, 15 bp, Homo sapiens
agaggggagagaatt

SEQ ID NO: 1328075 - DNA, 15 bp, Homo sapiens
cagaggggagagaat

SEQ ID NO: 1328076 - DNA, 15 bp, Homo sapiens
tcagaggggagagaa

SEQ ID NO: 1328077 - DNA, 15 bp, Homo sapiens
ttcagaggggagaga

SEQ ID NO: 1328078 - DNA, 15 bp, Homo sapiens
cttcagaggggagag

SEQ ID NO: 1328079 - DNA, 15 bp, Homo sapiens
gcttcagaggggaga

SEQ ID NO: 1328080 - DNA, 15 bp, Homo sapiens
ggcttcagaggggag

SEQ ID NO: 1328081 - DNA, 15 bp, Homo sapiens
aggcttcagagggga

SEQ ID NO: 1328082 - DNA, 15 bp, Homo sapiens
gaggcttcagagggg

SEQ ID NO: 1328083 - DNA, 15 bp, Homo sapiens
ggaggcttcagaggg

SEQ ID NO: 1328084 - DNA, 15 bp, Homo sapiens
gggaggcttcagagg

SEQ ID NO: 1328085 - DNA, 15 bp, Homo sapiens
agggaggcttcagag

SEQ ID NO: 1328086 - DNA, 15 bp, Homo sapiens
cagggaggcttcaga

SEQ ID NO: 1328087 - DNA, 15 bp, Homo sapiens
acagggaggcttcag

SEQ ID NO: 1328088 - DNA, 15 bp, Homo sapiens
gacagggaggcttca

SEQ ID NO: 1328089 - DNA, 15 bp, Homo sapiens
tgacagggaggcttc

SEQ ID NO: 1328090 - DNA, 15 bp, Homo sapiens
ctgacagggaggctt

SEQ ID NO: 1328091 - DNA, 15 bp, Homo sapiens
cctgacagggaggct

SEQ ID NO: 1328092 - DNA, 15 bp, Homo sapiens
acctgacagggaggc

SEQ ID NO: 1328093 - DNA, 15 bp, Homo sapiens
cacctgacagggagg

SEQ ID NO: 1328094 - DNA, 15 bp, Homo sapiens
ccacctgacagggag

SEQ ID NO: 1328095 - DNA, 15 bp, Homo sapiens
cccacctgacaggga

SEQ ID NO: 1328096 - DNA, 15 bp, Homo sapiens
gcccacctgacaggg

SEQ ID NO: 1328097 - DNA, 15 bp, Homo sapiens
tgcccacctgacagg

SEQ ID NO: 1328098 - DNA, 15 bp, Homo sapiens
atgcccacctgacag

SEQ ID NO: 1328099 - DNA, 15 bp, Homo sapiens
gatgcccacctgaca

SEQ ID NO: 1328100 - DNA, 15 bp, Homo sapiens
ggatgcccacctgac

SEQ ID NO: 1328101 - DNA, 15 bp, Homo sapiens
tggatgcccacctga

SEQ ID NO: 1328102 - DNA, 15 bp, Homo sapiens
ctggatgcccacctg

SEQ ID NO: 1328103 - DNA, 15 bp, Homo sapiens
gctggatgcccacct

SEQ ID NO: 1328104 - DNA, 15 bp, Homo sapiens
ggctggatgcccacc

SEQ ID NO: 1328105 - DNA, 15 bp, Homo sapiens
aggctggatgcccac

SEQ ID NO: 1328106 - DNA, 15 bp, Homo sapiens
gaggctggatgccca

SEQ ID NO: 1328107 - DNA, 15 bp, Homo sapiens
ggaggctggatgccc

SEQ ID NO: 1328108 - DNA, 15 bp, Homo sapiens
aggaggctggatgcc

SEQ ID NO: 1328109 - DNA, 15 bp, Homo sapiens
caggaggctggatgc

SEQ ID NO: 1328110 - DNA, 15 bp, Homo sapiens
tcaggaggctggatg

SEQ ID NO: 1328111 - DNA, 15 bp, Homo sapiens
atcaggaggctggat

SEQ ID NO: 1328112 - DNA, 15 bp, Homo sapiens
catcaggaggctgga

SEQ ID NO: 1328113 - DNA, 15 bp, Homo sapiens
tcatcaggaggctgg

SEQ ID NO: 1328114 - DNA, 15 bp, Homo sapiens
ttcatcaggaggctg

SEQ ID NO: 1328115 - DNA, 15 bp, Homo sapiens
attcatcaggaggct

SEQ ID NO: 1328116 - DNA, 15 bp, Homo sapiens
tattcatcaggaggc

SEQ ID NO: 1328117 - DNA, 15 bp, Homo sapiens
gtattcatcaggagg

SEQ ID NO: 1328118 - DNA, 15 bp, Homo sapiens
ggtattcatcaggag

SEQ ID NO: 1328119 - DNA, 15 bp, Homo sapiens
aggtattcatcagga

SEQ ID NO: 1328120 - DNA, 15 bp, Homo sapiens
gaggtattcatcagg

SEQ ID NO: 1328121 - DNA, 15 bp, Homo sapiens
tgaggtattcatcag

SEQ ID NO: 1328122 - DNA, 15 bp, Homo sapiens
ttgaggtattcatca

SEQ ID NO: 1328123 - DNA, 15 bp, Homo sapiens
cttgaggtattcatc

SEQ ID NO: 1328124 - DNA, 15 bp, Homo sapiens
tcttgaggtattcat

SEQ ID NO: 1328125 - DNA, 15 bp, Homo sapiens
ctcttgaggtattca

SEQ ID NO: 1328126 - DNA, 15 bp, Homo sapiens
tctcttgaggtattc

SEQ ID NO: 1328127 - DNA, 15 bp, Homo sapiens
gtctcttgaggtatt

SEQ ID NO: 1328128 - DNA, 15 bp, Homo sapiens
cgtctcttgaggtat

SEQ ID NO: 1328129 - DNA, 15 bp, Homo sapiens
ccgtctcttgaggta

SEQ ID NO: 1328130 - DNA, 15 bp, Homo sapiens
cccgtctcttgaggt

SEQ ID NO: 1328131 - DNA, 15 bp, Homo sapiens
ccccgtctcttgagg

SEQ ID NO: 1328132 - DNA, 15 bp, Homo sapiens
tccccgtctcttgag

SEQ ID NO: 1328133 - DNA, 15 bp, Homo sapiens
ctccccgtctcttga

SEQ ID NO: 1328134 - DNA, 15 bp, Homo sapiens
gctccccgtctcttg

SEQ ID NO: 1328135 - DNA, 15 bp, Homo sapiens
agctccccgtctctt

SEQ ID NO: 1328136 - DNA, 15 bp, Homo sapiens
gagctccccgtctct

SEQ ID NO: 1328137 - DNA, 15 bp, Homo sapiens
ggagctccccgtctc

SEQ ID NO: 1328138 - DNA, 15 bp, Homo sapiens
aggagctccccgtct

SEQ ID NO: 1328139 - DNA, 15 bp, Homo sapiens
aaggagctccccgtc

SEQ ID NO: 1328140 - DNA, 15 bp, Homo sapiens
caaggagctccccgt

SEQ ID NO: 1328141 - DNA, 15 bp, Homo sapiens
gcaaggagctccccg

SEQ ID NO: 1328142 - DNA, 15 bp, Homo sapiens
ggcaaggagctcccc

SEQ ID NO: 1328143 - DNA, 15 bp, Homo sapiens
aggcaaggagctccc

SEQ ID NO: 1328144 - DNA, 15 bp, Homo sapiens
gaggcaaggagctcc

SEQ ID NO: 1328145 - DNA, 15 bp, Homo sapiens
tgaggcaaggagctc

SEQ ID NO: 1328146 - DNA, 15 bp, Homo sapiens
gtgaggcaaggagct

SEQ ID NO: 1328147 - DNA, 15 bp, Homo sapiens
agtgaggcaaggagc

SEQ ID NO: 1328148 - DNA, 15 bp, Homo sapiens
cagtgaggcaaggag

SEQ ID NO: 1328149 - DNA, 15 bp, Homo sapiens
tcagtgaggcaagga

SEQ ID NO: 1328150 - DNA, 15 bp, Homo sapiens
ttcagtgaggcaagg

SEQ ID NO: 1328151 - DNA, 15 bp, Homo sapiens
gttcagtgaggcaag

SEQ ID NO: 1328152 - DNA, 15 bp, Homo sapiens
tgttcagtgaggcaa

SEQ ID NO: 1328153 - DNA, 15 bp, Homo sapiens
atgttcagtgaggca

SEQ ID NO: 1328154 - DNA, 15 bp, Homo sapiens
tatgttcagtgaggc

SEQ ID NO: 1328155 - DNA, 15 bp, Homo sapiens
gtatgttcagtgagg

SEQ ID NO: 1328156 - DNA, 15 bp, Homo sapiens
tgtatgttcagtgag

SEQ ID NO: 1328157 - DNA, 15 bp, Homo sapiens
atgtatgttcagtga

SEQ ID NO: 1328158 - DNA, 15 bp, Homo sapiens
aatgtatgttcagtg

SEQ ID NO: 1328159 - DNA, 15 bp, Homo sapiens
aaatgtatgttcagt

SEQ ID NO: 1328160 - DNA, 15 bp, Homo sapiens
gaaatgtatgttcag

SEQ ID NO: 1328161 - DNA, 15 bp, Homo sapiens
tgaaatgtatgttca

SEQ ID NO: 1328162 - DNA, 15 bp, Homo sapiens
atgaaatgtatgttc

SEQ ID NO: 1328163 - DNA, 15 bp, Homo sapiens
catgaaatgtatgtt

SEQ ID NO: 1328164 - DNA, 15 bp, Homo sapiens
acatgaaatgtatgt

SEQ ID NO: 1328165 - DNA, 15 bp, Homo sapiens
aacatgaaatgtatg

SEQ ID NO: 1328166 - DNA, 15 bp, Homo sapiens
aaacatgaaatgtat

SEQ ID NO: 1328167 - DNA, 15 bp, Homo sapiens
caaacatgaaatgta

SEQ ID NO: 1328168 - DNA, 15 bp, Homo sapiens
tcaaacatgaaatgt

SEQ ID NO: 1328169 - DNA, 15 bp, Homo sapiens
ctcaaacatgaaatg

SEQ ID NO: 1328170 - DNA, 15 bp, Homo sapiens
cctcaaacatgaaat

SEQ ID NO: 1328171 - DNA, 15 bp, Homo sapiens
acctcaaacatgaaa

SEQ ID NO: 1328172 - DNA, 15 bp, Homo sapiens
aacctcaaacatgaa

SEQ ID NO: 1328173 - DNA, 15 bp, Homo sapiens
aaacctcaaacatga

SEQ ID NO: 1328174 - DNA, 15 bp, Homo sapiens
aaaacctcaaacatg

SEQ ID NO: 1328175 - DNA, 15 bp, Homo sapiens
gaaaacctcaaacat

SEQ ID NO: 1328176 - DNA, 15 bp, Homo sapiens
agaaaacctcaaaca

SEQ ID NO: 1328177 - DNA, 15 bp, Homo sapiens
cagaaaacctcaaac

SEQ ID NO: 1328178 - DNA, 15 bp, Homo sapiens
tcagaaaacctcaaa

SEQ ID NO: 1328179 - DNA, 15 bp, Homo sapiens
atcagaaaacctcaa

SEQ ID NO: 1328180 - DNA, 15 bp, Homo sapiens
catcagaaaacctca

SEQ ID NO: 1328181 - DNA, 15 bp, Homo sapiens
acatcagaaaacctc

SEQ ID NO: 1328182 - DNA, 15 bp, Homo sapiens
cacatcagaaaacct

SEQ ID NO: 1328183 - DNA, 15 bp, Homo sapiens
acacatcagaaaacc

SEQ ID NO: 1328184 - DNA, 15 bp, Homo sapiens
gacacatcagaaaac

SEQ ID NO: 1328185 - DNA, 15 bp, Homo sapiens
agacacatcagaaaa

SEQ ID NO: 1328186 - DNA, 15 bp, Homo sapiens
cagacacatcagaaa

SEQ ID NO: 1328187 - DNA, 15 bp, Homo sapiens
gcagacacatcagaa

SEQ ID NO: 1328188 - DNA, 15 bp, Homo sapiens
tgcagacacatcaga

SEQ ID NO: 1328189 - DNA, 15 bp, Homo sapiens
atgcagacacatcag

SEQ ID NO: 1328190 - DNA, 15 bp, Homo sapiens
aatgcagacacatca

SEQ ID NO: 1328191 - DNA, 15 bp, Homo sapiens
caatgcagacacatc

SEQ ID NO: 1328192 - DNA, 15 bp, Homo sapiens
tcaatgcagacacat

SEQ ID NO: 1328193 - DNA, 15 bp, Homo sapiens
ctcaatgcagacaca

SEQ ID NO: 1328194 - DNA, 15 bp, Homo sapiens
gctcaatgcagacac

SEQ ID NO: 1328195 - DNA, 15 bp, Homo sapiens
ggctcaatgcagaca

SEQ ID NO: 1328196 - DNA, 15 bp, Homo sapiens
tggctcaatgcagac

SEQ ID NO: 1328197 - DNA, 15 bp, Homo sapiens
ctggctcaatgcaga

SEQ ID NO: 1328198 - DNA, 15 bp, Homo sapiens
gctggctcaatgcag

SEQ ID NO: 1328199 - DNA, 15 bp, Homo sapiens
tgctggctcaatgca

SEQ ID NO: 1328200 - DNA, 15 bp, Homo sapiens
atgctggctcaatgc

SEQ ID NO: 1328201 - DNA, 15 bp, Homo sapiens
gatgctggctcaatg

SEQ ID NO: 1328202 - DNA, 15 bp, Homo sapiens
agatgctggctcaat

SEQ ID NO: 1328203 - DNA, 15 bp, Homo sapiens
cagatgctggctcaa

SEQ ID NO: 1328204 - DNA, 15 bp, Homo sapiens
gcagatgctggctca

SEQ ID NO: 1328205 - DNA, 15 bp, Homo sapiens
agcagatgctggctc

SEQ ID NO: 1328206 - DNA, 15 bp, Homo sapiens
aagcagatgctggct

SEQ ID NO: 1328207 - DNA, 15 bp, Homo sapiens
gaagcagatgctggc

SEQ ID NO: 1328208 - DNA, 15 bp, Homo sapiens
ggaagcagatgctgg

SEQ ID NO: 1328209 - DNA, 15 bp, Homo sapiens
gggaagcagatgctg

SEQ ID NO: 1328210 - DNA, 15 bp, Homo sapiens
agggaagcagatgct

SEQ ID NO: 1328211 - DNA, 15 bp, Homo sapiens
cagggaagcagatgc

SEQ ID NO: 1328212 - DNA, 15 bp, Homo sapiens
tcagggaagcagatg

SEQ ID NO: 1328213 - DNA, 15 bp, Homo sapiens
ttcagggaagcagat

SEQ ID NO: 1328214 - DNA, 15 bp, Homo sapiens
cttcagggaagcaga

SEQ ID NO: 1328215 - DNA, 15 bp, Homo sapiens
acttcagggaagcag

SEQ ID NO: 1328216 - DNA, 15 bp, Homo sapiens
aacttcagggaagca

SEQ ID NO: 1328217 - DNA, 15 bp, Homo sapiens
gaacttcagggaagc

SEQ ID NO: 1328218 - DNA, 15 bp, Homo sapiens
agaacttcagggaag

SEQ ID NO: 1328219 - DNA, 15 bp, Homo sapiens
cagaacttcagggaa

SEQ ID NO: 1328220 - DNA, 15 bp, Homo sapiens
gcagaacttcaggga

SEQ ID NO: 1328221 - DNA, 15 bp, Homo sapiens
agcagaacttcaggg

SEQ ID NO: 1328222 - DNA, 15 bp, Homo sapiens
gagcagaacttcagg

SEQ ID NO: 1328223 - DNA, 15 bp, Homo sapiens
tgagcagaacttcag

SEQ ID NO: 1328224 - DNA, 15 bp, Homo sapiens
ctgagcagaacttca

SEQ ID NO: 1328225 - DNA, 15 bp, Homo sapiens
cctgagcagaacttc

SEQ ID NO: 1328226 - DNA, 15 bp, Homo sapiens
tcctgagcagaactt

SEQ ID NO: 1328227 - DNA, 15 bp, Homo sapiens
ttcctgagcagaact

SEQ ID NO: 1328228 - DNA, 15 bp, Homo sapiens
attcctgagcagaac

SEQ ID NO: 1328229 - DNA, 15 bp, Homo sapiens
gattcctgagcagaa

SEQ ID NO: 1328230 - DNA, 15 bp, Homo sapiens
agattcctgagcaga

SEQ ID NO: 1328231 - DNA, 15 bp, Homo sapiens
gagattcctgagcag

SEQ ID NO: 1328232 - DNA, 15 bp, Homo sapiens
tgagattcctgagca

SEQ ID NO: 1328233 - DNA, 15 bp, Homo sapiens
ctgagattcctgagc

SEQ ID NO: 1328234 - DNA, 15 bp, Homo sapiens
tctgagattcctgag

SEQ ID NO: 1328235 - DNA, 15 bp, Homo sapiens
ctctgagattcctga

SEQ ID NO: 1328236 - DNA, 15 bp, Homo sapiens
tctctgagattcctg

SEQ ID NO: 1328237 - DNA, 15 bp, Homo sapiens
ttctctgagattcct

SEQ ID NO: 1328238 - DNA, 15 bp, Homo sapiens
attctctgagattcc

SEQ ID NO: 1328239 - DNA, 15 bp, Homo sapiens
cattctctgagattc

SEQ ID NO: 1328240 - DNA, 15 bp, Homo sapiens
ccattctctgagatt

SEQ ID NO: 1328241 - DNA, 15 bp, Homo sapiens
accattctctgagat

SEQ ID NO: 1328242 - DNA, 15 bp, Homo sapiens
gaccattctctgaga

SEQ ID NO: 1328243 - DNA, 15 bp, Homo sapiens
ggaccattctctgag

SEQ ID NO: 1328244 - DNA, 15 bp, Homo sapiens
tggaccattctctga

SEQ ID NO: 1328245 - DNA, 15 bp, Homo sapiens
atggaccattctctg

SEQ ID NO: 1328246 - DNA, 15 bp, Homo sapiens
catggaccattctct

SEQ ID NO: 1328247 - DNA, 15 bp, Homo sapiens
gcatggaccattctc

SEQ ID NO: 1328248 - DNA, 15 bp, Homo sapiens
ggcatggaccattct

SEQ ID NO: 1328249 - DNA, 15 bp, Homo sapiens
gggcatggaccattc

SEQ ID NO: 1328250 - DNA, 15 bp, Homo sapiens
agggcatggaccatt

SEQ ID NO: 1328251 - DNA, 15 bp, Homo sapiens
aagggcatggaccat

SEQ ID NO: 1328252 - DNA, 15 bp, Homo sapiens
caagggcatggacca

SEQ ID NO: 1328253 - DNA, 15 bp, Homo sapiens
gcaagggcatggacc

SEQ ID NO: 1328254 - DNA, 15 bp, Homo sapiens
agcaagggcatggac

SEQ ID NO: 1328255 - DNA, 15 bp, Homo sapiens
gagcaagggcatgga

SEQ ID NO: 1328256 - DNA, 15 bp, Homo sapiens
ggagcaagggcatgg

SEQ ID NO: 1328257 - DNA, 15 bp, Homo sapiens
tggagcaagggcatg

SEQ ID NO: 1328258 - DNA, 15 bp, Homo sapiens
atggagcaagggcat

SEQ ID NO: 1328259 - DNA, 15 bp, Homo sapiens
catggagcaagggca

SEQ ID NO: 1328260 - DNA, 15 bp, Homo sapiens
tcatggagcaagggc

SEQ ID NO: 1328261 - DNA, 15 bp, Homo sapiens
gtcatggagcaaggg

SEQ ID NO: 1328262 - DNA, 15 bp, Homo sapiens
tgtcatggagcaagg

SEQ ID NO: 1328263 - DNA, 15 bp, Homo sapiens
atgtcatggagcaag

SEQ ID NO: 1328264 - DNA, 15 bp, Homo sapiens
tatgtcatggagcaa

SEQ ID NO: 1328265 - DNA, 15 bp, Homo sapiens
atatgtcatggagca

SEQ ID NO: 1328266 - DNA, 15 bp, Homo sapiens
gatatgtcatggagc

SEQ ID NO: 1328267 - DNA, 15 bp, Homo sapiens
tgatatgtcatggag

SEQ ID NO: 1328268 - DNA, 15 bp, Homo sapiens
ttgatatgtcatgga

SEQ ID NO: 1328269 - DNA, 15 bp, Homo sapiens
gttgatatgtcatgg

SEQ ID NO: 1328270 - DNA, 15 bp, Homo sapiens
ggttgatatgtcatg

SEQ ID NO: 1328271 - DNA, 15 bp, Homo sapiens
tggttgatatgtcat

SEQ ID NO: 1328272 - DNA, 15 bp, Homo sapiens
gtggttgatatgtca

SEQ ID NO: 1328273 - DNA, 15 bp, Homo sapiens
agtggttgatatgtc

SEQ ID NO: 1328274 - DNA, 15 bp, Homo sapiens
aagtggttgatatgt

SEQ ID NO: 1328275 - DNA, 15 bp, Homo sapiens
caagtggttgatatg

SEQ ID NO: 1328276 - DNA, 15 bp, Homo sapiens
tcaagtggttgatat

SEQ ID NO: 1328277 - DNA, 15 bp, Homo sapiens
ctcaagtggttgata

SEQ ID NO: 1328278 - DNA, 15 bp, Homo sapiens
tctcaagtggttgat

SEQ ID NO: 1328279 - DNA, 15 bp, Homo sapiens
atctcaagtggttga

SEQ ID NO: 1328280 - DNA, 15 bp, Homo sapiens
aatctcaagtggttg

SEQ ID NO: 1328281 - DNA, 15 bp, Homo sapiens
aaatctcaagtggtt

SEQ ID NO: 1328282 - DNA, 15 bp, Homo sapiens
aaaatctcaagtggt

SEQ ID NO: 1328283 - DNA, 15 bp, Homo sapiens
taaaatctcaagtgg

SEQ ID NO: 1328284 - DNA, 15 bp, Homo sapiens
ttaaaatctcaagtg

SEQ ID NO: 1328285 - DNA, 15 bp, Homo sapiens
cttaaaatctcaagt

SEQ ID NO: 1328286 - DNA, 15 bp, Homo sapiens
ccttaaaatctcaag

SEQ ID NO: 1328287 - DNA, 15 bp, Homo sapiens
tccttaaaatctcaa

SEQ ID NO: 1328288 - DNA, 15 bp, Homo sapiens
ttccttaaaatctca

SEQ ID NO: 1328289 - DNA, 15 bp, Homo sapiens
tttccttaaaatctc

SEQ ID NO: 1328290 - DNA, 15 bp, Homo sapiens
ttttccttaaaatct

SEQ ID NO: 1328291 - DNA, 15 bp, Homo sapiens
cttttccttaaaatc

SEQ ID NO: 1328292 - DNA, 15 bp, Homo sapiens
gcttttccttaaaat

SEQ ID NO: 1328293 - DNA, 15 bp, Homo sapiens
agcttttccttaaaa

SEQ ID NO: 1328294 - DNA, 15 bp, Homo sapiens
cagcttttccttaaa

SEQ ID NO: 1328295 - DNA, 15 bp, Homo sapiens
acagcttttccttaa

SEQ ID NO: 1328296 - DNA, 15 bp, Homo sapiens
cacagcttttcctta

SEQ ID NO: 1328297 - DNA, 15 bp, Homo sapiens
tcacagcttttcctt

SEQ ID NO: 1328298 - DNA, 15 bp, Homo sapiens
ttcacagcttttcct

SEQ ID NO: 1328299 - DNA, 15 bp, Homo sapiens
attcacagcttttcc

SEQ ID NO: 1328300 - DNA, 15 bp, Homo sapiens
aattcacagcttttc

SEQ ID NO: 1328301 - DNA, 15 bp, Homo sapiens
gaattcacagctttt

SEQ ID NO: 1328302 - DNA, 15 bp, Homo sapiens
ggaattcacagcttt

SEQ ID NO: 1328303 - DNA, 15 bp, Homo sapiens
aggaattcacagctt

SEQ ID NO: 1328304 - DNA, 15 bp, Homo sapiens
taggaattcacagct

SEQ ID NO: 1328305 - DNA, 15 bp, Homo sapiens
ttaggaattcacagc

SEQ ID NO: 1328306 - DNA, 15 bp, Homo sapiens
attaggaattcacag

SEQ ID NO: 1328307 - DNA, 15 bp, Homo sapiens
aattaggaattcaca

SEQ ID NO: 1328308 - DNA, 15 bp, Homo sapiens
gaattaggaattcac

SEQ ID NO: 1328309 - DNA, 15 bp, Homo sapiens
cgaattaggaattca

SEQ ID NO: 1328310 - DNA, 15 bp, Homo sapiens
acgaattaggaattc

SEQ ID NO: 1328311 - DNA, 15 bp, Homo sapiens
cacgaattaggaatt

SEQ ID NO: 1328312 - DNA, 15 bp, Homo sapiens
acacgaattaggaat

SEQ ID NO: 1328313 - DNA, 15 bp, Homo sapiens
aacacgaattaggaa

SEQ ID NO: 1328314 - DNA, 15 bp, Homo sapiens
gaacacgaattagga

SEQ ID NO: 1328315 - DNA, 15 bp, Homo sapiens
agaacacgaattagg

SEQ ID NO: 1328316 - DNA, 15 bp, Homo sapiens
tagaacacgaattag

SEQ ID NO: 1328317 - DNA, 15 bp, Homo sapiens
atagaacacgaatta

SEQ ID NO: 1328318 - DNA, 15 bp, Homo sapiens
aatagaacacgaatt

SEQ ID NO: 1328319 - DNA, 15 bp, Homo sapiens
aaatagaacacgaat

SEQ ID NO: 1328320 - DNA, 15 bp, Homo sapiens
caaatagaacacgaa

SEQ ID NO: 1328321 - DNA, 15 bp, Homo sapiens
ccaaatagaacacga

SEQ ID NO: 1328322 - DNA, 15 bp, Homo sapiens
tccaaatagaacacg

SEQ ID NO: 1328323 - DNA, 15 bp, Homo sapiens
ttccaaatagaacac

SEQ ID NO: 1328324 - DNA, 15 bp, Homo sapiens
gttccaaatagaaca

SEQ ID NO: 1328325 - DNA, 15 bp, Homo sapiens
tgttccaaatagaac

SEQ ID NO: 1328326 - DNA, 15 bp, Homo sapiens
ttgttccaaatagaa

SEQ ID NO: 1328327 - DNA, 15 bp, Homo sapiens
tttgttccaaataga

SEQ ID NO: 1328328 - DNA, 15 bp, Homo sapiens
ctttgttccaaatag

SEQ ID NO: 1328329 - DNA, 15 bp, Homo sapiens
tctttgttccaaata

SEQ ID NO: 1328330 - DNA, 15 bp, Homo sapiens
gtctttgttccaaat

SEQ ID NO: 1328331 - DNA, 15 bp, Homo sapiens
tgtctttgttccaaa

SEQ ID NO: 1328332 - DNA, 15 bp, Homo sapiens
gtgtctttgttccaa

SEQ ID NO: 1328333 - DNA, 15 bp, Homo sapiens
agtgtctttgttcca

SEQ ID NO: 1328334 - DNA, 15 bp, Homo sapiens
gagtgtctttgttcc

SEQ ID NO: 1328335 - DNA, 15 bp, Homo sapiens
tgagtgtctttgttc

SEQ ID NO: 1328336 - DNA, 15 bp, Homo sapiens
ctgagtgtctttgtt

SEQ ID NO: 1328337 - DNA, 15 bp, Homo sapiens
actgagtgtctttgt

SEQ ID NO: 1328338 - DNA, 15 bp, Homo sapiens
aactgagtgtctttg

SEQ ID NO: 1328339 - DNA, 15 bp, Homo sapiens
gaactgagtgtcttt

SEQ ID NO: 1328340 - DNA, 15 bp, Homo sapiens
ggaactgagtgtctt

SEQ ID NO: 1328341 - DNA, 15 bp, Homo sapiens
gggaactgagtgtct

SEQ ID NO: 1328342 - DNA, 15 bp, Homo sapiens
ggggaactgagtgtc

SEQ ID NO: 1328343 - DNA, 15 bp, Homo sapiens
gggggaactgagtgt

SEQ ID NO: 1328344 - DNA, 15 bp, Homo sapiens
tgggggaactgagtg

SEQ ID NO: 1328345 - DNA, 15 bp, Homo sapiens
ctgggggaactgagt

SEQ ID NO: 1328346 - DNA, 15 bp, Homo sapiens
gctgggggaactgag

SEQ ID NO: 1328347 - DNA, 15 bp, Homo sapiens
ggctgggggaactga

SEQ ID NO: 1328348 - DNA, 15 bp, Homo sapiens
aggctgggggaactg

SEQ ID NO: 1328349 - DNA, 15 bp, Homo sapiens
caggctgggggaact

SEQ ID NO: 1328350 - DNA, 15 bp, Homo sapiens
acaggctgggggaac

SEQ ID NO: 1328351 - DNA, 15 bp, Homo sapiens
gacaggctgggggaa

SEQ ID NO: 1328352 - DNA, 15 bp, Homo sapiens
ggacaggctggggga

SEQ ID NO: 1328353 - DNA, 15 bp, Homo sapiens
aggacaggctggggg

SEQ ID NO: 1328354 - DNA, 15 bp, Homo sapiens
aaggacaggctgggg

SEQ ID NO: 1328355 - DNA, 15 bp, Homo sapiens
taaggacaggctggg

SEQ ID NO: 1328356 - DNA, 15 bp, Homo sapiens
ctaaggacaggctgg

SEQ ID NO: 1328357 - DNA, 15 bp, Homo sapiens
cctaaggacaggctg

SEQ ID NO: 1328358 - DNA, 15 bp, Homo sapiens
tcctaaggacaggct

SEQ ID NO: 1328359 - DNA, 15 bp, Homo sapiens
atcctaaggacaggc

SEQ ID NO: 1328360 - DNA, 15 bp, Homo sapiens
tatcctaaggacagg

SEQ ID NO: 1328361 - DNA, 15 bp, Homo sapiens
ttatcctaaggacag

SEQ ID NO: 1328362 - DNA, 15 bp, Homo sapiens
cttatcctaaggaca

SEQ ID NO: 1328363 - DNA, 15 bp, Homo sapiens
acttatcctaaggac

SEQ ID NO: 1328364 - DNA, 15 bp, Homo sapiens
gacttatcctaagga

SEQ ID NO: 1328365 - DNA, 15 bp, Homo sapiens
agacttatcctaagg

SEQ ID NO: 1328366 - DNA, 15 bp, Homo sapiens
gagacttatcctaag

SEQ ID NO: 1328367 - DNA, 15 bp, Homo sapiens
tgagacttatcctaa

SEQ ID NO: 1328368 - DNA, 15 bp, Homo sapiens
ctgagacttatccta

SEQ ID NO: 1328369 - DNA, 15 bp, Homo sapiens
tctgagacttatcct

SEQ ID NO: 1328370 - DNA, 15 bp, Homo sapiens
gtctgagacttatcc

SEQ ID NO: 1328371 - DNA, 15 bp, Homo sapiens
ggtctgagacttatc

SEQ ID NO: 1328372 - DNA, 15 bp, Homo sapiens
aggtctgagacttat

SEQ ID NO: 1328373 - DNA, 15 bp, Homo sapiens
caggtctgagactta

SEQ ID NO: 1328374 - DNA, 15 bp, Homo sapiens
acaggtctgagactt

SEQ ID NO: 1328375 - DNA, 15 bp, Homo sapiens
cacaggtctgagact

SEQ ID NO: 1328376 - DNA, 15 bp, Homo sapiens
gcacaggtctgagac

SEQ ID NO: 1328377 - DNA, 15 bp, Homo sapiens
agcacaggtctgaga

SEQ ID NO: 1328378 - DNA, 15 bp, Homo sapiens
gagcacaggtctgag

SEQ ID NO: 1328379 - DNA, 15 bp, Homo sapiens
agagcacaggtctga

SEQ ID NO: 1328380 - DNA, 15 bp, Homo sapiens
cagagcacaggtctg

SEQ ID NO: 1328381 - DNA, 15 bp, Homo sapiens
ccagagcacaggtct

SEQ ID NO: 1328382 - DNA, 15 bp, Homo sapiens
cccagagcacaggtc

SEQ ID NO: 1328383 - DNA, 15 bp, Homo sapiens
gcccagagcacaggt

SEQ ID NO: 1328384 - DNA, 15 bp, Homo sapiens
tgcccagagcacagg

SEQ ID NO: 1328385 - DNA, 15 bp, Homo sapiens
gtgcccagagcacag

SEQ ID NO: 1328386 - DNA, 15 bp, Homo sapiens
cgtgcccagagcaca

SEQ ID NO: 1328387 - DNA, 15 bp, Homo sapiens
acgtgcccagagcac

SEQ ID NO: 1328388 - DNA, 15 bp, Homo sapiens
aacgtgcccagagca

SEQ ID NO: 1328389 - DNA, 15 bp, Homo sapiens
gaacgtgcccagagc

SEQ ID NO: 1328390 - DNA, 15 bp, Homo sapiens
ggaacgtgcccagag

SEQ ID NO: 1328391 - DNA, 15 bp, Homo sapiens
tggaacgtgcccaga

SEQ ID NO: 1328392 - DNA, 15 bp, Homo sapiens
ctggaacgtgcccag

SEQ ID NO: 1328393 - DNA, 15 bp, Homo sapiens
gctggaacgtgccca

SEQ ID NO: 1328394 - DNA, 15 bp, Homo sapiens
tgctggaacgtgccc

SEQ ID NO: 1328395 - DNA, 15 bp, Homo sapiens
ctgctggaacgtgcc

SEQ ID NO: 1328396 - DNA, 15 bp, Homo sapiens
gctgctggaacgtgc

SEQ ID NO: 1328397 - DNA, 15 bp, Homo sapiens
agctgctggaacgtg

SEQ ID NO: 1328398 - DNA, 15 bp, Homo sapiens
cagctgctggaacgt

SEQ ID NO: 1328399 - DNA, 15 bp, Homo sapiens
tcagctgctggaacg

SEQ ID NO: 1328400 - DNA, 15 bp, Homo sapiens
tcctcttgagtccta

SEQ ID NO: 1328401 - DNA, 15 bp, Homo sapiens
ctcctcttgagtcct

SEQ ID NO: 1328402 - DNA, 15 bp, Homo sapiens
tctcctcttgagtcc

SEQ ID NO: 1328403 - DNA, 15 bp, Homo sapiens
ctctcctcttgagtc

SEQ ID NO: 1328404 - DNA, 15 bp, Homo sapiens
tctctcctcttgagt

SEQ ID NO: 1328405 - DNA, 15 bp, Homo sapiens
ctctctcctcttgag

SEQ ID NO: 1328406 - DNA, 15 bp, Homo sapiens
gctctctcctcttga

SEQ ID NO: 1328407 - DNA, 15 bp, Homo sapiens
agctctctcctcttg

SEQ ID NO: 1328408 - DNA, 15 bp, Homo sapiens
gagctctctcctctt

SEQ ID NO: 1328409 - DNA, 15 bp, Homo sapiens
tgagctctctcctct

SEQ ID NO: 1328410 - DNA, 15 bp, Homo sapiens
atgagctctctcctc

SEQ ID NO: 1328411 - DNA, 15 bp, Homo sapiens
catgagctctctcct

SEQ ID NO: 1328412 - DNA, 15 bp, Homo sapiens
gcatgagctctctcc

SEQ ID NO: 1328413 - DNA, 15 bp, Homo sapiens
tgcatgagctctctc

SEQ ID NO: 1328414 - DNA, 15 bp, Homo sapiens
atgcatgagctctct

SEQ ID NO: 1328415 - DNA, 15 bp, Homo sapiens
catgcatgagctctc

SEQ ID NO: 1328416 - DNA, 15 bp, Homo sapiens
tcatgcatgagctct

SEQ ID NO: 1328417 - DNA, 15 bp, Homo sapiens
ttcatgcatgagctc

SEQ ID NO: 1328418 - DNA, 15 bp, Homo sapiens
gttcatgcatgagct

SEQ ID NO: 1328419 - DNA, 15 bp, Homo sapiens
tgttcatgcatgagc

SEQ ID NO: 1328420 - DNA, 15 bp, Homo sapiens
ctgttcatgcatgag

SEQ ID NO: 1328421 - DNA, 15 bp, Homo sapiens
actgttcatgcatga

SEQ ID NO: 1328422 - DNA, 15 bp, Homo sapiens
cactgttcatgcatg

SEQ ID NO: 1328423 - DNA, 15 bp, Homo sapiens
gcactgttcatgcat

SEQ ID NO: 1328424 - DNA, 15 bp, Homo sapiens
ggcactgttcatgca

SEQ ID NO: 1328425 - DNA, 15 bp, Homo sapiens
aggcactgttcatgc

SEQ ID NO: 1328426 - DNA, 15 bp, Homo sapiens
taggcactgttcatg

SEQ ID NO: 1328427 - DNA, 15 bp, Homo sapiens
ctaggcactgttcat

SEQ ID NO: 1328428 - DNA, 15 bp, Homo sapiens
gctaggcactgttca

SEQ ID NO: 1328429 - DNA, 15 bp, Homo sapiens
tgctaggcactgttc

SEQ ID NO: 1328430 - DNA, 15 bp, Homo sapiens
ctgctaggcactgtt

SEQ ID NO: 1328431 - DNA, 15 bp, Homo sapiens
cctgctaggcactgt

SEQ ID NO: 1328432 - DNA, 15 bp, Homo sapiens
ccctgctaggcactg

SEQ ID NO: 1328433 - DNA, 15 bp, Homo sapiens
tccctgctaggcact

SEQ ID NO: 1328434 - DNA, 15 bp, Homo sapiens
ttccctgctaggcac

SEQ ID NO: 1328435 - DNA, 15 bp, Homo sapiens
cttccctgctaggca

SEQ ID NO: 1328436 - DNA, 15 bp, Homo sapiens
tcttccctgctaggc

SEQ ID NO: 1328437 - DNA, 15 bp, Homo sapiens
ttcttccctgctagg

SEQ ID NO: 1328438 - DNA, 15 bp, Homo sapiens
attcttccctgctag

SEQ ID NO: 1328439 - DNA, 15 bp, Homo sapiens
aattcttccctgcta

SEQ ID NO: 1328440 - DNA, 15 bp, Homo sapiens
caattcttccctgct

SEQ ID NO: 1328441 - DNA, 15 bp, Homo sapiens
ccaattcttccctgc

SEQ ID NO: 1328442 - DNA, 15 bp, Homo sapiens
gccaattcttccctg

SEQ ID NO: 1328443 - DNA, 15 bp, Homo sapiens
tgccaattcttccct

SEQ ID NO: 1328444 - DNA, 15 bp, Homo sapiens
gtgccaattcttccc

SEQ ID NO: 1328445 - DNA, 15 bp, Homo sapiens
ggtgccaattcttcc

SEQ ID NO: 1328446 - DNA, 15 bp, Homo sapiens
cggtgccaattcttc

SEQ ID NO: 1328447 - DNA, 15 bp, Homo sapiens
ccggtgccaattctt

SEQ ID NO: 1328448 - DNA, 15 bp, Homo sapiens
cccggtgccaattct

SEQ ID NO: 1328449 - DNA, 15 bp, Homo sapiens
ccccggtgccaattc

SEQ ID NO: 1328450 - DNA, 15 bp, Homo sapiens
tccccggtgccaatt

SEQ ID NO: 1328451 - DNA, 15 bp, Homo sapiens
ctccccggtgccaat

SEQ ID NO: 1328452 - DNA, 15 bp, Homo sapiens
tctccccggtgccaa

SEQ ID NO: 1328453 - DNA, 15 bp, Homo sapiens
ttctccccggtgcca

SEQ ID NO: 1328454 - DNA, 15 bp, Homo sapiens
cttctccccggtgcc

SEQ ID NO: 1328455 - DNA, 15 bp, Homo sapiens
tcttctccccggtgc

SEQ ID NO: 1328456 - DNA, 15 bp, Homo sapiens
ttcttctccccggtg

SEQ ID NO: 1328457 - DNA, 15 bp, Homo sapiens
gttcttctccccggt

SEQ ID NO: 1328458 - DNA, 15 bp, Homo sapiens
tgttcttctccccgg

SEQ ID NO: 1328459 - DNA, 15 bp, Homo sapiens
ctgttcttctccccg

SEQ ID NO: 1328460 - DNA, 15 bp, Homo sapiens
tctgttcttctcccc

SEQ ID NO: 1328461 - DNA, 15 bp, Homo sapiens
ctctgttcttctccc

SEQ ID NO: 1328462 - DNA, 15 bp, Homo sapiens
cctctgttcttctcc

SEQ ID NO: 1328463 - DNA, 15 bp, Homo sapiens
tcctctgttcttctc

SEQ ID NO: 1328464 - DNA, 15 bp, Homo sapiens
ttcctctgttcttct

SEQ ID NO: 1328465 - DNA, 15 bp, Homo sapiens
cttcctctgttcttc

SEQ ID NO: 1328466 - DNA, 15 bp, Homo sapiens
acttcctctgttctt

SEQ ID NO: 1328467 - DNA, 15 bp, Homo sapiens
aacttcctctgttct

SEQ ID NO: 1328468 - DNA, 15 bp, Homo sapiens
taacttcctctgttc

SEQ ID NO: 1328469 - DNA, 15 bp, Homo sapiens
gtaacttcctctgtt

SEQ ID NO: 1328470 - DNA, 15 bp, Homo sapiens
tgtaacttcctctgt

SEQ ID NO: 1328471 - DNA, 15 bp, Homo sapiens
ctgtaacttcctctg

SEQ ID NO: 1328472 - DNA, 15 bp, Homo sapiens
cctgtaacttcctct

SEQ ID NO: 1328473 - DNA, 15 bp, Homo sapiens
ccctgtaacttcctc

SEQ ID NO: 1328474 - DNA, 15 bp, Homo sapiens
cccctgtaacttcct

SEQ ID NO: 1328475 - DNA, 15 bp, Homo sapiens
acccctgtaacttcc

SEQ ID NO: 1328476 - DNA, 15 bp, Homo sapiens
aacccctgtaacttc

SEQ ID NO: 1328477 - DNA, 15 bp, Homo sapiens
taacccctgtaactt

SEQ ID NO: 1328478 - DNA, 15 bp, Homo sapiens
ctaacccctgtaact

SEQ ID NO: 1328479 - DNA, 15 bp, Homo sapiens
tctaacccctgtaac

SEQ ID NO: 1328480 - DNA, 15 bp, Homo sapiens
ctctaacccctgtaa

SEQ ID NO: 1328481 - DNA, 15 bp, Homo sapiens
cctctaacccctgta

SEQ ID NO: 1328482 - DNA, 15 bp, Homo sapiens
tcctctaacccctgt

SEQ ID NO: 1328483 - DNA, 15 bp, Homo sapiens
ctcctctaacccctg

SEQ ID NO: 1328484 - DNA, 15 bp, Homo sapiens
cctcctctaacccct

SEQ ID NO: 1328485 - DNA, 15 bp, Homo sapiens
ccctcctctaacccc

SEQ ID NO: 1328486 - DNA, 15 bp, Homo sapiens
cccctcctctaaccc

SEQ ID NO: 1328487 - DNA, 15 bp, Homo sapiens
ccccctcctctaacc

SEQ ID NO: 1328488 - DNA, 15 bp, Homo sapiens
tccccctcctctaac

SEQ ID NO: 1328489 - DNA, 15 bp, Homo sapiens
atccccctcctctaa

SEQ ID NO: 1328490 - DNA, 15 bp, Homo sapiens
catccccctcctcta

SEQ ID NO: 1328491 - DNA, 15 bp, Homo sapiens
acatccccctcctct

SEQ ID NO: 1328492 - DNA, 15 bp, Homo sapiens
aacatccccctcctc

SEQ ID NO: 1328493 - DNA, 15 bp, Homo sapiens
aaacatccccctcct

SEQ ID NO: 1328494 - DNA, 15 bp, Homo sapiens
aaaacatccccctcc

SEQ ID NO: 1328495 - DNA, 15 bp, Homo sapiens
gaaaacatccccctc

SEQ ID NO: 1328496 - DNA, 15 bp, Homo sapiens
ggaaaacatccccct

SEQ ID NO: 1328497 - DNA, 15 bp, Homo sapiens
tggaaaacatccccc

SEQ ID NO: 1328498 - DNA, 15 bp, Homo sapiens
ctggaaaacatcccc

SEQ ID NO: 1328499 - DNA, 15 bp, Homo sapiens
gctggaaaacatccc

SEQ ID NO: 1328500 - DNA, 15 bp, Homo sapiens
agctggaaaacatcc

SEQ ID NO: 1328501 - DNA, 15 bp, Homo sapiens
cagctggaaaacatc

SEQ ID NO: 1328502 - DNA, 15 bp, Homo sapiens
attgtcagctggaaa

SEQ ID NO: 1328503 - DNA, 15 bp, Homo sapiens
cattgtcagctggaa

SEQ ID NO: 1328504 - DNA, 15 bp, Homo sapiens
tcattgtcagctgga

SEQ ID NO: 1328505 - DNA, 15 bp, Homo sapiens
atcattgtcagctgg

SEQ ID NO: 1328506 - DNA, 15 bp, Homo sapiens
catcattgtcagctg

SEQ ID NO: 1328507 - DNA, 15 bp, Homo sapiens
ccatcattgtcagct

SEQ ID NO: 1328508 - DNA, 15 bp, Homo sapiens
cccatcattgtcagc

SEQ ID NO: 1328509 - DNA, 15 bp, Homo sapiens
ccccatcattgtcag

SEQ ID NO: 1328510 - DNA, 15 bp, Homo sapiens
cccccatcattgtca

SEQ ID NO: 1328511 - DNA, 15 bp, Homo sapiens
acccccatcattgtc

SEQ ID NO: 1328512 - DNA, 15 bp, Homo sapiens
tacccccatcattgt

SEQ ID NO: 1328513 - DNA, 15 bp, Homo sapiens
atacccccatcattg

SEQ ID NO: 1328514 - DNA, 15 bp, Homo sapiens
gatacccccatcatt

SEQ ID NO: 1328515 - DNA, 15 bp, Homo sapiens
tgatacccccatcat

SEQ ID NO: 1328516 - DNA, 15 bp, Homo sapiens
ctgatacccccatca

SEQ ID NO: 1328517 - DNA, 15 bp, Homo sapiens
tctgatacccccatc

SEQ ID NO: 1328518 - DNA, 15 bp, Homo sapiens
ttctgatacccccat

SEQ ID NO: 1328519 - DNA, 15 bp, Homo sapiens
tttctgataccccca

SEQ ID NO: 1328520 - DNA, 15 bp, Homo sapiens
ctttctgataccccc

SEQ ID NO: 1328521 - DNA, 15 bp, Homo sapiens
cctttctgatacccc

SEQ ID NO: 1328522 - DNA, 15 bp, Homo sapiens
gcctttctgataccc

SEQ ID NO: 1328523 - DNA, 15 bp, Homo sapiens
agcctttctgatacc

SEQ ID NO: 1328524 - DNA, 15 bp, Homo sapiens
gagcctttctgatac

SEQ ID NO: 1328525 - DNA, 15 bp, Homo sapiens
agagcctttctgata

SEQ ID NO: 1328526 - DNA, 15 bp, Homo sapiens
aagagcctttctgat

SEQ ID NO: 1328527 - DNA, 15 bp, Homo sapiens
caagagcctttctga

SEQ ID NO: 1328528 - DNA, 15 bp, Homo sapiens
ccaagagcctttctg

SEQ ID NO: 1328529 - DNA, 15 bp, Homo sapiens
accaagagcctttct

SEQ ID NO: 1328530 - DNA, 15 bp, Homo sapiens
caccaagagcctttc

SEQ ID NO: 1328531 - DNA, 15 bp, Homo sapiens
tcaccaagagccttt

SEQ ID NO: 1328532 - DNA, 15 bp, Homo sapiens
ctcaccaagagcctt

SEQ ID NO: 1328533 - DNA, 15 bp, Homo sapiens
tctcaccaagagcct

SEQ ID NO: 1328534 - DNA, 15 bp, Homo sapiens
atctcaccaagagcc

SEQ ID NO: 1328535 - DNA, 15 bp, Homo sapiens
aatctcaccaagagc

SEQ ID NO: 1328536 - DNA, 15 bp, Homo sapiens
caatctcaccaagag

SEQ ID NO: 1328537 - DNA, 15 bp, Homo sapiens
gcaatctcaccaaga

SEQ ID NO: 1328538 - DNA, 15 bp, Homo sapiens
tgcaatctcaccaag

SEQ ID NO: 1328539 - DNA, 15 bp, Homo sapiens
gtgcaatctcaccaa

SEQ ID NO: 1328540 - DNA, 15 bp, Homo sapiens
ggtgcaatctcacca

SEQ ID NO: 1328541 - DNA, 15 bp, Homo sapiens
tggtgcaatctcacc

SEQ ID NO: 1328542 - DNA, 15 bp, Homo sapiens
tgccaggctggagtg

SEQ ID NO: 1328543 - DNA, 15 bp, Homo sapiens
ttgccaggctggagt

SEQ ID NO: 1328544 - DNA, 15 bp, Homo sapiens
gttgccaggctggag

SEQ ID NO: 1328545 - DNA, 15 bp, Homo sapiens
tgttgccaggctgga

SEQ ID NO: 1328546 - DNA, 15 bp, Homo sapiens
ttgttgccaggctgg

SEQ ID NO: 1328547 - DNA, 15 bp, Homo sapiens
cttgttgccaggctg

SEQ ID NO: 1328548 - DNA, 15 bp, Homo sapiens
tcttgttgccaggct

SEQ ID NO: 1328549 - DNA, 15 bp, Homo sapiens
ctcttgttgccaggc

SEQ ID NO: 1328550 - DNA, 15 bp, Homo sapiens
actcttgttgccagg

SEQ ID NO: 1328551 - DNA, 15 bp, Homo sapiens
cactcttgttgccag

SEQ ID NO: 1328552 - DNA, 15 bp, Homo sapiens
tcactcttgttgcca

SEQ ID NO: 1328553 - DNA, 15 bp, Homo sapiens
cctttcttttttttt

SEQ ID NO: 1328554 - DNA, 15 bp, Homo sapiens
gcctttctttttttt

SEQ ID NO: 1328555 - DNA, 15 bp, Homo sapiens
agcctttcttttttt

SEQ ID NO: 1328556 - DNA, 15 bp, Homo sapiens
gagcctttctttttt

SEQ ID NO: 1328557 - DNA, 15 bp, Homo sapiens
agagcctttcttttt

SEQ ID NO: 1328558 - DNA, 15 bp, Homo sapiens
aagagcctttctttt

SEQ ID NO: 1328559 - DNA, 15 bp, Homo sapiens
caagagcctttcttt

SEQ ID NO: 1328560 - DNA, 15 bp, Homo sapiens
ccaagagcctttctt

SEQ ID NO: 1328561 - DNA, 15 bp, Homo sapiens
tccaagagcctttct

SEQ ID NO: 1328562 - DNA, 15 bp, Homo sapiens
atccaagagcctttc

SEQ ID NO: 1328563 - DNA, 15 bp, Homo sapiens
aatccaagagccttt

SEQ ID NO: 1328564 - DNA, 15 bp, Homo sapiens
taatccaagagcctt

SEQ ID NO: 1328565 - DNA, 15 bp, Homo sapiens
ctaatccaagagcct

SEQ ID NO: 1328566 - DNA, 15 bp, Homo sapiens
cctaatccaagagcc

SEQ ID NO: 1328567 - DNA, 15 bp, Homo sapiens
gcctaatccaagagc

SEQ ID NO: 1328568 - DNA, 15 bp, Homo sapiens
agcctaatccaagag

SEQ ID NO: 1328569 - DNA, 15 bp, Homo sapiens
aagcctaatccaaga

SEQ ID NO: 1328570 - DNA, 15 bp, Homo sapiens
aaagcctaatccaag

SEQ ID NO: 1328571 - DNA, 15 bp, Homo sapiens
aaaagcctaatccaa

SEQ ID NO: 1328572 - DNA, 15 bp, Homo sapiens
taaaagcctaatcca

SEQ ID NO: 1328573 - DNA, 15 bp, Homo sapiens
ttaaaagcctaatcc

SEQ ID NO: 1328574 - DNA, 15 bp, Homo sapiens
gttaaaagcctaatc

SEQ ID NO: 1328575 - DNA, 15 bp, Homo sapiens
tgttaaaagcctaat

SEQ ID NO: 1328576 - DNA, 15 bp, Homo sapiens
atgttaaaagcctaa

SEQ ID NO: 1328577 - DNA, 15 bp, Homo sapiens
gatgttaaaagccta

SEQ ID NO: 1328578 - DNA, 15 bp, Homo sapiens
tgatgttaaaagcct

SEQ ID NO: 1328579 - DNA, 15 bp, Homo sapiens
ctgatgttaaaagcc

SEQ ID NO: 1328580 - DNA, 15 bp, Homo sapiens
cctgatgttaaaagc

SEQ ID NO: 1328581 - DNA, 15 bp, Homo sapiens
gcctgatgttaaaag

SEQ ID NO: 1328582 - DNA, 15 bp, Homo sapiens
tgcctgatgttaaaa

SEQ ID NO: 1328583 - DNA, 15 bp, Homo sapiens
ctgcctgatgttaaa

SEQ ID NO: 1328584 - DNA, 15 bp, Homo sapiens
cctgcctgatgttaa

SEQ ID NO: 1328585 - DNA, 15 bp, Homo sapiens
gcctgcctgatgtta

SEQ ID NO: 1328586 - DNA, 15 bp, Homo sapiens
cgcctgcctgatgtt

SEQ ID NO: 1328587 - DNA, 15 bp, Homo sapiens
gcgcctgcctgatgt

SEQ ID NO: 1328588 - DNA, 15 bp, Homo sapiens
tgcgcctgcctgatg

SEQ ID NO: 1328589 - DNA, 15 bp, Homo sapiens
ctgcgcctgcctgat

SEQ ID NO: 1328590 - DNA, 15 bp, Homo sapiens
cctgcgcctgcctga

SEQ ID NO: 1328591 - DNA, 15 bp, Homo sapiens
tcctgcgcctgcctg

SEQ ID NO: 1328592 - DNA, 15 bp, Homo sapiens
atcctgcgcctgcct

SEQ ID NO: 1328593 - DNA, 15 bp, Homo sapiens
catcctgcgcctgcc

SEQ ID NO: 1328594 - DNA, 15 bp, Homo sapiens
gcatcctgcgcctgc

SEQ ID NO: 1328595 - DNA, 15 bp, Homo sapiens
tgcatcctgcgcctg

SEQ ID NO: 1328596 - DNA, 15 bp, Homo sapiens
ttgcatcctgcgcct

SEQ ID NO: 1328597 - DNA, 15 bp, Homo sapiens
cttgcatcctgcgcc

SEQ ID NO: 1328598 - DNA, 15 bp, Homo sapiens
ccttgcatcctgcgc

SEQ ID NO: 1328599 - DNA, 15 bp, Homo sapiens
gccttgcatcctgcg

SEQ ID NO: 1328600 - DNA, 15 bp, Homo sapiens
tgccttgcatcctgc

SEQ ID NO: 1328601 - DNA, 15 bp, Homo sapiens
atgccttgcatcctg

SEQ ID NO: 1328602 - DNA, 15 bp, Homo sapiens
tatgccttgcatcct

SEQ ID NO: 1328603 - DNA, 15 bp, Homo sapiens
ctatgccttgcatcc

SEQ ID NO: 1328604 - DNA, 15 bp, Homo sapiens
tctatgccttgcatc

SEQ ID NO: 1328605 - DNA, 15 bp, Homo sapiens
ctctatgccttgcat

SEQ ID NO: 1328606 - DNA, 15 bp, Homo sapiens
tctctatgccttgca

SEQ ID NO: 1328607 - DNA, 15 bp, Homo sapiens
ttctctatgccttgc

SEQ ID NO: 1328608 - DNA, 15 bp, Homo sapiens
attctctatgccttg

SEQ ID NO: 1328609 - DNA, 15 bp, Homo sapiens
cattctctatgcctt

SEQ ID NO: 1328610 - DNA, 15 bp, Homo sapiens
tcattctctatgcct

SEQ ID NO: 1328611 - DNA, 15 bp, Homo sapiens
ctcattctctatgcc

SEQ ID NO: 1328612 - DNA, 15 bp, Homo sapiens
cctcattctctatgc

SEQ ID NO: 1328613 - DNA, 15 bp, Homo sapiens
acctcattctctatg

SEQ ID NO: 1328614 - DNA, 15 bp, Homo sapiens
cacctcattctctat

SEQ ID NO: 1328615 - DNA, 15 bp, Homo sapiens
tcacctcattctcta

SEQ ID NO: 1328616 - DNA, 15 bp, Homo sapiens
atcacctcattctct

SEQ ID NO: 1328617 - DNA, 15 bp, Homo sapiens
tatcacctcattctc

SEQ ID NO: 1328618 - DNA, 15 bp, Homo sapiens
atatcacctcattct

SEQ ID NO: 1328619 - DNA, 15 bp, Homo sapiens
tatatcacctcattc

SEQ ID NO: 1328620 - DNA, 15 bp, Homo sapiens
ctatatcacctcatt

SEQ ID NO: 1328621 - DNA, 15 bp, Homo sapiens
cctatatcacctcat

SEQ ID NO: 1328622 - DNA, 15 bp, Homo sapiens
tcctatatcacctca

SEQ ID NO: 1328623 - DNA, 15 bp, Homo sapiens
ttcctatatcacctc

SEQ ID NO: 1328624 - DNA, 15 bp, Homo sapiens
cttcctatatcacct

SEQ ID NO: 1328625 - DNA, 15 bp, Homo sapiens
gcttcctatatcacc

SEQ ID NO: 1328626 - DNA, 15 bp, Homo sapiens
cgcttcctatatcac

SEQ ID NO: 1328627 - DNA, 15 bp, Homo sapiens
ccgcttcctatatca

SEQ ID NO: 1328628 - DNA, 15 bp, Homo sapiens
cccgcttcctatatc

SEQ ID NO: 1328629 - DNA, 15 bp, Homo sapiens
acccgcttcctatat

SEQ ID NO: 1328630 - DNA, 15 bp, Homo sapiens
tacccgcttcctata

SEQ ID NO: 1328631 - DNA, 15 bp, Homo sapiens
atacccgcttcctat

SEQ ID NO: 1328632 - DNA, 15 bp, Homo sapiens
catacccgcttccta

SEQ ID NO: 1328633 - DNA, 15 bp, Homo sapiens
gcatacccgcttcct

SEQ ID NO: 1328634 - DNA, 15 bp, Homo sapiens
ggcatacccgcttcc

SEQ ID NO: 1328635 - DNA, 15 bp, Homo sapiens
aggcatacccgcttc

SEQ ID NO: 1328636 - DNA, 15 bp, Homo sapiens
taggcatacccgctt

SEQ ID NO: 1328637 - DNA, 15 bp, Homo sapiens
ataggcatacccgct

SEQ ID NO: 1328638 - DNA, 15 bp, Homo sapiens
tataggcatacccgc

SEQ ID NO: 1328639 - DNA, 15 bp, Homo sapiens
ctataggcatacccg

SEQ ID NO: 1328640 - DNA, 15 bp, Homo sapiens
cctataggcataccc

SEQ ID NO: 1328641 - DNA, 15 bp, Homo sapiens
tcctataggcatacc

SEQ ID NO: 1328642 - DNA, 15 bp, Homo sapiens
gtcctataggcatac

SEQ ID NO: 1328643 - DNA, 15 bp, Homo sapiens
cgtcctataggcata

SEQ ID NO: 1328644 - DNA, 15 bp, Homo sapiens
tcgtcctataggcat

SEQ ID NO: 1328645 - DNA, 15 bp, Homo sapiens
ctcgtcctataggca

SEQ ID NO: 1328646 - DNA, 15 bp, Homo sapiens
cctcgtcctataggc

SEQ ID NO: 1328647 - DNA, 15 bp, Homo sapiens
gcctcgtcctatagg

SEQ ID NO: 1328648 - DNA, 15 bp, Homo sapiens
tgcctcgtcctatag

SEQ ID NO: 1328649 - DNA, 15 bp, Homo sapiens
atgcctcgtcctata

SEQ ID NO: 1328650 - DNA, 15 bp, Homo sapiens
catgcctcgtcctat

SEQ ID NO: 1328651 - DNA, 15 bp, Homo sapiens
ccatgcctcgtccta

SEQ ID NO: 1328652 - DNA, 15 bp, Homo sapiens
gccatgcctcgtcct

SEQ ID NO: 1328653 - DNA, 15 bp, Homo sapiens
cgccatgcctcgtcc

SEQ ID NO: 1328654 - DNA, 15 bp, Homo sapiens
ccgccatgcctcgtc

SEQ ID NO: 1328655 - DNA, 15 bp, Homo sapiens
tccgccatgcctcgt

SEQ ID NO: 1328656 - DNA, 15 bp, Homo sapiens
ctccgccatgcctcg

SEQ ID NO: 1328657 - DNA, 15 bp, Homo sapiens
cctccgccatgcctc

SEQ ID NO: 1328658 - DNA, 15 bp, Homo sapiens
ccctccgccatgcct

SEQ ID NO: 1328659 - DNA, 15 bp, Homo sapiens
tccctccgccatgcc

SEQ ID NO: 1328660 - DNA, 15 bp, Homo sapiens
ttccctccgccatgc

SEQ ID NO: 1328661 - DNA, 15 bp, Homo sapiens
cttccctccgccatg

SEQ ID NO: 1328662 - DNA, 15 bp, Homo sapiens
ccttccctccgccat

SEQ ID NO: 1328663 - DNA, 15 bp, Homo sapiens
cccttccctccgcca

SEQ ID NO: 1328664 - DNA, 15 bp, Homo sapiens
gcccttccctccgcc

SEQ ID NO: 1328665 - DNA, 15 bp, Homo sapiens
agcccttccctccgc

SEQ ID NO: 1328666 - DNA, 15 bp, Homo sapiens
tagcccttccctccg

SEQ ID NO: 1328667 - DNA, 15 bp, Homo sapiens
ctagcccttccctcc

SEQ ID NO: 1328668 - DNA, 15 bp, Homo sapiens
cctagcccttccctc

SEQ ID NO: 1328669 - DNA, 15 bp, Homo sapiens
acctagcccttccct

SEQ ID NO: 1328670 - DNA, 15 bp, Homo sapiens
cacctagcccttccc

SEQ ID NO: 1328671 - DNA, 15 bp, Homo sapiens
ccacctagcccttcc

SEQ ID NO: 1328672 - DNA, 15 bp, Homo sapiens
tccacctagcccttc

SEQ ID NO: 1328673 - DNA, 15 bp, Homo sapiens
ctccacctagccctt

SEQ ID NO: 1328674 - DNA, 15 bp, Homo sapiens
tctccacctagccct

SEQ ID NO: 1328675 - DNA, 15 bp, Homo sapiens
gtctccacctagccc

SEQ ID NO: 1328676 - DNA, 15 bp, Homo sapiens
tgtctccacctagcc

SEQ ID NO: 1328677 - DNA, 15 bp, Homo sapiens
ctgtctccacctagc

SEQ ID NO: 1328678 - DNA, 15 bp, Homo sapiens
cctgtctccacctag

SEQ ID NO: 1328679 - DNA, 15 bp, Homo sapiens
ccctgtctccaccta

SEQ ID NO: 1328680 - DNA, 15 bp, Homo sapiens
tccctgtctccacct

SEQ ID NO: 1328681 - DNA, 15 bp, Homo sapiens
atccctgtctccacc

SEQ ID NO: 1328682 - DNA, 15 bp, Homo sapiens
gatccctgtctccac

SEQ ID NO: 1328683 - DNA, 15 bp, Homo sapiens
tgatccctgtctcca

SEQ ID NO: 1328684 - DNA, 15 bp, Homo sapiens
ctgatccctgtctcc

SEQ ID NO: 1328685 - DNA, 15 bp, Homo sapiens
tctgatccctgtctc

SEQ ID NO: 1328686 - DNA, 15 bp, Homo sapiens
ctctgatccctgtct

SEQ ID NO: 1328687 - DNA, 15 bp, Homo sapiens
cctctgatccctgtc

SEQ ID NO: 1328688 - DNA, 15 bp, Homo sapiens
ccctctgatccctgt

SEQ ID NO: 1328689 - DNA, 15 bp, Homo sapiens
gccctctgatccctg

SEQ ID NO: 1328690 - DNA, 15 bp, Homo sapiens
agccctctgatccct

SEQ ID NO: 1328691 - DNA, 15 bp, Homo sapiens
cagccctctgatccc

SEQ ID NO: 1328692 - DNA, 15 bp, Homo sapiens
tcagccctctgatcc

SEQ ID NO: 1328693 - DNA, 15 bp, Homo sapiens
gtcagccctctgatc

SEQ ID NO: 1328694 - DNA, 15 bp, Homo sapiens
agtcagccctctgat

SEQ ID NO: 1328695 - DNA, 15 bp, Homo sapiens
tagtcagccctctga

SEQ ID NO: 1328696 - DNA, 15 bp, Homo sapiens
gtagtcagccctctg

SEQ ID NO: 1328697 - DNA, 15 bp, Homo sapiens
tgtagtcagccctct

SEQ ID NO: 1328698 - DNA, 15 bp, Homo sapiens
ctgtagtcagccctc

SEQ ID NO: 1328699 - DNA, 15 bp, Homo sapiens
tctgtagtcagccct

SEQ ID NO: 1328700 - DNA, 15 bp, Homo sapiens
ttctgtagtcagccc

SEQ ID NO: 1328701 - DNA, 15 bp, Homo sapiens
tttctgtagtcagcc

SEQ ID NO: 1328702 - DNA, 15 bp, Homo sapiens
ttttctgtagtcagc

SEQ ID NO: 1328703 - DNA, 15 bp, Homo sapiens
attttctgtagtcag

SEQ ID NO: 1328704 - DNA, 15 bp, Homo sapiens
cattttctgtagtca

SEQ ID NO: 1328705 - DNA, 15 bp, Homo sapiens
tcattttctgtagtc

SEQ ID NO: 1328706 - DNA, 15 bp, Homo sapiens
gtcattttctgtagt

SEQ ID NO: 1328707 - DNA, 15 bp, Homo sapiens
ggtcattttctgtag

SEQ ID NO: 1328708 - DNA, 15 bp, Homo sapiens
gggtcattttctgta

SEQ ID NO: 1328709 - DNA, 15 bp, Homo sapiens
tgggtcattttctgt

SEQ ID NO: 1328710 - DNA, 15 bp, Homo sapiens
atgggtcattttctg

SEQ ID NO: 1328711 - DNA, 15 bp, Homo sapiens
catgggtcattttct

SEQ ID NO: 1328712 - DNA, 15 bp, Homo sapiens
tcatgggtcattttc

SEQ ID NO: 1328713 - DNA, 15 bp, Homo sapiens
atcatgggtcatttt

SEQ ID NO: 1328714 - DNA, 15 bp, Homo sapiens
catcatgggtcattt

SEQ ID NO: 1328715 - DNA, 15 bp, Homo sapiens
ccatcatgggtcatt

SEQ ID NO: 1328716 - DNA, 15 bp, Homo sapiens
cccatcatgggtcat

SEQ ID NO: 1328717 - DNA, 15 bp, Homo sapiens
ccccatcatgggtca

SEQ ID NO: 1328718 - DNA, 15 bp, Homo sapiens
accccatcatgggtc

SEQ ID NO: 1328719 - DNA, 15 bp, Homo sapiens
caccccatcatgggt

SEQ ID NO: 1328720 - DNA, 15 bp, Homo sapiens
acaccccatcatggg

SEQ ID NO: 1328721 - DNA, 15 bp, Homo sapiens
tacaccccatcatgg

SEQ ID NO: 1328722 - DNA, 15 bp, Homo sapiens
atacaccccatcatg

SEQ ID NO: 1328723 - DNA, 15 bp, Homo sapiens
catacaccccatcat

SEQ ID NO: 1328724 - DNA, 15 bp, Homo sapiens
gcatacaccccatca

SEQ ID NO: 1328725 - DNA, 15 bp, Homo sapiens
tgcatacaccccatc

SEQ ID NO: 1328726 - DNA, 15 bp, Homo sapiens
ctgcatacaccccat

SEQ ID NO: 1328727 - DNA, 15 bp, Homo sapiens
gctgcatacacccca

SEQ ID NO: 1328728 - DNA, 15 bp, Homo sapiens
agctgcatacacccc

SEQ ID NO: 1328729 - DNA, 15 bp, Homo sapiens
cagctgcatacaccc

SEQ ID NO: 1328730 - DNA, 15 bp, Homo sapiens
ccagctgcatacacc

SEQ ID NO: 1328731 - DNA, 15 bp, Homo sapiens
tccagctgcatacac

SEQ ID NO: 1328732 - DNA, 15 bp, Homo sapiens
ttccagctgcataca

SEQ ID NO: 1328733 - DNA, 15 bp, Homo sapiens
tttccagctgcatac

SEQ ID NO: 1328734 - DNA, 15 bp, Homo sapiens
ttttccagctgcata

SEQ ID NO: 1328735 - DNA, 15 bp, Homo sapiens
cttttccagctgcat

SEQ ID NO: 1328736 - DNA, 15 bp, Homo sapiens
ccttttccagctgca

SEQ ID NO: 1328737 - DNA, 15 bp, Homo sapiens
gccttttccagctgc

SEQ ID NO: 1328738 - DNA, 15 bp, Homo sapiens
agccttttccagctg

SEQ ID NO: 1328739 - DNA, 15 bp, Homo sapiens
cagccttttccagct

SEQ ID NO: 1328740 - DNA, 15 bp, Homo sapiens
acagccttttccagc

SEQ ID NO: 1328741 - DNA, 15 bp, Homo sapiens
gacagccttttccag

SEQ ID NO: 1328742 - DNA, 15 bp, Homo sapiens
tgacagccttttcca

SEQ ID NO: 1328743 - DNA, 15 bp, Homo sapiens
ctgacagccttttcc

SEQ ID NO: 1328744 - DNA, 15 bp, Homo sapiens
cctgacagccttttc

SEQ ID NO: 1328745 - DNA, 15 bp, Homo sapiens
ccctgacagcctttt

SEQ ID NO: 1328746 - DNA, 15 bp, Homo sapiens
gccctgacagccttt

SEQ ID NO: 1328747 - DNA, 15 bp, Homo sapiens
tgccctgacagcctt

SEQ ID NO: 1328748 - DNA, 15 bp, Homo sapiens
ctgccctgacagcct

SEQ ID NO: 1328749 - DNA, 15 bp, Homo sapiens
tctgccctgacagcc

SEQ ID NO: 1328750 - DNA, 15 bp, Homo sapiens
gtctgccctgacagc

SEQ ID NO: 1328751 - DNA, 15 bp, Homo sapiens
agtctgccctgacag

SEQ ID NO: 1328752 - DNA, 15 bp, Homo sapiens
tagtctgccctgaca

SEQ ID NO: 1328753 - DNA, 15 bp, Homo sapiens
ttagtctgccctgac

SEQ ID NO: 1328754 - DNA, 15 bp, Homo sapiens
cttagtctgccctga

SEQ ID NO: 1328755 - DNA, 15 bp, Homo sapiens
ccttagtctgccctg

SEQ ID NO: 1328756 - DNA, 15 bp, Homo sapiens
accttagtctgccct

SEQ ID NO: 1328757 - DNA, 15 bp, Homo sapiens
gaccttagtctgccc

SEQ ID NO: 1328758 - DNA, 15 bp, Homo sapiens
agaccttagtctgcc

SEQ ID NO: 1328759 - DNA, 15 bp, Homo sapiens
cagaccttagtctgc

SEQ ID NO: 1328760 - DNA, 15 bp, Homo sapiens
acagaccttagtctg

SEQ ID NO: 1328761 - DNA, 15 bp, Homo sapiens
aacagaccttagtct

SEQ ID NO: 1328762 - DNA, 15 bp, Homo sapiens
gaacagaccttagtc

SEQ ID NO: 1328763 - DNA, 15 bp, Homo sapiens
ggaacagaccttagt

SEQ ID NO: 1328764 - DNA, 15 bp, Homo sapiens
gggaacagaccttag

SEQ ID NO: 1328765 - DNA, 15 bp, Homo sapiens
tgggaacagacctta

SEQ ID NO: 1328766 - DNA, 15 bp, Homo sapiens
ctgggaacagacctt

SEQ ID NO: 1328767 - DNA, 15 bp, Homo sapiens
tctgggaacagacct

SEQ ID NO: 1328768 - DNA, 15 bp, Homo sapiens
ctctgggaacagacc

SEQ ID NO: 1328769 - DNA, 15 bp, Homo sapiens
cctctgggaacagac

SEQ ID NO: 1328770 - DNA, 15 bp, Homo sapiens
gcctctgggaacaga

SEQ ID NO: 1328771 - DNA, 15 bp, Homo sapiens
ggcctctgggaacag

SEQ ID NO: 1328772 - DNA, 15 bp, Homo sapiens
aggcctctgggaaca

SEQ ID NO: 1328773 - DNA, 15 bp, Homo sapiens
aaggcctctgggaac

SEQ ID NO: 1328774 - DNA, 15 bp, Homo sapiens
aaaggcctctgggaa

SEQ ID NO: 1328775 - DNA, 15 bp, Homo sapiens
caaaggcctctggga

SEQ ID NO: 1328776 - DNA, 15 bp, Homo sapiens
tcaaaggcctctggg

SEQ ID NO: 1328777 - DNA, 15 bp, Homo sapiens
atcaaaggcctctgg

SEQ ID NO: 1328778 - DNA, 15 bp, Homo sapiens
gatcaaaggcctctg

SEQ ID NO: 1328779 - DNA, 15 bp, Homo sapiens
tgatcaaaggcctct

SEQ ID NO: 1328780 - DNA, 15 bp, Homo sapiens
gtgatcaaaggcctc

SEQ ID NO: 1328781 - DNA, 15 bp, Homo sapiens
ggtgatcaaaggcct

SEQ ID NO: 1328782 - DNA, 15 bp, Homo sapiens
tggtgatcaaaggcc

SEQ ID NO: 1328783 - DNA, 15 bp, Homo sapiens
gtggtgatcaaaggc

SEQ ID NO: 1328784 - DNA, 15 bp, Homo sapiens
tgtggtgatcaaagg

SEQ ID NO: 1328785 - DNA, 15 bp, Homo sapiens
ttgtggtgatcaaag

SEQ ID NO: 1328786 - DNA, 15 bp, Homo sapiens
attgtggtgatcaaa

SEQ ID NO: 1328787 - DNA, 15 bp, Homo sapiens
tattgtggtgatcaa

SEQ ID NO: 1328788 - DNA, 15 bp, Homo sapiens
atattgtggtgatca

SEQ ID NO: 1328789 - DNA, 15 bp, Homo sapiens
catattgtggtgatc

SEQ ID NO: 1328790 - DNA, 15 bp, Homo sapiens
ccatattgtggtgat

SEQ ID NO: 1328791 - DNA, 15 bp, Homo sapiens
tccatattgtggtga

SEQ ID NO: 1328792 - DNA, 15 bp, Homo sapiens
ttccatattgtggtg

SEQ ID NO: 1328793 - DNA, 15 bp, Homo sapiens
attccatattgtggt

SEQ ID NO: 1328794 - DNA, 15 bp, Homo sapiens
aattccatattgtgg

SEQ ID NO: 1328795 - DNA, 15 bp, Homo sapiens
taattccatattgtg

SEQ ID NO: 1328796 - DNA, 15 bp, Homo sapiens
ttaattccatattgt

SEQ ID NO: 1328797 - DNA, 15 bp, Homo sapiens
tttaattccatattg

SEQ ID NO: 1328798 - DNA, 15 bp, Homo sapiens
ttttaattccatatt

SEQ ID NO: 1328799 - DNA, 15 bp, Homo sapiens
attttaattccatat

SEQ ID NO: 1328800 - DNA, 15 bp, Homo sapiens
cattttaattccata

SEQ ID NO: 1328801 - DNA, 15 bp, Homo sapiens
acattttaattccat

SEQ ID NO: 1328802 - DNA, 15 bp, Homo sapiens
cacattttaattcca

SEQ ID NO: 1328803 - DNA, 15 bp, Homo sapiens
tcacattttaattcc

SEQ ID NO: 1328804 - DNA, 15 bp, Homo sapiens
ctcacattttaattc

SEQ ID NO: 1328805 - DNA, 15 bp, Homo sapiens
actcacattttaatt

SEQ ID NO: 1328806 - DNA, 15 bp, Homo sapiens
cactcacattttaat

SEQ ID NO: 1328807 - DNA, 15 bp, Homo sapiens
acactcacattttaa

SEQ ID NO: 1328808 - DNA, 15 bp, Homo sapiens
cacactcacatttta

SEQ ID NO: 1328809 - DNA, 15 bp, Homo sapiens
acacactcacatttt

SEQ ID NO: 1328810 - DNA, 15 bp, Homo sapiens
tacacactcacattt

SEQ ID NO: 1328811 - DNA, 15 bp, Homo sapiens
atacacactcacatt

SEQ ID NO: 1328812 - DNA, 15 bp, Homo sapiens
catacacactcacat

SEQ ID NO: 1328813 - DNA, 15 bp, Homo sapiens
acatacacactcaca

SEQ ID NO: 1328814 - DNA, 15 bp, Homo sapiens
gacatacacactcac

SEQ ID NO: 1328815 - DNA, 15 bp, Homo sapiens
agacatacacactca

SEQ ID NO: 1328816 - DNA, 15 bp, Homo sapiens
gagacatacacactc

SEQ ID NO: 1328817 - DNA, 15 bp, Homo sapiens
tgagacatacacact

SEQ ID NO: 1328818 - DNA, 15 bp, Homo sapiens
ttgagacatacacac

SEQ ID NO: 1328819 - DNA, 15 bp, Homo sapiens
cttgagacatacaca

SEQ ID NO: 1328820 - DNA, 15 bp, Homo sapiens
tcttgagacatacac

SEQ ID NO: 1328821 - DNA, 15 bp, Homo sapiens
atcttgagacataca

SEQ ID NO: 1328822 - DNA, 15 bp, Homo sapiens
tatcttgagacatac

SEQ ID NO: 1328823 - DNA, 15 bp, Homo sapiens
atatcttgagacata

SEQ ID NO: 1328824 - DNA, 15 bp, Homo sapiens
catatcttgagacat

SEQ ID NO: 1328825 - DNA, 15 bp, Homo sapiens
acatatcttgagaca

SEQ ID NO: 1328826 - DNA, 15 bp, Homo sapiens
gacatatcttgagac

SEQ ID NO: 1328827 - DNA, 15 bp, Homo sapiens
tgacatatcttgaga

SEQ ID NO: 1328828 - DNA, 15 bp, Homo sapiens
ttgacatatcttgag

SEQ ID NO: 1328829 - DNA, 15 bp, Homo sapiens
gttgacatatcttga

SEQ ID NO: 1328830 - DNA, 15 bp, Homo sapiens
agttgacatatcttg

SEQ ID NO: 1328831 - DNA, 15 bp, Homo sapiens
aagttgacatatctt

SEQ ID NO: 1328832 - DNA, 15 bp, Homo sapiens
aaagttgacatatct

SEQ ID NO: 1328833 - DNA, 15 bp, Homo sapiens
caaagttgacatatc

SEQ ID NO: 1328834 - DNA, 15 bp, Homo sapiens
ccaaagttgacatat

SEQ ID NO: 1328835 - DNA, 15 bp, Homo sapiens
gccaaagttgacata

SEQ ID NO: 1328836 - DNA, 15 bp, Homo sapiens
agccaaagttgacat

SEQ ID NO: 1328837 - DNA, 15 bp, Homo sapiens
tagccaaagttgaca

SEQ ID NO: 1328838 - DNA, 15 bp, Homo sapiens
atagccaaagttgac

SEQ ID NO: 1328839 - DNA, 15 bp, Homo sapiens
catagccaaagttga

SEQ ID NO: 1328840 - DNA, 15 bp, Homo sapiens
gcatagccaaagttg

SEQ ID NO: 1328841 - DNA, 15 bp, Homo sapiens
tgcatagccaaagtt

SEQ ID NO: 1328842 - DNA, 15 bp, Homo sapiens
atgcatagccaaagt

SEQ ID NO: 1328843 - DNA, 15 bp, Homo sapiens
aatgcatagccaaag

SEQ ID NO: 1328844 - DNA, 15 bp, Homo sapiens
taatgcatagccaaa

SEQ ID NO: 1328845 - DNA, 15 bp, Homo sapiens
ctaatgcatagccaa

SEQ ID NO: 1328846 - DNA, 15 bp, Homo sapiens
tctaatgcatagcca

SEQ ID NO: 1328847 - DNA, 15 bp, Homo sapiens
ttctaatgcatagcc

SEQ ID NO: 1328848 - DNA, 15 bp, Homo sapiens
gttctaatgcatagc

SEQ ID NO: 1328849 - DNA, 15 bp, Homo sapiens
ggttctaatgcatag

SEQ ID NO: 1328850 - DNA, 15 bp, Homo sapiens
gggttctaatgcata

SEQ ID NO: 1328851 - DNA, 15 bp, Homo sapiens
agggttctaatgcat

SEQ ID NO: 1328852 - DNA, 15 bp, Homo sapiens
cagggttctaatgca

SEQ ID NO: 1328853 - DNA, 15 bp, Homo sapiens
acagggttctaatgc

SEQ ID NO: 1328854 - DNA, 15 bp, Homo sapiens
tacagggttctaatg

SEQ ID NO: 1328855 - DNA, 15 bp, Homo sapiens
ttacagggttctaat

SEQ ID NO: 1328856 - DNA, 15 bp, Homo sapiens
cttacagggttctaa

SEQ ID NO: 1328857 - DNA, 15 bp, Homo sapiens
tcttacagggttcta

SEQ ID NO: 1328858 - DNA, 15 bp, Homo sapiens
ctcttacagggttct

SEQ ID NO: 1328859 - DNA, 15 bp, Homo sapiens
actcttacagggttc

SEQ ID NO: 1328860 - DNA, 15 bp, Homo sapiens
gactcttacagggtt

SEQ ID NO: 1328861 - DNA, 15 bp, Homo sapiens
agactcttacagggt

SEQ ID NO: 1328862 - DNA, 15 bp, Homo sapiens
aagactcttacaggg

SEQ ID NO: 1328863 - DNA, 15 bp, Homo sapiens
taagactcttacagg

SEQ ID NO: 1328864 - DNA, 15 bp, Homo sapiens
ttaagactcttacag

SEQ ID NO: 1328865 - DNA, 15 bp, Homo sapiens
tttaagactcttaca

SEQ ID NO: 1328866 - DNA, 15 bp, Homo sapiens
ttttaagactcttac

SEQ ID NO: 1328867 - DNA, 15 bp, Homo sapiens
tttttaagactctta

SEQ ID NO: 1328868 - DNA, 15 bp, Homo sapiens
ttttttaagactctt

SEQ ID NO: 1328869 - DNA, 15 bp, Homo sapiens
gttttttaagactct

SEQ ID NO: 1328870 - DNA, 15 bp, Homo sapiens
tgttttttaagactc

SEQ ID NO: 1328871 - DNA, 15 bp, Homo sapiens
ttgttttttaagact

SEQ ID NO: 1328872 - DNA, 15 bp, Homo sapiens
tttgttttttaagac

SEQ ID NO: 1328873 - DNA, 15 bp, Homo sapiens
ttttgttttttaaga

SEQ ID NO: 1328874 - DNA, 15 bp, Homo sapiens
gttttgttttttaag

SEQ ID NO: 1328875 - DNA, 15 bp, Homo sapiens
agttttgttttttaa

SEQ ID NO: 1328876 - DNA, 15 bp, Homo sapiens
tagttttgtttttta

SEQ ID NO: 1328877 - DNA, 15 bp, Homo sapiens
ctagttttgtttttt

SEQ ID NO: 1328878 - DNA, 15 bp, Homo sapiens
cctagttttgttttt

SEQ ID NO: 1328879 - DNA, 15 bp, Homo sapiens
ccctagttttgtttt

SEQ ID NO: 1328880 - DNA, 15 bp, Homo sapiens
accctagttttgttt

SEQ ID NO: 1328881 - DNA, 15 bp, Homo sapiens
gaccctagttttgtt

SEQ ID NO: 1328882 - DNA, 15 bp, Homo sapiens
ggaccctagttttgt

SEQ ID NO: 1328883 - DNA, 15 bp, Homo sapiens
tggaccctagttttg

SEQ ID NO: 1328884 - DNA, 15 bp, Homo sapiens
ttggaccctagtttt

SEQ ID NO: 1328885 - DNA, 15 bp, Homo sapiens
gttggaccctagttt

SEQ ID NO: 1328886 - DNA, 15 bp, Homo sapiens
tgttggaccctagtt

SEQ ID NO: 1328887 - DNA, 15 bp, Homo sapiens
gtgttggaccctagt

SEQ ID NO: 1328888 - DNA, 15 bp, Homo sapiens
agtgttggaccctag

SEQ ID NO: 1328889 - DNA, 15 bp, Homo sapiens
tagtgttggacccta

SEQ ID NO: 1328890 - DNA, 15 bp, Homo sapiens
ctagtgttggaccct

SEQ ID NO: 1328891 - DNA, 15 bp, Homo sapiens
tctagtgttggaccc

SEQ ID NO: 1328892 - DNA, 15 bp, Homo sapiens
gtctagtgttggacc

SEQ ID NO: 1328893 - DNA, 15 bp, Homo sapiens
tgtctagtgttggac

SEQ ID NO: 1328894 - DNA, 15 bp, Homo sapiens
atgtctagtgttgga

SEQ ID NO: 1328895 - DNA, 15 bp, Homo sapiens
tatgtctagtgttgg

SEQ ID NO: 1328896 - DNA, 15 bp, Homo sapiens
atatgtctagtgttg

SEQ ID NO: 1328897 - DNA, 15 bp, Homo sapiens
gatatgtctagtgtt

SEQ ID NO: 1328898 - DNA, 15 bp, Homo sapiens
tgatatgtctagtgt

SEQ ID NO: 1328899 - DNA, 15 bp, Homo sapiens
ttgatatgtctagtg

SEQ ID NO: 1328900 - DNA, 15 bp, Homo sapiens
cttgatatgtctagt

SEQ ID NO: 1328901 - DNA, 15 bp, Homo sapiens
ccttgatatgtctag

SEQ ID NO: 1328902 - DNA, 15 bp, Homo sapiens
accttgatatgtcta

SEQ ID NO: 1328903 - DNA, 15 bp, Homo sapiens
caccttgatatgtct

SEQ ID NO: 1328904 - DNA, 15 bp, Homo sapiens
ccaccttgatatgtc

SEQ ID NO: 1328905 - DNA, 15 bp, Homo sapiens
tccaccttgatatgt

SEQ ID NO: 1328906 - DNA, 15 bp, Homo sapiens
ttccaccttgatatg

SEQ ID NO: 1328907 - DNA, 15 bp, Homo sapiens
attccaccttgatat

SEQ ID NO: 1328908 - DNA, 15 bp, Homo sapiens
gattccaccttgata

SEQ ID NO: 1328909 - DNA, 15 bp, Homo sapiens
agattccaccttgat

SEQ ID NO: 1328910 - DNA, 15 bp, Homo sapiens
gagattccaccttga

SEQ ID NO: 1328911 - DNA, 15 bp, Homo sapiens
agagattccaccttg

SEQ ID NO: 1328912 - DNA, 15 bp, Homo sapiens
cagagattccacctt

SEQ ID NO: 1328913 - DNA, 15 bp, Homo sapiens
ccagagattccacct

SEQ ID NO: 1328914 - DNA, 15 bp, Homo sapiens
accagagattccacc

SEQ ID NO: 1328915 - DNA, 15 bp, Homo sapiens
gaccagagattccac

SEQ ID NO: 1328916 - DNA, 15 bp, Homo sapiens
tgaccagagattcca

SEQ ID NO: 1328917 - DNA, 15 bp, Homo sapiens
ctgaccagagattcc

SEQ ID NO: 1328918 - DNA, 15 bp, Homo sapiens
tctgaccagagattc

SEQ ID NO: 1328919 - DNA, 15 bp, Homo sapiens
ctctgaccagagatt

SEQ ID NO: 1328920 - DNA, 15 bp, Homo sapiens
tctctgaccagagat

SEQ ID NO: 1328921 - DNA, 15 bp, Homo sapiens
atctctgaccagaga

SEQ ID NO: 1328922 - DNA, 15 bp, Homo sapiens
gatctctgaccagag

SEQ ID NO: 1328923 - DNA, 15 bp, Homo sapiens
ggatctctgaccaga

SEQ ID NO: 1328924 - DNA, 15 bp, Homo sapiens
tggatctctgaccag

SEQ ID NO: 1328925 - DNA, 15 bp, Homo sapiens
atggatctctgacca

SEQ ID NO: 1328926 - DNA, 15 bp, Homo sapiens
aatggatctctgacc

SEQ ID NO: 1328927 - DNA, 15 bp, Homo sapiens
gaatggatctctgac

SEQ ID NO: 1328928 - DNA, 15 bp, Homo sapiens
tgaatggatctctga

SEQ ID NO: 1328929 - DNA, 15 bp, Homo sapiens
atgaatggatctctg

SEQ ID NO: 1328930 - DNA, 15 bp, Homo sapiens
catgaatggatctct

SEQ ID NO: 1328931 - DNA, 15 bp, Homo sapiens
ccatgaatggatctc

SEQ ID NO: 1328932 - DNA, 15 bp, Homo sapiens
tccatgaatggatct

SEQ ID NO: 1328933 - DNA, 15 bp, Homo sapiens
ctccatgaatggatc

SEQ ID NO: 1328934 - DNA, 15 bp, Homo sapiens
gctccatgaatggat

SEQ ID NO: 1328935 - DNA, 15 bp, Homo sapiens
agctccatgaatgga

SEQ ID NO: 1328936 - DNA, 15 bp, Homo sapiens
gagctccatgaatgg

SEQ ID NO: 1328937 - DNA, 15 bp, Homo sapiens
ggagctccatgaatg

SEQ ID NO: 1328938 - DNA, 15 bp, Homo sapiens
gggagctccatgaat

SEQ ID NO: 1328939 - DNA, 15 bp, Homo sapiens
tgggagctccatgaa

SEQ ID NO: 1328940 - DNA, 15 bp, Homo sapiens
ttgggagctccatga

SEQ ID NO: 1328941 - DNA, 15 bp, Homo sapiens
cttgggagctccatg

SEQ ID NO: 1328942 - DNA, 15 bp, Homo sapiens
ccttgggagctccat

SEQ ID NO: 1328943 - DNA, 15 bp, Homo sapiens
accttgggagctcca

SEQ ID NO: 1328944 - DNA, 15 bp, Homo sapiens
caccttgggagctcc

SEQ ID NO: 1328945 - DNA, 15 bp, Homo sapiens
tcaccttgggagctc

SEQ ID NO: 1328946 - DNA, 15 bp, Homo sapiens
atcaccttgggagct

SEQ ID NO: 1328947 - DNA, 15 bp, Homo sapiens
aatcaccttgggagc

SEQ ID NO: 1328948 - DNA, 15 bp, Homo sapiens
gaatcaccttgggag

SEQ ID NO: 1328949 - DNA, 15 bp, Homo sapiens
agaatcaccttggga

SEQ ID NO: 1328950 - DNA, 15 bp, Homo sapiens
tagaatcaccttggg

SEQ ID NO: 1328951 - DNA, 15 bp, Homo sapiens
ttagaatcaccttgg

SEQ ID NO: 1328952 - DNA, 15 bp, Homo sapiens
cttagaatcaccttg

SEQ ID NO: 1328953 - DNA, 15 bp, Homo sapiens
ccttagaatcacctt

SEQ ID NO: 1328954 - DNA, 15 bp, Homo sapiens
accttagaatcacct

SEQ ID NO: 1328955 - DNA, 15 bp, Homo sapiens
aaccttagaatcacc

SEQ ID NO: 1328956 - DNA, 15 bp, Homo sapiens
caaccttagaatcac

SEQ ID NO: 1328957 - DNA, 15 bp, Homo sapiens
ccaaccttagaatca

SEQ ID NO: 1328958 - DNA, 15 bp, Homo sapiens
tccaaccttagaatc

SEQ ID NO: 1328959 - DNA, 15 bp, Homo sapiens
ttccaaccttagaat

SEQ ID NO: 1328960 - DNA, 15 bp, Homo sapiens
tttccaaccttagaa

SEQ ID NO: 1328961 - DNA, 15 bp, Homo sapiens
atttccaaccttaga

SEQ ID NO: 1328962 - DNA, 15 bp, Homo sapiens
aatttccaaccttag

SEQ ID NO: 1328963 - DNA, 15 bp, Homo sapiens
taatttccaacctta

SEQ ID NO: 1328964 - DNA, 15 bp, Homo sapiens
ataatttccaacctt

SEQ ID NO: 1328965 - DNA, 15 bp, Homo sapiens
aataatttccaacct

SEQ ID NO: 1328966 - DNA, 15 bp, Homo sapiens
caataatttccaacc

SEQ ID NO: 1328967 - DNA, 15 bp, Homo sapiens
gcaataatttccaac

SEQ ID NO: 1328968 - DNA, 15 bp, Homo sapiens
agcaataatttccaa

SEQ ID NO: 1328969 - DNA, 15 bp, Homo sapiens
cagcaataatttcca

SEQ ID NO: 1328970 - DNA, 15 bp, Homo sapiens
acagcaataatttcc

SEQ ID NO: 1328971 - DNA, 15 bp, Homo sapiens
aacagcaataatttc

SEQ ID NO: 1328972 - DNA, 15 bp, Homo sapiens
caacagcaataattt

SEQ ID NO: 1328973 - DNA, 15 bp, Homo sapiens
ccaacagcaataatt

SEQ ID NO: 1328974 - DNA, 15 bp, Homo sapiens
gccaacagcaataat

SEQ ID NO: 1328975 - DNA, 15 bp, Homo sapiens
tgccaacagcaataa

SEQ ID NO: 1328976 - DNA, 15 bp, Homo sapiens
ttgccaacagcaata

SEQ ID NO: 1328977 - DNA, 15 bp, Homo sapiens
attgccaacagcaat

SEQ ID NO: 1328978 - DNA, 15 bp, Homo sapiens
cattgccaacagcaa

SEQ ID NO: 1328979 - DNA, 15 bp, Homo sapiens
ccattgccaacagca

SEQ ID NO: 1328980 - DNA, 15 bp, Homo sapiens
cccattgccaacagc

SEQ ID NO: 1328981 - DNA, 15 bp, Homo sapiens
tcccattgccaacag

SEQ ID NO: 1328982 - DNA, 15 bp, Homo sapiens
ttcccattgccaaca

SEQ ID NO: 1328983 - DNA, 15 bp, Homo sapiens
attcccattgccaac

SEQ ID NO: 1328984 - DNA, 15 bp, Homo sapiens
gattcccattgccaa

SEQ ID NO: 1328985 - DNA, 15 bp, Homo sapiens
agattcccattgcca

SEQ ID NO: 1328986 - DNA, 15 bp, Homo sapiens
aagattcccattgcc

SEQ ID NO: 1328987 - DNA, 15 bp, Homo sapiens
aaagattcccattgc

SEQ ID NO: 1328988 - DNA, 15 bp, Homo sapiens
taaagattcccattg

SEQ ID NO: 1328989 - DNA, 15 bp, Homo sapiens
ctaaagattcccatt

SEQ ID NO: 1328990 - DNA, 15 bp, Homo sapiens
cctaaagattcccat

SEQ ID NO: 1328991 - DNA, 15 bp, Homo sapiens
ccctaaagattccca

SEQ ID NO: 1328992 - DNA, 15 bp, Homo sapiens
gccctaaagattccc

SEQ ID NO: 1328993 - DNA, 15 bp, Homo sapiens
tgccctaaagattcc

SEQ ID NO: 1328994 - DNA, 15 bp, Homo sapiens
atgccctaaagattc

SEQ ID NO: 1328995 - DNA, 15 bp, Homo sapiens
catgccctaaagatt

SEQ ID NO: 1328996 - DNA, 15 bp, Homo sapiens
tcatgccctaaagat

SEQ ID NO: 1328997 - DNA, 15 bp, Homo sapiens
atcatgccctaaaga

SEQ ID NO: 1328998 - DNA, 15 bp, Homo sapiens
gatcatgccctaaag

SEQ ID NO: 1328999 - DNA, 15 bp, Homo sapiens
tgatcatgccctaaa

SEQ ID NO: 1329000 - DNA, 15 bp, Homo sapiens
ctgatcatgccctaa

SEQ ID NO: 1329001 - DNA, 15 bp, Homo sapiens
tctgatcatgcccta

SEQ ID NO: 1329002 - DNA, 15 bp, Homo sapiens
ctctgatcatgccct

SEQ ID NO: 1329003 - DNA, 15 bp, Homo sapiens
actctgatcatgccc

SEQ ID NO: 1329004 - DNA, 15 bp, Homo sapiens
aactctgatcatgcc

SEQ ID NO: 1329005 - DNA, 15 bp, Homo sapiens
aaactctgatcatgc

SEQ ID NO: 1329006 - DNA, 15 bp, Homo sapiens
gaaactctgatcatg

SEQ ID NO: 1329007 - DNA, 15 bp, Homo sapiens
tgaaactctgatcat

SEQ ID NO: 1329008 - DNA, 15 bp, Homo sapiens
ctgaaactctgatca

SEQ ID NO: 1329009 - DNA, 15 bp, Homo sapiens
tctgaaactctgatc

SEQ ID NO: 1329010 - DNA, 15 bp, Homo sapiens
ctctgaaactctgat

SEQ ID NO: 1329011 - DNA, 15 bp, Homo sapiens
actctgaaactctga

SEQ ID NO: 1329012 - DNA, 15 bp, Homo sapiens
aactctgaaactctg

SEQ ID NO: 1329013 - DNA, 15 bp, Homo sapiens
caactctgaaactct

SEQ ID NO: 1329014 - DNA, 15 bp, Homo sapiens
ccaactctgaaactc

SEQ ID NO: 1329015 - DNA, 15 bp, Homo sapiens
cccaactctgaaact

SEQ ID NO: 1329016 - DNA, 15 bp, Homo sapiens
gcccaactctgaaac

SEQ ID NO: 1329017 - DNA, 15 bp, Homo sapiens
agcccaactctgaaa

SEQ ID NO: 1329018 - DNA, 15 bp, Homo sapiens
cagcccaactctgaa

SEQ ID NO: 1329019 - DNA, 15 bp, Homo sapiens
ccagcccaactctga

SEQ ID NO: 1329020 - DNA, 15 bp, Homo sapiens
cccagcccaactctg

SEQ ID NO: 1329021 - DNA, 15 bp, Homo sapiens
tcccagcccaactct

SEQ ID NO: 1329022 - DNA, 15 bp, Homo sapiens
ttcccagcccaactc

SEQ ID NO: 1329023 - DNA, 15 bp, Homo sapiens
cttcccagcccaact

SEQ ID NO: 1329024 - DNA, 15 bp, Homo sapiens
tcttcccagcccaac

SEQ ID NO: 1329025 - DNA, 15 bp, Homo sapiens
atcttcccagcccaa

SEQ ID NO: 1329026 - DNA, 15 bp, Homo sapiens
catcttcccagccca

SEQ ID NO: 1329027 - DNA, 15 bp, Homo sapiens
ccatcttcccagccc

SEQ ID NO: 1329028 - DNA, 15 bp, Homo sapiens
tccatcttcccagcc

SEQ ID NO: 1329029 - DNA, 15 bp, Homo sapiens
ctccatcttcccagc

SEQ ID NO: 1329030 - DNA, 15 bp, Homo sapiens
gctccatcttcccag

SEQ ID NO: 1329031 - DNA, 15 bp, Homo sapiens
ggctccatcttccca

SEQ ID NO: 1329032 - DNA, 15 bp, Homo sapiens
aggctccatcttccc

SEQ ID NO: 1329033 - DNA, 15 bp, Homo sapiens
taggctccatcttcc

SEQ ID NO: 1329034 - DNA, 15 bp, Homo sapiens
gtaggctccatcttc

SEQ ID NO: 1329035 - DNA, 15 bp, Homo sapiens
tgtaggctccatctt

SEQ ID NO: 1329036 - DNA, 15 bp, Homo sapiens
ctgtaggctccatct

SEQ ID NO: 1329037 - DNA, 15 bp, Homo sapiens
cctgtaggctccatc

SEQ ID NO: 1329038 - DNA, 15 bp, Homo sapiens
acctgtaggctccat

SEQ ID NO: 1329039 - DNA, 15 bp, Homo sapiens
cacctgtaggctcca

SEQ ID NO: 1329040 - DNA, 15 bp, Homo sapiens
acacctgtaggctcc

SEQ ID NO: 1329041 - DNA, 15 bp, Homo sapiens
cacacctgtaggctc

SEQ ID NO: 1329042 - DNA, 15 bp, Homo sapiens
acacacctgtaggct

SEQ ID NO: 1329043 - DNA, 15 bp, Homo sapiens
cacacacctgtaggc

SEQ ID NO: 1329044 - DNA, 15 bp, Homo sapiens
ccacacacctgtagg

SEQ ID NO: 1329045 - DNA, 15 bp, Homo sapiens
cccacacacctgtag

SEQ ID NO: 1329046 - DNA, 15 bp, Homo sapiens
acccacacacctgta

SEQ ID NO: 1329047 - DNA, 15 bp, Homo sapiens
gacccacacacctgt

SEQ ID NO: 1329048 - DNA, 15 bp, Homo sapiens
ggacccacacacctg

SEQ ID NO: 1329049 - DNA, 15 bp, Homo sapiens
tggacccacacacct

SEQ ID NO: 1329050 - DNA, 15 bp, Homo sapiens
ctggacccacacacc

SEQ ID NO: 1329051 - DNA, 15 bp, Homo sapiens
actggacccacacac

SEQ ID NO: 1329052 - DNA, 15 bp, Homo sapiens
aactggacccacaca

SEQ ID NO: 1329053 - DNA, 15 bp, Homo sapiens
taactggacccacac

SEQ ID NO: 1329054 - DNA, 15 bp, Homo sapiens
gtaactggacccaca

SEQ ID NO: 1329055 - DNA, 15 bp, Homo sapiens
agtaactggacccac

SEQ ID NO: 1329056 - DNA, 15 bp, Homo sapiens
tagtaactggaccca

SEQ ID NO: 1329057 - DNA, 15 bp, Homo sapiens
ctagtaactggaccc

SEQ ID NO: 1329058 - DNA, 15 bp, Homo sapiens
tctagtaactggacc

SEQ ID NO: 1329059 - DNA, 15 bp, Homo sapiens
gtctagtaactggac

SEQ ID NO: 1329060 - DNA, 15 bp, Homo sapiens
tgtctagtaactgga

SEQ ID NO: 1329061 - DNA, 15 bp, Homo sapiens
ctgtctagtaactgg

SEQ ID NO: 1329062 - DNA, 15 bp, Homo sapiens
tctgtctagtaactg

SEQ ID NO: 1329063 - DNA, 15 bp, Homo sapiens
ctctgtctagtaact

SEQ ID NO: 1329064 - DNA, 15 bp, Homo sapiens
cctctgtctagtaac

SEQ ID NO: 1329065 - DNA, 15 bp, Homo sapiens
tcctctgtctagtaa

SEQ ID NO: 1329066 - DNA, 15 bp, Homo sapiens
ctcctctgtctagta

SEQ ID NO: 1329067 - DNA, 15 bp, Homo sapiens
gctcctctgtctagt

SEQ ID NO: 1329068 - DNA, 15 bp, Homo sapiens
ggctcctctgtctag

SEQ ID NO: 1329069 - DNA, 15 bp, Homo sapiens
tggctcctctgtcta

SEQ ID NO: 1329070 - DNA, 15 bp, Homo sapiens
ttggctcctctgtct

SEQ ID NO: 1329071 - DNA, 15 bp, Homo sapiens
cttggctcctctgtc

SEQ ID NO: 1329072 - DNA, 15 bp, Homo sapiens
ccttggctcctctgt

SEQ ID NO: 1329073 - DNA, 15 bp, Homo sapiens
gccttggctcctctg

SEQ ID NO: 1329074 - DNA, 15 bp, Homo sapiens
ggccttggctcctct

SEQ ID NO: 1329075 - DNA, 15 bp, Homo sapiens
cggccttggctcctc

SEQ ID NO: 1329076 - DNA, 15 bp, Homo sapiens
gcggccttggctcct

SEQ ID NO: 1329077 - DNA, 15 bp, Homo sapiens
tgcggccttggctcc

SEQ ID NO: 1329078 - DNA, 15 bp, Homo sapiens
ctgcggccttggctc

SEQ ID NO: 1329079 - DNA, 15 bp, Homo sapiens
gctgcggccttggct

SEQ ID NO: 1329080 - DNA, 15 bp, Homo sapiens
tgctgcggccttggc

SEQ ID NO: 1329081 - DNA, 15 bp, Homo sapiens
ttgctgcggccttgg

SEQ ID NO: 1329082 - DNA, 15 bp, Homo sapiens
cttgctgcggccttg

SEQ ID NO: 1329083 - DNA, 15 bp, Homo sapiens
gcttgctgcggcctt

SEQ ID NO: 1329084 - DNA, 15 bp, Homo sapiens
tgcttgctgcggcct

SEQ ID NO: 1329085 - DNA, 15 bp, Homo sapiens
gtgcttgctgcggcc

SEQ ID NO: 1329086 - DNA, 15 bp, Homo sapiens
agtgcttgctgcggc

SEQ ID NO: 1329087 - DNA, 15 bp, Homo sapiens
gagtgcttgctgcgg

SEQ ID NO: 1329088 - DNA, 15 bp, Homo sapiens
tgagtgcttgctgcg

SEQ ID NO: 1329089 - DNA, 15 bp, Homo sapiens
gtgagtgcttgctgc

SEQ ID NO: 1329090 - DNA, 15 bp, Homo sapiens
cgtgagtgcttgctg

SEQ ID NO: 1329091 - DNA, 15 bp, Homo sapiens
tcgtgagtgcttgct

SEQ ID NO: 1329092 - DNA, 15 bp, Homo sapiens
gtcgtgagtgcttgc

SEQ ID NO: 1329093 - DNA, 15 bp, Homo sapiens
ggtcgtgagtgcttg

SEQ ID NO: 1329094 - DNA, 15 bp, Homo sapiens
tggtcgtgagtgctt

SEQ ID NO: 1329095 - DNA, 15 bp, Homo sapiens
ttggtcgtgagtgct

SEQ ID NO: 1329096 - DNA, 15 bp, Homo sapiens
cttggtcgtgagtgc

SEQ ID NO: 1329097 - DNA, 15 bp, Homo sapiens
tcttggtcgtgagtg

SEQ ID NO: 1329098 - DNA, 15 bp, Homo sapiens
atcttggtcgtgagt

SEQ ID NO: 1329099 - DNA, 15 bp, Homo sapiens
catcttggtcgtgag

SEQ ID NO: 1329100 - DNA, 15 bp, Homo sapiens
acatcttggtcgtga

SEQ ID NO: 1329101 - DNA, 15 bp, Homo sapiens
cacatcttggtcgtg

SEQ ID NO: 1329102 - DNA, 15 bp, Homo sapiens
ccacatcttggtcgt

SEQ ID NO: 1329103 - DNA, 15 bp, Homo sapiens
gccacatcttggtcg

SEQ ID NO: 1329104 - DNA, 15 bp, Homo sapiens
ggccacatcttggtc

SEQ ID NO: 1329105 - DNA, 15 bp, Homo sapiens
aggccacatcttggt

SEQ ID NO: 1329106 - DNA, 15 bp, Homo sapiens
caggccacatcttgg

SEQ ID NO: 1329107 - DNA, 15 bp, Homo sapiens
gcaggccacatcttg

SEQ ID NO: 1329108 - DNA, 15 bp, Homo sapiens
tgcaggccacatctt

SEQ ID NO: 1329109 - DNA, 15 bp, Homo sapiens
ctgcaggccacatct

SEQ ID NO: 1329110 - DNA, 15 bp, Homo sapiens
gctgcaggccacatc

SEQ ID NO: 1329111 - DNA, 15 bp, Homo sapiens
tgctgcaggccacat

SEQ ID NO: 1329112 - DNA, 15 bp, Homo sapiens
ctgctgcaggccaca

SEQ ID NO: 1329113 - DNA, 15 bp, Homo sapiens
cctgctgcaggccac

SEQ ID NO: 1329114 - DNA, 15 bp, Homo sapiens
ccctgctgcaggcca

SEQ ID NO: 1329115 - DNA, 15 bp, Homo sapiens
cccctgctgcaggcc

SEQ ID NO: 1329116 - DNA, 15 bp, Homo sapiens
tcccctgctgcaggc

SEQ ID NO: 1329117 - DNA, 15 bp, Homo sapiens
ctcccctgctgcagg

SEQ ID NO: 1329118 - DNA, 15 bp, Homo sapiens
tctcccctgctgcag

SEQ ID NO: 1329119 - DNA, 15 bp, Homo sapiens
atctcccctgctgca

SEQ ID NO: 1329120 - DNA, 15 bp, Homo sapiens
catctcccctgctgc

SEQ ID NO: 1329121 - DNA, 15 bp, Homo sapiens
gcatctcccctgctg

SEQ ID NO: 1329122 - DNA, 15 bp, Homo sapiens
agcatctcccctgct

SEQ ID NO: 1329123 - DNA, 15 bp, Homo sapiens
cagcatctcccctgc

SEQ ID NO: 1329124 - DNA, 15 bp, Homo sapiens
tcagcatctcccctg

SEQ ID NO: 1329125 - DNA, 15 bp, Homo sapiens
gtcagcatctcccct

SEQ ID NO: 1329126 - DNA, 15 bp, Homo sapiens
tgtcagcatctcccc

SEQ ID NO: 1329127 - DNA, 15 bp, Homo sapiens
ctgtcagcatctccc

SEQ ID NO: 1329128 - DNA, 15 bp, Homo sapiens
actgtcagcatctcc

SEQ ID NO: 1329129 - DNA, 15 bp, Homo sapiens
gactgtcagcatctc

SEQ ID NO: 1329130 - DNA, 15 bp, Homo sapiens
ggactgtcagcatct

SEQ ID NO: 1329131 - DNA, 15 bp, Homo sapiens
cggactgtcagcatc

SEQ ID NO: 1329132 - DNA, 15 bp, Homo sapiens
ccggactgtcagcat

SEQ ID NO: 1329133 - DNA, 15 bp, Homo sapiens
tccggactgtcagca

SEQ ID NO: 1329134 - DNA, 15 bp, Homo sapiens
gtccggactgtcagc

SEQ ID NO: 1329135 - DNA, 15 bp, Homo sapiens
agtccggactgtcag

SEQ ID NO: 1329136 - DNA, 15 bp, Homo sapiens
aagtccggactgtca

SEQ ID NO: 1329137 - DNA, 15 bp, Homo sapiens
caagtccggactgtc

SEQ ID NO: 1329138 - DNA, 15 bp, Homo sapiens
tcaagtccggactgt

SEQ ID NO: 1329139 - DNA, 15 bp, Homo sapiens
atcaagtccggactg

SEQ ID NO: 1329140 - DNA, 15 bp, Homo sapiens
catcaagtccggact

SEQ ID NO: 1329141 - DNA, 15 bp, Homo sapiens
ccatcaagtccggac

SEQ ID NO: 1329142 - DNA, 15 bp, Homo sapiens
gccatcaagtccgga

SEQ ID NO: 1329143 - DNA, 15 bp, Homo sapiens
agccatcaagtccgg

SEQ ID NO: 1329144 - DNA, 15 bp, Homo sapiens
cagccatcaagtccg

SEQ ID NO: 1329145 - DNA, 15 bp, Homo sapiens
tcagccatcaagtcc

SEQ ID NO: 1329146 - DNA, 15 bp, Homo sapiens
atcagccatcaagtc

SEQ ID NO: 1329147 - DNA, 15 bp, Homo sapiens
catcagccatcaagt

SEQ ID NO: 1329148 - DNA, 15 bp, Homo sapiens
ccatcagccatcaag

SEQ ID NO: 1329149 - DNA, 15 bp, Homo sapiens
cccatcagccatcaa

SEQ ID NO: 1329150 - DNA, 15 bp, Homo sapiens
tcccatcagccatca

SEQ ID NO: 1329151 - DNA, 15 bp, Homo sapiens
gtcccatcagccatc

SEQ ID NO: 1329152 - DNA, 15 bp, Homo sapiens
cgtcccatcagccat

SEQ ID NO: 1329153 - DNA, 15 bp, Homo sapiens
ccgtcccatcagcca

SEQ ID NO: 1329154 - DNA, 15 bp, Homo sapiens
cccgtcccatcagcc

SEQ ID NO: 1329155 - DNA, 15 bp, Homo sapiens
tcccgtcccatcagc

SEQ ID NO: 1329156 - DNA, 15 bp, Homo sapiens
ttcccgtcccatcag

SEQ ID NO: 1329157 - DNA, 15 bp, Homo sapiens
cttcccgtcccatca

SEQ ID NO: 1329158 - DNA, 15 bp, Homo sapiens
ccttcccgtcccatc

SEQ ID NO: 1329159 - DNA, 15 bp, Homo sapiens
cccttcccgtcccat

SEQ ID NO: 1329160 - DNA, 15 bp, Homo sapiens
ccccttcccgtccca

SEQ ID NO: 1329161 - DNA, 15 bp, Homo sapiens
gccccttcccgtccc

SEQ ID NO: 1329162 - DNA, 15 bp, Homo sapiens
tgccccttcccgtcc

SEQ ID NO: 1329163 - DNA, 15 bp, Homo sapiens
ctgccccttcccgtc

SEQ ID NO: 1329164 - DNA, 15 bp, Homo sapiens
cctgccccttcccgt

SEQ ID NO: 1329165 - DNA, 15 bp, Homo sapiens
ccctgccccttcccg

SEQ ID NO: 1329166 - DNA, 15 bp, Homo sapiens
accctgccccttccc

SEQ ID NO: 1329167 - DNA, 15 bp, Homo sapiens
caccctgccccttcc

SEQ ID NO: 1329168 - DNA, 15 bp, Homo sapiens
gcaccctgccccttc

SEQ ID NO: 1329169 - DNA, 15 bp, Homo sapiens
ggcaccctgcccctt

SEQ ID NO: 1329170 - DNA, 15 bp, Homo sapiens
aggcaccctgcccct

SEQ ID NO: 1329171 - DNA, 15 bp, Homo sapiens
caggcaccctgcccc

SEQ ID NO: 1329172 - DNA, 15 bp, Homo sapiens
ccaggcaccctgccc

SEQ ID NO: 1329173 - DNA, 15 bp, Homo sapiens
cccaggcaccctgcc

SEQ ID NO: 1329174 - DNA, 15 bp, Homo sapiens
tcccaggcaccctgc

SEQ ID NO: 1329175 - DNA, 15 bp, Homo sapiens
atcccaggcaccctg

SEQ ID NO: 1329176 - DNA, 15 bp, Homo sapiens
catcccaggcaccct

SEQ ID NO: 1329177 - DNA, 15 bp, Homo sapiens
ccatcccaggcaccc

SEQ ID NO: 1329178 - DNA, 15 bp, Homo sapiens
cccatcccaggcacc

SEQ ID NO: 1329179 - DNA, 15 bp, Homo sapiens
ccccatcccaggcac

SEQ ID NO: 1329180 - DNA, 15 bp, Homo sapiens
gccccatcccaggca

SEQ ID NO: 1329181 - DNA, 15 bp, Homo sapiens
cgccccatcccaggc

SEQ ID NO: 1329182 - DNA, 15 bp, Homo sapiens
acgccccatcccagg

SEQ ID NO: 1329183 - DNA, 15 bp, Homo sapiens
cacgccccatcccag

SEQ ID NO: 1329184 - DNA, 15 bp, Homo sapiens
ccacgccccatccca

SEQ ID NO: 1329185 - DNA, 15 bp, Homo sapiens
tccacgccccatccc

SEQ ID NO: 1329186 - DNA, 15 bp, Homo sapiens
ctccacgccccatcc

SEQ ID NO: 1329187 - DNA, 15 bp, Homo sapiens
cctccacgccccatc

SEQ ID NO: 1329188 - DNA, 15 bp, Homo sapiens
gcctccacgccccat

SEQ ID NO: 1329189 - DNA, 15 bp, Homo sapiens
agcctccacgcccca

SEQ ID NO: 1329190 - DNA, 15 bp, Homo sapiens
cagcctccacgcccc

SEQ ID NO: 1329191 - DNA, 15 bp, Homo sapiens
ccagcctccacgccc

SEQ ID NO: 1329192 - DNA, 15 bp, Homo sapiens
cccagcctccacgcc

SEQ ID NO: 1329193 - DNA, 15 bp, Homo sapiens
ccccagcctccacgc

SEQ ID NO: 1329194 - DNA, 15 bp, Homo sapiens
cccccagcctccacg

SEQ ID NO: 1329195 - DNA, 15 bp, Homo sapiens
tcccccagcctccac

SEQ ID NO: 1329196 - DNA, 15 bp, Homo sapiens
atcccccagcctcca

SEQ ID NO: 1329197 - DNA, 15 bp, Homo sapiens
gatcccccagcctcc

SEQ ID NO: 1329198 - DNA, 15 bp, Homo sapiens
agatcccccagcctc

SEQ ID NO: 1329199 - DNA, 15 bp, Homo sapiens
aagatcccccagcct

SEQ ID NO: 1329200 - DNA, 15 bp, Homo sapiens
caagatcccccagcc

SEQ ID NO: 1329201 - DNA, 15 bp, Homo sapiens
tcaagatcccccagc

SEQ ID NO: 1329202 - DNA, 15 bp, Homo sapiens
ctcaagatcccccag

SEQ ID NO: 1329203 - DNA, 15 bp, Homo sapiens
tctcaagatccccca

SEQ ID NO: 1329204 - DNA, 15 bp, Homo sapiens
ctctcaagatccccc

SEQ ID NO: 1329205 - DNA, 15 bp, Homo sapiens
actctcaagatcccc

SEQ ID NO: 1329206 - DNA, 15 bp, Homo sapiens
cactctcaagatccc

SEQ ID NO: 1329207 - DNA, 15 bp, Homo sapiens
gcactctcaagatcc

SEQ ID NO: 1329208 - DNA, 15 bp, Homo sapiens
agcactctcaagatc

SEQ ID NO: 1329209 - DNA, 15 bp, Homo sapiens
cagcactctcaagat

SEQ ID NO: 1329210 - DNA, 15 bp, Homo sapiens
tcagcactctcaaga

SEQ ID NO: 1329211 - DNA, 15 bp, Homo sapiens
ttcagcactctcaag

SEQ ID NO: 1329212 - DNA, 15 bp, Homo sapiens
cttcagcactctcaa

SEQ ID NO: 1329213 - DNA, 15 bp, Homo sapiens
ccttcagcactctca

SEQ ID NO: 1329214 - DNA, 15 bp, Homo sapiens
accttcagcactctc

SEQ ID NO: 1329215 - DNA, 15 bp, Homo sapiens
gaccttcagcactct

SEQ ID NO: 1329216 - DNA, 15 bp, Homo sapiens
tgaccttcagcactc

SEQ ID NO: 1329217 - DNA, 15 bp, Homo sapiens
ttgaccttcagcact

SEQ ID NO: 1329218 - DNA, 15 bp, Homo sapiens
attgaccttcagcac

SEQ ID NO: 1329219 - DNA, 15 bp, Homo sapiens
cattgaccttcagca

SEQ ID NO: 1329220 - DNA, 15 bp, Homo sapiens
tcattgaccttcagc

SEQ ID NO: 1329221 - DNA, 15 bp, Homo sapiens
ctcattgaccttcag

SEQ ID NO: 1329222 - DNA, 15 bp, Homo sapiens
tctcattgaccttca

SEQ ID NO: 1329223 - DNA, 15 bp, Homo sapiens
ttctcattgaccttc

SEQ ID NO: 1329224 - DNA, 15 bp, Homo sapiens
cttctcattgacctt

SEQ ID NO: 1329225 - DNA, 15 bp, Homo sapiens
acttctcattgacct

SEQ ID NO: 1329226 - DNA, 15 bp, Homo sapiens
cacttctcattgacc

SEQ ID NO: 1329227 - DNA, 15 bp, Homo sapiens
ccacttctcattgac

SEQ ID NO: 1329228 - DNA, 15 bp, Homo sapiens
cccacttctcattga

SEQ ID NO: 1329229 - DNA, 15 bp, Homo sapiens
acccacttctcattg

SEQ ID NO: 1329230 - DNA, 15 bp, Homo sapiens
gacccacttctcatt

SEQ ID NO: 1329231 - DNA, 15 bp, Homo sapiens
agacccacttctcat

SEQ ID NO: 1329232 - DNA, 15 bp, Homo sapiens
cagacccacttctca

SEQ ID NO: 1329233 - DNA, 15 bp, Homo sapiens
ccagacccacttctc

SEQ ID NO: 1329234 - DNA, 15 bp, Homo sapiens
cccagacccacttct

SEQ ID NO: 1329235 - DNA, 15 bp, Homo sapiens
gcccagacccacttc

SEQ ID NO: 1329236 - DNA, 15 bp, Homo sapiens
tgcccagacccactt

SEQ ID NO: 1329237 - DNA, 15 bp, Homo sapiens
ctgcccagacccact

SEQ ID NO: 1329238 - DNA, 15 bp, Homo sapiens
actgcccagacccac

SEQ ID NO: 1329239 - DNA, 15 bp, Homo sapiens
cactgcccagaccca

SEQ ID NO: 1329240 - DNA, 15 bp, Homo sapiens
gcactgcccagaccc

SEQ ID NO: 1329241 - DNA, 15 bp, Homo sapiens
tgcactgcccagacc

SEQ ID NO: 1329242 - DNA, 15 bp, Homo sapiens
ctgcactgcccagac

SEQ ID NO: 1329243 - DNA, 15 bp, Homo sapiens
cctgcactgcccaga

SEQ ID NO: 1329244 - DNA, 15 bp, Homo sapiens
tcctgcactgcccag

SEQ ID NO: 1329245 - DNA, 15 bp, Homo sapiens
atcctgcactgccca

SEQ ID NO: 1329246 - DNA, 15 bp, Homo sapiens
catcctgcactgccc

SEQ ID NO: 1329247 - DNA, 15 bp, Homo sapiens
ccatcctgcactgcc

SEQ ID NO: 1329248 - DNA, 15 bp, Homo sapiens
accatcctgcactgc

SEQ ID NO: 1329249 - DNA, 15 bp, Homo sapiens
gaccatcctgcactg

SEQ ID NO: 1329250 - DNA, 15 bp, Homo sapiens
tgaccatcctgcact

SEQ ID NO: 1329251 - DNA, 15 bp, Homo sapiens
ctgaccatcctgcac

SEQ ID NO: 1329252 - DNA, 15 bp, Homo sapiens
cctgaccatcctgca

SEQ ID NO: 1329253 - DNA, 15 bp, Homo sapiens
acctgaccatcctgc

SEQ ID NO: 1329254 - DNA, 15 bp, Homo sapiens
cacctgaccatcctg

SEQ ID NO: 1329255 - DNA, 15 bp, Homo sapiens
acacctgaccatcct

SEQ ID NO: 1329256 - DNA, 15 bp, Homo sapiens
aacacctgaccatcc

SEQ ID NO: 1329257 - DNA, 15 bp, Homo sapiens
gaacacctgaccatc

SEQ ID NO: 1329258 - DNA, 15 bp, Homo sapiens
agaacacctgaccat

SEQ ID NO: 1329259 - DNA, 15 bp, Homo sapiens
cagaacacctgacca

SEQ ID NO: 1329260 - DNA, 15 bp, Homo sapiens
acagaacacctgacc

SEQ ID NO: 1329261 - DNA, 15 bp, Homo sapiens
gacagaacacctgac

SEQ ID NO: 1329262 - DNA, 15 bp, Homo sapiens
tgacagaacacctga

SEQ ID NO: 1329263 - DNA, 15 bp, Homo sapiens
atgacagaacacctg

SEQ ID NO: 1329264 - DNA, 15 bp, Homo sapiens
gatgacagaacacct

SEQ ID NO: 1329265 - DNA, 15 bp, Homo sapiens
cgatgacagaacacc

SEQ ID NO: 1329266 - DNA, 15 bp, Homo sapiens
gcgatgacagaacac

SEQ ID NO: 1329267 - DNA, 15 bp, Homo sapiens
agcgatgacagaaca

SEQ ID NO: 1329268 - DNA, 15 bp, Homo sapiens
tagcgatgacagaac

SEQ ID NO: 1329269 - DNA, 15 bp, Homo sapiens
ctagcgatgacagaa

SEQ ID NO: 1329270 - DNA, 15 bp, Homo sapiens
actagcgatgacaga

SEQ ID NO: 1329271 - DNA, 15 bp, Homo sapiens
tactagcgatgacag

SEQ ID NO: 1329272 - DNA, 15 bp, Homo sapiens
atactagcgatgaca

SEQ ID NO: 1329273 - DNA, 15 bp, Homo sapiens
catactagcgatgac

SEQ ID NO: 1329274 - DNA, 15 bp, Homo sapiens
tcatactagcgatga

SEQ ID NO: 1329275 - DNA, 15 bp, Homo sapiens
gtcatactagcgatg

SEQ ID NO: 1329276 - DNA, 15 bp, Homo sapiens
agtcatactagcgat

SEQ ID NO: 1329277 - DNA, 15 bp, Homo sapiens
gagtcatactagcga

SEQ ID NO: 1329278 - DNA, 15 bp, Homo sapiens
cgagtcatactagcg

SEQ ID NO: 1329279 - DNA, 15 bp, Homo sapiens
ccgagtcatactagc

SEQ ID NO: 1329280 - DNA, 15 bp, Homo sapiens
gccgagtcatactag

SEQ ID NO: 1329281 - DNA, 15 bp, Homo sapiens
ggccgagtcatacta

SEQ ID NO: 1329282 - DNA, 15 bp, Homo sapiens
gggccgagtcatact

SEQ ID NO: 1329283 - DNA, 15 bp, Homo sapiens
ggggccgagtcatac

SEQ ID NO: 1329284 - DNA, 15 bp, Homo sapiens
tggggccgagtcata

SEQ ID NO: 1329285 - DNA, 15 bp, Homo sapiens
gtggggccgagtcat

SEQ ID NO: 1329286 - DNA, 15 bp, Homo sapiens
ggtggggccgagtca

SEQ ID NO: 1329287 - DNA, 15 bp, Homo sapiens
gggtggggccgagtc

SEQ ID NO: 1329288 - DNA, 15 bp, Homo sapiens
cgggtggggccgagt

SEQ ID NO: 1329289 - DNA, 15 bp, Homo sapiens
ccgggtggggccgag

SEQ ID NO: 1329290 - DNA, 15 bp, Homo sapiens
accgggtggggccga

SEQ ID NO: 1329291 - DNA, 15 bp, Homo sapiens
caccgggtggggccg

SEQ ID NO: 1329292 - DNA, 15 bp, Homo sapiens
ccaccgggtggggcc

SEQ ID NO: 1329293 - DNA, 15 bp, Homo sapiens
tccaccgggtggggc

SEQ ID NO: 1329294 - DNA, 15 bp, Homo sapiens
ctccaccgggtgggg

SEQ ID NO: 1329295 - DNA, 15 bp, Homo sapiens
tctccaccgggtggg

SEQ ID NO: 1329296 - DNA, 15 bp, Homo sapiens
ctctccaccgggtgg

SEQ ID NO: 1329297 - DNA, 15 bp, Homo sapiens
tctctccaccgggtg

SEQ ID NO: 1329298 - DNA, 15 bp, Homo sapiens
ctctctccaccgggt

SEQ ID NO: 1329299 - DNA, 15 bp, Homo sapiens
cctctctccaccggg

SEQ ID NO: 1329300 - DNA, 15 bp, Homo sapiens
acctctctccaccgg

SEQ ID NO: 1329301 - DNA, 15 bp, Homo sapiens
gacctctctccaccg

SEQ ID NO: 1329302 - DNA, 15 bp, Homo sapiens
agacctctctccacc

SEQ ID NO: 1329303 - DNA, 15 bp, Homo sapiens
gagacctctctccac

SEQ ID NO: 1329304 - DNA, 15 bp, Homo sapiens
tgagacctctctcca

SEQ ID NO: 1329305 - DNA, 15 bp, Homo sapiens
ctgagacctctctcc

SEQ ID NO: 1329306 - DNA, 15 bp, Homo sapiens
cctgagacctctctc

SEQ ID NO: 1329307 - DNA, 15 bp, Homo sapiens
ccctgagacctctct

SEQ ID NO: 1329308 - DNA, 15 bp, Homo sapiens
gccctgagacctctc

SEQ ID NO: 1329309 - DNA, 15 bp, Homo sapiens
ggccctgagacctct

SEQ ID NO: 1329310 - DNA, 15 bp, Homo sapiens
gggccctgagacctc

SEQ ID NO: 1329311 - DNA, 15 bp, Homo sapiens
tgggccctgagacct

SEQ ID NO: 1329312 - DNA, 15 bp, Homo sapiens
gtgggccctgagacc

SEQ ID NO: 1329313 - DNA, 15 bp, Homo sapiens
agtgggccctgagac

SEQ ID NO: 1329314 - DNA, 15 bp, Homo sapiens
cagtgggccctgaga

SEQ ID NO: 1329315 - DNA, 15 bp, Homo sapiens
ccagtgggccctgag

SEQ ID NO: 1329316 - DNA, 15 bp, Homo sapiens
tccagtgggccctga

SEQ ID NO: 1329317 - DNA, 15 bp, Homo sapiens
ctccagtgggccctg

SEQ ID NO: 1329318 - DNA, 15 bp, Homo sapiens
cctccagtgggccct

SEQ ID NO: 1329319 - DNA, 15 bp, Homo sapiens
gcctccagtgggccc

SEQ ID NO: 1329320 - DNA, 15 bp, Homo sapiens
tgcctccagtgggcc

SEQ ID NO: 1329321 - DNA, 15 bp, Homo sapiens
ctgcctccagtgggc

SEQ ID NO: 1329322 - DNA, 15 bp, Homo sapiens
gctgcctccagtggg

SEQ ID NO: 1329323 - DNA, 15 bp, Homo sapiens
agctgcctccagtgg

SEQ ID NO: 1329324 - DNA, 15 bp, Homo sapiens
gagctgcctccagtg

SEQ ID NO: 1329325 - DNA, 15 bp, Homo sapiens
ggagctgcctccagt

SEQ ID NO: 1329326 - DNA, 15 bp, Homo sapiens
aggagctgcctccag

SEQ ID NO: 1329327 - DNA, 15 bp, Homo sapiens
taggagctgcctcca

SEQ ID NO: 1329328 - DNA, 15 bp, Homo sapiens
gtaggagctgcctcc

SEQ ID NO: 1329329 - DNA, 15 bp, Homo sapiens
ggtaggagctgcctc

SEQ ID NO: 1329330 - DNA, 15 bp, Homo sapiens
gggtaggagctgcct

SEQ ID NO: 1329331 - DNA, 15 bp, Homo sapiens
tgggtaggagctgcc

SEQ ID NO: 1329332 - DNA, 15 bp, Homo sapiens
atgggtaggagctgc

SEQ ID NO: 1329333 - DNA, 15 bp, Homo sapiens
catgggtaggagctg

SEQ ID NO: 1329334 - DNA, 15 bp, Homo sapiens
tcatgggtaggagct

SEQ ID NO: 1329335 - DNA, 15 bp, Homo sapiens
gtcatgggtaggagc

SEQ ID NO: 1329336 - DNA, 15 bp, Homo sapiens
ggtcatgggtaggag

SEQ ID NO: 1329337 - DNA, 15 bp, Homo sapiens
gggtcatgggtagga

SEQ ID NO: 1329338 - DNA, 15 bp, Homo sapiens
ggggtcatgggtagg

SEQ ID NO: 1329339 - DNA, 15 bp, Homo sapiens
aggggtcatgggtag

SEQ ID NO: 1329340 - DNA, 15 bp, Homo sapiens
caggggtcatgggta

SEQ ID NO: 1329341 - DNA, 15 bp, Homo sapiens
gcaggggtcatgggt

SEQ ID NO: 1329342 - DNA, 15 bp, Homo sapiens
ggcaggggtcatggg

SEQ ID NO: 1329343 - DNA, 15 bp, Homo sapiens
aggcaggggtcatgg

SEQ ID NO: 1329344 - DNA, 15 bp, Homo sapiens
gaggcaggggtcatg

SEQ ID NO: 1329345 - DNA, 15 bp, Homo sapiens
agaggcaggggtcat

SEQ ID NO: 1329346 - DNA, 15 bp, Homo sapiens
cagaggcaggggtca

SEQ ID NO: 1329347 - DNA, 15 bp, Homo sapiens
gcagaggcaggggtc

SEQ ID NO: 1329348 - DNA, 15 bp, Homo sapiens
cgcagaggcaggggt

SEQ ID NO: 1329349 - DNA, 15 bp, Homo sapiens
acgcagaggcagggg

SEQ ID NO: 1329350 - DNA, 15 bp, Homo sapiens
aacgcagaggcaggg

SEQ ID NO: 1329351 - DNA, 15 bp, Homo sapiens
caacgcagaggcagg

SEQ ID NO: 1329352 - DNA, 15 bp, Homo sapiens
ccaacgcagaggcag

SEQ ID NO: 1329353 - DNA, 15 bp, Homo sapiens
gccaacgcagaggca

SEQ ID NO: 1329354 - DNA, 15 bp, Homo sapiens
tgccaacgcagaggc

SEQ ID NO: 1329355 - DNA, 15 bp, Homo sapiens
atgccaacgcagagg

SEQ ID NO: 1329356 - DNA, 15 bp, Homo sapiens
aatgccaacgcagag

SEQ ID NO: 1329357 - DNA, 15 bp, Homo sapiens
gaatgccaacgcaga

SEQ ID NO: 1329358 - DNA, 15 bp, Homo sapiens
tgaatgccaacgcag

SEQ ID NO: 1329359 - DNA, 15 bp, Homo sapiens
ctgaatgccaacgca

SEQ ID NO: 1329360 - DNA, 15 bp, Homo sapiens
actgaatgccaacgc

SEQ ID NO: 1329361 - DNA, 15 bp, Homo sapiens
tactgaatgccaacg

SEQ ID NO: 1329362 - DNA, 15 bp, Homo sapiens
ctactgaatgccaac

SEQ ID NO: 1329363 - DNA, 15 bp, Homo sapiens
gctactgaatgccaa

SEQ ID NO: 1329364 - DNA, 15 bp, Homo sapiens
ggctactgaatgcca

SEQ ID NO: 1329365 - DNA, 15 bp, Homo sapiens
gggctactgaatgcc

SEQ ID NO: 1329366 - DNA, 15 bp, Homo sapiens
agggctactgaatgc

SEQ ID NO: 1329367 - DNA, 15 bp, Homo sapiens
aagggctactgaatg

SEQ ID NO: 1329368 - DNA, 15 bp, Homo sapiens
caagggctactgaat

SEQ ID NO: 1329369 - DNA, 15 bp, Homo sapiens
tcaagggctactgaa

SEQ ID NO: 1329370 - DNA, 15 bp, Homo sapiens
atcaagggctactga

SEQ ID NO: 1329371 - DNA, 15 bp, Homo sapiens
aatcaagggctactg

SEQ ID NO: 1329372 - DNA, 15 bp, Homo sapiens
aaatcaagggctact

SEQ ID NO: 1329373 - DNA, 15 bp, Homo sapiens
taaatcaagggctac

SEQ ID NO: 1329374 - DNA, 15 bp, Homo sapiens
ataaatcaagggcta

SEQ ID NO: 1329375 - DNA, 15 bp, Homo sapiens
gataaatcaagggct

SEQ ID NO: 1329376 - DNA, 15 bp, Homo sapiens
ggataaatcaagggc

SEQ ID NO: 1329377 - DNA, 15 bp, Homo sapiens
gggataaatcaaggg

SEQ ID NO: 1329378 - DNA, 15 bp, Homo sapiens
tgggataaatcaagg

SEQ ID NO: 1329379 - DNA, 15 bp, Homo sapiens
ttgggataaatcaag

SEQ ID NO: 1329380 - DNA, 15 bp, Homo sapiens
attgggataaatcaa

SEQ ID NO: 1329381 - DNA, 15 bp, Homo sapiens
cattgggataaatca

SEQ ID NO: 1329382 - DNA, 15 bp, Homo sapiens
gcattgggataaatc

SEQ ID NO: 1329383 - DNA, 15 bp, Homo sapiens
tgcattgggataaat

SEQ ID NO: 1329384 - DNA, 15 bp, Homo sapiens
ttgcattgggataaa

SEQ ID NO: 1329385 - DNA, 15 bp, Homo sapiens
cttgcattgggataa

SEQ ID NO: 1329386 - DNA, 15 bp, Homo sapiens
tcttgcattgggata

SEQ ID NO: 1329387 - DNA, 15 bp, Homo sapiens
ttcttgcattgggat

SEQ ID NO: 1329388 - DNA, 15 bp, Homo sapiens
tttcttgcattggga

SEQ ID NO: 1329389 - DNA, 15 bp, Homo sapiens
gtttcttgcattggg

SEQ ID NO: 1329390 - DNA, 15 bp, Homo sapiens
tgtttcttgcattgg

SEQ ID NO: 1329391 - DNA, 15 bp, Homo sapiens
ttgtttcttgcattg

SEQ ID NO: 1329392 - DNA, 15 bp, Homo sapiens
tttgtttcttgcatt

SEQ ID NO: 1329393 - DNA, 15 bp, Homo sapiens
atttgtttcttgcat

SEQ ID NO: 1329394 - DNA, 15 bp, Homo sapiens
aatttgtttcttgca

SEQ ID NO: 1329395 - DNA, 15 bp, Homo sapiens
aaatttgtttcttgc

SEQ ID NO: 1329396 - DNA, 15 bp, Homo sapiens
aaaatttgtttcttg

SEQ ID NO: 1329397 - DNA, 15 bp, Homo sapiens
gaaaatttgtttctt

SEQ ID NO: 1329398 - DNA, 15 bp, Homo sapiens
tgaaaatttgtttct

SEQ ID NO: 1329399 - DNA, 15 bp, Homo sapiens
ttgaaaatttgtttc

SEQ ID NO: 1329400 - DNA, 15 bp, Homo sapiens
attgaaaatttgttt

SEQ ID NO: 1329401 - DNA, 15 bp, Homo sapiens
tattgaaaatttgtt

SEQ ID NO: 1329402 - DNA, 15 bp, Homo sapiens
ttattgaaaatttgt

SEQ ID NO: 1329403 - DNA, 15 bp, Homo sapiens
gttattgaaaatttg

SEQ ID NO: 1329404 - DNA, 15 bp, Homo sapiens
agttattgaaaattt

SEQ ID NO: 1329405 - DNA, 15 bp, Homo sapiens
cagttattgaaaatt

SEQ ID NO: 1329406 - DNA, 15 bp, Homo sapiens
ccagttattgaaaat

SEQ ID NO: 1329407 - DNA, 15 bp, Homo sapiens
accagttattgaaaa

SEQ ID NO: 1329408 - DNA, 15 bp, Homo sapiens
taccagttattgaaa

SEQ ID NO: 1329409 - DNA, 15 bp, Homo sapiens
ttaccagttattgaa

SEQ ID NO: 1329410 - DNA, 15 bp, Homo sapiens
gttaccagttattga

SEQ ID NO: 1329411 - DNA, 15 bp, Homo sapiens
tgttaccagttattg

SEQ ID NO: 1329412 - DNA, 15 bp, Homo sapiens
atgttaccagttatt

SEQ ID NO: 1329413 - DNA, 15 bp, Homo sapiens
aatgttaccagttat

SEQ ID NO: 1329414 - DNA, 15 bp, Homo sapiens
gaatgttaccagtta

SEQ ID NO: 1329415 - DNA, 15 bp, Homo sapiens
agaatgttaccagtt

SEQ ID NO: 1329416 - DNA, 15 bp, Homo sapiens
gagaatgttaccagt

SEQ ID NO: 1329417 - DNA, 15 bp, Homo sapiens
ggagaatgttaccag

SEQ ID NO: 1329418 - DNA, 15 bp, Homo sapiens
cggagaatgttacca

SEQ ID NO: 1329419 - DNA, 15 bp, Homo sapiens
ccggagaatgttacc

SEQ ID NO: 1329420 - DNA, 15 bp, Homo sapiens
cccggagaatgttac

SEQ ID NO: 1329421 - DNA, 15 bp, Homo sapiens
tcccggagaatgtta

SEQ ID NO: 1329422 - DNA, 15 bp, Homo sapiens
ctcccggagaatgtt

SEQ ID NO: 1329423 - DNA, 15 bp, Homo sapiens
actcccggagaatgt

SEQ ID NO: 1329424 - DNA, 15 bp, Homo sapiens
cactcccggagaatg

SEQ ID NO: 1329425 - DNA, 15 bp, Homo sapiens
tcactcccggagaat

SEQ ID NO: 1329426 - DNA, 15 bp, Homo sapiens
atcactcccggagaa

SEQ ID NO: 1329427 - DNA, 15 bp, Homo sapiens
tatcactcccggaga

SEQ ID NO: 1329428 - DNA, 15 bp, Homo sapiens
atatcactcccggag

SEQ ID NO: 1329429 - DNA, 15 bp, Homo sapiens
catatcactcccgga

SEQ ID NO: 1329430 - DNA, 15 bp, Homo sapiens
ccatatcactcccgg

SEQ ID NO: 1329431 - DNA, 15 bp, Homo sapiens
cccatatcactcccg

SEQ ID NO: 1329432 - DNA, 15 bp, Homo sapiens
gcccatatcactccc

SEQ ID NO: 1329433 - DNA, 15 bp, Homo sapiens
ggcccatatcactcc

SEQ ID NO: 1329434 - DNA, 15 bp, Homo sapiens
tggcccatatcactc

SEQ ID NO: 1329435 - DNA, 15 bp, Homo sapiens
ctggcccatatcact

SEQ ID NO: 1329436 - DNA, 15 bp, Homo sapiens
tctggcccatatcac

SEQ ID NO: 1329437 - DNA, 15 bp, Homo sapiens
ctctggcccatatca

SEQ ID NO: 1329438 - DNA, 15 bp, Homo sapiens
gctctggcccatatc

SEQ ID NO: 1329439 - DNA, 15 bp, Homo sapiens
tgctctggcccatat

SEQ ID NO: 1329440 - DNA, 15 bp, Homo sapiens
ctgctctggcccata

SEQ ID NO: 1329441 - DNA, 15 bp, Homo sapiens
cctgctctggcccat

SEQ ID NO: 1329442 - DNA, 15 bp, Homo sapiens
gcctgctctggccca

SEQ ID NO: 1329443 - DNA, 15 bp, Homo sapiens
agcctgctctggccc

SEQ ID NO: 1329444 - DNA, 15 bp, Homo sapiens
cagcctgctctggcc

SEQ ID NO: 1329445 - DNA, 15 bp, Homo sapiens
ccagcctgctctggc

SEQ ID NO: 1329446 - DNA, 15 bp, Homo sapiens
accagcctgctctgg

SEQ ID NO: 1329447 - DNA, 15 bp, Homo sapiens
aaccagcctgctctg

SEQ ID NO: 1329448 - DNA, 15 bp, Homo sapiens
aaaccagcctgctct

SEQ ID NO: 1329449 - DNA, 15 bp, Homo sapiens
aaaaccagcctgctc

SEQ ID NO: 1329450 - DNA, 15 bp, Homo sapiens
gaaaaccagcctgct

SEQ ID NO: 1329451 - DNA, 15 bp, Homo sapiens
tgaaaaccagcctgc

SEQ ID NO: 1329452 - DNA, 15 bp, Homo sapiens
ctgaaaaccagcctg

SEQ ID NO: 1329453 - DNA, 15 bp, Homo sapiens
cctgaaaaccagcct

SEQ ID NO: 1329454 - DNA, 15 bp, Homo sapiens
gcctgaaaaccagcc

SEQ ID NO: 1329455 - DNA, 15 bp, Homo sapiens
agcctgaaaaccagc

SEQ ID NO: 1329456 - DNA, 15 bp, Homo sapiens
cagcctgaaaaccag

SEQ ID NO: 1329457 - DNA, 15 bp, Homo sapiens
gcagcctgaaaacca

SEQ ID NO: 1329458 - DNA, 15 bp, Homo sapiens
ggcagcctgaaaacc

SEQ ID NO: 1329459 - DNA, 15 bp, Homo sapiens
aggcagcctgaaaac

SEQ ID NO: 1329460 - DNA, 15 bp, Homo sapiens
gaggcagcctgaaaa

SEQ ID NO: 1329461 - DNA, 15 bp, Homo sapiens
ggaggcagcctgaaa

SEQ ID NO: 1329462 - DNA, 15 bp, Homo sapiens
gggaggcagcctgaa

SEQ ID NO: 1329463 - DNA, 15 bp, Homo sapiens
agggaggcagcctga

SEQ ID NO: 1329464 - DNA, 15 bp, Homo sapiens
cagggaggcagcctg

SEQ ID NO: 1329465 - DNA, 15 bp, Homo sapiens
ccagggaggcagcct

SEQ ID NO: 1329466 - DNA, 15 bp, Homo sapiens
accagggaggcagcc

SEQ ID NO: 1329467 - DNA, 15 bp, Homo sapiens
gaccagggaggcagc

SEQ ID NO: 1329468 - DNA, 15 bp, Homo sapiens
ggaccagggaggcag

SEQ ID NO: 1329469 - DNA, 15 bp, Homo sapiens
aggaccagggaggca

SEQ ID NO: 1329470 - DNA, 15 bp, Homo sapiens
caggaccagggaggc

SEQ ID NO: 1329471 - DNA, 15 bp, Homo sapiens
tcaggaccagggagg

SEQ ID NO: 1329472 - DNA, 15 bp, Homo sapiens
ctcaggaccagggag

SEQ ID NO: 1329473 - DNA, 15 bp, Homo sapiens
tctcaggaccaggga

SEQ ID NO: 1329474 - DNA, 15 bp, Homo sapiens
atctcaggaccaggg

SEQ ID NO: 1329475 - DNA, 15 bp, Homo sapiens
aatctcaggaccagg

SEQ ID NO: 1329476 - DNA, 15 bp, Homo sapiens
caatctcaggaccag

SEQ ID NO: 1329477 - DNA, 15 bp, Homo sapiens
gcaatctcaggacca

SEQ ID NO: 1329478 - DNA, 15 bp, Homo sapiens
ggcaatctcaggacc

SEQ ID NO: 1329479 - DNA, 15 bp, Homo sapiens
tggcaatctcaggac

SEQ ID NO: 1329480 - DNA, 15 bp, Homo sapiens
ctggcaatctcagga

SEQ ID NO: 1329481 - DNA, 15 bp, Homo sapiens
gctggcaatctcagg

SEQ ID NO: 1329482 - DNA, 15 bp, Homo sapiens
agctggcaatctcag

SEQ ID NO: 1329483 - DNA, 15 bp, Homo sapiens
gagctggcaatctca

SEQ ID NO: 1329484 - DNA, 15 bp, Homo sapiens
tgagctggcaatctc

SEQ ID NO: 1329485 - DNA, 15 bp, Homo sapiens
ctgagctggcaatct

SEQ ID NO: 1329486 - DNA, 15 bp, Homo sapiens
tctgagctggcaatc

SEQ ID NO: 1329487 - DNA, 15 bp, Homo sapiens
ctctgagctggcaat

SEQ ID NO: 1329488 - DNA, 15 bp, Homo sapiens
cctctgagctggcaa

SEQ ID NO: 1329489 - DNA, 15 bp, Homo sapiens
tcctctgagctggca

SEQ ID NO: 1329490 - DNA, 15 bp, Homo sapiens
ctcctctgagctggc

SEQ ID NO: 1329491 - DNA, 15 bp, Homo sapiens
gctcctctgagctgg

SEQ ID NO: 1329492 - DNA, 15 bp, Homo sapiens
tgctcctctgagctg

SEQ ID NO: 1329493 - DNA, 15 bp, Homo sapiens
atgctcctctgagct

SEQ ID NO: 1329494 - DNA, 15 bp, Homo sapiens
gatgctcctctgagc

SEQ ID NO: 1329495 - DNA, 15 bp, Homo sapiens
ggatgctcctctgag

SEQ ID NO: 1329496 - DNA, 15 bp, Homo sapiens
gggatgctcctctga

SEQ ID NO: 1329497 - DNA, 15 bp, Homo sapiens
ggggatgctcctctg

SEQ ID NO: 1329498 - DNA, 15 bp, Homo sapiens
aggggatgctcctct

SEQ ID NO: 1329499 - DNA, 15 bp, Homo sapiens
caggggatgctcctc

SEQ ID NO: 1329500 - DNA, 15 bp, Homo sapiens
tcaggggatgctcct

SEQ ID NO: 1329501 - DNA, 15 bp, Homo sapiens
ttcaggggatgctcc

SEQ ID NO: 1329502 - DNA, 15 bp, Homo sapiens
attcaggggatgctc

SEQ ID NO: 1329503 - DNA, 15 bp, Homo sapiens
cattcaggggatgct

SEQ ID NO: 1329504 - DNA, 15 bp, Homo sapiens
tcattcaggggatgc

SEQ ID NO: 1329505 - DNA, 15 bp, Homo sapiens
ttcattcaggggatg

SEQ ID NO: 1329506 - DNA, 15 bp, Homo sapiens
gttcattcaggggat

SEQ ID NO: 1329507 - DNA, 15 bp, Homo sapiens
agttcattcagggga

SEQ ID NO: 1329508 - DNA, 15 bp, Homo sapiens
tgtcatggggattaa

SEQ ID NO: 1329509 - DNA, 15 bp, Homo sapiens
ctgtcatggggatta

SEQ ID NO: 1329510 - DNA, 15 bp, Homo sapiens
actgtcatggggatt

SEQ ID NO: 1329511 - DNA, 15 bp, Homo sapiens
aactgtcatggggat

SEQ ID NO: 1329512 - DNA, 15 bp, Homo sapiens
gaactgtcatgggga

SEQ ID NO: 1329513 - DNA, 15 bp, Homo sapiens
agaactgtcatgggg

SEQ ID NO: 1329514 - DNA, 15 bp, Homo sapiens
gagaactgtcatggg

SEQ ID NO: 1329515 - DNA, 15 bp, Homo sapiens
ggagaactgtcatgg

SEQ ID NO: 1329516 - DNA, 15 bp, Homo sapiens
aggagaactgtcatg

SEQ ID NO: 1329517 - DNA, 15 bp, Homo sapiens
taggagaactgtcat

SEQ ID NO: 1329518 - DNA, 15 bp, Homo sapiens
ctaggagaactgtca

SEQ ID NO: 1329519 - DNA, 15 bp, Homo sapiens
cctaggagaactgtc

SEQ ID NO: 1329520 - DNA, 15 bp, Homo sapiens
gcctaggagaactgt

SEQ ID NO: 1329521 - DNA, 15 bp, Homo sapiens
tgcctaggagaactg

SEQ ID NO: 1329522 - DNA, 15 bp, Homo sapiens
ctgcctaggagaact

SEQ ID NO: 1329523 - DNA, 15 bp, Homo sapiens
cctgcctaggagaac

SEQ ID NO: 1329524 - DNA, 15 bp, Homo sapiens
acctgcctaggagaa

SEQ ID NO: 1329525 - DNA, 15 bp, Homo sapiens
tacctgcctaggaga

SEQ ID NO: 1329526 - DNA, 15 bp, Homo sapiens
ctacctgcctaggag

SEQ ID NO: 1329527 - DNA, 15 bp, Homo sapiens
gctacctgcctagga

SEQ ID NO: 1329528 - DNA, 15 bp, Homo sapiens
ggctacctgcctagg

SEQ ID NO: 1329529 - DNA, 15 bp, Homo sapiens
aggctacctgcctag

SEQ ID NO: 1329530 - DNA, 15 bp, Homo sapiens
gaggctacctgccta

SEQ ID NO: 1329531 - DNA, 15 bp, Homo sapiens
tgaggctacctgcct

SEQ ID NO: 1329532 - DNA, 15 bp, Homo sapiens
gtgaggctacctgcc

SEQ ID NO: 1329533 - DNA, 15 bp, Homo sapiens
tgtgaggctacctgc

SEQ ID NO: 1329534 - DNA, 15 bp, Homo sapiens
ttgtgaggctacctg

SEQ ID NO: 1329535 - DNA, 15 bp, Homo sapiens
tttgtgaggctacct

SEQ ID NO: 1329536 - DNA, 15 bp, Homo sapiens
gtttgtgaggctacc

SEQ ID NO: 1329537 - DNA, 15 bp, Homo sapiens
ggtttgtgaggctac

SEQ ID NO: 1329538 - DNA, 15 bp, Homo sapiens
gggtttgtgaggcta

SEQ ID NO: 1329539 - DNA, 15 bp, Homo sapiens
tgggtttgtgaggct

SEQ ID NO: 1329540 - DNA, 15 bp, Homo sapiens
atgggtttgtgaggc

SEQ ID NO: 1329541 - DNA, 15 bp, Homo sapiens
aatgggtttgtgagg

SEQ ID NO: 1329542 - DNA, 15 bp, Homo sapiens
aaatgggtttgtgag

SEQ ID NO: 1329543 - DNA, 15 bp, Homo sapiens
aaaatgggtttgtga

SEQ ID NO: 1329544 - DNA, 15 bp, Homo sapiens
taaaatgggtttgtg

SEQ ID NO: 1329545 - DNA, 15 bp, Homo sapiens
gtaaaatgggtttgt

SEQ ID NO: 1329546 - DNA, 15 bp, Homo sapiens
tgtaaaatgggtttg

SEQ ID NO: 1329547 - DNA, 15 bp, Homo sapiens
ttgtaaaatgggttt

SEQ ID NO: 1329548 - DNA, 15 bp, Homo sapiens
cttgtaaaatgggtt

SEQ ID NO: 1329549 - DNA, 15 bp, Homo sapiens
ccttgtaaaatgggt

SEQ ID NO: 1329550 - DNA, 15 bp, Homo sapiens
gccttgtaaaatggg

SEQ ID NO: 1329551 - DNA, 15 bp, Homo sapiens
ggccttgtaaaatgg

SEQ ID NO: 1329552 - DNA, 15 bp, Homo sapiens
gggccttgtaaaatg

SEQ ID NO: 1329553 - DNA, 15 bp, Homo sapiens
tgggccttgtaaaat

SEQ ID NO: 1329554 - DNA, 15 bp, Homo sapiens
ctgggccttgtaaaa

SEQ ID NO: 1329555 - DNA, 15 bp, Homo sapiens
actgggccttgtaaa

SEQ ID NO: 1329556 - DNA, 15 bp, Homo sapiens
cactgggccttgtaa

SEQ ID NO: 1329557 - DNA, 15 bp, Homo sapiens
tcactgggccttgta

SEQ ID NO: 1329558 - DNA, 15 bp, Homo sapiens
ctcactgggccttgt

SEQ ID NO: 1329559 - DNA, 15 bp, Homo sapiens
cctcactgggccttg

SEQ ID NO: 1329560 - DNA, 15 bp, Homo sapiens
acctcactgggcctt

SEQ ID NO: 1329561 - DNA, 15 bp, Homo sapiens
aacctcactgggcct

SEQ ID NO: 1329562 - DNA, 15 bp, Homo sapiens
caacctcactgggcc

SEQ ID NO: 1329563 - DNA, 15 bp, Homo sapiens
acaacctcactgggc

SEQ ID NO: 1329564 - DNA, 15 bp, Homo sapiens
cacaacctcactggg

SEQ ID NO: 1329565 - DNA, 15 bp, Homo sapiens
ccacaacctcactgg

SEQ ID NO: 1329566 - DNA, 15 bp, Homo sapiens
gccacaacctcactg

SEQ ID NO: 1329567 - DNA, 15 bp, Homo sapiens
tgccacaacctcact

SEQ ID NO: 1329568 - DNA, 15 bp, Homo sapiens
ctgccacaacctcac

SEQ ID NO: 1329569 - DNA, 15 bp, Homo sapiens
actgccacaacctca

SEQ ID NO: 1329570 - DNA, 15 bp, Homo sapiens
aactgccacaacctc

SEQ ID NO: 1329571 - DNA, 15 bp, Homo sapiens
caactgccacaacct

SEQ ID NO: 1329572 - DNA, 15 bp, Homo sapiens
gcaactgccacaacc

SEQ ID NO: 1329573 - DNA, 15 bp, Homo sapiens
ggcaactgccacaac

SEQ ID NO: 1329574 - DNA, 15 bp, Homo sapiens
tggcaactgccacaa

SEQ ID NO: 1329575 - DNA, 15 bp, Homo sapiens
ttggcaactgccaca

SEQ ID NO: 1329576 - DNA, 15 bp, Homo sapiens
cttggcaactgccac

SEQ ID NO: 1329577 - DNA, 15 bp, Homo sapiens
ccttggcaactgcca

SEQ ID NO: 1329578 - DNA, 15 bp, Homo sapiens
accttggcaactgcc

SEQ ID NO: 1329579 - DNA, 15 bp, Homo sapiens
gaccttggcaactgc

SEQ ID NO: 1329580 - DNA, 15 bp, Homo sapiens
tgaccttggcaactg

SEQ ID NO: 1329581 - DNA, 15 bp, Homo sapiens
gtgaccttggcaact

SEQ ID NO: 1329582 - DNA, 15 bp, Homo sapiens
tgtgaccttggcaac

SEQ ID NO: 1329583 - DNA, 15 bp, Homo sapiens
gtgtgaccttggcaa

SEQ ID NO: 1329584 - DNA, 15 bp, Homo sapiens
tgtgtgaccttggca

SEQ ID NO: 1329585 - DNA, 15 bp, Homo sapiens
ctgtgtgaccttggc

SEQ ID NO: 1329586 - DNA, 15 bp, Homo sapiens
gagctgtgtgacctt

SEQ ID NO: 1329587 - DNA, 15 bp, Homo sapiens
tgagctgtgtgacct

SEQ ID NO: 1329588 - DNA, 15 bp, Homo sapiens
ctgagctgtgtgacc

SEQ ID NO: 1329589 - DNA, 15 bp, Homo sapiens
tctgagctgtgtgac

SEQ ID NO: 1329590 - DNA, 15 bp, Homo sapiens
ttctgagctgtgtga

SEQ ID NO: 1329591 - DNA, 15 bp, Homo sapiens
gttctgagctgtgtg

SEQ ID NO: 1329592 - DNA, 15 bp, Homo sapiens
agttctgagctgtgt

SEQ ID NO: 1329593 - DNA, 15 bp, Homo sapiens
gagttctgagctgtg

SEQ ID NO: 1329594 - DNA, 15 bp, Homo sapiens
tgagttctgagctgt

SEQ ID NO: 1329595 - DNA, 15 bp, Homo sapiens
ctgagttctgagctg

SEQ ID NO: 1329596 - DNA, 15 bp, Homo sapiens
cctgagttctgagct

SEQ ID NO: 1329597 - DNA, 15 bp, Homo sapiens
gcctgagttctgagc

SEQ ID NO: 1329598 - DNA, 15 bp, Homo sapiens
ggcctgagttctgag

SEQ ID NO: 1329599 - DNA, 15 bp, Homo sapiens
aggcctgagttctga

SEQ ID NO: 1329600 - DNA, 15 bp, Homo sapiens
caggcctgagttctg

SEQ ID NO: 1329601 - DNA, 15 bp, Homo sapiens
acaggcctgagttct

SEQ ID NO: 1329602 - DNA, 15 bp, Homo sapiens
gacaggcctgagttc

SEQ ID NO: 1329603 - DNA, 15 bp, Homo sapiens
agacaggcctgagtt

SEQ ID NO: 1329604 - DNA, 15 bp, Homo sapiens
cagacaggcctgagt

SEQ ID NO: 1329605 - DNA, 15 bp, Homo sapiens
tcagacaggcctgag

SEQ ID NO: 1329606 - DNA, 15 bp, Homo sapiens
gtcagacaggcctga

SEQ ID NO: 1329607 - DNA, 15 bp, Homo sapiens
agtcagacaggcctg

SEQ ID NO: 1329608 - DNA, 15 bp, Homo sapiens
gagtcagacaggcct

SEQ ID NO: 1329609 - DNA, 15 bp, Homo sapiens
ggagtcagacaggcc

SEQ ID NO: 1329610 - DNA, 15 bp, Homo sapiens
tggagtcagacaggc

SEQ ID NO: 1329611 - DNA, 15 bp, Homo sapiens
atggagtcagacagg

SEQ ID NO: 1329612 - DNA, 15 bp, Homo sapiens
tatggagtcagacag

SEQ ID NO: 1329613 - DNA, 15 bp, Homo sapiens
ctatggagtcagaca

SEQ ID NO: 1329614 - DNA, 15 bp, Homo sapiens
gctatggagtcagac

SEQ ID NO: 1329615 - DNA, 15 bp, Homo sapiens
ggctatggagtcaga

SEQ ID NO: 1329616 - DNA, 15 bp, Homo sapiens
tggctatggagtcag

SEQ ID NO: 1329617 - DNA, 15 bp, Homo sapiens
gtggctatggagtca

SEQ ID NO: 1329618 - DNA, 15 bp, Homo sapiens
tgtggctatggagtc

SEQ ID NO: 1329619 - DNA, 15 bp, Homo sapiens
gtgtggctatggagt

SEQ ID NO: 1329620 - DNA, 15 bp, Homo sapiens
agtgtggctatggag

SEQ ID NO: 1329621 - DNA, 15 bp, Homo sapiens
cagtgtggctatgga

SEQ ID NO: 1329622 - DNA, 15 bp, Homo sapiens
gcagtgtggctatgg

SEQ ID NO: 1329623 - DNA, 15 bp, Homo sapiens
agcagtgtggctatg

SEQ ID NO: 1329624 - DNA, 15 bp, Homo sapiens
tagcagtgtggctat

SEQ ID NO: 1329625 - DNA, 15 bp, Homo sapiens
atagcagtgtggcta

SEQ ID NO: 1329626 - DNA, 15 bp, Homo sapiens
aatagcagtgtggct

SEQ ID NO: 1329627 - DNA, 15 bp, Homo sapiens
aaatagcagtgtggc

SEQ ID NO: 1329628 - DNA, 15 bp, Homo sapiens
taaatagcagtgtgg

SEQ ID NO: 1329629 - DNA, 15 bp, Homo sapiens
ttaaatagcagtgtg

SEQ ID NO: 1329630 - DNA, 15 bp, Homo sapiens
cttaaatagcagtgt

SEQ ID NO: 1329631 - DNA, 15 bp, Homo sapiens
ccttaaatagcagtg

SEQ ID NO: 1329632 - DNA, 15 bp, Homo sapiens
tccttaaatagcagt

SEQ ID NO: 1329633 - DNA, 15 bp, Homo sapiens
ctccttaaatagcag

SEQ ID NO: 1329634 - DNA, 15 bp, Homo sapiens
gctccttaaatagca

SEQ ID NO: 1329635 - DNA, 15 bp, Homo sapiens
agctccttaaatagc

SEQ ID NO: 1329636 - DNA, 15 bp, Homo sapiens
tagctccttaaatag

SEQ ID NO: 1329637 - DNA, 15 bp, Homo sapiens
ctagctccttaaata

SEQ ID NO: 1329638 - DNA, 15 bp, Homo sapiens
cctagctccttaaat

SEQ ID NO: 1329639 - DNA, 15 bp, Homo sapiens
acctagctccttaaa

SEQ ID NO: 1329640 - DNA, 15 bp, Homo sapiens
aacctagctccttaa

SEQ ID NO: 1329641 - DNA, 15 bp, Homo sapiens
taacctagctcctta

SEQ ID NO: 1329642 - DNA, 15 bp, Homo sapiens
ctaacctagctcctt

SEQ ID NO: 1329643 - DNA, 15 bp, Homo sapiens
gctaacctagctcct

SEQ ID NO: 1329644 - DNA, 15 bp, Homo sapiens
ggctaacctagctcc

SEQ ID NO: 1329645 - DNA, 15 bp, Homo sapiens
tggctaacctagctc

SEQ ID NO: 1329646 - DNA, 15 bp, Homo sapiens
ttggctaacctagct

SEQ ID NO: 1329647 - DNA, 15 bp, Homo sapiens
cttggctaacctagc

SEQ ID NO: 1329648 - DNA, 15 bp, Homo sapiens
ccttggctaacctag

SEQ ID NO: 1329649 - DNA, 15 bp, Homo sapiens
accttggctaaccta

SEQ ID NO: 1329650 - DNA, 15 bp, Homo sapiens
gaccttggctaacct

SEQ ID NO: 1329651 - DNA, 15 bp, Homo sapiens
tgaccttggctaacc

SEQ ID NO: 1329652 - DNA, 15 bp, Homo sapiens
gtgaccttggctaac

SEQ ID NO: 1329653 - DNA, 15 bp, Homo sapiens
tgtgaccttggctaa

SEQ ID NO: 1329654 - DNA, 15 bp, Homo sapiens
ctgtgaccttggcta

SEQ ID NO: 1329655 - DNA, 15 bp, Homo sapiens
actgtgaccttggct

SEQ ID NO: 1329656 - DNA, 15 bp, Homo sapiens
gactgtgaccttggc

SEQ ID NO: 1329657 - DNA, 15 bp, Homo sapiens
tgactgtgaccttgg

SEQ ID NO: 1329658 - DNA, 15 bp, Homo sapiens
ctgactgtgaccttg

SEQ ID NO: 1329659 - DNA, 15 bp, Homo sapiens
tctgactgtgacctt

SEQ ID NO: 1329660 - DNA, 15 bp, Homo sapiens
ctctgactgtgacct

SEQ ID NO: 1329661 - DNA, 15 bp, Homo sapiens
cctctgactgtgacc

SEQ ID NO: 1329662 - DNA, 15 bp, Homo sapiens
gcctctgactgtgac

SEQ ID NO: 1329663 - DNA, 15 bp, Homo sapiens
tgcctctgactgtga

SEQ ID NO: 1329664 - DNA, 15 bp, Homo sapiens
atgcctctgactgtg

SEQ ID NO: 1329665 - DNA, 15 bp, Homo sapiens
aatgcctctgactgt

SEQ ID NO: 1329666 - DNA, 15 bp, Homo sapiens
caatgcctctgactg

SEQ ID NO: 1329667 - DNA, 15 bp, Homo sapiens
ccaatgcctctgact

SEQ ID NO: 1329668 - DNA, 15 bp, Homo sapiens
tccaatgcctctgac

SEQ ID NO: 1329669 - DNA, 15 bp, Homo sapiens
ctccaatgcctctga

SEQ ID NO: 1329670 - DNA, 15 bp, Homo sapiens
tctccaatgcctctg

SEQ ID NO: 1329671 - DNA, 15 bp, Homo sapiens
ctctccaatgcctct

SEQ ID NO: 1329672 - DNA, 15 bp, Homo sapiens
tctctccaatgcctc

SEQ ID NO: 1329673 - DNA, 15 bp, Homo sapiens
gtctctccaatgcct

SEQ ID NO: 1329674 - DNA, 15 bp, Homo sapiens
agtctctccaatgcc

SEQ ID NO: 1329675 - DNA, 15 bp, Homo sapiens
gagtctctccaatgc

SEQ ID NO: 1329676 - DNA, 15 bp, Homo sapiens
tgagtctctccaatg

SEQ ID NO: 1329677 - DNA, 15 bp, Homo sapiens
ctgagtctctccaat

SEQ ID NO: 1329678 - DNA, 15 bp, Homo sapiens
cctgagtctctccaa

SEQ ID NO: 1329679 - DNA, 15 bp, Homo sapiens
gcctgagtctctcca

SEQ ID NO: 1329680 - DNA, 15 bp, Homo sapiens
ggcctgagtctctcc

SEQ ID NO: 1329681 - DNA, 15 bp, Homo sapiens
tggcctgagtctctc

SEQ ID NO: 1329682 - DNA, 15 bp, Homo sapiens
ctggcctgagtctct

SEQ ID NO: 1329683 - DNA, 15 bp, Homo sapiens
cctggcctgagtctc

SEQ ID NO: 1329684 - DNA, 15 bp, Homo sapiens
gcctggcctgagtct

SEQ ID NO: 1329685 - DNA, 15 bp, Homo sapiens
ggcctggcctgagtc

SEQ ID NO: 1329686 - DNA, 15 bp, Homo sapiens
gggcctggcctgagt

SEQ ID NO: 1329687 - DNA, 15 bp, Homo sapiens
ggggcctggcctgag

SEQ ID NO: 1329688 - DNA, 15 bp, Homo sapiens
gggggcctggcctga

SEQ ID NO: 1329689 - DNA, 15 bp, Homo sapiens
agggggcctggcctg

SEQ ID NO: 1329690 - DNA, 15 bp, Homo sapiens
gagggggcctggcct

SEQ ID NO: 1329691 - DNA, 15 bp, Homo sapiens
tgagggggcctggcc

SEQ ID NO: 1329692 - DNA, 15 bp, Homo sapiens
gtgagggggcctggc

SEQ ID NO: 1329693 - DNA, 15 bp, Homo sapiens
ggtgagggggcctgg

SEQ ID NO: 1329694 - DNA, 15 bp, Homo sapiens
cggtgagggggcctg

SEQ ID NO: 1329695 - DNA, 15 bp, Homo sapiens
acggtgagggggcct

SEQ ID NO: 1329696 - DNA, 15 bp, Homo sapiens
gacggtgagggggcc

SEQ ID NO: 1329697 - DNA, 15 bp, Homo sapiens
tgacggtgagggggc

SEQ ID NO: 1329698 - DNA, 15 bp, Homo sapiens
ctgacggtgaggggg

SEQ ID NO: 1329699 - DNA, 15 bp, Homo sapiens
gctgacggtgagggg

SEQ ID NO: 1329700 - DNA, 15 bp, Homo sapiens
agctgacggtgaggg

SEQ ID NO: 1329701 - DNA, 15 bp, Homo sapiens
gagctgacggtgagg

SEQ ID NO: 1329702 - DNA, 15 bp, Homo sapiens
tgagctgacggtgag

SEQ ID NO: 1329703 - DNA, 15 bp, Homo sapiens
ctgagctgacggtga

SEQ ID NO: 1329704 - DNA, 15 bp, Homo sapiens
cctgagctgacggtg

SEQ ID NO: 1329705 - DNA, 15 bp, Homo sapiens
tcctgagctgacggt

SEQ ID NO: 1329706 - DNA, 15 bp, Homo sapiens
atcctgagctgacgg

SEQ ID NO: 1329707 - DNA, 15 bp, Homo sapiens
catcctgagctgacg

SEQ ID NO: 1329708 - DNA, 15 bp, Homo sapiens
gcatcctgagctgac

SEQ ID NO: 1329709 - DNA, 15 bp, Homo sapiens
agcatcctgagctga

SEQ ID NO: 1329710 - DNA, 15 bp, Homo sapiens
cagcatcctgagctg

SEQ ID NO: 1329711 - DNA, 15 bp, Homo sapiens
ccagcatcctgagct

SEQ ID NO: 1329712 - DNA, 15 bp, Homo sapiens
tccagcatcctgagc

SEQ ID NO: 1329713 - DNA, 15 bp, Homo sapiens
atccagcatcctgag

SEQ ID NO: 1329714 - DNA, 15 bp, Homo sapiens
aatccagcatcctga

SEQ ID NO: 1329715 - DNA, 15 bp, Homo sapiens
taatccagcatcctg

SEQ ID NO: 1329716 - DNA, 15 bp, Homo sapiens
ataatccagcatcct

SEQ ID NO: 1329717 - DNA, 15 bp, Homo sapiens
tataatccagcatcc

SEQ ID NO: 1329718 - DNA, 15 bp, Homo sapiens
atataatccagcatc

SEQ ID NO: 1329719 - DNA, 15 bp, Homo sapiens
catataatccagcat

SEQ ID NO: 1329720 - DNA, 15 bp, Homo sapiens
gcatataatccagca

SEQ ID NO: 1329721 - DNA, 15 bp, Homo sapiens
agcatataatccagc

SEQ ID NO: 1329722 - DNA, 15 bp, Homo sapiens
tagcatataatccag

SEQ ID NO: 1329723 - DNA, 15 bp, Homo sapiens
gtagcatataatcca

SEQ ID NO: 1329724 - DNA, 15 bp, Homo sapiens
agtagcatataatcc

SEQ ID NO: 1329725 - DNA, 15 bp, Homo sapiens
cagtagcatataatc

SEQ ID NO: 1329726 - DNA, 15 bp, Homo sapiens
tcagtagcatataat

SEQ ID NO: 1329727 - DNA, 15 bp, Homo sapiens
ctcagtagcatataa

SEQ ID NO: 1329728 - DNA, 15 bp, Homo sapiens
cctcagtagcatata

SEQ ID NO: 1329729 - DNA, 15 bp, Homo sapiens
tcctcagtagcatat

SEQ ID NO: 1329730 - DNA, 15 bp, Homo sapiens
gtcctcagtagcata

SEQ ID NO: 1329731 - DNA, 15 bp, Homo sapiens
ggtcctcagtagcat

SEQ ID NO: 1329732 - DNA, 15 bp, Homo sapiens
aggtcctcagtagca

SEQ ID NO: 1329733 - DNA, 15 bp, Homo sapiens
caggtcctcagtagc

SEQ ID NO: 1329734 - DNA, 15 bp, Homo sapiens
ccaggtcctcagtag

SEQ ID NO: 1329735 - DNA, 15 bp, Homo sapiens
gccaggtcctcagta

SEQ ID NO: 1329736 - DNA, 15 bp, Homo sapiens
tgccaggtcctcagt

SEQ ID NO: 1329737 - DNA, 15 bp, Homo sapiens
ctgccaggtcctcag

SEQ ID NO: 1329738 - DNA, 15 bp, Homo sapiens
actgccaggtcctca

SEQ ID NO: 1329739 - DNA, 15 bp, Homo sapiens
cactgccaggtcctc

SEQ ID NO: 1329740 - DNA, 15 bp, Homo sapiens
acactgccaggtcct

SEQ ID NO: 1329741 - DNA, 15 bp, Homo sapiens
gacactgccaggtcc

SEQ ID NO: 1329742 - DNA, 15 bp, Homo sapiens
ggacactgccaggtc

SEQ ID NO: 1329743 - DNA, 15 bp, Homo sapiens
tggacactgccaggt

SEQ ID NO: 1329744 - DNA, 15 bp, Homo sapiens
ttggacactgccagg

SEQ ID NO: 1329745 - DNA, 15 bp, Homo sapiens
gttggacactgccag

SEQ ID NO: 1329746 - DNA, 15 bp, Homo sapiens
tgttggacactgcca

SEQ ID NO: 1329747 - DNA, 15 bp, Homo sapiens
ctgttggacactgcc

SEQ ID NO: 1329748 - DNA, 15 bp, Homo sapiens
gctgttggacactgc

SEQ ID NO: 1329749 - DNA, 15 bp, Homo sapiens
agctgttggacactg

SEQ ID NO: 1329750 - DNA, 15 bp, Homo sapiens
gagctgttggacact

SEQ ID NO: 1329751 - DNA, 15 bp, Homo sapiens
agagctgttggacac

SEQ ID NO: 1329752 - DNA, 15 bp, Homo sapiens
cagagctgttggaca

SEQ ID NO: 1329753 - DNA, 15 bp, Homo sapiens
tcagagctgttggac

SEQ ID NO: 1329754 - DNA, 15 bp, Homo sapiens
ttcagagctgttgga

SEQ ID NO: 1329755 - DNA, 15 bp, Homo sapiens
attcagagctgttgg

SEQ ID NO: 1329756 - DNA, 15 bp, Homo sapiens
cattcagagctgttg

SEQ ID NO: 1329757 - DNA, 15 bp, Homo sapiens
gcattcagagctgtt

SEQ ID NO: 1329758 - DNA, 15 bp, Homo sapiens
ggcattcagagctgt

SEQ ID NO: 1329759 - DNA, 15 bp, Homo sapiens
tggcattcagagctg

SEQ ID NO: 1329760 - DNA, 15 bp, Homo sapiens
ctggcattcagagct

SEQ ID NO: 1329761 - DNA, 15 bp, Homo sapiens
tctggcattcagagc

SEQ ID NO: 1329762 - DNA, 15 bp, Homo sapiens
atctggcattcagag

SEQ ID NO: 1329763 - DNA, 15 bp, Homo sapiens
aatctggcattcaga

SEQ ID NO: 1329764 - DNA, 15 bp, Homo sapiens
gaatctggcattcag

SEQ ID NO: 1329765 - DNA, 15 bp, Homo sapiens
ggaatctggcattca

SEQ ID NO: 1329766 - DNA, 15 bp, Homo sapiens
aggaatctggcattc

SEQ ID NO: 1329767 - DNA, 15 bp, Homo sapiens
caggaatctggcatt

SEQ ID NO: 1329768 - DNA, 15 bp, Homo sapiens
tcaggaatctggcat

SEQ ID NO: 1329769 - DNA, 15 bp, Homo sapiens
ctcaggaatctggca

SEQ ID NO: 1329770 - DNA, 15 bp, Homo sapiens
cctcaggaatctggc

SEQ ID NO: 1329771 - DNA, 15 bp, Homo sapiens
tcctcaggaatctgg

SEQ ID NO: 1329772 - DNA, 15 bp, Homo sapiens
ctcctcaggaatctg

SEQ ID NO: 1329773 - DNA, 15 bp, Homo sapiens
gctcctcaggaatct

SEQ ID NO: 1329774 - DNA, 15 bp, Homo sapiens
ggctcctcaggaatc

SEQ ID NO: 1329775 - DNA, 15 bp, Homo sapiens
tggctcctcaggaat

SEQ ID NO: 1329776 - DNA, 15 bp, Homo sapiens
ctggctcctcaggaa

SEQ ID NO: 1329777 - DNA, 15 bp, Homo sapiens
gctggctcctcagga

SEQ ID NO: 1329778 - DNA, 15 bp, Homo sapiens
cgctggctcctcagg

SEQ ID NO: 1329779 - DNA, 15 bp, Homo sapiens
acgctggctcctcag

SEQ ID NO: 1329780 - DNA, 15 bp, Homo sapiens
gacgctggctcctca

SEQ ID NO: 1329781 - DNA, 15 bp, Homo sapiens
agacgctggctcctc

SEQ ID NO: 1329782 - DNA, 15 bp, Homo sapiens
gagacgctggctcct

SEQ ID NO: 1329783 - DNA, 15 bp, Homo sapiens
ggagacgctggctcc

SEQ ID NO: 1329784 - DNA, 15 bp, Homo sapiens
gggagacgctggctc

SEQ ID NO: 1329785 - DNA, 15 bp, Homo sapiens
ggggagacgctggct

SEQ ID NO: 1329786 - DNA, 15 bp, Homo sapiens
tggggagacgctggc

SEQ ID NO: 1329787 - DNA, 15 bp, Homo sapiens
ctggggagacgctgg

SEQ ID NO: 1329788 - DNA, 15 bp, Homo sapiens
gctggggagacgctg

SEQ ID NO: 1329789 - DNA, 15 bp, Homo sapiens
ggctggggagacgct

SEQ ID NO: 1329790 - DNA, 15 bp, Homo sapiens
aggctggggagacgc

SEQ ID NO: 1329791 - DNA, 15 bp, Homo sapiens
gaggctggggagacg

SEQ ID NO: 1329792 - DNA, 15 bp, Homo sapiens
tgaggctggggagac

SEQ ID NO: 1329793 - DNA, 15 bp, Homo sapiens
ctgaggctggggaga

SEQ ID NO: 1329794 - DNA, 15 bp, Homo sapiens
gctgaggctggggag

SEQ ID NO: 1329795 - DNA, 15 bp, Homo sapiens
agctgaggctgggga

SEQ ID NO: 1329796 - DNA, 15 bp, Homo sapiens
tagctgaggctgggg

SEQ ID NO: 1329797 - DNA, 15 bp, Homo sapiens
gtagctgaggctggg

SEQ ID NO: 1329798 - DNA, 15 bp, Homo sapiens
agtagctgaggctgg

SEQ ID NO: 1329799 - DNA, 15 bp, Homo sapiens
gagtagctgaggctg

SEQ ID NO: 1329800 - DNA, 15 bp, Homo sapiens
ggagtagctgaggct

SEQ ID NO: 1329801 - DNA, 15 bp, Homo sapiens
gggagtagctgaggc

SEQ ID NO: 1329802 - DNA, 15 bp, Homo sapiens
agggagtagctgagg

SEQ ID NO: 1329803 - DNA, 15 bp, Homo sapiens
cagggagtagctgag

SEQ ID NO: 1329804 - DNA, 15 bp, Homo sapiens
ccagggagtagctga

SEQ ID NO: 1329805 - DNA, 15 bp, Homo sapiens
gccagggagtagctg

SEQ ID NO: 1329806 - DNA, 15 bp, Homo sapiens
agccagggagtagct

SEQ ID NO: 1329807 - DNA, 15 bp, Homo sapiens
cagccagggagtagc

SEQ ID NO: 1329808 - DNA, 15 bp, Homo sapiens
ccagccagggagtag

SEQ ID NO: 1329809 - DNA, 15 bp, Homo sapiens
gccagccagggagta

SEQ ID NO: 1329810 - DNA, 15 bp, Homo sapiens
agccagccagggagt

SEQ ID NO: 1329811 - DNA, 15 bp, Homo sapiens
cagccagccagggag

SEQ ID NO: 1329812 - DNA, 15 bp, Homo sapiens
ccagccagccaggga

SEQ ID NO: 1329813 - DNA, 15 bp, Homo sapiens
cccagccagccaggg

SEQ ID NO: 1329814 - DNA, 15 bp, Homo sapiens
ccccagccagccagg

SEQ ID NO: 1329815 - DNA, 15 bp, Homo sapiens
gccccagccagccag

SEQ ID NO: 1329816 - DNA, 15 bp, Homo sapiens
ggccccagccagcca

SEQ ID NO: 1329817 - DNA, 15 bp, Homo sapiens
gggccccagccagcc

SEQ ID NO: 1329818 - DNA, 15 bp, Homo sapiens
agggccccagccagc

SEQ ID NO: 1329819 - DNA, 15 bp, Homo sapiens
tagggccccagccag

SEQ ID NO: 1329820 - DNA, 15 bp, Homo sapiens
ctagggccccagcca

SEQ ID NO: 1329821 - DNA, 15 bp, Homo sapiens
tctagggccccagcc

SEQ ID NO: 1329822 - DNA, 15 bp, Homo sapiens
atctagggccccagc

SEQ ID NO: 1329823 - DNA, 15 bp, Homo sapiens
gatctagggccccag

SEQ ID NO: 1329824 - DNA, 15 bp, Homo sapiens
agatctagggcccca

SEQ ID NO: 1329825 - DNA, 15 bp, Homo sapiens
cagatctagggcccc

SEQ ID NO: 1329826 - DNA, 15 bp, Homo sapiens
tcagatctagggccc

SEQ ID NO: 1329827 - DNA, 15 bp, Homo sapiens
ctcagatctagggcc

SEQ ID NO: 1329828 - DNA, 15 bp, Homo sapiens
actcagatctagggc

SEQ ID NO: 1329829 - DNA, 15 bp, Homo sapiens
cactcagatctaggg

SEQ ID NO: 1329830 - DNA, 15 bp, Homo sapiens
gcactcagatctagg

SEQ ID NO: 1329831 - DNA, 15 bp, Homo sapiens
tgcactcagatctag

SEQ ID NO: 1329832 - DNA, 15 bp, Homo sapiens
ctgcactcagatcta

SEQ ID NO: 1329833 - DNA, 15 bp, Homo sapiens
gctgcactcagatct

SEQ ID NO: 1329834 - DNA, 15 bp, Homo sapiens
tgctgcactcagatc

SEQ ID NO: 1329835 - DNA, 15 bp, Homo sapiens
atgctgcactcagat

SEQ ID NO: 1329836 - DNA, 15 bp, Homo sapiens
gatgctgcactcaga

SEQ ID NO: 1329837 - DNA, 15 bp, Homo sapiens
agatgctgcactcag

SEQ ID NO: 1329838 - DNA, 15 bp, Homo sapiens
cagatgctgcactca

SEQ ID NO: 1329839 - DNA, 15 bp, Homo sapiens
gcagatgctgcactc

SEQ ID NO: 1329840 - DNA, 15 bp, Homo sapiens
tgcagatgctgcact

SEQ ID NO: 1329841 - DNA, 15 bp, Homo sapiens
atgcagatgctgcac

SEQ ID NO: 1329842 - DNA, 15 bp, Homo sapiens
aatgcagatgctgca

SEQ ID NO: 1329843 - DNA, 15 bp, Homo sapiens
aaatgcagatgctgc

SEQ ID NO: 1329844 - DNA, 15 bp, Homo sapiens
gaaatgcagatgctg

SEQ ID NO: 1329845 - DNA, 15 bp, Homo sapiens
ggaaatgcagatgct

SEQ ID NO: 1329846 - DNA, 15 bp, Homo sapiens
gggaaatgcagatgc

SEQ ID NO: 1329847 - DNA, 15 bp, Homo sapiens
tgggaaatgcagatg

SEQ ID NO: 1329848 - DNA, 15 bp, Homo sapiens
ctgggaaatgcagat

SEQ ID NO: 1329849 - DNA, 15 bp, Homo sapiens
cctgggaaatgcaga

SEQ ID NO: 1329850 - DNA, 15 bp, Homo sapiens
gcctgggaaatgcag

SEQ ID NO: 1329851 - DNA, 15 bp, Homo sapiens
agcctgggaaatgca

SEQ ID NO: 1329852 - DNA, 15 bp, Homo sapiens
cagcctgggaaatgc

SEQ ID NO: 1329853 - DNA, 15 bp, Homo sapiens
acagcctgggaaatg

SEQ ID NO: 1329854 - DNA, 15 bp, Homo sapiens
cacagcctgggaaat

SEQ ID NO: 1329855 - DNA, 15 bp, Homo sapiens
tcacagcctgggaaa

SEQ ID NO: 1329856 - DNA, 15 bp, Homo sapiens
ctcacagcctgggaa

SEQ ID NO: 1329857 - DNA, 15 bp, Homo sapiens
tctcacagcctggga

SEQ ID NO: 1329858 - DNA, 15 bp, Homo sapiens
ttctcacagcctggg

SEQ ID NO: 1329859 - DNA, 15 bp, Homo sapiens
gttctcacagcctgg

SEQ ID NO: 1329860 - DNA, 15 bp, Homo sapiens
agttctcacagcctg

SEQ ID NO: 1329861 - DNA, 15 bp, Homo sapiens
tagttctcacagcct

SEQ ID NO: 1329862 - DNA, 15 bp, Homo sapiens
gtagttctcacagcc

SEQ ID NO: 1329863 - DNA, 15 bp, Homo sapiens
tgtagttctcacagc

SEQ ID NO: 1329864 - DNA, 15 bp, Homo sapiens
ctgtagttctcacag

SEQ ID NO: 1329865 - DNA, 15 bp, Homo sapiens
actgtagttctcaca

SEQ ID NO: 1329866 - DNA, 15 bp, Homo sapiens
cactgtagttctcac

SEQ ID NO: 1329867 - DNA, 15 bp, Homo sapiens
gcactgtagttctca

SEQ ID NO: 1329868 - DNA, 15 bp, Homo sapiens
tgcactgtagttctc

SEQ ID NO: 1329869 - DNA, 15 bp, Homo sapiens
ttgcactgtagttct

SEQ ID NO: 1329870 - DNA, 15 bp, Homo sapiens
gttgcactgtagttc

SEQ ID NO: 1329871 - DNA, 15 bp, Homo sapiens
ggttgcactgtagtt

SEQ ID NO: 1329872 - DNA, 15 bp, Homo sapiens
gggttgcactgtagt

SEQ ID NO: 1329873 - DNA, 15 bp, Homo sapiens
agggttgcactgtag

SEQ ID NO: 1329874 - DNA, 15 bp, Homo sapiens
gagggttgcactgta

SEQ ID NO: 1329875 - DNA, 15 bp, Homo sapiens
ggagggttgcactgt

SEQ ID NO: 1329876 - DNA, 15 bp, Homo sapiens
aggagggttgcactg

SEQ ID NO: 1329877 - DNA, 15 bp, Homo sapiens
gaggagggttgcact

SEQ ID NO: 1329878 - DNA, 15 bp, Homo sapiens
agaggagggttgcac

SEQ ID NO: 1329879 - DNA, 15 bp, Homo sapiens
cagaggagggttgca

SEQ ID NO: 1329880 - DNA, 15 bp, Homo sapiens
acagaggagggttgc

SEQ ID NO: 1329881 - DNA, 15 bp, Homo sapiens
cacagaggagggttg

SEQ ID NO: 1329882 - DNA, 15 bp, Homo sapiens
acacagaggagggtt

SEQ ID NO: 1329883 - DNA, 15 bp, Homo sapiens
aacacagaggagggt

SEQ ID NO: 1329884 - DNA, 15 bp, Homo sapiens
caacacagaggaggg

SEQ ID NO: 1329885 - DNA, 15 bp, Homo sapiens
gcaacacagaggagg

SEQ ID NO: 1329886 - DNA, 15 bp, Homo sapiens
agcaacacagaggag

SEQ ID NO: 1329887 - DNA, 15 bp, Homo sapiens
cagcaacacagagga

SEQ ID NO: 1329888 - DNA, 15 bp, Homo sapiens
ccagcaacacagagg

SEQ ID NO: 1329889 - DNA, 15 bp, Homo sapiens
tccagcaacacagag

SEQ ID NO: 1329890 - DNA, 15 bp, Homo sapiens
ctccagcaacacaga

SEQ ID NO: 1329891 - DNA, 15 bp, Homo sapiens
actccagcaacacag

SEQ ID NO: 1329892 - DNA, 15 bp, Homo sapiens
cactccagcaacaca

SEQ ID NO: 1329893 - DNA, 15 bp, Homo sapiens
tcactccagcaacac

SEQ ID NO: 1329894 - DNA, 15 bp, Homo sapiens
ttcactccagcaaca

SEQ ID NO: 1329895 - DNA, 15 bp, Homo sapiens
attcactccagcaac

SEQ ID NO: 1329896 - DNA, 15 bp, Homo sapiens
cattcactccagcaa

SEQ ID NO: 1329897 - DNA, 15 bp, Homo sapiens
gcattcactccagca

SEQ ID NO: 1329898 - DNA, 15 bp, Homo sapiens
ggcattcactccagc

SEQ ID NO: 1329899 - DNA, 15 bp, Homo sapiens
gggcattcactccag

SEQ ID NO: 1329900 - DNA, 15 bp, Homo sapiens
agggcattcactcca

SEQ ID NO: 1329901 - DNA, 15 bp, Homo sapiens
gagggcattcactcc

SEQ ID NO: 1329902 - DNA, 15 bp, Homo sapiens
tgagggcattcactc

SEQ ID NO: 1329903 - DNA, 15 bp, Homo sapiens
ctgagggcattcact

SEQ ID NO: 1329904 - DNA, 15 bp, Homo sapiens
cctgagggcattcac

SEQ ID NO: 1329905 - DNA, 15 bp, Homo sapiens
ccctgagggcattca

SEQ ID NO: 1329906 - DNA, 15 bp, Homo sapiens
gccctgagggcattc

SEQ ID NO: 1329907 - DNA, 15 bp, Homo sapiens
tgccctgagggcatt

SEQ ID NO: 1329908 - DNA, 15 bp, Homo sapiens
ctgccctgagggcat

SEQ ID NO: 1329909 - DNA, 15 bp, Homo sapiens
cctgccctgagggca

SEQ ID NO: 1329910 - DNA, 15 bp, Homo sapiens
gcctgccctgagggc

SEQ ID NO: 1329911 - DNA, 15 bp, Homo sapiens
tgcctgccctgaggg

SEQ ID NO: 1329912 - DNA, 15 bp, Homo sapiens
ctgcctgccctgagg

SEQ ID NO: 1329913 - DNA, 15 bp, Homo sapiens
gctgcctgccctgag

SEQ ID NO: 1329914 - DNA, 15 bp, Homo sapiens
agctgcctgccctga

SEQ ID NO: 1329915 - DNA, 15 bp, Homo sapiens
aagctgcctgccctg

SEQ ID NO: 1329916 - DNA, 15 bp, Homo sapiens
gaagctgcctgccct

SEQ ID NO: 1329917 - DNA, 15 bp, Homo sapiens
ggaagctgcctgccc

SEQ ID NO: 1329918 - DNA, 15 bp, Homo sapiens
tggaagctgcctgcc

SEQ ID NO: 1329919 - DNA, 15 bp, Homo sapiens
ctggaagctgcctgc

SEQ ID NO: 1329920 - DNA, 15 bp, Homo sapiens
cctggaagctgcctg

SEQ ID NO: 1329921 - DNA, 15 bp, Homo sapiens
ccctggaagctgcct

SEQ ID NO: 1329922 - DNA, 15 bp, Homo sapiens
accctggaagctgcc

SEQ ID NO: 1329923 - DNA, 15 bp, Homo sapiens
caccctggaagctgc

SEQ ID NO: 1329924 - DNA, 15 bp, Homo sapiens
ccaccctggaagctg

SEQ ID NO: 1329925 - DNA, 15 bp, Homo sapiens
gccaccctggaagct

SEQ ID NO: 1329926 - DNA, 15 bp, Homo sapiens
tgccaccctggaagc

SEQ ID NO: 1329927 - DNA, 15 bp, Homo sapiens
gtgccaccctggaag

SEQ ID NO: 1329928 - DNA, 15 bp, Homo sapiens
ggtgccaccctggaa

SEQ ID NO: 1329929 - DNA, 15 bp, Homo sapiens
aggtgccaccctgga

SEQ ID NO: 1329930 - DNA, 15 bp, Homo sapiens
gaggtgccaccctgg

SEQ ID NO: 1329931 - DNA, 15 bp, Homo sapiens
tgaggtgccaccctg

SEQ ID NO: 1329932 - DNA, 15 bp, Homo sapiens
atgaggtgccaccct

SEQ ID NO: 1329933 - DNA, 15 bp, Homo sapiens
tatgaggtgccaccc

SEQ ID NO: 1329934 - DNA, 15 bp, Homo sapiens
atatgaggtgccacc

SEQ ID NO: 1329935 - DNA, 15 bp, Homo sapiens
tatatgaggtgccac

SEQ ID NO: 1329936 - DNA, 15 bp, Homo sapiens
ttatatgaggtgcca

SEQ ID NO: 1329937 - DNA, 15 bp, Homo sapiens
tttatatgaggtgcc

SEQ ID NO: 1329938 - DNA, 15 bp, Homo sapiens
atttatatgaggtgc

SEQ ID NO: 1329939 - DNA, 15 bp, Homo sapiens
gatttatatgaggtg

SEQ ID NO: 1329940 - DNA, 15 bp, Homo sapiens
ggatttatatgaggt

SEQ ID NO: 1329941 - DNA, 15 bp, Homo sapiens
tggatttatatgagg

SEQ ID NO: 1329942 - DNA, 15 bp, Homo sapiens
ctggatttatatgag

SEQ ID NO: 1329943 - DNA, 15 bp, Homo sapiens
cctggatttatatga

SEQ ID NO: 1329944 - DNA, 15 bp, Homo sapiens
ccctggatttatatg

SEQ ID NO: 1329945 - DNA, 15 bp, Homo sapiens
tccctggatttatat

SEQ ID NO: 1329946 - DNA, 15 bp, Homo sapiens
ctccctggatttata

SEQ ID NO: 1329947 - DNA, 15 bp, Homo sapiens
actccctggatttat

SEQ ID NO: 1329948 - DNA, 15 bp, Homo sapiens
cactccctggattta

SEQ ID NO: 1329949 - DNA, 15 bp, Homo sapiens
ccactccctggattt

SEQ ID NO: 1329950 - DNA, 15 bp, Homo sapiens
gccactccctggatt

SEQ ID NO: 1329951 - DNA, 15 bp, Homo sapiens
ggccactccctggat

SEQ ID NO: 1329952 - DNA, 15 bp, Homo sapiens
cggccactccctgga

SEQ ID NO: 1329953 - DNA, 15 bp, Homo sapiens
tcggccactccctgg

SEQ ID NO: 1329954 - DNA, 15 bp, Homo sapiens
ctcggccactccctg

SEQ ID NO: 1329955 - DNA, 15 bp, Homo sapiens
cctcggccactccct

SEQ ID NO: 1329956 - DNA, 15 bp, Homo sapiens
gcctcggccactccc

SEQ ID NO: 1329957 - DNA, 15 bp, Homo sapiens
ggcctcggccactcc

SEQ ID NO: 1329958 - DNA, 15 bp, Homo sapiens
aggcctcggccactc

SEQ ID NO: 1329959 - DNA, 15 bp, Homo sapiens
caggcctcggccact

SEQ ID NO: 1329960 - DNA, 15 bp, Homo sapiens
gcaggcctcggccac

SEQ ID NO: 1329961 - DNA, 15 bp, Homo sapiens
tgcaggcctcggcca

SEQ ID NO: 1329962 - DNA, 15 bp, Homo sapiens
ttgcaggcctcggcc

SEQ ID NO: 1329963 - DNA, 15 bp, Homo sapiens
cttgcaggcctcggc

SEQ ID NO: 1329964 - DNA, 15 bp, Homo sapiens
ccttgcaggcctcgg

SEQ ID NO: 1329965 - DNA, 15 bp, Homo sapiens
tccttgcaggcctcg

SEQ ID NO: 1329966 - DNA, 15 bp, Homo sapiens
ttccttgcaggcctc

SEQ ID NO: 1329967 - DNA, 15 bp, Homo sapiens
attccttgcaggcct

SEQ ID NO: 1329968 - DNA, 15 bp, Homo sapiens
gattccttgcaggcc

SEQ ID NO: 1329969 - DNA, 15 bp, Homo sapiens
agattccttgcaggc

SEQ ID NO: 1329970 - DNA, 15 bp, Homo sapiens
cagattccttgcagg

SEQ ID NO: 1329971 - DNA, 15 bp, Homo sapiens
ccagattccttgcag

SEQ ID NO: 1329972 - DNA, 15 bp, Homo sapiens
ttctgggccgccagg

SEQ ID NO: 1329973 - DNA, 15 bp, Homo sapiens
cttctgggccgccag

SEQ ID NO: 1329974 - DNA, 15 bp, Homo sapiens
acttctgggccgcca

SEQ ID NO: 1329975 - DNA, 15 bp, Homo sapiens
tacttctgggccgcc

SEQ ID NO: 1329976 - DNA, 15 bp, Homo sapiens
ctacttctgggccgc

SEQ ID NO: 1329977 - DNA, 15 bp, Homo sapiens
tctacttctgggccg

SEQ ID NO: 1329978 - DNA, 15 bp, Homo sapiens
ctctacttctgggcc

SEQ ID NO: 1329979 - DNA, 15 bp, Homo sapiens
gctctacttctgggc

SEQ ID NO: 1329980 - DNA, 15 bp, Homo sapiens
ggctctacttctggg

SEQ ID NO: 1329981 - DNA, 15 bp, Homo sapiens
tggctctacttctgg

SEQ ID NO: 1329982 - DNA, 15 bp, Homo sapiens
atggctctacttctg

SEQ ID NO: 1329983 - DNA, 15 bp, Homo sapiens
gatggctctacttct

SEQ ID NO: 1329984 - DNA, 15 bp, Homo sapiens
ggatggctctacttc

SEQ ID NO: 1329985 - DNA, 15 bp, Homo sapiens
tggatggctctactt

SEQ ID NO: 1329986 - DNA, 15 bp, Homo sapiens
atggatggctctact

SEQ ID NO: 1329987 - DNA, 15 bp, Homo sapiens
gatggatggctctac

SEQ ID NO: 1329988 - DNA, 15 bp, Homo sapiens
ggatggatggctcta

SEQ ID NO: 1329989 - DNA, 15 bp, Homo sapiens
tggatggatggctct

SEQ ID NO: 1329990 - DNA, 15 bp, Homo sapiens
atggatggatggctc

SEQ ID NO: 1329991 - DNA, 15 bp, Homo sapiens
catggatggatggct

SEQ ID NO: 1329992 - DNA, 15 bp, Homo sapiens
gcatggatggatggc

SEQ ID NO: 1329993 - DNA, 15 bp, Homo sapiens
ggcatggatggatgg

SEQ ID NO: 1329994 - DNA, 15 bp, Homo sapiens
tggcatggatggatg

SEQ ID NO: 1329995 - DNA, 15 bp, Homo sapiens
atggcatggatggat

SEQ ID NO: 1329996 - DNA, 15 bp, Homo sapiens
tatggcatggatgga

SEQ ID NO: 1329997 - DNA, 15 bp, Homo sapiens
gtatggcatggatgg

SEQ ID NO: 1329998 - DNA, 15 bp, Homo sapiens
ggtatggcatggatg

SEQ ID NO: 1329999 - DNA, 15 bp, Homo sapiens
tggtatggcatggat

SEQ ID NO: 1330000 - DNA, 15 bp, Homo sapiens
gtggtatggcatgga

SEQ ID NO: 1330001 - DNA, 15 bp, Homo sapiens
agtggtatggcatgg

SEQ ID NO: 1330002 - DNA, 15 bp, Homo sapiens
aagtggtatggcatg

SEQ ID NO: 1330003 - DNA, 15 bp, Homo sapiens
caagtggtatggcat

SEQ ID NO: 1330004 - DNA, 15 bp, Homo sapiens
acaagtggtatggca

SEQ ID NO: 1330005 - DNA, 15 bp, Homo sapiens
gacaagtggtatggc

SEQ ID NO: 1330006 - DNA, 15 bp, Homo sapiens
tgacaagtggtatgg

SEQ ID NO: 1330007 - DNA, 15 bp, Homo sapiens
ctgacaagtggtatg

SEQ ID NO: 1330008 - DNA, 15 bp, Homo sapiens
cctgacaagtggtat

SEQ ID NO: 1330009 - DNA, 15 bp, Homo sapiens
ccctgacaagtggta

SEQ ID NO: 1330010 - DNA, 15 bp, Homo sapiens
gccctgacaagtggt

SEQ ID NO: 1330011 - DNA, 15 bp, Homo sapiens
tgccctgacaagtgg

SEQ ID NO: 1330012 - DNA, 15 bp, Homo sapiens
gtgccctgacaagtg

SEQ ID NO: 1330013 - DNA, 15 bp, Homo sapiens
tgtgccctgacaagt

SEQ ID NO: 1330014 - DNA, 15 bp, Homo sapiens
ctgtgccctgacaag

SEQ ID NO: 1330015 - DNA, 15 bp, Homo sapiens
cctgtgccctgacaa

SEQ ID NO: 1330016 - DNA, 15 bp, Homo sapiens
ccctgtgccctgaca

SEQ ID NO: 1330017 - DNA, 15 bp, Homo sapiens
cccctgtgccctgac

SEQ ID NO: 1330018 - DNA, 15 bp, Homo sapiens
tcccctgtgccctga

SEQ ID NO: 1330019 - DNA, 15 bp, Homo sapiens
gtcccctgtgccctg

SEQ ID NO: 1330020 - DNA, 15 bp, Homo sapiens
agtcccctgtgccct

SEQ ID NO: 1330021 - DNA, 15 bp, Homo sapiens
cagtcccctgtgccc

SEQ ID NO: 1330022 - DNA, 15 bp, Homo sapiens
ccagtcccctgtgcc

SEQ ID NO: 1330023 - DNA, 15 bp, Homo sapiens
gccagtcccctgtgc

SEQ ID NO: 1330024 - DNA, 15 bp, Homo sapiens
agccagtcccctgtg

SEQ ID NO: 1330025 - DNA, 15 bp, Homo sapiens
cagccagtcccctgt

SEQ ID NO: 1330026 - DNA, 15 bp, Homo sapiens
ccagccagtcccctg

SEQ ID NO: 1330027 - DNA, 15 bp, Homo sapiens
cccagccagtcccct

SEQ ID NO: 1330028 - DNA, 15 bp, Homo sapiens
gcccagccagtcccc

SEQ ID NO: 1330029 - DNA, 15 bp, Homo sapiens
ggcccagccagtccc

SEQ ID NO: 1330030 - DNA, 15 bp, Homo sapiens
gggcccagccagtcc

SEQ ID NO: 1330031 - DNA, 15 bp, Homo sapiens
ggggcccagccagtc

SEQ ID NO: 1330032 - DNA, 15 bp, Homo sapiens
gggggcccagccagt

SEQ ID NO: 1330033 - DNA, 15 bp, Homo sapiens
tgggggcccagccag

SEQ ID NO: 1330034 - DNA, 15 bp, Homo sapiens
ctgggggcccagcca

SEQ ID NO: 1330035 - DNA, 15 bp, Homo sapiens
cctgggggcccagcc

SEQ ID NO: 1330036 - DNA, 15 bp, Homo sapiens
ccctgggggcccagc

SEQ ID NO: 1330037 - DNA, 15 bp, Homo sapiens
gccctgggggcccag

SEQ ID NO: 1330038 - DNA, 15 bp, Homo sapiens
agccctgggggccca

SEQ ID NO: 1330039 - DNA, 15 bp, Homo sapiens
cagccctgggggccc

SEQ ID NO: 1330040 - DNA, 15 bp, Homo sapiens
gcagccctgggggcc

SEQ ID NO: 1330041 - DNA, 15 bp, Homo sapiens
agcagccctgggggc

SEQ ID NO: 1330042 - DNA, 15 bp, Homo sapiens
gagcagccctggggg

SEQ ID NO: 1330043 - DNA, 15 bp, Homo sapiens
ggagcagccctgggg

SEQ ID NO: 1330044 - DNA, 15 bp, Homo sapiens
gggagcagccctggg

SEQ ID NO: 1330045 - DNA, 15 bp, Homo sapiens
ggggagcagccctgg

SEQ ID NO: 1330046 - DNA, 15 bp, Homo sapiens
tggggagcagccctg

SEQ ID NO: 1330047 - DNA, 15 bp, Homo sapiens
gtggggagcagccct

SEQ ID NO: 1330048 - DNA, 15 bp, Homo sapiens
agtggggagcagccc

SEQ ID NO: 1330049 - DNA, 15 bp, Homo sapiens
aagtggggagcagcc

SEQ ID NO: 1330050 - DNA, 15 bp, Homo sapiens
caagtggggagcagc

SEQ ID NO: 1330051 - DNA, 15 bp, Homo sapiens
gcaagtggggagcag

SEQ ID NO: 1330052 - DNA, 15 bp, Homo sapiens
tgcaagtggggagca

SEQ ID NO: 1330053 - DNA, 15 bp, Homo sapiens
ctgcaagtggggagc

SEQ ID NO: 1330054 - DNA, 15 bp, Homo sapiens
gctgcaagtggggag

SEQ ID NO: 1330055 - DNA, 15 bp, Homo sapiens
tgctgcaagtgggga

SEQ ID NO: 1330056 - DNA, 15 bp, Homo sapiens
gtgctgcaagtgggg

SEQ ID NO: 1330057 - DNA, 15 bp, Homo sapiens
tgtgctgcaagtggg

SEQ ID NO: 1330058 - DNA, 15 bp, Homo sapiens
ttgtgctgcaagtgg

SEQ ID NO: 1330059 - DNA, 15 bp, Homo sapiens
attgtgctgcaagtg

SEQ ID NO: 1330060 - DNA, 15 bp, Homo sapiens
cattgtgctgcaagt

SEQ ID NO: 1330061 - DNA, 15 bp, Homo sapiens
gcattgtgctgcaag

SEQ ID NO: 1330062 - DNA, 15 bp, Homo sapiens
ggcattgtgctgcaa

SEQ ID NO: 1330063 - DNA, 15 bp, Homo sapiens
aggcattgtgctgca

SEQ ID NO: 1330064 - DNA, 15 bp, Homo sapiens
aaggcattgtgctgc

SEQ ID NO: 1330065 - DNA, 15 bp, Homo sapiens
gaaggcattgtgctg

SEQ ID NO: 1330066 - DNA, 15 bp, Homo sapiens
agaaggcattgtgct

SEQ ID NO: 1330067 - DNA, 15 bp, Homo sapiens
gagaaggcattgtgc

SEQ ID NO: 1330068 - DNA, 15 bp, Homo sapiens
ggagaaggcattgtg

SEQ ID NO: 1330069 - DNA, 15 bp, Homo sapiens
tggagaaggcattgt

SEQ ID NO: 1330070 - DNA, 15 bp, Homo sapiens
gtggagaaggcattg

SEQ ID NO: 1330071 - DNA, 15 bp, Homo sapiens
ggtggagaaggcatt

SEQ ID NO: 1330072 - DNA, 15 bp, Homo sapiens
aggtggagaaggcat

SEQ ID NO: 1330073 - DNA, 15 bp, Homo sapiens
caggtggagaaggca

SEQ ID NO: 1330074 - DNA, 15 bp, Homo sapiens
gcaggtggagaaggc

SEQ ID NO: 1330075 - DNA, 15 bp, Homo sapiens
ggcaggtggagaagg

SEQ ID NO: 1330076 - DNA, 15 bp, Homo sapiens
gggcaggtggagaag

SEQ ID NO: 1330077 - DNA, 15 bp, Homo sapiens
agggcaggtggagaa

SEQ ID NO: 1330078 - DNA, 15 bp, Homo sapiens
gagggcaggtggaga

SEQ ID NO: 1330079 - DNA, 15 bp, Homo sapiens
ggagggcaggtggag

SEQ ID NO: 1330080 - DNA, 15 bp, Homo sapiens
gggagggcaggtgga

SEQ ID NO: 1330081 - DNA, 15 bp, Homo sapiens
tgggagggcaggtgg

SEQ ID NO: 1330082 - DNA, 15 bp, Homo sapiens
gtgggagggcaggtg

SEQ ID NO: 1330083 - DNA, 15 bp, Homo sapiens
agtgggagggcaggt

SEQ ID NO: 1330084 - DNA, 15 bp, Homo sapiens
gagtgggagggcagg

SEQ ID NO: 1330085 - DNA, 15 bp, Homo sapiens
agagtgggagggcag

SEQ ID NO: 1330086 - DNA, 15 bp, Homo sapiens
aagagtgggagggca

SEQ ID NO: 1330087 - DNA, 15 bp, Homo sapiens
gaagagtgggagggc

SEQ ID NO: 1330088 - DNA, 15 bp, Homo sapiens
ggaagagtgggaggg

SEQ ID NO: 1330089 - DNA, 15 bp, Homo sapiens
tggaagagtgggagg

SEQ ID NO: 1330090 - DNA, 15 bp, Homo sapiens
ctggaagagtgggag

SEQ ID NO: 1330091 - DNA, 15 bp, Homo sapiens
actggaagagtggga

SEQ ID NO: 1330092 - DNA, 15 bp, Homo sapiens
gactggaagagtggg

SEQ ID NO: 1330093 - DNA, 15 bp, Homo sapiens
ggactggaagagtgg

SEQ ID NO: 1330094 - DNA, 15 bp, Homo sapiens
tggactggaagagtg

SEQ ID NO: 1330095 - DNA, 15 bp, Homo sapiens
ttggactggaagagt

SEQ ID NO: 1330096 - DNA, 15 bp, Homo sapiens
attggactggaagag

SEQ ID NO: 1330097 - DNA, 15 bp, Homo sapiens
gattggactggaaga

SEQ ID NO: 1330098 - DNA, 15 bp, Homo sapiens
ggattggactggaag

SEQ ID NO: 1330099 - DNA, 15 bp, Homo sapiens
tggattggactggaa

SEQ ID NO: 1330100 - DNA, 15 bp, Homo sapiens
gtggattggactgga

SEQ ID NO: 1330101 - DNA, 15 bp, Homo sapiens
cgtggattggactgg

SEQ ID NO: 1330102 - DNA, 15 bp, Homo sapiens
gcgtggattggactg

SEQ ID NO: 1330103 - DNA, 15 bp, Homo sapiens
agcgtggattggact

SEQ ID NO: 1330104 - DNA, 15 bp, Homo sapiens
cagcgtggattggac

SEQ ID NO: 1330105 - DNA, 15 bp, Homo sapiens
acagcgtggattgga

SEQ ID NO: 1330106 - DNA, 15 bp, Homo sapiens
gacagcgtggattgg

SEQ ID NO: 1330107 - DNA, 15 bp, Homo sapiens
agacagcgtggattg

SEQ ID NO: 1330108 - DNA, 15 bp, Homo sapiens
aagacagcgtggatt

SEQ ID NO: 1330109 - DNA, 15 bp, Homo sapiens
gaagacagcgtggat

SEQ ID NO: 1330110 - DNA, 15 bp, Homo sapiens
agaagacagcgtgga

SEQ ID NO: 1330111 - DNA, 15 bp, Homo sapiens
cagaagacagcgtgg

SEQ ID NO: 1330112 - DNA, 15 bp, Homo sapiens
acagaagacagcgtg

SEQ ID NO: 1330113 - DNA, 15 bp, Homo sapiens
aacagaagacagcgt

SEQ ID NO: 1330114 - DNA, 15 bp, Homo sapiens
caacagaagacagcg

SEQ ID NO: 1330115 - DNA, 15 bp, Homo sapiens
gcaacagaagacagc

SEQ ID NO: 1330116 - DNA, 15 bp, Homo sapiens
tgcaacagaagacag

SEQ ID NO: 1330117 - DNA, 15 bp, Homo sapiens
ctgcaacagaagaca

SEQ ID NO: 1330118 - DNA, 15 bp, Homo sapiens
cctgcaacagaagac

SEQ ID NO: 1330119 - DNA, 15 bp, Homo sapiens
tcctgcaacagaaga

SEQ ID NO: 1330120 - DNA, 15 bp, Homo sapiens
gtcctgcaacagaag

SEQ ID NO: 1330121 - DNA, 15 bp, Homo sapiens
agtcctgcaacagaa

SEQ ID NO: 1330122 - DNA, 15 bp, Homo sapiens
tagtcctgcaacaga

SEQ ID NO: 1330123 - DNA, 15 bp, Homo sapiens
ttagtcctgcaacag

SEQ ID NO: 1330124 - DNA, 15 bp, Homo sapiens
gttagtcctgcaaca

SEQ ID NO: 1330125 - DNA, 15 bp, Homo sapiens
ggttagtcctgcaac

SEQ ID NO: 1330126 - DNA, 15 bp, Homo sapiens
aggttagtcctgcaa

SEQ ID NO: 1330127 - DNA, 15 bp, Homo sapiens
aaggttagtcctgca

SEQ ID NO: 1330128 - DNA, 15 bp, Homo sapiens
aaaggttagtcctgc

SEQ ID NO: 1330129 - DNA, 15 bp, Homo sapiens
caaaggttagtcctg

SEQ ID NO: 1330130 - DNA, 15 bp, Homo sapiens
tcaaaggttagtcct

SEQ ID NO: 1330131 - DNA, 15 bp, Homo sapiens
ctcaaaggttagtcc

SEQ ID NO: 1330132 - DNA, 15 bp, Homo sapiens
tctcaaaggttagtc

SEQ ID NO: 1330133 - DNA, 15 bp, Homo sapiens
ttctcaaaggttagt

SEQ ID NO: 1330134 - DNA, 15 bp, Homo sapiens
tttctcaaaggttag

SEQ ID NO: 1330135 - DNA, 15 bp, Homo sapiens
atttctcaaaggtta

SEQ ID NO: 1330136 - DNA, 15 bp, Homo sapiens
gatttctcaaaggtt

SEQ ID NO: 1330137 - DNA, 15 bp, Homo sapiens
ggatttctcaaaggt

SEQ ID NO: 1330138 - DNA, 15 bp, Homo sapiens
aggatttctcaaagg

SEQ ID NO: 1330139 - DNA, 15 bp, Homo sapiens
aaggatttctcaaag

SEQ ID NO: 1330140 - DNA, 15 bp, Homo sapiens
aaaggatttctcaaa

SEQ ID NO: 1330141 - DNA, 15 bp, Homo sapiens
aaaaggatttctcaa

SEQ ID NO: 1330142 - DNA, 15 bp, Homo sapiens
caaaaggatttctca

SEQ ID NO: 1330143 - DNA, 15 bp, Homo sapiens
acaaaaggatttctc

SEQ ID NO: 1330144 - DNA, 15 bp, Homo sapiens
cacaaaaggatttct

SEQ ID NO: 1330145 - DNA, 15 bp, Homo sapiens
tcacaaaaggatttc

SEQ ID NO: 1330146 - DNA, 15 bp, Homo sapiens
ttcacaaaaggattt

SEQ ID NO: 1330147 - DNA, 15 bp, Homo sapiens
cttcacaaaaggatt

SEQ ID NO: 1330148 - DNA, 15 bp, Homo sapiens
acttcacaaaaggat

SEQ ID NO: 1330149 - DNA, 15 bp, Homo sapiens
gacttcacaaaagga

SEQ ID NO: 1330150 - DNA, 15 bp, Homo sapiens
tgacttcacaaaagg

SEQ ID NO: 1330151 - DNA, 15 bp, Homo sapiens
atgacttcacaaaag

SEQ ID NO: 1330152 - DNA, 15 bp, Homo sapiens
aatgacttcacaaaa

SEQ ID NO: 1330153 - DNA, 15 bp, Homo sapiens
caatgacttcacaaa

SEQ ID NO: 1330154 - DNA, 15 bp, Homo sapiens
gcaatgacttcacaa

SEQ ID NO: 1330155 - DNA, 15 bp, Homo sapiens
ggcaatgacttcaca

SEQ ID NO: 1330156 - DNA, 15 bp, Homo sapiens
aggcaatgacttcac

SEQ ID NO: 1330157 - DNA, 15 bp, Homo sapiens
caggcaatgacttca

SEQ ID NO: 1330158 - DNA, 15 bp, Homo sapiens
gcaggcaatgacttc

SEQ ID NO: 1330159 - DNA, 15 bp, Homo sapiens
agcaggcaatgactt

SEQ ID NO: 1330160 - DNA, 15 bp, Homo sapiens
gagcaggcaatgact

SEQ ID NO: 1330161 - DNA, 15 bp, Homo sapiens
tgagcaggcaatgac

SEQ ID NO: 1330162 - DNA, 15 bp, Homo sapiens
ttgagcaggcaatga

SEQ ID NO: 1330163 - DNA, 15 bp, Homo sapiens
cttgagcaggcaatg

SEQ ID NO: 1330164 - DNA, 15 bp, Homo sapiens
tcttgagcaggcaat

SEQ ID NO: 1330165 - DNA, 15 bp, Homo sapiens
ttcttgagcaggcaa

SEQ ID NO: 1330166 - DNA, 15 bp, Homo sapiens
attcttgagcaggca

SEQ ID NO: 1330167 - DNA, 15 bp, Homo sapiens
cattcttgagcaggc

SEQ ID NO: 1330168 - DNA, 15 bp, Homo sapiens
acattcttgagcagg

SEQ ID NO: 1330169 - DNA, 15 bp, Homo sapiens
tacattcttgagcag

SEQ ID NO: 1330170 - DNA, 15 bp, Homo sapiens
gtacattcttgagca

SEQ ID NO: 1330171 - DNA, 15 bp, Homo sapiens
tgtacattcttgagc

SEQ ID NO: 1330172 - DNA, 15 bp, Homo sapiens
ctgtacattcttgag

SEQ ID NO: 1330173 - DNA, 15 bp, Homo sapiens
actgtacattcttga

SEQ ID NO: 1330174 - DNA, 15 bp, Homo sapiens
cactgtacattcttg

SEQ ID NO: 1330175 - DNA, 15 bp, Homo sapiens
ccactgtacattctt

SEQ ID NO: 1330176 - DNA, 15 bp, Homo sapiens
gccactgtacattct

SEQ ID NO: 1330177 - DNA, 15 bp, Homo sapiens
agccactgtacattc

SEQ ID NO: 1330178 - DNA, 15 bp, Homo sapiens
gagccactgtacatt

SEQ ID NO: 1330179 - DNA, 15 bp, Homo sapiens
ggagccactgtacat

SEQ ID NO: 1330180 - DNA, 15 bp, Homo sapiens
gggagccactgtaca

SEQ ID NO: 1330181 - DNA, 15 bp, Homo sapiens
ggggagccactgtac

SEQ ID NO: 1330182 - DNA, 15 bp, Homo sapiens
tggggagccactgta

SEQ ID NO: 1330183 - DNA, 15 bp, Homo sapiens
ttggggagccactgt

SEQ ID NO: 1330184 - DNA, 15 bp, Homo sapiens
attggggagccactg

SEQ ID NO: 1330185 - DNA, 15 bp, Homo sapiens
cattggggagccact

SEQ ID NO: 1330186 - DNA, 15 bp, Homo sapiens
gcattggggagccac

SEQ ID NO: 1330187 - DNA, 15 bp, Homo sapiens
ggcattggggagcca

SEQ ID NO: 1330188 - DNA, 15 bp, Homo sapiens
aggcattggggagcc

SEQ ID NO: 1330189 - DNA, 15 bp, Homo sapiens
aaggcattggggagc

SEQ ID NO: 1330190 - DNA, 15 bp, Homo sapiens
caaggcattggggag

SEQ ID NO: 1330191 - DNA, 15 bp, Homo sapiens
ccaaggcattgggga

SEQ ID NO: 1330192 - DNA, 15 bp, Homo sapiens
tccaaggcattgggg

SEQ ID NO: 1330193 - DNA, 15 bp, Homo sapiens
ctccaaggcattggg

SEQ ID NO: 1330194 - DNA, 15 bp, Homo sapiens
cctccaaggcattgg

SEQ ID NO: 1330195 - DNA, 15 bp, Homo sapiens
gcctccaaggcattg

SEQ ID NO: 1330196 - DNA, 15 bp, Homo sapiens
ggcctccaaggcatt

SEQ ID NO: 1330197 - DNA, 15 bp, Homo sapiens
tggcctccaaggcat

SEQ ID NO: 1330198 - DNA, 15 bp, Homo sapiens
atggcctccaaggca

SEQ ID NO: 1330199 - DNA, 15 bp, Homo sapiens
tatggcctccaaggc

SEQ ID NO: 1330200 - DNA, 15 bp, Homo sapiens
ttatggcctccaagg

SEQ ID NO: 1330201 - DNA, 15 bp, Homo sapiens
cttatggcctccaag

SEQ ID NO: 1330202 - DNA, 15 bp, Homo sapiens
ccttatggcctccaa

SEQ ID NO: 1330203 - DNA, 15 bp, Homo sapiens
gccttatggcctcca

SEQ ID NO: 1330204 - DNA, 15 bp, Homo sapiens
ggccttatggcctcc

SEQ ID NO: 1330205 - DNA, 15 bp, Homo sapiens
tggccttatggcctc

SEQ ID NO: 1330206 - DNA, 15 bp, Homo sapiens
ctggccttatggcct

SEQ ID NO: 1330207 - DNA, 15 bp, Homo sapiens
gctggccttatggcc

SEQ ID NO: 1330208 - DNA, 15 bp, Homo sapiens
ggctggccttatggc

SEQ ID NO: 1330209 - DNA, 15 bp, Homo sapiens
tggctggccttatgg

SEQ ID NO: 1330210 - DNA, 15 bp, Homo sapiens
ctggctggccttatg

SEQ ID NO: 1330211 - DNA, 15 bp, Homo sapiens
actggctggccttat

SEQ ID NO: 1330212 - DNA, 15 bp, Homo sapiens
aactggctggcctta

SEQ ID NO: 1330213 - DNA, 15 bp, Homo sapiens
gaactggctggcctt

SEQ ID NO: 1330214 - DNA, 15 bp, Homo sapiens
agaactggctggcct

SEQ ID NO: 1330215 - DNA, 15 bp, Homo sapiens
tagaactggctggcc

SEQ ID NO: 1330216 - DNA, 15 bp, Homo sapiens
ctagaactggctggc

SEQ ID NO: 1330217 - DNA, 15 bp, Homo sapiens
gctagaactggctgg

SEQ ID NO: 1330218 - DNA, 15 bp, Homo sapiens
agctagaactggctg

SEQ ID NO: 1330219 - DNA, 15 bp, Homo sapiens
gagctagaactggct

SEQ ID NO: 1330220 - DNA, 15 bp, Homo sapiens
agagctagaactggc

SEQ ID NO: 1330221 - DNA, 15 bp, Homo sapiens
gagagctagaactgg

SEQ ID NO: 1330222 - DNA, 15 bp, Homo sapiens
agagagctagaactg

SEQ ID NO: 1330223 - DNA, 15 bp, Homo sapiens
tagagagctagaact

SEQ ID NO: 1330224 - DNA, 15 bp, Homo sapiens
atagagagctagaac

SEQ ID NO: 1330225 - DNA, 15 bp, Homo sapiens
aatagagagctagaa

SEQ ID NO: 1330226 - DNA, 15 bp, Homo sapiens
taatagagagctaga

SEQ ID NO: 1330227 - DNA, 15 bp, Homo sapiens
gtaatagagagctag

SEQ ID NO: 1330228 - DNA, 15 bp, Homo sapiens
ggtaatagagagcta

SEQ ID NO: 1330229 - DNA, 15 bp, Homo sapiens
aggtaatagagagct

SEQ ID NO: 1330230 - DNA, 15 bp, Homo sapiens
caggtaatagagagc

SEQ ID NO: 1330231 - DNA, 15 bp, Homo sapiens
acaggtaatagagag

SEQ ID NO: 1330232 - DNA, 15 bp, Homo sapiens
gacaggtaatagaga

SEQ ID NO: 1330233 - DNA, 15 bp, Homo sapiens
ggacaggtaatagag

SEQ ID NO: 1330234 - DNA, 15 bp, Homo sapiens
gggacaggtaataga

SEQ ID NO: 1330235 - DNA, 15 bp, Homo sapiens
ggggacaggtaatag

SEQ ID NO: 1330236 - DNA, 15 bp, Homo sapiens
tggggacaggtaata

SEQ ID NO: 1330237 - DNA, 15 bp, Homo sapiens
gtggggacaggtaat

SEQ ID NO: 1330238 - DNA, 15 bp, Homo sapiens
agtggggacaggtaa

SEQ ID NO: 1330239 - DNA, 15 bp, Homo sapiens
gagtggggacaggta

SEQ ID NO: 1330240 - DNA, 15 bp, Homo sapiens
tgagtggggacaggt

SEQ ID NO: 1330241 - DNA, 15 bp, Homo sapiens
ttgagtggggacagg

SEQ ID NO: 1330242 - DNA, 15 bp, Homo sapiens
gttgagtggggacag

SEQ ID NO: 1330243 - DNA, 15 bp, Homo sapiens
agttgagtggggaca

SEQ ID NO: 1330244 - DNA, 15 bp, Homo sapiens
cagttgagtggggac

SEQ ID NO: 1330245 - DNA, 15 bp, Homo sapiens
tcagttgagtgggga

SEQ ID NO: 1330246 - DNA, 15 bp, Homo sapiens
gtcagttgagtgggg

SEQ ID NO: 1330247 - DNA, 15 bp, Homo sapiens
agtcagttgagtggg

SEQ ID NO: 1330248 - DNA, 15 bp, Homo sapiens
gagtcagttgagtgg

SEQ ID NO: 1330249 - DNA, 15 bp, Homo sapiens
tgagtcagttgagtg

SEQ ID NO: 1330250 - DNA, 15 bp, Homo sapiens
atgagtcagttgagt

SEQ ID NO: 1330251 - DNA, 15 bp, Homo sapiens
tatgagtcagttgag

SEQ ID NO: 1330252 - DNA, 15 bp, Homo sapiens
gtatgagtcagttga

SEQ ID NO: 1330253 - DNA, 15 bp, Homo sapiens
ggtatgagtcagttg

SEQ ID NO: 1330254 - DNA, 15 bp, Homo sapiens
aggtatgagtcagtt

SEQ ID NO: 1330255 - DNA, 15 bp, Homo sapiens
caggtatgagtcagt

SEQ ID NO: 1330256 - DNA, 15 bp, Homo sapiens
acaggtatgagtcag

SEQ ID NO: 1330257 - DNA, 15 bp, Homo sapiens
aacaggtatgagtca

SEQ ID NO: 1330258 - DNA, 15 bp, Homo sapiens
aaacaggtatgagtc

SEQ ID NO: 1330259 - DNA, 15 bp, Homo sapiens
gaaacaggtatgagt

SEQ ID NO: 1330260 - DNA, 15 bp, Homo sapiens
ggaaacaggtatgag

SEQ ID NO: 1330261 - DNA, 15 bp, Homo sapiens
cggaaacaggtatga

SEQ ID NO: 1330262 - DNA, 15 bp, Homo sapiens
ccggaaacaggtatg

SEQ ID NO: 1330263 - DNA, 15 bp, Homo sapiens
gccggaaacaggtat

SEQ ID NO: 1330264 - DNA, 15 bp, Homo sapiens
agccggaaacaggta

SEQ ID NO: 1330265 - DNA, 15 bp, Homo sapiens
cagccggaaacaggt

SEQ ID NO: 1330266 - DNA, 15 bp, Homo sapiens
gcagccggaaacagg

SEQ ID NO: 1330267 - DNA, 15 bp, Homo sapiens
tgcagccggaaacag

SEQ ID NO: 1330268 - DNA, 15 bp, Homo sapiens
atgcagccggaaaca

SEQ ID NO: 1330269 - DNA, 15 bp, Homo sapiens
gatgcagccggaaac

SEQ ID NO: 1330270 - DNA, 15 bp, Homo sapiens
tgatgcagccggaaa

SEQ ID NO: 1330271 - DNA, 15 bp, Homo sapiens
gtgatgcagccggaa

SEQ ID NO: 1330272 - DNA, 15 bp, Homo sapiens
agtgatgcagccgga

SEQ ID NO: 1330273 - DNA, 15 bp, Homo sapiens
tagtgatgcagccgg

SEQ ID NO: 1330274 - DNA, 15 bp, Homo sapiens
atagtgatgcagccg

SEQ ID NO: 1330275 - DNA, 15 bp, Homo sapiens
catagtgatgcagcc

SEQ ID NO: 1330276 - DNA, 15 bp, Homo sapiens
acatagtgatgcagc

SEQ ID NO: 1330277 - DNA, 15 bp, Homo sapiens
cacatagtgatgcag

SEQ ID NO: 1330278 - DNA, 15 bp, Homo sapiens
gcacatagtgatgca

SEQ ID NO: 1330279 - DNA, 15 bp, Homo sapiens
ggcacatagtgatgc

SEQ ID NO: 1330280 - DNA, 15 bp, Homo sapiens
gggcacatagtgatg

SEQ ID NO: 1330281 - DNA, 15 bp, Homo sapiens
ggggcacatagtgat

SEQ ID NO: 1330282 - DNA, 15 bp, Homo sapiens
tggggcacatagtga

SEQ ID NO: 1330283 - DNA, 15 bp, Homo sapiens
gtggggcacatagtg

SEQ ID NO: 1330284 - DNA, 15 bp, Homo sapiens
tgtggggcacatagt

SEQ ID NO: 1330285 - DNA, 15 bp, Homo sapiens
ctgtggggcacatag

SEQ ID NO: 1330286 - DNA, 15 bp, Homo sapiens
tctgtggggcacata

SEQ ID NO: 1330287 - DNA, 15 bp, Homo sapiens
ctctgtggggcacat

SEQ ID NO: 1330288 - DNA, 15 bp, Homo sapiens
tctctgtggggcaca

SEQ ID NO: 1330289 - DNA, 15 bp, Homo sapiens
ttctctgtggggcac

SEQ ID NO: 1330290 - DNA, 15 bp, Homo sapiens
gttctctgtggggca

SEQ ID NO: 1330291 - DNA, 15 bp, Homo sapiens
cgttctctgtggggc

SEQ ID NO: 1330292 - DNA, 15 bp, Homo sapiens
tcgttctctgtgggg

SEQ ID NO: 1330293 - DNA, 15 bp, Homo sapiens
atcgttctctgtggg

SEQ ID NO: 1330294 - DNA, 15 bp, Homo sapiens
catcgttctctgtgg

SEQ ID NO: 1330295 - DNA, 15 bp, Homo sapiens
tcatcgttctctgtg

SEQ ID NO: 1330296 - DNA, 15 bp, Homo sapiens
atcatcgttctctgt

SEQ ID NO: 1330297 - DNA, 15 bp, Homo sapiens
gatcatcgttctctg

SEQ ID NO: 1330298 - DNA, 15 bp, Homo sapiens
cgatcatcgttctct

SEQ ID NO: 1330299 - DNA, 15 bp, Homo sapiens
acgatcatcgttctc

SEQ ID NO: 1330300 - DNA, 15 bp, Homo sapiens
gacgatcatcgttct

SEQ ID NO: 1330301 - DNA, 15 bp, Homo sapiens
tgacgatcatcgttc

SEQ ID NO: 1330302 - DNA, 15 bp, Homo sapiens
gtgacgatcatcgtt

SEQ ID NO: 1330303 - DNA, 15 bp, Homo sapiens
ggtgacgatcatcgt

SEQ ID NO: 1330304 - DNA, 15 bp, Homo sapiens
aggtgacgatcatcg

SEQ ID NO: 1330305 - DNA, 15 bp, Homo sapiens
gaggtgacgatcatc

SEQ ID NO: 1330306 - DNA, 15 bp, Homo sapiens
agaggtgacgatcat

SEQ ID NO: 1330307 - DNA, 15 bp, Homo sapiens
cagaggtgacgatca

SEQ ID NO: 1330308 - DNA, 15 bp, Homo sapiens
acagaggtgacgatc

SEQ ID NO: 1330309 - DNA, 15 bp, Homo sapiens
cacagaggtgacgat

SEQ ID NO: 1330310 - DNA, 15 bp, Homo sapiens
gcacagaggtgacga

SEQ ID NO: 1330311 - DNA, 15 bp, Homo sapiens
ggcacagaggtgacg

SEQ ID NO: 1330312 - DNA, 15 bp, Homo sapiens
aggcacagaggtgac

SEQ ID NO: 1330313 - DNA, 15 bp, Homo sapiens
caggcacagaggtga

SEQ ID NO: 1330314 - DNA, 15 bp, Homo sapiens
tcaggcacagaggtg

SEQ ID NO: 1330315 - DNA, 15 bp, Homo sapiens
ctcaggcacagaggt

SEQ ID NO: 1330316 - DNA, 15 bp, Homo sapiens
actcaggcacagagg

SEQ ID NO: 1330317 - DNA, 15 bp, Homo sapiens
aactcaggcacagag

SEQ ID NO: 1330318 - DNA, 15 bp, Homo sapiens
gaactcaggcacaga

SEQ ID NO: 1330319 - DNA, 15 bp, Homo sapiens
agaactcaggcacag

SEQ ID NO: 1330320 - DNA, 15 bp, Homo sapiens
gagaactcaggcaca

SEQ ID NO: 1330321 - DNA, 15 bp, Homo sapiens
ggagaactcaggcac

SEQ ID NO: 1330322 - DNA, 15 bp, Homo sapiens
gggagaactcaggca

SEQ ID NO: 1330323 - DNA, 15 bp, Homo sapiens
agggagaactcaggc

SEQ ID NO: 1330324 - DNA, 15 bp, Homo sapiens
cagggagaactcagg

SEQ ID NO: 1330325 - DNA, 15 bp, Homo sapiens
acagggagaactcag

SEQ ID NO: 1330326 - DNA, 15 bp, Homo sapiens
aacagggagaactca

SEQ ID NO: 1330327 - DNA, 15 bp, Homo sapiens
caacagggagaactc

SEQ ID NO: 1330328 - DNA, 15 bp, Homo sapiens
acaacagggagaact

SEQ ID NO: 1330329 - DNA, 15 bp, Homo sapiens
gacaacagggagaac

SEQ ID NO: 1330330 - DNA, 15 bp, Homo sapiens
agacaacagggagaa

SEQ ID NO: 1330331 - DNA, 15 bp, Homo sapiens
gagacaacagggaga

SEQ ID NO: 1330332 - DNA, 15 bp, Homo sapiens
ttgagacaacaggga

SEQ ID NO: 1330333 - DNA, 15 bp, Homo sapiens
tttgagacaacaggg

SEQ ID NO: 1330334 - DNA, 15 bp, Homo sapiens
ctttgagacaacagg

SEQ ID NO: 1330335 - DNA, 15 bp, Homo sapiens
gctttgagacaacag

SEQ ID NO: 1330336 - DNA, 15 bp, Homo sapiens
cgctttgagacaaca

SEQ ID NO: 1330337 - DNA, 15 bp, Homo sapiens
ccgctttgagacaac

SEQ ID NO: 1330338 - DNA, 15 bp, Homo sapiens
accgctttgagacaa

SEQ ID NO: 1330339 - DNA, 15 bp, Homo sapiens
taccgctttgagaca

SEQ ID NO: 1330340 - DNA, 15 bp, Homo sapiens
gtaccgctttgagac

SEQ ID NO: 1330341 - DNA, 15 bp, Homo sapiens
ggtaccgctttgaga

SEQ ID NO: 1330342 - DNA, 15 bp, Homo sapiens
gggtaccgctttgag

SEQ ID NO: 1330343 - DNA, 15 bp, Homo sapiens
tgggtaccgctttga

SEQ ID NO: 1330344 - DNA, 15 bp, Homo sapiens
atgggtaccgctttg

SEQ ID NO: 1330345 - DNA, 15 bp, Homo sapiens
gatgggtaccgcttt

SEQ ID NO: 1330346 - DNA, 15 bp, Homo sapiens
ggatgggtaccgctt

SEQ ID NO: 1330347 - DNA, 15 bp, Homo sapiens
aggatgggtaccgct

SEQ ID NO: 1330348 - DNA, 15 bp, Homo sapiens
gaggatgggtaccgc

SEQ ID NO: 1330349 - DNA, 15 bp, Homo sapiens
ggaggatgggtaccg

SEQ ID NO: 1330350 - DNA, 15 bp, Homo sapiens
gggaggatgggtacc

SEQ ID NO: 1330351 - DNA, 15 bp, Homo sapiens
ggggaggatgggtac

SEQ ID NO: 1330352 - DNA, 15 bp, Homo sapiens
gggggaggatgggta

SEQ ID NO: 1330353 - DNA, 15 bp, Homo sapiens
tgggggaggatgggt

SEQ ID NO: 1330354 - DNA, 15 bp, Homo sapiens
ctgggggaggatggg

SEQ ID NO: 1330355 - DNA, 15 bp, Homo sapiens
tctgggggaggatgg

SEQ ID NO: 1330356 - DNA, 15 bp, Homo sapiens
ttctgggggaggatg

SEQ ID NO: 1330357 - DNA, 15 bp, Homo sapiens
cttctgggggaggat

SEQ ID NO: 1330358 - DNA, 15 bp, Homo sapiens
gcttctgggggagga

SEQ ID NO: 1330359 - DNA, 15 bp, Homo sapiens
agcttctgggggagg

SEQ ID NO: 1330360 - DNA, 15 bp, Homo sapiens
cagcttctgggggag

SEQ ID NO: 1330361 - DNA, 15 bp, Homo sapiens
acagcttctggggga

SEQ ID NO: 1330362 - DNA, 15 bp, Homo sapiens
gacagcttctggggg

SEQ ID NO: 1330363 - DNA, 15 bp, Homo sapiens
ggacagcttctgggg

SEQ ID NO: 1330364 - DNA, 15 bp, Homo sapiens
gggacagcttctggg

SEQ ID NO: 1330365 - DNA, 15 bp, Homo sapiens
ggggacagcttctgg

SEQ ID NO: 1330366 - DNA, 15 bp, Homo sapiens
tggggacagcttctg

SEQ ID NO: 1330367 - DNA, 15 bp, Homo sapiens
ctggggacagcttct

SEQ ID NO: 1330368 - DNA, 15 bp, Homo sapiens
gctggggacagcttc

SEQ ID NO: 1330369 - DNA, 15 bp, Homo sapiens
cgctggggacagctt

SEQ ID NO: 1330370 - DNA, 15 bp, Homo sapiens
tcgctggggacagct

SEQ ID NO: 1330371 - DNA, 15 bp, Homo sapiens
ctcgctggggacagc

SEQ ID NO: 1330372 - DNA, 15 bp, Homo sapiens
gctcgctggggacag

SEQ ID NO: 1330373 - DNA, 15 bp, Homo sapiens
ggctcgctggggaca

SEQ ID NO: 1330374 - DNA, 15 bp, Homo sapiens
aggctcgctggggac

SEQ ID NO: 1330375 - DNA, 15 bp, Homo sapiens
gaggctcgctgggga

SEQ ID NO: 1330376 - DNA, 15 bp, Homo sapiens
ggaggctcgctgggg

SEQ ID NO: 1330377 - DNA, 15 bp, Homo sapiens
gggaggctcgctggg

SEQ ID NO: 1330378 - DNA, 15 bp, Homo sapiens
agggaggctcgctgg

SEQ ID NO: 1330379 - DNA, 15 bp, Homo sapiens
aagggaggctcgctg

SEQ ID NO: 1330380 - DNA, 15 bp, Homo sapiens
gaagggaggctcgct

SEQ ID NO: 1330381 - DNA, 15 bp, Homo sapiens
agaagggaggctcgc

SEQ ID NO: 1330382 - DNA, 15 bp, Homo sapiens
aagaagggaggctcg

SEQ ID NO: 1330383 - DNA, 15 bp, Homo sapiens
aaagaagggaggctc

SEQ ID NO: 1330384 - DNA, 15 bp, Homo sapiens
caaagaagggaggct

SEQ ID NO: 1330385 - DNA, 15 bp, Homo sapiens
acaaagaagggaggc

SEQ ID NO: 1330386 - DNA, 15 bp, Homo sapiens
aacaaagaagggagg

SEQ ID NO: 1330387 - DNA, 15 bp, Homo sapiens
aaacaaagaagggag

SEQ ID NO: 1330388 - DNA, 15 bp, Homo sapiens
caaacaaagaaggga

SEQ ID NO: 1330389 - DNA, 15 bp, Homo sapiens
tcaaacaaagaaggg

SEQ ID NO: 1330390 - DNA, 15 bp, Homo sapiens
ttcaaacaaagaagg

SEQ ID NO: 1330391 - DNA, 15 bp, Homo sapiens
attcaaacaaagaag

SEQ ID NO: 1330392 - DNA, 15 bp, Homo sapiens
aattcaaacaaagaa

SEQ ID NO: 1330393 - DNA, 15 bp, Homo sapiens
gaattcaaacaaaga

SEQ ID NO: 1330394 - DNA, 15 bp, Homo sapiens
agaattcaaacaaag

SEQ ID NO: 1330395 - DNA, 15 bp, Homo sapiens
gagaattcaaacaaa

SEQ ID NO: 1330396 - DNA, 15 bp, Homo sapiens
agagaattcaaacaa

SEQ ID NO: 1330397 - DNA, 15 bp, Homo sapiens
tagagaattcaaaca

SEQ ID NO: 1330398 - DNA, 15 bp, Homo sapiens
ttagagaattcaaac

SEQ ID NO: 1330399 - DNA, 15 bp, Homo sapiens
attagagaattcaaa

SEQ ID NO: 1330400 - DNA, 15 bp, Homo sapiens
tattagagaattcaa

SEQ ID NO: 1330401 - DNA, 15 bp, Homo sapiens
ttattagagaattca

SEQ ID NO: 1330402 - DNA, 15 bp, Homo sapiens
cttattagagaattc

SEQ ID NO: 1330403 - DNA, 15 bp, Homo sapiens
tcttattagagaatt

SEQ ID NO: 1330404 - DNA, 15 bp, Homo sapiens
ctcttattagagaat

SEQ ID NO: 1330405 - DNA, 15 bp, Homo sapiens
gctcttattagagaa

SEQ ID NO: 1330406 - DNA, 15 bp, Homo sapiens
tgctcttattagaga

SEQ ID NO: 1330407 - DNA, 15 bp, Homo sapiens
ttgctcttattagag

SEQ ID NO: 1330408 - DNA, 15 bp, Homo sapiens
gttgctcttattaga

SEQ ID NO: 1330409 - DNA, 15 bp, Homo sapiens
tgttgctcttattag

SEQ ID NO: 1330410 - DNA, 15 bp, Homo sapiens
ctgttgctcttatta

SEQ ID NO: 1330411 - DNA, 15 bp, Homo sapiens
gctgttgctcttatt

SEQ ID NO: 1330412 - DNA, 15 bp, Homo sapiens
tgctgttgctcttat

SEQ ID NO: 1330413 - DNA, 15 bp, Homo sapiens
ctgctgttgctctta

SEQ ID NO: 1330414 - DNA, 15 bp, Homo sapiens
gctgctgttgctctt

SEQ ID NO: 1330415 - DNA, 15 bp, Homo sapiens
agctgctgttgctct

SEQ ID NO: 1330416 - DNA, 15 bp, Homo sapiens
gagctgctgttgctc

SEQ ID NO: 1330417 - DNA, 15 bp, Homo sapiens
ggagctgctgttgct

SEQ ID NO: 1330418 - DNA, 15 bp, Homo sapiens
gggagctgctgttgc

SEQ ID NO: 1330419 - DNA, 15 bp, Homo sapiens
tgggagctgctgttg

SEQ ID NO: 1330420 - DNA, 15 bp, Homo sapiens
atgggagctgctgtt

SEQ ID NO: 1330421 - DNA, 15 bp, Homo sapiens
aatgggagctgctgt

SEQ ID NO: 1330422 - DNA, 15 bp, Homo sapiens
aaatgggagctgctg

SEQ ID NO: 1330423 - DNA, 15 bp, Homo sapiens
gaaatgggagctgct

SEQ ID NO: 1330424 - DNA, 15 bp, Homo sapiens
agaaatgggagctgc

SEQ ID NO: 1330425 - DNA, 15 bp, Homo sapiens
tagaaatgggagctg

SEQ ID NO: 1330426 - DNA, 15 bp, Homo sapiens
ctagaaatgggagct

SEQ ID NO: 1330427 - DNA, 15 bp, Homo sapiens
tctagaaatgggagc

SEQ ID NO: 1330428 - DNA, 15 bp, Homo sapiens
ttctagaaatgggag

SEQ ID NO: 1330429 - DNA, 15 bp, Homo sapiens
gttctagaaatggga

SEQ ID NO: 1330430 - DNA, 15 bp, Homo sapiens
tgttctagaaatggg

SEQ ID NO: 1330431 - DNA, 15 bp, Homo sapiens
gtgttctagaaatgg

SEQ ID NO: 1330432 - DNA, 15 bp, Homo sapiens
tgtgttctagaaatg

SEQ ID NO: 1330433 - DNA, 15 bp, Homo sapiens
atgtgttctagaaat

SEQ ID NO: 1330434 - DNA, 15 bp, Homo sapiens
aatgtgttctagaaa

SEQ ID NO: 1330435 - DNA, 15 bp, Homo sapiens
aaatgtgttctagaa

SEQ ID NO: 1330436 - DNA, 15 bp, Homo sapiens
taaatgtgttctaga

SEQ ID NO: 1330437 - DNA, 15 bp, Homo sapiens
gtaaatgtgttctag

SEQ ID NO: 1330438 - DNA, 15 bp, Homo sapiens
tgtaaatgtgttcta

SEQ ID NO: 1330439 - DNA, 15 bp, Homo sapiens
ctgtaaatgtgttct

SEQ ID NO: 1330440 - DNA, 15 bp, Homo sapiens
actgtaaatgtgttc

SEQ ID NO: 1330441 - DNA, 15 bp, Homo sapiens
tactgtaaatgtgtt

SEQ ID NO: 1330442 - DNA, 15 bp, Homo sapiens
atactgtaaatgtgt

SEQ ID NO: 1330443 - DNA, 15 bp, Homo sapiens
aatactgtaaatgtg

SEQ ID NO: 1330444 - DNA, 15 bp, Homo sapiens
taatactgtaaatgt

SEQ ID NO: 1330445 - DNA, 15 bp, Homo sapiens
gtaatactgtaaatg

SEQ ID NO: 1330446 - DNA, 15 bp, Homo sapiens
agtaatactgtaaat

SEQ ID NO: 1330447 - DNA, 15 bp, Homo sapiens
tagtaatactgtaaa

SEQ ID NO: 1330448 - DNA, 15 bp, Homo sapiens
atagtaatactgtaa

SEQ ID NO: 1330449 - DNA, 15 bp, Homo sapiens
aatagtaatactgta

SEQ ID NO: 1330450 - DNA, 15 bp, Homo sapiens
aaatagtaatactgt

SEQ ID NO: 1330451 - DNA, 15 bp, Homo sapiens
aaaatagtaatactg

SEQ ID NO: 1330452 - DNA, 15 bp, Homo sapiens
gaaaatagtaatact

SEQ ID NO: 1330453 - DNA, 15 bp, Homo sapiens
agaaaatagtaatac

SEQ ID NO: 1330454 - DNA, 15 bp, Homo sapiens
tagaaaatagtaata

SEQ ID NO: 1330455 - DNA, 15 bp, Homo sapiens
ctagaaaatagtaat

SEQ ID NO: 1330456 - DNA, 15 bp, Homo sapiens
cctagaaaatagtaa

SEQ ID NO: 1330457 - DNA, 15 bp, Homo sapiens
tcctagaaaatagta

SEQ ID NO: 1330458 - DNA, 15 bp, Homo sapiens
atcctagaaaatagt

SEQ ID NO: 1330459 - DNA, 15 bp, Homo sapiens
tatcctagaaaatag

SEQ ID NO: 1330460 - DNA, 15 bp, Homo sapiens
atatcctagaaaata

SEQ ID NO: 1330461 - DNA, 15 bp, Homo sapiens
tatatcctagaaaat

SEQ ID NO: 1330462 - DNA, 15 bp, Homo sapiens
ttatatcctagaaaa

SEQ ID NO: 1330463 - DNA, 15 bp, Homo sapiens
tttatatcctagaaa

SEQ ID NO: 1330464 - DNA, 15 bp, Homo sapiens
ctttatatcctagaa

SEQ ID NO: 1330465 - DNA, 15 bp, Homo sapiens
actttatatcctaga

SEQ ID NO: 1330466 - DNA, 15 bp, Homo sapiens
cactttatatcctag

SEQ ID NO: 1330467 - DNA, 15 bp, Homo sapiens
gcactttatatccta

SEQ ID NO: 1330468 - DNA, 15 bp, Homo sapiens
ggcactttatatcct

SEQ ID NO: 1330469 - DNA, 15 bp, Homo sapiens
tggcactttatatcc

SEQ ID NO: 1330470 - DNA, 15 bp, Homo sapiens
atggcactttatatc

SEQ ID NO: 1330471 - DNA, 15 bp, Homo sapiens
tatggcactttatat

SEQ ID NO: 1330472 - DNA, 15 bp, Homo sapiens
atatggcactttata

SEQ ID NO: 1330473 - DNA, 15 bp, Homo sapiens
tatatggcactttat

SEQ ID NO: 1330474 - DNA, 15 bp, Homo sapiens
atatatggcacttta

SEQ ID NO: 1330475 - DNA, 15 bp, Homo sapiens
tatatatggcacttt

SEQ ID NO: 1330476 - DNA, 15 bp, Homo sapiens
atatatatggcactt

SEQ ID NO: 1330477 - DNA, 15 bp, Homo sapiens
aatatatatggcact

SEQ ID NO: 1330478 - DNA, 15 bp, Homo sapiens
aaatatatatggcac

SEQ ID NO: 1330479 - DNA, 15 bp, Homo sapiens
aaaatatatatggca

SEQ ID NO: 1330480 - DNA, 15 bp, Homo sapiens
aaaaatatatatggc

SEQ ID NO: 1330481 - DNA, 15 bp, Homo sapiens
taaaaatatatatgg

SEQ ID NO: 1330482 - DNA, 15 bp, Homo sapiens
ttaaaaatatatatg

SEQ ID NO: 1330483 - DNA, 15 bp, Homo sapiens
attaaaaatatatat

SEQ ID NO: 1330484 - DNA, 15 bp, Homo sapiens
aattaaaaatatata

SEQ ID NO: 1330485 - DNA, 15 bp, Homo sapiens
gaattaaaaatatat

SEQ ID NO: 1330486 - DNA, 15 bp, Homo sapiens
ggaattaaaaatata

SEQ ID NO: 1330487 - DNA, 15 bp, Homo sapiens
tggaattaaaaatat

SEQ ID NO: 1330488 - DNA, 15 bp, Homo sapiens
ttggaattaaaaata

SEQ ID NO: 1330489 - DNA, 15 bp, Homo sapiens
attggaattaaaaat

SEQ ID NO: 1330490 - DNA, 15 bp, Homo sapiens
tattggaattaaaaa

SEQ ID NO: 1330491 - DNA, 15 bp, Homo sapiens
atattggaattaaaa

SEQ ID NO: 1330492 - DNA, 15 bp, Homo sapiens
aatattggaattaaa

SEQ ID NO: 1330493 - DNA, 15 bp, Homo sapiens
taatattggaattaa

SEQ ID NO: 1330494 - DNA, 15 bp, Homo sapiens
ttaatattggaatta

SEQ ID NO: 1330495 - DNA, 15 bp, Homo sapiens
attaatattggaatt

SEQ ID NO: 1330496 - DNA, 15 bp, Homo sapiens
tattaatattggaat

SEQ ID NO: 1330497 - DNA, 15 bp, Homo sapiens
ttattaatattggaa

SEQ ID NO: 1330498 - DNA, 15 bp, Homo sapiens
tttattaatattgga

SEQ ID NO: 1330499 - DNA, 15 bp, Homo sapiens
atttattaatattgg

SEQ ID NO: 1330500 - DNA, 15 bp, Homo sapiens
catttattaatattg

SEQ ID NO: 1330501 - DNA, 15 bp, Homo sapiens
acatttattaatatt

SEQ ID NO: 1330502 - DNA, 15 bp, Homo sapiens
tacatttattaatat

SEQ ID NO: 1330503 - DNA, 15 bp, Homo sapiens
atacatttattaata

SEQ ID NO: 1330504 - DNA, 15 bp, Homo sapiens
catacatttattaat

SEQ ID NO: 1330505 - DNA, 15 bp, Homo sapiens
gcatacatttattaa

SEQ ID NO: 1330506 - DNA, 15 bp, Homo sapiens
ggcatacatttatta

SEQ ID NO: 1330507 - DNA, 15 bp, Homo sapiens
tggcatacatttatt

SEQ ID NO: 1330508 - DNA, 15 bp, Homo sapiens
ttggcatacatttat

SEQ ID NO: 1330509 - DNA, 15 bp, Homo sapiens
tttggcatacattta

SEQ ID NO: 1330510 - DNA, 15 bp, Homo sapiens
gtttggcatacattt

SEQ ID NO: 1330511 - DNA, 15 bp, Homo sapiens
tgtttggcatacatt

SEQ ID NO: 1330512 - DNA, 15 bp, Homo sapiens
ttgtttggcatacat

SEQ ID NO: 1330513 - DNA, 15 bp, Homo sapiens
gttgtttggcataca

SEQ ID NO: 1330514 - DNA, 15 bp, Homo sapiens
tgttgtttggcatac

SEQ ID NO: 1330515 - DNA, 15 bp, Homo sapiens
ttgttgtttggcata

SEQ ID NO: 1330516 - DNA, 15 bp, Homo sapiens
attgttgtttggcat

SEQ ID NO: 1330517 - DNA, 15 bp, Homo sapiens
gattgttgtttggca

SEQ ID NO: 1330518 - DNA, 15 bp, Homo sapiens
tgattgttgtttggc

SEQ ID NO: 1330519 - DNA, 15 bp, Homo sapiens
ctgattgttgtttgg

SEQ ID NO: 1330520 - DNA, 15 bp, Homo sapiens
gctgattgttgtttg

SEQ ID NO: 1330521 - DNA, 15 bp, Homo sapiens
agctgattgttgttt

SEQ ID NO: 1330522 - DNA, 15 bp, Homo sapiens
cagctgattgttgtt

SEQ ID NO: 1330523 - DNA, 15 bp, Homo sapiens
gcagctgattgttgt

SEQ ID NO: 1330524 - DNA, 15 bp, Homo sapiens
tgcagctgattgttg

SEQ ID NO: 1330525 - DNA, 15 bp, Homo sapiens
ttgcagctgattgtt

SEQ ID NO: 1330526 - DNA, 15 bp, Homo sapiens
cttgcagctgattgt

SEQ ID NO: 1330527 - DNA, 15 bp, Homo sapiens
ccttgcagctgattg

SEQ ID NO: 1330528 - DNA, 15 bp, Homo sapiens
tccttgcagctgatt

SEQ ID NO: 1330529 - DNA, 15 bp, Homo sapiens
ttccttgcagctgat

SEQ ID NO: 1330530 - DNA, 15 bp, Homo sapiens
tttccttgcagctga

SEQ ID NO: 1330531 - DNA, 15 bp, Homo sapiens
gtttccttgcagctg

SEQ ID NO: 1330532 - DNA, 15 bp, Homo sapiens
tgtttccttgcagct

SEQ ID NO: 1330533 - DNA, 15 bp, Homo sapiens
gtgtttccttgcagc

SEQ ID NO: 1330534 - DNA, 15 bp, Homo sapiens
tgtgtttccttgcag

SEQ ID NO: 1330535 - DNA, 15 bp, Homo sapiens
atgtgtttccttgca

SEQ ID NO: 1330536 - DNA, 15 bp, Homo sapiens
catgtgtttccttgc

SEQ ID NO: 1330537 - DNA, 15 bp, Homo sapiens
tcatgtgtttccttg

SEQ ID NO: 1330538 - DNA, 15 bp, Homo sapiens
ctcatgtgtttcctt

SEQ ID NO: 1330539 - DNA, 15 bp, Homo sapiens
tctcatgtgtttcct

SEQ ID NO: 1330540 - DNA, 15 bp, Homo sapiens
ttctcatgtgtttcc

SEQ ID NO: 1330541 - DNA, 15 bp, Homo sapiens
gttctcatgtgtttc

SEQ ID NO: 1330542 - DNA, 15 bp, Homo sapiens
agttctcatgtgttt

SEQ ID NO: 1330543 - DNA, 15 bp, Homo sapiens
gagttctcatgtgtt

SEQ ID NO: 1330544 - DNA, 15 bp, Homo sapiens
tgagttctcatgtgt

SEQ ID NO: 1330545 - DNA, 15 bp, Homo sapiens
atgagttctcatgtg

SEQ ID NO: 1330546 - DNA, 15 bp, Homo sapiens
gatgagttctcatgt

SEQ ID NO: 1330547 - DNA, 15 bp, Homo sapiens
tgatgagttctcatg

SEQ ID NO: 1330548 - DNA, 15 bp, Homo sapiens
ttgatgagttctcat

SEQ ID NO: 1330549 - DNA, 15 bp, Homo sapiens
tttgatgagttctca

SEQ ID NO: 1330550 - DNA, 15 bp, Homo sapiens
ttttgatgagttctc

SEQ ID NO: 1330551 - DNA, 15 bp, Homo sapiens
attttgatgagttct

SEQ ID NO: 1330552 - DNA, 15 bp, Homo sapiens
aattttgatgagttc

SEQ ID NO: 1330553 - DNA, 15 bp, Homo sapiens
aaattttgatgagtt

SEQ ID NO: 1330554 - DNA, 15 bp, Homo sapiens
aaaattttgatgagt

SEQ ID NO: 1330555 - DNA, 15 bp, Homo sapiens
taaaattttgatgag

SEQ ID NO: 1330556 - DNA, 15 bp, Homo sapiens
ctaaaattttgatga

SEQ ID NO: 1330557 - DNA, 15 bp, Homo sapiens
gctaaaattttgatg

SEQ ID NO: 1330558 - DNA, 15 bp, Homo sapiens
cgctaaaattttgat

SEQ ID NO: 1330559 - DNA, 15 bp, Homo sapiens
ccgctaaaattttga

SEQ ID NO: 1330560 - DNA, 15 bp, Homo sapiens
accgctaaaattttg

SEQ ID NO: 1330561 - DNA, 15 bp, Homo sapiens
caccgctaaaatttt

SEQ ID NO: 1330562 - DNA, 15 bp, Homo sapiens
ccaccgctaaaattt

SEQ ID NO: 1330563 - DNA, 15 bp, Homo sapiens
cccaccgctaaaatt

SEQ ID NO: 1330564 - DNA, 15 bp, Homo sapiens
tcccaccgctaaaat

SEQ ID NO: 1330565 - DNA, 15 bp, Homo sapiens
atcccaccgctaaaa

SEQ ID NO: 1330566 - DNA, 15 bp, Homo sapiens
catcccaccgctaaa

SEQ ID NO: 1330567 - DNA, 15 bp, Homo sapiens
ccatcccaccgctaa

SEQ ID NO: 1330568 - DNA, 15 bp, Homo sapiens
accatcccaccgcta

SEQ ID NO: 1330569 - DNA, 15 bp, Homo sapiens
caccatcccaccgct

SEQ ID NO: 1330570 - DNA, 15 bp, Homo sapiens
ccaccatcccaccgc

SEQ ID NO: 1330571 - DNA, 15 bp, Homo sapiens
accaccatcccaccg

SEQ ID NO: 1330572 - DNA, 15 bp, Homo sapiens
aaccaccatcccacc

SEQ ID NO: 1330573 - DNA, 15 bp, Homo sapiens
taaccaccatcccac

SEQ ID NO: 1330574 - DNA, 15 bp, Homo sapiens
ttaaccaccatccca

SEQ ID NO: 1330575 - DNA, 15 bp, Homo sapiens
attaaccaccatccc

SEQ ID NO: 1330576 - DNA, 15 bp, Homo sapiens
aattaaccaccatcc

SEQ ID NO: 1330577 - DNA, 15 bp, Homo sapiens
aaattaaccaccatc

SEQ ID NO: 1330578 - DNA, 15 bp, Homo sapiens
gaaattaaccaccat

SEQ ID NO: 1330579 - DNA, 15 bp, Homo sapiens
agaaattaaccacca

SEQ ID NO: 1330580 - DNA, 15 bp, Homo sapiens
cagaaattaaccacc

SEQ ID NO: 1330581 - DNA, 15 bp, Homo sapiens
acagaaattaaccac

SEQ ID NO: 1330582 - DNA, 15 bp, Homo sapiens
aacagaaattaacca

SEQ ID NO: 1330583 - DNA, 15 bp, Homo sapiens
aaacagaaattaacc

SEQ ID NO: 1330584 - DNA, 15 bp, Homo sapiens
aaaacagaaattaac

SEQ ID NO: 1330585 - DNA, 15 bp, Homo sapiens
gaaaacagaaattaa

SEQ ID NO: 1330586 - DNA, 15 bp, Homo sapiens
agaaaacagaaatta

SEQ ID NO: 1330587 - DNA, 15 bp, Homo sapiens
aagaaaacagaaatt

SEQ ID NO: 1330588 - DNA, 15 bp, Homo sapiens
gaagaaaacagaaat

SEQ ID NO: 1330589 - DNA, 15 bp, Homo sapiens
ggaagaaaacagaaa

SEQ ID NO: 1330590 - DNA, 15 bp, Homo sapiens
aaggaagaaaacaga

SEQ ID NO: 1330591 - DNA, 15 bp, Homo sapiens
taaggaagaaaacag

SEQ ID NO: 1330592 - DNA, 15 bp, Homo sapiens
ataaggaagaaaaca

SEQ ID NO: 1330593 - DNA, 15 bp, Homo sapiens
gataaggaagaaaac

SEQ ID NO: 1330594 - DNA, 15 bp, Homo sapiens
ggataaggaagaaaa

SEQ ID NO: 1330595 - DNA, 15 bp, Homo sapiens
gggataaggaagaaa

SEQ ID NO: 1330596 - DNA, 15 bp, Homo sapiens
ggggataaggaagaa

SEQ ID NO: 1330597 - DNA, 15 bp, Homo sapiens
aggggataaggaaga

SEQ ID NO: 1330598 - DNA, 15 bp, Homo sapiens
aaggggataaggaag

SEQ ID NO: 1330599 - DNA, 15 bp, Homo sapiens
aaaggggataaggaa

SEQ ID NO: 1330600 - DNA, 15 bp, Homo sapiens
aaaaggggataagga

SEQ ID NO: 1330601 - DNA, 15 bp, Homo sapiens
aaaaaggggataagg

SEQ ID NO: 1330602 - DNA, 15 bp, Homo sapiens
taaaaaggggataag

SEQ ID NO: 1330603 - DNA, 15 bp, Homo sapiens
ataaaaaggggataa

SEQ ID NO: 1330604 - DNA, 15 bp, Homo sapiens
aataaaaaggggata

SEQ ID NO: 1330605 - DNA, 15 bp, Homo sapiens
aaataaaaaggggat

SEQ ID NO: 1330606 - DNA, 15 bp, Homo sapiens
aaaataaaaagggga

SEQ ID NO: 1330607 - DNA, 15 bp, Homo sapiens
aaaaataaaaagggg

SEQ ID NO: 1330608 - DNA, 15 bp, Homo sapiens
caaaaataaaaaggg

SEQ ID NO: 1330609 - DNA, 15 bp, Homo sapiens
gcaaaaataaaaagg

SEQ ID NO: 1330610 - DNA, 15 bp, Homo sapiens
agcaaaaataaaaag

SEQ ID NO: 1330611 - DNA, 15 bp, Homo sapiens
cagcaaaaataaaaa

SEQ ID NO: 1330612 - DNA, 15 bp, Homo sapiens
gcagcaaaaataaaa

SEQ ID NO: 1330613 - DNA, 15 bp, Homo sapiens
agcagcaaaaataaa

SEQ ID NO: 1330614 - DNA, 15 bp, Homo sapiens
aagcagcaaaaataa

SEQ ID NO: 1330615 - DNA, 15 bp, Homo sapiens
aaagcagcaaaaata

SEQ ID NO: 1330616 - DNA, 15 bp, Homo sapiens
aaaagcagcaaaaat

SEQ ID NO: 1330617 - DNA, 15 bp, Homo sapiens
gaaaagcagcaaaaa

SEQ ID NO: 1330618 - DNA, 15 bp, Homo sapiens
agaaaagcagcaaaa

SEQ ID NO: 1330619 - DNA, 15 bp, Homo sapiens
tagaaaagcagcaaa

SEQ ID NO: 1330620 - DNA, 15 bp, Homo sapiens
ttagaaaagcagcaa

SEQ ID NO: 1330621 - DNA, 15 bp, Homo sapiens
tttagaaaagcagca

SEQ ID NO: 1330622 - DNA, 15 bp, Homo sapiens
atttagaaaagcagc

SEQ ID NO: 1330623 - DNA, 15 bp, Homo sapiens
aatttagaaaagcag

SEQ ID NO: 1330624 - DNA, 15 bp, Homo sapiens
aaatttagaaaagca

SEQ ID NO: 1330625 - DNA, 15 bp, Homo sapiens
aaaatttagaaaagc

SEQ ID NO: 1330626 - DNA, 15 bp, Homo sapiens
aaaaatttagaaaag

SEQ ID NO: 1330627 - DNA, 15 bp, Homo sapiens
caaaaatttagaaaa

SEQ ID NO: 1330628 - DNA, 15 bp, Homo sapiens
tcaaaaatttagaaa

SEQ ID NO: 1330629 - DNA, 15 bp, Homo sapiens
atcaaaaatttagaa

SEQ ID NO: 1330630 - DNA, 15 bp, Homo sapiens
aatcaaaaatttaga

SEQ ID NO: 1330631 - DNA, 15 bp, Homo sapiens
taatcaaaaatttag

SEQ ID NO: 1330632 - DNA, 15 bp, Homo sapiens
ataatcaaaaattta

SEQ ID NO: 1330633 - DNA, 15 bp, Homo sapiens
tataatcaaaaattt

SEQ ID NO: 1330634 - DNA, 15 bp, Homo sapiens
ctataatcaaaaatt

SEQ ID NO: 1330635 - DNA, 15 bp, Homo sapiens
cctataatcaaaaat

SEQ ID NO: 1330636 - DNA, 15 bp, Homo sapiens
tcctataatcaaaaa

SEQ ID NO: 1330637 - DNA, 15 bp, Homo sapiens
ttcctataatcaaaa

SEQ ID NO: 1330638 - DNA, 15 bp, Homo sapiens
cttcctataatcaaa

SEQ ID NO: 1330639 - DNA, 15 bp, Homo sapiens
ccttcctataatcaa

SEQ ID NO: 1330640 - DNA, 15 bp, Homo sapiens
cccttcctataatca

SEQ ID NO: 1330641 - DNA, 15 bp, Homo sapiens
acccttcctataatc

SEQ ID NO: 1330642 - DNA, 15 bp, Homo sapiens
cacccttcctataat

SEQ ID NO: 1330643 - DNA, 15 bp, Homo sapiens
acacccttcctataa

SEQ ID NO: 1330644 - DNA, 15 bp, Homo sapiens
cacacccttcctata

SEQ ID NO: 1330645 - DNA, 15 bp, Homo sapiens
acacacccttcctat

SEQ ID NO: 1330646 - DNA, 15 bp, Homo sapiens
aacacacccttccta

SEQ ID NO: 1330647 - DNA, 15 bp, Homo sapiens
aaacacacccttcct

SEQ ID NO: 1330648 - DNA, 15 bp, Homo sapiens
gaaacacacccttcc

SEQ ID NO: 1330649 - DNA, 15 bp, Homo sapiens
cgaaacacacccttc

SEQ ID NO: 1330650 - DNA, 15 bp, Homo sapiens
acgaaacacaccctt

SEQ ID NO: 1330651 - DNA, 15 bp, Homo sapiens
aacgaaacacaccct

SEQ ID NO: 1330652 - DNA, 15 bp, Homo sapiens
aaacgaaacacaccc

SEQ ID NO: 1330653 - DNA, 15 bp, Homo sapiens
caaacgaaacacacc

SEQ ID NO: 1330654 - DNA, 15 bp, Homo sapiens
gcaaacgaaacacac

SEQ ID NO: 1330655 - DNA, 15 bp, Homo sapiens
agcaaacgaaacaca

SEQ ID NO: 1330656 - DNA, 15 bp, Homo sapiens
aagcaaacgaaacac

SEQ ID NO: 1330657 - DNA, 15 bp, Homo sapiens
aaagcaaacgaaaca

SEQ ID NO: 1330658 - DNA, 15 bp, Homo sapiens
aaaagcaaacgaaac

SEQ ID NO: 1330659 - DNA, 15 bp, Homo sapiens
taaaagcaaacgaaa

SEQ ID NO: 1330660 - DNA, 15 bp, Homo sapiens
ttaaaagcaaacgaa

SEQ ID NO: 1330661 - DNA, 15 bp, Homo sapiens
attaaaagcaaacga

SEQ ID NO: 1330662 - DNA, 15 bp, Homo sapiens
gattaaaagcaaacg

SEQ ID NO: 1330663 - DNA, 15 bp, Homo sapiens
tgattaaaagcaaac

SEQ ID NO: 1330664 - DNA, 15 bp, Homo sapiens
ctgattaaaagcaaa

SEQ ID NO: 1330665 - DNA, 15 bp, Homo sapiens
tctgattaaaagcaa

SEQ ID NO: 1330666 - DNA, 15 bp, Homo sapiens
ttctgattaaaagca

SEQ ID NO: 1330667 - DNA, 15 bp, Homo sapiens
tttctgattaaaagc

SEQ ID NO: 1330668 - DNA, 15 bp, Homo sapiens
ttttctgattaaaag

SEQ ID NO: 1330669 - DNA, 15 bp, Homo sapiens
cttttctgattaaaa

SEQ ID NO: 1330670 - DNA, 15 bp, Homo sapiens
gcttttctgattaaa

SEQ ID NO: 1330671 - DNA, 15 bp, Homo sapiens
ggcttttctgattaa

SEQ ID NO: 1330672 - DNA, 15 bp, Homo sapiens
tggcttttctgatta

SEQ ID NO: 1330673 - DNA, 15 bp, Homo sapiens
atggcttttctgatt

SEQ ID NO: 1330674 - DNA, 15 bp, Homo sapiens
catggcttttctgat

SEQ ID NO: 1330675 - DNA, 15 bp, Homo sapiens
ccatggcttttctga

SEQ ID NO: 1330676 - DNA, 15 bp, Homo sapiens
accatggcttttctg

SEQ ID NO: 1330677 - DNA, 15 bp, Homo sapiens
taccatggcttttct

SEQ ID NO: 1330678 - DNA, 15 bp, Homo sapiens
ctaccatggcttttc

SEQ ID NO: 1330679 - DNA, 15 bp, Homo sapiens
tctaccatggctttt

SEQ ID NO: 1330680 - DNA, 15 bp, Homo sapiens
atctaccatggcttt

SEQ ID NO: 1330681 - DNA, 15 bp, Homo sapiens
catctaccatggctt

SEQ ID NO: 1330682 - DNA, 15 bp, Homo sapiens
gcatctaccatggct

SEQ ID NO: 1330683 - DNA, 15 bp, Homo sapiens
ggcatctaccatggc

SEQ ID NO: 1330684 - DNA, 15 bp, Homo sapiens
tggcatctaccatgg

SEQ ID NO: 1330685 - DNA, 15 bp, Homo sapiens
atggcatctaccatg

SEQ ID NO: 1330686 - DNA, 15 bp, Homo sapiens
aatggcatctaccat

SEQ ID NO: 1330687 - DNA, 15 bp, Homo sapiens
aaatggcatctacca

SEQ ID NO: 1330688 - DNA, 15 bp, Homo sapiens
aaaatggcatctacc

SEQ ID NO: 1330689 - DNA, 15 bp, Homo sapiens
caaaatggcatctac

SEQ ID NO: 1330690 - DNA, 15 bp, Homo sapiens
ccaaaatggcatcta

SEQ ID NO: 1330691 - DNA, 15 bp, Homo sapiens
tccaaaatggcatct

SEQ ID NO: 1330692 - DNA, 15 bp, Homo sapiens
ttccaaaatggcatc

SEQ ID NO: 1330693 - DNA, 15 bp, Homo sapiens
tttccaaaatggcat

SEQ ID NO: 1330694 - DNA, 15 bp, Homo sapiens
ttttccaaaatggca

SEQ ID NO: 1330695 - DNA, 15 bp, Homo sapiens
cttttccaaaatggc

SEQ ID NO: 1330696 - DNA, 15 bp, Homo sapiens
acttttccaaaatgg

SEQ ID NO: 1330697 - DNA, 15 bp, Homo sapiens
aacttttccaaaatg

SEQ ID NO: 1330698 - DNA, 15 bp, Homo sapiens
caacttttccaaaat

SEQ ID NO: 1330699 - DNA, 15 bp, Homo sapiens
tcaacttttccaaaa

SEQ ID NO: 1330700 - DNA, 15 bp, Homo sapiens
ttcaacttttccaaa

SEQ ID NO: 1330701 - DNA, 15 bp, Homo sapiens
tttcaacttttccaa

SEQ ID NO: 1330702 - DNA, 15 bp, Homo sapiens
ctttcaacttttcca

SEQ ID NO: 1330703 - DNA, 15 bp, Homo sapiens
tctttcaacttttcc

SEQ ID NO: 1330704 - DNA, 15 bp, Homo sapiens
ctctttcaacttttc

SEQ ID NO: 1330705 - DNA, 15 bp, Homo sapiens
actctttcaactttt

SEQ ID NO: 1330706 - DNA, 15 bp, Homo sapiens
cactctttcaacttt

SEQ ID NO: 1330707 - DNA, 15 bp, Homo sapiens
acactctttcaactt

SEQ ID NO: 1330708 - DNA, 15 bp, Homo sapiens
cacactctttcaact

SEQ ID NO: 1330709 - DNA, 15 bp, Homo sapiens
acacactctttcaac

SEQ ID NO: 1330710 - DNA, 15 bp, Homo sapiens
gacacactctttcaa

SEQ ID NO: 1330711 - DNA, 15 bp, Homo sapiens
ggacacactctttca

SEQ ID NO: 1330712 - DNA, 15 bp, Homo sapiens
gggacacactctttc

SEQ ID NO: 1330713 - DNA, 15 bp, Homo sapiens
ggggacacactcttt

SEQ ID NO: 1330714 - DNA, 15 bp, Homo sapiens
gggggacacactctt

SEQ ID NO: 1330715 - DNA, 15 bp, Homo sapiens
agggggacacactct

SEQ ID NO: 1330716 - DNA, 15 bp, Homo sapiens
gagggggacacactc

SEQ ID NO: 1330717 - DNA, 15 bp, Homo sapiens
tgagggggacacact

SEQ ID NO: 1330718 - DNA, 15 bp, Homo sapiens
gtgagggggacacac

SEQ ID NO: 1330719 - DNA, 15 bp, Homo sapiens
tgtgagggggacaca

SEQ ID NO: 1330720 - DNA, 15 bp, Homo sapiens
ctgtgagggggacac

SEQ ID NO: 1330721 - DNA, 15 bp, Homo sapiens
tctgtgagggggaca

SEQ ID NO: 1330722 - DNA, 15 bp, Homo sapiens
ttctgtgagggggac

SEQ ID NO: 1330723 - DNA, 15 bp, Homo sapiens
tttctgtgaggggga

SEQ ID NO: 1330724 - DNA, 15 bp, Homo sapiens
ttttctgtgaggggg

SEQ ID NO: 1330725 - DNA, 15 bp, Homo sapiens
tttttctgtgagggg

SEQ ID NO: 1330726 - DNA, 15 bp, Homo sapiens
ctttttctgtgaggg

SEQ ID NO: 1330727 - DNA, 15 bp, Homo sapiens
tctttttctgtgagg

SEQ ID NO: 1330728 - DNA, 15 bp, Homo sapiens
atctttttctgtgag

SEQ ID NO: 1330729 - DNA, 15 bp, Homo sapiens
catctttttctgtga

SEQ ID NO: 1330730 - DNA, 15 bp, Homo sapiens
ccatctttttctgtg

SEQ ID NO: 1330731 - DNA, 15 bp, Homo sapiens
tccatctttttctgt

SEQ ID NO: 1330732 - DNA, 15 bp, Homo sapiens
ttccatctttttctg

SEQ ID NO: 1330733 - DNA, 15 bp, Homo sapiens
cttccatctttttct

SEQ ID NO: 1330734 - DNA, 15 bp, Homo sapiens
acttccatctttttc

SEQ ID NO: 1330735 - DNA, 15 bp, Homo sapiens
cacttccatcttttt

SEQ ID NO: 1330736 - DNA, 15 bp, Homo sapiens
ccacttccatctttt

SEQ ID NO: 1330737 - DNA, 15 bp, Homo sapiens
cccacttccatcttt

SEQ ID NO: 1330738 - DNA, 15 bp, Homo sapiens
acccacttccatctt

SEQ ID NO: 1330739 - DNA, 15 bp, Homo sapiens
gacccacttccatct

SEQ ID NO: 1330740 - DNA, 15 bp, Homo sapiens
agacccacttccatc

SEQ ID NO: 1330741 - DNA, 15 bp, Homo sapiens
cagacccacttccat

SEQ ID NO: 1330742 - DNA, 15 bp, Homo sapiens
ccagacccacttcca

SEQ ID NO: 1330743 - DNA, 15 bp, Homo sapiens
cccagacccacttcc

SEQ ID NO: 1330744 - DNA, 15 bp, Homo sapiens
ccccagacccacttc

SEQ ID NO: 1330745 - DNA, 15 bp, Homo sapiens
tccccagacccactt

SEQ ID NO: 1330746 - DNA, 15 bp, Homo sapiens
gtccccagacccact

SEQ ID NO: 1330747 - DNA, 15 bp, Homo sapiens
cgtccccagacccac

SEQ ID NO: 1330748 - DNA, 15 bp, Homo sapiens
ccgtccccagaccca

SEQ ID NO: 1330749 - DNA, 15 bp, Homo sapiens
tccgtccccagaccc

SEQ ID NO: 1330750 - DNA, 15 bp, Homo sapiens
ctccgtccccagacc

SEQ ID NO: 1330751 - DNA, 15 bp, Homo sapiens
actccgtccccagac

SEQ ID NO: 1330752 - DNA, 15 bp, Homo sapiens
aactccgtccccaga

SEQ ID NO: 1330753 - DNA, 15 bp, Homo sapiens
caactccgtccccag

SEQ ID NO: 1330754 - DNA, 15 bp, Homo sapiens
ccaactccgtcccca

SEQ ID NO: 1330755 - DNA, 15 bp, Homo sapiens
cccaactccgtcccc

SEQ ID NO: 1330756 - DNA, 15 bp, Homo sapiens
acccaactccgtccc

SEQ ID NO: 1330757 - DNA, 15 bp, Homo sapiens
aacccaactccgtcc

SEQ ID NO: 1330758 - DNA, 15 bp, Homo sapiens
gaacccaactccgtc

SEQ ID NO: 1330759 - DNA, 15 bp, Homo sapiens
ggaacccaactccgt

SEQ ID NO: 1330760 - DNA, 15 bp, Homo sapiens
tggaacccaactccg

SEQ ID NO: 1330761 - DNA, 15 bp, Homo sapiens
ctggaacccaactcc

SEQ ID NO: 1330762 - DNA, 15 bp, Homo sapiens
actggaacccaactc

SEQ ID NO: 1330763 - DNA, 15 bp, Homo sapiens
gactggaacccaact

SEQ ID NO: 1330764 - DNA, 15 bp, Homo sapiens
tgactggaacccaac

SEQ ID NO: 1330765 - DNA, 15 bp, Homo sapiens
ctgactggaacccaa

SEQ ID NO: 1330766 - DNA, 15 bp, Homo sapiens
tctgactggaaccca

SEQ ID NO: 1330767 - DNA, 15 bp, Homo sapiens
ctctgactggaaccc

SEQ ID NO: 1330768 - DNA, 15 bp, Homo sapiens
tctctgactggaacc

SEQ ID NO: 1330769 - DNA, 15 bp, Homo sapiens
gtctctgactggaac

SEQ ID NO: 1330770 - DNA, 15 bp, Homo sapiens
tgtctctgactggaa

SEQ ID NO: 1330771 - DNA, 15 bp, Homo sapiens
ctgtctctgactgga

SEQ ID NO: 1330772 - DNA, 15 bp, Homo sapiens
cctgtctctgactgg

SEQ ID NO: 1330773 - DNA, 15 bp, Homo sapiens
gcctgtctctgactg

SEQ ID NO: 1330774 - DNA, 15 bp, Homo sapiens
ggcctgtctctgact

SEQ ID NO: 1330775 - DNA, 15 bp, Homo sapiens
tggcctgtctctgac

SEQ ID NO: 1330776 - DNA, 15 bp, Homo sapiens
atggcctgtctctga

SEQ ID NO: 1330777 - DNA, 15 bp, Homo sapiens
aatggcctgtctctg

SEQ ID NO: 1330778 - DNA, 15 bp, Homo sapiens
gaatggcctgtctct

SEQ ID NO: 1330779 - DNA, 15 bp, Homo sapiens
tgaatggcctgtctc

SEQ ID NO: 1330780 - DNA, 15 bp, Homo sapiens
ctgaatggcctgtct

SEQ ID NO: 1330781 - DNA, 15 bp, Homo sapiens
tctgaatggcctgtc

SEQ ID NO: 1330782 - DNA, 15 bp, Homo sapiens
ttctgaatggcctgt

SEQ ID NO: 1330783 - DNA, 15 bp, Homo sapiens
gttctgaatggcctg

SEQ ID NO: 1330784 - DNA, 15 bp, Homo sapiens
tgttctgaatggcct

SEQ ID NO: 1330785 - DNA, 15 bp, Homo sapiens
gtgttctgaatggcc

SEQ ID NO: 1330786 - DNA, 15 bp, Homo sapiens
tgtgttctgaatggc

SEQ ID NO: 1330787 - DNA, 15 bp, Homo sapiens
gtgtgttctgaatgg

SEQ ID NO: 1330788 - DNA, 15 bp, Homo sapiens
tgtgtgttctgaatg

SEQ ID NO: 1330789 - DNA, 15 bp, Homo sapiens
ttgtgtgttctgaat

SEQ ID NO: 1330790 - DNA, 15 bp, Homo sapiens
attgtgtgttctgaa

SEQ ID NO: 1330791 - DNA, 15 bp, Homo sapiens
gattgtgtgttctga

SEQ ID NO: 1330792 - DNA, 15 bp, Homo sapiens
agattgtgtgttctg

SEQ ID NO: 1330793 - DNA, 15 bp, Homo sapiens
aagattgtgtgttct

SEQ ID NO: 1330794 - DNA, 15 bp, Homo sapiens
taagattgtgtgttc

SEQ ID NO: 1330795 - DNA, 15 bp, Homo sapiens
ttaagattgtgtgtt

SEQ ID NO: 1330796 - DNA, 15 bp, Homo sapiens
tttaagattgtgtgt

SEQ ID NO: 1330797 - DNA, 15 bp, Homo sapiens
ttttaagattgtgtg

SEQ ID NO: 1330798 - DNA, 15 bp, Homo sapiens
tttttaagattgtgt

SEQ ID NO: 1330799 - DNA, 15 bp, Homo sapiens
gtttttaagattgtg

SEQ ID NO: 1330800 - DNA, 15 bp, Homo sapiens
ggtttttaagattgt

SEQ ID NO: 1330801 - DNA, 15 bp, Homo sapiens
gggtttttaagattg

SEQ ID NO: 1330802 - DNA, 15 bp, Homo sapiens
ggggtttttaagatt

SEQ ID NO: 1330803 - DNA, 15 bp, Homo sapiens
aggggtttttaagat

SEQ ID NO: 1330804 - DNA, 15 bp, Homo sapiens
gaggggtttttaaga

SEQ ID NO: 1330805 - DNA, 15 bp, Homo sapiens
agaggggtttttaag

SEQ ID NO: 1330806 - DNA, 15 bp, Homo sapiens
cagaggggtttttaa

SEQ ID NO: 1330807 - DNA, 15 bp, Homo sapiens
ccagaggggttttta

SEQ ID NO: 1330808 - DNA, 15 bp, Homo sapiens
cccagaggggttttt

SEQ ID NO: 1330809 - DNA, 15 bp, Homo sapiens
gcccagaggggtttt

SEQ ID NO: 1330810 - DNA, 15 bp, Homo sapiens
ggcccagaggggttt

SEQ ID NO: 1330811 - DNA, 15 bp, Homo sapiens
cggcccagaggggtt

SEQ ID NO: 1330812 - DNA, 15 bp, Homo sapiens
ccggcccagaggggt

SEQ ID NO: 1330813 - DNA, 15 bp, Homo sapiens
cccggcccagagggg

SEQ ID NO: 1330814 - DNA, 15 bp, Homo sapiens
gcccggcccagaggg

SEQ ID NO: 1330815 - DNA, 15 bp, Homo sapiens
cgcccggcccagagg

SEQ ID NO: 1330816 - DNA, 15 bp, Homo sapiens
gcgcccggcccagag

SEQ ID NO: 1330817 - DNA, 15 bp, Homo sapiens
cgcgcccggcccaga

SEQ ID NO: 1330818 - DNA, 15 bp, Homo sapiens
accagcctcggcctc

SEQ ID NO: 1330819 - DNA, 15 bp, Homo sapiens
caccagcctcggcct

SEQ ID NO: 1330820 - DNA, 15 bp, Homo sapiens
ccaccagcctcggcc

SEQ ID NO: 1330821 - DNA, 15 bp, Homo sapiens
tccaccagcctcggc

SEQ ID NO: 1330822 - DNA, 15 bp, Homo sapiens
atccaccagcctcgg

SEQ ID NO: 1330823 - DNA, 15 bp, Homo sapiens
gatccaccagcctcg

SEQ ID NO: 1330824 - DNA, 15 bp, Homo sapiens
tgatccaccagcctc

SEQ ID NO: 1330825 - DNA, 15 bp, Homo sapiens
cgtgatccaccagcc

SEQ ID NO: 1330826 - DNA, 15 bp, Homo sapiens
tcgtgatccaccagc

SEQ ID NO: 1330827 - DNA, 15 bp, Homo sapiens
ctcgtgatccaccag

SEQ ID NO: 1330828 - DNA, 15 bp, Homo sapiens
cctcgtgatccacca

SEQ ID NO: 1330829 - DNA, 15 bp, Homo sapiens
ccaccaccacgcctg

SEQ ID NO: 1330830 - DNA, 15 bp, Homo sapiens
cccaccaccacgcct

SEQ ID NO: 1330831 - DNA, 15 bp, Homo sapiens
gcccaccaccacgcc

SEQ ID NO: 1330832 - DNA, 15 bp, Homo sapiens
cacaggtgcccacca

SEQ ID NO: 1330833 - DNA, 15 bp, Homo sapiens
ccacaggtgcccacc

SEQ ID NO: 1330834 - DNA, 15 bp, Homo sapiens
accacaggtgcccac

SEQ ID NO: 1330835 - DNA, 15 bp, Homo sapiens
gaccacaggtgccca

SEQ ID NO: 1330836 - DNA, 15 bp, Homo sapiens
ggaccacaggtgccc

SEQ ID NO: 1330837 - DNA, 15 bp, Homo sapiens
gggaccacaggtgcc

SEQ ID NO: 1330838 - DNA, 15 bp, Homo sapiens
tgggaccacaggtgc

SEQ ID NO: 1330839 - DNA, 15 bp, Homo sapiens
ctgggaccacaggtg

SEQ ID NO: 1330840 - DNA, 15 bp, Homo sapiens
gctgggaccacaggt

SEQ ID NO: 1330841 - DNA, 15 bp, Homo sapiens
tgagtagctgggacc

SEQ ID NO: 1330842 - DNA, 15 bp, Homo sapiens
ccccgggttcacgcc

SEQ ID NO: 1330843 - DNA, 15 bp, Homo sapiens
accccgggttcacgc

SEQ ID NO: 1330844 - DNA, 15 bp, Homo sapiens
aaccccgggttcacg

SEQ ID NO: 1330845 - DNA, 15 bp, Homo sapiens
gaaccccgggttcac

SEQ ID NO: 1330846 - DNA, 15 bp, Homo sapiens
cgaaccccgggttca

SEQ ID NO: 1330847 - DNA, 15 bp, Homo sapiens
ccgaaccccgggttc

SEQ ID NO: 1330848 - DNA, 15 bp, Homo sapiens
tccgaaccccgggtt

SEQ ID NO: 1330849 - DNA, 15 bp, Homo sapiens
ctccgaaccccgggt

SEQ ID NO: 1330850 - DNA, 15 bp, Homo sapiens
gctccgaaccccggg

SEQ ID NO: 1330851 - DNA, 15 bp, Homo sapiens
agctccgaaccccgg

SEQ ID NO: 1330852 - DNA, 15 bp, Homo sapiens
aagctccgaaccccg

SEQ ID NO: 1330853 - DNA, 15 bp, Homo sapiens
caagctccgaacccc

SEQ ID NO: 1330854 - DNA, 15 bp, Homo sapiens
gcaagctccgaaccc

SEQ ID NO: 1330855 - DNA, 15 bp, Homo sapiens
tgcaagctccgaacc

SEQ ID NO: 1330856 - DNA, 15 bp, Homo sapiens
ctgcaagctccgaac

SEQ ID NO: 1330857 - DNA, 15 bp, Homo sapiens
actgcaagctccgaa

SEQ ID NO: 1330858 - DNA, 15 bp, Homo sapiens
cactgcaagctccga

SEQ ID NO: 1330859 - DNA, 15 bp, Homo sapiens
acaatctcggctcac

SEQ ID NO: 1330860 - DNA, 15 bp, Homo sapiens
cacaatctcggctca

SEQ ID NO: 1330861 - DNA, 15 bp, Homo sapiens
gcacaatctcggctc

SEQ ID NO: 1330862 - DNA, 15 bp, Homo sapiens
ggcacaatctcggct

SEQ ID NO: 1330863 - DNA, 15 bp, Homo sapiens
tggcacaatctcggc

SEQ ID NO: 1330864 - DNA, 15 bp, Homo sapiens
gtggcacaatctcgg

SEQ ID NO: 1330865 - DNA, 15 bp, Homo sapiens
agtggcacaatctcg

SEQ ID NO: 1330866 - DNA, 15 bp, Homo sapiens
cagtggcacaatctc

SEQ ID NO: 1330867 - DNA, 15 bp, Homo sapiens
atcaccaggctggag

SEQ ID NO: 1330868 - DNA, 15 bp, Homo sapiens
tatcaccaggctgga

SEQ ID NO: 1330869 - DNA, 15 bp, Homo sapiens
ctatcaccaggctgg

SEQ ID NO: 1330870 - DNA, 15 bp, Homo sapiens
tctatcaccaggctg

SEQ ID NO: 1330871 - DNA, 15 bp, Homo sapiens
ttctatcaccaggct

SEQ ID NO: 1330872 - DNA, 15 bp, Homo sapiens
gttctatcaccaggc

SEQ ID NO: 1330873 - DNA, 15 bp, Homo sapiens
tgttctatcaccagg

SEQ ID NO: 1330874 - DNA, 15 bp, Homo sapiens
ttgttctatcaccag

SEQ ID NO: 1330875 - DNA, 15 bp, Homo sapiens
cttgttctatcacca

SEQ ID NO: 1330876 - DNA, 15 bp, Homo sapiens
tcttgttctatcacc

SEQ ID NO: 1330877 - DNA, 15 bp, Homo sapiens
gtcttgttctatcac

SEQ ID NO: 1330878 - DNA, 15 bp, Homo sapiens
agtcttgttctatca

SEQ ID NO: 1330879 - DNA, 15 bp, Homo sapiens
gagtcttgttctatc

SEQ ID NO: 1330880 - DNA, 15 bp, Homo sapiens
ggagtcttgttctat

SEQ ID NO: 1330881 - DNA, 15 bp, Homo sapiens
cggagtcttgttcta

SEQ ID NO: 1330882 - DNA, 15 bp, Homo sapiens
acggagtcttgttct

SEQ ID NO: 1330883 - DNA, 15 bp, Homo sapiens
gacggagtcttgttc

SEQ ID NO: 1330884 - DNA, 15 bp, Homo sapiens
agacggagtcttgtt

SEQ ID NO: 1330885 - DNA, 15 bp, Homo sapiens
gagacggagtcttgt

SEQ ID NO: 1330886 - DNA, 15 bp, Homo sapiens
gttttttttttgaga

SEQ ID NO: 1330887 - DNA, 15 bp, Homo sapiens
tgttttttttttgag

SEQ ID NO: 1330888 - DNA, 15 bp, Homo sapiens
ttgttttttttttga

SEQ ID NO: 1330889 - DNA, 15 bp, Homo sapiens
tttgttttttttttg

SEQ ID NO: 1330890 - DNA, 15 bp, Homo sapiens
attttttgttttttg

SEQ ID NO: 1330891 - DNA, 15 bp, Homo sapiens
cattttttgtttttt

SEQ ID NO: 1330892 - DNA, 15 bp, Homo sapiens
tcattttttgttttt

SEQ ID NO: 1330893 - DNA, 15 bp, Homo sapiens
ttcattttttgtttt

SEQ ID NO: 1330894 - DNA, 15 bp, Homo sapiens
tttcattttttgttt

SEQ ID NO: 1330895 - DNA, 15 bp, Homo sapiens
ttttcattttttgtt

SEQ ID NO: 1330896 - DNA, 15 bp, Homo sapiens
tttttcattttttgt

SEQ ID NO: 1330897 - DNA, 15 bp, Homo sapiens
gtttttcattttttg

SEQ ID NO: 1330898 - DNA, 15 bp, Homo sapiens
tgtttttcatttttt

SEQ ID NO: 1330899 - DNA, 15 bp, Homo sapiens
ttgtttttcattttt

SEQ ID NO: 1330900 - DNA, 15 bp, Homo sapiens
gggttgtttttcatt

SEQ ID NO: 1330901 - DNA, 15 bp, Homo sapiens
agggttgtttttcat

SEQ ID NO: 1330902 - DNA, 15 bp, Homo sapiens
gagggttgtttttca

SEQ ID NO: 1330903 - DNA, 15 bp, Homo sapiens
agagggttgtttttc

SEQ ID NO: 1330904 - DNA, 15 bp, Homo sapiens
cagagggttgttttt

SEQ ID NO: 1330905 - DNA, 15 bp, Homo sapiens
ccagagggttgtttt

SEQ ID NO: 1330906 - DNA, 15 bp, Homo sapiens
tccagagggttgttt

SEQ ID NO: 1330907 - DNA, 15 bp, Homo sapiens
ctccagagggttgtt

SEQ ID NO: 1330908 - DNA, 15 bp, Homo sapiens
cctccagagggttgt

SEQ ID NO: 1330909 - DNA, 15 bp, Homo sapiens
tcctccagagggttg

SEQ ID NO: 1330910 - DNA, 15 bp, Homo sapiens
ttcctccagagggtt

SEQ ID NO: 1330911 - DNA, 15 bp, Homo sapiens
tttcctccagagggt

SEQ ID NO: 1330912 - DNA, 15 bp, Homo sapiens
ctttcctccagaggg

SEQ ID NO: 1330913 - DNA, 15 bp, Homo sapiens
cctttcctccagagg

SEQ ID NO: 1330914 - DNA, 15 bp, Homo sapiens
acctttcctccagag

SEQ ID NO: 1330915 - DNA, 15 bp, Homo sapiens
gacctttcctccaga

SEQ ID NO: 1330916 - DNA, 15 bp, Homo sapiens
tgacctttcctccag

SEQ ID NO: 1330917 - DNA, 15 bp, Homo sapiens
atgacctttcctcca

SEQ ID NO: 1330918 - DNA, 15 bp, Homo sapiens
catgacctttcctcc

SEQ ID NO: 1330919 - DNA, 15 bp, Homo sapiens
tcatgacctttcctc

SEQ ID NO: 1330920 - DNA, 15 bp, Homo sapiens
atcatgacctttcct

SEQ ID NO: 1330921 - DNA, 15 bp, Homo sapiens
tatcatgacctttcc

SEQ ID NO: 1330922 - DNA, 15 bp, Homo sapiens
atatcatgacctttc

SEQ ID NO: 1330923 - DNA, 15 bp, Homo sapiens
tatatcatgaccttt

SEQ ID NO: 1330924 - DNA, 15 bp, Homo sapiens
ctatatcatgacctt

SEQ ID NO: 1330925 - DNA, 15 bp, Homo sapiens
tctatatcatgacct

SEQ ID NO: 1330926 - DNA, 15 bp, Homo sapiens
ctctatatcatgacc

SEQ ID NO: 1330927 - DNA, 15 bp, Homo sapiens
cctctatatcatgac

SEQ ID NO: 1330928 - DNA, 15 bp, Homo sapiens
tcctctatatcatga

SEQ ID NO: 1330929 - DNA, 15 bp, Homo sapiens
ctcctctatatcatg

SEQ ID NO: 1330930 - DNA, 15 bp, Homo sapiens
cctcctctatatcat

SEQ ID NO: 1330931 - DNA, 15 bp, Homo sapiens
tcctcctctatatca

SEQ ID NO: 1330932 - DNA, 15 bp, Homo sapiens
atcctcctctatatc

SEQ ID NO: 1330933 - DNA, 15 bp, Homo sapiens
aatcctcctctatat

SEQ ID NO: 1330934 - DNA, 15 bp, Homo sapiens
aaatcctcctctata

SEQ ID NO: 1330935 - DNA, 15 bp, Homo sapiens
caaatcctcctctat

SEQ ID NO: 1330936 - DNA, 15 bp, Homo sapiens
acaaatcctcctcta

SEQ ID NO: 1330937 - DNA, 15 bp, Homo sapiens
aacaaatcctcctct

SEQ ID NO: 1330938 - DNA, 15 bp, Homo sapiens
taacaaatcctcctc

SEQ ID NO: 1330939 - DNA, 15 bp, Homo sapiens
ataacaaatcctcct

SEQ ID NO: 1330940 - DNA, 15 bp, Homo sapiens
aataacaaatcctcc

SEQ ID NO: 1330941 - DNA, 15 bp, Homo sapiens
aaataacaaatcctc

SEQ ID NO: 1330942 - DNA, 15 bp, Homo sapiens
taaataacaaatcct

SEQ ID NO: 1330943 - DNA, 15 bp, Homo sapiens
ttaaataacaaatcc

SEQ ID NO: 1330944 - DNA, 15 bp, Homo sapiens
tttaaataacaaatc

SEQ ID NO: 1330945 - DNA, 15 bp, Homo sapiens
atttaaataacaaat

SEQ ID NO: 1330946 - DNA, 15 bp, Homo sapiens
aatttaaataacaaa

SEQ ID NO: 1330947 - DNA, 15 bp, Homo sapiens
caatttaaataacaa

SEQ ID NO: 1330948 - DNA, 15 bp, Homo sapiens
tcaatttaaataaca

SEQ ID NO: 1330949 - DNA, 15 bp, Homo sapiens
ctcaatttaaataac

SEQ ID NO: 1330950 - DNA, 15 bp, Homo sapiens
cctcaatttaaataa

SEQ ID NO: 1330951 - DNA, 15 bp, Homo sapiens
ccctcaatttaaata

SEQ ID NO: 1330952 - DNA, 15 bp, Homo sapiens
accctcaatttaaat

SEQ ID NO: 1330953 - DNA, 15 bp, Homo sapiens
taccctcaatttaaa

SEQ ID NO: 1330954 - DNA, 15 bp, Homo sapiens
ataccctcaatttaa

SEQ ID NO: 1330955 - DNA, 15 bp, Homo sapiens
cataccctcaattta

SEQ ID NO: 1330956 - DNA, 15 bp, Homo sapiens
ccataccctcaattt

SEQ ID NO: 1330957 - DNA, 15 bp, Homo sapiens
tccataccctcaatt

SEQ ID NO: 1330958 - DNA, 15 bp, Homo sapiens
gtccataccctcaat

SEQ ID NO: 1330959 - DNA, 15 bp, Homo sapiens
agtccataccctcaa

SEQ ID NO: 1330960 - DNA, 15 bp, Homo sapiens
gagtccataccctca

SEQ ID NO: 1330961 - DNA, 15 bp, Homo sapiens
agagtccataccctc

SEQ ID NO: 1330962 - DNA, 15 bp, Homo sapiens
cagagtccataccct

SEQ ID NO: 1330963 - DNA, 15 bp, Homo sapiens
ccagagtccataccc

SEQ ID NO: 1330964 - DNA, 15 bp, Homo sapiens
gccagagtccatacc

SEQ ID NO: 1330965 - DNA, 15 bp, Homo sapiens
tgccagagtccatac

SEQ ID NO: 1330966 - DNA, 15 bp, Homo sapiens
gtgccagagtccata

SEQ ID NO: 1330967 - DNA, 15 bp, Homo sapiens
agtgccagagtccat

SEQ ID NO: 1330968 - DNA, 15 bp, Homo sapiens
cagtgccagagtcca

SEQ ID NO: 1330969 - DNA, 15 bp, Homo sapiens
tcagtgccagagtcc

SEQ ID NO: 1330970 - DNA, 15 bp, Homo sapiens
ctcagtgccagagtc

SEQ ID NO: 1330971 - DNA, 15 bp, Homo sapiens
gctcagtgccagagt

SEQ ID NO: 1330972 - DNA, 15 bp, Homo sapiens
ggctcagtgccagag

SEQ ID NO: 1330973 - DNA, 15 bp, Homo sapiens
aggctcagtgccaga

SEQ ID NO: 1330974 - DNA, 15 bp, Homo sapiens
caggctcagtgccag

SEQ ID NO: 1330975 - DNA, 15 bp, Homo sapiens
gcaggctcagtgcca

SEQ ID NO: 1330976 - DNA, 15 bp, Homo sapiens
agcaggctcagtgcc

SEQ ID NO: 1330977 - DNA, 15 bp, Homo sapiens
cagcaggctcagtgc

SEQ ID NO: 1330978 - DNA, 15 bp, Homo sapiens
ccagcaggctcagtg

SEQ ID NO: 1330979 - DNA, 15 bp, Homo sapiens
cccagcaggctcagt

SEQ ID NO: 1330980 - DNA, 15 bp, Homo sapiens
ccccagcaggctcag

SEQ ID NO: 1330981 - DNA, 15 bp, Homo sapiens
tccccagcaggctca

SEQ ID NO: 1330982 - DNA, 15 bp, Homo sapiens
ttccccagcaggctc

SEQ ID NO: 1330983 - DNA, 15 bp, Homo sapiens
cttccccagcaggct

SEQ ID NO: 1330984 - DNA, 15 bp, Homo sapiens
gcttccccagcaggc

SEQ ID NO: 1330985 - DNA, 15 bp, Homo sapiens
ggcttccccagcagg

SEQ ID NO: 1330986 - DNA, 15 bp, Homo sapiens
aggcttccccagcag

SEQ ID NO: 1330987 - DNA, 15 bp, Homo sapiens
taggcttccccagca

SEQ ID NO: 1330988 - DNA, 15 bp, Homo sapiens
ataggcttccccagc

SEQ ID NO: 1330989 - DNA, 15 bp, Homo sapiens
gataggcttccccag

SEQ ID NO: 1330990 - DNA, 15 bp, Homo sapiens
agataggcttcccca

SEQ ID NO: 1330991 - DNA, 15 bp, Homo sapiens
gagataggcttcccc

SEQ ID NO: 1330992 - DNA, 15 bp, Homo sapiens
tgagataggcttccc

SEQ ID NO: 1330993 - DNA, 15 bp, Homo sapiens
ctgagataggcttcc

SEQ ID NO: 1330994 - DNA, 15 bp, Homo sapiens
tctgagataggcttc

SEQ ID NO: 1330995 - DNA, 15 bp, Homo sapiens
atctgagataggctt

SEQ ID NO: 1330996 - DNA, 15 bp, Homo sapiens
aatctgagataggct

SEQ ID NO: 1330997 - DNA, 15 bp, Homo sapiens
aaatctgagataggc

SEQ ID NO: 1330998 - DNA, 15 bp, Homo sapiens
caaatctgagatagg

SEQ ID NO: 1330999 - DNA, 15 bp, Homo sapiens
tcaaatctgagatag

SEQ ID NO: 1331000 - DNA, 15 bp, Homo sapiens
ttcaaatctgagata

SEQ ID NO: 1331001 - DNA, 15 bp, Homo sapiens
tttcaaatctgagat

SEQ ID NO: 1331002 - DNA, 15 bp, Homo sapiens
ttttcaaatctgaga

SEQ ID NO: 1331003 - DNA, 15 bp, Homo sapiens
cttttcaaatctgag

SEQ ID NO: 1331004 - DNA, 15 bp, Homo sapiens
ccttttcaaatctga

SEQ ID NO: 1331005 - DNA, 15 bp, Homo sapiens
cccttttcaaatctg

SEQ ID NO: 1331006 - DNA, 15 bp, Homo sapiens
gcccttttcaaatct

SEQ ID NO: 1331007 - DNA, 15 bp, Homo sapiens
tgcccttttcaaatc

SEQ ID NO: 1331008 - DNA, 15 bp, Homo sapiens
ttgcccttttcaaat

SEQ ID NO: 1331009 - DNA, 15 bp, Homo sapiens
tttgcccttttcaaa

SEQ ID NO: 1331010 - DNA, 15 bp, Homo sapiens
ttttgcccttttcaa

SEQ ID NO: 1331011 - DNA, 15 bp, Homo sapiens
attttgcccttttca

SEQ ID NO: 1331012 - DNA, 15 bp, Homo sapiens
cattttgcccttttc

SEQ ID NO: 1331013 - DNA, 15 bp, Homo sapiens
ccattttgccctttt

SEQ ID NO: 1331014 - DNA, 15 bp, Homo sapiens
cccattttgcccttt

SEQ ID NO: 1331015 - DNA, 15 bp, Homo sapiens
tcccattttgccctt

SEQ ID NO: 1331016 - DNA, 15 bp, Homo sapiens
ttcccattttgccct

SEQ ID NO: 1331017 - DNA, 15 bp, Homo sapiens
cttcccattttgccc

SEQ ID NO: 1331018 - DNA, 15 bp, Homo sapiens
tcttcccattttgcc

SEQ ID NO: 1331019 - DNA, 15 bp, Homo sapiens
ttcttcccattttgc

SEQ ID NO: 1331020 - DNA, 15 bp, Homo sapiens
cttcttcccattttg

SEQ ID NO: 1331021 - DNA, 15 bp, Homo sapiens
gcttcttcccatttt

SEQ ID NO: 1331022 - DNA, 15 bp, Homo sapiens
ggcttcttcccattt

SEQ ID NO: 1331023 - DNA, 15 bp, Homo sapiens
tggcttcttcccatt

SEQ ID NO: 1331024 - DNA, 15 bp, Homo sapiens
atggcttcttcccat

SEQ ID NO: 1331025 - DNA, 15 bp, Homo sapiens
gatggcttcttccca

SEQ ID NO: 1331026 - DNA, 15 bp, Homo sapiens
tgatggcttcttccc

SEQ ID NO: 1331027 - DNA, 15 bp, Homo sapiens
gtgatggcttcttcc

SEQ ID NO: 1331028 - DNA, 15 bp, Homo sapiens
ggtgatggcttcttc

SEQ ID NO: 1331029 - DNA, 15 bp, Homo sapiens
aggtgatggcttctt

SEQ ID NO: 1331030 - DNA, 15 bp, Homo sapiens
aaggtgatggcttct

SEQ ID NO: 1331031 - DNA, 15 bp, Homo sapiens
aaaggtgatggcttc

SEQ ID NO: 1331032 - DNA, 15 bp, Homo sapiens
taaaggtgatggctt

SEQ ID NO: 1331033 - DNA, 15 bp, Homo sapiens
gtaaaggtgatggct

SEQ ID NO: 1331034 - DNA, 15 bp, Homo sapiens
ggtaaaggtgatggc

SEQ ID NO: 1331035 - DNA, 15 bp, Homo sapiens
tggtaaaggtgatgg

SEQ ID NO: 1331036 - DNA, 15 bp, Homo sapiens
atggtaaaggtgatg

SEQ ID NO: 1331037 - DNA, 15 bp, Homo sapiens
aatggtaaaggtgat

SEQ ID NO: 1331038 - DNA, 15 bp, Homo sapiens
gaatggtaaaggtga

SEQ ID NO: 1331039 - DNA, 15 bp, Homo sapiens
ggaatggtaaaggtg

SEQ ID NO: 1331040 - DNA, 15 bp, Homo sapiens
gggaatggtaaaggt

SEQ ID NO: 1331041 - DNA, 15 bp, Homo sapiens
tgggaatggtaaagg

SEQ ID NO: 1331042 - DNA, 15 bp, Homo sapiens
gtgggaatggtaaag

SEQ ID NO: 1331043 - DNA, 15 bp, Homo sapiens
agtgggaatggtaaa

SEQ ID NO: 1331044 - DNA, 15 bp, Homo sapiens
gagtgggaatggtaa

SEQ ID NO: 1331045 - DNA, 15 bp, Homo sapiens
ggagtgggaatggta

SEQ ID NO: 1331046 - DNA, 15 bp, Homo sapiens
tggagtgggaatggt

SEQ ID NO: 1331047 - DNA, 15 bp, Homo sapiens
ctggagtgggaatgg

SEQ ID NO: 1331048 - DNA, 15 bp, Homo sapiens
cctggagtgggaatg

SEQ ID NO: 1331049 - DNA, 15 bp, Homo sapiens
tcctggagtgggaat

SEQ ID NO: 1331050 - DNA, 15 bp, Homo sapiens
ttcctggagtgggaa

SEQ ID NO: 1331051 - DNA, 15 bp, Homo sapiens
cttcctggagtggga

SEQ ID NO: 1331052 - DNA, 15 bp, Homo sapiens
acttcctggagtggg

SEQ ID NO: 1331053 - DNA, 15 bp, Homo sapiens
aacttcctggagtgg

SEQ ID NO: 1331054 - DNA, 15 bp, Homo sapiens
aaacttcctggagtg

SEQ ID NO: 1331055 - DNA, 15 bp, Homo sapiens
aaaacttcctggagt

SEQ ID NO: 1331056 - DNA, 15 bp, Homo sapiens
gaaaacttcctggag

SEQ ID NO: 1331057 - DNA, 15 bp, Homo sapiens
ggaaaacttcctgga

SEQ ID NO: 1331058 - DNA, 15 bp, Homo sapiens
aggaaaacttcctgg

SEQ ID NO: 1331059 - DNA, 15 bp, Homo sapiens
taggaaaacttcctg

SEQ ID NO: 1331060 - DNA, 15 bp, Homo sapiens
ctaggaaaacttcct

SEQ ID NO: 1331061 - DNA, 15 bp, Homo sapiens
tctaggaaaacttcc

SEQ ID NO: 1331062 - DNA, 15 bp, Homo sapiens
ttctaggaaaacttc

SEQ ID NO: 1331063 - DNA, 15 bp, Homo sapiens
gttctaggaaaactt

SEQ ID NO: 1331064 - DNA, 15 bp, Homo sapiens
cgttctaggaaaact

SEQ ID NO: 1331065 - DNA, 15 bp, Homo sapiens
tcgttctaggaaaac

SEQ ID NO: 1331066 - DNA, 15 bp, Homo sapiens
atcgttctaggaaaa

SEQ ID NO: 1331067 - DNA, 15 bp, Homo sapiens
catcgttctaggaaa

SEQ ID NO: 1331068 - DNA, 15 bp, Homo sapiens
tcatcgttctaggaa

SEQ ID NO: 1331069 - DNA, 15 bp, Homo sapiens
gtcatcgttctagga

SEQ ID NO: 1331070 - DNA, 15 bp, Homo sapiens
agtcatcgttctagg

SEQ ID NO: 1331071 - DNA, 15 bp, Homo sapiens
cagtcatcgttctag

SEQ ID NO: 1331072 - DNA, 15 bp, Homo sapiens
acagtcatcgttcta

SEQ ID NO: 1331073 - DNA, 15 bp, Homo sapiens
gacagtcatcgttct

SEQ ID NO: 1331074 - DNA, 15 bp, Homo sapiens
ggacagtcatcgttc

SEQ ID NO: 1331075 - DNA, 15 bp, Homo sapiens
tggacagtcatcgtt

SEQ ID NO: 1331076 - DNA, 15 bp, Homo sapiens
ttggacagtcatcgt

SEQ ID NO: 1331077 - DNA, 15 bp, Homo sapiens
cttggacagtcatcg

SEQ ID NO: 1331078 - DNA, 15 bp, Homo sapiens
acttggacagtcatc

SEQ ID NO: 1331079 - DNA, 15 bp, Homo sapiens
cacttggacagtcat

SEQ ID NO: 1331080 - DNA, 15 bp, Homo sapiens
acacttggacagtca

SEQ ID NO: 1331081 - DNA, 15 bp, Homo sapiens
cacacttggacagtc

SEQ ID NO: 1331082 - DNA, 15 bp, Homo sapiens
ccacacttggacagt

SEQ ID NO: 1331083 - DNA, 15 bp, Homo sapiens
accacacttggacag

SEQ ID NO: 1331084 - DNA, 15 bp, Homo sapiens
gaccacacttggaca

SEQ ID NO: 1331085 - DNA, 15 bp, Homo sapiens
ggaccacacttggac

SEQ ID NO: 1331086 - DNA, 15 bp, Homo sapiens
gggaccacacttgga

SEQ ID NO: 1331087 - DNA, 15 bp, Homo sapiens
agggaccacacttgg

SEQ ID NO: 1331088 - DNA, 15 bp, Homo sapiens
cagggaccacacttg

SEQ ID NO: 1331089 - DNA, 15 bp, Homo sapiens
ccagggaccacactt

SEQ ID NO: 1331090 - DNA, 15 bp, Homo sapiens
ggcccagggaccaca

SEQ ID NO: 1331091 - DNA, 15 bp, Homo sapiens
tggcccagggaccac

SEQ ID NO: 1331092 - DNA, 15 bp, Homo sapiens
ctggcccagggacca

SEQ ID NO: 1331093 - DNA, 15 bp, Homo sapiens
gctggcccagggacc

SEQ ID NO: 1331094 - DNA, 15 bp, Homo sapiens
tgctggcccagggac

SEQ ID NO: 1331095 - DNA, 15 bp, Homo sapiens
ctgctggcccaggga

SEQ ID NO: 1331096 - DNA, 15 bp, Homo sapiens
gctgctggcccaggg

SEQ ID NO: 1331097 - DNA, 15 bp, Homo sapiens
tgctgctggcccagg

SEQ ID NO: 1331098 - DNA, 15 bp, Homo sapiens
atgctgctggcccag

SEQ ID NO: 1331099 - DNA, 15 bp, Homo sapiens
gatgctgctggccca

SEQ ID NO: 1331100 - DNA, 15 bp, Homo sapiens
tgatgctgctggccc

SEQ ID NO: 1331101 - DNA, 15 bp, Homo sapiens
ctgatgctgctggcc

SEQ ID NO: 1331102 - DNA, 15 bp, Homo sapiens
cctgatgctgctggc

SEQ ID NO: 1331103 - DNA, 15 bp, Homo sapiens
tcctgatgctgctgg

SEQ ID NO: 1331104 - DNA, 15 bp, Homo sapiens
atcctgatgctgctg

SEQ ID NO: 1331105 - DNA, 15 bp, Homo sapiens
gatcctgatgctgct

SEQ ID NO: 1331106 - DNA, 15 bp, Homo sapiens
ggatcctgatgctgc

SEQ ID NO: 1331107 - DNA, 15 bp, Homo sapiens
aggatcctgatgctg

SEQ ID NO: 1331108 - DNA, 15 bp, Homo sapiens
caggatcctgatgct

SEQ ID NO: 1331109 - DNA, 15 bp, Homo sapiens
acaggatcctgatgc

SEQ ID NO: 1331110 - DNA, 15 bp, Homo sapiens
cacaggatcctgatg

SEQ ID NO: 1331111 - DNA, 15 bp, Homo sapiens
ccacaggatcctgat

SEQ ID NO: 1331112 - DNA, 15 bp, Homo sapiens
gccacaggatcctga

SEQ ID NO: 1331113 - DNA, 15 bp, Homo sapiens
tgccacaggatcctg

SEQ ID NO: 1331114 - DNA, 15 bp, Homo sapiens
ctgccacaggatcct

SEQ ID NO: 1331115 - DNA, 15 bp, Homo sapiens
gctgccacaggatcc

SEQ ID NO: 1331116 - DNA, 15 bp, Homo sapiens
agctgccacaggatc

SEQ ID NO: 1331117 - DNA, 15 bp, Homo sapiens
aagctgccacaggat

SEQ ID NO: 1331118 - DNA, 15 bp, Homo sapiens
caagctgccacagga

SEQ ID NO: 1331119 - DNA, 15 bp, Homo sapiens
acaagctgccacagg

SEQ ID NO: 1331120 - DNA, 15 bp, Homo sapiens
cacaagctgccacag

SEQ ID NO: 1331121 - DNA, 15 bp, Homo sapiens
tcacaagctgccaca

SEQ ID NO: 1331122 - DNA, 15 bp, Homo sapiens
ctcacaagctgccac

SEQ ID NO: 1331123 - DNA, 15 bp, Homo sapiens
tctcacaagctgcca

SEQ ID NO: 1331124 - DNA, 15 bp, Homo sapiens
ttctcacaagctgcc

SEQ ID NO: 1331125 - DNA, 15 bp, Homo sapiens
tttctcacaagctgc

SEQ ID NO: 1331126 - DNA, 15 bp, Homo sapiens
atttctcacaagctg

SEQ ID NO: 1331127 - DNA, 15 bp, Homo sapiens
catttctcacaagct

SEQ ID NO: 1331128 - DNA, 15 bp, Homo sapiens
gcatttctcacaagc

SEQ ID NO: 1331129 - DNA, 15 bp, Homo sapiens
tgcatttctcacaag

SEQ ID NO: 1331130 - DNA, 15 bp, Homo sapiens
gtgcatttctcacaa

SEQ ID NO: 1331131 - DNA, 15 bp, Homo sapiens
tgtgcatttctcaca

SEQ ID NO: 1331132 - DNA, 15 bp, Homo sapiens
gtgtgcatttctcac

SEQ ID NO: 1331133 - DNA, 15 bp, Homo sapiens
agtgtgcatttctca

SEQ ID NO: 1331134 - DNA, 15 bp, Homo sapiens
gagtgtgcatttctc

SEQ ID NO: 1331135 - DNA, 15 bp, Homo sapiens
agagtgtgcatttct

SEQ ID NO: 1331136 - DNA, 15 bp, Homo sapiens
gagagtgtgcatttc

SEQ ID NO: 1331137 - DNA, 15 bp, Homo sapiens
tgagagtgtgcattt

SEQ ID NO: 1331138 - DNA, 15 bp, Homo sapiens
ctgagagtgtgcatt

SEQ ID NO: 1331139 - DNA, 15 bp, Homo sapiens
cctgagagtgtgcat

SEQ ID NO: 1331140 - DNA, 15 bp, Homo sapiens
gcctgagagtgtgca

SEQ ID NO: 1331141 - DNA, 15 bp, Homo sapiens
ggcctgagagtgtgc

SEQ ID NO: 1331142 - DNA, 15 bp, Homo sapiens
gggcctgagagtgtg

SEQ ID NO: 1331143 - DNA, 15 bp, Homo sapiens
ggggcctgagagtgt

SEQ ID NO: 1331144 - DNA, 15 bp, Homo sapiens
aggggcctgagagtg

SEQ ID NO: 1331145 - DNA, 15 bp, Homo sapiens
caggggcctgagagt

SEQ ID NO: 1331146 - DNA, 15 bp, Homo sapiens
acaggggcctgagag

SEQ ID NO: 1331147 - DNA, 15 bp, Homo sapiens
gacaggggcctgaga

SEQ ID NO: 1331148 - DNA, 15 bp, Homo sapiens
ggacaggggcctgag

SEQ ID NO: 1331149 - DNA, 15 bp, Homo sapiens
gggacaggggcctga

SEQ ID NO: 1331150 - DNA, 15 bp, Homo sapiens
tgggacaggggcctg

SEQ ID NO: 1331151 - DNA, 15 bp, Homo sapiens
ctgggacaggggcct

SEQ ID NO: 1331152 - DNA, 15 bp, Homo sapiens
gctgggacaggggcc

SEQ ID NO: 1331153 - DNA, 15 bp, Homo sapiens
ggctgggacaggggc

SEQ ID NO: 1331154 - DNA, 15 bp, Homo sapiens
gggctgggacagggg

SEQ ID NO: 1331155 - DNA, 15 bp, Homo sapiens
ggggctgggacaggg

SEQ ID NO: 1331156 - DNA, 15 bp, Homo sapiens
tggggctgggacagg

SEQ ID NO: 1331157 - DNA, 15 bp, Homo sapiens
gtggggctgggacag

SEQ ID NO: 1331158 - DNA, 15 bp, Homo sapiens
ggtggggctgggaca

SEQ ID NO: 1331159 - DNA, 15 bp, Homo sapiens
tggtggggctgggac

SEQ ID NO: 1331160 - DNA, 15 bp, Homo sapiens
gtggtggggctggga

SEQ ID NO: 1331161 - DNA, 15 bp, Homo sapiens
cgtggtggggctggg

SEQ ID NO: 1331162 - DNA, 15 bp, Homo sapiens
gcgtggtggggctgg

SEQ ID NO: 1331163 - DNA, 15 bp, Homo sapiens
ggcgtggtggggctg

SEQ ID NO: 1331164 - DNA, 15 bp, Homo sapiens
tggcgtggtggggct

SEQ ID NO: 1331165 - DNA, 15 bp, Homo sapiens
ctggcgtggtggggc

SEQ ID NO: 1331166 - DNA, 15 bp, Homo sapiens
tctggcgtggtgggg

SEQ ID NO: 1331167 - DNA, 15 bp, Homo sapiens
ttctggcgtggtggg

SEQ ID NO: 1331168 - DNA, 15 bp, Homo sapiens
cttctggcgtggtgg

SEQ ID NO: 1331169 - DNA, 15 bp, Homo sapiens
gcttctggcgtggtg

SEQ ID NO: 1331170 - DNA, 15 bp, Homo sapiens
ggcttctggcgtggt

SEQ ID NO: 1331171 - DNA, 15 bp, Homo sapiens
gggcttctggcgtgg

SEQ ID NO: 1331172 - DNA, 15 bp, Homo sapiens
agggcttctggcgtg

SEQ ID NO: 1331173 - DNA, 15 bp, Homo sapiens
cagggcttctggcgt

SEQ ID NO: 1331174 - DNA, 15 bp, Homo sapiens
gcagggcttctggcg

SEQ ID NO: 1331175 - DNA, 15 bp, Homo sapiens
tgcagggcttctggc

SEQ ID NO: 1331176 - DNA, 15 bp, Homo sapiens
gtgcagggcttctgg

SEQ ID NO: 1331177 - DNA, 15 bp, Homo sapiens
cgtgcagggcttctg

SEQ ID NO: 1331178 - DNA, 15 bp, Homo sapiens
ccgtgcagggcttct

SEQ ID NO: 1331179 - DNA, 15 bp, Homo sapiens
cccgtgcagggcttc

SEQ ID NO: 1331180 - DNA, 15 bp, Homo sapiens
ccccgtgcagggctt

SEQ ID NO: 1331181 - DNA, 15 bp, Homo sapiens
accccgtgcagggct

SEQ ID NO: 1331182 - DNA, 15 bp, Homo sapiens
caccccgtgcagggc

SEQ ID NO: 1331183 - DNA, 15 bp, Homo sapiens
ccaccccgtgcaggg

SEQ ID NO: 1331184 - DNA, 15 bp, Homo sapiens
cccaccccgtgcagg

SEQ ID NO: 1331185 - DNA, 15 bp, Homo sapiens
ccccaccccgtgcag

SEQ ID NO: 1331186 - DNA, 15 bp, Homo sapiens
cccccaccccgtgca

SEQ ID NO: 1331187 - DNA, 15 bp, Homo sapiens
acccccaccccgtgc

SEQ ID NO: 1331188 - DNA, 15 bp, Homo sapiens
tacccccaccccgtg

SEQ ID NO: 1331189 - DNA, 15 bp, Homo sapiens
ctacccccaccccgt

SEQ ID NO: 1331190 - DNA, 15 bp, Homo sapiens
gctacccccaccccg

SEQ ID NO: 1331191 - DNA, 15 bp, Homo sapiens
tgctacccccacccc

SEQ ID NO: 1331192 - DNA, 15 bp, Homo sapiens
ttgctacccccaccc

SEQ ID NO: 1331193 - DNA, 15 bp, Homo sapiens
attgctacccccacc

SEQ ID NO: 1331194 - DNA, 15 bp, Homo sapiens
cattgctacccccac

SEQ ID NO: 1331195 - DNA, 15 bp, Homo sapiens
acattgctaccccca

SEQ ID NO: 1331196 - DNA, 15 bp, Homo sapiens
aacattgctaccccc

SEQ ID NO: 1331197 - DNA, 15 bp, Homo sapiens
gaacattgctacccc

SEQ ID NO: 1331198 - DNA, 15 bp, Homo sapiens
agaacattgctaccc

SEQ ID NO: 1331199 - DNA, 15 bp, Homo sapiens
cagaacattgctacc

SEQ ID NO: 1331200 - DNA, 15 bp, Homo sapiens
acagaacattgctac

SEQ ID NO: 1331201 - DNA, 15 bp, Homo sapiens
cacagaacattgcta

SEQ ID NO: 1331202 - DNA, 15 bp, Homo sapiens
acacagaacattgct

SEQ ID NO: 1331203 - DNA, 15 bp, Homo sapiens
aacacagaacattgc

SEQ ID NO: 1331204 - DNA, 15 bp, Homo sapiens
gaacacagaacattg

SEQ ID NO: 1331205 - DNA, 15 bp, Homo sapiens
agaacacagaacatt

SEQ ID NO: 1331206 - DNA, 15 bp, Homo sapiens
tagaacacagaacat

SEQ ID NO: 1331207 - DNA, 15 bp, Homo sapiens
ttagaacacagaaca

SEQ ID NO: 1331208 - DNA, 15 bp, Homo sapiens
gttagaacacagaac

SEQ ID NO: 1331209 - DNA, 15 bp, Homo sapiens
tgttagaacacagaa

SEQ ID NO: 1331210 - DNA, 15 bp, Homo sapiens
ttgttagaacacaga

SEQ ID NO: 1331211 - DNA, 15 bp, Homo sapiens
attgttagaacacag

SEQ ID NO: 1331212 - DNA, 15 bp, Homo sapiens
cattgttagaacaca

SEQ ID NO: 1331213 - DNA, 15 bp, Homo sapiens
gcattgttagaacac

SEQ ID NO: 1331214 - DNA, 15 bp, Homo sapiens
cgcattgttagaaca

SEQ ID NO: 1331215 - DNA, 15 bp, Homo sapiens
acgcattgttagaac

SEQ ID NO: 1331216 - DNA, 15 bp, Homo sapiens
tacgcattgttagaa

SEQ ID NO: 1331217 - DNA, 15 bp, Homo sapiens
ctacgcattgttaga

SEQ ID NO: 1331218 - DNA, 15 bp, Homo sapiens
cctacgcattgttag

SEQ ID NO: 1331219 - DNA, 15 bp, Homo sapiens
ccctacgcattgtta

SEQ ID NO: 1331220 - DNA, 15 bp, Homo sapiens
cccctacgcattgtt

SEQ ID NO: 1331221 - DNA, 15 bp, Homo sapiens
tcccctacgcattgt

SEQ ID NO: 1331222 - DNA, 15 bp, Homo sapiens
atcccctacgcattg

SEQ ID NO: 1331223 - DNA, 15 bp, Homo sapiens
aatcccctacgcatt

SEQ ID NO: 1331224 - DNA, 15 bp, Homo sapiens
gaatcccctacgcat

SEQ ID NO: 1331225 - DNA, 15 bp, Homo sapiens
agaatcccctacgca

SEQ ID NO: 1331226 - DNA, 15 bp, Homo sapiens
cagaatcccctacgc

SEQ ID NO: 1331227 - DNA, 15 bp, Homo sapiens
acagaatcccctacg

SEQ ID NO: 1331228 - DNA, 15 bp, Homo sapiens
cacagaatcccctac

SEQ ID NO: 1331229 - DNA, 15 bp, Homo sapiens
ccacagaatccccta

SEQ ID NO: 1331230 - DNA, 15 bp, Homo sapiens
gccacagaatcccct

SEQ ID NO: 1331231 - DNA, 15 bp, Homo sapiens
tgccacagaatcccc

SEQ ID NO: 1331232 - DNA, 15 bp, Homo sapiens
gtgccacagaatccc

SEQ ID NO: 1331233 - DNA, 15 bp, Homo sapiens
tgtgccacagaatcc

SEQ ID NO: 1331234 - DNA, 15 bp, Homo sapiens
gtgtgccacagaatc

SEQ ID NO: 1331235 - DNA, 15 bp, Homo sapiens
ggtgtgccacagaat

SEQ ID NO: 1331236 - DNA, 15 bp, Homo sapiens
aggtgtgccacagaa

SEQ ID NO: 1331237 - DNA, 15 bp, Homo sapiens
gaggtgtgccacaga

SEQ ID NO: 1331238 - DNA, 15 bp, Homo sapiens
cgaggtgtgccacag

SEQ ID NO: 1331239 - DNA, 15 bp, Homo sapiens
tcgaggtgtgccaca

SEQ ID NO: 1331240 - DNA, 15 bp, Homo sapiens
ctcgaggtgtgccac

SEQ ID NO: 1331241 - DNA, 15 bp, Homo sapiens
gctcgaggtgtgcca

SEQ ID NO: 1331242 - DNA, 15 bp, Homo sapiens
ggctcgaggtgtgcc

SEQ ID NO: 1331243 - DNA, 15 bp, Homo sapiens
tggctcgaggtgtgc

SEQ ID NO: 1331244 - DNA, 15 bp, Homo sapiens
ctggctcgaggtgtg

SEQ ID NO: 1331245 - DNA, 15 bp, Homo sapiens
tctggctcgaggtgt

SEQ ID NO: 1331246 - DNA, 15 bp, Homo sapiens
ctctggctcgaggtg

SEQ ID NO: 1331247 - DNA, 15 bp, Homo sapiens
tctctggctcgaggt

SEQ ID NO: 1331248 - DNA, 15 bp, Homo sapiens
ttctctggctcgagg

SEQ ID NO: 1331249 - DNA, 15 bp, Homo sapiens
gttctctggctcgag

SEQ ID NO: 1331250 - DNA, 15 bp, Homo sapiens
agttctctggctcga

SEQ ID NO: 1331251 - DNA, 15 bp, Homo sapiens
tagttctctggctcg

SEQ ID NO: 1331252 - DNA, 15 bp, Homo sapiens
gtagttctctggctc

SEQ ID NO: 1331253 - DNA, 15 bp, Homo sapiens
ggtagttctctggct

SEQ ID NO: 1331254 - DNA, 15 bp, Homo sapiens
cggtagttctctggc

SEQ ID NO: 1331255 - DNA, 15 bp, Homo sapiens
ccggtagttctctgg

SEQ ID NO: 1331256 - DNA, 15 bp, Homo sapiens
accggtagttctctg

SEQ ID NO: 1331257 - DNA, 15 bp, Homo sapiens
caccggtagttctct

SEQ ID NO: 1331258 - DNA, 15 bp, Homo sapiens
acaccggtagttctc

SEQ ID NO: 1331259 - DNA, 15 bp, Homo sapiens
tacaccggtagttct

SEQ ID NO: 1331260 - DNA, 15 bp, Homo sapiens
ctacaccggtagttc

SEQ ID NO: 1331261 - DNA, 15 bp, Homo sapiens
cctacaccggtagtt

SEQ ID NO: 1331262 - DNA, 15 bp, Homo sapiens
tcctacaccggtagt

SEQ ID NO: 1331263 - DNA, 15 bp, Homo sapiens
ttcctacaccggtag

SEQ ID NO: 1331264 - DNA, 15 bp, Homo sapiens
cttcctacaccggta

SEQ ID NO: 1331265 - DNA, 15 bp, Homo sapiens
acttcctacaccggt

SEQ ID NO: 1331266 - DNA, 15 bp, Homo sapiens
cacttcctacaccgg

SEQ ID NO: 1331267 - DNA, 15 bp, Homo sapiens
tcacttcctacaccg

SEQ ID NO: 1331268 - DNA, 15 bp, Homo sapiens
ctcacttcctacacc

SEQ ID NO: 1331269 - DNA, 15 bp, Homo sapiens
gctcacttcctacac

SEQ ID NO: 1331270 - DNA, 15 bp, Homo sapiens
cgctcacttcctaca

SEQ ID NO: 1331271 - DNA, 15 bp, Homo sapiens
acgctcacttcctac

SEQ ID NO: 1331272 - DNA, 15 bp, Homo sapiens
gacgctcacttccta

SEQ ID NO: 1331273 - DNA, 15 bp, Homo sapiens
ggacgctcacttcct

SEQ ID NO: 1331274 - DNA, 15 bp, Homo sapiens
aggacgctcacttcc

SEQ ID NO: 1331275 - DNA, 15 bp, Homo sapiens
caggacgctcacttc

SEQ ID NO: 1331276 - DNA, 15 bp, Homo sapiens
acaggacgctcactt

SEQ ID NO: 1331277 - DNA, 15 bp, Homo sapiens
gacaggacgctcact

SEQ ID NO: 1331278 - DNA, 15 bp, Homo sapiens
cgacaggacgctcac

SEQ ID NO: 1331279 - DNA, 15 bp, Homo sapiens
gcgacaggacgctca

SEQ ID NO: 1331280 - DNA, 15 bp, Homo sapiens
cgcgacaggacgctc

SEQ ID NO: 1331281 - DNA, 15 bp, Homo sapiens
tcgcgacaggacgct

SEQ ID NO: 1331282 - DNA, 15 bp, Homo sapiens
ctcgcgacaggacgc

SEQ ID NO: 1331283 - DNA, 15 bp, Homo sapiens
cctcgcgacaggacg

SEQ ID NO: 1331284 - DNA, 15 bp, Homo sapiens
tcctcgcgacaggac

SEQ ID NO: 1331285 - DNA, 15 bp, Homo sapiens
atcctcgcgacagga

SEQ ID NO: 1331286 - DNA, 15 bp, Homo sapiens
aatcctcgcgacagg

SEQ ID NO: 1331287 - DNA, 15 bp, Homo sapiens
aaatcctcgcgacag

SEQ ID NO: 1331288 - DNA, 15 bp, Homo sapiens
aaaatcctcgcgaca

SEQ ID NO: 1331289 - DNA, 15 bp, Homo sapiens
gaaaatcctcgcgac

SEQ ID NO: 1331290 - DNA, 15 bp, Homo sapiens
tgaaaatcctcgcga

SEQ ID NO: 1331291 - DNA, 15 bp, Homo sapiens
ctgaaaatcctcgcg

SEQ ID NO: 1331292 - DNA, 15 bp, Homo sapiens
tctgaaaatcctcgc

SEQ ID NO: 1331293 - DNA, 15 bp, Homo sapiens
ctctgaaaatcctcg

SEQ ID NO: 1331294 - DNA, 15 bp, Homo sapiens
gctctgaaaatcctc

SEQ ID NO: 1331295 - DNA, 15 bp, Homo sapiens
tgctctgaaaatcct

SEQ ID NO: 1331296 - DNA, 15 bp, Homo sapiens
ctgctctgaaaatcc

SEQ ID NO: 1331297 - DNA, 15 bp, Homo sapiens
cctgctctgaaaatc

SEQ ID NO: 1331298 - DNA, 15 bp, Homo sapiens
acctgctctgaaaat

SEQ ID NO: 1331299 - DNA, 15 bp, Homo sapiens
cacctgctctgaaaa

SEQ ID NO: 1331300 - DNA, 15 bp, Homo sapiens
tcacctgctctgaaa

SEQ ID NO: 1331301 - DNA, 15 bp, Homo sapiens
ctcacctgctctgaa

SEQ ID NO: 1331302 - DNA, 15 bp, Homo sapiens
actcacctgctctga

SEQ ID NO: 1331303 - DNA, 15 bp, Homo sapiens
cactcacctgctctg

SEQ ID NO: 1331304 - DNA, 15 bp, Homo sapiens
tcactcacctgctct

SEQ ID NO: 1331305 - DNA, 15 bp, Homo sapiens
gtcactcacctgctc

SEQ ID NO: 1331306 - DNA, 15 bp, Homo sapiens
ggtcactcacctgct

SEQ ID NO: 1331307 - DNA, 15 bp, Homo sapiens
tggtcactcacctgc

SEQ ID NO: 1331308 - DNA, 15 bp, Homo sapiens
atggtcactcacctg

SEQ ID NO: 1331309 - DNA, 15 bp, Homo sapiens
aatggtcactcacct

SEQ ID NO: 1331310 - DNA, 15 bp, Homo sapiens
gaatggtcactcacc

SEQ ID NO: 1331311 - DNA, 15 bp, Homo sapiens
cgaatggtcactcac

SEQ ID NO: 1331312 - DNA, 15 bp, Homo sapiens
ccgaatggtcactca

SEQ ID NO: 1331313 - DNA, 15 bp, Homo sapiens
gccgaatggtcactc

SEQ ID NO: 1331314 - DNA, 15 bp, Homo sapiens
tgccgaatggtcact

SEQ ID NO: 1331315 - DNA, 15 bp, Homo sapiens
ctgccgaatggtcac

SEQ ID NO: 1331316 - DNA, 15 bp, Homo sapiens
cctgccgaatggtca

SEQ ID NO: 1331317 - DNA, 15 bp, Homo sapiens
ccctgccgaatggtc

SEQ ID NO: 1331318 - DNA, 15 bp, Homo sapiens
gccctgccgaatggt

SEQ ID NO: 1331319 - DNA, 15 bp, Homo sapiens
ggccctgccgaatgg

SEQ ID NO: 1331320 - DNA, 15 bp, Homo sapiens
tggccctgccgaatg

SEQ ID NO: 1331321 - DNA, 15 bp, Homo sapiens
ctggccctgccgaat

SEQ ID NO: 1331322 - DNA, 15 bp, Homo sapiens
actggccctgccgaa

SEQ ID NO: 1331323 - DNA, 15 bp, Homo sapiens
gactggccctgccga

SEQ ID NO: 1331324 - DNA, 15 bp, Homo sapiens
ggactggccctgccg

SEQ ID NO: 1331325 - DNA, 15 bp, Homo sapiens
aggactggccctgcc

SEQ ID NO: 1331326 - DNA, 15 bp, Homo sapiens
caggactggccctgc

SEQ ID NO: 1331327 - DNA, 15 bp, Homo sapiens
tcaggactggccctg

SEQ ID NO: 1331328 - DNA, 15 bp, Homo sapiens
ctcaggactggccct

SEQ ID NO: 1331329 - DNA, 15 bp, Homo sapiens
gctcaggactggccc

SEQ ID NO: 1331330 - DNA, 15 bp, Homo sapiens
agctcaggactggcc

SEQ ID NO: 1331331 - DNA, 15 bp, Homo sapiens
cagctcaggactggc

SEQ ID NO: 1331332 - DNA, 15 bp, Homo sapiens
ccagctcaggactgg

SEQ ID NO: 1331333 - DNA, 15 bp, Homo sapiens
cccagctcaggactg

SEQ ID NO: 1331334 - DNA, 15 bp, Homo sapiens
acccagctcaggact

SEQ ID NO: 1331335 - DNA, 15 bp, Homo sapiens
cacccagctcaggac

SEQ ID NO: 1331336 - DNA, 15 bp, Homo sapiens
acacccagctcagga

SEQ ID NO: 1331337 - DNA, 15 bp, Homo sapiens
cacacccagctcagg

SEQ ID NO: 1331338 - DNA, 15 bp, Homo sapiens
tcacacccagctcag

SEQ ID NO: 1331339 - DNA, 15 bp, Homo sapiens
ttcacacccagctca

SEQ ID NO: 1331340 - DNA, 15 bp, Homo sapiens
cttcacacccagctc

SEQ ID NO: 1331341 - DNA, 15 bp, Homo sapiens
acttcacacccagct

SEQ ID NO: 1331342 - DNA, 15 bp, Homo sapiens
aacttcacacccagc

SEQ ID NO: 1331343 - DNA, 15 bp, Homo sapiens
taacttcacacccag

SEQ ID NO: 1331344 - DNA, 15 bp, Homo sapiens
ctaacttcacaccca

SEQ ID NO: 1331345 - DNA, 15 bp, Homo sapiens
cctaacttcacaccc

SEQ ID NO: 1331346 - DNA, 15 bp, Homo sapiens
gcctaacttcacacc

SEQ ID NO: 1331347 - DNA, 15 bp, Homo sapiens
agcctaacttcacac

SEQ ID NO: 1331348 - DNA, 15 bp, Homo sapiens
cagcctaacttcaca

SEQ ID NO: 1331349 - DNA, 15 bp, Homo sapiens
ccagcctaacttcac

SEQ ID NO: 1331350 - DNA, 15 bp, Homo sapiens
accagcctaacttca

SEQ ID NO: 1331351 - DNA, 15 bp, Homo sapiens
caccagcctaacttc

SEQ ID NO: 1331352 - DNA, 15 bp, Homo sapiens
acaccagcctaactt

SEQ ID NO: 1331353 - DNA, 15 bp, Homo sapiens
gacaccagcctaact

SEQ ID NO: 1331354 - DNA, 15 bp, Homo sapiens
agacaccagcctaac

SEQ ID NO: 1331355 - DNA, 15 bp, Homo sapiens
cagacaccagcctaa

SEQ ID NO: 1331356 - DNA, 15 bp, Homo sapiens
tcagacaccagccta

SEQ ID NO: 1331357 - DNA, 15 bp, Homo sapiens
ttcagacaccagcct

SEQ ID NO: 1331358 - DNA, 15 bp, Homo sapiens
cttcagacaccagcc

SEQ ID NO: 1331359 - DNA, 15 bp, Homo sapiens
acttcagacaccagc

SEQ ID NO: 1331360 - DNA, 15 bp, Homo sapiens
aacttcagacaccag

SEQ ID NO: 1331361 - DNA, 15 bp, Homo sapiens
aaacttcagacacca

SEQ ID NO: 1331362 - DNA, 15 bp, Homo sapiens
gaaacttcagacacc

SEQ ID NO: 1331363 - DNA, 15 bp, Homo sapiens
agaaacttcagacac

SEQ ID NO: 1331364 - DNA, 15 bp, Homo sapiens
aagaaacttcagaca

SEQ ID NO: 1331365 - DNA, 15 bp, Homo sapiens
gaagaaacttcagac

SEQ ID NO: 1331366 - DNA, 15 bp, Homo sapiens
ggaagaaacttcaga

SEQ ID NO: 1331367 - DNA, 15 bp, Homo sapiens
tggaagaaacttcag

SEQ ID NO: 1331368 - DNA, 15 bp, Homo sapiens
ctggaagaaacttca

SEQ ID NO: 1331369 - DNA, 15 bp, Homo sapiens
actggaagaaacttc

SEQ ID NO: 1331370 - DNA, 15 bp, Homo sapiens
cactggaagaaactt

SEQ ID NO: 1331371 - DNA, 15 bp, Homo sapiens
acactggaagaaact

SEQ ID NO: 1331372 - DNA, 15 bp, Homo sapiens
aacactggaagaaac

SEQ ID NO: 1331373 - DNA, 15 bp, Homo sapiens
caacactggaagaaa

SEQ ID NO: 1331374 - DNA, 15 bp, Homo sapiens
acaacactggaagaa

SEQ ID NO: 1331375 - DNA, 15 bp, Homo sapiens
cacaacactggaaga

SEQ ID NO: 1331376 - DNA, 15 bp, Homo sapiens
tcacaacactggaag

SEQ ID NO: 1331377 - DNA, 15 bp, Homo sapiens
ctcacaacactggaa

SEQ ID NO: 1331378 - DNA, 15 bp, Homo sapiens
actcacaacactgga

SEQ ID NO: 1331379 - DNA, 15 bp, Homo sapiens
gactcacaacactgg

SEQ ID NO: 1331380 - DNA, 15 bp, Homo sapiens
ggactcacaacactg

SEQ ID NO: 1331381 - DNA, 15 bp, Homo sapiens
tggactcacaacact

SEQ ID NO: 1331382 - DNA, 15 bp, Homo sapiens
ttggactcacaacac

SEQ ID NO: 1331383 - DNA, 15 bp, Homo sapiens
cttggactcacaaca

SEQ ID NO: 1331384 - DNA, 15 bp, Homo sapiens
tcttggactcacaac

SEQ ID NO: 1331385 - DNA, 15 bp, Homo sapiens
atcttggactcacaa

SEQ ID NO: 1331386 - DNA, 15 bp, Homo sapiens
catcttggactcaca

SEQ ID NO: 1331387 - DNA, 15 bp, Homo sapiens
gcatcttggactcac

SEQ ID NO: 1331388 - DNA, 15 bp, Homo sapiens
tgcatcttggactca

SEQ ID NO: 1331389 - DNA, 15 bp, Homo sapiens
ctgcatcttggactc

SEQ ID NO: 1331390 - DNA, 15 bp, Homo sapiens
tctgcatcttggact

SEQ ID NO: 1331391 - DNA, 15 bp, Homo sapiens
atctgcatcttggac

SEQ ID NO: 1331392 - DNA, 15 bp, Homo sapiens
gatctgcatcttgga

SEQ ID NO: 1331393 - DNA, 15 bp, Homo sapiens
agatctgcatcttgg

SEQ ID NO: 1331394 - DNA, 15 bp, Homo sapiens
aagatctgcatcttg

SEQ ID NO: 1331395 - DNA, 15 bp, Homo sapiens
caagatctgcatctt

SEQ ID NO: 1331396 - DNA, 15 bp, Homo sapiens
ccaagatctgcatct

SEQ ID NO: 1331397 - DNA, 15 bp, Homo sapiens
cccaagatctgcatc

SEQ ID NO: 1331398 - DNA, 15 bp, Homo sapiens
acccaagatctgcat

SEQ ID NO: 1331399 - DNA, 15 bp, Homo sapiens
aacccaagatctgca

SEQ ID NO: 1331400 - DNA, 15 bp, Homo sapiens
aaacccaagatctgc

SEQ ID NO: 1331401 - DNA, 15 bp, Homo sapiens
caaacccaagatctg

SEQ ID NO: 1331402 - DNA, 15 bp, Homo sapiens
tcaaacccaagatct

SEQ ID NO: 1331403 - DNA, 15 bp, Homo sapiens
ttcaaacccaagatc

SEQ ID NO: 1331404 - DNA, 15 bp, Homo sapiens
attcaaacccaagat

SEQ ID NO: 1331405 - DNA, 15 bp, Homo sapiens
gattcaaacccaaga

SEQ ID NO: 1331406 - DNA, 15 bp, Homo sapiens
aggattcaaacccaa

SEQ ID NO: 1331407 - DNA, 15 bp, Homo sapiens
caggattcaaaccca

SEQ ID NO: 1331408 - DNA, 15 bp, Homo sapiens
acaggattcaaaccc

SEQ ID NO: 1331409 - DNA, 15 bp, Homo sapiens
agacaggattcaaac

SEQ ID NO: 1331410 - DNA, 15 bp, Homo sapiens
gagacaggattcaaa

SEQ ID NO: 1331411 - DNA, 15 bp, Homo sapiens
agagacaggattcaa

SEQ ID NO: 1331412 - DNA, 15 bp, Homo sapiens
tagagacaggattca

SEQ ID NO: 1331413 - DNA, 15 bp, Homo sapiens
gtagagacaggattc

SEQ ID NO: 1331414 - DNA, 15 bp, Homo sapiens
gagtagagacaggat

SEQ ID NO: 1331415 - DNA, 15 bp, Homo sapiens
agagtagagacagga

SEQ ID NO: 1331416 - DNA, 15 bp, Homo sapiens
cagagtagagacagg

SEQ ID NO: 1331417 - DNA, 15 bp, Homo sapiens
gcagagtagagacag

SEQ ID NO: 1331418 - DNA, 15 bp, Homo sapiens
ggcagagtagagaca

SEQ ID NO: 1331419 - DNA, 15 bp, Homo sapiens
gggcagagtagagac

SEQ ID NO: 1331420 - DNA, 15 bp, Homo sapiens
cgggcagagtagaga

SEQ ID NO: 1331421 - DNA, 15 bp, Homo sapiens
tcgggcagagtagag

SEQ ID NO: 1331422 - DNA, 15 bp, Homo sapiens
atcgggcagagtaga

SEQ ID NO: 1331423 - DNA, 15 bp, Homo sapiens
aatcgggcagagtag

SEQ ID NO: 1331424 - DNA, 15 bp, Homo sapiens
aaatcgggcagagta

SEQ ID NO: 1331425 - DNA, 15 bp, Homo sapiens
gaaatcgggcagagt

SEQ ID NO: 1331426 - DNA, 15 bp, Homo sapiens
tgaaatcgggcagag

SEQ ID NO: 1331427 - DNA, 15 bp, Homo sapiens
atgaaatcgggcaga

SEQ ID NO: 1331428 - DNA, 15 bp, Homo sapiens
gatgaaatcgggcag

SEQ ID NO: 1331429 - DNA, 15 bp, Homo sapiens
agatgaaatcgggca

SEQ ID NO: 1331430 - DNA, 15 bp, Homo sapiens
gagatgaaatcgggc

SEQ ID NO: 1331431 - DNA, 15 bp, Homo sapiens
agagatgaaatcggg

SEQ ID NO: 1331432 - DNA, 15 bp, Homo sapiens
aagagatgaaatcgg

SEQ ID NO: 1331433 - DNA, 15 bp, Homo sapiens
aaagagatgaaatcg

SEQ ID NO: 1331434 - DNA, 15 bp, Homo sapiens
caaagagatgaaatc

SEQ ID NO: 1331435 - DNA, 15 bp, Homo sapiens
tcaaagagatgaaat

SEQ ID NO: 1331436 - DNA, 15 bp, Homo sapiens
atcaaagagatgaaa

SEQ ID NO: 1331437 - DNA, 15 bp, Homo sapiens
aatcaaagagatgaa

SEQ ID NO: 1331438 - DNA, 15 bp, Homo sapiens
gaatcaaagagatga

SEQ ID NO: 1331439 - DNA, 15 bp, Homo sapiens
agaatcaaagagatg

SEQ ID NO: 1331440 - DNA, 15 bp, Homo sapiens
aagaatcaaagagat

SEQ ID NO: 1331441 - DNA, 15 bp, Homo sapiens
taagaatcaaagaga

SEQ ID NO: 1331442 - DNA, 15 bp, Homo sapiens
ctaagaatcaaagag

SEQ ID NO: 1331443 - DNA, 15 bp, Homo sapiens
actaagaatcaaaga

SEQ ID NO: 1331444 - DNA, 15 bp, Homo sapiens
aactaagaatcaaag

SEQ ID NO: 1331445 - DNA, 15 bp, Homo sapiens
aaactaagaatcaaa

SEQ ID NO: 1331446 - DNA, 15 bp, Homo sapiens
aaaactaagaatcaa

SEQ ID NO: 1331447 - DNA, 15 bp, Homo sapiens
aaaaactaagaatca

SEQ ID NO: 1331448 - DNA, 15 bp, Homo sapiens
aaaaaactaagaatc

SEQ ID NO: 1331449 - DNA, 15 bp, Homo sapiens
gaaaaaactaagaat

SEQ ID NO: 1331450 - DNA, 15 bp, Homo sapiens
tgaaaaaactaagaa

SEQ ID NO: 1331451 - DNA, 15 bp, Homo sapiens
atgaaaaaactaaga

SEQ ID NO: 1331452 - DNA, 15 bp, Homo sapiens
gatgaaaaaactaag

SEQ ID NO: 1331453 - DNA, 15 bp, Homo sapiens
agatgaaaaaactaa

SEQ ID NO: 1331454 - DNA, 15 bp, Homo sapiens
tagatgaaaaaacta

SEQ ID NO: 1331455 - DNA, 15 bp, Homo sapiens
atagatgaaaaaact

SEQ ID NO: 1331456 - DNA, 15 bp, Homo sapiens
tatagatgaaaaaac

SEQ ID NO: 1331457 - DNA, 15 bp, Homo sapiens
ttatagatgaaaaaa

SEQ ID NO: 1331458 - DNA, 15 bp, Homo sapiens
tttatagatgaaaaa

SEQ ID NO: 1331459 - DNA, 15 bp, Homo sapiens
ttttatagatgaaaa

SEQ ID NO: 1331460 - DNA, 15 bp, Homo sapiens
cttttatagatgaaa

SEQ ID NO: 1331461 - DNA, 15 bp, Homo sapiens
tcttttatagatgaa

SEQ ID NO: 1331462 - DNA, 15 bp, Homo sapiens
ttcttttatagatga

SEQ ID NO: 1331463 - DNA, 15 bp, Homo sapiens
cttcttttatagatg

SEQ ID NO: 1331464 - DNA, 15 bp, Homo sapiens
ccttcttttatagat

SEQ ID NO: 1331465 - DNA, 15 bp, Homo sapiens
tccttcttttataga

SEQ ID NO: 1331466 - DNA, 15 bp, Homo sapiens
gtccttcttttatag

SEQ ID NO: 1331467 - DNA, 15 bp, Homo sapiens
agtccttcttttata

SEQ ID NO: 1331468 - DNA, 15 bp, Homo sapiens
gagtccttcttttat

SEQ ID NO: 1331469 - DNA, 15 bp, Homo sapiens
agagtccttctttta

SEQ ID NO: 1331470 - DNA, 15 bp, Homo sapiens
aagagtccttctttt

SEQ ID NO: 1331471 - DNA, 15 bp, Homo sapiens
aaagagtccttcttt

SEQ ID NO: 1331472 - DNA, 15 bp, Homo sapiens
gaaagagtccttctt

SEQ ID NO: 1331473 - DNA, 15 bp, Homo sapiens
agaaagagtccttct

SEQ ID NO: 1331474 - DNA, 15 bp, Homo sapiens
cagaaagagtccttc

SEQ ID NO: 1331475 - DNA, 15 bp, Homo sapiens
ccagaaagagtcctt

SEQ ID NO: 1331476 - DNA, 15 bp, Homo sapiens
tccagaaagagtcct

SEQ ID NO: 1331477 - DNA, 15 bp, Homo sapiens
atccagaaagagtcc

SEQ ID NO: 1331478 - DNA, 15 bp, Homo sapiens
tatccagaaagagtc

SEQ ID NO: 1331479 - DNA, 15 bp, Homo sapiens
ctatccagaaagagt

SEQ ID NO: 1331480 - DNA, 15 bp, Homo sapiens
actatccagaaagag

SEQ ID NO: 1331481 - DNA, 15 bp, Homo sapiens
aactatccagaaaga

SEQ ID NO: 1331482 - DNA, 15 bp, Homo sapiens
caactatccagaaag

SEQ ID NO: 1331483 - DNA, 15 bp, Homo sapiens
ccaactatccagaaa

SEQ ID NO: 1331484 - DNA, 15 bp, Homo sapiens
cccaactatccagaa

SEQ ID NO: 1331485 - DNA, 15 bp, Homo sapiens
tcccaactatccaga

SEQ ID NO: 1331486 - DNA, 15 bp, Homo sapiens
ctcccaactatccag

SEQ ID NO: 1331487 - DNA, 15 bp, Homo sapiens
cctcccaactatcca

SEQ ID NO: 1331488 - DNA, 15 bp, Homo sapiens
ccctcccaactatcc

SEQ ID NO: 1331489 - DNA, 15 bp, Homo sapiens
gccctcccaactatc

SEQ ID NO: 1331490 - DNA, 15 bp, Homo sapiens
agccctcccaactat

SEQ ID NO: 1331491 - DNA, 15 bp, Homo sapiens
cagccctcccaacta

SEQ ID NO: 1331492 - DNA, 15 bp, Homo sapiens
tcagccctcccaact

SEQ ID NO: 1331493 - DNA, 15 bp, Homo sapiens
ttcagccctcccaac

SEQ ID NO: 1331494 - DNA, 15 bp, Homo sapiens
cttcagccctcccaa

SEQ ID NO: 1331495 - DNA, 15 bp, Homo sapiens
ccttcagccctccca

SEQ ID NO: 1331496 - DNA, 15 bp, Homo sapiens
tccttcagccctccc

SEQ ID NO: 1331497 - DNA, 15 bp, Homo sapiens
ttccttcagccctcc

SEQ ID NO: 1331498 - DNA, 15 bp, Homo sapiens
attccttcagccctc

SEQ ID NO: 1331499 - DNA, 15 bp, Homo sapiens
cattccttcagccct

SEQ ID NO: 1331500 - DNA, 15 bp, Homo sapiens
acattccttcagccc

SEQ ID NO: 1331501 - DNA, 15 bp, Homo sapiens
aacattccttcagcc

SEQ ID NO: 1331502 - DNA, 15 bp, Homo sapiens
aaacattccttcagc

SEQ ID NO: 1331503 - DNA, 15 bp, Homo sapiens
caaacattccttcag

SEQ ID NO: 1331504 - DNA, 15 bp, Homo sapiens
tcaaacattccttca

SEQ ID NO: 1331505 - DNA, 15 bp, Homo sapiens
gtcaaacattccttc

SEQ ID NO: 1331506 - DNA, 15 bp, Homo sapiens
tgtcaaacattcctt

SEQ ID NO: 1331507 - DNA, 15 bp, Homo sapiens
gtgtcaaacattcct

SEQ ID NO: 1331508 - DNA, 15 bp, Homo sapiens
tgtgtcaaacattcc

SEQ ID NO: 1331509 - DNA, 15 bp, Homo sapiens
atgtgtcaaacattc

SEQ ID NO: 1331510 - DNA, 15 bp, Homo sapiens
gatgtgtcaaacatt

SEQ ID NO: 1331511 - DNA, 15 bp, Homo sapiens
tgatgtgtcaaacat

SEQ ID NO: 1331512 - DNA, 15 bp, Homo sapiens
atgatgtgtcaaaca

SEQ ID NO: 1331513 - DNA, 15 bp, Homo sapiens
tatgatgtgtcaaac

SEQ ID NO: 1331514 - DNA, 15 bp, Homo sapiens
ctatgatgtgtcaaa

SEQ ID NO: 1331515 - DNA, 15 bp, Homo sapiens
cctatgatgtgtcaa

SEQ ID NO: 1331516 - DNA, 15 bp, Homo sapiens
acctatgatgtgtca

SEQ ID NO: 1331517 - DNA, 15 bp, Homo sapiens
cacctatgatgtgtc

SEQ ID NO: 1331518 - DNA, 15 bp, Homo sapiens
acacctatgatgtgt

SEQ ID NO: 1331519 - DNA, 15 bp, Homo sapiens
aacacctatgatgtg

SEQ ID NO: 1331520 - DNA, 15 bp, Homo sapiens
aaacacctatgatgt

SEQ ID NO: 1331521 - DNA, 15 bp, Homo sapiens
taaacacctatgatg

SEQ ID NO: 1331522 - DNA, 15 bp, Homo sapiens
ttaaacacctatgat

SEQ ID NO: 1331523 - DNA, 15 bp, Homo sapiens
tttaaacacctatga

SEQ ID NO: 1331524 - DNA, 15 bp, Homo sapiens
ttttaaacacctatg

SEQ ID NO: 1331525 - DNA, 15 bp, Homo sapiens
attttaaacacctat

SEQ ID NO: 1331526 - DNA, 15 bp, Homo sapiens
cattttaaacaccta

SEQ ID NO: 1331527 - DNA, 15 bp, Homo sapiens
ccattttaaacacct

SEQ ID NO: 1331528 - DNA, 15 bp, Homo sapiens
gccattttaaacacc

SEQ ID NO: 1331529 - DNA, 15 bp, Homo sapiens
tgccattttaaacac

SEQ ID NO: 1331530 - DNA, 15 bp, Homo sapiens
ttgccattttaaaca

SEQ ID NO: 1331531 - DNA, 15 bp, Homo sapiens
gttgccattttaaac

SEQ ID NO: 1331532 - DNA, 15 bp, Homo sapiens
agttgccattttaaa

SEQ ID NO: 1331533 - DNA, 15 bp, Homo sapiens
tagttgccattttaa

SEQ ID NO: 1331534 - DNA, 15 bp, Homo sapiens
atagttgccatttta

SEQ ID NO: 1331535 - DNA, 15 bp, Homo sapiens
tatagttgccatttt

SEQ ID NO: 1331536 - DNA, 15 bp, Homo sapiens
ctatagttgccattt

SEQ ID NO: 1331537 - DNA, 15 bp, Homo sapiens
actatagttgccatt

SEQ ID NO: 1331538 - DNA, 15 bp, Homo sapiens
aactatagttgccat

SEQ ID NO: 1331539 - DNA, 15 bp, Homo sapiens
aaactatagttgcca

SEQ ID NO: 1331540 - DNA, 15 bp, Homo sapiens
aaaactatagttgcc

SEQ ID NO: 1331541 - DNA, 15 bp, Homo sapiens
aaaaactatagttgc

SEQ ID NO: 1331542 - DNA, 15 bp, Homo sapiens
aaaaaactatagttg

SEQ ID NO: 1331543 - DNA, 15 bp, Homo sapiens
aaaaaaactatagtt

SEQ ID NO: 1331544 - DNA, 15 bp, Homo sapiens
aaaaaaaactatagt

SEQ ID NO: 1331545 - DNA, 15 bp, Homo sapiens
caaaaaaaactatag

SEQ ID NO: 1331546 - DNA, 15 bp, Homo sapiens
acaaaaaaaactata

SEQ ID NO: 1331547 - DNA, 15 bp, Homo sapiens
aacaaaaaaaactat

SEQ ID NO: 1331548 - DNA, 15 bp, Homo sapiens
aaacaaaaaaaacta

SEQ ID NO: 1331549 - DNA, 15 bp, Homo sapiens
caaaacaaacaaaaa

SEQ ID NO: 1331550 - DNA, 15 bp, Homo sapiens
acaaaacaaacaaaa

SEQ ID NO: 1331551 - DNA, 15 bp, Homo sapiens
cacaaaacaaacaaa

SEQ ID NO: 1331552 - DNA, 15 bp, Homo sapiens
acacaaaacaaacaa

SEQ ID NO: 1331553 - DNA, 15 bp, Homo sapiens
cacacaaaacaaaca

SEQ ID NO: 1331554 - DNA, 15 bp, Homo sapiens
acacacaaaacaaac

SEQ ID NO: 1331555 - DNA, 15 bp, Homo sapiens
cacacacaaaacaaa

SEQ ID NO: 1331556 - DNA, 15 bp, Homo sapiens
acacacacaaaacaa

SEQ ID NO: 1331557 - DNA, 15 bp, Homo sapiens
cacacacacaaaaca

SEQ ID NO: 1331558 - DNA, 15 bp, Homo sapiens
acacacacacaaaac

SEQ ID NO: 1331559 - DNA, 15 bp, Homo sapiens
aacacacacacaaaa

SEQ ID NO: 1331560 - DNA, 15 bp, Homo sapiens
aaacacacacacaaa

SEQ ID NO: 1331561 - DNA, 15 bp, Homo sapiens
aaaacacacacacaa

SEQ ID NO: 1331562 - DNA, 15 bp, Homo sapiens
aaaaaaacacacaca

SEQ ID NO: 1331563 - DNA, 15 bp, Homo sapiens
gaaaaaaacacacac

SEQ ID NO: 1331564 - DNA, 15 bp, Homo sapiens
agaaaaaaacacaca

SEQ ID NO: 1331565 - DNA, 15 bp, Homo sapiens
aagaaaaaaacacac

SEQ ID NO: 1331566 - DNA, 15 bp, Homo sapiens
taagaaaaaaacaca

SEQ ID NO: 1331567 - DNA, 15 bp, Homo sapiens
ttaagaaaaaaacac

SEQ ID NO: 1331568 - DNA, 15 bp, Homo sapiens
gttaagaaaaaaaca

SEQ ID NO: 1331569 - DNA, 15 bp, Homo sapiens
agttaagaaaaaaac

SEQ ID NO: 1331570 - DNA, 15 bp, Homo sapiens
aagttaagaaaaaaa

SEQ ID NO: 1331571 - DNA, 15 bp, Homo sapiens
aaagttaagaaaaaa

SEQ ID NO: 1331572 - DNA, 15 bp, Homo sapiens
gaaagttaagaaaaa

SEQ ID NO: 1331573 - DNA, 15 bp, Homo sapiens
tgaaagttaagaaaa

SEQ ID NO: 1331574 - DNA, 15 bp, Homo sapiens
atgaaagttaagaaa

SEQ ID NO: 1331575 - DNA, 15 bp, Homo sapiens
aatgaaagttaagaa

SEQ ID NO: 1331576 - DNA, 15 bp, Homo sapiens
aaatgaaagttaaga

SEQ ID NO: 1331577 - DNA, 15 bp, Homo sapiens
aaaatgaaagttaag

SEQ ID NO: 1331578 - DNA, 15 bp, Homo sapiens
taaaatgaaagttaa

SEQ ID NO: 1331579 - DNA, 15 bp, Homo sapiens
ttaaaatgaaagtta

SEQ ID NO: 1331580 - DNA, 15 bp, Homo sapiens
cttaaaatgaaagtt

SEQ ID NO: 1331581 - DNA, 15 bp, Homo sapiens
acttaaaatgaaagt

SEQ ID NO: 1331582 - DNA, 15 bp, Homo sapiens
aacttaaaatgaaag

SEQ ID NO: 1331583 - DNA, 15 bp, Homo sapiens
caacttaaaatgaaa

SEQ ID NO: 1331584 - DNA, 15 bp, Homo sapiens
gcaacttaaaatgaa

SEQ ID NO: 1331585 - DNA, 15 bp, Homo sapiens
tgcaacttaaaatga

SEQ ID NO: 1331586 - DNA, 15 bp, Homo sapiens
ctgcaacttaaaatg

SEQ ID NO: 1331587 - DNA, 15 bp, Homo sapiens
cctgcaacttaaaat

SEQ ID NO: 1331588 - DNA, 15 bp, Homo sapiens
ccctgcaacttaaaa

SEQ ID NO: 1331589 - DNA, 15 bp, Homo sapiens
accctgcaacttaaa

SEQ ID NO: 1331590 - DNA, 15 bp, Homo sapiens
taccctgcaacttaa

SEQ ID NO: 1331591 - DNA, 15 bp, Homo sapiens
gtaccctgcaactta

SEQ ID NO: 1331592 - DNA, 15 bp, Homo sapiens
tgtaccctgcaactt

SEQ ID NO: 1331593 - DNA, 15 bp, Homo sapiens
gtgtaccctgcaact

SEQ ID NO: 1331594 - DNA, 15 bp, Homo sapiens
cgtgtaccctgcaac

SEQ ID NO: 1331595 - DNA, 15 bp, Homo sapiens
acgtgtaccctgcaa

SEQ ID NO: 1331596 - DNA, 15 bp, Homo sapiens
aacgtgtaccctgca

SEQ ID NO: 1331597 - DNA, 15 bp, Homo sapiens
gaacgtgtaccctgc

SEQ ID NO: 1331598 - DNA, 15 bp, Homo sapiens
tgaacgtgtaccctg

SEQ ID NO: 1331599 - DNA, 15 bp, Homo sapiens
ctgaacgtgtaccct

SEQ ID NO: 1331600 - DNA, 15 bp, Homo sapiens
cctgaacgtgtaccc

SEQ ID NO: 1331601 - DNA, 15 bp, Homo sapiens
acctgaacgtgtacc

SEQ ID NO: 1331602 - DNA, 15 bp, Homo sapiens
aacctgaacgtgtac

SEQ ID NO: 1331603 - DNA, 15 bp, Homo sapiens
aaacctgaacgtgta

SEQ ID NO: 1331604 - DNA, 15 bp, Homo sapiens
aggggattctgtgga

SEQ ID NO: 1331605 - DNA, 15 bp, Homo sapiens
aaggggattctgtgg

SEQ ID NO: 1331606 - DNA, 15 bp, Homo sapiens
aaaggggattctgtg

SEQ ID NO: 1331607 - DNA, 15 bp, Homo sapiens
caaaggggattctgt

SEQ ID NO: 1331608 - DNA, 15 bp, Homo sapiens
gcaaaggggattctg

SEQ ID NO: 1331609 - DNA, 15 bp, Homo sapiens
tgcaaaggggattct

SEQ ID NO: 1331610 - DNA, 15 bp, Homo sapiens
gtgcaaaggggattc

SEQ ID NO: 1331611 - DNA, 15 bp, Homo sapiens
tgtgcaaaggggatt

SEQ ID NO: 1331612 - DNA, 15 bp, Homo sapiens
gtgtgcaaaggggat

SEQ ID NO: 1331613 - DNA, 15 bp, Homo sapiens
ggtgtgcaaagggga

SEQ ID NO: 1331614 - DNA, 15 bp, Homo sapiens
tggtgtgcaaagggg

SEQ ID NO: 1331615 - DNA, 15 bp, Homo sapiens
atggtgtgcaaaggg

SEQ ID NO: 1331616 - DNA, 15 bp, Homo sapiens
catggtgtgcaaagg

SEQ ID NO: 1331617 - DNA, 15 bp, Homo sapiens
ccatggtgtgcaaag

SEQ ID NO: 1331618 - DNA, 15 bp, Homo sapiens
accatggtgtgcaaa

SEQ ID NO: 1331619 - DNA, 15 bp, Homo sapiens
caccatggtgtgcaa

SEQ ID NO: 1331620 - DNA, 15 bp, Homo sapiens
acaccatggtgtgca

SEQ ID NO: 1331621 - DNA, 15 bp, Homo sapiens
tacaccatggtgtgc

SEQ ID NO: 1331622 - DNA, 15 bp, Homo sapiens
ctacaccatggtgtg

SEQ ID NO: 1331623 - DNA, 15 bp, Homo sapiens
tctacaccatggtgt

SEQ ID NO: 1331624 - DNA, 15 bp, Homo sapiens
ctctacaccatggtg

SEQ ID NO: 1331625 - DNA, 15 bp, Homo sapiens
tctctacaccatggt

SEQ ID NO: 1331626 - DNA, 15 bp, Homo sapiens
ctctctacaccatgg

SEQ ID NO: 1331627 - DNA, 15 bp, Homo sapiens
cctctctacaccatg

SEQ ID NO: 1331628 - DNA, 15 bp, Homo sapiens
ccctctctacaccat

SEQ ID NO: 1331629 - DNA, 15 bp, Homo sapiens
gccctctctacacca

SEQ ID NO: 1331630 - DNA, 15 bp, Homo sapiens
agccctctctacacc

SEQ ID NO: 1331631 - DNA, 15 bp, Homo sapiens
gagccctctctacac

SEQ ID NO: 1331632 - DNA, 15 bp, Homo sapiens
agagccctctctaca

SEQ ID NO: 1331633 - DNA, 15 bp, Homo sapiens
aagagccctctctac

SEQ ID NO: 1331634 - DNA, 15 bp, Homo sapiens
taagagccctctcta

SEQ ID NO: 1331635 - DNA, 15 bp, Homo sapiens
ataagagccctctct

SEQ ID NO: 1331636 - DNA, 15 bp, Homo sapiens
tataagagccctctc

SEQ ID NO: 1331637 - DNA, 15 bp, Homo sapiens
ctataagagccctct

SEQ ID NO: 1331638 - DNA, 15 bp, Homo sapiens
tctataagagccctc

SEQ ID NO: 1331639 - DNA, 15 bp, Homo sapiens
ttctataagagccct

SEQ ID NO: 1331640 - DNA, 15 bp, Homo sapiens
cttctataagagccc

SEQ ID NO: 1331641 - DNA, 15 bp, Homo sapiens
ccttctataagagcc

SEQ ID NO: 1331642 - DNA, 15 bp, Homo sapiens
cccttctataagagc

SEQ ID NO: 1331643 - DNA, 15 bp, Homo sapiens
ccccttctataagag

SEQ ID NO: 1331644 - DNA, 15 bp, Homo sapiens
tccccttctataaga

SEQ ID NO: 1331645 - DNA, 15 bp, Homo sapiens
ttccccttctataag

SEQ ID NO: 1331646 - DNA, 15 bp, Homo sapiens
cttccccttctataa

SEQ ID NO: 1331647 - DNA, 15 bp, Homo sapiens
ccttccccttctata

SEQ ID NO: 1331648 - DNA, 15 bp, Homo sapiens
tccttccccttctat

SEQ ID NO: 1331649 - DNA, 15 bp, Homo sapiens
ttccttccccttcta

SEQ ID NO: 1331650 - DNA, 15 bp, Homo sapiens
tttccttccccttct

SEQ ID NO: 1331651 - DNA, 15 bp, Homo sapiens
ctttccttccccttc

SEQ ID NO: 1331652 - DNA, 15 bp, Homo sapiens
tctttccttcccctt

SEQ ID NO: 1331653 - DNA, 15 bp, Homo sapiens
ctctttccttcccct

SEQ ID NO: 1331654 - DNA, 15 bp, Homo sapiens
gctctttccttcccc

SEQ ID NO: 1331655 - DNA, 15 bp, Homo sapiens
tgctctttccttccc

SEQ ID NO: 1331656 - DNA, 15 bp, Homo sapiens
ctgctctttccttcc

SEQ ID NO: 1331657 - DNA, 15 bp, Homo sapiens
gctgctctttccttc

SEQ ID NO: 1331658 - DNA, 15 bp, Homo sapiens
agctgctctttcctt

SEQ ID NO: 1331659 - DNA, 15 bp, Homo sapiens
aagctgctctttcct

SEQ ID NO: 1331660 - DNA, 15 bp, Homo sapiens
caagctgctctttcc

SEQ ID NO: 1331661 - DNA, 15 bp, Homo sapiens
acaagctgctctttc

SEQ ID NO: 1331662 - DNA, 15 bp, Homo sapiens
cacaagctgctcttt

SEQ ID NO: 1331663 - DNA, 15 bp, Homo sapiens
tcacaagctgctctt

SEQ ID NO: 1331664 - DNA, 15 bp, Homo sapiens
ctcacaagctgctct

SEQ ID NO: 1331665 - DNA, 15 bp, Homo sapiens
actcacaagctgctc

SEQ ID NO: 1331666 - DNA, 15 bp, Homo sapiens
aactcacaagctgct

SEQ ID NO: 1331667 - DNA, 15 bp, Homo sapiens
gaactcacaagctgc

SEQ ID NO: 1331668 - DNA, 15 bp, Homo sapiens
agaactcacaagctg

SEQ ID NO: 1331669 - DNA, 15 bp, Homo sapiens
cagaactcacaagct

SEQ ID NO: 1331670 - DNA, 15 bp, Homo sapiens
tcagaactcacaagc

SEQ ID NO: 1331671 - DNA, 15 bp, Homo sapiens
atcagaactcacaag

SEQ ID NO: 1331672 - DNA, 15 bp, Homo sapiens
catcagaactcacaa

SEQ ID NO: 1331673 - DNA, 15 bp, Homo sapiens
gcatcagaactcaca

SEQ ID NO: 1331674 - DNA, 15 bp, Homo sapiens
agcatcagaactcac

SEQ ID NO: 1331675 - DNA, 15 bp, Homo sapiens
cagcatcagaactca

SEQ ID NO: 1331676 - DNA, 15 bp, Homo sapiens
gcagcatcagaactc

SEQ ID NO: 1331677 - DNA, 15 bp, Homo sapiens
ggcagcatcagaact

SEQ ID NO: 1331678 - DNA, 15 bp, Homo sapiens
gggcagcatcagaac

SEQ ID NO: 1331679 - DNA, 15 bp, Homo sapiens
cgggcagcatcagaa

SEQ ID NO: 1331680 - DNA, 15 bp, Homo sapiens
acgggcagcatcaga

SEQ ID NO: 1331681 - DNA, 15 bp, Homo sapiens
aacgggcagcatcag

SEQ ID NO: 1331682 - DNA, 15 bp, Homo sapiens
aaacgggcagcatca

SEQ ID NO: 1331683 - DNA, 15 bp, Homo sapiens
caaacgggcagcatc

SEQ ID NO: 1331684 - DNA, 15 bp, Homo sapiens
acaaacgggcagcat

SEQ ID NO: 1331685 - DNA, 15 bp, Homo sapiens
aacaaacgggcagca

SEQ ID NO: 1331686 - DNA, 15 bp, Homo sapiens
aaacaaacgggcagc

SEQ ID NO: 1331687 - DNA, 15 bp, Homo sapiens
caaacaaacgggcag

SEQ ID NO: 1331688 - DNA, 15 bp, Homo sapiens
acaaacaaacgggca

SEQ ID NO: 1331689 - DNA, 15 bp, Homo sapiens
tacaaacaaacgggc

SEQ ID NO: 1331690 - DNA, 15 bp, Homo sapiens
ctacaaacaaacggg

SEQ ID NO: 1331691 - DNA, 15 bp, Homo sapiens
tctacaaacaaacgg

SEQ ID NO: 1331692 - DNA, 15 bp, Homo sapiens
ttctacaaacaaacg

SEQ ID NO: 1331693 - DNA, 15 bp, Homo sapiens
attctacaaacaaac

SEQ ID NO: 1331694 - DNA, 15 bp, Homo sapiens
gattctacaaacaaa

SEQ ID NO: 1331695 - DNA, 15 bp, Homo sapiens
ggattctacaaacaa

SEQ ID NO: 1331696 - DNA, 15 bp, Homo sapiens
aggattctacaaaca

SEQ ID NO: 1331697 - DNA, 15 bp, Homo sapiens
taggattctacaaac

SEQ ID NO: 1331698 - DNA, 15 bp, Homo sapiens
ataggattctacaaa

SEQ ID NO: 1331699 - DNA, 15 bp, Homo sapiens
gataggattctacaa

SEQ ID NO: 1331700 - DNA, 15 bp, Homo sapiens
tgataggattctaca

SEQ ID NO: 1331701 - DNA, 15 bp, Homo sapiens
gtgataggattctac

SEQ ID NO: 1331702 - DNA, 15 bp, Homo sapiens
agtgataggattcta

SEQ ID NO: 1331703 - DNA, 15 bp, Homo sapiens
gagtgataggattct

SEQ ID NO: 1331704 - DNA, 15 bp, Homo sapiens
tgagtgataggattc

SEQ ID NO: 1331705 - DNA, 15 bp, Homo sapiens
gtgagtgataggatt

SEQ ID NO: 1331706 - DNA, 15 bp, Homo sapiens
tgtgagtgataggat

SEQ ID NO: 1331707 - DNA, 15 bp, Homo sapiens
ctgtgagtgatagga

SEQ ID NO: 1331708 - DNA, 15 bp, Homo sapiens
cctgtgagtgatagg

SEQ ID NO: 1331709 - DNA, 15 bp, Homo sapiens
gcctgtgagtgatag

SEQ ID NO: 1331710 - DNA, 15 bp, Homo sapiens
tgcctgtgagtgata

SEQ ID NO: 1331711 - DNA, 15 bp, Homo sapiens
atgcctgtgagtgat

SEQ ID NO: 1331712 - DNA, 15 bp, Homo sapiens
aatgcctgtgagtga

SEQ ID NO: 1331713 - DNA, 15 bp, Homo sapiens
aaatgcctgtgagtg

SEQ ID NO: 1331714 - DNA, 15 bp, Homo sapiens
gaaatgcctgtgagt

SEQ ID NO: 1331715 - DNA, 15 bp, Homo sapiens
agaaatgcctgtgag

SEQ ID NO: 1331716 - DNA, 15 bp, Homo sapiens
tagaaatgcctgtga

SEQ ID NO: 1331717 - DNA, 15 bp, Homo sapiens
atagaaatgcctgtg

SEQ ID NO: 1331718 - DNA, 15 bp, Homo sapiens
catagaaatgcctgt

SEQ ID NO: 1331719 - DNA, 15 bp, Homo sapiens
tcatagaaatgcctg

SEQ ID NO: 1331720 - DNA, 15 bp, Homo sapiens
atcatagaaatgcct

SEQ ID NO: 1331721 - DNA, 15 bp, Homo sapiens
aatcatagaaatgcc

SEQ ID NO: 1331722 - DNA, 15 bp, Homo sapiens
caatcatagaaatgc

SEQ ID NO: 1331723 - DNA, 15 bp, Homo sapiens
ccaatcatagaaatg

SEQ ID NO: 1331724 - DNA, 15 bp, Homo sapiens
tccaatcatagaaat

SEQ ID NO: 1331725 - DNA, 15 bp, Homo sapiens
ttccaatcatagaaa

SEQ ID NO: 1331726 - DNA, 15 bp, Homo sapiens
tttccaatcatagaa

SEQ ID NO: 1331727 - DNA, 15 bp, Homo sapiens
atttccaatcataga

SEQ ID NO: 1331728 - DNA, 15 bp, Homo sapiens
gatttccaatcatag

SEQ ID NO: 1331729 - DNA, 15 bp, Homo sapiens
tgatttccaatcata

SEQ ID NO: 1331730 - DNA, 15 bp, Homo sapiens
atgatttccaatcat

SEQ ID NO: 1331731 - DNA, 15 bp, Homo sapiens
aatgatttccaatca

SEQ ID NO: 1331732 - DNA, 15 bp, Homo sapiens
aaatgatttccaatc

SEQ ID NO: 1331733 - DNA, 15 bp, Homo sapiens
taaatgatttccaat

SEQ ID NO: 1331734 - DNA, 15 bp, Homo sapiens
gtaaatgatttccaa

SEQ ID NO: 1331735 - DNA, 15 bp, Homo sapiens
tgtaaatgatttcca

SEQ ID NO: 1331736 - DNA, 15 bp, Homo sapiens
ttgtaaatgatttcc

SEQ ID NO: 1331737 - DNA, 15 bp, Homo sapiens
tttgtaaatgatttc

SEQ ID NO: 1331738 - DNA, 15 bp, Homo sapiens
ttttgtaaatgattt

SEQ ID NO: 1331739 - DNA, 15 bp, Homo sapiens
attttgtaaatgatt

SEQ ID NO: 1331740 - DNA, 15 bp, Homo sapiens
aattttgtaaatgat

SEQ ID NO: 1331741 - DNA, 15 bp, Homo sapiens
taattttgtaaatga

SEQ ID NO: 1331742 - DNA, 15 bp, Homo sapiens
ctaattttgtaaatg

SEQ ID NO: 1331743 - DNA, 15 bp, Homo sapiens
actaattttgtaaat

SEQ ID NO: 1331744 - DNA, 15 bp, Homo sapiens
gactaattttgtaaa

SEQ ID NO: 1331745 - DNA, 15 bp, Homo sapiens
ggactaattttgtaa

SEQ ID NO: 1331746 - DNA, 15 bp, Homo sapiens
tggactaattttgta

SEQ ID NO: 1331747 - DNA, 15 bp, Homo sapiens
gtggactaattttgt

SEQ ID NO: 1331748 - DNA, 15 bp, Homo sapiens
tgtggactaattttg

SEQ ID NO: 1331749 - DNA, 15 bp, Homo sapiens
atgtggactaatttt

SEQ ID NO: 1331750 - DNA, 15 bp, Homo sapiens
tatgtggactaattt

SEQ ID NO: 1331751 - DNA, 15 bp, Homo sapiens
ctatgtggactaatt

SEQ ID NO: 1331752 - DNA, 15 bp, Homo sapiens
cctatgtggactaat

SEQ ID NO: 1331753 - DNA, 15 bp, Homo sapiens
tcctatgtggactaa

SEQ ID NO: 1331754 - DNA, 15 bp, Homo sapiens
atcctatgtggacta

SEQ ID NO: 1331755 - DNA, 15 bp, Homo sapiens
aatcctatgtggact

SEQ ID NO: 1331756 - DNA, 15 bp, Homo sapiens
gaatcctatgtggac

SEQ ID NO: 1331757 - DNA, 15 bp, Homo sapiens
agaatcctatgtgga

SEQ ID NO: 1331758 - DNA, 15 bp, Homo sapiens
aagaatcctatgtgg

SEQ ID NO: 1331759 - DNA, 15 bp, Homo sapiens
taagaatcctatgtg

SEQ ID NO: 1331760 - DNA, 15 bp, Homo sapiens
gtaagaatcctatgt

SEQ ID NO: 1331761 - DNA, 15 bp, Homo sapiens
agtaagaatcctatg

SEQ ID NO: 1331762 - DNA, 15 bp, Homo sapiens
tagtaagaatcctat

SEQ ID NO: 1331763 - DNA, 15 bp, Homo sapiens
ttagtaagaatccta

SEQ ID NO: 1331764 - DNA, 15 bp, Homo sapiens
tttagtaagaatcct

SEQ ID NO: 1331765 - DNA, 15 bp, Homo sapiens
ctttagtaagaatcc

SEQ ID NO: 1331766 - DNA, 15 bp, Homo sapiens
tctttagtaagaatc

SEQ ID NO: 1331767 - DNA, 15 bp, Homo sapiens
ctctttagtaagaat

SEQ ID NO: 1331768 - DNA, 15 bp, Homo sapiens
cctctttagtaagaa

SEQ ID NO: 1331769 - DNA, 15 bp, Homo sapiens
tcctctttagtaaga

SEQ ID NO: 1331770 - DNA, 15 bp, Homo sapiens
atcctctttagtaag

SEQ ID NO: 1331771 - DNA, 15 bp, Homo sapiens
aatcctctttagtaa

SEQ ID NO: 1331772 - DNA, 15 bp, Homo sapiens
gaatcctctttagta

SEQ ID NO: 1331773 - DNA, 15 bp, Homo sapiens
tgaatcctctttagt

SEQ ID NO: 1331774 - DNA, 15 bp, Homo sapiens
ttgaatcctctttag

SEQ ID NO: 1331775 - DNA, 15 bp, Homo sapiens
attgaatcctcttta

SEQ ID NO: 1331776 - DNA, 15 bp, Homo sapiens
aattgaatcctcttt

SEQ ID NO: 1331777 - DNA, 15 bp, Homo sapiens
aaattgaatcctctt

SEQ ID NO: 1331778 - DNA, 15 bp, Homo sapiens
caaattgaatcctct

SEQ ID NO: 1331779 - DNA, 15 bp, Homo sapiens
ccaaattgaatcctc

SEQ ID NO: 1331780 - DNA, 15 bp, Homo sapiens
cccaaattgaatcct

SEQ ID NO: 1331781 - DNA, 15 bp, Homo sapiens
tcccaaattgaatcc

SEQ ID NO: 1331782 - DNA, 15 bp, Homo sapiens
ttcccaaattgaatc

SEQ ID NO: 1331783 - DNA, 15 bp, Homo sapiens
attcccaaattgaat

SEQ ID NO: 1331784 - DNA, 15 bp, Homo sapiens
aattcccaaattgaa

SEQ ID NO: 1331785 - DNA, 15 bp, Homo sapiens
aaattcccaaattga

SEQ ID NO: 1331786 - DNA, 15 bp, Homo sapiens
gaaattcccaaattg

SEQ ID NO: 1331787 - DNA, 15 bp, Homo sapiens
agaaattcccaaatt

SEQ ID NO: 1331788 - DNA, 15 bp, Homo sapiens
gagaaattcccaaat

SEQ ID NO: 1331789 - DNA, 15 bp, Homo sapiens
cgagaaattcccaaa

SEQ ID NO: 1331790 - DNA, 15 bp, Homo sapiens
tcgagaaattcccaa

SEQ ID NO: 1331791 - DNA, 15 bp, Homo sapiens
ttcgagaaattccca

SEQ ID NO: 1331792 - DNA, 15 bp, Homo sapiens
tttcgagaaattccc

SEQ ID NO: 1331793 - DNA, 15 bp, Homo sapiens
atttcgagaaattcc

SEQ ID NO: 1331794 - DNA, 15 bp, Homo sapiens
tatttcgagaaattc

SEQ ID NO: 1331795 - DNA, 15 bp, Homo sapiens
ttatttcgagaaatt

SEQ ID NO: 1331796 - DNA, 15 bp, Homo sapiens
tttatttcgagaaat

SEQ ID NO: 1331797 - DNA, 15 bp, Homo sapiens
ctttatttcgagaaa

SEQ ID NO: 1331798 - DNA, 15 bp, Homo sapiens
gctttatttcgagaa

SEQ ID NO: 1331799 - DNA, 15 bp, Homo sapiens
ggctttatttcgaga

SEQ ID NO: 1331800 - DNA, 15 bp, Homo sapiens
gggctttatttcgag

SEQ ID NO: 1331801 - DNA, 15 bp, Homo sapiens
agggctttatttcga

SEQ ID NO: 1331802 - DNA, 15 bp, Homo sapiens
aagggctttatttcg

SEQ ID NO: 1331803 - DNA, 15 bp, Homo sapiens
taagggctttatttc

SEQ ID NO: 1331804 - DNA, 15 bp, Homo sapiens
gtaagggctttattt

SEQ ID NO: 1331805 - DNA, 15 bp, Homo sapiens
agtaagggctttatt

SEQ ID NO: 1331806 - DNA, 15 bp, Homo sapiens
tagtaagggctttat

SEQ ID NO: 1331807 - DNA, 15 bp, Homo sapiens
gtagtaagggcttta

SEQ ID NO: 1331808 - DNA, 15 bp, Homo sapiens
tgtagtaagggcttt

SEQ ID NO: 1331809 - DNA, 15 bp, Homo sapiens
gtgtagtaagggctt

SEQ ID NO: 1331810 - DNA, 15 bp, Homo sapiens
agtgtagtaagggct

SEQ ID NO: 1331811 - DNA, 15 bp, Homo sapiens
tagtgtagtaagggc

SEQ ID NO: 1331812 - DNA, 15 bp, Homo sapiens
atagtgtagtaaggg

SEQ ID NO: 1331813 - DNA, 15 bp, Homo sapiens
catagtgtagtaagg

SEQ ID NO: 1331814 - DNA, 15 bp, Homo sapiens
acatagtgtagtaag

SEQ ID NO: 1331815 - DNA, 15 bp, Homo sapiens
cacatagtgtagtaa

SEQ ID NO: 1331816 - DNA, 15 bp, Homo sapiens
acacatagtgtagta

SEQ ID NO: 1331817 - DNA, 15 bp, Homo sapiens
cacacatagtgtagt

SEQ ID NO: 1331818 - DNA, 15 bp, Homo sapiens
acacacatagtgtag

SEQ ID NO: 1331819 - DNA, 15 bp, Homo sapiens
gacacacatagtgta

SEQ ID NO: 1331820 - DNA, 15 bp, Homo sapiens
agacacacatagtgt

SEQ ID NO: 1331821 - DNA, 15 bp, Homo sapiens
cagacacacatagtg

SEQ ID NO: 1331822 - DNA, 15 bp, Homo sapiens
ccagacacacatagt

SEQ ID NO: 1331823 - DNA, 15 bp, Homo sapiens
cccagacacacatag

SEQ ID NO: 1331824 - DNA, 15 bp, Homo sapiens
tcccagacacacata

SEQ ID NO: 1331825 - DNA, 15 bp, Homo sapiens
ttcccagacacacat

SEQ ID NO: 1331826 - DNA, 15 bp, Homo sapiens
attcccagacacaca

SEQ ID NO: 1331827 - DNA, 15 bp, Homo sapiens
cattcccagacacac

SEQ ID NO: 1331828 - DNA, 15 bp, Homo sapiens
acattcccagacaca

SEQ ID NO: 1331829 - DNA, 15 bp, Homo sapiens
gacattcccagacac

SEQ ID NO: 1331830 - DNA, 15 bp, Homo sapiens
tgacattcccagaca

SEQ ID NO: 1331831 - DNA, 15 bp, Homo sapiens
gtgacattcccagac

SEQ ID NO: 1331832 - DNA, 15 bp, Homo sapiens
agtgacattcccaga

SEQ ID NO: 1331833 - DNA, 15 bp, Homo sapiens
cagtgacattcccag

SEQ ID NO: 1331834 - DNA, 15 bp, Homo sapiens
tcagtgacattccca

SEQ ID NO: 1331835 - DNA, 15 bp, Homo sapiens
gtcagtgacattccc

SEQ ID NO: 1331836 - DNA, 15 bp, Homo sapiens
tgtcagtgacattcc

SEQ ID NO: 1331837 - DNA, 15 bp, Homo sapiens
atgtcagtgacattc

SEQ ID NO: 1331838 - DNA, 15 bp, Homo sapiens
tatgtcagtgacatt

SEQ ID NO: 1331839 - DNA, 15 bp, Homo sapiens
ctatgtcagtgacat

SEQ ID NO: 1331840 - DNA, 15 bp, Homo sapiens
actatgtcagtgaca

SEQ ID NO: 1331841 - DNA, 15 bp, Homo sapiens
aactatgtcagtgac

SEQ ID NO: 1331842 - DNA, 15 bp, Homo sapiens
gaactatgtcagtga

SEQ ID NO: 1331843 - DNA, 15 bp, Homo sapiens
tgaactatgtcagtg

SEQ ID NO: 1331844 - DNA, 15 bp, Homo sapiens
ctgaactatgtcagt

SEQ ID NO: 1331845 - DNA, 15 bp, Homo sapiens
cctgaactatgtcag

SEQ ID NO: 1331846 - DNA, 15 bp, Homo sapiens
tcctgaactatgtca

SEQ ID NO: 1331847 - DNA, 15 bp, Homo sapiens
gtcctgaactatgtc

SEQ ID NO: 1331848 - DNA, 15 bp, Homo sapiens
agtcctgaactatgt

SEQ ID NO: 1331849 - DNA, 15 bp, Homo sapiens
aagtcctgaactatg

SEQ ID NO: 1331850 - DNA, 15 bp, Homo sapiens
gaagtcctgaactat

SEQ ID NO: 1331851 - DNA, 15 bp, Homo sapiens
tgaagtcctgaacta

SEQ ID NO: 1331852 - DNA, 15 bp, Homo sapiens
atgaagtcctgaact

SEQ ID NO: 1331853 - DNA, 15 bp, Homo sapiens
tatgaagtcctgaac

SEQ ID NO: 1331854 - DNA, 15 bp, Homo sapiens
ttatgaagtcctgaa

SEQ ID NO: 1331855 - DNA, 15 bp, Homo sapiens
tttatgaagtcctga

SEQ ID NO: 1331856 - DNA, 15 bp, Homo sapiens
atttatgaagtcctg

SEQ ID NO: 1331857 - DNA, 15 bp, Homo sapiens
tatttatgaagtcct

SEQ ID NO: 1331858 - DNA, 15 bp, Homo sapiens
ttatttatgaagtcc

SEQ ID NO: 1331859 - DNA, 15 bp, Homo sapiens
attatttatgaagtc

SEQ ID NO: 1331860 - DNA, 15 bp, Homo sapiens
cattatttatgaagt

SEQ ID NO: 1331861 - DNA, 15 bp, Homo sapiens
tcattatttatgaag

SEQ ID NO: 1331862 - DNA, 15 bp, Homo sapiens
ctcattatttatgaa

SEQ ID NO: 1331863 - DNA, 15 bp, Homo sapiens
actcattatttatga

SEQ ID NO: 1331864 - DNA, 15 bp, Homo sapiens
aactcattatttatg

SEQ ID NO: 1331865 - DNA, 15 bp, Homo sapiens
aaactcattatttat

SEQ ID NO: 1331866 - DNA, 15 bp, Homo sapiens
caaactcattattta

SEQ ID NO: 1331867 - DNA, 15 bp, Homo sapiens
ccaaactcattattt

SEQ ID NO: 1331868 - DNA, 15 bp, Homo sapiens
accaaactcattatt

SEQ ID NO: 1331869 - DNA, 15 bp, Homo sapiens
aaccaaactcattat

SEQ ID NO: 1331870 - DNA, 15 bp, Homo sapiens
aaaccaaactcatta

SEQ ID NO: 1331871 - DNA, 15 bp, Homo sapiens
aaaaccaaactcatt

SEQ ID NO: 1331872 - DNA, 15 bp, Homo sapiens
caaaaccaaactcat

SEQ ID NO: 1331873 - DNA, 15 bp, Homo sapiens
acaaaaccaaactca

SEQ ID NO: 1331874 - DNA, 15 bp, Homo sapiens
tacaaaaccaaactc

SEQ ID NO: 1331875 - DNA, 15 bp, Homo sapiens
ttacaaaaccaaact

SEQ ID NO: 1331876 - DNA, 15 bp, Homo sapiens
cttacaaaaccaaac

SEQ ID NO: 1331877 - DNA, 15 bp, Homo sapiens
gtcttacaaaaccaa

SEQ ID NO: 1331878 - DNA, 15 bp, Homo sapiens
cgtcttacaaaacca

SEQ ID NO: 1331879 - DNA, 15 bp, Homo sapiens
acgtcttacaaaacc

SEQ ID NO: 1331880 - DNA, 15 bp, Homo sapiens
aacgtcttacaaaac

SEQ ID NO: 1331881 - DNA, 15 bp, Homo sapiens
aaacgtcttacaaaa

SEQ ID NO: 1331882 - DNA, 15 bp, Homo sapiens
caaacgtcttacaaa

SEQ ID NO: 1331883 - DNA, 15 bp, Homo sapiens
tcaaacgtcttacaa

SEQ ID NO: 1331884 - DNA, 15 bp, Homo sapiens
ttcaaacgtcttaca

SEQ ID NO: 1331885 - DNA, 15 bp, Homo sapiens
cttcaaacgtcttac

SEQ ID NO: 1331886 - DNA, 15 bp, Homo sapiens
acttcaaacgtctta

SEQ ID NO: 1331887 - DNA, 15 bp, Homo sapiens
gacttcaaacgtctt

SEQ ID NO: 1331888 - DNA, 15 bp, Homo sapiens
agacttcaaacgtct

SEQ ID NO: 1331889 - DNA, 15 bp, Homo sapiens
aagacttcaaacgtc

SEQ ID NO: 1331890 - DNA, 15 bp, Homo sapiens
aaagacttcaaacgt

SEQ ID NO: 1331891 - DNA, 15 bp, Homo sapiens
aaaagacttcaaacg

SEQ ID NO: 1331892 - DNA, 15 bp, Homo sapiens
gaaaagacttcaaac

SEQ ID NO: 1331893 - DNA, 15 bp, Homo sapiens
ggaaaagacttcaaa

SEQ ID NO: 1331894 - DNA, 15 bp, Homo sapiens
aggaaaagacttcaa

SEQ ID NO: 1331895 - DNA, 15 bp, Homo sapiens
gaggaaaagacttca

SEQ ID NO: 1331896 - DNA, 15 bp, Homo sapiens
tgaggaaaagacttc

SEQ ID NO: 1331897 - DNA, 15 bp, Homo sapiens
atgaggaaaagactt

SEQ ID NO: 1331898 - DNA, 15 bp, Homo sapiens
aatgaggaaaagact

SEQ ID NO: 1331899 - DNA, 15 bp, Homo sapiens
caatgaggaaaagac

SEQ ID NO: 1331900 - DNA, 15 bp, Homo sapiens
ccaatgaggaaaaga

SEQ ID NO: 1331901 - DNA, 15 bp, Homo sapiens
tccaatgaggaaaag

SEQ ID NO: 1331902 - DNA, 15 bp, Homo sapiens
atccaatgaggaaaa

SEQ ID NO: 1331903 - DNA, 15 bp, Homo sapiens
aatccaatgaggaaa

SEQ ID NO: 1331904 - DNA, 15 bp, Homo sapiens
aaatccaatgaggaa

SEQ ID NO: 1331905 - DNA, 15 bp, Homo sapiens
aaaatccaatgagga

SEQ ID NO: 1331906 - DNA, 15 bp, Homo sapiens
aaaaatccaatgagg

SEQ ID NO: 1331907 - DNA, 15 bp, Homo sapiens
gaaaaatccaatgag

SEQ ID NO: 1331908 - DNA, 15 bp, Homo sapiens
tgaaaaatccaatga

SEQ ID NO: 1331909 - DNA, 15 bp, Homo sapiens
gtgaaaaatccaatg

SEQ ID NO: 1331910 - DNA, 15 bp, Homo sapiens
agtgaaaaatccaat

SEQ ID NO: 1331911 - DNA, 15 bp, Homo sapiens
cagtgaaaaatccaa

SEQ ID NO: 1331912 - DNA, 15 bp, Homo sapiens
ccagtgaaaaatcca

SEQ ID NO: 1331913 - DNA, 15 bp, Homo sapiens
tccagtgaaaaatcc

SEQ ID NO: 1331914 - DNA, 15 bp, Homo sapiens
ttccagtgaaaaatc

SEQ ID NO: 1331915 - DNA, 15 bp, Homo sapiens
tttccagtgaaaaat

SEQ ID NO: 1331916 - DNA, 15 bp, Homo sapiens
ctttccagtgaaaaa

SEQ ID NO: 1331917 - DNA, 15 bp, Homo sapiens
gctttccagtgaaaa

SEQ ID NO: 1331918 - DNA, 15 bp, Homo sapiens
agctttccagtgaaa

SEQ ID NO: 1331919 - DNA, 15 bp, Homo sapiens
cagctttccagtgaa

SEQ ID NO: 1331920 - DNA, 15 bp, Homo sapiens
ccagctttccagtga

SEQ ID NO: 1331921 - DNA, 15 bp, Homo sapiens
accagctttccagtg

SEQ ID NO: 1331922 - DNA, 15 bp, Homo sapiens
taccagctttccagt

SEQ ID NO: 1331923 - DNA, 15 bp, Homo sapiens
ttaccagctttccag

SEQ ID NO: 1331924 - DNA, 15 bp, Homo sapiens
tttaccagctttcca

SEQ ID NO: 1331925 - DNA, 15 bp, Homo sapiens
ctttaccagctttcc

SEQ ID NO: 1331926 - DNA, 15 bp, Homo sapiens
cctttaccagctttc

SEQ ID NO: 1331927 - DNA, 15 bp, Homo sapiens
acctttaccagcttt

SEQ ID NO: 1331928 - DNA, 15 bp, Homo sapiens
gacctttaccagctt

SEQ ID NO: 1331929 - DNA, 15 bp, Homo sapiens
tgacctttaccagct

SEQ ID NO: 1331930 - DNA, 15 bp, Homo sapiens
ttgacctttaccagc

SEQ ID NO: 1331931 - DNA, 15 bp, Homo sapiens
cttgacctttaccag

SEQ ID NO: 1331932 - DNA, 15 bp, Homo sapiens
gcttgacctttacca

SEQ ID NO: 1331933 - DNA, 15 bp, Homo sapiens
tgcttgacctttacc

SEQ ID NO: 1331934 - DNA, 15 bp, Homo sapiens
gtgcttgacctttac

SEQ ID NO: 1331935 - DNA, 15 bp, Homo sapiens
ggtgcttgaccttta

SEQ ID NO: 1331936 - DNA, 15 bp, Homo sapiens
aggtgcttgaccttt

SEQ ID NO: 1331937 - DNA, 15 bp, Homo sapiens
caggtgcttgacctt

SEQ ID NO: 1331938 - DNA, 15 bp, Homo sapiens
tcaggtgcttgacct

SEQ ID NO: 1331939 - DNA, 15 bp, Homo sapiens
gtcaggtgcttgacc

SEQ ID NO: 1331940 - DNA, 15 bp, Homo sapiens
agtcaggtgcttgac

SEQ ID NO: 1331941 - DNA, 15 bp, Homo sapiens
gagtcaggtgcttga

SEQ ID NO: 1331942 - DNA, 15 bp, Homo sapiens
ggagtcaggtgcttg

SEQ ID NO: 1331943 - DNA, 15 bp, Homo sapiens
tggagtcaggtgctt

SEQ ID NO: 1331944 - DNA, 15 bp, Homo sapiens
atggagtcaggtgct

SEQ ID NO: 1331945 - DNA, 15 bp, Homo sapiens
tatggagtcaggtgc

SEQ ID NO: 1331946 - DNA, 15 bp, Homo sapiens
ttatggagtcaggtg

SEQ ID NO: 1331947 - DNA, 15 bp, Homo sapiens
gttatggagtcaggt

SEQ ID NO: 1331948 - DNA, 15 bp, Homo sapiens
agttatggagtcagg

SEQ ID NO: 1331949 - DNA, 15 bp, Homo sapiens
gagttatggagtcag

SEQ ID NO: 1331950 - DNA, 15 bp, Homo sapiens
tgagttatggagtca

SEQ ID NO: 1331951 - DNA, 15 bp, Homo sapiens
atgagttatggagtc

SEQ ID NO: 1331952 - DNA, 15 bp, Homo sapiens
gatgagttatggagt

SEQ ID NO: 1331953 - DNA, 15 bp, Homo sapiens
ggatgagttatggag

SEQ ID NO: 1331954 - DNA, 15 bp, Homo sapiens
tggatgagttatgga

SEQ ID NO: 1331955 - DNA, 15 bp, Homo sapiens
gtggatgagttatgg

SEQ ID NO: 1331956 - DNA, 15 bp, Homo sapiens
tgtggatgagttatg

SEQ ID NO: 1331957 - DNA, 15 bp, Homo sapiens
ttgtggatgagttat

SEQ ID NO: 1331958 - DNA, 15 bp, Homo sapiens
tttgtggatgagtta

SEQ ID NO: 1331959 - DNA, 15 bp, Homo sapiens
ctttgtggatgagtt

SEQ ID NO: 1331960 - DNA, 15 bp, Homo sapiens
cctttgtggatgagt

SEQ ID NO: 1331961 - DNA, 15 bp, Homo sapiens
acctttgtggatgag

SEQ ID NO: 1331962 - DNA, 15 bp, Homo sapiens
tacctttgtggatga

SEQ ID NO: 1331963 - DNA, 15 bp, Homo sapiens
ttacctttgtggatg

SEQ ID NO: 1331964 - DNA, 15 bp, Homo sapiens
tttacctttgtggat

SEQ ID NO: 1331965 - DNA, 15 bp, Homo sapiens
ttttacctttgtgga

SEQ ID NO: 1331966 - DNA, 15 bp, Homo sapiens
attttacctttgtgg

SEQ ID NO: 1331967 - DNA, 15 bp, Homo sapiens
tattttacctttgtg

SEQ ID NO: 1331968 - DNA, 15 bp, Homo sapiens
atattttacctttgt

SEQ ID NO: 1331969 - DNA, 15 bp, Homo sapiens
gatattttacctttg

SEQ ID NO: 1331970 - DNA, 15 bp, Homo sapiens
agatattttaccttt

SEQ ID NO: 1331971 - DNA, 15 bp, Homo sapiens
gagatattttacctt

SEQ ID NO: 1331972 - DNA, 15 bp, Homo sapiens
agagatattttacct

SEQ ID NO: 1331973 - DNA, 15 bp, Homo sapiens
gagagatattttacc

SEQ ID NO: 1331974 - DNA, 15 bp, Homo sapiens
tgagagatattttac

SEQ ID NO: 1331975 - DNA, 15 bp, Homo sapiens
ttgagagatatttta

SEQ ID NO: 1331976 - DNA, 15 bp, Homo sapiens
tttgagagatatttt

SEQ ID NO: 1331977 - DNA, 15 bp, Homo sapiens
ctttgagagatattt

SEQ ID NO: 1331978 - DNA, 15 bp, Homo sapiens
actttgagagatatt

SEQ ID NO: 1331979 - DNA, 15 bp, Homo sapiens
tactttgagagatat

SEQ ID NO: 1331980 - DNA, 15 bp, Homo sapiens
ttactttgagagata

SEQ ID NO: 1331981 - DNA, 15 bp, Homo sapiens
tttactttgagagat

SEQ ID NO: 1331982 - DNA, 15 bp, Homo sapiens
ttttactttgagaga

SEQ ID NO: 1331983 - DNA, 15 bp, Homo sapiens
gttttactttgagag

SEQ ID NO: 1331984 - DNA, 15 bp, Homo sapiens
agttttactttgaga

SEQ ID NO: 1331985 - DNA, 15 bp, Homo sapiens
gagttttactttgag

SEQ ID NO: 1331986 - DNA, 15 bp, Homo sapiens
agagttttactttga

SEQ ID NO: 1331987 - DNA, 15 bp, Homo sapiens
cagagttttactttg

SEQ ID NO: 1331988 - DNA, 15 bp, Homo sapiens
tcagagttttacttt

SEQ ID NO: 1331989 - DNA, 15 bp, Homo sapiens
ctcagagttttactt

SEQ ID NO: 1331990 - DNA, 15 bp, Homo sapiens
tctcagagttttact

SEQ ID NO: 1331991 - DNA, 15 bp, Homo sapiens
ttctcagagttttac

SEQ ID NO: 1331992 - DNA, 15 bp, Homo sapiens
tttctcagagtttta

SEQ ID NO: 1331993 - DNA, 15 bp, Homo sapiens
ctttctcagagtttt

SEQ ID NO: 1331994 - DNA, 15 bp, Homo sapiens
actttctcagagttt

SEQ ID NO: 1331995 - DNA, 15 bp, Homo sapiens
aactttctcagagtt

SEQ ID NO: 1331996 - DNA, 15 bp, Homo sapiens
taactttctcagagt

SEQ ID NO: 1331997 - DNA, 15 bp, Homo sapiens
ttaactttctcagag

SEQ ID NO: 1331998 - DNA, 15 bp, Homo sapiens
tttaactttctcaga

SEQ ID NO: 1331999 - DNA, 15 bp, Homo sapiens
ttttaactttctcag

SEQ ID NO: 1332000 - DNA, 15 bp, Homo sapiens
tttttaactttctca

SEQ ID NO: 1332001 - DNA, 15 bp, Homo sapiens
atttttaactttctc

SEQ ID NO: 1332002 - DNA, 15 bp, Homo sapiens
tatttttaactttct

SEQ ID NO: 1332003 - DNA, 15 bp, Homo sapiens
ctatttttaactttc

SEQ ID NO: 1332004 - DNA, 15 bp, Homo sapiens
gctatttttaacttt

SEQ ID NO: 1332005 - DNA, 15 bp, Homo sapiens
ggctatttttaactt

SEQ ID NO: 1332006 - DNA, 15 bp, Homo sapiens
tggctatttttaact

SEQ ID NO: 1332007 - DNA, 15 bp, Homo sapiens
ctggctatttttaac

SEQ ID NO: 1332008 - DNA, 15 bp, Homo sapiens
gctggctatttttaa

SEQ ID NO: 1332009 - DNA, 15 bp, Homo sapiens
tgctggctattttta

SEQ ID NO: 1332010 - DNA, 15 bp, Homo sapiens
ttgctggctattttt

SEQ ID NO: 1332011 - DNA, 15 bp, Homo sapiens
attgctggctatttt

SEQ ID NO: 1332012 - DNA, 15 bp, Homo sapiens
aattgctggctattt

SEQ ID NO: 1332013 - DNA, 15 bp, Homo sapiens
gaattgctggctatt

SEQ ID NO: 1332014 - DNA, 15 bp, Homo sapiens
tgaattgctggctat

SEQ ID NO: 1332015 - DNA, 15 bp, Homo sapiens
ttgaattgctggcta

SEQ ID NO: 1332016 - DNA, 15 bp, Homo sapiens
tttgaattgctggct

SEQ ID NO: 1332017 - DNA, 15 bp, Homo sapiens
atttgaattgctggc

SEQ ID NO: 1332018 - DNA, 15 bp, Homo sapiens
catttgaattgctgg

SEQ ID NO: 1332019 - DNA, 15 bp, Homo sapiens
gcatttgaattgctg

SEQ ID NO: 1332020 - DNA, 15 bp, Homo sapiens
tgcatttgaattgct

SEQ ID NO: 1332021 - DNA, 15 bp, Homo sapiens
ttgcatttgaattgc

SEQ ID NO: 1332022 - DNA, 15 bp, Homo sapiens
tttgcatttgaattg

SEQ ID NO: 1332023 - DNA, 15 bp, Homo sapiens
atttgcatttgaatt

SEQ ID NO: 1332024 - DNA, 15 bp, Homo sapiens
gatttgcatttgaat

SEQ ID NO: 1332025 - DNA, 15 bp, Homo sapiens
agatttgcatttgaa

SEQ ID NO: 1332026 - DNA, 15 bp, Homo sapiens
tagatttgcatttga

SEQ ID NO: 1332027 - DNA, 15 bp, Homo sapiens
ctagatttgcatttg

SEQ ID NO: 1332028 - DNA, 15 bp, Homo sapiens
tctagatttgcattt

SEQ ID NO: 1332029 - DNA, 15 bp, Homo sapiens
ttctagatttgcatt

SEQ ID NO: 1332030 - DNA, 15 bp, Homo sapiens
attctagatttgcat

SEQ ID NO: 1332031 - DNA, 15 bp, Homo sapiens
gattctagatttgca

SEQ ID NO: 1332032 - DNA, 15 bp, Homo sapiens
agattctagatttgc

SEQ ID NO: 1332033 - DNA, 15 bp, Homo sapiens
aagattctagatttg

SEQ ID NO: 1332034 - DNA, 15 bp, Homo sapiens
aaagattctagattt

SEQ ID NO: 1332035 - DNA, 15 bp, Homo sapiens
gaaagattctagatt

SEQ ID NO: 1332036 - DNA, 15 bp, Homo sapiens
agaaagattctagat

SEQ ID NO: 1332037 - DNA, 15 bp, Homo sapiens
aagaaagattctaga

SEQ ID NO: 1332038 - DNA, 15 bp, Homo sapiens
caagaaagattctag

SEQ ID NO: 1332039 - DNA, 15 bp, Homo sapiens
gcaagaaagattcta

SEQ ID NO: 1332040 - DNA, 15 bp, Homo sapiens
agcaagaaagattct

SEQ ID NO: 1332041 - DNA, 15 bp, Homo sapiens
aagcaagaaagattc

SEQ ID NO: 1332042 - DNA, 15 bp, Homo sapiens
aaagcaagaaagatt

SEQ ID NO: 1332043 - DNA, 15 bp, Homo sapiens
caaagcaagaaagat

SEQ ID NO: 1332044 - DNA, 15 bp, Homo sapiens
gcaaagcaagaaaga

SEQ ID NO: 1332045 - DNA, 15 bp, Homo sapiens
tgcaaagcaagaaag

SEQ ID NO: 1332046 - DNA, 15 bp, Homo sapiens
atgcaaagcaagaaa

SEQ ID NO: 1332047 - DNA, 15 bp, Homo sapiens
gatgcaaagcaagaa

SEQ ID NO: 1332048 - DNA, 15 bp, Homo sapiens
tgatgcaaagcaaga

SEQ ID NO: 1332049 - DNA, 15 bp, Homo sapiens
ctgatgcaaagcaag

SEQ ID NO: 1332050 - DNA, 15 bp, Homo sapiens
tctgatgcaaagcaa

SEQ ID NO: 1332051 - DNA, 15 bp, Homo sapiens
atctgatgcaaagca

SEQ ID NO: 1332052 - DNA, 15 bp, Homo sapiens
catctgatgcaaagc

SEQ ID NO: 1332053 - DNA, 15 bp, Homo sapiens
gcatctgatgcaaag

SEQ ID NO: 1332054 - DNA, 15 bp, Homo sapiens
tgcatctgatgcaaa

SEQ ID NO: 1332055 - DNA, 15 bp, Homo sapiens
ctgcatctgatgcaa

SEQ ID NO: 1332056 - DNA, 15 bp, Homo sapiens
tctgcatctgatgca

SEQ ID NO: 1332057 - DNA, 15 bp, Homo sapiens
ctctgcatctgatgc

SEQ ID NO: 1332058 - DNA, 15 bp, Homo sapiens
tctctgcatctgatg

SEQ ID NO: 1332059 - DNA, 15 bp, Homo sapiens
ttctctgcatctgat

SEQ ID NO: 1332060 - DNA, 15 bp, Homo sapiens
attctctgcatctga

SEQ ID NO: 1332061 - DNA, 15 bp, Homo sapiens
gattctctgcatctg

SEQ ID NO: 1332062 - DNA, 15 bp, Homo sapiens
tgattctctgcatct

SEQ ID NO: 1332063 - DNA, 15 bp, Homo sapiens
atgattctctgcatc

SEQ ID NO: 1332064 - DNA, 15 bp, Homo sapiens
aatgattctctgcat

SEQ ID NO: 1332065 - DNA, 15 bp, Homo sapiens
gaatgattctctgca

SEQ ID NO: 1332066 - DNA, 15 bp, Homo sapiens
ggaatgattctctgc

SEQ ID NO: 1332067 - DNA, 15 bp, Homo sapiens
cggaatgattctctg

SEQ ID NO: 1332068 - DNA, 15 bp, Homo sapiens
ccggaatgattctct

SEQ ID NO: 1332069 - DNA, 15 bp, Homo sapiens
tccggaatgattctc

SEQ ID NO: 1332070 - DNA, 15 bp, Homo sapiens
gtccggaatgattct

SEQ ID NO: 1332071 - DNA, 15 bp, Homo sapiens
tgtccggaatgattc

SEQ ID NO: 1332072 - DNA, 15 bp, Homo sapiens
atgtccggaatgatt

SEQ ID NO: 1332073 - DNA, 15 bp, Homo sapiens
catgtccggaatgat

SEQ ID NO: 1332074 - DNA, 15 bp, Homo sapiens
gcatgtccggaatga

SEQ ID NO: 1332075 - DNA, 15 bp, Homo sapiens
agcatgtccggaatg

SEQ ID NO: 1332076 - DNA, 15 bp, Homo sapiens
cagcatgtccggaat

SEQ ID NO: 1332077 - DNA, 15 bp, Homo sapiens
gcagcatgtccggaa

SEQ ID NO: 1332078 - DNA, 15 bp, Homo sapiens
tgcagcatgtccgga

SEQ ID NO: 1332079 - DNA, 15 bp, Homo sapiens
atgcagcatgtccgg

SEQ ID NO: 1332080 - DNA, 15 bp, Homo sapiens
tatgcagcatgtccg

SEQ ID NO: 1332081 - DNA, 15 bp, Homo sapiens
ttatgcagcatgtcc

SEQ ID NO: 1332082 - DNA, 15 bp, Homo sapiens
cttatgcagcatgtc

SEQ ID NO: 1332083 - DNA, 15 bp, Homo sapiens
ccttatgcagcatgt

SEQ ID NO: 1332084 - DNA, 15 bp, Homo sapiens
gccttatgcagcatg

SEQ ID NO: 1332085 - DNA, 15 bp, Homo sapiens
tgccttatgcagcat

SEQ ID NO: 1332086 - DNA, 15 bp, Homo sapiens
gtgccttatgcagca

SEQ ID NO: 1332087 - DNA, 15 bp, Homo sapiens
agtgccttatgcagc

SEQ ID NO: 1332088 - DNA, 15 bp, Homo sapiens
aagtgccttatgcag

SEQ ID NO: 1332089 - DNA, 15 bp, Homo sapiens
aaagtgccttatgca

SEQ ID NO: 1332090 - DNA, 15 bp, Homo sapiens
taaagtgccttatgc

SEQ ID NO: 1332091 - DNA, 15 bp, Homo sapiens
ataaagtgccttatg

SEQ ID NO: 1332092 - DNA, 15 bp, Homo sapiens
cataaagtgccttat

SEQ ID NO: 1332093 - DNA, 15 bp, Homo sapiens
tcataaagtgcctta

SEQ ID NO: 1332094 - DNA, 15 bp, Homo sapiens
ctcataaagtgcctt

SEQ ID NO: 1332095 - DNA, 15 bp, Homo sapiens
tctcataaagtgcct

SEQ ID NO: 1332096 - DNA, 15 bp, Homo sapiens
ttctcataaagtgcc

SEQ ID NO: 1332097 - DNA, 15 bp, Homo sapiens
cttctcataaagtgc

SEQ ID NO: 1332098 - DNA, 15 bp, Homo sapiens
ccttctcataaagtg

SEQ ID NO: 1332099 - DNA, 15 bp, Homo sapiens
tccttctcataaagt

SEQ ID NO: 1332100 - DNA, 15 bp, Homo sapiens
atccttctcataaag

SEQ ID NO: 1332101 - DNA, 15 bp, Homo sapiens
tatccttctcataaa

SEQ ID NO: 1332102 - DNA, 15 bp, Homo sapiens
ctatccttctcataa

SEQ ID NO: 1332103 - DNA, 15 bp, Homo sapiens
tctatccttctcata

SEQ ID NO: 1332104 - DNA, 15 bp, Homo sapiens
ctctatccttctcat

SEQ ID NO: 1332105 - DNA, 15 bp, Homo sapiens
tctctatccttctca

SEQ ID NO: 1332106 - DNA, 15 bp, Homo sapiens
ttctctatccttctc

SEQ ID NO: 1332107 - DNA, 15 bp, Homo sapiens
cttctctatccttct

SEQ ID NO: 1332108 - DNA, 15 bp, Homo sapiens
gcttctctatccttc

SEQ ID NO: 1332109 - DNA, 15 bp, Homo sapiens
tgcttctctatcctt

SEQ ID NO: 1332110 - DNA, 15 bp, Homo sapiens
ctgcttctctatcct

SEQ ID NO: 1332111 - DNA, 15 bp, Homo sapiens
actgcttctctatcc

SEQ ID NO: 1332112 - DNA, 15 bp, Homo sapiens
aactgcttctctatc

SEQ ID NO: 1332113 - DNA, 15 bp, Homo sapiens
caactgcttctctat

SEQ ID NO: 1332114 - DNA, 15 bp, Homo sapiens
ccaactgcttctcta

SEQ ID NO: 1332115 - DNA, 15 bp, Homo sapiens
accaactgcttctct

SEQ ID NO: 1332116 - DNA, 15 bp, Homo sapiens
taccaactgcttctc

SEQ ID NO: 1332117 - DNA, 15 bp, Homo sapiens
ttaccaactgcttct

SEQ ID NO: 1332118 - DNA, 15 bp, Homo sapiens
tttaccaactgcttc

SEQ ID NO: 1332119 - DNA, 15 bp, Homo sapiens
atttaccaactgctt

SEQ ID NO: 1332120 - DNA, 15 bp, Homo sapiens
gatttaccaactgct

SEQ ID NO: 1332121 - DNA, 15 bp, Homo sapiens
agatttaccaactgc

SEQ ID NO: 1332122 - DNA, 15 bp, Homo sapiens
aagatttaccaactg

SEQ ID NO: 1332123 - DNA, 15 bp, Homo sapiens
caagatttaccaact

SEQ ID NO: 1332124 - DNA, 15 bp, Homo sapiens
gcaagatttaccaac

SEQ ID NO: 1332125 - DNA, 15 bp, Homo sapiens
agcaagatttaccaa

SEQ ID NO: 1332126 - DNA, 15 bp, Homo sapiens
gagcaagatttacca

SEQ ID NO: 1332127 - DNA, 15 bp, Homo sapiens
cgagcaagatttacc

SEQ ID NO: 1332128 - DNA, 15 bp, Homo sapiens
acgagcaagatttac

SEQ ID NO: 1332129 - DNA, 15 bp, Homo sapiens
cacgagcaagattta

SEQ ID NO: 1332130 - DNA, 15 bp, Homo sapiens
tcacgagcaagattt

SEQ ID NO: 1332131 - DNA, 15 bp, Homo sapiens
ctcacgagcaagatt

SEQ ID NO: 1332132 - DNA, 15 bp, Homo sapiens
tctcacgagcaagat

SEQ ID NO: 1332133 - DNA, 15 bp, Homo sapiens
atctcacgagcaaga

SEQ ID NO: 1332134 - DNA, 15 bp, Homo sapiens
tatctcacgagcaag

SEQ ID NO: 1332135 - DNA, 15 bp, Homo sapiens
ttatctcacgagcaa

SEQ ID NO: 1332136 - DNA, 15 bp, Homo sapiens
attatctcacgagca

SEQ ID NO: 1332137 - DNA, 15 bp, Homo sapiens
aattatctcacgagc

SEQ ID NO: 1332138 - DNA, 15 bp, Homo sapiens
gaattatctcacgag

SEQ ID NO: 1332139 - DNA, 15 bp, Homo sapiens
agaattatctcacga

SEQ ID NO: 1332140 - DNA, 15 bp, Homo sapiens
aagaattatctcacg

SEQ ID NO: 1332141 - DNA, 15 bp, Homo sapiens
caagaattatctcac

SEQ ID NO: 1332142 - DNA, 15 bp, Homo sapiens
tcaagaattatctca

SEQ ID NO: 1332143 - DNA, 15 bp, Homo sapiens
ttcaagaattatctc

SEQ ID NO: 1332144 - DNA, 15 bp, Homo sapiens
attcaagaattatct

SEQ ID NO: 1332145 - DNA, 15 bp, Homo sapiens
cattcaagaattatc

SEQ ID NO: 1332146 - DNA, 15 bp, Homo sapiens
acattcaagaattat

SEQ ID NO: 1332147 - DNA, 15 bp, Homo sapiens
gacattcaagaatta

SEQ ID NO: 1332148 - DNA, 15 bp, Homo sapiens
agacattcaagaatt

SEQ ID NO: 1332149 - DNA, 15 bp, Homo sapiens
aagacattcaagaat

SEQ ID NO: 1332150 - DNA, 15 bp, Homo sapiens
caagacattcaagaa

SEQ ID NO: 1332151 - DNA, 15 bp, Homo sapiens
tcaagacattcaaga

SEQ ID NO: 1332152 - DNA, 15 bp, Homo sapiens
ctcaagacattcaag

SEQ ID NO: 1332153 - DNA, 15 bp, Homo sapiens
actcaagacattcaa

SEQ ID NO: 1332154 - DNA, 15 bp, Homo sapiens
aactcaagacattca

SEQ ID NO: 1332155 - DNA, 15 bp, Homo sapiens
aaactcaagacattc

SEQ ID NO: 1332156 - DNA, 15 bp, Homo sapiens
caaactcaagacatt

SEQ ID NO: 1332157 - DNA, 15 bp, Homo sapiens
ccaaactcaagacat

SEQ ID NO: 1332158 - DNA, 15 bp, Homo sapiens
accaaactcaagaca

SEQ ID NO: 1332159 - DNA, 15 bp, Homo sapiens
aaccaaactcaagac

SEQ ID NO: 1332160 - DNA, 15 bp, Homo sapiens
aaaccaaactcaaga

SEQ ID NO: 1332161 - DNA, 15 bp, Homo sapiens
aaaaccaaactcaag

SEQ ID NO: 1332162 - DNA, 15 bp, Homo sapiens
caaaaccaaactcaa

SEQ ID NO: 1332163 - DNA, 15 bp, Homo sapiens
gcaaaaccaaactca

SEQ ID NO: 1332164 - DNA, 15 bp, Homo sapiens
tgcaaaaccaaactc

SEQ ID NO: 1332165 - DNA, 15 bp, Homo sapiens
atgcaaaaccaaact

SEQ ID NO: 1332166 - DNA, 15 bp, Homo sapiens
tatgcaaaaccaaac

SEQ ID NO: 1332167 - DNA, 15 bp, Homo sapiens
ttatgcaaaaccaaa

SEQ ID NO: 1332168 - DNA, 15 bp, Homo sapiens
tttatgcaaaaccaa

SEQ ID NO: 1332169 - DNA, 15 bp, Homo sapiens
gtttatgcaaaacca

SEQ ID NO: 1332170 - DNA, 15 bp, Homo sapiens
tgtttatgcaaaacc

SEQ ID NO: 1332171 - DNA, 15 bp, Homo sapiens
atgtttatgcaaaac

SEQ ID NO: 1332172 - DNA, 15 bp, Homo sapiens
gatgtttatgcaaaa

SEQ ID NO: 1332173 - DNA, 15 bp, Homo sapiens
agatgtttatgcaaa

SEQ ID NO: 1332174 - DNA, 15 bp, Homo sapiens
cagatgtttatgcaa

SEQ ID NO: 1332175 - DNA, 15 bp, Homo sapiens
tcagatgtttatgca

SEQ ID NO: 1332176 - DNA, 15 bp, Homo sapiens
ttcagatgtttatgc

SEQ ID NO: 1332177 - DNA, 15 bp, Homo sapiens
tttcagatgtttatg

SEQ ID NO: 1332178 - DNA, 15 bp, Homo sapiens
ttttcagatgtttat

SEQ ID NO: 1332179 - DNA, 15 bp, Homo sapiens
attttcagatgttta

SEQ ID NO: 1332180 - DNA, 15 bp, Homo sapiens
aattttcagatgttt

SEQ ID NO: 1332181 - DNA, 15 bp, Homo sapiens
aaattttcagatgtt

SEQ ID NO: 1332182 - DNA, 15 bp, Homo sapiens
aaaattttcagatgt

SEQ ID NO: 1332183 - DNA, 15 bp, Homo sapiens
taaaattttcagatg

SEQ ID NO: 1332184 - DNA, 15 bp, Homo sapiens
ctaaaattttcagat

SEQ ID NO: 1332185 - DNA, 15 bp, Homo sapiens
gtctaaaattttcag

SEQ ID NO: 1332186 - DNA, 15 bp, Homo sapiens
agtctaaaattttca

SEQ ID NO: 1332187 - DNA, 15 bp, Homo sapiens
tagtctaaaattttc

SEQ ID NO: 1332188 - DNA, 15 bp, Homo sapiens
atagtctaaaatttt

SEQ ID NO: 1332189 - DNA, 15 bp, Homo sapiens
tatagtctaaaattt

SEQ ID NO: 1332190 - DNA, 15 bp, Homo sapiens
atatagtctaaaatt

SEQ ID NO: 1332191 - DNA, 15 bp, Homo sapiens
catatagtctaaaat

SEQ ID NO: 1332192 - DNA, 15 bp, Homo sapiens
tcatatagtctaaaa

SEQ ID NO: 1332193 - DNA, 15 bp, Homo sapiens
ttcatatagtctaaa

SEQ ID NO: 1332194 - DNA, 15 bp, Homo sapiens
cttcatatagtctaa

SEQ ID NO: 1332195 - DNA, 15 bp, Homo sapiens
tcttcatatagtcta

SEQ ID NO: 1332196 - DNA, 15 bp, Homo sapiens
ttcttcatatagtct

SEQ ID NO: 1332197 - DNA, 15 bp, Homo sapiens
attcttcatatagtc

SEQ ID NO: 1332198 - DNA, 15 bp, Homo sapiens
cattcttcatatagt

SEQ ID NO: 1332199 - DNA, 15 bp, Homo sapiens
acattcttcatatag

SEQ ID NO: 1332200 - DNA, 15 bp, Homo sapiens
tacattcttcatata

SEQ ID NO: 1332201 - DNA, 15 bp, Homo sapiens
atacattcttcatat

SEQ ID NO: 1332202 - DNA, 15 bp, Homo sapiens
tatacattcttcata

SEQ ID NO: 1332203 - DNA, 15 bp, Homo sapiens
ctatacattcttcat

SEQ ID NO: 1332204 - DNA, 15 bp, Homo sapiens
actatacattcttca

SEQ ID NO: 1332205 - DNA, 15 bp, Homo sapiens
gactatacattcttc

SEQ ID NO: 1332206 - DNA, 15 bp, Homo sapiens
ggactatacattctt

SEQ ID NO: 1332207 - DNA, 15 bp, Homo sapiens
gggactatacattct

SEQ ID NO: 1332208 - DNA, 15 bp, Homo sapiens
tgggactatacattc

SEQ ID NO: 1332209 - DNA, 15 bp, Homo sapiens
atgggactatacatt

SEQ ID NO: 1332210 - DNA, 15 bp, Homo sapiens
gatgggactatacat

SEQ ID NO: 1332211 - DNA, 15 bp, Homo sapiens
tgatgggactataca

SEQ ID NO: 1332212 - DNA, 15 bp, Homo sapiens
ttgatgggactatac

SEQ ID NO: 1332213 - DNA, 15 bp, Homo sapiens
tttgatgggactata

SEQ ID NO: 1332214 - DNA, 15 bp, Homo sapiens
atttgatgggactat

SEQ ID NO: 1332215 - DNA, 15 bp, Homo sapiens
aatttgatgggacta

SEQ ID NO: 1332216 - DNA, 15 bp, Homo sapiens
caatttgatgggact

SEQ ID NO: 1332217 - DNA, 15 bp, Homo sapiens
tcaatttgatgggac

SEQ ID NO: 1332218 - DNA, 15 bp, Homo sapiens
ttcaatttgatggga

SEQ ID NO: 1332219 - DNA, 15 bp, Homo sapiens
gttcaatttgatggg

SEQ ID NO: 1332220 - DNA, 15 bp, Homo sapiens
agttcaatttgatgg

SEQ ID NO: 1332221 - DNA, 15 bp, Homo sapiens
tagttcaatttgatg

SEQ ID NO: 1332222 - DNA, 15 bp, Homo sapiens
ttagttcaatttgat

SEQ ID NO: 1332223 - DNA, 15 bp, Homo sapiens
tttagttcaatttga

SEQ ID NO: 1332224 - DNA, 15 bp, Homo sapiens
ttttagttcaatttg

SEQ ID NO: 1332225 - DNA, 15 bp, Homo sapiens
gttttagttcaattt

SEQ ID NO: 1332226 - DNA, 15 bp, Homo sapiens
agttttagttcaatt

SEQ ID NO: 1332227 - DNA, 15 bp, Homo sapiens
gagttttagttcaat

SEQ ID NO: 1332228 - DNA, 15 bp, Homo sapiens
aggagttttagttca

SEQ ID NO: 1332229 - DNA, 15 bp, Homo sapiens
taggagttttagttc

SEQ ID NO: 1332230 - DNA, 15 bp, Homo sapiens
gtaggagttttagtt

SEQ ID NO: 1332231 - DNA, 15 bp, Homo sapiens
tgtaggagttttagt

SEQ ID NO: 1332232 - DNA, 15 bp, Homo sapiens
ctgtaggagttttag

SEQ ID NO: 1332233 - DNA, 15 bp, Homo sapiens
tctgtaggagtttta

SEQ ID NO: 1332234 - DNA, 15 bp, Homo sapiens
ctctgtaggagtttt

SEQ ID NO: 1332235 - DNA, 15 bp, Homo sapiens
cctctgtaggagttt

SEQ ID NO: 1332236 - DNA, 15 bp, Homo sapiens
ccctctgtaggagtt

SEQ ID NO: 1332237 - DNA, 15 bp, Homo sapiens
tccctctgtaggagt

SEQ ID NO: 1332238 - DNA, 15 bp, Homo sapiens
atccctctgtaggag

SEQ ID NO: 1332239 - DNA, 15 bp, Homo sapiens
aatccctctgtagga

SEQ ID NO: 1332240 - DNA, 15 bp, Homo sapiens
gaatccctctgtagg

SEQ ID NO: 1332241 - DNA, 15 bp, Homo sapiens
agaatccctctgtag

SEQ ID NO: 1332242 - DNA, 15 bp, Homo sapiens
tagaatccctctgta

SEQ ID NO: 1332243 - DNA, 15 bp, Homo sapiens
atagaatccctctgt

SEQ ID NO: 1332244 - DNA, 15 bp, Homo sapiens
aatagaatccctctg

SEQ ID NO: 1332245 - DNA, 15 bp, Homo sapiens
aaatagaatccctct

SEQ ID NO: 1332246 - DNA, 15 bp, Homo sapiens
gaaatagaatccctc

SEQ ID NO: 1332247 - DNA, 15 bp, Homo sapiens
agaaatagaatccct

SEQ ID NO: 1332248 - DNA, 15 bp, Homo sapiens
cagaaatagaatccc

SEQ ID NO: 1332249 - DNA, 15 bp, Homo sapiens
acagaaatagaatcc

SEQ ID NO: 1332250 - DNA, 15 bp, Homo sapiens
tacagaaatagaatc

SEQ ID NO: 1332251 - DNA, 15 bp, Homo sapiens
ctacagaaatagaat

SEQ ID NO: 1332252 - DNA, 15 bp, Homo sapiens
tctacagaaatagaa

SEQ ID NO: 1332253 - DNA, 15 bp, Homo sapiens
ttctacagaaataga

SEQ ID NO: 1332254 - DNA, 15 bp, Homo sapiens
tttctacagaaatag

SEQ ID NO: 1332255 - DNA, 15 bp, Homo sapiens
atttctacagaaata

SEQ ID NO: 1332256 - DNA, 15 bp, Homo sapiens
aatttctacagaaat

SEQ ID NO: 1332257 - DNA, 15 bp, Homo sapiens
gaatttctacagaaa

SEQ ID NO: 1332258 - DNA, 15 bp, Homo sapiens
agaatttctacagaa

SEQ ID NO: 1332259 - DNA, 15 bp, Homo sapiens
cagaatttctacaga

SEQ ID NO: 1332260 - DNA, 15 bp, Homo sapiens
ccagaatttctacag

SEQ ID NO: 1332261 - DNA, 15 bp, Homo sapiens
tccagaatttctaca

SEQ ID NO: 1332262 - DNA, 15 bp, Homo sapiens
ttccagaatttctac

SEQ ID NO: 1332263 - DNA, 15 bp, Homo sapiens
gttccagaatttcta

SEQ ID NO: 1332264 - DNA, 15 bp, Homo sapiens
agttccagaatttct

SEQ ID NO: 1332265 - DNA, 15 bp, Homo sapiens
tagttccagaatttc

SEQ ID NO: 1332266 - DNA, 15 bp, Homo sapiens
atagttccagaattt

SEQ ID NO: 1332267 - DNA, 15 bp, Homo sapiens
aatagttccagaatt

SEQ ID NO: 1332268 - DNA, 15 bp, Homo sapiens
caatagttccagaat

SEQ ID NO: 1332269 - DNA, 15 bp, Homo sapiens
ccaatagttccagaa

SEQ ID NO: 1332270 - DNA, 15 bp, Homo sapiens
accaatagttccaga

SEQ ID NO: 1332271 - DNA, 15 bp, Homo sapiens
aaccaatagttccag

SEQ ID NO: 1332272 - DNA, 15 bp, Homo sapiens
caaccaatagttcca

SEQ ID NO: 1332273 - DNA, 15 bp, Homo sapiens
acaaccaatagttcc

SEQ ID NO: 1332274 - DNA, 15 bp, Homo sapiens
gacaaccaatagttc

SEQ ID NO: 1332275 - DNA, 15 bp, Homo sapiens
agacaaccaatagtt

SEQ ID NO: 1332276 - DNA, 15 bp, Homo sapiens
gagacaaccaatagt

SEQ ID NO: 1332277 - DNA, 15 bp, Homo sapiens
agagacaaccaatag

SEQ ID NO: 1332278 - DNA, 15 bp, Homo sapiens
cagagacaaccaata

SEQ ID NO: 1332279 - DNA, 15 bp, Homo sapiens
ccagagacaaccaat

SEQ ID NO: 1332280 - DNA, 15 bp, Homo sapiens
tccagagacaaccaa

SEQ ID NO: 1332281 - DNA, 15 bp, Homo sapiens
atccagagacaacca

SEQ ID NO: 1332282 - DNA, 15 bp, Homo sapiens
aatccagagacaacc

SEQ ID NO: 1332283 - DNA, 15 bp, Homo sapiens
caatccagagacaac

SEQ ID NO: 1332284 - DNA, 15 bp, Homo sapiens
acaatccagagacaa

SEQ ID NO: 1332285 - DNA, 15 bp, Homo sapiens
aacaatccagagaca

SEQ ID NO: 1332286 - DNA, 15 bp, Homo sapiens
aaacaatccagagac

SEQ ID NO: 1332287 - DNA, 15 bp, Homo sapiens
caaacaatccagaga

SEQ ID NO: 1332288 - DNA, 15 bp, Homo sapiens
acaaacaatccagag

SEQ ID NO: 1332289 - DNA, 15 bp, Homo sapiens
aacaaacaatccaga

SEQ ID NO: 1332290 - DNA, 15 bp, Homo sapiens
aaacaaacaatccag

SEQ ID NO: 1332291 - DNA, 15 bp, Homo sapiens
caaacaaacaatcca

SEQ ID NO: 1332292 - DNA, 15 bp, Homo sapiens
acaaacaaacaatcc

SEQ ID NO: 1332293 - DNA, 15 bp, Homo sapiens
aacaaacaaacaatc

SEQ ID NO: 1332294 - DNA, 15 bp, Homo sapiens
aaacaaacaaacaat

SEQ ID NO: 1332295 - DNA, 15 bp, Homo sapiens
gaaacaaacaaacaa

SEQ ID NO: 1332296 - DNA, 15 bp, Homo sapiens
ggaaacaaacaaaca

SEQ ID NO: 1332297 - DNA, 15 bp, Homo sapiens
aggaaacaaacaaac

SEQ ID NO: 1332298 - DNA, 15 bp, Homo sapiens
taggaaacaaacaaa

SEQ ID NO: 1332299 - DNA, 15 bp, Homo sapiens
gtaggaaacaaacaa

SEQ ID NO: 1332300 - DNA, 15 bp, Homo sapiens
agtaggaaacaaaca

SEQ ID NO: 1332301 - DNA, 15 bp, Homo sapiens
tagtaggaaacaaac

SEQ ID NO: 1332302 - DNA, 15 bp, Homo sapiens
atagtaggaaacaaa

SEQ ID NO: 1332303 - DNA, 15 bp, Homo sapiens
tatagtaggaaacaa

SEQ ID NO: 1332304 - DNA, 15 bp, Homo sapiens
atatagtaggaaaca

SEQ ID NO: 1332305 - DNA, 15 bp, Homo sapiens
aatatagtaggaaac

SEQ ID NO: 1332306 - DNA, 15 bp, Homo sapiens
aaatatagtaggaaa

SEQ ID NO: 1332307 - DNA, 15 bp, Homo sapiens
gaaatatagtaggaa

SEQ ID NO: 1332308 - DNA, 15 bp, Homo sapiens
tgaaatatagtagga

SEQ ID NO: 1332309 - DNA, 15 bp, Homo sapiens
ttgaaatatagtagg

SEQ ID NO: 1332310 - DNA, 15 bp, Homo sapiens
tttgaaatatagtag

SEQ ID NO: 1332311 - DNA, 15 bp, Homo sapiens
atttgaaatatagta

SEQ ID NO: 1332312 - DNA, 15 bp, Homo sapiens
catttgaaatatagt

SEQ ID NO: 1332313 - DNA, 15 bp, Homo sapiens
tcatttgaaatatag

SEQ ID NO: 1332314 - DNA, 15 bp, Homo sapiens
ctcatttgaaatata

SEQ ID NO: 1332315 - DNA, 15 bp, Homo sapiens
cctcatttgaaatat

SEQ ID NO: 1332316 - DNA, 15 bp, Homo sapiens
tcctcatttgaaata

SEQ ID NO: 1332317 - DNA, 15 bp, Homo sapiens
ttcctcatttgaaat

SEQ ID NO: 1332318 - DNA, 15 bp, Homo sapiens
tttcctcatttgaaa

SEQ ID NO: 1332319 - DNA, 15 bp, Homo sapiens
atttcctcatttgaa

SEQ ID NO: 1332320 - DNA, 15 bp, Homo sapiens
aatttcctcatttga

SEQ ID NO: 1332321 - DNA, 15 bp, Homo sapiens
taatttcctcatttg

SEQ ID NO: 1332322 - DNA, 15 bp, Homo sapiens
ctaatttcctcattt

SEQ ID NO: 1332323 - DNA, 15 bp, Homo sapiens
tctaatttcctcatt

SEQ ID NO: 1332324 - DNA, 15 bp, Homo sapiens
ttctaatttcctcat

SEQ ID NO: 1332325 - DNA, 15 bp, Homo sapiens
cttctaatttcctca

SEQ ID NO: 1332326 - DNA, 15 bp, Homo sapiens
ccttctaatttcctc

SEQ ID NO: 1332327 - DNA, 15 bp, Homo sapiens
cccttctaatttcct

SEQ ID NO: 1332328 - DNA, 15 bp, Homo sapiens
ccccttctaatttcc

SEQ ID NO: 1332329 - DNA, 15 bp, Homo sapiens
cccccttctaatttc

SEQ ID NO: 1332330 - DNA, 15 bp, Homo sapiens
tcccccttctaattt

SEQ ID NO: 1332331 - DNA, 15 bp, Homo sapiens
ttcccccttctaatt

SEQ ID NO: 1332332 - DNA, 15 bp, Homo sapiens
tttcccccttctaat

SEQ ID NO: 1332333 - DNA, 15 bp, Homo sapiens
ttttcccccttctaa

SEQ ID NO: 1332334 - DNA, 15 bp, Homo sapiens
cttttcccccttcta

SEQ ID NO: 1332335 - DNA, 15 bp, Homo sapiens
tcttttcccccttct

SEQ ID NO: 1332336 - DNA, 15 bp, Homo sapiens
ttcttttcccccttc

SEQ ID NO: 1332337 - DNA, 15 bp, Homo sapiens
tttcttttccccctt

SEQ ID NO: 1332338 - DNA, 15 bp, Homo sapiens
gtttcttttccccct

SEQ ID NO: 1332339 - DNA, 15 bp, Homo sapiens
ggtttcttttccccc

SEQ ID NO: 1332340 - DNA, 15 bp, Homo sapiens
aggtttcttttcccc

SEQ ID NO: 1332341 - DNA, 15 bp, Homo sapiens
caggtttcttttccc

SEQ ID NO: 1332342 - DNA, 15 bp, Homo sapiens
tcaggtttcttttcc

SEQ ID NO: 1332343 - DNA, 15 bp, Homo sapiens
gtcaggtttcttttc

SEQ ID NO: 1332344 - DNA, 15 bp, Homo sapiens
tgtcaggtttctttt

SEQ ID NO: 1332345 - DNA, 15 bp, Homo sapiens
atgtcaggtttcttt

SEQ ID NO: 1332346 - DNA, 15 bp, Homo sapiens
gatgtcaggtttctt

SEQ ID NO: 1332347 - DNA, 15 bp, Homo sapiens
ggatgtcaggtttct

SEQ ID NO: 1332348 - DNA, 15 bp, Homo sapiens
tggatgtcaggtttc

SEQ ID NO: 1332349 - DNA, 15 bp, Homo sapiens
ctggatgtcaggttt

SEQ ID NO: 1332350 - DNA, 15 bp, Homo sapiens
tctggatgtcaggtt

SEQ ID NO: 1332351 - DNA, 15 bp, Homo sapiens
ttctggatgtcaggt

SEQ ID NO: 1332352 - DNA, 15 bp, Homo sapiens
cttctggatgtcagg

SEQ ID NO: 1332353 - DNA, 15 bp, Homo sapiens
tcttctggatgtcag

SEQ ID NO: 1332354 - DNA, 15 bp, Homo sapiens
ttcttctggatgtca

SEQ ID NO: 1332355 - DNA, 15 bp, Homo sapiens
tttcttctggatgtc

SEQ ID NO: 1332356 - DNA, 15 bp, Homo sapiens
ttttcttctggatgt

SEQ ID NO: 1332357 - DNA, 15 bp, Homo sapiens
attttcttctggatg

SEQ ID NO: 1332358 - DNA, 15 bp, Homo sapiens
tattttcttctggat

SEQ ID NO: 1332359 - DNA, 15 bp, Homo sapiens
ttattttcttctgga

SEQ ID NO: 1332360 - DNA, 15 bp, Homo sapiens
attattttcttctgg

SEQ ID NO: 1332361 - DNA, 15 bp, Homo sapiens
tattattttcttctg

SEQ ID NO: 1332362 - DNA, 15 bp, Homo sapiens
gtattattttcttct

SEQ ID NO: 1332363 - DNA, 15 bp, Homo sapiens
ggtattattttcttc

SEQ ID NO: 1332364 - DNA, 15 bp, Homo sapiens
aggtattattttctt

SEQ ID NO: 1332365 - DNA, 15 bp, Homo sapiens
taggtattattttct

SEQ ID NO: 1332366 - DNA, 15 bp, Homo sapiens
ttaggtattattttc

SEQ ID NO: 1332367 - DNA, 15 bp, Homo sapiens
attaggtattatttt

SEQ ID NO: 1332368 - DNA, 15 bp, Homo sapiens
aattaggtattattt

SEQ ID NO: 1332369 - DNA, 15 bp, Homo sapiens
aaattaggtattatt

SEQ ID NO: 1332370 - DNA, 15 bp, Homo sapiens
aaaattaggtattat

SEQ ID NO: 1332371 - DNA, 15 bp, Homo sapiens
taaaattaggtatta

SEQ ID NO: 1332372 - DNA, 15 bp, Homo sapiens
ctaaaattaggtatt

SEQ ID NO: 1332373 - DNA, 15 bp, Homo sapiens
tctaaaattaggtat

SEQ ID NO: 1332374 - DNA, 15 bp, Homo sapiens
ctctaaaattaggta

SEQ ID NO: 1332375 - DNA, 15 bp, Homo sapiens
cctctaaaattaggt

SEQ ID NO: 1332376 - DNA, 15 bp, Homo sapiens
gcctctaaaattagg

SEQ ID NO: 1332377 - DNA, 15 bp, Homo sapiens
ggcctctaaaattag

SEQ ID NO: 1332378 - DNA, 15 bp, Homo sapiens
tggcctctaaaatta

SEQ ID NO: 1332379 - DNA, 15 bp, Homo sapiens
gtggcctctaaaatt

SEQ ID NO: 1332380 - DNA, 15 bp, Homo sapiens
tgtggcctctaaaat

SEQ ID NO: 1332381 - DNA, 15 bp, Homo sapiens
atgtggcctctaaaa

SEQ ID NO: 1332382 - DNA, 15 bp, Homo sapiens
aatgtggcctctaaa

SEQ ID NO: 1332383 - DNA, 15 bp, Homo sapiens
aaatgtggcctctaa

SEQ ID NO: 1332384 - DNA, 15 bp, Homo sapiens
aaaatgtggcctcta

SEQ ID NO: 1332385 - DNA, 15 bp, Homo sapiens
gaaaatgtggcctct

SEQ ID NO: 1332386 - DNA, 15 bp, Homo sapiens
tgaaaatgtggcctc

SEQ ID NO: 1332387 - DNA, 15 bp, Homo sapiens
atgaaaatgtggcct

SEQ ID NO: 1332388 - DNA, 15 bp, Homo sapiens
gatgaaaatgtggcc

SEQ ID NO: 1332389 - DNA, 15 bp, Homo sapiens
cgatgaaaatgtggc

SEQ ID NO: 1332390 - DNA, 15 bp, Homo sapiens
gcgatgaaaatgtgg

SEQ ID NO: 1332391 - DNA, 15 bp, Homo sapiens
tgcgatgaaaatgtg

SEQ ID NO: 1332392 - DNA, 15 bp, Homo sapiens
atgcgatgaaaatgt

SEQ ID NO: 1332393 - DNA, 15 bp, Homo sapiens
aatgcgatgaaaatg

SEQ ID NO: 1332394 - DNA, 15 bp, Homo sapiens
aaatgcgatgaaaat

SEQ ID NO: 1332395 - DNA, 15 bp, Homo sapiens
aaaatgcgatgaaaa

SEQ ID NO: 1332396 - DNA, 15 bp, Homo sapiens
caaaatgcgatgaaa

SEQ ID NO: 1332397 - DNA, 15 bp, Homo sapiens
tcaaaatgcgatgaa

SEQ ID NO: 1332398 - DNA, 15 bp, Homo sapiens
gtcaaaatgcgatga

SEQ ID NO: 1332399 - DNA, 15 bp, Homo sapiens
tgtcaaaatgcgatg

SEQ ID NO: 1332400 - DNA, 15 bp, Homo sapiens
ctgtcaaaatgcgat

SEQ ID NO: 1332401 - DNA, 15 bp, Homo sapiens
cctgtcaaaatgcga

SEQ ID NO: 1332402 - DNA, 15 bp, Homo sapiens
tcctgtcaaaatgcg

SEQ ID NO: 1332403 - DNA, 15 bp, Homo sapiens
atcctgtcaaaatgc

SEQ ID NO: 1332404 - DNA, 15 bp, Homo sapiens
aatcctgtcaaaatg

SEQ ID NO: 1332405 - DNA, 15 bp, Homo sapiens
caatcctgtcaaaat

SEQ ID NO: 1332406 - DNA, 15 bp, Homo sapiens
ccaatcctgtcaaaa

SEQ ID NO: 1332407 - DNA, 15 bp, Homo sapiens
accaatcctgtcaaa

SEQ ID NO: 1332408 - DNA, 15 bp, Homo sapiens
gaccaatcctgtcaa

SEQ ID NO: 1332409 - DNA, 15 bp, Homo sapiens
ggaccaatcctgtca

SEQ ID NO: 1332410 - DNA, 15 bp, Homo sapiens
gggaccaatcctgtc

SEQ ID NO: 1332411 - DNA, 15 bp, Homo sapiens
tgggaccaatcctgt

SEQ ID NO: 1332412 - DNA, 15 bp, Homo sapiens
atgggaccaatcctg

SEQ ID NO: 1332413 - DNA, 15 bp, Homo sapiens
aatgggaccaatcct

SEQ ID NO: 1332414 - DNA, 15 bp, Homo sapiens
aaatgggaccaatcc

SEQ ID NO: 1332415 - DNA, 15 bp, Homo sapiens
gaaatgggaccaatc

SEQ ID NO: 1332416 - DNA, 15 bp, Homo sapiens
agaaatgggaccaat

SEQ ID NO: 1332417 - DNA, 15 bp, Homo sapiens
gagaaatgggaccaa

SEQ ID NO: 1332418 - DNA, 15 bp, Homo sapiens
ggagaaatgggacca

SEQ ID NO: 1332419 - DNA, 15 bp, Homo sapiens
gggagaaatgggacc

SEQ ID NO: 1332420 - DNA, 15 bp, Homo sapiens
agggagaaatgggac

SEQ ID NO: 1332421 - DNA, 15 bp, Homo sapiens
gagggagaaatggga

SEQ ID NO: 1332422 - DNA, 15 bp, Homo sapiens
agagggagaaatggg

SEQ ID NO: 1332423 - DNA, 15 bp, Homo sapiens
gagagggagaaatgg

SEQ ID NO: 1332424 - DNA, 15 bp, Homo sapiens
agagagggagaaatg

SEQ ID NO: 1332425 - DNA, 15 bp, Homo sapiens
cagagagggagaaat

SEQ ID NO: 1332426 - DNA, 15 bp, Homo sapiens
acagagagggagaaa

SEQ ID NO: 1332427 - DNA, 15 bp, Homo sapiens
cacagagagggagaa

SEQ ID NO: 1332428 - DNA, 15 bp, Homo sapiens
tcacagagagggaga

SEQ ID NO: 1332429 - DNA, 15 bp, Homo sapiens
ttcacagagagggag

SEQ ID NO: 1332430 - DNA, 15 bp, Homo sapiens
cttcacagagaggga

SEQ ID NO: 1332431 - DNA, 15 bp, Homo sapiens
tcttcacagagaggg

SEQ ID NO: 1332432 - DNA, 15 bp, Homo sapiens
atcttcacagagagg

SEQ ID NO: 1332433 - DNA, 15 bp, Homo sapiens
catcttcacagagag

SEQ ID NO: 1332434 - DNA, 15 bp, Homo sapiens
tcatcttcacagaga

SEQ ID NO: 1332435 - DNA, 15 bp, Homo sapiens
atcatcttcacagag

SEQ ID NO: 1332436 - DNA, 15 bp, Homo sapiens
gatcatcttcacaga

SEQ ID NO: 1332437 - DNA, 15 bp, Homo sapiens
tgatcatcttcacag

SEQ ID NO: 1332438 - DNA, 15 bp, Homo sapiens
atgatcatcttcaca

SEQ ID NO: 1332439 - DNA, 15 bp, Homo sapiens
aatgatcatcttcac

SEQ ID NO: 1332440 - DNA, 15 bp, Homo sapiens
gaatgatcatcttca

SEQ ID NO: 1332441 - DNA, 15 bp, Homo sapiens
tgaatgatcatcttc

SEQ ID NO: 1332442 - DNA, 15 bp, Homo sapiens
gtgaatgatcatctt

SEQ ID NO: 1332443 - DNA, 15 bp, Homo sapiens
agtgaatgatcatct

SEQ ID NO: 1332444 - DNA, 15 bp, Homo sapiens
cagtgaatgatcatc

SEQ ID NO: 1332445 - DNA, 15 bp, Homo sapiens
ccagtgaatgatcat

SEQ ID NO: 1332446 - DNA, 15 bp, Homo sapiens
accagtgaatgatca

SEQ ID NO: 1332447 - DNA, 15 bp, Homo sapiens
aaccagtgaatgatc

SEQ ID NO: 1332448 - DNA, 15 bp, Homo sapiens
aaaccagtgaatgat

SEQ ID NO: 1332449 - DNA, 15 bp, Homo sapiens
taaaccagtgaatga

SEQ ID NO: 1332450 - DNA, 15 bp, Homo sapiens
ttaaaccagtgaatg

SEQ ID NO: 1332451 - DNA, 15 bp, Homo sapiens
gttaaaccagtgaat

SEQ ID NO: 1332452 - DNA, 15 bp, Homo sapiens
agttaaaccagtgaa

SEQ ID NO: 1332453 - DNA, 15 bp, Homo sapiens
aagttaaaccagtga

SEQ ID NO: 1332454 - DNA, 15 bp, Homo sapiens
aaagttaaaccagtg

SEQ ID NO: 1332455 - DNA, 15 bp, Homo sapiens
caaagttaaaccagt

SEQ ID NO: 1332456 - DNA, 15 bp, Homo sapiens
gcaaagttaaaccag

SEQ ID NO: 1332457 - DNA, 15 bp, Homo sapiens
agcaaagttaaacca

SEQ ID NO: 1332458 - DNA, 15 bp, Homo sapiens
aagcaaagttaaacc

SEQ ID NO: 1332459 - DNA, 15 bp, Homo sapiens
gaagcaaagttaaac

SEQ ID NO: 1332460 - DNA, 15 bp, Homo sapiens
tgaagcaaagttaaa

SEQ ID NO: 1332461 - DNA, 15 bp, Homo sapiens
atgaagcaaagttaa

SEQ ID NO: 1332462 - DNA, 15 bp, Homo sapiens
catgaagcaaagtta

SEQ ID NO: 1332463 - DNA, 15 bp, Homo sapiens
ccatgaagcaaagtt

SEQ ID NO: 1332464 - DNA, 15 bp, Homo sapiens
accatgaagcaaagt

SEQ ID NO: 1332465 - DNA, 15 bp, Homo sapiens
caccatgaagcaaag

SEQ ID NO: 1332466 - DNA, 15 bp, Homo sapiens
ccaccatgaagcaaa

SEQ ID NO: 1332467 - DNA, 15 bp, Homo sapiens
accaccatgaagcaa

SEQ ID NO: 1332468 - DNA, 15 bp, Homo sapiens
aaccaccatgaagca

SEQ ID NO: 1332469 - DNA, 15 bp, Homo sapiens
aaaccaccatgaagc

SEQ ID NO: 1332470 - DNA, 15 bp, Homo sapiens
aaaaccaccatgaag

SEQ ID NO: 1332471 - DNA, 15 bp, Homo sapiens
taaaaccaccatgaa

SEQ ID NO: 1332472 - DNA, 15 bp, Homo sapiens
ataaaaccaccatga

SEQ ID NO: 1332473 - DNA, 15 bp, Homo sapiens
gataaaaccaccatg

SEQ ID NO: 1332474 - DNA, 15 bp, Homo sapiens
agataaaaccaccat

SEQ ID NO: 1332475 - DNA, 15 bp, Homo sapiens
cagataaaaccacca

SEQ ID NO: 1332476 - DNA, 15 bp, Homo sapiens
acagataaaaccacc

SEQ ID NO: 1332477 - DNA, 15 bp, Homo sapiens
cacagataaaaccac

SEQ ID NO: 1332478 - DNA, 15 bp, Homo sapiens
acacagataaaacca

SEQ ID NO: 1332479 - DNA, 15 bp, Homo sapiens
cacacagataaaacc

SEQ ID NO: 1332480 - DNA, 15 bp, Homo sapiens
ccacacagataaaac

SEQ ID NO: 1332481 - DNA, 15 bp, Homo sapiens
accacacagataaaa

SEQ ID NO: 1332482 - DNA, 15 bp, Homo sapiens
caccacacagataaa

SEQ ID NO: 1332483 - DNA, 15 bp, Homo sapiens
gcaccacacagataa

SEQ ID NO: 1332484 - DNA, 15 bp, Homo sapiens
agcaccacacagata

SEQ ID NO: 1332485 - DNA, 15 bp, Homo sapiens
aagcaccacacagat

SEQ ID NO: 1332486 - DNA, 15 bp, Homo sapiens
caagcaccacacaga

SEQ ID NO: 1332487 - DNA, 15 bp, Homo sapiens
ccaagcaccacacag

SEQ ID NO: 1332488 - DNA, 15 bp, Homo sapiens
cccaagcaccacaca

SEQ ID NO: 1332489 - DNA, 15 bp, Homo sapiens
tcccaagcaccacac

SEQ ID NO: 1332490 - DNA, 15 bp, Homo sapiens
ttcccaagcaccaca

SEQ ID NO: 1332491 - DNA, 15 bp, Homo sapiens
gttcccaagcaccac

SEQ ID NO: 1332492 - DNA, 15 bp, Homo sapiens
tgttcccaagcacca

SEQ ID NO: 1332493 - DNA, 15 bp, Homo sapiens
ctgttcccaagcacc

SEQ ID NO: 1332494 - DNA, 15 bp, Homo sapiens
gctgttcccaagcac

SEQ ID NO: 1332495 - DNA, 15 bp, Homo sapiens
ggctgttcccaagca

SEQ ID NO: 1332496 - DNA, 15 bp, Homo sapiens
tggctgttcccaagc

SEQ ID NO: 1332497 - DNA, 15 bp, Homo sapiens
atggctgttcccaag

SEQ ID NO: 1332498 - DNA, 15 bp, Homo sapiens
catggctgttcccaa

SEQ ID NO: 1332499 - DNA, 15 bp, Homo sapiens
acatggctgttccca

SEQ ID NO: 1332500 - DNA, 15 bp, Homo sapiens
cacatggctgttccc

SEQ ID NO: 1332501 - DNA, 15 bp, Homo sapiens
tcacatggctgttcc

SEQ ID NO: 1332502 - DNA, 15 bp, Homo sapiens
ctcacatggctgttc

SEQ ID NO: 1332503 - DNA, 15 bp, Homo sapiens
cctcacatggctgtt

SEQ ID NO: 1332504 - DNA, 15 bp, Homo sapiens
gcctcacatggctgt

SEQ ID NO: 1332505 - DNA, 15 bp, Homo sapiens
agcctcacatggctg

SEQ ID NO: 1332506 - DNA, 15 bp, Homo sapiens
gagcctcacatggct

SEQ ID NO: 1332507 - DNA, 15 bp, Homo sapiens
agagcctcacatggc

SEQ ID NO: 1332508 - DNA, 15 bp, Homo sapiens
gagagcctcacatgg

SEQ ID NO: 1332509 - DNA, 15 bp, Homo sapiens
agagagcctcacatg

SEQ ID NO: 1332510 - DNA, 15 bp, Homo sapiens
cagagagcctcacat

SEQ ID NO: 1332511 - DNA, 15 bp, Homo sapiens
acagagagcctcaca

SEQ ID NO: 1332512 - DNA, 15 bp, Homo sapiens
cacagagagcctcac

SEQ ID NO: 1332513 - DNA, 15 bp, Homo sapiens
acacagagagcctca

SEQ ID NO: 1332514 - DNA, 15 bp, Homo sapiens
tacacagagagcctc

SEQ ID NO: 1332515 - DNA, 15 bp, Homo sapiens
ctacacagagagcct

SEQ ID NO: 1332516 - DNA, 15 bp, Homo sapiens
tctacacagagagcc

SEQ ID NO: 1332517 - DNA, 15 bp, Homo sapiens
atctacacagagagc

SEQ ID NO: 1332518 - DNA, 15 bp, Homo sapiens
tatctacacagagag

SEQ ID NO: 1332519 - DNA, 15 bp, Homo sapiens
ttatctacacagaga

SEQ ID NO: 1332520 - DNA, 15 bp, Homo sapiens
gttatctacacagag

SEQ ID NO: 1332521 - DNA, 15 bp, Homo sapiens
agttatctacacaga

SEQ ID NO: 1332522 - DNA, 15 bp, Homo sapiens
gagttatctacacag

SEQ ID NO: 1332523 - DNA, 15 bp, Homo sapiens
tgagttatctacaca

SEQ ID NO: 1332524 - DNA, 15 bp, Homo sapiens
ttgagttatctacac

SEQ ID NO: 1332525 - DNA, 15 bp, Homo sapiens
cttgagttatctaca

SEQ ID NO: 1332526 - DNA, 15 bp, Homo sapiens
ccttgagttatctac

SEQ ID NO: 1332527 - DNA, 15 bp, Homo sapiens
accttgagttatcta

SEQ ID NO: 1332528 - DNA, 15 bp, Homo sapiens
taccttgagttatct

SEQ ID NO: 1332529 - DNA, 15 bp, Homo sapiens
ttaccttgagttatc

SEQ ID NO: 1332530 - DNA, 15 bp, Homo sapiens
gttaccttgagttat

SEQ ID NO: 1332531 - DNA, 15 bp, Homo sapiens
agttaccttgagtta

SEQ ID NO: 1332532 - DNA, 15 bp, Homo sapiens
cagttaccttgagtt

SEQ ID NO: 1332533 - DNA, 15 bp, Homo sapiens
acagttaccttgagt

SEQ ID NO: 1332534 - DNA, 15 bp, Homo sapiens
aacagttaccttgag

SEQ ID NO: 1332535 - DNA, 15 bp, Homo sapiens
aaacagttaccttga

SEQ ID NO: 1332536 - DNA, 15 bp, Homo sapiens
caaacagttaccttg

SEQ ID NO: 1332537 - DNA, 15 bp, Homo sapiens
gcaaacagttacctt

SEQ ID NO: 1332538 - DNA, 15 bp, Homo sapiens
agcaaacagttacct

SEQ ID NO: 1332539 - DNA, 15 bp, Homo sapiens
aagcaaacagttacc

SEQ ID NO: 1332540 - DNA, 15 bp, Homo sapiens
aaagcaaacagttac

SEQ ID NO: 1332541 - DNA, 15 bp, Homo sapiens
caaagcaaacagtta

SEQ ID NO: 1332542 - DNA, 15 bp, Homo sapiens
tcaaagcaaacagtt

SEQ ID NO: 1332543 - DNA, 15 bp, Homo sapiens
ttcaaagcaaacagt

SEQ ID NO: 1332544 - DNA, 15 bp, Homo sapiens
tttcaaagcaaacag

SEQ ID NO: 1332545 - DNA, 15 bp, Homo sapiens
ttttcaaagcaaaca

SEQ ID NO: 1332546 - DNA, 15 bp, Homo sapiens
gttttcaaagcaaac

SEQ ID NO: 1332547 - DNA, 15 bp, Homo sapiens
tgttttcaaagcaaa

SEQ ID NO: 1332548 - DNA, 15 bp, Homo sapiens
atgttttcaaagcaa

SEQ ID NO: 1332549 - DNA, 15 bp, Homo sapiens
tatgttttcaaagca

SEQ ID NO: 1332550 - DNA, 15 bp, Homo sapiens
ttatgttttcaaagc

SEQ ID NO: 1332551 - DNA, 15 bp, Homo sapiens
tttatgttttcaaag

SEQ ID NO: 1332552 - DNA, 15 bp, Homo sapiens
ttttatgttttcaaa

SEQ ID NO: 1332553 - DNA, 15 bp, Homo sapiens
tttttatgttttcaa

SEQ ID NO: 1332554 - DNA, 15 bp, Homo sapiens
atttttatgttttca

SEQ ID NO: 1332555 - DNA, 15 bp, Homo sapiens
tatttttatgttttc

SEQ ID NO: 1332556 - DNA, 15 bp, Homo sapiens
ctatttttatgtttt

SEQ ID NO: 1332557 - DNA, 15 bp, Homo sapiens
tctatttttatgttt

SEQ ID NO: 1332558 - DNA, 15 bp, Homo sapiens
ttctatttttatgtt

SEQ ID NO: 1332559 - DNA, 15 bp, Homo sapiens
gttctatttttatgt

SEQ ID NO: 1332560 - DNA, 15 bp, Homo sapiens
tgttctatttttatg

SEQ ID NO: 1332561 - DNA, 15 bp, Homo sapiens
ctgttctatttttat

SEQ ID NO: 1332562 - DNA, 15 bp, Homo sapiens
gctgttctattttta

SEQ ID NO: 1332563 - DNA, 15 bp, Homo sapiens
tgctgttctattttt

SEQ ID NO: 1332564 - DNA, 15 bp, Homo sapiens
gtgctgttctatttt

SEQ ID NO: 1332565 - DNA, 15 bp, Homo sapiens
tgtgctgttctattt

SEQ ID NO: 1332566 - DNA, 15 bp, Homo sapiens
ctgtgctgttctatt

SEQ ID NO: 1332567 - DNA, 15 bp, Homo sapiens
cctgtgctgttctat

SEQ ID NO: 1332568 - DNA, 15 bp, Homo sapiens
tcctgtgctgttcta

SEQ ID NO: 1332569 - DNA, 15 bp, Homo sapiens
gtcctgtgctgttct

SEQ ID NO: 1332570 - DNA, 15 bp, Homo sapiens
agtcctgtgctgttc

SEQ ID NO: 1332571 - DNA, 15 bp, Homo sapiens
gagtcctgtgctgtt

SEQ ID NO: 1332572 - DNA, 15 bp, Homo sapiens
tgagtcctgtgctgt

SEQ ID NO: 1332573 - DNA, 15 bp, Homo sapiens
atgagtcctgtgctg

SEQ ID NO: 1332574 - DNA, 15 bp, Homo sapiens
aatgagtcctgtgct

SEQ ID NO: 1332575 - DNA, 15 bp, Homo sapiens
aaatgagtcctgtgc

SEQ ID NO: 1332576 - DNA, 15 bp, Homo sapiens
gaaatgagtcctgtg

SEQ ID NO: 1332577 - DNA, 15 bp, Homo sapiens
agaaatgagtcctgt

SEQ ID NO: 1332578 - DNA, 15 bp, Homo sapiens
gagaaatgagtcctg

SEQ ID NO: 1332579 - DNA, 15 bp, Homo sapiens
agagaaatgagtcct

SEQ ID NO: 1332580 - DNA, 15 bp, Homo sapiens
cagagaaatgagtcc

SEQ ID NO: 1332581 - DNA, 15 bp, Homo sapiens
acagagaaatgagtc

SEQ ID NO: 1332582 - DNA, 15 bp, Homo sapiens
aacagagaaatgagt

SEQ ID NO: 1332583 - DNA, 15 bp, Homo sapiens
caacagagaaatgag

SEQ ID NO: 1332584 - DNA, 15 bp, Homo sapiens
ccaacagagaaatga

SEQ ID NO: 1332585 - DNA, 15 bp, Homo sapiens
tccaacagagaaatg

SEQ ID NO: 1332586 - DNA, 15 bp, Homo sapiens
ttccaacagagaaat

SEQ ID NO: 1332587 - DNA, 15 bp, Homo sapiens
attccaacagagaaa

SEQ ID NO: 1332588 - DNA, 15 bp, Homo sapiens
cattccaacagagaa

SEQ ID NO: 1332589 - DNA, 15 bp, Homo sapiens
tcattccaacagaga

SEQ ID NO: 1332590 - DNA, 15 bp, Homo sapiens
ttcattccaacagag

SEQ ID NO: 1332591 - DNA, 15 bp, Homo sapiens
attcattccaacaga

SEQ ID NO: 1332592 - DNA, 15 bp, Homo sapiens
gattcattccaacag

SEQ ID NO: 1332593 - DNA, 15 bp, Homo sapiens
tgattcattccaaca

SEQ ID NO: 1332594 - DNA, 15 bp, Homo sapiens
ttgattcattccaac

SEQ ID NO: 1332595 - DNA, 15 bp, Homo sapiens
tttgattcattccaa

SEQ ID NO: 1332596 - DNA, 15 bp, Homo sapiens
ttttgattcattcca

SEQ ID NO: 1332597 - DNA, 15 bp, Homo sapiens
cttttgattcattcc

SEQ ID NO: 1332598 - DNA, 15 bp, Homo sapiens
tcttttgattcattc

SEQ ID NO: 1332599 - DNA, 15 bp, Homo sapiens
ttcttttgattcatt

SEQ ID NO: 1332600 - DNA, 15 bp, Homo sapiens
tttcttttgattcat

SEQ ID NO: 1332601 - DNA, 15 bp, Homo sapiens
ttttcttttgattca

SEQ ID NO: 1332602 - DNA, 15 bp, Homo sapiens
cttttcttttgattc

SEQ ID NO: 1332603 - DNA, 15 bp, Homo sapiens
acttttcttttgatt

SEQ ID NO: 1332604 - DNA, 15 bp, Homo sapiens
aacttttcttttgat

SEQ ID NO: 1332605 - DNA, 15 bp, Homo sapiens
caacttttcttttga

SEQ ID NO: 1332606 - DNA, 15 bp, Homo sapiens
tcaacttttcttttg

SEQ ID NO: 1332607 - DNA, 15 bp, Homo sapiens
gtcaacttttctttt

SEQ ID NO: 1332608 - DNA, 15 bp, Homo sapiens
tgtcaacttttcttt

SEQ ID NO: 1332609 - DNA, 15 bp, Homo sapiens
ctgtcaacttttctt

SEQ ID NO: 1332610 - DNA, 15 bp, Homo sapiens
tctgtcaacttttct

SEQ ID NO: 1332611 - DNA, 15 bp, Homo sapiens
ctctgtcaacttttc

SEQ ID NO: 1332612 - DNA, 15 bp, Homo sapiens
tctctgtcaactttt

SEQ ID NO: 1332613 - DNA, 15 bp, Homo sapiens
ttctctgtcaacttt

SEQ ID NO: 1332614 - DNA, 15 bp, Homo sapiens
tttctctgtcaactt

SEQ ID NO: 1332615 - DNA, 15 bp, Homo sapiens
atttctctgtcaact

SEQ ID NO: 1332616 - DNA, 15 bp, Homo sapiens
tatttctctgtcaac

SEQ ID NO: 1332617 - DNA, 15 bp, Homo sapiens
ttatttctctgtcaa

SEQ ID NO: 1332618 - DNA, 15 bp, Homo sapiens
tttatttctctgtca

SEQ ID NO: 1332619 - DNA, 15 bp, Homo sapiens
ctttatttctctgtc

SEQ ID NO: 1332620 - DNA, 15 bp, Homo sapiens
actttatttctctgt

SEQ ID NO: 1332621 - DNA, 15 bp, Homo sapiens
aactttatttctctg

SEQ ID NO: 1332622 - DNA, 15 bp, Homo sapiens
aaactttatttctct

SEQ ID NO: 1332623 - DNA, 15 bp, Homo sapiens
taaactttatttctc

SEQ ID NO: 1332624 - DNA, 15 bp, Homo sapiens
ataaactttatttct

SEQ ID NO: 1332625 - DNA, 15 bp, Homo sapiens
cataaactttatttc

SEQ ID NO: 1332626 - DNA, 15 bp, Homo sapiens
acataaactttattt

SEQ ID NO: 1332627 - DNA, 15 bp, Homo sapiens
tacataaactttatt

SEQ ID NO: 1332628 - DNA, 15 bp, Homo sapiens
gtacataaactttat

SEQ ID NO: 1332629 - DNA, 15 bp, Homo sapiens
tgtacataaacttta

SEQ ID NO: 1332630 - DNA, 15 bp, Homo sapiens
ttgtacataaacttt

SEQ ID NO: 1332631 - DNA, 15 bp, Homo sapiens
tttgtacataaactt

SEQ ID NO: 1332632 - DNA, 15 bp, Homo sapiens
ctttgtacataaact

SEQ ID NO: 1332633 - DNA, 15 bp, Homo sapiens
cctttgtacataaac

SEQ ID NO: 1332634 - DNA, 15 bp, Homo sapiens
tcctttgtacataaa

SEQ ID NO: 1332635 - DNA, 15 bp, Homo sapiens
ctcctttgtacataa

SEQ ID NO: 1332636 - DNA, 15 bp, Homo sapiens
tctcctttgtacata

SEQ ID NO: 1332637 - DNA, 15 bp, Homo sapiens
ttctcctttgtacat

SEQ ID NO: 1332638 - DNA, 15 bp, Homo sapiens
cttctcctttgtaca

SEQ ID NO: 1332639 - DNA, 15 bp, Homo sapiens
ccttctcctttgtac

SEQ ID NO: 1332640 - DNA, 15 bp, Homo sapiens
tccttctcctttgta

SEQ ID NO: 1332641 - DNA, 15 bp, Homo sapiens
ttccttctcctttgt

SEQ ID NO: 1332642 - DNA, 15 bp, Homo sapiens
cttccttctcctttg

SEQ ID NO: 1332643 - DNA, 15 bp, Homo sapiens
ccttccttctccttt

SEQ ID NO: 1332644 - DNA, 15 bp, Homo sapiens
accttccttctcctt

SEQ ID NO: 1332645 - DNA, 15 bp, Homo sapiens
aaccttccttctcct

SEQ ID NO: 1332646 - DNA, 15 bp, Homo sapiens
aaaccttccttctcc

SEQ ID NO: 1332647 - DNA, 15 bp, Homo sapiens
taaaccttccttctc

SEQ ID NO: 1332648 - DNA, 15 bp, Homo sapiens
ctaaaccttccttct

SEQ ID NO: 1332649 - DNA, 15 bp, Homo sapiens
tctaaaccttccttc

SEQ ID NO: 1332650 - DNA, 15 bp, Homo sapiens
atctaaaccttcctt

SEQ ID NO: 1332651 - DNA, 15 bp, Homo sapiens
tatctaaaccttcct

SEQ ID NO: 1332652 - DNA, 15 bp, Homo sapiens
ttatctaaaccttcc

SEQ ID NO: 1332653 - DNA, 15 bp, Homo sapiens
gttatctaaaccttc

SEQ ID NO: 1332654 - DNA, 15 bp, Homo sapiens
tgttatctaaacctt

SEQ ID NO: 1332655 - DNA, 15 bp, Homo sapiens
atgttatctaaacct

SEQ ID NO: 1332656 - DNA, 15 bp, Homo sapiens
tatgttatctaaacc

SEQ ID NO: 1332657 - DNA, 15 bp, Homo sapiens
atatgttatctaaac

SEQ ID NO: 1332658 - DNA, 15 bp, Homo sapiens
tatatgttatctaaa

SEQ ID NO: 1332659 - DNA, 15 bp, Homo sapiens
gtatatgttatctaa

SEQ ID NO: 1332660 - DNA, 15 bp, Homo sapiens
ggtatatgttatcta

SEQ ID NO: 1332661 - DNA, 15 bp, Homo sapiens
gggtatatgttatct

SEQ ID NO: 1332662 - DNA, 15 bp, Homo sapiens
tgggtatatgttatc

SEQ ID NO: 1332663 - DNA, 15 bp, Homo sapiens
ttgggtatatgttat

SEQ ID NO: 1332664 - DNA, 15 bp, Homo sapiens
tttgggtatatgtta

SEQ ID NO: 1332665 - DNA, 15 bp, Homo sapiens
atttgggtatatgtt

SEQ ID NO: 1332666 - DNA, 15 bp, Homo sapiens
tatttgggtatatgt

SEQ ID NO: 1332667 - DNA, 15 bp, Homo sapiens
atatttgggtatatg

SEQ ID NO: 1332668 - DNA, 15 bp, Homo sapiens
catatttgggtatat

SEQ ID NO: 1332669 - DNA, 15 bp, Homo sapiens
tcatatttgggtata

SEQ ID NO: 1332670 - DNA, 15 bp, Homo sapiens
ctcatatttgggtat

SEQ ID NO: 1332671 - DNA, 15 bp, Homo sapiens
tctcatatttgggta

SEQ ID NO: 1332672 - DNA, 15 bp, Homo sapiens
ttctcatatttgggt

SEQ ID NO: 1332673 - DNA, 15 bp, Homo sapiens
tttctcatatttggg

SEQ ID NO: 1332674 - DNA, 15 bp, Homo sapiens
ttttctcatatttgg

SEQ ID NO: 1332675 - DNA, 15 bp, Homo sapiens
attttctcatatttg

SEQ ID NO: 1332676 - DNA, 15 bp, Homo sapiens
aattttctcatattt

SEQ ID NO: 1332677 - DNA, 15 bp, Homo sapiens
aaattttctcatatt

SEQ ID NO: 1332678 - DNA, 15 bp, Homo sapiens
aaaattttctcatat

SEQ ID NO: 1332679 - DNA, 15 bp, Homo sapiens
aaaaattttctcata

SEQ ID NO: 1332680 - DNA, 15 bp, Homo sapiens
caaaaattttctcat

SEQ ID NO: 1332681 - DNA, 15 bp, Homo sapiens
acaaaaattttctca

SEQ ID NO: 1332682 - DNA, 15 bp, Homo sapiens
ctacaaaaattttct

SEQ ID NO: 1332683 - DNA, 15 bp, Homo sapiens
tctacaaaaattttc

SEQ ID NO: 1332684 - DNA, 15 bp, Homo sapiens
atctacaaaaatttt

SEQ ID NO: 1332685 - DNA, 15 bp, Homo sapiens
tatctacaaaaattt

SEQ ID NO: 1332686 - DNA, 15 bp, Homo sapiens
atatctacaaaaatt

SEQ ID NO: 1332687 - DNA, 15 bp, Homo sapiens
tatatctacaaaaat

SEQ ID NO: 1332688 - DNA, 15 bp, Homo sapiens
ctatatctacaaaaa

SEQ ID NO: 1332689 - DNA, 15 bp, Homo sapiens
tctatatctacaaaa

SEQ ID NO: 1332690 - DNA, 15 bp, Homo sapiens
ttctatatctacaaa

SEQ ID NO: 1332691 - DNA, 15 bp, Homo sapiens
tttctatatctacaa

SEQ ID NO: 1332692 - DNA, 15 bp, Homo sapiens
ttttctatatctaca

SEQ ID NO: 1332693 - DNA, 15 bp, Homo sapiens
attttctatatctac

SEQ ID NO: 1332694 - DNA, 15 bp, Homo sapiens
tattttctatatcta

SEQ ID NO: 1332695 - DNA, 15 bp, Homo sapiens
atattttctatatct

SEQ ID NO: 1332696 - DNA, 15 bp, Homo sapiens
tatattttctatatc

SEQ ID NO: 1332697 - DNA, 15 bp, Homo sapiens
ttatattttctatat

SEQ ID NO: 1332698 - DNA, 15 bp, Homo sapiens
gttatattttctata

SEQ ID NO: 1332699 - DNA, 15 bp, Homo sapiens
tgttatattttctat

SEQ ID NO: 1332700 - DNA, 15 bp, Homo sapiens
ttgttatattttcta

SEQ ID NO: 1332701 - DNA, 15 bp, Homo sapiens
attgttatattttct

SEQ ID NO: 1332702 - DNA, 15 bp, Homo sapiens
tattgttatattttc

SEQ ID NO: 1332703 - DNA, 15 bp, Homo sapiens
ctattgttatatttt

SEQ ID NO: 1332704 - DNA, 15 bp, Homo sapiens
tctattgttatattt

SEQ ID NO: 1332705 - DNA, 15 bp, Homo sapiens
ttctattgttatatt

SEQ ID NO: 1332706 - DNA, 15 bp, Homo sapiens
gttctattgttatat

SEQ ID NO: 1332707 - DNA, 15 bp, Homo sapiens
agttctattgttata

SEQ ID NO: 1332708 - DNA, 15 bp, Homo sapiens
cagttctattgttat

SEQ ID NO: 1332709 - DNA, 15 bp, Homo sapiens
ccagttctattgtta

SEQ ID NO: 1332710 - DNA, 15 bp, Homo sapiens
accagttctattgtt

SEQ ID NO: 1332711 - DNA, 15 bp, Homo sapiens
taccagttctattgt

SEQ ID NO: 1332712 - DNA, 15 bp, Homo sapiens
gtaccagttctattg

SEQ ID NO: 1332713 - DNA, 15 bp, Homo sapiens
tgtaccagttctatt

SEQ ID NO: 1332714 - DNA, 15 bp, Homo sapiens
ttgtaccagttctat

SEQ ID NO: 1332715 - DNA, 15 bp, Homo sapiens
tttgtaccagttcta

SEQ ID NO: 1332716 - DNA, 15 bp, Homo sapiens
ctttgtaccagttct

SEQ ID NO: 1332717 - DNA, 15 bp, Homo sapiens
tctttgtaccagttc

SEQ ID NO: 1332718 - DNA, 15 bp, Homo sapiens
ttctttgtaccagtt

SEQ ID NO: 1332719 - DNA, 15 bp, Homo sapiens
tttctttgtaccagt

SEQ ID NO: 1332720 - DNA, 15 bp, Homo sapiens
ttttctttgtaccag

SEQ ID NO: 1332721 - DNA, 15 bp, Homo sapiens
gttttctttgtacca

SEQ ID NO: 1332722 - DNA, 15 bp, Homo sapiens
agttttctttgtacc

SEQ ID NO: 1332723 - DNA, 15 bp, Homo sapiens
cagttttctttgtac

SEQ ID NO: 1332724 - DNA, 15 bp, Homo sapiens
ccagttttctttgta

SEQ ID NO: 1332725 - DNA, 15 bp, Homo sapiens
gccagttttctttgt

SEQ ID NO: 1332726 - DNA, 15 bp, Homo sapiens
agccagttttctttg

SEQ ID NO: 1332727 - DNA, 15 bp, Homo sapiens
tagccagttttcttt

SEQ ID NO: 1332728 - DNA, 15 bp, Homo sapiens
ctagccagttttctt

SEQ ID NO: 1332729 - DNA, 15 bp, Homo sapiens
tctagccagttttct

SEQ ID NO: 1332730 - DNA, 15 bp, Homo sapiens
ctctagccagttttc

SEQ ID NO: 1332731 - DNA, 15 bp, Homo sapiens
tctctagccagtttt

SEQ ID NO: 1332732 - DNA, 15 bp, Homo sapiens
ttctctagccagttt

SEQ ID NO: 1332733 - DNA, 15 bp, Homo sapiens
attctctagccagtt

SEQ ID NO: 1332734 - DNA, 15 bp, Homo sapiens
cattctctagccagt

SEQ ID NO: 1332735 - DNA, 15 bp, Homo sapiens
acattctctagccag

SEQ ID NO: 1332736 - DNA, 15 bp, Homo sapiens
gacattctctagcca

SEQ ID NO: 1332737 - DNA, 15 bp, Homo sapiens
agacattctctagcc

SEQ ID NO: 1332738 - DNA, 15 bp, Homo sapiens
tagacattctctagc

SEQ ID NO: 1332739 - DNA, 15 bp, Homo sapiens
atagacattctctag

SEQ ID NO: 1332740 - DNA, 15 bp, Homo sapiens
tatagacattctcta

SEQ ID NO: 1332741 - DNA, 15 bp, Homo sapiens
ttatagacattctct

SEQ ID NO: 1332742 - DNA, 15 bp, Homo sapiens
gttatagacattctc

SEQ ID NO: 1332743 - DNA, 15 bp, Homo sapiens
tgttatagacattct

SEQ ID NO: 1332744 - DNA, 15 bp, Homo sapiens
ttgttatagacattc

SEQ ID NO: 1332745 - DNA, 15 bp, Homo sapiens
attgttatagacatt

SEQ ID NO: 1332746 - DNA, 15 bp, Homo sapiens
gattgttatagacat

SEQ ID NO: 1332747 - DNA, 15 bp, Homo sapiens
agattgttatagaca

SEQ ID NO: 1332748 - DNA, 15 bp, Homo sapiens
cagattgttatagac

SEQ ID NO: 1332749 - DNA, 15 bp, Homo sapiens
gcagattgttataga

SEQ ID NO: 1332750 - DNA, 15 bp, Homo sapiens
agcagattgttatag

SEQ ID NO: 1332751 - DNA, 15 bp, Homo sapiens
aagcagattgttata

SEQ ID NO: 1332752 - DNA, 15 bp, Homo sapiens
gaagcagattgttat

SEQ ID NO: 1332753 - DNA, 15 bp, Homo sapiens
agaagcagattgtta

SEQ ID NO: 1332754 - DNA, 15 bp, Homo sapiens
gagaagcagattgtt

SEQ ID NO: 1332755 - DNA, 15 bp, Homo sapiens
tgagaagcagattgt

SEQ ID NO: 1332756 - DNA, 15 bp, Homo sapiens
ctgagaagcagattg

SEQ ID NO: 1332757 - DNA, 15 bp, Homo sapiens
actgagaagcagatt

SEQ ID NO: 1332758 - DNA, 15 bp, Homo sapiens
gactgagaagcagat

SEQ ID NO: 1332759 - DNA, 15 bp, Homo sapiens
agactgagaagcaga

SEQ ID NO: 1332760 - DNA, 15 bp, Homo sapiens
aagactgagaagcag

SEQ ID NO: 1332761 - DNA, 15 bp, Homo sapiens
gaagactgagaagca

SEQ ID NO: 1332762 - DNA, 15 bp, Homo sapiens
agaagactgagaagc

SEQ ID NO: 1332763 - DNA, 15 bp, Homo sapiens
tagaagactgagaag

SEQ ID NO: 1332764 - DNA, 15 bp, Homo sapiens
ctagaagactgagaa

SEQ ID NO: 1332765 - DNA, 15 bp, Homo sapiens
cctagaagactgaga

SEQ ID NO: 1332766 - DNA, 15 bp, Homo sapiens
acctagaagactgag

SEQ ID NO: 1332767 - DNA, 15 bp, Homo sapiens
gacctagaagactga

SEQ ID NO: 1332768 - DNA, 15 bp, Homo sapiens
agacctagaagactg

SEQ ID NO: 1332769 - DNA, 15 bp, Homo sapiens
tagacctagaagact

SEQ ID NO: 1332770 - DNA, 15 bp, Homo sapiens
atagacctagaagac

SEQ ID NO: 1332771 - DNA, 15 bp, Homo sapiens
aatagacctagaaga

SEQ ID NO: 1332772 - DNA, 15 bp, Homo sapiens
aaatagacctagaag

SEQ ID NO: 1332773 - DNA, 15 bp, Homo sapiens
gaaatagacctagaa

SEQ ID NO: 1332774 - DNA, 15 bp, Homo sapiens
ggaaatagacctaga

SEQ ID NO: 1332775 - DNA, 15 bp, Homo sapiens
gggaaatagacctag

SEQ ID NO: 1332776 - DNA, 15 bp, Homo sapiens
ggggaaatagaccta

SEQ ID NO: 1332777 - DNA, 15 bp, Homo sapiens
tggggaaatagacct

SEQ ID NO: 1332778 - DNA, 15 bp, Homo sapiens
atggggaaatagacc

SEQ ID NO: 1332779 - DNA, 15 bp, Homo sapiens
aatggggaaatagac

SEQ ID NO: 1332780 - DNA, 15 bp, Homo sapiens
caatggggaaataga

SEQ ID NO: 1332781 - DNA, 15 bp, Homo sapiens
tcaatggggaaatag

SEQ ID NO: 1332782 - DNA, 15 bp, Homo sapiens
gtcaatggggaaata

SEQ ID NO: 1332783 - DNA, 15 bp, Homo sapiens
tgtcaatggggaaat

SEQ ID NO: 1332784 - DNA, 15 bp, Homo sapiens
gtgtcaatggggaaa

SEQ ID NO: 1332785 - DNA, 15 bp, Homo sapiens
cgtgtcaatggggaa

SEQ ID NO: 1332786 - DNA, 15 bp, Homo sapiens
acgtgtcaatgggga

SEQ ID NO: 1332787 - DNA, 15 bp, Homo sapiens
cacgtgtcaatgggg

SEQ ID NO: 1332788 - DNA, 15 bp, Homo sapiens
ccacgtgtcaatggg

SEQ ID NO: 1332789 - DNA, 15 bp, Homo sapiens
tccacgtgtcaatgg

SEQ ID NO: 1332790 - DNA, 15 bp, Homo sapiens
atccacgtgtcaatg

SEQ ID NO: 1332791 - DNA, 15 bp, Homo sapiens
aatccacgtgtcaat

SEQ ID NO: 1332792 - DNA, 15 bp, Homo sapiens
aaatccacgtgtcaa

SEQ ID NO: 1332793 - DNA, 15 bp, Homo sapiens
taaatccacgtgtca

SEQ ID NO: 1332794 - DNA, 15 bp, Homo sapiens
ctaaatccacgtgtc

SEQ ID NO: 1332795 - DNA, 15 bp, Homo sapiens
actaaatccacgtgt

SEQ ID NO: 1332796 - DNA, 15 bp, Homo sapiens
cactaaatccacgtg

SEQ ID NO: 1332797 - DNA, 15 bp, Homo sapiens
acactaaatccacgt

SEQ ID NO: 1332798 - DNA, 15 bp, Homo sapiens
aacactaaatccacg

SEQ ID NO: 1332799 - DNA, 15 bp, Homo sapiens
aaacactaaatccac

SEQ ID NO: 1332800 - DNA, 15 bp, Homo sapiens
caaacactaaatcca

SEQ ID NO: 1332801 - DNA, 15 bp, Homo sapiens
gcaaacactaaatcc

SEQ ID NO: 1332802 - DNA, 15 bp, Homo sapiens
agcaaacactaaatc

SEQ ID NO: 1332803 - DNA, 15 bp, Homo sapiens
cagcaaacactaaat

SEQ ID NO: 1332804 - DNA, 15 bp, Homo sapiens
tcagcaaacactaaa

SEQ ID NO: 1332805 - DNA, 15 bp, Homo sapiens
ttcagcaaacactaa

SEQ ID NO: 1332806 - DNA, 15 bp, Homo sapiens
gttcagcaaacacta

SEQ ID NO: 1332807 - DNA, 15 bp, Homo sapiens
agttcagcaaacact

SEQ ID NO: 1332808 - DNA, 15 bp, Homo sapiens
cagttcagcaaacac

SEQ ID NO: 1332809 - DNA, 15 bp, Homo sapiens
tcagttcagcaaaca

SEQ ID NO: 1332810 - DNA, 15 bp, Homo sapiens
ttcagttcagcaaac

SEQ ID NO: 1332811 - DNA, 15 bp, Homo sapiens
tttcagttcagcaaa

SEQ ID NO: 1332812 - DNA, 15 bp, Homo sapiens
ctttcagttcagcaa

SEQ ID NO: 1332813 - DNA, 15 bp, Homo sapiens
actttcagttcagca

SEQ ID NO: 1332814 - DNA, 15 bp, Homo sapiens
cactttcagttcagc

SEQ ID NO: 1332815 - DNA, 15 bp, Homo sapiens
tcactttcagttcag

SEQ ID NO: 1332816 - DNA, 15 bp, Homo sapiens
ttcactttcagttca

SEQ ID NO: 1332817 - DNA, 15 bp, Homo sapiens
tttcactttcagttc

SEQ ID NO: 1332818 - DNA, 15 bp, Homo sapiens
ttttcactttcagtt

SEQ ID NO: 1332819 - DNA, 15 bp, Homo sapiens
tttttcactttcagt

SEQ ID NO: 1332820 - DNA, 15 bp, Homo sapiens
ttttttcactttcag

SEQ ID NO: 1332821 - DNA, 15 bp, Homo sapiens
tttttttcactttca

SEQ ID NO: 1332822 - DNA, 15 bp, Homo sapiens
gtttttttcactttc

SEQ ID NO: 1332823 - DNA, 15 bp, Homo sapiens
agtttttttcacttt

SEQ ID NO: 1332824 - DNA, 15 bp, Homo sapiens
cagtttttttcactt

SEQ ID NO: 1332825 - DNA, 15 bp, Homo sapiens
ccagtttttttcact

SEQ ID NO: 1332826 - DNA, 15 bp, Homo sapiens
accagtttttttcac

SEQ ID NO: 1332827 - DNA, 15 bp, Homo sapiens
taccagtttttttca

SEQ ID NO: 1332828 - DNA, 15 bp, Homo sapiens
ataccagtttttttc

SEQ ID NO: 1332829 - DNA, 15 bp, Homo sapiens
tataccagttttttt

SEQ ID NO: 1332830 - DNA, 15 bp, Homo sapiens
ttataccagtttttt

SEQ ID NO: 1332831 - DNA, 15 bp, Homo sapiens
tttataccagttttt

SEQ ID NO: 1332832 - DNA, 15 bp, Homo sapiens
ctttataccagtttt

SEQ ID NO: 1332833 - DNA, 15 bp, Homo sapiens
tctttataccagttt

SEQ ID NO: 1332834 - DNA, 15 bp, Homo sapiens
ttctttataccagtt

SEQ ID NO: 1332835 - DNA, 15 bp, Homo sapiens
tttctttataccagt

SEQ ID NO: 1332836 - DNA, 15 bp, Homo sapiens
ttttctttataccag

SEQ ID NO: 1332837 - DNA, 15 bp, Homo sapiens
gttttctttatacca

SEQ ID NO: 1332838 - DNA, 15 bp, Homo sapiens
tgttttctttatacc

SEQ ID NO: 1332839 - DNA, 15 bp, Homo sapiens
ttgttttctttatac

SEQ ID NO: 1332840 - DNA, 15 bp, Homo sapiens
tttgttttctttata

SEQ ID NO: 1332841 - DNA, 15 bp, Homo sapiens
atttgttttctttat

SEQ ID NO: 1332842 - DNA, 15 bp, Homo sapiens
catttgttttcttta

SEQ ID NO: 1332843 - DNA, 15 bp, Homo sapiens
acatttgttttcttt

SEQ ID NO: 1332844 - DNA, 15 bp, Homo sapiens
cacatttgttttctt

SEQ ID NO: 1332845 - DNA, 15 bp, Homo sapiens
gcacatttgttttct

SEQ ID NO: 1332846 - DNA, 15 bp, Homo sapiens
agcacatttgttttc

SEQ ID NO: 1332847 - DNA, 15 bp, Homo sapiens
gagcacatttgtttt

SEQ ID NO: 1332848 - DNA, 15 bp, Homo sapiens
agagcacatttgttt

SEQ ID NO: 1332849 - DNA, 15 bp, Homo sapiens
cagagcacatttgtt

SEQ ID NO: 1332850 - DNA, 15 bp, Homo sapiens
tcagagcacatttgt

SEQ ID NO: 1332851 - DNA, 15 bp, Homo sapiens
atcagagcacatttg

SEQ ID NO: 1332852 - DNA, 15 bp, Homo sapiens
aatcagagcacattt

SEQ ID NO: 1332853 - DNA, 15 bp, Homo sapiens
aaatcagagcacatt

SEQ ID NO: 1332854 - DNA, 15 bp, Homo sapiens
taaatcagagcacat

SEQ ID NO: 1332855 - DNA, 15 bp, Homo sapiens
gtaaatcagagcaca

SEQ ID NO: 1332856 - DNA, 15 bp, Homo sapiens
tgtaaatcagagcac

SEQ ID NO: 1332857 - DNA, 15 bp, Homo sapiens
atgtaaatcagagca

SEQ ID NO: 1332858 - DNA, 15 bp, Homo sapiens
catgtaaatcagagc

SEQ ID NO: 1332859 - DNA, 15 bp, Homo sapiens
gcatgtaaatcagag

SEQ ID NO: 1332860 - DNA, 15 bp, Homo sapiens
ggcatgtaaatcaga

SEQ ID NO: 1332861 - DNA, 15 bp, Homo sapiens
aggcatgtaaatcag

SEQ ID NO: 1332862 - DNA, 15 bp, Homo sapiens
taggcatgtaaatca

SEQ ID NO: 1332863 - DNA, 15 bp, Homo sapiens
ttaggcatgtaaatc

SEQ ID NO: 1332864 - DNA, 15 bp, Homo sapiens
tttaggcatgtaaat

SEQ ID NO: 1332865 - DNA, 15 bp, Homo sapiens
atttaggcatgtaaa

SEQ ID NO: 1332866 - DNA, 15 bp, Homo sapiens
catttaggcatgtaa

SEQ ID NO: 1332867 - DNA, 15 bp, Homo sapiens
tcatttaggcatgta

SEQ ID NO: 1332868 - DNA, 15 bp, Homo sapiens
ttcatttaggcatgt

SEQ ID NO: 1332869 - DNA, 15 bp, Homo sapiens
cttcatttaggcatg

SEQ ID NO: 1332870 - DNA, 15 bp, Homo sapiens
tcttcatttaggcat

SEQ ID NO: 1332871 - DNA, 15 bp, Homo sapiens
ttcttcatttaggca

SEQ ID NO: 1332872 - DNA, 15 bp, Homo sapiens
tttcttcatttaggc

SEQ ID NO: 1332873 - DNA, 15 bp, Homo sapiens
ctttcttcatttagg

SEQ ID NO: 1332874 - DNA, 15 bp, Homo sapiens
gctttcttcatttag

SEQ ID NO: 1332875 - DNA, 15 bp, Homo sapiens
agctttcttcattta

SEQ ID NO: 1332876 - DNA, 15 bp, Homo sapiens
tagctttcttcattt

SEQ ID NO: 1332877 - DNA, 15 bp, Homo sapiens
atagctttcttcatt

SEQ ID NO: 1332878 - DNA, 15 bp, Homo sapiens
gatagctttcttcat

SEQ ID NO: 1332879 - DNA, 15 bp, Homo sapiens
agatagctttcttca

SEQ ID NO: 1332880 - DNA, 15 bp, Homo sapiens
aagatagctttcttc

SEQ ID NO: 1332881 - DNA, 15 bp, Homo sapiens
aaagatagctttctt

SEQ ID NO: 1332882 - DNA, 15 bp, Homo sapiens
aaaagatagctttct

SEQ ID NO: 1332883 - DNA, 15 bp, Homo sapiens
aaaaagatagctttc

SEQ ID NO: 1332884 - DNA, 15 bp, Homo sapiens
aaaaaagatagcttt

SEQ ID NO: 1332885 - DNA, 15 bp, Homo sapiens
gaaaaaagatagctt

SEQ ID NO: 1332886 - DNA, 15 bp, Homo sapiens
tgaaaaaagatagct

SEQ ID NO: 1332887 - DNA, 15 bp, Homo sapiens
atgaaaaaagatagc

SEQ ID NO: 1332888 - DNA, 15 bp, Homo sapiens
tatgaaaaaagatag

SEQ ID NO: 1332889 - DNA, 15 bp, Homo sapiens
atatgaaaaaagata

SEQ ID NO: 1332890 - DNA, 15 bp, Homo sapiens
tatatgaaaaaagat

SEQ ID NO: 1332891 - DNA, 15 bp, Homo sapiens
ttatatgaaaaaaga

SEQ ID NO: 1332892 - DNA, 15 bp, Homo sapiens
cttatatgaaaaaag

SEQ ID NO: 1332893 - DNA, 15 bp, Homo sapiens
gcttatatgaaaaaa

SEQ ID NO: 1332894 - DNA, 15 bp, Homo sapiens
tgcttatatgaaaaa

SEQ ID NO: 1332895 - DNA, 15 bp, Homo sapiens
atgcttatatgaaaa

SEQ ID NO: 1332896 - DNA, 15 bp, Homo sapiens
tatgcttatatgaaa

SEQ ID NO: 1332897 - DNA, 15 bp, Homo sapiens
atatgcttatatgaa

SEQ ID NO: 1332898 - DNA, 15 bp, Homo sapiens
tatatgcttatatga

SEQ ID NO: 1332899 - DNA, 15 bp, Homo sapiens
ttatatgcttatatg

SEQ ID NO: 1332900 - DNA, 15 bp, Homo sapiens
tttatatgcttatat

SEQ ID NO: 1332901 - DNA, 15 bp, Homo sapiens
ctttatatgcttata

SEQ ID NO: 1332902 - DNA, 15 bp, Homo sapiens
actttatatgcttat

SEQ ID NO: 1332903 - DNA, 15 bp, Homo sapiens
aactttatatgctta

SEQ ID NO: 1332904 - DNA, 15 bp, Homo sapiens
caactttatatgctt

SEQ ID NO: 1332905 - DNA, 15 bp, Homo sapiens
acaactttatatgct

SEQ ID NO: 1332906 - DNA, 15 bp, Homo sapiens
tacaactttatatgc

SEQ ID NO: 1332907 - DNA, 15 bp, Homo sapiens
ttacaactttatatg

SEQ ID NO: 1332908 - DNA, 15 bp, Homo sapiens
attacaactttatat

SEQ ID NO: 1332909 - DNA, 15 bp, Homo sapiens
aattacaactttata

SEQ ID NO: 1332910 - DNA, 15 bp, Homo sapiens
aaattacaactttat

SEQ ID NO: 1332911 - DNA, 15 bp, Homo sapiens
aaaattacaacttta

SEQ ID NO: 1332912 - DNA, 15 bp, Homo sapiens
caaaattacaacttt

SEQ ID NO: 1332913 - DNA, 15 bp, Homo sapiens
tcaaaattacaactt

SEQ ID NO: 1332914 - DNA, 15 bp, Homo sapiens
atcaaaattacaact

SEQ ID NO: 1332915 - DNA, 15 bp, Homo sapiens
aatcaaaattacaac

SEQ ID NO: 1332916 - DNA, 15 bp, Homo sapiens
aaatcaaaattacaa

SEQ ID NO: 1332917 - DNA, 15 bp, Homo sapiens
gaaatcaaaattaca

SEQ ID NO: 1332918 - DNA, 15 bp, Homo sapiens
tgaaatcaaaattac

SEQ ID NO: 1332919 - DNA, 15 bp, Homo sapiens
ctgaaatcaaaatta

SEQ ID NO: 1332920 - DNA, 15 bp, Homo sapiens
cctgaaatcaaaatt

SEQ ID NO: 1332921 - DNA, 15 bp, Homo sapiens
gcctgaaatcaaaat

SEQ ID NO: 1332922 - DNA, 15 bp, Homo sapiens
tgcctgaaatcaaaa

SEQ ID NO: 1332923 - DNA, 15 bp, Homo sapiens
gtgcctgaaatcaaa

SEQ ID NO: 1332924 - DNA, 15 bp, Homo sapiens
tgtgcctgaaatcaa

SEQ ID NO: 1332925 - DNA, 15 bp, Homo sapiens
atgtgcctgaaatca

SEQ ID NO: 1332926 - DNA, 15 bp, Homo sapiens
catgtgcctgaaatc

SEQ ID NO: 1332927 - DNA, 15 bp, Homo sapiens
tcatgtgcctgaaat

SEQ ID NO: 1332928 - DNA, 15 bp, Homo sapiens
atcatgtgcctgaaa

SEQ ID NO: 1332929 - DNA, 15 bp, Homo sapiens
catcatgtgcctgaa

SEQ ID NO: 1332930 - DNA, 15 bp, Homo sapiens
ccatcatgtgcctga

SEQ ID NO: 1332931 - DNA, 15 bp, Homo sapiens
accatcatgtgcctg

SEQ ID NO: 1332932 - DNA, 15 bp, Homo sapiens
caccatcatgtgcct

SEQ ID NO: 1332933 - DNA, 15 bp, Homo sapiens
acaccatcatgtgcc

SEQ ID NO: 1332934 - DNA, 15 bp, Homo sapiens
aacaccatcatgtgc

SEQ ID NO: 1332935 - DNA, 15 bp, Homo sapiens
aaacaccatcatgtg

SEQ ID NO: 1332936 - DNA, 15 bp, Homo sapiens
taaacaccatcatgt

SEQ ID NO: 1332937 - DNA, 15 bp, Homo sapiens
ttaaacaccatcatg

SEQ ID NO: 1332938 - DNA, 15 bp, Homo sapiens
cttaaacaccatcat

SEQ ID NO: 1332939 - DNA, 15 bp, Homo sapiens
acttaaacaccatca

SEQ ID NO: 1332940 - DNA, 15 bp, Homo sapiens
tacttaaacaccatc

SEQ ID NO: 1332941 - DNA, 15 bp, Homo sapiens
gtacttaaacaccat

SEQ ID NO: 1332942 - DNA, 15 bp, Homo sapiens
tgtacttaaacacca

SEQ ID NO: 1332943 - DNA, 15 bp, Homo sapiens
atgtacttaaacacc

SEQ ID NO: 1332944 - DNA, 15 bp, Homo sapiens
aatgtacttaaacac

SEQ ID NO: 1332945 - DNA, 15 bp, Homo sapiens
aaatgtacttaaaca

SEQ ID NO: 1332946 - DNA, 15 bp, Homo sapiens
taaatgtacttaaac

SEQ ID NO: 1332947 - DNA, 15 bp, Homo sapiens
ataaatgtacttaaa

SEQ ID NO: 1332948 - DNA, 15 bp, Homo sapiens
aataaatgtacttaa

SEQ ID NO: 1332949 - DNA, 15 bp, Homo sapiens
caataaatgtactta

SEQ ID NO: 1332950 - DNA, 15 bp, Homo sapiens
gcaataaatgtactt

SEQ ID NO: 1332951 - DNA, 15 bp, Homo sapiens
tgcaataaatgtact

SEQ ID NO: 1332952 - DNA, 15 bp, Homo sapiens
ctgcaataaatgtac

SEQ ID NO: 1332953 - DNA, 15 bp, Homo sapiens
gctgcaataaatgta

SEQ ID NO: 1332954 - DNA, 15 bp, Homo sapiens
agctgcaataaatgt

SEQ ID NO: 1332955 - DNA, 15 bp, Homo sapiens
aagctgcaataaatg

SEQ ID NO: 1332956 - DNA, 15 bp, Homo sapiens
caagctgcaataaat

SEQ ID NO: 1332957 - DNA, 15 bp, Homo sapiens
acaagctgcaataaa

SEQ ID NO: 1332958 - DNA, 15 bp, Homo sapiens
tacaagctgcaataa

SEQ ID NO: 1332959 - DNA, 15 bp, Homo sapiens
atacaagctgcaata

SEQ ID NO: 1332960 - DNA, 15 bp, Homo sapiens
aatacaagctgcaat

SEQ ID NO: 1332961 - DNA, 15 bp, Homo sapiens
gaatacaagctgcaa

SEQ ID NO: 1332962 - DNA, 15 bp, Homo sapiens
agaatacaagctgca

SEQ ID NO: 1332963 - DNA, 15 bp, Homo sapiens
tagaatacaagctgc

SEQ ID NO: 1332964 - DNA, 15 bp, Homo sapiens
ctagaatacaagctg

SEQ ID NO: 1332965 - DNA, 15 bp, Homo sapiens
actagaatacaagct

SEQ ID NO: 1332966 - DNA, 15 bp, Homo sapiens
cactagaatacaagc

SEQ ID NO: 1332967 - DNA, 15 bp, Homo sapiens
tcactagaatacaag

SEQ ID NO: 1332968 - DNA, 15 bp, Homo sapiens
ctcactagaatacaa

SEQ ID NO: 1332969 - DNA, 15 bp, Homo sapiens
tctcactagaataca

SEQ ID NO: 1332970 - DNA, 15 bp, Homo sapiens
ttctcactagaatac

SEQ ID NO: 1332971 - DNA, 15 bp, Homo sapiens
cttctcactagaata

SEQ ID NO: 1332972 - DNA, 15 bp, Homo sapiens
acttctcactagaat

SEQ ID NO: 1332973 - DNA, 15 bp, Homo sapiens
tacttctcactagaa

SEQ ID NO: 1332974 - DNA, 15 bp, Homo sapiens
ttacttctcactaga

SEQ ID NO: 1332975 - DNA, 15 bp, Homo sapiens
attacttctcactag

SEQ ID NO: 1332976 - DNA, 15 bp, Homo sapiens
tattacttctcacta

SEQ ID NO: 1332977 - DNA, 15 bp, Homo sapiens
ttattacttctcact

SEQ ID NO: 1332978 - DNA, 15 bp, Homo sapiens
cttattacttctcac

SEQ ID NO: 1332979 - DNA, 15 bp, Homo sapiens
tcttattacttctca

SEQ ID NO: 1332980 - DNA, 15 bp, Homo sapiens
ttcttattacttctc

SEQ ID NO: 1332981 - DNA, 15 bp, Homo sapiens
tttcttattacttct

SEQ ID NO: 1332982 - DNA, 15 bp, Homo sapiens
ttttcttattacttc

SEQ ID NO: 1332983 - DNA, 15 bp, Homo sapiens
attttcttattactt

SEQ ID NO: 1332984 - DNA, 15 bp, Homo sapiens
aattttcttattact

SEQ ID NO: 1332985 - DNA, 15 bp, Homo sapiens
taattttcttattac

SEQ ID NO: 1332986 - DNA, 15 bp, Homo sapiens
ttaattttcttatta

SEQ ID NO: 1332987 - DNA, 15 bp, Homo sapiens
attaattttcttatt

SEQ ID NO: 1332988 - DNA, 15 bp, Homo sapiens
tattaattttcttat

SEQ ID NO: 1332989 - DNA, 15 bp, Homo sapiens
ttattaattttctta

SEQ ID NO: 1332990 - DNA, 15 bp, Homo sapiens
tttattaattttctt

SEQ ID NO: 1332991 - DNA, 15 bp, Homo sapiens
gtttattaattttct

SEQ ID NO: 1332992 - DNA, 15 bp, Homo sapiens
tgtttattaattttc

SEQ ID NO: 1332993 - DNA, 15 bp, Homo sapiens
ttgtttattaatttt

SEQ ID NO: 1332994 - DNA, 15 bp, Homo sapiens
cttgtttattaattt

SEQ ID NO: 1332995 - DNA, 15 bp, Homo sapiens
tcttgtttattaatt

SEQ ID NO: 1332996 - DNA, 15 bp, Homo sapiens
atcttgtttattaat

SEQ ID NO: 1332997 - DNA, 15 bp, Homo sapiens
tatcttgtttattaa

SEQ ID NO: 1332998 - DNA, 15 bp, Homo sapiens
ttatcttgtttatta

SEQ ID NO: 1332999 - DNA, 15 bp, Homo sapiens
tttatcttgtttatt

SEQ ID NO: 1333000 - DNA, 15 bp, Homo sapiens
ttttatcttgtttat

SEQ ID NO: 1333001 - DNA, 15 bp, Homo sapiens
tttttatcttgttta

SEQ ID NO: 1333002 - DNA, 15 bp, Homo sapiens
ctttttatcttgttt

SEQ ID NO: 1333003 - DNA, 15 bp, Homo sapiens
cctttttatcttgtt

SEQ ID NO: 1333004 - DNA, 15 bp, Homo sapiens
tcctttttatcttgt

SEQ ID NO: 1333005 - DNA, 15 bp, Homo sapiens
ttcctttttatcttg

SEQ ID NO: 1333006 - DNA, 15 bp, Homo sapiens
cttcctttttatctt

SEQ ID NO: 1333007 - DNA, 15 bp, Homo sapiens
gcttcctttttatct

SEQ ID NO: 1333008 - DNA, 15 bp, Homo sapiens
agcttcctttttatc

SEQ ID NO: 1333009 - DNA, 15 bp, Homo sapiens
tagcttcctttttat

SEQ ID NO: 1333010 - DNA, 15 bp, Homo sapiens
gtagcttccttttta

SEQ ID NO: 1333011 - DNA, 15 bp, Homo sapiens
agtagcttccttttt

SEQ ID NO: 1333012 - DNA, 15 bp, Homo sapiens
aagtagcttcctttt

SEQ ID NO: 1333013 - DNA, 15 bp, Homo sapiens
taagtagcttccttt

SEQ ID NO: 1333014 - DNA, 15 bp, Homo sapiens
gtaagtagcttcctt

SEQ ID NO: 1333015 - DNA, 15 bp, Homo sapiens
agtaagtagcttcct

SEQ ID NO: 1333016 - DNA, 15 bp, Homo sapiens
aagtaagtagcttcc

SEQ ID NO: 1333017 - DNA, 15 bp, Homo sapiens
gaagtaagtagcttc

SEQ ID NO: 1333018 - DNA, 15 bp, Homo sapiens
tgaagtaagtagctt

SEQ ID NO: 1333019 - DNA, 15 bp, Homo sapiens
gtgaagtaagtagct

SEQ ID NO: 1333020 - DNA, 15 bp, Homo sapiens
ggtgaagtaagtagc

SEQ ID NO: 1333021 - DNA, 15 bp, Homo sapiens
tggtgaagtaagtag

SEQ ID NO: 1333022 - DNA, 15 bp, Homo sapiens
gtggtgaagtaagta

SEQ ID NO: 1333023 - DNA, 15 bp, Homo sapiens
tgtggtgaagtaagt

SEQ ID NO: 1333024 - DNA, 15 bp, Homo sapiens
ttgtggtgaagtaag

SEQ ID NO: 1333025 - DNA, 15 bp, Homo sapiens
gttgtggtgaagtaa

SEQ ID NO: 1333026 - DNA, 15 bp, Homo sapiens
ggttgtggtgaagta

SEQ ID NO: 1333027 - DNA, 15 bp, Homo sapiens
aggttgtggtgaagt

SEQ ID NO: 1333028 - DNA, 15 bp, Homo sapiens
taggttgtggtgaag

SEQ ID NO: 1333029 - DNA, 15 bp, Homo sapiens
ataggttgtggtgaa

SEQ ID NO: 1333030 - DNA, 15 bp, Homo sapiens
cataggttgtggtga

SEQ ID NO: 1333031 - DNA, 15 bp, Homo sapiens
tcataggttgtggtg

SEQ ID NO: 1333032 - DNA, 15 bp, Homo sapiens
ttcataggttgtggt

SEQ ID NO: 1333033 - DNA, 15 bp, Homo sapiens
gttcataggttgtgg

SEQ ID NO: 1333034 - DNA, 15 bp, Homo sapiens
cgttcataggttgtg

SEQ ID NO: 1333035 - DNA, 15 bp, Homo sapiens
acgttcataggttgt

SEQ ID NO: 1333036 - DNA, 15 bp, Homo sapiens
gacgttcataggttg

SEQ ID NO: 1333037 - DNA, 15 bp, Homo sapiens
ggacgttcataggtt

SEQ ID NO: 1333038 - DNA, 15 bp, Homo sapiens
aggacgttcataggt

SEQ ID NO: 1333039 - DNA, 15 bp, Homo sapiens
taggacgttcatagg

SEQ ID NO: 1333040 - DNA, 15 bp, Homo sapiens
ttaggacgttcatag

SEQ ID NO: 1333041 - DNA, 15 bp, Homo sapiens
cttaggacgttcata

SEQ ID NO: 1333042 - DNA, 15 bp, Homo sapiens
ccttaggacgttcat

SEQ ID NO: 1333043 - DNA, 15 bp, Homo sapiens
accttaggacgttca

SEQ ID NO: 1333044 - DNA, 15 bp, Homo sapiens
caccttaggacgttc

SEQ ID NO: 1333045 - DNA, 15 bp, Homo sapiens
acaccttaggacgtt

SEQ ID NO: 1333046 - DNA, 15 bp, Homo sapiens
gacaccttaggacgt

SEQ ID NO: 1333047 - DNA, 15 bp, Homo sapiens
agacaccttaggacg

SEQ ID NO: 1333048 - DNA, 15 bp, Homo sapiens
tagacaccttaggac

SEQ ID NO: 1333049 - DNA, 15 bp, Homo sapiens
gtagacaccttagga

SEQ ID NO: 1333050 - DNA, 15 bp, Homo sapiens
tgtagacaccttagg

SEQ ID NO: 1333051 - DNA, 15 bp, Homo sapiens
gtgtagacaccttag

SEQ ID NO: 1333052 - DNA, 15 bp, Homo sapiens
cgtgtagacacctta

SEQ ID NO: 1333053 - DNA, 15 bp, Homo sapiens
acgtgtagacacctt

SEQ ID NO: 1333054 - DNA, 15 bp, Homo sapiens
aacgtgtagacacct

SEQ ID NO: 1333055 - DNA, 15 bp, Homo sapiens
aaacgtgtagacacc

SEQ ID NO: 1333056 - DNA, 15 bp, Homo sapiens
aaaacgtgtagacac

SEQ ID NO: 1333057 - DNA, 15 bp, Homo sapiens
taaaacgtgtagaca

SEQ ID NO: 1333058 - DNA, 15 bp, Homo sapiens
ttaaaacgtgtagac

SEQ ID NO: 1333059 - DNA, 15 bp, Homo sapiens
tttaaaacgtgtaga

SEQ ID NO: 1333060 - DNA, 15 bp, Homo sapiens
ttttaaaacgtgtag

SEQ ID NO: 1333061 - DNA, 15 bp, Homo sapiens
tttttaaaacgtgta

SEQ ID NO: 1333062 - DNA, 15 bp, Homo sapiens
atttttaaaacgtgt

SEQ ID NO: 1333063 - DNA, 15 bp, Homo sapiens
aatttttaaaacgtg

SEQ ID NO: 1333064 - DNA, 15 bp, Homo sapiens
gaatttttaaaacgt

SEQ ID NO: 1333065 - DNA, 15 bp, Homo sapiens
tgaatttttaaaacg

SEQ ID NO: 1333066 - DNA, 15 bp, Homo sapiens
atgaatttttaaaac

SEQ ID NO: 1333067 - DNA, 15 bp, Homo sapiens
aatgaatttttaaaa

SEQ ID NO: 1333068 - DNA, 15 bp, Homo sapiens
gaatgaatttttaaa

SEQ ID NO: 1333069 - DNA, 15 bp, Homo sapiens
agaatgaatttttaa

SEQ ID NO: 1333070 - DNA, 15 bp, Homo sapiens
gagaatgaattttta

SEQ ID NO: 1333071 - DNA, 15 bp, Homo sapiens
ggagaatgaattttt

SEQ ID NO: 1333072 - DNA, 15 bp, Homo sapiens
tggagaatgaatttt

SEQ ID NO: 1333073 - DNA, 15 bp, Homo sapiens
atggagaatgaattt

SEQ ID NO: 1333074 - DNA, 15 bp, Homo sapiens
gatggagaatgaatt

SEQ ID NO: 1333075 - DNA, 15 bp, Homo sapiens
ggatggagaatgaat

SEQ ID NO: 1333076 - DNA, 15 bp, Homo sapiens
aggatggagaatgaa

SEQ ID NO: 1333077 - DNA, 15 bp, Homo sapiens
taggatggagaatga

SEQ ID NO: 1333078 - DNA, 15 bp, Homo sapiens
gtaggatggagaatg

SEQ ID NO: 1333079 - DNA, 15 bp, Homo sapiens
agtaggatggagaat

SEQ ID NO: 1333080 - DNA, 15 bp, Homo sapiens
tagtaggatggagaa

SEQ ID NO: 1333081 - DNA, 15 bp, Homo sapiens
gtagtaggatggaga

SEQ ID NO: 1333082 - DNA, 15 bp, Homo sapiens
ggtagtaggatggag

SEQ ID NO: 1333083 - DNA, 15 bp, Homo sapiens
gggtagtaggatgga

SEQ ID NO: 1333084 - DNA, 15 bp, Homo sapiens
agggtagtaggatgg

SEQ ID NO: 1333085 - DNA, 15 bp, Homo sapiens
aagggtagtaggatg

SEQ ID NO: 1333086 - DNA, 15 bp, Homo sapiens
aaagggtagtaggat

SEQ ID NO: 1333087 - DNA, 15 bp, Homo sapiens
taaagggtagtagga

SEQ ID NO: 1333088 - DNA, 15 bp, Homo sapiens
ttaaagggtagtagg

SEQ ID NO: 1333089 - DNA, 15 bp, Homo sapiens
tttaaagggtagtag

SEQ ID NO: 1333090 - DNA, 15 bp, Homo sapiens
atttaaagggtagta

SEQ ID NO: 1333091 - DNA, 15 bp, Homo sapiens
aatttaaagggtagt

SEQ ID NO: 1333092 - DNA, 15 bp, Homo sapiens
taatttaaagggtag

SEQ ID NO: 1333093 - DNA, 15 bp, Homo sapiens
ataatttaaagggta

SEQ ID NO: 1333094 - DNA, 15 bp, Homo sapiens
tataatttaaagggt

SEQ ID NO: 1333095 - DNA, 15 bp, Homo sapiens
ctataatttaaaggg

SEQ ID NO: 1333096 - DNA, 15 bp, Homo sapiens
gctataatttaaagg

SEQ ID NO: 1333097 - DNA, 15 bp, Homo sapiens
ggctataatttaaag

SEQ ID NO: 1333098 - DNA, 15 bp, Homo sapiens
aggctataatttaaa

SEQ ID NO: 1333099 - DNA, 15 bp, Homo sapiens
caggctataatttaa

SEQ ID NO: 1333100 - DNA, 15 bp, Homo sapiens
acaggctataattta

SEQ ID NO: 1333101 - DNA, 15 bp, Homo sapiens
aacaggctataattt

SEQ ID NO: 1333102 - DNA, 15 bp, Homo sapiens
taacaggctataatt

SEQ ID NO: 1333103 - DNA, 15 bp, Homo sapiens
gtaacaggctataat

SEQ ID NO: 1333104 - DNA, 15 bp, Homo sapiens
tgtaacaggctataa

SEQ ID NO: 1333105 - DNA, 15 bp, Homo sapiens
ctgtaacaggctata

SEQ ID NO: 1333106 - DNA, 15 bp, Homo sapiens
cctgtaacaggctat

SEQ ID NO: 1333107 - DNA, 15 bp, Homo sapiens
ccctgtaacaggcta

SEQ ID NO: 1333108 - DNA, 15 bp, Homo sapiens
tccctgtaacaggct

SEQ ID NO: 1333109 - DNA, 15 bp, Homo sapiens
ctccctgtaacaggc

SEQ ID NO: 1333110 - DNA, 15 bp, Homo sapiens
actccctgtaacagg

SEQ ID NO: 1333111 - DNA, 15 bp, Homo sapiens
tactccctgtaacag

SEQ ID NO: 1333112 - DNA, 15 bp, Homo sapiens
ttactccctgtaaca

SEQ ID NO: 1333113 - DNA, 15 bp, Homo sapiens
cttactccctgtaac

SEQ ID NO: 1333114 - DNA, 15 bp, Homo sapiens
acttactccctgtaa

SEQ ID NO: 1333115 - DNA, 15 bp, Homo sapiens
cacttactccctgta

SEQ ID NO: 1333116 - DNA, 15 bp, Homo sapiens
ccacttactccctgt

SEQ ID NO: 1333117 - DNA, 15 bp, Homo sapiens
cccacttactccctg

SEQ ID NO: 1333118 - DNA, 15 bp, Homo sapiens
ccccacttactccct

SEQ ID NO: 1333119 - DNA, 15 bp, Homo sapiens
tccccacttactccc

SEQ ID NO: 1333120 - DNA, 15 bp, Homo sapiens
gtccccacttactcc

SEQ ID NO: 1333121 - DNA, 15 bp, Homo sapiens
agtccccacttactc

SEQ ID NO: 1333122 - DNA, 15 bp, Homo sapiens
cagtccccacttact

SEQ ID NO: 1333123 - DNA, 15 bp, Homo sapiens
acagtccccacttac

SEQ ID NO: 1333124 - DNA, 15 bp, Homo sapiens
cacagtccccactta

SEQ ID NO: 1333125 - DNA, 15 bp, Homo sapiens
gcacagtccccactt

SEQ ID NO: 1333126 - DNA, 15 bp, Homo sapiens
ggcacagtccccact

SEQ ID NO: 1333127 - DNA, 15 bp, Homo sapiens
gggcacagtccccac

SEQ ID NO: 1333128 - DNA, 15 bp, Homo sapiens
agggcacagtcccca

SEQ ID NO: 1333129 - DNA, 15 bp, Homo sapiens
cagggcacagtcccc

SEQ ID NO: 1333130 - DNA, 15 bp, Homo sapiens
tcagggcacagtccc

SEQ ID NO: 1333131 - DNA, 15 bp, Homo sapiens
gtcagggcacagtcc

SEQ ID NO: 1333132 - DNA, 15 bp, Homo sapiens
tgtcagggcacagtc

SEQ ID NO: 1333133 - DNA, 15 bp, Homo sapiens
ctgtcagggcacagt

SEQ ID NO: 1333134 - DNA, 15 bp, Homo sapiens
tctgtcagggcacag

SEQ ID NO: 1333135 - DNA, 15 bp, Homo sapiens
ctctgtcagggcaca

SEQ ID NO: 1333136 - DNA, 15 bp, Homo sapiens
actctgtcagggcac

SEQ ID NO: 1333137 - DNA, 15 bp, Homo sapiens
cactctgtcagggca

SEQ ID NO: 1333138 - DNA, 15 bp, Homo sapiens
acactctgtcagggc

SEQ ID NO: 1333139 - DNA, 15 bp, Homo sapiens
gacactctgtcaggg

SEQ ID NO: 1333140 - DNA, 15 bp, Homo sapiens
tgacactctgtcagg

SEQ ID NO: 1333141 - DNA, 15 bp, Homo sapiens
ttgacactctgtcag

SEQ ID NO: 1333142 - DNA, 15 bp, Homo sapiens
attgacactctgtca

SEQ ID NO: 1333143 - DNA, 15 bp, Homo sapiens
cattgacactctgtc

SEQ ID NO: 1333144 - DNA, 15 bp, Homo sapiens
acattgacactctgt

SEQ ID NO: 1333145 - DNA, 15 bp, Homo sapiens
cacattgacactctg

SEQ ID NO: 1333146 - DNA, 15 bp, Homo sapiens
acacattgacactct

SEQ ID NO: 1333147 - DNA, 15 bp, Homo sapiens
gacacattgacactc

SEQ ID NO: 1333148 - DNA, 15 bp, Homo sapiens
agacacattgacact

SEQ ID NO: 1333149 - DNA, 15 bp, Homo sapiens
cagacacattgacac

SEQ ID NO: 1333150 - DNA, 15 bp, Homo sapiens
ccagacacattgaca

SEQ ID NO: 1333151 - DNA, 15 bp, Homo sapiens
tccagacacattgac

SEQ ID NO: 1333152 - DNA, 15 bp, Homo sapiens
ctccagacacattga

SEQ ID NO: 1333153 - DNA, 15 bp, Homo sapiens
tctccagacacattg

SEQ ID NO: 1333154 - DNA, 15 bp, Homo sapiens
ctctccagacacatt

SEQ ID NO: 1333155 - DNA, 15 bp, Homo sapiens
gctctccagacacat

SEQ ID NO: 1333156 - DNA, 15 bp, Homo sapiens
tgctctccagacaca

SEQ ID NO: 1333157 - DNA, 15 bp, Homo sapiens
ttgctctccagacac

SEQ ID NO: 1333158 - DNA, 15 bp, Homo sapiens
cttgctctccagaca

SEQ ID NO: 1333159 - DNA, 15 bp, Homo sapiens
tcttgctctccagac

SEQ ID NO: 1333160 - DNA, 15 bp, Homo sapiens
ctcttgctctccaga

SEQ ID NO: 1333161 - DNA, 15 bp, Homo sapiens
actcttgctctccag

SEQ ID NO: 1333162 - DNA, 15 bp, Homo sapiens
gactcttgctctcca

SEQ ID NO: 1333163 - DNA, 15 bp, Homo sapiens
tgactcttgctctcc

SEQ ID NO: 1333164 - DNA, 15 bp, Homo sapiens
ctgactcttgctctc

SEQ ID NO: 1333165 - DNA, 15 bp, Homo sapiens
gctgactcttgctct

SEQ ID NO: 1333166 - DNA, 15 bp, Homo sapiens
tgctgactcttgctc

SEQ ID NO: 1333167 - DNA, 15 bp, Homo sapiens
ctgctgactcttgct

SEQ ID NO: 1333168 - DNA, 15 bp, Homo sapiens
gctgctgactcttgc

SEQ ID NO: 1333169 - DNA, 15 bp, Homo sapiens
tgctgctgactcttg

SEQ ID NO: 1333170 - DNA, 15 bp, Homo sapiens
atgctgctgactctt

SEQ ID NO: 1333171 - DNA, 15 bp, Homo sapiens
catgctgctgactct

SEQ ID NO: 1333172 - DNA, 15 bp, Homo sapiens
acatgctgctgactc

SEQ ID NO: 1333173 - DNA, 15 bp, Homo sapiens
tacatgctgctgact

SEQ ID NO: 1333174 - DNA, 15 bp, Homo sapiens
atacatgctgctgac

SEQ ID NO: 1333175 - DNA, 15 bp, Homo sapiens
aatacatgctgctga

SEQ ID NO: 1333176 - DNA, 15 bp, Homo sapiens
aaatacatgctgctg

SEQ ID NO: 1333177 - DNA, 15 bp, Homo sapiens
caaatacatgctgct

SEQ ID NO: 1333178 - DNA, 15 bp, Homo sapiens
ccaaatacatgctgc

SEQ ID NO: 1333179 - DNA, 15 bp, Homo sapiens
tccaaatacatgctg

SEQ ID NO: 1333180 - DNA, 15 bp, Homo sapiens
ttccaaatacatgct

SEQ ID NO: 1333181 - DNA, 15 bp, Homo sapiens
tttccaaatacatgc

SEQ ID NO: 1333182 - DNA, 15 bp, Homo sapiens
atttccaaatacatg

SEQ ID NO: 1333183 - DNA, 15 bp, Homo sapiens
tatttccaaatacat

SEQ ID NO: 1333184 - DNA, 15 bp, Homo sapiens
ttatttccaaataca

SEQ ID NO: 1333185 - DNA, 15 bp, Homo sapiens
cttatttccaaatac

SEQ ID NO: 1333186 - DNA, 15 bp, Homo sapiens
ccttatttccaaata

SEQ ID NO: 1333187 - DNA, 15 bp, Homo sapiens
gccttatttccaaat

SEQ ID NO: 1333188 - DNA, 15 bp, Homo sapiens
agccttatttccaaa

SEQ ID NO: 1333189 - DNA, 15 bp, Homo sapiens
tagccttatttccaa

SEQ ID NO: 1333190 - DNA, 15 bp, Homo sapiens
ttagccttatttcca

SEQ ID NO: 1333191 - DNA, 15 bp, Homo sapiens
tttagccttatttcc

SEQ ID NO: 1333192 - DNA, 15 bp, Homo sapiens
ttttagccttatttc

SEQ ID NO: 1333193 - DNA, 15 bp, Homo sapiens
cttttagccttattt

SEQ ID NO: 1333194 - DNA, 15 bp, Homo sapiens
ccttttagccttatt

SEQ ID NO: 1333195 - DNA, 15 bp, Homo sapiens
accttttagccttat

SEQ ID NO: 1333196 - DNA, 15 bp, Homo sapiens
taccttttagcctta

SEQ ID NO: 1333197 - DNA, 15 bp, Homo sapiens
ctaccttttagcctt

SEQ ID NO: 1333198 - DNA, 15 bp, Homo sapiens
tctaccttttagcct

SEQ ID NO: 1333199 - DNA, 15 bp, Homo sapiens
ttctaccttttagcc

SEQ ID NO: 1333200 - DNA, 15 bp, Homo sapiens
tttctaccttttagc

SEQ ID NO: 1333201 - DNA, 15 bp, Homo sapiens
ttttctaccttttag

SEQ ID NO: 1333202 - DNA, 15 bp, Homo sapiens
cttttctacctttta

SEQ ID NO: 1333203 - DNA, 15 bp, Homo sapiens
tcttttctacctttt

SEQ ID NO: 1333204 - DNA, 15 bp, Homo sapiens
ctcttttctaccttt

SEQ ID NO: 1333205 - DNA, 15 bp, Homo sapiens
gctcttttctacctt

SEQ ID NO: 1333206 - DNA, 15 bp, Homo sapiens
ggctcttttctacct

SEQ ID NO: 1333207 - DNA, 15 bp, Homo sapiens
tggctcttttctacc

SEQ ID NO: 1333208 - DNA, 15 bp, Homo sapiens
atggctcttttctac

SEQ ID NO: 1333209 - DNA, 15 bp, Homo sapiens
catggctcttttcta

SEQ ID NO: 1333210 - DNA, 15 bp, Homo sapiens
gcatggctcttttct

SEQ ID NO: 1333211 - DNA, 15 bp, Homo sapiens
agcatggctcttttc

SEQ ID NO: 1333212 - DNA, 15 bp, Homo sapiens
tagcatggctctttt

SEQ ID NO: 1333213 - DNA, 15 bp, Homo sapiens
ttagcatggctcttt

SEQ ID NO: 1333214 - DNA, 15 bp, Homo sapiens
cttagcatggctctt

SEQ ID NO: 1333215 - DNA, 15 bp, Homo sapiens
acttagcatggctct

SEQ ID NO: 1333216 - DNA, 15 bp, Homo sapiens
tacttagcatggctc

SEQ ID NO: 1333217 - DNA, 15 bp, Homo sapiens
ttacttagcatggct

SEQ ID NO: 1333218 - DNA, 15 bp, Homo sapiens
cttacttagcatggc

SEQ ID NO: 1333219 - DNA, 15 bp, Homo sapiens
tcttacttagcatgg

SEQ ID NO: 1333220 - DNA, 15 bp, Homo sapiens
gtcttacttagcatg

SEQ ID NO: 1333221 - DNA, 15 bp, Homo sapiens
ggtcttacttagcat

SEQ ID NO: 1333222 - DNA, 15 bp, Homo sapiens
aggtcttacttagca

SEQ ID NO: 1333223 - DNA, 15 bp, Homo sapiens
aaggtcttacttagc

SEQ ID NO: 1333224 - DNA, 15 bp, Homo sapiens
taaggtcttacttag

SEQ ID NO: 1333225 - DNA, 15 bp, Homo sapiens
gtaaggtcttactta

SEQ ID NO: 1333226 - DNA, 15 bp, Homo sapiens
tgtaaggtcttactt

SEQ ID NO: 1333227 - DNA, 15 bp, Homo sapiens
ctgtaaggtcttact

SEQ ID NO: 1333228 - DNA, 15 bp, Homo sapiens
cctgtaaggtcttac

SEQ ID NO: 1333229 - DNA, 15 bp, Homo sapiens
acctgtaaggtctta

SEQ ID NO: 1333230 - DNA, 15 bp, Homo sapiens
gacctgtaaggtctt

SEQ ID NO: 1333231 - DNA, 15 bp, Homo sapiens
tgacctgtaaggtct

SEQ ID NO: 1333232 - DNA, 15 bp, Homo sapiens
gtgacctgtaaggtc

SEQ ID NO: 1333233 - DNA, 15 bp, Homo sapiens
tgtgacctgtaaggt

SEQ ID NO: 1333234 - DNA, 15 bp, Homo sapiens
gtgtgacctgtaagg

SEQ ID NO: 1333235 - DNA, 15 bp, Homo sapiens
cgtgtgacctgtaag

SEQ ID NO: 1333236 - DNA, 15 bp, Homo sapiens
tcgtgtgacctgtaa

SEQ ID NO: 1333237 - DNA, 15 bp, Homo sapiens
ttcgtgtgacctgta

SEQ ID NO: 1333238 - DNA, 15 bp, Homo sapiens
attcgtgtgacctgt

SEQ ID NO: 1333239 - DNA, 15 bp, Homo sapiens
cattcgtgtgacctg

SEQ ID NO: 1333240 - DNA, 15 bp, Homo sapiens
tcattcgtgtgacct

SEQ ID NO: 1333241 - DNA, 15 bp, Homo sapiens
ctcattcgtgtgacc

SEQ ID NO: 1333242 - DNA, 15 bp, Homo sapiens
actcattcgtgtgac

SEQ ID NO: 1333243 - DNA, 15 bp, Homo sapiens
aactcattcgtgtga

SEQ ID NO: 1333244 - DNA, 15 bp, Homo sapiens
aaactcattcgtgtg

SEQ ID NO: 1333245 - DNA, 15 bp, Homo sapiens
caaactcattcgtgt

SEQ ID NO: 1333246 - DNA, 15 bp, Homo sapiens
gcaaactcattcgtg

SEQ ID NO: 1333247 - DNA, 15 bp, Homo sapiens
agcaaactcattcgt

SEQ ID NO: 1333248 - DNA, 15 bp, Homo sapiens
gagcaaactcattcg

SEQ ID NO: 1333249 - DNA, 15 bp, Homo sapiens
tgagcaaactcattc

SEQ ID NO: 1333250 - DNA, 15 bp, Homo sapiens
gttattcggaatgct

SEQ ID NO: 1333251 - DNA, 15 bp, Homo sapiens
agttattcggaatgc

SEQ ID NO: 1333252 - DNA, 15 bp, Homo sapiens
tagttattcggaatg

SEQ ID NO: 1333253 - DNA, 15 bp, Homo sapiens
atagttattcggaat

SEQ ID NO: 1333254 - DNA, 15 bp, Homo sapiens
aatagttattcggaa

SEQ ID NO: 1333255 - DNA, 15 bp, Homo sapiens
taatagttattcgga

SEQ ID NO: 1333256 - DNA, 15 bp, Homo sapiens
ttaatagttattcgg

SEQ ID NO: 1333257 - DNA, 15 bp, Homo sapiens
cttaatagttattcg

SEQ ID NO: 1333258 - DNA, 15 bp, Homo sapiens
tcttaatagttattc

SEQ ID NO: 1333259 - DNA, 15 bp, Homo sapiens
atcttaatagttatt

SEQ ID NO: 1333260 - DNA, 15 bp, Homo sapiens
aatcttaatagttat

SEQ ID NO: 1333261 - DNA, 15 bp, Homo sapiens
aaatcttaatagtta

SEQ ID NO: 1333262 - DNA, 15 bp, Homo sapiens
gaaatcttaatagtt

SEQ ID NO: 1333263 - DNA, 15 bp, Homo sapiens
ggaaatcttaatagt

SEQ ID NO: 1333264 - DNA, 15 bp, Homo sapiens
tggaaatcttaatag

SEQ ID NO: 1333265 - DNA, 15 bp, Homo sapiens
gtggaaatcttaata

SEQ ID NO: 1333266 - DNA, 15 bp, Homo sapiens
tgtggaaatcttaat

SEQ ID NO: 1333267 - DNA, 15 bp, Homo sapiens
ctgtggaaatcttaa

SEQ ID NO: 1333268 - DNA, 15 bp, Homo sapiens
tctgtggaaatctta

SEQ ID NO: 1333269 - DNA, 15 bp, Homo sapiens
ctctgtggaaatctt

SEQ ID NO: 1333270 - DNA, 15 bp, Homo sapiens
tctctgtggaaatct

SEQ ID NO: 1333271 - DNA, 15 bp, Homo sapiens
atctctgtggaaatc

SEQ ID NO: 1333272 - DNA, 15 bp, Homo sapiens
tatctctgtggaaat

SEQ ID NO: 1333273 - DNA, 15 bp, Homo sapiens
ttatctctgtggaaa

SEQ ID NO: 1333274 - DNA, 15 bp, Homo sapiens
tttatctctgtggaa

SEQ ID NO: 1333275 - DNA, 15 bp, Homo sapiens
gtttatctctgtgga

SEQ ID NO: 1333276 - DNA, 15 bp, Homo sapiens
tgtttatctctgtgg

SEQ ID NO: 1333277 - DNA, 15 bp, Homo sapiens
ttgtttatctctgtg

SEQ ID NO: 1333278 - DNA, 15 bp, Homo sapiens
cttgtttatctctgt

SEQ ID NO: 1333279 - DNA, 15 bp, Homo sapiens
ccttgtttatctctg

SEQ ID NO: 1333280 - DNA, 15 bp, Homo sapiens
accttgtttatctct

SEQ ID NO: 1333281 - DNA, 15 bp, Homo sapiens
taccttgtttatctc

SEQ ID NO: 1333282 - DNA, 15 bp, Homo sapiens
ttaccttgtttatct

SEQ ID NO: 1333283 - DNA, 15 bp, Homo sapiens
gttaccttgtttatc

SEQ ID NO: 1333284 - DNA, 15 bp, Homo sapiens
agttaccttgtttat

SEQ ID NO: 1333285 - DNA, 15 bp, Homo sapiens
cagttaccttgttta

SEQ ID NO: 1333286 - DNA, 15 bp, Homo sapiens
acagttaccttgttt

SEQ ID NO: 1333287 - DNA, 15 bp, Homo sapiens
gacagttaccttgtt

SEQ ID NO: 1333288 - DNA, 15 bp, Homo sapiens
ggacagttaccttgt

SEQ ID NO: 1333289 - DNA, 15 bp, Homo sapiens
tggacagttaccttg

SEQ ID NO: 1333290 - DNA, 15 bp, Homo sapiens
ttggacagttacctt

SEQ ID NO: 1333291 - DNA, 15 bp, Homo sapiens
attggacagttacct

SEQ ID NO: 1333292 - DNA, 15 bp, Homo sapiens
aattggacagttacc

SEQ ID NO: 1333293 - DNA, 15 bp, Homo sapiens
taattggacagttac

SEQ ID NO: 1333294 - DNA, 15 bp, Homo sapiens
gtaattggacagtta

SEQ ID NO: 1333295 - DNA, 15 bp, Homo sapiens
agtaattggacagtt

SEQ ID NO: 1333296 - DNA, 15 bp, Homo sapiens
cagtaattggacagt

SEQ ID NO: 1333297 - DNA, 15 bp, Homo sapiens
gcagtaattggacag

SEQ ID NO: 1333298 - DNA, 15 bp, Homo sapiens
agcagtaattggaca

SEQ ID NO: 1333299 - DNA, 15 bp, Homo sapiens
aagcagtaattggac

SEQ ID NO: 1333300 - DNA, 15 bp, Homo sapiens
aaagcagtaattgga

SEQ ID NO: 1333301 - DNA, 15 bp, Homo sapiens
taaagcagtaattgg

SEQ ID NO: 1333302 - DNA, 15 bp, Homo sapiens
ataaagcagtaattg

SEQ ID NO: 1333303 - DNA, 15 bp, Homo sapiens
aataaagcagtaatt

SEQ ID NO: 1333304 - DNA, 15 bp, Homo sapiens
gaataaagcagtaat

SEQ ID NO: 1333305 - DNA, 15 bp, Homo sapiens
agaataaagcagtaa

SEQ ID NO: 1333306 - DNA, 15 bp, Homo sapiens
gagaataaagcagta

SEQ ID NO: 1333307 - DNA, 15 bp, Homo sapiens
agagaataaagcagt

SEQ ID NO: 1333308 - DNA, 15 bp, Homo sapiens
gagagaataaagcag

SEQ ID NO: 1333309 - DNA, 15 bp, Homo sapiens
agagagaataaagca

SEQ ID NO: 1333310 - DNA, 15 bp, Homo sapiens
tagagagaataaagc

SEQ ID NO: 1333311 - DNA, 15 bp, Homo sapiens
gtagagagaataaag

SEQ ID NO: 1333312 - DNA, 15 bp, Homo sapiens
ggtagagagaataaa

SEQ ID NO: 1333313 - DNA, 15 bp, Homo sapiens
gggtagagagaataa

SEQ ID NO: 1333314 - DNA, 15 bp, Homo sapiens
agggtagagagaata

SEQ ID NO: 1333315 - DNA, 15 bp, Homo sapiens
aagggtagagagaat

SEQ ID NO: 1333316 - DNA, 15 bp, Homo sapiens
taagggtagagagaa

SEQ ID NO: 1333317 - DNA, 15 bp, Homo sapiens
ataagggtagagaga

SEQ ID NO: 1333318 - DNA, 15 bp, Homo sapiens
aataagggtagagag

SEQ ID NO: 1333319 - DNA, 15 bp, Homo sapiens
gaataagggtagaga

SEQ ID NO: 1333320 - DNA, 15 bp, Homo sapiens
cgaataagggtagag

SEQ ID NO: 1333321 - DNA, 15 bp, Homo sapiens
acgaataagggtaga

SEQ ID NO: 1333322 - DNA, 15 bp, Homo sapiens
aacgaataagggtag

SEQ ID NO: 1333323 - DNA, 15 bp, Homo sapiens
caacgaataagggta

SEQ ID NO: 1333324 - DNA, 15 bp, Homo sapiens
ccaacgaataagggt

SEQ ID NO: 1333325 - DNA, 15 bp, Homo sapiens
gccaacgaataaggg

SEQ ID NO: 1333326 - DNA, 15 bp, Homo sapiens
ggccaacgaataagg

SEQ ID NO: 1333327 - DNA, 15 bp, Homo sapiens
tggccaacgaataag

SEQ ID NO: 1333328 - DNA, 15 bp, Homo sapiens
atggccaacgaataa

SEQ ID NO: 1333329 - DNA, 15 bp, Homo sapiens
catggccaacgaata

SEQ ID NO: 1333330 - DNA, 15 bp, Homo sapiens
gcatggccaacgaat

SEQ ID NO: 1333331 - DNA, 15 bp, Homo sapiens
ggcatggccaacgaa

SEQ ID NO: 1333332 - DNA, 15 bp, Homo sapiens
aggcatggccaacga

SEQ ID NO: 1333333 - DNA, 15 bp, Homo sapiens
aaggcatggccaacg

SEQ ID NO: 1333334 - DNA, 15 bp, Homo sapiens
aaaggcatggccaac

SEQ ID NO: 1333335 - DNA, 15 bp, Homo sapiens
taaaggcatggccaa

SEQ ID NO: 1333336 - DNA, 15 bp, Homo sapiens
gtaaaggcatggcca

SEQ ID NO: 1333337 - DNA, 15 bp, Homo sapiens
tgtaaaggcatggcc

SEQ ID NO: 1333338 - DNA, 15 bp, Homo sapiens
ttgtaaaggcatggc

SEQ ID NO: 1333339 - DNA, 15 bp, Homo sapiens
tttgtaaaggcatgg

SEQ ID NO: 1333340 - DNA, 15 bp, Homo sapiens
ctttgtaaaggcatg

SEQ ID NO: 1333341 - DNA, 15 bp, Homo sapiens
tctttgtaaaggcat

SEQ ID NO: 1333342 - DNA, 15 bp, Homo sapiens
ttctttgtaaaggca

SEQ ID NO: 1333343 - DNA, 15 bp, Homo sapiens
tttctttgtaaaggc

SEQ ID NO: 1333344 - DNA, 15 bp, Homo sapiens
ctttctttgtaaagg

SEQ ID NO: 1333345 - DNA, 15 bp, Homo sapiens
cctttctttgtaaag

SEQ ID NO: 1333346 - DNA, 15 bp, Homo sapiens
ccctttctttgtaaa

SEQ ID NO: 1333347 - DNA, 15 bp, Homo sapiens
gccctttctttgtaa

SEQ ID NO: 1333348 - DNA, 15 bp, Homo sapiens
tgccctttctttgta

SEQ ID NO: 1333349 - DNA, 15 bp, Homo sapiens
atgccctttctttgt

SEQ ID NO: 1333350 - DNA, 15 bp, Homo sapiens
aatgccctttctttg

SEQ ID NO: 1333351 - DNA, 15 bp, Homo sapiens
taatgccctttcttt

SEQ ID NO: 1333352 - DNA, 15 bp, Homo sapiens
gtaatgccctttctt

SEQ ID NO: 1333353 - DNA, 15 bp, Homo sapiens
agtaatgccctttct

SEQ ID NO: 1333354 - DNA, 15 bp, Homo sapiens
cagtaatgccctttc

SEQ ID NO: 1333355 - DNA, 15 bp, Homo sapiens
acagtaatgcccttt

SEQ ID NO: 1333356 - DNA, 15 bp, Homo sapiens
cacagtaatgccctt

SEQ ID NO: 1333357 - DNA, 15 bp, Homo sapiens
acacagtaatgccct

SEQ ID NO: 1333358 - DNA, 15 bp, Homo sapiens
aacacagtaatgccc

SEQ ID NO: 1333359 - DNA, 15 bp, Homo sapiens
aaacacagtaatgcc

SEQ ID NO: 1333360 - DNA, 15 bp, Homo sapiens
gaaacacagtaatgc

SEQ ID NO: 1333361 - DNA, 15 bp, Homo sapiens
agaaacacagtaatg

SEQ ID NO: 1333362 - DNA, 15 bp, Homo sapiens
aagaaacacagtaat

SEQ ID NO: 1333363 - DNA, 15 bp, Homo sapiens
caagaaacacagtaa

SEQ ID NO: 1333364 - DNA, 15 bp, Homo sapiens
acaagaaacacagta

SEQ ID NO: 1333365 - DNA, 15 bp, Homo sapiens
aacaagaaacacagt

SEQ ID NO: 1333366 - DNA, 15 bp, Homo sapiens
taacaagaaacacag

SEQ ID NO: 1333367 - DNA, 15 bp, Homo sapiens
gtaacaagaaacaca

SEQ ID NO: 1333368 - DNA, 15 bp, Homo sapiens
agtaacaagaaacac

SEQ ID NO: 1333369 - DNA, 15 bp, Homo sapiens
gagtaacaagaaaca

SEQ ID NO: 1333370 - DNA, 15 bp, Homo sapiens
agagtaacaagaaac

SEQ ID NO: 1333371 - DNA, 15 bp, Homo sapiens
aagagtaacaagaaa

SEQ ID NO: 1333372 - DNA, 15 bp, Homo sapiens
taagagtaacaagaa

SEQ ID NO: 1333373 - DNA, 15 bp, Homo sapiens
ataagagtaacaaga

SEQ ID NO: 1333374 - DNA, 15 bp, Homo sapiens
cataagagtaacaag

SEQ ID NO: 1333375 - DNA, 15 bp, Homo sapiens
tcataagagtaacaa

SEQ ID NO: 1333376 - DNA, 15 bp, Homo sapiens
ttcataagagtaaca

SEQ ID NO: 1333377 - DNA, 15 bp, Homo sapiens
tttcataagagtaac

SEQ ID NO: 1333378 - DNA, 15 bp, Homo sapiens
ttttcataagagtaa

SEQ ID NO: 1333379 - DNA, 15 bp, Homo sapiens
tttttcataagagta

SEQ ID NO: 1333380 - DNA, 15 bp, Homo sapiens
ctttttcataagagt

SEQ ID NO: 1333381 - DNA, 15 bp, Homo sapiens
tctttttcataagag

SEQ ID NO: 1333382 - DNA, 15 bp, Homo sapiens
ctctttttcataaga

SEQ ID NO: 1333383 - DNA, 15 bp, Homo sapiens
tctctttttcataag

SEQ ID NO: 1333384 - DNA, 15 bp, Homo sapiens
ttctctttttcataa

SEQ ID NO: 1333385 - DNA, 15 bp, Homo sapiens
tttctctttttcata

SEQ ID NO: 1333386 - DNA, 15 bp, Homo sapiens
tttttctctttttca

SEQ ID NO: 1333387 - DNA, 15 bp, Homo sapiens
ctttttctctttttc

SEQ ID NO: 1333388 - DNA, 15 bp, Homo sapiens
tctttttctcttttt

SEQ ID NO: 1333389 - DNA, 15 bp, Homo sapiens
ttctttttctctttt

SEQ ID NO: 1333390 - DNA, 15 bp, Homo sapiens
tttctttttctcttt

SEQ ID NO: 1333391 - DNA, 15 bp, Homo sapiens
atttctttttctctt

SEQ ID NO: 1333392 - DNA, 15 bp, Homo sapiens
tatttctttttctct

SEQ ID NO: 1333393 - DNA, 15 bp, Homo sapiens
atatttctttttctc

SEQ ID NO: 1333394 - DNA, 15 bp, Homo sapiens
aatatttctttttct

SEQ ID NO: 1333395 - DNA, 15 bp, Homo sapiens
taatatttctttttc

SEQ ID NO: 1333396 - DNA, 15 bp, Homo sapiens
ataatatttcttttt

SEQ ID NO: 1333397 - DNA, 15 bp, Homo sapiens
tataatatttctttt

SEQ ID NO: 1333398 - DNA, 15 bp, Homo sapiens
ttataatatttcttt

SEQ ID NO: 1333399 - DNA, 15 bp, Homo sapiens
attataatatttctt

SEQ ID NO: 1333400 - DNA, 15 bp, Homo sapiens
aattataatatttct

SEQ ID NO: 1333401 - DNA, 15 bp, Homo sapiens
caattataatatttc

SEQ ID NO: 1333402 - DNA, 15 bp, Homo sapiens
ccaattataatattt

SEQ ID NO: 1333403 - DNA, 15 bp, Homo sapiens
cccaattataatatt

SEQ ID NO: 1333404 - DNA, 15 bp, Homo sapiens
ccccaattataatat

SEQ ID NO: 1333405 - DNA, 15 bp, Homo sapiens
tccccaattataata

SEQ ID NO: 1333406 - DNA, 15 bp, Homo sapiens
ttccccaattataat

SEQ ID NO: 1333407 - DNA, 15 bp, Homo sapiens
gttccccaattataa

SEQ ID NO: 1333408 - DNA, 15 bp, Homo sapiens
tgttccccaattata

SEQ ID NO: 1333409 - DNA, 15 bp, Homo sapiens
ctgttccccaattat

SEQ ID NO: 1333410 - DNA, 15 bp, Homo sapiens
tctgttccccaatta

SEQ ID NO: 1333411 - DNA, 15 bp, Homo sapiens
atctgttccccaatt

SEQ ID NO: 1333412 - DNA, 15 bp, Homo sapiens
tatctgttccccaat

SEQ ID NO: 1333413 - DNA, 15 bp, Homo sapiens
ctatctgttccccaa

SEQ ID NO: 1333414 - DNA, 15 bp, Homo sapiens
tctatctgttcccca

SEQ ID NO: 1333415 - DNA, 15 bp, Homo sapiens
ttctatctgttcccc

SEQ ID NO: 1333416 - DNA, 15 bp, Homo sapiens
cttctatctgttccc

SEQ ID NO: 1333417 - DNA, 15 bp, Homo sapiens
tcttctatctgttcc

SEQ ID NO: 1333418 - DNA, 15 bp, Homo sapiens
ttcttctatctgttc

SEQ ID NO: 1333419 - DNA, 15 bp, Homo sapiens
attcttctatctgtt

SEQ ID NO: 1333420 - DNA, 15 bp, Homo sapiens
tattcttctatctgt

SEQ ID NO: 1333421 - DNA, 15 bp, Homo sapiens
ctattcttctatctg

SEQ ID NO: 1333422 - DNA, 15 bp, Homo sapiens
actattcttctatct

SEQ ID NO: 1333423 - DNA, 15 bp, Homo sapiens
tactattcttctatc

SEQ ID NO: 1333424 - DNA, 15 bp, Homo sapiens
ttactattcttctat

SEQ ID NO: 1333425 - DNA, 15 bp, Homo sapiens
gttactattcttcta

SEQ ID NO: 1333426 - DNA, 15 bp, Homo sapiens
cgttactattcttct

SEQ ID NO: 1333427 - DNA, 15 bp, Homo sapiens
acgttactattcttc

SEQ ID NO: 1333428 - DNA, 15 bp, Homo sapiens
aacgttactattctt

SEQ ID NO: 1333429 - DNA, 15 bp, Homo sapiens
taacgttactattct

SEQ ID NO: 1333430 - DNA, 15 bp, Homo sapiens
ttaacgttactattc

SEQ ID NO: 1333431 - DNA, 15 bp, Homo sapiens
attaacgttactatt

SEQ ID NO: 1333432 - DNA, 15 bp, Homo sapiens
tattaacgttactat

SEQ ID NO: 1333433 - DNA, 15 bp, Homo sapiens
ctattaacgttacta

SEQ ID NO: 1333434 - DNA, 15 bp, Homo sapiens
tctattaacgttact

SEQ ID NO: 1333435 - DNA, 15 bp, Homo sapiens
ctctattaacgttac

SEQ ID NO: 1333436 - DNA, 15 bp, Homo sapiens
gctctattaacgtta

SEQ ID NO: 1333437 - DNA, 15 bp, Homo sapiens
agctctattaacgtt

SEQ ID NO: 1333438 - DNA, 15 bp, Homo sapiens
aagctctattaacgt

SEQ ID NO: 1333439 - DNA, 15 bp, Homo sapiens
aaagctctattaacg

SEQ ID NO: 1333440 - DNA, 15 bp, Homo sapiens
taaagctctattaac

SEQ ID NO: 1333441 - DNA, 15 bp, Homo sapiens
ctaaagctctattaa

SEQ ID NO: 1333442 - DNA, 15 bp, Homo sapiens
actaaagctctatta

SEQ ID NO: 1333443 - DNA, 15 bp, Homo sapiens
cactaaagctctatt

SEQ ID NO: 1333444 - DNA, 15 bp, Homo sapiens
tcactaaagctctat

SEQ ID NO: 1333445 - DNA, 15 bp, Homo sapiens
ttcactaaagctcta

SEQ ID NO: 1333446 - DNA, 15 bp, Homo sapiens
cttcactaaagctct

SEQ ID NO: 1333447 - DNA, 15 bp, Homo sapiens
ccttcactaaagctc

SEQ ID NO: 1333448 - DNA, 15 bp, Homo sapiens
gccttcactaaagct

SEQ ID NO: 1333449 - DNA, 15 bp, Homo sapiens
agccttcactaaagc

SEQ ID NO: 1333450 - DNA, 15 bp, Homo sapiens
aagccttcactaaag

SEQ ID NO: 1333451 - DNA, 15 bp, Homo sapiens
aaagccttcactaaa

SEQ ID NO: 1333452 - DNA, 15 bp, Homo sapiens
taaagccttcactaa

SEQ ID NO: 1333453 - DNA, 15 bp, Homo sapiens
ttaaagccttcacta

SEQ ID NO: 1333454 - DNA, 15 bp, Homo sapiens
cttaaagccttcact

SEQ ID NO: 1333455 - DNA, 15 bp, Homo sapiens
acttaaagccttcac

SEQ ID NO: 1333456 - DNA, 15 bp, Homo sapiens
tacttaaagccttca

SEQ ID NO: 1333457 - DNA, 15 bp, Homo sapiens
ttacttaaagccttc

SEQ ID NO: 1333458 - DNA, 15 bp, Homo sapiens
tttacttaaagcctt

SEQ ID NO: 1333459 - DNA, 15 bp, Homo sapiens
ctttacttaaagcct

SEQ ID NO: 1333460 - DNA, 15 bp, Homo sapiens
cctttacttaaagcc

SEQ ID NO: 1333461 - DNA, 15 bp, Homo sapiens
acctttacttaaagc

SEQ ID NO: 1333462 - DNA, 15 bp, Homo sapiens
tacctttacttaaag

SEQ ID NO: 1333463 - DNA, 15 bp, Homo sapiens
atacctttacttaaa

SEQ ID NO: 1333464 - DNA, 15 bp, Homo sapiens
gatacctttacttaa

SEQ ID NO: 1333465 - DNA, 15 bp, Homo sapiens
tgatacctttactta

SEQ ID NO: 1333466 - DNA, 15 bp, Homo sapiens
ttgatacctttactt

SEQ ID NO: 1333467 - DNA, 15 bp, Homo sapiens
cttgatacctttact

SEQ ID NO: 1333468 - DNA, 15 bp, Homo sapiens
tcttgatacctttac

SEQ ID NO: 1333469 - DNA, 15 bp, Homo sapiens
ttcttgataccttta

SEQ ID NO: 1333470 - DNA, 15 bp, Homo sapiens
attcttgataccttt

SEQ ID NO: 1333471 - DNA, 15 bp, Homo sapiens
tattcttgatacctt

SEQ ID NO: 1333472 - DNA, 15 bp, Homo sapiens
ttattcttgatacct

SEQ ID NO: 1333473 - DNA, 15 bp, Homo sapiens
cttattcttgatacc

SEQ ID NO: 1333474 - DNA, 15 bp, Homo sapiens
ccttattcttgatac

SEQ ID NO: 1333475 - DNA, 15 bp, Homo sapiens
tccttattcttgata

SEQ ID NO: 1333476 - DNA, 15 bp, Homo sapiens
ttccttattcttgat

SEQ ID NO: 1333477 - DNA, 15 bp, Homo sapiens
tttccttattcttga

SEQ ID NO: 1333478 - DNA, 15 bp, Homo sapiens
atttccttattcttg

SEQ ID NO: 1333479 - DNA, 15 bp, Homo sapiens
gatttccttattctt

SEQ ID NO: 1333480 - DNA, 15 bp, Homo sapiens
agatttccttattct

SEQ ID NO: 1333481 - DNA, 15 bp, Homo sapiens
tagatttccttattc

SEQ ID NO: 1333482 - DNA, 15 bp, Homo sapiens
ttagatttccttatt

SEQ ID NO: 1333483 - DNA, 15 bp, Homo sapiens
cttagatttccttat

SEQ ID NO: 1333484 - DNA, 15 bp, Homo sapiens
gcttagatttcctta

SEQ ID NO: 1333485 - DNA, 15 bp, Homo sapiens
tgcttagatttcctt

SEQ ID NO: 1333486 - DNA, 15 bp, Homo sapiens
ctgcttagatttcct

SEQ ID NO: 1333487 - DNA, 15 bp, Homo sapiens
actgcttagatttcc

SEQ ID NO: 1333488 - DNA, 15 bp, Homo sapiens
cactgcttagatttc

SEQ ID NO: 1333489 - DNA, 15 bp, Homo sapiens
gcactgcttagattt

SEQ ID NO: 1333490 - DNA, 15 bp, Homo sapiens
tgcactgcttagatt

SEQ ID NO: 1333491 - DNA, 15 bp, Homo sapiens
atgcactgcttagat

SEQ ID NO: 1333492 - DNA, 15 bp, Homo sapiens
aatgcactgcttaga

SEQ ID NO: 1333493 - DNA, 15 bp, Homo sapiens
caatgcactgcttag

SEQ ID NO: 1333494 - DNA, 15 bp, Homo sapiens
tcaatgcactgctta

SEQ ID NO: 1333495 - DNA, 15 bp, Homo sapiens
ctcaatgcactgctt

SEQ ID NO: 1333496 - DNA, 15 bp, Homo sapiens
tctcaatgcactgct

SEQ ID NO: 1333497 - DNA, 15 bp, Homo sapiens
atctcaatgcactgc

SEQ ID NO: 1333498 - DNA, 15 bp, Homo sapiens
gatctcaatgcactg

SEQ ID NO: 1333499 - DNA, 15 bp, Homo sapiens
agatctcaatgcact

SEQ ID NO: 1333500 - DNA, 15 bp, Homo sapiens
gagatctcaatgcac

SEQ ID NO: 1333501 - DNA, 15 bp, Homo sapiens
agagatctcaatgca

SEQ ID NO: 1333502 - DNA, 15 bp, Homo sapiens
cagagatctcaatgc

SEQ ID NO: 1333503 - DNA, 15 bp, Homo sapiens
acagagatctcaatg

SEQ ID NO: 1333504 - DNA, 15 bp, Homo sapiens
cacagagatctcaat

SEQ ID NO: 1333505 - DNA, 15 bp, Homo sapiens
tcacagagatctcaa

SEQ ID NO: 1333506 - DNA, 15 bp, Homo sapiens
ttcacagagatctca

SEQ ID NO: 1333507 - DNA, 15 bp, Homo sapiens
tttcacagagatctc

SEQ ID NO: 1333508 - DNA, 15 bp, Homo sapiens
atttcacagagatct

SEQ ID NO: 1333509 - DNA, 15 bp, Homo sapiens
gatttcacagagatc

SEQ ID NO: 1333510 - DNA, 15 bp, Homo sapiens
tgatttcacagagat

SEQ ID NO: 1333511 - DNA, 15 bp, Homo sapiens
ctgatttcacagaga

SEQ ID NO: 1333512 - DNA, 15 bp, Homo sapiens
actgatttcacagag

SEQ ID NO: 1333513 - DNA, 15 bp, Homo sapiens
cactgatttcacaga

SEQ ID NO: 1333514 - DNA, 15 bp, Homo sapiens
tcactgatttcacag

SEQ ID NO: 1333515 - DNA, 15 bp, Homo sapiens
ctcactgatttcaca

SEQ ID NO: 1333516 - DNA, 15 bp, Homo sapiens
tctcactgatttcac

SEQ ID NO: 1333517 - DNA, 15 bp, Homo sapiens
ttctcactgatttca

SEQ ID NO: 1333518 - DNA, 15 bp, Homo sapiens
attctcactgatttc

SEQ ID NO: 1333519 - DNA, 15 bp, Homo sapiens
aattctcactgattt

SEQ ID NO: 1333520 - DNA, 15 bp, Homo sapiens
gaattctcactgatt

SEQ ID NO: 1333521 - DNA, 15 bp, Homo sapiens
tgaattctcactgat

SEQ ID NO: 1333522 - DNA, 15 bp, Homo sapiens
atgaattctcactga

SEQ ID NO: 1333523 - DNA, 15 bp, Homo sapiens
gatgaattctcactg

SEQ ID NO: 1333524 - DNA, 15 bp, Homo sapiens
ggatgaattctcact

SEQ ID NO: 1333525 - DNA, 15 bp, Homo sapiens
aggatgaattctcac

SEQ ID NO: 1333526 - DNA, 15 bp, Homo sapiens
aaggatgaattctca

SEQ ID NO: 1333527 - DNA, 15 bp, Homo sapiens
caaggatgaattctc

SEQ ID NO: 1333528 - DNA, 15 bp, Homo sapiens
tcaaggatgaattct

SEQ ID NO: 1333529 - DNA, 15 bp, Homo sapiens
atcaaggatgaattc

SEQ ID NO: 1333530 - DNA, 15 bp, Homo sapiens
catcaaggatgaatt

SEQ ID NO: 1333531 - DNA, 15 bp, Homo sapiens
ccatcaaggatgaat

SEQ ID NO: 1333532 - DNA, 15 bp, Homo sapiens
accatcaaggatgaa

SEQ ID NO: 1333533 - DNA, 15 bp, Homo sapiens
taccatcaaggatga

SEQ ID NO: 1333534 - DNA, 15 bp, Homo sapiens
ataccatcaaggatg

SEQ ID NO: 1333535 - DNA, 15 bp, Homo sapiens
gataccatcaaggat

SEQ ID NO: 1333536 - DNA, 15 bp, Homo sapiens
agataccatcaagga

SEQ ID NO: 1333537 - DNA, 15 bp, Homo sapiens
aagataccatcaagg

SEQ ID NO: 1333538 - DNA, 15 bp, Homo sapiens
caagataccatcaag

SEQ ID NO: 1333539 - DNA, 15 bp, Homo sapiens
ccaagataccatcaa

SEQ ID NO: 1333540 - DNA, 15 bp, Homo sapiens
tccaagataccatca

SEQ ID NO: 1333541 - DNA, 15 bp, Homo sapiens
ctccaagataccatc

SEQ ID NO: 1333542 - DNA, 15 bp, Homo sapiens
tctccaagataccat

SEQ ID NO: 1333543 - DNA, 15 bp, Homo sapiens
atctccaagatacca

SEQ ID NO: 1333544 - DNA, 15 bp, Homo sapiens
aatctccaagatacc

SEQ ID NO: 1333545 - DNA, 15 bp, Homo sapiens
taatctccaagatac

SEQ ID NO: 1333546 - DNA, 15 bp, Homo sapiens
ataatctccaagata

SEQ ID NO: 1333547 - DNA, 15 bp, Homo sapiens
gataatctccaagat

SEQ ID NO: 1333548 - DNA, 15 bp, Homo sapiens
agataatctccaaga

SEQ ID NO: 1333549 - DNA, 15 bp, Homo sapiens
gagataatctccaag

SEQ ID NO: 1333550 - DNA, 15 bp, Homo sapiens
tgagataatctccaa

SEQ ID NO: 1333551 - DNA, 15 bp, Homo sapiens
gtgagataatctcca

SEQ ID NO: 1333552 - DNA, 15 bp, Homo sapiens
ggtgagataatctcc

SEQ ID NO: 1333553 - DNA, 15 bp, Homo sapiens
gggtgagataatctc

SEQ ID NO: 1333554 - DNA, 15 bp, Homo sapiens
tgggtgagataatct

SEQ ID NO: 1333555 - DNA, 15 bp, Homo sapiens
gtgggtgagataatc

SEQ ID NO: 1333556 - DNA, 15 bp, Homo sapiens
ggtgggtgagataat

SEQ ID NO: 1333557 - DNA, 15 bp, Homo sapiens
tggtgggtgagataa

SEQ ID NO: 1333558 - DNA, 15 bp, Homo sapiens
atggtgggtgagata

SEQ ID NO: 1333559 - DNA, 15 bp, Homo sapiens
aatggtgggtgagat

SEQ ID NO: 1333560 - DNA, 15 bp, Homo sapiens
aaatggtgggtgaga

SEQ ID NO: 1333561 - DNA, 15 bp, Homo sapiens
taaatggtgggtgag

SEQ ID NO: 1333562 - DNA, 15 bp, Homo sapiens
ttaaatggtgggtga

SEQ ID NO: 1333563 - DNA, 15 bp, Homo sapiens
tttaaatggtgggtg

SEQ ID NO: 1333564 - DNA, 15 bp, Homo sapiens
atttaaatggtgggt

SEQ ID NO: 1333565 - DNA, 15 bp, Homo sapiens
aatttaaatggtggg

SEQ ID NO: 1333566 - DNA, 15 bp, Homo sapiens
taatttaaatggtgg

SEQ ID NO: 1333567 - DNA, 15 bp, Homo sapiens
ataatttaaatggtg

SEQ ID NO: 1333568 - DNA, 15 bp, Homo sapiens
cataatttaaatggt

SEQ ID NO: 1333569 - DNA, 15 bp, Homo sapiens
tcataatttaaatgg

SEQ ID NO: 1333570 - DNA, 15 bp, Homo sapiens
ctcataatttaaatg

SEQ ID NO: 1333571 - DNA, 15 bp, Homo sapiens
actcataatttaaat

SEQ ID NO: 1333572 - DNA, 15 bp, Homo sapiens
tactcataatttaaa

SEQ ID NO: 1333573 - DNA, 15 bp, Homo sapiens
ttactcataatttaa

SEQ ID NO: 1333574 - DNA, 15 bp, Homo sapiens
tttactcataattta

SEQ ID NO: 1333575 - DNA, 15 bp, Homo sapiens
gtttactcataattt

SEQ ID NO: 1333576 - DNA, 15 bp, Homo sapiens
agtttactcataatt

SEQ ID NO: 1333577 - DNA, 15 bp, Homo sapiens
tagtttactcataat

SEQ ID NO: 1333578 - DNA, 15 bp, Homo sapiens
ctagtttactcataa

SEQ ID NO: 1333579 - DNA, 15 bp, Homo sapiens
cctagtttactcata

SEQ ID NO: 1333580 - DNA, 15 bp, Homo sapiens
ccctagtttactcat

SEQ ID NO: 1333581 - DNA, 15 bp, Homo sapiens
accctagtttactca

SEQ ID NO: 1333582 - DNA, 15 bp, Homo sapiens
aaccctagtttactc

SEQ ID NO: 1333583 - DNA, 15 bp, Homo sapiens
gaaccctagtttact

SEQ ID NO: 1333584 - DNA, 15 bp, Homo sapiens
tgaaccctagtttac

SEQ ID NO: 1333585 - DNA, 15 bp, Homo sapiens
ctgaaccctagttta

SEQ ID NO: 1333586 - DNA, 15 bp, Homo sapiens
tctgaaccctagttt

SEQ ID NO: 1333587 - DNA, 15 bp, Homo sapiens
ctctgaaccctagtt

SEQ ID NO: 1333588 - DNA, 15 bp, Homo sapiens
tctctgaaccctagt

SEQ ID NO: 1333589 - DNA, 15 bp, Homo sapiens
gtctctgaaccctag

SEQ ID NO: 1333590 - DNA, 15 bp, Homo sapiens
tgtctctgaacccta

SEQ ID NO: 1333591 - DNA, 15 bp, Homo sapiens
atgtctctgaaccct

SEQ ID NO: 1333592 - DNA, 15 bp, Homo sapiens
aatgtctctgaaccc

SEQ ID NO: 1333593 - DNA, 15 bp, Homo sapiens
gaatgtctctgaacc

SEQ ID NO: 1333594 - DNA, 15 bp, Homo sapiens
agaatgtctctgaac

SEQ ID NO: 1333595 - DNA, 15 bp, Homo sapiens
cagaatgtctctgaa

SEQ ID NO: 1333596 - DNA, 15 bp, Homo sapiens
acagaatgtctctga

SEQ ID NO: 1333597 - DNA, 15 bp, Homo sapiens
cacagaatgtctctg

SEQ ID NO: 1333598 - DNA, 15 bp, Homo sapiens
tcacagaatgtctct

SEQ ID NO: 1333599 - DNA, 15 bp, Homo sapiens
atcacagaatgtctc

SEQ ID NO: 1333600 - DNA, 15 bp, Homo sapiens
aatcacagaatgtct

SEQ ID NO: 1333601 - DNA, 15 bp, Homo sapiens
aaatcacagaatgtc

SEQ ID NO: 1333602 - DNA, 15 bp, Homo sapiens
caaatcacagaatgt

SEQ ID NO: 1333603 - DNA, 15 bp, Homo sapiens
tcaaatcacagaatg

SEQ ID NO: 1333604 - DNA, 15 bp, Homo sapiens
gtcaaatcacagaat

SEQ ID NO: 1333605 - DNA, 15 bp, Homo sapiens
ggtcaaatcacagaa

SEQ ID NO: 1333606 - DNA, 15 bp, Homo sapiens
tggtcaaatcacaga

SEQ ID NO: 1333607 - DNA, 15 bp, Homo sapiens
gtggtcaaatcacag

SEQ ID NO: 1333608 - DNA, 15 bp, Homo sapiens
ggtggtcaaatcaca

SEQ ID NO: 1333609 - DNA, 15 bp, Homo sapiens
tggtggtcaaatcac

SEQ ID NO: 1333610 - DNA, 15 bp, Homo sapiens
atggtggtcaaatca

SEQ ID NO: 1333611 - DNA, 15 bp, Homo sapiens
gatggtggtcaaatc

SEQ ID NO: 1333612 - DNA, 15 bp, Homo sapiens
tgatggtggtcaaat

SEQ ID NO: 1333613 - DNA, 15 bp, Homo sapiens
ttgatggtggtcaaa

SEQ ID NO: 1333614 - DNA, 15 bp, Homo sapiens
tttgatggtggtcaa

SEQ ID NO: 1333615 - DNA, 15 bp, Homo sapiens
gtttgatggtggtca

SEQ ID NO: 1333616 - DNA, 15 bp, Homo sapiens
tgtttgatggtggtc

SEQ ID NO: 1333617 - DNA, 15 bp, Homo sapiens
ctgtttgatggtggt

SEQ ID NO: 1333618 - DNA, 15 bp, Homo sapiens
gctgtttgatggtgg

SEQ ID NO: 1333619 - DNA, 15 bp, Homo sapiens
tgctgtttgatggtg

SEQ ID NO: 1333620 - DNA, 15 bp, Homo sapiens
ttgctgtttgatggt

SEQ ID NO: 1333621 - DNA, 15 bp, Homo sapiens
cttgctgtttgatgg

SEQ ID NO: 1333622 - DNA, 15 bp, Homo sapiens
acttgctgtttgatg

SEQ ID NO: 1333623 - DNA, 15 bp, Homo sapiens
aacttgctgtttgat

SEQ ID NO: 1333624 - DNA, 15 bp, Homo sapiens
taacttgctgtttga

SEQ ID NO: 1333625 - DNA, 15 bp, Homo sapiens
ctaacttgctgtttg

SEQ ID NO: 1333626 - DNA, 15 bp, Homo sapiens
gctaacttgctgttt

SEQ ID NO: 1333627 - DNA, 15 bp, Homo sapiens
tgctaacttgctgtt

SEQ ID NO: 1333628 - DNA, 15 bp, Homo sapiens
ttgctaacttgctgt

SEQ ID NO: 1333629 - DNA, 15 bp, Homo sapiens
gttgctaacttgctg

SEQ ID NO: 1333630 - DNA, 15 bp, Homo sapiens
tgttgctaacttgct

SEQ ID NO: 1333631 - DNA, 15 bp, Homo sapiens
gtgttgctaacttgc

SEQ ID NO: 1333632 - DNA, 15 bp, Homo sapiens
ggtgttgctaacttg

SEQ ID NO: 1333633 - DNA, 15 bp, Homo sapiens
tggtgttgctaactt

SEQ ID NO: 1333634 - DNA, 15 bp, Homo sapiens
ttggtgttgctaact

SEQ ID NO: 1333635 - DNA, 15 bp, Homo sapiens
cttggtgttgctaac

SEQ ID NO: 1333636 - DNA, 15 bp, Homo sapiens
tcttggtgttgctaa

SEQ ID NO: 1333637 - DNA, 15 bp, Homo sapiens
ctcttggtgttgcta

SEQ ID NO: 1333638 - DNA, 15 bp, Homo sapiens
tctcttggtgttgct

SEQ ID NO: 1333639 - DNA, 15 bp, Homo sapiens
gtctcttggtgttgc

SEQ ID NO: 1333640 - DNA, 15 bp, Homo sapiens
tgtctcttggtgttg

SEQ ID NO: 1333641 - DNA, 15 bp, Homo sapiens
atgtctcttggtgtt

SEQ ID NO: 1333642 - DNA, 15 bp, Homo sapiens
aatgtctcttggtgt

SEQ ID NO: 1333643 - DNA, 15 bp, Homo sapiens
caatgtctcttggtg

SEQ ID NO: 1333644 - DNA, 15 bp, Homo sapiens
tcaatgtctcttggt

SEQ ID NO: 1333645 - DNA, 15 bp, Homo sapiens
ttcaatgtctcttgg

SEQ ID NO: 1333646 - DNA, 15 bp, Homo sapiens
tttcaatgtctcttg

SEQ ID NO: 1333647 - DNA, 15 bp, Homo sapiens
gtttcaatgtctctt

SEQ ID NO: 1333648 - DNA, 15 bp, Homo sapiens
cgtttcaatgtctct

SEQ ID NO: 1333649 - DNA, 15 bp, Homo sapiens
tcgtttcaatgtctc

SEQ ID NO: 1333650 - DNA, 15 bp, Homo sapiens
ttcgtttcaatgtct

SEQ ID NO: 1333651 - DNA, 15 bp, Homo sapiens
tttcgtttcaatgtc

SEQ ID NO: 1333652 - DNA, 15 bp, Homo sapiens
gtttcgtttcaatgt

SEQ ID NO: 1333653 - DNA, 15 bp, Homo sapiens
ggtttcgtttcaatg

SEQ ID NO: 1333654 - DNA, 15 bp, Homo sapiens
aggtttcgtttcaat

SEQ ID NO: 1333655 - DNA, 15 bp, Homo sapiens
aaggtttcgtttcaa

SEQ ID NO: 1333656 - DNA, 15 bp, Homo sapiens
caaggtttcgtttca

SEQ ID NO: 1333657 - DNA, 15 bp, Homo sapiens
ccaaggtttcgtttc

SEQ ID NO: 1333658 - DNA, 15 bp, Homo sapiens
tccaaggtttcgttt

SEQ ID NO: 1333659 - DNA, 15 bp, Homo sapiens
ctccaaggtttcgtt

SEQ ID NO: 1333660 - DNA, 15 bp, Homo sapiens
gctccaaggtttcgt

SEQ ID NO: 1333661 - DNA, 15 bp, Homo sapiens
ggctccaaggtttcg

SEQ ID NO: 1333662 - DNA, 15 bp, Homo sapiens
gggctccaaggtttc

SEQ ID NO: 1333663 - DNA, 15 bp, Homo sapiens
ggggctccaaggttt

SEQ ID NO: 1333664 - DNA, 15 bp, Homo sapiens
tggggctccaaggtt

SEQ ID NO: 1333665 - DNA, 15 bp, Homo sapiens
gtggggctccaaggt

SEQ ID NO: 1333666 - DNA, 15 bp, Homo sapiens
tgtggggctccaagg

SEQ ID NO: 1333667 - DNA, 15 bp, Homo sapiens
gtgtggggctccaag

SEQ ID NO: 1333668 - DNA, 15 bp, Homo sapiens
ggtgtggggctccaa

SEQ ID NO: 1333669 - DNA, 15 bp, Homo sapiens
tggtgtggggctcca

SEQ ID NO: 1333670 - DNA, 15 bp, Homo sapiens
ctggtgtggggctcc

SEQ ID NO: 1333671 - DNA, 15 bp, Homo sapiens
actggtgtggggctc

SEQ ID NO: 1333672 - DNA, 15 bp, Homo sapiens
cactggtgtggggct

SEQ ID NO: 1333673 - DNA, 15 bp, Homo sapiens
gcactggtgtggggc

SEQ ID NO: 1333674 - DNA, 15 bp, Homo sapiens
ggcactggtgtgggg

SEQ ID NO: 1333675 - DNA, 15 bp, Homo sapiens
aggcactggtgtggg

SEQ ID NO: 1333676 - DNA, 15 bp, Homo sapiens
aaggcactggtgtgg

SEQ ID NO: 1333677 - DNA, 15 bp, Homo sapiens
gaaggcactggtgtg

SEQ ID NO: 1333678 - DNA, 15 bp, Homo sapiens
tgaaggcactggtgt

SEQ ID NO: 1333679 - DNA, 15 bp, Homo sapiens
ctgaaggcactggtg

SEQ ID NO: 1333680 - DNA, 15 bp, Homo sapiens
gctgaaggcactggt

SEQ ID NO: 1333681 - DNA, 15 bp, Homo sapiens
agctgaaggcactgg

SEQ ID NO: 1333682 - DNA, 15 bp, Homo sapiens
gagctgaaggcactg

SEQ ID NO: 1333683 - DNA, 15 bp, Homo sapiens
ggagctgaaggcact

SEQ ID NO: 1333684 - DNA, 15 bp, Homo sapiens
aggagctgaaggcac

SEQ ID NO: 1333685 - DNA, 15 bp, Homo sapiens
caggagctgaaggca

SEQ ID NO: 1333686 - DNA, 15 bp, Homo sapiens
gcaggagctgaaggc

SEQ ID NO: 1333687 - DNA, 15 bp, Homo sapiens
tgcaggagctgaagg

SEQ ID NO: 1333688 - DNA, 15 bp, Homo sapiens
gtgcaggagctgaag

SEQ ID NO: 1333689 - DNA, 15 bp, Homo sapiens
tgtgcaggagctgaa

SEQ ID NO: 1333690 - DNA, 15 bp, Homo sapiens
gtgtgcaggagctga

SEQ ID NO: 1333691 - DNA, 15 bp, Homo sapiens
tgtgtgcaggagctg

SEQ ID NO: 1333692 - DNA, 15 bp, Homo sapiens
gtgtgtgcaggagct

SEQ ID NO: 1333693 - DNA, 15 bp, Homo sapiens
agtgtgtgcaggagc

SEQ ID NO: 1333694 - DNA, 15 bp, Homo sapiens
aagtgtgtgcaggag

SEQ ID NO: 1333695 - DNA, 15 bp, Homo sapiens
caagtgtgtgcagga

SEQ ID NO: 1333696 - DNA, 15 bp, Homo sapiens
ccaagtgtgtgcagg

SEQ ID NO: 1333697 - DNA, 15 bp, Homo sapiens
gccaagtgtgtgcag

SEQ ID NO: 1333698 - DNA, 15 bp, Homo sapiens
ggccaagtgtgtgca

SEQ ID NO: 1333699 - DNA, 15 bp, Homo sapiens
aggccaagtgtgtgc

SEQ ID NO: 1333700 - DNA, 15 bp, Homo sapiens
gaggccaagtgtgtg

SEQ ID NO: 1333701 - DNA, 15 bp, Homo sapiens
ggaggccaagtgtgt

SEQ ID NO: 1333702 - DNA, 15 bp, Homo sapiens
aggaggccaagtgtg

SEQ ID NO: 1333703 - DNA, 15 bp, Homo sapiens
caggaggccaagtgt

SEQ ID NO: 1333704 - DNA, 15 bp, Homo sapiens
tcaggaggccaagtg

SEQ ID NO: 1333705 - DNA, 15 bp, Homo sapiens
gtcaggaggccaagt

SEQ ID NO: 1333706 - DNA, 15 bp, Homo sapiens
ggtcaggaggccaag

SEQ ID NO: 1333707 - DNA, 15 bp, Homo sapiens
aggtcaggaggccaa

SEQ ID NO: 1333708 - DNA, 15 bp, Homo sapiens
gaggtcaggaggcca

SEQ ID NO: 1333709 - DNA, 15 bp, Homo sapiens
agaggtcaggaggcc

SEQ ID NO: 1333710 - DNA, 15 bp, Homo sapiens
cagaggtcaggaggc

SEQ ID NO: 1333711 - DNA, 15 bp, Homo sapiens
gcagaggtcaggagg

SEQ ID NO: 1333712 - DNA, 15 bp, Homo sapiens
agcagaggtcaggag

SEQ ID NO: 1333713 - DNA, 15 bp, Homo sapiens
cagcagaggtcagga

SEQ ID NO: 1333714 - DNA, 15 bp, Homo sapiens
acagcagaggtcagg

SEQ ID NO: 1333715 - DNA, 15 bp, Homo sapiens
cacagcagaggtcag

SEQ ID NO: 1333716 - DNA, 15 bp, Homo sapiens
tcacagcagaggtca

SEQ ID NO: 1333717 - DNA, 15 bp, Homo sapiens
ctcacagcagaggtc

SEQ ID NO: 1333718 - DNA, 15 bp, Homo sapiens
cctcacagcagaggt

SEQ ID NO: 1333719 - DNA, 15 bp, Homo sapiens
acctcacagcagagg

SEQ ID NO: 1333720 - DNA, 15 bp, Homo sapiens
aacctcacagcagag

SEQ ID NO: 1333721 - DNA, 15 bp, Homo sapiens
gaacctcacagcaga

SEQ ID NO: 1333722 - DNA, 15 bp, Homo sapiens
ggaacctcacagcag

SEQ ID NO: 1333723 - DNA, 15 bp, Homo sapiens
aggaacctcacagca

SEQ ID NO: 1333724 - DNA, 15 bp, Homo sapiens
caggaacctcacagc

SEQ ID NO: 1333725 - DNA, 15 bp, Homo sapiens
ccaggaacctcacag

SEQ ID NO: 1333726 - DNA, 15 bp, Homo sapiens
accaggaacctcaca

SEQ ID NO: 1333727 - DNA, 15 bp, Homo sapiens
aaccaggaacctcac

SEQ ID NO: 1333728 - DNA, 15 bp, Homo sapiens
taaccaggaacctca

SEQ ID NO: 1333729 - DNA, 15 bp, Homo sapiens
ctaaccaggaacctc

SEQ ID NO: 1333730 - DNA, 15 bp, Homo sapiens
gctaaccaggaacct

SEQ ID NO: 1333731 - DNA, 15 bp, Homo sapiens
tgctaaccaggaacc

SEQ ID NO: 1333732 - DNA, 15 bp, Homo sapiens
ttgctaaccaggaac

SEQ ID NO: 1333733 - DNA, 15 bp, Homo sapiens
tttgctaaccaggaa

SEQ ID NO: 1333734 - DNA, 15 bp, Homo sapiens
ttttgctaaccagga

SEQ ID NO: 1333735 - DNA, 15 bp, Homo sapiens
attttgctaaccagg

SEQ ID NO: 1333736 - DNA, 15 bp, Homo sapiens
cattttgctaaccag

SEQ ID NO: 1333737 - DNA, 15 bp, Homo sapiens
ccattttgctaacca

SEQ ID NO: 1333738 - DNA, 15 bp, Homo sapiens
gccattttgctaacc

SEQ ID NO: 1333739 - DNA, 15 bp, Homo sapiens
agccattttgctaac

SEQ ID NO: 1333740 - DNA, 15 bp, Homo sapiens
cagccattttgctaa

SEQ ID NO: 1333741 - DNA, 15 bp, Homo sapiens
acagccattttgcta

SEQ ID NO: 1333742 - DNA, 15 bp, Homo sapiens
gacagccattttgct

SEQ ID NO: 1333743 - DNA, 15 bp, Homo sapiens
cgacagccattttgc

SEQ ID NO: 1333744 - DNA, 15 bp, Homo sapiens
acgacagccattttg

SEQ ID NO: 1333745 - DNA, 15 bp, Homo sapiens
aacgacagccatttt

SEQ ID NO: 1333746 - DNA, 15 bp, Homo sapiens
gaacgacagccattt

SEQ ID NO: 1333747 - DNA, 15 bp, Homo sapiens
agaacgacagccatt

SEQ ID NO: 1333748 - DNA, 15 bp, Homo sapiens
aagaacgacagccat

SEQ ID NO: 1333749 - DNA, 15 bp, Homo sapiens
aaagaacgacagcca

SEQ ID NO: 1333750 - DNA, 15 bp, Homo sapiens
aaaagaacgacagcc

SEQ ID NO: 1333751 - DNA, 15 bp, Homo sapiens
caaaagaacgacagc

SEQ ID NO: 1333752 - DNA, 15 bp, Homo sapiens
ccaaaagaacgacag

SEQ ID NO: 1333753 - DNA, 15 bp, Homo sapiens
cccaaaagaacgaca

SEQ ID NO: 1333754 - DNA, 15 bp, Homo sapiens
tcccaaaagaacgac

SEQ ID NO: 1333755 - DNA, 15 bp, Homo sapiens
ctcccaaaagaacga

SEQ ID NO: 1333756 - DNA, 15 bp, Homo sapiens
cctcccaaaagaacg

SEQ ID NO: 1333757 - DNA, 15 bp, Homo sapiens
tcctcccaaaagaac

SEQ ID NO: 1333758 - DNA, 15 bp, Homo sapiens
atcctcccaaaagaa

SEQ ID NO: 1333759 - DNA, 15 bp, Homo sapiens
aatcctcccaaaaga

SEQ ID NO: 1333760 - DNA, 15 bp, Homo sapiens
taatcctcccaaaag

SEQ ID NO: 1333761 - DNA, 15 bp, Homo sapiens
ttaatcctcccaaaa

SEQ ID NO: 1333762 - DNA, 15 bp, Homo sapiens
attaatcctcccaaa

SEQ ID NO: 1333763 - DNA, 15 bp, Homo sapiens
tattaatcctcccaa

SEQ ID NO: 1333764 - DNA, 15 bp, Homo sapiens
ttattaatcctccca

SEQ ID NO: 1333765 - DNA, 15 bp, Homo sapiens
cttattaatcctccc

SEQ ID NO: 1333766 - DNA, 15 bp, Homo sapiens
tcttattaatcctcc

SEQ ID NO: 1333767 - DNA, 15 bp, Homo sapiens
ttcttattaatcctc

SEQ ID NO: 1333768 - DNA, 15 bp, Homo sapiens
tttcttattaatcct

SEQ ID NO: 1333769 - DNA, 15 bp, Homo sapiens
ttttcttattaatcc

SEQ ID NO: 1333770 - DNA, 15 bp, Homo sapiens
attttcttattaatc

SEQ ID NO: 1333771 - DNA, 15 bp, Homo sapiens
gattttcttattaat

SEQ ID NO: 1333772 - DNA, 15 bp, Homo sapiens
agattttcttattaa

SEQ ID NO: 1333773 - DNA, 15 bp, Homo sapiens
cagattttcttatta

SEQ ID NO: 1333774 - DNA, 15 bp, Homo sapiens
acagattttcttatt

SEQ ID NO: 1333775 - DNA, 15 bp, Homo sapiens
tacagattttcttat

SEQ ID NO: 1333776 - DNA, 15 bp, Homo sapiens
ttacagattttctta

SEQ ID NO: 1333777 - DNA, 15 bp, Homo sapiens
tttacagattttctt

SEQ ID NO: 1333778 - DNA, 15 bp, Homo sapiens
atttacagattttct

SEQ ID NO: 1333779 - DNA, 15 bp, Homo sapiens
aatttacagattttc

SEQ ID NO: 1333780 - DNA, 15 bp, Homo sapiens
caatttacagatttt

SEQ ID NO: 1333781 - DNA, 15 bp, Homo sapiens
ccaatttacagattt

SEQ ID NO: 1333782 - DNA, 15 bp, Homo sapiens
accaatttacagatt

SEQ ID NO: 1333783 - DNA, 15 bp, Homo sapiens
aaccaatttacagat

SEQ ID NO: 1333784 - DNA, 15 bp, Homo sapiens
aaaccaatttacaga

SEQ ID NO: 1333785 - DNA, 15 bp, Homo sapiens
aaaaccaatttacag

SEQ ID NO: 1333786 - DNA, 15 bp, Homo sapiens
taaaaccaatttaca

SEQ ID NO: 1333787 - DNA, 15 bp, Homo sapiens
ctaaaaccaatttac

SEQ ID NO: 1333788 - DNA, 15 bp, Homo sapiens
gctaaaaccaattta

SEQ ID NO: 1333789 - DNA, 15 bp, Homo sapiens
agctaaaaccaattt

SEQ ID NO: 1333790 - DNA, 15 bp, Homo sapiens
gagctaaaaccaatt

SEQ ID NO: 1333791 - DNA, 15 bp, Homo sapiens
agagctaaaaccaat

SEQ ID NO: 1333792 - DNA, 15 bp, Homo sapiens
aagagctaaaaccaa

SEQ ID NO: 1333793 - DNA, 15 bp, Homo sapiens
aaagagctaaaacca

SEQ ID NO: 1333794 - DNA, 15 bp, Homo sapiens
caaagagctaaaacc

SEQ ID NO: 1333795 - DNA, 15 bp, Homo sapiens
gcaaagagctaaaac

SEQ ID NO: 1333796 - DNA, 15 bp, Homo sapiens
tgcaaagagctaaaa

SEQ ID NO: 1333797 - DNA, 15 bp, Homo sapiens
ttgcaaagagctaaa

SEQ ID NO: 1333798 - DNA, 15 bp, Homo sapiens
cttgcaaagagctaa

SEQ ID NO: 1333799 - DNA, 15 bp, Homo sapiens
tcttgcaaagagcta

SEQ ID NO: 1333800 - DNA, 15 bp, Homo sapiens
ctcttgcaaagagct

SEQ ID NO: 1333801 - DNA, 15 bp, Homo sapiens
tctcttgcaaagagc

SEQ ID NO: 1333802 - DNA, 15 bp, Homo sapiens
tctctcttgcaaaga

SEQ ID NO: 1333803 - DNA, 15 bp, Homo sapiens
ttctctcttgcaaag

SEQ ID NO: 1333804 - DNA, 15 bp, Homo sapiens
tttctctcttgcaaa

SEQ ID NO: 1333805 - DNA, 15 bp, Homo sapiens
ttttctctcttgcaa

SEQ ID NO: 1333806 - DNA, 15 bp, Homo sapiens
tttttctctcttgca

SEQ ID NO: 1333807 - DNA, 15 bp, Homo sapiens
ttttttctctcttgc

SEQ ID NO: 1333808 - DNA, 15 bp, Homo sapiens
gtttttttttctctc

SEQ ID NO: 1333809 - DNA, 15 bp, Homo sapiens
agtttttttttctct

SEQ ID NO: 1333810 - DNA, 15 bp, Homo sapiens
tagtttttttttctc

SEQ ID NO: 1333811 - DNA, 15 bp, Homo sapiens
atagtttttttttct

SEQ ID NO: 1333812 - DNA, 15 bp, Homo sapiens
catagtttttttttc

SEQ ID NO: 1333813 - DNA, 15 bp, Homo sapiens
acatagttttttttt

SEQ ID NO: 1333814 - DNA, 15 bp, Homo sapiens
cacatagtttttttt

SEQ ID NO: 1333815 - DNA, 15 bp, Homo sapiens
gcacatagttttttt

SEQ ID NO: 1333816 - DNA, 15 bp, Homo sapiens
tgcacatagtttttt

SEQ ID NO: 1333817 - DNA, 15 bp, Homo sapiens
ttgcacatagttttt

SEQ ID NO: 1333818 - DNA, 15 bp, Homo sapiens
attgcacatagtttt

SEQ ID NO: 1333819 - DNA, 15 bp, Homo sapiens
aattgcacatagttt

SEQ ID NO: 1333820 - DNA, 15 bp, Homo sapiens
aaattgcacatagtt

SEQ ID NO: 1333821 - DNA, 15 bp, Homo sapiens
gaaattgcacatagt

SEQ ID NO: 1333822 - DNA, 15 bp, Homo sapiens
agaaattgcacatag

SEQ ID NO: 1333823 - DNA, 15 bp, Homo sapiens
aagaaattgcacata

SEQ ID NO: 1333824 - DNA, 15 bp, Homo sapiens
gaagaaattgcacat

SEQ ID NO: 1333825 - DNA, 15 bp, Homo sapiens
agaagaaattgcaca

SEQ ID NO: 1333826 - DNA, 15 bp, Homo sapiens
aagaagaaattgcac

SEQ ID NO: 1333827 - DNA, 15 bp, Homo sapiens
aaagaagaaattgca

SEQ ID NO: 1333828 - DNA, 15 bp, Homo sapiens
taaagaagaaattgc

SEQ ID NO: 1333829 - DNA, 15 bp, Homo sapiens
ataaagaagaaattg

SEQ ID NO: 1333830 - DNA, 15 bp, Homo sapiens
aataaagaagaaatt

SEQ ID NO: 1333831 - DNA, 15 bp, Homo sapiens
caataaagaagaaat

SEQ ID NO: 1333832 - DNA, 15 bp, Homo sapiens
gcaataaagaagaaa

SEQ ID NO: 1333833 - DNA, 15 bp, Homo sapiens
agcaataaagaagaa

SEQ ID NO: 1333834 - DNA, 15 bp, Homo sapiens
cagcaataaagaaga

SEQ ID NO: 1333835 - DNA, 15 bp, Homo sapiens
acagcaataaagaag

SEQ ID NO: 1333836 - DNA, 15 bp, Homo sapiens
aacagcaataaagaa

SEQ ID NO: 1333837 - DNA, 15 bp, Homo sapiens
taacagcaataaaga

SEQ ID NO: 1333838 - DNA, 15 bp, Homo sapiens
ataacagcaataaag

SEQ ID NO: 1333839 - DNA, 15 bp, Homo sapiens
aataacagcaataaa

SEQ ID NO: 1333840 - DNA, 15 bp, Homo sapiens
taataacagcaataa

SEQ ID NO: 1333841 - DNA, 15 bp, Homo sapiens
ataataacagcaata

SEQ ID NO: 1333842 - DNA, 15 bp, Homo sapiens
cataataacagcaat

SEQ ID NO: 1333843 - DNA, 15 bp, Homo sapiens
acataataacagcaa

SEQ ID NO: 1333844 - DNA, 15 bp, Homo sapiens
cacataataacagca

SEQ ID NO: 1333845 - DNA, 15 bp, Homo sapiens
tcacataataacagc

SEQ ID NO: 1333846 - DNA, 15 bp, Homo sapiens
ttcacataataacag

SEQ ID NO: 1333847 - DNA, 15 bp, Homo sapiens
gttcacataataaca

SEQ ID NO: 1333848 - DNA, 15 bp, Homo sapiens
ggttcacataataac

SEQ ID NO: 1333849 - DNA, 15 bp, Homo sapiens
tggttcacataataa

SEQ ID NO: 1333850 - DNA, 15 bp, Homo sapiens
ctggttcacataata

SEQ ID NO: 1333851 - DNA, 15 bp, Homo sapiens
tctggttcacataat

SEQ ID NO: 1333852 - DNA, 15 bp, Homo sapiens
atctggttcacataa

SEQ ID NO: 1333853 - DNA, 15 bp, Homo sapiens
aatctggttcacata

SEQ ID NO: 1333854 - DNA, 15 bp, Homo sapiens
caatctggttcacat

SEQ ID NO: 1333855 - DNA, 15 bp, Homo sapiens
tcaatctggttcaca

SEQ ID NO: 1333856 - DNA, 15 bp, Homo sapiens
ttcaatctggttcac

SEQ ID NO: 1333857 - DNA, 15 bp, Homo sapiens
attcaatctggttca

SEQ ID NO: 1333858 - DNA, 15 bp, Homo sapiens
aattcaatctggttc

SEQ ID NO: 1333859 - DNA, 15 bp, Homo sapiens
caattcaatctggtt

SEQ ID NO: 1333860 - DNA, 15 bp, Homo sapiens
gcaattcaatctggt

SEQ ID NO: 1333861 - DNA, 15 bp, Homo sapiens
agcaattcaatctgg

SEQ ID NO: 1333862 - DNA, 15 bp, Homo sapiens
cagcaattcaatctg

SEQ ID NO: 1333863 - DNA, 15 bp, Homo sapiens
gcagcaattcaatct

SEQ ID NO: 1333864 - DNA, 15 bp, Homo sapiens
tgcagcaattcaatc

SEQ ID NO: 1333865 - DNA, 15 bp, Homo sapiens
atgcagcaattcaat

SEQ ID NO: 1333866 - DNA, 15 bp, Homo sapiens
gatgcagcaattcaa

SEQ ID NO: 1333867 - DNA, 15 bp, Homo sapiens
agatgcagcaattca

SEQ ID NO: 1333868 - DNA, 15 bp, Homo sapiens
gagatgcagcaattc

SEQ ID NO: 1333869 - DNA, 15 bp, Homo sapiens
agagatgcagcaatt

SEQ ID NO: 1333870 - DNA, 15 bp, Homo sapiens
cagagatgcagcaat

SEQ ID NO: 1333871 - DNA, 15 bp, Homo sapiens
tcagagatgcagcaa

SEQ ID NO: 1333872 - DNA, 15 bp, Homo sapiens
ttcagagatgcagca

SEQ ID NO: 1333873 - DNA, 15 bp, Homo sapiens
cttcagagatgcagc

SEQ ID NO: 1333874 - DNA, 15 bp, Homo sapiens
tcttcagagatgcag

SEQ ID NO: 1333875 - DNA, 15 bp, Homo sapiens
ctcttcagagatgca

SEQ ID NO: 1333876 - DNA, 15 bp, Homo sapiens
actcttcagagatgc

SEQ ID NO: 1333877 - DNA, 15 bp, Homo sapiens
aactcttcagagatg

SEQ ID NO: 1333878 - DNA, 15 bp, Homo sapiens
aaactcttcagagat

SEQ ID NO: 1333879 - DNA, 15 bp, Homo sapiens
gaaactcttcagaga

SEQ ID NO: 1333880 - DNA, 15 bp, Homo sapiens
agaaactcttcagag

SEQ ID NO: 1333881 - DNA, 15 bp, Homo sapiens
aagaaactcttcaga

SEQ ID NO: 1333882 - DNA, 15 bp, Homo sapiens
taagaaactcttcag

SEQ ID NO: 1333883 - DNA, 15 bp, Homo sapiens
ataagaaactcttca

SEQ ID NO: 1333884 - DNA, 15 bp, Homo sapiens
cataagaaactcttc

SEQ ID NO: 1333885 - DNA, 15 bp, Homo sapiens
tcataagaaactctt

SEQ ID NO: 1333886 - DNA, 15 bp, Homo sapiens
gtcataagaaactct

SEQ ID NO: 1333887 - DNA, 15 bp, Homo sapiens
agtcataagaaactc

SEQ ID NO: 1333888 - DNA, 15 bp, Homo sapiens
tagtcataagaaact

SEQ ID NO: 1333889 - DNA, 15 bp, Homo sapiens
ctagtcataagaaac

SEQ ID NO: 1333890 - DNA, 15 bp, Homo sapiens
actagtcataagaaa

SEQ ID NO: 1333891 - DNA, 15 bp, Homo sapiens
cactagtcataagaa

SEQ ID NO: 1333892 - DNA, 15 bp, Homo sapiens
acactagtcataaga

SEQ ID NO: 1333893 - DNA, 15 bp, Homo sapiens
cacactagtcataag

SEQ ID NO: 1333894 - DNA, 15 bp, Homo sapiens
tcacactagtcataa

SEQ ID NO: 1333895 - DNA, 15 bp, Homo sapiens
ttcacactagtcata

SEQ ID NO: 1333896 - DNA, 15 bp, Homo sapiens
cttcacactagtcat

SEQ ID NO: 1333897 - DNA, 15 bp, Homo sapiens
acttcacactagtca

SEQ ID NO: 1333898 - DNA, 15 bp, Homo sapiens
aacttcacactagtc

SEQ ID NO: 1333899 - DNA, 15 bp, Homo sapiens
aaacttcacactagt

SEQ ID NO: 1333900 - DNA, 15 bp, Homo sapiens
gaaacttcacactag

SEQ ID NO: 1333901 - DNA, 15 bp, Homo sapiens
ggaaacttcacacta

SEQ ID NO: 1333902 - DNA, 15 bp, Homo sapiens
gggaaacttcacact

SEQ ID NO: 1333903 - DNA, 15 bp, Homo sapiens
tgggaaacttcacac

SEQ ID NO: 1333904 - DNA, 15 bp, Homo sapiens
atgggaaacttcaca

SEQ ID NO: 1333905 - DNA, 15 bp, Homo sapiens
aatgggaaacttcac

SEQ ID NO: 1333906 - DNA, 15 bp, Homo sapiens
aaatgggaaacttca

SEQ ID NO: 1333907 - DNA, 15 bp, Homo sapiens
aaaatgggaaacttc

SEQ ID NO: 1333908 - DNA, 15 bp, Homo sapiens
taaaatgggaaactt

SEQ ID NO: 1333909 - DNA, 15 bp, Homo sapiens
ttaaaatgggaaact

SEQ ID NO: 1333910 - DNA, 15 bp, Homo sapiens
gttaaaatgggaaac

SEQ ID NO: 1333911 - DNA, 15 bp, Homo sapiens
ggttaaaatgggaaa

SEQ ID NO: 1333912 - DNA, 15 bp, Homo sapiens
gggttaaaatgggaa

SEQ ID NO: 1333913 - DNA, 15 bp, Homo sapiens
tgggttaaaatggga

SEQ ID NO: 1333914 - DNA, 15 bp, Homo sapiens
ttgggttaaaatggg

SEQ ID NO: 1333915 - DNA, 15 bp, Homo sapiens
cttgggttaaaatgg

SEQ ID NO: 1333916 - DNA, 15 bp, Homo sapiens
acttgggttaaaatg

SEQ ID NO: 1333917 - DNA, 15 bp, Homo sapiens
gacttgggttaaaat

SEQ ID NO: 1333918 - DNA, 15 bp, Homo sapiens
tgacttgggttaaaa

SEQ ID NO: 1333919 - DNA, 15 bp, Homo sapiens
ttgacttgggttaaa

SEQ ID NO: 1333920 - DNA, 15 bp, Homo sapiens
attgacttgggttaa

SEQ ID NO: 1333921 - DNA, 15 bp, Homo sapiens
aattgacttgggtta

SEQ ID NO: 1333922 - DNA, 15 bp, Homo sapiens
aaattgacttgggtt

SEQ ID NO: 1333923 - DNA, 15 bp, Homo sapiens
aaaattgacttgggt

SEQ ID NO: 1333924 - DNA, 15 bp, Homo sapiens
taaaattgacttggg

SEQ ID NO: 1333925 - DNA, 15 bp, Homo sapiens
ttaaaattgacttgg

SEQ ID NO: 1333926 - DNA, 15 bp, Homo sapiens
tttaaaattgacttg

SEQ ID NO: 1333927 - DNA, 15 bp, Homo sapiens
atttaaaattgactt

SEQ ID NO: 1333928 - DNA, 15 bp, Homo sapiens
aatttaaaattgact

SEQ ID NO: 1333929 - DNA, 15 bp, Homo sapiens
caatttaaaattgac

SEQ ID NO: 1333930 - DNA, 15 bp, Homo sapiens
gcaatttaaaattga

SEQ ID NO: 1333931 - DNA, 15 bp, Homo sapiens
ggcaatttaaaattg

SEQ ID NO: 1333932 - DNA, 15 bp, Homo sapiens
gggcaatttaaaatt

SEQ ID NO: 1333933 - DNA, 15 bp, Homo sapiens
tgggcaatttaaaat

SEQ ID NO: 1333934 - DNA, 15 bp, Homo sapiens
ttatctatctatcta

SEQ ID NO: 1333935 - DNA, 15 bp, Homo sapiens
attatctatctatct

SEQ ID NO: 1333936 - DNA, 15 bp, Homo sapiens
tattatctatctatc

SEQ ID NO: 1333937 - DNA, 15 bp, Homo sapiens
ctattatctatctat

SEQ ID NO: 1333938 - DNA, 15 bp, Homo sapiens
tctattatctatcta

SEQ ID NO: 1333939 - DNA, 15 bp, Homo sapiens
atctattatctatct

SEQ ID NO: 1333940 - DNA, 15 bp, Homo sapiens
tatctattatctatc

SEQ ID NO: 1333941 - DNA, 15 bp, Homo sapiens
ctatctattatctat

SEQ ID NO: 1333942 - DNA, 15 bp, Homo sapiens
tctatctattatcta

SEQ ID NO: 1333943 - DNA, 15 bp, Homo sapiens
atctatctattatct

SEQ ID NO: 1333944 - DNA, 15 bp, Homo sapiens
tatctatctattatc

SEQ ID NO: 1333945 - DNA, 15 bp, Homo sapiens
ctatctatctattat

SEQ ID NO: 1333946 - DNA, 15 bp, Homo sapiens
tctatctatctatta

SEQ ID NO: 1333947 - DNA, 15 bp, Homo sapiens
atctatctatctatt

SEQ ID NO: 1333948 - DNA, 15 bp, Homo sapiens
ccatctatctatcta

SEQ ID NO: 1333949 - DNA, 15 bp, Homo sapiens
tccatctatctatct

SEQ ID NO: 1333950 - DNA, 15 bp, Homo sapiens
atccatctatctatc

SEQ ID NO: 1333951 - DNA, 15 bp, Homo sapiens
tatccatctatctat

SEQ ID NO: 1333952 - DNA, 15 bp, Homo sapiens
ctatccatctatcta

SEQ ID NO: 1333953 - DNA, 15 bp, Homo sapiens
tctatccatctatct

SEQ ID NO: 1333954 - DNA, 15 bp, Homo sapiens
atctatccatctatc

SEQ ID NO: 1333955 - DNA, 15 bp, Homo sapiens
tatctatccatctat

SEQ ID NO: 1333956 - DNA, 15 bp, Homo sapiens
ctatctatccatcta

SEQ ID NO: 1333957 - DNA, 15 bp, Homo sapiens
tctatctatccatct

SEQ ID NO: 1333958 - DNA, 15 bp, Homo sapiens
gtctatctatccatc

SEQ ID NO: 1333959 - DNA, 15 bp, Homo sapiens
agtctatctatccat

SEQ ID NO: 1333960 - DNA, 15 bp, Homo sapiens
cagtctatctatcca

SEQ ID NO: 1333961 - DNA, 15 bp, Homo sapiens
tcagtctatctatcc

SEQ ID NO: 1333962 - DNA, 15 bp, Homo sapiens
ttcagtctatctatc

SEQ ID NO: 1333963 - DNA, 15 bp, Homo sapiens
gttcagtctatctat

SEQ ID NO: 1333964 - DNA, 15 bp, Homo sapiens
agttcagtctatcta

SEQ ID NO: 1333965 - DNA, 15 bp, Homo sapiens
tagttcagtctatct

SEQ ID NO: 1333966 - DNA, 15 bp, Homo sapiens
ctagttcagtctatc

SEQ ID NO: 1333967 - DNA, 15 bp, Homo sapiens
cctagttcagtctat

SEQ ID NO: 1333968 - DNA, 15 bp, Homo sapiens
tcctagttcagtcta

SEQ ID NO: 1333969 - DNA, 15 bp, Homo sapiens
gtcctagttcagtct

SEQ ID NO: 1333970 - DNA, 15 bp, Homo sapiens
ggtcctagttcagtc

SEQ ID NO: 1333971 - DNA, 15 bp, Homo sapiens
aggtcctagttcagt

SEQ ID NO: 1333972 - DNA, 15 bp, Homo sapiens
aaggtcctagttcag

SEQ ID NO: 1333973 - DNA, 15 bp, Homo sapiens
caaggtcctagttca

SEQ ID NO: 1333974 - DNA, 15 bp, Homo sapiens
ccaaggtcctagttc

SEQ ID NO: 1333975 - DNA, 15 bp, Homo sapiens
accaaggtcctagtt

SEQ ID NO: 1333976 - DNA, 15 bp, Homo sapiens
aaccaaggtcctagt

SEQ ID NO: 1333977 - DNA, 15 bp, Homo sapiens
aaaccaaggtcctag

SEQ ID NO: 1333978 - DNA, 15 bp, Homo sapiens
taaaccaaggtccta

SEQ ID NO: 1333979 - DNA, 15 bp, Homo sapiens
ttaaaccaaggtcct

SEQ ID NO: 1333980 - DNA, 15 bp, Homo sapiens
tttaaaccaaggtcc

SEQ ID NO: 1333981 - DNA, 15 bp, Homo sapiens
ttttaaaccaaggtc

SEQ ID NO: 1333982 - DNA, 15 bp, Homo sapiens
cttttaaaccaaggt

SEQ ID NO: 1333983 - DNA, 15 bp, Homo sapiens
tcttttaaaccaagg

SEQ ID NO: 1333984 - DNA, 15 bp, Homo sapiens
ctcttttaaaccaag

SEQ ID NO: 1333985 - DNA, 15 bp, Homo sapiens
actcttttaaaccaa

SEQ ID NO: 1333986 - DNA, 15 bp, Homo sapiens
aactcttttaaacca

SEQ ID NO: 1333987 - DNA, 15 bp, Homo sapiens
gaactcttttaaacc

SEQ ID NO: 1333988 - DNA, 15 bp, Homo sapiens
tgaactcttttaaac

SEQ ID NO: 1333989 - DNA, 15 bp, Homo sapiens
ctgaactcttttaaa

SEQ ID NO: 1333990 - DNA, 15 bp, Homo sapiens
actgaactcttttaa

SEQ ID NO: 1333991 - DNA, 15 bp, Homo sapiens
gactgaactctttta

SEQ ID NO: 1333992 - DNA, 15 bp, Homo sapiens
agactgaactctttt

SEQ ID NO: 1333993 - DNA, 15 bp, Homo sapiens
gagactgaactcttt

SEQ ID NO: 1333994 - DNA, 15 bp, Homo sapiens
agagactgaactctt

SEQ ID NO: 1333995 - DNA, 15 bp, Homo sapiens
cagagactgaactct

SEQ ID NO: 1333996 - DNA, 15 bp, Homo sapiens
acagagactgaactc

SEQ ID NO: 1333997 - DNA, 15 bp, Homo sapiens
tacagagactgaact

SEQ ID NO: 1333998 - DNA, 15 bp, Homo sapiens
atacagagactgaac

SEQ ID NO: 1333999 - DNA, 15 bp, Homo sapiens
aatacagagactgaa

SEQ ID NO: 1334000 - DNA, 15 bp, Homo sapiens
taatacagagactga

SEQ ID NO: 1334001 - DNA, 15 bp, Homo sapiens
ataatacagagactg

SEQ ID NO: 1334002 - DNA, 15 bp, Homo sapiens
aataatacagagact

SEQ ID NO: 1334003 - DNA, 15 bp, Homo sapiens
gaataatacagagac

SEQ ID NO: 1334004 - DNA, 15 bp, Homo sapiens
tgaataatacagaga

SEQ ID NO: 1334005 - DNA, 15 bp, Homo sapiens
ctgaataatacagag

SEQ ID NO: 1334006 - DNA, 15 bp, Homo sapiens
tctgaataatacaga

SEQ ID NO: 1334007 - DNA, 15 bp, Homo sapiens
ttctgaataatacag

SEQ ID NO: 1334008 - DNA, 15 bp, Homo sapiens
gttctgaataataca

SEQ ID NO: 1334009 - DNA, 15 bp, Homo sapiens
agttctgaataatac

SEQ ID NO: 1334010 - DNA, 15 bp, Homo sapiens
cagttctgaataata

SEQ ID NO: 1334011 - DNA, 15 bp, Homo sapiens
acagttctgaataat

SEQ ID NO: 1334012 - DNA, 15 bp, Homo sapiens
aacagttctgaataa

SEQ ID NO: 1334013 - DNA, 15 bp, Homo sapiens
aaacagttctgaata

SEQ ID NO: 1334014 - DNA, 15 bp, Homo sapiens
aaaacagttctgaat

SEQ ID NO: 1334015 - DNA, 15 bp, Homo sapiens
caaaacagttctgaa

SEQ ID NO: 1334016 - DNA, 15 bp, Homo sapiens
ccaaaacagttctga

SEQ ID NO: 1334017 - DNA, 15 bp, Homo sapiens
tccaaaacagttctg

SEQ ID NO: 1334018 - DNA, 15 bp, Homo sapiens
atccaaaacagttct

SEQ ID NO: 1334019 - DNA, 15 bp, Homo sapiens
tatccaaaacagttc

SEQ ID NO: 1334020 - DNA, 15 bp, Homo sapiens
atatccaaaacagtt

SEQ ID NO: 1334021 - DNA, 15 bp, Homo sapiens
tatatccaaaacagt

SEQ ID NO: 1334022 - DNA, 15 bp, Homo sapiens
ttatatccaaaacag

SEQ ID NO: 1334023 - DNA, 15 bp, Homo sapiens
tttatatccaaaaca

SEQ ID NO: 1334024 - DNA, 15 bp, Homo sapiens
atttatatccaaaac

SEQ ID NO: 1334025 - DNA, 15 bp, Homo sapiens
catttatatccaaaa

SEQ ID NO: 1334026 - DNA, 15 bp, Homo sapiens
tcatttatatccaaa

SEQ ID NO: 1334027 - DNA, 15 bp, Homo sapiens
gtcatttatatccaa

SEQ ID NO: 1334028 - DNA, 15 bp, Homo sapiens
tgtcatttatatcca

SEQ ID NO: 1334029 - DNA, 15 bp, Homo sapiens
ctgtcatttatatcc

SEQ ID NO: 1334030 - DNA, 15 bp, Homo sapiens
tctgtcatttatatc

SEQ ID NO: 1334031 - DNA, 15 bp, Homo sapiens
ttctgtcatttatat

SEQ ID NO: 1334032 - DNA, 15 bp, Homo sapiens
tttctgtcatttata

SEQ ID NO: 1334033 - DNA, 15 bp, Homo sapiens
gtttctgtcatttat

SEQ ID NO: 1334034 - DNA, 15 bp, Homo sapiens
tgtttctgtcattta

SEQ ID NO: 1334035 - DNA, 15 bp, Homo sapiens
gtgtttctgtcattt

SEQ ID NO: 1334036 - DNA, 15 bp, Homo sapiens
tgtgtttctgtcatt

SEQ ID NO: 1334037 - DNA, 15 bp, Homo sapiens
atgtgtttctgtcat

SEQ ID NO: 1334038 - DNA, 15 bp, Homo sapiens
aatgtgtttctgtca

SEQ ID NO: 1334039 - DNA, 15 bp, Homo sapiens
aaatgtgtttctgtc

SEQ ID NO: 1334040 - DNA, 15 bp, Homo sapiens
gaaatgtgtttctgt

SEQ ID NO: 1334041 - DNA, 15 bp, Homo sapiens
tgaaatgtgtttctg

SEQ ID NO: 1334042 - DNA, 15 bp, Homo sapiens
ttgaaatgtgtttct

SEQ ID NO: 1334043 - DNA, 15 bp, Homo sapiens
tttgaaatgtgtttc

SEQ ID NO: 1334044 - DNA, 15 bp, Homo sapiens
atttgaaatgtgttt

SEQ ID NO: 1334045 - DNA, 15 bp, Homo sapiens
tatttgaaatgtgtt

SEQ ID NO: 1334046 - DNA, 15 bp, Homo sapiens
gtatttgaaatgtgt

SEQ ID NO: 1334047 - DNA, 15 bp, Homo sapiens
tgtatttgaaatgtg

SEQ ID NO: 1334048 - DNA, 15 bp, Homo sapiens
atgtatttgaaatgt

SEQ ID NO: 1334049 - DNA, 15 bp, Homo sapiens
gatgtatttgaaatg

SEQ ID NO: 1334050 - DNA, 15 bp, Homo sapiens
ggatgtatttgaaat

SEQ ID NO: 1334051 - DNA, 15 bp, Homo sapiens
tggatgtatttgaaa

SEQ ID NO: 1334052 - DNA, 15 bp, Homo sapiens
ttggatgtatttgaa

SEQ ID NO: 1334053 - DNA, 15 bp, Homo sapiens
gttggatgtatttga

SEQ ID NO: 1334054 - DNA, 15 bp, Homo sapiens
ggttggatgtatttg

SEQ ID NO: 1334055 - DNA, 15 bp, Homo sapiens
tggttggatgtattt

SEQ ID NO: 1334056 - DNA, 15 bp, Homo sapiens
ttggttggatgtatt

SEQ ID NO: 1334057 - DNA, 15 bp, Homo sapiens
tttggttggatgtat

SEQ ID NO: 1334058 - DNA, 15 bp, Homo sapiens
atttggttggatgta

SEQ ID NO: 1334059 - DNA, 15 bp, Homo sapiens
tatttggttggatgt

SEQ ID NO: 1334060 - DNA, 15 bp, Homo sapiens
atatttggttggatg

SEQ ID NO: 1334061 - DNA, 15 bp, Homo sapiens
catatttggttggat

SEQ ID NO: 1334062 - DNA, 15 bp, Homo sapiens
tcatatttggttgga

SEQ ID NO: 1334063 - DNA, 15 bp, Homo sapiens
ttcatatttggttgg

SEQ ID NO: 1334064 - DNA, 15 bp, Homo sapiens
attcatatttggttg

SEQ ID NO: 1334065 - DNA, 15 bp, Homo sapiens
gattcatatttggtt

SEQ ID NO: 1334066 - DNA, 15 bp, Homo sapiens
tgattcatatttggt

SEQ ID NO: 1334067 - DNA, 15 bp, Homo sapiens
atgattcatatttgg

SEQ ID NO: 1334068 - DNA, 15 bp, Homo sapiens
tatgattcatatttg

SEQ ID NO: 1334069 - DNA, 15 bp, Homo sapiens
atatgattcatattt

SEQ ID NO: 1334070 - DNA, 15 bp, Homo sapiens
aatatgattcatatt

SEQ ID NO: 1334071 - DNA, 15 bp, Homo sapiens
caatatgattcatat

SEQ ID NO: 1334072 - DNA, 15 bp, Homo sapiens
ccaatatgattcata

SEQ ID NO: 1334073 - DNA, 15 bp, Homo sapiens
gccaatatgattcat

SEQ ID NO: 1334074 - DNA, 15 bp, Homo sapiens
agccaatatgattca

SEQ ID NO: 1334075 - DNA, 15 bp, Homo sapiens
aagccaatatgattc

SEQ ID NO: 1334076 - DNA, 15 bp, Homo sapiens
taagccaatatgatt

SEQ ID NO: 1334077 - DNA, 15 bp, Homo sapiens
ataagccaatatgat

SEQ ID NO: 1334078 - DNA, 15 bp, Homo sapiens
tataagccaatatga

SEQ ID NO: 1334079 - DNA, 15 bp, Homo sapiens
atataagccaatatg

SEQ ID NO: 1334080 - DNA, 15 bp, Homo sapiens
tatataagccaatat

SEQ ID NO: 1334081 - DNA, 15 bp, Homo sapiens
ttatataagccaata

SEQ ID NO: 1334082 - DNA, 15 bp, Homo sapiens
cttatataagccaat

SEQ ID NO: 1334083 - DNA, 15 bp, Homo sapiens
acttatataagccaa

SEQ ID NO: 1334084 - DNA, 15 bp, Homo sapiens
tacttatataagcca

SEQ ID NO: 1334085 - DNA, 15 bp, Homo sapiens
ttacttatataagcc

SEQ ID NO: 1334086 - DNA, 15 bp, Homo sapiens
tttacttatataagc

SEQ ID NO: 1334087 - DNA, 15 bp, Homo sapiens
ttttacttatataag

SEQ ID NO: 1334088 - DNA, 15 bp, Homo sapiens
tttttacttatataa

SEQ ID NO: 1334089 - DNA, 15 bp, Homo sapiens
atttttacttatata

SEQ ID NO: 1334090 - DNA, 15 bp, Homo sapiens
tatttttacttatat

SEQ ID NO: 1334091 - DNA, 15 bp, Homo sapiens
atatttttacttata

SEQ ID NO: 1334092 - DNA, 15 bp, Homo sapiens
gatatttttacttat

SEQ ID NO: 1334093 - DNA, 15 bp, Homo sapiens
tgatatttttactta

SEQ ID NO: 1334094 - DNA, 15 bp, Homo sapiens
ctgatatttttactt

SEQ ID NO: 1334095 - DNA, 15 bp, Homo sapiens
cctgatatttttact

SEQ ID NO: 1334096 - DNA, 15 bp, Homo sapiens
tcctgatatttttac

SEQ ID NO: 1334097 - DNA, 15 bp, Homo sapiens
ctcctgatattttta

SEQ ID NO: 1334098 - DNA, 15 bp, Homo sapiens
actcctgatattttt

SEQ ID NO: 1334099 - DNA, 15 bp, Homo sapiens
aactcctgatatttt

SEQ ID NO: 1334100 - DNA, 15 bp, Homo sapiens
caactcctgatattt

SEQ ID NO: 1334101 - DNA, 15 bp, Homo sapiens
tcaactcctgatatt

SEQ ID NO: 1334102 - DNA, 15 bp, Homo sapiens
gtcaactcctgatat

SEQ ID NO: 1334103 - DNA, 15 bp, Homo sapiens
agtcaactcctgata

SEQ ID NO: 1334104 - DNA, 15 bp, Homo sapiens
cagtcaactcctgat

SEQ ID NO: 1334105 - DNA, 15 bp, Homo sapiens
ccagtcaactcctga

SEQ ID NO: 1334106 - DNA, 15 bp, Homo sapiens
gccagtcaactcctg

SEQ ID NO: 1334107 - DNA, 15 bp, Homo sapiens
agccagtcaactcct

SEQ ID NO: 1334108 - DNA, 15 bp, Homo sapiens
aagccagtcaactcc

SEQ ID NO: 1334109 - DNA, 15 bp, Homo sapiens
taagccagtcaactc

SEQ ID NO: 1334110 - DNA, 15 bp, Homo sapiens
ctaagccagtcaact

SEQ ID NO: 1334111 - DNA, 15 bp, Homo sapiens
gctaagccagtcaac

SEQ ID NO: 1334112 - DNA, 15 bp, Homo sapiens
tgctaagccagtcaa

SEQ ID NO: 1334113 - DNA, 15 bp, Homo sapiens
atgctaagccagtca

SEQ ID NO: 1334114 - DNA, 15 bp, Homo sapiens
tatgctaagccagtc

SEQ ID NO: 1334115 - DNA, 15 bp, Homo sapiens
ctatgctaagccagt

SEQ ID NO: 1334116 - DNA, 15 bp, Homo sapiens
gctatgctaagccag

SEQ ID NO: 1334117 - DNA, 15 bp, Homo sapiens
agctatgctaagcca

SEQ ID NO: 1334118 - DNA, 15 bp, Homo sapiens
cagctatgctaagcc

SEQ ID NO: 1334119 - DNA, 15 bp, Homo sapiens
gcagctatgctaagc

SEQ ID NO: 1334120 - DNA, 15 bp, Homo sapiens
agcagctatgctaag

SEQ ID NO: 1334121 - DNA, 15 bp, Homo sapiens
gagcagctatgctaa

SEQ ID NO: 1334122 - DNA, 15 bp, Homo sapiens
tgagcagctatgcta

SEQ ID NO: 1334123 - DNA, 15 bp, Homo sapiens
ttgagcagctatgct

SEQ ID NO: 1334124 - DNA, 15 bp, Homo sapiens
tttgagcagctatgc

SEQ ID NO: 1334125 - DNA, 15 bp, Homo sapiens
ttttgagcagctatg

SEQ ID NO: 1334126 - DNA, 15 bp, Homo sapiens
tttttgagcagctat

SEQ ID NO: 1334127 - DNA, 15 bp, Homo sapiens
atttttgagcagcta

SEQ ID NO: 1334128 - DNA, 15 bp, Homo sapiens
catttttgagcagct

SEQ ID NO: 1334129 - DNA, 15 bp, Homo sapiens
acatttttgagcagc

SEQ ID NO: 1334130 - DNA, 15 bp, Homo sapiens
aacatttttgagcag

SEQ ID NO: 1334131 - DNA, 15 bp, Homo sapiens
gaacatttttgagca

SEQ ID NO: 1334132 - DNA, 15 bp, Homo sapiens
agaacatttttgagc

SEQ ID NO: 1334133 - DNA, 15 bp, Homo sapiens
gagaacatttttgag

SEQ ID NO: 1334134 - DNA, 15 bp, Homo sapiens
agagaacatttttga

SEQ ID NO: 1334135 - DNA, 15 bp, Homo sapiens
gagagaacatttttg

SEQ ID NO: 1334136 - DNA, 15 bp, Homo sapiens
agagagaacattttt

SEQ ID NO: 1334137 - DNA, 15 bp, Homo sapiens
aagagagaacatttt

SEQ ID NO: 1334138 - DNA, 15 bp, Homo sapiens
aaagagagaacattt

SEQ ID NO: 1334139 - DNA, 15 bp, Homo sapiens
taaagagagaacatt

SEQ ID NO: 1334140 - DNA, 15 bp, Homo sapiens
ataaagagagaacat

SEQ ID NO: 1334141 - DNA, 15 bp, Homo sapiens
aataaagagagaaca

SEQ ID NO: 1334142 - DNA, 15 bp, Homo sapiens
aaataaagagagaac

SEQ ID NO: 1334143 - DNA, 15 bp, Homo sapiens
gaaataaagagagaa

SEQ ID NO: 1334144 - DNA, 15 bp, Homo sapiens
agaaataaagagaga

SEQ ID NO: 1334145 - DNA, 15 bp, Homo sapiens
aagaaataaagagag

SEQ ID NO: 1334146 - DNA, 15 bp, Homo sapiens
caagaaataaagaga

SEQ ID NO: 1334147 - DNA, 15 bp, Homo sapiens
ccaagaaataaagag

SEQ ID NO: 1334148 - DNA, 15 bp, Homo sapiens
gccaagaaataaaga

SEQ ID NO: 1334149 - DNA, 15 bp, Homo sapiens
agccaagaaataaag

SEQ ID NO: 1334150 - DNA, 15 bp, Homo sapiens
gagccaagaaataaa

SEQ ID NO: 1334151 - DNA, 15 bp, Homo sapiens
agagccaagaaataa

SEQ ID NO: 1334152 - DNA, 15 bp, Homo sapiens
aagagccaagaaata

SEQ ID NO: 1334153 - DNA, 15 bp, Homo sapiens
aaagagccaagaaat

SEQ ID NO: 1334154 - DNA, 15 bp, Homo sapiens
aaaagagccaagaaa

SEQ ID NO: 1334155 - DNA, 15 bp, Homo sapiens
aaaaagagccaagaa

SEQ ID NO: 1334156 - DNA, 15 bp, Homo sapiens
aagaaaaagagccaa

SEQ ID NO: 1334157 - DNA, 15 bp, Homo sapiens
aaagaaaaagagcca

SEQ ID NO: 1334158 - DNA, 15 bp, Homo sapiens
aaaagaaaaagagcc

SEQ ID NO: 1334159 - DNA, 15 bp, Homo sapiens
caaaagaaaaagagc

SEQ ID NO: 1334160 - DNA, 15 bp, Homo sapiens
ccaaaagaaaaagag

SEQ ID NO: 1334161 - DNA, 15 bp, Homo sapiens
cccaaaagaaaaaga

SEQ ID NO: 1334162 - DNA, 15 bp, Homo sapiens
acccaaaagaaaaag

SEQ ID NO: 1334163 - DNA, 15 bp, Homo sapiens
aacccaaaagaaaaa

SEQ ID NO: 1334164 - DNA, 15 bp, Homo sapiens
caacccaaaagaaaa

SEQ ID NO: 1334165 - DNA, 15 bp, Homo sapiens
ccaacccaaaagaaa

SEQ ID NO: 1334166 - DNA, 15 bp, Homo sapiens
gccaacccaaaagaa

SEQ ID NO: 1334167 - DNA, 15 bp, Homo sapiens
agccaacccaaaaga

SEQ ID NO: 1334168 - DNA, 15 bp, Homo sapiens
tagccaacccaaaag

SEQ ID NO: 1334169 - DNA, 15 bp, Homo sapiens
gtagccaacccaaaa

SEQ ID NO: 1334170 - DNA, 15 bp, Homo sapiens
tgtagccaacccaaa

SEQ ID NO: 1334171 - DNA, 15 bp, Homo sapiens
atgtagccaacccaa

SEQ ID NO: 1334172 - DNA, 15 bp, Homo sapiens
aatgtagccaaccca

SEQ ID NO: 1334173 - DNA, 15 bp, Homo sapiens
aaatgtagccaaccc

SEQ ID NO: 1334174 - DNA, 15 bp, Homo sapiens
aaaatgtagccaacc

SEQ ID NO: 1334175 - DNA, 15 bp, Homo sapiens
gaaaatgtagccaac

SEQ ID NO: 1334176 - DNA, 15 bp, Homo sapiens
ggaaaatgtagccaa

SEQ ID NO: 1334177 - DNA, 15 bp, Homo sapiens
tggaaaatgtagcca

SEQ ID NO: 1334178 - DNA, 15 bp, Homo sapiens
ctggaaaatgtagcc

SEQ ID NO: 1334179 - DNA, 15 bp, Homo sapiens
tctggaaaatgtagc

SEQ ID NO: 1334180 - DNA, 15 bp, Homo sapiens
ttctggaaaatgtag

SEQ ID NO: 1334181 - DNA, 15 bp, Homo sapiens
cttctggaaaatgta

SEQ ID NO: 1334182 - DNA, 15 bp, Homo sapiens
acttctggaaaatgt

SEQ ID NO: 1334183 - DNA, 15 bp, Homo sapiens
aacttctggaaaatg

SEQ ID NO: 1334184 - DNA, 15 bp, Homo sapiens
aaacttctggaaaat

SEQ ID NO: 1334185 - DNA, 15 bp, Homo sapiens
aaaacttctggaaaa

SEQ ID NO: 1334186 - DNA, 15 bp, Homo sapiens
aaaaacttctggaaa

SEQ ID NO: 1334187 - DNA, 15 bp, Homo sapiens
gaaaaacttctggaa

SEQ ID NO: 1334188 - DNA, 15 bp, Homo sapiens
ggaaaaacttctgga

SEQ ID NO: 1334189 - DNA, 15 bp, Homo sapiens
gggaaaaacttctgg

SEQ ID NO: 1334190 - DNA, 15 bp, Homo sapiens
ggggaaaaacttctg

SEQ ID NO: 1334191 - DNA, 15 bp, Homo sapiens
tggggaaaaacttct

SEQ ID NO: 1334192 - DNA, 15 bp, Homo sapiens
atggggaaaaacttc

SEQ ID NO: 1334193 - DNA, 15 bp, Homo sapiens
catggggaaaaactt

SEQ ID NO: 1334194 - DNA, 15 bp, Homo sapiens
acatggggaaaaact

SEQ ID NO: 1334195 - DNA, 15 bp, Homo sapiens
tacatggggaaaaac

SEQ ID NO: 1334196 - DNA, 15 bp, Homo sapiens
atacatggggaaaaa

SEQ ID NO: 1334197 - DNA, 15 bp, Homo sapiens
aatacatggggaaaa

SEQ ID NO: 1334198 - DNA, 15 bp, Homo sapiens
taatacatggggaaa

SEQ ID NO: 1334199 - DNA, 15 bp, Homo sapiens
ctaatacatggggaa

SEQ ID NO: 1334200 - DNA, 15 bp, Homo sapiens
cctaatacatgggga

SEQ ID NO: 1334201 - DNA, 15 bp, Homo sapiens
tcctaatacatgggg

SEQ ID NO: 1334202 - DNA, 15 bp, Homo sapiens
ttcctaatacatggg

SEQ ID NO: 1334203 - DNA, 15 bp, Homo sapiens
attcctaatacatgg

SEQ ID NO: 1334204 - DNA, 15 bp, Homo sapiens
tattcctaatacatg

SEQ ID NO: 1334205 - DNA, 15 bp, Homo sapiens
ttattcctaatacat

SEQ ID NO: 1334206 - DNA, 15 bp, Homo sapiens
tttattcctaataca

SEQ ID NO: 1334207 - DNA, 15 bp, Homo sapiens
atttattcctaatac

SEQ ID NO: 1334208 - DNA, 15 bp, Homo sapiens
tatttattcctaata

SEQ ID NO: 1334209 - DNA, 15 bp, Homo sapiens
ctatttattcctaat

SEQ ID NO: 1334210 - DNA, 15 bp, Homo sapiens
gctatttattcctaa

SEQ ID NO: 1334211 - DNA, 15 bp, Homo sapiens
ggctatttattccta

SEQ ID NO: 1334212 - DNA, 15 bp, Homo sapiens
tggctatttattcct

SEQ ID NO: 1334213 - DNA, 15 bp, Homo sapiens
gtggctatttattcc

SEQ ID NO: 1334214 - DNA, 15 bp, Homo sapiens
ggtggctatttattc

SEQ ID NO: 1334215 - DNA, 15 bp, Homo sapiens
tggtggctatttatt

SEQ ID NO: 1334216 - DNA, 15 bp, Homo sapiens
ctggtggctatttat

SEQ ID NO: 1334217 - DNA, 15 bp, Homo sapiens
tctggtggctattta

SEQ ID NO: 1334218 - DNA, 15 bp, Homo sapiens
ttctggtggctattt

SEQ ID NO: 1334219 - DNA, 15 bp, Homo sapiens
cttctggtggctatt

SEQ ID NO: 1334220 - DNA, 15 bp, Homo sapiens
gcttctggtggctat

SEQ ID NO: 1334221 - DNA, 15 bp, Homo sapiens
agcttctggtggcta

SEQ ID NO: 1334222 - DNA, 15 bp, Homo sapiens
aagcttctggtggct

SEQ ID NO: 1334223 - DNA, 15 bp, Homo sapiens
gaagcttctggtggc

SEQ ID NO: 1334224 - DNA, 15 bp, Homo sapiens
tgaagcttctggtgg

SEQ ID NO: 1334225 - DNA, 15 bp, Homo sapiens
ctgaagcttctggtg

SEQ ID NO: 1334226 - DNA, 15 bp, Homo sapiens
tctgaagcttctggt

SEQ ID NO: 1334227 - DNA, 15 bp, Homo sapiens
ttctgaagcttctgg

SEQ ID NO: 1334228 - DNA, 15 bp, Homo sapiens
gttctgaagcttctg

SEQ ID NO: 1334229 - DNA, 15 bp, Homo sapiens
agttctgaagcttct

SEQ ID NO: 1334230 - DNA, 15 bp, Homo sapiens
tagttctgaagcttc

SEQ ID NO: 1334231 - DNA, 15 bp, Homo sapiens
gtagttctgaagctt

SEQ ID NO: 1334232 - DNA, 15 bp, Homo sapiens
tgtagttctgaagct

SEQ ID NO: 1334233 - DNA, 15 bp, Homo sapiens
atgtagttctgaagc

SEQ ID NO: 1334234 - DNA, 15 bp, Homo sapiens
tatgtagttctgaag

SEQ ID NO: 1334235 - DNA, 15 bp, Homo sapiens
ctatgtagttctgaa

SEQ ID NO: 1334236 - DNA, 15 bp, Homo sapiens
tctatgtagttctga

SEQ ID NO: 1334237 - DNA, 15 bp, Homo sapiens
gtctatgtagttctg

SEQ ID NO: 1334238 - DNA, 15 bp, Homo sapiens
agtctatgtagttct

SEQ ID NO: 1334239 - DNA, 15 bp, Homo sapiens
aagtctatgtagttc

SEQ ID NO: 1334240 - DNA, 15 bp, Homo sapiens
aaagtctatgtagtt

SEQ ID NO: 1334241 - DNA, 15 bp, Homo sapiens
caaagtctatgtagt

SEQ ID NO: 1334242 - DNA, 15 bp, Homo sapiens
gcaaagtctatgtag

SEQ ID NO: 1334243 - DNA, 15 bp, Homo sapiens
ggcaaagtctatgta

SEQ ID NO: 1334244 - DNA, 15 bp, Homo sapiens
gggcaaagtctatgt

SEQ ID NO: 1334245 - DNA, 15 bp, Homo sapiens
agggcaaagtctatg

SEQ ID NO: 1334246 - DNA, 15 bp, Homo sapiens
gagggcaaagtctat

SEQ ID NO: 1334247 - DNA, 15 bp, Homo sapiens
tgagggcaaagtcta

SEQ ID NO: 1334248 - DNA, 15 bp, Homo sapiens
ctgagggcaaagtct

SEQ ID NO: 1334249 - DNA, 15 bp, Homo sapiens
actgagggcaaagtc

SEQ ID NO: 1334250 - DNA, 15 bp, Homo sapiens
tactgagggcaaagt

SEQ ID NO: 1334251 - DNA, 15 bp, Homo sapiens
ctactgagggcaaag

SEQ ID NO: 1334252 - DNA, 15 bp, Homo sapiens
cctactgagggcaaa

SEQ ID NO: 1334253 - DNA, 15 bp, Homo sapiens
tcctactgagggcaa

SEQ ID NO: 1334254 - DNA, 15 bp, Homo sapiens
gtcctactgagggca

SEQ ID NO: 1334255 - DNA, 15 bp, Homo sapiens
tgtcctactgagggc

SEQ ID NO: 1334256 - DNA, 15 bp, Homo sapiens
ctgtcctactgaggg

SEQ ID NO: 1334257 - DNA, 15 bp, Homo sapiens
tctgtcctactgagg

SEQ ID NO: 1334258 - DNA, 15 bp, Homo sapiens
ctctgtcctactgag

SEQ ID NO: 1334259 - DNA, 15 bp, Homo sapiens
tctctgtcctactga

SEQ ID NO: 1334260 - DNA, 15 bp, Homo sapiens
ctctctgtcctactg

SEQ ID NO: 1334261 - DNA, 15 bp, Homo sapiens
cctctctgtcctact

SEQ ID NO: 1334262 - DNA, 15 bp, Homo sapiens
gcctctctgtcctac

SEQ ID NO: 1334263 - DNA, 15 bp, Homo sapiens
tgcctctctgtccta

SEQ ID NO: 1334264 - DNA, 15 bp, Homo sapiens
ttgcctctctgtcct

SEQ ID NO: 1334265 - DNA, 15 bp, Homo sapiens
attgcctctctgtcc

SEQ ID NO: 1334266 - DNA, 15 bp, Homo sapiens
gattgcctctctgtc

SEQ ID NO: 1334267 - DNA, 15 bp, Homo sapiens
agattgcctctctgt

SEQ ID NO: 1334268 - DNA, 15 bp, Homo sapiens
gagattgcctctctg

SEQ ID NO: 1334269 - DNA, 15 bp, Homo sapiens
agagattgcctctct

SEQ ID NO: 1334270 - DNA, 15 bp, Homo sapiens
aagagattgcctctc

SEQ ID NO: 1334271 - DNA, 15 bp, Homo sapiens
gaagagattgcctct

SEQ ID NO: 1334272 - DNA, 15 bp, Homo sapiens
tgaagagattgcctc

SEQ ID NO: 1334273 - DNA, 15 bp, Homo sapiens
ttgaagagattgcct

SEQ ID NO: 1334274 - DNA, 15 bp, Homo sapiens
tttgaagagattgcc

SEQ ID NO: 1334275 - DNA, 15 bp, Homo sapiens
gtttgaagagattgc

SEQ ID NO: 1334276 - DNA, 15 bp, Homo sapiens
tgtttgaagagattg

SEQ ID NO: 1334277 - DNA, 15 bp, Homo sapiens
atgtttgaagagatt

SEQ ID NO: 1334278 - DNA, 15 bp, Homo sapiens
gatgtttgaagagat

SEQ ID NO: 1334279 - DNA, 15 bp, Homo sapiens
ggatgtttgaagaga

SEQ ID NO: 1334280 - DNA, 15 bp, Homo sapiens
tggatgtttgaagag

SEQ ID NO: 1334281 - DNA, 15 bp, Homo sapiens
ttggatgtttgaaga

SEQ ID NO: 1334282 - DNA, 15 bp, Homo sapiens
tttggatgtttgaag

SEQ ID NO: 1334283 - DNA, 15 bp, Homo sapiens
atttggatgtttgaa

SEQ ID NO: 1334284 - DNA, 15 bp, Homo sapiens
tatttggatgtttga

SEQ ID NO: 1334285 - DNA, 15 bp, Homo sapiens
ttatttggatgtttg

SEQ ID NO: 1334286 - DNA, 15 bp, Homo sapiens
attatttggatgttt

SEQ ID NO: 1334287 - DNA, 15 bp, Homo sapiens
aattatttggatgtt

SEQ ID NO: 1334288 - DNA, 15 bp, Homo sapiens
taattatttggatgt

SEQ ID NO: 1334289 - DNA, 15 bp, Homo sapiens
gtaattatttggatg

SEQ ID NO: 1334290 - DNA, 15 bp, Homo sapiens
ggtaattatttggat

SEQ ID NO: 1334291 - DNA, 15 bp, Homo sapiens
aggtaattatttgga

SEQ ID NO: 1334292 - DNA, 15 bp, Homo sapiens
aaggtaattatttgg

SEQ ID NO: 1334293 - DNA, 15 bp, Homo sapiens
taaggtaattatttg

SEQ ID NO: 1334294 - DNA, 15 bp, Homo sapiens
ttaaggtaattattt

SEQ ID NO: 1334295 - DNA, 15 bp, Homo sapiens
tttaaggtaattatt

SEQ ID NO: 1334296 - DNA, 15 bp, Homo sapiens
ttttaaggtaattat

SEQ ID NO: 1334297 - DNA, 15 bp, Homo sapiens
cttttaaggtaatta

SEQ ID NO: 1334298 - DNA, 15 bp, Homo sapiens
tcttttaaggtaatt

SEQ ID NO: 1334299 - DNA, 15 bp, Homo sapiens
ctcttttaaggtaat

SEQ ID NO: 1334300 - DNA, 15 bp, Homo sapiens
cctcttttaaggtaa

SEQ ID NO: 1334301 - DNA, 15 bp, Homo sapiens
tcctcttttaaggta

SEQ ID NO: 1334302 - DNA, 15 bp, Homo sapiens
gtcctcttttaaggt

SEQ ID NO: 1334303 - DNA, 15 bp, Homo sapiens
agtcctcttttaagg

SEQ ID NO: 1334304 - DNA, 15 bp, Homo sapiens
aagtcctcttttaag

SEQ ID NO: 1334305 - DNA, 15 bp, Homo sapiens
gaagtcctcttttaa

SEQ ID NO: 1334306 - DNA, 15 bp, Homo sapiens
tgaagtcctctttta

SEQ ID NO: 1334307 - DNA, 15 bp, Homo sapiens
ttgaagtcctctttt

SEQ ID NO: 1334308 - DNA, 15 bp, Homo sapiens
cttgaagtcctcttt

SEQ ID NO: 1334309 - DNA, 15 bp, Homo sapiens
acttgaagtcctctt

SEQ ID NO: 1334310 - DNA, 15 bp, Homo sapiens
cacttgaagtcctct

SEQ ID NO: 1334311 - DNA, 15 bp, Homo sapiens
tcacttgaagtcctc

SEQ ID NO: 1334312 - DNA, 15 bp, Homo sapiens
ttcacttgaagtcct

SEQ ID NO: 1334313 - DNA, 15 bp, Homo sapiens
cttcacttgaagtcc

SEQ ID NO: 1334314 - DNA, 15 bp, Homo sapiens
tcttcacttgaagtc

SEQ ID NO: 1334315 - DNA, 15 bp, Homo sapiens
ctcttcacttgaagt

SEQ ID NO: 1334316 - DNA, 15 bp, Homo sapiens
tctcttcacttgaag

SEQ ID NO: 1334317 - DNA, 15 bp, Homo sapiens
gtctcttcacttgaa

SEQ ID NO: 1334318 - DNA, 15 bp, Homo sapiens
ggtctcttcacttga

SEQ ID NO: 1334319 - DNA, 15 bp, Homo sapiens
gggtctcttcacttg

SEQ ID NO: 1334320 - DNA, 15 bp, Homo sapiens
agggtctcttcactt

SEQ ID NO: 1334321 - DNA, 15 bp, Homo sapiens
cagggtctcttcact

SEQ ID NO: 1334322 - DNA, 15 bp, Homo sapiens
gcagggtctcttcac

SEQ ID NO: 1334323 - DNA, 15 bp, Homo sapiens
agcagggtctcttca

SEQ ID NO: 1334324 - DNA, 15 bp, Homo sapiens
aagcagggtctcttc

SEQ ID NO: 1334325 - DNA, 15 bp, Homo sapiens
taagcagggtctctt

SEQ ID NO: 1334326 - DNA, 15 bp, Homo sapiens
ttaagcagggtctct

SEQ ID NO: 1334327 - DNA, 15 bp, Homo sapiens
tttaagcagggtctc

SEQ ID NO: 1334328 - DNA, 15 bp, Homo sapiens
atttaagcagggtct

SEQ ID NO: 1334329 - DNA, 15 bp, Homo sapiens
gatttaagcagggtc

SEQ ID NO: 1334330 - DNA, 15 bp, Homo sapiens
agatttaagcagggt

SEQ ID NO: 1334331 - DNA, 15 bp, Homo sapiens
cagatttaagcaggg

SEQ ID NO: 1334332 - DNA, 15 bp, Homo sapiens
tcagatttaagcagg

SEQ ID NO: 1334333 - DNA, 15 bp, Homo sapiens
atcagatttaagcag

SEQ ID NO: 1334334 - DNA, 15 bp, Homo sapiens
aatcagatttaagca

SEQ ID NO: 1334335 - DNA, 15 bp, Homo sapiens
caatcagatttaagc

SEQ ID NO: 1334336 - DNA, 15 bp, Homo sapiens
ccaatcagatttaag

SEQ ID NO: 1334337 - DNA, 15 bp, Homo sapiens
gccaatcagatttaa

SEQ ID NO: 1334338 - DNA, 15 bp, Homo sapiens
ggccaatcagattta

SEQ ID NO: 1334339 - DNA, 15 bp, Homo sapiens
gggccaatcagattt

SEQ ID NO: 1334340 - DNA, 15 bp, Homo sapiens
ggggccaatcagatt

SEQ ID NO: 1334341 - DNA, 15 bp, Homo sapiens
tggggccaatcagat

SEQ ID NO: 1334342 - DNA, 15 bp, Homo sapiens
gtggggccaatcaga

SEQ ID NO: 1334343 - DNA, 15 bp, Homo sapiens
tgtggggccaatcag

SEQ ID NO: 1334344 - DNA, 15 bp, Homo sapiens
gtgtggggccaatca

SEQ ID NO: 1334345 - DNA, 15 bp, Homo sapiens
cgtgtggggccaatc

SEQ ID NO: 1334346 - DNA, 15 bp, Homo sapiens
tcgtgtggggccaat

SEQ ID NO: 1334347 - DNA, 15 bp, Homo sapiens
atcgtgtggggccaa

SEQ ID NO: 1334348 - DNA, 15 bp, Homo sapiens
gatcgtgtggggcca

SEQ ID NO: 1334349 - DNA, 15 bp, Homo sapiens
tgatcgtgtggggcc

SEQ ID NO: 1334350 - DNA, 15 bp, Homo sapiens
atgatcgtgtggggc

SEQ ID NO: 1334351 - DNA, 15 bp, Homo sapiens
catgatcgtgtgggg

SEQ ID NO: 1334352 - DNA, 15 bp, Homo sapiens
ccatgatcgtgtggg

SEQ ID NO: 1334353 - DNA, 15 bp, Homo sapiens
accatgatcgtgtgg

SEQ ID NO: 1334354 - DNA, 15 bp, Homo sapiens
caccatgatcgtgtg

SEQ ID NO: 1334355 - DNA, 15 bp, Homo sapiens
ccaccatgatcgtgt

SEQ ID NO: 1334356 - DNA, 15 bp, Homo sapiens
gccaccatgatcgtg

SEQ ID NO: 1334357 - DNA, 15 bp, Homo sapiens
agccaccatgatcgt

SEQ ID NO: 1334358 - DNA, 15 bp, Homo sapiens
tagccaccatgatcg

SEQ ID NO: 1334359 - DNA, 15 bp, Homo sapiens
ttagccaccatgatc

SEQ ID NO: 1334360 - DNA, 15 bp, Homo sapiens
attagccaccatgat

SEQ ID NO: 1334361 - DNA, 15 bp, Homo sapiens
gattagccaccatga

SEQ ID NO: 1334362 - DNA, 15 bp, Homo sapiens
tgattagccaccatg

SEQ ID NO: 1334363 - DNA, 15 bp, Homo sapiens
gtgattagccaccat

SEQ ID NO: 1334364 - DNA, 15 bp, Homo sapiens
tgtgattagccacca

SEQ ID NO: 1334365 - DNA, 15 bp, Homo sapiens
ttgtgattagccacc

SEQ ID NO: 1334366 - DNA, 15 bp, Homo sapiens
attgtgattagccac

SEQ ID NO: 1334367 - DNA, 15 bp, Homo sapiens
cattgtgattagcca

SEQ ID NO: 1334368 - DNA, 15 bp, Homo sapiens
ccattgtgattagcc

SEQ ID NO: 1334369 - DNA, 15 bp, Homo sapiens
accattgtgattagc

SEQ ID NO: 1334370 - DNA, 15 bp, Homo sapiens
aaccattgtgattag

SEQ ID NO: 1334371 - DNA, 15 bp, Homo sapiens
taaccattgtgatta

SEQ ID NO: 1334372 - DNA, 15 bp, Homo sapiens
ctaaccattgtgatt

SEQ ID NO: 1334373 - DNA, 15 bp, Homo sapiens
tctaaccattgtgat

SEQ ID NO: 1334374 - DNA, 15 bp, Homo sapiens
ttctaaccattgtga

SEQ ID NO: 1334375 - DNA, 15 bp, Homo sapiens
tttctaaccattgtg

SEQ ID NO: 1334376 - DNA, 15 bp, Homo sapiens
gtttctaaccattgt

SEQ ID NO: 1334377 - DNA, 15 bp, Homo sapiens
tgtttctaaccattg

SEQ ID NO: 1334378 - DNA, 15 bp, Homo sapiens
atgtttctaaccatt

SEQ ID NO: 1334379 - DNA, 15 bp, Homo sapiens
tatgtttctaaccat

SEQ ID NO: 1334380 - DNA, 15 bp, Homo sapiens
ctatgtttctaacca

SEQ ID NO: 1334381 - DNA, 15 bp, Homo sapiens
gctatgtttctaacc

SEQ ID NO: 1334382 - DNA, 15 bp, Homo sapiens
tgctatgtttctaac

SEQ ID NO: 1334383 - DNA, 15 bp, Homo sapiens
gtgctatgtttctaa

SEQ ID NO: 1334384 - DNA, 15 bp, Homo sapiens
tgtgctatgtttcta

SEQ ID NO: 1334385 - DNA, 15 bp, Homo sapiens
atgtgctatgtttct

SEQ ID NO: 1334386 - DNA, 15 bp, Homo sapiens
aatgtgctatgtttc

SEQ ID NO: 1334387 - DNA, 15 bp, Homo sapiens
gaatgtgctatgttt

SEQ ID NO: 1334388 - DNA, 15 bp, Homo sapiens
agaatgtgctatgtt

SEQ ID NO: 1334389 - DNA, 15 bp, Homo sapiens
tagaatgtgctatgt

SEQ ID NO: 1334390 - DNA, 15 bp, Homo sapiens
ttagaatgtgctatg

SEQ ID NO: 1334391 - DNA, 15 bp, Homo sapiens
attagaatgtgctat

SEQ ID NO: 1334392 - DNA, 15 bp, Homo sapiens
aattagaatgtgcta

SEQ ID NO: 1334393 - DNA, 15 bp, Homo sapiens
aaattagaatgtgct

SEQ ID NO: 1334394 - DNA, 15 bp, Homo sapiens
taaattagaatgtgc

SEQ ID NO: 1334395 - DNA, 15 bp, Homo sapiens
gtaaattagaatgtg

SEQ ID NO: 1334396 - DNA, 15 bp, Homo sapiens
ggtaaattagaatgt

SEQ ID NO: 1334397 - DNA, 15 bp, Homo sapiens
tggtaaattagaatg

SEQ ID NO: 1334398 - DNA, 15 bp, Homo sapiens
gtggtaaattagaat

SEQ ID NO: 1334399 - DNA, 15 bp, Homo sapiens
ggtggtaaattagaa

SEQ ID NO: 1334400 - DNA, 15 bp, Homo sapiens
aggtggtaaattaga

SEQ ID NO: 1334401 - DNA, 15 bp, Homo sapiens
gaggtggtaaattag

SEQ ID NO: 1334402 - DNA, 15 bp, Homo sapiens
cgaggtggtaaatta

SEQ ID NO: 1334403 - DNA, 15 bp, Homo sapiens
ccgaggtggtaaatt

SEQ ID NO: 1334404 - DNA, 15 bp, Homo sapiens
accgaggtggtaaat

SEQ ID NO: 1334405 - DNA, 15 bp, Homo sapiens
aaccgaggtggtaaa

SEQ ID NO: 1334406 - DNA, 15 bp, Homo sapiens
gaaccgaggtggtaa

SEQ ID NO: 1334407 - DNA, 15 bp, Homo sapiens
tgaaccgaggtggta

SEQ ID NO: 1334408 - DNA, 15 bp, Homo sapiens
atgaaccgaggtggt

SEQ ID NO: 1334409 - DNA, 15 bp, Homo sapiens
catgaaccgaggtgg

SEQ ID NO: 1334410 - DNA, 15 bp, Homo sapiens
acatgaaccgaggtg

SEQ ID NO: 1334411 - DNA, 15 bp, Homo sapiens
tacatgaaccgaggt

SEQ ID NO: 1334412 - DNA, 15 bp, Homo sapiens
ttacatgaaccgagg

SEQ ID NO: 1334413 - DNA, 15 bp, Homo sapiens
gttacatgaaccgag

SEQ ID NO: 1334414 - DNA, 15 bp, Homo sapiens
ggttacatgaaccga

SEQ ID NO: 1334415 - DNA, 15 bp, Homo sapiens
tggttacatgaaccg

SEQ ID NO: 1334416 - DNA, 15 bp, Homo sapiens
gtggttacatgaacc

SEQ ID NO: 1334417 - DNA, 15 bp, Homo sapiens
tgtggttacatgaac

SEQ ID NO: 1334418 - DNA, 15 bp, Homo sapiens
atgtggttacatgaa

SEQ ID NO: 1334419 - DNA, 15 bp, Homo sapiens
gatgtggttacatga

SEQ ID NO: 1334420 - DNA, 15 bp, Homo sapiens
agatgtggttacatg

SEQ ID NO: 1334421 - DNA, 15 bp, Homo sapiens
cagatgtggttacat

SEQ ID NO: 1334422 - DNA, 15 bp, Homo sapiens
gcagatgtggttaca

SEQ ID NO: 1334423 - DNA, 15 bp, Homo sapiens
cgcagatgtggttac

SEQ ID NO: 1334424 - DNA, 15 bp, Homo sapiens
ccgcagatgtggtta

SEQ ID NO: 1334425 - DNA, 15 bp, Homo sapiens
accgcagatgtggtt

SEQ ID NO: 1334426 - DNA, 15 bp, Homo sapiens
caccgcagatgtggt

SEQ ID NO: 1334427 - DNA, 15 bp, Homo sapiens
acaccgcagatgtgg

SEQ ID NO: 1334428 - DNA, 15 bp, Homo sapiens
tacaccgcagatgtg

SEQ ID NO: 1334429 - DNA, 15 bp, Homo sapiens
ctacaccgcagatgt

SEQ ID NO: 1334430 - DNA, 15 bp, Homo sapiens
tctacaccgcagatg

SEQ ID NO: 1334431 - DNA, 15 bp, Homo sapiens
ctctacaccgcagat

SEQ ID NO: 1334432 - DNA, 15 bp, Homo sapiens
cctctacaccgcaga

SEQ ID NO: 1334433 - DNA, 15 bp, Homo sapiens
ccctctacaccgcag

SEQ ID NO: 1334434 - DNA, 15 bp, Homo sapiens
cccctctacaccgca

SEQ ID NO: 1334435 - DNA, 15 bp, Homo sapiens
gcccctctacaccgc

SEQ ID NO: 1334436 - DNA, 15 bp, Homo sapiens
cgcccctctacaccg

SEQ ID NO: 1334437 - DNA, 15 bp, Homo sapiens
gcgcccctctacacc

SEQ ID NO: 1334438 - DNA, 15 bp, Homo sapiens
tgcgcccctctacac

SEQ ID NO: 1334439 - DNA, 15 bp, Homo sapiens
gtgcgcccctctaca

SEQ ID NO: 1334440 - DNA, 15 bp, Homo sapiens
agtgcgcccctctac

SEQ ID NO: 1334441 - DNA, 15 bp, Homo sapiens
tagtgcgcccctcta

SEQ ID NO: 1334442 - DNA, 15 bp, Homo sapiens
gtagtgcgcccctct

SEQ ID NO: 1334443 - DNA, 15 bp, Homo sapiens
ggtagtgcgcccctc

SEQ ID NO: 1334444 - DNA, 15 bp, Homo sapiens
gggtagtgcgcccct

SEQ ID NO: 1334445 - DNA, 15 bp, Homo sapiens
agggtagtgcgcccc

SEQ ID NO: 1334446 - DNA, 15 bp, Homo sapiens
aagggtagtgcgccc

SEQ ID NO: 1334447 - DNA, 15 bp, Homo sapiens
aaagggtagtgcgcc

SEQ ID NO: 1334448 - DNA, 15 bp, Homo sapiens
caaagggtagtgcgc

SEQ ID NO: 1334449 - DNA, 15 bp, Homo sapiens
tcaaagggtagtgcg

SEQ ID NO: 1334450 - DNA, 15 bp, Homo sapiens
atcaaagggtagtgc

SEQ ID NO: 1334451 - DNA, 15 bp, Homo sapiens
aatcaaagggtagtg

SEQ ID NO: 1334452 - DNA, 15 bp, Homo sapiens
gaatcaaagggtagt

SEQ ID NO: 1334453 - DNA, 15 bp, Homo sapiens
tgaatcaaagggtag

SEQ ID NO: 1334454 - DNA, 15 bp, Homo sapiens
atgaatcaaagggta

SEQ ID NO: 1334455 - DNA, 15 bp, Homo sapiens
tatgaatcaaagggt

SEQ ID NO: 1334456 - DNA, 15 bp, Homo sapiens
ctatgaatcaaaggg

SEQ ID NO: 1334457 - DNA, 15 bp, Homo sapiens
gctatgaatcaaagg

SEQ ID NO: 1334458 - DNA, 15 bp, Homo sapiens
ggctatgaatcaaag

SEQ ID NO: 1334459 - DNA, 15 bp, Homo sapiens
aggctatgaatcaaa

SEQ ID NO: 1334460 - DNA, 15 bp, Homo sapiens
gaggctatgaatcaa

SEQ ID NO: 1334461 - DNA, 15 bp, Homo sapiens
tgaggctatgaatca

SEQ ID NO: 1334462 - DNA, 15 bp, Homo sapiens
atgaggctatgaatc

SEQ ID NO: 1334463 - DNA, 15 bp, Homo sapiens
gatgaggctatgaat

SEQ ID NO: 1334464 - DNA, 15 bp, Homo sapiens
ggatgaggctatgaa

SEQ ID NO: 1334465 - DNA, 15 bp, Homo sapiens
tggatgaggctatga

SEQ ID NO: 1334466 - DNA, 15 bp, Homo sapiens
ttggatgaggctatg

SEQ ID NO: 1334467 - DNA, 15 bp, Homo sapiens
tttggatgaggctat

SEQ ID NO: 1334468 - DNA, 15 bp, Homo sapiens
atttggatgaggcta

SEQ ID NO: 1334469 - DNA, 15 bp, Homo sapiens
gatttggatgaggct

SEQ ID NO: 1334470 - DNA, 15 bp, Homo sapiens
tgatttggatgaggc

SEQ ID NO: 1334471 - DNA, 15 bp, Homo sapiens
gtgatttggatgagg

SEQ ID NO: 1334472 - DNA, 15 bp, Homo sapiens
tgtgatttggatgag

SEQ ID NO: 1334473 - DNA, 15 bp, Homo sapiens
ctgtgatttggatga

SEQ ID NO: 1334474 - DNA, 15 bp, Homo sapiens
actgtgatttggatg

SEQ ID NO: 1334475 - DNA, 15 bp, Homo sapiens
tactgtgatttggat

SEQ ID NO: 1334476 - DNA, 15 bp, Homo sapiens
ttactgtgatttgga

SEQ ID NO: 1334477 - DNA, 15 bp, Homo sapiens
cttactgtgatttgg

SEQ ID NO: 1334478 - DNA, 15 bp, Homo sapiens
tcttactgtgatttg

SEQ ID NO: 1334479 - DNA, 15 bp, Homo sapiens
ctcttactgtgattt

SEQ ID NO: 1334480 - DNA, 15 bp, Homo sapiens
tctcttactgtgatt

SEQ ID NO: 1334481 - DNA, 15 bp, Homo sapiens
ttctcttactgtgat

SEQ ID NO: 1334482 - DNA, 15 bp, Homo sapiens
tttctcttactgtga

SEQ ID NO: 1334483 - DNA, 15 bp, Homo sapiens
ctttctcttactgtg

SEQ ID NO: 1334484 - DNA, 15 bp, Homo sapiens
tctttctcttactgt

SEQ ID NO: 1334485 - DNA, 15 bp, Homo sapiens
ctctttctcttactg

SEQ ID NO: 1334486 - DNA, 15 bp, Homo sapiens
cctctttctcttact

SEQ ID NO: 1334487 - DNA, 15 bp, Homo sapiens
gcctctttctcttac

SEQ ID NO: 1334488 - DNA, 15 bp, Homo sapiens
tgcctctttctctta

SEQ ID NO: 1334489 - DNA, 15 bp, Homo sapiens
ttgcctctttctctt

SEQ ID NO: 1334490 - DNA, 15 bp, Homo sapiens
attgcctctttctct

SEQ ID NO: 1334491 - DNA, 15 bp, Homo sapiens
aattgcctctttctc

SEQ ID NO: 1334492 - DNA, 15 bp, Homo sapiens
aaattgcctctttct

SEQ ID NO: 1334493 - DNA, 15 bp, Homo sapiens
gaaattgcctctttc

SEQ ID NO: 1334494 - DNA, 15 bp, Homo sapiens
ggaaattgcctcttt

SEQ ID NO: 1334495 - DNA, 15 bp, Homo sapiens
tggaaattgcctctt

SEQ ID NO: 1334496 - DNA, 15 bp, Homo sapiens
ttggaaattgcctct

SEQ ID NO: 1334497 - DNA, 15 bp, Homo sapiens
tttggaaattgcctc

SEQ ID NO: 1334498 - DNA, 15 bp, Homo sapiens
atttggaaattgcct

SEQ ID NO: 1334499 - DNA, 15 bp, Homo sapiens
catttggaaattgcc

SEQ ID NO: 1334500 - DNA, 15 bp, Homo sapiens
tcatttggaaattgc

SEQ ID NO: 1334501 - DNA, 15 bp, Homo sapiens
ttcatttggaaattg

SEQ ID NO: 1334502 - DNA, 15 bp, Homo sapiens
tttcatttggaaatt

SEQ ID NO: 1334503 - DNA, 15 bp, Homo sapiens
ttttcatttggaaat

SEQ ID NO: 1334504 - DNA, 15 bp, Homo sapiens
cttttcatttggaaa

SEQ ID NO: 1334505 - DNA, 15 bp, Homo sapiens
ccttttcatttggaa

SEQ ID NO: 1334506 - DNA, 15 bp, Homo sapiens
tccttttcatttgga

SEQ ID NO: 1334507 - DNA, 15 bp, Homo sapiens
atccttttcatttgg

SEQ ID NO: 1334508 - DNA, 15 bp, Homo sapiens
catccttttcatttg

SEQ ID NO: 1334509 - DNA, 15 bp, Homo sapiens
acatccttttcattt

SEQ ID NO: 1334510 - DNA, 15 bp, Homo sapiens
tacatccttttcatt

SEQ ID NO: 1334511 - DNA, 15 bp, Homo sapiens
ctacatccttttcat

SEQ ID NO: 1334512 - DNA, 15 bp, Homo sapiens
tctacatccttttca

SEQ ID NO: 1334513 - DNA, 15 bp, Homo sapiens
ttctacatccttttc

SEQ ID NO: 1334514 - DNA, 15 bp, Homo sapiens
cttctacatcctttt

SEQ ID NO: 1334515 - DNA, 15 bp, Homo sapiens
tcttctacatccttt

SEQ ID NO: 1334516 - DNA, 15 bp, Homo sapiens
ttcttctacatcctt

SEQ ID NO: 1334517 - DNA, 15 bp, Homo sapiens
tttcttctacatcct

SEQ ID NO: 1334518 - DNA, 15 bp, Homo sapiens
gtttcttctacatcc

SEQ ID NO: 1334519 - DNA, 15 bp, Homo sapiens
tgtttcttctacatc

SEQ ID NO: 1334520 - DNA, 15 bp, Homo sapiens
ttgtttcttctacat

SEQ ID NO: 1334521 - DNA, 15 bp, Homo sapiens
tttgtttcttctaca

SEQ ID NO: 1334522 - DNA, 15 bp, Homo sapiens
ttttgtttcttctac

SEQ ID NO: 1334523 - DNA, 15 bp, Homo sapiens
attttgtttcttcta

SEQ ID NO: 1334524 - DNA, 15 bp, Homo sapiens
tattttgtttcttct

SEQ ID NO: 1334525 - DNA, 15 bp, Homo sapiens
ttattttgtttcttc

SEQ ID NO: 1334526 - DNA, 15 bp, Homo sapiens
attattttgtttctt

SEQ ID NO: 1334527 - DNA, 15 bp, Homo sapiens
tattattttgtttct

SEQ ID NO: 1334528 - DNA, 15 bp, Homo sapiens
ctattattttgtttc

SEQ ID NO: 1334529 - DNA, 15 bp, Homo sapiens
tctattattttgttt

SEQ ID NO: 1334530 - DNA, 15 bp, Homo sapiens
atctattattttgtt

SEQ ID NO: 1334531 - DNA, 15 bp, Homo sapiens
catctattattttgt

SEQ ID NO: 1334532 - DNA, 15 bp, Homo sapiens
gcatctattattttg

SEQ ID NO: 1334533 - DNA, 15 bp, Homo sapiens
ggcatctattatttt

SEQ ID NO: 1334534 - DNA, 15 bp, Homo sapiens
tggcatctattattt

SEQ ID NO: 1334535 - DNA, 15 bp, Homo sapiens
gtggcatctattatt

SEQ ID NO: 1334536 - DNA, 15 bp, Homo sapiens
ggtggcatctattat

SEQ ID NO: 1334537 - DNA, 15 bp, Homo sapiens
aggtggcatctatta

SEQ ID NO: 1334538 - DNA, 15 bp, Homo sapiens
taggtggcatctatt

SEQ ID NO: 1334539 - DNA, 15 bp, Homo sapiens
gtaggtggcatctat

SEQ ID NO: 1334540 - DNA, 15 bp, Homo sapiens
tgtaggtggcatcta

SEQ ID NO: 1334541 - DNA, 15 bp, Homo sapiens
ctgtaggtggcatct

SEQ ID NO: 1334542 - DNA, 15 bp, Homo sapiens
gctgtaggtggcatc

SEQ ID NO: 1334543 - DNA, 15 bp, Homo sapiens
agctgtaggtggcat

SEQ ID NO: 1334544 - DNA, 15 bp, Homo sapiens
aagctgtaggtggca

SEQ ID NO: 1334545 - DNA, 15 bp, Homo sapiens
gaagctgtaggtggc

SEQ ID NO: 1334546 - DNA, 15 bp, Homo sapiens
agaagctgtaggtgg

SEQ ID NO: 1334547 - DNA, 15 bp, Homo sapiens
aagaagctgtaggtg

SEQ ID NO: 1334548 - DNA, 15 bp, Homo sapiens
gaagaagctgtaggt

SEQ ID NO: 1334549 - DNA, 15 bp, Homo sapiens
ggaagaagctgtagg

SEQ ID NO: 1334550 - DNA, 15 bp, Homo sapiens
tggaagaagctgtag

SEQ ID NO: 1334551 - DNA, 15 bp, Homo sapiens
atggaagaagctgta

SEQ ID NO: 1334552 - DNA, 15 bp, Homo sapiens
tatggaagaagctgt

SEQ ID NO: 1334553 - DNA, 15 bp, Homo sapiens
ttatggaagaagctg

SEQ ID NO: 1334554 - DNA, 15 bp, Homo sapiens
tttatggaagaagct

SEQ ID NO: 1334555 - DNA, 15 bp, Homo sapiens
atttatggaagaagc

SEQ ID NO: 1334556 - DNA, 15 bp, Homo sapiens
aatttatggaagaag

SEQ ID NO: 1334557 - DNA, 15 bp, Homo sapiens
taatttatggaagaa

SEQ ID NO: 1334558 - DNA, 15 bp, Homo sapiens
gtaatttatggaaga

SEQ ID NO: 1334559 - DNA, 15 bp, Homo sapiens
agtaatttatggaag

SEQ ID NO: 1334560 - DNA, 15 bp, Homo sapiens
aagtaatttatggaa

SEQ ID NO: 1334561 - DNA, 15 bp, Homo sapiens
aaagtaatttatgga

SEQ ID NO: 1334562 - DNA, 15 bp, Homo sapiens
aaaagtaatttatgg

SEQ ID NO: 1334563 - DNA, 15 bp, Homo sapiens
taaaagtaatttatg

SEQ ID NO: 1334564 - DNA, 15 bp, Homo sapiens
gtaaaagtaatttat

SEQ ID NO: 1334565 - DNA, 15 bp, Homo sapiens
tgtaaaagtaattta

SEQ ID NO: 1334566 - DNA, 15 bp, Homo sapiens
atgtaaaagtaattt

SEQ ID NO: 1334567 - DNA, 15 bp, Homo sapiens
gatgtaaaagtaatt

SEQ ID NO: 1334568 - DNA, 15 bp, Homo sapiens
ggatgtaaaagtaat

SEQ ID NO: 1334569 - DNA, 15 bp, Homo sapiens
aggatgtaaaagtaa

SEQ ID NO: 1334570 - DNA, 15 bp, Homo sapiens
aaggatgtaaaagta

SEQ ID NO: 1334571 - DNA, 15 bp, Homo sapiens
caaggatgtaaaagt

SEQ ID NO: 1334572 - DNA, 15 bp, Homo sapiens
ccaaggatgtaaaag

SEQ ID NO: 1334573 - DNA, 15 bp, Homo sapiens
accaaggatgtaaaa

SEQ ID NO: 1334574 - DNA, 15 bp, Homo sapiens
aaccaaggatgtaaa

SEQ ID NO: 1334575 - DNA, 15 bp, Homo sapiens
caaccaaggatgtaa

SEQ ID NO: 1334576 - DNA, 15 bp, Homo sapiens
gcaaccaaggatgta

SEQ ID NO: 1334577 - DNA, 15 bp, Homo sapiens
agcaaccaaggatgt

SEQ ID NO: 1334578 - DNA, 15 bp, Homo sapiens
aagcaaccaaggatg

SEQ ID NO: 1334579 - DNA, 15 bp, Homo sapiens
gaagcaaccaaggat

SEQ ID NO: 1334580 - DNA, 15 bp, Homo sapiens
ggaagcaaccaagga

SEQ ID NO: 1334581 - DNA, 15 bp, Homo sapiens
gggaagcaaccaagg

SEQ ID NO: 1334582 - DNA, 15 bp, Homo sapiens
agggaagcaaccaag

SEQ ID NO: 1334583 - DNA, 15 bp, Homo sapiens
gagggaagcaaccaa

SEQ ID NO: 1334584 - DNA, 15 bp, Homo sapiens
ggagggaagcaacca

SEQ ID NO: 1334585 - DNA, 15 bp, Homo sapiens
aggagggaagcaacc

SEQ ID NO: 1334586 - DNA, 15 bp, Homo sapiens
aaggagggaagcaac

SEQ ID NO: 1334587 - DNA, 15 bp, Homo sapiens
caaggagggaagcaa

SEQ ID NO: 1334588 - DNA, 15 bp, Homo sapiens
tcaaggagggaagca

SEQ ID NO: 1334589 - DNA, 15 bp, Homo sapiens
ctcaaggagggaagc

SEQ ID NO: 1334590 - DNA, 15 bp, Homo sapiens
gctcaaggagggaag

SEQ ID NO: 1334591 - DNA, 15 bp, Homo sapiens
ggctcaaggagggaa

SEQ ID NO: 1334592 - DNA, 15 bp, Homo sapiens
aggctcaaggaggga

SEQ ID NO: 1334593 - DNA, 15 bp, Homo sapiens
gaggctcaaggaggg

SEQ ID NO: 1334594 - DNA, 15 bp, Homo sapiens
ggaggctcaaggagg

SEQ ID NO: 1334595 - DNA, 15 bp, Homo sapiens
tggaggctcaaggag

SEQ ID NO: 1334596 - DNA, 15 bp, Homo sapiens
atggaggctcaagga

SEQ ID NO: 1334597 - DNA, 15 bp, Homo sapiens
tatggaggctcaagg

SEQ ID NO: 1334598 - DNA, 15 bp, Homo sapiens
ctatggaggctcaag

SEQ ID NO: 1334599 - DNA, 15 bp, Homo sapiens
actatggaggctcaa

SEQ ID NO: 1334600 - DNA, 15 bp, Homo sapiens
tactatggaggctca

SEQ ID NO: 1334601 - DNA, 15 bp, Homo sapiens
gtactatggaggctc

SEQ ID NO: 1334602 - DNA, 15 bp, Homo sapiens
agtactatggaggct

SEQ ID NO: 1334603 - DNA, 15 bp, Homo sapiens
cagtactatggaggc

SEQ ID NO: 1334604 - DNA, 15 bp, Homo sapiens
acagtactatggagg

SEQ ID NO: 1334605 - DNA, 15 bp, Homo sapiens
tacagtactatggag

SEQ ID NO: 1334606 - DNA, 15 bp, Homo sapiens
ctacagtactatgga

SEQ ID NO: 1334607 - DNA, 15 bp, Homo sapiens
actacagtactatgg

SEQ ID NO: 1334608 - DNA, 15 bp, Homo sapiens
gactacagtactatg

SEQ ID NO: 1334609 - DNA, 15 bp, Homo sapiens
tgactacagtactat

SEQ ID NO: 1334610 - DNA, 15 bp, Homo sapiens
ctgactacagtacta

SEQ ID NO: 1334611 - DNA, 15 bp, Homo sapiens
actgactacagtact

SEQ ID NO: 1334612 - DNA, 15 bp, Homo sapiens
aactgactacagtac

SEQ ID NO: 1334613 - DNA, 15 bp, Homo sapiens
caactgactacagta

SEQ ID NO: 1334614 - DNA, 15 bp, Homo sapiens
acaactgactacagt

SEQ ID NO: 1334615 - DNA, 15 bp, Homo sapiens
aacaactgactacag

SEQ ID NO: 1334616 - DNA, 15 bp, Homo sapiens
aaacaactgactaca

SEQ ID NO: 1334617 - DNA, 15 bp, Homo sapiens
taaacaactgactac

SEQ ID NO: 1334618 - DNA, 15 bp, Homo sapiens
gtaaacaactgacta

SEQ ID NO: 1334619 - DNA, 15 bp, Homo sapiens
tgtaaacaactgact

SEQ ID NO: 1334620 - DNA, 15 bp, Homo sapiens
ttgtaaacaactgac

SEQ ID NO: 1334621 - DNA, 15 bp, Homo sapiens
gttgtaaacaactga

SEQ ID NO: 1334622 - DNA, 15 bp, Homo sapiens
ggttgtaaacaactg

SEQ ID NO: 1334623 - DNA, 15 bp, Homo sapiens
cggttgtaaacaact

SEQ ID NO: 1334624 - DNA, 15 bp, Homo sapiens
gcggttgtaaacaac

SEQ ID NO: 1334625 - DNA, 15 bp, Homo sapiens
ggcggttgtaaacaa

SEQ ID NO: 1334626 - DNA, 15 bp, Homo sapiens
cggcggttgtaaaca

SEQ ID NO: 1334627 - DNA, 15 bp, Homo sapiens
ccggcggttgtaaac

SEQ ID NO: 1334628 - DNA, 15 bp, Homo sapiens
tccggcggttgtaaa

SEQ ID NO: 1334629 - DNA, 15 bp, Homo sapiens
gtccggcggttgtaa

SEQ ID NO: 1334630 - DNA, 15 bp, Homo sapiens
agtccggcggttgta

SEQ ID NO: 1334631 - DNA, 15 bp, Homo sapiens
cagtccggcggttgt

SEQ ID NO: 1334632 - DNA, 15 bp, Homo sapiens
gcagtccggcggttg

SEQ ID NO: 1334633 - DNA, 15 bp, Homo sapiens
ggcagtccggcggtt

SEQ ID NO: 1334634 - DNA, 15 bp, Homo sapiens
aggcagtccggcggt

SEQ ID NO: 1334635 - DNA, 15 bp, Homo sapiens
gaggcagtccggcgg

SEQ ID NO: 1334636 - DNA, 15 bp, Homo sapiens
tgaggcagtccggcg

SEQ ID NO: 1334637 - DNA, 15 bp, Homo sapiens
ctgaggcagtccggc

SEQ ID NO: 1334638 - DNA, 15 bp, Homo sapiens
cctgaggcagtccgg

SEQ ID NO: 1334639 - DNA, 15 bp, Homo sapiens
tcctgaggcagtccg

SEQ ID NO: 1334640 - DNA, 15 bp, Homo sapiens
atcctgaggcagtcc

SEQ ID NO: 1334641 - DNA, 15 bp, Homo sapiens
aatcctgaggcagtc

SEQ ID NO: 1334642 - DNA, 15 bp, Homo sapiens
aaatcctgaggcagt

SEQ ID NO: 1334643 - DNA, 15 bp, Homo sapiens
taaatcctgaggcag

SEQ ID NO: 1334644 - DNA, 15 bp, Homo sapiens
ttaaatcctgaggca

SEQ ID NO: 1334645 - DNA, 15 bp, Homo sapiens
tttaaatcctgaggc

SEQ ID NO: 1334646 - DNA, 15 bp, Homo sapiens
gtttaaatcctgagg

SEQ ID NO: 1334647 - DNA, 15 bp, Homo sapiens
tgtttaaatcctgag

SEQ ID NO: 1334648 - DNA, 15 bp, Homo sapiens
atgtttaaatcctga

SEQ ID NO: 1334649 - DNA, 15 bp, Homo sapiens
aatgtttaaatcctg

SEQ ID NO: 1334650 - DNA, 15 bp, Homo sapiens
gaatgtttaaatcct

SEQ ID NO: 1334651 - DNA, 15 bp, Homo sapiens
agaatgtttaaatcc

SEQ ID NO: 1334652 - DNA, 15 bp, Homo sapiens
cagaatgtttaaatc

SEQ ID NO: 1334653 - DNA, 15 bp, Homo sapiens
tcagaatgtttaaat

SEQ ID NO: 1334654 - DNA, 15 bp, Homo sapiens
ctcagaatgtttaaa

SEQ ID NO: 1334655 - DNA, 15 bp, Homo sapiens
actcagaatgtttaa

SEQ ID NO: 1334656 - DNA, 15 bp, Homo sapiens
tactcagaatgttta

SEQ ID NO: 1334657 - DNA, 15 bp, Homo sapiens
ctactcagaatgttt

SEQ ID NO: 1334658 - DNA, 15 bp, Homo sapiens
tctactcagaatgtt

SEQ ID NO: 1334659 - DNA, 15 bp, Homo sapiens
ttctactcagaatgt

SEQ ID NO: 1334660 - DNA, 15 bp, Homo sapiens
tttctactcagaatg

SEQ ID NO: 1334661 - DNA, 15 bp, Homo sapiens
ttttctactcagaat

SEQ ID NO: 1334662 - DNA, 15 bp, Homo sapiens
tttttctactcagaa

SEQ ID NO: 1334663 - DNA, 15 bp, Homo sapiens
gtttttctactcaga

SEQ ID NO: 1334664 - DNA, 15 bp, Homo sapiens
tgtttttctactcag

SEQ ID NO: 1334665 - DNA, 15 bp, Homo sapiens
atgtttttctactca

SEQ ID NO: 1334666 - DNA, 15 bp, Homo sapiens
catgtttttctactc

SEQ ID NO: 1334667 - DNA, 15 bp, Homo sapiens
acatgtttttctact

SEQ ID NO: 1334668 - DNA, 15 bp, Homo sapiens
aacatgtttttctac

SEQ ID NO: 1334669 - DNA, 15 bp, Homo sapiens
aaacatgtttttcta

SEQ ID NO: 1334670 - DNA, 15 bp, Homo sapiens
aaaacatgtttttct

SEQ ID NO: 1334671 - DNA, 15 bp, Homo sapiens
gaaaacatgtttttc

SEQ ID NO: 1334672 - DNA, 15 bp, Homo sapiens
ggaaaacatgttttt

SEQ ID NO: 1334673 - DNA, 15 bp, Homo sapiens
aggaaaacatgtttt

SEQ ID NO: 1334674 - DNA, 15 bp, Homo sapiens
gaggaaaacatgttt

SEQ ID NO: 1334675 - DNA, 15 bp, Homo sapiens
tgaggaaaacatgtt

SEQ ID NO: 1334676 - DNA, 15 bp, Homo sapiens
gtgaggaaaacatgt

SEQ ID NO: 1334677 - DNA, 15 bp, Homo sapiens
tgtgaggaaaacatg

SEQ ID NO: 1334678 - DNA, 15 bp, Homo sapiens
ctgtgaggaaaacat

SEQ ID NO: 1334679 - DNA, 15 bp, Homo sapiens
gctgtgaggaaaaca

SEQ ID NO: 1334680 - DNA, 15 bp, Homo sapiens
ggctgtgaggaaaac

SEQ ID NO: 1334681 - DNA, 15 bp, Homo sapiens
aggctgtgaggaaaa

SEQ ID NO: 1334682 - DNA, 15 bp, Homo sapiens
caggctgtgaggaaa

SEQ ID NO: 1334683 - DNA, 15 bp, Homo sapiens
ccaggctgtgaggaa

SEQ ID NO: 1334684 - DNA, 15 bp, Homo sapiens
accaggctgtgagga

SEQ ID NO: 1334685 - DNA, 15 bp, Homo sapiens
caccaggctgtgagg

SEQ ID NO: 1334686 - DNA, 15 bp, Homo sapiens
acaccaggctgtgag

SEQ ID NO: 1334687 - DNA, 15 bp, Homo sapiens
tacaccaggctgtga

SEQ ID NO: 1334688 - DNA, 15 bp, Homo sapiens
atacaccaggctgtg

SEQ ID NO: 1334689 - DNA, 15 bp, Homo sapiens
aatacaccaggctgt

SEQ ID NO: 1334690 - DNA, 15 bp, Homo sapiens
caatacaccaggctg

SEQ ID NO: 1334691 - DNA, 15 bp, Homo sapiens
tcaatacaccaggct

SEQ ID NO: 1334692 - DNA, 15 bp, Homo sapiens
ttcaatacaccaggc

SEQ ID NO: 1334693 - DNA, 15 bp, Homo sapiens
gttcaatacaccagg

SEQ ID NO: 1334694 - DNA, 15 bp, Homo sapiens
tgttcaatacaccag

SEQ ID NO: 1334695 - DNA, 15 bp, Homo sapiens
atgttcaatacacca

SEQ ID NO: 1334696 - DNA, 15 bp, Homo sapiens
gatgttcaatacacc

SEQ ID NO: 1334697 - DNA, 15 bp, Homo sapiens
tgatgttcaatacac

SEQ ID NO: 1334698 - DNA, 15 bp, Homo sapiens
atgatgttcaataca

SEQ ID NO: 1334699 - DNA, 15 bp, Homo sapiens
gatgatgttcaatac

SEQ ID NO: 1334700 - DNA, 15 bp, Homo sapiens
agatgatgttcaata

SEQ ID NO: 1334701 - DNA, 15 bp, Homo sapiens
cagatgatgttcaat

SEQ ID NO: 1334702 - DNA, 15 bp, Homo sapiens
gcagatgatgttcaa

SEQ ID NO: 1334703 - DNA, 15 bp, Homo sapiens
ggcagatgatgttca

SEQ ID NO: 1334704 - DNA, 15 bp, Homo sapiens
aggcagatgatgttc

SEQ ID NO: 1334705 - DNA, 15 bp, Homo sapiens
gaggcagatgatgtt

SEQ ID NO: 1334706 - DNA, 15 bp, Homo sapiens
agaggcagatgatgt

SEQ ID NO: 1334707 - DNA, 15 bp, Homo sapiens
aagaggcagatgatg

SEQ ID NO: 1334708 - DNA, 15 bp, Homo sapiens
aaagaggcagatgat

SEQ ID NO: 1334709 - DNA, 15 bp, Homo sapiens
taaagaggcagatga

SEQ ID NO: 1334710 - DNA, 15 bp, Homo sapiens
ttaaagaggcagatg

SEQ ID NO: 1334711 - DNA, 15 bp, Homo sapiens
attaaagaggcagat

SEQ ID NO: 1334712 - DNA, 15 bp, Homo sapiens
aattaaagaggcaga

SEQ ID NO: 1334713 - DNA, 15 bp, Homo sapiens
aaattaaagaggcag

SEQ ID NO: 1334714 - DNA, 15 bp, Homo sapiens
taaattaaagaggca

SEQ ID NO: 1334715 - DNA, 15 bp, Homo sapiens
ttaaattaaagaggc

SEQ ID NO: 1334716 - DNA, 15 bp, Homo sapiens
tttaaattaaagagg

SEQ ID NO: 1334717 - DNA, 15 bp, Homo sapiens
ctttaaattaaagag

SEQ ID NO: 1334718 - DNA, 15 bp, Homo sapiens
cctttaaattaaaga

SEQ ID NO: 1334719 - DNA, 15 bp, Homo sapiens
ccctttaaattaaag

SEQ ID NO: 1334720 - DNA, 15 bp, Homo sapiens
tccctttaaattaaa

SEQ ID NO: 1334721 - DNA, 15 bp, Homo sapiens
atccctttaaattaa

SEQ ID NO: 1334722 - DNA, 15 bp, Homo sapiens
tatccctttaaatta

SEQ ID NO: 1334723 - DNA, 15 bp, Homo sapiens
ttatccctttaaatt

SEQ ID NO: 1334724 - DNA, 15 bp, Homo sapiens
gttatccctttaaat

SEQ ID NO: 1334725 - DNA, 15 bp, Homo sapiens
agttatccctttaaa

SEQ ID NO: 1334726 - DNA, 15 bp, Homo sapiens
aagttatccctttaa

SEQ ID NO: 1334727 - DNA, 15 bp, Homo sapiens
gaagttatcccttta

SEQ ID NO: 1334728 - DNA, 15 bp, Homo sapiens
agaagttatcccttt

SEQ ID NO: 1334729 - DNA, 15 bp, Homo sapiens
cagaagttatccctt

SEQ ID NO: 1334730 - DNA, 15 bp, Homo sapiens
gcagaagttatccct

SEQ ID NO: 1334731 - DNA, 15 bp, Homo sapiens
tgcagaagttatccc

SEQ ID NO: 1334732 - DNA, 15 bp, Homo sapiens
ttgcagaagttatcc

SEQ ID NO: 1334733 - DNA, 15 bp, Homo sapiens
tttgcagaagttatc

SEQ ID NO: 1334734 - DNA, 15 bp, Homo sapiens
ttttgcagaagttat

SEQ ID NO: 1334735 - DNA, 15 bp, Homo sapiens
gttttgcagaagtta

SEQ ID NO: 1334736 - DNA, 15 bp, Homo sapiens
ggttttgcagaagtt

SEQ ID NO: 1334737 - DNA, 15 bp, Homo sapiens
tggttttgcagaagt

SEQ ID NO: 1334738 - DNA, 15 bp, Homo sapiens
gtggttttgcagaag

SEQ ID NO: 1334739 - DNA, 15 bp, Homo sapiens
agtggttttgcagaa

SEQ ID NO: 1334740 - DNA, 15 bp, Homo sapiens
aagtggttttgcaga

SEQ ID NO: 1334741 - DNA, 15 bp, Homo sapiens
aaagtggttttgcag

SEQ ID NO: 1334742 - DNA, 15 bp, Homo sapiens
caaagtggttttgca

SEQ ID NO: 1334743 - DNA, 15 bp, Homo sapiens
acaaagtggttttgc

SEQ ID NO: 1334744 - DNA, 15 bp, Homo sapiens
tacaaagtggttttg

SEQ ID NO: 1334745 - DNA, 15 bp, Homo sapiens
ttacaaagtggtttt

SEQ ID NO: 1334746 - DNA, 15 bp, Homo sapiens
tttacaaagtggttt

SEQ ID NO: 1334747 - DNA, 15 bp, Homo sapiens
gtttacaaagtggtt

SEQ ID NO: 1334748 - DNA, 15 bp, Homo sapiens
agtttacaaagtggt

SEQ ID NO: 1334749 - DNA, 15 bp, Homo sapiens
cagtttacaaagtgg

SEQ ID NO: 1334750 - DNA, 15 bp, Homo sapiens
acagtttacaaagtg

SEQ ID NO: 1334751 - DNA, 15 bp, Homo sapiens
tacagtttacaaagt

SEQ ID NO: 1334752 - DNA, 15 bp, Homo sapiens
tctttacagtttaca

SEQ ID NO: 1334753 - DNA, 15 bp, Homo sapiens
ttctttacagtttac

SEQ ID NO: 1334754 - DNA, 15 bp, Homo sapiens
attctttacagttta

SEQ ID NO: 1334755 - DNA, 15 bp, Homo sapiens
aattctttacagttt

SEQ ID NO: 1334756 - DNA, 15 bp, Homo sapiens
taattctttacagtt

SEQ ID NO: 1334757 - DNA, 15 bp, Homo sapiens
ataattctttacagt

SEQ ID NO: 1334758 - DNA, 15 bp, Homo sapiens
tataattctttacag

SEQ ID NO: 1334759 - DNA, 15 bp, Homo sapiens
atataattctttaca

SEQ ID NO: 1334760 - DNA, 15 bp, Homo sapiens
tatataattctttac

SEQ ID NO: 1334761 - DNA, 15 bp, Homo sapiens
ttatataattcttta

SEQ ID NO: 1334762 - DNA, 15 bp, Homo sapiens
tttatataattcttt

SEQ ID NO: 1334763 - DNA, 15 bp, Homo sapiens
atttatataattctt

SEQ ID NO: 1334764 - DNA, 15 bp, Homo sapiens
catttatataattct

SEQ ID NO: 1334765 - DNA, 15 bp, Homo sapiens
acatttatataattc

SEQ ID NO: 1334766 - DNA, 15 bp, Homo sapiens
tacatttatataatt

SEQ ID NO: 1334767 - DNA, 15 bp, Homo sapiens
ttacatttatataat

SEQ ID NO: 1334768 - DNA, 15 bp, Homo sapiens
tttacatttatataa

SEQ ID NO: 1334769 - DNA, 15 bp, Homo sapiens
atttacatttatata

SEQ ID NO: 1334770 - DNA, 15 bp, Homo sapiens
tatttacatttatat

SEQ ID NO: 1334771 - DNA, 15 bp, Homo sapiens
atatttacatttata

SEQ ID NO: 1334772 - DNA, 15 bp, Homo sapiens
aatatttacatttat

SEQ ID NO: 1334773 - DNA, 15 bp, Homo sapiens
aaatatttacattta

SEQ ID NO: 1334774 - DNA, 15 bp, Homo sapiens
taaatatttacattt

SEQ ID NO: 1334775 - DNA, 15 bp, Homo sapiens
ctaaatatttacatt

SEQ ID NO: 1334776 - DNA, 15 bp, Homo sapiens
cctaaatatttacat

SEQ ID NO: 1334777 - DNA, 15 bp, Homo sapiens
tcctaaatatttaca

SEQ ID NO: 1334778 - DNA, 15 bp, Homo sapiens
atcctaaatatttac

SEQ ID NO: 1334779 - DNA, 15 bp, Homo sapiens
tatcctaaatattta

SEQ ID NO: 1334780 - DNA, 15 bp, Homo sapiens
ttatcctaaatattt

SEQ ID NO: 1334781 - DNA, 15 bp, Homo sapiens
attatcctaaatatt

SEQ ID NO: 1334782 - DNA, 15 bp, Homo sapiens
cattatcctaaatat

SEQ ID NO: 1334783 - DNA, 15 bp, Homo sapiens
tcattatcctaaata

SEQ ID NO: 1334784 - DNA, 15 bp, Homo sapiens
ttcattatcctaaat

SEQ ID NO: 1334785 - DNA, 15 bp, Homo sapiens
attcattatcctaaa

SEQ ID NO: 1334786 - DNA, 15 bp, Homo sapiens
aattcattatcctaa

SEQ ID NO: 1334787 - DNA, 15 bp, Homo sapiens
aaattcattatccta

SEQ ID NO: 1334788 - DNA, 15 bp, Homo sapiens
taaattcattatcct

SEQ ID NO: 1334789 - DNA, 15 bp, Homo sapiens
ttaaattcattatcc

SEQ ID NO: 1334790 - DNA, 15 bp, Homo sapiens
attaaattcattatc

SEQ ID NO: 1334791 - DNA, 15 bp, Homo sapiens
aattaaattcattat

SEQ ID NO: 1334792 - DNA, 15 bp, Homo sapiens
caattaaattcatta

SEQ ID NO: 1334793 - DNA, 15 bp, Homo sapiens
gcaattaaattcatt

SEQ ID NO: 1334794 - DNA, 15 bp, Homo sapiens
ggcaattaaattcat

SEQ ID NO: 1334795 - DNA, 15 bp, Homo sapiens
aggcaattaaattca

SEQ ID NO: 1334796 - DNA, 15 bp, Homo sapiens
aaggcaattaaattc

SEQ ID NO: 1334797 - DNA, 15 bp, Homo sapiens
gaaggcaattaaatt

SEQ ID NO: 1334798 - DNA, 15 bp, Homo sapiens
tgaaggcaattaaat

SEQ ID NO: 1334799 - DNA, 15 bp, Homo sapiens
ttgaaggcaattaaa

SEQ ID NO: 1334800 - DNA, 15 bp, Homo sapiens
gttgaaggcaattaa

SEQ ID NO: 1334801 - DNA, 15 bp, Homo sapiens
ggttgaaggcaatta

SEQ ID NO: 1334802 - DNA, 15 bp, Homo sapiens
aggttgaaggcaatt

SEQ ID NO: 1334803 - DNA, 15 bp, Homo sapiens
aaggttgaaggcaat

SEQ ID NO: 1334804 - DNA, 15 bp, Homo sapiens
gaaggttgaaggcaa

SEQ ID NO: 1334805 - DNA, 15 bp, Homo sapiens
agaaggttgaaggca

SEQ ID NO: 1334806 - DNA, 15 bp, Homo sapiens
cagaaggttgaaggc

SEQ ID NO: 1334807 - DNA, 15 bp, Homo sapiens
tcagaaggttgaagg

SEQ ID NO: 1334808 - DNA, 15 bp, Homo sapiens
ttcagaaggttgaag

SEQ ID NO: 1334809 - DNA, 15 bp, Homo sapiens
tttcagaaggttgaa

SEQ ID NO: 1334810 - DNA, 15 bp, Homo sapiens
ctttcagaaggttga

SEQ ID NO: 1334811 - DNA, 15 bp, Homo sapiens
tctttcagaaggttg

SEQ ID NO: 1334812 - DNA, 15 bp, Homo sapiens
ctctttcagaaggtt

SEQ ID NO: 1334813 - DNA, 15 bp, Homo sapiens
actctttcagaaggt

SEQ ID NO: 1334814 - DNA, 15 bp, Homo sapiens
aactctttcagaagg

SEQ ID NO: 1334815 - DNA, 15 bp, Homo sapiens
taactctttcagaag

SEQ ID NO: 1334816 - DNA, 15 bp, Homo sapiens
ttaactctttcagaa

SEQ ID NO: 1334817 - DNA, 15 bp, Homo sapiens
tttaactctttcaga

SEQ ID NO: 1334818 - DNA, 15 bp, Homo sapiens
ttttaactctttcag

SEQ ID NO: 1334819 - DNA, 15 bp, Homo sapiens
cttttaactctttca

SEQ ID NO: 1334820 - DNA, 15 bp, Homo sapiens
acttttaactctttc

SEQ ID NO: 1334821 - DNA, 15 bp, Homo sapiens
gacttttaactcttt

SEQ ID NO: 1334822 - DNA, 15 bp, Homo sapiens
tgacttttaactctt

SEQ ID NO: 1334823 - DNA, 15 bp, Homo sapiens
ctgacttttaactct

SEQ ID NO: 1334824 - DNA, 15 bp, Homo sapiens
gctgacttttaactc

SEQ ID NO: 1334825 - DNA, 15 bp, Homo sapiens
ggctgacttttaact

SEQ ID NO: 1334826 - DNA, 15 bp, Homo sapiens
gggctgacttttaac

SEQ ID NO: 1334827 - DNA, 15 bp, Homo sapiens
agggctgacttttaa

SEQ ID NO: 1334828 - DNA, 15 bp, Homo sapiens
aagggctgactttta

SEQ ID NO: 1334829 - DNA, 15 bp, Homo sapiens
gaagggctgactttt

SEQ ID NO: 1334830 - DNA, 15 bp, Homo sapiens
agaagggctgacttt

SEQ ID NO: 1334831 - DNA, 15 bp, Homo sapiens
cagaagggctgactt

SEQ ID NO: 1334832 - DNA, 15 bp, Homo sapiens
acagaagggctgact

SEQ ID NO: 1334833 - DNA, 15 bp, Homo sapiens
gacagaagggctgac

SEQ ID NO: 1334834 - DNA, 15 bp, Homo sapiens
agacagaagggctga

SEQ ID NO: 1334835 - DNA, 15 bp, Homo sapiens
gagacagaagggctg

SEQ ID NO: 1334836 - DNA, 15 bp, Homo sapiens
tgagacagaagggct

SEQ ID NO: 1334837 - DNA, 15 bp, Homo sapiens
ttgagacagaagggc

SEQ ID NO: 1334838 - DNA, 15 bp, Homo sapiens
tttgagacagaaggg

SEQ ID NO: 1334839 - DNA, 15 bp, Homo sapiens
ttttgagacagaagg

SEQ ID NO: 1334840 - DNA, 15 bp, Homo sapiens
attttgagacagaag

SEQ ID NO: 1334841 - DNA, 15 bp, Homo sapiens
aattttgagacagaa

SEQ ID NO: 1334842 - DNA, 15 bp, Homo sapiens
gaattttgagacaga

SEQ ID NO: 1334843 - DNA, 15 bp, Homo sapiens
tgaattttgagacag

SEQ ID NO: 1334844 - DNA, 15 bp, Homo sapiens
ctgaattttgagaca

SEQ ID NO: 1334845 - DNA, 15 bp, Homo sapiens
actgaattttgagac

SEQ ID NO: 1334846 - DNA, 15 bp, Homo sapiens
cactgaattttgaga

SEQ ID NO: 1334847 - DNA, 15 bp, Homo sapiens
tcactgaattttgag

SEQ ID NO: 1334848 - DNA, 15 bp, Homo sapiens
atcactgaattttga

SEQ ID NO: 1334849 - DNA, 15 bp, Homo sapiens
aatcactgaattttg

SEQ ID NO: 1334850 - DNA, 15 bp, Homo sapiens
aaatcactgaatttt

SEQ ID NO: 1334851 - DNA, 15 bp, Homo sapiens
aaaatcactgaattt

SEQ ID NO: 1334852 - DNA, 15 bp, Homo sapiens
gaaaatcactgaatt

SEQ ID NO: 1334853 - DNA, 15 bp, Homo sapiens
tgaaaatcactgaat

SEQ ID NO: 1334854 - DNA, 15 bp, Homo sapiens
ttgaaaatcactgaa

SEQ ID NO: 1334855 - DNA, 15 bp, Homo sapiens
cttgaaaatcactga

SEQ ID NO: 1334856 - DNA, 15 bp, Homo sapiens
ccttgaaaatcactg

SEQ ID NO: 1334857 - DNA, 15 bp, Homo sapiens
cccttgaaaatcact

SEQ ID NO: 1334858 - DNA, 15 bp, Homo sapiens
ccccttgaaaatcac

SEQ ID NO: 1334859 - DNA, 15 bp, Homo sapiens
accccttgaaaatca

SEQ ID NO: 1334860 - DNA, 15 bp, Homo sapiens
taccccttgaaaatc

SEQ ID NO: 1334861 - DNA, 15 bp, Homo sapiens
ttaccccttgaaaat

SEQ ID NO: 1334862 - DNA, 15 bp, Homo sapiens
attaccccttgaaaa

SEQ ID NO: 1334863 - DNA, 15 bp, Homo sapiens
cattaccccttgaaa

SEQ ID NO: 1334864 - DNA, 15 bp, Homo sapiens
acattaccccttgaa

SEQ ID NO: 1334865 - DNA, 15 bp, Homo sapiens
tacattaccccttga

SEQ ID NO: 1334866 - DNA, 15 bp, Homo sapiens
ctacattaccccttg

SEQ ID NO: 1334867 - DNA, 15 bp, Homo sapiens
tctacattacccctt

SEQ ID NO: 1334868 - DNA, 15 bp, Homo sapiens
ttctacattacccct

SEQ ID NO: 1334869 - DNA, 15 bp, Homo sapiens
gttctacattacccc

SEQ ID NO: 1334870 - DNA, 15 bp, Homo sapiens
agttctacattaccc

SEQ ID NO: 1334871 - DNA, 15 bp, Homo sapiens
cagttctacattacc

SEQ ID NO: 1334872 - DNA, 15 bp, Homo sapiens
gcagttctacattac

SEQ ID NO: 1334873 - DNA, 15 bp, Homo sapiens
agcagttctacatta

SEQ ID NO: 1334874 - DNA, 15 bp, Homo sapiens
aagcagttctacatt

SEQ ID NO: 1334875 - DNA, 15 bp, Homo sapiens
gaagcagttctacat

SEQ ID NO: 1334876 - DNA, 15 bp, Homo sapiens
ggaagcagttctaca

SEQ ID NO: 1334877 - DNA, 15 bp, Homo sapiens
tggaagcagttctac

SEQ ID NO: 1334878 - DNA, 15 bp, Homo sapiens
ctggaagcagttcta

SEQ ID NO: 1334879 - DNA, 15 bp, Homo sapiens
gctggaagcagttct

SEQ ID NO: 1334880 - DNA, 15 bp, Homo sapiens
tgctggaagcagttc

SEQ ID NO: 1334881 - DNA, 15 bp, Homo sapiens
ttgctggaagcagtt

SEQ ID NO: 1334882 - DNA, 15 bp, Homo sapiens
attgctggaagcagt

SEQ ID NO: 1334883 - DNA, 15 bp, Homo sapiens
tattgctggaagcag

SEQ ID NO: 1334884 - DNA, 15 bp, Homo sapiens
ctattgctggaagca

SEQ ID NO: 1334885 - DNA, 15 bp, Homo sapiens
gctattgctggaagc

SEQ ID NO: 1334886 - DNA, 15 bp, Homo sapiens
agctattgctggaag

SEQ ID NO: 1334887 - DNA, 15 bp, Homo sapiens
aagctattgctggaa

SEQ ID NO: 1334888 - DNA, 15 bp, Homo sapiens
gaagctattgctgga

SEQ ID NO: 1334889 - DNA, 15 bp, Homo sapiens
agaagctattgctgg

SEQ ID NO: 1334890 - DNA, 15 bp, Homo sapiens
cagaagctattgctg

SEQ ID NO: 1334891 - DNA, 15 bp, Homo sapiens
gcagaagctattgct

SEQ ID NO: 1334892 - DNA, 15 bp, Homo sapiens
tgcagaagctattgc

SEQ ID NO: 1334893 - DNA, 15 bp, Homo sapiens
atgcagaagctattg

SEQ ID NO: 1334894 - DNA, 15 bp, Homo sapiens
gatgcagaagctatt

SEQ ID NO: 1334895 - DNA, 15 bp, Homo sapiens
agatgcagaagctat

SEQ ID NO: 1334896 - DNA, 15 bp, Homo sapiens
tagatgcagaagcta

SEQ ID NO: 1334897 - DNA, 15 bp, Homo sapiens
atagatgcagaagct

SEQ ID NO: 1334898 - DNA, 15 bp, Homo sapiens
catagatgcagaagc

SEQ ID NO: 1334899 - DNA, 15 bp, Homo sapiens
gcatagatgcagaag

SEQ ID NO: 1334900 - DNA, 15 bp, Homo sapiens
ggcatagatgcagaa

SEQ ID NO: 1334901 - DNA, 15 bp, Homo sapiens
aggcatagatgcaga

SEQ ID NO: 1334902 - DNA, 15 bp, Homo sapiens
gaggcatagatgcag

SEQ ID NO: 1334903 - DNA, 15 bp, Homo sapiens
ggaggcatagatgca

SEQ ID NO: 1334904 - DNA, 15 bp, Homo sapiens
aggaggcatagatgc

SEQ ID NO: 1334905 - DNA, 15 bp, Homo sapiens
aaggaggcatagatg

SEQ ID NO: 1334906 - DNA, 15 bp, Homo sapiens
gaaggaggcatagat

SEQ ID NO: 1334907 - DNA, 15 bp, Homo sapiens
tgaaggaggcataga

SEQ ID NO: 1334908 - DNA, 15 bp, Homo sapiens
ttgaaggaggcatag

SEQ ID NO: 1334909 - DNA, 15 bp, Homo sapiens
gttgaaggaggcata

SEQ ID NO: 1334910 - DNA, 15 bp, Homo sapiens
agttgaaggaggcat

SEQ ID NO: 1334911 - DNA, 15 bp, Homo sapiens
aagttgaaggaggca

SEQ ID NO: 1334912 - DNA, 15 bp, Homo sapiens
taagttgaaggaggc

SEQ ID NO: 1334913 - DNA, 15 bp, Homo sapiens
ataagttgaaggagg

SEQ ID NO: 1334914 - DNA, 15 bp, Homo sapiens
tataagttgaaggag

SEQ ID NO: 1334915 - DNA, 15 bp, Homo sapiens
atataagttgaagga

SEQ ID NO: 1334916 - DNA, 15 bp, Homo sapiens
gatataagttgaagg

SEQ ID NO: 1334917 - DNA, 15 bp, Homo sapiens
agatataagttgaag

SEQ ID NO: 1334918 - DNA, 15 bp, Homo sapiens
cagatataagttgaa

SEQ ID NO: 1334919 - DNA, 15 bp, Homo sapiens
acagatataagttga

SEQ ID NO: 1334920 - DNA, 15 bp, Homo sapiens
aacagatataagttg

SEQ ID NO: 1334921 - DNA, 15 bp, Homo sapiens
aaacagatataagtt

SEQ ID NO: 1334922 - DNA, 15 bp, Homo sapiens
taaacagatataagt

SEQ ID NO: 1334923 - DNA, 15 bp, Homo sapiens
ataaacagatataag

SEQ ID NO: 1334924 - DNA, 15 bp, Homo sapiens
aataaacagatataa

SEQ ID NO: 1334925 - DNA, 15 bp, Homo sapiens
caataaacagatata

SEQ ID NO: 1334926 - DNA, 15 bp, Homo sapiens
gcaataaacagatat

SEQ ID NO: 1334927 - DNA, 15 bp, Homo sapiens
tgcaataaacagata

SEQ ID NO: 1334928 - DNA, 15 bp, Homo sapiens
atgcaataaacagat

SEQ ID NO: 1334929 - DNA, 15 bp, Homo sapiens
catgcaataaacaga

SEQ ID NO: 1334930 - DNA, 15 bp, Homo sapiens
gcatgcaataaacag

SEQ ID NO: 1334931 - DNA, 15 bp, Homo sapiens
ggcatgcaataaaca

SEQ ID NO: 1334932 - DNA, 15 bp, Homo sapiens
aggcatgcaataaac

SEQ ID NO: 1334933 - DNA, 15 bp, Homo sapiens
aaggcatgcaataaa

SEQ ID NO: 1334934 - DNA, 15 bp, Homo sapiens
aaaggcatgcaataa

SEQ ID NO: 1334935 - DNA, 15 bp, Homo sapiens
aaaaggcatgcaata

SEQ ID NO: 1334936 - DNA, 15 bp, Homo sapiens
aaaaaggcatgcaat

SEQ ID NO: 1334937 - DNA, 15 bp, Homo sapiens
aaaaaaggcatgcaa

SEQ ID NO: 1334938 - DNA, 15 bp, Homo sapiens
aaaaaaaggcatgca

SEQ ID NO: 1334939 - DNA, 15 bp, Homo sapiens
gaaaaaaaggcatgc

SEQ ID NO: 1334940 - DNA, 15 bp, Homo sapiens
ggaaaaaaaggcatg

SEQ ID NO: 1334941 - DNA, 15 bp, Homo sapiens
gggaaaaaaaggcat

SEQ ID NO: 1334942 - DNA, 15 bp, Homo sapiens
agggaaaaaaaggca

SEQ ID NO: 1334943 - DNA, 15 bp, Homo sapiens
cagggaaaaaaaggc

SEQ ID NO: 1334944 - DNA, 15 bp, Homo sapiens
tcagggaaaaaaagg

SEQ ID NO: 1334945 - DNA, 15 bp, Homo sapiens
atcagggaaaaaaag

SEQ ID NO: 1334946 - DNA, 15 bp, Homo sapiens
aatcagggaaaaaaa

SEQ ID NO: 1334947 - DNA, 15 bp, Homo sapiens
aaatcagggaaaaaa

SEQ ID NO: 1334948 - DNA, 15 bp, Homo sapiens
taaatcagggaaaaa

SEQ ID NO: 1334949 - DNA, 15 bp, Homo sapiens
ataaatcagggaaaa

SEQ ID NO: 1334950 - DNA, 15 bp, Homo sapiens
tataaatcagggaaa

SEQ ID NO: 1334951 - DNA, 15 bp, Homo sapiens
ttataaatcagggaa

SEQ ID NO: 1334952 - DNA, 15 bp, Homo sapiens
tttataaatcaggga

SEQ ID NO: 1334953 - DNA, 15 bp, Homo sapiens
ctttataaatcaggg

SEQ ID NO: 1334954 - DNA, 15 bp, Homo sapiens
cctttataaatcagg

SEQ ID NO: 1334955 - DNA, 15 bp, Homo sapiens
tcctttataaatcag

SEQ ID NO: 1334956 - DNA, 15 bp, Homo sapiens
ttcctttataaatca

SEQ ID NO: 1334957 - DNA, 15 bp, Homo sapiens
tttcctttataaatc

SEQ ID NO: 1334958 - DNA, 15 bp, Homo sapiens
cctttcctttataaa

SEQ ID NO: 1334959 - DNA, 15 bp, Homo sapiens
ccctttcctttataa

SEQ ID NO: 1334960 - DNA, 15 bp, Homo sapiens
cccctttcctttata

SEQ ID NO: 1334961 - DNA, 15 bp, Homo sapiens
gcccctttcctttat

SEQ ID NO: 1334962 - DNA, 15 bp, Homo sapiens
agcccctttccttta

SEQ ID NO: 1334963 - DNA, 15 bp, Homo sapiens
cagcccctttccttt

SEQ ID NO: 1334964 - DNA, 15 bp, Homo sapiens
tcagcccctttcctt

SEQ ID NO: 1334965 - DNA, 15 bp, Homo sapiens
ttcagcccctttcct

SEQ ID NO: 1334966 - DNA, 15 bp, Homo sapiens
cttcagcccctttcc

SEQ ID NO: 1334967 - DNA, 15 bp, Homo sapiens
tcttcagcccctttc

SEQ ID NO: 1334968 - DNA, 15 bp, Homo sapiens
atcttcagccccttt

SEQ ID NO: 1334969 - DNA, 15 bp, Homo sapiens
catcttcagcccctt

SEQ ID NO: 1334970 - DNA, 15 bp, Homo sapiens
tcatcttcagcccct

SEQ ID NO: 1334971 - DNA, 15 bp, Homo sapiens
ttcatcttcagcccc

SEQ ID NO: 1334972 - DNA, 15 bp, Homo sapiens
tttcatcttcagccc

SEQ ID NO: 1334973 - DNA, 15 bp, Homo sapiens
atttcatcttcagcc

SEQ ID NO: 1334974 - DNA, 15 bp, Homo sapiens
aatttcatcttcagc

SEQ ID NO: 1334975 - DNA, 15 bp, Homo sapiens
aaatttcatcttcag

SEQ ID NO: 1334976 - DNA, 15 bp, Homo sapiens
aaaatttcatcttca

SEQ ID NO: 1334977 - DNA, 15 bp, Homo sapiens
taaaatttcatcttc

SEQ ID NO: 1334978 - DNA, 15 bp, Homo sapiens
ttaaaatttcatctt

SEQ ID NO: 1334979 - DNA, 15 bp, Homo sapiens
tttaaaatttcatct

SEQ ID NO: 1334980 - DNA, 15 bp, Homo sapiens
ttttaaaatttcatc

SEQ ID NO: 1334981 - DNA, 15 bp, Homo sapiens
gttttaaaatttcat

SEQ ID NO: 1334982 - DNA, 15 bp, Homo sapiens
agttttaaaatttca

SEQ ID NO: 1334983 - DNA, 15 bp, Homo sapiens
cagttttaaaatttc

SEQ ID NO: 1334984 - DNA, 15 bp, Homo sapiens
acagttttaaaattt

SEQ ID NO: 1334985 - DNA, 15 bp, Homo sapiens
cacagttttaaaatt

SEQ ID NO: 1334986 - DNA, 15 bp, Homo sapiens
acacagttttaaaat

SEQ ID NO: 1334987 - DNA, 15 bp, Homo sapiens
aacacagttttaaaa

SEQ ID NO: 1334988 - DNA, 15 bp, Homo sapiens
taacacagttttaaa

SEQ ID NO: 1334989 - DNA, 15 bp, Homo sapiens
ataacacagttttaa

SEQ ID NO: 1334990 - DNA, 15 bp, Homo sapiens
aataacacagtttta

SEQ ID NO: 1334991 - DNA, 15 bp, Homo sapiens
taataacacagtttt

SEQ ID NO: 1334992 - DNA, 15 bp, Homo sapiens
ataataacacagttt

SEQ ID NO: 1334993 - DNA, 15 bp, Homo sapiens
gataataacacagtt

SEQ ID NO: 1334994 - DNA, 15 bp, Homo sapiens
agataataacacagt

SEQ ID NO: 1334995 - DNA, 15 bp, Homo sapiens
aagataataacacag

SEQ ID NO: 1334996 - DNA, 15 bp, Homo sapiens
caagataataacaca

SEQ ID NO: 1334997 - DNA, 15 bp, Homo sapiens
tcaagataataacac

SEQ ID NO: 1334998 - DNA, 15 bp, Homo sapiens
ttcaagataataaca

SEQ ID NO: 1334999 - DNA, 15 bp, Homo sapiens
tttcaagataataac

SEQ ID NO: 1335000 - DNA, 15 bp, Homo sapiens
gtttcaagataataa

SEQ ID NO: 1335001 - DNA, 15 bp, Homo sapiens
cgtttcaagataata

SEQ ID NO: 1335002 - DNA, 15 bp, Homo sapiens
gcgtttcaagataat

SEQ ID NO: 1335003 - DNA, 15 bp, Homo sapiens
tgcgtttcaagataa

SEQ ID NO: 1335004 - DNA, 15 bp, Homo sapiens
ttgcgtttcaagata

SEQ ID NO: 1335005 - DNA, 15 bp, Homo sapiens
gttgcgtttcaagat

SEQ ID NO: 1335006 - DNA, 15 bp, Homo sapiens
agttgcgtttcaaga

SEQ ID NO: 1335007 - DNA, 15 bp, Homo sapiens
gagttgcgtttcaag

SEQ ID NO: 1335008 - DNA, 15 bp, Homo sapiens
ggagttgcgtttcaa

SEQ ID NO: 1335009 - DNA, 15 bp, Homo sapiens
aggagttgcgtttca

SEQ ID NO: 1335010 - DNA, 15 bp, Homo sapiens
taggagttgcgtttc

SEQ ID NO: 1335011 - DNA, 15 bp, Homo sapiens
ataggagttgcgttt

SEQ ID NO: 1335012 - DNA, 15 bp, Homo sapiens
tataggagttgcgtt

SEQ ID NO: 1335013 - DNA, 15 bp, Homo sapiens
ctataggagttgcgt

SEQ ID NO: 1335014 - DNA, 15 bp, Homo sapiens
actataggagttgcg

SEQ ID NO: 1335015 - DNA, 15 bp, Homo sapiens
tactataggagttgc

SEQ ID NO: 1335016 - DNA, 15 bp, Homo sapiens
atactataggagttg

SEQ ID NO: 1335017 - DNA, 15 bp, Homo sapiens
aatactataggagtt

SEQ ID NO: 1335018 - DNA, 15 bp, Homo sapiens
gaatactataggagt

SEQ ID NO: 1335019 - DNA, 15 bp, Homo sapiens
tgaatactataggag

SEQ ID NO: 1335020 - DNA, 15 bp, Homo sapiens
atgaatactatagga

SEQ ID NO: 1335021 - DNA, 15 bp, Homo sapiens
aatgaatactatagg

SEQ ID NO: 1335022 - DNA, 15 bp, Homo sapiens
caatgaatactatag

SEQ ID NO: 1335023 - DNA, 15 bp, Homo sapiens
gcaatgaatactata

SEQ ID NO: 1335024 - DNA, 15 bp, Homo sapiens
tgcaatgaatactat

SEQ ID NO: 1335025 - DNA, 15 bp, Homo sapiens
ttgcaatgaatacta

SEQ ID NO: 1335026 - DNA, 15 bp, Homo sapiens
attgcaatgaatact

SEQ ID NO: 1335027 - DNA, 15 bp, Homo sapiens
tattgcaatgaatac

SEQ ID NO: 1335028 - DNA, 15 bp, Homo sapiens
atattgcaatgaata

SEQ ID NO: 1335029 - DNA, 15 bp, Homo sapiens
aatattgcaatgaat

SEQ ID NO: 1335030 - DNA, 15 bp, Homo sapiens
taatattgcaatgaa

SEQ ID NO: 1335031 - DNA, 15 bp, Homo sapiens
ataatattgcaatga

SEQ ID NO: 1335032 - DNA, 15 bp, Homo sapiens
aataatattgcaatg

SEQ ID NO: 1335033 - DNA, 15 bp, Homo sapiens
aaataatattgcaat

SEQ ID NO: 1335034 - DNA, 15 bp, Homo sapiens
gaaataatattgcaa

SEQ ID NO: 1335035 - DNA, 15 bp, Homo sapiens
agaaataatattgca

SEQ ID NO: 1335036 - DNA, 15 bp, Homo sapiens
gagaaataatattgc

SEQ ID NO: 1335037 - DNA, 15 bp, Homo sapiens
agagaaataatattg

SEQ ID NO: 1335038 - DNA, 15 bp, Homo sapiens
tagagaaataatatt

SEQ ID NO: 1335039 - DNA, 15 bp, Homo sapiens
gtagagaaataatat

SEQ ID NO: 1335040 - DNA, 15 bp, Homo sapiens
agtagagaaataata

SEQ ID NO: 1335041 - DNA, 15 bp, Homo sapiens
gagtagagaaataat

SEQ ID NO: 1335042 - DNA, 15 bp, Homo sapiens
ggagtagagaaataa

SEQ ID NO: 1335043 - DNA, 15 bp, Homo sapiens
aggagtagagaaata

SEQ ID NO: 1335044 - DNA, 15 bp, Homo sapiens
caggagtagagaaat

SEQ ID NO: 1335045 - DNA, 15 bp, Homo sapiens
ccaggagtagagaaa

SEQ ID NO: 1335046 - DNA, 15 bp, Homo sapiens
gccaggagtagagaa

SEQ ID NO: 1335047 - DNA, 15 bp, Homo sapiens
tgccaggagtagaga

SEQ ID NO: 1335048 - DNA, 15 bp, Homo sapiens
gtgccaggagtagag

SEQ ID NO: 1335049 - DNA, 15 bp, Homo sapiens
cgtgccaggagtaga

SEQ ID NO: 1335050 - DNA, 15 bp, Homo sapiens
ccgtgccaggagtag

SEQ ID NO: 1335051 - DNA, 15 bp, Homo sapiens
tccgtgccaggagta

SEQ ID NO: 1335052 - DNA, 15 bp, Homo sapiens
ctccgtgccaggagt

SEQ ID NO: 1335053 - DNA, 15 bp, Homo sapiens
gctccgtgccaggag

SEQ ID NO: 1335054 - DNA, 15 bp, Homo sapiens
tgctccgtgccagga

SEQ ID NO: 1335055 - DNA, 15 bp, Homo sapiens
ttgctccgtgccagg

SEQ ID NO: 1335056 - DNA, 15 bp, Homo sapiens
cttgctccgtgccag

SEQ ID NO: 1335057 - DNA, 15 bp, Homo sapiens
tcttgctccgtgcca

SEQ ID NO: 1335058 - DNA, 15 bp, Homo sapiens
atcttgctccgtgcc

SEQ ID NO: 1335059 - DNA, 15 bp, Homo sapiens
aatcttgctccgtgc

SEQ ID NO: 1335060 - DNA, 15 bp, Homo sapiens
taatcttgctccgtg

SEQ ID NO: 1335061 - DNA, 15 bp, Homo sapiens
ataatcttgctccgt

SEQ ID NO: 1335062 - DNA, 15 bp, Homo sapiens
aataatcttgctccg

SEQ ID NO: 1335063 - DNA, 15 bp, Homo sapiens
aaataatcttgctcc

SEQ ID NO: 1335064 - DNA, 15 bp, Homo sapiens
caaataatcttgctc

SEQ ID NO: 1335065 - DNA, 15 bp, Homo sapiens
ccaaataatcttgct

SEQ ID NO: 1335066 - DNA, 15 bp, Homo sapiens
tccaaataatcttgc

SEQ ID NO: 1335067 - DNA, 15 bp, Homo sapiens
ttccaaataatcttg

SEQ ID NO: 1335068 - DNA, 15 bp, Homo sapiens
attccaaataatctt

SEQ ID NO: 1335069 - DNA, 15 bp, Homo sapiens
cattccaaataatct

SEQ ID NO: 1335070 - DNA, 15 bp, Homo sapiens
acattccaaataatc

SEQ ID NO: 1335071 - DNA, 15 bp, Homo sapiens
tacattccaaataat

SEQ ID NO: 1335072 - DNA, 15 bp, Homo sapiens
ctacattccaaataa

SEQ ID NO: 1335073 - DNA, 15 bp, Homo sapiens
gctacattccaaata

SEQ ID NO: 1335074 - DNA, 15 bp, Homo sapiens
ggctacattccaaat

SEQ ID NO: 1335075 - DNA, 15 bp, Homo sapiens
tggctacattccaaa

SEQ ID NO: 1335076 - DNA, 15 bp, Homo sapiens
atggctacattccaa

SEQ ID NO: 1335077 - DNA, 15 bp, Homo sapiens
catggctacattcca

SEQ ID NO: 1335078 - DNA, 15 bp, Homo sapiens
acatggctacattcc

SEQ ID NO: 1335079 - DNA, 15 bp, Homo sapiens
gacatggctacattc

SEQ ID NO: 1335080 - DNA, 15 bp, Homo sapiens
agacatggctacatt

SEQ ID NO: 1335081 - DNA, 15 bp, Homo sapiens
cagacatggctacat

SEQ ID NO: 1335082 - DNA, 15 bp, Homo sapiens
acagacatggctaca

SEQ ID NO: 1335083 - DNA, 15 bp, Homo sapiens
aacagacatggctac

SEQ ID NO: 1335084 - DNA, 15 bp, Homo sapiens
aaacagacatggcta

SEQ ID NO: 1335085 - DNA, 15 bp, Homo sapiens
aaaacagacatggct

SEQ ID NO: 1335086 - DNA, 15 bp, Homo sapiens
aaaaacagacatggc

SEQ ID NO: 1335087 - DNA, 15 bp, Homo sapiens
gaaaaacagacatgg

SEQ ID NO: 1335088 - DNA, 15 bp, Homo sapiens
agaaaaacagacatg

SEQ ID NO: 1335089 - DNA, 15 bp, Homo sapiens
aagaaaaacagacat

SEQ ID NO: 1335090 - DNA, 15 bp, Homo sapiens
aaagaaaaacagaca

SEQ ID NO: 1335091 - DNA, 15 bp, Homo sapiens
aaaagaaaaacagac

SEQ ID NO: 1335092 - DNA, 15 bp, Homo sapiens
gaaaagaaaaacaga

SEQ ID NO: 1335093 - DNA, 15 bp, Homo sapiens
agaaaagaaaaacag

SEQ ID NO: 1335094 - DNA, 15 bp, Homo sapiens
aagaaaagaaaaaca

SEQ ID NO: 1335095 - DNA, 15 bp, Homo sapiens
aaagaaaagaaaaac

SEQ ID NO: 1335096 - DNA, 15 bp, Homo sapiens
taacaaaagaaaaga

SEQ ID NO: 1335097 - DNA, 15 bp, Homo sapiens
ctaacaaaagaaaag

SEQ ID NO: 1335098 - DNA, 15 bp, Homo sapiens
actaacaaaagaaaa

SEQ ID NO: 1335099 - DNA, 15 bp, Homo sapiens
tactaacaaaagaaa

SEQ ID NO: 1335100 - DNA, 15 bp, Homo sapiens
ttactaacaaaagaa

SEQ ID NO: 1335101 - DNA, 15 bp, Homo sapiens
attactaacaaaaga

SEQ ID NO: 1335102 - DNA, 15 bp, Homo sapiens
cattactaacaaaag

SEQ ID NO: 1335103 - DNA, 15 bp, Homo sapiens
tcattactaacaaaa

SEQ ID NO: 1335104 - DNA, 15 bp, Homo sapiens
gtcattactaacaaa

SEQ ID NO: 1335105 - DNA, 15 bp, Homo sapiens
tgtcattactaacaa

SEQ ID NO: 1335106 - DNA, 15 bp, Homo sapiens
atgtcattactaaca

SEQ ID NO: 1335107 - DNA, 15 bp, Homo sapiens
gatgtcattactaac

SEQ ID NO: 1335108 - DNA, 15 bp, Homo sapiens
agatgtcattactaa

SEQ ID NO: 1335109 - DNA, 15 bp, Homo sapiens
tagatgtcattacta

SEQ ID NO: 1335110 - DNA, 15 bp, Homo sapiens
ttagatgtcattact

SEQ ID NO: 1335111 - DNA, 15 bp, Homo sapiens
attagatgtcattac

SEQ ID NO: 1335112 - DNA, 15 bp, Homo sapiens
gattagatgtcatta

SEQ ID NO: 1335113 - DNA, 15 bp, Homo sapiens
agattagatgtcatt

SEQ ID NO: 1335114 - DNA, 15 bp, Homo sapiens
cagattagatgtcat

SEQ ID NO: 1335115 - DNA, 15 bp, Homo sapiens
ccagattagatgtca

SEQ ID NO: 1335116 - DNA, 15 bp, Homo sapiens
accagattagatgtc

SEQ ID NO: 1335117 - DNA, 15 bp, Homo sapiens
taccagattagatgt

SEQ ID NO: 1335118 - DNA, 15 bp, Homo sapiens
ctaccagattagatg

SEQ ID NO: 1335119 - DNA, 15 bp, Homo sapiens
gctaccagattagat

SEQ ID NO: 1335120 - DNA, 15 bp, Homo sapiens
tgctaccagattaga

SEQ ID NO: 1335121 - DNA, 15 bp, Homo sapiens
atgctaccagattag

SEQ ID NO: 1335122 - DNA, 15 bp, Homo sapiens
aatgctaccagatta

SEQ ID NO: 1335123 - DNA, 15 bp, Homo sapiens
caatgctaccagatt

SEQ ID NO: 1335124 - DNA, 15 bp, Homo sapiens
ccaatgctaccagat

SEQ ID NO: 1335125 - DNA, 15 bp, Homo sapiens
gccaatgctaccaga

SEQ ID NO: 1335126 - DNA, 15 bp, Homo sapiens
agccaatgctaccag

SEQ ID NO: 1335127 - DNA, 15 bp, Homo sapiens
gagccaatgctacca

SEQ ID NO: 1335128 - DNA, 15 bp, Homo sapiens
agagccaatgctacc

SEQ ID NO: 1335129 - DNA, 15 bp, Homo sapiens
aagagccaatgctac

SEQ ID NO: 1335130 - DNA, 15 bp, Homo sapiens
aaagagccaatgcta

SEQ ID NO: 1335131 - DNA, 15 bp, Homo sapiens
gaaagagccaatgct

SEQ ID NO: 1335132 - DNA, 15 bp, Homo sapiens
agaaagagccaatgc

SEQ ID NO: 1335133 - DNA, 15 bp, Homo sapiens
gagaaagagccaatg

SEQ ID NO: 1335134 - DNA, 15 bp, Homo sapiens
ggagaaagagccaat

SEQ ID NO: 1335135 - DNA, 15 bp, Homo sapiens
aggagaaagagccaa

SEQ ID NO: 1335136 - DNA, 15 bp, Homo sapiens
taggagaaagagcca

SEQ ID NO: 1335137 - DNA, 15 bp, Homo sapiens
ataggagaaagagcc

SEQ ID NO: 1335138 - DNA, 15 bp, Homo sapiens
cataggagaaagagc

SEQ ID NO: 1335139 - DNA, 15 bp, Homo sapiens
gcataggagaaagag

SEQ ID NO: 1335140 - DNA, 15 bp, Homo sapiens
tgcataggagaaaga

SEQ ID NO: 1335141 - DNA, 15 bp, Homo sapiens
atgcataggagaaag

SEQ ID NO: 1335142 - DNA, 15 bp, Homo sapiens
catgcataggagaaa

SEQ ID NO: 1335143 - DNA, 15 bp, Homo sapiens
acatgcataggagaa

SEQ ID NO: 1335144 - DNA, 15 bp, Homo sapiens
aacatgcataggaga

SEQ ID NO: 1335145 - DNA, 15 bp, Homo sapiens
taacatgcataggag

SEQ ID NO: 1335146 - DNA, 15 bp, Homo sapiens
ataacatgcatagga

SEQ ID NO: 1335147 - DNA, 15 bp, Homo sapiens
aataacatgcatagg

SEQ ID NO: 1335148 - DNA, 15 bp, Homo sapiens
aaataacatgcatag

SEQ ID NO: 1335149 - DNA, 15 bp, Homo sapiens
gaaataacatgcata

SEQ ID NO: 1335150 - DNA, 15 bp, Homo sapiens
agaaataacatgcat

SEQ ID NO: 1335151 - DNA, 15 bp, Homo sapiens
aagaaataacatgca

SEQ ID NO: 1335152 - DNA, 15 bp, Homo sapiens
aaagaaataacatgc

SEQ ID NO: 1335153 - DNA, 15 bp, Homo sapiens
aaaagaaataacatg

SEQ ID NO: 1335154 - DNA, 15 bp, Homo sapiens
taaaagaaataacat

SEQ ID NO: 1335155 - DNA, 15 bp, Homo sapiens
ttaaaagaaataaca

SEQ ID NO: 1335156 - DNA, 15 bp, Homo sapiens
attaaaagaaataac

SEQ ID NO: 1335157 - DNA, 15 bp, Homo sapiens
gattaaaagaaataa

SEQ ID NO: 1335158 - DNA, 15 bp, Homo sapiens
agattaaaagaaata

SEQ ID NO: 1335159 - DNA, 15 bp, Homo sapiens
aagattaaaagaaat

SEQ ID NO: 1335160 - DNA, 15 bp, Homo sapiens
gaagattaaaagaaa

SEQ ID NO: 1335161 - DNA, 15 bp, Homo sapiens
tgaagattaaaagaa

SEQ ID NO: 1335162 - DNA, 15 bp, Homo sapiens
ctgaagattaaaaga

SEQ ID NO: 1335163 - DNA, 15 bp, Homo sapiens
tctgaagattaaaag

SEQ ID NO: 1335164 - DNA, 15 bp, Homo sapiens
ttctgaagattaaaa

SEQ ID NO: 1335165 - DNA, 15 bp, Homo sapiens
attctgaagattaaa

SEQ ID NO: 1335166 - DNA, 15 bp, Homo sapiens
cattctgaagattaa

SEQ ID NO: 1335167 - DNA, 15 bp, Homo sapiens
tcattctgaagatta

SEQ ID NO: 1335168 - DNA, 15 bp, Homo sapiens
ttcattctgaagatt

SEQ ID NO: 1335169 - DNA, 15 bp, Homo sapiens
cttcattctgaagat

SEQ ID NO: 1335170 - DNA, 15 bp, Homo sapiens
acttcattctgaaga

SEQ ID NO: 1335171 - DNA, 15 bp, Homo sapiens
tacttcattctgaag

SEQ ID NO: 1335172 - DNA, 15 bp, Homo sapiens
ctacttcattctgaa

SEQ ID NO: 1335173 - DNA, 15 bp, Homo sapiens
actacttcattctga

SEQ ID NO: 1335174 - DNA, 15 bp, Homo sapiens
aactacttcattctg

SEQ ID NO: 1335175 - DNA, 15 bp, Homo sapiens
aaactacttcattct

SEQ ID NO: 1335176 - DNA, 15 bp, Homo sapiens
caaactacttcattc

SEQ ID NO: 1335177 - DNA, 15 bp, Homo sapiens
acaaactacttcatt

SEQ ID NO: 1335178 - DNA, 15 bp, Homo sapiens
aacaaactacttcat

SEQ ID NO: 1335179 - DNA, 15 bp, Homo sapiens
aaacaaactacttca

SEQ ID NO: 1335180 - DNA, 15 bp, Homo sapiens
aaaacaaactacttc

SEQ ID NO: 1335181 - DNA, 15 bp, Homo sapiens
gaaaacaaactactt

SEQ ID NO: 1335182 - DNA, 15 bp, Homo sapiens
tgaaaacaaactact

SEQ ID NO: 1335183 - DNA, 15 bp, Homo sapiens
ttgaaaacaaactac

SEQ ID NO: 1335184 - DNA, 15 bp, Homo sapiens
attgaaaacaaacta

SEQ ID NO: 1335185 - DNA, 15 bp, Homo sapiens
tattgaaaacaaact

SEQ ID NO: 1335186 - DNA, 15 bp, Homo sapiens
atattgaaaacaaac

SEQ ID NO: 1335187 - DNA, 15 bp, Homo sapiens
aatattgaaaacaaa

SEQ ID NO: 1335188 - DNA, 15 bp, Homo sapiens
gaatattgaaaacaa

SEQ ID NO: 1335189 - DNA, 15 bp, Homo sapiens
ggaatattgaaaaca

SEQ ID NO: 1335190 - DNA, 15 bp, Homo sapiens
gggaatattgaaaac

SEQ ID NO: 1335191 - DNA, 15 bp, Homo sapiens
ggggaatattgaaaa

SEQ ID NO: 1335192 - DNA, 15 bp, Homo sapiens
tggggaatattgaaa

SEQ ID NO: 1335193 - DNA, 15 bp, Homo sapiens
ttggggaatattgaa

SEQ ID NO: 1335194 - DNA, 15 bp, Homo sapiens
attggggaatattga

SEQ ID NO: 1335195 - DNA, 15 bp, Homo sapiens
tattggggaatattg

SEQ ID NO: 1335196 - DNA, 15 bp, Homo sapiens
atattggggaatatt

SEQ ID NO: 1335197 - DNA, 15 bp, Homo sapiens
gatattggggaatat

SEQ ID NO: 1335198 - DNA, 15 bp, Homo sapiens
agatattggggaata

SEQ ID NO: 1335199 - DNA, 15 bp, Homo sapiens
aagatattggggaat

SEQ ID NO: 1335200 - DNA, 15 bp, Homo sapiens
aaagatattggggaa

SEQ ID NO: 1335201 - DNA, 15 bp, Homo sapiens
caaagatattgggga

SEQ ID NO: 1335202 - DNA, 15 bp, Homo sapiens
acaaagatattgggg

SEQ ID NO: 1335203 - DNA, 15 bp, Homo sapiens
tacaaagatattggg

SEQ ID NO: 1335204 - DNA, 15 bp, Homo sapiens
ctacaaagatattgg

SEQ ID NO: 1335205 - DNA, 15 bp, Homo sapiens
actacaaagatattg

SEQ ID NO: 1335206 - DNA, 15 bp, Homo sapiens
cactacaaagatatt

SEQ ID NO: 1335207 - DNA, 15 bp, Homo sapiens
gcactacaaagatat

SEQ ID NO: 1335208 - DNA, 15 bp, Homo sapiens
ggcactacaaagata

SEQ ID NO: 1335209 - DNA, 15 bp, Homo sapiens
aggcactacaaagat

SEQ ID NO: 1335210 - DNA, 15 bp, Homo sapiens
aaggcactacaaaga

SEQ ID NO: 1335211 - DNA, 15 bp, Homo sapiens
taaggcactacaaag

SEQ ID NO: 1335212 - DNA, 15 bp, Homo sapiens
gtaaggcactacaaa

SEQ ID NO: 1335213 - DNA, 15 bp, Homo sapiens
tgtaaggcactacaa

SEQ ID NO: 1335214 - DNA, 15 bp, Homo sapiens
ttgtaaggcactaca

SEQ ID NO: 1335215 - DNA, 15 bp, Homo sapiens
cttgtaaggcactac

SEQ ID NO: 1335216 - DNA, 15 bp, Homo sapiens
acttgtaaggcacta

SEQ ID NO: 1335217 - DNA, 15 bp, Homo sapiens
gacttgtaaggcact

SEQ ID NO: 1335218 - DNA, 15 bp, Homo sapiens
tgacttgtaaggcac

SEQ ID NO: 1335219 - DNA, 15 bp, Homo sapiens
atgacttgtaaggca

SEQ ID NO: 1335220 - DNA, 15 bp, Homo sapiens
gatgacttgtaaggc

SEQ ID NO: 1335221 - DNA, 15 bp, Homo sapiens
tgatgacttgtaagg

SEQ ID NO: 1335222 - DNA, 15 bp, Homo sapiens
gtgatgacttgtaag

SEQ ID NO: 1335223 - DNA, 15 bp, Homo sapiens
agtgatgacttgtaa

SEQ ID NO: 1335224 - DNA, 15 bp, Homo sapiens
tagtgatgacttgta

SEQ ID NO: 1335225 - DNA, 15 bp, Homo sapiens
atagtgatgacttgt

SEQ ID NO: 1335226 - DNA, 15 bp, Homo sapiens
gatagtgatgacttg

SEQ ID NO: 1335227 - DNA, 15 bp, Homo sapiens
agatagtgatgactt

SEQ ID NO: 1335228 - DNA, 15 bp, Homo sapiens
aagatagtgatgact

SEQ ID NO: 1335229 - DNA, 15 bp, Homo sapiens
caagatagtgatgac

SEQ ID NO: 1335230 - DNA, 15 bp, Homo sapiens
tcaagatagtgatga

SEQ ID NO: 1335231 - DNA, 15 bp, Homo sapiens
ttcaagatagtgatg

SEQ ID NO: 1335232 - DNA, 15 bp, Homo sapiens
tttcaagatagtgat

SEQ ID NO: 1335233 - DNA, 15 bp, Homo sapiens
gtttcaagatagtga

SEQ ID NO: 1335234 - DNA, 15 bp, Homo sapiens
ggtttcaagatagtg

SEQ ID NO: 1335235 - DNA, 15 bp, Homo sapiens
tggtttcaagatagt

SEQ ID NO: 1335236 - DNA, 15 bp, Homo sapiens
ctggtttcaagatag

SEQ ID NO: 1335237 - DNA, 15 bp, Homo sapiens
actggtttcaagata

SEQ ID NO: 1335238 - DNA, 15 bp, Homo sapiens
gactggtttcaagat

SEQ ID NO: 1335239 - DNA, 15 bp, Homo sapiens
agactggtttcaaga

SEQ ID NO: 1335240 - DNA, 15 bp, Homo sapiens
gagactggtttcaag

SEQ ID NO: 1335241 - DNA, 15 bp, Homo sapiens
agagactggtttcaa

SEQ ID NO: 1335242 - DNA, 15 bp, Homo sapiens
gagagactggtttca

SEQ ID NO: 1335243 - DNA, 15 bp, Homo sapiens
tgagagactggtttc

SEQ ID NO: 1335244 - DNA, 15 bp, Homo sapiens
gtgagagactggttt

SEQ ID NO: 1335245 - DNA, 15 bp, Homo sapiens
ggtgagagactggtt

SEQ ID NO: 1335246 - DNA, 15 bp, Homo sapiens
gggtgagagactggt

SEQ ID NO: 1335247 - DNA, 15 bp, Homo sapiens
tgggtgagagactgg

SEQ ID NO: 1335248 - DNA, 15 bp, Homo sapiens
atgggtgagagactg

SEQ ID NO: 1335249 - DNA, 15 bp, Homo sapiens
aatgggtgagagact

SEQ ID NO: 1335250 - DNA, 15 bp, Homo sapiens
caatgggtgagagac

SEQ ID NO: 1335251 - DNA, 15 bp, Homo sapiens
tcaatgggtgagaga

SEQ ID NO: 1335252 - DNA, 15 bp, Homo sapiens
ttcaatgggtgagag

SEQ ID NO: 1335253 - DNA, 15 bp, Homo sapiens
tttcaatgggtgaga

SEQ ID NO: 1335254 - DNA, 15 bp, Homo sapiens
ctttcaatgggtgag

SEQ ID NO: 1335255 - DNA, 15 bp, Homo sapiens
actttcaatgggtga

SEQ ID NO: 1335256 - DNA, 15 bp, Homo sapiens
cactttcaatgggtg

SEQ ID NO: 1335257 - DNA, 15 bp, Homo sapiens
ccactttcaatgggt

SEQ ID NO: 1335258 - DNA, 15 bp, Homo sapiens
accactttcaatggg

SEQ ID NO: 1335259 - DNA, 15 bp, Homo sapiens
aaccactttcaatgg

SEQ ID NO: 1335260 - DNA, 15 bp, Homo sapiens
aaaccactttcaatg

SEQ ID NO: 1335261 - DNA, 15 bp, Homo sapiens
gaaaccactttcaat

SEQ ID NO: 1335262 - DNA, 15 bp, Homo sapiens
ggaaaccactttcaa

SEQ ID NO: 1335263 - DNA, 15 bp, Homo sapiens
aggaaaccactttca

SEQ ID NO: 1335264 - DNA, 15 bp, Homo sapiens
taggaaaccactttc

SEQ ID NO: 1335265 - DNA, 15 bp, Homo sapiens
ctaggaaaccacttt

SEQ ID NO: 1335266 - DNA, 15 bp, Homo sapiens
actaggaaaccactt

SEQ ID NO: 1335267 - DNA, 15 bp, Homo sapiens
aactaggaaaccact

SEQ ID NO: 1335268 - DNA, 15 bp, Homo sapiens
aaactaggaaaccac

SEQ ID NO: 1335269 - DNA, 15 bp, Homo sapiens
aaaactaggaaacca

SEQ ID NO: 1335270 - DNA, 15 bp, Homo sapiens
gaaaactaggaaacc

SEQ ID NO: 1335271 - DNA, 15 bp, Homo sapiens
tgaaaactaggaaac

SEQ ID NO: 1335272 - DNA, 15 bp, Homo sapiens
atgaaaactaggaaa

SEQ ID NO: 1335273 - DNA, 15 bp, Homo sapiens
catgaaaactaggaa

SEQ ID NO: 1335274 - DNA, 15 bp, Homo sapiens
acatgaaaactagga

SEQ ID NO: 1335275 - DNA, 15 bp, Homo sapiens
tacatgaaaactagg

SEQ ID NO: 1335276 - DNA, 15 bp, Homo sapiens
atacatgaaaactag

SEQ ID NO: 1335277 - DNA, 15 bp, Homo sapiens
aatacatgaaaacta

SEQ ID NO: 1335278 - DNA, 15 bp, Homo sapiens
aaatacatgaaaact

SEQ ID NO: 1335279 - DNA, 15 bp, Homo sapiens
aaaatacatgaaaac

SEQ ID NO: 1335280 - DNA, 15 bp, Homo sapiens
aaaaatacatgaaaa

SEQ ID NO: 1335281 - DNA, 15 bp, Homo sapiens
taaaaatacatgaaa

SEQ ID NO: 1335282 - DNA, 15 bp, Homo sapiens
ttaaaaatacatgaa

SEQ ID NO: 1335283 - DNA, 15 bp, Homo sapiens
attaaaaatacatga

SEQ ID NO: 1335284 - DNA, 15 bp, Homo sapiens
aattaaaaatacatg

SEQ ID NO: 1335285 - DNA, 15 bp, Homo sapiens
taattaaaaatacat

SEQ ID NO: 1335286 - DNA, 15 bp, Homo sapiens
ataattaaaaataca

SEQ ID NO: 1335287 - DNA, 15 bp, Homo sapiens
cataattaaaaatac

SEQ ID NO: 1335288 - DNA, 15 bp, Homo sapiens
gcataattaaaaata

SEQ ID NO: 1335289 - DNA, 15 bp, Homo sapiens
agcataattaaaaat

SEQ ID NO: 1335290 - DNA, 15 bp, Homo sapiens
cagcataattaaaaa

SEQ ID NO: 1335291 - DNA, 15 bp, Homo sapiens
ccagcataattaaaa

SEQ ID NO: 1335292 - DNA, 15 bp, Homo sapiens
cccagcataattaaa

SEQ ID NO: 1335293 - DNA, 15 bp, Homo sapiens
tcccagcataattaa

SEQ ID NO: 1335294 - DNA, 15 bp, Homo sapiens
ctcccagcataatta

SEQ ID NO: 1335295 - DNA, 15 bp, Homo sapiens
tctcccagcataatt

SEQ ID NO: 1335296 - DNA, 15 bp, Homo sapiens
gtctcccagcataat

SEQ ID NO: 1335297 - DNA, 15 bp, Homo sapiens
tgtctcccagcataa

SEQ ID NO: 1335298 - DNA, 15 bp, Homo sapiens
ttgtctcccagcata

SEQ ID NO: 1335299 - DNA, 15 bp, Homo sapiens
tttgtctcccagcat

SEQ ID NO: 1335300 - DNA, 15 bp, Homo sapiens
atttgtctcccagca

SEQ ID NO: 1335301 - DNA, 15 bp, Homo sapiens
gatttgtctcccagc

SEQ ID NO: 1335302 - DNA, 15 bp, Homo sapiens
tgatttgtctcccag

SEQ ID NO: 1335303 - DNA, 15 bp, Homo sapiens
atgatttgtctccca

SEQ ID NO: 1335304 - DNA, 15 bp, Homo sapiens
tatgatttgtctccc

SEQ ID NO: 1335305 - DNA, 15 bp, Homo sapiens
ttatgatttgtctcc

SEQ ID NO: 1335306 - DNA, 15 bp, Homo sapiens
gttatgatttgtctc

SEQ ID NO: 1335307 - DNA, 15 bp, Homo sapiens
ggttatgatttgtct

SEQ ID NO: 1335308 - DNA, 15 bp, Homo sapiens
gggttatgatttgtc

SEQ ID NO: 1335309 - DNA, 15 bp, Homo sapiens
agggttatgatttgt

SEQ ID NO: 1335310 - DNA, 15 bp, Homo sapiens
gagggttatgatttg

SEQ ID NO: 1335311 - DNA, 15 bp, Homo sapiens
agagggttatgattt

SEQ ID NO: 1335312 - DNA, 15 bp, Homo sapiens
gagagggttatgatt

SEQ ID NO: 1335313 - DNA, 15 bp, Homo sapiens
tgagagggttatgat

SEQ ID NO: 1335314 - DNA, 15 bp, Homo sapiens
ttgagagggttatga

SEQ ID NO: 1335315 - DNA, 15 bp, Homo sapiens
cttgagagggttatg

SEQ ID NO: 1335316 - DNA, 15 bp, Homo sapiens
ccttgagagggttat

SEQ ID NO: 1335317 - DNA, 15 bp, Homo sapiens
tccttgagagggtta

SEQ ID NO: 1335318 - DNA, 15 bp, Homo sapiens
ctccttgagagggtt

SEQ ID NO: 1335319 - DNA, 15 bp, Homo sapiens
cctccttgagagggt

SEQ ID NO: 1335320 - DNA, 15 bp, Homo sapiens
tcctccttgagaggg

SEQ ID NO: 1335321 - DNA, 15 bp, Homo sapiens
gtcctccttgagagg

SEQ ID NO: 1335322 - DNA, 15 bp, Homo sapiens
agtcctccttgagag

SEQ ID NO: 1335323 - DNA, 15 bp, Homo sapiens
tagtcctccttgaga

SEQ ID NO: 1335324 - DNA, 15 bp, Homo sapiens
atagtcctccttgag

SEQ ID NO: 1335325 - DNA, 15 bp, Homo sapiens
catagtcctccttga

SEQ ID NO: 1335326 - DNA, 15 bp, Homo sapiens
acatagtcctccttg

SEQ ID NO: 1335327 - DNA, 15 bp, Homo sapiens
aacatagtcctcctt

SEQ ID NO: 1335328 - DNA, 15 bp, Homo sapiens
aaacatagtcctcct

SEQ ID NO: 1335329 - DNA, 15 bp, Homo sapiens
aaaacatagtcctcc

SEQ ID NO: 1335330 - DNA, 15 bp, Homo sapiens
taaaacatagtcctc

SEQ ID NO: 1335331 - DNA, 15 bp, Homo sapiens
ataaaacatagtcct

SEQ ID NO: 1335332 - DNA, 15 bp, Homo sapiens
tataaaacatagtcc

SEQ ID NO: 1335333 - DNA, 15 bp, Homo sapiens
gtataaaacatagtc

SEQ ID NO: 1335334 - DNA, 15 bp, Homo sapiens
tgtataaaacatagt

SEQ ID NO: 1335335 - DNA, 15 bp, Homo sapiens
atgtataaaacatag

SEQ ID NO: 1335336 - DNA, 15 bp, Homo sapiens
aatgtataaaacata

SEQ ID NO: 1335337 - DNA, 15 bp, Homo sapiens
aaatgtataaaacat

SEQ ID NO: 1335338 - DNA, 15 bp, Homo sapiens
aaaatgtataaaaca

SEQ ID NO: 1335339 - DNA, 15 bp, Homo sapiens
aaaaatgtataaaac

SEQ ID NO: 1335340 - DNA, 15 bp, Homo sapiens
aaaaaatgtataaaa

SEQ ID NO: 1335341 - DNA, 15 bp, Homo sapiens
aaaaaaatgtataaa

SEQ ID NO: 1335342 - DNA, 15 bp, Homo sapiens
taaaaaaatgtataa

SEQ ID NO: 1335343 - DNA, 15 bp, Homo sapiens
ttaaaaaaatgtata

SEQ ID NO: 1335344 - DNA, 15 bp, Homo sapiens
tttaaaaaaatgtat

SEQ ID NO: 1335345 - DNA, 15 bp, Homo sapiens
atttaaaaaaatgta

SEQ ID NO: 1335346 - DNA, 15 bp, Homo sapiens
gatttaaaaaaatgt

SEQ ID NO: 1335347 - DNA, 15 bp, Homo sapiens
tgatttaaaaaaatg

SEQ ID NO: 1335348 - DNA, 15 bp, Homo sapiens
atgatttaaaaaaat

SEQ ID NO: 1335349 - DNA, 15 bp, Homo sapiens
gaatgatttaaaaaa

SEQ ID NO: 1335350 - DNA, 15 bp, Homo sapiens
tgaatgatttaaaaa

SEQ ID NO: 1335351 - DNA, 15 bp, Homo sapiens
gtgaatgatttaaaa

SEQ ID NO: 1335352 - DNA, 15 bp, Homo sapiens
tgtgaatgatttaaa

SEQ ID NO: 1335353 - DNA, 15 bp, Homo sapiens
ttgtgaatgatttaa

SEQ ID NO: 1335354 - DNA, 15 bp, Homo sapiens
gttgtgaatgattta

SEQ ID NO: 1335355 - DNA, 15 bp, Homo sapiens
tgttgtgaatgattt

SEQ ID NO: 1335356 - DNA, 15 bp, Homo sapiens
gtgttgtgaatgatt

SEQ ID NO: 1335357 - DNA, 15 bp, Homo sapiens
ggtgttgtgaatgat

SEQ ID NO: 1335358 - DNA, 15 bp, Homo sapiens
gggtgttgtgaatga

SEQ ID NO: 1335359 - DNA, 15 bp, Homo sapiens
agggtgttgtgaatg

SEQ ID NO: 1335360 - DNA, 15 bp, Homo sapiens
cagggtgttgtgaat

SEQ ID NO: 1335361 - DNA, 15 bp, Homo sapiens
gcagggtgttgtgaa

SEQ ID NO: 1335362 - DNA, 15 bp, Homo sapiens
tgcagggtgttgtga

SEQ ID NO: 1335363 - DNA, 15 bp, Homo sapiens
ttgcagggtgttgtg

SEQ ID NO: 1335364 - DNA, 15 bp, Homo sapiens
attgcagggtgttgt

SEQ ID NO: 1335365 - DNA, 15 bp, Homo sapiens
gattgcagggtgttg

SEQ ID NO: 1335366 - DNA, 15 bp, Homo sapiens
tgattgcagggtgtt

SEQ ID NO: 1335367 - DNA, 15 bp, Homo sapiens
ttgattgcagggtgt

SEQ ID NO: 1335368 - DNA, 15 bp, Homo sapiens
tttgattgcagggtg

SEQ ID NO: 1335369 - DNA, 15 bp, Homo sapiens
ttttgattgcagggt

SEQ ID NO: 1335370 - DNA, 15 bp, Homo sapiens
tttttgattgcaggg

SEQ ID NO: 1335371 - DNA, 15 bp, Homo sapiens
ttttttgattgcagg

SEQ ID NO: 1335372 - DNA, 15 bp, Homo sapiens
cttttttgattgcag

SEQ ID NO: 1335373 - DNA, 15 bp, Homo sapiens
acttttttgattgca

SEQ ID NO: 1335374 - DNA, 15 bp, Homo sapiens
gacttttttgattgc

SEQ ID NO: 1335375 - DNA, 15 bp, Homo sapiens
ggacttttttgattg

SEQ ID NO: 1335376 - DNA, 15 bp, Homo sapiens
gggacttttttgatt

SEQ ID NO: 1335377 - DNA, 15 bp, Homo sapiens
ggggacttttttgat

SEQ ID NO: 1335378 - DNA, 15 bp, Homo sapiens
gggggacttttttga

SEQ ID NO: 1335379 - DNA, 15 bp, Homo sapiens
tgggggacttttttg

SEQ ID NO: 1335380 - DNA, 15 bp, Homo sapiens
gtgggggactttttt

SEQ ID NO: 1335381 - DNA, 15 bp, Homo sapiens
tgtgggggacttttt

SEQ ID NO: 1335382 - DNA, 15 bp, Homo sapiens
ttgtgggggactttt

SEQ ID NO: 1335383 - DNA, 15 bp, Homo sapiens
attgtgggggacttt

SEQ ID NO: 1335384 - DNA, 15 bp, Homo sapiens
aattgtgggggactt

SEQ ID NO: 1335385 - DNA, 15 bp, Homo sapiens
aaattgtgggggact

SEQ ID NO: 1335386 - DNA, 15 bp, Homo sapiens
aaaattgtgggggac

SEQ ID NO: 1335387 - DNA, 15 bp, Homo sapiens
aaaaattgtggggga

SEQ ID NO: 1335388 - DNA, 15 bp, Homo sapiens
aaaaaattgtggggg

SEQ ID NO: 1335389 - DNA, 15 bp, Homo sapiens
aaaaaaattgtgggg

SEQ ID NO: 1335390 - DNA, 15 bp, Homo sapiens
taaaaaaattgtggg

SEQ ID NO: 1335391 - DNA, 15 bp, Homo sapiens
ttaaaaaaattgtgg

SEQ ID NO: 1335392 - DNA, 15 bp, Homo sapiens
attaaaaaaattgtg

SEQ ID NO: 1335393 - DNA, 15 bp, Homo sapiens
aattaaaaaaattgt

SEQ ID NO: 1335394 - DNA, 15 bp, Homo sapiens
aaattaaaaaaattg

SEQ ID NO: 1335395 - DNA, 15 bp, Homo sapiens
taaattaaaaaaatt

SEQ ID NO: 1335396 - DNA, 15 bp, Homo sapiens
ctaaattaaaaaaat

SEQ ID NO: 1335397 - DNA, 15 bp, Homo sapiens
actaaattaaaaaaa

SEQ ID NO: 1335398 - DNA, 15 bp, Homo sapiens
gactaaattaaaaaa

SEQ ID NO: 1335399 - DNA, 15 bp, Homo sapiens
agactaaattaaaaa

SEQ ID NO: 1335400 - DNA, 15 bp, Homo sapiens
cagactaaattaaaa

SEQ ID NO: 1335401 - DNA, 15 bp, Homo sapiens
tcagactaaattaaa

SEQ ID NO: 1335402 - DNA, 15 bp, Homo sapiens
ctcagactaaattaa

SEQ ID NO: 1335403 - DNA, 15 bp, Homo sapiens
tctcagactaaatta

SEQ ID NO: 1335404 - DNA, 15 bp, Homo sapiens
ttctcagactaaatt

SEQ ID NO: 1335405 - DNA, 15 bp, Homo sapiens
tttctcagactaaat

SEQ ID NO: 1335406 - DNA, 15 bp, Homo sapiens
atttctcagactaaa

SEQ ID NO: 1335407 - DNA, 15 bp, Homo sapiens
aatttctcagactaa

SEQ ID NO: 1335408 - DNA, 15 bp, Homo sapiens
taatttctcagacta

SEQ ID NO: 1335409 - DNA, 15 bp, Homo sapiens
ctaatttctcagact

SEQ ID NO: 1335410 - DNA, 15 bp, Homo sapiens
cctaatttctcagac

SEQ ID NO: 1335411 - DNA, 15 bp, Homo sapiens
tcctaatttctcaga

SEQ ID NO: 1335412 - DNA, 15 bp, Homo sapiens
ctcctaatttctcag

SEQ ID NO: 1335413 - DNA, 15 bp, Homo sapiens
cctcctaatttctca

SEQ ID NO: 1335414 - DNA, 15 bp, Homo sapiens
acctcctaatttctc

SEQ ID NO: 1335415 - DNA, 15 bp, Homo sapiens
gacctcctaatttct

SEQ ID NO: 1335416 - DNA, 15 bp, Homo sapiens
tgacctcctaatttc

SEQ ID NO: 1335417 - DNA, 15 bp, Homo sapiens
atgacctcctaattt

SEQ ID NO: 1335418 - DNA, 15 bp, Homo sapiens
aatgacctcctaatt

SEQ ID NO: 1335419 - DNA, 15 bp, Homo sapiens
taatgacctcctaat

SEQ ID NO: 1335420 - DNA, 15 bp, Homo sapiens
ctaatgacctcctaa

SEQ ID NO: 1335421 - DNA, 15 bp, Homo sapiens
tctaatgacctccta

SEQ ID NO: 1335422 - DNA, 15 bp, Homo sapiens
gtctaatgacctcct

SEQ ID NO: 1335423 - DNA, 15 bp, Homo sapiens
tgtctaatgacctcc

SEQ ID NO: 1335424 - DNA, 15 bp, Homo sapiens
ttgtctaatgacctc

SEQ ID NO: 1335425 - DNA, 15 bp, Homo sapiens
tttgtctaatgacct

SEQ ID NO: 1335426 - DNA, 15 bp, Homo sapiens
ttttgtctaatgacc

SEQ ID NO: 1335427 - DNA, 15 bp, Homo sapiens
gttttgtctaatgac

SEQ ID NO: 1335428 - DNA, 15 bp, Homo sapiens
cgttttgtctaatga

SEQ ID NO: 1335429 - DNA, 15 bp, Homo sapiens
acgttttgtctaatg

SEQ ID NO: 1335430 - DNA, 15 bp, Homo sapiens
cacgttttgtctaat

SEQ ID NO: 1335431 - DNA, 15 bp, Homo sapiens
tcacgttttgtctaa

SEQ ID NO: 1335432 - DNA, 15 bp, Homo sapiens
ttcacgttttgtcta

SEQ ID NO: 1335433 - DNA, 15 bp, Homo sapiens
tttcacgttttgtct

SEQ ID NO: 1335434 - DNA, 15 bp, Homo sapiens
ttttcacgttttgtc

SEQ ID NO: 1335435 - DNA, 15 bp, Homo sapiens
attttcacgttttgt

SEQ ID NO: 1335436 - DNA, 15 bp, Homo sapiens
tattttcacgttttg

SEQ ID NO: 1335437 - DNA, 15 bp, Homo sapiens
atattttcacgtttt

SEQ ID NO: 1335438 - DNA, 15 bp, Homo sapiens
aatattttcacgttt

SEQ ID NO: 1335439 - DNA, 15 bp, Homo sapiens
aaatattttcacgtt

SEQ ID NO: 1335440 - DNA, 15 bp, Homo sapiens
gaaatattttcacgt

SEQ ID NO: 1335441 - DNA, 15 bp, Homo sapiens
tgaaatattttcacg

SEQ ID NO: 1335442 - DNA, 15 bp, Homo sapiens
ttgaaatattttcac

SEQ ID NO: 1335443 - DNA, 15 bp, Homo sapiens
cttgaaatattttca

SEQ ID NO: 1335444 - DNA, 15 bp, Homo sapiens
tcttgaaatattttc

SEQ ID NO: 1335445 - DNA, 15 bp, Homo sapiens
ttcttgaaatatttt

SEQ ID NO: 1335446 - DNA, 15 bp, Homo sapiens
cttcttgaaatattt

SEQ ID NO: 1335447 - DNA, 15 bp, Homo sapiens
tcttcttgaaatatt

SEQ ID NO: 1335448 - DNA, 15 bp, Homo sapiens
gtcttcttgaaatat

SEQ ID NO: 1335449 - DNA, 15 bp, Homo sapiens
agtcttcttgaaata

SEQ ID NO: 1335450 - DNA, 15 bp, Homo sapiens
tagtcttcttgaaat

SEQ ID NO: 1335451 - DNA, 15 bp, Homo sapiens
ctagtcttcttgaaa

SEQ ID NO: 1335452 - DNA, 15 bp, Homo sapiens
tctagtcttcttgaa

SEQ ID NO: 1335453 - DNA, 15 bp, Homo sapiens
ttctagtcttcttga

SEQ ID NO: 1335454 - DNA, 15 bp, Homo sapiens
tttctagtcttcttg

SEQ ID NO: 1335455 - DNA, 15 bp, Homo sapiens
gtttctagtcttctt

SEQ ID NO: 1335456 - DNA, 15 bp, Homo sapiens
agtttctagtcttct

SEQ ID NO: 1335457 - DNA, 15 bp, Homo sapiens
aagtttctagtcttc

SEQ ID NO: 1335458 - DNA, 15 bp, Homo sapiens
taagtttctagtctt

SEQ ID NO: 1335459 - DNA, 15 bp, Homo sapiens
gtaagtttctagtct

SEQ ID NO: 1335460 - DNA, 15 bp, Homo sapiens
ggtaagtttctagtc

SEQ ID NO: 1335461 - DNA, 15 bp, Homo sapiens
aggtaagtttctagt

SEQ ID NO: 1335462 - DNA, 15 bp, Homo sapiens
gaggtaagtttctag

SEQ ID NO: 1335463 - DNA, 15 bp, Homo sapiens
tgaggtaagtttcta

SEQ ID NO: 1335464 - DNA, 15 bp, Homo sapiens
atgaggtaagtttct

SEQ ID NO: 1335465 - DNA, 15 bp, Homo sapiens
aatgaggtaagtttc

SEQ ID NO: 1335466 - DNA, 15 bp, Homo sapiens
taatgaggtaagttt

SEQ ID NO: 1335467 - DNA, 15 bp, Homo sapiens
ttaatgaggtaagtt

SEQ ID NO: 1335468 - DNA, 15 bp, Homo sapiens
tttaatgaggtaagt

SEQ ID NO: 1335469 - DNA, 15 bp, Homo sapiens
ttttaatgaggtaag

SEQ ID NO: 1335470 - DNA, 15 bp, Homo sapiens
attttaatgaggtaa

SEQ ID NO: 1335471 - DNA, 15 bp, Homo sapiens
cattttaatgaggta

SEQ ID NO: 1335472 - DNA, 15 bp, Homo sapiens
tcattttaatgaggt

SEQ ID NO: 1335473 - DNA, 15 bp, Homo sapiens
ttcattttaatgagg

SEQ ID NO: 1335474 - DNA, 15 bp, Homo sapiens
gttcattttaatgag

SEQ ID NO: 1335475 - DNA, 15 bp, Homo sapiens
ggttcattttaatga

SEQ ID NO: 1335476 - DNA, 15 bp, Homo sapiens
gggttcattttaatg

SEQ ID NO: 1335477 - DNA, 15 bp, Homo sapiens
tgggttcattttaat

SEQ ID NO: 1335478 - DNA, 15 bp, Homo sapiens
ttgggttcattttaa

SEQ ID NO: 1335479 - DNA, 15 bp, Homo sapiens
gttgggttcatttta

SEQ ID NO: 1335480 - DNA, 15 bp, Homo sapiens
agttgggttcatttt

SEQ ID NO: 1335481 - DNA, 15 bp, Homo sapiens
cagttgggttcattt

SEQ ID NO: 1335482 - DNA, 15 bp, Homo sapiens
gcagttgggttcatt

SEQ ID NO: 1335483 - DNA, 15 bp, Homo sapiens
tgcagttgggttcat

SEQ ID NO: 1335484 - DNA, 15 bp, Homo sapiens
ttgcagttgggttca

SEQ ID NO: 1335485 - DNA, 15 bp, Homo sapiens
attgcagttgggttc

SEQ ID NO: 1335486 - DNA, 15 bp, Homo sapiens
tattgcagttgggtt

SEQ ID NO: 1335487 - DNA, 15 bp, Homo sapiens
ctattgcagttgggt

SEQ ID NO: 1335488 - DNA, 15 bp, Homo sapiens
tctattgcagttggg

SEQ ID NO: 1335489 - DNA, 15 bp, Homo sapiens
ttctattgcagttgg

SEQ ID NO: 1335490 - DNA, 15 bp, Homo sapiens
cttctattgcagttg

SEQ ID NO: 1335491 - DNA, 15 bp, Homo sapiens
ccttctattgcagtt

SEQ ID NO: 1335492 - DNA, 15 bp, Homo sapiens
accttctattgcagt

SEQ ID NO: 1335493 - DNA, 15 bp, Homo sapiens
gaccttctattgcag

SEQ ID NO: 1335494 - DNA, 15 bp, Homo sapiens
tgaccttctattgca

SEQ ID NO: 1335495 - DNA, 15 bp, Homo sapiens
atgaccttctattgc

SEQ ID NO: 1335496 - DNA, 15 bp, Homo sapiens
aatgaccttctattg

SEQ ID NO: 1335497 - DNA, 15 bp, Homo sapiens
taatgaccttctatt

SEQ ID NO: 1335498 - DNA, 15 bp, Homo sapiens
ataatgaccttctat

SEQ ID NO: 1335499 - DNA, 15 bp, Homo sapiens
tataatgaccttcta

SEQ ID NO: 1335500 - DNA, 15 bp, Homo sapiens
ttataatgaccttct

SEQ ID NO: 1335501 - DNA, 15 bp, Homo sapiens
attataatgaccttc

SEQ ID NO: 1335502 - DNA, 15 bp, Homo sapiens
aattataatgacctt

SEQ ID NO: 1335503 - DNA, 15 bp, Homo sapiens
taattataatgacct

SEQ ID NO: 1335504 - DNA, 15 bp, Homo sapiens
ttaattataatgacc

SEQ ID NO: 1335505 - DNA, 15 bp, Homo sapiens
tttaattataatgac

SEQ ID NO: 1335506 - DNA, 15 bp, Homo sapiens
ttttaattataatga

SEQ ID NO: 1335507 - DNA, 15 bp, Homo sapiens
attttaattataatg

SEQ ID NO: 1335508 - DNA, 15 bp, Homo sapiens
tattttaattataat

SEQ ID NO: 1335509 - DNA, 15 bp, Homo sapiens
atattttaattataa

SEQ ID NO: 1335510 - DNA, 15 bp, Homo sapiens
aatattttaattata

SEQ ID NO: 1335511 - DNA, 15 bp, Homo sapiens
aaatattttaattat

SEQ ID NO: 1335512 - DNA, 15 bp, Homo sapiens
gaaatattttaatta

SEQ ID NO: 1335513 - DNA, 15 bp, Homo sapiens
ggaaatattttaatt

SEQ ID NO: 1335514 - DNA, 15 bp, Homo sapiens
tggaaatattttaat

SEQ ID NO: 1335515 - DNA, 15 bp, Homo sapiens
ctggaaatattttaa

SEQ ID NO: 1335516 - DNA, 15 bp, Homo sapiens
actggaaatatttta

SEQ ID NO: 1335517 - DNA, 15 bp, Homo sapiens
gactggaaatatttt

SEQ ID NO: 1335518 - DNA, 15 bp, Homo sapiens
ggactggaaatattt

SEQ ID NO: 1335519 - DNA, 15 bp, Homo sapiens
gggactggaaatatt

SEQ ID NO: 1335520 - DNA, 15 bp, Homo sapiens
agggactggaaatat

SEQ ID NO: 1335521 - DNA, 15 bp, Homo sapiens
aagggactggaaata

SEQ ID NO: 1335522 - DNA, 15 bp, Homo sapiens
gaagggactggaaat

SEQ ID NO: 1335523 - DNA, 15 bp, Homo sapiens
agaagggactggaaa

SEQ ID NO: 1335524 - DNA, 15 bp, Homo sapiens
cagaagggactggaa

SEQ ID NO: 1335525 - DNA, 15 bp, Homo sapiens
tcagaagggactgga

SEQ ID NO: 1335526 - DNA, 15 bp, Homo sapiens
ttcagaagggactgg

SEQ ID NO: 1335527 - DNA, 15 bp, Homo sapiens
gttcagaagggactg

SEQ ID NO: 1335528 - DNA, 15 bp, Homo sapiens
tgttcagaagggact

SEQ ID NO: 1335529 - DNA, 15 bp, Homo sapiens
atgttcagaagggac

SEQ ID NO: 1335530 - DNA, 15 bp, Homo sapiens
aatgttcagaaggga

SEQ ID NO: 1335531 - DNA, 15 bp, Homo sapiens
caatgttcagaaggg

SEQ ID NO: 1335532 - DNA, 15 bp, Homo sapiens
tcaatgttcagaagg

SEQ ID NO: 1335533 - DNA, 15 bp, Homo sapiens
gtcaatgttcagaag

SEQ ID NO: 1335534 - DNA, 15 bp, Homo sapiens
ggtcaatgttcagaa

SEQ ID NO: 1335535 - DNA, 15 bp, Homo sapiens
tggtcaatgttcaga

SEQ ID NO: 1335536 - DNA, 15 bp, Homo sapiens
ttggtcaatgttcag

SEQ ID NO: 1335537 - DNA, 15 bp, Homo sapiens
tttggtcaatgttca

SEQ ID NO: 1335538 - DNA, 15 bp, Homo sapiens
ctttggtcaatgttc

SEQ ID NO: 1335539 - DNA, 15 bp, Homo sapiens
cctttggtcaatgtt

SEQ ID NO: 1335540 - DNA, 15 bp, Homo sapiens
acctttggtcaatgt

SEQ ID NO: 1335541 - DNA, 15 bp, Homo sapiens
tacctttggtcaatg

SEQ ID NO: 1335542 - DNA, 15 bp, Homo sapiens
ttacctttggtcaat

SEQ ID NO: 1335543 - DNA, 15 bp, Homo sapiens
attacctttggtcaa

SEQ ID NO: 1335544 - DNA, 15 bp, Homo sapiens
cattacctttggtca

SEQ ID NO: 1335545 - DNA, 15 bp, Homo sapiens
tcattacctttggtc

SEQ ID NO: 1335546 - DNA, 15 bp, Homo sapiens
atcattacctttggt

SEQ ID NO: 1335547 - DNA, 15 bp, Homo sapiens
tatcattacctttgg

SEQ ID NO: 1335548 - DNA, 15 bp, Homo sapiens
gtatcattacctttg

SEQ ID NO: 1335549 - DNA, 15 bp, Homo sapiens
ggtatcattaccttt

SEQ ID NO: 1335550 - DNA, 15 bp, Homo sapiens
aggtatcattacctt

SEQ ID NO: 1335551 - DNA, 15 bp, Homo sapiens
aaggtatcattacct

SEQ ID NO: 1335552 - DNA, 15 bp, Homo sapiens
aaaggtatcattacc

SEQ ID NO: 1335553 - DNA, 15 bp, Homo sapiens
aaaaggtatcattac

SEQ ID NO: 1335554 - DNA, 15 bp, Homo sapiens
aaaaaggtatcatta

SEQ ID NO: 1335555 - DNA, 15 bp, Homo sapiens
aaaaaaggtatcatt

SEQ ID NO: 1335556 - DNA, 15 bp, Homo sapiens
aaaaaaaggtatcat

SEQ ID NO: 1335557 - DNA, 15 bp, Homo sapiens
aaaaaaaaggtatca

SEQ ID NO: 1335558 - DNA, 15 bp, Homo sapiens
aaaaaaaaaggtatc

SEQ ID NO: 1335559 - DNA, 15 bp, Homo sapiens
aaaaaaaaaaggtat

SEQ ID NO: 1335560 - DNA, 15 bp, Homo sapiens
aaaaaaaaaaaggta

SEQ ID NO: 1335561 - DNA, 15 bp, Homo sapiens
agagcaaaaaaaaaa

SEQ ID NO: 1335562 - DNA, 15 bp, Homo sapiens
aagagcaaaaaaaaa

SEQ ID NO: 1335563 - DNA, 15 bp, Homo sapiens
caagagcaaaaaaaa

SEQ ID NO: 1335564 - DNA, 15 bp, Homo sapiens
ccaagagcaaaaaaa

SEQ ID NO: 1335565 - DNA, 15 bp, Homo sapiens
accaagagcaaaaaa

SEQ ID NO: 1335566 - DNA, 15 bp, Homo sapiens
taccaagagcaaaaa

SEQ ID NO: 1335567 - DNA, 15 bp, Homo sapiens
ttaccaagagcaaaa

SEQ ID NO: 1335568 - DNA, 15 bp, Homo sapiens
tttaccaagagcaaa

SEQ ID NO: 1335569 - DNA, 15 bp, Homo sapiens
ctttaccaagagcaa

SEQ ID NO: 1335570 - DNA, 15 bp, Homo sapiens
actttaccaagagca

SEQ ID NO: 1335571 - DNA, 15 bp, Homo sapiens
tactttaccaagagc

SEQ ID NO: 1335572 - DNA, 15 bp, Homo sapiens
ttactttaccaagag

SEQ ID NO: 1335573 - DNA, 15 bp, Homo sapiens
tttactttaccaaga

SEQ ID NO: 1335574 - DNA, 15 bp, Homo sapiens
atttactttaccaag

SEQ ID NO: 1335575 - DNA, 15 bp, Homo sapiens
catttactttaccaa

SEQ ID NO: 1335576 - DNA, 15 bp, Homo sapiens
acatttactttacca

SEQ ID NO: 1335577 - DNA, 15 bp, Homo sapiens
aacatttactttacc

SEQ ID NO: 1335578 - DNA, 15 bp, Homo sapiens
aaacatttactttac

SEQ ID NO: 1335579 - DNA, 15 bp, Homo sapiens
gaaacatttacttta

SEQ ID NO: 1335580 - DNA, 15 bp, Homo sapiens
ggaaacatttacttt

SEQ ID NO: 1335581 - DNA, 15 bp, Homo sapiens
aggaaacatttactt

SEQ ID NO: 1335582 - DNA, 15 bp, Homo sapiens
aaggaaacatttact

SEQ ID NO: 1335583 - DNA, 15 bp, Homo sapiens
aaaggaaacatttac

SEQ ID NO: 1335584 - DNA, 15 bp, Homo sapiens
caaaggaaacattta

SEQ ID NO: 1335585 - DNA, 15 bp, Homo sapiens
acaaaggaaacattt

SEQ ID NO: 1335586 - DNA, 15 bp, Homo sapiens
aacaaaggaaacatt

SEQ ID NO: 1335587 - DNA, 15 bp, Homo sapiens
taacaaaggaaacat

SEQ ID NO: 1335588 - DNA, 15 bp, Homo sapiens
ttaacaaaggaaaca

SEQ ID NO: 1335589 - DNA, 15 bp, Homo sapiens
attaacaaaggaaac

SEQ ID NO: 1335590 - DNA, 15 bp, Homo sapiens
tattaacaaaggaaa

SEQ ID NO: 1335591 - DNA, 15 bp, Homo sapiens
ttattaacaaaggaa

SEQ ID NO: 1335592 - DNA, 15 bp, Homo sapiens
gttattaacaaagga

SEQ ID NO: 1335593 - DNA, 15 bp, Homo sapiens
agttattaacaaagg

SEQ ID NO: 1335594 - DNA, 15 bp, Homo sapiens
gagttattaacaaag

SEQ ID NO: 1335595 - DNA, 15 bp, Homo sapiens
tgagttattaacaaa

SEQ ID NO: 1335596 - DNA, 15 bp, Homo sapiens
ctgagttattaacaa

SEQ ID NO: 1335597 - DNA, 15 bp, Homo sapiens
actgagttattaaca

SEQ ID NO: 1335598 - DNA, 15 bp, Homo sapiens
tactgagttattaac

SEQ ID NO: 1335599 - DNA, 15 bp, Homo sapiens
atactgagttattaa

SEQ ID NO: 1335600 - DNA, 15 bp, Homo sapiens
tatactgagttatta

SEQ ID NO: 1335601 - DNA, 15 bp, Homo sapiens
ttatactgagttatt

SEQ ID NO: 1335602 - DNA, 15 bp, Homo sapiens
gttatactgagttat

SEQ ID NO: 1335603 - DNA, 15 bp, Homo sapiens
tgttatactgagtta

SEQ ID NO: 1335604 - DNA, 15 bp, Homo sapiens
ttgttatactgagtt

SEQ ID NO: 1335605 - DNA, 15 bp, Homo sapiens
tttgttatactgagt

SEQ ID NO: 1335606 - DNA, 15 bp, Homo sapiens
ctttgttatactgag

SEQ ID NO: 1335607 - DNA, 15 bp, Homo sapiens
tctttgttatactga

SEQ ID NO: 1335608 - DNA, 15 bp, Homo sapiens
gtctttgttatactg

SEQ ID NO: 1335609 - DNA, 15 bp, Homo sapiens
agtctttgttatact

SEQ ID NO: 1335610 - DNA, 15 bp, Homo sapiens
aagtctttgttatac

SEQ ID NO: 1335611 - DNA, 15 bp, Homo sapiens
aaagtctttgttata

SEQ ID NO: 1335612 - DNA, 15 bp, Homo sapiens
aaaagtctttgttat

SEQ ID NO: 1335613 - DNA, 15 bp, Homo sapiens
taaaagtctttgtta

SEQ ID NO: 1335614 - DNA, 15 bp, Homo sapiens
ctaaaagtctttgtt

SEQ ID NO: 1335615 - DNA, 15 bp, Homo sapiens
actaaaagtctttgt

SEQ ID NO: 1335616 - DNA, 15 bp, Homo sapiens
gactaaaagtctttg

SEQ ID NO: 1335617 - DNA, 15 bp, Homo sapiens
ggactaaaagtcttt

SEQ ID NO: 1335618 - DNA, 15 bp, Homo sapiens
aggactaaaagtctt

SEQ ID NO: 1335619 - DNA, 15 bp, Homo sapiens
gaggactaaaagtct

SEQ ID NO: 1335620 - DNA, 15 bp, Homo sapiens
tgaggactaaaagtc

SEQ ID NO: 1335621 - DNA, 15 bp, Homo sapiens
ctgaggactaaaagt

SEQ ID NO: 1335622 - DNA, 15 bp, Homo sapiens
actgaggactaaaag

SEQ ID NO: 1335623 - DNA, 15 bp, Homo sapiens
aactgaggactaaaa

SEQ ID NO: 1335624 - DNA, 15 bp, Homo sapiens
gaactgaggactaaa

SEQ ID NO: 1335625 - DNA, 15 bp, Homo sapiens
agaactgaggactaa

SEQ ID NO: 1335626 - DNA, 15 bp, Homo sapiens
aagaactgaggacta

SEQ ID NO: 1335627 - DNA, 15 bp, Homo sapiens
aaagaactgaggact

SEQ ID NO: 1335628 - DNA, 15 bp, Homo sapiens
aaaagaactgaggac

SEQ ID NO: 1335629 - DNA, 15 bp, Homo sapiens
gaaaagaactgagga

SEQ ID NO: 1335630 - DNA, 15 bp, Homo sapiens
tgaaaagaactgagg

SEQ ID NO: 1335631 - DNA, 15 bp, Homo sapiens
gtgaaaagaactgag

SEQ ID NO: 1335632 - DNA, 15 bp, Homo sapiens
tgtgaaaagaactga

SEQ ID NO: 1335633 - DNA, 15 bp, Homo sapiens
atgtgaaaagaactg

SEQ ID NO: 1335634 - DNA, 15 bp, Homo sapiens
tatgtgaaaagaact

SEQ ID NO: 1335635 - DNA, 15 bp, Homo sapiens
ttatgtgaaaagaac

SEQ ID NO: 1335636 - DNA, 15 bp, Homo sapiens
attatgtgaaaagaa

SEQ ID NO: 1335637 - DNA, 15 bp, Homo sapiens
aattatgtgaaaaga

SEQ ID NO: 1335638 - DNA, 15 bp, Homo sapiens
caattatgtgaaaag

SEQ ID NO: 1335639 - DNA, 15 bp, Homo sapiens
acaattatgtgaaaa

SEQ ID NO: 1335640 - DNA, 15 bp, Homo sapiens
gacaattatgtgaaa

SEQ ID NO: 1335641 - DNA, 15 bp, Homo sapiens
tgacaattatgtgaa

SEQ ID NO: 1335642 - DNA, 15 bp, Homo sapiens
gtgacaattatgtga

SEQ ID NO: 1335643 - DNA, 15 bp, Homo sapiens
agtgacaattatgtg

SEQ ID NO: 1335644 - DNA, 15 bp, Homo sapiens
tagtgacaattatgt

SEQ ID NO: 1335645 - DNA, 15 bp, Homo sapiens
ctagtgacaattatg

SEQ ID NO: 1335646 - DNA, 15 bp, Homo sapiens
gctagtgacaattat

SEQ ID NO: 1335647 - DNA, 15 bp, Homo sapiens
agctagtgacaatta

SEQ ID NO: 1335648 - DNA, 15 bp, Homo sapiens
tagctagtgacaatt

SEQ ID NO: 1335649 - DNA, 15 bp, Homo sapiens
atagctagtgacaat

SEQ ID NO: 1335650 - DNA, 15 bp, Homo sapiens
aatagctagtgacaa

SEQ ID NO: 1335651 - DNA, 15 bp, Homo sapiens
caatagctagtgaca

SEQ ID NO: 1335652 - DNA, 15 bp, Homo sapiens
acaatagctagtgac

SEQ ID NO: 1335653 - DNA, 15 bp, Homo sapiens
cacaatagctagtga

SEQ ID NO: 1335654 - DNA, 15 bp, Homo sapiens
ccacaatagctagtg

SEQ ID NO: 1335655 - DNA, 15 bp, Homo sapiens
tccacaatagctagt

SEQ ID NO: 1335656 - DNA, 15 bp, Homo sapiens
ctccacaatagctag

SEQ ID NO: 1335657 - DNA, 15 bp, Homo sapiens
tctccacaatagcta

SEQ ID NO: 1335658 - DNA, 15 bp, Homo sapiens
ctctccacaatagct

SEQ ID NO: 1335659 - DNA, 15 bp, Homo sapiens
tctctccacaatagc

SEQ ID NO: 1335660 - DNA, 15 bp, Homo sapiens
ttctctccacaatag

SEQ ID NO: 1335661 - DNA, 15 bp, Homo sapiens
tttctctccacaata

SEQ ID NO: 1335662 - DNA, 15 bp, Homo sapiens
ttttctctccacaat

SEQ ID NO: 1335663 - DNA, 15 bp, Homo sapiens
tttttctctccacaa

SEQ ID NO: 1335664 - DNA, 15 bp, Homo sapiens
ttttttctctccaca

SEQ ID NO: 1335665 - DNA, 15 bp, Homo sapiens
gttttttctctccac

SEQ ID NO: 1335666 - DNA, 15 bp, Homo sapiens
ggttttttctctcca

SEQ ID NO: 1335667 - DNA, 15 bp, Homo sapiens
gggttttttctctcc

SEQ ID NO: 1335668 - DNA, 15 bp, Homo sapiens
agggttttttctctc

SEQ ID NO: 1335669 - DNA, 15 bp, Homo sapiens
cagggttttttctct

SEQ ID NO: 1335670 - DNA, 15 bp, Homo sapiens
tcagggttttttctc

SEQ ID NO: 1335671 - DNA, 15 bp, Homo sapiens
ttcagggttttttct

SEQ ID NO: 1335672 - DNA, 15 bp, Homo sapiens
gttcagggttttttc

SEQ ID NO: 1335673 - DNA, 15 bp, Homo sapiens
tgttcagggtttttt

SEQ ID NO: 1335674 - DNA, 15 bp, Homo sapiens
gtgttcagggttttt

SEQ ID NO: 1335675 - DNA, 15 bp, Homo sapiens
agtgttcagggtttt

SEQ ID NO: 1335676 - DNA, 15 bp, Homo sapiens
aagtgttcagggttt

SEQ ID NO: 1335677 - DNA, 15 bp, Homo sapiens
caagtgttcagggtt

SEQ ID NO: 1335678 - DNA, 15 bp, Homo sapiens
tcaagtgttcagggt

SEQ ID NO: 1335679 - DNA, 15 bp, Homo sapiens
atcaagtgttcaggg

SEQ ID NO: 1335680 - DNA, 15 bp, Homo sapiens
aatcaagtgttcagg

SEQ ID NO: 1335681 - DNA, 15 bp, Homo sapiens
gaatcaagtgttcag

SEQ ID NO: 1335682 - DNA, 15 bp, Homo sapiens
agaatcaagtgttca

SEQ ID NO: 1335683 - DNA, 15 bp, Homo sapiens
cagaatcaagtgttc

SEQ ID NO: 1335684 - DNA, 15 bp, Homo sapiens
ccagaatcaagtgtt

SEQ ID NO: 1335685 - DNA, 15 bp, Homo sapiens
tccagaatcaagtgt

SEQ ID NO: 1335686 - DNA, 15 bp, Homo sapiens
ctccagaatcaagtg

SEQ ID NO: 1335687 - DNA, 15 bp, Homo sapiens
gctccagaatcaagt

SEQ ID NO: 1335688 - DNA, 15 bp, Homo sapiens
tgctccagaatcaag

SEQ ID NO: 1335689 - DNA, 15 bp, Homo sapiens
ttgctccagaatcaa

SEQ ID NO: 1335690 - DNA, 15 bp, Homo sapiens
tttgctccagaatca

SEQ ID NO: 1335691 - DNA, 15 bp, Homo sapiens
ctttgctccagaatc

SEQ ID NO: 1335692 - DNA, 15 bp, Homo sapiens
tctttgctccagaat

SEQ ID NO: 1335693 - DNA, 15 bp, Homo sapiens
ttctttgctccagaa

SEQ ID NO: 1335694 - DNA, 15 bp, Homo sapiens
gttctttgctccaga

SEQ ID NO: 1335695 - DNA, 15 bp, Homo sapiens
tgttctttgctccag

SEQ ID NO: 1335696 - DNA, 15 bp, Homo sapiens
ttgttctttgctcca

SEQ ID NO: 1335697 - DNA, 15 bp, Homo sapiens
cttgttctttgctcc

SEQ ID NO: 1335698 - DNA, 15 bp, Homo sapiens
acttgttctttgctc

SEQ ID NO: 1335699 - DNA, 15 bp, Homo sapiens
cacttgttctttgct

SEQ ID NO: 1335700 - DNA, 15 bp, Homo sapiens
tcacttgttctttgc

SEQ ID NO: 1335701 - DNA, 15 bp, Homo sapiens
ttcacttgttctttg

SEQ ID NO: 1335702 - DNA, 15 bp, Homo sapiens
tttcacttgttcttt

SEQ ID NO: 1335703 - DNA, 15 bp, Homo sapiens
ttttcacttgttctt

SEQ ID NO: 1335704 - DNA, 15 bp, Homo sapiens
tttttcacttgttct

SEQ ID NO: 1335705 - DNA, 15 bp, Homo sapiens
ttttttcacttgttc

SEQ ID NO: 1335706 - DNA, 15 bp, Homo sapiens
cttttttcacttgtt

SEQ ID NO: 1335707 - DNA, 15 bp, Homo sapiens
ccttttttcacttgt

SEQ ID NO: 1335708 - DNA, 15 bp, Homo sapiens
tccttttttcacttg

SEQ ID NO: 1335709 - DNA, 15 bp, Homo sapiens
ctccttttttcactt

SEQ ID NO: 1335710 - DNA, 15 bp, Homo sapiens
gctccttttttcact

SEQ ID NO: 1335711 - DNA, 15 bp, Homo sapiens
tgctccttttttcac

SEQ ID NO: 1335712 - DNA, 15 bp, Homo sapiens
ctgctccttttttca

SEQ ID NO: 1335713 - DNA, 15 bp, Homo sapiens
tctgctccttttttc

SEQ ID NO: 1335714 - DNA, 15 bp, Homo sapiens
ttctgctcctttttt

SEQ ID NO: 1335715 - DNA, 15 bp, Homo sapiens
cttctgctccttttt

SEQ ID NO: 1335716 - DNA, 15 bp, Homo sapiens
ccttctgctcctttt

SEQ ID NO: 1335717 - DNA, 15 bp, Homo sapiens
gccttctgctccttt

SEQ ID NO: 1335718 - DNA, 15 bp, Homo sapiens
tgccttctgctcctt

SEQ ID NO: 1335719 - DNA, 15 bp, Homo sapiens
gtgccttctgctcct

SEQ ID NO: 1335720 - DNA, 15 bp, Homo sapiens
ggtgccttctgctcc

SEQ ID NO: 1335721 - DNA, 15 bp, Homo sapiens
tggtgccttctgctc

SEQ ID NO: 1335722 - DNA, 15 bp, Homo sapiens
ctggtgccttctgct

SEQ ID NO: 1335723 - DNA, 15 bp, Homo sapiens
gctggtgccttctgc

SEQ ID NO: 1335724 - DNA, 15 bp, Homo sapiens
agctggtgccttctg

SEQ ID NO: 1335725 - DNA, 15 bp, Homo sapiens
tagctggtgccttct

SEQ ID NO: 1335726 - DNA, 15 bp, Homo sapiens
ttagctggtgccttc

SEQ ID NO: 1335727 - DNA, 15 bp, Homo sapiens
tttagctggtgcctt

SEQ ID NO: 1335728 - DNA, 15 bp, Homo sapiens
ttttagctggtgcct

SEQ ID NO: 1335729 - DNA, 15 bp, Homo sapiens
cttttagctggtgcc

SEQ ID NO: 1335730 - DNA, 15 bp, Homo sapiens
tcttttagctggtgc

SEQ ID NO: 1335731 - DNA, 15 bp, Homo sapiens
ctcttttagctggtg

SEQ ID NO: 1335732 - DNA, 15 bp, Homo sapiens
gctcttttagctggt

SEQ ID NO: 1335733 - DNA, 15 bp, Homo sapiens
tgctcttttagctgg

SEQ ID NO: 1335734 - DNA, 15 bp, Homo sapiens
ttgctcttttagctg

SEQ ID NO: 1335735 - DNA, 15 bp, Homo sapiens
tttgctcttttagct

SEQ ID NO: 1335736 - DNA, 15 bp, Homo sapiens
ttttgctcttttagc

SEQ ID NO: 1335737 - DNA, 15 bp, Homo sapiens
gttttgctcttttag

SEQ ID NO: 1335738 - DNA, 15 bp, Homo sapiens
ggttttgctctttta

SEQ ID NO: 1335739 - DNA, 15 bp, Homo sapiens
aggttttgctctttt

SEQ ID NO: 1335740 - DNA, 15 bp, Homo sapiens
aaggttttgctcttt

SEQ ID NO: 1335741 - DNA, 15 bp, Homo sapiens
taaggttttgctctt

SEQ ID NO: 1335742 - DNA, 15 bp, Homo sapiens
gtaaggttttgctct

SEQ ID NO: 1335743 - DNA, 15 bp, Homo sapiens
tgtaaggttttgctc

SEQ ID NO: 1335744 - DNA, 15 bp, Homo sapiens
ttgtaaggttttgct

SEQ ID NO: 1335745 - DNA, 15 bp, Homo sapiens
tttgtaaggttttgc

SEQ ID NO: 1335746 - DNA, 15 bp, Homo sapiens
ctttgtaaggttttg

SEQ ID NO: 1335747 - DNA, 15 bp, Homo sapiens
tctttgtaaggtttt

SEQ ID NO: 1335748 - DNA, 15 bp, Homo sapiens
ttctttgtaaggttt

SEQ ID NO: 1335749 - DNA, 15 bp, Homo sapiens
tttctttgtaaggtt

SEQ ID NO: 1335750 - DNA, 15 bp, Homo sapiens
atttctttgtaaggt

SEQ ID NO: 1335751 - DNA, 15 bp, Homo sapiens
catttctttgtaagg

SEQ ID NO: 1335752 - DNA, 15 bp, Homo sapiens
tcatttctttgtaag

SEQ ID NO: 1335753 - DNA, 15 bp, Homo sapiens
gtcatttctttgtaa

SEQ ID NO: 1335754 - DNA, 15 bp, Homo sapiens
agtcatttctttgta

SEQ ID NO: 1335755 - DNA, 15 bp, Homo sapiens
cagtcatttctttgt

SEQ ID NO: 1335756 - DNA, 15 bp, Homo sapiens
acagtcatttctttg

SEQ ID NO: 1335757 - DNA, 15 bp, Homo sapiens
gacagtcatttcttt

SEQ ID NO: 1335758 - DNA, 15 bp, Homo sapiens
tgacagtcatttctt

SEQ ID NO: 1335759 - DNA, 15 bp, Homo sapiens
ttgacagtcatttct

SEQ ID NO: 1335760 - DNA, 15 bp, Homo sapiens
cttgacagtcatttc

SEQ ID NO: 1335761 - DNA, 15 bp, Homo sapiens
tcttgacagtcattt

SEQ ID NO: 1335762 - DNA, 15 bp, Homo sapiens
ttcttgacagtcatt

SEQ ID NO: 1335763 - DNA, 15 bp, Homo sapiens
tttcttgacagtcat

SEQ ID NO: 1335764 - DNA, 15 bp, Homo sapiens
ttttcttgacagtca

SEQ ID NO: 1335765 - DNA, 15 bp, Homo sapiens
attttcttgacagtc

SEQ ID NO: 1335766 - DNA, 15 bp, Homo sapiens
tattttcttgacagt

SEQ ID NO: 1335767 - DNA, 15 bp, Homo sapiens
atattttcttgacag

SEQ ID NO: 1335768 - DNA, 15 bp, Homo sapiens
catattttcttgaca

SEQ ID NO: 1335769 - DNA, 15 bp, Homo sapiens
tcatattttcttgac

SEQ ID NO: 1335770 - DNA, 15 bp, Homo sapiens
atcatattttcttga

SEQ ID NO: 1335771 - DNA, 15 bp, Homo sapiens
tatcatattttcttg

SEQ ID NO: 1335772 - DNA, 15 bp, Homo sapiens
atatcatattttctt

SEQ ID NO: 1335773 - DNA, 15 bp, Homo sapiens
catatcatattttct

SEQ ID NO: 1335774 - DNA, 15 bp, Homo sapiens
gcatatcatattttc

SEQ ID NO: 1335775 - DNA, 15 bp, Homo sapiens
tgcatatcatatttt

SEQ ID NO: 1335776 - DNA, 15 bp, Homo sapiens
ctgcatatcatattt

SEQ ID NO: 1335777 - DNA, 15 bp, Homo sapiens
gctgcatatcatatt

SEQ ID NO: 1335778 - DNA, 15 bp, Homo sapiens
tgctgcatatcatat

SEQ ID NO: 1335779 - DNA, 15 bp, Homo sapiens
ttgctgcatatcata

SEQ ID NO: 1335780 - DNA, 15 bp, Homo sapiens
attgctgcatatcat

SEQ ID NO: 1335781 - DNA, 15 bp, Homo sapiens
aattgctgcatatca

SEQ ID NO: 1335782 - DNA, 15 bp, Homo sapiens
aaattgctgcatatc

SEQ ID NO: 1335783 - DNA, 15 bp, Homo sapiens
aaaattgctgcatat

SEQ ID NO: 1335784 - DNA, 15 bp, Homo sapiens
aaaaattgctgcata

SEQ ID NO: 1335785 - DNA, 15 bp, Homo sapiens
taaaaattgctgcat

SEQ ID NO: 1335786 - DNA, 15 bp, Homo sapiens
ataaaaattgctgca

SEQ ID NO: 1335787 - DNA, 15 bp, Homo sapiens
aataaaaattgctgc

SEQ ID NO: 1335788 - DNA, 15 bp, Homo sapiens
gaataaaaattgctg

SEQ ID NO: 1335789 - DNA, 15 bp, Homo sapiens
agaataaaaattgct

SEQ ID NO: 1335790 - DNA, 15 bp, Homo sapiens
gagaataaaaattgc

SEQ ID NO: 1335791 - DNA, 15 bp, Homo sapiens
tgagaataaaaattg

SEQ ID NO: 1335792 - DNA, 15 bp, Homo sapiens
gtgagaataaaaatt

SEQ ID NO: 1335793 - DNA, 15 bp, Homo sapiens
tgtgagaataaaaat

SEQ ID NO: 1335794 - DNA, 15 bp, Homo sapiens
ttgtgagaataaaaa

SEQ ID NO: 1335795 - DNA, 15 bp, Homo sapiens
tttgtgagaataaaa

SEQ ID NO: 1335796 - DNA, 15 bp, Homo sapiens
ttttgtgagaataaa

SEQ ID NO: 1335797 - DNA, 15 bp, Homo sapiens
tttttgtgagaataa

SEQ ID NO: 1335798 - DNA, 15 bp, Homo sapiens
atttttgtgagaata

SEQ ID NO: 1335799 - DNA, 15 bp, Homo sapiens
catttttgtgagaat

SEQ ID NO: 1335800 - DNA, 15 bp, Homo sapiens
ccatttttgtgagaa

SEQ ID NO: 1335801 - DNA, 15 bp, Homo sapiens
cccatttttgtgaga

SEQ ID NO: 1335802 - DNA, 15 bp, Homo sapiens
ccccatttttgtgag

SEQ ID NO: 1335803 - DNA, 15 bp, Homo sapiens
cccccatttttgtga

SEQ ID NO: 1335804 - DNA, 15 bp, Homo sapiens
acccccatttttgtg

SEQ ID NO: 1335805 - DNA, 15 bp, Homo sapiens
tacccccatttttgt

SEQ ID NO: 1335806 - DNA, 15 bp, Homo sapiens
ttacccccatttttg

SEQ ID NO: 1335807 - DNA, 15 bp, Homo sapiens
attacccccattttt

SEQ ID NO: 1335808 - DNA, 15 bp, Homo sapiens
tattacccccatttt

SEQ ID NO: 1335809 - DNA, 15 bp, Homo sapiens
ctattacccccattt

SEQ ID NO: 1335810 - DNA, 15 bp, Homo sapiens
cctattacccccatt

SEQ ID NO: 1335811 - DNA, 15 bp, Homo sapiens
acctattacccccat

SEQ ID NO: 1335812 - DNA, 15 bp, Homo sapiens
tacctattaccccca

SEQ ID NO: 1335813 - DNA, 15 bp, Homo sapiens
ttacctattaccccc

SEQ ID NO: 1335814 - DNA, 15 bp, Homo sapiens
attacctattacccc

SEQ ID NO: 1335815 - DNA, 15 bp, Homo sapiens
tattacctattaccc

SEQ ID NO: 1335816 - DNA, 15 bp, Homo sapiens
atattacctattacc

SEQ ID NO: 1335817 - DNA, 15 bp, Homo sapiens
tatattacctattac

SEQ ID NO: 1335818 - DNA, 15 bp, Homo sapiens
ttatattacctatta

SEQ ID NO: 1335819 - DNA, 15 bp, Homo sapiens
attatattacctatt

SEQ ID NO: 1335820 - DNA, 15 bp, Homo sapiens
aattatattacctat

SEQ ID NO: 1335821 - DNA, 15 bp, Homo sapiens
taattatattaccta

SEQ ID NO: 1335822 - DNA, 15 bp, Homo sapiens
ttaattatattacct

SEQ ID NO: 1335823 - DNA, 15 bp, Homo sapiens
attaattatattacc

SEQ ID NO: 1335824 - DNA, 15 bp, Homo sapiens
cattaattatattac

SEQ ID NO: 1335825 - DNA, 15 bp, Homo sapiens
tcattaattatatta

SEQ ID NO: 1335826 - DNA, 15 bp, Homo sapiens
ttcattaattatatt

SEQ ID NO: 1335827 - DNA, 15 bp, Homo sapiens
gttcattaattatat

SEQ ID NO: 1335828 - DNA, 15 bp, Homo sapiens
agttcattaattata

SEQ ID NO: 1335829 - DNA, 15 bp, Homo sapiens
gagttcattaattat

SEQ ID NO: 1335830 - DNA, 15 bp, Homo sapiens
agagttcattaatta

SEQ ID NO: 1335831 - DNA, 15 bp, Homo sapiens
cagagttcattaatt

SEQ ID NO: 1335832 - DNA, 15 bp, Homo sapiens
ccagagttcattaat

SEQ ID NO: 1335833 - DNA, 15 bp, Homo sapiens
accagagttcattaa

SEQ ID NO: 1335834 - DNA, 15 bp, Homo sapiens
taccagagttcatta

SEQ ID NO: 1335835 - DNA, 15 bp, Homo sapiens
ttaccagagttcatt

SEQ ID NO: 1335836 - DNA, 15 bp, Homo sapiens
cttaccagagttcat

SEQ ID NO: 1335837 - DNA, 15 bp, Homo sapiens
tcttaccagagttca

SEQ ID NO: 1335838 - DNA, 15 bp, Homo sapiens
ttcttaccagagttc

SEQ ID NO: 1335839 - DNA, 15 bp, Homo sapiens
cttcttaccagagtt

SEQ ID NO: 1335840 - DNA, 15 bp, Homo sapiens
tcttcttaccagagt

SEQ ID NO: 1335841 - DNA, 15 bp, Homo sapiens
ttcttcttaccagag

SEQ ID NO: 1335842 - DNA, 15 bp, Homo sapiens
tttcttcttaccaga

SEQ ID NO: 1335843 - DNA, 15 bp, Homo sapiens
ttttcttcttaccag

SEQ ID NO: 1335844 - DNA, 15 bp, Homo sapiens
cttttcttcttacca

SEQ ID NO: 1335845 - DNA, 15 bp, Homo sapiens
ccttttcttcttacc

SEQ ID NO: 1335846 - DNA, 15 bp, Homo sapiens
tccttttcttcttac

SEQ ID NO: 1335847 - DNA, 15 bp, Homo sapiens
ctccttttcttctta

SEQ ID NO: 1335848 - DNA, 15 bp, Homo sapiens
gctccttttcttctt

SEQ ID NO: 1335849 - DNA, 15 bp, Homo sapiens
agctccttttcttct

SEQ ID NO: 1335850 - DNA, 15 bp, Homo sapiens
aagctccttttcttc

SEQ ID NO: 1335851 - DNA, 15 bp, Homo sapiens
aaagctccttttctt

SEQ ID NO: 1335852 - DNA, 15 bp, Homo sapiens
caaagctccttttct

SEQ ID NO: 1335853 - DNA, 15 bp, Homo sapiens
tcaaagctccttttc

SEQ ID NO: 1335854 - DNA, 15 bp, Homo sapiens
gtcaaagctcctttt

SEQ ID NO: 1335855 - DNA, 15 bp, Homo sapiens
ggtcaaagctccttt

SEQ ID NO: 1335856 - DNA, 15 bp, Homo sapiens
tggtcaaagctcctt

SEQ ID NO: 1335857 - DNA, 15 bp, Homo sapiens
gtggtcaaagctcct

SEQ ID NO: 1335858 - DNA, 15 bp, Homo sapiens
tgtggtcaaagctcc

SEQ ID NO: 1335859 - DNA, 15 bp, Homo sapiens
ttgtggtcaaagctc

SEQ ID NO: 1335860 - DNA, 15 bp, Homo sapiens
tttgtggtcaaagct

SEQ ID NO: 1335861 - DNA, 15 bp, Homo sapiens
ctttgtggtcaaagc

SEQ ID NO: 1335862 - DNA, 15 bp, Homo sapiens
tctttgtggtcaaag

SEQ ID NO: 1335863 - DNA, 15 bp, Homo sapiens
atctttgtggtcaaa

SEQ ID NO: 1335864 - DNA, 15 bp, Homo sapiens
tatctttgtggtcaa

SEQ ID NO: 1335865 - DNA, 15 bp, Homo sapiens
atatctttgtggtca

SEQ ID NO: 1335866 - DNA, 15 bp, Homo sapiens
catatctttgtggtc

SEQ ID NO: 1335867 - DNA, 15 bp, Homo sapiens
gcatatctttgtggt

SEQ ID NO: 1335868 - DNA, 15 bp, Homo sapiens
agcatatctttgtgg

SEQ ID NO: 1335869 - DNA, 15 bp, Homo sapiens
tagcatatctttgtg

SEQ ID NO: 1335870 - DNA, 15 bp, Homo sapiens
atagcatatctttgt

SEQ ID NO: 1335871 - DNA, 15 bp, Homo sapiens
gatagcatatctttg

SEQ ID NO: 1335872 - DNA, 15 bp, Homo sapiens
agatagcatatcttt

SEQ ID NO: 1335873 - DNA, 15 bp, Homo sapiens
aagatagcatatctt

SEQ ID NO: 1335874 - DNA, 15 bp, Homo sapiens
taagatagcatatct

SEQ ID NO: 1335875 - DNA, 15 bp, Homo sapiens
gtaagatagcatatc

SEQ ID NO: 1335876 - DNA, 15 bp, Homo sapiens
agtaagatagcatat

SEQ ID NO: 1335877 - DNA, 15 bp, Homo sapiens
aagtaagatagcata

SEQ ID NO: 1335878 - DNA, 15 bp, Homo sapiens
taagtaagatagcat

SEQ ID NO: 1335879 - DNA, 15 bp, Homo sapiens
ttaagtaagatagca

SEQ ID NO: 1335880 - DNA, 15 bp, Homo sapiens
gttaagtaagatagc

SEQ ID NO: 1335881 - DNA, 15 bp, Homo sapiens
tgttaagtaagatag

SEQ ID NO: 1335882 - DNA, 15 bp, Homo sapiens
ttgttaagtaagata

SEQ ID NO: 1335883 - DNA, 15 bp, Homo sapiens
attgttaagtaagat

SEQ ID NO: 1335884 - DNA, 15 bp, Homo sapiens
aattgttaagtaaga

SEQ ID NO: 1335885 - DNA, 15 bp, Homo sapiens
aaattgttaagtaag

SEQ ID NO: 1335886 - DNA, 15 bp, Homo sapiens
taaattgttaagtaa

SEQ ID NO: 1335887 - DNA, 15 bp, Homo sapiens
gtaaattgttaagta

SEQ ID NO: 1335888 - DNA, 15 bp, Homo sapiens
tgtaaattgttaagt

SEQ ID NO: 1335889 - DNA, 15 bp, Homo sapiens
gtgtaaattgttaag

SEQ ID NO: 1335890 - DNA, 15 bp, Homo sapiens
ggtgtaaattgttaa

SEQ ID NO: 1335891 - DNA, 15 bp, Homo sapiens
tggtgtaaattgtta

SEQ ID NO: 1335892 - DNA, 15 bp, Homo sapiens
ttggtgtaaattgtt

SEQ ID NO: 1335893 - DNA, 15 bp, Homo sapiens
tttggtgtaaattgt

SEQ ID NO: 1335894 - DNA, 15 bp, Homo sapiens
ctttggtgtaaattg

SEQ ID NO: 1335895 - DNA, 15 bp, Homo sapiens
actttggtgtaaatt

SEQ ID NO: 1335896 - DNA, 15 bp, Homo sapiens
aactttggtgtaaat

SEQ ID NO: 1335897 - DNA, 15 bp, Homo sapiens
aaactttggtgtaaa

SEQ ID NO: 1335898 - DNA, 15 bp, Homo sapiens
aaaactttggtgtaa

SEQ ID NO: 1335899 - DNA, 15 bp, Homo sapiens
taaaactttggtgta

SEQ ID NO: 1335900 - DNA, 15 bp, Homo sapiens
ataaaactttggtgt

SEQ ID NO: 1335901 - DNA, 15 bp, Homo sapiens
gataaaactttggtg

SEQ ID NO: 1335902 - DNA, 15 bp, Homo sapiens
agataaaactttggt

SEQ ID NO: 1335903 - DNA, 15 bp, Homo sapiens
cagataaaactttgg

SEQ ID NO: 1335904 - DNA, 15 bp, Homo sapiens
acagataaaactttg

SEQ ID NO: 1335905 - DNA, 15 bp, Homo sapiens
aacagataaaacttt

SEQ ID NO: 1335906 - DNA, 15 bp, Homo sapiens
aaacagataaaactt

SEQ ID NO: 1335907 - DNA, 15 bp, Homo sapiens
aaaacagataaaact

SEQ ID NO: 1335908 - DNA, 15 bp, Homo sapiens
caaaacagataaaac

SEQ ID NO: 1335909 - DNA, 15 bp, Homo sapiens
gcaaaacagataaaa

SEQ ID NO: 1335910 - DNA, 15 bp, Homo sapiens
ggcaaaacagataaa

SEQ ID NO: 1335911 - DNA, 15 bp, Homo sapiens
aggcaaaacagataa

SEQ ID NO: 1335912 - DNA, 15 bp, Homo sapiens
gaggcaaaacagata

SEQ ID NO: 1335913 - DNA, 15 bp, Homo sapiens
tgaggcaaaacagat

SEQ ID NO: 1335914 - DNA, 15 bp, Homo sapiens
atgaggcaaaacaga

SEQ ID NO: 1335915 - DNA, 15 bp, Homo sapiens
tatgaggcaaaacag

SEQ ID NO: 1335916 - DNA, 15 bp, Homo sapiens
ctatgaggcaaaaca

SEQ ID NO: 1335917 - DNA, 15 bp, Homo sapiens
cctatgaggcaaaac

SEQ ID NO: 1335918 - DNA, 15 bp, Homo sapiens
tcctatgaggcaaaa

SEQ ID NO: 1335919 - DNA, 15 bp, Homo sapiens
atcctatgaggcaaa

SEQ ID NO: 1335920 - DNA, 15 bp, Homo sapiens
catcctatgaggcaa

SEQ ID NO: 1335921 - DNA, 15 bp, Homo sapiens
gcatcctatgaggca

SEQ ID NO: 1335922 - DNA, 15 bp, Homo sapiens
tgcatcctatgaggc

SEQ ID NO: 1335923 - DNA, 15 bp, Homo sapiens
ttgcatcctatgagg

SEQ ID NO: 1335924 - DNA, 15 bp, Homo sapiens
gttgcatcctatgag

SEQ ID NO: 1335925 - DNA, 15 bp, Homo sapiens
ggttgcatcctatga

SEQ ID NO: 1335926 - DNA, 15 bp, Homo sapiens
tggttgcatcctatg

SEQ ID NO: 1335927 - DNA, 15 bp, Homo sapiens
atggttgcatcctat

SEQ ID NO: 1335928 - DNA, 15 bp, Homo sapiens
aatggttgcatccta

SEQ ID NO: 1335929 - DNA, 15 bp, Homo sapiens
gaatggttgcatcct

SEQ ID NO: 1335930 - DNA, 15 bp, Homo sapiens
tgaatggttgcatcc

SEQ ID NO: 1335931 - DNA, 15 bp, Homo sapiens
ttgaatggttgcatc

SEQ ID NO: 1335932 - DNA, 15 bp, Homo sapiens
gttgaatggttgcat

SEQ ID NO: 1335933 - DNA, 15 bp, Homo sapiens
tgttgaatggttgca

SEQ ID NO: 1335934 - DNA, 15 bp, Homo sapiens
ttgttgaatggttgc

SEQ ID NO: 1335935 - DNA, 15 bp, Homo sapiens
attgttgaatggttg

SEQ ID NO: 1335936 - DNA, 15 bp, Homo sapiens
cattgttgaatggtt

SEQ ID NO: 1335937 - DNA, 15 bp, Homo sapiens
gcattgttgaatggt

SEQ ID NO: 1335938 - DNA, 15 bp, Homo sapiens
agcattgttgaatgg

SEQ ID NO: 1335939 - DNA, 15 bp, Homo sapiens
aagcattgttgaatg

SEQ ID NO: 1335940 - DNA, 15 bp, Homo sapiens
aaagcattgttgaat

SEQ ID NO: 1335941 - DNA, 15 bp, Homo sapiens
caaagcattgttgaa

SEQ ID NO: 1335942 - DNA, 15 bp, Homo sapiens
tcaaagcattgttga

SEQ ID NO: 1335943 - DNA, 15 bp, Homo sapiens
ttcaaagcattgttg

SEQ ID NO: 1335944 - DNA, 15 bp, Homo sapiens
tttcaaagcattgtt

SEQ ID NO: 1335945 - DNA, 15 bp, Homo sapiens
atttcaaagcattgt

SEQ ID NO: 1335946 - DNA, 15 bp, Homo sapiens
tatttcaaagcattg

SEQ ID NO: 1335947 - DNA, 15 bp, Homo sapiens
ctatttcaaagcatt

SEQ ID NO: 1335948 - DNA, 15 bp, Homo sapiens
gctatttcaaagcat

SEQ ID NO: 1335949 - DNA, 15 bp, Homo sapiens
agctatttcaaagca

SEQ ID NO: 1335950 - DNA, 15 bp, Homo sapiens
tagctatttcaaagc

SEQ ID NO: 1335951 - DNA, 15 bp, Homo sapiens
atagctatttcaaag

SEQ ID NO: 1335952 - DNA, 15 bp, Homo sapiens
aatagctatttcaaa

SEQ ID NO: 1335953 - DNA, 15 bp, Homo sapiens
taatagctatttcaa

SEQ ID NO: 1335954 - DNA, 15 bp, Homo sapiens
ataatagctatttca

SEQ ID NO: 1335955 - DNA, 15 bp, Homo sapiens
tataatagctatttc

SEQ ID NO: 1335956 - DNA, 15 bp, Homo sapiens
atataatagctattt

SEQ ID NO: 1335957 - DNA, 15 bp, Homo sapiens
catataatagctatt

SEQ ID NO: 1335958 - DNA, 15 bp, Homo sapiens
acatataatagctat

SEQ ID NO: 1335959 - DNA, 15 bp, Homo sapiens
aacatataatagcta

SEQ ID NO: 1335960 - DNA, 15 bp, Homo sapiens
gaacatataatagct

SEQ ID NO: 1335961 - DNA, 15 bp, Homo sapiens
tgaacatataatagc

SEQ ID NO: 1335962 - DNA, 15 bp, Homo sapiens
atgaacatataatag

SEQ ID NO: 1335963 - DNA, 15 bp, Homo sapiens
gatgaacatataata

SEQ ID NO: 1335964 - DNA, 15 bp, Homo sapiens
tgatgaacatataat

SEQ ID NO: 1335965 - DNA, 15 bp, Homo sapiens
gtgatgaacatataa

SEQ ID NO: 1335966 - DNA, 15 bp, Homo sapiens
agtgatgaacatata

SEQ ID NO: 1335967 - DNA, 15 bp, Homo sapiens
aagtgatgaacatat

SEQ ID NO: 1335968 - DNA, 15 bp, Homo sapiens
aaagtgatgaacata

SEQ ID NO: 1335969 - DNA, 15 bp, Homo sapiens
caaagtgatgaacat

SEQ ID NO: 1335970 - DNA, 15 bp, Homo sapiens
ccaaagtgatgaaca

SEQ ID NO: 1335971 - DNA, 15 bp, Homo sapiens
cccaaagtgatgaac

SEQ ID NO: 1335972 - DNA, 15 bp, Homo sapiens
tcccaaagtgatgaa

SEQ ID NO: 1335973 - DNA, 15 bp, Homo sapiens
atcccaaagtgatga

SEQ ID NO: 1335974 - DNA, 15 bp, Homo sapiens
aatcccaaagtgatg

SEQ ID NO: 1335975 - DNA, 15 bp, Homo sapiens
caatcccaaagtgat

SEQ ID NO: 1335976 - DNA, 15 bp, Homo sapiens
ccaatcccaaagtga

SEQ ID NO: 1335977 - DNA, 15 bp, Homo sapiens
cccaatcccaaagtg

SEQ ID NO: 1335978 - DNA, 15 bp, Homo sapiens
tcccaatcccaaagt

SEQ ID NO: 1335979 - DNA, 15 bp, Homo sapiens
ttcccaatcccaaag

SEQ ID NO: 1335980 - DNA, 15 bp, Homo sapiens
tttcccaatcccaaa

SEQ ID NO: 1335981 - DNA, 15 bp, Homo sapiens
gtttcccaatcccaa

SEQ ID NO: 1335982 - DNA, 15 bp, Homo sapiens
agtttcccaatccca

SEQ ID NO: 1335983 - DNA, 15 bp, Homo sapiens
cagtttcccaatccc

SEQ ID NO: 1335984 - DNA, 15 bp, Homo sapiens
acagtttcccaatcc

SEQ ID NO: 1335985 - DNA, 15 bp, Homo sapiens
cacagtttcccaatc

SEQ ID NO: 1335986 - DNA, 15 bp, Homo sapiens
acacagtttcccaat

SEQ ID NO: 1335987 - DNA, 15 bp, Homo sapiens
aacacagtttcccaa

SEQ ID NO: 1335988 - DNA, 15 bp, Homo sapiens
aaacacagtttccca

SEQ ID NO: 1335989 - DNA, 15 bp, Homo sapiens
gaaacacagtttccc

SEQ ID NO: 1335990 - DNA, 15 bp, Homo sapiens
tgaaacacagtttcc

SEQ ID NO: 1335991 - DNA, 15 bp, Homo sapiens
ctgaaacacagtttc

SEQ ID NO: 1335992 - DNA, 15 bp, Homo sapiens
tctgaaacacagttt

SEQ ID NO: 1335993 - DNA, 15 bp, Homo sapiens
gtctgaaacacagtt

SEQ ID NO: 1335994 - DNA, 15 bp, Homo sapiens
agtctgaaacacagt

SEQ ID NO: 1335995 - DNA, 15 bp, Homo sapiens
aagtctgaaacacag

SEQ ID NO: 1335996 - DNA, 15 bp, Homo sapiens
taagtctgaaacaca

SEQ ID NO: 1335997 - DNA, 15 bp, Homo sapiens
ttaagtctgaaacac

SEQ ID NO: 1335998 - DNA, 15 bp, Homo sapiens
tttaagtctgaaaca

SEQ ID NO: 1335999 - DNA, 15 bp, Homo sapiens
ctttaagtctgaaac

SEQ ID NO: 1336000 - DNA, 15 bp, Homo sapiens
actttaagtctgaaa

SEQ ID NO: 1336001 - DNA, 15 bp, Homo sapiens
cactttaagtctgaa

SEQ ID NO: 1336002 - DNA, 15 bp, Homo sapiens
ccactttaagtctga

SEQ ID NO: 1336003 - DNA, 15 bp, Homo sapiens
accactttaagtctg

SEQ ID NO: 1336004 - DNA, 15 bp, Homo sapiens
aaccactttaagtct

SEQ ID NO: 1336005 - DNA, 15 bp, Homo sapiens
aaaccactttaagtc

SEQ ID NO: 1336006 - DNA, 15 bp, Homo sapiens
aaaaccactttaagt

SEQ ID NO: 1336007 - DNA, 15 bp, Homo sapiens
gaaaaccactttaag

SEQ ID NO: 1336008 - DNA, 15 bp, Homo sapiens
ggaaaaccactttaa

SEQ ID NO: 1336009 - DNA, 15 bp, Homo sapiens
gggaaaaccacttta

SEQ ID NO: 1336010 - DNA, 15 bp, Homo sapiens
tgggaaaaccacttt

SEQ ID NO: 1336011 - DNA, 15 bp, Homo sapiens
ttgggaaaaccactt

SEQ ID NO: 1336012 - DNA, 15 bp, Homo sapiens
cttgggaaaaccact

SEQ ID NO: 1336013 - DNA, 15 bp, Homo sapiens
tcttgggaaaaccac

SEQ ID NO: 1336014 - DNA, 15 bp, Homo sapiens
ttcttgggaaaacca

SEQ ID NO: 1336015 - DNA, 15 bp, Homo sapiens
tttcttgggaaaacc

SEQ ID NO: 1336016 - DNA, 15 bp, Homo sapiens
ctttcttgggaaaac

SEQ ID NO: 1336017 - DNA, 15 bp, Homo sapiens
gctttcttgggaaaa

SEQ ID NO: 1336018 - DNA, 15 bp, Homo sapiens
tgctttcttgggaaa

SEQ ID NO: 1336019 - DNA, 15 bp, Homo sapiens
ttgctttcttgggaa

SEQ ID NO: 1336020 - DNA, 15 bp, Homo sapiens
cttgctttcttggga

SEQ ID NO: 1336021 - DNA, 15 bp, Homo sapiens
ccttgctttcttggg

SEQ ID NO: 1336022 - DNA, 15 bp, Homo sapiens
gccttgctttcttgg

SEQ ID NO: 1336023 - DNA, 15 bp, Homo sapiens
agccttgctttcttg

SEQ ID NO: 1336024 - DNA, 15 bp, Homo sapiens
tagccttgctttctt

SEQ ID NO: 1336025 - DNA, 15 bp, Homo sapiens
ctagccttgctttct

SEQ ID NO: 1336026 - DNA, 15 bp, Homo sapiens
gctagccttgctttc

SEQ ID NO: 1336027 - DNA, 15 bp, Homo sapiens
ggctagccttgcttt

SEQ ID NO: 1336028 - DNA, 15 bp, Homo sapiens
tggctagccttgctt

SEQ ID NO: 1336029 - DNA, 15 bp, Homo sapiens
gtggctagccttgct

SEQ ID NO: 1336030 - DNA, 15 bp, Homo sapiens
tgtggctagccttgc

SEQ ID NO: 1336031 - DNA, 15 bp, Homo sapiens
atgtggctagccttg

SEQ ID NO: 1336032 - DNA, 15 bp, Homo sapiens
aatgtggctagcctt

SEQ ID NO: 1336033 - DNA, 15 bp, Homo sapiens
gaatgtggctagcct

SEQ ID NO: 1336034 - DNA, 15 bp, Homo sapiens
agaatgtggctagcc

SEQ ID NO: 1336035 - DNA, 15 bp, Homo sapiens
cagaatgtggctagc

SEQ ID NO: 1336036 - DNA, 15 bp, Homo sapiens
tcagaatgtggctag

SEQ ID NO: 1336037 - DNA, 15 bp, Homo sapiens
atcagaatgtggcta

SEQ ID NO: 1336038 - DNA, 15 bp, Homo sapiens
catcagaatgtggct

SEQ ID NO: 1336039 - DNA, 15 bp, Homo sapiens
acatcagaatgtggc

SEQ ID NO: 1336040 - DNA, 15 bp, Homo sapiens
tacatcagaatgtgg

SEQ ID NO: 1336041 - DNA, 15 bp, Homo sapiens
ttacatcagaatgtg

SEQ ID NO: 1336042 - DNA, 15 bp, Homo sapiens
tttacatcagaatgt

SEQ ID NO: 1336043 - DNA, 15 bp, Homo sapiens
gtttacatcagaatg

SEQ ID NO: 1336044 - DNA, 15 bp, Homo sapiens
tgtttacatcagaat

SEQ ID NO: 1336045 - DNA, 15 bp, Homo sapiens
atgtttacatcagaa

SEQ ID NO: 1336046 - DNA, 15 bp, Homo sapiens
aatgtttacatcaga

SEQ ID NO: 1336047 - DNA, 15 bp, Homo sapiens
aaatgtttacatcag

SEQ ID NO: 1336048 - DNA, 15 bp, Homo sapiens
aaaatgtttacatca

SEQ ID NO: 1336049 - DNA, 15 bp, Homo sapiens
caaaatgtttacatc

SEQ ID NO: 1336050 - DNA, 15 bp, Homo sapiens
acaaaatgtttacat

SEQ ID NO: 1336051 - DNA, 15 bp, Homo sapiens
tacaaaatgtttaca

SEQ ID NO: 1336052 - DNA, 15 bp, Homo sapiens
gtacaaaatgtttac

SEQ ID NO: 1336053 - DNA, 15 bp, Homo sapiens
agtacaaaatgttta

SEQ ID NO: 1336054 - DNA, 15 bp, Homo sapiens
cagtacaaaatgttt

SEQ ID NO: 1336055 - DNA, 15 bp, Homo sapiens
acagtacaaaatgtt

SEQ ID NO: 1336056 - DNA, 15 bp, Homo sapiens
aacagtacaaaatgt

SEQ ID NO: 1336057 - DNA, 15 bp, Homo sapiens
aaacagtacaaaatg

SEQ ID NO: 1336058 - DNA, 15 bp, Homo sapiens
gaaacagtacaaaat

SEQ ID NO: 1336059 - DNA, 15 bp, Homo sapiens
ggaaacagtacaaaa

SEQ ID NO: 1336060 - DNA, 15 bp, Homo sapiens
tggaaacagtacaaa

SEQ ID NO: 1336061 - DNA, 15 bp, Homo sapiens
gtggaaacagtacaa

SEQ ID NO: 1336062 - DNA, 15 bp, Homo sapiens
cgtggaaacagtaca

SEQ ID NO: 1336063 - DNA, 15 bp, Homo sapiens
tcgtggaaacagtac

SEQ ID NO: 1336064 - DNA, 15 bp, Homo sapiens
atcgtggaaacagta

SEQ ID NO: 1336065 - DNA, 15 bp, Homo sapiens
catcgtggaaacagt

SEQ ID NO: 1336066 - DNA, 15 bp, Homo sapiens
acatcgtggaaacag

SEQ ID NO: 1336067 - DNA, 15 bp, Homo sapiens
gacatcgtggaaaca

SEQ ID NO: 1336068 - DNA, 15 bp, Homo sapiens
tgacatcgtggaaac

SEQ ID NO: 1336069 - DNA, 15 bp, Homo sapiens
gtgacatcgtggaaa

SEQ ID NO: 1336070 - DNA, 15 bp, Homo sapiens
tgtgacatcgtggaa

SEQ ID NO: 1336071 - DNA, 15 bp, Homo sapiens
ctgtgacatcgtgga

SEQ ID NO: 1336072 - DNA, 15 bp, Homo sapiens
tctgtgacatcgtgg

SEQ ID NO: 1336073 - DNA, 15 bp, Homo sapiens
ctctgtgacatcgtg

SEQ ID NO: 1336074 - DNA, 15 bp, Homo sapiens
cctctgtgacatcgt

SEQ ID NO: 1336075 - DNA, 15 bp, Homo sapiens
gcctctgtgacatcg

SEQ ID NO: 1336076 - DNA, 15 bp, Homo sapiens
agcctctgtgacatc

SEQ ID NO: 1336077 - DNA, 15 bp, Homo sapiens
tagcctctgtgacat

SEQ ID NO: 1336078 - DNA, 15 bp, Homo sapiens
ttagcctctgtgaca

SEQ ID NO: 1336079 - DNA, 15 bp, Homo sapiens
attagcctctgtgac

SEQ ID NO: 1336080 - DNA, 15 bp, Homo sapiens
tattagcctctgtga

SEQ ID NO: 1336081 - DNA, 15 bp, Homo sapiens
atattagcctctgtg

SEQ ID NO: 1336082 - DNA, 15 bp, Homo sapiens
aatattagcctctgt

SEQ ID NO: 1336083 - DNA, 15 bp, Homo sapiens
aaatattagcctctg

SEQ ID NO: 1336084 - DNA, 15 bp, Homo sapiens
aaaatattagcctct

SEQ ID NO: 1336085 - DNA, 15 bp, Homo sapiens
gaaaatattagcctc

SEQ ID NO: 1336086 - DNA, 15 bp, Homo sapiens
agaaaatattagcct

SEQ ID NO: 1336087 - DNA, 15 bp, Homo sapiens
aagaaaatattagcc

SEQ ID NO: 1336088 - DNA, 15 bp, Homo sapiens
gaagaaaatattagc

SEQ ID NO: 1336089 - DNA, 15 bp, Homo sapiens
ggaagaaaatattag

SEQ ID NO: 1336090 - DNA, 15 bp, Homo sapiens
tggaagaaaatatta

SEQ ID NO: 1336091 - DNA, 15 bp, Homo sapiens
gtggaagaaaatatt

SEQ ID NO: 1336092 - DNA, 15 bp, Homo sapiens
tgtggaagaaaatat

SEQ ID NO: 1336093 - DNA, 15 bp, Homo sapiens
ttgtggaagaaaata

SEQ ID NO: 1336094 - DNA, 15 bp, Homo sapiens
tttgtggaagaaaat

SEQ ID NO: 1336095 - DNA, 15 bp, Homo sapiens
atttgtggaagaaaa

SEQ ID NO: 1336096 - DNA, 15 bp, Homo sapiens
aatttgtggaagaaa

SEQ ID NO: 1336097 - DNA, 15 bp, Homo sapiens
taatttgtggaagaa

SEQ ID NO: 1336098 - DNA, 15 bp, Homo sapiens
ttaatttgtggaaga

SEQ ID NO: 1336099 - DNA, 15 bp, Homo sapiens
gttaatttgtggaag

SEQ ID NO: 1336100 - DNA, 15 bp, Homo sapiens
agttaatttgtggaa

SEQ ID NO: 1336101 - DNA, 15 bp, Homo sapiens
tagttaatttgtgga

SEQ ID NO: 1336102 - DNA, 15 bp, Homo sapiens
atagttaatttgtgg

SEQ ID NO: 1336103 - DNA, 15 bp, Homo sapiens
tatagttaatttgtg

SEQ ID NO: 1336104 - DNA, 15 bp, Homo sapiens
ttatagttaatttgt

SEQ ID NO: 1336105 - DNA, 15 bp, Homo sapiens
tttatagttaatttg

SEQ ID NO: 1336106 - DNA, 15 bp, Homo sapiens
gtttatagttaattt

SEQ ID NO: 1336107 - DNA, 15 bp, Homo sapiens
agtttatagttaatt

SEQ ID NO: 1336108 - DNA, 15 bp, Homo sapiens
aagtttatagttaat

SEQ ID NO: 1336109 - DNA, 15 bp, Homo sapiens
aaagtttatagttaa

SEQ ID NO: 1336110 - DNA, 15 bp, Homo sapiens
aaaagtttatagtta

SEQ ID NO: 1336111 - DNA, 15 bp, Homo sapiens
taaaagtttatagtt

SEQ ID NO: 1336112 - DNA, 15 bp, Homo sapiens
ttaaaagtttatagt

SEQ ID NO: 1336113 - DNA, 15 bp, Homo sapiens
tttaaaagtttatag

SEQ ID NO: 1336114 - DNA, 15 bp, Homo sapiens
ttttaaaagtttata

SEQ ID NO: 1336115 - DNA, 15 bp, Homo sapiens
gttttaaaagtttat

SEQ ID NO: 1336116 - DNA, 15 bp, Homo sapiens
tgttttaaaagttta

SEQ ID NO: 1336117 - DNA, 15 bp, Homo sapiens
gtgttttaaaagttt

SEQ ID NO: 1336118 - DNA, 15 bp, Homo sapiens
agtgttttaaaagtt

SEQ ID NO: 1336119 - DNA, 15 bp, Homo sapiens
cagtgttttaaaagt

SEQ ID NO: 1336120 - DNA, 15 bp, Homo sapiens
tcagtgttttaaaag

SEQ ID NO: 1336121 - DNA, 15 bp, Homo sapiens
ttcagtgttttaaaa

SEQ ID NO: 1336122 - DNA, 15 bp, Homo sapiens
attcagtgttttaaa

SEQ ID NO: 1336123 - DNA, 15 bp, Homo sapiens
aattcagtgttttaa

SEQ ID NO: 1336124 - DNA, 15 bp, Homo sapiens
taattcagtgtttta

SEQ ID NO: 1336125 - DNA, 15 bp, Homo sapiens
gtaattcagtgtttt

SEQ ID NO: 1336126 - DNA, 15 bp, Homo sapiens
agtaattcagtgttt

SEQ ID NO: 1336127 - DNA, 15 bp, Homo sapiens
tagtaattcagtgtt

SEQ ID NO: 1336128 - DNA, 15 bp, Homo sapiens
atagtaattcagtgt

SEQ ID NO: 1336129 - DNA, 15 bp, Homo sapiens
catagtaattcagtg

SEQ ID NO: 1336130 - DNA, 15 bp, Homo sapiens
acatagtaattcagt

SEQ ID NO: 1336131 - DNA, 15 bp, Homo sapiens
cacatagtaattcag

SEQ ID NO: 1336132 - DNA, 15 bp, Homo sapiens
acacatagtaattca

SEQ ID NO: 1336133 - DNA, 15 bp, Homo sapiens
tacacatagtaattc

SEQ ID NO: 1336134 - DNA, 15 bp, Homo sapiens
gtacacatagtaatt

SEQ ID NO: 1336135 - DNA, 15 bp, Homo sapiens
agtacacatagtaat

SEQ ID NO: 1336136 - DNA, 15 bp, Homo sapiens
aagtacacatagtaa

SEQ ID NO: 1336137 - DNA, 15 bp, Homo sapiens
aaagtacacatagta

SEQ ID NO: 1336138 - DNA, 15 bp, Homo sapiens
taaagtacacatagt

SEQ ID NO: 1336139 - DNA, 15 bp, Homo sapiens
ttaaagtacacatag

SEQ ID NO: 1336140 - DNA, 15 bp, Homo sapiens
tttaaagtacacata

SEQ ID NO: 1336141 - DNA, 15 bp, Homo sapiens
atttaaagtacacat

SEQ ID NO: 1336142 - DNA, 15 bp, Homo sapiens
tatttaaagtacaca

SEQ ID NO: 1336143 - DNA, 15 bp, Homo sapiens
atatttaaagtacac

SEQ ID NO: 1336144 - DNA, 15 bp, Homo sapiens
tatatttaaagtaca

SEQ ID NO: 1336145 - DNA, 15 bp, Homo sapiens
ttatatttaaagtac

SEQ ID NO: 1336146 - DNA, 15 bp, Homo sapiens
attatatttaaagta

SEQ ID NO: 1336147 - DNA, 15 bp, Homo sapiens
gattatatttaaagt

SEQ ID NO: 1336148 - DNA, 15 bp, Homo sapiens
agattatatttaaag

SEQ ID NO: 1336149 - DNA, 15 bp, Homo sapiens
gagattatatttaaa

SEQ ID NO: 1336150 - DNA, 15 bp, Homo sapiens
agagattatatttaa

SEQ ID NO: 1336151 - DNA, 15 bp, Homo sapiens
tagagattatattta

SEQ ID NO: 1336152 - DNA, 15 bp, Homo sapiens
ttagagattatattt

SEQ ID NO: 1336153 - DNA, 15 bp, Homo sapiens
attagagattatatt

SEQ ID NO: 1336154 - DNA, 15 bp, Homo sapiens
aattagagattatat

SEQ ID NO: 1336155 - DNA, 15 bp, Homo sapiens
aaattagagattata

SEQ ID NO: 1336156 - DNA, 15 bp, Homo sapiens
taaattagagattat

SEQ ID NO: 1336157 - DNA, 15 bp, Homo sapiens
ataaattagagatta

SEQ ID NO: 1336158 - DNA, 15 bp, Homo sapiens
aataaattagagatt

SEQ ID NO: 1336159 - DNA, 15 bp, Homo sapiens
taataaattagagat

SEQ ID NO: 1336160 - DNA, 15 bp, Homo sapiens
gtaataaattagaga

SEQ ID NO: 1336161 - DNA, 15 bp, Homo sapiens
tgtaataaattagag

SEQ ID NO: 1336162 - DNA, 15 bp, Homo sapiens
ttgtaataaattaga

SEQ ID NO: 1336163 - DNA, 15 bp, Homo sapiens
attgtaataaattag

SEQ ID NO: 1336164 - DNA, 15 bp, Homo sapiens
aattgtaataaatta

SEQ ID NO: 1336165 - DNA, 15 bp, Homo sapiens
aaattgtaataaatt

SEQ ID NO: 1336166 - DNA, 15 bp, Homo sapiens
aaaattgtaataaat

SEQ ID NO: 1336167 - DNA, 15 bp, Homo sapiens
taaaattgtaataaa

SEQ ID NO: 1336168 - DNA, 15 bp, Homo sapiens
ataaaattgtaataa

SEQ ID NO: 1336169 - DNA, 15 bp, Homo sapiens
aataaaattgtaata

SEQ ID NO: 1336170 - DNA, 15 bp, Homo sapiens
gaataaaattgtaat

SEQ ID NO: 1336171 - DNA, 15 bp, Homo sapiens
agaataaaattgtaa

SEQ ID NO: 1336172 - DNA, 15 bp, Homo sapiens
aagaataaaattgta

SEQ ID NO: 1336173 - DNA, 15 bp, Homo sapiens
aaagaataaaattgt

SEQ ID NO: 1336174 - DNA, 15 bp, Homo sapiens
gaaagaataaaattg

SEQ ID NO: 1336175 - DNA, 15 bp, Homo sapiens
agaaagaataaaatt

SEQ ID NO: 1336176 - DNA, 15 bp, Homo sapiens
tagaaagaataaaat

SEQ ID NO: 1336177 - DNA, 15 bp, Homo sapiens
gtagaaagaataaaa

SEQ ID NO: 1336178 - DNA, 15 bp, Homo sapiens
agtagaaagaataaa

SEQ ID NO: 1336179 - DNA, 15 bp, Homo sapiens
aagtagaaagaataa

SEQ ID NO: 1336180 - DNA, 15 bp, Homo sapiens
aaagtagaaagaata

SEQ ID NO: 1336181 - DNA, 15 bp, Homo sapiens
aaaagtagaaagaat

SEQ ID NO: 1336182 - DNA, 15 bp, Homo sapiens
aaaaagtagaaagaa

SEQ ID NO: 1336183 - DNA, 15 bp, Homo sapiens
taaaaagtagaaaga

SEQ ID NO: 1336184 - DNA, 15 bp, Homo sapiens
ctaaaaagtagaaag

SEQ ID NO: 1336185 - DNA, 15 bp, Homo sapiens
actaaaaagtagaaa

SEQ ID NO: 1336186 - DNA, 15 bp, Homo sapiens
aactaaaaagtagaa

SEQ ID NO: 1336187 - DNA, 15 bp, Homo sapiens
caactaaaaagtaga

SEQ ID NO: 1336188 - DNA, 15 bp, Homo sapiens
gcaactaaaaagtag

SEQ ID NO: 1336189 - DNA, 15 bp, Homo sapiens
agcaactaaaaagta

SEQ ID NO: 1336190 - DNA, 15 bp, Homo sapiens
gagcaactaaaaagt

SEQ ID NO: 1336191 - DNA, 15 bp, Homo sapiens
agagcaactaaaaag

SEQ ID NO: 1336192 - DNA, 15 bp, Homo sapiens
tagagcaactaaaaa

SEQ ID NO: 1336193 - DNA, 15 bp, Homo sapiens
atagagcaactaaaa

SEQ ID NO: 1336194 - DNA, 15 bp, Homo sapiens
tatagagcaactaaa

SEQ ID NO: 1336195 - DNA, 15 bp, Homo sapiens
atatagagcaactaa

SEQ ID NO: 1336196 - DNA, 15 bp, Homo sapiens
tatatagagcaacta

SEQ ID NO: 1336197 - DNA, 15 bp, Homo sapiens
gtatatagagcaact

SEQ ID NO: 1336198 - DNA, 15 bp, Homo sapiens
ggtatatagagcaac

SEQ ID NO: 1336199 - DNA, 15 bp, Homo sapiens
aggtatatagagcaa

SEQ ID NO: 1336200 - DNA, 15 bp, Homo sapiens
taggtatatagagca

SEQ ID NO: 1336201 - DNA, 15 bp, Homo sapiens
ataggtatatagagc

SEQ ID NO: 1336202 - DNA, 15 bp, Homo sapiens
cataggtatatagag

SEQ ID NO: 1336203 - DNA, 15 bp, Homo sapiens
acataggtatataga

SEQ ID NO: 1336204 - DNA, 15 bp, Homo sapiens
cacataggtatatag

SEQ ID NO: 1336205 - DNA, 15 bp, Homo sapiens
ccacataggtatata

SEQ ID NO: 1336206 - DNA, 15 bp, Homo sapiens
tccacataggtatat

SEQ ID NO: 1336207 - DNA, 15 bp, Homo sapiens
atccacataggtata

SEQ ID NO: 1336208 - DNA, 15 bp, Homo sapiens
catccacataggtat

SEQ ID NO: 1336209 - DNA, 15 bp, Homo sapiens
acatccacataggta

SEQ ID NO: 1336210 - DNA, 15 bp, Homo sapiens
cacatccacataggt

SEQ ID NO: 1336211 - DNA, 15 bp, Homo sapiens
acacatccacatagg

SEQ ID NO: 1336212 - DNA, 15 bp, Homo sapiens
tacacatccacatag

SEQ ID NO: 1336213 - DNA, 15 bp, Homo sapiens
ctacacatccacata

SEQ ID NO: 1336214 - DNA, 15 bp, Homo sapiens
gctacacatccacat

SEQ ID NO: 1336215 - DNA, 15 bp, Homo sapiens
tgctacacatccaca

SEQ ID NO: 1336216 - DNA, 15 bp, Homo sapiens
ctgctacacatccac

SEQ ID NO: 1336217 - DNA, 15 bp, Homo sapiens
tctgctacacatcca

SEQ ID NO: 1336218 - DNA, 15 bp, Homo sapiens
ctctgctacacatcc

SEQ ID NO: 1336219 - DNA, 15 bp, Homo sapiens
actctgctacacatc

SEQ ID NO: 1336220 - DNA, 15 bp, Homo sapiens
gactctgctacacat

SEQ ID NO: 1336221 - DNA, 15 bp, Homo sapiens
agactctgctacaca

SEQ ID NO: 1336222 - DNA, 15 bp, Homo sapiens
aagactctgctacac

SEQ ID NO: 1336223 - DNA, 15 bp, Homo sapiens
aaagactctgctaca

SEQ ID NO: 1336224 - DNA, 15 bp, Homo sapiens
aaaagactctgctac

SEQ ID NO: 1336225 - DNA, 15 bp, Homo sapiens
caaaagactctgcta

SEQ ID NO: 1336226 - DNA, 15 bp, Homo sapiens
acaaaagactctgct

SEQ ID NO: 1336227 - DNA, 15 bp, Homo sapiens
cacaaaagactctgc

SEQ ID NO: 1336228 - DNA, 15 bp, Homo sapiens
tcacaaaagactctg

SEQ ID NO: 1336229 - DNA, 15 bp, Homo sapiens
atcacaaaagactct

SEQ ID NO: 1336230 - DNA, 15 bp, Homo sapiens
aatcacaaaagactc

SEQ ID NO: 1336231 - DNA, 15 bp, Homo sapiens
aaatcacaaaagact

SEQ ID NO: 1336232 - DNA, 15 bp, Homo sapiens
aaaatcacaaaagac

SEQ ID NO: 1336233 - DNA, 15 bp, Homo sapiens
aaaaatcacaaaaga

SEQ ID NO: 1336234 - DNA, 15 bp, Homo sapiens
aaaaaatcacaaaag

SEQ ID NO: 1336235 - DNA, 15 bp, Homo sapiens
aaaaaaaatcacaaa

SEQ ID NO: 1336236 - DNA, 15 bp, Homo sapiens
aaaaaaaaatcacaa

SEQ ID NO: 1336237 - DNA, 15 bp, Homo sapiens
aaaaaaaaaatcaca

SEQ ID NO: 1336238 - DNA, 15 bp, Homo sapiens
taaaaaaaaaatcac

SEQ ID NO: 1336239 - DNA, 15 bp, Homo sapiens
ttaaaaaaaaaatca

SEQ ID NO: 1336240 - DNA, 15 bp, Homo sapiens
attaaaaaaaaaatc

SEQ ID NO: 1336241 - DNA, 15 bp, Homo sapiens
gattaaaaaaaaaat

SEQ ID NO: 1336242 - DNA, 15 bp, Homo sapiens
tgattaaaaaaaaaa

SEQ ID NO: 1336243 - DNA, 15 bp, Homo sapiens
ttgattaaaaaaaaa

SEQ ID NO: 1336244 - DNA, 15 bp, Homo sapiens
cttgattaaaaaaaa

SEQ ID NO: 1336245 - DNA, 15 bp, Homo sapiens
gcttgattaaaaaaa

SEQ ID NO: 1336246 - DNA, 15 bp, Homo sapiens
agcttgattaaaaaa

SEQ ID NO: 1336247 - DNA, 15 bp, Homo sapiens
aagcttgattaaaaa

SEQ ID NO: 1336248 - DNA, 15 bp, Homo sapiens
gaagcttgattaaaa

SEQ ID NO: 1336249 - DNA, 15 bp, Homo sapiens
tgaagcttgattaaa

SEQ ID NO: 1336250 - DNA, 15 bp, Homo sapiens
gtgaagcttgattaa

SEQ ID NO: 1336251 - DNA, 15 bp, Homo sapiens
cgtgaagcttgatta

SEQ ID NO: 1336252 - DNA, 15 bp, Homo sapiens
ccgtgaagcttgatt

SEQ ID NO: 1336253 - DNA, 15 bp, Homo sapiens
gccgtgaagcttgat

SEQ ID NO: 1336254 - DNA, 15 bp, Homo sapiens
agccgtgaagcttga

SEQ ID NO: 1336255 - DNA, 15 bp, Homo sapiens
aagccgtgaagcttg

SEQ ID NO: 1336256 - DNA, 15 bp, Homo sapiens
aaagccgtgaagctt

SEQ ID NO: 1336257 - DNA, 15 bp, Homo sapiens
gaaagccgtgaagct

SEQ ID NO: 1336258 - DNA, 15 bp, Homo sapiens
ggaaagccgtgaagc

SEQ ID NO: 1336259 - DNA, 15 bp, Homo sapiens
gggaaagccgtgaag

SEQ ID NO: 1336260 - DNA, 15 bp, Homo sapiens
agggaaagccgtgaa

SEQ ID NO: 1336261 - DNA, 15 bp, Homo sapiens
cagggaaagccgtga

SEQ ID NO: 1336262 - DNA, 15 bp, Homo sapiens
ccagggaaagccgtg

SEQ ID NO: 1336263 - DNA, 15 bp, Homo sapiens
gccagggaaagccgt

SEQ ID NO: 1336264 - DNA, 15 bp, Homo sapiens
agccagggaaagccg

SEQ ID NO: 1336265 - DNA, 15 bp, Homo sapiens
gagccagggaaagcc

SEQ ID NO: 1336266 - DNA, 15 bp, Homo sapiens
agagccagggaaagc

SEQ ID NO: 1336267 - DNA, 15 bp, Homo sapiens
tagagccagggaaag

SEQ ID NO: 1336268 - DNA, 15 bp, Homo sapiens
atagagccagggaaa

SEQ ID NO: 1336269 - DNA, 15 bp, Homo sapiens
aatagagccagggaa

SEQ ID NO: 1336270 - DNA, 15 bp, Homo sapiens
aaatagagccaggga

SEQ ID NO: 1336271 - DNA, 15 bp, Homo sapiens
caaatagagccaggg

SEQ ID NO: 1336272 - DNA, 15 bp, Homo sapiens
tcaaatagagccagg

SEQ ID NO: 1336273 - DNA, 15 bp, Homo sapiens
gtcaaatagagccag

SEQ ID NO: 1336274 - DNA, 15 bp, Homo sapiens
tgtcaaatagagcca

SEQ ID NO: 1336275 - DNA, 15 bp, Homo sapiens
ttgtcaaatagagcc

SEQ ID NO: 1336276 - DNA, 15 bp, Homo sapiens
tttgtcaaatagagc

SEQ ID NO: 1336277 - DNA, 15 bp, Homo sapiens
ttttgtcaaatagag

SEQ ID NO: 1336278 - DNA, 15 bp, Homo sapiens
cttttgtcaaataga

SEQ ID NO: 1336279 - DNA, 15 bp, Homo sapiens
acttttgtcaaatag

SEQ ID NO: 1336280 - DNA, 15 bp, Homo sapiens
cacttttgtcaaata

SEQ ID NO: 1336281 - DNA, 15 bp, Homo sapiens
acacttttgtcaaat

SEQ ID NO: 1336282 - DNA, 15 bp, Homo sapiens
aacacttttgtcaaa

SEQ ID NO: 1336283 - DNA, 15 bp, Homo sapiens
aaacacttttgtcaa

SEQ ID NO: 1336284 - DNA, 15 bp, Homo sapiens
aaaacacttttgtca

SEQ ID NO: 1336285 - DNA, 15 bp, Homo sapiens
caaaacacttttgtc

SEQ ID NO: 1336286 - DNA, 15 bp, Homo sapiens
acaaaacacttttgt

SEQ ID NO: 1336287 - DNA, 15 bp, Homo sapiens
aacaaaacacttttg

SEQ ID NO: 1336288 - DNA, 15 bp, Homo sapiens
caacaaaacactttt

SEQ ID NO: 1336289 - DNA, 15 bp, Homo sapiens
acaacaaaacacttt

SEQ ID NO: 1336290 - DNA, 15 bp, Homo sapiens
aacaacaaaacactt

SEQ ID NO: 1336291 - DNA, 15 bp, Homo sapiens
caacaacaaaacact

SEQ ID NO: 1336292 - DNA, 15 bp, Homo sapiens
acaacaacaaaacac

SEQ ID NO: 1336293 - DNA, 15 bp, Homo sapiens
caacaacaacaacaa

SEQ ID NO: 1336294 - DNA, 15 bp, Homo sapiens
acaacaacaacaaca

SEQ ID NO: 1336295 - DNA, 15 bp, Homo sapiens
aacaacaacaacaac

SEQ ID NO: 1336296 - DNA, 15 bp, Homo sapiens
gaacaacaacaacaa

SEQ ID NO: 1336297 - DNA, 15 bp, Homo sapiens
agaacaacaacaaca

SEQ ID NO: 1336298 - DNA, 15 bp, Homo sapiens
aagaacaacaacaac

SEQ ID NO: 1336299 - DNA, 15 bp, Homo sapiens
aaagaacaacaacaa

SEQ ID NO: 1336300 - DNA, 15 bp, Homo sapiens
aaaagaacaacaaca

SEQ ID NO: 1336301 - DNA, 15 bp, Homo sapiens
taaaagaacaacaac

SEQ ID NO: 1336302 - DNA, 15 bp, Homo sapiens
gtaaaagaacaacaa

SEQ ID NO: 1336303 - DNA, 15 bp, Homo sapiens
ggtaaaagaacaaca

SEQ ID NO: 1336304 - DNA, 15 bp, Homo sapiens
tggtaaaagaacaac

SEQ ID NO: 1336305 - DNA, 15 bp, Homo sapiens
gtggtaaaagaacaa

SEQ ID NO: 1336306 - DNA, 15 bp, Homo sapiens
tgtggtaaaagaaca

SEQ ID NO: 1336307 - DNA, 15 bp, Homo sapiens
ttgtggtaaaagaac

SEQ ID NO: 1336308 - DNA, 15 bp, Homo sapiens
cttgtggtaaaagaa

SEQ ID NO: 1336309 - DNA, 15 bp, Homo sapiens
acttgtggtaaaaga

SEQ ID NO: 1336310 - DNA, 15 bp, Homo sapiens
cacttgtggtaaaag

SEQ ID NO: 1336311 - DNA, 15 bp, Homo sapiens
tcacttgtggtaaaa

SEQ ID NO: 1336312 - DNA, 15 bp, Homo sapiens
gtcacttgtggtaaa

SEQ ID NO: 1336313 - DNA, 15 bp, Homo sapiens
agtcacttgtggtaa

SEQ ID NO: 1336314 - DNA, 15 bp, Homo sapiens
gagtcacttgtggta

SEQ ID NO: 1336315 - DNA, 15 bp, Homo sapiens
agagtcacttgtggt

SEQ ID NO: 1336316 - DNA, 15 bp, Homo sapiens
cagagtcacttgtgg

SEQ ID NO: 1336317 - DNA, 15 bp, Homo sapiens
acagagtcacttgtg

SEQ ID NO: 1336318 - DNA, 15 bp, Homo sapiens
aacagagtcacttgt

SEQ ID NO: 1336319 - DNA, 15 bp, Homo sapiens
aaacagagtcacttg

SEQ ID NO: 1336320 - DNA, 15 bp, Homo sapiens
aaaacagagtcactt

SEQ ID NO: 1336321 - DNA, 15 bp, Homo sapiens
caaaacagagtcact

SEQ ID NO: 1336322 - DNA, 15 bp, Homo sapiens
tcaaaacagagtcac

SEQ ID NO: 1336323 - DNA, 15 bp, Homo sapiens
ttcaaaacagagtca

SEQ ID NO: 1336324 - DNA, 15 bp, Homo sapiens
tttcaaaacagagtc

SEQ ID NO: 1336325 - DNA, 15 bp, Homo sapiens
gtttcaaaacagagt

SEQ ID NO: 1336326 - DNA, 15 bp, Homo sapiens
agtttcaaaacagag

SEQ ID NO: 1336327 - DNA, 15 bp, Homo sapiens
cagtttcaaaacaga

SEQ ID NO: 1336328 - DNA, 15 bp, Homo sapiens
tcagtttcaaaacag

SEQ ID NO: 1336329 - DNA, 15 bp, Homo sapiens
gtcagtttcaaaaca

SEQ ID NO: 1336330 - DNA, 15 bp, Homo sapiens
tgtcagtttcaaaac

SEQ ID NO: 1336331 - DNA, 15 bp, Homo sapiens
ttgtcagtttcaaaa

SEQ ID NO: 1336332 - DNA, 15 bp, Homo sapiens
gttgtcagtttcaaa

SEQ ID NO: 1336333 - DNA, 15 bp, Homo sapiens
agttgtcagtttcaa

SEQ ID NO: 1336334 - DNA, 15 bp, Homo sapiens
aagttgtcagtttca

SEQ ID NO: 1336335 - DNA, 15 bp, Homo sapiens
aaagttgtcagtttc

SEQ ID NO: 1336336 - DNA, 15 bp, Homo sapiens
gaaagttgtcagttt

SEQ ID NO: 1336337 - DNA, 15 bp, Homo sapiens
tgaaagttgtcagtt

SEQ ID NO: 1336338 - DNA, 15 bp, Homo sapiens
gtgaaagttgtcagt

SEQ ID NO: 1336339 - DNA, 15 bp, Homo sapiens
tgtgaaagttgtcag

SEQ ID NO: 1336340 - DNA, 15 bp, Homo sapiens
atgtgaaagttgtca

SEQ ID NO: 1336341 - DNA, 15 bp, Homo sapiens
aatgtgaaagttgtc

SEQ ID NO: 1336342 - DNA, 15 bp, Homo sapiens
aaatgtgaaagttgt

SEQ ID NO: 1336343 - DNA, 15 bp, Homo sapiens
gaaatgtgaaagttg

SEQ ID NO: 1336344 - DNA, 15 bp, Homo sapiens
ggaaatgtgaaagtt

SEQ ID NO: 1336345 - DNA, 15 bp, Homo sapiens
gggaaatgtgaaagt

SEQ ID NO: 1336346 - DNA, 15 bp, Homo sapiens
ggggaaatgtgaaag

SEQ ID NO: 1336347 - DNA, 15 bp, Homo sapiens
aggggaaatgtgaaa

SEQ ID NO: 1336348 - DNA, 15 bp, Homo sapiens
aaggggaaatgtgaa

SEQ ID NO: 1336349 - DNA, 15 bp, Homo sapiens
aaaggggaaatgtga

SEQ ID NO: 1336350 - DNA, 15 bp, Homo sapiens
aaaaggggaaatgtg

SEQ ID NO: 1336351 - DNA, 15 bp, Homo sapiens
caaaaggggaaatgt

SEQ ID NO: 1336352 - DNA, 15 bp, Homo sapiens
tcaaaaggggaaatg

SEQ ID NO: 1336353 - DNA, 15 bp, Homo sapiens
atcaaaaggggaaat

SEQ ID NO: 1336354 - DNA, 15 bp, Homo sapiens
gatcaaaaggggaaa

SEQ ID NO: 1336355 - DNA, 15 bp, Homo sapiens
tgatcaaaaggggaa

SEQ ID NO: 1336356 - DNA, 15 bp, Homo sapiens
ttgatcaaaagggga

SEQ ID NO: 1336357 - DNA, 15 bp, Homo sapiens
cttgatcaaaagggg

SEQ ID NO: 1336358 - DNA, 15 bp, Homo sapiens
tcttgatcaaaaggg

SEQ ID NO: 1336359 - DNA, 15 bp, Homo sapiens
atcttgatcaaaagg

SEQ ID NO: 1336360 - DNA, 15 bp, Homo sapiens
gatcttgatcaaaag

SEQ ID NO: 1336361 - DNA, 15 bp, Homo sapiens
agatcttgatcaaaa

SEQ ID NO: 1336362 - DNA, 15 bp, Homo sapiens
tagatcttgatcaaa

SEQ ID NO: 1336363 - DNA, 15 bp, Homo sapiens
ttagatcttgatcaa

SEQ ID NO: 1336364 - DNA, 15 bp, Homo sapiens
attagatcttgatca

SEQ ID NO: 1336365 - DNA, 15 bp, Homo sapiens
tattagatcttgatc

SEQ ID NO: 1336366 - DNA, 15 bp, Homo sapiens
ttattagatcttgat

SEQ ID NO: 1336367 - DNA, 15 bp, Homo sapiens
attattagatcttga

SEQ ID NO: 1336368 - DNA, 15 bp, Homo sapiens
cattattagatcttg

SEQ ID NO: 1336369 - DNA, 15 bp, Homo sapiens
acattattagatctt

SEQ ID NO: 1336370 - DNA, 15 bp, Homo sapiens
cacattattagatct

SEQ ID NO: 1336371 - DNA, 15 bp, Homo sapiens
acacattattagatc

SEQ ID NO: 1336372 - DNA, 15 bp, Homo sapiens
aacacattattagat

SEQ ID NO: 1336373 - DNA, 15 bp, Homo sapiens
taacacattattaga

SEQ ID NO: 1336374 - DNA, 15 bp, Homo sapiens
gtaacacattattag

SEQ ID NO: 1336375 - DNA, 15 bp, Homo sapiens
tgtaacacattatta

SEQ ID NO: 1336376 - DNA, 15 bp, Homo sapiens
atgtaacacattatt

SEQ ID NO: 1336377 - DNA, 15 bp, Homo sapiens
tatgtaacacattat

SEQ ID NO: 1336378 - DNA, 15 bp, Homo sapiens
ttatgtaacacatta

SEQ ID NO: 1336379 - DNA, 15 bp, Homo sapiens
tttatgtaacacatt

SEQ ID NO: 1336380 - DNA, 15 bp, Homo sapiens
atttatgtaacacat

SEQ ID NO: 1336381 - DNA, 15 bp, Homo sapiens
tatttatgtaacaca

SEQ ID NO: 1336382 - DNA, 15 bp, Homo sapiens
atatttatgtaacac

SEQ ID NO: 1336383 - DNA, 15 bp, Homo sapiens
tatatttatgtaaca

SEQ ID NO: 1336384 - DNA, 15 bp, Homo sapiens
atatatttatgtaac

SEQ ID NO: 1336385 - DNA, 15 bp, Homo sapiens
catatatttatgtaa

SEQ ID NO: 1336386 - DNA, 15 bp, Homo sapiens
ccatatatttatgta

SEQ ID NO: 1336387 - DNA, 15 bp, Homo sapiens
accatatatttatgt

SEQ ID NO: 1336388 - DNA, 15 bp, Homo sapiens
caccatatatttatg

SEQ ID NO: 1336389 - DNA, 15 bp, Homo sapiens
tcaccatatatttat

SEQ ID NO: 1336390 - DNA, 15 bp, Homo sapiens
ttcaccatatattta

SEQ ID NO: 1336391 - DNA, 15 bp, Homo sapiens
attcaccatatattt

SEQ ID NO: 1336392 - DNA, 15 bp, Homo sapiens
tattcaccatatatt

SEQ ID NO: 1336393 - DNA, 15 bp, Homo sapiens
ttattcaccatatat

SEQ ID NO: 1336394 - DNA, 15 bp, Homo sapiens
tttattcaccatata

SEQ ID NO: 1336395 - DNA, 15 bp, Homo sapiens
atttattcaccatat

SEQ ID NO: 1336396 - DNA, 15 bp, Homo sapiens
tatttattcaccata

SEQ ID NO: 1336397 - DNA, 15 bp, Homo sapiens
ttatttattcaccat

SEQ ID NO: 1336398 - DNA, 15 bp, Homo sapiens
tttatttattcacca

SEQ ID NO: 1336399 - DNA, 15 bp, Homo sapiens
atttatttattcacc

SEQ ID NO: 1336400 - DNA, 15 bp, Homo sapiens
tatttatttattcac

SEQ ID NO: 1336401 - DNA, 15 bp, Homo sapiens
tttatttatttattc

SEQ ID NO: 1336402 - DNA, 15 bp, Homo sapiens
ctattttatttattt

SEQ ID NO: 1336403 - DNA, 15 bp, Homo sapiens
tctattttatttatt

SEQ ID NO: 1336404 - DNA, 15 bp, Homo sapiens
ttctattttatttat

SEQ ID NO: 1336405 - DNA, 15 bp, Homo sapiens
cttctattttattta

SEQ ID NO: 1336406 - DNA, 15 bp, Homo sapiens
ccttctattttattt

SEQ ID NO: 1336407 - DNA, 15 bp, Homo sapiens
tccttctattttatt

SEQ ID NO: 1336408 - DNA, 15 bp, Homo sapiens
ttccttctattttat

SEQ ID NO: 1336409 - DNA, 15 bp, Homo sapiens
attccttctatttta

SEQ ID NO: 1336410 - DNA, 15 bp, Homo sapiens
tattccttctatttt

SEQ ID NO: 1336411 - DNA, 15 bp, Homo sapiens
atattccttctattt

SEQ ID NO: 1336412 - DNA, 15 bp, Homo sapiens
aatattccttctatt

SEQ ID NO: 1336413 - DNA, 15 bp, Homo sapiens
aaatattccttctat

SEQ ID NO: 1336414 - DNA, 15 bp, Homo sapiens
caaatattccttcta

SEQ ID NO: 1336415 - DNA, 15 bp, Homo sapiens
acaaatattccttct

SEQ ID NO: 1336416 - DNA, 15 bp, Homo sapiens
tacaaatattccttc

SEQ ID NO: 1336417 - DNA, 15 bp, Homo sapiens
ctacaaatattcctt

SEQ ID NO: 1336418 - DNA, 15 bp, Homo sapiens
cctacaaatattcct

SEQ ID NO: 1336419 - DNA, 15 bp, Homo sapiens
acctacaaatattcc

SEQ ID NO: 1336420 - DNA, 15 bp, Homo sapiens
tacctacaaatattc

SEQ ID NO: 1336421 - DNA, 15 bp, Homo sapiens
ttacctacaaatatt

SEQ ID NO: 1336422 - DNA, 15 bp, Homo sapiens
cttacctacaaatat

SEQ ID NO: 1336423 - DNA, 15 bp, Homo sapiens
ccttacctacaaata

SEQ ID NO: 1336424 - DNA, 15 bp, Homo sapiens
gccttacctacaaat

SEQ ID NO: 1336425 - DNA, 15 bp, Homo sapiens
tgccttacctacaaa

SEQ ID NO: 1336426 - DNA, 15 bp, Homo sapiens
ttgccttacctacaa

SEQ ID NO: 1336427 - DNA, 15 bp, Homo sapiens
tttgccttacctaca

SEQ ID NO: 1336428 - DNA, 15 bp, Homo sapiens
ttttgccttacctac

SEQ ID NO: 1336429 - DNA, 15 bp, Homo sapiens
attttgccttaccta

SEQ ID NO: 1336430 - DNA, 15 bp, Homo sapiens
gattttgccttacct

SEQ ID NO: 1336431 - DNA, 15 bp, Homo sapiens
agattttgccttacc

SEQ ID NO: 1336432 - DNA, 15 bp, Homo sapiens
cagattttgccttac

SEQ ID NO: 1336433 - DNA, 15 bp, Homo sapiens
acagattttgcctta

SEQ ID NO: 1336434 - DNA, 15 bp, Homo sapiens
cacagattttgcctt

SEQ ID NO: 1336435 - DNA, 15 bp, Homo sapiens
ccacagattttgcct

SEQ ID NO: 1336436 - DNA, 15 bp, Homo sapiens
tccacagattttgcc

SEQ ID NO: 1336437 - DNA, 15 bp, Homo sapiens
atccacagattttgc

SEQ ID NO: 1336438 - DNA, 15 bp, Homo sapiens
gatccacagattttg

SEQ ID NO: 1336439 - DNA, 15 bp, Homo sapiens
agatccacagatttt

SEQ ID NO: 1336440 - DNA, 15 bp, Homo sapiens
cagatccacagattt

SEQ ID NO: 1336441 - DNA, 15 bp, Homo sapiens
gcagatccacagatt

SEQ ID NO: 1336442 - DNA, 15 bp, Homo sapiens
ggcagatccacagat

SEQ ID NO: 1336443 - DNA, 15 bp, Homo sapiens
aggcagatccacaga

SEQ ID NO: 1336444 - DNA, 15 bp, Homo sapiens
aaggcagatccacag

SEQ ID NO: 1336445 - DNA, 15 bp, Homo sapiens
aaaggcagatccaca

SEQ ID NO: 1336446 - DNA, 15 bp, Homo sapiens
aaaaggcagatccac

SEQ ID NO: 1336447 - DNA, 15 bp, Homo sapiens
gaaaaggcagatcca

SEQ ID NO: 1336448 - DNA, 15 bp, Homo sapiens
ggaaaaggcagatcc

SEQ ID NO: 1336449 - DNA, 15 bp, Homo sapiens
aggaaaaggcagatc

SEQ ID NO: 1336450 - DNA, 15 bp, Homo sapiens
aaggaaaaggcagat

SEQ ID NO: 1336451 - DNA, 15 bp, Homo sapiens
taaggaaaaggcaga

SEQ ID NO: 1336452 - DNA, 15 bp, Homo sapiens
ataaggaaaaggcag

SEQ ID NO: 1336453 - DNA, 15 bp, Homo sapiens
cataaggaaaaggca

SEQ ID NO: 1336454 - DNA, 15 bp, Homo sapiens
ccataaggaaaaggc

SEQ ID NO: 1336455 - DNA, 15 bp, Homo sapiens
tccataaggaaaagg

SEQ ID NO: 1336456 - DNA, 15 bp, Homo sapiens
atccataaggaaaag

SEQ ID NO: 1336457 - DNA, 15 bp, Homo sapiens
tatccataaggaaaa

SEQ ID NO: 1336458 - DNA, 15 bp, Homo sapiens
atatccataaggaaa

SEQ ID NO: 1336459 - DNA, 15 bp, Homo sapiens
tatatccataaggaa

SEQ ID NO: 1336460 - DNA, 15 bp, Homo sapiens
atatatccataagga

SEQ ID NO: 1336461 - DNA, 15 bp, Homo sapiens
tatatatccataagg

SEQ ID NO: 1336462 - DNA, 15 bp, Homo sapiens
atatatatccataag

SEQ ID NO: 1336463 - DNA, 15 bp, Homo sapiens
tatatatatccataa

SEQ ID NO: 1336464 - DNA, 15 bp, Homo sapiens
atatatatatccata

SEQ ID NO: 1336465 - DNA, 15 bp, Homo sapiens
tatatatatatccat

SEQ ID NO: 1336466 - DNA, 15 bp, Homo sapiens
atatatatatatcca

SEQ ID NO: 1336467 - DNA, 15 bp, Homo sapiens
tatatatatatatcc

SEQ ID NO: 1336468 - DNA, 15 bp, Homo sapiens
gtatatatatatata

SEQ ID NO: 1336469 - DNA, 15 bp, Homo sapiens
aagtatatatatata

SEQ ID NO: 1336470 - DNA, 15 bp, Homo sapiens
aaagtatatatatat

SEQ ID NO: 1336471 - DNA, 15 bp, Homo sapiens
aaaagtatatatata

SEQ ID NO: 1336472 - DNA, 15 bp, Homo sapiens
aaaaagtatatatat

SEQ ID NO: 1336473 - DNA, 15 bp, Homo sapiens
aaaaaagtatatata

SEQ ID NO: 1336474 - DNA, 15 bp, Homo sapiens
gaaaaaagtatatat

SEQ ID NO: 1336475 - DNA, 15 bp, Homo sapiens
agaaaaaagtatata

SEQ ID NO: 1336476 - DNA, 15 bp, Homo sapiens
cagaaaaaagtatat

SEQ ID NO: 1336477 - DNA, 15 bp, Homo sapiens
acagaaaaaagtata

SEQ ID NO: 1336478 - DNA, 15 bp, Homo sapiens
aacagaaaaaagtat

SEQ ID NO: 1336479 - DNA, 15 bp, Homo sapiens
aaacagaaaaaagta

SEQ ID NO: 1336480 - DNA, 15 bp, Homo sapiens
gaaacagaaaaaagt

SEQ ID NO: 1336481 - DNA, 15 bp, Homo sapiens
tgaaacagaaaaaag

SEQ ID NO: 1336482 - DNA, 15 bp, Homo sapiens
gtgaaacagaaaaaa

SEQ ID NO: 1336483 - DNA, 15 bp, Homo sapiens
agtgaaacagaaaaa

SEQ ID NO: 1336484 - DNA, 15 bp, Homo sapiens
aagtgaaacagaaaa

SEQ ID NO: 1336485 - DNA, 15 bp, Homo sapiens
taagtgaaacagaaa

SEQ ID NO: 1336486 - DNA, 15 bp, Homo sapiens
ataagtgaaacagaa

SEQ ID NO: 1336487 - DNA, 15 bp, Homo sapiens
aataagtgaaacaga

SEQ ID NO: 1336488 - DNA, 15 bp, Homo sapiens
aaataagtgaaacag

SEQ ID NO: 1336489 - DNA, 15 bp, Homo sapiens
taaataagtgaaaca

SEQ ID NO: 1336490 - DNA, 15 bp, Homo sapiens
ataaataagtgaaac

SEQ ID NO: 1336491 - DNA, 15 bp, Homo sapiens
cataaataagtgaaa

SEQ ID NO: 1336492 - DNA, 15 bp, Homo sapiens
acataaataagtgaa

SEQ ID NO: 1336493 - DNA, 15 bp, Homo sapiens
tacataaataagtga

SEQ ID NO: 1336494 - DNA, 15 bp, Homo sapiens
atacataaataagtg

SEQ ID NO: 1336495 - DNA, 15 bp, Homo sapiens
aatacataaataagt

SEQ ID NO: 1336496 - DNA, 15 bp, Homo sapiens
aaatacataaataag

SEQ ID NO: 1336497 - DNA, 15 bp, Homo sapiens
caaatacataaataa

SEQ ID NO: 1336498 - DNA, 15 bp, Homo sapiens
acaaatacataaata

SEQ ID NO: 1336499 - DNA, 15 bp, Homo sapiens
aacaaatacataaat

SEQ ID NO: 1336500 - DNA, 15 bp, Homo sapiens
aaacaaatacataaa

SEQ ID NO: 1336501 - DNA, 15 bp, Homo sapiens
taaacaaatacataa

SEQ ID NO: 1336502 - DNA, 15 bp, Homo sapiens
ataaacaaatacata

SEQ ID NO: 1336503 - DNA, 15 bp, Homo sapiens
cataaacaaatacat

SEQ ID NO: 1336504 - DNA, 15 bp, Homo sapiens
acataaacaaataca

SEQ ID NO: 1336505 - DNA, 15 bp, Homo sapiens
tacataaacaaatac

SEQ ID NO: 1336506 - DNA, 15 bp, Homo sapiens
atacataaacaaata

SEQ ID NO: 1336507 - DNA, 15 bp, Homo sapiens
aatacataaacaaat

SEQ ID NO: 1336508 - DNA, 15 bp, Homo sapiens
aaatacataaacaaa

SEQ ID NO: 1336509 - DNA, 15 bp, Homo sapiens
taaatacataaacaa

SEQ ID NO: 1336510 - DNA, 15 bp, Homo sapiens
ataaatacataaaca

SEQ ID NO: 1336511 - DNA, 15 bp, Homo sapiens
aataaatacataaac

SEQ ID NO: 1336512 - DNA, 15 bp, Homo sapiens
gtaaaataaatacat

SEQ ID NO: 1336513 - DNA, 15 bp, Homo sapiens
agtaaaataaataca

SEQ ID NO: 1336514 - DNA, 15 bp, Homo sapiens
aagtaaaataaatac

SEQ ID NO: 1336515 - DNA, 15 bp, Homo sapiens
aaagtaaaataaata

SEQ ID NO: 1336516 - DNA, 15 bp, Homo sapiens
taaagtaaaataaat

SEQ ID NO: 1336517 - DNA, 15 bp, Homo sapiens
ttaaagtaaaataaa

SEQ ID NO: 1336518 - DNA, 15 bp, Homo sapiens
cttaaagtaaaataa

SEQ ID NO: 1336519 - DNA, 15 bp, Homo sapiens
acttaaagtaaaata

SEQ ID NO: 1336520 - DNA, 15 bp, Homo sapiens
aacttaaagtaaaat

SEQ ID NO: 1336521 - DNA, 15 bp, Homo sapiens
agaacttaaagtaaa

SEQ ID NO: 1336522 - DNA, 15 bp, Homo sapiens
cagaacttaaagtaa

SEQ ID NO: 1336523 - DNA, 15 bp, Homo sapiens
ccagaacttaaagta

SEQ ID NO: 1336524 - DNA, 15 bp, Homo sapiens
tcccagaacttaaag

SEQ ID NO: 1336525 - DNA, 15 bp, Homo sapiens
atcccagaacttaaa

SEQ ID NO: 1336526 - DNA, 15 bp, Homo sapiens
tatcccagaacttaa

SEQ ID NO: 1336527 - DNA, 15 bp, Homo sapiens
gtatcccagaactta

SEQ ID NO: 1336528 - DNA, 15 bp, Homo sapiens
tgtatcccagaactt

SEQ ID NO: 1336529 - DNA, 15 bp, Homo sapiens
atgtatcccagaact

SEQ ID NO: 1336530 - DNA, 15 bp, Homo sapiens
catgtatcccagaac

SEQ ID NO: 1336531 - DNA, 15 bp, Homo sapiens
acatgtatcccagaa

SEQ ID NO: 1336532 - DNA, 15 bp, Homo sapiens
cacatgtatcccaga

SEQ ID NO: 1336533 - DNA, 15 bp, Homo sapiens
gcacatgtatcccag

SEQ ID NO: 1336534 - DNA, 15 bp, Homo sapiens
tgcacatgtatccca

SEQ ID NO: 1336535 - DNA, 15 bp, Homo sapiens
gttctgcacatgtat

SEQ ID NO: 1336536 - DNA, 15 bp, Homo sapiens
tgttctgcacatgta

SEQ ID NO: 1336537 - DNA, 15 bp, Homo sapiens
atgttctgcacatgt

SEQ ID NO: 1336538 - DNA, 15 bp, Homo sapiens
catgttctgcacatg

SEQ ID NO: 1336539 - DNA, 15 bp, Homo sapiens
gcatgttctgcacat

SEQ ID NO: 1336540 - DNA, 15 bp, Homo sapiens
tgcatgttctgcaca

SEQ ID NO: 1336541 - DNA, 15 bp, Homo sapiens
ctgcatgttctgcac

SEQ ID NO: 1336542 - DNA, 15 bp, Homo sapiens
cctgcatgttctgca

SEQ ID NO: 1336543 - DNA, 15 bp, Homo sapiens
acctgcatgttctgc

SEQ ID NO: 1336544 - DNA, 15 bp, Homo sapiens
aacctgcatgttctg

SEQ ID NO: 1336545 - DNA, 15 bp, Homo sapiens
aaacctgcatgttct

SEQ ID NO: 1336546 - DNA, 15 bp, Homo sapiens
caaacctgcatgttc

SEQ ID NO: 1336547 - DNA, 15 bp, Homo sapiens
gcaaacctgcatgtt

SEQ ID NO: 1336548 - DNA, 15 bp, Homo sapiens
agcaaacctgcatgt

SEQ ID NO: 1336549 - DNA, 15 bp, Homo sapiens
tagcaaacctgcatg

SEQ ID NO: 1336550 - DNA, 15 bp, Homo sapiens
gtagcaaacctgcat

SEQ ID NO: 1336551 - DNA, 15 bp, Homo sapiens
ctatgtagcaaacct

SEQ ID NO: 1336552 - DNA, 15 bp, Homo sapiens
cctatgtagcaaacc

SEQ ID NO: 1336553 - DNA, 15 bp, Homo sapiens
acctatgtagcaaac

SEQ ID NO: 1336554 - DNA, 15 bp, Homo sapiens
tacctatgtagcaaa

SEQ ID NO: 1336555 - DNA, 15 bp, Homo sapiens
atacctatgtagcaa

SEQ ID NO: 1336556 - DNA, 15 bp, Homo sapiens
tatacctatgtagca

SEQ ID NO: 1336557 - DNA, 15 bp, Homo sapiens
gtatacctatgtagc

SEQ ID NO: 1336558 - DNA, 15 bp, Homo sapiens
tgtatacctatgtag

SEQ ID NO: 1336559 - DNA, 15 bp, Homo sapiens
gtgtatacctatgta

SEQ ID NO: 1336560 - DNA, 15 bp, Homo sapiens
cgtgtatacctatgt

SEQ ID NO: 1336561 - DNA, 15 bp, Homo sapiens
acgtgtatacctatg

SEQ ID NO: 1336562 - DNA, 15 bp, Homo sapiens
gcacgtgtataccta

SEQ ID NO: 1336563 - DNA, 15 bp, Homo sapiens
ggcacgtgtatacct

SEQ ID NO: 1336564 - DNA, 15 bp, Homo sapiens
tggcacgtgtatacc

SEQ ID NO: 1336565 - DNA, 15 bp, Homo sapiens
atggcacgtgtatac

SEQ ID NO: 1336566 - DNA, 15 bp, Homo sapiens
catggcacgtgtata

SEQ ID NO: 1336567 - DNA, 15 bp, Homo sapiens
ccatggcacgtgtat

SEQ ID NO: 1336568 - DNA, 15 bp, Homo sapiens
accatggcacgtgta

SEQ ID NO: 1336569 - DNA, 15 bp, Homo sapiens
caccatggcacgtgt

SEQ ID NO: 1336570 - DNA, 15 bp, Homo sapiens
ccaccatggcacgtg

SEQ ID NO: 1336571 - DNA, 15 bp, Homo sapiens
accaccatggcacgt

SEQ ID NO: 1336572 - DNA, 15 bp, Homo sapiens
aaccaccatggcacg

SEQ ID NO: 1336573 - DNA, 15 bp, Homo sapiens
aaaccaccatggcac

SEQ ID NO: 1336574 - DNA, 15 bp, Homo sapiens
caaaccaccatggca

SEQ ID NO: 1336575 - DNA, 15 bp, Homo sapiens
gcaaaccaccatggc

SEQ ID NO: 1336576 - DNA, 15 bp, Homo sapiens
agcaaaccaccatgg

SEQ ID NO: 1336577 - DNA, 15 bp, Homo sapiens
aggtgcagcaaacca

SEQ ID NO: 1336578 - DNA, 15 bp, Homo sapiens
taggtgcagcaaacc

SEQ ID NO: 1336579 - DNA, 15 bp, Homo sapiens
ataggtgcagcaaac

SEQ ID NO: 1336580 - DNA, 15 bp, Homo sapiens
gataggtgcagcaaa

SEQ ID NO: 1336581 - DNA, 15 bp, Homo sapiens
tgataggtgcagcaa

SEQ ID NO: 1336582 - DNA, 15 bp, Homo sapiens
ttgataggtgcagca

SEQ ID NO: 1336583 - DNA, 15 bp, Homo sapiens
gttgataggtgcagc

SEQ ID NO: 1336584 - DNA, 15 bp, Homo sapiens
ggttgataggtgcag

SEQ ID NO: 1336585 - DNA, 15 bp, Homo sapiens
aggttgataggtgca

SEQ ID NO: 1336586 - DNA, 15 bp, Homo sapiens
caggttgataggtgc

SEQ ID NO: 1336587 - DNA, 15 bp, Homo sapiens
acaggttgataggtg

SEQ ID NO: 1336588 - DNA, 15 bp, Homo sapiens
gacaggttgataggt

SEQ ID NO: 1336589 - DNA, 15 bp, Homo sapiens
tgacaggttgatagg

SEQ ID NO: 1336590 - DNA, 15 bp, Homo sapiens
atgacaggttgatag

SEQ ID NO: 1336591 - DNA, 15 bp, Homo sapiens
gatgacaggttgata

SEQ ID NO: 1336592 - DNA, 15 bp, Homo sapiens
ctagatgacaggttg

SEQ ID NO: 1336593 - DNA, 15 bp, Homo sapiens
cctagatgacaggtt

SEQ ID NO: 1336594 - DNA, 15 bp, Homo sapiens
acctagatgacaggt

SEQ ID NO: 1336595 - DNA, 15 bp, Homo sapiens
aacctagatgacagg

SEQ ID NO: 1336596 - DNA, 15 bp, Homo sapiens
aaacctagatgacag

SEQ ID NO: 1336597 - DNA, 15 bp, Homo sapiens
aaaacctagatgaca

SEQ ID NO: 1336598 - DNA, 15 bp, Homo sapiens
taaaacctagatgac

SEQ ID NO: 1336599 - DNA, 15 bp, Homo sapiens
ttaaaacctagatga

SEQ ID NO: 1336600 - DNA, 15 bp, Homo sapiens
cttaaaacctagatg

SEQ ID NO: 1336601 - DNA, 15 bp, Homo sapiens
gcttaaaacctagat

SEQ ID NO: 1336602 - DNA, 15 bp, Homo sapiens
ggcttaaaacctaga

SEQ ID NO: 1336603 - DNA, 15 bp, Homo sapiens
gggcttaaaacctag

SEQ ID NO: 1336604 - DNA, 15 bp, Homo sapiens
ggggcttaaaaccta

SEQ ID NO: 1336605 - DNA, 15 bp, Homo sapiens
tggggcttaaaacct

SEQ ID NO: 1336606 - DNA, 15 bp, Homo sapiens
gtggggcttaaaacc

SEQ ID NO: 1336607 - DNA, 15 bp, Homo sapiens
tgtggggcttaaaac

SEQ ID NO: 1336608 - DNA, 15 bp, Homo sapiens
atgtggggcttaaaa

SEQ ID NO: 1336609 - DNA, 15 bp, Homo sapiens
catgtggggcttaaa

SEQ ID NO: 1336610 - DNA, 15 bp, Homo sapiens
gcatgtggggcttaa

SEQ ID NO: 1336611 - DNA, 15 bp, Homo sapiens
tgcatgtggggctta

SEQ ID NO: 1336612 - DNA, 15 bp, Homo sapiens
atgcatgtggggctt

SEQ ID NO: 1336613 - DNA, 15 bp, Homo sapiens
aatgcatgtggggct

SEQ ID NO: 1336614 - DNA, 15 bp, Homo sapiens
taatgcatgtggggc

SEQ ID NO: 1336615 - DNA, 15 bp, Homo sapiens
ctaatgcatgtgggg

SEQ ID NO: 1336616 - DNA, 15 bp, Homo sapiens
cctaatgcatgtggg

SEQ ID NO: 1336617 - DNA, 15 bp, Homo sapiens
acctaatgcatgtgg

SEQ ID NO: 1336618 - DNA, 15 bp, Homo sapiens
tacctaatgcatgtg

SEQ ID NO: 1336619 - DNA, 15 bp, Homo sapiens
atacctaatgcatgt

SEQ ID NO: 1336620 - DNA, 15 bp, Homo sapiens
aatacctaatgcatg

SEQ ID NO: 1336621 - DNA, 15 bp, Homo sapiens
aaatacctaatgcat

SEQ ID NO: 1336622 - DNA, 15 bp, Homo sapiens
caaatacctaatgca

SEQ ID NO: 1336623 - DNA, 15 bp, Homo sapiens
acaaatacctaatgc

SEQ ID NO: 1336624 - DNA, 15 bp, Homo sapiens
gacaaatacctaatg

SEQ ID NO: 1336625 - DNA, 15 bp, Homo sapiens
ggacaaatacctaat

SEQ ID NO: 1336626 - DNA, 15 bp, Homo sapiens
aggacaaatacctaa

SEQ ID NO: 1336627 - DNA, 15 bp, Homo sapiens
taggacaaataccta

SEQ ID NO: 1336628 - DNA, 15 bp, Homo sapiens
ttaggacaaatacct

SEQ ID NO: 1336629 - DNA, 15 bp, Homo sapiens
attaggacaaatacc

SEQ ID NO: 1336630 - DNA, 15 bp, Homo sapiens
cattaggacaaatac

SEQ ID NO: 1336631 - DNA, 15 bp, Homo sapiens
gcattaggacaaata

SEQ ID NO: 1336632 - DNA, 15 bp, Homo sapiens
agcattaggacaaat

SEQ ID NO: 1336633 - DNA, 15 bp, Homo sapiens
gagcattaggacaaa

SEQ ID NO: 1336634 - DNA, 15 bp, Homo sapiens
agagcattaggacaa

SEQ ID NO: 1336635 - DNA, 15 bp, Homo sapiens
gagagcattaggaca

SEQ ID NO: 1336636 - DNA, 15 bp, Homo sapiens
ggagagcattaggac

SEQ ID NO: 1336637 - DNA, 15 bp, Homo sapiens
gggagagcattagga

SEQ ID NO: 1336638 - DNA, 15 bp, Homo sapiens
agggagagcattagg

SEQ ID NO: 1336639 - DNA, 15 bp, Homo sapiens
gagggagagcattag

SEQ ID NO: 1336640 - DNA, 15 bp, Homo sapiens
ggagggagagcatta

SEQ ID NO: 1336641 - DNA, 15 bp, Homo sapiens
gggagggagagcatt

SEQ ID NO: 1336642 - DNA, 15 bp, Homo sapiens
ggggagggagagcat

SEQ ID NO: 1336643 - DNA, 15 bp, Homo sapiens
aggggagggagagca

SEQ ID NO: 1336644 - DNA, 15 bp, Homo sapiens
aaggggagggagagc

SEQ ID NO: 1336645 - DNA, 15 bp, Homo sapiens
caaggggagggagag

SEQ ID NO: 1336646 - DNA, 15 bp, Homo sapiens
gcaaggggagggaga

SEQ ID NO: 1336647 - DNA, 15 bp, Homo sapiens
ggcaaggggagggag

SEQ ID NO: 1336648 - DNA, 15 bp, Homo sapiens
gggcaaggggaggga

SEQ ID NO: 1336649 - DNA, 15 bp, Homo sapiens
ggggcaaggggaggg

SEQ ID NO: 1336650 - DNA, 15 bp, Homo sapiens
gggggcaaggggagg

SEQ ID NO: 1336651 - DNA, 15 bp, Homo sapiens
tgggggcaaggggag

SEQ ID NO: 1336652 - DNA, 15 bp, Homo sapiens
ttgggggcaagggga

SEQ ID NO: 1336653 - DNA, 15 bp, Homo sapiens
tttgggggcaagggg

SEQ ID NO: 1336654 - DNA, 15 bp, Homo sapiens
gtttgggggcaaggg

SEQ ID NO: 1336655 - DNA, 15 bp, Homo sapiens
ggtttgggggcaagg

SEQ ID NO: 1336656 - DNA, 15 bp, Homo sapiens
gggtttgggggcaag

SEQ ID NO: 1336657 - DNA, 15 bp, Homo sapiens
ggggtttgggggcaa

SEQ ID NO: 1336658 - DNA, 15 bp, Homo sapiens
aggggtttgggggca

SEQ ID NO: 1336659 - DNA, 15 bp, Homo sapiens
caggggtttgggggc

SEQ ID NO: 1336660 - DNA, 15 bp, Homo sapiens
tcaggggtttggggg

SEQ ID NO: 1336661 - DNA, 15 bp, Homo sapiens
gtcaggggtttgggg

SEQ ID NO: 1336662 - DNA, 15 bp, Homo sapiens
tgtcaggggtttggg

SEQ ID NO: 1336663 - DNA, 15 bp, Homo sapiens
ctgtcaggggtttgg

SEQ ID NO: 1336664 - DNA, 15 bp, Homo sapiens
cctgtcaggggtttg

SEQ ID NO: 1336665 - DNA, 15 bp, Homo sapiens
gcctgtcaggggttt

SEQ ID NO: 1336666 - DNA, 15 bp, Homo sapiens
ggcctgtcaggggtt

SEQ ID NO: 1336667 - DNA, 15 bp, Homo sapiens
gggcctgtcaggggt

SEQ ID NO: 1336668 - DNA, 15 bp, Homo sapiens
caacatcacacaccg

SEQ ID NO: 1336669 - DNA, 15 bp, Homo sapiens
gcaacatcacacacc

SEQ ID NO: 1336670 - DNA, 15 bp, Homo sapiens
ggcaacatcacacac

SEQ ID NO: 1336671 - DNA, 15 bp, Homo sapiens
gggcaacatcacaca

SEQ ID NO: 1336672 - DNA, 15 bp, Homo sapiens
agggcaacatcacac

SEQ ID NO: 1336673 - DNA, 15 bp, Homo sapiens
gagggcaacatcaca

SEQ ID NO: 1336674 - DNA, 15 bp, Homo sapiens
ggagggcaacatcac

SEQ ID NO: 1336675 - DNA, 15 bp, Homo sapiens
gggagggcaacatca

SEQ ID NO: 1336676 - DNA, 15 bp, Homo sapiens
agggagggcaacatc

SEQ ID NO: 1336677 - DNA, 15 bp, Homo sapiens
cagggagggcaacat

SEQ ID NO: 1336678 - DNA, 15 bp, Homo sapiens
acagggagggcaaca

SEQ ID NO: 1336679 - DNA, 15 bp, Homo sapiens
cacagggagggcaac

SEQ ID NO: 1336680 - DNA, 15 bp, Homo sapiens
acacagggagggcaa

SEQ ID NO: 1336681 - DNA, 15 bp, Homo sapiens
gacacagggagggca

SEQ ID NO: 1336682 - DNA, 15 bp, Homo sapiens
ggacacagggagggc

SEQ ID NO: 1336683 - DNA, 15 bp, Homo sapiens
tggacacagggaggg

SEQ ID NO: 1336684 - DNA, 15 bp, Homo sapiens
gtggacacagggagg

SEQ ID NO: 1336685 - DNA, 15 bp, Homo sapiens
cgtggacacagggag

SEQ ID NO: 1336686 - DNA, 15 bp, Homo sapiens
acgtggacacaggga

SEQ ID NO: 1336687 - DNA, 15 bp, Homo sapiens
cacgtggacacaggg

SEQ ID NO: 1336688 - DNA, 15 bp, Homo sapiens
acacgtggacacagg

SEQ ID NO: 1336689 - DNA, 15 bp, Homo sapiens
aacacgtggacacag

SEQ ID NO: 1336690 - DNA, 15 bp, Homo sapiens
aaacacgtggacaca

SEQ ID NO: 1336691 - DNA, 15 bp, Homo sapiens
aaaacacgtggacac

SEQ ID NO: 1336692 - DNA, 15 bp, Homo sapiens
gaaaacacgtggaca

SEQ ID NO: 1336693 - DNA, 15 bp, Homo sapiens
tgaaaacacgtggac

SEQ ID NO: 1336694 - DNA, 15 bp, Homo sapiens
atgaaaacacgtgga

SEQ ID NO: 1336695 - DNA, 15 bp, Homo sapiens
aatgaaaacacgtgg

SEQ ID NO: 1336696 - DNA, 15 bp, Homo sapiens
caatgaaaacacgtg

SEQ ID NO: 1336697 - DNA, 15 bp, Homo sapiens
acaatgaaaacacgt

SEQ ID NO: 1336698 - DNA, 15 bp, Homo sapiens
aacaatgaaaacacg

SEQ ID NO: 1336699 - DNA, 15 bp, Homo sapiens
gaacaatgaaaacac

SEQ ID NO: 1336700 - DNA, 15 bp, Homo sapiens
ttgaacaatgaaaac

SEQ ID NO: 1336701 - DNA, 15 bp, Homo sapiens
gttgaacaatgaaaa

SEQ ID NO: 1336702 - DNA, 15 bp, Homo sapiens
agttgaacaatgaaa

SEQ ID NO: 1336703 - DNA, 15 bp, Homo sapiens
gagttgaacaatgaa

SEQ ID NO: 1336704 - DNA, 15 bp, Homo sapiens
ggagttgaacaatga

SEQ ID NO: 1336705 - DNA, 15 bp, Homo sapiens
gggagttgaacaatg

SEQ ID NO: 1336706 - DNA, 15 bp, Homo sapiens
tgggagttgaacaat

SEQ ID NO: 1336707 - DNA, 15 bp, Homo sapiens
ttgggagttgaacaa

SEQ ID NO: 1336708 - DNA, 15 bp, Homo sapiens
attgggagttgaaca

SEQ ID NO: 1336709 - DNA, 15 bp, Homo sapiens
aattgggagttgaac

SEQ ID NO: 1336710 - DNA, 15 bp, Homo sapiens
taattgggagttgaa

SEQ ID NO: 1336711 - DNA, 15 bp, Homo sapiens
gtaattgggagttga

SEQ ID NO: 1336712 - DNA, 15 bp, Homo sapiens
cgtaattgggagttg

SEQ ID NO: 1336713 - DNA, 15 bp, Homo sapiens
tcgtaattgggagtt

SEQ ID NO: 1336714 - DNA, 15 bp, Homo sapiens
ttcgtaattgggagt

SEQ ID NO: 1336715 - DNA, 15 bp, Homo sapiens
attcgtaattgggag

SEQ ID NO: 1336716 - DNA, 15 bp, Homo sapiens
cattcgtaattggga

SEQ ID NO: 1336717 - DNA, 15 bp, Homo sapiens
tcattcgtaattggg

SEQ ID NO: 1336718 - DNA, 15 bp, Homo sapiens
ctcattcgtaattgg

SEQ ID NO: 1336719 - DNA, 15 bp, Homo sapiens
tctcattcgtaattg

SEQ ID NO: 1336720 - DNA, 15 bp, Homo sapiens
ttctcattcgtaatt

SEQ ID NO: 1336721 - DNA, 15 bp, Homo sapiens
gttctcattcgtaat

SEQ ID NO: 1336722 - DNA, 15 bp, Homo sapiens
tgttctcattcgtaa

SEQ ID NO: 1336723 - DNA, 15 bp, Homo sapiens
atgttctcattcgta

SEQ ID NO: 1336724 - DNA, 15 bp, Homo sapiens
catgttctcattcgt

SEQ ID NO: 1336725 - DNA, 15 bp, Homo sapiens
gcatgttctcattcg

SEQ ID NO: 1336726 - DNA, 15 bp, Homo sapiens
cgcatgttctcattc

SEQ ID NO: 1336727 - DNA, 15 bp, Homo sapiens
ccgcatgttctcatt

SEQ ID NO: 1336728 - DNA, 15 bp, Homo sapiens
accgcatgttctcat

SEQ ID NO: 1336729 - DNA, 15 bp, Homo sapiens
caccgcatgttctca

SEQ ID NO: 1336730 - DNA, 15 bp, Homo sapiens
acaccgcatgttctc

SEQ ID NO: 1336731 - DNA, 15 bp, Homo sapiens
aacaccgcatgttct

SEQ ID NO: 1336732 - DNA, 15 bp, Homo sapiens
aaacaccgcatgttc

SEQ ID NO: 1336733 - DNA, 15 bp, Homo sapiens
caaacaccgcatgtt

SEQ ID NO: 1336734 - DNA, 15 bp, Homo sapiens
ccaaacaccgcatgt

SEQ ID NO: 1336735 - DNA, 15 bp, Homo sapiens
gccaaacaccgcatg

SEQ ID NO: 1336736 - DNA, 15 bp, Homo sapiens
agccaaacaccgcat

SEQ ID NO: 1336737 - DNA, 15 bp, Homo sapiens
aagccaaacaccgca

SEQ ID NO: 1336738 - DNA, 15 bp, Homo sapiens
aaagccaaacaccgc

SEQ ID NO: 1336739 - DNA, 15 bp, Homo sapiens
gaaagccaaacaccg

SEQ ID NO: 1336740 - DNA, 15 bp, Homo sapiens
agaaagccaaacacc

SEQ ID NO: 1336741 - DNA, 15 bp, Homo sapiens
cagaaagccaaacac

SEQ ID NO: 1336742 - DNA, 15 bp, Homo sapiens
acagaaagccaaaca

SEQ ID NO: 1336743 - DNA, 15 bp, Homo sapiens
aacagaaagccaaac

SEQ ID NO: 1336744 - DNA, 15 bp, Homo sapiens
gaacagaaagccaaa

SEQ ID NO: 1336745 - DNA, 15 bp, Homo sapiens
ggaacagaaagccaa

SEQ ID NO: 1336746 - DNA, 15 bp, Homo sapiens
aggaacagaaagcca

SEQ ID NO: 1336747 - DNA, 15 bp, Homo sapiens
caggaacagaaagcc

SEQ ID NO: 1336748 - DNA, 15 bp, Homo sapiens
acaggaacagaaagc

SEQ ID NO: 1336749 - DNA, 15 bp, Homo sapiens
cacaggaacagaaag

SEQ ID NO: 1336750 - DNA, 15 bp, Homo sapiens
acacaggaacagaaa

SEQ ID NO: 1336751 - DNA, 15 bp, Homo sapiens
aacacaggaacagaa

SEQ ID NO: 1336752 - DNA, 15 bp, Homo sapiens
taacacaggaacaga

SEQ ID NO: 1336753 - DNA, 15 bp, Homo sapiens
ctaacacaggaacag

SEQ ID NO: 1336754 - DNA, 15 bp, Homo sapiens
actaacacaggaaca

SEQ ID NO: 1336755 - DNA, 15 bp, Homo sapiens
aactaacacaggaac

SEQ ID NO: 1336756 - DNA, 15 bp, Homo sapiens
aaactaacacaggaa

SEQ ID NO: 1336757 - DNA, 15 bp, Homo sapiens
caaactaacacagga

SEQ ID NO: 1336758 - DNA, 15 bp, Homo sapiens
ggctggaaaccatca

SEQ ID NO: 1336759 - DNA, 15 bp, Homo sapiens
gggctggaaaccatc

SEQ ID NO: 1336760 - DNA, 15 bp, Homo sapiens
tgggctggaaaccat

SEQ ID NO: 1336761 - DNA, 15 bp, Homo sapiens
atgggctggaaacca

SEQ ID NO: 1336762 - DNA, 15 bp, Homo sapiens
gatgggctggaaacc

SEQ ID NO: 1336763 - DNA, 15 bp, Homo sapiens
ggatgggctggaaac

SEQ ID NO: 1336764 - DNA, 15 bp, Homo sapiens
tggatgggctggaaa

SEQ ID NO: 1336765 - DNA, 15 bp, Homo sapiens
atggatgggctggaa

SEQ ID NO: 1336766 - DNA, 15 bp, Homo sapiens
catggatgggctgga

SEQ ID NO: 1336767 - DNA, 15 bp, Homo sapiens
acatggatgggctgg

SEQ ID NO: 1336768 - DNA, 15 bp, Homo sapiens
gacatggatgggctg

SEQ ID NO: 1336769 - DNA, 15 bp, Homo sapiens
ggacatggatgggct

SEQ ID NO: 1336770 - DNA, 15 bp, Homo sapiens
gggacatggatgggc

SEQ ID NO: 1336771 - DNA, 15 bp, Homo sapiens
agggacatggatggg

SEQ ID NO: 1336772 - DNA, 15 bp, Homo sapiens
cttcatgtcctttgc

SEQ ID NO: 1336773 - DNA, 15 bp, Homo sapiens
acttcatgtcctttg

SEQ ID NO: 1336774 - DNA, 15 bp, Homo sapiens
gacttcatgtccttt

SEQ ID NO: 1336775 - DNA, 15 bp, Homo sapiens
tgacttcatgtcctt

SEQ ID NO: 1336776 - DNA, 15 bp, Homo sapiens
atgacttcatgtcct

SEQ ID NO: 1336777 - DNA, 15 bp, Homo sapiens
aatgacttcatgtcc

SEQ ID NO: 1336778 - DNA, 15 bp, Homo sapiens
gaatgacttcatgtc

SEQ ID NO: 1336779 - DNA, 15 bp, Homo sapiens
ggaatgacttcatgt

SEQ ID NO: 1336780 - DNA, 15 bp, Homo sapiens
aggaatgacttcatg

SEQ ID NO: 1336781 - DNA, 15 bp, Homo sapiens
aaggaatgacttcat

SEQ ID NO: 1336782 - DNA, 15 bp, Homo sapiens
aaaggaatgacttca

SEQ ID NO: 1336783 - DNA, 15 bp, Homo sapiens
aaaaggaatgacttc

SEQ ID NO: 1336784 - DNA, 15 bp, Homo sapiens
aaaaaggaatgactt

SEQ ID NO: 1336785 - DNA, 15 bp, Homo sapiens
taaaaaggaatgact

SEQ ID NO: 1336786 - DNA, 15 bp, Homo sapiens
gtaaaaaggaatgac

SEQ ID NO: 1336787 - DNA, 15 bp, Homo sapiens
cgtaaaaaggaatga

SEQ ID NO: 1336788 - DNA, 15 bp, Homo sapiens
ccgtaaaaaggaatg

SEQ ID NO: 1336789 - DNA, 15 bp, Homo sapiens
gccgtaaaaaggaat

SEQ ID NO: 1336790 - DNA, 15 bp, Homo sapiens
agccgtaaaaaggaa

SEQ ID NO: 1336791 - DNA, 15 bp, Homo sapiens
cagccgtaaaaagga

SEQ ID NO: 1336792 - DNA, 15 bp, Homo sapiens
gcagccgtaaaaagg

SEQ ID NO: 1336793 - DNA, 15 bp, Homo sapiens
tgcagccgtaaaaag

SEQ ID NO: 1336794 - DNA, 15 bp, Homo sapiens
atgcagccgtaaaaa

SEQ ID NO: 1336795 - DNA, 15 bp, Homo sapiens
tatgcagccgtaaaa

SEQ ID NO: 1336796 - DNA, 15 bp, Homo sapiens
ctatgcagccgtaaa

SEQ ID NO: 1336797 - DNA, 15 bp, Homo sapiens
actatgcagccgtaa

SEQ ID NO: 1336798 - DNA, 15 bp, Homo sapiens
tactatgcagccgta

SEQ ID NO: 1336799 - DNA, 15 bp, Homo sapiens
atactatgcagccgt

SEQ ID NO: 1336800 - DNA, 15 bp, Homo sapiens
aatactatgcagccg

SEQ ID NO: 1336801 - DNA, 15 bp, Homo sapiens
agaatactatgcagc

SEQ ID NO: 1336802 - DNA, 15 bp, Homo sapiens
tagaatactatgcag

SEQ ID NO: 1336803 - DNA, 15 bp, Homo sapiens
atagaatactatgca

SEQ ID NO: 1336804 - DNA, 15 bp, Homo sapiens
catagaatactatgc

SEQ ID NO: 1336805 - DNA, 15 bp, Homo sapiens
tcatagaatactatg

SEQ ID NO: 1336806 - DNA, 15 bp, Homo sapiens
atcatagaatactat

SEQ ID NO: 1336807 - DNA, 15 bp, Homo sapiens
tatcatagaatacta

SEQ ID NO: 1336808 - DNA, 15 bp, Homo sapiens
atatcatagaatact

SEQ ID NO: 1336809 - DNA, 15 bp, Homo sapiens
tatatcatagaatac

SEQ ID NO: 1336810 - DNA, 15 bp, Homo sapiens
gtatatcatagaata

SEQ ID NO: 1336811 - DNA, 15 bp, Homo sapiens
tgtatatcatagaat

SEQ ID NO: 1336812 - DNA, 15 bp, Homo sapiens
atgtatatcatagaa

SEQ ID NO: 1336813 - DNA, 15 bp, Homo sapiens
catgtatatcataga

SEQ ID NO: 1336814 - DNA, 15 bp, Homo sapiens
acatgtatatcatag

SEQ ID NO: 1336815 - DNA, 15 bp, Homo sapiens
cacatgtatatcata

SEQ ID NO: 1336816 - DNA, 15 bp, Homo sapiens
gcacatgtatatcat

SEQ ID NO: 1336817 - DNA, 15 bp, Homo sapiens
ggcacatgtatatca

SEQ ID NO: 1336818 - DNA, 15 bp, Homo sapiens
tggcacatgtatatc

SEQ ID NO: 1336819 - DNA, 15 bp, Homo sapiens
ttggcacatgtatat

SEQ ID NO: 1336820 - DNA, 15 bp, Homo sapiens
tttggcacatgtata

SEQ ID NO: 1336821 - DNA, 15 bp, Homo sapiens
atttggcacatgtat

SEQ ID NO: 1336822 - DNA, 15 bp, Homo sapiens
aatttggcacatgta

SEQ ID NO: 1336823 - DNA, 15 bp, Homo sapiens
aaatttggcacatgt

SEQ ID NO: 1336824 - DNA, 15 bp, Homo sapiens
aaaatttggcacatg

SEQ ID NO: 1336825 - DNA, 15 bp, Homo sapiens
gaaaatttggcacat

SEQ ID NO: 1336826 - DNA, 15 bp, Homo sapiens
agaaaatttggcaca

SEQ ID NO: 1336827 - DNA, 15 bp, Homo sapiens
aagaaaatttggcac

SEQ ID NO: 1336828 - DNA, 15 bp, Homo sapiens
aaagaaaatttggca

SEQ ID NO: 1336829 - DNA, 15 bp, Homo sapiens
taaagaaaatttggc

SEQ ID NO: 1336830 - DNA, 15 bp, Homo sapiens
ataaagaaaatttgg

SEQ ID NO: 1336831 - DNA, 15 bp, Homo sapiens
gataaagaaaatttg

SEQ ID NO: 1336832 - DNA, 15 bp, Homo sapiens
ggataaagaaaattt

SEQ ID NO: 1336833 - DNA, 15 bp, Homo sapiens
tggataaagaaaatt

SEQ ID NO: 1336834 - DNA, 15 bp, Homo sapiens
gctggataaagaaaa

SEQ ID NO: 1336835 - DNA, 15 bp, Homo sapiens
agctggataaagaaa

SEQ ID NO: 1336836 - DNA, 15 bp, Homo sapiens
aagctggataaagaa

SEQ ID NO: 1336837 - DNA, 15 bp, Homo sapiens
taagctggataaaga

SEQ ID NO: 1336838 - DNA, 15 bp, Homo sapiens
ataagctggataaag

SEQ ID NO: 1336839 - DNA, 15 bp, Homo sapiens
gataagctggataaa

SEQ ID NO: 1336840 - DNA, 15 bp, Homo sapiens
tgataagctggataa

SEQ ID NO: 1336841 - DNA, 15 bp, Homo sapiens
gtgataagctggata

SEQ ID NO: 1336842 - DNA, 15 bp, Homo sapiens
agtgataagctggat

SEQ ID NO: 1336843 - DNA, 15 bp, Homo sapiens
cagtgataagctgga

SEQ ID NO: 1336844 - DNA, 15 bp, Homo sapiens
tcagtgataagctgg

SEQ ID NO: 1336845 - DNA, 15 bp, Homo sapiens
atcagtgataagctg

SEQ ID NO: 1336846 - DNA, 15 bp, Homo sapiens
catcagtgataagct

SEQ ID NO: 1336847 - DNA, 15 bp, Homo sapiens
ccatcagtgataagc

SEQ ID NO: 1336848 - DNA, 15 bp, Homo sapiens
cccatcagtgataag

SEQ ID NO: 1336849 - DNA, 15 bp, Homo sapiens
gcccatcagtgataa

SEQ ID NO: 1336850 - DNA, 15 bp, Homo sapiens
agcccatcagtgata

SEQ ID NO: 1336851 - DNA, 15 bp, Homo sapiens
aagcccatcagtgat

SEQ ID NO: 1336852 - DNA, 15 bp, Homo sapiens
aaagcccatcagtga

SEQ ID NO: 1336853 - DNA, 15 bp, Homo sapiens
aaaagcccatcagtg

SEQ ID NO: 1336854 - DNA, 15 bp, Homo sapiens
caaaagcccatcagt

SEQ ID NO: 1336855 - DNA, 15 bp, Homo sapiens
ccaaaagcccatcag

SEQ ID NO: 1336856 - DNA, 15 bp, Homo sapiens
cccaaaagcccatca

SEQ ID NO: 1336857 - DNA, 15 bp, Homo sapiens
acccaaaagcccatc

SEQ ID NO: 1336858 - DNA, 15 bp, Homo sapiens
aacccaaaagcccat

SEQ ID NO: 1336859 - DNA, 15 bp, Homo sapiens
caacccaaaagccca

SEQ ID NO: 1336860 - DNA, 15 bp, Homo sapiens
ccaacccaaaagccc

SEQ ID NO: 1336861 - DNA, 15 bp, Homo sapiens
accaacccaaaagcc

SEQ ID NO: 1336862 - DNA, 15 bp, Homo sapiens
aaccaacccaaaagc

SEQ ID NO: 1336863 - DNA, 15 bp, Homo sapiens
gaaccaacccaaaag

SEQ ID NO: 1336864 - DNA, 15 bp, Homo sapiens
ggaaccaacccaaaa

SEQ ID NO: 1336865 - DNA, 15 bp, Homo sapiens
cacttggaaccaacc

SEQ ID NO: 1336866 - DNA, 15 bp, Homo sapiens
acacttggaaccaac

SEQ ID NO: 1336867 - DNA, 15 bp, Homo sapiens
aacacttggaaccaa

SEQ ID NO: 1336868 - DNA, 15 bp, Homo sapiens
aaacacttggaacca

SEQ ID NO: 1336869 - DNA, 15 bp, Homo sapiens
caaacacttggaacc

SEQ ID NO: 1336870 - DNA, 15 bp, Homo sapiens
gcaaacacttggaac

SEQ ID NO: 1336871 - DNA, 15 bp, Homo sapiens
agcaaacacttggaa

SEQ ID NO: 1336872 - DNA, 15 bp, Homo sapiens
tagcaaacacttgga

SEQ ID NO: 1336873 - DNA, 15 bp, Homo sapiens
atagcaaacacttgg

SEQ ID NO: 1336874 - DNA, 15 bp, Homo sapiens
aatagcaaacacttg

SEQ ID NO: 1336875 - DNA, 15 bp, Homo sapiens
caatagcaaacactt

SEQ ID NO: 1336876 - DNA, 15 bp, Homo sapiens
acaatagcaaacact

SEQ ID NO: 1336877 - DNA, 15 bp, Homo sapiens
tacaatagcaaacac

SEQ ID NO: 1336878 - DNA, 15 bp, Homo sapiens
ttacaatagcaaaca

SEQ ID NO: 1336879 - DNA, 15 bp, Homo sapiens
tttacaatagcaaac

SEQ ID NO: 1336880 - DNA, 15 bp, Homo sapiens
atttacaatagcaaa

SEQ ID NO: 1336881 - DNA, 15 bp, Homo sapiens
tatttacaatagcaa

SEQ ID NO: 1336882 - DNA, 15 bp, Homo sapiens
ctatttacaatagca

SEQ ID NO: 1336883 - DNA, 15 bp, Homo sapiens
actatttacaatagc

SEQ ID NO: 1336884 - DNA, 15 bp, Homo sapiens
cactatttacaatag

SEQ ID NO: 1336885 - DNA, 15 bp, Homo sapiens
gcactatttacaata

SEQ ID NO: 1336886 - DNA, 15 bp, Homo sapiens
agcactatttacaat

SEQ ID NO: 1336887 - DNA, 15 bp, Homo sapiens
cagcactatttacaa

SEQ ID NO: 1336888 - DNA, 15 bp, Homo sapiens
gcagcactatttaca

SEQ ID NO: 1336889 - DNA, 15 bp, Homo sapiens
tgcagcactatttac

SEQ ID NO: 1336890 - DNA, 15 bp, Homo sapiens
ttgcagcactattta

SEQ ID NO: 1336891 - DNA, 15 bp, Homo sapiens
attgcagcactattt

SEQ ID NO: 1336892 - DNA, 15 bp, Homo sapiens
tattgcagcactatt

SEQ ID NO: 1336893 - DNA, 15 bp, Homo sapiens
ttattgcagcactat

SEQ ID NO: 1336894 - DNA, 15 bp, Homo sapiens
tttattgcagcacta

SEQ ID NO: 1336895 - DNA, 15 bp, Homo sapiens
gtttattgcagcact

SEQ ID NO: 1336896 - DNA, 15 bp, Homo sapiens
tgtttattgcagcac

SEQ ID NO: 1336897 - DNA, 15 bp, Homo sapiens
gtgtttattgcagca

SEQ ID NO: 1336898 - DNA, 15 bp, Homo sapiens
tgtgtttattgcagc

SEQ ID NO: 1336899 - DNA, 15 bp, Homo sapiens
gtgtgtttattgcag

SEQ ID NO: 1336900 - DNA, 15 bp, Homo sapiens
cgtgtgtttattgca

SEQ ID NO: 1336901 - DNA, 15 bp, Homo sapiens
acgtgtgtttattgc

SEQ ID NO: 1336902 - DNA, 15 bp, Homo sapiens
cacgtgtgtttattg

SEQ ID NO: 1336903 - DNA, 15 bp, Homo sapiens
acacgtgtgtttatt

SEQ ID NO: 1336904 - DNA, 15 bp, Homo sapiens
cacacgtgtgtttat

SEQ ID NO: 1336905 - DNA, 15 bp, Homo sapiens
gcacacgtgtgttta

SEQ ID NO: 1336906 - DNA, 15 bp, Homo sapiens
tgcacacgtgtgttt

SEQ ID NO: 1336907 - DNA, 15 bp, Homo sapiens
atgcacacgtgtgtt

SEQ ID NO: 1336908 - DNA, 15 bp, Homo sapiens
catgcacacgtgtgt

SEQ ID NO: 1336909 - DNA, 15 bp, Homo sapiens
acatgcacacgtgtg

SEQ ID NO: 1336910 - DNA, 15 bp, Homo sapiens
cacatgcacacgtgt

SEQ ID NO: 1336911 - DNA, 15 bp, Homo sapiens
acacatgcacacgtg

SEQ ID NO: 1336912 - DNA, 15 bp, Homo sapiens
gacacatgcacacgt

SEQ ID NO: 1336913 - DNA, 15 bp, Homo sapiens
agacacatgcacacg

SEQ ID NO: 1336914 - DNA, 15 bp, Homo sapiens
aagacacatgcacac

SEQ ID NO: 1336915 - DNA, 15 bp, Homo sapiens
aaagacacatgcaca

SEQ ID NO: 1336916 - DNA, 15 bp, Homo sapiens
caaagacacatgcac

SEQ ID NO: 1336917 - DNA, 15 bp, Homo sapiens
acaaagacacatgca

SEQ ID NO: 1336918 - DNA, 15 bp, Homo sapiens
aacaaagacacatgc

SEQ ID NO: 1336919 - DNA, 15 bp, Homo sapiens
aaacaaagacacatg

SEQ ID NO: 1336920 - DNA, 15 bp, Homo sapiens
gaaacaaagacacat

SEQ ID NO: 1336921 - DNA, 15 bp, Homo sapiens
ggaaacaaagacaca

SEQ ID NO: 1336922 - DNA, 15 bp, Homo sapiens
gggaaacaaagacac

SEQ ID NO: 1336923 - DNA, 15 bp, Homo sapiens
tgggaaacaaagaca

SEQ ID NO: 1336924 - DNA, 15 bp, Homo sapiens
gtgggaaacaaagac

SEQ ID NO: 1336925 - DNA, 15 bp, Homo sapiens
agtgggaaacaaaga

SEQ ID NO: 1336926 - DNA, 15 bp, Homo sapiens
gagtgggaaacaaag

SEQ ID NO: 1336927 - DNA, 15 bp, Homo sapiens
agagtgggaaacaaa

SEQ ID NO: 1336928 - DNA, 15 bp, Homo sapiens
cagagtgggaaacaa

SEQ ID NO: 1336929 - DNA, 15 bp, Homo sapiens
acagagtgggaaaca

SEQ ID NO: 1336930 - DNA, 15 bp, Homo sapiens
tacagagtgggaaac

SEQ ID NO: 1336931 - DNA, 15 bp, Homo sapiens
ttacagagtgggaaa

SEQ ID NO: 1336932 - DNA, 15 bp, Homo sapiens
tttacagagtgggaa

SEQ ID NO: 1336933 - DNA, 15 bp, Homo sapiens
atttacagagtggga

SEQ ID NO: 1336934 - DNA, 15 bp, Homo sapiens
aatttacagagtggg

SEQ ID NO: 1336935 - DNA, 15 bp, Homo sapiens
taatttacagagtgg

SEQ ID NO: 1336936 - DNA, 15 bp, Homo sapiens
gtaatttacagagtg

SEQ ID NO: 1336937 - DNA, 15 bp, Homo sapiens
agtaatttacagagt

SEQ ID NO: 1336938 - DNA, 15 bp, Homo sapiens
cagtaatttacagag

SEQ ID NO: 1336939 - DNA, 15 bp, Homo sapiens
acagtaatttacaga

SEQ ID NO: 1336940 - DNA, 15 bp, Homo sapiens
tacagtaatttacag

SEQ ID NO: 1336941 - DNA, 15 bp, Homo sapiens
gtacagtaatttaca

SEQ ID NO: 1336942 - DNA, 15 bp, Homo sapiens
tgtacagtaatttac

SEQ ID NO: 1336943 - DNA, 15 bp, Homo sapiens
ttgtacagtaattta

SEQ ID NO: 1336944 - DNA, 15 bp, Homo sapiens
cttgtacagtaattt

SEQ ID NO: 1336945 - DNA, 15 bp, Homo sapiens
acttgtacagtaatt

SEQ ID NO: 1336946 - DNA, 15 bp, Homo sapiens
cacttgtacagtaat

SEQ ID NO: 1336947 - DNA, 15 bp, Homo sapiens
acacttgtacagtaa

SEQ ID NO: 1336948 - DNA, 15 bp, Homo sapiens
tacacttgtacagta

SEQ ID NO: 1336949 - DNA, 15 bp, Homo sapiens
ttacacttgtacagt

SEQ ID NO: 1336950 - DNA, 15 bp, Homo sapiens
cttacacttgtacag

SEQ ID NO: 1336951 - DNA, 15 bp, Homo sapiens
tcttacacttgtaca

SEQ ID NO: 1336952 - DNA, 15 bp, Homo sapiens
atcttacacttgtac

SEQ ID NO: 1336953 - DNA, 15 bp, Homo sapiens
aatcttacacttgta

SEQ ID NO: 1336954 - DNA, 15 bp, Homo sapiens
aaatcttacacttgt

SEQ ID NO: 1336955 - DNA, 15 bp, Homo sapiens
taaatcttacacttg

SEQ ID NO: 1336956 - DNA, 15 bp, Homo sapiens
ataaatcttacactt

SEQ ID NO: 1336957 - DNA, 15 bp, Homo sapiens
aataaatcttacact

SEQ ID NO: 1336958 - DNA, 15 bp, Homo sapiens
aaataaatcttacac

SEQ ID NO: 1336959 - DNA, 15 bp, Homo sapiens
aaaataaatcttaca

SEQ ID NO: 1336960 - DNA, 15 bp, Homo sapiens
aaaaataaatcttac

SEQ ID NO: 1336961 - DNA, 15 bp, Homo sapiens
aaaaaataaatctta

SEQ ID NO: 1336962 - DNA, 15 bp, Homo sapiens
caaaaaataaatctt

SEQ ID NO: 1336963 - DNA, 15 bp, Homo sapiens
tcaaaaaataaatct

SEQ ID NO: 1336964 - DNA, 15 bp, Homo sapiens
ttcaaaaaataaatc

SEQ ID NO: 1336965 - DNA, 15 bp, Homo sapiens
attcaaaaaataaat

SEQ ID NO: 1336966 - DNA, 15 bp, Homo sapiens
aaattcaaaaaataa

SEQ ID NO: 1336967 - DNA, 15 bp, Homo sapiens
taaattcaaaaaata

SEQ ID NO: 1336968 - DNA, 15 bp, Homo sapiens
ttaaattcaaaaaat

SEQ ID NO: 1336969 - DNA, 15 bp, Homo sapiens
tttaaattcaaaaaa

SEQ ID NO: 1336970 - DNA, 15 bp, Homo sapiens
ttttaaattcaaaaa

SEQ ID NO: 1336971 - DNA, 15 bp, Homo sapiens
attttaaattcaaaa

SEQ ID NO: 1336972 - DNA, 15 bp, Homo sapiens
aattttaaattcaaa

SEQ ID NO: 1336973 - DNA, 15 bp, Homo sapiens
gaattttaaattcaa

SEQ ID NO: 1336974 - DNA, 15 bp, Homo sapiens
agaattttaaattca

SEQ ID NO: 1336975 - DNA, 15 bp, Homo sapiens
cagaattttaaattc

SEQ ID NO: 1336976 - DNA, 15 bp, Homo sapiens
gcagaattttaaatt

SEQ ID NO: 1336977 - DNA, 15 bp, Homo sapiens
ggcagaattttaaat

SEQ ID NO: 1336978 - DNA, 15 bp, Homo sapiens
tggcagaattttaaa

SEQ ID NO: 1336979 - DNA, 15 bp, Homo sapiens
atggcagaattttaa

SEQ ID NO: 1336980 - DNA, 15 bp, Homo sapiens
aatggcagaatttta

SEQ ID NO: 1336981 - DNA, 15 bp, Homo sapiens
gaatggcagaatttt

SEQ ID NO: 1336982 - DNA, 15 bp, Homo sapiens
agaatggcagaattt

SEQ ID NO: 1336983 - DNA, 15 bp, Homo sapiens
cagaatggcagaatt

SEQ ID NO: 1336984 - DNA, 15 bp, Homo sapiens
tcagaatggcagaat

SEQ ID NO: 1336985 - DNA, 15 bp, Homo sapiens
ttcagaatggcagaa

SEQ ID NO: 1336986 - DNA, 15 bp, Homo sapiens
attcagaatggcaga

SEQ ID NO: 1336987 - DNA, 15 bp, Homo sapiens
tattcagaatggcag

SEQ ID NO: 1336988 - DNA, 15 bp, Homo sapiens
atattcagaatggca

SEQ ID NO: 1336989 - DNA, 15 bp, Homo sapiens
aatattcagaatggc

SEQ ID NO: 1336990 - DNA, 15 bp, Homo sapiens
aaatattcagaatgg

SEQ ID NO: 1336991 - DNA, 15 bp, Homo sapiens
gaaatattcagaatg

SEQ ID NO: 1336992 - DNA, 15 bp, Homo sapiens
tgaaatattcagaat

SEQ ID NO: 1336993 - DNA, 15 bp, Homo sapiens
ttgaaatattcagaa

SEQ ID NO: 1336994 - DNA, 15 bp, Homo sapiens
tttgaaatattcaga

SEQ ID NO: 1336995 - DNA, 15 bp, Homo sapiens
atttgaaatattcag

SEQ ID NO: 1336996 - DNA, 15 bp, Homo sapiens
catttgaaatattca

SEQ ID NO: 1336997 - DNA, 15 bp, Homo sapiens
tcatttgaaatattc

SEQ ID NO: 1336998 - DNA, 15 bp, Homo sapiens
ttcatttgaaatatt

SEQ ID NO: 1336999 - DNA, 15 bp, Homo sapiens
attcatttgaaatat

SEQ ID NO: 1337000 - DNA, 15 bp, Homo sapiens
cattcatttgaaata

SEQ ID NO: 1337001 - DNA, 15 bp, Homo sapiens
acattcatttgaaat

SEQ ID NO: 1337002 - DNA, 15 bp, Homo sapiens
aacattcatttgaaa

SEQ ID NO: 1337003 - DNA, 15 bp, Homo sapiens
taacattcatttgaa

SEQ ID NO: 1337004 - DNA, 15 bp, Homo sapiens
gtaacattcatttga

SEQ ID NO: 1337005 - DNA, 15 bp, Homo sapiens
tgtaacattcatttg

SEQ ID NO: 1337006 - DNA, 15 bp, Homo sapiens
gtgtaacattcattt

SEQ ID NO: 1337007 - DNA, 15 bp, Homo sapiens
tgtgtaacattcatt

SEQ ID NO: 1337008 - DNA, 15 bp, Homo sapiens
ttgtgtaacattcat

SEQ ID NO: 1337009 - DNA, 15 bp, Homo sapiens
attgtgtaacattca

SEQ ID NO: 1337010 - DNA, 15 bp, Homo sapiens
gattgtgtaacattc

SEQ ID NO: 1337011 - DNA, 15 bp, Homo sapiens
tgattgtgtaacatt

SEQ ID NO: 1337012 - DNA, 15 bp, Homo sapiens
atgattgtgtaacat

SEQ ID NO: 1337013 - DNA, 15 bp, Homo sapiens
aatgattgtgtaaca

SEQ ID NO: 1337014 - DNA, 15 bp, Homo sapiens
aaatgattgtgtaac

SEQ ID NO: 1337015 - DNA, 15 bp, Homo sapiens
gaaatgattgtgtaa

SEQ ID NO: 1337016 - DNA, 15 bp, Homo sapiens
agaaatgattgtgta

SEQ ID NO: 1337017 - DNA, 15 bp, Homo sapiens
gagaaatgattgtgt

SEQ ID NO: 1337018 - DNA, 15 bp, Homo sapiens
ggagaaatgattgtg

SEQ ID NO: 1337019 - DNA, 15 bp, Homo sapiens
tggagaaatgattgt

SEQ ID NO: 1337020 - DNA, 15 bp, Homo sapiens
ttggagaaatgattg

SEQ ID NO: 1337021 - DNA, 15 bp, Homo sapiens
cttggagaaatgatt

SEQ ID NO: 1337022 - DNA, 15 bp, Homo sapiens
gcttggagaaatgat

SEQ ID NO: 1337023 - DNA, 15 bp, Homo sapiens
tgcttggagaaatga

SEQ ID NO: 1337024 - DNA, 15 bp, Homo sapiens
ttgcttggagaaatg

SEQ ID NO: 1337025 - DNA, 15 bp, Homo sapiens
tttgcttggagaaat

SEQ ID NO: 1337026 - DNA, 15 bp, Homo sapiens
atttgcttggagaaa

SEQ ID NO: 1337027 - DNA, 15 bp, Homo sapiens
catttgcttggagaa

SEQ ID NO: 1337028 - DNA, 15 bp, Homo sapiens
ccatttgcttggaga

SEQ ID NO: 1337029 - DNA, 15 bp, Homo sapiens
tccatttgcttggag

SEQ ID NO: 1337030 - DNA, 15 bp, Homo sapiens
ttccatttgcttgga

SEQ ID NO: 1337031 - DNA, 15 bp, Homo sapiens
tttccatttgcttgg

SEQ ID NO: 1337032 - DNA, 15 bp, Homo sapiens
gtttccatttgcttg

SEQ ID NO: 1337033 - DNA, 15 bp, Homo sapiens
tgtttccatttgctt

SEQ ID NO: 1337034 - DNA, 15 bp, Homo sapiens
atgtttccatttgct

SEQ ID NO: 1337035 - DNA, 15 bp, Homo sapiens
aatgtttccatttgc

SEQ ID NO: 1337036 - DNA, 15 bp, Homo sapiens
aaatgtttccatttg

SEQ ID NO: 1337037 - DNA, 15 bp, Homo sapiens
gaaatgtttccattt

SEQ ID NO: 1337038 - DNA, 15 bp, Homo sapiens
ggaaatgtttccatt

SEQ ID NO: 1337039 - DNA, 15 bp, Homo sapiens
tggaaatgtttccat

SEQ ID NO: 1337040 - DNA, 15 bp, Homo sapiens
ctggaaatgtttcca

SEQ ID NO: 1337041 - DNA, 15 bp, Homo sapiens
cctggaaatgtttcc

SEQ ID NO: 1337042 - DNA, 15 bp, Homo sapiens
ccctggaaatgtttc

SEQ ID NO: 1337043 - DNA, 15 bp, Homo sapiens
cccctggaaatgttt

SEQ ID NO: 1337044 - DNA, 15 bp, Homo sapiens
acccctggaaatgtt

SEQ ID NO: 1337045 - DNA, 15 bp, Homo sapiens
tacccctggaaatgt

SEQ ID NO: 1337046 - DNA, 15 bp, Homo sapiens
ctacccctggaaatg

SEQ ID NO: 1337047 - DNA, 15 bp, Homo sapiens
gctacccctggaaat

SEQ ID NO: 1337048 - DNA, 15 bp, Homo sapiens
agctacccctggaaa

SEQ ID NO: 1337049 - DNA, 15 bp, Homo sapiens
cagctacccctggaa

SEQ ID NO: 1337050 - DNA, 15 bp, Homo sapiens
gcagctacccctgga

SEQ ID NO: 1337051 - DNA, 15 bp, Homo sapiens
tgcagctacccctgg

SEQ ID NO: 1337052 - DNA, 15 bp, Homo sapiens
gtgcagctacccctg

SEQ ID NO: 1337053 - DNA, 15 bp, Homo sapiens
tgtgcagctacccct

SEQ ID NO: 1337054 - DNA, 15 bp, Homo sapiens
ctgtgcagctacccc

SEQ ID NO: 1337055 - DNA, 15 bp, Homo sapiens
gctgtgcagctaccc

SEQ ID NO: 1337056 - DNA, 15 bp, Homo sapiens
tgctgtgcagctacc

SEQ ID NO: 1337057 - DNA, 15 bp, Homo sapiens
atgctgtgcagctac

SEQ ID NO: 1337058 - DNA, 15 bp, Homo sapiens
tatgctgtgcagcta

SEQ ID NO: 1337059 - DNA, 15 bp, Homo sapiens
atatgctgtgcagct

SEQ ID NO: 1337060 - DNA, 15 bp, Homo sapiens
tatatgctgtgcagc

SEQ ID NO: 1337061 - DNA, 15 bp, Homo sapiens
gtatatgctgtgcag

SEQ ID NO: 1337062 - DNA, 15 bp, Homo sapiens
tgtatatgctgtgca

SEQ ID NO: 1337063 - DNA, 15 bp, Homo sapiens
ttgtatatgctgtgc

SEQ ID NO: 1337064 - DNA, 15 bp, Homo sapiens
tttgtatatgctgtg

SEQ ID NO: 1337065 - DNA, 15 bp, Homo sapiens
cttttgtatatgctg

SEQ ID NO: 1337066 - DNA, 15 bp, Homo sapiens
tcttttgtatatgct

SEQ ID NO: 1337067 - DNA, 15 bp, Homo sapiens
ttcttttgtatatgc

SEQ ID NO: 1337068 - DNA, 15 bp, Homo sapiens
cttcttttgtatatg

SEQ ID NO: 1337069 - DNA, 15 bp, Homo sapiens
ccttcttttgtatat

SEQ ID NO: 1337070 - DNA, 15 bp, Homo sapiens
cccttcttttgtata

SEQ ID NO: 1337071 - DNA, 15 bp, Homo sapiens
acccttcttttgtat

SEQ ID NO: 1337072 - DNA, 15 bp, Homo sapiens
cacccttcttttgta

SEQ ID NO: 1337073 - DNA, 15 bp, Homo sapiens
ccacccttcttttgt

SEQ ID NO: 1337074 - DNA, 15 bp, Homo sapiens
accacccttcttttg

SEQ ID NO: 1337075 - DNA, 15 bp, Homo sapiens
aaccacccttctttt

SEQ ID NO: 1337076 - DNA, 15 bp, Homo sapiens
caaccacccttcttt

SEQ ID NO: 1337077 - DNA, 15 bp, Homo sapiens
ccaaccacccttctt

SEQ ID NO: 1337078 - DNA, 15 bp, Homo sapiens
accaaccacccttct

SEQ ID NO: 1337079 - DNA, 15 bp, Homo sapiens
gaccaaccacccttc

SEQ ID NO: 1337080 - DNA, 15 bp, Homo sapiens
tgaccaaccaccctt

SEQ ID NO: 1337081 - DNA, 15 bp, Homo sapiens
ttgaccaaccaccct

SEQ ID NO: 1337082 - DNA, 15 bp, Homo sapiens
attgaccaaccaccc

SEQ ID NO: 1337083 - DNA, 15 bp, Homo sapiens
cattgaccaaccacc

SEQ ID NO: 1337084 - DNA, 15 bp, Homo sapiens
gcattgaccaaccac

SEQ ID NO: 1337085 - DNA, 15 bp, Homo sapiens
cgcattgaccaacca

SEQ ID NO: 1337086 - DNA, 15 bp, Homo sapiens
gcgcattgaccaacc

SEQ ID NO: 1337087 - DNA, 15 bp, Homo sapiens
tgcgcattgaccaac

SEQ ID NO: 1337088 - DNA, 15 bp, Homo sapiens
atgcgcattgaccaa

SEQ ID NO: 1337089 - DNA, 15 bp, Homo sapiens
aatgcgcattgacca

SEQ ID NO: 1337090 - DNA, 15 bp, Homo sapiens
aaatgcgcattgacc

SEQ ID NO: 1337091 - DNA, 15 bp, Homo sapiens
aaaatgcgcattgac

SEQ ID NO: 1337092 - DNA, 15 bp, Homo sapiens
aaaaatgcgcattga

SEQ ID NO: 1337093 - DNA, 15 bp, Homo sapiens
aaaaaatgcgcattg

SEQ ID NO: 1337094 - DNA, 15 bp, Homo sapiens
caaaaaatgcgcatt

SEQ ID NO: 1337095 - DNA, 15 bp, Homo sapiens
acaaaaaatgcgcat

SEQ ID NO: 1337096 - DNA, 15 bp, Homo sapiens
cacaaaaaatgcgca

SEQ ID NO: 1337097 - DNA, 15 bp, Homo sapiens
acacaaaaaatgcgc

SEQ ID NO: 1337098 - DNA, 15 bp, Homo sapiens
cacacaaaaaatgcg

SEQ ID NO: 1337099 - DNA, 15 bp, Homo sapiens
tcacacaaaaaatgc

SEQ ID NO: 1337100 - DNA, 15 bp, Homo sapiens
ctcacacaaaaaatg

SEQ ID NO: 1337101 - DNA, 15 bp, Homo sapiens
actcacacaaaaaat

SEQ ID NO: 1337102 - DNA, 15 bp, Homo sapiens
cactcacacaaaaaa

SEQ ID NO: 1337103 - DNA, 15 bp, Homo sapiens
tcactcacacaaaaa

SEQ ID NO: 1337104 - DNA, 15 bp, Homo sapiens
ctcactcacacaaaa

SEQ ID NO: 1337105 - DNA, 15 bp, Homo sapiens
actcactcacacaaa

SEQ ID NO: 1337106 - DNA, 15 bp, Homo sapiens
tactcactcacacaa

SEQ ID NO: 1337107 - DNA, 15 bp, Homo sapiens
atactcactcacaca

SEQ ID NO: 1337108 - DNA, 15 bp, Homo sapiens
catactcactcacac

SEQ ID NO: 1337109 - DNA, 15 bp, Homo sapiens
tcatactcactcaca

SEQ ID NO: 1337110 - DNA, 15 bp, Homo sapiens
gtcatactcactcac

SEQ ID NO: 1337111 - DNA, 15 bp, Homo sapiens
tgtcatactcactca

SEQ ID NO: 1337112 - DNA, 15 bp, Homo sapiens
ctgtcatactcactc

SEQ ID NO: 1337113 - DNA, 15 bp, Homo sapiens
actgtcatactcact

SEQ ID NO: 1337114 - DNA, 15 bp, Homo sapiens
aactgtcatactcac

SEQ ID NO: 1337115 - DNA, 15 bp, Homo sapiens
aaactgtcatactca

SEQ ID NO: 1337116 - DNA, 15 bp, Homo sapiens
taaactgtcatactc

SEQ ID NO: 1337117 - DNA, 15 bp, Homo sapiens
ctaaactgtcatact

SEQ ID NO: 1337118 - DNA, 15 bp, Homo sapiens
actaaactgtcatac

SEQ ID NO: 1337119 - DNA, 15 bp, Homo sapiens
tactaaactgtcata

SEQ ID NO: 1337120 - DNA, 15 bp, Homo sapiens
atactaaactgtcat

SEQ ID NO: 1337121 - DNA, 15 bp, Homo sapiens
tatactaaactgtca

SEQ ID NO: 1337122 - DNA, 15 bp, Homo sapiens
ctatactaaactgtc

SEQ ID NO: 1337123 - DNA, 15 bp, Homo sapiens
tctatactaaactgt

SEQ ID NO: 1337124 - DNA, 15 bp, Homo sapiens
ctctatactaaactg

SEQ ID NO: 1337125 - DNA, 15 bp, Homo sapiens
tctctatactaaact

SEQ ID NO: 1337126 - DNA, 15 bp, Homo sapiens
ctctctatactaaac

SEQ ID NO: 1337127 - DNA, 15 bp, Homo sapiens
tctctctatactaaa

SEQ ID NO: 1337128 - DNA, 15 bp, Homo sapiens
ttctctctatactaa

SEQ ID NO: 1337129 - DNA, 15 bp, Homo sapiens
cttctctctatacta

SEQ ID NO: 1337130 - DNA, 15 bp, Homo sapiens
tcttctctctatact

SEQ ID NO: 1337131 - DNA, 15 bp, Homo sapiens
ctcttctctctatac

SEQ ID NO: 1337132 - DNA, 15 bp, Homo sapiens
tctcttctctctata

SEQ ID NO: 1337133 - DNA, 15 bp, Homo sapiens
gtctcttctctctat

SEQ ID NO: 1337134 - DNA, 15 bp, Homo sapiens
agtctcttctctcta

SEQ ID NO: 1337135 - DNA, 15 bp, Homo sapiens
aagtctcttctctct

SEQ ID NO: 1337136 - DNA, 15 bp, Homo sapiens
aaagtctcttctctc

SEQ ID NO: 1337137 - DNA, 15 bp, Homo sapiens
gaaagtctcttctct

SEQ ID NO: 1337138 - DNA, 15 bp, Homo sapiens
agaaagtctcttctc

SEQ ID NO: 1337139 - DNA, 15 bp, Homo sapiens
cagaaagtctcttct

SEQ ID NO: 1337140 - DNA, 15 bp, Homo sapiens
ccagaaagtctcttc

SEQ ID NO: 1337141 - DNA, 15 bp, Homo sapiens
gccagaaagtctctt

SEQ ID NO: 1337142 - DNA, 15 bp, Homo sapiens
tgccagaaagtctct

SEQ ID NO: 1337143 - DNA, 15 bp, Homo sapiens
ctgccagaaagtctc

SEQ ID NO: 1337144 - DNA, 15 bp, Homo sapiens
tctgccagaaagtct

SEQ ID NO: 1337145 - DNA, 15 bp, Homo sapiens
ttctgccagaaagtc

SEQ ID NO: 1337146 - DNA, 15 bp, Homo sapiens
attctgccagaaagt

SEQ ID NO: 1337147 - DNA, 15 bp, Homo sapiens
gattctgccagaaag

SEQ ID NO: 1337148 - DNA, 15 bp, Homo sapiens
tgattctgccagaaa

SEQ ID NO: 1337149 - DNA, 15 bp, Homo sapiens
atgattctgccagaa

SEQ ID NO: 1337150 - DNA, 15 bp, Homo sapiens
catgattctgccaga

SEQ ID NO: 1337151 - DNA, 15 bp, Homo sapiens
gcatgattctgccag

SEQ ID NO: 1337152 - DNA, 15 bp, Homo sapiens
ggcatgattctgcca

SEQ ID NO: 1337153 - DNA, 15 bp, Homo sapiens
tggcatgattctgcc

SEQ ID NO: 1337154 - DNA, 15 bp, Homo sapiens
gtggcatgattctgc

SEQ ID NO: 1337155 - DNA, 15 bp, Homo sapiens
agtggcatgattctg

SEQ ID NO: 1337156 - DNA, 15 bp, Homo sapiens
aagtggcatgattct

SEQ ID NO: 1337157 - DNA, 15 bp, Homo sapiens
caagtggcatgattc

SEQ ID NO: 1337158 - DNA, 15 bp, Homo sapiens
gcaagtggcatgatt

SEQ ID NO: 1337159 - DNA, 15 bp, Homo sapiens
agcaagtggcatgat

SEQ ID NO: 1337160 - DNA, 15 bp, Homo sapiens
aagcaagtggcatga

SEQ ID NO: 1337161 - DNA, 15 bp, Homo sapiens
taagcaagtggcatg

SEQ ID NO: 1337162 - DNA, 15 bp, Homo sapiens
gtaagcaagtggcat

SEQ ID NO: 1337163 - DNA, 15 bp, Homo sapiens
agtaagcaagtggca

SEQ ID NO: 1337164 - DNA, 15 bp, Homo sapiens
aagtaagcaagtggc

SEQ ID NO: 1337165 - DNA, 15 bp, Homo sapiens
taagtaagcaagtgg

SEQ ID NO: 1337166 - DNA, 15 bp, Homo sapiens
ttaagtaagcaagtg

SEQ ID NO: 1337167 - DNA, 15 bp, Homo sapiens
gttaagtaagcaagt

SEQ ID NO: 1337168 - DNA, 15 bp, Homo sapiens
agttaagtaagcaag

SEQ ID NO: 1337169 - DNA, 15 bp, Homo sapiens
cagttaagtaagcaa

SEQ ID NO: 1337170 - DNA, 15 bp, Homo sapiens
ccagttaagtaagca

SEQ ID NO: 1337171 - DNA, 15 bp, Homo sapiens
gccagttaagtaagc

SEQ ID NO: 1337172 - DNA, 15 bp, Homo sapiens
agccagttaagtaag

SEQ ID NO: 1337173 - DNA, 15 bp, Homo sapiens
gagccagttaagtaa

SEQ ID NO: 1337174 - DNA, 15 bp, Homo sapiens
tgagccagttaagta

SEQ ID NO: 1337175 - DNA, 15 bp, Homo sapiens
ttgagccagttaagt

SEQ ID NO: 1337176 - DNA, 15 bp, Homo sapiens
gttgagccagttaag

SEQ ID NO: 1337177 - DNA, 15 bp, Homo sapiens
tgttgagccagttaa

SEQ ID NO: 1337178 - DNA, 15 bp, Homo sapiens
ttgttgagccagtta

SEQ ID NO: 1337179 - DNA, 15 bp, Homo sapiens
tttgttgagccagtt

SEQ ID NO: 1337180 - DNA, 15 bp, Homo sapiens
ctttgttgagccagt

SEQ ID NO: 1337181 - DNA, 15 bp, Homo sapiens
gctttgttgagccag

SEQ ID NO: 1337182 - DNA, 15 bp, Homo sapiens
agctttgttgagcca

SEQ ID NO: 1337183 - DNA, 15 bp, Homo sapiens
tagctttgttgagcc

SEQ ID NO: 1337184 - DNA, 15 bp, Homo sapiens
atagctttgttgagc

SEQ ID NO: 1337185 - DNA, 15 bp, Homo sapiens
tatagctttgttgag

SEQ ID NO: 1337186 - DNA, 15 bp, Homo sapiens
gtatagctttgttga

SEQ ID NO: 1337187 - DNA, 15 bp, Homo sapiens
tgtatagctttgttg

SEQ ID NO: 1337188 - DNA, 15 bp, Homo sapiens
ttgtatagctttgtt

SEQ ID NO: 1337189 - DNA, 15 bp, Homo sapiens
attgtatagctttgt

SEQ ID NO: 1337190 - DNA, 15 bp, Homo sapiens
aattgtatagctttg

SEQ ID NO: 1337191 - DNA, 15 bp, Homo sapiens
taattgtatagcttt

SEQ ID NO: 1337192 - DNA, 15 bp, Homo sapiens
ataattgtatagctt

SEQ ID NO: 1337193 - DNA, 15 bp, Homo sapiens
tataattgtatagct

SEQ ID NO: 1337194 - DNA, 15 bp, Homo sapiens
atataattgtatagc

SEQ ID NO: 1337195 - DNA, 15 bp, Homo sapiens
gatataattgtatag

SEQ ID NO: 1337196 - DNA, 15 bp, Homo sapiens
ggatataattgtata

SEQ ID NO: 1337197 - DNA, 15 bp, Homo sapiens
tggatataattgtat

SEQ ID NO: 1337198 - DNA, 15 bp, Homo sapiens
atggatataattgta

SEQ ID NO: 1337199 - DNA, 15 bp, Homo sapiens
tatggatataattgt

SEQ ID NO: 1337200 - DNA, 15 bp, Homo sapiens
gtatggatataattg

SEQ ID NO: 1337201 - DNA, 15 bp, Homo sapiens
tgtatggatataatt

SEQ ID NO: 1337202 - DNA, 15 bp, Homo sapiens
atgtatggatataat

SEQ ID NO: 1337203 - DNA, 15 bp, Homo sapiens
tatgtatggatataa

SEQ ID NO: 1337204 - DNA, 15 bp, Homo sapiens
ctatgtatggatata

SEQ ID NO: 1337205 - DNA, 15 bp, Homo sapiens
tctatgtatggatat

SEQ ID NO: 1337206 - DNA, 15 bp, Homo sapiens
ttctatgtatggata

SEQ ID NO: 1337207 - DNA, 15 bp, Homo sapiens
attctatgtatggat

SEQ ID NO: 1337208 - DNA, 15 bp, Homo sapiens
cattctatgtatgga

SEQ ID NO: 1337209 - DNA, 15 bp, Homo sapiens
gcattctatgtatgg

SEQ ID NO: 1337210 - DNA, 15 bp, Homo sapiens
tgcattctatgtatg

SEQ ID NO: 1337211 - DNA, 15 bp, Homo sapiens
atgcattctatgtat

SEQ ID NO: 1337212 - DNA, 15 bp, Homo sapiens
catgcattctatgta

SEQ ID NO: 1337213 - DNA, 15 bp, Homo sapiens
tcatgcattctatgt

SEQ ID NO: 1337214 - DNA, 15 bp, Homo sapiens
gtcatgcattctatg

SEQ ID NO: 1337215 - DNA, 15 bp, Homo sapiens
agtcatgcattctat

SEQ ID NO: 1337216 - DNA, 15 bp, Homo sapiens
tagtcatgcattcta

SEQ ID NO: 1337217 - DNA, 15 bp, Homo sapiens
gtagtcatgcattct

SEQ ID NO: 1337218 - DNA, 15 bp, Homo sapiens
ggtagtcatgcattc

SEQ ID NO: 1337219 - DNA, 15 bp, Homo sapiens
aggtagtcatgcatt

SEQ ID NO: 1337220 - DNA, 15 bp, Homo sapiens
taggtagtcatgcat

SEQ ID NO: 1337221 - DNA, 15 bp, Homo sapiens
ataggtagtcatgca

SEQ ID NO: 1337222 - DNA, 15 bp, Homo sapiens
aataggtagtcatgc

SEQ ID NO: 1337223 - DNA, 15 bp, Homo sapiens
aaataggtagtcatg

SEQ ID NO: 1337224 - DNA, 15 bp, Homo sapiens
taaataggtagtcat

SEQ ID NO: 1337225 - DNA, 15 bp, Homo sapiens
ttaaataggtagtca

SEQ ID NO: 1337226 - DNA, 15 bp, Homo sapiens
gttaaataggtagtc

SEQ ID NO: 1337227 - DNA, 15 bp, Homo sapiens
tgttaaataggtagt

SEQ ID NO: 1337228 - DNA, 15 bp, Homo sapiens
ctgttaaataggtag

SEQ ID NO: 1337229 - DNA, 15 bp, Homo sapiens
tctgttaaataggta

SEQ ID NO: 1337230 - DNA, 15 bp, Homo sapiens
ctctgttaaataggt

SEQ ID NO: 1337231 - DNA, 15 bp, Homo sapiens
actctgttaaatagg

SEQ ID NO: 1337232 - DNA, 15 bp, Homo sapiens
tactctgttaaatag

SEQ ID NO: 1337233 - DNA, 15 bp, Homo sapiens
ctactctgttaaata

SEQ ID NO: 1337234 - DNA, 15 bp, Homo sapiens
gctactctgttaaat

SEQ ID NO: 1337235 - DNA, 15 bp, Homo sapiens
agctactctgttaaa

SEQ ID NO: 1337236 - DNA, 15 bp, Homo sapiens
tagctactctgttaa

SEQ ID NO: 1337237 - DNA, 15 bp, Homo sapiens
ttagctactctgtta

SEQ ID NO: 1337238 - DNA, 15 bp, Homo sapiens
cttagctactctgtt

SEQ ID NO: 1337239 - DNA, 15 bp, Homo sapiens
ccttagctactctgt

SEQ ID NO: 1337240 - DNA, 15 bp, Homo sapiens
tccttagctactctg

SEQ ID NO: 1337241 - DNA, 15 bp, Homo sapiens
ttccttagctactct

SEQ ID NO: 1337242 - DNA, 15 bp, Homo sapiens
tttccttagctactc

SEQ ID NO: 1337243 - DNA, 15 bp, Homo sapiens
gtttccttagctact

SEQ ID NO: 1337244 - DNA, 15 bp, Homo sapiens
tgtttccttagctac

SEQ ID NO: 1337245 - DNA, 15 bp, Homo sapiens
ctgtttccttagcta

SEQ ID NO: 1337246 - DNA, 15 bp, Homo sapiens
tctgtttccttagct

SEQ ID NO: 1337247 - DNA, 15 bp, Homo sapiens
ttctgtttccttagc

SEQ ID NO: 1337248 - DNA, 15 bp, Homo sapiens
tttctgtttccttag

SEQ ID NO: 1337249 - DNA, 15 bp, Homo sapiens
ttttctgtttcctta

SEQ ID NO: 1337250 - DNA, 15 bp, Homo sapiens
attttctgtttcctt

SEQ ID NO: 1337251 - DNA, 15 bp, Homo sapiens
gattttctgtttcct

SEQ ID NO: 1337252 - DNA, 15 bp, Homo sapiens
tgattttctgtttcc

SEQ ID NO: 1337253 - DNA, 15 bp, Homo sapiens
gtgattttctgtttc

SEQ ID NO: 1337254 - DNA, 15 bp, Homo sapiens
agtgattttctgttt

SEQ ID NO: 1337255 - DNA, 15 bp, Homo sapiens
cagtgattttctgtt

SEQ ID NO: 1337256 - DNA, 15 bp, Homo sapiens
tcagtgattttctgt

SEQ ID NO: 1337257 - DNA, 15 bp, Homo sapiens
atcagtgattttctg

SEQ ID NO: 1337258 - DNA, 15 bp, Homo sapiens
aatcagtgattttct

SEQ ID NO: 1337259 - DNA, 15 bp, Homo sapiens
aaatcagtgattttc

SEQ ID NO: 1337260 - DNA, 15 bp, Homo sapiens
aaaatcagtgatttt

SEQ ID NO: 1337261 - DNA, 15 bp, Homo sapiens
aaaaatcagtgattt

SEQ ID NO: 1337262 - DNA, 15 bp, Homo sapiens
gaaaaatcagtgatt

SEQ ID NO: 1337263 - DNA, 15 bp, Homo sapiens
agaaaaatcagtgat

SEQ ID NO: 1337264 - DNA, 15 bp, Homo sapiens
gagaaaaatcagtga

SEQ ID NO: 1337265 - DNA, 15 bp, Homo sapiens
tgagaaaaatcagtg

SEQ ID NO: 1337266 - DNA, 15 bp, Homo sapiens
ttgagaaaaatcagt

SEQ ID NO: 1337267 - DNA, 15 bp, Homo sapiens
cttgagaaaaatcag

SEQ ID NO: 1337268 - DNA, 15 bp, Homo sapiens
ccttgagaaaaatca

SEQ ID NO: 1337269 - DNA, 15 bp, Homo sapiens
cccttgagaaaaatc

SEQ ID NO: 1337270 - DNA, 15 bp, Homo sapiens
tcccttgagaaaaat

SEQ ID NO: 1337271 - DNA, 15 bp, Homo sapiens
ttcccttgagaaaaa

SEQ ID NO: 1337272 - DNA, 15 bp, Homo sapiens
cttcccttgagaaaa

SEQ ID NO: 1337273 - DNA, 15 bp, Homo sapiens
tcttcccttgagaaa

SEQ ID NO: 1337274 - DNA, 15 bp, Homo sapiens
ttcttcccttgagaa

SEQ ID NO: 1337275 - DNA, 15 bp, Homo sapiens
attcttcccttgaga

SEQ ID NO: 1337276 - DNA, 15 bp, Homo sapiens
gattcttcccttgag

SEQ ID NO: 1337277 - DNA, 15 bp, Homo sapiens
tgattcttcccttga

SEQ ID NO: 1337278 - DNA, 15 bp, Homo sapiens
atgattcttcccttg

SEQ ID NO: 1337279 - DNA, 15 bp, Homo sapiens
gatgattcttccctt

SEQ ID NO: 1337280 - DNA, 15 bp, Homo sapiens
ggatgattcttccct

SEQ ID NO: 1337281 - DNA, 15 bp, Homo sapiens
tggatgattcttccc

SEQ ID NO: 1337282 - DNA, 15 bp, Homo sapiens
ttggatgattcttcc

SEQ ID NO: 1337283 - DNA, 15 bp, Homo sapiens
tttggatgattcttc

SEQ ID NO: 1337284 - DNA, 15 bp, Homo sapiens
ctttggatgattctt

SEQ ID NO: 1337285 - DNA, 15 bp, Homo sapiens
tctttggatgattct

SEQ ID NO: 1337286 - DNA, 15 bp, Homo sapiens
ttctttggatgattc

SEQ ID NO: 1337287 - DNA, 15 bp, Homo sapiens
gttctttggatgatt

SEQ ID NO: 1337288 - DNA, 15 bp, Homo sapiens
tgttctttggatgat

SEQ ID NO: 1337289 - DNA, 15 bp, Homo sapiens
ttgttctttggatga

SEQ ID NO: 1337290 - DNA, 15 bp, Homo sapiens
cttgttctttggatg

SEQ ID NO: 1337291 - DNA, 15 bp, Homo sapiens
acttgttctttggat

SEQ ID NO: 1337292 - DNA, 15 bp, Homo sapiens
cacttgttctttgga

SEQ ID NO: 1337293 - DNA, 15 bp, Homo sapiens
gcacttgttctttgg

SEQ ID NO: 1337294 - DNA, 15 bp, Homo sapiens
agcacttgttctttg

SEQ ID NO: 1337295 - DNA, 15 bp, Homo sapiens
tagcacttgttcttt

SEQ ID NO: 1337296 - DNA, 15 bp, Homo sapiens
atagcacttgttctt

SEQ ID NO: 1337297 - DNA, 15 bp, Homo sapiens
gatagcacttgttct

SEQ ID NO: 1337298 - DNA, 15 bp, Homo sapiens
agatagcacttgttc

SEQ ID NO: 1337299 - DNA, 15 bp, Homo sapiens
aagatagcacttgtt

SEQ ID NO: 1337300 - DNA, 15 bp, Homo sapiens
caagatagcacttgt

SEQ ID NO: 1337301 - DNA, 15 bp, Homo sapiens
acaagatagcacttg

SEQ ID NO: 1337302 - DNA, 15 bp, Homo sapiens
gacaagatagcactt

SEQ ID NO: 1337303 - DNA, 15 bp, Homo sapiens
agacaagatagcact

SEQ ID NO: 1337304 - DNA, 15 bp, Homo sapiens
cagacaagatagcac

SEQ ID NO: 1337305 - DNA, 15 bp, Homo sapiens
acagacaagatagca

SEQ ID NO: 1337306 - DNA, 15 bp, Homo sapiens
aacagacaagatagc

SEQ ID NO: 1337307 - DNA, 15 bp, Homo sapiens
aaacagacaagatag

SEQ ID NO: 1337308 - DNA, 15 bp, Homo sapiens
aaaacagacaagata

SEQ ID NO: 1337309 - DNA, 15 bp, Homo sapiens
aaaaacagacaagat

SEQ ID NO: 1337310 - DNA, 15 bp, Homo sapiens
taaaaacagacaaga

SEQ ID NO: 1337311 - DNA, 15 bp, Homo sapiens
ataaaaacagacaag

SEQ ID NO: 1337312 - DNA, 15 bp, Homo sapiens
gataaaaacagacaa

SEQ ID NO: 1337313 - DNA, 15 bp, Homo sapiens
agataaaaacagaca

SEQ ID NO: 1337314 - DNA, 15 bp, Homo sapiens
tagataaaaacagac

SEQ ID NO: 1337315 - DNA, 15 bp, Homo sapiens
atagataaaaacaga

SEQ ID NO: 1337316 - DNA, 15 bp, Homo sapiens
tatagataaaaacag

SEQ ID NO: 1337317 - DNA, 15 bp, Homo sapiens
atatagataaaaaca

SEQ ID NO: 1337318 - DNA, 15 bp, Homo sapiens
catatagataaaaac

SEQ ID NO: 1337319 - DNA, 15 bp, Homo sapiens
gcatatagataaaaa

SEQ ID NO: 1337320 - DNA, 15 bp, Homo sapiens
agcatatagataaaa

SEQ ID NO: 1337321 - DNA, 15 bp, Homo sapiens
tagcatatagataaa

SEQ ID NO: 1337322 - DNA, 15 bp, Homo sapiens
gtagcatatagataa

SEQ ID NO: 1337323 - DNA, 15 bp, Homo sapiens
agtagcatatagata

SEQ ID NO: 1337324 - DNA, 15 bp, Homo sapiens
gagtagcatatagat

SEQ ID NO: 1337325 - DNA, 15 bp, Homo sapiens
agagtagcatataga

SEQ ID NO: 1337326 - DNA, 15 bp, Homo sapiens
gagagtagcatatag

SEQ ID NO: 1337327 - DNA, 15 bp, Homo sapiens
tgagagtagcatata

SEQ ID NO: 1337328 - DNA, 15 bp, Homo sapiens
ctgagagtagcatat

SEQ ID NO: 1337329 - DNA, 15 bp, Homo sapiens
gctgagagtagcata

SEQ ID NO: 1337330 - DNA, 15 bp, Homo sapiens
agctgagagtagcat

SEQ ID NO: 1337331 - DNA, 15 bp, Homo sapiens
tagctgagagtagca

SEQ ID NO: 1337332 - DNA, 15 bp, Homo sapiens
ttagctgagagtagc

SEQ ID NO: 1337333 - DNA, 15 bp, Homo sapiens
attagctgagagtag

SEQ ID NO: 1337334 - DNA, 15 bp, Homo sapiens
tattagctgagagta

SEQ ID NO: 1337335 - DNA, 15 bp, Homo sapiens
gtattagctgagagt

SEQ ID NO: 1337336 - DNA, 15 bp, Homo sapiens
agtattagctgagag

SEQ ID NO: 1337337 - DNA, 15 bp, Homo sapiens
cagtattagctgaga

SEQ ID NO: 1337338 - DNA, 15 bp, Homo sapiens
tcagtattagctgag

SEQ ID NO: 1337339 - DNA, 15 bp, Homo sapiens
atcagtattagctga

SEQ ID NO: 1337340 - DNA, 15 bp, Homo sapiens
catcagtattagctg

SEQ ID NO: 1337341 - DNA, 15 bp, Homo sapiens
tcatcagtattagct

SEQ ID NO: 1337342 - DNA, 15 bp, Homo sapiens
atcatcagtattagc

SEQ ID NO: 1337343 - DNA, 15 bp, Homo sapiens
catcatcagtattag

SEQ ID NO: 1337344 - DNA, 15 bp, Homo sapiens
tcatcatcagtatta

SEQ ID NO: 1337345 - DNA, 15 bp, Homo sapiens
ttcatcatcagtatt

SEQ ID NO: 1337346 - DNA, 15 bp, Homo sapiens
tttcatcatcagtat

SEQ ID NO: 1337347 - DNA, 15 bp, Homo sapiens
ctttcatcatcagta

SEQ ID NO: 1337348 - DNA, 15 bp, Homo sapiens
tctttcatcatcagt

SEQ ID NO: 1337349 - DNA, 15 bp, Homo sapiens
atctttcatcatcag

SEQ ID NO: 1337350 - DNA, 15 bp, Homo sapiens
aatctttcatcatca

SEQ ID NO: 1337351 - DNA, 15 bp, Homo sapiens
taatctttcatcatc

SEQ ID NO: 1337352 - DNA, 15 bp, Homo sapiens
ataatctttcatcat

SEQ ID NO: 1337353 - DNA, 15 bp, Homo sapiens
gataatctttcatca

SEQ ID NO: 1337354 - DNA, 15 bp, Homo sapiens
tgataatctttcatc

SEQ ID NO: 1337355 - DNA, 15 bp, Homo sapiens
ttgataatctttcat

SEQ ID NO: 1337356 - DNA, 15 bp, Homo sapiens
cttgataatctttca

SEQ ID NO: 1337357 - DNA, 15 bp, Homo sapiens
tcttgataatctttc

SEQ ID NO: 1337358 - DNA, 15 bp, Homo sapiens
ttcttgataatcttt

SEQ ID NO: 1337359 - DNA, 15 bp, Homo sapiens
attcttgataatctt

SEQ ID NO: 1337360 - DNA, 15 bp, Homo sapiens
gattcttgataatct

SEQ ID NO: 1337361 - DNA, 15 bp, Homo sapiens
agattcttgataatc

SEQ ID NO: 1337362 - DNA, 15 bp, Homo sapiens
gagattcttgataat

SEQ ID NO: 1337363 - DNA, 15 bp, Homo sapiens
ggagattcttgataa

SEQ ID NO: 1337364 - DNA, 15 bp, Homo sapiens
tggagattcttgata

SEQ ID NO: 1337365 - DNA, 15 bp, Homo sapiens
ttggagattcttgat

SEQ ID NO: 1337366 - DNA, 15 bp, Homo sapiens
gttggagattcttga

SEQ ID NO: 1337367 - DNA, 15 bp, Homo sapiens
tgttggagattcttg

SEQ ID NO: 1337368 - DNA, 15 bp, Homo sapiens
atgttggagattctt

SEQ ID NO: 1337369 - DNA, 15 bp, Homo sapiens
tatgttggagattct

SEQ ID NO: 1337370 - DNA, 15 bp, Homo sapiens
atatgttggagattc

SEQ ID NO: 1337371 - DNA, 15 bp, Homo sapiens
catatgttggagatt

SEQ ID NO: 1337372 - DNA, 15 bp, Homo sapiens
tcatatgttggagat

SEQ ID NO: 1337373 - DNA, 15 bp, Homo sapiens
gtcatatgttggaga

SEQ ID NO: 1337374 - DNA, 15 bp, Homo sapiens
ggtcatatgttggag

SEQ ID NO: 1337375 - DNA, 15 bp, Homo sapiens
aggtcatatgttgga

SEQ ID NO: 1337376 - DNA, 15 bp, Homo sapiens
aaggtcatatgttgg

SEQ ID NO: 1337377 - DNA, 15 bp, Homo sapiens
taaggtcatatgttg

SEQ ID NO: 1337378 - DNA, 15 bp, Homo sapiens
ctaaggtcatatgtt

SEQ ID NO: 1337379 - DNA, 15 bp, Homo sapiens
actaaggtcatatgt

SEQ ID NO: 1337380 - DNA, 15 bp, Homo sapiens
tactaaggtcatatg

SEQ ID NO: 1337381 - DNA, 15 bp, Homo sapiens
atactaaggtcatat

SEQ ID NO: 1337382 - DNA, 15 bp, Homo sapiens
tatactaaggtcata

SEQ ID NO: 1337383 - DNA, 15 bp, Homo sapiens
atatactaaggtcat

SEQ ID NO: 1337384 - DNA, 15 bp, Homo sapiens
tatatactaaggtca

SEQ ID NO: 1337385 - DNA, 15 bp, Homo sapiens
ttatatactaaggtc

SEQ ID NO: 1337386 - DNA, 15 bp, Homo sapiens
tttatatactaaggt

SEQ ID NO: 1337387 - DNA, 15 bp, Homo sapiens
ttttatatactaagg

SEQ ID NO: 1337388 - DNA, 15 bp, Homo sapiens
tttttatatactaag

SEQ ID NO: 1337389 - DNA, 15 bp, Homo sapiens
atttttatatactaa

SEQ ID NO: 1337390 - DNA, 15 bp, Homo sapiens
tatttttatatacta

SEQ ID NO: 1337391 - DNA, 15 bp, Homo sapiens
atatttttatatact

SEQ ID NO: 1337392 - DNA, 15 bp, Homo sapiens
tatatttttatatac

SEQ ID NO: 1337393 - DNA, 15 bp, Homo sapiens
ctatatttttatata

SEQ ID NO: 1337394 - DNA, 15 bp, Homo sapiens
actatatttttatat

SEQ ID NO: 1337395 - DNA, 15 bp, Homo sapiens
aactatatttttata

SEQ ID NO: 1337396 - DNA, 15 bp, Homo sapiens
caactatatttttat

SEQ ID NO: 1337397 - DNA, 15 bp, Homo sapiens
acaactatattttta

SEQ ID NO: 1337398 - DNA, 15 bp, Homo sapiens
aacaactatattttt

SEQ ID NO: 1337399 - DNA, 15 bp, Homo sapiens
aaacaactatatttt

SEQ ID NO: 1337400 - DNA, 15 bp, Homo sapiens
taaacaactatattt

SEQ ID NO: 1337401 - DNA, 15 bp, Homo sapiens
ctaaacaactatatt

SEQ ID NO: 1337402 - DNA, 15 bp, Homo sapiens
tctaaacaactatat

SEQ ID NO: 1337403 - DNA, 15 bp, Homo sapiens
ttctaaacaactata

SEQ ID NO: 1337404 - DNA, 15 bp, Homo sapiens
gttctaaacaactat

SEQ ID NO: 1337405 - DNA, 15 bp, Homo sapiens
tgttctaaacaacta

SEQ ID NO: 1337406 - DNA, 15 bp, Homo sapiens
atgttctaaacaact

SEQ ID NO: 1337407 - DNA, 15 bp, Homo sapiens
catgttctaaacaac

SEQ ID NO: 1337408 - DNA, 15 bp, Homo sapiens
tcatgttctaaacaa

SEQ ID NO: 1337409 - DNA, 15 bp, Homo sapiens
atcatgttctaaaca

SEQ ID NO: 1337410 - DNA, 15 bp, Homo sapiens
tatcatgttctaaac

SEQ ID NO: 1337411 - DNA, 15 bp, Homo sapiens
atatcatgttctaaa

SEQ ID NO: 1337412 - DNA, 15 bp, Homo sapiens
gatatcatgttctaa

SEQ ID NO: 1337413 - DNA, 15 bp, Homo sapiens
agatatcatgttcta

SEQ ID NO: 1337414 - DNA, 15 bp, Homo sapiens
tagatatcatgttct

SEQ ID NO: 1337415 - DNA, 15 bp, Homo sapiens
ctagatatcatgttc

SEQ ID NO: 1337416 - DNA, 15 bp, Homo sapiens
actagatatcatgtt

SEQ ID NO: 1337417 - DNA, 15 bp, Homo sapiens
tactagatatcatgt

SEQ ID NO: 1337418 - DNA, 15 bp, Homo sapiens
ctactagatatcatg

SEQ ID NO: 1337419 - DNA, 15 bp, Homo sapiens
actactagatatcat

SEQ ID NO: 1337420 - DNA, 15 bp, Homo sapiens
tactactagatatca

SEQ ID NO: 1337421 - DNA, 15 bp, Homo sapiens
ttactactagatatc

SEQ ID NO: 1337422 - DNA, 15 bp, Homo sapiens
attactactagatat

SEQ ID NO: 1337423 - DNA, 15 bp, Homo sapiens
tattactactagata

SEQ ID NO: 1337424 - DNA, 15 bp, Homo sapiens
ttattactactagat

SEQ ID NO: 1337425 - DNA, 15 bp, Homo sapiens
gttattactactaga

SEQ ID NO: 1337426 - DNA, 15 bp, Homo sapiens
tgttattactactag

SEQ ID NO: 1337427 - DNA, 15 bp, Homo sapiens
ttgttattactacta

SEQ ID NO: 1337428 - DNA, 15 bp, Homo sapiens
tttgttattactact

SEQ ID NO: 1337429 - DNA, 15 bp, Homo sapiens
ctttgttattactac

SEQ ID NO: 1337430 - DNA, 15 bp, Homo sapiens
cctttgttattacta

SEQ ID NO: 1337431 - DNA, 15 bp, Homo sapiens
tcctttgttattact

SEQ ID NO: 1337432 - DNA, 15 bp, Homo sapiens
ttcctttgttattac

SEQ ID NO: 1337433 - DNA, 15 bp, Homo sapiens
tttcctttgttatta

SEQ ID NO: 1337434 - DNA, 15 bp, Homo sapiens
atttcctttgttatt

SEQ ID NO: 1337435 - DNA, 15 bp, Homo sapiens
catttcctttgttat

SEQ ID NO: 1337436 - DNA, 15 bp, Homo sapiens
acatttcctttgtta

SEQ ID NO: 1337437 - DNA, 15 bp, Homo sapiens
tacatttcctttgtt

SEQ ID NO: 1337438 - DNA, 15 bp, Homo sapiens
atacatttcctttgt

SEQ ID NO: 1337439 - DNA, 15 bp, Homo sapiens
aatacatttcctttg

SEQ ID NO: 1337440 - DNA, 15 bp, Homo sapiens
taatacatttccttt

SEQ ID NO: 1337441 - DNA, 15 bp, Homo sapiens
ttaatacatttcctt

SEQ ID NO: 1337442 - DNA, 15 bp, Homo sapiens
attaatacatttcct

SEQ ID NO: 1337443 - DNA, 15 bp, Homo sapiens
gattaatacatttcc

SEQ ID NO: 1337444 - DNA, 15 bp, Homo sapiens
agattaatacatttc

SEQ ID NO: 1337445 - DNA, 15 bp, Homo sapiens
aagattaatacattt

SEQ ID NO: 1337446 - DNA, 15 bp, Homo sapiens
gaagattaatacatt

SEQ ID NO: 1337447 - DNA, 15 bp, Homo sapiens
agaagattaatacat

SEQ ID NO: 1337448 - DNA, 15 bp, Homo sapiens
cagaagattaataca

SEQ ID NO: 1337449 - DNA, 15 bp, Homo sapiens
gcagaagattaatac

SEQ ID NO: 1337450 - DNA, 15 bp, Homo sapiens
tgcagaagattaata

SEQ ID NO: 1337451 - DNA, 15 bp, Homo sapiens
ttgcagaagattaat

SEQ ID NO: 1337452 - DNA, 15 bp, Homo sapiens
tttgcagaagattaa

SEQ ID NO: 1337453 - DNA, 15 bp, Homo sapiens
ttttgcagaagatta

SEQ ID NO: 1337454 - DNA, 15 bp, Homo sapiens
attttgcagaagatt

SEQ ID NO: 1337455 - DNA, 15 bp, Homo sapiens
aattttgcagaagat

SEQ ID NO: 1337456 - DNA, 15 bp, Homo sapiens
gaattttgcagaaga

SEQ ID NO: 1337457 - DNA, 15 bp, Homo sapiens
ggaattttgcagaag

SEQ ID NO: 1337458 - DNA, 15 bp, Homo sapiens
tggaattttgcagaa

SEQ ID NO: 1337459 - DNA, 15 bp, Homo sapiens
ctggaattttgcaga

SEQ ID NO: 1337460 - DNA, 15 bp, Homo sapiens
actggaattttgcag

SEQ ID NO: 1337461 - DNA, 15 bp, Homo sapiens
cactggaattttgca

SEQ ID NO: 1337462 - DNA, 15 bp, Homo sapiens
gcactggaattttgc

SEQ ID NO: 1337463 - DNA, 15 bp, Homo sapiens
agcactggaattttg

SEQ ID NO: 1337464 - DNA, 15 bp, Homo sapiens
tagcactggaatttt

SEQ ID NO: 1337465 - DNA, 15 bp, Homo sapiens
atagcactggaattt

SEQ ID NO: 1337466 - DNA, 15 bp, Homo sapiens
gatagcactggaatt

SEQ ID NO: 1337467 - DNA, 15 bp, Homo sapiens
agatagcactggaat

SEQ ID NO: 1337468 - DNA, 15 bp, Homo sapiens
gagatagcactggaa

SEQ ID NO: 1337469 - DNA, 15 bp, Homo sapiens
agagatagcactgga

SEQ ID NO: 1337470 - DNA, 15 bp, Homo sapiens
tagagatagcactgg

SEQ ID NO: 1337471 - DNA, 15 bp, Homo sapiens
gtagagatagcactg

SEQ ID NO: 1337472 - DNA, 15 bp, Homo sapiens
agtagagatagcact

SEQ ID NO: 1337473 - DNA, 15 bp, Homo sapiens
tagtagagatagcac

SEQ ID NO: 1337474 - DNA, 15 bp, Homo sapiens
gtagtagagatagca

SEQ ID NO: 1337475 - DNA, 15 bp, Homo sapiens
ggtagtagagatagc

SEQ ID NO: 1337476 - DNA, 15 bp, Homo sapiens
aggtagtagagatag

SEQ ID NO: 1337477 - DNA, 15 bp, Homo sapiens
aaggtagtagagata

SEQ ID NO: 1337478 - DNA, 15 bp, Homo sapiens
aaaggtagtagagat

SEQ ID NO: 1337479 - DNA, 15 bp, Homo sapiens
caaaggtagtagaga

SEQ ID NO: 1337480 - DNA, 15 bp, Homo sapiens
tcaaaggtagtagag

SEQ ID NO: 1337481 - DNA, 15 bp, Homo sapiens
ttcaaaggtagtaga

SEQ ID NO: 1337482 - DNA, 15 bp, Homo sapiens
tttcaaaggtagtag

SEQ ID NO: 1337483 - DNA, 15 bp, Homo sapiens
ttttcaaaggtagta

SEQ ID NO: 1337484 - DNA, 15 bp, Homo sapiens
tttttcaaaggtagt

SEQ ID NO: 1337485 - DNA, 15 bp, Homo sapiens
ctttttcaaaggtag

SEQ ID NO: 1337486 - DNA, 15 bp, Homo sapiens
tctttttcaaaggta

SEQ ID NO: 1337487 - DNA, 15 bp, Homo sapiens
gtctttttcaaaggt

SEQ ID NO: 1337488 - DNA, 15 bp, Homo sapiens
agtctttttcaaagg

SEQ ID NO: 1337489 - DNA, 15 bp, Homo sapiens
aagtctttttcaaag

SEQ ID NO: 1337490 - DNA, 15 bp, Homo sapiens
caagtctttttcaaa

SEQ ID NO: 1337491 - DNA, 15 bp, Homo sapiens
gcaagtctttttcaa

SEQ ID NO: 1337492 - DNA, 15 bp, Homo sapiens
tgcaagtctttttca

SEQ ID NO: 1337493 - DNA, 15 bp, Homo sapiens
ttgcaagtctttttc

SEQ ID NO: 1337494 - DNA, 15 bp, Homo sapiens
attgcaagtcttttt

SEQ ID NO: 1337495 - DNA, 15 bp, Homo sapiens
aattgcaagtctttt

SEQ ID NO: 1337496 - DNA, 15 bp, Homo sapiens
aaattgcaagtcttt

SEQ ID NO: 1337497 - DNA, 15 bp, Homo sapiens
aaaattgcaagtctt

SEQ ID NO: 1337498 - DNA, 15 bp, Homo sapiens
caaaattgcaagtct

SEQ ID NO: 1337499 - DNA, 15 bp, Homo sapiens
acaaaattgcaagtc

SEQ ID NO: 1337500 - DNA, 15 bp, Homo sapiens
cacaaaattgcaagt

SEQ ID NO: 1337501 - DNA, 15 bp, Homo sapiens
gcacaaaattgcaag

SEQ ID NO: 1337502 - DNA, 15 bp, Homo sapiens
tgcacaaaattgcaa

SEQ ID NO: 1337503 - DNA, 15 bp, Homo sapiens
atgcacaaaattgca

SEQ ID NO: 1337504 - DNA, 15 bp, Homo sapiens
aatgcacaaaattgc

SEQ ID NO: 1337505 - DNA, 15 bp, Homo sapiens
aaatgcacaaaattg

SEQ ID NO: 1337506 - DNA, 15 bp, Homo sapiens
aaaatgcacaaaatt

SEQ ID NO: 1337507 - DNA, 15 bp, Homo sapiens
caaaatgcacaaaat

SEQ ID NO: 1337508 - DNA, 15 bp, Homo sapiens
ccaaaatgcacaaaa

SEQ ID NO: 1337509 - DNA, 15 bp, Homo sapiens
accaaaatgcacaaa

SEQ ID NO: 1337510 - DNA, 15 bp, Homo sapiens
aaccaaaatgcacaa

SEQ ID NO: 1337511 - DNA, 15 bp, Homo sapiens
caaccaaaatgcaca

SEQ ID NO: 1337512 - DNA, 15 bp, Homo sapiens
acaaccaaaatgcac

SEQ ID NO: 1337513 - DNA, 15 bp, Homo sapiens
aacaaccaaaatgca

SEQ ID NO: 1337514 - DNA, 15 bp, Homo sapiens
caacaaccaaaatgc

SEQ ID NO: 1337515 - DNA, 15 bp, Homo sapiens
tcaacaaccaaaatg

SEQ ID NO: 1337516 - DNA, 15 bp, Homo sapiens
atcaacaaccaaaat

SEQ ID NO: 1337517 - DNA, 15 bp, Homo sapiens
aatcaacaaccaaaa

SEQ ID NO: 1337518 - DNA, 15 bp, Homo sapiens
aaatcaacaaccaaa

SEQ ID NO: 1337519 - DNA, 15 bp, Homo sapiens
taaatcaacaaccaa

SEQ ID NO: 1337520 - DNA, 15 bp, Homo sapiens
gtaaatcaacaacca

SEQ ID NO: 1337521 - DNA, 15 bp, Homo sapiens
agtaaatcaacaacc

SEQ ID NO: 1337522 - DNA, 15 bp, Homo sapiens
aagtaaatcaacaac

SEQ ID NO: 1337523 - DNA, 15 bp, Homo sapiens
gaagtaaatcaacaa

SEQ ID NO: 1337524 - DNA, 15 bp, Homo sapiens
agaagtaaatcaaca

SEQ ID NO: 1337525 - DNA, 15 bp, Homo sapiens
gagaagtaaatcaac

SEQ ID NO: 1337526 - DNA, 15 bp, Homo sapiens
ggagaagtaaatcaa

SEQ ID NO: 1337527 - DNA, 15 bp, Homo sapiens
gggagaagtaaatca

SEQ ID NO: 1337528 - DNA, 15 bp, Homo sapiens
ggggagaagtaaatc

SEQ ID NO: 1337529 - DNA, 15 bp, Homo sapiens
tggggagaagtaaat

SEQ ID NO: 1337530 - DNA, 15 bp, Homo sapiens
gtggggagaagtaaa

SEQ ID NO: 1337531 - DNA, 15 bp, Homo sapiens
agtggggagaagtaa

SEQ ID NO: 1337532 - DNA, 15 bp, Homo sapiens
aagtggggagaagta

SEQ ID NO: 1337533 - DNA, 15 bp, Homo sapiens
aaagtggggagaagt

SEQ ID NO: 1337534 - DNA, 15 bp, Homo sapiens
taaagtggggagaag

SEQ ID NO: 1337535 - DNA, 15 bp, Homo sapiens
gtaaagtggggagaa

SEQ ID NO: 1337536 - DNA, 15 bp, Homo sapiens
agtaaagtggggaga

SEQ ID NO: 1337537 - DNA, 15 bp, Homo sapiens
aagtaaagtggggag

SEQ ID NO: 1337538 - DNA, 15 bp, Homo sapiens
gaagtaaagtgggga

SEQ ID NO: 1337539 - DNA, 15 bp, Homo sapiens
agaagtaaagtgggg

SEQ ID NO: 1337540 - DNA, 15 bp, Homo sapiens
cagaagtaaagtggg

SEQ ID NO: 1337541 - DNA, 15 bp, Homo sapiens
gcagaagtaaagtgg

SEQ ID NO: 1337542 - DNA, 15 bp, Homo sapiens
tgcagaagtaaagtg

SEQ ID NO: 1337543 - DNA, 15 bp, Homo sapiens
atgcagaagtaaagt

SEQ ID NO: 1337544 - DNA, 15 bp, Homo sapiens
gatgcagaagtaaag

SEQ ID NO: 1337545 - DNA, 15 bp, Homo sapiens
agatgcagaagtaaa

SEQ ID NO: 1337546 - DNA, 15 bp, Homo sapiens
aagatgcagaagtaa

SEQ ID NO: 1337547 - DNA, 15 bp, Homo sapiens
aaagatgcagaagta

SEQ ID NO: 1337548 - DNA, 15 bp, Homo sapiens
taaagatgcagaagt

SEQ ID NO: 1337549 - DNA, 15 bp, Homo sapiens
ttaaagatgcagaag

SEQ ID NO: 1337550 - DNA, 15 bp, Homo sapiens
tttaaagatgcagaa

SEQ ID NO: 1337551 - DNA, 15 bp, Homo sapiens
ttttaaagatgcaga

SEQ ID NO: 1337552 - DNA, 15 bp, Homo sapiens
tttttaaagatgcag

SEQ ID NO: 1337553 - DNA, 15 bp, Homo sapiens
atttttaaagatgca

SEQ ID NO: 1337554 - DNA, 15 bp, Homo sapiens
tatttttaaagatgc

SEQ ID NO: 1337555 - DNA, 15 bp, Homo sapiens
ttatttttaaagatg

SEQ ID NO: 1337556 - DNA, 15 bp, Homo sapiens
gttttatttttaaag

SEQ ID NO: 1337557 - DNA, 15 bp, Homo sapiens
ctgttttatttttaa

SEQ ID NO: 1337558 - DNA, 15 bp, Homo sapiens
gctgttttattttta

SEQ ID NO: 1337559 - DNA, 15 bp, Homo sapiens
tgctgttttattttt

SEQ ID NO: 1337560 - DNA, 15 bp, Homo sapiens
ttgctgttttatttt

SEQ ID NO: 1337561 - DNA, 15 bp, Homo sapiens
cttgctgttttattt

SEQ ID NO: 1337562 - DNA, 15 bp, Homo sapiens
tcttgctgttttatt

SEQ ID NO: 1337563 - DNA, 15 bp, Homo sapiens
atcttgctgttttat

SEQ ID NO: 1337564 - DNA, 15 bp, Homo sapiens
tatcttgctgtttta

SEQ ID NO: 1337565 - DNA, 15 bp, Homo sapiens
ttatcttgctgtttt

SEQ ID NO: 1337566 - DNA, 15 bp, Homo sapiens
tttatcttgctgttt

SEQ ID NO: 1337567 - DNA, 15 bp, Homo sapiens
ttttatcttgctgtt

SEQ ID NO: 1337568 - DNA, 15 bp, Homo sapiens
gttttatcttgctgt

SEQ ID NO: 1337569 - DNA, 15 bp, Homo sapiens
tgttttatcttgctg

SEQ ID NO: 1337570 - DNA, 15 bp, Homo sapiens
ttgttttatcttgct

SEQ ID NO: 1337571 - DNA, 15 bp, Homo sapiens
tttgttttatcttgc

SEQ ID NO: 1337572 - DNA, 15 bp, Homo sapiens
ctttgttttatcttg

SEQ ID NO: 1337573 - DNA, 15 bp, Homo sapiens
cctttgttttatctt

SEQ ID NO: 1337574 - DNA, 15 bp, Homo sapiens
ccctttgttttatct

SEQ ID NO: 1337575 - DNA, 15 bp, Homo sapiens
tccctttgttttatc

SEQ ID NO: 1337576 - DNA, 15 bp, Homo sapiens
ttccctttgttttat

SEQ ID NO: 1337577 - DNA, 15 bp, Homo sapiens
tttccctttgtttta

SEQ ID NO: 1337578 - DNA, 15 bp, Homo sapiens
atttccctttgtttt

SEQ ID NO: 1337579 - DNA, 15 bp, Homo sapiens
gatttccctttgttt

SEQ ID NO: 1337580 - DNA, 15 bp, Homo sapiens
ggatttccctttgtt

SEQ ID NO: 1337581 - DNA, 15 bp, Homo sapiens
aggatttccctttgt

SEQ ID NO: 1337582 - DNA, 15 bp, Homo sapiens
taggatttccctttg

SEQ ID NO: 1337583 - DNA, 15 bp, Homo sapiens
ctaggatttcccttt

SEQ ID NO: 1337584 - DNA, 15 bp, Homo sapiens
gctaggatttccctt

SEQ ID NO: 1337585 - DNA, 15 bp, Homo sapiens
tgctaggatttccct

SEQ ID NO: 1337586 - DNA, 15 bp, Homo sapiens
atgctaggatttccc

SEQ ID NO: 1337587 - DNA, 15 bp, Homo sapiens
gatgctaggatttcc

SEQ ID NO: 1337588 - DNA, 15 bp, Homo sapiens
agatgctaggatttc

SEQ ID NO: 1337589 - DNA, 15 bp, Homo sapiens
aagatgctaggattt

SEQ ID NO: 1337590 - DNA, 15 bp, Homo sapiens
aaagatgctaggatt

SEQ ID NO: 1337591 - DNA, 15 bp, Homo sapiens
caaagatgctaggat

SEQ ID NO: 1337592 - DNA, 15 bp, Homo sapiens
tcaaagatgctagga

SEQ ID NO: 1337593 - DNA, 15 bp, Homo sapiens
ctcaaagatgctagg

SEQ ID NO: 1337594 - DNA, 15 bp, Homo sapiens
cctcaaagatgctag

SEQ ID NO: 1337595 - DNA, 15 bp, Homo sapiens
ccctcaaagatgcta

SEQ ID NO: 1337596 - DNA, 15 bp, Homo sapiens
tccctcaaagatgct

SEQ ID NO: 1337597 - DNA, 15 bp, Homo sapiens
ttccctcaaagatgc

SEQ ID NO: 1337598 - DNA, 15 bp, Homo sapiens
tttccctcaaagatg

SEQ ID NO: 1337599 - DNA, 15 bp, Homo sapiens
atttccctcaaagat

SEQ ID NO: 1337600 - DNA, 15 bp, Homo sapiens
catttccctcaaaga

SEQ ID NO: 1337601 - DNA, 15 bp, Homo sapiens
acatttccctcaaag

SEQ ID NO: 1337602 - DNA, 15 bp, Homo sapiens
cacatttccctcaaa

SEQ ID NO: 1337603 - DNA, 15 bp, Homo sapiens
ccacatttccctcaa

SEQ ID NO: 1337604 - DNA, 15 bp, Homo sapiens
tccacatttccctca

SEQ ID NO: 1337605 - DNA, 15 bp, Homo sapiens
atccacatttccctc

SEQ ID NO: 1337606 - DNA, 15 bp, Homo sapiens
aatccacatttccct

SEQ ID NO: 1337607 - DNA, 15 bp, Homo sapiens
gaatccacatttccc

SEQ ID NO: 1337608 - DNA, 15 bp, Homo sapiens
ggaatccacatttcc

SEQ ID NO: 1337609 - DNA, 15 bp, Homo sapiens
tggaatccacatttc

SEQ ID NO: 1337610 - DNA, 15 bp, Homo sapiens
atggaatccacattt

SEQ ID NO: 1337611 - DNA, 15 bp, Homo sapiens
catggaatccacatt

SEQ ID NO: 1337612 - DNA, 15 bp, Homo sapiens
ccatggaatccacat

SEQ ID NO: 1337613 - DNA, 15 bp, Homo sapiens
tccatggaatccaca

SEQ ID NO: 1337614 - DNA, 15 bp, Homo sapiens
atccatggaatccac

SEQ ID NO: 1337615 - DNA, 15 bp, Homo sapiens
tatccatggaatcca

SEQ ID NO: 1337616 - DNA, 15 bp, Homo sapiens
ttatccatggaatcc

SEQ ID NO: 1337617 - DNA, 15 bp, Homo sapiens
attatccatggaatc

SEQ ID NO: 1337618 - DNA, 15 bp, Homo sapiens
cattatccatggaat

SEQ ID NO: 1337619 - DNA, 15 bp, Homo sapiens
tcattatccatggaa

SEQ ID NO: 1337620 - DNA, 15 bp, Homo sapiens
gtcattatccatgga

SEQ ID NO: 1337621 - DNA, 15 bp, Homo sapiens
tgtcattatccatgg

SEQ ID NO: 1337622 - DNA, 15 bp, Homo sapiens
atgtcattatccatg

SEQ ID NO: 1337623 - DNA, 15 bp, Homo sapiens
aatgtcattatccat

SEQ ID NO: 1337624 - DNA, 15 bp, Homo sapiens
taatgtcattatcca

SEQ ID NO: 1337625 - DNA, 15 bp, Homo sapiens
ataatgtcattatcc

SEQ ID NO: 1337626 - DNA, 15 bp, Homo sapiens
aataatgtcattatc

SEQ ID NO: 1337627 - DNA, 15 bp, Homo sapiens
gaataatgtcattat

SEQ ID NO: 1337628 - DNA, 15 bp, Homo sapiens
tgaataatgtcatta

SEQ ID NO: 1337629 - DNA, 15 bp, Homo sapiens
atgaataatgtcatt

SEQ ID NO: 1337630 - DNA, 15 bp, Homo sapiens
gatgaataatgtcat

SEQ ID NO: 1337631 - DNA, 15 bp, Homo sapiens
ggatgaataatgtca

SEQ ID NO: 1337632 - DNA, 15 bp, Homo sapiens
tggatgaataatgtc

SEQ ID NO: 1337633 - DNA, 15 bp, Homo sapiens
ctggatgaataatgt

SEQ ID NO: 1337634 - DNA, 15 bp, Homo sapiens
tctggatgaataatg

SEQ ID NO: 1337635 - DNA, 15 bp, Homo sapiens
gtctggatgaataat

SEQ ID NO: 1337636 - DNA, 15 bp, Homo sapiens
agtctggatgaataa

SEQ ID NO: 1337637 - DNA, 15 bp, Homo sapiens
gagtctggatgaata

SEQ ID NO: 1337638 - DNA, 15 bp, Homo sapiens
tgagtctggatgaat

SEQ ID NO: 1337639 - DNA, 15 bp, Homo sapiens
ctgagtctggatgaa

SEQ ID NO: 1337640 - DNA, 15 bp, Homo sapiens
actgagtctggatga

SEQ ID NO: 1337641 - DNA, 15 bp, Homo sapiens
gactgagtctggatg

SEQ ID NO: 1337642 - DNA, 15 bp, Homo sapiens
ggactgagtctggat

SEQ ID NO: 1337643 - DNA, 15 bp, Homo sapiens
aggactgagtctgga

SEQ ID NO: 1337644 - DNA, 15 bp, Homo sapiens
gaggactgagtctgg

SEQ ID NO: 1337645 - DNA, 15 bp, Homo sapiens
tgaggactgagtctg

SEQ ID NO: 1337646 - DNA, 15 bp, Homo sapiens
ctgaggactgagtct

SEQ ID NO: 1337647 - DNA, 15 bp, Homo sapiens
tctgaggactgagtc

SEQ ID NO: 1337648 - DNA, 15 bp, Homo sapiens
ttctgaggactgagt

SEQ ID NO: 1337649 - DNA, 15 bp, Homo sapiens
gttctgaggactgag

SEQ ID NO: 1337650 - DNA, 15 bp, Homo sapiens
tgttctgaggactga

SEQ ID NO: 1337651 - DNA, 15 bp, Homo sapiens
gtgttctgaggactg

SEQ ID NO: 1337652 - DNA, 15 bp, Homo sapiens
ggtgttctgaggact

SEQ ID NO: 1337653 - DNA, 15 bp, Homo sapiens
tggtgttctgaggac

SEQ ID NO: 1337654 - DNA, 15 bp, Homo sapiens
gtggtgttctgagga

SEQ ID NO: 1337655 - DNA, 15 bp, Homo sapiens
agtggtgttctgagg

SEQ ID NO: 1337656 - DNA, 15 bp, Homo sapiens
aagtggtgttctgag

SEQ ID NO: 1337657 - DNA, 15 bp, Homo sapiens
taagtggtgttctga

SEQ ID NO: 1337658 - DNA, 15 bp, Homo sapiens
gtaagtggtgttctg

SEQ ID NO: 1337659 - DNA, 15 bp, Homo sapiens
tgtaagtggtgttct

SEQ ID NO: 1337660 - DNA, 15 bp, Homo sapiens
atgtaagtggtgttc

SEQ ID NO: 1337661 - DNA, 15 bp, Homo sapiens
tatgtaagtggtgtt

SEQ ID NO: 1337662 - DNA, 15 bp, Homo sapiens
ctatgtaagtggtgt

SEQ ID NO: 1337663 - DNA, 15 bp, Homo sapiens
cctatgtaagtggtg

SEQ ID NO: 1337664 - DNA, 15 bp, Homo sapiens
tcctatgtaagtggt

SEQ ID NO: 1337665 - DNA, 15 bp, Homo sapiens
ttcctatgtaagtgg

SEQ ID NO: 1337666 - DNA, 15 bp, Homo sapiens
cttcctatgtaagtg

SEQ ID NO: 1337667 - DNA, 15 bp, Homo sapiens
tcttcctatgtaagt

SEQ ID NO: 1337668 - DNA, 15 bp, Homo sapiens
ttcttcctatgtaag

SEQ ID NO: 1337669 - DNA, 15 bp, Homo sapiens
tttcttcctatgtaa

SEQ ID NO: 1337670 - DNA, 15 bp, Homo sapiens
ttttcttcctatgta

SEQ ID NO: 1337671 - DNA, 15 bp, Homo sapiens
cttttcttcctatgt

SEQ ID NO: 1337672 - DNA, 15 bp, Homo sapiens
gcttttcttcctatg

SEQ ID NO: 1337673 - DNA, 15 bp, Homo sapiens
tgcttttcttcctat

SEQ ID NO: 1337674 - DNA, 15 bp, Homo sapiens
ttgcttttcttccta

SEQ ID NO: 1337675 - DNA, 15 bp, Homo sapiens
attgcttttcttcct

SEQ ID NO: 1337676 - DNA, 15 bp, Homo sapiens
gattgcttttcttcc

SEQ ID NO: 1337677 - DNA, 15 bp, Homo sapiens
tgattgcttttcttc

SEQ ID NO: 1337678 - DNA, 15 bp, Homo sapiens
ctgattgcttttctt

SEQ ID NO: 1337679 - DNA, 15 bp, Homo sapiens
gctgattgcttttct

SEQ ID NO: 1337680 - DNA, 15 bp, Homo sapiens
tgctgattgcttttc

SEQ ID NO: 1337681 - DNA, 15 bp, Homo sapiens
ttgctgattgctttt

SEQ ID NO: 1337682 - DNA, 15 bp, Homo sapiens
tttgctgattgcttt

SEQ ID NO: 1337683 - DNA, 15 bp, Homo sapiens
atttgctgattgctt

SEQ ID NO: 1337684 - DNA, 15 bp, Homo sapiens
tatttgctgattgct

SEQ ID NO: 1337685 - DNA, 15 bp, Homo sapiens
atatttgctgattgc

SEQ ID NO: 1337686 - DNA, 15 bp, Homo sapiens
tatatttgctgattg

SEQ ID NO: 1337687 - DNA, 15 bp, Homo sapiens
ttatatttgctgatt

SEQ ID NO: 1337688 - DNA, 15 bp, Homo sapiens
tttatatttgctgat

SEQ ID NO: 1337689 - DNA, 15 bp, Homo sapiens
atttatatttgctga

SEQ ID NO: 1337690 - DNA, 15 bp, Homo sapiens
tatttatatttgctg

SEQ ID NO: 1337691 - DNA, 15 bp, Homo sapiens
ttatttatatttgct

SEQ ID NO: 1337692 - DNA, 15 bp, Homo sapiens
gttatttatatttgc

SEQ ID NO: 1337693 - DNA, 15 bp, Homo sapiens
ggttatttatatttg

SEQ ID NO: 1337694 - DNA, 15 bp, Homo sapiens
aggttatttatattt

SEQ ID NO: 1337695 - DNA, 15 bp, Homo sapiens
taggttatttatatt

SEQ ID NO: 1337696 - DNA, 15 bp, Homo sapiens
ttaggttatttatat

SEQ ID NO: 1337697 - DNA, 15 bp, Homo sapiens
attaggttatttata

SEQ ID NO: 1337698 - DNA, 15 bp, Homo sapiens
gattaggttatttat

SEQ ID NO: 1337699 - DNA, 15 bp, Homo sapiens
tgattaggttattta

SEQ ID NO: 1337700 - DNA, 15 bp, Homo sapiens
ttgattaggttattt

SEQ ID NO: 1337701 - DNA, 15 bp, Homo sapiens
cttgattaggttatt

SEQ ID NO: 1337702 - DNA, 15 bp, Homo sapiens
acttgattaggttat

SEQ ID NO: 1337703 - DNA, 15 bp, Homo sapiens
gacttgattaggtta

SEQ ID NO: 1337704 - DNA, 15 bp, Homo sapiens
tgacttgattaggtt

SEQ ID NO: 1337705 - DNA, 15 bp, Homo sapiens
atgacttgattaggt

SEQ ID NO: 1337706 - DNA, 15 bp, Homo sapiens
tatgacttgattagg

SEQ ID NO: 1337707 - DNA, 15 bp, Homo sapiens
ctatgacttgattag

SEQ ID NO: 1337708 - DNA, 15 bp, Homo sapiens
actatgacttgatta

SEQ ID NO: 1337709 - DNA, 15 bp, Homo sapiens
gactatgacttgatt

SEQ ID NO: 1337710 - DNA, 15 bp, Homo sapiens
agactatgacttgat

SEQ ID NO: 1337711 - DNA, 15 bp, Homo sapiens
tagactatgacttga

SEQ ID NO: 1337712 - DNA, 15 bp, Homo sapiens
ctagactatgacttg

SEQ ID NO: 1337713 - DNA, 15 bp, Homo sapiens
cctagactatgactt

SEQ ID NO: 1337714 - DNA, 15 bp, Homo sapiens
tcctagactatgact

SEQ ID NO: 1337715 - DNA, 15 bp, Homo sapiens
ttcctagactatgac

SEQ ID NO: 1337716 - DNA, 15 bp, Homo sapiens
cttcctagactatga

SEQ ID NO: 1337717 - DNA, 15 bp, Homo sapiens
acttcctagactatg

SEQ ID NO: 1337718 - DNA, 15 bp, Homo sapiens
aacttcctagactat

SEQ ID NO: 1337719 - DNA, 15 bp, Homo sapiens
taacttcctagacta

SEQ ID NO: 1337720 - DNA, 15 bp, Homo sapiens
ataacttcctagact

SEQ ID NO: 1337721 - DNA, 15 bp, Homo sapiens
cataacttcctagac

SEQ ID NO: 1337722 - DNA, 15 bp, Homo sapiens
tcataacttcctaga

SEQ ID NO: 1337723 - DNA, 15 bp, Homo sapiens
gtcataacttcctag

SEQ ID NO: 1337724 - DNA, 15 bp, Homo sapiens
agtcataacttccta

SEQ ID NO: 1337725 - DNA, 15 bp, Homo sapiens
aagtcataacttcct

SEQ ID NO: 1337726 - DNA, 15 bp, Homo sapiens
aaagtcataacttcc

SEQ ID NO: 1337727 - DNA, 15 bp, Homo sapiens
taaagtcataacttc

SEQ ID NO: 1337728 - DNA, 15 bp, Homo sapiens
ttaaagtcataactt

SEQ ID NO: 1337729 - DNA, 15 bp, Homo sapiens
tttaaagtcataact

SEQ ID NO: 1337730 - DNA, 15 bp, Homo sapiens
ctttaaagtcataac

SEQ ID NO: 1337731 - DNA, 15 bp, Homo sapiens
tctttaaagtcataa

SEQ ID NO: 1337732 - DNA, 15 bp, Homo sapiens
ttctttaaagtcata

SEQ ID NO: 1337733 - DNA, 15 bp, Homo sapiens
attctttaaagtcat

SEQ ID NO: 1337734 - DNA, 15 bp, Homo sapiens
tattctttaaagtca

SEQ ID NO: 1337735 - DNA, 15 bp, Homo sapiens
ttattctttaaagtc

SEQ ID NO: 1337736 - DNA, 15 bp, Homo sapiens
tttattctttaaagt

SEQ ID NO: 1337737 - DNA, 15 bp, Homo sapiens
ttttattctttaaag

SEQ ID NO: 1337738 - DNA, 15 bp, Homo sapiens
tttttattctttaaa

SEQ ID NO: 1337739 - DNA, 15 bp, Homo sapiens
gtttttattctttaa

SEQ ID NO: 1337740 - DNA, 15 bp, Homo sapiens
ggtttttattcttta

SEQ ID NO: 1337741 - DNA, 15 bp, Homo sapiens
aggtttttattcttt

SEQ ID NO: 1337742 - DNA, 15 bp, Homo sapiens
taggtttttattctt

SEQ ID NO: 1337743 - DNA, 15 bp, Homo sapiens
cactctgttacccag

SEQ ID NO: 1337744 - DNA, 15 bp, Homo sapiens
tcactctgttaccca

SEQ ID NO: 1337745 - DNA, 15 bp, Homo sapiens
ctcactctgttaccc

SEQ ID NO: 1337746 - DNA, 15 bp, Homo sapiens
tctcactctgttacc

SEQ ID NO: 1337747 - DNA, 15 bp, Homo sapiens
gtctcactctgttac

SEQ ID NO: 1337748 - DNA, 15 bp, Homo sapiens
ggtctcactctgtta

SEQ ID NO: 1337749 - DNA, 15 bp, Homo sapiens
gcctttttttttttt

SEQ ID NO: 1337750 - DNA, 15 bp, Homo sapiens
agccttttttttttt

SEQ ID NO: 1337751 - DNA, 15 bp, Homo sapiens
aagcctttttttttt

SEQ ID NO: 1337752 - DNA, 15 bp, Homo sapiens
aaagccttttttttt

SEQ ID NO: 1337753 - DNA, 15 bp, Homo sapiens
aaaagcctttttttt

SEQ ID NO: 1337754 - DNA, 15 bp, Homo sapiens
taaaagccttttttt

SEQ ID NO: 1337755 - DNA, 15 bp, Homo sapiens
ataaaagcctttttt

SEQ ID NO: 1337756 - DNA, 15 bp, Homo sapiens
aataaaagccttttt

SEQ ID NO: 1337757 - DNA, 15 bp, Homo sapiens
aaataaaagcctttt

SEQ ID NO: 1337758 - DNA, 15 bp, Homo sapiens
taaataaaagccttt

SEQ ID NO: 1337759 - DNA, 15 bp, Homo sapiens
ctaaataaaagcctt

SEQ ID NO: 1337760 - DNA, 15 bp, Homo sapiens
gctaaataaaagcct

SEQ ID NO: 1337761 - DNA, 15 bp, Homo sapiens
tgctaaataaaagcc

SEQ ID NO: 1337762 - DNA, 15 bp, Homo sapiens
ctgctaaataaaagc

SEQ ID NO: 1337763 - DNA, 15 bp, Homo sapiens
gctgctaaataaaag

SEQ ID NO: 1337764 - DNA, 15 bp, Homo sapiens
tgctgctaaataaaa

SEQ ID NO: 1337765 - DNA, 15 bp, Homo sapiens
ttgctgctaaataaa

SEQ ID NO: 1337766 - DNA, 15 bp, Homo sapiens
attgctgctaaataa

SEQ ID NO: 1337767 - DNA, 15 bp, Homo sapiens
cattgctgctaaata

SEQ ID NO: 1337768 - DNA, 15 bp, Homo sapiens
acattgctgctaaat

SEQ ID NO: 1337769 - DNA, 15 bp, Homo sapiens
aacattgctgctaaa

SEQ ID NO: 1337770 - DNA, 15 bp, Homo sapiens
caacattgctgctaa

SEQ ID NO: 1337771 - DNA, 15 bp, Homo sapiens
acaacattgctgcta

SEQ ID NO: 1337772 - DNA, 15 bp, Homo sapiens
tacaacattgctgct

SEQ ID NO: 1337773 - DNA, 15 bp, Homo sapiens
atacaacattgctgc

SEQ ID NO: 1337774 - DNA, 15 bp, Homo sapiens
catacaacattgctg

SEQ ID NO: 1337775 - DNA, 15 bp, Homo sapiens
tcatacaacattgct

SEQ ID NO: 1337776 - DNA, 15 bp, Homo sapiens
ctcatacaacattgc

SEQ ID NO: 1337777 - DNA, 15 bp, Homo sapiens
tctcatacaacattg

SEQ ID NO: 1337778 - DNA, 15 bp, Homo sapiens
gtctcatacaacatt

SEQ ID NO: 1337779 - DNA, 15 bp, Homo sapiens
tgtctcatacaacat

SEQ ID NO: 1337780 - DNA, 15 bp, Homo sapiens
atgtctcatacaaca

SEQ ID NO: 1337781 - DNA, 15 bp, Homo sapiens
catgtctcatacaac

SEQ ID NO: 1337782 - DNA, 15 bp, Homo sapiens
ccatgtctcatacaa

SEQ ID NO: 1337783 - DNA, 15 bp, Homo sapiens
gccatgtctcataca

SEQ ID NO: 1337784 - DNA, 15 bp, Homo sapiens
tgccatgtctcatac

SEQ ID NO: 1337785 - DNA, 15 bp, Homo sapiens
gtgccatgtctcata

SEQ ID NO: 1337786 - DNA, 15 bp, Homo sapiens
agtgccatgtctcat

SEQ ID NO: 1337787 - DNA, 15 bp, Homo sapiens
tagtgccatgtctca

SEQ ID NO: 1337788 - DNA, 15 bp, Homo sapiens
ttagtgccatgtctc

SEQ ID NO: 1337789 - DNA, 15 bp, Homo sapiens
cttagtgccatgtct

SEQ ID NO: 1337790 - DNA, 15 bp, Homo sapiens
gcttagtgccatgtc

SEQ ID NO: 1337791 - DNA, 15 bp, Homo sapiens
tgcttagtgccatgt

SEQ ID NO: 1337792 - DNA, 15 bp, Homo sapiens
ttgcttagtgccatg

SEQ ID NO: 1337793 - DNA, 15 bp, Homo sapiens
attgcttagtgccat

SEQ ID NO: 1337794 - DNA, 15 bp, Homo sapiens
tattgcttagtgcca

SEQ ID NO: 1337795 - DNA, 15 bp, Homo sapiens
atattgcttagtgcc

SEQ ID NO: 1337796 - DNA, 15 bp, Homo sapiens
catattgcttagtgc

SEQ ID NO: 1337797 - DNA, 15 bp, Homo sapiens
tcatattgcttagtg

SEQ ID NO: 1337798 - DNA, 15 bp, Homo sapiens
ctcatattgcttagt

SEQ ID NO: 1337799 - DNA, 15 bp, Homo sapiens
tctcatattgcttag

SEQ ID NO: 1337800 - DNA, 15 bp, Homo sapiens
ctctcatattgctta

SEQ ID NO: 1337801 - DNA, 15 bp, Homo sapiens
tctctcatattgctt

SEQ ID NO: 1337802 - DNA, 15 bp, Homo sapiens
atctctcatattgct

SEQ ID NO: 1337803 - DNA, 15 bp, Homo sapiens
tatctctcatattgc

SEQ ID NO: 1337804 - DNA, 15 bp, Homo sapiens
ttatctctcatattg

SEQ ID NO: 1337805 - DNA, 15 bp, Homo sapiens
tttatctctcatatt

SEQ ID NO: 1337806 - DNA, 15 bp, Homo sapiens
gtttatctctcatat

SEQ ID NO: 1337807 - DNA, 15 bp, Homo sapiens
agtttatctctcata

SEQ ID NO: 1337808 - DNA, 15 bp, Homo sapiens
cagtttatctctcat

SEQ ID NO: 1337809 - DNA, 15 bp, Homo sapiens
gcagtttatctctca

SEQ ID NO: 1337810 - DNA, 15 bp, Homo sapiens
agcagtttatctctc

SEQ ID NO: 1337811 - DNA, 15 bp, Homo sapiens
aagcagtttatctct

SEQ ID NO: 1337812 - DNA, 15 bp, Homo sapiens
aaagcagtttatctc

SEQ ID NO: 1337813 - DNA, 15 bp, Homo sapiens
gaaagcagtttatct

SEQ ID NO: 1337814 - DNA, 15 bp, Homo sapiens
agaaagcagtttatc

SEQ ID NO: 1337815 - DNA, 15 bp, Homo sapiens
tagaaagcagtttat

SEQ ID NO: 1337816 - DNA, 15 bp, Homo sapiens
gtagaaagcagttta

SEQ ID NO: 1337817 - DNA, 15 bp, Homo sapiens
tgtagaaagcagttt

SEQ ID NO: 1337818 - DNA, 15 bp, Homo sapiens
gtgtagaaagcagtt

SEQ ID NO: 1337819 - DNA, 15 bp, Homo sapiens
cgtgtagaaagcagt

SEQ ID NO: 1337820 - DNA, 15 bp, Homo sapiens
acgtgtagaaagcag

SEQ ID NO: 1337821 - DNA, 15 bp, Homo sapiens
aacgtgtagaaagca

SEQ ID NO: 1337822 - DNA, 15 bp, Homo sapiens
aaacgtgtagaaagc

SEQ ID NO: 1337823 - DNA, 15 bp, Homo sapiens
taaacgtgtagaaag

SEQ ID NO: 1337824 - DNA, 15 bp, Homo sapiens
ctaaacgtgtagaaa

SEQ ID NO: 1337825 - DNA, 15 bp, Homo sapiens
actaaacgtgtagaa

SEQ ID NO: 1337826 - DNA, 15 bp, Homo sapiens
cactaaacgtgtaga

SEQ ID NO: 1337827 - DNA, 15 bp, Homo sapiens
acactaaacgtgtag

SEQ ID NO: 1337828 - DNA, 15 bp, Homo sapiens
aacactaaacgtgta

SEQ ID NO: 1337829 - DNA, 15 bp, Homo sapiens
aaacactaaacgtgt

SEQ ID NO: 1337830 - DNA, 15 bp, Homo sapiens
taaacactaaacgtg

SEQ ID NO: 1337831 - DNA, 15 bp, Homo sapiens
ttaaacactaaacgt

SEQ ID NO: 1337832 - DNA, 15 bp, Homo sapiens
attaaacactaaacg

SEQ ID NO: 1337833 - DNA, 15 bp, Homo sapiens
tattaaacactaaac

SEQ ID NO: 1337834 - DNA, 15 bp, Homo sapiens
ctattaaacactaaa

SEQ ID NO: 1337835 - DNA, 15 bp, Homo sapiens
tctattaaacactaa

SEQ ID NO: 1337836 - DNA, 15 bp, Homo sapiens
ttctattaaacacta

SEQ ID NO: 1337837 - DNA, 15 bp, Homo sapiens
tttctattaaacact

SEQ ID NO: 1337838 - DNA, 15 bp, Homo sapiens
ttttctattaaacac

SEQ ID NO: 1337839 - DNA, 15 bp, Homo sapiens
tttttctattaaaca

SEQ ID NO: 1337840 - DNA, 15 bp, Homo sapiens
atttttctattaaac

SEQ ID NO: 1337841 - DNA, 15 bp, Homo sapiens
catttttctattaaa

SEQ ID NO: 1337842 - DNA, 15 bp, Homo sapiens
acatttttctattaa

SEQ ID NO: 1337843 - DNA, 15 bp, Homo sapiens
tacatttttctatta

SEQ ID NO: 1337844 - DNA, 15 bp, Homo sapiens
ttacatttttctatt

SEQ ID NO: 1337845 - DNA, 15 bp, Homo sapiens
cttacatttttctat

SEQ ID NO: 1337846 - DNA, 15 bp, Homo sapiens
ccttacatttttcta

SEQ ID NO: 1337847 - DNA, 15 bp, Homo sapiens
gccttacatttttct

SEQ ID NO: 1337848 - DNA, 15 bp, Homo sapiens
tgccttacatttttc

SEQ ID NO: 1337849 - DNA, 15 bp, Homo sapiens
atgccttacattttt

SEQ ID NO: 1337850 - DNA, 15 bp, Homo sapiens
aatgccttacatttt

SEQ ID NO: 1337851 - DNA, 15 bp, Homo sapiens
gaatgccttacattt

SEQ ID NO: 1337852 - DNA, 15 bp, Homo sapiens
tgaatgccttacatt

SEQ ID NO: 1337853 - DNA, 15 bp, Homo sapiens
gtgaatgccttacat

SEQ ID NO: 1337854 - DNA, 15 bp, Homo sapiens
agtgaatgccttaca

SEQ ID NO: 1337855 - DNA, 15 bp, Homo sapiens
gagtgaatgccttac

SEQ ID NO: 1337856 - DNA, 15 bp, Homo sapiens
tgagtgaatgcctta

SEQ ID NO: 1337857 - DNA, 15 bp, Homo sapiens
ttgagtgaatgcctt

SEQ ID NO: 1337858 - DNA, 15 bp, Homo sapiens
tttgagtgaatgcct

SEQ ID NO: 1337859 - DNA, 15 bp, Homo sapiens
atttgagtgaatgcc

SEQ ID NO: 1337860 - DNA, 15 bp, Homo sapiens
tatttgagtgaatgc

SEQ ID NO: 1337861 - DNA, 15 bp, Homo sapiens
ttatttgagtgaatg

SEQ ID NO: 1337862 - DNA, 15 bp, Homo sapiens
tttatttgagtgaat

SEQ ID NO: 1337863 - DNA, 15 bp, Homo sapiens
ctttatttgagtgaa

SEQ ID NO: 1337864 - DNA, 15 bp, Homo sapiens
gctttatttgagtga

SEQ ID NO: 1337865 - DNA, 15 bp, Homo sapiens
agctttatttgagtg

SEQ ID NO: 1337866 - DNA, 15 bp, Homo sapiens
cagctttatttgagt

SEQ ID NO: 1337867 - DNA, 15 bp, Homo sapiens
acagctttatttgag

SEQ ID NO: 1337868 - DNA, 15 bp, Homo sapiens
cacagctttatttga

SEQ ID NO: 1337869 - DNA, 15 bp, Homo sapiens
tcacagctttatttg

SEQ ID NO: 1337870 - DNA, 15 bp, Homo sapiens
atcacagctttattt

SEQ ID NO: 1337871 - DNA, 15 bp, Homo sapiens
catcacagctttatt

SEQ ID NO: 1337872 - DNA, 15 bp, Homo sapiens
gcatcacagctttat

SEQ ID NO: 1337873 - DNA, 15 bp, Homo sapiens
ggcatcacagcttta

SEQ ID NO: 1337874 - DNA, 15 bp, Homo sapiens
aggcatcacagcttt

SEQ ID NO: 1337875 - DNA, 15 bp, Homo sapiens
caggcatcacagctt

SEQ ID NO: 1337876 - DNA, 15 bp, Homo sapiens
acaggcatcacagct

SEQ ID NO: 1337877 - DNA, 15 bp, Homo sapiens
cacaggcatcacagc

SEQ ID NO: 1337878 - DNA, 15 bp, Homo sapiens
tcacaggcatcacag

SEQ ID NO: 1337879 - DNA, 15 bp, Homo sapiens
ttcacaggcatcaca

SEQ ID NO: 1337880 - DNA, 15 bp, Homo sapiens
tttcacaggcatcac

SEQ ID NO: 1337881 - DNA, 15 bp, Homo sapiens
ctttcacaggcatca

SEQ ID NO: 1337882 - DNA, 15 bp, Homo sapiens
cctttcacaggcatc

SEQ ID NO: 1337883 - DNA, 15 bp, Homo sapiens
tcctttcacaggcat

SEQ ID NO: 1337884 - DNA, 15 bp, Homo sapiens
ctcctttcacaggca

SEQ ID NO: 1337885 - DNA, 15 bp, Homo sapiens
tctcctttcacaggc

SEQ ID NO: 1337886 - DNA, 15 bp, Homo sapiens
ctctcctttcacagg

SEQ ID NO: 1337887 - DNA, 15 bp, Homo sapiens
tctctcctttcacag

SEQ ID NO: 1337888 - DNA, 15 bp, Homo sapiens
atctctcctttcaca

SEQ ID NO: 1337889 - DNA, 15 bp, Homo sapiens
catctctcctttcac

SEQ ID NO: 1337890 - DNA, 15 bp, Homo sapiens
tcatctctcctttca

SEQ ID NO: 1337891 - DNA, 15 bp, Homo sapiens
ttcatctctcctttc

SEQ ID NO: 1337892 - DNA, 15 bp, Homo sapiens
tttcatctctccttt

SEQ ID NO: 1337893 - DNA, 15 bp, Homo sapiens
ttttcatctctcctt

SEQ ID NO: 1337894 - DNA, 15 bp, Homo sapiens
attttcatctctcct

SEQ ID NO: 1337895 - DNA, 15 bp, Homo sapiens
cattttcatctctcc

SEQ ID NO: 1337896 - DNA, 15 bp, Homo sapiens
tcattttcatctctc

SEQ ID NO: 1337897 - DNA, 15 bp, Homo sapiens
atcattttcatctct

SEQ ID NO: 1337898 - DNA, 15 bp, Homo sapiens
gatcattttcatctc

SEQ ID NO: 1337899 - DNA, 15 bp, Homo sapiens
tgatcattttcatct

SEQ ID NO: 1337900 - DNA, 15 bp, Homo sapiens
ttgatcattttcatc

SEQ ID NO: 1337901 - DNA, 15 bp, Homo sapiens
cttgatcattttcat

SEQ ID NO: 1337902 - DNA, 15 bp, Homo sapiens
tcttgatcattttca

SEQ ID NO: 1337903 - DNA, 15 bp, Homo sapiens
ttcttgatcattttc

SEQ ID NO: 1337904 - DNA, 15 bp, Homo sapiens
cttcttgatcatttt

SEQ ID NO: 1337905 - DNA, 15 bp, Homo sapiens
acttcttgatcattt

SEQ ID NO: 1337906 - DNA, 15 bp, Homo sapiens
cacttcttgatcatt

SEQ ID NO: 1337907 - DNA, 15 bp, Homo sapiens
acacttcttgatcat

SEQ ID NO: 1337908 - DNA, 15 bp, Homo sapiens
cacacttcttgatca

SEQ ID NO: 1337909 - DNA, 15 bp, Homo sapiens
acacacttcttgatc

SEQ ID NO: 1337910 - DNA, 15 bp, Homo sapiens
tacacacttcttgat

SEQ ID NO: 1337911 - DNA, 15 bp, Homo sapiens
ttacacacttcttga

SEQ ID NO: 1337912 - DNA, 15 bp, Homo sapiens
cttacacacttcttg

SEQ ID NO: 1337913 - DNA, 15 bp, Homo sapiens
tcttacacacttctt

SEQ ID NO: 1337914 - DNA, 15 bp, Homo sapiens
ctcttacacacttct

SEQ ID NO: 1337915 - DNA, 15 bp, Homo sapiens
tctcttacacacttc

SEQ ID NO: 1337916 - DNA, 15 bp, Homo sapiens
ctctcttacacactt

SEQ ID NO: 1337917 - DNA, 15 bp, Homo sapiens
tctctcttacacact

SEQ ID NO: 1337918 - DNA, 15 bp, Homo sapiens
ttctctcttacacac

SEQ ID NO: 1337919 - DNA, 15 bp, Homo sapiens
tttctctcttacaca

SEQ ID NO: 1337920 - DNA, 15 bp, Homo sapiens
atttctctcttacac

SEQ ID NO: 1337921 - DNA, 15 bp, Homo sapiens
aatttctctcttaca

SEQ ID NO: 1337922 - DNA, 15 bp, Homo sapiens
aaatttctctcttac

SEQ ID NO: 1337923 - DNA, 15 bp, Homo sapiens
gaaatttctctctta

SEQ ID NO: 1337924 - DNA, 15 bp, Homo sapiens
ggaaatttctctctt

SEQ ID NO: 1337925 - DNA, 15 bp, Homo sapiens
gggaaatttctctct

SEQ ID NO: 1337926 - DNA, 15 bp, Homo sapiens
tgggaaatttctctc

SEQ ID NO: 1337927 - DNA, 15 bp, Homo sapiens
gtgggaaatttctct

SEQ ID NO: 1337928 - DNA, 15 bp, Homo sapiens
cgtgggaaatttctc

SEQ ID NO: 1337929 - DNA, 15 bp, Homo sapiens
acgtgggaaatttct

SEQ ID NO: 1337930 - DNA, 15 bp, Homo sapiens
tacgtgggaaatttc

SEQ ID NO: 1337931 - DNA, 15 bp, Homo sapiens
ctacgtgggaaattt

SEQ ID NO: 1337932 - DNA, 15 bp, Homo sapiens
tctacgtgggaaatt

SEQ ID NO: 1337933 - DNA, 15 bp, Homo sapiens
ctctacgtgggaaat

SEQ ID NO: 1337934 - DNA, 15 bp, Homo sapiens
cctctacgtgggaaa

SEQ ID NO: 1337935 - DNA, 15 bp, Homo sapiens
tcctctacgtgggaa

SEQ ID NO: 1337936 - DNA, 15 bp, Homo sapiens
ttcctctacgtggga

SEQ ID NO: 1337937 - DNA, 15 bp, Homo sapiens
tttcctctacgtggg

SEQ ID NO: 1337938 - DNA, 15 bp, Homo sapiens
atttcctctacgtgg

SEQ ID NO: 1337939 - DNA, 15 bp, Homo sapiens
tatttcctctacgtg

SEQ ID NO: 1337940 - DNA, 15 bp, Homo sapiens
ttatttcctctacgt

SEQ ID NO: 1337941 - DNA, 15 bp, Homo sapiens
tttatttcctctacg

SEQ ID NO: 1337942 - DNA, 15 bp, Homo sapiens
ctttatttcctctac

SEQ ID NO: 1337943 - DNA, 15 bp, Homo sapiens
tctttatttcctcta

SEQ ID NO: 1337944 - DNA, 15 bp, Homo sapiens
ttctttatttcctct

SEQ ID NO: 1337945 - DNA, 15 bp, Homo sapiens
tttctttatttcctc

SEQ ID NO: 1337946 - DNA, 15 bp, Homo sapiens
gtttctttatttcct

SEQ ID NO: 1337947 - DNA, 15 bp, Homo sapiens
agtttctttatttcc

SEQ ID NO: 1337948 - DNA, 15 bp, Homo sapiens
aagtttctttatttc

SEQ ID NO: 1337949 - DNA, 15 bp, Homo sapiens
gaagtttctttattt

SEQ ID NO: 1337950 - DNA, 15 bp, Homo sapiens
tgaagtttctttatt

SEQ ID NO: 1337951 - DNA, 15 bp, Homo sapiens
gtgaagtttctttat

SEQ ID NO: 1337952 - DNA, 15 bp, Homo sapiens
tgtgaagtttcttta

SEQ ID NO: 1337953 - DNA, 15 bp, Homo sapiens
ctgtgaagtttcttt

SEQ ID NO: 1337954 - DNA, 15 bp, Homo sapiens
tctgtgaagtttctt

SEQ ID NO: 1337955 - DNA, 15 bp, Homo sapiens
ctctgtgaagtttct

SEQ ID NO: 1337956 - DNA, 15 bp, Homo sapiens
gctctgtgaagtttc

SEQ ID NO: 1337957 - DNA, 15 bp, Homo sapiens
cgctctgtgaagttt

SEQ ID NO: 1337958 - DNA, 15 bp, Homo sapiens
tcgctctgtgaagtt

SEQ ID NO: 1337959 - DNA, 15 bp, Homo sapiens
ctcgctctgtgaagt

SEQ ID NO: 1337960 - DNA, 15 bp, Homo sapiens
cctcgctctgtgaag

SEQ ID NO: 1337961 - DNA, 15 bp, Homo sapiens
acctcgctctgtgaa

SEQ ID NO: 1337962 - DNA, 15 bp, Homo sapiens
aacctcgctctgtga

SEQ ID NO: 1337963 - DNA, 15 bp, Homo sapiens
caacctcgctctgtg

SEQ ID NO: 1337964 - DNA, 15 bp, Homo sapiens
gcaacctcgctctgt

SEQ ID NO: 1337965 - DNA, 15 bp, Homo sapiens
agcaacctcgctctg

SEQ ID NO: 1337966 - DNA, 15 bp, Homo sapiens
cagcaacctcgctct

SEQ ID NO: 1337967 - DNA, 15 bp, Homo sapiens
acagcaacctcgctc

SEQ ID NO: 1337968 - DNA, 15 bp, Homo sapiens
cacagcaacctcgct

SEQ ID NO: 1337969 - DNA, 15 bp, Homo sapiens
tcacagcaacctcgc

SEQ ID NO: 1337970 - DNA, 15 bp, Homo sapiens
ctcacagcaacctcg

SEQ ID NO: 1337971 - DNA, 15 bp, Homo sapiens
ttctcacagcaacct

SEQ ID NO: 1337972 - DNA, 15 bp, Homo sapiens
cttctcacagcaacc

SEQ ID NO: 1337973 - DNA, 15 bp, Homo sapiens
gcttctcacagcaac

SEQ ID NO: 1337974 - DNA, 15 bp, Homo sapiens
tgcttctcacagcaa

SEQ ID NO: 1337975 - DNA, 15 bp, Homo sapiens
ttgcttctcacagca

SEQ ID NO: 1337976 - DNA, 15 bp, Homo sapiens
tttgcttctcacagc

SEQ ID NO: 1337977 - DNA, 15 bp, Homo sapiens
atttgcttctcacag

SEQ ID NO: 1337978 - DNA, 15 bp, Homo sapiens
catttgcttctcaca

SEQ ID NO: 1337979 - DNA, 15 bp, Homo sapiens
ccatttgcttctcac

SEQ ID NO: 1337980 - DNA, 15 bp, Homo sapiens
gccatttgcttctca

SEQ ID NO: 1337981 - DNA, 15 bp, Homo sapiens
tgccatttgcttctc

SEQ ID NO: 1337982 - DNA, 15 bp, Homo sapiens
atgccatttgcttct

SEQ ID NO: 1337983 - DNA, 15 bp, Homo sapiens
tatgccatttgcttc

SEQ ID NO: 1337984 - DNA, 15 bp, Homo sapiens
ttatgccatttgctt

SEQ ID NO: 1337985 - DNA, 15 bp, Homo sapiens
attatgccatttgct

SEQ ID NO: 1337986 - DNA, 15 bp, Homo sapiens
tattatgccatttgc

SEQ ID NO: 1337987 - DNA, 15 bp, Homo sapiens
atattatgccatttg

SEQ ID NO: 1337988 - DNA, 15 bp, Homo sapiens
tatattatgccattt

SEQ ID NO: 1337989 - DNA, 15 bp, Homo sapiens
gtatattatgccatt

SEQ ID NO: 1337990 - DNA, 15 bp, Homo sapiens
tgtatattatgccat

SEQ ID NO: 1337991 - DNA, 15 bp, Homo sapiens
atgtatattatgcca

SEQ ID NO: 1337992 - DNA, 15 bp, Homo sapiens
aatgtatattatgcc

SEQ ID NO: 1337993 - DNA, 15 bp, Homo sapiens
taatgtatattatgc

SEQ ID NO: 1337994 - DNA, 15 bp, Homo sapiens
ttaatgtatattatg

SEQ ID NO: 1337995 - DNA, 15 bp, Homo sapiens
tttaatgtatattat

SEQ ID NO: 1337996 - DNA, 15 bp, Homo sapiens
ctttaatgtatatta

SEQ ID NO: 1337997 - DNA, 15 bp, Homo sapiens
gctttaatgtatatt

SEQ ID NO: 1337998 - DNA, 15 bp, Homo sapiens
tgctttaatgtatat

SEQ ID NO: 1337999 - DNA, 15 bp, Homo sapiens
gtgctttaatgtata

SEQ ID NO: 1338000 - DNA, 15 bp, Homo sapiens
agtgctttaatgtat

SEQ ID NO: 1338001 - DNA, 15 bp, Homo sapiens
gagtgctttaatgta

SEQ ID NO: 1338002 - DNA, 15 bp, Homo sapiens
agagtgctttaatgt

SEQ ID NO: 1338003 - DNA, 15 bp, Homo sapiens
cagagtgctttaatg

SEQ ID NO: 1338004 - DNA, 15 bp, Homo sapiens
acagagtgctttaat

SEQ ID NO: 1338005 - DNA, 15 bp, Homo sapiens
tacagagtgctttaa

SEQ ID NO: 1338006 - DNA, 15 bp, Homo sapiens
ttacagagtgcttta

SEQ ID NO: 1338007 - DNA, 15 bp, Homo sapiens
tttacagagtgcttt

SEQ ID NO: 1338008 - DNA, 15 bp, Homo sapiens
atttacagagtgctt

SEQ ID NO: 1338009 - DNA, 15 bp, Homo sapiens
aatttacagagtgct

SEQ ID NO: 1338010 - DNA, 15 bp, Homo sapiens
taatttacagagtgc

SEQ ID NO: 1338011 - DNA, 15 bp, Homo sapiens
ataatttacagagtg

SEQ ID NO: 1338012 - DNA, 15 bp, Homo sapiens
tataatttacagagt

SEQ ID NO: 1338013 - DNA, 15 bp, Homo sapiens
ttataatttacagag

SEQ ID NO: 1338014 - DNA, 15 bp, Homo sapiens
tttataatttacaga

SEQ ID NO: 1338015 - DNA, 15 bp, Homo sapiens
ttttataatttacag

SEQ ID NO: 1338016 - DNA, 15 bp, Homo sapiens
attttataatttaca

SEQ ID NO: 1338017 - DNA, 15 bp, Homo sapiens
aattttataatttac

SEQ ID NO: 1338018 - DNA, 15 bp, Homo sapiens
taattttataattta

SEQ ID NO: 1338019 - DNA, 15 bp, Homo sapiens
ataattttataattt

SEQ ID NO: 1338020 - DNA, 15 bp, Homo sapiens
cataattttataatt

SEQ ID NO: 1338021 - DNA, 15 bp, Homo sapiens
acataattttataat

SEQ ID NO: 1338022 - DNA, 15 bp, Homo sapiens
aacataattttataa

SEQ ID NO: 1338023 - DNA, 15 bp, Homo sapiens
gaacataattttata

SEQ ID NO: 1338024 - DNA, 15 bp, Homo sapiens
agaacataattttat

SEQ ID NO: 1338025 - DNA, 15 bp, Homo sapiens
tagaacataatttta

SEQ ID NO: 1338026 - DNA, 15 bp, Homo sapiens
ttagaacataatttt

SEQ ID NO: 1338027 - DNA, 15 bp, Homo sapiens
attagaacataattt

SEQ ID NO: 1338028 - DNA, 15 bp, Homo sapiens
cattagaacataatt

SEQ ID NO: 1338029 - DNA, 15 bp, Homo sapiens
acattagaacataat

SEQ ID NO: 1338030 - DNA, 15 bp, Homo sapiens
aacattagaacataa

SEQ ID NO: 1338031 - DNA, 15 bp, Homo sapiens
taacattagaacata

SEQ ID NO: 1338032 - DNA, 15 bp, Homo sapiens
ctaacattagaacat

SEQ ID NO: 1338033 - DNA, 15 bp, Homo sapiens
tctaacattagaaca

SEQ ID NO: 1338034 - DNA, 15 bp, Homo sapiens
atctaacattagaac

SEQ ID NO: 1338035 - DNA, 15 bp, Homo sapiens
aatctaacattagaa

SEQ ID NO: 1338036 - DNA, 15 bp, Homo sapiens
taatctaacattaga

SEQ ID NO: 1338037 - DNA, 15 bp, Homo sapiens
ataatctaacattag

SEQ ID NO: 1338038 - DNA, 15 bp, Homo sapiens
aataatctaacatta

SEQ ID NO: 1338039 - DNA, 15 bp, Homo sapiens
aaataatctaacatt

SEQ ID NO: 1338040 - DNA, 15 bp, Homo sapiens
aaaataatctaacat

SEQ ID NO: 1338041 - DNA, 15 bp, Homo sapiens
aaaaataatctaaca

SEQ ID NO: 1338042 - DNA, 15 bp, Homo sapiens
aaaaaataatctaac

SEQ ID NO: 1338043 - DNA, 15 bp, Homo sapiens
gaaaaaataatctaa

SEQ ID NO: 1338044 - DNA, 15 bp, Homo sapiens
ggaaaaaataatcta

SEQ ID NO: 1338045 - DNA, 15 bp, Homo sapiens
tggaaaaaataatct

SEQ ID NO: 1338046 - DNA, 15 bp, Homo sapiens
ttggaaaaaataatc

SEQ ID NO: 1338047 - DNA, 15 bp, Homo sapiens
cttggaaaaaataat

SEQ ID NO: 1338048 - DNA, 15 bp, Homo sapiens
tcttggaaaaaataa

SEQ ID NO: 1338049 - DNA, 15 bp, Homo sapiens
ttcttggaaaaaata

SEQ ID NO: 1338050 - DNA, 15 bp, Homo sapiens
attcttggaaaaaat

SEQ ID NO: 1338051 - DNA, 15 bp, Homo sapiens
tattcttggaaaaaa

SEQ ID NO: 1338052 - DNA, 15 bp, Homo sapiens
ctattcttggaaaaa

SEQ ID NO: 1338053 - DNA, 15 bp, Homo sapiens
tctattcttggaaaa

SEQ ID NO: 1338054 - DNA, 15 bp, Homo sapiens
ctctattcttggaaa

SEQ ID NO: 1338055 - DNA, 15 bp, Homo sapiens
gctctattcttggaa

SEQ ID NO: 1338056 - DNA, 15 bp, Homo sapiens
ggctctattcttgga

SEQ ID NO: 1338057 - DNA, 15 bp, Homo sapiens
tggctctattcttgg

SEQ ID NO: 1338058 - DNA, 15 bp, Homo sapiens
ttggctctattcttg

SEQ ID NO: 1338059 - DNA, 15 bp, Homo sapiens
tttggctctattctt

SEQ ID NO: 1338060 - DNA, 15 bp, Homo sapiens
gtttggctctattct

SEQ ID NO: 1338061 - DNA, 15 bp, Homo sapiens
tgtttggctctattc

SEQ ID NO: 1338062 - DNA, 15 bp, Homo sapiens
atgtttggctctatt

SEQ ID NO: 1338063 - DNA, 15 bp, Homo sapiens
catgtttggctctat

SEQ ID NO: 1338064 - DNA, 15 bp, Homo sapiens
acatgtttggctcta

SEQ ID NO: 1338065 - DNA, 15 bp, Homo sapiens
cacatgtttggctct

SEQ ID NO: 1338066 - DNA, 15 bp, Homo sapiens
ccacatgtttggctc

SEQ ID NO: 1338067 - DNA, 15 bp, Homo sapiens
gccacatgtttggct

SEQ ID NO: 1338068 - DNA, 15 bp, Homo sapiens
tgccacatgtttggc

SEQ ID NO: 1338069 - DNA, 15 bp, Homo sapiens
gtgccacatgtttgg

SEQ ID NO: 1338070 - DNA, 15 bp, Homo sapiens
agtgccacatgtttg

SEQ ID NO: 1338071 - DNA, 15 bp, Homo sapiens
gagtgccacatgttt

SEQ ID NO: 1338072 - DNA, 15 bp, Homo sapiens
agagtgccacatgtt

SEQ ID NO: 1338073 - DNA, 15 bp, Homo sapiens
tagagtgccacatgt

SEQ ID NO: 1338074 - DNA, 15 bp, Homo sapiens
ttagagtgccacatg

SEQ ID NO: 1338075 - DNA, 15 bp, Homo sapiens
tttagagtgccacat

SEQ ID NO: 1338076 - DNA, 15 bp, Homo sapiens
atttagagtgccaca

SEQ ID NO: 1338077 - DNA, 15 bp, Homo sapiens
aatttagagtgccac

SEQ ID NO: 1338078 - DNA, 15 bp, Homo sapiens
gaatttagagtgcca

SEQ ID NO: 1338079 - DNA, 15 bp, Homo sapiens
cgaatttagagtgcc

SEQ ID NO: 1338080 - DNA, 15 bp, Homo sapiens
tcgaatttagagtgc

SEQ ID NO: 1338081 - DNA, 15 bp, Homo sapiens
gtcgaatttagagtg

SEQ ID NO: 1338082 - DNA, 15 bp, Homo sapiens
tgtcgaatttagagt

SEQ ID NO: 1338083 - DNA, 15 bp, Homo sapiens
gtgtcgaatttagag

SEQ ID NO: 1338084 - DNA, 15 bp, Homo sapiens
ggtgtcgaatttaga

SEQ ID NO: 1338085 - DNA, 15 bp, Homo sapiens
tggtgtcgaatttag

SEQ ID NO: 1338086 - DNA, 15 bp, Homo sapiens
ttggtgtcgaattta

SEQ ID NO: 1338087 - DNA, 15 bp, Homo sapiens
cttggtgtcgaattt

SEQ ID NO: 1338088 - DNA, 15 bp, Homo sapiens
tcttggtgtcgaatt

SEQ ID NO: 1338089 - DNA, 15 bp, Homo sapiens
ttcttggtgtcgaat

SEQ ID NO: 1338090 - DNA, 15 bp, Homo sapiens
cttcttggtgtcgaa

SEQ ID NO: 1338091 - DNA, 15 bp, Homo sapiens
ccttcttggtgtcga

SEQ ID NO: 1338092 - DNA, 15 bp, Homo sapiens
tccttcttggtgtcg

SEQ ID NO: 1338093 - DNA, 15 bp, Homo sapiens
gtccttcttggtgtc

SEQ ID NO: 1338094 - DNA, 15 bp, Homo sapiens
tgtccttcttggtgt

SEQ ID NO: 1338095 - DNA, 15 bp, Homo sapiens
ctgtccttcttggtg

SEQ ID NO: 1338096 - DNA, 15 bp, Homo sapiens
actgtccttcttggt

SEQ ID NO: 1338097 - DNA, 15 bp, Homo sapiens
aactgtccttcttgg

SEQ ID NO: 1338098 - DNA, 15 bp, Homo sapiens
caactgtccttcttg

SEQ ID NO: 1338099 - DNA, 15 bp, Homo sapiens
tcaactgtccttctt

SEQ ID NO: 1338100 - DNA, 15 bp, Homo sapiens
ttcaactgtccttct

SEQ ID NO: 1338101 - DNA, 15 bp, Homo sapiens
attcaactgtccttc

SEQ ID NO: 1338102 - DNA, 15 bp, Homo sapiens
aattcaactgtcctt

SEQ ID NO: 1338103 - DNA, 15 bp, Homo sapiens
taattcaactgtcct

SEQ ID NO: 1338104 - DNA, 15 bp, Homo sapiens
ctaattcaactgtcc

SEQ ID NO: 1338105 - DNA, 15 bp, Homo sapiens
actaattcaactgtc

SEQ ID NO: 1338106 - DNA, 15 bp, Homo sapiens
gactaattcaactgt

SEQ ID NO: 1338107 - DNA, 15 bp, Homo sapiens
agactaattcaactg

SEQ ID NO: 1338108 - DNA, 15 bp, Homo sapiens
gagactaattcaact

SEQ ID NO: 1338109 - DNA, 15 bp, Homo sapiens
agagactaattcaac

SEQ ID NO: 1338110 - DNA, 15 bp, Homo sapiens
aagagactaattcaa

SEQ ID NO: 1338111 - DNA, 15 bp, Homo sapiens
aaagagactaattca

SEQ ID NO: 1338112 - DNA, 15 bp, Homo sapiens
aaaagagactaattc

SEQ ID NO: 1338113 - DNA, 15 bp, Homo sapiens
taaaagagactaatt

SEQ ID NO: 1338114 - DNA, 15 bp, Homo sapiens
ctaaaagagactaat

SEQ ID NO: 1338115 - DNA, 15 bp, Homo sapiens
tctaaaagagactaa

SEQ ID NO: 1338116 - DNA, 15 bp, Homo sapiens
atctaaaagagacta

SEQ ID NO: 1338117 - DNA, 15 bp, Homo sapiens
tatctaaaagagact

SEQ ID NO: 1338118 - DNA, 15 bp, Homo sapiens
atatctaaaagagac

SEQ ID NO: 1338119 - DNA, 15 bp, Homo sapiens
tatatctaaaagaga

SEQ ID NO: 1338120 - DNA, 15 bp, Homo sapiens
ttatatctaaaagag

SEQ ID NO: 1338121 - DNA, 15 bp, Homo sapiens
cttatatctaaaaga

SEQ ID NO: 1338122 - DNA, 15 bp, Homo sapiens
tcttatatctaaaag

SEQ ID NO: 1338123 - DNA, 15 bp, Homo sapiens
ttcttatatctaaaa

SEQ ID NO: 1338124 - DNA, 15 bp, Homo sapiens
gttcttatatctaaa

SEQ ID NO: 1338125 - DNA, 15 bp, Homo sapiens
tgttcttatatctaa

SEQ ID NO: 1338126 - DNA, 15 bp, Homo sapiens
ctgttcttatatcta

SEQ ID NO: 1338127 - DNA, 15 bp, Homo sapiens
tctgttcttatatct

SEQ ID NO: 1338128 - DNA, 15 bp, Homo sapiens
ctctgttcttatatc

SEQ ID NO: 1338129 - DNA, 15 bp, Homo sapiens
cctctgttcttatat

SEQ ID NO: 1338130 - DNA, 15 bp, Homo sapiens
acctctgttcttata

SEQ ID NO: 1338131 - DNA, 15 bp, Homo sapiens
gacctctgttcttat

SEQ ID NO: 1338132 - DNA, 15 bp, Homo sapiens
ggacctctgttctta

SEQ ID NO: 1338133 - DNA, 15 bp, Homo sapiens
aggacctctgttctt

SEQ ID NO: 1338134 - DNA, 15 bp, Homo sapiens
gaggacctctgttct

SEQ ID NO: 1338135 - DNA, 15 bp, Homo sapiens
agaggacctctgttc

SEQ ID NO: 1338136 - DNA, 15 bp, Homo sapiens
tagaggacctctgtt

SEQ ID NO: 1338137 - DNA, 15 bp, Homo sapiens
ttagaggacctctgt

SEQ ID NO: 1338138 - DNA, 15 bp, Homo sapiens
tcttagaggacctct

SEQ ID NO: 1338139 - DNA, 15 bp, Homo sapiens
ttcttagaggacctc

SEQ ID NO: 1338140 - DNA, 15 bp, Homo sapiens
gttcttagaggacct

SEQ ID NO: 1338141 - DNA, 15 bp, Homo sapiens
tgttcttagaggacc

SEQ ID NO: 1338142 - DNA, 15 bp, Homo sapiens
gtgttcttagaggac

SEQ ID NO: 1338143 - DNA, 15 bp, Homo sapiens
cgtgttcttagagga

SEQ ID NO: 1338144 - DNA, 15 bp, Homo sapiens
ccgtgttcttagagg

SEQ ID NO: 1338145 - DNA, 15 bp, Homo sapiens
tccgtgttcttagag

SEQ ID NO: 1338146 - DNA, 15 bp, Homo sapiens
ttccgtgttcttaga

SEQ ID NO: 1338147 - DNA, 15 bp, Homo sapiens
tttccgtgttcttag

SEQ ID NO: 1338148 - DNA, 15 bp, Homo sapiens
gtttccgtgttctta

SEQ ID NO: 1338149 - DNA, 15 bp, Homo sapiens
ggtttccgtgttctt

SEQ ID NO: 1338150 - DNA, 15 bp, Homo sapiens
tggtttccgtgttct

SEQ ID NO: 1338151 - DNA, 15 bp, Homo sapiens
ttggtttccgtgttc

SEQ ID NO: 1338152 - DNA, 15 bp, Homo sapiens
cttggtttccgtgtt

SEQ ID NO: 1338153 - DNA, 15 bp, Homo sapiens
ccttggtttccgtgt

SEQ ID NO: 1338154 - DNA, 15 bp, Homo sapiens
tccttggtttccgtg

SEQ ID NO: 1338155 - DNA, 15 bp, Homo sapiens
ttccttggtttccgt

SEQ ID NO: 1338156 - DNA, 15 bp, Homo sapiens
tttccttggtttccg

SEQ ID NO: 1338157 - DNA, 15 bp, Homo sapiens
gtttccttggtttcc

SEQ ID NO: 1338158 - DNA, 15 bp, Homo sapiens
tgtttccttggtttc

SEQ ID NO: 1338159 - DNA, 15 bp, Homo sapiens
gtgtttccttggttt

SEQ ID NO: 1338160 - DNA, 15 bp, Homo sapiens
tgtgtttccttggtt

SEQ ID NO: 1338161 - DNA, 15 bp, Homo sapiens
gtgtgtttccttggt

SEQ ID NO: 1338162 - DNA, 15 bp, Homo sapiens
ggtgtgtttccttgg

SEQ ID NO: 1338163 - DNA, 15 bp, Homo sapiens
aggtgtgtttccttg

SEQ ID NO: 1338164 - DNA, 15 bp, Homo sapiens
gaggtgtgtttcctt

SEQ ID NO: 1338165 - DNA, 15 bp, Homo sapiens
agaggtgtgtttcct

SEQ ID NO: 1338166 - DNA, 15 bp, Homo sapiens
aagaggtgtgtttcc

SEQ ID NO: 1338167 - DNA, 15 bp, Homo sapiens
caagaggtgtgtttc

SEQ ID NO: 1338168 - DNA, 15 bp, Homo sapiens
gcaagaggtgtgttt

SEQ ID NO: 1338169 - DNA, 15 bp, Homo sapiens
ggcaagaggtgtgtt

SEQ ID NO: 1338170 - DNA, 15 bp, Homo sapiens
gggcaagaggtgtgt

SEQ ID NO: 1338171 - DNA, 15 bp, Homo sapiens
ggggcaagaggtgtg

SEQ ID NO: 1338172 - DNA, 15 bp, Homo sapiens
tggggcaagaggtgt

SEQ ID NO: 1338173 - DNA, 15 bp, Homo sapiens
ttggggcaagaggtg

SEQ ID NO: 1338174 - DNA, 15 bp, Homo sapiens
tttggggcaagaggt

SEQ ID NO: 1338175 - DNA, 15 bp, Homo sapiens
gtttggggcaagagg

SEQ ID NO: 1338176 - DNA, 15 bp, Homo sapiens
tgtttggggcaagag

SEQ ID NO: 1338177 - DNA, 15 bp, Homo sapiens
ttgtttggggcaaga

SEQ ID NO: 1338178 - DNA, 15 bp, Homo sapiens
cttgtttggggcaag

SEQ ID NO: 1338179 - DNA, 15 bp, Homo sapiens
ccttgtttggggcaa

SEQ ID NO: 1338180 - DNA, 15 bp, Homo sapiens
tccttgtttggggca

SEQ ID NO: 1338181 - DNA, 15 bp, Homo sapiens
ctccttgtttggggc

SEQ ID NO: 1338182 - DNA, 15 bp, Homo sapiens
tctccttgtttgggg

SEQ ID NO: 1338183 - DNA, 15 bp, Homo sapiens
atctccttgtttggg

SEQ ID NO: 1338184 - DNA, 15 bp, Homo sapiens
catctccttgtttgg

SEQ ID NO: 1338185 - DNA, 15 bp, Homo sapiens
acatctccttgtttg

SEQ ID NO: 1338186 - DNA, 15 bp, Homo sapiens
aacatctccttgttt

SEQ ID NO: 1338187 - DNA, 15 bp, Homo sapiens
taacatctccttgtt

SEQ ID NO: 1338188 - DNA, 15 bp, Homo sapiens
ctaacatctccttgt

SEQ ID NO: 1338189 - DNA, 15 bp, Homo sapiens
cctaacatctccttg

SEQ ID NO: 1338190 - DNA, 15 bp, Homo sapiens
acctaacatctcctt

SEQ ID NO: 1338191 - DNA, 15 bp, Homo sapiens
tacctaacatctcct

SEQ ID NO: 1338192 - DNA, 15 bp, Homo sapiens
ctacctaacatctcc

SEQ ID NO: 1338193 - DNA, 15 bp, Homo sapiens
actacctaacatctc

SEQ ID NO: 1338194 - DNA, 15 bp, Homo sapiens
cactacctaacatct

SEQ ID NO: 1338195 - DNA, 15 bp, Homo sapiens
gcactacctaacatc

SEQ ID NO: 1338196 - DNA, 15 bp, Homo sapiens
tgcactacctaacat

SEQ ID NO: 1338197 - DNA, 15 bp, Homo sapiens
ctgcactacctaaca

SEQ ID NO: 1338198 - DNA, 15 bp, Homo sapiens
cctgcactacctaac

SEQ ID NO: 1338199 - DNA, 15 bp, Homo sapiens
acctgcactacctaa

SEQ ID NO: 1338200 - DNA, 15 bp, Homo sapiens
aacctgcactaccta

SEQ ID NO: 1338201 - DNA, 15 bp, Homo sapiens
gaacctgcactacct

SEQ ID NO: 1338202 - DNA, 15 bp, Homo sapiens
ggaacctgcactacc

SEQ ID NO: 1338203 - DNA, 15 bp, Homo sapiens
gggaacctgcactac

SEQ ID NO: 1338204 - DNA, 15 bp, Homo sapiens
tgggaacctgcacta

SEQ ID NO: 1338205 - DNA, 15 bp, Homo sapiens
atgggaacctgcact

SEQ ID NO: 1338206 - DNA, 15 bp, Homo sapiens
catgggaacctgcac

SEQ ID NO: 1338207 - DNA, 15 bp, Homo sapiens
ccatgggaacctgca

SEQ ID NO: 1338208 - DNA, 15 bp, Homo sapiens
tccatgggaacctgc

SEQ ID NO: 1338209 - DNA, 15 bp, Homo sapiens
ctccatgggaacctg

SEQ ID NO: 1338210 - DNA, 15 bp, Homo sapiens
cctccatgggaacct

SEQ ID NO: 1338211 - DNA, 15 bp, Homo sapiens
tcctccatgggaacc

SEQ ID NO: 1338212 - DNA, 15 bp, Homo sapiens
ttcctccatgggaac

SEQ ID NO: 1338213 - DNA, 15 bp, Homo sapiens
tttcctccatgggaa

SEQ ID NO: 1338214 - DNA, 15 bp, Homo sapiens
atttcctccatggga

SEQ ID NO: 1338215 - DNA, 15 bp, Homo sapiens
catttcctccatggg

SEQ ID NO: 1338216 - DNA, 15 bp, Homo sapiens
tcatttcctccatgg

SEQ ID NO: 1338217 - DNA, 15 bp, Homo sapiens
ctcatttcctccatg

SEQ ID NO: 1338218 - DNA, 15 bp, Homo sapiens
cctcatttcctccat

SEQ ID NO: 1338219 - DNA, 15 bp, Homo sapiens
ccctcatttcctcca

SEQ ID NO: 1338220 - DNA, 15 bp, Homo sapiens
tccctcatttcctcc

SEQ ID NO: 1338221 - DNA, 15 bp, Homo sapiens
ttccctcatttcctc

SEQ ID NO: 1338222 - DNA, 15 bp, Homo sapiens
cttccctcatttcct

SEQ ID NO: 1338223 - DNA, 15 bp, Homo sapiens
gcttccctcatttcc

SEQ ID NO: 1338224 - DNA, 15 bp, Homo sapiens
tgcttccctcatttc

SEQ ID NO: 1338225 - DNA, 15 bp, Homo sapiens
ctgcttccctcattt

SEQ ID NO: 1338226 - DNA, 15 bp, Homo sapiens
tctgcttccctcatt

SEQ ID NO: 1338227 - DNA, 15 bp, Homo sapiens
ttctgcttccctcat

SEQ ID NO: 1338228 - DNA, 15 bp, Homo sapiens
cttctgcttccctca

SEQ ID NO: 1338229 - DNA, 15 bp, Homo sapiens
gcttctgcttccctc

SEQ ID NO: 1338230 - DNA, 15 bp, Homo sapiens
agcttctgcttccct

SEQ ID NO: 1338231 - DNA, 15 bp, Homo sapiens
aagcttctgcttccc

SEQ ID NO: 1338232 - DNA, 15 bp, Homo sapiens
caagcttctgcttcc

SEQ ID NO: 1338233 - DNA, 15 bp, Homo sapiens
acaagcttctgcttc

SEQ ID NO: 1338234 - DNA, 15 bp, Homo sapiens
aacaagcttctgctt

SEQ ID NO: 1338235 - DNA, 15 bp, Homo sapiens
aaacaagcttctgct

SEQ ID NO: 1338236 - DNA, 15 bp, Homo sapiens
caaacaagcttctgc

SEQ ID NO: 1338237 - DNA, 15 bp, Homo sapiens
ccaaacaagcttctg

SEQ ID NO: 1338238 - DNA, 15 bp, Homo sapiens
tccaaacaagcttct

SEQ ID NO: 1338239 - DNA, 15 bp, Homo sapiens
ctccaaacaagcttc

SEQ ID NO: 1338240 - DNA, 15 bp, Homo sapiens
tctccaaacaagctt

SEQ ID NO: 1338241 - DNA, 15 bp, Homo sapiens
atctccaaacaagct

SEQ ID NO: 1338242 - DNA, 15 bp, Homo sapiens
gatctccaaacaagc

SEQ ID NO: 1338243 - DNA, 15 bp, Homo sapiens
tgatctccaaacaag

SEQ ID NO: 1338244 - DNA, 15 bp, Homo sapiens
ctgatctccaaacaa

SEQ ID NO: 1338245 - DNA, 15 bp, Homo sapiens
cctgatctccaaaca

SEQ ID NO: 1338246 - DNA, 15 bp, Homo sapiens
gcctgatctccaaac

SEQ ID NO: 1338247 - DNA, 15 bp, Homo sapiens
agcctgatctccaaa

SEQ ID NO: 1338248 - DNA, 15 bp, Homo sapiens
cagcctgatctccaa

SEQ ID NO: 1338249 - DNA, 15 bp, Homo sapiens
gcagcctgatctcca

SEQ ID NO: 1338250 - DNA, 15 bp, Homo sapiens
tgcagcctgatctcc

SEQ ID NO: 1338251 - DNA, 15 bp, Homo sapiens
gtgcagcctgatctc

SEQ ID NO: 1338252 - DNA, 15 bp, Homo sapiens
agtgcagcctgatct

SEQ ID NO: 1338253 - DNA, 15 bp, Homo sapiens
cagtgcagcctgatc

SEQ ID NO: 1338254 - DNA, 15 bp, Homo sapiens
tcagtgcagcctgat

SEQ ID NO: 1338255 - DNA, 15 bp, Homo sapiens
ttcagtgcagcctga

SEQ ID NO: 1338256 - DNA, 15 bp, Homo sapiens
gttcagtgcagcctg

SEQ ID NO: 1338257 - DNA, 15 bp, Homo sapiens
tgttcagtgcagcct

SEQ ID NO: 1338258 - DNA, 15 bp, Homo sapiens
gtgttcagtgcagcc

SEQ ID NO: 1338259 - DNA, 15 bp, Homo sapiens
tgtgttcagtgcagc

SEQ ID NO: 1338260 - DNA, 15 bp, Homo sapiens
gtgtgttcagtgcag

SEQ ID NO: 1338261 - DNA, 15 bp, Homo sapiens
tgtgtgttcagtgca

SEQ ID NO: 1338262 - DNA, 15 bp, Homo sapiens
ctgtgtgttcagtgc

SEQ ID NO: 1338263 - DNA, 15 bp, Homo sapiens
cctgtgtgttcagtg

SEQ ID NO: 1338264 - DNA, 15 bp, Homo sapiens
gcctgtgtgttcagt

SEQ ID NO: 1338265 - DNA, 15 bp, Homo sapiens
tgcctgtgtgttcag

SEQ ID NO: 1338266 - DNA, 15 bp, Homo sapiens
ctgcctgtgtgttca

SEQ ID NO: 1338267 - DNA, 15 bp, Homo sapiens
gctgcctgtgtgttc

SEQ ID NO: 1338268 - DNA, 15 bp, Homo sapiens
tgctgcctgtgtgtt

SEQ ID NO: 1338269 - DNA, 15 bp, Homo sapiens
ctgctgcctgtgtgt

SEQ ID NO: 1338270 - DNA, 15 bp, Homo sapiens
cctgctgcctgtgtg

SEQ ID NO: 1338271 - DNA, 15 bp, Homo sapiens
gcctgctgcctgtgt

SEQ ID NO: 1338272 - DNA, 15 bp, Homo sapiens
agcctgctgcctgtg

SEQ ID NO: 1338273 - DNA, 15 bp, Homo sapiens
cagcctgctgcctgt

SEQ ID NO: 1338274 - DNA, 15 bp, Homo sapiens
acagcctgctgcctg

SEQ ID NO: 1338275 - DNA, 15 bp, Homo sapiens
cacagcctgctgcct

SEQ ID NO: 1338276 - DNA, 15 bp, Homo sapiens
tcacagcctgctgcc

SEQ ID NO: 1338277 - DNA, 15 bp, Homo sapiens
gtcacagcctgctgc

SEQ ID NO: 1338278 - DNA, 15 bp, Homo sapiens
agtcacagcctgctg

SEQ ID NO: 1338279 - DNA, 15 bp, Homo sapiens
gagtcacagcctgct

SEQ ID NO: 1338280 - DNA, 15 bp, Homo sapiens
agagtcacagcctgc

SEQ ID NO: 1338281 - DNA, 15 bp, Homo sapiens
aagagtcacagcctg

SEQ ID NO: 1338282 - DNA, 15 bp, Homo sapiens
gaagagtcacagcct

SEQ ID NO: 1338283 - DNA, 15 bp, Homo sapiens
tgaagagtcacagcc

SEQ ID NO: 1338284 - DNA, 15 bp, Homo sapiens
gtgaagagtcacagc

SEQ ID NO: 1338285 - DNA, 15 bp, Homo sapiens
cgtgaagagtcacag

SEQ ID NO: 1338286 - DNA, 15 bp, Homo sapiens
gcgtgaagagtcaca

SEQ ID NO: 1338287 - DNA, 15 bp, Homo sapiens
agcgtgaagagtcac

SEQ ID NO: 1338288 - DNA, 15 bp, Homo sapiens
gagcgtgaagagtca

SEQ ID NO: 1338289 - DNA, 15 bp, Homo sapiens
agagcgtgaagagtc

SEQ ID NO: 1338290 - DNA, 15 bp, Homo sapiens
cagagcgtgaagagt

SEQ ID NO: 1338291 - DNA, 15 bp, Homo sapiens
tcagagcgtgaagag

SEQ ID NO: 1338292 - DNA, 15 bp, Homo sapiens
gtcagagcgtgaaga

SEQ ID NO: 1338293 - DNA, 15 bp, Homo sapiens
agtcagagcgtgaag

SEQ ID NO: 1338294 - DNA, 15 bp, Homo sapiens
gagtcagagcgtgaa

SEQ ID NO: 1338295 - DNA, 15 bp, Homo sapiens
agagtcagagcgtga

SEQ ID NO: 1338296 - DNA, 15 bp, Homo sapiens
tagagtcagagcgtg

SEQ ID NO: 1338297 - DNA, 15 bp, Homo sapiens
gtagagtcagagcgt

SEQ ID NO: 1338298 - DNA, 15 bp, Homo sapiens
ggtagagtcagagcg

SEQ ID NO: 1338299 - DNA, 15 bp, Homo sapiens
tggtagagtcagagc

SEQ ID NO: 1338300 - DNA, 15 bp, Homo sapiens
atggtagagtcagag

SEQ ID NO: 1338301 - DNA, 15 bp, Homo sapiens
aatggtagagtcaga

SEQ ID NO: 1338302 - DNA, 15 bp, Homo sapiens
aaatggtagagtcag

SEQ ID NO: 1338303 - DNA, 15 bp, Homo sapiens
aaaatggtagagtca

SEQ ID NO: 1338304 - DNA, 15 bp, Homo sapiens
taaaatggtagagtc

SEQ ID NO: 1338305 - DNA, 15 bp, Homo sapiens
ttaaaatggtagagt

SEQ ID NO: 1338306 - DNA, 15 bp, Homo sapiens
gttaaaatggtagag

SEQ ID NO: 1338307 - DNA, 15 bp, Homo sapiens
ggttaaaatggtaga

SEQ ID NO: 1338308 - DNA, 15 bp, Homo sapiens
aggttaaaatggtag

SEQ ID NO: 1338309 - DNA, 15 bp, Homo sapiens
caggttaaaatggta

SEQ ID NO: 1338310 - DNA, 15 bp, Homo sapiens
ccaggttaaaatggt

SEQ ID NO: 1338311 - DNA, 15 bp, Homo sapiens
gccaggttaaaatgg

SEQ ID NO: 1338312 - DNA, 15 bp, Homo sapiens
agccaggttaaaatg

SEQ ID NO: 1338313 - DNA, 15 bp, Homo sapiens
gagccaggttaaaat

SEQ ID NO: 1338314 - DNA, 15 bp, Homo sapiens
ggagccaggttaaaa

SEQ ID NO: 1338315 - DNA, 15 bp, Homo sapiens
aggagccaggttaaa

SEQ ID NO: 1338316 - DNA, 15 bp, Homo sapiens
gaggagccaggttaa

SEQ ID NO: 1338317 - DNA, 15 bp, Homo sapiens
ggaggagccaggtta

SEQ ID NO: 1338318 - DNA, 15 bp, Homo sapiens
aggaggagccaggtt

SEQ ID NO: 1338319 - DNA, 15 bp, Homo sapiens
caggaggagccaggt

SEQ ID NO: 1338320 - DNA, 15 bp, Homo sapiens
ccaggaggagccagg

SEQ ID NO: 1338321 - DNA, 15 bp, Homo sapiens
cccaggaggagccag

SEQ ID NO: 1338322 - DNA, 15 bp, Homo sapiens
ccccaggaggagcca

SEQ ID NO: 1338323 - DNA, 15 bp, Homo sapiens
gccccaggaggagcc

SEQ ID NO: 1338324 - DNA, 15 bp, Homo sapiens
agccccaggaggagc

SEQ ID NO: 1338325 - DNA, 15 bp, Homo sapiens
aagccccaggaggag

SEQ ID NO: 1338326 - DNA, 15 bp, Homo sapiens
gaagccccaggagga

SEQ ID NO: 1338327 - DNA, 15 bp, Homo sapiens
tgaagccccaggagg

SEQ ID NO: 1338328 - DNA, 15 bp, Homo sapiens
ctgaagccccaggag

SEQ ID NO: 1338329 - DNA, 15 bp, Homo sapiens
tctgaagccccagga

SEQ ID NO: 1338330 - DNA, 15 bp, Homo sapiens
ttctgaagccccagg

SEQ ID NO: 1338331 - DNA, 15 bp, Homo sapiens
gttctgaagccccag

SEQ ID NO: 1338332 - DNA, 15 bp, Homo sapiens
agttctgaagcccca

SEQ ID NO: 1338333 - DNA, 15 bp, Homo sapiens
tagttctgaagcccc

SEQ ID NO: 1338334 - DNA, 15 bp, Homo sapiens
ttagttctgaagccc

SEQ ID NO: 1338335 - DNA, 15 bp, Homo sapiens
cttagttctgaagcc

SEQ ID NO: 1338336 - DNA, 15 bp, Homo sapiens
acttagttctgaagc

SEQ ID NO: 1338337 - DNA, 15 bp, Homo sapiens
cacttagttctgaag

SEQ ID NO: 1338338 - DNA, 15 bp, Homo sapiens
tcacttagttctgaa

SEQ ID NO: 1338339 - DNA, 15 bp, Homo sapiens
ctcacttagttctga

SEQ ID NO: 1338340 - DNA, 15 bp, Homo sapiens
gctcacttagttctg

SEQ ID NO: 1338341 - DNA, 15 bp, Homo sapiens
ggctcacttagttct

SEQ ID NO: 1338342 - DNA, 15 bp, Homo sapiens
aggctcacttagttc

SEQ ID NO: 1338343 - DNA, 15 bp, Homo sapiens
aaggctcacttagtt

SEQ ID NO: 1338344 - DNA, 15 bp, Homo sapiens
taaggctcacttagt

SEQ ID NO: 1338345 - DNA, 15 bp, Homo sapiens
ataaggctcacttag

SEQ ID NO: 1338346 - DNA, 15 bp, Homo sapiens
aataaggctcactta

SEQ ID NO: 1338347 - DNA, 15 bp, Homo sapiens
gaataaggctcactt

SEQ ID NO: 1338348 - DNA, 15 bp, Homo sapiens
ggaataaggctcact

SEQ ID NO: 1338349 - DNA, 15 bp, Homo sapiens
aggaataaggctcac

SEQ ID NO: 1338350 - DNA, 15 bp, Homo sapiens
aaggaataaggctca

SEQ ID NO: 1338351 - DNA, 15 bp, Homo sapiens
gaaggaataaggctc

SEQ ID NO: 1338352 - DNA, 15 bp, Homo sapiens
ggaaggaataaggct

SEQ ID NO: 1338353 - DNA, 15 bp, Homo sapiens
cggaaggaataaggc

SEQ ID NO: 1338354 - DNA, 15 bp, Homo sapiens
ccggaaggaataagg

SEQ ID NO: 1338355 - DNA, 15 bp, Homo sapiens
tccggaaggaataag

SEQ ID NO: 1338356 - DNA, 15 bp, Homo sapiens
gtccggaaggaataa

SEQ ID NO: 1338357 - DNA, 15 bp, Homo sapiens
tgtccggaaggaata

SEQ ID NO: 1338358 - DNA, 15 bp, Homo sapiens
atgtccggaaggaat

SEQ ID NO: 1338359 - DNA, 15 bp, Homo sapiens
tatgtccggaaggaa

SEQ ID NO: 1338360 - DNA, 15 bp, Homo sapiens
atatgtccggaagga

SEQ ID NO: 1338361 - DNA, 15 bp, Homo sapiens
gatatgtccggaagg

SEQ ID NO: 1338362 - DNA, 15 bp, Homo sapiens
agatatgtccggaag

SEQ ID NO: 1338363 - DNA, 15 bp, Homo sapiens
aagatatgtccggaa

SEQ ID NO: 1338364 - DNA, 15 bp, Homo sapiens
taagatatgtccgga

SEQ ID NO: 1338365 - DNA, 15 bp, Homo sapiens
ataagatatgtccgg

SEQ ID NO: 1338366 - DNA, 15 bp, Homo sapiens
gataagatatgtccg

SEQ ID NO: 1338367 - DNA, 15 bp, Homo sapiens
agataagatatgtcc

SEQ ID NO: 1338368 - DNA, 15 bp, Homo sapiens
gagataagatatgtc

SEQ ID NO: 1338369 - DNA, 15 bp, Homo sapiens
agagataagatatgt

SEQ ID NO: 1338370 - DNA, 15 bp, Homo sapiens
aagagataagatatg

SEQ ID NO: 1338371 - DNA, 15 bp, Homo sapiens
aaagagataagatat

SEQ ID NO: 1338372 - DNA, 15 bp, Homo sapiens
caaagagataagata

SEQ ID NO: 1338373 - DNA, 15 bp, Homo sapiens
gcaaagagataagat

SEQ ID NO: 1338374 - DNA, 15 bp, Homo sapiens
ggcaaagagataaga

SEQ ID NO: 1338375 - DNA, 15 bp, Homo sapiens
aggcaaagagataag

SEQ ID NO: 1338376 - DNA, 15 bp, Homo sapiens
aaggcaaagagataa

SEQ ID NO: 1338377 - DNA, 15 bp, Homo sapiens
aaaggcaaagagata

SEQ ID NO: 1338378 - DNA, 15 bp, Homo sapiens
aaaaggcaaagagat

SEQ ID NO: 1338379 - DNA, 15 bp, Homo sapiens
taaaaggcaaagaga

SEQ ID NO: 1338380 - DNA, 15 bp, Homo sapiens
ttaaaaggcaaagag

SEQ ID NO: 1338381 - DNA, 15 bp, Homo sapiens
cttaaaaggcaaaga

SEQ ID NO: 1338382 - DNA, 15 bp, Homo sapiens
acttaaaaggcaaag

SEQ ID NO: 1338383 - DNA, 15 bp, Homo sapiens
tacttaaaaggcaaa

SEQ ID NO: 1338384 - DNA, 15 bp, Homo sapiens
atacttaaaaggcaa

SEQ ID NO: 1338385 - DNA, 15 bp, Homo sapiens
aatacttaaaaggca

SEQ ID NO: 1338386 - DNA, 15 bp, Homo sapiens
aaatacttaaaaggc

SEQ ID NO: 1338387 - DNA, 15 bp, Homo sapiens
gaaatacttaaaagg

SEQ ID NO: 1338388 - DNA, 15 bp, Homo sapiens
agaaatacttaaaag

SEQ ID NO: 1338389 - DNA, 15 bp, Homo sapiens
aagaaatacttaaaa

SEQ ID NO: 1338390 - DNA, 15 bp, Homo sapiens
gaagaaatacttaaa

SEQ ID NO: 1338391 - DNA, 15 bp, Homo sapiens
tgaagaaatacttaa

SEQ ID NO: 1338392 - DNA, 15 bp, Homo sapiens
atgaagaaatactta

SEQ ID NO: 1338393 - DNA, 15 bp, Homo sapiens
catgaagaaatactt

SEQ ID NO: 1338394 - DNA, 15 bp, Homo sapiens
acatgaagaaatact

SEQ ID NO: 1338395 - DNA, 15 bp, Homo sapiens
gaacatgaagaaata

SEQ ID NO: 1338396 - DNA, 15 bp, Homo sapiens
tgaacatgaagaaat

SEQ ID NO: 1338397 - DNA, 15 bp, Homo sapiens
ttgaacatgaagaaa

SEQ ID NO: 1338398 - DNA, 15 bp, Homo sapiens
gttgaacatgaagaa

SEQ ID NO: 1338399 - DNA, 15 bp, Homo sapiens
agttgaacatgaaga

SEQ ID NO: 1338400 - DNA, 15 bp, Homo sapiens
aagttgaacatgaag

SEQ ID NO: 1338401 - DNA, 15 bp, Homo sapiens
caagttgaacatgaa

SEQ ID NO: 1338402 - DNA, 15 bp, Homo sapiens
acaagttgaacatga

SEQ ID NO: 1338403 - DNA, 15 bp, Homo sapiens
gacaagttgaacatg

SEQ ID NO: 1338404 - DNA, 15 bp, Homo sapiens
agacaagttgaacat

SEQ ID NO: 1338405 - DNA, 15 bp, Homo sapiens
gagacaagttgaaca

SEQ ID NO: 1338406 - DNA, 15 bp, Homo sapiens
agagacaagttgaac

SEQ ID NO: 1338407 - DNA, 15 bp, Homo sapiens
tagagacaagttgaa

SEQ ID NO: 1338408 - DNA, 15 bp, Homo sapiens
atagagacaagttga

SEQ ID NO: 1338409 - DNA, 15 bp, Homo sapiens
gatagagacaagttg

SEQ ID NO: 1338410 - DNA, 15 bp, Homo sapiens
ggatagagacaagtt

SEQ ID NO: 1338411 - DNA, 15 bp, Homo sapiens
gggatagagacaagt

SEQ ID NO: 1338412 - DNA, 15 bp, Homo sapiens
agggatagagacaag

SEQ ID NO: 1338413 - DNA, 15 bp, Homo sapiens
cagggatagagacaa

SEQ ID NO: 1338414 - DNA, 15 bp, Homo sapiens
acagggatagagaca

SEQ ID NO: 1338415 - DNA, 15 bp, Homo sapiens
aacagggatagagac

SEQ ID NO: 1338416 - DNA, 15 bp, Homo sapiens
caacagggatagaga

SEQ ID NO: 1338417 - DNA, 15 bp, Homo sapiens
ccaacagggatagag

SEQ ID NO: 1338418 - DNA, 15 bp, Homo sapiens
tccaacagggataga

SEQ ID NO: 1338419 - DNA, 15 bp, Homo sapiens
gtccaacagggatag

SEQ ID NO: 1338420 - DNA, 15 bp, Homo sapiens
agtccaacagggata

SEQ ID NO: 1338421 - DNA, 15 bp, Homo sapiens
gagtccaacagggat

SEQ ID NO: 1338422 - DNA, 15 bp, Homo sapiens
tgagtccaacaggga

SEQ ID NO: 1338423 - DNA, 15 bp, Homo sapiens
atgagtccaacaggg

SEQ ID NO: 1338424 - DNA, 15 bp, Homo sapiens
aatgagtccaacagg

SEQ ID NO: 1338425 - DNA, 15 bp, Homo sapiens
caatgagtccaacag

SEQ ID NO: 1338426 - DNA, 15 bp, Homo sapiens
gcaatgagtccaaca

SEQ ID NO: 1338427 - DNA, 15 bp, Homo sapiens
tgcaatgagtccaac

SEQ ID NO: 1338428 - DNA, 15 bp, Homo sapiens
ctgcaatgagtccaa

SEQ ID NO: 1338429 - DNA, 15 bp, Homo sapiens
gctgcaatgagtcca

SEQ ID NO: 1338430 - DNA, 15 bp, Homo sapiens
agctgcaatgagtcc

SEQ ID NO: 1338431 - DNA, 15 bp, Homo sapiens
aagctgcaatgagtc

SEQ ID NO: 1338432 - DNA, 15 bp, Homo sapiens
taagctgcaatgagt

SEQ ID NO: 1338433 - DNA, 15 bp, Homo sapiens
gtaagctgcaatgag

SEQ ID NO: 1338434 - DNA, 15 bp, Homo sapiens
tgtaagctgcaatga

SEQ ID NO: 1338435 - DNA, 15 bp, Homo sapiens
ttgtaagctgcaatg

SEQ ID NO: 1338436 - DNA, 15 bp, Homo sapiens
gttgtaagctgcaat

SEQ ID NO: 1338437 - DNA, 15 bp, Homo sapiens
agttgtaagctgcaa

SEQ ID NO: 1338438 - DNA, 15 bp, Homo sapiens
cagttgtaagctgca

SEQ ID NO: 1338439 - DNA, 15 bp, Homo sapiens
gcagttgtaagctgc

SEQ ID NO: 1338440 - DNA, 15 bp, Homo sapiens
agcagttgtaagctg

SEQ ID NO: 1338441 - DNA, 15 bp, Homo sapiens
aagcagttgtaagct

SEQ ID NO: 1338442 - DNA, 15 bp, Homo sapiens
aaagcagttgtaagc

SEQ ID NO: 1338443 - DNA, 15 bp, Homo sapiens
gaaagcagttgtaag

SEQ ID NO: 1338444 - DNA, 15 bp, Homo sapiens
agaaagcagttgtaa

SEQ ID NO: 1338445 - DNA, 15 bp, Homo sapiens
tagaaagcagttgta

SEQ ID NO: 1338446 - DNA, 15 bp, Homo sapiens
atagaaagcagttgt

SEQ ID NO: 1338447 - DNA, 15 bp, Homo sapiens
aatagaaagcagttg

SEQ ID NO: 1338448 - DNA, 15 bp, Homo sapiens
gaatagaaagcagtt

SEQ ID NO: 1338449 - DNA, 15 bp, Homo sapiens
tgaatagaaagcagt

SEQ ID NO: 1338450 - DNA, 15 bp, Homo sapiens
atgaatagaaagcag

SEQ ID NO: 1338451 - DNA, 15 bp, Homo sapiens
catgaatagaaagca

SEQ ID NO: 1338452 - DNA, 15 bp, Homo sapiens
acatgaatagaaagc

SEQ ID NO: 1338453 - DNA, 15 bp, Homo sapiens
aacatgaatagaaag

SEQ ID NO: 1338454 - DNA, 15 bp, Homo sapiens
aaacatgaatagaaa

SEQ ID NO: 1338455 - DNA, 15 bp, Homo sapiens
aaaacatgaatagaa

SEQ ID NO: 1338456 - DNA, 15 bp, Homo sapiens
aaaaacatgaataga

SEQ ID NO: 1338457 - DNA, 15 bp, Homo sapiens
taaaaacatgaatag

SEQ ID NO: 1338458 - DNA, 15 bp, Homo sapiens
gtaaaaacatgaata

SEQ ID NO: 1338459 - DNA, 15 bp, Homo sapiens
agtaaaaacatgaat

SEQ ID NO: 1338460 - DNA, 15 bp, Homo sapiens
aagtaaaaacatgaa

SEQ ID NO: 1338461 - DNA, 15 bp, Homo sapiens
gaagtaaaaacatga

SEQ ID NO: 1338462 - DNA, 15 bp, Homo sapiens
ggaagtaaaaacatg

SEQ ID NO: 1338463 - DNA, 15 bp, Homo sapiens
tggaagtaaaaacat

SEQ ID NO: 1338464 - DNA, 15 bp, Homo sapiens
gtggaagtaaaaaca

SEQ ID NO: 1338465 - DNA, 15 bp, Homo sapiens
tgtggaagtaaaaac

SEQ ID NO: 1338466 - DNA, 15 bp, Homo sapiens
ctgtggaagtaaaaa

SEQ ID NO: 1338467 - DNA, 15 bp, Homo sapiens
gctgtggaagtaaaa

SEQ ID NO: 1338468 - DNA, 15 bp, Homo sapiens
ggctgtggaagtaaa

SEQ ID NO: 1338469 - DNA, 15 bp, Homo sapiens
tggctgtggaagtaa

SEQ ID NO: 1338470 - DNA, 15 bp, Homo sapiens
gtggctgtggaagta

SEQ ID NO: 1338471 - DNA, 15 bp, Homo sapiens
ggtggctgtggaagt

SEQ ID NO: 1338472 - DNA, 15 bp, Homo sapiens
tggtggctgtggaag

SEQ ID NO: 1338473 - DNA, 15 bp, Homo sapiens
atggtggctgtggaa

SEQ ID NO: 1338474 - DNA, 15 bp, Homo sapiens
catggtggctgtgga

SEQ ID NO: 1338475 - DNA, 15 bp, Homo sapiens
acatggtggctgtgg

SEQ ID NO: 1338476 - DNA, 15 bp, Homo sapiens
tacatggtggctgtg

SEQ ID NO: 1338477 - DNA, 15 bp, Homo sapiens
ttacatggtggctgt

SEQ ID NO: 1338478 - DNA, 15 bp, Homo sapiens
attacatggtggctg

SEQ ID NO: 1338479 - DNA, 15 bp, Homo sapiens
cattacatggtggct

SEQ ID NO: 1338480 - DNA, 15 bp, Homo sapiens
acattacatggtggc

SEQ ID NO: 1338481 - DNA, 15 bp, Homo sapiens
aacattacatggtgg

SEQ ID NO: 1338482 - DNA, 15 bp, Homo sapiens
caacattacatggtg

SEQ ID NO: 1338483 - DNA, 15 bp, Homo sapiens
tcaacattacatggt

SEQ ID NO: 1338484 - DNA, 15 bp, Homo sapiens
atcaacattacatgg

SEQ ID NO: 1338485 - DNA, 15 bp, Homo sapiens
aatcaacattacatg

SEQ ID NO: 1338486 - DNA, 15 bp, Homo sapiens
gaatcaacattacat

SEQ ID NO: 1338487 - DNA, 15 bp, Homo sapiens
agaatcaacattaca

SEQ ID NO: 1338488 - DNA, 15 bp, Homo sapiens
gagaatcaacattac

SEQ ID NO: 1338489 - DNA, 15 bp, Homo sapiens
agagaatcaacatta

SEQ ID NO: 1338490 - DNA, 15 bp, Homo sapiens
aagagaatcaacatt

SEQ ID NO: 1338491 - DNA, 15 bp, Homo sapiens
aaagagaatcaacat

SEQ ID NO: 1338492 - DNA, 15 bp, Homo sapiens
taaagagaatcaaca

SEQ ID NO: 1338493 - DNA, 15 bp, Homo sapiens
ataaagagaatcaac

SEQ ID NO: 1338494 - DNA, 15 bp, Homo sapiens
cataaagagaatcaa

SEQ ID NO: 1338495 - DNA, 15 bp, Homo sapiens
ccataaagagaatca

SEQ ID NO: 1338496 - DNA, 15 bp, Homo sapiens
gccataaagagaatc

SEQ ID NO: 1338497 - DNA, 15 bp, Homo sapiens
agccataaagagaat

SEQ ID NO: 1338498 - DNA, 15 bp, Homo sapiens
aagccataaagagaa

SEQ ID NO: 1338499 - DNA, 15 bp, Homo sapiens
aaagccataaagaga

SEQ ID NO: 1338500 - DNA, 15 bp, Homo sapiens
aaaagccataaagag

SEQ ID NO: 1338501 - DNA, 15 bp, Homo sapiens
caaaagccataaaga

SEQ ID NO: 1338502 - DNA, 15 bp, Homo sapiens
gcaaaagccataaag

SEQ ID NO: 1338503 - DNA, 15 bp, Homo sapiens
agcaaaagccataaa

SEQ ID NO: 1338504 - DNA, 15 bp, Homo sapiens
cagcaaaagccataa

SEQ ID NO: 1338505 - DNA, 15 bp, Homo sapiens
gcagcaaaagccata

SEQ ID NO: 1338506 - DNA, 15 bp, Homo sapiens
tgcagcaaaagccat

SEQ ID NO: 1338507 - DNA, 15 bp, Homo sapiens
ttgcagcaaaagcca

SEQ ID NO: 1338508 - DNA, 15 bp, Homo sapiens
tttgcagcaaaagcc

SEQ ID NO: 1338509 - DNA, 15 bp, Homo sapiens
atttgcagcaaaagc

SEQ ID NO: 1338510 - DNA, 15 bp, Homo sapiens
aatttgcagcaaaag

SEQ ID NO: 1338511 - DNA, 15 bp, Homo sapiens
gaatttgcagcaaaa

SEQ ID NO: 1338512 - DNA, 15 bp, Homo sapiens
ggaatttgcagcaaa

SEQ ID NO: 1338513 - DNA, 15 bp, Homo sapiens
aggaatttgcagcaa

SEQ ID NO: 1338514 - DNA, 15 bp, Homo sapiens
taggaatttgcagca

SEQ ID NO: 1338515 - DNA, 15 bp, Homo sapiens
ttaggaatttgcagc

SEQ ID NO: 1338516 - DNA, 15 bp, Homo sapiens
cttaggaatttgcag

SEQ ID NO: 1338517 - DNA, 15 bp, Homo sapiens
ccttaggaatttgca

SEQ ID NO: 1338518 - DNA, 15 bp, Homo sapiens
cccttaggaatttgc

SEQ ID NO: 1338519 - DNA, 15 bp, Homo sapiens
tcccttaggaatttg

SEQ ID NO: 1338520 - DNA, 15 bp, Homo sapiens
ctcccttaggaattt

SEQ ID NO: 1338521 - DNA, 15 bp, Homo sapiens
cctcccttaggaatt

SEQ ID NO: 1338522 - DNA, 15 bp, Homo sapiens
ccctcccttaggaat

SEQ ID NO: 1338523 - DNA, 15 bp, Homo sapiens
tccctcccttaggaa

SEQ ID NO: 1338524 - DNA, 15 bp, Homo sapiens
ttccctcccttagga

SEQ ID NO: 1338525 - DNA, 15 bp, Homo sapiens
attccctcccttagg

SEQ ID NO: 1338526 - DNA, 15 bp, Homo sapiens
gattccctcccttag

SEQ ID NO: 1338527 - DNA, 15 bp, Homo sapiens
agattccctccctta

SEQ ID NO: 1338528 - DNA, 15 bp, Homo sapiens
cagattccctccctt

SEQ ID NO: 1338529 - DNA, 15 bp, Homo sapiens
gcagattccctccct

SEQ ID NO: 1338530 - DNA, 15 bp, Homo sapiens
ggcagattccctccc

SEQ ID NO: 1338531 - DNA, 15 bp, Homo sapiens
aggcagattccctcc

SEQ ID NO: 1338532 - DNA, 15 bp, Homo sapiens
caggcagattccctc

SEQ ID NO: 1338533 - DNA, 15 bp, Homo sapiens
acaggcagattccct

SEQ ID NO: 1338534 - DNA, 15 bp, Homo sapiens
aacaggcagattccc

SEQ ID NO: 1338535 - DNA, 15 bp, Homo sapiens
aaacaggcagattcc

SEQ ID NO: 1338536 - DNA, 15 bp, Homo sapiens
caaacaggcagattc

SEQ ID NO: 1338537 - DNA, 15 bp, Homo sapiens
ccaaacaggcagatt

SEQ ID NO: 1338538 - DNA, 15 bp, Homo sapiens
gccaaacaggcagat

SEQ ID NO: 1338539 - DNA, 15 bp, Homo sapiens
agccaaacaggcaga

SEQ ID NO: 1338540 - DNA, 15 bp, Homo sapiens
aagccaaacaggcag

SEQ ID NO: 1338541 - DNA, 15 bp, Homo sapiens
taagccaaacaggca

SEQ ID NO: 1338542 - DNA, 15 bp, Homo sapiens
ataagccaaacaggc

SEQ ID NO: 1338543 - DNA, 15 bp, Homo sapiens
gataagccaaacagg

SEQ ID NO: 1338544 - DNA, 15 bp, Homo sapiens
agataagccaaacag

SEQ ID NO: 1338545 - DNA, 15 bp, Homo sapiens
aagataagccaaaca

SEQ ID NO: 1338546 - DNA, 15 bp, Homo sapiens
aaagataagccaaac

SEQ ID NO: 1338547 - DNA, 15 bp, Homo sapiens
aaaagataagccaaa

SEQ ID NO: 1338548 - DNA, 15 bp, Homo sapiens
gaaaagataagccaa

SEQ ID NO: 1338549 - DNA, 15 bp, Homo sapiens
agaaaagataagcca

SEQ ID NO: 1338550 - DNA, 15 bp, Homo sapiens
gagaaaagataagcc

SEQ ID NO: 1338551 - DNA, 15 bp, Homo sapiens
tgagaaaagataagc

SEQ ID NO: 1338552 - DNA, 15 bp, Homo sapiens
atgagaaaagataag

SEQ ID NO: 1338553 - DNA, 15 bp, Homo sapiens
gatgagaaaagataa

SEQ ID NO: 1338554 - DNA, 15 bp, Homo sapiens
ggatgagaaaagata

SEQ ID NO: 1338555 - DNA, 15 bp, Homo sapiens
tggatgagaaaagat

SEQ ID NO: 1338556 - DNA, 15 bp, Homo sapiens
ctggatgagaaaaga

SEQ ID NO: 1338557 - DNA, 15 bp, Homo sapiens
actggatgagaaaag

SEQ ID NO: 1338558 - DNA, 15 bp, Homo sapiens
gactggatgagaaaa

SEQ ID NO: 1338559 - DNA, 15 bp, Homo sapiens
ggactggatgagaaa

SEQ ID NO: 1338560 - DNA, 15 bp, Homo sapiens
cggactggatgagaa

SEQ ID NO: 1338561 - DNA, 15 bp, Homo sapiens
acggactggatgaga

SEQ ID NO: 1338562 - DNA, 15 bp, Homo sapiens
cacggactggatgag

SEQ ID NO: 1338563 - DNA, 15 bp, Homo sapiens
acacggactggatga

SEQ ID NO: 1338564 - DNA, 15 bp, Homo sapiens
gacacggactggatg

SEQ ID NO: 1338565 - DNA, 15 bp, Homo sapiens
tgacacggactggat

SEQ ID NO: 1338566 - DNA, 15 bp, Homo sapiens
ctgacacggactgga

SEQ ID NO: 1338567 - DNA, 15 bp, Homo sapiens
tctgacacggactgg

SEQ ID NO: 1338568 - DNA, 15 bp, Homo sapiens
gtctgacacggactg

SEQ ID NO: 1338569 - DNA, 15 bp, Homo sapiens
tgtctgacacggact

SEQ ID NO: 1338570 - DNA, 15 bp, Homo sapiens
atgtctgacacggac

SEQ ID NO: 1338571 - DNA, 15 bp, Homo sapiens
gatgtctgacacgga

SEQ ID NO: 1338572 - DNA, 15 bp, Homo sapiens
ggatgtctgacacgg

SEQ ID NO: 1338573 - DNA, 15 bp, Homo sapiens
gggatgtctgacacg

SEQ ID NO: 1338574 - DNA, 15 bp, Homo sapiens
agggatgtctgacac

SEQ ID NO: 1338575 - DNA, 15 bp, Homo sapiens
cagggatgtctgaca

SEQ ID NO: 1338576 - DNA, 15 bp, Homo sapiens
acagggatgtctgac

SEQ ID NO: 1338577 - DNA, 15 bp, Homo sapiens
gacagggatgtctga

SEQ ID NO: 1338578 - DNA, 15 bp, Homo sapiens
agacagggatgtctg

SEQ ID NO: 1338579 - DNA, 15 bp, Homo sapiens
tagacagggatgtct

SEQ ID NO: 1338580 - DNA, 15 bp, Homo sapiens
ttagacagggatgtc

SEQ ID NO: 1338581 - DNA, 15 bp, Homo sapiens
gttagacagggatgt

SEQ ID NO: 1338582 - DNA, 15 bp, Homo sapiens
agttagacagggatg

SEQ ID NO: 1338583 - DNA, 15 bp, Homo sapiens
aagttagacagggat

SEQ ID NO: 1338584 - DNA, 15 bp, Homo sapiens
taagttagacaggga

SEQ ID NO: 1338585 - DNA, 15 bp, Homo sapiens
ttaagttagacaggg

SEQ ID NO: 1338586 - DNA, 15 bp, Homo sapiens
cttaagttagacagg

SEQ ID NO: 1338587 - DNA, 15 bp, Homo sapiens
ccttaagttagacag

SEQ ID NO: 1338588 - DNA, 15 bp, Homo sapiens
tccttaagttagaca

SEQ ID NO: 1338589 - DNA, 15 bp, Homo sapiens
atccttaagttagac

SEQ ID NO: 1338590 - DNA, 15 bp, Homo sapiens
gatccttaagttaga

SEQ ID NO: 1338591 - DNA, 15 bp, Homo sapiens
cgatccttaagttag

SEQ ID NO: 1338592 - DNA, 15 bp, Homo sapiens
ccgatccttaagtta

SEQ ID NO: 1338593 - DNA, 15 bp, Homo sapiens
gccgatccttaagtt

SEQ ID NO: 1338594 - DNA, 15 bp, Homo sapiens
agccgatccttaagt

SEQ ID NO: 1338595 - DNA, 15 bp, Homo sapiens
cagccgatccttaag

SEQ ID NO: 1338596 - DNA, 15 bp, Homo sapiens
gcagccgatccttaa

SEQ ID NO: 1338597 - DNA, 15 bp, Homo sapiens
ggcagccgatcctta

SEQ ID NO: 1338598 - DNA, 15 bp, Homo sapiens
gggcagccgatcctt

SEQ ID NO: 1338599 - DNA, 15 bp, Homo sapiens
agggcagccgatcct

SEQ ID NO: 1338600 - DNA, 15 bp, Homo sapiens
aagggcagccgatcc

SEQ ID NO: 1338601 - DNA, 15 bp, Homo sapiens
caagggcagccgatc

SEQ ID NO: 1338602 - DNA, 15 bp, Homo sapiens
tcaagggcagccgat

SEQ ID NO: 1338603 - DNA, 15 bp, Homo sapiens
ctcaagggcagccga

SEQ ID NO: 1338604 - DNA, 15 bp, Homo sapiens
actcaagggcagccg

SEQ ID NO: 1338605 - DNA, 15 bp, Homo sapiens
gactcaagggcagcc

SEQ ID NO: 1338606 - DNA, 15 bp, Homo sapiens
cgactcaagggcagc

SEQ ID NO: 1338607 - DNA, 15 bp, Homo sapiens
tcgactcaagggcag

SEQ ID NO: 1338608 - DNA, 15 bp, Homo sapiens
ctcgactcaagggca

SEQ ID NO: 1338609 - DNA, 15 bp, Homo sapiens
actcgactcaagggc

SEQ ID NO: 1338610 - DNA, 15 bp, Homo sapiens
cactcgactcaaggg

SEQ ID NO: 1338611 - DNA, 15 bp, Homo sapiens
gcactcgactcaagg

SEQ ID NO: 1338612 - DNA, 15 bp, Homo sapiens
ggcactcgactcaag

SEQ ID NO: 1338613 - DNA, 15 bp, Homo sapiens
gggcactcgactcaa

SEQ ID NO: 1338614 - DNA, 15 bp, Homo sapiens
tgggcactcgactca

SEQ ID NO: 1338615 - DNA, 15 bp, Homo sapiens
ctgggcactcgactc

SEQ ID NO: 1338616 - DNA, 15 bp, Homo sapiens
gctgggcactcgact

SEQ ID NO: 1338617 - DNA, 15 bp, Homo sapiens
agctgggcactcgac

SEQ ID NO: 1338618 - DNA, 15 bp, Homo sapiens
cagctgggcactcga

SEQ ID NO: 1338619 - DNA, 15 bp, Homo sapiens
acagctgggcactcg

SEQ ID NO: 1338620 - DNA, 15 bp, Homo sapiens
aacagctgggcactc

SEQ ID NO: 1338621 - DNA, 15 bp, Homo sapiens
caacagctgggcact

SEQ ID NO: 1338622 - DNA, 15 bp, Homo sapiens
gcaacagctgggcac

SEQ ID NO: 1338623 - DNA, 15 bp, Homo sapiens
ggcaacagctgggca

SEQ ID NO: 1338624 - DNA, 15 bp, Homo sapiens
gggcaacagctgggc

SEQ ID NO: 1338625 - DNA, 15 bp, Homo sapiens
tgggcaacagctggg

SEQ ID NO: 1338626 - DNA, 15 bp, Homo sapiens
ctgggcaacagctgg

SEQ ID NO: 1338627 - DNA, 15 bp, Homo sapiens
actgggcaacagctg

SEQ ID NO: 1338628 - DNA, 15 bp, Homo sapiens
gactgggcaacagct

SEQ ID NO: 1338629 - DNA, 15 bp, Homo sapiens
tgactgggcaacagc

SEQ ID NO: 1338630 - DNA, 15 bp, Homo sapiens
ctgactgggcaacag

SEQ ID NO: 1338631 - DNA, 15 bp, Homo sapiens
gctgactgggcaaca

SEQ ID NO: 1338632 - DNA, 15 bp, Homo sapiens
agctgactgggcaac

SEQ ID NO: 1338633 - DNA, 15 bp, Homo sapiens
aagctgactgggcaa

SEQ ID NO: 1338634 - DNA, 15 bp, Homo sapiens
aaagctgactgggca

SEQ ID NO: 1338635 - DNA, 15 bp, Homo sapiens
taaagctgactgggc

SEQ ID NO: 1338636 - DNA, 15 bp, Homo sapiens
ttaaagctgactggg

SEQ ID NO: 1338637 - DNA, 15 bp, Homo sapiens
attaaagctgactgg

SEQ ID NO: 1338638 - DNA, 15 bp, Homo sapiens
gattaaagctgactg

SEQ ID NO: 1338639 - DNA, 15 bp, Homo sapiens
tgattaaagctgact

SEQ ID NO: 1338640 - DNA, 15 bp, Homo sapiens
ctgattaaagctgac

SEQ ID NO: 1338641 - DNA, 15 bp, Homo sapiens
cctgattaaagctga

SEQ ID NO: 1338642 - DNA, 15 bp, Homo sapiens
ccctgattaaagctg

SEQ ID NO: 1338643 - DNA, 15 bp, Homo sapiens
accctgattaaagct

SEQ ID NO: 1338644 - DNA, 15 bp, Homo sapiens
caccctgattaaagc

SEQ ID NO: 1338645 - DNA, 15 bp, Homo sapiens
ccaccctgattaaag

SEQ ID NO: 1338646 - DNA, 15 bp, Homo sapiens
tccaccctgattaaa

SEQ ID NO: 1338647 - DNA, 15 bp, Homo sapiens
ttccaccctgattaa

SEQ ID NO: 1338648 - DNA, 15 bp, Homo sapiens
cttccaccctgatta

SEQ ID NO: 1338649 - DNA, 15 bp, Homo sapiens
acttccaccctgatt

SEQ ID NO: 1338650 - DNA, 15 bp, Homo sapiens
cacttccaccctgat

SEQ ID NO: 1338651 - DNA, 15 bp, Homo sapiens
acacttccaccctga

SEQ ID NO: 1338652 - DNA, 15 bp, Homo sapiens
aacacttccaccctg

SEQ ID NO: 1338653 - DNA, 15 bp, Homo sapiens
caacacttccaccct

SEQ ID NO: 1338654 - DNA, 15 bp, Homo sapiens
acaacacttccaccc

SEQ ID NO: 1338655 - DNA, 15 bp, Homo sapiens
cacaacacttccacc

SEQ ID NO: 1338656 - DNA, 15 bp, Homo sapiens
acacaacacttccac

SEQ ID NO: 1338657 - DNA, 15 bp, Homo sapiens
cacacaacacttcca

SEQ ID NO: 1338658 - DNA, 15 bp, Homo sapiens
ccacacaacacttcc

SEQ ID NO: 1338659 - DNA, 15 bp, Homo sapiens
accacacaacacttc

SEQ ID NO: 1338660 - DNA, 15 bp, Homo sapiens
aaccacacaacactt

SEQ ID NO: 1338661 - DNA, 15 bp, Homo sapiens
gaaccacacaacact

SEQ ID NO: 1338662 - DNA, 15 bp, Homo sapiens
tgaaccacacaacac

SEQ ID NO: 1338663 - DNA, 15 bp, Homo sapiens
ttgaaccacacaaca

SEQ ID NO: 1338664 - DNA, 15 bp, Homo sapiens
cttgaaccacacaac

SEQ ID NO: 1338665 - DNA, 15 bp, Homo sapiens
ccttgaaccacacaa

SEQ ID NO: 1338666 - DNA, 15 bp, Homo sapiens
gccttgaaccacaca

SEQ ID NO: 1338667 - DNA, 15 bp, Homo sapiens
ggccttgaaccacac

SEQ ID NO: 1338668 - DNA, 15 bp, Homo sapiens
aggccttgaaccaca

SEQ ID NO: 1338669 - DNA, 15 bp, Homo sapiens
caggccttgaaccac

SEQ ID NO: 1338670 - DNA, 15 bp, Homo sapiens
tcaggccttgaacca

SEQ ID NO: 1338671 - DNA, 15 bp, Homo sapiens
gtcaggccttgaacc

SEQ ID NO: 1338672 - DNA, 15 bp, Homo sapiens
ggtcaggccttgaac

SEQ ID NO: 1338673 - DNA, 15 bp, Homo sapiens
tggtcaggccttgaa

SEQ ID NO: 1338674 - DNA, 15 bp, Homo sapiens
atggtcaggccttga

SEQ ID NO: 1338675 - DNA, 15 bp, Homo sapiens
gatggtcaggccttg

SEQ ID NO: 1338676 - DNA, 15 bp, Homo sapiens
agatggtcaggcctt

SEQ ID NO: 1338677 - DNA, 15 bp, Homo sapiens
tagatggtcaggcct

SEQ ID NO: 1338678 - DNA, 15 bp, Homo sapiens
ctagatggtcaggcc

SEQ ID NO: 1338679 - DNA, 15 bp, Homo sapiens
tctagatggtcaggc

SEQ ID NO: 1338680 - DNA, 15 bp, Homo sapiens
atctagatggtcagg

SEQ ID NO: 1338681 - DNA, 15 bp, Homo sapiens
aatctagatggtcag

SEQ ID NO: 1338682 - DNA, 15 bp, Homo sapiens
aaatctagatggtca

SEQ ID NO: 1338683 - DNA, 15 bp, Homo sapiens
aaaatctagatggtc

SEQ ID NO: 1338684 - DNA, 15 bp, Homo sapiens
taaaatctagatggt

SEQ ID NO: 1338685 - DNA, 15 bp, Homo sapiens
ataaaatctagatgg

SEQ ID NO: 1338686 - DNA, 15 bp, Homo sapiens
gataaaatctagatg

SEQ ID NO: 1338687 - DNA, 15 bp, Homo sapiens
ggataaaatctagat

SEQ ID NO: 1338688 - DNA, 15 bp, Homo sapiens
aggataaaatctaga

SEQ ID NO: 1338689 - DNA, 15 bp, Homo sapiens
aaggataaaatctag

SEQ ID NO: 1338690 - DNA, 15 bp, Homo sapiens
gaaggataaaatcta

SEQ ID NO: 1338691 - DNA, 15 bp, Homo sapiens
tgaaggataaaatct

SEQ ID NO: 1338692 - DNA, 15 bp, Homo sapiens
atgaaggataaaatc

SEQ ID NO: 1338693 - DNA, 15 bp, Homo sapiens
aatgaaggataaaat

SEQ ID NO: 1338694 - DNA, 15 bp, Homo sapiens
gaatgaaggataaaa

SEQ ID NO: 1338695 - DNA, 15 bp, Homo sapiens
tgaatgaaggataaa

SEQ ID NO: 1338696 - DNA, 15 bp, Homo sapiens
gtgaatgaaggataa

SEQ ID NO: 1338697 - DNA, 15 bp, Homo sapiens
tgtgaatgaaggata

SEQ ID NO: 1338698 - DNA, 15 bp, Homo sapiens
gtgtgaatgaaggat

SEQ ID NO: 1338699 - DNA, 15 bp, Homo sapiens
tgtgtgaatgaagga

SEQ ID NO: 1338700 - DNA, 15 bp, Homo sapiens
gtgtgtgaatgaagg

SEQ ID NO: 1338701 - DNA, 15 bp, Homo sapiens
ggtgtgtgaatgaag

SEQ ID NO: 1338702 - DNA, 15 bp, Homo sapiens
aggtgtgtgaatgaa

SEQ ID NO: 1338703 - DNA, 15 bp, Homo sapiens
caggtgtgtgaatga

SEQ ID NO: 1338704 - DNA, 15 bp, Homo sapiens
acaggtgtgtgaatg

SEQ ID NO: 1338705 - DNA, 15 bp, Homo sapiens
aacaggtgtgtgaat

SEQ ID NO: 1338706 - DNA, 15 bp, Homo sapiens
caacaggtgtgtgaa

SEQ ID NO: 1338707 - DNA, 15 bp, Homo sapiens
gcaacaggtgtgtga

SEQ ID NO: 1338708 - DNA, 15 bp, Homo sapiens
agcaacaggtgtgtg

SEQ ID NO: 1338709 - DNA, 15 bp, Homo sapiens
gagcaacaggtgtgt

SEQ ID NO: 1338710 - DNA, 15 bp, Homo sapiens
agagcaacaggtgtg

SEQ ID NO: 1338711 - DNA, 15 bp, Homo sapiens
tagagcaacaggtgt

SEQ ID NO: 1338712 - DNA, 15 bp, Homo sapiens
atagagcaacaggtg

SEQ ID NO: 1338713 - DNA, 15 bp, Homo sapiens
catagagcaacaggt

SEQ ID NO: 1338714 - DNA, 15 bp, Homo sapiens
acatagagcaacagg

SEQ ID NO: 1338715 - DNA, 15 bp, Homo sapiens
cacatagagcaacag

SEQ ID NO: 1338716 - DNA, 15 bp, Homo sapiens
gcacatagagcaaca

SEQ ID NO: 1338717 - DNA, 15 bp, Homo sapiens
agcacatagagcaac

SEQ ID NO: 1338718 - DNA, 15 bp, Homo sapiens
cagcacatagagcaa

SEQ ID NO: 1338719 - DNA, 15 bp, Homo sapiens
ccagcacatagagca

SEQ ID NO: 1338720 - DNA, 15 bp, Homo sapiens
tccagcacatagagc

SEQ ID NO: 1338721 - DNA, 15 bp, Homo sapiens
atccagcacatagag

SEQ ID NO: 1338722 - DNA, 15 bp, Homo sapiens
catccagcacataga

SEQ ID NO: 1338723 - DNA, 15 bp, Homo sapiens
tcatccagcacatag

SEQ ID NO: 1338724 - DNA, 15 bp, Homo sapiens
atcatccagcacata

SEQ ID NO: 1338725 - DNA, 15 bp, Homo sapiens
tatcatccagcacat

SEQ ID NO: 1338726 - DNA, 15 bp, Homo sapiens
gtatcatccagcaca

SEQ ID NO: 1338727 - DNA, 15 bp, Homo sapiens
tgtatcatccagcac

SEQ ID NO: 1338728 - DNA, 15 bp, Homo sapiens
ttgtatcatccagca

SEQ ID NO: 1338729 - DNA, 15 bp, Homo sapiens
attgtatcatccagc

SEQ ID NO: 1338730 - DNA, 15 bp, Homo sapiens
cattgtatcatccag

SEQ ID NO: 1338731 - DNA, 15 bp, Homo sapiens
acattgtatcatcca

SEQ ID NO: 1338732 - DNA, 15 bp, Homo sapiens
tacattgtatcatcc

SEQ ID NO: 1338733 - DNA, 15 bp, Homo sapiens
gtacattgtatcatc

SEQ ID NO: 1338734 - DNA, 15 bp, Homo sapiens
tgtacattgtatcat

SEQ ID NO: 1338735 - DNA, 15 bp, Homo sapiens
gtgtacattgtatca

SEQ ID NO: 1338736 - DNA, 15 bp, Homo sapiens
tgtgtacattgtatc

SEQ ID NO: 1338737 - DNA, 15 bp, Homo sapiens
ttgtgtacattgtat

SEQ ID NO: 1338738 - DNA, 15 bp, Homo sapiens
attgtgtacattgta

SEQ ID NO: 1338739 - DNA, 15 bp, Homo sapiens
aattgtgtacattgt

SEQ ID NO: 1338740 - DNA, 15 bp, Homo sapiens
aaattgtgtacattg

SEQ ID NO: 1338741 - DNA, 15 bp, Homo sapiens
taaattgtgtacatt

SEQ ID NO: 1338742 - DNA, 15 bp, Homo sapiens
ttaaattgtgtacat

SEQ ID NO: 1338743 - DNA, 15 bp, Homo sapiens
tttaaattgtgtaca

SEQ ID NO: 1338744 - DNA, 15 bp, Homo sapiens
atttaaattgtgtac

SEQ ID NO: 1338745 - DNA, 15 bp, Homo sapiens
tatttaaattgtgta

SEQ ID NO: 1338746 - DNA, 15 bp, Homo sapiens
ttatttaaattgtgt

SEQ ID NO: 1338747 - DNA, 15 bp, Homo sapiens
tttatttaaattgtg

SEQ ID NO: 1338748 - DNA, 15 bp, Homo sapiens
atttatttaaattgt

SEQ ID NO: 1338749 - DNA, 15 bp, Homo sapiens
aatttatttaaattg

SEQ ID NO: 1338750 - DNA, 15 bp, Homo sapiens
taatttatttaaatt

SEQ ID NO: 1338751 - DNA, 15 bp, Homo sapiens
ttaatttatttaaat

SEQ ID NO: 1338752 - DNA, 15 bp, Homo sapiens
attaatttatttaaa

SEQ ID NO: 1338753 - DNA, 15 bp, Homo sapiens
gatttattaatttat

SEQ ID NO: 1338754 - DNA, 15 bp, Homo sapiens
agatttattaattta

SEQ ID NO: 1338755 - DNA, 15 bp, Homo sapiens
cagatttattaattt

SEQ ID NO: 1338756 - DNA, 15 bp, Homo sapiens
ccagatttattaatt

SEQ ID NO: 1338757 - DNA, 15 bp, Homo sapiens
cccagatttattaat

SEQ ID NO: 1338758 - DNA, 15 bp, Homo sapiens
gcccagatttattaa

SEQ ID NO: 1338759 - DNA, 15 bp, Homo sapiens
ggcccagatttatta

SEQ ID NO: 1338760 - DNA, 15 bp, Homo sapiens
tggcccagatttatt

SEQ ID NO: 1338761 - DNA, 15 bp, Homo sapiens
ctggcccagatttat

SEQ ID NO: 1338762 - DNA, 15 bp, Homo sapiens
cctggcccagattta

SEQ ID NO: 1338763 - DNA, 15 bp, Homo sapiens
gcctggcccagattt

SEQ ID NO: 1338764 - DNA, 15 bp, Homo sapiens
cgcctggcccagatt

SEQ ID NO: 1338765 - DNA, 15 bp, Homo sapiens
acgcctggcccagat

SEQ ID NO: 1338766 - DNA, 15 bp, Homo sapiens
cacgcctggcccaga

SEQ ID NO: 1338767 - DNA, 15 bp, Homo sapiens
ccacgcctggcccag

SEQ ID NO: 1338768 - DNA, 15 bp, Homo sapiens
accacgcctggccca

SEQ ID NO: 1338769 - DNA, 15 bp, Homo sapiens
aagccaccacgcctg

SEQ ID NO: 1338770 - DNA, 15 bp, Homo sapiens
taagccaccacgcct

SEQ ID NO: 1338771 - DNA, 15 bp, Homo sapiens
ataagccaccacgcc

SEQ ID NO: 1338772 - DNA, 15 bp, Homo sapiens
cataagccaccacgc

SEQ ID NO: 1338773 - DNA, 15 bp, Homo sapiens
gcataagccaccacg

SEQ ID NO: 1338774 - DNA, 15 bp, Homo sapiens
ggcataagccaccac

SEQ ID NO: 1338775 - DNA, 15 bp, Homo sapiens
aggcataagccacca

SEQ ID NO: 1338776 - DNA, 15 bp, Homo sapiens
caggcataagccacc

SEQ ID NO: 1338777 - DNA, 15 bp, Homo sapiens
acaggcataagccac

SEQ ID NO: 1338778 - DNA, 15 bp, Homo sapiens
tacaggcataagcca

SEQ ID NO: 1338779 - DNA, 15 bp, Homo sapiens
ttacaggcataagcc

SEQ ID NO: 1338780 - DNA, 15 bp, Homo sapiens
attacaggcataagc

SEQ ID NO: 1338781 - DNA, 15 bp, Homo sapiens
aattacaggcataag

SEQ ID NO: 1338782 - DNA, 15 bp, Homo sapiens
gaattacaggcataa

SEQ ID NO: 1338783 - DNA, 15 bp, Homo sapiens
ggaattacaggcata

SEQ ID NO: 1338784 - DNA, 15 bp, Homo sapiens
tggaattacaggcat

SEQ ID NO: 1338785 - DNA, 15 bp, Homo sapiens
acctgcctcagcatc

SEQ ID NO: 1338786 - DNA, 15 bp, Homo sapiens
cacctgcctcagcat

SEQ ID NO: 1338787 - DNA, 15 bp, Homo sapiens
ccacctgcctcagca

SEQ ID NO: 1338788 - DNA, 15 bp, Homo sapiens
tccacctgcctcagc

SEQ ID NO: 1338789 - DNA, 15 bp, Homo sapiens
atccacctgcctcag

SEQ ID NO: 1338790 - DNA, 15 bp, Homo sapiens
gatccacctgcctca

SEQ ID NO: 1338791 - DNA, 15 bp, Homo sapiens
gcatgttggccaggc

SEQ ID NO: 1338792 - DNA, 15 bp, Homo sapiens
agcatgttggccagg

SEQ ID NO: 1338793 - DNA, 15 bp, Homo sapiens
cagcatgttggccag

SEQ ID NO: 1338794 - DNA, 15 bp, Homo sapiens
tcagcatgttggcca

SEQ ID NO: 1338795 - DNA, 15 bp, Homo sapiens
ttcagcatgttggcc

SEQ ID NO: 1338796 - DNA, 15 bp, Homo sapiens
tttcagcatgttggc

SEQ ID NO: 1338797 - DNA, 15 bp, Homo sapiens
gtttcagcatgttgg

SEQ ID NO: 1338798 - DNA, 15 bp, Homo sapiens
ggtttcagcatgttg

SEQ ID NO: 1338799 - DNA, 15 bp, Homo sapiens
gggtttcagcatgtt

SEQ ID NO: 1338800 - DNA, 15 bp, Homo sapiens
ggggtttcagcatgt

SEQ ID NO: 1338801 - DNA, 15 bp, Homo sapiens
cggggtttcagcatg

SEQ ID NO: 1338802 - DNA, 15 bp, Homo sapiens
acggggtttcagcat

SEQ ID NO: 1338803 - DNA, 15 bp, Homo sapiens
gacggggtttcagca

SEQ ID NO: 1338804 - DNA, 15 bp, Homo sapiens
agacggggtttcagc

SEQ ID NO: 1338805 - DNA, 15 bp, Homo sapiens
gagacggggtttcag

SEQ ID NO: 1338806 - DNA, 15 bp, Homo sapiens
tttttgcatttttag

SEQ ID NO: 1338807 - DNA, 15 bp, Homo sapiens
gtttttgcattttta

SEQ ID NO: 1338808 - DNA, 15 bp, Homo sapiens
agtttttgcattttt

SEQ ID NO: 1338809 - DNA, 15 bp, Homo sapiens
tagtttttgcatttt

SEQ ID NO: 1338810 - DNA, 15 bp, Homo sapiens
ctagtttttgcattt

SEQ ID NO: 1338811 - DNA, 15 bp, Homo sapiens
gctagtttttgcatt

SEQ ID NO: 1338812 - DNA, 15 bp, Homo sapiens
ggctagtttttgcat

SEQ ID NO: 1338813 - DNA, 15 bp, Homo sapiens
tggctagtttttgca

SEQ ID NO: 1338814 - DNA, 15 bp, Homo sapiens
ctggctagtttttgc

SEQ ID NO: 1338815 - DNA, 15 bp, Homo sapiens
cctggctagtttttg

SEQ ID NO: 1338816 - DNA, 15 bp, Homo sapiens
gcctggctagttttt

SEQ ID NO: 1338817 - DNA, 15 bp, Homo sapiens
tgcctggctagtttt

SEQ ID NO: 1338818 - DNA, 15 bp, Homo sapiens
atgcctggctagttt

SEQ ID NO: 1338819 - DNA, 15 bp, Homo sapiens
catgcctggctagtt

SEQ ID NO: 1338820 - DNA, 15 bp, Homo sapiens
ccatgcctggctagt

SEQ ID NO: 1338821 - DNA, 15 bp, Homo sapiens
accatgcctggctag

SEQ ID NO: 1338822 - DNA, 15 bp, Homo sapiens
tatgcaccaccatgc

SEQ ID NO: 1338823 - DNA, 15 bp, Homo sapiens
gtatgcaccaccatg

SEQ ID NO: 1338824 - DNA, 15 bp, Homo sapiens
ggtatgcaccaccat

SEQ ID NO: 1338825 - DNA, 15 bp, Homo sapiens
aggtatgcaccacca

SEQ ID NO: 1338826 - DNA, 15 bp, Homo sapiens
caggtatgcaccacc

SEQ ID NO: 1338827 - DNA, 15 bp, Homo sapiens
acaggtatgcaccac

SEQ ID NO: 1338828 - DNA, 15 bp, Homo sapiens
tacaggtatgcacca

SEQ ID NO: 1338829 - DNA, 15 bp, Homo sapiens
ttacaggtatgcacc

SEQ ID NO: 1338830 - DNA, 15 bp, Homo sapiens
attacaggtatgcac

SEQ ID NO: 1338831 - DNA, 15 bp, Homo sapiens
gattacaggtatgca

SEQ ID NO: 1338832 - DNA, 15 bp, Homo sapiens
ggattacaggtatgc

SEQ ID NO: 1338833 - DNA, 15 bp, Homo sapiens
gggattacaggtatg

SEQ ID NO: 1338834 - DNA, 15 bp, Homo sapiens
tgggattacaggtat

SEQ ID NO: 1338835 - DNA, 15 bp, Homo sapiens
ctgggattacaggta

SEQ ID NO: 1338836 - DNA, 15 bp, Homo sapiens
tagcctcccgagtag

SEQ ID NO: 1338837 - DNA, 15 bp, Homo sapiens
ttagcctcccgagta

SEQ ID NO: 1338838 - DNA, 15 bp, Homo sapiens
cttagcctcccgagt

SEQ ID NO: 1338839 - DNA, 15 bp, Homo sapiens
ccttagcctcccgag

SEQ ID NO: 1338840 - DNA, 15 bp, Homo sapiens
gccttagcctcccga

SEQ ID NO: 1338841 - DNA, 15 bp, Homo sapiens
tgccttagcctcccg

SEQ ID NO: 1338842 - DNA, 15 bp, Homo sapiens
ctgccttagcctccc

SEQ ID NO: 1338843 - DNA, 15 bp, Homo sapiens
tctcctgccttagcc

SEQ ID NO: 1338844 - DNA, 15 bp, Homo sapiens
ttctcctgccttagc

SEQ ID NO: 1338845 - DNA, 15 bp, Homo sapiens
attctcctgccttag

SEQ ID NO: 1338846 - DNA, 15 bp, Homo sapiens
gattctcctgcctta

SEQ ID NO: 1338847 - DNA, 15 bp, Homo sapiens
tgattctcctgcctt

SEQ ID NO: 1338848 - DNA, 15 bp, Homo sapiens
cgtgatcttggctca

SEQ ID NO: 1338849 - DNA, 15 bp, Homo sapiens
gcgtgatcttggctc

SEQ ID NO: 1338850 - DNA, 15 bp, Homo sapiens
ggcgtgatcttggct

SEQ ID NO: 1338851 - DNA, 15 bp, Homo sapiens
tggcgtgatcttggc

SEQ ID NO: 1338852 - DNA, 15 bp, Homo sapiens
gtggcgtgatcttgg

SEQ ID NO: 1338853 - DNA, 15 bp, Homo sapiens
agtggcgtgatcttg

SEQ ID NO: 1338854 - DNA, 15 bp, Homo sapiens
cagtggcgtgatctt

SEQ ID NO: 1338855 - DNA, 15 bp, Homo sapiens
tgcagtggcgtgatc

SEQ ID NO: 1338856 - DNA, 15 bp, Homo sapiens
gtgcagtggcgtgat

SEQ ID NO: 1338857 - DNA, 15 bp, Homo sapiens
agtgcagtggcgtga

SEQ ID NO: 1338858 - DNA, 15 bp, Homo sapiens
gagtgcagtggcgtg

SEQ ID NO: 1338859 - DNA, 15 bp, Homo sapiens
tgagtgcagtggcgt

SEQ ID NO: 1338860 - DNA, 15 bp, Homo sapiens
ttgagtgcagtggcg

SEQ ID NO: 1338861 - DNA, 15 bp, Homo sapiens
cttgagtgcagtggc

SEQ ID NO: 1338862 - DNA, 15 bp, Homo sapiens
gcttgagtgcagtgg

SEQ ID NO: 1338863 - DNA, 15 bp, Homo sapiens
ggcttgagtgcagtg

SEQ ID NO: 1338864 - DNA, 15 bp, Homo sapiens
aggcttgagtgcagt

SEQ ID NO: 1338865 - DNA, 15 bp, Homo sapiens
caggcttgagtgcag

SEQ ID NO: 1338866 - DNA, 15 bp, Homo sapiens
ccaggcttgagtgca

SEQ ID NO: 1338867 - DNA, 15 bp, Homo sapiens
cccaggcttgagtgc

SEQ ID NO: 1338868 - DNA, 15 bp, Homo sapiens
gcccaggcttgagtg

SEQ ID NO: 1338869 - DNA, 15 bp, Homo sapiens
tgcccaggcttgagt

SEQ ID NO: 1338870 - DNA, 15 bp, Homo sapiens
ttgcccaggcttgag

SEQ ID NO: 1338871 - DNA, 15 bp, Homo sapiens
gttgcccaggcttga

SEQ ID NO: 1338872 - DNA, 15 bp, Homo sapiens
tgttgcccaggcttg

SEQ ID NO: 1338873 - DNA, 15 bp, Homo sapiens
ctgttgcccaggctt

SEQ ID NO: 1338874 - DNA, 15 bp, Homo sapiens
gtcttgttctgttgc

SEQ ID NO: 1338875 - DNA, 15 bp, Homo sapiens
agtcttgttctgttg

SEQ ID NO: 1338876 - DNA, 15 bp, Homo sapiens
gagtcttgttctgtt

SEQ ID NO: 1338877 - DNA, 15 bp, Homo sapiens
agagtcttgttctgt

SEQ ID NO: 1338878 - DNA, 15 bp, Homo sapiens
cagagtcttgttctg

SEQ ID NO: 1338879 - DNA, 15 bp, Homo sapiens
acagagtcttgttct

SEQ ID NO: 1338880 - DNA, 15 bp, Homo sapiens
gacagagtcttgttc

SEQ ID NO: 1338881 - DNA, 15 bp, Homo sapiens
agacagagtcttgtt

SEQ ID NO: 1338882 - DNA, 15 bp, Homo sapiens
tagacagagtcttgt

SEQ ID NO: 1338883 - DNA, 15 bp, Homo sapiens
atagacagagtcttg

SEQ ID NO: 1338884 - DNA, 15 bp, Homo sapiens
tatagacagagtctt

SEQ ID NO: 1338885 - DNA, 15 bp, Homo sapiens
ttatagacagagtct

SEQ ID NO: 1338886 - DNA, 15 bp, Homo sapiens
tttatagacagagtc

SEQ ID NO: 1338887 - DNA, 15 bp, Homo sapiens
atttatagacagagt

SEQ ID NO: 1338888 - DNA, 15 bp, Homo sapiens
tatttatagacagag

SEQ ID NO: 1338889 - DNA, 15 bp, Homo sapiens
ttatttatagacaga

SEQ ID NO: 1338890 - DNA, 15 bp, Homo sapiens
tttatttatagacag

SEQ ID NO: 1338891 - DNA, 15 bp, Homo sapiens
atttatttatagaca

SEQ ID NO: 1338892 - DNA, 15 bp, Homo sapiens
tatttatttatagac

SEQ ID NO: 1338893 - DNA, 15 bp, Homo sapiens
ttatttatttataga

SEQ ID NO: 1338894 - DNA, 15 bp, Homo sapiens
tttatttatttatag

SEQ ID NO: 1338895 - DNA, 15 bp, Homo sapiens
gtttatttatttata

SEQ ID NO: 1338896 - DNA, 15 bp, Homo sapiens
ttgtttatttattta

SEQ ID NO: 1338897 - DNA, 15 bp, Homo sapiens
tttgtttatttattt

SEQ ID NO: 1338898 - DNA, 15 bp, Homo sapiens
atttgtttatttatt

SEQ ID NO: 1338899 - DNA, 15 bp, Homo sapiens
tatttgtttatttat

SEQ ID NO: 1338900 - DNA, 15 bp, Homo sapiens
ttatttgtttattta

SEQ ID NO: 1338901 - DNA, 15 bp, Homo sapiens
tttatttgtttattt

SEQ ID NO: 1338902 - DNA, 15 bp, Homo sapiens
ttttatttgtttatt

SEQ ID NO: 1338903 - DNA, 15 bp, Homo sapiens
attttatttgtttat

SEQ ID NO: 1338904 - DNA, 15 bp, Homo sapiens
gattttatttgttta

SEQ ID NO: 1338905 - DNA, 15 bp, Homo sapiens
agattttatttgttt

SEQ ID NO: 1338906 - DNA, 15 bp, Homo sapiens
cagattttatttgtt

SEQ ID NO: 1338907 - DNA, 15 bp, Homo sapiens
acagattttatttgt

SEQ ID NO: 1338908 - DNA, 15 bp, Homo sapiens
tacagattttatttg

SEQ ID NO: 1338909 - DNA, 15 bp, Homo sapiens
atacagattttattt

SEQ ID NO: 1338910 - DNA, 15 bp, Homo sapiens
gatacagattttatt

SEQ ID NO: 1338911 - DNA, 15 bp, Homo sapiens
agatacagattttat

SEQ ID NO: 1338912 - DNA, 15 bp, Homo sapiens
aagatacagatttta

SEQ ID NO: 1338913 - DNA, 15 bp, Homo sapiens
aaagatacagatttt

SEQ ID NO: 1338914 - DNA, 15 bp, Homo sapiens
caaagatacagattt

SEQ ID NO: 1338915 - DNA, 15 bp, Homo sapiens
acaaagatacagatt

SEQ ID NO: 1338916 - DNA, 15 bp, Homo sapiens
cacaaagatacagat

SEQ ID NO: 1338917 - DNA, 15 bp, Homo sapiens
tcacaaagatacaga

SEQ ID NO: 1338918 - DNA, 15 bp, Homo sapiens
atcacaaagatacag

SEQ ID NO: 1338919 - DNA, 15 bp, Homo sapiens
catcacaaagataca

SEQ ID NO: 1338920 - DNA, 15 bp, Homo sapiens
gcatcacaaagatac

SEQ ID NO: 1338921 - DNA, 15 bp, Homo sapiens
agcatcacaaagata

SEQ ID NO: 1338922 - DNA, 15 bp, Homo sapiens
aagcatcacaaagat

SEQ ID NO: 1338923 - DNA, 15 bp, Homo sapiens
gaagcatcacaaaga

SEQ ID NO: 1338924 - DNA, 15 bp, Homo sapiens
ggaagcatcacaaag

SEQ ID NO: 1338925 - DNA, 15 bp, Homo sapiens
tggaagcatcacaaa

SEQ ID NO: 1338926 - DNA, 15 bp, Homo sapiens
atggaagcatcacaa

SEQ ID NO: 1338927 - DNA, 15 bp, Homo sapiens
aatggaagcatcaca

SEQ ID NO: 1338928 - DNA, 15 bp, Homo sapiens
gaatggaagcatcac

SEQ ID NO: 1338929 - DNA, 15 bp, Homo sapiens
agaatggaagcatca

SEQ ID NO: 1338930 - DNA, 15 bp, Homo sapiens
tagaatggaagcatc

SEQ ID NO: 1338931 - DNA, 15 bp, Homo sapiens
ctagaatggaagcat

SEQ ID NO: 1338932 - DNA, 15 bp, Homo sapiens
actagaatggaagca

SEQ ID NO: 1338933 - DNA, 15 bp, Homo sapiens
aactagaatggaagc

SEQ ID NO: 1338934 - DNA, 15 bp, Homo sapiens
caactagaatggaag

SEQ ID NO: 1338935 - DNA, 15 bp, Homo sapiens
acaactagaatggaa

SEQ ID NO: 1338936 - DNA, 15 bp, Homo sapiens
tacaactagaatgga

SEQ ID NO: 1338937 - DNA, 15 bp, Homo sapiens
ttacaactagaatgg

SEQ ID NO: 1338938 - DNA, 15 bp, Homo sapiens
cttacaactagaatg

SEQ ID NO: 1338939 - DNA, 15 bp, Homo sapiens
tcttacaactagaat

SEQ ID NO: 1338940 - DNA, 15 bp, Homo sapiens
ctcttacaactagaa

SEQ ID NO: 1338941 - DNA, 15 bp, Homo sapiens
cctcttacaactaga

SEQ ID NO: 1338942 - DNA, 15 bp, Homo sapiens
gcctcttacaactag

SEQ ID NO: 1338943 - DNA, 15 bp, Homo sapiens
ggcctcttacaacta

SEQ ID NO: 1338944 - DNA, 15 bp, Homo sapiens
tggcctcttacaact

SEQ ID NO: 1338945 - DNA, 15 bp, Homo sapiens
atggcctcttacaac

SEQ ID NO: 1338946 - DNA, 15 bp, Homo sapiens
tatggcctcttacaa

SEQ ID NO: 1338947 - DNA, 15 bp, Homo sapiens
ttatggcctcttaca

SEQ ID NO: 1338948 - DNA, 15 bp, Homo sapiens
attatggcctcttac

SEQ ID NO: 1338949 - DNA, 15 bp, Homo sapiens
tattatggcctctta

SEQ ID NO: 1338950 - DNA, 15 bp, Homo sapiens
ttattatggcctctt

SEQ ID NO: 1338951 - DNA, 15 bp, Homo sapiens
tttattatggcctct

SEQ ID NO: 1338952 - DNA, 15 bp, Homo sapiens
ttttattatggcctc

SEQ ID NO: 1338953 - DNA, 15 bp, Homo sapiens
cttttattatggcct

SEQ ID NO: 1338954 - DNA, 15 bp, Homo sapiens
acttttattatggcc

SEQ ID NO: 1338955 - DNA, 15 bp, Homo sapiens
cacttttattatggc

SEQ ID NO: 1338956 - DNA, 15 bp, Homo sapiens
tcacttttattatgg

SEQ ID NO: 1338957 - DNA, 15 bp, Homo sapiens
ctcacttttattatg

SEQ ID NO: 1338958 - DNA, 15 bp, Homo sapiens
tctcacttttattat

SEQ ID NO: 1338959 - DNA, 15 bp, Homo sapiens
ttctcacttttatta

SEQ ID NO: 1338960 - DNA, 15 bp, Homo sapiens
tttctcacttttatt

SEQ ID NO: 1338961 - DNA, 15 bp, Homo sapiens
ttttctcacttttat

SEQ ID NO: 1338962 - DNA, 15 bp, Homo sapiens
attttctcactttta

SEQ ID NO: 1338963 - DNA, 15 bp, Homo sapiens
tattttctcactttt

SEQ ID NO: 1338964 - DNA, 15 bp, Homo sapiens
ttattttctcacttt

SEQ ID NO: 1338965 - DNA, 15 bp, Homo sapiens
tttattttctcactt

SEQ ID NO: 1338966 - DNA, 15 bp, Homo sapiens
gtttattttctcact

SEQ ID NO: 1338967 - DNA, 15 bp, Homo sapiens
tgtttattttctcac

SEQ ID NO: 1338968 - DNA, 15 bp, Homo sapiens
ttgtttattttctca

SEQ ID NO: 1338969 - DNA, 15 bp, Homo sapiens
cttgtttattttctc

SEQ ID NO: 1338970 - DNA, 15 bp, Homo sapiens
tcttgtttattttct

SEQ ID NO: 1338971 - DNA, 15 bp, Homo sapiens
atcttgtttattttc

SEQ ID NO: 1338972 - DNA, 15 bp, Homo sapiens
tatcttgtttatttt

SEQ ID NO: 1338973 - DNA, 15 bp, Homo sapiens
ttatcttgtttattt

SEQ ID NO: 1338974 - DNA, 15 bp, Homo sapiens
atttatcttgtttat

SEQ ID NO: 1338975 - DNA, 15 bp, Homo sapiens
aatttatcttgttta

SEQ ID NO: 1338976 - DNA, 15 bp, Homo sapiens
gaatttatcttgttt

SEQ ID NO: 1338977 - DNA, 15 bp, Homo sapiens
tgaatttatcttgtt

SEQ ID NO: 1338978 - DNA, 15 bp, Homo sapiens
ttgaatttatcttgt

SEQ ID NO: 1338979 - DNA, 15 bp, Homo sapiens
gttgaatttatcttg

SEQ ID NO: 1338980 - DNA, 15 bp, Homo sapiens
agttgaatttatctt

SEQ ID NO: 1338981 - DNA, 15 bp, Homo sapiens
cagttgaatttatct

SEQ ID NO: 1338982 - DNA, 15 bp, Homo sapiens
acagttgaatttatc

SEQ ID NO: 1338983 - DNA, 15 bp, Homo sapiens
cacagttgaatttat

SEQ ID NO: 1338984 - DNA, 15 bp, Homo sapiens
tcacagttgaattta

SEQ ID NO: 1338985 - DNA, 15 bp, Homo sapiens
atcacagttgaattt

SEQ ID NO: 1338986 - DNA, 15 bp, Homo sapiens
tatcacagttgaatt

SEQ ID NO: 1338987 - DNA, 15 bp, Homo sapiens
ttatcacagttgaat

SEQ ID NO: 1338988 - DNA, 15 bp, Homo sapiens
tttatcacagttgaa

SEQ ID NO: 1338989 - DNA, 15 bp, Homo sapiens
atttatcacagttga

SEQ ID NO: 1338990 - DNA, 15 bp, Homo sapiens
tatttatcacagttg

SEQ ID NO: 1338991 - DNA, 15 bp, Homo sapiens
gtatttatcacagtt

SEQ ID NO: 1338992 - DNA, 15 bp, Homo sapiens
agtatttatcacagt

SEQ ID NO: 1338993 - DNA, 15 bp, Homo sapiens
tagtatttatcacag

SEQ ID NO: 1338994 - DNA, 15 bp, Homo sapiens
atagtatttatcaca

SEQ ID NO: 1338995 - DNA, 15 bp, Homo sapiens
catagtatttatcac

SEQ ID NO: 1338996 - DNA, 15 bp, Homo sapiens
ccatagtatttatca

SEQ ID NO: 1338997 - DNA, 15 bp, Homo sapiens
tccatagtatttatc

SEQ ID NO: 1338998 - DNA, 15 bp, Homo sapiens
ttccatagtatttat

SEQ ID NO: 1338999 - DNA, 15 bp, Homo sapiens
tttccatagtattta

SEQ ID NO: 1339000 - DNA, 15 bp, Homo sapiens
atttccatagtattt

SEQ ID NO: 1339001 - DNA, 15 bp, Homo sapiens
tatttccatagtatt

SEQ ID NO: 1339002 - DNA, 15 bp, Homo sapiens
ttatttccatagtat

SEQ ID NO: 1339003 - DNA, 15 bp, Homo sapiens
attatttccatagta

SEQ ID NO: 1339004 - DNA, 15 bp, Homo sapiens
tattatttccatagt

SEQ ID NO: 1339005 - DNA, 15 bp, Homo sapiens
ttattatttccatag

SEQ ID NO: 1339006 - DNA, 15 bp, Homo sapiens
tttattatttccata

SEQ ID NO: 1339007 - DNA, 15 bp, Homo sapiens
ttttattatttccat

SEQ ID NO: 1339008 - DNA, 15 bp, Homo sapiens
attttattatttcca

SEQ ID NO: 1339009 - DNA, 15 bp, Homo sapiens
tattttattatttcc

SEQ ID NO: 1339010 - DNA, 15 bp, Homo sapiens
atattttattatttc

SEQ ID NO: 1339011 - DNA, 15 bp, Homo sapiens
gatattttattattt

SEQ ID NO: 1339012 - DNA, 15 bp, Homo sapiens
agatattttattatt

SEQ ID NO: 1339013 - DNA, 15 bp, Homo sapiens
tagatattttattat

SEQ ID NO: 1339014 - DNA, 15 bp, Homo sapiens
ttagatattttatta

SEQ ID NO: 1339015 - DNA, 15 bp, Homo sapiens
gttagatattttatt

SEQ ID NO: 1339016 - DNA, 15 bp, Homo sapiens
cgttagatattttat

SEQ ID NO: 1339017 - DNA, 15 bp, Homo sapiens
tcgttagatatttta

SEQ ID NO: 1339018 - DNA, 15 bp, Homo sapiens
ctcgttagatatttt

SEQ ID NO: 1339019 - DNA, 15 bp, Homo sapiens
tctcgttagatattt

SEQ ID NO: 1339020 - DNA, 15 bp, Homo sapiens
ttctcgttagatatt

SEQ ID NO: 1339021 - DNA, 15 bp, Homo sapiens
attctcgttagatat

SEQ ID NO: 1339022 - DNA, 15 bp, Homo sapiens
cattctcgttagata

SEQ ID NO: 1339023 - DNA, 15 bp, Homo sapiens
ccattctcgttagat

SEQ ID NO: 1339024 - DNA, 15 bp, Homo sapiens
cccattctcgttaga

SEQ ID NO: 1339025 - DNA, 15 bp, Homo sapiens
tcccattctcgttag

SEQ ID NO: 1339026 - DNA, 15 bp, Homo sapiens
ctcccattctcgtta

SEQ ID NO: 1339027 - DNA, 15 bp, Homo sapiens
actcccattctcgtt

SEQ ID NO: 1339028 - DNA, 15 bp, Homo sapiens
cactcccattctcgt

SEQ ID NO: 1339029 - DNA, 15 bp, Homo sapiens
tcactcccattctcg

SEQ ID NO: 1339030 - DNA, 15 bp, Homo sapiens
ctcactcccattctc

SEQ ID NO: 1339031 - DNA, 15 bp, Homo sapiens
cctcactcccattct

SEQ ID NO: 1339032 - DNA, 15 bp, Homo sapiens
tcctcactcccattc

SEQ ID NO: 1339033 - DNA, 15 bp, Homo sapiens
ttcctcactcccatt

SEQ ID NO: 1339034 - DNA, 15 bp, Homo sapiens
tttcctcactcccat

SEQ ID NO: 1339035 - DNA, 15 bp, Homo sapiens
ctttcctcactccca

SEQ ID NO: 1339036 - DNA, 15 bp, Homo sapiens
tctttcctcactccc

SEQ ID NO: 1339037 - DNA, 15 bp, Homo sapiens
ctctttcctcactcc

SEQ ID NO: 1339038 - DNA, 15 bp, Homo sapiens
tctctttcctcactc

SEQ ID NO: 1339039 - DNA, 15 bp, Homo sapiens
atctctttcctcact

SEQ ID NO: 1339040 - DNA, 15 bp, Homo sapiens
catctctttcctcac

SEQ ID NO: 1339041 - DNA, 15 bp, Homo sapiens
tcatctctttcctca

SEQ ID NO: 1339042 - DNA, 15 bp, Homo sapiens
ctcatctctttcctc

SEQ ID NO: 1339043 - DNA, 15 bp, Homo sapiens
tctcatctctttcct

SEQ ID NO: 1339044 - DNA, 15 bp, Homo sapiens
atctcatctctttcc

SEQ ID NO: 1339045 - DNA, 15 bp, Homo sapiens
tatctcatctctttc

SEQ ID NO: 1339046 - DNA, 15 bp, Homo sapiens
gtatctcatctcttt

SEQ ID NO: 1339047 - DNA, 15 bp, Homo sapiens
agtatctcatctctt

SEQ ID NO: 1339048 - DNA, 15 bp, Homo sapiens
cagtatctcatctct

SEQ ID NO: 1339049 - DNA, 15 bp, Homo sapiens
ccagtatctcatctc

SEQ ID NO: 1339050 - DNA, 15 bp, Homo sapiens
accagtatctcatct

SEQ ID NO: 1339051 - DNA, 15 bp, Homo sapiens
aaccagtatctcatc

SEQ ID NO: 1339052 - DNA, 15 bp, Homo sapiens
aaaccagtatctcat

SEQ ID NO: 1339053 - DNA, 15 bp, Homo sapiens
caaaccagtatctca

SEQ ID NO: 1339054 - DNA, 15 bp, Homo sapiens
ccaaaccagtatctc

SEQ ID NO: 1339055 - DNA, 15 bp, Homo sapiens
cccaaaccagtatct

SEQ ID NO: 1339056 - DNA, 15 bp, Homo sapiens
gcccaaaccagtatc

SEQ ID NO: 1339057 - DNA, 15 bp, Homo sapiens
agcccaaaccagtat

SEQ ID NO: 1339058 - DNA, 15 bp, Homo sapiens
cagcccaaaccagta

SEQ ID NO: 1339059 - DNA, 15 bp, Homo sapiens
ccagcccaaaccagt

SEQ ID NO: 1339060 - DNA, 15 bp, Homo sapiens
cccagcccaaaccag

SEQ ID NO: 1339061 - DNA, 15 bp, Homo sapiens
acccagcccaaacca

SEQ ID NO: 1339062 - DNA, 15 bp, Homo sapiens
tacccagcccaaacc

SEQ ID NO: 1339063 - DNA, 15 bp, Homo sapiens
ctacccagcccaaac

SEQ ID NO: 1339064 - DNA, 15 bp, Homo sapiens
actacccagcccaaa

SEQ ID NO: 1339065 - DNA, 15 bp, Homo sapiens
aactacccagcccaa

SEQ ID NO: 1339066 - DNA, 15 bp, Homo sapiens
taactacccagccca

SEQ ID NO: 1339067 - DNA, 15 bp, Homo sapiens
gtaactacccagccc

SEQ ID NO: 1339068 - DNA, 15 bp, Homo sapiens
tgtaactacccagcc

SEQ ID NO: 1339069 - DNA, 15 bp, Homo sapiens
ctgtaactacccagc

SEQ ID NO: 1339070 - DNA, 15 bp, Homo sapiens
tctgtaactacccag

SEQ ID NO: 1339071 - DNA, 15 bp, Homo sapiens
ttctgtaactaccca

SEQ ID NO: 1339072 - DNA, 15 bp, Homo sapiens
cttctgtaactaccc

SEQ ID NO: 1339073 - DNA, 15 bp, Homo sapiens
ccttctgtaactacc

SEQ ID NO: 1339074 - DNA, 15 bp, Homo sapiens
tccttctgtaactac

SEQ ID NO: 1339075 - DNA, 15 bp, Homo sapiens
ttccttctgtaacta

SEQ ID NO: 1339076 - DNA, 15 bp, Homo sapiens
cttccttctgtaact

SEQ ID NO: 1339077 - DNA, 15 bp, Homo sapiens
ccttccttctgtaac

SEQ ID NO: 1339078 - DNA, 15 bp, Homo sapiens
cccttccttctgtaa

SEQ ID NO: 1339079 - DNA, 15 bp, Homo sapiens
ccccttccttctgta

SEQ ID NO: 1339080 - DNA, 15 bp, Homo sapiens
tccccttccttctgt

SEQ ID NO: 1339081 - DNA, 15 bp, Homo sapiens
gtccccttccttctg

SEQ ID NO: 1339082 - DNA, 15 bp, Homo sapiens
agtccccttccttct

SEQ ID NO: 1339083 - DNA, 15 bp, Homo sapiens
gagtccccttccttc

SEQ ID NO: 1339084 - DNA, 15 bp, Homo sapiens
tgagtccccttcctt

SEQ ID NO: 1339085 - DNA, 15 bp, Homo sapiens
ctgagtccccttcct

SEQ ID NO: 1339086 - DNA, 15 bp, Homo sapiens
actgagtccccttcc

SEQ ID NO: 1339087 - DNA, 15 bp, Homo sapiens
cactgagtccccttc

SEQ ID NO: 1339088 - DNA, 15 bp, Homo sapiens
tcactgagtcccctt

SEQ ID NO: 1339089 - DNA, 15 bp, Homo sapiens
ttcactgagtcccct

SEQ ID NO: 1339090 - DNA, 15 bp, Homo sapiens
attcactgagtcccc

SEQ ID NO: 1339091 - DNA, 15 bp, Homo sapiens
tattcactgagtccc

SEQ ID NO: 1339092 - DNA, 15 bp, Homo sapiens
ctattcactgagtcc

SEQ ID NO: 1339093 - DNA, 15 bp, Homo sapiens
tctattcactgagtc

SEQ ID NO: 1339094 - DNA, 15 bp, Homo sapiens
ctctattcactgagt

SEQ ID NO: 1339095 - DNA, 15 bp, Homo sapiens
tctctattcactgag

SEQ ID NO: 1339096 - DNA, 15 bp, Homo sapiens
ctctctattcactga

SEQ ID NO: 1339097 - DNA, 15 bp, Homo sapiens
gctctctattcactg

SEQ ID NO: 1339098 - DNA, 15 bp, Homo sapiens
tgctctctattcact

SEQ ID NO: 1339099 - DNA, 15 bp, Homo sapiens
ctgctctctattcac

SEQ ID NO: 1339100 - DNA, 15 bp, Homo sapiens
cctgctctctattca

SEQ ID NO: 1339101 - DNA, 15 bp, Homo sapiens
ccctgctctctattc

SEQ ID NO: 1339102 - DNA, 15 bp, Homo sapiens
accctgctctctatt

SEQ ID NO: 1339103 - DNA, 15 bp, Homo sapiens
caccctgctctctat

SEQ ID NO: 1339104 - DNA, 15 bp, Homo sapiens
tcaccctgctctcta

SEQ ID NO: 1339105 - DNA, 15 bp, Homo sapiens
ctcaccctgctctct

SEQ ID NO: 1339106 - DNA, 15 bp, Homo sapiens
actcaccctgctctc

SEQ ID NO: 1339107 - DNA, 15 bp, Homo sapiens
aactcaccctgctct

SEQ ID NO: 1339108 - DNA, 15 bp, Homo sapiens
caactcaccctgctc

SEQ ID NO: 1339109 - DNA, 15 bp, Homo sapiens
ccaactcaccctgct

SEQ ID NO: 1339110 - DNA, 15 bp, Homo sapiens
cccaactcaccctgc

SEQ ID NO: 1339111 - DNA, 15 bp, Homo sapiens
acccaactcaccctg

SEQ ID NO: 1339112 - DNA, 15 bp, Homo sapiens
aacccaactcaccct

SEQ ID NO: 1339113 - DNA, 15 bp, Homo sapiens
gaacccaactcaccc

SEQ ID NO: 1339114 - DNA, 15 bp, Homo sapiens
agaacccaactcacc

SEQ ID NO: 1339115 - DNA, 15 bp, Homo sapiens
cagaacccaactcac

SEQ ID NO: 1339116 - DNA, 15 bp, Homo sapiens
ccagaacccaactca

SEQ ID NO: 1339117 - DNA, 15 bp, Homo sapiens
cccagaacccaactc

SEQ ID NO: 1339118 - DNA, 15 bp, Homo sapiens
ccccagaacccaact

SEQ ID NO: 1339119 - DNA, 15 bp, Homo sapiens
accccagaacccaac

SEQ ID NO: 1339120 - DNA, 15 bp, Homo sapiens
taccccagaacccaa

SEQ ID NO: 1339121 - DNA, 15 bp, Homo sapiens
ctaccccagaaccca

SEQ ID NO: 1339122 - DNA, 15 bp, Homo sapiens
cctaccccagaaccc

SEQ ID NO: 1339123 - DNA, 15 bp, Homo sapiens
ccctaccccagaacc

SEQ ID NO: 1339124 - DNA, 15 bp, Homo sapiens
cccctaccccagaac

SEQ ID NO: 1339125 - DNA, 15 bp, Homo sapiens
ccccctaccccagaa

SEQ ID NO: 1339126 - DNA, 15 bp, Homo sapiens
accccctaccccaga

SEQ ID NO: 1339127 - DNA, 15 bp, Homo sapiens
aaccccctaccccag

SEQ ID NO: 1339128 - DNA, 15 bp, Homo sapiens
taaccccctacccca

SEQ ID NO: 1339129 - DNA, 15 bp, Homo sapiens
ataaccccctacccc

SEQ ID NO: 1339130 - DNA, 15 bp, Homo sapiens
cataaccccctaccc

SEQ ID NO: 1339131 - DNA, 15 bp, Homo sapiens
acataaccccctacc

SEQ ID NO: 1339132 - DNA, 15 bp, Homo sapiens
gacataaccccctac

SEQ ID NO: 1339133 - DNA, 15 bp, Homo sapiens
tgacataacccccta

SEQ ID NO: 1339134 - DNA, 15 bp, Homo sapiens
gtgacataaccccct

SEQ ID NO: 1339135 - DNA, 15 bp, Homo sapiens
tgtgacataaccccc

SEQ ID NO: 1339136 - DNA, 15 bp, Homo sapiens
atgtgacataacccc

SEQ ID NO: 1339137 - DNA, 15 bp, Homo sapiens
gatgtgacataaccc

SEQ ID NO: 1339138 - DNA, 15 bp, Homo sapiens
tgatgtgacataacc

SEQ ID NO: 1339139 - DNA, 15 bp, Homo sapiens
gtgatgtgacataac

SEQ ID NO: 1339140 - DNA, 15 bp, Homo sapiens
ggtgatgtgacataa

SEQ ID NO: 1339141 - DNA, 15 bp, Homo sapiens
tggtgatgtgacata

SEQ ID NO: 1339142 - DNA, 15 bp, Homo sapiens
gtggtgatgtgacat

SEQ ID NO: 1339143 - DNA, 15 bp, Homo sapiens
tgtggtgatgtgaca

SEQ ID NO: 1339144 - DNA, 15 bp, Homo sapiens
ttgtggtgatgtgac

SEQ ID NO: 1339145 - DNA, 15 bp, Homo sapiens
cttgtggtgatgtga

SEQ ID NO: 1339146 - DNA, 15 bp, Homo sapiens
acttgtggtgatgtg

SEQ ID NO: 1339147 - DNA, 15 bp, Homo sapiens
tacttgtggtgatgt

SEQ ID NO: 1339148 - DNA, 15 bp, Homo sapiens
ttacttgtggtgatg

SEQ ID NO: 1339149 - DNA, 15 bp, Homo sapiens
tttacttgtggtgat

SEQ ID NO: 1339150 - DNA, 15 bp, Homo sapiens
ttttacttgtggtga

SEQ ID NO: 1339151 - DNA, 15 bp, Homo sapiens
attttacttgtggtg

SEQ ID NO: 1339152 - DNA, 15 bp, Homo sapiens
tattttacttgtggt

SEQ ID NO: 1339153 - DNA, 15 bp, Homo sapiens
atattttacttgtgg

SEQ ID NO: 1339154 - DNA, 15 bp, Homo sapiens
tatattttacttgtg

SEQ ID NO: 1339155 - DNA, 15 bp, Homo sapiens
gtatattttacttgt

SEQ ID NO: 1339156 - DNA, 15 bp, Homo sapiens
ggtatattttacttg

SEQ ID NO: 1339157 - DNA, 15 bp, Homo sapiens
tggtatattttactt

SEQ ID NO: 1339158 - DNA, 15 bp, Homo sapiens
ttggtatattttact

SEQ ID NO: 1339159 - DNA, 15 bp, Homo sapiens
cttggtatattttac

SEQ ID NO: 1339160 - DNA, 15 bp, Homo sapiens
tcttggtatatttta

SEQ ID NO: 1339161 - DNA, 15 bp, Homo sapiens
gtcttggtatatttt

SEQ ID NO: 1339162 - DNA, 15 bp, Homo sapiens
agtcttggtatattt

SEQ ID NO: 1339163 - DNA, 15 bp, Homo sapiens
cagtcttggtatatt

SEQ ID NO: 1339164 - DNA, 15 bp, Homo sapiens
gcagtcttggtatat

SEQ ID NO: 1339165 - DNA, 15 bp, Homo sapiens
agcagtcttggtata

SEQ ID NO: 1339166 - DNA, 15 bp, Homo sapiens
tagcagtcttggtat

SEQ ID NO: 1339167 - DNA, 15 bp, Homo sapiens
ttagcagtcttggta

SEQ ID NO: 1339168 - DNA, 15 bp, Homo sapiens
cttagcagtcttggt

SEQ ID NO: 1339169 - DNA, 15 bp, Homo sapiens
acttagcagtcttgg

SEQ ID NO: 1339170 - DNA, 15 bp, Homo sapiens
aacttagcagtcttg

SEQ ID NO: 1339171 - DNA, 15 bp, Homo sapiens
aaacttagcagtctt

SEQ ID NO: 1339172 - DNA, 15 bp, Homo sapiens
taaacttagcagtct

SEQ ID NO: 1339173 - DNA, 15 bp, Homo sapiens
ataaacttagcagtc

SEQ ID NO: 1339174 - DNA, 15 bp, Homo sapiens
aataaacttagcagt

SEQ ID NO: 1339175 - DNA, 15 bp, Homo sapiens
taataaacttagcag

SEQ ID NO: 1339176 - DNA, 15 bp, Homo sapiens
ctaataaacttagca

SEQ ID NO: 1339177 - DNA, 15 bp, Homo sapiens
gctaataaacttagc

SEQ ID NO: 1339178 - DNA, 15 bp, Homo sapiens
tgctaataaacttag

SEQ ID NO: 1339179 - DNA, 15 bp, Homo sapiens
atgctaataaactta

SEQ ID NO: 1339180 - DNA, 15 bp, Homo sapiens
gatgctaataaactt

SEQ ID NO: 1339181 - DNA, 15 bp, Homo sapiens
tgatgctaataaact

SEQ ID NO: 1339182 - DNA, 15 bp, Homo sapiens
atgatgctaataaac

SEQ ID NO: 1339183 - DNA, 15 bp, Homo sapiens
aatgatgctaataaa

SEQ ID NO: 1339184 - DNA, 15 bp, Homo sapiens
gaatgatgctaataa

SEQ ID NO: 1339185 - DNA, 15 bp, Homo sapiens
ggaatgatgctaata

SEQ ID NO: 1339186 - DNA, 15 bp, Homo sapiens
tggaatgatgctaat

SEQ ID NO: 1339187 - DNA, 15 bp, Homo sapiens
ttggaatgatgctaa

SEQ ID NO: 1339188 - DNA, 15 bp, Homo sapiens
attggaatgatgcta

SEQ ID NO: 1339189 - DNA, 15 bp, Homo sapiens
gattggaatgatgct

SEQ ID NO: 1339190 - DNA, 15 bp, Homo sapiens
ggattggaatgatgc

SEQ ID NO: 1339191 - DNA, 15 bp, Homo sapiens
aggattggaatgatg

SEQ ID NO: 1339192 - DNA, 15 bp, Homo sapiens
gaggattggaatgat

SEQ ID NO: 1339193 - DNA, 15 bp, Homo sapiens
ggaggattggaatga

SEQ ID NO: 1339194 - DNA, 15 bp, Homo sapiens
aggaggattggaatg

SEQ ID NO: 1339195 - DNA, 15 bp, Homo sapiens
gaggaggattggaat

SEQ ID NO: 1339196 - DNA, 15 bp, Homo sapiens
ggaggaggattggaa

SEQ ID NO: 1339197 - DNA, 15 bp, Homo sapiens
gggaggaggattgga

SEQ ID NO: 1339198 - DNA, 15 bp, Homo sapiens
tgggaggaggattgg

SEQ ID NO: 1339199 - DNA, 15 bp, Homo sapiens
ttgggaggaggattg

SEQ ID NO: 1339200 - DNA, 15 bp, Homo sapiens
gttgggaggaggatt

SEQ ID NO: 1339201 - DNA, 15 bp, Homo sapiens
ggttgggaggaggat

SEQ ID NO: 1339202 - DNA, 15 bp, Homo sapiens
tggttgggaggagga

SEQ ID NO: 1339203 - DNA, 15 bp, Homo sapiens
ctggttgggaggagg

SEQ ID NO: 1339204 - DNA, 15 bp, Homo sapiens
cctggttgggaggag

SEQ ID NO: 1339205 - DNA, 15 bp, Homo sapiens
ccctggttgggagga

SEQ ID NO: 1339206 - DNA, 15 bp, Homo sapiens
accctggttgggagg

SEQ ID NO: 1339207 - DNA, 15 bp, Homo sapiens
gaccctggttgggag

SEQ ID NO: 1339208 - DNA, 15 bp, Homo sapiens
tgaccctggttggga

SEQ ID NO: 1339209 - DNA, 15 bp, Homo sapiens
ttgaccctggttggg

SEQ ID NO: 1339210 - DNA, 15 bp, Homo sapiens
attgaccctggttgg

SEQ ID NO: 1339211 - DNA, 15 bp, Homo sapiens
tattgaccctggttg

SEQ ID NO: 1339212 - DNA, 15 bp, Homo sapiens
atattgaccctggtt

SEQ ID NO: 1339213 - DNA, 15 bp, Homo sapiens
aatattgaccctggt

SEQ ID NO: 1339214 - DNA, 15 bp, Homo sapiens
taatattgaccctgg

SEQ ID NO: 1339215 - DNA, 15 bp, Homo sapiens
ttaatattgaccctg

SEQ ID NO: 1339216 - DNA, 15 bp, Homo sapiens
gttaatattgaccct

SEQ ID NO: 1339217 - DNA, 15 bp, Homo sapiens
tgttaatattgaccc

SEQ ID NO: 1339218 - DNA, 15 bp, Homo sapiens
atgttaatattgacc

SEQ ID NO: 1339219 - DNA, 15 bp, Homo sapiens
tatgttaatattgac

SEQ ID NO: 1339220 - DNA, 15 bp, Homo sapiens
gtatgttaatattga

SEQ ID NO: 1339221 - DNA, 15 bp, Homo sapiens
ggtatgttaatattg

SEQ ID NO: 1339222 - DNA, 15 bp, Homo sapiens
tggtatgttaatatt

SEQ ID NO: 1339223 - DNA, 15 bp, Homo sapiens
ttggtatgttaatat

SEQ ID NO: 1339224 - DNA, 15 bp, Homo sapiens
cttggtatgttaata

SEQ ID NO: 1339225 - DNA, 15 bp, Homo sapiens
acttggtatgttaat

SEQ ID NO: 1339226 - DNA, 15 bp, Homo sapiens
aacttggtatgttaa

SEQ ID NO: 1339227 - DNA, 15 bp, Homo sapiens
aaacttggtatgtta

SEQ ID NO: 1339228 - DNA, 15 bp, Homo sapiens
taaacttggtatgtt

SEQ ID NO: 1339229 - DNA, 15 bp, Homo sapiens
ttaaacttggtatgt

SEQ ID NO: 1339230 - DNA, 15 bp, Homo sapiens
tttaaacttggtatg

SEQ ID NO: 1339231 - DNA, 15 bp, Homo sapiens
ttttaaacttggtat

SEQ ID NO: 1339232 - DNA, 15 bp, Homo sapiens
attttaaacttggta

SEQ ID NO: 1339233 - DNA, 15 bp, Homo sapiens
tattttaaacttggt

SEQ ID NO: 1339234 - DNA, 15 bp, Homo sapiens
atattttaaacttgg

SEQ ID NO: 1339235 - DNA, 15 bp, Homo sapiens
catattttaaacttg

SEQ ID NO: 1339236 - DNA, 15 bp, Homo sapiens
acatattttaaactt

SEQ ID NO: 1339237 - DNA, 15 bp, Homo sapiens
tacatattttaaact

SEQ ID NO: 1339238 - DNA, 15 bp, Homo sapiens
atacatattttaaac

SEQ ID NO: 1339239 - DNA, 15 bp, Homo sapiens
tatacatattttaaa

SEQ ID NO: 1339240 - DNA, 15 bp, Homo sapiens
gtatacatattttaa

SEQ ID NO: 1339241 - DNA, 15 bp, Homo sapiens
agtatacatatttta

SEQ ID NO: 1339242 - DNA, 15 bp, Homo sapiens
tagtatacatatttt

SEQ ID NO: 1339243 - DNA, 15 bp, Homo sapiens
ttagtatacatattt

SEQ ID NO: 1339244 - DNA, 15 bp, Homo sapiens
gttagtatacatatt

SEQ ID NO: 1339245 - DNA, 15 bp, Homo sapiens
tgttagtatacatat

SEQ ID NO: 1339246 - DNA, 15 bp, Homo sapiens
ttgttagtatacata

SEQ ID NO: 1339247 - DNA, 15 bp, Homo sapiens
attgttagtatacat

SEQ ID NO: 1339248 - DNA, 15 bp, Homo sapiens
aattgttagtataca

SEQ ID NO: 1339249 - DNA, 15 bp, Homo sapiens
caattgttagtatac

SEQ ID NO: 1339250 - DNA, 15 bp, Homo sapiens
acaattgttagtata

SEQ ID NO: 1339251 - DNA, 15 bp, Homo sapiens
cacaattgttagtat

SEQ ID NO: 1339252 - DNA, 15 bp, Homo sapiens
tcacaattgttagta

SEQ ID NO: 1339253 - DNA, 15 bp, Homo sapiens
ctcacaattgttagt

SEQ ID NO: 1339254 - DNA, 15 bp, Homo sapiens
gctcacaattgttag

SEQ ID NO: 1339255 - DNA, 15 bp, Homo sapiens
agctcacaattgtta

SEQ ID NO: 1339256 - DNA, 15 bp, Homo sapiens
cagctcacaattgtt

SEQ ID NO: 1339257 - DNA, 15 bp, Homo sapiens
acagctcacaattgt

SEQ ID NO: 1339258 - DNA, 15 bp, Homo sapiens
cacagctcacaattg

SEQ ID NO: 1339259 - DNA, 15 bp, Homo sapiens
tcacagctcacaatt

SEQ ID NO: 1339260 - DNA, 15 bp, Homo sapiens
gtcacagctcacaat

SEQ ID NO: 1339261 - DNA, 15 bp, Homo sapiens
cgtcacagctcacaa

SEQ ID NO: 1339262 - DNA, 15 bp, Homo sapiens
tcgtcacagctcaca

SEQ ID NO: 1339263 - DNA, 15 bp, Homo sapiens
ttcgtcacagctcac

SEQ ID NO: 1339264 - DNA, 15 bp, Homo sapiens
attcgtcacagctca

SEQ ID NO: 1339265 - DNA, 15 bp, Homo sapiens
gattcgtcacagctc

SEQ ID NO: 1339266 - DNA, 15 bp, Homo sapiens
tgattcgtcacagct

SEQ ID NO: 1339267 - DNA, 15 bp, Homo sapiens
ttgattcgtcacagc

SEQ ID NO: 1339268 - DNA, 15 bp, Homo sapiens
gttgattcgtcacag

SEQ ID NO: 1339269 - DNA, 15 bp, Homo sapiens
agttgattcgtcaca

SEQ ID NO: 1339270 - DNA, 15 bp, Homo sapiens
aagttgattcgtcac

SEQ ID NO: 1339271 - DNA, 15 bp, Homo sapiens
gaagttgattcgtca

SEQ ID NO: 1339272 - DNA, 15 bp, Homo sapiens
ggaagttgattcgtc

SEQ ID NO: 1339273 - DNA, 15 bp, Homo sapiens
tggaagttgattcgt

SEQ ID NO: 1339274 - DNA, 15 bp, Homo sapiens
ttggaagttgattcg

SEQ ID NO: 1339275 - DNA, 15 bp, Homo sapiens
tttggaagttgattc

SEQ ID NO: 1339276 - DNA, 15 bp, Homo sapiens
gtttggaagttgatt

SEQ ID NO: 1339277 - DNA, 15 bp, Homo sapiens
tgtttggaagttgat

SEQ ID NO: 1339278 - DNA, 15 bp, Homo sapiens
atgtttggaagttga

SEQ ID NO: 1339279 - DNA, 15 bp, Homo sapiens
catgtttggaagttg

SEQ ID NO: 1339280 - DNA, 15 bp, Homo sapiens
acatgtttggaagtt

SEQ ID NO: 1339281 - DNA, 15 bp, Homo sapiens
tacatgtttggaagt

SEQ ID NO: 1339282 - DNA, 15 bp, Homo sapiens
ctacatgtttggaag

SEQ ID NO: 1339283 - DNA, 15 bp, Homo sapiens
tctacatgtttggaa

SEQ ID NO: 1339284 - DNA, 15 bp, Homo sapiens
ttctacatgtttgga

SEQ ID NO: 1339285 - DNA, 15 bp, Homo sapiens
cttctacatgtttgg

SEQ ID NO: 1339286 - DNA, 15 bp, Homo sapiens
gcttctacatgtttg

SEQ ID NO: 1339287 - DNA, 15 bp, Homo sapiens
tgcttctacatgttt

SEQ ID NO: 1339288 - DNA, 15 bp, Homo sapiens
gtgcttctacatgtt

SEQ ID NO: 1339289 - DNA, 15 bp, Homo sapiens
tgtgcttctacatgt

SEQ ID NO: 1339290 - DNA, 15 bp, Homo sapiens
ttgtgcttctacatg

SEQ ID NO: 1339291 - DNA, 15 bp, Homo sapiens
tttgtgcttctacat

SEQ ID NO: 1339292 - DNA, 15 bp, Homo sapiens
atttgtgcttctaca

SEQ ID NO: 1339293 - DNA, 15 bp, Homo sapiens
gatttgtgcttctac

SEQ ID NO: 1339294 - DNA, 15 bp, Homo sapiens
tgatttgtgcttcta

SEQ ID NO: 1339295 - DNA, 15 bp, Homo sapiens
ttgatttgtgcttct

SEQ ID NO: 1339296 - DNA, 15 bp, Homo sapiens
tttgatttgtgcttc

SEQ ID NO: 1339297 - DNA, 15 bp, Homo sapiens
ctttgatttgtgctt

SEQ ID NO: 1339298 - DNA, 15 bp, Homo sapiens
tctttgatttgtgct

SEQ ID NO: 1339299 - DNA, 15 bp, Homo sapiens
ttctttgatttgtgc

SEQ ID NO: 1339300 - DNA, 15 bp, Homo sapiens
tttctttgatttgtg

SEQ ID NO: 1339301 - DNA, 15 bp, Homo sapiens
ttttctttgatttgt

SEQ ID NO: 1339302 - DNA, 15 bp, Homo sapiens
attttctttgatttg

SEQ ID NO: 1339303 - DNA, 15 bp, Homo sapiens
tattttctttgattt

SEQ ID NO: 1339304 - DNA, 15 bp, Homo sapiens
ttattttctttgatt

SEQ ID NO: 1339305 - DNA, 15 bp, Homo sapiens
tttattttctttgat

SEQ ID NO: 1339306 - DNA, 15 bp, Homo sapiens
ctttattttctttga

SEQ ID NO: 1339307 - DNA, 15 bp, Homo sapiens
tctttattttctttg

SEQ ID NO: 1339308 - DNA, 15 bp, Homo sapiens
atctttattttcttt

SEQ ID NO: 1339309 - DNA, 15 bp, Homo sapiens
tatctttattttctt

SEQ ID NO: 1339310 - DNA, 15 bp, Homo sapiens
gtatctttattttct

SEQ ID NO: 1339311 - DNA, 15 bp, Homo sapiens
ggtatctttattttc

SEQ ID NO: 1339312 - DNA, 15 bp, Homo sapiens
tggtatctttatttt

SEQ ID NO: 1339313 - DNA, 15 bp, Homo sapiens
atggtatctttattt

SEQ ID NO: 1339314 - DNA, 15 bp, Homo sapiens
gatggtatctttatt

SEQ ID NO: 1339315 - DNA, 15 bp, Homo sapiens
agatggtatctttat

SEQ ID NO: 1339316 - DNA, 15 bp, Homo sapiens
tagatggtatcttta

SEQ ID NO: 1339317 - DNA, 15 bp, Homo sapiens
ctagatggtatcttt

SEQ ID NO: 1339318 - DNA, 15 bp, Homo sapiens
actagatggtatctt

SEQ ID NO: 1339319 - DNA, 15 bp, Homo sapiens
cactagatggtatct

SEQ ID NO: 1339320 - DNA, 15 bp, Homo sapiens
tcactagatggtatc

SEQ ID NO: 1339321 - DNA, 15 bp, Homo sapiens
atcactagatggtat

SEQ ID NO: 1339322 - DNA, 15 bp, Homo sapiens
tatcactagatggta

SEQ ID NO: 1339323 - DNA, 15 bp, Homo sapiens
ctatcactagatggt

SEQ ID NO: 1339324 - DNA, 15 bp, Homo sapiens
actatcactagatgg

SEQ ID NO: 1339325 - DNA, 15 bp, Homo sapiens
gactatcactagatg

SEQ ID NO: 1339326 - DNA, 15 bp, Homo sapiens
tgactatcactagat

SEQ ID NO: 1339327 - DNA, 15 bp, Homo sapiens
ctgactatcactaga

SEQ ID NO: 1339328 - DNA, 15 bp, Homo sapiens
tctgactatcactag

SEQ ID NO: 1339329 - DNA, 15 bp, Homo sapiens
ttctgactatcacta

SEQ ID NO: 1339330 - DNA, 15 bp, Homo sapiens
gttctgactatcact

SEQ ID NO: 1339331 - DNA, 15 bp, Homo sapiens
agttctgactatcac

SEQ ID NO: 1339332 - DNA, 15 bp, Homo sapiens
cagttctgactatca

SEQ ID NO: 1339333 - DNA, 15 bp, Homo sapiens
tcagttctgactatc

SEQ ID NO: 1339334 - DNA, 15 bp, Homo sapiens
gtcagttctgactat

SEQ ID NO: 1339335 - DNA, 15 bp, Homo sapiens
cgtcagttctgacta

SEQ ID NO: 1339336 - DNA, 15 bp, Homo sapiens
ccgtcagttctgact

SEQ ID NO: 1339337 - DNA, 15 bp, Homo sapiens
accgtcagttctgac

SEQ ID NO: 1339338 - DNA, 15 bp, Homo sapiens
taccgtcagttctga

SEQ ID NO: 1339339 - DNA, 15 bp, Homo sapiens
ttaccgtcagttctg

SEQ ID NO: 1339340 - DNA, 15 bp, Homo sapiens
attaccgtcagttct

SEQ ID NO: 1339341 - DNA, 15 bp, Homo sapiens
aattaccgtcagttc

SEQ ID NO: 1339342 - DNA, 15 bp, Homo sapiens
aaattaccgtcagtt

SEQ ID NO: 1339343 - DNA, 15 bp, Homo sapiens
aaaattaccgtcagt

SEQ ID NO: 1339344 - DNA, 15 bp, Homo sapiens
caaaattaccgtcag

SEQ ID NO: 1339345 - DNA, 15 bp, Homo sapiens
gcaaaattaccgtca

SEQ ID NO: 1339346 - DNA, 15 bp, Homo sapiens
agcaaaattaccgtc

SEQ ID NO: 1339347 - DNA, 15 bp, Homo sapiens
cagcaaaattaccgt

SEQ ID NO: 1339348 - DNA, 15 bp, Homo sapiens
acagcaaaattaccg

SEQ ID NO: 1339349 - DNA, 15 bp, Homo sapiens
cacagcaaaattacc

SEQ ID NO: 1339350 - DNA, 15 bp, Homo sapiens
tcacagcaaaattac

SEQ ID NO: 1339351 - DNA, 15 bp, Homo sapiens
atcacagcaaaatta

SEQ ID NO: 1339352 - DNA, 15 bp, Homo sapiens
aatcacagcaaaatt

SEQ ID NO: 1339353 - DNA, 15 bp, Homo sapiens
aaatcacagcaaaat

SEQ ID NO: 1339354 - DNA, 15 bp, Homo sapiens
gaaatcacagcaaaa

SEQ ID NO: 1339355 - DNA, 15 bp, Homo sapiens
agaaatcacagcaaa

SEQ ID NO: 1339356 - DNA, 15 bp, Homo sapiens
tagaaatcacagcaa

SEQ ID NO: 1339357 - DNA, 15 bp, Homo sapiens
gtagaaatcacagca

SEQ ID NO: 1339358 - DNA, 15 bp, Homo sapiens
agtagaaatcacagc

SEQ ID NO: 1339359 - DNA, 15 bp, Homo sapiens
gagtagaaatcacag

SEQ ID NO: 1339360 - DNA, 15 bp, Homo sapiens
ggagtagaaatcaca

SEQ ID NO: 1339361 - DNA, 15 bp, Homo sapiens
tggagtagaaatcac

SEQ ID NO: 1339362 - DNA, 15 bp, Homo sapiens
gtggagtagaaatca

SEQ ID NO: 1339363 - DNA, 15 bp, Homo sapiens
tgtggagtagaaatc

SEQ ID NO: 1339364 - DNA, 15 bp, Homo sapiens
ctgtggagtagaaat

SEQ ID NO: 1339365 - DNA, 15 bp, Homo sapiens
cctgtggagtagaaa

SEQ ID NO: 1339366 - DNA, 15 bp, Homo sapiens
tcctgtggagtagaa

SEQ ID NO: 1339367 - DNA, 15 bp, Homo sapiens
atcctgtggagtaga

SEQ ID NO: 1339368 - DNA, 15 bp, Homo sapiens
aatcctgtggagtag

SEQ ID NO: 1339369 - DNA, 15 bp, Homo sapiens
taatcctgtggagta

SEQ ID NO: 1339370 - DNA, 15 bp, Homo sapiens
ataatcctgtggagt

SEQ ID NO: 1339371 - DNA, 15 bp, Homo sapiens
aataatcctgtggag

SEQ ID NO: 1339372 - DNA, 15 bp, Homo sapiens
caataatcctgtgga

SEQ ID NO: 1339373 - DNA, 15 bp, Homo sapiens
tcaataatcctgtgg

SEQ ID NO: 1339374 - DNA, 15 bp, Homo sapiens
gtcaataatcctgtg

SEQ ID NO: 1339375 - DNA, 15 bp, Homo sapiens
tgtcaataatcctgt

SEQ ID NO: 1339376 - DNA, 15 bp, Homo sapiens
ctgtcaataatcctg

SEQ ID NO: 1339377 - DNA, 15 bp, Homo sapiens
cctgtcaataatcct

SEQ ID NO: 1339378 - DNA, 15 bp, Homo sapiens
tcctgtcaataatcc

SEQ ID NO: 1339379 - DNA, 15 bp, Homo sapiens
atcctgtcaataatc

SEQ ID NO: 1339380 - DNA, 15 bp, Homo sapiens
tatcctgtcaataat

SEQ ID NO: 1339381 - DNA, 15 bp, Homo sapiens
gtatcctgtcaataa

SEQ ID NO: 1339382 - DNA, 15 bp, Homo sapiens
tgtatcctgtcaata

SEQ ID NO: 1339383 - DNA, 15 bp, Homo sapiens
ttgtatcctgtcaat

SEQ ID NO: 1339384 - DNA, 15 bp, Homo sapiens
gttgtatcctgtcaa

SEQ ID NO: 1339385 - DNA, 15 bp, Homo sapiens
agttgtatcctgtca

SEQ ID NO: 1339386 - DNA, 15 bp, Homo sapiens
tagttgtatcctgtc

SEQ ID NO: 1339387 - DNA, 15 bp, Homo sapiens
ttagttgtatcctgt

SEQ ID NO: 1339388 - DNA, 15 bp, Homo sapiens
attagttgtatcctg

SEQ ID NO: 1339389 - DNA, 15 bp, Homo sapiens
tattagttgtatcct

SEQ ID NO: 1339390 - DNA, 15 bp, Homo sapiens
atattagttgtatcc

SEQ ID NO: 1339391 - DNA, 15 bp, Homo sapiens
catattagttgtatc

SEQ ID NO: 1339392 - DNA, 15 bp, Homo sapiens
tcatattagttgtat

SEQ ID NO: 1339393 - DNA, 15 bp, Homo sapiens
ttcatattagttgta

SEQ ID NO: 1339394 - DNA, 15 bp, Homo sapiens
tttcatattagttgt

SEQ ID NO: 1339395 - DNA, 15 bp, Homo sapiens
atttcatattagttg

SEQ ID NO: 1339396 - DNA, 15 bp, Homo sapiens
tatttcatattagtt

SEQ ID NO: 1339397 - DNA, 15 bp, Homo sapiens
ttatttcatattagt

SEQ ID NO: 1339398 - DNA, 15 bp, Homo sapiens
tttatttcatattag

SEQ ID NO: 1339399 - DNA, 15 bp, Homo sapiens
ttttatttcatatta

SEQ ID NO: 1339400 - DNA, 15 bp, Homo sapiens
cttttatttcatatt

SEQ ID NO: 1339401 - DNA, 15 bp, Homo sapiens
tcttttatttcatat

SEQ ID NO: 1339402 - DNA, 15 bp, Homo sapiens
atcttttatttcata

SEQ ID NO: 1339403 - DNA, 15 bp, Homo sapiens
tatcttttatttcat

SEQ ID NO: 1339404 - DNA, 15 bp, Homo sapiens
atatcttttatttca

SEQ ID NO: 1339405 - DNA, 15 bp, Homo sapiens
tatatcttttatttc

SEQ ID NO: 1339406 - DNA, 15 bp, Homo sapiens
ttatatcttttattt

SEQ ID NO: 1339407 - DNA, 15 bp, Homo sapiens
tttatatcttttatt

SEQ ID NO: 1339408 - DNA, 15 bp, Homo sapiens
ttttatatcttttat

SEQ ID NO: 1339409 - DNA, 15 bp, Homo sapiens
cttttatatctttta

SEQ ID NO: 1339410 - DNA, 15 bp, Homo sapiens
gcttttatatctttt

SEQ ID NO: 1339411 - DNA, 15 bp, Homo sapiens
tgcttttatatcttt

SEQ ID NO: 1339412 - DNA, 15 bp, Homo sapiens
atgcttttatatctt

SEQ ID NO: 1339413 - DNA, 15 bp, Homo sapiens
aatgcttttatatct

SEQ ID NO: 1339414 - DNA, 15 bp, Homo sapiens
aaatgcttttatatc

SEQ ID NO: 1339415 - DNA, 15 bp, Homo sapiens
caaatgcttttatat

SEQ ID NO: 1339416 - DNA, 15 bp, Homo sapiens
acaaatgcttttata

SEQ ID NO: 1339417 - DNA, 15 bp, Homo sapiens
cacaaatgcttttat

SEQ ID NO: 1339418 - DNA, 15 bp, Homo sapiens
tcacaaatgctttta

SEQ ID NO: 1339419 - DNA, 15 bp, Homo sapiens
ttcacaaatgctttt

SEQ ID NO: 1339420 - DNA, 15 bp, Homo sapiens
gttcacaaatgcttt

SEQ ID NO: 1339421 - DNA, 15 bp, Homo sapiens
ggttcacaaatgctt

SEQ ID NO: 1339422 - DNA, 15 bp, Homo sapiens
tggttcacaaatgct

SEQ ID NO: 1339423 - DNA, 15 bp, Homo sapiens
ttggttcacaaatgc

SEQ ID NO: 1339424 - DNA, 15 bp, Homo sapiens
tttggttcacaaatg

SEQ ID NO: 1339425 - DNA, 15 bp, Homo sapiens
ctttggttcacaaat

SEQ ID NO: 1339426 - DNA, 15 bp, Homo sapiens
cctttggttcacaaa

SEQ ID NO: 1339427 - DNA, 15 bp, Homo sapiens
tcctttggttcacaa

SEQ ID NO: 1339428 - DNA, 15 bp, Homo sapiens
gtcctttggttcaca

SEQ ID NO: 1339429 - DNA, 15 bp, Homo sapiens
agtcctttggttcac

SEQ ID NO: 1339430 - DNA, 15 bp, Homo sapiens
aagtcctttggttca

SEQ ID NO: 1339431 - DNA, 15 bp, Homo sapiens
aaagtcctttggttc

SEQ ID NO: 1339432 - DNA, 15 bp, Homo sapiens
taaagtcctttggtt

SEQ ID NO: 1339433 - DNA, 15 bp, Homo sapiens
ataaagtcctttggt

SEQ ID NO: 1339434 - DNA, 15 bp, Homo sapiens
tataaagtcctttgg

SEQ ID NO: 1339435 - DNA, 15 bp, Homo sapiens
atataaagtcctttg

SEQ ID NO: 1339436 - DNA, 15 bp, Homo sapiens
tatataaagtccttt

SEQ ID NO: 1339437 - DNA, 15 bp, Homo sapiens
ctatataaagtcctt

SEQ ID NO: 1339438 - DNA, 15 bp, Homo sapiens
tctatataaagtcct

SEQ ID NO: 1339439 - DNA, 15 bp, Homo sapiens
atctatataaagtcc

SEQ ID NO: 1339440 - DNA, 15 bp, Homo sapiens
tatctatataaagtc

SEQ ID NO: 1339441 - DNA, 15 bp, Homo sapiens
gtatctatataaagt

SEQ ID NO: 1339442 - DNA, 15 bp, Homo sapiens
tgtatctatataaag

SEQ ID NO: 1339443 - DNA, 15 bp, Homo sapiens
gtgtatctatataaa

SEQ ID NO: 1339444 - DNA, 15 bp, Homo sapiens
tgtgtatctatataa

SEQ ID NO: 1339445 - DNA, 15 bp, Homo sapiens
ctgtgtatctatata

SEQ ID NO: 1339446 - DNA, 15 bp, Homo sapiens
cctgtgtatctatat

SEQ ID NO: 1339447 - DNA, 15 bp, Homo sapiens
tcctgtgtatctata

SEQ ID NO: 1339448 - DNA, 15 bp, Homo sapiens
atcctgtgtatctat

SEQ ID NO: 1339449 - DNA, 15 bp, Homo sapiens
gatcctgtgtatcta

SEQ ID NO: 1339450 - DNA, 15 bp, Homo sapiens
tgatcctgtgtatct

SEQ ID NO: 1339451 - DNA, 15 bp, Homo sapiens
atgatcctgtgtatc

SEQ ID NO: 1339452 - DNA, 15 bp, Homo sapiens
tatgatcctgtgtat

SEQ ID NO: 1339453 - DNA, 15 bp, Homo sapiens
ttatgatcctgtgta

SEQ ID NO: 1339454 - DNA, 15 bp, Homo sapiens
attatgatcctgtgt

SEQ ID NO: 1339455 - DNA, 15 bp, Homo sapiens
gattatgatcctgtg

SEQ ID NO: 1339456 - DNA, 15 bp, Homo sapiens
tgattatgatcctgt

SEQ ID NO: 1339457 - DNA, 15 bp, Homo sapiens
atgattatgatcctg

SEQ ID NO: 1339458 - DNA, 15 bp, Homo sapiens
aatgattatgatcct

SEQ ID NO: 1339459 - DNA, 15 bp, Homo sapiens
taatgattatgatcc

SEQ ID NO: 1339460 - DNA, 15 bp, Homo sapiens
gtaatgattatgatc

SEQ ID NO: 1339461 - DNA, 15 bp, Homo sapiens
ggtaatgattatgat

SEQ ID NO: 1339462 - DNA, 15 bp, Homo sapiens
tggtaatgattatga

SEQ ID NO: 1339463 - DNA, 15 bp, Homo sapiens
ctggtaatgattatg

SEQ ID NO: 1339464 - DNA, 15 bp, Homo sapiens
actggtaatgattat

SEQ ID NO: 1339465 - DNA, 15 bp, Homo sapiens
tactggtaatgatta

SEQ ID NO: 1339466 - DNA, 15 bp, Homo sapiens
atactggtaatgatt

SEQ ID NO: 1339467 - DNA, 15 bp, Homo sapiens
tatactggtaatgat

SEQ ID NO: 1339468 - DNA, 15 bp, Homo sapiens
ttatactggtaatga

SEQ ID NO: 1339469 - DNA, 15 bp, Homo sapiens
tttatactggtaatg

SEQ ID NO: 1339470 - DNA, 15 bp, Homo sapiens
gtttatactggtaat

SEQ ID NO: 1339471 - DNA, 15 bp, Homo sapiens
agtttatactggtaa

SEQ ID NO: 1339472 - DNA, 15 bp, Homo sapiens
tagtttatactggta

SEQ ID NO: 1339473 - DNA, 15 bp, Homo sapiens
gtagtttatactggt

SEQ ID NO: 1339474 - DNA, 15 bp, Homo sapiens
tgtagtttatactgg

SEQ ID NO: 1339475 - DNA, 15 bp, Homo sapiens
ctgtagtttatactg

SEQ ID NO: 1339476 - DNA, 15 bp, Homo sapiens
actgtagtttatact

SEQ ID NO: 1339477 - DNA, 15 bp, Homo sapiens
tactgtagtttatac

SEQ ID NO: 1339478 - DNA, 15 bp, Homo sapiens
ttactgtagtttata

SEQ ID NO: 1339479 - DNA, 15 bp, Homo sapiens
tttactgtagtttat

SEQ ID NO: 1339480 - DNA, 15 bp, Homo sapiens
ctttactgtagttta

SEQ ID NO: 1339481 - DNA, 15 bp, Homo sapiens
cctttactgtagttt

SEQ ID NO: 1339482 - DNA, 15 bp, Homo sapiens
ccctttactgtagtt

SEQ ID NO: 1339483 - DNA, 15 bp, Homo sapiens
tccctttactgtagt

SEQ ID NO: 1339484 - DNA, 15 bp, Homo sapiens
ttccctttactgtag

SEQ ID NO: 1339485 - DNA, 15 bp, Homo sapiens
cttccctttactgta

SEQ ID NO: 1339486 - DNA, 15 bp, Homo sapiens
tcttccctttactgt

SEQ ID NO: 1339487 - DNA, 15 bp, Homo sapiens
ttcttccctttactg

SEQ ID NO: 1339488 - DNA, 15 bp, Homo sapiens
gttcttccctttact

SEQ ID NO: 1339489 - DNA, 15 bp, Homo sapiens
tgttcttccctttac

SEQ ID NO: 1339490 - DNA, 15 bp, Homo sapiens
ctgttcttcccttta

SEQ ID NO: 1339491 - DNA, 15 bp, Homo sapiens
actgttcttcccttt

SEQ ID NO: 1339492 - DNA, 15 bp, Homo sapiens
cactgttcttccctt

SEQ ID NO: 1339493 - DNA, 15 bp, Homo sapiens
tcactgttcttccct

SEQ ID NO: 1339494 - DNA, 15 bp, Homo sapiens
ctcactgttcttccc

SEQ ID NO: 1339495 - DNA, 15 bp, Homo sapiens
actcactgttcttcc

SEQ ID NO: 1339496 - DNA, 15 bp, Homo sapiens
gactcactgttcttc

SEQ ID NO: 1339497 - DNA, 15 bp, Homo sapiens
ggactcactgttctt

SEQ ID NO: 1339498 - DNA, 15 bp, Homo sapiens
gggactcactgttct

SEQ ID NO: 1339499 - DNA, 15 bp, Homo sapiens
tgggactcactgttc

SEQ ID NO: 1339500 - DNA, 15 bp, Homo sapiens
atgggactcactgtt

SEQ ID NO: 1339501 - DNA, 15 bp, Homo sapiens
catgggactcactgt

SEQ ID NO: 1339502 - DNA, 15 bp, Homo sapiens
gcatgggactcactg

SEQ ID NO: 1339503 - DNA, 15 bp, Homo sapiens
ggcatgggactcact

SEQ ID NO: 1339504 - DNA, 15 bp, Homo sapiens
tggcatgggactcac

SEQ ID NO: 1339505 - DNA, 15 bp, Homo sapiens
ctggcatgggactca

SEQ ID NO: 1339506 - DNA, 15 bp, Homo sapiens
cctggcatgggactc

SEQ ID NO: 1339507 - DNA, 15 bp, Homo sapiens
acctggcatgggact

SEQ ID NO: 1339508 - DNA, 15 bp, Homo sapiens
tacctggcatgggac

SEQ ID NO: 1339509 - DNA, 15 bp, Homo sapiens
ctacctggcatggga

SEQ ID NO: 1339510 - DNA, 15 bp, Homo sapiens
cctacctggcatggg

SEQ ID NO: 1339511 - DNA, 15 bp, Homo sapiens
gcctacctggcatgg

SEQ ID NO: 1339512 - DNA, 15 bp, Homo sapiens
tgcctacctggcatg

SEQ ID NO: 1339513 - DNA, 15 bp, Homo sapiens
atgcctacctggcat

SEQ ID NO: 1339514 - DNA, 15 bp, Homo sapiens
gatgcctacctggca

SEQ ID NO: 1339515 - DNA, 15 bp, Homo sapiens
ggatgcctacctggc

SEQ ID NO: 1339516 - DNA, 15 bp, Homo sapiens
tggatgcctacctgg

SEQ ID NO: 1339517 - DNA, 15 bp, Homo sapiens
gtggatgcctacctg

SEQ ID NO: 1339518 - DNA, 15 bp, Homo sapiens
ggtggatgcctacct

SEQ ID NO: 1339519 - DNA, 15 bp, Homo sapiens
tggtggatgcctacc

SEQ ID NO: 1339520 - DNA, 15 bp, Homo sapiens
ttggtggatgcctac

SEQ ID NO: 1339521 - DNA, 15 bp, Homo sapiens
attggtggatgccta

SEQ ID NO: 1339522 - DNA, 15 bp, Homo sapiens
gattggtggatgcct

SEQ ID NO: 1339523 - DNA, 15 bp, Homo sapiens
agattggtggatgcc

SEQ ID NO: 1339524 - DNA, 15 bp, Homo sapiens
gagattggtggatgc

SEQ ID NO: 1339525 - DNA, 15 bp, Homo sapiens
tgagattggtggatg

SEQ ID NO: 1339526 - DNA, 15 bp, Homo sapiens
gtgagattggtggat

SEQ ID NO: 1339527 - DNA, 15 bp, Homo sapiens
agtgagattggtgga

SEQ ID NO: 1339528 - DNA, 15 bp, Homo sapiens
aagtgagattggtgg

SEQ ID NO: 1339529 - DNA, 15 bp, Homo sapiens
aaagtgagattggtg

SEQ ID NO: 1339530 - DNA, 15 bp, Homo sapiens
aaaagtgagattggt

SEQ ID NO: 1339531 - DNA, 15 bp, Homo sapiens
aaaaagtgagattgg

SEQ ID NO: 1339532 - DNA, 15 bp, Homo sapiens
taaaaagtgagattg

SEQ ID NO: 1339533 - DNA, 15 bp, Homo sapiens
ctaaaaagtgagatt

SEQ ID NO: 1339534 - DNA, 15 bp, Homo sapiens
tctaaaaagtgagat

SEQ ID NO: 1339535 - DNA, 15 bp, Homo sapiens
ttctaaaaagtgaga

SEQ ID NO: 1339536 - DNA, 15 bp, Homo sapiens
tttctaaaaagtgag

SEQ ID NO: 1339537 - DNA, 15 bp, Homo sapiens
atttctaaaaagtga

SEQ ID NO: 1339538 - DNA, 15 bp, Homo sapiens
aatttctaaaaagtg

SEQ ID NO: 1339539 - DNA, 15 bp, Homo sapiens
caatttctaaaaagt

SEQ ID NO: 1339540 - DNA, 15 bp, Homo sapiens
acaatttctaaaaag

SEQ ID NO: 1339541 - DNA, 15 bp, Homo sapiens
cacaatttctaaaaa

SEQ ID NO: 1339542 - DNA, 15 bp, Homo sapiens
tcacaatttctaaaa

SEQ ID NO: 1339543 - DNA, 15 bp, Homo sapiens
ctcacaatttctaaa

SEQ ID NO: 1339544 - DNA, 15 bp, Homo sapiens
actcacaatttctaa

SEQ ID NO: 1339545 - DNA, 15 bp, Homo sapiens
tactcacaatttcta

SEQ ID NO: 1339546 - DNA, 15 bp, Homo sapiens
ttactcacaatttct

SEQ ID NO: 1339547 - DNA, 15 bp, Homo sapiens
attactcacaatttc

SEQ ID NO: 1339548 - DNA, 15 bp, Homo sapiens
tattactcacaattt

SEQ ID NO: 1339549 - DNA, 15 bp, Homo sapiens
ttattactcacaatt

SEQ ID NO: 1339550 - DNA, 15 bp, Homo sapiens
tttattactcacaat

SEQ ID NO: 1339551 - DNA, 15 bp, Homo sapiens
ttttattactcacaa

SEQ ID NO: 1339552 - DNA, 15 bp, Homo sapiens
tttttattactcaca

SEQ ID NO: 1339553 - DNA, 15 bp, Homo sapiens
ttttttattactcac

SEQ ID NO: 1339554 - DNA, 15 bp, Homo sapiens
tttttttattactca

SEQ ID NO: 1339555 - DNA, 15 bp, Homo sapiens
atttttttattactc

SEQ ID NO: 1339556 - DNA, 15 bp, Homo sapiens
catttttttattact

SEQ ID NO: 1339557 - DNA, 15 bp, Homo sapiens
gcatttttttattac

SEQ ID NO: 1339558 - DNA, 15 bp, Homo sapiens
agcatttttttatta

SEQ ID NO: 1339559 - DNA, 15 bp, Homo sapiens
aagcatttttttatt

SEQ ID NO: 1339560 - DNA, 15 bp, Homo sapiens
caagcatttttttat

SEQ ID NO: 1339561 - DNA, 15 bp, Homo sapiens
gcaagcattttttta

SEQ ID NO: 1339562 - DNA, 15 bp, Homo sapiens
tgcaagcattttttt

SEQ ID NO: 1339563 - DNA, 15 bp, Homo sapiens
ttgcaagcatttttt

SEQ ID NO: 1339564 - DNA, 15 bp, Homo sapiens
attgcaagcattttt

SEQ ID NO: 1339565 - DNA, 15 bp, Homo sapiens
tattgcaagcatttt

SEQ ID NO: 1339566 - DNA, 15 bp, Homo sapiens
gtattgcaagcattt

SEQ ID NO: 1339567 - DNA, 15 bp, Homo sapiens
tgtattgcaagcatt

SEQ ID NO: 1339568 - DNA, 15 bp, Homo sapiens
atgtattgcaagcat

SEQ ID NO: 1339569 - DNA, 15 bp, Homo sapiens
tatgtattgcaagca

SEQ ID NO: 1339570 - DNA, 15 bp, Homo sapiens
gtatgtattgcaagc

SEQ ID NO: 1339571 - DNA, 15 bp, Homo sapiens
agtatgtattgcaag

SEQ ID NO: 1339572 - DNA, 15 bp, Homo sapiens
aagtatgtattgcaa

SEQ ID NO: 1339573 - DNA, 15 bp, Homo sapiens
taagtatgtattgca

SEQ ID NO: 1339574 - DNA, 15 bp, Homo sapiens
ataagtatgtattgc

SEQ ID NO: 1339575 - DNA, 15 bp, Homo sapiens
cataagtatgtattg

SEQ ID NO: 1339576 - DNA, 15 bp, Homo sapiens
tcataagtatgtatt

SEQ ID NO: 1339577 - DNA, 15 bp, Homo sapiens
atcataagtatgtat

SEQ ID NO: 1339578 - DNA, 15 bp, Homo sapiens
catcataagtatgta

SEQ ID NO: 1339579 - DNA, 15 bp, Homo sapiens
acatcataagtatgt

SEQ ID NO: 1339580 - DNA, 15 bp, Homo sapiens
cacatcataagtatg

SEQ ID NO: 1339581 - DNA, 15 bp, Homo sapiens
acacatcataagtat

SEQ ID NO: 1339582 - DNA, 15 bp, Homo sapiens
cacacatcataagta

SEQ ID NO: 1339583 - DNA, 15 bp, Homo sapiens
tcacacatcataagt

SEQ ID NO: 1339584 - DNA, 15 bp, Homo sapiens
ctcacacatcataag

SEQ ID NO: 1339585 - DNA, 15 bp, Homo sapiens
cctcacacatcataa

SEQ ID NO: 1339586 - DNA, 15 bp, Homo sapiens
ccctcacacatcata

SEQ ID NO: 1339587 - DNA, 15 bp, Homo sapiens
tccctcacacatcat

SEQ ID NO: 1339588 - DNA, 15 bp, Homo sapiens
ctccctcacacatca

SEQ ID NO: 1339589 - DNA, 15 bp, Homo sapiens
tctccctcacacatc

SEQ ID NO: 1339590 - DNA, 15 bp, Homo sapiens
ttctctccctcacac

SEQ ID NO: 1339591 - DNA, 15 bp, Homo sapiens
tttctctccctcaca

SEQ ID NO: 1339592 - DNA, 15 bp, Homo sapiens
ttttctctccctcac

SEQ ID NO: 1339593 - DNA, 15 bp, Homo sapiens
attttctctccctca

SEQ ID NO: 1339594 - DNA, 15 bp, Homo sapiens
aattttctctccctc

SEQ ID NO: 1339595 - DNA, 15 bp, Homo sapiens
taattttctctccct

SEQ ID NO: 1339596 - DNA, 15 bp, Homo sapiens
gtaattttctctccc

SEQ ID NO: 1339597 - DNA, 15 bp, Homo sapiens
ggtaattttctctcc

SEQ ID NO: 1339598 - DNA, 15 bp, Homo sapiens
tggtaattttctctc

SEQ ID NO: 1339599 - DNA, 15 bp, Homo sapiens
ttggtaattttctct

SEQ ID NO: 1339600 - DNA, 15 bp, Homo sapiens
cttggtaattttctc

SEQ ID NO: 1339601 - DNA, 15 bp, Homo sapiens
gcttggtaattttct

SEQ ID NO: 1339602 - DNA, 15 bp, Homo sapiens
agcttggtaattttc

SEQ ID NO: 1339603 - DNA, 15 bp, Homo sapiens
aagcttggtaatttt

SEQ ID NO: 1339604 - DNA, 15 bp, Homo sapiens
caagcttggtaattt

SEQ ID NO: 1339605 - DNA, 15 bp, Homo sapiens
tcaagcttggtaatt

SEQ ID NO: 1339606 - DNA, 15 bp, Homo sapiens
ttcaagcttggtaat

SEQ ID NO: 1339607 - DNA, 15 bp, Homo sapiens
gttcaagcttggtaa

SEQ ID NO: 1339608 - DNA, 15 bp, Homo sapiens
agttcaagcttggta

SEQ ID NO: 1339609 - DNA, 15 bp, Homo sapiens
aagttcaagcttggt

SEQ ID NO: 1339610 - DNA, 15 bp, Homo sapiens
aaagttcaagcttgg

SEQ ID NO: 1339611 - DNA, 15 bp, Homo sapiens
taaagttcaagcttg

SEQ ID NO: 1339612 - DNA, 15 bp, Homo sapiens
ataaagttcaagctt

SEQ ID NO: 1339613 - DNA, 15 bp, Homo sapiens
tataaagttcaagct

SEQ ID NO: 1339614 - DNA, 15 bp, Homo sapiens
ctataaagttcaagc

SEQ ID NO: 1339615 - DNA, 15 bp, Homo sapiens
cctataaagttcaag

SEQ ID NO: 1339616 - DNA, 15 bp, Homo sapiens
ccctataaagttcaa

SEQ ID NO: 1339617 - DNA, 15 bp, Homo sapiens
tccctataaagttca

SEQ ID NO: 1339618 - DNA, 15 bp, Homo sapiens
ttccctataaagttc

SEQ ID NO: 1339619 - DNA, 15 bp, Homo sapiens
tttccctataaagtt

SEQ ID NO: 1339620 - DNA, 15 bp, Homo sapiens
ttttccctataaagt

SEQ ID NO: 1339621 - DNA, 15 bp, Homo sapiens
tttttccctataaag

SEQ ID NO: 1339622 - DNA, 15 bp, Homo sapiens
ttttttccctataaa

SEQ ID NO: 1339623 - DNA, 15 bp, Homo sapiens
attttttccctataa

SEQ ID NO: 1339624 - DNA, 15 bp, Homo sapiens
aattttttccctata

SEQ ID NO: 1339625 - DNA, 15 bp, Homo sapiens
aaattttttccctat

SEQ ID NO: 1339626 - DNA, 15 bp, Homo sapiens
aaaattttttcccta

SEQ ID NO: 1339627 - DNA, 15 bp, Homo sapiens
aaaaattttttccct

SEQ ID NO: 1339628 - DNA, 15 bp, Homo sapiens
taaaaattttttccc

SEQ ID NO: 1339629 - DNA, 15 bp, Homo sapiens
ataaaaattttttcc

SEQ ID NO: 1339630 - DNA, 15 bp, Homo sapiens
cataaaaattttttc

SEQ ID NO: 1339631 - DNA, 15 bp, Homo sapiens
acataaaaatttttt

SEQ ID NO: 1339632 - DNA, 15 bp, Homo sapiens
gacataaaaattttt

SEQ ID NO: 1339633 - DNA, 15 bp, Homo sapiens
ggacataaaaatttt

SEQ ID NO: 1339634 - DNA, 15 bp, Homo sapiens
tggacataaaaattt

SEQ ID NO: 1339635 - DNA, 15 bp, Homo sapiens
atggacataaaaatt

SEQ ID NO: 1339636 - DNA, 15 bp, Homo sapiens
tatggacataaaaat

SEQ ID NO: 1339637 - DNA, 15 bp, Homo sapiens
atatggacataaaaa

SEQ ID NO: 1339638 - DNA, 15 bp, Homo sapiens
tatatggacataaaa

SEQ ID NO: 1339639 - DNA, 15 bp, Homo sapiens
atatatggacataaa

SEQ ID NO: 1339640 - DNA, 15 bp, Homo sapiens
aatatatggacataa

SEQ ID NO: 1339641 - DNA, 15 bp, Homo sapiens
aaatatatggacata

SEQ ID NO: 1339642 - DNA, 15 bp, Homo sapiens
taaatatatggacat

SEQ ID NO: 1339643 - DNA, 15 bp, Homo sapiens
ataaatatatggaca

SEQ ID NO: 1339644 - DNA, 15 bp, Homo sapiens
cataaatatatggac

SEQ ID NO: 1339645 - DNA, 15 bp, Homo sapiens
acataaatatatgga

SEQ ID NO: 1339646 - DNA, 15 bp, Homo sapiens
gacataaatatatgg

SEQ ID NO: 1339647 - DNA, 15 bp, Homo sapiens
tgacataaatatatg

SEQ ID NO: 1339648 - DNA, 15 bp, Homo sapiens
atgacataaatatat

SEQ ID NO: 1339649 - DNA, 15 bp, Homo sapiens
gatgacataaatata

SEQ ID NO: 1339650 - DNA, 15 bp, Homo sapiens
ggatgacataaatat

SEQ ID NO: 1339651 - DNA, 15 bp, Homo sapiens
gggatgacataaata

SEQ ID NO: 1339652 - DNA, 15 bp, Homo sapiens
agggatgacataaat

SEQ ID NO: 1339653 - DNA, 15 bp, Homo sapiens
cagggatgacataaa

SEQ ID NO: 1339654 - DNA, 15 bp, Homo sapiens
acagggatgacataa

SEQ ID NO: 1339655 - DNA, 15 bp, Homo sapiens
aacagggatgacata

SEQ ID NO: 1339656 - DNA, 15 bp, Homo sapiens
caacagggatgacat

SEQ ID NO: 1339657 - DNA, 15 bp, Homo sapiens
ccaacagggatgaca

SEQ ID NO: 1339658 - DNA, 15 bp, Homo sapiens
accaacagggatgac

SEQ ID NO: 1339659 - DNA, 15 bp, Homo sapiens
taccaacagggatga

SEQ ID NO: 1339660 - DNA, 15 bp, Homo sapiens
ttaccaacagggatg

SEQ ID NO: 1339661 - DNA, 15 bp, Homo sapiens
gttaccaacagggat

SEQ ID NO: 1339662 - DNA, 15 bp, Homo sapiens
tgttaccaacaggga

SEQ ID NO: 1339663 - DNA, 15 bp, Homo sapiens
gtgttaccaacaggg

SEQ ID NO: 1339664 - DNA, 15 bp, Homo sapiens
agtgttaccaacagg

SEQ ID NO: 1339665 - DNA, 15 bp, Homo sapiens
cagtgttaccaacag

SEQ ID NO: 1339666 - DNA, 15 bp, Homo sapiens
acagtgttaccaaca

SEQ ID NO: 1339667 - DNA, 15 bp, Homo sapiens
cacagtgttaccaac

SEQ ID NO: 1339668 - DNA, 15 bp, Homo sapiens
tcacagtgttaccaa

SEQ ID NO: 1339669 - DNA, 15 bp, Homo sapiens
ttcacagtgttacca

SEQ ID NO: 1339670 - DNA, 15 bp, Homo sapiens
gttcacagtgttacc

SEQ ID NO: 1339671 - DNA, 15 bp, Homo sapiens
tgttcacagtgttac

SEQ ID NO: 1339672 - DNA, 15 bp, Homo sapiens
gtgttcacagtgtta

SEQ ID NO: 1339673 - DNA, 15 bp, Homo sapiens
agtgttcacagtgtt

SEQ ID NO: 1339674 - DNA, 15 bp, Homo sapiens
cagtgttcacagtgt

SEQ ID NO: 1339675 - DNA, 15 bp, Homo sapiens
acagtgttcacagtg

SEQ ID NO: 1339676 - DNA, 15 bp, Homo sapiens
aacagtgttcacagt

SEQ ID NO: 1339677 - DNA, 15 bp, Homo sapiens
aaacagtgttcacag

SEQ ID NO: 1339678 - DNA, 15 bp, Homo sapiens
taaacagtgttcaca

SEQ ID NO: 1339679 - DNA, 15 bp, Homo sapiens
ttaaacagtgttcac

SEQ ID NO: 1339680 - DNA, 15 bp, Homo sapiens
tttaaacagtgttca

SEQ ID NO: 1339681 - DNA, 15 bp, Homo sapiens
ttttaaacagtgttc

SEQ ID NO: 1339682 - DNA, 15 bp, Homo sapiens
attttaaacagtgtt

SEQ ID NO: 1339683 - DNA, 15 bp, Homo sapiens
gattttaaacagtgt

SEQ ID NO: 1339684 - DNA, 15 bp, Homo sapiens
tgattttaaacagtg

SEQ ID NO: 1339685 - DNA, 15 bp, Homo sapiens
ttgattttaaacagt

SEQ ID NO: 1339686 - DNA, 15 bp, Homo sapiens
tttgattttaaacag

SEQ ID NO: 1339687 - DNA, 15 bp, Homo sapiens
ttttgattttaaaca

SEQ ID NO: 1339688 - DNA, 15 bp, Homo sapiens
attttgattttaaac

SEQ ID NO: 1339689 - DNA, 15 bp, Homo sapiens
gattttgattttaaa

SEQ ID NO: 1339690 - DNA, 15 bp, Homo sapiens
agattttgattttaa

SEQ ID NO: 1339691 - DNA, 15 bp, Homo sapiens
gagattttgatttta

SEQ ID NO: 1339692 - DNA, 15 bp, Homo sapiens
agagattttgatttt

SEQ ID NO: 1339693 - DNA, 15 bp, Homo sapiens
aagagattttgattt

SEQ ID NO: 1339694 - DNA, 15 bp, Homo sapiens
gaagagattttgatt

SEQ ID NO: 1339695 - DNA, 15 bp, Homo sapiens
tgaagagattttgat

SEQ ID NO: 1339696 - DNA, 15 bp, Homo sapiens
atgaagagattttga

SEQ ID NO: 1339697 - DNA, 15 bp, Homo sapiens
aatgaagagattttg

SEQ ID NO: 1339698 - DNA, 15 bp, Homo sapiens
aaatgaagagatttt

SEQ ID NO: 1339699 - DNA, 15 bp, Homo sapiens
gaaatgaagagattt

SEQ ID NO: 1339700 - DNA, 15 bp, Homo sapiens
tgaaatgaagagatt

SEQ ID NO: 1339701 - DNA, 15 bp, Homo sapiens
gtgaaatgaagagat

SEQ ID NO: 1339702 - DNA, 15 bp, Homo sapiens
ggtgaaatgaagaga

SEQ ID NO: 1339703 - DNA, 15 bp, Homo sapiens
tggtgaaatgaagag

SEQ ID NO: 1339704 - DNA, 15 bp, Homo sapiens
atggtgaaatgaaga

SEQ ID NO: 1339705 - DNA, 15 bp, Homo sapiens
aatggtgaaatgaag

SEQ ID NO: 1339706 - DNA, 15 bp, Homo sapiens
aaatggtgaaatgaa

SEQ ID NO: 1339707 - DNA, 15 bp, Homo sapiens
taaatggtgaaatga

SEQ ID NO: 1339708 - DNA, 15 bp, Homo sapiens
ataaatggtgaaatg

SEQ ID NO: 1339709 - DNA, 15 bp, Homo sapiens
aataaatggtgaaat

SEQ ID NO: 1339710 - DNA, 15 bp, Homo sapiens
aaataaatggtgaaa

SEQ ID NO: 1339711 - DNA, 15 bp, Homo sapiens
taaataaatggtgaa

SEQ ID NO: 1339712 - DNA, 15 bp, Homo sapiens
ctaaataaatggtga

SEQ ID NO: 1339713 - DNA, 15 bp, Homo sapiens
gctaaataaatggtg

SEQ ID NO: 1339714 - DNA, 15 bp, Homo sapiens
ggctaaataaatggt

SEQ ID NO: 1339715 - DNA, 15 bp, Homo sapiens
aggctaaataaatgg

SEQ ID NO: 1339716 - DNA, 15 bp, Homo sapiens
taggctaaataaatg

SEQ ID NO: 1339717 - DNA, 15 bp, Homo sapiens
ttaggctaaataaat

SEQ ID NO: 1339718 - DNA, 15 bp, Homo sapiens
cttaggctaaataaa

SEQ ID NO: 1339719 - DNA, 15 bp, Homo sapiens
acttaggctaaataa

SEQ ID NO: 1339720 - DNA, 15 bp, Homo sapiens
tacttaggctaaata

SEQ ID NO: 1339721 - DNA, 15 bp, Homo sapiens
gtacttaggctaaat

SEQ ID NO: 1339722 - DNA, 15 bp, Homo sapiens
tgtacttaggctaaa

SEQ ID NO: 1339723 - DNA, 15 bp, Homo sapiens
atgtacttaggctaa

SEQ ID NO: 1339724 - DNA, 15 bp, Homo sapiens
aatgtacttaggcta

SEQ ID NO: 1339725 - DNA, 15 bp, Homo sapiens
caatgtacttaggct

SEQ ID NO: 1339726 - DNA, 15 bp, Homo sapiens
gcaatgtacttaggc

SEQ ID NO: 1339727 - DNA, 15 bp, Homo sapiens
tgcaatgtacttagg

SEQ ID NO: 1339728 - DNA, 15 bp, Homo sapiens
ttgcaatgtacttag

SEQ ID NO: 1339729 - DNA, 15 bp, Homo sapiens
attgcaatgtactta

SEQ ID NO: 1339730 - DNA, 15 bp, Homo sapiens
aattgcaatgtactt

SEQ ID NO: 1339731 - DNA, 15 bp, Homo sapiens
aaattgcaatgtact

SEQ ID NO: 1339732 - DNA, 15 bp, Homo sapiens
gaaattgcaatgtac

SEQ ID NO: 1339733 - DNA, 15 bp, Homo sapiens
agaaattgcaatgta

SEQ ID NO: 1339734 - DNA, 15 bp, Homo sapiens
tagaaattgcaatgt

SEQ ID NO: 1339735 - DNA, 15 bp, Homo sapiens
gtagaaattgcaatg

SEQ ID NO: 1339736 - DNA, 15 bp, Homo sapiens
tgtagaaattgcaat

SEQ ID NO: 1339737 - DNA, 15 bp, Homo sapiens
ctgtagaaattgcaa

SEQ ID NO: 1339738 - DNA, 15 bp, Homo sapiens
gctgtagaaattgca

SEQ ID NO: 1339739 - DNA, 15 bp, Homo sapiens
agctgtagaaattgc

SEQ ID NO: 1339740 - DNA, 15 bp, Homo sapiens
cagctgtagaaattg

SEQ ID NO: 1339741 - DNA, 15 bp, Homo sapiens
ccagctgtagaaatt

SEQ ID NO: 1339742 - DNA, 15 bp, Homo sapiens
tccagctgtagaaat

SEQ ID NO: 1339743 - DNA, 15 bp, Homo sapiens
atccagctgtagaaa

SEQ ID NO: 1339744 - DNA, 15 bp, Homo sapiens
gatccagctgtagaa

SEQ ID NO: 1339745 - DNA, 15 bp, Homo sapiens
agatccagctgtaga

SEQ ID NO: 1339746 - DNA, 15 bp, Homo sapiens
gagatccagctgtag

SEQ ID NO: 1339747 - DNA, 15 bp, Homo sapiens
tgagatccagctgta

SEQ ID NO: 1339748 - DNA, 15 bp, Homo sapiens
gtgagatccagctgt

SEQ ID NO: 1339749 - DNA, 15 bp, Homo sapiens
tgtgagatccagctg

SEQ ID NO: 1339750 - DNA, 15 bp, Homo sapiens
ctgtgagatccagct

SEQ ID NO: 1339751 - DNA, 15 bp, Homo sapiens
tctgtgagatccagc

SEQ ID NO: 1339752 - DNA, 15 bp, Homo sapiens
ttctgtgagatccag

SEQ ID NO: 1339753 - DNA, 15 bp, Homo sapiens
tttctgtgagatcca

SEQ ID NO: 1339754 - DNA, 15 bp, Homo sapiens
atttctgtgagatcc

SEQ ID NO: 1339755 - DNA, 15 bp, Homo sapiens
tatttctgtgagatc

SEQ ID NO: 1339756 - DNA, 15 bp, Homo sapiens
atatttctgtgagat

SEQ ID NO: 1339757 - DNA, 15 bp, Homo sapiens
catatttctgtgaga

SEQ ID NO: 1339758 - DNA, 15 bp, Homo sapiens
tcatatttctgtgag

SEQ ID NO: 1339759 - DNA, 15 bp, Homo sapiens
atcatatttctgtga

SEQ ID NO: 1339760 - DNA, 15 bp, Homo sapiens
aatcatatttctgtg

SEQ ID NO: 1339761 - DNA, 15 bp, Homo sapiens
aaatcatatttctgt

SEQ ID NO: 1339762 - DNA, 15 bp, Homo sapiens
aaaatcatatttctg

SEQ ID NO: 1339763 - DNA, 15 bp, Homo sapiens
aaaaatcatatttct

SEQ ID NO: 1339764 - DNA, 15 bp, Homo sapiens
taaaaatcatatttc

SEQ ID NO: 1339765 - DNA, 15 bp, Homo sapiens
ttaaaaatcatattt

SEQ ID NO: 1339766 - DNA, 15 bp, Homo sapiens
cttaaaaatcatatt

SEQ ID NO: 1339767 - DNA, 15 bp, Homo sapiens
acttaaaaatcatat

SEQ ID NO: 1339768 - DNA, 15 bp, Homo sapiens
gacttaaaaatcata

SEQ ID NO: 1339769 - DNA, 15 bp, Homo sapiens
tgacttaaaaatcat

SEQ ID NO: 1339770 - DNA, 15 bp, Homo sapiens
ctgacttaaaaatca

SEQ ID NO: 1339771 - DNA, 15 bp, Homo sapiens
cttctgacttaaaaa

SEQ ID NO: 1339772 - DNA, 15 bp, Homo sapiens
acttctgacttaaaa

SEQ ID NO: 1339773 - DNA, 15 bp, Homo sapiens
aacttctgacttaaa

SEQ ID NO: 1339774 - DNA, 15 bp, Homo sapiens
aaacttctgacttaa

SEQ ID NO: 1339775 - DNA, 15 bp, Homo sapiens
caaacttctgactta

SEQ ID NO: 1339776 - DNA, 15 bp, Homo sapiens
acaaacttctgactt

SEQ ID NO: 1339777 - DNA, 15 bp, Homo sapiens
gacaaacttctgact

SEQ ID NO: 1339778 - DNA, 15 bp, Homo sapiens
ggacaaacttctgac

SEQ ID NO: 1339779 - DNA, 15 bp, Homo sapiens
gggacaaacttctga

SEQ ID NO: 1339780 - DNA, 15 bp, Homo sapiens
tgggacaaacttctg

SEQ ID NO: 1339781 - DNA, 15 bp, Homo sapiens
ctgggacaaacttct

SEQ ID NO: 1339782 - DNA, 15 bp, Homo sapiens
actgggacaaacttc

SEQ ID NO: 1339783 - DNA, 15 bp, Homo sapiens
aactgggacaaactt

SEQ ID NO: 1339784 - DNA, 15 bp, Homo sapiens
aaactgggacaaact

SEQ ID NO: 1339785 - DNA, 15 bp, Homo sapiens
aaaactgggacaaac

SEQ ID NO: 1339786 - DNA, 15 bp, Homo sapiens
taaaactgggacaaa

SEQ ID NO: 1339787 - DNA, 15 bp, Homo sapiens
ctaaaactgggacaa

SEQ ID NO: 1339788 - DNA, 15 bp, Homo sapiens
tctaaaactgggaca

SEQ ID NO: 1339789 - DNA, 15 bp, Homo sapiens
ctctaaaactgggac

SEQ ID NO: 1339790 - DNA, 15 bp, Homo sapiens
cctctaaaactggga

SEQ ID NO: 1339791 - DNA, 15 bp, Homo sapiens
acctctaaaactggg

SEQ ID NO: 1339792 - DNA, 15 bp, Homo sapiens
aacctctaaaactgg

SEQ ID NO: 1339793 - DNA, 15 bp, Homo sapiens
taacctctaaaactg

SEQ ID NO: 1339794 - DNA, 15 bp, Homo sapiens
ataacctctaaaact

SEQ ID NO: 1339795 - DNA, 15 bp, Homo sapiens
tataacctctaaaac

SEQ ID NO: 1339796 - DNA, 15 bp, Homo sapiens
atataacctctaaaa

SEQ ID NO: 1339797 - DNA, 15 bp, Homo sapiens
aatataacctctaaa

SEQ ID NO: 1339798 - DNA, 15 bp, Homo sapiens
aaatataacctctaa

SEQ ID NO: 1339799 - DNA, 15 bp, Homo sapiens
aaaatataacctcta

SEQ ID NO: 1339800 - DNA, 15 bp, Homo sapiens
gaaaatataacctct

SEQ ID NO: 1339801 - DNA, 15 bp, Homo sapiens
tgaaaatataacctc

SEQ ID NO: 1339802 - DNA, 15 bp, Homo sapiens
ctgaaaatataacct

SEQ ID NO: 1339803 - DNA, 15 bp, Homo sapiens
actgaaaatataacc

SEQ ID NO: 1339804 - DNA, 15 bp, Homo sapiens
gactgaaaatataac

SEQ ID NO: 1339805 - DNA, 15 bp, Homo sapiens
ggactgaaaatataa

SEQ ID NO: 1339806 - DNA, 15 bp, Homo sapiens
aggactgaaaatata

SEQ ID NO: 1339807 - DNA, 15 bp, Homo sapiens
caggactgaaaatat

SEQ ID NO: 1339808 - DNA, 15 bp, Homo sapiens
gcaggactgaaaata

SEQ ID NO: 1339809 - DNA, 15 bp, Homo sapiens
ggcaggactgaaaat

SEQ ID NO: 1339810 - DNA, 15 bp, Homo sapiens
tggcaggactgaaaa

SEQ ID NO: 1339811 - DNA, 15 bp, Homo sapiens
gtggcaggactgaaa

SEQ ID NO: 1339812 - DNA, 15 bp, Homo sapiens
ggtggcaggactgaa

SEQ ID NO: 1339813 - DNA, 15 bp, Homo sapiens
aggtggcaggactga

SEQ ID NO: 1339814 - DNA, 15 bp, Homo sapiens
aaggtggcaggactg

SEQ ID NO: 1339815 - DNA, 15 bp, Homo sapiens
aaaggtggcaggact

SEQ ID NO: 1339816 - DNA, 15 bp, Homo sapiens
gaaaggtggcaggac

SEQ ID NO: 1339817 - DNA, 15 bp, Homo sapiens
ggaaaggtggcagga

SEQ ID NO: 1339818 - DNA, 15 bp, Homo sapiens
aggaaaggtggcagg

SEQ ID NO: 1339819 - DNA, 15 bp, Homo sapiens
taggaaaggtggcag

SEQ ID NO: 1339820 - DNA, 15 bp, Homo sapiens
ataggaaaggtggca

SEQ ID NO: 1339821 - DNA, 15 bp, Homo sapiens
tataggaaaggtggc

SEQ ID NO: 1339822 - DNA, 15 bp, Homo sapiens
atataggaaaggtgg

SEQ ID NO: 1339823 - DNA, 15 bp, Homo sapiens
gatataggaaaggtg

SEQ ID NO: 1339824 - DNA, 15 bp, Homo sapiens
tgatataggaaaggt

SEQ ID NO: 1339825 - DNA, 15 bp, Homo sapiens
gtgatataggaaagg

SEQ ID NO: 1339826 - DNA, 15 bp, Homo sapiens
agtgatataggaaag

SEQ ID NO: 1339827 - DNA, 15 bp, Homo sapiens
gagtgatataggaaa

SEQ ID NO: 1339828 - DNA, 15 bp, Homo sapiens
agagtgatataggaa

SEQ ID NO: 1339829 - DNA, 15 bp, Homo sapiens
tagagtgatatagga

SEQ ID NO: 1339830 - DNA, 15 bp, Homo sapiens
ttagagtgatatagg

SEQ ID NO: 1339831 - DNA, 15 bp, Homo sapiens
cttagagtgatatag

SEQ ID NO: 1339832 - DNA, 15 bp, Homo sapiens
gcttagagtgatata

SEQ ID NO: 1339833 - DNA, 15 bp, Homo sapiens
agcttagagtgatat

SEQ ID NO: 1339834 - DNA, 15 bp, Homo sapiens
aagcttagagtgata

SEQ ID NO: 1339835 - DNA, 15 bp, Homo sapiens
taagcttagagtgat

SEQ ID NO: 1339836 - DNA, 15 bp, Homo sapiens
ataagcttagagtga

SEQ ID NO: 1339837 - DNA, 15 bp, Homo sapiens
tataagcttagagtg

SEQ ID NO: 1339838 - DNA, 15 bp, Homo sapiens
gtataagcttagagt

SEQ ID NO: 1339839 - DNA, 15 bp, Homo sapiens
tgtataagcttagag

SEQ ID NO: 1339840 - DNA, 15 bp, Homo sapiens
ttgtataagcttaga

SEQ ID NO: 1339841 - DNA, 15 bp, Homo sapiens
tttgtataagcttag

SEQ ID NO: 1339842 - DNA, 15 bp, Homo sapiens
ttttgtataagctta

SEQ ID NO: 1339843 - DNA, 15 bp, Homo sapiens
attttgtataagctt

SEQ ID NO: 1339844 - DNA, 15 bp, Homo sapiens
gattttgtataagct

SEQ ID NO: 1339845 - DNA, 15 bp, Homo sapiens
tgattttgtataagc

SEQ ID NO: 1339846 - DNA, 15 bp, Homo sapiens
ctgattttgtataag

SEQ ID NO: 1339847 - DNA, 15 bp, Homo sapiens
tctgattttgtataa

SEQ ID NO: 1339848 - DNA, 15 bp, Homo sapiens
atctgattttgtata

SEQ ID NO: 1339849 - DNA, 15 bp, Homo sapiens
tatctgattttgtat

SEQ ID NO: 1339850 - DNA, 15 bp, Homo sapiens
ttatctgattttgta

SEQ ID NO: 1339851 - DNA, 15 bp, Homo sapiens
cttatctgattttgt

SEQ ID NO: 1339852 - DNA, 15 bp, Homo sapiens
ccttatctgattttg

SEQ ID NO: 1339853 - DNA, 15 bp, Homo sapiens
cccttatctgatttt

SEQ ID NO: 1339854 - DNA, 15 bp, Homo sapiens
ccccttatctgattt

SEQ ID NO: 1339855 - DNA, 15 bp, Homo sapiens
cccccttatctgatt

SEQ ID NO: 1339856 - DNA, 15 bp, Homo sapiens
acccccttatctgat

SEQ ID NO: 1339857 - DNA, 15 bp, Homo sapiens
cacccccttatctga

SEQ ID NO: 1339858 - DNA, 15 bp, Homo sapiens
ccacccccttatctg

SEQ ID NO: 1339859 - DNA, 15 bp, Homo sapiens
gccacccccttatct

SEQ ID NO: 1339860 - DNA, 15 bp, Homo sapiens
agccacccccttatc

SEQ ID NO: 1339861 - DNA, 15 bp, Homo sapiens
cagccacccccttat

SEQ ID NO: 1339862 - DNA, 15 bp, Homo sapiens
ccagccaccccctta

SEQ ID NO: 1339863 - DNA, 15 bp, Homo sapiens
accagccaccccctt

SEQ ID NO: 1339864 - DNA, 15 bp, Homo sapiens
taccagccaccccct

SEQ ID NO: 1339865 - DNA, 15 bp, Homo sapiens
ttaccagccaccccc

SEQ ID NO: 1339866 - DNA, 15 bp, Homo sapiens
cttaccagccacccc

SEQ ID NO: 1339867 - DNA, 15 bp, Homo sapiens
tcttaccagccaccc

SEQ ID NO: 1339868 - DNA, 15 bp, Homo sapiens
atcttaccagccacc

SEQ ID NO: 1339869 - DNA, 15 bp, Homo sapiens
catcttaccagccac

SEQ ID NO: 1339870 - DNA, 15 bp, Homo sapiens
ccatcttaccagcca

SEQ ID NO: 1339871 - DNA, 15 bp, Homo sapiens
gccatcttaccagcc

SEQ ID NO: 1339872 - DNA, 15 bp, Homo sapiens
agccatcttaccagc

SEQ ID NO: 1339873 - DNA, 15 bp, Homo sapiens
cagccatcttaccag

SEQ ID NO: 1339874 - DNA, 15 bp, Homo sapiens
tcagccatcttacca

SEQ ID NO: 1339875 - DNA, 15 bp, Homo sapiens
ttcagccatcttacc

SEQ ID NO: 1339876 - DNA, 15 bp, Homo sapiens
attcagccatcttac

SEQ ID NO: 1339877 - DNA, 15 bp, Homo sapiens
tattcagccatctta

SEQ ID NO: 1339878 - DNA, 15 bp, Homo sapiens
ctattcagccatctt

SEQ ID NO: 1339879 - DNA, 15 bp, Homo sapiens
cctattcagccatct

SEQ ID NO: 1339880 - DNA, 15 bp, Homo sapiens
tcctattcagccatc

SEQ ID NO: 1339881 - DNA, 15 bp, Homo sapiens
ttcctattcagccat

SEQ ID NO: 1339882 - DNA, 15 bp, Homo sapiens
gttcctattcagcca

SEQ ID NO: 1339883 - DNA, 15 bp, Homo sapiens
tgttcctattcagcc

SEQ ID NO: 1339884 - DNA, 15 bp, Homo sapiens
ctgttcctattcagc

SEQ ID NO: 1339885 - DNA, 15 bp, Homo sapiens
gctgttcctattcag

SEQ ID NO: 1339886 - DNA, 15 bp, Homo sapiens
agctgttcctattca

SEQ ID NO: 1339887 - DNA, 15 bp, Homo sapiens
gagctgttcctattc

SEQ ID NO: 1339888 - DNA, 15 bp, Homo sapiens
agagctgttcctatt

SEQ ID NO: 1339889 - DNA, 15 bp, Homo sapiens
cagagctgttcctat

SEQ ID NO: 1339890 - DNA, 15 bp, Homo sapiens
ccagagctgttccta

SEQ ID NO: 1339891 - DNA, 15 bp, Homo sapiens
accagagctgttcct

SEQ ID NO: 1339892 - DNA, 15 bp, Homo sapiens
gaccagagctgttcc

SEQ ID NO: 1339893 - DNA, 15 bp, Homo sapiens
agaccagagctgttc

SEQ ID NO: 1339894 - DNA, 15 bp, Homo sapiens
cagaccagagctgtt

SEQ ID NO: 1339895 - DNA, 15 bp, Homo sapiens
gcagaccagagctgt

SEQ ID NO: 1339896 - DNA, 15 bp, Homo sapiens
tgcagaccagagctg

SEQ ID NO: 1339897 - DNA, 15 bp, Homo sapiens
ctgcagaccagagct

SEQ ID NO: 1339898 - DNA, 15 bp, Homo sapiens
gctgcagaccagagc

SEQ ID NO: 1339899 - DNA, 15 bp, Homo sapiens
agctgcagaccagag

SEQ ID NO: 1339900 - DNA, 15 bp, Homo sapiens
aagctgcagaccaga

SEQ ID NO: 1339901 - DNA, 15 bp, Homo sapiens
gaagctgcagaccag

SEQ ID NO: 1339902 - DNA, 15 bp, Homo sapiens
ggaagctgcagacca

SEQ ID NO: 1339903 - DNA, 15 bp, Homo sapiens
tggaagctgcagacc

SEQ ID NO: 1339904 - DNA, 15 bp, Homo sapiens
ctggaagctgcagac

SEQ ID NO: 1339905 - DNA, 15 bp, Homo sapiens
gctggaagctgcaga

SEQ ID NO: 1339906 - DNA, 15 bp, Homo sapiens
tgctggaagctgcag

SEQ ID NO: 1339907 - DNA, 15 bp, Homo sapiens
ttgctggaagctgca

SEQ ID NO: 1339908 - DNA, 15 bp, Homo sapiens
cttgctggaagctgc

SEQ ID NO: 1339909 - DNA, 15 bp, Homo sapiens
tcttgctggaagctg

SEQ ID NO: 1339910 - DNA, 15 bp, Homo sapiens
atcttgctggaagct

SEQ ID NO: 1339911 - DNA, 15 bp, Homo sapiens
gatcttgctggaagc

SEQ ID NO: 1339912 - DNA, 15 bp, Homo sapiens
tgatcttgctggaag

SEQ ID NO: 1339913 - DNA, 15 bp, Homo sapiens
ttgatcttgctggaa

SEQ ID NO: 1339914 - DNA, 15 bp, Homo sapiens
attgatcttgctgga

SEQ ID NO: 1339915 - DNA, 15 bp, Homo sapiens
cattgatcttgctgg

SEQ ID NO: 1339916 - DNA, 15 bp, Homo sapiens
gcattgatcttgctg

SEQ ID NO: 1339917 - DNA, 15 bp, Homo sapiens
tgcattgatcttgct

SEQ ID NO: 1339918 - DNA, 15 bp, Homo sapiens
ctgcattgatcttgc

SEQ ID NO: 1339919 - DNA, 15 bp, Homo sapiens
tctgcattgatcttg

SEQ ID NO: 1339920 - DNA, 15 bp, Homo sapiens
ttctgcattgatctt

SEQ ID NO: 1339921 - DNA, 15 bp, Homo sapiens
cttctgcattgatct

SEQ ID NO: 1339922 - DNA, 15 bp, Homo sapiens
ccttctgcattgatc

SEQ ID NO: 1339923 - DNA, 15 bp, Homo sapiens
gccttctgcattgat

SEQ ID NO: 1339924 - DNA, 15 bp, Homo sapiens
cgccttctgcattga

SEQ ID NO: 1339925 - DNA, 15 bp, Homo sapiens
ccgccttctgcattg

SEQ ID NO: 1339926 - DNA, 15 bp, Homo sapiens
cccgccttctgcatt

SEQ ID NO: 1339927 - DNA, 15 bp, Homo sapiens
acccgccttctgcat

SEQ ID NO: 1339928 - DNA, 15 bp, Homo sapiens
cacccgccttctgca

SEQ ID NO: 1339929 - DNA, 15 bp, Homo sapiens
tcacccgccttctgc

SEQ ID NO: 1339930 - DNA, 15 bp, Homo sapiens
atcacccgccttctg

SEQ ID NO: 1339931 - DNA, 15 bp, Homo sapiens
aatcacccgccttct

SEQ ID NO: 1339932 - DNA, 15 bp, Homo sapiens
aaatcacccgccttc

SEQ ID NO: 1339933 - DNA, 15 bp, Homo sapiens
gaaatcacccgcctt

SEQ ID NO: 1339934 - DNA, 15 bp, Homo sapiens
agaaatcacccgcct

SEQ ID NO: 1339935 - DNA, 15 bp, Homo sapiens
cagaaatcacccgcc

SEQ ID NO: 1339936 - DNA, 15 bp, Homo sapiens
gcagaaatcacccgc

SEQ ID NO: 1339937 - DNA, 15 bp, Homo sapiens
tgcagaaatcacccg

SEQ ID NO: 1339938 - DNA, 15 bp, Homo sapiens
atgcagaaatcaccc

SEQ ID NO: 1339939 - DNA, 15 bp, Homo sapiens
caaatgcagaaatca

SEQ ID NO: 1339940 - DNA, 15 bp, Homo sapiens
gcaaatgcagaaatc

SEQ ID NO: 1339941 - DNA, 15 bp, Homo sapiens
tgcaaatgcagaaat

SEQ ID NO: 1339942 - DNA, 15 bp, Homo sapiens
ttgcaaatgcagaaa

SEQ ID NO: 1339943 - DNA, 15 bp, Homo sapiens
gttgcaaatgcagaa

SEQ ID NO: 1339944 - DNA, 15 bp, Homo sapiens
agttgcaaatgcaga

SEQ ID NO: 1339945 - DNA, 15 bp, Homo sapiens
cagttgcaaatgcag

SEQ ID NO: 1339946 - DNA, 15 bp, Homo sapiens
tcagttgcaaatgca

SEQ ID NO: 1339947 - DNA, 15 bp, Homo sapiens
ctcagttgcaaatgc

SEQ ID NO: 1339948 - DNA, 15 bp, Homo sapiens
cctcagttgcaaatg

SEQ ID NO: 1339949 - DNA, 15 bp, Homo sapiens
acctcagttgcaaat

SEQ ID NO: 1339950 - DNA, 15 bp, Homo sapiens
tacctcagttgcaaa

SEQ ID NO: 1339951 - DNA, 15 bp, Homo sapiens
gtacctcagttgcaa

SEQ ID NO: 1339952 - DNA, 15 bp, Homo sapiens
ggtacctcagttgca

SEQ ID NO: 1339953 - DNA, 15 bp, Homo sapiens
gggtacctcagttgc

SEQ ID NO: 1339954 - DNA, 15 bp, Homo sapiens
cgggtacctcagttg

SEQ ID NO: 1339955 - DNA, 15 bp, Homo sapiens
ccgggtacctcagtt

SEQ ID NO: 1339956 - DNA, 15 bp, Homo sapiens
gccgggtacctcagt

SEQ ID NO: 1339957 - DNA, 15 bp, Homo sapiens
agccgggtacctcag

SEQ ID NO: 1339958 - DNA, 15 bp, Homo sapiens
gagccgggtacctca

SEQ ID NO: 1339959 - DNA, 15 bp, Homo sapiens
tgagccgggtacctc

SEQ ID NO: 1339960 - DNA, 15 bp, Homo sapiens
atgagccgggtacct

SEQ ID NO: 1339961 - DNA, 15 bp, Homo sapiens
gatgagccgggtacc

SEQ ID NO: 1339962 - DNA, 15 bp, Homo sapiens
agatgagccgggtac

SEQ ID NO: 1339963 - DNA, 15 bp, Homo sapiens
gagatgagccgggta

SEQ ID NO: 1339964 - DNA, 15 bp, Homo sapiens
tgagatgagccgggt

SEQ ID NO: 1339965 - DNA, 15 bp, Homo sapiens
atgagatgagccggg

SEQ ID NO: 1339966 - DNA, 15 bp, Homo sapiens
aatgagatgagccgg

SEQ ID NO: 1339967 - DNA, 15 bp, Homo sapiens
caatgagatgagccg

SEQ ID NO: 1339968 - DNA, 15 bp, Homo sapiens
ccaatgagatgagcc

SEQ ID NO: 1339969 - DNA, 15 bp, Homo sapiens
cccaatgagatgagc

SEQ ID NO: 1339970 - DNA, 15 bp, Homo sapiens
tcccaatgagatgag

SEQ ID NO: 1339971 - DNA, 15 bp, Homo sapiens
gtcccaatgagatga

SEQ ID NO: 1339972 - DNA, 15 bp, Homo sapiens
agtcccaatgagatg

SEQ ID NO: 1339973 - DNA, 15 bp, Homo sapiens
cagtcccaatgagat

SEQ ID NO: 1339974 - DNA, 15 bp, Homo sapiens
ccagtcccaatgaga

SEQ ID NO: 1339975 - DNA, 15 bp, Homo sapiens
accagtcccaatgag

SEQ ID NO: 1339976 - DNA, 15 bp, Homo sapiens
aaccagtcccaatga

SEQ ID NO: 1339977 - DNA, 15 bp, Homo sapiens
taaccagtcccaatg

SEQ ID NO: 1339978 - DNA, 15 bp, Homo sapiens
ctaaccagtcccaat

SEQ ID NO: 1339979 - DNA, 15 bp, Homo sapiens
tctaaccagtcccaa

SEQ ID NO: 1339980 - DNA, 15 bp, Homo sapiens
atctaaccagtccca

SEQ ID NO: 1339981 - DNA, 15 bp, Homo sapiens
tatctaaccagtccc

SEQ ID NO: 1339982 - DNA, 15 bp, Homo sapiens
ctatctaaccagtcc

SEQ ID NO: 1339983 - DNA, 15 bp, Homo sapiens
actatctaaccagtc

SEQ ID NO: 1339984 - DNA, 15 bp, Homo sapiens
cactatctaaccagt

SEQ ID NO: 1339985 - DNA, 15 bp, Homo sapiens
ccactatctaaccag

SEQ ID NO: 1339986 - DNA, 15 bp, Homo sapiens
cccactatctaacca

SEQ ID NO: 1339987 - DNA, 15 bp, Homo sapiens
acccactatctaacc

SEQ ID NO: 1339988 - DNA, 15 bp, Homo sapiens
cacccactatctaac

SEQ ID NO: 1339989 - DNA, 15 bp, Homo sapiens
gcacccactatctaa

SEQ ID NO: 1339990 - DNA, 15 bp, Homo sapiens
tgcacccactatcta

SEQ ID NO: 1339991 - DNA, 15 bp, Homo sapiens
ctgcacccactatct

SEQ ID NO: 1339992 - DNA, 15 bp, Homo sapiens
gctgcacccactatc

SEQ ID NO: 1339993 - DNA, 15 bp, Homo sapiens
ggctgcacccactat

SEQ ID NO: 1339994 - DNA, 15 bp, Homo sapiens
gggctgcacccacta

SEQ ID NO: 1339995 - DNA, 15 bp, Homo sapiens
tgggctgcacccact

SEQ ID NO: 1339996 - DNA, 15 bp, Homo sapiens
gtgggctgcacccac

SEQ ID NO: 1339997 - DNA, 15 bp, Homo sapiens
cgtgggctgcaccca

SEQ ID NO: 1339998 - DNA, 15 bp, Homo sapiens
ccgtgggctgcaccc

SEQ ID NO: 1339999 - DNA, 15 bp, Homo sapiens
tccgtgggctgcacc

SEQ ID NO: 1340000 - DNA, 15 bp, Homo sapiens
ctccgtgggctgcac

SEQ ID NO: 1340001 - DNA, 15 bp, Homo sapiens
cctccgtgggctgca

SEQ ID NO: 1340002 - DNA, 15 bp, Homo sapiens
ccctccgtgggctgc

SEQ ID NO: 1340003 - DNA, 15 bp, Homo sapiens
gccctccgtgggctg

SEQ ID NO: 1340004 - DNA, 15 bp, Homo sapiens
tgccctccgtgggct

SEQ ID NO: 1340005 - DNA, 15 bp, Homo sapiens
ttgccctccgtgggc

SEQ ID NO: 1340006 - DNA, 15 bp, Homo sapiens
cttgccctccgtggg

SEQ ID NO: 1340007 - DNA, 15 bp, Homo sapiens
gcttgccctccgtgg

SEQ ID NO: 1340008 - DNA, 15 bp, Homo sapiens
tgcttgccctccgtg

SEQ ID NO: 1340009 - DNA, 15 bp, Homo sapiens
ctgcttgccctccgt

SEQ ID NO: 1340010 - DNA, 15 bp, Homo sapiens
tctgcttgccctccg

SEQ ID NO: 1340011 - DNA, 15 bp, Homo sapiens
ttctgcttgccctcc

SEQ ID NO: 1340012 - DNA, 15 bp, Homo sapiens
cttctgcttgccctc

SEQ ID NO: 1340013 - DNA, 15 bp, Homo sapiens
gcttctgcttgccct

SEQ ID NO: 1340014 - DNA, 15 bp, Homo sapiens
tgcttctgcttgccc

SEQ ID NO: 1340015 - DNA, 15 bp, Homo sapiens
ctgcttctgcttgcc

SEQ ID NO: 1340016 - DNA, 15 bp, Homo sapiens
cctgcttctgcttgc

SEQ ID NO: 1340017 - DNA, 15 bp, Homo sapiens
ccctgcttctgcttg

SEQ ID NO: 1340018 - DNA, 15 bp, Homo sapiens
accctgcttctgctt

SEQ ID NO: 1340019 - DNA, 15 bp, Homo sapiens
caccctgcttctgct

SEQ ID NO: 1340020 - DNA, 15 bp, Homo sapiens
ccaccctgcttctgc

SEQ ID NO: 1340021 - DNA, 15 bp, Homo sapiens
cccaccctgcttctg

SEQ ID NO: 1340022 - DNA, 15 bp, Homo sapiens
ccccaccctgcttct

SEQ ID NO: 1340023 - DNA, 15 bp, Homo sapiens
gccccaccctgcttc

SEQ ID NO: 1340024 - DNA, 15 bp, Homo sapiens
cgccccaccctgctt

SEQ ID NO: 1340025 - DNA, 15 bp, Homo sapiens
acgccccaccctgct

SEQ ID NO: 1340026 - DNA, 15 bp, Homo sapiens
aacgccccaccctgc

SEQ ID NO: 1340027 - DNA, 15 bp, Homo sapiens
caacgccccaccctg

SEQ ID NO: 1340028 - DNA, 15 bp, Homo sapiens
gcaacgccccaccct

SEQ ID NO: 1340029 - DNA, 15 bp, Homo sapiens
ggcaacgccccaccc

SEQ ID NO: 1340030 - DNA, 15 bp, Homo sapiens
aggcaacgccccacc

SEQ ID NO: 1340031 - DNA, 15 bp, Homo sapiens
gaggcaacgccccac

SEQ ID NO: 1340032 - DNA, 15 bp, Homo sapiens
tgaggcaacgcccca

SEQ ID NO: 1340033 - DNA, 15 bp, Homo sapiens
gtgaggcaacgcccc

SEQ ID NO: 1340034 - DNA, 15 bp, Homo sapiens
ggtgaggcaacgccc

SEQ ID NO: 1340035 - DNA, 15 bp, Homo sapiens
gggtgaggcaacgcc

SEQ ID NO: 1340036 - DNA, 15 bp, Homo sapiens
tgggtgaggcaacgc

SEQ ID NO: 1340037 - DNA, 15 bp, Homo sapiens
ctgggtgaggcaacg

SEQ ID NO: 1340038 - DNA, 15 bp, Homo sapiens
cctgggtgaggcaac

SEQ ID NO: 1340039 - DNA, 15 bp, Homo sapiens
tcctgggtgaggcaa

SEQ ID NO: 1340040 - DNA, 15 bp, Homo sapiens
ttcctgggtgaggca

SEQ ID NO: 1340041 - DNA, 15 bp, Homo sapiens
cttcctgggtgaggc

SEQ ID NO: 1340042 - DNA, 15 bp, Homo sapiens
gcttcctgggtgagg

SEQ ID NO: 1340043 - DNA, 15 bp, Homo sapiens
tgcttcctgggtgag

SEQ ID NO: 1340044 - DNA, 15 bp, Homo sapiens
gtgcttcctgggtga

SEQ ID NO: 1340045 - DNA, 15 bp, Homo sapiens
tgtgcttcctgggtg

SEQ ID NO: 1340046 - DNA, 15 bp, Homo sapiens
ttgtgcttcctgggt

SEQ ID NO: 1340047 - DNA, 15 bp, Homo sapiens
cttgtgcttcctggg

SEQ ID NO: 1340048 - DNA, 15 bp, Homo sapiens
tcttgtgcttcctgg

SEQ ID NO: 1340049 - DNA, 15 bp, Homo sapiens
ctcttgtgcttcctg

SEQ ID NO: 1340050 - DNA, 15 bp, Homo sapiens
cctcttgtgcttcct

SEQ ID NO: 1340051 - DNA, 15 bp, Homo sapiens
gcctcttgtgcttcc

SEQ ID NO: 1340052 - DNA, 15 bp, Homo sapiens
agcctcttgtgcttc

SEQ ID NO: 1340053 - DNA, 15 bp, Homo sapiens
cagcctcttgtgctt

SEQ ID NO: 1340054 - DNA, 15 bp, Homo sapiens
ccagcctcttgtgct

SEQ ID NO: 1340055 - DNA, 15 bp, Homo sapiens
cccagcctcttgtgc

SEQ ID NO: 1340056 - DNA, 15 bp, Homo sapiens
ccccagcctcttgtg

SEQ ID NO: 1340057 - DNA, 15 bp, Homo sapiens
tccccagcctcttgt

SEQ ID NO: 1340058 - DNA, 15 bp, Homo sapiens
ttccccagcctcttg

SEQ ID NO: 1340059 - DNA, 15 bp, Homo sapiens
gttccccagcctctt

SEQ ID NO: 1340060 - DNA, 15 bp, Homo sapiens
agttccccagcctct

SEQ ID NO: 1340061 - DNA, 15 bp, Homo sapiens
gagttccccagcctc

SEQ ID NO: 1340062 - DNA, 15 bp, Homo sapiens
ggagttccccagcct

SEQ ID NO: 1340063 - DNA, 15 bp, Homo sapiens
gggagttccccagcc

SEQ ID NO: 1340064 - DNA, 15 bp, Homo sapiens
agggagttccccagc

SEQ ID NO: 1340065 - DNA, 15 bp, Homo sapiens
gagggagttccccag

SEQ ID NO: 1340066 - DNA, 15 bp, Homo sapiens
ggagggagttcccca

SEQ ID NO: 1340067 - DNA, 15 bp, Homo sapiens
gggagggagttcccc

SEQ ID NO: 1340068 - DNA, 15 bp, Homo sapiens
ggggagggagttccc

SEQ ID NO: 1340069 - DNA, 15 bp, Homo sapiens
aggggagggagttcc

SEQ ID NO: 1340070 - DNA, 15 bp, Homo sapiens
taggggagggagttc

SEQ ID NO: 1340071 - DNA, 15 bp, Homo sapiens
ctaggggagggagtt

SEQ ID NO: 1340072 - DNA, 15 bp, Homo sapiens
gctaggggagggagt

SEQ ID NO: 1340073 - DNA, 15 bp, Homo sapiens
ggctaggggagggag

SEQ ID NO: 1340074 - DNA, 15 bp, Homo sapiens
tggctaggggaggga

SEQ ID NO: 1340075 - DNA, 15 bp, Homo sapiens
ttggctaggggaggg

SEQ ID NO: 1340076 - DNA, 15 bp, Homo sapiens
cttggctaggggagg

SEQ ID NO: 1340077 - DNA, 15 bp, Homo sapiens
ccttggctaggggag

SEQ ID NO: 1340078 - DNA, 15 bp, Homo sapiens
cccttggctagggga

SEQ ID NO: 1340079 - DNA, 15 bp, Homo sapiens
tcccttggctagggg

SEQ ID NO: 1340080 - DNA, 15 bp, Homo sapiens
ttcccttggctaggg

SEQ ID NO: 1340081 - DNA, 15 bp, Homo sapiens
cttcccttggctagg

SEQ ID NO: 1340082 - DNA, 15 bp, Homo sapiens
gcttcccttggctag

SEQ ID NO: 1340083 - DNA, 15 bp, Homo sapiens
agcttcccttggcta

SEQ ID NO: 1340084 - DNA, 15 bp, Homo sapiens
cagcttcccttggct

SEQ ID NO: 1340085 - DNA, 15 bp, Homo sapiens
acagcttcccttggc

SEQ ID NO: 1340086 - DNA, 15 bp, Homo sapiens
cacagcttcccttgg

SEQ ID NO: 1340087 - DNA, 15 bp, Homo sapiens
tcacagcttcccttg

SEQ ID NO: 1340088 - DNA, 15 bp, Homo sapiens
ctcacagcttccctt

SEQ ID NO: 1340089 - DNA, 15 bp, Homo sapiens
cctcacagcttccct

SEQ ID NO: 1340090 - DNA, 15 bp, Homo sapiens
ccctcacagcttccc

SEQ ID NO: 1340091 - DNA, 15 bp, Homo sapiens
tccctcacagcttcc

SEQ ID NO: 1340092 - DNA, 15 bp, Homo sapiens
gtccctcacagcttc

SEQ ID NO: 1340093 - DNA, 15 bp, Homo sapiens
agtccctcacagctt

SEQ ID NO: 1340094 - DNA, 15 bp, Homo sapiens
cagtccctcacagct

SEQ ID NO: 1340095 - DNA, 15 bp, Homo sapiens
acagtccctcacagc

SEQ ID NO: 1340096 - DNA, 15 bp, Homo sapiens
cacagtccctcacag

SEQ ID NO: 1340097 - DNA, 15 bp, Homo sapiens
gcacagtccctcaca

SEQ ID NO: 1340098 - DNA, 15 bp, Homo sapiens
ggcacagtccctcac

SEQ ID NO: 1340099 - DNA, 15 bp, Homo sapiens
tggcacagtccctca

SEQ ID NO: 1340100 - DNA, 15 bp, Homo sapiens
ttggcacagtccctc

SEQ ID NO: 1340101 - DNA, 15 bp, Homo sapiens
cttggcacagtccct

SEQ ID NO: 1340102 - DNA, 15 bp, Homo sapiens
tcttggcacagtccc

SEQ ID NO: 1340103 - DNA, 15 bp, Homo sapiens
ttcttggcacagtcc

SEQ ID NO: 1340104 - DNA, 15 bp, Homo sapiens
gttcttggcacagtc

SEQ ID NO: 1340105 - DNA, 15 bp, Homo sapiens
agttcttggcacagt

SEQ ID NO: 1340106 - DNA, 15 bp, Homo sapiens
tagttcttggcacag

SEQ ID NO: 1340107 - DNA, 15 bp, Homo sapiens
ctagttcttggcaca

SEQ ID NO: 1340108 - DNA, 15 bp, Homo sapiens
cctagttcttggcac

SEQ ID NO: 1340109 - DNA, 15 bp, Homo sapiens
gcctagttcttggca

SEQ ID NO: 1340110 - DNA, 15 bp, Homo sapiens
tgcctagttcttggc

SEQ ID NO: 1340111 - DNA, 15 bp, Homo sapiens
gtgcctagttcttgg

SEQ ID NO: 1340112 - DNA, 15 bp, Homo sapiens
agtgcctagttcttg

SEQ ID NO: 1340113 - DNA, 15 bp, Homo sapiens
gagtgcctagttctt

SEQ ID NO: 1340114 - DNA, 15 bp, Homo sapiens
cgagtgcctagttct

SEQ ID NO: 1340115 - DNA, 15 bp, Homo sapiens
ccgagtgcctagttc

SEQ ID NO: 1340116 - DNA, 15 bp, Homo sapiens
gccgagtgcctagtt

SEQ ID NO: 1340117 - DNA, 15 bp, Homo sapiens
ggccgagtgcctagt

SEQ ID NO: 1340118 - DNA, 15 bp, Homo sapiens
gggccgagtgcctag

SEQ ID NO: 1340119 - DNA, 15 bp, Homo sapiens
tgggccgagtgccta

SEQ ID NO: 1340120 - DNA, 15 bp, Homo sapiens
ctgggccgagtgcct

SEQ ID NO: 1340121 - DNA, 15 bp, Homo sapiens
tctgggccgagtgcc

SEQ ID NO: 1340122 - DNA, 15 bp, Homo sapiens
atctgggccgagtgc

SEQ ID NO: 1340123 - DNA, 15 bp, Homo sapiens
tatctgggccgagtg

SEQ ID NO: 1340124 - DNA, 15 bp, Homo sapiens
gtatctgggccgagt

SEQ ID NO: 1340125 - DNA, 15 bp, Homo sapiens
agtatctgggccgag

SEQ ID NO: 1340126 - DNA, 15 bp, Homo sapiens
cagtatctgggccga

SEQ ID NO: 1340127 - DNA, 15 bp, Homo sapiens
gcagtatctgggccg

SEQ ID NO: 1340128 - DNA, 15 bp, Homo sapiens
agcagtatctgggcc

SEQ ID NO: 1340129 - DNA, 15 bp, Homo sapiens
gagcagtatctgggc

SEQ ID NO: 1340130 - DNA, 15 bp, Homo sapiens
agagcagtatctggg

SEQ ID NO: 1340131 - DNA, 15 bp, Homo sapiens
aagagcagtatctgg

SEQ ID NO: 1340132 - DNA, 15 bp, Homo sapiens
aaagagcagtatctg

SEQ ID NO: 1340133 - DNA, 15 bp, Homo sapiens
aaaagagcagtatct

SEQ ID NO: 1340134 - DNA, 15 bp, Homo sapiens
gaaaagagcagtatc

SEQ ID NO: 1340135 - DNA, 15 bp, Homo sapiens
ggaaaagagcagtat

SEQ ID NO: 1340136 - DNA, 15 bp, Homo sapiens
gggaaaagagcagta

SEQ ID NO: 1340137 - DNA, 15 bp, Homo sapiens
tgggaaaagagcagt

SEQ ID NO: 1340138 - DNA, 15 bp, Homo sapiens
atgggaaaagagcag

SEQ ID NO: 1340139 - DNA, 15 bp, Homo sapiens
catgggaaaagagca

SEQ ID NO: 1340140 - DNA, 15 bp, Homo sapiens
ccatgggaaaagagc

SEQ ID NO: 1340141 - DNA, 15 bp, Homo sapiens
accatgggaaaagag

SEQ ID NO: 1340142 - DNA, 15 bp, Homo sapiens
gaccatgggaaaaga

SEQ ID NO: 1340143 - DNA, 15 bp, Homo sapiens
agaccatgggaaaag

SEQ ID NO: 1340144 - DNA, 15 bp, Homo sapiens
aagaccatgggaaaa

SEQ ID NO: 1340145 - DNA, 15 bp, Homo sapiens
aaagaccatgggaaa

SEQ ID NO: 1340146 - DNA, 15 bp, Homo sapiens
caaagaccatgggaa

SEQ ID NO: 1340147 - DNA, 15 bp, Homo sapiens
gcaaagaccatggga

SEQ ID NO: 1340148 - DNA, 15 bp, Homo sapiens
tgcaaagaccatggg

SEQ ID NO: 1340149 - DNA, 15 bp, Homo sapiens
ttgcaaagaccatgg

SEQ ID NO: 1340150 - DNA, 15 bp, Homo sapiens
gttgcaaagaccatg

SEQ ID NO: 1340151 - DNA, 15 bp, Homo sapiens
ggttgcaaagaccat

SEQ ID NO: 1340152 - DNA, 15 bp, Homo sapiens
aggttgcaaagacca

SEQ ID NO: 1340153 - DNA, 15 bp, Homo sapiens
caggttgcaaagacc

SEQ ID NO: 1340154 - DNA, 15 bp, Homo sapiens
gcaggttgcaaagac

SEQ ID NO: 1340155 - DNA, 15 bp, Homo sapiens
tgcaggttgcaaaga

SEQ ID NO: 1340156 - DNA, 15 bp, Homo sapiens
ctgcaggttgcaaag

SEQ ID NO: 1340157 - DNA, 15 bp, Homo sapiens
tctgcaggttgcaaa

SEQ ID NO: 1340158 - DNA, 15 bp, Homo sapiens
gtctgcaggttgcaa

SEQ ID NO: 1340159 - DNA, 15 bp, Homo sapiens
ggtctgcaggttgca

SEQ ID NO: 1340160 - DNA, 15 bp, Homo sapiens
tggtctgcaggttgc

SEQ ID NO: 1340161 - DNA, 15 bp, Homo sapiens
ctggtctgcaggttg

SEQ ID NO: 1340162 - DNA, 15 bp, Homo sapiens
cctggtctgcaggtt

SEQ ID NO: 1340163 - DNA, 15 bp, Homo sapiens
tcctggtctgcaggt

SEQ ID NO: 1340164 - DNA, 15 bp, Homo sapiens
gtcctggtctgcagg

SEQ ID NO: 1340165 - DNA, 15 bp, Homo sapiens
tgtcctggtctgcag

SEQ ID NO: 1340166 - DNA, 15 bp, Homo sapiens
atgtcctggtctgca

SEQ ID NO: 1340167 - DNA, 15 bp, Homo sapiens
aatgtcctggtctgc

SEQ ID NO: 1340168 - DNA, 15 bp, Homo sapiens
gaatgtcctggtctg

SEQ ID NO: 1340169 - DNA, 15 bp, Homo sapiens
ggaatgtcctggtct

SEQ ID NO: 1340170 - DNA, 15 bp, Homo sapiens
gggaatgtcctggtc

SEQ ID NO: 1340171 - DNA, 15 bp, Homo sapiens
agggaatgtcctggt

SEQ ID NO: 1340172 - DNA, 15 bp, Homo sapiens
aagggaatgtcctgg

SEQ ID NO: 1340173 - DNA, 15 bp, Homo sapiens
caagggaatgtcctg

SEQ ID NO: 1340174 - DNA, 15 bp, Homo sapiens
ccaagggaatgtcct

SEQ ID NO: 1340175 - DNA, 15 bp, Homo sapiens
cccaagggaatgtcc

SEQ ID NO: 1340176 - DNA, 15 bp, Homo sapiens
acccaagggaatgtc

SEQ ID NO: 1340177 - DNA, 15 bp, Homo sapiens
cacccaagggaatgt

SEQ ID NO: 1340178 - DNA, 15 bp, Homo sapiens
gcacccaagggaatg

SEQ ID NO: 1340179 - DNA, 15 bp, Homo sapiens
ggcacccaagggaat

SEQ ID NO: 1340180 - DNA, 15 bp, Homo sapiens
aggcacccaagggaa

SEQ ID NO: 1340181 - DNA, 15 bp, Homo sapiens
taggcacccaaggga

SEQ ID NO: 1340182 - DNA, 15 bp, Homo sapiens
ataggcacccaaggg

SEQ ID NO: 1340183 - DNA, 15 bp, Homo sapiens
tataggcacccaagg

SEQ ID NO: 1340184 - DNA, 15 bp, Homo sapiens
gtataggcacccaag

SEQ ID NO: 1340185 - DNA, 15 bp, Homo sapiens
ggtataggcacccaa

SEQ ID NO: 1340186 - DNA, 15 bp, Homo sapiens
tggtataggcaccca

SEQ ID NO: 1340187 - DNA, 15 bp, Homo sapiens
gtggtataggcaccc

SEQ ID NO: 1340188 - DNA, 15 bp, Homo sapiens
ggtggtataggcacc

SEQ ID NO: 1340189 - DNA, 15 bp, Homo sapiens
tggtggtataggcac

SEQ ID NO: 1340190 - DNA, 15 bp, Homo sapiens
ctggtggtataggca

SEQ ID NO: 1340191 - DNA, 15 bp, Homo sapiens
cctggtggtataggc

SEQ ID NO: 1340192 - DNA, 15 bp, Homo sapiens
ccctggtggtatagg

SEQ ID NO: 1340193 - DNA, 15 bp, Homo sapiens
tccctggtggtatag

SEQ ID NO: 1340194 - DNA, 15 bp, Homo sapiens
gtccctggtggtata

SEQ ID NO: 1340195 - DNA, 15 bp, Homo sapiens
ggtccctggtggtat

SEQ ID NO: 1340196 - DNA, 15 bp, Homo sapiens
cggtccctggtggta

SEQ ID NO: 1340197 - DNA, 15 bp, Homo sapiens
ccggtccctggtggt

SEQ ID NO: 1340198 - DNA, 15 bp, Homo sapiens
cccggtccctggtgg

SEQ ID NO: 1340199 - DNA, 15 bp, Homo sapiens
ccccggtccctggtg

SEQ ID NO: 1340200 - DNA, 15 bp, Homo sapiens
accccggtccctggt

SEQ ID NO: 1340201 - DNA, 15 bp, Homo sapiens
aaccccggtccctgg

SEQ ID NO: 1340202 - DNA, 15 bp, Homo sapiens
aaaccccggtccctg

SEQ ID NO: 1340203 - DNA, 15 bp, Homo sapiens
gaaaccccggtccct

SEQ ID NO: 1340204 - DNA, 15 bp, Homo sapiens
tgaaaccccggtccc

SEQ ID NO: 1340205 - DNA, 15 bp, Homo sapiens
ttgaaaccccggtcc

SEQ ID NO: 1340206 - DNA, 15 bp, Homo sapiens
cttgaaaccccggtc

SEQ ID NO: 1340207 - DNA, 15 bp, Homo sapiens
gcttgaaaccccggt

SEQ ID NO: 1340208 - DNA, 15 bp, Homo sapiens
tgcttgaaaccccgg

SEQ ID NO: 1340209 - DNA, 15 bp, Homo sapiens
ctgcttgaaaccccg

SEQ ID NO: 1340210 - DNA, 15 bp, Homo sapiens
tctgcttgaaacccc

SEQ ID NO: 1340211 - DNA, 15 bp, Homo sapiens
ttctgcttgaaaccc

SEQ ID NO: 1340212 - DNA, 15 bp, Homo sapiens
tttctgcttgaaacc

SEQ ID NO: 1340213 - DNA, 15 bp, Homo sapiens
ctttctgcttgaaac

SEQ ID NO: 1340214 - DNA, 15 bp, Homo sapiens
gctttctgcttgaaa

SEQ ID NO: 1340215 - DNA, 15 bp, Homo sapiens
agctttctgcttgaa

SEQ ID NO: 1340216 - DNA, 15 bp, Homo sapiens
cagctttctgcttga

SEQ ID NO: 1340217 - DNA, 15 bp, Homo sapiens
ccagctttctgcttg

SEQ ID NO: 1340218 - DNA, 15 bp, Homo sapiens
cccagctttctgctt

SEQ ID NO: 1340219 - DNA, 15 bp, Homo sapiens
gcccagctttctgct

SEQ ID NO: 1340220 - DNA, 15 bp, Homo sapiens
tgcccagctttctgc

SEQ ID NO: 1340221 - DNA, 15 bp, Homo sapiens
ctgcccagctttctg

SEQ ID NO: 1340222 - DNA, 15 bp, Homo sapiens
tctgcccagctttct

SEQ ID NO: 1340223 - DNA, 15 bp, Homo sapiens
gtctgcccagctttc

SEQ ID NO: 1340224 - DNA, 15 bp, Homo sapiens
cgtctgcccagcttt

SEQ ID NO: 1340225 - DNA, 15 bp, Homo sapiens
acgtctgcccagctt

SEQ ID NO: 1340226 - DNA, 15 bp, Homo sapiens
aacgtctgcccagct

SEQ ID NO: 1340227 - DNA, 15 bp, Homo sapiens
aaacgtctgcccagc

SEQ ID NO: 1340228 - DNA, 15 bp, Homo sapiens
caaacgtctgcccag

SEQ ID NO: 1340229 - DNA, 15 bp, Homo sapiens
ccaaacgtctgccca

SEQ ID NO: 1340230 - DNA, 15 bp, Homo sapiens
cccaaacgtctgccc

SEQ ID NO: 1340231 - DNA, 15 bp, Homo sapiens
gcccaaacgtctgcc

SEQ ID NO: 1340232 - DNA, 15 bp, Homo sapiens
tgcccaaacgtctgc

SEQ ID NO: 1340233 - DNA, 15 bp, Homo sapiens
ctgcccaaacgtctg

SEQ ID NO: 1340234 - DNA, 15 bp, Homo sapiens
tctgcccaaacgtct

SEQ ID NO: 1340235 - DNA, 15 bp, Homo sapiens
gtctgcccaaacgtc

SEQ ID NO: 1340236 - DNA, 15 bp, Homo sapiens
tgtctgcccaaacgt

SEQ ID NO: 1340237 - DNA, 15 bp, Homo sapiens
gtgtctgcccaaacg

SEQ ID NO: 1340238 - DNA, 15 bp, Homo sapiens
ggtgtctgcccaaac

SEQ ID NO: 1340239 - DNA, 15 bp, Homo sapiens
cggtgtctgcccaaa

SEQ ID NO: 1340240 - DNA, 15 bp, Homo sapiens
tcggtgtctgcccaa

SEQ ID NO: 1340241 - DNA, 15 bp, Homo sapiens
ctcggtgtctgccca

SEQ ID NO: 1340242 - DNA, 15 bp, Homo sapiens
gctcggtgtctgccc

SEQ ID NO: 1340243 - DNA, 15 bp, Homo sapiens
tgctcggtgtctgcc

SEQ ID NO: 1340244 - DNA, 15 bp, Homo sapiens
ttgctcggtgtctgc

SEQ ID NO: 1340245 - DNA, 15 bp, Homo sapiens
cttgctcggtgtctg

SEQ ID NO: 1340246 - DNA, 15 bp, Homo sapiens
gcttgctcggtgtct

SEQ ID NO: 1340247 - DNA, 15 bp, Homo sapiens
agcttgctcggtgtc

SEQ ID NO: 1340248 - DNA, 15 bp, Homo sapiens
cagcttgctcggtgt

SEQ ID NO: 1340249 - DNA, 15 bp, Homo sapiens
gcagcttgctcggtg

SEQ ID NO: 1340250 - DNA, 15 bp, Homo sapiens
tgcagcttgctcggt

SEQ ID NO: 1340251 - DNA, 15 bp, Homo sapiens
ctgcagcttgctcgg

SEQ ID NO: 1340252 - DNA, 15 bp, Homo sapiens
cctgcagcttgctcg

SEQ ID NO: 1340253 - DNA, 15 bp, Homo sapiens
tcctgcagcttgctc

SEQ ID NO: 1340254 - DNA, 15 bp, Homo sapiens
ttcctgcagcttgct

SEQ ID NO: 1340255 - DNA, 15 bp, Homo sapiens
attcctgcagcttgc

SEQ ID NO: 1340256 - DNA, 15 bp, Homo sapiens
aattcctgcagcttg

SEQ ID NO: 1340257 - DNA, 15 bp, Homo sapiens
aaattcctgcagctt

SEQ ID NO: 1340258 - DNA, 15 bp, Homo sapiens
aaaattcctgcagct

SEQ ID NO: 1340259 - DNA, 15 bp, Homo sapiens
aaaaattcctgcagc

SEQ ID NO: 1340260 - DNA, 15 bp, Homo sapiens
aaaaaattcctgcag

SEQ ID NO: 1340261 - DNA, 15 bp, Homo sapiens
aaaaaaattcctgca

SEQ ID NO: 1340262 - DNA, 15 bp, Homo sapiens
aaaaaaaattcctgc

SEQ ID NO: 1340263 - DNA, 15 bp, Homo sapiens
gaaaaaaaattcctg

SEQ ID NO: 1340264 - DNA, 15 bp, Homo sapiens
tgaaaaaaaattcct

SEQ ID NO: 1340265 - DNA, 15 bp, Homo sapiens
atgaaaaaaaattcc

SEQ ID NO: 1340266 - DNA, 15 bp, Homo sapiens
tatgaaaaaaaattc

SEQ ID NO: 1340267 - DNA, 15 bp, Homo sapiens
gtatgaaaaaaaatt

SEQ ID NO: 1340268 - DNA, 15 bp, Homo sapiens
ggtatgaaaaaaaat

SEQ ID NO: 1340269 - DNA, 15 bp, Homo sapiens
gggtatgaaaaaaaa

SEQ ID NO: 1340270 - DNA, 15 bp, Homo sapiens
ggggtatgaaaaaaa

SEQ ID NO: 1340271 - DNA, 15 bp, Homo sapiens
tggggtatgaaaaaa

SEQ ID NO: 1340272 - DNA, 15 bp, Homo sapiens
ctggggtatgaaaaa

SEQ ID NO: 1340273 - DNA, 15 bp, Homo sapiens
actggggtatgaaaa

SEQ ID NO: 1340274 - DNA, 15 bp, Homo sapiens
cactggggtatgaaa

SEQ ID NO: 1340275 - DNA, 15 bp, Homo sapiens
ccactggggtatgaa

SEQ ID NO: 1340276 - DNA, 15 bp, Homo sapiens
accactggggtatga

SEQ ID NO: 1340277 - DNA, 15 bp, Homo sapiens
caccactggggtatg

SEQ ID NO: 1340278 - DNA, 15 bp, Homo sapiens
gcaccactggggtat

SEQ ID NO: 1340279 - DNA, 15 bp, Homo sapiens
ggcaccactggggta

SEQ ID NO: 1340280 - DNA, 15 bp, Homo sapiens
aggcaccactggggt

SEQ ID NO: 1340281 - DNA, 15 bp, Homo sapiens
caggcaccactgggg

SEQ ID NO: 1340282 - DNA, 15 bp, Homo sapiens
ccaggcaccactggg

SEQ ID NO: 1340283 - DNA, 15 bp, Homo sapiens
tccaggcaccactgg

SEQ ID NO: 1340284 - DNA, 15 bp, Homo sapiens
ttccaggcaccactg

SEQ ID NO: 1340285 - DNA, 15 bp, Homo sapiens
tttccaggcaccact

SEQ ID NO: 1340286 - DNA, 15 bp, Homo sapiens
ttttccaggcaccac

SEQ ID NO: 1340287 - DNA, 15 bp, Homo sapiens
gttttccaggcacca

SEQ ID NO: 1340288 - DNA, 15 bp, Homo sapiens
ggttttccaggcacc

SEQ ID NO: 1340289 - DNA, 15 bp, Homo sapiens
tggttttccaggcac

SEQ ID NO: 1340290 - DNA, 15 bp, Homo sapiens
ctggttttccaggca

SEQ ID NO: 1340291 - DNA, 15 bp, Homo sapiens
gctggttttccaggc

SEQ ID NO: 1340292 - DNA, 15 bp, Homo sapiens
tgctggttttccagg

SEQ ID NO: 1340293 - DNA, 15 bp, Homo sapiens
ttgctggttttccag

SEQ ID NO: 1340294 - DNA, 15 bp, Homo sapiens
cttgctggttttcca

SEQ ID NO: 1340295 - DNA, 15 bp, Homo sapiens
tcttgctggttttcc

SEQ ID NO: 1340296 - DNA, 15 bp, Homo sapiens
gtcttgctggttttc

SEQ ID NO: 1340297 - DNA, 15 bp, Homo sapiens
tgtcttgctggtttt

SEQ ID NO: 1340298 - DNA, 15 bp, Homo sapiens
ttgtcttgctggttt

SEQ ID NO: 1340299 - DNA, 15 bp, Homo sapiens
tttgtcttgctggtt

SEQ ID NO: 1340300 - DNA, 15 bp, Homo sapiens
ttttgtcttgctggt

SEQ ID NO: 1340301 - DNA, 15 bp, Homo sapiens
gttttgtcttgctgg

SEQ ID NO: 1340302 - DNA, 15 bp, Homo sapiens
agttttgtcttgctg

SEQ ID NO: 1340303 - DNA, 15 bp, Homo sapiens
cagttttgtcttgct

SEQ ID NO: 1340304 - DNA, 15 bp, Homo sapiens
acagttttgtcttgc

SEQ ID NO: 1340305 - DNA, 15 bp, Homo sapiens
aacagttttgtcttg

SEQ ID NO: 1340306 - DNA, 15 bp, Homo sapiens
gaacagttttgtctt

SEQ ID NO: 1340307 - DNA, 15 bp, Homo sapiens
tgaacagttttgtct

SEQ ID NO: 1340308 - DNA, 15 bp, Homo sapiens
gtgaacagttttgtc

SEQ ID NO: 1340309 - DNA, 15 bp, Homo sapiens
agtgaacagttttgt

SEQ ID NO: 1340310 - DNA, 15 bp, Homo sapiens
gagtgaacagttttg

SEQ ID NO: 1340311 - DNA, 15 bp, Homo sapiens
agagtgaacagtttt

SEQ ID NO: 1340312 - DNA, 15 bp, Homo sapiens
gagagtgaacagttt

SEQ ID NO: 1340313 - DNA, 15 bp, Homo sapiens
ggagagtgaacagtt

SEQ ID NO: 1340314 - DNA, 15 bp, Homo sapiens
aggagagtgaacagt

SEQ ID NO: 1340315 - DNA, 15 bp, Homo sapiens
caggagagtgaacag

SEQ ID NO: 1340316 - DNA, 15 bp, Homo sapiens
ccaggagagtgaaca

SEQ ID NO: 1340317 - DNA, 15 bp, Homo sapiens
tccaggagagtgaac

SEQ ID NO: 1340318 - DNA, 15 bp, Homo sapiens
ttccaggagagtgaa

SEQ ID NO: 1340319 - DNA, 15 bp, Homo sapiens
tttccaggagagtga

SEQ ID NO: 1340320 - DNA, 15 bp, Homo sapiens
ctttccaggagagtg

SEQ ID NO: 1340321 - DNA, 15 bp, Homo sapiens
cctttccaggagagt

SEQ ID NO: 1340322 - DNA, 15 bp, Homo sapiens
ccctttccaggagag

SEQ ID NO: 1340323 - DNA, 15 bp, Homo sapiens
cccctttccaggaga

SEQ ID NO: 1340324 - DNA, 15 bp, Homo sapiens
ccccctttccaggag

SEQ ID NO: 1340325 - DNA, 15 bp, Homo sapiens
gccccctttccagga

SEQ ID NO: 1340326 - DNA, 15 bp, Homo sapiens
agccccctttccagg

SEQ ID NO: 1340327 - DNA, 15 bp, Homo sapiens
cagccccctttccag

SEQ ID NO: 1340328 - DNA, 15 bp, Homo sapiens
tcagccccctttcca

SEQ ID NO: 1340329 - DNA, 15 bp, Homo sapiens
ttcagccccctttcc

SEQ ID NO: 1340330 - DNA, 15 bp, Homo sapiens
cttcagccccctttc

SEQ ID NO: 1340331 - DNA, 15 bp, Homo sapiens
gcttcagcccccttt

SEQ ID NO: 1340332 - DNA, 15 bp, Homo sapiens
ggcttcagccccctt

SEQ ID NO: 1340333 - DNA, 15 bp, Homo sapiens
tggcttcagccccct

SEQ ID NO: 1340334 - DNA, 15 bp, Homo sapiens
ctggcttcagccccc

SEQ ID NO: 1340335 - DNA, 15 bp, Homo sapiens
cctggcttcagcccc

SEQ ID NO: 1340336 - DNA, 15 bp, Homo sapiens
ccctggcttcagccc

SEQ ID NO: 1340337 - DNA, 15 bp, Homo sapiens
tccctggcttcagcc

SEQ ID NO: 1340338 - DNA, 15 bp, Homo sapiens
ctccctggcttcagc

SEQ ID NO: 1340339 - DNA, 15 bp, Homo sapiens
gctccctggcttcag

SEQ ID NO: 1340340 - DNA, 15 bp, Homo sapiens
ggctccctggcttca

SEQ ID NO: 1340341 - DNA, 15 bp, Homo sapiens
tggctccctggcttc

SEQ ID NO: 1340342 - DNA, 15 bp, Homo sapiens
ttggctccctggctt

SEQ ID NO: 1340343 - DNA, 15 bp, Homo sapiens
cttggctccctggct

SEQ ID NO: 1340344 - DNA, 15 bp, Homo sapiens
acttggctccctggc

SEQ ID NO: 1340345 - DNA, 15 bp, Homo sapiens
cacttggctccctgg

SEQ ID NO: 1340346 - DNA, 15 bp, Homo sapiens
ccacttggctccctg

SEQ ID NO: 1340347 - DNA, 15 bp, Homo sapiens
accacttggctccct

SEQ ID NO: 1340348 - DNA, 15 bp, Homo sapiens
gaccacttggctccc

SEQ ID NO: 1340349 - DNA, 15 bp, Homo sapiens
agaccacttggctcc

SEQ ID NO: 1340350 - DNA, 15 bp, Homo sapiens
tagaccacttggctc

SEQ ID NO: 1340351 - DNA, 15 bp, Homo sapiens
ctagaccacttggct

SEQ ID NO: 1340352 - DNA, 15 bp, Homo sapiens
gctagaccacttggc

SEQ ID NO: 1340353 - DNA, 15 bp, Homo sapiens
agctagaccacttgg

SEQ ID NO: 1340354 - DNA, 15 bp, Homo sapiens
gagctagaccacttg

SEQ ID NO: 1340355 - DNA, 15 bp, Homo sapiens
tgagctagaccactt

SEQ ID NO: 1340356 - DNA, 15 bp, Homo sapiens
ctgagctagaccact

SEQ ID NO: 1340357 - DNA, 15 bp, Homo sapiens
gctgagctagaccac

SEQ ID NO: 1340358 - DNA, 15 bp, Homo sapiens
tgctgagctagacca

SEQ ID NO: 1340359 - DNA, 15 bp, Homo sapiens
ctgctgagctagacc

SEQ ID NO: 1340360 - DNA, 15 bp, Homo sapiens
tctgctgagctagac

SEQ ID NO: 1340361 - DNA, 15 bp, Homo sapiens
atctgctgagctaga

SEQ ID NO: 1340362 - DNA, 15 bp, Homo sapiens
gatctgctgagctag

SEQ ID NO: 1340363 - DNA, 15 bp, Homo sapiens
ggatctgctgagcta

SEQ ID NO: 1340364 - DNA, 15 bp, Homo sapiens
gggatctgctgagct

SEQ ID NO: 1340365 - DNA, 15 bp, Homo sapiens
tgggatctgctgagc

SEQ ID NO: 1340366 - DNA, 15 bp, Homo sapiens
gtgggatctgctgag

SEQ ID NO: 1340367 - DNA, 15 bp, Homo sapiens
ggtgggatctgctga

SEQ ID NO: 1340368 - DNA, 15 bp, Homo sapiens
gggtgggatctgctg

SEQ ID NO: 1340369 - DNA, 15 bp, Homo sapiens
ggggtgggatctgct

SEQ ID NO: 1340370 - DNA, 15 bp, Homo sapiens
gggggtgggatctgc

SEQ ID NO: 1340371 - DNA, 15 bp, Homo sapiens
tgggggtgggatctg

SEQ ID NO: 1340372 - DNA, 15 bp, Homo sapiens
atgggggtgggatct

SEQ ID NO: 1340373 - DNA, 15 bp, Homo sapiens
catgggggtgggatc

SEQ ID NO: 1340374 - DNA, 15 bp, Homo sapiens
ccatgggggtgggat

SEQ ID NO: 1340375 - DNA, 15 bp, Homo sapiens
tccatgggggtggga

SEQ ID NO: 1340376 - DNA, 15 bp, Homo sapiens
ctccatgggggtggg

SEQ ID NO: 1340377 - DNA, 15 bp, Homo sapiens
gctccatgggggtgg

SEQ ID NO: 1340378 - DNA, 15 bp, Homo sapiens
ggctccatgggggtg

SEQ ID NO: 1340379 - DNA, 15 bp, Homo sapiens
gggctccatgggggt

SEQ ID NO: 1340380 - DNA, 15 bp, Homo sapiens
tgggctccatggggg

SEQ ID NO: 1340381 - DNA, 15 bp, Homo sapiens
ctgggctccatgggg

SEQ ID NO: 1340382 - DNA, 15 bp, Homo sapiens
gctgggctccatggg

SEQ ID NO: 1340383 - DNA, 15 bp, Homo sapiens
tgctgggctccatgg

SEQ ID NO: 1340384 - DNA, 15 bp, Homo sapiens
ttgctgggctccatg

SEQ ID NO: 1340385 - DNA, 15 bp, Homo sapiens
cttgctgggctccat

SEQ ID NO: 1340386 - DNA, 15 bp, Homo sapiens
gcttgctgggctcca

SEQ ID NO: 1340387 - DNA, 15 bp, Homo sapiens
agcttgctgggctcc

SEQ ID NO: 1340388 - DNA, 15 bp, Homo sapiens
tagcttgctgggctc

SEQ ID NO: 1340389 - DNA, 15 bp, Homo sapiens
ttagcttgctgggct

SEQ ID NO: 1340390 - DNA, 15 bp, Homo sapiens
cttagcttgctgggc

SEQ ID NO: 1340391 - DNA, 15 bp, Homo sapiens
tcttagcttgctggg

SEQ ID NO: 1340392 - DNA, 15 bp, Homo sapiens
atcttagcttgctgg

SEQ ID NO: 1340393 - DNA, 15 bp, Homo sapiens
gatcttagcttgctg

SEQ ID NO: 1340394 - DNA, 15 bp, Homo sapiens
ggatcttagcttgct

SEQ ID NO: 1340395 - DNA, 15 bp, Homo sapiens
gggatcttagcttgc

SEQ ID NO: 1340396 - DNA, 15 bp, Homo sapiens
ggggatcttagcttg

SEQ ID NO: 1340397 - DNA, 15 bp, Homo sapiens
aggggatcttagctt

SEQ ID NO: 1340398 - DNA, 15 bp, Homo sapiens
caggggatcttagct

SEQ ID NO: 1340399 - DNA, 15 bp, Homo sapiens
ccaggggatcttagc

SEQ ID NO: 1340400 - DNA, 15 bp, Homo sapiens
gccaggggatcttag

SEQ ID NO: 1340401 - DNA, 15 bp, Homo sapiens
agccaggggatctta

SEQ ID NO: 1340402 - DNA, 15 bp, Homo sapiens
aagccaggggatctt

SEQ ID NO: 1340403 - DNA, 15 bp, Homo sapiens
caagccaggggatct

SEQ ID NO: 1340404 - DNA, 15 bp, Homo sapiens
tcaagccaggggatc

SEQ ID NO: 1340405 - DNA, 15 bp, Homo sapiens
ttcaagccaggggat

SEQ ID NO: 1340406 - DNA, 15 bp, Homo sapiens
tttcaagccagggga

SEQ ID NO: 1340407 - DNA, 15 bp, Homo sapiens
atttcaagccagggg

SEQ ID NO: 1340408 - DNA, 15 bp, Homo sapiens
aatttcaagccaggg

SEQ ID NO: 1340409 - DNA, 15 bp, Homo sapiens
gaatttcaagccagg

SEQ ID NO: 1340410 - DNA, 15 bp, Homo sapiens
agaatttcaagccag

SEQ ID NO: 1340411 - DNA, 15 bp, Homo sapiens
aagaatttcaagcca

SEQ ID NO: 1340412 - DNA, 15 bp, Homo sapiens
caagaatttcaagcc

SEQ ID NO: 1340413 - DNA, 15 bp, Homo sapiens
gcaagaatttcaagc

SEQ ID NO: 1340414 - DNA, 15 bp, Homo sapiens
agcaagaatttcaag

SEQ ID NO: 1340415 - DNA, 15 bp, Homo sapiens
cagcaagaatttcaa

SEQ ID NO: 1340416 - DNA, 15 bp, Homo sapiens
gcagcaagaatttca

SEQ ID NO: 1340417 - DNA, 15 bp, Homo sapiens
ggcagcaagaatttc

SEQ ID NO: 1340418 - DNA, 15 bp, Homo sapiens
tggcagcaagaattt

SEQ ID NO: 1340419 - DNA, 15 bp, Homo sapiens
ctggcagcaagaatt

SEQ ID NO: 1340420 - DNA, 15 bp, Homo sapiens
gctggcagcaagaat

SEQ ID NO: 1340421 - DNA, 15 bp, Homo sapiens
tgctggcagcaagaa

SEQ ID NO: 1340422 - DNA, 15 bp, Homo sapiens
gtgctggcagcaaga

SEQ ID NO: 1340423 - DNA, 15 bp, Homo sapiens
tgtgctggcagcaag

SEQ ID NO: 1340424 - DNA, 15 bp, Homo sapiens
ctgtgctggcagcaa

SEQ ID NO: 1340425 - DNA, 15 bp, Homo sapiens
gctgtgctggcagca

SEQ ID NO: 1340426 - DNA, 15 bp, Homo sapiens
tgctgtgctggcagc

SEQ ID NO: 1340427 - DNA, 15 bp, Homo sapiens
ctgctgtgctggcag

SEQ ID NO: 1340428 - DNA, 15 bp, Homo sapiens
actgctgtgctggca

SEQ ID NO: 1340429 - DNA, 15 bp, Homo sapiens
gactgctgtgctggc

SEQ ID NO: 1340430 - DNA, 15 bp, Homo sapiens
agactgctgtgctgg

SEQ ID NO: 1340431 - DNA, 15 bp, Homo sapiens
cagactgctgtgctg

SEQ ID NO: 1340432 - DNA, 15 bp, Homo sapiens
cttcagactgctgtg

SEQ ID NO: 1340433 - DNA, 15 bp, Homo sapiens
acttcagactgctgt

SEQ ID NO: 1340434 - DNA, 15 bp, Homo sapiens
gacttcagactgctg

SEQ ID NO: 1340435 - DNA, 15 bp, Homo sapiens
cgacttcagactgct

SEQ ID NO: 1340436 - DNA, 15 bp, Homo sapiens
tcgacttcagactgc

SEQ ID NO: 1340437 - DNA, 15 bp, Homo sapiens
gtcgacttcagactg

SEQ ID NO: 1340438 - DNA, 15 bp, Homo sapiens
ggtcgacttcagact

SEQ ID NO: 1340439 - DNA, 15 bp, Homo sapiens
aggtcgacttcagac

SEQ ID NO: 1340440 - DNA, 15 bp, Homo sapiens
caggtcgacttcaga

SEQ ID NO: 1340441 - DNA, 15 bp, Homo sapiens
ccaggtcgacttcag

SEQ ID NO: 1340442 - DNA, 15 bp, Homo sapiens
cccaggtcgacttca

SEQ ID NO: 1340443 - DNA, 15 bp, Homo sapiens
tcccaggtcgacttc

SEQ ID NO: 1340444 - DNA, 15 bp, Homo sapiens
ctcccaggtcgactt

SEQ ID NO: 1340445 - DNA, 15 bp, Homo sapiens
cctcccaggtcgact

SEQ ID NO: 1340446 - DNA, 15 bp, Homo sapiens
gcctcccaggtcgac

SEQ ID NO: 1340447 - DNA, 15 bp, Homo sapiens
agcctcccaggtcga

SEQ ID NO: 1340448 - DNA, 15 bp, Homo sapiens
gagcctcccaggtcg

SEQ ID NO: 1340449 - DNA, 15 bp, Homo sapiens
tgagcctcccaggtc

SEQ ID NO: 1340450 - DNA, 15 bp, Homo sapiens
ttgagcctcccaggt

SEQ ID NO: 1340451 - DNA, 15 bp, Homo sapiens
cttgagcctcccagg

SEQ ID NO: 1340452 - DNA, 15 bp, Homo sapiens
gcttgagcctcccag

SEQ ID NO: 1340453 - DNA, 15 bp, Homo sapiens
agcttgagcctccca

SEQ ID NO: 1340454 - DNA, 15 bp, Homo sapiens
aagcttgagcctccc

SEQ ID NO: 1340455 - DNA, 15 bp, Homo sapiens
caagcttgagcctcc

SEQ ID NO: 1340456 - DNA, 15 bp, Homo sapiens
ccaagcttgagcctc

SEQ ID NO: 1340457 - DNA, 15 bp, Homo sapiens
accaagcttgagcct

SEQ ID NO: 1340458 - DNA, 15 bp, Homo sapiens
taccaagcttgagcc

SEQ ID NO: 1340459 - DNA, 15 bp, Homo sapiens
ctaccaagcttgagc

SEQ ID NO: 1340460 - DNA, 15 bp, Homo sapiens
cctaccaagcttgag

SEQ ID NO: 1340461 - DNA, 15 bp, Homo sapiens
ccctaccaagcttga

SEQ ID NO: 1340462 - DNA, 15 bp, Homo sapiens
cccctaccaagcttg

SEQ ID NO: 1340463 - DNA, 15 bp, Homo sapiens
ccccctaccaagctt

SEQ ID NO: 1340464 - DNA, 15 bp, Homo sapiens
tccccctaccaagct

SEQ ID NO: 1340465 - DNA, 15 bp, Homo sapiens
ctccccctaccaagc

SEQ ID NO: 1340466 - DNA, 15 bp, Homo sapiens
cctccccctaccaag

SEQ ID NO: 1340467 - DNA, 15 bp, Homo sapiens
ccctccccctaccaa

SEQ ID NO: 1340468 - DNA, 15 bp, Homo sapiens
cccctccccctacca

SEQ ID NO: 1340469 - DNA, 15 bp, Homo sapiens
gcccctccccctacc

SEQ ID NO: 1340470 - DNA, 15 bp, Homo sapiens
tgcccctccccctac

SEQ ID NO: 1340471 - DNA, 15 bp, Homo sapiens
atgcccctcccccta

SEQ ID NO: 1340472 - DNA, 15 bp, Homo sapiens
gatgcccctccccct

SEQ ID NO: 1340473 - DNA, 15 bp, Homo sapiens
ggatgcccctccccc

SEQ ID NO: 1340474 - DNA, 15 bp, Homo sapiens
tggatgcccctcccc

SEQ ID NO: 1340475 - DNA, 15 bp, Homo sapiens
gtggatgcccctccc

SEQ ID NO: 1340476 - DNA, 15 bp, Homo sapiens
ggtggatgcccctcc

SEQ ID NO: 1340477 - DNA, 15 bp, Homo sapiens
tggtggatgcccctc

SEQ ID NO: 1340478 - DNA, 15 bp, Homo sapiens
atggtggatgcccct

SEQ ID NO: 1340479 - DNA, 15 bp, Homo sapiens
aatggtggatgcccc

SEQ ID NO: 1340480 - DNA, 15 bp, Homo sapiens
taatggtggatgccc

SEQ ID NO: 1340481 - DNA, 15 bp, Homo sapiens
gtaatggtggatgcc

SEQ ID NO: 1340482 - DNA, 15 bp, Homo sapiens
ggtaatggtggatgc

SEQ ID NO: 1340483 - DNA, 15 bp, Homo sapiens
tggtaatggtggatg

SEQ ID NO: 1340484 - DNA, 15 bp, Homo sapiens
ttggtaatggtggat

SEQ ID NO: 1340485 - DNA, 15 bp, Homo sapiens
cttggtaatggtgga

SEQ ID NO: 1340486 - DNA, 15 bp, Homo sapiens
ccttggtaatggtgg

SEQ ID NO: 1340487 - DNA, 15 bp, Homo sapiens
gccttggtaatggtg

SEQ ID NO: 1340488 - DNA, 15 bp, Homo sapiens
agccttggtaatggt

SEQ ID NO: 1340489 - DNA, 15 bp, Homo sapiens
aagccttggtaatgg

SEQ ID NO: 1340490 - DNA, 15 bp, Homo sapiens
caagccttggtaatg

SEQ ID NO: 1340491 - DNA, 15 bp, Homo sapiens
tcaagccttggtaat

SEQ ID NO: 1340492 - DNA, 15 bp, Homo sapiens
ctcaagccttggtaa

SEQ ID NO: 1340493 - DNA, 15 bp, Homo sapiens
actcaagccttggta

SEQ ID NO: 1340494 - DNA, 15 bp, Homo sapiens
tactcaagccttggt

SEQ ID NO: 1340495 - DNA, 15 bp, Homo sapiens
ctactcaagccttgg

SEQ ID NO: 1340496 - DNA, 15 bp, Homo sapiens
cctactcaagccttg

SEQ ID NO: 1340497 - DNA, 15 bp, Homo sapiens
gcctactcaagcctt

SEQ ID NO: 1340498 - DNA, 15 bp, Homo sapiens
tgcctactcaagcct

SEQ ID NO: 1340499 - DNA, 15 bp, Homo sapiens
ttgcctactcaagcc

SEQ ID NO: 1340500 - DNA, 15 bp, Homo sapiens
attgcctactcaagc

SEQ ID NO: 1340501 - DNA, 15 bp, Homo sapiens
aattgcctactcaag

SEQ ID NO: 1340502 - DNA, 15 bp, Homo sapiens
aaattgcctactcaa

SEQ ID NO: 1340503 - DNA, 15 bp, Homo sapiens
aaaattgcctactca

SEQ ID NO: 1340504 - DNA, 15 bp, Homo sapiens
gaaaattgcctactc

SEQ ID NO: 1340505 - DNA, 15 bp, Homo sapiens
ggaaaattgcctact

SEQ ID NO: 1340506 - DNA, 15 bp, Homo sapiens
gggaaaattgcctac

SEQ ID NO: 1340507 - DNA, 15 bp, Homo sapiens
ggggaaaattgccta

SEQ ID NO: 1340508 - DNA, 15 bp, Homo sapiens
aggggaaaattgcct

SEQ ID NO: 1340509 - DNA, 15 bp, Homo sapiens
gaggggaaaattgcc

SEQ ID NO: 1340510 - DNA, 15 bp, Homo sapiens
tgaggggaaaattgc

SEQ ID NO: 1340511 - DNA, 15 bp, Homo sapiens
gtgaggggaaaattg

SEQ ID NO: 1340512 - DNA, 15 bp, Homo sapiens
tgtgaggggaaaatt

SEQ ID NO: 1340513 - DNA, 15 bp, Homo sapiens
ctgtgaggggaaaat

SEQ ID NO: 1340514 - DNA, 15 bp, Homo sapiens
actgtgaggggaaaa

SEQ ID NO: 1340515 - DNA, 15 bp, Homo sapiens
cactgtgaggggaaa

SEQ ID NO: 1340516 - DNA, 15 bp, Homo sapiens
acactgtgaggggaa

SEQ ID NO: 1340517 - DNA, 15 bp, Homo sapiens
tacactgtgagggga

SEQ ID NO: 1340518 - DNA, 15 bp, Homo sapiens
ttacactgtgagggg

SEQ ID NO: 1340519 - DNA, 15 bp, Homo sapiens
tttacactgtgaggg

SEQ ID NO: 1340520 - DNA, 15 bp, Homo sapiens
gtttacactgtgagg

SEQ ID NO: 1340521 - DNA, 15 bp, Homo sapiens
tgtttacactgtgag

SEQ ID NO: 1340522 - DNA, 15 bp, Homo sapiens
ttgtttacactgtga

SEQ ID NO: 1340523 - DNA, 15 bp, Homo sapiens
tttgtttacactgtg

SEQ ID NO: 1340524 - DNA, 15 bp, Homo sapiens
ctttgtttacactgt

SEQ ID NO: 1340525 - DNA, 15 bp, Homo sapiens
gctttgtttacactg

SEQ ID NO: 1340526 - DNA, 15 bp, Homo sapiens
ggctttgtttacact

SEQ ID NO: 1340527 - DNA, 15 bp, Homo sapiens
tggctttgtttacac

SEQ ID NO: 1340528 - DNA, 15 bp, Homo sapiens
gtggctttgtttaca

SEQ ID NO: 1340529 - DNA, 15 bp, Homo sapiens
ggtggctttgtttac

SEQ ID NO: 1340530 - DNA, 15 bp, Homo sapiens
gggtggctttgttta

SEQ ID NO: 1340531 - DNA, 15 bp, Homo sapiens
cgggtggctttgttt

SEQ ID NO: 1340532 - DNA, 15 bp, Homo sapiens
ccgggtggctttgtt

SEQ ID NO: 1340533 - DNA, 15 bp, Homo sapiens
tccgggtggctttgt

SEQ ID NO: 1340534 - DNA, 15 bp, Homo sapiens
ttccgggtggctttg

SEQ ID NO: 1340535 - DNA, 15 bp, Homo sapiens
cttccgggtggcttt

SEQ ID NO: 1340536 - DNA, 15 bp, Homo sapiens
acttccgggtggctt

SEQ ID NO: 1340537 - DNA, 15 bp, Homo sapiens
aacttccgggtggct

SEQ ID NO: 1340538 - DNA, 15 bp, Homo sapiens
gaacttccgggtggc

SEQ ID NO: 1340539 - DNA, 15 bp, Homo sapiens
tgaacttccgggtgg

SEQ ID NO: 1340540 - DNA, 15 bp, Homo sapiens
ttgaacttccgggtg

SEQ ID NO: 1340541 - DNA, 15 bp, Homo sapiens
tttgaacttccgggt

SEQ ID NO: 1340542 - DNA, 15 bp, Homo sapiens
gtttgaacttccggg

SEQ ID NO: 1340543 - DNA, 15 bp, Homo sapiens
tgtttgaacttccgg

SEQ ID NO: 1340544 - DNA, 15 bp, Homo sapiens
ctgtttgaacttccg

SEQ ID NO: 1340545 - DNA, 15 bp, Homo sapiens
cctgtttgaacttcc

SEQ ID NO: 1340546 - DNA, 15 bp, Homo sapiens
ccctgtttgaacttc

SEQ ID NO: 1340547 - DNA, 15 bp, Homo sapiens
gccctgtttgaactt

SEQ ID NO: 1340548 - DNA, 15 bp, Homo sapiens
tgccctgtttgaact

SEQ ID NO: 1340549 - DNA, 15 bp, Homo sapiens
ctgccctgtttgaac

SEQ ID NO: 1340550 - DNA, 15 bp, Homo sapiens
tctgccctgtttgaa

SEQ ID NO: 1340551 - DNA, 15 bp, Homo sapiens
ctctgccctgtttga

SEQ ID NO: 1340552 - DNA, 15 bp, Homo sapiens
gctctgccctgtttg

SEQ ID NO: 1340553 - DNA, 15 bp, Homo sapiens
ggctctgccctgttt

SEQ ID NO: 1340554 - DNA, 15 bp, Homo sapiens
gggctctgccctgtt

SEQ ID NO: 1340555 - DNA, 15 bp, Homo sapiens
tgggctctgccctgt

SEQ ID NO: 1340556 - DNA, 15 bp, Homo sapiens
gtgggctctgccctg

SEQ ID NO: 1340557 - DNA, 15 bp, Homo sapiens
ggtgggctctgccct

SEQ ID NO: 1340558 - DNA, 15 bp, Homo sapiens
tggtgggctctgccc

SEQ ID NO: 1340559 - DNA, 15 bp, Homo sapiens
gtggtgggctctgcc

SEQ ID NO: 1340560 - DNA, 15 bp, Homo sapiens
tgtggtgggctctgc

SEQ ID NO: 1340561 - DNA, 15 bp, Homo sapiens
gtgtggtgggctctg

SEQ ID NO: 1340562 - DNA, 15 bp, Homo sapiens
ggtgtggtgggctct

SEQ ID NO: 1340563 - DNA, 15 bp, Homo sapiens
aggtgtggtgggctc

SEQ ID NO: 1340564 - DNA, 15 bp, Homo sapiens
aaggtgtggtgggct

SEQ ID NO: 1340565 - DNA, 15 bp, Homo sapiens
caaggtgtggtgggc

SEQ ID NO: 1340566 - DNA, 15 bp, Homo sapiens
ccaaggtgtggtggg

SEQ ID NO: 1340567 - DNA, 15 bp, Homo sapiens
gccaaggtgtggtgg

SEQ ID NO: 1340568 - DNA, 15 bp, Homo sapiens
tgccaaggtgtggtg

SEQ ID NO: 1340569 - DNA, 15 bp, Homo sapiens
ttgccaaggtgtggt

SEQ ID NO: 1340570 - DNA, 15 bp, Homo sapiens
tttgccaaggtgtgg

SEQ ID NO: 1340571 - DNA, 15 bp, Homo sapiens
ctttgccaaggtgtg

SEQ ID NO: 1340572 - DNA, 15 bp, Homo sapiens
gctttgccaaggtgt

SEQ ID NO: 1340573 - DNA, 15 bp, Homo sapiens
ggctttgccaaggtg

SEQ ID NO: 1340574 - DNA, 15 bp, Homo sapiens
cggctttgccaaggt

SEQ ID NO: 1340575 - DNA, 15 bp, Homo sapiens
gcggctttgccaagg

SEQ ID NO: 1340576 - DNA, 15 bp, Homo sapiens
agcggctttgccaag

SEQ ID NO: 1340577 - DNA, 15 bp, Homo sapiens
cagcggctttgccaa

SEQ ID NO: 1340578 - DNA, 15 bp, Homo sapiens
acagcggctttgcca

SEQ ID NO: 1340579 - DNA, 15 bp, Homo sapiens
tacagcggctttgcc

SEQ ID NO: 1340580 - DNA, 15 bp, Homo sapiens
ctacagcggctttgc

SEQ ID NO: 1340581 - DNA, 15 bp, Homo sapiens
gctacagcggctttg

SEQ ID NO: 1340582 - DNA, 15 bp, Homo sapiens
ggctacagcggcttt

SEQ ID NO: 1340583 - DNA, 15 bp, Homo sapiens
tggctacagcggctt

SEQ ID NO: 1340584 - DNA, 15 bp, Homo sapiens
ctggctacagcggct

SEQ ID NO: 1340585 - DNA, 15 bp, Homo sapiens
tctggctacagcggc

SEQ ID NO: 1340586 - DNA, 15 bp, Homo sapiens
gtctggctacagcgg

SEQ ID NO: 1340587 - DNA, 15 bp, Homo sapiens
agtctggctacagcg

SEQ ID NO: 1340588 - DNA, 15 bp, Homo sapiens
cagtctggctacagc

SEQ ID NO: 1340589 - DNA, 15 bp, Homo sapiens
gcagtctggctacag

SEQ ID NO: 1340590 - DNA, 15 bp, Homo sapiens
ggcagtctggctaca

SEQ ID NO: 1340591 - DNA, 15 bp, Homo sapiens
aggcagtctggctac

SEQ ID NO: 1340592 - DNA, 15 bp, Homo sapiens
caggcagtctggcta

SEQ ID NO: 1340593 - DNA, 15 bp, Homo sapiens
acaggcagtctggct

SEQ ID NO: 1340594 - DNA, 15 bp, Homo sapiens
gacaggcagtctggc

SEQ ID NO: 1340595 - DNA, 15 bp, Homo sapiens
agacaggcagtctgg

SEQ ID NO: 1340596 - DNA, 15 bp, Homo sapiens
tagacaggcagtctg

SEQ ID NO: 1340597 - DNA, 15 bp, Homo sapiens
ctagacaggcagtct

SEQ ID NO: 1340598 - DNA, 15 bp, Homo sapiens
tctagacaggcagtc

SEQ ID NO: 1340599 - DNA, 15 bp, Homo sapiens
atctagacaggcagt

SEQ ID NO: 1340600 - DNA, 15 bp, Homo sapiens
aatctagacaggcag

SEQ ID NO: 1340601 - DNA, 15 bp, Homo sapiens
gaatctagacaggca

SEQ ID NO: 1340602 - DNA, 15 bp, Homo sapiens
tgaatctagacaggc

SEQ ID NO: 1340603 - DNA, 15 bp, Homo sapiens
atgaatctagacagg

SEQ ID NO: 1340604 - DNA, 15 bp, Homo sapiens
gatgaatctagacag

SEQ ID NO: 1340605 - DNA, 15 bp, Homo sapiens
ggatgaatctagaca

SEQ ID NO: 1340606 - DNA, 15 bp, Homo sapiens
aggatgaatctagac

SEQ ID NO: 1340607 - DNA, 15 bp, Homo sapiens
gaggatgaatctaga

SEQ ID NO: 1340608 - DNA, 15 bp, Homo sapiens
ggaggatgaatctag

SEQ ID NO: 1340609 - DNA, 15 bp, Homo sapiens
gggaggatgaatcta

SEQ ID NO: 1340610 - DNA, 15 bp, Homo sapiens
agggaggatgaatct

SEQ ID NO: 1340611 - DNA, 15 bp, Homo sapiens
cagggaggatgaatc

SEQ ID NO: 1340612 - DNA, 15 bp, Homo sapiens
ccagggaggatgaat

SEQ ID NO: 1340613 - DNA, 15 bp, Homo sapiens
cccagggaggatgaa

SEQ ID NO: 1340614 - DNA, 15 bp, Homo sapiens
gcccagggaggatga

SEQ ID NO: 1340615 - DNA, 15 bp, Homo sapiens
tgcccagggaggatg

SEQ ID NO: 1340616 - DNA, 15 bp, Homo sapiens
ctgcccagggaggat

SEQ ID NO: 1340617 - DNA, 15 bp, Homo sapiens
cctgcccagggagga

SEQ ID NO: 1340618 - DNA, 15 bp, Homo sapiens
ccctgcccagggagg

SEQ ID NO: 1340619 - DNA, 15 bp, Homo sapiens
gccctgcccagggag

SEQ ID NO: 1340620 - DNA, 15 bp, Homo sapiens
atgccctgcccaggg

SEQ ID NO: 1340621 - DNA, 15 bp, Homo sapiens
gatgccctgcccagg

SEQ ID NO: 1340622 - DNA, 15 bp, Homo sapiens
agatgccctgcccag

SEQ ID NO: 1340623 - DNA, 15 bp, Homo sapiens
gagatgccctgccca

SEQ ID NO: 1340624 - DNA, 15 bp, Homo sapiens
agagatgccctgccc

SEQ ID NO: 1340625 - DNA, 15 bp, Homo sapiens
cagagatgccctgcc

SEQ ID NO: 1340626 - DNA, 15 bp, Homo sapiens
tcagagatgccctgc

SEQ ID NO: 1340627 - DNA, 15 bp, Homo sapiens
ttcagagatgccctg

SEQ ID NO: 1340628 - DNA, 15 bp, Homo sapiens
tttcagagatgccct

SEQ ID NO: 1340629 - DNA, 15 bp, Homo sapiens
ctttcagagatgccc

SEQ ID NO: 1340630 - DNA, 15 bp, Homo sapiens
tctttcagagatgcc

SEQ ID NO: 1340631 - DNA, 15 bp, Homo sapiens
ttctttcagagatgc

SEQ ID NO: 1340632 - DNA, 15 bp, Homo sapiens
tttctttcagagatg

SEQ ID NO: 1340633 - DNA, 15 bp, Homo sapiens
ctttctttcagagat

SEQ ID NO: 1340634 - DNA, 15 bp, Homo sapiens
cctttctttcagaga

SEQ ID NO: 1340635 - DNA, 15 bp, Homo sapiens
gcctttctttcagag

SEQ ID NO: 1340636 - DNA, 15 bp, Homo sapiens
tgcctttctttcaga

SEQ ID NO: 1340637 - DNA, 15 bp, Homo sapiens
ctgcctttctttcag

SEQ ID NO: 1340638 - DNA, 15 bp, Homo sapiens
gctgcctttctttca

SEQ ID NO: 1340639 - DNA, 15 bp, Homo sapiens
tgctgcctttctttc

SEQ ID NO: 1340640 - DNA, 15 bp, Homo sapiens
ctgctgcctttcttt

SEQ ID NO: 1340641 - DNA, 15 bp, Homo sapiens
gctgctgcctttctt

SEQ ID NO: 1340642 - DNA, 15 bp, Homo sapiens
ggctgctgcctttct

SEQ ID NO: 1340643 - DNA, 15 bp, Homo sapiens
gggctgctgcctttc

SEQ ID NO: 1340644 - DNA, 15 bp, Homo sapiens
ggggctgctgccttt

SEQ ID NO: 1340645 - DNA, 15 bp, Homo sapiens
tggggctgctgcctt

SEQ ID NO: 1340646 - DNA, 15 bp, Homo sapiens
ctggggctgctgcct

SEQ ID NO: 1340647 - DNA, 15 bp, Homo sapiens
tctggggctgctgcc

SEQ ID NO: 1340648 - DNA, 15 bp, Homo sapiens
gtctggggctgctgc

SEQ ID NO: 1340649 - DNA, 15 bp, Homo sapiens
tgtctggggctgctg

SEQ ID NO: 1340650 - DNA, 15 bp, Homo sapiens
ctgtctggggctgct

SEQ ID NO: 1340651 - DNA, 15 bp, Homo sapiens
cctgtctggggctgc

SEQ ID NO: 1340652 - DNA, 15 bp, Homo sapiens
ccctgtctggggctg

SEQ ID NO: 1340653 - DNA, 15 bp, Homo sapiens
cccctgtctggggct

SEQ ID NO: 1340654 - DNA, 15 bp, Homo sapiens
gcccctgtctggggc

SEQ ID NO: 1340655 - DNA, 15 bp, Homo sapiens
agcccctgtctgggg

SEQ ID NO: 1340656 - DNA, 15 bp, Homo sapiens
aagcccctgtctggg

SEQ ID NO: 1340657 - DNA, 15 bp, Homo sapiens
taagcccctgtctgg

SEQ ID NO: 1340658 - DNA, 15 bp, Homo sapiens
ataagcccctgtctg

SEQ ID NO: 1340659 - DNA, 15 bp, Homo sapiens
tataagcccctgtct

SEQ ID NO: 1340660 - DNA, 15 bp, Homo sapiens
gtataagcccctgtc

SEQ ID NO: 1340661 - DNA, 15 bp, Homo sapiens
ggtataagcccctgt

SEQ ID NO: 1340662 - DNA, 15 bp, Homo sapiens
aggtataagcccctg

SEQ ID NO: 1340663 - DNA, 15 bp, Homo sapiens
taggtataagcccct

SEQ ID NO: 1340664 - DNA, 15 bp, Homo sapiens
ttaggtataagcccc

SEQ ID NO: 1340665 - DNA, 15 bp, Homo sapiens
tttaggtataagccc

SEQ ID NO: 1340666 - DNA, 15 bp, Homo sapiens
ttttaggtataagcc

SEQ ID NO: 1340667 - DNA, 15 bp, Homo sapiens
gttttaggtataagc

SEQ ID NO: 1340668 - DNA, 15 bp, Homo sapiens
agttttaggtataag

SEQ ID NO: 1340669 - DNA, 15 bp, Homo sapiens
gagttttaggtataa

SEQ ID NO: 1340670 - DNA, 15 bp, Homo sapiens
ggagttttaggtata

SEQ ID NO: 1340671 - DNA, 15 bp, Homo sapiens
gggagttttaggtat

SEQ ID NO: 1340672 - DNA, 15 bp, Homo sapiens
cgggagttttaggta

SEQ ID NO: 1340673 - DNA, 15 bp, Homo sapiens
acgggagttttaggt

SEQ ID NO: 1340674 - DNA, 15 bp, Homo sapiens
aacgggagttttagg

SEQ ID NO: 1340675 - DNA, 15 bp, Homo sapiens
aaacgggagttttag

SEQ ID NO: 1340676 - DNA, 15 bp, Homo sapiens
gaaacgggagtttta

SEQ ID NO: 1340677 - DNA, 15 bp, Homo sapiens
ggaaacgggagtttt

SEQ ID NO: 1340678 - DNA, 15 bp, Homo sapiens
gggaaacgggagttt

SEQ ID NO: 1340679 - DNA, 15 bp, Homo sapiens
agggaaacgggagtt

SEQ ID NO: 1340680 - DNA, 15 bp, Homo sapiens
cagggaaacgggagt

SEQ ID NO: 1340681 - DNA, 15 bp, Homo sapiens
ccagggaaacgggag

SEQ ID NO: 1340682 - DNA, 15 bp, Homo sapiens
cccagggaaacggga

SEQ ID NO: 1340683 - DNA, 15 bp, Homo sapiens
tcccagggaaacggg

SEQ ID NO: 1340684 - DNA, 15 bp, Homo sapiens
gtcccagggaaacgg

SEQ ID NO: 1340685 - DNA, 15 bp, Homo sapiens
tgtcccagggaaacg

SEQ ID NO: 1340686 - DNA, 15 bp, Homo sapiens
ctgtcccagggaaac

SEQ ID NO: 1340687 - DNA, 15 bp, Homo sapiens
tctgtcccagggaaa

SEQ ID NO: 1340688 - DNA, 15 bp, Homo sapiens
ctctgtcccagggaa

SEQ ID NO: 1340689 - DNA, 15 bp, Homo sapiens
gctctgtcccaggga

SEQ ID NO: 1340690 - DNA, 15 bp, Homo sapiens
tgctctgtcccaggg

SEQ ID NO: 1340691 - DNA, 15 bp, Homo sapiens
gtgctctgtcccagg

SEQ ID NO: 1340692 - DNA, 15 bp, Homo sapiens
ggtgctctgtcccag

SEQ ID NO: 1340693 - DNA, 15 bp, Homo sapiens
aggtgctctgtccca

SEQ ID NO: 1340694 - DNA, 15 bp, Homo sapiens
caggtgctctgtccc

SEQ ID NO: 1340695 - DNA, 15 bp, Homo sapiens
ccaggtgctctgtcc

SEQ ID NO: 1340696 - DNA, 15 bp, Homo sapiens
cccaggtgctctgtc

SEQ ID NO: 1340697 - DNA, 15 bp, Homo sapiens
ccccaggtgctctgt

SEQ ID NO: 1340698 - DNA, 15 bp, Homo sapiens
cccccaggtgctctg

SEQ ID NO: 1340699 - DNA, 15 bp, Homo sapiens
tcccccaggtgctct

SEQ ID NO: 1340700 - DNA, 15 bp, Homo sapiens
ttcccccaggtgctc

SEQ ID NO: 1340701 - DNA, 15 bp, Homo sapiens
cttcccccaggtgct

SEQ ID NO: 1340702 - DNA, 15 bp, Homo sapiens
ccttcccccaggtgc

SEQ ID NO: 1340703 - DNA, 15 bp, Homo sapiens
cccttcccccaggtg

SEQ ID NO: 1340704 - DNA, 15 bp, Homo sapiens
ccccttcccccaggt

SEQ ID NO: 1340705 - DNA, 15 bp, Homo sapiens
gccccttcccccagg

SEQ ID NO: 1340706 - DNA, 15 bp, Homo sapiens
tgccccttcccccag

SEQ ID NO: 1340707 - DNA, 15 bp, Homo sapiens
ctgccccttccccca

SEQ ID NO: 1340708 - DNA, 15 bp, Homo sapiens
gctgccccttccccc

SEQ ID NO: 1340709 - DNA, 15 bp, Homo sapiens
agctgccccttcccc

SEQ ID NO: 1340710 - DNA, 15 bp, Homo sapiens
cagctgccccttccc

SEQ ID NO: 1340711 - DNA, 15 bp, Homo sapiens
acagctgccccttcc

SEQ ID NO: 1340712 - DNA, 15 bp, Homo sapiens
cacagctgccccttc

SEQ ID NO: 1340713 - DNA, 15 bp, Homo sapiens
ccacagctgcccctt

SEQ ID NO: 1340714 - DNA, 15 bp, Homo sapiens
cccacagctgcccct

SEQ ID NO: 1340715 - DNA, 15 bp, Homo sapiens
acccacagctgcccc

SEQ ID NO: 1340716 - DNA, 15 bp, Homo sapiens
cacccacagctgccc

SEQ ID NO: 1340717 - DNA, 15 bp, Homo sapiens
gcacccacagctgcc

SEQ ID NO: 1340718 - DNA, 15 bp, Homo sapiens
gctgcacccacagct

SEQ ID NO: 1340719 - DNA, 15 bp, Homo sapiens
ggctgcacccacagc

SEQ ID NO: 1340720 - DNA, 15 bp, Homo sapiens
aggctgcacccacag

SEQ ID NO: 1340721 - DNA, 15 bp, Homo sapiens
gaggctgcacccaca

SEQ ID NO: 1340722 - DNA, 15 bp, Homo sapiens
tgaggctgcacccac

SEQ ID NO: 1340723 - DNA, 15 bp, Homo sapiens
ctgaggctgcaccca

SEQ ID NO: 1340724 - DNA, 15 bp, Homo sapiens
gctgaggctgcaccc

SEQ ID NO: 1340725 - DNA, 15 bp, Homo sapiens
tgctgaggctgcacc

SEQ ID NO: 1340726 - DNA, 15 bp, Homo sapiens
ctgctgaggctgcac

SEQ ID NO: 1340727 - DNA, 15 bp, Homo sapiens
tctgctgaggctgca

SEQ ID NO: 1340728 - DNA, 15 bp, Homo sapiens
gtctgctgaggctgc

SEQ ID NO: 1340729 - DNA, 15 bp, Homo sapiens
agtctgctgaggctg

SEQ ID NO: 1340730 - DNA, 15 bp, Homo sapiens
aagtctgctgaggct

SEQ ID NO: 1340731 - DNA, 15 bp, Homo sapiens
taagtctgctgaggc

SEQ ID NO: 1340732 - DNA, 15 bp, Homo sapiens
ttaagtctgctgagg

SEQ ID NO: 1340733 - DNA, 15 bp, Homo sapiens
tttaagtctgctgag

SEQ ID NO: 1340734 - DNA, 15 bp, Homo sapiens
atttaagtctgctga

SEQ ID NO: 1340735 - DNA, 15 bp, Homo sapiens
tatttaagtctgctg

SEQ ID NO: 1340736 - DNA, 15 bp, Homo sapiens
atatttaagtctgct

SEQ ID NO: 1340737 - DNA, 15 bp, Homo sapiens
aatatttaagtctgc

SEQ ID NO: 1340738 - DNA, 15 bp, Homo sapiens
gaatatttaagtctg

SEQ ID NO: 1340739 - DNA, 15 bp, Homo sapiens
ggaatatttaagtct

SEQ ID NO: 1340740 - DNA, 15 bp, Homo sapiens
aggaatatttaagtc

SEQ ID NO: 1340741 - DNA, 15 bp, Homo sapiens
caggaatatttaagt

SEQ ID NO: 1340742 - DNA, 15 bp, Homo sapiens
tcaggaatatttaag

SEQ ID NO: 1340743 - DNA, 15 bp, Homo sapiens
gtcaggaatatttaa

SEQ ID NO: 1340744 - DNA, 15 bp, Homo sapiens
agtcaggaatattta

SEQ ID NO: 1340745 - DNA, 15 bp, Homo sapiens
cagtcaggaatattt

SEQ ID NO: 1340746 - DNA, 15 bp, Homo sapiens
gcagtcaggaatatt

SEQ ID NO: 1340747 - DNA, 15 bp, Homo sapiens
ggcagtcaggaatat

SEQ ID NO: 1340748 - DNA, 15 bp, Homo sapiens
tggcagtcaggaata

SEQ ID NO: 1340749 - DNA, 15 bp, Homo sapiens
ctggcagtcaggaat

SEQ ID NO: 1340750 - DNA, 15 bp, Homo sapiens
gctggcagtcaggaa

SEQ ID NO: 1340751 - DNA, 15 bp, Homo sapiens
agctggcagtcagga

SEQ ID NO: 1340752 - DNA, 15 bp, Homo sapiens
gagctggcagtcagg

SEQ ID NO: 1340753 - DNA, 15 bp, Homo sapiens
agagctggcagtcag

SEQ ID NO: 1340754 - DNA, 15 bp, Homo sapiens
cagagctggcagtca

SEQ ID NO: 1340755 - DNA, 15 bp, Homo sapiens
tcagagctggcagtc

SEQ ID NO: 1340756 - DNA, 15 bp, Homo sapiens
ttcagagctggcagt

SEQ ID NO: 1340757 - DNA, 15 bp, Homo sapiens
cttcagagctggcag

SEQ ID NO: 1340758 - DNA, 15 bp, Homo sapiens
tcttcagagctggca

SEQ ID NO: 1340759 - DNA, 15 bp, Homo sapiens
ctcttcagagctggc

SEQ ID NO: 1340760 - DNA, 15 bp, Homo sapiens
tctcttcagagctgg

SEQ ID NO: 1340761 - DNA, 15 bp, Homo sapiens
ctctcttcagagctg

SEQ ID NO: 1340762 - DNA, 15 bp, Homo sapiens
gctctcttcagagct

SEQ ID NO: 1340763 - DNA, 15 bp, Homo sapiens
cgctctcttcagagc

SEQ ID NO: 1340764 - DNA, 15 bp, Homo sapiens
ccgctctcttcagag

SEQ ID NO: 1340765 - DNA, 15 bp, Homo sapiens
tccgctctcttcaga

SEQ ID NO: 1340766 - DNA, 15 bp, Homo sapiens
ctccgctctcttcag

SEQ ID NO: 1340767 - DNA, 15 bp, Homo sapiens
cctccgctctcttca

SEQ ID NO: 1340768 - DNA, 15 bp, Homo sapiens
tcctccgctctcttc

SEQ ID NO: 1340769 - DNA, 15 bp, Homo sapiens
atcctccgctctctt

SEQ ID NO: 1340770 - DNA, 15 bp, Homo sapiens
gatcctccgctctct

SEQ ID NO: 1340771 - DNA, 15 bp, Homo sapiens
agatcctccgctctc

SEQ ID NO: 1340772 - DNA, 15 bp, Homo sapiens
gagatcctccgctct

SEQ ID NO: 1340773 - DNA, 15 bp, Homo sapiens
ggagatcctccgctc

SEQ ID NO: 1340774 - DNA, 15 bp, Homo sapiens
gggagatcctccgct

SEQ ID NO: 1340775 - DNA, 15 bp, Homo sapiens
tgggagatcctccgc

SEQ ID NO: 1340776 - DNA, 15 bp, Homo sapiens
ctgggagatcctccg

SEQ ID NO: 1340777 - DNA, 15 bp, Homo sapiens
gctgggagatcctcc

SEQ ID NO: 1340778 - DNA, 15 bp, Homo sapiens
agctgggagatcctc

SEQ ID NO: 1340779 - DNA, 15 bp, Homo sapiens
gagctgggagatcct

SEQ ID NO: 1340780 - DNA, 15 bp, Homo sapiens
tgagctgggagatcc

SEQ ID NO: 1340781 - DNA, 15 bp, Homo sapiens
ctgagctgggagatc

SEQ ID NO: 1340782 - DNA, 15 bp, Homo sapiens
actgagctgggagat

SEQ ID NO: 1340783 - DNA, 15 bp, Homo sapiens
cactgagctgggaga

SEQ ID NO: 1340784 - DNA, 15 bp, Homo sapiens
gcactgagctgggag

SEQ ID NO: 1340785 - DNA, 15 bp, Homo sapiens
agcactgagctggga

SEQ ID NO: 1340786 - DNA, 15 bp, Homo sapiens
cgagcactgagctgg

SEQ ID NO: 1340787 - DNA, 15 bp, Homo sapiens
tcgagcactgagctg

SEQ ID NO: 1340788 - DNA, 15 bp, Homo sapiens
ctcgagcactgagct

SEQ ID NO: 1340789 - DNA, 15 bp, Homo sapiens
gctcgagcactgagc

SEQ ID NO: 1340790 - DNA, 15 bp, Homo sapiens
agctcgagcactgag

SEQ ID NO: 1340791 - DNA, 15 bp, Homo sapiens
gagctcgagcactga

SEQ ID NO: 1340792 - DNA, 15 bp, Homo sapiens
agagctcgagcactg

SEQ ID NO: 1340793 - DNA, 15 bp, Homo sapiens
cagagctcgagcact

SEQ ID NO: 1340794 - DNA, 15 bp, Homo sapiens
gcagagctcgagcac

SEQ ID NO: 1340795 - DNA, 15 bp, Homo sapiens
agcagagctcgagca

SEQ ID NO: 1340796 - DNA, 15 bp, Homo sapiens
tagcagagctcgagc

SEQ ID NO: 1340797 - DNA, 15 bp, Homo sapiens
ttagcagagctcgag

SEQ ID NO: 1340798 - DNA, 15 bp, Homo sapiens
cttagcagagctcga

SEQ ID NO: 1340799 - DNA, 15 bp, Homo sapiens
ccttagcagagctcg

SEQ ID NO: 1340800 - DNA, 15 bp, Homo sapiens
cccttagcagagctc

SEQ ID NO: 1340801 - DNA, 15 bp, Homo sapiens
tcccttagcagagct

SEQ ID NO: 1340802 - DNA, 15 bp, Homo sapiens
gtcccttagcagagc

SEQ ID NO: 1340803 - DNA, 15 bp, Homo sapiens
tgtcccttagcagag

SEQ ID NO: 1340804 - DNA, 15 bp, Homo sapiens
ctgtcccttagcaga

SEQ ID NO: 1340805 - DNA, 15 bp, Homo sapiens
tctgtcccttagcag

SEQ ID NO: 1340806 - DNA, 15 bp, Homo sapiens
gtctgtcccttagca

SEQ ID NO: 1340807 - DNA, 15 bp, Homo sapiens
agtctgtcccttagc

SEQ ID NO: 1340808 - DNA, 15 bp, Homo sapiens
cagtctgtcccttag

SEQ ID NO: 1340809 - DNA, 15 bp, Homo sapiens
gcagtctgtccctta

SEQ ID NO: 1340810 - DNA, 15 bp, Homo sapiens
ggcagtctgtccctt

SEQ ID NO: 1340811 - DNA, 15 bp, Homo sapiens
aggcagtctgtccct

SEQ ID NO: 1340812 - DNA, 15 bp, Homo sapiens
gaggcagtctgtccc

SEQ ID NO: 1340813 - DNA, 15 bp, Homo sapiens
ggaggcagtctgtcc

SEQ ID NO: 1340814 - DNA, 15 bp, Homo sapiens
aggaggcagtctgtc

SEQ ID NO: 1340815 - DNA, 15 bp, Homo sapiens
gaggaggcagtctgt

SEQ ID NO: 1340816 - DNA, 15 bp, Homo sapiens
tgaggaggcagtctg

SEQ ID NO: 1340817 - DNA, 15 bp, Homo sapiens
ttgaggaggcagtct

SEQ ID NO: 1340818 - DNA, 15 bp, Homo sapiens
cttgaggaggcagtc

SEQ ID NO: 1340819 - DNA, 15 bp, Homo sapiens
acttgaggaggcagt

SEQ ID NO: 1340820 - DNA, 15 bp, Homo sapiens
cacttgaggaggcag

SEQ ID NO: 1340821 - DNA, 15 bp, Homo sapiens
ccacttgaggaggca

SEQ ID NO: 1340822 - DNA, 15 bp, Homo sapiens
cccacttgaggaggc

SEQ ID NO: 1340823 - DNA, 15 bp, Homo sapiens
acccacttgaggagg

SEQ ID NO: 1340824 - DNA, 15 bp, Homo sapiens
gacccacttgaggag

SEQ ID NO: 1340825 - DNA, 15 bp, Homo sapiens
ggacccacttgagga

SEQ ID NO: 1340826 - DNA, 15 bp, Homo sapiens
gggacccacttgagg

SEQ ID NO: 1340827 - DNA, 15 bp, Homo sapiens
cggggtcagggaccc

SEQ ID NO: 1340828 - DNA, 15 bp, Homo sapiens
ccggggtcagggacc

SEQ ID NO: 1340829 - DNA, 15 bp, Homo sapiens
accggggtcagggac

SEQ ID NO: 1340830 - DNA, 15 bp, Homo sapiens
caccggggtcaggga

SEQ ID NO: 1340831 - DNA, 15 bp, Homo sapiens
gcaccggggtcaggg

SEQ ID NO: 1340832 - DNA, 15 bp, Homo sapiens
ggcaccggggtcagg

SEQ ID NO: 1340833 - DNA, 15 bp, Homo sapiens
aggcaccggggtcag

SEQ ID NO: 1340834 - DNA, 15 bp, Homo sapiens
gaggcaccggggtca

SEQ ID NO: 1340835 - DNA, 15 bp, Homo sapiens
ggaggcaccggggtc

SEQ ID NO: 1340836 - DNA, 15 bp, Homo sapiens
aggaggcaccggggt

SEQ ID NO: 1340837 - DNA, 15 bp, Homo sapiens
caggaggcaccgggg

SEQ ID NO: 1340838 - DNA, 15 bp, Homo sapiens
tcaggaggcaccggg

SEQ ID NO: 1340839 - DNA, 15 bp, Homo sapiens
gtcaggaggcaccgg

SEQ ID NO: 1340840 - DNA, 15 bp, Homo sapiens
agtcaggaggcaccg

SEQ ID NO: 1340841 - DNA, 15 bp, Homo sapiens
cagtcaggaggcacc

SEQ ID NO: 1340842 - DNA, 15 bp, Homo sapiens
ccagtcaggaggcac

SEQ ID NO: 1340843 - DNA, 15 bp, Homo sapiens
cccagtcaggaggca

SEQ ID NO: 1340844 - DNA, 15 bp, Homo sapiens
tcccagtcaggaggc

SEQ ID NO: 1340845 - DNA, 15 bp, Homo sapiens
ctcccagtcaggagg

SEQ ID NO: 1340846 - DNA, 15 bp, Homo sapiens
tctcccagtcaggag

SEQ ID NO: 1340847 - DNA, 15 bp, Homo sapiens
gtctcccagtcagga

SEQ ID NO: 1340848 - DNA, 15 bp, Homo sapiens
tgtctcccagtcagg

SEQ ID NO: 1340849 - DNA, 15 bp, Homo sapiens
gtgtctcccagtcag

SEQ ID NO: 1340850 - DNA, 15 bp, Homo sapiens
ggtgtctcccagtca

SEQ ID NO: 1340851 - DNA, 15 bp, Homo sapiens
aggtgtctcccagtc

SEQ ID NO: 1340852 - DNA, 15 bp, Homo sapiens
gaggtgtctcccagt

SEQ ID NO: 1340853 - DNA, 15 bp, Homo sapiens
ggaggtgtctcccag

SEQ ID NO: 1340854 - DNA, 15 bp, Homo sapiens
gggaggtgtctccca

SEQ ID NO: 1340855 - DNA, 15 bp, Homo sapiens
tgggaggtgtctccc

SEQ ID NO: 1340856 - DNA, 15 bp, Homo sapiens
ctgggaggtgtctcc

SEQ ID NO: 1340857 - DNA, 15 bp, Homo sapiens
gctgggaggtgtctc

SEQ ID NO: 1340858 - DNA, 15 bp, Homo sapiens
tgctgggaggtgtct

SEQ ID NO: 1340859 - DNA, 15 bp, Homo sapiens
ctgctgggaggtgtc

SEQ ID NO: 1340860 - DNA, 15 bp, Homo sapiens
cctgctgggaggtgt

SEQ ID NO: 1340861 - DNA, 15 bp, Homo sapiens
acctgctgggaggtg

SEQ ID NO: 1340862 - DNA, 15 bp, Homo sapiens
aacctgctgggaggt

SEQ ID NO: 1340863 - DNA, 15 bp, Homo sapiens
caacctgctgggagg

SEQ ID NO: 1340864 - DNA, 15 bp, Homo sapiens
tcaacctgctgggag

SEQ ID NO: 1340865 - DNA, 15 bp, Homo sapiens
gtcaacctgctggga

SEQ ID NO: 1340866 - DNA, 15 bp, Homo sapiens
tgtcaacctgctggg

SEQ ID NO: 1340867 - DNA, 15 bp, Homo sapiens
gtgtcaacctgctgg

SEQ ID NO: 1340868 - DNA, 15 bp, Homo sapiens
ggtgtcaacctgctg

SEQ ID NO: 1340869 - DNA, 15 bp, Homo sapiens
aggtgtcaacctgct

SEQ ID NO: 1340870 - DNA, 15 bp, Homo sapiens
gaggtgtcaacctgc

SEQ ID NO: 1340871 - DNA, 15 bp, Homo sapiens
ggaggtgtcaacctg

SEQ ID NO: 1340872 - DNA, 15 bp, Homo sapiens
gggaggtgtcaacct

SEQ ID NO: 1340873 - DNA, 15 bp, Homo sapiens
tgggaggtgtcaacc

SEQ ID NO: 1340874 - DNA, 15 bp, Homo sapiens
gtgggaggtgtcaac

SEQ ID NO: 1340875 - DNA, 15 bp, Homo sapiens
tgtgggaggtgtcaa

SEQ ID NO: 1340876 - DNA, 15 bp, Homo sapiens
ttgtgggaggtgtca

SEQ ID NO: 1340877 - DNA, 15 bp, Homo sapiens
tttgtgggaggtgtc

SEQ ID NO: 1340878 - DNA, 15 bp, Homo sapiens
atttgtgggaggtgt

SEQ ID NO: 1340879 - DNA, 15 bp, Homo sapiens
catttgtgggaggtg

SEQ ID NO: 1340880 - DNA, 15 bp, Homo sapiens
tcatttgtgggaggt

SEQ ID NO: 1340881 - DNA, 15 bp, Homo sapiens
ctcatttgtgggagg

SEQ ID NO: 1340882 - DNA, 15 bp, Homo sapiens
cctcatttgtgggag

SEQ ID NO: 1340883 - DNA, 15 bp, Homo sapiens
acctcatttgtggga

SEQ ID NO: 1340884 - DNA, 15 bp, Homo sapiens
cacctcatttgtggg

SEQ ID NO: 1340885 - DNA, 15 bp, Homo sapiens
acacctcatttgtgg

SEQ ID NO: 1340886 - DNA, 15 bp, Homo sapiens
gacacctcatttgtg

SEQ ID NO: 1340887 - DNA, 15 bp, Homo sapiens
tgacacctcatttgt

SEQ ID NO: 1340888 - DNA, 15 bp, Homo sapiens
ttgacacctcatttg

SEQ ID NO: 1340889 - DNA, 15 bp, Homo sapiens
gttgacacctcattt

SEQ ID NO: 1340890 - DNA, 15 bp, Homo sapiens
tgttgacacctcatt

SEQ ID NO: 1340891 - DNA, 15 bp, Homo sapiens
ctgttgacacctcat

SEQ ID NO: 1340892 - DNA, 15 bp, Homo sapiens
cctgttgacacctca

SEQ ID NO: 1340893 - DNA, 15 bp, Homo sapiens
gcctgttgacacctc

SEQ ID NO: 1340894 - DNA, 15 bp, Homo sapiens
tgcctgttgacacct

SEQ ID NO: 1340895 - DNA, 15 bp, Homo sapiens
gtgcctgttgacacc

SEQ ID NO: 1340896 - DNA, 15 bp, Homo sapiens
ggtgcctgttgacac

SEQ ID NO: 1340897 - DNA, 15 bp, Homo sapiens
aggtgcctgttgaca

SEQ ID NO: 1340898 - DNA, 15 bp, Homo sapiens
gaggtgcctgttgac

SEQ ID NO: 1340899 - DNA, 15 bp, Homo sapiens
tgaggtgcctgttga

SEQ ID NO: 1340900 - DNA, 15 bp, Homo sapiens
gtgaggtgcctgttg

SEQ ID NO: 1340901 - DNA, 15 bp, Homo sapiens
tgtgaggtgcctgtt

SEQ ID NO: 1340902 - DNA, 15 bp, Homo sapiens
gtgtgaggtgcctgt

SEQ ID NO: 1340903 - DNA, 15 bp, Homo sapiens
agtgtgaggtgcctg

SEQ ID NO: 1340904 - DNA, 15 bp, Homo sapiens
cagtgtgaggtgcct

SEQ ID NO: 1340905 - DNA, 15 bp, Homo sapiens
ccagtgtgaggtgcc

SEQ ID NO: 1340906 - DNA, 15 bp, Homo sapiens
tccagtgtgaggtgc

SEQ ID NO: 1340907 - DNA, 15 bp, Homo sapiens
ctccagtgtgaggtg

SEQ ID NO: 1340908 - DNA, 15 bp, Homo sapiens
tctccagtgtgaggt

SEQ ID NO: 1340909 - DNA, 15 bp, Homo sapiens
ctctccagtgtgagg

SEQ ID NO: 1340910 - DNA, 15 bp, Homo sapiens
gctctccagtgtgag

SEQ ID NO: 1340911 - DNA, 15 bp, Homo sapiens
agctctccagtgtga

SEQ ID NO: 1340912 - DNA, 15 bp, Homo sapiens
gagctctccagtgtg

SEQ ID NO: 1340913 - DNA, 15 bp, Homo sapiens
ggagctctccagtgt

SEQ ID NO: 1340914 - DNA, 15 bp, Homo sapiens
tggagctctccagtg

SEQ ID NO: 1340915 - DNA, 15 bp, Homo sapiens
ctggagctctccagt

SEQ ID NO: 1340916 - DNA, 15 bp, Homo sapiens
gctggagctctccag

SEQ ID NO: 1340917 - DNA, 15 bp, Homo sapiens
agctggagctctcca

SEQ ID NO: 1340918 - DNA, 15 bp, Homo sapiens
cagctggagctctcc

SEQ ID NO: 1340919 - DNA, 15 bp, Homo sapiens
ccagctggagctctc

SEQ ID NO: 1340920 - DNA, 15 bp, Homo sapiens
gccagctggagctct

SEQ ID NO: 1340921 - DNA, 15 bp, Homo sapiens
tgccagctggagctc

SEQ ID NO: 1340922 - DNA, 15 bp, Homo sapiens
atgccagctggagct

SEQ ID NO: 1340923 - DNA, 15 bp, Homo sapiens
gatgccagctggagc

SEQ ID NO: 1340924 - DNA, 15 bp, Homo sapiens
agatgccagctggag

SEQ ID NO: 1340925 - DNA, 15 bp, Homo sapiens
cagatgccagctgga

SEQ ID NO: 1340926 - DNA, 15 bp, Homo sapiens
ccagatgccagctgg

SEQ ID NO: 1340927 - DNA, 15 bp, Homo sapiens
accagatgccagctg

SEQ ID NO: 1340928 - DNA, 15 bp, Homo sapiens
caccagatgccagct

SEQ ID NO: 1340929 - DNA, 15 bp, Homo sapiens
ccaccagatgccagc

SEQ ID NO: 1340930 - DNA, 15 bp, Homo sapiens
cccaccagatgccag

SEQ ID NO: 1340931 - DNA, 15 bp, Homo sapiens
acccaccagatgcca

SEQ ID NO: 1340932 - DNA, 15 bp, Homo sapiens
cacccaccagatgcc

SEQ ID NO: 1340933 - DNA, 15 bp, Homo sapiens
gcacccaccagatgc

SEQ ID NO: 1340934 - DNA, 15 bp, Homo sapiens
ggcacccaccagatg

SEQ ID NO: 1340935 - DNA, 15 bp, Homo sapiens
aggcacccaccagat

SEQ ID NO: 1340936 - DNA, 15 bp, Homo sapiens
gaggcacccaccaga

SEQ ID NO: 1340937 - DNA, 15 bp, Homo sapiens
agaggcacccaccag

SEQ ID NO: 1340938 - DNA, 15 bp, Homo sapiens
gagaggcacccacca

SEQ ID NO: 1340939 - DNA, 15 bp, Homo sapiens
agagaggcacccacc

SEQ ID NO: 1340940 - DNA, 15 bp, Homo sapiens
cagagaggcacccac

SEQ ID NO: 1340941 - DNA, 15 bp, Homo sapiens
ccagagaggcaccca

SEQ ID NO: 1340942 - DNA, 15 bp, Homo sapiens
cccagagaggcaccc

SEQ ID NO: 1340943 - DNA, 15 bp, Homo sapiens
tcccagagaggcacc

SEQ ID NO: 1340944 - DNA, 15 bp, Homo sapiens
gtcccagagaggcac

SEQ ID NO: 1340945 - DNA, 15 bp, Homo sapiens
tgtcccagagaggca

SEQ ID NO: 1340946 - DNA, 15 bp, Homo sapiens
ttgtcccagagaggc

SEQ ID NO: 1340947 - DNA, 15 bp, Homo sapiens
tttgtcccagagagg

SEQ ID NO: 1340948 - DNA, 15 bp, Homo sapiens
ctttgtcccagagag

SEQ ID NO: 1340949 - DNA, 15 bp, Homo sapiens
gctttgtcccagaga

SEQ ID NO: 1340950 - DNA, 15 bp, Homo sapiens
agctttgtcccagag

SEQ ID NO: 1340951 - DNA, 15 bp, Homo sapiens
aagctttgtcccaga

SEQ ID NO: 1340952 - DNA, 15 bp, Homo sapiens
gaagctttgtcccag

SEQ ID NO: 1340953 - DNA, 15 bp, Homo sapiens
ggaagctttgtccca

SEQ ID NO: 1340954 - DNA, 15 bp, Homo sapiens
tggaagctttgtccc

SEQ ID NO: 1340955 - DNA, 15 bp, Homo sapiens
ttggaagctttgtcc

SEQ ID NO: 1340956 - DNA, 15 bp, Homo sapiens
tttggaagctttgtc

SEQ ID NO: 1340957 - DNA, 15 bp, Homo sapiens
ctttggaagctttgt

SEQ ID NO: 1340958 - DNA, 15 bp, Homo sapiens
cctttggaagctttg

SEQ ID NO: 1340959 - DNA, 15 bp, Homo sapiens
tcctttggaagcttt

SEQ ID NO: 1340960 - DNA, 15 bp, Homo sapiens
ttcctttggaagctt

SEQ ID NO: 1340961 - DNA, 15 bp, Homo sapiens
cttcctttggaagct

SEQ ID NO: 1340962 - DNA, 15 bp, Homo sapiens
ccttcctttggaagc

SEQ ID NO: 1340963 - DNA, 15 bp, Homo sapiens
tccttcctttggaag

SEQ ID NO: 1340964 - DNA, 15 bp, Homo sapiens
ttccttcctttggaa

SEQ ID NO: 1340965 - DNA, 15 bp, Homo sapiens
gttccttcctttgga

SEQ ID NO: 1340966 - DNA, 15 bp, Homo sapiens
tgttccttcctttgg

SEQ ID NO: 1340967 - DNA, 15 bp, Homo sapiens
ttgttccttcctttg

SEQ ID NO: 1340968 - DNA, 15 bp, Homo sapiens
cttgttccttccttt

SEQ ID NO: 1340969 - DNA, 15 bp, Homo sapiens
ccttgttccttcctt

SEQ ID NO: 1340970 - DNA, 15 bp, Homo sapiens
tccttgttccttcct

SEQ ID NO: 1340971 - DNA, 15 bp, Homo sapiens
ctccttgttccttcc

SEQ ID NO: 1340972 - DNA, 15 bp, Homo sapiens
gctccttgttccttc

SEQ ID NO: 1340973 - DNA, 15 bp, Homo sapiens
tgctccttgttcctt

SEQ ID NO: 1340974 - DNA, 15 bp, Homo sapiens
ttgctccttgttcct

SEQ ID NO: 1340975 - DNA, 15 bp, Homo sapiens
attgctccttgttcc

SEQ ID NO: 1340976 - DNA, 15 bp, Homo sapiens
tattgctccttgttc

SEQ ID NO: 1340977 - DNA, 15 bp, Homo sapiens
atattgctccttgtt

SEQ ID NO: 1340978 - DNA, 15 bp, Homo sapiens
aatattgctccttgt

SEQ ID NO: 1340979 - DNA, 15 bp, Homo sapiens
aaatattgctccttg

SEQ ID NO: 1340980 - DNA, 15 bp, Homo sapiens
caaatattgctcctt

SEQ ID NO: 1340981 - DNA, 15 bp, Homo sapiens
gcaaatattgctcct

SEQ ID NO: 1340982 - DNA, 15 bp, Homo sapiens
agcaaatattgctcc

SEQ ID NO: 1340983 - DNA, 15 bp, Homo sapiens
gagcaaatattgctc

SEQ ID NO: 1340984 - DNA, 15 bp, Homo sapiens
agagcaaatattgct

SEQ ID NO: 1340985 - DNA, 15 bp, Homo sapiens
aagagcaaatattgc

SEQ ID NO: 1340986 - DNA, 15 bp, Homo sapiens
gaagagcaaatattg

SEQ ID NO: 1340987 - DNA, 15 bp, Homo sapiens
agaagagcaaatatt

SEQ ID NO: 1340988 - DNA, 15 bp, Homo sapiens
cagaagagcaaatat

SEQ ID NO: 1340989 - DNA, 15 bp, Homo sapiens
gcagaagagcaaata

SEQ ID NO: 1340990 - DNA, 15 bp, Homo sapiens
tgcagaagagcaaat

SEQ ID NO: 1340991 - DNA, 15 bp, Homo sapiens
ctgcagaagagcaaa

SEQ ID NO: 1340992 - DNA, 15 bp, Homo sapiens
gctgcagaagagcaa

SEQ ID NO: 1340993 - DNA, 15 bp, Homo sapiens
ggctgcagaagagca

SEQ ID NO: 1340994 - DNA, 15 bp, Homo sapiens
aggctgcagaagagc

SEQ ID NO: 1340995 - DNA, 15 bp, Homo sapiens
gaggctgcagaagag

SEQ ID NO: 1340996 - DNA, 15 bp, Homo sapiens
ggaggctgcagaaga

SEQ ID NO: 1340997 - DNA, 15 bp, Homo sapiens
cggaggctgcagaag

SEQ ID NO: 1340998 - DNA, 15 bp, Homo sapiens
aagcggaggctgcag

SEQ ID NO: 1340999 - DNA, 15 bp, Homo sapiens
caagcggaggctgca

SEQ ID NO: 1341000 - DNA, 15 bp, Homo sapiens
gcaagcggaggctgc

SEQ ID NO: 1341001 - DNA, 15 bp, Homo sapiens
cgcaagcggaggctg

SEQ ID NO: 1341002 - DNA, 15 bp, Homo sapiens
acgcaagcggaggct

SEQ ID NO: 1341003 - DNA, 15 bp, Homo sapiens
gacgcaagcggaggc

SEQ ID NO: 1341004 - DNA, 15 bp, Homo sapiens
ggacgcaagcggagg

SEQ ID NO: 1341005 - DNA, 15 bp, Homo sapiens
tggacgcaagcggag

SEQ ID NO: 1341006 - DNA, 15 bp, Homo sapiens
gtggacgcaagcgga

SEQ ID NO: 1341007 - DNA, 15 bp, Homo sapiens
agtggacgcaagcgg

SEQ ID NO: 1341008 - DNA, 15 bp, Homo sapiens
gagtggacgcaagcg

SEQ ID NO: 1341009 - DNA, 15 bp, Homo sapiens
ggagtggacgcaagc

SEQ ID NO: 1341010 - DNA, 15 bp, Homo sapiens
tggagtggacgcaag

SEQ ID NO: 1341011 - DNA, 15 bp, Homo sapiens
ctggagtggacgcaa

SEQ ID NO: 1341012 - DNA, 15 bp, Homo sapiens
cctggagtggacgca

SEQ ID NO: 1341013 - DNA, 15 bp, Homo sapiens
gcctggagtggacgc

SEQ ID NO: 1341014 - DNA, 15 bp, Homo sapiens
tgcctggagtggacg

SEQ ID NO: 1341015 - DNA, 15 bp, Homo sapiens
ttgcctggagtggac

SEQ ID NO: 1341016 - DNA, 15 bp, Homo sapiens
tttgcctggagtgga

SEQ ID NO: 1341017 - DNA, 15 bp, Homo sapiens
gtttgcctggagtgg

SEQ ID NO: 1341018 - DNA, 15 bp, Homo sapiens
tgtttgcctggagtg

SEQ ID NO: 1341019 - DNA, 15 bp, Homo sapiens
ctgtttgcctggagt

SEQ ID NO: 1341020 - DNA, 15 bp, Homo sapiens
cctgtttgcctggag

SEQ ID NO: 1341021 - DNA, 15 bp, Homo sapiens
ccctgtttgcctgga

SEQ ID NO: 1341022 - DNA, 15 bp, Homo sapiens
accctgtttgcctgg

SEQ ID NO: 1341023 - DNA, 15 bp, Homo sapiens
gaccctgtttgcctg

SEQ ID NO: 1341024 - DNA, 15 bp, Homo sapiens
agaccctgtttgcct

SEQ ID NO: 1341025 - DNA, 15 bp, Homo sapiens
cagaccctgtttgcc

SEQ ID NO: 1341026 - DNA, 15 bp, Homo sapiens
ccagaccctgtttgc

SEQ ID NO: 1341027 - DNA, 15 bp, Homo sapiens
tccagaccctgtttg

SEQ ID NO: 1341028 - DNA, 15 bp, Homo sapiens
aaggtccactccaga

SEQ ID NO: 1341029 - DNA, 15 bp, Homo sapiens
gaaggtccactccag

SEQ ID NO: 1341030 - DNA, 15 bp, Homo sapiens
tgaaggtccactcca

SEQ ID NO: 1341031 - DNA, 15 bp, Homo sapiens
ctgaaggtccactcc

SEQ ID NO: 1341032 - DNA, 15 bp, Homo sapiens
gctgaaggtccactc

SEQ ID NO: 1341033 - DNA, 15 bp, Homo sapiens
tgctgaaggtccact

SEQ ID NO: 1341034 - DNA, 15 bp, Homo sapiens
ctgctgaaggtccac

SEQ ID NO: 1341035 - DNA, 15 bp, Homo sapiens
tctgctgaaggtcca

SEQ ID NO: 1341036 - DNA, 15 bp, Homo sapiens
atctgctgaaggtcc

SEQ ID NO: 1341037 - DNA, 15 bp, Homo sapiens
aatctgctgaaggtc

SEQ ID NO: 1341038 - DNA, 15 bp, Homo sapiens
taatctgctgaaggt

SEQ ID NO: 1341039 - DNA, 15 bp, Homo sapiens
gtaatctgctgaagg

SEQ ID NO: 1341040 - DNA, 15 bp, Homo sapiens
tgtaatctgctgaag

SEQ ID NO: 1341041 - DNA, 15 bp, Homo sapiens
ctgtaatctgctgaa

SEQ ID NO: 1341042 - DNA, 15 bp, Homo sapiens
actgtaatctgctga

SEQ ID NO: 1341043 - DNA, 15 bp, Homo sapiens
tactgtaatctgctg

SEQ ID NO: 1341044 - DNA, 15 bp, Homo sapiens
ctactgtaatctgct

SEQ ID NO: 1341045 - DNA, 15 bp, Homo sapiens
tctactgtaatctgc

SEQ ID NO: 1341046 - DNA, 15 bp, Homo sapiens
gtctactgtaatctg

SEQ ID NO: 1341047 - DNA, 15 bp, Homo sapiens
ggtctactgtaatct

SEQ ID NO: 1341048 - DNA, 15 bp, Homo sapiens
aggtctactgtaatc

SEQ ID NO: 1341049 - DNA, 15 bp, Homo sapiens
caggtctactgtaat

SEQ ID NO: 1341050 - DNA, 15 bp, Homo sapiens
gcaggtctactgtaa

SEQ ID NO: 1341051 - DNA, 15 bp, Homo sapiens
tgcaggtctactgta

SEQ ID NO: 1341052 - DNA, 15 bp, Homo sapiens
ctgcaggtctactgt

SEQ ID NO: 1341053 - DNA, 15 bp, Homo sapiens
tctgcaggtctactg

SEQ ID NO: 1341054 - DNA, 15 bp, Homo sapiens
ttctgcaggtctact

SEQ ID NO: 1341055 - DNA, 15 bp, Homo sapiens
cttctgcaggtctac

SEQ ID NO: 1341056 - DNA, 15 bp, Homo sapiens
tcttctgcaggtcta

SEQ ID NO: 1341057 - DNA, 15 bp, Homo sapiens
ctcttctgcaggtct

SEQ ID NO: 1341058 - DNA, 15 bp, Homo sapiens
cctcttctgcaggtc

SEQ ID NO: 1341059 - DNA, 15 bp, Homo sapiens
ccctcttctgcaggt

SEQ ID NO: 1341060 - DNA, 15 bp, Homo sapiens
cccctcttctgcagg

SEQ ID NO: 1341061 - DNA, 15 bp, Homo sapiens
ggcccctcttctgca

SEQ ID NO: 1341062 - DNA, 15 bp, Homo sapiens
aggcccctcttctgc

SEQ ID NO: 1341063 - DNA, 15 bp, Homo sapiens
caggcccctcttctg

SEQ ID NO: 1341064 - DNA, 15 bp, Homo sapiens
tcaggcccctcttct

SEQ ID NO: 1341065 - DNA, 15 bp, Homo sapiens
gtcaggcccctcttc

SEQ ID NO: 1341066 - DNA, 15 bp, Homo sapiens
agtcaggcccctctt

SEQ ID NO: 1341067 - DNA, 15 bp, Homo sapiens
cagtcaggcccctct

SEQ ID NO: 1341068 - DNA, 15 bp, Homo sapiens
acagtcaggcccctc

SEQ ID NO: 1341069 - DNA, 15 bp, Homo sapiens
aacagtcaggcccct

SEQ ID NO: 1341070 - DNA, 15 bp, Homo sapiens
taacagtcaggcccc

SEQ ID NO: 1341071 - DNA, 15 bp, Homo sapiens
ctaacagtcaggccc

SEQ ID NO: 1341072 - DNA, 15 bp, Homo sapiens
tctaacagtcaggcc

SEQ ID NO: 1341073 - DNA, 15 bp, Homo sapiens
ttctaacagtcaggc

SEQ ID NO: 1341074 - DNA, 15 bp, Homo sapiens
ttcctttctgtttgt

SEQ ID NO: 1341075 - DNA, 15 bp, Homo sapiens
attcctttctgtttg

SEQ ID NO: 1341076 - DNA, 15 bp, Homo sapiens
tattcctttctgttt

SEQ ID NO: 1341077 - DNA, 15 bp, Homo sapiens
ctattcctttctgtt

SEQ ID NO: 1341078 - DNA, 15 bp, Homo sapiens
gctattcctttctgt

SEQ ID NO: 1341079 - DNA, 15 bp, Homo sapiens
tgctattcctttctg

SEQ ID NO: 1341080 - DNA, 15 bp, Homo sapiens
atgctattcctttct

SEQ ID NO: 1341081 - DNA, 15 bp, Homo sapiens
gatgctattcctttc

SEQ ID NO: 1341082 - DNA, 15 bp, Homo sapiens
tgatgctattccttt

SEQ ID NO: 1341083 - DNA, 15 bp, Homo sapiens
ttgatgctattcctt

SEQ ID NO: 1341084 - DNA, 15 bp, Homo sapiens
gttgatgctattcct

SEQ ID NO: 1341085 - DNA, 15 bp, Homo sapiens
tgttgatgctattcc

SEQ ID NO: 1341086 - DNA, 15 bp, Homo sapiens
atgttgatgctattc

SEQ ID NO: 1341087 - DNA, 15 bp, Homo sapiens
gatgttgatgctatt

SEQ ID NO: 1341088 - DNA, 15 bp, Homo sapiens
tgatgttgatgctat

SEQ ID NO: 1341089 - DNA, 15 bp, Homo sapiens
ttgatgttgatgcta

SEQ ID NO: 1341090 - DNA, 15 bp, Homo sapiens
gttgatgttgatgct

SEQ ID NO: 1341091 - DNA, 15 bp, Homo sapiens
tgttgatgttgatgc

SEQ ID NO: 1341092 - DNA, 15 bp, Homo sapiens
ttgttgatgttgatg

SEQ ID NO: 1341093 - DNA, 15 bp, Homo sapiens
tttgttgatgttgat

SEQ ID NO: 1341094 - DNA, 15 bp, Homo sapiens
ttttgttgatgttga

SEQ ID NO: 1341095 - DNA, 15 bp, Homo sapiens
tttttgttgatgttg

SEQ ID NO: 1341096 - DNA, 15 bp, Homo sapiens
ctttttgttgatgtt

SEQ ID NO: 1341097 - DNA, 15 bp, Homo sapiens
cctttttgttgatgt

SEQ ID NO: 1341098 - DNA, 15 bp, Homo sapiens
tcctttttgttgatg

SEQ ID NO: 1341099 - DNA, 15 bp, Homo sapiens
gtcctttttgttgat

SEQ ID NO: 1341100 - DNA, 15 bp, Homo sapiens
tgtcctttttgttga

SEQ ID NO: 1341101 - DNA, 15 bp, Homo sapiens
atgtcctttttgttg

SEQ ID NO: 1341102 - DNA, 15 bp, Homo sapiens
gatgtcctttttgtt

SEQ ID NO: 1341103 - DNA, 15 bp, Homo sapiens
ggatgtcctttttgt

SEQ ID NO: 1341104 - DNA, 15 bp, Homo sapiens
tggatgtcctttttg

SEQ ID NO: 1341105 - DNA, 15 bp, Homo sapiens
gtggatgtccttttt

SEQ ID NO: 1341106 - DNA, 15 bp, Homo sapiens
tgtggatgtcctttt

SEQ ID NO: 1341107 - DNA, 15 bp, Homo sapiens
gtgtggatgtccttt

SEQ ID NO: 1341108 - DNA, 15 bp, Homo sapiens
ggtgtggatgtcctt

SEQ ID NO: 1341109 - DNA, 15 bp, Homo sapiens
tggtgtggatgtcct

SEQ ID NO: 1341110 - DNA, 15 bp, Homo sapiens
ttggtgtggatgtcc

SEQ ID NO: 1341111 - DNA, 15 bp, Homo sapiens
tttggtgtggatgtc

SEQ ID NO: 1341112 - DNA, 15 bp, Homo sapiens
ttttggtgtggatgt

SEQ ID NO: 1341113 - DNA, 15 bp, Homo sapiens
gttttggtgtggatg

SEQ ID NO: 1341114 - DNA, 15 bp, Homo sapiens
ggttttggtgtggat

SEQ ID NO: 1341115 - DNA, 15 bp, Homo sapiens
gggttttggtgtgga

SEQ ID NO: 1341116 - DNA, 15 bp, Homo sapiens
ggggttttggtgtgg

SEQ ID NO: 1341117 - DNA, 15 bp, Homo sapiens
tggggttttggtgtg

SEQ ID NO: 1341118 - DNA, 15 bp, Homo sapiens
atggggttttggtgt

SEQ ID NO: 1341119 - DNA, 15 bp, Homo sapiens
gatggggttttggtg

SEQ ID NO: 1341120 - DNA, 15 bp, Homo sapiens
ggatggggttttggt

SEQ ID NO: 1341121 - DNA, 15 bp, Homo sapiens
cggatggggttttgg

SEQ ID NO: 1341122 - DNA, 15 bp, Homo sapiens
tcggatggggttttg

SEQ ID NO: 1341123 - DNA, 15 bp, Homo sapiens
ttcggatggggtttt

SEQ ID NO: 1341124 - DNA, 15 bp, Homo sapiens
cttcggatggggttt

SEQ ID NO: 1341125 - DNA, 15 bp, Homo sapiens
ccttcggatggggtt

SEQ ID NO: 1341126 - DNA, 15 bp, Homo sapiens
accttcggatggggt

SEQ ID NO: 1341127 - DNA, 15 bp, Homo sapiens
gaccttcggatgggg

SEQ ID NO: 1341128 - DNA, 15 bp, Homo sapiens
tgaccttcggatggg

SEQ ID NO: 1341129 - DNA, 15 bp, Homo sapiens
gtgaccttcggatgg

SEQ ID NO: 1341130 - DNA, 15 bp, Homo sapiens
ggtgaccttcggatg

SEQ ID NO: 1341131 - DNA, 15 bp, Homo sapiens
tggtgaccttcggat

SEQ ID NO: 1341132 - DNA, 15 bp, Homo sapiens
ttggtgaccttcgga

SEQ ID NO: 1341133 - DNA, 15 bp, Homo sapiens
attggtgaccttcgg

SEQ ID NO: 1341134 - DNA, 15 bp, Homo sapiens
tattggtgaccttcg

SEQ ID NO: 1341135 - DNA, 15 bp, Homo sapiens
atattggtgaccttc

SEQ ID NO: 1341136 - DNA, 15 bp, Homo sapiens
gatattggtgacctt

SEQ ID NO: 1341137 - DNA, 15 bp, Homo sapiens
tgatattggtgacct

SEQ ID NO: 1341138 - DNA, 15 bp, Homo sapiens
ttgatattggtgacc

SEQ ID NO: 1341139 - DNA, 15 bp, Homo sapiens
tttgatattggtgac

SEQ ID NO: 1341140 - DNA, 15 bp, Homo sapiens
ttttgatattggtga

SEQ ID NO: 1341141 - DNA, 15 bp, Homo sapiens
gttttgatattggtg

SEQ ID NO: 1341142 - DNA, 15 bp, Homo sapiens
ggttttgatattggt

SEQ ID NO: 1341143 - DNA, 15 bp, Homo sapiens
tggttttgatattgg

SEQ ID NO: 1341144 - DNA, 15 bp, Homo sapiens
ttggttttgatattg

SEQ ID NO: 1341145 - DNA, 15 bp, Homo sapiens
tttggttttgatatt

SEQ ID NO: 1341146 - DNA, 15 bp, Homo sapiens
ctttggttttgatat

SEQ ID NO: 1341147 - DNA, 15 bp, Homo sapiens
cctttggttttgata

SEQ ID NO: 1341148 - DNA, 15 bp, Homo sapiens
acctttggttttgat

SEQ ID NO: 1341149 - DNA, 15 bp, Homo sapiens
tacctttggttttga

SEQ ID NO: 1341150 - DNA, 15 bp, Homo sapiens
ctacctttggttttg

SEQ ID NO: 1341151 - DNA, 15 bp, Homo sapiens
atttatctacctttg

SEQ ID NO: 1341152 - DNA, 15 bp, Homo sapiens
gatttatctaccttt

SEQ ID NO: 1341153 - DNA, 15 bp, Homo sapiens
ggatttatctacctt

SEQ ID NO: 1341154 - DNA, 15 bp, Homo sapiens
tggatttatctacct

SEQ ID NO: 1341155 - DNA, 15 bp, Homo sapiens
atggatttatctacc

SEQ ID NO: 1341156 - DNA, 15 bp, Homo sapiens
tatggatttatctac

SEQ ID NO: 1341157 - DNA, 15 bp, Homo sapiens
ttatggatttatcta

SEQ ID NO: 1341158 - DNA, 15 bp, Homo sapiens
tttatggatttatct

SEQ ID NO: 1341159 - DNA, 15 bp, Homo sapiens
ctttatggatttatc

SEQ ID NO: 1341160 - DNA, 15 bp, Homo sapiens
tctttatggatttat

SEQ ID NO: 1341161 - DNA, 15 bp, Homo sapiens
atctttatggattta

SEQ ID NO: 1341162 - DNA, 15 bp, Homo sapiens
catctttatggattt

SEQ ID NO: 1341163 - DNA, 15 bp, Homo sapiens
tcatctttatggatt

SEQ ID NO: 1341164 - DNA, 15 bp, Homo sapiens
ctcatctttatggat

SEQ ID NO: 1341165 - DNA, 15 bp, Homo sapiens
cctcatctttatgga

SEQ ID NO: 1341166 - DNA, 15 bp, Homo sapiens
tcctcatctttatgg

SEQ ID NO: 1341167 - DNA, 15 bp, Homo sapiens
ttcctcatctttatg

SEQ ID NO: 1341168 - DNA, 15 bp, Homo sapiens
tttcctcatctttat

SEQ ID NO: 1341169 - DNA, 15 bp, Homo sapiens
ttttcctcatcttta

SEQ ID NO: 1341170 - DNA, 15 bp, Homo sapiens
tttttcctcatcttt

SEQ ID NO: 1341171 - DNA, 15 bp, Homo sapiens
gtttttcctcatctt

SEQ ID NO: 1341172 - DNA, 15 bp, Homo sapiens
ggtttttcctcatct

SEQ ID NO: 1341173 - DNA, 15 bp, Homo sapiens
tggtttttcctcatc

SEQ ID NO: 1341174 - DNA, 15 bp, Homo sapiens
ctggtttttcctcat

SEQ ID NO: 1341175 - DNA, 15 bp, Homo sapiens
gctggtttttcctca

SEQ ID NO: 1341176 - DNA, 15 bp, Homo sapiens
agctggtttttcctc

SEQ ID NO: 1341177 - DNA, 15 bp, Homo sapiens
gagctggtttttcct

SEQ ID NO: 1341178 - DNA, 15 bp, Homo sapiens
tgagctggtttttcc

SEQ ID NO: 1341179 - DNA, 15 bp, Homo sapiens
ttgagctggtttttc

SEQ ID NO: 1341180 - DNA, 15 bp, Homo sapiens
gttgagctggttttt

SEQ ID NO: 1341181 - DNA, 15 bp, Homo sapiens
tgttgagctggtttt

SEQ ID NO: 1341182 - DNA, 15 bp, Homo sapiens
ttgttgagctggttt

SEQ ID NO: 1341183 - DNA, 15 bp, Homo sapiens
attgttgagctggtt

SEQ ID NO: 1341184 - DNA, 15 bp, Homo sapiens
aattgttgagctggt

SEQ ID NO: 1341185 - DNA, 15 bp, Homo sapiens
gaattgttgagctgg

SEQ ID NO: 1341186 - DNA, 15 bp, Homo sapiens
agaattgttgagctg

SEQ ID NO: 1341187 - DNA, 15 bp, Homo sapiens
cagaattgttgagct

SEQ ID NO: 1341188 - DNA, 15 bp, Homo sapiens
tcagaattgttgagc

SEQ ID NO: 1341189 - DNA, 15 bp, Homo sapiens
ttcagaattgttgag

SEQ ID NO: 1341190 - DNA, 15 bp, Homo sapiens
tttcagaattgttga

SEQ ID NO: 1341191 - DNA, 15 bp, Homo sapiens
ttttcagaattgttg

SEQ ID NO: 1341192 - DNA, 15 bp, Homo sapiens
attttcagaattgtt

SEQ ID NO: 1341193 - DNA, 15 bp, Homo sapiens
aattttcagaattgt

SEQ ID NO: 1341194 - DNA, 15 bp, Homo sapiens
gaattttcagaattg

SEQ ID NO: 1341195 - DNA, 15 bp, Homo sapiens
ggaattttcagaatt

SEQ ID NO: 1341196 - DNA, 15 bp, Homo sapiens
tggaattttcagaat

SEQ ID NO: 1341197 - DNA, 15 bp, Homo sapiens
ttggaattttcagaa

SEQ ID NO: 1341198 - DNA, 15 bp, Homo sapiens
tttggaattttcaga

SEQ ID NO: 1341199 - DNA, 15 bp, Homo sapiens
ttttggaattttcag

SEQ ID NO: 1341200 - DNA, 15 bp, Homo sapiens
tttttggaattttca

SEQ ID NO: 1341201 - DNA, 15 bp, Homo sapiens
gtttttggaattttc

SEQ ID NO: 1341202 - DNA, 15 bp, Homo sapiens
ggtttttggaatttt

SEQ ID NO: 1341203 - DNA, 15 bp, Homo sapiens
tggtttttggaattt

SEQ ID NO: 1341204 - DNA, 15 bp, Homo sapiens
ctggtttttggaatt

SEQ ID NO: 1341205 - DNA, 15 bp, Homo sapiens
tctggtttttggaat

SEQ ID NO: 1341206 - DNA, 15 bp, Homo sapiens
ttctggtttttggaa

SEQ ID NO: 1341207 - DNA, 15 bp, Homo sapiens
gttctggtttttgga

SEQ ID NO: 1341208 - DNA, 15 bp, Homo sapiens
cgttctggtttttgg

SEQ ID NO: 1341209 - DNA, 15 bp, Homo sapiens
acgttctggtttttg

SEQ ID NO: 1341210 - DNA, 15 bp, Homo sapiens
gacgttctggttttt

SEQ ID NO: 1341211 - DNA, 15 bp, Homo sapiens
agacgttctggtttt

SEQ ID NO: 1341212 - DNA, 15 bp, Homo sapiens
gagacgttctggttt

SEQ ID NO: 1341213 - DNA, 15 bp, Homo sapiens
agagacgttctggtt

SEQ ID NO: 1341214 - DNA, 15 bp, Homo sapiens
aagagacgttctggt

SEQ ID NO: 1341215 - DNA, 15 bp, Homo sapiens
gaagagacgttctgg

SEQ ID NO: 1341216 - DNA, 15 bp, Homo sapiens
agaagagacgttctg

SEQ ID NO: 1341217 - DNA, 15 bp, Homo sapiens
gagaagagacgttct

SEQ ID NO: 1341218 - DNA, 15 bp, Homo sapiens
ggagaagagacgttc

SEQ ID NO: 1341219 - DNA, 15 bp, Homo sapiens
aggagaagagacgtt

SEQ ID NO: 1341220 - DNA, 15 bp, Homo sapiens
gaggagaagagacgt

SEQ ID NO: 1341221 - DNA, 15 bp, Homo sapiens
ggaggagaagagacg

SEQ ID NO: 1341222 - DNA, 15 bp, Homo sapiens
tggaggagaagagac

SEQ ID NO: 1341223 - DNA, 15 bp, Homo sapiens
ttggaggagaagaga

SEQ ID NO: 1341224 - DNA, 15 bp, Homo sapiens
tttggaggagaagag

SEQ ID NO: 1341225 - DNA, 15 bp, Homo sapiens
ctttggaggagaaga

SEQ ID NO: 1341226 - DNA, 15 bp, Homo sapiens
cctttggaggagaag

SEQ ID NO: 1341227 - DNA, 15 bp, Homo sapiens
tcctttggaggagaa

SEQ ID NO: 1341228 - DNA, 15 bp, Homo sapiens
atcctttggaggaga

SEQ ID NO: 1341229 - DNA, 15 bp, Homo sapiens
gatcctttggaggag

SEQ ID NO: 1341230 - DNA, 15 bp, Homo sapiens
tgatcctttggagga

SEQ ID NO: 1341231 - DNA, 15 bp, Homo sapiens
gtgatcctttggagg

SEQ ID NO: 1341232 - DNA, 15 bp, Homo sapiens
tgtgatcctttggag

SEQ ID NO: 1341233 - DNA, 15 bp, Homo sapiens
ttgtgatcctttgga

SEQ ID NO: 1341234 - DNA, 15 bp, Homo sapiens
gttgtgatcctttgg

SEQ ID NO: 1341235 - DNA, 15 bp, Homo sapiens
agttgtgatcctttg

SEQ ID NO: 1341236 - DNA, 15 bp, Homo sapiens
gagttgtgatccttt

SEQ ID NO: 1341237 - DNA, 15 bp, Homo sapiens
ggagttgtgatcctt

SEQ ID NO: 1341238 - DNA, 15 bp, Homo sapiens
aggagttgtgatcct

SEQ ID NO: 1341239 - DNA, 15 bp, Homo sapiens
gaggagttgtgatcc

SEQ ID NO: 1341240 - DNA, 15 bp, Homo sapiens
tgaggagttgtgatc

SEQ ID NO: 1341241 - DNA, 15 bp, Homo sapiens
gtgaggagttgtgat

SEQ ID NO: 1341242 - DNA, 15 bp, Homo sapiens
ggtgaggagttgtga

SEQ ID NO: 1341243 - DNA, 15 bp, Homo sapiens
tggtgaggagttgtg

SEQ ID NO: 1341244 - DNA, 15 bp, Homo sapiens
ctggtgaggagttgt

SEQ ID NO: 1341245 - DNA, 15 bp, Homo sapiens
gctggtgaggagttg

SEQ ID NO: 1341246 - DNA, 15 bp, Homo sapiens
tgctggtgaggagtt

SEQ ID NO: 1341247 - DNA, 15 bp, Homo sapiens
ttgctggtgaggagt

SEQ ID NO: 1341248 - DNA, 15 bp, Homo sapiens
cttgctggtgaggag

SEQ ID NO: 1341249 - DNA, 15 bp, Homo sapiens
ccttgctggtgagga

SEQ ID NO: 1341250 - DNA, 15 bp, Homo sapiens
cccttgctggtgagg

SEQ ID NO: 1341251 - DNA, 15 bp, Homo sapiens
tcccttgctggtgag

SEQ ID NO: 1341252 - DNA, 15 bp, Homo sapiens
ttcccttgctggtga

SEQ ID NO: 1341253 - DNA, 15 bp, Homo sapiens
gttcccttgctggtg

SEQ ID NO: 1341254 - DNA, 15 bp, Homo sapiens
tgttcccttgctggt

SEQ ID NO: 1341255 - DNA, 15 bp, Homo sapiens
ttgttcccttgctgg

SEQ ID NO: 1341256 - DNA, 15 bp, Homo sapiens
tttgttcccttgctg

SEQ ID NO: 1341257 - DNA, 15 bp, Homo sapiens
ttttgttcccttgct

SEQ ID NO: 1341258 - DNA, 15 bp, Homo sapiens
cttttgttcccttgc

SEQ ID NO: 1341259 - DNA, 15 bp, Homo sapiens
acttttgttcccttg

SEQ ID NO: 1341260 - DNA, 15 bp, Homo sapiens
cacttttgttccctt

SEQ ID NO: 1341261 - DNA, 15 bp, Homo sapiens
ccacttttgttccct

SEQ ID NO: 1341262 - DNA, 15 bp, Homo sapiens
tccacttttgttccc

SEQ ID NO: 1341263 - DNA, 15 bp, Homo sapiens
gtccacttttgttcc

SEQ ID NO: 1341264 - DNA, 15 bp, Homo sapiens
tgtccacttttgttc

SEQ ID NO: 1341265 - DNA, 15 bp, Homo sapiens
ctgtccacttttgtt

SEQ ID NO: 1341266 - DNA, 15 bp, Homo sapiens
tctgtccacttttgt

SEQ ID NO: 1341267 - DNA, 15 bp, Homo sapiens
ctctgtccacttttg

SEQ ID NO: 1341268 - DNA, 15 bp, Homo sapiens
tctctgtccactttt

SEQ ID NO: 1341269 - DNA, 15 bp, Homo sapiens
ttctctgtccacttt

SEQ ID NO: 1341270 - DNA, 15 bp, Homo sapiens
attctctgtccactt

SEQ ID NO: 1341271 - DNA, 15 bp, Homo sapiens
cattctctgtccact

SEQ ID NO: 1341272 - DNA, 15 bp, Homo sapiens
tcattctctgtccac

SEQ ID NO: 1341273 - DNA, 15 bp, Homo sapiens
ctcattctctgtcca

SEQ ID NO: 1341274 - DNA, 15 bp, Homo sapiens
actcattctctgtcc

SEQ ID NO: 1341275 - DNA, 15 bp, Homo sapiens
aactcattctctgtc

SEQ ID NO: 1341276 - DNA, 15 bp, Homo sapiens
aaactcattctctgt

SEQ ID NO: 1341277 - DNA, 15 bp, Homo sapiens
caaactcattctctg

SEQ ID NO: 1341278 - DNA, 15 bp, Homo sapiens
tcaaactcattctct

SEQ ID NO: 1341279 - DNA, 15 bp, Homo sapiens
atcaaactcattctc

SEQ ID NO: 1341280 - DNA, 15 bp, Homo sapiens
catcaaactcattct

SEQ ID NO: 1341281 - DNA, 15 bp, Homo sapiens
tcatcaaactcattc

SEQ ID NO: 1341282 - DNA, 15 bp, Homo sapiens
ttcatcaaactcatt

SEQ ID NO: 1341283 - DNA, 15 bp, Homo sapiens
attcatcaaactcat

SEQ ID NO: 1341284 - DNA, 15 bp, Homo sapiens
aattcatcaaactca

SEQ ID NO: 1341285 - DNA, 15 bp, Homo sapiens
caattcatcaaactc

SEQ ID NO: 1341286 - DNA, 15 bp, Homo sapiens
tcaattcatcaaact

SEQ ID NO: 1341287 - DNA, 15 bp, Homo sapiens
gtcaattcatcaaac

SEQ ID NO: 1341288 - DNA, 15 bp, Homo sapiens
tgtcaattcatcaaa

SEQ ID NO: 1341289 - DNA, 15 bp, Homo sapiens
ctgtcaattcatcaa

SEQ ID NO: 1341290 - DNA, 15 bp, Homo sapiens
tctgtcaattcatca

SEQ ID NO: 1341291 - DNA, 15 bp, Homo sapiens
ttctgtcaattcatc

SEQ ID NO: 1341292 - DNA, 15 bp, Homo sapiens
cttctgtcaattcat

SEQ ID NO: 1341293 - DNA, 15 bp, Homo sapiens
acttctgtcaattca

SEQ ID NO: 1341294 - DNA, 15 bp, Homo sapiens
tacttctgtcaattc

SEQ ID NO: 1341295 - DNA, 15 bp, Homo sapiens
ctacttctgtcaatt

SEQ ID NO: 1341296 - DNA, 15 bp, Homo sapiens
cctacttctgtcaat

SEQ ID NO: 1341297 - DNA, 15 bp, Homo sapiens
gcctacttctgtcaa

SEQ ID NO: 1341298 - DNA, 15 bp, Homo sapiens
agcctacttctgtca

SEQ ID NO: 1341299 - DNA, 15 bp, Homo sapiens
aagcctacttctgtc

SEQ ID NO: 1341300 - DNA, 15 bp, Homo sapiens
gaagcctacttctgt

SEQ ID NO: 1341301 - DNA, 15 bp, Homo sapiens
tgaagcctacttctg

SEQ ID NO: 1341302 - DNA, 15 bp, Homo sapiens
ctgaagcctacttct

SEQ ID NO: 1341303 - DNA, 15 bp, Homo sapiens
tctgaagcctacttc

SEQ ID NO: 1341304 - DNA, 15 bp, Homo sapiens
ttctgaagcctactt

SEQ ID NO: 1341305 - DNA, 15 bp, Homo sapiens
cttctgaagcctact

SEQ ID NO: 1341306 - DNA, 15 bp, Homo sapiens
ccttctgaagcctac

SEQ ID NO: 1341307 - DNA, 15 bp, Homo sapiens
accttctgaagccta

SEQ ID NO: 1341308 - DNA, 15 bp, Homo sapiens
caccttctgaagcct

SEQ ID NO: 1341309 - DNA, 15 bp, Homo sapiens
cccaccttctgaagc

SEQ ID NO: 1341310 - DNA, 15 bp, Homo sapiens
acccaccttctgaag

SEQ ID NO: 1341311 - DNA, 15 bp, Homo sapiens
tacccaccttctgaa

SEQ ID NO: 1341312 - DNA, 15 bp, Homo sapiens
ttacccaccttctga

SEQ ID NO: 1341313 - DNA, 15 bp, Homo sapiens
attacccaccttctg

SEQ ID NO: 1341314 - DNA, 15 bp, Homo sapiens
tattacccaccttct

SEQ ID NO: 1341315 - DNA, 15 bp, Homo sapiens
ttattacccaccttc

SEQ ID NO: 1341316 - DNA, 15 bp, Homo sapiens
gttattacccacctt

SEQ ID NO: 1341317 - DNA, 15 bp, Homo sapiens
tgttattacccacct

SEQ ID NO: 1341318 - DNA, 15 bp, Homo sapiens
ttgttattacccacc

SEQ ID NO: 1341319 - DNA, 15 bp, Homo sapiens
tttgttattacccac

SEQ ID NO: 1341320 - DNA, 15 bp, Homo sapiens
gtttgttattaccca

SEQ ID NO: 1341321 - DNA, 15 bp, Homo sapiens
agtttgttattaccc

SEQ ID NO: 1341322 - DNA, 15 bp, Homo sapiens
gagtttgttattacc

SEQ ID NO: 1341323 - DNA, 15 bp, Homo sapiens
ggagtttgttattac

SEQ ID NO: 1341324 - DNA, 15 bp, Homo sapiens
aggagtttgttatta

SEQ ID NO: 1341325 - DNA, 15 bp, Homo sapiens
gaggagtttgttatt

SEQ ID NO: 1341326 - DNA, 15 bp, Homo sapiens
ggaggagtttgttat

SEQ ID NO: 1341327 - DNA, 15 bp, Homo sapiens
cggaggagtttgtta

SEQ ID NO: 1341328 - DNA, 15 bp, Homo sapiens
tcggaggagtttgtt

SEQ ID NO: 1341329 - DNA, 15 bp, Homo sapiens
ctcggaggagtttgt

SEQ ID NO: 1341330 - DNA, 15 bp, Homo sapiens
gctcggaggagtttg

SEQ ID NO: 1341331 - DNA, 15 bp, Homo sapiens
agctcggaggagttt

SEQ ID NO: 1341332 - DNA, 15 bp, Homo sapiens
tagctcggaggagtt

SEQ ID NO: 1341333 - DNA, 15 bp, Homo sapiens
ttagctcggaggagt

SEQ ID NO: 1341334 - DNA, 15 bp, Homo sapiens
tttagctcggaggag

SEQ ID NO: 1341335 - DNA, 15 bp, Homo sapiens
ctttagctcggagga

SEQ ID NO: 1341336 - DNA, 15 bp, Homo sapiens
cctttagctcggagg

SEQ ID NO: 1341337 - DNA, 15 bp, Homo sapiens
tcctttagctcggag

SEQ ID NO: 1341338 - DNA, 15 bp, Homo sapiens
ctcctttagctcgga

SEQ ID NO: 1341339 - DNA, 15 bp, Homo sapiens
gctcctttagctcgg

SEQ ID NO: 1341340 - DNA, 15 bp, Homo sapiens
tgctcctttagctcg

SEQ ID NO: 1341341 - DNA, 15 bp, Homo sapiens
gtgctcctttagctc

SEQ ID NO: 1341342 - DNA, 15 bp, Homo sapiens
cgtgctcctttagct

SEQ ID NO: 1341343 - DNA, 15 bp, Homo sapiens
acgtgctcctttagc

SEQ ID NO: 1341344 - DNA, 15 bp, Homo sapiens
aacgtgctcctttag

SEQ ID NO: 1341345 - DNA, 15 bp, Homo sapiens
gaacgtgctccttta

SEQ ID NO: 1341346 - DNA, 15 bp, Homo sapiens
agaacgtgctccttt

SEQ ID NO: 1341347 - DNA, 15 bp, Homo sapiens
tagaacgtgctcctt

SEQ ID NO: 1341348 - DNA, 15 bp, Homo sapiens
ttagaacgtgctcct

SEQ ID NO: 1341349 - DNA, 15 bp, Homo sapiens
gttagaacgtgctcc

SEQ ID NO: 1341350 - DNA, 15 bp, Homo sapiens
ggttagaacgtgctc

SEQ ID NO: 1341351 - DNA, 15 bp, Homo sapiens
gggttagaacgtgct

SEQ ID NO: 1341352 - DNA, 15 bp, Homo sapiens
tgggttagaacgtgc

SEQ ID NO: 1341353 - DNA, 15 bp, Homo sapiens
ttgggttagaacgtg

SEQ ID NO: 1341354 - DNA, 15 bp, Homo sapiens
attgggttagaacgt

SEQ ID NO: 1341355 - DNA, 15 bp, Homo sapiens
tattgggttagaacg

SEQ ID NO: 1341356 - DNA, 15 bp, Homo sapiens
gtattgggttagaac

SEQ ID NO: 1341357 - DNA, 15 bp, Homo sapiens
tgtattgggttagaa

SEQ ID NO: 1341358 - DNA, 15 bp, Homo sapiens
ttgtattgggttaga

SEQ ID NO: 1341359 - DNA, 15 bp, Homo sapiens
cttgtattgggttag

SEQ ID NO: 1341360 - DNA, 15 bp, Homo sapiens
ccttgtattgggtta

SEQ ID NO: 1341361 - DNA, 15 bp, Homo sapiens
tccttgtattgggtt

SEQ ID NO: 1341362 - DNA, 15 bp, Homo sapiens
ttccttgtattgggt

SEQ ID NO: 1341363 - DNA, 15 bp, Homo sapiens
cttccttgtattggg

SEQ ID NO: 1341364 - DNA, 15 bp, Homo sapiens
gcttccttgtattgg

SEQ ID NO: 1341365 - DNA, 15 bp, Homo sapiens
agcttccttgtattg

SEQ ID NO: 1341366 - DNA, 15 bp, Homo sapiens
tagcttccttgtatt

SEQ ID NO: 1341367 - DNA, 15 bp, Homo sapiens
ttagcttccttgtat

SEQ ID NO: 1341368 - DNA, 15 bp, Homo sapiens
cttagcttccttgta

SEQ ID NO: 1341369 - DNA, 15 bp, Homo sapiens
tcttagcttccttgt

SEQ ID NO: 1341370 - DNA, 15 bp, Homo sapiens
ttcttagcttccttg

SEQ ID NO: 1341371 - DNA, 15 bp, Homo sapiens
gttcttagcttcctt

SEQ ID NO: 1341372 - DNA, 15 bp, Homo sapiens
ggttcttagcttcct

SEQ ID NO: 1341373 - DNA, 15 bp, Homo sapiens
aggttcttagcttcc

SEQ ID NO: 1341374 - DNA, 15 bp, Homo sapiens
aaggttcttagcttc

SEQ ID NO: 1341375 - DNA, 15 bp, Homo sapiens
caaggttcttagctt

SEQ ID NO: 1341376 - DNA, 15 bp, Homo sapiens
tcaaggttcttagct

SEQ ID NO: 1341377 - DNA, 15 bp, Homo sapiens
ttcaaggttcttagc

SEQ ID NO: 1341378 - DNA, 15 bp, Homo sapiens
tttcaaggttcttag

SEQ ID NO: 1341379 - DNA, 15 bp, Homo sapiens
ttttcaaggttctta

SEQ ID NO: 1341380 - DNA, 15 bp, Homo sapiens
tttttcaaggttctt

SEQ ID NO: 1341381 - DNA, 15 bp, Homo sapiens
ttttttcaaggttct

SEQ ID NO: 1341382 - DNA, 15 bp, Homo sapiens
cttttttcaaggttc

SEQ ID NO: 1341383 - DNA, 15 bp, Homo sapiens
ccttttttcaaggtt

SEQ ID NO: 1341384 - DNA, 15 bp, Homo sapiens
accttttttcaaggt

SEQ ID NO: 1341385 - DNA, 15 bp, Homo sapiens
aaccttttttcaagg

SEQ ID NO: 1341386 - DNA, 15 bp, Homo sapiens
taaccttttttcaag

SEQ ID NO: 1341387 - DNA, 15 bp, Homo sapiens
ctaaccttttttcaa

SEQ ID NO: 1341388 - DNA, 15 bp, Homo sapiens
tctaaccttttttca

SEQ ID NO: 1341389 - DNA, 15 bp, Homo sapiens
ctctaaccttttttc

SEQ ID NO: 1341390 - DNA, 15 bp, Homo sapiens
cctctaacctttttt

SEQ ID NO: 1341391 - DNA, 15 bp, Homo sapiens
tcctctaaccttttt

SEQ ID NO: 1341392 - DNA, 15 bp, Homo sapiens
ttcctctaacctttt

SEQ ID NO: 1341393 - DNA, 15 bp, Homo sapiens
attcctctaaccttt

SEQ ID NO: 1341394 - DNA, 15 bp, Homo sapiens
aattcctctaacctt

SEQ ID NO: 1341395 - DNA, 15 bp, Homo sapiens
caattcctctaacct

SEQ ID NO: 1341396 - DNA, 15 bp, Homo sapiens
gcaattcctctaacc

SEQ ID NO: 1341397 - DNA, 15 bp, Homo sapiens
agcaattcctctaac

SEQ ID NO: 1341398 - DNA, 15 bp, Homo sapiens
tagcaattcctctaa

SEQ ID NO: 1341399 - DNA, 15 bp, Homo sapiens
ttagcaattcctcta

SEQ ID NO: 1341400 - DNA, 15 bp, Homo sapiens
gttagcaattcctct

SEQ ID NO: 1341401 - DNA, 15 bp, Homo sapiens
agttagcaattcctc

SEQ ID NO: 1341402 - DNA, 15 bp, Homo sapiens
tagttagcaattcct

SEQ ID NO: 1341403 - DNA, 15 bp, Homo sapiens
ctagttagcaattcc

SEQ ID NO: 1341404 - DNA, 15 bp, Homo sapiens
tctagttagcaattc

SEQ ID NO: 1341405 - DNA, 15 bp, Homo sapiens
ttctagttagcaatt

SEQ ID NO: 1341406 - DNA, 15 bp, Homo sapiens
attctagttagcaat

SEQ ID NO: 1341407 - DNA, 15 bp, Homo sapiens
tattctagttagcaa

SEQ ID NO: 1341408 - DNA, 15 bp, Homo sapiens
ttattctagttagca

SEQ ID NO: 1341409 - DNA, 15 bp, Homo sapiens
tggttattctagtta

SEQ ID NO: 1341410 - DNA, 15 bp, Homo sapiens
ctggttattctagtt

SEQ ID NO: 1341411 - DNA, 15 bp, Homo sapiens
actggttattctagt

SEQ ID NO: 1341412 - DNA, 15 bp, Homo sapiens
aactggttattctag

SEQ ID NO: 1341413 - DNA, 15 bp, Homo sapiens
aaactggttattcta

SEQ ID NO: 1341414 - DNA, 15 bp, Homo sapiens
taaactggttattct

SEQ ID NO: 1341415 - DNA, 15 bp, Homo sapiens
ctaaactggttattc

SEQ ID NO: 1341416 - DNA, 15 bp, Homo sapiens
tctaaactggttatt

SEQ ID NO: 1341417 - DNA, 15 bp, Homo sapiens
ctctaaactggttat

SEQ ID NO: 1341418 - DNA, 15 bp, Homo sapiens
tctctaaactggtta

SEQ ID NO: 1341419 - DNA, 15 bp, Homo sapiens
ttctctaaactggtt

SEQ ID NO: 1341420 - DNA, 15 bp, Homo sapiens
cttctctaaactggt

SEQ ID NO: 1341421 - DNA, 15 bp, Homo sapiens
tcttctctaaactgg

SEQ ID NO: 1341422 - DNA, 15 bp, Homo sapiens
ttcttctctaaactg

SEQ ID NO: 1341423 - DNA, 15 bp, Homo sapiens
gttcttctctaaact

SEQ ID NO: 1341424 - DNA, 15 bp, Homo sapiens
tgttcttctctaaac

SEQ ID NO: 1341425 - DNA, 15 bp, Homo sapiens
gtgttcttctctaaa

SEQ ID NO: 1341426 - DNA, 15 bp, Homo sapiens
tgtgttcttctctaa

SEQ ID NO: 1341427 - DNA, 15 bp, Homo sapiens
ttgtgttcttctcta

SEQ ID NO: 1341428 - DNA, 15 bp, Homo sapiens
tttgtgttcttctct

SEQ ID NO: 1341429 - DNA, 15 bp, Homo sapiens
gtttgtgttcttctc

SEQ ID NO: 1341430 - DNA, 15 bp, Homo sapiens
tgtttgtgttcttct

SEQ ID NO: 1341431 - DNA, 15 bp, Homo sapiens
gtgtttgtgttcttc

SEQ ID NO: 1341432 - DNA, 15 bp, Homo sapiens
tgtgtttgtgttctt

SEQ ID NO: 1341433 - DNA, 15 bp, Homo sapiens
ttgtgtttgtgttct

SEQ ID NO: 1341434 - DNA, 15 bp, Homo sapiens
cttgtgtttgtgttc

SEQ ID NO: 1341435 - DNA, 15 bp, Homo sapiens
acttgtgtttgtgtt

SEQ ID NO: 1341436 - DNA, 15 bp, Homo sapiens
aacttgtgtttgtgt

SEQ ID NO: 1341437 - DNA, 15 bp, Homo sapiens
aaacttgtgtttgtg

SEQ ID NO: 1341438 - DNA, 15 bp, Homo sapiens
taaacttgtgtttgt

SEQ ID NO: 1341439 - DNA, 15 bp, Homo sapiens
ctaaacttgtgtttg

SEQ ID NO: 1341440 - DNA, 15 bp, Homo sapiens
tctaaacttgtgttt

SEQ ID NO: 1341441 - DNA, 15 bp, Homo sapiens
ctctaaacttgtgtt

SEQ ID NO: 1341442 - DNA, 15 bp, Homo sapiens
tctctaaacttgtgt

SEQ ID NO: 1341443 - DNA, 15 bp, Homo sapiens
ttctctaaacttgtg

SEQ ID NO: 1341444 - DNA, 15 bp, Homo sapiens
cttctctaaacttgt

SEQ ID NO: 1341445 - DNA, 15 bp, Homo sapiens
tcttctctaaacttg

SEQ ID NO: 1341446 - DNA, 15 bp, Homo sapiens
atcttctctaaactt

SEQ ID NO: 1341447 - DNA, 15 bp, Homo sapiens
catcttctctaaact

SEQ ID NO: 1341448 - DNA, 15 bp, Homo sapiens
ccatcttctctaaac

SEQ ID NO: 1341449 - DNA, 15 bp, Homo sapiens
tccatcttctctaaa

SEQ ID NO: 1341450 - DNA, 15 bp, Homo sapiens
ctccatcttctctaa

SEQ ID NO: 1341451 - DNA, 15 bp, Homo sapiens
gctccatcttctcta

SEQ ID NO: 1341452 - DNA, 15 bp, Homo sapiens
agctccatcttctct

SEQ ID NO: 1341453 - DNA, 15 bp, Homo sapiens
cagctccatcttctc

SEQ ID NO: 1341454 - DNA, 15 bp, Homo sapiens
tcagctccatcttct

SEQ ID NO: 1341455 - DNA, 15 bp, Homo sapiens
ttcagctccatcttc

SEQ ID NO: 1341456 - DNA, 15 bp, Homo sapiens
tttcagctccatctt

SEQ ID NO: 1341457 - DNA, 15 bp, Homo sapiens
ttttcagctccatct

SEQ ID NO: 1341458 - DNA, 15 bp, Homo sapiens
tttttcagctccatc

SEQ ID NO: 1341459 - DNA, 15 bp, Homo sapiens
gtttttcagctccat

SEQ ID NO: 1341460 - DNA, 15 bp, Homo sapiens
tgtttttcagctcca

SEQ ID NO: 1341461 - DNA, 15 bp, Homo sapiens
ctgtttttcagctcc

SEQ ID NO: 1341462 - DNA, 15 bp, Homo sapiens
gctgtttttcagctc

SEQ ID NO: 1341463 - DNA, 15 bp, Homo sapiens
tgctgtttttcagct

SEQ ID NO: 1341464 - DNA, 15 bp, Homo sapiens
gtgctgtttttcagc

SEQ ID NO: 1341465 - DNA, 15 bp, Homo sapiens
tgtgctgtttttcag

SEQ ID NO: 1341466 - DNA, 15 bp, Homo sapiens
ttgtgctgtttttca

SEQ ID NO: 1341467 - DNA, 15 bp, Homo sapiens
cttgtgctgtttttc

SEQ ID NO: 1341468 - DNA, 15 bp, Homo sapiens
tcttgtgctgttttt

SEQ ID NO: 1341469 - DNA, 15 bp, Homo sapiens
ttcttgtgctgtttt

SEQ ID NO: 1341470 - DNA, 15 bp, Homo sapiens
gttcttgtgctgttt

SEQ ID NO: 1341471 - DNA, 15 bp, Homo sapiens
agttcttgtgctgtt

SEQ ID NO: 1341472 - DNA, 15 bp, Homo sapiens
aagttcttgtgctgt

SEQ ID NO: 1341473 - DNA, 15 bp, Homo sapiens
gaagttcttgtgctg

SEQ ID NO: 1341474 - DNA, 15 bp, Homo sapiens
tgaagttcttgtgct

SEQ ID NO: 1341475 - DNA, 15 bp, Homo sapiens
atgaagttcttgtgc

SEQ ID NO: 1341476 - DNA, 15 bp, Homo sapiens
catgaagttcttgtg

SEQ ID NO: 1341477 - DNA, 15 bp, Homo sapiens
tcatgaagttcttgt

SEQ ID NO: 1341478 - DNA, 15 bp, Homo sapiens
ttcatgaagttcttg

SEQ ID NO: 1341479 - DNA, 15 bp, Homo sapiens
cttcatgaagttctt

SEQ ID NO: 1341480 - DNA, 15 bp, Homo sapiens
gcttcatgaagttct

SEQ ID NO: 1341481 - DNA, 15 bp, Homo sapiens
tgcttcatgaagttc

SEQ ID NO: 1341482 - DNA, 15 bp, Homo sapiens
atgcttcatgaagtt

SEQ ID NO: 1341483 - DNA, 15 bp, Homo sapiens
tatgcttcatgaagt

SEQ ID NO: 1341484 - DNA, 15 bp, Homo sapiens
gtatgcttcatgaag

SEQ ID NO: 1341485 - DNA, 15 bp, Homo sapiens
tgtatgcttcatgaa

SEQ ID NO: 1341486 - DNA, 15 bp, Homo sapiens
gtgtatgcttcatga

SEQ ID NO: 1341487 - DNA, 15 bp, Homo sapiens
tgtgtatgcttcatg

SEQ ID NO: 1341488 - DNA, 15 bp, Homo sapiens
ttgtgtatgcttcat

SEQ ID NO: 1341489 - DNA, 15 bp, Homo sapiens
tttgtgtatgcttca

SEQ ID NO: 1341490 - DNA, 15 bp, Homo sapiens
atttgtgtatgcttc

SEQ ID NO: 1341491 - DNA, 15 bp, Homo sapiens
tatttgtgtatgctt

SEQ ID NO: 1341492 - DNA, 15 bp, Homo sapiens
atatttgtgtatgct

SEQ ID NO: 1341493 - DNA, 15 bp, Homo sapiens
gatatttgtgtatgc

SEQ ID NO: 1341494 - DNA, 15 bp, Homo sapiens
tgatatttgtgtatg

SEQ ID NO: 1341495 - DNA, 15 bp, Homo sapiens
attgatatttgtgta

SEQ ID NO: 1341496 - DNA, 15 bp, Homo sapiens
tattgatatttgtgt

SEQ ID NO: 1341497 - DNA, 15 bp, Homo sapiens
ctattgatatttgtg

SEQ ID NO: 1341498 - DNA, 15 bp, Homo sapiens
gctattgatatttgt

SEQ ID NO: 1341499 - DNA, 15 bp, Homo sapiens
ggctattgatatttg

SEQ ID NO: 1341500 - DNA, 15 bp, Homo sapiens
cggctattgatattt

SEQ ID NO: 1341501 - DNA, 15 bp, Homo sapiens
tcggctattgatatt

SEQ ID NO: 1341502 - DNA, 15 bp, Homo sapiens
ttcggctattgatat

SEQ ID NO: 1341503 - DNA, 15 bp, Homo sapiens
attcggctattgata

SEQ ID NO: 1341504 - DNA, 15 bp, Homo sapiens
gattcggctattgat

SEQ ID NO: 1341505 - DNA, 15 bp, Homo sapiens
cgattcggctattga

SEQ ID NO: 1341506 - DNA, 15 bp, Homo sapiens
tcgattcggctattg

SEQ ID NO: 1341507 - DNA, 15 bp, Homo sapiens
atcgattcggctatt

SEQ ID NO: 1341508 - DNA, 15 bp, Homo sapiens
aatcgattcggctat

SEQ ID NO: 1341509 - DNA, 15 bp, Homo sapiens
taatcgattcggcta

SEQ ID NO: 1341510 - DNA, 15 bp, Homo sapiens
ttaatcgattcggct

SEQ ID NO: 1341511 - DNA, 15 bp, Homo sapiens
cttaatcgattcggc

SEQ ID NO: 1341512 - DNA, 15 bp, Homo sapiens
gcttaatcgattcgg

SEQ ID NO: 1341513 - DNA, 15 bp, Homo sapiens
tgcttaatcgattcg

SEQ ID NO: 1341514 - DNA, 15 bp, Homo sapiens
ctgcttaatcgattc

SEQ ID NO: 1341515 - DNA, 15 bp, Homo sapiens
tctgcttaatcgatt

SEQ ID NO: 1341516 - DNA, 15 bp, Homo sapiens
ttctgcttaatcgat

SEQ ID NO: 1341517 - DNA, 15 bp, Homo sapiens
cttctgcttaatcga

SEQ ID NO: 1341518 - DNA, 15 bp, Homo sapiens
tcttctgcttaatcg

SEQ ID NO: 1341519 - DNA, 15 bp, Homo sapiens
ttcttctgcttaatc

SEQ ID NO: 1341520 - DNA, 15 bp, Homo sapiens
tttcttctgcttaat

SEQ ID NO: 1341521 - DNA, 15 bp, Homo sapiens
ctttcttctgcttaa

SEQ ID NO: 1341522 - DNA, 15 bp, Homo sapiens
cctttcttctgctta

SEQ ID NO: 1341523 - DNA, 15 bp, Homo sapiens
tcctttcttctgctt

SEQ ID NO: 1341524 - DNA, 15 bp, Homo sapiens
atcctttcttctgct

SEQ ID NO: 1341525 - DNA, 15 bp, Homo sapiens
tatcctttcttctgc

SEQ ID NO: 1341526 - DNA, 15 bp, Homo sapiens
atatcctttcttctg

SEQ ID NO: 1341527 - DNA, 15 bp, Homo sapiens
gatatcctttcttct

SEQ ID NO: 1341528 - DNA, 15 bp, Homo sapiens
tgatatcctttcttc

SEQ ID NO: 1341529 - DNA, 15 bp, Homo sapiens
ctgatatcctttctt

SEQ ID NO: 1341530 - DNA, 15 bp, Homo sapiens
tctgatatcctttct

SEQ ID NO: 1341531 - DNA, 15 bp, Homo sapiens
ctctgatatcctttc

SEQ ID NO: 1341532 - DNA, 15 bp, Homo sapiens
tctctgatatccttt

SEQ ID NO: 1341533 - DNA, 15 bp, Homo sapiens
atctctgatatcctt

SEQ ID NO: 1341534 - DNA, 15 bp, Homo sapiens
aatctctgatatcct

SEQ ID NO: 1341535 - DNA, 15 bp, Homo sapiens
caatctctgatatcc

SEQ ID NO: 1341536 - DNA, 15 bp, Homo sapiens
tcaatctctgatatc

SEQ ID NO: 1341537 - DNA, 15 bp, Homo sapiens
ttcaatctctgatat

SEQ ID NO: 1341538 - DNA, 15 bp, Homo sapiens
cttcaatctctgata

SEQ ID NO: 1341539 - DNA, 15 bp, Homo sapiens
tcttcaatctctgat

SEQ ID NO: 1341540 - DNA, 15 bp, Homo sapiens
atcttcaatctctga

SEQ ID NO: 1341541 - DNA, 15 bp, Homo sapiens
gatcttcaatctctg

SEQ ID NO: 1341542 - DNA, 15 bp, Homo sapiens
tgatcttcaatctct

SEQ ID NO: 1341543 - DNA, 15 bp, Homo sapiens
ttgatcttcaatctc

SEQ ID NO: 1341544 - DNA, 15 bp, Homo sapiens
gttgatcttcaatct

SEQ ID NO: 1341545 - DNA, 15 bp, Homo sapiens
agttgatcttcaatc

SEQ ID NO: 1341546 - DNA, 15 bp, Homo sapiens
aagttgatcttcaat

SEQ ID NO: 1341547 - DNA, 15 bp, Homo sapiens
caagttgatcttcaa

SEQ ID NO: 1341548 - DNA, 15 bp, Homo sapiens
tcaagttgatcttca

SEQ ID NO: 1341549 - DNA, 15 bp, Homo sapiens
atcaagttgatcttc

SEQ ID NO: 1341550 - DNA, 15 bp, Homo sapiens
catcaagttgatctt

SEQ ID NO: 1341551 - DNA, 15 bp, Homo sapiens
tcatcaagttgatct

SEQ ID NO: 1341552 - DNA, 15 bp, Homo sapiens
ttcatcaagttgatc

SEQ ID NO: 1341553 - DNA, 15 bp, Homo sapiens
tttcatcaagttgat

SEQ ID NO: 1341554 - DNA, 15 bp, Homo sapiens
atttcatcaagttga

SEQ ID NO: 1341555 - DNA, 15 bp, Homo sapiens
tatttcatcaagttg

SEQ ID NO: 1341556 - DNA, 15 bp, Homo sapiens
ttatttcatcaagtt

SEQ ID NO: 1341557 - DNA, 15 bp, Homo sapiens
tttatttcatcaagt

SEQ ID NO: 1341558 - DNA, 15 bp, Homo sapiens
ctttatttcatcaag

SEQ ID NO: 1341559 - DNA, 15 bp, Homo sapiens
actttatttcatcaa

SEQ ID NO: 1341560 - DNA, 15 bp, Homo sapiens
tactttatttcatca

SEQ ID NO: 1341561 - DNA, 15 bp, Homo sapiens
atactttatttcatc

SEQ ID NO: 1341562 - DNA, 15 bp, Homo sapiens
catactttatttcat

SEQ ID NO: 1341563 - DNA, 15 bp, Homo sapiens
tcatactttatttca

SEQ ID NO: 1341564 - DNA, 15 bp, Homo sapiens
ttcatactttatttc

SEQ ID NO: 1341565 - DNA, 15 bp, Homo sapiens
cttcatactttattt

SEQ ID NO: 1341566 - DNA, 15 bp, Homo sapiens
tcttcatactttatt

SEQ ID NO: 1341567 - DNA, 15 bp, Homo sapiens
gtcttcatactttat

SEQ ID NO: 1341568 - DNA, 15 bp, Homo sapiens
tgtcttcatacttta

SEQ ID NO: 1341569 - DNA, 15 bp, Homo sapiens
ttgtcttcatacttt

SEQ ID NO: 1341570 - DNA, 15 bp, Homo sapiens
cttgtcttcatactt

SEQ ID NO: 1341571 - DNA, 15 bp, Homo sapiens
tcttgtcttcatact

SEQ ID NO: 1341572 - DNA, 15 bp, Homo sapiens
gtcttgtcttcatac

SEQ ID NO: 1341573 - DNA, 15 bp, Homo sapiens
agtcttgtcttcata

SEQ ID NO: 1341574 - DNA, 15 bp, Homo sapiens
tagtcttgtcttcat

SEQ ID NO: 1341575 - DNA, 15 bp, Homo sapiens
ctagtcttgtcttca

SEQ ID NO: 1341576 - DNA, 15 bp, Homo sapiens
tctagtcttgtcttc

SEQ ID NO: 1341577 - DNA, 15 bp, Homo sapiens
ctctagtcttgtctt

SEQ ID NO: 1341578 - DNA, 15 bp, Homo sapiens
tctctagtcttgtct

SEQ ID NO: 1341579 - DNA, 15 bp, Homo sapiens
ttctctagtcttgtc

SEQ ID NO: 1341580 - DNA, 15 bp, Homo sapiens
tttctctagtcttgt

SEQ ID NO: 1341581 - DNA, 15 bp, Homo sapiens
ttttctctagtcttg

SEQ ID NO: 1341582 - DNA, 15 bp, Homo sapiens
tttttctctagtctt

SEQ ID NO: 1341583 - DNA, 15 bp, Homo sapiens
ttttttctctagtct

SEQ ID NO: 1341584 - DNA, 15 bp, Homo sapiens
cttttttctctagtc

SEQ ID NO: 1341585 - DNA, 15 bp, Homo sapiens
tcttttttctctagt

SEQ ID NO: 1341586 - DNA, 15 bp, Homo sapiens
ttcttttttctctag

SEQ ID NO: 1341587 - DNA, 15 bp, Homo sapiens
cattcttttttctct

SEQ ID NO: 1341588 - DNA, 15 bp, Homo sapiens
tcattcttttttctc

SEQ ID NO: 1341589 - DNA, 15 bp, Homo sapiens
ttcattcttttttct

SEQ ID NO: 1341590 - DNA, 15 bp, Homo sapiens
tttcattcttttttc

SEQ ID NO: 1341591 - DNA, 15 bp, Homo sapiens
ttttcattctttttt

SEQ ID NO: 1341592 - DNA, 15 bp, Homo sapiens
cttttcattcttttt

SEQ ID NO: 1341593 - DNA, 15 bp, Homo sapiens
ccttttcattctttt

SEQ ID NO: 1341594 - DNA, 15 bp, Homo sapiens
tccttttcattcttt

SEQ ID NO: 1341595 - DNA, 15 bp, Homo sapiens
ttccttttcattctt

SEQ ID NO: 1341596 - DNA, 15 bp, Homo sapiens
tttccttttcattct

SEQ ID NO: 1341597 - DNA, 15 bp, Homo sapiens
ctttccttttcattc

SEQ ID NO: 1341598 - DNA, 15 bp, Homo sapiens
tctttccttttcatt

SEQ ID NO: 1341599 - DNA, 15 bp, Homo sapiens
gttctttccttttca

SEQ ID NO: 1341600 - DNA, 15 bp, Homo sapiens
tgttctttccttttc

SEQ ID NO: 1341601 - DNA, 15 bp, Homo sapiens
ttgttctttcctttt

SEQ ID NO: 1341602 - DNA, 15 bp, Homo sapiens
tttgttctttccttt

SEQ ID NO: 1341603 - DNA, 15 bp, Homo sapiens
ctttgttctttcctt

SEQ ID NO: 1341604 - DNA, 15 bp, Homo sapiens
gctttgttctttcct

SEQ ID NO: 1341605 - DNA, 15 bp, Homo sapiens
ggctttgttctttcc

SEQ ID NO: 1341606 - DNA, 15 bp, Homo sapiens
aggctttgttctttc

SEQ ID NO: 1341607 - DNA, 15 bp, Homo sapiens
gaggctttgttcttt

SEQ ID NO: 1341608 - DNA, 15 bp, Homo sapiens
ggaggctttgttctt

SEQ ID NO: 1341609 - DNA, 15 bp, Homo sapiens
tggaggctttgttct

SEQ ID NO: 1341610 - DNA, 15 bp, Homo sapiens
ttggaggctttgttc

SEQ ID NO: 1341611 - DNA, 15 bp, Homo sapiens
cttggaggctttgtt

SEQ ID NO: 1341612 - DNA, 15 bp, Homo sapiens
tcttggaggctttgt

SEQ ID NO: 1341613 - DNA, 15 bp, Homo sapiens
atcccatatttcttg

SEQ ID NO: 1341614 - DNA, 15 bp, Homo sapiens
aatcccatatttctt

SEQ ID NO: 1341615 - DNA, 15 bp, Homo sapiens
taatcccatatttct

SEQ ID NO: 1341616 - DNA, 15 bp, Homo sapiens
ataatcccatatttc

SEQ ID NO: 1341617 - DNA, 15 bp, Homo sapiens
cataatcccatattt

SEQ ID NO: 1341618 - DNA, 15 bp, Homo sapiens
acataatcccatatt

SEQ ID NO: 1341619 - DNA, 15 bp, Homo sapiens
cacataatcccatat

SEQ ID NO: 1341620 - DNA, 15 bp, Homo sapiens
tcacataatcccata

SEQ ID NO: 1341621 - DNA, 15 bp, Homo sapiens
ttcacataatcccat

SEQ ID NO: 1341622 - DNA, 15 bp, Homo sapiens
tttcacataatccca

SEQ ID NO: 1341623 - DNA, 15 bp, Homo sapiens
ttttcacataatccc

SEQ ID NO: 1341624 - DNA, 15 bp, Homo sapiens
cttttcacataatcc

SEQ ID NO: 1341625 - DNA, 15 bp, Homo sapiens
tcttttcacataatc

SEQ ID NO: 1341626 - DNA, 15 bp, Homo sapiens
gtcttttcacataat

SEQ ID NO: 1341627 - DNA, 15 bp, Homo sapiens
ggtcttttcacataa

SEQ ID NO: 1341628 - DNA, 15 bp, Homo sapiens
attggtcttttcaca

SEQ ID NO: 1341629 - DNA, 15 bp, Homo sapiens
gattggtcttttcac

SEQ ID NO: 1341630 - DNA, 15 bp, Homo sapiens
ggattggtcttttca

SEQ ID NO: 1341631 - DNA, 15 bp, Homo sapiens
aggattggtcttttc

SEQ ID NO: 1341632 - DNA, 15 bp, Homo sapiens
taggattggtctttt

SEQ ID NO: 1341633 - DNA, 15 bp, Homo sapiens
gtaggattggtcttt

SEQ ID NO: 1341634 - DNA, 15 bp, Homo sapiens
tgtaggattggtctt

SEQ ID NO: 1341635 - DNA, 15 bp, Homo sapiens
atgtaggattggtct

SEQ ID NO: 1341636 - DNA, 15 bp, Homo sapiens
aatgtaggattggtc

SEQ ID NO: 1341637 - DNA, 15 bp, Homo sapiens
aaatgtaggattggt

SEQ ID NO: 1341638 - DNA, 15 bp, Homo sapiens
caaatgtaggattgg

SEQ ID NO: 1341639 - DNA, 15 bp, Homo sapiens
tcaaatgtaggattg

SEQ ID NO: 1341640 - DNA, 15 bp, Homo sapiens
atcaaatgtaggatt

SEQ ID NO: 1341641 - DNA, 15 bp, Homo sapiens
aatcaaatgtaggat

SEQ ID NO: 1341642 - DNA, 15 bp, Homo sapiens
caatcaaatgtagga

SEQ ID NO: 1341643 - DNA, 15 bp, Homo sapiens
ccaatcaaatgtagg

SEQ ID NO: 1341644 - DNA, 15 bp, Homo sapiens
accaatcaaatgtag

SEQ ID NO: 1341645 - DNA, 15 bp, Homo sapiens
caccaatcaaatgta

SEQ ID NO: 1341646 - DNA, 15 bp, Homo sapiens
acaccaatcaaatgt

SEQ ID NO: 1341647 - DNA, 15 bp, Homo sapiens
tacaccaatcaaatg

SEQ ID NO: 1341648 - DNA, 15 bp, Homo sapiens
gtacaccaatcaaat

SEQ ID NO: 1341649 - DNA, 15 bp, Homo sapiens
ggtacaccaatcaaa

SEQ ID NO: 1341650 - DNA, 15 bp, Homo sapiens
aggtacaccaatcaa

SEQ ID NO: 1341651 - DNA, 15 bp, Homo sapiens
ccctgtcactttcag

SEQ ID NO: 1341652 - DNA, 15 bp, Homo sapiens
tccctgtcactttca

SEQ ID NO: 1341653 - DNA, 15 bp, Homo sapiens
ctccctgtcactttc

SEQ ID NO: 1341654 - DNA, 15 bp, Homo sapiens
tctccctgtcacttt

SEQ ID NO: 1341655 - DNA, 15 bp, Homo sapiens
ttctccctgtcactt

SEQ ID NO: 1341656 - DNA, 15 bp, Homo sapiens
attctccctgtcact

SEQ ID NO: 1341657 - DNA, 15 bp, Homo sapiens
cattctccctgtcac

SEQ ID NO: 1341658 - DNA, 15 bp, Homo sapiens
ccattctccctgtca

SEQ ID NO: 1341659 - DNA, 15 bp, Homo sapiens
tccattctccctgtc

SEQ ID NO: 1341660 - DNA, 15 bp, Homo sapiens
ttccattctccctgt

SEQ ID NO: 1341661 - DNA, 15 bp, Homo sapiens
gttccattctccctg

SEQ ID NO: 1341662 - DNA, 15 bp, Homo sapiens
ggttccattctccct

SEQ ID NO: 1341663 - DNA, 15 bp, Homo sapiens
tggttccattctccc

SEQ ID NO: 1341664 - DNA, 15 bp, Homo sapiens
ttggttccattctcc

SEQ ID NO: 1341665 - DNA, 15 bp, Homo sapiens
cttggttccattctc

SEQ ID NO: 1341666 - DNA, 15 bp, Homo sapiens
acttggttccattct

SEQ ID NO: 1341667 - DNA, 15 bp, Homo sapiens
aacttggttccattc

SEQ ID NO: 1341668 - DNA, 15 bp, Homo sapiens
atgttttccaacttg

SEQ ID NO: 1341669 - DNA, 15 bp, Homo sapiens
aatgttttccaactt

SEQ ID NO: 1341670 - DNA, 15 bp, Homo sapiens
gaatgttttccaact

SEQ ID NO: 1341671 - DNA, 15 bp, Homo sapiens
agaatgttttccaac

SEQ ID NO: 1341672 - DNA, 15 bp, Homo sapiens
aagaatgttttccaa

SEQ ID NO: 1341673 - DNA, 15 bp, Homo sapiens
gaagaatgttttcca

SEQ ID NO: 1341674 - DNA, 15 bp, Homo sapiens
tgaagaatgttttcc

SEQ ID NO: 1341675 - DNA, 15 bp, Homo sapiens
ctgaagaatgttttc

SEQ ID NO: 1341676 - DNA, 15 bp, Homo sapiens
cctgaagaatgtttt

SEQ ID NO: 1341677 - DNA, 15 bp, Homo sapiens
tcctgaagaatgttt

SEQ ID NO: 1341678 - DNA, 15 bp, Homo sapiens
atcctgaagaatgtt

SEQ ID NO: 1341679 - DNA, 15 bp, Homo sapiens
tatcctgaagaatgt

SEQ ID NO: 1341680 - DNA, 15 bp, Homo sapiens
atatcctgaagaatg

SEQ ID NO: 1341681 - DNA, 15 bp, Homo sapiens
aatatcctgaagaat

SEQ ID NO: 1341682 - DNA, 15 bp, Homo sapiens
taatatcctgaagaa

SEQ ID NO: 1341683 - DNA, 15 bp, Homo sapiens
ataatatcctgaaga

SEQ ID NO: 1341684 - DNA, 15 bp, Homo sapiens
gataatatcctgaag

SEQ ID NO: 1341685 - DNA, 15 bp, Homo sapiens
ggataatatcctgaa

SEQ ID NO: 1341686 - DNA, 15 bp, Homo sapiens
tggataatatcctga

SEQ ID NO: 1341687 - DNA, 15 bp, Homo sapiens
gttggggaagttctc

SEQ ID NO: 1341688 - DNA, 15 bp, Homo sapiens
ggttggggaagttct

SEQ ID NO: 1341689 - DNA, 15 bp, Homo sapiens
aggttggggaagttc

SEQ ID NO: 1341690 - DNA, 15 bp, Homo sapiens
taggttggggaagtt

SEQ ID NO: 1341691 - DNA, 15 bp, Homo sapiens
ctaggttggggaagt

SEQ ID NO: 1341692 - DNA, 15 bp, Homo sapiens
gctaggttggggaag

SEQ ID NO: 1341693 - DNA, 15 bp, Homo sapiens
tgctaggttggggaa

SEQ ID NO: 1341694 - DNA, 15 bp, Homo sapiens
ttgctaggttgggga

SEQ ID NO: 1341695 - DNA, 15 bp, Homo sapiens
cttgctaggttgggg

SEQ ID NO: 1341696 - DNA, 15 bp, Homo sapiens
ccttgctaggttggg

SEQ ID NO: 1341697 - DNA, 15 bp, Homo sapiens
gccttgctaggttgg

SEQ ID NO: 1341698 - DNA, 15 bp, Homo sapiens
tgccttgctaggttg

SEQ ID NO: 1341699 - DNA, 15 bp, Homo sapiens
ctgccttgctaggtt

SEQ ID NO: 1341700 - DNA, 15 bp, Homo sapiens
cctgccttgctaggt

SEQ ID NO: 1341701 - DNA, 15 bp, Homo sapiens
gcctgccttgctagg

SEQ ID NO: 1341702 - DNA, 15 bp, Homo sapiens
gaatgttggcctgcc

SEQ ID NO: 1341703 - DNA, 15 bp, Homo sapiens
tgaatgttggcctgc

SEQ ID NO: 1341704 - DNA, 15 bp, Homo sapiens
ttgaatgttggcctg

SEQ ID NO: 1341705 - DNA, 15 bp, Homo sapiens
tttgaatgttggcct

SEQ ID NO: 1341706 - DNA, 15 bp, Homo sapiens
gtttgaatgttggcc

SEQ ID NO: 1341707 - DNA, 15 bp, Homo sapiens
agtttgaatgttggc

SEQ ID NO: 1341708 - DNA, 15 bp, Homo sapiens
gagtttgaatgttgg

SEQ ID NO: 1341709 - DNA, 15 bp, Homo sapiens
tgagtttgaatgttg

SEQ ID NO: 1341710 - DNA, 15 bp, Homo sapiens
ctgagtttgaatgtt

SEQ ID NO: 1341711 - DNA, 15 bp, Homo sapiens
cctgagtttgaatgt

SEQ ID NO: 1341712 - DNA, 15 bp, Homo sapiens
tcctgagtttgaatg

SEQ ID NO: 1341713 - DNA, 15 bp, Homo sapiens
ttcctgagtttgaat

SEQ ID NO: 1341714 - DNA, 15 bp, Homo sapiens
tttcctgagtttgaa

SEQ ID NO: 1341715 - DNA, 15 bp, Homo sapiens
atttcctgagtttga

SEQ ID NO: 1341716 - DNA, 15 bp, Homo sapiens
tatttcctgagtttg

SEQ ID NO: 1341717 - DNA, 15 bp, Homo sapiens
gtatttcctgagttt

SEQ ID NO: 1341718 - DNA, 15 bp, Homo sapiens
tgtatttcctgagtt

SEQ ID NO: 1341719 - DNA, 15 bp, Homo sapiens
ctgtatttcctgagt

SEQ ID NO: 1341720 - DNA, 15 bp, Homo sapiens
tctgtatttcctgag

SEQ ID NO: 1341721 - DNA, 15 bp, Homo sapiens
ctctgtatttcctga

SEQ ID NO: 1341722 - DNA, 15 bp, Homo sapiens
tctctgtatttcctg

SEQ ID NO: 1341723 - DNA, 15 bp, Homo sapiens
ttctctgtatttcct

SEQ ID NO: 1341724 - DNA, 15 bp, Homo sapiens
gttctctgtatttcc

SEQ ID NO: 1341725 - DNA, 15 bp, Homo sapiens
tgttctctgtatttc

SEQ ID NO: 1341726 - DNA, 15 bp, Homo sapiens
gtgttctctgtattt

SEQ ID NO: 1341727 - DNA, 15 bp, Homo sapiens
ggtgttctctgtatt

SEQ ID NO: 1341728 - DNA, 15 bp, Homo sapiens
tggtgttctctgtat

SEQ ID NO: 1341729 - DNA, 15 bp, Homo sapiens
gtggtgttctctgta

SEQ ID NO: 1341730 - DNA, 15 bp, Homo sapiens
tgtggtgttctctgt

SEQ ID NO: 1341731 - DNA, 15 bp, Homo sapiens
ttgtggtgttctctg

SEQ ID NO: 1341732 - DNA, 15 bp, Homo sapiens
tttgtggtgttctct

SEQ ID NO: 1341733 - DNA, 15 bp, Homo sapiens
ctttgtggtgttctc

SEQ ID NO: 1341734 - DNA, 15 bp, Homo sapiens
tctttgtggtgttct

SEQ ID NO: 1341735 - DNA, 15 bp, Homo sapiens
atctttgtggtgttc

SEQ ID NO: 1341736 - DNA, 15 bp, Homo sapiens
tatctttgtggtgtt

SEQ ID NO: 1341737 - DNA, 15 bp, Homo sapiens
gtatctttgtggtgt

SEQ ID NO: 1341738 - DNA, 15 bp, Homo sapiens
agtatctttgtggtg

SEQ ID NO: 1341739 - DNA, 15 bp, Homo sapiens
gagtatctttgtggt

SEQ ID NO: 1341740 - DNA, 15 bp, Homo sapiens
ggagtatctttgtgg

SEQ ID NO: 1341741 - DNA, 15 bp, Homo sapiens
aggagtatctttgtg

SEQ ID NO: 1341742 - DNA, 15 bp, Homo sapiens
aaggagtatctttgt

SEQ ID NO: 1341743 - DNA, 15 bp, Homo sapiens
caaggagtatctttg

SEQ ID NO: 1341744 - DNA, 15 bp, Homo sapiens
tcaaggagtatcttt

SEQ ID NO: 1341745 - DNA, 15 bp, Homo sapiens
ctcaaggagtatctt

SEQ ID NO: 1341746 - DNA, 15 bp, Homo sapiens
tctcaaggagtatct

SEQ ID NO: 1341747 - DNA, 15 bp, Homo sapiens
ttctcaaggagtatc

SEQ ID NO: 1341748 - DNA, 15 bp, Homo sapiens
cttctcaaggagtat

SEQ ID NO: 1341749 - DNA, 15 bp, Homo sapiens
tcttctcaaggagta

SEQ ID NO: 1341750 - DNA, 15 bp, Homo sapiens
ctcttctcaaggagt

SEQ ID NO: 1341751 - DNA, 15 bp, Homo sapiens
gctcttctcaaggag

SEQ ID NO: 1341752 - DNA, 15 bp, Homo sapiens
tgctcttctcaagga

SEQ ID NO: 1341753 - DNA, 15 bp, Homo sapiens
ttgctcttctcaagg

SEQ ID NO: 1341754 - DNA, 15 bp, Homo sapiens
gttgctcttctcaag

SEQ ID NO: 1341755 - DNA, 15 bp, Homo sapiens
ggttgctcttctcaa

SEQ ID NO: 1341756 - DNA, 15 bp, Homo sapiens
gggttgctcttctca

SEQ ID NO: 1341757 - DNA, 15 bp, Homo sapiens
ggggttgctcttctc

SEQ ID NO: 1341758 - DNA, 15 bp, Homo sapiens
tggggttgctcttct

SEQ ID NO: 1341759 - DNA, 15 bp, Homo sapiens
ttggggttgctcttc

SEQ ID NO: 1341760 - DNA, 15 bp, Homo sapiens
cttggggttgctctt

SEQ ID NO: 1341761 - DNA, 15 bp, Homo sapiens
tcttggggttgctct

SEQ ID NO: 1341762 - DNA, 15 bp, Homo sapiens
gtcttggggttgctc

SEQ ID NO: 1341763 - DNA, 15 bp, Homo sapiens
tgtcttggggttgct

SEQ ID NO: 1341764 - DNA, 15 bp, Homo sapiens
gtgtcttggggttgc

SEQ ID NO: 1341765 - DNA, 15 bp, Homo sapiens
cgtgtcttggggttg

SEQ ID NO: 1341766 - DNA, 15 bp, Homo sapiens
acgtgtcttggggtt

SEQ ID NO: 1341767 - DNA, 15 bp, Homo sapiens
tacgtgtcttggggt

SEQ ID NO: 1341768 - DNA, 15 bp, Homo sapiens
ttacgtgtcttgggg

SEQ ID NO: 1341769 - DNA, 15 bp, Homo sapiens
attacgtgtcttggg

SEQ ID NO: 1341770 - DNA, 15 bp, Homo sapiens
aattacgtgtcttgg

SEQ ID NO: 1341771 - DNA, 15 bp, Homo sapiens
caattacgtgtcttg

SEQ ID NO: 1341772 - DNA, 15 bp, Homo sapiens
acaattacgtgtctt

SEQ ID NO: 1341773 - DNA, 15 bp, Homo sapiens
gacaattacgtgtct

SEQ ID NO: 1341774 - DNA, 15 bp, Homo sapiens
tgacaattacgtgtc

SEQ ID NO: 1341775 - DNA, 15 bp, Homo sapiens
ctgacaattacgtgt

SEQ ID NO: 1341776 - DNA, 15 bp, Homo sapiens
tctgacaattacgtg

SEQ ID NO: 1341777 - DNA, 15 bp, Homo sapiens
atctgacaattacgt

SEQ ID NO: 1341778 - DNA, 15 bp, Homo sapiens
aatctgacaattacg

SEQ ID NO: 1341779 - DNA, 15 bp, Homo sapiens
gaatctgacaattac

SEQ ID NO: 1341780 - DNA, 15 bp, Homo sapiens
tgaatctgacaatta

SEQ ID NO: 1341781 - DNA, 15 bp, Homo sapiens
gtgaatctgacaatt

SEQ ID NO: 1341782 - DNA, 15 bp, Homo sapiens
ggtgaatctgacaat

SEQ ID NO: 1341783 - DNA, 15 bp, Homo sapiens
tggtgaatctgacaa

SEQ ID NO: 1341784 - DNA, 15 bp, Homo sapiens
ttggtgaatctgaca

SEQ ID NO: 1341785 - DNA, 15 bp, Homo sapiens
cttggtgaatctgac

SEQ ID NO: 1341786 - DNA, 15 bp, Homo sapiens
ccttggtgaatctga

SEQ ID NO: 1341787 - DNA, 15 bp, Homo sapiens
accttggtgaatctg

SEQ ID NO: 1341788 - DNA, 15 bp, Homo sapiens
aaccttggtgaatct

SEQ ID NO: 1341789 - DNA, 15 bp, Homo sapiens
taaccttggtgaatc

SEQ ID NO: 1341790 - DNA, 15 bp, Homo sapiens
ttaaccttggtgaat

SEQ ID NO: 1341791 - DNA, 15 bp, Homo sapiens
tttaaccttggtgaa

SEQ ID NO: 1341792 - DNA, 15 bp, Homo sapiens
ttttaaccttggtga

SEQ ID NO: 1341793 - DNA, 15 bp, Homo sapiens
attttaaccttggtg

SEQ ID NO: 1341794 - DNA, 15 bp, Homo sapiens
cattttaaccttggt

SEQ ID NO: 1341795 - DNA, 15 bp, Homo sapiens
tcattttaaccttgg

SEQ ID NO: 1341796 - DNA, 15 bp, Homo sapiens
ttcattttaaccttg

SEQ ID NO: 1341797 - DNA, 15 bp, Homo sapiens
cttcattttaacctt

SEQ ID NO: 1341798 - DNA, 15 bp, Homo sapiens
ccttcattttaacct

SEQ ID NO: 1341799 - DNA, 15 bp, Homo sapiens
tccttcattttaacc

SEQ ID NO: 1341800 - DNA, 15 bp, Homo sapiens
ctccttcattttaac

SEQ ID NO: 1341801 - DNA, 15 bp, Homo sapiens
tctccttcattttaa

SEQ ID NO: 1341802 - DNA, 15 bp, Homo sapiens
ttctccttcatttta

SEQ ID NO: 1341803 - DNA, 15 bp, Homo sapiens
tttctccttcatttt

SEQ ID NO: 1341804 - DNA, 15 bp, Homo sapiens
ttttctccttcattt

SEQ ID NO: 1341805 - DNA, 15 bp, Homo sapiens
attttctccttcatt

SEQ ID NO: 1341806 - DNA, 15 bp, Homo sapiens
cattttctccttcat

SEQ ID NO: 1341807 - DNA, 15 bp, Homo sapiens
acattttctccttca

SEQ ID NO: 1341808 - DNA, 15 bp, Homo sapiens
aacattttctccttc

SEQ ID NO: 1341809 - DNA, 15 bp, Homo sapiens
taacattttctcctt

SEQ ID NO: 1341810 - DNA, 15 bp, Homo sapiens
ttaacattttctcct

SEQ ID NO: 1341811 - DNA, 15 bp, Homo sapiens
cttaacattttctcc

SEQ ID NO: 1341812 - DNA, 15 bp, Homo sapiens
ccttaacattttctc

SEQ ID NO: 1341813 - DNA, 15 bp, Homo sapiens
cccttaacattttct

SEQ ID NO: 1341814 - DNA, 15 bp, Homo sapiens
gcccttaacattttc

SEQ ID NO: 1341815 - DNA, 15 bp, Homo sapiens
tgcccttaacatttt

SEQ ID NO: 1341816 - DNA, 15 bp, Homo sapiens
ctgcccttaacattt

SEQ ID NO: 1341817 - DNA, 15 bp, Homo sapiens
gctgcccttaacatt

SEQ ID NO: 1341818 - DNA, 15 bp, Homo sapiens
ggctgcccttaacat

SEQ ID NO: 1341819 - DNA, 15 bp, Homo sapiens
tggctgcccttaaca

SEQ ID NO: 1341820 - DNA, 15 bp, Homo sapiens
ctggctgcccttaac

SEQ ID NO: 1341821 - DNA, 15 bp, Homo sapiens
tctggctgcccttaa

SEQ ID NO: 1341822 - DNA, 15 bp, Homo sapiens
ctctggctgccctta

SEQ ID NO: 1341823 - DNA, 15 bp, Homo sapiens
tctctggctgccctt

SEQ ID NO: 1341824 - DNA, 15 bp, Homo sapiens
ctctctggctgccct

SEQ ID NO: 1341825 - DNA, 15 bp, Homo sapiens
tctctctggctgccc

SEQ ID NO: 1341826 - DNA, 15 bp, Homo sapiens
ttctctctggctgcc

SEQ ID NO: 1341827 - DNA, 15 bp, Homo sapiens
tttctctctggctgc

SEQ ID NO: 1341828 - DNA, 15 bp, Homo sapiens
ctttctctctggctg

SEQ ID NO: 1341829 - DNA, 15 bp, Homo sapiens
cctttctctctggct

SEQ ID NO: 1341830 - DNA, 15 bp, Homo sapiens
acctttctctctggc

SEQ ID NO: 1341831 - DNA, 15 bp, Homo sapiens
aacctttctctctgg

SEQ ID NO: 1341832 - DNA, 15 bp, Homo sapiens
caacctttctctctg

SEQ ID NO: 1341833 - DNA, 15 bp, Homo sapiens
ccaacctttctctct

SEQ ID NO: 1341834 - DNA, 15 bp, Homo sapiens
cccaacctttctctc

SEQ ID NO: 1341835 - DNA, 15 bp, Homo sapiens
acccaacctttctct

SEQ ID NO: 1341836 - DNA, 15 bp, Homo sapiens
aacccaacctttctc

SEQ ID NO: 1341837 - DNA, 15 bp, Homo sapiens
taacccaacctttct

SEQ ID NO: 1341838 - DNA, 15 bp, Homo sapiens
gtaacccaacctttc

SEQ ID NO: 1341839 - DNA, 15 bp, Homo sapiens
ggtaacccaaccttt

SEQ ID NO: 1341840 - DNA, 15 bp, Homo sapiens
cggtaacccaacctt

SEQ ID NO: 1341841 - DNA, 15 bp, Homo sapiens
tcggtaacccaacct

SEQ ID NO: 1341842 - DNA, 15 bp, Homo sapiens
gtcggtaacccaacc

SEQ ID NO: 1341843 - DNA, 15 bp, Homo sapiens
tgtcggtaacccaac

SEQ ID NO: 1341844 - DNA, 15 bp, Homo sapiens
ttgtcggtaacccaa

SEQ ID NO: 1341845 - DNA, 15 bp, Homo sapiens
tttgtcggtaaccca

SEQ ID NO: 1341846 - DNA, 15 bp, Homo sapiens
ctttgtcggtaaccc

SEQ ID NO: 1341847 - DNA, 15 bp, Homo sapiens
tctttgtcggtaacc

SEQ ID NO: 1341848 - DNA, 15 bp, Homo sapiens
ctctttgtcggtaac

SEQ ID NO: 1341849 - DNA, 15 bp, Homo sapiens
tctctttgtcggtaa

SEQ ID NO: 1341850 - DNA, 15 bp, Homo sapiens
ttctctttgtcggta

SEQ ID NO: 1341851 - DNA, 15 bp, Homo sapiens
cttctctttgtcggt

SEQ ID NO: 1341852 - DNA, 15 bp, Homo sapiens
gcttctctttgtcgg

SEQ ID NO: 1341853 - DNA, 15 bp, Homo sapiens
ggcttctctttgtcg

SEQ ID NO: 1341854 - DNA, 15 bp, Homo sapiens
gggcttctctttgtc

SEQ ID NO: 1341855 - DNA, 15 bp, Homo sapiens
tgggcttctctttgt

SEQ ID NO: 1341856 - DNA, 15 bp, Homo sapiens
atgggcttctctttg

SEQ ID NO: 1341857 - DNA, 15 bp, Homo sapiens
gatgggcttctcttt

SEQ ID NO: 1341858 - DNA, 15 bp, Homo sapiens
tgatgggcttctctt

SEQ ID NO: 1341859 - DNA, 15 bp, Homo sapiens
ttgatgggcttctct

SEQ ID NO: 1341860 - DNA, 15 bp, Homo sapiens
tttgatgggcttctc

SEQ ID NO: 1341861 - DNA, 15 bp, Homo sapiens
gtttgatgggcttct

SEQ ID NO: 1341862 - DNA, 15 bp, Homo sapiens
agtttgatgggcttc

SEQ ID NO: 1341863 - DNA, 15 bp, Homo sapiens
tagtttgatgggctt

SEQ ID NO: 1341864 - DNA, 15 bp, Homo sapiens
ttagtttgatgggct

SEQ ID NO: 1341865 - DNA, 15 bp, Homo sapiens
gttagtttgatgggc

SEQ ID NO: 1341866 - DNA, 15 bp, Homo sapiens
tgttagtttgatggg

SEQ ID NO: 1341867 - DNA, 15 bp, Homo sapiens
ctgttagtttgatgg

SEQ ID NO: 1341868 - DNA, 15 bp, Homo sapiens
gctgttagtttgatg

SEQ ID NO: 1341869 - DNA, 15 bp, Homo sapiens
tgctgttagtttgat

SEQ ID NO: 1341870 - DNA, 15 bp, Homo sapiens
ctgctgttagtttga

SEQ ID NO: 1341871 - DNA, 15 bp, Homo sapiens
tctgctgttagtttg

SEQ ID NO: 1341872 - DNA, 15 bp, Homo sapiens
atctgctgttagttt

SEQ ID NO: 1341873 - DNA, 15 bp, Homo sapiens
gatctgctgttagtt

SEQ ID NO: 1341874 - DNA, 15 bp, Homo sapiens
agatctgctgttagt

SEQ ID NO: 1341875 - DNA, 15 bp, Homo sapiens
gagatctgctgttag

SEQ ID NO: 1341876 - DNA, 15 bp, Homo sapiens
agagatctgctgtta

SEQ ID NO: 1341877 - DNA, 15 bp, Homo sapiens
gagagatctgctgtt

SEQ ID NO: 1341878 - DNA, 15 bp, Homo sapiens
agagagatctgctgt

SEQ ID NO: 1341879 - DNA, 15 bp, Homo sapiens
cagagagatctgctg

SEQ ID NO: 1341880 - DNA, 15 bp, Homo sapiens
gcagagagatctgct

SEQ ID NO: 1341881 - DNA, 15 bp, Homo sapiens
tgcagagagatctgc

SEQ ID NO: 1341882 - DNA, 15 bp, Homo sapiens
ctgcagagagatctg

SEQ ID NO: 1341883 - DNA, 15 bp, Homo sapiens
tctgcagagagatct

SEQ ID NO: 1341884 - DNA, 15 bp, Homo sapiens
ttctgcagagagatc

SEQ ID NO: 1341885 - DNA, 15 bp, Homo sapiens
tttctgcagagagat

SEQ ID NO: 1341886 - DNA, 15 bp, Homo sapiens
gtttctgcagagaga

SEQ ID NO: 1341887 - DNA, 15 bp, Homo sapiens
ggtttctgcagagag

SEQ ID NO: 1341888 - DNA, 15 bp, Homo sapiens
gggtttctgcagaga

SEQ ID NO: 1341889 - DNA, 15 bp, Homo sapiens
agggtttctgcagag

SEQ ID NO: 1341890 - DNA, 15 bp, Homo sapiens
cagggtttctgcaga

SEQ ID NO: 1341891 - DNA, 15 bp, Homo sapiens
gcagggtttctgcag

SEQ ID NO: 1341892 - DNA, 15 bp, Homo sapiens
tgcagggtttctgca

SEQ ID NO: 1341893 - DNA, 15 bp, Homo sapiens
ttgcagggtttctgc

SEQ ID NO: 1341894 - DNA, 15 bp, Homo sapiens
cttgcagggtttctg

SEQ ID NO: 1341895 - DNA, 15 bp, Homo sapiens
gcttgcagggtttct

SEQ ID NO: 1341896 - DNA, 15 bp, Homo sapiens
ggcttgcagggtttc

SEQ ID NO: 1341897 - DNA, 15 bp, Homo sapiens
tggcttgcagggttt

SEQ ID NO: 1341898 - DNA, 15 bp, Homo sapiens
ctggcttgcagggtt

SEQ ID NO: 1341899 - DNA, 15 bp, Homo sapiens
tctggcttgcagggt

SEQ ID NO: 1341900 - DNA, 15 bp, Homo sapiens
ttctggcttgcaggg

SEQ ID NO: 1341901 - DNA, 15 bp, Homo sapiens
attctggcttgcagg

SEQ ID NO: 1341902 - DNA, 15 bp, Homo sapiens
tattctggcttgcag

SEQ ID NO: 1341903 - DNA, 15 bp, Homo sapiens
ctattctggcttgca

SEQ ID NO: 1341904 - DNA, 15 bp, Homo sapiens
tctattctggcttgc

SEQ ID NO: 1341905 - DNA, 15 bp, Homo sapiens
ctctattctggcttg

SEQ ID NO: 1341906 - DNA, 15 bp, Homo sapiens
actctattctggctt

SEQ ID NO: 1341907 - DNA, 15 bp, Homo sapiens
cactctattctggct

SEQ ID NO: 1341908 - DNA, 15 bp, Homo sapiens
ccactctattctggc

SEQ ID NO: 1341909 - DNA, 15 bp, Homo sapiens
cccactctattctgg

SEQ ID NO: 1341910 - DNA, 15 bp, Homo sapiens
ccccactctattctg

SEQ ID NO: 1341911 - DNA, 15 bp, Homo sapiens
cccccactctattct

SEQ ID NO: 1341912 - DNA, 15 bp, Homo sapiens
gcccccactctattc

SEQ ID NO: 1341913 - DNA, 15 bp, Homo sapiens
ggcccccactctatt

SEQ ID NO: 1341914 - DNA, 15 bp, Homo sapiens
tggcccccactctat

SEQ ID NO: 1341915 - DNA, 15 bp, Homo sapiens
ttggcccccactcta

SEQ ID NO: 1341916 - DNA, 15 bp, Homo sapiens
attggcccccactct

SEQ ID NO: 1341917 - DNA, 15 bp, Homo sapiens
tattggcccccactc

SEQ ID NO: 1341918 - DNA, 15 bp, Homo sapiens
atattggcccccact

SEQ ID NO: 1341919 - DNA, 15 bp, Homo sapiens
aatattggcccccac

SEQ ID NO: 1341920 - DNA, 15 bp, Homo sapiens
gaatattggccccca

SEQ ID NO: 1341921 - DNA, 15 bp, Homo sapiens
tgaatattggccccc

SEQ ID NO: 1341922 - DNA, 15 bp, Homo sapiens
ttgaatattggcccc

SEQ ID NO: 1341923 - DNA, 15 bp, Homo sapiens
gttgaatattggccc

SEQ ID NO: 1341924 - DNA, 15 bp, Homo sapiens
tgttgaatattggcc

SEQ ID NO: 1341925 - DNA, 15 bp, Homo sapiens
gtgttgaatattggc

SEQ ID NO: 1341926 - DNA, 15 bp, Homo sapiens
agtgttgaatattgg

SEQ ID NO: 1341927 - DNA, 15 bp, Homo sapiens
gagtgttgaatattg

SEQ ID NO: 1341928 - DNA, 15 bp, Homo sapiens
agagtgttgaatatt

SEQ ID NO: 1341929 - DNA, 15 bp, Homo sapiens
aagagtgttgaatat

SEQ ID NO: 1341930 - DNA, 15 bp, Homo sapiens
taagagtgttgaata

SEQ ID NO: 1341931 - DNA, 15 bp, Homo sapiens
gtaagagtgttgaat

SEQ ID NO: 1341932 - DNA, 15 bp, Homo sapiens
tgtaagagtgttgaa

SEQ ID NO: 1341933 - DNA, 15 bp, Homo sapiens
ctgtaagagtgttga

SEQ ID NO: 1341934 - DNA, 15 bp, Homo sapiens
tctgtaagagtgttg

SEQ ID NO: 1341935 - DNA, 15 bp, Homo sapiens
ttctgtaagagtgtt

SEQ ID NO: 1341936 - DNA, 15 bp, Homo sapiens
tttctgtaagagtgt

SEQ ID NO: 1341937 - DNA, 15 bp, Homo sapiens
ttttctgtaagagtg

SEQ ID NO: 1341938 - DNA, 15 bp, Homo sapiens
cttttctgtaagagt

SEQ ID NO: 1341939 - DNA, 15 bp, Homo sapiens
tcttttctgtaagag

SEQ ID NO: 1341940 - DNA, 15 bp, Homo sapiens
ttcttttctgtaaga

SEQ ID NO: 1341941 - DNA, 15 bp, Homo sapiens
attcttttctgtaag

SEQ ID NO: 1341942 - DNA, 15 bp, Homo sapiens
aattcttttctgtaa

SEQ ID NO: 1341943 - DNA, 15 bp, Homo sapiens
aaattcttttctgta

SEQ ID NO: 1341944 - DNA, 15 bp, Homo sapiens
aaaattcttttctgt

SEQ ID NO: 1341945 - DNA, 15 bp, Homo sapiens
gaaaattcttttctg

SEQ ID NO: 1341946 - DNA, 15 bp, Homo sapiens
ggttgaaaattcttt

SEQ ID NO: 1341947 - DNA, 15 bp, Homo sapiens
gggttgaaaattctt

SEQ ID NO: 1341948 - DNA, 15 bp, Homo sapiens
tgggttgaaaattct

SEQ ID NO: 1341949 - DNA, 15 bp, Homo sapiens
ctgggttgaaaattc

SEQ ID NO: 1341950 - DNA, 15 bp, Homo sapiens
tctgggttgaaaatt

SEQ ID NO: 1341951 - DNA, 15 bp, Homo sapiens
ttctgggttgaaaat

SEQ ID NO: 1341952 - DNA, 15 bp, Homo sapiens
attctgggttgaaaa

SEQ ID NO: 1341953 - DNA, 15 bp, Homo sapiens
aattctgggttgaaa

SEQ ID NO: 1341954 - DNA, 15 bp, Homo sapiens
aaattctgggttgaa

SEQ ID NO: 1341955 - DNA, 15 bp, Homo sapiens
gaaattctgggttga

SEQ ID NO: 1341956 - DNA, 15 bp, Homo sapiens
tgaaattctgggttg

SEQ ID NO: 1341957 - DNA, 15 bp, Homo sapiens
atgaaattctgggtt

SEQ ID NO: 1341958 - DNA, 15 bp, Homo sapiens
tatgaaattctgggt

SEQ ID NO: 1341959 - DNA, 15 bp, Homo sapiens
atatgaaattctggg

SEQ ID NO: 1341960 - DNA, 15 bp, Homo sapiens
gatatgaaattctgg

SEQ ID NO: 1341961 - DNA, 15 bp, Homo sapiens
ggatatgaaattctg

SEQ ID NO: 1341962 - DNA, 15 bp, Homo sapiens
aggatatgaaattct

SEQ ID NO: 1341963 - DNA, 15 bp, Homo sapiens
caggatatgaaattc

SEQ ID NO: 1341964 - DNA, 15 bp, Homo sapiens
gcaggatatgaaatt

SEQ ID NO: 1341965 - DNA, 15 bp, Homo sapiens
ggcaggatatgaaat

SEQ ID NO: 1341966 - DNA, 15 bp, Homo sapiens
tggcaggatatgaaa

SEQ ID NO: 1341967 - DNA, 15 bp, Homo sapiens
ttggcaggatatgaa

SEQ ID NO: 1341968 - DNA, 15 bp, Homo sapiens
tttggcaggatatga

SEQ ID NO: 1341969 - DNA, 15 bp, Homo sapiens
gtttggcaggatatg

SEQ ID NO: 1341970 - DNA, 15 bp, Homo sapiens
agtttggcaggatat

SEQ ID NO: 1341971 - DNA, 15 bp, Homo sapiens
tagtttggcaggata

SEQ ID NO: 1341972 - DNA, 15 bp, Homo sapiens
ttagtttggcaggat

SEQ ID NO: 1341973 - DNA, 15 bp, Homo sapiens
cttagtttggcagga

SEQ ID NO: 1341974 - DNA, 15 bp, Homo sapiens
gcttagtttggcagg

SEQ ID NO: 1341975 - DNA, 15 bp, Homo sapiens
agcttagtttggcag

SEQ ID NO: 1341976 - DNA, 15 bp, Homo sapiens
aagcttagtttggca

SEQ ID NO: 1341977 - DNA, 15 bp, Homo sapiens
gaagcttagtttggc

SEQ ID NO: 1341978 - DNA, 15 bp, Homo sapiens
tgaagcttagtttgg

SEQ ID NO: 1341979 - DNA, 15 bp, Homo sapiens
atgaagcttagtttg

SEQ ID NO: 1341980 - DNA, 15 bp, Homo sapiens
tatgaagcttagttt

SEQ ID NO: 1341981 - DNA, 15 bp, Homo sapiens
ttatgaagcttagtt

SEQ ID NO: 1341982 - DNA, 15 bp, Homo sapiens
cttatgaagcttagt

SEQ ID NO: 1341983 - DNA, 15 bp, Homo sapiens
gcttatgaagcttag

SEQ ID NO: 1341984 - DNA, 15 bp, Homo sapiens
tgcttatgaagctta

SEQ ID NO: 1341985 - DNA, 15 bp, Homo sapiens
ttgcttatgaagctt

SEQ ID NO: 1341986 - DNA, 15 bp, Homo sapiens
tttgcttatgaagct

SEQ ID NO: 1341987 - DNA, 15 bp, Homo sapiens
ctttgcttatgaagc

SEQ ID NO: 1341988 - DNA, 15 bp, Homo sapiens
cctttgcttatgaag

SEQ ID NO: 1341989 - DNA, 15 bp, Homo sapiens
tcctttgcttatgaa

SEQ ID NO: 1341990 - DNA, 15 bp, Homo sapiens
ctcctttgcttatga

SEQ ID NO: 1341991 - DNA, 15 bp, Homo sapiens
tctcctttgcttatg

SEQ ID NO: 1341992 - DNA, 15 bp, Homo sapiens
ttctcctttgcttat

SEQ ID NO: 1341993 - DNA, 15 bp, Homo sapiens
tttctcctttgctta

SEQ ID NO: 1341994 - DNA, 15 bp, Homo sapiens
atttctcctttgctt

SEQ ID NO: 1341995 - DNA, 15 bp, Homo sapiens
gatttctcctttgct

SEQ ID NO: 1341996 - DNA, 15 bp, Homo sapiens
tgatttctcctttgc

SEQ ID NO: 1341997 - DNA, 15 bp, Homo sapiens
ttgatttctcctttg

SEQ ID NO: 1341998 - DNA, 15 bp, Homo sapiens
attgatttctccttt

SEQ ID NO: 1341999 - DNA, 15 bp, Homo sapiens
aattgatttctcctt

SEQ ID NO: 1342000 - DNA, 15 bp, Homo sapiens
taattgatttctcct

SEQ ID NO: 1342001 - DNA, 15 bp, Homo sapiens
ctaattgatttctcc

SEQ ID NO: 1342002 - DNA, 15 bp, Homo sapiens
actaattgatttctc

SEQ ID NO: 1342003 - DNA, 15 bp, Homo sapiens
aactaattgatttct

SEQ ID NO: 1342004 - DNA, 15 bp, Homo sapiens
aaactaattgatttc

SEQ ID NO: 1342005 - DNA, 15 bp, Homo sapiens
taaactaattgattt

SEQ ID NO: 1342006 - DNA, 15 bp, Homo sapiens
gtaaactaattgatt

SEQ ID NO: 1342007 - DNA, 15 bp, Homo sapiens
tgtaaactaattgat

SEQ ID NO: 1342008 - DNA, 15 bp, Homo sapiens
ctgtaaactaattga

SEQ ID NO: 1342009 - DNA, 15 bp, Homo sapiens
tctgtaaactaattg

SEQ ID NO: 1342010 - DNA, 15 bp, Homo sapiens
gtctgtaaactaatt

SEQ ID NO: 1342011 - DNA, 15 bp, Homo sapiens
tgtctgtaaactaat

SEQ ID NO: 1342012 - DNA, 15 bp, Homo sapiens
ttgtctgtaaactaa

SEQ ID NO: 1342013 - DNA, 15 bp, Homo sapiens
cttgtctgtaaacta

SEQ ID NO: 1342014 - DNA, 15 bp, Homo sapiens
gcttgtctgtaaact

SEQ ID NO: 1342015 - DNA, 15 bp, Homo sapiens
tgcttgtctgtaaac

SEQ ID NO: 1342016 - DNA, 15 bp, Homo sapiens
ttgcttgtctgtaaa

SEQ ID NO: 1342017 - DNA, 15 bp, Homo sapiens
tttgcttgtctgtaa

SEQ ID NO: 1342018 - DNA, 15 bp, Homo sapiens
atttgcttgtctgta

SEQ ID NO: 1342019 - DNA, 15 bp, Homo sapiens
catttgcttgtctgt

SEQ ID NO: 1342020 - DNA, 15 bp, Homo sapiens
gcatttgcttgtctg

SEQ ID NO: 1342021 - DNA, 15 bp, Homo sapiens
agcatttgcttgtct

SEQ ID NO: 1342022 - DNA, 15 bp, Homo sapiens
cagcatttgcttgtc

SEQ ID NO: 1342023 - DNA, 15 bp, Homo sapiens
tcagcatttgcttgt

SEQ ID NO: 1342024 - DNA, 15 bp, Homo sapiens
ttcagcatttgcttg

SEQ ID NO: 1342025 - DNA, 15 bp, Homo sapiens
tttcagcatttgctt

SEQ ID NO: 1342026 - DNA, 15 bp, Homo sapiens
ctttcagcatttgct

SEQ ID NO: 1342027 - DNA, 15 bp, Homo sapiens
tctttcagcatttgc

SEQ ID NO: 1342028 - DNA, 15 bp, Homo sapiens
atctttcagcatttg

SEQ ID NO: 1342029 - DNA, 15 bp, Homo sapiens
aatctttcagcattt

SEQ ID NO: 1342030 - DNA, 15 bp, Homo sapiens
aaatctttcagcatt

SEQ ID NO: 1342031 - DNA, 15 bp, Homo sapiens
aaaatctttcagcat

SEQ ID NO: 1342032 - DNA, 15 bp, Homo sapiens
caaaatctttcagca

SEQ ID NO: 1342033 - DNA, 15 bp, Homo sapiens
acaaaatctttcagc

SEQ ID NO: 1342034 - DNA, 15 bp, Homo sapiens
gacaaaatctttcag

SEQ ID NO: 1342035 - DNA, 15 bp, Homo sapiens
tgacaaaatctttca

SEQ ID NO: 1342036 - DNA, 15 bp, Homo sapiens
gtgacaaaatctttc

SEQ ID NO: 1342037 - DNA, 15 bp, Homo sapiens
ggtgacaaaatcttt

SEQ ID NO: 1342038 - DNA, 15 bp, Homo sapiens
tggtgacaaaatctt

SEQ ID NO: 1342039 - DNA, 15 bp, Homo sapiens
atggtgacaaaatct

SEQ ID NO: 1342040 - DNA, 15 bp, Homo sapiens
gatggtgacaaaatc

SEQ ID NO: 1342041 - DNA, 15 bp, Homo sapiens
tgatggtgacaaaat

SEQ ID NO: 1342042 - DNA, 15 bp, Homo sapiens
ctgatggtgacaaaa

SEQ ID NO: 1342043 - DNA, 15 bp, Homo sapiens
cctgatggtgacaaa

SEQ ID NO: 1342044 - DNA, 15 bp, Homo sapiens
gcctgatggtgacaa

SEQ ID NO: 1342045 - DNA, 15 bp, Homo sapiens
ggcctgatggtgaca

SEQ ID NO: 1342046 - DNA, 15 bp, Homo sapiens
aggcctgatggtgac

SEQ ID NO: 1342047 - DNA, 15 bp, Homo sapiens
caggcctgatggtga

SEQ ID NO: 1342048 - DNA, 15 bp, Homo sapiens
gcaggcctgatggtg

SEQ ID NO: 1342049 - DNA, 15 bp, Homo sapiens
ggcaggcctgatggt

SEQ ID NO: 1342050 - DNA, 15 bp, Homo sapiens
aggcaggcctgatgg

SEQ ID NO: 1342051 - DNA, 15 bp, Homo sapiens
aaggcaggcctgatg

SEQ ID NO: 1342052 - DNA, 15 bp, Homo sapiens
taaggcaggcctgat

SEQ ID NO: 1342053 - DNA, 15 bp, Homo sapiens
gtaaggcaggcctga

SEQ ID NO: 1342054 - DNA, 15 bp, Homo sapiens
tgtaaggcaggcctg

SEQ ID NO: 1342055 - DNA, 15 bp, Homo sapiens
ttgtaaggcaggcct

SEQ ID NO: 1342056 - DNA, 15 bp, Homo sapiens
cttgtaaggcaggcc

SEQ ID NO: 1342057 - DNA, 15 bp, Homo sapiens
tcttgtaaggcaggc

SEQ ID NO: 1342058 - DNA, 15 bp, Homo sapiens
ttcttgtaaggcagg

SEQ ID NO: 1342059 - DNA, 15 bp, Homo sapiens
attcttgtaaggcag

SEQ ID NO: 1342060 - DNA, 15 bp, Homo sapiens
aattcttgtaaggca

SEQ ID NO: 1342061 - DNA, 15 bp, Homo sapiens
gaattcttgtaaggc

SEQ ID NO: 1342062 - DNA, 15 bp, Homo sapiens
ggaattcttgtaagg

SEQ ID NO: 1342063 - DNA, 15 bp, Homo sapiens
gggaattcttgtaag

SEQ ID NO: 1342064 - DNA, 15 bp, Homo sapiens
cgggaattcttgtaa

SEQ ID NO: 1342065 - DNA, 15 bp, Homo sapiens
tcgggaattcttgta

SEQ ID NO: 1342066 - DNA, 15 bp, Homo sapiens
ttcgggaattcttgt

SEQ ID NO: 1342067 - DNA, 15 bp, Homo sapiens
cttcgggaattcttg

SEQ ID NO: 1342068 - DNA, 15 bp, Homo sapiens
ccttcgggaattctt

SEQ ID NO: 1342069 - DNA, 15 bp, Homo sapiens
tccttcgggaattct

SEQ ID NO: 1342070 - DNA, 15 bp, Homo sapiens
atccttcgggaattc

SEQ ID NO: 1342071 - DNA, 15 bp, Homo sapiens
catccttcgggaatt

SEQ ID NO: 1342072 - DNA, 15 bp, Homo sapiens
gcatccttcgggaat

SEQ ID NO: 1342073 - DNA, 15 bp, Homo sapiens
tgcatccttcgggaa

SEQ ID NO: 1342074 - DNA, 15 bp, Homo sapiens
gtgcatccttcggga

SEQ ID NO: 1342075 - DNA, 15 bp, Homo sapiens
agtgcatccttcggg

SEQ ID NO: 1342076 - DNA, 15 bp, Homo sapiens
tagtgcatccttcgg

SEQ ID NO: 1342077 - DNA, 15 bp, Homo sapiens
ttagtgcatccttcg

SEQ ID NO: 1342078 - DNA, 15 bp, Homo sapiens
tttagtgcatccttc

SEQ ID NO: 1342079 - DNA, 15 bp, Homo sapiens
atttagtgcatcctt

SEQ ID NO: 1342080 - DNA, 15 bp, Homo sapiens
tatttagtgcatcct

SEQ ID NO: 1342081 - DNA, 15 bp, Homo sapiens
atatttagtgcatcc

SEQ ID NO: 1342082 - DNA, 15 bp, Homo sapiens
catatttagtgcatc

SEQ ID NO: 1342083 - DNA, 15 bp, Homo sapiens
ccatatttagtgcat

SEQ ID NO: 1342084 - DNA, 15 bp, Homo sapiens
tccatatttagtgca

SEQ ID NO: 1342085 - DNA, 15 bp, Homo sapiens
ctccatatttagtgc

SEQ ID NO: 1342086 - DNA, 15 bp, Homo sapiens
tctccatatttagtg

SEQ ID NO: 1342087 - DNA, 15 bp, Homo sapiens
ctctccatatttagt

SEQ ID NO: 1342088 - DNA, 15 bp, Homo sapiens
cctctccatatttag

SEQ ID NO: 1342089 - DNA, 15 bp, Homo sapiens
tcctctccatattta

SEQ ID NO: 1342090 - DNA, 15 bp, Homo sapiens
ttcctctccatattt

SEQ ID NO: 1342091 - DNA, 15 bp, Homo sapiens
tttcctctccatatt

SEQ ID NO: 1342092 - DNA, 15 bp, Homo sapiens
ttttcctctccatat

SEQ ID NO: 1342093 - DNA, 15 bp, Homo sapiens
tttttcctctccata

SEQ ID NO: 1342094 - DNA, 15 bp, Homo sapiens
gtttttcctctccat

SEQ ID NO: 1342095 - DNA, 15 bp, Homo sapiens
agtttttcctctcca

SEQ ID NO: 1342096 - DNA, 15 bp, Homo sapiens
tagtttttcctctcc

SEQ ID NO: 1342097 - DNA, 15 bp, Homo sapiens
ctagtttttcctctc

SEQ ID NO: 1342098 - DNA, 15 bp, Homo sapiens
actagtttttcctct

SEQ ID NO: 1342099 - DNA, 15 bp, Homo sapiens
tactagtttttcctc

SEQ ID NO: 1342100 - DNA, 15 bp, Homo sapiens
gtactagtttttcct

SEQ ID NO: 1342101 - DNA, 15 bp, Homo sapiens
ggtactagtttttcc

SEQ ID NO: 1342102 - DNA, 15 bp, Homo sapiens
gctggtactagtttt

SEQ ID NO: 1342103 - DNA, 15 bp, Homo sapiens
ggctggtactagttt

SEQ ID NO: 1342104 - DNA, 15 bp, Homo sapiens
tggctggtactagtt

SEQ ID NO: 1342105 - DNA, 15 bp, Homo sapiens
gtggctggtactagt

SEQ ID NO: 1342106 - DNA, 15 bp, Homo sapiens
agtggctggtactag

SEQ ID NO: 1342107 - DNA, 15 bp, Homo sapiens
cagtggctggtacta

SEQ ID NO: 1342108 - DNA, 15 bp, Homo sapiens
gcagtggctggtact

SEQ ID NO: 1342109 - DNA, 15 bp, Homo sapiens
tgcagtggctggtac

SEQ ID NO: 1342110 - DNA, 15 bp, Homo sapiens
ttgcagtggctggta

SEQ ID NO: 1342111 - DNA, 15 bp, Homo sapiens
tttgcagtggctggt

SEQ ID NO: 1342112 - DNA, 15 bp, Homo sapiens
ttttgcagtggctgg

SEQ ID NO: 1342113 - DNA, 15 bp, Homo sapiens
tttttgcagtggctg

SEQ ID NO: 1342114 - DNA, 15 bp, Homo sapiens
gtttttgcagtggct

SEQ ID NO: 1342115 - DNA, 15 bp, Homo sapiens
tgtttttgcagtggc

SEQ ID NO: 1342116 - DNA, 15 bp, Homo sapiens
atgtttttgcagtgg

SEQ ID NO: 1342117 - DNA, 15 bp, Homo sapiens
tatgtttttgcagtg

SEQ ID NO: 1342118 - DNA, 15 bp, Homo sapiens
gtatgtttttgcagt

SEQ ID NO: 1342119 - DNA, 15 bp, Homo sapiens
ggtatgtttttgcag

SEQ ID NO: 1342120 - DNA, 15 bp, Homo sapiens
tggtatgtttttgca

SEQ ID NO: 1342121 - DNA, 15 bp, Homo sapiens
ttggtatgtttttgc

SEQ ID NO: 1342122 - DNA, 15 bp, Homo sapiens
tttggtatgtttttg

SEQ ID NO: 1342123 - DNA, 15 bp, Homo sapiens
atttggtatgttttt

SEQ ID NO: 1342124 - DNA, 15 bp, Homo sapiens
aatttggtatgtttt

SEQ ID NO: 1342125 - DNA, 15 bp, Homo sapiens
caatttggtatgttt

SEQ ID NO: 1342126 - DNA, 15 bp, Homo sapiens
acaatttggtatgtt

SEQ ID NO: 1342127 - DNA, 15 bp, Homo sapiens
tacaatttggtatgt

SEQ ID NO: 1342128 - DNA, 15 bp, Homo sapiens
ttacaatttggtatg

SEQ ID NO: 1342129 - DNA, 15 bp, Homo sapiens
tttacaatttggtat

SEQ ID NO: 1342130 - DNA, 15 bp, Homo sapiens
ctttacaatttggta

SEQ ID NO: 1342131 - DNA, 15 bp, Homo sapiens
tctttacaatttggt

SEQ ID NO: 1342132 - DNA, 15 bp, Homo sapiens
gtctttacaatttgg

SEQ ID NO: 1342133 - DNA, 15 bp, Homo sapiens
ggtctttacaatttg

SEQ ID NO: 1342134 - DNA, 15 bp, Homo sapiens
tggtctttacaattt

SEQ ID NO: 1342135 - DNA, 15 bp, Homo sapiens
atggtctttacaatt

SEQ ID NO: 1342136 - DNA, 15 bp, Homo sapiens
aatggtctttacaat

SEQ ID NO: 1342137 - DNA, 15 bp, Homo sapiens
caatggtctttacaa

SEQ ID NO: 1342138 - DNA, 15 bp, Homo sapiens
tcaatggtctttaca

SEQ ID NO: 1342139 - DNA, 15 bp, Homo sapiens
gtcaatggtctttac

SEQ ID NO: 1342140 - DNA, 15 bp, Homo sapiens
tgtcaatggtcttta

SEQ ID NO: 1342141 - DNA, 15 bp, Homo sapiens
gtgtcaatggtcttt

SEQ ID NO: 1342142 - DNA, 15 bp, Homo sapiens
agtgtcaatggtctt

SEQ ID NO: 1342143 - DNA, 15 bp, Homo sapiens
tagtgtcaatggtct

SEQ ID NO: 1342144 - DNA, 15 bp, Homo sapiens
atagtgtcaatggtc

SEQ ID NO: 1342145 - DNA, 15 bp, Homo sapiens
tatagtgtcaatggt

SEQ ID NO: 1342146 - DNA, 15 bp, Homo sapiens
ttatagtgtcaatgg

SEQ ID NO: 1342147 - DNA, 15 bp, Homo sapiens
tttatagtgtcaatg

SEQ ID NO: 1342148 - DNA, 15 bp, Homo sapiens
ctttatagtgtcaat

SEQ ID NO: 1342149 - DNA, 15 bp, Homo sapiens
tctttatagtgtcaa

SEQ ID NO: 1342150 - DNA, 15 bp, Homo sapiens
ttctttatagtgtca

SEQ ID NO: 1342151 - DNA, 15 bp, Homo sapiens
tttctttatagtgtc

SEQ ID NO: 1342152 - DNA, 15 bp, Homo sapiens
gtttctttatagtgt

SEQ ID NO: 1342153 - DNA, 15 bp, Homo sapiens
agtttctttatagtg

SEQ ID NO: 1342154 - DNA, 15 bp, Homo sapiens
cagtttctttatagt

SEQ ID NO: 1342155 - DNA, 15 bp, Homo sapiens
gcagtttctttatag

SEQ ID NO: 1342156 - DNA, 15 bp, Homo sapiens
tgcagtttctttata

SEQ ID NO: 1342157 - DNA, 15 bp, Homo sapiens
atgcagtttctttat

SEQ ID NO: 1342158 - DNA, 15 bp, Homo sapiens
gatgcagtttcttta

SEQ ID NO: 1342159 - DNA, 15 bp, Homo sapiens
tgatgcagtttcttt

SEQ ID NO: 1342160 - DNA, 15 bp, Homo sapiens
ttgatgcagtttctt

SEQ ID NO: 1342161 - DNA, 15 bp, Homo sapiens
gttgatgcagtttct

SEQ ID NO: 1342162 - DNA, 15 bp, Homo sapiens
agttgatgcagtttc

SEQ ID NO: 1342163 - DNA, 15 bp, Homo sapiens
cagttgatgcagttt

SEQ ID NO: 1342164 - DNA, 15 bp, Homo sapiens
tcagttgatgcagtt

SEQ ID NO: 1342165 - DNA, 15 bp, Homo sapiens
gtcagttgatgcagt

SEQ ID NO: 1342166 - DNA, 15 bp, Homo sapiens
tgtcagttgatgcag

SEQ ID NO: 1342167 - DNA, 15 bp, Homo sapiens
ctgtcagttgatgca

SEQ ID NO: 1342168 - DNA, 15 bp, Homo sapiens
actgtcagttgatgc

SEQ ID NO: 1342169 - DNA, 15 bp, Homo sapiens
gactgtcagttgatg

SEQ ID NO: 1342170 - DNA, 15 bp, Homo sapiens
tgactgtcagttgat

SEQ ID NO: 1342171 - DNA, 15 bp, Homo sapiens
ttgactgtcagttga

SEQ ID NO: 1342172 - DNA, 15 bp, Homo sapiens
tttgactgtcagttg

SEQ ID NO: 1342173 - DNA, 15 bp, Homo sapiens
ttttgactgtcagtt

SEQ ID NO: 1342174 - DNA, 15 bp, Homo sapiens
attttgactgtcagt

SEQ ID NO: 1342175 - DNA, 15 bp, Homo sapiens
tattttgactgtcag

SEQ ID NO: 1342176 - DNA, 15 bp, Homo sapiens
ttattttgactgtca

SEQ ID NO: 1342177 - DNA, 15 bp, Homo sapiens
gttattttgactgtc

SEQ ID NO: 1342178 - DNA, 15 bp, Homo sapiens
ggttattttgactgt

SEQ ID NO: 1342179 - DNA, 15 bp, Homo sapiens
tggttattttgactg

SEQ ID NO: 1342180 - DNA, 15 bp, Homo sapiens
ctggttattttgact

SEQ ID NO: 1342181 - DNA, 15 bp, Homo sapiens
gctggttattttgac

SEQ ID NO: 1342182 - DNA, 15 bp, Homo sapiens
agctggttattttga

SEQ ID NO: 1342183 - DNA, 15 bp, Homo sapiens
tagctggttattttg

SEQ ID NO: 1342184 - DNA, 15 bp, Homo sapiens
ctagctggttatttt

SEQ ID NO: 1342185 - DNA, 15 bp, Homo sapiens
gctagctggttattt

SEQ ID NO: 1342186 - DNA, 15 bp, Homo sapiens
tgctagctggttatt

SEQ ID NO: 1342187 - DNA, 15 bp, Homo sapiens
atgctagctggttat

SEQ ID NO: 1342188 - DNA, 15 bp, Homo sapiens
gatgctagctggtta

SEQ ID NO: 1342189 - DNA, 15 bp, Homo sapiens
tgatgctagctggtt

SEQ ID NO: 1342190 - DNA, 15 bp, Homo sapiens
atgatgctagctggt

SEQ ID NO: 1342191 - DNA, 15 bp, Homo sapiens
tatgatgctagctgg

SEQ ID NO: 1342192 - DNA, 15 bp, Homo sapiens
ttatgatgctagctg

SEQ ID NO: 1342193 - DNA, 15 bp, Homo sapiens
attatgatgctagct

SEQ ID NO: 1342194 - DNA, 15 bp, Homo sapiens
cattatgatgctagc

SEQ ID NO: 1342195 - DNA, 15 bp, Homo sapiens
tcattatgatgctag

SEQ ID NO: 1342196 - DNA, 15 bp, Homo sapiens
gtcattatgatgcta

SEQ ID NO: 1342197 - DNA, 15 bp, Homo sapiens
tgtcattatgatgct

SEQ ID NO: 1342198 - DNA, 15 bp, Homo sapiens
ctgtcattatgatgc

SEQ ID NO: 1342199 - DNA, 15 bp, Homo sapiens
cctgtcattatgatg

SEQ ID NO: 1342200 - DNA, 15 bp, Homo sapiens
tcctgtcattatgat

SEQ ID NO: 1342201 - DNA, 15 bp, Homo sapiens
atcctgtcattatga

SEQ ID NO: 1342202 - DNA, 15 bp, Homo sapiens
gatcctgtcattatg

SEQ ID NO: 1342203 - DNA, 15 bp, Homo sapiens
tgatcctgtcattat

SEQ ID NO: 1342204 - DNA, 15 bp, Homo sapiens
ttgatcctgtcatta

SEQ ID NO: 1342205 - DNA, 15 bp, Homo sapiens
tttgatcctgtcatt

SEQ ID NO: 1342206 - DNA, 15 bp, Homo sapiens
atttgatcctgtcat

SEQ ID NO: 1342207 - DNA, 15 bp, Homo sapiens
aatttgatcctgtca

SEQ ID NO: 1342208 - DNA, 15 bp, Homo sapiens
gaatttgatcctgtc

SEQ ID NO: 1342209 - DNA, 15 bp, Homo sapiens
tgaatttgatcctgt

SEQ ID NO: 1342210 - DNA, 15 bp, Homo sapiens
gtgaatttgatcctg

SEQ ID NO: 1342211 - DNA, 15 bp, Homo sapiens
tgtgaatttgatcct

SEQ ID NO: 1342212 - DNA, 15 bp, Homo sapiens
gtgtgaatttgatcc

SEQ ID NO: 1342213 - DNA, 15 bp, Homo sapiens
tgtgtgaatttgatc

SEQ ID NO: 1342214 - DNA, 15 bp, Homo sapiens
atgtgtgaatttgat

SEQ ID NO: 1342215 - DNA, 15 bp, Homo sapiens
tatgtgtgaatttga

SEQ ID NO: 1342216 - DNA, 15 bp, Homo sapiens
ttatgtgtgaatttg

SEQ ID NO: 1342217 - DNA, 15 bp, Homo sapiens
gttatgtgtgaattt

SEQ ID NO: 1342218 - DNA, 15 bp, Homo sapiens
tgttatgtgtgaatt

SEQ ID NO: 1342219 - DNA, 15 bp, Homo sapiens
ttgttatgtgtgaat

SEQ ID NO: 1342220 - DNA, 15 bp, Homo sapiens
attgttatgtgtgaa

SEQ ID NO: 1342221 - DNA, 15 bp, Homo sapiens
cattgttatgtgtga

SEQ ID NO: 1342222 - DNA, 15 bp, Homo sapiens
acattgttatgtgtg

SEQ ID NO: 1342223 - DNA, 15 bp, Homo sapiens
aacattgttatgtgt

SEQ ID NO: 1342224 - DNA, 15 bp, Homo sapiens
taacattgttatgtg

SEQ ID NO: 1342225 - DNA, 15 bp, Homo sapiens
ttaacattgttatgt

SEQ ID NO: 1342226 - DNA, 15 bp, Homo sapiens
gttaacattgttatg

SEQ ID NO: 1342227 - DNA, 15 bp, Homo sapiens
ggttaacattgttat

SEQ ID NO: 1342228 - DNA, 15 bp, Homo sapiens
aggttaacattgtta

SEQ ID NO: 1342229 - DNA, 15 bp, Homo sapiens
gaggttaacattgtt

SEQ ID NO: 1342230 - DNA, 15 bp, Homo sapiens
tgaggttaacattgt

SEQ ID NO: 1342231 - DNA, 15 bp, Homo sapiens
ttgaggttaacattg

SEQ ID NO: 1342232 - DNA, 15 bp, Homo sapiens
tttgaggttaacatt

SEQ ID NO: 1342233 - DNA, 15 bp, Homo sapiens
atttgaggttaacat

SEQ ID NO: 1342234 - DNA, 15 bp, Homo sapiens
catttgaggttaaca

SEQ ID NO: 1342235 - DNA, 15 bp, Homo sapiens
acatttgaggttaac

SEQ ID NO: 1342236 - DNA, 15 bp, Homo sapiens
tacatttgaggttaa

SEQ ID NO: 1342237 - DNA, 15 bp, Homo sapiens
ttacatttgaggtta

SEQ ID NO: 1342238 - DNA, 15 bp, Homo sapiens
tttacatttgaggtt

SEQ ID NO: 1342239 - DNA, 15 bp, Homo sapiens
gtttacatttgaggt

SEQ ID NO: 1342240 - DNA, 15 bp, Homo sapiens
tgtttacatttgagg

SEQ ID NO: 1342241 - DNA, 15 bp, Homo sapiens
ctgtttacatttgag

SEQ ID NO: 1342242 - DNA, 15 bp, Homo sapiens
cctgtttacatttga

SEQ ID NO: 1342243 - DNA, 15 bp, Homo sapiens
gcctgtttacatttg

SEQ ID NO: 1342244 - DNA, 15 bp, Homo sapiens
agcctgtttacattt

SEQ ID NO: 1342245 - DNA, 15 bp, Homo sapiens
tagcctgtttacatt

SEQ ID NO: 1342246 - DNA, 15 bp, Homo sapiens
ttagcctgtttacat

SEQ ID NO: 1342247 - DNA, 15 bp, Homo sapiens
tttagcctgtttaca

SEQ ID NO: 1342248 - DNA, 15 bp, Homo sapiens
atttagcctgtttac

SEQ ID NO: 1342249 - DNA, 15 bp, Homo sapiens
catttagcctgttta

SEQ ID NO: 1342250 - DNA, 15 bp, Homo sapiens
gcatttagcctgttt

SEQ ID NO: 1342251 - DNA, 15 bp, Homo sapiens
ggcatttagcctgtt

SEQ ID NO: 1342252 - DNA, 15 bp, Homo sapiens
gggcatttagcctgt

SEQ ID NO: 1342253 - DNA, 15 bp, Homo sapiens
ggggcatttagcctg

SEQ ID NO: 1342254 - DNA, 15 bp, Homo sapiens
tggggcatttagcct

SEQ ID NO: 1342255 - DNA, 15 bp, Homo sapiens
ctggggcatttagcc

SEQ ID NO: 1342256 - DNA, 15 bp, Homo sapiens
actggggcatttagc

SEQ ID NO: 1342257 - DNA, 15 bp, Homo sapiens
aactggggcatttag

SEQ ID NO: 1342258 - DNA, 15 bp, Homo sapiens
taactggggcattta

SEQ ID NO: 1342259 - DNA, 15 bp, Homo sapiens
ttaactggggcattt

SEQ ID NO: 1342260 - DNA, 15 bp, Homo sapiens
tttaactggggcatt

SEQ ID NO: 1342261 - DNA, 15 bp, Homo sapiens
ttttaactggggcat

SEQ ID NO: 1342262 - DNA, 15 bp, Homo sapiens
cttttaactggggca

SEQ ID NO: 1342263 - DNA, 15 bp, Homo sapiens
tcttttaactggggc

SEQ ID NO: 1342264 - DNA, 15 bp, Homo sapiens
gtcttttaactgggg

SEQ ID NO: 1342265 - DNA, 15 bp, Homo sapiens
tgtcttttaactggg

SEQ ID NO: 1342266 - DNA, 15 bp, Homo sapiens
gtgtcttttaactgg

SEQ ID NO: 1342267 - DNA, 15 bp, Homo sapiens
tgtgtcttttaactg

SEQ ID NO: 1342268 - DNA, 15 bp, Homo sapiens
ctgtgtcttttaact

SEQ ID NO: 1342269 - DNA, 15 bp, Homo sapiens
tctgtgtcttttaac

SEQ ID NO: 1342270 - DNA, 15 bp, Homo sapiens
gtctgtgtcttttaa

SEQ ID NO: 1342271 - DNA, 15 bp, Homo sapiens
agtctgtgtctttta

SEQ ID NO: 1342272 - DNA, 15 bp, Homo sapiens
cagtctgtgtctttt

SEQ ID NO: 1342273 - DNA, 15 bp, Homo sapiens
ccagtctgtgtcttt

SEQ ID NO: 1342274 - DNA, 15 bp, Homo sapiens
gccagtctgtgtctt

SEQ ID NO: 1342275 - DNA, 15 bp, Homo sapiens
tgccagtctgtgtct

SEQ ID NO: 1342276 - DNA, 15 bp, Homo sapiens
ttgccagtctgtgtc

SEQ ID NO: 1342277 - DNA, 15 bp, Homo sapiens
tttgccagtctgtgt

SEQ ID NO: 1342278 - DNA, 15 bp, Homo sapiens
atttgccagtctgtg

SEQ ID NO: 1342279 - DNA, 15 bp, Homo sapiens
aatttgccagtctgt

SEQ ID NO: 1342280 - DNA, 15 bp, Homo sapiens
caatttgccagtctg

SEQ ID NO: 1342281 - DNA, 15 bp, Homo sapiens
ccaatttgccagtct

SEQ ID NO: 1342282 - DNA, 15 bp, Homo sapiens
tccaatttgccagtc

SEQ ID NO: 1342283 - DNA, 15 bp, Homo sapiens
atccaatttgccagt

SEQ ID NO: 1342284 - DNA, 15 bp, Homo sapiens
tatccaatttgccag

SEQ ID NO: 1342285 - DNA, 15 bp, Homo sapiens
ttatccaatttgcca

SEQ ID NO: 1342286 - DNA, 15 bp, Homo sapiens
tttatccaatttgcc

SEQ ID NO: 1342287 - DNA, 15 bp, Homo sapiens
ttttatccaatttgc

SEQ ID NO: 1342288 - DNA, 15 bp, Homo sapiens
tttttatccaatttg

SEQ ID NO: 1342289 - DNA, 15 bp, Homo sapiens
ttttttatccaattt

SEQ ID NO: 1342290 - DNA, 15 bp, Homo sapiens
attttttatccaatt

SEQ ID NO: 1342291 - DNA, 15 bp, Homo sapiens
gattttttatccaat

SEQ ID NO: 1342292 - DNA, 15 bp, Homo sapiens
tgattttttatccaa

SEQ ID NO: 1342293 - DNA, 15 bp, Homo sapiens
cttccaaattccata

SEQ ID NO: 1342294 - DNA, 15 bp, Homo sapiens
acttccaaattccat

SEQ ID NO: 1342295 - DNA, 15 bp, Homo sapiens
cacttccaaattcca

SEQ ID NO: 1342296 - DNA, 15 bp, Homo sapiens
tcacttccaaattcc

SEQ ID NO: 1342297 - DNA, 15 bp, Homo sapiens
gtcacttccaaattc

SEQ ID NO: 1342298 - DNA, 15 bp, Homo sapiens
agtcacttccaaatt

SEQ ID NO: 1342299 - DNA, 15 bp, Homo sapiens
cagtcacttccaaat

SEQ ID NO: 1342300 - DNA, 15 bp, Homo sapiens
gcagtcacttccaaa

SEQ ID NO: 1342301 - DNA, 15 bp, Homo sapiens
agcagtcacttccaa

SEQ ID NO: 1342302 - DNA, 15 bp, Homo sapiens
gagcagtcacttcca

SEQ ID NO: 1342303 - DNA, 15 bp, Homo sapiens
agagcagtcacttcc

SEQ ID NO: 1342304 - DNA, 15 bp, Homo sapiens
aagagcagtcacttc

SEQ ID NO: 1342305 - DNA, 15 bp, Homo sapiens
taagagcagtcactt

SEQ ID NO: 1342306 - DNA, 15 bp, Homo sapiens
gtaagagcagtcact

SEQ ID NO: 1342307 - DNA, 15 bp, Homo sapiens
ggtaagagcagtcac

SEQ ID NO: 1342308 - DNA, 15 bp, Homo sapiens
aggtaagagcagtca

SEQ ID NO: 1342309 - DNA, 15 bp, Homo sapiens
taggtaagagcagtc

SEQ ID NO: 1342310 - DNA, 15 bp, Homo sapiens
gtaggtaagagcagt

SEQ ID NO: 1342311 - DNA, 15 bp, Homo sapiens
ggtaggtaagagcag

SEQ ID NO: 1342312 - DNA, 15 bp, Homo sapiens
aggtaggtaagagca

SEQ ID NO: 1342313 - DNA, 15 bp, Homo sapiens
taggtaggtaagagc

SEQ ID NO: 1342314 - DNA, 15 bp, Homo sapiens
ctaggtaggtaagag

SEQ ID NO: 1342315 - DNA, 15 bp, Homo sapiens
tctaggtaggtaaga

SEQ ID NO: 1342316 - DNA, 15 bp, Homo sapiens
ctctaggtaggtaag

SEQ ID NO: 1342317 - DNA, 15 bp, Homo sapiens
cctctaggtaggtaa

SEQ ID NO: 1342318 - DNA, 15 bp, Homo sapiens
ccctctaggtaggta

SEQ ID NO: 1342319 - DNA, 15 bp, Homo sapiens
tccctctaggtaggt

SEQ ID NO: 1342320 - DNA, 15 bp, Homo sapiens
atccctctaggtagg

SEQ ID NO: 1342321 - DNA, 15 bp, Homo sapiens
catccctctaggtag

SEQ ID NO: 1342322 - DNA, 15 bp, Homo sapiens
gcatccctctaggta

SEQ ID NO: 1342323 - DNA, 15 bp, Homo sapiens
agcatccctctaggt

SEQ ID NO: 1342324 - DNA, 15 bp, Homo sapiens
gagcatccctctagg

SEQ ID NO: 1342325 - DNA, 15 bp, Homo sapiens
agagcatccctctag

SEQ ID NO: 1342326 - DNA, 15 bp, Homo sapiens
cagagcatccctcta

SEQ ID NO: 1342327 - DNA, 15 bp, Homo sapiens
ccagagcatccctct

SEQ ID NO: 1342328 - DNA, 15 bp, Homo sapiens
gccagagcatccctc

SEQ ID NO: 1342329 - DNA, 15 bp, Homo sapiens
agccagagcatccct

SEQ ID NO: 1342330 - DNA, 15 bp, Homo sapiens
gagccagagcatccc

SEQ ID NO: 1342331 - DNA, 15 bp, Homo sapiens
tgagccagagcatcc

SEQ ID NO: 1342332 - DNA, 15 bp, Homo sapiens
ttgagccagagcatc

SEQ ID NO: 1342333 - DNA, 15 bp, Homo sapiens
cttgagccagagcat

SEQ ID NO: 1342334 - DNA, 15 bp, Homo sapiens
acttgagccagagca

SEQ ID NO: 1342335 - DNA, 15 bp, Homo sapiens
tacttgagccagagc

SEQ ID NO: 1342336 - DNA, 15 bp, Homo sapiens
ttacttgagccagag

SEQ ID NO: 1342337 - DNA, 15 bp, Homo sapiens
cttacttgagccaga

SEQ ID NO: 1342338 - DNA, 15 bp, Homo sapiens
ccttacttgagccag

SEQ ID NO: 1342339 - DNA, 15 bp, Homo sapiens
cccttacttgagcca

SEQ ID NO: 1342340 - DNA, 15 bp, Homo sapiens
tcccttacttgagcc

SEQ ID NO: 1342341 - DNA, 15 bp, Homo sapiens
ctcccttacttgagc

SEQ ID NO: 1342342 - DNA, 15 bp, Homo sapiens
cctcccttacttgag

SEQ ID NO: 1342343 - DNA, 15 bp, Homo sapiens
acctcccttacttga

SEQ ID NO: 1342344 - DNA, 15 bp, Homo sapiens
tacctcccttacttg

SEQ ID NO: 1342345 - DNA, 15 bp, Homo sapiens
ttacctcccttactt

SEQ ID NO: 1342346 - DNA, 15 bp, Homo sapiens
attacctcccttact

SEQ ID NO: 1342347 - DNA, 15 bp, Homo sapiens
aattacctcccttac

SEQ ID NO: 1342348 - DNA, 15 bp, Homo sapiens
aaattacctccctta

SEQ ID NO: 1342349 - DNA, 15 bp, Homo sapiens
caaattacctccctt

SEQ ID NO: 1342350 - DNA, 15 bp, Homo sapiens
tcaaattacctccct

SEQ ID NO: 1342351 - DNA, 15 bp, Homo sapiens
atcaaattacctccc

SEQ ID NO: 1342352 - DNA, 15 bp, Homo sapiens
catcaaattacctcc

SEQ ID NO: 1342353 - DNA, 15 bp, Homo sapiens
acatcaaattacctc

SEQ ID NO: 1342354 - DNA, 15 bp, Homo sapiens
tacatcaaattacct

SEQ ID NO: 1342355 - DNA, 15 bp, Homo sapiens
ctacatcaaattacc

SEQ ID NO: 1342356 - DNA, 15 bp, Homo sapiens
actacatcaaattac

SEQ ID NO: 1342357 - DNA, 15 bp, Homo sapiens
cactacatcaaatta

SEQ ID NO: 1342358 - DNA, 15 bp, Homo sapiens
tcactacatcaaatt

SEQ ID NO: 1342359 - DNA, 15 bp, Homo sapiens
atcactacatcaaat

SEQ ID NO: 1342360 - DNA, 15 bp, Homo sapiens
aatcactacatcaaa

SEQ ID NO: 1342361 - DNA, 15 bp, Homo sapiens
taatcactacatcaa

SEQ ID NO: 1342362 - DNA, 15 bp, Homo sapiens
ataatcactacatca

SEQ ID NO: 1342363 - DNA, 15 bp, Homo sapiens
aataatcactacatc

SEQ ID NO: 1342364 - DNA, 15 bp, Homo sapiens
taataatcactacat

SEQ ID NO: 1342365 - DNA, 15 bp, Homo sapiens
ctaataatcactaca

SEQ ID NO: 1342366 - DNA, 15 bp, Homo sapiens
cctaataatcactac

SEQ ID NO: 1342367 - DNA, 15 bp, Homo sapiens
acctaataatcacta

SEQ ID NO: 1342368 - DNA, 15 bp, Homo sapiens
aacctaataatcact

SEQ ID NO: 1342369 - DNA, 15 bp, Homo sapiens
taacctaataatcac

SEQ ID NO: 1342370 - DNA, 15 bp, Homo sapiens
ttaacctaataatca

SEQ ID NO: 1342371 - DNA, 15 bp, Homo sapiens
cttaacctaataatc

SEQ ID NO: 1342372 - DNA, 15 bp, Homo sapiens
gcttaacctaataat

SEQ ID NO: 1342373 - DNA, 15 bp, Homo sapiens
tgcttaacctaataa

SEQ ID NO: 1342374 - DNA, 15 bp, Homo sapiens
atgcttaacctaata

SEQ ID NO: 1342375 - DNA, 15 bp, Homo sapiens
tatgcttaacctaat

SEQ ID NO: 1342376 - DNA, 15 bp, Homo sapiens
ctatgcttaacctaa

SEQ ID NO: 1342377 - DNA, 15 bp, Homo sapiens
tctatgcttaaccta

SEQ ID NO: 1342378 - DNA, 15 bp, Homo sapiens
ttctatgcttaacct

SEQ ID NO: 1342379 - DNA, 15 bp, Homo sapiens
attctatgcttaacc

SEQ ID NO: 1342380 - DNA, 15 bp, Homo sapiens
gattctatgcttaac

SEQ ID NO: 1342381 - DNA, 15 bp, Homo sapiens
agattctatgcttaa

SEQ ID NO: 1342382 - DNA, 15 bp, Homo sapiens
tagattctatgctta

SEQ ID NO: 1342383 - DNA, 15 bp, Homo sapiens
ctagattctatgctt

SEQ ID NO: 1342384 - DNA, 15 bp, Homo sapiens
tctagattctatgct

SEQ ID NO: 1342385 - DNA, 15 bp, Homo sapiens
ctctagattctatgc

SEQ ID NO: 1342386 - DNA, 15 bp, Homo sapiens
tctctagattctatg

SEQ ID NO: 1342387 - DNA, 15 bp, Homo sapiens
gtctctagattctat

SEQ ID NO: 1342388 - DNA, 15 bp, Homo sapiens
tgtctctagattcta

SEQ ID NO: 1342389 - DNA, 15 bp, Homo sapiens
ctgtctctagattct

SEQ ID NO: 1342390 - DNA, 15 bp, Homo sapiens
tctgtctctagattc

SEQ ID NO: 1342391 - DNA, 15 bp, Homo sapiens
gtctgtctctagatt

SEQ ID NO: 1342392 - DNA, 15 bp, Homo sapiens
agtctgtctctagat

SEQ ID NO: 1342393 - DNA, 15 bp, Homo sapiens
tagtctgtctctaga

SEQ ID NO: 1342394 - DNA, 15 bp, Homo sapiens
ttagtctgtctctag

SEQ ID NO: 1342395 - DNA, 15 bp, Homo sapiens
attagtctgtctcta

SEQ ID NO: 1342396 - DNA, 15 bp, Homo sapiens
aattagtctgtctct

SEQ ID NO: 1342397 - DNA, 15 bp, Homo sapiens
caattagtctgtctc

SEQ ID NO: 1342398 - DNA, 15 bp, Homo sapiens
ccaattagtctgtct

SEQ ID NO: 1342399 - DNA, 15 bp, Homo sapiens
cccaattagtctgtc

SEQ ID NO: 1342400 - DNA, 15 bp, Homo sapiens
acccaattagtctgt

SEQ ID NO: 1342401 - DNA, 15 bp, Homo sapiens
aacccaattagtctg

SEQ ID NO: 1342402 - DNA, 15 bp, Homo sapiens
taacccaattagtct

SEQ ID NO: 1342403 - DNA, 15 bp, Homo sapiens
ataacccaattagtc

SEQ ID NO: 1342404 - DNA, 15 bp, Homo sapiens
cataacccaattagt

SEQ ID NO: 1342405 - DNA, 15 bp, Homo sapiens
tcataacccaattag

SEQ ID NO: 1342406 - DNA, 15 bp, Homo sapiens
atcataacccaatta

SEQ ID NO: 1342407 - DNA, 15 bp, Homo sapiens
gatcataacccaatt

SEQ ID NO: 1342408 - DNA, 15 bp, Homo sapiens
agatcataacccaat

SEQ ID NO: 1342409 - DNA, 15 bp, Homo sapiens
aagatcataacccaa

SEQ ID NO: 1342410 - DNA, 15 bp, Homo sapiens
caagatcataaccca

SEQ ID NO: 1342411 - DNA, 15 bp, Homo sapiens
gcaagatcataaccc

SEQ ID NO: 1342412 - DNA, 15 bp, Homo sapiens
ggcaagatcataacc

SEQ ID NO: 1342413 - DNA, 15 bp, Homo sapiens
aggcaagatcataac

SEQ ID NO: 1342414 - DNA, 15 bp, Homo sapiens
aaggcaagatcataa

SEQ ID NO: 1342415 - DNA, 15 bp, Homo sapiens
aaaggcaagatcata

SEQ ID NO: 1342416 - DNA, 15 bp, Homo sapiens
caaaggcaagatcat

SEQ ID NO: 1342417 - DNA, 15 bp, Homo sapiens
gcaaaggcaagatca

SEQ ID NO: 1342418 - DNA, 15 bp, Homo sapiens
ggcaaaggcaagatc

SEQ ID NO: 1342419 - DNA, 15 bp, Homo sapiens
tggcaaaggcaagat

SEQ ID NO: 1342420 - DNA, 15 bp, Homo sapiens
gtggcaaaggcaaga

SEQ ID NO: 1342421 - DNA, 15 bp, Homo sapiens
agtggcaaaggcaag

SEQ ID NO: 1342422 - DNA, 15 bp, Homo sapiens
aagtggcaaaggcaa

SEQ ID NO: 1342423 - DNA, 15 bp, Homo sapiens
taagtggcaaaggca

SEQ ID NO: 1342424 - DNA, 15 bp, Homo sapiens
gtaagtggcaaaggc

SEQ ID NO: 1342425 - DNA, 15 bp, Homo sapiens
agtaagtggcaaagg

SEQ ID NO: 1342426 - DNA, 15 bp, Homo sapiens
tagtaagtggcaaag

SEQ ID NO: 1342427 - DNA, 15 bp, Homo sapiens
ctagtaagtggcaaa

SEQ ID NO: 1342428 - DNA, 15 bp, Homo sapiens
gctagtaagtggcaa

SEQ ID NO: 1342429 - DNA, 15 bp, Homo sapiens
cacagctagtaagtg

SEQ ID NO: 1342430 - DNA, 15 bp, Homo sapiens
tcacagctagtaagt

SEQ ID NO: 1342431 - DNA, 15 bp, Homo sapiens
ttcacagctagtaag

SEQ ID NO: 1342432 - DNA, 15 bp, Homo sapiens
tttcacagctagtaa

SEQ ID NO: 1342433 - DNA, 15 bp, Homo sapiens
atttcacagctagta

SEQ ID NO: 1342434 - DNA, 15 bp, Homo sapiens
gatttcacagctagt

SEQ ID NO: 1342435 - DNA, 15 bp, Homo sapiens
ggatttcacagctag

SEQ ID NO: 1342436 - DNA, 15 bp, Homo sapiens
gggatttcacagcta

SEQ ID NO: 1342437 - DNA, 15 bp, Homo sapiens
agggatttcacagct

SEQ ID NO: 1342438 - DNA, 15 bp, Homo sapiens
gagggatttcacagc

SEQ ID NO: 1342439 - DNA, 15 bp, Homo sapiens
tgagggatttcacag

SEQ ID NO: 1342440 - DNA, 15 bp, Homo sapiens
ttgagggatttcaca

SEQ ID NO: 1342441 - DNA, 15 bp, Homo sapiens
cttgagggatttcac

SEQ ID NO: 1342442 - DNA, 15 bp, Homo sapiens
gcttgagggatttca

SEQ ID NO: 1342443 - DNA, 15 bp, Homo sapiens
tgcttgagggatttc

SEQ ID NO: 1342444 - DNA, 15 bp, Homo sapiens
ttgcttgagggattt

SEQ ID NO: 1342445 - DNA, 15 bp, Homo sapiens
cttgcttgagggatt

SEQ ID NO: 1342446 - DNA, 15 bp, Homo sapiens
acttgcttgagggat

SEQ ID NO: 1342447 - DNA, 15 bp, Homo sapiens
aacttgcttgaggga

SEQ ID NO: 1342448 - DNA, 15 bp, Homo sapiens
caacttgcttgaggg

SEQ ID NO: 1342449 - DNA, 15 bp, Homo sapiens
acaacttgcttgagg

SEQ ID NO: 1342450 - DNA, 15 bp, Homo sapiens
aacaacttgcttgag

SEQ ID NO: 1342451 - DNA, 15 bp, Homo sapiens
aaacaacttgcttga

SEQ ID NO: 1342452 - DNA, 15 bp, Homo sapiens
taaacaacttgcttg

SEQ ID NO: 1342453 - DNA, 15 bp, Homo sapiens
ttaaacaacttgctt

SEQ ID NO: 1342454 - DNA, 15 bp, Homo sapiens
cttaaacaacttgct

SEQ ID NO: 1342455 - DNA, 15 bp, Homo sapiens
gcttaaacaacttgc

SEQ ID NO: 1342456 - DNA, 15 bp, Homo sapiens
agcttaaacaacttg

SEQ ID NO: 1342457 - DNA, 15 bp, Homo sapiens
gagcttaaacaactt

SEQ ID NO: 1342458 - DNA, 15 bp, Homo sapiens
agagcttaaacaact

SEQ ID NO: 1342459 - DNA, 15 bp, Homo sapiens
gagagcttaaacaac

SEQ ID NO: 1342460 - DNA, 15 bp, Homo sapiens
agagagcttaaacaa

SEQ ID NO: 1342461 - DNA, 15 bp, Homo sapiens
cagagagcttaaaca

SEQ ID NO: 1342462 - DNA, 15 bp, Homo sapiens
ccagagagcttaaac

SEQ ID NO: 1342463 - DNA, 15 bp, Homo sapiens
cccagagagcttaaa

SEQ ID NO: 1342464 - DNA, 15 bp, Homo sapiens
ccccagagagcttaa

SEQ ID NO: 1342465 - DNA, 15 bp, Homo sapiens
gccccagagagctta

SEQ ID NO: 1342466 - DNA, 15 bp, Homo sapiens
agccccagagagctt

SEQ ID NO: 1342467 - DNA, 15 bp, Homo sapiens
tagccccagagagct

SEQ ID NO: 1342468 - DNA, 15 bp, Homo sapiens
ttagccccagagagc

SEQ ID NO: 1342469 - DNA, 15 bp, Homo sapiens
tttagccccagagag

SEQ ID NO: 1342470 - DNA, 15 bp, Homo sapiens
atttagccccagaga

SEQ ID NO: 1342471 - DNA, 15 bp, Homo sapiens
aatttagccccagag

SEQ ID NO: 1342472 - DNA, 15 bp, Homo sapiens
aaatttagccccaga

SEQ ID NO: 1342473 - DNA, 15 bp, Homo sapiens
gaaatttagccccag

SEQ ID NO: 1342474 - DNA, 15 bp, Homo sapiens
agaaatttagcccca

SEQ ID NO: 1342475 - DNA, 15 bp, Homo sapiens
aagaaatttagcccc

SEQ ID NO: 1342476 - DNA, 15 bp, Homo sapiens
gaagaaatttagccc

SEQ ID NO: 1342477 - DNA, 15 bp, Homo sapiens
tgaagaaatttagcc

SEQ ID NO: 1342478 - DNA, 15 bp, Homo sapiens
atgaagaaatttagc

SEQ ID NO: 1342479 - DNA, 15 bp, Homo sapiens
aatgaagaaatttag

SEQ ID NO: 1342480 - DNA, 15 bp, Homo sapiens
aaatgaagaaattta

SEQ ID NO: 1342481 - DNA, 15 bp, Homo sapiens
taaatgaagaaattt

SEQ ID NO: 1342482 - DNA, 15 bp, Homo sapiens
ataaatgaagaaatt

SEQ ID NO: 1342483 - DNA, 15 bp, Homo sapiens
tataaatgaagaaat

SEQ ID NO: 1342484 - DNA, 15 bp, Homo sapiens
ttataaatgaagaaa

SEQ ID NO: 1342485 - DNA, 15 bp, Homo sapiens
tttataaatgaagaa

SEQ ID NO: 1342486 - DNA, 15 bp, Homo sapiens
ttttataaatgaaga

SEQ ID NO: 1342487 - DNA, 15 bp, Homo sapiens
attttataaatgaag

SEQ ID NO: 1342488 - DNA, 15 bp, Homo sapiens
tattttataaatgaa

SEQ ID NO: 1342489 - DNA, 15 bp, Homo sapiens
ttattttataaatga

SEQ ID NO: 1342490 - DNA, 15 bp, Homo sapiens
cttattttataaatg

SEQ ID NO: 1342491 - DNA, 15 bp, Homo sapiens
tcttattttataaat

SEQ ID NO: 1342492 - DNA, 15 bp, Homo sapiens
atcttattttataaa

SEQ ID NO: 1342493 - DNA, 15 bp, Homo sapiens
tatcttattttataa

SEQ ID NO: 1342494 - DNA, 15 bp, Homo sapiens
atatcttattttata

SEQ ID NO: 1342495 - DNA, 15 bp, Homo sapiens
aatatcttattttat

SEQ ID NO: 1342496 - DNA, 15 bp, Homo sapiens
caatatcttatttta

SEQ ID NO: 1342497 - DNA, 15 bp, Homo sapiens
acaatatcttatttt

SEQ ID NO: 1342498 - DNA, 15 bp, Homo sapiens
aacaatatcttattt

SEQ ID NO: 1342499 - DNA, 15 bp, Homo sapiens
caacaatatcttatt

SEQ ID NO: 1342500 - DNA, 15 bp, Homo sapiens
gcaacaatatcttat

SEQ ID NO: 1342501 - DNA, 15 bp, Homo sapiens
agcaacaatatctta

SEQ ID NO: 1342502 - DNA, 15 bp, Homo sapiens
aagcaacaatatctt

SEQ ID NO: 1342503 - DNA, 15 bp, Homo sapiens
gaagcaacaatatct

SEQ ID NO: 1342504 - DNA, 15 bp, Homo sapiens
agaagcaacaatatc

SEQ ID NO: 1342505 - DNA, 15 bp, Homo sapiens
gagaagcaacaatat

SEQ ID NO: 1342506 - DNA, 15 bp, Homo sapiens
agagaagcaacaata

SEQ ID NO: 1342507 - DNA, 15 bp, Homo sapiens
aagagaagcaacaat

SEQ ID NO: 1342508 - DNA, 15 bp, Homo sapiens
taagagaagcaacaa

SEQ ID NO: 1342509 - DNA, 15 bp, Homo sapiens
ataagagaagcaaca

SEQ ID NO: 1342510 - DNA, 15 bp, Homo sapiens
tataagagaagcaac

SEQ ID NO: 1342511 - DNA, 15 bp, Homo sapiens
ctataagagaagcaa

SEQ ID NO: 1342512 - DNA, 15 bp, Homo sapiens
cctataagagaagca

SEQ ID NO: 1342513 - DNA, 15 bp, Homo sapiens
tcctataagagaagc

SEQ ID NO: 1342514 - DNA, 15 bp, Homo sapiens
atcctataagagaag

SEQ ID NO: 1342515 - DNA, 15 bp, Homo sapiens
aatcctataagagaa

SEQ ID NO: 1342516 - DNA, 15 bp, Homo sapiens
caatcctataagaga

SEQ ID NO: 1342517 - DNA, 15 bp, Homo sapiens
acaatcctataagag

SEQ ID NO: 1342518 - DNA, 15 bp, Homo sapiens
gacaatcctataaga

SEQ ID NO: 1342519 - DNA, 15 bp, Homo sapiens
tgacaatcctataag

SEQ ID NO: 1342520 - DNA, 15 bp, Homo sapiens
ctgacaatcctataa

SEQ ID NO: 1342521 - DNA, 15 bp, Homo sapiens
cctgacaatcctata

SEQ ID NO: 1342522 - DNA, 15 bp, Homo sapiens
tcctgacaatcctat

SEQ ID NO: 1342523 - DNA, 15 bp, Homo sapiens
ttcctgacaatccta

SEQ ID NO: 1342524 - DNA, 15 bp, Homo sapiens
attcctgacaatcct

SEQ ID NO: 1342525 - DNA, 15 bp, Homo sapiens
tattcctgacaatcc

SEQ ID NO: 1342526 - DNA, 15 bp, Homo sapiens
gtattcctgacaatc

SEQ ID NO: 1342527 - DNA, 15 bp, Homo sapiens
agtattcctgacaat

SEQ ID NO: 1342528 - DNA, 15 bp, Homo sapiens
tagtattcctgacaa

SEQ ID NO: 1342529 - DNA, 15 bp, Homo sapiens
ttagtattcctgaca

SEQ ID NO: 1342530 - DNA, 15 bp, Homo sapiens
tttagtattcctgac

SEQ ID NO: 1342531 - DNA, 15 bp, Homo sapiens
atttagtattcctga

SEQ ID NO: 1342532 - DNA, 15 bp, Homo sapiens
catttagtattcctg

SEQ ID NO: 1342533 - DNA, 15 bp, Homo sapiens
tcatttagtattcct

SEQ ID NO: 1342534 - DNA, 15 bp, Homo sapiens
ctcatttagtattcc

SEQ ID NO: 1342535 - DNA, 15 bp, Homo sapiens
tctcatttagtattc

SEQ ID NO: 1342536 - DNA, 15 bp, Homo sapiens
atctcatttagtatt

SEQ ID NO: 1342537 - DNA, 15 bp, Homo sapiens
catctcatttagtat

SEQ ID NO: 1342538 - DNA, 15 bp, Homo sapiens
tcatctcatttagta

SEQ ID NO: 1342539 - DNA, 15 bp, Homo sapiens
ttcatctcatttagt

SEQ ID NO: 1342540 - DNA, 15 bp, Homo sapiens
attcatctcatttag

SEQ ID NO: 1342541 - DNA, 15 bp, Homo sapiens
cattcatctcattta

SEQ ID NO: 1342542 - DNA, 15 bp, Homo sapiens
gcattcatctcattt

SEQ ID NO: 1342543 - DNA, 15 bp, Homo sapiens
agcattcatctcatt

SEQ ID NO: 1342544 - DNA, 15 bp, Homo sapiens
cagcattcatctcat

SEQ ID NO: 1342545 - DNA, 15 bp, Homo sapiens
tcagcattcatctca

SEQ ID NO: 1342546 - DNA, 15 bp, Homo sapiens
ctcagcattcatctc

SEQ ID NO: 1342547 - DNA, 15 bp, Homo sapiens
tctcagcattcatct

SEQ ID NO: 1342548 - DNA, 15 bp, Homo sapiens
ttctcagcattcatc

SEQ ID NO: 1342549 - DNA, 15 bp, Homo sapiens
gttctcagcattcat

SEQ ID NO: 1342550 - DNA, 15 bp, Homo sapiens
tgttctcagcattca

SEQ ID NO: 1342551 - DNA, 15 bp, Homo sapiens
ttgttctcagcattc

SEQ ID NO: 1342552 - DNA, 15 bp, Homo sapiens
cttgttctcagcatt

SEQ ID NO: 1342553 - DNA, 15 bp, Homo sapiens
tcttgttctcagcat

SEQ ID NO: 1342554 - DNA, 15 bp, Homo sapiens
atcttgttctcagca

SEQ ID NO: 1342555 - DNA, 15 bp, Homo sapiens
aatcttgttctcagc

SEQ ID NO: 1342556 - DNA, 15 bp, Homo sapiens
caatcttgttctcag

SEQ ID NO: 1342557 - DNA, 15 bp, Homo sapiens
ccaatcttgttctca

SEQ ID NO: 1342558 - DNA, 15 bp, Homo sapiens
gccaatcttgttctc

SEQ ID NO: 1342559 - DNA, 15 bp, Homo sapiens
tgccaatcttgttct

SEQ ID NO: 1342560 - DNA, 15 bp, Homo sapiens
atgccaatcttgttc

SEQ ID NO: 1342561 - DNA, 15 bp, Homo sapiens
tatgccaatcttgtt

SEQ ID NO: 1342562 - DNA, 15 bp, Homo sapiens
atatgccaatcttgt

SEQ ID NO: 1342563 - DNA, 15 bp, Homo sapiens
tatatgccaatcttg

SEQ ID NO: 1342564 - DNA, 15 bp, Homo sapiens
ctatatgccaatctt

SEQ ID NO: 1342565 - DNA, 15 bp, Homo sapiens
cctatatgccaatct

SEQ ID NO: 1342566 - DNA, 15 bp, Homo sapiens
tcctatatgccaatc

SEQ ID NO: 1342567 - DNA, 15 bp, Homo sapiens
ttcctatatgccaat

SEQ ID NO: 1342568 - DNA, 15 bp, Homo sapiens
cttcctatatgccaa

SEQ ID NO: 1342569 - DNA, 15 bp, Homo sapiens
acttcctatatgcca

SEQ ID NO: 1342570 - DNA, 15 bp, Homo sapiens
cacttcctatatgcc

SEQ ID NO: 1342571 - DNA, 15 bp, Homo sapiens
ccacttcctatatgc

SEQ ID NO: 1342572 - DNA, 15 bp, Homo sapiens
tccacttcctatatg

SEQ ID NO: 1342573 - DNA, 15 bp, Homo sapiens
ctccacttcctatat

SEQ ID NO: 1342574 - DNA, 15 bp, Homo sapiens
actccacttcctata

SEQ ID NO: 1342575 - DNA, 15 bp, Homo sapiens
tactccacttcctat

SEQ ID NO: 1342576 - DNA, 15 bp, Homo sapiens
atactccacttccta

SEQ ID NO: 1342577 - DNA, 15 bp, Homo sapiens
tatactccacttcct

SEQ ID NO: 1342578 - DNA, 15 bp, Homo sapiens
atatactccacttcc

SEQ ID NO: 1342579 - DNA, 15 bp, Homo sapiens
gatatactccacttc

SEQ ID NO: 1342580 - DNA, 15 bp, Homo sapiens
agatatactccactt

SEQ ID NO: 1342581 - DNA, 15 bp, Homo sapiens
cagatatactccact

SEQ ID NO: 1342582 - DNA, 15 bp, Homo sapiens
tcagatatactccac

SEQ ID NO: 1342583 - DNA, 15 bp, Homo sapiens
ttcagatatactcca

SEQ ID NO: 1342584 - DNA, 15 bp, Homo sapiens
tttcagatatactcc

SEQ ID NO: 1342585 - DNA, 15 bp, Homo sapiens
ttttcagatatactc

SEQ ID NO: 1342586 - DNA, 15 bp, Homo sapiens
gttttcagatatact

SEQ ID NO: 1342587 - DNA, 15 bp, Homo sapiens
agttttcagatatac

SEQ ID NO: 1342588 - DNA, 15 bp, Homo sapiens
tagttttcagatata

SEQ ID NO: 1342589 - DNA, 15 bp, Homo sapiens
atagttttcagatat

SEQ ID NO: 1342590 - DNA, 15 bp, Homo sapiens
aatagttttcagata

SEQ ID NO: 1342591 - DNA, 15 bp, Homo sapiens
taatagttttcagat

SEQ ID NO: 1342592 - DNA, 15 bp, Homo sapiens
gtaatagttttcaga

SEQ ID NO: 1342593 - DNA, 15 bp, Homo sapiens
agtaatagttttcag

SEQ ID NO: 1342594 - DNA, 15 bp, Homo sapiens
tagtaatagttttca

SEQ ID NO: 1342595 - DNA, 15 bp, Homo sapiens
ctagtaatagttttc

SEQ ID NO: 1342596 - DNA, 15 bp, Homo sapiens
actagtaatagtttt

SEQ ID NO: 1342597 - DNA, 15 bp, Homo sapiens
gactagtaatagttt

SEQ ID NO: 1342598 - DNA, 15 bp, Homo sapiens
tgactagtaatagtt

SEQ ID NO: 1342599 - DNA, 15 bp, Homo sapiens
atgactagtaatagt

SEQ ID NO: 1342600 - DNA, 15 bp, Homo sapiens
catgactagtaatag

SEQ ID NO: 1342601 - DNA, 15 bp, Homo sapiens
acatgactagtaata

SEQ ID NO: 1342602 - DNA, 15 bp, Homo sapiens
tacatgactagtaat

SEQ ID NO: 1342603 - DNA, 15 bp, Homo sapiens
ttacatgactagtaa

SEQ ID NO: 1342604 - DNA, 15 bp, Homo sapiens
attacatgactagta

SEQ ID NO: 1342605 - DNA, 15 bp, Homo sapiens
tattacatgactagt

SEQ ID NO: 1342606 - DNA, 15 bp, Homo sapiens
ttattacatgactag

SEQ ID NO: 1342607 - DNA, 15 bp, Homo sapiens
cttattacatgacta

SEQ ID NO: 1342608 - DNA, 15 bp, Homo sapiens
acttattacatgact

SEQ ID NO: 1342609 - DNA, 15 bp, Homo sapiens
aacttattacatgac

SEQ ID NO: 1342610 - DNA, 15 bp, Homo sapiens
caacttattacatga

SEQ ID NO: 1342611 - DNA, 15 bp, Homo sapiens
acaacttattacatg

SEQ ID NO: 1342612 - DNA, 15 bp, Homo sapiens
aacaacttattacat

SEQ ID NO: 1342613 - DNA, 15 bp, Homo sapiens
aaacaacttattaca

SEQ ID NO: 1342614 - DNA, 15 bp, Homo sapiens
taaacaacttattac

SEQ ID NO: 1342615 - DNA, 15 bp, Homo sapiens
ttaaacaacttatta

SEQ ID NO: 1342616 - DNA, 15 bp, Homo sapiens
tttaaacaacttatt

SEQ ID NO: 1342617 - DNA, 15 bp, Homo sapiens
ttttaaacaacttat

SEQ ID NO: 1342618 - DNA, 15 bp, Homo sapiens
gttttaaacaactta

SEQ ID NO: 1342619 - DNA, 15 bp, Homo sapiens
tgttttaaacaactt

SEQ ID NO: 1342620 - DNA, 15 bp, Homo sapiens
atgttttaaacaact

SEQ ID NO: 1342621 - DNA, 15 bp, Homo sapiens
catgttttaaacaac

SEQ ID NO: 1342622 - DNA, 15 bp, Homo sapiens
gcatgttttaaacaa

SEQ ID NO: 1342623 - DNA, 15 bp, Homo sapiens
ggcatgttttaaaca

SEQ ID NO: 1342624 - DNA, 15 bp, Homo sapiens
aggcatgttttaaac

SEQ ID NO: 1342625 - DNA, 15 bp, Homo sapiens
aaggcatgttttaaa

SEQ ID NO: 1342626 - DNA, 15 bp, Homo sapiens
gaaggcatgttttaa

SEQ ID NO: 1342627 - DNA, 15 bp, Homo sapiens
agaaggcatgtttta

SEQ ID NO: 1342628 - DNA, 15 bp, Homo sapiens
gagaaggcatgtttt

SEQ ID NO: 1342629 - DNA, 15 bp, Homo sapiens
tgagaaggcatgttt

SEQ ID NO: 1342630 - DNA, 15 bp, Homo sapiens
atgagaaggcatgtt

SEQ ID NO: 1342631 - DNA, 15 bp, Homo sapiens
catgagaaggcatgt

SEQ ID NO: 1342632 - DNA, 15 bp, Homo sapiens
acatgagaaggcatg

SEQ ID NO: 1342633 - DNA, 15 bp, Homo sapiens
tacatgagaaggcat

SEQ ID NO: 1342634 - DNA, 15 bp, Homo sapiens
atacatgagaaggca

SEQ ID NO: 1342635 - DNA, 15 bp, Homo sapiens
aatacatgagaaggc

SEQ ID NO: 1342636 - DNA, 15 bp, Homo sapiens
gaatacatgagaagg

SEQ ID NO: 1342637 - DNA, 15 bp, Homo sapiens
agaatacatgagaag

SEQ ID NO: 1342638 - DNA, 15 bp, Homo sapiens
cagaatacatgagaa

SEQ ID NO: 1342639 - DNA, 15 bp, Homo sapiens
acagaatacatgaga

SEQ ID NO: 1342640 - DNA, 15 bp, Homo sapiens
cacagaatacatgag

SEQ ID NO: 1342641 - DNA, 15 bp, Homo sapiens
tcacagaatacatga

SEQ ID NO: 1342642 - DNA, 15 bp, Homo sapiens
ctcacagaatacatg

SEQ ID NO: 1342643 - DNA, 15 bp, Homo sapiens
cctcacagaatacat

SEQ ID NO: 1342644 - DNA, 15 bp, Homo sapiens
ccctcacagaataca

SEQ ID NO: 1342645 - DNA, 15 bp, Homo sapiens
gccctcacagaatac

SEQ ID NO: 1342646 - DNA, 15 bp, Homo sapiens
tgccctcacagaata

SEQ ID NO: 1342647 - DNA, 15 bp, Homo sapiens
ctgccctcacagaat

SEQ ID NO: 1342648 - DNA, 15 bp, Homo sapiens
tctgccctcacagaa

SEQ ID NO: 1342649 - DNA, 15 bp, Homo sapiens
ttctgccctcacaga

SEQ ID NO: 1342650 - DNA, 15 bp, Homo sapiens
attctgccctcacag

SEQ ID NO: 1342651 - DNA, 15 bp, Homo sapiens
gattctgccctcaca

SEQ ID NO: 1342652 - DNA, 15 bp, Homo sapiens
agattctgccctcac

SEQ ID NO: 1342653 - DNA, 15 bp, Homo sapiens
tagattctgccctca

SEQ ID NO: 1342654 - DNA, 15 bp, Homo sapiens
atagattctgccctc

SEQ ID NO: 1342655 - DNA, 15 bp, Homo sapiens
gatagattctgccct

SEQ ID NO: 1342656 - DNA, 15 bp, Homo sapiens
agatagattctgccc

SEQ ID NO: 1342657 - DNA, 15 bp, Homo sapiens
cagatagattctgcc

SEQ ID NO: 1342658 - DNA, 15 bp, Homo sapiens
acagatagattctgc

SEQ ID NO: 1342659 - DNA, 15 bp, Homo sapiens
tacagatagattctg

SEQ ID NO: 1342660 - DNA, 15 bp, Homo sapiens
ttacagatagattct

SEQ ID NO: 1342661 - DNA, 15 bp, Homo sapiens
cttacagatagattc

SEQ ID NO: 1342662 - DNA, 15 bp, Homo sapiens
tcttacagatagatt

SEQ ID NO: 1342663 - DNA, 15 bp, Homo sapiens
ctcttacagatagat

SEQ ID NO: 1342664 - DNA, 15 bp, Homo sapiens
cctcttacagataga

SEQ ID NO: 1342665 - DNA, 15 bp, Homo sapiens
acctcttacagatag

SEQ ID NO: 1342666 - DNA, 15 bp, Homo sapiens
aacctcttacagata

SEQ ID NO: 1342667 - DNA, 15 bp, Homo sapiens
caacctcttacagat

SEQ ID NO: 1342668 - DNA, 15 bp, Homo sapiens
tcaacctcttacaga

SEQ ID NO: 1342669 - DNA, 15 bp, Homo sapiens
ctcaacctcttacag

SEQ ID NO: 1342670 - DNA, 15 bp, Homo sapiens
tctcaacctcttaca

SEQ ID NO: 1342671 - DNA, 15 bp, Homo sapiens
ttctcaacctcttac

SEQ ID NO: 1342672 - DNA, 15 bp, Homo sapiens
attctcaacctctta

SEQ ID NO: 1342673 - DNA, 15 bp, Homo sapiens
cattctcaacctctt

SEQ ID NO: 1342674 - DNA, 15 bp, Homo sapiens
acattctcaacctct

SEQ ID NO: 1342675 - DNA, 15 bp, Homo sapiens
cacattctcaacctc

SEQ ID NO: 1342676 - DNA, 15 bp, Homo sapiens
acacattctcaacct

SEQ ID NO: 1342677 - DNA, 15 bp, Homo sapiens
aacacattctcaacc

SEQ ID NO: 1342678 - DNA, 15 bp, Homo sapiens
aaacacattctcaac

SEQ ID NO: 1342679 - DNA, 15 bp, Homo sapiens
taaacacattctcaa

SEQ ID NO: 1342680 - DNA, 15 bp, Homo sapiens
ttaaacacattctca

SEQ ID NO: 1342681 - DNA, 15 bp, Homo sapiens
gttaaacacattctc

SEQ ID NO: 1342682 - DNA, 15 bp, Homo sapiens
tgttaaacacattct

SEQ ID NO: 1342683 - DNA, 15 bp, Homo sapiens
gtgttaaacacattc

SEQ ID NO: 1342684 - DNA, 15 bp, Homo sapiens
agtgttaaacacatt

SEQ ID NO: 1342685 - DNA, 15 bp, Homo sapiens
tagtgttaaacacat

SEQ ID NO: 1342686 - DNA, 15 bp, Homo sapiens
atagtgttaaacaca

SEQ ID NO: 1342687 - DNA, 15 bp, Homo sapiens
tatagtgttaaacac

SEQ ID NO: 1342688 - DNA, 15 bp, Homo sapiens
atatagtgttaaaca

SEQ ID NO: 1342689 - DNA, 15 bp, Homo sapiens
gatatagtgttaaac

SEQ ID NO: 1342690 - DNA, 15 bp, Homo sapiens
tgatatagtgttaaa

SEQ ID NO: 1342691 - DNA, 15 bp, Homo sapiens
gtgatatagtgttaa

SEQ ID NO: 1342692 - DNA, 15 bp, Homo sapiens
tgtgatatagtgtta

SEQ ID NO: 1342693 - DNA, 15 bp, Homo sapiens
ctgtgatatagtgtt

SEQ ID NO: 1342694 - DNA, 15 bp, Homo sapiens
cctgtgatatagtgt

SEQ ID NO: 1342695 - DNA, 15 bp, Homo sapiens
gcctgtgatatagtg

SEQ ID NO: 1342696 - DNA, 15 bp, Homo sapiens
ggcctgtgatatagt

SEQ ID NO: 1342697 - DNA, 15 bp, Homo sapiens
aggcctgtgatatag

SEQ ID NO: 1342698 - DNA, 15 bp, Homo sapiens
taggcctgtgatata

SEQ ID NO: 1342699 - DNA, 15 bp, Homo sapiens
ctaggcctgtgatat

SEQ ID NO: 1342700 - DNA, 15 bp, Homo sapiens
gctaggcctgtgata

SEQ ID NO: 1342701 - DNA, 15 bp, Homo sapiens
tgctaggcctgtgat

SEQ ID NO: 1342702 - DNA, 15 bp, Homo sapiens
ctgctaggcctgtga

SEQ ID NO: 1342703 - DNA, 15 bp, Homo sapiens
tctgctaggcctgtg

SEQ ID NO: 1342704 - DNA, 15 bp, Homo sapiens
ctctgctaggcctgt

SEQ ID NO: 1342705 - DNA, 15 bp, Homo sapiens
actctgctaggcctg

SEQ ID NO: 1342706 - DNA, 15 bp, Homo sapiens
cactctgctaggcct

SEQ ID NO: 1342707 - DNA, 15 bp, Homo sapiens
gcactctgctaggcc

SEQ ID NO: 1342708 - DNA, 15 bp, Homo sapiens
ggcactctgctaggc

SEQ ID NO: 1342709 - DNA, 15 bp, Homo sapiens
aggcactctgctagg

SEQ ID NO: 1342710 - DNA, 15 bp, Homo sapiens
caggcactctgctag

SEQ ID NO: 1342711 - DNA, 15 bp, Homo sapiens
ccaggcactctgcta

SEQ ID NO: 1342712 - DNA, 15 bp, Homo sapiens
tccaggcactctgct

SEQ ID NO: 1342713 - DNA, 15 bp, Homo sapiens
gtccaggcactctgc

SEQ ID NO: 1342714 - DNA, 15 bp, Homo sapiens
tgtccaggcactctg

SEQ ID NO: 1342715 - DNA, 15 bp, Homo sapiens
gtgtccaggcactct

SEQ ID NO: 1342716 - DNA, 15 bp, Homo sapiens
tgtgtccaggcactc

SEQ ID NO: 1342717 - DNA, 15 bp, Homo sapiens
ctgtgtccaggcact

SEQ ID NO: 1342718 - DNA, 15 bp, Homo sapiens
actgtgtccaggcac

SEQ ID NO: 1342719 - DNA, 15 bp, Homo sapiens
cactgtgtccaggca

SEQ ID NO: 1342720 - DNA, 15 bp, Homo sapiens
ccactgtgtccaggc

SEQ ID NO: 1342721 - DNA, 15 bp, Homo sapiens
cccactgtgtccagg

SEQ ID NO: 1342722 - DNA, 15 bp, Homo sapiens
acccactgtgtccag

SEQ ID NO: 1342723 - DNA, 15 bp, Homo sapiens
cacccactgtgtcca

SEQ ID NO: 1342724 - DNA, 15 bp, Homo sapiens
acacccactgtgtcc

SEQ ID NO: 1342725 - DNA, 15 bp, Homo sapiens
aacacccactgtgtc

SEQ ID NO: 1342726 - DNA, 15 bp, Homo sapiens
aaacacccactgtgt

SEQ ID NO: 1342727 - DNA, 15 bp, Homo sapiens
caaacacccactgtg

SEQ ID NO: 1342728 - DNA, 15 bp, Homo sapiens
tcaaacacccactgt

SEQ ID NO: 1342729 - DNA, 15 bp, Homo sapiens
atcaaacacccactg

SEQ ID NO: 1342730 - DNA, 15 bp, Homo sapiens
tatcaaacacccact

SEQ ID NO: 1342731 - DNA, 15 bp, Homo sapiens
ttatcaaacacccac

SEQ ID NO: 1342732 - DNA, 15 bp, Homo sapiens
tttatcaaacaccca

SEQ ID NO: 1342733 - DNA, 15 bp, Homo sapiens
atttatcaaacaccc

SEQ ID NO: 1342734 - DNA, 15 bp, Homo sapiens
tatttatcaaacacc

SEQ ID NO: 1342735 - DNA, 15 bp, Homo sapiens
atatttatcaaacac

SEQ ID NO: 1342736 - DNA, 15 bp, Homo sapiens
aatatttatcaaaca

SEQ ID NO: 1342737 - DNA, 15 bp, Homo sapiens
aaatatttatcaaac

SEQ ID NO: 1342738 - DNA, 15 bp, Homo sapiens
caaatatttatcaaa

SEQ ID NO: 1342739 - DNA, 15 bp, Homo sapiens
tcaaatatttatcaa

SEQ ID NO: 1342740 - DNA, 15 bp, Homo sapiens
ttcaaatatttatca

SEQ ID NO: 1342741 - DNA, 15 bp, Homo sapiens
attcaaatatttatc

SEQ ID NO: 1342742 - DNA, 15 bp, Homo sapiens
aattcaaatatttat

SEQ ID NO: 1342743 - DNA, 15 bp, Homo sapiens
taattcaaatattta

SEQ ID NO: 1342744 - DNA, 15 bp, Homo sapiens
ttaattcaaatattt

SEQ ID NO: 1342745 - DNA, 15 bp, Homo sapiens
attaattcaaatatt

SEQ ID NO: 1342746 - DNA, 15 bp, Homo sapiens
cattaattcaaatat

SEQ ID NO: 1342747 - DNA, 15 bp, Homo sapiens
tcattaattcaaata

SEQ ID NO: 1342748 - DNA, 15 bp, Homo sapiens
ttcattaattcaaat

SEQ ID NO: 1342749 - DNA, 15 bp, Homo sapiens
attcattaattcaaa

SEQ ID NO: 1342750 - DNA, 15 bp, Homo sapiens
cattcattaattcaa

SEQ ID NO: 1342751 - DNA, 15 bp, Homo sapiens
ccattcattaattca

SEQ ID NO: 1342752 - DNA, 15 bp, Homo sapiens
tccattcattaattc

SEQ ID NO: 1342753 - DNA, 15 bp, Homo sapiens
gtccattcattaatt

SEQ ID NO: 1342754 - DNA, 15 bp, Homo sapiens
tgtccattcattaat

SEQ ID NO: 1342755 - DNA, 15 bp, Homo sapiens
ttgtccattcattaa

SEQ ID NO: 1342756 - DNA, 15 bp, Homo sapiens
tttgtccattcatta

SEQ ID NO: 1342757 - DNA, 15 bp, Homo sapiens
atttgtccattcatt

SEQ ID NO: 1342758 - DNA, 15 bp, Homo sapiens
catttgtccattcat

SEQ ID NO: 1342759 - DNA, 15 bp, Homo sapiens
tcatttgtccattca

SEQ ID NO: 1342760 - DNA, 15 bp, Homo sapiens
ttcatttgtccattc

SEQ ID NO: 1342761 - DNA, 15 bp, Homo sapiens
tttcatttgtccatt

SEQ ID NO: 1342762 - DNA, 15 bp, Homo sapiens
ttttcatttgtccat

SEQ ID NO: 1342763 - DNA, 15 bp, Homo sapiens
cttttcatttgtcca

SEQ ID NO: 1342764 - DNA, 15 bp, Homo sapiens
gcttttcatttgtcc

SEQ ID NO: 1342765 - DNA, 15 bp, Homo sapiens
agcttttcatttgtc

SEQ ID NO: 1342766 - DNA, 15 bp, Homo sapiens
cagcttttcatttgt

SEQ ID NO: 1342767 - DNA, 15 bp, Homo sapiens
tcagcttttcatttg

SEQ ID NO: 1342768 - DNA, 15 bp, Homo sapiens
ctcagcttttcattt

SEQ ID NO: 1342769 - DNA, 15 bp, Homo sapiens
actcagcttttcatt

SEQ ID NO: 1342770 - DNA, 15 bp, Homo sapiens
tactcagcttttcat

SEQ ID NO: 1342771 - DNA, 15 bp, Homo sapiens
gtactcagcttttca

SEQ ID NO: 1342772 - DNA, 15 bp, Homo sapiens
tgtactcagcttttc

SEQ ID NO: 1342773 - DNA, 15 bp, Homo sapiens
gtgtactcagctttt

SEQ ID NO: 1342774 - DNA, 15 bp, Homo sapiens
tgtgtactcagcttt

SEQ ID NO: 1342775 - DNA, 15 bp, Homo sapiens
ctgtgtactcagctt

SEQ ID NO: 1342776 - DNA, 15 bp, Homo sapiens
tctgtgtactcagct

SEQ ID NO: 1342777 - DNA, 15 bp, Homo sapiens
atctgtgtactcagc

SEQ ID NO: 1342778 - DNA, 15 bp, Homo sapiens
gatctgtgtactcag

SEQ ID NO: 1342779 - DNA, 15 bp, Homo sapiens
agatctgtgtactca

SEQ ID NO: 1342780 - DNA, 15 bp, Homo sapiens
aagatctgtgtactc

SEQ ID NO: 1342781 - DNA, 15 bp, Homo sapiens
taagatctgtgtact

SEQ ID NO: 1342782 - DNA, 15 bp, Homo sapiens
gtaagatctgtgtac

SEQ ID NO: 1342783 - DNA, 15 bp, Homo sapiens
agtaagatctgtgta

SEQ ID NO: 1342784 - DNA, 15 bp, Homo sapiens
cagtaagatctgtgt

SEQ ID NO: 1342785 - DNA, 15 bp, Homo sapiens
gcagtaagatctgtg

SEQ ID NO: 1342786 - DNA, 15 bp, Homo sapiens
ggcagtaagatctgt

SEQ ID NO: 1342787 - DNA, 15 bp, Homo sapiens
aggcagtaagatctg

SEQ ID NO: 1342788 - DNA, 15 bp, Homo sapiens
taggcagtaagatct

SEQ ID NO: 1342789 - DNA, 15 bp, Homo sapiens
ttaggcagtaagatc

SEQ ID NO: 1342790 - DNA, 15 bp, Homo sapiens
gttaggcagtaagat

SEQ ID NO: 1342791 - DNA, 15 bp, Homo sapiens
tgttaggcagtaaga

SEQ ID NO: 1342792 - DNA, 15 bp, Homo sapiens
gtgttaggcagtaag

SEQ ID NO: 1342793 - DNA, 15 bp, Homo sapiens
ggtgttaggcagtaa

SEQ ID NO: 1342794 - DNA, 15 bp, Homo sapiens
tggtgttaggcagta

SEQ ID NO: 1342795 - DNA, 15 bp, Homo sapiens
gtggtgttaggcagt

SEQ ID NO: 1342796 - DNA, 15 bp, Homo sapiens
ggtggtgttaggcag

SEQ ID NO: 1342797 - DNA, 15 bp, Homo sapiens
tggtggtgttaggca

SEQ ID NO: 1342798 - DNA, 15 bp, Homo sapiens
gtggtggtgttaggc

SEQ ID NO: 1342799 - DNA, 15 bp, Homo sapiens
tgtggtggtgttagg

SEQ ID NO: 1342800 - DNA, 15 bp, Homo sapiens
atgtggtggtgttag

SEQ ID NO: 1342801 - DNA, 15 bp, Homo sapiens
catgtggtggtgtta

SEQ ID NO: 1342802 - DNA, 15 bp, Homo sapiens
gcatgtggtggtgtt

SEQ ID NO: 1342803 - DNA, 15 bp, Homo sapiens
tgcatgtggtggtgt

SEQ ID NO: 1342804 - DNA, 15 bp, Homo sapiens
atgcatgtggtggtg

SEQ ID NO: 1342805 - DNA, 15 bp, Homo sapiens
tatgcatgtggtggt

SEQ ID NO: 1342806 - DNA, 15 bp, Homo sapiens
ctatgcatgtggtgg

SEQ ID NO: 1342807 - DNA, 15 bp, Homo sapiens
tctatgcatgtggtg

SEQ ID NO: 1342808 - DNA, 15 bp, Homo sapiens
ctctatgcatgtggt

SEQ ID NO: 1342809 - DNA, 15 bp, Homo sapiens
gctctatgcatgtgg

SEQ ID NO: 1342810 - DNA, 15 bp, Homo sapiens
tgctctatgcatgtg

SEQ ID NO: 1342811 - DNA, 15 bp, Homo sapiens
gtgctctatgcatgt

SEQ ID NO: 1342812 - DNA, 15 bp, Homo sapiens
tgtgctctatgcatg

SEQ ID NO: 1342813 - DNA, 15 bp, Homo sapiens
atgtgctctatgcat

SEQ ID NO: 1342814 - DNA, 15 bp, Homo sapiens
aatgtgctctatgca

SEQ ID NO: 1342815 - DNA, 15 bp, Homo sapiens
taatgtgctctatgc

SEQ ID NO: 1342816 - DNA, 15 bp, Homo sapiens
ttaatgtgctctatg

SEQ ID NO: 1342817 - DNA, 15 bp, Homo sapiens
tttaatgtgctctat

SEQ ID NO: 1342818 - DNA, 15 bp, Homo sapiens
ttttaatgtgctcta

SEQ ID NO: 1342819 - DNA, 15 bp, Homo sapiens
attttaatgtgctct

SEQ ID NO: 1342820 - DNA, 15 bp, Homo sapiens
cattttaatgtgctc

SEQ ID NO: 1342821 - DNA, 15 bp, Homo sapiens
acattttaatgtgct

SEQ ID NO: 1342822 - DNA, 15 bp, Homo sapiens
tacattttaatgtgc

SEQ ID NO: 1342823 - DNA, 15 bp, Homo sapiens
atacattttaatgtg

SEQ ID NO: 1342824 - DNA, 15 bp, Homo sapiens
catacattttaatgt

SEQ ID NO: 1342825 - DNA, 15 bp, Homo sapiens
ccatacattttaatg

SEQ ID NO: 1342826 - DNA, 15 bp, Homo sapiens
accatacattttaat

SEQ ID NO: 1342827 - DNA, 15 bp, Homo sapiens
caccatacattttaa

SEQ ID NO: 1342828 - DNA, 15 bp, Homo sapiens
gcaccatacatttta

SEQ ID NO: 1342829 - DNA, 15 bp, Homo sapiens
ggcaccatacatttt

SEQ ID NO: 1342830 - DNA, 15 bp, Homo sapiens
aggcaccatacattt

SEQ ID NO: 1342831 - DNA, 15 bp, Homo sapiens
caggcaccatacatt

SEQ ID NO: 1342832 - DNA, 15 bp, Homo sapiens
acaggcaccatacat

SEQ ID NO: 1342833 - DNA, 15 bp, Homo sapiens
aacaggcaccataca

SEQ ID NO: 1342834 - DNA, 15 bp, Homo sapiens
aaacaggcaccatac

SEQ ID NO: 1342835 - DNA, 15 bp, Homo sapiens
gaaacaggcaccata

SEQ ID NO: 1342836 - DNA, 15 bp, Homo sapiens
tgaaacaggcaccat

SEQ ID NO: 1342837 - DNA, 15 bp, Homo sapiens
atgaaacaggcacca

SEQ ID NO: 1342838 - DNA, 15 bp, Homo sapiens
catgaaacaggcacc

SEQ ID NO: 1342839 - DNA, 15 bp, Homo sapiens
tcatgaaacaggcac

SEQ ID NO: 1342840 - DNA, 15 bp, Homo sapiens
gtcatgaaacaggca

SEQ ID NO: 1342841 - DNA, 15 bp, Homo sapiens
ggtcatgaaacaggc

SEQ ID NO: 1342842 - DNA, 15 bp, Homo sapiens
tggtcatgaaacagg

SEQ ID NO: 1342843 - DNA, 15 bp, Homo sapiens
atggtcatgaaacag

SEQ ID NO: 1342844 - DNA, 15 bp, Homo sapiens
aatggtcatgaaaca

SEQ ID NO: 1342845 - DNA, 15 bp, Homo sapiens
aaatggtcatgaaac

SEQ ID NO: 1342846 - DNA, 15 bp, Homo sapiens
aaaatggtcatgaaa

SEQ ID NO: 1342847 - DNA, 15 bp, Homo sapiens
caaaatggtcatgaa

SEQ ID NO: 1342848 - DNA, 15 bp, Homo sapiens
acaaaatggtcatga

SEQ ID NO: 1342849 - DNA, 15 bp, Homo sapiens
aacaaaatggtcatg

SEQ ID NO: 1342850 - DNA, 15 bp, Homo sapiens
aaacaaaatggtcat

SEQ ID NO: 1342851 - DNA, 15 bp, Homo sapiens
taaacaaaatggtca

SEQ ID NO: 1342852 - DNA, 15 bp, Homo sapiens
ttaaacaaaatggtc

SEQ ID NO: 1342853 - DNA, 15 bp, Homo sapiens
attaaacaaaatggt

SEQ ID NO: 1342854 - DNA, 15 bp, Homo sapiens
aattaaacaaaatgg

SEQ ID NO: 1342855 - DNA, 15 bp, Homo sapiens
aaattaaacaaaatg

SEQ ID NO: 1342856 - DNA, 15 bp, Homo sapiens
aaaattaaacaaaat

SEQ ID NO: 1342857 - DNA, 15 bp, Homo sapiens
taaaattaaacaaaa

SEQ ID NO: 1342858 - DNA, 15 bp, Homo sapiens
ttaaaattaaacaaa

SEQ ID NO: 1342859 - DNA, 15 bp, Homo sapiens
gttaaaattaaacaa

SEQ ID NO: 1342860 - DNA, 15 bp, Homo sapiens
ggttaaaattaaaca

SEQ ID NO: 1342861 - DNA, 15 bp, Homo sapiens
tggttaaaattaaac

SEQ ID NO: 1342862 - DNA, 15 bp, Homo sapiens
gtggttaaaattaaa

SEQ ID NO: 1342863 - DNA, 15 bp, Homo sapiens
tgtggttaaaattaa

SEQ ID NO: 1342864 - DNA, 15 bp, Homo sapiens
ttgtggttaaaatta

SEQ ID NO: 1342865 - DNA, 15 bp, Homo sapiens
tttgtggttaaaatt

SEQ ID NO: 1342866 - DNA, 15 bp, Homo sapiens
ctttgtggttaaaat

SEQ ID NO: 1342867 - DNA, 15 bp, Homo sapiens
actttgtggttaaaa

SEQ ID NO: 1342868 - DNA, 15 bp, Homo sapiens
gactttgtggttaaa

SEQ ID NO: 1342869 - DNA, 15 bp, Homo sapiens
tgactttgtggttaa

SEQ ID NO: 1342870 - DNA, 15 bp, Homo sapiens
ttgactttgtggtta

SEQ ID NO: 1342871 - DNA, 15 bp, Homo sapiens
tttgactttgtggtt

SEQ ID NO: 1342872 - DNA, 15 bp, Homo sapiens
ctttgactttgtggt

SEQ ID NO: 1342873 - DNA, 15 bp, Homo sapiens
tctttgactttgtgg

SEQ ID NO: 1342874 - DNA, 15 bp, Homo sapiens
ttctttgactttgtg

SEQ ID NO: 1342875 - DNA, 15 bp, Homo sapiens
cttctttgactttgt

SEQ ID NO: 1342876 - DNA, 15 bp, Homo sapiens
ccttctttgactttg

SEQ ID NO: 1342877 - DNA, 15 bp, Homo sapiens
cccttctttgacttt

SEQ ID NO: 1342878 - DNA, 15 bp, Homo sapiens
tcccttctttgactt

SEQ ID NO: 1342879 - DNA, 15 bp, Homo sapiens
ttcccttctttgact

SEQ ID NO: 1342880 - DNA, 15 bp, Homo sapiens
cttcccttctttgac

SEQ ID NO: 1342881 - DNA, 15 bp, Homo sapiens
ccttcccttctttga

SEQ ID NO: 1342882 - DNA, 15 bp, Homo sapiens
tccttcccttctttg

SEQ ID NO: 1342883 - DNA, 15 bp, Homo sapiens
ttccttcccttcttt

SEQ ID NO: 1342884 - DNA, 15 bp, Homo sapiens
gttccttcccttctt

SEQ ID NO: 1342885 - DNA, 15 bp, Homo sapiens
agttccttcccttct

SEQ ID NO: 1342886 - DNA, 15 bp, Homo sapiens
tagttccttcccttc

SEQ ID NO: 1342887 - DNA, 15 bp, Homo sapiens
atagttccttccctt

SEQ ID NO: 1342888 - DNA, 15 bp, Homo sapiens
aatagttccttccct

SEQ ID NO: 1342889 - DNA, 15 bp, Homo sapiens
taatagttccttccc

SEQ ID NO: 1342890 - DNA, 15 bp, Homo sapiens
ataatagttccttcc

SEQ ID NO: 1342891 - DNA, 15 bp, Homo sapiens
gataatagttccttc

SEQ ID NO: 1342892 - DNA, 15 bp, Homo sapiens
ggataatagttcctt

SEQ ID NO: 1342893 - DNA, 15 bp, Homo sapiens
tggataatagttcct

SEQ ID NO: 1342894 - DNA, 15 bp, Homo sapiens
atggataatagttcc

SEQ ID NO: 1342895 - DNA, 15 bp, Homo sapiens
tatggataatagttc

SEQ ID NO: 1342896 - DNA, 15 bp, Homo sapiens
atatggataatagtt

SEQ ID NO: 1342897 - DNA, 15 bp, Homo sapiens
aatatggataatagt

SEQ ID NO: 1342898 - DNA, 15 bp, Homo sapiens
aaatatggataatag

SEQ ID NO: 1342899 - DNA, 15 bp, Homo sapiens
aaaatatggataata

SEQ ID NO: 1342900 - DNA, 15 bp, Homo sapiens
taaaatatggataat

SEQ ID NO: 1342901 - DNA, 15 bp, Homo sapiens
gtaaaatatggataa

SEQ ID NO: 1342902 - DNA, 15 bp, Homo sapiens
ggtaaaatatggata

SEQ ID NO: 1342903 - DNA, 15 bp, Homo sapiens
aggtaaaatatggat

SEQ ID NO: 1342904 - DNA, 15 bp, Homo sapiens
aaggtaaaatatgga

SEQ ID NO: 1342905 - DNA, 15 bp, Homo sapiens
aaaggtaaaatatgg

SEQ ID NO: 1342906 - DNA, 15 bp, Homo sapiens
caaaggtaaaatatg

SEQ ID NO: 1342907 - DNA, 15 bp, Homo sapiens
tcaaaggtaaaatat

SEQ ID NO: 1342908 - DNA, 15 bp, Homo sapiens
atcaaaggtaaaata

SEQ ID NO: 1342909 - DNA, 15 bp, Homo sapiens
tatcaaaggtaaaat

SEQ ID NO: 1342910 - DNA, 15 bp, Homo sapiens
ttatcaaaggtaaaa

SEQ ID NO: 1342911 - DNA, 15 bp, Homo sapiens
attatcaaaggtaaa

SEQ ID NO: 1342912 - DNA, 15 bp, Homo sapiens
cattatcaaaggtaa

SEQ ID NO: 1342913 - DNA, 15 bp, Homo sapiens
acattatcaaaggta

SEQ ID NO: 1342914 - DNA, 15 bp, Homo sapiens
aacattatcaaaggt

SEQ ID NO: 1342915 - DNA, 15 bp, Homo sapiens
caacattatcaaagg

SEQ ID NO: 1342916 - DNA, 15 bp, Homo sapiens
tcaacattatcaaag

SEQ ID NO: 1342917 - DNA, 15 bp, Homo sapiens
ctcaacattatcaaa

SEQ ID NO: 1342918 - DNA, 15 bp, Homo sapiens
actcaacattatcaa

SEQ ID NO: 1342919 - DNA, 15 bp, Homo sapiens
gactcaacattatca

SEQ ID NO: 1342920 - DNA, 15 bp, Homo sapiens
agactcaacattatc

SEQ ID NO: 1342921 - DNA, 15 bp, Homo sapiens
gagactcaacattat

SEQ ID NO: 1342922 - DNA, 15 bp, Homo sapiens
tgagactcaacatta

SEQ ID NO: 1342923 - DNA, 15 bp, Homo sapiens
ctgagactcaacatt

SEQ ID NO: 1342924 - DNA, 15 bp, Homo sapiens
tctgagactcaacat

SEQ ID NO: 1342925 - DNA, 15 bp, Homo sapiens
ttctgagactcaaca

SEQ ID NO: 1342926 - DNA, 15 bp, Homo sapiens
tttctgagactcaac

SEQ ID NO: 1342927 - DNA, 15 bp, Homo sapiens
ctttctgagactcaa

SEQ ID NO: 1342928 - DNA, 15 bp, Homo sapiens
actttctgagactca

SEQ ID NO: 1342929 - DNA, 15 bp, Homo sapiens
aactttctgagactc

SEQ ID NO: 1342930 - DNA, 15 bp, Homo sapiens
caactttctgagact

SEQ ID NO: 1342931 - DNA, 15 bp, Homo sapiens
acaactttctgagac

SEQ ID NO: 1342932 - DNA, 15 bp, Homo sapiens
aacaactttctgaga

SEQ ID NO: 1342933 - DNA, 15 bp, Homo sapiens
aaacaactttctgag

SEQ ID NO: 1342934 - DNA, 15 bp, Homo sapiens
caaacaactttctga

SEQ ID NO: 1342935 - DNA, 15 bp, Homo sapiens
gcaaacaactttctg

SEQ ID NO: 1342936 - DNA, 15 bp, Homo sapiens
agcaaacaactttct

SEQ ID NO: 1342937 - DNA, 15 bp, Homo sapiens
gagcaaacaactttc

SEQ ID NO: 1342938 - DNA, 15 bp, Homo sapiens
tgagcaaacaacttt

SEQ ID NO: 1342939 - DNA, 15 bp, Homo sapiens
ttgagcaaacaactt

SEQ ID NO: 1342940 - DNA, 15 bp, Homo sapiens
cttgagcaaacaact

SEQ ID NO: 1342941 - DNA, 15 bp, Homo sapiens
ccttgagcaaacaac

SEQ ID NO: 1342942 - DNA, 15 bp, Homo sapiens
accttgagcaaacaa

SEQ ID NO: 1342943 - DNA, 15 bp, Homo sapiens
gaccttgagcaaaca

SEQ ID NO: 1342944 - DNA, 15 bp, Homo sapiens
tgaccttgagcaaac

SEQ ID NO: 1342945 - DNA, 15 bp, Homo sapiens
atgaccttgagcaaa

SEQ ID NO: 1342946 - DNA, 15 bp, Homo sapiens
tatgaccttgagcaa

SEQ ID NO: 1342947 - DNA, 15 bp, Homo sapiens
atatgaccttgagca

SEQ ID NO: 1342948 - DNA, 15 bp, Homo sapiens
tatatgaccttgagc

SEQ ID NO: 1342949 - DNA, 15 bp, Homo sapiens
ctatatgaccttgag

SEQ ID NO: 1342950 - DNA, 15 bp, Homo sapiens
actatatgaccttga

SEQ ID NO: 1342951 - DNA, 15 bp, Homo sapiens
aactatatgaccttg

SEQ ID NO: 1342952 - DNA, 15 bp, Homo sapiens
caactatatgacctt

SEQ ID NO: 1342953 - DNA, 15 bp, Homo sapiens
tcaactatatgacct

SEQ ID NO: 1342954 - DNA, 15 bp, Homo sapiens
atcaactatatgacc

SEQ ID NO: 1342955 - DNA, 15 bp, Homo sapiens
tatcaactatatgac

SEQ ID NO: 1342956 - DNA, 15 bp, Homo sapiens
ttatcaactatatga

SEQ ID NO: 1342957 - DNA, 15 bp, Homo sapiens
tttatcaactatatg

SEQ ID NO: 1342958 - DNA, 15 bp, Homo sapiens
atttatcaactatat

SEQ ID NO: 1342959 - DNA, 15 bp, Homo sapiens
catttatcaactata

SEQ ID NO: 1342960 - DNA, 15 bp, Homo sapiens
ccatttatcaactat

SEQ ID NO: 1342961 - DNA, 15 bp, Homo sapiens
accatttatcaacta

SEQ ID NO: 1342962 - DNA, 15 bp, Homo sapiens
taccatttatcaact

SEQ ID NO: 1342963 - DNA, 15 bp, Homo sapiens
ttaccatttatcaac

SEQ ID NO: 1342964 - DNA, 15 bp, Homo sapiens
tttaccatttatcaa

SEQ ID NO: 1342965 - DNA, 15 bp, Homo sapiens
ctttaccatttatca

SEQ ID NO: 1342966 - DNA, 15 bp, Homo sapiens
gctttaccatttatc

SEQ ID NO: 1342967 - DNA, 15 bp, Homo sapiens
ggctttaccatttat

SEQ ID NO: 1342968 - DNA, 15 bp, Homo sapiens
tggctttaccattta

SEQ ID NO: 1342969 - DNA, 15 bp, Homo sapiens
ttggctttaccattt

SEQ ID NO: 1342970 - DNA, 15 bp, Homo sapiens
tttggctttaccatt

SEQ ID NO: 1342971 - DNA, 15 bp, Homo sapiens
ctttggctttaccat

SEQ ID NO: 1342972 - DNA, 15 bp, Homo sapiens
cctttggctttacca

SEQ ID NO: 1342973 - DNA, 15 bp, Homo sapiens
tcctttggctttacc

SEQ ID NO: 1342974 - DNA, 15 bp, Homo sapiens
ttcctttggctttac

SEQ ID NO: 1342975 - DNA, 15 bp, Homo sapiens
cttcctttggcttta

SEQ ID NO: 1342976 - DNA, 15 bp, Homo sapiens
atcttcctttggctt

SEQ ID NO: 1342977 - DNA, 15 bp, Homo sapiens
gatcttcctttggct

SEQ ID NO: 1342978 - DNA, 15 bp, Homo sapiens
ggatcttcctttggc

SEQ ID NO: 1342979 - DNA, 15 bp, Homo sapiens
aggatcttcctttgg

SEQ ID NO: 1342980 - DNA, 15 bp, Homo sapiens
caggatcttcctttg

SEQ ID NO: 1342981 - DNA, 15 bp, Homo sapiens
tcaggatcttccttt

SEQ ID NO: 1342982 - DNA, 15 bp, Homo sapiens
gtcaggatcttcctt

SEQ ID NO: 1342983 - DNA, 15 bp, Homo sapiens
agtcaggatcttcct

SEQ ID NO: 1342984 - DNA, 15 bp, Homo sapiens
gagtcaggatcttcc

SEQ ID NO: 1342985 - DNA, 15 bp, Homo sapiens
agagtcaggatcttc

SEQ ID NO: 1342986 - DNA, 15 bp, Homo sapiens
gagagtcaggatctt

SEQ ID NO: 1342987 - DNA, 15 bp, Homo sapiens
tgagagtcaggatct

SEQ ID NO: 1342988 - DNA, 15 bp, Homo sapiens
ttgagagtcaggatc

SEQ ID NO: 1342989 - DNA, 15 bp, Homo sapiens
tttgagagtcaggat

SEQ ID NO: 1342990 - DNA, 15 bp, Homo sapiens
gtttgagagtcagga

SEQ ID NO: 1342991 - DNA, 15 bp, Homo sapiens
agtttgagagtcagg

SEQ ID NO: 1342992 - DNA, 15 bp, Homo sapiens
tagtttgagagtcag

SEQ ID NO: 1342993 - DNA, 15 bp, Homo sapiens
gtagtttgagagtca

SEQ ID NO: 1342994 - DNA, 15 bp, Homo sapiens
ggtagtttgagagtc

SEQ ID NO: 1342995 - DNA, 15 bp, Homo sapiens
gggtagtttgagagt

SEQ ID NO: 1342996 - DNA, 15 bp, Homo sapiens
tgggtagtttgagag

SEQ ID NO: 1342997 - DNA, 15 bp, Homo sapiens
ttgggtagtttgaga

SEQ ID NO: 1342998 - DNA, 15 bp, Homo sapiens
cttgggtagtttgag

SEQ ID NO: 1342999 - DNA, 15 bp, Homo sapiens
ccttgggtagtttga

SEQ ID NO: 1343000 - DNA, 15 bp, Homo sapiens
gccttgggtagtttg

SEQ ID NO: 1343001 - DNA, 15 bp, Homo sapiens
ggccttgggtagttt

SEQ ID NO: 1343002 - DNA, 15 bp, Homo sapiens
tggccttgggtagtt

SEQ ID NO: 1343003 - DNA, 15 bp, Homo sapiens
ctggccttgggtagt

SEQ ID NO: 1343004 - DNA, 15 bp, Homo sapiens
tctggccttgggtag

SEQ ID NO: 1343005 - DNA, 15 bp, Homo sapiens
ctctggccttgggta

SEQ ID NO: 1343006 - DNA, 15 bp, Homo sapiens
actctggccttgggt

SEQ ID NO: 1343007 - DNA, 15 bp, Homo sapiens
aactctggccttggg

SEQ ID NO: 1343008 - DNA, 15 bp, Homo sapiens
taactctggccttgg

SEQ ID NO: 1343009 - DNA, 15 bp, Homo sapiens
ataactctggccttg

SEQ ID NO: 1343010 - DNA, 15 bp, Homo sapiens
gataactctggcctt

SEQ ID NO: 1343011 - DNA, 15 bp, Homo sapiens
agataactctggcct

SEQ ID NO: 1343012 - DNA, 15 bp, Homo sapiens
aagataactctggcc

SEQ ID NO: 1343013 - DNA, 15 bp, Homo sapiens
taagataactctggc

SEQ ID NO: 1343014 - DNA, 15 bp, Homo sapiens
ttaagataactctgg

SEQ ID NO: 1343015 - DNA, 15 bp, Homo sapiens
tttaagataactctg

SEQ ID NO: 1343016 - DNA, 15 bp, Homo sapiens
ctttaagataactct

SEQ ID NO: 1343017 - DNA, 15 bp, Homo sapiens
tctttaagataactc

SEQ ID NO: 1343018 - DNA, 15 bp, Homo sapiens
gtctttaagataact

SEQ ID NO: 1343019 - DNA, 15 bp, Homo sapiens
tgtctttaagataac

SEQ ID NO: 1343020 - DNA, 15 bp, Homo sapiens
ttgtctttaagataa

SEQ ID NO: 1343021 - DNA, 15 bp, Homo sapiens
gttgtctttaagata

SEQ ID NO: 1343022 - DNA, 15 bp, Homo sapiens
ggttgtctttaagat

SEQ ID NO: 1343023 - DNA, 15 bp, Homo sapiens
gggttgtctttaaga

SEQ ID NO: 1343024 - DNA, 15 bp, Homo sapiens
tgggttgtctttaag

SEQ ID NO: 1343025 - DNA, 15 bp, Homo sapiens
ctgggttgtctttaa

SEQ ID NO: 1343026 - DNA, 15 bp, Homo sapiens
tctgggttgtcttta

SEQ ID NO: 1343027 - DNA, 15 bp, Homo sapiens
atctgggttgtcttt

SEQ ID NO: 1343028 - DNA, 15 bp, Homo sapiens
catctgggttgtctt

SEQ ID NO: 1343029 - DNA, 15 bp, Homo sapiens
tcatctgggttgtct

SEQ ID NO: 1343030 - DNA, 15 bp, Homo sapiens
ctcatctgggttgtc

SEQ ID NO: 1343031 - DNA, 15 bp, Homo sapiens
tctcatctgggttgt

SEQ ID NO: 1343032 - DNA, 15 bp, Homo sapiens
ctctcatctgggttg

SEQ ID NO: 1343033 - DNA, 15 bp, Homo sapiens
actctcatctgggtt

SEQ ID NO: 1343034 - DNA, 15 bp, Homo sapiens
gactctcatctgggt

SEQ ID NO: 1343035 - DNA, 15 bp, Homo sapiens
tgactctcatctggg

SEQ ID NO: 1343036 - DNA, 15 bp, Homo sapiens
gtgactctcatctgg

SEQ ID NO: 1343037 - DNA, 15 bp, Homo sapiens
ggtgactctcatctg

SEQ ID NO: 1343038 - DNA, 15 bp, Homo sapiens
tggtgactctcatct

SEQ ID NO: 1343039 - DNA, 15 bp, Homo sapiens
gtggtgactctcatc

SEQ ID NO: 1343040 - DNA, 15 bp, Homo sapiens
tgtggtgactctcat

SEQ ID NO: 1343041 - DNA, 15 bp, Homo sapiens
ctgtggtgactctca

SEQ ID NO: 1343042 - DNA, 15 bp, Homo sapiens
cctgtggtgactctc

SEQ ID NO: 1343043 - DNA, 15 bp, Homo sapiens
gcctgtggtgactct

SEQ ID NO: 1343044 - DNA, 15 bp, Homo sapiens
tgcctgtggtgactc

SEQ ID NO: 1343045 - DNA, 15 bp, Homo sapiens
ttgcctgtggtgact

SEQ ID NO: 1343046 - DNA, 15 bp, Homo sapiens
cttgcctgtggtgac

SEQ ID NO: 1343047 - DNA, 15 bp, Homo sapiens
ccttgcctgtggtga

SEQ ID NO: 1343048 - DNA, 15 bp, Homo sapiens
accttgcctgtggtg

SEQ ID NO: 1343049 - DNA, 15 bp, Homo sapiens
aaccttgcctgtggt

SEQ ID NO: 1343050 - DNA, 15 bp, Homo sapiens
caaccttgcctgtgg

SEQ ID NO: 1343051 - DNA, 15 bp, Homo sapiens
tcaaccttgcctgtg

SEQ ID NO: 1343052 - DNA, 15 bp, Homo sapiens
ttcaaccttgcctgt

SEQ ID NO: 1343053 - DNA, 15 bp, Homo sapiens
gttcaaccttgcctg

SEQ ID NO: 1343054 - DNA, 15 bp, Homo sapiens
ggttcaaccttgcct

SEQ ID NO: 1343055 - DNA, 15 bp, Homo sapiens
tggttcaaccttgcc

SEQ ID NO: 1343056 - DNA, 15 bp, Homo sapiens
ttggttcaaccttgc

SEQ ID NO: 1343057 - DNA, 15 bp, Homo sapiens
attggttcaaccttg

SEQ ID NO: 1343058 - DNA, 15 bp, Homo sapiens
gattggttcaacctt

SEQ ID NO: 1343059 - DNA, 15 bp, Homo sapiens
tgattggttcaacct

SEQ ID NO: 1343060 - DNA, 15 bp, Homo sapiens
gtgattggttcaacc

SEQ ID NO: 1343061 - DNA, 15 bp, Homo sapiens
ggtgattggttcaac

SEQ ID NO: 1343062 - DNA, 15 bp, Homo sapiens
tggtgattggttcaa

SEQ ID NO: 1343063 - DNA, 15 bp, Homo sapiens
atggtgattggttca

SEQ ID NO: 1343064 - DNA, 15 bp, Homo sapiens
aatggtgattggttc

SEQ ID NO: 1343065 - DNA, 15 bp, Homo sapiens
gaatggtgattggtt

SEQ ID NO: 1343066 - DNA, 15 bp, Homo sapiens
tgaatggtgattggt

SEQ ID NO: 1343067 - DNA, 15 bp, Homo sapiens
gtgaatggtgattgg

SEQ ID NO: 1343068 - DNA, 15 bp, Homo sapiens
tgtgaatggtgattg

SEQ ID NO: 1343069 - DNA, 15 bp, Homo sapiens
ctgtgaatggtgatt

SEQ ID NO: 1343070 - DNA, 15 bp, Homo sapiens
actgtgaatggtgat

SEQ ID NO: 1343071 - DNA, 15 bp, Homo sapiens
cactgtgaatggtga

SEQ ID NO: 1343072 - DNA, 15 bp, Homo sapiens
gcactgtgaatggtg

SEQ ID NO: 1343073 - DNA, 15 bp, Homo sapiens
ggcactgtgaatggt

SEQ ID NO: 1343074 - DNA, 15 bp, Homo sapiens
gggcactgtgaatgg

SEQ ID NO: 1343075 - DNA, 15 bp, Homo sapiens
agggcactgtgaatg

SEQ ID NO: 1343076 - DNA, 15 bp, Homo sapiens
gagggcactgtgaat

SEQ ID NO: 1343077 - DNA, 15 bp, Homo sapiens
agagggcactgtgaa

SEQ ID NO: 1343078 - DNA, 15 bp, Homo sapiens
aagagggcactgtga

SEQ ID NO: 1343079 - DNA, 15 bp, Homo sapiens
caagagggcactgtg

SEQ ID NO: 1343080 - DNA, 15 bp, Homo sapiens
tcaagagggcactgt

SEQ ID NO: 1343081 - DNA, 15 bp, Homo sapiens
ctcaagagggcactg

SEQ ID NO: 1343082 - DNA, 15 bp, Homo sapiens
actcaagagggcact

SEQ ID NO: 1343083 - DNA, 15 bp, Homo sapiens
aactcaagagggcac

SEQ ID NO: 1343084 - DNA, 15 bp, Homo sapiens
caactcaagagggca

SEQ ID NO: 1343085 - DNA, 15 bp, Homo sapiens
gcaactcaagagggc

SEQ ID NO: 1343086 - DNA, 15 bp, Homo sapiens
ggcaactcaagaggg

SEQ ID NO: 1343087 - DNA, 15 bp, Homo sapiens
gggcaactcaagagg

SEQ ID NO: 1343088 - DNA, 15 bp, Homo sapiens
ggggcaactcaagag

SEQ ID NO: 1343089 - DNA, 15 bp, Homo sapiens
tggggcaactcaaga

SEQ ID NO: 1343090 - DNA, 15 bp, Homo sapiens
ctggggcaactcaag

SEQ ID NO: 1343091 - DNA, 15 bp, Homo sapiens
actggggcaactcaa

SEQ ID NO: 1343092 - DNA, 15 bp, Homo sapiens
aactggggcaactca

SEQ ID NO: 1343093 - DNA, 15 bp, Homo sapiens
gaactggggcaactc

SEQ ID NO: 1343094 - DNA, 15 bp, Homo sapiens
agaactggggcaact

SEQ ID NO: 1343095 - DNA, 15 bp, Homo sapiens
cagaactggggcaac

SEQ ID NO: 1343096 - DNA, 15 bp, Homo sapiens
tcagaactggggcaa

SEQ ID NO: 1343097 - DNA, 15 bp, Homo sapiens
ttcagaactggggca

SEQ ID NO: 1343098 - DNA, 15 bp, Homo sapiens
gttcagaactggggc

SEQ ID NO: 1343099 - DNA, 15 bp, Homo sapiens
ggttcagaactgggg

SEQ ID NO: 1343100 - DNA, 15 bp, Homo sapiens
aggttcagaactggg

SEQ ID NO: 1343101 - DNA, 15 bp, Homo sapiens
aaggttcagaactgg

SEQ ID NO: 1343102 - DNA, 15 bp, Homo sapiens
caaggttcagaactg

SEQ ID NO: 1343103 - DNA, 15 bp, Homo sapiens
tcaaggttcagaact

SEQ ID NO: 1343104 - DNA, 15 bp, Homo sapiens
atcaaggttcagaac

SEQ ID NO: 1343105 - DNA, 15 bp, Homo sapiens
gatcaaggttcagaa

SEQ ID NO: 1343106 - DNA, 15 bp, Homo sapiens
agatcaaggttcaga

SEQ ID NO: 1343107 - DNA, 15 bp, Homo sapiens
aagatcaaggttcag

SEQ ID NO: 1343108 - DNA, 15 bp, Homo sapiens
caagatcaaggttca

SEQ ID NO: 1343109 - DNA, 15 bp, Homo sapiens
gcaagatcaaggttc

SEQ ID NO: 1343110 - DNA, 15 bp, Homo sapiens
agcaagatcaaggtt

SEQ ID NO: 1343111 - DNA, 15 bp, Homo sapiens
cagcaagatcaaggt

SEQ ID NO: 1343112 - DNA, 15 bp, Homo sapiens
acagcaagatcaagg

SEQ ID NO: 1343113 - DNA, 15 bp, Homo sapiens
cacagcaagatcaag

SEQ ID NO: 1343114 - DNA, 15 bp, Homo sapiens
tcacagcaagatcaa

SEQ ID NO: 1343115 - DNA, 15 bp, Homo sapiens
atcacagcaagatca

SEQ ID NO: 1343116 - DNA, 15 bp, Homo sapiens
aatcacagcaagatc

SEQ ID NO: 1343117 - DNA, 15 bp, Homo sapiens
gaatcacagcaagat

SEQ ID NO: 1343118 - DNA, 15 bp, Homo sapiens
ggaatcacagcaaga

SEQ ID NO: 1343119 - DNA, 15 bp, Homo sapiens
aggaatcacagcaag

SEQ ID NO: 1343120 - DNA, 15 bp, Homo sapiens
caggaatcacagcaa

SEQ ID NO: 1343121 - DNA, 15 bp, Homo sapiens
tcaggaatcacagca

SEQ ID NO: 1343122 - DNA, 15 bp, Homo sapiens
ttcaggaatcacagc

SEQ ID NO: 1343123 - DNA, 15 bp, Homo sapiens
tttcaggaatcacag

SEQ ID NO: 1343124 - DNA, 15 bp, Homo sapiens
ttttcaggaatcaca

SEQ ID NO: 1343125 - DNA, 15 bp, Homo sapiens
gttttcaggaatcac

SEQ ID NO: 1343126 - DNA, 15 bp, Homo sapiens
ggttttcaggaatca

SEQ ID NO: 1343127 - DNA, 15 bp, Homo sapiens
aggttttcaggaatc

SEQ ID NO: 1343128 - DNA, 15 bp, Homo sapiens
gaggttttcaggaat

SEQ ID NO: 1343129 - DNA, 15 bp, Homo sapiens
agaggttttcaggaa

SEQ ID NO: 1343130 - DNA, 15 bp, Homo sapiens
gagaggttttcagga

SEQ ID NO: 1343131 - DNA, 15 bp, Homo sapiens
agagaggttttcagg

SEQ ID NO: 1343132 - DNA, 15 bp, Homo sapiens
tagagaggttttcag

SEQ ID NO: 1343133 - DNA, 15 bp, Homo sapiens
gtagagaggttttca

SEQ ID NO: 1343134 - DNA, 15 bp, Homo sapiens
ggtagagaggttttc

SEQ ID NO: 1343135 - DNA, 15 bp, Homo sapiens
aggtagagaggtttt

SEQ ID NO: 1343136 - DNA, 15 bp, Homo sapiens
caggtagagaggttt

SEQ ID NO: 1343137 - DNA, 15 bp, Homo sapiens
gcaggtagagaggtt

SEQ ID NO: 1343138 - DNA, 15 bp, Homo sapiens
agcaggtagagaggt

SEQ ID NO: 1343139 - DNA, 15 bp, Homo sapiens
cagcaggtagagagg

SEQ ID NO: 1343140 - DNA, 15 bp, Homo sapiens
gcagcaggtagagag

SEQ ID NO: 1343141 - DNA, 15 bp, Homo sapiens
agcagcaggtagaga

SEQ ID NO: 1343142 - DNA, 15 bp, Homo sapiens
aagcagcaggtagag

SEQ ID NO: 1343143 - DNA, 15 bp, Homo sapiens
gaagcagcaggtaga

SEQ ID NO: 1343144 - DNA, 15 bp, Homo sapiens
tgaagcagcaggtag

SEQ ID NO: 1343145 - DNA, 15 bp, Homo sapiens
ctgaagcagcaggta

SEQ ID NO: 1343146 - DNA, 15 bp, Homo sapiens
gctgaagcagcaggt

SEQ ID NO: 1343147 - DNA, 15 bp, Homo sapiens
agctgaagcagcagg

SEQ ID NO: 1343148 - DNA, 15 bp, Homo sapiens
aagctgaagcagcag

SEQ ID NO: 1343149 - DNA, 15 bp, Homo sapiens
aaagctgaagcagca

SEQ ID NO: 1343150 - DNA, 15 bp, Homo sapiens
caaagctgaagcagc

SEQ ID NO: 1343151 - DNA, 15 bp, Homo sapiens
acaaagctgaagcag

SEQ ID NO: 1343152 - DNA, 15 bp, Homo sapiens
aacaaagctgaagca

SEQ ID NO: 1343153 - DNA, 15 bp, Homo sapiens
taacaaagctgaagc

SEQ ID NO: 1343154 - DNA, 15 bp, Homo sapiens
ttaacaaagctgaag

SEQ ID NO: 1343155 - DNA, 15 bp, Homo sapiens
cttaacaaagctgaa

SEQ ID NO: 1343156 - DNA, 15 bp, Homo sapiens
acttaacaaagctga

SEQ ID NO: 1343157 - DNA, 15 bp, Homo sapiens
tacttaacaaagctg

SEQ ID NO: 1343158 - DNA, 15 bp, Homo sapiens
ctacttaacaaagct

SEQ ID NO: 1343159 - DNA, 15 bp, Homo sapiens
gctacttaacaaagc

SEQ ID NO: 1343160 - DNA, 15 bp, Homo sapiens
ggctacttaacaaag

SEQ ID NO: 1343161 - DNA, 15 bp, Homo sapiens
aggctacttaacaaa

SEQ ID NO: 1343162 - DNA, 15 bp, Homo sapiens
gaggctacttaacaa

SEQ ID NO: 1343163 - DNA, 15 bp, Homo sapiens
ggaggctacttaaca

SEQ ID NO: 1343164 - DNA, 15 bp, Homo sapiens
gggaggctacttaac

SEQ ID NO: 1343165 - DNA, 15 bp, Homo sapiens
ggggaggctacttaa

SEQ ID NO: 1343166 - DNA, 15 bp, Homo sapiens
gggggaggctactta

SEQ ID NO: 1343167 - DNA, 15 bp, Homo sapiens
tgggggaggctactt

SEQ ID NO: 1343168 - DNA, 15 bp, Homo sapiens
atgggggaggctact

SEQ ID NO: 1343169 - DNA, 15 bp, Homo sapiens
tatgggggaggctac

SEQ ID NO: 1343170 - DNA, 15 bp, Homo sapiens
ctatgggggaggcta

SEQ ID NO: 1343171 - DNA, 15 bp, Homo sapiens
gctatgggggaggct

SEQ ID NO: 1343172 - DNA, 15 bp, Homo sapiens
tgctatgggggaggc

SEQ ID NO: 1343173 - DNA, 15 bp, Homo sapiens
atgctatgggggagg

SEQ ID NO: 1343174 - DNA, 15 bp, Homo sapiens
gatgctatgggggag

SEQ ID NO: 1343175 - DNA, 15 bp, Homo sapiens
agatgctatggggga

SEQ ID NO: 1343176 - DNA, 15 bp, Homo sapiens
cagatgctatggggg

SEQ ID NO: 1343177 - DNA, 15 bp, Homo sapiens
ccagatgctatgggg

SEQ ID NO: 1343178 - DNA, 15 bp, Homo sapiens
accagatgctatggg

SEQ ID NO: 1343179 - DNA, 15 bp, Homo sapiens
caccagatgctatgg

SEQ ID NO: 1343180 - DNA, 15 bp, Homo sapiens
ccaccagatgctatg

SEQ ID NO: 1343181 - DNA, 15 bp, Homo sapiens
accaccagatgctat

SEQ ID NO: 1343182 - DNA, 15 bp, Homo sapiens
caccaccagatgcta

SEQ ID NO: 1343183 - DNA, 15 bp, Homo sapiens
acaccaccagatgct

SEQ ID NO: 1343184 - DNA, 15 bp, Homo sapiens
gacaccaccagatgc

SEQ ID NO: 1343185 - DNA, 15 bp, Homo sapiens
agacaccaccagatg

SEQ ID NO: 1343186 - DNA, 15 bp, Homo sapiens
cagacaccaccagat

SEQ ID NO: 1343187 - DNA, 15 bp, Homo sapiens
gcagacaccaccaga

SEQ ID NO: 1343188 - DNA, 15 bp, Homo sapiens
agcagacaccaccag

SEQ ID NO: 1343189 - DNA, 15 bp, Homo sapiens
aagcagacaccacca

SEQ ID NO: 1343190 - DNA, 15 bp, Homo sapiens
taagcagacaccacc

SEQ ID NO: 1343191 - DNA, 15 bp, Homo sapiens
ataagcagacaccac

SEQ ID NO: 1343192 - DNA, 15 bp, Homo sapiens
gataagcagacacca

SEQ ID NO: 1343193 - DNA, 15 bp, Homo sapiens
ggataagcagacacc

SEQ ID NO: 1343194 - DNA, 15 bp, Homo sapiens
tggataagcagacac

SEQ ID NO: 1343195 - DNA, 15 bp, Homo sapiens
ctggataagcagaca

SEQ ID NO: 1343196 - DNA, 15 bp, Homo sapiens
cctggataagcagac

SEQ ID NO: 1343197 - DNA, 15 bp, Homo sapiens
gcctggataagcaga

SEQ ID NO: 1343198 - DNA, 15 bp, Homo sapiens
cgcctggataagcag

SEQ ID NO: 1343199 - DNA, 15 bp, Homo sapiens
gcgcctggataagca

SEQ ID NO: 1343200 - DNA, 15 bp, Homo sapiens
ggcgcctggataagc

SEQ ID NO: 1343201 - DNA, 15 bp, Homo sapiens
gggcgcctggataag

SEQ ID NO: 1343202 - DNA, 15 bp, Homo sapiens
ggggcgcctggataa

SEQ ID NO: 1343203 - DNA, 15 bp, Homo sapiens
aggggcgcctggata

SEQ ID NO: 1343204 - DNA, 15 bp, Homo sapiens
caggggcgcctggat

SEQ ID NO: 1343205 - DNA, 15 bp, Homo sapiens
gcaggggcgcctgga

SEQ ID NO: 1343206 - DNA, 15 bp, Homo sapiens
agcaggggcgcctgg

SEQ ID NO: 1343207 - DNA, 15 bp, Homo sapiens
cagcaggggcgcctg

SEQ ID NO: 1343208 - DNA, 15 bp, Homo sapiens
tcagcaggggcgcct

SEQ ID NO: 1343209 - DNA, 15 bp, Homo sapiens
gtcagcaggggcgcc

SEQ ID NO: 1343210 - DNA, 15 bp, Homo sapiens
agtcagcaggggcgc

SEQ ID NO: 1343211 - DNA, 15 bp, Homo sapiens
aagtcagcaggggcg

SEQ ID NO: 1343212 - DNA, 15 bp, Homo sapiens
gaagtcagcaggggc

SEQ ID NO: 1343213 - DNA, 15 bp, Homo sapiens
tgaagtcagcagggg

SEQ ID NO: 1343214 - DNA, 15 bp, Homo sapiens
gtgaagtcagcaggg

SEQ ID NO: 1343215 - DNA, 15 bp, Homo sapiens
agtgaagtcagcagg

SEQ ID NO: 1343216 - DNA, 15 bp, Homo sapiens
cagtgaagtcagcag

SEQ ID NO: 1343217 - DNA, 15 bp, Homo sapiens
gcagtgaagtcagca

SEQ ID NO: 1343218 - DNA, 15 bp, Homo sapiens
ggcagtgaagtcagc

SEQ ID NO: 1343219 - DNA, 15 bp, Homo sapiens
gggcagtgaagtcag

SEQ ID NO: 1343220 - DNA, 15 bp, Homo sapiens
tgggcagtgaagtca

SEQ ID NO: 1343221 - DNA, 15 bp, Homo sapiens
gtgggcagtgaagtc

SEQ ID NO: 1343222 - DNA, 15 bp, Homo sapiens
ggtgggcagtgaagt

SEQ ID NO: 1343223 - DNA, 15 bp, Homo sapiens
aggtgggcagtgaag

SEQ ID NO: 1343224 - DNA, 15 bp, Homo sapiens
caggtgggcagtgaa

SEQ ID NO: 1343225 - DNA, 15 bp, Homo sapiens
tcaggtgggcagtga

SEQ ID NO: 1343226 - DNA, 15 bp, Homo sapiens
ttcaggtgggcagtg

SEQ ID NO: 1343227 - DNA, 15 bp, Homo sapiens
tttcaggtgggcagt

SEQ ID NO: 1343228 - DNA, 15 bp, Homo sapiens
atttcaggtgggcag

SEQ ID NO: 1343229 - DNA, 15 bp, Homo sapiens
gatttcaggtgggca

SEQ ID NO: 1343230 - DNA, 15 bp, Homo sapiens
agatttcaggtgggc

SEQ ID NO: 1343231 - DNA, 15 bp, Homo sapiens
cagatttcaggtggg

SEQ ID NO: 1343232 - DNA, 15 bp, Homo sapiens
tcagatttcaggtgg

SEQ ID NO: 1343233 - DNA, 15 bp, Homo sapiens
ctcagatttcaggtg

SEQ ID NO: 1343234 - DNA, 15 bp, Homo sapiens
actcagatttcaggt

SEQ ID NO: 1343235 - DNA, 15 bp, Homo sapiens
tactcagatttcagg

SEQ ID NO: 1343236 - DNA, 15 bp, Homo sapiens
gtactcagatttcag

SEQ ID NO: 1343237 - DNA, 15 bp, Homo sapiens
tgtactcagatttca

SEQ ID NO: 1343238 - DNA, 15 bp, Homo sapiens
ctgtactcagatttc

SEQ ID NO: 1343239 - DNA, 15 bp, Homo sapiens
gctgtactcagattt

SEQ ID NO: 1343240 - DNA, 15 bp, Homo sapiens
tgctgtactcagatt

SEQ ID NO: 1343241 - DNA, 15 bp, Homo sapiens
atgctgtactcagat

SEQ ID NO: 1343242 - DNA, 15 bp, Homo sapiens
gatgctgtactcaga

SEQ ID NO: 1343243 - DNA, 15 bp, Homo sapiens
tgatgctgtactcag

SEQ ID NO: 1343244 - DNA, 15 bp, Homo sapiens
gtgatgctgtactca

SEQ ID NO: 1343245 - DNA, 15 bp, Homo sapiens
tgtgatgctgtactc

SEQ ID NO: 1343246 - DNA, 15 bp, Homo sapiens
ttgtgatgctgtact

SEQ ID NO: 1343247 - DNA, 15 bp, Homo sapiens
tttgtgatgctgtac

SEQ ID NO: 1343248 - DNA, 15 bp, Homo sapiens
gtttgtgatgctgta

SEQ ID NO: 1343249 - DNA, 15 bp, Homo sapiens
ggtttgtgatgctgt

SEQ ID NO: 1343250 - DNA, 15 bp, Homo sapiens
tggtttgtgatgctg

SEQ ID NO: 1343251 - DNA, 15 bp, Homo sapiens
ttggtttgtgatgct

SEQ ID NO: 1343252 - DNA, 15 bp, Homo sapiens
cttggtttgtgatgc

SEQ ID NO: 1343253 - DNA, 15 bp, Homo sapiens
acttggtttgtgatg

SEQ ID NO: 1343254 - DNA, 15 bp, Homo sapiens
gacttggtttgtgat

SEQ ID NO: 1343255 - DNA, 15 bp, Homo sapiens
agacttggtttgtga

SEQ ID NO: 1343256 - DNA, 15 bp, Homo sapiens
cagacttggtttgtg

SEQ ID NO: 1343257 - DNA, 15 bp, Homo sapiens
tcagacttggtttgt

SEQ ID NO: 1343258 - DNA, 15 bp, Homo sapiens
gtcagacttggtttg

SEQ ID NO: 1343259 - DNA, 15 bp, Homo sapiens
tgtcagacttggttt

SEQ ID NO: 1343260 - DNA, 15 bp, Homo sapiens
gtgtcagacttggtt

SEQ ID NO: 1343261 - DNA, 15 bp, Homo sapiens
tgtgtcagacttggt

SEQ ID NO: 1343262 - DNA, 15 bp, Homo sapiens
ttgtgtcagacttgg

SEQ ID NO: 1343263 - DNA, 15 bp, Homo sapiens
tttgtgtcagacttg

SEQ ID NO: 1343264 - DNA, 15 bp, Homo sapiens
gtttgtgtcagactt

SEQ ID NO: 1343265 - DNA, 15 bp, Homo sapiens
cgtttgtgtcagact

SEQ ID NO: 1343266 - DNA, 15 bp, Homo sapiens
acgtttgtgtcagac

SEQ ID NO: 1343267 - DNA, 15 bp, Homo sapiens
tacgtttgtgtcaga

SEQ ID NO: 1343268 - DNA, 15 bp, Homo sapiens
ctacgtttgtgtcag

SEQ ID NO: 1343269 - DNA, 15 bp, Homo sapiens
cctacgtttgtgtca

SEQ ID NO: 1343270 - DNA, 15 bp, Homo sapiens
tcctacgtttgtgtc

SEQ ID NO: 1343271 - DNA, 15 bp, Homo sapiens
atcctacgtttgtgt

SEQ ID NO: 1343272 - DNA, 15 bp, Homo sapiens
gatcctacgtttgtg

SEQ ID NO: 1343273 - DNA, 15 bp, Homo sapiens
ggatcctacgtttgt

SEQ ID NO: 1343274 - DNA, 15 bp, Homo sapiens
aggatcctacgtttg

SEQ ID NO: 1343275 - DNA, 15 bp, Homo sapiens
aaggatcctacgttt

SEQ ID NO: 1343276 - DNA, 15 bp, Homo sapiens
aaaggatcctacgtt

SEQ ID NO: 1343277 - DNA, 15 bp, Homo sapiens
taaaggatcctacgt

SEQ ID NO: 1343278 - DNA, 15 bp, Homo sapiens
ttaaaggatcctacg

SEQ ID NO: 1343279 - DNA, 15 bp, Homo sapiens
attaaaggatcctac

SEQ ID NO: 1343280 - DNA, 15 bp, Homo sapiens
aattaaaggatccta

SEQ ID NO: 1343281 - DNA, 15 bp, Homo sapiens
caattaaaggatcct

SEQ ID NO: 1343282 - DNA, 15 bp, Homo sapiens
ccaattaaaggatcc

SEQ ID NO: 1343283 - DNA, 15 bp, Homo sapiens
tccaattaaaggatc

SEQ ID NO: 1343284 - DNA, 15 bp, Homo sapiens
gtccaattaaaggat

SEQ ID NO: 1343285 - DNA, 15 bp, Homo sapiens
ggtccaattaaagga

SEQ ID NO: 1343286 - DNA, 15 bp, Homo sapiens
tggtccaattaaagg

SEQ ID NO: 1343287 - DNA, 15 bp, Homo sapiens
atggtccaattaaag

SEQ ID NO: 1343288 - DNA, 15 bp, Homo sapiens
tatggtccaattaaa

SEQ ID NO: 1343289 - DNA, 15 bp, Homo sapiens
ttatggtccaattaa

SEQ ID NO: 1343290 - DNA, 15 bp, Homo sapiens
gttatggtccaatta

SEQ ID NO: 1343291 - DNA, 15 bp, Homo sapiens
tgttatggtccaatt

SEQ ID NO: 1343292 - DNA, 15 bp, Homo sapiens
ttgttatggtccaat

SEQ ID NO: 1343293 - DNA, 15 bp, Homo sapiens
tttgttatggtccaa

SEQ ID NO: 1343294 - DNA, 15 bp, Homo sapiens
ctttgttatggtcca

SEQ ID NO: 1343295 - DNA, 15 bp, Homo sapiens
actttgttatggtcc

SEQ ID NO: 1343296 - DNA, 15 bp, Homo sapiens
cactttgttatggtc

SEQ ID NO: 1343297 - DNA, 15 bp, Homo sapiens
ccactttgttatggt

SEQ ID NO: 1343298 - DNA, 15 bp, Homo sapiens
cccactttgttatgg

SEQ ID NO: 1343299 - DNA, 15 bp, Homo sapiens
tcccactttgttatg

SEQ ID NO: 1343300 - DNA, 15 bp, Homo sapiens
gtcccactttgttat

SEQ ID NO: 1343301 - DNA, 15 bp, Homo sapiens
tgtcccactttgtta

SEQ ID NO: 1343302 - DNA, 15 bp, Homo sapiens
gtgtcccactttgtt

SEQ ID NO: 1343303 - DNA, 15 bp, Homo sapiens
agtgtcccactttgt

SEQ ID NO: 1343304 - DNA, 15 bp, Homo sapiens
cagtgtcccactttg

SEQ ID NO: 1343305 - DNA, 15 bp, Homo sapiens
tcagtgtcccacttt

SEQ ID NO: 1343306 - DNA, 15 bp, Homo sapiens
atcagtgtcccactt

SEQ ID NO: 1343307 - DNA, 15 bp, Homo sapiens
aatcagtgtcccact

SEQ ID NO: 1343308 - DNA, 15 bp, Homo sapiens
aaatcagtgtcccac

SEQ ID NO: 1343309 - DNA, 15 bp, Homo sapiens
aaaatcagtgtccca

SEQ ID NO: 1343310 - DNA, 15 bp, Homo sapiens
aaaaatcagtgtccc

SEQ ID NO: 1343311 - DNA, 15 bp, Homo sapiens
aaaaaatcagtgtcc

SEQ ID NO: 1343312 - DNA, 15 bp, Homo sapiens
aaaaaaatcagtgtc

SEQ ID NO: 1343313 - DNA, 15 bp, Homo sapiens
aaaaaaaatcagtgt

SEQ ID NO: 1343314 - DNA, 15 bp, Homo sapiens
caaaaaaaatcagtg

SEQ ID NO: 1343315 - DNA, 15 bp, Homo sapiens
ccaaaaaaaatcagt

SEQ ID NO: 1343316 - DNA, 15 bp, Homo sapiens
cccaaaaaaaatcag

SEQ ID NO: 1343317 - DNA, 15 bp, Homo sapiens
tcccaaaaaaaatca

SEQ ID NO: 1343318 - DNA, 15 bp, Homo sapiens
ctcccaaaaaaaatc

SEQ ID NO: 1343319 - DNA, 15 bp, Homo sapiens
cctcccaaaaaaaat

SEQ ID NO: 1343320 - DNA, 15 bp, Homo sapiens
ccctcccaaaaaaaa

SEQ ID NO: 1343321 - DNA, 15 bp, Homo sapiens
tccctcccaaaaaaa

SEQ ID NO: 1343322 - DNA, 15 bp, Homo sapiens
atccctcccaaaaaa

SEQ ID NO: 1343323 - DNA, 15 bp, Homo sapiens
aatccctcccaaaaa

SEQ ID NO: 1343324 - DNA, 15 bp, Homo sapiens
caatccctcccaaaa

SEQ ID NO: 1343325 - DNA, 15 bp, Homo sapiens
tcaatccctcccaaa

SEQ ID NO: 1343326 - DNA, 15 bp, Homo sapiens
ttcaatccctcccaa

SEQ ID NO: 1343327 - DNA, 15 bp, Homo sapiens
attcaatccctccca

SEQ ID NO: 1343328 - DNA, 15 bp, Homo sapiens
tattcaatccctccc

SEQ ID NO: 1343329 - DNA, 15 bp, Homo sapiens
atattcaatccctcc

SEQ ID NO: 1343330 - DNA, 15 bp, Homo sapiens
catattcaatccctc

SEQ ID NO: 1343331 - DNA, 15 bp, Homo sapiens
tcatattcaatccct

SEQ ID NO: 1343332 - DNA, 15 bp, Homo sapiens
ctcatattcaatccc

SEQ ID NO: 1343333 - DNA, 15 bp, Homo sapiens
tctcatattcaatcc

SEQ ID NO: 1343334 - DNA, 15 bp, Homo sapiens
ttctcatattcaatc

SEQ ID NO: 1343335 - DNA, 15 bp, Homo sapiens
cttctcatattcaat

SEQ ID NO: 1343336 - DNA, 15 bp, Homo sapiens
tcttctcatattcaa

SEQ ID NO: 1343337 - DNA, 15 bp, Homo sapiens
ctcttctcatattca

SEQ ID NO: 1343338 - DNA, 15 bp, Homo sapiens
tctcttctcatattc

SEQ ID NO: 1343339 - DNA, 15 bp, Homo sapiens
atctcttctcatatt

SEQ ID NO: 1343340 - DNA, 15 bp, Homo sapiens
aatctcttctcatat

SEQ ID NO: 1343341 - DNA, 15 bp, Homo sapiens
taatctcttctcata

SEQ ID NO: 1343342 - DNA, 15 bp, Homo sapiens
ttaatctcttctcat

SEQ ID NO: 1343343 - DNA, 15 bp, Homo sapiens
tttaatctcttctca

SEQ ID NO: 1343344 - DNA, 15 bp, Homo sapiens
ctttaatctcttctc

SEQ ID NO: 1343345 - DNA, 15 bp, Homo sapiens
cctttaatctcttct

SEQ ID NO: 1343346 - DNA, 15 bp, Homo sapiens
tcctttaatctcttc

SEQ ID NO: 1343347 - DNA, 15 bp, Homo sapiens
ctcctttaatctctt

SEQ ID NO: 1343348 - DNA, 15 bp, Homo sapiens
actcctttaatctct

SEQ ID NO: 1343349 - DNA, 15 bp, Homo sapiens
aactcctttaatctc

SEQ ID NO: 1343350 - DNA, 15 bp, Homo sapiens
taactcctttaatct

SEQ ID NO: 1343351 - DNA, 15 bp, Homo sapiens
ttaactcctttaatc

SEQ ID NO: 1343352 - DNA, 15 bp, Homo sapiens
gttaactcctttaat

SEQ ID NO: 1343353 - DNA, 15 bp, Homo sapiens
agttaactcctttaa

SEQ ID NO: 1343354 - DNA, 15 bp, Homo sapiens
tagttaactccttta

SEQ ID NO: 1343355 - DNA, 15 bp, Homo sapiens
ttagttaactccttt

SEQ ID NO: 1343356 - DNA, 15 bp, Homo sapiens
cttagttaactcctt

SEQ ID NO: 1343357 - DNA, 15 bp, Homo sapiens
acttagttaactcct

SEQ ID NO: 1343358 - DNA, 15 bp, Homo sapiens
aacttagttaactcc

SEQ ID NO: 1343359 - DNA, 15 bp, Homo sapiens
aaacttagttaactc

SEQ ID NO: 1343360 - DNA, 15 bp, Homo sapiens
gaaacttagttaact

SEQ ID NO: 1343361 - DNA, 15 bp, Homo sapiens
tgaaacttagttaac

SEQ ID NO: 1343362 - DNA, 15 bp, Homo sapiens
ttgaaacttagttaa

SEQ ID NO: 1343363 - DNA, 15 bp, Homo sapiens
cttgaaacttagtta

SEQ ID NO: 1343364 - DNA, 15 bp, Homo sapiens
gcttgaaacttagtt

SEQ ID NO: 1343365 - DNA, 15 bp, Homo sapiens
ggcttgaaacttagt

SEQ ID NO: 1343366 - DNA, 15 bp, Homo sapiens
gggcttgaaacttag

SEQ ID NO: 1343367 - DNA, 15 bp, Homo sapiens
tgggcttgaaactta

SEQ ID NO: 1343368 - DNA, 15 bp, Homo sapiens
ctgggcttgaaactt

SEQ ID NO: 1343369 - DNA, 15 bp, Homo sapiens
actgggcttgaaact

SEQ ID NO: 1343370 - DNA, 15 bp, Homo sapiens
aactgggcttgaaac

SEQ ID NO: 1343371 - DNA, 15 bp, Homo sapiens
taactgggcttgaaa

SEQ ID NO: 1343372 - DNA, 15 bp, Homo sapiens
ttaactgggcttgaa

SEQ ID NO: 1343373 - DNA, 15 bp, Homo sapiens
gttaactgggcttga

SEQ ID NO: 1343374 - DNA, 15 bp, Homo sapiens
ggttaactgggcttg

SEQ ID NO: 1343375 - DNA, 15 bp, Homo sapiens
tggttaactgggctt

SEQ ID NO: 1343376 - DNA, 15 bp, Homo sapiens
ctggttaactgggct

SEQ ID NO: 1343377 - DNA, 15 bp, Homo sapiens
cctggttaactgggc

SEQ ID NO: 1343378 - DNA, 15 bp, Homo sapiens
tcctggttaactggg

SEQ ID NO: 1343379 - DNA, 15 bp, Homo sapiens
ctcctggttaactgg

SEQ ID NO: 1343380 - DNA, 15 bp, Homo sapiens
tctcctggttaactg

SEQ ID NO: 1343381 - DNA, 15 bp, Homo sapiens
ttctcctggttaact

SEQ ID NO: 1343382 - DNA, 15 bp, Homo sapiens
attctcctggttaac

SEQ ID NO: 1343383 - DNA, 15 bp, Homo sapiens
cattctcctggttaa

SEQ ID NO: 1343384 - DNA, 15 bp, Homo sapiens
tcattctcctggtta

SEQ ID NO: 1343385 - DNA, 15 bp, Homo sapiens
gtcattctcctggtt

SEQ ID NO: 1343386 - DNA, 15 bp, Homo sapiens
tgtcattctcctggt

SEQ ID NO: 1343387 - DNA, 15 bp, Homo sapiens
atgtcattctcctgg

SEQ ID NO: 1343388 - DNA, 15 bp, Homo sapiens
aatgtcattctcctg

SEQ ID NO: 1343389 - DNA, 15 bp, Homo sapiens
taatgtcattctcct

SEQ ID NO: 1343390 - DNA, 15 bp, Homo sapiens
ttaatgtcattctcc

SEQ ID NO: 1343391 - DNA, 15 bp, Homo sapiens
gttaatgtcattctc

SEQ ID NO: 1343392 - DNA, 15 bp, Homo sapiens
tgttaatgtcattct

SEQ ID NO: 1343393 - DNA, 15 bp, Homo sapiens
gtgttaatgtcattc

SEQ ID NO: 1343394 - DNA, 15 bp, Homo sapiens
tgtgttaatgtcatt

SEQ ID NO: 1343395 - DNA, 15 bp, Homo sapiens
ttgtgttaatgtcat

SEQ ID NO: 1343396 - DNA, 15 bp, Homo sapiens
tttgtgttaatgtca

SEQ ID NO: 1343397 - DNA, 15 bp, Homo sapiens
atttgtgttaatgtc

SEQ ID NO: 1343398 - DNA, 15 bp, Homo sapiens
tatttgtgttaatgt

SEQ ID NO: 1343399 - DNA, 15 bp, Homo sapiens
ctatttgtgttaatg

SEQ ID NO: 1343400 - DNA, 15 bp, Homo sapiens
actatttgtgttaat

SEQ ID NO: 1343401 - DNA, 15 bp, Homo sapiens
gactatttgtgttaa

SEQ ID NO: 1343402 - DNA, 15 bp, Homo sapiens
tgactatttgtgtta

SEQ ID NO: 1343403 - DNA, 15 bp, Homo sapiens
ttgactatttgtgtt

SEQ ID NO: 1343404 - DNA, 15 bp, Homo sapiens
attgactatttgtgt

SEQ ID NO: 1343405 - DNA, 15 bp, Homo sapiens
tattgactatttgtg

SEQ ID NO: 1343406 - DNA, 15 bp, Homo sapiens
gtattgactatttgt

SEQ ID NO: 1343407 - DNA, 15 bp, Homo sapiens
tgtattgactatttg

SEQ ID NO: 1343408 - DNA, 15 bp, Homo sapiens
ttgtattgactattt

SEQ ID NO: 1343409 - DNA, 15 bp, Homo sapiens
cttgtattgactatt

SEQ ID NO: 1343410 - DNA, 15 bp, Homo sapiens
tcttgtattgactat

SEQ ID NO: 1343411 - DNA, 15 bp, Homo sapiens
ctcttgtattgacta

SEQ ID NO: 1343412 - DNA, 15 bp, Homo sapiens
actcttgtattgact

SEQ ID NO: 1343413 - DNA, 15 bp, Homo sapiens
tactcttgtattgac

SEQ ID NO: 1343414 - DNA, 15 bp, Homo sapiens
ctactcttgtattga

SEQ ID NO: 1343415 - DNA, 15 bp, Homo sapiens
actactcttgtattg

SEQ ID NO: 1343416 - DNA, 15 bp, Homo sapiens
aactactcttgtatt

SEQ ID NO: 1343417 - DNA, 15 bp, Homo sapiens
aaactactcttgtat

SEQ ID NO: 1343418 - DNA, 15 bp, Homo sapiens
caaactactcttgta

SEQ ID NO: 1343419 - DNA, 15 bp, Homo sapiens
acaaactactcttgt

SEQ ID NO: 1343420 - DNA, 15 bp, Homo sapiens
aacaaactactcttg

SEQ ID NO: 1343421 - DNA, 15 bp, Homo sapiens
aaacaaactactctt

SEQ ID NO: 1343422 - DNA, 15 bp, Homo sapiens
caaacaaactactct

SEQ ID NO: 1343423 - DNA, 15 bp, Homo sapiens
tcaaacaaactactc

SEQ ID NO: 1343424 - DNA, 15 bp, Homo sapiens
ttcaaacaaactact

SEQ ID NO: 1343425 - DNA, 15 bp, Homo sapiens
cttcaaacaaactac

SEQ ID NO: 1343426 - DNA, 15 bp, Homo sapiens
ccttcaaacaaacta

SEQ ID NO: 1343427 - DNA, 15 bp, Homo sapiens
tccttcaaacaaact

SEQ ID NO: 1343428 - DNA, 15 bp, Homo sapiens
ttccttcaaacaaac

SEQ ID NO: 1343429 - DNA, 15 bp, Homo sapiens
gttccttcaaacaaa

SEQ ID NO: 1343430 - DNA, 15 bp, Homo sapiens
tgttccttcaaacaa

SEQ ID NO: 1343431 - DNA, 15 bp, Homo sapiens
atgttccttcaaaca

SEQ ID NO: 1343432 - DNA, 15 bp, Homo sapiens
tatgttccttcaaac

SEQ ID NO: 1343433 - DNA, 15 bp, Homo sapiens
ctatgttccttcaaa

SEQ ID NO: 1343434 - DNA, 15 bp, Homo sapiens
tctatgttccttcaa

SEQ ID NO: 1343435 - DNA, 15 bp, Homo sapiens
ttctatgttccttca

SEQ ID NO: 1343436 - DNA, 15 bp, Homo sapiens
gttctatgttccttc

SEQ ID NO: 1343437 - DNA, 15 bp, Homo sapiens
agttctatgttcctt

SEQ ID NO: 1343438 - DNA, 15 bp, Homo sapiens
tagttctatgttcct

SEQ ID NO: 1343439 - DNA, 15 bp, Homo sapiens
atagttctatgttcc

SEQ ID NO: 1343440 - DNA, 15 bp, Homo sapiens
aatagttctatgttc

SEQ ID NO: 1343441 - DNA, 15 bp, Homo sapiens
gaatagttctatgtt

SEQ ID NO: 1343442 - DNA, 15 bp, Homo sapiens
tgaatagttctatgt

SEQ ID NO: 1343443 - DNA, 15 bp, Homo sapiens
ttgaatagttctatg

SEQ ID NO: 1343444 - DNA, 15 bp, Homo sapiens
gttgaatagttctat

SEQ ID NO: 1343445 - DNA, 15 bp, Homo sapiens
tgttgaatagttcta

SEQ ID NO: 1343446 - DNA, 15 bp, Homo sapiens
atgttgaatagttct

SEQ ID NO: 1343447 - DNA, 15 bp, Homo sapiens
aatgttgaatagttc

SEQ ID NO: 1343448 - DNA, 15 bp, Homo sapiens
taatgttgaatagtt

SEQ ID NO: 1343449 - DNA, 15 bp, Homo sapiens
ctaatgttgaatagt

SEQ ID NO: 1343450 - DNA, 15 bp, Homo sapiens
tctaatgttgaatag

SEQ ID NO: 1343451 - DNA, 15 bp, Homo sapiens
gtctaatgttgaata

SEQ ID NO: 1343452 - DNA, 15 bp, Homo sapiens
tgtctaatgttgaat

SEQ ID NO: 1343453 - DNA, 15 bp, Homo sapiens
gtgtctaatgttgaa

SEQ ID NO: 1343454 - DNA, 15 bp, Homo sapiens
cgtgtctaatgttga

SEQ ID NO: 1343455 - DNA, 15 bp, Homo sapiens
acgtgtctaatgttg

SEQ ID NO: 1343456 - DNA, 15 bp, Homo sapiens
gacgtgtctaatgtt

SEQ ID NO: 1343457 - DNA, 15 bp, Homo sapiens
tgacgtgtctaatgt

SEQ ID NO: 1343458 - DNA, 15 bp, Homo sapiens
ttgacgtgtctaatg

SEQ ID NO: 1343459 - DNA, 15 bp, Homo sapiens
cttgacgtgtctaat

SEQ ID NO: 1343460 - DNA, 15 bp, Homo sapiens
acttgacgtgtctaa

SEQ ID NO: 1343461 - DNA, 15 bp, Homo sapiens
aacttgacgtgtcta

SEQ ID NO: 1343462 - DNA, 15 bp, Homo sapiens
aaacttgacgtgtct

SEQ ID NO: 1343463 - DNA, 15 bp, Homo sapiens
caaacttgacgtgtc

SEQ ID NO: 1343464 - DNA, 15 bp, Homo sapiens
ccaaacttgacgtgt

SEQ ID NO: 1343465 - DNA, 15 bp, Homo sapiens
cccaaacttgacgtg

SEQ ID NO: 1343466 - DNA, 15 bp, Homo sapiens
tcccaaacttgacgt

SEQ ID NO: 1343467 - DNA, 15 bp, Homo sapiens
gtcccaaacttgacg

SEQ ID NO: 1343468 - DNA, 15 bp, Homo sapiens
tgtcccaaacttgac

SEQ ID NO: 1343469 - DNA, 15 bp, Homo sapiens
gtgtcccaaacttga

SEQ ID NO: 1343470 - DNA, 15 bp, Homo sapiens
ggtgtcccaaacttg

SEQ ID NO: 1343471 - DNA, 15 bp, Homo sapiens
tggtgtcccaaactt

SEQ ID NO: 1343472 - DNA, 15 bp, Homo sapiens
ctggtgtcccaaact

SEQ ID NO: 1343473 - DNA, 15 bp, Homo sapiens
actggtgtcccaaac

SEQ ID NO: 1343474 - DNA, 15 bp, Homo sapiens
tactggtgtcccaaa

SEQ ID NO: 1343475 - DNA, 15 bp, Homo sapiens
ttactggtgtcccaa

SEQ ID NO: 1343476 - DNA, 15 bp, Homo sapiens
cttactggtgtccca

SEQ ID NO: 1343477 - DNA, 15 bp, Homo sapiens
acttactggtgtccc

SEQ ID NO: 1343478 - DNA, 15 bp, Homo sapiens
tacttactggtgtcc

SEQ ID NO: 1343479 - DNA, 15 bp, Homo sapiens
ctacttactggtgtc

SEQ ID NO: 1343480 - DNA, 15 bp, Homo sapiens
actacttactggtgt

SEQ ID NO: 1343481 - DNA, 15 bp, Homo sapiens
gactacttactggtg

SEQ ID NO: 1343482 - DNA, 15 bp, Homo sapiens
agactacttactggt

SEQ ID NO: 1343483 - DNA, 15 bp, Homo sapiens
tagactacttactgg

SEQ ID NO: 1343484 - DNA, 15 bp, Homo sapiens
ttagactacttactg

SEQ ID NO: 1343485 - DNA, 15 bp, Homo sapiens
cttagactacttact

SEQ ID NO: 1343486 - DNA, 15 bp, Homo sapiens
acttagactacttac

SEQ ID NO: 1343487 - DNA, 15 bp, Homo sapiens
cacttagactactta

SEQ ID NO: 1343488 - DNA, 15 bp, Homo sapiens
tcacttagactactt

SEQ ID NO: 1343489 - DNA, 15 bp, Homo sapiens
ttcacttagactact

SEQ ID NO: 1343490 - DNA, 15 bp, Homo sapiens
attcacttagactac

SEQ ID NO: 1343491 - DNA, 15 bp, Homo sapiens
tattcacttagacta

SEQ ID NO: 1343492 - DNA, 15 bp, Homo sapiens
ctattcacttagact

SEQ ID NO: 1343493 - DNA, 15 bp, Homo sapiens
gctattcacttagac

SEQ ID NO: 1343494 - DNA, 15 bp, Homo sapiens
tgctattcacttaga

SEQ ID NO: 1343495 - DNA, 15 bp, Homo sapiens
ttgctattcacttag

SEQ ID NO: 1343496 - DNA, 15 bp, Homo sapiens
tttgctattcactta

SEQ ID NO: 1343497 - DNA, 15 bp, Homo sapiens
atttgctattcactt

SEQ ID NO: 1343498 - DNA, 15 bp, Homo sapiens
tatttgctattcact

SEQ ID NO: 1343499 - DNA, 15 bp, Homo sapiens
ctatttgctattcac

SEQ ID NO: 1343500 - DNA, 15 bp, Homo sapiens
tctatttgctattca

SEQ ID NO: 1343501 - DNA, 15 bp, Homo sapiens
atctatttgctattc

SEQ ID NO: 1343502 - DNA, 15 bp, Homo sapiens
tatctatttgctatt

SEQ ID NO: 1343503 - DNA, 15 bp, Homo sapiens
atatctatttgctat

SEQ ID NO: 1343504 - DNA, 15 bp, Homo sapiens
catatctatttgcta

SEQ ID NO: 1343505 - DNA, 15 bp, Homo sapiens
ccatatctatttgct

SEQ ID NO: 1343506 - DNA, 15 bp, Homo sapiens
tccatatctatttgc

SEQ ID NO: 1343507 - DNA, 15 bp, Homo sapiens
atccatatctatttg

SEQ ID NO: 1343508 - DNA, 15 bp, Homo sapiens
aatccatatctattt

SEQ ID NO: 1343509 - DNA, 15 bp, Homo sapiens
taatccatatctatt

SEQ ID NO: 1343510 - DNA, 15 bp, Homo sapiens
ttaatccatatctat

SEQ ID NO: 1343511 - DNA, 15 bp, Homo sapiens
gttaatccatatcta

SEQ ID NO: 1343512 - DNA, 15 bp, Homo sapiens
tgttaatccatatct

SEQ ID NO: 1343513 - DNA, 15 bp, Homo sapiens
atgttaatccatatc

SEQ ID NO: 1343514 - DNA, 15 bp, Homo sapiens
aatgttaatccatat

SEQ ID NO: 1343515 - DNA, 15 bp, Homo sapiens
gaatgttaatccata

SEQ ID NO: 1343516 - DNA, 15 bp, Homo sapiens
tgaatgttaatccat

SEQ ID NO: 1343517 - DNA, 15 bp, Homo sapiens
ctgaatgttaatcca

SEQ ID NO: 1343518 - DNA, 15 bp, Homo sapiens
cctgaatgttaatcc

SEQ ID NO: 1343519 - DNA, 15 bp, Homo sapiens
tcctgaatgttaatc

SEQ ID NO: 1343520 - DNA, 15 bp, Homo sapiens
ctcctgaatgttaat

SEQ ID NO: 1343521 - DNA, 15 bp, Homo sapiens
tctcctgaatgttaa

SEQ ID NO: 1343522 - DNA, 15 bp, Homo sapiens
ctctcctgaatgtta

SEQ ID NO: 1343523 - DNA, 15 bp, Homo sapiens
tctctcctgaatgtt

SEQ ID NO: 1343524 - DNA, 15 bp, Homo sapiens
ttctctcctgaatgt

SEQ ID NO: 1343525 - DNA, 15 bp, Homo sapiens
tttctctcctgaatg

SEQ ID NO: 1343526 - DNA, 15 bp, Homo sapiens
atttctctcctgaat

SEQ ID NO: 1343527 - DNA, 15 bp, Homo sapiens
tatttctctcctgaa

SEQ ID NO: 1343528 - DNA, 15 bp, Homo sapiens
ttatttctctcctga

SEQ ID NO: 1343529 - DNA, 15 bp, Homo sapiens
ctttatttctctcct

SEQ ID NO: 1343530 - DNA, 15 bp, Homo sapiens
gctttatttctctcc

SEQ ID NO: 1343531 - DNA, 15 bp, Homo sapiens
ggctttatttctctc

SEQ ID NO: 1343532 - DNA, 15 bp, Homo sapiens
gggctttatttctct

SEQ ID NO: 1343533 - DNA, 15 bp, Homo sapiens
tgggctttatttctc

SEQ ID NO: 1343534 - DNA, 15 bp, Homo sapiens
ttgggctttatttct

SEQ ID NO: 1343535 - DNA, 15 bp, Homo sapiens
cttgggctttatttc

SEQ ID NO: 1343536 - DNA, 15 bp, Homo sapiens
ccttgggctttattt

SEQ ID NO: 1343537 - DNA, 15 bp, Homo sapiens
tccttgggctttatt

SEQ ID NO: 1343538 - DNA, 15 bp, Homo sapiens
ttccttgggctttat

SEQ ID NO: 1343539 - DNA, 15 bp, Homo sapiens
attccttgggcttta

SEQ ID NO: 1343540 - DNA, 15 bp, Homo sapiens
gattccttgggcttt

SEQ ID NO: 1343541 - DNA, 15 bp, Homo sapiens
tgattccttgggctt

SEQ ID NO: 1343542 - DNA, 15 bp, Homo sapiens
gtgattccttgggct

SEQ ID NO: 1343543 - DNA, 15 bp, Homo sapiens
ggtgattccttgggc

SEQ ID NO: 1343544 - DNA, 15 bp, Homo sapiens
aggtgattccttggg

SEQ ID NO: 1343545 - DNA, 15 bp, Homo sapiens
taggtgattccttgg

SEQ ID NO: 1343546 - DNA, 15 bp, Homo sapiens
gtaggtgattccttg

SEQ ID NO: 1343547 - DNA, 15 bp, Homo sapiens
tgtaggtgattcctt

SEQ ID NO: 1343548 - DNA, 15 bp, Homo sapiens
gtgtaggtgattcct

SEQ ID NO: 1343549 - DNA, 15 bp, Homo sapiens
tgtgtaggtgattcc

SEQ ID NO: 1343550 - DNA, 15 bp, Homo sapiens
gtgtgtaggtgattc

SEQ ID NO: 1343551 - DNA, 15 bp, Homo sapiens
tgtgtgtaggtgatt

SEQ ID NO: 1343552 - DNA, 15 bp, Homo sapiens
ttgtgtgtaggtgat

SEQ ID NO: 1343553 - DNA, 15 bp, Homo sapiens
tttgtgtgtaggtga

SEQ ID NO: 1343554 - DNA, 15 bp, Homo sapiens
ttttgtgtgtaggtg

SEQ ID NO: 1343555 - DNA, 15 bp, Homo sapiens
tttttgtgtgtaggt

SEQ ID NO: 1343556 - DNA, 15 bp, Homo sapiens
ttttttgtgtgtagg

SEQ ID NO: 1343557 - DNA, 15 bp, Homo sapiens
tttttttgtgtgtag

SEQ ID NO: 1343558 - DNA, 15 bp, Homo sapiens
atttttttgtgtgta

SEQ ID NO: 1343559 - DNA, 15 bp, Homo sapiens
catttttttgtgtgt

SEQ ID NO: 1343560 - DNA, 15 bp, Homo sapiens
tcatttttttgtgtg

SEQ ID NO: 1343561 - DNA, 15 bp, Homo sapiens
atcatttttttgtgt

SEQ ID NO: 1343562 - DNA, 15 bp, Homo sapiens
aatcatttttttgtg

SEQ ID NO: 1343563 - DNA, 15 bp, Homo sapiens
taatcatttttttgt

SEQ ID NO: 1343564 - DNA, 15 bp, Homo sapiens
ttaatcatttttttg

SEQ ID NO: 1343565 - DNA, 15 bp, Homo sapiens
tttaatcattttttt

SEQ ID NO: 1343566 - DNA, 15 bp, Homo sapiens
ctttaatcatttttt

SEQ ID NO: 1343567 - DNA, 15 bp, Homo sapiens
gctttaatcattttt

SEQ ID NO: 1343568 - DNA, 15 bp, Homo sapiens
ggctttaatcatttt

SEQ ID NO: 1343569 - DNA, 15 bp, Homo sapiens
tggctttaatcattt

SEQ ID NO: 1343570 - DNA, 15 bp, Homo sapiens
gtggctttaatcatt

SEQ ID NO: 1343571 - DNA, 15 bp, Homo sapiens
tgtggctttaatcat

SEQ ID NO: 1343572 - DNA, 15 bp, Homo sapiens
ctgtggctttaatca

SEQ ID NO: 1343573 - DNA, 15 bp, Homo sapiens
tctgtggctttaatc

SEQ ID NO: 1343574 - DNA, 15 bp, Homo sapiens
ttctgtggctttaat

SEQ ID NO: 1343575 - DNA, 15 bp, Homo sapiens
gttctgtggctttaa

SEQ ID NO: 1343576 - DNA, 15 bp, Homo sapiens
agttctgtggcttta

SEQ ID NO: 1343577 - DNA, 15 bp, Homo sapiens
gagttctgtggcttt

SEQ ID NO: 1343578 - DNA, 15 bp, Homo sapiens
tgagttctgtggctt

SEQ ID NO: 1343579 - DNA, 15 bp, Homo sapiens
ttgagttctgtggct

SEQ ID NO: 1343580 - DNA, 15 bp, Homo sapiens
tttgagttctgtggc

SEQ ID NO: 1343581 - DNA, 15 bp, Homo sapiens
atttgagttctgtgg

SEQ ID NO: 1343582 - DNA, 15 bp, Homo sapiens
gatttgagttctgtg

SEQ ID NO: 1343583 - DNA, 15 bp, Homo sapiens
ggatttgagttctgt

SEQ ID NO: 1343584 - DNA, 15 bp, Homo sapiens
aggatttgagttctg

SEQ ID NO: 1343585 - DNA, 15 bp, Homo sapiens
caggatttgagttct

SEQ ID NO: 1343586 - DNA, 15 bp, Homo sapiens
gcaggatttgagttc

SEQ ID NO: 1343587 - DNA, 15 bp, Homo sapiens
tgcaggatttgagtt

SEQ ID NO: 1343588 - DNA, 15 bp, Homo sapiens
gtgcaggatttgagt

SEQ ID NO: 1343589 - DNA, 15 bp, Homo sapiens
tgtgcaggatttgag

SEQ ID NO: 1343590 - DNA, 15 bp, Homo sapiens
ctgtgcaggatttga

SEQ ID NO: 1343591 - DNA, 15 bp, Homo sapiens
actgtgcaggatttg

SEQ ID NO: 1343592 - DNA, 15 bp, Homo sapiens
cactgtgcaggattt

SEQ ID NO: 1343593 - DNA, 15 bp, Homo sapiens
acactgtgcaggatt

SEQ ID NO: 1343594 - DNA, 15 bp, Homo sapiens
aacactgtgcaggat

SEQ ID NO: 1343595 - DNA, 15 bp, Homo sapiens
taacactgtgcagga

SEQ ID NO: 1343596 - DNA, 15 bp, Homo sapiens
ataacactgtgcagg

SEQ ID NO: 1343597 - DNA, 15 bp, Homo sapiens
aataacactgtgcag

SEQ ID NO: 1343598 - DNA, 15 bp, Homo sapiens
aaataacactgtgca

SEQ ID NO: 1343599 - DNA, 15 bp, Homo sapiens
taaataacactgtgc

SEQ ID NO: 1343600 - DNA, 15 bp, Homo sapiens
ctaaataacactgtg

SEQ ID NO: 1343601 - DNA, 15 bp, Homo sapiens
actaaataacactgt

SEQ ID NO: 1343602 - DNA, 15 bp, Homo sapiens
cactaaataacactg

SEQ ID NO: 1343603 - DNA, 15 bp, Homo sapiens
acactaaataacact

SEQ ID NO: 1343604 - DNA, 15 bp, Homo sapiens
cacactaaataacac

SEQ ID NO: 1343605 - DNA, 15 bp, Homo sapiens
ccacactaaataaca

SEQ ID NO: 1343606 - DNA, 15 bp, Homo sapiens
cccacactaaataac

SEQ ID NO: 1343607 - DNA, 15 bp, Homo sapiens
ccccacactaaataa

SEQ ID NO: 1343608 - DNA, 15 bp, Homo sapiens
gccccacactaaata

SEQ ID NO: 1343609 - DNA, 15 bp, Homo sapiens
agccccacactaaat

SEQ ID NO: 1343610 - DNA, 15 bp, Homo sapiens
tagccccacactaaa

SEQ ID NO: 1343611 - DNA, 15 bp, Homo sapiens
atagccccacactaa

SEQ ID NO: 1343612 - DNA, 15 bp, Homo sapiens
aatagccccacacta

SEQ ID NO: 1343613 - DNA, 15 bp, Homo sapiens
gaatagccccacact

SEQ ID NO: 1343614 - DNA, 15 bp, Homo sapiens
agaatagccccacac

SEQ ID NO: 1343615 - DNA, 15 bp, Homo sapiens
cagaatagccccaca

SEQ ID NO: 1343616 - DNA, 15 bp, Homo sapiens
acagaatagccccac

SEQ ID NO: 1343617 - DNA, 15 bp, Homo sapiens
cacagaatagcccca

SEQ ID NO: 1343618 - DNA, 15 bp, Homo sapiens
acacagaatagcccc

SEQ ID NO: 1343619 - DNA, 15 bp, Homo sapiens
gacacagaatagccc

SEQ ID NO: 1343620 - DNA, 15 bp, Homo sapiens
agacacagaatagcc

SEQ ID NO: 1343621 - DNA, 15 bp, Homo sapiens
cagacacagaatagc

SEQ ID NO: 1343622 - DNA, 15 bp, Homo sapiens
tcagacacagaatag

SEQ ID NO: 1343623 - DNA, 15 bp, Homo sapiens
atcagacacagaata

SEQ ID NO: 1343624 - DNA, 15 bp, Homo sapiens
catcagacacagaat

SEQ ID NO: 1343625 - DNA, 15 bp, Homo sapiens
ccatcagacacagaa

SEQ ID NO: 1343626 - DNA, 15 bp, Homo sapiens
accatcagacacaga

SEQ ID NO: 1343627 - DNA, 15 bp, Homo sapiens
caccatcagacacag

SEQ ID NO: 1343628 - DNA, 15 bp, Homo sapiens
acaccatcagacaca

SEQ ID NO: 1343629 - DNA, 15 bp, Homo sapiens
cacaccatcagacac

SEQ ID NO: 1343630 - DNA, 15 bp, Homo sapiens
gcacaccatcagaca

SEQ ID NO: 1343631 - DNA, 15 bp, Homo sapiens
agcacaccatcagac

SEQ ID NO: 1343632 - DNA, 15 bp, Homo sapiens
cagcacaccatcaga

SEQ ID NO: 1343633 - DNA, 15 bp, Homo sapiens
tcagcacaccatcag

SEQ ID NO: 1343634 - DNA, 15 bp, Homo sapiens
gtcagcacaccatca

SEQ ID NO: 1343635 - DNA, 15 bp, Homo sapiens
tgtcagcacaccatc

SEQ ID NO: 1343636 - DNA, 15 bp, Homo sapiens
atgtcagcacaccat

SEQ ID NO: 1343637 - DNA, 15 bp, Homo sapiens
aatgtcagcacacca

SEQ ID NO: 1343638 - DNA, 15 bp, Homo sapiens
gaatgtcagcacacc

SEQ ID NO: 1343639 - DNA, 15 bp, Homo sapiens
ggaatgtcagcacac

SEQ ID NO: 1343640 - DNA, 15 bp, Homo sapiens
gggaatgtcagcaca

SEQ ID NO: 1343641 - DNA, 15 bp, Homo sapiens
agggaatgtcagcac

SEQ ID NO: 1343642 - DNA, 15 bp, Homo sapiens
tagggaatgtcagca

SEQ ID NO: 1343643 - DNA, 15 bp, Homo sapiens
ctagggaatgtcagc

SEQ ID NO: 1343644 - DNA, 15 bp, Homo sapiens
tctagggaatgtcag

SEQ ID NO: 1343645 - DNA, 15 bp, Homo sapiens
ctctagggaatgtca

SEQ ID NO: 1343646 - DNA, 15 bp, Homo sapiens
cctctagggaatgtc

SEQ ID NO: 1343647 - DNA, 15 bp, Homo sapiens
ccctctagggaatgt

SEQ ID NO: 1343648 - DNA, 15 bp, Homo sapiens
cccctctagggaatg

SEQ ID NO: 1343649 - DNA, 15 bp, Homo sapiens
gcccctctagggaat

SEQ ID NO: 1343650 - DNA, 15 bp, Homo sapiens
tgcccctctagggaa

SEQ ID NO: 1343651 - DNA, 15 bp, Homo sapiens
ctgcccctctaggga

SEQ ID NO: 1343652 - DNA, 15 bp, Homo sapiens
gctgcccctctaggg

SEQ ID NO: 1343653 - DNA, 15 bp, Homo sapiens
tgctgcccctctagg

SEQ ID NO: 1343654 - DNA, 15 bp, Homo sapiens
ctgctgcccctctag

SEQ ID NO: 1343655 - DNA, 15 bp, Homo sapiens
actgctgcccctcta

SEQ ID NO: 1343656 - DNA, 15 bp, Homo sapiens
tactgctgcccctct

SEQ ID NO: 1343657 - DNA, 15 bp, Homo sapiens
atactgctgcccctc

SEQ ID NO: 1343658 - DNA, 15 bp, Homo sapiens
gatactgctgcccct

SEQ ID NO: 1343659 - DNA, 15 bp, Homo sapiens
ggatactgctgcccc

SEQ ID NO: 1343660 - DNA, 15 bp, Homo sapiens
tggatactgctgccc

SEQ ID NO: 1343661 - DNA, 15 bp, Homo sapiens
ttggatactgctgcc

SEQ ID NO: 1343662 - DNA, 15 bp, Homo sapiens
gttggatactgctgc

SEQ ID NO: 1343663 - DNA, 15 bp, Homo sapiens
agttggatactgctg

SEQ ID NO: 1343664 - DNA, 15 bp, Homo sapiens
cagttggatactgct

SEQ ID NO: 1343665 - DNA, 15 bp, Homo sapiens
gcagttggatactgc

SEQ ID NO: 1343666 - DNA, 15 bp, Homo sapiens
ggcagttggatactg

SEQ ID NO: 1343667 - DNA, 15 bp, Homo sapiens
aggcagttggatact

SEQ ID NO: 1343668 - DNA, 15 bp, Homo sapiens
caggcagttggatac

SEQ ID NO: 1343669 - DNA, 15 bp, Homo sapiens
ccaggcagttggata

SEQ ID NO: 1343670 - DNA, 15 bp, Homo sapiens
tccaggcagttggat

SEQ ID NO: 1343671 - DNA, 15 bp, Homo sapiens
gtccaggcagttgga

SEQ ID NO: 1343672 - DNA, 15 bp, Homo sapiens
agtccaggcagttgg

SEQ ID NO: 1343673 - DNA, 15 bp, Homo sapiens
aagtccaggcagttg

SEQ ID NO: 1343674 - DNA, 15 bp, Homo sapiens
caagtccaggcagtt

SEQ ID NO: 1343675 - DNA, 15 bp, Homo sapiens
ccaagtccaggcagt

SEQ ID NO: 1343676 - DNA, 15 bp, Homo sapiens
cccaagtccaggcag

SEQ ID NO: 1343677 - DNA, 15 bp, Homo sapiens
tcccaagtccaggca

SEQ ID NO: 1343678 - DNA, 15 bp, Homo sapiens
gtcccaagtccaggc

SEQ ID NO: 1343679 - DNA, 15 bp, Homo sapiens
ggtcccaagtccagg

SEQ ID NO: 1343680 - DNA, 15 bp, Homo sapiens
aggtcccaagtccag

SEQ ID NO: 1343681 - DNA, 15 bp, Homo sapiens
gaggtcccaagtcca

SEQ ID NO: 1343682 - DNA, 15 bp, Homo sapiens
tgaggtcccaagtcc

SEQ ID NO: 1343683 - DNA, 15 bp, Homo sapiens
ctgaggtcccaagtc

SEQ ID NO: 1343684 - DNA, 15 bp, Homo sapiens
tctgaggtcccaagt

SEQ ID NO: 1343685 - DNA, 15 bp, Homo sapiens
atctgaggtcccaag

SEQ ID NO: 1343686 - DNA, 15 bp, Homo sapiens
tatctgaggtcccaa

SEQ ID NO: 1343687 - DNA, 15 bp, Homo sapiens
gtatctgaggtccca

SEQ ID NO: 1343688 - DNA, 15 bp, Homo sapiens
ggtatctgaggtccc

SEQ ID NO: 1343689 - DNA, 15 bp, Homo sapiens
cggtatctgaggtcc

SEQ ID NO: 1343690 - DNA, 15 bp, Homo sapiens
gcggtatctgaggtc

SEQ ID NO: 1343691 - DNA, 15 bp, Homo sapiens
agcggtatctgaggt

SEQ ID NO: 1343692 - DNA, 15 bp, Homo sapiens
aagcggtatctgagg

SEQ ID NO: 1343693 - DNA, 15 bp, Homo sapiens
gaagcggtatctgag

SEQ ID NO: 1343694 - DNA, 15 bp, Homo sapiens
tgaagcggtatctga

SEQ ID NO: 1343695 - DNA, 15 bp, Homo sapiens
ttgaagcggtatctg

SEQ ID NO: 1343696 - DNA, 15 bp, Homo sapiens
attgaagcggtatct

SEQ ID NO: 1343697 - DNA, 15 bp, Homo sapiens
gattgaagcggtatc

SEQ ID NO: 1343698 - DNA, 15 bp, Homo sapiens
tgattgaagcggtat

SEQ ID NO: 1343699 - DNA, 15 bp, Homo sapiens
gtgattgaagcggta

SEQ ID NO: 1343700 - DNA, 15 bp, Homo sapiens
ggtgattgaagcggt

SEQ ID NO: 1343701 - DNA, 15 bp, Homo sapiens
tggtgattgaagcgg

SEQ ID NO: 1343702 - DNA, 15 bp, Homo sapiens
atggtgattgaagcg

SEQ ID NO: 1343703 - DNA, 15 bp, Homo sapiens
tatggtgattgaagc

SEQ ID NO: 1343704 - DNA, 15 bp, Homo sapiens
ctatggtgattgaag

SEQ ID NO: 1343705 - DNA, 15 bp, Homo sapiens
cctatggtgattgaa

SEQ ID NO: 1343706 - DNA, 15 bp, Homo sapiens
ccctatggtgattga

SEQ ID NO: 1343707 - DNA, 15 bp, Homo sapiens
gccctatggtgattg

SEQ ID NO: 1343708 - DNA, 15 bp, Homo sapiens
ggccctatggtgatt

SEQ ID NO: 1343709 - DNA, 15 bp, Homo sapiens
tggccctatggtgat

SEQ ID NO: 1343710 - DNA, 15 bp, Homo sapiens
gtggccctatggtga

SEQ ID NO: 1343711 - DNA, 15 bp, Homo sapiens
tgtggccctatggtg

SEQ ID NO: 1343712 - DNA, 15 bp, Homo sapiens
gtgtggccctatggt

SEQ ID NO: 1343713 - DNA, 15 bp, Homo sapiens
agtgtggccctatgg

SEQ ID NO: 1343714 - DNA, 15 bp, Homo sapiens
aagtgtggccctatg

SEQ ID NO: 1343715 - DNA, 15 bp, Homo sapiens
taagtgtggccctat

SEQ ID NO: 1343716 - DNA, 15 bp, Homo sapiens
gtaagtgtggcccta

SEQ ID NO: 1343717 - DNA, 15 bp, Homo sapiens
cgtaagtgtggccct

SEQ ID NO: 1343718 - DNA, 15 bp, Homo sapiens
acgtaagtgtggccc

SEQ ID NO: 1343719 - DNA, 15 bp, Homo sapiens
cacgtaagtgtggcc

SEQ ID NO: 1343720 - DNA, 15 bp, Homo sapiens
tcacgtaagtgtggc

SEQ ID NO: 1343721 - DNA, 15 bp, Homo sapiens
atcacgtaagtgtgg

SEQ ID NO: 1343722 - DNA, 15 bp, Homo sapiens
aatcacgtaagtgtg

SEQ ID NO: 1343723 - DNA, 15 bp, Homo sapiens
aaatcacgtaagtgt

SEQ ID NO: 1343724 - DNA, 15 bp, Homo sapiens
taaatcacgtaagtg

SEQ ID NO: 1343725 - DNA, 15 bp, Homo sapiens
ataaatcacgtaagt

SEQ ID NO: 1343726 - DNA, 15 bp, Homo sapiens
tataaatcacgtaag

SEQ ID NO: 1343727 - DNA, 15 bp, Homo sapiens
atataaatcacgtaa

SEQ ID NO: 1343728 - DNA, 15 bp, Homo sapiens
aatataaatcacgta

SEQ ID NO: 1343729 - DNA, 15 bp, Homo sapiens
caatataaatcacgt

SEQ ID NO: 1343730 - DNA, 15 bp, Homo sapiens
tcaatataaatcacg

SEQ ID NO: 1343731 - DNA, 15 bp, Homo sapiens
ttcaatataaatcac

SEQ ID NO: 1343732 - DNA, 15 bp, Homo sapiens
attcaatataaatca

SEQ ID NO: 1343733 - DNA, 15 bp, Homo sapiens
gattcaatataaatc

SEQ ID NO: 1343734 - DNA, 15 bp, Homo sapiens
agattcaatataaat

SEQ ID NO: 1343735 - DNA, 15 bp, Homo sapiens
gagattcaatataaa

SEQ ID NO: 1343736 - DNA, 15 bp, Homo sapiens
tgagattcaatataa

SEQ ID NO: 1343737 - DNA, 15 bp, Homo sapiens
ctgagattcaatata

SEQ ID NO: 1343738 - DNA, 15 bp, Homo sapiens
actgagattcaatat

SEQ ID NO: 1343739 - DNA, 15 bp, Homo sapiens
cactgagattcaata

SEQ ID NO: 1343740 - DNA, 15 bp, Homo sapiens
acactgagattcaat

SEQ ID NO: 1343741 - DNA, 15 bp, Homo sapiens
gacactgagattcaa

SEQ ID NO: 1343742 - DNA, 15 bp, Homo sapiens
tgacactgagattca

SEQ ID NO: 1343743 - DNA, 15 bp, Homo sapiens
ctgacactgagattc

SEQ ID NO: 1343744 - DNA, 15 bp, Homo sapiens
tctgacactgagatt

SEQ ID NO: 1343745 - DNA, 15 bp, Homo sapiens
ctctgacactgagat

SEQ ID NO: 1343746 - DNA, 15 bp, Homo sapiens
actctgacactgaga

SEQ ID NO: 1343747 - DNA, 15 bp, Homo sapiens
aactctgacactgag

SEQ ID NO: 1343748 - DNA, 15 bp, Homo sapiens
aaactctgacactga

SEQ ID NO: 1343749 - DNA, 15 bp, Homo sapiens
caaactctgacactg

SEQ ID NO: 1343750 - DNA, 15 bp, Homo sapiens
acaaactctgacact

SEQ ID NO: 1343751 - DNA, 15 bp, Homo sapiens
aacaaactctgacac

SEQ ID NO: 1343752 - DNA, 15 bp, Homo sapiens
aaacaaactctgaca

SEQ ID NO: 1343753 - DNA, 15 bp, Homo sapiens
caaacaaactctgac

SEQ ID NO: 1343754 - DNA, 15 bp, Homo sapiens
tcaaacaaactctga

SEQ ID NO: 1343755 - DNA, 15 bp, Homo sapiens
atcaaacaaactctg

SEQ ID NO: 1343756 - DNA, 15 bp, Homo sapiens
aatcaaacaaactct

SEQ ID NO: 1343757 - DNA, 15 bp, Homo sapiens
taatcaaacaaactc

SEQ ID NO: 1343758 - DNA, 15 bp, Homo sapiens
ttaatcaaacaaact

SEQ ID NO: 1343759 - DNA, 15 bp, Homo sapiens
gttaatcaaacaaac

SEQ ID NO: 1343760 - DNA, 15 bp, Homo sapiens
tgttaatcaaacaaa

SEQ ID NO: 1343761 - DNA, 15 bp, Homo sapiens
ttgttaatcaaacaa

SEQ ID NO: 1343762 - DNA, 15 bp, Homo sapiens
tttgttaatcaaaca

SEQ ID NO: 1343763 - DNA, 15 bp, Homo sapiens
ttttgttaatcaaac

SEQ ID NO: 1343764 - DNA, 15 bp, Homo sapiens
attttgttaatcaaa

SEQ ID NO: 1343765 - DNA, 15 bp, Homo sapiens
aattttgttaatcaa

SEQ ID NO: 1343766 - DNA, 15 bp, Homo sapiens
taattttgttaatca

SEQ ID NO: 1343767 - DNA, 15 bp, Homo sapiens
ctaattttgttaatc

SEQ ID NO: 1343768 - DNA, 15 bp, Homo sapiens
gctaattttgttaat

SEQ ID NO: 1343769 - DNA, 15 bp, Homo sapiens
agctaattttgttaa

SEQ ID NO: 1343770 - DNA, 15 bp, Homo sapiens
tagctaattttgtta

SEQ ID NO: 1343771 - DNA, 15 bp, Homo sapiens
ttagctaattttgtt

SEQ ID NO: 1343772 - DNA, 15 bp, Homo sapiens
tttagctaattttgt

SEQ ID NO: 1343773 - DNA, 15 bp, Homo sapiens
ttttagctaattttg

SEQ ID NO: 1343774 - DNA, 15 bp, Homo sapiens
cttttagctaatttt

SEQ ID NO: 1343775 - DNA, 15 bp, Homo sapiens
tcttttagctaattt

SEQ ID NO: 1343776 - DNA, 15 bp, Homo sapiens
ttcttttagctaatt

SEQ ID NO: 1343777 - DNA, 15 bp, Homo sapiens
tttcttttagctaat

SEQ ID NO: 1343778 - DNA, 15 bp, Homo sapiens
atttcttttagctaa

SEQ ID NO: 1343779 - DNA, 15 bp, Homo sapiens
catttcttttagcta

SEQ ID NO: 1343780 - DNA, 15 bp, Homo sapiens
acatttcttttagct

SEQ ID NO: 1343781 - DNA, 15 bp, Homo sapiens
aacatttcttttagc

SEQ ID NO: 1343782 - DNA, 15 bp, Homo sapiens
aaacatttcttttag

SEQ ID NO: 1343783 - DNA, 15 bp, Homo sapiens
caaacatttctttta

SEQ ID NO: 1343784 - DNA, 15 bp, Homo sapiens
tcaaacatttctttt

SEQ ID NO: 1343785 - DNA, 15 bp, Homo sapiens
ttcaaacatttcttt

SEQ ID NO: 1343786 - DNA, 15 bp, Homo sapiens
cttcaaacatttctt

SEQ ID NO: 1343787 - DNA, 15 bp, Homo sapiens
gcttcaaacatttct

SEQ ID NO: 1343788 - DNA, 15 bp, Homo sapiens
tgcttcaaacatttc

SEQ ID NO: 1343789 - DNA, 15 bp, Homo sapiens
atgcttcaaacattt

SEQ ID NO: 1343790 - DNA, 15 bp, Homo sapiens
aatgcttcaaacatt

SEQ ID NO: 1343791 - DNA, 15 bp, Homo sapiens
taatgcttcaaacat

SEQ ID NO: 1343792 - DNA, 15 bp, Homo sapiens
ttaatgcttcaaaca

SEQ ID NO: 1343793 - DNA, 15 bp, Homo sapiens
attaatgcttcaaac

SEQ ID NO: 1343794 - DNA, 15 bp, Homo sapiens
aattaatgcttcaaa

SEQ ID NO: 1343795 - DNA, 15 bp, Homo sapiens
aaattaatgcttcaa

SEQ ID NO: 1343796 - DNA, 15 bp, Homo sapiens
taaattaatgcttca

SEQ ID NO: 1343797 - DNA, 15 bp, Homo sapiens
ctaaattaatgcttc

SEQ ID NO: 1343798 - DNA, 15 bp, Homo sapiens
actaaattaatgctt

SEQ ID NO: 1343799 - DNA, 15 bp, Homo sapiens
tactaaattaatgct

SEQ ID NO: 1343800 - DNA, 15 bp, Homo sapiens
ctactaaattaatgc

SEQ ID NO: 1343801 - DNA, 15 bp, Homo sapiens
cctactaaattaatg

SEQ ID NO: 1343802 - DNA, 15 bp, Homo sapiens
acctactaaattaat

SEQ ID NO: 1343803 - DNA, 15 bp, Homo sapiens
tacctactaaattaa

SEQ ID NO: 1343804 - DNA, 15 bp, Homo sapiens
atacctactaaatta

SEQ ID NO: 1343805 - DNA, 15 bp, Homo sapiens
aatacctactaaatt

SEQ ID NO: 1343806 - DNA, 15 bp, Homo sapiens
gaatacctactaaat

SEQ ID NO: 1343807 - DNA, 15 bp, Homo sapiens
agaatacctactaaa

SEQ ID NO: 1343808 - DNA, 15 bp, Homo sapiens
gagaatacctactaa

SEQ ID NO: 1343809 - DNA, 15 bp, Homo sapiens
agagaatacctacta

SEQ ID NO: 1343810 - DNA, 15 bp, Homo sapiens
gagagaatacctact

SEQ ID NO: 1343811 - DNA, 15 bp, Homo sapiens
agagagaatacctac

SEQ ID NO: 1343812 - DNA, 15 bp, Homo sapiens
gagagagaataccta

SEQ ID NO: 1343813 - DNA, 15 bp, Homo sapiens
ggagagagaatacct

SEQ ID NO: 1343814 - DNA, 15 bp, Homo sapiens
gggagagagaatacc

SEQ ID NO: 1343815 - DNA, 15 bp, Homo sapiens
agggagagagaatac

SEQ ID NO: 1343816 - DNA, 15 bp, Homo sapiens
tagggagagagaata

SEQ ID NO: 1343817 - DNA, 15 bp, Homo sapiens
atagggagagagaat

SEQ ID NO: 1343818 - DNA, 15 bp, Homo sapiens
aatagggagagagaa

SEQ ID NO: 1343819 - DNA, 15 bp, Homo sapiens
gaatagggagagaga

SEQ ID NO: 1343820 - DNA, 15 bp, Homo sapiens
agaatagggagagag

SEQ ID NO: 1343821 - DNA, 15 bp, Homo sapiens
tagaatagggagaga

SEQ ID NO: 1343822 - DNA, 15 bp, Homo sapiens
gtagaatagggagag

SEQ ID NO: 1343823 - DNA, 15 bp, Homo sapiens
agtagaatagggaga

SEQ ID NO: 1343824 - DNA, 15 bp, Homo sapiens
tagtagaatagggag

SEQ ID NO: 1343825 - DNA, 15 bp, Homo sapiens
gtagtagaataggga

SEQ ID NO: 1343826 - DNA, 15 bp, Homo sapiens
ggtagtagaataggg

SEQ ID NO: 1343827 - DNA, 15 bp, Homo sapiens
tggtagtagaatagg

SEQ ID NO: 1343828 - DNA, 15 bp, Homo sapiens
ttggtagtagaatag

SEQ ID NO: 1343829 - DNA, 15 bp, Homo sapiens
tttggtagtagaata

SEQ ID NO: 1343830 - DNA, 15 bp, Homo sapiens
ctttggtagtagaat

SEQ ID NO: 1343831 - DNA, 15 bp, Homo sapiens
gctttggtagtagaa

SEQ ID NO: 1343832 - DNA, 15 bp, Homo sapiens
ggctttggtagtaga

SEQ ID NO: 1343833 - DNA, 15 bp, Homo sapiens
aggctttggtagtag

SEQ ID NO: 1343834 - DNA, 15 bp, Homo sapiens
gaggctttggtagta

SEQ ID NO: 1343835 - DNA, 15 bp, Homo sapiens
agaggctttggtagt

SEQ ID NO: 1343836 - DNA, 15 bp, Homo sapiens
cagaggctttggtag

SEQ ID NO: 1343837 - DNA, 15 bp, Homo sapiens
acagaggctttggta

SEQ ID NO: 1343838 - DNA, 15 bp, Homo sapiens
aacagaggctttggt

SEQ ID NO: 1343839 - DNA, 15 bp, Homo sapiens
taacagaggctttgg

SEQ ID NO: 1343840 - DNA, 15 bp, Homo sapiens
ataacagaggctttg

SEQ ID NO: 1343841 - DNA, 15 bp, Homo sapiens
tataacagaggcttt

SEQ ID NO: 1343842 - DNA, 15 bp, Homo sapiens
ctataacagaggctt

SEQ ID NO: 1343843 - DNA, 15 bp, Homo sapiens
actataacagaggct

SEQ ID NO: 1343844 - DNA, 15 bp, Homo sapiens
cactataacagaggc

SEQ ID NO: 1343845 - DNA, 15 bp, Homo sapiens
acactataacagagg

SEQ ID NO: 1343846 - DNA, 15 bp, Homo sapiens
gacactataacagag

SEQ ID NO: 1343847 - DNA, 15 bp, Homo sapiens
agacactataacaga

SEQ ID NO: 1343848 - DNA, 15 bp, Homo sapiens
gagacactataacag

SEQ ID NO: 1343849 - DNA, 15 bp, Homo sapiens
agagacactataaca

SEQ ID NO: 1343850 - DNA, 15 bp, Homo sapiens
tagagacactataac

SEQ ID NO: 1343851 - DNA, 15 bp, Homo sapiens
gtagagacactataa

SEQ ID NO: 1343852 - DNA, 15 bp, Homo sapiens
ggtagagacactata

SEQ ID NO: 1343853 - DNA, 15 bp, Homo sapiens
gggtagagacactat

SEQ ID NO: 1343854 - DNA, 15 bp, Homo sapiens
tgggtagagacacta

SEQ ID NO: 1343855 - DNA, 15 bp, Homo sapiens
gtgggtagagacact

SEQ ID NO: 1343856 - DNA, 15 bp, Homo sapiens
tgtgggtagagacac

SEQ ID NO: 1343857 - DNA, 15 bp, Homo sapiens
gtgtgggtagagaca

SEQ ID NO: 1343858 - DNA, 15 bp, Homo sapiens
ggtgtgggtagagac

SEQ ID NO: 1343859 - DNA, 15 bp, Homo sapiens
gggtgtgggtagaga

SEQ ID NO: 1343860 - DNA, 15 bp, Homo sapiens
tgggtgtgggtagag

SEQ ID NO: 1343861 - DNA, 15 bp, Homo sapiens
ctgggtgtgggtaga

SEQ ID NO: 1343862 - DNA, 15 bp, Homo sapiens
tctgggtgtgggtag

SEQ ID NO: 1343863 - DNA, 15 bp, Homo sapiens
atctgggtgtgggta

SEQ ID NO: 1343864 - DNA, 15 bp, Homo sapiens
tatctgggtgtgggt

SEQ ID NO: 1343865 - DNA, 15 bp, Homo sapiens
atatctgggtgtggg

SEQ ID NO: 1343866 - DNA, 15 bp, Homo sapiens
tatatctgggtgtgg

SEQ ID NO: 1343867 - DNA, 15 bp, Homo sapiens
gtatatctgggtgtg

SEQ ID NO: 1343868 - DNA, 15 bp, Homo sapiens
cgtatatctgggtgt

SEQ ID NO: 1343869 - DNA, 15 bp, Homo sapiens
ccgtatatctgggtg

SEQ ID NO: 1343870 - DNA, 15 bp, Homo sapiens
gccgtatatctgggt

SEQ ID NO: 1343871 - DNA, 15 bp, Homo sapiens
tgccgtatatctggg

SEQ ID NO: 1343872 - DNA, 15 bp, Homo sapiens
ctgccgtatatctgg

SEQ ID NO: 1343873 - DNA, 15 bp, Homo sapiens
cctgccgtatatctg

SEQ ID NO: 1343874 - DNA, 15 bp, Homo sapiens
ccctgccgtatatct

SEQ ID NO: 1343875 - DNA, 15 bp, Homo sapiens
tccctgccgtatatc

SEQ ID NO: 1343876 - DNA, 15 bp, Homo sapiens
ctccctgccgtatat

SEQ ID NO: 1343877 - DNA, 15 bp, Homo sapiens
tctccctgccgtata

SEQ ID NO: 1343878 - DNA, 15 bp, Homo sapiens
ttctccctgccgtat

SEQ ID NO: 1343879 - DNA, 15 bp, Homo sapiens
tttctccctgccgta

SEQ ID NO: 1343880 - DNA, 15 bp, Homo sapiens
atttctccctgccgt

SEQ ID NO: 1343881 - DNA, 15 bp, Homo sapiens
gatttctccctgccg

SEQ ID NO: 1343882 - DNA, 15 bp, Homo sapiens
tgatttctccctgcc

SEQ ID NO: 1343883 - DNA, 15 bp, Homo sapiens
atgatttctccctgc

SEQ ID NO: 1343884 - DNA, 15 bp, Homo sapiens
gatgatttctccctg

SEQ ID NO: 1343885 - DNA, 15 bp, Homo sapiens
tgatgatttctccct

SEQ ID NO: 1343886 - DNA, 15 bp, Homo sapiens
ttgatgatttctccc

SEQ ID NO: 1343887 - DNA, 15 bp, Homo sapiens
gttgatgatttctcc

SEQ ID NO: 1343888 - DNA, 15 bp, Homo sapiens
agttgatgatttctc

SEQ ID NO: 1343889 - DNA, 15 bp, Homo sapiens
aagttgatgatttct

SEQ ID NO: 1343890 - DNA, 15 bp, Homo sapiens
caagttgatgatttc

SEQ ID NO: 1343891 - DNA, 15 bp, Homo sapiens
tcaagttgatgattt

SEQ ID NO: 1343892 - DNA, 15 bp, Homo sapiens
ttcaagttgatgatt

SEQ ID NO: 1343893 - DNA, 15 bp, Homo sapiens
attcaagttgatgat

SEQ ID NO: 1343894 - DNA, 15 bp, Homo sapiens
aattcaagttgatga

SEQ ID NO: 1343895 - DNA, 15 bp, Homo sapiens
aaattcaagttgatg

SEQ ID NO: 1343896 - DNA, 15 bp, Homo sapiens
aaaattcaagttgat

SEQ ID NO: 1343897 - DNA, 15 bp, Homo sapiens
taaaattcaagttga

SEQ ID NO: 1343898 - DNA, 15 bp, Homo sapiens
ctaaaattcaagttg

SEQ ID NO: 1343899 - DNA, 15 bp, Homo sapiens
actaaaattcaagtt

SEQ ID NO: 1343900 - DNA, 15 bp, Homo sapiens
aactaaaattcaagt

SEQ ID NO: 1343901 - DNA, 15 bp, Homo sapiens
gaactaaaattcaag

SEQ ID NO: 1343902 - DNA, 15 bp, Homo sapiens
agaactaaaattcaa

SEQ ID NO: 1343903 - DNA, 15 bp, Homo sapiens
cagaactaaaattca

SEQ ID NO: 1343904 - DNA, 15 bp, Homo sapiens
tcagaactaaaattc

SEQ ID NO: 1343905 - DNA, 15 bp, Homo sapiens
gtcagaactaaaatt

SEQ ID NO: 1343906 - DNA, 15 bp, Homo sapiens
tgtcagaactaaaat

SEQ ID NO: 1343907 - DNA, 15 bp, Homo sapiens
ctgtcagaactaaaa

SEQ ID NO: 1343908 - DNA, 15 bp, Homo sapiens
actgtcagaactaaa

SEQ ID NO: 1343909 - DNA, 15 bp, Homo sapiens
cactgtcagaactaa

SEQ ID NO: 1343910 - DNA, 15 bp, Homo sapiens
tcactgtcagaacta

SEQ ID NO: 1343911 - DNA, 15 bp, Homo sapiens
ttcactgtcagaact

SEQ ID NO: 1343912 - DNA, 15 bp, Homo sapiens
gttcactgtcagaac

SEQ ID NO: 1343913 - DNA, 15 bp, Homo sapiens
tgttcactgtcagaa

SEQ ID NO: 1343914 - DNA, 15 bp, Homo sapiens
ttgttcactgtcaga

SEQ ID NO: 1343915 - DNA, 15 bp, Homo sapiens
cttgttcactgtcag

SEQ ID NO: 1343916 - DNA, 15 bp, Homo sapiens
gcttgttcactgtca

SEQ ID NO: 1343917 - DNA, 15 bp, Homo sapiens
ggcttgttcactgtc

SEQ ID NO: 1343918 - DNA, 15 bp, Homo sapiens
tggcttgttcactgt

SEQ ID NO: 1343919 - DNA, 15 bp, Homo sapiens
ctggcttgttcactg

SEQ ID NO: 1343920 - DNA, 15 bp, Homo sapiens
cctggcttgttcact

SEQ ID NO: 1343921 - DNA, 15 bp, Homo sapiens
tcctggcttgttcac

SEQ ID NO: 1343922 - DNA, 15 bp, Homo sapiens
ttcctggcttgttca

SEQ ID NO: 1343923 - DNA, 15 bp, Homo sapiens
gttcctggcttgttc

SEQ ID NO: 1343924 - DNA, 15 bp, Homo sapiens
agttcctggcttgtt

SEQ ID NO: 1343925 - DNA, 15 bp, Homo sapiens
gagttcctggcttgt

SEQ ID NO: 1343926 - DNA, 15 bp, Homo sapiens
agagttcctggcttg

SEQ ID NO: 1343927 - DNA, 15 bp, Homo sapiens
aagagttcctggctt

SEQ ID NO: 1343928 - DNA, 15 bp, Homo sapiens
taagagttcctggct

SEQ ID NO: 1343929 - DNA, 15 bp, Homo sapiens
ttaagagttcctggc

SEQ ID NO: 1343930 - DNA, 15 bp, Homo sapiens
gttaagagttcctgg

SEQ ID NO: 1343931 - DNA, 15 bp, Homo sapiens
agttaagagttcctg

SEQ ID NO: 1343932 - DNA, 15 bp, Homo sapiens
tagttaagagttcct

SEQ ID NO: 1343933 - DNA, 15 bp, Homo sapiens
ttagttaagagttcc

SEQ ID NO: 1343934 - DNA, 15 bp, Homo sapiens
tttagttaagagttc

SEQ ID NO: 1343935 - DNA, 15 bp, Homo sapiens
atttagttaagagtt

SEQ ID NO: 1343936 - DNA, 15 bp, Homo sapiens
tatttagttaagagt

SEQ ID NO: 1343937 - DNA, 15 bp, Homo sapiens
ttatttagttaagag

SEQ ID NO: 1343938 - DNA, 15 bp, Homo sapiens
attatttagttaaga

SEQ ID NO: 1343939 - DNA, 15 bp, Homo sapiens
tattatttagttaag

SEQ ID NO: 1343940 - DNA, 15 bp, Homo sapiens
atattatttagttaa

SEQ ID NO: 1343941 - DNA, 15 bp, Homo sapiens
aatattatttagtta

SEQ ID NO: 1343942 - DNA, 15 bp, Homo sapiens
gaatattatttagtt

SEQ ID NO: 1343943 - DNA, 15 bp, Homo sapiens
tgaatattatttagt

SEQ ID NO: 1343944 - DNA, 15 bp, Homo sapiens
ctgaatattatttag

SEQ ID NO: 1343945 - DNA, 15 bp, Homo sapiens
actgaatattattta

SEQ ID NO: 1343946 - DNA, 15 bp, Homo sapiens
aactgaatattattt

SEQ ID NO: 1343947 - DNA, 15 bp, Homo sapiens
caactgaatattatt

SEQ ID NO: 1343948 - DNA, 15 bp, Homo sapiens
tcaactgaatattat

SEQ ID NO: 1343949 - DNA, 15 bp, Homo sapiens
gtcaactgaatatta

SEQ ID NO: 1343950 - DNA, 15 bp, Homo sapiens
agtcaactgaatatt

SEQ ID NO: 1343951 - DNA, 15 bp, Homo sapiens
gagtcaactgaatat

SEQ ID NO: 1343952 - DNA, 15 bp, Homo sapiens
tgagtcaactgaata

SEQ ID NO: 1343953 - DNA, 15 bp, Homo sapiens
atgagtcaactgaat

SEQ ID NO: 1343954 - DNA, 15 bp, Homo sapiens
catgagtcaactgaa

SEQ ID NO: 1343955 - DNA, 15 bp, Homo sapiens
acatgagtcaactga

SEQ ID NO: 1343956 - DNA, 15 bp, Homo sapiens
cacatgagtcaactg

SEQ ID NO: 1343957 - DNA, 15 bp, Homo sapiens
acacatgagtcaact

SEQ ID NO: 1343958 - DNA, 15 bp, Homo sapiens
cacacatgagtcaac

SEQ ID NO: 1343959 - DNA, 15 bp, Homo sapiens
tcacacatgagtcaa

SEQ ID NO: 1343960 - DNA, 15 bp, Homo sapiens
atcacacatgagtca

SEQ ID NO: 1343961 - DNA, 15 bp, Homo sapiens
aatcacacatgagtc

SEQ ID NO: 1343962 - DNA, 15 bp, Homo sapiens
aaatcacacatgagt

SEQ ID NO: 1343963 - DNA, 15 bp, Homo sapiens
taaatcacacatgag

SEQ ID NO: 1343964 - DNA, 15 bp, Homo sapiens
ctaaatcacacatga

SEQ ID NO: 1343965 - DNA, 15 bp, Homo sapiens
tctaaatcacacatg

SEQ ID NO: 1343966 - DNA, 15 bp, Homo sapiens
ttctaaatcacacat

SEQ ID NO: 1343967 - DNA, 15 bp, Homo sapiens
tttctaaatcacaca

SEQ ID NO: 1343968 - DNA, 15 bp, Homo sapiens
ttttctaaatcacac

SEQ ID NO: 1343969 - DNA, 15 bp, Homo sapiens
attttctaaatcaca

SEQ ID NO: 1343970 - DNA, 15 bp, Homo sapiens
tattttctaaatcac

SEQ ID NO: 1343971 - DNA, 15 bp, Homo sapiens
atattttctaaatca

SEQ ID NO: 1343972 - DNA, 15 bp, Homo sapiens
aatattttctaaatc

SEQ ID NO: 1343973 - DNA, 15 bp, Homo sapiens
aaatattttctaaat

SEQ ID NO: 1343974 - DNA, 15 bp, Homo sapiens
aaaatattttctaaa

SEQ ID NO: 1343975 - DNA, 15 bp, Homo sapiens
caaaatattttctaa

SEQ ID NO: 1343976 - DNA, 15 bp, Homo sapiens
tcaaaatattttcta

SEQ ID NO: 1343977 - DNA, 15 bp, Homo sapiens
atcaaaatattttct

SEQ ID NO: 1343978 - DNA, 15 bp, Homo sapiens
tatcaaaatattttc

SEQ ID NO: 1343979 - DNA, 15 bp, Homo sapiens
atatcaaaatatttt

SEQ ID NO: 1343980 - DNA, 15 bp, Homo sapiens
aatatcaaaatattt

SEQ ID NO: 1343981 - DNA, 15 bp, Homo sapiens
gaatatcaaaatatt

SEQ ID NO: 1343982 - DNA, 15 bp, Homo sapiens
agaatatcaaaatat

SEQ ID NO: 1343983 - DNA, 15 bp, Homo sapiens
tagaatatcaaaata

SEQ ID NO: 1343984 - DNA, 15 bp, Homo sapiens
ctagaatatcaaaat

SEQ ID NO: 1343985 - DNA, 15 bp, Homo sapiens
actagaatatcaaaa

SEQ ID NO: 1343986 - DNA, 15 bp, Homo sapiens
gactagaatatcaaa

SEQ ID NO: 1343987 - DNA, 15 bp, Homo sapiens
agactagaatatcaa

SEQ ID NO: 1343988 - DNA, 15 bp, Homo sapiens
cagactagaatatca

SEQ ID NO: 1343989 - DNA, 15 bp, Homo sapiens
ccagactagaatatc

SEQ ID NO: 1343990 - DNA, 15 bp, Homo sapiens
accagactagaatat

SEQ ID NO: 1343991 - DNA, 15 bp, Homo sapiens
aaccagactagaata

SEQ ID NO: 1343992 - DNA, 15 bp, Homo sapiens
gaaccagactagaat

SEQ ID NO: 1343993 - DNA, 15 bp, Homo sapiens
ggaaccagactagaa

SEQ ID NO: 1343994 - DNA, 15 bp, Homo sapiens
tggaaccagactaga

SEQ ID NO: 1343995 - DNA, 15 bp, Homo sapiens
ctggaaccagactag

SEQ ID NO: 1343996 - DNA, 15 bp, Homo sapiens
actggaaccagacta

SEQ ID NO: 1343997 - DNA, 15 bp, Homo sapiens
aactggaaccagact

SEQ ID NO: 1343998 - DNA, 15 bp, Homo sapiens
gaactggaaccagac

SEQ ID NO: 1343999 - DNA, 15 bp, Homo sapiens
tgaactggaaccaga

SEQ ID NO: 1344000 - DNA, 15 bp, Homo sapiens
ctgaactggaaccag

SEQ ID NO: 1344001 - DNA, 15 bp, Homo sapiens
actgaactggaacca

SEQ ID NO: 1344002 - DNA, 15 bp, Homo sapiens
cactgaactggaacc

SEQ ID NO: 1344003 - DNA, 15 bp, Homo sapiens
tcactgaactggaac

SEQ ID NO: 1344004 - DNA, 15 bp, Homo sapiens
ttcactgaactggaa

SEQ ID NO: 1344005 - DNA, 15 bp, Homo sapiens
attcactgaactgga

SEQ ID NO: 1344006 - DNA, 15 bp, Homo sapiens
gattcactgaactgg

SEQ ID NO: 1344007 - DNA, 15 bp, Homo sapiens
tgattcactgaactg

SEQ ID NO: 1344008 - DNA, 15 bp, Homo sapiens
ctgattcactgaact

SEQ ID NO: 1344009 - DNA, 15 bp, Homo sapiens
actgattcactgaac

SEQ ID NO: 1344010 - DNA, 15 bp, Homo sapiens
cactgattcactgaa

SEQ ID NO: 1344011 - DNA, 15 bp, Homo sapiens
tcactgattcactga

SEQ ID NO: 1344012 - DNA, 15 bp, Homo sapiens
gtcactgattcactg

SEQ ID NO: 1344013 - DNA, 15 bp, Homo sapiens
tgtcactgattcact

SEQ ID NO: 1344014 - DNA, 15 bp, Homo sapiens
ctgtcactgattcac

SEQ ID NO: 1344015 - DNA, 15 bp, Homo sapiens
cctgtcactgattca

SEQ ID NO: 1344016 - DNA, 15 bp, Homo sapiens
acctgtcactgattc

SEQ ID NO: 1344017 - DNA, 15 bp, Homo sapiens
aacctgtcactgatt

SEQ ID NO: 1344018 - DNA, 15 bp, Homo sapiens
gaacctgtcactgat

SEQ ID NO: 1344019 - DNA, 15 bp, Homo sapiens
tgaacctgtcactga

SEQ ID NO: 1344020 - DNA, 15 bp, Homo sapiens
ttgaacctgtcactg

SEQ ID NO: 1344021 - DNA, 15 bp, Homo sapiens
tttgaacctgtcact

SEQ ID NO: 1344022 - DNA, 15 bp, Homo sapiens
ctttgaacctgtcac

SEQ ID NO: 1344023 - DNA, 15 bp, Homo sapiens
actttgaacctgtca

SEQ ID NO: 1344024 - DNA, 15 bp, Homo sapiens
cactttgaacctgtc

SEQ ID NO: 1344025 - DNA, 15 bp, Homo sapiens
ccactttgaacctgt

SEQ ID NO: 1344026 - DNA, 15 bp, Homo sapiens
accactttgaacctg

SEQ ID NO: 1344027 - DNA, 15 bp, Homo sapiens
aaccactttgaacct

SEQ ID NO: 1344028 - DNA, 15 bp, Homo sapiens
gaaccactttgaacc

SEQ ID NO: 1344029 - DNA, 15 bp, Homo sapiens
tgaaccactttgaac

SEQ ID NO: 1344030 - DNA, 15 bp, Homo sapiens
gtgaaccactttgaa

SEQ ID NO: 1344031 - DNA, 15 bp, Homo sapiens
agtgaaccactttga

SEQ ID NO: 1344032 - DNA, 15 bp, Homo sapiens
cagtgaaccactttg

SEQ ID NO: 1344033 - DNA, 15 bp, Homo sapiens
gcagtgaaccacttt

SEQ ID NO: 1344034 - DNA, 15 bp, Homo sapiens
tgcagtgaaccactt

SEQ ID NO: 1344035 - DNA, 15 bp, Homo sapiens
ctgcagtgaaccact

SEQ ID NO: 1344036 - DNA, 15 bp, Homo sapiens
actgcagtgaaccac

SEQ ID NO: 1344037 - DNA, 15 bp, Homo sapiens
aactgcagtgaacca

SEQ ID NO: 1344038 - DNA, 15 bp, Homo sapiens
aaactgcagtgaacc

SEQ ID NO: 1344039 - DNA, 15 bp, Homo sapiens
taaactgcagtgaac

SEQ ID NO: 1344040 - DNA, 15 bp, Homo sapiens
ttaaactgcagtgaa

SEQ ID NO: 1344041 - DNA, 15 bp, Homo sapiens
tttaaactgcagtga

SEQ ID NO: 1344042 - DNA, 15 bp, Homo sapiens
atttaaactgcagtg

SEQ ID NO: 1344043 - DNA, 15 bp, Homo sapiens
tatttaaactgcagt

SEQ ID NO: 1344044 - DNA, 15 bp, Homo sapiens
ttatttaaactgcag

SEQ ID NO: 1344045 - DNA, 15 bp, Homo sapiens
attatttaaactgca

SEQ ID NO: 1344046 - DNA, 15 bp, Homo sapiens
tattatttaaactgc

SEQ ID NO: 1344047 - DNA, 15 bp, Homo sapiens
ttattatttaaactg

SEQ ID NO: 1344048 - DNA, 15 bp, Homo sapiens
tttattatttaaact

SEQ ID NO: 1344049 - DNA, 15 bp, Homo sapiens
ttttattatttaaac

SEQ ID NO: 1344050 - DNA, 15 bp, Homo sapiens
attttattatttaaa

SEQ ID NO: 1344051 - DNA, 15 bp, Homo sapiens
tattttattatttaa

SEQ ID NO: 1344052 - DNA, 15 bp, Homo sapiens
ttattttattattta

SEQ ID NO: 1344053 - DNA, 15 bp, Homo sapiens
attttattttattat

SEQ ID NO: 1344054 - DNA, 15 bp, Homo sapiens
tattttattttatta

SEQ ID NO: 1344055 - DNA, 15 bp, Homo sapiens
tattttattttattt

SEQ ID NO: 1344056 - DNA, 15 bp, Homo sapiens
cttattttattttat

SEQ ID NO: 1344057 - DNA, 15 bp, Homo sapiens
gcttattttatttta

SEQ ID NO: 1344058 - DNA, 15 bp, Homo sapiens
agcttattttatttt

SEQ ID NO: 1344059 - DNA, 15 bp, Homo sapiens
aagcttattttattt

SEQ ID NO: 1344060 - DNA, 15 bp, Homo sapiens
aaagcttattttatt

SEQ ID NO: 1344061 - DNA, 15 bp, Homo sapiens
caaagcttattttat

SEQ ID NO: 1344062 - DNA, 15 bp, Homo sapiens
acaaagcttatttta

SEQ ID NO: 1344063 - DNA, 15 bp, Homo sapiens
aacaaagcttatttt

SEQ ID NO: 1344064 - DNA, 15 bp, Homo sapiens
aaacaaagcttattt

SEQ ID NO: 1344065 - DNA, 15 bp, Homo sapiens
aaaacaaagcttatt

SEQ ID NO: 1344066 - DNA, 15 bp, Homo sapiens
taaaacaaagcttat

SEQ ID NO: 1344067 - DNA, 15 bp, Homo sapiens
ataaaacaaagctta

SEQ ID NO: 1344068 - DNA, 15 bp, Homo sapiens
aataaaacaaagctt

SEQ ID NO: 1344069 - DNA, 15 bp, Homo sapiens
aaataaaacaaagct

SEQ ID NO: 1344070 - DNA, 15 bp, Homo sapiens
gaaataaaacaaagc

SEQ ID NO: 1344071 - DNA, 15 bp, Homo sapiens
agaaataaaacaaag

SEQ ID NO: 1344072 - DNA, 15 bp, Homo sapiens
gagaaataaaacaaa

SEQ ID NO: 1344073 - DNA, 15 bp, Homo sapiens
tgagaaataaaacaa

SEQ ID NO: 1344074 - DNA, 15 bp, Homo sapiens
ctgagaaataaaaca

SEQ ID NO: 1344075 - DNA, 15 bp, Homo sapiens
actgagaaataaaac

SEQ ID NO: 1344076 - DNA, 15 bp, Homo sapiens
aactgagaaataaaa

SEQ ID NO: 1344077 - DNA, 15 bp, Homo sapiens
gaactgagaaataaa

SEQ ID NO: 1344078 - DNA, 15 bp, Homo sapiens
ggaactgagaaataa

SEQ ID NO: 1344079 - DNA, 15 bp, Homo sapiens
tggaactgagaaata

SEQ ID NO: 1344080 - DNA, 15 bp, Homo sapiens
atggaactgagaaat

SEQ ID NO: 1344081 - DNA, 15 bp, Homo sapiens
tatggaactgagaaa

SEQ ID NO: 1344082 - DNA, 15 bp, Homo sapiens
ctatggaactgagaa

SEQ ID NO: 1344083 - DNA, 15 bp, Homo sapiens
tctatggaactgaga

SEQ ID NO: 1344084 - DNA, 15 bp, Homo sapiens
ttctatggaactgag

SEQ ID NO: 1344085 - DNA, 15 bp, Homo sapiens
tttctatggaactga

SEQ ID NO: 1344086 - DNA, 15 bp, Homo sapiens
ttttctatggaactg

SEQ ID NO: 1344087 - DNA, 15 bp, Homo sapiens
attttctatggaact

SEQ ID NO: 1344088 - DNA, 15 bp, Homo sapiens
tattttctatggaac

SEQ ID NO: 1344089 - DNA, 15 bp, Homo sapiens
ttattttctatggaa

SEQ ID NO: 1344090 - DNA, 15 bp, Homo sapiens
tttattttctatgga

SEQ ID NO: 1344091 - DNA, 15 bp, Homo sapiens
ttttattttctatgg

SEQ ID NO: 1344092 - DNA, 15 bp, Homo sapiens
attttattttctatg

SEQ ID NO: 1344093 - DNA, 15 bp, Homo sapiens
tattttattttctat

SEQ ID NO: 1344094 - DNA, 15 bp, Homo sapiens
ttattttattttcta

SEQ ID NO: 1344095 - DNA, 15 bp, Homo sapiens
attattttattttct

SEQ ID NO: 1344096 - DNA, 15 bp, Homo sapiens
tattattttattttc

SEQ ID NO: 1344097 - DNA, 15 bp, Homo sapiens
attattattttattt

SEQ ID NO: 1344098 - DNA, 15 bp, Homo sapiens
cattattattttatt

SEQ ID NO: 1344099 - DNA, 15 bp, Homo sapiens
acattattattttat

SEQ ID NO: 1344100 - DNA, 15 bp, Homo sapiens
aacattattatttta

SEQ ID NO: 1344101 - DNA, 15 bp, Homo sapiens
aaacattattatttt

SEQ ID NO: 1344102 - DNA, 15 bp, Homo sapiens
caaacattattattt

SEQ ID NO: 1344103 - DNA, 15 bp, Homo sapiens
ccaaacattattatt

SEQ ID NO: 1344104 - DNA, 15 bp, Homo sapiens
accaaacattattat

SEQ ID NO: 1344105 - DNA, 15 bp, Homo sapiens
taccaaacattatta

SEQ ID NO: 1344106 - DNA, 15 bp, Homo sapiens
ataccaaacattatt

SEQ ID NO: 1344107 - DNA, 15 bp, Homo sapiens
aataccaaacattat

SEQ ID NO: 1344108 - DNA, 15 bp, Homo sapiens
aaataccaaacatta

SEQ ID NO: 1344109 - DNA, 15 bp, Homo sapiens
caaataccaaacatt

SEQ ID NO: 1344110 - DNA, 15 bp, Homo sapiens
tcaaataccaaacat

SEQ ID NO: 1344111 - DNA, 15 bp, Homo sapiens
ctcaaataccaaaca

SEQ ID NO: 1344112 - DNA, 15 bp, Homo sapiens
actcaaataccaaac

SEQ ID NO: 1344113 - DNA, 15 bp, Homo sapiens
aactcaaataccaaa

SEQ ID NO: 1344114 - DNA, 15 bp, Homo sapiens
caactcaaataccaa

SEQ ID NO: 1344115 - DNA, 15 bp, Homo sapiens
tcaactcaaatacca

SEQ ID NO: 1344116 - DNA, 15 bp, Homo sapiens
ctcaactcaaatacc

SEQ ID NO: 1344117 - DNA, 15 bp, Homo sapiens
cctcaactcaaatac

SEQ ID NO: 1344118 - DNA, 15 bp, Homo sapiens
acctcaactcaaata

SEQ ID NO: 1344119 - DNA, 15 bp, Homo sapiens
aacctcaactcaaat

SEQ ID NO: 1344120 - DNA, 15 bp, Homo sapiens
gaacctcaactcaaa

SEQ ID NO: 1344121 - DNA, 15 bp, Homo sapiens
tgaacctcaactcaa

SEQ ID NO: 1344122 - DNA, 15 bp, Homo sapiens
ctgaacctcaactca

SEQ ID NO: 1344123 - DNA, 15 bp, Homo sapiens
gctgaacctcaactc

SEQ ID NO: 1344124 - DNA, 15 bp, Homo sapiens
tgctgaacctcaact

SEQ ID NO: 1344125 - DNA, 15 bp, Homo sapiens
ttgctgaacctcaac

SEQ ID NO: 1344126 - DNA, 15 bp, Homo sapiens
tttgctgaacctcaa

SEQ ID NO: 1344127 - DNA, 15 bp, Homo sapiens
gtttgctgaacctca

SEQ ID NO: 1344128 - DNA, 15 bp, Homo sapiens
agtttgctgaacctc

SEQ ID NO: 1344129 - DNA, 15 bp, Homo sapiens
aagtttgctgaacct

SEQ ID NO: 1344130 - DNA, 15 bp, Homo sapiens
aaagtttgctgaacc

SEQ ID NO: 1344131 - DNA, 15 bp, Homo sapiens
aaaagtttgctgaac

SEQ ID NO: 1344132 - DNA, 15 bp, Homo sapiens
taaaagtttgctgaa

SEQ ID NO: 1344133 - DNA, 15 bp, Homo sapiens
ataaaagtttgctga

SEQ ID NO: 1344134 - DNA, 15 bp, Homo sapiens
tataaaagtttgctg

SEQ ID NO: 1344135 - DNA, 15 bp, Homo sapiens
ttataaaagtttgct

SEQ ID NO: 1344136 - DNA, 15 bp, Homo sapiens
attataaaagtttgc

SEQ ID NO: 1344137 - DNA, 15 bp, Homo sapiens
aattataaaagtttg

SEQ ID NO: 1344138 - DNA, 15 bp, Homo sapiens
gaattataaaagttt

SEQ ID NO: 1344139 - DNA, 15 bp, Homo sapiens
tgaattataaaagtt

SEQ ID NO: 1344140 - DNA, 15 bp, Homo sapiens
atgaattataaaagt

SEQ ID NO: 1344141 - DNA, 15 bp, Homo sapiens
aatgaattataaaag

SEQ ID NO: 1344142 - DNA, 15 bp, Homo sapiens
gaatgaattataaaa

SEQ ID NO: 1344143 - DNA, 15 bp, Homo sapiens
agaatgaattataaa

SEQ ID NO: 1344144 - DNA, 15 bp, Homo sapiens
tagaatgaattataa

SEQ ID NO: 1344145 - DNA, 15 bp, Homo sapiens
ctagaatgaattata

SEQ ID NO: 1344146 - DNA, 15 bp, Homo sapiens
cctagaatgaattat

SEQ ID NO: 1344147 - DNA, 15 bp, Homo sapiens
acctagaatgaatta

SEQ ID NO: 1344148 - DNA, 15 bp, Homo sapiens
aacctagaatgaatt

SEQ ID NO: 1344149 - DNA, 15 bp, Homo sapiens
aaacctagaatgaat

SEQ ID NO: 1344150 - DNA, 15 bp, Homo sapiens
aaaacctagaatgaa

SEQ ID NO: 1344151 - DNA, 15 bp, Homo sapiens
aaaaacctagaatga

SEQ ID NO: 1344152 - DNA, 15 bp, Homo sapiens
caaaaacctagaatg

SEQ ID NO: 1344153 - DNA, 15 bp, Homo sapiens
acaaaaacctagaat

SEQ ID NO: 1344154 - DNA, 15 bp, Homo sapiens
aacaaaaacctagaa

SEQ ID NO: 1344155 - DNA, 15 bp, Homo sapiens
aaacaaaaacctaga

SEQ ID NO: 1344156 - DNA, 15 bp, Homo sapiens
taaacaaaaacctag

SEQ ID NO: 1344157 - DNA, 15 bp, Homo sapiens
ataaacaaaaaccta

SEQ ID NO: 1344158 - DNA, 15 bp, Homo sapiens
aataaacaaaaacct

SEQ ID NO: 1344159 - DNA, 15 bp, Homo sapiens
caataaacaaaaacc

SEQ ID NO: 1344160 - DNA, 15 bp, Homo sapiens
acaataaacaaaaac

SEQ ID NO: 1344161 - DNA, 15 bp, Homo sapiens
aacaataaacaaaaa

SEQ ID NO: 1344162 - DNA, 15 bp, Homo sapiens
aaacaataaacaaaa

SEQ ID NO: 1344163 - DNA, 15 bp, Homo sapiens
gaaacaataaacaaa

SEQ ID NO: 1344164 - DNA, 15 bp, Homo sapiens
ggaaacaataaacaa

SEQ ID NO: 1344165 - DNA, 15 bp, Homo sapiens
gggaaacaataaaca

SEQ ID NO: 1344166 - DNA, 15 bp, Homo sapiens
agggaaacaataaac

SEQ ID NO: 1344167 - DNA, 15 bp, Homo sapiens
gagggaaacaataaa

SEQ ID NO: 1344168 - DNA, 15 bp, Homo sapiens
agagggaaacaataa

SEQ ID NO: 1344169 - DNA, 15 bp, Homo sapiens
cagagggaaacaata

SEQ ID NO: 1344170 - DNA, 15 bp, Homo sapiens
gcagagggaaacaat

SEQ ID NO: 1344171 - DNA, 15 bp, Homo sapiens
tgcagagggaaacaa

SEQ ID NO: 1344172 - DNA, 15 bp, Homo sapiens
atgcagagggaaaca

SEQ ID NO: 1344173 - DNA, 15 bp, Homo sapiens
gatgcagagggaaac

SEQ ID NO: 1344174 - DNA, 15 bp, Homo sapiens
tgatgcagagggaaa

SEQ ID NO: 1344175 - DNA, 15 bp, Homo sapiens
ttgatgcagagggaa

SEQ ID NO: 1344176 - DNA, 15 bp, Homo sapiens
gttgatgcagaggga

SEQ ID NO: 1344177 - DNA, 15 bp, Homo sapiens
agttgatgcagaggg

SEQ ID NO: 1344178 - DNA, 15 bp, Homo sapiens
gagttgatgcagagg

SEQ ID NO: 1344179 - DNA, 15 bp, Homo sapiens
ggagttgatgcagag

SEQ ID NO: 1344180 - DNA, 15 bp, Homo sapiens
aggagttgatgcaga

SEQ ID NO: 1344181 - DNA, 15 bp, Homo sapiens
gaggagttgatgcag

SEQ ID NO: 1344182 - DNA, 15 bp, Homo sapiens
ggaggagttgatgca

SEQ ID NO: 1344183 - DNA, 15 bp, Homo sapiens
aggaggagttgatgc

SEQ ID NO: 1344184 - DNA, 15 bp, Homo sapiens
caggaggagttgatg

SEQ ID NO: 1344185 - DNA, 15 bp, Homo sapiens
acaggaggagttgat

SEQ ID NO: 1344186 - DNA, 15 bp, Homo sapiens
aacaggaggagttga

SEQ ID NO: 1344187 - DNA, 15 bp, Homo sapiens
aaacaggaggagttg

SEQ ID NO: 1344188 - DNA, 15 bp, Homo sapiens
aaaacaggaggagtt

SEQ ID NO: 1344189 - DNA, 15 bp, Homo sapiens
caaaacaggaggagt

SEQ ID NO: 1344190 - DNA, 15 bp, Homo sapiens
ccaaaacaggaggag

SEQ ID NO: 1344191 - DNA, 15 bp, Homo sapiens
tccaaaacaggagga

SEQ ID NO: 1344192 - DNA, 15 bp, Homo sapiens
ttccaaaacaggagg

SEQ ID NO: 1344193 - DNA, 15 bp, Homo sapiens
tttccaaaacaggag

SEQ ID NO: 1344194 - DNA, 15 bp, Homo sapiens
gtttccaaaacagga

SEQ ID NO: 1344195 - DNA, 15 bp, Homo sapiens
tgtttccaaaacagg

SEQ ID NO: 1344196 - DNA, 15 bp, Homo sapiens
atgtttccaaaacag

SEQ ID NO: 1344197 - DNA, 15 bp, Homo sapiens
catgtttccaaaaca

SEQ ID NO: 1344198 - DNA, 15 bp, Homo sapiens
gcatgtttccaaaac

SEQ ID NO: 1344199 - DNA, 15 bp, Homo sapiens
ggcatgtttccaaaa

SEQ ID NO: 1344200 - DNA, 15 bp, Homo sapiens
gggcatgtttccaaa

SEQ ID NO: 1344201 - DNA, 15 bp, Homo sapiens
agggcatgtttccaa

SEQ ID NO: 1344202 - DNA, 15 bp, Homo sapiens
cagggcatgtttcca

SEQ ID NO: 1344203 - DNA, 15 bp, Homo sapiens
acagggcatgtttcc

SEQ ID NO: 1344204 - DNA, 15 bp, Homo sapiens
tacagggcatgtttc

SEQ ID NO: 1344205 - DNA, 15 bp, Homo sapiens
ctacagggcatgttt

SEQ ID NO: 1344206 - DNA, 15 bp, Homo sapiens
tctacagggcatgtt

SEQ ID NO: 1344207 - DNA, 15 bp, Homo sapiens
atctacagggcatgt

SEQ ID NO: 1344208 - DNA, 15 bp, Homo sapiens
tatctacagggcatg

SEQ ID NO: 1344209 - DNA, 15 bp, Homo sapiens
atatctacagggcat

SEQ ID NO: 1344210 - DNA, 15 bp, Homo sapiens
gatatctacagggca

SEQ ID NO: 1344211 - DNA, 15 bp, Homo sapiens
agatatctacagggc

SEQ ID NO: 1344212 - DNA, 15 bp, Homo sapiens
tagatatctacaggg

SEQ ID NO: 1344213 - DNA, 15 bp, Homo sapiens
gtagatatctacagg

SEQ ID NO: 1344214 - DNA, 15 bp, Homo sapiens
tgtagatatctacag

SEQ ID NO: 1344215 - DNA, 15 bp, Homo sapiens
ttgtagatatctaca

SEQ ID NO: 1344216 - DNA, 15 bp, Homo sapiens
tttgtagatatctac

SEQ ID NO: 1344217 - DNA, 15 bp, Homo sapiens
atttgtagatatcta

SEQ ID NO: 1344218 - DNA, 15 bp, Homo sapiens
gatttgtagatatct

SEQ ID NO: 1344219 - DNA, 15 bp, Homo sapiens
ggatttgtagatatc

SEQ ID NO: 1344220 - DNA, 15 bp, Homo sapiens
tggatttgtagatat

SEQ ID NO: 1344221 - DNA, 15 bp, Homo sapiens
atggatttgtagata

SEQ ID NO: 1344222 - DNA, 15 bp, Homo sapiens
tatggatttgtagat

SEQ ID NO: 1344223 - DNA, 15 bp, Homo sapiens
gtatggatttgtaga

SEQ ID NO: 1344224 - DNA, 15 bp, Homo sapiens
agtatggatttgtag

SEQ ID NO: 1344225 - DNA, 15 bp, Homo sapiens
cagtatggatttgta

SEQ ID NO: 1344226 - DNA, 15 bp, Homo sapiens
ccagtatggatttgt

SEQ ID NO: 1344227 - DNA, 15 bp, Homo sapiens
accagtatggatttg

SEQ ID NO: 1344228 - DNA, 15 bp, Homo sapiens
caccagtatggattt

SEQ ID NO: 1344229 - DNA, 15 bp, Homo sapiens
ccaccagtatggatt

SEQ ID NO: 1344230 - DNA, 15 bp, Homo sapiens
tccaccagtatggat

SEQ ID NO: 1344231 - DNA, 15 bp, Homo sapiens
gtccaccagtatgga

SEQ ID NO: 1344232 - DNA, 15 bp, Homo sapiens
ggtccaccagtatgg

SEQ ID NO: 1344233 - DNA, 15 bp, Homo sapiens
cggtccaccagtatg

SEQ ID NO: 1344234 - DNA, 15 bp, Homo sapiens
acggtccaccagtat

SEQ ID NO: 1344235 - DNA, 15 bp, Homo sapiens
tacggtccaccagta

SEQ ID NO: 1344236 - DNA, 15 bp, Homo sapiens
atacggtccaccagt

SEQ ID NO: 1344237 - DNA, 15 bp, Homo sapiens
aatacggtccaccag

SEQ ID NO: 1344238 - DNA, 15 bp, Homo sapiens
gaatacggtccacca

SEQ ID NO: 1344239 - DNA, 15 bp, Homo sapiens
tgaatacggtccacc

SEQ ID NO: 1344240 - DNA, 15 bp, Homo sapiens
ttgaatacggtccac

SEQ ID NO: 1344241 - DNA, 15 bp, Homo sapiens
cttgaatacggtcca

SEQ ID NO: 1344242 - DNA, 15 bp, Homo sapiens
ccttgaatacggtcc

SEQ ID NO: 1344243 - DNA, 15 bp, Homo sapiens
gccttgaatacggtc

SEQ ID NO: 1344244 - DNA, 15 bp, Homo sapiens
ggccttgaatacggt

SEQ ID NO: 1344245 - DNA, 15 bp, Homo sapiens
aggccttgaatacgg

SEQ ID NO: 1344246 - DNA, 15 bp, Homo sapiens
gaggccttgaatacg

SEQ ID NO: 1344247 - DNA, 15 bp, Homo sapiens
tgaggccttgaatac

SEQ ID NO: 1344248 - DNA, 15 bp, Homo sapiens
ttgaggccttgaata

SEQ ID NO: 1344249 - DNA, 15 bp, Homo sapiens
attgaggccttgaat

SEQ ID NO: 1344250 - DNA, 15 bp, Homo sapiens
aattgaggccttgaa

SEQ ID NO: 1344251 - DNA, 15 bp, Homo sapiens
aaattgaggccttga

SEQ ID NO: 1344252 - DNA, 15 bp, Homo sapiens
taaattgaggccttg

SEQ ID NO: 1344253 - DNA, 15 bp, Homo sapiens
ttaaattgaggcctt

SEQ ID NO: 1344254 - DNA, 15 bp, Homo sapiens
tttaaattgaggcct

SEQ ID NO: 1344255 - DNA, 15 bp, Homo sapiens
ttttaaattgaggcc

SEQ ID NO: 1344256 - DNA, 15 bp, Homo sapiens
attttaaattgaggc

SEQ ID NO: 1344257 - DNA, 15 bp, Homo sapiens
cattttaaattgagg

SEQ ID NO: 1344258 - DNA, 15 bp, Homo sapiens
tcattttaaattgag

SEQ ID NO: 1344259 - DNA, 15 bp, Homo sapiens
atcattttaaattga

SEQ ID NO: 1344260 - DNA, 15 bp, Homo sapiens
catcattttaaattg

SEQ ID NO: 1344261 - DNA, 15 bp, Homo sapiens
tcatcattttaaatt

SEQ ID NO: 1344262 - DNA, 15 bp, Homo sapiens
ctcatcattttaaat

SEQ ID NO: 1344263 - DNA, 15 bp, Homo sapiens
actcatcattttaaa

SEQ ID NO: 1344264 - DNA, 15 bp, Homo sapiens
gactcatcattttaa

SEQ ID NO: 1344265 - DNA, 15 bp, Homo sapiens
tgactcatcatttta

SEQ ID NO: 1344266 - DNA, 15 bp, Homo sapiens
gtgactcatcatttt

SEQ ID NO: 1344267 - DNA, 15 bp, Homo sapiens
tgtgactcatcattt

SEQ ID NO: 1344268 - DNA, 15 bp, Homo sapiens
ctgtgactcatcatt

SEQ ID NO: 1344269 - DNA, 15 bp, Homo sapiens
gctgtgactcatcat

SEQ ID NO: 1344270 - DNA, 15 bp, Homo sapiens
agctgtgactcatca

SEQ ID NO: 1344271 - DNA, 15 bp, Homo sapiens
tagctgtgactcatc

SEQ ID NO: 1344272 - DNA, 15 bp, Homo sapiens
atagctgtgactcat

SEQ ID NO: 1344273 - DNA, 15 bp, Homo sapiens
aatagctgtgactca

SEQ ID NO: 1344274 - DNA, 15 bp, Homo sapiens
gaatagctgtgactc

SEQ ID NO: 1344275 - DNA, 15 bp, Homo sapiens
tgaatagctgtgact

SEQ ID NO: 1344276 - DNA, 15 bp, Homo sapiens
atgaatagctgtgac

SEQ ID NO: 1344277 - DNA, 15 bp, Homo sapiens
catgaatagctgtga

SEQ ID NO: 1344278 - DNA, 15 bp, Homo sapiens
tcatgaatagctgtg

SEQ ID NO: 1344279 - DNA, 15 bp, Homo sapiens
atcatgaatagctgt

SEQ ID NO: 1344280 - DNA, 15 bp, Homo sapiens
catcatgaatagctg

SEQ ID NO: 1344281 - DNA, 15 bp, Homo sapiens
acatcatgaatagct

SEQ ID NO: 1344282 - DNA, 15 bp, Homo sapiens
gacatcatgaatagc

SEQ ID NO: 1344283 - DNA, 15 bp, Homo sapiens
tgacatcatgaatag

SEQ ID NO: 1344284 - DNA, 15 bp, Homo sapiens
ctgacatcatgaata

SEQ ID NO: 1344285 - DNA, 15 bp, Homo sapiens
cctgacatcatgaat

SEQ ID NO: 1344286 - DNA, 15 bp, Homo sapiens
ccctgacatcatgaa

SEQ ID NO: 1344287 - DNA, 15 bp, Homo sapiens
cccctgacatcatga

SEQ ID NO: 1344288 - DNA, 15 bp, Homo sapiens
acccctgacatcatg

SEQ ID NO: 1344289 - DNA, 15 bp, Homo sapiens
tacccctgacatcat

SEQ ID NO: 1344290 - DNA, 15 bp, Homo sapiens
ttacccctgacatca

SEQ ID NO: 1344291 - DNA, 15 bp, Homo sapiens
cttacccctgacatc

SEQ ID NO: 1344292 - DNA, 15 bp, Homo sapiens
gcttacccctgacat

SEQ ID NO: 1344293 - DNA, 15 bp, Homo sapiens
ggcttacccctgaca

SEQ ID NO: 1344294 - DNA, 15 bp, Homo sapiens
aggcttacccctgac

SEQ ID NO: 1344295 - DNA, 15 bp, Homo sapiens
gaggcttacccctga

SEQ ID NO: 1344296 - DNA, 15 bp, Homo sapiens
tgaggcttacccctg

SEQ ID NO: 1344297 - DNA, 15 bp, Homo sapiens
ctgaggcttacccct

SEQ ID NO: 1344298 - DNA, 15 bp, Homo sapiens
gctgaggcttacccc

SEQ ID NO: 1344299 - DNA, 15 bp, Homo sapiens
agctgaggcttaccc

SEQ ID NO: 1344300 - DNA, 15 bp, Homo sapiens
tagctgaggcttacc

SEQ ID NO: 1344301 - DNA, 15 bp, Homo sapiens
ctagctgaggcttac

SEQ ID NO: 1344302 - DNA, 15 bp, Homo sapiens
gctagctgaggctta

SEQ ID NO: 1344303 - DNA, 15 bp, Homo sapiens
ggctagctgaggctt

SEQ ID NO: 1344304 - DNA, 15 bp, Homo sapiens
aggctagctgaggct

SEQ ID NO: 1344305 - DNA, 15 bp, Homo sapiens
aaggctagctgaggc

SEQ ID NO: 1344306 - DNA, 15 bp, Homo sapiens
gaaggctagctgagg

SEQ ID NO: 1344307 - DNA, 15 bp, Homo sapiens
agaaggctagctgag

SEQ ID NO: 1344308 - DNA, 15 bp, Homo sapiens
tagaaggctagctga

SEQ ID NO: 1344309 - DNA, 15 bp, Homo sapiens
gtagaaggctagctg

SEQ ID NO: 1344310 - DNA, 15 bp, Homo sapiens
agtagaaggctagct

SEQ ID NO: 1344311 - DNA, 15 bp, Homo sapiens
aagtagaaggctagc

SEQ ID NO: 1344312 - DNA, 15 bp, Homo sapiens
caagtagaaggctag

SEQ ID NO: 1344313 - DNA, 15 bp, Homo sapiens
tcaagtagaaggcta

SEQ ID NO: 1344314 - DNA, 15 bp, Homo sapiens
ctcaagtagaaggct

SEQ ID NO: 1344315 - DNA, 15 bp, Homo sapiens
actcaagtagaaggc

SEQ ID NO: 1344316 - DNA, 15 bp, Homo sapiens
cactcaagtagaagg

SEQ ID NO: 1344317 - DNA, 15 bp, Homo sapiens
gcactcaagtagaag

SEQ ID NO: 1344318 - DNA, 15 bp, Homo sapiens
agcactcaagtagaa

SEQ ID NO: 1344319 - DNA, 15 bp, Homo sapiens
cagcactcaagtaga

SEQ ID NO: 1344320 - DNA, 15 bp, Homo sapiens
ccagcactcaagtag

SEQ ID NO: 1344321 - DNA, 15 bp, Homo sapiens
cccagcactcaagta

SEQ ID NO: 1344322 - DNA, 15 bp, Homo sapiens
gcccagcactcaagt

SEQ ID NO: 1344323 - DNA, 15 bp, Homo sapiens
tgcccagcactcaag

SEQ ID NO: 1344324 - DNA, 15 bp, Homo sapiens
ttgcccagcactcaa

SEQ ID NO: 1344325 - DNA, 15 bp, Homo sapiens
cttgcccagcactca

SEQ ID NO: 1344326 - DNA, 15 bp, Homo sapiens
gcttgcccagcactc

SEQ ID NO: 1344327 - DNA, 15 bp, Homo sapiens
ggcttgcccagcact

SEQ ID NO: 1344328 - DNA, 15 bp, Homo sapiens
aggcttgcccagcac

SEQ ID NO: 1344329 - DNA, 15 bp, Homo sapiens
gaggcttgcccagca

SEQ ID NO: 1344330 - DNA, 15 bp, Homo sapiens
tgaggcttgcccagc

SEQ ID NO: 1344331 - DNA, 15 bp, Homo sapiens
ctgaggcttgcccag

SEQ ID NO: 1344332 - DNA, 15 bp, Homo sapiens
cctgaggcttgccca

SEQ ID NO: 1344333 - DNA, 15 bp, Homo sapiens
acctgaggcttgccc

SEQ ID NO: 1344334 - DNA, 15 bp, Homo sapiens
tacctgaggcttgcc

SEQ ID NO: 1344335 - DNA, 15 bp, Homo sapiens
atacctgaggcttgc

SEQ ID NO: 1344336 - DNA, 15 bp, Homo sapiens
tatacctgaggcttg

SEQ ID NO: 1344337 - DNA, 15 bp, Homo sapiens
ttatacctgaggctt

SEQ ID NO: 1344338 - DNA, 15 bp, Homo sapiens
attatacctgaggct

SEQ ID NO: 1344339 - DNA, 15 bp, Homo sapiens
gattatacctgaggc

SEQ ID NO: 1344340 - DNA, 15 bp, Homo sapiens
agattatacctgagg

SEQ ID NO: 1344341 - DNA, 15 bp, Homo sapiens
gagattatacctgag

SEQ ID NO: 1344342 - DNA, 15 bp, Homo sapiens
tgagattatacctga

SEQ ID NO: 1344343 - DNA, 15 bp, Homo sapiens
atgagattatacctg

SEQ ID NO: 1344344 - DNA, 15 bp, Homo sapiens
aatgagattatacct

SEQ ID NO: 1344345 - DNA, 15 bp, Homo sapiens
caatgagattatacc

SEQ ID NO: 1344346 - DNA, 15 bp, Homo sapiens
ccaatgagattatac

SEQ ID NO: 1344347 - DNA, 15 bp, Homo sapiens
tccaatgagattata

SEQ ID NO: 1344348 - DNA, 15 bp, Homo sapiens
ttccaatgagattat

SEQ ID NO: 1344349 - DNA, 15 bp, Homo sapiens
cttccaatgagatta

SEQ ID NO: 1344350 - DNA, 15 bp, Homo sapiens
tcttccaatgagatt

SEQ ID NO: 1344351 - DNA, 15 bp, Homo sapiens
ttcttccaatgagat

SEQ ID NO: 1344352 - DNA, 15 bp, Homo sapiens
attcttccaatgaga

SEQ ID NO: 1344353 - DNA, 15 bp, Homo sapiens
tattcttccaatgag

SEQ ID NO: 1344354 - DNA, 15 bp, Homo sapiens
atattcttccaatga

SEQ ID NO: 1344355 - DNA, 15 bp, Homo sapiens
aatattcttccaatg

SEQ ID NO: 1344356 - DNA, 15 bp, Homo sapiens
aaatattcttccaat

SEQ ID NO: 1344357 - DNA, 15 bp, Homo sapiens
caaatattcttccaa

SEQ ID NO: 1344358 - DNA, 15 bp, Homo sapiens
gcaaatattcttcca

SEQ ID NO: 1344359 - DNA, 15 bp, Homo sapiens
ggcaaatattcttcc

SEQ ID NO: 1344360 - DNA, 15 bp, Homo sapiens
gggcaaatattcttc

SEQ ID NO: 1344361 - DNA, 15 bp, Homo sapiens
tgggcaaatattctt

SEQ ID NO: 1344362 - DNA, 15 bp, Homo sapiens
ctgggcaaatattct

SEQ ID NO: 1344363 - DNA, 15 bp, Homo sapiens
cctgggcaaatattc

SEQ ID NO: 1344364 - DNA, 15 bp, Homo sapiens
tcctgggcaaatatt

SEQ ID NO: 1344365 - DNA, 15 bp, Homo sapiens
ctcctgggcaaatat

SEQ ID NO: 1344366 - DNA, 15 bp, Homo sapiens
gctcctgggcaaata

SEQ ID NO: 1344367 - DNA, 15 bp, Homo sapiens
agctcctgggcaaat

SEQ ID NO: 1344368 - DNA, 15 bp, Homo sapiens
gagctcctgggcaaa

SEQ ID NO: 1344369 - DNA, 15 bp, Homo sapiens
agagctcctgggcaa

SEQ ID NO: 1344370 - DNA, 15 bp, Homo sapiens
gagagctcctgggca

SEQ ID NO: 1344371 - DNA, 15 bp, Homo sapiens
ggagagctcctgggc

SEQ ID NO: 1344372 - DNA, 15 bp, Homo sapiens
aggagagctcctggg

SEQ ID NO: 1344373 - DNA, 15 bp, Homo sapiens
caggagagctcctgg

SEQ ID NO: 1344374 - DNA, 15 bp, Homo sapiens
tcaggagagctcctg

SEQ ID NO: 1344375 - DNA, 15 bp, Homo sapiens
ctcaggagagctcct

SEQ ID NO: 1344376 - DNA, 15 bp, Homo sapiens
tctcaggagagctcc

SEQ ID NO: 1344377 - DNA, 15 bp, Homo sapiens
ctctcaggagagctc

SEQ ID NO: 1344378 - DNA, 15 bp, Homo sapiens
tctctcaggagagct

SEQ ID NO: 1344379 - DNA, 15 bp, Homo sapiens
ttctctcaggagagc

SEQ ID NO: 1344380 - DNA, 15 bp, Homo sapiens
cttctctcaggagag

SEQ ID NO: 1344381 - DNA, 15 bp, Homo sapiens
ccttctctcaggaga

SEQ ID NO: 1344382 - DNA, 15 bp, Homo sapiens
accttctctcaggag

SEQ ID NO: 1344383 - DNA, 15 bp, Homo sapiens
gaccttctctcagga

SEQ ID NO: 1344384 - DNA, 15 bp, Homo sapiens
ggaccttctctcagg

SEQ ID NO: 1344385 - DNA, 15 bp, Homo sapiens
gggaccttctctcag

SEQ ID NO: 1344386 - DNA, 15 bp, Homo sapiens
tgggaccttctctca

SEQ ID NO: 1344387 - DNA, 15 bp, Homo sapiens
ctgggaccttctctc

SEQ ID NO: 1344388 - DNA, 15 bp, Homo sapiens
cctgggaccttctct

SEQ ID NO: 1344389 - DNA, 15 bp, Homo sapiens
acctgggaccttctc

SEQ ID NO: 1344390 - DNA, 15 bp, Homo sapiens
gacctgggaccttct

SEQ ID NO: 1344391 - DNA, 15 bp, Homo sapiens
tgacctgggaccttc

SEQ ID NO: 1344392 - DNA, 15 bp, Homo sapiens
atgacctgggacctt

SEQ ID NO: 1344393 - DNA, 15 bp, Homo sapiens
tatgacctgggacct

SEQ ID NO: 1344394 - DNA, 15 bp, Homo sapiens
ctatgacctgggacc

SEQ ID NO: 1344395 - DNA, 15 bp, Homo sapiens
cctatgacctgggac

SEQ ID NO: 1344396 - DNA, 15 bp, Homo sapiens
tcctatgacctggga

SEQ ID NO: 1344397 - DNA, 15 bp, Homo sapiens
atcctatgacctggg

SEQ ID NO: 1344398 - DNA, 15 bp, Homo sapiens
tatcctatgacctgg

SEQ ID NO: 1344399 - DNA, 15 bp, Homo sapiens
gtatcctatgacctg

SEQ ID NO: 1344400 - DNA, 15 bp, Homo sapiens
ggtatcctatgacct

SEQ ID NO: 1344401 - DNA, 15 bp, Homo sapiens
aggtatcctatgacc

SEQ ID NO: 1344402 - DNA, 15 bp, Homo sapiens
aaggtatcctatgac

SEQ ID NO: 1344403 - DNA, 15 bp, Homo sapiens
taaggtatcctatga

SEQ ID NO: 1344404 - DNA, 15 bp, Homo sapiens
ttaaggtatcctatg

SEQ ID NO: 1344405 - DNA, 15 bp, Homo sapiens
cttaaggtatcctat

SEQ ID NO: 1344406 - DNA, 15 bp, Homo sapiens
ccttaaggtatccta

SEQ ID NO: 1344407 - DNA, 15 bp, Homo sapiens
tccttaaggtatcct

SEQ ID NO: 1344408 - DNA, 15 bp, Homo sapiens
gtccttaaggtatcc

SEQ ID NO: 1344409 - DNA, 15 bp, Homo sapiens
tgtccttaaggtatc

SEQ ID NO: 1344410 - DNA, 15 bp, Homo sapiens
ttgtccttaaggtat

SEQ ID NO: 1344411 - DNA, 15 bp, Homo sapiens
attgtccttaaggta

SEQ ID NO: 1344412 - DNA, 15 bp, Homo sapiens
tattgtccttaaggt

SEQ ID NO: 1344413 - DNA, 15 bp, Homo sapiens
ctattgtccttaagg

SEQ ID NO: 1344414 - DNA, 15 bp, Homo sapiens
gctattgtccttaag

SEQ ID NO: 1344415 - DNA, 15 bp, Homo sapiens
tgctattgtccttaa

SEQ ID NO: 1344416 - DNA, 15 bp, Homo sapiens
atgctattgtcctta

SEQ ID NO: 1344417 - DNA, 15 bp, Homo sapiens
gatgctattgtcctt

SEQ ID NO: 1344418 - DNA, 15 bp, Homo sapiens
tgatgctattgtcct

SEQ ID NO: 1344419 - DNA, 15 bp, Homo sapiens
gtgatgctattgtcc

SEQ ID NO: 1344420 - DNA, 15 bp, Homo sapiens
tgtgatgctattgtc

SEQ ID NO: 1344421 - DNA, 15 bp, Homo sapiens
ctgtgatgctattgt

SEQ ID NO: 1344422 - DNA, 15 bp, Homo sapiens
cctgtgatgctattg

SEQ ID NO: 1344423 - DNA, 15 bp, Homo sapiens
acctgtgatgctatt

SEQ ID NO: 1344424 - DNA, 15 bp, Homo sapiens
tacctgtgatgctat

SEQ ID NO: 1344425 - DNA, 15 bp, Homo sapiens
atacctgtgatgcta

SEQ ID NO: 1344426 - DNA, 15 bp, Homo sapiens
catacctgtgatgct

SEQ ID NO: 1344427 - DNA, 15 bp, Homo sapiens
tcatacctgtgatgc

SEQ ID NO: 1344428 - DNA, 15 bp, Homo sapiens
atcatacctgtgatg

SEQ ID NO: 1344429 - DNA, 15 bp, Homo sapiens
tatcatacctgtgat

SEQ ID NO: 1344430 - DNA, 15 bp, Homo sapiens
ttatcatacctgtga

SEQ ID NO: 1344431 - DNA, 15 bp, Homo sapiens
tttatcatacctgtg

SEQ ID NO: 1344432 - DNA, 15 bp, Homo sapiens
atttatcatacctgt

SEQ ID NO: 1344433 - DNA, 15 bp, Homo sapiens
aatttatcatacctg

SEQ ID NO: 1344434 - DNA, 15 bp, Homo sapiens
taatttatcatacct

SEQ ID NO: 1344435 - DNA, 15 bp, Homo sapiens
gtaatttatcatacc

SEQ ID NO: 1344436 - DNA, 15 bp, Homo sapiens
tgtaatttatcatac

SEQ ID NO: 1344437 - DNA, 15 bp, Homo sapiens
atgtaatttatcata

SEQ ID NO: 1344438 - DNA, 15 bp, Homo sapiens
gatgtaatttatcat

SEQ ID NO: 1344439 - DNA, 15 bp, Homo sapiens
tgatgtaatttatca

SEQ ID NO: 1344440 - DNA, 15 bp, Homo sapiens
ctgatgtaatttatc

SEQ ID NO: 1344441 - DNA, 15 bp, Homo sapiens
tctgatgtaatttat

SEQ ID NO: 1344442 - DNA, 15 bp, Homo sapiens
gtctgatgtaattta

SEQ ID NO: 1344443 - DNA, 15 bp, Homo sapiens
tgtctgatgtaattt

SEQ ID NO: 1344444 - DNA, 15 bp, Homo sapiens
gtgtctgatgtaatt

SEQ ID NO: 1344445 - DNA, 15 bp, Homo sapiens
tgtgtctgatgtaat

SEQ ID NO: 1344446 - DNA, 15 bp, Homo sapiens
ctgtgtctgatgtaa

SEQ ID NO: 1344447 - DNA, 15 bp, Homo sapiens
gctgtgtctgatgta

SEQ ID NO: 1344448 - DNA, 15 bp, Homo sapiens
agctgtgtctgatgt

SEQ ID NO: 1344449 - DNA, 15 bp, Homo sapiens
cagctgtgtctgatg

SEQ ID NO: 1344450 - DNA, 15 bp, Homo sapiens
gcagctgtgtctgat

SEQ ID NO: 1344451 - DNA, 15 bp, Homo sapiens
ggcagctgtgtctga

SEQ ID NO: 1344452 - DNA, 15 bp, Homo sapiens
gggcagctgtgtctg

SEQ ID NO: 1344453 - DNA, 15 bp, Homo sapiens
ggggcagctgtgtct

SEQ ID NO: 1344454 - DNA, 15 bp, Homo sapiens
aggggcagctgtgtc

SEQ ID NO: 1344455 - DNA, 15 bp, Homo sapiens
aaggggcagctgtgt

SEQ ID NO: 1344456 - DNA, 15 bp, Homo sapiens
aaaggggcagctgtg

SEQ ID NO: 1344457 - DNA, 15 bp, Homo sapiens
gaaaggggcagctgt

SEQ ID NO: 1344458 - DNA, 15 bp, Homo sapiens
tgaaaggggcagctg

SEQ ID NO: 1344459 - DNA, 15 bp, Homo sapiens
ctgaaaggggcagct

SEQ ID NO: 1344460 - DNA, 15 bp, Homo sapiens
actgaaaggggcagc

SEQ ID NO: 1344461 - DNA, 15 bp, Homo sapiens
cactgaaaggggcag

SEQ ID NO: 1344462 - DNA, 15 bp, Homo sapiens
gcactgaaaggggca

SEQ ID NO: 1344463 - DNA, 15 bp, Homo sapiens
ggcactgaaaggggc

SEQ ID NO: 1344464 - DNA, 15 bp, Homo sapiens
aggcactgaaagggg

SEQ ID NO: 1344465 - DNA, 15 bp, Homo sapiens
gaggcactgaaaggg

SEQ ID NO: 1344466 - DNA, 15 bp, Homo sapiens
tgaggcactgaaagg

SEQ ID NO: 1344467 - DNA, 15 bp, Homo sapiens
ttgaggcactgaaag

SEQ ID NO: 1344468 - DNA, 15 bp, Homo sapiens
cttgaggcactgaaa

SEQ ID NO: 1344469 - DNA, 15 bp, Homo sapiens
acttgaggcactgaa

SEQ ID NO: 1344470 - DNA, 15 bp, Homo sapiens
aacttgaggcactga

SEQ ID NO: 1344471 - DNA, 15 bp, Homo sapiens
aaacttgaggcactg

SEQ ID NO: 1344472 - DNA, 15 bp, Homo sapiens
gaaacttgaggcact

SEQ ID NO: 1344473 - DNA, 15 bp, Homo sapiens
tgaaacttgaggcac

SEQ ID NO: 1344474 - DNA, 15 bp, Homo sapiens
atgaaacttgaggca

SEQ ID NO: 1344475 - DNA, 15 bp, Homo sapiens
catgaaacttgaggc

SEQ ID NO: 1344476 - DNA, 15 bp, Homo sapiens
acatgaaacttgagg

SEQ ID NO: 1344477 - DNA, 15 bp, Homo sapiens
cacatgaaacttgag

SEQ ID NO: 1344478 - DNA, 15 bp, Homo sapiens
ccacatgaaacttga

SEQ ID NO: 1344479 - DNA, 15 bp, Homo sapiens
tccacatgaaacttg

SEQ ID NO: 1344480 - DNA, 15 bp, Homo sapiens
atccacatgaaactt

SEQ ID NO: 1344481 - DNA, 15 bp, Homo sapiens
aatccacatgaaact

SEQ ID NO: 1344482 - DNA, 15 bp, Homo sapiens
taatccacatgaaac

SEQ ID NO: 1344483 - DNA, 15 bp, Homo sapiens
ctaatccacatgaaa

SEQ ID NO: 1344484 - DNA, 15 bp, Homo sapiens
gctaatccacatgaa

SEQ ID NO: 1344485 - DNA, 15 bp, Homo sapiens
tgctaatccacatga

SEQ ID NO: 1344486 - DNA, 15 bp, Homo sapiens
gtgctaatccacatg

SEQ ID NO: 1344487 - DNA, 15 bp, Homo sapiens
ggtgctaatccacat

SEQ ID NO: 1344488 - DNA, 15 bp, Homo sapiens
aggtgctaatccaca

SEQ ID NO: 1344489 - DNA, 15 bp, Homo sapiens
taggtgctaatccac

SEQ ID NO: 1344490 - DNA, 15 bp, Homo sapiens
gtaggtgctaatcca

SEQ ID NO: 1344491 - DNA, 15 bp, Homo sapiens
cgtaggtgctaatcc

SEQ ID NO: 1344492 - DNA, 15 bp, Homo sapiens
acgtaggtgctaatc

SEQ ID NO: 1344493 - DNA, 15 bp, Homo sapiens
cacgtaggtgctaat

SEQ ID NO: 1344494 - DNA, 15 bp, Homo sapiens
gcacgtaggtgctaa

SEQ ID NO: 1344495 - DNA, 15 bp, Homo sapiens
agcacgtaggtgcta

SEQ ID NO: 1344496 - DNA, 15 bp, Homo sapiens
cagcacgtaggtgct

SEQ ID NO: 1344497 - DNA, 15 bp, Homo sapiens
acagcacgtaggtgc

SEQ ID NO: 1344498 - DNA, 15 bp, Homo sapiens
cacagcacgtaggtg

SEQ ID NO: 1344499 - DNA, 15 bp, Homo sapiens
acacagcacgtaggt

SEQ ID NO: 1344500 - DNA, 15 bp, Homo sapiens
cacacagcacgtagg

SEQ ID NO: 1344501 - DNA, 15 bp, Homo sapiens
gcacacagcacgtag

SEQ ID NO: 1344502 - DNA, 15 bp, Homo sapiens
tgcacacagcacgta

SEQ ID NO: 1344503 - DNA, 15 bp, Homo sapiens
atgcacacagcacgt

SEQ ID NO: 1344504 - DNA, 15 bp, Homo sapiens
gatgcacacagcacg

SEQ ID NO: 1344505 - DNA, 15 bp, Homo sapiens
agatgcacacagcac

SEQ ID NO: 1344506 - DNA, 15 bp, Homo sapiens
cagatgcacacagca

SEQ ID NO: 1344507 - DNA, 15 bp, Homo sapiens
ccagatgcacacagc

SEQ ID NO: 1344508 - DNA, 15 bp, Homo sapiens
cccagatgcacacag

SEQ ID NO: 1344509 - DNA, 15 bp, Homo sapiens
gcccagatgcacaca

SEQ ID NO: 1344510 - DNA, 15 bp, Homo sapiens
ggcccagatgcacac

SEQ ID NO: 1344511 - DNA, 15 bp, Homo sapiens
gggcccagatgcaca

SEQ ID NO: 1344512 - DNA, 15 bp, Homo sapiens
tgggcccagatgcac

SEQ ID NO: 1344513 - DNA, 15 bp, Homo sapiens
ttgggcccagatgca

SEQ ID NO: 1344514 - DNA, 15 bp, Homo sapiens
attgggcccagatgc

SEQ ID NO: 1344515 - DNA, 15 bp, Homo sapiens
aattgggcccagatg

SEQ ID NO: 1344516 - DNA, 15 bp, Homo sapiens
gaattgggcccagat

SEQ ID NO: 1344517 - DNA, 15 bp, Homo sapiens
ggaattgggcccaga

SEQ ID NO: 1344518 - DNA, 15 bp, Homo sapiens
gggaattgggcccag

SEQ ID NO: 1344519 - DNA, 15 bp, Homo sapiens
tgggaattgggccca

SEQ ID NO: 1344520 - DNA, 15 bp, Homo sapiens
ctgggaattgggccc

SEQ ID NO: 1344521 - DNA, 15 bp, Homo sapiens
cctgggaattgggcc

SEQ ID NO: 1344522 - DNA, 15 bp, Homo sapiens
gcctgggaattgggc

SEQ ID NO: 1344523 - DNA, 15 bp, Homo sapiens
cgcctgggaattggg

SEQ ID NO: 1344524 - DNA, 15 bp, Homo sapiens
ccgcctgggaattgg

SEQ ID NO: 1344525 - DNA, 15 bp, Homo sapiens
accgcctgggaattg

SEQ ID NO: 1344526 - DNA, 15 bp, Homo sapiens
aaccgcctgggaatt

SEQ ID NO: 1344527 - DNA, 15 bp, Homo sapiens
taaccgcctgggaat

SEQ ID NO: 1344528 - DNA, 15 bp, Homo sapiens
ctaaccgcctgggaa

SEQ ID NO: 1344529 - DNA, 15 bp, Homo sapiens
gctaaccgcctggga

SEQ ID NO: 1344530 - DNA, 15 bp, Homo sapiens
agctaaccgcctggg

SEQ ID NO: 1344531 - DNA, 15 bp, Homo sapiens
tagctaaccgcctgg

SEQ ID NO: 1344532 - DNA, 15 bp, Homo sapiens
ttagctaaccgcctg

SEQ ID NO: 1344533 - DNA, 15 bp, Homo sapiens
gttagctaaccgcct

SEQ ID NO: 1344534 - DNA, 15 bp, Homo sapiens
ggttagctaaccgcc

SEQ ID NO: 1344535 - DNA, 15 bp, Homo sapiens
gggttagctaaccgc

SEQ ID NO: 1344536 - DNA, 15 bp, Homo sapiens
tgggttagctaaccg

SEQ ID NO: 1344537 - DNA, 15 bp, Homo sapiens
ttgggttagctaacc

SEQ ID NO: 1344538 - DNA, 15 bp, Homo sapiens
cttgggttagctaac

SEQ ID NO: 1344539 - DNA, 15 bp, Homo sapiens
ccttgggttagctaa

SEQ ID NO: 1344540 - DNA, 15 bp, Homo sapiens
gccttgggttagcta

SEQ ID NO: 1344541 - DNA, 15 bp, Homo sapiens
ggccttgggttagct

SEQ ID NO: 1344542 - DNA, 15 bp, Homo sapiens
gggccttgggttagc

SEQ ID NO: 1344543 - DNA, 15 bp, Homo sapiens
ggggccttgggttag

SEQ ID NO: 1344544 - DNA, 15 bp, Homo sapiens
aggggccttgggtta

SEQ ID NO: 1344545 - DNA, 15 bp, Homo sapiens
caggggccttgggtt

SEQ ID NO: 1344546 - DNA, 15 bp, Homo sapiens
tcaggggccttgggt

SEQ ID NO: 1344547 - DNA, 15 bp, Homo sapiens
atcaggggccttggg

SEQ ID NO: 1344548 - DNA, 15 bp, Homo sapiens
gatcaggggccttgg

SEQ ID NO: 1344549 - DNA, 15 bp, Homo sapiens
ggatcaggggccttg

SEQ ID NO: 1344550 - DNA, 15 bp, Homo sapiens
tggatcaggggcctt

SEQ ID NO: 1344551 - DNA, 15 bp, Homo sapiens
ttggatcaggggcct

SEQ ID NO: 1344552 - DNA, 15 bp, Homo sapiens
tttggatcaggggcc

SEQ ID NO: 1344553 - DNA, 15 bp, Homo sapiens
ctttggatcaggggc

SEQ ID NO: 1344554 - DNA, 15 bp, Homo sapiens
cctttggatcagggg

SEQ ID NO: 1344555 - DNA, 15 bp, Homo sapiens
tcctttggatcaggg

SEQ ID NO: 1344556 - DNA, 15 bp, Homo sapiens
ctcctttggatcagg

SEQ ID NO: 1344557 - DNA, 15 bp, Homo sapiens
tctcctttggatcag

SEQ ID NO: 1344558 - DNA, 15 bp, Homo sapiens
ctctcctttggatca

SEQ ID NO: 1344559 - DNA, 15 bp, Homo sapiens
gctctcctttggatc

SEQ ID NO: 1344560 - DNA, 15 bp, Homo sapiens
agctctcctttggat

SEQ ID NO: 1344561 - DNA, 15 bp, Homo sapiens
cagctctcctttgga

SEQ ID NO: 1344562 - DNA, 15 bp, Homo sapiens
tcagctctcctttgg

SEQ ID NO: 1344563 - DNA, 15 bp, Homo sapiens
ctcagctctcctttg

SEQ ID NO: 1344564 - DNA, 15 bp, Homo sapiens
gctcagctctccttt

SEQ ID NO: 1344565 - DNA, 15 bp, Homo sapiens
agctcagctctcctt

SEQ ID NO: 1344566 - DNA, 15 bp, Homo sapiens
cagctcagctctcct

SEQ ID NO: 1344567 - DNA, 15 bp, Homo sapiens
tcagctcagctctcc

SEQ ID NO: 1344568 - DNA, 15 bp, Homo sapiens
ctcagctcagctctc

SEQ ID NO: 1344569 - DNA, 15 bp, Homo sapiens
gctcagctcagctct

SEQ ID NO: 1344570 - DNA, 15 bp, Homo sapiens
tgctcagctcagctc

SEQ ID NO: 1344571 - DNA, 15 bp, Homo sapiens
ttgctcagctcagct

SEQ ID NO: 1344572 - DNA, 15 bp, Homo sapiens
tttgctcagctcagc

SEQ ID NO: 1344573 - DNA, 15 bp, Homo sapiens
atttgctcagctcag

SEQ ID NO: 1344574 - DNA, 15 bp, Homo sapiens
aatttgctcagctca

SEQ ID NO: 1344575 - DNA, 15 bp, Homo sapiens
caatttgctcagctc

SEQ ID NO: 1344576 - DNA, 15 bp, Homo sapiens
gcaatttgctcagct

SEQ ID NO: 1344577 - DNA, 15 bp, Homo sapiens
ggcaatttgctcagc

SEQ ID NO: 1344578 - DNA, 15 bp, Homo sapiens
tggcaatttgctcag

SEQ ID NO: 1344579 - DNA, 15 bp, Homo sapiens
gtggcaatttgctca

SEQ ID NO: 1344580 - DNA, 15 bp, Homo sapiens
ggtggcaatttgctc

SEQ ID NO: 1344581 - DNA, 15 bp, Homo sapiens
tggtggcaatttgct

SEQ ID NO: 1344582 - DNA, 15 bp, Homo sapiens
ctggtggcaatttgc

SEQ ID NO: 1344583 - DNA, 15 bp, Homo sapiens
gctggtggcaatttg

SEQ ID NO: 1344584 - DNA, 15 bp, Homo sapiens
tgctggtggcaattt

SEQ ID NO: 1344585 - DNA, 15 bp, Homo sapiens
atgctggtggcaatt

SEQ ID NO: 1344586 - DNA, 15 bp, Homo sapiens
aatgctggtggcaat

SEQ ID NO: 1344587 - DNA, 15 bp, Homo sapiens
gaatgctggtggcaa

SEQ ID NO: 1344588 - DNA, 15 bp, Homo sapiens
tgaatgctggtggca

SEQ ID NO: 1344589 - DNA, 15 bp, Homo sapiens
ttgaatgctggtggc

SEQ ID NO: 1344590 - DNA, 15 bp, Homo sapiens
cttgaatgctggtgg

SEQ ID NO: 1344591 - DNA, 15 bp, Homo sapiens
acttgaatgctggtg

SEQ ID NO: 1344592 - DNA, 15 bp, Homo sapiens
tacttgaatgctggt

SEQ ID NO: 1344593 - DNA, 15 bp, Homo sapiens
ttacttgaatgctgg

SEQ ID NO: 1344594 - DNA, 15 bp, Homo sapiens
cttacttgaatgctg

SEQ ID NO: 1344595 - DNA, 15 bp, Homo sapiens
ccttacttgaatgct

SEQ ID NO: 1344596 - DNA, 15 bp, Homo sapiens
cccttacttgaatgc

SEQ ID NO: 1344597 - DNA, 15 bp, Homo sapiens
gcccttacttgaatg

SEQ ID NO: 1344598 - DNA, 15 bp, Homo sapiens
tgcccttacttgaat

SEQ ID NO: 1344599 - DNA, 15 bp, Homo sapiens
ctgcccttacttgaa

SEQ ID NO: 1344600 - DNA, 15 bp, Homo sapiens
tctgcccttacttga

SEQ ID NO: 1344601 - DNA, 15 bp, Homo sapiens
atctgcccttacttg

SEQ ID NO: 1344602 - DNA, 15 bp, Homo sapiens
aatctgcccttactt

SEQ ID NO: 1344603 - DNA, 15 bp, Homo sapiens
aaatctgcccttact

SEQ ID NO: 1344604 - DNA, 15 bp, Homo sapiens
gaaatctgcccttac

SEQ ID NO: 1344605 - DNA, 15 bp, Homo sapiens
tgaaatctgccctta

SEQ ID NO: 1344606 - DNA, 15 bp, Homo sapiens
ctgaaatctgccctt

SEQ ID NO: 1344607 - DNA, 15 bp, Homo sapiens
gctgaaatctgccct

SEQ ID NO: 1344608 - DNA, 15 bp, Homo sapiens
agctgaaatctgccc

SEQ ID NO: 1344609 - DNA, 15 bp, Homo sapiens
aagctgaaatctgcc

SEQ ID NO: 1344610 - DNA, 15 bp, Homo sapiens
aaagctgaaatctgc

SEQ ID NO: 1344611 - DNA, 15 bp, Homo sapiens
gaaagctgaaatctg

SEQ ID NO: 1344612 - DNA, 15 bp, Homo sapiens
agaaagctgaaatct

SEQ ID NO: 1344613 - DNA, 15 bp, Homo sapiens
aagaaagctgaaatc

SEQ ID NO: 1344614 - DNA, 15 bp, Homo sapiens
aaagaaagctgaaat

SEQ ID NO: 1344615 - DNA, 15 bp, Homo sapiens
aaaagaaagctgaaa

SEQ ID NO: 1344616 - DNA, 15 bp, Homo sapiens
taaaagaaagctgaa

SEQ ID NO: 1344617 - DNA, 15 bp, Homo sapiens
ttaaaagaaagctga

SEQ ID NO: 1344618 - DNA, 15 bp, Homo sapiens
attaaaagaaagctg

SEQ ID NO: 1344619 - DNA, 15 bp, Homo sapiens
gattaaaagaaagct

SEQ ID NO: 1344620 - DNA, 15 bp, Homo sapiens
tgattaaaagaaagc

SEQ ID NO: 1344621 - DNA, 15 bp, Homo sapiens
ttgattaaaagaaag

SEQ ID NO: 1344622 - DNA, 15 bp, Homo sapiens
tttgattaaaagaaa

SEQ ID NO: 1344623 - DNA, 15 bp, Homo sapiens
gtttgattaaaagaa

SEQ ID NO: 1344624 - DNA, 15 bp, Homo sapiens
ggtttgattaaaaga

SEQ ID NO: 1344625 - DNA, 15 bp, Homo sapiens
aggtttgattaaaag

SEQ ID NO: 1344626 - DNA, 15 bp, Homo sapiens
gaggtttgattaaaa

SEQ ID NO: 1344627 - DNA, 15 bp, Homo sapiens
tgaggtttgattaaa

SEQ ID NO: 1344628 - DNA, 15 bp, Homo sapiens
ctgaggtttgattaa

SEQ ID NO: 1344629 - DNA, 15 bp, Homo sapiens
tctgaggtttgatta

SEQ ID NO: 1344630 - DNA, 15 bp, Homo sapiens
ctctgaggtttgatt

SEQ ID NO: 1344631 - DNA, 15 bp, Homo sapiens
tctctgaggtttgat

SEQ ID NO: 1344632 - DNA, 15 bp, Homo sapiens
ttctctgaggtttga

SEQ ID NO: 1344633 - DNA, 15 bp, Homo sapiens
attctctgaggtttg

SEQ ID NO: 1344634 - DNA, 15 bp, Homo sapiens
aattctctgaggttt

SEQ ID NO: 1344635 - DNA, 15 bp, Homo sapiens
taattctctgaggtt

SEQ ID NO: 1344636 - DNA, 15 bp, Homo sapiens
ttaattctctgaggt

SEQ ID NO: 1344637 - DNA, 15 bp, Homo sapiens
tttaattctctgagg

SEQ ID NO: 1344638 - DNA, 15 bp, Homo sapiens
atttaattctctgag

SEQ ID NO: 1344639 - DNA, 15 bp, Homo sapiens
tatttaattctctga

SEQ ID NO: 1344640 - DNA, 15 bp, Homo sapiens
ttatttaattctctg

SEQ ID NO: 1344641 - DNA, 15 bp, Homo sapiens
tttatttaattctct

SEQ ID NO: 1344642 - DNA, 15 bp, Homo sapiens
atttatttaattctc

SEQ ID NO: 1344643 - DNA, 15 bp, Homo sapiens
tatttatttaattct

SEQ ID NO: 1344644 - DNA, 15 bp, Homo sapiens
ttatttatttaattc

SEQ ID NO: 1344645 - DNA, 15 bp, Homo sapiens
tttatttatttaatt

SEQ ID NO: 1344646 - DNA, 15 bp, Homo sapiens
atttatttatttaat

SEQ ID NO: 1344647 - DNA, 15 bp, Homo sapiens
gttatttatttattt

SEQ ID NO: 1344648 - DNA, 15 bp, Homo sapiens
tgttatttatttatt

SEQ ID NO: 1344649 - DNA, 15 bp, Homo sapiens
ttgttatttatttat

SEQ ID NO: 1344650 - DNA, 15 bp, Homo sapiens
tttgttatttattta

SEQ ID NO: 1344651 - DNA, 15 bp, Homo sapiens
ttttgttatttattt

SEQ ID NO: 1344652 - DNA, 15 bp, Homo sapiens
gttttgttatttatt

SEQ ID NO: 1344653 - DNA, 15 bp, Homo sapiens
tgttttgttatttat

SEQ ID NO: 1344654 - DNA, 15 bp, Homo sapiens
ttgttttgttattta

SEQ ID NO: 1344655 - DNA, 15 bp, Homo sapiens
tttgttttgttattt

SEQ ID NO: 1344656 - DNA, 15 bp, Homo sapiens
gtttgttttgttatt

SEQ ID NO: 1344657 - DNA, 15 bp, Homo sapiens
tgtttgttttgttat

SEQ ID NO: 1344658 - DNA, 15 bp, Homo sapiens
ttgtttgttttgtta

SEQ ID NO: 1344659 - DNA, 15 bp, Homo sapiens
aattttttgtttgtt

SEQ ID NO: 1344660 - DNA, 15 bp, Homo sapiens
aaattttttgtttgt

SEQ ID NO: 1344661 - DNA, 15 bp, Homo sapiens
caaattttttgtttg

SEQ ID NO: 1344662 - DNA, 15 bp, Homo sapiens
acaaattttttgttt

SEQ ID NO: 1344663 - DNA, 15 bp, Homo sapiens
aacaaattttttgtt

SEQ ID NO: 1344664 - DNA, 15 bp, Homo sapiens
taacaaattttttgt

SEQ ID NO: 1344665 - DNA, 15 bp, Homo sapiens
gtaacaaattttttg

SEQ ID NO: 1344666 - DNA, 15 bp, Homo sapiens
agtaacaaatttttt

SEQ ID NO: 1344667 - DNA, 15 bp, Homo sapiens
cagtaacaaattttt

SEQ ID NO: 1344668 - DNA, 15 bp, Homo sapiens
ccagtaacaaatttt

SEQ ID NO: 1344669 - DNA, 15 bp, Homo sapiens
cccagtaacaaattt

SEQ ID NO: 1344670 - DNA, 15 bp, Homo sapiens
acccagtaacaaatt

SEQ ID NO: 1344671 - DNA, 15 bp, Homo sapiens
tacccagtaacaaat

SEQ ID NO: 1344672 - DNA, 15 bp, Homo sapiens
ttacccagtaacaaa

SEQ ID NO: 1344673 - DNA, 15 bp, Homo sapiens
attacccagtaacaa

SEQ ID NO: 1344674 - DNA, 15 bp, Homo sapiens
aattacccagtaaca

SEQ ID NO: 1344675 - DNA, 15 bp, Homo sapiens
aaattacccagtaac

SEQ ID NO: 1344676 - DNA, 15 bp, Homo sapiens
aaaattacccagtaa

SEQ ID NO: 1344677 - DNA, 15 bp, Homo sapiens
aaaaattacccagta

SEQ ID NO: 1344678 - DNA, 15 bp, Homo sapiens
aaaaaattacccagt

SEQ ID NO: 1344679 - DNA, 15 bp, Homo sapiens
aaaaaaattacccag

SEQ ID NO: 1344680 - DNA, 15 bp, Homo sapiens
aaaaaaaattaccca

SEQ ID NO: 1344681 - DNA, 15 bp, Homo sapiens
aaaaaaaaaaattac

SEQ ID NO: 1344682 - DNA, 15 bp, Homo sapiens
ggcaaaaaaaaaaaa

SEQ ID NO: 1344683 - DNA, 15 bp, Homo sapiens
aggcaaaaaaaaaaa

SEQ ID NO: 1344684 - DNA, 15 bp, Homo sapiens
aaggcaaaaaaaaaa

SEQ ID NO: 1344685 - DNA, 15 bp, Homo sapiens
aaaggcaaaaaaaaa

SEQ ID NO: 1344686 - DNA, 15 bp, Homo sapiens
aaaaggcaaaaaaaa

SEQ ID NO: 1344687 - DNA, 15 bp, Homo sapiens
gaaaaaggcaaaaaa

SEQ ID NO: 1344688 - DNA, 15 bp, Homo sapiens
agaaaaaggcaaaaa

SEQ ID NO: 1344689 - DNA, 15 bp, Homo sapiens
cagaaaaaggcaaaa

SEQ ID NO: 1344690 - DNA, 15 bp, Homo sapiens
ccagaaaaaggcaaa

SEQ ID NO: 1344691 - DNA, 15 bp, Homo sapiens
tccagaaaaaggcaa

SEQ ID NO: 1344692 - DNA, 15 bp, Homo sapiens
atccagaaaaaggca

SEQ ID NO: 1344693 - DNA, 15 bp, Homo sapiens
aatccagaaaaaggc

SEQ ID NO: 1344694 - DNA, 15 bp, Homo sapiens
caatccagaaaaagg

SEQ ID NO: 1344695 - DNA, 15 bp, Homo sapiens
tcaatccagaaaaag

SEQ ID NO: 1344696 - DNA, 15 bp, Homo sapiens
atcaatccagaaaaa

SEQ ID NO: 1344697 - DNA, 15 bp, Homo sapiens
tatcaatccagaaaa

SEQ ID NO: 1344698 - DNA, 15 bp, Homo sapiens
gtatcaatccagaaa

SEQ ID NO: 1344699 - DNA, 15 bp, Homo sapiens
ggtatcaatccagaa

SEQ ID NO: 1344700 - DNA, 15 bp, Homo sapiens
gggtatcaatccaga

SEQ ID NO: 1344701 - DNA, 15 bp, Homo sapiens
tgggtatcaatccag

SEQ ID NO: 1344702 - DNA, 15 bp, Homo sapiens
ttgggtatcaatcca

SEQ ID NO: 1344703 - DNA, 15 bp, Homo sapiens
gttgggtatcaatcc

SEQ ID NO: 1344704 - DNA, 15 bp, Homo sapiens
ggttgggtatcaatc

SEQ ID NO: 1344705 - DNA, 15 bp, Homo sapiens
gggttgggtatcaat

SEQ ID NO: 1344706 - DNA, 15 bp, Homo sapiens
tgggttgggtatcaa

SEQ ID NO: 1344707 - DNA, 15 bp, Homo sapiens
atgggttgggtatca

SEQ ID NO: 1344708 - DNA, 15 bp, Homo sapiens
catgggttgggtatc

SEQ ID NO: 1344709 - DNA, 15 bp, Homo sapiens
tcatgggttgggtat

SEQ ID NO: 1344710 - DNA, 15 bp, Homo sapiens
ttcatgggttgggta

SEQ ID NO: 1344711 - DNA, 15 bp, Homo sapiens
gttcatgggttgggt

SEQ ID NO: 1344712 - DNA, 15 bp, Homo sapiens
tgttcatgggttggg

SEQ ID NO: 1344713 - DNA, 15 bp, Homo sapiens
ctgttcatgggttgg

SEQ ID NO: 1344714 - DNA, 15 bp, Homo sapiens
gctgttcatgggttg

SEQ ID NO: 1344715 - DNA, 15 bp, Homo sapiens
agctgttcatgggtt

SEQ ID NO: 1344716 - DNA, 15 bp, Homo sapiens
gagctgttcatgggt

SEQ ID NO: 1344717 - DNA, 15 bp, Homo sapiens
tgagctgttcatggg

SEQ ID NO: 1344718 - DNA, 15 bp, Homo sapiens
ttgagctgttcatgg

SEQ ID NO: 1344719 - DNA, 15 bp, Homo sapiens
gttgagctgttcatg

SEQ ID NO: 1344720 - DNA, 15 bp, Homo sapiens
agttgagctgttcat

SEQ ID NO: 1344721 - DNA, 15 bp, Homo sapiens
aagttgagctgttca

SEQ ID NO: 1344722 - DNA, 15 bp, Homo sapiens
taagttgagctgttc

SEQ ID NO: 1344723 - DNA, 15 bp, Homo sapiens
ttaagttgagctgtt

SEQ ID NO: 1344724 - DNA, 15 bp, Homo sapiens
attaagttgagctgt

SEQ ID NO: 1344725 - DNA, 15 bp, Homo sapiens
tattaagttgagctg

SEQ ID NO: 1344726 - DNA, 15 bp, Homo sapiens
ttattaagttgagct

SEQ ID NO: 1344727 - DNA, 15 bp, Homo sapiens
attattaagttgagc

SEQ ID NO: 1344728 - DNA, 15 bp, Homo sapiens
tattattaagttgag

SEQ ID NO: 1344729 - DNA, 15 bp, Homo sapiens
ttattattaagttga

SEQ ID NO: 1344730 - DNA, 15 bp, Homo sapiens
tttattattaagttg

SEQ ID NO: 1344731 - DNA, 15 bp, Homo sapiens
ttttattattaagtt

SEQ ID NO: 1344732 - DNA, 15 bp, Homo sapiens
cttttattattaagt

SEQ ID NO: 1344733 - DNA, 15 bp, Homo sapiens
acttttattattaag

SEQ ID NO: 1344734 - DNA, 15 bp, Homo sapiens
aacttttattattaa

SEQ ID NO: 1344735 - DNA, 15 bp, Homo sapiens
aaacttttattatta

SEQ ID NO: 1344736 - DNA, 15 bp, Homo sapiens
gaaacttttattatt

SEQ ID NO: 1344737 - DNA, 15 bp, Homo sapiens
agaaacttttattat

SEQ ID NO: 1344738 - DNA, 15 bp, Homo sapiens
gagaaacttttatta

SEQ ID NO: 1344739 - DNA, 15 bp, Homo sapiens
tgagaaacttttatt

SEQ ID NO: 1344740 - DNA, 15 bp, Homo sapiens
atgagaaacttttat

SEQ ID NO: 1344741 - DNA, 15 bp, Homo sapiens
aatgagaaactttta

SEQ ID NO: 1344742 - DNA, 15 bp, Homo sapiens
caatgagaaactttt

SEQ ID NO: 1344743 - DNA, 15 bp, Homo sapiens
acaatgagaaacttt

SEQ ID NO: 1344744 - DNA, 15 bp, Homo sapiens
aacaatgagaaactt

SEQ ID NO: 1344745 - DNA, 15 bp, Homo sapiens
caacaatgagaaact

SEQ ID NO: 1344746 - DNA, 15 bp, Homo sapiens
gcaacaatgagaaac

SEQ ID NO: 1344747 - DNA, 15 bp, Homo sapiens
ggcaacaatgagaaa

SEQ ID NO: 1344748 - DNA, 15 bp, Homo sapiens
aggcaacaatgagaa

SEQ ID NO: 1344749 - DNA, 15 bp, Homo sapiens
caggcaacaatgaga

SEQ ID NO: 1344750 - DNA, 15 bp, Homo sapiens
ccaggcaacaatgag

SEQ ID NO: 1344751 - DNA, 15 bp, Homo sapiens
cccaggcaacaatga

SEQ ID NO: 1344752 - DNA, 15 bp, Homo sapiens
tcccaggcaacaatg

SEQ ID NO: 1344753 - DNA, 15 bp, Homo sapiens
atcccaggcaacaat

SEQ ID NO: 1344754 - DNA, 15 bp, Homo sapiens
aatcccaggcaacaa

SEQ ID NO: 1344755 - DNA, 15 bp, Homo sapiens
aaatcccaggcaaca

SEQ ID NO: 1344756 - DNA, 15 bp, Homo sapiens
aaaatcccaggcaac

SEQ ID NO: 1344757 - DNA, 15 bp, Homo sapiens
aaaaatcccaggcaa

SEQ ID NO: 1344758 - DNA, 15 bp, Homo sapiens
caaaaatcccaggca

SEQ ID NO: 1344759 - DNA, 15 bp, Homo sapiens
tcaaaaatcccaggc

SEQ ID NO: 1344760 - DNA, 15 bp, Homo sapiens
ttcaaaaatcccagg

SEQ ID NO: 1344761 - DNA, 15 bp, Homo sapiens
tttcaaaaatcccag

SEQ ID NO: 1344762 - DNA, 15 bp, Homo sapiens
ttttcaaaaatccca

SEQ ID NO: 1344763 - DNA, 15 bp, Homo sapiens
attttcaaaaatccc

SEQ ID NO: 1344764 - DNA, 15 bp, Homo sapiens
tattttcaaaaatcc

SEQ ID NO: 1344765 - DNA, 15 bp, Homo sapiens
gtattttcaaaaatc

SEQ ID NO: 1344766 - DNA, 15 bp, Homo sapiens
tgtattttcaaaaat

SEQ ID NO: 1344767 - DNA, 15 bp, Homo sapiens
gtgtattttcaaaaa

SEQ ID NO: 1344768 - DNA, 15 bp, Homo sapiens
tgtgtattttcaaaa

SEQ ID NO: 1344769 - DNA, 15 bp, Homo sapiens
ttgtgtattttcaaa

SEQ ID NO: 1344770 - DNA, 15 bp, Homo sapiens
tttgtgtattttcaa

SEQ ID NO: 1344771 - DNA, 15 bp, Homo sapiens
atttgtgtattttca

SEQ ID NO: 1344772 - DNA, 15 bp, Homo sapiens
aatttgtgtattttc

SEQ ID NO: 1344773 - DNA, 15 bp, Homo sapiens
aaatttgtgtatttt

SEQ ID NO: 1344774 - DNA, 15 bp, Homo sapiens
caaatttgtgtattt

SEQ ID NO: 1344775 - DNA, 15 bp, Homo sapiens
acaaatttgtgtatt

SEQ ID NO: 1344776 - DNA, 15 bp, Homo sapiens
aacaaatttgtgtat

SEQ ID NO: 1344777 - DNA, 15 bp, Homo sapiens
aaacaaatttgtgta

SEQ ID NO: 1344778 - DNA, 15 bp, Homo sapiens
aaaacaaatttgtgt

SEQ ID NO: 1344779 - DNA, 15 bp, Homo sapiens
aaaaacaaatttgtg

SEQ ID NO: 1344780 - DNA, 15 bp, Homo sapiens
aaaaaacaaatttgt

SEQ ID NO: 1344781 - DNA, 15 bp, Homo sapiens
caaaaaacaaatttg

SEQ ID NO: 1344782 - DNA, 15 bp, Homo sapiens
acaaaaaacaaattt

SEQ ID NO: 1344783 - DNA, 15 bp, Homo sapiens
tacaaaaaacaaatt

SEQ ID NO: 1344784 - DNA, 15 bp, Homo sapiens
ctacaaaaaacaaat

SEQ ID NO: 1344785 - DNA, 15 bp, Homo sapiens
gctacaaaaaacaaa

SEQ ID NO: 1344786 - DNA, 15 bp, Homo sapiens
agctacaaaaaacaa

SEQ ID NO: 1344787 - DNA, 15 bp, Homo sapiens
cagctacaaaaaaca

SEQ ID NO: 1344788 - DNA, 15 bp, Homo sapiens
gcagctacaaaaaac

SEQ ID NO: 1344789 - DNA, 15 bp, Homo sapiens
tgcagctacaaaaaa

SEQ ID NO: 1344790 - DNA, 15 bp, Homo sapiens
ttgcagctacaaaaa

SEQ ID NO: 1344791 - DNA, 15 bp, Homo sapiens
tttgcagctacaaaa

SEQ ID NO: 1344792 - DNA, 15 bp, Homo sapiens
ttttgcagctacaaa

SEQ ID NO: 1344793 - DNA, 15 bp, Homo sapiens
attttgcagctacaa

SEQ ID NO: 1344794 - DNA, 15 bp, Homo sapiens
tattttgcagctaca

SEQ ID NO: 1344795 - DNA, 15 bp, Homo sapiens
atattttgcagctac

SEQ ID NO: 1344796 - DNA, 15 bp, Homo sapiens
gatattttgcagcta

SEQ ID NO: 1344797 - DNA, 15 bp, Homo sapiens
agatattttgcagct

SEQ ID NO: 1344798 - DNA, 15 bp, Homo sapiens
cagatattttgcagc

SEQ ID NO: 1344799 - DNA, 15 bp, Homo sapiens
acagatattttgcag

SEQ ID NO: 1344800 - DNA, 15 bp, Homo sapiens
tacagatattttgca

SEQ ID NO: 1344801 - DNA, 15 bp, Homo sapiens
gtacagatattttgc

SEQ ID NO: 1344802 - DNA, 15 bp, Homo sapiens
agtacagatattttg

SEQ ID NO: 1344803 - DNA, 15 bp, Homo sapiens
tagtacagatatttt

SEQ ID NO: 1344804 - DNA, 15 bp, Homo sapiens
ttagtacagatattt

SEQ ID NO: 1344805 - DNA, 15 bp, Homo sapiens
cttagtacagatatt

SEQ ID NO: 1344806 - DNA, 15 bp, Homo sapiens
tcttagtacagatat

SEQ ID NO: 1344807 - DNA, 15 bp, Homo sapiens
atcttagtacagata

SEQ ID NO: 1344808 - DNA, 15 bp, Homo sapiens
catcttagtacagat

SEQ ID NO: 1344809 - DNA, 15 bp, Homo sapiens
acatcttagtacaga

SEQ ID NO: 1344810 - DNA, 15 bp, Homo sapiens
gacatcttagtacag

SEQ ID NO: 1344811 - DNA, 15 bp, Homo sapiens
agacatcttagtaca

SEQ ID NO: 1344812 - DNA, 15 bp, Homo sapiens
tagacatcttagtac

SEQ ID NO: 1344813 - DNA, 15 bp, Homo sapiens
atagacatcttagta

SEQ ID NO: 1344814 - DNA, 15 bp, Homo sapiens
tatagacatcttagt

SEQ ID NO: 1344815 - DNA, 15 bp, Homo sapiens
gtatagacatcttag

SEQ ID NO: 1344816 - DNA, 15 bp, Homo sapiens
agtatagacatctta

SEQ ID NO: 1344817 - DNA, 15 bp, Homo sapiens
tagtatagacatctt

SEQ ID NO: 1344818 - DNA, 15 bp, Homo sapiens
ttagtatagacatct

SEQ ID NO: 1344819 - DNA, 15 bp, Homo sapiens
tttagtatagacatc

SEQ ID NO: 1344820 - DNA, 15 bp, Homo sapiens
atttagtatagacat

SEQ ID NO: 1344821 - DNA, 15 bp, Homo sapiens
catttagtatagaca

SEQ ID NO: 1344822 - DNA, 15 bp, Homo sapiens
ccatttagtatagac

SEQ ID NO: 1344823 - DNA, 15 bp, Homo sapiens
accatttagtataga

SEQ ID NO: 1344824 - DNA, 15 bp, Homo sapiens
aaccatttagtatag

SEQ ID NO: 1344825 - DNA, 15 bp, Homo sapiens
caaccatttagtata

SEQ ID NO: 1344826 - DNA, 15 bp, Homo sapiens
tcaaccatttagtat

SEQ ID NO: 1344827 - DNA, 15 bp, Homo sapiens
ttcaaccatttagta

SEQ ID NO: 1344828 - DNA, 15 bp, Homo sapiens
attcaaccatttagt

SEQ ID NO: 1344829 - DNA, 15 bp, Homo sapiens
aattcaaccatttag

SEQ ID NO: 1344830 - DNA, 15 bp, Homo sapiens
gaattcaaccattta

SEQ ID NO: 1344831 - DNA, 15 bp, Homo sapiens
ggaattcaaccattt

SEQ ID NO: 1344832 - DNA, 15 bp, Homo sapiens
tggaattcaaccatt

SEQ ID NO: 1344833 - DNA, 15 bp, Homo sapiens
gtggaattcaaccat

SEQ ID NO: 1344834 - DNA, 15 bp, Homo sapiens
agtggaattcaacca

SEQ ID NO: 1344835 - DNA, 15 bp, Homo sapiens
cagtggaattcaacc

SEQ ID NO: 1344836 - DNA, 15 bp, Homo sapiens
acagtggaattcaac

SEQ ID NO: 1344837 - DNA, 15 bp, Homo sapiens
cacagtggaattcaa

SEQ ID NO: 1344838 - DNA, 15 bp, Homo sapiens
ccacagtggaattca

SEQ ID NO: 1344839 - DNA, 15 bp, Homo sapiens
tccacagtggaattc

SEQ ID NO: 1344840 - DNA, 15 bp, Homo sapiens
ttccacagtggaatt

SEQ ID NO: 1344841 - DNA, 15 bp, Homo sapiens
tttccacagtggaat

SEQ ID NO: 1344842 - DNA, 15 bp, Homo sapiens
ttttccacagtggaa

SEQ ID NO: 1344843 - DNA, 15 bp, Homo sapiens
attttccacagtgga

SEQ ID NO: 1344844 - DNA, 15 bp, Homo sapiens
cattttccacagtgg

SEQ ID NO: 1344845 - DNA, 15 bp, Homo sapiens
acattttccacagtg

SEQ ID NO: 1344846 - DNA, 15 bp, Homo sapiens
cacattttccacagt

SEQ ID NO: 1344847 - DNA, 15 bp, Homo sapiens
acacattttccacag

SEQ ID NO: 1344848 - DNA, 15 bp, Homo sapiens
tacacattttccaca

SEQ ID NO: 1344849 - DNA, 15 bp, Homo sapiens
ttacacattttccac

SEQ ID NO: 1344850 - DNA, 15 bp, Homo sapiens
attacacattttcca

SEQ ID NO: 1344851 - DNA, 15 bp, Homo sapiens
cattacacattttcc

SEQ ID NO: 1344852 - DNA, 15 bp, Homo sapiens
acattacacattttc

SEQ ID NO: 1344853 - DNA, 15 bp, Homo sapiens
aacattacacatttt

SEQ ID NO: 1344854 - DNA, 15 bp, Homo sapiens
caacattacacattt

SEQ ID NO: 1344855 - DNA, 15 bp, Homo sapiens
gcaacattacacatt

SEQ ID NO: 1344856 - DNA, 15 bp, Homo sapiens
tgcaacattacacat

SEQ ID NO: 1344857 - DNA, 15 bp, Homo sapiens
atgcaacattacaca

SEQ ID NO: 1344858 - DNA, 15 bp, Homo sapiens
tatgcaacattacac

SEQ ID NO: 1344859 - DNA, 15 bp, Homo sapiens
ttatgcaacattaca

SEQ ID NO: 1344860 - DNA, 15 bp, Homo sapiens
tttatgcaacattac

SEQ ID NO: 1344861 - DNA, 15 bp, Homo sapiens
ctttatgcaacatta

SEQ ID NO: 1344862 - DNA, 15 bp, Homo sapiens
actttatgcaacatt

SEQ ID NO: 1344863 - DNA, 15 bp, Homo sapiens
gactttatgcaacat

SEQ ID NO: 1344864 - DNA, 15 bp, Homo sapiens
tgactttatgcaaca

SEQ ID NO: 1344865 - DNA, 15 bp, Homo sapiens
ttgactttatgcaac

SEQ ID NO: 1344866 - DNA, 15 bp, Homo sapiens
tttgactttatgcaa

SEQ ID NO: 1344867 - DNA, 15 bp, Homo sapiens
atttgactttatgca

SEQ ID NO: 1344868 - DNA, 15 bp, Homo sapiens
aatttgactttatgc

SEQ ID NO: 1344869 - DNA, 15 bp, Homo sapiens
aaatttgactttatg

SEQ ID NO: 1344870 - DNA, 15 bp, Homo sapiens
aaaatttgactttat

SEQ ID NO: 1344871 - DNA, 15 bp, Homo sapiens
aaaaatttgacttta

SEQ ID NO: 1344872 - DNA, 15 bp, Homo sapiens
gaaaaatttgacttt

SEQ ID NO: 1344873 - DNA, 15 bp, Homo sapiens
agaaaaatttgactt

SEQ ID NO: 1344874 - DNA, 15 bp, Homo sapiens
gagaaaaatttgact

SEQ ID NO: 1344875 - DNA, 15 bp, Homo sapiens
ggagaaaaatttgac

SEQ ID NO: 1344876 - DNA, 15 bp, Homo sapiens
aggagaaaaatttga

SEQ ID NO: 1344877 - DNA, 15 bp, Homo sapiens
aaggagaaaaatttg

SEQ ID NO: 1344878 - DNA, 15 bp, Homo sapiens
gaaggagaaaaattt

SEQ ID NO: 1344879 - DNA, 15 bp, Homo sapiens
ggaaggagaaaaatt

SEQ ID NO: 1344880 - DNA, 15 bp, Homo sapiens
tggaaggagaaaaat

SEQ ID NO: 1344881 - DNA, 15 bp, Homo sapiens
ttggaaggagaaaaa

SEQ ID NO: 1344882 - DNA, 15 bp, Homo sapiens
gttggaaggagaaaa

SEQ ID NO: 1344883 - DNA, 15 bp, Homo sapiens
tgttggaaggagaaa

SEQ ID NO: 1344884 - DNA, 15 bp, Homo sapiens
atgttggaaggagaa

SEQ ID NO: 1344885 - DNA, 15 bp, Homo sapiens
tatgttggaaggaga

SEQ ID NO: 1344886 - DNA, 15 bp, Homo sapiens
gtatgttggaaggag

SEQ ID NO: 1344887 - DNA, 15 bp, Homo sapiens
agtatgttggaagga

SEQ ID NO: 1344888 - DNA, 15 bp, Homo sapiens
aagtatgttggaagg

SEQ ID NO: 1344889 - DNA, 15 bp, Homo sapiens
caagtatgttggaag

SEQ ID NO: 1344890 - DNA, 15 bp, Homo sapiens
acaagtatgttggaa

SEQ ID NO: 1344891 - DNA, 15 bp, Homo sapiens
aacaagtatgttgga

SEQ ID NO: 1344892 - DNA, 15 bp, Homo sapiens
caacaagtatgttgg

SEQ ID NO: 1344893 - DNA, 15 bp, Homo sapiens
tcaacaagtatgttg

SEQ ID NO: 1344894 - DNA, 15 bp, Homo sapiens
ctcaacaagtatgtt

SEQ ID NO: 1344895 - DNA, 15 bp, Homo sapiens
tctcaacaagtatgt

SEQ ID NO: 1344896 - DNA, 15 bp, Homo sapiens
gtctcaacaagtatg

SEQ ID NO: 1344897 - DNA, 15 bp, Homo sapiens
tgtctcaacaagtat

SEQ ID NO: 1344898 - DNA, 15 bp, Homo sapiens
ttgtctcaacaagta

SEQ ID NO: 1344899 - DNA, 15 bp, Homo sapiens
gttgtctcaacaagt

SEQ ID NO: 1344900 - DNA, 15 bp, Homo sapiens
tgttgtctcaacaag

SEQ ID NO: 1344901 - DNA, 15 bp, Homo sapiens
gtgttgtctcaacaa

SEQ ID NO: 1344902 - DNA, 15 bp, Homo sapiens
tgtgttgtctcaaca

SEQ ID NO: 1344903 - DNA, 15 bp, Homo sapiens
atgtgttgtctcaac

SEQ ID NO: 1344904 - DNA, 15 bp, Homo sapiens
aatgtgttgtctcaa

SEQ ID NO: 1344905 - DNA, 15 bp, Homo sapiens
taatgtgttgtctca

SEQ ID NO: 1344906 - DNA, 15 bp, Homo sapiens
ataatgtgttgtctc

SEQ ID NO: 1344907 - DNA, 15 bp, Homo sapiens
aataatgtgttgtct

SEQ ID NO: 1344908 - DNA, 15 bp, Homo sapiens
aaataatgtgttgtc

SEQ ID NO: 1344909 - DNA, 15 bp, Homo sapiens
taaataatgtgttgt

SEQ ID NO: 1344910 - DNA, 15 bp, Homo sapiens
ataaataatgtgttg

SEQ ID NO: 1344911 - DNA, 15 bp, Homo sapiens
gataaataatgtgtt

SEQ ID NO: 1344912 - DNA, 15 bp, Homo sapiens
tgataaataatgtgt

SEQ ID NO: 1344913 - DNA, 15 bp, Homo sapiens
ttgataaataatgtg

SEQ ID NO: 1344914 - DNA, 15 bp, Homo sapiens
cttgataaataatgt

SEQ ID NO: 1344915 - DNA, 15 bp, Homo sapiens
acttgataaataatg

SEQ ID NO: 1344916 - DNA, 15 bp, Homo sapiens
cacttgataaataat

SEQ ID NO: 1344917 - DNA, 15 bp, Homo sapiens
acacttgataaataa

SEQ ID NO: 1344918 - DNA, 15 bp, Homo sapiens
cacacttgataaata

SEQ ID NO: 1344919 - DNA, 15 bp, Homo sapiens
tcacacttgataaat

SEQ ID NO: 1344920 - DNA, 15 bp, Homo sapiens
atcacacttgataaa

SEQ ID NO: 1344921 - DNA, 15 bp, Homo sapiens
gatcacacttgataa

SEQ ID NO: 1344922 - DNA, 15 bp, Homo sapiens
ggatcacacttgata

SEQ ID NO: 1344923 - DNA, 15 bp, Homo sapiens
tggatcacacttgat

SEQ ID NO: 1344924 - DNA, 15 bp, Homo sapiens
atggatcacacttga

SEQ ID NO: 1344925 - DNA, 15 bp, Homo sapiens
aatggatcacacttg

SEQ ID NO: 1344926 - DNA, 15 bp, Homo sapiens
aaatggatcacactt

SEQ ID NO: 1344927 - DNA, 15 bp, Homo sapiens
caaatggatcacact

SEQ ID NO: 1344928 - DNA, 15 bp, Homo sapiens
tcaaatggatcacac

SEQ ID NO: 1344929 - DNA, 15 bp, Homo sapiens
gtcaaatggatcaca

SEQ ID NO: 1344930 - DNA, 15 bp, Homo sapiens
ggtcaaatggatcac

SEQ ID NO: 1344931 - DNA, 15 bp, Homo sapiens
aggtcaaatggatca

SEQ ID NO: 1344932 - DNA, 15 bp, Homo sapiens
gaggtcaaatggatc

SEQ ID NO: 1344933 - DNA, 15 bp, Homo sapiens
agaggtcaaatggat

SEQ ID NO: 1344934 - DNA, 15 bp, Homo sapiens
tagaggtcaaatgga

SEQ ID NO: 1344935 - DNA, 15 bp, Homo sapiens
atagaggtcaaatgg

SEQ ID NO: 1344936 - DNA, 15 bp, Homo sapiens
catagaggtcaaatg

SEQ ID NO: 1344937 - DNA, 15 bp, Homo sapiens
acatagaggtcaaat

SEQ ID NO: 1344938 - DNA, 15 bp, Homo sapiens
aacatagaggtcaaa

SEQ ID NO: 1344939 - DNA, 15 bp, Homo sapiens
taacatagaggtcaa

SEQ ID NO: 1344940 - DNA, 15 bp, Homo sapiens
ctaacatagaggtca

SEQ ID NO: 1344941 - DNA, 15 bp, Homo sapiens
actaacatagaggtc

SEQ ID NO: 1344942 - DNA, 15 bp, Homo sapiens
tactaacatagaggt

SEQ ID NO: 1344943 - DNA, 15 bp, Homo sapiens
ttactaacatagagg

SEQ ID NO: 1344944 - DNA, 15 bp, Homo sapiens
attactaacatagag

SEQ ID NO: 1344945 - DNA, 15 bp, Homo sapiens
aattactaacataga

SEQ ID NO: 1344946 - DNA, 15 bp, Homo sapiens
aaattactaacatag

SEQ ID NO: 1344947 - DNA, 15 bp, Homo sapiens
gaaattactaacata

SEQ ID NO: 1344948 - DNA, 15 bp, Homo sapiens
tgaaattactaacat

SEQ ID NO: 1344949 - DNA, 15 bp, Homo sapiens
atgaaattactaaca

SEQ ID NO: 1344950 - DNA, 15 bp, Homo sapiens
tatgaaattactaac

SEQ ID NO: 1344951 - DNA, 15 bp, Homo sapiens
ttatgaaattactaa

SEQ ID NO: 1344952 - DNA, 15 bp, Homo sapiens
attatgaaattacta

SEQ ID NO: 1344953 - DNA, 15 bp, Homo sapiens
tattatgaaattact

SEQ ID NO: 1344954 - DNA, 15 bp, Homo sapiens
atattatgaaattac

SEQ ID NO: 1344955 - DNA, 15 bp, Homo sapiens
gatattatgaaatta

SEQ ID NO: 1344956 - DNA, 15 bp, Homo sapiens
agatattatgaaatt

SEQ ID NO: 1344957 - DNA, 15 bp, Homo sapiens
aagatattatgaaat

SEQ ID NO: 1344958 - DNA, 15 bp, Homo sapiens
caagatattatgaaa

SEQ ID NO: 1344959 - DNA, 15 bp, Homo sapiens
tcaagatattatgaa

SEQ ID NO: 1344960 - DNA, 15 bp, Homo sapiens
ttcaagatattatga

SEQ ID NO: 1344961 - DNA, 15 bp, Homo sapiens
attcaagatattatg

SEQ ID NO: 1344962 - DNA, 15 bp, Homo sapiens
aattcaagatattat

SEQ ID NO: 1344963 - DNA, 15 bp, Homo sapiens
caattcaagatatta

SEQ ID NO: 1344964 - DNA, 15 bp, Homo sapiens
ccaattcaagatatt

SEQ ID NO: 1344965 - DNA, 15 bp, Homo sapiens
cccaattcaagatat

SEQ ID NO: 1344966 - DNA, 15 bp, Homo sapiens
ccccaattcaagata

SEQ ID NO: 1344967 - DNA, 15 bp, Homo sapiens
cccccaattcaagat

SEQ ID NO: 1344968 - DNA, 15 bp, Homo sapiens
gcccccaattcaaga

SEQ ID NO: 1344969 - DNA, 15 bp, Homo sapiens
agcccccaattcaag

SEQ ID NO: 1344970 - DNA, 15 bp, Homo sapiens
aagcccccaattcaa

SEQ ID NO: 1344971 - DNA, 15 bp, Homo sapiens
aaagcccccaattca

SEQ ID NO: 1344972 - DNA, 15 bp, Homo sapiens
aaaagcccccaattc

SEQ ID NO: 1344973 - DNA, 15 bp, Homo sapiens
taaaagcccccaatt

SEQ ID NO: 1344974 - DNA, 15 bp, Homo sapiens
ctaaaagcccccaat

SEQ ID NO: 1344975 - DNA, 15 bp, Homo sapiens
tctaaaagcccccaa

SEQ ID NO: 1344976 - DNA, 15 bp, Homo sapiens
ttctaaaagccccca

SEQ ID NO: 1344977 - DNA, 15 bp, Homo sapiens
tttctaaaagccccc

SEQ ID NO: 1344978 - DNA, 15 bp, Homo sapiens
ctttctaaaagcccc

SEQ ID NO: 1344979 - DNA, 15 bp, Homo sapiens
tctttctaaaagccc

SEQ ID NO: 1344980 - DNA, 15 bp, Homo sapiens
atctttctaaaagcc

SEQ ID NO: 1344981 - DNA, 15 bp, Homo sapiens
aatctttctaaaagc

SEQ ID NO: 1344982 - DNA, 15 bp, Homo sapiens
gaatctttctaaaag

SEQ ID NO: 1344983 - DNA, 15 bp, Homo sapiens
tgaatctttctaaaa

SEQ ID NO: 1344984 - DNA, 15 bp, Homo sapiens
ctgaatctttctaaa

SEQ ID NO: 1344985 - DNA, 15 bp, Homo sapiens
actgaatctttctaa

SEQ ID NO: 1344986 - DNA, 15 bp, Homo sapiens
tactgaatctttcta

SEQ ID NO: 1344987 - DNA, 15 bp, Homo sapiens
ctactgaatctttct

SEQ ID NO: 1344988 - DNA, 15 bp, Homo sapiens
gctactgaatctttc

SEQ ID NO: 1344989 - DNA, 15 bp, Homo sapiens
agctactgaatcttt

SEQ ID NO: 1344990 - DNA, 15 bp, Homo sapiens
aagctactgaatctt

SEQ ID NO: 1344991 - DNA, 15 bp, Homo sapiens
aaagctactgaatct

SEQ ID NO: 1344992 - DNA, 15 bp, Homo sapiens
gaaagctactgaatc

SEQ ID NO: 1344993 - DNA, 15 bp, Homo sapiens
agaaagctactgaat

SEQ ID NO: 1344994 - DNA, 15 bp, Homo sapiens
tagaaagctactgaa

SEQ ID NO: 1344995 - DNA, 15 bp, Homo sapiens
atagaaagctactga

SEQ ID NO: 1344996 - DNA, 15 bp, Homo sapiens
aatagaaagctactg

SEQ ID NO: 1344997 - DNA, 15 bp, Homo sapiens
aaatagaaagctact

SEQ ID NO: 1344998 - DNA, 15 bp, Homo sapiens
aaaatagaaagctac

SEQ ID NO: 1344999 - DNA, 15 bp, Homo sapiens
aaaaatagaaagcta

SEQ ID NO: 1345000 - DNA, 15 bp, Homo sapiens
aaaaaatagaaagct

SEQ ID NO: 1345001 - DNA, 15 bp, Homo sapiens
gaaaaaatagaaagc

SEQ ID NO: 1345002 - DNA, 15 bp, Homo sapiens
agaaaaaatagaaag

SEQ ID NO: 1345003 - DNA, 15 bp, Homo sapiens
aagaaaaaatagaaa

SEQ ID NO: 1345004 - DNA, 15 bp, Homo sapiens
aaagaaaaaatagaa

SEQ ID NO: 1345005 - DNA, 15 bp, Homo sapiens
aaaagaaaaaataga

SEQ ID NO: 1345006 - DNA, 15 bp, Homo sapiens
aaaaagaaaaaatag

SEQ ID NO: 1345007 - DNA, 15 bp, Homo sapiens
aaaaaagaaaaaata

SEQ ID NO: 1345008 - DNA, 15 bp, Homo sapiens
gaaaaaaagaaaaaa

SEQ ID NO: 1345009 - DNA, 15 bp, Homo sapiens
agaaaaaaagaaaaa

SEQ ID NO: 1345010 - DNA, 15 bp, Homo sapiens
aagaaaaaaagaaaa

SEQ ID NO: 1345011 - DNA, 15 bp, Homo sapiens
aaagaaaaaaagaaa

SEQ ID NO: 1345012 - DNA, 15 bp, Homo sapiens
gaaagaaaaaaagaa

SEQ ID NO: 1345013 - DNA, 15 bp, Homo sapiens
agaaagaaaaaaaga

SEQ ID NO: 1345014 - DNA, 15 bp, Homo sapiens
aagaaagaaaaaaag

SEQ ID NO: 1345015 - DNA, 15 bp, Homo sapiens
ccttttttaaaaaaa

SEQ ID NO: 1345016 - DNA, 15 bp, Homo sapiens
gccttttttaaaaaa

SEQ ID NO: 1345017 - DNA, 15 bp, Homo sapiens
tgccttttttaaaaa

SEQ ID NO: 1345018 - DNA, 15 bp, Homo sapiens
atgccttttttaaaa

SEQ ID NO: 1345019 - DNA, 15 bp, Homo sapiens
aatgccttttttaaa

SEQ ID NO: 1345020 - DNA, 15 bp, Homo sapiens
aaatgccttttttaa

SEQ ID NO: 1345021 - DNA, 15 bp, Homo sapiens
taaatgcctttttta

SEQ ID NO: 1345022 - DNA, 15 bp, Homo sapiens
ctaaatgcctttttt

SEQ ID NO: 1345023 - DNA, 15 bp, Homo sapiens
actaaatgccttttt

SEQ ID NO: 1345024 - DNA, 15 bp, Homo sapiens
aactaaatgcctttt

SEQ ID NO: 1345025 - DNA, 15 bp, Homo sapiens
aaactaaatgccttt

SEQ ID NO: 1345026 - DNA, 15 bp, Homo sapiens
taaactaaatgcctt

SEQ ID NO: 1345027 - DNA, 15 bp, Homo sapiens
ataaactaaatgcct

SEQ ID NO: 1345028 - DNA, 15 bp, Homo sapiens
aataaactaaatgcc

SEQ ID NO: 1345029 - DNA, 15 bp, Homo sapiens
gaataaactaaatgc

SEQ ID NO: 1345030 - DNA, 15 bp, Homo sapiens
agaataaactaaatg

SEQ ID NO: 1345031 - DNA, 15 bp, Homo sapiens
gagaataaactaaat

SEQ ID NO: 1345032 - DNA, 15 bp, Homo sapiens
ggagaataaactaaa

SEQ ID NO: 1345033 - DNA, 15 bp, Homo sapiens
aggagaataaactaa

SEQ ID NO: 1345034 - DNA, 15 bp, Homo sapiens
gaggagaataaacta

SEQ ID NO: 1345035 - DNA, 15 bp, Homo sapiens
tgaggagaataaact

SEQ ID NO: 1345036 - DNA, 15 bp, Homo sapiens
atgaggagaataaac

SEQ ID NO: 1345037 - DNA, 15 bp, Homo sapiens
gatgaggagaataaa

SEQ ID NO: 1345038 - DNA, 15 bp, Homo sapiens
tgatgaggagaataa

SEQ ID NO: 1345039 - DNA, 15 bp, Homo sapiens
ctgatgaggagaata

SEQ ID NO: 1345040 - DNA, 15 bp, Homo sapiens
actgatgaggagaat

SEQ ID NO: 1345041 - DNA, 15 bp, Homo sapiens
aactgatgaggagaa

SEQ ID NO: 1345042 - DNA, 15 bp, Homo sapiens
aaactgatgaggaga

SEQ ID NO: 1345043 - DNA, 15 bp, Homo sapiens
gaaactgatgaggag

SEQ ID NO: 1345044 - DNA, 15 bp, Homo sapiens
tgaaactgatgagga

SEQ ID NO: 1345045 - DNA, 15 bp, Homo sapiens
gtgaaactgatgagg

SEQ ID NO: 1345046 - DNA, 15 bp, Homo sapiens
agtgaaactgatgag

SEQ ID NO: 1345047 - DNA, 15 bp, Homo sapiens
aagtgaaactgatga

SEQ ID NO: 1345048 - DNA, 15 bp, Homo sapiens
taagtgaaactgatg

SEQ ID NO: 1345049 - DNA, 15 bp, Homo sapiens
ataagtgaaactgat

SEQ ID NO: 1345050 - DNA, 15 bp, Homo sapiens
tataagtgaaactga

SEQ ID NO: 1345051 - DNA, 15 bp, Homo sapiens
atataagtgaaactg

SEQ ID NO: 1345052 - DNA, 15 bp, Homo sapiens
aatataagtgaaact

SEQ ID NO: 1345053 - DNA, 15 bp, Homo sapiens
aaatataagtgaaac

SEQ ID NO: 1345054 - DNA, 15 bp, Homo sapiens
aaaatataagtgaaa

SEQ ID NO: 1345055 - DNA, 15 bp, Homo sapiens
gaaaatataagtgaa

SEQ ID NO: 1345056 - DNA, 15 bp, Homo sapiens
tgaaaatataagtga

SEQ ID NO: 1345057 - DNA, 15 bp, Homo sapiens
atgaaaatataagtg

SEQ ID NO: 1345058 - DNA, 15 bp, Homo sapiens
catgaaaatataagt

SEQ ID NO: 1345059 - DNA, 15 bp, Homo sapiens
ccatgaaaatataag

SEQ ID NO: 1345060 - DNA, 15 bp, Homo sapiens
accatgaaaatataa

SEQ ID NO: 1345061 - DNA, 15 bp, Homo sapiens
aaccatgaaaatata

SEQ ID NO: 1345062 - DNA, 15 bp, Homo sapiens
gaaccatgaaaatat

SEQ ID NO: 1345063 - DNA, 15 bp, Homo sapiens
tgaaccatgaaaata

SEQ ID NO: 1345064 - DNA, 15 bp, Homo sapiens
gtgaaccatgaaaat

SEQ ID NO: 1345065 - DNA, 15 bp, Homo sapiens
tgtgaaccatgaaaa

SEQ ID NO: 1345066 - DNA, 15 bp, Homo sapiens
gtgtgaaccatgaaa

SEQ ID NO: 1345067 - DNA, 15 bp, Homo sapiens
agtgtgaaccatgaa

SEQ ID NO: 1345068 - DNA, 15 bp, Homo sapiens
aagtgtgaaccatga

SEQ ID NO: 1345069 - DNA, 15 bp, Homo sapiens
caagtgtgaaccatg

SEQ ID NO: 1345070 - DNA, 15 bp, Homo sapiens
gcaagtgtgaaccat

SEQ ID NO: 1345071 - DNA, 15 bp, Homo sapiens
ggcaagtgtgaacca

SEQ ID NO: 1345072 - DNA, 15 bp, Homo sapiens
tggcaagtgtgaacc

SEQ ID NO: 1345073 - DNA, 15 bp, Homo sapiens
ttggcaagtgtgaac

SEQ ID NO: 1345074 - DNA, 15 bp, Homo sapiens
gttggcaagtgtgaa

SEQ ID NO: 1345075 - DNA, 15 bp, Homo sapiens
cgttggcaagtgtga

SEQ ID NO: 1345076 - DNA, 15 bp, Homo sapiens
gcgttggcaagtgtg

SEQ ID NO: 1345077 - DNA, 15 bp, Homo sapiens
ggcgttggcaagtgt

SEQ ID NO: 1345078 - DNA, 15 bp, Homo sapiens
cggcgttggcaagtg

SEQ ID NO: 1345079 - DNA, 15 bp, Homo sapiens
gcggcgttggcaagt

SEQ ID NO: 1345080 - DNA, 15 bp, Homo sapiens
agcggcgttggcaag

SEQ ID NO: 1345081 - DNA, 15 bp, Homo sapiens
gagcggcgttggcaa

SEQ ID NO: 1345082 - DNA, 15 bp, Homo sapiens
agagcggcgttggca

SEQ ID NO: 1345083 - DNA, 15 bp, Homo sapiens
aagagcggcgttggc

SEQ ID NO: 1345084 - DNA, 15 bp, Homo sapiens
gaagagcggcgttgg

SEQ ID NO: 1345085 - DNA, 15 bp, Homo sapiens
agaagagcggcgttg

SEQ ID NO: 1345086 - DNA, 15 bp, Homo sapiens
gagaagagcggcgtt

SEQ ID NO: 1345087 - DNA, 15 bp, Homo sapiens
tgagaagagcggcgt

SEQ ID NO: 1345088 - DNA, 15 bp, Homo sapiens
atgagaagagcggcg

SEQ ID NO: 1345089 - DNA, 15 bp, Homo sapiens
aatgagaagagcggc

SEQ ID NO: 1345090 - DNA, 15 bp, Homo sapiens
taatgagaagagcgg

SEQ ID NO: 1345091 - DNA, 15 bp, Homo sapiens
gtaatgagaagagcg

SEQ ID NO: 1345092 - DNA, 15 bp, Homo sapiens
tgtaatgagaagagc

SEQ ID NO: 1345093 - DNA, 15 bp, Homo sapiens
ctgtaatgagaagag

SEQ ID NO: 1345094 - DNA, 15 bp, Homo sapiens
actgtaatgagaaga

SEQ ID NO: 1345095 - DNA, 15 bp, Homo sapiens
tactgtaatgagaag

SEQ ID NO: 1345096 - DNA, 15 bp, Homo sapiens
ctactgtaatgagaa

SEQ ID NO: 1345097 - DNA, 15 bp, Homo sapiens
actactgtaatgaga

SEQ ID NO: 1345098 - DNA, 15 bp, Homo sapiens
aactactgtaatgag

SEQ ID NO: 1345099 - DNA, 15 bp, Homo sapiens
taactactgtaatga

SEQ ID NO: 1345100 - DNA, 15 bp, Homo sapiens
ttaactactgtaatg

SEQ ID NO: 1345101 - DNA, 15 bp, Homo sapiens
tttaactactgtaat

SEQ ID NO: 1345102 - DNA, 15 bp, Homo sapiens
atttaactactgtaa

SEQ ID NO: 1345103 - DNA, 15 bp, Homo sapiens
catttaactactgta

SEQ ID NO: 1345104 - DNA, 15 bp, Homo sapiens
acatttaactactgt

SEQ ID NO: 1345105 - DNA, 15 bp, Homo sapiens
cacatttaactactg

SEQ ID NO: 1345106 - DNA, 15 bp, Homo sapiens
gcacatttaactact

SEQ ID NO: 1345107 - DNA, 15 bp, Homo sapiens
tgcacatttaactac

SEQ ID NO: 1345108 - DNA, 15 bp, Homo sapiens
ttgcacatttaacta

SEQ ID NO: 1345109 - DNA, 15 bp, Homo sapiens
tttgcacatttaact

SEQ ID NO: 1345110 - DNA, 15 bp, Homo sapiens
gtttgcacatttaac

SEQ ID NO: 1345111 - DNA, 15 bp, Homo sapiens
agtttgcacatttaa

SEQ ID NO: 1345112 - DNA, 15 bp, Homo sapiens
gagtttgcacattta

SEQ ID NO: 1345113 - DNA, 15 bp, Homo sapiens
tgagtttgcacattt

SEQ ID NO: 1345114 - DNA, 15 bp, Homo sapiens
gtgagtttgcacatt

SEQ ID NO: 1345115 - DNA, 15 bp, Homo sapiens
agtgagtttgcacat

SEQ ID NO: 1345116 - DNA, 15 bp, Homo sapiens
aagtgagtttgcaca

SEQ ID NO: 1345117 - DNA, 15 bp, Homo sapiens
caagtgagtttgcac

SEQ ID NO: 1345118 - DNA, 15 bp, Homo sapiens
ccaagtgagtttgca

SEQ ID NO: 1345119 - DNA, 15 bp, Homo sapiens
cccaagtgagtttgc

SEQ ID NO: 1345120 - DNA, 15 bp, Homo sapiens
ccccaagtgagtttg

SEQ ID NO: 1345121 - DNA, 15 bp, Homo sapiens
cccccaagtgagttt

SEQ ID NO: 1345122 - DNA, 15 bp, Homo sapiens
gcccccaagtgagtt

SEQ ID NO: 1345123 - DNA, 15 bp, Homo sapiens
agcccccaagtgagt

SEQ ID NO: 1345124 - DNA, 15 bp, Homo sapiens
gagcccccaagtgag

SEQ ID NO: 1345125 - DNA, 15 bp, Homo sapiens
tgagcccccaagtga

SEQ ID NO: 1345126 - DNA, 15 bp, Homo sapiens
ctgagcccccaagtg

SEQ ID NO: 1345127 - DNA, 15 bp, Homo sapiens
cctgagcccccaagt

SEQ ID NO: 1345128 - DNA, 15 bp, Homo sapiens
ccctgagcccccaag

SEQ ID NO: 1345129 - DNA, 15 bp, Homo sapiens
tccctgagcccccaa

SEQ ID NO: 1345130 - DNA, 15 bp, Homo sapiens
ctccctgagccccca

SEQ ID NO: 1345131 - DNA, 15 bp, Homo sapiens
cctccctgagccccc

SEQ ID NO: 1345132 - DNA, 15 bp, Homo sapiens
ccctccctgagcccc

SEQ ID NO: 1345133 - DNA, 15 bp, Homo sapiens
cccctccctgagccc

SEQ ID NO: 1345134 - DNA, 15 bp, Homo sapiens
acccctccctgagcc

SEQ ID NO: 1345135 - DNA, 15 bp, Homo sapiens
cacccctccctgagc

SEQ ID NO: 1345136 - DNA, 15 bp, Homo sapiens
ccacccctccctgag

SEQ ID NO: 1345137 - DNA, 15 bp, Homo sapiens
cccacccctccctga

SEQ ID NO: 1345138 - DNA, 15 bp, Homo sapiens
ccccacccctccctg

SEQ ID NO: 1345139 - DNA, 15 bp, Homo sapiens
cccccacccctccct

SEQ ID NO: 1345140 - DNA, 15 bp, Homo sapiens
gcccccacccctccc

SEQ ID NO: 1345141 - DNA, 15 bp, Homo sapiens
agcccccacccctcc

SEQ ID NO: 1345142 - DNA, 15 bp, Homo sapiens
gagcccccacccctc

SEQ ID NO: 1345143 - DNA, 15 bp, Homo sapiens
cgagcccccacccct

SEQ ID NO: 1345144 - DNA, 15 bp, Homo sapiens
ccgagcccccacccc

SEQ ID NO: 1345145 - DNA, 15 bp, Homo sapiens
accgagcccccaccc

SEQ ID NO: 1345146 - DNA, 15 bp, Homo sapiens
gaccgagcccccacc

SEQ ID NO: 1345147 - DNA, 15 bp, Homo sapiens
ggaccgagcccccac

SEQ ID NO: 1345148 - DNA, 15 bp, Homo sapiens
aggaccgagccccca

SEQ ID NO: 1345149 - DNA, 15 bp, Homo sapiens
caggaccgagccccc

SEQ ID NO: 1345150 - DNA, 15 bp, Homo sapiens
ccaggaccgagcccc

SEQ ID NO: 1345151 - DNA, 15 bp, Homo sapiens
cccaggaccgagccc

SEQ ID NO: 1345152 - DNA, 15 bp, Homo sapiens
acccaggaccgagcc

SEQ ID NO: 1345153 - DNA, 15 bp, Homo sapiens
cacccaggaccgagc

SEQ ID NO: 1345154 - DNA, 15 bp, Homo sapiens
ccacccaggaccgag

SEQ ID NO: 1345155 - DNA, 15 bp, Homo sapiens
cccacccaggaccga

SEQ ID NO: 1345156 - DNA, 15 bp, Homo sapiens
tcccacccaggaccg

SEQ ID NO: 1345157 - DNA, 15 bp, Homo sapiens
ttcccacccaggacc

SEQ ID NO: 1345158 - DNA, 15 bp, Homo sapiens
cttcccacccaggac

SEQ ID NO: 1345159 - DNA, 15 bp, Homo sapiens
ccttcccacccagga

SEQ ID NO: 1345160 - DNA, 15 bp, Homo sapiens
cccttcccacccagg

SEQ ID NO: 1345161 - DNA, 15 bp, Homo sapiens
acccttcccacccag

SEQ ID NO: 1345162 - DNA, 15 bp, Homo sapiens
cacccttcccaccca

SEQ ID NO: 1345163 - DNA, 15 bp, Homo sapiens
acacccttcccaccc

SEQ ID NO: 1345164 - DNA, 15 bp, Homo sapiens
aacacccttcccacc

SEQ ID NO: 1345165 - DNA, 15 bp, Homo sapiens
caacacccttcccac

SEQ ID NO: 1345166 - DNA, 15 bp, Homo sapiens
ccaacacccttccca

SEQ ID NO: 1345167 - DNA, 15 bp, Homo sapiens
gccaacacccttccc

SEQ ID NO: 1345168 - DNA, 15 bp, Homo sapiens
tgccaacacccttcc

SEQ ID NO: 1345169 - DNA, 15 bp, Homo sapiens
gtgccaacacccttc

SEQ ID NO: 1345170 - DNA, 15 bp, Homo sapiens
agtgccaacaccctt

SEQ ID NO: 1345171 - DNA, 15 bp, Homo sapiens
aagtgccaacaccct

SEQ ID NO: 1345172 - DNA, 15 bp, Homo sapiens
gaagtgccaacaccc

SEQ ID NO: 1345173 - DNA, 15 bp, Homo sapiens
tgaagtgccaacacc

SEQ ID NO: 1345174 - DNA, 15 bp, Homo sapiens
gtgaagtgccaacac

SEQ ID NO: 1345175 - DNA, 15 bp, Homo sapiens
cgtgaagtgccaaca

SEQ ID NO: 1345176 - DNA, 15 bp, Homo sapiens
acgtgaagtgccaac

SEQ ID NO: 1345177 - DNA, 15 bp, Homo sapiens
cacgtgaagtgccaa

SEQ ID NO: 1345178 - DNA, 15 bp, Homo sapiens
ccacgtgaagtgcca

SEQ ID NO: 1345179 - DNA, 15 bp, Homo sapiens
tccacgtgaagtgcc

SEQ ID NO: 1345180 - DNA, 15 bp, Homo sapiens
gtccacgtgaagtgc

SEQ ID NO: 1345181 - DNA, 15 bp, Homo sapiens
tgtccacgtgaagtg

SEQ ID NO: 1345182 - DNA, 15 bp, Homo sapiens
ctgtccacgtgaagt

SEQ ID NO: 1345183 - DNA, 15 bp, Homo sapiens
cctgtccacgtgaag

SEQ ID NO: 1345184 - DNA, 15 bp, Homo sapiens
ccctgtccacgtgaa

SEQ ID NO: 1345185 - DNA, 15 bp, Homo sapiens
gccctgtccacgtga

SEQ ID NO: 1345186 - DNA, 15 bp, Homo sapiens
cgccctgtccacgtg

SEQ ID NO: 1345187 - DNA, 15 bp, Homo sapiens
ccgccctgtccacgt

SEQ ID NO: 1345188 - DNA, 15 bp, Homo sapiens
cccgccctgtccacg

SEQ ID NO: 1345189 - DNA, 15 bp, Homo sapiens
gcccgccctgtccac

SEQ ID NO: 1345190 - DNA, 15 bp, Homo sapiens
tgcccgccctgtcca

SEQ ID NO: 1345191 - DNA, 15 bp, Homo sapiens
ttgcccgccctgtcc

SEQ ID NO: 1345192 - DNA, 15 bp, Homo sapiens
gttgcccgccctgtc

SEQ ID NO: 1345193 - DNA, 15 bp, Homo sapiens
ggttgcccgccctgt

SEQ ID NO: 1345194 - DNA, 15 bp, Homo sapiens
aggttgcccgccctg

SEQ ID NO: 1345195 - DNA, 15 bp, Homo sapiens
caggttgcccgccct

SEQ ID NO: 1345196 - DNA, 15 bp, Homo sapiens
acaggttgcccgccc

SEQ ID NO: 1345197 - DNA, 15 bp, Homo sapiens
gacaggttgcccgcc

SEQ ID NO: 1345198 - DNA, 15 bp, Homo sapiens
ggacaggttgcccgc

SEQ ID NO: 1345199 - DNA, 15 bp, Homo sapiens
gggacaggttgcccg

SEQ ID NO: 1345200 - DNA, 15 bp, Homo sapiens
cgggacaggttgccc

SEQ ID NO: 1345201 - DNA, 15 bp, Homo sapiens
tcgggacaggttgcc

SEQ ID NO: 1345202 - DNA, 15 bp, Homo sapiens
ctcgggacaggttgc

SEQ ID NO: 1345203 - DNA, 15 bp, Homo sapiens
actcgggacaggttg

SEQ ID NO: 1345204 - DNA, 15 bp, Homo sapiens
cactcgggacaggtt

SEQ ID NO: 1345205 - DNA, 15 bp, Homo sapiens
tcactcgggacaggt

SEQ ID NO: 1345206 - DNA, 15 bp, Homo sapiens
gtcactcgggacagg

SEQ ID NO: 1345207 - DNA, 15 bp, Homo sapiens
tgtcactcgggacag

SEQ ID NO: 1345208 - DNA, 15 bp, Homo sapiens
ctgtcactcgggaca

SEQ ID NO: 1345209 - DNA, 15 bp, Homo sapiens
tctgtcactcgggac

SEQ ID NO: 1345210 - DNA, 15 bp, Homo sapiens
ctctgtcactcggga

SEQ ID NO: 1345211 - DNA, 15 bp, Homo sapiens
cctctgtcactcggg

SEQ ID NO: 1345212 - DNA, 15 bp, Homo sapiens
acctctgtcactcgg

SEQ ID NO: 1345213 - DNA, 15 bp, Homo sapiens
cacctctgtcactcg

SEQ ID NO: 1345214 - DNA, 15 bp, Homo sapiens
acacctctgtcactc

SEQ ID NO: 1345215 - DNA, 15 bp, Homo sapiens
cacacctctgtcact

SEQ ID NO: 1345216 - DNA, 15 bp, Homo sapiens
ccacacctctgtcac

SEQ ID NO: 1345217 - DNA, 15 bp, Homo sapiens
cccacacctctgtca

SEQ ID NO: 1345218 - DNA, 15 bp, Homo sapiens
acccacacctctgtc

SEQ ID NO: 1345219 - DNA, 15 bp, Homo sapiens
cacccacacctctgt

SEQ ID NO: 1345220 - DNA, 15 bp, Homo sapiens
tcacccacacctctg

SEQ ID NO: 1345221 - DNA, 15 bp, Homo sapiens
ctcacccacacctct

SEQ ID NO: 1345222 - DNA, 15 bp, Homo sapiens
actcacccacacctc

SEQ ID NO: 1345223 - DNA, 15 bp, Homo sapiens
cactcacccacacct

SEQ ID NO: 1345224 - DNA, 15 bp, Homo sapiens
ccactcacccacacc

SEQ ID NO: 1345225 - DNA, 15 bp, Homo sapiens
cccactcacccacac

SEQ ID NO: 1345226 - DNA, 15 bp, Homo sapiens
gcccactcacccaca

SEQ ID NO: 1345227 - DNA, 15 bp, Homo sapiens
tgcccactcacccac

SEQ ID NO: 1345228 - DNA, 15 bp, Homo sapiens
ctgcccactcaccca

SEQ ID NO: 1345229 - DNA, 15 bp, Homo sapiens
gctgcccactcaccc

SEQ ID NO: 1345230 - DNA, 15 bp, Homo sapiens
ggctgcccactcacc

SEQ ID NO: 1345231 - DNA, 15 bp, Homo sapiens
tggctgcccactcac

SEQ ID NO: 1345232 - DNA, 15 bp, Homo sapiens
ctggctgcccactca

SEQ ID NO: 1345233 - DNA, 15 bp, Homo sapiens
cctggctgcccactc

SEQ ID NO: 1345234 - DNA, 15 bp, Homo sapiens
ccctggctgcccact

SEQ ID NO: 1345235 - DNA, 15 bp, Homo sapiens
tccctggctgcccac

SEQ ID NO: 1345236 - DNA, 15 bp, Homo sapiens
ttccctggctgccca

SEQ ID NO: 1345237 - DNA, 15 bp, Homo sapiens
cttccctggctgccc

SEQ ID NO: 1345238 - DNA, 15 bp, Homo sapiens
ccttccctggctgcc

SEQ ID NO: 1345239 - DNA, 15 bp, Homo sapiens
cccttccctggctgc

SEQ ID NO: 1345240 - DNA, 15 bp, Homo sapiens
ccccttccctggctg

SEQ ID NO: 1345241 - DNA, 15 bp, Homo sapiens
tccccttccctggct

SEQ ID NO: 1345242 - DNA, 15 bp, Homo sapiens
ctccccttccctggc

SEQ ID NO: 1345243 - DNA, 15 bp, Homo sapiens
actccccttccctgg

SEQ ID NO: 1345244 - DNA, 15 bp, Homo sapiens
aactccccttccctg

SEQ ID NO: 1345245 - DNA, 15 bp, Homo sapiens
caactccccttccct

SEQ ID NO: 1345246 - DNA, 15 bp, Homo sapiens
ccaactccccttccc

SEQ ID NO: 1345247 - DNA, 15 bp, Homo sapiens
gccaactccccttcc

SEQ ID NO: 1345248 - DNA, 15 bp, Homo sapiens
tgccaactccccttc

SEQ ID NO: 1345249 - DNA, 15 bp, Homo sapiens
ctgccaactcccctt

SEQ ID NO: 1345250 - DNA, 15 bp, Homo sapiens
cctgccaactcccct

SEQ ID NO: 1345251 - DNA, 15 bp, Homo sapiens
ccctgccaactcccc

SEQ ID NO: 1345252 - DNA, 15 bp, Homo sapiens
cccctgccaactccc

SEQ ID NO: 1345253 - DNA, 15 bp, Homo sapiens
tcccctgccaactcc

SEQ ID NO: 1345254 - DNA, 15 bp, Homo sapiens
ctcccctgccaactc

SEQ ID NO: 1345255 - DNA, 15 bp, Homo sapiens
cctcccctgccaact

SEQ ID NO: 1345256 - DNA, 15 bp, Homo sapiens
ccctcccctgccaac

SEQ ID NO: 1345257 - DNA, 15 bp, Homo sapiens
gccctcccctgccaa

SEQ ID NO: 1345258 - DNA, 15 bp, Homo sapiens
ggccctcccctgcca

SEQ ID NO: 1345259 - DNA, 15 bp, Homo sapiens
gggccctcccctgcc

SEQ ID NO: 1345260 - DNA, 15 bp, Homo sapiens
ggggccctcccctgc

SEQ ID NO: 1345261 - DNA, 15 bp, Homo sapiens
tggggccctcccctg

SEQ ID NO: 1345262 - DNA, 15 bp, Homo sapiens
atggggccctcccct

SEQ ID NO: 1345263 - DNA, 15 bp, Homo sapiens
catggggccctcccc

SEQ ID NO: 1345264 - DNA, 15 bp, Homo sapiens
ccatggggccctccc

SEQ ID NO: 1345265 - DNA, 15 bp, Homo sapiens
accatggggccctcc

SEQ ID NO: 1345266 - DNA, 15 bp, Homo sapiens
gaccatggggccctc

SEQ ID NO: 1345267 - DNA, 15 bp, Homo sapiens
agaccatggggccct

SEQ ID NO: 1345268 - DNA, 15 bp, Homo sapiens
aagaccatggggccc

SEQ ID NO: 1345269 - DNA, 15 bp, Homo sapiens
aaagaccatggggcc

SEQ ID NO: 1345270 - DNA, 15 bp, Homo sapiens
aaaagaccatggggc

SEQ ID NO: 1345271 - DNA, 15 bp, Homo sapiens
aaaaagaccatgggg

SEQ ID NO: 1345272 - DNA, 15 bp, Homo sapiens
aaaaaagaccatggg

SEQ ID NO: 1345273 - DNA, 15 bp, Homo sapiens
gaaaaaagaccatgg

SEQ ID NO: 1345274 - DNA, 15 bp, Homo sapiens
gagaaaaaagaccat

SEQ ID NO: 1345275 - DNA, 15 bp, Homo sapiens
agagaaaaaagacca

SEQ ID NO: 1345276 - DNA, 15 bp, Homo sapiens
cagagaaaaaagacc

SEQ ID NO: 1345277 - DNA, 15 bp, Homo sapiens
ccagagaaaaaagac

SEQ ID NO: 1345278 - DNA, 15 bp, Homo sapiens
accagagaaaaaaga

SEQ ID NO: 1345279 - DNA, 15 bp, Homo sapiens
caccagagaaaaaag

SEQ ID NO: 1345280 - DNA, 15 bp, Homo sapiens
ccaccagagaaaaaa

SEQ ID NO: 1345281 - DNA, 15 bp, Homo sapiens
accaccagagaaaaa

SEQ ID NO: 1345282 - DNA, 15 bp, Homo sapiens
aaccaccagagaaaa

SEQ ID NO: 1345283 - DNA, 15 bp, Homo sapiens
caaccaccagagaaa

SEQ ID NO: 1345284 - DNA, 15 bp, Homo sapiens
ccaaccaccagagaa

SEQ ID NO: 1345285 - DNA, 15 bp, Homo sapiens
accaaccaccagaga

SEQ ID NO: 1345286 - DNA, 15 bp, Homo sapiens
caccaaccaccagag

SEQ ID NO: 1345287 - DNA, 15 bp, Homo sapiens
tcaccaaccaccaga

SEQ ID NO: 1345288 - DNA, 15 bp, Homo sapiens
atcaccaaccaccag

SEQ ID NO: 1345289 - DNA, 15 bp, Homo sapiens
aatcaccaaccacca

SEQ ID NO: 1345290 - DNA, 15 bp, Homo sapiens
gaatcaccaaccacc

SEQ ID NO: 1345291 - DNA, 15 bp, Homo sapiens
agaatcaccaaccac

SEQ ID NO: 1345292 - DNA, 15 bp, Homo sapiens
gagaatcaccaacca

SEQ ID NO: 1345293 - DNA, 15 bp, Homo sapiens
ggagaatcaccaacc

SEQ ID NO: 1345294 - DNA, 15 bp, Homo sapiens
tggagaatcaccaac

SEQ ID NO: 1345295 - DNA, 15 bp, Homo sapiens
atggagaatcaccaa

SEQ ID NO: 1345296 - DNA, 15 bp, Homo sapiens
aatggagaatcacca

SEQ ID NO: 1345297 - DNA, 15 bp, Homo sapiens
gaatggagaatcacc

SEQ ID NO: 1345298 - DNA, 15 bp, Homo sapiens
tgaatggagaatcac

SEQ ID NO: 1345299 - DNA, 15 bp, Homo sapiens
ctgaatggagaatca

SEQ ID NO: 1345300 - DNA, 15 bp, Homo sapiens
tctgaatggagaatc

SEQ ID NO: 1345301 - DNA, 15 bp, Homo sapiens
atctgaatggagaat

SEQ ID NO: 1345302 - DNA, 15 bp, Homo sapiens
aatctgaatggagaa

SEQ ID NO: 1345303 - DNA, 15 bp, Homo sapiens
gaatctgaatggaga

SEQ ID NO: 1345304 - DNA, 15 bp, Homo sapiens
ggaatctgaatggag

SEQ ID NO: 1345305 - DNA, 15 bp, Homo sapiens
aggaatctgaatgga

SEQ ID NO: 1345306 - DNA, 15 bp, Homo sapiens
aaggaatctgaatgg

SEQ ID NO: 1345307 - DNA, 15 bp, Homo sapiens
gaaggaatctgaatg

SEQ ID NO: 1345308 - DNA, 15 bp, Homo sapiens
ggaaggaatctgaat

SEQ ID NO: 1345309 - DNA, 15 bp, Homo sapiens
aggaaggaatctgaa

SEQ ID NO: 1345310 - DNA, 15 bp, Homo sapiens
caggaaggaatctga

SEQ ID NO: 1345311 - DNA, 15 bp, Homo sapiens
ccaggaaggaatctg

SEQ ID NO: 1345312 - DNA, 15 bp, Homo sapiens
gccaggaaggaatct

SEQ ID NO: 1345313 - DNA, 15 bp, Homo sapiens
agccaggaaggaatc

SEQ ID NO: 1345314 - DNA, 15 bp, Homo sapiens
cagccaggaaggaat

SEQ ID NO: 1345315 - DNA, 15 bp, Homo sapiens
gcagccaggaaggaa

SEQ ID NO: 1345316 - DNA, 15 bp, Homo sapiens
ggcagccaggaagga

SEQ ID NO: 1345317 - DNA, 15 bp, Homo sapiens
gggcagccaggaagg

SEQ ID NO: 1345318 - DNA, 15 bp, Homo sapiens
tgggcagccaggaag

SEQ ID NO: 1345319 - DNA, 15 bp, Homo sapiens
ctgggcagccaggaa

SEQ ID NO: 1345320 - DNA, 15 bp, Homo sapiens
tctgggcagccagga

SEQ ID NO: 1345321 - DNA, 15 bp, Homo sapiens
ctctgggcagccagg

SEQ ID NO: 1345322 - DNA, 15 bp, Homo sapiens
actctgggcagccag

SEQ ID NO: 1345323 - DNA, 15 bp, Homo sapiens
cactctgggcagcca

SEQ ID NO: 1345324 - DNA, 15 bp, Homo sapiens
tcactctgggcagcc

SEQ ID NO: 1345325 - DNA, 15 bp, Homo sapiens
ctcactctgggcagc

SEQ ID NO: 1345326 - DNA, 15 bp, Homo sapiens
cctcactctgggcag

SEQ ID NO: 1345327 - DNA, 15 bp, Homo sapiens
ccctcactctgggca

SEQ ID NO: 1345328 - DNA, 15 bp, Homo sapiens
tccctcactctgggc

SEQ ID NO: 1345329 - DNA, 15 bp, Homo sapiens
ttccctcactctggg

SEQ ID NO: 1345330 - DNA, 15 bp, Homo sapiens
tttccctcactctgg

SEQ ID NO: 1345331 - DNA, 15 bp, Homo sapiens
gtttccctcactctg

SEQ ID NO: 1345332 - DNA, 15 bp, Homo sapiens
ggtttccctcactct

SEQ ID NO: 1345333 - DNA, 15 bp, Homo sapiens
tggtttccctcactc

SEQ ID NO: 1345334 - DNA, 15 bp, Homo sapiens
atggtttccctcact

SEQ ID NO: 1345335 - DNA, 15 bp, Homo sapiens
catggtttccctcac

SEQ ID NO: 1345336 - DNA, 15 bp, Homo sapiens
gcatggtttccctca

SEQ ID NO: 1345337 - DNA, 15 bp, Homo sapiens
tgcatggtttccctc

SEQ ID NO: 1345338 - DNA, 15 bp, Homo sapiens
ctgcatggtttccct

SEQ ID NO: 1345339 - DNA, 15 bp, Homo sapiens
gctgcatggtttccc

SEQ ID NO: 1345340 - DNA, 15 bp, Homo sapiens
agctgcatggtttcc

SEQ ID NO: 1345341 - DNA, 15 bp, Homo sapiens
aagctgcatggtttc

SEQ ID NO: 1345342 - DNA, 15 bp, Homo sapiens
taagctgcatggttt

SEQ ID NO: 1345343 - DNA, 15 bp, Homo sapiens
ctaagctgcatggtt

SEQ ID NO: 1345344 - DNA, 15 bp, Homo sapiens
gctaagctgcatggt

SEQ ID NO: 1345345 - DNA, 15 bp, Homo sapiens
cgctaagctgcatgg

SEQ ID NO: 1345346 - DNA, 15 bp, Homo sapiens
gcgctaagctgcatg

SEQ ID NO: 1345347 - DNA, 15 bp, Homo sapiens
tgcgctaagctgcat

SEQ ID NO: 1345348 - DNA, 15 bp, Homo sapiens
ctgcgctaagctgca

SEQ ID NO: 1345349 - DNA, 15 bp, Homo sapiens
cctgcgctaagctgc

SEQ ID NO: 1345350 - DNA, 15 bp, Homo sapiens
ccctgcgctaagctg

SEQ ID NO: 1345351 - DNA, 15 bp, Homo sapiens
gccctgcgctaagct

SEQ ID NO: 1345352 - DNA, 15 bp, Homo sapiens
tgccctgcgctaagc

SEQ ID NO: 1345353 - DNA, 15 bp, Homo sapiens
ctgccctgcgctaag

SEQ ID NO: 1345354 - DNA, 15 bp, Homo sapiens
cctgccctgcgctaa

SEQ ID NO: 1345355 - DNA, 15 bp, Homo sapiens
ccctgccctgcgcta

SEQ ID NO: 1345356 - DNA, 15 bp, Homo sapiens
cccctgccctgcgct

SEQ ID NO: 1345357 - DNA, 15 bp, Homo sapiens
tcccctgccctgcgc

SEQ ID NO: 1345358 - DNA, 15 bp, Homo sapiens
ctcccctgccctgcg

SEQ ID NO: 1345359 - DNA, 15 bp, Homo sapiens
cctcccctgccctgc

SEQ ID NO: 1345360 - DNA, 15 bp, Homo sapiens
tcctcccctgccctg

SEQ ID NO: 1345361 - DNA, 15 bp, Homo sapiens
ttcctcccctgccct

SEQ ID NO: 1345362 - DNA, 15 bp, Homo sapiens
cttcctcccctgccc

SEQ ID NO: 1345363 - DNA, 15 bp, Homo sapiens
tcttcctcccctgcc

SEQ ID NO: 1345364 - DNA, 15 bp, Homo sapiens
atcttcctcccctgc

SEQ ID NO: 1345365 - DNA, 15 bp, Homo sapiens
tatcttcctcccctg

SEQ ID NO: 1345366 - DNA, 15 bp, Homo sapiens
ttatcttcctcccct

SEQ ID NO: 1345367 - DNA, 15 bp, Homo sapiens
cttatcttcctcccc

SEQ ID NO: 1345368 - DNA, 15 bp, Homo sapiens
ccttatcttcctccc

SEQ ID NO: 1345369 - DNA, 15 bp, Homo sapiens
tccttatcttcctcc

SEQ ID NO: 1345370 - DNA, 15 bp, Homo sapiens
ttccttatcttcctc

SEQ ID NO: 1345371 - DNA, 15 bp, Homo sapiens
tttccttatcttcct

SEQ ID NO: 1345372 - DNA, 15 bp, Homo sapiens
ttttccttatcttcc

SEQ ID NO: 1345373 - DNA, 15 bp, Homo sapiens
tttttccttatcttc

SEQ ID NO: 1345374 - DNA, 15 bp, Homo sapiens
ctttttccttatctt

SEQ ID NO: 1345375 - DNA, 15 bp, Homo sapiens
gctttttccttatct

SEQ ID NO: 1345376 - DNA, 15 bp, Homo sapiens
tgctttttccttatc

SEQ ID NO: 1345377 - DNA, 15 bp, Homo sapiens
ctgctttttccttat

SEQ ID NO: 1345378 - DNA, 15 bp, Homo sapiens
gctgctttttcctta

SEQ ID NO: 1345379 - DNA, 15 bp, Homo sapiens
tgctgctttttcctt

SEQ ID NO: 1345380 - DNA, 15 bp, Homo sapiens
ctgctgctttttcct

SEQ ID NO: 1345381 - DNA, 15 bp, Homo sapiens
cctgctgctttttcc

SEQ ID NO: 1345382 - DNA, 15 bp, Homo sapiens
gcctgctgctttttc

SEQ ID NO: 1345383 - DNA, 15 bp, Homo sapiens
agcctgctgcttttt

SEQ ID NO: 1345384 - DNA, 15 bp, Homo sapiens
cagcctgctgctttt

SEQ ID NO: 1345385 - DNA, 15 bp, Homo sapiens
gcagcctgctgcttt

SEQ ID NO: 1345386 - DNA, 15 bp, Homo sapiens
ggcagcctgctgctt

SEQ ID NO: 1345387 - DNA, 15 bp, Homo sapiens
gggcagcctgctgct

SEQ ID NO: 1345388 - DNA, 15 bp, Homo sapiens
tgggcagcctgctgc

SEQ ID NO: 1345389 - DNA, 15 bp, Homo sapiens
ctgggcagcctgctg

SEQ ID NO: 1345390 - DNA, 15 bp, Homo sapiens
cctgggcagcctgct

SEQ ID NO: 1345391 - DNA, 15 bp, Homo sapiens
ccctgggcagcctgc

SEQ ID NO: 1345392 - DNA, 15 bp, Homo sapiens
cccctgggcagcctg

SEQ ID NO: 1345393 - DNA, 15 bp, Homo sapiens
tcccctgggcagcct

SEQ ID NO: 1345394 - DNA, 15 bp, Homo sapiens
ttcccctgggcagcc

SEQ ID NO: 1345395 - DNA, 15 bp, Homo sapiens
cttcccctgggcagc

SEQ ID NO: 1345396 - DNA, 15 bp, Homo sapiens
ccttcccctgggcag

SEQ ID NO: 1345397 - DNA, 15 bp, Homo sapiens
cccttcccctgggca

SEQ ID NO: 1345398 - DNA, 15 bp, Homo sapiens
ccccttcccctgggc

SEQ ID NO: 1345399 - DNA, 15 bp, Homo sapiens
accccttcccctggg

SEQ ID NO: 1345400 - DNA, 15 bp, Homo sapiens
taccccttcccctgg

SEQ ID NO: 1345401 - DNA, 15 bp, Homo sapiens
ctaccccttcccctg

SEQ ID NO: 1345402 - DNA, 15 bp, Homo sapiens
cctaccccttcccct

SEQ ID NO: 1345403 - DNA, 15 bp, Homo sapiens
ccctaccccttcccc

SEQ ID NO: 1345404 - DNA, 15 bp, Homo sapiens
cccctaccccttccc

SEQ ID NO: 1345405 - DNA, 15 bp, Homo sapiens
ccccctaccccttcc

SEQ ID NO: 1345406 - DNA, 15 bp, Homo sapiens
accccctaccccttc

SEQ ID NO: 1345407 - DNA, 15 bp, Homo sapiens
caccccctacccctt

SEQ ID NO: 1345408 - DNA, 15 bp, Homo sapiens
tcaccccctacccct

SEQ ID NO: 1345409 - DNA, 15 bp, Homo sapiens
ttcaccccctacccc

SEQ ID NO: 1345410 - DNA, 15 bp, Homo sapiens
gttcaccccctaccc

SEQ ID NO: 1345411 - DNA, 15 bp, Homo sapiens
tgttcaccccctacc

SEQ ID NO: 1345412 - DNA, 15 bp, Homo sapiens
ctgttcaccccctac

SEQ ID NO: 1345413 - DNA, 15 bp, Homo sapiens
gctgttcacccccta

SEQ ID NO: 1345414 - DNA, 15 bp, Homo sapiens
tgctgttcaccccct

SEQ ID NO: 1345415 - DNA, 15 bp, Homo sapiens
ctgctgttcaccccc

SEQ ID NO: 1345416 - DNA, 15 bp, Homo sapiens
cctgctgttcacccc

SEQ ID NO: 1345417 - DNA, 15 bp, Homo sapiens
ccctgctgttcaccc

SEQ ID NO: 1345418 - DNA, 15 bp, Homo sapiens
gccctgctgttcacc

SEQ ID NO: 1345419 - DNA, 15 bp, Homo sapiens
tgccctgctgttcac

SEQ ID NO: 1345420 - DNA, 15 bp, Homo sapiens
ttgccctgctgttca

SEQ ID NO: 1345421 - DNA, 15 bp, Homo sapiens
cttgccctgctgttc

SEQ ID NO: 1345422 - DNA, 15 bp, Homo sapiens
ccttgccctgctgtt

SEQ ID NO: 1345423 - DNA, 15 bp, Homo sapiens
tccttgccctgctgt

SEQ ID NO: 1345424 - DNA, 15 bp, Homo sapiens
ctccttgccctgctg

SEQ ID NO: 1345425 - DNA, 15 bp, Homo sapiens
cctccttgccctgct

SEQ ID NO: 1345426 - DNA, 15 bp, Homo sapiens
ccctccttgccctgc

SEQ ID NO: 1345427 - DNA, 15 bp, Homo sapiens
gccctccttgccctg

SEQ ID NO: 1345428 - DNA, 15 bp, Homo sapiens
tgccctccttgccct

SEQ ID NO: 1345429 - DNA, 15 bp, Homo sapiens
gtgccctccttgccc

SEQ ID NO: 1345430 - DNA, 15 bp, Homo sapiens
tgtgccctccttgcc

SEQ ID NO: 1345431 - DNA, 15 bp, Homo sapiens
ctgtgccctccttgc

SEQ ID NO: 1345432 - DNA, 15 bp, Homo sapiens
cctgtgccctccttg

SEQ ID NO: 1345433 - DNA, 15 bp, Homo sapiens
ccctgtgccctcctt

SEQ ID NO: 1345434 - DNA, 15 bp, Homo sapiens
cccctgtgccctcct

SEQ ID NO: 1345435 - DNA, 15 bp, Homo sapiens
acccctgtgccctcc

SEQ ID NO: 1345436 - DNA, 15 bp, Homo sapiens
cacccctgtgccctc

SEQ ID NO: 1345437 - DNA, 15 bp, Homo sapiens
ccacccctgtgccct

SEQ ID NO: 1345438 - DNA, 15 bp, Homo sapiens
gccacccctgtgccc

SEQ ID NO: 1345439 - DNA, 15 bp, Homo sapiens
agccacccctgtgcc

SEQ ID NO: 1345440 - DNA, 15 bp, Homo sapiens
gagccacccctgtgc

SEQ ID NO: 1345441 - DNA, 15 bp, Homo sapiens
ggagccacccctgtg

SEQ ID NO: 1345442 - DNA, 15 bp, Homo sapiens
aggagccacccctgt

SEQ ID NO: 1345443 - DNA, 15 bp, Homo sapiens
caggagccacccctg

SEQ ID NO: 1345444 - DNA, 15 bp, Homo sapiens
ccaggagccacccct

SEQ ID NO: 1345445 - DNA, 15 bp, Homo sapiens
cccaggagccacccc

SEQ ID NO: 1345446 - DNA, 15 bp, Homo sapiens
ccccaggagccaccc

SEQ ID NO: 1345447 - DNA, 15 bp, Homo sapiens
accccaggagccacc

SEQ ID NO: 1345448 - DNA, 15 bp, Homo sapiens
taccccaggagccac

SEQ ID NO: 1345449 - DNA, 15 bp, Homo sapiens
ttaccccaggagcca

SEQ ID NO: 1345450 - DNA, 15 bp, Homo sapiens
cttaccccaggagcc

SEQ ID NO: 1345451 - DNA, 15 bp, Homo sapiens
ccttaccccaggagc

SEQ ID NO: 1345452 - DNA, 15 bp, Homo sapiens
gccttaccccaggag

SEQ ID NO: 1345453 - DNA, 15 bp, Homo sapiens
tgccttaccccagga

SEQ ID NO: 1345454 - DNA, 15 bp, Homo sapiens
gtgccttaccccagg

SEQ ID NO: 1345455 - DNA, 15 bp, Homo sapiens
tgtgccttaccccag

SEQ ID NO: 1345456 - DNA, 15 bp, Homo sapiens
ttgtgccttacccca

SEQ ID NO: 1345457 - DNA, 15 bp, Homo sapiens
gttgtgccttacccc

SEQ ID NO: 1345458 - DNA, 15 bp, Homo sapiens
ggttgtgccttaccc

SEQ ID NO: 1345459 - DNA, 15 bp, Homo sapiens
aggttgtgccttacc

SEQ ID NO: 1345460 - DNA, 15 bp, Homo sapiens
aaggttgtgccttac

SEQ ID NO: 1345461 - DNA, 15 bp, Homo sapiens
caaggttgtgcctta

SEQ ID NO: 1345462 - DNA, 15 bp, Homo sapiens
acaaggttgtgcctt

SEQ ID NO: 1345463 - DNA, 15 bp, Homo sapiens
gacaaggttgtgcct

SEQ ID NO: 1345464 - DNA, 15 bp, Homo sapiens
agacaaggttgtgcc

SEQ ID NO: 1345465 - DNA, 15 bp, Homo sapiens
aagacaaggttgtgc

SEQ ID NO: 1345466 - DNA, 15 bp, Homo sapiens
aaagacaaggttgtg

SEQ ID NO: 1345467 - DNA, 15 bp, Homo sapiens
caaagacaaggttgt

SEQ ID NO: 1345468 - DNA, 15 bp, Homo sapiens
ccaaagacaaggttg

SEQ ID NO: 1345469 - DNA, 15 bp, Homo sapiens
gccaaagacaaggtt

SEQ ID NO: 1345470 - DNA, 15 bp, Homo sapiens
agccaaagacaaggt

SEQ ID NO: 1345471 - DNA, 15 bp, Homo sapiens
gagccaaagacaagg

SEQ ID NO: 1345472 - DNA, 15 bp, Homo sapiens
agagccaaagacaag

SEQ ID NO: 1345473 - DNA, 15 bp, Homo sapiens
gagagccaaagacaa

SEQ ID NO: 1345474 - DNA, 15 bp, Homo sapiens
ggagagccaaagaca

SEQ ID NO: 1345475 - DNA, 15 bp, Homo sapiens
aggagagccaaagac

SEQ ID NO: 1345476 - DNA, 15 bp, Homo sapiens
caggagagccaaaga

SEQ ID NO: 1345477 - DNA, 15 bp, Homo sapiens
ccaggagagccaaag

SEQ ID NO: 1345478 - DNA, 15 bp, Homo sapiens
accaggagagccaaa

SEQ ID NO: 1345479 - DNA, 15 bp, Homo sapiens
caccaggagagccaa

SEQ ID NO: 1345480 - DNA, 15 bp, Homo sapiens
tcaccaggagagcca

SEQ ID NO: 1345481 - DNA, 15 bp, Homo sapiens
ctcaccaggagagcc

SEQ ID NO: 1345482 - DNA, 15 bp, Homo sapiens
cctcaccaggagagc

SEQ ID NO: 1345483 - DNA, 15 bp, Homo sapiens
ccctcaccaggagag

SEQ ID NO: 1345484 - DNA, 15 bp, Homo sapiens
cccctcaccaggaga

SEQ ID NO: 1345485 - DNA, 15 bp, Homo sapiens
acccctcaccaggag

SEQ ID NO: 1345486 - DNA, 15 bp, Homo sapiens
aacccctcaccagga

SEQ ID NO: 1345487 - DNA, 15 bp, Homo sapiens
aaacccctcaccagg

SEQ ID NO: 1345488 - DNA, 15 bp, Homo sapiens
gaaacccctcaccag

SEQ ID NO: 1345489 - DNA, 15 bp, Homo sapiens
ggaaacccctcacca

SEQ ID NO: 1345490 - DNA, 15 bp, Homo sapiens
aggaaacccctcacc

SEQ ID NO: 1345491 - DNA, 15 bp, Homo sapiens
gaggaaacccctcac

SEQ ID NO: 1345492 - DNA, 15 bp, Homo sapiens
ggaggaaacccctca

SEQ ID NO: 1345493 - DNA, 15 bp, Homo sapiens
gggaggaaacccctc

SEQ ID NO: 1345494 - DNA, 15 bp, Homo sapiens
agggaggaaacccct

SEQ ID NO: 1345495 - DNA, 15 bp, Homo sapiens
aagggaggaaacccc

SEQ ID NO: 1345496 - DNA, 15 bp, Homo sapiens
caagggaggaaaccc

SEQ ID NO: 1345497 - DNA, 15 bp, Homo sapiens
gcaagggaggaaacc

SEQ ID NO: 1345498 - DNA, 15 bp, Homo sapiens
tgcaagggaggaaac

SEQ ID NO: 1345499 - DNA, 15 bp, Homo sapiens
gtgcaagggaggaaa

SEQ ID NO: 1345500 - DNA, 15 bp, Homo sapiens
ggtgcaagggaggaa

SEQ ID NO: 1345501 - DNA, 15 bp, Homo sapiens
gggtgcaagggagga

SEQ ID NO: 1345502 - DNA, 15 bp, Homo sapiens
agggtgcaagggagg

SEQ ID NO: 1345503 - DNA, 15 bp, Homo sapiens
gagggtgcaagggag

SEQ ID NO: 1345504 - DNA, 15 bp, Homo sapiens
agagggtgcaaggga

SEQ ID NO: 1345505 - DNA, 15 bp, Homo sapiens
cagagggtgcaaggg

SEQ ID NO: 1345506 - DNA, 15 bp, Homo sapiens
gcagagggtgcaagg

SEQ ID NO: 1345507 - DNA, 15 bp, Homo sapiens
ggcagagggtgcaag

SEQ ID NO: 1345508 - DNA, 15 bp, Homo sapiens
aggcagagggtgcaa

SEQ ID NO: 1345509 - DNA, 15 bp, Homo sapiens
caggcagagggtgca

SEQ ID NO: 1345510 - DNA, 15 bp, Homo sapiens
ccaggcagagggtgc

SEQ ID NO: 1345511 - DNA, 15 bp, Homo sapiens
gccaggcagagggtg

SEQ ID NO: 1345512 - DNA, 15 bp, Homo sapiens
ggccaggcagagggt

SEQ ID NO: 1345513 - DNA, 15 bp, Homo sapiens
gggccaggcagaggg

SEQ ID NO: 1345514 - DNA, 15 bp, Homo sapiens
agggccaggcagagg

SEQ ID NO: 1345515 - DNA, 15 bp, Homo sapiens
aagggccaggcagag

SEQ ID NO: 1345516 - DNA, 15 bp, Homo sapiens
gaagggccaggcaga

SEQ ID NO: 1345517 - DNA, 15 bp, Homo sapiens
agaagggccaggcag

SEQ ID NO: 1345518 - DNA, 15 bp, Homo sapiens
aagaagggccaggca

SEQ ID NO: 1345519 - DNA, 15 bp, Homo sapiens
gaagaagggccaggc

SEQ ID NO: 1345520 - DNA, 15 bp, Homo sapiens
ggaagaagggccagg

SEQ ID NO: 1345521 - DNA, 15 bp, Homo sapiens
gggaagaagggccag

SEQ ID NO: 1345522 - DNA, 15 bp, Homo sapiens
ggggaagaagggcca

SEQ ID NO: 1345523 - DNA, 15 bp, Homo sapiens
gggggaagaagggcc

SEQ ID NO: 1345524 - DNA, 15 bp, Homo sapiens
ggggggaagaagggc

SEQ ID NO: 1345525 - DNA, 15 bp, Homo sapiens
tggggggaagaaggg

SEQ ID NO: 1345526 - DNA, 15 bp, Homo sapiens
atggggggaagaagg

SEQ ID NO: 1345527 - DNA, 15 bp, Homo sapiens
gatggggggaagaag

SEQ ID NO: 1345528 - DNA, 15 bp, Homo sapiens
tgatggggggaagaa

SEQ ID NO: 1345529 - DNA, 15 bp, Homo sapiens
gtgatggggggaaga

SEQ ID NO: 1345530 - DNA, 15 bp, Homo sapiens
ggtgatggggggaag

SEQ ID NO: 1345531 - DNA, 15 bp, Homo sapiens
gggtgatggggggaa

SEQ ID NO: 1345532 - DNA, 15 bp, Homo sapiens
tgggtgatgggggga

SEQ ID NO: 1345533 - DNA, 15 bp, Homo sapiens
gtgggtgatgggggg

SEQ ID NO: 1345534 - DNA, 15 bp, Homo sapiens
ggtgggtgatggggg

SEQ ID NO: 1345535 - DNA, 15 bp, Homo sapiens
tggtgggtgatgggg

SEQ ID NO: 1345536 - DNA, 15 bp, Homo sapiens
ctggtgggtgatggg

SEQ ID NO: 1345537 - DNA, 15 bp, Homo sapiens
tctggtgggtgatgg

SEQ ID NO: 1345538 - DNA, 15 bp, Homo sapiens
gtctggtgggtgatg

SEQ ID NO: 1345539 - DNA, 15 bp, Homo sapiens
ggtctggtgggtgat

SEQ ID NO: 1345540 - DNA, 15 bp, Homo sapiens
gggtctggtgggtga

SEQ ID NO: 1345541 - DNA, 15 bp, Homo sapiens
tgggtctggtgggtg

SEQ ID NO: 1345542 - DNA, 15 bp, Homo sapiens
gtgggtctggtgggt

SEQ ID NO: 1345543 - DNA, 15 bp, Homo sapiens
tgtgggtctggtggg

SEQ ID NO: 1345544 - DNA, 15 bp, Homo sapiens
gtgtgggtctggtgg

SEQ ID NO: 1345545 - DNA, 15 bp, Homo sapiens
tgtgtgggtctggtg

SEQ ID NO: 1345546 - DNA, 15 bp, Homo sapiens
gtgtgtgggtctggt

SEQ ID NO: 1345547 - DNA, 15 bp, Homo sapiens
tgtgtgtgggtctgg

SEQ ID NO: 1345548 - DNA, 15 bp, Homo sapiens
gtgtgtgtgggtctg

SEQ ID NO: 1345549 - DNA, 15 bp, Homo sapiens
tgtgtgtgtgggtct

SEQ ID NO: 1345550 - DNA, 15 bp, Homo sapiens
ctgtgtgtgtgggtc

SEQ ID NO: 1345551 - DNA, 15 bp, Homo sapiens
actgtgtgtgtgggt

SEQ ID NO: 1345552 - DNA, 15 bp, Homo sapiens
gactgtgtgtgtggg

SEQ ID NO: 1345553 - DNA, 15 bp, Homo sapiens
ggactgtgtgtgtgg

SEQ ID NO: 1345554 - DNA, 15 bp, Homo sapiens
gggactgtgtgtgtg

SEQ ID NO: 1345555 - DNA, 15 bp, Homo sapiens
tgggactgtgtgtgt

SEQ ID NO: 1345556 - DNA, 15 bp, Homo sapiens
ctgggactgtgtgtg

SEQ ID NO: 1345557 - DNA, 15 bp, Homo sapiens
cctgggactgtgtgt

SEQ ID NO: 1345558 - DNA, 15 bp, Homo sapiens
tcctgggactgtgtg

SEQ ID NO: 1345559 - DNA, 15 bp, Homo sapiens
ctcctgggactgtgt

SEQ ID NO: 1345560 - DNA, 15 bp, Homo sapiens
gctcctgggactgtg

SEQ ID NO: 1345561 - DNA, 15 bp, Homo sapiens
ggctcctgggactgt

SEQ ID NO: 1345562 - DNA, 15 bp, Homo sapiens
tggctcctgggactg

SEQ ID NO: 1345563 - DNA, 15 bp, Homo sapiens
ctggctcctgggact

SEQ ID NO: 1345564 - DNA, 15 bp, Homo sapiens
cctggctcctgggac

SEQ ID NO: 1345565 - DNA, 15 bp, Homo sapiens
ccctggctcctggga

SEQ ID NO: 1345566 - DNA, 15 bp, Homo sapiens
cccctggctcctggg

SEQ ID NO: 1345567 - DNA, 15 bp, Homo sapiens
ccccctggctcctgg

SEQ ID NO: 1345568 - DNA, 15 bp, Homo sapiens
gccccctggctcctg

SEQ ID NO: 1345569 - DNA, 15 bp, Homo sapiens
tgccccctggctcct

SEQ ID NO: 1345570 - DNA, 15 bp, Homo sapiens
gtgccccctggctcc

SEQ ID NO: 1345571 - DNA, 15 bp, Homo sapiens
ggtgccccctggctc

SEQ ID NO: 1345572 - DNA, 15 bp, Homo sapiens
aggtgccccctggct

SEQ ID NO: 1345573 - DNA, 15 bp, Homo sapiens
gaggtgccccctggc

SEQ ID NO: 1345574 - DNA, 15 bp, Homo sapiens
agaggtgccccctgg

SEQ ID NO: 1345575 - DNA, 15 bp, Homo sapiens
aagaggtgccccctg

SEQ ID NO: 1345576 - DNA, 15 bp, Homo sapiens
caagaggtgccccct

SEQ ID NO: 1345577 - DNA, 15 bp, Homo sapiens
ccaagaggtgccccc

SEQ ID NO: 1345578 - DNA, 15 bp, Homo sapiens
cccaagaggtgcccc

SEQ ID NO: 1345579 - DNA, 15 bp, Homo sapiens
ccccaagaggtgccc

SEQ ID NO: 1345580 - DNA, 15 bp, Homo sapiens
accccaagaggtgcc

SEQ ID NO: 1345581 - DNA, 15 bp, Homo sapiens
gaccccaagaggtgc

SEQ ID NO: 1345582 - DNA, 15 bp, Homo sapiens
ggaccccaagaggtg

SEQ ID NO: 1345583 - DNA, 15 bp, Homo sapiens
gggaccccaagaggt

SEQ ID NO: 1345584 - DNA, 15 bp, Homo sapiens
agggaccccaagagg

SEQ ID NO: 1345585 - DNA, 15 bp, Homo sapiens
cagggaccccaagag

SEQ ID NO: 1345586 - DNA, 15 bp, Homo sapiens
tcagggaccccaaga

SEQ ID NO: 1345587 - DNA, 15 bp, Homo sapiens
ttcagggaccccaag

SEQ ID NO: 1345588 - DNA, 15 bp, Homo sapiens
tttcagggaccccaa

SEQ ID NO: 1345589 - DNA, 15 bp, Homo sapiens
gtttcagggacccca

SEQ ID NO: 1345590 - DNA, 15 bp, Homo sapiens
tgtttcagggacccc

SEQ ID NO: 1345591 - DNA, 15 bp, Homo sapiens
ttgtttcagggaccc

SEQ ID NO: 1345592 - DNA, 15 bp, Homo sapiens
cttgtttcagggacc

SEQ ID NO: 1345593 - DNA, 15 bp, Homo sapiens
acttgtttcagggac

SEQ ID NO: 1345594 - DNA, 15 bp, Homo sapiens
cacttgtttcaggga

SEQ ID NO: 1345595 - DNA, 15 bp, Homo sapiens
ccacttgtttcaggg

SEQ ID NO: 1345596 - DNA, 15 bp, Homo sapiens
cccacttgtttcagg

SEQ ID NO: 1345597 - DNA, 15 bp, Homo sapiens
gcccacttgtttcag

SEQ ID NO: 1345598 - DNA, 15 bp, Homo sapiens
ggcccacttgtttca

SEQ ID NO: 1345599 - DNA, 15 bp, Homo sapiens
gggcccacttgtttc

SEQ ID NO: 1345600 - DNA, 15 bp, Homo sapiens
agggcccacttgttt

SEQ ID NO: 1345601 - DNA, 15 bp, Homo sapiens
cagggcccacttgtt

SEQ ID NO: 1345602 - DNA, 15 bp, Homo sapiens
gcagggcccacttgt

SEQ ID NO: 1345603 - DNA, 15 bp, Homo sapiens
ggcagggcccacttg

SEQ ID NO: 1345604 - DNA, 15 bp, Homo sapiens
tggcagggcccactt

SEQ ID NO: 1345605 - DNA, 15 bp, Homo sapiens
gtggcagggcccact

SEQ ID NO: 1345606 - DNA, 15 bp, Homo sapiens
ggtggcagggcccac

SEQ ID NO: 1345607 - DNA, 15 bp, Homo sapiens
gggtggcagggccca

SEQ ID NO: 1345608 - DNA, 15 bp, Homo sapiens
tgggtggcagggccc

SEQ ID NO: 1345609 - DNA, 15 bp, Homo sapiens
ttgggtggcagggcc

SEQ ID NO: 1345610 - DNA, 15 bp, Homo sapiens
cttgggtggcagggc

SEQ ID NO: 1345611 - DNA, 15 bp, Homo sapiens
gcttgggtggcaggg

SEQ ID NO: 1345612 - DNA, 15 bp, Homo sapiens
ggcttgggtggcagg

SEQ ID NO: 1345613 - DNA, 15 bp, Homo sapiens
tggcttgggtggcag

SEQ ID NO: 1345614 - DNA, 15 bp, Homo sapiens
ctggcttgggtggca

SEQ ID NO: 1345615 - DNA, 15 bp, Homo sapiens
actggcttgggtggc

SEQ ID NO: 1345616 - DNA, 15 bp, Homo sapiens
cactggcttgggtgg

SEQ ID NO: 1345617 - DNA, 15 bp, Homo sapiens
gcactggcttgggtg

SEQ ID NO: 1345618 - DNA, 15 bp, Homo sapiens
ggcactggcttgggt

SEQ ID NO: 1345619 - DNA, 15 bp, Homo sapiens
tggcactggcttggg

SEQ ID NO: 1345620 - DNA, 15 bp, Homo sapiens
gtggcactggcttgg

SEQ ID NO: 1345621 - DNA, 15 bp, Homo sapiens
tgtggcactggcttg

SEQ ID NO: 1345622 - DNA, 15 bp, Homo sapiens
ctgtggcactggctt

SEQ ID NO: 1345623 - DNA, 15 bp, Homo sapiens
cctgtggcactggct

SEQ ID NO: 1345624 - DNA, 15 bp, Homo sapiens
ccctgtggcactggc

SEQ ID NO: 1345625 - DNA, 15 bp, Homo sapiens
gccctgtggcactgg

SEQ ID NO: 1345626 - DNA, 15 bp, Homo sapiens
agccctgtggcactg

SEQ ID NO: 1345627 - DNA, 15 bp, Homo sapiens
aagccctgtggcact

SEQ ID NO: 1345628 - DNA, 15 bp, Homo sapiens
caagccctgtggcac

SEQ ID NO: 1345629 - DNA, 15 bp, Homo sapiens
tcaagccctgtggca

SEQ ID NO: 1345630 - DNA, 15 bp, Homo sapiens
ctcaagccctgtggc

SEQ ID NO: 1345631 - DNA, 15 bp, Homo sapiens
cctcaagccctgtgg

SEQ ID NO: 1345632 - DNA, 15 bp, Homo sapiens
tcctcaagccctgtg

SEQ ID NO: 1345633 - DNA, 15 bp, Homo sapiens
ctcctcaagccctgt

SEQ ID NO: 1345634 - DNA, 15 bp, Homo sapiens
cctcctcaagccctg

SEQ ID NO: 1345635 - DNA, 15 bp, Homo sapiens
ccctcctcaagccct

SEQ ID NO: 1345636 - DNA, 15 bp, Homo sapiens
tccctcctcaagccc

SEQ ID NO: 1345637 - DNA, 15 bp, Homo sapiens
gtccctcctcaagcc

SEQ ID NO: 1345638 - DNA, 15 bp, Homo sapiens
tgtccctcctcaagc

SEQ ID NO: 1345639 - DNA, 15 bp, Homo sapiens
gtgtccctcctcaag

SEQ ID NO: 1345640 - DNA, 15 bp, Homo sapiens
ggtgtccctcctcaa

SEQ ID NO: 1345641 - DNA, 15 bp, Homo sapiens
gggtgtccctcctca

SEQ ID NO: 1345642 - DNA, 15 bp, Homo sapiens
tgggtgtccctcctc

SEQ ID NO: 1345643 - DNA, 15 bp, Homo sapiens
ttgggtgtccctcct

SEQ ID NO: 1345644 - DNA, 15 bp, Homo sapiens
cttgggtgtccctcc

SEQ ID NO: 1345645 - DNA, 15 bp, Homo sapiens
ccttgggtgtccctc

SEQ ID NO: 1345646 - DNA, 15 bp, Homo sapiens
tccttgggtgtccct

SEQ ID NO: 1345647 - DNA, 15 bp, Homo sapiens
ttccttgggtgtccc

SEQ ID NO: 1345648 - DNA, 15 bp, Homo sapiens
tttccttgggtgtcc

SEQ ID NO: 1345649 - DNA, 15 bp, Homo sapiens
ttttccttgggtgtc

SEQ ID NO: 1345650 - DNA, 15 bp, Homo sapiens
gccttttccttgggt

SEQ ID NO: 1345651 - DNA, 15 bp, Homo sapiens
tgccttttccttggg

SEQ ID NO: 1345652 - DNA, 15 bp, Homo sapiens
ctgccttttccttgg

SEQ ID NO: 1345653 - DNA, 15 bp, Homo sapiens
tctgccttttccttg

SEQ ID NO: 1345654 - DNA, 15 bp, Homo sapiens
ctctgccttttcctt

SEQ ID NO: 1345655 - DNA, 15 bp, Homo sapiens
tctctgccttttcct

SEQ ID NO: 1345656 - DNA, 15 bp, Homo sapiens
ctctctgccttttcc

SEQ ID NO: 1345657 - DNA, 15 bp, Homo sapiens
tctctctgccttttc

SEQ ID NO: 1345658 - DNA, 15 bp, Homo sapiens
ctctctctgcctttt

SEQ ID NO: 1345659 - DNA, 15 bp, Homo sapiens
cctctctctgccttt

SEQ ID NO: 1345660 - DNA, 15 bp, Homo sapiens
gcctctctctgcctt

SEQ ID NO: 1345661 - DNA, 15 bp, Homo sapiens
tgcctctctctgcct

SEQ ID NO: 1345662 - DNA, 15 bp, Homo sapiens
ctgcctctctctgcc

SEQ ID NO: 1345663 - DNA, 15 bp, Homo sapiens
cctgcctctctctgc

SEQ ID NO: 1345664 - DNA, 15 bp, Homo sapiens
gcctgcctctctctg

SEQ ID NO: 1345665 - DNA, 15 bp, Homo sapiens
tgcctgcctctctct

SEQ ID NO: 1345666 - DNA, 15 bp, Homo sapiens
ctgcctgcctctctc

SEQ ID NO: 1345667 - DNA, 15 bp, Homo sapiens
cctgcctgcctctct

SEQ ID NO: 1345668 - DNA, 15 bp, Homo sapiens
ccctgcctgcctctc

SEQ ID NO: 1345669 - DNA, 15 bp, Homo sapiens
cccctgcctgcctct

SEQ ID NO: 1345670 - DNA, 15 bp, Homo sapiens
gcccctgcctgcctc

SEQ ID NO: 1345671 - DNA, 15 bp, Homo sapiens
ggcccctgcctgcct

SEQ ID NO: 1345672 - DNA, 15 bp, Homo sapiens
gggcccctgcctgcc

SEQ ID NO: 1345673 - DNA, 15 bp, Homo sapiens
tgggcccctgcctgc

SEQ ID NO: 1345674 - DNA, 15 bp, Homo sapiens
gtgggcccctgcctg

SEQ ID NO: 1345675 - DNA, 15 bp, Homo sapiens
cctgggtgggcccct

SEQ ID NO: 1345676 - DNA, 15 bp, Homo sapiens
tcctgggtgggcccc

SEQ ID NO: 1345677 - DNA, 15 bp, Homo sapiens
gtcctgggtgggccc

SEQ ID NO: 1345678 - DNA, 15 bp, Homo sapiens
tgtcctgggtgggcc

SEQ ID NO: 1345679 - DNA, 15 bp, Homo sapiens
ttgtcctgggtgggc

SEQ ID NO: 1345680 - DNA, 15 bp, Homo sapiens
cttgtcctgggtggg

SEQ ID NO: 1345681 - DNA, 15 bp, Homo sapiens
ccttgtcctgggtgg

SEQ ID NO: 1345682 - DNA, 15 bp, Homo sapiens
cccttgtcctgggtg

SEQ ID NO: 1345683 - DNA, 15 bp, Homo sapiens
ccccttgtcctgggt

SEQ ID NO: 1345684 - DNA, 15 bp, Homo sapiens
cccccttgtcctggg

SEQ ID NO: 1345685 - DNA, 15 bp, Homo sapiens
acccccttgtcctgg

SEQ ID NO: 1345686 - DNA, 15 bp, Homo sapiens
cacccccttgtcctg

SEQ ID NO: 1345687 - DNA, 15 bp, Homo sapiens
ccacccccttgtcct

SEQ ID NO: 1345688 - DNA, 15 bp, Homo sapiens
cccacccccttgtcc

SEQ ID NO: 1345689 - DNA, 15 bp, Homo sapiens
ccccacccccttgtc

SEQ ID NO: 1345690 - DNA, 15 bp, Homo sapiens
cccccacccccttgt

SEQ ID NO: 1345691 - DNA, 15 bp, Homo sapiens
gcccccacccccttg

SEQ ID NO: 1345692 - DNA, 15 bp, Homo sapiens
cgcccccaccccctt

SEQ ID NO: 1345693 - DNA, 15 bp, Homo sapiens
ccgcccccaccccct

SEQ ID NO: 1345694 - DNA, 15 bp, Homo sapiens
cccgcccccaccccc

SEQ ID NO: 1345695 - DNA, 15 bp, Homo sapiens
ccccgcccccacccc

SEQ ID NO: 1345696 - DNA, 15 bp, Homo sapiens
tccccgcccccaccc

SEQ ID NO: 1345697 - DNA, 15 bp, Homo sapiens
ctccccgcccccacc

SEQ ID NO: 1345698 - DNA, 15 bp, Homo sapiens
tctccccgcccccac

SEQ ID NO: 1345699 - DNA, 15 bp, Homo sapiens
ttctccccgccccca

SEQ ID NO: 1345700 - DNA, 15 bp, Homo sapiens
cttctccccgccccc

SEQ ID NO: 1345701 - DNA, 15 bp, Homo sapiens
tcttctccccgcccc

SEQ ID NO: 1345702 - DNA, 15 bp, Homo sapiens
gtcttctccccgccc

SEQ ID NO: 1345703 - DNA, 15 bp, Homo sapiens
ggtcttctccccgcc

SEQ ID NO: 1345704 - DNA, 15 bp, Homo sapiens
gggtcttctccccgc

SEQ ID NO: 1345705 - DNA, 15 bp, Homo sapiens
ggggtcttctccccg

SEQ ID NO: 1345706 - DNA, 15 bp, Homo sapiens
tggggtcttctcccc

SEQ ID NO: 1345707 - DNA, 15 bp, Homo sapiens
ctggggtcttctccc

SEQ ID NO: 1345708 - DNA, 15 bp, Homo sapiens
cctggggtcttctcc

SEQ ID NO: 1345709 - DNA, 15 bp, Homo sapiens
gcctggggtcttctc

SEQ ID NO: 1345710 - DNA, 15 bp, Homo sapiens
ggcctggggtcttct

SEQ ID NO: 1345711 - DNA, 15 bp, Homo sapiens
gggcctggggtcttc

SEQ ID NO: 1345712 - DNA, 15 bp, Homo sapiens
tgggcctggggtctt

SEQ ID NO: 1345713 - DNA, 15 bp, Homo sapiens
ctgggcctggggtct

SEQ ID NO: 1345714 - DNA, 15 bp, Homo sapiens
cctgggcctggggtc

SEQ ID NO: 1345715 - DNA, 15 bp, Homo sapiens
tcctgggcctggggt

SEQ ID NO: 1345716 - DNA, 15 bp, Homo sapiens
ctcctgggcctgggg

SEQ ID NO: 1345717 - DNA, 15 bp, Homo sapiens
gctcctgggcctggg

SEQ ID NO: 1345718 - DNA, 15 bp, Homo sapiens
agctcctgggcctgg

SEQ ID NO: 1345719 - DNA, 15 bp, Homo sapiens
cagctcctgggcctg

SEQ ID NO: 1345720 - DNA, 15 bp, Homo sapiens
ccagctcctgggcct

SEQ ID NO: 1345721 - DNA, 15 bp, Homo sapiens
tccagctcctgggcc

SEQ ID NO: 1345722 - DNA, 15 bp, Homo sapiens
gtccagctcctgggc

SEQ ID NO: 1345723 - DNA, 15 bp, Homo sapiens
ggtccagctcctggg

SEQ ID NO: 1345724 - DNA, 15 bp, Homo sapiens
gggtccagctcctgg

SEQ ID NO: 1345725 - DNA, 15 bp, Homo sapiens
ggggtccagctcctg

SEQ ID NO: 1345726 - DNA, 15 bp, Homo sapiens
gggggtccagctcct

SEQ ID NO: 1345727 - DNA, 15 bp, Homo sapiens
ggggggtccagctcc

SEQ ID NO: 1345728 - DNA, 15 bp, Homo sapiens
gggggggtccagctc

SEQ ID NO: 1345729 - DNA, 15 bp, Homo sapiens
tgggggggtccagct

SEQ ID NO: 1345730 - DNA, 15 bp, Homo sapiens
gtgggggggtccagc

SEQ ID NO: 1345731 - DNA, 15 bp, Homo sapiens
ggtgggggggtccag

SEQ ID NO: 1345732 - DNA, 15 bp, Homo sapiens
gggtgggggggtcca

SEQ ID NO: 1345733 - DNA, 15 bp, Homo sapiens
ggggtgggggggtcc

SEQ ID NO: 1345734 - DNA, 15 bp, Homo sapiens
tggggtgggggggtc

SEQ ID NO: 1345735 - DNA, 15 bp, Homo sapiens
ttggggtgggggggt

SEQ ID NO: 1345736 - DNA, 15 bp, Homo sapiens
gttggggtggggggg

SEQ ID NO: 1345737 - DNA, 15 bp, Homo sapiens
agttggggtgggggg

SEQ ID NO: 1345738 - DNA, 15 bp, Homo sapiens
tagttggggtggggg

SEQ ID NO: 1345739 - DNA, 15 bp, Homo sapiens
ttagttggggtgggg

SEQ ID NO: 1345740 - DNA, 15 bp, Homo sapiens
cttagttggggtggg

SEQ ID NO: 1345741 - DNA, 15 bp, Homo sapiens
ccttagttggggtgg

SEQ ID NO: 1345742 - DNA, 15 bp, Homo sapiens
gccttagttggggtg

SEQ ID NO: 1345743 - DNA, 15 bp, Homo sapiens
ggccttagttggggt

SEQ ID NO: 1345744 - DNA, 15 bp, Homo sapiens
aggccttagttgggg

SEQ ID NO: 1345745 - DNA, 15 bp, Homo sapiens
caggccttagttggg

SEQ ID NO: 1345746 - DNA, 15 bp, Homo sapiens
ccaggccttagttgg

SEQ ID NO: 1345747 - DNA, 15 bp, Homo sapiens
tccaggccttagttg

SEQ ID NO: 1345748 - DNA, 15 bp, Homo sapiens
ttccaggccttagtt

SEQ ID NO: 1345749 - DNA, 15 bp, Homo sapiens
cttccaggccttagt

SEQ ID NO: 1345750 - DNA, 15 bp, Homo sapiens
acttccaggccttag

SEQ ID NO: 1345751 - DNA, 15 bp, Homo sapiens
gacttccaggcctta

SEQ ID NO: 1345752 - DNA, 15 bp, Homo sapiens
cgacttccaggcctt

SEQ ID NO: 1345753 - DNA, 15 bp, Homo sapiens
ccgacttccaggcct

SEQ ID NO: 1345754 - DNA, 15 bp, Homo sapiens
cccgacttccaggcc

SEQ ID NO: 1345755 - DNA, 15 bp, Homo sapiens
ccccgacttccaggc

SEQ ID NO: 1345756 - DNA, 15 bp, Homo sapiens
tccccgacttccagg

SEQ ID NO: 1345757 - DNA, 15 bp, Homo sapiens
ctccccgacttccag

SEQ ID NO: 1345758 - DNA, 15 bp, Homo sapiens
gctccccgacttcca

SEQ ID NO: 1345759 - DNA, 15 bp, Homo sapiens
tgctccccgacttcc

SEQ ID NO: 1345760 - DNA, 15 bp, Homo sapiens
ctgctccccgacttc

SEQ ID NO: 1345761 - DNA, 15 bp, Homo sapiens
gctgctccccgactt

SEQ ID NO: 1345762 - DNA, 15 bp, Homo sapiens
ggctgctccccgact

SEQ ID NO: 1345763 - DNA, 15 bp, Homo sapiens
cggctgctccccgac

SEQ ID NO: 1345764 - DNA, 15 bp, Homo sapiens
gcggctgctccccga

SEQ ID NO: 1345765 - DNA, 15 bp, Homo sapiens
agcggctgctccccg

SEQ ID NO: 1345766 - DNA, 15 bp, Homo sapiens
aagcggctgctcccc

SEQ ID NO: 1345767 - DNA, 15 bp, Homo sapiens
gaagcggctgctccc

SEQ ID NO: 1345768 - DNA, 15 bp, Homo sapiens
agaagcggctgctcc

SEQ ID NO: 1345769 - DNA, 15 bp, Homo sapiens
aagaagcggctgctc

SEQ ID NO: 1345770 - DNA, 15 bp, Homo sapiens
aaagaagcggctgct

SEQ ID NO: 1345771 - DNA, 15 bp, Homo sapiens
aaaagaagcggctgc

SEQ ID NO: 1345772 - DNA, 15 bp, Homo sapiens
gaaaagaagcggctg

SEQ ID NO: 1345773 - DNA, 15 bp, Homo sapiens
tgaaaagaagcggct

SEQ ID NO: 1345774 - DNA, 15 bp, Homo sapiens
ctgaaaagaagcggc

SEQ ID NO: 1345775 - DNA, 15 bp, Homo sapiens
cctgaaaagaagcgg

SEQ ID NO: 1345776 - DNA, 15 bp, Homo sapiens
ccctgaaaagaagcg

SEQ ID NO: 1345777 - DNA, 15 bp, Homo sapiens
tccctgaaaagaagc

SEQ ID NO: 1345778 - DNA, 15 bp, Homo sapiens
gtccctgaaaagaag

SEQ ID NO: 1345779 - DNA, 15 bp, Homo sapiens
ggtccctgaaaagaa

SEQ ID NO: 1345780 - DNA, 15 bp, Homo sapiens
aggtccctgaaaaga

SEQ ID NO: 1345781 - DNA, 15 bp, Homo sapiens
caggtccctgaaaag

SEQ ID NO: 1345782 - DNA, 15 bp, Homo sapiens
ccaggtccctgaaaa

SEQ ID NO: 1345783 - DNA, 15 bp, Homo sapiens
gccaggtccctgaaa

SEQ ID NO: 1345784 - DNA, 15 bp, Homo sapiens
agccaggtccctgaa

SEQ ID NO: 1345785 - DNA, 15 bp, Homo sapiens
cagccaggtccctga

SEQ ID NO: 1345786 - DNA, 15 bp, Homo sapiens
ccagccaggtccctg

SEQ ID NO: 1345787 - DNA, 15 bp, Homo sapiens
tccagccaggtccct

SEQ ID NO: 1345788 - DNA, 15 bp, Homo sapiens
ctccagccaggtccc

SEQ ID NO: 1345789 - DNA, 15 bp, Homo sapiens
gctccagccaggtcc

SEQ ID NO: 1345790 - DNA, 15 bp, Homo sapiens
agctccagccaggtc

SEQ ID NO: 1345791 - DNA, 15 bp, Homo sapiens
gagctccagccaggt

SEQ ID NO: 1345792 - DNA, 15 bp, Homo sapiens
ggagctccagccagg

SEQ ID NO: 1345793 - DNA, 15 bp, Homo sapiens
cggagctccagccag

SEQ ID NO: 1345794 - DNA, 15 bp, Homo sapiens
ccggagctccagcca

SEQ ID NO: 1345795 - DNA, 15 bp, Homo sapiens
gccggagctccagcc

SEQ ID NO: 1345796 - DNA, 15 bp, Homo sapiens
ggccggagctccagc

SEQ ID NO: 1345797 - DNA, 15 bp, Homo sapiens
gggccggagctccag

SEQ ID NO: 1345798 - DNA, 15 bp, Homo sapiens
cgggccggagctcca

SEQ ID NO: 1345799 - DNA, 15 bp, Homo sapiens
gcgggccggagctcc

SEQ ID NO: 1345800 - DNA, 15 bp, Homo sapiens
ggcgggccggagctc

SEQ ID NO: 1345801 - DNA, 15 bp, Homo sapiens
gggcgggccggagct

SEQ ID NO: 1345802 - DNA, 15 bp, Homo sapiens
ggggcgggccggagc

SEQ ID NO: 1345803 - DNA, 15 bp, Homo sapiens
aggggcgggccggag

SEQ ID NO: 1345804 - DNA, 15 bp, Homo sapiens
taggggcgggccgga

SEQ ID NO: 1345805 - DNA, 15 bp, Homo sapiens
ctaggggcgggccgg

SEQ ID NO: 1345806 - DNA, 15 bp, Homo sapiens
cctaggggcgggccg

SEQ ID NO: 1345807 - DNA, 15 bp, Homo sapiens
gcctaggggcgggcc

SEQ ID NO: 1345808 - DNA, 15 bp, Homo sapiens
ggcctaggggcgggc

SEQ ID NO: 1345809 - DNA, 15 bp, Homo sapiens
aggcctaggggcggg

SEQ ID NO: 1345810 - DNA, 15 bp, Homo sapiens
aaggcctaggggcgg

SEQ ID NO: 1345811 - DNA, 15 bp, Homo sapiens
gaaggcctaggggcg

SEQ ID NO: 1345812 - DNA, 15 bp, Homo sapiens
tgaaggcctaggggc

SEQ ID NO: 1345813 - DNA, 15 bp, Homo sapiens
gtgaaggcctagggg

SEQ ID NO: 1345814 - DNA, 15 bp, Homo sapiens
ggtgaaggcctaggg

SEQ ID NO: 1345815 - DNA, 15 bp, Homo sapiens
tggtgaaggcctagg

SEQ ID NO: 1345816 - DNA, 15 bp, Homo sapiens
ctggtgaaggcctag

SEQ ID NO: 1345817 - DNA, 15 bp, Homo sapiens
cctggtgaaggccta

SEQ ID NO: 1345818 - DNA, 15 bp, Homo sapiens
gcctggtgaaggcct

SEQ ID NO: 1345819 - DNA, 15 bp, Homo sapiens
ggcctggtgaaggcc

SEQ ID NO: 1345820 - DNA, 15 bp, Homo sapiens
gggcctggtgaaggc

SEQ ID NO: 1345821 - DNA, 15 bp, Homo sapiens
tgggcctggtgaagg

SEQ ID NO: 1345822 - DNA, 15 bp, Homo sapiens
ctgggcctggtgaag

SEQ ID NO: 1345823 - DNA, 15 bp, Homo sapiens
gctgggcctggtgaa

SEQ ID NO: 1345824 - DNA, 15 bp, Homo sapiens
ggctgggcctggtga

SEQ ID NO: 1345825 - DNA, 15 bp, Homo sapiens
cggctgggcctggtg

SEQ ID NO: 1345826 - DNA, 15 bp, Homo sapiens
gcggctgggcctggt

SEQ ID NO: 1345827 - DNA, 15 bp, Homo sapiens
agcggctgggcctgg

SEQ ID NO: 1345828 - DNA, 15 bp, Homo sapiens
aagcggctgggcctg

SEQ ID NO: 1345829 - DNA, 15 bp, Homo sapiens
caagcggctgggcct

SEQ ID NO: 1345830 - DNA, 15 bp, Homo sapiens
gcaagcggctgggcc

SEQ ID NO: 1345831 - DNA, 15 bp, Homo sapiens
ggcaagcggctgggc

SEQ ID NO: 1345832 - DNA, 15 bp, Homo sapiens
tggcaagcggctggg

SEQ ID NO: 1345833 - DNA, 15 bp, Homo sapiens
ttggcaagcggctgg

SEQ ID NO: 1345834 - DNA, 15 bp, Homo sapiens
cttggcaagcggctg

SEQ ID NO: 1345835 - DNA, 15 bp, Homo sapiens
acttggcaagcggct

SEQ ID NO: 1345836 - DNA, 15 bp, Homo sapiens
cacttggcaagcggc

SEQ ID NO: 1345837 - DNA, 15 bp, Homo sapiens
tcacttggcaagcgg

SEQ ID NO: 1345838 - DNA, 15 bp, Homo sapiens
gtcacttggcaagcg

SEQ ID NO: 1345839 - DNA, 15 bp, Homo sapiens
ggtcacttggcaagc

SEQ ID NO: 1345840 - DNA, 15 bp, Homo sapiens
tggtcacttggcaag

SEQ ID NO: 1345841 - DNA, 15 bp, Homo sapiens
ctggtcacttggcaa

SEQ ID NO: 1345842 - DNA, 15 bp, Homo sapiens
cctggtcacttggca

SEQ ID NO: 1345843 - DNA, 15 bp, Homo sapiens
ccctggtcacttggc

SEQ ID NO: 1345844 - DNA, 15 bp, Homo sapiens
gccctggtcacttgg

SEQ ID NO: 1345845 - DNA, 15 bp, Homo sapiens
tgccctggtcacttg

SEQ ID NO: 1345846 - DNA, 15 bp, Homo sapiens
atgccctggtcactt

SEQ ID NO: 1345847 - DNA, 15 bp, Homo sapiens
aatgccctggtcact

SEQ ID NO: 1345848 - DNA, 15 bp, Homo sapiens
caatgccctggtcac

SEQ ID NO: 1345849 - DNA, 15 bp, Homo sapiens
gcaatgccctggtca

SEQ ID NO: 1345850 - DNA, 15 bp, Homo sapiens
tgcaatgccctggtc

SEQ ID NO: 1345851 - DNA, 15 bp, Homo sapiens
gtgcaatgccctggt

SEQ ID NO: 1345852 - DNA, 15 bp, Homo sapiens
agtgcaatgccctgg

SEQ ID NO: 1345853 - DNA, 15 bp, Homo sapiens
aagtgcaatgccctg

SEQ ID NO: 1345854 - DNA, 15 bp, Homo sapiens
aaagtgcaatgccct

SEQ ID NO: 1345855 - DNA, 15 bp, Homo sapiens
caaagtgcaatgccc

SEQ ID NO: 1345856 - DNA, 15 bp, Homo sapiens
ccaaagtgcaatgcc

SEQ ID NO: 1345857 - DNA, 15 bp, Homo sapiens
cccaaagtgcaatgc

SEQ ID NO: 1345858 - DNA, 15 bp, Homo sapiens
ccccaaagtgcaatg

SEQ ID NO: 1345859 - DNA, 15 bp, Homo sapiens
accccaaagtgcaat

SEQ ID NO: 1345860 - DNA, 15 bp, Homo sapiens
gaccccaaagtgcaa

SEQ ID NO: 1345861 - DNA, 15 bp, Homo sapiens
tgaccccaaagtgca

SEQ ID NO: 1345862 - DNA, 15 bp, Homo sapiens
ttgaccccaaagtgc

SEQ ID NO: 1345863 - DNA, 15 bp, Homo sapiens
attgaccccaaagtg

SEQ ID NO: 1345864 - DNA, 15 bp, Homo sapiens
cattgaccccaaagt

SEQ ID NO: 1345865 - DNA, 15 bp, Homo sapiens
gcattgaccccaaag

SEQ ID NO: 1345866 - DNA, 15 bp, Homo sapiens
ggcattgaccccaaa

SEQ ID NO: 1345867 - DNA, 15 bp, Homo sapiens
cggcattgaccccaa

SEQ ID NO: 1345868 - DNA, 15 bp, Homo sapiens
ccggcattgacccca

SEQ ID NO: 1345869 - DNA, 15 bp, Homo sapiens
cccggcattgacccc

SEQ ID NO: 1345870 - DNA, 15 bp, Homo sapiens
ccccggcattgaccc

SEQ ID NO: 1345871 - DNA, 15 bp, Homo sapiens
accccggcattgacc

SEQ ID NO: 1345872 - DNA, 15 bp, Homo sapiens
caccccggcattgac

SEQ ID NO: 1345873 - DNA, 15 bp, Homo sapiens
ccaccccggcattga

SEQ ID NO: 1345874 - DNA, 15 bp, Homo sapiens
cccaccccggcattg

SEQ ID NO: 1345875 - DNA, 15 bp, Homo sapiens
ccccaccccggcatt

SEQ ID NO: 1345876 - DNA, 15 bp, Homo sapiens
tccccaccccggcat

SEQ ID NO: 1345877 - DNA, 15 bp, Homo sapiens
ctccccaccccggca

SEQ ID NO: 1345878 - DNA, 15 bp, Homo sapiens
cctccccaccccggc

SEQ ID NO: 1345879 - DNA, 15 bp, Homo sapiens
acctccccaccccgg

SEQ ID NO: 1345880 - DNA, 15 bp, Homo sapiens
cacctccccaccccg

SEQ ID NO: 1345881 - DNA, 15 bp, Homo sapiens
gcccacctccccacc

SEQ ID NO: 1345882 - DNA, 15 bp, Homo sapiens
ggcccacctccccac

SEQ ID NO: 1345883 - DNA, 15 bp, Homo sapiens
tggcccacctcccca

SEQ ID NO: 1345884 - DNA, 15 bp, Homo sapiens
ctggcccacctcccc

SEQ ID NO: 1345885 - DNA, 15 bp, Homo sapiens
cctggcccacctccc

SEQ ID NO: 1345886 - DNA, 15 bp, Homo sapiens
acctggcccacctcc

SEQ ID NO: 1345887 - DNA, 15 bp, Homo sapiens
cacctggcccacctc

SEQ ID NO: 1345888 - DNA, 15 bp, Homo sapiens
tcacctggcccacct

SEQ ID NO: 1345889 - DNA, 15 bp, Homo sapiens
ctcacctggcccacc

SEQ ID NO: 1345890 - DNA, 15 bp, Homo sapiens
cctcacctggcccac

SEQ ID NO: 1345891 - DNA, 15 bp, Homo sapiens
ccctcacctggccca

SEQ ID NO: 1345892 - DNA, 15 bp, Homo sapiens
cccctcacctggccc

SEQ ID NO: 1345893 - DNA, 15 bp, Homo sapiens
tcccctcacctggcc

SEQ ID NO: 1345894 - DNA, 15 bp, Homo sapiens
ctcccctcacctggc

SEQ ID NO: 1345895 - DNA, 15 bp, Homo sapiens
tctcccctcacctgg

SEQ ID NO: 1345896 - DNA, 15 bp, Homo sapiens
ttctcccctcacctg

SEQ ID NO: 1345897 - DNA, 15 bp, Homo sapiens
cttctcccctcacct

SEQ ID NO: 1345898 - DNA, 15 bp, Homo sapiens
tcttctcccctcacc

SEQ ID NO: 1345899 - DNA, 15 bp, Homo sapiens
ctcttctcccctcac

SEQ ID NO: 1345900 - DNA, 15 bp, Homo sapiens
cctcttctcccctca

SEQ ID NO: 1345901 - DNA, 15 bp, Homo sapiens
ccctcttctcccctc

SEQ ID NO: 1345902 - DNA, 15 bp, Homo sapiens
cccctcttctcccct

SEQ ID NO: 1345903 - DNA, 15 bp, Homo sapiens
gcccctcttctcccc

SEQ ID NO: 1345904 - DNA, 15 bp, Homo sapiens
tgcccctcttctccc

SEQ ID NO: 1345905 - DNA, 15 bp, Homo sapiens
ttgcccctcttctcc

SEQ ID NO: 1345906 - DNA, 15 bp, Homo sapiens
gttgcccctcttctc

SEQ ID NO: 1345907 - DNA, 15 bp, Homo sapiens
agttgcccctcttct

SEQ ID NO: 1345908 - DNA, 15 bp, Homo sapiens
tagttgcccctcttc

SEQ ID NO: 1345909 - DNA, 15 bp, Homo sapiens
ttagttgcccctctt

SEQ ID NO: 1345910 - DNA, 15 bp, Homo sapiens
cttagttgcccctct

SEQ ID NO: 1345911 - DNA, 15 bp, Homo sapiens
ccttagttgcccctc

SEQ ID NO: 1345912 - DNA, 15 bp, Homo sapiens
accttagttgcccct

SEQ ID NO: 1345913 - DNA, 15 bp, Homo sapiens
caccttagttgcccc

SEQ ID NO: 1345914 - DNA, 15 bp, Homo sapiens
gcaccttagttgccc

SEQ ID NO: 1345915 - DNA, 15 bp, Homo sapiens
agcaccttagttgcc

SEQ ID NO: 1345916 - DNA, 15 bp, Homo sapiens
aagcaccttagttgc

SEQ ID NO: 1345917 - DNA, 15 bp, Homo sapiens
caagcaccttagttg

SEQ ID NO: 1345918 - DNA, 15 bp, Homo sapiens
tcaagcaccttagtt

SEQ ID NO: 1345919 - DNA, 15 bp, Homo sapiens
gtcaagcaccttagt

SEQ ID NO: 1345920 - DNA, 15 bp, Homo sapiens
agtcaagcaccttag

SEQ ID NO: 1345921 - DNA, 15 bp, Homo sapiens
tagtcaagcacctta

SEQ ID NO: 1345922 - DNA, 15 bp, Homo sapiens
atagtcaagcacctt

SEQ ID NO: 1345923 - DNA, 15 bp, Homo sapiens
aatagtcaagcacct

SEQ ID NO: 1345924 - DNA, 15 bp, Homo sapiens
taatagtcaagcacc

SEQ ID NO: 1345925 - DNA, 15 bp, Homo sapiens
ataatagtcaagcac

SEQ ID NO: 1345926 - DNA, 15 bp, Homo sapiens
gataatagtcaagca

SEQ ID NO: 1345927 - DNA, 15 bp, Homo sapiens
agataatagtcaagc

SEQ ID NO: 1345928 - DNA, 15 bp, Homo sapiens
tagataatagtcaag

SEQ ID NO: 1345929 - DNA, 15 bp, Homo sapiens
ttagataatagtcaa

SEQ ID NO: 1345930 - DNA, 15 bp, Homo sapiens
gttagataatagtca

SEQ ID NO: 1345931 - DNA, 15 bp, Homo sapiens
agttagataatagtc

SEQ ID NO: 1345932 - DNA, 15 bp, Homo sapiens
gagttagataatagt

SEQ ID NO: 1345933 - DNA, 15 bp, Homo sapiens
tgagttagataatag

SEQ ID NO: 1345934 - DNA, 15 bp, Homo sapiens
atgagttagataata

SEQ ID NO: 1345935 - DNA, 15 bp, Homo sapiens
tatgagttagataat

SEQ ID NO: 1345936 - DNA, 15 bp, Homo sapiens
ctatgagttagataa

SEQ ID NO: 1345937 - DNA, 15 bp, Homo sapiens
gctatgagttagata

SEQ ID NO: 1345938 - DNA, 15 bp, Homo sapiens
tgctatgagttagat

SEQ ID NO: 1345939 - DNA, 15 bp, Homo sapiens
ttgctatgagttaga

SEQ ID NO: 1345940 - DNA, 15 bp, Homo sapiens
tttgctatgagttag

SEQ ID NO: 1345941 - DNA, 15 bp, Homo sapiens
ctttgctatgagtta

SEQ ID NO: 1345942 - DNA, 15 bp, Homo sapiens
actttgctatgagtt

SEQ ID NO: 1345943 - DNA, 15 bp, Homo sapiens
gactttgctatgagt

SEQ ID NO: 1345944 - DNA, 15 bp, Homo sapiens
agactttgctatgag

SEQ ID NO: 1345945 - DNA, 15 bp, Homo sapiens
tagactttgctatga

SEQ ID NO: 1345946 - DNA, 15 bp, Homo sapiens
atagactttgctatg

SEQ ID NO: 1345947 - DNA, 15 bp, Homo sapiens
gatagactttgctat

SEQ ID NO: 1345948 - DNA, 15 bp, Homo sapiens
tgatagactttgcta

SEQ ID NO: 1345949 - DNA, 15 bp, Homo sapiens
ctgatagactttgct

SEQ ID NO: 1345950 - DNA, 15 bp, Homo sapiens
cctgatagactttgc

SEQ ID NO: 1345951 - DNA, 15 bp, Homo sapiens
tcctgatagactttg

SEQ ID NO: 1345952 - DNA, 15 bp, Homo sapiens
ttcctgatagacttt

SEQ ID NO: 1345953 - DNA, 15 bp, Homo sapiens
cttcctgatagactt

SEQ ID NO: 1345954 - DNA, 15 bp, Homo sapiens
tcttcctgatagact

SEQ ID NO: 1345955 - DNA, 15 bp, Homo sapiens
atcttcctgatagac

SEQ ID NO: 1345956 - DNA, 15 bp, Homo sapiens
tatcttcctgataga

SEQ ID NO: 1345957 - DNA, 15 bp, Homo sapiens
ctatcttcctgatag

SEQ ID NO: 1345958 - DNA, 15 bp, Homo sapiens
tctatcttcctgata

SEQ ID NO: 1345959 - DNA, 15 bp, Homo sapiens
ctctatcttcctgat

SEQ ID NO: 1345960 - DNA, 15 bp, Homo sapiens
tctctatcttcctga

SEQ ID NO: 1345961 - DNA, 15 bp, Homo sapiens
ttctctatcttcctg

SEQ ID NO: 1345962 - DNA, 15 bp, Homo sapiens
gttctctatcttcct

SEQ ID NO: 1345963 - DNA, 15 bp, Homo sapiens
tgttctctatcttcc

SEQ ID NO: 1345964 - DNA, 15 bp, Homo sapiens
ctgttctctatcttc

SEQ ID NO: 1345965 - DNA, 15 bp, Homo sapiens
tctgttctctatctt

SEQ ID NO: 1345966 - DNA, 15 bp, Homo sapiens
ctctgttctctatct

SEQ ID NO: 1345967 - DNA, 15 bp, Homo sapiens
tctctgttctctatc

SEQ ID NO: 1345968 - DNA, 15 bp, Homo sapiens
atctctgttctctat

SEQ ID NO: 1345969 - DNA, 15 bp, Homo sapiens
aatctctgttctcta

SEQ ID NO: 1345970 - DNA, 15 bp, Homo sapiens
caatctctgttctct

SEQ ID NO: 1345971 - DNA, 15 bp, Homo sapiens
gcaatctctgttctc

SEQ ID NO: 1345972 - DNA, 15 bp, Homo sapiens
ggcaatctctgttct

SEQ ID NO: 1345973 - DNA, 15 bp, Homo sapiens
tggcaatctctgttc

SEQ ID NO: 1345974 - DNA, 15 bp, Homo sapiens
gtggcaatctctgtt

SEQ ID NO: 1345975 - DNA, 15 bp, Homo sapiens
tgtggcaatctctgt

SEQ ID NO: 1345976 - DNA, 15 bp, Homo sapiens
ttgtggcaatctctg

SEQ ID NO: 1345977 - DNA, 15 bp, Homo sapiens
tttgtggcaatctct

SEQ ID NO: 1345978 - DNA, 15 bp, Homo sapiens
atttgtggcaatctc

SEQ ID NO: 1345979 - DNA, 15 bp, Homo sapiens
gatttgtggcaatct

SEQ ID NO: 1345980 - DNA, 15 bp, Homo sapiens
tgatttgtggcaatc

SEQ ID NO: 1345981 - DNA, 15 bp, Homo sapiens
ttgatttgtggcaat

SEQ ID NO: 1345982 - DNA, 15 bp, Homo sapiens
cttgatttgtggcaa

SEQ ID NO: 1345983 - DNA, 15 bp, Homo sapiens
gcttgatttgtggca

SEQ ID NO: 1345984 - DNA, 15 bp, Homo sapiens
tgcttgatttgtggc

SEQ ID NO: 1345985 - DNA, 15 bp, Homo sapiens
ctgcttgatttgtgg

SEQ ID NO: 1345986 - DNA, 15 bp, Homo sapiens
actgcttgatttgtg

SEQ ID NO: 1345987 - DNA, 15 bp, Homo sapiens
cactgcttgatttgt

SEQ ID NO: 1345988 - DNA, 15 bp, Homo sapiens
tcactgcttgatttg

SEQ ID NO: 1345989 - DNA, 15 bp, Homo sapiens
ttcactgcttgattt

SEQ ID NO: 1345990 - DNA, 15 bp, Homo sapiens
attcactgcttgatt

SEQ ID NO: 1345991 - DNA, 15 bp, Homo sapiens
aattcactgcttgat

SEQ ID NO: 1345992 - DNA, 15 bp, Homo sapiens
taattcactgcttga

SEQ ID NO: 1345993 - DNA, 15 bp, Homo sapiens
ataattcactgcttg

SEQ ID NO: 1345994 - DNA, 15 bp, Homo sapiens
aataattcactgctt

SEQ ID NO: 1345995 - DNA, 15 bp, Homo sapiens
taataattcactgct

SEQ ID NO: 1345996 - DNA, 15 bp, Homo sapiens
gtaataattcactgc

SEQ ID NO: 1345997 - DNA, 15 bp, Homo sapiens
tgtaataattcactg

SEQ ID NO: 1345998 - DNA, 15 bp, Homo sapiens
atgtaataattcact

SEQ ID NO: 1345999 - DNA, 15 bp, Homo sapiens
tatgtaataattcac

SEQ ID NO: 1346000 - DNA, 15 bp, Homo sapiens
ctatgtaataattca

SEQ ID NO: 1346001 - DNA, 15 bp, Homo sapiens
actatgtaataattc

SEQ ID NO: 1346002 - DNA, 15 bp, Homo sapiens
cactatgtaataatt

SEQ ID NO: 1346003 - DNA, 15 bp, Homo sapiens
acactatgtaataat

SEQ ID NO: 1346004 - DNA, 15 bp, Homo sapiens
tacactatgtaataa

SEQ ID NO: 1346005 - DNA, 15 bp, Homo sapiens
ctacactatgtaata

SEQ ID NO: 1346006 - DNA, 15 bp, Homo sapiens
tctacactatgtaat

SEQ ID NO: 1346007 - DNA, 15 bp, Homo sapiens
ttctacactatgtaa

SEQ ID NO: 1346008 - DNA, 15 bp, Homo sapiens
gttctacactatgta

SEQ ID NO: 1346009 - DNA, 15 bp, Homo sapiens
tgttctacactatgt

SEQ ID NO: 1346010 - DNA, 15 bp, Homo sapiens
ctgttctacactatg

SEQ ID NO: 1346011 - DNA, 15 bp, Homo sapiens
actgttctacactat

SEQ ID NO: 1346012 - DNA, 15 bp, Homo sapiens
cactgttctacacta

SEQ ID NO: 1346013 - DNA, 15 bp, Homo sapiens
ccactgttctacact

SEQ ID NO: 1346014 - DNA, 15 bp, Homo sapiens
tccactgttctacac

SEQ ID NO: 1346015 - DNA, 15 bp, Homo sapiens
ttccactgttctaca

SEQ ID NO: 1346016 - DNA, 15 bp, Homo sapiens
tttccactgttctac

SEQ ID NO: 1346017 - DNA, 15 bp, Homo sapiens
ttttccactgttcta

SEQ ID NO: 1346018 - DNA, 15 bp, Homo sapiens
attttccactgttct

SEQ ID NO: 1346019 - DNA, 15 bp, Homo sapiens
tattttccactgttc

SEQ ID NO: 1346020 - DNA, 15 bp, Homo sapiens
ctattttccactgtt

SEQ ID NO: 1346021 - DNA, 15 bp, Homo sapiens
cctattttccactgt

SEQ ID NO: 1346022 - DNA, 15 bp, Homo sapiens
ccctattttccactg

SEQ ID NO: 1346023 - DNA, 15 bp, Homo sapiens
tccctattttccact

SEQ ID NO: 1346024 - DNA, 15 bp, Homo sapiens
ttccctattttccac

SEQ ID NO: 1346025 - DNA, 15 bp, Homo sapiens
cttccctattttcca

SEQ ID NO: 1346026 - DNA, 15 bp, Homo sapiens
tcttccctattttcc

SEQ ID NO: 1346027 - DNA, 15 bp, Homo sapiens
ttcttccctattttc

SEQ ID NO: 1346028 - DNA, 15 bp, Homo sapiens
tttcttccctatttt

SEQ ID NO: 1346029 - DNA, 15 bp, Homo sapiens
ttttcttccctattt

SEQ ID NO: 1346030 - DNA, 15 bp, Homo sapiens
cttttcttccctatt

SEQ ID NO: 1346031 - DNA, 15 bp, Homo sapiens
atcttttcttcccta

SEQ ID NO: 1346032 - DNA, 15 bp, Homo sapiens
catcttttcttccct

SEQ ID NO: 1346033 - DNA, 15 bp, Homo sapiens
tcatcttttcttccc

SEQ ID NO: 1346034 - DNA, 15 bp, Homo sapiens
ctcatcttttcttcc

SEQ ID NO: 1346035 - DNA, 15 bp, Homo sapiens
actcatcttttcttc

SEQ ID NO: 1346036 - DNA, 15 bp, Homo sapiens
gactcatcttttctt

SEQ ID NO: 1346037 - DNA, 15 bp, Homo sapiens
tgactcatcttttct

SEQ ID NO: 1346038 - DNA, 15 bp, Homo sapiens
ttgactcatcttttc

SEQ ID NO: 1346039 - DNA, 15 bp, Homo sapiens
cttgactcatctttt

SEQ ID NO: 1346040 - DNA, 15 bp, Homo sapiens
ccttgactcatcttt

SEQ ID NO: 1346041 - DNA, 15 bp, Homo sapiens
tccttgactcatctt

SEQ ID NO: 1346042 - DNA, 15 bp, Homo sapiens
ctccttgactcatct

SEQ ID NO: 1346043 - DNA, 15 bp, Homo sapiens
actccttgactcatc

SEQ ID NO: 1346044 - DNA, 15 bp, Homo sapiens
aactccttgactcat

SEQ ID NO: 1346045 - DNA, 15 bp, Homo sapiens
taactccttgactca

SEQ ID NO: 1346046 - DNA, 15 bp, Homo sapiens
ctaactccttgactc

SEQ ID NO: 1346047 - DNA, 15 bp, Homo sapiens
tctaactccttgact

SEQ ID NO: 1346048 - DNA, 15 bp, Homo sapiens
gtctaactccttgac

SEQ ID NO: 1346049 - DNA, 15 bp, Homo sapiens
tgtctaactccttga

SEQ ID NO: 1346050 - DNA, 15 bp, Homo sapiens
ctgtctaactccttg

SEQ ID NO: 1346051 - DNA, 15 bp, Homo sapiens
gctgtctaactcctt

SEQ ID NO: 1346052 - DNA, 15 bp, Homo sapiens
ggctgtctaactcct

SEQ ID NO: 1346053 - DNA, 15 bp, Homo sapiens
gggctgtctaactcc

SEQ ID NO: 1346054 - DNA, 15 bp, Homo sapiens
agggctgtctaactc

SEQ ID NO: 1346055 - DNA, 15 bp, Homo sapiens
tagggctgtctaact

SEQ ID NO: 1346056 - DNA, 15 bp, Homo sapiens
ttagggctgtctaac

SEQ ID NO: 1346057 - DNA, 15 bp, Homo sapiens
acttagggctgtcta

SEQ ID NO: 1346058 - DNA, 15 bp, Homo sapiens
aacttagggctgtct

SEQ ID NO: 1346059 - DNA, 15 bp, Homo sapiens
gaacttagggctgtc

SEQ ID NO: 1346060 - DNA, 15 bp, Homo sapiens
tgaacttagggctgt

SEQ ID NO: 1346061 - DNA, 15 bp, Homo sapiens
ttgaacttagggctg

SEQ ID NO: 1346062 - DNA, 15 bp, Homo sapiens
tttgaacttagggct

SEQ ID NO: 1346063 - DNA, 15 bp, Homo sapiens
atttgaacttagggc

SEQ ID NO: 1346064 - DNA, 15 bp, Homo sapiens
tatttgaacttaggg

SEQ ID NO: 1346065 - DNA, 15 bp, Homo sapiens
gtatttgaacttagg

SEQ ID NO: 1346066 - DNA, 15 bp, Homo sapiens
agtatttgaacttag

SEQ ID NO: 1346067 - DNA, 15 bp, Homo sapiens
tagtatttgaactta

SEQ ID NO: 1346068 - DNA, 15 bp, Homo sapiens
ttagtatttgaactt

SEQ ID NO: 1346069 - DNA, 15 bp, Homo sapiens
gttagtatttgaact

SEQ ID NO: 1346070 - DNA, 15 bp, Homo sapiens
ggttagtatttgaac

SEQ ID NO: 1346071 - DNA, 15 bp, Homo sapiens
gggttagtatttgaa

SEQ ID NO: 1346072 - DNA, 15 bp, Homo sapiens
agggttagtatttga

SEQ ID NO: 1346073 - DNA, 15 bp, Homo sapiens
aagggttagtatttg

SEQ ID NO: 1346074 - DNA, 15 bp, Homo sapiens
gaagggttagtattt

SEQ ID NO: 1346075 - DNA, 15 bp, Homo sapiens
tgaagggttagtatt

SEQ ID NO: 1346076 - DNA, 15 bp, Homo sapiens
gtgaagggttagtat

SEQ ID NO: 1346077 - DNA, 15 bp, Homo sapiens
ggtgaagggttagta

SEQ ID NO: 1346078 - DNA, 15 bp, Homo sapiens
aggtgaagggttagt

SEQ ID NO: 1346079 - DNA, 15 bp, Homo sapiens
taggtgaagggttag

SEQ ID NO: 1346080 - DNA, 15 bp, Homo sapiens
gtaggtgaagggtta

SEQ ID NO: 1346081 - DNA, 15 bp, Homo sapiens
agtaggtgaagggtt

SEQ ID NO: 1346082 - DNA, 15 bp, Homo sapiens
aagtaggtgaagggt

SEQ ID NO: 1346083 - DNA, 15 bp, Homo sapiens
caagtaggtgaaggg

SEQ ID NO: 1346084 - DNA, 15 bp, Homo sapiens
ccaagtaggtgaagg

SEQ ID NO: 1346085 - DNA, 15 bp, Homo sapiens
accaagtaggtgaag

SEQ ID NO: 1346086 - DNA, 15 bp, Homo sapiens
taccaagtaggtgaa

SEQ ID NO: 1346087 - DNA, 15 bp, Homo sapiens
ctaccaagtaggtga

SEQ ID NO: 1346088 - DNA, 15 bp, Homo sapiens
cctaccaagtaggtg

SEQ ID NO: 1346089 - DNA, 15 bp, Homo sapiens
gcctaccaagtaggt

SEQ ID NO: 1346090 - DNA, 15 bp, Homo sapiens
tgcctaccaagtagg

SEQ ID NO: 1346091 - DNA, 15 bp, Homo sapiens
ctgcctaccaagtag

SEQ ID NO: 1346092 - DNA, 15 bp, Homo sapiens
gctgcctaccaagta

SEQ ID NO: 1346093 - DNA, 15 bp, Homo sapiens
ggctgcctaccaagt

SEQ ID NO: 1346094 - DNA, 15 bp, Homo sapiens
aggctgcctaccaag

SEQ ID NO: 1346095 - DNA, 15 bp, Homo sapiens
aaggctgcctaccaa

SEQ ID NO: 1346096 - DNA, 15 bp, Homo sapiens
caaggctgcctacca

SEQ ID NO: 1346097 - DNA, 15 bp, Homo sapiens
ccaaggctgcctacc

SEQ ID NO: 1346098 - DNA, 15 bp, Homo sapiens
accaaggctgcctac

SEQ ID NO: 1346099 - DNA, 15 bp, Homo sapiens
caccaaggctgccta

SEQ ID NO: 1346100 - DNA, 15 bp, Homo sapiens
tcaccaaggctgcct

SEQ ID NO: 1346101 - DNA, 15 bp, Homo sapiens
ttcaccaaggctgcc

SEQ ID NO: 1346102 - DNA, 15 bp, Homo sapiens
cttcaccaaggctgc

SEQ ID NO: 1346103 - DNA, 15 bp, Homo sapiens
acttcaccaaggctg

SEQ ID NO: 1346104 - DNA, 15 bp, Homo sapiens
gacttcaccaaggct

SEQ ID NO: 1346105 - DNA, 15 bp, Homo sapiens
tgacttcaccaaggc

SEQ ID NO: 1346106 - DNA, 15 bp, Homo sapiens
atgacttcaccaagg

SEQ ID NO: 1346107 - DNA, 15 bp, Homo sapiens
aatgacttcaccaag

SEQ ID NO: 1346108 - DNA, 15 bp, Homo sapiens
taatgacttcaccaa

SEQ ID NO: 1346109 - DNA, 15 bp, Homo sapiens
ttaatgacttcacca

SEQ ID NO: 1346110 - DNA, 15 bp, Homo sapiens
tttaatgacttcacc

SEQ ID NO: 1346111 - DNA, 15 bp, Homo sapiens
gtttaatgacttcac

SEQ ID NO: 1346112 - DNA, 15 bp, Homo sapiens
agtttaatgacttca

SEQ ID NO: 1346113 - DNA, 15 bp, Homo sapiens
aagtttaatgacttc

SEQ ID NO: 1346114 - DNA, 15 bp, Homo sapiens
aaagtttaatgactt

SEQ ID NO: 1346115 - DNA, 15 bp, Homo sapiens
aaaagtttaatgact

SEQ ID NO: 1346116 - DNA, 15 bp, Homo sapiens
gaaaagtttaatgac

SEQ ID NO: 1346117 - DNA, 15 bp, Homo sapiens
agaaaagtttaatga

SEQ ID NO: 1346118 - DNA, 15 bp, Homo sapiens
cagaaaagtttaatg

SEQ ID NO: 1346119 - DNA, 15 bp, Homo sapiens
tcagaaaagtttaat

SEQ ID NO: 1346120 - DNA, 15 bp, Homo sapiens
ttcagaaaagtttaa

SEQ ID NO: 1346121 - DNA, 15 bp, Homo sapiens
gttcagaaaagttta

SEQ ID NO: 1346122 - DNA, 15 bp, Homo sapiens
ggttcagaaaagttt

SEQ ID NO: 1346123 - DNA, 15 bp, Homo sapiens
aggttcagaaaagtt

SEQ ID NO: 1346124 - DNA, 15 bp, Homo sapiens
caggttcagaaaagt

SEQ ID NO: 1346125 - DNA, 15 bp, Homo sapiens
acaggttcagaaaag

SEQ ID NO: 1346126 - DNA, 15 bp, Homo sapiens
aacaggttcagaaaa

SEQ ID NO: 1346127 - DNA, 15 bp, Homo sapiens
aaacaggttcagaaa

SEQ ID NO: 1346128 - DNA, 15 bp, Homo sapiens
aaaacaggttcagaa

SEQ ID NO: 1346129 - DNA, 15 bp, Homo sapiens
gaaaacaggttcaga

SEQ ID NO: 1346130 - DNA, 15 bp, Homo sapiens
tgaaaacaggttcag

SEQ ID NO: 1346131 - DNA, 15 bp, Homo sapiens
ttgaaaacaggttca

SEQ ID NO: 1346132 - DNA, 15 bp, Homo sapiens
gttgaaaacaggttc

SEQ ID NO: 1346133 - DNA, 15 bp, Homo sapiens
agttgaaaacaggtt

SEQ ID NO: 1346134 - DNA, 15 bp, Homo sapiens
gagttgaaaacaggt

SEQ ID NO: 1346135 - DNA, 15 bp, Homo sapiens
ggagttgaaaacagg

SEQ ID NO: 1346136 - DNA, 15 bp, Homo sapiens
aggagttgaaaacag

SEQ ID NO: 1346137 - DNA, 15 bp, Homo sapiens
gaggagttgaaaaca

SEQ ID NO: 1346138 - DNA, 15 bp, Homo sapiens
tgaggagttgaaaac

SEQ ID NO: 1346139 - DNA, 15 bp, Homo sapiens
ttgaggagttgaaaa

SEQ ID NO: 1346140 - DNA, 15 bp, Homo sapiens
tttgaggagttgaaa

SEQ ID NO: 1346141 - DNA, 15 bp, Homo sapiens
ttttgaggagttgaa

SEQ ID NO: 1346142 - DNA, 15 bp, Homo sapiens
attttgaggagttga

SEQ ID NO: 1346143 - DNA, 15 bp, Homo sapiens
cattttgaggagttg

SEQ ID NO: 1346144 - DNA, 15 bp, Homo sapiens
ccattttgaggagtt

SEQ ID NO: 1346145 - DNA, 15 bp, Homo sapiens
tccattttgaggagt

SEQ ID NO: 1346146 - DNA, 15 bp, Homo sapiens
gtccattttgaggag

SEQ ID NO: 1346147 - DNA, 15 bp, Homo sapiens
agtccattttgagga

SEQ ID NO: 1346148 - DNA, 15 bp, Homo sapiens
tagtccattttgagg

SEQ ID NO: 1346149 - DNA, 15 bp, Homo sapiens
atagtccattttgag

SEQ ID NO: 1346150 - DNA, 15 bp, Homo sapiens
gatagtccattttga

SEQ ID NO: 1346151 - DNA, 15 bp, Homo sapiens
tgatagtccattttg

SEQ ID NO: 1346152 - DNA, 15 bp, Homo sapiens
atgatagtccatttt

SEQ ID NO: 1346153 - DNA, 15 bp, Homo sapiens
gatgatagtccattt

SEQ ID NO: 1346154 - DNA, 15 bp, Homo sapiens
tgatgatagtccatt

SEQ ID NO: 1346155 - DNA, 15 bp, Homo sapiens
ctgatgatagtccat

SEQ ID NO: 1346156 - DNA, 15 bp, Homo sapiens
actgatgatagtcca

SEQ ID NO: 1346157 - DNA, 15 bp, Homo sapiens
cactgatgatagtcc

SEQ ID NO: 1346158 - DNA, 15 bp, Homo sapiens
acactgatgatagtc

SEQ ID NO: 1346159 - DNA, 15 bp, Homo sapiens
tacactgatgatagt

SEQ ID NO: 1346160 - DNA, 15 bp, Homo sapiens
ctacactgatgatag

SEQ ID NO: 1346161 - DNA, 15 bp, Homo sapiens
actacactgatgata

SEQ ID NO: 1346162 - DNA, 15 bp, Homo sapiens
tactacactgatgat

SEQ ID NO: 1346163 - DNA, 15 bp, Homo sapiens
atactacactgatga

SEQ ID NO: 1346164 - DNA, 15 bp, Homo sapiens
tatactacactgatg

SEQ ID NO: 1346165 - DNA, 15 bp, Homo sapiens
atatactacactgat

SEQ ID NO: 1346166 - DNA, 15 bp, Homo sapiens
catatactacactga

SEQ ID NO: 1346167 - DNA, 15 bp, Homo sapiens
gcatatactacactg

SEQ ID NO: 1346168 - DNA, 15 bp, Homo sapiens
agcatatactacact

SEQ ID NO: 1346169 - DNA, 15 bp, Homo sapiens
gagcatatactacac

SEQ ID NO: 1346170 - DNA, 15 bp, Homo sapiens
tgagcatatactaca

SEQ ID NO: 1346171 - DNA, 15 bp, Homo sapiens
ttgagcatatactac

SEQ ID NO: 1346172 - DNA, 15 bp, Homo sapiens
attgagcatatacta

SEQ ID NO: 1346173 - DNA, 15 bp, Homo sapiens
tattgagcatatact

SEQ ID NO: 1346174 - DNA, 15 bp, Homo sapiens
atattgagcatatac

SEQ ID NO: 1346175 - DNA, 15 bp, Homo sapiens
gatattgagcatata

SEQ ID NO: 1346176 - DNA, 15 bp, Homo sapiens
ggatattgagcatat

SEQ ID NO: 1346177 - DNA, 15 bp, Homo sapiens
tggatattgagcata

SEQ ID NO: 1346178 - DNA, 15 bp, Homo sapiens
gtggatattgagcat

SEQ ID NO: 1346179 - DNA, 15 bp, Homo sapiens
agtggatattgagca

SEQ ID NO: 1346180 - DNA, 15 bp, Homo sapiens
aagtggatattgagc

SEQ ID NO: 1346181 - DNA, 15 bp, Homo sapiens
caagtggatattgag

SEQ ID NO: 1346182 - DNA, 15 bp, Homo sapiens
acaagtggatattga

SEQ ID NO: 1346183 - DNA, 15 bp, Homo sapiens
aacaagtggatattg

SEQ ID NO: 1346184 - DNA, 15 bp, Homo sapiens
gaacaagtggatatt

SEQ ID NO: 1346185 - DNA, 15 bp, Homo sapiens
tgaacaagtggatat

SEQ ID NO: 1346186 - DNA, 15 bp, Homo sapiens
gtgaacaagtggata

SEQ ID NO: 1346187 - DNA, 15 bp, Homo sapiens
agtgaacaagtggat

SEQ ID NO: 1346188 - DNA, 15 bp, Homo sapiens
aagtgaacaagtgga

SEQ ID NO: 1346189 - DNA, 15 bp, Homo sapiens
aaagtgaacaagtgg

SEQ ID NO: 1346190 - DNA, 15 bp, Homo sapiens
aaaagtgaacaagtg

SEQ ID NO: 1346191 - DNA, 15 bp, Homo sapiens
gaaaagtgaacaagt

SEQ ID NO: 1346192 - DNA, 15 bp, Homo sapiens
ggaaaagtgaacaag

SEQ ID NO: 1346193 - DNA, 15 bp, Homo sapiens
aggaaaagtgaacaa

SEQ ID NO: 1346194 - DNA, 15 bp, Homo sapiens
taggaaaagtgaaca

SEQ ID NO: 1346195 - DNA, 15 bp, Homo sapiens
gtaggaaaagtgaac

SEQ ID NO: 1346196 - DNA, 15 bp, Homo sapiens
ggtaggaaaagtgaa

SEQ ID NO: 1346197 - DNA, 15 bp, Homo sapiens
gggtaggaaaagtga

SEQ ID NO: 1346198 - DNA, 15 bp, Homo sapiens
agggtaggaaaagtg

SEQ ID NO: 1346199 - DNA, 15 bp, Homo sapiens
aagggtaggaaaagt

SEQ ID NO: 1346200 - DNA, 15 bp, Homo sapiens
gaagggtaggaaaag

SEQ ID NO: 1346201 - DNA, 15 bp, Homo sapiens
agaagggtaggaaaa

SEQ ID NO: 1346202 - DNA, 15 bp, Homo sapiens
aagaagggtaggaaa

SEQ ID NO: 1346203 - DNA, 15 bp, Homo sapiens
taagaagggtaggaa

SEQ ID NO: 1346204 - DNA, 15 bp, Homo sapiens
gtaagaagggtagga

SEQ ID NO: 1346205 - DNA, 15 bp, Homo sapiens
tgtaagaagggtagg

SEQ ID NO: 1346206 - DNA, 15 bp, Homo sapiens
atgtaagaagggtag

SEQ ID NO: 1346207 - DNA, 15 bp, Homo sapiens
tatgtaagaagggta

SEQ ID NO: 1346208 - DNA, 15 bp, Homo sapiens
ttatgtaagaagggt

SEQ ID NO: 1346209 - DNA, 15 bp, Homo sapiens
tttatgtaagaaggg

SEQ ID NO: 1346210 - DNA, 15 bp, Homo sapiens
atttatgtaagaagg

SEQ ID NO: 1346211 - DNA, 15 bp, Homo sapiens
gatttatgtaagaag

SEQ ID NO: 1346212 - DNA, 15 bp, Homo sapiens
tgatttatgtaagaa

SEQ ID NO: 1346213 - DNA, 15 bp, Homo sapiens
ctgatttatgtaaga

SEQ ID NO: 1346214 - DNA, 15 bp, Homo sapiens
cctgatttatgtaag

SEQ ID NO: 1346215 - DNA, 15 bp, Homo sapiens
ccctgatttatgtaa

SEQ ID NO: 1346216 - DNA, 15 bp, Homo sapiens
cccctgatttatgta

SEQ ID NO: 1346217 - DNA, 15 bp, Homo sapiens
acccctgatttatgt

SEQ ID NO: 1346218 - DNA, 15 bp, Homo sapiens
gacccctgatttatg

SEQ ID NO: 1346219 - DNA, 15 bp, Homo sapiens
tgacccctgatttat

SEQ ID NO: 1346220 - DNA, 15 bp, Homo sapiens
gtgacccctgattta

SEQ ID NO: 1346221 - DNA, 15 bp, Homo sapiens
cgtgacccctgattt

SEQ ID NO: 1346222 - DNA, 15 bp, Homo sapiens
acgtgacccctgatt

SEQ ID NO: 1346223 - DNA, 15 bp, Homo sapiens
cacgtgacccctgat

SEQ ID NO: 1346224 - DNA, 15 bp, Homo sapiens
acacgtgacccctga

SEQ ID NO: 1346225 - DNA, 15 bp, Homo sapiens
aacacgtgacccctg

SEQ ID NO: 1346226 - DNA, 15 bp, Homo sapiens
gaacacgtgacccct

SEQ ID NO: 1346227 - DNA, 15 bp, Homo sapiens
cgaacacgtgacccc

SEQ ID NO: 1346228 - DNA, 15 bp, Homo sapiens
acgaacacgtgaccc

SEQ ID NO: 1346229 - DNA, 15 bp, Homo sapiens
cacgaacacgtgacc

SEQ ID NO: 1346230 - DNA, 15 bp, Homo sapiens
acacgaacacgtgac

SEQ ID NO: 1346231 - DNA, 15 bp, Homo sapiens
aacacgaacacgtga

SEQ ID NO: 1346232 - DNA, 15 bp, Homo sapiens
gaacacgaacacgtg

SEQ ID NO: 1346233 - DNA, 15 bp, Homo sapiens
agaacacgaacacgt

SEQ ID NO: 1346234 - DNA, 15 bp, Homo sapiens
aagaacacgaacacg

SEQ ID NO: 1346235 - DNA, 15 bp, Homo sapiens
gaagaacacgaacac

SEQ ID NO: 1346236 - DNA, 15 bp, Homo sapiens
ggaagaacacgaaca

SEQ ID NO: 1346237 - DNA, 15 bp, Homo sapiens
tggaagaacacgaac

SEQ ID NO: 1346238 - DNA, 15 bp, Homo sapiens
ttggaagaacacgaa

SEQ ID NO: 1346239 - DNA, 15 bp, Homo sapiens
tttggaagaacacga

SEQ ID NO: 1346240 - DNA, 15 bp, Homo sapiens
atttggaagaacacg

SEQ ID NO: 1346241 - DNA, 15 bp, Homo sapiens
catttggaagaacac

SEQ ID NO: 1346242 - DNA, 15 bp, Homo sapiens
gcatttggaagaaca

SEQ ID NO: 1346243 - DNA, 15 bp, Homo sapiens
tgcatttggaagaac

SEQ ID NO: 1346244 - DNA, 15 bp, Homo sapiens
atgcatttggaagaa

SEQ ID NO: 1346245 - DNA, 15 bp, Homo sapiens
gatgcatttggaaga

SEQ ID NO: 1346246 - DNA, 15 bp, Homo sapiens
tgatgcatttggaag

SEQ ID NO: 1346247 - DNA, 15 bp, Homo sapiens
ttgatgcatttggaa

SEQ ID NO: 1346248 - DNA, 15 bp, Homo sapiens
attgatgcatttgga

SEQ ID NO: 1346249 - DNA, 15 bp, Homo sapiens
cattgatgcatttgg

SEQ ID NO: 1346250 - DNA, 15 bp, Homo sapiens
ccattgatgcatttg

SEQ ID NO: 1346251 - DNA, 15 bp, Homo sapiens
gccattgatgcattt

SEQ ID NO: 1346252 - DNA, 15 bp, Homo sapiens
tgccattgatgcatt

SEQ ID NO: 1346253 - DNA, 15 bp, Homo sapiens
ttgccattgatgcat

SEQ ID NO: 1346254 - DNA, 15 bp, Homo sapiens
tttgccattgatgca

SEQ ID NO: 1346255 - DNA, 15 bp, Homo sapiens
ttttgccattgatgc

SEQ ID NO: 1346256 - DNA, 15 bp, Homo sapiens
tttttgccattgatg

SEQ ID NO: 1346257 - DNA, 15 bp, Homo sapiens
ctttttgccattgat

SEQ ID NO: 1346258 - DNA, 15 bp, Homo sapiens
actttttgccattga

SEQ ID NO: 1346259 - DNA, 15 bp, Homo sapiens
tactttttgccattg

SEQ ID NO: 1346260 - DNA, 15 bp, Homo sapiens
ttactttttgccatt

SEQ ID NO: 1346261 - DNA, 15 bp, Homo sapiens
tttactttttgccat

SEQ ID NO: 1346262 - DNA, 15 bp, Homo sapiens
ttttactttttgcca

SEQ ID NO: 1346263 - DNA, 15 bp, Homo sapiens
gttttactttttgcc

SEQ ID NO: 1346264 - DNA, 15 bp, Homo sapiens
agttttactttttgc

SEQ ID NO: 1346265 - DNA, 15 bp, Homo sapiens
aagttttactttttg

SEQ ID NO: 1346266 - DNA, 15 bp, Homo sapiens
aaagttttacttttt

SEQ ID NO: 1346267 - DNA, 15 bp, Homo sapiens
caaagttttactttt

SEQ ID NO: 1346268 - DNA, 15 bp, Homo sapiens
tcaaagttttacttt

SEQ ID NO: 1346269 - DNA, 15 bp, Homo sapiens
gtcaaagttttactt

SEQ ID NO: 1346270 - DNA, 15 bp, Homo sapiens
tgtcaaagttttact

SEQ ID NO: 1346271 - DNA, 15 bp, Homo sapiens
atgtcaaagttttac

SEQ ID NO: 1346272 - DNA, 15 bp, Homo sapiens
catgtcaaagtttta

SEQ ID NO: 1346273 - DNA, 15 bp, Homo sapiens
tcatgtcaaagtttt

SEQ ID NO: 1346274 - DNA, 15 bp, Homo sapiens
gtcatgtcaaagttt

SEQ ID NO: 1346275 - DNA, 15 bp, Homo sapiens
agtcatgtcaaagtt

SEQ ID NO: 1346276 - DNA, 15 bp, Homo sapiens
gagtcatgtcaaagt

SEQ ID NO: 1346277 - DNA, 15 bp, Homo sapiens
tgagtcatgtcaaag

SEQ ID NO: 1346278 - DNA, 15 bp, Homo sapiens
gtgagtcatgtcaaa

SEQ ID NO: 1346279 - DNA, 15 bp, Homo sapiens
ggtgagtcatgtcaa

SEQ ID NO: 1346280 - DNA, 15 bp, Homo sapiens
gggtgagtcatgtca

SEQ ID NO: 1346281 - DNA, 15 bp, Homo sapiens
agggtgagtcatgtc

SEQ ID NO: 1346282 - DNA, 15 bp, Homo sapiens
tagggtgagtcatgt

SEQ ID NO: 1346283 - DNA, 15 bp, Homo sapiens
atagggtgagtcatg

SEQ ID NO: 1346284 - DNA, 15 bp, Homo sapiens
tatagggtgagtcat

SEQ ID NO: 1346285 - DNA, 15 bp, Homo sapiens
ctatagggtgagtca

SEQ ID NO: 1346286 - DNA, 15 bp, Homo sapiens
tctatagggtgagtc

SEQ ID NO: 1346287 - DNA, 15 bp, Homo sapiens
ctctatagggtgagt

SEQ ID NO: 1346288 - DNA, 15 bp, Homo sapiens
actctatagggtgag

SEQ ID NO: 1346289 - DNA, 15 bp, Homo sapiens
tactctatagggtga

SEQ ID NO: 1346290 - DNA, 15 bp, Homo sapiens
ttactctatagggtg

SEQ ID NO: 1346291 - DNA, 15 bp, Homo sapiens
cttactctatagggt

SEQ ID NO: 1346292 - DNA, 15 bp, Homo sapiens
tcttactctataggg

SEQ ID NO: 1346293 - DNA, 15 bp, Homo sapiens
gtcttactctatagg

SEQ ID NO: 1346294 - DNA, 15 bp, Homo sapiens
agtcttactctatag

SEQ ID NO: 1346295 - DNA, 15 bp, Homo sapiens
aagtcttactctata

SEQ ID NO: 1346296 - DNA, 15 bp, Homo sapiens
caagtcttactctat

SEQ ID NO: 1346297 - DNA, 15 bp, Homo sapiens
tcaagtcttactcta

SEQ ID NO: 1346298 - DNA, 15 bp, Homo sapiens
atcaagtcttactct

SEQ ID NO: 1346299 - DNA, 15 bp, Homo sapiens
gatcaagtcttactc

SEQ ID NO: 1346300 - DNA, 15 bp, Homo sapiens
agatcaagtcttact

SEQ ID NO: 1346301 - DNA, 15 bp, Homo sapiens
aagatcaagtcttac

SEQ ID NO: 1346302 - DNA, 15 bp, Homo sapiens
caagatcaagtctta

SEQ ID NO: 1346303 - DNA, 15 bp, Homo sapiens
gcaagatcaagtctt

SEQ ID NO: 1346304 - DNA, 15 bp, Homo sapiens
ggcaagatcaagtct

SEQ ID NO: 1346305 - DNA, 15 bp, Homo sapiens
tggcaagatcaagtc

SEQ ID NO: 1346306 - DNA, 15 bp, Homo sapiens
atggcaagatcaagt

SEQ ID NO: 1346307 - DNA, 15 bp, Homo sapiens
tatggcaagatcaag

SEQ ID NO: 1346308 - DNA, 15 bp, Homo sapiens
ttatggcaagatcaa

SEQ ID NO: 1346309 - DNA, 15 bp, Homo sapiens
cttatggcaagatca

SEQ ID NO: 1346310 - DNA, 15 bp, Homo sapiens
acttatggcaagatc

SEQ ID NO: 1346311 - DNA, 15 bp, Homo sapiens
tacttatggcaagat

SEQ ID NO: 1346312 - DNA, 15 bp, Homo sapiens
atacttatggcaaga

SEQ ID NO: 1346313 - DNA, 15 bp, Homo sapiens
aatacttatggcaag

SEQ ID NO: 1346314 - DNA, 15 bp, Homo sapiens
taatacttatggcaa

SEQ ID NO: 1346315 - DNA, 15 bp, Homo sapiens
ctaatacttatggca

SEQ ID NO: 1346316 - DNA, 15 bp, Homo sapiens
actaatacttatggc

SEQ ID NO: 1346317 - DNA, 15 bp, Homo sapiens
cactaatacttatgg

SEQ ID NO: 1346318 - DNA, 15 bp, Homo sapiens
tcactaatacttatg

SEQ ID NO: 1346319 - DNA, 15 bp, Homo sapiens
ctcactaatacttat

SEQ ID NO: 1346320 - DNA, 15 bp, Homo sapiens
tctcactaatactta

SEQ ID NO: 1346321 - DNA, 15 bp, Homo sapiens
ctctcactaatactt

SEQ ID NO: 1346322 - DNA, 15 bp, Homo sapiens
tctctcactaatact

SEQ ID NO: 1346323 - DNA, 15 bp, Homo sapiens
gtctctcactaatac

SEQ ID NO: 1346324 - DNA, 15 bp, Homo sapiens
tgtctctcactaata

SEQ ID NO: 1346325 - DNA, 15 bp, Homo sapiens
atgtctctcactaat

SEQ ID NO: 1346326 - DNA, 15 bp, Homo sapiens
aatgtctctcactaa

SEQ ID NO: 1346327 - DNA, 15 bp, Homo sapiens
gaatgtctctcacta

SEQ ID NO: 1346328 - DNA, 15 bp, Homo sapiens
ggaatgtctctcact

SEQ ID NO: 1346329 - DNA, 15 bp, Homo sapiens
gggaatgtctctcac

SEQ ID NO: 1346330 - DNA, 15 bp, Homo sapiens
ggggaatgtctctca

SEQ ID NO: 1346331 - DNA, 15 bp, Homo sapiens
aggggaatgtctctc

SEQ ID NO: 1346332 - DNA, 15 bp, Homo sapiens
caggggaatgtctct

SEQ ID NO: 1346333 - DNA, 15 bp, Homo sapiens
acaggggaatgtctc

SEQ ID NO: 1346334 - DNA, 15 bp, Homo sapiens
gacaggggaatgtct

SEQ ID NO: 1346335 - DNA, 15 bp, Homo sapiens
agacaggggaatgtc

SEQ ID NO: 1346336 - DNA, 15 bp, Homo sapiens
gagacaggggaatgt

SEQ ID NO: 1346337 - DNA, 15 bp, Homo sapiens
tgagacaggggaatg

SEQ ID NO: 1346338 - DNA, 15 bp, Homo sapiens
atgagacaggggaat

SEQ ID NO: 1346339 - DNA, 15 bp, Homo sapiens
aatgagacaggggaa

SEQ ID NO: 1346340 - DNA, 15 bp, Homo sapiens
aaatgagacagggga

SEQ ID NO: 1346341 - DNA, 15 bp, Homo sapiens
taaatgagacagggg

SEQ ID NO: 1346342 - DNA, 15 bp, Homo sapiens
ataaatgagacaggg

SEQ ID NO: 1346343 - DNA, 15 bp, Homo sapiens
aataaatgagacagg

SEQ ID NO: 1346344 - DNA, 15 bp, Homo sapiens
taataaatgagacag

SEQ ID NO: 1346345 - DNA, 15 bp, Homo sapiens
ataataaatgagaca

SEQ ID NO: 1346346 - DNA, 15 bp, Homo sapiens
tataataaatgagac

SEQ ID NO: 1346347 - DNA, 15 bp, Homo sapiens
gtataataaatgaga

SEQ ID NO: 1346348 - DNA, 15 bp, Homo sapiens
tgtataataaatgag

SEQ ID NO: 1346349 - DNA, 15 bp, Homo sapiens
ctgtataataaatga

SEQ ID NO: 1346350 - DNA, 15 bp, Homo sapiens
actgtataataaatg

SEQ ID NO: 1346351 - DNA, 15 bp, Homo sapiens
cactgtataataaat

SEQ ID NO: 1346352 - DNA, 15 bp, Homo sapiens
tcactgtataataaa

SEQ ID NO: 1346353 - DNA, 15 bp, Homo sapiens
ttcactgtataataa

SEQ ID NO: 1346354 - DNA, 15 bp, Homo sapiens
tttcactgtataata

SEQ ID NO: 1346355 - DNA, 15 bp, Homo sapiens
atttcactgtataat

SEQ ID NO: 1346356 - DNA, 15 bp, Homo sapiens
tatttcactgtataa

SEQ ID NO: 1346357 - DNA, 15 bp, Homo sapiens
ctatttcactgtata

SEQ ID NO: 1346358 - DNA, 15 bp, Homo sapiens
cctatttcactgtat

SEQ ID NO: 1346359 - DNA, 15 bp, Homo sapiens
gcctatttcactgta

SEQ ID NO: 1346360 - DNA, 15 bp, Homo sapiens
ggcctatttcactgt

SEQ ID NO: 1346361 - DNA, 15 bp, Homo sapiens
aggcctatttcactg

SEQ ID NO: 1346362 - DNA, 15 bp, Homo sapiens
taggcctatttcact

SEQ ID NO: 1346363 - DNA, 15 bp, Homo sapiens
ttaggcctatttcac

SEQ ID NO: 1346364 - DNA, 15 bp, Homo sapiens
tttaggcctatttca

SEQ ID NO: 1346365 - DNA, 15 bp, Homo sapiens
ctttaggcctatttc

SEQ ID NO: 1346366 - DNA, 15 bp, Homo sapiens
cctttaggcctattt

SEQ ID NO: 1346367 - DNA, 15 bp, Homo sapiens
tcctttaggcctatt

SEQ ID NO: 1346368 - DNA, 15 bp, Homo sapiens
gtcctttaggcctat

SEQ ID NO: 1346369 - DNA, 15 bp, Homo sapiens
tgtcctttaggccta

SEQ ID NO: 1346370 - DNA, 15 bp, Homo sapiens
gtgtcctttaggcct

SEQ ID NO: 1346371 - DNA, 15 bp, Homo sapiens
tgtgtcctttaggcc

SEQ ID NO: 1346372 - DNA, 15 bp, Homo sapiens
ctgtgtcctttaggc

SEQ ID NO: 1346373 - DNA, 15 bp, Homo sapiens
tctgtgtcctttagg

SEQ ID NO: 1346374 - DNA, 15 bp, Homo sapiens
ctctgtgtcctttag

SEQ ID NO: 1346375 - DNA, 15 bp, Homo sapiens
actctgtgtccttta

SEQ ID NO: 1346376 - DNA, 15 bp, Homo sapiens
tactctgtgtccttt

SEQ ID NO: 1346377 - DNA, 15 bp, Homo sapiens
atactctgtgtcctt

SEQ ID NO: 1346378 - DNA, 15 bp, Homo sapiens
aatactctgtgtcct

SEQ ID NO: 1346379 - DNA, 15 bp, Homo sapiens
aaatactctgtgtcc

SEQ ID NO: 1346380 - DNA, 15 bp, Homo sapiens
aaaatactctgtgtc

SEQ ID NO: 1346381 - DNA, 15 bp, Homo sapiens
aaaaatactctgtgt

SEQ ID NO: 1346382 - DNA, 15 bp, Homo sapiens
aaaaaatactctgtg

SEQ ID NO: 1346383 - DNA, 15 bp, Homo sapiens
taaaaaatactctgt

SEQ ID NO: 1346384 - DNA, 15 bp, Homo sapiens
ttaaaaaatactctg

SEQ ID NO: 1346385 - DNA, 15 bp, Homo sapiens
cttaaaaaatactct

SEQ ID NO: 1346386 - DNA, 15 bp, Homo sapiens
tcttaaaaaatactc

SEQ ID NO: 1346387 - DNA, 15 bp, Homo sapiens
ttcttaaaaaatact

SEQ ID NO: 1346388 - DNA, 15 bp, Homo sapiens
cttcttaaaaaatac

SEQ ID NO: 1346389 - DNA, 15 bp, Homo sapiens
tcttcttaaaaaata

SEQ ID NO: 1346390 - DNA, 15 bp, Homo sapiens
ttcttcttaaaaaat

SEQ ID NO: 1346391 - DNA, 15 bp, Homo sapiens
tttcttcttaaaaaa

SEQ ID NO: 1346392 - DNA, 15 bp, Homo sapiens
gtttcttcttaaaaa

SEQ ID NO: 1346393 - DNA, 15 bp, Homo sapiens
agtttcttcttaaaa

SEQ ID NO: 1346394 - DNA, 15 bp, Homo sapiens
cagtttcttcttaaa

SEQ ID NO: 1346395 - DNA, 15 bp, Homo sapiens
tcagtttcttcttaa

SEQ ID NO: 1346396 - DNA, 15 bp, Homo sapiens
atcagtttcttctta

SEQ ID NO: 1346397 - DNA, 15 bp, Homo sapiens
gatcagtttcttctt

SEQ ID NO: 1346398 - DNA, 15 bp, Homo sapiens
tgatcagtttcttct

SEQ ID NO: 1346399 - DNA, 15 bp, Homo sapiens
ctgatcagtttcttc

SEQ ID NO: 1346400 - DNA, 15 bp, Homo sapiens
cctgatcagtttctt

SEQ ID NO: 1346401 - DNA, 15 bp, Homo sapiens
ccctgatcagtttct

SEQ ID NO: 1346402 - DNA, 15 bp, Homo sapiens
tccctgatcagtttc

SEQ ID NO: 1346403 - DNA, 15 bp, Homo sapiens
ttccctgatcagttt

SEQ ID NO: 1346404 - DNA, 15 bp, Homo sapiens
tttccctgatcagtt

SEQ ID NO: 1346405 - DNA, 15 bp, Homo sapiens
gtttccctgatcagt

SEQ ID NO: 1346406 - DNA, 15 bp, Homo sapiens
agtttccctgatcag

SEQ ID NO: 1346407 - DNA, 15 bp, Homo sapiens
tagtttccctgatca

SEQ ID NO: 1346408 - DNA, 15 bp, Homo sapiens
atagtttccctgatc

SEQ ID NO: 1346409 - DNA, 15 bp, Homo sapiens
aatagtttccctgat

SEQ ID NO: 1346410 - DNA, 15 bp, Homo sapiens
aaatagtttccctga

SEQ ID NO: 1346411 - DNA, 15 bp, Homo sapiens
aaaatagtttccctg

SEQ ID NO: 1346412 - DNA, 15 bp, Homo sapiens
taaaatagtttccct

SEQ ID NO: 1346413 - DNA, 15 bp, Homo sapiens
ttaaaatagtttccc

SEQ ID NO: 1346414 - DNA, 15 bp, Homo sapiens
attaaaatagtttcc

SEQ ID NO: 1346415 - DNA, 15 bp, Homo sapiens
cattaaaatagtttc

SEQ ID NO: 1346416 - DNA, 15 bp, Homo sapiens
tcattaaaatagttt

SEQ ID NO: 1346417 - DNA, 15 bp, Homo sapiens
ctcattaaaatagtt

SEQ ID NO: 1346418 - DNA, 15 bp, Homo sapiens
gctcattaaaatagt

SEQ ID NO: 1346419 - DNA, 15 bp, Homo sapiens
tgctcattaaaatag

SEQ ID NO: 1346420 - DNA, 15 bp, Homo sapiens
gtgctcattaaaata

SEQ ID NO: 1346421 - DNA, 15 bp, Homo sapiens
ggtgctcattaaaat

SEQ ID NO: 1346422 - DNA, 15 bp, Homo sapiens
gggtgctcattaaaa

SEQ ID NO: 1346423 - DNA, 15 bp, Homo sapiens
tgggtgctcattaaa

SEQ ID NO: 1346424 - DNA, 15 bp, Homo sapiens
ctgggtgctcattaa

SEQ ID NO: 1346425 - DNA, 15 bp, Homo sapiens
gctgggtgctcatta

SEQ ID NO: 1346426 - DNA, 15 bp, Homo sapiens
agctgggtgctcatt

SEQ ID NO: 1346427 - DNA, 15 bp, Homo sapiens
cagctgggtgctcat

SEQ ID NO: 1346428 - DNA, 15 bp, Homo sapiens
tcagctgggtgctca

SEQ ID NO: 1346429 - DNA, 15 bp, Homo sapiens
ttcagctgggtgctc

SEQ ID NO: 1346430 - DNA, 15 bp, Homo sapiens
cttcagctgggtgct

SEQ ID NO: 1346431 - DNA, 15 bp, Homo sapiens
ccttcagctgggtgc

SEQ ID NO: 1346432 - DNA, 15 bp, Homo sapiens
accttcagctgggtg

SEQ ID NO: 1346433 - DNA, 15 bp, Homo sapiens
aaccttcagctgggt

SEQ ID NO: 1346434 - DNA, 15 bp, Homo sapiens
taaccttcagctggg

SEQ ID NO: 1346435 - DNA, 15 bp, Homo sapiens
ttaaccttcagctgg

SEQ ID NO: 1346436 - DNA, 15 bp, Homo sapiens
attaaccttcagctg

SEQ ID NO: 1346437 - DNA, 15 bp, Homo sapiens
aattaaccttcagct

SEQ ID NO: 1346438 - DNA, 15 bp, Homo sapiens
aaattaaccttcagc

SEQ ID NO: 1346439 - DNA, 15 bp, Homo sapiens
gaaattaaccttcag

SEQ ID NO: 1346440 - DNA, 15 bp, Homo sapiens
tgaaattaaccttca

SEQ ID NO: 1346441 - DNA, 15 bp, Homo sapiens
ctgaaattaaccttc

SEQ ID NO: 1346442 - DNA, 15 bp, Homo sapiens
tctgaaattaacctt

SEQ ID NO: 1346443 - DNA, 15 bp, Homo sapiens
ttctgaaattaacct

SEQ ID NO: 1346444 - DNA, 15 bp, Homo sapiens
attctgaaattaacc

SEQ ID NO: 1346445 - DNA, 15 bp, Homo sapiens
cattctgaaattaac

SEQ ID NO: 1346446 - DNA, 15 bp, Homo sapiens
gcattctgaaattaa

SEQ ID NO: 1346447 - DNA, 15 bp, Homo sapiens
agcattctgaaatta

SEQ ID NO: 1346448 - DNA, 15 bp, Homo sapiens
gagcattctgaaatt

SEQ ID NO: 1346449 - DNA, 15 bp, Homo sapiens
agagcattctgaaat

SEQ ID NO: 1346450 - DNA, 15 bp, Homo sapiens
cagagcattctgaaa

SEQ ID NO: 1346451 - DNA, 15 bp, Homo sapiens
ccagagcattctgaa

SEQ ID NO: 1346452 - DNA, 15 bp, Homo sapiens
accagagcattctga

SEQ ID NO: 1346453 - DNA, 15 bp, Homo sapiens
taccagagcattctg

SEQ ID NO: 1346454 - DNA, 15 bp, Homo sapiens
gtaccagagcattct

SEQ ID NO: 1346455 - DNA, 15 bp, Homo sapiens
ggtaccagagcattc

SEQ ID NO: 1346456 - DNA, 15 bp, Homo sapiens
aggtaccagagcatt

SEQ ID NO: 1346457 - DNA, 15 bp, Homo sapiens
caggtaccagagcat

SEQ ID NO: 1346458 - DNA, 15 bp, Homo sapiens
tcaggtaccagagca

SEQ ID NO: 1346459 - DNA, 15 bp, Homo sapiens
ctcaggtaccagagc

SEQ ID NO: 1346460 - DNA, 15 bp, Homo sapiens
actcaggtaccagag

SEQ ID NO: 1346461 - DNA, 15 bp, Homo sapiens
aactcaggtaccaga

SEQ ID NO: 1346462 - DNA, 15 bp, Homo sapiens
gaactcaggtaccag

SEQ ID NO: 1346463 - DNA, 15 bp, Homo sapiens
tgaactcaggtacca

SEQ ID NO: 1346464 - DNA, 15 bp, Homo sapiens
atgaactcaggtacc

SEQ ID NO: 1346465 - DNA, 15 bp, Homo sapiens
aatgaactcaggtac

SEQ ID NO: 1346466 - DNA, 15 bp, Homo sapiens
gaatgaactcaggta

SEQ ID NO: 1346467 - DNA, 15 bp, Homo sapiens
agaatgaactcaggt

SEQ ID NO: 1346468 - DNA, 15 bp, Homo sapiens
gagaatgaactcagg

SEQ ID NO: 1346469 - DNA, 15 bp, Homo sapiens
agagaatgaactcag

SEQ ID NO: 1346470 - DNA, 15 bp, Homo sapiens
gagagaatgaactca

SEQ ID NO: 1346471 - DNA, 15 bp, Homo sapiens
tgagagaatgaactc

SEQ ID NO: 1346472 - DNA, 15 bp, Homo sapiens
atgagagaatgaact

SEQ ID NO: 1346473 - DNA, 15 bp, Homo sapiens
tatgagagaatgaac

SEQ ID NO: 1346474 - DNA, 15 bp, Homo sapiens
gtatgagagaatgaa

SEQ ID NO: 1346475 - DNA, 15 bp, Homo sapiens
ggtatgagagaatga

SEQ ID NO: 1346476 - DNA, 15 bp, Homo sapiens
tggtatgagagaatg

SEQ ID NO: 1346477 - DNA, 15 bp, Homo sapiens
gtggtatgagagaat

SEQ ID NO: 1346478 - DNA, 15 bp, Homo sapiens
tcagtggtatgagag

SEQ ID NO: 1346479 - DNA, 15 bp, Homo sapiens
ctcagtggtatgaga

SEQ ID NO: 1346480 - DNA, 15 bp, Homo sapiens
cctcagtggtatgag

SEQ ID NO: 1346481 - DNA, 15 bp, Homo sapiens
tcctcagtggtatga

SEQ ID NO: 1346482 - DNA, 15 bp, Homo sapiens
ttcctcagtggtatg

SEQ ID NO: 1346483 - DNA, 15 bp, Homo sapiens
tttcctcagtggtat

SEQ ID NO: 1346484 - DNA, 15 bp, Homo sapiens
ttttcctcagtggta

SEQ ID NO: 1346485 - DNA, 15 bp, Homo sapiens
attttcctcagtggt

SEQ ID NO: 1346486 - DNA, 15 bp, Homo sapiens
cattttcctcagtgg

SEQ ID NO: 1346487 - DNA, 15 bp, Homo sapiens
ccattttcctcagtg

SEQ ID NO: 1346488 - DNA, 15 bp, Homo sapiens
tccattttcctcagt

SEQ ID NO: 1346489 - DNA, 15 bp, Homo sapiens
ttccattttcctcag

SEQ ID NO: 1346490 - DNA, 15 bp, Homo sapiens
tttccattttcctca

SEQ ID NO: 1346491 - DNA, 15 bp, Homo sapiens
ttttccattttcctc

SEQ ID NO: 1346492 - DNA, 15 bp, Homo sapiens
attttccattttcct

SEQ ID NO: 1346493 - DNA, 15 bp, Homo sapiens
cattttccattttcc

SEQ ID NO: 1346494 - DNA, 15 bp, Homo sapiens
tcattttccattttc

SEQ ID NO: 1346495 - DNA, 15 bp, Homo sapiens
catcattttccattt

SEQ ID NO: 1346496 - DNA, 15 bp, Homo sapiens
ccatcattttccatt

SEQ ID NO: 1346497 - DNA, 15 bp, Homo sapiens
cccatcattttccat

SEQ ID NO: 1346498 - DNA, 15 bp, Homo sapiens
tcccatcattttcca

SEQ ID NO: 1346499 - DNA, 15 bp, Homo sapiens
gtcccatcattttcc

SEQ ID NO: 1346500 - DNA, 15 bp, Homo sapiens
tgtcccatcattttc

SEQ ID NO: 1346501 - DNA, 15 bp, Homo sapiens
ttgtcccatcatttt

SEQ ID NO: 1346502 - DNA, 15 bp, Homo sapiens
tttgtcccatcattt

SEQ ID NO: 1346503 - DNA, 15 bp, Homo sapiens
ttttgtcccatcatt

SEQ ID NO: 1346504 - DNA, 15 bp, Homo sapiens
attttgtcccatcat

SEQ ID NO: 1346505 - DNA, 15 bp, Homo sapiens
cattttgtcccatca

SEQ ID NO: 1346506 - DNA, 15 bp, Homo sapiens
gcattttgtcccatc

SEQ ID NO: 1346507 - DNA, 15 bp, Homo sapiens
agcattttgtcccat

SEQ ID NO: 1346508 - DNA, 15 bp, Homo sapiens
gagcattttgtccca

SEQ ID NO: 1346509 - DNA, 15 bp, Homo sapiens
ggagcattttgtccc

SEQ ID NO: 1346510 - DNA, 15 bp, Homo sapiens
aggagcattttgtcc

SEQ ID NO: 1346511 - DNA, 15 bp, Homo sapiens
caggagcattttgtc

SEQ ID NO: 1346512 - DNA, 15 bp, Homo sapiens
acaggagcattttgt

SEQ ID NO: 1346513 - DNA, 15 bp, Homo sapiens
tacaggagcattttg

SEQ ID NO: 1346514 - DNA, 15 bp, Homo sapiens
ttacaggagcatttt

SEQ ID NO: 1346515 - DNA, 15 bp, Homo sapiens
tttacaggagcattt

SEQ ID NO: 1346516 - DNA, 15 bp, Homo sapiens
atttacaggagcatt

SEQ ID NO: 1346517 - DNA, 15 bp, Homo sapiens
aatttacaggagcat

SEQ ID NO: 1346518 - DNA, 15 bp, Homo sapiens
agaaatttacaggag

SEQ ID NO: 1346519 - DNA, 15 bp, Homo sapiens
tagaaatttacagga

SEQ ID NO: 1346520 - DNA, 15 bp, Homo sapiens
atagaaatttacagg

SEQ ID NO: 1346521 - DNA, 15 bp, Homo sapiens
gatagaaatttacag

SEQ ID NO: 1346522 - DNA, 15 bp, Homo sapiens
cgatagaaatttaca

SEQ ID NO: 1346523 - DNA, 15 bp, Homo sapiens
acgatagaaatttac

SEQ ID NO: 1346524 - DNA, 15 bp, Homo sapiens
aacgatagaaattta

SEQ ID NO: 1346525 - DNA, 15 bp, Homo sapiens
caacgatagaaattt

SEQ ID NO: 1346526 - DNA, 15 bp, Homo sapiens
ccaacgatagaaatt

SEQ ID NO: 1346527 - DNA, 15 bp, Homo sapiens
gccaacgatagaaat

SEQ ID NO: 1346528 - DNA, 15 bp, Homo sapiens
tgccaacgatagaaa

SEQ ID NO: 1346529 - DNA, 15 bp, Homo sapiens
atgccaacgatagaa

SEQ ID NO: 1346530 - DNA, 15 bp, Homo sapiens
aatgccaacgataga

SEQ ID NO: 1346531 - DNA, 15 bp, Homo sapiens
caatgccaacgatag

SEQ ID NO: 1346532 - DNA, 15 bp, Homo sapiens
gcaatgccaacgata

SEQ ID NO: 1346533 - DNA, 15 bp, Homo sapiens
agcaatgccaacgat

SEQ ID NO: 1346534 - DNA, 15 bp, Homo sapiens
gagcaatgccaacga

SEQ ID NO: 1346535 - DNA, 15 bp, Homo sapiens
ggagcaatgccaacg

SEQ ID NO: 1346536 - DNA, 15 bp, Homo sapiens
gggagcaatgccaac

SEQ ID NO: 1346537 - DNA, 15 bp, Homo sapiens
agggagcaatgccaa

SEQ ID NO: 1346538 - DNA, 15 bp, Homo sapiens
aagggagcaatgcca

SEQ ID NO: 1346539 - DNA, 15 bp, Homo sapiens
caagggagcaatgcc

SEQ ID NO: 1346540 - DNA, 15 bp, Homo sapiens
acaagggagcaatgc

SEQ ID NO: 1346541 - DNA, 15 bp, Homo sapiens
cacaagggagcaatg

SEQ ID NO: 1346542 - DNA, 15 bp, Homo sapiens
acacaagggagcaat

SEQ ID NO: 1346543 - DNA, 15 bp, Homo sapiens
tacacaagggagcaa

SEQ ID NO: 1346544 - DNA, 15 bp, Homo sapiens
ctacacaagggagca

SEQ ID NO: 1346545 - DNA, 15 bp, Homo sapiens
actacacaagggagc

SEQ ID NO: 1346546 - DNA, 15 bp, Homo sapiens
tactacacaagggag

SEQ ID NO: 1346547 - DNA, 15 bp, Homo sapiens
atactacacaaggga

SEQ ID NO: 1346548 - DNA, 15 bp, Homo sapiens
tatactacacaaggg

SEQ ID NO: 1346549 - DNA, 15 bp, Homo sapiens
ttatactacacaagg

SEQ ID NO: 1346550 - DNA, 15 bp, Homo sapiens
cttatactacacaag

SEQ ID NO: 1346551 - DNA, 15 bp, Homo sapiens
tcttatactacacaa

SEQ ID NO: 1346552 - DNA, 15 bp, Homo sapiens
ctcttatactacaca

SEQ ID NO: 1346553 - DNA, 15 bp, Homo sapiens
tctcttatactacac

SEQ ID NO: 1346554 - DNA, 15 bp, Homo sapiens
atctcttatactaca

SEQ ID NO: 1346555 - DNA, 15 bp, Homo sapiens
gatctcttatactac

SEQ ID NO: 1346556 - DNA, 15 bp, Homo sapiens
agatctcttatacta

SEQ ID NO: 1346557 - DNA, 15 bp, Homo sapiens
aagatctcttatact

SEQ ID NO: 1346558 - DNA, 15 bp, Homo sapiens
caagatctcttatac

SEQ ID NO: 1346559 - DNA, 15 bp, Homo sapiens
gcaagatctcttata

SEQ ID NO: 1346560 - DNA, 15 bp, Homo sapiens
tgcaagatctcttat

SEQ ID NO: 1346561 - DNA, 15 bp, Homo sapiens
ttgcaagatctctta

SEQ ID NO: 1346562 - DNA, 15 bp, Homo sapiens
tttgcaagatctctt

SEQ ID NO: 1346563 - DNA, 15 bp, Homo sapiens
ttttgcaagatctct

SEQ ID NO: 1346564 - DNA, 15 bp, Homo sapiens
tttttgcaagatctc

SEQ ID NO: 1346565 - DNA, 15 bp, Homo sapiens
ctttttgcaagatct

SEQ ID NO: 1346566 - DNA, 15 bp, Homo sapiens
cctttttgcaagatc

SEQ ID NO: 1346567 - DNA, 15 bp, Homo sapiens
gcctttttgcaagat

SEQ ID NO: 1346568 - DNA, 15 bp, Homo sapiens
tgcctttttgcaaga

SEQ ID NO: 1346569 - DNA, 15 bp, Homo sapiens
ttgcctttttgcaag

SEQ ID NO: 1346570 - DNA, 15 bp, Homo sapiens
tttgcctttttgcaa

SEQ ID NO: 1346571 - DNA, 15 bp, Homo sapiens
ctttgcctttttgca

SEQ ID NO: 1346572 - DNA, 15 bp, Homo sapiens
cctttgcctttttgc

SEQ ID NO: 1346573 - DNA, 15 bp, Homo sapiens
ccctttgcctttttg

SEQ ID NO: 1346574 - DNA, 15 bp, Homo sapiens
cccctttgccttttt

SEQ ID NO: 1346575 - DNA, 15 bp, Homo sapiens
tcccctttgcctttt

SEQ ID NO: 1346576 - DNA, 15 bp, Homo sapiens
gtcccctttgccttt

SEQ ID NO: 1346577 - DNA, 15 bp, Homo sapiens
ggtcccctttgcctt

SEQ ID NO: 1346578 - DNA, 15 bp, Homo sapiens
aggtcccctttgcct

SEQ ID NO: 1346579 - DNA, 15 bp, Homo sapiens
caggtcccctttgcc

SEQ ID NO: 1346580 - DNA, 15 bp, Homo sapiens
ccaggtcccctttgc

SEQ ID NO: 1346581 - DNA, 15 bp, Homo sapiens
tccaggtcccctttg

SEQ ID NO: 1346582 - DNA, 15 bp, Homo sapiens
ctccaggtccccttt

SEQ ID NO: 1346583 - DNA, 15 bp, Homo sapiens
actccaggtcccctt

SEQ ID NO: 1346584 - DNA, 15 bp, Homo sapiens
gactccaggtcccct

SEQ ID NO: 1346585 - DNA, 15 bp, Homo sapiens
tgactccaggtcccc

SEQ ID NO: 1346586 - DNA, 15 bp, Homo sapiens
ctgactccaggtccc

SEQ ID NO: 1346587 - DNA, 15 bp, Homo sapiens
tctgactccaggtcc

SEQ ID NO: 1346588 - DNA, 15 bp, Homo sapiens
ctctgactccaggtc

SEQ ID NO: 1346589 - DNA, 15 bp, Homo sapiens
tctctgactccaggt

SEQ ID NO: 1346590 - DNA, 15 bp, Homo sapiens
ctctctgactccagg

SEQ ID NO: 1346591 - DNA, 15 bp, Homo sapiens
tctctctgactccag

SEQ ID NO: 1346592 - DNA, 15 bp, Homo sapiens
gtctctctgactcca

SEQ ID NO: 1346593 - DNA, 15 bp, Homo sapiens
agtctctctgactcc

SEQ ID NO: 1346594 - DNA, 15 bp, Homo sapiens
aagtctctctgactc

SEQ ID NO: 1346595 - DNA, 15 bp, Homo sapiens
caagtctctctgact

SEQ ID NO: 1346596 - DNA, 15 bp, Homo sapiens
tcaagtctctctgac

SEQ ID NO: 1346597 - DNA, 15 bp, Homo sapiens
ttcaagtctctctga

SEQ ID NO: 1346598 - DNA, 15 bp, Homo sapiens
attcaagtctctctg

SEQ ID NO: 1346599 - DNA, 15 bp, Homo sapiens
gattcaagtctctct

SEQ ID NO: 1346600 - DNA, 15 bp, Homo sapiens
agattcaagtctctc

SEQ ID NO: 1346601 - DNA, 15 bp, Homo sapiens
cagattcaagtctct

SEQ ID NO: 1346602 - DNA, 15 bp, Homo sapiens
tcagattcaagtctc

SEQ ID NO: 1346603 - DNA, 15 bp, Homo sapiens
ttcagattcaagtct

SEQ ID NO: 1346604 - DNA, 15 bp, Homo sapiens
gttcagattcaagtc

SEQ ID NO: 1346605 - DNA, 15 bp, Homo sapiens
tgttcagattcaagt

SEQ ID NO: 1346606 - DNA, 15 bp, Homo sapiens
gtgttcagattcaag

SEQ ID NO: 1346607 - DNA, 15 bp, Homo sapiens
ggtgttcagattcaa

SEQ ID NO: 1346608 - DNA, 15 bp, Homo sapiens
tggtgttcagattca

SEQ ID NO: 1346609 - DNA, 15 bp, Homo sapiens
ctggtgttcagattc

SEQ ID NO: 1346610 - DNA, 15 bp, Homo sapiens
actggtgttcagatt

SEQ ID NO: 1346611 - DNA, 15 bp, Homo sapiens
tactggtgttcagat

SEQ ID NO: 1346612 - DNA, 15 bp, Homo sapiens
gtactggtgttcaga

SEQ ID NO: 1346613 - DNA, 15 bp, Homo sapiens
agtactggtgttcag

SEQ ID NO: 1346614 - DNA, 15 bp, Homo sapiens
cagtactggtgttca

SEQ ID NO: 1346615 - DNA, 15 bp, Homo sapiens
acagtactggtgttc

SEQ ID NO: 1346616 - DNA, 15 bp, Homo sapiens
gacagtactggtgtt

SEQ ID NO: 1346617 - DNA, 15 bp, Homo sapiens
tgacagtactggtgt

SEQ ID NO: 1346618 - DNA, 15 bp, Homo sapiens
atgacagtactggtg

SEQ ID NO: 1346619 - DNA, 15 bp, Homo sapiens
aatgacagtactggt

SEQ ID NO: 1346620 - DNA, 15 bp, Homo sapiens
taatgacagtactgg

SEQ ID NO: 1346621 - DNA, 15 bp, Homo sapiens
ttaatgacagtactg

SEQ ID NO: 1346622 - DNA, 15 bp, Homo sapiens
gttaatgacagtact

SEQ ID NO: 1346623 - DNA, 15 bp, Homo sapiens
agttaatgacagtac

SEQ ID NO: 1346624 - DNA, 15 bp, Homo sapiens
cagttaatgacagta

SEQ ID NO: 1346625 - DNA, 15 bp, Homo sapiens
acagttaatgacagt

SEQ ID NO: 1346626 - DNA, 15 bp, Homo sapiens
gacagttaatgacag

SEQ ID NO: 1346627 - DNA, 15 bp, Homo sapiens
tgacagttaatgaca

SEQ ID NO: 1346628 - DNA, 15 bp, Homo sapiens
ctgacagttaatgac

SEQ ID NO: 1346629 - DNA, 15 bp, Homo sapiens
tctgacagttaatga

SEQ ID NO: 1346630 - DNA, 15 bp, Homo sapiens
gtctgacagttaatg

SEQ ID NO: 1346631 - DNA, 15 bp, Homo sapiens
ggtctgacagttaat

SEQ ID NO: 1346632 - DNA, 15 bp, Homo sapiens
gggtctgacagttaa

SEQ ID NO: 1346633 - DNA, 15 bp, Homo sapiens
tgggtctgacagtta

SEQ ID NO: 1346634 - DNA, 15 bp, Homo sapiens
atgggtctgacagtt

SEQ ID NO: 1346635 - DNA, 15 bp, Homo sapiens
catgggtctgacagt

SEQ ID NO: 1346636 - DNA, 15 bp, Homo sapiens
gcatgggtctgacag

SEQ ID NO: 1346637 - DNA, 15 bp, Homo sapiens
tgcatgggtctgaca

SEQ ID NO: 1346638 - DNA, 15 bp, Homo sapiens
ttgcatgggtctgac

SEQ ID NO: 1346639 - DNA, 15 bp, Homo sapiens
cttgcatgggtctga

SEQ ID NO: 1346640 - DNA, 15 bp, Homo sapiens
acttgcatgggtctg

SEQ ID NO: 1346641 - DNA, 15 bp, Homo sapiens
aacttgcatgggtct

SEQ ID NO: 1346642 - DNA, 15 bp, Homo sapiens
taacttgcatgggtc

SEQ ID NO: 1346643 - DNA, 15 bp, Homo sapiens
ataacttgcatgggt

SEQ ID NO: 1346644 - DNA, 15 bp, Homo sapiens
aataacttgcatggg

SEQ ID NO: 1346645 - DNA, 15 bp, Homo sapiens
aaataacttgcatgg

SEQ ID NO: 1346646 - DNA, 15 bp, Homo sapiens
taaataacttgcatg

SEQ ID NO: 1346647 - DNA, 15 bp, Homo sapiens
ttaaataacttgcat

SEQ ID NO: 1346648 - DNA, 15 bp, Homo sapiens
gttaaataacttgca

SEQ ID NO: 1346649 - DNA, 15 bp, Homo sapiens
tgttaaataacttgc

SEQ ID NO: 1346650 - DNA, 15 bp, Homo sapiens
atgttaaataacttg

SEQ ID NO: 1346651 - DNA, 15 bp, Homo sapiens
aatgttaaataactt

SEQ ID NO: 1346652 - DNA, 15 bp, Homo sapiens
aaatgttaaataact

SEQ ID NO: 1346653 - DNA, 15 bp, Homo sapiens
gaaatgttaaataac

SEQ ID NO: 1346654 - DNA, 15 bp, Homo sapiens
agaaatgttaaataa

SEQ ID NO: 1346655 - DNA, 15 bp, Homo sapiens
cagaaatgttaaata

SEQ ID NO: 1346656 - DNA, 15 bp, Homo sapiens
tcagaaatgttaaat

SEQ ID NO: 1346657 - DNA, 15 bp, Homo sapiens
ctcagaaatgttaaa

SEQ ID NO: 1346658 - DNA, 15 bp, Homo sapiens
gctcagaaatgttaa

SEQ ID NO: 1346659 - DNA, 15 bp, Homo sapiens
tgctcagaaatgtta

SEQ ID NO: 1346660 - DNA, 15 bp, Homo sapiens
atgctcagaaatgtt

SEQ ID NO: 1346661 - DNA, 15 bp, Homo sapiens
aatgctcagaaatgt

SEQ ID NO: 1346662 - DNA, 15 bp, Homo sapiens
caatgctcagaaatg

SEQ ID NO: 1346663 - DNA, 15 bp, Homo sapiens
tcaatgctcagaaat

SEQ ID NO: 1346664 - DNA, 15 bp, Homo sapiens
atcaatgctcagaaa

SEQ ID NO: 1346665 - DNA, 15 bp, Homo sapiens
aatcaatgctcagaa

SEQ ID NO: 1346666 - DNA, 15 bp, Homo sapiens
aaatcaatgctcaga

SEQ ID NO: 1346667 - DNA, 15 bp, Homo sapiens
gaaatcaatgctcag

SEQ ID NO: 1346668 - DNA, 15 bp, Homo sapiens
agaaatcaatgctca

SEQ ID NO: 1346669 - DNA, 15 bp, Homo sapiens
gagaaatcaatgctc

SEQ ID NO: 1346670 - DNA, 15 bp, Homo sapiens
tgagaaatcaatgct

SEQ ID NO: 1346671 - DNA, 15 bp, Homo sapiens
atgagaaatcaatgc

SEQ ID NO: 1346672 - DNA, 15 bp, Homo sapiens
aatgagaaatcaatg

SEQ ID NO: 1346673 - DNA, 15 bp, Homo sapiens
aaatgagaaatcaat

SEQ ID NO: 1346674 - DNA, 15 bp, Homo sapiens
taaatgagaaatcaa

SEQ ID NO: 1346675 - DNA, 15 bp, Homo sapiens
ataaatgagaaatca

SEQ ID NO: 1346676 - DNA, 15 bp, Homo sapiens
cataaatgagaaatc

SEQ ID NO: 1346677 - DNA, 15 bp, Homo sapiens
tcataaatgagaaat

SEQ ID NO: 1346678 - DNA, 15 bp, Homo sapiens
ttcataaatgagaaa

SEQ ID NO: 1346679 - DNA, 15 bp, Homo sapiens
cttcataaatgagaa

SEQ ID NO: 1346680 - DNA, 15 bp, Homo sapiens
acttcataaatgaga

SEQ ID NO: 1346681 - DNA, 15 bp, Homo sapiens
cacttcataaatgag

SEQ ID NO: 1346682 - DNA, 15 bp, Homo sapiens
tcacttcataaatga

SEQ ID NO: 1346683 - DNA, 15 bp, Homo sapiens
ttcacttcataaatg

SEQ ID NO: 1346684 - DNA, 15 bp, Homo sapiens
tttcacttcataaat

SEQ ID NO: 1346685 - DNA, 15 bp, Homo sapiens
ttttcacttcataaa

SEQ ID NO: 1346686 - DNA, 15 bp, Homo sapiens
attttcacttcataa

SEQ ID NO: 1346687 - DNA, 15 bp, Homo sapiens
aattttcacttcata

SEQ ID NO: 1346688 - DNA, 15 bp, Homo sapiens
taattttcacttcat

SEQ ID NO: 1346689 - DNA, 15 bp, Homo sapiens
ataattttcacttca

SEQ ID NO: 1346690 - DNA, 15 bp, Homo sapiens
tataattttcacttc

SEQ ID NO: 1346691 - DNA, 15 bp, Homo sapiens
ttataattttcactt

SEQ ID NO: 1346692 - DNA, 15 bp, Homo sapiens
attataattttcact

SEQ ID NO: 1346693 - DNA, 15 bp, Homo sapiens
tattataattttcac

SEQ ID NO: 1346694 - DNA, 15 bp, Homo sapiens
ttattataattttca

SEQ ID NO: 1346695 - DNA, 15 bp, Homo sapiens
tttattataattttc

SEQ ID NO: 1346696 - DNA, 15 bp, Homo sapiens
ctttattataatttt

SEQ ID NO: 1346697 - DNA, 15 bp, Homo sapiens
actttattataattt

SEQ ID NO: 1346698 - DNA, 15 bp, Homo sapiens
gactttattataatt

SEQ ID NO: 1346699 - DNA, 15 bp, Homo sapiens
agactttattataat

SEQ ID NO: 1346700 - DNA, 15 bp, Homo sapiens
tagactttattataa

SEQ ID NO: 1346701 - DNA, 15 bp, Homo sapiens
gtagactttattata

SEQ ID NO: 1346702 - DNA, 15 bp, Homo sapiens
ggtagactttattat

SEQ ID NO: 1346703 - DNA, 15 bp, Homo sapiens
aggtagactttatta

SEQ ID NO: 1346704 - DNA, 15 bp, Homo sapiens
gaggtagactttatt

SEQ ID NO: 1346705 - DNA, 15 bp, Homo sapiens
tgaggtagactttat

SEQ ID NO: 1346706 - DNA, 15 bp, Homo sapiens
gtgaggtagacttta

SEQ ID NO: 1346707 - DNA, 15 bp, Homo sapiens
tgtgaggtagacttt

SEQ ID NO: 1346708 - DNA, 15 bp, Homo sapiens
ctgtgaggtagactt

SEQ ID NO: 1346709 - DNA, 15 bp, Homo sapiens
cctgtgaggtagact

SEQ ID NO: 1346710 - DNA, 15 bp, Homo sapiens
gcctgtgaggtagac

SEQ ID NO: 1346711 - DNA, 15 bp, Homo sapiens
agcctgtgaggtaga

SEQ ID NO: 1346712 - DNA, 15 bp, Homo sapiens
aagcctgtgaggtag

SEQ ID NO: 1346713 - DNA, 15 bp, Homo sapiens
caagcctgtgaggta

SEQ ID NO: 1346714 - DNA, 15 bp, Homo sapiens
acaagcctgtgaggt

SEQ ID NO: 1346715 - DNA, 15 bp, Homo sapiens
cacaagcctgtgagg

SEQ ID NO: 1346716 - DNA, 15 bp, Homo sapiens
ccacaagcctgtgag

SEQ ID NO: 1346717 - DNA, 15 bp, Homo sapiens
cccacaagcctgtga

SEQ ID NO: 1346718 - DNA, 15 bp, Homo sapiens
tcccacaagcctgtg

SEQ ID NO: 1346719 - DNA, 15 bp, Homo sapiens
ttcccacaagcctgt

SEQ ID NO: 1346720 - DNA, 15 bp, Homo sapiens
tttcccacaagcctg

SEQ ID NO: 1346721 - DNA, 15 bp, Homo sapiens
ttttcccacaagcct

SEQ ID NO: 1346722 - DNA, 15 bp, Homo sapiens
tttttcccacaagcc

SEQ ID NO: 1346723 - DNA, 15 bp, Homo sapiens
atttttcccacaagc

SEQ ID NO: 1346724 - DNA, 15 bp, Homo sapiens
aatttttcccacaag

SEQ ID NO: 1346725 - DNA, 15 bp, Homo sapiens
taatttttcccacaa

SEQ ID NO: 1346726 - DNA, 15 bp, Homo sapiens
ttaatttttcccaca

SEQ ID NO: 1346727 - DNA, 15 bp, Homo sapiens
tttaatttttcccac

SEQ ID NO: 1346728 - DNA, 15 bp, Homo sapiens
atttaatttttccca

SEQ ID NO: 1346729 - DNA, 15 bp, Homo sapiens
tatttaatttttccc

SEQ ID NO: 1346730 - DNA, 15 bp, Homo sapiens
ttatttaatttttcc

SEQ ID NO: 1346731 - DNA, 15 bp, Homo sapiens
attatttaatttttc

SEQ ID NO: 1346732 - DNA, 15 bp, Homo sapiens
aattatttaattttt

SEQ ID NO: 1346733 - DNA, 15 bp, Homo sapiens
aaattatttaatttt

SEQ ID NO: 1346734 - DNA, 15 bp, Homo sapiens
taaattatttaattt

SEQ ID NO: 1346735 - DNA, 15 bp, Homo sapiens
ttaaattatttaatt

SEQ ID NO: 1346736 - DNA, 15 bp, Homo sapiens
cttaaattatttaat

SEQ ID NO: 1346737 - DNA, 15 bp, Homo sapiens
acttaaattatttaa

SEQ ID NO: 1346738 - DNA, 15 bp, Homo sapiens
tacttaaattattta

SEQ ID NO: 1346739 - DNA, 15 bp, Homo sapiens
ttacttaaattattt

SEQ ID NO: 1346740 - DNA, 15 bp, Homo sapiens
tttacttaaattatt

SEQ ID NO: 1346741 - DNA, 15 bp, Homo sapiens
ttttacttaaattat

SEQ ID NO: 1346742 - DNA, 15 bp, Homo sapiens
attttacttaaatta

SEQ ID NO: 1346743 - DNA, 15 bp, Homo sapiens
cattttacttaaatt

SEQ ID NO: 1346744 - DNA, 15 bp, Homo sapiens
ccattttacttaaat

SEQ ID NO: 1346745 - DNA, 15 bp, Homo sapiens
gccattttacttaaa

SEQ ID NO: 1346746 - DNA, 15 bp, Homo sapiens
agccattttacttaa

SEQ ID NO: 1346747 - DNA, 15 bp, Homo sapiens
aagccattttactta

SEQ ID NO: 1346748 - DNA, 15 bp, Homo sapiens
caagccattttactt

SEQ ID NO: 1346749 - DNA, 15 bp, Homo sapiens
gcaagccattttact

SEQ ID NO: 1346750 - DNA, 15 bp, Homo sapiens
tgcaagccattttac

SEQ ID NO: 1346751 - DNA, 15 bp, Homo sapiens
ttgcaagccatttta

SEQ ID NO: 1346752 - DNA, 15 bp, Homo sapiens
tttgcaagccatttt

SEQ ID NO: 1346753 - DNA, 15 bp, Homo sapiens
ctttgcaagccattt

SEQ ID NO: 1346754 - DNA, 15 bp, Homo sapiens
actttgcaagccatt

SEQ ID NO: 1346755 - DNA, 15 bp, Homo sapiens
cactttgcaagccat

SEQ ID NO: 1346756 - DNA, 15 bp, Homo sapiens
gcactttgcaagcca

SEQ ID NO: 1346757 - DNA, 15 bp, Homo sapiens
ggcactttgcaagcc

SEQ ID NO: 1346758 - DNA, 15 bp, Homo sapiens
aggcactttgcaagc

SEQ ID NO: 1346759 - DNA, 15 bp, Homo sapiens
caggcactttgcaag

SEQ ID NO: 1346760 - DNA, 15 bp, Homo sapiens
tcaggcactttgcaa

SEQ ID NO: 1346761 - DNA, 15 bp, Homo sapiens
gtcaggcactttgca

SEQ ID NO: 1346762 - DNA, 15 bp, Homo sapiens
tgtcaggcactttgc

SEQ ID NO: 1346763 - DNA, 15 bp, Homo sapiens
gtgtcaggcactttg

SEQ ID NO: 1346764 - DNA, 15 bp, Homo sapiens
tgtgtcaggcacttt

SEQ ID NO: 1346765 - DNA, 15 bp, Homo sapiens
atgtgtcaggcactt

SEQ ID NO: 1346766 - DNA, 15 bp, Homo sapiens
catgtgtcaggcact

SEQ ID NO: 1346767 - DNA, 15 bp, Homo sapiens
ccatgtgtcaggcac

SEQ ID NO: 1346768 - DNA, 15 bp, Homo sapiens
accatgtgtcaggca

SEQ ID NO: 1346769 - DNA, 15 bp, Homo sapiens
taccatgtgtcaggc

SEQ ID NO: 1346770 - DNA, 15 bp, Homo sapiens
ttaccatgtgtcagg

SEQ ID NO: 1346771 - DNA, 15 bp, Homo sapiens
cttaccatgtgtcag

SEQ ID NO: 1346772 - DNA, 15 bp, Homo sapiens
acttaccatgtgtca

SEQ ID NO: 1346773 - DNA, 15 bp, Homo sapiens
tacttaccatgtgtc

SEQ ID NO: 1346774 - DNA, 15 bp, Homo sapiens
atacttaccatgtgt

SEQ ID NO: 1346775 - DNA, 15 bp, Homo sapiens
aatacttaccatgtg

SEQ ID NO: 1346776 - DNA, 15 bp, Homo sapiens
gaatacttaccatgt

SEQ ID NO: 1346777 - DNA, 15 bp, Homo sapiens
tgaatacttaccatg

SEQ ID NO: 1346778 - DNA, 15 bp, Homo sapiens
ttgaatacttaccat

SEQ ID NO: 1346779 - DNA, 15 bp, Homo sapiens
gttgaatacttacca

SEQ ID NO: 1346780 - DNA, 15 bp, Homo sapiens
tgttgaatacttacc

SEQ ID NO: 1346781 - DNA, 15 bp, Homo sapiens
ttgttgaatacttac

SEQ ID NO: 1346782 - DNA, 15 bp, Homo sapiens
cttgttgaatactta

SEQ ID NO: 1346783 - DNA, 15 bp, Homo sapiens
acttgttgaatactt

SEQ ID NO: 1346784 - DNA, 15 bp, Homo sapiens
cacttgttgaatact

SEQ ID NO: 1346785 - DNA, 15 bp, Homo sapiens
tcacttgttgaatac

SEQ ID NO: 1346786 - DNA, 15 bp, Homo sapiens
atcacttgttgaata

SEQ ID NO: 1346787 - DNA, 15 bp, Homo sapiens
gatcacttgttgaat

SEQ ID NO: 1346788 - DNA, 15 bp, Homo sapiens
agatcacttgttgaa

SEQ ID NO: 1346789 - DNA, 15 bp, Homo sapiens
aagatcacttgttga

SEQ ID NO: 1346790 - DNA, 15 bp, Homo sapiens
aaagatcacttgttg

SEQ ID NO: 1346791 - DNA, 15 bp, Homo sapiens
taaagatcacttgtt

SEQ ID NO: 1346792 - DNA, 15 bp, Homo sapiens
ataaagatcacttgt

SEQ ID NO: 1346793 - DNA, 15 bp, Homo sapiens
aataaagatcacttg

SEQ ID NO: 1346794 - DNA, 15 bp, Homo sapiens
taataaagatcactt

SEQ ID NO: 1346795 - DNA, 15 bp, Homo sapiens
gtaataaagatcact

SEQ ID NO: 1346796 - DNA, 15 bp, Homo sapiens
tgtaataaagatcac

SEQ ID NO: 1346797 - DNA, 15 bp, Homo sapiens
ttgtaataaagatca

SEQ ID NO: 1346798 - DNA, 15 bp, Homo sapiens
tttgtaataaagatc

SEQ ID NO: 1346799 - DNA, 15 bp, Homo sapiens
ctttgtaataaagat

SEQ ID NO: 1346800 - DNA, 15 bp, Homo sapiens
actttgtaataaaga

SEQ ID NO: 1346801 - DNA, 15 bp, Homo sapiens
tactttgtaataaag

SEQ ID NO: 1346802 - DNA, 15 bp, Homo sapiens
atactttgtaataaa

SEQ ID NO: 1346803 - DNA, 15 bp, Homo sapiens
aatactttgtaataa

SEQ ID NO: 1346804 - DNA, 15 bp, Homo sapiens
taatactttgtaata

SEQ ID NO: 1346805 - DNA, 15 bp, Homo sapiens
ctaatactttgtaat

SEQ ID NO: 1346806 - DNA, 15 bp, Homo sapiens
actaatactttgtaa

SEQ ID NO: 1346807 - DNA, 15 bp, Homo sapiens
gactaatactttgta

SEQ ID NO: 1346808 - DNA, 15 bp, Homo sapiens
ggactaatactttgt

SEQ ID NO: 1346809 - DNA, 15 bp, Homo sapiens
tggactaatactttg

SEQ ID NO: 1346810 - DNA, 15 bp, Homo sapiens
atggactaatacttt

SEQ ID NO: 1346811 - DNA, 15 bp, Homo sapiens
aatggactaatactt

SEQ ID NO: 1346812 - DNA, 15 bp, Homo sapiens
aaatggactaatact

SEQ ID NO: 1346813 - DNA, 15 bp, Homo sapiens
aaaatggactaatac

SEQ ID NO: 1346814 - DNA, 15 bp, Homo sapiens
gaaaatggactaata

SEQ ID NO: 1346815 - DNA, 15 bp, Homo sapiens
tgaaaatggactaat

SEQ ID NO: 1346816 - DNA, 15 bp, Homo sapiens
gtgaaaatggactaa

SEQ ID NO: 1346817 - DNA, 15 bp, Homo sapiens
tgtgaaaatggacta

SEQ ID NO: 1346818 - DNA, 15 bp, Homo sapiens
gtgtgaaaatggact

SEQ ID NO: 1346819 - DNA, 15 bp, Homo sapiens
agtgtgaaaatggac

SEQ ID NO: 1346820 - DNA, 15 bp, Homo sapiens
cagtgtgaaaatgga

SEQ ID NO: 1346821 - DNA, 15 bp, Homo sapiens
gcagtgtgaaaatgg

SEQ ID NO: 1346822 - DNA, 15 bp, Homo sapiens
agcagtgtgaaaatg

SEQ ID NO: 1346823 - DNA, 15 bp, Homo sapiens
tagcagtgtgaaaat

SEQ ID NO: 1346824 - DNA, 15 bp, Homo sapiens
atagcagtgtgaaaa

SEQ ID NO: 1346825 - DNA, 15 bp, Homo sapiens
tatagcagtgtgaaa

SEQ ID NO: 1346826 - DNA, 15 bp, Homo sapiens
ttatagcagtgtgaa

SEQ ID NO: 1346827 - DNA, 15 bp, Homo sapiens
tttatagcagtgtga

SEQ ID NO: 1346828 - DNA, 15 bp, Homo sapiens
ctttatagcagtgtg

SEQ ID NO: 1346829 - DNA, 15 bp, Homo sapiens
tctttatagcagtgt

SEQ ID NO: 1346830 - DNA, 15 bp, Homo sapiens
ttctttatagcagtg

SEQ ID NO: 1346831 - DNA, 15 bp, Homo sapiens
gttctttatagcagt

SEQ ID NO: 1346832 - DNA, 15 bp, Homo sapiens
agttctttatagcag

SEQ ID NO: 1346833 - DNA, 15 bp, Homo sapiens
cagttctttatagca

SEQ ID NO: 1346834 - DNA, 15 bp, Homo sapiens
gcagttctttatagc

SEQ ID NO: 1346835 - DNA, 15 bp, Homo sapiens
ggcagttctttatag

SEQ ID NO: 1346836 - DNA, 15 bp, Homo sapiens
gggcagttctttata

SEQ ID NO: 1346837 - DNA, 15 bp, Homo sapiens
tgggcagttctttat

SEQ ID NO: 1346838 - DNA, 15 bp, Homo sapiens
ttgggcagttcttta

SEQ ID NO: 1346839 - DNA, 15 bp, Homo sapiens
cttgggcagttcttt

SEQ ID NO: 1346840 - DNA, 15 bp, Homo sapiens
ccttgggcagttctt

SEQ ID NO: 1346841 - DNA, 15 bp, Homo sapiens
gccttgggcagttct

SEQ ID NO: 1346842 - DNA, 15 bp, Homo sapiens
agccttgggcagttc

SEQ ID NO: 1346843 - DNA, 15 bp, Homo sapiens
cagccttgggcagtt

SEQ ID NO: 1346844 - DNA, 15 bp, Homo sapiens
gcagccttgggcagt

SEQ ID NO: 1346845 - DNA, 15 bp, Homo sapiens
tgcagccttgggcag

SEQ ID NO: 1346846 - DNA, 15 bp, Homo sapiens
atgcagccttgggca

SEQ ID NO: 1346847 - DNA, 15 bp, Homo sapiens
tatgcagccttgggc

SEQ ID NO: 1346848 - DNA, 15 bp, Homo sapiens
ttatgcagccttggg

SEQ ID NO: 1346849 - DNA, 15 bp, Homo sapiens
attatgcagccttgg

SEQ ID NO: 1346850 - DNA, 15 bp, Homo sapiens
aattatgcagccttg

SEQ ID NO: 1346851 - DNA, 15 bp, Homo sapiens
aaattatgcagcctt

SEQ ID NO: 1346852 - DNA, 15 bp, Homo sapiens
taaattatgcagcct

SEQ ID NO: 1346853 - DNA, 15 bp, Homo sapiens
ataaattatgcagcc

SEQ ID NO: 1346854 - DNA, 15 bp, Homo sapiens
tataaattatgcagc

SEQ ID NO: 1346855 - DNA, 15 bp, Homo sapiens
ttataaattatgcag

SEQ ID NO: 1346856 - DNA, 15 bp, Homo sapiens
tttataaattatgca

SEQ ID NO: 1346857 - DNA, 15 bp, Homo sapiens
ctttataaattatgc

SEQ ID NO: 1346858 - DNA, 15 bp, Homo sapiens
tctttataaattatg

SEQ ID NO: 1346859 - DNA, 15 bp, Homo sapiens
ttctttataaattat

SEQ ID NO: 1346860 - DNA, 15 bp, Homo sapiens
tttctttataaatta

SEQ ID NO: 1346861 - DNA, 15 bp, Homo sapiens
ctttctttataaatt

SEQ ID NO: 1346862 - DNA, 15 bp, Homo sapiens
tctttctttataaat

SEQ ID NO: 1346863 - DNA, 15 bp, Homo sapiens
ttctttctttataaa

SEQ ID NO: 1346864 - DNA, 15 bp, Homo sapiens
cttctttctttataa

SEQ ID NO: 1346865 - DNA, 15 bp, Homo sapiens
tcttctttctttata

SEQ ID NO: 1346866 - DNA, 15 bp, Homo sapiens
atcttctttctttat

SEQ ID NO: 1346867 - DNA, 15 bp, Homo sapiens
aatcttctttcttta

SEQ ID NO: 1346868 - DNA, 15 bp, Homo sapiens
aaatcttctttcttt

SEQ ID NO: 1346869 - DNA, 15 bp, Homo sapiens
taaatcttctttctt

SEQ ID NO: 1346870 - DNA, 15 bp, Homo sapiens
ttaaatcttctttct

SEQ ID NO: 1346871 - DNA, 15 bp, Homo sapiens
attaaatcttctttc

SEQ ID NO: 1346872 - DNA, 15 bp, Homo sapiens
aattaaatcttcttt

SEQ ID NO: 1346873 - DNA, 15 bp, Homo sapiens
caattaaatcttctt

SEQ ID NO: 1346874 - DNA, 15 bp, Homo sapiens
tcaattaaatcttct

SEQ ID NO: 1346875 - DNA, 15 bp, Homo sapiens
gtcaattaaatcttc

SEQ ID NO: 1346876 - DNA, 15 bp, Homo sapiens
agtcaattaaatctt

SEQ ID NO: 1346877 - DNA, 15 bp, Homo sapiens
gagtcaattaaatct

SEQ ID NO: 1346878 - DNA, 15 bp, Homo sapiens
tgagtcaattaaatc

SEQ ID NO: 1346879 - DNA, 15 bp, Homo sapiens
ttgagtcaattaaat

SEQ ID NO: 1346880 - DNA, 15 bp, Homo sapiens
cttgagtcaattaaa

SEQ ID NO: 1346881 - DNA, 15 bp, Homo sapiens
acttgagtcaattaa

SEQ ID NO: 1346882 - DNA, 15 bp, Homo sapiens
aacttgagtcaatta

SEQ ID NO: 1346883 - DNA, 15 bp, Homo sapiens
gaacttgagtcaatt

SEQ ID NO: 1346884 - DNA, 15 bp, Homo sapiens
ggaacttgagtcaat

SEQ ID NO: 1346885 - DNA, 15 bp, Homo sapiens
tggaacttgagtcaa

SEQ ID NO: 1346886 - DNA, 15 bp, Homo sapiens
gtggaacttgagtca

SEQ ID NO: 1346887 - DNA, 15 bp, Homo sapiens
tgtggaacttgagtc

SEQ ID NO: 1346888 - DNA, 15 bp, Homo sapiens
atgtggaacttgagt

SEQ ID NO: 1346889 - DNA, 15 bp, Homo sapiens
catgtggaacttgag

SEQ ID NO: 1346890 - DNA, 15 bp, Homo sapiens
ccatgtggaacttga

SEQ ID NO: 1346891 - DNA, 15 bp, Homo sapiens
gccatgtggaacttg

SEQ ID NO: 1346892 - DNA, 15 bp, Homo sapiens
agccatgtggaactt

SEQ ID NO: 1346893 - DNA, 15 bp, Homo sapiens
tcccagccatgtgga

SEQ ID NO: 1346894 - DNA, 15 bp, Homo sapiens
ttcccagccatgtgg

SEQ ID NO: 1346895 - DNA, 15 bp, Homo sapiens
cttcccagccatgtg

SEQ ID NO: 1346896 - DNA, 15 bp, Homo sapiens
ccttcccagccatgt

SEQ ID NO: 1346897 - DNA, 15 bp, Homo sapiens
gccttcccagccatg

SEQ ID NO: 1346898 - DNA, 15 bp, Homo sapiens
ggccttcccagccat

SEQ ID NO: 1346899 - DNA, 15 bp, Homo sapiens
aggccttcccagcca

SEQ ID NO: 1346900 - DNA, 15 bp, Homo sapiens
gaggccttcccagcc

SEQ ID NO: 1346901 - DNA, 15 bp, Homo sapiens
tgaggccttcccagc

SEQ ID NO: 1346902 - DNA, 15 bp, Homo sapiens
ctgaggccttcccag

SEQ ID NO: 1346903 - DNA, 15 bp, Homo sapiens
cctgaggccttccca

SEQ ID NO: 1346904 - DNA, 15 bp, Homo sapiens
tcctgaggccttccc

SEQ ID NO: 1346905 - DNA, 15 bp, Homo sapiens
ttcctgaggccttcc

SEQ ID NO: 1346906 - DNA, 15 bp, Homo sapiens
tttcctgaggccttc

SEQ ID NO: 1346907 - DNA, 15 bp, Homo sapiens
gtttcctgaggcctt

SEQ ID NO: 1346908 - DNA, 15 bp, Homo sapiens
agtttcctgaggcct

SEQ ID NO: 1346909 - DNA, 15 bp, Homo sapiens
aagtttcctgaggcc

SEQ ID NO: 1346910 - DNA, 15 bp, Homo sapiens
taagtttcctgaggc

SEQ ID NO: 1346911 - DNA, 15 bp, Homo sapiens
gtaagtttcctgagg

SEQ ID NO: 1346912 - DNA, 15 bp, Homo sapiens
tgtaagtttcctgag

SEQ ID NO: 1346913 - DNA, 15 bp, Homo sapiens
ttgtaagtttcctga

SEQ ID NO: 1346914 - DNA, 15 bp, Homo sapiens
attgtaagtttcctg

SEQ ID NO: 1346915 - DNA, 15 bp, Homo sapiens
tattgtaagtttcct

SEQ ID NO: 1346916 - DNA, 15 bp, Homo sapiens
ttattgtaagtttcc

SEQ ID NO: 1346917 - DNA, 15 bp, Homo sapiens
attattgtaagtttc

SEQ ID NO: 1346918 - DNA, 15 bp, Homo sapiens
cattattgtaagttt

SEQ ID NO: 1346919 - DNA, 15 bp, Homo sapiens
ccattattgtaagtt

SEQ ID NO: 1346920 - DNA, 15 bp, Homo sapiens
gccattattgtaagt

SEQ ID NO: 1346921 - DNA, 15 bp, Homo sapiens
tgccattattgtaag

SEQ ID NO: 1346922 - DNA, 15 bp, Homo sapiens
ctgccattattgtaa

SEQ ID NO: 1346923 - DNA, 15 bp, Homo sapiens
tctgccattattgta

SEQ ID NO: 1346924 - DNA, 15 bp, Homo sapiens
ttctgccattattgt

SEQ ID NO: 1346925 - DNA, 15 bp, Homo sapiens
cttctgccattattg

SEQ ID NO: 1346926 - DNA, 15 bp, Homo sapiens
ccttctgccattatt

SEQ ID NO: 1346927 - DNA, 15 bp, Homo sapiens
cccttctgccattat

SEQ ID NO: 1346928 - DNA, 15 bp, Homo sapiens
ccccttctgccatta

SEQ ID NO: 1346929 - DNA, 15 bp, Homo sapiens
tccccttctgccatt

SEQ ID NO: 1346930 - DNA, 15 bp, Homo sapiens
ttccccttctgccat

SEQ ID NO: 1346931 - DNA, 15 bp, Homo sapiens
cttccccttctgcca

SEQ ID NO: 1346932 - DNA, 15 bp, Homo sapiens
gcttccccttctgcc

SEQ ID NO: 1346933 - DNA, 15 bp, Homo sapiens
tgcttccccttctgc

SEQ ID NO: 1346934 - DNA, 15 bp, Homo sapiens
ttgcttccccttctg

SEQ ID NO: 1346935 - DNA, 15 bp, Homo sapiens
tttgcttccccttct

SEQ ID NO: 1346936 - DNA, 15 bp, Homo sapiens
atttgcttccccttc

SEQ ID NO: 1346937 - DNA, 15 bp, Homo sapiens
tatttgcttcccctt

SEQ ID NO: 1346938 - DNA, 15 bp, Homo sapiens
atatttgcttcccct

SEQ ID NO: 1346939 - DNA, 15 bp, Homo sapiens
catatttgcttcccc

SEQ ID NO: 1346940 - DNA, 15 bp, Homo sapiens
acatatttgcttccc

SEQ ID NO: 1346941 - DNA, 15 bp, Homo sapiens
gacatatttgcttcc

SEQ ID NO: 1346942 - DNA, 15 bp, Homo sapiens
ggacatatttgcttc

SEQ ID NO: 1346943 - DNA, 15 bp, Homo sapiens
aggacatatttgctt

SEQ ID NO: 1346944 - DNA, 15 bp, Homo sapiens
aaggacatatttgct

SEQ ID NO: 1346945 - DNA, 15 bp, Homo sapiens
gaaggacatatttgc

SEQ ID NO: 1346946 - DNA, 15 bp, Homo sapiens
agaaggacatatttg

SEQ ID NO: 1346947 - DNA, 15 bp, Homo sapiens
aagaaggacatattt

SEQ ID NO: 1346948 - DNA, 15 bp, Homo sapiens
gaagaaggacatatt

SEQ ID NO: 1346949 - DNA, 15 bp, Homo sapiens
tgaagaaggacatat

SEQ ID NO: 1346950 - DNA, 15 bp, Homo sapiens
gtgaagaaggacata

SEQ ID NO: 1346951 - DNA, 15 bp, Homo sapiens
tgtgaagaaggacat

SEQ ID NO: 1346952 - DNA, 15 bp, Homo sapiens
ttgtgaagaaggaca

SEQ ID NO: 1346953 - DNA, 15 bp, Homo sapiens
cttgtgaagaaggac

SEQ ID NO: 1346954 - DNA, 15 bp, Homo sapiens
ccttgtgaagaagga

SEQ ID NO: 1346955 - DNA, 15 bp, Homo sapiens
gccttgtgaagaagg

SEQ ID NO: 1346956 - DNA, 15 bp, Homo sapiens
tgccttgtgaagaag

SEQ ID NO: 1346957 - DNA, 15 bp, Homo sapiens
ctgccttgtgaagaa

SEQ ID NO: 1346958 - DNA, 15 bp, Homo sapiens
gctgccttgtgaaga

SEQ ID NO: 1346959 - DNA, 15 bp, Homo sapiens
tgctgccttgtgaag

SEQ ID NO: 1346960 - DNA, 15 bp, Homo sapiens
ctgctgccttgtgaa

SEQ ID NO: 1346961 - DNA, 15 bp, Homo sapiens
cctgctgccttgtga

SEQ ID NO: 1346962 - DNA, 15 bp, Homo sapiens
tcctgctgccttgtg

SEQ ID NO: 1346963 - DNA, 15 bp, Homo sapiens
ctcctgctgccttgt

SEQ ID NO: 1346964 - DNA, 15 bp, Homo sapiens
tctcctgctgccttg

SEQ ID NO: 1346965 - DNA, 15 bp, Homo sapiens
ctctcctgctgcctt

SEQ ID NO: 1346966 - DNA, 15 bp, Homo sapiens
tctctcctgctgcct

SEQ ID NO: 1346967 - DNA, 15 bp, Homo sapiens
ttctctcctgctgcc

SEQ ID NO: 1346968 - DNA, 15 bp, Homo sapiens
tttctctcctgctgc

SEQ ID NO: 1346969 - DNA, 15 bp, Homo sapiens
ctttctctcctgctg

SEQ ID NO: 1346970 - DNA, 15 bp, Homo sapiens
cctttctctcctgct

SEQ ID NO: 1346971 - DNA, 15 bp, Homo sapiens
ccctttctctcctgc

SEQ ID NO: 1346972 - DNA, 15 bp, Homo sapiens
accctttctctcctg

SEQ ID NO: 1346973 - DNA, 15 bp, Homo sapiens
taccctttctctcct

SEQ ID NO: 1346974 - DNA, 15 bp, Homo sapiens
ataccctttctctcc

SEQ ID NO: 1346975 - DNA, 15 bp, Homo sapiens
cataccctttctctc

SEQ ID NO: 1346976 - DNA, 15 bp, Homo sapiens
gcataccctttctct

SEQ ID NO: 1346977 - DNA, 15 bp, Homo sapiens
tgcataccctttctc

SEQ ID NO: 1346978 - DNA, 15 bp, Homo sapiens
ctgcataccctttct

SEQ ID NO: 1346979 - DNA, 15 bp, Homo sapiens
actgcataccctttc

SEQ ID NO: 1346980 - DNA, 15 bp, Homo sapiens
cactgcatacccttt

SEQ ID NO: 1346981 - DNA, 15 bp, Homo sapiens
tcactgcataccctt

SEQ ID NO: 1346982 - DNA, 15 bp, Homo sapiens
ttcactgcataccct

SEQ ID NO: 1346983 - DNA, 15 bp, Homo sapiens
cttcactgcataccc

SEQ ID NO: 1346984 - DNA, 15 bp, Homo sapiens
acttcactgcatacc

SEQ ID NO: 1346985 - DNA, 15 bp, Homo sapiens
cacttcactgcatac

SEQ ID NO: 1346986 - DNA, 15 bp, Homo sapiens
ccacttcactgcata

SEQ ID NO: 1346987 - DNA, 15 bp, Homo sapiens
cccacttcactgcat

SEQ ID NO: 1346988 - DNA, 15 bp, Homo sapiens
tcccacttcactgca

SEQ ID NO: 1346989 - DNA, 15 bp, Homo sapiens
ttcccacttcactgc

SEQ ID NO: 1346990 - DNA, 15 bp, Homo sapiens
cttcccacttcactg

SEQ ID NO: 1346991 - DNA, 15 bp, Homo sapiens
tcttcccacttcact

SEQ ID NO: 1346992 - DNA, 15 bp, Homo sapiens
ctcttcccacttcac

SEQ ID NO: 1346993 - DNA, 15 bp, Homo sapiens
gctcttcccacttca

SEQ ID NO: 1346994 - DNA, 15 bp, Homo sapiens
ggctcttcccacttc

SEQ ID NO: 1346995 - DNA, 15 bp, Homo sapiens
aggctcttcccactt

SEQ ID NO: 1346996 - DNA, 15 bp, Homo sapiens
gaggctcttcccact

SEQ ID NO: 1346997 - DNA, 15 bp, Homo sapiens
agaggctcttcccac

SEQ ID NO: 1346998 - DNA, 15 bp, Homo sapiens
aagaggctcttccca

SEQ ID NO: 1346999 - DNA, 15 bp, Homo sapiens
taagaggctcttccc

SEQ ID NO: 1347000 - DNA, 15 bp, Homo sapiens
ataagaggctcttcc

SEQ ID NO: 1347001 - DNA, 15 bp, Homo sapiens
tataagaggctcttc

SEQ ID NO: 1347002 - DNA, 15 bp, Homo sapiens
ttataagaggctctt

SEQ ID NO: 1347003 - DNA, 15 bp, Homo sapiens
tttataagaggctct

SEQ ID NO: 1347004 - DNA, 15 bp, Homo sapiens
ttttataagaggctc

SEQ ID NO: 1347005 - DNA, 15 bp, Homo sapiens
gttttataagaggct

SEQ ID NO: 1347006 - DNA, 15 bp, Homo sapiens
ggttttataagaggc

SEQ ID NO: 1347007 - DNA, 15 bp, Homo sapiens
tggttttataagagg

SEQ ID NO: 1347008 - DNA, 15 bp, Homo sapiens
atggttttataagag

SEQ ID NO: 1347009 - DNA, 15 bp, Homo sapiens
gatggttttataaga

SEQ ID NO: 1347010 - DNA, 15 bp, Homo sapiens
tgatggttttataag

SEQ ID NO: 1347011 - DNA, 15 bp, Homo sapiens
ttctcatgagatctg

SEQ ID NO: 1347012 - DNA, 15 bp, Homo sapiens
cttctcatgagatct

SEQ ID NO: 1347013 - DNA, 15 bp, Homo sapiens
acttctcatgagatc

SEQ ID NO: 1347014 - DNA, 15 bp, Homo sapiens
gacttctcatgagat

SEQ ID NO: 1347015 - DNA, 15 bp, Homo sapiens
tgacttctcatgaga

SEQ ID NO: 1347016 - DNA, 15 bp, Homo sapiens
gtgacttctcatgag

SEQ ID NO: 1347017 - DNA, 15 bp, Homo sapiens
agtgacttctcatga

SEQ ID NO: 1347018 - DNA, 15 bp, Homo sapiens
gagtgacttctcatg

SEQ ID NO: 1347019 - DNA, 15 bp, Homo sapiens
tgagtgacttctcat

SEQ ID NO: 1347020 - DNA, 15 bp, Homo sapiens
gtgagtgacttctca

SEQ ID NO: 1347021 - DNA, 15 bp, Homo sapiens
agtgagtgacttctc

SEQ ID NO: 1347022 - DNA, 15 bp, Homo sapiens
tagtgagtgacttct

SEQ ID NO: 1347023 - DNA, 15 bp, Homo sapiens
atagtgagtgacttc

SEQ ID NO: 1347024 - DNA, 15 bp, Homo sapiens
gatagtgagtgactt

SEQ ID NO: 1347025 - DNA, 15 bp, Homo sapiens
tgatagtgagtgact

SEQ ID NO: 1347026 - DNA, 15 bp, Homo sapiens
gtgatagtgagtgac

SEQ ID NO: 1347027 - DNA, 15 bp, Homo sapiens
cgtgatagtgagtga

SEQ ID NO: 1347028 - DNA, 15 bp, Homo sapiens
ccgtgatagtgagtg

SEQ ID NO: 1347029 - DNA, 15 bp, Homo sapiens
cccgtgatagtgagt

SEQ ID NO: 1347030 - DNA, 15 bp, Homo sapiens
tcccgtgatagtgag

SEQ ID NO: 1347031 - DNA, 15 bp, Homo sapiens
ttcccgtgatagtga

SEQ ID NO: 1347032 - DNA, 15 bp, Homo sapiens
gttcccgtgatagtg

SEQ ID NO: 1347033 - DNA, 15 bp, Homo sapiens
tgttcccgtgatagt

SEQ ID NO: 1347034 - DNA, 15 bp, Homo sapiens
ctgttcccgtgatag

SEQ ID NO: 1347035 - DNA, 15 bp, Homo sapiens
gctgttcccgtgata

SEQ ID NO: 1347036 - DNA, 15 bp, Homo sapiens
tgctgttcccgtgat

SEQ ID NO: 1347037 - DNA, 15 bp, Homo sapiens
atgctgttcccgtga

SEQ ID NO: 1347038 - DNA, 15 bp, Homo sapiens
catgctgttcccgtg

SEQ ID NO: 1347039 - DNA, 15 bp, Homo sapiens
ccatgctgttcccgt

SEQ ID NO: 1347040 - DNA, 15 bp, Homo sapiens
cccatgctgttcccg

SEQ ID NO: 1347041 - DNA, 15 bp, Homo sapiens
ccccatgctgttccc

SEQ ID NO: 1347042 - DNA, 15 bp, Homo sapiens
accccatgctgttcc

SEQ ID NO: 1347043 - DNA, 15 bp, Homo sapiens
taccccatgctgttc

SEQ ID NO: 1347044 - DNA, 15 bp, Homo sapiens
ttaccccatgctgtt

SEQ ID NO: 1347045 - DNA, 15 bp, Homo sapiens
tttaccccatgctgt

SEQ ID NO: 1347046 - DNA, 15 bp, Homo sapiens
gtttaccccatgctg

SEQ ID NO: 1347047 - DNA, 15 bp, Homo sapiens
agtttaccccatgct

SEQ ID NO: 1347048 - DNA, 15 bp, Homo sapiens
cagtttaccccatgc

SEQ ID NO: 1347049 - DNA, 15 bp, Homo sapiens
gcagtttaccccatg

SEQ ID NO: 1347050 - DNA, 15 bp, Homo sapiens
ggcagtttaccccat

SEQ ID NO: 1347051 - DNA, 15 bp, Homo sapiens
gggcagtttacccca

SEQ ID NO: 1347052 - DNA, 15 bp, Homo sapiens
ggggcagtttacccc

SEQ ID NO: 1347053 - DNA, 15 bp, Homo sapiens
gggggcagtttaccc

SEQ ID NO: 1347054 - DNA, 15 bp, Homo sapiens
tgggggcagtttacc

SEQ ID NO: 1347055 - DNA, 15 bp, Homo sapiens
ctgggggcagtttac

SEQ ID NO: 1347056 - DNA, 15 bp, Homo sapiens
cctgggggcagttta

SEQ ID NO: 1347057 - DNA, 15 bp, Homo sapiens
tcctgggggcagttt

SEQ ID NO: 1347058 - DNA, 15 bp, Homo sapiens
atcctgggggcagtt

SEQ ID NO: 1347059 - DNA, 15 bp, Homo sapiens
gatcctgggggcagt

SEQ ID NO: 1347060 - DNA, 15 bp, Homo sapiens
ggatcctgggggcag

SEQ ID NO: 1347061 - DNA, 15 bp, Homo sapiens
tggatcctgggggca

SEQ ID NO: 1347062 - DNA, 15 bp, Homo sapiens
ttggatcctgggggc

SEQ ID NO: 1347063 - DNA, 15 bp, Homo sapiens
attggatcctggggg

SEQ ID NO: 1347064 - DNA, 15 bp, Homo sapiens
gattggatcctgggg

SEQ ID NO: 1347065 - DNA, 15 bp, Homo sapiens
tgattggatcctggg

SEQ ID NO: 1347066 - DNA, 15 bp, Homo sapiens
gtgattggatcctgg

SEQ ID NO: 1347067 - DNA, 15 bp, Homo sapiens
agtgattggatcctg

SEQ ID NO: 1347068 - DNA, 15 bp, Homo sapiens
gagtgattggatcct

SEQ ID NO: 1347069 - DNA, 15 bp, Homo sapiens
ggagtgattggatcc

SEQ ID NO: 1347070 - DNA, 15 bp, Homo sapiens
aggagtgattggatc

SEQ ID NO: 1347071 - DNA, 15 bp, Homo sapiens
gaggagtgattggat

SEQ ID NO: 1347072 - DNA, 15 bp, Homo sapiens
tgaggagtgattgga

SEQ ID NO: 1347073 - DNA, 15 bp, Homo sapiens
gtgaggagtgattgg

SEQ ID NO: 1347074 - DNA, 15 bp, Homo sapiens
ggtgaggagtgattg

SEQ ID NO: 1347075 - DNA, 15 bp, Homo sapiens
tggtgaggagtgatt

SEQ ID NO: 1347076 - DNA, 15 bp, Homo sapiens
gtggtgaggagtgat

SEQ ID NO: 1347077 - DNA, 15 bp, Homo sapiens
cgtggtgaggagtga

SEQ ID NO: 1347078 - DNA, 15 bp, Homo sapiens
acgtggtgaggagtg

SEQ ID NO: 1347079 - DNA, 15 bp, Homo sapiens
gacgtggtgaggagt

SEQ ID NO: 1347080 - DNA, 15 bp, Homo sapiens
agacgtggtgaggag

SEQ ID NO: 1347081 - DNA, 15 bp, Homo sapiens
gagacgtggtgagga

SEQ ID NO: 1347082 - DNA, 15 bp, Homo sapiens
agagacgtggtgagg

SEQ ID NO: 1347083 - DNA, 15 bp, Homo sapiens
gagagacgtggtgag

SEQ ID NO: 1347084 - DNA, 15 bp, Homo sapiens
ggagagacgtggtga

SEQ ID NO: 1347085 - DNA, 15 bp, Homo sapiens
gggagagacgtggtg

SEQ ID NO: 1347086 - DNA, 15 bp, Homo sapiens
agggagagacgtggt

SEQ ID NO: 1347087 - DNA, 15 bp, Homo sapiens
tagggagagacgtgg

SEQ ID NO: 1347088 - DNA, 15 bp, Homo sapiens
ctagggagagacgtg

SEQ ID NO: 1347089 - DNA, 15 bp, Homo sapiens
tctagggagagacgt

SEQ ID NO: 1347090 - DNA, 15 bp, Homo sapiens
gtctagggagagacg

SEQ ID NO: 1347091 - DNA, 15 bp, Homo sapiens
tgtctagggagagac

SEQ ID NO: 1347092 - DNA, 15 bp, Homo sapiens
gtgtctagggagaga

SEQ ID NO: 1347093 - DNA, 15 bp, Homo sapiens
tgtgtctagggagag

SEQ ID NO: 1347094 - DNA, 15 bp, Homo sapiens
atgtgtctagggaga

SEQ ID NO: 1347095 - DNA, 15 bp, Homo sapiens
catgtgtctagggag

SEQ ID NO: 1347096 - DNA, 15 bp, Homo sapiens
ccatgtgtctaggga

SEQ ID NO: 1347097 - DNA, 15 bp, Homo sapiens
tccatgtgtctaggg

SEQ ID NO: 1347098 - DNA, 15 bp, Homo sapiens
ctccatgtgtctagg

SEQ ID NO: 1347099 - DNA, 15 bp, Homo sapiens
tctccatgtgtctag

SEQ ID NO: 1347100 - DNA, 15 bp, Homo sapiens
atctccatgtgtcta

SEQ ID NO: 1347101 - DNA, 15 bp, Homo sapiens
aatctccatgtgtct

SEQ ID NO: 1347102 - DNA, 15 bp, Homo sapiens
taatctccatgtgtc

SEQ ID NO: 1347103 - DNA, 15 bp, Homo sapiens
ataatctccatgtgt

SEQ ID NO: 1347104 - DNA, 15 bp, Homo sapiens
cataatctccatgtg

SEQ ID NO: 1347105 - DNA, 15 bp, Homo sapiens
tcataatctccatgt

SEQ ID NO: 1347106 - DNA, 15 bp, Homo sapiens
ctcataatctccatg

SEQ ID NO: 1347107 - DNA, 15 bp, Homo sapiens
cctcataatctccat

SEQ ID NO: 1347108 - DNA, 15 bp, Homo sapiens
tcctcataatctcca

SEQ ID NO: 1347109 - DNA, 15 bp, Homo sapiens
atcctcataatctcc

SEQ ID NO: 1347110 - DNA, 15 bp, Homo sapiens
aatcctcataatctc

SEQ ID NO: 1347111 - DNA, 15 bp, Homo sapiens
taatcctcataatct

SEQ ID NO: 1347112 - DNA, 15 bp, Homo sapiens
ctaatcctcataatc

SEQ ID NO: 1347113 - DNA, 15 bp, Homo sapiens
tctaatcctcataat

SEQ ID NO: 1347114 - DNA, 15 bp, Homo sapiens
ttctaatcctcataa

SEQ ID NO: 1347115 - DNA, 15 bp, Homo sapiens
attctaatcctcata

SEQ ID NO: 1347116 - DNA, 15 bp, Homo sapiens
aattctaatcctcat

SEQ ID NO: 1347117 - DNA, 15 bp, Homo sapiens
gaattctaatcctca

SEQ ID NO: 1347118 - DNA, 15 bp, Homo sapiens
tgaattctaatcctc

SEQ ID NO: 1347119 - DNA, 15 bp, Homo sapiens
ttgaattctaatcct

SEQ ID NO: 1347120 - DNA, 15 bp, Homo sapiens
cttgaattctaatcc

SEQ ID NO: 1347121 - DNA, 15 bp, Homo sapiens
tcttgaattctaatc

SEQ ID NO: 1347122 - DNA, 15 bp, Homo sapiens
atcttgaattctaat

SEQ ID NO: 1347123 - DNA, 15 bp, Homo sapiens
catcttgaattctaa

SEQ ID NO: 1347124 - DNA, 15 bp, Homo sapiens
tcatcttgaattcta

SEQ ID NO: 1347125 - DNA, 15 bp, Homo sapiens
ctcatcttgaattct

SEQ ID NO: 1347126 - DNA, 15 bp, Homo sapiens
tctcatcttgaattc

SEQ ID NO: 1347127 - DNA, 15 bp, Homo sapiens
ttgtgtccccaccca

SEQ ID NO: 1347128 - DNA, 15 bp, Homo sapiens
tttgtgtccccaccc

SEQ ID NO: 1347129 - DNA, 15 bp, Homo sapiens
ctttgtgtccccacc

SEQ ID NO: 1347130 - DNA, 15 bp, Homo sapiens
gctttgtgtccccac

SEQ ID NO: 1347131 - DNA, 15 bp, Homo sapiens
ggctttgtgtcccca

SEQ ID NO: 1347132 - DNA, 15 bp, Homo sapiens
aggctttgtgtcccc

SEQ ID NO: 1347133 - DNA, 15 bp, Homo sapiens
taggctttgtgtccc

SEQ ID NO: 1347134 - DNA, 15 bp, Homo sapiens
ttaggctttgtgtcc

SEQ ID NO: 1347135 - DNA, 15 bp, Homo sapiens
gttaggctttgtgtc

SEQ ID NO: 1347136 - DNA, 15 bp, Homo sapiens
ggttaggctttgtgt

SEQ ID NO: 1347137 - DNA, 15 bp, Homo sapiens
tggttaggctttgtg

SEQ ID NO: 1347138 - DNA, 15 bp, Homo sapiens
atggttaggctttgt

SEQ ID NO: 1347139 - DNA, 15 bp, Homo sapiens
tatggttaggctttg

SEQ ID NO: 1347140 - DNA, 15 bp, Homo sapiens
atatggttaggcttt

SEQ ID NO: 1347141 - DNA, 15 bp, Homo sapiens
gatatggttaggctt

SEQ ID NO: 1347142 - DNA, 15 bp, Homo sapiens
tgatatggttaggct

SEQ ID NO: 1347143 - DNA, 15 bp, Homo sapiens
atgatatggttaggc

SEQ ID NO: 1347144 - DNA, 15 bp, Homo sapiens
tatgatatggttagg

SEQ ID NO: 1347145 - DNA, 15 bp, Homo sapiens
gtatgatatggttag

SEQ ID NO: 1347146 - DNA, 15 bp, Homo sapiens
agtatgatatggtta

SEQ ID NO: 1347147 - DNA, 15 bp, Homo sapiens
tagtatgatatggtt

SEQ ID NO: 1347148 - DNA, 15 bp, Homo sapiens
ttagtatgatatggt

SEQ ID NO: 1347149 - DNA, 15 bp, Homo sapiens
tttagtatgatatgg

SEQ ID NO: 1347150 - DNA, 15 bp, Homo sapiens
ttttagtatgatatg

SEQ ID NO: 1347151 - DNA, 15 bp, Homo sapiens
gttttagtatgatat

SEQ ID NO: 1347152 - DNA, 15 bp, Homo sapiens
agttttagtatgata

SEQ ID NO: 1347153 - DNA, 15 bp, Homo sapiens
aagttttagtatgat

SEQ ID NO: 1347154 - DNA, 15 bp, Homo sapiens
caagttttagtatga

SEQ ID NO: 1347155 - DNA, 15 bp, Homo sapiens
acaagttttagtatg

SEQ ID NO: 1347156 - DNA, 15 bp, Homo sapiens
aacaagttttagtat

SEQ ID NO: 1347157 - DNA, 15 bp, Homo sapiens
taacaagttttagta

SEQ ID NO: 1347158 - DNA, 15 bp, Homo sapiens
ttaacaagttttagt

SEQ ID NO: 1347159 - DNA, 15 bp, Homo sapiens
gttaacaagttttag

SEQ ID NO: 1347160 - DNA, 15 bp, Homo sapiens
agttaacaagtttta

SEQ ID NO: 1347161 - DNA, 15 bp, Homo sapiens
aagttaacaagtttt

SEQ ID NO: 1347162 - DNA, 15 bp, Homo sapiens
taagttaacaagttt

SEQ ID NO: 1347163 - DNA, 15 bp, Homo sapiens
ttaagttaacaagtt

SEQ ID NO: 1347164 - DNA, 15 bp, Homo sapiens
gttaagttaacaagt

SEQ ID NO: 1347165 - DNA, 15 bp, Homo sapiens
agttaagttaacaag

SEQ ID NO: 1347166 - DNA, 15 bp, Homo sapiens
tagttaagttaacaa

SEQ ID NO: 1347167 - DNA, 15 bp, Homo sapiens
atagttaagttaaca

SEQ ID NO: 1347168 - DNA, 15 bp, Homo sapiens
tatagttaagttaac

SEQ ID NO: 1347169 - DNA, 15 bp, Homo sapiens
gtatagttaagttaa

SEQ ID NO: 1347170 - DNA, 15 bp, Homo sapiens
agtatagttaagtta

SEQ ID NO: 1347171 - DNA, 15 bp, Homo sapiens
tagtatagttaagtt

SEQ ID NO: 1347172 - DNA, 15 bp, Homo sapiens
atagtatagttaagt

SEQ ID NO: 1347173 - DNA, 15 bp, Homo sapiens
tatagtatagttaag

SEQ ID NO: 1347174 - DNA, 15 bp, Homo sapiens
gtatagtatagttaa

SEQ ID NO: 1347175 - DNA, 15 bp, Homo sapiens
agtatagtatagtta

SEQ ID NO: 1347176 - DNA, 15 bp, Homo sapiens
tagtatagtatagtt

SEQ ID NO: 1347177 - DNA, 15 bp, Homo sapiens
atagtatagtatagt

SEQ ID NO: 1347178 - DNA, 15 bp, Homo sapiens
tatagtatagtatag

SEQ ID NO: 1347179 - DNA, 15 bp, Homo sapiens
ctatagtatagtata

SEQ ID NO: 1347180 - DNA, 15 bp, Homo sapiens
actatagtatagtat

SEQ ID NO: 1347181 - DNA, 15 bp, Homo sapiens
tactatagtatagta

SEQ ID NO: 1347182 - DNA, 15 bp, Homo sapiens
atactatagtatagt

SEQ ID NO: 1347183 - DNA, 15 bp, Homo sapiens
tatactatagtatag

SEQ ID NO: 1347184 - DNA, 15 bp, Homo sapiens
ctatactatagtata

SEQ ID NO: 1347185 - DNA, 15 bp, Homo sapiens
actatactatagtat

SEQ ID NO: 1347186 - DNA, 15 bp, Homo sapiens
tactatactatagta

SEQ ID NO: 1347187 - DNA, 15 bp, Homo sapiens
ttactatactatagt

SEQ ID NO: 1347188 - DNA, 15 bp, Homo sapiens
cttactatactatag

SEQ ID NO: 1347189 - DNA, 15 bp, Homo sapiens
acttactatactata

SEQ ID NO: 1347190 - DNA, 15 bp, Homo sapiens
tacttactatactat

SEQ ID NO: 1347191 - DNA, 15 bp, Homo sapiens
atacttactatacta

SEQ ID NO: 1347192 - DNA, 15 bp, Homo sapiens
tatacttactatact

SEQ ID NO: 1347193 - DNA, 15 bp, Homo sapiens
atatacttactatac

SEQ ID NO: 1347194 - DNA, 15 bp, Homo sapiens
tatatacttactata

SEQ ID NO: 1347195 - DNA, 15 bp, Homo sapiens
atatatacttactat

SEQ ID NO: 1347196 - DNA, 15 bp, Homo sapiens
tatatatacttacta

SEQ ID NO: 1347197 - DNA, 15 bp, Homo sapiens
atatatatacttact

SEQ ID NO: 1347198 - DNA, 15 bp, Homo sapiens
tatatatatacttac

SEQ ID NO: 1347199 - DNA, 15 bp, Homo sapiens
ttatatatatactta

SEQ ID NO: 1347200 - DNA, 15 bp, Homo sapiens
gttatatatatactt

SEQ ID NO: 1347201 - DNA, 15 bp, Homo sapiens
agttatatatatact

SEQ ID NO: 1347202 - DNA, 15 bp, Homo sapiens
aagttatatatatac

SEQ ID NO: 1347203 - DNA, 15 bp, Homo sapiens
taagttatatatata

SEQ ID NO: 1347204 - DNA, 15 bp, Homo sapiens
ataagttatatatat

SEQ ID NO: 1347205 - DNA, 15 bp, Homo sapiens
tataagttatatata

SEQ ID NO: 1347206 - DNA, 15 bp, Homo sapiens
atataagttatatat

SEQ ID NO: 1347207 - DNA, 15 bp, Homo sapiens
tatataagttatata

SEQ ID NO: 1347208 - DNA, 15 bp, Homo sapiens
ctatataagttatat

SEQ ID NO: 1347209 - DNA, 15 bp, Homo sapiens
tctatataagttata

SEQ ID NO: 1347210 - DNA, 15 bp, Homo sapiens
ctctatataagttat

SEQ ID NO: 1347211 - DNA, 15 bp, Homo sapiens
tctctatataagtta

SEQ ID NO: 1347212 - DNA, 15 bp, Homo sapiens
ctctctatataagtt

SEQ ID NO: 1347213 - DNA, 15 bp, Homo sapiens
tctctctatataagt

SEQ ID NO: 1347214 - DNA, 15 bp, Homo sapiens
ttctctctatataag

SEQ ID NO: 1347215 - DNA, 15 bp, Homo sapiens
attctctctatataa

SEQ ID NO: 1347216 - DNA, 15 bp, Homo sapiens
tattctctctatata

SEQ ID NO: 1347217 - DNA, 15 bp, Homo sapiens
ttattctctctatat

SEQ ID NO: 1347218 - DNA, 15 bp, Homo sapiens
cttattctctctata

SEQ ID NO: 1347219 - DNA, 15 bp, Homo sapiens
acttattctctctat

SEQ ID NO: 1347220 - DNA, 15 bp, Homo sapiens
tacttattctctcta

SEQ ID NO: 1347221 - DNA, 15 bp, Homo sapiens
atacttattctctct

SEQ ID NO: 1347222 - DNA, 15 bp, Homo sapiens
tatacttattctctc

SEQ ID NO: 1347223 - DNA, 15 bp, Homo sapiens
atatacttattctct

SEQ ID NO: 1347224 - DNA, 15 bp, Homo sapiens
tatatacttattctc

SEQ ID NO: 1347225 - DNA, 15 bp, Homo sapiens
atatatacttattct

SEQ ID NO: 1347226 - DNA, 15 bp, Homo sapiens
catatatacttattc

SEQ ID NO: 1347227 - DNA, 15 bp, Homo sapiens
acatatatacttatt

SEQ ID NO: 1347228 - DNA, 15 bp, Homo sapiens
tacatatatacttat

SEQ ID NO: 1347229 - DNA, 15 bp, Homo sapiens
ttacatatatactta

SEQ ID NO: 1347230 - DNA, 15 bp, Homo sapiens
gttacatatatactt

SEQ ID NO: 1347231 - DNA, 15 bp, Homo sapiens
agttacatatatact

SEQ ID NO: 1347232 - DNA, 15 bp, Homo sapiens
aagttacatatatac

SEQ ID NO: 1347233 - DNA, 15 bp, Homo sapiens
taagttacatatata

SEQ ID NO: 1347234 - DNA, 15 bp, Homo sapiens
ataagttacatatat

SEQ ID NO: 1347235 - DNA, 15 bp, Homo sapiens
tataagttacatata

SEQ ID NO: 1347236 - DNA, 15 bp, Homo sapiens
atataagttacatat

SEQ ID NO: 1347237 - DNA, 15 bp, Homo sapiens
tatataagttacata

SEQ ID NO: 1347238 - DNA, 15 bp, Homo sapiens
atatataagttacat

SEQ ID NO: 1347239 - DNA, 15 bp, Homo sapiens
tatatataagttaca

SEQ ID NO: 1347240 - DNA, 15 bp, Homo sapiens
atatatataagttac

SEQ ID NO: 1347241 - DNA, 15 bp, Homo sapiens
tatatatataagtta

SEQ ID NO: 1347242 - DNA, 15 bp, Homo sapiens
atatatatataagtt

SEQ ID NO: 1347243 - DNA, 15 bp, Homo sapiens
tatatatatataagt

SEQ ID NO: 1347244 - DNA, 15 bp, Homo sapiens
ctatatatatataag

SEQ ID NO: 1347245 - DNA, 15 bp, Homo sapiens
actatatatatataa

SEQ ID NO: 1347246 - DNA, 15 bp, Homo sapiens
tactatatatatata

SEQ ID NO: 1347247 - DNA, 15 bp, Homo sapiens
ttactatatatatat

SEQ ID NO: 1347248 - DNA, 15 bp, Homo sapiens
cttactatatatata

SEQ ID NO: 1347249 - DNA, 15 bp, Homo sapiens
acttactatatatat

SEQ ID NO: 1347250 - DNA, 15 bp, Homo sapiens
tacttactatatata

SEQ ID NO: 1347251 - DNA, 15 bp, Homo sapiens
atacttactatatat

SEQ ID NO: 1347252 - DNA, 15 bp, Homo sapiens
tatacttactatata

SEQ ID NO: 1347253 - DNA, 15 bp, Homo sapiens
atatacttactatat

SEQ ID NO: 1347254 - DNA, 15 bp, Homo sapiens
cttatatatatactt

SEQ ID NO: 1347255 - DNA, 15 bp, Homo sapiens
acttatatatatact

SEQ ID NO: 1347256 - DNA, 15 bp, Homo sapiens
tacttatatatatac

SEQ ID NO: 1347257 - DNA, 15 bp, Homo sapiens
atacttatatatata

SEQ ID NO: 1347258 - DNA, 15 bp, Homo sapiens
tatacttatatatat

SEQ ID NO: 1347259 - DNA, 15 bp, Homo sapiens
atatacttatatata

SEQ ID NO: 1347260 - DNA, 15 bp, Homo sapiens
tatatacttatatat

SEQ ID NO: 1347261 - DNA, 15 bp, Homo sapiens
atatatacttatata

SEQ ID NO: 1347262 - DNA, 15 bp, Homo sapiens
tatatatacttatat

SEQ ID NO: 1347263 - DNA, 15 bp, Homo sapiens
atatatatacttata

SEQ ID NO: 1347264 - DNA, 15 bp, Homo sapiens
tatatatatacttat

SEQ ID NO: 1347265 - DNA, 15 bp, Homo sapiens
ttaagttatatatat

SEQ ID NO: 1347266 - DNA, 15 bp, Homo sapiens
gttaagttatatata

SEQ ID NO: 1347267 - DNA, 15 bp, Homo sapiens
agttaagttatatat

SEQ ID NO: 1347268 - DNA, 15 bp, Homo sapiens
tagttaagttatata

SEQ ID NO: 1347269 - DNA, 15 bp, Homo sapiens
atagttaagttatat

SEQ ID NO: 1347270 - DNA, 15 bp, Homo sapiens
tatagttaagttata

SEQ ID NO: 1347271 - DNA, 15 bp, Homo sapiens
gtatagttaagttat

SEQ ID NO: 1347272 - DNA, 15 bp, Homo sapiens
ttatagtatagttaa

SEQ ID NO: 1347273 - DNA, 15 bp, Homo sapiens
gttatagtatagtta

SEQ ID NO: 1347274 - DNA, 15 bp, Homo sapiens
tgttatagtatagtt

SEQ ID NO: 1347275 - DNA, 15 bp, Homo sapiens
ttgttatagtatagt

SEQ ID NO: 1347276 - DNA, 15 bp, Homo sapiens
cttgttatagtatag

SEQ ID NO: 1347277 - DNA, 15 bp, Homo sapiens
acttgttatagtata

SEQ ID NO: 1347278 - DNA, 15 bp, Homo sapiens
tacttgttatagtat

SEQ ID NO: 1347279 - DNA, 15 bp, Homo sapiens
ttacttgttatagta

SEQ ID NO: 1347280 - DNA, 15 bp, Homo sapiens
tttacttgttatagt

SEQ ID NO: 1347281 - DNA, 15 bp, Homo sapiens
gtttacttgttatag

SEQ ID NO: 1347282 - DNA, 15 bp, Homo sapiens
agtttacttgttata

SEQ ID NO: 1347283 - DNA, 15 bp, Homo sapiens
aagtttacttgttat

SEQ ID NO: 1347284 - DNA, 15 bp, Homo sapiens
taagtttacttgtta

SEQ ID NO: 1347285 - DNA, 15 bp, Homo sapiens
ttaagtttacttgtt

SEQ ID NO: 1347286 - DNA, 15 bp, Homo sapiens
gttaagtttacttgt

SEQ ID NO: 1347287 - DNA, 15 bp, Homo sapiens
agttaagtttacttg

SEQ ID NO: 1347288 - DNA, 15 bp, Homo sapiens
aagttaagtttactt

SEQ ID NO: 1347289 - DNA, 15 bp, Homo sapiens
caagttaagtttact

SEQ ID NO: 1347290 - DNA, 15 bp, Homo sapiens
acaagttaagtttac

SEQ ID NO: 1347291 - DNA, 15 bp, Homo sapiens
aacaagttaagttta

SEQ ID NO: 1347292 - DNA, 15 bp, Homo sapiens
taacaagttaagttt

SEQ ID NO: 1347293 - DNA, 15 bp, Homo sapiens
ttaacaagttaagtt

SEQ ID NO: 1347294 - DNA, 15 bp, Homo sapiens
gttaacaagttaagt

SEQ ID NO: 1347295 - DNA, 15 bp, Homo sapiens
agttaacaagttaag

SEQ ID NO: 1347296 - DNA, 15 bp, Homo sapiens
tagttaacaagttaa

SEQ ID NO: 1347297 - DNA, 15 bp, Homo sapiens
atagttaacaagtta

SEQ ID NO: 1347298 - DNA, 15 bp, Homo sapiens
tatagttaacaagtt

SEQ ID NO: 1347299 - DNA, 15 bp, Homo sapiens
ttatagttaacaagt

SEQ ID NO: 1347300 - DNA, 15 bp, Homo sapiens
gttatagttaacaag

SEQ ID NO: 1347301 - DNA, 15 bp, Homo sapiens
tgttatagttaacaa

SEQ ID NO: 1347302 - DNA, 15 bp, Homo sapiens
ttgttatagttaaca

SEQ ID NO: 1347303 - DNA, 15 bp, Homo sapiens
attgttatagttaac

SEQ ID NO: 1347304 - DNA, 15 bp, Homo sapiens
cattgttatagttaa

SEQ ID NO: 1347305 - DNA, 15 bp, Homo sapiens
acattgttatagtta

SEQ ID NO: 1347306 - DNA, 15 bp, Homo sapiens
aacattgttatagtt

SEQ ID NO: 1347307 - DNA, 15 bp, Homo sapiens
taacattgttatagt

SEQ ID NO: 1347308 - DNA, 15 bp, Homo sapiens
ttaacattgttatag

SEQ ID NO: 1347309 - DNA, 15 bp, Homo sapiens
gttaacattgttata

SEQ ID NO: 1347310 - DNA, 15 bp, Homo sapiens
agttaacattgttat

SEQ ID NO: 1347311 - DNA, 15 bp, Homo sapiens
aagttaacattgtta

SEQ ID NO: 1347312 - DNA, 15 bp, Homo sapiens
taagttaacattgtt

SEQ ID NO: 1347313 - DNA, 15 bp, Homo sapiens
gtaagttaacattgt

SEQ ID NO: 1347314 - DNA, 15 bp, Homo sapiens
tgtaagttaacattg

SEQ ID NO: 1347315 - DNA, 15 bp, Homo sapiens
gtgtaagttaacatt

SEQ ID NO: 1347316 - DNA, 15 bp, Homo sapiens
agtgtaagttaacat

SEQ ID NO: 1347317 - DNA, 15 bp, Homo sapiens
cagtgtaagttaaca

SEQ ID NO: 1347318 - DNA, 15 bp, Homo sapiens
ccagtgtaagttaac

SEQ ID NO: 1347319 - DNA, 15 bp, Homo sapiens
gccagtgtaagttaa

SEQ ID NO: 1347320 - DNA, 15 bp, Homo sapiens
ggccagtgtaagtta

SEQ ID NO: 1347321 - DNA, 15 bp, Homo sapiens
tggccagtgtaagtt

SEQ ID NO: 1347322 - DNA, 15 bp, Homo sapiens
ttggccagtgtaagt

SEQ ID NO: 1347323 - DNA, 15 bp, Homo sapiens
attggccagtgtaag

SEQ ID NO: 1347324 - DNA, 15 bp, Homo sapiens
cattggccagtgtaa

SEQ ID NO: 1347325 - DNA, 15 bp, Homo sapiens
ccattggccagtgta

SEQ ID NO: 1347326 - DNA, 15 bp, Homo sapiens
gccattggccagtgt

SEQ ID NO: 1347327 - DNA, 15 bp, Homo sapiens
tgccattggccagtg

SEQ ID NO: 1347328 - DNA, 15 bp, Homo sapiens
ttgccattggccagt

SEQ ID NO: 1347329 - DNA, 15 bp, Homo sapiens
tttgccattggccag

SEQ ID NO: 1347330 - DNA, 15 bp, Homo sapiens
ttttgccattggcca

SEQ ID NO: 1347331 - DNA, 15 bp, Homo sapiens
attttgccattggcc

SEQ ID NO: 1347332 - DNA, 15 bp, Homo sapiens
gattttgccattggc

SEQ ID NO: 1347333 - DNA, 15 bp, Homo sapiens
ggattttgccattgg

SEQ ID NO: 1347334 - DNA, 15 bp, Homo sapiens
tggattttgccattg

SEQ ID NO: 1347335 - DNA, 15 bp, Homo sapiens
ttggattttgccatt

SEQ ID NO: 1347336 - DNA, 15 bp, Homo sapiens
cttggattttgccat

SEQ ID NO: 1347337 - DNA, 15 bp, Homo sapiens
ccttggattttgcca

SEQ ID NO: 1347338 - DNA, 15 bp, Homo sapiens
accttggattttgcc

SEQ ID NO: 1347339 - DNA, 15 bp, Homo sapiens
aaccttggattttgc

SEQ ID NO: 1347340 - DNA, 15 bp, Homo sapiens
taaccttggattttg

SEQ ID NO: 1347341 - DNA, 15 bp, Homo sapiens
ataaccttggatttt

SEQ ID NO: 1347342 - DNA, 15 bp, Homo sapiens
tataaccttggattt

SEQ ID NO: 1347343 - DNA, 15 bp, Homo sapiens
ttataaccttggatt

SEQ ID NO: 1347344 - DNA, 15 bp, Homo sapiens
tttataaccttggat

SEQ ID NO: 1347345 - DNA, 15 bp, Homo sapiens
ttttataaccttgga

SEQ ID NO: 1347346 - DNA, 15 bp, Homo sapiens
attttataaccttgg

SEQ ID NO: 1347347 - DNA, 15 bp, Homo sapiens
aattttataaccttg

SEQ ID NO: 1347348 - DNA, 15 bp, Homo sapiens
taattttataacctt

SEQ ID NO: 1347349 - DNA, 15 bp, Homo sapiens
ttaattttataacct

SEQ ID NO: 1347350 - DNA, 15 bp, Homo sapiens
attaattttataacc

SEQ ID NO: 1347351 - DNA, 15 bp, Homo sapiens
aattaattttataac

SEQ ID NO: 1347352 - DNA, 15 bp, Homo sapiens
aaattaattttataa

SEQ ID NO: 1347353 - DNA, 15 bp, Homo sapiens
taaattaattttata

SEQ ID NO: 1347354 - DNA, 15 bp, Homo sapiens
ataaattaattttat

SEQ ID NO: 1347355 - DNA, 15 bp, Homo sapiens
tataaattaatttta

SEQ ID NO: 1347356 - DNA, 15 bp, Homo sapiens
ttataaattaatttt

SEQ ID NO: 1347357 - DNA, 15 bp, Homo sapiens
cttataaattaattt

SEQ ID NO: 1347358 - DNA, 15 bp, Homo sapiens
ccttataaattaatt

SEQ ID NO: 1347359 - DNA, 15 bp, Homo sapiens
tccttataaattaat

SEQ ID NO: 1347360 - DNA, 15 bp, Homo sapiens
atccttataaattaa

SEQ ID NO: 1347361 - DNA, 15 bp, Homo sapiens
tatccttataaatta

SEQ ID NO: 1347362 - DNA, 15 bp, Homo sapiens
ttatccttataaatt

SEQ ID NO: 1347363 - DNA, 15 bp, Homo sapiens
tttatccttataaat

SEQ ID NO: 1347364 - DNA, 15 bp, Homo sapiens
gtttatccttataaa

SEQ ID NO: 1347365 - DNA, 15 bp, Homo sapiens
cgtttatccttataa

SEQ ID NO: 1347366 - DNA, 15 bp, Homo sapiens
gcgtttatccttata

SEQ ID NO: 1347367 - DNA, 15 bp, Homo sapiens
ggcgtttatccttat

SEQ ID NO: 1347368 - DNA, 15 bp, Homo sapiens
aggcgtttatcctta

SEQ ID NO: 1347369 - DNA, 15 bp, Homo sapiens
caggcgtttatcctt

SEQ ID NO: 1347370 - DNA, 15 bp, Homo sapiens
acaggcgtttatcct

SEQ ID NO: 1347371 - DNA, 15 bp, Homo sapiens
gacaggcgtttatcc

SEQ ID NO: 1347372 - DNA, 15 bp, Homo sapiens
agacaggcgtttatc

SEQ ID NO: 1347373 - DNA, 15 bp, Homo sapiens
gagacaggcgtttat

SEQ ID NO: 1347374 - DNA, 15 bp, Homo sapiens
ggagacaggcgttta

SEQ ID NO: 1347375 - DNA, 15 bp, Homo sapiens
aggagacaggcgttt

SEQ ID NO: 1347376 - DNA, 15 bp, Homo sapiens
caggagacaggcgtt

SEQ ID NO: 1347377 - DNA, 15 bp, Homo sapiens
acaggagacaggcgt

SEQ ID NO: 1347378 - DNA, 15 bp, Homo sapiens
cacaggagacaggcg

SEQ ID NO: 1347379 - DNA, 15 bp, Homo sapiens
acacaggagacaggc

SEQ ID NO: 1347380 - DNA, 15 bp, Homo sapiens
tacacaggagacagg

SEQ ID NO: 1347381 - DNA, 15 bp, Homo sapiens
ttacacaggagacag

SEQ ID NO: 1347382 - DNA, 15 bp, Homo sapiens
tttacacaggagaca

SEQ ID NO: 1347383 - DNA, 15 bp, Homo sapiens
ttttacacaggagac

SEQ ID NO: 1347384 - DNA, 15 bp, Homo sapiens
attttacacaggaga

SEQ ID NO: 1347385 - DNA, 15 bp, Homo sapiens
aattttacacaggag

SEQ ID NO: 1347386 - DNA, 15 bp, Homo sapiens
taattttacacagga

SEQ ID NO: 1347387 - DNA, 15 bp, Homo sapiens
ataattttacacagg

SEQ ID NO: 1347388 - DNA, 15 bp, Homo sapiens
aataattttacacag

SEQ ID NO: 1347389 - DNA, 15 bp, Homo sapiens
taataattttacaca

SEQ ID NO: 1347390 - DNA, 15 bp, Homo sapiens
ttaataattttacac

SEQ ID NO: 1347391 - DNA, 15 bp, Homo sapiens
cttaataattttaca

SEQ ID NO: 1347392 - DNA, 15 bp, Homo sapiens
acttaataattttac

SEQ ID NO: 1347393 - DNA, 15 bp, Homo sapiens
cacttaataatttta

SEQ ID NO: 1347394 - DNA, 15 bp, Homo sapiens
gcacttaataatttt

SEQ ID NO: 1347395 - DNA, 15 bp, Homo sapiens
tgcacttaataattt

SEQ ID NO: 1347396 - DNA, 15 bp, Homo sapiens
ttgcacttaataatt

SEQ ID NO: 1347397 - DNA, 15 bp, Homo sapiens
attgcacttaataat

SEQ ID NO: 1347398 - DNA, 15 bp, Homo sapiens
aattgcacttaataa

SEQ ID NO: 1347399 - DNA, 15 bp, Homo sapiens
ttaattgcacttaat

SEQ ID NO: 1347400 - DNA, 15 bp, Homo sapiens
attaattgcacttaa

SEQ ID NO: 1347401 - DNA, 15 bp, Homo sapiens
cattaattgcactta

SEQ ID NO: 1347402 - DNA, 15 bp, Homo sapiens
acattaattgcactt

SEQ ID NO: 1347403 - DNA, 15 bp, Homo sapiens
gacattaattgcact

SEQ ID NO: 1347404 - DNA, 15 bp, Homo sapiens
tgacattaattgcac

SEQ ID NO: 1347405 - DNA, 15 bp, Homo sapiens
atgacattaattgca

SEQ ID NO: 1347406 - DNA, 15 bp, Homo sapiens
gatgacattaattgc

SEQ ID NO: 1347407 - DNA, 15 bp, Homo sapiens
agatgacattaattg

SEQ ID NO: 1347408 - DNA, 15 bp, Homo sapiens
aagatgacattaatt

SEQ ID NO: 1347409 - DNA, 15 bp, Homo sapiens
taagatgacattaat

SEQ ID NO: 1347410 - DNA, 15 bp, Homo sapiens
ataagatgacattaa

SEQ ID NO: 1347411 - DNA, 15 bp, Homo sapiens
aataagatgacatta

SEQ ID NO: 1347412 - DNA, 15 bp, Homo sapiens
taataagatgacatt

SEQ ID NO: 1347413 - DNA, 15 bp, Homo sapiens
ttaataagatgacat

SEQ ID NO: 1347414 - DNA, 15 bp, Homo sapiens
attaataagatgaca

SEQ ID NO: 1347415 - DNA, 15 bp, Homo sapiens
aattaataagatgac

SEQ ID NO: 1347416 - DNA, 15 bp, Homo sapiens
caattaataagatga

SEQ ID NO: 1347417 - DNA, 15 bp, Homo sapiens
gcaattaataagatg

SEQ ID NO: 1347418 - DNA, 15 bp, Homo sapiens
ggcaattaataagat

SEQ ID NO: 1347419 - DNA, 15 bp, Homo sapiens
aggcaattaataaga

SEQ ID NO: 1347420 - DNA, 15 bp, Homo sapiens
gaggcaattaataag

SEQ ID NO: 1347421 - DNA, 15 bp, Homo sapiens
tgaggcaattaataa

SEQ ID NO: 1347422 - DNA, 15 bp, Homo sapiens
atgaggcaattaata

SEQ ID NO: 1347423 - DNA, 15 bp, Homo sapiens
tatgaggcaattaat

SEQ ID NO: 1347424 - DNA, 15 bp, Homo sapiens
ctatgaggcaattaa

SEQ ID NO: 1347425 - DNA, 15 bp, Homo sapiens
tctatgaggcaatta

SEQ ID NO: 1347426 - DNA, 15 bp, Homo sapiens
ctctatgaggcaatt

SEQ ID NO: 1347427 - DNA, 15 bp, Homo sapiens
cctctatgaggcaat

SEQ ID NO: 1347428 - DNA, 15 bp, Homo sapiens
acctctatgaggcaa

SEQ ID NO: 1347429 - DNA, 15 bp, Homo sapiens
aacctctatgaggca

SEQ ID NO: 1347430 - DNA, 15 bp, Homo sapiens
aaacctctatgaggc

SEQ ID NO: 1347431 - DNA, 15 bp, Homo sapiens
taaacctctatgagg

SEQ ID NO: 1347432 - DNA, 15 bp, Homo sapiens
ttaaacctctatgag

SEQ ID NO: 1347433 - DNA, 15 bp, Homo sapiens
cttaaacctctatga

SEQ ID NO: 1347434 - DNA, 15 bp, Homo sapiens
ccttaaacctctatg

SEQ ID NO: 1347435 - DNA, 15 bp, Homo sapiens
tccttaaacctctat

SEQ ID NO: 1347436 - DNA, 15 bp, Homo sapiens
atccttaaacctcta

SEQ ID NO: 1347437 - DNA, 15 bp, Homo sapiens
aatccttaaacctct

SEQ ID NO: 1347438 - DNA, 15 bp, Homo sapiens
aaatccttaaacctc

SEQ ID NO: 1347439 - DNA, 15 bp, Homo sapiens
caaatccttaaacct

SEQ ID NO: 1347440 - DNA, 15 bp, Homo sapiens
tcaaatccttaaacc

SEQ ID NO: 1347441 - DNA, 15 bp, Homo sapiens
ctcaaatccttaaac

SEQ ID NO: 1347442 - DNA, 15 bp, Homo sapiens
actcaaatccttaaa

SEQ ID NO: 1347443 - DNA, 15 bp, Homo sapiens
aactcaaatccttaa

SEQ ID NO: 1347444 - DNA, 15 bp, Homo sapiens
caactcaaatcctta

SEQ ID NO: 1347445 - DNA, 15 bp, Homo sapiens
ccaactcaaatcctt

SEQ ID NO: 1347446 - DNA, 15 bp, Homo sapiens
gccaactcaaatcct

SEQ ID NO: 1347447 - DNA, 15 bp, Homo sapiens
agccaactcaaatcc

SEQ ID NO: 1347448 - DNA, 15 bp, Homo sapiens
tagccaactcaaatc

SEQ ID NO: 1347449 - DNA, 15 bp, Homo sapiens
ctagccaactcaaat

SEQ ID NO: 1347450 - DNA, 15 bp, Homo sapiens
tctagccaactcaaa

SEQ ID NO: 1347451 - DNA, 15 bp, Homo sapiens
atctagccaactcaa

SEQ ID NO: 1347452 - DNA, 15 bp, Homo sapiens
aatctagccaactca

SEQ ID NO: 1347453 - DNA, 15 bp, Homo sapiens
taatctagccaactc

SEQ ID NO: 1347454 - DNA, 15 bp, Homo sapiens
ataatctagccaact

SEQ ID NO: 1347455 - DNA, 15 bp, Homo sapiens
aataatctagccaac

SEQ ID NO: 1347456 - DNA, 15 bp, Homo sapiens
aaataatctagccaa

SEQ ID NO: 1347457 - DNA, 15 bp, Homo sapiens
taaataatctagcca

SEQ ID NO: 1347458 - DNA, 15 bp, Homo sapiens
ataaataatctagcc

SEQ ID NO: 1347459 - DNA, 15 bp, Homo sapiens
tataaataatctagc

SEQ ID NO: 1347460 - DNA, 15 bp, Homo sapiens
ttataaataatctag

SEQ ID NO: 1347461 - DNA, 15 bp, Homo sapiens
tttataaataatcta

SEQ ID NO: 1347462 - DNA, 15 bp, Homo sapiens
gtttataaataatct

SEQ ID NO: 1347463 - DNA, 15 bp, Homo sapiens
tgtttataaataatc

SEQ ID NO: 1347464 - DNA, 15 bp, Homo sapiens
atgtttataaataat

SEQ ID NO: 1347465 - DNA, 15 bp, Homo sapiens
aatgtttataaataa

SEQ ID NO: 1347466 - DNA, 15 bp, Homo sapiens
caatgtttataaata

SEQ ID NO: 1347467 - DNA, 15 bp, Homo sapiens
tcaatgtttataaat

SEQ ID NO: 1347468 - DNA, 15 bp, Homo sapiens
ctcaatgtttataaa

SEQ ID NO: 1347469 - DNA, 15 bp, Homo sapiens
tctcaatgtttataa

SEQ ID NO: 1347470 - DNA, 15 bp, Homo sapiens
atctcaatgtttata

SEQ ID NO: 1347471 - DNA, 15 bp, Homo sapiens
aatctcaatgtttat

SEQ ID NO: 1347472 - DNA, 15 bp, Homo sapiens
aaatctcaatgttta

SEQ ID NO: 1347473 - DNA, 15 bp, Homo sapiens
taaatctcaatgttt

SEQ ID NO: 1347474 - DNA, 15 bp, Homo sapiens
ataaatctcaatgtt

SEQ ID NO: 1347475 - DNA, 15 bp, Homo sapiens
aataaatctcaatgt

SEQ ID NO: 1347476 - DNA, 15 bp, Homo sapiens
aaataaatctcaatg

SEQ ID NO: 1347477 - DNA, 15 bp, Homo sapiens
aaaataaatctcaat

SEQ ID NO: 1347478 - DNA, 15 bp, Homo sapiens
taaaataaatctcaa

SEQ ID NO: 1347479 - DNA, 15 bp, Homo sapiens
ataaaataaatctca

SEQ ID NO: 1347480 - DNA, 15 bp, Homo sapiens
aataaaataaatctc

SEQ ID NO: 1347481 - DNA, 15 bp, Homo sapiens
gaataaaataaatct

SEQ ID NO: 1347482 - DNA, 15 bp, Homo sapiens
agaataaaataaatc

SEQ ID NO: 1347483 - DNA, 15 bp, Homo sapiens
gagaataaaataaat

SEQ ID NO: 1347484 - DNA, 15 bp, Homo sapiens
agagaataaaataaa

SEQ ID NO: 1347485 - DNA, 15 bp, Homo sapiens
gagagaataaaataa

SEQ ID NO: 1347486 - DNA, 15 bp, Homo sapiens
ggagagaataaaata

SEQ ID NO: 1347487 - DNA, 15 bp, Homo sapiens
cggagagaataaaat

SEQ ID NO: 1347488 - DNA, 15 bp, Homo sapiens
acggagagaataaaa

SEQ ID NO: 1347489 - DNA, 15 bp, Homo sapiens
cacggagagaataaa

SEQ ID NO: 1347490 - DNA, 15 bp, Homo sapiens
acacggagagaataa

SEQ ID NO: 1347491 - DNA, 15 bp, Homo sapiens
aacacggagagaata

SEQ ID NO: 1347492 - DNA, 15 bp, Homo sapiens
taacacggagagaat

SEQ ID NO: 1347493 - DNA, 15 bp, Homo sapiens
ttaacacggagagaa

SEQ ID NO: 1347494 - DNA, 15 bp, Homo sapiens
tttaacacggagaga

SEQ ID NO: 1347495 - DNA, 15 bp, Homo sapiens
ttttaacacggagag

SEQ ID NO: 1347496 - DNA, 15 bp, Homo sapiens
cttttaacacggaga

SEQ ID NO: 1347497 - DNA, 15 bp, Homo sapiens
acttttaacacggag

SEQ ID NO: 1347498 - DNA, 15 bp, Homo sapiens
gacttttaacacgga

SEQ ID NO: 1347499 - DNA, 15 bp, Homo sapiens
agacttttaacacgg

SEQ ID NO: 1347500 - DNA, 15 bp, Homo sapiens
tagacttttaacacg

SEQ ID NO: 1347501 - DNA, 15 bp, Homo sapiens
ttagacttttaacac

SEQ ID NO: 1347502 - DNA, 15 bp, Homo sapiens
tttagacttttaaca

SEQ ID NO: 1347503 - DNA, 15 bp, Homo sapiens
gtttagacttttaac

SEQ ID NO: 1347504 - DNA, 15 bp, Homo sapiens
agtttagacttttaa

SEQ ID NO: 1347505 - DNA, 15 bp, Homo sapiens
aagtttagactttta

SEQ ID NO: 1347506 - DNA, 15 bp, Homo sapiens
gaagtttagactttt

SEQ ID NO: 1347507 - DNA, 15 bp, Homo sapiens
agaagtttagacttt

SEQ ID NO: 1347508 - DNA, 15 bp, Homo sapiens
cagaagtttagactt

SEQ ID NO: 1347509 - DNA, 15 bp, Homo sapiens
tcagaagtttagact

SEQ ID NO: 1347510 - DNA, 15 bp, Homo sapiens
ttcagaagtttagac

SEQ ID NO: 1347511 - DNA, 15 bp, Homo sapiens
cttcagaagtttaga

SEQ ID NO: 1347512 - DNA, 15 bp, Homo sapiens
acttcagaagtttag

SEQ ID NO: 1347513 - DNA, 15 bp, Homo sapiens
tacttcagaagttta

SEQ ID NO: 1347514 - DNA, 15 bp, Homo sapiens
ttacttcagaagttt

SEQ ID NO: 1347515 - DNA, 15 bp, Homo sapiens
gttacttcagaagtt

SEQ ID NO: 1347516 - DNA, 15 bp, Homo sapiens
ggttacttcagaagt

SEQ ID NO: 1347517 - DNA, 15 bp, Homo sapiens
tggttacttcagaag

SEQ ID NO: 1347518 - DNA, 15 bp, Homo sapiens
ctggttacttcagaa

SEQ ID NO: 1347519 - DNA, 15 bp, Homo sapiens
tctggttacttcaga

SEQ ID NO: 1347520 - DNA, 15 bp, Homo sapiens
ttctggttacttcag

SEQ ID NO: 1347521 - DNA, 15 bp, Homo sapiens
tttctggttacttca

SEQ ID NO: 1347522 - DNA, 15 bp, Homo sapiens
ctttctggttacttc

SEQ ID NO: 1347523 - DNA, 15 bp, Homo sapiens
tctttctggttactt

SEQ ID NO: 1347524 - DNA, 15 bp, Homo sapiens
ttctttctggttact

SEQ ID NO: 1347525 - DNA, 15 bp, Homo sapiens
tttctttctggttac

SEQ ID NO: 1347526 - DNA, 15 bp, Homo sapiens
ttttctttctggtta

SEQ ID NO: 1347527 - DNA, 15 bp, Homo sapiens
cttttctttctggtt

SEQ ID NO: 1347528 - DNA, 15 bp, Homo sapiens
acttttctttctggt

SEQ ID NO: 1347529 - DNA, 15 bp, Homo sapiens
aacttttctttctgg

SEQ ID NO: 1347530 - DNA, 15 bp, Homo sapiens
caacttttctttctg

SEQ ID NO: 1347531 - DNA, 15 bp, Homo sapiens
tcaacttttctttct

SEQ ID NO: 1347532 - DNA, 15 bp, Homo sapiens
ttcaacttttctttc

SEQ ID NO: 1347533 - DNA, 15 bp, Homo sapiens
tttcaacttttcttt

SEQ ID NO: 1347534 - DNA, 15 bp, Homo sapiens
atttcaacttttctt

SEQ ID NO: 1347535 - DNA, 15 bp, Homo sapiens
aatttcaacttttct

SEQ ID NO: 1347536 - DNA, 15 bp, Homo sapiens
gaatttcaacttttc

SEQ ID NO: 1347537 - DNA, 15 bp, Homo sapiens
agaatttcaactttt

SEQ ID NO: 1347538 - DNA, 15 bp, Homo sapiens
aagaatttcaacttt

SEQ ID NO: 1347539 - DNA, 15 bp, Homo sapiens
aaagaatttcaactt

SEQ ID NO: 1347540 - DNA, 15 bp, Homo sapiens
taaagaatttcaact

SEQ ID NO: 1347541 - DNA, 15 bp, Homo sapiens
ttaaagaatttcaac

SEQ ID NO: 1347542 - DNA, 15 bp, Homo sapiens
attaaagaatttcaa

SEQ ID NO: 1347543 - DNA, 15 bp, Homo sapiens
aattaaagaatttca

SEQ ID NO: 1347544 - DNA, 15 bp, Homo sapiens
aaattaaagaatttc

SEQ ID NO: 1347545 - DNA, 15 bp, Homo sapiens
gaaattaaagaattt

SEQ ID NO: 1347546 - DNA, 15 bp, Homo sapiens
tgaaattaaagaatt

SEQ ID NO: 1347547 - DNA, 15 bp, Homo sapiens
atgaaattaaagaat

SEQ ID NO: 1347548 - DNA, 15 bp, Homo sapiens
aatgaaattaaagaa

SEQ ID NO: 1347549 - DNA, 15 bp, Homo sapiens
gaatgaaattaaaga

SEQ ID NO: 1347550 - DNA, 15 bp, Homo sapiens
tgaatgaaattaaag

SEQ ID NO: 1347551 - DNA, 15 bp, Homo sapiens
atgaatgaaattaaa

SEQ ID NO: 1347552 - DNA, 15 bp, Homo sapiens
catgaatgaaattaa

SEQ ID NO: 1347553 - DNA, 15 bp, Homo sapiens
tcatgaatgaaatta

SEQ ID NO: 1347554 - DNA, 15 bp, Homo sapiens
atcatgaatgaaatt

SEQ ID NO: 1347555 - DNA, 15 bp, Homo sapiens
aatcatgaatgaaat

SEQ ID NO: 1347556 - DNA, 15 bp, Homo sapiens
caatcatgaatgaaa

SEQ ID NO: 1347557 - DNA, 15 bp, Homo sapiens
ccaatcatgaatgaa

SEQ ID NO: 1347558 - DNA, 15 bp, Homo sapiens
gccaatcatgaatga

SEQ ID NO: 1347559 - DNA, 15 bp, Homo sapiens
ggccaatcatgaatg

SEQ ID NO: 1347560 - DNA, 15 bp, Homo sapiens
aggccaatcatgaat

SEQ ID NO: 1347561 - DNA, 15 bp, Homo sapiens
aaggccaatcatgaa

SEQ ID NO: 1347562 - DNA, 15 bp, Homo sapiens
taaggccaatcatga

SEQ ID NO: 1347563 - DNA, 15 bp, Homo sapiens
gtaaggccaatcatg

SEQ ID NO: 1347564 - DNA, 15 bp, Homo sapiens
tgtaaggccaatcat

SEQ ID NO: 1347565 - DNA, 15 bp, Homo sapiens
atgtaaggccaatca

SEQ ID NO: 1347566 - DNA, 15 bp, Homo sapiens
aatgtaaggccaatc

SEQ ID NO: 1347567 - DNA, 15 bp, Homo sapiens
aaatgtaaggccaat

SEQ ID NO: 1347568 - DNA, 15 bp, Homo sapiens
aaaatgtaaggccaa

SEQ ID NO: 1347569 - DNA, 15 bp, Homo sapiens
caaaatgtaaggcca

SEQ ID NO: 1347570 - DNA, 15 bp, Homo sapiens
ccaaaatgtaaggcc

SEQ ID NO: 1347571 - DNA, 15 bp, Homo sapiens
accaaaatgtaaggc

SEQ ID NO: 1347572 - DNA, 15 bp, Homo sapiens
aaccaaaatgtaagg

SEQ ID NO: 1347573 - DNA, 15 bp, Homo sapiens
taaccaaaatgtaag

SEQ ID NO: 1347574 - DNA, 15 bp, Homo sapiens
ataaccaaaatgtaa

SEQ ID NO: 1347575 - DNA, 15 bp, Homo sapiens
gataaccaaaatgta

SEQ ID NO: 1347576 - DNA, 15 bp, Homo sapiens
agataaccaaaatgt

SEQ ID NO: 1347577 - DNA, 15 bp, Homo sapiens
cagataaccaaaatg

SEQ ID NO: 1347578 - DNA, 15 bp, Homo sapiens
ccagataaccaaaat

SEQ ID NO: 1347579 - DNA, 15 bp, Homo sapiens
accagataaccaaaa

SEQ ID NO: 1347580 - DNA, 15 bp, Homo sapiens
taccagataaccaaa

SEQ ID NO: 1347581 - DNA, 15 bp, Homo sapiens
ttaccagataaccaa

SEQ ID NO: 1347582 - DNA, 15 bp, Homo sapiens
attaccagataacca

SEQ ID NO: 1347583 - DNA, 15 bp, Homo sapiens
tattaccagataacc

SEQ ID NO: 1347584 - DNA, 15 bp, Homo sapiens
atattaccagataac

SEQ ID NO: 1347585 - DNA, 15 bp, Homo sapiens
aatattaccagataa

SEQ ID NO: 1347586 - DNA, 15 bp, Homo sapiens
aaatattaccagata

SEQ ID NO: 1347587 - DNA, 15 bp, Homo sapiens
aaaatattaccagat

SEQ ID NO: 1347588 - DNA, 15 bp, Homo sapiens
aaaaatattaccaga

SEQ ID NO: 1347589 - DNA, 15 bp, Homo sapiens
gaaaaatattaccag

SEQ ID NO: 1347590 - DNA, 15 bp, Homo sapiens
ggaaaaatattacca

SEQ ID NO: 1347591 - DNA, 15 bp, Homo sapiens
aggaaaaatattacc

SEQ ID NO: 1347592 - DNA, 15 bp, Homo sapiens
aaggaaaaatattac

SEQ ID NO: 1347593 - DNA, 15 bp, Homo sapiens
taaggaaaaatatta

SEQ ID NO: 1347594 - DNA, 15 bp, Homo sapiens
ttaaggaaaaatatt

SEQ ID NO: 1347595 - DNA, 15 bp, Homo sapiens
tttaaggaaaaatat

SEQ ID NO: 1347596 - DNA, 15 bp, Homo sapiens
atttaaggaaaaata

SEQ ID NO: 1347597 - DNA, 15 bp, Homo sapiens
catttaaggaaaaat

SEQ ID NO: 1347598 - DNA, 15 bp, Homo sapiens
acatttaaggaaaaa

SEQ ID NO: 1347599 - DNA, 15 bp, Homo sapiens
tacatttaaggaaaa

SEQ ID NO: 1347600 - DNA, 15 bp, Homo sapiens
gtacatttaaggaaa

SEQ ID NO: 1347601 - DNA, 15 bp, Homo sapiens
tgtacatttaaggaa

SEQ ID NO: 1347602 - DNA, 15 bp, Homo sapiens
ttgtacatttaagga

SEQ ID NO: 1347603 - DNA, 15 bp, Homo sapiens
gttgtacatttaagg

SEQ ID NO: 1347604 - DNA, 15 bp, Homo sapiens
agttgtacatttaag

SEQ ID NO: 1347605 - DNA, 15 bp, Homo sapiens
tagttgtacatttaa

SEQ ID NO: 1347606 - DNA, 15 bp, Homo sapiens
gtagttgtacattta

SEQ ID NO: 1347607 - DNA, 15 bp, Homo sapiens
tgtagttgtacattt

SEQ ID NO: 1347608 - DNA, 15 bp, Homo sapiens
ttgtagttgtacatt

SEQ ID NO: 1347609 - DNA, 15 bp, Homo sapiens
tttgtagttgtacat

SEQ ID NO: 1347610 - DNA, 15 bp, Homo sapiens
ctttgtagttgtaca

SEQ ID NO: 1347611 - DNA, 15 bp, Homo sapiens
tctttgtagttgtac

SEQ ID NO: 1347612 - DNA, 15 bp, Homo sapiens
ttctttgtagttgta

SEQ ID NO: 1347613 - DNA, 15 bp, Homo sapiens
tttctttgtagttgt

SEQ ID NO: 1347614 - DNA, 15 bp, Homo sapiens
ttttctttgtagttg

SEQ ID NO: 1347615 - DNA, 15 bp, Homo sapiens
attttctttgtagtt

SEQ ID NO: 1347616 - DNA, 15 bp, Homo sapiens
tattttctttgtagt

SEQ ID NO: 1347617 - DNA, 15 bp, Homo sapiens
gtattttctttgtag

SEQ ID NO: 1347618 - DNA, 15 bp, Homo sapiens
agtattttctttgta

SEQ ID NO: 1347619 - DNA, 15 bp, Homo sapiens
tagtattttctttgt

SEQ ID NO: 1347620 - DNA, 15 bp, Homo sapiens
ttagtattttctttg

SEQ ID NO: 1347621 - DNA, 15 bp, Homo sapiens
cttagtattttcttt

SEQ ID NO: 1347622 - DNA, 15 bp, Homo sapiens
tcttagtattttctt

SEQ ID NO: 1347623 - DNA, 15 bp, Homo sapiens
gtcttagtattttct

SEQ ID NO: 1347624 - DNA, 15 bp, Homo sapiens
agtcttagtattttc

SEQ ID NO: 1347625 - DNA, 15 bp, Homo sapiens
tagtcttagtatttt

SEQ ID NO: 1347626 - DNA, 15 bp, Homo sapiens
ttagtcttagtattt

SEQ ID NO: 1347627 - DNA, 15 bp, Homo sapiens
attagtcttagtatt

SEQ ID NO: 1347628 - DNA, 15 bp, Homo sapiens
aattagtcttagtat

SEQ ID NO: 1347629 - DNA, 15 bp, Homo sapiens
aaattagtcttagta

SEQ ID NO: 1347630 - DNA, 15 bp, Homo sapiens
taaattagtcttagt

SEQ ID NO: 1347631 - DNA, 15 bp, Homo sapiens
ataaattagtcttag

SEQ ID NO: 1347632 - DNA, 15 bp, Homo sapiens
tataaattagtctta

SEQ ID NO: 1347633 - DNA, 15 bp, Homo sapiens
gtataaattagtctt

SEQ ID NO: 1347634 - DNA, 15 bp, Homo sapiens
agtataaattagtct

SEQ ID NO: 1347635 - DNA, 15 bp, Homo sapiens
cagtataaattagtc

SEQ ID NO: 1347636 - DNA, 15 bp, Homo sapiens
acagtataaattagt

SEQ ID NO: 1347637 - DNA, 15 bp, Homo sapiens
aacagtataaattag

SEQ ID NO: 1347638 - DNA, 15 bp, Homo sapiens
taacagtataaatta

SEQ ID NO: 1347639 - DNA, 15 bp, Homo sapiens
ataacagtataaatt

SEQ ID NO: 1347640 - DNA, 15 bp, Homo sapiens
aataacagtataaat

SEQ ID NO: 1347641 - DNA, 15 bp, Homo sapiens
gaataacagtataaa

SEQ ID NO: 1347642 - DNA, 15 bp, Homo sapiens
ggaataacagtataa

SEQ ID NO: 1347643 - DNA, 15 bp, Homo sapiens
tggaataacagtata

SEQ ID NO: 1347644 - DNA, 15 bp, Homo sapiens
atggaataacagtat

SEQ ID NO: 1347645 - DNA, 15 bp, Homo sapiens
tatggaataacagta

SEQ ID NO: 1347646 - DNA, 15 bp, Homo sapiens
ttatggaataacagt

SEQ ID NO: 1347647 - DNA, 15 bp, Homo sapiens
attatggaataacag

SEQ ID NO: 1347648 - DNA, 15 bp, Homo sapiens
aattatggaataaca

SEQ ID NO: 1347649 - DNA, 15 bp, Homo sapiens
aaattatggaataac

SEQ ID NO: 1347650 - DNA, 15 bp, Homo sapiens
aaaattatggaataa

SEQ ID NO: 1347651 - DNA, 15 bp, Homo sapiens
caaaattatggaata

SEQ ID NO: 1347652 - DNA, 15 bp, Homo sapiens
gcaaaattatggaat

SEQ ID NO: 1347653 - DNA, 15 bp, Homo sapiens
ggcaaaattatggaa

SEQ ID NO: 1347654 - DNA, 15 bp, Homo sapiens
aggcaaaattatgga

SEQ ID NO: 1347655 - DNA, 15 bp, Homo sapiens
aaggcaaaattatgg

SEQ ID NO: 1347656 - DNA, 15 bp, Homo sapiens
aaaggcaaaattatg

SEQ ID NO: 1347657 - DNA, 15 bp, Homo sapiens
caaaggcaaaattat

SEQ ID NO: 1347658 - DNA, 15 bp, Homo sapiens
tcaaaggcaaaatta

SEQ ID NO: 1347659 - DNA, 15 bp, Homo sapiens
ttcaaaggcaaaatt

SEQ ID NO: 1347660 - DNA, 15 bp, Homo sapiens
tttcaaaggcaaaat

SEQ ID NO: 1347661 - DNA, 15 bp, Homo sapiens
gtttcaaaggcaaaa

SEQ ID NO: 1347662 - DNA, 15 bp, Homo sapiens
tgtttcaaaggcaaa

SEQ ID NO: 1347663 - DNA, 15 bp, Homo sapiens
ttgtttcaaaggcaa

SEQ ID NO: 1347664 - DNA, 15 bp, Homo sapiens
cttgtttcaaaggca

SEQ ID NO: 1347665 - DNA, 15 bp, Homo sapiens
tcttgtttcaaaggc

SEQ ID NO: 1347666 - DNA, 15 bp, Homo sapiens
ttcttgtttcaaagg

SEQ ID NO: 1347667 - DNA, 15 bp, Homo sapiens
attcttgtttcaaag

SEQ ID NO: 1347668 - DNA, 15 bp, Homo sapiens
aattcttgtttcaaa

SEQ ID NO: 1347669 - DNA, 15 bp, Homo sapiens
aaattcttgtttcaa

SEQ ID NO: 1347670 - DNA, 15 bp, Homo sapiens
caaattcttgtttca

SEQ ID NO: 1347671 - DNA, 15 bp, Homo sapiens
tcaaattcttgtttc

SEQ ID NO: 1347672 - DNA, 15 bp, Homo sapiens
ttcaaattcttgttt

SEQ ID NO: 1347673 - DNA, 15 bp, Homo sapiens
cttcaaattcttgtt

SEQ ID NO: 1347674 - DNA, 15 bp, Homo sapiens
gcttcaaattcttgt

SEQ ID NO: 1347675 - DNA, 15 bp, Homo sapiens
ggcttcaaattcttg

SEQ ID NO: 1347676 - DNA, 15 bp, Homo sapiens
aggcttcaaattctt

SEQ ID NO: 1347677 - DNA, 15 bp, Homo sapiens
caggcttcaaattct

SEQ ID NO: 1347678 - DNA, 15 bp, Homo sapiens
tcaggcttcaaattc

SEQ ID NO: 1347679 - DNA, 15 bp, Homo sapiens
atcaggcttcaaatt

SEQ ID NO: 1347680 - DNA, 15 bp, Homo sapiens
catcaggcttcaaat

SEQ ID NO: 1347681 - DNA, 15 bp, Homo sapiens
acatcaggcttcaaa

SEQ ID NO: 1347682 - DNA, 15 bp, Homo sapiens
aacatcaggcttcaa

SEQ ID NO: 1347683 - DNA, 15 bp, Homo sapiens
caacatcaggcttca

SEQ ID NO: 1347684 - DNA, 15 bp, Homo sapiens
acaacatcaggcttc

SEQ ID NO: 1347685 - DNA, 15 bp, Homo sapiens
cacaacatcaggctt

SEQ ID NO: 1347686 - DNA, 15 bp, Homo sapiens
ccacaacatcaggct

SEQ ID NO: 1347687 - DNA, 15 bp, Homo sapiens
gccacaacatcaggc

SEQ ID NO: 1347688 - DNA, 15 bp, Homo sapiens
agccacaacatcagg

SEQ ID NO: 1347689 - DNA, 15 bp, Homo sapiens
aagccacaacatcag

SEQ ID NO: 1347690 - DNA, 15 bp, Homo sapiens
aaagccacaacatca

SEQ ID NO: 1347691 - DNA, 15 bp, Homo sapiens
caaagccacaacatc

SEQ ID NO: 1347692 - DNA, 15 bp, Homo sapiens
tcaaagccacaacat

SEQ ID NO: 1347693 - DNA, 15 bp, Homo sapiens
ttcaaagccacaaca

SEQ ID NO: 1347694 - DNA, 15 bp, Homo sapiens
gttcaaagccacaac

SEQ ID NO: 1347695 - DNA, 15 bp, Homo sapiens
tgttcaaagccacaa

SEQ ID NO: 1347696 - DNA, 15 bp, Homo sapiens
atgttcaaagccaca

SEQ ID NO: 1347697 - DNA, 15 bp, Homo sapiens
gatgttcaaagccac

SEQ ID NO: 1347698 - DNA, 15 bp, Homo sapiens
ggatgttcaaagcca

SEQ ID NO: 1347699 - DNA, 15 bp, Homo sapiens
tggatgttcaaagcc

SEQ ID NO: 1347700 - DNA, 15 bp, Homo sapiens
atggatgttcaaagc

SEQ ID NO: 1347701 - DNA, 15 bp, Homo sapiens
aatggatgttcaaag

SEQ ID NO: 1347702 - DNA, 15 bp, Homo sapiens
aaatggatgttcaaa

SEQ ID NO: 1347703 - DNA, 15 bp, Homo sapiens
aaaatggatgttcaa

SEQ ID NO: 1347704 - DNA, 15 bp, Homo sapiens
caaaatggatgttca

SEQ ID NO: 1347705 - DNA, 15 bp, Homo sapiens
ccaaaatggatgttc

SEQ ID NO: 1347706 - DNA, 15 bp, Homo sapiens
tccaaaatggatgtt

SEQ ID NO: 1347707 - DNA, 15 bp, Homo sapiens
atccaaaatggatgt

SEQ ID NO: 1347708 - DNA, 15 bp, Homo sapiens
aatccaaaatggatg

SEQ ID NO: 1347709 - DNA, 15 bp, Homo sapiens
taatccaaaatggat

SEQ ID NO: 1347710 - DNA, 15 bp, Homo sapiens
ataatccaaaatgga

SEQ ID NO: 1347711 - DNA, 15 bp, Homo sapiens
tataatccaaaatgg

SEQ ID NO: 1347712 - DNA, 15 bp, Homo sapiens
ctataatccaaaatg

SEQ ID NO: 1347713 - DNA, 15 bp, Homo sapiens
actataatccaaaat

SEQ ID NO: 1347714 - DNA, 15 bp, Homo sapiens
tactataatccaaaa

SEQ ID NO: 1347715 - DNA, 15 bp, Homo sapiens
ctactataatccaaa

SEQ ID NO: 1347716 - DNA, 15 bp, Homo sapiens
tctactataatccaa

SEQ ID NO: 1347717 - DNA, 15 bp, Homo sapiens
ttctactataatcca

SEQ ID NO: 1347718 - DNA, 15 bp, Homo sapiens
attctactataatcc

SEQ ID NO: 1347719 - DNA, 15 bp, Homo sapiens
cattctactataatc

SEQ ID NO: 1347720 - DNA, 15 bp, Homo sapiens
acattctactataat

SEQ ID NO: 1347721 - DNA, 15 bp, Homo sapiens
gacattctactataa

SEQ ID NO: 1347722 - DNA, 15 bp, Homo sapiens
ggacattctactata

SEQ ID NO: 1347723 - DNA, 15 bp, Homo sapiens
aggacattctactat

SEQ ID NO: 1347724 - DNA, 15 bp, Homo sapiens
taggacattctacta

SEQ ID NO: 1347725 - DNA, 15 bp, Homo sapiens
ctaggacattctact

SEQ ID NO: 1347726 - DNA, 15 bp, Homo sapiens
cctaggacattctac

SEQ ID NO: 1347727 - DNA, 15 bp, Homo sapiens
tcctaggacattcta

SEQ ID NO: 1347728 - DNA, 15 bp, Homo sapiens
ctcctaggacattct

SEQ ID NO: 1347729 - DNA, 15 bp, Homo sapiens
tctcctaggacattc

SEQ ID NO: 1347730 - DNA, 15 bp, Homo sapiens
ttctcctaggacatt

SEQ ID NO: 1347731 - DNA, 15 bp, Homo sapiens
gttctcctaggacat

SEQ ID NO: 1347732 - DNA, 15 bp, Homo sapiens
tgttctcctaggaca

SEQ ID NO: 1347733 - DNA, 15 bp, Homo sapiens
ctgttctcctaggac

SEQ ID NO: 1347734 - DNA, 15 bp, Homo sapiens
actgttctcctagga

SEQ ID NO: 1347735 - DNA, 15 bp, Homo sapiens
aactgttctcctagg

SEQ ID NO: 1347736 - DNA, 15 bp, Homo sapiens
aaactgttctcctag

SEQ ID NO: 1347737 - DNA, 15 bp, Homo sapiens
aaaactgttctccta

SEQ ID NO: 1347738 - DNA, 15 bp, Homo sapiens
taaaactgttctcct

SEQ ID NO: 1347739 - DNA, 15 bp, Homo sapiens
ataaaactgttctcc

SEQ ID NO: 1347740 - DNA, 15 bp, Homo sapiens
cataaaactgttctc

SEQ ID NO: 1347741 - DNA, 15 bp, Homo sapiens
acataaaactgttct

SEQ ID NO: 1347742 - DNA, 15 bp, Homo sapiens
tacataaaactgttc

SEQ ID NO: 1347743 - DNA, 15 bp, Homo sapiens
gtacataaaactgtt

SEQ ID NO: 1347744 - DNA, 15 bp, Homo sapiens
tgtacataaaactgt

SEQ ID NO: 1347745 - DNA, 15 bp, Homo sapiens
ctgtacataaaactg

SEQ ID NO: 1347746 - DNA, 15 bp, Homo sapiens
actgtacataaaact

SEQ ID NO: 1347747 - DNA, 15 bp, Homo sapiens
gactgtacataaaac

SEQ ID NO: 1347748 - DNA, 15 bp, Homo sapiens
ggactgtacataaaa

SEQ ID NO: 1347749 - DNA, 15 bp, Homo sapiens
tggactgtacataaa

SEQ ID NO: 1347750 - DNA, 15 bp, Homo sapiens
ctggactgtacataa

SEQ ID NO: 1347751 - DNA, 15 bp, Homo sapiens
tctggactgtacata

SEQ ID NO: 1347752 - DNA, 15 bp, Homo sapiens
ctctggactgtacat

SEQ ID NO: 1347753 - DNA, 15 bp, Homo sapiens
gctctggactgtaca

SEQ ID NO: 1347754 - DNA, 15 bp, Homo sapiens
ggctctggactgtac

SEQ ID NO: 1347755 - DNA, 15 bp, Homo sapiens
aggctctggactgta

SEQ ID NO: 1347756 - DNA, 15 bp, Homo sapiens
gaggctctggactgt

SEQ ID NO: 1347757 - DNA, 15 bp, Homo sapiens
tgaggctctggactg

SEQ ID NO: 1347758 - DNA, 15 bp, Homo sapiens
atgaggctctggact

SEQ ID NO: 1347759 - DNA, 15 bp, Homo sapiens
aatgaggctctggac

SEQ ID NO: 1347760 - DNA, 15 bp, Homo sapiens
taatgaggctctgga

SEQ ID NO: 1347761 - DNA, 15 bp, Homo sapiens
ataatgaggctctgg

SEQ ID NO: 1347762 - DNA, 15 bp, Homo sapiens
tataatgaggctctg

SEQ ID NO: 1347763 - DNA, 15 bp, Homo sapiens
ttataatgaggctct

SEQ ID NO: 1347764 - DNA, 15 bp, Homo sapiens
cttataatgaggctc

SEQ ID NO: 1347765 - DNA, 15 bp, Homo sapiens
tcttataatgaggct

SEQ ID NO: 1347766 - DNA, 15 bp, Homo sapiens
gtcttataatgaggc

SEQ ID NO: 1347767 - DNA, 15 bp, Homo sapiens
agtcttataatgagg

SEQ ID NO: 1347768 - DNA, 15 bp, Homo sapiens
cagtcttataatgag

SEQ ID NO: 1347769 - DNA, 15 bp, Homo sapiens
tcagtcttataatga

SEQ ID NO: 1347770 - DNA, 15 bp, Homo sapiens
atcagtcttataatg

SEQ ID NO: 1347771 - DNA, 15 bp, Homo sapiens
catcagtcttataat

SEQ ID NO: 1347772 - DNA, 15 bp, Homo sapiens
gcatcagtcttataa

SEQ ID NO: 1347773 - DNA, 15 bp, Homo sapiens
agcatcagtcttata

SEQ ID NO: 1347774 - DNA, 15 bp, Homo sapiens
cagcatcagtcttat

SEQ ID NO: 1347775 - DNA, 15 bp, Homo sapiens
tcagcatcagtctta

SEQ ID NO: 1347776 - DNA, 15 bp, Homo sapiens
ttcagcatcagtctt

SEQ ID NO: 1347777 - DNA, 15 bp, Homo sapiens
tttcagcatcagtct

SEQ ID NO: 1347778 - DNA, 15 bp, Homo sapiens
gtttcagcatcagtc

SEQ ID NO: 1347779 - DNA, 15 bp, Homo sapiens
ggtttcagcatcagt

SEQ ID NO: 1347780 - DNA, 15 bp, Homo sapiens
aggtttcagcatcag

SEQ ID NO: 1347781 - DNA, 15 bp, Homo sapiens
taggtttcagcatca

SEQ ID NO: 1347782 - DNA, 15 bp, Homo sapiens
ttaggtttcagcatc

SEQ ID NO: 1347783 - DNA, 15 bp, Homo sapiens
gttaggtttcagcat

SEQ ID NO: 1347784 - DNA, 15 bp, Homo sapiens
tgttaggtttcagca

SEQ ID NO: 1347785 - DNA, 15 bp, Homo sapiens
gtgttaggtttcagc

SEQ ID NO: 1347786 - DNA, 15 bp, Homo sapiens
ggtgttaggtttcag

SEQ ID NO: 1347787 - DNA, 15 bp, Homo sapiens
gggtgttaggtttca

SEQ ID NO: 1347788 - DNA, 15 bp, Homo sapiens
tgggtgttaggtttc

SEQ ID NO: 1347789 - DNA, 15 bp, Homo sapiens
ctgggtgttaggttt

SEQ ID NO: 1347790 - DNA, 15 bp, Homo sapiens
actgggtgttaggtt

SEQ ID NO: 1347791 - DNA, 15 bp, Homo sapiens
aactgggtgttaggt

SEQ ID NO: 1347792 - DNA, 15 bp, Homo sapiens
gaactgggtgttagg

SEQ ID NO: 1347793 - DNA, 15 bp, Homo sapiens
agaactgggtgttag

SEQ ID NO: 1347794 - DNA, 15 bp, Homo sapiens
aagaactgggtgtta

SEQ ID NO: 1347795 - DNA, 15 bp, Homo sapiens
aaagaactgggtgtt

SEQ ID NO: 1347796 - DNA, 15 bp, Homo sapiens
aaaagaactgggtgt

SEQ ID NO: 1347797 - DNA, 15 bp, Homo sapiens
aaaaagaactgggtg

SEQ ID NO: 1347798 - DNA, 15 bp, Homo sapiens
aaaaaagaactgggt

SEQ ID NO: 1347799 - DNA, 15 bp, Homo sapiens
caaaaaagaactggg

SEQ ID NO: 1347800 - DNA, 15 bp, Homo sapiens
tcaaaaaagaactgg

SEQ ID NO: 1347801 - DNA, 15 bp, Homo sapiens
ttcaaaaaagaactg

SEQ ID NO: 1347802 - DNA, 15 bp, Homo sapiens
tttcaaaaaagaact

SEQ ID NO: 1347803 - DNA, 15 bp, Homo sapiens
ctttcaaaaaagaac

SEQ ID NO: 1347804 - DNA, 15 bp, Homo sapiens
tctttcaaaaaagaa

SEQ ID NO: 1347805 - DNA, 15 bp, Homo sapiens
ttctttcaaaaaaga

SEQ ID NO: 1347806 - DNA, 15 bp, Homo sapiens
tttctttcaaaaaag

SEQ ID NO: 1347807 - DNA, 15 bp, Homo sapiens
ttttctttcaaaaaa

SEQ ID NO: 1347808 - DNA, 15 bp, Homo sapiens
gttttctttcaaaaa

SEQ ID NO: 1347809 - DNA, 15 bp, Homo sapiens
agttttctttcaaaa

SEQ ID NO: 1347810 - DNA, 15 bp, Homo sapiens
aagttttctttcaaa

SEQ ID NO: 1347811 - DNA, 15 bp, Homo sapiens
aaagttttctttcaa

SEQ ID NO: 1347812 - DNA, 15 bp, Homo sapiens
aaaagttttctttca

SEQ ID NO: 1347813 - DNA, 15 bp, Homo sapiens
taaaagttttctttc

SEQ ID NO: 1347814 - DNA, 15 bp, Homo sapiens
gtaaaagttttcttt

SEQ ID NO: 1347815 - DNA, 15 bp, Homo sapiens
tgtaaaagttttctt

SEQ ID NO: 1347816 - DNA, 15 bp, Homo sapiens
atgtaaaagttttct

SEQ ID NO: 1347817 - DNA, 15 bp, Homo sapiens
aatgtaaaagttttc

SEQ ID NO: 1347818 - DNA, 15 bp, Homo sapiens
aaatgtaaaagtttt

SEQ ID NO: 1347819 - DNA, 15 bp, Homo sapiens
caaatgtaaaagttt

SEQ ID NO: 1347820 - DNA, 15 bp, Homo sapiens
acaaatgtaaaagtt

SEQ ID NO: 1347821 - DNA, 15 bp, Homo sapiens
aacaaatgtaaaagt

SEQ ID NO: 1347822 - DNA, 15 bp, Homo sapiens
gaacaaatgtaaaag

SEQ ID NO: 1347823 - DNA, 15 bp, Homo sapiens
agaacaaatgtaaaa

SEQ ID NO: 1347824 - DNA, 15 bp, Homo sapiens
aagaacaaatgtaaa

SEQ ID NO: 1347825 - DNA, 15 bp, Homo sapiens
taagaacaaatgtaa

SEQ ID NO: 1347826 - DNA, 15 bp, Homo sapiens
ataagaacaaatgta

SEQ ID NO: 1347827 - DNA, 15 bp, Homo sapiens
tataagaacaaatgt

SEQ ID NO: 1347828 - DNA, 15 bp, Homo sapiens
ttataagaacaaatg

SEQ ID NO: 1347829 - DNA, 15 bp, Homo sapiens
tttataagaacaaat

SEQ ID NO: 1347830 - DNA, 15 bp, Homo sapiens
ttttataagaacaaa

SEQ ID NO: 1347831 - DNA, 15 bp, Homo sapiens
cttttataagaacaa

SEQ ID NO: 1347832 - DNA, 15 bp, Homo sapiens
gcttttataagaaca

SEQ ID NO: 1347833 - DNA, 15 bp, Homo sapiens
cgcttttataagaac

SEQ ID NO: 1347834 - DNA, 15 bp, Homo sapiens
acgcttttataagaa

SEQ ID NO: 1347835 - DNA, 15 bp, Homo sapiens
cacgcttttataaga

SEQ ID NO: 1347836 - DNA, 15 bp, Homo sapiens
acacgcttttataag

SEQ ID NO: 1347837 - DNA, 15 bp, Homo sapiens
cacacgcttttataa

SEQ ID NO: 1347838 - DNA, 15 bp, Homo sapiens
tcacacgcttttata

SEQ ID NO: 1347839 - DNA, 15 bp, Homo sapiens
ctcacacgcttttat

SEQ ID NO: 1347840 - DNA, 15 bp, Homo sapiens
tctcacacgctttta

SEQ ID NO: 1347841 - DNA, 15 bp, Homo sapiens
ttctcacacgctttt

SEQ ID NO: 1347842 - DNA, 15 bp, Homo sapiens
tttctcacacgcttt

SEQ ID NO: 1347843 - DNA, 15 bp, Homo sapiens
atttctcacacgctt

SEQ ID NO: 1347844 - DNA, 15 bp, Homo sapiens
catttctcacacgct

SEQ ID NO: 1347845 - DNA, 15 bp, Homo sapiens
tcatttctcacacgc

SEQ ID NO: 1347846 - DNA, 15 bp, Homo sapiens
atcatttctcacacg

SEQ ID NO: 1347847 - DNA, 15 bp, Homo sapiens
tatcatttctcacac

SEQ ID NO: 1347848 - DNA, 15 bp, Homo sapiens
atatcatttctcaca

SEQ ID NO: 1347849 - DNA, 15 bp, Homo sapiens
gatatcatttctcac

SEQ ID NO: 1347850 - DNA, 15 bp, Homo sapiens
agatatcatttctca

SEQ ID NO: 1347851 - DNA, 15 bp, Homo sapiens
gagatatcatttctc

SEQ ID NO: 1347852 - DNA, 15 bp, Homo sapiens
tgagatatcatttct

SEQ ID NO: 1347853 - DNA, 15 bp, Homo sapiens
atgagatatcatttc

SEQ ID NO: 1347854 - DNA, 15 bp, Homo sapiens
aatgagatatcattt

SEQ ID NO: 1347855 - DNA, 15 bp, Homo sapiens
aaatgagatatcatt

SEQ ID NO: 1347856 - DNA, 15 bp, Homo sapiens
aaaatgagatatcat

SEQ ID NO: 1347857 - DNA, 15 bp, Homo sapiens
caaaatgagatatca

SEQ ID NO: 1347858 - DNA, 15 bp, Homo sapiens
tcaaaatgagatatc

SEQ ID NO: 1347859 - DNA, 15 bp, Homo sapiens
gtcaaaatgagatat

SEQ ID NO: 1347860 - DNA, 15 bp, Homo sapiens
agtcaaaatgagata

SEQ ID NO: 1347861 - DNA, 15 bp, Homo sapiens
gagtcaaaatgagat

SEQ ID NO: 1347862 - DNA, 15 bp, Homo sapiens
tgagtcaaaatgaga

SEQ ID NO: 1347863 - DNA, 15 bp, Homo sapiens
atgagtcaaaatgag

SEQ ID NO: 1347864 - DNA, 15 bp, Homo sapiens
aatgagtcaaaatga

SEQ ID NO: 1347865 - DNA, 15 bp, Homo sapiens
aaatgagtcaaaatg

SEQ ID NO: 1347866 - DNA, 15 bp, Homo sapiens
gaaatgagtcaaaat

SEQ ID NO: 1347867 - DNA, 15 bp, Homo sapiens
tgaaatgagtcaaaa

SEQ ID NO: 1347868 - DNA, 15 bp, Homo sapiens
gtgaaatgagtcaaa

SEQ ID NO: 1347869 - DNA, 15 bp, Homo sapiens
agtgaaatgagtcaa

SEQ ID NO: 1347870 - DNA, 15 bp, Homo sapiens
aagtgaaatgagtca

SEQ ID NO: 1347871 - DNA, 15 bp, Homo sapiens
aaagtgaaatgagtc

SEQ ID NO: 1347872 - DNA, 15 bp, Homo sapiens
gaaagtgaaatgagt

SEQ ID NO: 1347873 - DNA, 15 bp, Homo sapiens
tgaaagtgaaatgag

SEQ ID NO: 1347874 - DNA, 15 bp, Homo sapiens
atgaaagtgaaatga

SEQ ID NO: 1347875 - DNA, 15 bp, Homo sapiens
tatgaaagtgaaatg

SEQ ID NO: 1347876 - DNA, 15 bp, Homo sapiens
ttatgaaagtgaaat

SEQ ID NO: 1347877 - DNA, 15 bp, Homo sapiens
attatgaaagtgaaa

SEQ ID NO: 1347878 - DNA, 15 bp, Homo sapiens
tattatgaaagtgaa

SEQ ID NO: 1347879 - DNA, 15 bp, Homo sapiens
ttattatgaaagtga

SEQ ID NO: 1347880 - DNA, 15 bp, Homo sapiens
gttattatgaaagtg

SEQ ID NO: 1347881 - DNA, 15 bp, Homo sapiens
tgttattatgaaagt

SEQ ID NO: 1347882 - DNA, 15 bp, Homo sapiens
atgttattatgaaag

SEQ ID NO: 1347883 - DNA, 15 bp, Homo sapiens
aatgttattatgaaa

SEQ ID NO: 1347884 - DNA, 15 bp, Homo sapiens
gaatgttattatgaa

SEQ ID NO: 1347885 - DNA, 15 bp, Homo sapiens
agaatgttattatga

SEQ ID NO: 1347886 - DNA, 15 bp, Homo sapiens
tagaatgttattatg

SEQ ID NO: 1347887 - DNA, 15 bp, Homo sapiens
atagaatgttattat

SEQ ID NO: 1347888 - DNA, 15 bp, Homo sapiens
tatagaatgttatta

SEQ ID NO: 1347889 - DNA, 15 bp, Homo sapiens
atatagaatgttatt

SEQ ID NO: 1347890 - DNA, 15 bp, Homo sapiens
catatagaatgttat

SEQ ID NO: 1347891 - DNA, 15 bp, Homo sapiens
tcatatagaatgtta

SEQ ID NO: 1347892 - DNA, 15 bp, Homo sapiens
ttcatatagaatgtt

SEQ ID NO: 1347893 - DNA, 15 bp, Homo sapiens
tttcatatagaatgt

SEQ ID NO: 1347894 - DNA, 15 bp, Homo sapiens
gtttcatatagaatg

SEQ ID NO: 1347895 - DNA, 15 bp, Homo sapiens
tgtttcatatagaat

SEQ ID NO: 1347896 - DNA, 15 bp, Homo sapiens
ttgtttcatatagaa

SEQ ID NO: 1347897 - DNA, 15 bp, Homo sapiens
gttgtttcatataga

SEQ ID NO: 1347898 - DNA, 15 bp, Homo sapiens
agttgtttcatatag

SEQ ID NO: 1347899 - DNA, 15 bp, Homo sapiens
aagttgtttcatata

SEQ ID NO: 1347900 - DNA, 15 bp, Homo sapiens
aaagttgtttcatat

SEQ ID NO: 1347901 - DNA, 15 bp, Homo sapiens
gaaagttgtttcata

SEQ ID NO: 1347902 - DNA, 15 bp, Homo sapiens
ggaaagttgtttcat

SEQ ID NO: 1347903 - DNA, 15 bp, Homo sapiens
aggaaagttgtttca

SEQ ID NO: 1347904 - DNA, 15 bp, Homo sapiens
gaggaaagttgtttc

SEQ ID NO: 1347905 - DNA, 15 bp, Homo sapiens
tgaggaaagttgttt

SEQ ID NO: 1347906 - DNA, 15 bp, Homo sapiens
ttgaggaaagttgtt

SEQ ID NO: 1347907 - DNA, 15 bp, Homo sapiens
gttgaggaaagttgt

SEQ ID NO: 1347908 - DNA, 15 bp, Homo sapiens
tgttgaggaaagttg

SEQ ID NO: 1347909 - DNA, 15 bp, Homo sapiens
ttgttgaggaaagtt

SEQ ID NO: 1347910 - DNA, 15 bp, Homo sapiens
tttgttgaggaaagt

SEQ ID NO: 1347911 - DNA, 15 bp, Homo sapiens
atttgttgaggaaag

SEQ ID NO: 1347912 - DNA, 15 bp, Homo sapiens
catttgttgaggaaa

SEQ ID NO: 1347913 - DNA, 15 bp, Homo sapiens
acatttgttgaggaa

SEQ ID NO: 1347914 - DNA, 15 bp, Homo sapiens
aacatttgttgagga

SEQ ID NO: 1347915 - DNA, 15 bp, Homo sapiens
gaacatttgttgagg

SEQ ID NO: 1347916 - DNA, 15 bp, Homo sapiens
tgaacatttgttgag

SEQ ID NO: 1347917 - DNA, 15 bp, Homo sapiens
ctgaacatttgttga

SEQ ID NO: 1347918 - DNA, 15 bp, Homo sapiens
tctgaacatttgttg

SEQ ID NO: 1347919 - DNA, 15 bp, Homo sapiens
gtctgaacatttgtt

SEQ ID NO: 1347920 - DNA, 15 bp, Homo sapiens
tgtctgaacatttgt

SEQ ID NO: 1347921 - DNA, 15 bp, Homo sapiens
gtgtctgaacatttg

SEQ ID NO: 1347922 - DNA, 15 bp, Homo sapiens
ggtgtctgaacattt

SEQ ID NO: 1347923 - DNA, 15 bp, Homo sapiens
aggtgtctgaacatt

SEQ ID NO: 1347924 - DNA, 15 bp, Homo sapiens
aaggtgtctgaacat

SEQ ID NO: 1347925 - DNA, 15 bp, Homo sapiens
gaaggtgtctgaaca

SEQ ID NO: 1347926 - DNA, 15 bp, Homo sapiens
agaaggtgtctgaac

SEQ ID NO: 1347927 - DNA, 15 bp, Homo sapiens
gagaaggtgtctgaa

SEQ ID NO: 1347928 - DNA, 15 bp, Homo sapiens
tgagaaggtgtctga

SEQ ID NO: 1347929 - DNA, 15 bp, Homo sapiens
ttgagaaggtgtctg

SEQ ID NO: 1347930 - DNA, 15 bp, Homo sapiens
gttgagaaggtgtct

SEQ ID NO: 1347931 - DNA, 15 bp, Homo sapiens
agttgagaaggtgtc

SEQ ID NO: 1347932 - DNA, 15 bp, Homo sapiens
aagttgagaaggtgt

SEQ ID NO: 1347933 - DNA, 15 bp, Homo sapiens
aaagttgagaaggtg

SEQ ID NO: 1347934 - DNA, 15 bp, Homo sapiens
caaagttgagaaggt

SEQ ID NO: 1347935 - DNA, 15 bp, Homo sapiens
acaaagttgagaagg

SEQ ID NO: 1347936 - DNA, 15 bp, Homo sapiens
gacaaagttgagaag

SEQ ID NO: 1347937 - DNA, 15 bp, Homo sapiens
ggacaaagttgagaa

SEQ ID NO: 1347938 - DNA, 15 bp, Homo sapiens
aagtatggaggtatg

SEQ ID NO: 1347939 - DNA, 15 bp, Homo sapiens
aaagtatggaggtat

SEQ ID NO: 1347940 - DNA, 15 bp, Homo sapiens
gaaagtatggaggta

SEQ ID NO: 1347941 - DNA, 15 bp, Homo sapiens
tgaaagtatggaggt

SEQ ID NO: 1347942 - DNA, 15 bp, Homo sapiens
ttgaaagtatggagg

SEQ ID NO: 1347943 - DNA, 15 bp, Homo sapiens
tttgaaagtatggag

SEQ ID NO: 1347944 - DNA, 15 bp, Homo sapiens
ctttgaaagtatgga

SEQ ID NO: 1347945 - DNA, 15 bp, Homo sapiens
cctttgaaagtatgg

SEQ ID NO: 1347946 - DNA, 15 bp, Homo sapiens
ccctttgaaagtatg

SEQ ID NO: 1347947 - DNA, 15 bp, Homo sapiens
gccctttgaaagtat

SEQ ID NO: 1347948 - DNA, 15 bp, Homo sapiens
tgccctttgaaagta

SEQ ID NO: 1347949 - DNA, 15 bp, Homo sapiens
atgccctttgaaagt

SEQ ID NO: 1347950 - DNA, 15 bp, Homo sapiens
aatgccctttgaaag

SEQ ID NO: 1347951 - DNA, 15 bp, Homo sapiens
aaatgccctttgaaa

SEQ ID NO: 1347952 - DNA, 15 bp, Homo sapiens
gaaatgccctttgaa

SEQ ID NO: 1347953 - DNA, 15 bp, Homo sapiens
agaaatgccctttga

SEQ ID NO: 1347954 - DNA, 15 bp, Homo sapiens
cagaaatgccctttg

SEQ ID NO: 1347955 - DNA, 15 bp, Homo sapiens
gcagaaatgcccttt

SEQ ID NO: 1347956 - DNA, 15 bp, Homo sapiens
tgcagaaatgccctt

SEQ ID NO: 1347957 - DNA, 15 bp, Homo sapiens
ctgcagaaatgccct

SEQ ID NO: 1347958 - DNA, 15 bp, Homo sapiens
actgcagaaatgccc

SEQ ID NO: 1347959 - DNA, 15 bp, Homo sapiens
tactgcagaaatgcc

SEQ ID NO: 1347960 - DNA, 15 bp, Homo sapiens
gtactgcagaaatgc

SEQ ID NO: 1347961 - DNA, 15 bp, Homo sapiens
tgtactgcagaaatg

SEQ ID NO: 1347962 - DNA, 15 bp, Homo sapiens
ttgtactgcagaaat

SEQ ID NO: 1347963 - DNA, 15 bp, Homo sapiens
tttgtactgcagaaa

SEQ ID NO: 1347964 - DNA, 15 bp, Homo sapiens
gtttgtactgcagaa

SEQ ID NO: 1347965 - DNA, 15 bp, Homo sapiens
agtttgtactgcaga

SEQ ID NO: 1347966 - DNA, 15 bp, Homo sapiens
tagtttgtactgcag

SEQ ID NO: 1347967 - DNA, 15 bp, Homo sapiens
gtagtttgtactgca

SEQ ID NO: 1347968 - DNA, 15 bp, Homo sapiens
tgtagtttgtactgc

SEQ ID NO: 1347969 - DNA, 15 bp, Homo sapiens
ctgtagtttgtactg

SEQ ID NO: 1347970 - DNA, 15 bp, Homo sapiens
actgtagtttgtact

SEQ ID NO: 1347971 - DNA, 15 bp, Homo sapiens
tactgtagtttgtac

SEQ ID NO: 1347972 - DNA, 15 bp, Homo sapiens
ttactgtagtttgta

SEQ ID NO: 1347973 - DNA, 15 bp, Homo sapiens
tttactgtagtttgt

SEQ ID NO: 1347974 - DNA, 15 bp, Homo sapiens
gtttactgtagtttg

SEQ ID NO: 1347975 - DNA, 15 bp, Homo sapiens
tgtttactgtagttt

SEQ ID NO: 1347976 - DNA, 15 bp, Homo sapiens
ctgtttactgtagtt

SEQ ID NO: 1347977 - DNA, 15 bp, Homo sapiens
actgtttactgtagt

SEQ ID NO: 1347978 - DNA, 15 bp, Homo sapiens
tactgtttactgtag

SEQ ID NO: 1347979 - DNA, 15 bp, Homo sapiens
atactgtttactgta

SEQ ID NO: 1347980 - DNA, 15 bp, Homo sapiens
tatactgtttactgt

SEQ ID NO: 1347981 - DNA, 15 bp, Homo sapiens
ctatactgtttactg

SEQ ID NO: 1347982 - DNA, 15 bp, Homo sapiens
cctatactgtttact

SEQ ID NO: 1347983 - DNA, 15 bp, Homo sapiens
gcctatactgtttac

SEQ ID NO: 1347984 - DNA, 15 bp, Homo sapiens
agcctatactgttta

SEQ ID NO: 1347985 - DNA, 15 bp, Homo sapiens
tagcctatactgttt

SEQ ID NO: 1347986 - DNA, 15 bp, Homo sapiens
ctagcctatactgtt

SEQ ID NO: 1347987 - DNA, 15 bp, Homo sapiens
actagcctatactgt

SEQ ID NO: 1347988 - DNA, 15 bp, Homo sapiens
cactagcctatactg

SEQ ID NO: 1347989 - DNA, 15 bp, Homo sapiens
tcactagcctatact

SEQ ID NO: 1347990 - DNA, 15 bp, Homo sapiens
atcactagcctatac

SEQ ID NO: 1347991 - DNA, 15 bp, Homo sapiens
catcactagcctata

SEQ ID NO: 1347992 - DNA, 15 bp, Homo sapiens
ccatcactagcctat

SEQ ID NO: 1347993 - DNA, 15 bp, Homo sapiens
accatcactagccta

SEQ ID NO: 1347994 - DNA, 15 bp, Homo sapiens
aaccatcactagcct

SEQ ID NO: 1347995 - DNA, 15 bp, Homo sapiens
gaaccatcactagcc

SEQ ID NO: 1347996 - DNA, 15 bp, Homo sapiens
agaaccatcactagc

SEQ ID NO: 1347997 - DNA, 15 bp, Homo sapiens
aagaaccatcactag

SEQ ID NO: 1347998 - DNA, 15 bp, Homo sapiens
taagaaccatcacta

SEQ ID NO: 1347999 - DNA, 15 bp, Homo sapiens
ctaagaaccatcact

SEQ ID NO: 1348000 - DNA, 15 bp, Homo sapiens
tctaagaaccatcac

SEQ ID NO: 1348001 - DNA, 15 bp, Homo sapiens
atctaagaaccatca

SEQ ID NO: 1348002 - DNA, 15 bp, Homo sapiens
gatctaagaaccatc

SEQ ID NO: 1348003 - DNA, 15 bp, Homo sapiens
agatctaagaaccat

SEQ ID NO: 1348004 - DNA, 15 bp, Homo sapiens
cagatctaagaacca

SEQ ID NO: 1348005 - DNA, 15 bp, Homo sapiens
ccagatctaagaacc

SEQ ID NO: 1348006 - DNA, 15 bp, Homo sapiens
accagatctaagaac

SEQ ID NO: 1348007 - DNA, 15 bp, Homo sapiens
taccagatctaagaa

SEQ ID NO: 1348008 - DNA, 15 bp, Homo sapiens
ttaccagatctaaga

SEQ ID NO: 1348009 - DNA, 15 bp, Homo sapiens
cttaccagatctaag

SEQ ID NO: 1348010 - DNA, 15 bp, Homo sapiens
tcttaccagatctaa

SEQ ID NO: 1348011 - DNA, 15 bp, Homo sapiens
atcttaccagatcta

SEQ ID NO: 1348012 - DNA, 15 bp, Homo sapiens
catcttaccagatct

SEQ ID NO: 1348013 - DNA, 15 bp, Homo sapiens
tcatcttaccagatc

SEQ ID NO: 1348014 - DNA, 15 bp, Homo sapiens
ctcatcttaccagat

SEQ ID NO: 1348015 - DNA, 15 bp, Homo sapiens
tctcatcttaccaga

SEQ ID NO: 1348016 - DNA, 15 bp, Homo sapiens
atctcatcttaccag

SEQ ID NO: 1348017 - DNA, 15 bp, Homo sapiens
gatctcatcttacca

SEQ ID NO: 1348018 - DNA, 15 bp, Homo sapiens
tgatctcatcttacc

SEQ ID NO: 1348019 - DNA, 15 bp, Homo sapiens
atgatctcatcttac

SEQ ID NO: 1348020 - DNA, 15 bp, Homo sapiens
catgatctcatctta

SEQ ID NO: 1348021 - DNA, 15 bp, Homo sapiens
aacatgatctcatct

SEQ ID NO: 1348022 - DNA, 15 bp, Homo sapiens
aaacatgatctcatc

SEQ ID NO: 1348023 - DNA, 15 bp, Homo sapiens
taaacatgatctcat

SEQ ID NO: 1348024 - DNA, 15 bp, Homo sapiens
ttaaacatgatctca

SEQ ID NO: 1348025 - DNA, 15 bp, Homo sapiens
attaaacatgatctc

SEQ ID NO: 1348026 - DNA, 15 bp, Homo sapiens
cattaaacatgatct

SEQ ID NO: 1348027 - DNA, 15 bp, Homo sapiens
acattaaacatgatc

SEQ ID NO: 1348028 - DNA, 15 bp, Homo sapiens
tacattaaacatgat

SEQ ID NO: 1348029 - DNA, 15 bp, Homo sapiens
gtacattaaacatga

SEQ ID NO: 1348030 - DNA, 15 bp, Homo sapiens
agtacattaaacatg

SEQ ID NO: 1348031 - DNA, 15 bp, Homo sapiens
cagtacattaaacat

SEQ ID NO: 1348032 - DNA, 15 bp, Homo sapiens
gcagtacattaaaca

SEQ ID NO: 1348033 - DNA, 15 bp, Homo sapiens
ggcagtacattaaac

SEQ ID NO: 1348034 - DNA, 15 bp, Homo sapiens
tggcagtacattaaa

SEQ ID NO: 1348035 - DNA, 15 bp, Homo sapiens
ttggcagtacattaa

SEQ ID NO: 1348036 - DNA, 15 bp, Homo sapiens
attggcagtacatta

SEQ ID NO: 1348037 - DNA, 15 bp, Homo sapiens
cattggcagtacatt

SEQ ID NO: 1348038 - DNA, 15 bp, Homo sapiens
acattggcagtacat

SEQ ID NO: 1348039 - DNA, 15 bp, Homo sapiens
aacattggcagtaca

SEQ ID NO: 1348040 - DNA, 15 bp, Homo sapiens
taacattggcagtac

SEQ ID NO: 1348041 - DNA, 15 bp, Homo sapiens
gtaacattggcagta

SEQ ID NO: 1348042 - DNA, 15 bp, Homo sapiens
ggtaacattggcagt

SEQ ID NO: 1348043 - DNA, 15 bp, Homo sapiens
aggtaacattggcag

SEQ ID NO: 1348044 - DNA, 15 bp, Homo sapiens
caggtaacattggca

SEQ ID NO: 1348045 - DNA, 15 bp, Homo sapiens
tcaggtaacattggc

SEQ ID NO: 1348046 - DNA, 15 bp, Homo sapiens
gtcaggtaacattgg

SEQ ID NO: 1348047 - DNA, 15 bp, Homo sapiens
tgtcaggtaacattg

SEQ ID NO: 1348048 - DNA, 15 bp, Homo sapiens
gtgtcaggtaacatt

SEQ ID NO: 1348049 - DNA, 15 bp, Homo sapiens
ggtgtcaggtaacat

SEQ ID NO: 1348050 - DNA, 15 bp, Homo sapiens
tggtgtcaggtaaca

SEQ ID NO: 1348051 - DNA, 15 bp, Homo sapiens
gtggtgtcaggtaac

SEQ ID NO: 1348052 - DNA, 15 bp, Homo sapiens
ggtggtgtcaggtaa

SEQ ID NO: 1348053 - DNA, 15 bp, Homo sapiens
tggtggtgtcaggta

SEQ ID NO: 1348054 - DNA, 15 bp, Homo sapiens
ttggtggtgtcaggt

SEQ ID NO: 1348055 - DNA, 15 bp, Homo sapiens
gttggtggtgtcagg

SEQ ID NO: 1348056 - DNA, 15 bp, Homo sapiens
tgttggtggtgtcag

SEQ ID NO: 1348057 - DNA, 15 bp, Homo sapiens
ctgttggtggtgtca

SEQ ID NO: 1348058 - DNA, 15 bp, Homo sapiens
tctgttggtggtgtc

SEQ ID NO: 1348059 - DNA, 15 bp, Homo sapiens
gtctgttggtggtgt

SEQ ID NO: 1348060 - DNA, 15 bp, Homo sapiens
agtctgttggtggtg

SEQ ID NO: 1348061 - DNA, 15 bp, Homo sapiens
gagtctgttggtggt

SEQ ID NO: 1348062 - DNA, 15 bp, Homo sapiens
tgagtctgttggtgg

SEQ ID NO: 1348063 - DNA, 15 bp, Homo sapiens
gtgagtctgttggtg

SEQ ID NO: 1348064 - DNA, 15 bp, Homo sapiens
tgtgagtctgttggt

SEQ ID NO: 1348065 - DNA, 15 bp, Homo sapiens
ctgtgagtctgttgg

SEQ ID NO: 1348066 - DNA, 15 bp, Homo sapiens
actgtgagtctgttg

SEQ ID NO: 1348067 - DNA, 15 bp, Homo sapiens
aactgtgagtctgtt

SEQ ID NO: 1348068 - DNA, 15 bp, Homo sapiens
taactgtgagtctgt

SEQ ID NO: 1348069 - DNA, 15 bp, Homo sapiens
gtaactgtgagtctg

SEQ ID NO: 1348070 - DNA, 15 bp, Homo sapiens
tgtaactgtgagtct

SEQ ID NO: 1348071 - DNA, 15 bp, Homo sapiens
ctgtaactgtgagtc

SEQ ID NO: 1348072 - DNA, 15 bp, Homo sapiens
actgtaactgtgagt

SEQ ID NO: 1348073 - DNA, 15 bp, Homo sapiens
gactgtaactgtgag

SEQ ID NO: 1348074 - DNA, 15 bp, Homo sapiens
tgactgtaactgtga

SEQ ID NO: 1348075 - DNA, 15 bp, Homo sapiens
atgactgtaactgtg

SEQ ID NO: 1348076 - DNA, 15 bp, Homo sapiens
catgactgtaactgt

SEQ ID NO: 1348077 - DNA, 15 bp, Homo sapiens
gcatgactgtaactg

SEQ ID NO: 1348078 - DNA, 15 bp, Homo sapiens
ggcatgactgtaact

SEQ ID NO: 1348079 - DNA, 15 bp, Homo sapiens
gggcatgactgtaac

SEQ ID NO: 1348080 - DNA, 15 bp, Homo sapiens
tgggcatgactgtaa

SEQ ID NO: 1348081 - DNA, 15 bp, Homo sapiens
ttgggcatgactgta

SEQ ID NO: 1348082 - DNA, 15 bp, Homo sapiens
attgggcatgactgt

SEQ ID NO: 1348083 - DNA, 15 bp, Homo sapiens
cattgggcatgactg

SEQ ID NO: 1348084 - DNA, 15 bp, Homo sapiens
tcattgggcatgact

SEQ ID NO: 1348085 - DNA, 15 bp, Homo sapiens
gtcattgggcatgac

SEQ ID NO: 1348086 - DNA, 15 bp, Homo sapiens
tgtcattgggcatga

SEQ ID NO: 1348087 - DNA, 15 bp, Homo sapiens
ctgtcattgggcatg

SEQ ID NO: 1348088 - DNA, 15 bp, Homo sapiens
actgtcattgggcat

SEQ ID NO: 1348089 - DNA, 15 bp, Homo sapiens
aactgtcattgggca

SEQ ID NO: 1348090 - DNA, 15 bp, Homo sapiens
taactgtcattgggc

SEQ ID NO: 1348091 - DNA, 15 bp, Homo sapiens
ataactgtcattggg

SEQ ID NO: 1348092 - DNA, 15 bp, Homo sapiens
cataactgtcattgg

SEQ ID NO: 1348093 - DNA, 15 bp, Homo sapiens
tcataactgtcattg

SEQ ID NO: 1348094 - DNA, 15 bp, Homo sapiens
ttcataactgtcatt

SEQ ID NO: 1348095 - DNA, 15 bp, Homo sapiens
attcataactgtcat

SEQ ID NO: 1348096 - DNA, 15 bp, Homo sapiens
gattcataactgtca

SEQ ID NO: 1348097 - DNA, 15 bp, Homo sapiens
agattcataactgtc

SEQ ID NO: 1348098 - DNA, 15 bp, Homo sapiens
gagattcataactgt

SEQ ID NO: 1348099 - DNA, 15 bp, Homo sapiens
ggagattcataactg

SEQ ID NO: 1348100 - DNA, 15 bp, Homo sapiens
tggagattcataact

SEQ ID NO: 1348101 - DNA, 15 bp, Homo sapiens
ctggagattcataac

SEQ ID NO: 1348102 - DNA, 15 bp, Homo sapiens
actggagattcataa

SEQ ID NO: 1348103 - DNA, 15 bp, Homo sapiens
cactggagattcata

SEQ ID NO: 1348104 - DNA, 15 bp, Homo sapiens
gcactggagattcat

SEQ ID NO: 1348105 - DNA, 15 bp, Homo sapiens
agcactggagattca

SEQ ID NO: 1348106 - DNA, 15 bp, Homo sapiens
tagcactggagattc

SEQ ID NO: 1348107 - DNA, 15 bp, Homo sapiens
ttagcactggagatt

SEQ ID NO: 1348108 - DNA, 15 bp, Homo sapiens
tttagcactggagat

SEQ ID NO: 1348109 - DNA, 15 bp, Homo sapiens
ctttagcactggaga

SEQ ID NO: 1348110 - DNA, 15 bp, Homo sapiens
cctttagcactggag

SEQ ID NO: 1348111 - DNA, 15 bp, Homo sapiens
tcctttagcactgga

SEQ ID NO: 1348112 - DNA, 15 bp, Homo sapiens
ttcctttagcactgg

SEQ ID NO: 1348113 - DNA, 15 bp, Homo sapiens
cttcctttagcactg

SEQ ID NO: 1348114 - DNA, 15 bp, Homo sapiens
tcttcctttagcact

SEQ ID NO: 1348115 - DNA, 15 bp, Homo sapiens
ttcttcctttagcac

SEQ ID NO: 1348116 - DNA, 15 bp, Homo sapiens
gttcttcctttagca

SEQ ID NO: 1348117 - DNA, 15 bp, Homo sapiens
agttcttcctttagc

SEQ ID NO: 1348118 - DNA, 15 bp, Homo sapiens
gagttcttcctttag

SEQ ID NO: 1348119 - DNA, 15 bp, Homo sapiens
tgagttcttccttta

SEQ ID NO: 1348120 - DNA, 15 bp, Homo sapiens
gtgagttcttccttt

SEQ ID NO: 1348121 - DNA, 15 bp, Homo sapiens
ggtgagttcttcctt

SEQ ID NO: 1348122 - DNA, 15 bp, Homo sapiens
gggtgagttcttcct

SEQ ID NO: 1348123 - DNA, 15 bp, Homo sapiens
agggtgagttcttcc

SEQ ID NO: 1348124 - DNA, 15 bp, Homo sapiens
cagggtgagttcttc

SEQ ID NO: 1348125 - DNA, 15 bp, Homo sapiens
gcagggtgagttctt

SEQ ID NO: 1348126 - DNA, 15 bp, Homo sapiens
ggcagggtgagttct

SEQ ID NO: 1348127 - DNA, 15 bp, Homo sapiens
gggcagggtgagttc

SEQ ID NO: 1348128 - DNA, 15 bp, Homo sapiens
ggggcagggtgagtt

SEQ ID NO: 1348129 - DNA, 15 bp, Homo sapiens
tggggcagggtgagt

SEQ ID NO: 1348130 - DNA, 15 bp, Homo sapiens
ctggggcagggtgag

SEQ ID NO: 1348131 - DNA, 15 bp, Homo sapiens
actggggcagggtga

SEQ ID NO: 1348132 - DNA, 15 bp, Homo sapiens
cactggggcagggtg

SEQ ID NO: 1348133 - DNA, 15 bp, Homo sapiens
acactggggcagggt

SEQ ID NO: 1348134 - DNA, 15 bp, Homo sapiens
gacactggggcaggg

SEQ ID NO: 1348135 - DNA, 15 bp, Homo sapiens
ggacactggggcagg

SEQ ID NO: 1348136 - DNA, 15 bp, Homo sapiens
tggacactggggcag

SEQ ID NO: 1348137 - DNA, 15 bp, Homo sapiens
gtggacactggggca

SEQ ID NO: 1348138 - DNA, 15 bp, Homo sapiens
ggtggacactggggc

SEQ ID NO: 1348139 - DNA, 15 bp, Homo sapiens
tggtggacactgggg

SEQ ID NO: 1348140 - DNA, 15 bp, Homo sapiens
atggtggacactggg

SEQ ID NO: 1348141 - DNA, 15 bp, Homo sapiens
tatggtggacactgg

SEQ ID NO: 1348142 - DNA, 15 bp, Homo sapiens
atatggtggacactg

SEQ ID NO: 1348143 - DNA, 15 bp, Homo sapiens
aatatggtggacact

SEQ ID NO: 1348144 - DNA, 15 bp, Homo sapiens
caatatggtggacac

SEQ ID NO: 1348145 - DNA, 15 bp, Homo sapiens
gcaatatggtggaca

SEQ ID NO: 1348146 - DNA, 15 bp, Homo sapiens
agcaatatggtggac

SEQ ID NO: 1348147 - DNA, 15 bp, Homo sapiens
aagcaatatggtgga

SEQ ID NO: 1348148 - DNA, 15 bp, Homo sapiens
aaagcaatatggtgg

SEQ ID NO: 1348149 - DNA, 15 bp, Homo sapiens
aaaagcaatatggtg

SEQ ID NO: 1348150 - DNA, 15 bp, Homo sapiens
aaaaagcaatatggt

SEQ ID NO: 1348151 - DNA, 15 bp, Homo sapiens
aaaaaagcaatatgg

SEQ ID NO: 1348152 - DNA, 15 bp, Homo sapiens
gaaaaaagcaatatg

SEQ ID NO: 1348153 - DNA, 15 bp, Homo sapiens
ggaaaaaagcaatat

SEQ ID NO: 1348154 - DNA, 15 bp, Homo sapiens
aggaaaaaagcaata

SEQ ID NO: 1348155 - DNA, 15 bp, Homo sapiens
caggaaaaaagcaat

SEQ ID NO: 1348156 - DNA, 15 bp, Homo sapiens
gcaggaaaaaagcaa

SEQ ID NO: 1348157 - DNA, 15 bp, Homo sapiens
agcaggaaaaaagca

SEQ ID NO: 1348158 - DNA, 15 bp, Homo sapiens
aagcaggaaaaaagc

SEQ ID NO: 1348159 - DNA, 15 bp, Homo sapiens
aaagcaggaaaaaag

SEQ ID NO: 1348160 - DNA, 15 bp, Homo sapiens
aaaagcaggaaaaaa

SEQ ID NO: 1348161 - DNA, 15 bp, Homo sapiens
taaaagcaggaaaaa

SEQ ID NO: 1348162 - DNA, 15 bp, Homo sapiens
gtaaaagcaggaaaa

SEQ ID NO: 1348163 - DNA, 15 bp, Homo sapiens
agtaaaagcaggaaa

SEQ ID NO: 1348164 - DNA, 15 bp, Homo sapiens
aagtaaaagcaggaa

SEQ ID NO: 1348165 - DNA, 15 bp, Homo sapiens
gaagtaaaagcagga

SEQ ID NO: 1348166 - DNA, 15 bp, Homo sapiens
ggaagtaaaagcagg

SEQ ID NO: 1348167 - DNA, 15 bp, Homo sapiens
tggaagtaaaagcag

SEQ ID NO: 1348168 - DNA, 15 bp, Homo sapiens
atggaagtaaaagca

SEQ ID NO: 1348169 - DNA, 15 bp, Homo sapiens
catggaagtaaaagc

SEQ ID NO: 1348170 - DNA, 15 bp, Homo sapiens
acatggaagtaaaag

SEQ ID NO: 1348171 - DNA, 15 bp, Homo sapiens
tacatggaagtaaaa

SEQ ID NO: 1348172 - DNA, 15 bp, Homo sapiens
atacatggaagtaaa

SEQ ID NO: 1348173 - DNA, 15 bp, Homo sapiens
tatacatggaagtaa

SEQ ID NO: 1348174 - DNA, 15 bp, Homo sapiens
ttatacatggaagta

SEQ ID NO: 1348175 - DNA, 15 bp, Homo sapiens
tttatacatggaagt

SEQ ID NO: 1348176 - DNA, 15 bp, Homo sapiens
atttatacatggaag

SEQ ID NO: 1348177 - DNA, 15 bp, Homo sapiens
catttatacatggaa

SEQ ID NO: 1348178 - DNA, 15 bp, Homo sapiens
tcatttatacatgga

SEQ ID NO: 1348179 - DNA, 15 bp, Homo sapiens
gtcatttatacatgg

SEQ ID NO: 1348180 - DNA, 15 bp, Homo sapiens
ggtcatttatacatg

SEQ ID NO: 1348181 - DNA, 15 bp, Homo sapiens
tggtcatttatacat

SEQ ID NO: 1348182 - DNA, 15 bp, Homo sapiens
gtggtcatttataca

SEQ ID NO: 1348183 - DNA, 15 bp, Homo sapiens
tgtggtcatttatac

SEQ ID NO: 1348184 - DNA, 15 bp, Homo sapiens
ttgtggtcatttata

SEQ ID NO: 1348185 - DNA, 15 bp, Homo sapiens
tttgtggtcatttat

SEQ ID NO: 1348186 - DNA, 15 bp, Homo sapiens
ctttgtggtcattta

SEQ ID NO: 1348187 - DNA, 15 bp, Homo sapiens
actttgtggtcattt

SEQ ID NO: 1348188 - DNA, 15 bp, Homo sapiens
gactttgtggtcatt

SEQ ID NO: 1348189 - DNA, 15 bp, Homo sapiens
ggactttgtggtcat

SEQ ID NO: 1348190 - DNA, 15 bp, Homo sapiens
tggactttgtggtca

SEQ ID NO: 1348191 - DNA, 15 bp, Homo sapiens
atggactttgtggtc

SEQ ID NO: 1348192 - DNA, 15 bp, Homo sapiens
aatggactttgtggt

SEQ ID NO: 1348193 - DNA, 15 bp, Homo sapiens
aaatggactttgtgg

SEQ ID NO: 1348194 - DNA, 15 bp, Homo sapiens
gaaatggactttgtg

SEQ ID NO: 1348195 - DNA, 15 bp, Homo sapiens
ggaaatggactttgt

SEQ ID NO: 1348196 - DNA, 15 bp, Homo sapiens
gggaaatggactttg

SEQ ID NO: 1348197 - DNA, 15 bp, Homo sapiens
agggaaatggacttt

SEQ ID NO: 1348198 - DNA, 15 bp, Homo sapiens
cagggaaatggactt

SEQ ID NO: 1348199 - DNA, 15 bp, Homo sapiens
ccagggaaatggact

SEQ ID NO: 1348200 - DNA, 15 bp, Homo sapiens
gccagggaaatggac

SEQ ID NO: 1348201 - DNA, 15 bp, Homo sapiens
cgccagggaaatgga

SEQ ID NO: 1348202 - DNA, 15 bp, Homo sapiens
gcgccagggaaatgg

SEQ ID NO: 1348203 - DNA, 15 bp, Homo sapiens
agcgccagggaaatg

SEQ ID NO: 1348204 - DNA, 15 bp, Homo sapiens
aagcgccagggaaat

SEQ ID NO: 1348205 - DNA, 15 bp, Homo sapiens
gaagcgccagggaaa

SEQ ID NO: 1348206 - DNA, 15 bp, Homo sapiens
agaagcgccagggaa

SEQ ID NO: 1348207 - DNA, 15 bp, Homo sapiens
aagaagcgccaggga

SEQ ID NO: 1348208 - DNA, 15 bp, Homo sapiens
aaagaagcgccaggg

SEQ ID NO: 1348209 - DNA, 15 bp, Homo sapiens
aaaagaagcgccagg

SEQ ID NO: 1348210 - DNA, 15 bp, Homo sapiens
taaaagaagcgccag

SEQ ID NO: 1348211 - DNA, 15 bp, Homo sapiens
ttaaaagaagcgcca

SEQ ID NO: 1348212 - DNA, 15 bp, Homo sapiens
cttaaaagaagcgcc

SEQ ID NO: 1348213 - DNA, 15 bp, Homo sapiens
tcttaaaagaagcgc

SEQ ID NO: 1348214 - DNA, 15 bp, Homo sapiens
ctcttaaaagaagcg

SEQ ID NO: 1348215 - DNA, 15 bp, Homo sapiens
tctcttaaaagaagc

SEQ ID NO: 1348216 - DNA, 15 bp, Homo sapiens
gtctcttaaaagaag

SEQ ID NO: 1348217 - DNA, 15 bp, Homo sapiens
agtctcttaaaagaa

SEQ ID NO: 1348218 - DNA, 15 bp, Homo sapiens
gagtctcttaaaaga

SEQ ID NO: 1348219 - DNA, 15 bp, Homo sapiens
agagtctcttaaaag

SEQ ID NO: 1348220 - DNA, 15 bp, Homo sapiens
gagagtctcttaaaa

SEQ ID NO: 1348221 - DNA, 15 bp, Homo sapiens
agagagtctcttaaa

SEQ ID NO: 1348222 - DNA, 15 bp, Homo sapiens
cagagagtctcttaa

SEQ ID NO: 1348223 - DNA, 15 bp, Homo sapiens
gcagagagtctctta

SEQ ID NO: 1348224 - DNA, 15 bp, Homo sapiens
agcagagagtctctt

SEQ ID NO: 1348225 - DNA, 15 bp, Homo sapiens
tagcagagagtctct

SEQ ID NO: 1348226 - DNA, 15 bp, Homo sapiens
gtagcagagagtctc

SEQ ID NO: 1348227 - DNA, 15 bp, Homo sapiens
tgtagcagagagtct

SEQ ID NO: 1348228 - DNA, 15 bp, Homo sapiens
ctgtagcagagagtc

SEQ ID NO: 1348229 - DNA, 15 bp, Homo sapiens
actgtagcagagagt

SEQ ID NO: 1348230 - DNA, 15 bp, Homo sapiens
aactgtagcagagag

SEQ ID NO: 1348231 - DNA, 15 bp, Homo sapiens
caactgtagcagaga

SEQ ID NO: 1348232 - DNA, 15 bp, Homo sapiens
tcaactgtagcagag

SEQ ID NO: 1348233 - DNA, 15 bp, Homo sapiens
ctcaactgtagcaga

SEQ ID NO: 1348234 - DNA, 15 bp, Homo sapiens
gctcaactgtagcag

SEQ ID NO: 1348235 - DNA, 15 bp, Homo sapiens
ggctcaactgtagca

SEQ ID NO: 1348236 - DNA, 15 bp, Homo sapiens
tggctcaactgtagc

SEQ ID NO: 1348237 - DNA, 15 bp, Homo sapiens
atggctcaactgtag

SEQ ID NO: 1348238 - DNA, 15 bp, Homo sapiens
aatggctcaactgta

SEQ ID NO: 1348239 - DNA, 15 bp, Homo sapiens
aaatggctcaactgt

SEQ ID NO: 1348240 - DNA, 15 bp, Homo sapiens
gaaatggctcaactg

SEQ ID NO: 1348241 - DNA, 15 bp, Homo sapiens
agaaatggctcaact

SEQ ID NO: 1348242 - DNA, 15 bp, Homo sapiens
cagaaatggctcaac

SEQ ID NO: 1348243 - DNA, 15 bp, Homo sapiens
acagaaatggctcaa

SEQ ID NO: 1348244 - DNA, 15 bp, Homo sapiens
aaacagaaatggctc

SEQ ID NO: 1348245 - DNA, 15 bp, Homo sapiens
taaacagaaatggct

SEQ ID NO: 1348246 - DNA, 15 bp, Homo sapiens
gtaaacagaaatggc

SEQ ID NO: 1348247 - DNA, 15 bp, Homo sapiens
tgtaaacagaaatgg

SEQ ID NO: 1348248 - DNA, 15 bp, Homo sapiens
gtgtaaacagaaatg

SEQ ID NO: 1348249 - DNA, 15 bp, Homo sapiens
ggtgtaaacagaaat

SEQ ID NO: 1348250 - DNA, 15 bp, Homo sapiens
tggtgtaaacagaaa

SEQ ID NO: 1348251 - DNA, 15 bp, Homo sapiens
ttggtgtaaacagaa

SEQ ID NO: 1348252 - DNA, 15 bp, Homo sapiens
cttggtgtaaacaga

SEQ ID NO: 1348253 - DNA, 15 bp, Homo sapiens
tcttggtgtaaacag

SEQ ID NO: 1348254 - DNA, 15 bp, Homo sapiens
gtcttggtgtaaaca

SEQ ID NO: 1348255 - DNA, 15 bp, Homo sapiens
ggtcttggtgtaaac

SEQ ID NO: 1348256 - DNA, 15 bp, Homo sapiens
tggtcttggtgtaaa

SEQ ID NO: 1348257 - DNA, 15 bp, Homo sapiens
atggtcttggtgtaa

SEQ ID NO: 1348258 - DNA, 15 bp, Homo sapiens
catggtcttggtgta

SEQ ID NO: 1348259 - DNA, 15 bp, Homo sapiens
tcatggtcttggtgt

SEQ ID NO: 1348260 - DNA, 15 bp, Homo sapiens
gtcatggtcttggtg

SEQ ID NO: 1348261 - DNA, 15 bp, Homo sapiens
tgtcatggtcttggt

SEQ ID NO: 1348262 - DNA, 15 bp, Homo sapiens
ttgtcatggtcttgg

SEQ ID NO: 1348263 - DNA, 15 bp, Homo sapiens
cttgtcatggtcttg

SEQ ID NO: 1348264 - DNA, 15 bp, Homo sapiens
tcttgtcatggtctt

SEQ ID NO: 1348265 - DNA, 15 bp, Homo sapiens
ttcttgtcatggtct

SEQ ID NO: 1348266 - DNA, 15 bp, Homo sapiens
tttcttgtcatggtc

SEQ ID NO: 1348267 - DNA, 15 bp, Homo sapiens
ctttcttgtcatggt

SEQ ID NO: 1348268 - DNA, 15 bp, Homo sapiens
tctttcttgtcatgg

SEQ ID NO: 1348269 - DNA, 15 bp, Homo sapiens
atctttcttgtcatg

SEQ ID NO: 1348270 - DNA, 15 bp, Homo sapiens
catctttcttgtcat

SEQ ID NO: 1348271 - DNA, 15 bp, Homo sapiens
ccatctttcttgtca

SEQ ID NO: 1348272 - DNA, 15 bp, Homo sapiens
accatctttcttgtc

SEQ ID NO: 1348273 - DNA, 15 bp, Homo sapiens
taccatctttcttgt

SEQ ID NO: 1348274 - DNA, 15 bp, Homo sapiens
ataccatctttcttg

SEQ ID NO: 1348275 - DNA, 15 bp, Homo sapiens
gataccatctttctt

SEQ ID NO: 1348276 - DNA, 15 bp, Homo sapiens
tgataccatctttct

SEQ ID NO: 1348277 - DNA, 15 bp, Homo sapiens
ttgataccatctttc

SEQ ID NO: 1348278 - DNA, 15 bp, Homo sapiens
tttgataccatcttt

SEQ ID NO: 1348279 - DNA, 15 bp, Homo sapiens
ctttgataccatctt

SEQ ID NO: 1348280 - DNA, 15 bp, Homo sapiens
cctttgataccatct

SEQ ID NO: 1348281 - DNA, 15 bp, Homo sapiens
tcctttgataccatc

SEQ ID NO: 1348282 - DNA, 15 bp, Homo sapiens
atcctttgataccat

SEQ ID NO: 1348283 - DNA, 15 bp, Homo sapiens
catcctttgatacca

SEQ ID NO: 1348284 - DNA, 15 bp, Homo sapiens
ccatcctttgatacc

SEQ ID NO: 1348285 - DNA, 15 bp, Homo sapiens
gccatcctttgatac

SEQ ID NO: 1348286 - DNA, 15 bp, Homo sapiens
agccatcctttgata

SEQ ID NO: 1348287 - DNA, 15 bp, Homo sapiens
aagccatcctttgat

SEQ ID NO: 1348288 - DNA, 15 bp, Homo sapiens
caagccatcctttga

SEQ ID NO: 1348289 - DNA, 15 bp, Homo sapiens
gcaagccatcctttg

SEQ ID NO: 1348290 - DNA, 15 bp, Homo sapiens
agcaagccatccttt

SEQ ID NO: 1348291 - DNA, 15 bp, Homo sapiens
aagcaagccatcctt

SEQ ID NO: 1348292 - DNA, 15 bp, Homo sapiens
caagcaagccatcct

SEQ ID NO: 1348293 - DNA, 15 bp, Homo sapiens
ccaagcaagccatcc

SEQ ID NO: 1348294 - DNA, 15 bp, Homo sapiens
cccaagcaagccatc

SEQ ID NO: 1348295 - DNA, 15 bp, Homo sapiens
gcccaagcaagccat

SEQ ID NO: 1348296 - DNA, 15 bp, Homo sapiens
agcccaagcaagcca

SEQ ID NO: 1348297 - DNA, 15 bp, Homo sapiens
aagcccaagcaagcc

SEQ ID NO: 1348298 - DNA, 15 bp, Homo sapiens
aaagcccaagcaagc

SEQ ID NO: 1348299 - DNA, 15 bp, Homo sapiens
taaagcccaagcaag

SEQ ID NO: 1348300 - DNA, 15 bp, Homo sapiens
ctaaagcccaagcaa

SEQ ID NO: 1348301 - DNA, 15 bp, Homo sapiens
tctaaagcccaagca

SEQ ID NO: 1348302 - DNA, 15 bp, Homo sapiens
gtctaaagcccaagc

SEQ ID NO: 1348303 - DNA, 15 bp, Homo sapiens
ggtctaaagcccaag

SEQ ID NO: 1348304 - DNA, 15 bp, Homo sapiens
gggtctaaagcccaa

SEQ ID NO: 1348305 - DNA, 15 bp, Homo sapiens
ggggtctaaagccca

SEQ ID NO: 1348306 - DNA, 15 bp, Homo sapiens
aggggtctaaagccc

SEQ ID NO: 1348307 - DNA, 15 bp, Homo sapiens
gaggggtctaaagcc

SEQ ID NO: 1348308 - DNA, 15 bp, Homo sapiens
ggaggggtctaaagc

SEQ ID NO: 1348309 - DNA, 15 bp, Homo sapiens
aggaggggtctaaag

SEQ ID NO: 1348310 - DNA, 15 bp, Homo sapiens
aaggaggggtctaaa

SEQ ID NO: 1348311 - DNA, 15 bp, Homo sapiens
gaaggaggggtctaa

SEQ ID NO: 1348312 - DNA, 15 bp, Homo sapiens
agaaggaggggtcta

SEQ ID NO: 1348313 - DNA, 15 bp, Homo sapiens
gagaaggaggggtct

SEQ ID NO: 1348314 - DNA, 15 bp, Homo sapiens
ggagaaggaggggtc

SEQ ID NO: 1348315 - DNA, 15 bp, Homo sapiens
gggagaaggaggggt

SEQ ID NO: 1348316 - DNA, 15 bp, Homo sapiens
tgggagaaggagggg

SEQ ID NO: 1348317 - DNA, 15 bp, Homo sapiens
gtgggagaaggaggg

SEQ ID NO: 1348318 - DNA, 15 bp, Homo sapiens
tgtgggagaaggagg

SEQ ID NO: 1348319 - DNA, 15 bp, Homo sapiens
ttgtgggagaaggag

SEQ ID NO: 1348320 - DNA, 15 bp, Homo sapiens
attgtgggagaagga

SEQ ID NO: 1348321 - DNA, 15 bp, Homo sapiens
aattgtgggagaagg

SEQ ID NO: 1348322 - DNA, 15 bp, Homo sapiens
aaattgtgggagaag

SEQ ID NO: 1348323 - DNA, 15 bp, Homo sapiens
gaaattgtgggagaa

SEQ ID NO: 1348324 - DNA, 15 bp, Homo sapiens
ggaaattgtgggaga

SEQ ID NO: 1348325 - DNA, 15 bp, Homo sapiens
tggaaattgtgggag

SEQ ID NO: 1348326 - DNA, 15 bp, Homo sapiens
ctggaaattgtggga

SEQ ID NO: 1348327 - DNA, 15 bp, Homo sapiens
gctggaaattgtggg

SEQ ID NO: 1348328 - DNA, 15 bp, Homo sapiens
tgctggaaattgtgg

SEQ ID NO: 1348329 - DNA, 15 bp, Homo sapiens
ttgctggaaattgtg

SEQ ID NO: 1348330 - DNA, 15 bp, Homo sapiens
attgctggaaattgt

SEQ ID NO: 1348331 - DNA, 15 bp, Homo sapiens
tattgctggaaattg

SEQ ID NO: 1348332 - DNA, 15 bp, Homo sapiens
gtattgctggaaatt

SEQ ID NO: 1348333 - DNA, 15 bp, Homo sapiens
agtattgctggaaat

SEQ ID NO: 1348334 - DNA, 15 bp, Homo sapiens
gagtattgctggaaa

SEQ ID NO: 1348335 - DNA, 15 bp, Homo sapiens
agagtattgctggaa

SEQ ID NO: 1348336 - DNA, 15 bp, Homo sapiens
gagagtattgctgga

SEQ ID NO: 1348337 - DNA, 15 bp, Homo sapiens
ggagagtattgctgg

SEQ ID NO: 1348338 - DNA, 15 bp, Homo sapiens
aggagagtattgctg

SEQ ID NO: 1348339 - DNA, 15 bp, Homo sapiens
taggagagtattgct

SEQ ID NO: 1348340 - DNA, 15 bp, Homo sapiens
ctaggagagtattgc

SEQ ID NO: 1348341 - DNA, 15 bp, Homo sapiens
tctaggagagtattg

SEQ ID NO: 1348342 - DNA, 15 bp, Homo sapiens
ttctaggagagtatt

SEQ ID NO: 1348343 - DNA, 15 bp, Homo sapiens
gttctaggagagtat

SEQ ID NO: 1348344 - DNA, 15 bp, Homo sapiens
ggttctaggagagta

SEQ ID NO: 1348345 - DNA, 15 bp, Homo sapiens
aggttctaggagagt

SEQ ID NO: 1348346 - DNA, 15 bp, Homo sapiens
taggttctaggagag

SEQ ID NO: 1348347 - DNA, 15 bp, Homo sapiens
gtaggttctaggaga

SEQ ID NO: 1348348 - DNA, 15 bp, Homo sapiens
agtaggttctaggag

SEQ ID NO: 1348349 - DNA, 15 bp, Homo sapiens
cagtaggttctagga

SEQ ID NO: 1348350 - DNA, 15 bp, Homo sapiens
tcagtaggttctagg

SEQ ID NO: 1348351 - DNA, 15 bp, Homo sapiens
gtcagtaggttctag

SEQ ID NO: 1348352 - DNA, 15 bp, Homo sapiens
tgtcagtaggttcta

SEQ ID NO: 1348353 - DNA, 15 bp, Homo sapiens
ttgtcagtaggttct

SEQ ID NO: 1348354 - DNA, 15 bp, Homo sapiens
tttgtcagtaggttc

SEQ ID NO: 1348355 - DNA, 15 bp, Homo sapiens
atttgtcagtaggtt

SEQ ID NO: 1348356 - DNA, 15 bp, Homo sapiens
tatttgtcagtaggt

SEQ ID NO: 1348357 - DNA, 15 bp, Homo sapiens
ttatttgtcagtagg

SEQ ID NO: 1348358 - DNA, 15 bp, Homo sapiens
cttatttgtcagtag

SEQ ID NO: 1348359 - DNA, 15 bp, Homo sapiens
gcttatttgtcagta

SEQ ID NO: 1348360 - DNA, 15 bp, Homo sapiens
tgcttatttgtcagt

SEQ ID NO: 1348361 - DNA, 15 bp, Homo sapiens
atgcttatttgtcag

SEQ ID NO: 1348362 - DNA, 15 bp, Homo sapiens
tatgcttatttgtca

SEQ ID NO: 1348363 - DNA, 15 bp, Homo sapiens
gtatgcttatttgtc

SEQ ID NO: 1348364 - DNA, 15 bp, Homo sapiens
tgtatgcttatttgt

SEQ ID NO: 1348365 - DNA, 15 bp, Homo sapiens
ttgtatgcttatttg

SEQ ID NO: 1348366 - DNA, 15 bp, Homo sapiens
attgtatgcttattt

SEQ ID NO: 1348367 - DNA, 15 bp, Homo sapiens
gattgtatgcttatt

SEQ ID NO: 1348368 - DNA, 15 bp, Homo sapiens
agattgtatgcttat

SEQ ID NO: 1348369 - DNA, 15 bp, Homo sapiens
tagattgtatgctta

SEQ ID NO: 1348370 - DNA, 15 bp, Homo sapiens
ttagattgtatgctt

SEQ ID NO: 1348371 - DNA, 15 bp, Homo sapiens
tttagattgtatgct

SEQ ID NO: 1348372 - DNA, 15 bp, Homo sapiens
atttagattgtatgc

SEQ ID NO: 1348373 - DNA, 15 bp, Homo sapiens
aatttagattgtatg

SEQ ID NO: 1348374 - DNA, 15 bp, Homo sapiens
taatttagattgtat

SEQ ID NO: 1348375 - DNA, 15 bp, Homo sapiens
ttaatttagattgta

SEQ ID NO: 1348376 - DNA, 15 bp, Homo sapiens
tttaatttagattgt

SEQ ID NO: 1348377 - DNA, 15 bp, Homo sapiens
ttttaatttagattg

SEQ ID NO: 1348378 - DNA, 15 bp, Homo sapiens
attttaatttagatt

SEQ ID NO: 1348379 - DNA, 15 bp, Homo sapiens
cattttaatttagat

SEQ ID NO: 1348380 - DNA, 15 bp, Homo sapiens
acattttaatttaga

SEQ ID NO: 1348381 - DNA, 15 bp, Homo sapiens
cacattttaatttag

SEQ ID NO: 1348382 - DNA, 15 bp, Homo sapiens
acacattttaattta

SEQ ID NO: 1348383 - DNA, 15 bp, Homo sapiens
cacacattttaattt

SEQ ID NO: 1348384 - DNA, 15 bp, Homo sapiens
acacacattttaatt

SEQ ID NO: 1348385 - DNA, 15 bp, Homo sapiens
cacacacattttaat

SEQ ID NO: 1348386 - DNA, 15 bp, Homo sapiens
tcacacacattttaa

SEQ ID NO: 1348387 - DNA, 15 bp, Homo sapiens
ttcacacacatttta

SEQ ID NO: 1348388 - DNA, 15 bp, Homo sapiens
gttcacacacatttt

SEQ ID NO: 1348389 - DNA, 15 bp, Homo sapiens
tgttcacacacattt

SEQ ID NO: 1348390 - DNA, 15 bp, Homo sapiens
gtgttcacacacatt

SEQ ID NO: 1348391 - DNA, 15 bp, Homo sapiens
tgtgttcacacacat

SEQ ID NO: 1348392 - DNA, 15 bp, Homo sapiens
ttgtgttcacacaca

SEQ ID NO: 1348393 - DNA, 15 bp, Homo sapiens
tttgtgttcacacac

SEQ ID NO: 1348394 - DNA, 15 bp, Homo sapiens
ttttgtgttcacaca

SEQ ID NO: 1348395 - DNA, 15 bp, Homo sapiens
attttgtgttcacac

SEQ ID NO: 1348396 - DNA, 15 bp, Homo sapiens
gattttgtgttcaca

SEQ ID NO: 1348397 - DNA, 15 bp, Homo sapiens
tgattttgtgttcac

SEQ ID NO: 1348398 - DNA, 15 bp, Homo sapiens
atgattttgtgttca

SEQ ID NO: 1348399 - DNA, 15 bp, Homo sapiens
gatgattttgtgttc

SEQ ID NO: 1348400 - DNA, 15 bp, Homo sapiens
agatgattttgtgtt

SEQ ID NO: 1348401 - DNA, 15 bp, Homo sapiens
aagatgattttgtgt

SEQ ID NO: 1348402 - DNA, 15 bp, Homo sapiens
gaagatgattttgtg

SEQ ID NO: 1348403 - DNA, 15 bp, Homo sapiens
cgaagatgattttgt

SEQ ID NO: 1348404 - DNA, 15 bp, Homo sapiens
tcgaagatgattttg

SEQ ID NO: 1348405 - DNA, 15 bp, Homo sapiens
ttcgaagatgatttt

SEQ ID NO: 1348406 - DNA, 15 bp, Homo sapiens
tttcgaagatgattt

SEQ ID NO: 1348407 - DNA, 15 bp, Homo sapiens
atttcgaagatgatt

SEQ ID NO: 1348408 - DNA, 15 bp, Homo sapiens
tatttcgaagatgat

SEQ ID NO: 1348409 - DNA, 15 bp, Homo sapiens
ttatttcgaagatga

SEQ ID NO: 1348410 - DNA, 15 bp, Homo sapiens
tttatttcgaagatg

SEQ ID NO: 1348411 - DNA, 15 bp, Homo sapiens
ttttatttcgaagat

SEQ ID NO: 1348412 - DNA, 15 bp, Homo sapiens
attttatttcgaaga

SEQ ID NO: 1348413 - DNA, 15 bp, Homo sapiens
tattttatttcgaag

SEQ ID NO: 1348414 - DNA, 15 bp, Homo sapiens
ttattttatttcgaa

SEQ ID NO: 1348415 - DNA, 15 bp, Homo sapiens
cttattttatttcga

SEQ ID NO: 1348416 - DNA, 15 bp, Homo sapiens
acttattttatttcg

SEQ ID NO: 1348417 - DNA, 15 bp, Homo sapiens
cacttattttatttc

SEQ ID NO: 1348418 - DNA, 15 bp, Homo sapiens
aacacttattttatt

SEQ ID NO: 1348419 - DNA, 15 bp, Homo sapiens
gaacacttattttat

SEQ ID NO: 1348420 - DNA, 15 bp, Homo sapiens
ggaacacttatttta

SEQ ID NO: 1348421 - DNA, 15 bp, Homo sapiens
tggaacacttatttt

SEQ ID NO: 1348422 - DNA, 15 bp, Homo sapiens
ctggaacacttattt

SEQ ID NO: 1348423 - DNA, 15 bp, Homo sapiens
gctggaacacttatt

SEQ ID NO: 1348424 - DNA, 15 bp, Homo sapiens
tgctggaacacttat

SEQ ID NO: 1348425 - DNA, 15 bp, Homo sapiens
atgctggaacactta

SEQ ID NO: 1348426 - DNA, 15 bp, Homo sapiens
gatgctggaacactt

SEQ ID NO: 1348427 - DNA, 15 bp, Homo sapiens
agatgctggaacact

SEQ ID NO: 1348428 - DNA, 15 bp, Homo sapiens
gagatgctggaacac

SEQ ID NO: 1348429 - DNA, 15 bp, Homo sapiens
ggagatgctggaaca

SEQ ID NO: 1348430 - DNA, 15 bp, Homo sapiens
aggagatgctggaac

SEQ ID NO: 1348431 - DNA, 15 bp, Homo sapiens
gaggagatgctggaa

SEQ ID NO: 1348432 - DNA, 15 bp, Homo sapiens
ggaggagatgctgga

SEQ ID NO: 1348433 - DNA, 15 bp, Homo sapiens
gggaggagatgctgg

SEQ ID NO: 1348434 - DNA, 15 bp, Homo sapiens
tgggaggagatgctg

SEQ ID NO: 1348435 - DNA, 15 bp, Homo sapiens
ttgggaggagatgct

SEQ ID NO: 1348436 - DNA, 15 bp, Homo sapiens
gttgggaggagatgc

SEQ ID NO: 1348437 - DNA, 15 bp, Homo sapiens
cgttgggaggagatg

SEQ ID NO: 1348438 - DNA, 15 bp, Homo sapiens
ccgttgggaggagat

SEQ ID NO: 1348439 - DNA, 15 bp, Homo sapiens
cccgttgggaggaga

SEQ ID NO: 1348440 - DNA, 15 bp, Homo sapiens
tcccgttgggaggag

SEQ ID NO: 1348441 - DNA, 15 bp, Homo sapiens
gtcccgttgggagga

SEQ ID NO: 1348442 - DNA, 15 bp, Homo sapiens
agtcccgttgggagg

SEQ ID NO: 1348443 - DNA, 15 bp, Homo sapiens
cagtcccgttgggag

SEQ ID NO: 1348444 - DNA, 15 bp, Homo sapiens
gcagtcccgttggga

SEQ ID NO: 1348445 - DNA, 15 bp, Homo sapiens
ggcagtcccgttggg

SEQ ID NO: 1348446 - DNA, 15 bp, Homo sapiens
tggcagtcccgttgg

SEQ ID NO: 1348447 - DNA, 15 bp, Homo sapiens
gtggcagtcccgttg

SEQ ID NO: 1348448 - DNA, 15 bp, Homo sapiens
ggtggcagtcccgtt

SEQ ID NO: 1348449 - DNA, 15 bp, Homo sapiens
tggtggcagtcccgt

SEQ ID NO: 1348450 - DNA, 15 bp, Homo sapiens
ctggtggcagtcccg

SEQ ID NO: 1348451 - DNA, 15 bp, Homo sapiens
actggtggcagtccc

SEQ ID NO: 1348452 - DNA, 15 bp, Homo sapiens
tactggtggcagtcc

SEQ ID NO: 1348453 - DNA, 15 bp, Homo sapiens
ttactggtggcagtc

SEQ ID NO: 1348454 - DNA, 15 bp, Homo sapiens
cttactggtggcagt

SEQ ID NO: 1348455 - DNA, 15 bp, Homo sapiens
gcttactggtggcag

SEQ ID NO: 1348456 - DNA, 15 bp, Homo sapiens
agcttactggtggca

SEQ ID NO: 1348457 - DNA, 15 bp, Homo sapiens
cagcttactggtggc

SEQ ID NO: 1348458 - DNA, 15 bp, Homo sapiens
acagcttactggtgg

SEQ ID NO: 1348459 - DNA, 15 bp, Homo sapiens
aacagcttactggtg

SEQ ID NO: 1348460 - DNA, 15 bp, Homo sapiens
gaacagcttactggt

SEQ ID NO: 1348461 - DNA, 15 bp, Homo sapiens
ggaacagcttactgg

SEQ ID NO: 1348462 - DNA, 15 bp, Homo sapiens
tggaacagcttactg

SEQ ID NO: 1348463 - DNA, 15 bp, Homo sapiens
gtggaacagcttact

SEQ ID NO: 1348464 - DNA, 15 bp, Homo sapiens
tgtggaacagcttac

SEQ ID NO: 1348465 - DNA, 15 bp, Homo sapiens
atgtggaacagctta

SEQ ID NO: 1348466 - DNA, 15 bp, Homo sapiens
tatgtggaacagctt

SEQ ID NO: 1348467 - DNA, 15 bp, Homo sapiens
ttatgtggaacagct

SEQ ID NO: 1348468 - DNA, 15 bp, Homo sapiens
cttatgtggaacagc

SEQ ID NO: 1348469 - DNA, 15 bp, Homo sapiens
tcttatgtggaacag

SEQ ID NO: 1348470 - DNA, 15 bp, Homo sapiens
ttcttatgtggaaca

SEQ ID NO: 1348471 - DNA, 15 bp, Homo sapiens
attcttatgtggaac

SEQ ID NO: 1348472 - DNA, 15 bp, Homo sapiens
aattcttatgtggaa

SEQ ID NO: 1348473 - DNA, 15 bp, Homo sapiens
aaattcttatgtgga

SEQ ID NO: 1348474 - DNA, 15 bp, Homo sapiens
aaaattcttatgtgg

SEQ ID NO: 1348475 - DNA, 15 bp, Homo sapiens
caaaattcttatgtg

SEQ ID NO: 1348476 - DNA, 15 bp, Homo sapiens
ccaaaattcttatgt

SEQ ID NO: 1348477 - DNA, 15 bp, Homo sapiens
tccaaaattcttatg

SEQ ID NO: 1348478 - DNA, 15 bp, Homo sapiens
ttccaaaattcttat

SEQ ID NO: 1348479 - DNA, 15 bp, Homo sapiens
gttccaaaattctta

SEQ ID NO: 1348480 - DNA, 15 bp, Homo sapiens
ggttccaaaattctt

SEQ ID NO: 1348481 - DNA, 15 bp, Homo sapiens
tggttccaaaattct

SEQ ID NO: 1348482 - DNA, 15 bp, Homo sapiens
atggttccaaaattc

SEQ ID NO: 1348483 - DNA, 15 bp, Homo sapiens
gatggttccaaaatt

SEQ ID NO: 1348484 - DNA, 15 bp, Homo sapiens
tgatggttccaaaat

SEQ ID NO: 1348485 - DNA, 15 bp, Homo sapiens
gtgatggttccaaaa

SEQ ID NO: 1348486 - DNA, 15 bp, Homo sapiens
agtgatggttccaaa

SEQ ID NO: 1348487 - DNA, 15 bp, Homo sapiens
tagtgatggttccaa

SEQ ID NO: 1348488 - DNA, 15 bp, Homo sapiens
ttagtgatggttcca

SEQ ID NO: 1348489 - DNA, 15 bp, Homo sapiens
attagtgatggttcc

SEQ ID NO: 1348490 - DNA, 15 bp, Homo sapiens
cattagtgatggttc

SEQ ID NO: 1348491 - DNA, 15 bp, Homo sapiens
gcattagtgatggtt

SEQ ID NO: 1348492 - DNA, 15 bp, Homo sapiens
ggcattagtgatggt

SEQ ID NO: 1348493 - DNA, 15 bp, Homo sapiens
tggcattagtgatgg

SEQ ID NO: 1348494 - DNA, 15 bp, Homo sapiens
ttggcattagtgatg

SEQ ID NO: 1348495 - DNA, 15 bp, Homo sapiens
cttggcattagtgat

SEQ ID NO: 1348496 - DNA, 15 bp, Homo sapiens
ccttggcattagtga

SEQ ID NO: 1348497 - DNA, 15 bp, Homo sapiens
accttggcattagtg

SEQ ID NO: 1348498 - DNA, 15 bp, Homo sapiens
gaccttggcattagt

SEQ ID NO: 1348499 - DNA, 15 bp, Homo sapiens
tgaccttggcattag

SEQ ID NO: 1348500 - DNA, 15 bp, Homo sapiens
atgaccttggcatta

SEQ ID NO: 1348501 - DNA, 15 bp, Homo sapiens
ccatgaccttggcat

SEQ ID NO: 1348502 - DNA, 15 bp, Homo sapiens
tccatgaccttggca

SEQ ID NO: 1348503 - DNA, 15 bp, Homo sapiens
gtccatgaccttggc

SEQ ID NO: 1348504 - DNA, 15 bp, Homo sapiens
agtccatgaccttgg

SEQ ID NO: 1348505 - DNA, 15 bp, Homo sapiens
cagtccatgaccttg

SEQ ID NO: 1348506 - DNA, 15 bp, Homo sapiens
acagtccatgacctt

SEQ ID NO: 1348507 - DNA, 15 bp, Homo sapiens
gacagtccatgacct

SEQ ID NO: 1348508 - DNA, 15 bp, Homo sapiens
tgacagtccatgacc

SEQ ID NO: 1348509 - DNA, 15 bp, Homo sapiens
ttgacagtccatgac

SEQ ID NO: 1348510 - DNA, 15 bp, Homo sapiens
cttgacagtccatga

SEQ ID NO: 1348511 - DNA, 15 bp, Homo sapiens
acttgacagtccatg

SEQ ID NO: 1348512 - DNA, 15 bp, Homo sapiens
aacttgacagtccat

SEQ ID NO: 1348513 - DNA, 15 bp, Homo sapiens
gaacttgacagtcca

SEQ ID NO: 1348514 - DNA, 15 bp, Homo sapiens
agaacttgacagtcc

SEQ ID NO: 1348515 - DNA, 15 bp, Homo sapiens
cagaacttgacagtc

SEQ ID NO: 1348516 - DNA, 15 bp, Homo sapiens
acagaacttgacagt

SEQ ID NO: 1348517 - DNA, 15 bp, Homo sapiens
aacagaacttgacag

SEQ ID NO: 1348518 - DNA, 15 bp, Homo sapiens
aaacagaacttgaca

SEQ ID NO: 1348519 - DNA, 15 bp, Homo sapiens
gaaacagaacttgac

SEQ ID NO: 1348520 - DNA, 15 bp, Homo sapiens
agaaacagaacttga

SEQ ID NO: 1348521 - DNA, 15 bp, Homo sapiens
cagaaacagaacttg

SEQ ID NO: 1348522 - DNA, 15 bp, Homo sapiens
gcagaaacagaactt

SEQ ID NO: 1348523 - DNA, 15 bp, Homo sapiens
ggcagaaacagaact

SEQ ID NO: 1348524 - DNA, 15 bp, Homo sapiens
tggcagaaacagaac

SEQ ID NO: 1348525 - DNA, 15 bp, Homo sapiens
ctggcagaaacagaa

SEQ ID NO: 1348526 - DNA, 15 bp, Homo sapiens
actggcagaaacaga

SEQ ID NO: 1348527 - DNA, 15 bp, Homo sapiens
gactggcagaaacag

SEQ ID NO: 1348528 - DNA, 15 bp, Homo sapiens
tgactggcagaaaca

SEQ ID NO: 1348529 - DNA, 15 bp, Homo sapiens
gtgactggcagaaac

SEQ ID NO: 1348530 - DNA, 15 bp, Homo sapiens
tgtgactggcagaaa

SEQ ID NO: 1348531 - DNA, 15 bp, Homo sapiens
ctgtgactggcagaa

SEQ ID NO: 1348532 - DNA, 15 bp, Homo sapiens
tctgtgactggcaga

SEQ ID NO: 1348533 - DNA, 15 bp, Homo sapiens
ctctgtgactggcag

SEQ ID NO: 1348534 - DNA, 15 bp, Homo sapiens
tctctgtgactggca

SEQ ID NO: 1348535 - DNA, 15 bp, Homo sapiens
ctctctgtgactggc

SEQ ID NO: 1348536 - DNA, 15 bp, Homo sapiens
tctctctgtgactgg

SEQ ID NO: 1348537 - DNA, 15 bp, Homo sapiens
ttctctctgtgactg

SEQ ID NO: 1348538 - DNA, 15 bp, Homo sapiens
gttctctctgtgact

SEQ ID NO: 1348539 - DNA, 15 bp, Homo sapiens
cgttctctctgtgac

SEQ ID NO: 1348540 - DNA, 15 bp, Homo sapiens
tcgttctctctgtga

SEQ ID NO: 1348541 - DNA, 15 bp, Homo sapiens
atcgttctctctgtg

SEQ ID NO: 1348542 - DNA, 15 bp, Homo sapiens
gatcgttctctctgt

SEQ ID NO: 1348543 - DNA, 15 bp, Homo sapiens
agatcgttctctctg

SEQ ID NO: 1348544 - DNA, 15 bp, Homo sapiens
gagatcgttctctct

SEQ ID NO: 1348545 - DNA, 15 bp, Homo sapiens
agagatcgttctctc

SEQ ID NO: 1348546 - DNA, 15 bp, Homo sapiens
aagagatcgttctct

SEQ ID NO: 1348547 - DNA, 15 bp, Homo sapiens
gaagagatcgttctc

SEQ ID NO: 1348548 - DNA, 15 bp, Homo sapiens
agaagagatcgttct

SEQ ID NO: 1348549 - DNA, 15 bp, Homo sapiens
tagaagagatcgttc

SEQ ID NO: 1348550 - DNA, 15 bp, Homo sapiens
ttagaagagatcgtt

SEQ ID NO: 1348551 - DNA, 15 bp, Homo sapiens
tttagaagagatcgt

SEQ ID NO: 1348552 - DNA, 15 bp, Homo sapiens
gtttagaagagatcg

SEQ ID NO: 1348553 - DNA, 15 bp, Homo sapiens
agtttagaagagatc

SEQ ID NO: 1348554 - DNA, 15 bp, Homo sapiens
gagtttagaagagat

SEQ ID NO: 1348555 - DNA, 15 bp, Homo sapiens
agagtttagaagaga

SEQ ID NO: 1348556 - DNA, 15 bp, Homo sapiens
aagagtttagaagag

SEQ ID NO: 1348557 - DNA, 15 bp, Homo sapiens
aaagagtttagaaga

SEQ ID NO: 1348558 - DNA, 15 bp, Homo sapiens
caaagagtttagaag

SEQ ID NO: 1348559 - DNA, 15 bp, Homo sapiens
gcaaagagtttagaa

SEQ ID NO: 1348560 - DNA, 15 bp, Homo sapiens
agcaaagagtttaga

SEQ ID NO: 1348561 - DNA, 15 bp, Homo sapiens
tagcaaagagtttag

SEQ ID NO: 1348562 - DNA, 15 bp, Homo sapiens
atagcaaagagttta

SEQ ID NO: 1348563 - DNA, 15 bp, Homo sapiens
tatagcaaagagttt

SEQ ID NO: 1348564 - DNA, 15 bp, Homo sapiens
atatagcaaagagtt

SEQ ID NO: 1348565 - DNA, 15 bp, Homo sapiens
aatatagcaaagagt

SEQ ID NO: 1348566 - DNA, 15 bp, Homo sapiens
aaatatagcaaagag

SEQ ID NO: 1348567 - DNA, 15 bp, Homo sapiens
aaaatatagcaaaga

SEQ ID NO: 1348568 - DNA, 15 bp, Homo sapiens
caaaatatagcaaag

SEQ ID NO: 1348569 - DNA, 15 bp, Homo sapiens
gcaaaatatagcaaa

SEQ ID NO: 1348570 - DNA, 15 bp, Homo sapiens
ggcaaaatatagcaa

SEQ ID NO: 1348571 - DNA, 15 bp, Homo sapiens
tggcaaaatatagca

SEQ ID NO: 1348572 - DNA, 15 bp, Homo sapiens
gtggcaaaatatagc

SEQ ID NO: 1348573 - DNA, 15 bp, Homo sapiens
ggtggcaaaatatag

SEQ ID NO: 1348574 - DNA, 15 bp, Homo sapiens
aggtggcaaaatata

SEQ ID NO: 1348575 - DNA, 15 bp, Homo sapiens
caggtggcaaaatat

SEQ ID NO: 1348576 - DNA, 15 bp, Homo sapiens
ccaggtggcaaaata

SEQ ID NO: 1348577 - DNA, 15 bp, Homo sapiens
accaggtggcaaaat

SEQ ID NO: 1348578 - DNA, 15 bp, Homo sapiens
aaccaggtggcaaaa

SEQ ID NO: 1348579 - DNA, 15 bp, Homo sapiens
gaaccaggtggcaaa

SEQ ID NO: 1348580 - DNA, 15 bp, Homo sapiens
ggaaccaggtggcaa

SEQ ID NO: 1348581 - DNA, 15 bp, Homo sapiens
aggaaccaggtggca

SEQ ID NO: 1348582 - DNA, 15 bp, Homo sapiens
taggaaccaggtggc

SEQ ID NO: 1348583 - DNA, 15 bp, Homo sapiens
ttaggaaccaggtgg

SEQ ID NO: 1348584 - DNA, 15 bp, Homo sapiens
gttaggaaccaggtg

SEQ ID NO: 1348585 - DNA, 15 bp, Homo sapiens
agttaggaaccaggt

SEQ ID NO: 1348586 - DNA, 15 bp, Homo sapiens
tagttaggaaccagg

SEQ ID NO: 1348587 - DNA, 15 bp, Homo sapiens
ctagttaggaaccag

SEQ ID NO: 1348588 - DNA, 15 bp, Homo sapiens
tctagttaggaacca

SEQ ID NO: 1348589 - DNA, 15 bp, Homo sapiens
ctctagttaggaacc

SEQ ID NO: 1348590 - DNA, 15 bp, Homo sapiens
actctagttaggaac

SEQ ID NO: 1348591 - DNA, 15 bp, Homo sapiens
aactctagttaggaa

SEQ ID NO: 1348592 - DNA, 15 bp, Homo sapiens
taactctagttagga

SEQ ID NO: 1348593 - DNA, 15 bp, Homo sapiens
gtaactctagttagg

SEQ ID NO: 1348594 - DNA, 15 bp, Homo sapiens
tgtaactctagttag

SEQ ID NO: 1348595 - DNA, 15 bp, Homo sapiens
atgtaactctagtta

SEQ ID NO: 1348596 - DNA, 15 bp, Homo sapiens
aatgtaactctagtt

SEQ ID NO: 1348597 - DNA, 15 bp, Homo sapiens
caatgtaactctagt

SEQ ID NO: 1348598 - DNA, 15 bp, Homo sapiens
ccaatgtaactctag

SEQ ID NO: 1348599 - DNA, 15 bp, Homo sapiens
cccaatgtaactcta

SEQ ID NO: 1348600 - DNA, 15 bp, Homo sapiens
acccaatgtaactct

SEQ ID NO: 1348601 - DNA, 15 bp, Homo sapiens
gacccaatgtaactc

SEQ ID NO: 1348602 - DNA, 15 bp, Homo sapiens
agacccaatgtaact

SEQ ID NO: 1348603 - DNA, 15 bp, Homo sapiens
cagacccaatgtaac

SEQ ID NO: 1348604 - DNA, 15 bp, Homo sapiens
ccagacccaatgtaa

SEQ ID NO: 1348605 - DNA, 15 bp, Homo sapiens
tccagacccaatgta

SEQ ID NO: 1348606 - DNA, 15 bp, Homo sapiens
ttccagacccaatgt

SEQ ID NO: 1348607 - DNA, 15 bp, Homo sapiens
attccagacccaatg

SEQ ID NO: 1348608 - DNA, 15 bp, Homo sapiens
tattccagacccaat

SEQ ID NO: 1348609 - DNA, 15 bp, Homo sapiens
atattccagacccaa

SEQ ID NO: 1348610 - DNA, 15 bp, Homo sapiens
aatattccagaccca

SEQ ID NO: 1348611 - DNA, 15 bp, Homo sapiens
taatattccagaccc

SEQ ID NO: 1348612 - DNA, 15 bp, Homo sapiens
gtaatattccagacc

SEQ ID NO: 1348613 - DNA, 15 bp, Homo sapiens
tgtaatattccagac

SEQ ID NO: 1348614 - DNA, 15 bp, Homo sapiens
ttgtaatattccaga

SEQ ID NO: 1348615 - DNA, 15 bp, Homo sapiens
tttgtaatattccag

SEQ ID NO: 1348616 - DNA, 15 bp, Homo sapiens
atttgtaatattcca

SEQ ID NO: 1348617 - DNA, 15 bp, Homo sapiens
aatttgtaatattcc

SEQ ID NO: 1348618 - DNA, 15 bp, Homo sapiens
gaatttgtaatattc

SEQ ID NO: 1348619 - DNA, 15 bp, Homo sapiens
agaatttgtaatatt

SEQ ID NO: 1348620 - DNA, 15 bp, Homo sapiens
aagaatttgtaatat

SEQ ID NO: 1348621 - DNA, 15 bp, Homo sapiens
aaagaatttgtaata

SEQ ID NO: 1348622 - DNA, 15 bp, Homo sapiens
gaaagaatttgtaat

SEQ ID NO: 1348623 - DNA, 15 bp, Homo sapiens
agaaagaatttgtaa

SEQ ID NO: 1348624 - DNA, 15 bp, Homo sapiens
aagaaagaatttgta

SEQ ID NO: 1348625 - DNA, 15 bp, Homo sapiens
caagaaagaatttgt

SEQ ID NO: 1348626 - DNA, 15 bp, Homo sapiens
tcaagaaagaatttg

SEQ ID NO: 1348627 - DNA, 15 bp, Homo sapiens
ttcaagaaagaattt

SEQ ID NO: 1348628 - DNA, 15 bp, Homo sapiens
tttcaagaaagaatt

SEQ ID NO: 1348629 - DNA, 15 bp, Homo sapiens
ttttcaagaaagaat

SEQ ID NO: 1348630 - DNA, 15 bp, Homo sapiens
attttcaagaaagaa

SEQ ID NO: 1348631 - DNA, 15 bp, Homo sapiens
cattttcaagaaaga

SEQ ID NO: 1348632 - DNA, 15 bp, Homo sapiens
ccattttcaagaaag

SEQ ID NO: 1348633 - DNA, 15 bp, Homo sapiens
accattttcaagaaa

SEQ ID NO: 1348634 - DNA, 15 bp, Homo sapiens
aaccattttcaagaa

SEQ ID NO: 1348635 - DNA, 15 bp, Homo sapiens
caaccattttcaaga

SEQ ID NO: 1348636 - DNA, 15 bp, Homo sapiens
acaaccattttcaag

SEQ ID NO: 1348637 - DNA, 15 bp, Homo sapiens
cacaaccattttcaa

SEQ ID NO: 1348638 - DNA, 15 bp, Homo sapiens
gcacaaccattttca

SEQ ID NO: 1348639 - DNA, 15 bp, Homo sapiens
ggcacaaccattttc

SEQ ID NO: 1348640 - DNA, 15 bp, Homo sapiens
tggcacaaccatttt

SEQ ID NO: 1348641 - DNA, 15 bp, Homo sapiens
ctggcacaaccattt

SEQ ID NO: 1348642 - DNA, 15 bp, Homo sapiens
actggcacaaccatt

SEQ ID NO: 1348643 - DNA, 15 bp, Homo sapiens
aactggcacaaccat

SEQ ID NO: 1348644 - DNA, 15 bp, Homo sapiens
aaactggcacaacca

SEQ ID NO: 1348645 - DNA, 15 bp, Homo sapiens
gaaactggcacaacc

SEQ ID NO: 1348646 - DNA, 15 bp, Homo sapiens
agaaactggcacaac

SEQ ID NO: 1348647 - DNA, 15 bp, Homo sapiens
cagaaactggcacaa

SEQ ID NO: 1348648 - DNA, 15 bp, Homo sapiens
ccagaaactggcaca

SEQ ID NO: 1348649 - DNA, 15 bp, Homo sapiens
accagaaactggcac

SEQ ID NO: 1348650 - DNA, 15 bp, Homo sapiens
aaccagaaactggca

SEQ ID NO: 1348651 - DNA, 15 bp, Homo sapiens
aaaccagaaactggc

SEQ ID NO: 1348652 - DNA, 15 bp, Homo sapiens
aaaaccagaaactgg

SEQ ID NO: 1348653 - DNA, 15 bp, Homo sapiens
aaaaaccagaaactg

SEQ ID NO: 1348654 - DNA, 15 bp, Homo sapiens
taaaaaccagaaact

SEQ ID NO: 1348655 - DNA, 15 bp, Homo sapiens
ataaaaaccagaaac

SEQ ID NO: 1348656 - DNA, 15 bp, Homo sapiens
tataaaaaccagaaa

SEQ ID NO: 1348657 - DNA, 15 bp, Homo sapiens
ttataaaaaccagaa

SEQ ID NO: 1348658 - DNA, 15 bp, Homo sapiens
cttataaaaaccaga

SEQ ID NO: 1348659 - DNA, 15 bp, Homo sapiens
acttataaaaaccag

SEQ ID NO: 1348660 - DNA, 15 bp, Homo sapiens
tacttataaaaacca

SEQ ID NO: 1348661 - DNA, 15 bp, Homo sapiens
atacttataaaaacc

SEQ ID NO: 1348662 - DNA, 15 bp, Homo sapiens
tatacttataaaaac

SEQ ID NO: 1348663 - DNA, 15 bp, Homo sapiens
gtatacttataaaaa

SEQ ID NO: 1348664 - DNA, 15 bp, Homo sapiens
agtatacttataaaa

SEQ ID NO: 1348665 - DNA, 15 bp, Homo sapiens
cagtatacttataaa

SEQ ID NO: 1348666 - DNA, 15 bp, Homo sapiens
acagtatacttataa

SEQ ID NO: 1348667 - DNA, 15 bp, Homo sapiens
cacagtatacttata

SEQ ID NO: 1348668 - DNA, 15 bp, Homo sapiens
ccacagtatacttat

SEQ ID NO: 1348669 - DNA, 15 bp, Homo sapiens
cccacagtatactta

SEQ ID NO: 1348670 - DNA, 15 bp, Homo sapiens
gcccacagtatactt

SEQ ID NO: 1348671 - DNA, 15 bp, Homo sapiens
tgcccacagtatact

SEQ ID NO: 1348672 - DNA, 15 bp, Homo sapiens
gtgcccacagtatac

SEQ ID NO: 1348673 - DNA, 15 bp, Homo sapiens
ggtgcccacagtata

SEQ ID NO: 1348674 - DNA, 15 bp, Homo sapiens
tggtgcccacagtat

SEQ ID NO: 1348675 - DNA, 15 bp, Homo sapiens
gtggtgcccacagta

SEQ ID NO: 1348676 - DNA, 15 bp, Homo sapiens
tgtggtgcccacagt

SEQ ID NO: 1348677 - DNA, 15 bp, Homo sapiens
ctgtggtgcccacag

SEQ ID NO: 1348678 - DNA, 15 bp, Homo sapiens
actgtggtgcccaca

SEQ ID NO: 1348679 - DNA, 15 bp, Homo sapiens
gactgtggtgcccac

SEQ ID NO: 1348680 - DNA, 15 bp, Homo sapiens
ggactgtggtgccca

SEQ ID NO: 1348681 - DNA, 15 bp, Homo sapiens
tggactgtggtgccc

SEQ ID NO: 1348682 - DNA, 15 bp, Homo sapiens
ctggactgtggtgcc

SEQ ID NO: 1348683 - DNA, 15 bp, Homo sapiens
gctggactgtggtgc

SEQ ID NO: 1348684 - DNA, 15 bp, Homo sapiens
agctggactgtggtg

SEQ ID NO: 1348685 - DNA, 15 bp, Homo sapiens
aagctggactgtggt

SEQ ID NO: 1348686 - DNA, 15 bp, Homo sapiens
gaagctggactgtgg

SEQ ID NO: 1348687 - DNA, 15 bp, Homo sapiens
agaagctggactgtg

SEQ ID NO: 1348688 - DNA, 15 bp, Homo sapiens
tagaagctggactgt

SEQ ID NO: 1348689 - DNA, 15 bp, Homo sapiens
ctagaagctggactg

SEQ ID NO: 1348690 - DNA, 15 bp, Homo sapiens
actagaagctggact

SEQ ID NO: 1348691 - DNA, 15 bp, Homo sapiens
aactagaagctggac

SEQ ID NO: 1348692 - DNA, 15 bp, Homo sapiens
aaactagaagctgga

SEQ ID NO: 1348693 - DNA, 15 bp, Homo sapiens
taaactagaagctgg

SEQ ID NO: 1348694 - DNA, 15 bp, Homo sapiens
ataaactagaagctg

SEQ ID NO: 1348695 - DNA, 15 bp, Homo sapiens
tataaactagaagct

SEQ ID NO: 1348696 - DNA, 15 bp, Homo sapiens
ctataaactagaagc

SEQ ID NO: 1348697 - DNA, 15 bp, Homo sapiens
actataaactagaag

SEQ ID NO: 1348698 - DNA, 15 bp, Homo sapiens
tactataaactagaa

SEQ ID NO: 1348699 - DNA, 15 bp, Homo sapiens
ttactataaactaga

SEQ ID NO: 1348700 - DNA, 15 bp, Homo sapiens
tttactataaactag

SEQ ID NO: 1348701 - DNA, 15 bp, Homo sapiens
atttactataaacta

SEQ ID NO: 1348702 - DNA, 15 bp, Homo sapiens
aatttactataaact

SEQ ID NO: 1348703 - DNA, 15 bp, Homo sapiens
taatttactataaac

SEQ ID NO: 1348704 - DNA, 15 bp, Homo sapiens
ttaatttactataaa

SEQ ID NO: 1348705 - DNA, 15 bp, Homo sapiens
attaatttactataa

SEQ ID NO: 1348706 - DNA, 15 bp, Homo sapiens
aattaatttactata

SEQ ID NO: 1348707 - DNA, 15 bp, Homo sapiens
gaattaatttactat

SEQ ID NO: 1348708 - DNA, 15 bp, Homo sapiens
tgaattaatttacta

SEQ ID NO: 1348709 - DNA, 15 bp, Homo sapiens
ttgaattaatttact

SEQ ID NO: 1348710 - DNA, 15 bp, Homo sapiens
cttgaattaatttac

SEQ ID NO: 1348711 - DNA, 15 bp, Homo sapiens
ccttgaattaattta

SEQ ID NO: 1348712 - DNA, 15 bp, Homo sapiens
tccttgaattaattt

SEQ ID NO: 1348713 - DNA, 15 bp, Homo sapiens
ctccttgaattaatt

SEQ ID NO: 1348714 - DNA, 15 bp, Homo sapiens
cctccttgaattaat

SEQ ID NO: 1348715 - DNA, 15 bp, Homo sapiens
acctccttgaattaa

SEQ ID NO: 1348716 - DNA, 15 bp, Homo sapiens
cacctccttgaatta

SEQ ID NO: 1348717 - DNA, 15 bp, Homo sapiens
tcacctccttgaatt

SEQ ID NO: 1348718 - DNA, 15 bp, Homo sapiens
ctcacctccttgaat

SEQ ID NO: 1348719 - DNA, 15 bp, Homo sapiens
tctcacctccttgaa

SEQ ID NO: 1348720 - DNA, 15 bp, Homo sapiens
ctctcacctccttga

SEQ ID NO: 1348721 - DNA, 15 bp, Homo sapiens
cctctcacctccttg

SEQ ID NO: 1348722 - DNA, 15 bp, Homo sapiens
ccctctcacctcctt

SEQ ID NO: 1348723 - DNA, 15 bp, Homo sapiens
gccctctcacctcct

SEQ ID NO: 1348724 - DNA, 15 bp, Homo sapiens
tgccctctcacctcc

SEQ ID NO: 1348725 - DNA, 15 bp, Homo sapiens
ttgccctctcacctc

SEQ ID NO: 1348726 - DNA, 15 bp, Homo sapiens
gttgccctctcacct

SEQ ID NO: 1348727 - DNA, 15 bp, Homo sapiens
tgttgccctctcacc

SEQ ID NO: 1348728 - DNA, 15 bp, Homo sapiens
ctgttgccctctcac

SEQ ID NO: 1348729 - DNA, 15 bp, Homo sapiens
tctgttgccctctca

SEQ ID NO: 1348730 - DNA, 15 bp, Homo sapiens
atctgttgccctctc

SEQ ID NO: 1348731 - DNA, 15 bp, Homo sapiens
tatctgttgccctct

SEQ ID NO: 1348732 - DNA, 15 bp, Homo sapiens
gtatctgttgccctc

SEQ ID NO: 1348733 - DNA, 15 bp, Homo sapiens
ggtatctgttgccct

SEQ ID NO: 1348734 - DNA, 15 bp, Homo sapiens
tggtatctgttgccc

SEQ ID NO: 1348735 - DNA, 15 bp, Homo sapiens
atggtatctgttgcc

SEQ ID NO: 1348736 - DNA, 15 bp, Homo sapiens
catggtatctgttgc

SEQ ID NO: 1348737 - DNA, 15 bp, Homo sapiens
gcatggtatctgttg

SEQ ID NO: 1348738 - DNA, 15 bp, Homo sapiens
ggcatggtatctgtt

SEQ ID NO: 1348739 - DNA, 15 bp, Homo sapiens
tggcatggtatctgt

SEQ ID NO: 1348740 - DNA, 15 bp, Homo sapiens
atggcatggtatctg

SEQ ID NO: 1348741 - DNA, 15 bp, Homo sapiens
aatggcatggtatct

SEQ ID NO: 1348742 - DNA, 15 bp, Homo sapiens
gaatggcatggtatc

SEQ ID NO: 1348743 - DNA, 15 bp, Homo sapiens
ggaatggcatggtat

SEQ ID NO: 1348744 - DNA, 15 bp, Homo sapiens
gggaatggcatggta

SEQ ID NO: 1348745 - DNA, 15 bp, Homo sapiens
agggaatggcatggt

SEQ ID NO: 1348746 - DNA, 15 bp, Homo sapiens
gagggaatggcatgg

SEQ ID NO: 1348747 - DNA, 15 bp, Homo sapiens
ggagggaatggcatg

SEQ ID NO: 1348748 - DNA, 15 bp, Homo sapiens
aggagggaatggcat

SEQ ID NO: 1348749 - DNA, 15 bp, Homo sapiens
gaggagggaatggca

SEQ ID NO: 1348750 - DNA, 15 bp, Homo sapiens
ggaggagggaatggc

SEQ ID NO: 1348751 - DNA, 15 bp, Homo sapiens
gggaggagggaatgg

SEQ ID NO: 1348752 - DNA, 15 bp, Homo sapiens
agggaggagggaatg

SEQ ID NO: 1348753 - DNA, 15 bp, Homo sapiens
aagggaggagggaat

SEQ ID NO: 1348754 - DNA, 15 bp, Homo sapiens
gaagggaggagggaa

SEQ ID NO: 1348755 - DNA, 15 bp, Homo sapiens
agaagggaggaggga

SEQ ID NO: 1348756 - DNA, 15 bp, Homo sapiens
gagaagggaggaggg

SEQ ID NO: 1348757 - DNA, 15 bp, Homo sapiens
ggagaagggaggagg

SEQ ID NO: 1348758 - DNA, 15 bp, Homo sapiens
aggagaagggaggag

SEQ ID NO: 1348759 - DNA, 15 bp, Homo sapiens
aaggagaagggagga

SEQ ID NO: 1348760 - DNA, 15 bp, Homo sapiens
aaaggagaagggagg

SEQ ID NO: 1348761 - DNA, 15 bp, Homo sapiens
aaaaggagaagggag

SEQ ID NO: 1348762 - DNA, 15 bp, Homo sapiens
gaaaaggagaaggga

SEQ ID NO: 1348763 - DNA, 15 bp, Homo sapiens
agaaaaggagaaggg

SEQ ID NO: 1348764 - DNA, 15 bp, Homo sapiens
aagaaaaggagaagg

SEQ ID NO: 1348765 - DNA, 15 bp, Homo sapiens
caagaaaaggagaag

SEQ ID NO: 1348766 - DNA, 15 bp, Homo sapiens
acaagaaaaggagaa

SEQ ID NO: 1348767 - DNA, 15 bp, Homo sapiens
gacaagaaaaggaga

SEQ ID NO: 1348768 - DNA, 15 bp, Homo sapiens
agacaagaaaaggag

SEQ ID NO: 1348769 - DNA, 15 bp, Homo sapiens
aagacaagaaaagga

SEQ ID NO: 1348770 - DNA, 15 bp, Homo sapiens
gaagacaagaaaagg

SEQ ID NO: 1348771 - DNA, 15 bp, Homo sapiens
ggaagacaagaaaag

SEQ ID NO: 1348772 - DNA, 15 bp, Homo sapiens
gggaagacaagaaaa

SEQ ID NO: 1348773 - DNA, 15 bp, Homo sapiens
ggggaagacaagaaa

SEQ ID NO: 1348774 - DNA, 15 bp, Homo sapiens
tggggaagacaagaa

SEQ ID NO: 1348775 - DNA, 15 bp, Homo sapiens
atggggaagacaaga

SEQ ID NO: 1348776 - DNA, 15 bp, Homo sapiens
gatggggaagacaag

SEQ ID NO: 1348777 - DNA, 15 bp, Homo sapiens
agatggggaagacaa

SEQ ID NO: 1348778 - DNA, 15 bp, Homo sapiens
aagagatggggaaga

SEQ ID NO: 1348779 - DNA, 15 bp, Homo sapiens
aaagagatggggaag

SEQ ID NO: 1348780 - DNA, 15 bp, Homo sapiens
aaaagagatggggaa

SEQ ID NO: 1348781 - DNA, 15 bp, Homo sapiens
aaaaagagatgggga

SEQ ID NO: 1348782 - DNA, 15 bp, Homo sapiens
aaaaaagagatgggg

SEQ ID NO: 1348783 - DNA, 15 bp, Homo sapiens
gaaaaaagagatggg

SEQ ID NO: 1348784 - DNA, 15 bp, Homo sapiens
ggaaaaaagagatgg

SEQ ID NO: 1348785 - DNA, 15 bp, Homo sapiens
tggaaaaaagagatg

SEQ ID NO: 1348786 - DNA, 15 bp, Homo sapiens
ttggaaaaaagagat

SEQ ID NO: 1348787 - DNA, 15 bp, Homo sapiens
cttggaaaaaagaga

SEQ ID NO: 1348788 - DNA, 15 bp, Homo sapiens
tcttggaaaaaagag

SEQ ID NO: 1348789 - DNA, 15 bp, Homo sapiens
atcttggaaaaaaga

SEQ ID NO: 1348790 - DNA, 15 bp, Homo sapiens
tatcttggaaaaaag

SEQ ID NO: 1348791 - DNA, 15 bp, Homo sapiens
gtatcttggaaaaaa

SEQ ID NO: 1348792 - DNA, 15 bp, Homo sapiens
tgtatcttggaaaaa

SEQ ID NO: 1348793 - DNA, 15 bp, Homo sapiens
atgtatcttggaaaa

SEQ ID NO: 1348794 - DNA, 15 bp, Homo sapiens
tatgtatcttggaaa

SEQ ID NO: 1348795 - DNA, 15 bp, Homo sapiens
ctatgtatcttggaa

SEQ ID NO: 1348796 - DNA, 15 bp, Homo sapiens
tctatgtatcttgga

SEQ ID NO: 1348797 - DNA, 15 bp, Homo sapiens
atctatgtatcttgg

SEQ ID NO: 1348798 - DNA, 15 bp, Homo sapiens
catctatgtatcttg

SEQ ID NO: 1348799 - DNA, 15 bp, Homo sapiens
gcatctatgtatctt

SEQ ID NO: 1348800 - DNA, 15 bp, Homo sapiens
agcatctatgtatct

SEQ ID NO: 1348801 - DNA, 15 bp, Homo sapiens
tagcatctatgtatc

SEQ ID NO: 1348802 - DNA, 15 bp, Homo sapiens
atagcatctatgtat

SEQ ID NO: 1348803 - DNA, 15 bp, Homo sapiens
aatagcatctatgta

SEQ ID NO: 1348804 - DNA, 15 bp, Homo sapiens
taatagcatctatgt

SEQ ID NO: 1348805 - DNA, 15 bp, Homo sapiens
ataatagcatctatg

SEQ ID NO: 1348806 - DNA, 15 bp, Homo sapiens
tataatagcatctat

SEQ ID NO: 1348807 - DNA, 15 bp, Homo sapiens
atataatagcatcta

SEQ ID NO: 1348808 - DNA, 15 bp, Homo sapiens
catataatagcatct

SEQ ID NO: 1348809 - DNA, 15 bp, Homo sapiens
gcatataatagcatc

SEQ ID NO: 1348810 - DNA, 15 bp, Homo sapiens
tgcatataatagcat

SEQ ID NO: 1348811 - DNA, 15 bp, Homo sapiens
ttgcatataatagca

SEQ ID NO: 1348812 - DNA, 15 bp, Homo sapiens
attgcatataatagc

SEQ ID NO: 1348813 - DNA, 15 bp, Homo sapiens
tattgcatataatag

SEQ ID NO: 1348814 - DNA, 15 bp, Homo sapiens
ctattgcatataata

SEQ ID NO: 1348815 - DNA, 15 bp, Homo sapiens
actattgcatataat

SEQ ID NO: 1348816 - DNA, 15 bp, Homo sapiens
tactattgcatataa

SEQ ID NO: 1348817 - DNA, 15 bp, Homo sapiens
atactattgcatata

SEQ ID NO: 1348818 - DNA, 15 bp, Homo sapiens
tatactattgcatat

SEQ ID NO: 1348819 - DNA, 15 bp, Homo sapiens
atatactattgcata

SEQ ID NO: 1348820 - DNA, 15 bp, Homo sapiens
catatactattgcat

SEQ ID NO: 1348821 - DNA, 15 bp, Homo sapiens
gcatatactattgca

SEQ ID NO: 1348822 - DNA, 15 bp, Homo sapiens
tgcatatactattgc

SEQ ID NO: 1348823 - DNA, 15 bp, Homo sapiens
ttgcatatactattg

SEQ ID NO: 1348824 - DNA, 15 bp, Homo sapiens
tttgcatatactatt

SEQ ID NO: 1348825 - DNA, 15 bp, Homo sapiens
atttgcatatactat

SEQ ID NO: 1348826 - DNA, 15 bp, Homo sapiens
aatttgcatatacta

SEQ ID NO: 1348827 - DNA, 15 bp, Homo sapiens
caatttgcatatact

SEQ ID NO: 1348828 - DNA, 15 bp, Homo sapiens
tcaatttgcatatac

SEQ ID NO: 1348829 - DNA, 15 bp, Homo sapiens
atcaatttgcatata

SEQ ID NO: 1348830 - DNA, 15 bp, Homo sapiens
catcaatttgcatat

SEQ ID NO: 1348831 - DNA, 15 bp, Homo sapiens
acatcaatttgcata

SEQ ID NO: 1348832 - DNA, 15 bp, Homo sapiens
cacatcaatttgcat

SEQ ID NO: 1348833 - DNA, 15 bp, Homo sapiens
tcacatcaatttgca

SEQ ID NO: 1348834 - DNA, 15 bp, Homo sapiens
ctcacatcaatttgc

SEQ ID NO: 1348835 - DNA, 15 bp, Homo sapiens
cctcacatcaatttg

SEQ ID NO: 1348836 - DNA, 15 bp, Homo sapiens
tcctcacatcaattt

SEQ ID NO: 1348837 - DNA, 15 bp, Homo sapiens
ttcctcacatcaatt

SEQ ID NO: 1348838 - DNA, 15 bp, Homo sapiens
attcctcacatcaat

SEQ ID NO: 1348839 - DNA, 15 bp, Homo sapiens
cattcctcacatcaa

SEQ ID NO: 1348840 - DNA, 15 bp, Homo sapiens
ccattcctcacatca

SEQ ID NO: 1348841 - DNA, 15 bp, Homo sapiens
tccattcctcacatc

SEQ ID NO: 1348842 - DNA, 15 bp, Homo sapiens
ctccattcctcacat

SEQ ID NO: 1348843 - DNA, 15 bp, Homo sapiens
tctccattcctcaca

SEQ ID NO: 1348844 - DNA, 15 bp, Homo sapiens
gtctccattcctcac

SEQ ID NO: 1348845 - DNA, 15 bp, Homo sapiens
ggtctccattcctca

SEQ ID NO: 1348846 - DNA, 15 bp, Homo sapiens
aggtctccattcctc

SEQ ID NO: 1348847 - DNA, 15 bp, Homo sapiens
caggtctccattcct

SEQ ID NO: 1348848 - DNA, 15 bp, Homo sapiens
tcaggtctccattcc

SEQ ID NO: 1348849 - DNA, 15 bp, Homo sapiens
ttcaggtctccattc

SEQ ID NO: 1348850 - DNA, 15 bp, Homo sapiens
gttcaggtctccatt

SEQ ID NO: 1348851 - DNA, 15 bp, Homo sapiens
agttcaggtctccat

SEQ ID NO: 1348852 - DNA, 15 bp, Homo sapiens
aagttcaggtctcca

SEQ ID NO: 1348853 - DNA, 15 bp, Homo sapiens
gaagttcaggtctcc

SEQ ID NO: 1348854 - DNA, 15 bp, Homo sapiens
agaagttcaggtctc

SEQ ID NO: 1348855 - DNA, 15 bp, Homo sapiens
cagaagttcaggtct

SEQ ID NO: 1348856 - DNA, 15 bp, Homo sapiens
acagaagttcaggtc

SEQ ID NO: 1348857 - DNA, 15 bp, Homo sapiens
gacagaagttcaggt

SEQ ID NO: 1348858 - DNA, 15 bp, Homo sapiens
agacagaagttcagg

SEQ ID NO: 1348859 - DNA, 15 bp, Homo sapiens
aagacagaagttcag

SEQ ID NO: 1348860 - DNA, 15 bp, Homo sapiens
gaagacagaagttca

SEQ ID NO: 1348861 - DNA, 15 bp, Homo sapiens
agaagacagaagttc

SEQ ID NO: 1348862 - DNA, 15 bp, Homo sapiens
tagaagacagaagtt

SEQ ID NO: 1348863 - DNA, 15 bp, Homo sapiens
cttagaagacagaag

SEQ ID NO: 1348864 - DNA, 15 bp, Homo sapiens
gcttagaagacagaa

SEQ ID NO: 1348865 - DNA, 15 bp, Homo sapiens
tgcttagaagacaga

SEQ ID NO: 1348866 - DNA, 15 bp, Homo sapiens
ttgcttagaagacag

SEQ ID NO: 1348867 - DNA, 15 bp, Homo sapiens
tttgcttagaagaca

SEQ ID NO: 1348868 - DNA, 15 bp, Homo sapiens
ttttgcttagaagac

SEQ ID NO: 1348869 - DNA, 15 bp, Homo sapiens
attttgcttagaaga

SEQ ID NO: 1348870 - DNA, 15 bp, Homo sapiens
cattttgcttagaag

SEQ ID NO: 1348871 - DNA, 15 bp, Homo sapiens
acattttgcttagaa

SEQ ID NO: 1348872 - DNA, 15 bp, Homo sapiens
aacattttgcttaga

SEQ ID NO: 1348873 - DNA, 15 bp, Homo sapiens
aaacattttgcttag

SEQ ID NO: 1348874 - DNA, 15 bp, Homo sapiens
gaaacattttgctta

SEQ ID NO: 1348875 - DNA, 15 bp, Homo sapiens
tgaaacattttgctt

SEQ ID NO: 1348876 - DNA, 15 bp, Homo sapiens
atgaaacattttgct

SEQ ID NO: 1348877 - DNA, 15 bp, Homo sapiens
aatgaaacattttgc

SEQ ID NO: 1348878 - DNA, 15 bp, Homo sapiens
gaatgaaacattttg

SEQ ID NO: 1348879 - DNA, 15 bp, Homo sapiens
tgaatgaaacatttt

SEQ ID NO: 1348880 - DNA, 15 bp, Homo sapiens
gtgaatgaaacattt

SEQ ID NO: 1348881 - DNA, 15 bp, Homo sapiens
agtgaatgaaacatt

SEQ ID NO: 1348882 - DNA, 15 bp, Homo sapiens
tagtgaatgaaacat

SEQ ID NO: 1348883 - DNA, 15 bp, Homo sapiens
ctagtgaatgaaaca

SEQ ID NO: 1348884 - DNA, 15 bp, Homo sapiens
actagtgaatgaaac

SEQ ID NO: 1348885 - DNA, 15 bp, Homo sapiens
cactagtgaatgaaa

SEQ ID NO: 1348886 - DNA, 15 bp, Homo sapiens
ccactagtgaatgaa

SEQ ID NO: 1348887 - DNA, 15 bp, Homo sapiens
tccactagtgaatga

SEQ ID NO: 1348888 - DNA, 15 bp, Homo sapiens
gtccactagtgaatg

SEQ ID NO: 1348889 - DNA, 15 bp, Homo sapiens
agtccactagtgaat

SEQ ID NO: 1348890 - DNA, 15 bp, Homo sapiens
gagtccactagtgaa

SEQ ID NO: 1348891 - DNA, 15 bp, Homo sapiens
agagtccactagtga

SEQ ID NO: 1348892 - DNA, 15 bp, Homo sapiens
aagagtccactagtg

SEQ ID NO: 1348893 - DNA, 15 bp, Homo sapiens
taagagtccactagt

SEQ ID NO: 1348894 - DNA, 15 bp, Homo sapiens
ttaagagtccactag

SEQ ID NO: 1348895 - DNA, 15 bp, Homo sapiens
cttaagagtccacta

SEQ ID NO: 1348896 - DNA, 15 bp, Homo sapiens
tcttaagagtccact

SEQ ID NO: 1348897 - DNA, 15 bp, Homo sapiens
ttcttaagagtccac

SEQ ID NO: 1348898 - DNA, 15 bp, Homo sapiens
gttcttaagagtcca

SEQ ID NO: 1348899 - DNA, 15 bp, Homo sapiens
agttcttaagagtcc

SEQ ID NO: 1348900 - DNA, 15 bp, Homo sapiens
gagttcttaagagtc

SEQ ID NO: 1348901 - DNA, 15 bp, Homo sapiens
agagttcttaagagt

SEQ ID NO: 1348902 - DNA, 15 bp, Homo sapiens
aagagttcttaagag

SEQ ID NO: 1348903 - DNA, 15 bp, Homo sapiens
taagagttcttaaga

SEQ ID NO: 1348904 - DNA, 15 bp, Homo sapiens
ttaagagttcttaag

SEQ ID NO: 1348905 - DNA, 15 bp, Homo sapiens
cttaagagttcttaa

SEQ ID NO: 1348906 - DNA, 15 bp, Homo sapiens
tcttaagagttctta

SEQ ID NO: 1348907 - DNA, 15 bp, Homo sapiens
ctcttaagagttctt

SEQ ID NO: 1348908 - DNA, 15 bp, Homo sapiens
gctcttaagagttct

SEQ ID NO: 1348909 - DNA, 15 bp, Homo sapiens
agctcttaagagttc

SEQ ID NO: 1348910 - DNA, 15 bp, Homo sapiens
gagctcttaagagtt

SEQ ID NO: 1348911 - DNA, 15 bp, Homo sapiens
agagctcttaagagt

SEQ ID NO: 1348912 - DNA, 15 bp, Homo sapiens
aagagctcttaagag

SEQ ID NO: 1348913 - DNA, 15 bp, Homo sapiens
taagagctcttaaga

SEQ ID NO: 1348914 - DNA, 15 bp, Homo sapiens
ataagagctcttaag

SEQ ID NO: 1348915 - DNA, 15 bp, Homo sapiens
cataagagctcttaa

SEQ ID NO: 1348916 - DNA, 15 bp, Homo sapiens
tcataagagctctta

SEQ ID NO: 1348917 - DNA, 15 bp, Homo sapiens
ttcataagagctctt

SEQ ID NO: 1348918 - DNA, 15 bp, Homo sapiens
gttcataagagctct

SEQ ID NO: 1348919 - DNA, 15 bp, Homo sapiens
tgttcataagagctc

SEQ ID NO: 1348920 - DNA, 15 bp, Homo sapiens
ctgttcataagagct

SEQ ID NO: 1348921 - DNA, 15 bp, Homo sapiens
tctgttcataagagc

SEQ ID NO: 1348922 - DNA, 15 bp, Homo sapiens
ttctgttcataagag

SEQ ID NO: 1348923 - DNA, 15 bp, Homo sapiens
tttctgttcataaga

SEQ ID NO: 1348924 - DNA, 15 bp, Homo sapiens
atttctgttcataag

SEQ ID NO: 1348925 - DNA, 15 bp, Homo sapiens
catttctgttcataa

SEQ ID NO: 1348926 - DNA, 15 bp, Homo sapiens
gcatttctgttcata

SEQ ID NO: 1348927 - DNA, 15 bp, Homo sapiens
agcatttctgttcat

SEQ ID NO: 1348928 - DNA, 15 bp, Homo sapiens
cagcatttctgttca

SEQ ID NO: 1348929 - DNA, 15 bp, Homo sapiens
ccagcatttctgttc

SEQ ID NO: 1348930 - DNA, 15 bp, Homo sapiens
tccagcatttctgtt

SEQ ID NO: 1348931 - DNA, 15 bp, Homo sapiens
ttccagcatttctgt

SEQ ID NO: 1348932 - DNA, 15 bp, Homo sapiens
attccagcatttctg

SEQ ID NO: 1348933 - DNA, 15 bp, Homo sapiens
aattccagcatttct

SEQ ID NO: 1348934 - DNA, 15 bp, Homo sapiens
caattccagcatttc

SEQ ID NO: 1348935 - DNA, 15 bp, Homo sapiens
acaattccagcattt

SEQ ID NO: 1348936 - DNA, 15 bp, Homo sapiens
aacaattccagcatt

SEQ ID NO: 1348937 - DNA, 15 bp, Homo sapiens
aaacaattccagcat

SEQ ID NO: 1348938 - DNA, 15 bp, Homo sapiens
aaaacaattccagca

SEQ ID NO: 1348939 - DNA, 15 bp, Homo sapiens
aaaaacaattccagc

SEQ ID NO: 1348940 - DNA, 15 bp, Homo sapiens
taaaaacaattccag

SEQ ID NO: 1348941 - DNA, 15 bp, Homo sapiens
ttaaaaacaattcca

SEQ ID NO: 1348942 - DNA, 15 bp, Homo sapiens
cttaaaaacaattcc

SEQ ID NO: 1348943 - DNA, 15 bp, Homo sapiens
tcttaaaaacaattc

SEQ ID NO: 1348944 - DNA, 15 bp, Homo sapiens
ttcttaaaaacaatt

SEQ ID NO: 1348945 - DNA, 15 bp, Homo sapiens
tttcttaaaaacaat

SEQ ID NO: 1348946 - DNA, 15 bp, Homo sapiens
ttttcttaaaaacaa

SEQ ID NO: 1348947 - DNA, 15 bp, Homo sapiens
attttcttaaaaaca

SEQ ID NO: 1348948 - DNA, 15 bp, Homo sapiens
cattttcttaaaaac

SEQ ID NO: 1348949 - DNA, 15 bp, Homo sapiens
acattttcttaaaaa

SEQ ID NO: 1348950 - DNA, 15 bp, Homo sapiens
aacattttcttaaaa

SEQ ID NO: 1348951 - DNA, 15 bp, Homo sapiens
taacattttcttaaa

SEQ ID NO: 1348952 - DNA, 15 bp, Homo sapiens
ataacattttcttaa

SEQ ID NO: 1348953 - DNA, 15 bp, Homo sapiens
gataacattttctta

SEQ ID NO: 1348954 - DNA, 15 bp, Homo sapiens
ggataacattttctt

SEQ ID NO: 1348955 - DNA, 15 bp, Homo sapiens
tggataacattttct

SEQ ID NO: 1348956 - DNA, 15 bp, Homo sapiens
ttggataacattttc

SEQ ID NO: 1348957 - DNA, 15 bp, Homo sapiens
cttggataacatttt

SEQ ID NO: 1348958 - DNA, 15 bp, Homo sapiens
gcttggataacattt

SEQ ID NO: 1348959 - DNA, 15 bp, Homo sapiens
ggcttggataacatt

SEQ ID NO: 1348960 - DNA, 15 bp, Homo sapiens
aggcttggataacat

SEQ ID NO: 1348961 - DNA, 15 bp, Homo sapiens
taggcttggataaca

SEQ ID NO: 1348962 - DNA, 15 bp, Homo sapiens
ttaggcttggataac

SEQ ID NO: 1348963 - DNA, 15 bp, Homo sapiens
attaggcttggataa

SEQ ID NO: 1348964 - DNA, 15 bp, Homo sapiens
gattaggcttggata

SEQ ID NO: 1348965 - DNA, 15 bp, Homo sapiens
tgattaggcttggat

SEQ ID NO: 1348966 - DNA, 15 bp, Homo sapiens
ctgattaggcttgga

SEQ ID NO: 1348967 - DNA, 15 bp, Homo sapiens
gctgattaggcttgg

SEQ ID NO: 1348968 - DNA, 15 bp, Homo sapiens
agctgattaggcttg

SEQ ID NO: 1348969 - DNA, 15 bp, Homo sapiens
aagctgattaggctt

SEQ ID NO: 1348970 - DNA, 15 bp, Homo sapiens
aaagctgattaggct

SEQ ID NO: 1348971 - DNA, 15 bp, Homo sapiens
taaagctgattaggc

SEQ ID NO: 1348972 - DNA, 15 bp, Homo sapiens
ctaaagctgattagg

SEQ ID NO: 1348973 - DNA, 15 bp, Homo sapiens
actaaagctgattag

SEQ ID NO: 1348974 - DNA, 15 bp, Homo sapiens
cactaaagctgatta

SEQ ID NO: 1348975 - DNA, 15 bp, Homo sapiens
acactaaagctgatt

SEQ ID NO: 1348976 - DNA, 15 bp, Homo sapiens
aacactaaagctgat

SEQ ID NO: 1348977 - DNA, 15 bp, Homo sapiens
aaacactaaagctga

SEQ ID NO: 1348978 - DNA, 15 bp, Homo sapiens
aaaacactaaagctg

SEQ ID NO: 1348979 - DNA, 15 bp, Homo sapiens
taaaacactaaagct

SEQ ID NO: 1348980 - DNA, 15 bp, Homo sapiens
ctaaaacactaaagc

SEQ ID NO: 1348981 - DNA, 15 bp, Homo sapiens
tctaaaacactaaag

SEQ ID NO: 1348982 - DNA, 15 bp, Homo sapiens
ttctaaaacactaaa

SEQ ID NO: 1348983 - DNA, 15 bp, Homo sapiens
tttctaaaacactaa

SEQ ID NO: 1348984 - DNA, 15 bp, Homo sapiens
ctttctaaaacacta

SEQ ID NO: 1348985 - DNA, 15 bp, Homo sapiens
gctttctaaaacact

SEQ ID NO: 1348986 - DNA, 15 bp, Homo sapiens
tgctttctaaaacac

SEQ ID NO: 1348987 - DNA, 15 bp, Homo sapiens
ttgctttctaaaaca

SEQ ID NO: 1348988 - DNA, 15 bp, Homo sapiens
gttgctttctaaaac

SEQ ID NO: 1348989 - DNA, 15 bp, Homo sapiens
agttgctttctaaaa

SEQ ID NO: 1348990 - DNA, 15 bp, Homo sapiens
aagttgctttctaaa

SEQ ID NO: 1348991 - DNA, 15 bp, Homo sapiens
aaagttgctttctaa

SEQ ID NO: 1348992 - DNA, 15 bp, Homo sapiens
gaaagttgctttcta

SEQ ID NO: 1348993 - DNA, 15 bp, Homo sapiens
tgaaagttgctttct

SEQ ID NO: 1348994 - DNA, 15 bp, Homo sapiens
ttgaaagttgctttc

SEQ ID NO: 1348995 - DNA, 15 bp, Homo sapiens
attgaaagttgcttt

SEQ ID NO: 1348996 - DNA, 15 bp, Homo sapiens
aattgaaagttgctt

SEQ ID NO: 1348997 - DNA, 15 bp, Homo sapiens
taattgaaagttgct

SEQ ID NO: 1348998 - DNA, 15 bp, Homo sapiens
ataattgaaagttgc

SEQ ID NO: 1348999 - DNA, 15 bp, Homo sapiens
gataattgaaagttg

SEQ ID NO: 1349000 - DNA, 15 bp, Homo sapiens
agataattgaaagtt

SEQ ID NO: 1349001 - DNA, 15 bp, Homo sapiens
cagataattgaaagt

SEQ ID NO: 1349002 - DNA, 15 bp, Homo sapiens
ccagataattgaaag

SEQ ID NO: 1349003 - DNA, 15 bp, Homo sapiens
tccagataattgaaa

SEQ ID NO: 1349004 - DNA, 15 bp, Homo sapiens
ttccagataattgaa

SEQ ID NO: 1349005 - DNA, 15 bp, Homo sapiens
tttccagataattga

SEQ ID NO: 1349006 - DNA, 15 bp, Homo sapiens
ttttccagataattg

SEQ ID NO: 1349007 - DNA, 15 bp, Homo sapiens
cttttccagataatt

SEQ ID NO: 1349008 - DNA, 15 bp, Homo sapiens
acttttccagataat

SEQ ID NO: 1349009 - DNA, 15 bp, Homo sapiens
cacttttccagataa

SEQ ID NO: 1349010 - DNA, 15 bp, Homo sapiens
tcacttttccagata

SEQ ID NO: 1349011 - DNA, 15 bp, Homo sapiens
atcacttttccagat

SEQ ID NO: 1349012 - DNA, 15 bp, Homo sapiens
aatcacttttccaga

SEQ ID NO: 1349013 - DNA, 15 bp, Homo sapiens
aaatcacttttccag

SEQ ID NO: 1349014 - DNA, 15 bp, Homo sapiens
taaatcacttttcca

SEQ ID NO: 1349015 - DNA, 15 bp, Homo sapiens
ataaatcacttttcc

SEQ ID NO: 1349016 - DNA, 15 bp, Homo sapiens
cataaatcacttttc

SEQ ID NO: 1349017 - DNA, 15 bp, Homo sapiens
acataaatcactttt

SEQ ID NO: 1349018 - DNA, 15 bp, Homo sapiens
cacataaatcacttt

SEQ ID NO: 1349019 - DNA, 15 bp, Homo sapiens
tcacataaatcactt

SEQ ID NO: 1349020 - DNA, 15 bp, Homo sapiens
ttcacataaatcact

SEQ ID NO: 1349021 - DNA, 15 bp, Homo sapiens
cttcacataaatcac

SEQ ID NO: 1349022 - DNA, 15 bp, Homo sapiens
gcttcacataaatca

SEQ ID NO: 1349023 - DNA, 15 bp, Homo sapiens
tgcttcacataaatc

SEQ ID NO: 1349024 - DNA, 15 bp, Homo sapiens
gtgcttcacataaat

SEQ ID NO: 1349025 - DNA, 15 bp, Homo sapiens
ggtgcttcacataaa

SEQ ID NO: 1349026 - DNA, 15 bp, Homo sapiens
aggtgcttcacataa

SEQ ID NO: 1349027 - DNA, 15 bp, Homo sapiens
aaggtgcttcacata

SEQ ID NO: 1349028 - DNA, 15 bp, Homo sapiens
taaggtgcttcacat

SEQ ID NO: 1349029 - DNA, 15 bp, Homo sapiens
ataaggtgcttcaca

SEQ ID NO: 1349030 - DNA, 15 bp, Homo sapiens
aataaggtgcttcac

SEQ ID NO: 1349031 - DNA, 15 bp, Homo sapiens
aaataaggtgcttca

SEQ ID NO: 1349032 - DNA, 15 bp, Homo sapiens
aaaataaggtgcttc

SEQ ID NO: 1349033 - DNA, 15 bp, Homo sapiens
aaaaataaggtgctt

SEQ ID NO: 1349034 - DNA, 15 bp, Homo sapiens
gaaaaataaggtgct

SEQ ID NO: 1349035 - DNA, 15 bp, Homo sapiens
tgaaaaataaggtgc

SEQ ID NO: 1349036 - DNA, 15 bp, Homo sapiens
ctgaaaaataaggtg

SEQ ID NO: 1349037 - DNA, 15 bp, Homo sapiens
actgaaaaataaggt

SEQ ID NO: 1349038 - DNA, 15 bp, Homo sapiens
tactgaaaaataagg

SEQ ID NO: 1349039 - DNA, 15 bp, Homo sapiens
ctactgaaaaataag

SEQ ID NO: 1349040 - DNA, 15 bp, Homo sapiens
actactgaaaaataa

SEQ ID NO: 1349041 - DNA, 15 bp, Homo sapiens
aactactgaaaaata

SEQ ID NO: 1349042 - DNA, 15 bp, Homo sapiens
aaactactgaaaaat

SEQ ID NO: 1349043 - DNA, 15 bp, Homo sapiens
gaaactactgaaaaa

SEQ ID NO: 1349044 - DNA, 15 bp, Homo sapiens
cgaaactactgaaaa

SEQ ID NO: 1349045 - DNA, 15 bp, Homo sapiens
tcgaaactactgaaa

SEQ ID NO: 1349046 - DNA, 15 bp, Homo sapiens
ttcgaaactactgaa

SEQ ID NO: 1349047 - DNA, 15 bp, Homo sapiens
attcgaaactactga

SEQ ID NO: 1349048 - DNA, 15 bp, Homo sapiens
tattcgaaactactg

SEQ ID NO: 1349049 - DNA, 15 bp, Homo sapiens
atattcgaaactact

SEQ ID NO: 1349050 - DNA, 15 bp, Homo sapiens
catattcgaaactac

SEQ ID NO: 1349051 - DNA, 15 bp, Homo sapiens
acatattcgaaacta

SEQ ID NO: 1349052 - DNA, 15 bp, Homo sapiens
aacatattcgaaact

SEQ ID NO: 1349053 - DNA, 15 bp, Homo sapiens
taacatattcgaaac

SEQ ID NO: 1349054 - DNA, 15 bp, Homo sapiens
ctaacatattcgaaa

SEQ ID NO: 1349055 - DNA, 15 bp, Homo sapiens
cctaacatattcgaa

SEQ ID NO: 1349056 - DNA, 15 bp, Homo sapiens
gcctaacatattcga

SEQ ID NO: 1349057 - DNA, 15 bp, Homo sapiens
tgcctaacatattcg

SEQ ID NO: 1349058 - DNA, 15 bp, Homo sapiens
atgcctaacatattc

SEQ ID NO: 1349059 - DNA, 15 bp, Homo sapiens
aatgcctaacatatt

SEQ ID NO: 1349060 - DNA, 15 bp, Homo sapiens
taatgcctaacatat

SEQ ID NO: 1349061 - DNA, 15 bp, Homo sapiens
ataatgcctaacata

SEQ ID NO: 1349062 - DNA, 15 bp, Homo sapiens
aataatgcctaacat

SEQ ID NO: 1349063 - DNA, 15 bp, Homo sapiens
aaataatgcctaaca

SEQ ID NO: 1349064 - DNA, 15 bp, Homo sapiens
taaataatgcctaac

SEQ ID NO: 1349065 - DNA, 15 bp, Homo sapiens
gtaaataatgcctaa

SEQ ID NO: 1349066 - DNA, 15 bp, Homo sapiens
tgtaaataatgccta

SEQ ID NO: 1349067 - DNA, 15 bp, Homo sapiens
ttgtaaataatgcct

SEQ ID NO: 1349068 - DNA, 15 bp, Homo sapiens
cttgtaaataatgcc

SEQ ID NO: 1349069 - DNA, 15 bp, Homo sapiens
gcttgtaaataatgc

SEQ ID NO: 1349070 - DNA, 15 bp, Homo sapiens
tgcttgtaaataatg

SEQ ID NO: 1349071 - DNA, 15 bp, Homo sapiens
ttgcttgtaaataat

SEQ ID NO: 1349072 - DNA, 15 bp, Homo sapiens
tttgcttgtaaataa

SEQ ID NO: 1349073 - DNA, 15 bp, Homo sapiens
ctttgcttgtaaata

SEQ ID NO: 1349074 - DNA, 15 bp, Homo sapiens
tctttgcttgtaaat

SEQ ID NO: 1349075 - DNA, 15 bp, Homo sapiens
ttctttgcttgtaaa

SEQ ID NO: 1349076 - DNA, 15 bp, Homo sapiens
tttctttgcttgtaa

SEQ ID NO: 1349077 - DNA, 15 bp, Homo sapiens
ctttctttgcttgta

SEQ ID NO: 1349078 - DNA, 15 bp, Homo sapiens
tctttctttgcttgt

SEQ ID NO: 1349079 - DNA, 15 bp, Homo sapiens
gacttctttctttgc

SEQ ID NO: 1349080 - DNA, 15 bp, Homo sapiens
tgacttctttctttg

SEQ ID NO: 1349081 - DNA, 15 bp, Homo sapiens
ctgacttctttcttt

SEQ ID NO: 1349082 - DNA, 15 bp, Homo sapiens
tctgacttctttctt

SEQ ID NO: 1349083 - DNA, 15 bp, Homo sapiens
gtctgacttctttct

SEQ ID NO: 1349084 - DNA, 15 bp, Homo sapiens
tgtctgacttctttc

SEQ ID NO: 1349085 - DNA, 15 bp, Homo sapiens
ttgtctgacttcttt

SEQ ID NO: 1349086 - DNA, 15 bp, Homo sapiens
gttgtctgacttctt

SEQ ID NO: 1349087 - DNA, 15 bp, Homo sapiens
agttgtctgacttct

SEQ ID NO: 1349088 - DNA, 15 bp, Homo sapiens
aagttgtctgacttc

SEQ ID NO: 1349089 - DNA, 15 bp, Homo sapiens
taagttgtctgactt

SEQ ID NO: 1349090 - DNA, 15 bp, Homo sapiens
ttaagttgtctgact

SEQ ID NO: 1349091 - DNA, 15 bp, Homo sapiens
attaagttgtctgac

SEQ ID NO: 1349092 - DNA, 15 bp, Homo sapiens
tattaagttgtctga

SEQ ID NO: 1349093 - DNA, 15 bp, Homo sapiens
ttattaagttgtctg

SEQ ID NO: 1349094 - DNA, 15 bp, Homo sapiens
tttattaagttgtct

SEQ ID NO: 1349095 - DNA, 15 bp, Homo sapiens
ttttattaagttgtc

SEQ ID NO: 1349096 - DNA, 15 bp, Homo sapiens
gttttattaagttgt

SEQ ID NO: 1349097 - DNA, 15 bp, Homo sapiens
agttttattaagttg

SEQ ID NO: 1349098 - DNA, 15 bp, Homo sapiens
tagttttattaagtt

SEQ ID NO: 1349099 - DNA, 15 bp, Homo sapiens
atagttttattaagt

SEQ ID NO: 1349100 - DNA, 15 bp, Homo sapiens
tatagttttattaag

SEQ ID NO: 1349101 - DNA, 15 bp, Homo sapiens
atatagttttattaa

SEQ ID NO: 1349102 - DNA, 15 bp, Homo sapiens
tatatagttttatta

SEQ ID NO: 1349103 - DNA, 15 bp, Homo sapiens
ctatatagttttatt

SEQ ID NO: 1349104 - DNA, 15 bp, Homo sapiens
gctatatagttttat

SEQ ID NO: 1349105 - DNA, 15 bp, Homo sapiens
tgctatatagtttta

SEQ ID NO: 1349106 - DNA, 15 bp, Homo sapiens
atgctatatagtttt

SEQ ID NO: 1349107 - DNA, 15 bp, Homo sapiens
aatgctatatagttt

SEQ ID NO: 1349108 - DNA, 15 bp, Homo sapiens
aaatgctatatagtt

SEQ ID NO: 1349109 - DNA, 15 bp, Homo sapiens
aaaatgctatatagt

SEQ ID NO: 1349110 - DNA, 15 bp, Homo sapiens
aaaaatgctatatag

SEQ ID NO: 1349111 - DNA, 15 bp, Homo sapiens
taaaaatgctatata

SEQ ID NO: 1349112 - DNA, 15 bp, Homo sapiens
ttaaaaatgctatat

SEQ ID NO: 1349113 - DNA, 15 bp, Homo sapiens
attaaaaatgctata

SEQ ID NO: 1349114 - DNA, 15 bp, Homo sapiens
tattaaaaatgctat

SEQ ID NO: 1349115 - DNA, 15 bp, Homo sapiens
gtattaaaaatgcta

SEQ ID NO: 1349116 - DNA, 15 bp, Homo sapiens
cgtattaaaaatgct

SEQ ID NO: 1349117 - DNA, 15 bp, Homo sapiens
ccgtattaaaaatgc

SEQ ID NO: 1349118 - DNA, 15 bp, Homo sapiens
tccgtattaaaaatg

SEQ ID NO: 1349119 - DNA, 15 bp, Homo sapiens
ctccgtattaaaaat

SEQ ID NO: 1349120 - DNA, 15 bp, Homo sapiens
tctccgtattaaaaa

SEQ ID NO: 1349121 - DNA, 15 bp, Homo sapiens
ttctccgtattaaaa

SEQ ID NO: 1349122 - DNA, 15 bp, Homo sapiens
tttctccgtattaaa

SEQ ID NO: 1349123 - DNA, 15 bp, Homo sapiens
ctttctccgtattaa

SEQ ID NO: 1349124 - DNA, 15 bp, Homo sapiens
actttctccgtatta

SEQ ID NO: 1349125 - DNA, 15 bp, Homo sapiens
cactttctccgtatt

SEQ ID NO: 1349126 - DNA, 15 bp, Homo sapiens
acactttctccgtat

SEQ ID NO: 1349127 - DNA, 15 bp, Homo sapiens
aacactttctccgta

SEQ ID NO: 1349128 - DNA, 15 bp, Homo sapiens
aaacactttctccgt

SEQ ID NO: 1349129 - DNA, 15 bp, Homo sapiens
gaaacactttctccg

SEQ ID NO: 1349130 - DNA, 15 bp, Homo sapiens
agaaacactttctcc

SEQ ID NO: 1349131 - DNA, 15 bp, Homo sapiens
tagaaacactttctc

SEQ ID NO: 1349132 - DNA, 15 bp, Homo sapiens
gtagaaacactttct

SEQ ID NO: 1349133 - DNA, 15 bp, Homo sapiens
agtagaaacactttc

SEQ ID NO: 1349134 - DNA, 15 bp, Homo sapiens
gagtagaaacacttt

SEQ ID NO: 1349135 - DNA, 15 bp, Homo sapiens
agagtagaaacactt

SEQ ID NO: 1349136 - DNA, 15 bp, Homo sapiens
gagagtagaaacact

SEQ ID NO: 1349137 - DNA, 15 bp, Homo sapiens
ggagagtagaaacac

SEQ ID NO: 1349138 - DNA, 15 bp, Homo sapiens
gggagagtagaaaca

SEQ ID NO: 1349139 - DNA, 15 bp, Homo sapiens
agggagagtagaaac

SEQ ID NO: 1349140 - DNA, 15 bp, Homo sapiens
cagggagagtagaaa

SEQ ID NO: 1349141 - DNA, 15 bp, Homo sapiens
tcagggagagtagaa

SEQ ID NO: 1349142 - DNA, 15 bp, Homo sapiens
atcagggagagtaga

SEQ ID NO: 1349143 - DNA, 15 bp, Homo sapiens
catcagggagagtag

SEQ ID NO: 1349144 - DNA, 15 bp, Homo sapiens
ccatcagggagagta

SEQ ID NO: 1349145 - DNA, 15 bp, Homo sapiens
tccatcagggagagt

SEQ ID NO: 1349146 - DNA, 15 bp, Homo sapiens
ttccatcagggagag

SEQ ID NO: 1349147 - DNA, 15 bp, Homo sapiens
cttccatcagggaga

SEQ ID NO: 1349148 - DNA, 15 bp, Homo sapiens
gcttccatcagggag

SEQ ID NO: 1349149 - DNA, 15 bp, Homo sapiens
agcttccatcaggga

SEQ ID NO: 1349150 - DNA, 15 bp, Homo sapiens
aagcttccatcaggg

SEQ ID NO: 1349151 - DNA, 15 bp, Homo sapiens
taagcttccatcagg

SEQ ID NO: 1349152 - DNA, 15 bp, Homo sapiens
ataagcttccatcag

SEQ ID NO: 1349153 - DNA, 15 bp, Homo sapiens
gataagcttccatca

SEQ ID NO: 1349154 - DNA, 15 bp, Homo sapiens
agataagcttccatc

SEQ ID NO: 1349155 - DNA, 15 bp, Homo sapiens
tagataagcttccat

SEQ ID NO: 1349156 - DNA, 15 bp, Homo sapiens
atagataagcttcca

SEQ ID NO: 1349157 - DNA, 15 bp, Homo sapiens
aatagataagcttcc

SEQ ID NO: 1349158 - DNA, 15 bp, Homo sapiens
taatagataagcttc

SEQ ID NO: 1349159 - DNA, 15 bp, Homo sapiens
ttaatagataagctt

SEQ ID NO: 1349160 - DNA, 15 bp, Homo sapiens
tttaatagataagct

SEQ ID NO: 1349161 - DNA, 15 bp, Homo sapiens
ttttaatagataagc

SEQ ID NO: 1349162 - DNA, 15 bp, Homo sapiens
cttttaatagataag

SEQ ID NO: 1349163 - DNA, 15 bp, Homo sapiens
ccttttaatagataa

SEQ ID NO: 1349164 - DNA, 15 bp, Homo sapiens
tccttttaatagata

SEQ ID NO: 1349165 - DNA, 15 bp, Homo sapiens
atccttttaatagat

SEQ ID NO: 1349166 - DNA, 15 bp, Homo sapiens
aatccttttaataga

SEQ ID NO: 1349167 - DNA, 15 bp, Homo sapiens
gaatccttttaatag

SEQ ID NO: 1349168 - DNA, 15 bp, Homo sapiens
tgaatccttttaata

SEQ ID NO: 1349169 - DNA, 15 bp, Homo sapiens
ctgaatccttttaat

SEQ ID NO: 1349170 - DNA, 15 bp, Homo sapiens
tctgaatccttttaa

SEQ ID NO: 1349171 - DNA, 15 bp, Homo sapiens
atctgaatcctttta

SEQ ID NO: 1349172 - DNA, 15 bp, Homo sapiens
tatctgaatcctttt

SEQ ID NO: 1349173 - DNA, 15 bp, Homo sapiens
atatctgaatccttt

SEQ ID NO: 1349174 - DNA, 15 bp, Homo sapiens
gatatctgaatcctt

SEQ ID NO: 1349175 - DNA, 15 bp, Homo sapiens
agatatctgaatcct

SEQ ID NO: 1349176 - DNA, 15 bp, Homo sapiens
tagatatctgaatcc

SEQ ID NO: 1349177 - DNA, 15 bp, Homo sapiens
ttagatatctgaatc

SEQ ID NO: 1349178 - DNA, 15 bp, Homo sapiens
tttagatatctgaat

SEQ ID NO: 1349179 - DNA, 15 bp, Homo sapiens
gtttagatatctgaa

SEQ ID NO: 1349180 - DNA, 15 bp, Homo sapiens
agtttagatatctga

SEQ ID NO: 1349181 - DNA, 15 bp, Homo sapiens
aagtttagatatctg

SEQ ID NO: 1349182 - DNA, 15 bp, Homo sapiens
aaagtttagatatct

SEQ ID NO: 1349183 - DNA, 15 bp, Homo sapiens
taaagtttagatatc

SEQ ID NO: 1349184 - DNA, 15 bp, Homo sapiens
ttaaagtttagatat

SEQ ID NO: 1349185 - DNA, 15 bp, Homo sapiens
cttaaagtttagata

SEQ ID NO: 1349186 - DNA, 15 bp, Homo sapiens
tcttaaagtttagat

SEQ ID NO: 1349187 - DNA, 15 bp, Homo sapiens
ttcttaaagtttaga

SEQ ID NO: 1349188 - DNA, 15 bp, Homo sapiens
tttcttaaagtttag

SEQ ID NO: 1349189 - DNA, 15 bp, Homo sapiens
ctttcttaaagttta

SEQ ID NO: 1349190 - DNA, 15 bp, Homo sapiens
cctttcttaaagttt

SEQ ID NO: 1349191 - DNA, 15 bp, Homo sapiens
gcctttcttaaagtt

SEQ ID NO: 1349192 - DNA, 15 bp, Homo sapiens
tgcctttcttaaagt

SEQ ID NO: 1349193 - DNA, 15 bp, Homo sapiens
ctgcctttcttaaag

SEQ ID NO: 1349194 - DNA, 15 bp, Homo sapiens
tctgcctttcttaaa

SEQ ID NO: 1349195 - DNA, 15 bp, Homo sapiens
ctctgcctttcttaa

SEQ ID NO: 1349196 - DNA, 15 bp, Homo sapiens
tctctgcctttctta

SEQ ID NO: 1349197 - DNA, 15 bp, Homo sapiens
gtctctgcctttctt

SEQ ID NO: 1349198 - DNA, 15 bp, Homo sapiens
ggtctctgcctttct

SEQ ID NO: 1349199 - DNA, 15 bp, Homo sapiens
gggtctctgcctttc

SEQ ID NO: 1349200 - DNA, 15 bp, Homo sapiens
agggtctctgccttt

SEQ ID NO: 1349201 - DNA, 15 bp, Homo sapiens
ggaagggtctctgcc

SEQ ID NO: 1349202 - DNA, 15 bp, Homo sapiens
aggaagggtctctgc

SEQ ID NO: 1349203 - DNA, 15 bp, Homo sapiens
taggaagggtctctg

SEQ ID NO: 1349204 - DNA, 15 bp, Homo sapiens
gtaggaagggtctct

SEQ ID NO: 1349205 - DNA, 15 bp, Homo sapiens
ggtaggaagggtctc

SEQ ID NO: 1349206 - DNA, 15 bp, Homo sapiens
aggtaggaagggtct

SEQ ID NO: 1349207 - DNA, 15 bp, Homo sapiens
gaggtaggaagggtc

SEQ ID NO: 1349208 - DNA, 15 bp, Homo sapiens
ggaggtaggaagggt

SEQ ID NO: 1349209 - DNA, 15 bp, Homo sapiens
aggaggtaggaaggg

SEQ ID NO: 1349210 - DNA, 15 bp, Homo sapiens
aaggaggtaggaagg

SEQ ID NO: 1349211 - DNA, 15 bp, Homo sapiens
taaggaggtaggaag

SEQ ID NO: 1349212 - DNA, 15 bp, Homo sapiens
ttaaggaggtaggaa

SEQ ID NO: 1349213 - DNA, 15 bp, Homo sapiens
attaaggaggtagga

SEQ ID NO: 1349214 - DNA, 15 bp, Homo sapiens
tattaaggaggtagg

SEQ ID NO: 1349215 - DNA, 15 bp, Homo sapiens
atattaaggaggtag

SEQ ID NO: 1349216 - DNA, 15 bp, Homo sapiens
catattaaggaggta

SEQ ID NO: 1349217 - DNA, 15 bp, Homo sapiens
ccatattaaggaggt

SEQ ID NO: 1349218 - DNA, 15 bp, Homo sapiens
accatattaaggagg

SEQ ID NO: 1349219 - DNA, 15 bp, Homo sapiens
aaccatattaaggag

SEQ ID NO: 1349220 - DNA, 15 bp, Homo sapiens
gaaccatattaagga

SEQ ID NO: 1349221 - DNA, 15 bp, Homo sapiens
tgaaccatattaagg

SEQ ID NO: 1349222 - DNA, 15 bp, Homo sapiens
atgaaccatattaag

SEQ ID NO: 1349223 - DNA, 15 bp, Homo sapiens
gatgaaccatattaa

SEQ ID NO: 1349224 - DNA, 15 bp, Homo sapiens
cgatgaaccatatta

SEQ ID NO: 1349225 - DNA, 15 bp, Homo sapiens
ccgatgaaccatatt

SEQ ID NO: 1349226 - DNA, 15 bp, Homo sapiens
cccgatgaaccatat

SEQ ID NO: 1349227 - DNA, 15 bp, Homo sapiens
ccccgatgaaccata

SEQ ID NO: 1349228 - DNA, 15 bp, Homo sapiens
accccgatgaaccat

SEQ ID NO: 1349229 - DNA, 15 bp, Homo sapiens
taccccgatgaacca

SEQ ID NO: 1349230 - DNA, 15 bp, Homo sapiens
ttaccccgatgaacc

SEQ ID NO: 1349231 - DNA, 15 bp, Homo sapiens
tttaccccgatgaac

SEQ ID NO: 1349232 - DNA, 15 bp, Homo sapiens
ttttaccccgatgaa

SEQ ID NO: 1349233 - DNA, 15 bp, Homo sapiens
cttttaccccgatga

SEQ ID NO: 1349234 - DNA, 15 bp, Homo sapiens
acttttaccccgatg

SEQ ID NO: 1349235 - DNA, 15 bp, Homo sapiens
aacttttaccccgat

SEQ ID NO: 1349236 - DNA, 15 bp, Homo sapiens
taacttttaccccga

SEQ ID NO: 1349237 - DNA, 15 bp, Homo sapiens
gtaacttttaccccg

SEQ ID NO: 1349238 - DNA, 15 bp, Homo sapiens
agtaacttttacccc

SEQ ID NO: 1349239 - DNA, 15 bp, Homo sapiens
gagtaacttttaccc

SEQ ID NO: 1349240 - DNA, 15 bp, Homo sapiens
ggagtaacttttacc

SEQ ID NO: 1349241 - DNA, 15 bp, Homo sapiens
aggagtaacttttac

SEQ ID NO: 1349242 - DNA, 15 bp, Homo sapiens
aaggagtaactttta

SEQ ID NO: 1349243 - DNA, 15 bp, Homo sapiens
taaggagtaactttt

SEQ ID NO: 1349244 - DNA, 15 bp, Homo sapiens
gtaaggagtaacttt

SEQ ID NO: 1349245 - DNA, 15 bp, Homo sapiens
agtaaggagtaactt

SEQ ID NO: 1349246 - DNA, 15 bp, Homo sapiens
gagtaaggagtaact

SEQ ID NO: 1349247 - DNA, 15 bp, Homo sapiens
tgagtaaggagtaac

SEQ ID NO: 1349248 - DNA, 15 bp, Homo sapiens
gtgagtaaggagtaa

SEQ ID NO: 1349249 - DNA, 15 bp, Homo sapiens
agtgagtaaggagta

SEQ ID NO: 1349250 - DNA, 15 bp, Homo sapiens
tagtgagtaaggagt

SEQ ID NO: 1349251 - DNA, 15 bp, Homo sapiens
ttagtgagtaaggag

SEQ ID NO: 1349252 - DNA, 15 bp, Homo sapiens
gttagtgagtaagga

SEQ ID NO: 1349253 - DNA, 15 bp, Homo sapiens
ggttagtgagtaagg

SEQ ID NO: 1349254 - DNA, 15 bp, Homo sapiens
tggttagtgagtaag

SEQ ID NO: 1349255 - DNA, 15 bp, Homo sapiens
ttggttagtgagtaa

SEQ ID NO: 1349256 - DNA, 15 bp, Homo sapiens
tttggttagtgagta

SEQ ID NO: 1349257 - DNA, 15 bp, Homo sapiens
gtttggttagtgagt

SEQ ID NO: 1349258 - DNA, 15 bp, Homo sapiens
ggtttggttagtgag

SEQ ID NO: 1349259 - DNA, 15 bp, Homo sapiens
aggtttggttagtga

SEQ ID NO: 1349260 - DNA, 15 bp, Homo sapiens
gaggtttggttagtg

SEQ ID NO: 1349261 - DNA, 15 bp, Homo sapiens
agaggtttggttagt

SEQ ID NO: 1349262 - DNA, 15 bp, Homo sapiens
tagaggtttggttag

SEQ ID NO: 1349263 - DNA, 15 bp, Homo sapiens
ctagaggtttggtta

SEQ ID NO: 1349264 - DNA, 15 bp, Homo sapiens
cctagaggtttggtt

SEQ ID NO: 1349265 - DNA, 15 bp, Homo sapiens
acctagaggtttggt

SEQ ID NO: 1349266 - DNA, 15 bp, Homo sapiens
gacctagaggtttgg

SEQ ID NO: 1349267 - DNA, 15 bp, Homo sapiens
tgacctagaggtttg

SEQ ID NO: 1349268 - DNA, 15 bp, Homo sapiens
atgacctagaggttt

SEQ ID NO: 1349269 - DNA, 15 bp, Homo sapiens
gatgacctagaggtt

SEQ ID NO: 1349270 - DNA, 15 bp, Homo sapiens
agatgacctagaggt

SEQ ID NO: 1349271 - DNA, 15 bp, Homo sapiens
aagatgacctagagg

SEQ ID NO: 1349272 - DNA, 15 bp, Homo sapiens
gaagatgacctagag

SEQ ID NO: 1349273 - DNA, 15 bp, Homo sapiens
ggaagatgacctaga

SEQ ID NO: 1349274 - DNA, 15 bp, Homo sapiens
gggaagatgacctag

SEQ ID NO: 1349275 - DNA, 15 bp, Homo sapiens
tgggaagatgaccta

SEQ ID NO: 1349276 - DNA, 15 bp, Homo sapiens
gtgggaagatgacct

SEQ ID NO: 1349277 - DNA, 15 bp, Homo sapiens
agtgggaagatgacc

SEQ ID NO: 1349278 - DNA, 15 bp, Homo sapiens
aagtgggaagatgac

SEQ ID NO: 1349279 - DNA, 15 bp, Homo sapiens
gaagtgggaagatga

SEQ ID NO: 1349280 - DNA, 15 bp, Homo sapiens
tgaagtgggaagatg

SEQ ID NO: 1349281 - DNA, 15 bp, Homo sapiens
atgaagtgggaagat

SEQ ID NO: 1349282 - DNA, 15 bp, Homo sapiens
tatgaagtgggaaga

SEQ ID NO: 1349283 - DNA, 15 bp, Homo sapiens
atatgaagtgggaag

SEQ ID NO: 1349284 - DNA, 15 bp, Homo sapiens
aatatgaagtgggaa

SEQ ID NO: 1349285 - DNA, 15 bp, Homo sapiens
gaatatgaagtggga

SEQ ID NO: 1349286 - DNA, 15 bp, Homo sapiens
ggaatatgaagtggg

SEQ ID NO: 1349287 - DNA, 15 bp, Homo sapiens
aggaatatgaagtgg

SEQ ID NO: 1349288 - DNA, 15 bp, Homo sapiens
aaggaatatgaagtg

SEQ ID NO: 1349289 - DNA, 15 bp, Homo sapiens
gaaggaatatgaagt

SEQ ID NO: 1349290 - DNA, 15 bp, Homo sapiens
agaaggaatatgaag

SEQ ID NO: 1349291 - DNA, 15 bp, Homo sapiens
aagaaggaatatgaa

SEQ ID NO: 1349292 - DNA, 15 bp, Homo sapiens
gaagaaggaatatga

SEQ ID NO: 1349293 - DNA, 15 bp, Homo sapiens
agaagaaggaatatg

SEQ ID NO: 1349294 - DNA, 15 bp, Homo sapiens
gagaagaaggaatat

SEQ ID NO: 1349295 - DNA, 15 bp, Homo sapiens
ggagaagaaggaata

SEQ ID NO: 1349296 - DNA, 15 bp, Homo sapiens
cggagaagaaggaat

SEQ ID NO: 1349297 - DNA, 15 bp, Homo sapiens
acggagaagaaggaa

SEQ ID NO: 1349298 - DNA, 15 bp, Homo sapiens
cacggagaagaagga

SEQ ID NO: 1349299 - DNA, 15 bp, Homo sapiens
tcacggagaagaagg

SEQ ID NO: 1349300 - DNA, 15 bp, Homo sapiens
gtcacggagaagaag

SEQ ID NO: 1349301 - DNA, 15 bp, Homo sapiens
agtcacggagaagaa

SEQ ID NO: 1349302 - DNA, 15 bp, Homo sapiens
cagtcacggagaaga

SEQ ID NO: 1349303 - DNA, 15 bp, Homo sapiens
tcagtcacggagaag

SEQ ID NO: 1349304 - DNA, 15 bp, Homo sapiens
atcagtcacggagaa

SEQ ID NO: 1349305 - DNA, 15 bp, Homo sapiens
tatcagtcacggaga

SEQ ID NO: 1349306 - DNA, 15 bp, Homo sapiens
ttatcagtcacggag

SEQ ID NO: 1349307 - DNA, 15 bp, Homo sapiens
tttatcagtcacgga

SEQ ID NO: 1349308 - DNA, 15 bp, Homo sapiens
gtttatcagtcacgg

SEQ ID NO: 1349309 - DNA, 15 bp, Homo sapiens
ggtttatcagtcacg

SEQ ID NO: 1349310 - DNA, 15 bp, Homo sapiens
aggtttatcagtcac

SEQ ID NO: 1349311 - DNA, 15 bp, Homo sapiens
gaggtttatcagtca

SEQ ID NO: 1349312 - DNA, 15 bp, Homo sapiens
agaggtttatcagtc

SEQ ID NO: 1349313 - DNA, 15 bp, Homo sapiens
gagaggtttatcagt

SEQ ID NO: 1349314 - DNA, 15 bp, Homo sapiens
tgagaggtttatcag

SEQ ID NO: 1349315 - DNA, 15 bp, Homo sapiens
ctgagaggtttatca

SEQ ID NO: 1349316 - DNA, 15 bp, Homo sapiens
actgagaggtttatc

SEQ ID NO: 1349317 - DNA, 15 bp, Homo sapiens
tactgagaggtttat

SEQ ID NO: 1349318 - DNA, 15 bp, Homo sapiens
gtactgagaggttta

SEQ ID NO: 1349319 - DNA, 15 bp, Homo sapiens
agtactgagaggttt

SEQ ID NO: 1349320 - DNA, 15 bp, Homo sapiens
aagtactgagaggtt

SEQ ID NO: 1349321 - DNA, 15 bp, Homo sapiens
aaagtactgagaggt

SEQ ID NO: 1349322 - DNA, 15 bp, Homo sapiens
gaaagtactgagagg

SEQ ID NO: 1349323 - DNA, 15 bp, Homo sapiens
agaaagtactgagag

SEQ ID NO: 1349324 - DNA, 15 bp, Homo sapiens
cagaaagtactgaga

SEQ ID NO: 1349325 - DNA, 15 bp, Homo sapiens
tcagaaagtactgag

SEQ ID NO: 1349326 - DNA, 15 bp, Homo sapiens
ttcagaaagtactga

SEQ ID NO: 1349327 - DNA, 15 bp, Homo sapiens
tttcagaaagtactg

SEQ ID NO: 1349328 - DNA, 15 bp, Homo sapiens
atttcagaaagtact

SEQ ID NO: 1349329 - DNA, 15 bp, Homo sapiens
aatttcagaaagtac

SEQ ID NO: 1349330 - DNA, 15 bp, Homo sapiens
gaatttcagaaagta

SEQ ID NO: 1349331 - DNA, 15 bp, Homo sapiens
ggaatttcagaaagt

SEQ ID NO: 1349332 - DNA, 15 bp, Homo sapiens
aggaatttcagaaag

SEQ ID NO: 1349333 - DNA, 15 bp, Homo sapiens
caggaatttcagaaa

SEQ ID NO: 1349334 - DNA, 15 bp, Homo sapiens
ccaggaatttcagaa

SEQ ID NO: 1349335 - DNA, 15 bp, Homo sapiens
accaggaatttcaga

SEQ ID NO: 1349336 - DNA, 15 bp, Homo sapiens
taccaggaatttcag

SEQ ID NO: 1349337 - DNA, 15 bp, Homo sapiens
ttaccaggaatttca

SEQ ID NO: 1349338 - DNA, 15 bp, Homo sapiens
tttaccaggaatttc

SEQ ID NO: 1349339 - DNA, 15 bp, Homo sapiens
ctttaccaggaattt

SEQ ID NO: 1349340 - DNA, 15 bp, Homo sapiens
tctttaccaggaatt

SEQ ID NO: 1349341 - DNA, 15 bp, Homo sapiens
atctttaccaggaat

SEQ ID NO: 1349342 - DNA, 15 bp, Homo sapiens
catctttaccaggaa

SEQ ID NO: 1349343 - DNA, 15 bp, Homo sapiens
ccatctttaccagga

SEQ ID NO: 1349344 - DNA, 15 bp, Homo sapiens
gccatctttaccagg

SEQ ID NO: 1349345 - DNA, 15 bp, Homo sapiens
tgccatctttaccag

SEQ ID NO: 1349346 - DNA, 15 bp, Homo sapiens
atgccatctttacca

SEQ ID NO: 1349347 - DNA, 15 bp, Homo sapiens
aatgccatctttacc

SEQ ID NO: 1349348 - DNA, 15 bp, Homo sapiens
gaatgccatctttac

SEQ ID NO: 1349349 - DNA, 15 bp, Homo sapiens
agaatgccatcttta

SEQ ID NO: 1349350 - DNA, 15 bp, Homo sapiens
gagaatgccatcttt

SEQ ID NO: 1349351 - DNA, 15 bp, Homo sapiens
tgagaatgccatctt

SEQ ID NO: 1349352 - DNA, 15 bp, Homo sapiens
ctgagaatgccatct

SEQ ID NO: 1349353 - DNA, 15 bp, Homo sapiens
actgagaatgccatc

SEQ ID NO: 1349354 - DNA, 15 bp, Homo sapiens
cactgagaatgccat

SEQ ID NO: 1349355 - DNA, 15 bp, Homo sapiens
ccactgagaatgcca

SEQ ID NO: 1349356 - DNA, 15 bp, Homo sapiens
accactgagaatgcc

SEQ ID NO: 1349357 - DNA, 15 bp, Homo sapiens
caccactgagaatgc

SEQ ID NO: 1349358 - DNA, 15 bp, Homo sapiens
gcaccactgagaatg

SEQ ID NO: 1349359 - DNA, 15 bp, Homo sapiens
agcaccactgagaat

SEQ ID NO: 1349360 - DNA, 15 bp, Homo sapiens
aagcaccactgagaa

SEQ ID NO: 1349361 - DNA, 15 bp, Homo sapiens
caagcaccactgaga

SEQ ID NO: 1349362 - DNA, 15 bp, Homo sapiens
gcaagcaccactgag

SEQ ID NO: 1349363 - DNA, 15 bp, Homo sapiens
agcaagcaccactga

SEQ ID NO: 1349364 - DNA, 15 bp, Homo sapiens
aagcaagcaccactg

SEQ ID NO: 1349365 - DNA, 15 bp, Homo sapiens
gaagcaagcaccact

SEQ ID NO: 1349366 - DNA, 15 bp, Homo sapiens
ggaagcaagcaccac

SEQ ID NO: 1349367 - DNA, 15 bp, Homo sapiens
aggaagcaagcacca

SEQ ID NO: 1349368 - DNA, 15 bp, Homo sapiens
taggaagcaagcacc

SEQ ID NO: 1349369 - DNA, 15 bp, Homo sapiens
ttaggaagcaagcac

SEQ ID NO: 1349370 - DNA, 15 bp, Homo sapiens
gttaggaagcaagca

SEQ ID NO: 1349371 - DNA, 15 bp, Homo sapiens
tgttaggaagcaagc

SEQ ID NO: 1349372 - DNA, 15 bp, Homo sapiens
gtgttaggaagcaag

SEQ ID NO: 1349373 - DNA, 15 bp, Homo sapiens
tgtgttaggaagcaa

SEQ ID NO: 1349374 - DNA, 15 bp, Homo sapiens
atgtgttaggaagca

SEQ ID NO: 1349375 - DNA, 15 bp, Homo sapiens
catgtgttaggaagc

SEQ ID NO: 1349376 - DNA, 15 bp, Homo sapiens
ccatgtgttaggaag

SEQ ID NO: 1349377 - DNA, 15 bp, Homo sapiens
gccatgtgttaggaa

SEQ ID NO: 1349378 - DNA, 15 bp, Homo sapiens
tgccatgtgttagga

SEQ ID NO: 1349379 - DNA, 15 bp, Homo sapiens
ttgccatgtgttagg

SEQ ID NO: 1349380 - DNA, 15 bp, Homo sapiens
tttgccatgtgttag

SEQ ID NO: 1349381 - DNA, 15 bp, Homo sapiens
ttttgccatgtgtta

SEQ ID NO: 1349382 - DNA, 15 bp, Homo sapiens
tttttgccatgtgtt

SEQ ID NO: 1349383 - DNA, 15 bp, Homo sapiens
gtttttgccatgtgt

SEQ ID NO: 1349384 - DNA, 15 bp, Homo sapiens
tgtttttgccatgtg

SEQ ID NO: 1349385 - DNA, 15 bp, Homo sapiens
ctgtttttgccatgt

SEQ ID NO: 1349386 - DNA, 15 bp, Homo sapiens
tctgtttttgccatg

SEQ ID NO: 1349387 - DNA, 15 bp, Homo sapiens
gtctgtttttgccat

SEQ ID NO: 1349388 - DNA, 15 bp, Homo sapiens
agtctgtttttgcca

SEQ ID NO: 1349389 - DNA, 15 bp, Homo sapiens
cagtctgtttttgcc

SEQ ID NO: 1349390 - DNA, 15 bp, Homo sapiens
tcagtctgtttttgc

SEQ ID NO: 1349391 - DNA, 15 bp, Homo sapiens
gtcagtctgtttttg

SEQ ID NO: 1349392 - DNA, 15 bp, Homo sapiens
tgtcagtctgttttt

SEQ ID NO: 1349393 - DNA, 15 bp, Homo sapiens
ctgtcagtctgtttt

SEQ ID NO: 1349394 - DNA, 15 bp, Homo sapiens
gctgtcagtctgttt

SEQ ID NO: 1349395 - DNA, 15 bp, Homo sapiens
agctgtcagtctgtt

SEQ ID NO: 1349396 - DNA, 15 bp, Homo sapiens
aagctgtcagtctgt

SEQ ID NO: 1349397 - DNA, 15 bp, Homo sapiens
taagctgtcagtctg

SEQ ID NO: 1349398 - DNA, 15 bp, Homo sapiens
ataagctgtcagtct

SEQ ID NO: 1349399 - DNA, 15 bp, Homo sapiens
aataagctgtcagtc

SEQ ID NO: 1349400 - DNA, 15 bp, Homo sapiens
taataagctgtcagt

SEQ ID NO: 1349401 - DNA, 15 bp, Homo sapiens
ctaataagctgtcag

SEQ ID NO: 1349402 - DNA, 15 bp, Homo sapiens
actaataagctgtca

SEQ ID NO: 1349403 - DNA, 15 bp, Homo sapiens
cactaataagctgtc

SEQ ID NO: 1349404 - DNA, 15 bp, Homo sapiens
gcactaataagctgt

SEQ ID NO: 1349405 - DNA, 15 bp, Homo sapiens
agcactaataagctg

SEQ ID NO: 1349406 - DNA, 15 bp, Homo sapiens
cagcactaataagct

SEQ ID NO: 1349407 - DNA, 15 bp, Homo sapiens
acagcactaataagc

SEQ ID NO: 1349408 - DNA, 15 bp, Homo sapiens
gacagcactaataag

SEQ ID NO: 1349409 - DNA, 15 bp, Homo sapiens
tgacagcactaataa

SEQ ID NO: 1349410 - DNA, 15 bp, Homo sapiens
ctgacagcactaata

SEQ ID NO: 1349411 - DNA, 15 bp, Homo sapiens
actgacagcactaat

SEQ ID NO: 1349412 - DNA, 15 bp, Homo sapiens
tactgacagcactaa

SEQ ID NO: 1349413 - DNA, 15 bp, Homo sapiens
ttactgacagcacta

SEQ ID NO: 1349414 - DNA, 15 bp, Homo sapiens
gttactgacagcact

SEQ ID NO: 1349415 - DNA, 15 bp, Homo sapiens
tgttactgacagcac

SEQ ID NO: 1349416 - DNA, 15 bp, Homo sapiens
ctgttactgacagca

SEQ ID NO: 1349417 - DNA, 15 bp, Homo sapiens
gctgttactgacagc

SEQ ID NO: 1349418 - DNA, 15 bp, Homo sapiens
agctgttactgacag

SEQ ID NO: 1349419 - DNA, 15 bp, Homo sapiens
tagctgttactgaca

SEQ ID NO: 1349420 - DNA, 15 bp, Homo sapiens
gtagctgttactgac

SEQ ID NO: 1349421 - DNA, 15 bp, Homo sapiens
tgtagctgttactga

SEQ ID NO: 1349422 - DNA, 15 bp, Homo sapiens
atgtagctgttactg

SEQ ID NO: 1349423 - DNA, 15 bp, Homo sapiens
aatgtagctgttact

SEQ ID NO: 1349424 - DNA, 15 bp, Homo sapiens
caatgtagctgttac

SEQ ID NO: 1349425 - DNA, 15 bp, Homo sapiens
tcaatgtagctgtta

SEQ ID NO: 1349426 - DNA, 15 bp, Homo sapiens
ctcaatgtagctgtt

SEQ ID NO: 1349427 - DNA, 15 bp, Homo sapiens
tctcaatgtagctgt

SEQ ID NO: 1349428 - DNA, 15 bp, Homo sapiens
gtctcaatgtagctg

SEQ ID NO: 1349429 - DNA, 15 bp, Homo sapiens
agtctcaatgtagct

SEQ ID NO: 1349430 - DNA, 15 bp, Homo sapiens
cagtctcaatgtagc

SEQ ID NO: 1349431 - DNA, 15 bp, Homo sapiens
tcagtctcaatgtag

SEQ ID NO: 1349432 - DNA, 15 bp, Homo sapiens
ttcagtctcaatgta

SEQ ID NO: 1349433 - DNA, 15 bp, Homo sapiens
tttcagtctcaatgt

SEQ ID NO: 1349434 - DNA, 15 bp, Homo sapiens
ttttcagtctcaatg

SEQ ID NO: 1349435 - DNA, 15 bp, Homo sapiens
cttttcagtctcaat

SEQ ID NO: 1349436 - DNA, 15 bp, Homo sapiens
ccttttcagtctcaa

SEQ ID NO: 1349437 - DNA, 15 bp, Homo sapiens
gccttttcagtctca

SEQ ID NO: 1349438 - DNA, 15 bp, Homo sapiens
agccttttcagtctc

SEQ ID NO: 1349439 - DNA, 15 bp, Homo sapiens
tagccttttcagtct

SEQ ID NO: 1349440 - DNA, 15 bp, Homo sapiens
ctagccttttcagtc

SEQ ID NO: 1349441 - DNA, 15 bp, Homo sapiens
cctagccttttcagt

SEQ ID NO: 1349442 - DNA, 15 bp, Homo sapiens
ccctagccttttcag

SEQ ID NO: 1349443 - DNA, 15 bp, Homo sapiens
cccctagccttttca

SEQ ID NO: 1349444 - DNA, 15 bp, Homo sapiens
tcccctagccttttc

SEQ ID NO: 1349445 - DNA, 15 bp, Homo sapiens
gtcccctagcctttt

SEQ ID NO: 1349446 - DNA, 15 bp, Homo sapiens
ggtcccctagccttt

SEQ ID NO: 1349447 - DNA, 15 bp, Homo sapiens
gggtcccctagcctt

SEQ ID NO: 1349448 - DNA, 15 bp, Homo sapiens
tgggtcccctagcct

SEQ ID NO: 1349449 - DNA, 15 bp, Homo sapiens
ttgggtcccctagcc

SEQ ID NO: 1349450 - DNA, 15 bp, Homo sapiens
cttgggtcccctagc

SEQ ID NO: 1349451 - DNA, 15 bp, Homo sapiens
gcttgggtcccctag

SEQ ID NO: 1349452 - DNA, 15 bp, Homo sapiens
ggcttgggtccccta

SEQ ID NO: 1349453 - DNA, 15 bp, Homo sapiens
tggcttgggtcccct

SEQ ID NO: 1349454 - DNA, 15 bp, Homo sapiens
gtggcttgggtcccc

SEQ ID NO: 1349455 - DNA, 15 bp, Homo sapiens
tgtggcttgggtccc

SEQ ID NO: 1349456 - DNA, 15 bp, Homo sapiens
atgtggcttgggtcc

SEQ ID NO: 1349457 - DNA, 15 bp, Homo sapiens
tatgtggcttgggtc

SEQ ID NO: 1349458 - DNA, 15 bp, Homo sapiens
ctatgtggcttgggt

SEQ ID NO: 1349459 - DNA, 15 bp, Homo sapiens
gctatgtggcttggg

SEQ ID NO: 1349460 - DNA, 15 bp, Homo sapiens
agctatgtggcttgg

SEQ ID NO: 1349461 - DNA, 15 bp, Homo sapiens
tagctatgtggcttg

SEQ ID NO: 1349462 - DNA, 15 bp, Homo sapiens
atagctatgtggctt

SEQ ID NO: 1349463 - DNA, 15 bp, Homo sapiens
aatagctatgtggct

SEQ ID NO: 1349464 - DNA, 15 bp, Homo sapiens
taatagctatgtggc

SEQ ID NO: 1349465 - DNA, 15 bp, Homo sapiens
ttaatagctatgtgg

SEQ ID NO: 1349466 - DNA, 15 bp, Homo sapiens
attaatagctatgtg

SEQ ID NO: 1349467 - DNA, 15 bp, Homo sapiens
tattaatagctatgt

SEQ ID NO: 1349468 - DNA, 15 bp, Homo sapiens
ttattaatagctatg

SEQ ID NO: 1349469 - DNA, 15 bp, Homo sapiens
tttattaatagctat

SEQ ID NO: 1349470 - DNA, 15 bp, Homo sapiens
ttttattaatagcta

SEQ ID NO: 1349471 - DNA, 15 bp, Homo sapiens
cttttattaatagct

SEQ ID NO: 1349472 - DNA, 15 bp, Homo sapiens
ccttttattaatagc

SEQ ID NO: 1349473 - DNA, 15 bp, Homo sapiens
tccttttattaatag

SEQ ID NO: 1349474 - DNA, 15 bp, Homo sapiens
gtccttttattaata

SEQ ID NO: 1349475 - DNA, 15 bp, Homo sapiens
tgtccttttattaat

SEQ ID NO: 1349476 - DNA, 15 bp, Homo sapiens
catgtccttttatta

SEQ ID NO: 1349477 - DNA, 15 bp, Homo sapiens
tcatgtccttttatt

SEQ ID NO: 1349478 - DNA, 15 bp, Homo sapiens
ttcatgtccttttat

SEQ ID NO: 1349479 - DNA, 15 bp, Homo sapiens
attcatgtcctttta

SEQ ID NO: 1349480 - DNA, 15 bp, Homo sapiens
cattcatgtcctttt

SEQ ID NO: 1349481 - DNA, 15 bp, Homo sapiens
gcattcatgtccttt

SEQ ID NO: 1349482 - DNA, 15 bp, Homo sapiens
tgcattcatgtcctt

SEQ ID NO: 1349483 - DNA, 15 bp, Homo sapiens
atgcattcatgtcct

SEQ ID NO: 1349484 - DNA, 15 bp, Homo sapiens
aatgcattcatgtcc

SEQ ID NO: 1349485 - DNA, 15 bp, Homo sapiens
aaatgcattcatgtc

SEQ ID NO: 1349486 - DNA, 15 bp, Homo sapiens
aaaatgcattcatgt

SEQ ID NO: 1349487 - DNA, 15 bp, Homo sapiens
taaaatgcattcatg

SEQ ID NO: 1349488 - DNA, 15 bp, Homo sapiens
gtaaaatgcattcat

SEQ ID NO: 1349489 - DNA, 15 bp, Homo sapiens
ggtaaaatgcattca

SEQ ID NO: 1349490 - DNA, 15 bp, Homo sapiens
gggtaaaatgcattc

SEQ ID NO: 1349491 - DNA, 15 bp, Homo sapiens
ggggtaaaatgcatt

SEQ ID NO: 1349492 - DNA, 15 bp, Homo sapiens
tggggtaaaatgcat

SEQ ID NO: 1349493 - DNA, 15 bp, Homo sapiens
gtggggtaaaatgca

SEQ ID NO: 1349494 - DNA, 15 bp, Homo sapiens
tgtggggtaaaatgc

SEQ ID NO: 1349495 - DNA, 15 bp, Homo sapiens
ttgtggggtaaaatg

SEQ ID NO: 1349496 - DNA, 15 bp, Homo sapiens
attgtggggtaaaat

SEQ ID NO: 1349497 - DNA, 15 bp, Homo sapiens
gattgtggggtaaaa

SEQ ID NO: 1349498 - DNA, 15 bp, Homo sapiens
ggattgtggggtaaa

SEQ ID NO: 1349499 - DNA, 15 bp, Homo sapiens
tggattgtggggtaa

SEQ ID NO: 1349500 - DNA, 15 bp, Homo sapiens
ttggattgtggggta

SEQ ID NO: 1349501 - DNA, 15 bp, Homo sapiens
cttggattgtggggt

SEQ ID NO: 1349502 - DNA, 15 bp, Homo sapiens
tcttggattgtgggg

SEQ ID NO: 1349503 - DNA, 15 bp, Homo sapiens
ttcttggattgtggg

SEQ ID NO: 1349504 - DNA, 15 bp, Homo sapiens
gttcttggattgtgg

SEQ ID NO: 1349505 - DNA, 15 bp, Homo sapiens
agttcttggattgtg

SEQ ID NO: 1349506 - DNA, 15 bp, Homo sapiens
cagttcttggattgt

SEQ ID NO: 1349507 - DNA, 15 bp, Homo sapiens
tcagttcttggattg

SEQ ID NO: 1349508 - DNA, 15 bp, Homo sapiens
gtcagttcttggatt

SEQ ID NO: 1349509 - DNA, 15 bp, Homo sapiens
tgtcagttcttggat

SEQ ID NO: 1349510 - DNA, 15 bp, Homo sapiens
ttgtcagttcttgga

SEQ ID NO: 1349511 - DNA, 15 bp, Homo sapiens
tttgtcagttcttgg

SEQ ID NO: 1349512 - DNA, 15 bp, Homo sapiens
ttttgtcagttcttg

SEQ ID NO: 1349513 - DNA, 15 bp, Homo sapiens
gttttgtcagttctt

SEQ ID NO: 1349514 - DNA, 15 bp, Homo sapiens
agttttgtcagttct

SEQ ID NO: 1349515 - DNA, 15 bp, Homo sapiens
tagttttgtcagttc

SEQ ID NO: 1349516 - DNA, 15 bp, Homo sapiens
gtagttttgtcagtt

SEQ ID NO: 1349517 - DNA, 15 bp, Homo sapiens
agtagttttgtcagt

SEQ ID NO: 1349518 - DNA, 15 bp, Homo sapiens
gagtagttttgtcag

SEQ ID NO: 1349519 - DNA, 15 bp, Homo sapiens
tgagtagttttgtca

SEQ ID NO: 1349520 - DNA, 15 bp, Homo sapiens
ctgagtagttttgtc

SEQ ID NO: 1349521 - DNA, 15 bp, Homo sapiens
gctgagtagttttgt

SEQ ID NO: 1349522 - DNA, 15 bp, Homo sapiens
agctgagtagttttg

SEQ ID NO: 1349523 - DNA, 15 bp, Homo sapiens
aagctgagtagtttt

SEQ ID NO: 1349524 - DNA, 15 bp, Homo sapiens
gaagctgagtagttt

SEQ ID NO: 1349525 - DNA, 15 bp, Homo sapiens
ggaagctgagtagtt

SEQ ID NO: 1349526 - DNA, 15 bp, Homo sapiens
cggaagctgagtagt

SEQ ID NO: 1349527 - DNA, 15 bp, Homo sapiens
gcggaagctgagtag

SEQ ID NO: 1349528 - DNA, 15 bp, Homo sapiens
ggcggaagctgagta

SEQ ID NO: 1349529 - DNA, 15 bp, Homo sapiens
aggcggaagctgagt

SEQ ID NO: 1349530 - DNA, 15 bp, Homo sapiens
taggcggaagctgag

SEQ ID NO: 1349531 - DNA, 15 bp, Homo sapiens
ataggcggaagctga

SEQ ID NO: 1349532 - DNA, 15 bp, Homo sapiens
cataggcggaagctg

SEQ ID NO: 1349533 - DNA, 15 bp, Homo sapiens
gcataggcggaagct

SEQ ID NO: 1349534 - DNA, 15 bp, Homo sapiens
cgcataggcggaagc

SEQ ID NO: 1349535 - DNA, 15 bp, Homo sapiens
ccgcataggcggaag

SEQ ID NO: 1349536 - DNA, 15 bp, Homo sapiens
gccgcataggcggaa

SEQ ID NO: 1349537 - DNA, 15 bp, Homo sapiens
agccgcataggcgga

SEQ ID NO: 1349538 - DNA, 15 bp, Homo sapiens
cagccgcataggcgg

SEQ ID NO: 1349539 - DNA, 15 bp, Homo sapiens
ccagccgcataggcg

SEQ ID NO: 1349540 - DNA, 15 bp, Homo sapiens
gccagccgcataggc

SEQ ID NO: 1349541 - DNA, 15 bp, Homo sapiens
tgccagccgcatagg

SEQ ID NO: 1349542 - DNA, 15 bp, Homo sapiens
atgccagccgcatag

SEQ ID NO: 1349543 - DNA, 15 bp, Homo sapiens
aatgccagccgcata

SEQ ID NO: 1349544 - DNA, 15 bp, Homo sapiens
gaatgccagccgcat

SEQ ID NO: 1349545 - DNA, 15 bp, Homo sapiens
ggaatgccagccgca

SEQ ID NO: 1349546 - DNA, 15 bp, Homo sapiens
aggaatgccagccgc

SEQ ID NO: 1349547 - DNA, 15 bp, Homo sapiens
aaggaatgccagccg

SEQ ID NO: 1349548 - DNA, 15 bp, Homo sapiens
taaggaatgccagcc

SEQ ID NO: 1349549 - DNA, 15 bp, Homo sapiens
ttaaggaatgccagc

SEQ ID NO: 1349550 - DNA, 15 bp, Homo sapiens
attaaggaatgccag

SEQ ID NO: 1349551 - DNA, 15 bp, Homo sapiens
aattaaggaatgcca

SEQ ID NO: 1349552 - DNA, 15 bp, Homo sapiens
gaattaaggaatgcc

SEQ ID NO: 1349553 - DNA, 15 bp, Homo sapiens
ggaattaaggaatgc

SEQ ID NO: 1349554 - DNA, 15 bp, Homo sapiens
gggaattaaggaatg

SEQ ID NO: 1349555 - DNA, 15 bp, Homo sapiens
agggaattaaggaat

SEQ ID NO: 1349556 - DNA, 15 bp, Homo sapiens
aagggaattaaggaa

SEQ ID NO: 1349557 - DNA, 15 bp, Homo sapiens
aaagggaattaagga

SEQ ID NO: 1349558 - DNA, 15 bp, Homo sapiens
aaaagggaattaagg

SEQ ID NO: 1349559 - DNA, 15 bp, Homo sapiens
caaaagggaattaag

SEQ ID NO: 1349560 - DNA, 15 bp, Homo sapiens
gcaaaagggaattaa

SEQ ID NO: 1349561 - DNA, 15 bp, Homo sapiens
agcaaaagggaatta

SEQ ID NO: 1349562 - DNA, 15 bp, Homo sapiens
cagcaaaagggaatt

SEQ ID NO: 1349563 - DNA, 15 bp, Homo sapiens
gcagcaaaagggaat

SEQ ID NO: 1349564 - DNA, 15 bp, Homo sapiens
ggcagcaaaagggaa

SEQ ID NO: 1349565 - DNA, 15 bp, Homo sapiens
gggcagcaaaaggga

SEQ ID NO: 1349566 - DNA, 15 bp, Homo sapiens
tgggcagcaaaaggg

SEQ ID NO: 1349567 - DNA, 15 bp, Homo sapiens
atgggcagcaaaagg

SEQ ID NO: 1349568 - DNA, 15 bp, Homo sapiens
catgggcagcaaaag

SEQ ID NO: 1349569 - DNA, 15 bp, Homo sapiens
ccatgggcagcaaaa

SEQ ID NO: 1349570 - DNA, 15 bp, Homo sapiens
accatgggcagcaaa

SEQ ID NO: 1349571 - DNA, 15 bp, Homo sapiens
aaccatgggcagcaa

SEQ ID NO: 1349572 - DNA, 15 bp, Homo sapiens
taaccatgggcagca

SEQ ID NO: 1349573 - DNA, 15 bp, Homo sapiens
ctaaccatgggcagc

SEQ ID NO: 1349574 - DNA, 15 bp, Homo sapiens
cctaaccatgggcag

SEQ ID NO: 1349575 - DNA, 15 bp, Homo sapiens
gcctaaccatgggca

SEQ ID NO: 1349576 - DNA, 15 bp, Homo sapiens
ggcctaaccatgggc

SEQ ID NO: 1349577 - DNA, 15 bp, Homo sapiens
gggcctaaccatggg

SEQ ID NO: 1349578 - DNA, 15 bp, Homo sapiens
tgggcctaaccatgg

SEQ ID NO: 1349579 - DNA, 15 bp, Homo sapiens
ttgggcctaaccatg

SEQ ID NO: 1349580 - DNA, 15 bp, Homo sapiens
tttgggcctaaccat

SEQ ID NO: 1349581 - DNA, 15 bp, Homo sapiens
atttgggcctaacca

SEQ ID NO: 1349582 - DNA, 15 bp, Homo sapiens
tatttgggcctaacc

SEQ ID NO: 1349583 - DNA, 15 bp, Homo sapiens
ttatttgggcctaac

SEQ ID NO: 1349584 - DNA, 15 bp, Homo sapiens
gttatttgggcctaa

SEQ ID NO: 1349585 - DNA, 15 bp, Homo sapiens
tgttatttgggccta

SEQ ID NO: 1349586 - DNA, 15 bp, Homo sapiens
gtgttatttgggcct

SEQ ID NO: 1349587 - DNA, 15 bp, Homo sapiens
tgtgttatttgggcc

SEQ ID NO: 1349588 - DNA, 15 bp, Homo sapiens
atgtgttatttgggc

SEQ ID NO: 1349589 - DNA, 15 bp, Homo sapiens
catgtgttatttggg

SEQ ID NO: 1349590 - DNA, 15 bp, Homo sapiens
ccatgtgttatttgg

SEQ ID NO: 1349591 - DNA, 15 bp, Homo sapiens
accatgtgttatttg

SEQ ID NO: 1349592 - DNA, 15 bp, Homo sapiens
caccatgtgttattt

SEQ ID NO: 1349593 - DNA, 15 bp, Homo sapiens
tcaccatgtgttatt

SEQ ID NO: 1349594 - DNA, 15 bp, Homo sapiens
ttcaccatgtgttat

SEQ ID NO: 1349595 - DNA, 15 bp, Homo sapiens
gttcaccatgtgtta

SEQ ID NO: 1349596 - DNA, 15 bp, Homo sapiens
tgttcaccatgtgtt

SEQ ID NO: 1349597 - DNA, 15 bp, Homo sapiens
gtgttcaccatgtgt

SEQ ID NO: 1349598 - DNA, 15 bp, Homo sapiens
agtgttcaccatgtg

SEQ ID NO: 1349599 - DNA, 15 bp, Homo sapiens
cagtgttcaccatgt

SEQ ID NO: 1349600 - DNA, 15 bp, Homo sapiens
ccagtgttcaccatg

SEQ ID NO: 1349601 - DNA, 15 bp, Homo sapiens
tccagtgttcaccat

SEQ ID NO: 1349602 - DNA, 15 bp, Homo sapiens
atccagtgttcacca

SEQ ID NO: 1349603 - DNA, 15 bp, Homo sapiens
gatccagtgttcacc

SEQ ID NO: 1349604 - DNA, 15 bp, Homo sapiens
cgatccagtgttcac

SEQ ID NO: 1349605 - DNA, 15 bp, Homo sapiens
ccgatccagtgttca

SEQ ID NO: 1349606 - DNA, 15 bp, Homo sapiens
cccgatccagtgttc

SEQ ID NO: 1349607 - DNA, 15 bp, Homo sapiens
ccccgatccagtgtt

SEQ ID NO: 1349608 - DNA, 15 bp, Homo sapiens
cccccgatccagtgt

SEQ ID NO: 1349609 - DNA, 15 bp, Homo sapiens
ccccccgatccagtg

SEQ ID NO: 1349610 - DNA, 15 bp, Homo sapiens
accccccgatccagt

SEQ ID NO: 1349611 - DNA, 15 bp, Homo sapiens
gaccccccgatccag

SEQ ID NO: 1349612 - DNA, 15 bp, Homo sapiens
cgaccccccgatcca

SEQ ID NO: 1349613 - DNA, 15 bp, Homo sapiens
tcgaccccccgatcc

SEQ ID NO: 1349614 - DNA, 15 bp, Homo sapiens
atcgaccccccgatc

SEQ ID NO: 1349615 - DNA, 15 bp, Homo sapiens
catcgaccccccgat

SEQ ID NO: 1349616 - DNA, 15 bp, Homo sapiens
ccatcgaccccccga

SEQ ID NO: 1349617 - DNA, 15 bp, Homo sapiens
tccatcgaccccccg

SEQ ID NO: 1349618 - DNA, 15 bp, Homo sapiens
atccatcgacccccc

SEQ ID NO: 1349619 - DNA, 15 bp, Homo sapiens
catccatcgaccccc

SEQ ID NO: 1349620 - DNA, 15 bp, Homo sapiens
ccatccatcgacccc

SEQ ID NO: 1349621 - DNA, 15 bp, Homo sapiens
cccatccatcgaccc

SEQ ID NO: 1349622 - DNA, 15 bp, Homo sapiens
gcccatccatcgacc

SEQ ID NO: 1349623 - DNA, 15 bp, Homo sapiens
tgcccatccatcgac

SEQ ID NO: 1349624 - DNA, 15 bp, Homo sapiens
ctgcccatccatcga

SEQ ID NO: 1349625 - DNA, 15 bp, Homo sapiens
tctgcccatccatcg

SEQ ID NO: 1349626 - DNA, 15 bp, Homo sapiens
atctgcccatccatc

SEQ ID NO: 1349627 - DNA, 15 bp, Homo sapiens
catctgcccatccat

SEQ ID NO: 1349628 - DNA, 15 bp, Homo sapiens
ccatctgcccatcca

SEQ ID NO: 1349629 - DNA, 15 bp, Homo sapiens
tccatctgcccatcc

SEQ ID NO: 1349630 - DNA, 15 bp, Homo sapiens
atccatctgcccatc

SEQ ID NO: 1349631 - DNA, 15 bp, Homo sapiens
catccatctgcccat

SEQ ID NO: 1349632 - DNA, 15 bp, Homo sapiens
tcatccatctgccca

SEQ ID NO: 1349633 - DNA, 15 bp, Homo sapiens
ttcatccatctgccc

SEQ ID NO: 1349634 - DNA, 15 bp, Homo sapiens
attcatccatctgcc

SEQ ID NO: 1349635 - DNA, 15 bp, Homo sapiens
cattcatccatctgc

SEQ ID NO: 1349636 - DNA, 15 bp, Homo sapiens
ccattcatccatctg

SEQ ID NO: 1349637 - DNA, 15 bp, Homo sapiens
tccattcatccatct

SEQ ID NO: 1349638 - DNA, 15 bp, Homo sapiens
atccattcatccatc

SEQ ID NO: 1349639 - DNA, 15 bp, Homo sapiens
aatccattcatccat

SEQ ID NO: 1349640 - DNA, 15 bp, Homo sapiens
taatccattcatcca

SEQ ID NO: 1349641 - DNA, 15 bp, Homo sapiens
ttaatccattcatcc

SEQ ID NO: 1349642 - DNA, 15 bp, Homo sapiens
attaatccattcatc

SEQ ID NO: 1349643 - DNA, 15 bp, Homo sapiens
cattaatccattcat

SEQ ID NO: 1349644 - DNA, 15 bp, Homo sapiens
ccattaatccattca

SEQ ID NO: 1349645 - DNA, 15 bp, Homo sapiens
tccattaatccattc

SEQ ID NO: 1349646 - DNA, 15 bp, Homo sapiens
atccattaatccatt

SEQ ID NO: 1349647 - DNA, 15 bp, Homo sapiens
catccattaatccat

SEQ ID NO: 1349648 - DNA, 15 bp, Homo sapiens
tcatccattaatcca

SEQ ID NO: 1349649 - DNA, 15 bp, Homo sapiens
ttcatccattaatcc

SEQ ID NO: 1349650 - DNA, 15 bp, Homo sapiens
gttcatccattaatc

SEQ ID NO: 1349651 - DNA, 15 bp, Homo sapiens
tgttcatccattaat

SEQ ID NO: 1349652 - DNA, 15 bp, Homo sapiens
ctgttcatccattaa

SEQ ID NO: 1349653 - DNA, 15 bp, Homo sapiens
tctgttcatccatta

SEQ ID NO: 1349654 - DNA, 15 bp, Homo sapiens
atctgttcatccatt

SEQ ID NO: 1349655 - DNA, 15 bp, Homo sapiens
catctgttcatccat

SEQ ID NO: 1349656 - DNA, 15 bp, Homo sapiens
tcatctgttcatcca

SEQ ID NO: 1349657 - DNA, 15 bp, Homo sapiens
ttcatctgttcatcc

SEQ ID NO: 1349658 - DNA, 15 bp, Homo sapiens
attcatctgttcatc

SEQ ID NO: 1349659 - DNA, 15 bp, Homo sapiens
tattcatctgttcat

SEQ ID NO: 1349660 - DNA, 15 bp, Homo sapiens
ttattcatctgttca

SEQ ID NO: 1349661 - DNA, 15 bp, Homo sapiens
attattcatctgttc

SEQ ID NO: 1349662 - DNA, 15 bp, Homo sapiens
aattattcatctgtt

SEQ ID NO: 1349663 - DNA, 15 bp, Homo sapiens
caattattcatctgt

SEQ ID NO: 1349664 - DNA, 15 bp, Homo sapiens
acaattattcatctg

SEQ ID NO: 1349665 - DNA, 15 bp, Homo sapiens
aacaattattcatct

SEQ ID NO: 1349666 - DNA, 15 bp, Homo sapiens
gaacaattattcatc

SEQ ID NO: 1349667 - DNA, 15 bp, Homo sapiens
ggaacaattattcat

SEQ ID NO: 1349668 - DNA, 15 bp, Homo sapiens
aggaacaattattca

SEQ ID NO: 1349669 - DNA, 15 bp, Homo sapiens
aaggaacaattattc

SEQ ID NO: 1349670 - DNA, 15 bp, Homo sapiens
caaggaacaattatt

SEQ ID NO: 1349671 - DNA, 15 bp, Homo sapiens
tcaaggaacaattat

SEQ ID NO: 1349672 - DNA, 15 bp, Homo sapiens
gtcaaggaacaatta

SEQ ID NO: 1349673 - DNA, 15 bp, Homo sapiens
agtcaaggaacaatt

SEQ ID NO: 1349674 - DNA, 15 bp, Homo sapiens
tagtcaaggaacaat

SEQ ID NO: 1349675 - DNA, 15 bp, Homo sapiens
atagtcaaggaacaa

SEQ ID NO: 1349676 - DNA, 15 bp, Homo sapiens
tatagtcaaggaaca

SEQ ID NO: 1349677 - DNA, 15 bp, Homo sapiens
ctatagtcaaggaac

SEQ ID NO: 1349678 - DNA, 15 bp, Homo sapiens
gctatagtcaaggaa

SEQ ID NO: 1349679 - DNA, 15 bp, Homo sapiens
ggctatagtcaagga

SEQ ID NO: 1349680 - DNA, 15 bp, Homo sapiens
tggctatagtcaagg

SEQ ID NO: 1349681 - DNA, 15 bp, Homo sapiens
ctggctatagtcaag

SEQ ID NO: 1349682 - DNA, 15 bp, Homo sapiens
cctggctatagtcaa

SEQ ID NO: 1349683 - DNA, 15 bp, Homo sapiens
acctggctatagtca

SEQ ID NO: 1349684 - DNA, 15 bp, Homo sapiens
tacctggctatagtc

SEQ ID NO: 1349685 - DNA, 15 bp, Homo sapiens
ctacctggctatagt

SEQ ID NO: 1349686 - DNA, 15 bp, Homo sapiens
tctacctggctatag

SEQ ID NO: 1349687 - DNA, 15 bp, Homo sapiens
gtctacctggctata

SEQ ID NO: 1349688 - DNA, 15 bp, Homo sapiens
tgtctacctggctat

SEQ ID NO: 1349689 - DNA, 15 bp, Homo sapiens
ttgtctacctggcta

SEQ ID NO: 1349690 - DNA, 15 bp, Homo sapiens
tttgtctacctggct

SEQ ID NO: 1349691 - DNA, 15 bp, Homo sapiens
ctttgtctacctggc

SEQ ID NO: 1349692 - DNA, 15 bp, Homo sapiens
tctttgtctacctgg

SEQ ID NO: 1349693 - DNA, 15 bp, Homo sapiens
ttctttgtctacctg

SEQ ID NO: 1349694 - DNA, 15 bp, Homo sapiens
attctttgtctacct

SEQ ID NO: 1349695 - DNA, 15 bp, Homo sapiens
cattctttgtctacc

SEQ ID NO: 1349696 - DNA, 15 bp, Homo sapiens
tcattctttgtctac

SEQ ID NO: 1349697 - DNA, 15 bp, Homo sapiens
ctcattctttgtcta

SEQ ID NO: 1349698 - DNA, 15 bp, Homo sapiens
tctcattctttgtct

SEQ ID NO: 1349699 - DNA, 15 bp, Homo sapiens
ctctcattctttgtc

SEQ ID NO: 1349700 - DNA, 15 bp, Homo sapiens
tctctcattctttgt

SEQ ID NO: 1349701 - DNA, 15 bp, Homo sapiens
ctctctcattctttg

SEQ ID NO: 1349702 - DNA, 15 bp, Homo sapiens
cctctctcattcttt

SEQ ID NO: 1349703 - DNA, 15 bp, Homo sapiens
ccctctctcattctt

SEQ ID NO: 1349704 - DNA, 15 bp, Homo sapiens
tccctctctcattct

SEQ ID NO: 1349705 - DNA, 15 bp, Homo sapiens
ttccctctctcattc

SEQ ID NO: 1349706 - DNA, 15 bp, Homo sapiens
tttccctctctcatt

SEQ ID NO: 1349707 - DNA, 15 bp, Homo sapiens
atttccctctctcat

SEQ ID NO: 1349708 - DNA, 15 bp, Homo sapiens
aatttccctctctca

SEQ ID NO: 1349709 - DNA, 15 bp, Homo sapiens
gaatttccctctctc

SEQ ID NO: 1349710 - DNA, 15 bp, Homo sapiens
tgaatttccctctct

SEQ ID NO: 1349711 - DNA, 15 bp, Homo sapiens
ttgaatttccctctc

SEQ ID NO: 1349712 - DNA, 15 bp, Homo sapiens
tttgaatttccctct

SEQ ID NO: 1349713 - DNA, 15 bp, Homo sapiens
atttgaatttccctc

SEQ ID NO: 1349714 - DNA, 15 bp, Homo sapiens
gatttgaatttccct

SEQ ID NO: 1349715 - DNA, 15 bp, Homo sapiens
agatttgaatttccc

SEQ ID NO: 1349716 - DNA, 15 bp, Homo sapiens
gagatttgaatttcc

SEQ ID NO: 1349717 - DNA, 15 bp, Homo sapiens
tgagatttgaatttc

SEQ ID NO: 1349718 - DNA, 15 bp, Homo sapiens
ctgagatttgaattt

SEQ ID NO: 1349719 - DNA, 15 bp, Homo sapiens
cctgagatttgaatt

SEQ ID NO: 1349720 - DNA, 15 bp, Homo sapiens
acctgagatttgaat

SEQ ID NO: 1349721 - DNA, 15 bp, Homo sapiens
cacctgagatttgaa

SEQ ID NO: 1349722 - DNA, 15 bp, Homo sapiens
acacctgagatttga

SEQ ID NO: 1349723 - DNA, 15 bp, Homo sapiens
cacacctgagatttg

SEQ ID NO: 1349724 - DNA, 15 bp, Homo sapiens
gcacacctgagattt

SEQ ID NO: 1349725 - DNA, 15 bp, Homo sapiens
agcacacctgagatt

SEQ ID NO: 1349726 - DNA, 15 bp, Homo sapiens
tagcacacctgagat

SEQ ID NO: 1349727 - DNA, 15 bp, Homo sapiens
atagcacacctgaga

SEQ ID NO: 1349728 - DNA, 15 bp, Homo sapiens
aatagcacacctgag

SEQ ID NO: 1349729 - DNA, 15 bp, Homo sapiens
aaatagcacacctga

SEQ ID NO: 1349730 - DNA, 15 bp, Homo sapiens
caaatagcacacctg

SEQ ID NO: 1349731 - DNA, 15 bp, Homo sapiens
acaaatagcacacct

SEQ ID NO: 1349732 - DNA, 15 bp, Homo sapiens
gacaaatagcacacc

SEQ ID NO: 1349733 - DNA, 15 bp, Homo sapiens
tgacaaatagcacac

SEQ ID NO: 1349734 - DNA, 15 bp, Homo sapiens
gtgacaaatagcaca

SEQ ID NO: 1349735 - DNA, 15 bp, Homo sapiens
tgtgacaaatagcac

SEQ ID NO: 1349736 - DNA, 15 bp, Homo sapiens
ttgtgacaaatagca

SEQ ID NO: 1349737 - DNA, 15 bp, Homo sapiens
attgtgacaaatagc

SEQ ID NO: 1349738 - DNA, 15 bp, Homo sapiens
aattgtgacaaatag

SEQ ID NO: 1349739 - DNA, 15 bp, Homo sapiens
gaattgtgacaaata

SEQ ID NO: 1349740 - DNA, 15 bp, Homo sapiens
tgaattgtgacaaat

SEQ ID NO: 1349741 - DNA, 15 bp, Homo sapiens
ttgaattgtgacaaa

SEQ ID NO: 1349742 - DNA, 15 bp, Homo sapiens
tttgaattgtgacaa

SEQ ID NO: 1349743 - DNA, 15 bp, Homo sapiens
atttgaattgtgaca

SEQ ID NO: 1349744 - DNA, 15 bp, Homo sapiens
aatttgaattgtgac

SEQ ID NO: 1349745 - DNA, 15 bp, Homo sapiens
taatttgaattgtga

SEQ ID NO: 1349746 - DNA, 15 bp, Homo sapiens
ttaatttgaattgtg

SEQ ID NO: 1349747 - DNA, 15 bp, Homo sapiens
tttaatttgaattgt

SEQ ID NO: 1349748 - DNA, 15 bp, Homo sapiens
ttttaatttgaattg

SEQ ID NO: 1349749 - DNA, 15 bp, Homo sapiens
cttttaatttgaatt

SEQ ID NO: 1349750 - DNA, 15 bp, Homo sapiens
ccttttaatttgaat

SEQ ID NO: 1349751 - DNA, 15 bp, Homo sapiens
accttttaatttgaa

SEQ ID NO: 1349752 - DNA, 15 bp, Homo sapiens
caccttttaatttga

SEQ ID NO: 1349753 - DNA, 15 bp, Homo sapiens
acaccttttaatttg

SEQ ID NO: 1349754 - DNA, 15 bp, Homo sapiens
aacaccttttaattt

SEQ ID NO: 1349755 - DNA, 15 bp, Homo sapiens
caacaccttttaatt

SEQ ID NO: 1349756 - DNA, 15 bp, Homo sapiens
ccaacaccttttaat

SEQ ID NO: 1349757 - DNA, 15 bp, Homo sapiens
cccaacaccttttaa

SEQ ID NO: 1349758 - DNA, 15 bp, Homo sapiens
tcccaacacctttta

SEQ ID NO: 1349759 - DNA, 15 bp, Homo sapiens
ctcccaacacctttt

SEQ ID NO: 1349760 - DNA, 15 bp, Homo sapiens
tctcccaacaccttt

SEQ ID NO: 1349761 - DNA, 15 bp, Homo sapiens
ttctcccaacacctt

SEQ ID NO: 1349762 - DNA, 15 bp, Homo sapiens
tttctcccaacacct

SEQ ID NO: 1349763 - DNA, 15 bp, Homo sapiens
ttttctcccaacacc

SEQ ID NO: 1349764 - DNA, 15 bp, Homo sapiens
attttctcccaacac

SEQ ID NO: 1349765 - DNA, 15 bp, Homo sapiens
cattttctcccaaca

SEQ ID NO: 1349766 - DNA, 15 bp, Homo sapiens
ccattttctcccaac

SEQ ID NO: 1349767 - DNA, 15 bp, Homo sapiens
cccattttctcccaa

SEQ ID NO: 1349768 - DNA, 15 bp, Homo sapiens
tcccattttctccca

SEQ ID NO: 1349769 - DNA, 15 bp, Homo sapiens
gtcccattttctccc

SEQ ID NO: 1349770 - DNA, 15 bp, Homo sapiens
agtcccattttctcc

SEQ ID NO: 1349771 - DNA, 15 bp, Homo sapiens
tagtcccattttctc

SEQ ID NO: 1349772 - DNA, 15 bp, Homo sapiens
gtagtcccattttct

SEQ ID NO: 1349773 - DNA, 15 bp, Homo sapiens
agtagtcccattttc

SEQ ID NO: 1349774 - DNA, 15 bp, Homo sapiens
tagtagtcccatttt

SEQ ID NO: 1349775 - DNA, 15 bp, Homo sapiens
ttagtagtcccattt

SEQ ID NO: 1349776 - DNA, 15 bp, Homo sapiens
gttagtagtcccatt

SEQ ID NO: 1349777 - DNA, 15 bp, Homo sapiens
agttagtagtcccat

SEQ ID NO: 1349778 - DNA, 15 bp, Homo sapiens
tagttagtagtccca

SEQ ID NO: 1349779 - DNA, 15 bp, Homo sapiens
ttagttagtagtccc

SEQ ID NO: 1349780 - DNA, 15 bp, Homo sapiens
tttagttagtagtcc

SEQ ID NO: 1349781 - DNA, 15 bp, Homo sapiens
ttttagttagtagtc

SEQ ID NO: 1349782 - DNA, 15 bp, Homo sapiens
attttagttagtagt

SEQ ID NO: 1349783 - DNA, 15 bp, Homo sapiens
aattttagttagtag

SEQ ID NO: 1349784 - DNA, 15 bp, Homo sapiens
gaattttagttagta

SEQ ID NO: 1349785 - DNA, 15 bp, Homo sapiens
tgaattttagttagt

SEQ ID NO: 1349786 - DNA, 15 bp, Homo sapiens
ttgaattttagttag

SEQ ID NO: 1349787 - DNA, 15 bp, Homo sapiens
tttgaattttagtta

SEQ ID NO: 1349788 - DNA, 15 bp, Homo sapiens
atttgaattttagtt

SEQ ID NO: 1349789 - DNA, 15 bp, Homo sapiens
aatttgaattttagt

SEQ ID NO: 1349790 - DNA, 15 bp, Homo sapiens
taatttgaattttag

SEQ ID NO: 1349791 - DNA, 15 bp, Homo sapiens
ataatttgaatttta

SEQ ID NO: 1349792 - DNA, 15 bp, Homo sapiens
cataatttgaatttt

SEQ ID NO: 1349793 - DNA, 15 bp, Homo sapiens
ccataatttgaattt

SEQ ID NO: 1349794 - DNA, 15 bp, Homo sapiens
tccataatttgaatt

SEQ ID NO: 1349795 - DNA, 15 bp, Homo sapiens
atccataatttgaat

SEQ ID NO: 1349796 - DNA, 15 bp, Homo sapiens
aatccataatttgaa

SEQ ID NO: 1349797 - DNA, 15 bp, Homo sapiens
aaatccataatttga

SEQ ID NO: 1349798 - DNA, 15 bp, Homo sapiens
gaaatccataatttg

SEQ ID NO: 1349799 - DNA, 15 bp, Homo sapiens
tgaaatccataattt

SEQ ID NO: 1349800 - DNA, 15 bp, Homo sapiens
ctgaaatccataatt

SEQ ID NO: 1349801 - DNA, 15 bp, Homo sapiens
gctgaaatccataat

SEQ ID NO: 1349802 - DNA, 15 bp, Homo sapiens
agctgaaatccataa

SEQ ID NO: 1349803 - DNA, 15 bp, Homo sapiens
aagctgaaatccata

SEQ ID NO: 1349804 - DNA, 15 bp, Homo sapiens
caagctgaaatccat

SEQ ID NO: 1349805 - DNA, 15 bp, Homo sapiens
acaagctgaaatcca

SEQ ID NO: 1349806 - DNA, 15 bp, Homo sapiens
aacaagctgaaatcc

SEQ ID NO: 1349807 - DNA, 15 bp, Homo sapiens
aaacaagctgaaatc

SEQ ID NO: 1349808 - DNA, 15 bp, Homo sapiens
aaaacaagctgaaat

SEQ ID NO: 1349809 - DNA, 15 bp, Homo sapiens
caaaacaagctgaaa

SEQ ID NO: 1349810 - DNA, 15 bp, Homo sapiens
gcaaaacaagctgaa

SEQ ID NO: 1349811 - DNA, 15 bp, Homo sapiens
ggcaaaacaagctga

SEQ ID NO: 1349812 - DNA, 15 bp, Homo sapiens
tggcaaaacaagctg

SEQ ID NO: 1349813 - DNA, 15 bp, Homo sapiens
gtggcaaaacaagct

SEQ ID NO: 1349814 - DNA, 15 bp, Homo sapiens
agtggcaaaacaagc

SEQ ID NO: 1349815 - DNA, 15 bp, Homo sapiens
gagtggcaaaacaag

SEQ ID NO: 1349816 - DNA, 15 bp, Homo sapiens
ggagtggcaaaacaa

SEQ ID NO: 1349817 - DNA, 15 bp, Homo sapiens
aggagtggcaaaaca

SEQ ID NO: 1349818 - DNA, 15 bp, Homo sapiens
aaggagtggcaaaac

SEQ ID NO: 1349819 - DNA, 15 bp, Homo sapiens
aaaggagtggcaaaa

SEQ ID NO: 1349820 - DNA, 15 bp, Homo sapiens
caaaggagtggcaaa

SEQ ID NO: 1349821 - DNA, 15 bp, Homo sapiens
ccaaaggagtggcaa

SEQ ID NO: 1349822 - DNA, 15 bp, Homo sapiens
gccaaaggagtggca

SEQ ID NO: 1349823 - DNA, 15 bp, Homo sapiens
agccaaaggagtggc

SEQ ID NO: 1349824 - DNA, 15 bp, Homo sapiens
tagccaaaggagtgg

SEQ ID NO: 1349825 - DNA, 15 bp, Homo sapiens
ttagccaaaggagtg

SEQ ID NO: 1349826 - DNA, 15 bp, Homo sapiens
attagccaaaggagt

SEQ ID NO: 1349827 - DNA, 15 bp, Homo sapiens
aattagccaaaggag

SEQ ID NO: 1349828 - DNA, 15 bp, Homo sapiens
taattagccaaagga

SEQ ID NO: 1349829 - DNA, 15 bp, Homo sapiens
ttaattagccaaagg

SEQ ID NO: 1349830 - DNA, 15 bp, Homo sapiens
attaattagccaaag

SEQ ID NO: 1349831 - DNA, 15 bp, Homo sapiens
aattaattagccaaa

SEQ ID NO: 1349832 - DNA, 15 bp, Homo sapiens
aaattaattagccaa

SEQ ID NO: 1349833 - DNA, 15 bp, Homo sapiens
taaattaattagcca

SEQ ID NO: 1349834 - DNA, 15 bp, Homo sapiens
ttaaattaattagcc

SEQ ID NO: 1349835 - DNA, 15 bp, Homo sapiens
tttaaattaattagc

SEQ ID NO: 1349836 - DNA, 15 bp, Homo sapiens
atttaaattaattag

SEQ ID NO: 1349837 - DNA, 15 bp, Homo sapiens
aatttaaattaatta

SEQ ID NO: 1349838 - DNA, 15 bp, Homo sapiens
aaatttaaattaatt

SEQ ID NO: 1349839 - DNA, 15 bp, Homo sapiens
aaaatttaaattaat

SEQ ID NO: 1349840 - DNA, 15 bp, Homo sapiens
taaaatttaaattaa

SEQ ID NO: 1349841 - DNA, 15 bp, Homo sapiens
gtaaaatttaaatta

SEQ ID NO: 1349842 - DNA, 15 bp, Homo sapiens
agtaaaatttaaatt

SEQ ID NO: 1349843 - DNA, 15 bp, Homo sapiens
gagtaaaatttaaat

SEQ ID NO: 1349844 - DNA, 15 bp, Homo sapiens
tgagtaaaatttaaa

SEQ ID NO: 1349845 - DNA, 15 bp, Homo sapiens
ttgagtaaaatttaa

SEQ ID NO: 1349846 - DNA, 15 bp, Homo sapiens
tttgagtaaaattta

SEQ ID NO: 1349847 - DNA, 15 bp, Homo sapiens
ctttgagtaaaattt

SEQ ID NO: 1349848 - DNA, 15 bp, Homo sapiens
actttgagtaaaatt

SEQ ID NO: 1349849 - DNA, 15 bp, Homo sapiens
aactttgagtaaaat

SEQ ID NO: 1349850 - DNA, 15 bp, Homo sapiens
ttaactttgagtaaa

SEQ ID NO: 1349851 - DNA, 15 bp, Homo sapiens
gttaactttgagtaa

SEQ ID NO: 1349852 - DNA, 15 bp, Homo sapiens
agttaactttgagta

SEQ ID NO: 1349853 - DNA, 15 bp, Homo sapiens
cagttaactttgagt

SEQ ID NO: 1349854 - DNA, 15 bp, Homo sapiens
gcagttaactttgag

SEQ ID NO: 1349855 - DNA, 15 bp, Homo sapiens
tgcagttaactttga

SEQ ID NO: 1349856 - DNA, 15 bp, Homo sapiens
gtgcagttaactttg

SEQ ID NO: 1349857 - DNA, 15 bp, Homo sapiens
agtgcagttaacttt

SEQ ID NO: 1349858 - DNA, 15 bp, Homo sapiens
tagtgcagttaactt

SEQ ID NO: 1349859 - DNA, 15 bp, Homo sapiens
ttagtgcagttaact

SEQ ID NO: 1349860 - DNA, 15 bp, Homo sapiens
gttagtgcagttaac

SEQ ID NO: 1349861 - DNA, 15 bp, Homo sapiens
tgttagtgcagttaa

SEQ ID NO: 1349862 - DNA, 15 bp, Homo sapiens
ttgttagtgcagtta

SEQ ID NO: 1349863 - DNA, 15 bp, Homo sapiens
attgttagtgcagtt

SEQ ID NO: 1349864 - DNA, 15 bp, Homo sapiens
aattgttagtgcagt

SEQ ID NO: 1349865 - DNA, 15 bp, Homo sapiens
gaattgttagtgcag

SEQ ID NO: 1349866 - DNA, 15 bp, Homo sapiens
agaattgttagtgca

SEQ ID NO: 1349867 - DNA, 15 bp, Homo sapiens
gagaattgttagtgc

SEQ ID NO: 1349868 - DNA, 15 bp, Homo sapiens
tgagaattgttagtg

SEQ ID NO: 1349869 - DNA, 15 bp, Homo sapiens
ttgagaattgttagt

SEQ ID NO: 1349870 - DNA, 15 bp, Homo sapiens
cttgagaattgttag

SEQ ID NO: 1349871 - DNA, 15 bp, Homo sapiens
gcttgagaattgtta

SEQ ID NO: 1349872 - DNA, 15 bp, Homo sapiens
ggcttgagaattgtt

SEQ ID NO: 1349873 - DNA, 15 bp, Homo sapiens
tggcttgagaattgt

SEQ ID NO: 1349874 - DNA, 15 bp, Homo sapiens
gtggcttgagaattg

SEQ ID NO: 1349875 - DNA, 15 bp, Homo sapiens
tgtggcttgagaatt

SEQ ID NO: 1349876 - DNA, 15 bp, Homo sapiens
ctgtggcttgagaat

SEQ ID NO: 1349877 - DNA, 15 bp, Homo sapiens
tctgtggcttgagaa

SEQ ID NO: 1349878 - DNA, 15 bp, Homo sapiens
ttctgtggcttgaga

SEQ ID NO: 1349879 - DNA, 15 bp, Homo sapiens
cttctgtggcttgag

SEQ ID NO: 1349880 - DNA, 15 bp, Homo sapiens
gcttctgtggcttga

SEQ ID NO: 1349881 - DNA, 15 bp, Homo sapiens
tgcttctgtggcttg

SEQ ID NO: 1349882 - DNA, 15 bp, Homo sapiens
atgcttctgtggctt

SEQ ID NO: 1349883 - DNA, 15 bp, Homo sapiens
tatgcttctgtggct

SEQ ID NO: 1349884 - DNA, 15 bp, Homo sapiens
gtatgcttctgtggc

SEQ ID NO: 1349885 - DNA, 15 bp, Homo sapiens
ggtatgcttctgtgg

SEQ ID NO: 1349886 - DNA, 15 bp, Homo sapiens
aggtatgcttctgtg

SEQ ID NO: 1349887 - DNA, 15 bp, Homo sapiens
taggtatgcttctgt

SEQ ID NO: 1349888 - DNA, 15 bp, Homo sapiens
ctaggtatgcttctg

SEQ ID NO: 1349889 - DNA, 15 bp, Homo sapiens
gctaggtatgcttct

SEQ ID NO: 1349890 - DNA, 15 bp, Homo sapiens
tgctaggtatgcttc

SEQ ID NO: 1349891 - DNA, 15 bp, Homo sapiens
atgctaggtatgctt

SEQ ID NO: 1349892 - DNA, 15 bp, Homo sapiens
tatgctaggtatgct

SEQ ID NO: 1349893 - DNA, 15 bp, Homo sapiens
ttatgctaggtatgc

SEQ ID NO: 1349894 - DNA, 15 bp, Homo sapiens
attatgctaggtatg

SEQ ID NO: 1349895 - DNA, 15 bp, Homo sapiens
tattatgctaggtat

SEQ ID NO: 1349896 - DNA, 15 bp, Homo sapiens
ttattatgctaggta

SEQ ID NO: 1349897 - DNA, 15 bp, Homo sapiens
gttattatgctaggt

SEQ ID NO: 1349898 - DNA, 15 bp, Homo sapiens
agttattatgctagg

SEQ ID NO: 1349899 - DNA, 15 bp, Homo sapiens
tagttattatgctag

SEQ ID NO: 1349900 - DNA, 15 bp, Homo sapiens
ctagttattatgcta

SEQ ID NO: 1349901 - DNA, 15 bp, Homo sapiens
cctagttattatgct

SEQ ID NO: 1349902 - DNA, 15 bp, Homo sapiens
acctagttattatgc

SEQ ID NO: 1349903 - DNA, 15 bp, Homo sapiens
tacctagttattatg

SEQ ID NO: 1349904 - DNA, 15 bp, Homo sapiens
atacctagttattat

SEQ ID NO: 1349905 - DNA, 15 bp, Homo sapiens
tatacctagttatta

SEQ ID NO: 1349906 - DNA, 15 bp, Homo sapiens
ttatacctagttatt

SEQ ID NO: 1349907 - DNA, 15 bp, Homo sapiens
attatacctagttat

SEQ ID NO: 1349908 - DNA, 15 bp, Homo sapiens
tattatacctagtta

SEQ ID NO: 1349909 - DNA, 15 bp, Homo sapiens
ttattatacctagtt

SEQ ID NO: 1349910 - DNA, 15 bp, Homo sapiens
attattatacctagt

SEQ ID NO: 1349911 - DNA, 15 bp, Homo sapiens
aattattatacctag

SEQ ID NO: 1349912 - DNA, 15 bp, Homo sapiens
taattattataccta

SEQ ID NO: 1349913 - DNA, 15 bp, Homo sapiens
ttaattattatacct

SEQ ID NO: 1349914 - DNA, 15 bp, Homo sapiens
gttaattattatacc

SEQ ID NO: 1349915 - DNA, 15 bp, Homo sapiens
ggttaattattatac

SEQ ID NO: 1349916 - DNA, 15 bp, Homo sapiens
tggttaattattata

SEQ ID NO: 1349917 - DNA, 15 bp, Homo sapiens
ctggttaattattat

SEQ ID NO: 1349918 - DNA, 15 bp, Homo sapiens
tctggttaattatta

SEQ ID NO: 1349919 - DNA, 15 bp, Homo sapiens
atctggttaattatt

SEQ ID NO: 1349920 - DNA, 15 bp, Homo sapiens
catctggttaattat

SEQ ID NO: 1349921 - DNA, 15 bp, Homo sapiens
acatctggttaatta

SEQ ID NO: 1349922 - DNA, 15 bp, Homo sapiens
aacatctggttaatt

SEQ ID NO: 1349923 - DNA, 15 bp, Homo sapiens
taacatctggttaat

SEQ ID NO: 1349924 - DNA, 15 bp, Homo sapiens
ttaacatctggttaa

SEQ ID NO: 1349925 - DNA, 15 bp, Homo sapiens
attaacatctggtta

SEQ ID NO: 1349926 - DNA, 15 bp, Homo sapiens
aattaacatctggtt

SEQ ID NO: 1349927 - DNA, 15 bp, Homo sapiens
gaattaacatctggt

SEQ ID NO: 1349928 - DNA, 15 bp, Homo sapiens
agaattaacatctgg

SEQ ID NO: 1349929 - DNA, 15 bp, Homo sapiens
gagaattaacatctg

SEQ ID NO: 1349930 - DNA, 15 bp, Homo sapiens
tgagaattaacatct

SEQ ID NO: 1349931 - DNA, 15 bp, Homo sapiens
gtgagaattaacatc

SEQ ID NO: 1349932 - DNA, 15 bp, Homo sapiens
tgtgagaattaacat

SEQ ID NO: 1349933 - DNA, 15 bp, Homo sapiens
atgtgagaattaaca

SEQ ID NO: 1349934 - DNA, 15 bp, Homo sapiens
catgtgagaattaac

SEQ ID NO: 1349935 - DNA, 15 bp, Homo sapiens
ccatgtgagaattaa

SEQ ID NO: 1349936 - DNA, 15 bp, Homo sapiens
tccatgtgagaatta

SEQ ID NO: 1349937 - DNA, 15 bp, Homo sapiens
ctccatgtgagaatt

SEQ ID NO: 1349938 - DNA, 15 bp, Homo sapiens
tctccatgtgagaat

SEQ ID NO: 1349939 - DNA, 15 bp, Homo sapiens
ttctccatgtgagaa

SEQ ID NO: 1349940 - DNA, 15 bp, Homo sapiens
tttctccatgtgaga

SEQ ID NO: 1349941 - DNA, 15 bp, Homo sapiens
ttttctccatgtgag

SEQ ID NO: 1349942 - DNA, 15 bp, Homo sapiens
gttttctccatgtga

SEQ ID NO: 1349943 - DNA, 15 bp, Homo sapiens
tgttttctccatgtg

SEQ ID NO: 1349944 - DNA, 15 bp, Homo sapiens
ctgttttctccatgt

SEQ ID NO: 1349945 - DNA, 15 bp, Homo sapiens
gctgttttctccatg

SEQ ID NO: 1349946 - DNA, 15 bp, Homo sapiens
agctgttttctccat

SEQ ID NO: 1349947 - DNA, 15 bp, Homo sapiens
tagctgttttctcca

SEQ ID NO: 1349948 - DNA, 15 bp, Homo sapiens
atagctgttttctcc

SEQ ID NO: 1349949 - DNA, 15 bp, Homo sapiens
aatagctgttttctc

SEQ ID NO: 1349950 - DNA, 15 bp, Homo sapiens
gaatagctgttttct

SEQ ID NO: 1349951 - DNA, 15 bp, Homo sapiens
agaatagctgttttc

SEQ ID NO: 1349952 - DNA, 15 bp, Homo sapiens
tagaatagctgtttt

SEQ ID NO: 1349953 - DNA, 15 bp, Homo sapiens
ctagaatagctgttt

SEQ ID NO: 1349954 - DNA, 15 bp, Homo sapiens
gctagaatagctgtt

SEQ ID NO: 1349955 - DNA, 15 bp, Homo sapiens
ggctagaatagctgt

SEQ ID NO: 1349956 - DNA, 15 bp, Homo sapiens
tggctagaatagctg

SEQ ID NO: 1349957 - DNA, 15 bp, Homo sapiens
gtggctagaatagct

SEQ ID NO: 1349958 - DNA, 15 bp, Homo sapiens
tgtggctagaatagc

SEQ ID NO: 1349959 - DNA, 15 bp, Homo sapiens
ctgtggctagaatag

SEQ ID NO: 1349960 - DNA, 15 bp, Homo sapiens
gctgtggctagaata

SEQ ID NO: 1349961 - DNA, 15 bp, Homo sapiens
agctgtggctagaat

SEQ ID NO: 1349962 - DNA, 15 bp, Homo sapiens
aagctgtggctagaa

SEQ ID NO: 1349963 - DNA, 15 bp, Homo sapiens
gaagctgtggctaga

SEQ ID NO: 1349964 - DNA, 15 bp, Homo sapiens
tgaagctgtggctag

SEQ ID NO: 1349965 - DNA, 15 bp, Homo sapiens
gtgaagctgtggcta

SEQ ID NO: 1349966 - DNA, 15 bp, Homo sapiens
tgtgaagctgtggct

SEQ ID NO: 1349967 - DNA, 15 bp, Homo sapiens
atgtgaagctgtggc

SEQ ID NO: 1349968 - DNA, 15 bp, Homo sapiens
gatgtgaagctgtgg

SEQ ID NO: 1349969 - DNA, 15 bp, Homo sapiens
tgatgtgaagctgtg

SEQ ID NO: 1349970 - DNA, 15 bp, Homo sapiens
atgatgtgaagctgt

SEQ ID NO: 1349971 - DNA, 15 bp, Homo sapiens
catgatgtgaagctg

SEQ ID NO: 1349972 - DNA, 15 bp, Homo sapiens
gcatgatgtgaagct

SEQ ID NO: 1349973 - DNA, 15 bp, Homo sapiens
tgcatgatgtgaagc

SEQ ID NO: 1349974 - DNA, 15 bp, Homo sapiens
atgcatgatgtgaag

SEQ ID NO: 1349975 - DNA, 15 bp, Homo sapiens
catgcatgatgtgaa

SEQ ID NO: 1349976 - DNA, 15 bp, Homo sapiens
ccatgcatgatgtga

SEQ ID NO: 1349977 - DNA, 15 bp, Homo sapiens
accatgcatgatgtg

SEQ ID NO: 1349978 - DNA, 15 bp, Homo sapiens
aaccatgcatgatgt

SEQ ID NO: 1349979 - DNA, 15 bp, Homo sapiens
aaaccatgcatgatg

SEQ ID NO: 1349980 - DNA, 15 bp, Homo sapiens
gaaaccatgcatgat

SEQ ID NO: 1349981 - DNA, 15 bp, Homo sapiens
ggaaaccatgcatga

SEQ ID NO: 1349982 - DNA, 15 bp, Homo sapiens
tggaaaccatgcatg

SEQ ID NO: 1349983 - DNA, 15 bp, Homo sapiens
ctggaaaccatgcat

SEQ ID NO: 1349984 - DNA, 15 bp, Homo sapiens
gctggaaaccatgca

SEQ ID NO: 1349985 - DNA, 15 bp, Homo sapiens
ggctggaaaccatgc

SEQ ID NO: 1349986 - DNA, 15 bp, Homo sapiens
aggctggaaaccatg

SEQ ID NO: 1349987 - DNA, 15 bp, Homo sapiens
aaggctggaaaccat

SEQ ID NO: 1349988 - DNA, 15 bp, Homo sapiens
taaggctggaaacca

SEQ ID NO: 1349989 - DNA, 15 bp, Homo sapiens
gtaaggctggaaacc

SEQ ID NO: 1349990 - DNA, 15 bp, Homo sapiens
agtaaggctggaaac

SEQ ID NO: 1349991 - DNA, 15 bp, Homo sapiens
tagtaaggctggaaa

SEQ ID NO: 1349992 - DNA, 15 bp, Homo sapiens
ctagtaaggctggaa

SEQ ID NO: 1349993 - DNA, 15 bp, Homo sapiens
tctagtaaggctgga

SEQ ID NO: 1349994 - DNA, 15 bp, Homo sapiens
ttctagtaaggctgg

SEQ ID NO: 1349995 - DNA, 15 bp, Homo sapiens
tttctagtaaggctg

SEQ ID NO: 1349996 - DNA, 15 bp, Homo sapiens
ttttctagtaaggct

SEQ ID NO: 1349997 - DNA, 15 bp, Homo sapiens
attttctagtaaggc

SEQ ID NO: 1349998 - DNA, 15 bp, Homo sapiens
tattttctagtaagg

SEQ ID NO: 1349999 - DNA, 15 bp, Homo sapiens
atattttctagtaag

SEQ ID NO: 1350000 - DNA, 15 bp, Homo sapiens
aatattttctagtaa

SEQ ID NO: 1350001 - DNA, 15 bp, Homo sapiens
aaatattttctagta

SEQ ID NO: 1350002 - DNA, 15 bp, Homo sapiens
aaaatattttctagt

SEQ ID NO: 1350003 - DNA, 15 bp, Homo sapiens
gaaaatattttctag

SEQ ID NO: 1350004 - DNA, 15 bp, Homo sapiens
tgaaaatattttcta

SEQ ID NO: 1350005 - DNA, 15 bp, Homo sapiens
ctgaaaatattttct

SEQ ID NO: 1350006 - DNA, 15 bp, Homo sapiens
actgaaaatattttc

SEQ ID NO: 1350007 - DNA, 15 bp, Homo sapiens
taactgaaaatattt

SEQ ID NO: 1350008 - DNA, 15 bp, Homo sapiens
ttaactgaaaatatt

SEQ ID NO: 1350009 - DNA, 15 bp, Homo sapiens
tttaactgaaaatat

SEQ ID NO: 1350010 - DNA, 15 bp, Homo sapiens
ttttaactgaaaata

SEQ ID NO: 1350011 - DNA, 15 bp, Homo sapiens
attttaactgaaaat

SEQ ID NO: 1350012 - DNA, 15 bp, Homo sapiens
tattttaactgaaaa

SEQ ID NO: 1350013 - DNA, 15 bp, Homo sapiens
ctattttaactgaaa

SEQ ID NO: 1350014 - DNA, 15 bp, Homo sapiens
tctattttaactgaa

SEQ ID NO: 1350015 - DNA, 15 bp, Homo sapiens
ttctattttaactga

SEQ ID NO: 1350016 - DNA, 15 bp, Homo sapiens
tttctattttaactg

SEQ ID NO: 1350017 - DNA, 15 bp, Homo sapiens
atttctattttaact

SEQ ID NO: 1350018 - DNA, 15 bp, Homo sapiens
tatttctattttaac

SEQ ID NO: 1350019 - DNA, 15 bp, Homo sapiens
atatttctattttaa

SEQ ID NO: 1350020 - DNA, 15 bp, Homo sapiens
catatttctatttta

SEQ ID NO: 1350021 - DNA, 15 bp, Homo sapiens
ccatatttctatttt

SEQ ID NO: 1350022 - DNA, 15 bp, Homo sapiens
cccatatttctattt

SEQ ID NO: 1350023 - DNA, 15 bp, Homo sapiens
acccatatttctatt

SEQ ID NO: 1350024 - DNA, 15 bp, Homo sapiens
aacccatatttctat

SEQ ID NO: 1350025 - DNA, 15 bp, Homo sapiens
taacccatatttcta

SEQ ID NO: 1350026 - DNA, 15 bp, Homo sapiens
ataacccatatttct

SEQ ID NO: 1350027 - DNA, 15 bp, Homo sapiens
aataacccatatttc

SEQ ID NO: 1350028 - DNA, 15 bp, Homo sapiens
aaataacccatattt

SEQ ID NO: 1350029 - DNA, 15 bp, Homo sapiens
taaataacccatatt

SEQ ID NO: 1350030 - DNA, 15 bp, Homo sapiens
ttaaataacccatat

SEQ ID NO: 1350031 - DNA, 15 bp, Homo sapiens
attaaataacccata

SEQ ID NO: 1350032 - DNA, 15 bp, Homo sapiens
aattaaataacccat

SEQ ID NO: 1350033 - DNA, 15 bp, Homo sapiens
aaattaaataaccca

SEQ ID NO: 1350034 - DNA, 15 bp, Homo sapiens
caaattaaataaccc

SEQ ID NO: 1350035 - DNA, 15 bp, Homo sapiens
gcaaattaaataacc

SEQ ID NO: 1350036 - DNA, 15 bp, Homo sapiens
tgcaaattaaataac

SEQ ID NO: 1350037 - DNA, 15 bp, Homo sapiens
atgcaaattaaataa

SEQ ID NO: 1350038 - DNA, 15 bp, Homo sapiens
aatgcaaattaaata

SEQ ID NO: 1350039 - DNA, 15 bp, Homo sapiens
gaatgcaaattaaat

SEQ ID NO: 1350040 - DNA, 15 bp, Homo sapiens
tgaatgcaaattaaa

SEQ ID NO: 1350041 - DNA, 15 bp, Homo sapiens
gtgaatgcaaattaa

SEQ ID NO: 1350042 - DNA, 15 bp, Homo sapiens
agtgaatgcaaatta

SEQ ID NO: 1350043 - DNA, 15 bp, Homo sapiens
cagtgaatgcaaatt

SEQ ID NO: 1350044 - DNA, 15 bp, Homo sapiens
gcagtgaatgcaaat

SEQ ID NO: 1350045 - DNA, 15 bp, Homo sapiens
tgcagtgaatgcaaa

SEQ ID NO: 1350046 - DNA, 15 bp, Homo sapiens
ttgcagtgaatgcaa

SEQ ID NO: 1350047 - DNA, 15 bp, Homo sapiens
gttgcagtgaatgca

SEQ ID NO: 1350048 - DNA, 15 bp, Homo sapiens
tgttgcagtgaatgc

SEQ ID NO: 1350049 - DNA, 15 bp, Homo sapiens
ctgttgcagtgaatg

SEQ ID NO: 1350050 - DNA, 15 bp, Homo sapiens
cctgttgcagtgaat

SEQ ID NO: 1350051 - DNA, 15 bp, Homo sapiens
acctgttgcagtgaa

SEQ ID NO: 1350052 - DNA, 15 bp, Homo sapiens
aacctgttgcagtga

SEQ ID NO: 1350053 - DNA, 15 bp, Homo sapiens
caacctgttgcagtg

SEQ ID NO: 1350054 - DNA, 15 bp, Homo sapiens
tcaacctgttgcagt

SEQ ID NO: 1350055 - DNA, 15 bp, Homo sapiens
gtcaacctgttgcag

SEQ ID NO: 1350056 - DNA, 15 bp, Homo sapiens
tgtcaacctgttgca

SEQ ID NO: 1350057 - DNA, 15 bp, Homo sapiens
ctgtcaacctgttgc

SEQ ID NO: 1350058 - DNA, 15 bp, Homo sapiens
actgtcaacctgttg

SEQ ID NO: 1350059 - DNA, 15 bp, Homo sapiens
tactgtcaacctgtt

SEQ ID NO: 1350060 - DNA, 15 bp, Homo sapiens
gtactgtcaacctgt

SEQ ID NO: 1350061 - DNA, 15 bp, Homo sapiens
tgtactgtcaacctg

SEQ ID NO: 1350062 - DNA, 15 bp, Homo sapiens
ttgtactgtcaacct

SEQ ID NO: 1350063 - DNA, 15 bp, Homo sapiens
gttgtactgtcaacc

SEQ ID NO: 1350064 - DNA, 15 bp, Homo sapiens
tgttgtactgtcaac

SEQ ID NO: 1350065 - DNA, 15 bp, Homo sapiens
ctgttgtactgtcaa

SEQ ID NO: 1350066 - DNA, 15 bp, Homo sapiens
cctgttgtactgtca

SEQ ID NO: 1350067 - DNA, 15 bp, Homo sapiens
acctgttgtactgtc

SEQ ID NO: 1350068 - DNA, 15 bp, Homo sapiens
aacctgttgtactgt

SEQ ID NO: 1350069 - DNA, 15 bp, Homo sapiens
aaacctgttgtactg

SEQ ID NO: 1350070 - DNA, 15 bp, Homo sapiens
caaacctgttgtact

SEQ ID NO: 1350071 - DNA, 15 bp, Homo sapiens
ccaaacctgttgtac

SEQ ID NO: 1350072 - DNA, 15 bp, Homo sapiens
tccaaacctgttgta

SEQ ID NO: 1350073 - DNA, 15 bp, Homo sapiens
ttccaaacctgttgt

SEQ ID NO: 1350074 - DNA, 15 bp, Homo sapiens
cttccaaacctgttg

SEQ ID NO: 1350075 - DNA, 15 bp, Homo sapiens
gcttccaaacctgtt

SEQ ID NO: 1350076 - DNA, 15 bp, Homo sapiens
tgcttccaaacctgt

SEQ ID NO: 1350077 - DNA, 15 bp, Homo sapiens
ttgcttccaaacctg

SEQ ID NO: 1350078 - DNA, 15 bp, Homo sapiens
attgcttccaaacct

SEQ ID NO: 1350079 - DNA, 15 bp, Homo sapiens
aattgcttccaaacc

SEQ ID NO: 1350080 - DNA, 15 bp, Homo sapiens
aaattgcttccaaac

SEQ ID NO: 1350081 - DNA, 15 bp, Homo sapiens
taaattgcttccaaa

SEQ ID NO: 1350082 - DNA, 15 bp, Homo sapiens
ttaaattgcttccaa

SEQ ID NO: 1350083 - DNA, 15 bp, Homo sapiens
attaaattgcttcca

SEQ ID NO: 1350084 - DNA, 15 bp, Homo sapiens
aattaaattgcttcc

SEQ ID NO: 1350085 - DNA, 15 bp, Homo sapiens
caattaaattgcttc

SEQ ID NO: 1350086 - DNA, 15 bp, Homo sapiens
tcaattaaattgctt

SEQ ID NO: 1350087 - DNA, 15 bp, Homo sapiens
ttcaattaaattgct

SEQ ID NO: 1350088 - DNA, 15 bp, Homo sapiens
tttcaattaaattgc

SEQ ID NO: 1350089 - DNA, 15 bp, Homo sapiens
gtttcaattaaattg

SEQ ID NO: 1350090 - DNA, 15 bp, Homo sapiens
agtttcaattaaatt

SEQ ID NO: 1350091 - DNA, 15 bp, Homo sapiens
tagtttcaattaaat

SEQ ID NO: 1350092 - DNA, 15 bp, Homo sapiens
atagtttcaattaaa

SEQ ID NO: 1350093 - DNA, 15 bp, Homo sapiens
tatagtttcaattaa

SEQ ID NO: 1350094 - DNA, 15 bp, Homo sapiens
ttatagtttcaatta

SEQ ID NO: 1350095 - DNA, 15 bp, Homo sapiens
tttatagtttcaatt

SEQ ID NO: 1350096 - DNA, 15 bp, Homo sapiens
atttatagtttcaat

SEQ ID NO: 1350097 - DNA, 15 bp, Homo sapiens
aatttatagtttcaa

SEQ ID NO: 1350098 - DNA, 15 bp, Homo sapiens
taatttatagtttca

SEQ ID NO: 1350099 - DNA, 15 bp, Homo sapiens
ataatttatagtttc

SEQ ID NO: 1350100 - DNA, 15 bp, Homo sapiens
aataatttatagttt

SEQ ID NO: 1350101 - DNA, 15 bp, Homo sapiens
gaataatttatagtt

SEQ ID NO: 1350102 - DNA, 15 bp, Homo sapiens
agaataatttatagt

SEQ ID NO: 1350103 - DNA, 15 bp, Homo sapiens
cagaataatttatag

SEQ ID NO: 1350104 - DNA, 15 bp, Homo sapiens
gcagaataatttata

SEQ ID NO: 1350105 - DNA, 15 bp, Homo sapiens
cgcagaataatttat

SEQ ID NO: 1350106 - DNA, 15 bp, Homo sapiens
acgcagaataattta

SEQ ID NO: 1350107 - DNA, 15 bp, Homo sapiens
gacgcagaataattt

SEQ ID NO: 1350108 - DNA, 15 bp, Homo sapiens
tgacgcagaataatt

SEQ ID NO: 1350109 - DNA, 15 bp, Homo sapiens
atgacgcagaataat

SEQ ID NO: 1350110 - DNA, 15 bp, Homo sapiens
gatgacgcagaataa

SEQ ID NO: 1350111 - DNA, 15 bp, Homo sapiens
agatgacgcagaata

SEQ ID NO: 1350112 - DNA, 15 bp, Homo sapiens
cagatgacgcagaat

SEQ ID NO: 1350113 - DNA, 15 bp, Homo sapiens
ccagatgacgcagaa

SEQ ID NO: 1350114 - DNA, 15 bp, Homo sapiens
cccagatgacgcaga

SEQ ID NO: 1350115 - DNA, 15 bp, Homo sapiens
tcccagatgacgcag

SEQ ID NO: 1350116 - DNA, 15 bp, Homo sapiens
ctcccagatgacgca

SEQ ID NO: 1350117 - DNA, 15 bp, Homo sapiens
cctcccagatgacgc

SEQ ID NO: 1350118 - DNA, 15 bp, Homo sapiens
gcctcccagatgacg

SEQ ID NO: 1350119 - DNA, 15 bp, Homo sapiens
tgcctcccagatgac

SEQ ID NO: 1350120 - DNA, 15 bp, Homo sapiens
ttgcctcccagatga

SEQ ID NO: 1350121 - DNA, 15 bp, Homo sapiens
cttgcctcccagatg

SEQ ID NO: 1350122 - DNA, 15 bp, Homo sapiens
tcttgcctcccagat

SEQ ID NO: 1350123 - DNA, 15 bp, Homo sapiens
gtcttgcctcccaga

SEQ ID NO: 1350124 - DNA, 15 bp, Homo sapiens
ggtcttgcctcccag

SEQ ID NO: 1350125 - DNA, 15 bp, Homo sapiens
tggtcttgcctccca

SEQ ID NO: 1350126 - DNA, 15 bp, Homo sapiens
atggtcttgcctccc

SEQ ID NO: 1350127 - DNA, 15 bp, Homo sapiens
catggtcttgcctcc

SEQ ID NO: 1350128 - DNA, 15 bp, Homo sapiens
acatggtcttgcctc

SEQ ID NO: 1350129 - DNA, 15 bp, Homo sapiens
aacatggtcttgcct

SEQ ID NO: 1350130 - DNA, 15 bp, Homo sapiens
taacatggtcttgcc

SEQ ID NO: 1350131 - DNA, 15 bp, Homo sapiens
ataacatggtcttgc

SEQ ID NO: 1350132 - DNA, 15 bp, Homo sapiens
gataacatggtcttg

SEQ ID NO: 1350133 - DNA, 15 bp, Homo sapiens
ggataacatggtctt

SEQ ID NO: 1350134 - DNA, 15 bp, Homo sapiens
aggataacatggtct

SEQ ID NO: 1350135 - DNA, 15 bp, Homo sapiens
caggataacatggtc

SEQ ID NO: 1350136 - DNA, 15 bp, Homo sapiens
tcaggataacatggt

SEQ ID NO: 1350137 - DNA, 15 bp, Homo sapiens
atcaggataacatgg

SEQ ID NO: 1350138 - DNA, 15 bp, Homo sapiens
catcaggataacatg

SEQ ID NO: 1350139 - DNA, 15 bp, Homo sapiens
gcatcaggataacat

SEQ ID NO: 1350140 - DNA, 15 bp, Homo sapiens
agcatcaggataaca

SEQ ID NO: 1350141 - DNA, 15 bp, Homo sapiens
aagcatcaggataac

SEQ ID NO: 1350142 - DNA, 15 bp, Homo sapiens
aaagcatcaggataa

SEQ ID NO: 1350143 - DNA, 15 bp, Homo sapiens
aaaagcatcaggata

SEQ ID NO: 1350144 - DNA, 15 bp, Homo sapiens
caaaagcatcaggat

SEQ ID NO: 1350145 - DNA, 15 bp, Homo sapiens
acaaaagcatcagga

SEQ ID NO: 1350146 - DNA, 15 bp, Homo sapiens
aacaaaagcatcagg

SEQ ID NO: 1350147 - DNA, 15 bp, Homo sapiens
aaacaaaagcatcag

SEQ ID NO: 1350148 - DNA, 15 bp, Homo sapiens
gaaacaaaagcatca

SEQ ID NO: 1350149 - DNA, 15 bp, Homo sapiens
ggaaacaaaagcatc

SEQ ID NO: 1350150 - DNA, 15 bp, Homo sapiens
aggaaacaaaagcat

SEQ ID NO: 1350151 - DNA, 15 bp, Homo sapiens
aaggaaacaaaagca

SEQ ID NO: 1350152 - DNA, 15 bp, Homo sapiens
aaaggaaacaaaagc

SEQ ID NO: 1350153 - DNA, 15 bp, Homo sapiens
caaaggaaacaaaag

SEQ ID NO: 1350154 - DNA, 15 bp, Homo sapiens
ccaaaggaaacaaaa

SEQ ID NO: 1350155 - DNA, 15 bp, Homo sapiens
tccaaaggaaacaaa

SEQ ID NO: 1350156 - DNA, 15 bp, Homo sapiens
ttccaaaggaaacaa

SEQ ID NO: 1350157 - DNA, 15 bp, Homo sapiens
tttccaaaggaaaca

SEQ ID NO: 1350158 - DNA, 15 bp, Homo sapiens
gtttccaaaggaaac

SEQ ID NO: 1350159 - DNA, 15 bp, Homo sapiens
tgtttccaaaggaaa

SEQ ID NO: 1350160 - DNA, 15 bp, Homo sapiens
ctgtttccaaaggaa

SEQ ID NO: 1350161 - DNA, 15 bp, Homo sapiens
cctgtttccaaagga

SEQ ID NO: 1350162 - DNA, 15 bp, Homo sapiens
tcctgtttccaaagg

SEQ ID NO: 1350163 - DNA, 15 bp, Homo sapiens
atcctgtttccaaag

SEQ ID NO: 1350164 - DNA, 15 bp, Homo sapiens
aatcctgtttccaaa

SEQ ID NO: 1350165 - DNA, 15 bp, Homo sapiens
taatcctgtttccaa

SEQ ID NO: 1350166 - DNA, 15 bp, Homo sapiens
ctaatcctgtttcca

SEQ ID NO: 1350167 - DNA, 15 bp, Homo sapiens
actaatcctgtttcc

SEQ ID NO: 1350168 - DNA, 15 bp, Homo sapiens
tactaatcctgtttc

SEQ ID NO: 1350169 - DNA, 15 bp, Homo sapiens
gtactaatcctgttt

SEQ ID NO: 1350170 - DNA, 15 bp, Homo sapiens
tgtactaatcctgtt

SEQ ID NO: 1350171 - DNA, 15 bp, Homo sapiens
ttgtactaatcctgt

SEQ ID NO: 1350172 - DNA, 15 bp, Homo sapiens
attgtactaatcctg

SEQ ID NO: 1350173 - DNA, 15 bp, Homo sapiens
cattgtactaatcct

SEQ ID NO: 1350174 - DNA, 15 bp, Homo sapiens
gcattgtactaatcc

SEQ ID NO: 1350175 - DNA, 15 bp, Homo sapiens
ggcattgtactaatc

SEQ ID NO: 1350176 - DNA, 15 bp, Homo sapiens
aggcattgtactaat

SEQ ID NO: 1350177 - DNA, 15 bp, Homo sapiens
gaggcattgtactaa

SEQ ID NO: 1350178 - DNA, 15 bp, Homo sapiens
tgaggcattgtacta

SEQ ID NO: 1350179 - DNA, 15 bp, Homo sapiens
ctgaggcattgtact

SEQ ID NO: 1350180 - DNA, 15 bp, Homo sapiens
cctgaggcattgtac

SEQ ID NO: 1350181 - DNA, 15 bp, Homo sapiens
tcctgaggcattgta

SEQ ID NO: 1350182 - DNA, 15 bp, Homo sapiens
ttcctgaggcattgt

SEQ ID NO: 1350183 - DNA, 15 bp, Homo sapiens
tttcctgaggcattg

SEQ ID NO: 1350184 - DNA, 15 bp, Homo sapiens
atttcctgaggcatt

SEQ ID NO: 1350185 - DNA, 15 bp, Homo sapiens
catttcctgaggcat

SEQ ID NO: 1350186 - DNA, 15 bp, Homo sapiens
acatttcctgaggca

SEQ ID NO: 1350187 - DNA, 15 bp, Homo sapiens
tacatttcctgaggc

SEQ ID NO: 1350188 - DNA, 15 bp, Homo sapiens
gtacatttcctgagg

SEQ ID NO: 1350189 - DNA, 15 bp, Homo sapiens
tgtacatttcctgag

SEQ ID NO: 1350190 - DNA, 15 bp, Homo sapiens
atgtacatttcctga

SEQ ID NO: 1350191 - DNA, 15 bp, Homo sapiens
tatgtacatttcctg

SEQ ID NO: 1350192 - DNA, 15 bp, Homo sapiens
atatgtacatttcct

SEQ ID NO: 1350193 - DNA, 15 bp, Homo sapiens
gatatgtacatttcc

SEQ ID NO: 1350194 - DNA, 15 bp, Homo sapiens
agatatgtacatttc

SEQ ID NO: 1350195 - DNA, 15 bp, Homo sapiens
gagatatgtacattt

SEQ ID NO: 1350196 - DNA, 15 bp, Homo sapiens
tgagatatgtacatt

SEQ ID NO: 1350197 - DNA, 15 bp, Homo sapiens
ttgagatatgtacat

SEQ ID NO: 1350198 - DNA, 15 bp, Homo sapiens
gttgagatatgtaca

SEQ ID NO: 1350199 - DNA, 15 bp, Homo sapiens
tgttgagatatgtac

SEQ ID NO: 1350200 - DNA, 15 bp, Homo sapiens
gtgttgagatatgta

SEQ ID NO: 1350201 - DNA, 15 bp, Homo sapiens
tgtgttgagatatgt

SEQ ID NO: 1350202 - DNA, 15 bp, Homo sapiens
ctgtgttgagatatg

SEQ ID NO: 1350203 - DNA, 15 bp, Homo sapiens
tctgtgttgagatat

SEQ ID NO: 1350204 - DNA, 15 bp, Homo sapiens
ctctgtgttgagata

SEQ ID NO: 1350205 - DNA, 15 bp, Homo sapiens
cctctgtgttgagat

SEQ ID NO: 1350206 - DNA, 15 bp, Homo sapiens
gcctctgtgttgaga

SEQ ID NO: 1350207 - DNA, 15 bp, Homo sapiens
agcctctgtgttgag

SEQ ID NO: 1350208 - DNA, 15 bp, Homo sapiens
cagcctctgtgttga

SEQ ID NO: 1350209 - DNA, 15 bp, Homo sapiens
tcagcctctgtgttg

SEQ ID NO: 1350210 - DNA, 15 bp, Homo sapiens
ttcagcctctgtgtt

SEQ ID NO: 1350211 - DNA, 15 bp, Homo sapiens
tttcagcctctgtgt

SEQ ID NO: 1350212 - DNA, 15 bp, Homo sapiens
ttttcagcctctgtg

SEQ ID NO: 1350213 - DNA, 15 bp, Homo sapiens
gttttcagcctctgt

SEQ ID NO: 1350214 - DNA, 15 bp, Homo sapiens
tgttttcagcctctg

SEQ ID NO: 1350215 - DNA, 15 bp, Homo sapiens
gtgttttcagcctct

SEQ ID NO: 1350216 - DNA, 15 bp, Homo sapiens
tgtgttttcagcctc

SEQ ID NO: 1350217 - DNA, 15 bp, Homo sapiens
ctgtgttttcagcct

SEQ ID NO: 1350218 - DNA, 15 bp, Homo sapiens
cctgtgttttcagcc

SEQ ID NO: 1350219 - DNA, 15 bp, Homo sapiens
ccctgtgttttcagc

SEQ ID NO: 1350220 - DNA, 15 bp, Homo sapiens
gccctgtgttttcag

SEQ ID NO: 1350221 - DNA, 15 bp, Homo sapiens
agccctgtgttttca

SEQ ID NO: 1350222 - DNA, 15 bp, Homo sapiens
aagccctgtgttttc

SEQ ID NO: 1350223 - DNA, 15 bp, Homo sapiens
aaagccctgtgtttt

SEQ ID NO: 1350224 - DNA, 15 bp, Homo sapiens
caaagccctgtgttt

SEQ ID NO: 1350225 - DNA, 15 bp, Homo sapiens
acaaagccctgtgtt

SEQ ID NO: 1350226 - DNA, 15 bp, Homo sapiens
gacaaagccctgtgt

SEQ ID NO: 1350227 - DNA, 15 bp, Homo sapiens
agacaaagccctgtg

SEQ ID NO: 1350228 - DNA, 15 bp, Homo sapiens
cagacaaagccctgt

SEQ ID NO: 1350229 - DNA, 15 bp, Homo sapiens
tcagacaaagccctg

SEQ ID NO: 1350230 - DNA, 15 bp, Homo sapiens
gtcagacaaagccct

SEQ ID NO: 1350231 - DNA, 15 bp, Homo sapiens
agtcagacaaagccc

SEQ ID NO: 1350232 - DNA, 15 bp, Homo sapiens
cagtcagacaaagcc

SEQ ID NO: 1350233 - DNA, 15 bp, Homo sapiens
acagtcagacaaagc

SEQ ID NO: 1350234 - DNA, 15 bp, Homo sapiens
aacagtcagacaaag

SEQ ID NO: 1350235 - DNA, 15 bp, Homo sapiens
caacagtcagacaaa

SEQ ID NO: 1350236 - DNA, 15 bp, Homo sapiens
ccaacagtcagacaa

SEQ ID NO: 1350237 - DNA, 15 bp, Homo sapiens
cccaacagtcagaca

SEQ ID NO: 1350238 - DNA, 15 bp, Homo sapiens
acccaacagtcagac

SEQ ID NO: 1350239 - DNA, 15 bp, Homo sapiens
tacccaacagtcaga

SEQ ID NO: 1350240 - DNA, 15 bp, Homo sapiens
atacccaacagtcag

SEQ ID NO: 1350241 - DNA, 15 bp, Homo sapiens
catacccaacagtca

SEQ ID NO: 1350242 - DNA, 15 bp, Homo sapiens
acatacccaacagtc

SEQ ID NO: 1350243 - DNA, 15 bp, Homo sapiens
gacatacccaacagt

SEQ ID NO: 1350244 - DNA, 15 bp, Homo sapiens
ggacatacccaacag

SEQ ID NO: 1350245 - DNA, 15 bp, Homo sapiens
gggacatacccaaca

SEQ ID NO: 1350246 - DNA, 15 bp, Homo sapiens
agggacatacccaac

SEQ ID NO: 1350247 - DNA, 15 bp, Homo sapiens
gagggacatacccaa

SEQ ID NO: 1350248 - DNA, 15 bp, Homo sapiens
agagggacataccca

SEQ ID NO: 1350249 - DNA, 15 bp, Homo sapiens
cagagggacataccc

SEQ ID NO: 1350250 - DNA, 15 bp, Homo sapiens
gcagagggacatacc

SEQ ID NO: 1350251 - DNA, 15 bp, Homo sapiens
ggcagagggacatac

SEQ ID NO: 1350252 - DNA, 15 bp, Homo sapiens
aggcagagggacata

SEQ ID NO: 1350253 - DNA, 15 bp, Homo sapiens
aaggcagagggacat

SEQ ID NO: 1350254 - DNA, 15 bp, Homo sapiens
aaaggcagagggaca

SEQ ID NO: 1350255 - DNA, 15 bp, Homo sapiens
taaaggcagagggac

SEQ ID NO: 1350256 - DNA, 15 bp, Homo sapiens
ataaaggcagaggga

SEQ ID NO: 1350257 - DNA, 15 bp, Homo sapiens
gataaaggcagaggg

SEQ ID NO: 1350258 - DNA, 15 bp, Homo sapiens
agataaaggcagagg

SEQ ID NO: 1350259 - DNA, 15 bp, Homo sapiens
gagataaaggcagag

SEQ ID NO: 1350260 - DNA, 15 bp, Homo sapiens
ggagataaaggcaga

SEQ ID NO: 1350261 - DNA, 15 bp, Homo sapiens
tggagataaaggcag

SEQ ID NO: 1350262 - DNA, 15 bp, Homo sapiens
gtggagataaaggca

SEQ ID NO: 1350263 - DNA, 15 bp, Homo sapiens
tgtggagataaaggc

SEQ ID NO: 1350264 - DNA, 15 bp, Homo sapiens
ttgtggagataaagg

SEQ ID NO: 1350265 - DNA, 15 bp, Homo sapiens
gttgtggagataaag

SEQ ID NO: 1350266 - DNA, 15 bp, Homo sapiens
tgttgtggagataaa

SEQ ID NO: 1350267 - DNA, 15 bp, Homo sapiens
ttgttgtggagataa

SEQ ID NO: 1350268 - DNA, 15 bp, Homo sapiens
tttgttgtggagata

SEQ ID NO: 1350269 - DNA, 15 bp, Homo sapiens
gtttgttgtggagat

SEQ ID NO: 1350270 - DNA, 15 bp, Homo sapiens
tgtttgttgtggaga

SEQ ID NO: 1350271 - DNA, 15 bp, Homo sapiens
ttgtttgttgtggag

SEQ ID NO: 1350272 - DNA, 15 bp, Homo sapiens
attgtttgttgtgga

SEQ ID NO: 1350273 - DNA, 15 bp, Homo sapiens
tattgtttgttgtgg

SEQ ID NO: 1350274 - DNA, 15 bp, Homo sapiens
ttattgtttgttgtg

SEQ ID NO: 1350275 - DNA, 15 bp, Homo sapiens
gttattgtttgttgt

SEQ ID NO: 1350276 - DNA, 15 bp, Homo sapiens
tgttattgtttgttg

SEQ ID NO: 1350277 - DNA, 15 bp, Homo sapiens
atgttattgtttgtt

SEQ ID NO: 1350278 - DNA, 15 bp, Homo sapiens
aatgttattgtttgt

SEQ ID NO: 1350279 - DNA, 15 bp, Homo sapiens
taatgttattgtttg

SEQ ID NO: 1350280 - DNA, 15 bp, Homo sapiens
gtaatgttattgttt

SEQ ID NO: 1350281 - DNA, 15 bp, Homo sapiens
tgtaatgttattgtt

SEQ ID NO: 1350282 - DNA, 15 bp, Homo sapiens
ctgtaatgttattgt

SEQ ID NO: 1350283 - DNA, 15 bp, Homo sapiens
tctgtaatgttattg

SEQ ID NO: 1350284 - DNA, 15 bp, Homo sapiens
ttctgtaatgttatt

SEQ ID NO: 1350285 - DNA, 15 bp, Homo sapiens
tttctgtaatgttat

SEQ ID NO: 1350286 - DNA, 15 bp, Homo sapiens
ttttctgtaatgtta

SEQ ID NO: 1350287 - DNA, 15 bp, Homo sapiens
cttttctgtaatgtt

SEQ ID NO: 1350288 - DNA, 15 bp, Homo sapiens
tcttttctgtaatgt

SEQ ID NO: 1350289 - DNA, 15 bp, Homo sapiens
ctcttttctgtaatg

SEQ ID NO: 1350290 - DNA, 15 bp, Homo sapiens
actcttttctgtaat

SEQ ID NO: 1350291 - DNA, 15 bp, Homo sapiens
cactcttttctgtaa

SEQ ID NO: 1350292 - DNA, 15 bp, Homo sapiens
ccactcttttctgta

SEQ ID NO: 1350293 - DNA, 15 bp, Homo sapiens
gccactcttttctgt

SEQ ID NO: 1350294 - DNA, 15 bp, Homo sapiens
agccactcttttctg

SEQ ID NO: 1350295 - DNA, 15 bp, Homo sapiens
aagccactcttttct

SEQ ID NO: 1350296 - DNA, 15 bp, Homo sapiens
caagccactcttttc

SEQ ID NO: 1350297 - DNA, 15 bp, Homo sapiens
tcaagccactctttt

SEQ ID NO: 1350298 - DNA, 15 bp, Homo sapiens
atcaagccactcttt

SEQ ID NO: 1350299 - DNA, 15 bp, Homo sapiens
aatcaagccactctt

SEQ ID NO: 1350300 - DNA, 15 bp, Homo sapiens
taatcaagccactct

SEQ ID NO: 1350301 - DNA, 15 bp, Homo sapiens
ttaatcaagccactc

SEQ ID NO: 1350302 - DNA, 15 bp, Homo sapiens
cttaatcaagccact

SEQ ID NO: 1350303 - DNA, 15 bp, Homo sapiens
ccttaatcaagccac

SEQ ID NO: 1350304 - DNA, 15 bp, Homo sapiens
tccttaatcaagcca

SEQ ID NO: 1350305 - DNA, 15 bp, Homo sapiens
ttccttaatcaagcc

SEQ ID NO: 1350306 - DNA, 15 bp, Homo sapiens
tttccttaatcaagc

SEQ ID NO: 1350307 - DNA, 15 bp, Homo sapiens
ttttccttaatcaag

SEQ ID NO: 1350308 - DNA, 15 bp, Homo sapiens
tttttccttaatcaa

SEQ ID NO: 1350309 - DNA, 15 bp, Homo sapiens
atttttccttaatca

SEQ ID NO: 1350310 - DNA, 15 bp, Homo sapiens
catttttccttaatc

SEQ ID NO: 1350311 - DNA, 15 bp, Homo sapiens
tcatttttccttaat

SEQ ID NO: 1350312 - DNA, 15 bp, Homo sapiens
atcatttttccttaa

SEQ ID NO: 1350313 - DNA, 15 bp, Homo sapiens
tatcatttttcctta

SEQ ID NO: 1350314 - DNA, 15 bp, Homo sapiens
ctatcatttttcctt

SEQ ID NO: 1350315 - DNA, 15 bp, Homo sapiens
actatcatttttcct

SEQ ID NO: 1350316 - DNA, 15 bp, Homo sapiens
tactatcatttttcc

SEQ ID NO: 1350317 - DNA, 15 bp, Homo sapiens
gtactatcatttttc

SEQ ID NO: 1350318 - DNA, 15 bp, Homo sapiens
tgtactatcattttt

SEQ ID NO: 1350319 - DNA, 15 bp, Homo sapiens
gtgtactatcatttt

SEQ ID NO: 1350320 - DNA, 15 bp, Homo sapiens
tgtgtactatcattt

SEQ ID NO: 1350321 - DNA, 15 bp, Homo sapiens
gtgtgtactatcatt

SEQ ID NO: 1350322 - DNA, 15 bp, Homo sapiens
tgtgtgtactatcat

SEQ ID NO: 1350323 - DNA, 15 bp, Homo sapiens
ctgtgtgtactatca

SEQ ID NO: 1350324 - DNA, 15 bp, Homo sapiens
actgtgtgtactatc

SEQ ID NO: 1350325 - DNA, 15 bp, Homo sapiens
tactgtgtgtactat

SEQ ID NO: 1350326 - DNA, 15 bp, Homo sapiens
atactgtgtgtacta

SEQ ID NO: 1350327 - DNA, 15 bp, Homo sapiens
catactgtgtgtact

SEQ ID NO: 1350328 - DNA, 15 bp, Homo sapiens
gcatactgtgtgtac

SEQ ID NO: 1350329 - DNA, 15 bp, Homo sapiens
agcatactgtgtgta

SEQ ID NO: 1350330 - DNA, 15 bp, Homo sapiens
gagcatactgtgtgt

SEQ ID NO: 1350331 - DNA, 15 bp, Homo sapiens
agagcatactgtgtg

SEQ ID NO: 1350332 - DNA, 15 bp, Homo sapiens
gagagcatactgtgt

SEQ ID NO: 1350333 - DNA, 15 bp, Homo sapiens
agagagcatactgtg

SEQ ID NO: 1350334 - DNA, 15 bp, Homo sapiens
tagagagcatactgt

SEQ ID NO: 1350335 - DNA, 15 bp, Homo sapiens
atagagagcatactg

SEQ ID NO: 1350336 - DNA, 15 bp, Homo sapiens
gatagagagcatact

SEQ ID NO: 1350337 - DNA, 15 bp, Homo sapiens
ggatagagagcatac

SEQ ID NO: 1350338 - DNA, 15 bp, Homo sapiens
gggatagagagcata

SEQ ID NO: 1350339 - DNA, 15 bp, Homo sapiens
agggatagagagcat

SEQ ID NO: 1350340 - DNA, 15 bp, Homo sapiens
cagggatagagagca

SEQ ID NO: 1350341 - DNA, 15 bp, Homo sapiens
ccagggatagagagc

SEQ ID NO: 1350342 - DNA, 15 bp, Homo sapiens
cccagggatagagag

SEQ ID NO: 1350343 - DNA, 15 bp, Homo sapiens
tcccagggatagaga

SEQ ID NO: 1350344 - DNA, 15 bp, Homo sapiens
atcccagggatagag

SEQ ID NO: 1350345 - DNA, 15 bp, Homo sapiens
gatcccagggataga

SEQ ID NO: 1350346 - DNA, 15 bp, Homo sapiens
tgatcccagggatag

SEQ ID NO: 1350347 - DNA, 15 bp, Homo sapiens
ttgatcccagggata

SEQ ID NO: 1350348 - DNA, 15 bp, Homo sapiens
tttgatcccagggat

SEQ ID NO: 1350349 - DNA, 15 bp, Homo sapiens
gtttgatcccaggga

SEQ ID NO: 1350350 - DNA, 15 bp, Homo sapiens
agtttgatcccaggg

SEQ ID NO: 1350351 - DNA, 15 bp, Homo sapiens
tagtttgatcccagg

SEQ ID NO: 1350352 - DNA, 15 bp, Homo sapiens
ttagtttgatcccag

SEQ ID NO: 1350353 - DNA, 15 bp, Homo sapiens
cttagtttgatccca

SEQ ID NO: 1350354 - DNA, 15 bp, Homo sapiens
tcttagtttgatccc

SEQ ID NO: 1350355 - DNA, 15 bp, Homo sapiens
gtcttagtttgatcc

SEQ ID NO: 1350356 - DNA, 15 bp, Homo sapiens
ggtcttagtttgatc

SEQ ID NO: 1350357 - DNA, 15 bp, Homo sapiens
gggtcttagtttgat

SEQ ID NO: 1350358 - DNA, 15 bp, Homo sapiens
tgggtcttagtttga

SEQ ID NO: 1350359 - DNA, 15 bp, Homo sapiens
atgggtcttagtttg

SEQ ID NO: 1350360 - DNA, 15 bp, Homo sapiens
catgggtcttagttt

SEQ ID NO: 1350361 - DNA, 15 bp, Homo sapiens
ccatgggtcttagtt

SEQ ID NO: 1350362 - DNA, 15 bp, Homo sapiens
accatgggtcttagt

SEQ ID NO: 1350363 - DNA, 15 bp, Homo sapiens
caccatgggtcttag

SEQ ID NO: 1350364 - DNA, 15 bp, Homo sapiens
acaccatgggtctta

SEQ ID NO: 1350365 - DNA, 15 bp, Homo sapiens
tacaccatgggtctt

SEQ ID NO: 1350366 - DNA, 15 bp, Homo sapiens
atacaccatgggtct

SEQ ID NO: 1350367 - DNA, 15 bp, Homo sapiens
aatacaccatgggtc

SEQ ID NO: 1350368 - DNA, 15 bp, Homo sapiens
taatacaccatgggt

SEQ ID NO: 1350369 - DNA, 15 bp, Homo sapiens
ctaatacaccatggg

SEQ ID NO: 1350370 - DNA, 15 bp, Homo sapiens
actaatacaccatgg

SEQ ID NO: 1350371 - DNA, 15 bp, Homo sapiens
gactaatacaccatg

SEQ ID NO: 1350372 - DNA, 15 bp, Homo sapiens
ggactaatacaccat

SEQ ID NO: 1350373 - DNA, 15 bp, Homo sapiens
tggactaatacacca

SEQ ID NO: 1350374 - DNA, 15 bp, Homo sapiens
atggactaatacacc

SEQ ID NO: 1350375 - DNA, 15 bp, Homo sapiens
aatggactaatacac

SEQ ID NO: 1350376 - DNA, 15 bp, Homo sapiens
gaatggactaataca

SEQ ID NO: 1350377 - DNA, 15 bp, Homo sapiens
agaatggactaatac

SEQ ID NO: 1350378 - DNA, 15 bp, Homo sapiens
gagaatggactaata

SEQ ID NO: 1350379 - DNA, 15 bp, Homo sapiens
tgagaatggactaat

SEQ ID NO: 1350380 - DNA, 15 bp, Homo sapiens
gtgagaatggactaa

SEQ ID NO: 1350381 - DNA, 15 bp, Homo sapiens
tgtgagaatggacta

SEQ ID NO: 1350382 - DNA, 15 bp, Homo sapiens
gtgtgagaatggact

SEQ ID NO: 1350383 - DNA, 15 bp, Homo sapiens
agtgtgagaatggac

SEQ ID NO: 1350384 - DNA, 15 bp, Homo sapiens
cagtgtgagaatgga

SEQ ID NO: 1350385 - DNA, 15 bp, Homo sapiens
gcagtgtgagaatgg

SEQ ID NO: 1350386 - DNA, 15 bp, Homo sapiens
agcagtgtgagaatg

SEQ ID NO: 1350387 - DNA, 15 bp, Homo sapiens
tagcagtgtgagaat

SEQ ID NO: 1350388 - DNA, 15 bp, Homo sapiens
ttagcagtgtgagaa

SEQ ID NO: 1350389 - DNA, 15 bp, Homo sapiens
attagcagtgtgaga

SEQ ID NO: 1350390 - DNA, 15 bp, Homo sapiens
tattagcagtgtgag

SEQ ID NO: 1350391 - DNA, 15 bp, Homo sapiens
ttattagcagtgtga

SEQ ID NO: 1350392 - DNA, 15 bp, Homo sapiens
tttattagcagtgtg

SEQ ID NO: 1350393 - DNA, 15 bp, Homo sapiens
ctttattagcagtgt

SEQ ID NO: 1350394 - DNA, 15 bp, Homo sapiens
tctttattagcagtg

SEQ ID NO: 1350395 - DNA, 15 bp, Homo sapiens
atctttattagcagt

SEQ ID NO: 1350396 - DNA, 15 bp, Homo sapiens
tatctttattagcag

SEQ ID NO: 1350397 - DNA, 15 bp, Homo sapiens
atatctttattagca

SEQ ID NO: 1350398 - DNA, 15 bp, Homo sapiens
tatatctttattagc

SEQ ID NO: 1350399 - DNA, 15 bp, Homo sapiens
gtatatctttattag

SEQ ID NO: 1350400 - DNA, 15 bp, Homo sapiens
ggtatatctttatta

SEQ ID NO: 1350401 - DNA, 15 bp, Homo sapiens
aggtatatctttatt

SEQ ID NO: 1350402 - DNA, 15 bp, Homo sapiens
caggtatatctttat

SEQ ID NO: 1350403 - DNA, 15 bp, Homo sapiens
tcaggtatatcttta

SEQ ID NO: 1350404 - DNA, 15 bp, Homo sapiens
gtcaggtatatcttt

SEQ ID NO: 1350405 - DNA, 15 bp, Homo sapiens
tgtcaggtatatctt

SEQ ID NO: 1350406 - DNA, 15 bp, Homo sapiens
gtgtcaggtatatct

SEQ ID NO: 1350407 - DNA, 15 bp, Homo sapiens
agtgtcaggtatatc

SEQ ID NO: 1350408 - DNA, 15 bp, Homo sapiens
cagtgtcaggtatat

SEQ ID NO: 1350409 - DNA, 15 bp, Homo sapiens
ccagtgtcaggtata

SEQ ID NO: 1350410 - DNA, 15 bp, Homo sapiens
tccagtgtcaggtat

SEQ ID NO: 1350411 - DNA, 15 bp, Homo sapiens
atccagtgtcaggta

SEQ ID NO: 1350412 - DNA, 15 bp, Homo sapiens
tatccagtgtcaggt

SEQ ID NO: 1350413 - DNA, 15 bp, Homo sapiens
ttatccagtgtcagg

SEQ ID NO: 1350414 - DNA, 15 bp, Homo sapiens
attatccagtgtcag

SEQ ID NO: 1350415 - DNA, 15 bp, Homo sapiens
aattatccagtgtca

SEQ ID NO: 1350416 - DNA, 15 bp, Homo sapiens
aaattatccagtgtc

SEQ ID NO: 1350417 - DNA, 15 bp, Homo sapiens
caaattatccagtgt

SEQ ID NO: 1350418 - DNA, 15 bp, Homo sapiens
acaaattatccagtg

SEQ ID NO: 1350419 - DNA, 15 bp, Homo sapiens
tacaaattatccagt

SEQ ID NO: 1350420 - DNA, 15 bp, Homo sapiens
ttacaaattatccag

SEQ ID NO: 1350421 - DNA, 15 bp, Homo sapiens
tttacaaattatcca

SEQ ID NO: 1350422 - DNA, 15 bp, Homo sapiens
ctttacaaattatcc

SEQ ID NO: 1350423 - DNA, 15 bp, Homo sapiens
cctttacaaattatc

SEQ ID NO: 1350424 - DNA, 15 bp, Homo sapiens
tcctttacaaattat

SEQ ID NO: 1350425 - DNA, 15 bp, Homo sapiens
ttcctttacaaatta

SEQ ID NO: 1350426 - DNA, 15 bp, Homo sapiens
tttcctttacaaatt

SEQ ID NO: 1350427 - DNA, 15 bp, Homo sapiens
ctttcctttacaaat

SEQ ID NO: 1350428 - DNA, 15 bp, Homo sapiens
tctttcctttacaaa

SEQ ID NO: 1350429 - DNA, 15 bp, Homo sapiens
ctctttcctttacaa

SEQ ID NO: 1350430 - DNA, 15 bp, Homo sapiens
tctctttcctttaca

SEQ ID NO: 1350431 - DNA, 15 bp, Homo sapiens
atctctttcctttac

SEQ ID NO: 1350432 - DNA, 15 bp, Homo sapiens
aatctctttccttta

SEQ ID NO: 1350433 - DNA, 15 bp, Homo sapiens
aaatctctttccttt

SEQ ID NO: 1350434 - DNA, 15 bp, Homo sapiens
taaatctctttcctt

SEQ ID NO: 1350435 - DNA, 15 bp, Homo sapiens
ttaaatctctttcct

SEQ ID NO: 1350436 - DNA, 15 bp, Homo sapiens
attaaatctctttcc

SEQ ID NO: 1350437 - DNA, 15 bp, Homo sapiens
aattaaatctctttc

SEQ ID NO: 1350438 - DNA, 15 bp, Homo sapiens
caattaaatctcttt

SEQ ID NO: 1350439 - DNA, 15 bp, Homo sapiens
tcaattaaatctctt

SEQ ID NO: 1350440 - DNA, 15 bp, Homo sapiens
gtcaattaaatctct

SEQ ID NO: 1350441 - DNA, 15 bp, Homo sapiens
agtcaattaaatctc

SEQ ID NO: 1350442 - DNA, 15 bp, Homo sapiens
atgagtcaattaaat

SEQ ID NO: 1350443 - DNA, 15 bp, Homo sapiens
catgagtcaattaaa

SEQ ID NO: 1350444 - DNA, 15 bp, Homo sapiens
acatgagtcaattaa

SEQ ID NO: 1350445 - DNA, 15 bp, Homo sapiens
gacatgagtcaatta

SEQ ID NO: 1350446 - DNA, 15 bp, Homo sapiens
agacatgagtcaatt

SEQ ID NO: 1350447 - DNA, 15 bp, Homo sapiens
gagacatgagtcaat

SEQ ID NO: 1350448 - DNA, 15 bp, Homo sapiens
tgagacatgagtcaa

SEQ ID NO: 1350449 - DNA, 15 bp, Homo sapiens
ctgagacatgagtca

SEQ ID NO: 1350450 - DNA, 15 bp, Homo sapiens
gctgagacatgagtc

SEQ ID NO: 1350451 - DNA, 15 bp, Homo sapiens
tgctgagacatgagt

SEQ ID NO: 1350452 - DNA, 15 bp, Homo sapiens
atgctgagacatgag

SEQ ID NO: 1350453 - DNA, 15 bp, Homo sapiens
catgctgagacatga

SEQ ID NO: 1350454 - DNA, 15 bp, Homo sapiens
tcatgctgagacatg

SEQ ID NO: 1350455 - DNA, 15 bp, Homo sapiens
gtcatgctgagacat

SEQ ID NO: 1350456 - DNA, 15 bp, Homo sapiens
agtcatgctgagaca

SEQ ID NO: 1350457 - DNA, 15 bp, Homo sapiens
cagtcatgctgagac

SEQ ID NO: 1350458 - DNA, 15 bp, Homo sapiens
ccagtcatgctgaga

SEQ ID NO: 1350459 - DNA, 15 bp, Homo sapiens
gccagtcatgctgag

SEQ ID NO: 1350460 - DNA, 15 bp, Homo sapiens
cgccagtcatgctga

SEQ ID NO: 1350461 - DNA, 15 bp, Homo sapiens
tcgccagtcatgctg

SEQ ID NO: 1350462 - DNA, 15 bp, Homo sapiens
ctcgccagtcatgct

SEQ ID NO: 1350463 - DNA, 15 bp, Homo sapiens
cctcgccagtcatgc

SEQ ID NO: 1350464 - DNA, 15 bp, Homo sapiens
tcctcgccagtcatg

SEQ ID NO: 1350465 - DNA, 15 bp, Homo sapiens
gtcctcgccagtcat

SEQ ID NO: 1350466 - DNA, 15 bp, Homo sapiens
agtcctcgccagtca

SEQ ID NO: 1350467 - DNA, 15 bp, Homo sapiens
gagtcctcgccagtc

SEQ ID NO: 1350468 - DNA, 15 bp, Homo sapiens
tgagtcctcgccagt

SEQ ID NO: 1350469 - DNA, 15 bp, Homo sapiens
ttgagtcctcgccag

SEQ ID NO: 1350470 - DNA, 15 bp, Homo sapiens
cttgagtcctcgcca

SEQ ID NO: 1350471 - DNA, 15 bp, Homo sapiens
tcttgagtcctcgcc

SEQ ID NO: 1350472 - DNA, 15 bp, Homo sapiens
ttcttgagtcctcgc

SEQ ID NO: 1350473 - DNA, 15 bp, Homo sapiens
tttcttgagtcctcg

SEQ ID NO: 1350474 - DNA, 15 bp, Homo sapiens
gtttcttgagtcctc

SEQ ID NO: 1350475 - DNA, 15 bp, Homo sapiens
agtttcttgagtcct

SEQ ID NO: 1350476 - DNA, 15 bp, Homo sapiens
aagtttcttgagtcc

SEQ ID NO: 1350477 - DNA, 15 bp, Homo sapiens
taagtttcttgagtc

SEQ ID NO: 1350478 - DNA, 15 bp, Homo sapiens
gtaagtttcttgagt

SEQ ID NO: 1350479 - DNA, 15 bp, Homo sapiens
tgtaagtttcttgag

SEQ ID NO: 1350480 - DNA, 15 bp, Homo sapiens
ttgtaagtttcttga

SEQ ID NO: 1350481 - DNA, 15 bp, Homo sapiens
attgtaagtttcttg

SEQ ID NO: 1350482 - DNA, 15 bp, Homo sapiens
gattgtaagtttctt

SEQ ID NO: 1350483 - DNA, 15 bp, Homo sapiens
cgattgtaagtttct

SEQ ID NO: 1350484 - DNA, 15 bp, Homo sapiens
acgattgtaagtttc

SEQ ID NO: 1350485 - DNA, 15 bp, Homo sapiens
cacgattgtaagttt

SEQ ID NO: 1350486 - DNA, 15 bp, Homo sapiens
ccacgattgtaagtt

SEQ ID NO: 1350487 - DNA, 15 bp, Homo sapiens
gccacgattgtaagt

SEQ ID NO: 1350488 - DNA, 15 bp, Homo sapiens
tgccacgattgtaag

SEQ ID NO: 1350489 - DNA, 15 bp, Homo sapiens
ctgccacgattgtaa

SEQ ID NO: 1350490 - DNA, 15 bp, Homo sapiens
tctgccacgattgta

SEQ ID NO: 1350491 - DNA, 15 bp, Homo sapiens
ctctgccacgattgt

SEQ ID NO: 1350492 - DNA, 15 bp, Homo sapiens
cctctgccacgattg

SEQ ID NO: 1350493 - DNA, 15 bp, Homo sapiens
ccctctgccacgatt

SEQ ID NO: 1350494 - DNA, 15 bp, Homo sapiens
cccctctgccacgat

SEQ ID NO: 1350495 - DNA, 15 bp, Homo sapiens
tcccctctgccacga

SEQ ID NO: 1350496 - DNA, 15 bp, Homo sapiens
ttcccctctgccacg

SEQ ID NO: 1350497 - DNA, 15 bp, Homo sapiens
gttcccctctgccac

SEQ ID NO: 1350498 - DNA, 15 bp, Homo sapiens
ggttcccctctgcca

SEQ ID NO: 1350499 - DNA, 15 bp, Homo sapiens
tggttcccctctgcc

SEQ ID NO: 1350500 - DNA, 15 bp, Homo sapiens
ttggttcccctctgc

SEQ ID NO: 1350501 - DNA, 15 bp, Homo sapiens
tttggttcccctctg

SEQ ID NO: 1350502 - DNA, 15 bp, Homo sapiens
atttggttcccctct

SEQ ID NO: 1350503 - DNA, 15 bp, Homo sapiens
tatttggttcccctc

SEQ ID NO: 1350504 - DNA, 15 bp, Homo sapiens
atatttggttcccct

SEQ ID NO: 1350505 - DNA, 15 bp, Homo sapiens
catatttggttcccc

SEQ ID NO: 1350506 - DNA, 15 bp, Homo sapiens
acatatttggttccc

SEQ ID NO: 1350507 - DNA, 15 bp, Homo sapiens
gacatatttggttcc

SEQ ID NO: 1350508 - DNA, 15 bp, Homo sapiens
ggacatatttggttc

SEQ ID NO: 1350509 - DNA, 15 bp, Homo sapiens
aggacatatttggtt

SEQ ID NO: 1350510 - DNA, 15 bp, Homo sapiens
aaggacatatttggt

SEQ ID NO: 1350511 - DNA, 15 bp, Homo sapiens
gaaggacatatttgg

SEQ ID NO: 1350512 - DNA, 15 bp, Homo sapiens
atgtgaagaaggaca

SEQ ID NO: 1350513 - DNA, 15 bp, Homo sapiens
catgtgaagaaggac

SEQ ID NO: 1350514 - DNA, 15 bp, Homo sapiens
ccatgtgaagaagga

SEQ ID NO: 1350515 - DNA, 15 bp, Homo sapiens
gccatgtgaagaagg

SEQ ID NO: 1350516 - DNA, 15 bp, Homo sapiens
tgccatgtgaagaag

SEQ ID NO: 1350517 - DNA, 15 bp, Homo sapiens
ctgccatgtgaagaa

SEQ ID NO: 1350518 - DNA, 15 bp, Homo sapiens
gctgccatgtgaaga

SEQ ID NO: 1350519 - DNA, 15 bp, Homo sapiens
tgctgccatgtgaag

SEQ ID NO: 1350520 - DNA, 15 bp, Homo sapiens
ctgctgccatgtgaa

SEQ ID NO: 1350521 - DNA, 15 bp, Homo sapiens
gctgctgccatgtga

SEQ ID NO: 1350522 - DNA, 15 bp, Homo sapiens
tgctgctgccatgtg

SEQ ID NO: 1350523 - DNA, 15 bp, Homo sapiens
ttgctgctgccatgt

SEQ ID NO: 1350524 - DNA, 15 bp, Homo sapiens
cttgctgctgccatg

SEQ ID NO: 1350525 - DNA, 15 bp, Homo sapiens
ccttgctgctgccat

SEQ ID NO: 1350526 - DNA, 15 bp, Homo sapiens
tccttgctgctgcca

SEQ ID NO: 1350527 - DNA, 15 bp, Homo sapiens
ctccttgctgctgcc

SEQ ID NO: 1350528 - DNA, 15 bp, Homo sapiens
tctccttgctgctgc

SEQ ID NO: 1350529 - DNA, 15 bp, Homo sapiens
ttctccttgctgctg

SEQ ID NO: 1350530 - DNA, 15 bp, Homo sapiens
cttctccttgctgct

SEQ ID NO: 1350531 - DNA, 15 bp, Homo sapiens
acttctccttgctgc

SEQ ID NO: 1350532 - DNA, 15 bp, Homo sapiens
cacttctccttgctg

SEQ ID NO: 1350533 - DNA, 15 bp, Homo sapiens
gcacttctccttgct

SEQ ID NO: 1350534 - DNA, 15 bp, Homo sapiens
agcacttctccttgc

SEQ ID NO: 1350535 - DNA, 15 bp, Homo sapiens
cagcacttctccttg

SEQ ID NO: 1350536 - DNA, 15 bp, Homo sapiens
tcagcacttctcctt

SEQ ID NO: 1350537 - DNA, 15 bp, Homo sapiens
ctcagcacttctcct

SEQ ID NO: 1350538 - DNA, 15 bp, Homo sapiens
tctcagcacttctcc

SEQ ID NO: 1350539 - DNA, 15 bp, Homo sapiens
ttctcagcacttctc

SEQ ID NO: 1350540 - DNA, 15 bp, Homo sapiens
tttctcagcacttct

SEQ ID NO: 1350541 - DNA, 15 bp, Homo sapiens
ttttctcagcacttc

SEQ ID NO: 1350542 - DNA, 15 bp, Homo sapiens
tttttctcagcactt

SEQ ID NO: 1350543 - DNA, 15 bp, Homo sapiens
ctttttctcagcact

SEQ ID NO: 1350544 - DNA, 15 bp, Homo sapiens
cctttttctcagcac

SEQ ID NO: 1350545 - DNA, 15 bp, Homo sapiens
ccctttttctcagca

SEQ ID NO: 1350546 - DNA, 15 bp, Homo sapiens
cccctttttctcagc

SEQ ID NO: 1350547 - DNA, 15 bp, Homo sapiens
tcccctttttctcag

SEQ ID NO: 1350548 - DNA, 15 bp, Homo sapiens
ttcccctttttctca

SEQ ID NO: 1350549 - DNA, 15 bp, Homo sapiens
tttcccctttttctc

SEQ ID NO: 1350550 - DNA, 15 bp, Homo sapiens
atttcccctttttct

SEQ ID NO: 1350551 - DNA, 15 bp, Homo sapiens
catttcccctttttc

SEQ ID NO: 1350552 - DNA, 15 bp, Homo sapiens
gcatttccccttttt

SEQ ID NO: 1350553 - DNA, 15 bp, Homo sapiens
ggcatttcccctttt

SEQ ID NO: 1350554 - DNA, 15 bp, Homo sapiens
tggcatttccccttt

SEQ ID NO: 1350555 - DNA, 15 bp, Homo sapiens
gtggcatttcccctt

SEQ ID NO: 1350556 - DNA, 15 bp, Homo sapiens
agtggcatttcccct

SEQ ID NO: 1350557 - DNA, 15 bp, Homo sapiens
aagtggcatttcccc

SEQ ID NO: 1350558 - DNA, 15 bp, Homo sapiens
taagtggcatttccc

SEQ ID NO: 1350559 - DNA, 15 bp, Homo sapiens
ataagtggcatttcc

SEQ ID NO: 1350560 - DNA, 15 bp, Homo sapiens
tataagtggcatttc

SEQ ID NO: 1350561 - DNA, 15 bp, Homo sapiens
ttataagtggcattt

SEQ ID NO: 1350562 - DNA, 15 bp, Homo sapiens
tttataagtggcatt

SEQ ID NO: 1350563 - DNA, 15 bp, Homo sapiens
ctttataagtggcat

SEQ ID NO: 1350564 - DNA, 15 bp, Homo sapiens
gctttataagtggca

SEQ ID NO: 1350565 - DNA, 15 bp, Homo sapiens
ggctttataagtggc

SEQ ID NO: 1350566 - DNA, 15 bp, Homo sapiens
tggctttataagtgg

SEQ ID NO: 1350567 - DNA, 15 bp, Homo sapiens
atggctttataagtg

SEQ ID NO: 1350568 - DNA, 15 bp, Homo sapiens
gatggctttataagt

SEQ ID NO: 1350569 - DNA, 15 bp, Homo sapiens
tgatggctttataag

SEQ ID NO: 1350570 - DNA, 15 bp, Homo sapiens
ctgatggctttataa

SEQ ID NO: 1350571 - DNA, 15 bp, Homo sapiens
tctgatggctttata

SEQ ID NO: 1350572 - DNA, 15 bp, Homo sapiens
atctgatggctttat

SEQ ID NO: 1350573 - DNA, 15 bp, Homo sapiens
gatctgatggcttta

SEQ ID NO: 1350574 - DNA, 15 bp, Homo sapiens
agatctgatggcttt

SEQ ID NO: 1350575 - DNA, 15 bp, Homo sapiens
aagatctgatggctt

SEQ ID NO: 1350576 - DNA, 15 bp, Homo sapiens
aaagatctgatggct

SEQ ID NO: 1350577 - DNA, 15 bp, Homo sapiens
aaaagatctgatggc

SEQ ID NO: 1350578 - DNA, 15 bp, Homo sapiens
caaaagatctgatgg

SEQ ID NO: 1350579 - DNA, 15 bp, Homo sapiens
tcaaaagatctgatg

SEQ ID NO: 1350580 - DNA, 15 bp, Homo sapiens
ctcaaaagatctgat

SEQ ID NO: 1350581 - DNA, 15 bp, Homo sapiens
tctcaaaagatctga

SEQ ID NO: 1350582 - DNA, 15 bp, Homo sapiens
ctctcaaaagatctg

SEQ ID NO: 1350583 - DNA, 15 bp, Homo sapiens
gctctcaaaagatct

SEQ ID NO: 1350584 - DNA, 15 bp, Homo sapiens
agctctcaaaagatc

SEQ ID NO: 1350585 - DNA, 15 bp, Homo sapiens
aagctctcaaaagat

SEQ ID NO: 1350586 - DNA, 15 bp, Homo sapiens
taagctctcaaaaga

SEQ ID NO: 1350587 - DNA, 15 bp, Homo sapiens
gtaagctctcaaaag

SEQ ID NO: 1350588 - DNA, 15 bp, Homo sapiens
agtaagctctcaaaa

SEQ ID NO: 1350589 - DNA, 15 bp, Homo sapiens
tagtaagctctcaaa

SEQ ID NO: 1350590 - DNA, 15 bp, Homo sapiens
atagtaagctctcaa

SEQ ID NO: 1350591 - DNA, 15 bp, Homo sapiens
gatagtaagctctca

SEQ ID NO: 1350592 - DNA, 15 bp, Homo sapiens
tgatagtaagctctc

SEQ ID NO: 1350593 - DNA, 15 bp, Homo sapiens
atgatagtaagctct

SEQ ID NO: 1350594 - DNA, 15 bp, Homo sapiens
catgatagtaagctc

SEQ ID NO: 1350595 - DNA, 15 bp, Homo sapiens
tcatgatagtaagct

SEQ ID NO: 1350596 - DNA, 15 bp, Homo sapiens
ctcatgatagtaagc

SEQ ID NO: 1350597 - DNA, 15 bp, Homo sapiens
tctcatgatagtaag

SEQ ID NO: 1350598 - DNA, 15 bp, Homo sapiens
ttctcatgatagtaa

SEQ ID NO: 1350599 - DNA, 15 bp, Homo sapiens
gttctcatgatagta

SEQ ID NO: 1350600 - DNA, 15 bp, Homo sapiens
accatgctgttctca

SEQ ID NO: 1350601 - DNA, 15 bp, Homo sapiens
caccatgctgttctc

SEQ ID NO: 1350602 - DNA, 15 bp, Homo sapiens
ccaccatgctgttct

SEQ ID NO: 1350603 - DNA, 15 bp, Homo sapiens
accaccatgctgttc

SEQ ID NO: 1350604 - DNA, 15 bp, Homo sapiens
taccaccatgctgtt

SEQ ID NO: 1350605 - DNA, 15 bp, Homo sapiens
ttaccaccatgctgt

SEQ ID NO: 1350606 - DNA, 15 bp, Homo sapiens
gttaccaccatgctg

SEQ ID NO: 1350607 - DNA, 15 bp, Homo sapiens
agttaccaccatgct

SEQ ID NO: 1350608 - DNA, 15 bp, Homo sapiens
gagttaccaccatgc

SEQ ID NO: 1350609 - DNA, 15 bp, Homo sapiens
ggagttaccaccatg

SEQ ID NO: 1350610 - DNA, 15 bp, Homo sapiens
gggagttaccaccat

SEQ ID NO: 1350611 - DNA, 15 bp, Homo sapiens
ggggagttaccacca

SEQ ID NO: 1350612 - DNA, 15 bp, Homo sapiens
gggggagttaccacc

SEQ ID NO: 1350613 - DNA, 15 bp, Homo sapiens
agggggagttaccac

SEQ ID NO: 1350614 - DNA, 15 bp, Homo sapiens
tagggggagttacca

SEQ ID NO: 1350615 - DNA, 15 bp, Homo sapiens
atagggggagttacc

SEQ ID NO: 1350616 - DNA, 15 bp, Homo sapiens
catagggggagttac

SEQ ID NO: 1350617 - DNA, 15 bp, Homo sapiens
tcatagggggagtta

SEQ ID NO: 1350618 - DNA, 15 bp, Homo sapiens
atcatagggggagtt

SEQ ID NO: 1350619 - DNA, 15 bp, Homo sapiens
aatcatagggggagt

SEQ ID NO: 1350620 - DNA, 15 bp, Homo sapiens
gaatcatagggggag

SEQ ID NO: 1350621 - DNA, 15 bp, Homo sapiens
tgaatcataggggga

SEQ ID NO: 1350622 - DNA, 15 bp, Homo sapiens
ttgaatcataggggg

SEQ ID NO: 1350623 - DNA, 15 bp, Homo sapiens
attgaatcatagggg

SEQ ID NO: 1350624 - DNA, 15 bp, Homo sapiens
aattgaatcataggg

SEQ ID NO: 1350625 - DNA, 15 bp, Homo sapiens
taattgaatcatagg

SEQ ID NO: 1350626 - DNA, 15 bp, Homo sapiens
gtaattgaatcatag

SEQ ID NO: 1350627 - DNA, 15 bp, Homo sapiens
ggtaattgaatcata

SEQ ID NO: 1350628 - DNA, 15 bp, Homo sapiens
agtgggaggtaattg

SEQ ID NO: 1350629 - DNA, 15 bp, Homo sapiens
cagtgggaggtaatt

SEQ ID NO: 1350630 - DNA, 15 bp, Homo sapiens
tcagtgggaggtaat

SEQ ID NO: 1350631 - DNA, 15 bp, Homo sapiens
ctcagtgggaggtaa

SEQ ID NO: 1350632 - DNA, 15 bp, Homo sapiens
actcagtgggaggta

SEQ ID NO: 1350633 - DNA, 15 bp, Homo sapiens
gactcagtgggaggt

SEQ ID NO: 1350634 - DNA, 15 bp, Homo sapiens
ggactcagtgggagg

SEQ ID NO: 1350635 - DNA, 15 bp, Homo sapiens
gggactcagtgggag

SEQ ID NO: 1350636 - DNA, 15 bp, Homo sapiens
agggactcagtggga

SEQ ID NO: 1350637 - DNA, 15 bp, Homo sapiens
gagggactcagtggg

SEQ ID NO: 1350638 - DNA, 15 bp, Homo sapiens
ggagggactcagtgg

SEQ ID NO: 1350639 - DNA, 15 bp, Homo sapiens
gggagggactcagtg

SEQ ID NO: 1350640 - DNA, 15 bp, Homo sapiens
tgggagggactcagt

SEQ ID NO: 1350641 - DNA, 15 bp, Homo sapiens
atgggagggactcag

SEQ ID NO: 1350642 - DNA, 15 bp, Homo sapiens
catgggagggactca

SEQ ID NO: 1350643 - DNA, 15 bp, Homo sapiens
tcatgggagggactc

SEQ ID NO: 1350644 - DNA, 15 bp, Homo sapiens
gtcatgggagggact

SEQ ID NO: 1350645 - DNA, 15 bp, Homo sapiens
tgtcatgggagggac

SEQ ID NO: 1350646 - DNA, 15 bp, Homo sapiens
gtgtcatgggaggga

SEQ ID NO: 1350647 - DNA, 15 bp, Homo sapiens
tgtgtcatgggaggg

SEQ ID NO: 1350648 - DNA, 15 bp, Homo sapiens
atgtgtcatgggagg

SEQ ID NO: 1350649 - DNA, 15 bp, Homo sapiens
catgtgtcatgggag

SEQ ID NO: 1350650 - DNA, 15 bp, Homo sapiens
ccatgtgtcatggga

SEQ ID NO: 1350651 - DNA, 15 bp, Homo sapiens
cccatgtgtcatggg

SEQ ID NO: 1350652 - DNA, 15 bp, Homo sapiens
ccccatgtgtcatgg

SEQ ID NO: 1350653 - DNA, 15 bp, Homo sapiens
tccccatgtgtcatg

SEQ ID NO: 1350654 - DNA, 15 bp, Homo sapiens
atccccatgtgtcat

SEQ ID NO: 1350655 - DNA, 15 bp, Homo sapiens
aatccccatgtgtca

SEQ ID NO: 1350656 - DNA, 15 bp, Homo sapiens
taatccccatgtgtc

SEQ ID NO: 1350657 - DNA, 15 bp, Homo sapiens
gtaatccccatgtgt

SEQ ID NO: 1350658 - DNA, 15 bp, Homo sapiens
cgtaatccccatgtg

SEQ ID NO: 1350659 - DNA, 15 bp, Homo sapiens
ccgtaatccccatgt

SEQ ID NO: 1350660 - DNA, 15 bp, Homo sapiens
cccgtaatccccatg

SEQ ID NO: 1350661 - DNA, 15 bp, Homo sapiens
tcccgtaatccccat

SEQ ID NO: 1350662 - DNA, 15 bp, Homo sapiens
ttcccgtaatcccca

SEQ ID NO: 1350663 - DNA, 15 bp, Homo sapiens
gttcccgtaatcccc

SEQ ID NO: 1350664 - DNA, 15 bp, Homo sapiens
agttcccgtaatccc

SEQ ID NO: 1350665 - DNA, 15 bp, Homo sapiens
tagttcccgtaatcc

SEQ ID NO: 1350666 - DNA, 15 bp, Homo sapiens
gtagttcccgtaatc

SEQ ID NO: 1350667 - DNA, 15 bp, Homo sapiens
tgtagttcccgtaat

SEQ ID NO: 1350668 - DNA, 15 bp, Homo sapiens
ttgtagttcccgtaa

SEQ ID NO: 1350669 - DNA, 15 bp, Homo sapiens
attgtagttcccgta

SEQ ID NO: 1350670 - DNA, 15 bp, Homo sapiens
aattgtagttcccgt

SEQ ID NO: 1350671 - DNA, 15 bp, Homo sapiens
gaattgtagttcccg

SEQ ID NO: 1350672 - DNA, 15 bp, Homo sapiens
tgaattgtagttccc

SEQ ID NO: 1350673 - DNA, 15 bp, Homo sapiens
ttgaattgtagttcc

SEQ ID NO: 1350674 - DNA, 15 bp, Homo sapiens
cttgaattgtagttc

SEQ ID NO: 1350675 - DNA, 15 bp, Homo sapiens
tcttgaattgtagtt

SEQ ID NO: 1350676 - DNA, 15 bp, Homo sapiens
atcttgaattgtagt

SEQ ID NO: 1350677 - DNA, 15 bp, Homo sapiens
catcttgaattgtag

SEQ ID NO: 1350678 - DNA, 15 bp, Homo sapiens
tcacccaaatctcat

SEQ ID NO: 1350679 - DNA, 15 bp, Homo sapiens
ctcacccaaatctca

SEQ ID NO: 1350680 - DNA, 15 bp, Homo sapiens
cctcacccaaatctc

SEQ ID NO: 1350681 - DNA, 15 bp, Homo sapiens
tcctcacccaaatct

SEQ ID NO: 1350682 - DNA, 15 bp, Homo sapiens
gtcctcacccaaatc

SEQ ID NO: 1350683 - DNA, 15 bp, Homo sapiens
tgtcctcacccaaat

SEQ ID NO: 1350684 - DNA, 15 bp, Homo sapiens
gtgtcctcacccaaa

SEQ ID NO: 1350685 - DNA, 15 bp, Homo sapiens
tgtgtcctcacccaa

SEQ ID NO: 1350686 - DNA, 15 bp, Homo sapiens
ctgtgtcctcaccca

SEQ ID NO: 1350687 - DNA, 15 bp, Homo sapiens
gctgtgtcctcaccc

SEQ ID NO: 1350688 - DNA, 15 bp, Homo sapiens
ggctgtgtcctcacc

SEQ ID NO: 1350689 - DNA, 15 bp, Homo sapiens
tggctgtgtcctcac

SEQ ID NO: 1350690 - DNA, 15 bp, Homo sapiens
ttggctgtgtcctca

SEQ ID NO: 1350691 - DNA, 15 bp, Homo sapiens
tttggctgtgtcctc

SEQ ID NO: 1350692 - DNA, 15 bp, Homo sapiens
gtttggctgtgtcct

SEQ ID NO: 1350693 - DNA, 15 bp, Homo sapiens
tgtttggctgtgtcc

SEQ ID NO: 1350694 - DNA, 15 bp, Homo sapiens
ttgtttggctgtgtc

SEQ ID NO: 1350695 - DNA, 15 bp, Homo sapiens
attgtttggctgtgt

SEQ ID NO: 1350696 - DNA, 15 bp, Homo sapiens
tattgtttggctgtg

SEQ ID NO: 1350697 - DNA, 15 bp, Homo sapiens
atattgtttggctgt

SEQ ID NO: 1350698 - DNA, 15 bp, Homo sapiens
gatattgtttggctg

SEQ ID NO: 1350699 - DNA, 15 bp, Homo sapiens
tgatattgtttggct

SEQ ID NO: 1350700 - DNA, 15 bp, Homo sapiens
atgatattgtttggc

SEQ ID NO: 1350701 - DNA, 15 bp, Homo sapiens
aatgatattgtttgg

SEQ ID NO: 1350702 - DNA, 15 bp, Homo sapiens
aaatgatattgtttg

SEQ ID NO: 1350703 - DNA, 15 bp, Homo sapiens
gaaatgatattgttt

SEQ ID NO: 1350704 - DNA, 15 bp, Homo sapiens
tgaaatgatattgtt

SEQ ID NO: 1350705 - DNA, 15 bp, Homo sapiens
gtgaaatgatattgt

SEQ ID NO: 1350706 - DNA, 15 bp, Homo sapiens
ggtgaaatgatattg

SEQ ID NO: 1350707 - DNA, 15 bp, Homo sapiens
gggtgaaatgatatt

SEQ ID NO: 1350708 - DNA, 15 bp, Homo sapiens
agggtgaaatgatat

SEQ ID NO: 1350709 - DNA, 15 bp, Homo sapiens
aagggtgaaatgata

SEQ ID NO: 1350710 - DNA, 15 bp, Homo sapiens
caagggtgaaatgat

SEQ ID NO: 1350711 - DNA, 15 bp, Homo sapiens
ccaagggtgaaatga

SEQ ID NO: 1350712 - DNA, 15 bp, Homo sapiens
gccaagggtgaaatg

SEQ ID NO: 1350713 - DNA, 15 bp, Homo sapiens
ggccaagggtgaaat

SEQ ID NO: 1350714 - DNA, 15 bp, Homo sapiens
gggccaagggtgaaa

SEQ ID NO: 1350715 - DNA, 15 bp, Homo sapiens
ggggccaagggtgaa

SEQ ID NO: 1350716 - DNA, 15 bp, Homo sapiens
aggggccaagggtga

SEQ ID NO: 1350717 - DNA, 15 bp, Homo sapiens
gaggggccaagggtg

SEQ ID NO: 1350718 - DNA, 15 bp, Homo sapiens
ggaggggccaagggt

SEQ ID NO: 1350719 - DNA, 15 bp, Homo sapiens
gggaggggccaaggg

SEQ ID NO: 1350720 - DNA, 15 bp, Homo sapiens
tgggaggggccaagg

SEQ ID NO: 1350721 - DNA, 15 bp, Homo sapiens
ttgggaggggccaag

SEQ ID NO: 1350722 - DNA, 15 bp, Homo sapiens
tttgggaggggccaa

SEQ ID NO: 1350723 - DNA, 15 bp, Homo sapiens
atttgggaggggcca

SEQ ID NO: 1350724 - DNA, 15 bp, Homo sapiens
gatttgggaggggcc

SEQ ID NO: 1350725 - DNA, 15 bp, Homo sapiens
agatttgggaggggc

SEQ ID NO: 1350726 - DNA, 15 bp, Homo sapiens
gagatttgggagggg

SEQ ID NO: 1350727 - DNA, 15 bp, Homo sapiens
tgagatttgggaggg

SEQ ID NO: 1350728 - DNA, 15 bp, Homo sapiens
atgagatttgggagg

SEQ ID NO: 1350729 - DNA, 15 bp, Homo sapiens
catgagatttgggag

SEQ ID NO: 1350730 - DNA, 15 bp, Homo sapiens
acatgagatttggga

SEQ ID NO: 1350731 - DNA, 15 bp, Homo sapiens
gacatgagatttggg

SEQ ID NO: 1350732 - DNA, 15 bp, Homo sapiens
ggacatgagatttgg

SEQ ID NO: 1350733 - DNA, 15 bp, Homo sapiens
aggacatgagatttg

SEQ ID NO: 1350734 - DNA, 15 bp, Homo sapiens
gaggacatgagattt

SEQ ID NO: 1350735 - DNA, 15 bp, Homo sapiens
tgaggacatgagatt

SEQ ID NO: 1350736 - DNA, 15 bp, Homo sapiens
gtgaggacatgagat

SEQ ID NO: 1350737 - DNA, 15 bp, Homo sapiens
tgtgaggacatgaga

SEQ ID NO: 1350738 - DNA, 15 bp, Homo sapiens
atgtgaggacatgag

SEQ ID NO: 1350739 - DNA, 15 bp, Homo sapiens
aatgtgaggacatga

SEQ ID NO: 1350740 - DNA, 15 bp, Homo sapiens
aaatgtgaggacatg

SEQ ID NO: 1350741 - DNA, 15 bp, Homo sapiens
gaaatgtgaggacat

SEQ ID NO: 1350742 - DNA, 15 bp, Homo sapiens
tgaaatgtgaggaca

SEQ ID NO: 1350743 - DNA, 15 bp, Homo sapiens
ttgaaatgtgaggac

SEQ ID NO: 1350744 - DNA, 15 bp, Homo sapiens
tttgaaatgtgagga

SEQ ID NO: 1350745 - DNA, 15 bp, Homo sapiens
ttttgaaatgtgagg

SEQ ID NO: 1350746 - DNA, 15 bp, Homo sapiens
gttttgaaatgtgag

SEQ ID NO: 1350747 - DNA, 15 bp, Homo sapiens
tgttttgaaatgtga

SEQ ID NO: 1350748 - DNA, 15 bp, Homo sapiens
gtgttttgaaatgtg

SEQ ID NO: 1350749 - DNA, 15 bp, Homo sapiens
tgtgttttgaaatgt

SEQ ID NO: 1350750 - DNA, 15 bp, Homo sapiens
ttgtgttttgaaatg

SEQ ID NO: 1350751 - DNA, 15 bp, Homo sapiens
attgtgttttgaaat

SEQ ID NO: 1350752 - DNA, 15 bp, Homo sapiens
gattgtgttttgaaa

SEQ ID NO: 1350753 - DNA, 15 bp, Homo sapiens
tgattgtgttttgaa

SEQ ID NO: 1350754 - DNA, 15 bp, Homo sapiens
atgattgtgttttga

SEQ ID NO: 1350755 - DNA, 15 bp, Homo sapiens
catgattgtgttttg

SEQ ID NO: 1350756 - DNA, 15 bp, Homo sapiens
gcatgattgtgtttt

SEQ ID NO: 1350757 - DNA, 15 bp, Homo sapiens
ggcatgattgtgttt

SEQ ID NO: 1350758 - DNA, 15 bp, Homo sapiens
aggcatgattgtgtt

SEQ ID NO: 1350759 - DNA, 15 bp, Homo sapiens
aaggcatgattgtgt

SEQ ID NO: 1350760 - DNA, 15 bp, Homo sapiens
gaaggcatgattgtg

SEQ ID NO: 1350761 - DNA, 15 bp, Homo sapiens
ggaaggcatgattgt

SEQ ID NO: 1350762 - DNA, 15 bp, Homo sapiens
gggaaggcatgattg

SEQ ID NO: 1350763 - DNA, 15 bp, Homo sapiens
tgggaaggcatgatt

SEQ ID NO: 1350764 - DNA, 15 bp, Homo sapiens
ttgggaaggcatgat

SEQ ID NO: 1350765 - DNA, 15 bp, Homo sapiens
gttgggaaggcatga

SEQ ID NO: 1350766 - DNA, 15 bp, Homo sapiens
tgttgggaaggcatg

SEQ ID NO: 1350767 - DNA, 15 bp, Homo sapiens
ctgttgggaaggcat

SEQ ID NO: 1350768 - DNA, 15 bp, Homo sapiens
actgttgggaaggca

SEQ ID NO: 1350769 - DNA, 15 bp, Homo sapiens
aactgttgggaaggc

SEQ ID NO: 1350770 - DNA, 15 bp, Homo sapiens
gaactgttgggaagg

SEQ ID NO: 1350771 - DNA, 15 bp, Homo sapiens
ggaactgttgggaag

SEQ ID NO: 1350772 - DNA, 15 bp, Homo sapiens
gggaactgttgggaa

SEQ ID NO: 1350773 - DNA, 15 bp, Homo sapiens
ggggaactgttggga

SEQ ID NO: 1350774 - DNA, 15 bp, Homo sapiens
tggggaactgttggg

SEQ ID NO: 1350775 - DNA, 15 bp, Homo sapiens
ttggggaactgttgg

SEQ ID NO: 1350776 - DNA, 15 bp, Homo sapiens
tttggggaactgttg

SEQ ID NO: 1350777 - DNA, 15 bp, Homo sapiens
ctttggggaactgtt

SEQ ID NO: 1350778 - DNA, 15 bp, Homo sapiens
actttggggaactgt

SEQ ID NO: 1350779 - DNA, 15 bp, Homo sapiens
gactttggggaactg

SEQ ID NO: 1350780 - DNA, 15 bp, Homo sapiens
agactttggggaact

SEQ ID NO: 1350781 - DNA, 15 bp, Homo sapiens
aagactttggggaac

SEQ ID NO: 1350782 - DNA, 15 bp, Homo sapiens
taagactttggggaa

SEQ ID NO: 1350783 - DNA, 15 bp, Homo sapiens
ctaagactttgggga

SEQ ID NO: 1350784 - DNA, 15 bp, Homo sapiens
gctaagactttgggg

SEQ ID NO: 1350785 - DNA, 15 bp, Homo sapiens
agctaagactttggg

SEQ ID NO: 1350786 - DNA, 15 bp, Homo sapiens
gagctaagactttgg

SEQ ID NO: 1350787 - DNA, 15 bp, Homo sapiens
tgagctaagactttg

SEQ ID NO: 1350788 - DNA, 15 bp, Homo sapiens
atgagctaagacttt

SEQ ID NO: 1350789 - DNA, 15 bp, Homo sapiens
aatgagctaagactt

SEQ ID NO: 1350790 - DNA, 15 bp, Homo sapiens
gaatgagctaagact

SEQ ID NO: 1350791 - DNA, 15 bp, Homo sapiens
ggaatgagctaagac

SEQ ID NO: 1350792 - DNA, 15 bp, Homo sapiens
tggaatgagctaaga

SEQ ID NO: 1350793 - DNA, 15 bp, Homo sapiens
ctggaatgagctaag

SEQ ID NO: 1350794 - DNA, 15 bp, Homo sapiens
gctggaatgagctaa

SEQ ID NO: 1350795 - DNA, 15 bp, Homo sapiens
tgctggaatgagcta

SEQ ID NO: 1350796 - DNA, 15 bp, Homo sapiens
atgctggaatgagct

SEQ ID NO: 1350797 - DNA, 15 bp, Homo sapiens
aatgctggaatgagc

SEQ ID NO: 1350798 - DNA, 15 bp, Homo sapiens
taatgctggaatgag

SEQ ID NO: 1350799 - DNA, 15 bp, Homo sapiens
ttaatgctggaatga

SEQ ID NO: 1350800 - DNA, 15 bp, Homo sapiens
gttaatgctggaatg

SEQ ID NO: 1350801 - DNA, 15 bp, Homo sapiens
agttaatgctggaat

SEQ ID NO: 1350802 - DNA, 15 bp, Homo sapiens
gagttaatgctggaa

SEQ ID NO: 1350803 - DNA, 15 bp, Homo sapiens
tgagttaatgctgga

SEQ ID NO: 1350804 - DNA, 15 bp, Homo sapiens
ttgagttaatgctgg

SEQ ID NO: 1350805 - DNA, 15 bp, Homo sapiens
tttgagttaatgctg

SEQ ID NO: 1350806 - DNA, 15 bp, Homo sapiens
ttttgagttaatgct

SEQ ID NO: 1350807 - DNA, 15 bp, Homo sapiens
cttttgagttaatgc

SEQ ID NO: 1350808 - DNA, 15 bp, Homo sapiens
acttttgagttaatg

SEQ ID NO: 1350809 - DNA, 15 bp, Homo sapiens
gacttttgagttaat

SEQ ID NO: 1350810 - DNA, 15 bp, Homo sapiens
ggacttttgagttaa

SEQ ID NO: 1350811 - DNA, 15 bp, Homo sapiens
tggacttttgagtta

SEQ ID NO: 1350812 - DNA, 15 bp, Homo sapiens
ctggacttttgagtt

SEQ ID NO: 1350813 - DNA, 15 bp, Homo sapiens
cctggacttttgagt

SEQ ID NO: 1350814 - DNA, 15 bp, Homo sapiens
acctggacttttgag

SEQ ID NO: 1350815 - DNA, 15 bp, Homo sapiens
gacctggacttttga

SEQ ID NO: 1350816 - DNA, 15 bp, Homo sapiens
ggacctggacttttg

SEQ ID NO: 1350817 - DNA, 15 bp, Homo sapiens
tggacctggactttt

SEQ ID NO: 1350818 - DNA, 15 bp, Homo sapiens
ttggacctggacttt

SEQ ID NO: 1350819 - DNA, 15 bp, Homo sapiens
tttggacctggactt

SEQ ID NO: 1350820 - DNA, 15 bp, Homo sapiens
ctttggacctggact

SEQ ID NO: 1350821 - DNA, 15 bp, Homo sapiens
actttggacctggac

SEQ ID NO: 1350822 - DNA, 15 bp, Homo sapiens
gactttggacctgga

SEQ ID NO: 1350823 - DNA, 15 bp, Homo sapiens
agactttggacctgg

SEQ ID NO: 1350824 - DNA, 15 bp, Homo sapiens
gagactttggacctg

SEQ ID NO: 1350825 - DNA, 15 bp, Homo sapiens
tgagactttggacct

SEQ ID NO: 1350826 - DNA, 15 bp, Homo sapiens
atgagactttggacc

SEQ ID NO: 1350827 - DNA, 15 bp, Homo sapiens
gatgagactttggac

SEQ ID NO: 1350828 - DNA, 15 bp, Homo sapiens
agatgagactttgga

SEQ ID NO: 1350829 - DNA, 15 bp, Homo sapiens
cagatgagactttgg

SEQ ID NO: 1350830 - DNA, 15 bp, Homo sapiens
tcagatgagactttg

SEQ ID NO: 1350831 - DNA, 15 bp, Homo sapiens
ctcagatgagacttt

SEQ ID NO: 1350832 - DNA, 15 bp, Homo sapiens
tctcagatgagactt

SEQ ID NO: 1350833 - DNA, 15 bp, Homo sapiens
gtctcagatgagact

SEQ ID NO: 1350834 - DNA, 15 bp, Homo sapiens
tgtctcagatgagac

SEQ ID NO: 1350835 - DNA, 15 bp, Homo sapiens
ttgtctcagatgaga

SEQ ID NO: 1350836 - DNA, 15 bp, Homo sapiens
cttgtctcagatgag

SEQ ID NO: 1350837 - DNA, 15 bp, Homo sapiens
ccttgtctcagatga

SEQ ID NO: 1350838 - DNA, 15 bp, Homo sapiens
gccttgtctcagatg

SEQ ID NO: 1350839 - DNA, 15 bp, Homo sapiens
tgccttgtctcagat

SEQ ID NO: 1350840 - DNA, 15 bp, Homo sapiens
ttgccttgtctcaga

SEQ ID NO: 1350841 - DNA, 15 bp, Homo sapiens
cttgccttgtctcag

SEQ ID NO: 1350842 - DNA, 15 bp, Homo sapiens
acttgccttgtctca

SEQ ID NO: 1350843 - DNA, 15 bp, Homo sapiens
gacttgccttgtctc

SEQ ID NO: 1350844 - DNA, 15 bp, Homo sapiens
ggacttgccttgtct

SEQ ID NO: 1350845 - DNA, 15 bp, Homo sapiens
gggacttgccttgtc

SEQ ID NO: 1350846 - DNA, 15 bp, Homo sapiens
agggacttgccttgt

SEQ ID NO: 1350847 - DNA, 15 bp, Homo sapiens
aagggacttgccttg

SEQ ID NO: 1350848 - DNA, 15 bp, Homo sapiens
gaagggacttgcctt

SEQ ID NO: 1350849 - DNA, 15 bp, Homo sapiens
agaagggacttgcct

SEQ ID NO: 1350850 - DNA, 15 bp, Homo sapiens
cagaagggacttgcc

SEQ ID NO: 1350851 - DNA, 15 bp, Homo sapiens
gcagaagggacttgc

SEQ ID NO: 1350852 - DNA, 15 bp, Homo sapiens
ggcagaagggacttg

SEQ ID NO: 1350853 - DNA, 15 bp, Homo sapiens
aggcagaagggactt

SEQ ID NO: 1350854 - DNA, 15 bp, Homo sapiens
taggcagaagggact

SEQ ID NO: 1350855 - DNA, 15 bp, Homo sapiens
ataggcagaagggac

SEQ ID NO: 1350856 - DNA, 15 bp, Homo sapiens
cataggcagaaggga

SEQ ID NO: 1350857 - DNA, 15 bp, Homo sapiens
tcataggcagaaggg

SEQ ID NO: 1350858 - DNA, 15 bp, Homo sapiens
ctcataggcagaagg

SEQ ID NO: 1350859 - DNA, 15 bp, Homo sapiens
gctcataggcagaag

SEQ ID NO: 1350860 - DNA, 15 bp, Homo sapiens
ggctcataggcagaa

SEQ ID NO: 1350861 - DNA, 15 bp, Homo sapiens
aggctcataggcaga

SEQ ID NO: 1350862 - DNA, 15 bp, Homo sapiens
caggctcataggcag

SEQ ID NO: 1350863 - DNA, 15 bp, Homo sapiens
acaggctcataggca

SEQ ID NO: 1350864 - DNA, 15 bp, Homo sapiens
tacaggctcataggc

SEQ ID NO: 1350865 - DNA, 15 bp, Homo sapiens
ttacaggctcatagg

SEQ ID NO: 1350866 - DNA, 15 bp, Homo sapiens
tttacaggctcatag

SEQ ID NO: 1350867 - DNA, 15 bp, Homo sapiens
ttttacaggctcata

SEQ ID NO: 1350868 - DNA, 15 bp, Homo sapiens
attttacaggctcat

SEQ ID NO: 1350869 - DNA, 15 bp, Homo sapiens
gattttacaggctca

SEQ ID NO: 1350870 - DNA, 15 bp, Homo sapiens
tgattttacaggctc

SEQ ID NO: 1350871 - DNA, 15 bp, Homo sapiens
ttgattttacaggct

SEQ ID NO: 1350872 - DNA, 15 bp, Homo sapiens
tttgattttacaggc

SEQ ID NO: 1350873 - DNA, 15 bp, Homo sapiens
ttttgattttacagg

SEQ ID NO: 1350874 - DNA, 15 bp, Homo sapiens
cttttgattttacag

SEQ ID NO: 1350875 - DNA, 15 bp, Homo sapiens
gcttttgattttaca

SEQ ID NO: 1350876 - DNA, 15 bp, Homo sapiens
tgcttttgattttac

SEQ ID NO: 1350877 - DNA, 15 bp, Homo sapiens
ttgcttttgatttta

SEQ ID NO: 1350878 - DNA, 15 bp, Homo sapiens
cttgcttttgatttt

SEQ ID NO: 1350879 - DNA, 15 bp, Homo sapiens
acttgcttttgattt

SEQ ID NO: 1350880 - DNA, 15 bp, Homo sapiens
aacttgcttttgatt

SEQ ID NO: 1350881 - DNA, 15 bp, Homo sapiens
taacttgcttttgat

SEQ ID NO: 1350882 - DNA, 15 bp, Homo sapiens
ctaacttgcttttga

SEQ ID NO: 1350883 - DNA, 15 bp, Homo sapiens
actaacttgcttttg

SEQ ID NO: 1350884 - DNA, 15 bp, Homo sapiens
aactaacttgctttt

SEQ ID NO: 1350885 - DNA, 15 bp, Homo sapiens
taactaacttgcttt

SEQ ID NO: 1350886 - DNA, 15 bp, Homo sapiens
gtaactaacttgctt

SEQ ID NO: 1350887 - DNA, 15 bp, Homo sapiens
agtaactaacttgct

SEQ ID NO: 1350888 - DNA, 15 bp, Homo sapiens
aagtaactaacttgc

SEQ ID NO: 1350889 - DNA, 15 bp, Homo sapiens
gaagtaactaacttg

SEQ ID NO: 1350890 - DNA, 15 bp, Homo sapiens
ggaagtaactaactt

SEQ ID NO: 1350891 - DNA, 15 bp, Homo sapiens
aggaagtaactaact

SEQ ID NO: 1350892 - DNA, 15 bp, Homo sapiens
taggaagtaactaac

SEQ ID NO: 1350893 - DNA, 15 bp, Homo sapiens
ctaggaagtaactaa

SEQ ID NO: 1350894 - DNA, 15 bp, Homo sapiens
tctaggaagtaacta

SEQ ID NO: 1350895 - DNA, 15 bp, Homo sapiens
atctaggaagtaact

SEQ ID NO: 1350896 - DNA, 15 bp, Homo sapiens
tatctaggaagtaac

SEQ ID NO: 1350897 - DNA, 15 bp, Homo sapiens
gtatctaggaagtaa

SEQ ID NO: 1350898 - DNA, 15 bp, Homo sapiens
ggtatctaggaagta

SEQ ID NO: 1350899 - DNA, 15 bp, Homo sapiens
tggtatctaggaagt

SEQ ID NO: 1350900 - DNA, 15 bp, Homo sapiens
atggtatctaggaag

SEQ ID NO: 1350901 - DNA, 15 bp, Homo sapiens
catggtatctaggaa

SEQ ID NO: 1350902 - DNA, 15 bp, Homo sapiens
ccatggtatctagga

SEQ ID NO: 1350903 - DNA, 15 bp, Homo sapiens
cccatggtatctagg

SEQ ID NO: 1350904 - DNA, 15 bp, Homo sapiens
tcccatggtatctag

SEQ ID NO: 1350905 - DNA, 15 bp, Homo sapiens
ctcccatggtatcta

SEQ ID NO: 1350906 - DNA, 15 bp, Homo sapiens
actcccatggtatct

SEQ ID NO: 1350907 - DNA, 15 bp, Homo sapiens
tactcccatggtatc

SEQ ID NO: 1350908 - DNA, 15 bp, Homo sapiens
gtactcccatggtat

SEQ ID NO: 1350909 - DNA, 15 bp, Homo sapiens
tgtactcccatggta

SEQ ID NO: 1350910 - DNA, 15 bp, Homo sapiens
ctgtactcccatggt

SEQ ID NO: 1350911 - DNA, 15 bp, Homo sapiens
cctgtactcccatgg

SEQ ID NO: 1350912 - DNA, 15 bp, Homo sapiens
acctgtactcccatg

SEQ ID NO: 1350913 - DNA, 15 bp, Homo sapiens
tacctgtactcccat

SEQ ID NO: 1350914 - DNA, 15 bp, Homo sapiens
atacctgtactccca

SEQ ID NO: 1350915 - DNA, 15 bp, Homo sapiens
aatacctgtactccc

SEQ ID NO: 1350916 - DNA, 15 bp, Homo sapiens
caatacctgtactcc

SEQ ID NO: 1350917 - DNA, 15 bp, Homo sapiens
ccaatacctgtactc

SEQ ID NO: 1350918 - DNA, 15 bp, Homo sapiens
cccaatacctgtact

SEQ ID NO: 1350919 - DNA, 15 bp, Homo sapiens
acccaatacctgtac

SEQ ID NO: 1350920 - DNA, 15 bp, Homo sapiens
gacccaatacctgta

SEQ ID NO: 1350921 - DNA, 15 bp, Homo sapiens
tgacccaatacctgt

SEQ ID NO: 1350922 - DNA, 15 bp, Homo sapiens
ttgacccaatacctg

SEQ ID NO: 1350923 - DNA, 15 bp, Homo sapiens
attgacccaatacct

SEQ ID NO: 1350924 - DNA, 15 bp, Homo sapiens
tattgacccaatacc

SEQ ID NO: 1350925 - DNA, 15 bp, Homo sapiens
gtattgacccaatac

SEQ ID NO: 1350926 - DNA, 15 bp, Homo sapiens
tgtattgacccaata

SEQ ID NO: 1350927 - DNA, 15 bp, Homo sapiens
gtgtattgacccaat

SEQ ID NO: 1350928 - DNA, 15 bp, Homo sapiens
ggtgtattgacccaa

SEQ ID NO: 1350929 - DNA, 15 bp, Homo sapiens
gggtgtattgaccca

SEQ ID NO: 1350930 - DNA, 15 bp, Homo sapiens
tgggtgtattgaccc

SEQ ID NO: 1350931 - DNA, 15 bp, Homo sapiens
atgggtgtattgacc

SEQ ID NO: 1350932 - DNA, 15 bp, Homo sapiens
aatgggtgtattgac

SEQ ID NO: 1350933 - DNA, 15 bp, Homo sapiens
gaatgggtgtattga

SEQ ID NO: 1350934 - DNA, 15 bp, Homo sapiens
ggaatgggtgtattg

SEQ ID NO: 1350935 - DNA, 15 bp, Homo sapiens
tggaatgggtgtatt

SEQ ID NO: 1350936 - DNA, 15 bp, Homo sapiens
ttggaatgggtgtat

SEQ ID NO: 1350937 - DNA, 15 bp, Homo sapiens
tttggaatgggtgta

SEQ ID NO: 1350938 - DNA, 15 bp, Homo sapiens
atttggaatgggtgt

SEQ ID NO: 1350939 - DNA, 15 bp, Homo sapiens
tatttggaatgggtg

SEQ ID NO: 1350940 - DNA, 15 bp, Homo sapiens
ctatttggaatgggt

SEQ ID NO: 1350941 - DNA, 15 bp, Homo sapiens
tctatttggaatggg

SEQ ID NO: 1350942 - DNA, 15 bp, Homo sapiens
ttctatttggaatgg

SEQ ID NO: 1350943 - DNA, 15 bp, Homo sapiens
cttctatttggaatg

SEQ ID NO: 1350944 - DNA, 15 bp, Homo sapiens
tcttctatttggaat

SEQ ID NO: 1350945 - DNA, 15 bp, Homo sapiens
ttcttctatttggaa

SEQ ID NO: 1350946 - DNA, 15 bp, Homo sapiens
tttcttctatttgga

SEQ ID NO: 1350947 - DNA, 15 bp, Homo sapiens
atttcttctatttgg

SEQ ID NO: 1350948 - DNA, 15 bp, Homo sapiens
aatttcttctatttg

SEQ ID NO: 1350949 - DNA, 15 bp, Homo sapiens
caatttcttctattt

SEQ ID NO: 1350950 - DNA, 15 bp, Homo sapiens
acaatttcttctatt

SEQ ID NO: 1350951 - DNA, 15 bp, Homo sapiens
aacaatttcttctat

SEQ ID NO: 1350952 - DNA, 15 bp, Homo sapiens
gaacaatttcttcta

SEQ ID NO: 1350953 - DNA, 15 bp, Homo sapiens
tgaacaatttcttct

SEQ ID NO: 1350954 - DNA, 15 bp, Homo sapiens
ttgaacaatttcttc

SEQ ID NO: 1350955 - DNA, 15 bp, Homo sapiens
tttgaacaatttctt

SEQ ID NO: 1350956 - DNA, 15 bp, Homo sapiens
ttttgaacaatttct

SEQ ID NO: 1350957 - DNA, 15 bp, Homo sapiens
gttttgaacaatttc

SEQ ID NO: 1350958 - DNA, 15 bp, Homo sapiens
tgttttgaacaattt

SEQ ID NO: 1350959 - DNA, 15 bp, Homo sapiens
ttgttttgaacaatt

SEQ ID NO: 1350960 - DNA, 15 bp, Homo sapiens
tttgttttgaacaat

SEQ ID NO: 1350961 - DNA, 15 bp, Homo sapiens
ctttgttttgaacaa

SEQ ID NO: 1350962 - DNA, 15 bp, Homo sapiens
cctttgttttgaaca

SEQ ID NO: 1350963 - DNA, 15 bp, Homo sapiens
ccctttgttttgaac

SEQ ID NO: 1350964 - DNA, 15 bp, Homo sapiens
cccctttgttttgaa

SEQ ID NO: 1350965 - DNA, 15 bp, Homo sapiens
gcccctttgttttga

SEQ ID NO: 1350966 - DNA, 15 bp, Homo sapiens
agcccctttgttttg

SEQ ID NO: 1350967 - DNA, 15 bp, Homo sapiens
tagcccctttgtttt

SEQ ID NO: 1350968 - DNA, 15 bp, Homo sapiens
gtagcccctttgttt

SEQ ID NO: 1350969 - DNA, 15 bp, Homo sapiens
tgtagcccctttgtt

SEQ ID NO: 1350970 - DNA, 15 bp, Homo sapiens
ctgtagcccctttgt

SEQ ID NO: 1350971 - DNA, 15 bp, Homo sapiens
cctgtagcccctttg

SEQ ID NO: 1350972 - DNA, 15 bp, Homo sapiens
gcctgtagccccttt

SEQ ID NO: 1350973 - DNA, 15 bp, Homo sapiens
ggcctgtagcccctt

SEQ ID NO: 1350974 - DNA, 15 bp, Homo sapiens
gggcctgtagcccct

SEQ ID NO: 1350975 - DNA, 15 bp, Homo sapiens
ggggcctgtagcccc

SEQ ID NO: 1350976 - DNA, 15 bp, Homo sapiens
tggggcctgtagccc

SEQ ID NO: 1350977 - DNA, 15 bp, Homo sapiens
atggggcctgtagcc

SEQ ID NO: 1350978 - DNA, 15 bp, Homo sapiens
catggggcctgtagc

SEQ ID NO: 1350979 - DNA, 15 bp, Homo sapiens
gcatggggcctgtag

SEQ ID NO: 1350980 - DNA, 15 bp, Homo sapiens
tgcatggggcctgta

SEQ ID NO: 1350981 - DNA, 15 bp, Homo sapiens
ttgcatggggcctgt

SEQ ID NO: 1350982 - DNA, 15 bp, Homo sapiens
cttgcatggggcctg

SEQ ID NO: 1350983 - DNA, 15 bp, Homo sapiens
acttgcatggggcct

SEQ ID NO: 1350984 - DNA, 15 bp, Homo sapiens
gacttgcatggggcc

SEQ ID NO: 1350985 - DNA, 15 bp, Homo sapiens
ggacttgcatggggc

SEQ ID NO: 1350986 - DNA, 15 bp, Homo sapiens
tggacttgcatgggg

SEQ ID NO: 1350987 - DNA, 15 bp, Homo sapiens
ttggacttgcatggg

SEQ ID NO: 1350988 - DNA, 15 bp, Homo sapiens
tttggacttgcatgg

SEQ ID NO: 1350989 - DNA, 15 bp, Homo sapiens
ttttggacttgcatg

SEQ ID NO: 1350990 - DNA, 15 bp, Homo sapiens
attttggacttgcat

SEQ ID NO: 1350991 - DNA, 15 bp, Homo sapiens
gattttggacttgca

SEQ ID NO: 1350992 - DNA, 15 bp, Homo sapiens
ggattttggacttgc

SEQ ID NO: 1350993 - DNA, 15 bp, Homo sapiens
tggattttggacttg

SEQ ID NO: 1350994 - DNA, 15 bp, Homo sapiens
ttggattttggactt

SEQ ID NO: 1350995 - DNA, 15 bp, Homo sapiens
attggattttggact

SEQ ID NO: 1350996 - DNA, 15 bp, Homo sapiens
tattggattttggac

SEQ ID NO: 1350997 - DNA, 15 bp, Homo sapiens
ctattggattttgga

SEQ ID NO: 1350998 - DNA, 15 bp, Homo sapiens
cctattggattttgg

SEQ ID NO: 1350999 - DNA, 15 bp, Homo sapiens
ccctattggattttg

SEQ ID NO: 1351000 - DNA, 15 bp, Homo sapiens
gccctattggatttt

SEQ ID NO: 1351001 - DNA, 15 bp, Homo sapiens
tgccctattggattt

SEQ ID NO: 1351002 - DNA, 15 bp, Homo sapiens
ttgccctattggatt

SEQ ID NO: 1351003 - DNA, 15 bp, Homo sapiens
attgccctattggat

SEQ ID NO: 1351004 - DNA, 15 bp, Homo sapiens
gattgccctattgga

SEQ ID NO: 1351005 - DNA, 15 bp, Homo sapiens
tgattgccctattgg

SEQ ID NO: 1351006 - DNA, 15 bp, Homo sapiens
atgattgccctattg

SEQ ID NO: 1351007 - DNA, 15 bp, Homo sapiens
aatgattgccctatt

SEQ ID NO: 1351008 - DNA, 15 bp, Homo sapiens
taatgattgccctat

SEQ ID NO: 1351009 - DNA, 15 bp, Homo sapiens
ttaatgattgcccta

SEQ ID NO: 1351010 - DNA, 15 bp, Homo sapiens
tttaatgattgccct

SEQ ID NO: 1351011 - DNA, 15 bp, Homo sapiens
gtttaatgattgccc

SEQ ID NO: 1351012 - DNA, 15 bp, Homo sapiens
ggtttaatgattgcc

SEQ ID NO: 1351013 - DNA, 15 bp, Homo sapiens
aggtttaatgattgc

SEQ ID NO: 1351014 - DNA, 15 bp, Homo sapiens
aaggtttaatgattg

SEQ ID NO: 1351015 - DNA, 15 bp, Homo sapiens
taaggtttaatgatt

SEQ ID NO: 1351016 - DNA, 15 bp, Homo sapiens
ttaaggtttaatgat

SEQ ID NO: 1351017 - DNA, 15 bp, Homo sapiens
tttaaggtttaatga

SEQ ID NO: 1351018 - DNA, 15 bp, Homo sapiens
ctttaaggtttaatg

SEQ ID NO: 1351019 - DNA, 15 bp, Homo sapiens
actttaaggtttaat

SEQ ID NO: 1351020 - DNA, 15 bp, Homo sapiens
aactttaaggtttaa

SEQ ID NO: 1351021 - DNA, 15 bp, Homo sapiens
taactttaaggttta

SEQ ID NO: 1351022 - DNA, 15 bp, Homo sapiens
gtaactttaaggttt

SEQ ID NO: 1351023 - DNA, 15 bp, Homo sapiens
tgtaactttaaggtt

SEQ ID NO: 1351024 - DNA, 15 bp, Homo sapiens
ttgtaactttaaggt

SEQ ID NO: 1351025 - DNA, 15 bp, Homo sapiens
tttgtaactttaagg

SEQ ID NO: 1351026 - DNA, 15 bp, Homo sapiens
ttttgtaactttaag

SEQ ID NO: 1351027 - DNA, 15 bp, Homo sapiens
attttgtaactttaa

SEQ ID NO: 1351028 - DNA, 15 bp, Homo sapiens
cattttgtaacttta

SEQ ID NO: 1351029 - DNA, 15 bp, Homo sapiens
tcattttgtaacttt

SEQ ID NO: 1351030 - DNA, 15 bp, Homo sapiens
atcattttgtaactt

SEQ ID NO: 1351031 - DNA, 15 bp, Homo sapiens
gatcattttgtaact

SEQ ID NO: 1351032 - DNA, 15 bp, Homo sapiens
ggatcattttgtaac

SEQ ID NO: 1351033 - DNA, 15 bp, Homo sapiens
gggatcattttgtaa

SEQ ID NO: 1351034 - DNA, 15 bp, Homo sapiens
ggggatcattttgta

SEQ ID NO: 1351035 - DNA, 15 bp, Homo sapiens
aggggatcattttgt

SEQ ID NO: 1351036 - DNA, 15 bp, Homo sapiens
aaggggatcattttg

SEQ ID NO: 1351037 - DNA, 15 bp, Homo sapiens
aaaggggatcatttt

SEQ ID NO: 1351038 - DNA, 15 bp, Homo sapiens
caaaggggatcattt

SEQ ID NO: 1351039 - DNA, 15 bp, Homo sapiens
tcaaaggggatcatt

SEQ ID NO: 1351040 - DNA, 15 bp, Homo sapiens
gtcaaaggggatcat

SEQ ID NO: 1351041 - DNA, 15 bp, Homo sapiens
agtcaaaggggatca

SEQ ID NO: 1351042 - DNA, 15 bp, Homo sapiens
gagtcaaaggggatc

SEQ ID NO: 1351043 - DNA, 15 bp, Homo sapiens
ggagtcaaaggggat

SEQ ID NO: 1351044 - DNA, 15 bp, Homo sapiens
tggagtcaaagggga

SEQ ID NO: 1351045 - DNA, 15 bp, Homo sapiens
atggagtcaaagggg

SEQ ID NO: 1351046 - DNA, 15 bp, Homo sapiens
catggagtcaaaggg

SEQ ID NO: 1351047 - DNA, 15 bp, Homo sapiens
acatggagtcaaagg

SEQ ID NO: 1351048 - DNA, 15 bp, Homo sapiens
gacatggagtcaaag

SEQ ID NO: 1351049 - DNA, 15 bp, Homo sapiens
agacatggagtcaaa

SEQ ID NO: 1351050 - DNA, 15 bp, Homo sapiens
gagacatggagtcaa

SEQ ID NO: 1351051 - DNA, 15 bp, Homo sapiens
tgagacatggagtca

SEQ ID NO: 1351052 - DNA, 15 bp, Homo sapiens
gtgagacatggagtc

SEQ ID NO: 1351053 - DNA, 15 bp, Homo sapiens
tgtgagacatggagt

SEQ ID NO: 1351054 - DNA, 15 bp, Homo sapiens
gtgtgagacatggag

SEQ ID NO: 1351055 - DNA, 15 bp, Homo sapiens
tgtgtgagacatgga

SEQ ID NO: 1351056 - DNA, 15 bp, Homo sapiens
gtgtgtgagacatgg

SEQ ID NO: 1351057 - DNA, 15 bp, Homo sapiens
tgtgtgtgagacatg

SEQ ID NO: 1351058 - DNA, 15 bp, Homo sapiens
atgtgtgtgagacat

SEQ ID NO: 1351059 - DNA, 15 bp, Homo sapiens
gatgtgtgtgagaca

SEQ ID NO: 1351060 - DNA, 15 bp, Homo sapiens
ggatgtgtgtgagac

SEQ ID NO: 1351061 - DNA, 15 bp, Homo sapiens
tggatgtgtgtgaga

SEQ ID NO: 1351062 - DNA, 15 bp, Homo sapiens
ctggatgtgtgtgag

SEQ ID NO: 1351063 - DNA, 15 bp, Homo sapiens
cctggatgtgtgtga

SEQ ID NO: 1351064 - DNA, 15 bp, Homo sapiens
acctggatgtgtgtg

SEQ ID NO: 1351065 - DNA, 15 bp, Homo sapiens
gacctggatgtgtgt

SEQ ID NO: 1351066 - DNA, 15 bp, Homo sapiens
tgacctggatgtgtg

SEQ ID NO: 1351067 - DNA, 15 bp, Homo sapiens
gtgacctggatgtgt

SEQ ID NO: 1351068 - DNA, 15 bp, Homo sapiens
tgtgacctggatgtg

SEQ ID NO: 1351069 - DNA, 15 bp, Homo sapiens
gtgtgacctggatgt

SEQ ID NO: 1351070 - DNA, 15 bp, Homo sapiens
agtgtgacctggatg

SEQ ID NO: 1351071 - DNA, 15 bp, Homo sapiens
cagtgtgacctggat

SEQ ID NO: 1351072 - DNA, 15 bp, Homo sapiens
tcagtgtgacctgga

SEQ ID NO: 1351073 - DNA, 15 bp, Homo sapiens
atcagtgtgacctgg

SEQ ID NO: 1351074 - DNA, 15 bp, Homo sapiens
catcagtgtgacctg

SEQ ID NO: 1351075 - DNA, 15 bp, Homo sapiens
gcatcagtgtgacct

SEQ ID NO: 1351076 - DNA, 15 bp, Homo sapiens
tgcatcagtgtgacc

SEQ ID NO: 1351077 - DNA, 15 bp, Homo sapiens
ttgcatcagtgtgac

SEQ ID NO: 1351078 - DNA, 15 bp, Homo sapiens
cttgcatcagtgtga

SEQ ID NO: 1351079 - DNA, 15 bp, Homo sapiens
tcttgcatcagtgtg

SEQ ID NO: 1351080 - DNA, 15 bp, Homo sapiens
ctcttgcatcagtgt

SEQ ID NO: 1351081 - DNA, 15 bp, Homo sapiens
cctcttgcatcagtg

SEQ ID NO: 1351082 - DNA, 15 bp, Homo sapiens
acctcttgcatcagt

SEQ ID NO: 1351083 - DNA, 15 bp, Homo sapiens
tacctcttgcatcag

SEQ ID NO: 1351084 - DNA, 15 bp, Homo sapiens
ctacctcttgcatca

SEQ ID NO: 1351085 - DNA, 15 bp, Homo sapiens
gctacctcttgcatc

SEQ ID NO: 1351086 - DNA, 15 bp, Homo sapiens
ggctacctcttgcat

SEQ ID NO: 1351087 - DNA, 15 bp, Homo sapiens
aggctacctcttgca

SEQ ID NO: 1351088 - DNA, 15 bp, Homo sapiens
gaggctacctcttgc

SEQ ID NO: 1351089 - DNA, 15 bp, Homo sapiens
ggaggctacctcttg

SEQ ID NO: 1351090 - DNA, 15 bp, Homo sapiens
gggaggctacctctt

SEQ ID NO: 1351091 - DNA, 15 bp, Homo sapiens
tgggaggctacctct

SEQ ID NO: 1351092 - DNA, 15 bp, Homo sapiens
atgggaggctacctc

SEQ ID NO: 1351093 - DNA, 15 bp, Homo sapiens
catgggaggctacct

SEQ ID NO: 1351094 - DNA, 15 bp, Homo sapiens
ccatgggaggctacc

SEQ ID NO: 1351095 - DNA, 15 bp, Homo sapiens
accatgggaggctac

SEQ ID NO: 1351096 - DNA, 15 bp, Homo sapiens
gaccatgggaggcta

SEQ ID NO: 1351097 - DNA, 15 bp, Homo sapiens
agaccatgggaggct

SEQ ID NO: 1351098 - DNA, 15 bp, Homo sapiens
aagaccatgggaggc

SEQ ID NO: 1351099 - DNA, 15 bp, Homo sapiens
caagaccatgggagg

SEQ ID NO: 1351100 - DNA, 15 bp, Homo sapiens
ccaagaccatgggag

SEQ ID NO: 1351101 - DNA, 15 bp, Homo sapiens
cccaagaccatggga

SEQ ID NO: 1351102 - DNA, 15 bp, Homo sapiens
gcccaagaccatggg

SEQ ID NO: 1351103 - DNA, 15 bp, Homo sapiens
tgcccaagaccatgg

SEQ ID NO: 1351104 - DNA, 15 bp, Homo sapiens
ctgcccaagaccatg

SEQ ID NO: 1351105 - DNA, 15 bp, Homo sapiens
gctgcccaagaccat

SEQ ID NO: 1351106 - DNA, 15 bp, Homo sapiens
agctgcccaagacca

SEQ ID NO: 1351107 - DNA, 15 bp, Homo sapiens
gagctgcccaagacc

SEQ ID NO: 1351108 - DNA, 15 bp, Homo sapiens
ggagctgcccaagac

SEQ ID NO: 1351109 - DNA, 15 bp, Homo sapiens
cggagctgcccaaga

SEQ ID NO: 1351110 - DNA, 15 bp, Homo sapiens
gcggagctgcccaag

SEQ ID NO: 1351111 - DNA, 15 bp, Homo sapiens
ggcggagctgcccaa

SEQ ID NO: 1351112 - DNA, 15 bp, Homo sapiens
gggcggagctgccca

SEQ ID NO: 1351113 - DNA, 15 bp, Homo sapiens
ggggcggagctgccc

SEQ ID NO: 1351114 - DNA, 15 bp, Homo sapiens
aggggcggagctgcc

SEQ ID NO: 1351115 - DNA, 15 bp, Homo sapiens
caggggcggagctgc

SEQ ID NO: 1351116 - DNA, 15 bp, Homo sapiens
acaggggcggagctg

SEQ ID NO: 1351117 - DNA, 15 bp, Homo sapiens
tacaggggcggagct

SEQ ID NO: 1351118 - DNA, 15 bp, Homo sapiens
ctacaggggcggagc

SEQ ID NO: 1351119 - DNA, 15 bp, Homo sapiens
gctacaggggcggag

SEQ ID NO: 1351120 - DNA, 15 bp, Homo sapiens
agctacaggggcgga

SEQ ID NO: 1351121 - DNA, 15 bp, Homo sapiens
aagctacaggggcgg

SEQ ID NO: 1351122 - DNA, 15 bp, Homo sapiens
aaagctacaggggcg

SEQ ID NO: 1351123 - DNA, 15 bp, Homo sapiens
caaagctacaggggc

SEQ ID NO: 1351124 - DNA, 15 bp, Homo sapiens
gcaaagctacagggg

SEQ ID NO: 1351125 - DNA, 15 bp, Homo sapiens
tgcaaagctacaggg

SEQ ID NO: 1351126 - DNA, 15 bp, Homo sapiens
ctgcaaagctacagg

SEQ ID NO: 1351127 - DNA, 15 bp, Homo sapiens
cctgcaaagctacag

SEQ ID NO: 1351128 - DNA, 15 bp, Homo sapiens
ccctgcaaagctaca

SEQ ID NO: 1351129 - DNA, 15 bp, Homo sapiens
accctgcaaagctac

SEQ ID NO: 1351130 - DNA, 15 bp, Homo sapiens
taccctgcaaagcta

SEQ ID NO: 1351131 - DNA, 15 bp, Homo sapiens
gtaccctgcaaagct

SEQ ID NO: 1351132 - DNA, 15 bp, Homo sapiens
tgtaccctgcaaagc

SEQ ID NO: 1351133 - DNA, 15 bp, Homo sapiens
ctgtaccctgcaaag

SEQ ID NO: 1351134 - DNA, 15 bp, Homo sapiens
gctgtaccctgcaaa

SEQ ID NO: 1351135 - DNA, 15 bp, Homo sapiens
ggctgtaccctgcaa

SEQ ID NO: 1351136 - DNA, 15 bp, Homo sapiens
gggctgtaccctgca

SEQ ID NO: 1351137 - DNA, 15 bp, Homo sapiens
ggggctgtaccctgc

SEQ ID NO: 1351138 - DNA, 15 bp, Homo sapiens
gggggctgtaccctg

SEQ ID NO: 1351139 - DNA, 15 bp, Homo sapiens
ggggggctgtaccct

SEQ ID NO: 1351140 - DNA, 15 bp, Homo sapiens
gggggggctgtaccc

SEQ ID NO: 1351141 - DNA, 15 bp, Homo sapiens
cgggggggctgtacc

SEQ ID NO: 1351142 - DNA, 15 bp, Homo sapiens
gcgggggggctgtac

SEQ ID NO: 1351143 - DNA, 15 bp, Homo sapiens
ggcgggggggctgta

SEQ ID NO: 1351144 - DNA, 15 bp, Homo sapiens
tggcgggggggctgt

SEQ ID NO: 1351145 - DNA, 15 bp, Homo sapiens
ctggcgggggggctg

SEQ ID NO: 1351146 - DNA, 15 bp, Homo sapiens
gctggcgggggggct

SEQ ID NO: 1351147 - DNA, 15 bp, Homo sapiens
agctggcgggggggc

SEQ ID NO: 1351148 - DNA, 15 bp, Homo sapiens
gagctggcggggggg

SEQ ID NO: 1351149 - DNA, 15 bp, Homo sapiens
ggagctggcgggggg

SEQ ID NO: 1351150 - DNA, 15 bp, Homo sapiens
aggagctggcggggg

SEQ ID NO: 1351151 - DNA, 15 bp, Homo sapiens
aaggagctggcgggg

SEQ ID NO: 1351152 - DNA, 15 bp, Homo sapiens
aaaggagctggcggg

SEQ ID NO: 1351153 - DNA, 15 bp, Homo sapiens
gaaaggagctggcgg

SEQ ID NO: 1351154 - DNA, 15 bp, Homo sapiens
tgaaaggagctggcg

SEQ ID NO: 1351155 - DNA, 15 bp, Homo sapiens
gtgaaaggagctggc

SEQ ID NO: 1351156 - DNA, 15 bp, Homo sapiens
tgtgaaaggagctgg

SEQ ID NO: 1351157 - DNA, 15 bp, Homo sapiens
ctgtgaaaggagctg

SEQ ID NO: 1351158 - DNA, 15 bp, Homo sapiens
cctgtgaaaggagct

SEQ ID NO: 1351159 - DNA, 15 bp, Homo sapiens
gcctgtgaaaggagc

SEQ ID NO: 1351160 - DNA, 15 bp, Homo sapiens
agcctgtgaaaggag

SEQ ID NO: 1351161 - DNA, 15 bp, Homo sapiens
cagcctgtgaaagga

SEQ ID NO: 1351162 - DNA, 15 bp, Homo sapiens
ccagcctgtgaaagg

SEQ ID NO: 1351163 - DNA, 15 bp, Homo sapiens
gccagcctgtgaaag

SEQ ID NO: 1351164 - DNA, 15 bp, Homo sapiens
tgccagcctgtgaaa

SEQ ID NO: 1351165 - DNA, 15 bp, Homo sapiens
atgccagcctgtgaa

SEQ ID NO: 1351166 - DNA, 15 bp, Homo sapiens
aatgccagcctgtga

SEQ ID NO: 1351167 - DNA, 15 bp, Homo sapiens
caatgccagcctgtg

SEQ ID NO: 1351168 - DNA, 15 bp, Homo sapiens
tcaatgccagcctgt

SEQ ID NO: 1351169 - DNA, 15 bp, Homo sapiens
ctcaatgccagcctg

SEQ ID NO: 1351170 - DNA, 15 bp, Homo sapiens
actcaatgccagcct

SEQ ID NO: 1351171 - DNA, 15 bp, Homo sapiens
cactcaatgccagcc

SEQ ID NO: 1351172 - DNA, 15 bp, Homo sapiens
acactcaatgccagc

SEQ ID NO: 1351173 - DNA, 15 bp, Homo sapiens
gacactcaatgccag

SEQ ID NO: 1351174 - DNA, 15 bp, Homo sapiens
agacactcaatgcca

SEQ ID NO: 1351175 - DNA, 15 bp, Homo sapiens
cagacactcaatgcc

SEQ ID NO: 1351176 - DNA, 15 bp, Homo sapiens
gcagacactcaatgc

SEQ ID NO: 1351177 - DNA, 15 bp, Homo sapiens
tgcagacactcaatg

SEQ ID NO: 1351178 - DNA, 15 bp, Homo sapiens
ttgcagacactcaat

SEQ ID NO: 1351179 - DNA, 15 bp, Homo sapiens
gttgcagacactcaa

SEQ ID NO: 1351180 - DNA, 15 bp, Homo sapiens
agttgcagacactca

SEQ ID NO: 1351181 - DNA, 15 bp, Homo sapiens
aagttgcagacactc

SEQ ID NO: 1351182 - DNA, 15 bp, Homo sapiens
aaagttgcagacact

SEQ ID NO: 1351183 - DNA, 15 bp, Homo sapiens
aaaagttgcagacac

SEQ ID NO: 1351184 - DNA, 15 bp, Homo sapiens
gaaaagttgcagaca

SEQ ID NO: 1351185 - DNA, 15 bp, Homo sapiens
ggaaaagttgcagac

SEQ ID NO: 1351186 - DNA, 15 bp, Homo sapiens
tggaaaagttgcaga

SEQ ID NO: 1351187 - DNA, 15 bp, Homo sapiens
ctggaaaagttgcag

SEQ ID NO: 1351188 - DNA, 15 bp, Homo sapiens
cctggaaaagttgca

SEQ ID NO: 1351189 - DNA, 15 bp, Homo sapiens
acctggaaaagttgc

SEQ ID NO: 1351190 - DNA, 15 bp, Homo sapiens
cacctggaaaagttg

SEQ ID NO: 1351191 - DNA, 15 bp, Homo sapiens
gcacctggaaaagtt

SEQ ID NO: 1351192 - DNA, 15 bp, Homo sapiens
tgcacctggaaaagt

SEQ ID NO: 1351193 - DNA, 15 bp, Homo sapiens
gtgcacctggaaaag

SEQ ID NO: 1351194 - DNA, 15 bp, Homo sapiens
tgtgcacctggaaaa

SEQ ID NO: 1351195 - DNA, 15 bp, Homo sapiens
ctgtgcacctggaaa

SEQ ID NO: 1351196 - DNA, 15 bp, Homo sapiens
actgtgcacctggaa

SEQ ID NO: 1351197 - DNA, 15 bp, Homo sapiens
cactgtgcacctgga

SEQ ID NO: 1351198 - DNA, 15 bp, Homo sapiens
acactgtgcacctgg

SEQ ID NO: 1351199 - DNA, 15 bp, Homo sapiens
tacactgtgcacctg

SEQ ID NO: 1351200 - DNA, 15 bp, Homo sapiens
ttacactgtgcacct

SEQ ID NO: 1351201 - DNA, 15 bp, Homo sapiens
cttacactgtgcacc

SEQ ID NO: 1351202 - DNA, 15 bp, Homo sapiens
gcttacactgtgcac

SEQ ID NO: 1351203 - DNA, 15 bp, Homo sapiens
agcttacactgtgca

SEQ ID NO: 1351204 - DNA, 15 bp, Homo sapiens
cagcttacactgtgc

SEQ ID NO: 1351205 - DNA, 15 bp, Homo sapiens
acagcttacactgtg

SEQ ID NO: 1351206 - DNA, 15 bp, Homo sapiens
aacagcttacactgt

SEQ ID NO: 1351207 - DNA, 15 bp, Homo sapiens
caacagcttacactg

SEQ ID NO: 1351208 - DNA, 15 bp, Homo sapiens
ccaacagcttacact

SEQ ID NO: 1351209 - DNA, 15 bp, Homo sapiens
accaacagcttacac

SEQ ID NO: 1351210 - DNA, 15 bp, Homo sapiens
caccaacagcttaca

SEQ ID NO: 1351211 - DNA, 15 bp, Homo sapiens
ccaccaacagcttac

SEQ ID NO: 1351212 - DNA, 15 bp, Homo sapiens
gccaccaacagctta

SEQ ID NO: 1351213 - DNA, 15 bp, Homo sapiens
agccaccaacagctt

SEQ ID NO: 1351214 - DNA, 15 bp, Homo sapiens
gagccaccaacagct

SEQ ID NO: 1351215 - DNA, 15 bp, Homo sapiens
agagccaccaacagc

SEQ ID NO: 1351216 - DNA, 15 bp, Homo sapiens
tagagccaccaacag

SEQ ID NO: 1351217 - DNA, 15 bp, Homo sapiens
gtagagccaccaaca

SEQ ID NO: 1351218 - DNA, 15 bp, Homo sapiens
ggtagagccaccaac

SEQ ID NO: 1351219 - DNA, 15 bp, Homo sapiens
tggtagagccaccaa

SEQ ID NO: 1351220 - DNA, 15 bp, Homo sapiens
atggtagagccacca

SEQ ID NO: 1351221 - DNA, 15 bp, Homo sapiens
aatggtagagccacc

SEQ ID NO: 1351222 - DNA, 15 bp, Homo sapiens
gaatggtagagccac

SEQ ID NO: 1351223 - DNA, 15 bp, Homo sapiens
agaatggtagagcca

SEQ ID NO: 1351224 - DNA, 15 bp, Homo sapiens
cagaatggtagagcc

SEQ ID NO: 1351225 - DNA, 15 bp, Homo sapiens
ccagaatggtagagc

SEQ ID NO: 1351226 - DNA, 15 bp, Homo sapiens
cccagaatggtagag

SEQ ID NO: 1351227 - DNA, 15 bp, Homo sapiens
ccccagaatggtaga

SEQ ID NO: 1351228 - DNA, 15 bp, Homo sapiens
accccagaatggtag

SEQ ID NO: 1351229 - DNA, 15 bp, Homo sapiens
gaccccagaatggta

SEQ ID NO: 1351230 - DNA, 15 bp, Homo sapiens
agaccccagaatggt

SEQ ID NO: 1351231 - DNA, 15 bp, Homo sapiens
cagaccccagaatgg

SEQ ID NO: 1351232 - DNA, 15 bp, Homo sapiens
tcagaccccagaatg

SEQ ID NO: 1351233 - DNA, 15 bp, Homo sapiens
ttcagaccccagaat

SEQ ID NO: 1351234 - DNA, 15 bp, Homo sapiens
cttcagaccccagaa

SEQ ID NO: 1351235 - DNA, 15 bp, Homo sapiens
tcttcagaccccaga

SEQ ID NO: 1351236 - DNA, 15 bp, Homo sapiens
ttcttcagaccccag

SEQ ID NO: 1351237 - DNA, 15 bp, Homo sapiens
attcttcagacccca

SEQ ID NO: 1351238 - DNA, 15 bp, Homo sapiens
cattcttcagacccc

SEQ ID NO: 1351239 - DNA, 15 bp, Homo sapiens
ccattcttcagaccc

SEQ ID NO: 1351240 - DNA, 15 bp, Homo sapiens
accattcttcagacc

SEQ ID NO: 1351241 - DNA, 15 bp, Homo sapiens
caccattcttcagac

SEQ ID NO: 1351242 - DNA, 15 bp, Homo sapiens
ccaccattcttcaga

SEQ ID NO: 1351243 - DNA, 15 bp, Homo sapiens
gccaccattcttcag

SEQ ID NO: 1351244 - DNA, 15 bp, Homo sapiens
ggccaccattcttca

SEQ ID NO: 1351245 - DNA, 15 bp, Homo sapiens
gggccaccattcttc

SEQ ID NO: 1351246 - DNA, 15 bp, Homo sapiens
agggccaccattctt

SEQ ID NO: 1351247 - DNA, 15 bp, Homo sapiens
gagggccaccattct

SEQ ID NO: 1351248 - DNA, 15 bp, Homo sapiens
agagggccaccattc

SEQ ID NO: 1351249 - DNA, 15 bp, Homo sapiens
aagagggccaccatt

SEQ ID NO: 1351250 - DNA, 15 bp, Homo sapiens
gaagagggccaccat

SEQ ID NO: 1351251 - DNA, 15 bp, Homo sapiens
agaagagggccacca

SEQ ID NO: 1351252 - DNA, 15 bp, Homo sapiens
gagaagagggccacc

SEQ ID NO: 1351253 - DNA, 15 bp, Homo sapiens
tgagaagagggccac

SEQ ID NO: 1351254 - DNA, 15 bp, Homo sapiens
gtgagaagagggcca

SEQ ID NO: 1351255 - DNA, 15 bp, Homo sapiens
tgtgagaagagggcc

SEQ ID NO: 1351256 - DNA, 15 bp, Homo sapiens
ctgtgagaagagggc

SEQ ID NO: 1351257 - DNA, 15 bp, Homo sapiens
tctgtgagaagaggg

SEQ ID NO: 1351258 - DNA, 15 bp, Homo sapiens
atctgtgagaagagg

SEQ ID NO: 1351259 - DNA, 15 bp, Homo sapiens
gatctgtgagaagag

SEQ ID NO: 1351260 - DNA, 15 bp, Homo sapiens
ggatctgtgagaaga

SEQ ID NO: 1351261 - DNA, 15 bp, Homo sapiens
tggatctgtgagaag

SEQ ID NO: 1351262 - DNA, 15 bp, Homo sapiens
gtggatctgtgagaa

SEQ ID NO: 1351263 - DNA, 15 bp, Homo sapiens
agtggatctgtgaga

SEQ ID NO: 1351264 - DNA, 15 bp, Homo sapiens
tagtggatctgtgag

SEQ ID NO: 1351265 - DNA, 15 bp, Homo sapiens
ctagtggatctgtga

SEQ ID NO: 1351266 - DNA, 15 bp, Homo sapiens
cctagtggatctgtg

SEQ ID NO: 1351267 - DNA, 15 bp, Homo sapiens
gcctagtggatctgt

SEQ ID NO: 1351268 - DNA, 15 bp, Homo sapiens
tgcctagtggatctg

SEQ ID NO: 1351269 - DNA, 15 bp, Homo sapiens
ctgcctagtggatct

SEQ ID NO: 1351270 - DNA, 15 bp, Homo sapiens
actgcctagtggatc

SEQ ID NO: 1351271 - DNA, 15 bp, Homo sapiens
cactgcctagtggat

SEQ ID NO: 1351272 - DNA, 15 bp, Homo sapiens
gcactgcctagtgga

SEQ ID NO: 1351273 - DNA, 15 bp, Homo sapiens
ggcactgcctagtgg

SEQ ID NO: 1351274 - DNA, 15 bp, Homo sapiens
aggcactgcctagtg

SEQ ID NO: 1351275 - DNA, 15 bp, Homo sapiens
gaggcactgcctagt

SEQ ID NO: 1351276 - DNA, 15 bp, Homo sapiens
tgaggcactgcctag

SEQ ID NO: 1351277 - DNA, 15 bp, Homo sapiens
ttgaggcactgccta

SEQ ID NO: 1351278 - DNA, 15 bp, Homo sapiens
attgaggcactgcct

SEQ ID NO: 1351279 - DNA, 15 bp, Homo sapiens
cattgaggcactgcc

SEQ ID NO: 1351280 - DNA, 15 bp, Homo sapiens
ccattgaggcactgc

SEQ ID NO: 1351281 - DNA, 15 bp, Homo sapiens
cccattgaggcactg

SEQ ID NO: 1351282 - DNA, 15 bp, Homo sapiens
ccccattgaggcact

SEQ ID NO: 1351283 - DNA, 15 bp, Homo sapiens
tccccattgaggcac

SEQ ID NO: 1351284 - DNA, 15 bp, Homo sapiens
gtccccattgaggca

SEQ ID NO: 1351285 - DNA, 15 bp, Homo sapiens
agtccccattgaggc

SEQ ID NO: 1351286 - DNA, 15 bp, Homo sapiens
gagtccccattgagg

SEQ ID NO: 1351287 - DNA, 15 bp, Homo sapiens
agagtccccattgag

SEQ ID NO: 1351288 - DNA, 15 bp, Homo sapiens
cagagtccccattga

SEQ ID NO: 1351289 - DNA, 15 bp, Homo sapiens
acagagtccccattg

SEQ ID NO: 1351290 - DNA, 15 bp, Homo sapiens
cacagagtccccatt

SEQ ID NO: 1351291 - DNA, 15 bp, Homo sapiens
acacagagtccccat

SEQ ID NO: 1351292 - DNA, 15 bp, Homo sapiens
cacacagagtcccca

SEQ ID NO: 1351293 - DNA, 15 bp, Homo sapiens
ccacacagagtcccc

SEQ ID NO: 1351294 - DNA, 15 bp, Homo sapiens
cccacacagagtccc

SEQ ID NO: 1351295 - DNA, 15 bp, Homo sapiens
ccccacacagagtcc

SEQ ID NO: 1351296 - DNA, 15 bp, Homo sapiens
cccccacacagagtc

SEQ ID NO: 1351297 - DNA, 15 bp, Homo sapiens
tcccccacacagagt

SEQ ID NO: 1351298 - DNA, 15 bp, Homo sapiens
atcccccacacagag

SEQ ID NO: 1351299 - DNA, 15 bp, Homo sapiens
aatcccccacacaga

SEQ ID NO: 1351300 - DNA, 15 bp, Homo sapiens
gaatcccccacacag

SEQ ID NO: 1351301 - DNA, 15 bp, Homo sapiens
tgaatcccccacaca

SEQ ID NO: 1351302 - DNA, 15 bp, Homo sapiens
ttgaatcccccacac

SEQ ID NO: 1351303 - DNA, 15 bp, Homo sapiens
gttgaatcccccaca

SEQ ID NO: 1351304 - DNA, 15 bp, Homo sapiens
ggttgaatcccccac

SEQ ID NO: 1351305 - DNA, 15 bp, Homo sapiens
gggttgaatccccca

SEQ ID NO: 1351306 - DNA, 15 bp, Homo sapiens
tgggttgaatccccc

SEQ ID NO: 1351307 - DNA, 15 bp, Homo sapiens
gtgggttgaatcccc

SEQ ID NO: 1351308 - DNA, 15 bp, Homo sapiens
tgtgggttgaatccc

SEQ ID NO: 1351309 - DNA, 15 bp, Homo sapiens
atgtgggttgaatcc

SEQ ID NO: 1351310 - DNA, 15 bp, Homo sapiens
aatgtgggttgaatc

SEQ ID NO: 1351311 - DNA, 15 bp, Homo sapiens
aaatgtgggttgaat

SEQ ID NO: 1351312 - DNA, 15 bp, Homo sapiens
gaaatgtgggttgaa

SEQ ID NO: 1351313 - DNA, 15 bp, Homo sapiens
ggaaatgtgggttga

SEQ ID NO: 1351314 - DNA, 15 bp, Homo sapiens
gggaaatgtgggttg

SEQ ID NO: 1351315 - DNA, 15 bp, Homo sapiens
agggaaatgtgggtt

SEQ ID NO: 1351316 - DNA, 15 bp, Homo sapiens
aagggaaatgtgggt

SEQ ID NO: 1351317 - DNA, 15 bp, Homo sapiens
gaagggaaatgtggg

SEQ ID NO: 1351318 - DNA, 15 bp, Homo sapiens
agaagggaaatgtgg

SEQ ID NO: 1351319 - DNA, 15 bp, Homo sapiens
cagaagggaaatgtg

SEQ ID NO: 1351320 - DNA, 15 bp, Homo sapiens
gcagaagggaaatgt

SEQ ID NO: 1351321 - DNA, 15 bp, Homo sapiens
tgcagaagggaaatg

SEQ ID NO: 1351322 - DNA, 15 bp, Homo sapiens
gtgcagaagggaaat

SEQ ID NO: 1351323 - DNA, 15 bp, Homo sapiens
agtgcagaagggaaa

SEQ ID NO: 1351324 - DNA, 15 bp, Homo sapiens
cagtgcagaagggaa

SEQ ID NO: 1351325 - DNA, 15 bp, Homo sapiens
gcagtgcagaaggga

SEQ ID NO: 1351326 - DNA, 15 bp, Homo sapiens
ggcagtgcagaaggg

SEQ ID NO: 1351327 - DNA, 15 bp, Homo sapiens
gggcagtgcagaagg

SEQ ID NO: 1351328 - DNA, 15 bp, Homo sapiens
agggcagtgcagaag

SEQ ID NO: 1351329 - DNA, 15 bp, Homo sapiens
gagggcagtgcagaa

SEQ ID NO: 1351330 - DNA, 15 bp, Homo sapiens
tgagggcagtgcaga

SEQ ID NO: 1351331 - DNA, 15 bp, Homo sapiens
gtgagggcagtgcag

SEQ ID NO: 1351332 - DNA, 15 bp, Homo sapiens
cgtgagggcagtgca

SEQ ID NO: 1351333 - DNA, 15 bp, Homo sapiens
ccgtgagggcagtgc

SEQ ID NO: 1351334 - DNA, 15 bp, Homo sapiens
tccgtgagggcagtg

SEQ ID NO: 1351335 - DNA, 15 bp, Homo sapiens
ctccgtgagggcagt

SEQ ID NO: 1351336 - DNA, 15 bp, Homo sapiens
cctccgtgagggcag

SEQ ID NO: 1351337 - DNA, 15 bp, Homo sapiens
acctccgtgagggca

SEQ ID NO: 1351338 - DNA, 15 bp, Homo sapiens
aacctccgtgagggc

SEQ ID NO: 1351339 - DNA, 15 bp, Homo sapiens
gaacctccgtgaggg

SEQ ID NO: 1351340 - DNA, 15 bp, Homo sapiens
agaacctccgtgagg

SEQ ID NO: 1351341 - DNA, 15 bp, Homo sapiens
gagaacctccgtgag

SEQ ID NO: 1351342 - DNA, 15 bp, Homo sapiens
ggagaacctccgtga

SEQ ID NO: 1351343 - DNA, 15 bp, Homo sapiens
tggagaacctccgtg

SEQ ID NO: 1351344 - DNA, 15 bp, Homo sapiens
atggagaacctccgt

SEQ ID NO: 1351345 - DNA, 15 bp, Homo sapiens
catggagaacctccg

SEQ ID NO: 1351346 - DNA, 15 bp, Homo sapiens
tcatggagaacctcc

SEQ ID NO: 1351347 - DNA, 15 bp, Homo sapiens
ctcatggagaacctc

SEQ ID NO: 1351348 - DNA, 15 bp, Homo sapiens
cctcatggagaacct

SEQ ID NO: 1351349 - DNA, 15 bp, Homo sapiens
ccctcatggagaacc

SEQ ID NO: 1351350 - DNA, 15 bp, Homo sapiens
gccctcatggagaac

SEQ ID NO: 1351351 - DNA, 15 bp, Homo sapiens
ggccctcatggagaa

SEQ ID NO: 1351352 - DNA, 15 bp, Homo sapiens
gggccctcatggaga

SEQ ID NO: 1351353 - DNA, 15 bp, Homo sapiens
ggggccctcatggag

SEQ ID NO: 1351354 - DNA, 15 bp, Homo sapiens
tggggccctcatgga

SEQ ID NO: 1351355 - DNA, 15 bp, Homo sapiens
ctggggccctcatgg

SEQ ID NO: 1351356 - DNA, 15 bp, Homo sapiens
gctggggccctcatg

SEQ ID NO: 1351357 - DNA, 15 bp, Homo sapiens
ggctggggccctcat

SEQ ID NO: 1351358 - DNA, 15 bp, Homo sapiens
gggctggggccctca

SEQ ID NO: 1351359 - DNA, 15 bp, Homo sapiens
ggggctggggccctc

SEQ ID NO: 1351360 - DNA, 15 bp, Homo sapiens
aggggctggggccct

SEQ ID NO: 1351361 - DNA, 15 bp, Homo sapiens
gaggggctggggccc

SEQ ID NO: 1351362 - DNA, 15 bp, Homo sapiens
tggaggggctggggc

SEQ ID NO: 1351363 - DNA, 15 bp, Homo sapiens
ctggaggggctgggg

SEQ ID NO: 1351364 - DNA, 15 bp, Homo sapiens
tgctggaggggctgg

SEQ ID NO: 1351365 - DNA, 15 bp, Homo sapiens
ttgctggaggggctg

SEQ ID NO: 1351366 - DNA, 15 bp, Homo sapiens
tttgctggaggggct

SEQ ID NO: 1351367 - DNA, 15 bp, Homo sapiens
gtttgctggaggggc

SEQ ID NO: 1351368 - DNA, 15 bp, Homo sapiens
agtttgctggagggg

SEQ ID NO: 1351369 - DNA, 15 bp, Homo sapiens
aagtttgctggaggg

SEQ ID NO: 1351370 - DNA, 15 bp, Homo sapiens
gaagtttgctggagg

SEQ ID NO: 1351371 - DNA, 15 bp, Homo sapiens
agaagtttgctggag

SEQ ID NO: 1351372 - DNA, 15 bp, Homo sapiens
cagaagtttgctgga

SEQ ID NO: 1351373 - DNA, 15 bp, Homo sapiens
tcagaagtttgctgg

SEQ ID NO: 1351374 - DNA, 15 bp, Homo sapiens
gtcagaagtttgctg

SEQ ID NO: 1351375 - DNA, 15 bp, Homo sapiens
agtcagaagtttgct

SEQ ID NO: 1351376 - DNA, 15 bp, Homo sapiens
cagtcagaagtttgc

SEQ ID NO: 1351377 - DNA, 15 bp, Homo sapiens
ccagtcagaagtttg

SEQ ID NO: 1351378 - DNA, 15 bp, Homo sapiens
tccagtcagaagttt

SEQ ID NO: 1351379 - DNA, 15 bp, Homo sapiens
gtccagtcagaagtt

SEQ ID NO: 1351380 - DNA, 15 bp, Homo sapiens
tgtccagtcagaagt

SEQ ID NO: 1351381 - DNA, 15 bp, Homo sapiens
atgtccagtcagaag

SEQ ID NO: 1351382 - DNA, 15 bp, Homo sapiens
tatgtccagtcagaa

SEQ ID NO: 1351383 - DNA, 15 bp, Homo sapiens
gtatgtccagtcaga

SEQ ID NO: 1351384 - DNA, 15 bp, Homo sapiens
tgtatgtccagtcag

SEQ ID NO: 1351385 - DNA, 15 bp, Homo sapiens
ctgtatgtccagtca

SEQ ID NO: 1351386 - DNA, 15 bp, Homo sapiens
cctgtatgtccagtc

SEQ ID NO: 1351387 - DNA, 15 bp, Homo sapiens
gcctgtatgtccagt

SEQ ID NO: 1351388 - DNA, 15 bp, Homo sapiens
tgcctgtatgtccag

SEQ ID NO: 1351389 - DNA, 15 bp, Homo sapiens
atgcctgtatgtcca

SEQ ID NO: 1351390 - DNA, 15 bp, Homo sapiens
aatgcctgtatgtcc

SEQ ID NO: 1351391 - DNA, 15 bp, Homo sapiens
gaatgcctgtatgtc

SEQ ID NO: 1351392 - DNA, 15 bp, Homo sapiens
ggaatgcctgtatgt

SEQ ID NO: 1351393 - DNA, 15 bp, Homo sapiens
aggaatgcctgtatg

SEQ ID NO: 1351394 - DNA, 15 bp, Homo sapiens
taggaatgcctgtat

SEQ ID NO: 1351395 - DNA, 15 bp, Homo sapiens
ataggaatgcctgta

SEQ ID NO: 1351396 - DNA, 15 bp, Homo sapiens
tataggaatgcctgt

SEQ ID NO: 1351397 - DNA, 15 bp, Homo sapiens
ttataggaatgcctg

SEQ ID NO: 1351398 - DNA, 15 bp, Homo sapiens
tttataggaatgcct

SEQ ID NO: 1351399 - DNA, 15 bp, Homo sapiens
gtttataggaatgcc

SEQ ID NO: 1351400 - DNA, 15 bp, Homo sapiens
ggtttataggaatgc

SEQ ID NO: 1351401 - DNA, 15 bp, Homo sapiens
gggtttataggaatg

SEQ ID NO: 1351402 - DNA, 15 bp, Homo sapiens
agggtttataggaat

SEQ ID NO: 1351403 - DNA, 15 bp, Homo sapiens
gagggtttataggaa

SEQ ID NO: 1351404 - DNA, 15 bp, Homo sapiens
agagggtttatagga

SEQ ID NO: 1351405 - DNA, 15 bp, Homo sapiens
cagagggtttatagg

SEQ ID NO: 1351406 - DNA, 15 bp, Homo sapiens
tcagagggtttatag

SEQ ID NO: 1351407 - DNA, 15 bp, Homo sapiens
ttcagagggtttata

SEQ ID NO: 1351408 - DNA, 15 bp, Homo sapiens
tttcagagggtttat

SEQ ID NO: 1351409 - DNA, 15 bp, Homo sapiens
atttcagagggttta

SEQ ID NO: 1351410 - DNA, 15 bp, Homo sapiens
gatttcagagggttt

SEQ ID NO: 1351411 - DNA, 15 bp, Homo sapiens
agatttcagagggtt

SEQ ID NO: 1351412 - DNA, 15 bp, Homo sapiens
tagatttcagagggt

SEQ ID NO: 1351413 - DNA, 15 bp, Homo sapiens
ctagatttcagaggg

SEQ ID NO: 1351414 - DNA, 15 bp, Homo sapiens
cctagatttcagagg

SEQ ID NO: 1351415 - DNA, 15 bp, Homo sapiens
gcctagatttcagag

SEQ ID NO: 1351416 - DNA, 15 bp, Homo sapiens
tgcctagatttcaga

SEQ ID NO: 1351417 - DNA, 15 bp, Homo sapiens
ctgcctagatttcag

SEQ ID NO: 1351418 - DNA, 15 bp, Homo sapiens
tctgcctagatttca

SEQ ID NO: 1351419 - DNA, 15 bp, Homo sapiens
ttctgcctagatttc

SEQ ID NO: 1351420 - DNA, 15 bp, Homo sapiens
cttctgcctagattt

SEQ ID NO: 1351421 - DNA, 15 bp, Homo sapiens
acttctgcctagatt

SEQ ID NO: 1351422 - DNA, 15 bp, Homo sapiens
aacttctgcctagat

SEQ ID NO: 1351423 - DNA, 15 bp, Homo sapiens
gaacttctgcctaga

SEQ ID NO: 1351424 - DNA, 15 bp, Homo sapiens
ggaacttctgcctag

SEQ ID NO: 1351425 - DNA, 15 bp, Homo sapiens
gggaacttctgccta

SEQ ID NO: 1351426 - DNA, 15 bp, Homo sapiens
tgggaacttctgcct

SEQ ID NO: 1351427 - DNA, 15 bp, Homo sapiens
ttgggaacttctgcc

SEQ ID NO: 1351428 - DNA, 15 bp, Homo sapiens
tttgggaacttctgc

SEQ ID NO: 1351429 - DNA, 15 bp, Homo sapiens
gtttgggaacttctg

SEQ ID NO: 1351430 - DNA, 15 bp, Homo sapiens
ggtttgggaacttct

SEQ ID NO: 1351431 - DNA, 15 bp, Homo sapiens
aggtttgggaacttc

SEQ ID NO: 1351432 - DNA, 15 bp, Homo sapiens
gaggtttgggaactt

SEQ ID NO: 1351433 - DNA, 15 bp, Homo sapiens
tgaggtttgggaact

SEQ ID NO: 1351434 - DNA, 15 bp, Homo sapiens
ctgaggtttgggaac

SEQ ID NO: 1351435 - DNA, 15 bp, Homo sapiens
actgaggtttgggaa

SEQ ID NO: 1351436 - DNA, 15 bp, Homo sapiens
aactgaggtttggga

SEQ ID NO: 1351437 - DNA, 15 bp, Homo sapiens
gaactgaggtttggg

SEQ ID NO: 1351438 - DNA, 15 bp, Homo sapiens
agaactgaggtttgg

SEQ ID NO: 1351439 - DNA, 15 bp, Homo sapiens
aagaactgaggtttg

SEQ ID NO: 1351440 - DNA, 15 bp, Homo sapiens
caagaactgaggttt

SEQ ID NO: 1351441 - DNA, 15 bp, Homo sapiens
tcaagaactgaggtt

SEQ ID NO: 1351442 - DNA, 15 bp, Homo sapiens
gtcaagaactgaggt

SEQ ID NO: 1351443 - DNA, 15 bp, Homo sapiens
agtcaagaactgagg

SEQ ID NO: 1351444 - DNA, 15 bp, Homo sapiens
aagtcaagaactgag

SEQ ID NO: 1351445 - DNA, 15 bp, Homo sapiens
gaagtcaagaactga

SEQ ID NO: 1351446 - DNA, 15 bp, Homo sapiens
agaagtcaagaactg

SEQ ID NO: 1351447 - DNA, 15 bp, Homo sapiens
cagaagtcaagaact

SEQ ID NO: 1351448 - DNA, 15 bp, Homo sapiens
acagaagtcaagaac

SEQ ID NO: 1351449 - DNA, 15 bp, Homo sapiens
cacagaagtcaagaa

SEQ ID NO: 1351450 - DNA, 15 bp, Homo sapiens
gcacagaagtcaaga

SEQ ID NO: 1351451 - DNA, 15 bp, Homo sapiens
tgcacagaagtcaag

SEQ ID NO: 1351452 - DNA, 15 bp, Homo sapiens
gtgcacagaagtcaa

SEQ ID NO: 1351453 - DNA, 15 bp, Homo sapiens
ggtgcacagaagtca

SEQ ID NO: 1351454 - DNA, 15 bp, Homo sapiens
aggtgcacagaagtc

SEQ ID NO: 1351455 - DNA, 15 bp, Homo sapiens
caggtgcacagaagt

SEQ ID NO: 1351456 - DNA, 15 bp, Homo sapiens
gcaggtgcacagaag

SEQ ID NO: 1351457 - DNA, 15 bp, Homo sapiens
tgcaggtgcacagaa

SEQ ID NO: 1351458 - DNA, 15 bp, Homo sapiens
ctgcaggtgcacaga

SEQ ID NO: 1351459 - DNA, 15 bp, Homo sapiens
cctgcaggtgcacag

SEQ ID NO: 1351460 - DNA, 15 bp, Homo sapiens
gcctgcaggtgcaca

SEQ ID NO: 1351461 - DNA, 15 bp, Homo sapiens
agcctgcaggtgcac

SEQ ID NO: 1351462 - DNA, 15 bp, Homo sapiens
cagcctgcaggtgca

SEQ ID NO: 1351463 - DNA, 15 bp, Homo sapiens
tcagcctgcaggtgc

SEQ ID NO: 1351464 - DNA, 15 bp, Homo sapiens
ttcagcctgcaggtg

SEQ ID NO: 1351465 - DNA, 15 bp, Homo sapiens
gttcagcctgcaggt

SEQ ID NO: 1351466 - DNA, 15 bp, Homo sapiens
tgttcagcctgcagg

SEQ ID NO: 1351467 - DNA, 15 bp, Homo sapiens
gtgttcagcctgcag

SEQ ID NO: 1351468 - DNA, 15 bp, Homo sapiens
ggtgttcagcctgca

SEQ ID NO: 1351469 - DNA, 15 bp, Homo sapiens
tggtgttcagcctgc

SEQ ID NO: 1351470 - DNA, 15 bp, Homo sapiens
gtggtgttcagcctg

SEQ ID NO: 1351471 - DNA, 15 bp, Homo sapiens
tgtggtgttcagcct

SEQ ID NO: 1351472 - DNA, 15 bp, Homo sapiens
atgtggtgttcagcc

SEQ ID NO: 1351473 - DNA, 15 bp, Homo sapiens
catgtggtgttcagc

SEQ ID NO: 1351474 - DNA, 15 bp, Homo sapiens
ccatgtggtgttcag

SEQ ID NO: 1351475 - DNA, 15 bp, Homo sapiens
gccatgtggtgttca

SEQ ID NO: 1351476 - DNA, 15 bp, Homo sapiens
tgccatgtggtgttc

SEQ ID NO: 1351477 - DNA, 15 bp, Homo sapiens
gtgccatgtggtgtt

SEQ ID NO: 1351478 - DNA, 15 bp, Homo sapiens
ggtgccatgtggtgt

SEQ ID NO: 1351479 - DNA, 15 bp, Homo sapiens
aggtgccatgtggtg

SEQ ID NO: 1351480 - DNA, 15 bp, Homo sapiens
caggtgccatgtggt

SEQ ID NO: 1351481 - DNA, 15 bp, Homo sapiens
gcaggtgccatgtgg

SEQ ID NO: 1351482 - DNA, 15 bp, Homo sapiens
ggcaggtgccatgtg

SEQ ID NO: 1351483 - DNA, 15 bp, Homo sapiens
tggcaggtgccatgt

SEQ ID NO: 1351484 - DNA, 15 bp, Homo sapiens
ttggcaggtgccatg

SEQ ID NO: 1351485 - DNA, 15 bp, Homo sapiens
cttggcaggtgccat

SEQ ID NO: 1351486 - DNA, 15 bp, Homo sapiens
ccttggcaggtgcca

SEQ ID NO: 1351487 - DNA, 15 bp, Homo sapiens
gccttggcaggtgcc

SEQ ID NO: 1351488 - DNA, 15 bp, Homo sapiens
agccttggcaggtgc

SEQ ID NO: 1351489 - DNA, 15 bp, Homo sapiens
aagccttggcaggtg

SEQ ID NO: 1351490 - DNA, 15 bp, Homo sapiens
caagccttggcaggt

SEQ ID NO: 1351491 - DNA, 15 bp, Homo sapiens
ccaagccttggcagg

SEQ ID NO: 1351492 - DNA, 15 bp, Homo sapiens
cccaagccttggcag

SEQ ID NO: 1351493 - DNA, 15 bp, Homo sapiens
ccccaagccttggca

SEQ ID NO: 1351494 - DNA, 15 bp, Homo sapiens
gccccaagccttggc

SEQ ID NO: 1351495 - DNA, 15 bp, Homo sapiens
agccccaagccttgg

SEQ ID NO: 1351496 - DNA, 15 bp, Homo sapiens
gagccccaagccttg

SEQ ID NO: 1351497 - DNA, 15 bp, Homo sapiens
tgagccccaagcctt

SEQ ID NO: 1351498 - DNA, 15 bp, Homo sapiens
gtgagccccaagcct

SEQ ID NO: 1351499 - DNA, 15 bp, Homo sapiens
tgtgagccccaagcc

SEQ ID NO: 1351500 - DNA, 15 bp, Homo sapiens
gtgtgagccccaagc

SEQ ID NO: 1351501 - DNA, 15 bp, Homo sapiens
ggtgtgagccccaag

SEQ ID NO: 1351502 - DNA, 15 bp, Homo sapiens
gggtgtgagccccaa

SEQ ID NO: 1351503 - DNA, 15 bp, Homo sapiens
agggtgtgagcccca

SEQ ID NO: 1351504 - DNA, 15 bp, Homo sapiens
gagggtgtgagcccc

SEQ ID NO: 1351505 - DNA, 15 bp, Homo sapiens
agagggtgtgagccc

SEQ ID NO: 1351506 - DNA, 15 bp, Homo sapiens
cagagggtgtgagcc

SEQ ID NO: 1351507 - DNA, 15 bp, Homo sapiens
tcagagggtgtgagc

SEQ ID NO: 1351508 - DNA, 15 bp, Homo sapiens
ttcagagggtgtgag

SEQ ID NO: 1351509 - DNA, 15 bp, Homo sapiens
cttcagagggtgtga

SEQ ID NO: 1351510 - DNA, 15 bp, Homo sapiens
gcttcagagggtgtg

SEQ ID NO: 1351511 - DNA, 15 bp, Homo sapiens
ggcttcagagggtgt

SEQ ID NO: 1351512 - DNA, 15 bp, Homo sapiens
tggcttcagagggtg

SEQ ID NO: 1351513 - DNA, 15 bp, Homo sapiens
atggcttcagagggt

SEQ ID NO: 1351514 - DNA, 15 bp, Homo sapiens
catggcttcagaggg

SEQ ID NO: 1351515 - DNA, 15 bp, Homo sapiens
tcatggcttcagagg

SEQ ID NO: 1351516 - DNA, 15 bp, Homo sapiens
gtcatggcttcagag

SEQ ID NO: 1351517 - DNA, 15 bp, Homo sapiens
ggtcatggcttcaga

SEQ ID NO: 1351518 - DNA, 15 bp, Homo sapiens
gggtcatggcttcag

SEQ ID NO: 1351519 - DNA, 15 bp, Homo sapiens
tgggtcatggcttca

SEQ ID NO: 1351520 - DNA, 15 bp, Homo sapiens
ttgggtcatggcttc

SEQ ID NO: 1351521 - DNA, 15 bp, Homo sapiens
tttgggtcatggctt

SEQ ID NO: 1351522 - DNA, 15 bp, Homo sapiens
gtttgggtcatggct

SEQ ID NO: 1351523 - DNA, 15 bp, Homo sapiens
agtttgggtcatggc

SEQ ID NO: 1351524 - DNA, 15 bp, Homo sapiens
cagtttgggtcatgg

SEQ ID NO: 1351525 - DNA, 15 bp, Homo sapiens
acagtttgggtcatg

SEQ ID NO: 1351526 - DNA, 15 bp, Homo sapiens
tacagtttgggtcat

SEQ ID NO: 1351527 - DNA, 15 bp, Homo sapiens
gtacagtttgggtca

SEQ ID NO: 1351528 - DNA, 15 bp, Homo sapiens
ggtacagtttgggtc

SEQ ID NO: 1351529 - DNA, 15 bp, Homo sapiens
aggtacagtttgggt

SEQ ID NO: 1351530 - DNA, 15 bp, Homo sapiens
aaggtacagtttggg

SEQ ID NO: 1351531 - DNA, 15 bp, Homo sapiens
caaggtacagtttgg

SEQ ID NO: 1351532 - DNA, 15 bp, Homo sapiens
ccaaggtacagtttg

SEQ ID NO: 1351533 - DNA, 15 bp, Homo sapiens
gccaaggtacagttt

SEQ ID NO: 1351534 - DNA, 15 bp, Homo sapiens
ggccaaggtacagtt

SEQ ID NO: 1351535 - DNA, 15 bp, Homo sapiens
gggccaaggtacagt

SEQ ID NO: 1351536 - DNA, 15 bp, Homo sapiens
ggggccaaggtacag

SEQ ID NO: 1351537 - DNA, 15 bp, Homo sapiens
aggggccaaggtaca

SEQ ID NO: 1351538 - DNA, 15 bp, Homo sapiens
aaggggccaaggtac

SEQ ID NO: 1351539 - DNA, 15 bp, Homo sapiens
caaggggccaaggta

SEQ ID NO: 1351540 - DNA, 15 bp, Homo sapiens
acaaggggccaaggt

SEQ ID NO: 1351541 - DNA, 15 bp, Homo sapiens
tacaaggggccaagg

SEQ ID NO: 1351542 - DNA, 15 bp, Homo sapiens
ctacaaggggccaag

SEQ ID NO: 1351543 - DNA, 15 bp, Homo sapiens
gctacaaggggccaa

SEQ ID NO: 1351544 - DNA, 15 bp, Homo sapiens
ggctacaaggggcca

SEQ ID NO: 1351545 - DNA, 15 bp, Homo sapiens
tggctacaaggggcc

SEQ ID NO: 1351546 - DNA, 15 bp, Homo sapiens
ttggctacaaggggc

SEQ ID NO: 1351547 - DNA, 15 bp, Homo sapiens
cttggctacaagggg

SEQ ID NO: 1351548 - DNA, 15 bp, Homo sapiens
ccttggctacaaggg

SEQ ID NO: 1351549 - DNA, 15 bp, Homo sapiens
gccttggctacaagg

SEQ ID NO: 1351550 - DNA, 15 bp, Homo sapiens
agccttggctacaag

SEQ ID NO: 1351551 - DNA, 15 bp, Homo sapiens
cagccttggctacaa

SEQ ID NO: 1351552 - DNA, 15 bp, Homo sapiens
ccagccttggctaca

SEQ ID NO: 1351553 - DNA, 15 bp, Homo sapiens
tccagccttggctac

SEQ ID NO: 1351554 - DNA, 15 bp, Homo sapiens
ctccagccttggcta

SEQ ID NO: 1351555 - DNA, 15 bp, Homo sapiens
cctccagccttggct

SEQ ID NO: 1351556 - DNA, 15 bp, Homo sapiens
ccctccagccttggc

SEQ ID NO: 1351557 - DNA, 15 bp, Homo sapiens
cccctccagccttgg

SEQ ID NO: 1351558 - DNA, 15 bp, Homo sapiens
gcccctccagccttg

SEQ ID NO: 1351559 - DNA, 15 bp, Homo sapiens
agcccctccagcctt

SEQ ID NO: 1351560 - DNA, 15 bp, Homo sapiens
cagcccctccagcct

SEQ ID NO: 1351561 - DNA, 15 bp, Homo sapiens
ccagcccctccagcc

SEQ ID NO: 1351562 - DNA, 15 bp, Homo sapiens
tcccagcccctccag

SEQ ID NO: 1351563 - DNA, 15 bp, Homo sapiens
atcccagcccctcca

SEQ ID NO: 1351564 - DNA, 15 bp, Homo sapiens
catcccagcccctcc

SEQ ID NO: 1351565 - DNA, 15 bp, Homo sapiens
acatcccagcccctc

SEQ ID NO: 1351566 - DNA, 15 bp, Homo sapiens
cacatcccagcccct

SEQ ID NO: 1351567 - DNA, 15 bp, Homo sapiens
ccacatcccagcccc

SEQ ID NO: 1351568 - DNA, 15 bp, Homo sapiens
cccacatcccagccc

SEQ ID NO: 1351569 - DNA, 15 bp, Homo sapiens
ccccacatcccagcc

SEQ ID NO: 1351570 - DNA, 15 bp, Homo sapiens
gccccacatcccagc

SEQ ID NO: 1351571 - DNA, 15 bp, Homo sapiens
tgccccacatcccag

SEQ ID NO: 1351572 - DNA, 15 bp, Homo sapiens
gtgccccacatccca

SEQ ID NO: 1351573 - DNA, 15 bp, Homo sapiens
ggtgccccacatccc

SEQ ID NO: 1351574 - DNA, 15 bp, Homo sapiens
tggtgccccacatcc

SEQ ID NO: 1351575 - DNA, 15 bp, Homo sapiens
ttggtgccccacatc

SEQ ID NO: 1351576 - DNA, 15 bp, Homo sapiens
cttggtgccccacat

SEQ ID NO: 1351577 - DNA, 15 bp, Homo sapiens
ccttggtgccccaca

SEQ ID NO: 1351578 - DNA, 15 bp, Homo sapiens
gccttggtgccccac

SEQ ID NO: 1351579 - DNA, 15 bp, Homo sapiens
ggccttggtgcccca

SEQ ID NO: 1351580 - DNA, 15 bp, Homo sapiens
aggccttggtgcccc

SEQ ID NO: 1351581 - DNA, 15 bp, Homo sapiens
caggccttggtgccc

SEQ ID NO: 1351582 - DNA, 15 bp, Homo sapiens
tcaggccttggtgcc

SEQ ID NO: 1351583 - DNA, 15 bp, Homo sapiens
ctcaggccttggtgc

SEQ ID NO: 1351584 - DNA, 15 bp, Homo sapiens
cctcaggccttggtg

SEQ ID NO: 1351585 - DNA, 15 bp, Homo sapiens
gcctcaggccttggt

SEQ ID NO: 1351586 - DNA, 15 bp, Homo sapiens
agcctcaggccttgg

SEQ ID NO: 1351587 - DNA, 15 bp, Homo sapiens
cagcctcaggccttg

SEQ ID NO: 1351588 - DNA, 15 bp, Homo sapiens
gcagcctcaggcctt

SEQ ID NO: 1351589 - DNA, 15 bp, Homo sapiens
tgcagcctcaggcct

SEQ ID NO: 1351590 - DNA, 15 bp, Homo sapiens
gtgcagcctcaggcc

SEQ ID NO: 1351591 - DNA, 15 bp, Homo sapiens
tgtgcagcctcaggc

SEQ ID NO: 1351592 - DNA, 15 bp, Homo sapiens
gtgtgcagcctcagg

SEQ ID NO: 1351593 - DNA, 15 bp, Homo sapiens
tgtgtgcagcctcag

SEQ ID NO: 1351594 - DNA, 15 bp, Homo sapiens
ctgtgtgcagcctca

SEQ ID NO: 1351595 - DNA, 15 bp, Homo sapiens
actgtgtgcagcctc

SEQ ID NO: 1351596 - DNA, 15 bp, Homo sapiens
cactgtgtgcagcct

SEQ ID NO: 1351597 - DNA, 15 bp, Homo sapiens
ccactgtgtgcagcc

SEQ ID NO: 1351598 - DNA, 15 bp, Homo sapiens
accactgtgtgcagc

SEQ ID NO: 1351599 - DNA, 15 bp, Homo sapiens
gaccactgtgtgcag

SEQ ID NO: 1351600 - DNA, 15 bp, Homo sapiens
tgaccactgtgtgca

SEQ ID NO: 1351601 - DNA, 15 bp, Homo sapiens
gtgaccactgtgtgc

SEQ ID NO: 1351602 - DNA, 15 bp, Homo sapiens
tgtgaccactgtgtg

SEQ ID NO: 1351603 - DNA, 15 bp, Homo sapiens
ctgtgaccactgtgt

SEQ ID NO: 1351604 - DNA, 15 bp, Homo sapiens
cctgtgaccactgtg

SEQ ID NO: 1351605 - DNA, 15 bp, Homo sapiens
ccctgtgaccactgt

SEQ ID NO: 1351606 - DNA, 15 bp, Homo sapiens
accctgtgaccactg

SEQ ID NO: 1351607 - DNA, 15 bp, Homo sapiens
caccctgtgaccact

SEQ ID NO: 1351608 - DNA, 15 bp, Homo sapiens
ccaccctgtgaccac

SEQ ID NO: 1351609 - DNA, 15 bp, Homo sapiens
cccaccctgtgacca

SEQ ID NO: 1351610 - DNA, 15 bp, Homo sapiens
acccaccctgtgacc

SEQ ID NO: 1351611 - DNA, 15 bp, Homo sapiens
cacccaccctgtgac

SEQ ID NO: 1351612 - DNA, 15 bp, Homo sapiens
ccacccaccctgtga

SEQ ID NO: 1351613 - DNA, 15 bp, Homo sapiens
cccacccaccctgtg

SEQ ID NO: 1351614 - DNA, 15 bp, Homo sapiens
gcccacccaccctgt

SEQ ID NO: 1351615 - DNA, 15 bp, Homo sapiens
tgcccacccaccctg

SEQ ID NO: 1351616 - DNA, 15 bp, Homo sapiens
gtgcccacccaccct

SEQ ID NO: 1351617 - DNA, 15 bp, Homo sapiens
ggtgcccacccaccc

SEQ ID NO: 1351618 - DNA, 15 bp, Homo sapiens
aggtgcccacccacc

SEQ ID NO: 1351619 - DNA, 15 bp, Homo sapiens
caggtgcccacccac

SEQ ID NO: 1351620 - DNA, 15 bp, Homo sapiens
acaggtgcccaccca

SEQ ID NO: 1351621 - DNA, 15 bp, Homo sapiens
tacaggtgcccaccc

SEQ ID NO: 1351622 - DNA, 15 bp, Homo sapiens
gtacaggtgcccacc

SEQ ID NO: 1351623 - DNA, 15 bp, Homo sapiens
ggtacaggtgcccac

SEQ ID NO: 1351624 - DNA, 15 bp, Homo sapiens
aggtacaggtgccca

SEQ ID NO: 1351625 - DNA, 15 bp, Homo sapiens
caggtacaggtgccc

SEQ ID NO: 1351626 - DNA, 15 bp, Homo sapiens
gcaggtacaggtgcc

SEQ ID NO: 1351627 - DNA, 15 bp, Homo sapiens
ggcaggtacaggtgc

SEQ ID NO: 1351628 - DNA, 15 bp, Homo sapiens
gggcaggtacaggtg

SEQ ID NO: 1351629 - DNA, 15 bp, Homo sapiens
ggggcaggtacaggt

SEQ ID NO: 1351630 - DNA, 15 bp, Homo sapiens
tggggcaggtacagg

SEQ ID NO: 1351631 - DNA, 15 bp, Homo sapiens
ctggggcaggtacag

SEQ ID NO: 1351632 - DNA, 15 bp, Homo sapiens
cctggggcaggtaca

SEQ ID NO: 1351633 - DNA, 15 bp, Homo sapiens
tcctggggcaggtac

SEQ ID NO: 1351634 - DNA, 15 bp, Homo sapiens
ttcctggggcaggta

SEQ ID NO: 1351635 - DNA, 15 bp, Homo sapiens
tttcctggggcaggt

SEQ ID NO: 1351636 - DNA, 15 bp, Homo sapiens
gtttcctggggcagg

SEQ ID NO: 1351637 - DNA, 15 bp, Homo sapiens
ggtttcctggggcag

SEQ ID NO: 1351638 - DNA, 15 bp, Homo sapiens
tggtttcctggggca

SEQ ID NO: 1351639 - DNA, 15 bp, Homo sapiens
atggtttcctggggc

SEQ ID NO: 1351640 - DNA, 15 bp, Homo sapiens
aatggtttcctgggg

SEQ ID NO: 1351641 - DNA, 15 bp, Homo sapiens
aaatggtttcctggg

SEQ ID NO: 1351642 - DNA, 15 bp, Homo sapiens
aaaatggtttcctgg

SEQ ID NO: 1351643 - DNA, 15 bp, Homo sapiens
aaaaatggtttcctg

SEQ ID NO: 1351644 - DNA, 15 bp, Homo sapiens
gaaaaatggtttcct

SEQ ID NO: 1351645 - DNA, 15 bp, Homo sapiens
ggaaaaatggtttcc

SEQ ID NO: 1351646 - DNA, 15 bp, Homo sapiens
gggaaaaatggtttc

SEQ ID NO: 1351647 - DNA, 15 bp, Homo sapiens
agggaaaaatggttt

SEQ ID NO: 1351648 - DNA, 15 bp, Homo sapiens
gagggaaaaatggtt

SEQ ID NO: 1351649 - DNA, 15 bp, Homo sapiens
ggagggaaaaatggt

SEQ ID NO: 1351650 - DNA, 15 bp, Homo sapiens
aggagggaaaaatgg

SEQ ID NO: 1351651 - DNA, 15 bp, Homo sapiens
taggagggaaaaatg

SEQ ID NO: 1351652 - DNA, 15 bp, Homo sapiens
ctaggagggaaaaat

SEQ ID NO: 1351653 - DNA, 15 bp, Homo sapiens
cctaggagggaaaaa

SEQ ID NO: 1351654 - DNA, 15 bp, Homo sapiens
gcctaggagggaaaa

SEQ ID NO: 1351655 - DNA, 15 bp, Homo sapiens
ggcctaggagggaaa

SEQ ID NO: 1351656 - DNA, 15 bp, Homo sapiens
aggcctaggagggaa

SEQ ID NO: 1351657 - DNA, 15 bp, Homo sapiens
gaggcctaggaggga

SEQ ID NO: 1351658 - DNA, 15 bp, Homo sapiens
agaggcctaggaggg

SEQ ID NO: 1351659 - DNA, 15 bp, Homo sapiens
cagaggcctaggagg

SEQ ID NO: 1351660 - DNA, 15 bp, Homo sapiens
ccagaggcctaggag

SEQ ID NO: 1351661 - DNA, 15 bp, Homo sapiens
cccagaggcctagga

SEQ ID NO: 1351662 - DNA, 15 bp, Homo sapiens
gcccagaggcctagg

SEQ ID NO: 1351663 - DNA, 15 bp, Homo sapiens
ggcccagaggcctag

SEQ ID NO: 1351664 - DNA, 15 bp, Homo sapiens
aggcccagaggccta

SEQ ID NO: 1351665 - DNA, 15 bp, Homo sapiens
caggcccagaggcct

SEQ ID NO: 1351666 - DNA, 15 bp, Homo sapiens
acaggcccagaggcc

SEQ ID NO: 1351667 - DNA, 15 bp, Homo sapiens
cacaggcccagaggc

SEQ ID NO: 1351668 - DNA, 15 bp, Homo sapiens
tcacaggcccagagg

SEQ ID NO: 1351669 - DNA, 15 bp, Homo sapiens
atcacaggcccagag

SEQ ID NO: 1351670 - DNA, 15 bp, Homo sapiens
catcacaggcccaga

SEQ ID NO: 1351671 - DNA, 15 bp, Homo sapiens
ccatcacaggcccag

SEQ ID NO: 1351672 - DNA, 15 bp, Homo sapiens
cccatcacaggccca

SEQ ID NO: 1351673 - DNA, 15 bp, Homo sapiens
tcccatcacaggccc

SEQ ID NO: 1351674 - DNA, 15 bp, Homo sapiens
ctcccatcacaggcc

SEQ ID NO: 1351675 - DNA, 15 bp, Homo sapiens
cctcccatcacaggc

SEQ ID NO: 1351676 - DNA, 15 bp, Homo sapiens
ccctcccatcacagg

SEQ ID NO: 1351677 - DNA, 15 bp, Homo sapiens
cccctcccatcacag

SEQ ID NO: 1351678 - DNA, 15 bp, Homo sapiens
gcccctcccatcaca

SEQ ID NO: 1351679 - DNA, 15 bp, Homo sapiens
agcccctcccatcac

SEQ ID NO: 1351680 - DNA, 15 bp, Homo sapiens
cagcccctcccatca

SEQ ID NO: 1351681 - DNA, 15 bp, Homo sapiens
gcagcccctcccatc

SEQ ID NO: 1351682 - DNA, 15 bp, Homo sapiens
ggcagcccctcccat

SEQ ID NO: 1351683 - DNA, 15 bp, Homo sapiens
tggcagcccctccca

SEQ ID NO: 1351684 - DNA, 15 bp, Homo sapiens
atggcagcccctccc

SEQ ID NO: 1351685 - DNA, 15 bp, Homo sapiens
catggcagcccctcc

SEQ ID NO: 1351686 - DNA, 15 bp, Homo sapiens
tcatggcagcccctc

SEQ ID NO: 1351687 - DNA, 15 bp, Homo sapiens
ttcatggcagcccct

SEQ ID NO: 1351688 - DNA, 15 bp, Homo sapiens
cttcatggcagcccc

SEQ ID NO: 1351689 - DNA, 15 bp, Homo sapiens
ccttcatggcagccc

SEQ ID NO: 1351690 - DNA, 15 bp, Homo sapiens
accttcatggcagcc

SEQ ID NO: 1351691 - DNA, 15 bp, Homo sapiens
gaccttcatggcagc

SEQ ID NO: 1351692 - DNA, 15 bp, Homo sapiens
agaccttcatggcag

SEQ ID NO: 1351693 - DNA, 15 bp, Homo sapiens
gagaccttcatggca

SEQ ID NO: 1351694 - DNA, 15 bp, Homo sapiens
agagaccttcatggc

SEQ ID NO: 1351695 - DNA, 15 bp, Homo sapiens
cagagaccttcatgg

SEQ ID NO: 1351696 - DNA, 15 bp, Homo sapiens
tcagagaccttcatg

SEQ ID NO: 1351697 - DNA, 15 bp, Homo sapiens
gtcagagaccttcat

SEQ ID NO: 1351698 - DNA, 15 bp, Homo sapiens
tgtcagagaccttca

SEQ ID NO: 1351699 - DNA, 15 bp, Homo sapiens
atgtcagagaccttc

SEQ ID NO: 1351700 - DNA, 15 bp, Homo sapiens
catgtcagagacctt

SEQ ID NO: 1351701 - DNA, 15 bp, Homo sapiens
gcatgtcagagacct

SEQ ID NO: 1351702 - DNA, 15 bp, Homo sapiens
ggcatgtcagagacc

SEQ ID NO: 1351703 - DNA, 15 bp, Homo sapiens
gggcatgtcagagac

SEQ ID NO: 1351704 - DNA, 15 bp, Homo sapiens
agggcatgtcagaga

SEQ ID NO: 1351705 - DNA, 15 bp, Homo sapiens
cagggcatgtcagag

SEQ ID NO: 1351706 - DNA, 15 bp, Homo sapiens
ccagggcatgtcaga

SEQ ID NO: 1351707 - DNA, 15 bp, Homo sapiens
tccagggcatgtcag

SEQ ID NO: 1351708 - DNA, 15 bp, Homo sapiens
ctccagggcatgtca

SEQ ID NO: 1351709 - DNA, 15 bp, Homo sapiens
tctccagggcatgtc

SEQ ID NO: 1351710 - DNA, 15 bp, Homo sapiens
gtctccagggcatgt

SEQ ID NO: 1351711 - DNA, 15 bp, Homo sapiens
tgtctccagggcatg

SEQ ID NO: 1351712 - DNA, 15 bp, Homo sapiens
atgtctccagggcat

SEQ ID NO: 1351713 - DNA, 15 bp, Homo sapiens
aatgtctccagggca

SEQ ID NO: 1351714 - DNA, 15 bp, Homo sapiens
aaatgtctccagggc

SEQ ID NO: 1351715 - DNA, 15 bp, Homo sapiens
aaaatgtctccaggg

SEQ ID NO: 1351716 - DNA, 15 bp, Homo sapiens
gaaaatgtctccagg

SEQ ID NO: 1351717 - DNA, 15 bp, Homo sapiens
ggaaaatgtctccag

SEQ ID NO: 1351718 - DNA, 15 bp, Homo sapiens
gggaaaatgtctcca

SEQ ID NO: 1351719 - DNA, 15 bp, Homo sapiens
ggggaaaatgtctcc

SEQ ID NO: 1351720 - DNA, 15 bp, Homo sapiens
tggggaaaatgtctc

SEQ ID NO: 1351721 - DNA, 15 bp, Homo sapiens
atggggaaaatgtct

SEQ ID NO: 1351722 - DNA, 15 bp, Homo sapiens
aatggggaaaatgtc

SEQ ID NO: 1351723 - DNA, 15 bp, Homo sapiens
caatggggaaaatgt

SEQ ID NO: 1351724 - DNA, 15 bp, Homo sapiens
gcaatggggaaaatg

SEQ ID NO: 1351725 - DNA, 15 bp, Homo sapiens
ggcaatggggaaaat

SEQ ID NO: 1351726 - DNA, 15 bp, Homo sapiens
aggcaatggggaaaa

SEQ ID NO: 1351727 - DNA, 15 bp, Homo sapiens
aaggcaatggggaaa

SEQ ID NO: 1351728 - DNA, 15 bp, Homo sapiens
caaggcaatggggaa

SEQ ID NO: 1351729 - DNA, 15 bp, Homo sapiens
ccaaggcaatgggga

SEQ ID NO: 1351730 - DNA, 15 bp, Homo sapiens
gccaaggcaatgggg

SEQ ID NO: 1351731 - DNA, 15 bp, Homo sapiens
tgccaaggcaatggg

SEQ ID NO: 1351732 - DNA, 15 bp, Homo sapiens
ttgccaaggcaatgg

SEQ ID NO: 1351733 - DNA, 15 bp, Homo sapiens
attgccaaggcaatg

SEQ ID NO: 1351734 - DNA, 15 bp, Homo sapiens
aattgccaaggcaat

SEQ ID NO: 1351735 - DNA, 15 bp, Homo sapiens
taattgccaaggcaa

SEQ ID NO: 1351736 - DNA, 15 bp, Homo sapiens
ctaattgccaaggca

SEQ ID NO: 1351737 - DNA, 15 bp, Homo sapiens
gctaattgccaaggc

SEQ ID NO: 1351738 - DNA, 15 bp, Homo sapiens
tgctaattgccaagg

SEQ ID NO: 1351739 - DNA, 15 bp, Homo sapiens
atgctaattgccaag

SEQ ID NO: 1351740 - DNA, 15 bp, Homo sapiens
aatgctaattgccaa

SEQ ID NO: 1351741 - DNA, 15 bp, Homo sapiens
aaatgctaattgcca

SEQ ID NO: 1351742 - DNA, 15 bp, Homo sapiens
caaatgctaattgcc

SEQ ID NO: 1351743 - DNA, 15 bp, Homo sapiens
ccaaatgctaattgc

SEQ ID NO: 1351744 - DNA, 15 bp, Homo sapiens
gccaaatgctaattg

SEQ ID NO: 1351745 - DNA, 15 bp, Homo sapiens
agccaaatgctaatt

SEQ ID NO: 1351746 - DNA, 15 bp, Homo sapiens
gagccaaatgctaat

SEQ ID NO: 1351747 - DNA, 15 bp, Homo sapiens
ggagccaaatgctaa

SEQ ID NO: 1351748 - DNA, 15 bp, Homo sapiens
aggagccaaatgcta

SEQ ID NO: 1351749 - DNA, 15 bp, Homo sapiens
aaggagccaaatgct

SEQ ID NO: 1351750 - DNA, 15 bp, Homo sapiens
caaggagccaaatgc

SEQ ID NO: 1351751 - DNA, 15 bp, Homo sapiens
acaaggagccaaatg

SEQ ID NO: 1351752 - DNA, 15 bp, Homo sapiens
aacaaggagccaaat

SEQ ID NO: 1351753 - DNA, 15 bp, Homo sapiens
taacaaggagccaaa

SEQ ID NO: 1351754 - DNA, 15 bp, Homo sapiens
gtaacaaggagccaa

SEQ ID NO: 1351755 - DNA, 15 bp, Homo sapiens
agtaacaaggagcca

SEQ ID NO: 1351756 - DNA, 15 bp, Homo sapiens
gagtaacaaggagcc

SEQ ID NO: 1351757 - DNA, 15 bp, Homo sapiens
tgagtaacaaggagc

SEQ ID NO: 1351758 - DNA, 15 bp, Homo sapiens
atgagtaacaaggag

SEQ ID NO: 1351759 - DNA, 15 bp, Homo sapiens
catgagtaacaagga

SEQ ID NO: 1351760 - DNA, 15 bp, Homo sapiens
gcatgagtaacaagg

SEQ ID NO: 1351761 - DNA, 15 bp, Homo sapiens
tgcatgagtaacaag

SEQ ID NO: 1351762 - DNA, 15 bp, Homo sapiens
ttgcatgagtaacaa

SEQ ID NO: 1351763 - DNA, 15 bp, Homo sapiens
tttgcatgagtaaca

SEQ ID NO: 1351764 - DNA, 15 bp, Homo sapiens
gtttgcatgagtaac

SEQ ID NO: 1351765 - DNA, 15 bp, Homo sapiens
agtttgcatgagtaa

SEQ ID NO: 1351766 - DNA, 15 bp, Homo sapiens
aagtttgcatgagta

SEQ ID NO: 1351767 - DNA, 15 bp, Homo sapiens
gaagtttgcatgagt

SEQ ID NO: 1351768 - DNA, 15 bp, Homo sapiens
agaagtttgcatgag

SEQ ID NO: 1351769 - DNA, 15 bp, Homo sapiens
tagaagtttgcatga

SEQ ID NO: 1351770 - DNA, 15 bp, Homo sapiens
gtagaagtttgcatg

SEQ ID NO: 1351771 - DNA, 15 bp, Homo sapiens
agtagaagtttgcat

SEQ ID NO: 1351772 - DNA, 15 bp, Homo sapiens
tagtagaagtttgca

SEQ ID NO: 1351773 - DNA, 15 bp, Homo sapiens
gtagtagaagtttgc

SEQ ID NO: 1351774 - DNA, 15 bp, Homo sapiens
agtagtagaagtttg

SEQ ID NO: 1351775 - DNA, 15 bp, Homo sapiens
cagtagtagaagttt

SEQ ID NO: 1351776 - DNA, 15 bp, Homo sapiens
ccagtagtagaagtt

SEQ ID NO: 1351777 - DNA, 15 bp, Homo sapiens
gccagtagtagaagt

SEQ ID NO: 1351778 - DNA, 15 bp, Homo sapiens
agccagtagtagaag

SEQ ID NO: 1351779 - DNA, 15 bp, Homo sapiens
aagccagtagtagaa

SEQ ID NO: 1351780 - DNA, 15 bp, Homo sapiens
caagccagtagtaga

SEQ ID NO: 1351781 - DNA, 15 bp, Homo sapiens
tcaagccagtagtag

SEQ ID NO: 1351782 - DNA, 15 bp, Homo sapiens
ttcaagccagtagta

SEQ ID NO: 1351783 - DNA, 15 bp, Homo sapiens
attcaagccagtagt

SEQ ID NO: 1351784 - DNA, 15 bp, Homo sapiens
aattcaagccagtag

SEQ ID NO: 1351785 - DNA, 15 bp, Homo sapiens
aaattcaagccagta

SEQ ID NO: 1351786 - DNA, 15 bp, Homo sapiens
gaaattcaagccagt

SEQ ID NO: 1351787 - DNA, 15 bp, Homo sapiens
agaaattcaagccag

SEQ ID NO: 1351788 - DNA, 15 bp, Homo sapiens
aagaaattcaagcca

SEQ ID NO: 1351789 - DNA, 15 bp, Homo sapiens
gaagaaattcaagcc

SEQ ID NO: 1351790 - DNA, 15 bp, Homo sapiens
ggaagaaattcaagc

SEQ ID NO: 1351791 - DNA, 15 bp, Homo sapiens
gggaagaaattcaag

SEQ ID NO: 1351792 - DNA, 15 bp, Homo sapiens
tgggaagaaattcaa

SEQ ID NO: 1351793 - DNA, 15 bp, Homo sapiens
ctgggaagaaattca

SEQ ID NO: 1351794 - DNA, 15 bp, Homo sapiens
tctgggaagaaattc

SEQ ID NO: 1351795 - DNA, 15 bp, Homo sapiens
ttctgggaagaaatt

SEQ ID NO: 1351796 - DNA, 15 bp, Homo sapiens
attctgggaagaaat

SEQ ID NO: 1351797 - DNA, 15 bp, Homo sapiens
tattctgggaagaaa

SEQ ID NO: 1351798 - DNA, 15 bp, Homo sapiens
atattctgggaagaa

SEQ ID NO: 1351799 - DNA, 15 bp, Homo sapiens
tatattctgggaaga

SEQ ID NO: 1351800 - DNA, 15 bp, Homo sapiens
ttatattctgggaag

SEQ ID NO: 1351801 - DNA, 15 bp, Homo sapiens
cttatattctgggaa

SEQ ID NO: 1351802 - DNA, 15 bp, Homo sapiens
acttatattctggga

SEQ ID NO: 1351803 - DNA, 15 bp, Homo sapiens
aacttatattctggg

SEQ ID NO: 1351804 - DNA, 15 bp, Homo sapiens
aaacttatattctgg

SEQ ID NO: 1351805 - DNA, 15 bp, Homo sapiens
aaaacttatattctg

SEQ ID NO: 1351806 - DNA, 15 bp, Homo sapiens
aaaaacttatattct

SEQ ID NO: 1351807 - DNA, 15 bp, Homo sapiens
gaaaaacttatattc

SEQ ID NO: 1351808 - DNA, 15 bp, Homo sapiens
agaaaaacttatatt

SEQ ID NO: 1351809 - DNA, 15 bp, Homo sapiens
aagaaaaacttatat

SEQ ID NO: 1351810 - DNA, 15 bp, Homo sapiens
aaagaaaaacttata

SEQ ID NO: 1351811 - DNA, 15 bp, Homo sapiens
aaaagaaaaacttat

SEQ ID NO: 1351812 - DNA, 15 bp, Homo sapiens
gaaaagaaaaactta

SEQ ID NO: 1351813 - DNA, 15 bp, Homo sapiens
agaaaagaaaaactt

SEQ ID NO: 1351814 - DNA, 15 bp, Homo sapiens
tagaaaagaaaaact

SEQ ID NO: 1351815 - DNA, 15 bp, Homo sapiens
atagaaaagaaaaac

SEQ ID NO: 1351816 - DNA, 15 bp, Homo sapiens
gatagaaaagaaaaa

SEQ ID NO: 1351817 - DNA, 15 bp, Homo sapiens
tgatagaaaagaaaa

SEQ ID NO: 1351818 - DNA, 15 bp, Homo sapiens
gtgatagaaaagaaa

SEQ ID NO: 1351819 - DNA, 15 bp, Homo sapiens
tgtgatagaaaagaa

SEQ ID NO: 1351820 - DNA, 15 bp, Homo sapiens
atgtgatagaaaaga

SEQ ID NO: 1351821 - DNA, 15 bp, Homo sapiens
gatgtgatagaaaag

SEQ ID NO: 1351822 - DNA, 15 bp, Homo sapiens
tgatgtgatagaaaa

SEQ ID NO: 1351823 - DNA, 15 bp, Homo sapiens
atgatgtgatagaaa

SEQ ID NO: 1351824 - DNA, 15 bp, Homo sapiens
aatgatgtgatagaa

SEQ ID NO: 1351825 - DNA, 15 bp, Homo sapiens
taatgatgtgataga

SEQ ID NO: 1351826 - DNA, 15 bp, Homo sapiens
ctaatgatgtgatag

SEQ ID NO: 1351827 - DNA, 15 bp, Homo sapiens
tctaatgatgtgata

SEQ ID NO: 1351828 - DNA, 15 bp, Homo sapiens
gtctaatgatgtgat

SEQ ID NO: 1351829 - DNA, 15 bp, Homo sapiens
agtctaatgatgtga

SEQ ID NO: 1351830 - DNA, 15 bp, Homo sapiens
cagtctaatgatgtg

SEQ ID NO: 1351831 - DNA, 15 bp, Homo sapiens
gcagtctaatgatgt

SEQ ID NO: 1351832 - DNA, 15 bp, Homo sapiens
tgcagtctaatgatg

SEQ ID NO: 1351833 - DNA, 15 bp, Homo sapiens
ttgcagtctaatgat

SEQ ID NO: 1351834 - DNA, 15 bp, Homo sapiens
tttgcagtctaatga

SEQ ID NO: 1351835 - DNA, 15 bp, Homo sapiens
atttgcagtctaatg

SEQ ID NO: 1351836 - DNA, 15 bp, Homo sapiens
aatttgcagtctaat

SEQ ID NO: 1351837 - DNA, 15 bp, Homo sapiens
aaatttgcagtctaa

SEQ ID NO: 1351838 - DNA, 15 bp, Homo sapiens
aaaatttgcagtcta

SEQ ID NO: 1351839 - DNA, 15 bp, Homo sapiens
aaaaatttgcagtct

SEQ ID NO: 1351840 - DNA, 15 bp, Homo sapiens
gaaaaatttgcagtc

SEQ ID NO: 1351841 - DNA, 15 bp, Homo sapiens
tgaaaaatttgcagt

SEQ ID NO: 1351842 - DNA, 15 bp, Homo sapiens
ttgaaaaatttgcag

SEQ ID NO: 1351843 - DNA, 15 bp, Homo sapiens
tttgaaaaatttgca

SEQ ID NO: 1351844 - DNA, 15 bp, Homo sapiens
atttgaaaaatttgc

SEQ ID NO: 1351845 - DNA, 15 bp, Homo sapiens
aatttgaaaaatttg

SEQ ID NO: 1351846 - DNA, 15 bp, Homo sapiens
aaatttgaaaaattt

SEQ ID NO: 1351847 - DNA, 15 bp, Homo sapiens
aaaatttgaaaaatt

SEQ ID NO: 1351848 - DNA, 15 bp, Homo sapiens
aaaaatttgaaaaat

SEQ ID NO: 1351849 - DNA, 15 bp, Homo sapiens
taaaaatttgaaaaa

SEQ ID NO: 1351850 - DNA, 15 bp, Homo sapiens
ataaaaatttgaaaa

SEQ ID NO: 1351851 - DNA, 15 bp, Homo sapiens
cataaaaatttgaaa

SEQ ID NO: 1351852 - DNA, 15 bp, Homo sapiens
gcataaaaatttgaa

SEQ ID NO: 1351853 - DNA, 15 bp, Homo sapiens
agcataaaaatttga

SEQ ID NO: 1351854 - DNA, 15 bp, Homo sapiens
gagcataaaaatttg

SEQ ID NO: 1351855 - DNA, 15 bp, Homo sapiens
agagcataaaaattt

SEQ ID NO: 1351856 - DNA, 15 bp, Homo sapiens
aagagcataaaaatt

SEQ ID NO: 1351857 - DNA, 15 bp, Homo sapiens
gaagagcataaaaat

SEQ ID NO: 1351858 - DNA, 15 bp, Homo sapiens
agaagagcataaaaa

SEQ ID NO: 1351859 - DNA, 15 bp, Homo sapiens
aagaagagcataaaa

SEQ ID NO: 1351860 - DNA, 15 bp, Homo sapiens
gaagaagagcataaa

SEQ ID NO: 1351861 - DNA, 15 bp, Homo sapiens
ggaagaagagcataa

SEQ ID NO: 1351862 - DNA, 15 bp, Homo sapiens
aggaagaagagcata

SEQ ID NO: 1351863 - DNA, 15 bp, Homo sapiens
caggaagaagagcat

SEQ ID NO: 1351864 - DNA, 15 bp, Homo sapiens
acaggaagaagagca

SEQ ID NO: 1351865 - DNA, 15 bp, Homo sapiens
aacaggaagaagagc

SEQ ID NO: 1351866 - DNA, 15 bp, Homo sapiens
caacaggaagaagag

SEQ ID NO: 1351867 - DNA, 15 bp, Homo sapiens
tcaacaggaagaaga

SEQ ID NO: 1351868 - DNA, 15 bp, Homo sapiens
ttcaacaggaagaag

SEQ ID NO: 1351869 - DNA, 15 bp, Homo sapiens
gttcaacaggaagaa

SEQ ID NO: 1351870 - DNA, 15 bp, Homo sapiens
tgttcaacaggaaga

SEQ ID NO: 1351871 - DNA, 15 bp, Homo sapiens
gtgttcaacaggaag

SEQ ID NO: 1351872 - DNA, 15 bp, Homo sapiens
agtgttcaacaggaa

SEQ ID NO: 1351873 - DNA, 15 bp, Homo sapiens
aagtgttcaacagga

SEQ ID NO: 1351874 - DNA, 15 bp, Homo sapiens
aaagtgttcaacagg

SEQ ID NO: 1351875 - DNA, 15 bp, Homo sapiens
caaagtgttcaacag

SEQ ID NO: 1351876 - DNA, 15 bp, Homo sapiens
gcaaagtgttcaaca

SEQ ID NO: 1351877 - DNA, 15 bp, Homo sapiens
agcaaagtgttcaac

SEQ ID NO: 1351878 - DNA, 15 bp, Homo sapiens
cagcaaagtgttcaa

SEQ ID NO: 1351879 - DNA, 15 bp, Homo sapiens
gcagcaaagtgttca

SEQ ID NO: 1351880 - DNA, 15 bp, Homo sapiens
agcagcaaagtgttc

SEQ ID NO: 1351881 - DNA, 15 bp, Homo sapiens
aagcagcaaagtgtt

SEQ ID NO: 1351882 - DNA, 15 bp, Homo sapiens
taagcagcaaagtgt

SEQ ID NO: 1351883 - DNA, 15 bp, Homo sapiens
ctaagcagcaaagtg

SEQ ID NO: 1351884 - DNA, 15 bp, Homo sapiens
tctaagcagcaaagt

SEQ ID NO: 1351885 - DNA, 15 bp, Homo sapiens
ttctaagcagcaaag

SEQ ID NO: 1351886 - DNA, 15 bp, Homo sapiens
tttctaagcagcaaa

SEQ ID NO: 1351887 - DNA, 15 bp, Homo sapiens
atttctaagcagcaa

SEQ ID NO: 1351888 - DNA, 15 bp, Homo sapiens
gaaatttctaagcag

SEQ ID NO: 1351889 - DNA, 15 bp, Homo sapiens
agaaatttctaagca

SEQ ID NO: 1351890 - DNA, 15 bp, Homo sapiens
aagaaatttctaagc

SEQ ID NO: 1351891 - DNA, 15 bp, Homo sapiens
gaagaaatttctaag

SEQ ID NO: 1351892 - DNA, 15 bp, Homo sapiens
agaagaaatttctaa

SEQ ID NO: 1351893 - DNA, 15 bp, Homo sapiens
cagaagaaatttcta

SEQ ID NO: 1351894 - DNA, 15 bp, Homo sapiens
gcagaagaaatttct

SEQ ID NO: 1351895 - DNA, 15 bp, Homo sapiens
ggcagaagaaatttc

SEQ ID NO: 1351896 - DNA, 15 bp, Homo sapiens
tggcagaagaaattt

SEQ ID NO: 1351897 - DNA, 15 bp, Homo sapiens
ctggcagaagaaatt

SEQ ID NO: 1351898 - DNA, 15 bp, Homo sapiens
tctggcagaagaaat

SEQ ID NO: 1351899 - DNA, 15 bp, Homo sapiens
atctggcagaagaaa

SEQ ID NO: 1351900 - DNA, 15 bp, Homo sapiens
tatctggcagaagaa

SEQ ID NO: 1351901 - DNA, 15 bp, Homo sapiens
gtatctggcagaaga

SEQ ID NO: 1351902 - DNA, 15 bp, Homo sapiens
ggtatctggcagaag

SEQ ID NO: 1351903 - DNA, 15 bp, Homo sapiens
aggtatctggcagaa

SEQ ID NO: 1351904 - DNA, 15 bp, Homo sapiens
aaggtatctggcaga

SEQ ID NO: 1351905 - DNA, 15 bp, Homo sapiens
taaggtatctggcag

SEQ ID NO: 1351906 - DNA, 15 bp, Homo sapiens
ttaaggtatctggca

SEQ ID NO: 1351907 - DNA, 15 bp, Homo sapiens
tttaaggtatctggc

SEQ ID NO: 1351908 - DNA, 15 bp, Homo sapiens
atttaaggtatctgg

SEQ ID NO: 1351909 - DNA, 15 bp, Homo sapiens
gatttaaggtatctg

SEQ ID NO: 1351910 - DNA, 15 bp, Homo sapiens
tgatttaaggtatct

SEQ ID NO: 1351911 - DNA, 15 bp, Homo sapiens
atgatttaaggtatc

SEQ ID NO: 1351912 - DNA, 15 bp, Homo sapiens
tatgatttaaggtat

SEQ ID NO: 1351913 - DNA, 15 bp, Homo sapiens
atatgatttaaggta

SEQ ID NO: 1351914 - DNA, 15 bp, Homo sapiens
gatatgatttaaggt

SEQ ID NO: 1351915 - DNA, 15 bp, Homo sapiens
agatatgatttaagg

SEQ ID NO: 1351916 - DNA, 15 bp, Homo sapiens
gagatatgatttaag

SEQ ID NO: 1351917 - DNA, 15 bp, Homo sapiens
agagatatgatttaa

SEQ ID NO: 1351918 - DNA, 15 bp, Homo sapiens
gagagatatgattta

SEQ ID NO: 1351919 - DNA, 15 bp, Homo sapiens
tgagagatatgattt

SEQ ID NO: 1351920 - DNA, 15 bp, Homo sapiens
ttgagagatatgatt

SEQ ID NO: 1351921 - DNA, 15 bp, Homo sapiens
cttgagagatatgat

SEQ ID NO: 1351922 - DNA, 15 bp, Homo sapiens
acttgagagatatga

SEQ ID NO: 1351923 - DNA, 15 bp, Homo sapiens
aacttgagagatatg

SEQ ID NO: 1351924 - DNA, 15 bp, Homo sapiens
gaacttgagagatat

SEQ ID NO: 1351925 - DNA, 15 bp, Homo sapiens
tgaacttgagagata

SEQ ID NO: 1351926 - DNA, 15 bp, Homo sapiens
ttgaacttgagagat

SEQ ID NO: 1351927 - DNA, 15 bp, Homo sapiens
tttgaacttgagaga

SEQ ID NO: 1351928 - DNA, 15 bp, Homo sapiens
ctttgaacttgagag

SEQ ID NO: 1351929 - DNA, 15 bp, Homo sapiens
actttgaacttgaga

SEQ ID NO: 1351930 - DNA, 15 bp, Homo sapiens
aactttgaacttgag

SEQ ID NO: 1351931 - DNA, 15 bp, Homo sapiens
taactttgaacttga

SEQ ID NO: 1351932 - DNA, 15 bp, Homo sapiens
gtaactttgaacttg

SEQ ID NO: 1351933 - DNA, 15 bp, Homo sapiens
tgtaactttgaactt

SEQ ID NO: 1351934 - DNA, 15 bp, Homo sapiens
gtgtaactttgaact

SEQ ID NO: 1351935 - DNA, 15 bp, Homo sapiens
tgtgtaactttgaac

SEQ ID NO: 1351936 - DNA, 15 bp, Homo sapiens
ctgtgtaactttgaa

SEQ ID NO: 1351937 - DNA, 15 bp, Homo sapiens
tctgtgtaactttga

SEQ ID NO: 1351938 - DNA, 15 bp, Homo sapiens
atctgtgtaactttg

SEQ ID NO: 1351939 - DNA, 15 bp, Homo sapiens
gatctgtgtaacttt

SEQ ID NO: 1351940 - DNA, 15 bp, Homo sapiens
agatctgtgtaactt

SEQ ID NO: 1351941 - DNA, 15 bp, Homo sapiens
gagatctgtgtaact

SEQ ID NO: 1351942 - DNA, 15 bp, Homo sapiens
agagatctgtgtaac

SEQ ID NO: 1351943 - DNA, 15 bp, Homo sapiens
tagagatctgtgtaa

SEQ ID NO: 1351944 - DNA, 15 bp, Homo sapiens
ctagagatctgtgta

SEQ ID NO: 1351945 - DNA, 15 bp, Homo sapiens
cctagagatctgtgt

SEQ ID NO: 1351946 - DNA, 15 bp, Homo sapiens
ccctagagatctgtg

SEQ ID NO: 1351947 - DNA, 15 bp, Homo sapiens
gccctagagatctgt

SEQ ID NO: 1351948 - DNA, 15 bp, Homo sapiens
cctgaggcctccctg

SEQ ID NO: 1351949 - DNA, 15 bp, Homo sapiens
tcctgaggcctccct

SEQ ID NO: 1351950 - DNA, 15 bp, Homo sapiens
ttcctgaggcctccc

SEQ ID NO: 1351951 - DNA, 15 bp, Homo sapiens
tttcctgaggcctcc

SEQ ID NO: 1351952 - DNA, 15 bp, Homo sapiens
gtttcctgaggcctc

SEQ ID NO: 1351953 - DNA, 15 bp, Homo sapiens
ttaagtttcctgagg

SEQ ID NO: 1351954 - DNA, 15 bp, Homo sapiens
tttaagtttcctgag

SEQ ID NO: 1351955 - DNA, 15 bp, Homo sapiens
ttttaagtttcctga

SEQ ID NO: 1351956 - DNA, 15 bp, Homo sapiens
attttaagtttcctg

SEQ ID NO: 1351957 - DNA, 15 bp, Homo sapiens
gattttaagtttcct

SEQ ID NO: 1351958 - DNA, 15 bp, Homo sapiens
tgattttaagtttcc

SEQ ID NO: 1351959 - DNA, 15 bp, Homo sapiens
atgattttaagtttc

SEQ ID NO: 1351960 - DNA, 15 bp, Homo sapiens
catgattttaagttt

SEQ ID NO: 1351961 - DNA, 15 bp, Homo sapiens
ccatgattttaagtt

SEQ ID NO: 1351962 - DNA, 15 bp, Homo sapiens
gccatgattttaagt

SEQ ID NO: 1351963 - DNA, 15 bp, Homo sapiens
tgccatgattttaag

SEQ ID NO: 1351964 - DNA, 15 bp, Homo sapiens
ctgccatgattttaa

SEQ ID NO: 1351965 - DNA, 15 bp, Homo sapiens
tctgccatgatttta

SEQ ID NO: 1351966 - DNA, 15 bp, Homo sapiens
ttctgccatgatttt

SEQ ID NO: 1351967 - DNA, 15 bp, Homo sapiens
cttctgccatgattt

SEQ ID NO: 1351968 - DNA, 15 bp, Homo sapiens
cccttctgccatgat

SEQ ID NO: 1351969 - DNA, 15 bp, Homo sapiens
ccccttctgccatga

SEQ ID NO: 1351970 - DNA, 15 bp, Homo sapiens
tccccttctgccatg

SEQ ID NO: 1351971 - DNA, 15 bp, Homo sapiens
gtttgcttccccttc

SEQ ID NO: 1351972 - DNA, 15 bp, Homo sapiens
tgtttgcttcccctt

SEQ ID NO: 1351973 - DNA, 15 bp, Homo sapiens
atgtttgcttcccct

SEQ ID NO: 1351974 - DNA, 15 bp, Homo sapiens
catgtttgcttcccc

SEQ ID NO: 1351975 - DNA, 15 bp, Homo sapiens
gcatgtttgcttccc

SEQ ID NO: 1351976 - DNA, 15 bp, Homo sapiens
ggcatgtttgcttcc

SEQ ID NO: 1351977 - DNA, 15 bp, Homo sapiens
gggcatgtttgcttc

SEQ ID NO: 1351978 - DNA, 15 bp, Homo sapiens
agggcatgtttgctt

SEQ ID NO: 1351979 - DNA, 15 bp, Homo sapiens
aagggcatgtttgct

SEQ ID NO: 1351980 - DNA, 15 bp, Homo sapiens
gaagggcatgtttgc

SEQ ID NO: 1351981 - DNA, 15 bp, Homo sapiens
agaagggcatgtttg

SEQ ID NO: 1351982 - DNA, 15 bp, Homo sapiens
aagaagggcatgttt

SEQ ID NO: 1351983 - DNA, 15 bp, Homo sapiens
gaagaagggcatgtt

SEQ ID NO: 1351984 - DNA, 15 bp, Homo sapiens
tgaagaagggcatgt

SEQ ID NO: 1351985 - DNA, 15 bp, Homo sapiens
gtgaagaagggcatg

SEQ ID NO: 1351986 - DNA, 15 bp, Homo sapiens
tgtgaagaagggcat

SEQ ID NO: 1351987 - DNA, 15 bp, Homo sapiens
atgtgaagaagggca

SEQ ID NO: 1351988 - DNA, 15 bp, Homo sapiens
catgtgaagaagggc

SEQ ID NO: 1351989 - DNA, 15 bp, Homo sapiens
ccatgtgaagaaggg

SEQ ID NO: 1351990 - DNA, 15 bp, Homo sapiens
accatgtgaagaagg

SEQ ID NO: 1351991 - DNA, 15 bp, Homo sapiens
caccatgtgaagaag

SEQ ID NO: 1351992 - DNA, 15 bp, Homo sapiens
ccaccatgtgaagaa

SEQ ID NO: 1351993 - DNA, 15 bp, Homo sapiens
gccaccatgtgaaga

SEQ ID NO: 1351994 - DNA, 15 bp, Homo sapiens
tgccaccatgtgaag

SEQ ID NO: 1351995 - DNA, 15 bp, Homo sapiens
ctgccaccatgtgaa

SEQ ID NO: 1351996 - DNA, 15 bp, Homo sapiens
gctgccaccatgtga

SEQ ID NO: 1351997 - DNA, 15 bp, Homo sapiens
tgctgccaccatgtg

SEQ ID NO: 1351998 - DNA, 15 bp, Homo sapiens
ttgctgccaccatgt

SEQ ID NO: 1351999 - DNA, 15 bp, Homo sapiens
cttgctgccaccatg

SEQ ID NO: 1352000 - DNA, 15 bp, Homo sapiens
ccttgctgccaccat

SEQ ID NO: 1352001 - DNA, 15 bp, Homo sapiens
tccttgctgccacca

SEQ ID NO: 1352002 - DNA, 15 bp, Homo sapiens
ctccttgctgccacc

SEQ ID NO: 1352003 - DNA, 15 bp, Homo sapiens
tctccttgctgccac

SEQ ID NO: 1352004 - DNA, 15 bp, Homo sapiens
ttctccttgctgcca

SEQ ID NO: 1352005 - DNA, 15 bp, Homo sapiens
cttctccttgctgcc

SEQ ID NO: 1352006 - DNA, 15 bp, Homo sapiens
tcttctccttgctgc

SEQ ID NO: 1352007 - DNA, 15 bp, Homo sapiens
ctcttctccttgctg

SEQ ID NO: 1352008 - DNA, 15 bp, Homo sapiens
gctcttctccttgct

SEQ ID NO: 1352009 - DNA, 15 bp, Homo sapiens
ggctcttctccttgc

SEQ ID NO: 1352010 - DNA, 15 bp, Homo sapiens
tggctcttctccttg

SEQ ID NO: 1352011 - DNA, 15 bp, Homo sapiens
ttggctcttctcctt

SEQ ID NO: 1352012 - DNA, 15 bp, Homo sapiens
cttggctcttctcct

SEQ ID NO: 1352013 - DNA, 15 bp, Homo sapiens
gcttggctcttctcc

SEQ ID NO: 1352014 - DNA, 15 bp, Homo sapiens
tgcttggctcttctc

SEQ ID NO: 1352015 - DNA, 15 bp, Homo sapiens
ttgcttggctcttct

SEQ ID NO: 1352016 - DNA, 15 bp, Homo sapiens
tttgcttggctcttc

SEQ ID NO: 1352017 - DNA, 15 bp, Homo sapiens
ttttgcttggctctt

SEQ ID NO: 1352018 - DNA, 15 bp, Homo sapiens
attttgcttggctct

SEQ ID NO: 1352019 - DNA, 15 bp, Homo sapiens
cattttgcttggctc

SEQ ID NO: 1352020 - DNA, 15 bp, Homo sapiens
ccattttgcttggct

SEQ ID NO: 1352021 - DNA, 15 bp, Homo sapiens
cccattttgcttggc

SEQ ID NO: 1352022 - DNA, 15 bp, Homo sapiens
tcccattttgcttgg

SEQ ID NO: 1352023 - DNA, 15 bp, Homo sapiens
ttcccattttgcttg

SEQ ID NO: 1352024 - DNA, 15 bp, Homo sapiens
tttcccattttgctt

SEQ ID NO: 1352025 - DNA, 15 bp, Homo sapiens
ttttcccattttgct

SEQ ID NO: 1352026 - DNA, 15 bp, Homo sapiens
tttttcccattttgc

SEQ ID NO: 1352027 - DNA, 15 bp, Homo sapiens
atttttcccattttg

SEQ ID NO: 1352028 - DNA, 15 bp, Homo sapiens
gatttttcccatttt

SEQ ID NO: 1352029 - DNA, 15 bp, Homo sapiens
ggatttttcccattt

SEQ ID NO: 1352030 - DNA, 15 bp, Homo sapiens
gggatttttcccatt

SEQ ID NO: 1352031 - DNA, 15 bp, Homo sapiens
agggatttttcccat

SEQ ID NO: 1352032 - DNA, 15 bp, Homo sapiens
aagggatttttccca

SEQ ID NO: 1352033 - DNA, 15 bp, Homo sapiens
taagggatttttccc

SEQ ID NO: 1352034 - DNA, 15 bp, Homo sapiens
ataagggatttttcc

SEQ ID NO: 1352035 - DNA, 15 bp, Homo sapiens
tataagggatttttc

SEQ ID NO: 1352036 - DNA, 15 bp, Homo sapiens
ttataagggattttt

SEQ ID NO: 1352037 - DNA, 15 bp, Homo sapiens
tttataagggatttt

SEQ ID NO: 1352038 - DNA, 15 bp, Homo sapiens
ttttataagggattt

SEQ ID NO: 1352039 - DNA, 15 bp, Homo sapiens
gttttataagggatt

SEQ ID NO: 1352040 - DNA, 15 bp, Homo sapiens
ggttttataagggat

SEQ ID NO: 1352041 - DNA, 15 bp, Homo sapiens
tggttttataaggga

SEQ ID NO: 1352042 - DNA, 15 bp, Homo sapiens
atggttttataaggg

SEQ ID NO: 1352043 - DNA, 15 bp, Homo sapiens
gatggttttataagg

SEQ ID NO: 1352044 - DNA, 15 bp, Homo sapiens
tatctgatggtttta

SEQ ID NO: 1352045 - DNA, 15 bp, Homo sapiens
atatctgatggtttt

SEQ ID NO: 1352046 - DNA, 15 bp, Homo sapiens
gatatctgatggttt

SEQ ID NO: 1352047 - DNA, 15 bp, Homo sapiens
tgatatctgatggtt

SEQ ID NO: 1352048 - DNA, 15 bp, Homo sapiens
atgatatctgatggt

SEQ ID NO: 1352049 - DNA, 15 bp, Homo sapiens
catgatatctgatgg

SEQ ID NO: 1352050 - DNA, 15 bp, Homo sapiens
tcatgatatctgatg

SEQ ID NO: 1352051 - DNA, 15 bp, Homo sapiens
ctcatgatatctgat

SEQ ID NO: 1352052 - DNA, 15 bp, Homo sapiens
tctcatgatatctga

SEQ ID NO: 1352053 - DNA, 15 bp, Homo sapiens
atctcatgatatctg

SEQ ID NO: 1352054 - DNA, 15 bp, Homo sapiens
tatctcatgatatct

SEQ ID NO: 1352055 - DNA, 15 bp, Homo sapiens
atatctcatgatatc

SEQ ID NO: 1352056 - DNA, 15 bp, Homo sapiens
gatatctcatgatat

SEQ ID NO: 1352057 - DNA, 15 bp, Homo sapiens
agatatctcatgata

SEQ ID NO: 1352058 - DNA, 15 bp, Homo sapiens
cagatatctcatgat

SEQ ID NO: 1352059 - DNA, 15 bp, Homo sapiens
tcagatatctcatga

SEQ ID NO: 1352060 - DNA, 15 bp, Homo sapiens
gtcagatatctcatg

SEQ ID NO: 1352061 - DNA, 15 bp, Homo sapiens
agtcagatatctcat

SEQ ID NO: 1352062 - DNA, 15 bp, Homo sapiens
gagtcagatatctca

SEQ ID NO: 1352063 - DNA, 15 bp, Homo sapiens
tgagtcagatatctc

SEQ ID NO: 1352064 - DNA, 15 bp, Homo sapiens
gtgagtcagatatct

SEQ ID NO: 1352065 - DNA, 15 bp, Homo sapiens
agtgagtcagatatc

SEQ ID NO: 1352066 - DNA, 15 bp, Homo sapiens
tagtgagtcagatat

SEQ ID NO: 1352067 - DNA, 15 bp, Homo sapiens
atagtgagtcagata

SEQ ID NO: 1352068 - DNA, 15 bp, Homo sapiens
gatagtgagtcagat

SEQ ID NO: 1352069 - DNA, 15 bp, Homo sapiens
tgatagtgagtcaga

SEQ ID NO: 1352070 - DNA, 15 bp, Homo sapiens
atgatagtgagtcag

SEQ ID NO: 1352071 - DNA, 15 bp, Homo sapiens
catgatagtgagtca

SEQ ID NO: 1352072 - DNA, 15 bp, Homo sapiens
tcatgatagtgagtc

SEQ ID NO: 1352073 - DNA, 15 bp, Homo sapiens
ctcatgatagtgagt

SEQ ID NO: 1352074 - DNA, 15 bp, Homo sapiens
tctcatgatagtgag

SEQ ID NO: 1352075 - DNA, 15 bp, Homo sapiens
ctccatgctgttctc

SEQ ID NO: 1352076 - DNA, 15 bp, Homo sapiens
cctccatgctgttct

SEQ ID NO: 1352077 - DNA, 15 bp, Homo sapiens
acctccatgctgttc

SEQ ID NO: 1352078 - DNA, 15 bp, Homo sapiens
tacctccatgctgtt

SEQ ID NO: 1352079 - DNA, 15 bp, Homo sapiens
ttacctccatgctgt

SEQ ID NO: 1352080 - DNA, 15 bp, Homo sapiens
gttacctccatgctg

SEQ ID NO: 1352081 - DNA, 15 bp, Homo sapiens
ggttacctccatgct

SEQ ID NO: 1352082 - DNA, 15 bp, Homo sapiens
tggttacctccatgc

SEQ ID NO: 1352083 - DNA, 15 bp, Homo sapiens
gtggttacctccatg

SEQ ID NO: 1352084 - DNA, 15 bp, Homo sapiens
ggtggttacctccat

SEQ ID NO: 1352085 - DNA, 15 bp, Homo sapiens
aggtggttacctcca

SEQ ID NO: 1352086 - DNA, 15 bp, Homo sapiens
gaggtggttacctcc

SEQ ID NO: 1352087 - DNA, 15 bp, Homo sapiens
ggaggtggttacctc

SEQ ID NO: 1352088 - DNA, 15 bp, Homo sapiens
tggaggtggttacct

SEQ ID NO: 1352089 - DNA, 15 bp, Homo sapiens
atggaggtggttacc

SEQ ID NO: 1352090 - DNA, 15 bp, Homo sapiens
catggaggtggttac

SEQ ID NO: 1352091 - DNA, 15 bp, Homo sapiens
tcatggaggtggtta

SEQ ID NO: 1352092 - DNA, 15 bp, Homo sapiens
atcatggaggtggtt

SEQ ID NO: 1352093 - DNA, 15 bp, Homo sapiens
aatcatggaggtggt

SEQ ID NO: 1352094 - DNA, 15 bp, Homo sapiens
gaatcatggaggtgg

SEQ ID NO: 1352095 - DNA, 15 bp, Homo sapiens
tgaatcatggaggtg

SEQ ID NO: 1352096 - DNA, 15 bp, Homo sapiens
ttgaatcatggaggt

SEQ ID NO: 1352097 - DNA, 15 bp, Homo sapiens
attgaatcatggagg

SEQ ID NO: 1352098 - DNA, 15 bp, Homo sapiens
aattgaatcatggag

SEQ ID NO: 1352099 - DNA, 15 bp, Homo sapiens
taattgaatcatgga

SEQ ID NO: 1352100 - DNA, 15 bp, Homo sapiens
gtaattgaatcatgg

SEQ ID NO: 1352101 - DNA, 15 bp, Homo sapiens
tggtgggaggtaatt

SEQ ID NO: 1352102 - DNA, 15 bp, Homo sapiens
ctggtgggaggtaat

SEQ ID NO: 1352103 - DNA, 15 bp, Homo sapiens
cctggtgggaggtaa

SEQ ID NO: 1352104 - DNA, 15 bp, Homo sapiens
acctggtgggaggta

SEQ ID NO: 1352105 - DNA, 15 bp, Homo sapiens
gacctggtgggaggt

SEQ ID NO: 1352106 - DNA, 15 bp, Homo sapiens
ggacctggtgggagg

SEQ ID NO: 1352107 - DNA, 15 bp, Homo sapiens
aggacctggtgggag

SEQ ID NO: 1352108 - DNA, 15 bp, Homo sapiens
aaggacctggtggga

SEQ ID NO: 1352109 - DNA, 15 bp, Homo sapiens
gaaggacctggtggg

SEQ ID NO: 1352110 - DNA, 15 bp, Homo sapiens
ggaaggacctggtgg

SEQ ID NO: 1352111 - DNA, 15 bp, Homo sapiens
atgggaaggacctgg

SEQ ID NO: 1352112 - DNA, 15 bp, Homo sapiens
catgggaaggacctg

SEQ ID NO: 1352113 - DNA, 15 bp, Homo sapiens
tcatgggaaggacct

SEQ ID NO: 1352114 - DNA, 15 bp, Homo sapiens
atcatgggaaggacc

SEQ ID NO: 1352115 - DNA, 15 bp, Homo sapiens
tatcatgggaaggac

SEQ ID NO: 1352116 - DNA, 15 bp, Homo sapiens
gtatcatgggaagga

SEQ ID NO: 1352117 - DNA, 15 bp, Homo sapiens
tgtatcatgggaagg

SEQ ID NO: 1352118 - DNA, 15 bp, Homo sapiens
atgtatcatgggaag

SEQ ID NO: 1352119 - DNA, 15 bp, Homo sapiens
catgtatcatgggaa

SEQ ID NO: 1352120 - DNA, 15 bp, Homo sapiens
ccatgtatcatggga

SEQ ID NO: 1352121 - DNA, 15 bp, Homo sapiens
cccatgtatcatggg

SEQ ID NO: 1352122 - DNA, 15 bp, Homo sapiens
tcccatgtatcatgg

SEQ ID NO: 1352123 - DNA, 15 bp, Homo sapiens
atcccatgtatcatg

SEQ ID NO: 1352124 - DNA, 15 bp, Homo sapiens
aatcccatgtatcat

SEQ ID NO: 1352125 - DNA, 15 bp, Homo sapiens
taatcccatgtatca

SEQ ID NO: 1352126 - DNA, 15 bp, Homo sapiens
ataatcccatgtatc

SEQ ID NO: 1352127 - DNA, 15 bp, Homo sapiens
cataatcccatgtat

SEQ ID NO: 1352128 - DNA, 15 bp, Homo sapiens
ccataatcccatgta

SEQ ID NO: 1352129 - DNA, 15 bp, Homo sapiens
cccataatcccatgt

SEQ ID NO: 1352130 - DNA, 15 bp, Homo sapiens
ccccataatcccatg

SEQ ID NO: 1352131 - DNA, 15 bp, Homo sapiens
tccccataatcccat

SEQ ID NO: 1352132 - DNA, 15 bp, Homo sapiens
gtccccataatccca

SEQ ID NO: 1352133 - DNA, 15 bp, Homo sapiens
agtccccataatccc

SEQ ID NO: 1352134 - DNA, 15 bp, Homo sapiens
tagtccccataatcc

SEQ ID NO: 1352135 - DNA, 15 bp, Homo sapiens
gtagtccccataatc

SEQ ID NO: 1352136 - DNA, 15 bp, Homo sapiens
tgtagtccccataat

SEQ ID NO: 1352137 - DNA, 15 bp, Homo sapiens
ttgtagtccccataa

SEQ ID NO: 1352138 - DNA, 15 bp, Homo sapiens
attgtagtccccata

SEQ ID NO: 1352139 - DNA, 15 bp, Homo sapiens
aattgtagtccccat

SEQ ID NO: 1352140 - DNA, 15 bp, Homo sapiens
gaattgtagtcccca

SEQ ID NO: 1352141 - DNA, 15 bp, Homo sapiens
tgaattgtagtcccc

SEQ ID NO: 1352142 - DNA, 15 bp, Homo sapiens
ttgaattgtagtccc

SEQ ID NO: 1352143 - DNA, 15 bp, Homo sapiens
cttgaattgtagtcc

SEQ ID NO: 1352144 - DNA, 15 bp, Homo sapiens
tcttgaattgtagtc

SEQ ID NO: 1352145 - DNA, 15 bp, Homo sapiens
catctcatcttgaat

SEQ ID NO: 1352146 - DNA, 15 bp, Homo sapiens
acatctcatcttgaa

SEQ ID NO: 1352147 - DNA, 15 bp, Homo sapiens
cacatctcatcttga

SEQ ID NO: 1352148 - DNA, 15 bp, Homo sapiens
ccacatctcatcttg

SEQ ID NO: 1352149 - DNA, 15 bp, Homo sapiens
cccacatctcatctt

SEQ ID NO: 1352150 - DNA, 15 bp, Homo sapiens
acccacatctcatct

SEQ ID NO: 1352151 - DNA, 15 bp, Homo sapiens
cacccacatctcatc

SEQ ID NO: 1352152 - DNA, 15 bp, Homo sapiens
ccacccacatctcat

SEQ ID NO: 1352153 - DNA, 15 bp, Homo sapiens
cccacccacatctca

SEQ ID NO: 1352154 - DNA, 15 bp, Homo sapiens
ccccacccacatctc

SEQ ID NO: 1352155 - DNA, 15 bp, Homo sapiens
tccccacccacatct

SEQ ID NO: 1352156 - DNA, 15 bp, Homo sapiens
atccccacccacatc

SEQ ID NO: 1352157 - DNA, 15 bp, Homo sapiens
tatccccacccacat

SEQ ID NO: 1352158 - DNA, 15 bp, Homo sapiens
gtatccccacccaca

SEQ ID NO: 1352159 - DNA, 15 bp, Homo sapiens
tgtatccccacccac

SEQ ID NO: 1352160 - DNA, 15 bp, Homo sapiens
ttgtatccccaccca

SEQ ID NO: 1352161 - DNA, 15 bp, Homo sapiens
gttgtatccccaccc

SEQ ID NO: 1352162 - DNA, 15 bp, Homo sapiens
tgttgtatccccacc

SEQ ID NO: 1352163 - DNA, 15 bp, Homo sapiens
ttgttgtatccccac

SEQ ID NO: 1352164 - DNA, 15 bp, Homo sapiens
tttgttgtatcccca

SEQ ID NO: 1352165 - DNA, 15 bp, Homo sapiens
ttttgttgtatcccc

SEQ ID NO: 1352166 - DNA, 15 bp, Homo sapiens
gttttgttgtatccc

SEQ ID NO: 1352167 - DNA, 15 bp, Homo sapiens
ggttttgttgtatcc

SEQ ID NO: 1352168 - DNA, 15 bp, Homo sapiens
tggttttgttgtatc

SEQ ID NO: 1352169 - DNA, 15 bp, Homo sapiens
atggttttgttgtat

SEQ ID NO: 1352170 - DNA, 15 bp, Homo sapiens
tatggttttgttgta

SEQ ID NO: 1352171 - DNA, 15 bp, Homo sapiens
atatggttttgttgt

SEQ ID NO: 1352172 - DNA, 15 bp, Homo sapiens
gatatggttttgttg

SEQ ID NO: 1352173 - DNA, 15 bp, Homo sapiens
tgatatggttttgtt

SEQ ID NO: 1352174 - DNA, 15 bp, Homo sapiens
gtgatatggttttgt

SEQ ID NO: 1352175 - DNA, 15 bp, Homo sapiens
tgtgatatggttttg

SEQ ID NO: 1352176 - DNA, 15 bp, Homo sapiens
gtgtgatatggtttt

SEQ ID NO: 1352177 - DNA, 15 bp, Homo sapiens
cgtgtgatatggttt

SEQ ID NO: 1352178 - DNA, 15 bp, Homo sapiens
ccgtgtgatatggtt

SEQ ID NO: 1352179 - DNA, 15 bp, Homo sapiens
accgtgtgatatggt

SEQ ID NO: 1352180 - DNA, 15 bp, Homo sapiens
aaccgtgtgatatgg

SEQ ID NO: 1352181 - DNA, 15 bp, Homo sapiens
aaaccgtgtgatatg

SEQ ID NO: 1352182 - DNA, 15 bp, Homo sapiens
caaaccgtgtgatat

SEQ ID NO: 1352183 - DNA, 15 bp, Homo sapiens
ccaaaccgtgtgata

SEQ ID NO: 1352184 - DNA, 15 bp, Homo sapiens
accaaaccgtgtgat

SEQ ID NO: 1352185 - DNA, 15 bp, Homo sapiens
gaccaaaccgtgtga

SEQ ID NO: 1352186 - DNA, 15 bp, Homo sapiens
agaccaaaccgtgtg

SEQ ID NO: 1352187 - DNA, 15 bp, Homo sapiens
tagaccaaaccgtgt

SEQ ID NO: 1352188 - DNA, 15 bp, Homo sapiens
ttagaccaaaccgtg

SEQ ID NO: 1352189 - DNA, 15 bp, Homo sapiens
gttagaccaaaccgt

SEQ ID NO: 1352190 - DNA, 15 bp, Homo sapiens
tgttagaccaaaccg

SEQ ID NO: 1352191 - DNA, 15 bp, Homo sapiens
ctgttagaccaaacc

SEQ ID NO: 1352192 - DNA, 15 bp, Homo sapiens
tctgttagaccaaac

SEQ ID NO: 1352193 - DNA, 15 bp, Homo sapiens
ctctgttagaccaaa

SEQ ID NO: 1352194 - DNA, 15 bp, Homo sapiens
gctctgttagaccaa

SEQ ID NO: 1352195 - DNA, 15 bp, Homo sapiens
tgctctgttagacca

SEQ ID NO: 1352196 - DNA, 15 bp, Homo sapiens
ttgctctgttagacc

SEQ ID NO: 1352197 - DNA, 15 bp, Homo sapiens
tttgctctgttagac

SEQ ID NO: 1352198 - DNA, 15 bp, Homo sapiens
ttttgctctgttaga

SEQ ID NO: 1352199 - DNA, 15 bp, Homo sapiens
gttttgctctgttag

SEQ ID NO: 1352200 - DNA, 15 bp, Homo sapiens
ggttttgctctgtta

SEQ ID NO: 1352201 - DNA, 15 bp, Homo sapiens
gggttttgctctgtt

SEQ ID NO: 1352202 - DNA, 15 bp, Homo sapiens
tgggttttgctctgt

SEQ ID NO: 1352203 - DNA, 15 bp, Homo sapiens
ttgggttttgctctg

SEQ ID NO: 1352204 - DNA, 15 bp, Homo sapiens
attgggttttgctct

SEQ ID NO: 1352205 - DNA, 15 bp, Homo sapiens
cattgggttttgctc

SEQ ID NO: 1352206 - DNA, 15 bp, Homo sapiens
gcattgggttttgct

SEQ ID NO: 1352207 - DNA, 15 bp, Homo sapiens
agcattgggttttgc

SEQ ID NO: 1352208 - DNA, 15 bp, Homo sapiens
tagcattgggttttg

SEQ ID NO: 1352209 - DNA, 15 bp, Homo sapiens
ctagcattgggtttt

SEQ ID NO: 1352210 - DNA, 15 bp, Homo sapiens
tctagcattgggttt

SEQ ID NO: 1352211 - DNA, 15 bp, Homo sapiens
gtctagcattgggtt

SEQ ID NO: 1352212 - DNA, 15 bp, Homo sapiens
agtctagcattgggt

SEQ ID NO: 1352213 - DNA, 15 bp, Homo sapiens
gagtctagcattggg

SEQ ID NO: 1352214 - DNA, 15 bp, Homo sapiens
ggagtctagcattgg

SEQ ID NO: 1352215 - DNA, 15 bp, Homo sapiens
gggagtctagcattg

SEQ ID NO: 1352216 - DNA, 15 bp, Homo sapiens
agggagtctagcatt

SEQ ID NO: 1352217 - DNA, 15 bp, Homo sapiens
gagggagtctagcat

SEQ ID NO: 1352218 - DNA, 15 bp, Homo sapiens
tgagggagtctagca

SEQ ID NO: 1352219 - DNA, 15 bp, Homo sapiens
ttgagggagtctagc

SEQ ID NO: 1352220 - DNA, 15 bp, Homo sapiens
tttgagggagtctag

SEQ ID NO: 1352221 - DNA, 15 bp, Homo sapiens
ttttgagggagtcta

SEQ ID NO: 1352222 - DNA, 15 bp, Homo sapiens
cttttgagggagtct

SEQ ID NO: 1352223 - DNA, 15 bp, Homo sapiens
gcttttgagggagtc

SEQ ID NO: 1352224 - DNA, 15 bp, Homo sapiens
ggcttttgagggagt

SEQ ID NO: 1352225 - DNA, 15 bp, Homo sapiens
aggcttttgagggag

SEQ ID NO: 1352226 - DNA, 15 bp, Homo sapiens
taggcttttgaggga

SEQ ID NO: 1352227 - DNA, 15 bp, Homo sapiens
ttaggcttttgaggg

SEQ ID NO: 1352228 - DNA, 15 bp, Homo sapiens
cttaggcttttgagg

SEQ ID NO: 1352229 - DNA, 15 bp, Homo sapiens
acttaggcttttgag

SEQ ID NO: 1352230 - DNA, 15 bp, Homo sapiens
cacttaggcttttga

SEQ ID NO: 1352231 - DNA, 15 bp, Homo sapiens
tcacttaggcttttg

SEQ ID NO: 1352232 - DNA, 15 bp, Homo sapiens
ttcacttaggctttt

SEQ ID NO: 1352233 - DNA, 15 bp, Homo sapiens
gttcacttaggcttt

SEQ ID NO: 1352234 - DNA, 15 bp, Homo sapiens
tgttcacttaggctt

SEQ ID NO: 1352235 - DNA, 15 bp, Homo sapiens
ctgttcacttaggct

SEQ ID NO: 1352236 - DNA, 15 bp, Homo sapiens
gctgttcacttaggc

SEQ ID NO: 1352237 - DNA, 15 bp, Homo sapiens
agctgttcacttagg

SEQ ID NO: 1352238 - DNA, 15 bp, Homo sapiens
cagctgttcacttag

SEQ ID NO: 1352239 - DNA, 15 bp, Homo sapiens
gcagctgttcactta

SEQ ID NO: 1352240 - DNA, 15 bp, Homo sapiens
ggcagctgttcactt

SEQ ID NO: 1352241 - DNA, 15 bp, Homo sapiens
tggcagctgttcact

SEQ ID NO: 1352242 - DNA, 15 bp, Homo sapiens
atggcagctgttcac

SEQ ID NO: 1352243 - DNA, 15 bp, Homo sapiens
gatggcagctgttca

SEQ ID NO: 1352244 - DNA, 15 bp, Homo sapiens
agatggcagctgttc

SEQ ID NO: 1352245 - DNA, 15 bp, Homo sapiens
aagatggcagctgtt

SEQ ID NO: 1352246 - DNA, 15 bp, Homo sapiens
aaagatggcagctgt

SEQ ID NO: 1352247 - DNA, 15 bp, Homo sapiens
gaaagatggcagctg

SEQ ID NO: 1352248 - DNA, 15 bp, Homo sapiens
agaaagatggcagct

SEQ ID NO: 1352249 - DNA, 15 bp, Homo sapiens
cagaaagatggcagc

SEQ ID NO: 1352250 - DNA, 15 bp, Homo sapiens
tcagaaagatggcag

SEQ ID NO: 1352251 - DNA, 15 bp, Homo sapiens
atcagaaagatggca

SEQ ID NO: 1352252 - DNA, 15 bp, Homo sapiens
catcagaaagatggc

SEQ ID NO: 1352253 - DNA, 15 bp, Homo sapiens
acatcagaaagatgg

SEQ ID NO: 1352254 - DNA, 15 bp, Homo sapiens
cacatcagaaagatg

SEQ ID NO: 1352255 - DNA, 15 bp, Homo sapiens
tcacatcagaaagat

SEQ ID NO: 1352256 - DNA, 15 bp, Homo sapiens
ctcacatcagaaaga

SEQ ID NO: 1352257 - DNA, 15 bp, Homo sapiens
tctcacatcagaaag

SEQ ID NO: 1352258 - DNA, 15 bp, Homo sapiens
atctcacatcagaaa

SEQ ID NO: 1352259 - DNA, 15 bp, Homo sapiens
gatctcacatcagaa

SEQ ID NO: 1352260 - DNA, 15 bp, Homo sapiens
agatctcacatcaga

SEQ ID NO: 1352261 - DNA, 15 bp, Homo sapiens
gagatctcacatcag

SEQ ID NO: 1352262 - DNA, 15 bp, Homo sapiens
tgagatctcacatca

SEQ ID NO: 1352263 - DNA, 15 bp, Homo sapiens
ctgagatctcacatc

SEQ ID NO: 1352264 - DNA, 15 bp, Homo sapiens
cctgagatctcacat

SEQ ID NO: 1352265 - DNA, 15 bp, Homo sapiens
ccctgagatctcaca

SEQ ID NO: 1352266 - DNA, 15 bp, Homo sapiens
tccctgagatctcac

SEQ ID NO: 1352267 - DNA, 15 bp, Homo sapiens
ctccctgagatctca

SEQ ID NO: 1352268 - DNA, 15 bp, Homo sapiens
tctccctgagatctc

SEQ ID NO: 1352269 - DNA, 15 bp, Homo sapiens
ttctccctgagatct

SEQ ID NO: 1352270 - DNA, 15 bp, Homo sapiens
tttctccctgagatc

SEQ ID NO: 1352271 - DNA, 15 bp, Homo sapiens
atttctccctgagat

SEQ ID NO: 1352272 - DNA, 15 bp, Homo sapiens
tatttctccctgaga

SEQ ID NO: 1352273 - DNA, 15 bp, Homo sapiens
atatttctccctgag

SEQ ID NO: 1352274 - DNA, 15 bp, Homo sapiens
aatatttctccctga

SEQ ID NO: 1352275 - DNA, 15 bp, Homo sapiens
aaatatttctccctg

SEQ ID NO: 1352276 - DNA, 15 bp, Homo sapiens
taaatatttctccct

SEQ ID NO: 1352277 - DNA, 15 bp, Homo sapiens
ttaaatatttctccc

SEQ ID NO: 1352278 - DNA, 15 bp, Homo sapiens
cttaaatatttctcc

SEQ ID NO: 1352279 - DNA, 15 bp, Homo sapiens
tcttaaatatttctc

SEQ ID NO: 1352280 - DNA, 15 bp, Homo sapiens
ttcttaaatatttct

SEQ ID NO: 1352281 - DNA, 15 bp, Homo sapiens
cttcttaaatatttc

SEQ ID NO: 1352282 - DNA, 15 bp, Homo sapiens
ccttcttaaatattt

SEQ ID NO: 1352283 - DNA, 15 bp, Homo sapiens
gccttcttaaatatt

SEQ ID NO: 1352284 - DNA, 15 bp, Homo sapiens
tgccttcttaaatat

SEQ ID NO: 1352285 - DNA, 15 bp, Homo sapiens
ctgccttcttaaata

SEQ ID NO: 1352286 - DNA, 15 bp, Homo sapiens
tctgccttcttaaat

SEQ ID NO: 1352287 - DNA, 15 bp, Homo sapiens
ctctgccttcttaaa

SEQ ID NO: 1352288 - DNA, 15 bp, Homo sapiens
cctctgccttcttaa

SEQ ID NO: 1352289 - DNA, 15 bp, Homo sapiens
ccctctgccttctta

SEQ ID NO: 1352290 - DNA, 15 bp, Homo sapiens
tcccctctgccttct

SEQ ID NO: 1352291 - DNA, 15 bp, Homo sapiens
ctcccctctgccttc

SEQ ID NO: 1352292 - DNA, 15 bp, Homo sapiens
actcccctctgcctt

SEQ ID NO: 1352293 - DNA, 15 bp, Homo sapiens
tactcccctctgcct

SEQ ID NO: 1352294 - DNA, 15 bp, Homo sapiens
ttactcccctctgcc

SEQ ID NO: 1352295 - DNA, 15 bp, Homo sapiens
gttactcccctctgc

SEQ ID NO: 1352296 - DNA, 15 bp, Homo sapiens
ggttactcccctctg

SEQ ID NO: 1352297 - DNA, 15 bp, Homo sapiens
tggttactcccctct

SEQ ID NO: 1352298 - DNA, 15 bp, Homo sapiens
gtggttactcccctc

SEQ ID NO: 1352299 - DNA, 15 bp, Homo sapiens
cgtggttactcccct

SEQ ID NO: 1352300 - DNA, 15 bp, Homo sapiens
tcgtggttactcccc

SEQ ID NO: 1352301 - DNA, 15 bp, Homo sapiens
atcgtggttactccc

SEQ ID NO: 1352302 - DNA, 15 bp, Homo sapiens
aatcgtggttactcc

SEQ ID NO: 1352303 - DNA, 15 bp, Homo sapiens
taatcgtggttactc

SEQ ID NO: 1352304 - DNA, 15 bp, Homo sapiens
ttaatcgtggttact

SEQ ID NO: 1352305 - DNA, 15 bp, Homo sapiens
cttaatcgtggttac

SEQ ID NO: 1352306 - DNA, 15 bp, Homo sapiens
acttaatcgtggtta

SEQ ID NO: 1352307 - DNA, 15 bp, Homo sapiens
aacttaatcgtggtt

SEQ ID NO: 1352308 - DNA, 15 bp, Homo sapiens
aaacttaatcgtggt

SEQ ID NO: 1352309 - DNA, 15 bp, Homo sapiens
taaacttaatcgtgg

SEQ ID NO: 1352310 - DNA, 15 bp, Homo sapiens
ataaacttaatcgtg

SEQ ID NO: 1352311 - DNA, 15 bp, Homo sapiens
cataaacttaatcgt

SEQ ID NO: 1352312 - DNA, 15 bp, Homo sapiens
tcataaacttaatcg

SEQ ID NO: 1352313 - DNA, 15 bp, Homo sapiens
ctcataaacttaatc

SEQ ID NO: 1352314 - DNA, 15 bp, Homo sapiens
actcataaacttaat

SEQ ID NO: 1352315 - DNA, 15 bp, Homo sapiens
cactcataaacttaa

SEQ ID NO: 1352316 - DNA, 15 bp, Homo sapiens
gcactcataaactta

SEQ ID NO: 1352317 - DNA, 15 bp, Homo sapiens
ggcactcataaactt

SEQ ID NO: 1352318 - DNA, 15 bp, Homo sapiens
aggcactcataaact

SEQ ID NO: 1352319 - DNA, 15 bp, Homo sapiens
taggcactcataaac

SEQ ID NO: 1352320 - DNA, 15 bp, Homo sapiens
ataggcactcataaa

SEQ ID NO: 1352321 - DNA, 15 bp, Homo sapiens
cataggcactcataa

SEQ ID NO: 1352322 - DNA, 15 bp, Homo sapiens
tcataggcactcata

SEQ ID NO: 1352323 - DNA, 15 bp, Homo sapiens
gtcataggcactcat

SEQ ID NO: 1352324 - DNA, 15 bp, Homo sapiens
ggtcataggcactca

SEQ ID NO: 1352325 - DNA, 15 bp, Homo sapiens
gggtcataggcactc

SEQ ID NO: 1352326 - DNA, 15 bp, Homo sapiens
agggtcataggcact

SEQ ID NO: 1352327 - DNA, 15 bp, Homo sapiens
cagggtcataggcac

SEQ ID NO: 1352328 - DNA, 15 bp, Homo sapiens
tcagggtcataggca

SEQ ID NO: 1352329 - DNA, 15 bp, Homo sapiens
ttcagggtcataggc

SEQ ID NO: 1352330 - DNA, 15 bp, Homo sapiens
cttcagggtcatagg

SEQ ID NO: 1352331 - DNA, 15 bp, Homo sapiens
ccttcagggtcatag

SEQ ID NO: 1352332 - DNA, 15 bp, Homo sapiens
gccttcagggtcata

SEQ ID NO: 1352333 - DNA, 15 bp, Homo sapiens
ggccttcagggtcat

SEQ ID NO: 1352334 - DNA, 15 bp, Homo sapiens
aggccttcagggtca

SEQ ID NO: 1352335 - DNA, 15 bp, Homo sapiens
gaggccttcagggtc

SEQ ID NO: 1352336 - DNA, 15 bp, Homo sapiens
agaggccttcagggt

SEQ ID NO: 1352337 - DNA, 15 bp, Homo sapiens
tagaggccttcaggg

SEQ ID NO: 1352338 - DNA, 15 bp, Homo sapiens
tatagaggccttcag

SEQ ID NO: 1352339 - DNA, 15 bp, Homo sapiens
ttatagaggccttca

SEQ ID NO: 1352340 - DNA, 15 bp, Homo sapiens
gttatagaggccttc

SEQ ID NO: 1352341 - DNA, 15 bp, Homo sapiens
agttatagaggcctt

SEQ ID NO: 1352342 - DNA, 15 bp, Homo sapiens
cagttatagaggcct

SEQ ID NO: 1352343 - DNA, 15 bp, Homo sapiens
acagttatagaggcc

SEQ ID NO: 1352344 - DNA, 15 bp, Homo sapiens
tacagttatagaggc

SEQ ID NO: 1352345 - DNA, 15 bp, Homo sapiens
atacagttatagagg

SEQ ID NO: 1352346 - DNA, 15 bp, Homo sapiens
tatacagttatagag

SEQ ID NO: 1352347 - DNA, 15 bp, Homo sapiens
atatacagttataga

SEQ ID NO: 1352348 - DNA, 15 bp, Homo sapiens
aatatacagttatag

SEQ ID NO: 1352349 - DNA, 15 bp, Homo sapiens
aaatatacagttata

SEQ ID NO: 1352350 - DNA, 15 bp, Homo sapiens
caaatatacagttat

SEQ ID NO: 1352351 - DNA, 15 bp, Homo sapiens
acaaatatacagtta

SEQ ID NO: 1352352 - DNA, 15 bp, Homo sapiens
aacaaatatacagtt

SEQ ID NO: 1352353 - DNA, 15 bp, Homo sapiens
aaacaaatatacagt

SEQ ID NO: 1352354 - DNA, 15 bp, Homo sapiens
caaacaaatatacag

SEQ ID NO: 1352355 - DNA, 15 bp, Homo sapiens
tcaaacaaatataca

SEQ ID NO: 1352356 - DNA, 15 bp, Homo sapiens
ttcaaacaaatatac

SEQ ID NO: 1352357 - DNA, 15 bp, Homo sapiens
attcaaacaaatata

SEQ ID NO: 1352358 - DNA, 15 bp, Homo sapiens
aattcaaacaaatat

SEQ ID NO: 1352359 - DNA, 15 bp, Homo sapiens
caattcaaacaaata

SEQ ID NO: 1352360 - DNA, 15 bp, Homo sapiens
acaattcaaacaaat

SEQ ID NO: 1352361 - DNA, 15 bp, Homo sapiens
aacaattcaaacaaa

SEQ ID NO: 1352362 - DNA, 15 bp, Homo sapiens
aaacaattcaaacaa

SEQ ID NO: 1352363 - DNA, 15 bp, Homo sapiens
caaacaattcaaaca

SEQ ID NO: 1352364 - DNA, 15 bp, Homo sapiens
tcaaacaattcaaac

SEQ ID NO: 1352365 - DNA, 15 bp, Homo sapiens
ctcaaacaattcaaa

SEQ ID NO: 1352366 - DNA, 15 bp, Homo sapiens
gctcaaacaattcaa

SEQ ID NO: 1352367 - DNA, 15 bp, Homo sapiens
agctcaaacaattca

SEQ ID NO: 1352368 - DNA, 15 bp, Homo sapiens
gagctcaaacaattc

SEQ ID NO: 1352369 - DNA, 15 bp, Homo sapiens
agagctcaaacaatt

SEQ ID NO: 1352370 - DNA, 15 bp, Homo sapiens
cagagctcaaacaat

SEQ ID NO: 1352371 - DNA, 15 bp, Homo sapiens
tcagagctcaaacaa

SEQ ID NO: 1352372 - DNA, 15 bp, Homo sapiens
ctcagagctcaaaca

SEQ ID NO: 1352373 - DNA, 15 bp, Homo sapiens
cctcagagctcaaac

SEQ ID NO: 1352374 - DNA, 15 bp, Homo sapiens
tcctcagagctcaaa

SEQ ID NO: 1352375 - DNA, 15 bp, Homo sapiens
ttcctcagagctcaa

SEQ ID NO: 1352376 - DNA, 15 bp, Homo sapiens
tttcctcagagctca

SEQ ID NO: 1352377 - DNA, 15 bp, Homo sapiens
ttttcctcagagctc

SEQ ID NO: 1352378 - DNA, 15 bp, Homo sapiens
cttttcctcagagct

SEQ ID NO: 1352379 - DNA, 15 bp, Homo sapiens
ccttttcctcagagc

SEQ ID NO: 1352380 - DNA, 15 bp, Homo sapiens
cccttttcctcagag

SEQ ID NO: 1352381 - DNA, 15 bp, Homo sapiens
gcccttttcctcaga

SEQ ID NO: 1352382 - DNA, 15 bp, Homo sapiens
ggcccttttcctcag

SEQ ID NO: 1352383 - DNA, 15 bp, Homo sapiens
aggcccttttcctca

SEQ ID NO: 1352384 - DNA, 15 bp, Homo sapiens
aaggcccttttcctc

SEQ ID NO: 1352385 - DNA, 15 bp, Homo sapiens
aaaggcccttttcct

SEQ ID NO: 1352386 - DNA, 15 bp, Homo sapiens
caaaggcccttttcc

SEQ ID NO: 1352387 - DNA, 15 bp, Homo sapiens
tcaaaggcccttttc

SEQ ID NO: 1352388 - DNA, 15 bp, Homo sapiens
atcaaaggccctttt

SEQ ID NO: 1352389 - DNA, 15 bp, Homo sapiens
gatcaaaggcccttt

SEQ ID NO: 1352390 - DNA, 15 bp, Homo sapiens
tgatcaaaggccctt

SEQ ID NO: 1352391 - DNA, 15 bp, Homo sapiens
ctgatcaaaggccct

SEQ ID NO: 1352392 - DNA, 15 bp, Homo sapiens
tctgatcaaaggccc

SEQ ID NO: 1352393 - DNA, 15 bp, Homo sapiens
ttctgatcaaaggcc

SEQ ID NO: 1352394 - DNA, 15 bp, Homo sapiens
cttctgatcaaaggc

SEQ ID NO: 1352395 - DNA, 15 bp, Homo sapiens
ccttctgatcaaagg

SEQ ID NO: 1352396 - DNA, 15 bp, Homo sapiens
accttctgatcaaag

SEQ ID NO: 1352397 - DNA, 15 bp, Homo sapiens
gaccttctgatcaaa

SEQ ID NO: 1352398 - DNA, 15 bp, Homo sapiens
agaccttctgatcaa

SEQ ID NO: 1352399 - DNA, 15 bp, Homo sapiens
aagaccttctgatca

SEQ ID NO: 1352400 - DNA, 15 bp, Homo sapiens
caagaccttctgatc

SEQ ID NO: 1352401 - DNA, 15 bp, Homo sapiens
ccaagaccttctgat

SEQ ID NO: 1352402 - DNA, 15 bp, Homo sapiens
accaagaccttctga

SEQ ID NO: 1352403 - DNA, 15 bp, Homo sapiens
gaccaagaccttctg

SEQ ID NO: 1352404 - DNA, 15 bp, Homo sapiens
tgaccaagaccttct

SEQ ID NO: 1352405 - DNA, 15 bp, Homo sapiens
atgaccaagaccttc

SEQ ID NO: 1352406 - DNA, 15 bp, Homo sapiens
catgaccaagacctt

SEQ ID NO: 1352407 - DNA, 15 bp, Homo sapiens
gcatgaccaagacct

SEQ ID NO: 1352408 - DNA, 15 bp, Homo sapiens
ggcatgaccaagacc

SEQ ID NO: 1352409 - DNA, 15 bp, Homo sapiens
tggcatgaccaagac

SEQ ID NO: 1352410 - DNA, 15 bp, Homo sapiens
ctggcatgaccaaga

SEQ ID NO: 1352411 - DNA, 15 bp, Homo sapiens
cctggcatgaccaag

SEQ ID NO: 1352412 - DNA, 15 bp, Homo sapiens
gcctggcatgaccaa

SEQ ID NO: 1352413 - DNA, 15 bp, Homo sapiens
ggcctggcatgacca

SEQ ID NO: 1352414 - DNA, 15 bp, Homo sapiens
aggcctggcatgacc

SEQ ID NO: 1352415 - DNA, 15 bp, Homo sapiens
taggcctggcatgac

SEQ ID NO: 1352416 - DNA, 15 bp, Homo sapiens
ctaggcctggcatga

SEQ ID NO: 1352417 - DNA, 15 bp, Homo sapiens
cctaggcctggcatg

SEQ ID NO: 1352418 - DNA, 15 bp, Homo sapiens
ccctaggcctggcat

SEQ ID NO: 1352419 - DNA, 15 bp, Homo sapiens
accctaggcctggca

SEQ ID NO: 1352420 - DNA, 15 bp, Homo sapiens
taccctaggcctggc

SEQ ID NO: 1352421 - DNA, 15 bp, Homo sapiens
ttaccctaggcctgg

SEQ ID NO: 1352422 - DNA, 15 bp, Homo sapiens
tttaccctaggcctg

SEQ ID NO: 1352423 - DNA, 15 bp, Homo sapiens
ttttaccctaggcct

SEQ ID NO: 1352424 - DNA, 15 bp, Homo sapiens
attttaccctaggcc

SEQ ID NO: 1352425 - DNA, 15 bp, Homo sapiens
cattttaccctaggc

SEQ ID NO: 1352426 - DNA, 15 bp, Homo sapiens
ccattttaccctagg

SEQ ID NO: 1352427 - DNA, 15 bp, Homo sapiens
cccattttaccctag

SEQ ID NO: 1352428 - DNA, 15 bp, Homo sapiens
tcccattttacccta

SEQ ID NO: 1352429 - DNA, 15 bp, Homo sapiens
ctcccattttaccct

SEQ ID NO: 1352430 - DNA, 15 bp, Homo sapiens
tctcccattttaccc

SEQ ID NO: 1352431 - DNA, 15 bp, Homo sapiens
ctctcccattttacc

SEQ ID NO: 1352432 - DNA, 15 bp, Homo sapiens
tctctcccattttac

SEQ ID NO: 1352433 - DNA, 15 bp, Homo sapiens
atctctcccatttta

SEQ ID NO: 1352434 - DNA, 15 bp, Homo sapiens
tatctctcccatttt

SEQ ID NO: 1352435 - DNA, 15 bp, Homo sapiens
ctatctctcccattt

SEQ ID NO: 1352436 - DNA, 15 bp, Homo sapiens
tctatctctcccatt

SEQ ID NO: 1352437 - DNA, 15 bp, Homo sapiens
ctctatctctcccat

SEQ ID NO: 1352438 - DNA, 15 bp, Homo sapiens
cctctatctctccca

SEQ ID NO: 1352439 - DNA, 15 bp, Homo sapiens
gcctctatctctccc

SEQ ID NO: 1352440 - DNA, 15 bp, Homo sapiens
tgcctctatctctcc

SEQ ID NO: 1352441 - DNA, 15 bp, Homo sapiens
ttgcctctatctctc

SEQ ID NO: 1352442 - DNA, 15 bp, Homo sapiens
gttgcctctatctct

SEQ ID NO: 1352443 - DNA, 15 bp, Homo sapiens
tgttgcctctatctc

SEQ ID NO: 1352444 - DNA, 15 bp, Homo sapiens
atgttgcctctatct

SEQ ID NO: 1352445 - DNA, 15 bp, Homo sapiens
catgttgcctctatc

SEQ ID NO: 1352446 - DNA, 15 bp, Homo sapiens
ccatgttgcctctat

SEQ ID NO: 1352447 - DNA, 15 bp, Homo sapiens
cccatgttgcctcta

SEQ ID NO: 1352448 - DNA, 15 bp, Homo sapiens
ccccatgttgcctct

SEQ ID NO: 1352449 - DNA, 15 bp, Homo sapiens
accccatgttgcctc

SEQ ID NO: 1352450 - DNA, 15 bp, Homo sapiens
caccccatgttgcct

SEQ ID NO: 1352451 - DNA, 15 bp, Homo sapiens
gcaccccatgttgcc

SEQ ID NO: 1352452 - DNA, 15 bp, Homo sapiens
tgcaccccatgttgc

SEQ ID NO: 1352453 - DNA, 15 bp, Homo sapiens
ttgcaccccatgttg

SEQ ID NO: 1352454 - DNA, 15 bp, Homo sapiens
cttgcaccccatgtt

SEQ ID NO: 1352455 - DNA, 15 bp, Homo sapiens
ccttgcaccccatgt

SEQ ID NO: 1352456 - DNA, 15 bp, Homo sapiens
cccttgcaccccatg

SEQ ID NO: 1352457 - DNA, 15 bp, Homo sapiens
acccttgcaccccat

SEQ ID NO: 1352458 - DNA, 15 bp, Homo sapiens
tacccttgcacccca

SEQ ID NO: 1352459 - DNA, 15 bp, Homo sapiens
gtacccttgcacccc

SEQ ID NO: 1352460 - DNA, 15 bp, Homo sapiens
tgtacccttgcaccc

SEQ ID NO: 1352461 - DNA, 15 bp, Homo sapiens
ttgtacccttgcacc

SEQ ID NO: 1352462 - DNA, 15 bp, Homo sapiens
cttgtacccttgcac

SEQ ID NO: 1352463 - DNA, 15 bp, Homo sapiens
acttgtacccttgca

SEQ ID NO: 1352464 - DNA, 15 bp, Homo sapiens
gacttgtacccttgc

SEQ ID NO: 1352465 - DNA, 15 bp, Homo sapiens
agacttgtacccttg

SEQ ID NO: 1352466 - DNA, 15 bp, Homo sapiens
cagacttgtaccctt

SEQ ID NO: 1352467 - DNA, 15 bp, Homo sapiens
tcagacttgtaccct

SEQ ID NO: 1352468 - DNA, 15 bp, Homo sapiens
ctcagacttgtaccc

SEQ ID NO: 1352469 - DNA, 15 bp, Homo sapiens
actcagacttgtacc

SEQ ID NO: 1352470 - DNA, 15 bp, Homo sapiens
aactcagacttgtac

SEQ ID NO: 1352471 - DNA, 15 bp, Homo sapiens
gaactcagacttgta

SEQ ID NO: 1352472 - DNA, 15 bp, Homo sapiens
tgaactcagacttgt

SEQ ID NO: 1352473 - DNA, 15 bp, Homo sapiens
ctgaactcagacttg

SEQ ID NO: 1352474 - DNA, 15 bp, Homo sapiens
actgaactcagactt

SEQ ID NO: 1352475 - DNA, 15 bp, Homo sapiens
cactgaactcagact

SEQ ID NO: 1352476 - DNA, 15 bp, Homo sapiens
ccactgaactcagac

SEQ ID NO: 1352477 - DNA, 15 bp, Homo sapiens
cccactgaactcaga

SEQ ID NO: 1352478 - DNA, 15 bp, Homo sapiens
ccccactgaactcag

SEQ ID NO: 1352479 - DNA, 15 bp, Homo sapiens
tccccactgaactca

SEQ ID NO: 1352480 - DNA, 15 bp, Homo sapiens
ctccccactgaactc

SEQ ID NO: 1352481 - DNA, 15 bp, Homo sapiens
cctccccactgaact

SEQ ID NO: 1352482 - DNA, 15 bp, Homo sapiens
tcctccccactgaac

SEQ ID NO: 1352483 - DNA, 15 bp, Homo sapiens
ttcctccccactgaa

SEQ ID NO: 1352484 - DNA, 15 bp, Homo sapiens
tttcctccccactga

SEQ ID NO: 1352485 - DNA, 15 bp, Homo sapiens
ttttcctccccactg

SEQ ID NO: 1352486 - DNA, 15 bp, Homo sapiens
attttcctccccact

SEQ ID NO: 1352487 - DNA, 15 bp, Homo sapiens
aattttcctccccac

SEQ ID NO: 1352488 - DNA, 15 bp, Homo sapiens
aaattttcctcccca

SEQ ID NO: 1352489 - DNA, 15 bp, Homo sapiens
aaaattttcctcccc

SEQ ID NO: 1352490 - DNA, 15 bp, Homo sapiens
gaaaattttcctccc

SEQ ID NO: 1352491 - DNA, 15 bp, Homo sapiens
ggaaaattttcctcc

SEQ ID NO: 1352492 - DNA, 15 bp, Homo sapiens
gggaaaattttcctc

SEQ ID NO: 1352493 - DNA, 15 bp, Homo sapiens
ggggaaaattttcct

SEQ ID NO: 1352494 - DNA, 15 bp, Homo sapiens
aggggaaaattttcc

SEQ ID NO: 1352495 - DNA, 15 bp, Homo sapiens
aaggggaaaattttc

SEQ ID NO: 1352496 - DNA, 15 bp, Homo sapiens
aaaggggaaaatttt

SEQ ID NO: 1352497 - DNA, 15 bp, Homo sapiens
gaaaggggaaaattt

SEQ ID NO: 1352498 - DNA, 15 bp, Homo sapiens
ggaaaggggaaaatt

SEQ ID NO: 1352499 - DNA, 15 bp, Homo sapiens
gggaaaggggaaaat

SEQ ID NO: 1352500 - DNA, 15 bp, Homo sapiens
agggaaaggggaaaa

SEQ ID NO: 1352501 - DNA, 15 bp, Homo sapiens
cagggaaaggggaaa

SEQ ID NO: 1352502 - DNA, 15 bp, Homo sapiens
acagggaaaggggaa

SEQ ID NO: 1352503 - DNA, 15 bp, Homo sapiens
gacagggaaagggga

SEQ ID NO: 1352504 - DNA, 15 bp, Homo sapiens
ggacagggaaagggg

SEQ ID NO: 1352505 - DNA, 15 bp, Homo sapiens
gggacagggaaaggg

SEQ ID NO: 1352506 - DNA, 15 bp, Homo sapiens
tgggacagggaaagg

SEQ ID NO: 1352507 - DNA, 15 bp, Homo sapiens
atgggacagggaaag

SEQ ID NO: 1352508 - DNA, 15 bp, Homo sapiens
tatgggacagggaaa

SEQ ID NO: 1352509 - DNA, 15 bp, Homo sapiens
atatgggacagggaa

SEQ ID NO: 1352510 - DNA, 15 bp, Homo sapiens
aatatgggacaggga

SEQ ID NO: 1352511 - DNA, 15 bp, Homo sapiens
caatatgggacaggg

SEQ ID NO: 1352512 - DNA, 15 bp, Homo sapiens
tcaatatgggacagg

SEQ ID NO: 1352513 - DNA, 15 bp, Homo sapiens
ctcaatatgggacag

SEQ ID NO: 1352514 - DNA, 15 bp, Homo sapiens
cctcaatatgggaca

SEQ ID NO: 1352515 - DNA, 15 bp, Homo sapiens
gcctcaatatgggac

SEQ ID NO: 1352516 - DNA, 15 bp, Homo sapiens
agcctcaatatggga

SEQ ID NO: 1352517 - DNA, 15 bp, Homo sapiens
gagcctcaatatggg

SEQ ID NO: 1352518 - DNA, 15 bp, Homo sapiens
ggagcctcaatatgg

SEQ ID NO: 1352519 - DNA, 15 bp, Homo sapiens
aggagcctcaatatg

SEQ ID NO: 1352520 - DNA, 15 bp, Homo sapiens
caggagcctcaatat

SEQ ID NO: 1352521 - DNA, 15 bp, Homo sapiens
ccaggagcctcaata

SEQ ID NO: 1352522 - DNA, 15 bp, Homo sapiens
tccaggagcctcaat

SEQ ID NO: 1352523 - DNA, 15 bp, Homo sapiens
gtccaggagcctcaa

SEQ ID NO: 1352524 - DNA, 15 bp, Homo sapiens
agtccaggagcctca

SEQ ID NO: 1352525 - DNA, 15 bp, Homo sapiens
cagtccaggagcctc

SEQ ID NO: 1352526 - DNA, 15 bp, Homo sapiens
acagtccaggagcct

SEQ ID NO: 1352527 - DNA, 15 bp, Homo sapiens
cacagtccaggagcc

SEQ ID NO: 1352528 - DNA, 15 bp, Homo sapiens
ccacagtccaggagc

SEQ ID NO: 1352529 - DNA, 15 bp, Homo sapiens
accacagtccaggag

SEQ ID NO: 1352530 - DNA, 15 bp, Homo sapiens
caccacagtccagga

SEQ ID NO: 1352531 - DNA, 15 bp, Homo sapiens
tcaccacagtccagg

SEQ ID NO: 1352532 - DNA, 15 bp, Homo sapiens
atcaccacagtccag

SEQ ID NO: 1352533 - DNA, 15 bp, Homo sapiens
catcaccacagtcca

SEQ ID NO: 1352534 - DNA, 15 bp, Homo sapiens
ccatcaccacagtcc

SEQ ID NO: 1352535 - DNA, 15 bp, Homo sapiens
tccatcaccacagtc

SEQ ID NO: 1352536 - DNA, 15 bp, Homo sapiens
ttccatcaccacagt

SEQ ID NO: 1352537 - DNA, 15 bp, Homo sapiens
cttccatcaccacag

SEQ ID NO: 1352538 - DNA, 15 bp, Homo sapiens
ccttccatcaccaca

SEQ ID NO: 1352539 - DNA, 15 bp, Homo sapiens
cccttccatcaccac

SEQ ID NO: 1352540 - DNA, 15 bp, Homo sapiens
tcccttccatcacca

SEQ ID NO: 1352541 - DNA, 15 bp, Homo sapiens
ttcccttccatcacc

SEQ ID NO: 1352542 - DNA, 15 bp, Homo sapiens
attcccttccatcac

SEQ ID NO: 1352543 - DNA, 15 bp, Homo sapiens
aattcccttccatca

SEQ ID NO: 1352544 - DNA, 15 bp, Homo sapiens
caattcccttccatc

SEQ ID NO: 1352545 - DNA, 15 bp, Homo sapiens
tcaattcccttccat

SEQ ID NO: 1352546 - DNA, 15 bp, Homo sapiens
ttcaattcccttcca

SEQ ID NO: 1352547 - DNA, 15 bp, Homo sapiens
attcaattcccttcc

SEQ ID NO: 1352548 - DNA, 15 bp, Homo sapiens
aattcaattcccttc

SEQ ID NO: 1352549 - DNA, 15 bp, Homo sapiens
gaattcaattccctt

SEQ ID NO: 1352550 - DNA, 15 bp, Homo sapiens
agaattcaattccct

SEQ ID NO: 1352551 - DNA, 15 bp, Homo sapiens
cagaattcaattccc

SEQ ID NO: 1352552 - DNA, 15 bp, Homo sapiens
acagaattcaattcc

SEQ ID NO: 1352553 - DNA, 15 bp, Homo sapiens
aacagaattcaattc

SEQ ID NO: 1352554 - DNA, 15 bp, Homo sapiens
aaacagaattcaatt

SEQ ID NO: 1352555 - DNA, 15 bp, Homo sapiens
aaaacagaattcaat

SEQ ID NO: 1352556 - DNA, 15 bp, Homo sapiens
gaaaacagaattcaa

SEQ ID NO: 1352557 - DNA, 15 bp, Homo sapiens
tgaaaacagaattca

SEQ ID NO: 1352558 - DNA, 15 bp, Homo sapiens
atgaaaacagaattc

SEQ ID NO: 1352559 - DNA, 15 bp, Homo sapiens
catgaaaacagaatt

SEQ ID NO: 1352560 - DNA, 15 bp, Homo sapiens
acatgaaaacagaat

SEQ ID NO: 1352561 - DNA, 15 bp, Homo sapiens
tacatgaaaacagaa

SEQ ID NO: 1352562 - DNA, 15 bp, Homo sapiens
atacatgaaaacaga

SEQ ID NO: 1352563 - DNA, 15 bp, Homo sapiens
catacatgaaaacag

SEQ ID NO: 1352564 - DNA, 15 bp, Homo sapiens
tcatacatgaaaaca

SEQ ID NO: 1352565 - DNA, 15 bp, Homo sapiens
gtcatacatgaaaac

SEQ ID NO: 1352566 - DNA, 15 bp, Homo sapiens
agtcatacatgaaaa

SEQ ID NO: 1352567 - DNA, 15 bp, Homo sapiens
aagtcatacatgaaa

SEQ ID NO: 1352568 - DNA, 15 bp, Homo sapiens
aaagtcatacatgaa

SEQ ID NO: 1352569 - DNA, 15 bp, Homo sapiens
aaaagtcatacatga

SEQ ID NO: 1352570 - DNA, 15 bp, Homo sapiens
gaaaagtcatacatg

SEQ ID NO: 1352571 - DNA, 15 bp, Homo sapiens
tgaaaagtcatacat

SEQ ID NO: 1352572 - DNA, 15 bp, Homo sapiens
ctgaaaagtcataca

SEQ ID NO: 1352573 - DNA, 15 bp, Homo sapiens
gctgaaaagtcatac

SEQ ID NO: 1352574 - DNA, 15 bp, Homo sapiens
ggctgaaaagtcata

SEQ ID NO: 1352575 - DNA, 15 bp, Homo sapiens
aggctgaaaagtcat

SEQ ID NO: 1352576 - DNA, 15 bp, Homo sapiens
aaggctgaaaagtca

SEQ ID NO: 1352577 - DNA, 15 bp, Homo sapiens
taaggctgaaaagtc

SEQ ID NO: 1352578 - DNA, 15 bp, Homo sapiens
ttaaggctgaaaagt

SEQ ID NO: 1352579 - DNA, 15 bp, Homo sapiens
cttaaggctgaaaag

SEQ ID NO: 1352580 - DNA, 15 bp, Homo sapiens
ccttaaggctgaaaa

SEQ ID NO: 1352581 - DNA, 15 bp, Homo sapiens
gccttaaggctgaaa

SEQ ID NO: 1352582 - DNA, 15 bp, Homo sapiens
tgccttaaggctgaa

SEQ ID NO: 1352583 - DNA, 15 bp, Homo sapiens
atgccttaaggctga

SEQ ID NO: 1352584 - DNA, 15 bp, Homo sapiens
tatgccttaaggctg

SEQ ID NO: 1352585 - DNA, 15 bp, Homo sapiens
ctatgccttaaggct

SEQ ID NO: 1352586 - DNA, 15 bp, Homo sapiens
gctatgccttaaggc

SEQ ID NO: 1352587 - DNA, 15 bp, Homo sapiens
tgctatgccttaagg

SEQ ID NO: 1352588 - DNA, 15 bp, Homo sapiens
ctgctatgccttaag

SEQ ID NO: 1352589 - DNA, 15 bp, Homo sapiens
cctgctatgccttaa

SEQ ID NO: 1352590 - DNA, 15 bp, Homo sapiens
ccctgctatgcctta

SEQ ID NO: 1352591 - DNA, 15 bp, Homo sapiens
cccctgctatgcctt

SEQ ID NO: 1352592 - DNA, 15 bp, Homo sapiens
ccccctgctatgcct

SEQ ID NO: 1352593 - DNA, 15 bp, Homo sapiens
gccccctgctatgcc

SEQ ID NO: 1352594 - DNA, 15 bp, Homo sapiens
tgccccctgctatgc

SEQ ID NO: 1352595 - DNA, 15 bp, Homo sapiens
ctgccccctgctatg

SEQ ID NO: 1352596 - DNA, 15 bp, Homo sapiens
gctgccccctgctat

SEQ ID NO: 1352597 - DNA, 15 bp, Homo sapiens
tgctgccccctgcta

SEQ ID NO: 1352598 - DNA, 15 bp, Homo sapiens
gtgctgccccctgct

SEQ ID NO: 1352599 - DNA, 15 bp, Homo sapiens
ggtgctgccccctgc

SEQ ID NO: 1352600 - DNA, 15 bp, Homo sapiens
cggtgctgccccctg

SEQ ID NO: 1352601 - DNA, 15 bp, Homo sapiens
gcggtgctgccccct

SEQ ID NO: 1352602 - DNA, 15 bp, Homo sapiens
tgcggtgctgccccc

SEQ ID NO: 1352603 - DNA, 15 bp, Homo sapiens
ctgcggtgctgcccc

SEQ ID NO: 1352604 - DNA, 15 bp, Homo sapiens
tctgcggtgctgccc

SEQ ID NO: 1352605 - DNA, 15 bp, Homo sapiens
gtctgcggtgctgcc

SEQ ID NO: 1352606 - DNA, 15 bp, Homo sapiens
tgtctgcggtgctgc

SEQ ID NO: 1352607 - DNA, 15 bp, Homo sapiens
ttgtctgcggtgctg

SEQ ID NO: 1352608 - DNA, 15 bp, Homo sapiens
cttgtctgcggtgct

SEQ ID NO: 1352609 - DNA, 15 bp, Homo sapiens
ccttgtctgcggtgc

SEQ ID NO: 1352610 - DNA, 15 bp, Homo sapiens
accttgtctgcggtg

SEQ ID NO: 1352611 - DNA, 15 bp, Homo sapiens
taccttgtctgcggt

SEQ ID NO: 1352612 - DNA, 15 bp, Homo sapiens
ctaccttgtctgcgg

SEQ ID NO: 1352613 - DNA, 15 bp, Homo sapiens
actaccttgtctgcg

SEQ ID NO: 1352614 - DNA, 15 bp, Homo sapiens
cactaccttgtctgc

SEQ ID NO: 1352615 - DNA, 15 bp, Homo sapiens
gcactaccttgtctg

SEQ ID NO: 1352616 - DNA, 15 bp, Homo sapiens
agcactaccttgtct

SEQ ID NO: 1352617 - DNA, 15 bp, Homo sapiens
aagcactaccttgtc

SEQ ID NO: 1352618 - DNA, 15 bp, Homo sapiens
gaagcactaccttgt

SEQ ID NO: 1352619 - DNA, 15 bp, Homo sapiens
agaagcactaccttg

SEQ ID NO: 1352620 - DNA, 15 bp, Homo sapiens
gagaagcactacctt

SEQ ID NO: 1352621 - DNA, 15 bp, Homo sapiens
agagaagcactacct

SEQ ID NO: 1352622 - DNA, 15 bp, Homo sapiens
cagagaagcactacc

SEQ ID NO: 1352623 - DNA, 15 bp, Homo sapiens
acagagaagcactac

SEQ ID NO: 1352624 - DNA, 15 bp, Homo sapiens
tacagagaagcacta

SEQ ID NO: 1352625 - DNA, 15 bp, Homo sapiens
ctacagagaagcact

SEQ ID NO: 1352626 - DNA, 15 bp, Homo sapiens
actacagagaagcac

SEQ ID NO: 1352627 - DNA, 15 bp, Homo sapiens
cactacagagaagca

SEQ ID NO: 1352628 - DNA, 15 bp, Homo sapiens
ccactacagagaagc

SEQ ID NO: 1352629 - DNA, 15 bp, Homo sapiens
tccactacagagaag

SEQ ID NO: 1352630 - DNA, 15 bp, Homo sapiens
ttccactacagagaa

SEQ ID NO: 1352631 - DNA, 15 bp, Homo sapiens
cttccactacagaga

SEQ ID NO: 1352632 - DNA, 15 bp, Homo sapiens
ccttccactacagag

SEQ ID NO: 1352633 - DNA, 15 bp, Homo sapiens
cccttccactacaga

SEQ ID NO: 1352634 - DNA, 15 bp, Homo sapiens
gcccttccactacag

SEQ ID NO: 1352635 - DNA, 15 bp, Homo sapiens
agcccttccactaca

SEQ ID NO: 1352636 - DNA, 15 bp, Homo sapiens
cagcccttccactac

SEQ ID NO: 1352637 - DNA, 15 bp, Homo sapiens
ccagcccttccacta

SEQ ID NO: 1352638 - DNA, 15 bp, Homo sapiens
tccagcccttccact

SEQ ID NO: 1352639 - DNA, 15 bp, Homo sapiens
ctccagcccttccac

SEQ ID NO: 1352640 - DNA, 15 bp, Homo sapiens
tctccagcccttcca

SEQ ID NO: 1352641 - DNA, 15 bp, Homo sapiens
ctctccagcccttcc

SEQ ID NO: 1352642 - DNA, 15 bp, Homo sapiens
cctctccagcccttc

SEQ ID NO: 1352643 - DNA, 15 bp, Homo sapiens
tcctctccagccctt

SEQ ID NO: 1352644 - DNA, 15 bp, Homo sapiens
ttcctctccagccct

SEQ ID NO: 1352645 - DNA, 15 bp, Homo sapiens
tttcctctccagccc

SEQ ID NO: 1352646 - DNA, 15 bp, Homo sapiens
gtttcctctccagcc

SEQ ID NO: 1352647 - DNA, 15 bp, Homo sapiens
tgtttcctctccagc

SEQ ID NO: 1352648 - DNA, 15 bp, Homo sapiens
ctgtttcctctccag

SEQ ID NO: 1352649 - DNA, 15 bp, Homo sapiens
gctgtttcctctcca

SEQ ID NO: 1352650 - DNA, 15 bp, Homo sapiens
tgctgtttcctctcc

SEQ ID NO: 1352651 - DNA, 15 bp, Homo sapiens
ttgctgtttcctctc

SEQ ID NO: 1352652 - DNA, 15 bp, Homo sapiens
attgctgtttcctct

SEQ ID NO: 1352653 - DNA, 15 bp, Homo sapiens
cattgctgtttcctc

SEQ ID NO: 1352654 - DNA, 15 bp, Homo sapiens
gcattgctgtttcct

SEQ ID NO: 1352655 - DNA, 15 bp, Homo sapiens
ggcattgctgtttcc

SEQ ID NO: 1352656 - DNA, 15 bp, Homo sapiens
gggcattgctgtttc

SEQ ID NO: 1352657 - DNA, 15 bp, Homo sapiens
tgggcattgctgttt

SEQ ID NO: 1352658 - DNA, 15 bp, Homo sapiens
ctgggcattgctgtt

SEQ ID NO: 1352659 - DNA, 15 bp, Homo sapiens
actgggcattgctgt

SEQ ID NO: 1352660 - DNA, 15 bp, Homo sapiens
cactgggcattgctg

SEQ ID NO: 1352661 - DNA, 15 bp, Homo sapiens
gcactgggcattgct

SEQ ID NO: 1352662 - DNA, 15 bp, Homo sapiens
tgcactgggcattgc

SEQ ID NO: 1352663 - DNA, 15 bp, Homo sapiens
gtgcactgggcattg

SEQ ID NO: 1352664 - DNA, 15 bp, Homo sapiens
tgtgcactgggcatt

SEQ ID NO: 1352665 - DNA, 15 bp, Homo sapiens
ttgtgcactgggcat

SEQ ID NO: 1352666 - DNA, 15 bp, Homo sapiens
tttgtgcactgggca

SEQ ID NO: 1352667 - DNA, 15 bp, Homo sapiens
ctttgtgcactgggc

SEQ ID NO: 1352668 - DNA, 15 bp, Homo sapiens
tctttgtgcactggg

SEQ ID NO: 1352669 - DNA, 15 bp, Homo sapiens
atctttgtgcactgg

SEQ ID NO: 1352670 - DNA, 15 bp, Homo sapiens
aatctttgtgcactg

SEQ ID NO: 1352671 - DNA, 15 bp, Homo sapiens
aaatctttgtgcact

SEQ ID NO: 1352672 - DNA, 15 bp, Homo sapiens
aaaatctttgtgcac

SEQ ID NO: 1352673 - DNA, 15 bp, Homo sapiens
taaaatctttgtgca

SEQ ID NO: 1352674 - DNA, 15 bp, Homo sapiens
ataaaatctttgtgc

SEQ ID NO: 1352675 - DNA, 15 bp, Homo sapiens
aataaaatctttgtg

SEQ ID NO: 1352676 - DNA, 15 bp, Homo sapiens
caataaaatctttgt

SEQ ID NO: 1352677 - DNA, 15 bp, Homo sapiens
gcaataaaatctttg

SEQ ID NO: 1352678 - DNA, 15 bp, Homo sapiens
tgcaataaaatcttt

SEQ ID NO: 1352679 - DNA, 15 bp, Homo sapiens
gtgcaataaaatctt

SEQ ID NO: 1352680 - DNA, 15 bp, Homo sapiens
agtgcaataaaatct

SEQ ID NO: 1352681 - DNA, 15 bp, Homo sapiens
gagtgcaataaaatc

SEQ ID NO: 1352682 - DNA, 15 bp, Homo sapiens
tgagtgcaataaaat

SEQ ID NO: 1352683 - DNA, 15 bp, Homo sapiens
ttgagtgcaataaaa

SEQ ID NO: 1352684 - DNA, 15 bp, Homo sapiens
gttgagtgcaataaa

SEQ ID NO: 1352685 - DNA, 15 bp, Homo sapiens
tgttgagtgcaataa

SEQ ID NO: 1352686 - DNA, 15 bp, Homo sapiens
ctgttgagtgcaata

SEQ ID NO: 1352687 - DNA, 15 bp, Homo sapiens
gctgttgagtgcaat

SEQ ID NO: 1352688 - DNA, 15 bp, Homo sapiens
ggctgttgagtgcaa

SEQ ID NO: 1352689 - DNA, 15 bp, Homo sapiens
aggctgttgagtgca

SEQ ID NO: 1352690 - DNA, 15 bp, Homo sapiens
aaggctgttgagtgc

SEQ ID NO: 1352691 - DNA, 15 bp, Homo sapiens
caaggctgttgagtg

SEQ ID NO: 1352692 - DNA, 15 bp, Homo sapiens
ccaaggctgttgagt

SEQ ID NO: 1352693 - DNA, 15 bp, Homo sapiens
tccaaggctgttgag

SEQ ID NO: 1352694 - DNA, 15 bp, Homo sapiens
ctccaaggctgttga

SEQ ID NO: 1352695 - DNA, 15 bp, Homo sapiens
tctccaaggctgttg

SEQ ID NO: 1352696 - DNA, 15 bp, Homo sapiens
atctccaaggctgtt

SEQ ID NO: 1352697 - DNA, 15 bp, Homo sapiens
catctccaaggctgt

SEQ ID NO: 1352698 - DNA, 15 bp, Homo sapiens
tcatctccaaggctg

SEQ ID NO: 1352699 - DNA, 15 bp, Homo sapiens
ctcatctccaaggct

SEQ ID NO: 1352700 - DNA, 15 bp, Homo sapiens
gctcatctccaaggc

SEQ ID NO: 1352701 - DNA, 15 bp, Homo sapiens
ggctcatctccaagg

SEQ ID NO: 1352702 - DNA, 15 bp, Homo sapiens
tggctcatctccaag

SEQ ID NO: 1352703 - DNA, 15 bp, Homo sapiens
ttggctcatctccaa

SEQ ID NO: 1352704 - DNA, 15 bp, Homo sapiens
tttggctcatctcca

SEQ ID NO: 1352705 - DNA, 15 bp, Homo sapiens
ttttggctcatctcc

SEQ ID NO: 1352706 - DNA, 15 bp, Homo sapiens
attttggctcatctc

SEQ ID NO: 1352707 - DNA, 15 bp, Homo sapiens
tattttggctcatct

SEQ ID NO: 1352708 - DNA, 15 bp, Homo sapiens
gtattttggctcatc

SEQ ID NO: 1352709 - DNA, 15 bp, Homo sapiens
ggtattttggctcat

SEQ ID NO: 1352710 - DNA, 15 bp, Homo sapiens
tggtattttggctca

SEQ ID NO: 1352711 - DNA, 15 bp, Homo sapiens
ctggtattttggctc

SEQ ID NO: 1352712 - DNA, 15 bp, Homo sapiens
gctggtattttggct

SEQ ID NO: 1352713 - DNA, 15 bp, Homo sapiens
ggctggtattttggc

SEQ ID NO: 1352714 - DNA, 15 bp, Homo sapiens
tggctggtattttgg

SEQ ID NO: 1352715 - DNA, 15 bp, Homo sapiens
ctggctggtattttg

SEQ ID NO: 1352716 - DNA, 15 bp, Homo sapiens
tctggctggtatttt

SEQ ID NO: 1352717 - DNA, 15 bp, Homo sapiens
ctctggctggtattt

SEQ ID NO: 1352718 - DNA, 15 bp, Homo sapiens
cctctggctggtatt

SEQ ID NO: 1352719 - DNA, 15 bp, Homo sapiens
tcctctggctggtat

SEQ ID NO: 1352720 - DNA, 15 bp, Homo sapiens
ctcctctggctggta

SEQ ID NO: 1352721 - DNA, 15 bp, Homo sapiens
cctcctctggctggt

SEQ ID NO: 1352722 - DNA, 15 bp, Homo sapiens
tcctcctctggctgg

SEQ ID NO: 1352723 - DNA, 15 bp, Homo sapiens
gtcctcctctggctg

SEQ ID NO: 1352724 - DNA, 15 bp, Homo sapiens
tgtcctcctctggct

SEQ ID NO: 1352725 - DNA, 15 bp, Homo sapiens
gtgtcctcctctggc

SEQ ID NO: 1352726 - DNA, 15 bp, Homo sapiens
agtgtcctcctctgg

SEQ ID NO: 1352727 - DNA, 15 bp, Homo sapiens
aagtgtcctcctctg

SEQ ID NO: 1352728 - DNA, 15 bp, Homo sapiens
aaagtgtcctcctct

SEQ ID NO: 1352729 - DNA, 15 bp, Homo sapiens
taaagtgtcctcctc

SEQ ID NO: 1352730 - DNA, 15 bp, Homo sapiens
gtaaagtgtcctcct

SEQ ID NO: 1352731 - DNA, 15 bp, Homo sapiens
ggtaaagtgtcctcc

SEQ ID NO: 1352732 - DNA, 15 bp, Homo sapiens
tggtaaagtgtcctc

SEQ ID NO: 1352733 - DNA, 15 bp, Homo sapiens
ttggtaaagtgtcct

SEQ ID NO: 1352734 - DNA, 15 bp, Homo sapiens
gttggtaaagtgtcc

SEQ ID NO: 1352735 - DNA, 15 bp, Homo sapiens
ggttggtaaagtgtc

SEQ ID NO: 1352736 - DNA, 15 bp, Homo sapiens
aggttggtaaagtgt

SEQ ID NO: 1352737 - DNA, 15 bp, Homo sapiens
caggttggtaaagtg

SEQ ID NO: 1352738 - DNA, 15 bp, Homo sapiens
gcaggttggtaaagt

SEQ ID NO: 1352739 - DNA, 15 bp, Homo sapiens
agcaggttggtaaag

SEQ ID NO: 1352740 - DNA, 15 bp, Homo sapiens
aagcaggttggtaaa

SEQ ID NO: 1352741 - DNA, 15 bp, Homo sapiens
caagcaggttggtaa

SEQ ID NO: 1352742 - DNA, 15 bp, Homo sapiens
tcaagcaggttggta

SEQ ID NO: 1352743 - DNA, 15 bp, Homo sapiens
ttcaagcaggttggt

SEQ ID NO: 1352744 - DNA, 15 bp, Homo sapiens
gttcaagcaggttgg

SEQ ID NO: 1352745 - DNA, 15 bp, Homo sapiens
agttcaagcaggttg

SEQ ID NO: 1352746 - DNA, 15 bp, Homo sapiens
tagttcaagcaggtt

SEQ ID NO: 1352747 - DNA, 15 bp, Homo sapiens
ttagttcaagcaggt

SEQ ID NO: 1352748 - DNA, 15 bp, Homo sapiens
cttagttcaagcagg

SEQ ID NO: 1352749 - DNA, 15 bp, Homo sapiens
tcttagttcaagcag

SEQ ID NO: 1352750 - DNA, 15 bp, Homo sapiens
ttcttagttcaagca

SEQ ID NO: 1352751 - DNA, 15 bp, Homo sapiens
cttcttagttcaagc

SEQ ID NO: 1352752 - DNA, 15 bp, Homo sapiens
tcttcttagttcaag

SEQ ID NO: 1352753 - DNA, 15 bp, Homo sapiens
ctcttcttagttcaa

SEQ ID NO: 1352754 - DNA, 15 bp, Homo sapiens
gctcttcttagttca

SEQ ID NO: 1352755 - DNA, 15 bp, Homo sapiens
agctcttcttagttc

SEQ ID NO: 1352756 - DNA, 15 bp, Homo sapiens
tagctcttcttagtt

SEQ ID NO: 1352757 - DNA, 15 bp, Homo sapiens
ttagctcttcttagt

SEQ ID NO: 1352758 - DNA, 15 bp, Homo sapiens
cttagctcttcttag

SEQ ID NO: 1352759 - DNA, 15 bp, Homo sapiens
tcttagctcttctta

SEQ ID NO: 1352760 - DNA, 15 bp, Homo sapiens
ttcttagctcttctt

SEQ ID NO: 1352761 - DNA, 15 bp, Homo sapiens
gttcttagctcttct

SEQ ID NO: 1352762 - DNA, 15 bp, Homo sapiens
ggttcttagctcttc

SEQ ID NO: 1352763 - DNA, 15 bp, Homo sapiens
tggttcttagctctt

SEQ ID NO: 1352764 - DNA, 15 bp, Homo sapiens
ctggttcttagctct

SEQ ID NO: 1352765 - DNA, 15 bp, Homo sapiens
gctggttcttagctc

SEQ ID NO: 1352766 - DNA, 15 bp, Homo sapiens
tgctggttcttagct

SEQ ID NO: 1352767 - DNA, 15 bp, Homo sapiens
gtgctggttcttagc

SEQ ID NO: 1352768 - DNA, 15 bp, Homo sapiens
ggtgctggttcttag

SEQ ID NO: 1352769 - DNA, 15 bp, Homo sapiens
tggtgctggttctta

SEQ ID NO: 1352770 - DNA, 15 bp, Homo sapiens
atggtgctggttctt

SEQ ID NO: 1352771 - DNA, 15 bp, Homo sapiens
aatggtgctggttct

SEQ ID NO: 1352772 - DNA, 15 bp, Homo sapiens
aaatggtgctggttc

SEQ ID NO: 1352773 - DNA, 15 bp, Homo sapiens
caaatggtgctggtt

SEQ ID NO: 1352774 - DNA, 15 bp, Homo sapiens
ccaaatggtgctggt

SEQ ID NO: 1352775 - DNA, 15 bp, Homo sapiens
tccaaatggtgctgg

SEQ ID NO: 1352776 - DNA, 15 bp, Homo sapiens
atccaaatggtgctg

SEQ ID NO: 1352777 - DNA, 15 bp, Homo sapiens
tatccaaatggtgct

SEQ ID NO: 1352778 - DNA, 15 bp, Homo sapiens
gtatccaaatggtgc

SEQ ID NO: 1352779 - DNA, 15 bp, Homo sapiens
tgtatccaaatggtg

SEQ ID NO: 1352780 - DNA, 15 bp, Homo sapiens
ttgtatccaaatggt

SEQ ID NO: 1352781 - DNA, 15 bp, Homo sapiens
tttgtatccaaatgg

SEQ ID NO: 1352782 - DNA, 15 bp, Homo sapiens
atttgtatccaaatg

SEQ ID NO: 1352783 - DNA, 15 bp, Homo sapiens
aatttgtatccaaat

SEQ ID NO: 1352784 - DNA, 15 bp, Homo sapiens
caatttgtatccaaa

SEQ ID NO: 1352785 - DNA, 15 bp, Homo sapiens
gcaatttgtatccaa

SEQ ID NO: 1352786 - DNA, 15 bp, Homo sapiens
agcaatttgtatcca

SEQ ID NO: 1352787 - DNA, 15 bp, Homo sapiens
cagcaatttgtatcc

SEQ ID NO: 1352788 - DNA, 15 bp, Homo sapiens
tcagcaatttgtatc

SEQ ID NO: 1352789 - DNA, 15 bp, Homo sapiens
atcagcaatttgtat

SEQ ID NO: 1352790 - DNA, 15 bp, Homo sapiens
aatcagcaatttgta

SEQ ID NO: 1352791 - DNA, 15 bp, Homo sapiens
aaatcagcaatttgt

SEQ ID NO: 1352792 - DNA, 15 bp, Homo sapiens
taaatcagcaatttg

SEQ ID NO: 1352793 - DNA, 15 bp, Homo sapiens
ataaatcagcaattt

SEQ ID NO: 1352794 - DNA, 15 bp, Homo sapiens
aataaatcagcaatt

SEQ ID NO: 1352795 - DNA, 15 bp, Homo sapiens
aaataaatcagcaat

SEQ ID NO: 1352796 - DNA, 15 bp, Homo sapiens
aaaataaatcagcaa

SEQ ID NO: 1352797 - DNA, 15 bp, Homo sapiens
gaaaataaatcagca

SEQ ID NO: 1352798 - DNA, 15 bp, Homo sapiens
agaaaataaatcagc

SEQ ID NO: 1352799 - DNA, 15 bp, Homo sapiens
aagaaaataaatcag

SEQ ID NO: 1352800 - DNA, 15 bp, Homo sapiens
gaagaaaataaatca

SEQ ID NO: 1352801 - DNA, 15 bp, Homo sapiens
ggaagaaaataaatc

SEQ ID NO: 1352802 - DNA, 15 bp, Homo sapiens
aggaagaaaataaat

SEQ ID NO: 1352803 - DNA, 15 bp, Homo sapiens
aaggaagaaaataaa

SEQ ID NO: 1352804 - DNA, 15 bp, Homo sapiens
caaggaagaaaataa

SEQ ID NO: 1352805 - DNA, 15 bp, Homo sapiens
gcaaggaagaaaata

SEQ ID NO: 1352806 - DNA, 15 bp, Homo sapiens
ggcaaggaagaaaat

SEQ ID NO: 1352807 - DNA, 15 bp, Homo sapiens
tggcaaggaagaaaa

SEQ ID NO: 1352808 - DNA, 15 bp, Homo sapiens
ctggcaaggaagaaa

SEQ ID NO: 1352809 - DNA, 15 bp, Homo sapiens
actggcaaggaagaa

SEQ ID NO: 1352810 - DNA, 15 bp, Homo sapiens
tactggcaaggaaga

SEQ ID NO: 1352811 - DNA, 15 bp, Homo sapiens
ctactggcaaggaag

SEQ ID NO: 1352812 - DNA, 15 bp, Homo sapiens
cctactggcaaggaa

SEQ ID NO: 1352813 - DNA, 15 bp, Homo sapiens
gcctactggcaagga

SEQ ID NO: 1352814 - DNA, 15 bp, Homo sapiens
agcctactggcaagg

SEQ ID NO: 1352815 - DNA, 15 bp, Homo sapiens
tagcctactggcaag

SEQ ID NO: 1352816 - DNA, 15 bp, Homo sapiens
ctagcctactggcaa

SEQ ID NO: 1352817 - DNA, 15 bp, Homo sapiens
actagcctactggca

SEQ ID NO: 1352818 - DNA, 15 bp, Homo sapiens
cactagcctactggc

SEQ ID NO: 1352819 - DNA, 15 bp, Homo sapiens
tcactagcctactgg

SEQ ID NO: 1352820 - DNA, 15 bp, Homo sapiens
ctcactagcctactg

SEQ ID NO: 1352821 - DNA, 15 bp, Homo sapiens
cctcactagcctact

SEQ ID NO: 1352822 - DNA, 15 bp, Homo sapiens
gcctcactagcctac

SEQ ID NO: 1352823 - DNA, 15 bp, Homo sapiens
ggcctcactagccta

SEQ ID NO: 1352824 - DNA, 15 bp, Homo sapiens
aggcctcactagcct

SEQ ID NO: 1352825 - DNA, 15 bp, Homo sapiens
caggcctcactagcc

SEQ ID NO: 1352826 - DNA, 15 bp, Homo sapiens
ccaggcctcactagc

SEQ ID NO: 1352827 - DNA, 15 bp, Homo sapiens
cccaggcctcactag

SEQ ID NO: 1352828 - DNA, 15 bp, Homo sapiens
ccccaggcctcacta

SEQ ID NO: 1352829 - DNA, 15 bp, Homo sapiens
tccccaggcctcact

SEQ ID NO: 1352830 - DNA, 15 bp, Homo sapiens
gtccccaggcctcac

SEQ ID NO: 1352831 - DNA, 15 bp, Homo sapiens
tgtccccaggcctca

SEQ ID NO: 1352832 - DNA, 15 bp, Homo sapiens
atgtccccaggcctc

SEQ ID NO: 1352833 - DNA, 15 bp, Homo sapiens
tatgtccccaggcct

SEQ ID NO: 1352834 - DNA, 15 bp, Homo sapiens
gtatgtccccaggcc

SEQ ID NO: 1352835 - DNA, 15 bp, Homo sapiens
tgtatgtccccaggc

SEQ ID NO: 1352836 - DNA, 15 bp, Homo sapiens
atgtatgtccccagg

SEQ ID NO: 1352837 - DNA, 15 bp, Homo sapiens
catgtatgtccccag

SEQ ID NO: 1352838 - DNA, 15 bp, Homo sapiens
acatgtatgtcccca

SEQ ID NO: 1352839 - DNA, 15 bp, Homo sapiens
aacatgtatgtcccc

SEQ ID NO: 1352840 - DNA, 15 bp, Homo sapiens
taacatgtatgtccc

SEQ ID NO: 1352841 - DNA, 15 bp, Homo sapiens
gtaacatgtatgtcc

SEQ ID NO: 1352842 - DNA, 15 bp, Homo sapiens
agtaacatgtatgtc

SEQ ID NO: 1352843 - DNA, 15 bp, Homo sapiens
tagtaacatgtatgt

SEQ ID NO: 1352844 - DNA, 15 bp, Homo sapiens
ttagtaacatgtatg

SEQ ID NO: 1352845 - DNA, 15 bp, Homo sapiens
cttagtaacatgtat

SEQ ID NO: 1352846 - DNA, 15 bp, Homo sapiens
tcttagtaacatgta

SEQ ID NO: 1352847 - DNA, 15 bp, Homo sapiens
gtcttagtaacatgt

SEQ ID NO: 1352848 - DNA, 15 bp, Homo sapiens
tgtcttagtaacatg

SEQ ID NO: 1352849 - DNA, 15 bp, Homo sapiens
ttgtcttagtaacat

SEQ ID NO: 1352850 - DNA, 15 bp, Homo sapiens
cttgtcttagtaaca

SEQ ID NO: 1352851 - DNA, 15 bp, Homo sapiens
acttgtcttagtaac

SEQ ID NO: 1352852 - DNA, 15 bp, Homo sapiens
tacttgtcttagtaa

SEQ ID NO: 1352853 - DNA, 15 bp, Homo sapiens
atacttgtcttagta

SEQ ID NO: 1352854 - DNA, 15 bp, Homo sapiens
gatacttgtcttagt

SEQ ID NO: 1352855 - DNA, 15 bp, Homo sapiens
ggatacttgtcttag

SEQ ID NO: 1352856 - DNA, 15 bp, Homo sapiens
tggatacttgtctta

SEQ ID NO: 1352857 - DNA, 15 bp, Homo sapiens
ctggatacttgtctt

SEQ ID NO: 1352858 - DNA, 15 bp, Homo sapiens
gctggatacttgtct

SEQ ID NO: 1352859 - DNA, 15 bp, Homo sapiens
tgctggatacttgtc

SEQ ID NO: 1352860 - DNA, 15 bp, Homo sapiens
ctgctggatacttgt

SEQ ID NO: 1352861 - DNA, 15 bp, Homo sapiens
actgctggatacttg

SEQ ID NO: 1352862 - DNA, 15 bp, Homo sapiens
aactgctggatactt

SEQ ID NO: 1352863 - DNA, 15 bp, Homo sapiens
taactgctggatact

SEQ ID NO: 1352864 - DNA, 15 bp, Homo sapiens
gtaactgctggatac

SEQ ID NO: 1352865 - DNA, 15 bp, Homo sapiens
tgtaactgctggata

SEQ ID NO: 1352866 - DNA, 15 bp, Homo sapiens
ctgtaactgctggat

SEQ ID NO: 1352867 - DNA, 15 bp, Homo sapiens
cctgtaactgctgga

SEQ ID NO: 1352868 - DNA, 15 bp, Homo sapiens
tcctgtaactgctgg

SEQ ID NO: 1352869 - DNA, 15 bp, Homo sapiens
atcctgtaactgctg

SEQ ID NO: 1352870 - DNA, 15 bp, Homo sapiens
aatcctgtaactgct

SEQ ID NO: 1352871 - DNA, 15 bp, Homo sapiens
gaatcctgtaactgc

SEQ ID NO: 1352872 - DNA, 15 bp, Homo sapiens
agaatcctgtaactg

SEQ ID NO: 1352873 - DNA, 15 bp, Homo sapiens
aagaatcctgtaact

SEQ ID NO: 1352874 - DNA, 15 bp, Homo sapiens
caagaatcctgtaac

SEQ ID NO: 1352875 - DNA, 15 bp, Homo sapiens
acaagaatcctgtaa

SEQ ID NO: 1352876 - DNA, 15 bp, Homo sapiens
aacaagaatcctgta

SEQ ID NO: 1352877 - DNA, 15 bp, Homo sapiens
aaacaagaatcctgt

SEQ ID NO: 1352878 - DNA, 15 bp, Homo sapiens
caaacaagaatcctg

SEQ ID NO: 1352879 - DNA, 15 bp, Homo sapiens
gcaaacaagaatcct

SEQ ID NO: 1352880 - DNA, 15 bp, Homo sapiens
tgcaaacaagaatcc

SEQ ID NO: 1352881 - DNA, 15 bp, Homo sapiens
ttgcaaacaagaatc

SEQ ID NO: 1352882 - DNA, 15 bp, Homo sapiens
attgcaaacaagaat

SEQ ID NO: 1352883 - DNA, 15 bp, Homo sapiens
tattgcaaacaagaa

SEQ ID NO: 1352884 - DNA, 15 bp, Homo sapiens
ttattgcaaacaaga

SEQ ID NO: 1352885 - DNA, 15 bp, Homo sapiens
attattgcaaacaag

SEQ ID NO: 1352886 - DNA, 15 bp, Homo sapiens
aattattgcaaacaa

SEQ ID NO: 1352887 - DNA, 15 bp, Homo sapiens
taattattgcaaaca

SEQ ID NO: 1352888 - DNA, 15 bp, Homo sapiens
ataattattgcaaac

SEQ ID NO: 1352889 - DNA, 15 bp, Homo sapiens
tataattattgcaaa

SEQ ID NO: 1352890 - DNA, 15 bp, Homo sapiens
ttataattattgcaa

SEQ ID NO: 1352891 - DNA, 15 bp, Homo sapiens
attataattattgca

SEQ ID NO: 1352892 - DNA, 15 bp, Homo sapiens
tattataattattgc

SEQ ID NO: 1352893 - DNA, 15 bp, Homo sapiens
atattataattattg

SEQ ID NO: 1352894 - DNA, 15 bp, Homo sapiens
gatattataattatt

SEQ ID NO: 1352895 - DNA, 15 bp, Homo sapiens
ggatattataattat

SEQ ID NO: 1352896 - DNA, 15 bp, Homo sapiens
gggatattataatta

SEQ ID NO: 1352897 - DNA, 15 bp, Homo sapiens
agggatattataatt

SEQ ID NO: 1352898 - DNA, 15 bp, Homo sapiens
aagggatattataat

SEQ ID NO: 1352899 - DNA, 15 bp, Homo sapiens
taagggatattataa

SEQ ID NO: 1352900 - DNA, 15 bp, Homo sapiens
gtaagggatattata

SEQ ID NO: 1352901 - DNA, 15 bp, Homo sapiens
tgtaagggatattat

SEQ ID NO: 1352902 - DNA, 15 bp, Homo sapiens
gtgtaagggatatta

SEQ ID NO: 1352903 - DNA, 15 bp, Homo sapiens
tgtgtaagggatatt

SEQ ID NO: 1352904 - DNA, 15 bp, Homo sapiens
ctgtgtaagggatat

SEQ ID NO: 1352905 - DNA, 15 bp, Homo sapiens
cctgtgtaagggata

SEQ ID NO: 1352906 - DNA, 15 bp, Homo sapiens
acctgtgtaagggat

SEQ ID NO: 1352907 - DNA, 15 bp, Homo sapiens
cacctgtgtaaggga

SEQ ID NO: 1352908 - DNA, 15 bp, Homo sapiens
gcacctgtgtaaggg

SEQ ID NO: 1352909 - DNA, 15 bp, Homo sapiens
agcacctgtgtaagg

SEQ ID NO: 1352910 - DNA, 15 bp, Homo sapiens
aagcacctgtgtaag

SEQ ID NO: 1352911 - DNA, 15 bp, Homo sapiens
taagcacctgtgtaa

SEQ ID NO: 1352912 - DNA, 15 bp, Homo sapiens
ataagcacctgtgta

SEQ ID NO: 1352913 - DNA, 15 bp, Homo sapiens
cataagcacctgtgt

SEQ ID NO: 1352914 - DNA, 15 bp, Homo sapiens
gcataagcacctgtg

SEQ ID NO: 1352915 - DNA, 15 bp, Homo sapiens
tgcataagcacctgt

SEQ ID NO: 1352916 - DNA, 15 bp, Homo sapiens
atgcataagcacctg

SEQ ID NO: 1352917 - DNA, 15 bp, Homo sapiens
tatgcataagcacct

SEQ ID NO: 1352918 - DNA, 15 bp, Homo sapiens
gtatgcataagcacc

SEQ ID NO: 1352919 - DNA, 15 bp, Homo sapiens
tgtatgcataagcac

SEQ ID NO: 1352920 - DNA, 15 bp, Homo sapiens
gtgtatgcataagca

SEQ ID NO: 1352921 - DNA, 15 bp, Homo sapiens
tgtgtatgcataagc

SEQ ID NO: 1352922 - DNA, 15 bp, Homo sapiens
gtgtgtatgcataag

SEQ ID NO: 1352923 - DNA, 15 bp, Homo sapiens
tgtgtgtatgcataa

SEQ ID NO: 1352924 - DNA, 15 bp, Homo sapiens
gtgtgtgtatgcata

SEQ ID NO: 1352925 - DNA, 15 bp, Homo sapiens
tgtgtgtgtatgcat

SEQ ID NO: 1352926 - DNA, 15 bp, Homo sapiens
gtgtgtgtgtatgca

SEQ ID NO: 1352927 - DNA, 15 bp, Homo sapiens
tgtgtgtgtgtatgc

SEQ ID NO: 1352928 - DNA, 15 bp, Homo sapiens
gtgtgtgtgtgtatg

SEQ ID NO: 1352929 - DNA, 15 bp, Homo sapiens
agggagtgtgtgtgt

SEQ ID NO: 1352930 - DNA, 15 bp, Homo sapiens
aagggagtgtgtgtg

SEQ ID NO: 1352931 - DNA, 15 bp, Homo sapiens
gaagggagtgtgtgt

SEQ ID NO: 1352932 - DNA, 15 bp, Homo sapiens
ggaagggagtgtgtg

SEQ ID NO: 1352933 - DNA, 15 bp, Homo sapiens
aggaagggagtgtgt

SEQ ID NO: 1352934 - DNA, 15 bp, Homo sapiens
gaggaagggagtgtg

SEQ ID NO: 1352935 - DNA, 15 bp, Homo sapiens
tgaggaagggagtgt

SEQ ID NO: 1352936 - DNA, 15 bp, Homo sapiens
gtgaggaagggagtg

SEQ ID NO: 1352937 - DNA, 15 bp, Homo sapiens
tgtgaggaagggagt

SEQ ID NO: 1352938 - DNA, 15 bp, Homo sapiens
ttgtgaggaagggag

SEQ ID NO: 1352939 - DNA, 15 bp, Homo sapiens
attgtgaggaaggga

SEQ ID NO: 1352940 - DNA, 15 bp, Homo sapiens
tattgtgaggaaggg

SEQ ID NO: 1352941 - DNA, 15 bp, Homo sapiens
ttattgtgaggaagg

SEQ ID NO: 1352942 - DNA, 15 bp, Homo sapiens
cttattgtgaggaag

SEQ ID NO: 1352943 - DNA, 15 bp, Homo sapiens
gcttattgtgaggaa

SEQ ID NO: 1352944 - DNA, 15 bp, Homo sapiens
agcttattgtgagga

SEQ ID NO: 1352945 - DNA, 15 bp, Homo sapiens
gagcttattgtgagg

SEQ ID NO: 1352946 - DNA, 15 bp, Homo sapiens
tgagcttattgtgag

SEQ ID NO: 1352947 - DNA, 15 bp, Homo sapiens
ctgagcttattgtga

SEQ ID NO: 1352948 - DNA, 15 bp, Homo sapiens
gctgagcttattgtg

SEQ ID NO: 1352949 - DNA, 15 bp, Homo sapiens
agctgagcttattgt

SEQ ID NO: 1352950 - DNA, 15 bp, Homo sapiens
aagctgagcttattg

SEQ ID NO: 1352951 - DNA, 15 bp, Homo sapiens
aaagctgagcttatt

SEQ ID NO: 1352952 - DNA, 15 bp, Homo sapiens
caaagctgagcttat

SEQ ID NO: 1352953 - DNA, 15 bp, Homo sapiens
tcaaagctgagctta

SEQ ID NO: 1352954 - DNA, 15 bp, Homo sapiens
gtcaaagctgagctt

SEQ ID NO: 1352955 - DNA, 15 bp, Homo sapiens
tgtcaaagctgagct

SEQ ID NO: 1352956 - DNA, 15 bp, Homo sapiens
gtgtcaaagctgagc

SEQ ID NO: 1352957 - DNA, 15 bp, Homo sapiens
ggtgtcaaagctgag

SEQ ID NO: 1352958 - DNA, 15 bp, Homo sapiens
cggtgtcaaagctga

SEQ ID NO: 1352959 - DNA, 15 bp, Homo sapiens
ccggtgtcaaagctg

SEQ ID NO: 1352960 - DNA, 15 bp, Homo sapiens
cccggtgtcaaagct

SEQ ID NO: 1352961 - DNA, 15 bp, Homo sapiens
gcccggtgtcaaagc

SEQ ID NO: 1352962 - DNA, 15 bp, Homo sapiens
tgcccggtgtcaaag

SEQ ID NO: 1352963 - DNA, 15 bp, Homo sapiens
ctgcccggtgtcaaa

SEQ ID NO: 1352964 - DNA, 15 bp, Homo sapiens
tctgcccggtgtcaa

SEQ ID NO: 1352965 - DNA, 15 bp, Homo sapiens
ctctgcccggtgtca

SEQ ID NO: 1352966 - DNA, 15 bp, Homo sapiens
cctctgcccggtgtc

SEQ ID NO: 1352967 - DNA, 15 bp, Homo sapiens
ccctctgcccggtgt

SEQ ID NO: 1352968 - DNA, 15 bp, Homo sapiens
tccctctgcccggtg

SEQ ID NO: 1352969 - DNA, 15 bp, Homo sapiens
ttccctctgcccggt

SEQ ID NO: 1352970 - DNA, 15 bp, Homo sapiens
tttccctctgcccgg

SEQ ID NO: 1352971 - DNA, 15 bp, Homo sapiens
ttttccctctgcccg

SEQ ID NO: 1352972 - DNA, 15 bp, Homo sapiens
tttttccctctgccc

SEQ ID NO: 1352973 - DNA, 15 bp, Homo sapiens
gtttttccctctgcc

SEQ ID NO: 1352974 - DNA, 15 bp, Homo sapiens
tgtttttccctctgc

SEQ ID NO: 1352975 - DNA, 15 bp, Homo sapiens
ttgtttttccctctg

SEQ ID NO: 1352976 - DNA, 15 bp, Homo sapiens
gttgtttttccctct

SEQ ID NO: 1352977 - DNA, 15 bp, Homo sapiens
tgttgtttttccctc

SEQ ID NO: 1352978 - DNA, 15 bp, Homo sapiens
ctgttgtttttccct

SEQ ID NO: 1352979 - DNA, 15 bp, Homo sapiens
tctgttgtttttccc

SEQ ID NO: 1352980 - DNA, 15 bp, Homo sapiens
gtctgttgtttttcc

SEQ ID NO: 1352981 - DNA, 15 bp, Homo sapiens
tgtctgttgtttttc

SEQ ID NO: 1352982 - DNA, 15 bp, Homo sapiens
ttgtctgttgttttt

SEQ ID NO: 1352983 - DNA, 15 bp, Homo sapiens
gttgtctgttgtttt

SEQ ID NO: 1352984 - DNA, 15 bp, Homo sapiens
agttgtctgttgttt

SEQ ID NO: 1352985 - DNA, 15 bp, Homo sapiens
aagttgtctgttgtt

SEQ ID NO: 1352986 - DNA, 15 bp, Homo sapiens
aaagttgtctgttgt

SEQ ID NO: 1352987 - DNA, 15 bp, Homo sapiens
taaagttgtctgttg

SEQ ID NO: 1352988 - DNA, 15 bp, Homo sapiens
ctaaagttgtctgtt

SEQ ID NO: 1352989 - DNA, 15 bp, Homo sapiens
tctaaagttgtctgt

SEQ ID NO: 1352990 - DNA, 15 bp, Homo sapiens
atctaaagttgtctg

SEQ ID NO: 1352991 - DNA, 15 bp, Homo sapiens
catctaaagttgtct

SEQ ID NO: 1352992 - DNA, 15 bp, Homo sapiens
acatctaaagttgtc

SEQ ID NO: 1352993 - DNA, 15 bp, Homo sapiens
tacatctaaagttgt

SEQ ID NO: 1352994 - DNA, 15 bp, Homo sapiens
ctacatctaaagttg

SEQ ID NO: 1352995 - DNA, 15 bp, Homo sapiens
gctacatctaaagtt

SEQ ID NO: 1352996 - DNA, 15 bp, Homo sapiens
agctacatctaaagt

SEQ ID NO: 1352997 - DNA, 15 bp, Homo sapiens
cagctacatctaaag

SEQ ID NO: 1352998 - DNA, 15 bp, Homo sapiens
acagctacatctaaa

SEQ ID NO: 1352999 - DNA, 15 bp, Homo sapiens
tacagctacatctaa

SEQ ID NO: 1353000 - DNA, 15 bp, Homo sapiens
ctacagctacatcta

SEQ ID NO: 1353001 - DNA, 15 bp, Homo sapiens
actacagctacatct

SEQ ID NO: 1353002 - DNA, 15 bp, Homo sapiens
cactacagctacatc

SEQ ID NO: 1353003 - DNA, 15 bp, Homo sapiens
ccactacagctacat

SEQ ID NO: 1353004 - DNA, 15 bp, Homo sapiens
tccactacagctaca

SEQ ID NO: 1353005 - DNA, 15 bp, Homo sapiens
ttccactacagctac

SEQ ID NO: 1353006 - DNA, 15 bp, Homo sapiens
attccactacagcta

SEQ ID NO: 1353007 - DNA, 15 bp, Homo sapiens
tattccactacagct

SEQ ID NO: 1353008 - DNA, 15 bp, Homo sapiens
ctattccactacagc

SEQ ID NO: 1353009 - DNA, 15 bp, Homo sapiens
gctattccactacag

SEQ ID NO: 1353010 - DNA, 15 bp, Homo sapiens
agctattccactaca

SEQ ID NO: 1353011 - DNA, 15 bp, Homo sapiens
gagctattccactac

SEQ ID NO: 1353012 - DNA, 15 bp, Homo sapiens
agagctattccacta

SEQ ID NO: 1353013 - DNA, 15 bp, Homo sapiens
cagagctattccact

SEQ ID NO: 1353014 - DNA, 15 bp, Homo sapiens
tcagagctattccac

SEQ ID NO: 1353015 - DNA, 15 bp, Homo sapiens
ttcagagctattcca

SEQ ID NO: 1353016 - DNA, 15 bp, Homo sapiens
tttcagagctattcc

SEQ ID NO: 1353017 - DNA, 15 bp, Homo sapiens
atttcagagctattc

SEQ ID NO: 1353018 - DNA, 15 bp, Homo sapiens
aatttcagagctatt

SEQ ID NO: 1353019 - DNA, 15 bp, Homo sapiens
gaatttcagagctat

SEQ ID NO: 1353020 - DNA, 15 bp, Homo sapiens
agaatttcagagcta

SEQ ID NO: 1353021 - DNA, 15 bp, Homo sapiens
cagaatttcagagct

SEQ ID NO: 1353022 - DNA, 15 bp, Homo sapiens
acagaatttcagagc

SEQ ID NO: 1353023 - DNA, 15 bp, Homo sapiens
cacagaatttcagag

SEQ ID NO: 1353024 - DNA, 15 bp, Homo sapiens
acacagaatttcaga

SEQ ID NO: 1353025 - DNA, 15 bp, Homo sapiens
gacacagaatttcag

SEQ ID NO: 1353026 - DNA, 15 bp, Homo sapiens
tgacacagaatttca

SEQ ID NO: 1353027 - DNA, 15 bp, Homo sapiens
gtgacacagaatttc

SEQ ID NO: 1353028 - DNA, 15 bp, Homo sapiens
tgtgacacagaattt

SEQ ID NO: 1353029 - DNA, 15 bp, Homo sapiens
ctgtgacacagaatt

SEQ ID NO: 1353030 - DNA, 15 bp, Homo sapiens
actgtgacacagaat

SEQ ID NO: 1353031 - DNA, 15 bp, Homo sapiens
aactgtgacacagaa

SEQ ID NO: 1353032 - DNA, 15 bp, Homo sapiens
aaactgtgacacaga

SEQ ID NO: 1353033 - DNA, 15 bp, Homo sapiens
aaaactgtgacacag

SEQ ID NO: 1353034 - DNA, 15 bp, Homo sapiens
gaaaactgtgacaca

SEQ ID NO: 1353035 - DNA, 15 bp, Homo sapiens
agaaaactgtgacac

SEQ ID NO: 1353036 - DNA, 15 bp, Homo sapiens
tagaaaactgtgaca

SEQ ID NO: 1353037 - DNA, 15 bp, Homo sapiens
atagaaaactgtgac

SEQ ID NO: 1353038 - DNA, 15 bp, Homo sapiens
catagaaaactgtga

SEQ ID NO: 1353039 - DNA, 15 bp, Homo sapiens
tcatagaaaactgtg

SEQ ID NO: 1353040 - DNA, 15 bp, Homo sapiens
ttcatagaaaactgt

SEQ ID NO: 1353041 - DNA, 15 bp, Homo sapiens
attcatagaaaactg

SEQ ID NO: 1353042 - DNA, 15 bp, Homo sapiens
cattcatagaaaact

SEQ ID NO: 1353043 - DNA, 15 bp, Homo sapiens
tcattcatagaaaac

SEQ ID NO: 1353044 - DNA, 15 bp, Homo sapiens
ttcattcatagaaaa

SEQ ID NO: 1353045 - DNA, 15 bp, Homo sapiens
attcattcatagaaa

SEQ ID NO: 1353046 - DNA, 15 bp, Homo sapiens
tattcattcatagaa

SEQ ID NO: 1353047 - DNA, 15 bp, Homo sapiens
ctattcattcataga

SEQ ID NO: 1353048 - DNA, 15 bp, Homo sapiens
tctattcattcatag

SEQ ID NO: 1353049 - DNA, 15 bp, Homo sapiens
ttctattcattcata

SEQ ID NO: 1353050 - DNA, 15 bp, Homo sapiens
cttctattcattcat

SEQ ID NO: 1353051 - DNA, 15 bp, Homo sapiens
acttctattcattca

SEQ ID NO: 1353052 - DNA, 15 bp, Homo sapiens
cacttctattcattc

SEQ ID NO: 1353053 - DNA, 15 bp, Homo sapiens
acacttctattcatt

SEQ ID NO: 1353054 - DNA, 15 bp, Homo sapiens
gacacttctattcat

SEQ ID NO: 1353055 - DNA, 15 bp, Homo sapiens
tgacacttctattca

SEQ ID NO: 1353056 - DNA, 15 bp, Homo sapiens
atgacacttctattc

SEQ ID NO: 1353057 - DNA, 15 bp, Homo sapiens
aatgacacttctatt

SEQ ID NO: 1353058 - DNA, 15 bp, Homo sapiens
aaatgacacttctat

SEQ ID NO: 1353059 - DNA, 15 bp, Homo sapiens
caaatgacacttcta

SEQ ID NO: 1353060 - DNA, 15 bp, Homo sapiens
ccaaatgacacttct

SEQ ID NO: 1353061 - DNA, 15 bp, Homo sapiens
gccaaatgacacttc

SEQ ID NO: 1353062 - DNA, 15 bp, Homo sapiens
tgccaaatgacactt

SEQ ID NO: 1353063 - DNA, 15 bp, Homo sapiens
atgccaaatgacact

SEQ ID NO: 1353064 - DNA, 15 bp, Homo sapiens
gatgccaaatgacac

SEQ ID NO: 1353065 - DNA, 15 bp, Homo sapiens
agatgccaaatgaca

SEQ ID NO: 1353066 - DNA, 15 bp, Homo sapiens
aagatgccaaatgac

SEQ ID NO: 1353067 - DNA, 15 bp, Homo sapiens
caagatgccaaatga

SEQ ID NO: 1353068 - DNA, 15 bp, Homo sapiens
gcaagatgccaaatg

SEQ ID NO: 1353069 - DNA, 15 bp, Homo sapiens
ggcaagatgccaaat

SEQ ID NO: 1353070 - DNA, 15 bp, Homo sapiens
tggcaagatgccaaa

SEQ ID NO: 1353071 - DNA, 15 bp, Homo sapiens
gtggcaagatgccaa

SEQ ID NO: 1353072 - DNA, 15 bp, Homo sapiens
tgtggcaagatgcca

SEQ ID NO: 1353073 - DNA, 15 bp, Homo sapiens
atgtggcaagatgcc

SEQ ID NO: 1353074 - DNA, 15 bp, Homo sapiens
aatgtggcaagatgc

SEQ ID NO: 1353075 - DNA, 15 bp, Homo sapiens
gaatgtggcaagatg

SEQ ID NO: 1353076 - DNA, 15 bp, Homo sapiens
agaatgtggcaagat

SEQ ID NO: 1353077 - DNA, 15 bp, Homo sapiens
gagaatgtggcaaga

SEQ ID NO: 1353078 - DNA, 15 bp, Homo sapiens
ggagaatgtggcaag

SEQ ID NO: 1353079 - DNA, 15 bp, Homo sapiens
aggagaatgtggcaa

SEQ ID NO: 1353080 - DNA, 15 bp, Homo sapiens
gaggagaatgtggca

SEQ ID NO: 1353081 - DNA, 15 bp, Homo sapiens
tgaggagaatgtggc

SEQ ID NO: 1353082 - DNA, 15 bp, Homo sapiens
gtgaggagaatgtgg

SEQ ID NO: 1353083 - DNA, 15 bp, Homo sapiens
ggtgaggagaatgtg

SEQ ID NO: 1353084 - DNA, 15 bp, Homo sapiens
tggtgaggagaatgt

SEQ ID NO: 1353085 - DNA, 15 bp, Homo sapiens
ctggtgaggagaatg

SEQ ID NO: 1353086 - DNA, 15 bp, Homo sapiens
actggtgaggagaat

SEQ ID NO: 1353087 - DNA, 15 bp, Homo sapiens
gactggtgaggagaa

SEQ ID NO: 1353088 - DNA, 15 bp, Homo sapiens
agactggtgaggaga

SEQ ID NO: 1353089 - DNA, 15 bp, Homo sapiens
gagactggtgaggag

SEQ ID NO: 1353090 - DNA, 15 bp, Homo sapiens
tgagactggtgagga

SEQ ID NO: 1353091 - DNA, 15 bp, Homo sapiens
atgagactggtgagg

SEQ ID NO: 1353092 - DNA, 15 bp, Homo sapiens
gatgagactggtgag

SEQ ID NO: 1353093 - DNA, 15 bp, Homo sapiens
tgatgagactggtga

SEQ ID NO: 1353094 - DNA, 15 bp, Homo sapiens
gtgatgagactggtg

SEQ ID NO: 1353095 - DNA, 15 bp, Homo sapiens
agtgatgagactggt

SEQ ID NO: 1353096 - DNA, 15 bp, Homo sapiens
aagtgatgagactgg

SEQ ID NO: 1353097 - DNA, 15 bp, Homo sapiens
caagtgatgagactg

SEQ ID NO: 1353098 - DNA, 15 bp, Homo sapiens
gcaagtgatgagact

SEQ ID NO: 1353099 - DNA, 15 bp, Homo sapiens
agcaagtgatgagac

SEQ ID NO: 1353100 - DNA, 15 bp, Homo sapiens
gagcaagtgatgaga

SEQ ID NO: 1353101 - DNA, 15 bp, Homo sapiens
agagcaagtgatgag

SEQ ID NO: 1353102 - DNA, 15 bp, Homo sapiens
cagagcaagtgatga

SEQ ID NO: 1353103 - DNA, 15 bp, Homo sapiens
gcagagcaagtgatg

SEQ ID NO: 1353104 - DNA, 15 bp, Homo sapiens
tgcagagcaagtgat

SEQ ID NO: 1353105 - DNA, 15 bp, Homo sapiens
ttgcagagcaagtga

SEQ ID NO: 1353106 - DNA, 15 bp, Homo sapiens
gttgcagagcaagtg

SEQ ID NO: 1353107 - DNA, 15 bp, Homo sapiens
agttgcagagcaagt

SEQ ID NO: 1353108 - DNA, 15 bp, Homo sapiens
gagttgcagagcaag

SEQ ID NO: 1353109 - DNA, 15 bp, Homo sapiens
agagttgcagagcaa

SEQ ID NO: 1353110 - DNA, 15 bp, Homo sapiens
cagagttgcagagca

SEQ ID NO: 1353111 - DNA, 15 bp, Homo sapiens
gcagagttgcagagc

SEQ ID NO: 1353112 - DNA, 15 bp, Homo sapiens
ggcagagttgcagag

SEQ ID NO: 1353113 - DNA, 15 bp, Homo sapiens
gggcagagttgcaga

SEQ ID NO: 1353114 - DNA, 15 bp, Homo sapiens
cgggcagagttgcag

SEQ ID NO: 1353115 - DNA, 15 bp, Homo sapiens
ccgggcagagttgca

SEQ ID NO: 1353116 - DNA, 15 bp, Homo sapiens
accgggcagagttgc

SEQ ID NO: 1353117 - DNA, 15 bp, Homo sapiens
aaccgggcagagttg

SEQ ID NO: 1353118 - DNA, 15 bp, Homo sapiens
aaaccgggcagagtt

SEQ ID NO: 1353119 - DNA, 15 bp, Homo sapiens
aaaaccgggcagagt

SEQ ID NO: 1353120 - DNA, 15 bp, Homo sapiens
gaaaaccgggcagag

SEQ ID NO: 1353121 - DNA, 15 bp, Homo sapiens
agaaaaccgggcaga

SEQ ID NO: 1353122 - DNA, 15 bp, Homo sapiens
cagaaaaccgggcag

SEQ ID NO: 1353123 - DNA, 15 bp, Homo sapiens
acagaaaaccgggca

SEQ ID NO: 1353124 - DNA, 15 bp, Homo sapiens
cacagaaaaccgggc

SEQ ID NO: 1353125 - DNA, 15 bp, Homo sapiens
acacagaaaaccggg

SEQ ID NO: 1353126 - DNA, 15 bp, Homo sapiens
gacacagaaaaccgg

SEQ ID NO: 1353127 - DNA, 15 bp, Homo sapiens
tgacacagaaaaccg

SEQ ID NO: 1353128 - DNA, 15 bp, Homo sapiens
atgacacagaaaacc

SEQ ID NO: 1353129 - DNA, 15 bp, Homo sapiens
tatgacacagaaaac

SEQ ID NO: 1353130 - DNA, 15 bp, Homo sapiens
ctatgacacagaaaa

SEQ ID NO: 1353131 - DNA, 15 bp, Homo sapiens
actatgacacagaaa

SEQ ID NO: 1353132 - DNA, 15 bp, Homo sapiens
gactatgacacagaa

SEQ ID NO: 1353133 - DNA, 15 bp, Homo sapiens
ggactatgacacaga

SEQ ID NO: 1353134 - DNA, 15 bp, Homo sapiens
aggactatgacacag

SEQ ID NO: 1353135 - DNA, 15 bp, Homo sapiens
aaggactatgacaca

SEQ ID NO: 1353136 - DNA, 15 bp, Homo sapiens
gaaggactatgacac

SEQ ID NO: 1353137 - DNA, 15 bp, Homo sapiens
agaaggactatgaca

SEQ ID NO: 1353138 - DNA, 15 bp, Homo sapiens
aagaaggactatgac

SEQ ID NO: 1353139 - DNA, 15 bp, Homo sapiens
gaagaaggactatga

SEQ ID NO: 1353140 - DNA, 15 bp, Homo sapiens
tgaagaaggactatg

SEQ ID NO: 1353141 - DNA, 15 bp, Homo sapiens
atgaagaaggactat

SEQ ID NO: 1353142 - DNA, 15 bp, Homo sapiens
aatgaagaaggacta

SEQ ID NO: 1353143 - DNA, 15 bp, Homo sapiens
gaatgaagaaggact

SEQ ID NO: 1353144 - DNA, 15 bp, Homo sapiens
tgaatgaagaaggac

SEQ ID NO: 1353145 - DNA, 15 bp, Homo sapiens
ctgaatgaagaagga

SEQ ID NO: 1353146 - DNA, 15 bp, Homo sapiens
cctgaatgaagaagg

SEQ ID NO: 1353147 - DNA, 15 bp, Homo sapiens
gcctgaatgaagaag

SEQ ID NO: 1353148 - DNA, 15 bp, Homo sapiens
agcctgaatgaagaa

SEQ ID NO: 1353149 - DNA, 15 bp, Homo sapiens
cagcctgaatgaaga

SEQ ID NO: 1353150 - DNA, 15 bp, Homo sapiens
acagcctgaatgaag

SEQ ID NO: 1353151 - DNA, 15 bp, Homo sapiens
cacagcctgaatgaa

SEQ ID NO: 1353152 - DNA, 15 bp, Homo sapiens
acacagcctgaatga

SEQ ID NO: 1353153 - DNA, 15 bp, Homo sapiens
cacacagcctgaatg

SEQ ID NO: 1353154 - DNA, 15 bp, Homo sapiens
ccacacagcctgaat

SEQ ID NO: 1353155 - DNA, 15 bp, Homo sapiens
accacacagcctgaa

SEQ ID NO: 1353156 - DNA, 15 bp, Homo sapiens
caccacacagcctga

SEQ ID NO: 1353157 - DNA, 15 bp, Homo sapiens
gcaccacacagcctg

SEQ ID NO: 1353158 - DNA, 15 bp, Homo sapiens
ggcaccacacagcct

SEQ ID NO: 1353159 - DNA, 15 bp, Homo sapiens
tggcaccacacagcc

SEQ ID NO: 1353160 - DNA, 15 bp, Homo sapiens
atggcaccacacagc

SEQ ID NO: 1353161 - DNA, 15 bp, Homo sapiens
gatggcaccacacag

SEQ ID NO: 1353162 - DNA, 15 bp, Homo sapiens
tgatggcaccacaca

SEQ ID NO: 1353163 - DNA, 15 bp, Homo sapiens
ttgatggcaccacac

SEQ ID NO: 1353164 - DNA, 15 bp, Homo sapiens
cttgatggcaccaca

SEQ ID NO: 1353165 - DNA, 15 bp, Homo sapiens
tcttgatggcaccac

SEQ ID NO: 1353166 - DNA, 15 bp, Homo sapiens
gtcttgatggcacca

SEQ ID NO: 1353167 - DNA, 15 bp, Homo sapiens
ggtcttgatggcacc

SEQ ID NO: 1353168 - DNA, 15 bp, Homo sapiens
aggtcttgatggcac

SEQ ID NO: 1353169 - DNA, 15 bp, Homo sapiens
taggtcttgatggca

SEQ ID NO: 1353170 - DNA, 15 bp, Homo sapiens
ttaggtcttgatggc

SEQ ID NO: 1353171 - DNA, 15 bp, Homo sapiens
tttaggtcttgatgg

SEQ ID NO: 1353172 - DNA, 15 bp, Homo sapiens
atttaggtcttgatg

SEQ ID NO: 1353173 - DNA, 15 bp, Homo sapiens
aatttaggtcttgat

SEQ ID NO: 1353174 - DNA, 15 bp, Homo sapiens
aaatttaggtcttga

SEQ ID NO: 1353175 - DNA, 15 bp, Homo sapiens
taaatttaggtcttg

SEQ ID NO: 1353176 - DNA, 15 bp, Homo sapiens
ataaatttaggtctt

SEQ ID NO: 1353177 - DNA, 15 bp, Homo sapiens
tataaatttaggtct

SEQ ID NO: 1353178 - DNA, 15 bp, Homo sapiens
aatataaatttaggt

SEQ ID NO: 1353179 - DNA, 15 bp, Homo sapiens
gaatataaatttagg

SEQ ID NO: 1353180 - DNA, 15 bp, Homo sapiens
tgaatataaatttag

SEQ ID NO: 1353181 - DNA, 15 bp, Homo sapiens
ctgaatataaattta

SEQ ID NO: 1353182 - DNA, 15 bp, Homo sapiens
cctgaatataaattt

SEQ ID NO: 1353183 - DNA, 15 bp, Homo sapiens
acctgaatataaatt

SEQ ID NO: 1353184 - DNA, 15 bp, Homo sapiens
tacctgaatataaat

SEQ ID NO: 1353185 - DNA, 15 bp, Homo sapiens
atacctgaatataaa

SEQ ID NO: 1353186 - DNA, 15 bp, Homo sapiens
tatacctgaatataa

SEQ ID NO: 1353187 - DNA, 15 bp, Homo sapiens
gtatacctgaatata

SEQ ID NO: 1353188 - DNA, 15 bp, Homo sapiens
tgtatacctgaatat

SEQ ID NO: 1353189 - DNA, 15 bp, Homo sapiens
atgtatacctgaata

SEQ ID NO: 1353190 - DNA, 15 bp, Homo sapiens
aatgtatacctgaat

SEQ ID NO: 1353191 - DNA, 15 bp, Homo sapiens
gaatgtatacctgaa

SEQ ID NO: 1353192 - DNA, 15 bp, Homo sapiens
agaatgtatacctga

SEQ ID NO: 1353193 - DNA, 15 bp, Homo sapiens
cagaatgtatacctg

SEQ ID NO: 1353194 - DNA, 15 bp, Homo sapiens
acagaatgtatacct

SEQ ID NO: 1353195 - DNA, 15 bp, Homo sapiens
cacagaatgtatacc

SEQ ID NO: 1353196 - DNA, 15 bp, Homo sapiens
acacagaatgtatac

SEQ ID NO: 1353197 - DNA, 15 bp, Homo sapiens
aacacagaatgtata

SEQ ID NO: 1353198 - DNA, 15 bp, Homo sapiens
aaacacagaatgtat

SEQ ID NO: 1353199 - DNA, 15 bp, Homo sapiens
aaaacacagaatgta

SEQ ID NO: 1353200 - DNA, 15 bp, Homo sapiens
gaaaacacagaatgt

SEQ ID NO: 1353201 - DNA, 15 bp, Homo sapiens
agaaaacacagaatg

SEQ ID NO: 1353202 - DNA, 15 bp, Homo sapiens
aagaaaacacagaat

SEQ ID NO: 1353203 - DNA, 15 bp, Homo sapiens
gaagaaaacacagaa

SEQ ID NO: 1353204 - DNA, 15 bp, Homo sapiens
tgaagaaaacacaga

SEQ ID NO: 1353205 - DNA, 15 bp, Homo sapiens
gtgaagaaaacacag

SEQ ID NO: 1353206 - DNA, 15 bp, Homo sapiens
tgtgaagaaaacaca

SEQ ID NO: 1353207 - DNA, 15 bp, Homo sapiens
atgtgaagaaaacac

SEQ ID NO: 1353208 - DNA, 15 bp, Homo sapiens
tatgtgaagaaaaca

SEQ ID NO: 1353209 - DNA, 15 bp, Homo sapiens
gtatgtgaagaaaac

SEQ ID NO: 1353210 - DNA, 15 bp, Homo sapiens
agtatgtgaagaaaa

SEQ ID NO: 1353211 - DNA, 15 bp, Homo sapiens
tagtatgtgaagaaa

SEQ ID NO: 1353212 - DNA, 15 bp, Homo sapiens
ttagtatgtgaagaa

SEQ ID NO: 1353213 - DNA, 15 bp, Homo sapiens
attagtatgtgaaga

SEQ ID NO: 1353214 - DNA, 15 bp, Homo sapiens
gattagtatgtgaag

SEQ ID NO: 1353215 - DNA, 15 bp, Homo sapiens
tgattagtatgtgaa

SEQ ID NO: 1353216 - DNA, 15 bp, Homo sapiens
atgattagtatgtga

SEQ ID NO: 1353217 - DNA, 15 bp, Homo sapiens
aatgattagtatgtg

SEQ ID NO: 1353218 - DNA, 15 bp, Homo sapiens
gaatgattagtatgt

SEQ ID NO: 1353219 - DNA, 15 bp, Homo sapiens
tgaatgattagtatg

SEQ ID NO: 1353220 - DNA, 15 bp, Homo sapiens
gtgaatgattagtat

SEQ ID NO: 1353221 - DNA, 15 bp, Homo sapiens
ggtgaatgattagta

SEQ ID NO: 1353222 - DNA, 15 bp, Homo sapiens
tggtgaatgattagt

SEQ ID NO: 1353223 - DNA, 15 bp, Homo sapiens
gtggtgaatgattag

SEQ ID NO: 1353224 - DNA, 15 bp, Homo sapiens
agtggtgaatgatta

SEQ ID NO: 1353225 - DNA, 15 bp, Homo sapiens
cagtggtgaatgatt

SEQ ID NO: 1353226 - DNA, 15 bp, Homo sapiens
acagtggtgaatgat

SEQ ID NO: 1353227 - DNA, 15 bp, Homo sapiens
cacagtggtgaatga

SEQ ID NO: 1353228 - DNA, 15 bp, Homo sapiens
acacagtggtgaatg

SEQ ID NO: 1353229 - DNA, 15 bp, Homo sapiens
gacacagtggtgaat

SEQ ID NO: 1353230 - DNA, 15 bp, Homo sapiens
agacacagtggtgaa

SEQ ID NO: 1353231 - DNA, 15 bp, Homo sapiens
tagacacagtggtga

SEQ ID NO: 1353232 - DNA, 15 bp, Homo sapiens
atagacacagtggtg

SEQ ID NO: 1353233 - DNA, 15 bp, Homo sapiens
tatagacacagtggt

SEQ ID NO: 1353234 - DNA, 15 bp, Homo sapiens
atatagacacagtgg

SEQ ID NO: 1353235 - DNA, 15 bp, Homo sapiens
catatagacacagtg

SEQ ID NO: 1353236 - DNA, 15 bp, Homo sapiens
ccatatagacacagt

SEQ ID NO: 1353237 - DNA, 15 bp, Homo sapiens
accatatagacacag

SEQ ID NO: 1353238 - DNA, 15 bp, Homo sapiens
caccatatagacaca

SEQ ID NO: 1353239 - DNA, 15 bp, Homo sapiens
tcaccatatagacac

SEQ ID NO: 1353240 - DNA, 15 bp, Homo sapiens
gtcaccatatagaca

SEQ ID NO: 1353241 - DNA, 15 bp, Homo sapiens
tgtcaccatatagac

SEQ ID NO: 1353242 - DNA, 15 bp, Homo sapiens
atgtcaccatataga

SEQ ID NO: 1353243 - DNA, 15 bp, Homo sapiens
aatgtcaccatatag

SEQ ID NO: 1353244 - DNA, 15 bp, Homo sapiens
aaatgtcaccatata

SEQ ID NO: 1353245 - DNA, 15 bp, Homo sapiens
taaatgtcaccatat

SEQ ID NO: 1353246 - DNA, 15 bp, Homo sapiens
ttaaatgtcaccata

SEQ ID NO: 1353247 - DNA, 15 bp, Homo sapiens
cttaaatgtcaccat

SEQ ID NO: 1353248 - DNA, 15 bp, Homo sapiens
tcttaaatgtcacca

SEQ ID NO: 1353249 - DNA, 15 bp, Homo sapiens
ttcttaaatgtcacc

SEQ ID NO: 1353250 - DNA, 15 bp, Homo sapiens
attcttaaatgtcac

SEQ ID NO: 1353251 - DNA, 15 bp, Homo sapiens
aattcttaaatgtca

SEQ ID NO: 1353252 - DNA, 15 bp, Homo sapiens
aaattcttaaatgtc

SEQ ID NO: 1353253 - DNA, 15 bp, Homo sapiens
taaattcttaaatgt

SEQ ID NO: 1353254 - DNA, 15 bp, Homo sapiens
ataaattcttaaatg

SEQ ID NO: 1353255 - DNA, 15 bp, Homo sapiens
tataaattcttaaat

SEQ ID NO: 1353256 - DNA, 15 bp, Homo sapiens
atataaattcttaaa

SEQ ID NO: 1353257 - DNA, 15 bp, Homo sapiens
aatataaattcttaa

SEQ ID NO: 1353258 - DNA, 15 bp, Homo sapiens
aaatataaattctta

SEQ ID NO: 1353259 - DNA, 15 bp, Homo sapiens
caaatataaattctt

SEQ ID NO: 1353260 - DNA, 15 bp, Homo sapiens
ccaaatataaattct

SEQ ID NO: 1353261 - DNA, 15 bp, Homo sapiens
cccaaatataaattc

SEQ ID NO: 1353262 - DNA, 15 bp, Homo sapiens
gcccaaatataaatt

SEQ ID NO: 1353263 - DNA, 15 bp, Homo sapiens
tgcccaaatataaat

SEQ ID NO: 1353264 - DNA, 15 bp, Homo sapiens
atgcccaaatataaa

SEQ ID NO: 1353265 - DNA, 15 bp, Homo sapiens
catgcccaaatataa

SEQ ID NO: 1353266 - DNA, 15 bp, Homo sapiens
tcatgcccaaatata

SEQ ID NO: 1353267 - DNA, 15 bp, Homo sapiens
ttcatgcccaaatat

SEQ ID NO: 1353268 - DNA, 15 bp, Homo sapiens
tttcatgcccaaata

SEQ ID NO: 1353269 - DNA, 15 bp, Homo sapiens
atttcatgcccaaat

SEQ ID NO: 1353270 - DNA, 15 bp, Homo sapiens
aatttcatgcccaaa

SEQ ID NO: 1353271 - DNA, 15 bp, Homo sapiens
taatttcatgcccaa

SEQ ID NO: 1353272 - DNA, 15 bp, Homo sapiens
ataatttcatgccca

SEQ ID NO: 1353273 - DNA, 15 bp, Homo sapiens
gataatttcatgccc

SEQ ID NO: 1353274 - DNA, 15 bp, Homo sapiens
agataatttcatgcc

SEQ ID NO: 1353275 - DNA, 15 bp, Homo sapiens
aagataatttcatgc

SEQ ID NO: 1353276 - DNA, 15 bp, Homo sapiens
aaagataatttcatg

SEQ ID NO: 1353277 - DNA, 15 bp, Homo sapiens
aaaagataatttcat

SEQ ID NO: 1353278 - DNA, 15 bp, Homo sapiens
taaaagataatttca

SEQ ID NO: 1353279 - DNA, 15 bp, Homo sapiens
ctaaaagataatttc

SEQ ID NO: 1353280 - DNA, 15 bp, Homo sapiens
gctaaaagataattt

SEQ ID NO: 1353281 - DNA, 15 bp, Homo sapiens
agctaaaagataatt

SEQ ID NO: 1353282 - DNA, 15 bp, Homo sapiens
aagctaaaagataat

SEQ ID NO: 1353283 - DNA, 15 bp, Homo sapiens
taagctaaaagataa

SEQ ID NO: 1353284 - DNA, 15 bp, Homo sapiens
ataagctaaaagata

SEQ ID NO: 1353285 - DNA, 15 bp, Homo sapiens
aataagctaaaagat

SEQ ID NO: 1353286 - DNA, 15 bp, Homo sapiens
taataagctaaaaga

SEQ ID NO: 1353287 - DNA, 15 bp, Homo sapiens
ataataagctaaaag

SEQ ID NO: 1353288 - DNA, 15 bp, Homo sapiens
aataataagctaaaa

SEQ ID NO: 1353289 - DNA, 15 bp, Homo sapiens
aaataataagctaaa

SEQ ID NO: 1353290 - DNA, 15 bp, Homo sapiens
aaaataataagctaa

SEQ ID NO: 1353291 - DNA, 15 bp, Homo sapiens
taaaataataagcta

SEQ ID NO: 1353292 - DNA, 15 bp, Homo sapiens
ttaaaataataagct

SEQ ID NO: 1353293 - DNA, 15 bp, Homo sapiens
tttaaaataataagc

SEQ ID NO: 1353294 - DNA, 15 bp, Homo sapiens
ctttaaaataataag

SEQ ID NO: 1353295 - DNA, 15 bp, Homo sapiens
tctttaaaataataa

SEQ ID NO: 1353296 - DNA, 15 bp, Homo sapiens
atctttaaaataata

SEQ ID NO: 1353297 - DNA, 15 bp, Homo sapiens
gatctttaaaataat

SEQ ID NO: 1353298 - DNA, 15 bp, Homo sapiens
tgatctttaaaataa

SEQ ID NO: 1353299 - DNA, 15 bp, Homo sapiens
atgatctttaaaata

SEQ ID NO: 1353300 - DNA, 15 bp, Homo sapiens
aatgatctttaaaat

SEQ ID NO: 1353301 - DNA, 15 bp, Homo sapiens
caatgatctttaaaa

SEQ ID NO: 1353302 - DNA, 15 bp, Homo sapiens
gcaatgatctttaaa

SEQ ID NO: 1353303 - DNA, 15 bp, Homo sapiens
ggcaatgatctttaa

SEQ ID NO: 1353304 - DNA, 15 bp, Homo sapiens
aggcaatgatcttta

SEQ ID NO: 1353305 - DNA, 15 bp, Homo sapiens
caggcaatgatcttt

SEQ ID NO: 1353306 - DNA, 15 bp, Homo sapiens
ccaggcaatgatctt

SEQ ID NO: 1353307 - DNA, 15 bp, Homo sapiens
accaggcaatgatct

SEQ ID NO: 1353308 - DNA, 15 bp, Homo sapiens
taccaggcaatgatc

SEQ ID NO: 1353309 - DNA, 15 bp, Homo sapiens
ttaccaggcaatgat

SEQ ID NO: 1353310 - DNA, 15 bp, Homo sapiens
tttaccaggcaatga

SEQ ID NO: 1353311 - DNA, 15 bp, Homo sapiens
gtttaccaggcaatg

SEQ ID NO: 1353312 - DNA, 15 bp, Homo sapiens
agtttaccaggcaat

SEQ ID NO: 1353313 - DNA, 15 bp, Homo sapiens
tagtttaccaggcaa

SEQ ID NO: 1353314 - DNA, 15 bp, Homo sapiens
atagtttaccaggca

SEQ ID NO: 1353315 - DNA, 15 bp, Homo sapiens
tatagtttaccaggc

SEQ ID NO: 1353316 - DNA, 15 bp, Homo sapiens
ttatagtttaccagg

SEQ ID NO: 1353317 - DNA, 15 bp, Homo sapiens
attatagtttaccag

SEQ ID NO: 1353318 - DNA, 15 bp, Homo sapiens
tattatagtttacca

SEQ ID NO: 1353319 - DNA, 15 bp, Homo sapiens
ttattatagtttacc

SEQ ID NO: 1353320 - DNA, 15 bp, Homo sapiens
attattatagtttac

SEQ ID NO: 1353321 - DNA, 15 bp, Homo sapiens
aattattatagttta

SEQ ID NO: 1353322 - DNA, 15 bp, Homo sapiens
taattattatagttt

SEQ ID NO: 1353323 - DNA, 15 bp, Homo sapiens
ataattattatagtt

SEQ ID NO: 1353324 - DNA, 15 bp, Homo sapiens
tataattattatagt

SEQ ID NO: 1353325 - DNA, 15 bp, Homo sapiens
gtataattattatag

SEQ ID NO: 1353326 - DNA, 15 bp, Homo sapiens
tgtataattattata

SEQ ID NO: 1353327 - DNA, 15 bp, Homo sapiens
ttgtataattattat

SEQ ID NO: 1353328 - DNA, 15 bp, Homo sapiens
tttgtataattatta

SEQ ID NO: 1353329 - DNA, 15 bp, Homo sapiens
atttgtataattatt

SEQ ID NO: 1353330 - DNA, 15 bp, Homo sapiens
aatttgtataattat

SEQ ID NO: 1353331 - DNA, 15 bp, Homo sapiens
gaatttgtataatta

SEQ ID NO: 1353332 - DNA, 15 bp, Homo sapiens
tgaatttgtataatt

SEQ ID NO: 1353333 - DNA, 15 bp, Homo sapiens
ttgaatttgtataat

SEQ ID NO: 1353334 - DNA, 15 bp, Homo sapiens
attgaatttgtataa

SEQ ID NO: 1353335 - DNA, 15 bp, Homo sapiens
tattgaatttgtata

SEQ ID NO: 1353336 - DNA, 15 bp, Homo sapiens
gtattgaatttgtat

SEQ ID NO: 1353337 - DNA, 15 bp, Homo sapiens
agtattgaatttgta

SEQ ID NO: 1353338 - DNA, 15 bp, Homo sapiens
aagtattgaatttgt

SEQ ID NO: 1353339 - DNA, 15 bp, Homo sapiens
gaagtattgaatttg

SEQ ID NO: 1353340 - DNA, 15 bp, Homo sapiens
tgaagtattgaattt

SEQ ID NO: 1353341 - DNA, 15 bp, Homo sapiens
ctgaagtattgaatt

SEQ ID NO: 1353342 - DNA, 15 bp, Homo sapiens
actgaagtattgaat

SEQ ID NO: 1353343 - DNA, 15 bp, Homo sapiens
aactgaagtattgaa

SEQ ID NO: 1353344 - DNA, 15 bp, Homo sapiens
gaactgaagtattga

SEQ ID NO: 1353345 - DNA, 15 bp, Homo sapiens
agaactgaagtattg

SEQ ID NO: 1353346 - DNA, 15 bp, Homo sapiens
aagaactgaagtatt

SEQ ID NO: 1353347 - DNA, 15 bp, Homo sapiens
caagaactgaagtat

SEQ ID NO: 1353348 - DNA, 15 bp, Homo sapiens
acaagaactgaagta

SEQ ID NO: 1353349 - DNA, 15 bp, Homo sapiens
aacaagaactgaagt

SEQ ID NO: 1353350 - DNA, 15 bp, Homo sapiens
gaacaagaactgaag

SEQ ID NO: 1353351 - DNA, 15 bp, Homo sapiens
tgaacaagaactgaa

SEQ ID NO: 1353352 - DNA, 15 bp, Homo sapiens
atgaacaagaactga

SEQ ID NO: 1353353 - DNA, 15 bp, Homo sapiens
aatgaacaagaactg

SEQ ID NO: 1353354 - DNA, 15 bp, Homo sapiens
taatgaacaagaact

SEQ ID NO: 1353355 - DNA, 15 bp, Homo sapiens
gtaatgaacaagaac

SEQ ID NO: 1353356 - DNA, 15 bp, Homo sapiens
ggtaatgaacaagaa

SEQ ID NO: 1353357 - DNA, 15 bp, Homo sapiens
aggtaatgaacaaga

SEQ ID NO: 1353358 - DNA, 15 bp, Homo sapiens
taggtaatgaacaag

SEQ ID NO: 1353359 - DNA, 15 bp, Homo sapiens
gtaggtaatgaacaa

SEQ ID NO: 1353360 - DNA, 15 bp, Homo sapiens
agtaggtaatgaaca

SEQ ID NO: 1353361 - DNA, 15 bp, Homo sapiens
tagtaggtaatgaac

SEQ ID NO: 1353362 - DNA, 15 bp, Homo sapiens
ttagtaggtaatgaa

SEQ ID NO: 1353363 - DNA, 15 bp, Homo sapiens
attagtaggtaatga

SEQ ID NO: 1353364 - DNA, 15 bp, Homo sapiens
aattagtaggtaatg

SEQ ID NO: 1353365 - DNA, 15 bp, Homo sapiens
gaattagtaggtaat

SEQ ID NO: 1353366 - DNA, 15 bp, Homo sapiens
tgaattagtaggtaa

SEQ ID NO: 1353367 - DNA, 15 bp, Homo sapiens
atgaattagtaggta

SEQ ID NO: 1353368 - DNA, 15 bp, Homo sapiens
tatgaattagtaggt

SEQ ID NO: 1353369 - DNA, 15 bp, Homo sapiens
ctatgaattagtagg

SEQ ID NO: 1353370 - DNA, 15 bp, Homo sapiens
actatgaattagtag

SEQ ID NO: 1353371 - DNA, 15 bp, Homo sapiens
gactatgaattagta

SEQ ID NO: 1353372 - DNA, 15 bp, Homo sapiens
tgactatgaattagt

SEQ ID NO: 1353373 - DNA, 15 bp, Homo sapiens
atgactatgaattag

SEQ ID NO: 1353374 - DNA, 15 bp, Homo sapiens
aatgactatgaatta

SEQ ID NO: 1353375 - DNA, 15 bp, Homo sapiens
taatgactatgaatt

SEQ ID NO: 1353376 - DNA, 15 bp, Homo sapiens
ctaatgactatgaat

SEQ ID NO: 1353377 - DNA, 15 bp, Homo sapiens
actaatgactatgaa

SEQ ID NO: 1353378 - DNA, 15 bp, Homo sapiens
tactaatgactatga

SEQ ID NO: 1353379 - DNA, 15 bp, Homo sapiens
gtactaatgactatg

SEQ ID NO: 1353380 - DNA, 15 bp, Homo sapiens
ggtactaatgactat

SEQ ID NO: 1353381 - DNA, 15 bp, Homo sapiens
tggtactaatgacta

SEQ ID NO: 1353382 - DNA, 15 bp, Homo sapiens
gtggtactaatgact

SEQ ID NO: 1353383 - DNA, 15 bp, Homo sapiens
tgtggtactaatgac

SEQ ID NO: 1353384 - DNA, 15 bp, Homo sapiens
ttgtggtactaatga

SEQ ID NO: 1353385 - DNA, 15 bp, Homo sapiens
tttgtggtactaatg

SEQ ID NO: 1353386 - DNA, 15 bp, Homo sapiens
gtttgtggtactaat

SEQ ID NO: 1353387 - DNA, 15 bp, Homo sapiens
tgtttgtggtactaa

SEQ ID NO: 1353388 - DNA, 15 bp, Homo sapiens
ttgtttgtggtacta

SEQ ID NO: 1353389 - DNA, 15 bp, Homo sapiens
tttgtttgtggtact

SEQ ID NO: 1353390 - DNA, 15 bp, Homo sapiens
ttttgtttgtggtac

SEQ ID NO: 1353391 - DNA, 15 bp, Homo sapiens
attttgtttgtggta

SEQ ID NO: 1353392 - DNA, 15 bp, Homo sapiens
cattttgtttgtggt

SEQ ID NO: 1353393 - DNA, 15 bp, Homo sapiens
ccattttgtttgtgg

SEQ ID NO: 1353394 - DNA, 15 bp, Homo sapiens
accattttgtttgtg

SEQ ID NO: 1353395 - DNA, 15 bp, Homo sapiens
aaccattttgtttgt

SEQ ID NO: 1353396 - DNA, 15 bp, Homo sapiens
taaccattttgtttg

SEQ ID NO: 1353397 - DNA, 15 bp, Homo sapiens
ataaccattttgttt

SEQ ID NO: 1353398 - DNA, 15 bp, Homo sapiens
aataaccattttgtt

SEQ ID NO: 1353399 - DNA, 15 bp, Homo sapiens
taataaccattttgt

SEQ ID NO: 1353400 - DNA, 15 bp, Homo sapiens
ttaataaccattttg

SEQ ID NO: 1353401 - DNA, 15 bp, Homo sapiens
gttaataaccatttt

SEQ ID NO: 1353402 - DNA, 15 bp, Homo sapiens
ggttaataaccattt

SEQ ID NO: 1353403 - DNA, 15 bp, Homo sapiens
tggttaataaccatt

SEQ ID NO: 1353404 - DNA, 15 bp, Homo sapiens
ttggttaataaccat

SEQ ID NO: 1353405 - DNA, 15 bp, Homo sapiens
tttggttaataacca

SEQ ID NO: 1353406 - DNA, 15 bp, Homo sapiens
ttttggttaataacc

SEQ ID NO: 1353407 - DNA, 15 bp, Homo sapiens
cttttggttaataac

SEQ ID NO: 1353408 - DNA, 15 bp, Homo sapiens
gcttttggttaataa

SEQ ID NO: 1353409 - DNA, 15 bp, Homo sapiens
ggcttttggttaata

SEQ ID NO: 1353410 - DNA, 15 bp, Homo sapiens
tggcttttggttaat

SEQ ID NO: 1353411 - DNA, 15 bp, Homo sapiens
ctggcttttggttaa

SEQ ID NO: 1353412 - DNA, 15 bp, Homo sapiens
tctggcttttggtta

SEQ ID NO: 1353413 - DNA, 15 bp, Homo sapiens
ctctggcttttggtt

SEQ ID NO: 1353414 - DNA, 15 bp, Homo sapiens
actctggcttttggt

SEQ ID NO: 1353415 - DNA, 15 bp, Homo sapiens
aactctggcttttgg

SEQ ID NO: 1353416 - DNA, 15 bp, Homo sapiens
aaactctggcttttg

SEQ ID NO: 1353417 - DNA, 15 bp, Homo sapiens
gaaactctggctttt

SEQ ID NO: 1353418 - DNA, 15 bp, Homo sapiens
tgaaactctggcttt

SEQ ID NO: 1353419 - DNA, 15 bp, Homo sapiens
atgaaactctggctt

SEQ ID NO: 1353420 - DNA, 15 bp, Homo sapiens
tatgaaactctggct

SEQ ID NO: 1353421 - DNA, 15 bp, Homo sapiens
ctatgaaactctggc

SEQ ID NO: 1353422 - DNA, 15 bp, Homo sapiens
actatgaaactctgg

SEQ ID NO: 1353423 - DNA, 15 bp, Homo sapiens
aactatgaaactctg

SEQ ID NO: 1353424 - DNA, 15 bp, Homo sapiens
aaactatgaaactct

SEQ ID NO: 1353425 - DNA, 15 bp, Homo sapiens
gaaactatgaaactc

SEQ ID NO: 1353426 - DNA, 15 bp, Homo sapiens
tgaaactatgaaact

SEQ ID NO: 1353427 - DNA, 15 bp, Homo sapiens
atgaaactatgaaac

SEQ ID NO: 1353428 - DNA, 15 bp, Homo sapiens
aatgaaactatgaaa

SEQ ID NO: 1353429 - DNA, 15 bp, Homo sapiens
caatgaaactatgaa

SEQ ID NO: 1353430 - DNA, 15 bp, Homo sapiens
tcaatgaaactatga

SEQ ID NO: 1353431 - DNA, 15 bp, Homo sapiens
gtcaatgaaactatg

SEQ ID NO: 1353432 - DNA, 15 bp, Homo sapiens
tgtcaatgaaactat

SEQ ID NO: 1353433 - DNA, 15 bp, Homo sapiens
atgtcaatgaaacta

SEQ ID NO: 1353434 - DNA, 15 bp, Homo sapiens
gatgtcaatgaaact

SEQ ID NO: 1353435 - DNA, 15 bp, Homo sapiens
tgatgtcaatgaaac

SEQ ID NO: 1353436 - DNA, 15 bp, Homo sapiens
gtgatgtcaatgaaa

SEQ ID NO: 1353437 - DNA, 15 bp, Homo sapiens
agtgatgtcaatgaa

SEQ ID NO: 1353438 - DNA, 15 bp, Homo sapiens
cagtgatgtcaatga

SEQ ID NO: 1353439 - DNA, 15 bp, Homo sapiens
acagtgatgtcaatg

SEQ ID NO: 1353440 - DNA, 15 bp, Homo sapiens
gacagtgatgtcaat

SEQ ID NO: 1353441 - DNA, 15 bp, Homo sapiens
tgacagtgatgtcaa

SEQ ID NO: 1353442 - DNA, 15 bp, Homo sapiens
atgacagtgatgtca

SEQ ID NO: 1353443 - DNA, 15 bp, Homo sapiens
aatgacagtgatgtc

SEQ ID NO: 1353444 - DNA, 15 bp, Homo sapiens
taatgacagtgatgt

SEQ ID NO: 1353445 - DNA, 15 bp, Homo sapiens
ctaatgacagtgatg

SEQ ID NO: 1353446 - DNA, 15 bp, Homo sapiens
tctaatgacagtgat

SEQ ID NO: 1353447 - DNA, 15 bp, Homo sapiens
ctctaatgacagtga

SEQ ID NO: 1353448 - DNA, 15 bp, Homo sapiens
tctctaatgacagtg

SEQ ID NO: 1353449 - DNA, 15 bp, Homo sapiens
atctctaatgacagt

SEQ ID NO: 1353450 - DNA, 15 bp, Homo sapiens
catctctaatgacag

SEQ ID NO: 1353451 - DNA, 15 bp, Homo sapiens
gcatctctaatgaca

SEQ ID NO: 1353452 - DNA, 15 bp, Homo sapiens
tgcatctctaatgac

SEQ ID NO: 1353453 - DNA, 15 bp, Homo sapiens
ctgcatctctaatga

SEQ ID NO: 1353454 - DNA, 15 bp, Homo sapiens
tctgcatctctaatg

SEQ ID NO: 1353455 - DNA, 15 bp, Homo sapiens
ttctgcatctctaat

SEQ ID NO: 1353456 - DNA, 15 bp, Homo sapiens
cttctgcatctctaa

SEQ ID NO: 1353457 - DNA, 15 bp, Homo sapiens
tcttctgcatctcta

SEQ ID NO: 1353458 - DNA, 15 bp, Homo sapiens
gtcttctgcatctct

SEQ ID NO: 1353459 - DNA, 15 bp, Homo sapiens
tgtcttctgcatctc

SEQ ID NO: 1353460 - DNA, 15 bp, Homo sapiens
atgtcttctgcatct

SEQ ID NO: 1353461 - DNA, 15 bp, Homo sapiens
tatgtcttctgcatc

SEQ ID NO: 1353462 - DNA, 15 bp, Homo sapiens
atatgtcttctgcat

SEQ ID NO: 1353463 - DNA, 15 bp, Homo sapiens
aatatgtcttctgca

SEQ ID NO: 1353464 - DNA, 15 bp, Homo sapiens
aaatatgtcttctgc

SEQ ID NO: 1353465 - DNA, 15 bp, Homo sapiens
gaaatatgtcttctg

SEQ ID NO: 1353466 - DNA, 15 bp, Homo sapiens
tgaaatatgtcttct

SEQ ID NO: 1353467 - DNA, 15 bp, Homo sapiens
gtgaaatatgtcttc

SEQ ID NO: 1353468 - DNA, 15 bp, Homo sapiens
ggtgaaatatgtctt

SEQ ID NO: 1353469 - DNA, 15 bp, Homo sapiens
aggtgaaatatgtct

SEQ ID NO: 1353470 - DNA, 15 bp, Homo sapiens
caggtgaaatatgtc

SEQ ID NO: 1353471 - DNA, 15 bp, Homo sapiens
acaggtgaaatatgt

SEQ ID NO: 1353472 - DNA, 15 bp, Homo sapiens
cacaggtgaaatatg

SEQ ID NO: 1353473 - DNA, 15 bp, Homo sapiens
gcacaggtgaaatat

SEQ ID NO: 1353474 - DNA, 15 bp, Homo sapiens
tgcacaggtgaaata

SEQ ID NO: 1353475 - DNA, 15 bp, Homo sapiens
gtgcacaggtgaaat

SEQ ID NO: 1353476 - DNA, 15 bp, Homo sapiens
agtgcacaggtgaaa

SEQ ID NO: 1353477 - DNA, 15 bp, Homo sapiens
aagtgcacaggtgaa

SEQ ID NO: 1353478 - DNA, 15 bp, Homo sapiens
gaagtgcacaggtga

SEQ ID NO: 1353479 - DNA, 15 bp, Homo sapiens
tgaagtgcacaggtg

SEQ ID NO: 1353480 - DNA, 15 bp, Homo sapiens
atgaagtgcacaggt

SEQ ID NO: 1353481 - DNA, 15 bp, Homo sapiens
catgaagtgcacagg

SEQ ID NO: 1353482 - DNA, 15 bp, Homo sapiens
acatgaagtgcacag

SEQ ID NO: 1353483 - DNA, 15 bp, Homo sapiens
aacatgaagtgcaca

SEQ ID NO: 1353484 - DNA, 15 bp, Homo sapiens
taacatgaagtgcac

SEQ ID NO: 1353485 - DNA, 15 bp, Homo sapiens
ataacatgaagtgca

SEQ ID NO: 1353486 - DNA, 15 bp, Homo sapiens
cataacatgaagtgc

SEQ ID NO: 1353487 - DNA, 15 bp, Homo sapiens
acataacatgaagtg

SEQ ID NO: 1353488 - DNA, 15 bp, Homo sapiens
tacataacatgaagt

SEQ ID NO: 1353489 - DNA, 15 bp, Homo sapiens
atacataacatgaag

SEQ ID NO: 1353490 - DNA, 15 bp, Homo sapiens
catacataacatgaa

SEQ ID NO: 1353491 - DNA, 15 bp, Homo sapiens
ccatacataacatga

SEQ ID NO: 1353492 - DNA, 15 bp, Homo sapiens
accatacataacatg

SEQ ID NO: 1353493 - DNA, 15 bp, Homo sapiens
aaccatacataacat

SEQ ID NO: 1353494 - DNA, 15 bp, Homo sapiens
aaaccatacataaca

SEQ ID NO: 1353495 - DNA, 15 bp, Homo sapiens
caaaccatacataac

SEQ ID NO: 1353496 - DNA, 15 bp, Homo sapiens
tcaaaccatacataa

SEQ ID NO: 1353497 - DNA, 15 bp, Homo sapiens
ctcaaaccatacata

SEQ ID NO: 1353498 - DNA, 15 bp, Homo sapiens
gctcaaaccatacat

SEQ ID NO: 1353499 - DNA, 15 bp, Homo sapiens
tgctcaaaccataca

SEQ ID NO: 1353500 - DNA, 15 bp, Homo sapiens
atgctcaaaccatac

SEQ ID NO: 1353501 - DNA, 15 bp, Homo sapiens
aatgctcaaaccata

SEQ ID NO: 1353502 - DNA, 15 bp, Homo sapiens
aaatgctcaaaccat

SEQ ID NO: 1353503 - DNA, 15 bp, Homo sapiens
aaaatgctcaaacca

SEQ ID NO: 1353504 - DNA, 15 bp, Homo sapiens
aaaaatgctcaaacc

SEQ ID NO: 1353505 - DNA, 15 bp, Homo sapiens
gaaaaatgctcaaac

SEQ ID NO: 1353506 - DNA, 15 bp, Homo sapiens
ggaaaaatgctcaaa

SEQ ID NO: 1353507 - DNA, 15 bp, Homo sapiens
gggaaaaatgctcaa

SEQ ID NO: 1353508 - DNA, 15 bp, Homo sapiens
tgggaaaaatgctca

SEQ ID NO: 1353509 - DNA, 15 bp, Homo sapiens
ttgggaaaaatgctc

SEQ ID NO: 1353510 - DNA, 15 bp, Homo sapiens
cttgggaaaaatgct

SEQ ID NO: 1353511 - DNA, 15 bp, Homo sapiens
gcttgggaaaaatgc

SEQ ID NO: 1353512 - DNA, 15 bp, Homo sapiens
agcttgggaaaaatg

SEQ ID NO: 1353513 - DNA, 15 bp, Homo sapiens
tagcttgggaaaaat

SEQ ID NO: 1353514 - DNA, 15 bp, Homo sapiens
ttagcttgggaaaaa

SEQ ID NO: 1353515 - DNA, 15 bp, Homo sapiens
tttagcttgggaaaa

SEQ ID NO: 1353516 - DNA, 15 bp, Homo sapiens
ctttagcttgggaaa

SEQ ID NO: 1353517 - DNA, 15 bp, Homo sapiens
actttagcttgggaa

SEQ ID NO: 1353518 - DNA, 15 bp, Homo sapiens
tactttagcttggga

SEQ ID NO: 1353519 - DNA, 15 bp, Homo sapiens
ttactttagcttggg

SEQ ID NO: 1353520 - DNA, 15 bp, Homo sapiens
attactttagcttgg

SEQ ID NO: 1353521 - DNA, 15 bp, Homo sapiens
aattactttagcttg

SEQ ID NO: 1353522 - DNA, 15 bp, Homo sapiens
aaattactttagctt

SEQ ID NO: 1353523 - DNA, 15 bp, Homo sapiens
aaaattactttagct

SEQ ID NO: 1353524 - DNA, 15 bp, Homo sapiens
caaaattactttagc

SEQ ID NO: 1353525 - DNA, 15 bp, Homo sapiens
tcaaaattactttag

SEQ ID NO: 1353526 - DNA, 15 bp, Homo sapiens
ttcaaaattacttta

SEQ ID NO: 1353527 - DNA, 15 bp, Homo sapiens
gttcaaaattacttt

SEQ ID NO: 1353528 - DNA, 15 bp, Homo sapiens
agttcaaaattactt

SEQ ID NO: 1353529 - DNA, 15 bp, Homo sapiens
aagttcaaaattact

SEQ ID NO: 1353530 - DNA, 15 bp, Homo sapiens
aaagttcaaaattac

SEQ ID NO: 1353531 - DNA, 15 bp, Homo sapiens
caaagttcaaaatta

SEQ ID NO: 1353532 - DNA, 15 bp, Homo sapiens
tcaaagttcaaaatt

SEQ ID NO: 1353533 - DNA, 15 bp, Homo sapiens
atcaaagttcaaaat

SEQ ID NO: 1353534 - DNA, 15 bp, Homo sapiens
aatcaaagttcaaaa

SEQ ID NO: 1353535 - DNA, 15 bp, Homo sapiens
aaatcaaagttcaaa

SEQ ID NO: 1353536 - DNA, 15 bp, Homo sapiens
aaaatcaaagttcaa

SEQ ID NO: 1353537 - DNA, 15 bp, Homo sapiens
taaaatcaaagttca

SEQ ID NO: 1353538 - DNA, 15 bp, Homo sapiens
ttaaaatcaaagttc

SEQ ID NO: 1353539 - DNA, 15 bp, Homo sapiens
tttaaaatcaaagtt

SEQ ID NO: 1353540 - DNA, 15 bp, Homo sapiens
atttaaaatcaaagt

SEQ ID NO: 1353541 - DNA, 15 bp, Homo sapiens
aatttaaaatcaaag

SEQ ID NO: 1353542 - DNA, 15 bp, Homo sapiens
taatttaaaatcaaa

SEQ ID NO: 1353543 - DNA, 15 bp, Homo sapiens
ctaatttaaaatcaa

SEQ ID NO: 1353544 - DNA, 15 bp, Homo sapiens
tctaatttaaaatca

SEQ ID NO: 1353545 - DNA, 15 bp, Homo sapiens
atctaatttaaaatc

SEQ ID NO: 1353546 - DNA, 15 bp, Homo sapiens
tatctaatttaaaat

SEQ ID NO: 1353547 - DNA, 15 bp, Homo sapiens
atatctaatttaaaa

SEQ ID NO: 1353548 - DNA, 15 bp, Homo sapiens
tatatctaatttaaa

SEQ ID NO: 1353549 - DNA, 15 bp, Homo sapiens
ttatatctaatttaa

SEQ ID NO: 1353550 - DNA, 15 bp, Homo sapiens
gttatatctaattta

SEQ ID NO: 1353551 - DNA, 15 bp, Homo sapiens
tgttatatctaattt

SEQ ID NO: 1353552 - DNA, 15 bp, Homo sapiens
atgttatatctaatt

SEQ ID NO: 1353553 - DNA, 15 bp, Homo sapiens
tatgttatatctaat

SEQ ID NO: 1353554 - DNA, 15 bp, Homo sapiens
ttatgttatatctaa

SEQ ID NO: 1353555 - DNA, 15 bp, Homo sapiens
attatgttatatcta

SEQ ID NO: 1353556 - DNA, 15 bp, Homo sapiens
aattatgttatatct

SEQ ID NO: 1353557 - DNA, 15 bp, Homo sapiens
aaattatgttatatc

SEQ ID NO: 1353558 - DNA, 15 bp, Homo sapiens
taaattatgttatat

SEQ ID NO: 1353559 - DNA, 15 bp, Homo sapiens
ataaattatgttata

SEQ ID NO: 1353560 - DNA, 15 bp, Homo sapiens
aataaattatgttat

SEQ ID NO: 1353561 - DNA, 15 bp, Homo sapiens
caataaattatgtta

SEQ ID NO: 1353562 - DNA, 15 bp, Homo sapiens
acaataaattatgtt

SEQ ID NO: 1353563 - DNA, 15 bp, Homo sapiens
aacaataaattatgt

SEQ ID NO: 1353564 - DNA, 15 bp, Homo sapiens
aaacaataaattatg

SEQ ID NO: 1353565 - DNA, 15 bp, Homo sapiens
caaacaataaattat

SEQ ID NO: 1353566 - DNA, 15 bp, Homo sapiens
tcaaacaataaatta

SEQ ID NO: 1353567 - DNA, 15 bp, Homo sapiens
ctcaaacaataaatt

SEQ ID NO: 1353568 - DNA, 15 bp, Homo sapiens
actcaaacaataaat

SEQ ID NO: 1353569 - DNA, 15 bp, Homo sapiens
tactcaaacaataaa

SEQ ID NO: 1353570 - DNA, 15 bp, Homo sapiens
gtactcaaacaataa

SEQ ID NO: 1353571 - DNA, 15 bp, Homo sapiens
agtactcaaacaata

SEQ ID NO: 1353572 - DNA, 15 bp, Homo sapiens
aagtactcaaacaat

SEQ ID NO: 1353573 - DNA, 15 bp, Homo sapiens
aaagtactcaaacaa

SEQ ID NO: 1353574 - DNA, 15 bp, Homo sapiens
taaagtactcaaaca

SEQ ID NO: 1353575 - DNA, 15 bp, Homo sapiens
ataaagtactcaaac

SEQ ID NO: 1353576 - DNA, 15 bp, Homo sapiens
cataaagtactcaaa

SEQ ID NO: 1353577 - DNA, 15 bp, Homo sapiens
acataaagtactcaa

SEQ ID NO: 1353578 - DNA, 15 bp, Homo sapiens
gacataaagtactca

SEQ ID NO: 1353579 - DNA, 15 bp, Homo sapiens
ggacataaagtactc

SEQ ID NO: 1353580 - DNA, 15 bp, Homo sapiens
aggacataaagtact

SEQ ID NO: 1353581 - DNA, 15 bp, Homo sapiens
aaggacataaagtac

SEQ ID NO: 1353582 - DNA, 15 bp, Homo sapiens
caaggacataaagta

SEQ ID NO: 1353583 - DNA, 15 bp, Homo sapiens
tcaaggacataaagt

SEQ ID NO: 1353584 - DNA, 15 bp, Homo sapiens
ttcaaggacataaag

SEQ ID NO: 1353585 - DNA, 15 bp, Homo sapiens
tttcaaggacataaa

SEQ ID NO: 1353586 - DNA, 15 bp, Homo sapiens
atttcaaggacataa

SEQ ID NO: 1353587 - DNA, 15 bp, Homo sapiens
gatttcaaggacata

SEQ ID NO: 1353588 - DNA, 15 bp, Homo sapiens
agatttcaaggacat

SEQ ID NO: 1353589 - DNA, 15 bp, Homo sapiens
cagatttcaaggaca

SEQ ID NO: 1353590 - DNA, 15 bp, Homo sapiens
acagatttcaaggac

SEQ ID NO: 1353591 - DNA, 15 bp, Homo sapiens
cacagatttcaagga

SEQ ID NO: 1353592 - DNA, 15 bp, Homo sapiens
acacagatttcaagg

SEQ ID NO: 1353593 - DNA, 15 bp, Homo sapiens
gacacagatttcaag

SEQ ID NO: 1353594 - DNA, 15 bp, Homo sapiens
agacacagatttcaa

SEQ ID NO: 1353595 - DNA, 15 bp, Homo sapiens
gagacacagatttca

SEQ ID NO: 1353596 - DNA, 15 bp, Homo sapiens
tgagacacagatttc

SEQ ID NO: 1353597 - DNA, 15 bp, Homo sapiens
ctgagacacagattt

SEQ ID NO: 1353598 - DNA, 15 bp, Homo sapiens
tctgagacacagatt

SEQ ID NO: 1353599 - DNA, 15 bp, Homo sapiens
atctgagacacagat

SEQ ID NO: 1353600 - DNA, 15 bp, Homo sapiens
tatctgagacacaga

SEQ ID NO: 1353601 - DNA, 15 bp, Homo sapiens
gtatctgagacacag

SEQ ID NO: 1353602 - DNA, 15 bp, Homo sapiens
tgtatctgagacaca

SEQ ID NO: 1353603 - DNA, 15 bp, Homo sapiens
ttgtatctgagacac

SEQ ID NO: 1353604 - DNA, 15 bp, Homo sapiens
gttgtatctgagaca

SEQ ID NO: 1353605 - DNA, 15 bp, Homo sapiens
ggttgtatctgagac

SEQ ID NO: 1353606 - DNA, 15 bp, Homo sapiens
tggttgtatctgaga

SEQ ID NO: 1353607 - DNA, 15 bp, Homo sapiens
atggttgtatctgag

SEQ ID NO: 1353608 - DNA, 15 bp, Homo sapiens
tatggttgtatctga

SEQ ID NO: 1353609 - DNA, 15 bp, Homo sapiens
ttatggttgtatctg

SEQ ID NO: 1353610 - DNA, 15 bp, Homo sapiens
cttatggttgtatct

SEQ ID NO: 1353611 - DNA, 15 bp, Homo sapiens
acttatggttgtatc

SEQ ID NO: 1353612 - DNA, 15 bp, Homo sapiens
gacttatggttgtat

SEQ ID NO: 1353613 - DNA, 15 bp, Homo sapiens
tgacttatggttgta

SEQ ID NO: 1353614 - DNA, 15 bp, Homo sapiens
ctgacttatggttgt

SEQ ID NO: 1353615 - DNA, 15 bp, Homo sapiens
actgacttatggttg

SEQ ID NO: 1353616 - DNA, 15 bp, Homo sapiens
cactgacttatggtt

SEQ ID NO: 1353617 - DNA, 15 bp, Homo sapiens
acactgacttatggt

SEQ ID NO: 1353618 - DNA, 15 bp, Homo sapiens
aacactgacttatgg

SEQ ID NO: 1353619 - DNA, 15 bp, Homo sapiens
aaacactgacttatg

SEQ ID NO: 1353620 - DNA, 15 bp, Homo sapiens
caaacactgacttat

SEQ ID NO: 1353621 - DNA, 15 bp, Homo sapiens
ccaaacactgactta

SEQ ID NO: 1353622 - DNA, 15 bp, Homo sapiens
accaaacactgactt

SEQ ID NO: 1353623 - DNA, 15 bp, Homo sapiens
aaccaaacactgact

SEQ ID NO: 1353624 - DNA, 15 bp, Homo sapiens
aaaccaaacactgac

SEQ ID NO: 1353625 - DNA, 15 bp, Homo sapiens
gaaaccaaacactga

SEQ ID NO: 1353626 - DNA, 15 bp, Homo sapiens
agaaaccaaacactg

SEQ ID NO: 1353627 - DNA, 15 bp, Homo sapiens
aagaaaccaaacact

SEQ ID NO: 1353628 - DNA, 15 bp, Homo sapiens
gaagaaaccaaacac

SEQ ID NO: 1353629 - DNA, 15 bp, Homo sapiens
ggaagaaaccaaaca

SEQ ID NO: 1353630 - DNA, 15 bp, Homo sapiens
tggaagaaaccaaac

SEQ ID NO: 1353631 - DNA, 15 bp, Homo sapiens
ttggaagaaaccaaa

SEQ ID NO: 1353632 - DNA, 15 bp, Homo sapiens
atttggaagaaacca

SEQ ID NO: 1353633 - DNA, 15 bp, Homo sapiens
aatttggaagaaacc

SEQ ID NO: 1353634 - DNA, 15 bp, Homo sapiens
aaatttggaagaaac

SEQ ID NO: 1353635 - DNA, 15 bp, Homo sapiens
aaaatttggaagaaa

SEQ ID NO: 1353636 - DNA, 15 bp, Homo sapiens
gaaaatttggaagaa

SEQ ID NO: 1353637 - DNA, 15 bp, Homo sapiens
ggaaaatttggaaga

SEQ ID NO: 1353638 - DNA, 15 bp, Homo sapiens
tggaaaatttggaag

SEQ ID NO: 1353639 - DNA, 15 bp, Homo sapiens
ttggaaaatttggaa

SEQ ID NO: 1353640 - DNA, 15 bp, Homo sapiens
tttggaaaatttgga

SEQ ID NO: 1353641 - DNA, 15 bp, Homo sapiens
gtttggaaaatttgg

SEQ ID NO: 1353642 - DNA, 15 bp, Homo sapiens
ggtttggaaaatttg

SEQ ID NO: 1353643 - DNA, 15 bp, Homo sapiens
gggtttggaaaattt

SEQ ID NO: 1353644 - DNA, 15 bp, Homo sapiens
tgggtttggaaaatt

SEQ ID NO: 1353645 - DNA, 15 bp, Homo sapiens
ctgggtttggaaaat

SEQ ID NO: 1353646 - DNA, 15 bp, Homo sapiens
gctgggtttggaaaa

SEQ ID NO: 1353647 - DNA, 15 bp, Homo sapiens
ggctgggtttggaaa

SEQ ID NO: 1353648 - DNA, 15 bp, Homo sapiens
tgggctgggtttgga

SEQ ID NO: 1353649 - DNA, 15 bp, Homo sapiens
ctgggctgggtttgg

SEQ ID NO: 1353650 - DNA, 15 bp, Homo sapiens
cctgggctgggtttg

SEQ ID NO: 1353651 - DNA, 15 bp, Homo sapiens
ccctgggctgggttt

SEQ ID NO: 1353652 - DNA, 15 bp, Homo sapiens
tccctgggctgggtt

SEQ ID NO: 1353653 - DNA, 15 bp, Homo sapiens
gtccctgggctgggt

SEQ ID NO: 1353654 - DNA, 15 bp, Homo sapiens
agtccctgggctggg

SEQ ID NO: 1353655 - DNA, 15 bp, Homo sapiens
aagtccctgggctgg

SEQ ID NO: 1353656 - DNA, 15 bp, Homo sapiens
taagtccctgggctg

SEQ ID NO: 1353657 - DNA, 15 bp, Homo sapiens
gtaagtccctgggct

SEQ ID NO: 1353658 - DNA, 15 bp, Homo sapiens
tgtaagtccctgggc

SEQ ID NO: 1353659 - DNA, 15 bp, Homo sapiens
ctgtaagtccctggg

SEQ ID NO: 1353660 - DNA, 15 bp, Homo sapiens
tctgtaagtccctgg

SEQ ID NO: 1353661 - DNA, 15 bp, Homo sapiens
ttctgtaagtccctg

SEQ ID NO: 1353662 - DNA, 15 bp, Homo sapiens
tttctgtaagtccct

SEQ ID NO: 1353663 - DNA, 15 bp, Homo sapiens
ttttctgtaagtccc

SEQ ID NO: 1353664 - DNA, 15 bp, Homo sapiens
attttctgtaagtcc

SEQ ID NO: 1353665 - DNA, 15 bp, Homo sapiens
aattttctgtaagtc

SEQ ID NO: 1353666 - DNA, 15 bp, Homo sapiens
caattttctgtaagt

SEQ ID NO: 1353667 - DNA, 15 bp, Homo sapiens
gcaattttctgtaag

SEQ ID NO: 1353668 - DNA, 15 bp, Homo sapiens
agcaattttctgtaa

SEQ ID NO: 1353669 - DNA, 15 bp, Homo sapiens
aagcaattttctgta

SEQ ID NO: 1353670 - DNA, 15 bp, Homo sapiens
gaagcaattttctgt

SEQ ID NO: 1353671 - DNA, 15 bp, Homo sapiens
agaagcaattttctg

SEQ ID NO: 1353672 - DNA, 15 bp, Homo sapiens
gagaagcaattttct

SEQ ID NO: 1353673 - DNA, 15 bp, Homo sapiens
tgagaagcaattttc

SEQ ID NO: 1353674 - DNA, 15 bp, Homo sapiens
ttgagaagcaatttt

SEQ ID NO: 1353675 - DNA, 15 bp, Homo sapiens
tttgagaagcaattt

SEQ ID NO: 1353676 - DNA, 15 bp, Homo sapiens
ttttgagaagcaatt

SEQ ID NO: 1353677 - DNA, 15 bp, Homo sapiens
tttttgagaagcaat

SEQ ID NO: 1353678 - DNA, 15 bp, Homo sapiens
ttttttgagaagcaa

SEQ ID NO: 1353679 - DNA, 15 bp, Homo sapiens
cttttttgagaagca

SEQ ID NO: 1353680 - DNA, 15 bp, Homo sapiens
tcttttttgagaagc

SEQ ID NO: 1353681 - DNA, 15 bp, Homo sapiens
atcttttttgagaag

SEQ ID NO: 1353682 - DNA, 15 bp, Homo sapiens
gatcttttttgagaa

SEQ ID NO: 1353683 - DNA, 15 bp, Homo sapiens
ggatcttttttgaga

SEQ ID NO: 1353684 - DNA, 15 bp, Homo sapiens
gggatcttttttgag

SEQ ID NO: 1353685 - DNA, 15 bp, Homo sapiens
agggatcttttttga

SEQ ID NO: 1353686 - DNA, 15 bp, Homo sapiens
aagggatcttttttg

SEQ ID NO: 1353687 - DNA, 15 bp, Homo sapiens
gaagggatctttttt

SEQ ID NO: 1353688 - DNA, 15 bp, Homo sapiens
tgaagggatcttttt

SEQ ID NO: 1353689 - DNA, 15 bp, Homo sapiens
ctgaagggatctttt

SEQ ID NO: 1353690 - DNA, 15 bp, Homo sapiens
gctgaagggatcttt

SEQ ID NO: 1353691 - DNA, 15 bp, Homo sapiens
tgctgaagggatctt

SEQ ID NO: 1353692 - DNA, 15 bp, Homo sapiens
atgctgaagggatct

SEQ ID NO: 1353693 - DNA, 15 bp, Homo sapiens
tatgctgaagggatc

SEQ ID NO: 1353694 - DNA, 15 bp, Homo sapiens
ttatgctgaagggat

SEQ ID NO: 1353695 - DNA, 15 bp, Homo sapiens
tttatgctgaaggga

SEQ ID NO: 1353696 - DNA, 15 bp, Homo sapiens
ttttatgctgaaggg

SEQ ID NO: 1353697 - DNA, 15 bp, Homo sapiens
tttttatgctgaagg

SEQ ID NO: 1353698 - DNA, 15 bp, Homo sapiens
atttttatgctgaag

SEQ ID NO: 1353699 - DNA, 15 bp, Homo sapiens
catttttatgctgaa

SEQ ID NO: 1353700 - DNA, 15 bp, Homo sapiens
tcatttttatgctga

SEQ ID NO: 1353701 - DNA, 15 bp, Homo sapiens
atcatttttatgctg

SEQ ID NO: 1353702 - DNA, 15 bp, Homo sapiens
tatcatttttatgct

SEQ ID NO: 1353703 - DNA, 15 bp, Homo sapiens
atatcatttttatgc

SEQ ID NO: 1353704 - DNA, 15 bp, Homo sapiens
tatatcatttttatg

SEQ ID NO: 1353705 - DNA, 15 bp, Homo sapiens
ttatatcatttttat

SEQ ID NO: 1353706 - DNA, 15 bp, Homo sapiens
attatatcattttta

SEQ ID NO: 1353707 - DNA, 15 bp, Homo sapiens
cattatatcattttt

SEQ ID NO: 1353708 - DNA, 15 bp, Homo sapiens
ccattatatcatttt

SEQ ID NO: 1353709 - DNA, 15 bp, Homo sapiens
tccattatatcattt

SEQ ID NO: 1353710 - DNA, 15 bp, Homo sapiens
atccattatatcatt

SEQ ID NO: 1353711 - DNA, 15 bp, Homo sapiens
aatccattatatcat

SEQ ID NO: 1353712 - DNA, 15 bp, Homo sapiens
caatccattatatca

SEQ ID NO: 1353713 - DNA, 15 bp, Homo sapiens
acaatccattatatc

SEQ ID NO: 1353714 - DNA, 15 bp, Homo sapiens
tacaatccattatat

SEQ ID NO: 1353715 - DNA, 15 bp, Homo sapiens
ctacaatccattata

SEQ ID NO: 1353716 - DNA, 15 bp, Homo sapiens
cctacaatccattat

SEQ ID NO: 1353717 - DNA, 15 bp, Homo sapiens
tcctacaatccatta

SEQ ID NO: 1353718 - DNA, 15 bp, Homo sapiens
ttcctacaatccatt

SEQ ID NO: 1353719 - DNA, 15 bp, Homo sapiens
gttcctacaatccat

SEQ ID NO: 1353720 - DNA, 15 bp, Homo sapiens
agttcctacaatcca

SEQ ID NO: 1353721 - DNA, 15 bp, Homo sapiens
aagttcctacaatcc

SEQ ID NO: 1353722 - DNA, 15 bp, Homo sapiens
caagttcctacaatc

SEQ ID NO: 1353723 - DNA, 15 bp, Homo sapiens
ccaagttcctacaat

SEQ ID NO: 1353724 - DNA, 15 bp, Homo sapiens
cccaagttcctacaa

SEQ ID NO: 1353725 - DNA, 15 bp, Homo sapiens
acccaagttcctaca

SEQ ID NO: 1353726 - DNA, 15 bp, Homo sapiens
cacccaagttcctac

SEQ ID NO: 1353727 - DNA, 15 bp, Homo sapiens
ccacccaagttccta

SEQ ID NO: 1353728 - DNA, 15 bp, Homo sapiens
tccacccaagttcct

SEQ ID NO: 1353729 - DNA, 15 bp, Homo sapiens
ttccacccaagttcc

SEQ ID NO: 1353730 - DNA, 15 bp, Homo sapiens
cttccacccaagttc

SEQ ID NO: 1353731 - DNA, 15 bp, Homo sapiens
tcttccacccaagtt

SEQ ID NO: 1353732 - DNA, 15 bp, Homo sapiens
ttcttccacccaagt

SEQ ID NO: 1353733 - DNA, 15 bp, Homo sapiens
attcttccacccaag

SEQ ID NO: 1353734 - DNA, 15 bp, Homo sapiens
cattcttccacccaa

SEQ ID NO: 1353735 - DNA, 15 bp, Homo sapiens
ggatttgggttatat

SEQ ID NO: 1353736 - DNA, 15 bp, Homo sapiens
gggatttgggttata

SEQ ID NO: 1353737 - DNA, 15 bp, Homo sapiens
tgggatttgggttat

SEQ ID NO: 1353738 - DNA, 15 bp, Homo sapiens
ctgggatttgggtta

SEQ ID NO: 1353739 - DNA, 15 bp, Homo sapiens
cctgggatttgggtt

SEQ ID NO: 1353740 - DNA, 15 bp, Homo sapiens
ccctgggatttgggt

SEQ ID NO: 1353741 - DNA, 15 bp, Homo sapiens
accctgggatttggg

SEQ ID NO: 1353742 - DNA, 15 bp, Homo sapiens
aaccctgggatttgg

SEQ ID NO: 1353743 - DNA, 15 bp, Homo sapiens
gaaccctgggatttg

SEQ ID NO: 1353744 - DNA, 15 bp, Homo sapiens
agaaccctgggattt

SEQ ID NO: 1353745 - DNA, 15 bp, Homo sapiens
aagaaccctgggatt

SEQ ID NO: 1353746 - DNA, 15 bp, Homo sapiens
gaagaaccctgggat

SEQ ID NO: 1353747 - DNA, 15 bp, Homo sapiens
tgaagaaccctggga

SEQ ID NO: 1353748 - DNA, 15 bp, Homo sapiens
atgaagaaccctggg

SEQ ID NO: 1353749 - DNA, 15 bp, Homo sapiens
gatgaagaaccctgg

SEQ ID NO: 1353750 - DNA, 15 bp, Homo sapiens
ggatgaagaaccctg

SEQ ID NO: 1353751 - DNA, 15 bp, Homo sapiens
aggatgaagaaccct

SEQ ID NO: 1353752 - DNA, 15 bp, Homo sapiens
gaggatgaagaaccc

SEQ ID NO: 1353753 - DNA, 15 bp, Homo sapiens
tgaggatgaagaacc

SEQ ID NO: 1353754 - DNA, 15 bp, Homo sapiens
ctgaggatgaagaac

SEQ ID NO: 1353755 - DNA, 15 bp, Homo sapiens
cctgaggatgaagaa

SEQ ID NO: 1353756 - DNA, 15 bp, Homo sapiens
tcctgaggatgaaga

SEQ ID NO: 1353757 - DNA, 15 bp, Homo sapiens
ctcctgaggatgaag

SEQ ID NO: 1353758 - DNA, 15 bp, Homo sapiens
actcctgaggatgaa

SEQ ID NO: 1353759 - DNA, 15 bp, Homo sapiens
tactcctgaggatga

SEQ ID NO: 1353760 - DNA, 15 bp, Homo sapiens
ttactcctgaggatg

SEQ ID NO: 1353761 - DNA, 15 bp, Homo sapiens
gttactcctgaggat

SEQ ID NO: 1353762 - DNA, 15 bp, Homo sapiens
agttactcctgagga

SEQ ID NO: 1353763 - DNA, 15 bp, Homo sapiens
aagttactcctgagg

SEQ ID NO: 1353764 - DNA, 15 bp, Homo sapiens
aaagttactcctgag

SEQ ID NO: 1353765 - DNA, 15 bp, Homo sapiens
gaaagttactcctga

SEQ ID NO: 1353766 - DNA, 15 bp, Homo sapiens
ggaaagttactcctg

SEQ ID NO: 1353767 - DNA, 15 bp, Homo sapiens
gggaaagttactcct

SEQ ID NO: 1353768 - DNA, 15 bp, Homo sapiens
ggggaaagttactcc

SEQ ID NO: 1353769 - DNA, 15 bp, Homo sapiens
aggggaaagttactc

SEQ ID NO: 1353770 - DNA, 15 bp, Homo sapiens
aaggggaaagttact

SEQ ID NO: 1353771 - DNA, 15 bp, Homo sapiens
aaaggggaaagttac

SEQ ID NO: 1353772 - DNA, 15 bp, Homo sapiens
caaaggggaaagtta

SEQ ID NO: 1353773 - DNA, 15 bp, Homo sapiens
ccaaaggggaaagtt

SEQ ID NO: 1353774 - DNA, 15 bp, Homo sapiens
cccaaaggggaaagt

SEQ ID NO: 1353775 - DNA, 15 bp, Homo sapiens
tcccaaaggggaaag

SEQ ID NO: 1353776 - DNA, 15 bp, Homo sapiens
ttcccaaaggggaaa

SEQ ID NO: 1353777 - DNA, 15 bp, Homo sapiens
tttcccaaaggggaa

SEQ ID NO: 1353778 - DNA, 15 bp, Homo sapiens
ttttcccaaagggga

SEQ ID NO: 1353779 - DNA, 15 bp, Homo sapiens
tttttcccaaagggg

SEQ ID NO: 1353780 - DNA, 15 bp, Homo sapiens
ccctttttcccaaag

SEQ ID NO: 1353781 - DNA, 15 bp, Homo sapiens
gccctttttcccaaa

SEQ ID NO: 1353782 - DNA, 15 bp, Homo sapiens
agccctttttcccaa

SEQ ID NO: 1353783 - DNA, 15 bp, Homo sapiens
gagccctttttccca

SEQ ID NO: 1353784 - DNA, 15 bp, Homo sapiens
agagccctttttccc

SEQ ID NO: 1353785 - DNA, 15 bp, Homo sapiens
aagagccctttttcc

SEQ ID NO: 1353786 - DNA, 15 bp, Homo sapiens
gaagagccctttttc

SEQ ID NO: 1353787 - DNA, 15 bp, Homo sapiens
agaagagcccttttt

SEQ ID NO: 1353788 - DNA, 15 bp, Homo sapiens
gagaagagccctttt

SEQ ID NO: 1353789 - DNA, 15 bp, Homo sapiens
tgagaagagcccttt

SEQ ID NO: 1353790 - DNA, 15 bp, Homo sapiens
ttgagaagagccctt

SEQ ID NO: 1353791 - DNA, 15 bp, Homo sapiens
tttgagaagagccct

SEQ ID NO: 1353792 - DNA, 15 bp, Homo sapiens
gtttgagaagagccc

SEQ ID NO: 1353793 - DNA, 15 bp, Homo sapiens
agtttgagaagagcc

SEQ ID NO: 1353794 - DNA, 15 bp, Homo sapiens
cagtttgagaagagc

SEQ ID NO: 1353795 - DNA, 15 bp, Homo sapiens
tcagtttgagaagag

SEQ ID NO: 1353796 - DNA, 15 bp, Homo sapiens
atcagtttgagaaga

SEQ ID NO: 1353797 - DNA, 15 bp, Homo sapiens
gatcagtttgagaag

SEQ ID NO: 1353798 - DNA, 15 bp, Homo sapiens
ggatcagtttgagaa

SEQ ID NO: 1353799 - DNA, 15 bp, Homo sapiens
aggatcagtttgaga

SEQ ID NO: 1353800 - DNA, 15 bp, Homo sapiens
taggatcagtttgag

SEQ ID NO: 1353801 - DNA, 15 bp, Homo sapiens
ttaggatcagtttga

SEQ ID NO: 1353802 - DNA, 15 bp, Homo sapiens
tttaggatcagtttg

SEQ ID NO: 1353803 - DNA, 15 bp, Homo sapiens
atttaggatcagttt

SEQ ID NO: 1353804 - DNA, 15 bp, Homo sapiens
catttaggatcagtt

SEQ ID NO: 1353805 - DNA, 15 bp, Homo sapiens
ccatttaggatcagt

SEQ ID NO: 1353806 - DNA, 15 bp, Homo sapiens
accatttaggatcag

SEQ ID NO: 1353807 - DNA, 15 bp, Homo sapiens
gaccatttaggatca

SEQ ID NO: 1353808 - DNA, 15 bp, Homo sapiens
ggaccatttaggatc

SEQ ID NO: 1353809 - DNA, 15 bp, Homo sapiens
tggaccatttaggat

SEQ ID NO: 1353810 - DNA, 15 bp, Homo sapiens
atggaccatttagga

SEQ ID NO: 1353811 - DNA, 15 bp, Homo sapiens
aatggaccatttagg

SEQ ID NO: 1353812 - DNA, 15 bp, Homo sapiens
gaatggaccatttag

SEQ ID NO: 1353813 - DNA, 15 bp, Homo sapiens
ggaatggaccattta

SEQ ID NO: 1353814 - DNA, 15 bp, Homo sapiens
gggaatggaccattt

SEQ ID NO: 1353815 - DNA, 15 bp, Homo sapiens
ggggaatggaccatt

SEQ ID NO: 1353816 - DNA, 15 bp, Homo sapiens
aggggaatggaccat

SEQ ID NO: 1353817 - DNA, 15 bp, Homo sapiens
caggggaatggacca

SEQ ID NO: 1353818 - DNA, 15 bp, Homo sapiens
acaggggaatggacc

SEQ ID NO: 1353819 - DNA, 15 bp, Homo sapiens
aacaggggaatggac

SEQ ID NO: 1353820 - DNA, 15 bp, Homo sapiens
caacaggggaatgga

SEQ ID NO: 1353821 - DNA, 15 bp, Homo sapiens
gcaacaggggaatgg

SEQ ID NO: 1353822 - DNA, 15 bp, Homo sapiens
tgcaacaggggaatg

SEQ ID NO: 1353823 - DNA, 15 bp, Homo sapiens
atgcaacaggggaat

SEQ ID NO: 1353824 - DNA, 15 bp, Homo sapiens
catgcaacaggggaa

SEQ ID NO: 1353825 - DNA, 15 bp, Homo sapiens
acatgcaacagggga

SEQ ID NO: 1353826 - DNA, 15 bp, Homo sapiens
aacatgcaacagggg

SEQ ID NO: 1353827 - DNA, 15 bp, Homo sapiens
gaacatgcaacaggg

SEQ ID NO: 1353828 - DNA, 15 bp, Homo sapiens
ggaacatgcaacagg

SEQ ID NO: 1353829 - DNA, 15 bp, Homo sapiens
aggaacatgcaacag

SEQ ID NO: 1353830 - DNA, 15 bp, Homo sapiens
aaggaacatgcaaca

SEQ ID NO: 1353831 - DNA, 15 bp, Homo sapiens
aaaggaacatgcaac

SEQ ID NO: 1353832 - DNA, 15 bp, Homo sapiens
gaaaggaacatgcaa

SEQ ID NO: 1353833 - DNA, 15 bp, Homo sapiens
agaaaggaacatgca

SEQ ID NO: 1353834 - DNA, 15 bp, Homo sapiens
tagaaaggaacatgc

SEQ ID NO: 1353835 - DNA, 15 bp, Homo sapiens
atagaaaggaacatg

SEQ ID NO: 1353836 - DNA, 15 bp, Homo sapiens
aatagaaaggaacat

SEQ ID NO: 1353837 - DNA, 15 bp, Homo sapiens
gaatagaaaggaaca

SEQ ID NO: 1353838 - DNA, 15 bp, Homo sapiens
agaatagaaaggaac

SEQ ID NO: 1353839 - DNA, 15 bp, Homo sapiens
aagaatagaaaggaa

SEQ ID NO: 1353840 - DNA, 15 bp, Homo sapiens
gaagaatagaaagga

SEQ ID NO: 1353841 - DNA, 15 bp, Homo sapiens
ggaagaatagaaagg

SEQ ID NO: 1353842 - DNA, 15 bp, Homo sapiens
tggaagaatagaaag

SEQ ID NO: 1353843 - DNA, 15 bp, Homo sapiens
gtggaagaatagaaa

SEQ ID NO: 1353844 - DNA, 15 bp, Homo sapiens
agtggaagaatagaa

SEQ ID NO: 1353845 - DNA, 15 bp, Homo sapiens
gagtggaagaataga

SEQ ID NO: 1353846 - DNA, 15 bp, Homo sapiens
agagtggaagaatag

SEQ ID NO: 1353847 - DNA, 15 bp, Homo sapiens
gagagtggaagaata

SEQ ID NO: 1353848 - DNA, 15 bp, Homo sapiens
agagagtggaagaat

SEQ ID NO: 1353849 - DNA, 15 bp, Homo sapiens
cagagagtggaagaa

SEQ ID NO: 1353850 - DNA, 15 bp, Homo sapiens
acagagagtggaaga

SEQ ID NO: 1353851 - DNA, 15 bp, Homo sapiens
cacagagagtggaag

SEQ ID NO: 1353852 - DNA, 15 bp, Homo sapiens
tcacagagagtggaa

SEQ ID NO: 1353853 - DNA, 15 bp, Homo sapiens
ctcacagagagtgga

SEQ ID NO: 1353854 - DNA, 15 bp, Homo sapiens
actcacagagagtgg

SEQ ID NO: 1353855 - DNA, 15 bp, Homo sapiens
aactcacagagagtg

SEQ ID NO: 1353856 - DNA, 15 bp, Homo sapiens
taactcacagagagt

SEQ ID NO: 1353857 - DNA, 15 bp, Homo sapiens
ataactcacagagag

SEQ ID NO: 1353858 - DNA, 15 bp, Homo sapiens
gataactcacagaga

SEQ ID NO: 1353859 - DNA, 15 bp, Homo sapiens
tgataactcacagag

SEQ ID NO: 1353860 - DNA, 15 bp, Homo sapiens
gtgataactcacaga

SEQ ID NO: 1353861 - DNA, 15 bp, Homo sapiens
agtgataactcacag

SEQ ID NO: 1353862 - DNA, 15 bp, Homo sapiens
gagtgataactcaca

SEQ ID NO: 1353863 - DNA, 15 bp, Homo sapiens
tgagtgataactcac

SEQ ID NO: 1353864 - DNA, 15 bp, Homo sapiens
gtgagtgataactca

SEQ ID NO: 1353865 - DNA, 15 bp, Homo sapiens
agtgagtgataactc

SEQ ID NO: 1353866 - DNA, 15 bp, Homo sapiens
aagtgagtgataact

SEQ ID NO: 1353867 - DNA, 15 bp, Homo sapiens
gaagtgagtgataac

SEQ ID NO: 1353868 - DNA, 15 bp, Homo sapiens
agaagtgagtgataa

SEQ ID NO: 1353869 - DNA, 15 bp, Homo sapiens
gagaagtgagtgata

SEQ ID NO: 1353870 - DNA, 15 bp, Homo sapiens
tgagaagtgagtgat

SEQ ID NO: 1353871 - DNA, 15 bp, Homo sapiens
ctgagaagtgagtga

SEQ ID NO: 1353872 - DNA, 15 bp, Homo sapiens
cctgagaagtgagtg

SEQ ID NO: 1353873 - DNA, 15 bp, Homo sapiens
gcctgagaagtgagt

SEQ ID NO: 1353874 - DNA, 15 bp, Homo sapiens
ggcctgagaagtgag

SEQ ID NO: 1353875 - DNA, 15 bp, Homo sapiens
aggcctgagaagtga

SEQ ID NO: 1353876 - DNA, 15 bp, Homo sapiens
gaggcctgagaagtg

SEQ ID NO: 1353877 - DNA, 15 bp, Homo sapiens
agaggcctgagaagt

SEQ ID NO: 1353878 - DNA, 15 bp, Homo sapiens
aagaggcctgagaag

SEQ ID NO: 1353879 - DNA, 15 bp, Homo sapiens
caagaggcctgagaa

SEQ ID NO: 1353880 - DNA, 15 bp, Homo sapiens
ccaagaggcctgaga

SEQ ID NO: 1353881 - DNA, 15 bp, Homo sapiens
tccaagaggcctgag

SEQ ID NO: 1353882 - DNA, 15 bp, Homo sapiens
ttccaagaggcctga

SEQ ID NO: 1353883 - DNA, 15 bp, Homo sapiens
tttccaagaggcctg

SEQ ID NO: 1353884 - DNA, 15 bp, Homo sapiens
atttccaagaggcct

SEQ ID NO: 1353885 - DNA, 15 bp, Homo sapiens
aatttccaagaggcc

SEQ ID NO: 1353886 - DNA, 15 bp, Homo sapiens
aaatttccaagaggc

SEQ ID NO: 1353887 - DNA, 15 bp, Homo sapiens
aaaatttccaagagg

SEQ ID NO: 1353888 - DNA, 15 bp, Homo sapiens
aaaaatttccaagag

SEQ ID NO: 1353889 - DNA, 15 bp, Homo sapiens
aaaaaatttccaaga

SEQ ID NO: 1353890 - DNA, 15 bp, Homo sapiens
aaaaaaatttccaag

SEQ ID NO: 1353891 - DNA, 15 bp, Homo sapiens
taaaaaaatttccaa

SEQ ID NO: 1353892 - DNA, 15 bp, Homo sapiens
ttaaaaaaatttcca

SEQ ID NO: 1353893 - DNA, 15 bp, Homo sapiens
tttaaaaaaatttcc

SEQ ID NO: 1353894 - DNA, 15 bp, Homo sapiens
catttttaaaaaaat

SEQ ID NO: 1353895 - DNA, 15 bp, Homo sapiens
ccatttttaaaaaaa

SEQ ID NO: 1353896 - DNA, 15 bp, Homo sapiens
cccatttttaaaaaa

SEQ ID NO: 1353897 - DNA, 15 bp, Homo sapiens
tcccatttttaaaaa

SEQ ID NO: 1353898 - DNA, 15 bp, Homo sapiens
atcccatttttaaaa

SEQ ID NO: 1353899 - DNA, 15 bp, Homo sapiens
aatcccatttttaaa

SEQ ID NO: 1353900 - DNA, 15 bp, Homo sapiens
gaatcccatttttaa

SEQ ID NO: 1353901 - DNA, 15 bp, Homo sapiens
tgaatcccattttta

SEQ ID NO: 1353902 - DNA, 15 bp, Homo sapiens
gtgaatcccattttt

SEQ ID NO: 1353903 - DNA, 15 bp, Homo sapiens
agtgaatcccatttt

SEQ ID NO: 1353904 - DNA, 15 bp, Homo sapiens
tagtgaatcccattt

SEQ ID NO: 1353905 - DNA, 15 bp, Homo sapiens
atagtgaatcccatt

SEQ ID NO: 1353906 - DNA, 15 bp, Homo sapiens
tatagtgaatcccat

SEQ ID NO: 1353907 - DNA, 15 bp, Homo sapiens
ctatagtgaatccca

SEQ ID NO: 1353908 - DNA, 15 bp, Homo sapiens
gctatagtgaatccc

SEQ ID NO: 1353909 - DNA, 15 bp, Homo sapiens
tgctatagtgaatcc

SEQ ID NO: 1353910 - DNA, 15 bp, Homo sapiens
gtgctatagtgaatc

SEQ ID NO: 1353911 - DNA, 15 bp, Homo sapiens
tgtgctatagtgaat

SEQ ID NO: 1353912 - DNA, 15 bp, Homo sapiens
atgtgctatagtgaa

SEQ ID NO: 1353913 - DNA, 15 bp, Homo sapiens
gatgtgctatagtga

SEQ ID NO: 1353914 - DNA, 15 bp, Homo sapiens
ggatgtgctatagtg

SEQ ID NO: 1353915 - DNA, 15 bp, Homo sapiens
tggatgtgctatagt

SEQ ID NO: 1353916 - DNA, 15 bp, Homo sapiens
gtggatgtgctatag

SEQ ID NO: 1353917 - DNA, 15 bp, Homo sapiens
tgtggatgtgctata

SEQ ID NO: 1353918 - DNA, 15 bp, Homo sapiens
gtgtggatgtgctat

SEQ ID NO: 1353919 - DNA, 15 bp, Homo sapiens
tgtgtggatgtgcta

SEQ ID NO: 1353920 - DNA, 15 bp, Homo sapiens
gtgtgtggatgtgct

SEQ ID NO: 1353921 - DNA, 15 bp, Homo sapiens
ggtgtgtggatgtgc

SEQ ID NO: 1353922 - DNA, 15 bp, Homo sapiens
aggtgtgtggatgtg

SEQ ID NO: 1353923 - DNA, 15 bp, Homo sapiens
taggtgtgtggatgt

SEQ ID NO: 1353924 - DNA, 15 bp, Homo sapiens
gtaggtgtgtggatg

SEQ ID NO: 1353925 - DNA, 15 bp, Homo sapiens
cgtaggtgtgtggat

SEQ ID NO: 1353926 - DNA, 15 bp, Homo sapiens
acgtaggtgtgtgga

SEQ ID NO: 1353927 - DNA, 15 bp, Homo sapiens
cacgtaggtgtgtgg

SEQ ID NO: 1353928 - DNA, 15 bp, Homo sapiens
acacgtaggtgtgtg

SEQ ID NO: 1353929 - DNA, 15 bp, Homo sapiens
cacacgtaggtgtgt

SEQ ID NO: 1353930 - DNA, 15 bp, Homo sapiens
gcacacgtaggtgtg

SEQ ID NO: 1353931 - DNA, 15 bp, Homo sapiens
ggcacacgtaggtgt

SEQ ID NO: 1353932 - DNA, 15 bp, Homo sapiens
tggcacacgtaggtg

SEQ ID NO: 1353933 - DNA, 15 bp, Homo sapiens
atggcacacgtaggt

SEQ ID NO: 1353934 - DNA, 15 bp, Homo sapiens
catggcacacgtagg

SEQ ID NO: 1353935 - DNA, 15 bp, Homo sapiens
acatggcacacgtag

SEQ ID NO: 1353936 - DNA, 15 bp, Homo sapiens
cacatggcacacgta

SEQ ID NO: 1353937 - DNA, 15 bp, Homo sapiens
ccacatggcacacgt

SEQ ID NO: 1353938 - DNA, 15 bp, Homo sapiens
accacatggcacacg

SEQ ID NO: 1353939 - DNA, 15 bp, Homo sapiens
aaccacatggcacac

SEQ ID NO: 1353940 - DNA, 15 bp, Homo sapiens
gaaccacatggcaca

SEQ ID NO: 1353941 - DNA, 15 bp, Homo sapiens
agaaccacatggcac

SEQ ID NO: 1353942 - DNA, 15 bp, Homo sapiens
tagaaccacatggca

SEQ ID NO: 1353943 - DNA, 15 bp, Homo sapiens
atagaaccacatggc

SEQ ID NO: 1353944 - DNA, 15 bp, Homo sapiens
tatagaaccacatgg

SEQ ID NO: 1353945 - DNA, 15 bp, Homo sapiens
gtatagaaccacatg

SEQ ID NO: 1353946 - DNA, 15 bp, Homo sapiens
tgtatagaaccacat

SEQ ID NO: 1353947 - DNA, 15 bp, Homo sapiens
ttgtatagaaccaca

SEQ ID NO: 1353948 - DNA, 15 bp, Homo sapiens
gttgtatagaaccac

SEQ ID NO: 1353949 - DNA, 15 bp, Homo sapiens
tgttgtatagaacca

SEQ ID NO: 1353950 - DNA, 15 bp, Homo sapiens
atgttgtatagaacc

SEQ ID NO: 1353951 - DNA, 15 bp, Homo sapiens
gatgttgtatagaac

SEQ ID NO: 1353952 - DNA, 15 bp, Homo sapiens
tgatgttgtatagaa

SEQ ID NO: 1353953 - DNA, 15 bp, Homo sapiens
ctgatgttgtataga

SEQ ID NO: 1353954 - DNA, 15 bp, Homo sapiens
tctgatgttgtatag

SEQ ID NO: 1353955 - DNA, 15 bp, Homo sapiens
ttctgatgttgtata

SEQ ID NO: 1353956 - DNA, 15 bp, Homo sapiens
cttctgatgttgtat

SEQ ID NO: 1353957 - DNA, 15 bp, Homo sapiens
ccttctgatgttgta

SEQ ID NO: 1353958 - DNA, 15 bp, Homo sapiens
tccttctgatgttgt

SEQ ID NO: 1353959 - DNA, 15 bp, Homo sapiens
gtccttctgatgttg

SEQ ID NO: 1353960 - DNA, 15 bp, Homo sapiens
tgtccttctgatgtt

SEQ ID NO: 1353961 - DNA, 15 bp, Homo sapiens
atgtccttctgatgt

SEQ ID NO: 1353962 - DNA, 15 bp, Homo sapiens
aatgtccttctgatg

SEQ ID NO: 1353963 - DNA, 15 bp, Homo sapiens
aaatgtccttctgat

SEQ ID NO: 1353964 - DNA, 15 bp, Homo sapiens
taaatgtccttctga

SEQ ID NO: 1353965 - DNA, 15 bp, Homo sapiens
ttaaatgtccttctg

SEQ ID NO: 1353966 - DNA, 15 bp, Homo sapiens
tttaaatgtccttct

SEQ ID NO: 1353967 - DNA, 15 bp, Homo sapiens
ttttaaatgtccttc

SEQ ID NO: 1353968 - DNA, 15 bp, Homo sapiens
attttaaatgtcctt

SEQ ID NO: 1353969 - DNA, 15 bp, Homo sapiens
aattttaaatgtcct

SEQ ID NO: 1353970 - DNA, 15 bp, Homo sapiens
taattttaaatgtcc

SEQ ID NO: 1353971 - DNA, 15 bp, Homo sapiens
ttaattttaaatgtc

SEQ ID NO: 1353972 - DNA, 15 bp, Homo sapiens
tttaattttaaatgt

SEQ ID NO: 1353973 - DNA, 15 bp, Homo sapiens
atttaattttaaatg

SEQ ID NO: 1353974 - DNA, 15 bp, Homo sapiens
catttaattttaaat

SEQ ID NO: 1353975 - DNA, 15 bp, Homo sapiens
ccatttaattttaaa

SEQ ID NO: 1353976 - DNA, 15 bp, Homo sapiens
accatttaattttaa

SEQ ID NO: 1353977 - DNA, 15 bp, Homo sapiens
aaccatttaatttta

SEQ ID NO: 1353978 - DNA, 15 bp, Homo sapiens
aaaccatttaatttt

SEQ ID NO: 1353979 - DNA, 15 bp, Homo sapiens
aaaaccatttaattt

SEQ ID NO: 1353980 - DNA, 15 bp, Homo sapiens
aaaaaccatttaatt

SEQ ID NO: 1353981 - DNA, 15 bp, Homo sapiens
aaaaaaccatttaat

SEQ ID NO: 1353982 - DNA, 15 bp, Homo sapiens
gaaaaaaccatttaa

SEQ ID NO: 1353983 - DNA, 15 bp, Homo sapiens
tgaaaaaaccattta

SEQ ID NO: 1353984 - DNA, 15 bp, Homo sapiens
ttgaaaaaaccattt

SEQ ID NO: 1353985 - DNA, 15 bp, Homo sapiens
attgaaaaaaccatt

SEQ ID NO: 1353986 - DNA, 15 bp, Homo sapiens
aattgaaaaaaccat

SEQ ID NO: 1353987 - DNA, 15 bp, Homo sapiens
aaattgaaaaaacca

SEQ ID NO: 1353988 - DNA, 15 bp, Homo sapiens
aaaattgaaaaaacc

SEQ ID NO: 1353989 - DNA, 15 bp, Homo sapiens
aaaaattgaaaaaac

SEQ ID NO: 1353990 - DNA, 15 bp, Homo sapiens
taaaaattgaaaaaa

SEQ ID NO: 1353991 - DNA, 15 bp, Homo sapiens
ttaaaaattgaaaaa

SEQ ID NO: 1353992 - DNA, 15 bp, Homo sapiens
tttaaaaattgaaaa

SEQ ID NO: 1353993 - DNA, 15 bp, Homo sapiens
atttaaaaattgaaa

SEQ ID NO: 1353994 - DNA, 15 bp, Homo sapiens
gatttaaaaattgaa

SEQ ID NO: 1353995 - DNA, 15 bp, Homo sapiens
tgatttaaaaattga

SEQ ID NO: 1353996 - DNA, 15 bp, Homo sapiens
ttgatttaaaaattg

SEQ ID NO: 1353997 - DNA, 15 bp, Homo sapiens
cttgatttaaaaatt

SEQ ID NO: 1353998 - DNA, 15 bp, Homo sapiens
acttgatttaaaaat

SEQ ID NO: 1353999 - DNA, 15 bp, Homo sapiens
aacttgatttaaaaa

SEQ ID NO: 1354000 - DNA, 15 bp, Homo sapiens
gaacttgatttaaaa

SEQ ID NO: 1354001 - DNA, 15 bp, Homo sapiens
agaacttgatttaaa

SEQ ID NO: 1354002 - DNA, 15 bp, Homo sapiens
aagaacttgatttaa

SEQ ID NO: 1354003 - DNA, 15 bp, Homo sapiens
taagaacttgattta

SEQ ID NO: 1354004 - DNA, 15 bp, Homo sapiens
ctaagaacttgattt

SEQ ID NO: 1354005 - DNA, 15 bp, Homo sapiens
aactaagaacttgat

SEQ ID NO: 1354006 - DNA, 15 bp, Homo sapiens
aaactaagaacttga

SEQ ID NO: 1354007 - DNA, 15 bp, Homo sapiens
caaactaagaacttg

SEQ ID NO: 1354008 - DNA, 15 bp, Homo sapiens
gcaaactaagaactt

SEQ ID NO: 1354009 - DNA, 15 bp, Homo sapiens
tgcaaactaagaact

SEQ ID NO: 1354010 - DNA, 15 bp, Homo sapiens
atgcaaactaagaac

SEQ ID NO: 1354011 - DNA, 15 bp, Homo sapiens
catgcaaactaagaa

SEQ ID NO: 1354012 - DNA, 15 bp, Homo sapiens
acatgcaaactaaga

SEQ ID NO: 1354013 - DNA, 15 bp, Homo sapiens
gacatgcaaactaag

SEQ ID NO: 1354014 - DNA, 15 bp, Homo sapiens
agacatgcaaactaa

SEQ ID NO: 1354015 - DNA, 15 bp, Homo sapiens
aagacatgcaaacta

SEQ ID NO: 1354016 - DNA, 15 bp, Homo sapiens
caagacatgcaaact

SEQ ID NO: 1354017 - DNA, 15 bp, Homo sapiens
gcaagacatgcaaac

SEQ ID NO: 1354018 - DNA, 15 bp, Homo sapiens
tgcaagacatgcaaa

SEQ ID NO: 1354019 - DNA, 15 bp, Homo sapiens
atgcaagacatgcaa

SEQ ID NO: 1354020 - DNA, 15 bp, Homo sapiens
tatgcaagacatgca

SEQ ID NO: 1354021 - DNA, 15 bp, Homo sapiens
ttatgcaagacatgc

SEQ ID NO: 1354022 - DNA, 15 bp, Homo sapiens
gttatgcaagacatg

SEQ ID NO: 1354023 - DNA, 15 bp, Homo sapiens
tgttatgcaagacat

SEQ ID NO: 1354024 - DNA, 15 bp, Homo sapiens
atgttatgcaagaca

SEQ ID NO: 1354025 - DNA, 15 bp, Homo sapiens
gatgttatgcaagac

SEQ ID NO: 1354026 - DNA, 15 bp, Homo sapiens
ggatgttatgcaaga

SEQ ID NO: 1354027 - DNA, 15 bp, Homo sapiens
aggatgttatgcaag

SEQ ID NO: 1354028 - DNA, 15 bp, Homo sapiens
aaggatgttatgcaa

SEQ ID NO: 1354029 - DNA, 15 bp, Homo sapiens
gaaggatgttatgca

SEQ ID NO: 1354030 - DNA, 15 bp, Homo sapiens
agaaggatgttatgc

SEQ ID NO: 1354031 - DNA, 15 bp, Homo sapiens
tagaaggatgttatg

SEQ ID NO: 1354032 - DNA, 15 bp, Homo sapiens
atagaaggatgttat

SEQ ID NO: 1354033 - DNA, 15 bp, Homo sapiens
aatagaaggatgtta

SEQ ID NO: 1354034 - DNA, 15 bp, Homo sapiens
taatagaaggatgtt

SEQ ID NO: 1354035 - DNA, 15 bp, Homo sapiens
ataatagaaggatgt

SEQ ID NO: 1354036 - DNA, 15 bp, Homo sapiens
aataatagaaggatg

SEQ ID NO: 1354037 - DNA, 15 bp, Homo sapiens
aaataatagaaggat

SEQ ID NO: 1354038 - DNA, 15 bp, Homo sapiens
gaaataatagaagga

SEQ ID NO: 1354039 - DNA, 15 bp, Homo sapiens
agaaataatagaagg

SEQ ID NO: 1354040 - DNA, 15 bp, Homo sapiens
cagaaataatagaag

SEQ ID NO: 1354041 - DNA, 15 bp, Homo sapiens
acagaaataatagaa

SEQ ID NO: 1354042 - DNA, 15 bp, Homo sapiens
tacagaaataataga

SEQ ID NO: 1354043 - DNA, 15 bp, Homo sapiens
atacagaaataatag

SEQ ID NO: 1354044 - DNA, 15 bp, Homo sapiens
catacagaaataata

SEQ ID NO: 1354045 - DNA, 15 bp, Homo sapiens
ccatacagaaataat

SEQ ID NO: 1354046 - DNA, 15 bp, Homo sapiens
tccatacagaaataa

SEQ ID NO: 1354047 - DNA, 15 bp, Homo sapiens
ctccatacagaaata

SEQ ID NO: 1354048 - DNA, 15 bp, Homo sapiens
actccatacagaaat

SEQ ID NO: 1354049 - DNA, 15 bp, Homo sapiens
cactccatacagaaa

SEQ ID NO: 1354050 - DNA, 15 bp, Homo sapiens
tcactccatacagaa

SEQ ID NO: 1354051 - DNA, 15 bp, Homo sapiens
ctcactccatacaga

SEQ ID NO: 1354052 - DNA, 15 bp, Homo sapiens
cctcactccatacag

SEQ ID NO: 1354053 - DNA, 15 bp, Homo sapiens
ccctcactccataca

SEQ ID NO: 1354054 - DNA, 15 bp, Homo sapiens
tccctcactccatac

SEQ ID NO: 1354055 - DNA, 15 bp, Homo sapiens
atccctcactccata

SEQ ID NO: 1354056 - DNA, 15 bp, Homo sapiens
catccctcactccat

SEQ ID NO: 1354057 - DNA, 15 bp, Homo sapiens
ccatccctcactcca

SEQ ID NO: 1354058 - DNA, 15 bp, Homo sapiens
tccatccctcactcc

SEQ ID NO: 1354059 - DNA, 15 bp, Homo sapiens
ttccatccctcactc

SEQ ID NO: 1354060 - DNA, 15 bp, Homo sapiens
attccatccctcact

SEQ ID NO: 1354061 - DNA, 15 bp, Homo sapiens
gattccatccctcac

SEQ ID NO: 1354062 - DNA, 15 bp, Homo sapiens
tgattccatccctca

SEQ ID NO: 1354063 - DNA, 15 bp, Homo sapiens
ctgattccatccctc

SEQ ID NO: 1354064 - DNA, 15 bp, Homo sapiens
actgattccatccct

SEQ ID NO: 1354065 - DNA, 15 bp, Homo sapiens
cactgattccatccc

SEQ ID NO: 1354066 - DNA, 15 bp, Homo sapiens
acactgattccatcc

SEQ ID NO: 1354067 - DNA, 15 bp, Homo sapiens
cacactgattccatc

SEQ ID NO: 1354068 - DNA, 15 bp, Homo sapiens
tcacactgattccat

SEQ ID NO: 1354069 - DNA, 15 bp, Homo sapiens
ctcacactgattcca

SEQ ID NO: 1354070 - DNA, 15 bp, Homo sapiens
gctcacactgattcc

SEQ ID NO: 1354071 - DNA, 15 bp, Homo sapiens
tgctcacactgattc

SEQ ID NO: 1354072 - DNA, 15 bp, Homo sapiens
atgctcacactgatt

SEQ ID NO: 1354073 - DNA, 15 bp, Homo sapiens
catgctcacactgat

SEQ ID NO: 1354074 - DNA, 15 bp, Homo sapiens
acatgctcacactga

SEQ ID NO: 1354075 - DNA, 15 bp, Homo sapiens
tacatgctcacactg

SEQ ID NO: 1354076 - DNA, 15 bp, Homo sapiens
atacatgctcacact

SEQ ID NO: 1354077 - DNA, 15 bp, Homo sapiens
aatacatgctcacac

SEQ ID NO: 1354078 - DNA, 15 bp, Homo sapiens
taatacatgctcaca

SEQ ID NO: 1354079 - DNA, 15 bp, Homo sapiens
ttaatacatgctcac

SEQ ID NO: 1354080 - DNA, 15 bp, Homo sapiens
gttaatacatgctca

SEQ ID NO: 1354081 - DNA, 15 bp, Homo sapiens
ggttaatacatgctc

SEQ ID NO: 1354082 - DNA, 15 bp, Homo sapiens
aggttaatacatgct

SEQ ID NO: 1354083 - DNA, 15 bp, Homo sapiens
gaggttaatacatgc

SEQ ID NO: 1354084 - DNA, 15 bp, Homo sapiens
tgaggttaatacatg

SEQ ID NO: 1354085 - DNA, 15 bp, Homo sapiens
atgaggttaatacat

SEQ ID NO: 1354086 - DNA, 15 bp, Homo sapiens
catgaggttaataca

SEQ ID NO: 1354087 - DNA, 15 bp, Homo sapiens
ccatgaggttaatac

SEQ ID NO: 1354088 - DNA, 15 bp, Homo sapiens
gccatgaggttaata

SEQ ID NO: 1354089 - DNA, 15 bp, Homo sapiens
agccatgaggttaat

SEQ ID NO: 1354090 - DNA, 15 bp, Homo sapiens
tagccatgaggttaa

SEQ ID NO: 1354091 - DNA, 15 bp, Homo sapiens
ttagccatgaggtta

SEQ ID NO: 1354092 - DNA, 15 bp, Homo sapiens
tttagccatgaggtt

SEQ ID NO: 1354093 - DNA, 15 bp, Homo sapiens
ttttagccatgaggt

SEQ ID NO: 1354094 - DNA, 15 bp, Homo sapiens
cttttagccatgagg

SEQ ID NO: 1354095 - DNA, 15 bp, Homo sapiens
acttttagccatgag

SEQ ID NO: 1354096 - DNA, 15 bp, Homo sapiens
tacttttagccatga

SEQ ID NO: 1354097 - DNA, 15 bp, Homo sapiens
ctacttttagccatg

SEQ ID NO: 1354098 - DNA, 15 bp, Homo sapiens
cctacttttagccat

SEQ ID NO: 1354099 - DNA, 15 bp, Homo sapiens
tcctacttttagcca

SEQ ID NO: 1354100 - DNA, 15 bp, Homo sapiens
ttcctacttttagcc

SEQ ID NO: 1354101 - DNA, 15 bp, Homo sapiens
tttcctacttttagc

SEQ ID NO: 1354102 - DNA, 15 bp, Homo sapiens
ctttcctacttttag

SEQ ID NO: 1354103 - DNA, 15 bp, Homo sapiens
tctttcctactttta

SEQ ID NO: 1354104 - DNA, 15 bp, Homo sapiens
ttctttcctactttt

SEQ ID NO: 1354105 - DNA, 15 bp, Homo sapiens
tttctttcctacttt

SEQ ID NO: 1354106 - DNA, 15 bp, Homo sapiens
ttttctttcctactt

SEQ ID NO: 1354107 - DNA, 15 bp, Homo sapiens
tttttctttcctact

SEQ ID NO: 1354108 - DNA, 15 bp, Homo sapiens
ctttttctttcctac

SEQ ID NO: 1354109 - DNA, 15 bp, Homo sapiens
tctttttctttccta

SEQ ID NO: 1354110 - DNA, 15 bp, Homo sapiens
atctttttctttcct

SEQ ID NO: 1354111 - DNA, 15 bp, Homo sapiens
aatctttttctttcc

SEQ ID NO: 1354112 - DNA, 15 bp, Homo sapiens
aaatctttttctttc

SEQ ID NO: 1354113 - DNA, 15 bp, Homo sapiens
gaaatctttttcttt

SEQ ID NO: 1354114 - DNA, 15 bp, Homo sapiens
ggaaatctttttctt

SEQ ID NO: 1354115 - DNA, 15 bp, Homo sapiens
aggaaatctttttct

SEQ ID NO: 1354116 - DNA, 15 bp, Homo sapiens
gaggaaatctttttc

SEQ ID NO: 1354117 - DNA, 15 bp, Homo sapiens
tgaggaaatcttttt

SEQ ID NO: 1354118 - DNA, 15 bp, Homo sapiens
atgaggaaatctttt

SEQ ID NO: 1354119 - DNA, 15 bp, Homo sapiens
tatgaggaaatcttt

SEQ ID NO: 1354120 - DNA, 15 bp, Homo sapiens
gtatgaggaaatctt

SEQ ID NO: 1354121 - DNA, 15 bp, Homo sapiens
agtatgaggaaatct

SEQ ID NO: 1354122 - DNA, 15 bp, Homo sapiens
cagtatgaggaaatc

SEQ ID NO: 1354123 - DNA, 15 bp, Homo sapiens
acagtatgaggaaat

SEQ ID NO: 1354124 - DNA, 15 bp, Homo sapiens
aacagtatgaggaaa

SEQ ID NO: 1354125 - DNA, 15 bp, Homo sapiens
taacagtatgaggaa

SEQ ID NO: 1354126 - DNA, 15 bp, Homo sapiens
ataacagtatgagga

SEQ ID NO: 1354127 - DNA, 15 bp, Homo sapiens
cataacagtatgagg

SEQ ID NO: 1354128 - DNA, 15 bp, Homo sapiens
acataacagtatgag

SEQ ID NO: 1354129 - DNA, 15 bp, Homo sapiens
tacataacagtatga

SEQ ID NO: 1354130 - DNA, 15 bp, Homo sapiens
atacataacagtatg

SEQ ID NO: 1354131 - DNA, 15 bp, Homo sapiens
catacataacagtat

SEQ ID NO: 1354132 - DNA, 15 bp, Homo sapiens
acatacataacagta

SEQ ID NO: 1354133 - DNA, 15 bp, Homo sapiens
cacatacataacagt

SEQ ID NO: 1354134 - DNA, 15 bp, Homo sapiens
acacatacataacag

SEQ ID NO: 1354135 - DNA, 15 bp, Homo sapiens
gacacatacataaca

SEQ ID NO: 1354136 - DNA, 15 bp, Homo sapiens
agacacatacataac

SEQ ID NO: 1354137 - DNA, 15 bp, Homo sapiens
tagacacatacataa

SEQ ID NO: 1354138 - DNA, 15 bp, Homo sapiens
ctagacacatacata

SEQ ID NO: 1354139 - DNA, 15 bp, Homo sapiens
actagacacatacat

SEQ ID NO: 1354140 - DNA, 15 bp, Homo sapiens
tactagacacataca

SEQ ID NO: 1354141 - DNA, 15 bp, Homo sapiens
gtactagacacatac

SEQ ID NO: 1354142 - DNA, 15 bp, Homo sapiens
tgtactagacacata

SEQ ID NO: 1354143 - DNA, 15 bp, Homo sapiens
ttgtactagacacat

SEQ ID NO: 1354144 - DNA, 15 bp, Homo sapiens
attgtactagacaca

SEQ ID NO: 1354145 - DNA, 15 bp, Homo sapiens
cattgtactagacac

SEQ ID NO: 1354146 - DNA, 15 bp, Homo sapiens
acattgtactagaca

SEQ ID NO: 1354147 - DNA, 15 bp, Homo sapiens
gacattgtactagac

SEQ ID NO: 1354148 - DNA, 15 bp, Homo sapiens
agacattgtactaga

SEQ ID NO: 1354149 - DNA, 15 bp, Homo sapiens
cagacattgtactag

SEQ ID NO: 1354150 - DNA, 15 bp, Homo sapiens
tcagacattgtacta

SEQ ID NO: 1354151 - DNA, 15 bp, Homo sapiens
gtcagacattgtact

SEQ ID NO: 1354152 - DNA, 15 bp, Homo sapiens
tgtcagacattgtac

SEQ ID NO: 1354153 - DNA, 15 bp, Homo sapiens
gtgtcagacattgta

SEQ ID NO: 1354154 - DNA, 15 bp, Homo sapiens
tgtgtcagacattgt

SEQ ID NO: 1354155 - DNA, 15 bp, Homo sapiens
ctgtgtcagacattg

SEQ ID NO: 1354156 - DNA, 15 bp, Homo sapiens
tctgtgtcagacatt

SEQ ID NO: 1354157 - DNA, 15 bp, Homo sapiens
ttctgtgtcagacat

SEQ ID NO: 1354158 - DNA, 15 bp, Homo sapiens
gttctgtgtcagaca

SEQ ID NO: 1354159 - DNA, 15 bp, Homo sapiens
tgttctgtgtcagac

SEQ ID NO: 1354160 - DNA, 15 bp, Homo sapiens
gtgttctgtgtcaga

SEQ ID NO: 1354161 - DNA, 15 bp, Homo sapiens
tgtgttctgtgtcag

SEQ ID NO: 1354162 - DNA, 15 bp, Homo sapiens
atgtgttctgtgtca

SEQ ID NO: 1354163 - DNA, 15 bp, Homo sapiens
catgtgttctgtgtc

SEQ ID NO: 1354164 - DNA, 15 bp, Homo sapiens
gcatgtgttctgtgt

SEQ ID NO: 1354165 - DNA, 15 bp, Homo sapiens
ggcatgtgttctgtg

SEQ ID NO: 1354166 - DNA, 15 bp, Homo sapiens
tggcatgtgttctgt

SEQ ID NO: 1354167 - DNA, 15 bp, Homo sapiens
ttggcatgtgttctg

SEQ ID NO: 1354168 - DNA, 15 bp, Homo sapiens
attggcatgtgttct

SEQ ID NO: 1354169 - DNA, 15 bp, Homo sapiens
tattggcatgtgttc

SEQ ID NO: 1354170 - DNA, 15 bp, Homo sapiens
ttattggcatgtgtt

SEQ ID NO: 1354171 - DNA, 15 bp, Homo sapiens
tttattggcatgtgt

SEQ ID NO: 1354172 - DNA, 15 bp, Homo sapiens
atttattggcatgtg

SEQ ID NO: 1354173 - DNA, 15 bp, Homo sapiens
tatttattggcatgt

SEQ ID NO: 1354174 - DNA, 15 bp, Homo sapiens
atatttattggcatg

SEQ ID NO: 1354175 - DNA, 15 bp, Homo sapiens
gatatttattggcat

SEQ ID NO: 1354176 - DNA, 15 bp, Homo sapiens
tgatatttattggca

SEQ ID NO: 1354177 - DNA, 15 bp, Homo sapiens
ttgatatttattggc

SEQ ID NO: 1354178 - DNA, 15 bp, Homo sapiens
attgatatttattgg

SEQ ID NO: 1354179 - DNA, 15 bp, Homo sapiens
cattgatatttattg

SEQ ID NO: 1354180 - DNA, 15 bp, Homo sapiens
acattgatatttatt

SEQ ID NO: 1354181 - DNA, 15 bp, Homo sapiens
aacattgatatttat

SEQ ID NO: 1354182 - DNA, 15 bp, Homo sapiens
aaacattgatattta

SEQ ID NO: 1354183 - DNA, 15 bp, Homo sapiens
aaaacattgatattt

SEQ ID NO: 1354184 - DNA, 15 bp, Homo sapiens
gaaaacattgatatt

SEQ ID NO: 1354185 - DNA, 15 bp, Homo sapiens
ggaaaacattgatat

SEQ ID NO: 1354186 - DNA, 15 bp, Homo sapiens
gggaaaacattgata

SEQ ID NO: 1354187 - DNA, 15 bp, Homo sapiens
agggaaaacattgat

SEQ ID NO: 1354188 - DNA, 15 bp, Homo sapiens
aagggaaaacattga

SEQ ID NO: 1354189 - DNA, 15 bp, Homo sapiens
caagggaaaacattg

SEQ ID NO: 1354190 - DNA, 15 bp, Homo sapiens
acaagggaaaacatt

SEQ ID NO: 1354191 - DNA, 15 bp, Homo sapiens
gacaagggaaaacat

SEQ ID NO: 1354192 - DNA, 15 bp, Homo sapiens
ggacaagggaaaaca

SEQ ID NO: 1354193 - DNA, 15 bp, Homo sapiens
aggacaagggaaaac

SEQ ID NO: 1354194 - DNA, 15 bp, Homo sapiens
taggacaagggaaaa

SEQ ID NO: 1354195 - DNA, 15 bp, Homo sapiens
ctaggacaagggaaa

SEQ ID NO: 1354196 - DNA, 15 bp, Homo sapiens
tctaggacaagggaa

SEQ ID NO: 1354197 - DNA, 15 bp, Homo sapiens
ttctaggacaaggga

SEQ ID NO: 1354198 - DNA, 15 bp, Homo sapiens
tttctaggacaaggg

SEQ ID NO: 1354199 - DNA, 15 bp, Homo sapiens
ttttctaggacaagg

SEQ ID NO: 1354200 - DNA, 15 bp, Homo sapiens
tttttctaggacaag

SEQ ID NO: 1354201 - DNA, 15 bp, Homo sapiens
ttttttctaggacaa

SEQ ID NO: 1354202 - DNA, 15 bp, Homo sapiens
tttttttctaggaca

SEQ ID NO: 1354203 - DNA, 15 bp, Homo sapiens
ttttttttctaggac

SEQ ID NO: 1354204 - DNA, 15 bp, Homo sapiens
tttttttttctagga

SEQ ID NO: 1354205 - DNA, 15 bp, Homo sapiens
ttttttttttctagg

SEQ ID NO: 1354206 - DNA, 15 bp, Homo sapiens
attttttttttctag

SEQ ID NO: 1354207 - DNA, 15 bp, Homo sapiens
cattttttttttcta

SEQ ID NO: 1354208 - DNA, 15 bp, Homo sapiens
gcattttttttttct

SEQ ID NO: 1354209 - DNA, 15 bp, Homo sapiens
ggcattttttttttc

SEQ ID NO: 1354210 - DNA, 15 bp, Homo sapiens
tggcatttttttttt

SEQ ID NO: 1354211 - DNA, 15 bp, Homo sapiens
atggcattttttttt

SEQ ID NO: 1354212 - DNA, 15 bp, Homo sapiens
catggcatttttttt

SEQ ID NO: 1354213 - DNA, 15 bp, Homo sapiens
tcatggcattttttt

SEQ ID NO: 1354214 - DNA, 15 bp, Homo sapiens
ttcatggcatttttt

SEQ ID NO: 1354215 - DNA, 15 bp, Homo sapiens
tttcatggcattttt

SEQ ID NO: 1354216 - DNA, 15 bp, Homo sapiens
atttcatggcatttt

SEQ ID NO: 1354217 - DNA, 15 bp, Homo sapiens
tatttcatggcattt

SEQ ID NO: 1354218 - DNA, 15 bp, Homo sapiens
atatttcatggcatt

SEQ ID NO: 1354219 - DNA, 15 bp, Homo sapiens
aatatttcatggcat

SEQ ID NO: 1354220 - DNA, 15 bp, Homo sapiens
taatatttcatggca

SEQ ID NO: 1354221 - DNA, 15 bp, Homo sapiens
ttaatatttcatggc

SEQ ID NO: 1354222 - DNA, 15 bp, Homo sapiens
tttaatatttcatgg

SEQ ID NO: 1354223 - DNA, 15 bp, Homo sapiens
ttttaatatttcatg

SEQ ID NO: 1354224 - DNA, 15 bp, Homo sapiens
attttaatatttcat

SEQ ID NO: 1354225 - DNA, 15 bp, Homo sapiens
aattttaatatttca

SEQ ID NO: 1354226 - DNA, 15 bp, Homo sapiens
aaattttaatatttc

SEQ ID NO: 1354227 - DNA, 15 bp, Homo sapiens
taaattttaatattt

SEQ ID NO: 1354228 - DNA, 15 bp, Homo sapiens
ataaattttaatatt

SEQ ID NO: 1354229 - DNA, 15 bp, Homo sapiens
aataaattttaatat

SEQ ID NO: 1354230 - DNA, 15 bp, Homo sapiens
aaataaattttaata

SEQ ID NO: 1354231 - DNA, 15 bp, Homo sapiens
aaaataaattttaat

SEQ ID NO: 1354232 - DNA, 15 bp, Homo sapiens
gaaaataaattttaa

SEQ ID NO: 1354233 - DNA, 15 bp, Homo sapiens
tgaaaataaatttta

SEQ ID NO: 1354234 - DNA, 15 bp, Homo sapiens
ttgaaaataaatttt

SEQ ID NO: 1354235 - DNA, 15 bp, Homo sapiens
gttgaaaataaattt

SEQ ID NO: 1354236 - DNA, 15 bp, Homo sapiens
ggttgaaaataaatt

SEQ ID NO: 1354237 - DNA, 15 bp, Homo sapiens
aggttgaaaataaat

SEQ ID NO: 1354238 - DNA, 15 bp, Homo sapiens
gaggttgaaaataaa

SEQ ID NO: 1354239 - DNA, 15 bp, Homo sapiens
tgaggttgaaaataa

SEQ ID NO: 1354240 - DNA, 15 bp, Homo sapiens
gtgaggttgaaaata

SEQ ID NO: 1354241 - DNA, 15 bp, Homo sapiens
tgtgaggttgaaaat

SEQ ID NO: 1354242 - DNA, 15 bp, Homo sapiens
atgtgaggttgaaaa

SEQ ID NO: 1354243 - DNA, 15 bp, Homo sapiens
aatgtgaggttgaaa

SEQ ID NO: 1354244 - DNA, 15 bp, Homo sapiens
gaatgtgaggttgaa

SEQ ID NO: 1354245 - DNA, 15 bp, Homo sapiens
agaatgtgaggttga

SEQ ID NO: 1354246 - DNA, 15 bp, Homo sapiens
aagaatgtgaggttg

SEQ ID NO: 1354247 - DNA, 15 bp, Homo sapiens
caagaatgtgaggtt

SEQ ID NO: 1354248 - DNA, 15 bp, Homo sapiens
acaagaatgtgaggt

SEQ ID NO: 1354249 - DNA, 15 bp, Homo sapiens
cacaagaatgtgagg

SEQ ID NO: 1354250 - DNA, 15 bp, Homo sapiens
tccacaagaatgtga

SEQ ID NO: 1354251 - DNA, 15 bp, Homo sapiens
gtccacaagaatgtg

SEQ ID NO: 1354252 - DNA, 15 bp, Homo sapiens
agtccacaagaatgt

SEQ ID NO: 1354253 - DNA, 15 bp, Homo sapiens
aagtccacaagaatg

SEQ ID NO: 1354254 - DNA, 15 bp, Homo sapiens
aaagtccacaagaat

SEQ ID NO: 1354255 - DNA, 15 bp, Homo sapiens
taaagtccacaagaa

SEQ ID NO: 1354256 - DNA, 15 bp, Homo sapiens
ataaagtccacaaga

SEQ ID NO: 1354257 - DNA, 15 bp, Homo sapiens
tataaagtccacaag

SEQ ID NO: 1354258 - DNA, 15 bp, Homo sapiens
atataaagtccacaa

SEQ ID NO: 1354259 - DNA, 15 bp, Homo sapiens
tatataaagtccaca

SEQ ID NO: 1354260 - DNA, 15 bp, Homo sapiens
atatataaagtccac

SEQ ID NO: 1354261 - DNA, 15 bp, Homo sapiens
gatatataaagtcca

SEQ ID NO: 1354262 - DNA, 15 bp, Homo sapiens
tgatatataaagtcc

SEQ ID NO: 1354263 - DNA, 15 bp, Homo sapiens
atgatatataaagtc

SEQ ID NO: 1354264 - DNA, 15 bp, Homo sapiens
catgatatataaagt

SEQ ID NO: 1354265 - DNA, 15 bp, Homo sapiens
tcatgatatataaag

SEQ ID NO: 1354266 - DNA, 15 bp, Homo sapiens
gtcatgatatataaa

SEQ ID NO: 1354267 - DNA, 15 bp, Homo sapiens
agtcatgatatataa

SEQ ID NO: 1354268 - DNA, 15 bp, Homo sapiens
aagtcatgatatata

SEQ ID NO: 1354269 - DNA, 15 bp, Homo sapiens
taagtcatgatatat

SEQ ID NO: 1354270 - DNA, 15 bp, Homo sapiens
gtaagtcatgatata

SEQ ID NO: 1354271 - DNA, 15 bp, Homo sapiens
agtaagtcatgatat

SEQ ID NO: 1354272 - DNA, 15 bp, Homo sapiens
tagtaagtcatgata

SEQ ID NO: 1354273 - DNA, 15 bp, Homo sapiens
gtagtaagtcatgat

SEQ ID NO: 1354274 - DNA, 15 bp, Homo sapiens
tgtagtaagtcatga

SEQ ID NO: 1354275 - DNA, 15 bp, Homo sapiens
ttgtagtaagtcatg

SEQ ID NO: 1354276 - DNA, 15 bp, Homo sapiens
gttgtagtaagtcat

SEQ ID NO: 1354277 - DNA, 15 bp, Homo sapiens
tgttgtagtaagtca

SEQ ID NO: 1354278 - DNA, 15 bp, Homo sapiens
gtgttgtagtaagtc

SEQ ID NO: 1354279 - DNA, 15 bp, Homo sapiens
tgtgttgtagtaagt

SEQ ID NO: 1354280 - DNA, 15 bp, Homo sapiens
ttgtgttgtagtaag

SEQ ID NO: 1354281 - DNA, 15 bp, Homo sapiens
attgtgttgtagtaa

SEQ ID NO: 1354282 - DNA, 15 bp, Homo sapiens
cattgtgttgtagta

SEQ ID NO: 1354283 - DNA, 15 bp, Homo sapiens
tcattgtgttgtagt

SEQ ID NO: 1354284 - DNA, 15 bp, Homo sapiens
ttcattgtgttgtag

SEQ ID NO: 1354285 - DNA, 15 bp, Homo sapiens
tttcattgtgttgta

SEQ ID NO: 1354286 - DNA, 15 bp, Homo sapiens
atttcattgtgttgt

SEQ ID NO: 1354287 - DNA, 15 bp, Homo sapiens
catttcattgtgttg

SEQ ID NO: 1354288 - DNA, 15 bp, Homo sapiens
ccatttcattgtgtt

SEQ ID NO: 1354289 - DNA, 15 bp, Homo sapiens
cccatttcattgtgt

SEQ ID NO: 1354290 - DNA, 15 bp, Homo sapiens
gcccatttcattgtg

SEQ ID NO: 1354291 - DNA, 15 bp, Homo sapiens
tgcccatttcattgt

SEQ ID NO: 1354292 - DNA, 15 bp, Homo sapiens
gtgcccatttcattg

SEQ ID NO: 1354293 - DNA, 15 bp, Homo sapiens
tgtgcccatttcatt

SEQ ID NO: 1354294 - DNA, 15 bp, Homo sapiens
ttgtgcccatttcat

SEQ ID NO: 1354295 - DNA, 15 bp, Homo sapiens
cttgtgcccatttca

SEQ ID NO: 1354296 - DNA, 15 bp, Homo sapiens
tcttgtgcccatttc

SEQ ID NO: 1354297 - DNA, 15 bp, Homo sapiens
gtcttgtgcccattt

SEQ ID NO: 1354298 - DNA, 15 bp, Homo sapiens
cgtcttgtgcccatt

SEQ ID NO: 1354299 - DNA, 15 bp, Homo sapiens
gcgtcttgtgcccat

SEQ ID NO: 1354300 - DNA, 15 bp, Homo sapiens
agcgtcttgtgccca

SEQ ID NO: 1354301 - DNA, 15 bp, Homo sapiens
tagcgtcttgtgccc

SEQ ID NO: 1354302 - DNA, 15 bp, Homo sapiens
gtagcgtcttgtgcc

SEQ ID NO: 1354303 - DNA, 15 bp, Homo sapiens
agtagcgtcttgtgc

SEQ ID NO: 1354304 - DNA, 15 bp, Homo sapiens
tagtagcgtcttgtg

SEQ ID NO: 1354305 - DNA, 15 bp, Homo sapiens
atagtagcgtcttgt

SEQ ID NO: 1354306 - DNA, 15 bp, Homo sapiens
gatagtagcgtcttg

SEQ ID NO: 1354307 - DNA, 15 bp, Homo sapiens
agatagtagcgtctt

SEQ ID NO: 1354308 - DNA, 15 bp, Homo sapiens
gagatagtagcgtct

SEQ ID NO: 1354309 - DNA, 15 bp, Homo sapiens
agagatagtagcgtc

SEQ ID NO: 1354310 - DNA, 15 bp, Homo sapiens
tagagatagtagcgt

SEQ ID NO: 1354311 - DNA, 15 bp, Homo sapiens
atagagatagtagcg

SEQ ID NO: 1354312 - DNA, 15 bp, Homo sapiens
aatagagatagtagc

SEQ ID NO: 1354313 - DNA, 15 bp, Homo sapiens
caatagagatagtag

SEQ ID NO: 1354314 - DNA, 15 bp, Homo sapiens
ccaatagagatagta

SEQ ID NO: 1354315 - DNA, 15 bp, Homo sapiens
accaatagagatagt

SEQ ID NO: 1354316 - DNA, 15 bp, Homo sapiens
taccaatagagatag

SEQ ID NO: 1354317 - DNA, 15 bp, Homo sapiens
ttaccaatagagata

SEQ ID NO: 1354318 - DNA, 15 bp, Homo sapiens
gttaccaatagagat

SEQ ID NO: 1354319 - DNA, 15 bp, Homo sapiens
agttaccaatagaga

SEQ ID NO: 1354320 - DNA, 15 bp, Homo sapiens
cagttaccaatagag

SEQ ID NO: 1354321 - DNA, 15 bp, Homo sapiens
acagttaccaataga

SEQ ID NO: 1354322 - DNA, 15 bp, Homo sapiens
tacagttaccaatag

SEQ ID NO: 1354323 - DNA, 15 bp, Homo sapiens
atacagttaccaata

SEQ ID NO: 1354324 - DNA, 15 bp, Homo sapiens
aatacagttaccaat

SEQ ID NO: 1354325 - DNA, 15 bp, Homo sapiens
gaatacagttaccaa

SEQ ID NO: 1354326 - DNA, 15 bp, Homo sapiens
cgaatacagttacca

SEQ ID NO: 1354327 - DNA, 15 bp, Homo sapiens
acgaatacagttacc

SEQ ID NO: 1354328 - DNA, 15 bp, Homo sapiens
gacgaatacagttac

SEQ ID NO: 1354329 - DNA, 15 bp, Homo sapiens
ggacgaatacagtta

SEQ ID NO: 1354330 - DNA, 15 bp, Homo sapiens
cggacgaatacagtt

SEQ ID NO: 1354331 - DNA, 15 bp, Homo sapiens
acggacgaatacagt

SEQ ID NO: 1354332 - DNA, 15 bp, Homo sapiens
aacggacgaatacag

SEQ ID NO: 1354333 - DNA, 15 bp, Homo sapiens
aaacggacgaataca

SEQ ID NO: 1354334 - DNA, 15 bp, Homo sapiens
aaaacggacgaatac

SEQ ID NO: 1354335 - DNA, 15 bp, Homo sapiens
gaaaacggacgaata

SEQ ID NO: 1354336 - DNA, 15 bp, Homo sapiens
tgaaaacggacgaat

SEQ ID NO: 1354337 - DNA, 15 bp, Homo sapiens
gtgaaaacggacgaa

SEQ ID NO: 1354338 - DNA, 15 bp, Homo sapiens
tgtgaaaacggacga

SEQ ID NO: 1354339 - DNA, 15 bp, Homo sapiens
gtgtgaaaacggacg

SEQ ID NO: 1354340 - DNA, 15 bp, Homo sapiens
acagcagtgtgaaaa

SEQ ID NO: 1354341 - DNA, 15 bp, Homo sapiens
tacagcagtgtgaaa

SEQ ID NO: 1354342 - DNA, 15 bp, Homo sapiens
ttacagcagtgtgaa

SEQ ID NO: 1354343 - DNA, 15 bp, Homo sapiens
tttacagcagtgtga

SEQ ID NO: 1354344 - DNA, 15 bp, Homo sapiens
ctttacagcagtgtg

SEQ ID NO: 1354345 - DNA, 15 bp, Homo sapiens
tctttacagcagtgt

SEQ ID NO: 1354346 - DNA, 15 bp, Homo sapiens
ttctttacagcagtg

SEQ ID NO: 1354347 - DNA, 15 bp, Homo sapiens
gttctttacagcagt

SEQ ID NO: 1354348 - DNA, 15 bp, Homo sapiens
agttctttacagcag

SEQ ID NO: 1354349 - DNA, 15 bp, Homo sapiens
tagttctttacagca

SEQ ID NO: 1354350 - DNA, 15 bp, Homo sapiens
gtagttctttacagc

SEQ ID NO: 1354351 - DNA, 15 bp, Homo sapiens
ggtagttctttacag

SEQ ID NO: 1354352 - DNA, 15 bp, Homo sapiens
aggtagttctttaca

SEQ ID NO: 1354353 - DNA, 15 bp, Homo sapiens
caggtagttctttac

SEQ ID NO: 1354354 - DNA, 15 bp, Homo sapiens
tcaggtagttcttta

SEQ ID NO: 1354355 - DNA, 15 bp, Homo sapiens
gtcaggtagttcttt

SEQ ID NO: 1354356 - DNA, 15 bp, Homo sapiens
tgtcaggtagttctt

SEQ ID NO: 1354357 - DNA, 15 bp, Homo sapiens
atgtcaggtagttct

SEQ ID NO: 1354358 - DNA, 15 bp, Homo sapiens
aatgtcaggtagttc

SEQ ID NO: 1354359 - DNA, 15 bp, Homo sapiens
caatgtcaggtagtt

SEQ ID NO: 1354360 - DNA, 15 bp, Homo sapiens
ccaatgtcaggtagt

SEQ ID NO: 1354361 - DNA, 15 bp, Homo sapiens
cccaatgtcaggtag

SEQ ID NO: 1354362 - DNA, 15 bp, Homo sapiens
acccaatgtcaggta

SEQ ID NO: 1354363 - DNA, 15 bp, Homo sapiens
tacccaatgtcaggt

SEQ ID NO: 1354364 - DNA, 15 bp, Homo sapiens
ttacccaatgtcagg

SEQ ID NO: 1354365 - DNA, 15 bp, Homo sapiens
attacccaatgtcag

SEQ ID NO: 1354366 - DNA, 15 bp, Homo sapiens
aattacccaatgtca

SEQ ID NO: 1354367 - DNA, 15 bp, Homo sapiens
aaattacccaatgtc

SEQ ID NO: 1354368 - DNA, 15 bp, Homo sapiens
caaattacccaatgt

SEQ ID NO: 1354369 - DNA, 15 bp, Homo sapiens
acaaattacccaatg

SEQ ID NO: 1354370 - DNA, 15 bp, Homo sapiens
cacaaattacccaat

SEQ ID NO: 1354371 - DNA, 15 bp, Homo sapiens
tcacaaattacccaa

SEQ ID NO: 1354372 - DNA, 15 bp, Homo sapiens
ttcacaaattaccca

SEQ ID NO: 1354373 - DNA, 15 bp, Homo sapiens
cttcacaaattaccc

SEQ ID NO: 1354374 - DNA, 15 bp, Homo sapiens
tcttcacaaattacc

SEQ ID NO: 1354375 - DNA, 15 bp, Homo sapiens
ttcttcacaaattac

SEQ ID NO: 1354376 - DNA, 15 bp, Homo sapiens
tttcttcacaaatta

SEQ ID NO: 1354377 - DNA, 15 bp, Homo sapiens
ttttcttcacaaatt

SEQ ID NO: 1354378 - DNA, 15 bp, Homo sapiens
cttttcttcacaaat

SEQ ID NO: 1354379 - DNA, 15 bp, Homo sapiens
tcttttcttcacaaa

SEQ ID NO: 1354380 - DNA, 15 bp, Homo sapiens
ctcttttcttcacaa

SEQ ID NO: 1354381 - DNA, 15 bp, Homo sapiens
cctcttttcttcaca

SEQ ID NO: 1354382 - DNA, 15 bp, Homo sapiens
acctcttttcttcac

SEQ ID NO: 1354383 - DNA, 15 bp, Homo sapiens
aacctcttttcttca

SEQ ID NO: 1354384 - DNA, 15 bp, Homo sapiens
aaacctcttttcttc

SEQ ID NO: 1354385 - DNA, 15 bp, Homo sapiens
taaacctcttttctt

SEQ ID NO: 1354386 - DNA, 15 bp, Homo sapiens
ttaaacctcttttct

SEQ ID NO: 1354387 - DNA, 15 bp, Homo sapiens
attaaacctcttttc

SEQ ID NO: 1354388 - DNA, 15 bp, Homo sapiens
aattaaacctctttt

SEQ ID NO: 1354389 - DNA, 15 bp, Homo sapiens
aagtcaattaaacct

SEQ ID NO: 1354390 - DNA, 15 bp, Homo sapiens
taagtcaattaaacc

SEQ ID NO: 1354391 - DNA, 15 bp, Homo sapiens
gtaagtcaattaaac

SEQ ID NO: 1354392 - DNA, 15 bp, Homo sapiens
tgtaagtcaattaaa

SEQ ID NO: 1354393 - DNA, 15 bp, Homo sapiens
ctgtaagtcaattaa

SEQ ID NO: 1354394 - DNA, 15 bp, Homo sapiens
actgtaagtcaatta

SEQ ID NO: 1354395 - DNA, 15 bp, Homo sapiens
aactgtaagtcaatt

SEQ ID NO: 1354396 - DNA, 15 bp, Homo sapiens
gaactgtaagtcaat

SEQ ID NO: 1354397 - DNA, 15 bp, Homo sapiens
ggaactgtaagtcaa

SEQ ID NO: 1354398 - DNA, 15 bp, Homo sapiens
tggaactgtaagtca

SEQ ID NO: 1354399 - DNA, 15 bp, Homo sapiens
ctgtggaactgtaag

SEQ ID NO: 1354400 - DNA, 15 bp, Homo sapiens
cctgtggaactgtaa

SEQ ID NO: 1354401 - DNA, 15 bp, Homo sapiens
gcctgtggaactgta

SEQ ID NO: 1354402 - DNA, 15 bp, Homo sapiens
agcctgtggaactgt

SEQ ID NO: 1354403 - DNA, 15 bp, Homo sapiens
cagcctgtggaactg

SEQ ID NO: 1354404 - DNA, 15 bp, Homo sapiens
acagcctgtggaact

SEQ ID NO: 1354405 - DNA, 15 bp, Homo sapiens
tacagcctgtggaac

SEQ ID NO: 1354406 - DNA, 15 bp, Homo sapiens
gtacagcctgtggaa

SEQ ID NO: 1354407 - DNA, 15 bp, Homo sapiens
tgtacagcctgtgga

SEQ ID NO: 1354408 - DNA, 15 bp, Homo sapiens
ctgtacagcctgtgg

SEQ ID NO: 1354409 - DNA, 15 bp, Homo sapiens
cctgtacagcctgtg

SEQ ID NO: 1354410 - DNA, 15 bp, Homo sapiens
tcctgtacagcctgt

SEQ ID NO: 1354411 - DNA, 15 bp, Homo sapiens
ttcctgtacagcctg

SEQ ID NO: 1354412 - DNA, 15 bp, Homo sapiens
cttcctgtacagcct

SEQ ID NO: 1354413 - DNA, 15 bp, Homo sapiens
gcttcctgtacagcc

SEQ ID NO: 1354414 - DNA, 15 bp, Homo sapiens
tgcttcctgtacagc

SEQ ID NO: 1354415 - DNA, 15 bp, Homo sapiens
atgcttcctgtacag

SEQ ID NO: 1354416 - DNA, 15 bp, Homo sapiens
catgcttcctgtaca

SEQ ID NO: 1354417 - DNA, 15 bp, Homo sapiens
ccatgcttcctgtac

SEQ ID NO: 1354418 - DNA, 15 bp, Homo sapiens
gccatgcttcctgta

SEQ ID NO: 1354419 - DNA, 15 bp, Homo sapiens
agccatgcttcctgt

SEQ ID NO: 1354420 - DNA, 15 bp, Homo sapiens
cagccatgcttcctg

SEQ ID NO: 1354421 - DNA, 15 bp, Homo sapiens
ccagccatgcttcct

SEQ ID NO: 1354422 - DNA, 15 bp, Homo sapiens
cccagccatgcttcc

SEQ ID NO: 1354423 - DNA, 15 bp, Homo sapiens
tcccagccatgcttc

SEQ ID NO: 1354424 - DNA, 15 bp, Homo sapiens
ctcccagccatgctt

SEQ ID NO: 1354425 - DNA, 15 bp, Homo sapiens
cctcccagccatgct

SEQ ID NO: 1354426 - DNA, 15 bp, Homo sapiens
gcctcccagccatgc

SEQ ID NO: 1354427 - DNA, 15 bp, Homo sapiens
ggcctcccagccatg

SEQ ID NO: 1354428 - DNA, 15 bp, Homo sapiens
gaggcctcccagcca

SEQ ID NO: 1354429 - DNA, 15 bp, Homo sapiens
tgaggcctcccagcc

SEQ ID NO: 1354430 - DNA, 15 bp, Homo sapiens
ctgaggcctcccagc

SEQ ID NO: 1354431 - DNA, 15 bp, Homo sapiens
cctgaggcctcccag

SEQ ID NO: 1354432 - DNA, 15 bp, Homo sapiens
tcctgaggcctccca

SEQ ID NO: 1354433 - DNA, 15 bp, Homo sapiens
gattgtaagtttcct

SEQ ID NO: 1354434 - DNA, 15 bp, Homo sapiens
tgattgtaagtttcc

SEQ ID NO: 1354435 - DNA, 15 bp, Homo sapiens
gtgattgtaagtttc

SEQ ID NO: 1354436 - DNA, 15 bp, Homo sapiens
tgtgattgtaagttt

SEQ ID NO: 1354437 - DNA, 15 bp, Homo sapiens
ctgtgattgtaagtt

SEQ ID NO: 1354438 - DNA, 15 bp, Homo sapiens
gctgtgattgtaagt

SEQ ID NO: 1354439 - DNA, 15 bp, Homo sapiens
tgctgtgattgtaag

SEQ ID NO: 1354440 - DNA, 15 bp, Homo sapiens
ctgctgtgattgtaa

SEQ ID NO: 1354441 - DNA, 15 bp, Homo sapiens
tctgctgtgattgta

SEQ ID NO: 1354442 - DNA, 15 bp, Homo sapiens
ttctgctgtgattgt

SEQ ID NO: 1354443 - DNA, 15 bp, Homo sapiens
cttctgctgtgattg

SEQ ID NO: 1354444 - DNA, 15 bp, Homo sapiens
ccttctgctgtgatt

SEQ ID NO: 1354445 - DNA, 15 bp, Homo sapiens
gccttctgctgtgat

SEQ ID NO: 1354446 - DNA, 15 bp, Homo sapiens
tgccttctgctgtga

SEQ ID NO: 1354447 - DNA, 15 bp, Homo sapiens
ttgccttctgctgtg

SEQ ID NO: 1354448 - DNA, 15 bp, Homo sapiens
tttgccttctgctgt

SEQ ID NO: 1354449 - DNA, 15 bp, Homo sapiens
ctttgccttctgctg

SEQ ID NO: 1354450 - DNA, 15 bp, Homo sapiens
cctttgccttctgct

SEQ ID NO: 1354451 - DNA, 15 bp, Homo sapiens
ccctttgccttctgc

SEQ ID NO: 1354452 - DNA, 15 bp, Homo sapiens
cccctttgccttctg

SEQ ID NO: 1354453 - DNA, 15 bp, Homo sapiens
tcccctttgccttct

SEQ ID NO: 1354454 - DNA, 15 bp, Homo sapiens
ttcccctttgccttc

SEQ ID NO: 1354455 - DNA, 15 bp, Homo sapiens
cttcccctttgcctt

SEQ ID NO: 1354456 - DNA, 15 bp, Homo sapiens
gcttcccctttgcct

SEQ ID NO: 1354457 - DNA, 15 bp, Homo sapiens
tgcttcccctttgcc

SEQ ID NO: 1354458 - DNA, 15 bp, Homo sapiens
ttgcttcccctttgc

SEQ ID NO: 1354459 - DNA, 15 bp, Homo sapiens
cttgcttcccctttg

SEQ ID NO: 1354460 - DNA, 15 bp, Homo sapiens
gcttgcttccccttt

SEQ ID NO: 1354461 - DNA, 15 bp, Homo sapiens
tgcttgcttcccctt

SEQ ID NO: 1354462 - DNA, 15 bp, Homo sapiens
atgcttgcttcccct

SEQ ID NO: 1354463 - DNA, 15 bp, Homo sapiens
catgcttgcttcccc

SEQ ID NO: 1354464 - DNA, 15 bp, Homo sapiens
acatgcttgcttccc

SEQ ID NO: 1354465 - DNA, 15 bp, Homo sapiens
cacatgcttgcttcc

SEQ ID NO: 1354466 - DNA, 15 bp, Homo sapiens
acacatgcttgcttc

SEQ ID NO: 1354467 - DNA, 15 bp, Homo sapiens
aacacatgcttgctt

SEQ ID NO: 1354468 - DNA, 15 bp, Homo sapiens
taacacatgcttgct

SEQ ID NO: 1354469 - DNA, 15 bp, Homo sapiens
gtaacacatgcttgc

SEQ ID NO: 1354470 - DNA, 15 bp, Homo sapiens
ggtaacacatgcttg

SEQ ID NO: 1354471 - DNA, 15 bp, Homo sapiens
tggtaacacatgctt

SEQ ID NO: 1354472 - DNA, 15 bp, Homo sapiens
atggtaacacatgct

SEQ ID NO: 1354473 - DNA, 15 bp, Homo sapiens
catggtaacacatgc

SEQ ID NO: 1354474 - DNA, 15 bp, Homo sapiens
ccatggtaacacatg

SEQ ID NO: 1354475 - DNA, 15 bp, Homo sapiens
tccatggtaacacat

SEQ ID NO: 1354476 - DNA, 15 bp, Homo sapiens
ctccatggtaacaca

SEQ ID NO: 1354477 - DNA, 15 bp, Homo sapiens
cctccatggtaacac

SEQ ID NO: 1354478 - DNA, 15 bp, Homo sapiens
tcctccatggtaaca

SEQ ID NO: 1354479 - DNA, 15 bp, Homo sapiens
ctcctccatggtaac

SEQ ID NO: 1354480 - DNA, 15 bp, Homo sapiens
gctcctccatggtaa

SEQ ID NO: 1354481 - DNA, 15 bp, Homo sapiens
tgctcctccatggta

SEQ ID NO: 1354482 - DNA, 15 bp, Homo sapiens
ttgctcctccatggt

SEQ ID NO: 1354483 - DNA, 15 bp, Homo sapiens
cttgctcctccatgg

SEQ ID NO: 1354484 - DNA, 15 bp, Homo sapiens
tcttgctcctccatg

SEQ ID NO: 1354485 - DNA, 15 bp, Homo sapiens
ctcttgctcctccat

SEQ ID NO: 1354486 - DNA, 15 bp, Homo sapiens
tctcttgctcctcca

SEQ ID NO: 1354487 - DNA, 15 bp, Homo sapiens
ctctcttgctcctcc

SEQ ID NO: 1354488 - DNA, 15 bp, Homo sapiens
tctctcttgctcctc

SEQ ID NO: 1354489 - DNA, 15 bp, Homo sapiens
ctctctcttgctcct

SEQ ID NO: 1354490 - DNA, 15 bp, Homo sapiens
tctctctcttgctcc

SEQ ID NO: 1354491 - DNA, 15 bp, Homo sapiens
ctctctctcttgctc

SEQ ID NO: 1354492 - DNA, 15 bp, Homo sapiens
tctctctctcttgct

SEQ ID NO: 1354493 - DNA, 15 bp, Homo sapiens
ctctctctctcttgc

SEQ ID NO: 1354494 - DNA, 15 bp, Homo sapiens
gctctctctctcttg

SEQ ID NO: 1354495 - DNA, 15 bp, Homo sapiens
tgctctctctctctt

SEQ ID NO: 1354496 - DNA, 15 bp, Homo sapiens
tttgctctctctctc

SEQ ID NO: 1354497 - DNA, 15 bp, Homo sapiens
ctttgctctctctct

SEQ ID NO: 1354498 - DNA, 15 bp, Homo sapiens
cctttgctctctctc

SEQ ID NO: 1354499 - DNA, 15 bp, Homo sapiens
ccctttgctctctct

SEQ ID NO: 1354500 - DNA, 15 bp, Homo sapiens
accctttgctctctc

SEQ ID NO: 1354501 - DNA, 15 bp, Homo sapiens
caccctttgctctct

SEQ ID NO: 1354502 - DNA, 15 bp, Homo sapiens
tcaccctttgctctc

SEQ ID NO: 1354503 - DNA, 15 bp, Homo sapiens
ttcaccctttgctct

SEQ ID NO: 1354504 - DNA, 15 bp, Homo sapiens
cttcaccctttgctc

SEQ ID NO: 1354505 - DNA, 15 bp, Homo sapiens
acttcaccctttgct

SEQ ID NO: 1354506 - DNA, 15 bp, Homo sapiens
cacttcaccctttgc

SEQ ID NO: 1354507 - DNA, 15 bp, Homo sapiens
gcacttcaccctttg

SEQ ID NO: 1354508 - DNA, 15 bp, Homo sapiens
agcacttcacccttt

SEQ ID NO: 1354509 - DNA, 15 bp, Homo sapiens
tagcacttcaccctt

SEQ ID NO: 1354510 - DNA, 15 bp, Homo sapiens
gtagcacttcaccct

SEQ ID NO: 1354511 - DNA, 15 bp, Homo sapiens
tgtagcacttcaccc

SEQ ID NO: 1354512 - DNA, 15 bp, Homo sapiens
gtgtagcacttcacc

SEQ ID NO: 1354513 - DNA, 15 bp, Homo sapiens
tgtgtagcacttcac

SEQ ID NO: 1354514 - DNA, 15 bp, Homo sapiens
gtgtgtagcacttca

SEQ ID NO: 1354515 - DNA, 15 bp, Homo sapiens
agtgtgtagcacttc

SEQ ID NO: 1354516 - DNA, 15 bp, Homo sapiens
aagtgtgtagcactt

SEQ ID NO: 1354517 - DNA, 15 bp, Homo sapiens
aaagtgtgtagcact

SEQ ID NO: 1354518 - DNA, 15 bp, Homo sapiens
aaaagtgtgtagcac

SEQ ID NO: 1354519 - DNA, 15 bp, Homo sapiens
taaaagtgtgtagca

SEQ ID NO: 1354520 - DNA, 15 bp, Homo sapiens
ttaaaagtgtgtagc

SEQ ID NO: 1354521 - DNA, 15 bp, Homo sapiens
tttaaaagtgtgtag

SEQ ID NO: 1354522 - DNA, 15 bp, Homo sapiens
gtttaaaagtgtgta

SEQ ID NO: 1354523 - DNA, 15 bp, Homo sapiens
tgtttaaaagtgtgt

SEQ ID NO: 1354524 - DNA, 15 bp, Homo sapiens
ttgtttaaaagtgtg

SEQ ID NO: 1354525 - DNA, 15 bp, Homo sapiens
gttgtttaaaagtgt

SEQ ID NO: 1354526 - DNA, 15 bp, Homo sapiens
ggttgtttaaaagtg

SEQ ID NO: 1354527 - DNA, 15 bp, Homo sapiens
tggttgtttaaaagt

SEQ ID NO: 1354528 - DNA, 15 bp, Homo sapiens
ctggttgtttaaaag

SEQ ID NO: 1354529 - DNA, 15 bp, Homo sapiens
tctggttgtttaaaa

SEQ ID NO: 1354530 - DNA, 15 bp, Homo sapiens
atctggttgtttaaa

SEQ ID NO: 1354531 - DNA, 15 bp, Homo sapiens
gatctggttgtttaa

SEQ ID NO: 1354532 - DNA, 15 bp, Homo sapiens
agatctggttgttta

SEQ ID NO: 1354533 - DNA, 15 bp, Homo sapiens
aagatctggttgttt

SEQ ID NO: 1354534 - DNA, 15 bp, Homo sapiens
caagatctggttgtt

SEQ ID NO: 1354535 - DNA, 15 bp, Homo sapiens
acaagatctggttgt

SEQ ID NO: 1354536 - DNA, 15 bp, Homo sapiens
tacaagatctggttg

SEQ ID NO: 1354537 - DNA, 15 bp, Homo sapiens
ttacaagatctggtt

SEQ ID NO: 1354538 - DNA, 15 bp, Homo sapiens
cttacaagatctggt

SEQ ID NO: 1354539 - DNA, 15 bp, Homo sapiens
tcttacaagatctgg

SEQ ID NO: 1354540 - DNA, 15 bp, Homo sapiens
ttcttacaagatctg

SEQ ID NO: 1354541 - DNA, 15 bp, Homo sapiens
gttcttacaagatct

SEQ ID NO: 1354542 - DNA, 15 bp, Homo sapiens
agttcttacaagatc

SEQ ID NO: 1354543 - DNA, 15 bp, Homo sapiens
gagttcttacaagat

SEQ ID NO: 1354544 - DNA, 15 bp, Homo sapiens
tgagttcttacaaga

SEQ ID NO: 1354545 - DNA, 15 bp, Homo sapiens
gtgagttcttacaag

SEQ ID NO: 1354546 - DNA, 15 bp, Homo sapiens
agtgagttcttacaa

SEQ ID NO: 1354547 - DNA, 15 bp, Homo sapiens
gagtgagttcttaca

SEQ ID NO: 1354548 - DNA, 15 bp, Homo sapiens
tgagtgagttcttac

SEQ ID NO: 1354549 - DNA, 15 bp, Homo sapiens
gtgagtgagttctta

SEQ ID NO: 1354550 - DNA, 15 bp, Homo sapiens
agtgagtgagttctt

SEQ ID NO: 1354551 - DNA, 15 bp, Homo sapiens
tagtgagtgagttct

SEQ ID NO: 1354552 - DNA, 15 bp, Homo sapiens
atagtgagtgagttc

SEQ ID NO: 1354553 - DNA, 15 bp, Homo sapiens
gatagtgagtgagtt

SEQ ID NO: 1354554 - DNA, 15 bp, Homo sapiens
tgatagtgagtgagt

SEQ ID NO: 1354555 - DNA, 15 bp, Homo sapiens
gtgatagtgagtgag

SEQ ID NO: 1354556 - DNA, 15 bp, Homo sapiens
tgtgatagtgagtga

SEQ ID NO: 1354557 - DNA, 15 bp, Homo sapiens
ttgtgatagtgagtg

SEQ ID NO: 1354558 - DNA, 15 bp, Homo sapiens
cttgtgatagtgagt

SEQ ID NO: 1354559 - DNA, 15 bp, Homo sapiens
tcttgtgatagtgag

SEQ ID NO: 1354560 - DNA, 15 bp, Homo sapiens
ttcttgtgatagtga

SEQ ID NO: 1354561 - DNA, 15 bp, Homo sapiens
gttcttgtgatagtg

SEQ ID NO: 1354562 - DNA, 15 bp, Homo sapiens
tgttcttgtgatagt

SEQ ID NO: 1354563 - DNA, 15 bp, Homo sapiens
ctgttcttgtgatag

SEQ ID NO: 1354564 - DNA, 15 bp, Homo sapiens
gctgttcttgtgata

SEQ ID NO: 1354565 - DNA, 15 bp, Homo sapiens
tgctgttcttgtgat

SEQ ID NO: 1354566 - DNA, 15 bp, Homo sapiens
ttgctgttcttgtga

SEQ ID NO: 1354567 - DNA, 15 bp, Homo sapiens
cttgctgttcttgtg

SEQ ID NO: 1354568 - DNA, 15 bp, Homo sapiens
ccttgctgttcttgt

SEQ ID NO: 1354569 - DNA, 15 bp, Homo sapiens
cccttgctgttcttg

SEQ ID NO: 1354570 - DNA, 15 bp, Homo sapiens
ccccttgctgttctt

SEQ ID NO: 1354571 - DNA, 15 bp, Homo sapiens
cccccttgctgttct

SEQ ID NO: 1354572 - DNA, 15 bp, Homo sapiens
tcccccttgctgttc

SEQ ID NO: 1354573 - DNA, 15 bp, Homo sapiens
ttcccccttgctgtt

SEQ ID NO: 1354574 - DNA, 15 bp, Homo sapiens
tttcccccttgctgt

SEQ ID NO: 1354575 - DNA, 15 bp, Homo sapiens
atttcccccttgctg

SEQ ID NO: 1354576 - DNA, 15 bp, Homo sapiens
gatttcccccttgct

SEQ ID NO: 1354577 - DNA, 15 bp, Homo sapiens
ggatttcccccttgc

SEQ ID NO: 1354578 - DNA, 15 bp, Homo sapiens
cggatttcccccttg

SEQ ID NO: 1354579 - DNA, 15 bp, Homo sapiens
gcggatttccccctt

SEQ ID NO: 1354580 - DNA, 15 bp, Homo sapiens
ggcggatttccccct

SEQ ID NO: 1354581 - DNA, 15 bp, Homo sapiens
gggcggatttccccc

SEQ ID NO: 1354582 - DNA, 15 bp, Homo sapiens
ggggcggatttcccc

SEQ ID NO: 1354583 - DNA, 15 bp, Homo sapiens
gggggcggatttccc

SEQ ID NO: 1354584 - DNA, 15 bp, Homo sapiens
tgggggcggatttcc

SEQ ID NO: 1354585 - DNA, 15 bp, Homo sapiens
atgggggcggatttc

SEQ ID NO: 1354586 - DNA, 15 bp, Homo sapiens
catgggggcggattt

SEQ ID NO: 1354587 - DNA, 15 bp, Homo sapiens
tcatgggggcggatt

SEQ ID NO: 1354588 - DNA, 15 bp, Homo sapiens
atcatgggggcggat

SEQ ID NO: 1354589 - DNA, 15 bp, Homo sapiens
gatcatgggggcgga

SEQ ID NO: 1354590 - DNA, 15 bp, Homo sapiens
ggatcatgggggcgg

SEQ ID NO: 1354591 - DNA, 15 bp, Homo sapiens
tggatcatgggggcg

SEQ ID NO: 1354592 - DNA, 15 bp, Homo sapiens
ttggatcatgggggc

SEQ ID NO: 1354593 - DNA, 15 bp, Homo sapiens
tttggatcatggggg

SEQ ID NO: 1354594 - DNA, 15 bp, Homo sapiens
gtttggatcatgggg

SEQ ID NO: 1354595 - DNA, 15 bp, Homo sapiens
tgtttggatcatggg

SEQ ID NO: 1354596 - DNA, 15 bp, Homo sapiens
gtgtttggatcatgg

SEQ ID NO: 1354597 - DNA, 15 bp, Homo sapiens
agtgtttggatcatg

SEQ ID NO: 1354598 - DNA, 15 bp, Homo sapiens
aagtgtttggatcat

SEQ ID NO: 1354599 - DNA, 15 bp, Homo sapiens
gaagtgtttggatca

SEQ ID NO: 1354600 - DNA, 15 bp, Homo sapiens
ggaagtgtttggatc

SEQ ID NO: 1354601 - DNA, 15 bp, Homo sapiens
gggaagtgtttggat

SEQ ID NO: 1354602 - DNA, 15 bp, Homo sapiens
tgggaagtgtttgga

SEQ ID NO: 1354603 - DNA, 15 bp, Homo sapiens
gtgggaagtgtttgg

SEQ ID NO: 1354604 - DNA, 15 bp, Homo sapiens
ggtgggaagtgtttg

SEQ ID NO: 1354605 - DNA, 15 bp, Homo sapiens
tggtgggaagtgttt

SEQ ID NO: 1354606 - DNA, 15 bp, Homo sapiens
gtggtgggaagtgtt

SEQ ID NO: 1354607 - DNA, 15 bp, Homo sapiens
cgtggtgggaagtgt

SEQ ID NO: 1354608 - DNA, 15 bp, Homo sapiens
acgtggtgggaagtg

SEQ ID NO: 1354609 - DNA, 15 bp, Homo sapiens
gacgtggtgggaagt

SEQ ID NO: 1354610 - DNA, 15 bp, Homo sapiens
ggacgtggtgggaag

SEQ ID NO: 1354611 - DNA, 15 bp, Homo sapiens
gggacgtggtgggaa

SEQ ID NO: 1354612 - DNA, 15 bp, Homo sapiens
agggacgtggtggga

SEQ ID NO: 1354613 - DNA, 15 bp, Homo sapiens
gagggacgtggtggg

SEQ ID NO: 1354614 - DNA, 15 bp, Homo sapiens
ggagggacgtggtgg

SEQ ID NO: 1354615 - DNA, 15 bp, Homo sapiens
gggagggacgtggtg

SEQ ID NO: 1354616 - DNA, 15 bp, Homo sapiens
ggggagggacgtggt

SEQ ID NO: 1354617 - DNA, 15 bp, Homo sapiens
tggggagggacgtgg

SEQ ID NO: 1354618 - DNA, 15 bp, Homo sapiens
ttggggagggacgtg

SEQ ID NO: 1354619 - DNA, 15 bp, Homo sapiens
gttggggagggacgt

SEQ ID NO: 1354620 - DNA, 15 bp, Homo sapiens
tgttggggagggacg

SEQ ID NO: 1354621 - DNA, 15 bp, Homo sapiens
gtgttggggagggac

SEQ ID NO: 1354622 - DNA, 15 bp, Homo sapiens
agtgttggggaggga

SEQ ID NO: 1354623 - DNA, 15 bp, Homo sapiens
cagtgttggggaggg

SEQ ID NO: 1354624 - DNA, 15 bp, Homo sapiens
ccagtgttggggagg

SEQ ID NO: 1354625 - DNA, 15 bp, Homo sapiens
cccagtgttggggag

SEQ ID NO: 1354626 - DNA, 15 bp, Homo sapiens
acccagtgttgggga

SEQ ID NO: 1354627 - DNA, 15 bp, Homo sapiens
tacccagtgttgggg

SEQ ID NO: 1354628 - DNA, 15 bp, Homo sapiens
atacccagtgttggg

SEQ ID NO: 1354629 - DNA, 15 bp, Homo sapiens
aatacccagtgttgg

SEQ ID NO: 1354630 - DNA, 15 bp, Homo sapiens
taatacccagtgttg

SEQ ID NO: 1354631 - DNA, 15 bp, Homo sapiens
gtaatacccagtgtt

SEQ ID NO: 1354632 - DNA, 15 bp, Homo sapiens
tgtaatacccagtgt

SEQ ID NO: 1354633 - DNA, 15 bp, Homo sapiens
ttgtaatacccagtg

SEQ ID NO: 1354634 - DNA, 15 bp, Homo sapiens
attgtaatacccagt

SEQ ID NO: 1354635 - DNA, 15 bp, Homo sapiens
aattgtaatacccag

SEQ ID NO: 1354636 - DNA, 15 bp, Homo sapiens
aaattgtaataccca

SEQ ID NO: 1354637 - DNA, 15 bp, Homo sapiens
caaattgtaataccc

SEQ ID NO: 1354638 - DNA, 15 bp, Homo sapiens
tcaaattgtaatacc

SEQ ID NO: 1354639 - DNA, 15 bp, Homo sapiens
gtcaaattgtaatac

SEQ ID NO: 1354640 - DNA, 15 bp, Homo sapiens
tgtcaaattgtaata

SEQ ID NO: 1354641 - DNA, 15 bp, Homo sapiens
atgtcaaattgtaat

SEQ ID NO: 1354642 - DNA, 15 bp, Homo sapiens
catgtcaaattgtaa

SEQ ID NO: 1354643 - DNA, 15 bp, Homo sapiens
tcatgtcaaattgta

SEQ ID NO: 1354644 - DNA, 15 bp, Homo sapiens
ctcatgtcaaattgt

SEQ ID NO: 1354645 - DNA, 15 bp, Homo sapiens
tctcatgtcaaattg

SEQ ID NO: 1354646 - DNA, 15 bp, Homo sapiens
atctcatgtcaaatt

SEQ ID NO: 1354647 - DNA, 15 bp, Homo sapiens
aatctcatgtcaaat

SEQ ID NO: 1354648 - DNA, 15 bp, Homo sapiens
aaatctcatgtcaaa

SEQ ID NO: 1354649 - DNA, 15 bp, Homo sapiens
caaatctcatgtcaa

SEQ ID NO: 1354650 - DNA, 15 bp, Homo sapiens
acccaaatctcatgt

SEQ ID NO: 1354651 - DNA, 15 bp, Homo sapiens
cacccaaatctcatg

SEQ ID NO: 1354652 - DNA, 15 bp, Homo sapiens
ggtccccacccaaat

SEQ ID NO: 1354653 - DNA, 15 bp, Homo sapiens
gggtccccacccaaa

SEQ ID NO: 1354654 - DNA, 15 bp, Homo sapiens
tgggtccccacccaa

SEQ ID NO: 1354655 - DNA, 15 bp, Homo sapiens
ctgggtccccaccca

SEQ ID NO: 1354656 - DNA, 15 bp, Homo sapiens
tctgggtccccaccc

SEQ ID NO: 1354657 - DNA, 15 bp, Homo sapiens
ctctgggtccccacc

SEQ ID NO: 1354658 - DNA, 15 bp, Homo sapiens
gctctgggtccccac

SEQ ID NO: 1354659 - DNA, 15 bp, Homo sapiens
ggctctgggtcccca

SEQ ID NO: 1354660 - DNA, 15 bp, Homo sapiens
tggctctgggtcccc

SEQ ID NO: 1354661 - DNA, 15 bp, Homo sapiens
ttggctctgggtccc

SEQ ID NO: 1354662 - DNA, 15 bp, Homo sapiens
tttggctctgggtcc

SEQ ID NO: 1354663 - DNA, 15 bp, Homo sapiens
gtttggctctgggtc

SEQ ID NO: 1354664 - DNA, 15 bp, Homo sapiens
ggtttggctctgggt

SEQ ID NO: 1354665 - DNA, 15 bp, Homo sapiens
tggtttggctctggg

SEQ ID NO: 1354666 - DNA, 15 bp, Homo sapiens
atggtttggctctgg

SEQ ID NO: 1354667 - DNA, 15 bp, Homo sapiens
tagtgatatggtttg

SEQ ID NO: 1354668 - DNA, 15 bp, Homo sapiens
ttagtgatatggttt

SEQ ID NO: 1354669 - DNA, 15 bp, Homo sapiens
cttagtgatatggtt

SEQ ID NO: 1354670 - DNA, 15 bp, Homo sapiens
acttagtgatatggt

SEQ ID NO: 1354671 - DNA, 15 bp, Homo sapiens
gacttagtgatatgg

SEQ ID NO: 1354672 - DNA, 15 bp, Homo sapiens
agacttagtgatatg

SEQ ID NO: 1354673 - DNA, 15 bp, Homo sapiens
gagacttagtgatat

SEQ ID NO: 1354674 - DNA, 15 bp, Homo sapiens
agagacttagtgata

SEQ ID NO: 1354675 - DNA, 15 bp, Homo sapiens
tagagacttagtgat

SEQ ID NO: 1354676 - DNA, 15 bp, Homo sapiens
atagagacttagtga

SEQ ID NO: 1354677 - DNA, 15 bp, Homo sapiens
catagagacttagtg

SEQ ID NO: 1354678 - DNA, 15 bp, Homo sapiens
gcatagagacttagt

SEQ ID NO: 1354679 - DNA, 15 bp, Homo sapiens
ggcatagagacttag

SEQ ID NO: 1354680 - DNA, 15 bp, Homo sapiens
aggcatagagactta

SEQ ID NO: 1354681 - DNA, 15 bp, Homo sapiens
aaggcatagagactt

SEQ ID NO: 1354682 - DNA, 15 bp, Homo sapiens
caaggcatagagact

SEQ ID NO: 1354683 - DNA, 15 bp, Homo sapiens
tcaaggcatagagac

SEQ ID NO: 1354684 - DNA, 15 bp, Homo sapiens
ttcaaggcatagaga

SEQ ID NO: 1354685 - DNA, 15 bp, Homo sapiens
tttcaaggcatagag

SEQ ID NO: 1354686 - DNA, 15 bp, Homo sapiens
ttttcaaggcataga

SEQ ID NO: 1354687 - DNA, 15 bp, Homo sapiens
attttcaaggcatag

SEQ ID NO: 1354688 - DNA, 15 bp, Homo sapiens
aattttcaaggcata

SEQ ID NO: 1354689 - DNA, 15 bp, Homo sapiens
aaattttcaaggcat

SEQ ID NO: 1354690 - DNA, 15 bp, Homo sapiens
aaaattttcaaggca

SEQ ID NO: 1354691 - DNA, 15 bp, Homo sapiens
gaaaattttcaaggc

SEQ ID NO: 1354692 - DNA, 15 bp, Homo sapiens
ggaaaattttcaagg

SEQ ID NO: 1354693 - DNA, 15 bp, Homo sapiens
aggaaaattttcaag

SEQ ID NO: 1354694 - DNA, 15 bp, Homo sapiens
gaggaaaattttcaa

SEQ ID NO: 1354695 - DNA, 15 bp, Homo sapiens
agaggaaaattttca

SEQ ID NO: 1354696 - DNA, 15 bp, Homo sapiens
aagaggaaaattttc

SEQ ID NO: 1354697 - DNA, 15 bp, Homo sapiens
aaagaggaaaatttt

SEQ ID NO: 1354698 - DNA, 15 bp, Homo sapiens
aaaagaggaaaattt

SEQ ID NO: 1354699 - DNA, 15 bp, Homo sapiens
aaaaagaggaaaatt

SEQ ID NO: 1354700 - DNA, 15 bp, Homo sapiens
aaaaaagaggaaaat

SEQ ID NO: 1354701 - DNA, 15 bp, Homo sapiens
aaaaaaagaggaaaa

SEQ ID NO: 1354702 - DNA, 15 bp, Homo sapiens
caaaaaaagaggaaa

SEQ ID NO: 1354703 - DNA, 15 bp, Homo sapiens
aacaaaaaaagagga

SEQ ID NO: 1354704 - DNA, 15 bp, Homo sapiens
aaacaaaaaaagagg

SEQ ID NO: 1354705 - DNA, 15 bp, Homo sapiens
taaacaaaaaaagag

SEQ ID NO: 1354706 - DNA, 15 bp, Homo sapiens
ataaacaaaaaaaga

SEQ ID NO: 1354707 - DNA, 15 bp, Homo sapiens
tataaacaaaaaaag

SEQ ID NO: 1354708 - DNA, 15 bp, Homo sapiens
atataaacaaaaaaa

SEQ ID NO: 1354709 - DNA, 15 bp, Homo sapiens
tatataaacaaaaaa

SEQ ID NO: 1354710 - DNA, 15 bp, Homo sapiens
atatataaacaaaaa

SEQ ID NO: 1354711 - DNA, 15 bp, Homo sapiens
tatatataaacaaaa

SEQ ID NO: 1354712 - DNA, 15 bp, Homo sapiens
atatatataaacaaa

SEQ ID NO: 1354713 - DNA, 15 bp, Homo sapiens
aatatatataaacaa

SEQ ID NO: 1354714 - DNA, 15 bp, Homo sapiens
aaatatatataaaca

SEQ ID NO: 1354715 - DNA, 15 bp, Homo sapiens
caaatatatataaac

SEQ ID NO: 1354716 - DNA, 15 bp, Homo sapiens
tcaaatatatataaa

SEQ ID NO: 1354717 - DNA, 15 bp, Homo sapiens
ttcaaatatatataa

SEQ ID NO: 1354718 - DNA, 15 bp, Homo sapiens
tttcaaatatatata

SEQ ID NO: 1354719 - DNA, 15 bp, Homo sapiens
ttttcaaatatatat

SEQ ID NO: 1354720 - DNA, 15 bp, Homo sapiens
gttttcaaatatata

SEQ ID NO: 1354721 - DNA, 15 bp, Homo sapiens
agttttcaaatatat

SEQ ID NO: 1354722 - DNA, 15 bp, Homo sapiens
gagttttcaaatata

SEQ ID NO: 1354723 - DNA, 15 bp, Homo sapiens
tgagttttcaaatat

SEQ ID NO: 1354724 - DNA, 15 bp, Homo sapiens
atgagttttcaaata

SEQ ID NO: 1354725 - DNA, 15 bp, Homo sapiens
gatgagttttcaaat

SEQ ID NO: 1354726 - DNA, 15 bp, Homo sapiens
agatgagttttcaaa

SEQ ID NO: 1354727 - DNA, 15 bp, Homo sapiens
cagatgagttttcaa

SEQ ID NO: 1354728 - DNA, 15 bp, Homo sapiens
ccagatgagttttca

SEQ ID NO: 1354729 - DNA, 15 bp, Homo sapiens
tccagatgagttttc

SEQ ID NO: 1354730 - DNA, 15 bp, Homo sapiens
gtccagatgagtttt

SEQ ID NO: 1354731 - DNA, 15 bp, Homo sapiens
agtccagatgagttt

SEQ ID NO: 1354732 - DNA, 15 bp, Homo sapiens
tagtccagatgagtt

SEQ ID NO: 1354733 - DNA, 15 bp, Homo sapiens
ttagtccagatgagt

SEQ ID NO: 1354734 - DNA, 15 bp, Homo sapiens
tttagtccagatgag

SEQ ID NO: 1354735 - DNA, 15 bp, Homo sapiens
ttttagtccagatga

SEQ ID NO: 1354736 - DNA, 15 bp, Homo sapiens
cttttagtccagatg

SEQ ID NO: 1354737 - DNA, 15 bp, Homo sapiens
acttttagtccagat

SEQ ID NO: 1354738 - DNA, 15 bp, Homo sapiens
aacttttagtccaga

SEQ ID NO: 1354739 - DNA, 15 bp, Homo sapiens
taacttttagtccag

SEQ ID NO: 1354740 - DNA, 15 bp, Homo sapiens
ttaacttttagtcca

SEQ ID NO: 1354741 - DNA, 15 bp, Homo sapiens
attaacttttagtcc

SEQ ID NO: 1354742 - DNA, 15 bp, Homo sapiens
aattaacttttagtc

SEQ ID NO: 1354743 - DNA, 15 bp, Homo sapiens
taattaacttttagt

SEQ ID NO: 1354744 - DNA, 15 bp, Homo sapiens
ataattaacttttag

SEQ ID NO: 1354745 - DNA, 15 bp, Homo sapiens
aataattaactttta

SEQ ID NO: 1354746 - DNA, 15 bp, Homo sapiens
aaataattaactttt

SEQ ID NO: 1354747 - DNA, 15 bp, Homo sapiens
caaataattaacttt

SEQ ID NO: 1354748 - DNA, 15 bp, Homo sapiens
tcaaataattaactt

SEQ ID NO: 1354749 - DNA, 15 bp, Homo sapiens
gtcaaataattaact

SEQ ID NO: 1354750 - DNA, 15 bp, Homo sapiens
tgtcaaataattaac

SEQ ID NO: 1354751 - DNA, 15 bp, Homo sapiens
ttgtcaaataattaa

SEQ ID NO: 1354752 - DNA, 15 bp, Homo sapiens
gttgtcaaataatta

SEQ ID NO: 1354753 - DNA, 15 bp, Homo sapiens
ggttgtcaaataatt

SEQ ID NO: 1354754 - DNA, 15 bp, Homo sapiens
tggttgtcaaataat

SEQ ID NO: 1354755 - DNA, 15 bp, Homo sapiens
ttggttgtcaaataa

SEQ ID NO: 1354756 - DNA, 15 bp, Homo sapiens
tttggttgtcaaata

SEQ ID NO: 1354757 - DNA, 15 bp, Homo sapiens
ttttggttgtcaaat

SEQ ID NO: 1354758 - DNA, 15 bp, Homo sapiens
tttttggttgtcaaa

SEQ ID NO: 1354759 - DNA, 15 bp, Homo sapiens
atttttggttgtcaa

SEQ ID NO: 1354760 - DNA, 15 bp, Homo sapiens
aatttttggttgtca

SEQ ID NO: 1354761 - DNA, 15 bp, Homo sapiens
taatttttggttgtc

SEQ ID NO: 1354762 - DNA, 15 bp, Homo sapiens
ttaatttttggttgt

SEQ ID NO: 1354763 - DNA, 15 bp, Homo sapiens
attaatttttggttg

SEQ ID NO: 1354764 - DNA, 15 bp, Homo sapiens
aattaatttttggtt

SEQ ID NO: 1354765 - DNA, 15 bp, Homo sapiens
gaattaatttttggt

SEQ ID NO: 1354766 - DNA, 15 bp, Homo sapiens
ggaattaatttttgg

SEQ ID NO: 1354767 - DNA, 15 bp, Homo sapiens
gggaattaatttttg

SEQ ID NO: 1354768 - DNA, 15 bp, Homo sapiens
tgggaattaattttt

SEQ ID NO: 1354769 - DNA, 15 bp, Homo sapiens
ttgggaattaatttt

SEQ ID NO: 1354770 - DNA, 15 bp, Homo sapiens
gttgggaattaattt

SEQ ID NO: 1354771 - DNA, 15 bp, Homo sapiens
agttgggaattaatt

SEQ ID NO: 1354772 - DNA, 15 bp, Homo sapiens
gagttgggaattaat

SEQ ID NO: 1354773 - DNA, 15 bp, Homo sapiens
tgagttgggaattaa

SEQ ID NO: 1354774 - DNA, 15 bp, Homo sapiens
atgagttgggaatta

SEQ ID NO: 1354775 - DNA, 15 bp, Homo sapiens
catgagttgggaatt

SEQ ID NO: 1354776 - DNA, 15 bp, Homo sapiens
tcatgagttgggaat

SEQ ID NO: 1354777 - DNA, 15 bp, Homo sapiens
ttcatgagttgggaa

SEQ ID NO: 1354778 - DNA, 15 bp, Homo sapiens
cttcatgagttggga

SEQ ID NO: 1354779 - DNA, 15 bp, Homo sapiens
gcttcatgagttggg

SEQ ID NO: 1354780 - DNA, 15 bp, Homo sapiens
ggcttcatgagttgg

SEQ ID NO: 1354781 - DNA, 15 bp, Homo sapiens
tggcttcatgagttg

SEQ ID NO: 1354782 - DNA, 15 bp, Homo sapiens
ttggcttcatgagtt

SEQ ID NO: 1354783 - DNA, 15 bp, Homo sapiens
tttggcttcatgagt

SEQ ID NO: 1354784 - DNA, 15 bp, Homo sapiens
ttttggcttcatgag

SEQ ID NO: 1354785 - DNA, 15 bp, Homo sapiens
attttggcttcatga

SEQ ID NO: 1354786 - DNA, 15 bp, Homo sapiens
aattttggcttcatg

SEQ ID NO: 1354787 - DNA, 15 bp, Homo sapiens
gaattttggcttcat

SEQ ID NO: 1354788 - DNA, 15 bp, Homo sapiens
agaattttggcttca

SEQ ID NO: 1354789 - DNA, 15 bp, Homo sapiens
gagaattttggcttc

SEQ ID NO: 1354790 - DNA, 15 bp, Homo sapiens
tgagaattttggctt

SEQ ID NO: 1354791 - DNA, 15 bp, Homo sapiens
atgagaattttggct

SEQ ID NO: 1354792 - DNA, 15 bp, Homo sapiens
aatgagaattttggc

SEQ ID NO: 1354793 - DNA, 15 bp, Homo sapiens
aaatgagaattttgg

SEQ ID NO: 1354794 - DNA, 15 bp, Homo sapiens
aaaatgagaattttg

SEQ ID NO: 1354795 - DNA, 15 bp, Homo sapiens
aaaaatgagaatttt

SEQ ID NO: 1354796 - DNA, 15 bp, Homo sapiens
aaaaaatgagaattt

SEQ ID NO: 1354797 - DNA, 15 bp, Homo sapiens
taaaaaatgagaatt

SEQ ID NO: 1354798 - DNA, 15 bp, Homo sapiens
ttaaaaaatgagaat

SEQ ID NO: 1354799 - DNA, 15 bp, Homo sapiens
attaaaaaatgagaa

SEQ ID NO: 1354800 - DNA, 15 bp, Homo sapiens
tattaaaaaatgaga

SEQ ID NO: 1354801 - DNA, 15 bp, Homo sapiens
ttattaaaaaatgag

SEQ ID NO: 1354802 - DNA, 15 bp, Homo sapiens
tttattaaaaaatga

SEQ ID NO: 1354803 - DNA, 15 bp, Homo sapiens
ctttattaaaaaatg

SEQ ID NO: 1354804 - DNA, 15 bp, Homo sapiens
actttattaaaaaat

SEQ ID NO: 1354805 - DNA, 15 bp, Homo sapiens
aactttattaaaaaa

SEQ ID NO: 1354806 - DNA, 15 bp, Homo sapiens
gaactttattaaaaa

SEQ ID NO: 1354807 - DNA, 15 bp, Homo sapiens
tgaactttattaaaa

SEQ ID NO: 1354808 - DNA, 15 bp, Homo sapiens
ttgaactttattaaa

SEQ ID NO: 1354809 - DNA, 15 bp, Homo sapiens
gttgaactttattaa

SEQ ID NO: 1354810 - DNA, 15 bp, Homo sapiens
agttgaactttatta

SEQ ID NO: 1354811 - DNA, 15 bp, Homo sapiens
aagttgaactttatt

SEQ ID NO: 1354812 - DNA, 15 bp, Homo sapiens
taagttgaactttat

SEQ ID NO: 1354813 - DNA, 15 bp, Homo sapiens
ataagttgaacttta

SEQ ID NO: 1354814 - DNA, 15 bp, Homo sapiens
aataagttgaacttt

SEQ ID NO: 1354815 - DNA, 15 bp, Homo sapiens
caataagttgaactt

SEQ ID NO: 1354816 - DNA, 15 bp, Homo sapiens
ccaataagttgaact

SEQ ID NO: 1354817 - DNA, 15 bp, Homo sapiens
accaataagttgaac

SEQ ID NO: 1354818 - DNA, 15 bp, Homo sapiens
aaccaataagttgaa

SEQ ID NO: 1354819 - DNA, 15 bp, Homo sapiens
aaaccaataagttga

SEQ ID NO: 1354820 - DNA, 15 bp, Homo sapiens
aaaaccaataagttg

SEQ ID NO: 1354821 - DNA, 15 bp, Homo sapiens
aaaaaccaataagtt

SEQ ID NO: 1354822 - DNA, 15 bp, Homo sapiens
gaaaaaccaataagt

SEQ ID NO: 1354823 - DNA, 15 bp, Homo sapiens
agaaaaaccaataag

SEQ ID NO: 1354824 - DNA, 15 bp, Homo sapiens
gagaaaaaccaataa

SEQ ID NO: 1354825 - DNA, 15 bp, Homo sapiens
agagaaaaaccaata

SEQ ID NO: 1354826 - DNA, 15 bp, Homo sapiens
gagagaaaaaccaat

SEQ ID NO: 1354827 - DNA, 15 bp, Homo sapiens
tgagagaaaaaccaa

SEQ ID NO: 1354828 - DNA, 15 bp, Homo sapiens
atgagagaaaaacca

SEQ ID NO: 1354829 - DNA, 15 bp, Homo sapiens
tatgagagaaaaacc

SEQ ID NO: 1354830 - DNA, 15 bp, Homo sapiens
ctatgagagaaaaac

SEQ ID NO: 1354831 - DNA, 15 bp, Homo sapiens
tctatgagagaaaaa

SEQ ID NO: 1354832 - DNA, 15 bp, Homo sapiens
atctatgagagaaaa

SEQ ID NO: 1354833 - DNA, 15 bp, Homo sapiens
aatctatgagagaaa

SEQ ID NO: 1354834 - DNA, 15 bp, Homo sapiens
caatctatgagagaa

SEQ ID NO: 1354835 - DNA, 15 bp, Homo sapiens
acaatctatgagaga

SEQ ID NO: 1354836 - DNA, 15 bp, Homo sapiens
cacaatctatgagag

SEQ ID NO: 1354837 - DNA, 15 bp, Homo sapiens
gcacaatctatgaga

SEQ ID NO: 1354838 - DNA, 15 bp, Homo sapiens
agcacaatctatgag

SEQ ID NO: 1354839 - DNA, 15 bp, Homo sapiens
aagcacaatctatga

SEQ ID NO: 1354840 - DNA, 15 bp, Homo sapiens
aaagcacaatctatg

SEQ ID NO: 1354841 - DNA, 15 bp, Homo sapiens
caaagcacaatctat

SEQ ID NO: 1354842 - DNA, 15 bp, Homo sapiens
ccaaagcacaatcta

SEQ ID NO: 1354843 - DNA, 15 bp, Homo sapiens
cccaaagcacaatct

SEQ ID NO: 1354844 - DNA, 15 bp, Homo sapiens
ccccaaagcacaatc

SEQ ID NO: 1354845 - DNA, 15 bp, Homo sapiens
cccccaaagcacaat

SEQ ID NO: 1354846 - DNA, 15 bp, Homo sapiens
acccccaaagcacaa

SEQ ID NO: 1354847 - DNA, 15 bp, Homo sapiens
aacccccaaagcaca

SEQ ID NO: 1354848 - DNA, 15 bp, Homo sapiens
caacccccaaagcac

SEQ ID NO: 1354849 - DNA, 15 bp, Homo sapiens
acaacccccaaagca

SEQ ID NO: 1354850 - DNA, 15 bp, Homo sapiens
tacaacccccaaagc

SEQ ID NO: 1354851 - DNA, 15 bp, Homo sapiens
gtacaacccccaaag

SEQ ID NO: 1354852 - DNA, 15 bp, Homo sapiens
agtacaacccccaaa

SEQ ID NO: 1354853 - DNA, 15 bp, Homo sapiens
tagtacaacccccaa

SEQ ID NO: 1354854 - DNA, 15 bp, Homo sapiens
ttagtacaaccccca

SEQ ID NO: 1354855 - DNA, 15 bp, Homo sapiens
tttagtacaaccccc

SEQ ID NO: 1354856 - DNA, 15 bp, Homo sapiens
ttttagtacaacccc

SEQ ID NO: 1354857 - DNA, 15 bp, Homo sapiens
tttttagtacaaccc

SEQ ID NO: 1354858 - DNA, 15 bp, Homo sapiens
gtttttagtacaacc

SEQ ID NO: 1354859 - DNA, 15 bp, Homo sapiens
agtttttagtacaac

SEQ ID NO: 1354860 - DNA, 15 bp, Homo sapiens
cagtttttagtacaa

SEQ ID NO: 1354861 - DNA, 15 bp, Homo sapiens
tcagtttttagtaca

SEQ ID NO: 1354862 - DNA, 15 bp, Homo sapiens
ctcagtttttagtac

SEQ ID NO: 1354863 - DNA, 15 bp, Homo sapiens
tctcagtttttagta

SEQ ID NO: 1354864 - DNA, 15 bp, Homo sapiens
ttctcagtttttagt

SEQ ID NO: 1354865 - DNA, 15 bp, Homo sapiens
gttctcagtttttag

SEQ ID NO: 1354866 - DNA, 15 bp, Homo sapiens
ggttctcagttttta

SEQ ID NO: 1354867 - DNA, 15 bp, Homo sapiens
tggttctcagttttt

SEQ ID NO: 1354868 - DNA, 15 bp, Homo sapiens
ttggttctcagtttt

SEQ ID NO: 1354869 - DNA, 15 bp, Homo sapiens
tttggttctcagttt

SEQ ID NO: 1354870 - DNA, 15 bp, Homo sapiens
atttggttctcagtt

SEQ ID NO: 1354871 - DNA, 15 bp, Homo sapiens
gatttggttctcagt

SEQ ID NO: 1354872 - DNA, 15 bp, Homo sapiens
ggatttggttctcag

SEQ ID NO: 1354873 - DNA, 15 bp, Homo sapiens
tggatttggttctca

SEQ ID NO: 1354874 - DNA, 15 bp, Homo sapiens
ttggatttggttctc

SEQ ID NO: 1354875 - DNA, 15 bp, Homo sapiens
cttggatttggttct

SEQ ID NO: 1354876 - DNA, 15 bp, Homo sapiens
ccttggatttggttc

SEQ ID NO: 1354877 - DNA, 15 bp, Homo sapiens
accttggatttggtt

SEQ ID NO: 1354878 - DNA, 15 bp, Homo sapiens
gaccttggatttggt

SEQ ID NO: 1354879 - DNA, 15 bp, Homo sapiens
tgaccttggatttgg

SEQ ID NO: 1354880 - DNA, 15 bp, Homo sapiens
gtgaccttggatttg

SEQ ID NO: 1354881 - DNA, 15 bp, Homo sapiens
ggtgaccttggattt

SEQ ID NO: 1354882 - DNA, 15 bp, Homo sapiens
aggtgaccttggatt

SEQ ID NO: 1354883 - DNA, 15 bp, Homo sapiens
caggtgaccttggat

SEQ ID NO: 1354884 - DNA, 15 bp, Homo sapiens
ccaggtgaccttgga

SEQ ID NO: 1354885 - DNA, 15 bp, Homo sapiens
tccaggtgaccttgg

SEQ ID NO: 1354886 - DNA, 15 bp, Homo sapiens
atccaggtgaccttg

SEQ ID NO: 1354887 - DNA, 15 bp, Homo sapiens
aatccaggtgacctt

SEQ ID NO: 1354888 - DNA, 15 bp, Homo sapiens
caatccaggtgacct

SEQ ID NO: 1354889 - DNA, 15 bp, Homo sapiens
gcaatccaggtgacc

SEQ ID NO: 1354890 - DNA, 15 bp, Homo sapiens
ggcaatccaggtgac

SEQ ID NO: 1354891 - DNA, 15 bp, Homo sapiens
aggcaatccaggtga

SEQ ID NO: 1354892 - DNA, 15 bp, Homo sapiens
gaggcaatccaggtg

SEQ ID NO: 1354893 - DNA, 15 bp, Homo sapiens
ggaggcaatccaggt

SEQ ID NO: 1354894 - DNA, 15 bp, Homo sapiens
aggaggcaatccagg

SEQ ID NO: 1354895 - DNA, 15 bp, Homo sapiens
taggaggcaatccag

SEQ ID NO: 1354896 - DNA, 15 bp, Homo sapiens
ataggaggcaatcca

SEQ ID NO: 1354897 - DNA, 15 bp, Homo sapiens
cataggaggcaatcc

SEQ ID NO: 1354898 - DNA, 15 bp, Homo sapiens
gcataggaggcaatc

SEQ ID NO: 1354899 - DNA, 15 bp, Homo sapiens
agcataggaggcaat

SEQ ID NO: 1354900 - DNA, 15 bp, Homo sapiens
aagcataggaggcaa

SEQ ID NO: 1354901 - DNA, 15 bp, Homo sapiens
taagcataggaggca

SEQ ID NO: 1354902 - DNA, 15 bp, Homo sapiens
ataagcataggaggc

SEQ ID NO: 1354903 - DNA, 15 bp, Homo sapiens
aataagcataggagg

SEQ ID NO: 1354904 - DNA, 15 bp, Homo sapiens
gaataagcataggag

SEQ ID NO: 1354905 - DNA, 15 bp, Homo sapiens
agaataagcatagga

SEQ ID NO: 1354906 - DNA, 15 bp, Homo sapiens
tagaataagcatagg

SEQ ID NO: 1354907 - DNA, 15 bp, Homo sapiens
ctagaataagcatag

SEQ ID NO: 1354908 - DNA, 15 bp, Homo sapiens
tctagaataagcata

SEQ ID NO: 1354909 - DNA, 15 bp, Homo sapiens
ttctagaataagcat

SEQ ID NO: 1354910 - DNA, 15 bp, Homo sapiens
cttctagaataagca

SEQ ID NO: 1354911 - DNA, 15 bp, Homo sapiens
acttctagaataagc

SEQ ID NO: 1354912 - DNA, 15 bp, Homo sapiens
aacttctagaataag

SEQ ID NO: 1354913 - DNA, 15 bp, Homo sapiens
aaacttctagaataa

SEQ ID NO: 1354914 - DNA, 15 bp, Homo sapiens
aaaacttctagaata

SEQ ID NO: 1354915 - DNA, 15 bp, Homo sapiens
caaaacttctagaat

SEQ ID NO: 1354916 - DNA, 15 bp, Homo sapiens
acaaaacttctagaa

SEQ ID NO: 1354917 - DNA, 15 bp, Homo sapiens
tacaaaacttctaga

SEQ ID NO: 1354918 - DNA, 15 bp, Homo sapiens
ctacaaaacttctag

SEQ ID NO: 1354919 - DNA, 15 bp, Homo sapiens
actacaaaacttcta

SEQ ID NO: 1354920 - DNA, 15 bp, Homo sapiens
aactacaaaacttct

SEQ ID NO: 1354921 - DNA, 15 bp, Homo sapiens
aaactacaaaacttc

SEQ ID NO: 1354922 - DNA, 15 bp, Homo sapiens
aaaactacaaaactt

SEQ ID NO: 1354923 - DNA, 15 bp, Homo sapiens
caaaactacaaaact

SEQ ID NO: 1354924 - DNA, 15 bp, Homo sapiens
gcaaaactacaaaac

SEQ ID NO: 1354925 - DNA, 15 bp, Homo sapiens
tgcaaaactacaaaa

SEQ ID NO: 1354926 - DNA, 15 bp, Homo sapiens
atgcaaaactacaaa

SEQ ID NO: 1354927 - DNA, 15 bp, Homo sapiens
aatgcaaaactacaa

SEQ ID NO: 1354928 - DNA, 15 bp, Homo sapiens
taatgcaaaactaca

SEQ ID NO: 1354929 - DNA, 15 bp, Homo sapiens
ttaatgcaaaactac

SEQ ID NO: 1354930 - DNA, 15 bp, Homo sapiens
cttaatgcaaaacta

SEQ ID NO: 1354931 - DNA, 15 bp, Homo sapiens
ccttaatgcaaaact

SEQ ID NO: 1354932 - DNA, 15 bp, Homo sapiens
accttaatgcaaaac

SEQ ID NO: 1354933 - DNA, 15 bp, Homo sapiens
gaccttaatgcaaaa

SEQ ID NO: 1354934 - DNA, 15 bp, Homo sapiens
tgaccttaatgcaaa

SEQ ID NO: 1354935 - DNA, 15 bp, Homo sapiens
ttgaccttaatgcaa

SEQ ID NO: 1354936 - DNA, 15 bp, Homo sapiens
attgaccttaatgca

SEQ ID NO: 1354937 - DNA, 15 bp, Homo sapiens
cattgaccttaatgc

SEQ ID NO: 1354938 - DNA, 15 bp, Homo sapiens
tcattgaccttaatg

SEQ ID NO: 1354939 - DNA, 15 bp, Homo sapiens
atcattgaccttaat

SEQ ID NO: 1354940 - DNA, 15 bp, Homo sapiens
gatcattgaccttaa

SEQ ID NO: 1354941 - DNA, 15 bp, Homo sapiens
ggatcattgacctta

SEQ ID NO: 1354942 - DNA, 15 bp, Homo sapiens
tggatcattgacctt

SEQ ID NO: 1354943 - DNA, 15 bp, Homo sapiens
atggatcattgacct

SEQ ID NO: 1354944 - DNA, 15 bp, Homo sapiens
aatggatcattgacc

SEQ ID NO: 1354945 - DNA, 15 bp, Homo sapiens
aaatggatcattgac

SEQ ID NO: 1354946 - DNA, 15 bp, Homo sapiens
aaaatggatcattga

SEQ ID NO: 1354947 - DNA, 15 bp, Homo sapiens
gaaaatggatcattg

SEQ ID NO: 1354948 - DNA, 15 bp, Homo sapiens
tgaaaatggatcatt

SEQ ID NO: 1354949 - DNA, 15 bp, Homo sapiens
ctgaaaatggatcat

SEQ ID NO: 1354950 - DNA, 15 bp, Homo sapiens
actgaaaatggatca

SEQ ID NO: 1354951 - DNA, 15 bp, Homo sapiens
aactgaaaatggatc

SEQ ID NO: 1354952 - DNA, 15 bp, Homo sapiens
taactgaaaatggat

SEQ ID NO: 1354953 - DNA, 15 bp, Homo sapiens
ttaactgaaaatgga

SEQ ID NO: 1354954 - DNA, 15 bp, Homo sapiens
tttaactgaaaatgg

SEQ ID NO: 1354955 - DNA, 15 bp, Homo sapiens
atttaactgaaaatg

SEQ ID NO: 1354956 - DNA, 15 bp, Homo sapiens
aatttaactgaaaat

SEQ ID NO: 1354957 - DNA, 15 bp, Homo sapiens
aaatttaactgaaaa

SEQ ID NO: 1354958 - DNA, 15 bp, Homo sapiens
aaaatttaactgaaa

SEQ ID NO: 1354959 - DNA, 15 bp, Homo sapiens
aaaaatttaactgaa

SEQ ID NO: 1354960 - DNA, 15 bp, Homo sapiens
aaaaaatttaactga

SEQ ID NO: 1354961 - DNA, 15 bp, Homo sapiens
aaaaaaatttaactg

SEQ ID NO: 1354962 - DNA, 15 bp, Homo sapiens
aaaaaaaatttaact

SEQ ID NO: 1354963 - DNA, 15 bp, Homo sapiens
aaaaaaaaatttaac

SEQ ID NO: 1354964 - DNA, 15 bp, Homo sapiens
taaaaaaaaatttaa

SEQ ID NO: 1354965 - DNA, 15 bp, Homo sapiens
ttaaaaaaaaattta

SEQ ID NO: 1354966 - DNA, 15 bp, Homo sapiens
cttaaaaaaaaattt

SEQ ID NO: 1354967 - DNA, 15 bp, Homo sapiens
acttaaaaaaaaatt

SEQ ID NO: 1354968 - DNA, 15 bp, Homo sapiens
tacttaaaaaaaaat

SEQ ID NO: 1354969 - DNA, 15 bp, Homo sapiens
ttacttaaaaaaaaa

SEQ ID NO: 1354970 - DNA, 15 bp, Homo sapiens
attacttaaaaaaaa

SEQ ID NO: 1354971 - DNA, 15 bp, Homo sapiens
tattacttaaaaaaa

SEQ ID NO: 1354972 - DNA, 15 bp, Homo sapiens
ttattacttaaaaaa

SEQ ID NO: 1354973 - DNA, 15 bp, Homo sapiens
cttattacttaaaaa

SEQ ID NO: 1354974 - DNA, 15 bp, Homo sapiens
ccttattacttaaaa

SEQ ID NO: 1354975 - DNA, 15 bp, Homo sapiens
accttattacttaaa

SEQ ID NO: 1354976 - DNA, 15 bp, Homo sapiens
gaccttattacttaa

SEQ ID NO: 1354977 - DNA, 15 bp, Homo sapiens
agaccttattactta

SEQ ID NO: 1354978 - DNA, 15 bp, Homo sapiens
gagaccttattactt

SEQ ID NO: 1354979 - DNA, 15 bp, Homo sapiens
agagaccttattact

SEQ ID NO: 1354980 - DNA, 15 bp, Homo sapiens
cagagaccttattac

SEQ ID NO: 1354981 - DNA, 15 bp, Homo sapiens
ccagagaccttatta

SEQ ID NO: 1354982 - DNA, 15 bp, Homo sapiens
cccagagaccttatt

SEQ ID NO: 1354983 - DNA, 15 bp, Homo sapiens
acccagagaccttat

SEQ ID NO: 1354984 - DNA, 15 bp, Homo sapiens
gacccagagacctta

SEQ ID NO: 1354985 - DNA, 15 bp, Homo sapiens
agacccagagacctt

SEQ ID NO: 1354986 - DNA, 15 bp, Homo sapiens
cagacccagagacct

SEQ ID NO: 1354987 - DNA, 15 bp, Homo sapiens
acagacccagagacc

SEQ ID NO: 1354988 - DNA, 15 bp, Homo sapiens
cacagacccagagac

SEQ ID NO: 1354989 - DNA, 15 bp, Homo sapiens
acacagacccagaga

SEQ ID NO: 1354990 - DNA, 15 bp, Homo sapiens
gacacagacccagag

SEQ ID NO: 1354991 - DNA, 15 bp, Homo sapiens
agacacagacccaga

SEQ ID NO: 1354992 - DNA, 15 bp, Homo sapiens
tagacacagacccag

SEQ ID NO: 1354993 - DNA, 15 bp, Homo sapiens
ctagacacagaccca

SEQ ID NO: 1354994 - DNA, 15 bp, Homo sapiens
cctagacacagaccc

SEQ ID NO: 1354995 - DNA, 15 bp, Homo sapiens
acctagacacagacc

SEQ ID NO: 1354996 - DNA, 15 bp, Homo sapiens
aacctagacacagac

SEQ ID NO: 1354997 - DNA, 15 bp, Homo sapiens
gaacctagacacaga

SEQ ID NO: 1354998 - DNA, 15 bp, Homo sapiens
agaacctagacacag

SEQ ID NO: 1354999 - DNA, 15 bp, Homo sapiens
aagaacctagacaca

SEQ ID NO: 1355000 - DNA, 15 bp, Homo sapiens
gaagaacctagacac

SEQ ID NO: 1355001 - DNA, 15 bp, Homo sapiens
agaagaacctagaca

SEQ ID NO: 1355002 - DNA, 15 bp, Homo sapiens
aagaagaacctagac

SEQ ID NO: 1355003 - DNA, 15 bp, Homo sapiens
aaagaagaacctaga

SEQ ID NO: 1355004 - DNA, 15 bp, Homo sapiens
aaaagaagaacctag

SEQ ID NO: 1355005 - DNA, 15 bp, Homo sapiens
aaaaagaagaaccta

SEQ ID NO: 1355006 - DNA, 15 bp, Homo sapiens
aaaaaagaagaacct

SEQ ID NO: 1355007 - DNA, 15 bp, Homo sapiens
caaaaaagaagaacc

SEQ ID NO: 1355008 - DNA, 15 bp, Homo sapiens
gcaaaaaagaagaac

SEQ ID NO: 1355009 - DNA, 15 bp, Homo sapiens
tgcaaaaaagaagaa

SEQ ID NO: 1355010 - DNA, 15 bp, Homo sapiens
atgcaaaaaagaaga

SEQ ID NO: 1355011 - DNA, 15 bp, Homo sapiens
tatgcaaaaaagaag

SEQ ID NO: 1355012 - DNA, 15 bp, Homo sapiens
atatgcaaaaaagaa

SEQ ID NO: 1355013 - DNA, 15 bp, Homo sapiens
catatgcaaaaaaga

SEQ ID NO: 1355014 - DNA, 15 bp, Homo sapiens
ccatatgcaaaaaag

SEQ ID NO: 1355015 - DNA, 15 bp, Homo sapiens
tccatatgcaaaaaa

SEQ ID NO: 1355016 - DNA, 15 bp, Homo sapiens
ctccatatgcaaaaa

SEQ ID NO: 1355017 - DNA, 15 bp, Homo sapiens
tctccatatgcaaaa

SEQ ID NO: 1355018 - DNA, 15 bp, Homo sapiens
atctccatatgcaaa

SEQ ID NO: 1355019 - DNA, 15 bp, Homo sapiens
gatctccatatgcaa

SEQ ID NO: 1355020 - DNA, 15 bp, Homo sapiens
ggatctccatatgca

SEQ ID NO: 1355021 - DNA, 15 bp, Homo sapiens
tggatctccatatgc

SEQ ID NO: 1355022 - DNA, 15 bp, Homo sapiens
ttggatctccatatg

SEQ ID NO: 1355023 - DNA, 15 bp, Homo sapiens
attggatctccatat

SEQ ID NO: 1355024 - DNA, 15 bp, Homo sapiens
aattggatctccata

SEQ ID NO: 1355025 - DNA, 15 bp, Homo sapiens
caattggatctccat

SEQ ID NO: 1355026 - DNA, 15 bp, Homo sapiens
ccaattggatctcca

SEQ ID NO: 1355027 - DNA, 15 bp, Homo sapiens
accaattggatctcc

SEQ ID NO: 1355028 - DNA, 15 bp, Homo sapiens
gaccaattggatctc

SEQ ID NO: 1355029 - DNA, 15 bp, Homo sapiens
agaccaattggatct

SEQ ID NO: 1355030 - DNA, 15 bp, Homo sapiens
tagaccaattggatc

SEQ ID NO: 1355031 - DNA, 15 bp, Homo sapiens
atagaccaattggat

SEQ ID NO: 1355032 - DNA, 15 bp, Homo sapiens
aatagaccaattgga

SEQ ID NO: 1355033 - DNA, 15 bp, Homo sapiens
taatagaccaattgg

SEQ ID NO: 1355034 - DNA, 15 bp, Homo sapiens
ataatagaccaattg

SEQ ID NO: 1355035 - DNA, 15 bp, Homo sapiens
gataatagaccaatt

SEQ ID NO: 1355036 - DNA, 15 bp, Homo sapiens
tgataatagaccaat

SEQ ID NO: 1355037 - DNA, 15 bp, Homo sapiens
atgataatagaccaa

SEQ ID NO: 1355038 - DNA, 15 bp, Homo sapiens
aatgataatagacca

SEQ ID NO: 1355039 - DNA, 15 bp, Homo sapiens
aaatgataatagacc

SEQ ID NO: 1355040 - DNA, 15 bp, Homo sapiens
caaatgataatagac

SEQ ID NO: 1355041 - DNA, 15 bp, Homo sapiens
ccaaatgataataga

SEQ ID NO: 1355042 - DNA, 15 bp, Homo sapiens
accaaatgataatag

SEQ ID NO: 1355043 - DNA, 15 bp, Homo sapiens
caccaaatgataata

SEQ ID NO: 1355044 - DNA, 15 bp, Homo sapiens
tcaccaaatgataat

SEQ ID NO: 1355045 - DNA, 15 bp, Homo sapiens
ttcaccaaatgataa

SEQ ID NO: 1355046 - DNA, 15 bp, Homo sapiens
tttcaccaaatgata

SEQ ID NO: 1355047 - DNA, 15 bp, Homo sapiens
ttttcaccaaatgat

SEQ ID NO: 1355048 - DNA, 15 bp, Homo sapiens
cttttcaccaaatga

SEQ ID NO: 1355049 - DNA, 15 bp, Homo sapiens
tcttttcaccaaatg

SEQ ID NO: 1355050 - DNA, 15 bp, Homo sapiens
gtcttttcaccaaat

SEQ ID NO: 1355051 - DNA, 15 bp, Homo sapiens
agtcttttcaccaaa

SEQ ID NO: 1355052 - DNA, 15 bp, Homo sapiens
tagtcttttcaccaa

SEQ ID NO: 1355053 - DNA, 15 bp, Homo sapiens
gtagtcttttcacca

SEQ ID NO: 1355054 - DNA, 15 bp, Homo sapiens
ggtagtcttttcacc

SEQ ID NO: 1355055 - DNA, 15 bp, Homo sapiens
aggtagtcttttcac

SEQ ID NO: 1355056 - DNA, 15 bp, Homo sapiens
aaggtagtcttttca

SEQ ID NO: 1355057 - DNA, 15 bp, Homo sapiens
aaaggtagtcttttc

SEQ ID NO: 1355058 - DNA, 15 bp, Homo sapiens
gaaaggtagtctttt

SEQ ID NO: 1355059 - DNA, 15 bp, Homo sapiens
ggaaaggtagtcttt

SEQ ID NO: 1355060 - DNA, 15 bp, Homo sapiens
aggaaaggtagtctt

SEQ ID NO: 1355061 - DNA, 15 bp, Homo sapiens
gaggaaaggtagtct

SEQ ID NO: 1355062 - DNA, 15 bp, Homo sapiens
ggaggaaaggtagtc

SEQ ID NO: 1355063 - DNA, 15 bp, Homo sapiens
tggaggaaaggtagt

SEQ ID NO: 1355064 - DNA, 15 bp, Homo sapiens
atggaggaaaggtag

SEQ ID NO: 1355065 - DNA, 15 bp, Homo sapiens
aatggaggaaaggta

SEQ ID NO: 1355066 - DNA, 15 bp, Homo sapiens
caatggaggaaaggt

SEQ ID NO: 1355067 - DNA, 15 bp, Homo sapiens
tcaatggaggaaagg

SEQ ID NO: 1355068 - DNA, 15 bp, Homo sapiens
ttcaatggaggaaag

SEQ ID NO: 1355069 - DNA, 15 bp, Homo sapiens
attcaatggaggaaa

SEQ ID NO: 1355070 - DNA, 15 bp, Homo sapiens
aattcaatggaggaa

SEQ ID NO: 1355071 - DNA, 15 bp, Homo sapiens
caattcaatggagga

SEQ ID NO: 1355072 - DNA, 15 bp, Homo sapiens
acaattcaatggagg

SEQ ID NO: 1355073 - DNA, 15 bp, Homo sapiens
gacaattcaatggag

SEQ ID NO: 1355074 - DNA, 15 bp, Homo sapiens
agacaattcaatgga

SEQ ID NO: 1355075 - DNA, 15 bp, Homo sapiens
cagacaattcaatgg

SEQ ID NO: 1355076 - DNA, 15 bp, Homo sapiens
acagacaattcaatg

SEQ ID NO: 1355077 - DNA, 15 bp, Homo sapiens
cacagacaattcaat

SEQ ID NO: 1355078 - DNA, 15 bp, Homo sapiens
acacagacaattcaa

SEQ ID NO: 1355079 - DNA, 15 bp, Homo sapiens
aacacagacaattca

SEQ ID NO: 1355080 - DNA, 15 bp, Homo sapiens
gaacacagacaattc

SEQ ID NO: 1355081 - DNA, 15 bp, Homo sapiens
ggaacacagacaatt

SEQ ID NO: 1355082 - DNA, 15 bp, Homo sapiens
aggaacacagacaat

SEQ ID NO: 1355083 - DNA, 15 bp, Homo sapiens
aaggaacacagacaa

SEQ ID NO: 1355084 - DNA, 15 bp, Homo sapiens
aaaggaacacagaca

SEQ ID NO: 1355085 - DNA, 15 bp, Homo sapiens
caaaggaacacagac

SEQ ID NO: 1355086 - DNA, 15 bp, Homo sapiens
acaaaggaacacaga

SEQ ID NO: 1355087 - DNA, 15 bp, Homo sapiens
gacaaaggaacacag

SEQ ID NO: 1355088 - DNA, 15 bp, Homo sapiens
tgacaaaggaacaca

SEQ ID NO: 1355089 - DNA, 15 bp, Homo sapiens
ttgacaaaggaacac

SEQ ID NO: 1355090 - DNA, 15 bp, Homo sapiens
tttgacaaaggaaca

SEQ ID NO: 1355091 - DNA, 15 bp, Homo sapiens
ctttgacaaaggaac

SEQ ID NO: 1355092 - DNA, 15 bp, Homo sapiens
tctttgacaaaggaa

SEQ ID NO: 1355093 - DNA, 15 bp, Homo sapiens
atctttgacaaagga

SEQ ID NO: 1355094 - DNA, 15 bp, Homo sapiens
gatctttgacaaagg

SEQ ID NO: 1355095 - DNA, 15 bp, Homo sapiens
tgatctttgacaaag

SEQ ID NO: 1355096 - DNA, 15 bp, Homo sapiens
ctgatctttgacaaa

SEQ ID NO: 1355097 - DNA, 15 bp, Homo sapiens
actgatctttgacaa

SEQ ID NO: 1355098 - DNA, 15 bp, Homo sapiens
aactgatctttgaca

SEQ ID NO: 1355099 - DNA, 15 bp, Homo sapiens
caactgatctttgac

SEQ ID NO: 1355100 - DNA, 15 bp, Homo sapiens
tcaactgatctttga

SEQ ID NO: 1355101 - DNA, 15 bp, Homo sapiens
ttcaactgatctttg

SEQ ID NO: 1355102 - DNA, 15 bp, Homo sapiens
gttcaactgatcttt

SEQ ID NO: 1355103 - DNA, 15 bp, Homo sapiens
tgttcaactgatctt

SEQ ID NO: 1355104 - DNA, 15 bp, Homo sapiens
atgttcaactgatct

SEQ ID NO: 1355105 - DNA, 15 bp, Homo sapiens
catgttcaactgatc

SEQ ID NO: 1355106 - DNA, 15 bp, Homo sapiens
acatgttcaactgat

SEQ ID NO: 1355107 - DNA, 15 bp, Homo sapiens
aacatgttcaactga

SEQ ID NO: 1355108 - DNA, 15 bp, Homo sapiens
aaacatgttcaactg

SEQ ID NO: 1355109 - DNA, 15 bp, Homo sapiens
gaaacatgttcaact

SEQ ID NO: 1355110 - DNA, 15 bp, Homo sapiens
agaaacatgttcaac

SEQ ID NO: 1355111 - DNA, 15 bp, Homo sapiens
aagaaacatgttcaa

SEQ ID NO: 1355112 - DNA, 15 bp, Homo sapiens
aaagaaacatgttca

SEQ ID NO: 1355113 - DNA, 15 bp, Homo sapiens
caaagaaacatgttc

SEQ ID NO: 1355114 - DNA, 15 bp, Homo sapiens
ccaaagaaacatgtt

SEQ ID NO: 1355115 - DNA, 15 bp, Homo sapiens
cccaaagaaacatgt

SEQ ID NO: 1355116 - DNA, 15 bp, Homo sapiens
acccaaagaaacatg

SEQ ID NO: 1355117 - DNA, 15 bp, Homo sapiens
gacccaaagaaacat

SEQ ID NO: 1355118 - DNA, 15 bp, Homo sapiens
agacccaaagaaaca

SEQ ID NO: 1355119 - DNA, 15 bp, Homo sapiens
cagacccaaagaaac

SEQ ID NO: 1355120 - DNA, 15 bp, Homo sapiens
gcagacccaaagaaa

SEQ ID NO: 1355121 - DNA, 15 bp, Homo sapiens
agcagacccaaagaa

SEQ ID NO: 1355122 - DNA, 15 bp, Homo sapiens
aagcagacccaaaga

SEQ ID NO: 1355123 - DNA, 15 bp, Homo sapiens
gaagcagacccaaag

SEQ ID NO: 1355124 - DNA, 15 bp, Homo sapiens
agaagcagacccaaa

SEQ ID NO: 1355125 - DNA, 15 bp, Homo sapiens
cagaagcagacccaa

SEQ ID NO: 1355126 - DNA, 15 bp, Homo sapiens
ccagaagcagaccca

SEQ ID NO: 1355127 - DNA, 15 bp, Homo sapiens
tccagaagcagaccc

SEQ ID NO: 1355128 - DNA, 15 bp, Homo sapiens
gtccagaagcagacc

SEQ ID NO: 1355129 - DNA, 15 bp, Homo sapiens
agtccagaagcagac

SEQ ID NO: 1355130 - DNA, 15 bp, Homo sapiens
gagtccagaagcaga

SEQ ID NO: 1355131 - DNA, 15 bp, Homo sapiens
agagtccagaagcag

SEQ ID NO: 1355132 - DNA, 15 bp, Homo sapiens
cagagtccagaagca

SEQ ID NO: 1355133 - DNA, 15 bp, Homo sapiens
tcagagtccagaagc

SEQ ID NO: 1355134 - DNA, 15 bp, Homo sapiens
ttcagagtccagaag

SEQ ID NO: 1355135 - DNA, 15 bp, Homo sapiens
attcagagtccagaa

SEQ ID NO: 1355136 - DNA, 15 bp, Homo sapiens
aattcagagtccaga

SEQ ID NO: 1355137 - DNA, 15 bp, Homo sapiens
aaattcagagtccag

SEQ ID NO: 1355138 - DNA, 15 bp, Homo sapiens
taaattcagagtcca

SEQ ID NO: 1355139 - DNA, 15 bp, Homo sapiens
ctaaattcagagtcc

SEQ ID NO: 1355140 - DNA, 15 bp, Homo sapiens
actaaattcagagtc

SEQ ID NO: 1355141 - DNA, 15 bp, Homo sapiens
aactaaattcagagt

SEQ ID NO: 1355142 - DNA, 15 bp, Homo sapiens
aaactaaattcagag

SEQ ID NO: 1355143 - DNA, 15 bp, Homo sapiens
aaaactaaattcaga

SEQ ID NO: 1355144 - DNA, 15 bp, Homo sapiens
taaaactaaattcag

SEQ ID NO: 1355145 - DNA, 15 bp, Homo sapiens
ttaaaactaaattca

SEQ ID NO: 1355146 - DNA, 15 bp, Homo sapiens
attaaaactaaattc

SEQ ID NO: 1355147 - DNA, 15 bp, Homo sapiens
cattaaaactaaatt

SEQ ID NO: 1355148 - DNA, 15 bp, Homo sapiens
tcattaaaactaaat

SEQ ID NO: 1355149 - DNA, 15 bp, Homo sapiens
atcattaaaactaaa

SEQ ID NO: 1355150 - DNA, 15 bp, Homo sapiens
aatcattaaaactaa

SEQ ID NO: 1355151 - DNA, 15 bp, Homo sapiens
aaatcattaaaacta

SEQ ID NO: 1355152 - DNA, 15 bp, Homo sapiens
taaatcattaaaact

SEQ ID NO: 1355153 - DNA, 15 bp, Homo sapiens
ataaatcattaaaac

SEQ ID NO: 1355154 - DNA, 15 bp, Homo sapiens
cataaatcattaaaa

SEQ ID NO: 1355155 - DNA, 15 bp, Homo sapiens
acataaatcattaaa

SEQ ID NO: 1355156 - DNA, 15 bp, Homo sapiens
cacataaatcattaa

SEQ ID NO: 1355157 - DNA, 15 bp, Homo sapiens
acacataaatcatta

SEQ ID NO: 1355158 - DNA, 15 bp, Homo sapiens
gacacataaatcatt

SEQ ID NO: 1355159 - DNA, 15 bp, Homo sapiens
agacacataaatcat

SEQ ID NO: 1355160 - DNA, 15 bp, Homo sapiens
tagacacataaatca

SEQ ID NO: 1355161 - DNA, 15 bp, Homo sapiens
atagacacataaatc

SEQ ID NO: 1355162 - DNA, 15 bp, Homo sapiens
aatagacacataaat

SEQ ID NO: 1355163 - DNA, 15 bp, Homo sapiens
taatagacacataaa

SEQ ID NO: 1355164 - DNA, 15 bp, Homo sapiens
ttaatagacacataa

SEQ ID NO: 1355165 - DNA, 15 bp, Homo sapiens
attaatagacacata

SEQ ID NO: 1355166 - DNA, 15 bp, Homo sapiens
aattaatagacacat

SEQ ID NO: 1355167 - DNA, 15 bp, Homo sapiens
aaattaatagacaca

SEQ ID NO: 1355168 - DNA, 15 bp, Homo sapiens
taaattaatagacac

SEQ ID NO: 1355169 - DNA, 15 bp, Homo sapiens
gtaaattaatagaca

SEQ ID NO: 1355170 - DNA, 15 bp, Homo sapiens
ggtaaattaatagac

SEQ ID NO: 1355171 - DNA, 15 bp, Homo sapiens
tggtaaattaataga

SEQ ID NO: 1355172 - DNA, 15 bp, Homo sapiens
ttggtaaattaatag

SEQ ID NO: 1355173 - DNA, 15 bp, Homo sapiens
attggtaaattaata

SEQ ID NO: 1355174 - DNA, 15 bp, Homo sapiens
tattggtaaattaat

SEQ ID NO: 1355175 - DNA, 15 bp, Homo sapiens
gtattggtaaattaa

SEQ ID NO: 1355176 - DNA, 15 bp, Homo sapiens
agtattggtaaatta

SEQ ID NO: 1355177 - DNA, 15 bp, Homo sapiens
tagtattggtaaatt

SEQ ID NO: 1355178 - DNA, 15 bp, Homo sapiens
gtagtattggtaaat

SEQ ID NO: 1355179 - DNA, 15 bp, Homo sapiens
tgtagtattggtaaa

SEQ ID NO: 1355180 - DNA, 15 bp, Homo sapiens
gtgtagtattggtaa

SEQ ID NO: 1355181 - DNA, 15 bp, Homo sapiens
agtgtagtattggta

SEQ ID NO: 1355182 - DNA, 15 bp, Homo sapiens
cagtgtagtattggt

SEQ ID NO: 1355183 - DNA, 15 bp, Homo sapiens
acagtgtagtattgg

SEQ ID NO: 1355184 - DNA, 15 bp, Homo sapiens
gacagtgtagtattg

SEQ ID NO: 1355185 - DNA, 15 bp, Homo sapiens
tgacagtgtagtatt

SEQ ID NO: 1355186 - DNA, 15 bp, Homo sapiens
atgacagtgtagtat

SEQ ID NO: 1355187 - DNA, 15 bp, Homo sapiens
catgacagtgtagta

SEQ ID NO: 1355188 - DNA, 15 bp, Homo sapiens
tcatgacagtgtagt

SEQ ID NO: 1355189 - DNA, 15 bp, Homo sapiens
atcatgacagtgtag

SEQ ID NO: 1355190 - DNA, 15 bp, Homo sapiens
aatcatgacagtgta

SEQ ID NO: 1355191 - DNA, 15 bp, Homo sapiens
aaatcatgacagtgt

SEQ ID NO: 1355192 - DNA, 15 bp, Homo sapiens
gaaatcatgacagtg

SEQ ID NO: 1355193 - DNA, 15 bp, Homo sapiens
agaaatcatgacagt

SEQ ID NO: 1355194 - DNA, 15 bp, Homo sapiens
aagaaatcatgacag

SEQ ID NO: 1355195 - DNA, 15 bp, Homo sapiens
aaagaaatcatgaca

SEQ ID NO: 1355196 - DNA, 15 bp, Homo sapiens
taaagaaatcatgac

SEQ ID NO: 1355197 - DNA, 15 bp, Homo sapiens
ttaaagaaatcatga

SEQ ID NO: 1355198 - DNA, 15 bp, Homo sapiens
gttaaagaaatcatg

SEQ ID NO: 1355199 - DNA, 15 bp, Homo sapiens
agttaaagaaatcat

SEQ ID NO: 1355200 - DNA, 15 bp, Homo sapiens
aagttaaagaaatca

SEQ ID NO: 1355201 - DNA, 15 bp, Homo sapiens
aaagttaaagaaatc

SEQ ID NO: 1355202 - DNA, 15 bp, Homo sapiens
taaagttaaagaaat

SEQ ID NO: 1355203 - DNA, 15 bp, Homo sapiens
gtaaagttaaagaaa

SEQ ID NO: 1355204 - DNA, 15 bp, Homo sapiens
tgtaaagttaaagaa

SEQ ID NO: 1355205 - DNA, 15 bp, Homo sapiens
atgtaaagttaaaga

SEQ ID NO: 1355206 - DNA, 15 bp, Homo sapiens
aatgtaaagttaaag

SEQ ID NO: 1355207 - DNA, 15 bp, Homo sapiens
taatgtaaagttaaa

SEQ ID NO: 1355208 - DNA, 15 bp, Homo sapiens
ttaatgtaaagttaa

SEQ ID NO: 1355209 - DNA, 15 bp, Homo sapiens
attaatgtaaagtta

SEQ ID NO: 1355210 - DNA, 15 bp, Homo sapiens
aattaatgtaaagtt

SEQ ID NO: 1355211 - DNA, 15 bp, Homo sapiens
aaattaatgtaaagt

SEQ ID NO: 1355212 - DNA, 15 bp, Homo sapiens
aaaattaatgtaaag

SEQ ID NO: 1355213 - DNA, 15 bp, Homo sapiens
aaaaattaatgtaaa

SEQ ID NO: 1355214 - DNA, 15 bp, Homo sapiens
caaaaattaatgtaa

SEQ ID NO: 1355215 - DNA, 15 bp, Homo sapiens
tcaaaaattaatgta

SEQ ID NO: 1355216 - DNA, 15 bp, Homo sapiens
ttcaaaaattaatgt

SEQ ID NO: 1355217 - DNA, 15 bp, Homo sapiens
tttcaaaaattaatg

SEQ ID NO: 1355218 - DNA, 15 bp, Homo sapiens
atttcaaaaattaat

SEQ ID NO: 1355219 - DNA, 15 bp, Homo sapiens
gatttcaaaaattaa

SEQ ID NO: 1355220 - DNA, 15 bp, Homo sapiens
tgatttcaaaaatta

SEQ ID NO: 1355221 - DNA, 15 bp, Homo sapiens
ctgatttcaaaaatt

SEQ ID NO: 1355222 - DNA, 15 bp, Homo sapiens
tctgatttcaaaaat

SEQ ID NO: 1355223 - DNA, 15 bp, Homo sapiens
atctgatttcaaaaa

SEQ ID NO: 1355224 - DNA, 15 bp, Homo sapiens
tatctgatttcaaaa

SEQ ID NO: 1355225 - DNA, 15 bp, Homo sapiens
ctatctgatttcaaa

SEQ ID NO: 1355226 - DNA, 15 bp, Homo sapiens
actatctgatttcaa

SEQ ID NO: 1355227 - DNA, 15 bp, Homo sapiens
aactatctgatttca

SEQ ID NO: 1355228 - DNA, 15 bp, Homo sapiens
aaactatctgatttc

SEQ ID NO: 1355229 - DNA, 15 bp, Homo sapiens
gaaactatctgattt

SEQ ID NO: 1355230 - DNA, 15 bp, Homo sapiens
tgaaactatctgatt

SEQ ID NO: 1355231 - DNA, 15 bp, Homo sapiens
ctgaaactatctgat

SEQ ID NO: 1355232 - DNA, 15 bp, Homo sapiens
actgaaactatctga

SEQ ID NO: 1355233 - DNA, 15 bp, Homo sapiens
aactgaaactatctg

SEQ ID NO: 1355234 - DNA, 15 bp, Homo sapiens
gaactgaaactatct

SEQ ID NO: 1355235 - DNA, 15 bp, Homo sapiens
agaactgaaactatc

SEQ ID NO: 1355236 - DNA, 15 bp, Homo sapiens
gagaactgaaactat

SEQ ID NO: 1355237 - DNA, 15 bp, Homo sapiens
agagaactgaaacta

SEQ ID NO: 1355238 - DNA, 15 bp, Homo sapiens
tagagaactgaaact

SEQ ID NO: 1355239 - DNA, 15 bp, Homo sapiens
ttagagaactgaaac

SEQ ID NO: 1355240 - DNA, 15 bp, Homo sapiens
gttagagaactgaaa

SEQ ID NO: 1355241 - DNA, 15 bp, Homo sapiens
agttagagaactgaa

SEQ ID NO: 1355242 - DNA, 15 bp, Homo sapiens
aagttagagaactga

SEQ ID NO: 1355243 - DNA, 15 bp, Homo sapiens
aaagttagagaactg

SEQ ID NO: 1355244 - DNA, 15 bp, Homo sapiens
caaagttagagaact

SEQ ID NO: 1355245 - DNA, 15 bp, Homo sapiens
acaaagttagagaac

SEQ ID NO: 1355246 - DNA, 15 bp, Homo sapiens
aacaaagttagagaa

SEQ ID NO: 1355247 - DNA, 15 bp, Homo sapiens
gaacaaagttagaga

SEQ ID NO: 1355248 - DNA, 15 bp, Homo sapiens
agaacaaagttagag

SEQ ID NO: 1355249 - DNA, 15 bp, Homo sapiens
aagaacaaagttaga

SEQ ID NO: 1355250 - DNA, 15 bp, Homo sapiens
gaagaacaaagttag

SEQ ID NO: 1355251 - DNA, 15 bp, Homo sapiens
agaagaacaaagtta

SEQ ID NO: 1355252 - DNA, 15 bp, Homo sapiens
aagaagaacaaagtt

SEQ ID NO: 1355253 - DNA, 15 bp, Homo sapiens
gaagaagaacaaagt

SEQ ID NO: 1355254 - DNA, 15 bp, Homo sapiens
tgaagaagaacaaag

SEQ ID NO: 1355255 - DNA, 15 bp, Homo sapiens
ctgaagaagaacaaa

SEQ ID NO: 1355256 - DNA, 15 bp, Homo sapiens
actgaagaagaacaa

SEQ ID NO: 1355257 - DNA, 15 bp, Homo sapiens
tactgaagaagaaca

SEQ ID NO: 1355258 - DNA, 15 bp, Homo sapiens
atactgaagaagaac

SEQ ID NO: 1355259 - DNA, 15 bp, Homo sapiens
aatactgaagaagaa

SEQ ID NO: 1355260 - DNA, 15 bp, Homo sapiens
caatactgaagaaga

SEQ ID NO: 1355261 - DNA, 15 bp, Homo sapiens
acaatactgaagaag

SEQ ID NO: 1355262 - DNA, 15 bp, Homo sapiens
cacaatactgaagaa

SEQ ID NO: 1355263 - DNA, 15 bp, Homo sapiens
acacaatactgaaga

SEQ ID NO: 1355264 - DNA, 15 bp, Homo sapiens
tacacaatactgaag

SEQ ID NO: 1355265 - DNA, 15 bp, Homo sapiens
ttacacaatactgaa

SEQ ID NO: 1355266 - DNA, 15 bp, Homo sapiens
gttacacaatactga

SEQ ID NO: 1355267 - DNA, 15 bp, Homo sapiens
agttacacaatactg

SEQ ID NO: 1355268 - DNA, 15 bp, Homo sapiens
cagttacacaatact

SEQ ID NO: 1355269 - DNA, 15 bp, Homo sapiens
tcagttacacaatac

SEQ ID NO: 1355270 - DNA, 15 bp, Homo sapiens
atcagttacacaata

SEQ ID NO: 1355271 - DNA, 15 bp, Homo sapiens
aatcagttacacaat

SEQ ID NO: 1355272 - DNA, 15 bp, Homo sapiens
caatcagttacacaa

SEQ ID NO: 1355273 - DNA, 15 bp, Homo sapiens
acaatcagttacaca

SEQ ID NO: 1355274 - DNA, 15 bp, Homo sapiens
tacaatcagttacac

SEQ ID NO: 1355275 - DNA, 15 bp, Homo sapiens
ctacaatcagttaca

SEQ ID NO: 1355276 - DNA, 15 bp, Homo sapiens
tctacaatcagttac

SEQ ID NO: 1355277 - DNA, 15 bp, Homo sapiens
atctacaatcagtta

SEQ ID NO: 1355278 - DNA, 15 bp, Homo sapiens
aatctacaatcagtt

SEQ ID NO: 1355279 - DNA, 15 bp, Homo sapiens
aaatctacaatcagt

SEQ ID NO: 1355280 - DNA, 15 bp, Homo sapiens
aaaatctacaatcag

SEQ ID NO: 1355281 - DNA, 15 bp, Homo sapiens
aaaaatctacaatca

SEQ ID NO: 1355282 - DNA, 15 bp, Homo sapiens
caaaaatctacaatc

SEQ ID NO: 1355283 - DNA, 15 bp, Homo sapiens
gcaaaaatctacaat

SEQ ID NO: 1355284 - DNA, 15 bp, Homo sapiens
agcaaaaatctacaa

SEQ ID NO: 1355285 - DNA, 15 bp, Homo sapiens
aagcaaaaatctaca

SEQ ID NO: 1355286 - DNA, 15 bp, Homo sapiens
aaagcaaaaatctac

SEQ ID NO: 1355287 - DNA, 15 bp, Homo sapiens
aaaagcaaaaatcta

SEQ ID NO: 1355288 - DNA, 15 bp, Homo sapiens
aaaaagcaaaaatct

SEQ ID NO: 1355289 - DNA, 15 bp, Homo sapiens
aaaaaagcaaaaatc

SEQ ID NO: 1355290 - DNA, 15 bp, Homo sapiens
taaaaaagcaaaaat

SEQ ID NO: 1355291 - DNA, 15 bp, Homo sapiens
ataaaaaagcaaaaa

SEQ ID NO: 1355292 - DNA, 15 bp, Homo sapiens
tataaaaaagcaaaa

SEQ ID NO: 1355293 - DNA, 15 bp, Homo sapiens
ttataaaaaagcaaa

SEQ ID NO: 1355294 - DNA, 15 bp, Homo sapiens
cttataaaaaagcaa

SEQ ID NO: 1355295 - DNA, 15 bp, Homo sapiens
tcttataaaaaagca

SEQ ID NO: 1355296 - DNA, 15 bp, Homo sapiens
ctcttataaaaaagc

SEQ ID NO: 1355297 - DNA, 15 bp, Homo sapiens
gctcttataaaaaag

SEQ ID NO: 1355298 - DNA, 15 bp, Homo sapiens
agctcttataaaaaa

SEQ ID NO: 1355299 - DNA, 15 bp, Homo sapiens
gagctcttataaaaa

SEQ ID NO: 1355300 - DNA, 15 bp, Homo sapiens
agagctcttataaaa

SEQ ID NO: 1355301 - DNA, 15 bp, Homo sapiens
tagagctcttataaa

SEQ ID NO: 1355302 - DNA, 15 bp, Homo sapiens
ctagagctcttataa

SEQ ID NO: 1355303 - DNA, 15 bp, Homo sapiens
tctagagctcttata

SEQ ID NO: 1355304 - DNA, 15 bp, Homo sapiens
ttctagagctcttat

SEQ ID NO: 1355305 - DNA, 15 bp, Homo sapiens
attctagagctctta

SEQ ID NO: 1355306 - DNA, 15 bp, Homo sapiens
gattctagagctctt

SEQ ID NO: 1355307 - DNA, 15 bp, Homo sapiens
tgattctagagctct

SEQ ID NO: 1355308 - DNA, 15 bp, Homo sapiens
ctgattctagagctc

SEQ ID NO: 1355309 - DNA, 15 bp, Homo sapiens
actgattctagagct

SEQ ID NO: 1355310 - DNA, 15 bp, Homo sapiens
aactgattctagagc

SEQ ID NO: 1355311 - DNA, 15 bp, Homo sapiens
aaactgattctagag

SEQ ID NO: 1355312 - DNA, 15 bp, Homo sapiens
caaactgattctaga

SEQ ID NO: 1355313 - DNA, 15 bp, Homo sapiens
acaaactgattctag

SEQ ID NO: 1355314 - DNA, 15 bp, Homo sapiens
gacaaactgattcta

SEQ ID NO: 1355315 - DNA, 15 bp, Homo sapiens
tgacaaactgattct

SEQ ID NO: 1355316 - DNA, 15 bp, Homo sapiens
ttgacaaactgattc

SEQ ID NO: 1355317 - DNA, 15 bp, Homo sapiens
attgacaaactgatt

SEQ ID NO: 1355318 - DNA, 15 bp, Homo sapiens
tattgacaaactgat

SEQ ID NO: 1355319 - DNA, 15 bp, Homo sapiens
atattgacaaactga

SEQ ID NO: 1355320 - DNA, 15 bp, Homo sapiens
gatattgacaaactg

SEQ ID NO: 1355321 - DNA, 15 bp, Homo sapiens
agatattgacaaact

SEQ ID NO: 1355322 - DNA, 15 bp, Homo sapiens
tagatattgacaaac

SEQ ID NO: 1355323 - DNA, 15 bp, Homo sapiens
gtagatattgacaaa

SEQ ID NO: 1355324 - DNA, 15 bp, Homo sapiens
tgtagatattgacaa

SEQ ID NO: 1355325 - DNA, 15 bp, Homo sapiens
ttgtagatattgaca

SEQ ID NO: 1355326 - DNA, 15 bp, Homo sapiens
tttgtagatattgac

SEQ ID NO: 1355327 - DNA, 15 bp, Homo sapiens
ttttgtagatattga

SEQ ID NO: 1355328 - DNA, 15 bp, Homo sapiens
gttttgtagatattg

SEQ ID NO: 1355329 - DNA, 15 bp, Homo sapiens
tgttttgtagatatt

SEQ ID NO: 1355330 - DNA, 15 bp, Homo sapiens
ctgttttgtagatat

SEQ ID NO: 1355331 - DNA, 15 bp, Homo sapiens
gctgttttgtagata

SEQ ID NO: 1355332 - DNA, 15 bp, Homo sapiens
agctgttttgtagat

SEQ ID NO: 1355333 - DNA, 15 bp, Homo sapiens
aagctgttttgtaga

SEQ ID NO: 1355334 - DNA, 15 bp, Homo sapiens
gaagctgttttgtag

SEQ ID NO: 1355335 - DNA, 15 bp, Homo sapiens
ggaagctgttttgta

SEQ ID NO: 1355336 - DNA, 15 bp, Homo sapiens
aggaagctgttttgt

SEQ ID NO: 1355337 - DNA, 15 bp, Homo sapiens
caggaagctgttttg

SEQ ID NO: 1355338 - DNA, 15 bp, Homo sapiens
ccaggaagctgtttt

SEQ ID NO: 1355339 - DNA, 15 bp, Homo sapiens
tccaggaagctgttt

SEQ ID NO: 1355340 - DNA, 15 bp, Homo sapiens
ttccaggaagctgtt

SEQ ID NO: 1355341 - DNA, 15 bp, Homo sapiens
attccaggaagctgt

SEQ ID NO: 1355342 - DNA, 15 bp, Homo sapiens
aattccaggaagctg

SEQ ID NO: 1355343 - DNA, 15 bp, Homo sapiens
aaattccaggaagct

SEQ ID NO: 1355344 - DNA, 15 bp, Homo sapiens
aaaattccaggaagc

SEQ ID NO: 1355345 - DNA, 15 bp, Homo sapiens
caaaattccaggaag

SEQ ID NO: 1355346 - DNA, 15 bp, Homo sapiens
tcaaaattccaggaa

SEQ ID NO: 1355347 - DNA, 15 bp, Homo sapiens
gtcaaaattccagga

SEQ ID NO: 1355348 - DNA, 15 bp, Homo sapiens
agtcaaaattccagg

SEQ ID NO: 1355349 - DNA, 15 bp, Homo sapiens
cagtcaaaattccag

SEQ ID NO: 1355350 - DNA, 15 bp, Homo sapiens
tcagtcaaaattcca

SEQ ID NO: 1355351 - DNA, 15 bp, Homo sapiens
atcagtcaaaattcc

SEQ ID NO: 1355352 - DNA, 15 bp, Homo sapiens
tatcagtcaaaattc

SEQ ID NO: 1355353 - DNA, 15 bp, Homo sapiens
atatcagtcaaaatt

SEQ ID NO: 1355354 - DNA, 15 bp, Homo sapiens
aatatcagtcaaaat

SEQ ID NO: 1355355 - DNA, 15 bp, Homo sapiens
caatatcagtcaaaa

SEQ ID NO: 1355356 - DNA, 15 bp, Homo sapiens
acaatatcagtcaaa

SEQ ID NO: 1355357 - DNA, 15 bp, Homo sapiens
cacaatatcagtcaa

SEQ ID NO: 1355358 - DNA, 15 bp, Homo sapiens
acacaatatcagtca

SEQ ID NO: 1355359 - DNA, 15 bp, Homo sapiens
aacacaatatcagtc

SEQ ID NO: 1355360 - DNA, 15 bp, Homo sapiens
taacacaatatcagt

SEQ ID NO: 1355361 - DNA, 15 bp, Homo sapiens
ttaacacaatatcag

SEQ ID NO: 1355362 - DNA, 15 bp, Homo sapiens
gttaacacaatatca

SEQ ID NO: 1355363 - DNA, 15 bp, Homo sapiens
agttaacacaatatc

SEQ ID NO: 1355364 - DNA, 15 bp, Homo sapiens
aagttaacacaatat

SEQ ID NO: 1355365 - DNA, 15 bp, Homo sapiens
aaagttaacacaata

SEQ ID NO: 1355366 - DNA, 15 bp, Homo sapiens
taaagttaacacaat

SEQ ID NO: 1355367 - DNA, 15 bp, Homo sapiens
ataaagttaacacaa

SEQ ID NO: 1355368 - DNA, 15 bp, Homo sapiens
tataaagttaacaca

SEQ ID NO: 1355369 - DNA, 15 bp, Homo sapiens
ctataaagttaacac

SEQ ID NO: 1355370 - DNA, 15 bp, Homo sapiens
tctataaagttaaca

SEQ ID NO: 1355371 - DNA, 15 bp, Homo sapiens
atctataaagttaac

SEQ ID NO: 1355372 - DNA, 15 bp, Homo sapiens
aatctataaagttaa

SEQ ID NO: 1355373 - DNA, 15 bp, Homo sapiens
taatctataaagtta

SEQ ID NO: 1355374 - DNA, 15 bp, Homo sapiens
ttaatctataaagtt

SEQ ID NO: 1355375 - DNA, 15 bp, Homo sapiens
cttaatctataaagt

SEQ ID NO: 1355376 - DNA, 15 bp, Homo sapiens
acttaatctataaag

SEQ ID NO: 1355377 - DNA, 15 bp, Homo sapiens
aacttaatctataaa

SEQ ID NO: 1355378 - DNA, 15 bp, Homo sapiens
aaacttaatctataa

SEQ ID NO: 1355379 - DNA, 15 bp, Homo sapiens
caaacttaatctata

SEQ ID NO: 1355380 - DNA, 15 bp, Homo sapiens
tcaaacttaatctat

SEQ ID NO: 1355381 - DNA, 15 bp, Homo sapiens
ttcaaacttaatcta

SEQ ID NO: 1355382 - DNA, 15 bp, Homo sapiens
tttcaaacttaatct

SEQ ID NO: 1355383 - DNA, 15 bp, Homo sapiens
ctttcaaacttaatc

SEQ ID NO: 1355384 - DNA, 15 bp, Homo sapiens
tctttcaaacttaat

SEQ ID NO: 1355385 - DNA, 15 bp, Homo sapiens
ttctttcaaacttaa

SEQ ID NO: 1355386 - DNA, 15 bp, Homo sapiens
attctttcaaactta

SEQ ID NO: 1355387 - DNA, 15 bp, Homo sapiens
aattctttcaaactt

SEQ ID NO: 1355388 - DNA, 15 bp, Homo sapiens
taattctttcaaact

SEQ ID NO: 1355389 - DNA, 15 bp, Homo sapiens
ttaattctttcaaac

SEQ ID NO: 1355390 - DNA, 15 bp, Homo sapiens
gttaattctttcaaa

SEQ ID NO: 1355391 - DNA, 15 bp, Homo sapiens
tgttaattctttcaa

SEQ ID NO: 1355392 - DNA, 15 bp, Homo sapiens
atgttaattctttca

SEQ ID NO: 1355393 - DNA, 15 bp, Homo sapiens
gatgttaattctttc

SEQ ID NO: 1355394 - DNA, 15 bp, Homo sapiens
agatgttaattcttt

SEQ ID NO: 1355395 - DNA, 15 bp, Homo sapiens
aagatgttaattctt

SEQ ID NO: 1355396 - DNA, 15 bp, Homo sapiens
taagatgttaattct

SEQ ID NO: 1355397 - DNA, 15 bp, Homo sapiens
ttaagatgttaattc

SEQ ID NO: 1355398 - DNA, 15 bp, Homo sapiens
attaagatgttaatt

SEQ ID NO: 1355399 - DNA, 15 bp, Homo sapiens
tattaagatgttaat

SEQ ID NO: 1355400 - DNA, 15 bp, Homo sapiens
atattaagatgttaa

SEQ ID NO: 1355401 - DNA, 15 bp, Homo sapiens
aatattaagatgtta

SEQ ID NO: 1355402 - DNA, 15 bp, Homo sapiens
taatattaagatgtt

SEQ ID NO: 1355403 - DNA, 15 bp, Homo sapiens
ttaatattaagatgt

SEQ ID NO: 1355404 - DNA, 15 bp, Homo sapiens
cttaatattaagatg

SEQ ID NO: 1355405 - DNA, 15 bp, Homo sapiens
acttaatattaagat

SEQ ID NO: 1355406 - DNA, 15 bp, Homo sapiens
gacttaatattaaga

SEQ ID NO: 1355407 - DNA, 15 bp, Homo sapiens
agacttaatattaag

SEQ ID NO: 1355408 - DNA, 15 bp, Homo sapiens
aagacttaatattaa

SEQ ID NO: 1355409 - DNA, 15 bp, Homo sapiens
gaagacttaatatta

SEQ ID NO: 1355410 - DNA, 15 bp, Homo sapiens
tagaagacttaatat

SEQ ID NO: 1355411 - DNA, 15 bp, Homo sapiens
ttagaagacttaata

SEQ ID NO: 1355412 - DNA, 15 bp, Homo sapiens
tttagaagacttaat

SEQ ID NO: 1355413 - DNA, 15 bp, Homo sapiens
atttagaagacttaa

SEQ ID NO: 1355414 - DNA, 15 bp, Homo sapiens
gatttagaagactta

SEQ ID NO: 1355415 - DNA, 15 bp, Homo sapiens
tgatttagaagactt

SEQ ID NO: 1355416 - DNA, 15 bp, Homo sapiens
ttgatttagaagact

SEQ ID NO: 1355417 - DNA, 15 bp, Homo sapiens
attgatttagaagac

SEQ ID NO: 1355418 - DNA, 15 bp, Homo sapiens
tattgatttagaaga

SEQ ID NO: 1355419 - DNA, 15 bp, Homo sapiens
ttattgatttagaag

SEQ ID NO: 1355420 - DNA, 15 bp, Homo sapiens
tttattgatttagaa

SEQ ID NO: 1355421 - DNA, 15 bp, Homo sapiens
atttattgatttaga

SEQ ID NO: 1355422 - DNA, 15 bp, Homo sapiens
catttattgatttag

SEQ ID NO: 1355423 - DNA, 15 bp, Homo sapiens
ccatttattgattta

SEQ ID NO: 1355424 - DNA, 15 bp, Homo sapiens
cccatttattgattt

SEQ ID NO: 1355425 - DNA, 15 bp, Homo sapiens
ccccatttattgatt

SEQ ID NO: 1355426 - DNA, 15 bp, Homo sapiens
tccccatttattgat

SEQ ID NO: 1355427 - DNA, 15 bp, Homo sapiens
atccccatttattga

SEQ ID NO: 1355428 - DNA, 15 bp, Homo sapiens
tatccccatttattg

SEQ ID NO: 1355429 - DNA, 15 bp, Homo sapiens
atatccccatttatt

SEQ ID NO: 1355430 - DNA, 15 bp, Homo sapiens
gatatccccatttat

SEQ ID NO: 1355431 - DNA, 15 bp, Homo sapiens
agatatccccattta

SEQ ID NO: 1355432 - DNA, 15 bp, Homo sapiens
gagatatccccattt

SEQ ID NO: 1355433 - DNA, 15 bp, Homo sapiens
agagatatccccatt

SEQ ID NO: 1355434 - DNA, 15 bp, Homo sapiens
tagagatatccccat

SEQ ID NO: 1355435 - DNA, 15 bp, Homo sapiens
gtagagatatcccca

SEQ ID NO: 1355436 - DNA, 15 bp, Homo sapiens
tgtagagatatcccc

SEQ ID NO: 1355437 - DNA, 15 bp, Homo sapiens
atgtagagatatccc

SEQ ID NO: 1355438 - DNA, 15 bp, Homo sapiens
aatgtagagatatcc

SEQ ID NO: 1355439 - DNA, 15 bp, Homo sapiens
aaatgtagagatatc

SEQ ID NO: 1355440 - DNA, 15 bp, Homo sapiens
taaatgtagagatat

SEQ ID NO: 1355441 - DNA, 15 bp, Homo sapiens
ataaatgtagagata

SEQ ID NO: 1355442 - DNA, 15 bp, Homo sapiens
aataaatgtagagat

SEQ ID NO: 1355443 - DNA, 15 bp, Homo sapiens
aaataaatgtagaga

SEQ ID NO: 1355444 - DNA, 15 bp, Homo sapiens
aaaataaatgtagag

SEQ ID NO: 1355445 - DNA, 15 bp, Homo sapiens
caaaataaatgtaga

SEQ ID NO: 1355446 - DNA, 15 bp, Homo sapiens
tcaaaataaatgtag

SEQ ID NO: 1355447 - DNA, 15 bp, Homo sapiens
atcaaaataaatgta

SEQ ID NO: 1355448 - DNA, 15 bp, Homo sapiens
aatcaaaataaatgt

SEQ ID NO: 1355449 - DNA, 15 bp, Homo sapiens
aaatcaaaataaatg

SEQ ID NO: 1355450 - DNA, 15 bp, Homo sapiens
aaaatcaaaataaat

SEQ ID NO: 1355451 - DNA, 15 bp, Homo sapiens
aaaaatcaaaataaa

SEQ ID NO: 1355452 - DNA, 15 bp, Homo sapiens
aaaaaatcaaaataa

SEQ ID NO: 1355453 - DNA, 15 bp, Homo sapiens
gaaaaaatcaaaata

SEQ ID NO: 1355454 - DNA, 15 bp, Homo sapiens
tgaaaaaatcaaaat

SEQ ID NO: 1355455 - DNA, 15 bp, Homo sapiens
ttgaaaaaatcaaaa

SEQ ID NO: 1355456 - DNA, 15 bp, Homo sapiens
tttgaaaaaatcaaa

SEQ ID NO: 1355457 - DNA, 15 bp, Homo sapiens
ctttgaaaaaatcaa

SEQ ID NO: 1355458 - DNA, 15 bp, Homo sapiens
tctttgaaaaaatca

SEQ ID NO: 1355459 - DNA, 15 bp, Homo sapiens
ctctttgaaaaaatc

SEQ ID NO: 1355460 - DNA, 15 bp, Homo sapiens
actctttgaaaaaat

SEQ ID NO: 1355461 - DNA, 15 bp, Homo sapiens
aactctttgaaaaaa

SEQ ID NO: 1355462 - DNA, 15 bp, Homo sapiens
aaactctttgaaaaa

SEQ ID NO: 1355463 - DNA, 15 bp, Homo sapiens
aaaactctttgaaaa

SEQ ID NO: 1355464 - DNA, 15 bp, Homo sapiens
caaaactctttgaaa

SEQ ID NO: 1355465 - DNA, 15 bp, Homo sapiens
acaaaactctttgaa

SEQ ID NO: 1355466 - DNA, 15 bp, Homo sapiens
tacaaaactctttga

SEQ ID NO: 1355467 - DNA, 15 bp, Homo sapiens
ctacaaaactctttg

SEQ ID NO: 1355468 - DNA, 15 bp, Homo sapiens
actacaaaactcttt

SEQ ID NO: 1355469 - DNA, 15 bp, Homo sapiens
aactacaaaactctt

SEQ ID NO: 1355470 - DNA, 15 bp, Homo sapiens
aaactacaaaactct

SEQ ID NO: 1355471 - DNA, 15 bp, Homo sapiens
aaaactacaaaactc

SEQ ID NO: 1355472 - DNA, 15 bp, Homo sapiens
aaaaactacaaaact

SEQ ID NO: 1355473 - DNA, 15 bp, Homo sapiens
gaaaaactacaaaac

SEQ ID NO: 1355474 - DNA, 15 bp, Homo sapiens
tgaaaaactacaaaa

SEQ ID NO: 1355475 - DNA, 15 bp, Homo sapiens
gtgaaaaactacaaa

SEQ ID NO: 1355476 - DNA, 15 bp, Homo sapiens
tgtgaaaaactacaa

SEQ ID NO: 1355477 - DNA, 15 bp, Homo sapiens
atgtgaaaaactaca

SEQ ID NO: 1355478 - DNA, 15 bp, Homo sapiens
tatgtgaaaaactac

SEQ ID NO: 1355479 - DNA, 15 bp, Homo sapiens
atatgtgaaaaacta

SEQ ID NO: 1355480 - DNA, 15 bp, Homo sapiens
tatatgtgaaaaact

SEQ ID NO: 1355481 - DNA, 15 bp, Homo sapiens
ctatatgtgaaaaac

SEQ ID NO: 1355482 - DNA, 15 bp, Homo sapiens
tctatatgtgaaaaa

SEQ ID NO: 1355483 - DNA, 15 bp, Homo sapiens
ttctatatgtgaaaa

SEQ ID NO: 1355484 - DNA, 15 bp, Homo sapiens
gttctatatgtgaaa

SEQ ID NO: 1355485 - DNA, 15 bp, Homo sapiens
ggttctatatgtgaa

SEQ ID NO: 1355486 - DNA, 15 bp, Homo sapiens
gggttctatatgtga

SEQ ID NO: 1355487 - DNA, 15 bp, Homo sapiens
tgggttctatatgtg

SEQ ID NO: 1355488 - DNA, 15 bp, Homo sapiens
gtgggttctatatgt

SEQ ID NO: 1355489 - DNA, 15 bp, Homo sapiens
tgtgggttctatatg

SEQ ID NO: 1355490 - DNA, 15 bp, Homo sapiens
gtgtgggttctatat

SEQ ID NO: 1355491 - DNA, 15 bp, Homo sapiens
tgtgtgggttctata

SEQ ID NO: 1355492 - DNA, 15 bp, Homo sapiens
atgtgtgggttctat

SEQ ID NO: 1355493 - DNA, 15 bp, Homo sapiens
tatgtgtgggttcta

SEQ ID NO: 1355494 - DNA, 15 bp, Homo sapiens
atatgtgtgggttct

SEQ ID NO: 1355495 - DNA, 15 bp, Homo sapiens
aatatgtgtgggttc

SEQ ID NO: 1355496 - DNA, 15 bp, Homo sapiens
aaatatgtgtgggtt

SEQ ID NO: 1355497 - DNA, 15 bp, Homo sapiens
aaaatatgtgtgggt

SEQ ID NO: 1355498 - DNA, 15 bp, Homo sapiens
caaaatatgtgtggg

SEQ ID NO: 1355499 - DNA, 15 bp, Homo sapiens
acaaaatatgtgtgg

SEQ ID NO: 1355500 - DNA, 15 bp, Homo sapiens
gacaaaatatgtgtg

SEQ ID NO: 1355501 - DNA, 15 bp, Homo sapiens
tgacaaaatatgtgt

SEQ ID NO: 1355502 - DNA, 15 bp, Homo sapiens
ctgacaaaatatgtg

SEQ ID NO: 1355503 - DNA, 15 bp, Homo sapiens
tctgacaaaatatgt

SEQ ID NO: 1355504 - DNA, 15 bp, Homo sapiens
atctgacaaaatatg

SEQ ID NO: 1355505 - DNA, 15 bp, Homo sapiens
aatctgacaaaatat

SEQ ID NO: 1355506 - DNA, 15 bp, Homo sapiens
aaatctgacaaaata

SEQ ID NO: 1355507 - DNA, 15 bp, Homo sapiens
taaatctgacaaaat

SEQ ID NO: 1355508 - DNA, 15 bp, Homo sapiens
ataaatctgacaaaa

SEQ ID NO: 1355509 - DNA, 15 bp, Homo sapiens
tataaatctgacaaa

SEQ ID NO: 1355510 - DNA, 15 bp, Homo sapiens
gtataaatctgacaa

SEQ ID NO: 1355511 - DNA, 15 bp, Homo sapiens
agtataaatctgaca

SEQ ID NO: 1355512 - DNA, 15 bp, Homo sapiens
aagtataaatctgac

SEQ ID NO: 1355513 - DNA, 15 bp, Homo sapiens
taagtataaatctga

SEQ ID NO: 1355514 - DNA, 15 bp, Homo sapiens
ttaagtataaatctg

SEQ ID NO: 1355515 - DNA, 15 bp, Homo sapiens
cttaagtataaatct

SEQ ID NO: 1355516 - DNA, 15 bp, Homo sapiens
acttaagtataaatc

SEQ ID NO: 1355517 - DNA, 15 bp, Homo sapiens
aacttaagtataaat

SEQ ID NO: 1355518 - DNA, 15 bp, Homo sapiens
aaacttaagtataaa

SEQ ID NO: 1355519 - DNA, 15 bp, Homo sapiens
gaaacttaagtataa

SEQ ID NO: 1355520 - DNA, 15 bp, Homo sapiens
tgaaacttaagtata

SEQ ID NO: 1355521 - DNA, 15 bp, Homo sapiens
gtgaaacttaagtat

SEQ ID NO: 1355522 - DNA, 15 bp, Homo sapiens
agtgaaacttaagta

SEQ ID NO: 1355523 - DNA, 15 bp, Homo sapiens
cagtgaaacttaagt

SEQ ID NO: 1355524 - DNA, 15 bp, Homo sapiens
ccagtgaaacttaag

SEQ ID NO: 1355525 - DNA, 15 bp, Homo sapiens
accagtgaaacttaa

SEQ ID NO: 1355526 - DNA, 15 bp, Homo sapiens
caccagtgaaactta

SEQ ID NO: 1355527 - DNA, 15 bp, Homo sapiens
gcaccagtgaaactt

SEQ ID NO: 1355528 - DNA, 15 bp, Homo sapiens
tgcaccagtgaaact

SEQ ID NO: 1355529 - DNA, 15 bp, Homo sapiens
ttgcaccagtgaaac

SEQ ID NO: 1355530 - DNA, 15 bp, Homo sapiens
attgcaccagtgaaa

SEQ ID NO: 1355531 - DNA, 15 bp, Homo sapiens
aattgcaccagtgaa

SEQ ID NO: 1355532 - DNA, 15 bp, Homo sapiens
aaattgcaccagtga

SEQ ID NO: 1355533 - DNA, 15 bp, Homo sapiens
aaaattgcaccagtg

SEQ ID NO: 1355534 - DNA, 15 bp, Homo sapiens
taaaattgcaccagt

SEQ ID NO: 1355535 - DNA, 15 bp, Homo sapiens
ataaaattgcaccag

SEQ ID NO: 1355536 - DNA, 15 bp, Homo sapiens
cataaaattgcacca

SEQ ID NO: 1355537 - DNA, 15 bp, Homo sapiens
acataaaattgcacc

SEQ ID NO: 1355538 - DNA, 15 bp, Homo sapiens
cacataaaattgcac

SEQ ID NO: 1355539 - DNA, 15 bp, Homo sapiens
tcacataaaattgca

SEQ ID NO: 1355540 - DNA, 15 bp, Homo sapiens
atcacataaaattgc

SEQ ID NO: 1355541 - DNA, 15 bp, Homo sapiens
tatcacataaaattg

SEQ ID NO: 1355542 - DNA, 15 bp, Homo sapiens
gtatcacataaaatt

SEQ ID NO: 1355543 - DNA, 15 bp, Homo sapiens
agtatcacataaaat

SEQ ID NO: 1355544 - DNA, 15 bp, Homo sapiens
tagtatcacataaaa

SEQ ID NO: 1355545 - DNA, 15 bp, Homo sapiens
atagtatcacataaa

SEQ ID NO: 1355546 - DNA, 15 bp, Homo sapiens
aatagtatcacataa

SEQ ID NO: 1355547 - DNA, 15 bp, Homo sapiens
aaatagtatcacata

SEQ ID NO: 1355548 - DNA, 15 bp, Homo sapiens
aaaatagtatcacat

SEQ ID NO: 1355549 - DNA, 15 bp, Homo sapiens
aaaaatagtatcaca

SEQ ID NO: 1355550 - DNA, 15 bp, Homo sapiens
aaaaaatagtatcac

SEQ ID NO: 1355551 - DNA, 15 bp, Homo sapiens
aaaaaaatagtatca

SEQ ID NO: 1355552 - DNA, 15 bp, Homo sapiens
aaaaaaaatagtatc

SEQ ID NO: 1355553 - DNA, 15 bp, Homo sapiens
taaaaaaaatagtat

SEQ ID NO: 1355554 - DNA, 15 bp, Homo sapiens
ttaaaaaaaatagta

SEQ ID NO: 1355555 - DNA, 15 bp, Homo sapiens
tttaaaaaaaatagt

SEQ ID NO: 1355556 - DNA, 15 bp, Homo sapiens
atttaaaaaaaatag

SEQ ID NO: 1355557 - DNA, 15 bp, Homo sapiens
aatttaaaaaaaata

SEQ ID NO: 1355558 - DNA, 15 bp, Homo sapiens
gaaatttaaaaaaaa

SEQ ID NO: 1355559 - DNA, 15 bp, Homo sapiens
tgaaatttaaaaaaa

SEQ ID NO: 1355560 - DNA, 15 bp, Homo sapiens
ttgaaatttaaaaaa

SEQ ID NO: 1355561 - DNA, 15 bp, Homo sapiens
tttgaaatttaaaaa

SEQ ID NO: 1355562 - DNA, 15 bp, Homo sapiens
atttgaaatttaaaa

SEQ ID NO: 1355563 - DNA, 15 bp, Homo sapiens
gatttgaaatttaaa

SEQ ID NO: 1355564 - DNA, 15 bp, Homo sapiens
ggatttgaaatttaa

SEQ ID NO: 1355565 - DNA, 15 bp, Homo sapiens
tggatttgaaattta

SEQ ID NO: 1355566 - DNA, 15 bp, Homo sapiens
atggatttgaaattt

SEQ ID NO: 1355567 - DNA, 15 bp, Homo sapiens
aatggatttgaaatt

SEQ ID NO: 1355568 - DNA, 15 bp, Homo sapiens
aaatggatttgaaat

SEQ ID NO: 1355569 - DNA, 15 bp, Homo sapiens
caaatggatttgaaa

SEQ ID NO: 1355570 - DNA, 15 bp, Homo sapiens
acaaatggatttgaa

SEQ ID NO: 1355571 - DNA, 15 bp, Homo sapiens
aacaaatggatttga

SEQ ID NO: 1355572 - DNA, 15 bp, Homo sapiens
aaacaaatggatttg

SEQ ID NO: 1355573 - DNA, 15 bp, Homo sapiens
taaacaaatggattt

SEQ ID NO: 1355574 - DNA, 15 bp, Homo sapiens
ataaacaaatggatt

SEQ ID NO: 1355575 - DNA, 15 bp, Homo sapiens
aataaacaaatggat

SEQ ID NO: 1355576 - DNA, 15 bp, Homo sapiens
caataaacaaatgga

SEQ ID NO: 1355577 - DNA, 15 bp, Homo sapiens
gcaataaacaaatgg

SEQ ID NO: 1355578 - DNA, 15 bp, Homo sapiens
agcaataaacaaatg

SEQ ID NO: 1355579 - DNA, 15 bp, Homo sapiens
tagcaataaacaaat

SEQ ID NO: 1355580 - DNA, 15 bp, Homo sapiens
ctagcaataaacaaa

SEQ ID NO: 1355581 - DNA, 15 bp, Homo sapiens
actagcaataaacaa

SEQ ID NO: 1355582 - DNA, 15 bp, Homo sapiens
tactagcaataaaca

SEQ ID NO: 1355583 - DNA, 15 bp, Homo sapiens
ttactagcaataaac

SEQ ID NO: 1355584 - DNA, 15 bp, Homo sapiens
tttactagcaataaa

SEQ ID NO: 1355585 - DNA, 15 bp, Homo sapiens
ttttactagcaataa

SEQ ID NO: 1355586 - DNA, 15 bp, Homo sapiens
cttttactagcaata

SEQ ID NO: 1355587 - DNA, 15 bp, Homo sapiens
ccttttactagcaat

SEQ ID NO: 1355588 - DNA, 15 bp, Homo sapiens
tccttttactagcaa

SEQ ID NO: 1355589 - DNA, 15 bp, Homo sapiens
ttccttttactagca

SEQ ID NO: 1355590 - DNA, 15 bp, Homo sapiens
tttccttttactagc

SEQ ID NO: 1355591 - DNA, 15 bp, Homo sapiens
ctttccttttactag

SEQ ID NO: 1355592 - DNA, 15 bp, Homo sapiens
gctttccttttacta

SEQ ID NO: 1355593 - DNA, 15 bp, Homo sapiens
tgctttccttttact

SEQ ID NO: 1355594 - DNA, 15 bp, Homo sapiens
ttgctttccttttac

SEQ ID NO: 1355595 - DNA, 15 bp, Homo sapiens
attgctttcctttta

SEQ ID NO: 1355596 - DNA, 15 bp, Homo sapiens
aattgctttcctttt

SEQ ID NO: 1355597 - DNA, 15 bp, Homo sapiens
caattgctttccttt

SEQ ID NO: 1355598 - DNA, 15 bp, Homo sapiens
ccaattgctttcctt

SEQ ID NO: 1355599 - DNA, 15 bp, Homo sapiens
gccaattgctttcct

SEQ ID NO: 1355600 - DNA, 15 bp, Homo sapiens
agccaattgctttcc

SEQ ID NO: 1355601 - DNA, 15 bp, Homo sapiens
aagccaattgctttc

SEQ ID NO: 1355602 - DNA, 15 bp, Homo sapiens
aaagccaattgcttt

SEQ ID NO: 1355603 - DNA, 15 bp, Homo sapiens
aaaagccaattgctt

SEQ ID NO: 1355604 - DNA, 15 bp, Homo sapiens
taaaagccaattgct

SEQ ID NO: 1355605 - DNA, 15 bp, Homo sapiens
ataaaagccaattgc

SEQ ID NO: 1355606 - DNA, 15 bp, Homo sapiens
tataaaagccaattg

SEQ ID NO: 1355607 - DNA, 15 bp, Homo sapiens
atataaaagccaatt

SEQ ID NO: 1355608 - DNA, 15 bp, Homo sapiens
tatataaaagccaat

SEQ ID NO: 1355609 - DNA, 15 bp, Homo sapiens
atatataaaagccaa

SEQ ID NO: 1355610 - DNA, 15 bp, Homo sapiens
aatatataaaagcca

SEQ ID NO: 1355611 - DNA, 15 bp, Homo sapiens
taatatataaaagcc

SEQ ID NO: 1355612 - DNA, 15 bp, Homo sapiens
ttaatatataaaagc

SEQ ID NO: 1355613 - DNA, 15 bp, Homo sapiens
gttaatatataaaag

SEQ ID NO: 1355614 - DNA, 15 bp, Homo sapiens
ggttaatatataaaa

SEQ ID NO: 1355615 - DNA, 15 bp, Homo sapiens
aggttaatatataaa

SEQ ID NO: 1355616 - DNA, 15 bp, Homo sapiens
aaggttaatatataa

SEQ ID NO: 1355617 - DNA, 15 bp, Homo sapiens
aaaggttaatatata

SEQ ID NO: 1355618 - DNA, 15 bp, Homo sapiens
aaaaggttaatatat

SEQ ID NO: 1355619 - DNA, 15 bp, Homo sapiens
caaaaggttaatata

SEQ ID NO: 1355620 - DNA, 15 bp, Homo sapiens
acaaaaggttaatat

SEQ ID NO: 1355621 - DNA, 15 bp, Homo sapiens
aacaaaaggttaata

SEQ ID NO: 1355622 - DNA, 15 bp, Homo sapiens
gaacaaaaggttaat

SEQ ID NO: 1355623 - DNA, 15 bp, Homo sapiens
cgaacaaaaggttaa

SEQ ID NO: 1355624 - DNA, 15 bp, Homo sapiens
ccgaacaaaaggtta

SEQ ID NO: 1355625 - DNA, 15 bp, Homo sapiens
cccgaacaaaaggtt

SEQ ID NO: 1355626 - DNA, 15 bp, Homo sapiens
ccccgaacaaaaggt

SEQ ID NO: 1355627 - DNA, 15 bp, Homo sapiens
tccccgaacaaaagg

SEQ ID NO: 1355628 - DNA, 15 bp, Homo sapiens
gtccccgaacaaaag

SEQ ID NO: 1355629 - DNA, 15 bp, Homo sapiens
ggtccccgaacaaaa

SEQ ID NO: 1355630 - DNA, 15 bp, Homo sapiens
aggtccccgaacaaa

SEQ ID NO: 1355631 - DNA, 15 bp, Homo sapiens
aaggtccccgaacaa

SEQ ID NO: 1355632 - DNA, 15 bp, Homo sapiens
caaggtccccgaaca

SEQ ID NO: 1355633 - DNA, 15 bp, Homo sapiens
gcaaggtccccgaac

SEQ ID NO: 1355634 - DNA, 15 bp, Homo sapiens
agcaaggtccccgaa

SEQ ID NO: 1355635 - DNA, 15 bp, Homo sapiens
tagcaaggtccccga

SEQ ID NO: 1355636 - DNA, 15 bp, Homo sapiens
atagcaaggtccccg

SEQ ID NO: 1355637 - DNA, 15 bp, Homo sapiens
tatagcaaggtcccc

SEQ ID NO: 1355638 - DNA, 15 bp, Homo sapiens
ttatagcaaggtccc

SEQ ID NO: 1355639 - DNA, 15 bp, Homo sapiens
attatagcaaggtcc

SEQ ID NO: 1355640 - DNA, 15 bp, Homo sapiens
gattatagcaaggtc

SEQ ID NO: 1355641 - DNA, 15 bp, Homo sapiens
tgattatagcaaggt

SEQ ID NO: 1355642 - DNA, 15 bp, Homo sapiens
gtgattatagcaagg

SEQ ID NO: 1355643 - DNA, 15 bp, Homo sapiens
agtgattatagcaag

SEQ ID NO: 1355644 - DNA, 15 bp, Homo sapiens
cagtgattatagcaa

SEQ ID NO: 1355645 - DNA, 15 bp, Homo sapiens
tcagtgattatagca

SEQ ID NO: 1355646 - DNA, 15 bp, Homo sapiens
atcagtgattatagc

SEQ ID NO: 1355647 - DNA, 15 bp, Homo sapiens
aatcagtgattatag

SEQ ID NO: 1355648 - DNA, 15 bp, Homo sapiens
aaatcagtgattata

SEQ ID NO: 1355649 - DNA, 15 bp, Homo sapiens
taaatcagtgattat

SEQ ID NO: 1355650 - DNA, 15 bp, Homo sapiens
ataaatcagtgatta

SEQ ID NO: 1355651 - DNA, 15 bp, Homo sapiens
aataaatcagtgatt

SEQ ID NO: 1355652 - DNA, 15 bp, Homo sapiens
gaataaatcagtgat

SEQ ID NO: 1355653 - DNA, 15 bp, Homo sapiens
ggaataaatcagtga

SEQ ID NO: 1355654 - DNA, 15 bp, Homo sapiens
tggaataaatcagtg

SEQ ID NO: 1355655 - DNA, 15 bp, Homo sapiens
ctggaataaatcagt

SEQ ID NO: 1355656 - DNA, 15 bp, Homo sapiens
cctggaataaatcag

SEQ ID NO: 1355657 - DNA, 15 bp, Homo sapiens
tcctggaataaatca

SEQ ID NO: 1355658 - DNA, 15 bp, Homo sapiens
ctcctggaataaatc

SEQ ID NO: 1355659 - DNA, 15 bp, Homo sapiens
cctcctggaataaat

SEQ ID NO: 1355660 - DNA, 15 bp, Homo sapiens
ccctcctggaataaa

SEQ ID NO: 1355661 - DNA, 15 bp, Homo sapiens
accctcctggaataa

SEQ ID NO: 1355662 - DNA, 15 bp, Homo sapiens
aaccctcctggaata

SEQ ID NO: 1355663 - DNA, 15 bp, Homo sapiens
aaaccctcctggaat

SEQ ID NO: 1355664 - DNA, 15 bp, Homo sapiens
gaaaccctcctggaa

SEQ ID NO: 1355665 - DNA, 15 bp, Homo sapiens
agaaaccctcctgga

SEQ ID NO: 1355666 - DNA, 15 bp, Homo sapiens
aagaaaccctcctgg

SEQ ID NO: 1355667 - DNA, 15 bp, Homo sapiens
caagaaaccctcctg

SEQ ID NO: 1355668 - DNA, 15 bp, Homo sapiens
acaagaaaccctcct

SEQ ID NO: 1355669 - DNA, 15 bp, Homo sapiens
aacaagaaaccctcc

SEQ ID NO: 1355670 - DNA, 15 bp, Homo sapiens
caacaagaaaccctc

SEQ ID NO: 1355671 - DNA, 15 bp, Homo sapiens
tcaacaagaaaccct

SEQ ID NO: 1355672 - DNA, 15 bp, Homo sapiens
atcaacaagaaaccc

SEQ ID NO: 1355673 - DNA, 15 bp, Homo sapiens
aatcaacaagaaacc

SEQ ID NO: 1355674 - DNA, 15 bp, Homo sapiens
gaatcaacaagaaac

SEQ ID NO: 1355675 - DNA, 15 bp, Homo sapiens
agaatcaacaagaaa

SEQ ID NO: 1355676 - DNA, 15 bp, Homo sapiens
aagaatcaacaagaa

SEQ ID NO: 1355677 - DNA, 15 bp, Homo sapiens
aaagaatcaacaaga

SEQ ID NO: 1355678 - DNA, 15 bp, Homo sapiens
caaagaatcaacaag

SEQ ID NO: 1355679 - DNA, 15 bp, Homo sapiens
tcaaagaatcaacaa

SEQ ID NO: 1355680 - DNA, 15 bp, Homo sapiens
ctcaaagaatcaaca

SEQ ID NO: 1355681 - DNA, 15 bp, Homo sapiens
tctcaaagaatcaac

SEQ ID NO: 1355682 - DNA, 15 bp, Homo sapiens
atctcaaagaatcaa

SEQ ID NO: 1355683 - DNA, 15 bp, Homo sapiens
tatctcaaagaatca

SEQ ID NO: 1355684 - DNA, 15 bp, Homo sapiens
atatctcaaagaatc

SEQ ID NO: 1355685 - DNA, 15 bp, Homo sapiens
aatatctcaaagaat

SEQ ID NO: 1355686 - DNA, 15 bp, Homo sapiens
gaatatctcaaagaa

SEQ ID NO: 1355687 - DNA, 15 bp, Homo sapiens
agaatatctcaaaga

SEQ ID NO: 1355688 - DNA, 15 bp, Homo sapiens
cagaatatctcaaag

SEQ ID NO: 1355689 - DNA, 15 bp, Homo sapiens
gcagaatatctcaaa

SEQ ID NO: 1355690 - DNA, 15 bp, Homo sapiens
tgcagaatatctcaa

SEQ ID NO: 1355691 - DNA, 15 bp, Homo sapiens
gtgcagaatatctca

SEQ ID NO: 1355692 - DNA, 15 bp, Homo sapiens
tgtgcagaatatctc

SEQ ID NO: 1355693 - DNA, 15 bp, Homo sapiens
gtgtgcagaatatct

SEQ ID NO: 1355694 - DNA, 15 bp, Homo sapiens
tgtgtgcagaatatc

SEQ ID NO: 1355695 - DNA, 15 bp, Homo sapiens
atgtgtgcagaatat

SEQ ID NO: 1355696 - DNA, 15 bp, Homo sapiens
tatgtgtgcagaata

SEQ ID NO: 1355697 - DNA, 15 bp, Homo sapiens
ttatgtgtgcagaat

SEQ ID NO: 1355698 - DNA, 15 bp, Homo sapiens
attatgtgtgcagaa

SEQ ID NO: 1355699 - DNA, 15 bp, Homo sapiens
gattatgtgtgcaga

SEQ ID NO: 1355700 - DNA, 15 bp, Homo sapiens
tgattatgtgtgcag

SEQ ID NO: 1355701 - DNA, 15 bp, Homo sapiens
atgattatgtgtgca

SEQ ID NO: 1355702 - DNA, 15 bp, Homo sapiens
tatgattatgtgtgc

SEQ ID NO: 1355703 - DNA, 15 bp, Homo sapiens
atatgattatgtgtg

SEQ ID NO: 1355704 - DNA, 15 bp, Homo sapiens
catatgattatgtgt

SEQ ID NO: 1355705 - DNA, 15 bp, Homo sapiens
acatatgattatgtg

SEQ ID NO: 1355706 - DNA, 15 bp, Homo sapiens
tacatatgattatgt

SEQ ID NO: 1355707 - DNA, 15 bp, Homo sapiens
atacatatgattatg

SEQ ID NO: 1355708 - DNA, 15 bp, Homo sapiens
catacatatgattat

SEQ ID NO: 1355709 - DNA, 15 bp, Homo sapiens
tcatacatatgatta

SEQ ID NO: 1355710 - DNA, 15 bp, Homo sapiens
ttcatacatatgatt

SEQ ID NO: 1355711 - DNA, 15 bp, Homo sapiens
attcatacatatgat

SEQ ID NO: 1355712 - DNA, 15 bp, Homo sapiens
tattcatacatatga

SEQ ID NO: 1355713 - DNA, 15 bp, Homo sapiens
ttattcatacatatg

SEQ ID NO: 1355714 - DNA, 15 bp, Homo sapiens
tttattcatacatat

SEQ ID NO: 1355715 - DNA, 15 bp, Homo sapiens
ctttattcatacata

SEQ ID NO: 1355716 - DNA, 15 bp, Homo sapiens
gctttattcatacat

SEQ ID NO: 1355717 - DNA, 15 bp, Homo sapiens
agctttattcataca

SEQ ID NO: 1355718 - DNA, 15 bp, Homo sapiens
aagctttattcatac

SEQ ID NO: 1355719 - DNA, 15 bp, Homo sapiens
aaagctttattcata

SEQ ID NO: 1355720 - DNA, 15 bp, Homo sapiens
aaaagctttattcat

SEQ ID NO: 1355721 - DNA, 15 bp, Homo sapiens
aaaaagctttattca

SEQ ID NO: 1355722 - DNA, 15 bp, Homo sapiens
aaaaaagctttattc

SEQ ID NO: 1355723 - DNA, 15 bp, Homo sapiens
aaaaaaagctttatt

SEQ ID NO: 1355724 - DNA, 15 bp, Homo sapiens
aaaaaaaagctttat

SEQ ID NO: 1355725 - DNA, 15 bp, Homo sapiens
gaaaaaaaagcttta

SEQ ID NO: 1355726 - DNA, 15 bp, Homo sapiens
agaaaaaaaagcttt

SEQ ID NO: 1355727 - DNA, 15 bp, Homo sapiens
aagaaaaaaaagctt

SEQ ID NO: 1355728 - DNA, 15 bp, Homo sapiens
aaagaaaaaaaagct

SEQ ID NO: 1355729 - DNA, 15 bp, Homo sapiens
aaaagaaaaaaaagc

SEQ ID NO: 1355730 - DNA, 15 bp, Homo sapiens
aaaaagaaaaaaaag

SEQ ID NO: 1355731 - DNA, 15 bp, Homo sapiens
gaaaaagaaaaaaaa

SEQ ID NO: 1355732 - DNA, 15 bp, Homo sapiens
ggaaaaagaaaaaaa

SEQ ID NO: 1355733 - DNA, 15 bp, Homo sapiens
gggaaaaagaaaaaa

SEQ ID NO: 1355734 - DNA, 15 bp, Homo sapiens
ggggaaaaagaaaaa

SEQ ID NO: 1355735 - DNA, 15 bp, Homo sapiens
tggggaaaaagaaaa

SEQ ID NO: 1355736 - DNA, 15 bp, Homo sapiens
gtggggaaaaagaaa

SEQ ID NO: 1355737 - DNA, 15 bp, Homo sapiens
agtggggaaaaagaa

SEQ ID NO: 1355738 - DNA, 15 bp, Homo sapiens
aagtggggaaaaaga

SEQ ID NO: 1355739 - DNA, 15 bp, Homo sapiens
aaagtggggaaaaag

SEQ ID NO: 1355740 - DNA, 15 bp, Homo sapiens
caaagtggggaaaaa

SEQ ID NO: 1355741 - DNA, 15 bp, Homo sapiens
acaaagtggggaaaa

SEQ ID NO: 1355742 - DNA, 15 bp, Homo sapiens
tacaaagtggggaaa

SEQ ID NO: 1355743 - DNA, 15 bp, Homo sapiens
atacaaagtggggaa

SEQ ID NO: 1355744 - DNA, 15 bp, Homo sapiens
catacaaagtgggga

SEQ ID NO: 1355745 - DNA, 15 bp, Homo sapiens
gcatacaaagtgggg

SEQ ID NO: 1355746 - DNA, 15 bp, Homo sapiens
tgcatacaaagtggg

SEQ ID NO: 1355747 - DNA, 15 bp, Homo sapiens
atgcatacaaagtgg

SEQ ID NO: 1355748 - DNA, 15 bp, Homo sapiens
aatgcatacaaagtg

SEQ ID NO: 1355749 - DNA, 15 bp, Homo sapiens
aaatgcatacaaagt

SEQ ID NO: 1355750 - DNA, 15 bp, Homo sapiens
aaaatgcatacaaag

SEQ ID NO: 1355751 - DNA, 15 bp, Homo sapiens
taaaatgcatacaaa

SEQ ID NO: 1355752 - DNA, 15 bp, Homo sapiens
ataaaatgcatacaa

SEQ ID NO: 1355753 - DNA, 15 bp, Homo sapiens
aataaaatgcataca

SEQ ID NO: 1355754 - DNA, 15 bp, Homo sapiens
aaataaaatgcatac

SEQ ID NO: 1355755 - DNA, 15 bp, Homo sapiens
gaaataaaatgcata

SEQ ID NO: 1355756 - DNA, 15 bp, Homo sapiens
agaaataaaatgcat

SEQ ID NO: 1355757 - DNA, 15 bp, Homo sapiens
aagaaataaaatgca

SEQ ID NO: 1355758 - DNA, 15 bp, Homo sapiens
caagaaataaaatgc

SEQ ID NO: 1355759 - DNA, 15 bp, Homo sapiens
acaagaaataaaatg

SEQ ID NO: 1355760 - DNA, 15 bp, Homo sapiens
aacaagaaataaaat

SEQ ID NO: 1355761 - DNA, 15 bp, Homo sapiens
aaacaagaaataaaa

SEQ ID NO: 1355762 - DNA, 15 bp, Homo sapiens
aaaacaagaaataaa

SEQ ID NO: 1355763 - DNA, 15 bp, Homo sapiens
aaaaacaagaaataa

SEQ ID NO: 1355764 - DNA, 15 bp, Homo sapiens
taaaaacaagaaata

SEQ ID NO: 1355765 - DNA, 15 bp, Homo sapiens
gtaaaaacaagaaat

SEQ ID NO: 1355766 - DNA, 15 bp, Homo sapiens
ggtaaaaacaagaaa

SEQ ID NO: 1355767 - DNA, 15 bp, Homo sapiens
aggtaaaaacaagaa

SEQ ID NO: 1355768 - DNA, 15 bp, Homo sapiens
aaggtaaaaacaaga

SEQ ID NO: 1355769 - DNA, 15 bp, Homo sapiens
taaggtaaaaacaag

SEQ ID NO: 1355770 - DNA, 15 bp, Homo sapiens
gtaaggtaaaaacaa

SEQ ID NO: 1355771 - DNA, 15 bp, Homo sapiens
agtaaggtaaaaaca

SEQ ID NO: 1355772 - DNA, 15 bp, Homo sapiens
cagtaaggtaaaaac

SEQ ID NO: 1355773 - DNA, 15 bp, Homo sapiens
gcagtaaggtaaaaa

SEQ ID NO: 1355774 - DNA, 15 bp, Homo sapiens
tgcagtaaggtaaaa

SEQ ID NO: 1355775 - DNA, 15 bp, Homo sapiens
ctgcagtaaggtaaa

SEQ ID NO: 1355776 - DNA, 15 bp, Homo sapiens
actgcagtaaggtaa

SEQ ID NO: 1355777 - DNA, 15 bp, Homo sapiens
tactgcagtaaggta

SEQ ID NO: 1355778 - DNA, 15 bp, Homo sapiens
ctactgcagtaaggt

SEQ ID NO: 1355779 - DNA, 15 bp, Homo sapiens
actactgcagtaagg

SEQ ID NO: 1355780 - DNA, 15 bp, Homo sapiens
aactactgcagtaag

SEQ ID NO: 1355781 - DNA, 15 bp, Homo sapiens
taactactgcagtaa

SEQ ID NO: 1355782 - DNA, 15 bp, Homo sapiens
ctaactactgcagta

SEQ ID NO: 1355783 - DNA, 15 bp, Homo sapiens
cctaactactgcagt

SEQ ID NO: 1355784 - DNA, 15 bp, Homo sapiens
tcctaactactgcag

SEQ ID NO: 1355785 - DNA, 15 bp, Homo sapiens
gtcctaactactgca

SEQ ID NO: 1355786 - DNA, 15 bp, Homo sapiens
agtcctaactactgc

SEQ ID NO: 1355787 - DNA, 15 bp, Homo sapiens
aagtcctaactactg

SEQ ID NO: 1355788 - DNA, 15 bp, Homo sapiens
aaagtcctaactact

SEQ ID NO: 1355789 - DNA, 15 bp, Homo sapiens
aaaagtcctaactac

SEQ ID NO: 1355790 - DNA, 15 bp, Homo sapiens
caaaagtcctaacta

SEQ ID NO: 1355791 - DNA, 15 bp, Homo sapiens
ccaaaagtcctaact

SEQ ID NO: 1355792 - DNA, 15 bp, Homo sapiens
accaaaagtcctaac

SEQ ID NO: 1355793 - DNA, 15 bp, Homo sapiens
taccaaaagtcctaa

SEQ ID NO: 1355794 - DNA, 15 bp, Homo sapiens
gtaccaaaagtccta

SEQ ID NO: 1355795 - DNA, 15 bp, Homo sapiens
tgtaccaaaagtcct

SEQ ID NO: 1355796 - DNA, 15 bp, Homo sapiens
ttgtaccaaaagtcc

SEQ ID NO: 1355797 - DNA, 15 bp, Homo sapiens
attgtaccaaaagtc

SEQ ID NO: 1355798 - DNA, 15 bp, Homo sapiens
cattgtaccaaaagt

SEQ ID NO: 1355799 - DNA, 15 bp, Homo sapiens
acattgtaccaaaag

SEQ ID NO: 1355800 - DNA, 15 bp, Homo sapiens
aacattgtaccaaaa

SEQ ID NO: 1355801 - DNA, 15 bp, Homo sapiens
caacattgtaccaaa

SEQ ID NO: 1355802 - DNA, 15 bp, Homo sapiens
tcaacattgtaccaa

SEQ ID NO: 1355803 - DNA, 15 bp, Homo sapiens
ttcaacattgtacca

SEQ ID NO: 1355804 - DNA, 15 bp, Homo sapiens
gttcaacattgtacc

SEQ ID NO: 1355805 - DNA, 15 bp, Homo sapiens
tgttcaacattgtac

SEQ ID NO: 1355806 - DNA, 15 bp, Homo sapiens
ctgttcaacattgta

SEQ ID NO: 1355807 - DNA, 15 bp, Homo sapiens
tctgttcaacattgt

SEQ ID NO: 1355808 - DNA, 15 bp, Homo sapiens
ttctgttcaacattg

SEQ ID NO: 1355809 - DNA, 15 bp, Homo sapiens
cttctgttcaacatt

SEQ ID NO: 1355810 - DNA, 15 bp, Homo sapiens
acttctgttcaacat

SEQ ID NO: 1355811 - DNA, 15 bp, Homo sapiens
tacttctgttcaaca

SEQ ID NO: 1355812 - DNA, 15 bp, Homo sapiens
ctacttctgttcaac

SEQ ID NO: 1355813 - DNA, 15 bp, Homo sapiens
actacttctgttcaa

SEQ ID NO: 1355814 - DNA, 15 bp, Homo sapiens
tactacttctgttca

SEQ ID NO: 1355815 - DNA, 15 bp, Homo sapiens
ttactacttctgttc

SEQ ID NO: 1355816 - DNA, 15 bp, Homo sapiens
cttactacttctgtt

SEQ ID NO: 1355817 - DNA, 15 bp, Homo sapiens
tcttactacttctgt

SEQ ID NO: 1355818 - DNA, 15 bp, Homo sapiens
ctcttactacttctg

SEQ ID NO: 1355819 - DNA, 15 bp, Homo sapiens
gctcttactacttct

SEQ ID NO: 1355820 - DNA, 15 bp, Homo sapiens
agctcttactacttc

SEQ ID NO: 1355821 - DNA, 15 bp, Homo sapiens
tagctcttactactt

SEQ ID NO: 1355822 - DNA, 15 bp, Homo sapiens
ttagctcttactact

SEQ ID NO: 1355823 - DNA, 15 bp, Homo sapiens
tttagctcttactac

SEQ ID NO: 1355824 - DNA, 15 bp, Homo sapiens
atttagctcttacta

SEQ ID NO: 1355825 - DNA, 15 bp, Homo sapiens
aatttagctcttact

SEQ ID NO: 1355826 - DNA, 15 bp, Homo sapiens
aaatttagctcttac

SEQ ID NO: 1355827 - DNA, 15 bp, Homo sapiens
aaaatttagctctta

SEQ ID NO: 1355828 - DNA, 15 bp, Homo sapiens
aaaaatttagctctt

SEQ ID NO: 1355829 - DNA, 15 bp, Homo sapiens
aaaaaatttagctct

SEQ ID NO: 1355830 - DNA, 15 bp, Homo sapiens
aaaaaaatttagctc

SEQ ID NO: 1355831 - DNA, 15 bp, Homo sapiens
gaaaaaaatttagct

SEQ ID NO: 1355832 - DNA, 15 bp, Homo sapiens
ggaaaaaaatttagc

SEQ ID NO: 1355833 - DNA, 15 bp, Homo sapiens
aggaaaaaaatttag

SEQ ID NO: 1355834 - DNA, 15 bp, Homo sapiens
aaggaaaaaaattta

SEQ ID NO: 1355835 - DNA, 15 bp, Homo sapiens
caaggaaaaaaattt

SEQ ID NO: 1355836 - DNA, 15 bp, Homo sapiens
acaaggaaaaaaatt

SEQ ID NO: 1355837 - DNA, 15 bp, Homo sapiens
aacaaggaaaaaaat

SEQ ID NO: 1355838 - DNA, 15 bp, Homo sapiens
gaacaaggaaaaaaa

SEQ ID NO: 1355839 - DNA, 15 bp, Homo sapiens
ggaacaaggaaaaaa

SEQ ID NO: 1355840 - DNA, 15 bp, Homo sapiens
gggaacaaggaaaaa

SEQ ID NO: 1355841 - DNA, 15 bp, Homo sapiens
agggaacaaggaaaa

SEQ ID NO: 1355842 - DNA, 15 bp, Homo sapiens
tagggaacaaggaaa

SEQ ID NO: 1355843 - DNA, 15 bp, Homo sapiens
ctagggaacaaggaa

SEQ ID NO: 1355844 - DNA, 15 bp, Homo sapiens
tctagggaacaagga

SEQ ID NO: 1355845 - DNA, 15 bp, Homo sapiens
ctctagggaacaagg

SEQ ID NO: 1355846 - DNA, 15 bp, Homo sapiens
cctctagggaacaag

SEQ ID NO: 1355847 - DNA, 15 bp, Homo sapiens
tcctctagggaacaa

SEQ ID NO: 1355848 - DNA, 15 bp, Homo sapiens
ttcctctagggaaca

SEQ ID NO: 1355849 - DNA, 15 bp, Homo sapiens
tttcctctagggaac

SEQ ID NO: 1355850 - DNA, 15 bp, Homo sapiens
atttcctctagggaa

SEQ ID NO: 1355851 - DNA, 15 bp, Homo sapiens
catttcctctaggga

SEQ ID NO: 1355852 - DNA, 15 bp, Homo sapiens
acatttcctctaggg

SEQ ID NO: 1355853 - DNA, 15 bp, Homo sapiens
aacatttcctctagg

SEQ ID NO: 1355854 - DNA, 15 bp, Homo sapiens
gaacatttcctctag

SEQ ID NO: 1355855 - DNA, 15 bp, Homo sapiens
agaacatttcctcta

SEQ ID NO: 1355856 - DNA, 15 bp, Homo sapiens
gagaacatttcctct

SEQ ID NO: 1355857 - DNA, 15 bp, Homo sapiens
agagaacatttcctc

SEQ ID NO: 1355858 - DNA, 15 bp, Homo sapiens
aagagaacatttcct

SEQ ID NO: 1355859 - DNA, 15 bp, Homo sapiens
aaagagaacatttcc

SEQ ID NO: 1355860 - DNA, 15 bp, Homo sapiens
gaaagagaacatttc

SEQ ID NO: 1355861 - DNA, 15 bp, Homo sapiens
agaaagagaacattt

SEQ ID NO: 1355862 - DNA, 15 bp, Homo sapiens
gagaaagagaacatt

SEQ ID NO: 1355863 - DNA, 15 bp, Homo sapiens
agagaaagagaacat

SEQ ID NO: 1355864 - DNA, 15 bp, Homo sapiens
aagagaaagagaaca

SEQ ID NO: 1355865 - DNA, 15 bp, Homo sapiens
aaagagaaagagaac

SEQ ID NO: 1355866 - DNA, 15 bp, Homo sapiens
ttaaagagaaagaga

SEQ ID NO: 1355867 - DNA, 15 bp, Homo sapiens
gttaaagagaaagag

SEQ ID NO: 1355868 - DNA, 15 bp, Homo sapiens
tgttaaagagaaaga

SEQ ID NO: 1355869 - DNA, 15 bp, Homo sapiens
atgttaaagagaaag

SEQ ID NO: 1355870 - DNA, 15 bp, Homo sapiens
gatgttaaagagaaa

SEQ ID NO: 1355871 - DNA, 15 bp, Homo sapiens
tgatgttaaagagaa

SEQ ID NO: 1355872 - DNA, 15 bp, Homo sapiens
atgatgttaaagaga

SEQ ID NO: 1355873 - DNA, 15 bp, Homo sapiens
catgatgttaaagag

SEQ ID NO: 1355874 - DNA, 15 bp, Homo sapiens
gcatgatgttaaaga

SEQ ID NO: 1355875 - DNA, 15 bp, Homo sapiens
ggcatgatgttaaag

SEQ ID NO: 1355876 - DNA, 15 bp, Homo sapiens
tggcatgatgttaaa

SEQ ID NO: 1355877 - DNA, 15 bp, Homo sapiens
ttggcatgatgttaa

SEQ ID NO: 1355878 - DNA, 15 bp, Homo sapiens
attggcatgatgtta

SEQ ID NO: 1355879 - DNA, 15 bp, Homo sapiens
aattggcatgatgtt

SEQ ID NO: 1355880 - DNA, 15 bp, Homo sapiens
gaattggcatgatgt

SEQ ID NO: 1355881 - DNA, 15 bp, Homo sapiens
agaattggcatgatg

SEQ ID NO: 1355882 - DNA, 15 bp, Homo sapiens
tagaattggcatgat

SEQ ID NO: 1355883 - DNA, 15 bp, Homo sapiens
ctagaattggcatga

SEQ ID NO: 1355884 - DNA, 15 bp, Homo sapiens
cctagaattggcatg

SEQ ID NO: 1355885 - DNA, 15 bp, Homo sapiens
tcctagaattggcat

SEQ ID NO: 1355886 - DNA, 15 bp, Homo sapiens
atcctagaattggca

SEQ ID NO: 1355887 - DNA, 15 bp, Homo sapiens
aatcctagaattggc

SEQ ID NO: 1355888 - DNA, 15 bp, Homo sapiens
aaatcctagaattgg

SEQ ID NO: 1355889 - DNA, 15 bp, Homo sapiens
gaaatcctagaattg

SEQ ID NO: 1355890 - DNA, 15 bp, Homo sapiens
agaaatcctagaatt

SEQ ID NO: 1355891 - DNA, 15 bp, Homo sapiens
cagaaatcctagaat

SEQ ID NO: 1355892 - DNA, 15 bp, Homo sapiens
acagaaatcctagaa

SEQ ID NO: 1355893 - DNA, 15 bp, Homo sapiens
tacagaaatcctaga

SEQ ID NO: 1355894 - DNA, 15 bp, Homo sapiens
gtacagaaatcctag

SEQ ID NO: 1355895 - DNA, 15 bp, Homo sapiens
tgtacagaaatccta

SEQ ID NO: 1355896 - DNA, 15 bp, Homo sapiens
atgtacagaaatcct

SEQ ID NO: 1355897 - DNA, 15 bp, Homo sapiens
catgtacagaaatcc

SEQ ID NO: 1355898 - DNA, 15 bp, Homo sapiens
acatgtacagaaatc

SEQ ID NO: 1355899 - DNA, 15 bp, Homo sapiens
aacatgtacagaaat

SEQ ID NO: 1355900 - DNA, 15 bp, Homo sapiens
gaacatgtacagaaa

SEQ ID NO: 1355901 - DNA, 15 bp, Homo sapiens
agaacatgtacagaa

SEQ ID NO: 1355902 - DNA, 15 bp, Homo sapiens
aagaacatgtacaga

SEQ ID NO: 1355903 - DNA, 15 bp, Homo sapiens
aaagaacatgtacag

SEQ ID NO: 1355904 - DNA, 15 bp, Homo sapiens
aaaagaacatgtaca

SEQ ID NO: 1355905 - DNA, 15 bp, Homo sapiens
gaaaagaacatgtac

SEQ ID NO: 1355906 - DNA, 15 bp, Homo sapiens
tgaaaagaacatgta

SEQ ID NO: 1355907 - DNA, 15 bp, Homo sapiens
ttgaaaagaacatgt

SEQ ID NO: 1355908 - DNA, 15 bp, Homo sapiens
cttgaaaagaacatg

SEQ ID NO: 1355909 - DNA, 15 bp, Homo sapiens
acttgaaaagaacat

SEQ ID NO: 1355910 - DNA, 15 bp, Homo sapiens
aacttgaaaagaaca

SEQ ID NO: 1355911 - DNA, 15 bp, Homo sapiens
caacttgaaaagaac

SEQ ID NO: 1355912 - DNA, 15 bp, Homo sapiens
tcaacttgaaaagaa

SEQ ID NO: 1355913 - DNA, 15 bp, Homo sapiens
ctcaacttgaaaaga

SEQ ID NO: 1355914 - DNA, 15 bp, Homo sapiens
tctcaacttgaaaag

SEQ ID NO: 1355915 - DNA, 15 bp, Homo sapiens
ttctcaacttgaaaa

SEQ ID NO: 1355916 - DNA, 15 bp, Homo sapiens
tttctcaacttgaaa

SEQ ID NO: 1355917 - DNA, 15 bp, Homo sapiens
ctttctcaacttgaa

SEQ ID NO: 1355918 - DNA, 15 bp, Homo sapiens
actttctcaacttga

SEQ ID NO: 1355919 - DNA, 15 bp, Homo sapiens
aactttctcaacttg

SEQ ID NO: 1355920 - DNA, 15 bp, Homo sapiens
gaactttctcaactt

SEQ ID NO: 1355921 - DNA, 15 bp, Homo sapiens
ggaactttctcaact

SEQ ID NO: 1355922 - DNA, 15 bp, Homo sapiens
aggaactttctcaac

SEQ ID NO: 1355923 - DNA, 15 bp, Homo sapiens
gaggaactttctcaa

SEQ ID NO: 1355924 - DNA, 15 bp, Homo sapiens
agaggaactttctca

SEQ ID NO: 1355925 - DNA, 15 bp, Homo sapiens
gagaggaactttctc

SEQ ID NO: 1355926 - DNA, 15 bp, Homo sapiens
agagaggaactttct

SEQ ID NO: 1355927 - DNA, 15 bp, Homo sapiens
tagagaggaactttc

SEQ ID NO: 1355928 - DNA, 15 bp, Homo sapiens
atagagaggaacttt

SEQ ID NO: 1355929 - DNA, 15 bp, Homo sapiens
aatagagaggaactt

SEQ ID NO: 1355930 - DNA, 15 bp, Homo sapiens
gaatagagaggaact

SEQ ID NO: 1355931 - DNA, 15 bp, Homo sapiens
ggaatagagaggaac

SEQ ID NO: 1355932 - DNA, 15 bp, Homo sapiens
aggaatagagaggaa

SEQ ID NO: 1355933 - DNA, 15 bp, Homo sapiens
taggaatagagagga

SEQ ID NO: 1355934 - DNA, 15 bp, Homo sapiens
ctaggaatagagagg

SEQ ID NO: 1355935 - DNA, 15 bp, Homo sapiens
actaggaatagagag

SEQ ID NO: 1355936 - DNA, 15 bp, Homo sapiens
aactaggaatagaga

SEQ ID NO: 1355937 - DNA, 15 bp, Homo sapiens
aaactaggaatagag

SEQ ID NO: 1355938 - DNA, 15 bp, Homo sapiens
caaactaggaataga

SEQ ID NO: 1355939 - DNA, 15 bp, Homo sapiens
acaaactaggaatag

SEQ ID NO: 1355940 - DNA, 15 bp, Homo sapiens
aacaaactaggaata

SEQ ID NO: 1355941 - DNA, 15 bp, Homo sapiens
caacaaactaggaat

SEQ ID NO: 1355942 - DNA, 15 bp, Homo sapiens
tcaacaaactaggaa

SEQ ID NO: 1355943 - DNA, 15 bp, Homo sapiens
ctcaacaaactagga

SEQ ID NO: 1355944 - DNA, 15 bp, Homo sapiens
tctcaacaaactagg

SEQ ID NO: 1355945 - DNA, 15 bp, Homo sapiens
ctctcaacaaactag

SEQ ID NO: 1355946 - DNA, 15 bp, Homo sapiens
actctcaacaaacta

SEQ ID NO: 1355947 - DNA, 15 bp, Homo sapiens
aactctcaacaaact

SEQ ID NO: 1355948 - DNA, 15 bp, Homo sapiens
aaactctcaacaaac

SEQ ID NO: 1355949 - DNA, 15 bp, Homo sapiens
aaaactctcaacaaa

SEQ ID NO: 1355950 - DNA, 15 bp, Homo sapiens
aaaaactctcaacaa

SEQ ID NO: 1355951 - DNA, 15 bp, Homo sapiens
taaaaactctcaaca

SEQ ID NO: 1355952 - DNA, 15 bp, Homo sapiens
ataaaaactctcaac

SEQ ID NO: 1355953 - DNA, 15 bp, Homo sapiens
attcatgataaaaac

SEQ ID NO: 1355954 - DNA, 15 bp, Homo sapiens
cattcatgataaaaa

SEQ ID NO: 1355955 - DNA, 15 bp, Homo sapiens
ccattcatgataaaa

SEQ ID NO: 1355956 - DNA, 15 bp, Homo sapiens
cccattcatgataaa

SEQ ID NO: 1355957 - DNA, 15 bp, Homo sapiens
acccattcatgataa

SEQ ID NO: 1355958 - DNA, 15 bp, Homo sapiens
tacccattcatgata

SEQ ID NO: 1355959 - DNA, 15 bp, Homo sapiens
ttacccattcatgat

SEQ ID NO: 1355960 - DNA, 15 bp, Homo sapiens
tttacccattcatga

SEQ ID NO: 1355961 - DNA, 15 bp, Homo sapiens
atttacccattcatg

SEQ ID NO: 1355962 - DNA, 15 bp, Homo sapiens
gatttacccattcat

SEQ ID NO: 1355963 - DNA, 15 bp, Homo sapiens
agatttacccattca

SEQ ID NO: 1355964 - DNA, 15 bp, Homo sapiens
aagatttacccattc

SEQ ID NO: 1355965 - DNA, 15 bp, Homo sapiens
taagatttacccatt

SEQ ID NO: 1355966 - DNA, 15 bp, Homo sapiens
ataagatttacccat

SEQ ID NO: 1355967 - DNA, 15 bp, Homo sapiens
aataagatttaccca

SEQ ID NO: 1355968 - DNA, 15 bp, Homo sapiens
aaataagatttaccc

SEQ ID NO: 1355969 - DNA, 15 bp, Homo sapiens
aaaataagatttacc

SEQ ID NO: 1355970 - DNA, 15 bp, Homo sapiens
aaaaataagatttac

SEQ ID NO: 1355971 - DNA, 15 bp, Homo sapiens
taaaaataagattta

SEQ ID NO: 1355972 - DNA, 15 bp, Homo sapiens
ttaaaaataagattt

SEQ ID NO: 1355973 - DNA, 15 bp, Homo sapiens
tttaaaaataagatt

SEQ ID NO: 1355974 - DNA, 15 bp, Homo sapiens
ttttaaaaataagat

SEQ ID NO: 1355975 - DNA, 15 bp, Homo sapiens
tttttaaaaataaga

SEQ ID NO: 1355976 - DNA, 15 bp, Homo sapiens
gtttttaaaaataag

SEQ ID NO: 1355977 - DNA, 15 bp, Homo sapiens
agtttttaaaaataa

SEQ ID NO: 1355978 - DNA, 15 bp, Homo sapiens
aagtttttaaaaata

SEQ ID NO: 1355979 - DNA, 15 bp, Homo sapiens
aaagtttttaaaaat

SEQ ID NO: 1355980 - DNA, 15 bp, Homo sapiens
gaaagtttttaaaaa

SEQ ID NO: 1355981 - DNA, 15 bp, Homo sapiens
agaaagtttttaaaa

SEQ ID NO: 1355982 - DNA, 15 bp, Homo sapiens
aagaaagtttttaaa

SEQ ID NO: 1355983 - DNA, 15 bp, Homo sapiens
aaagaaagtttttaa

SEQ ID NO: 1355984 - DNA, 15 bp, Homo sapiens
aaaagaaagttttta

SEQ ID NO: 1355985 - DNA, 15 bp, Homo sapiens
aaaaagaaagttttt

SEQ ID NO: 1355986 - DNA, 15 bp, Homo sapiens
taaaaagaaagtttt

SEQ ID NO: 1355987 - DNA, 15 bp, Homo sapiens
ttaaaaagaaagttt

SEQ ID NO: 1355988 - DNA, 15 bp, Homo sapiens
gttaaaaagaaagtt

SEQ ID NO: 1355989 - DNA, 15 bp, Homo sapiens
agttaaaaagaaagt

SEQ ID NO: 1355990 - DNA, 15 bp, Homo sapiens
aagttaaaaagaaag

SEQ ID NO: 1355991 - DNA, 15 bp, Homo sapiens
aaagttaaaaagaaa

SEQ ID NO: 1355992 - DNA, 15 bp, Homo sapiens
aaaagttaaaaagaa

SEQ ID NO: 1355993 - DNA, 15 bp, Homo sapiens
taaaagttaaaaaga

SEQ ID NO: 1355994 - DNA, 15 bp, Homo sapiens
ataaaagttaaaaag

SEQ ID NO: 1355995 - DNA, 15 bp, Homo sapiens
tataaaagttaaaaa

SEQ ID NO: 1355996 - DNA, 15 bp, Homo sapiens
atataaaagttaaaa

SEQ ID NO: 1355997 - DNA, 15 bp, Homo sapiens
aatataaaagttaaa

SEQ ID NO: 1355998 - DNA, 15 bp, Homo sapiens
aaatataaaagttaa

SEQ ID NO: 1355999 - DNA, 15 bp, Homo sapiens
gaaatataaaagtta

SEQ ID NO: 1356000 - DNA, 15 bp, Homo sapiens
tgaaatataaaagtt

SEQ ID NO: 1356001 - DNA, 15 bp, Homo sapiens
atgaaatataaaagt

SEQ ID NO: 1356002 - DNA, 15 bp, Homo sapiens
gatgaaatataaaag

SEQ ID NO: 1356003 - DNA, 15 bp, Homo sapiens
agatgaaatataaaa

SEQ ID NO: 1356004 - DNA, 15 bp, Homo sapiens
gagatgaaatataaa

SEQ ID NO: 1356005 - DNA, 15 bp, Homo sapiens
tgagatgaaatataa

SEQ ID NO: 1356006 - DNA, 15 bp, Homo sapiens
ttgagatgaaatata

SEQ ID NO: 1356007 - DNA, 15 bp, Homo sapiens
attgagatgaaatat

SEQ ID NO: 1356008 - DNA, 15 bp, Homo sapiens
tattgagatgaaata

SEQ ID NO: 1356009 - DNA, 15 bp, Homo sapiens
atattgagatgaaat

SEQ ID NO: 1356010 - DNA, 15 bp, Homo sapiens
catattgagatgaaa

SEQ ID NO: 1356011 - DNA, 15 bp, Homo sapiens
acatattgagatgaa

SEQ ID NO: 1356012 - DNA, 15 bp, Homo sapiens
aacatattgagatga

SEQ ID NO: 1356013 - DNA, 15 bp, Homo sapiens
aaacatattgagatg

SEQ ID NO: 1356014 - DNA, 15 bp, Homo sapiens
gaaacatattgagat

SEQ ID NO: 1356015 - DNA, 15 bp, Homo sapiens
agaaacatattgaga

SEQ ID NO: 1356016 - DNA, 15 bp, Homo sapiens
tagaaacatattgag

SEQ ID NO: 1356017 - DNA, 15 bp, Homo sapiens
ttagaaacatattga

SEQ ID NO: 1356018 - DNA, 15 bp, Homo sapiens
tttagaaacatattg

SEQ ID NO: 1356019 - DNA, 15 bp, Homo sapiens
atttagaaacatatt

SEQ ID NO: 1356020 - DNA, 15 bp, Homo sapiens
aatttagaaacatat

SEQ ID NO: 1356021 - DNA, 15 bp, Homo sapiens
taatttagaaacata

SEQ ID NO: 1356022 - DNA, 15 bp, Homo sapiens
ataatttagaaacat

SEQ ID NO: 1356023 - DNA, 15 bp, Homo sapiens
cataatttagaaaca

SEQ ID NO: 1356024 - DNA, 15 bp, Homo sapiens
gcataatttagaaac

SEQ ID NO: 1356025 - DNA, 15 bp, Homo sapiens
agcataatttagaaa

SEQ ID NO: 1356026 - DNA, 15 bp, Homo sapiens
aagcataatttagaa

SEQ ID NO: 1356027 - DNA, 15 bp, Homo sapiens
taagcataatttaga

SEQ ID NO: 1356028 - DNA, 15 bp, Homo sapiens
ataagcataatttag

SEQ ID NO: 1356029 - DNA, 15 bp, Homo sapiens
aataagcataattta

SEQ ID NO: 1356030 - DNA, 15 bp, Homo sapiens
aaataagcataattt

SEQ ID NO: 1356031 - DNA, 15 bp, Homo sapiens
taaataagcataatt

SEQ ID NO: 1356032 - DNA, 15 bp, Homo sapiens
ataaataagcataat

SEQ ID NO: 1356033 - DNA, 15 bp, Homo sapiens
gataaataagcataa

SEQ ID NO: 1356034 - DNA, 15 bp, Homo sapiens
ggataaataagcata

SEQ ID NO: 1356035 - DNA, 15 bp, Homo sapiens
tggataaataagcat

SEQ ID NO: 1356036 - DNA, 15 bp, Homo sapiens
atggataaataagca

SEQ ID NO: 1356037 - DNA, 15 bp, Homo sapiens
aatggataaataagc

SEQ ID NO: 1356038 - DNA, 15 bp, Homo sapiens
aaatggataaataag

SEQ ID NO: 1356039 - DNA, 15 bp, Homo sapiens
aaaatggataaataa

SEQ ID NO: 1356040 - DNA, 15 bp, Homo sapiens
taaaatggataaata

SEQ ID NO: 1356041 - DNA, 15 bp, Homo sapiens
ataaaatggataaat

SEQ ID NO: 1356042 - DNA, 15 bp, Homo sapiens
aataaaatggataaa

SEQ ID NO: 1356043 - DNA, 15 bp, Homo sapiens
aaataaaatggataa

SEQ ID NO: 1356044 - DNA, 15 bp, Homo sapiens
aaaataaaatggata

SEQ ID NO: 1356045 - DNA, 15 bp, Homo sapiens
aaaaataaaatggat

SEQ ID NO: 1356046 - DNA, 15 bp, Homo sapiens
taaaaataaaatgga

SEQ ID NO: 1356047 - DNA, 15 bp, Homo sapiens
ataaaaataaaatgg

SEQ ID NO: 1356048 - DNA, 15 bp, Homo sapiens
tataaaaataaaatg

SEQ ID NO: 1356049 - DNA, 15 bp, Homo sapiens
gtataaaaataaaat

SEQ ID NO: 1356050 - DNA, 15 bp, Homo sapiens
ggtataaaaataaaa

SEQ ID NO: 1356051 - DNA, 15 bp, Homo sapiens
gggtataaaaataaa

SEQ ID NO: 1356052 - DNA, 15 bp, Homo sapiens
agggtataaaaataa

SEQ ID NO: 1356053 - DNA, 15 bp, Homo sapiens
aagggtataaaaata

SEQ ID NO: 1356054 - DNA, 15 bp, Homo sapiens
taagggtataaaaat

SEQ ID NO: 1356055 - DNA, 15 bp, Homo sapiens
ctaagggtataaaaa

SEQ ID NO: 1356056 - DNA, 15 bp, Homo sapiens
actaagggtataaaa

SEQ ID NO: 1356057 - DNA, 15 bp, Homo sapiens
aactaagggtataaa

SEQ ID NO: 1356058 - DNA, 15 bp, Homo sapiens
aaactaagggtataa

SEQ ID NO: 1356059 - DNA, 15 bp, Homo sapiens
gaaactaagggtata

SEQ ID NO: 1356060 - DNA, 15 bp, Homo sapiens
agaaactaagggtat

SEQ ID NO: 1356061 - DNA, 15 bp, Homo sapiens
tagaaactaagggta

SEQ ID NO: 1356062 - DNA, 15 bp, Homo sapiens
ttagaaactaagggt

SEQ ID NO: 1356063 - DNA, 15 bp, Homo sapiens
tttagaaactaaggg

SEQ ID NO: 1356064 - DNA, 15 bp, Homo sapiens
gtttagaaactaagg

SEQ ID NO: 1356065 - DNA, 15 bp, Homo sapiens
agtttagaaactaag

SEQ ID NO: 1356066 - DNA, 15 bp, Homo sapiens
cagtttagaaactaa

SEQ ID NO: 1356067 - DNA, 15 bp, Homo sapiens
ccagtttagaaacta

SEQ ID NO: 1356068 - DNA, 15 bp, Homo sapiens
accagtttagaaact

SEQ ID NO: 1356069 - DNA, 15 bp, Homo sapiens
taccagtttagaaac

SEQ ID NO: 1356070 - DNA, 15 bp, Homo sapiens
ataccagtttagaaa

SEQ ID NO: 1356071 - DNA, 15 bp, Homo sapiens
tataccagtttagaa

SEQ ID NO: 1356072 - DNA, 15 bp, Homo sapiens
ttataccagtttaga

SEQ ID NO: 1356073 - DNA, 15 bp, Homo sapiens
attataccagtttag

SEQ ID NO: 1356074 - DNA, 15 bp, Homo sapiens
aattataccagttta

SEQ ID NO: 1356075 - DNA, 15 bp, Homo sapiens
taattataccagttt

SEQ ID NO: 1356076 - DNA, 15 bp, Homo sapiens
ttaattataccagtt

SEQ ID NO: 1356077 - DNA, 15 bp, Homo sapiens
cttaattataccagt

SEQ ID NO: 1356078 - DNA, 15 bp, Homo sapiens
gcttaattataccag

SEQ ID NO: 1356079 - DNA, 15 bp, Homo sapiens
ggcttaattatacca

SEQ ID NO: 1356080 - DNA, 15 bp, Homo sapiens
tggcttaattatacc

SEQ ID NO: 1356081 - DNA, 15 bp, Homo sapiens
atggcttaattatac

SEQ ID NO: 1356082 - DNA, 15 bp, Homo sapiens
gatggcttaattata

SEQ ID NO: 1356083 - DNA, 15 bp, Homo sapiens
agatggcttaattat

SEQ ID NO: 1356084 - DNA, 15 bp, Homo sapiens
cagatggcttaatta

SEQ ID NO: 1356085 - DNA, 15 bp, Homo sapiens
ccagatggcttaatt

SEQ ID NO: 1356086 - DNA, 15 bp, Homo sapiens
tccagatggcttaat

SEQ ID NO: 1356087 - DNA, 15 bp, Homo sapiens
ctccagatggcttaa

SEQ ID NO: 1356088 - DNA, 15 bp, Homo sapiens
tctccagatggctta

SEQ ID NO: 1356089 - DNA, 15 bp, Homo sapiens
atctccagatggctt

SEQ ID NO: 1356090 - DNA, 15 bp, Homo sapiens
aatctccagatggct

SEQ ID NO: 1356091 - DNA, 15 bp, Homo sapiens
aaatctccagatggc

SEQ ID NO: 1356092 - DNA, 15 bp, Homo sapiens
aaaatctccagatgg

SEQ ID NO: 1356093 - DNA, 15 bp, Homo sapiens
taaaaatctccagat

SEQ ID NO: 1356094 - DNA, 15 bp, Homo sapiens
ataaaaatctccaga

SEQ ID NO: 1356095 - DNA, 15 bp, Homo sapiens
tataaaaatctccag

SEQ ID NO: 1356096 - DNA, 15 bp, Homo sapiens
ttataaaaatctcca

SEQ ID NO: 1356097 - DNA, 15 bp, Homo sapiens
cttataaaaatctcc

SEQ ID NO: 1356098 - DNA, 15 bp, Homo sapiens
tcttataaaaatctc

SEQ ID NO: 1356099 - DNA, 15 bp, Homo sapiens
gtcttataaaaatct

SEQ ID NO: 1356100 - DNA, 15 bp, Homo sapiens
agtcttataaaaatc

SEQ ID NO: 1356101 - DNA, 15 bp, Homo sapiens
aagtcttataaaaat

SEQ ID NO: 1356102 - DNA, 15 bp, Homo sapiens
taagtcttataaaaa

SEQ ID NO: 1356103 - DNA, 15 bp, Homo sapiens
gtaagtcttataaaa

SEQ ID NO: 1356104 - DNA, 15 bp, Homo sapiens
agtaagtcttataaa

SEQ ID NO: 1356105 - DNA, 15 bp, Homo sapiens
tagtaagtcttataa

SEQ ID NO: 1356106 - DNA, 15 bp, Homo sapiens
ttagtaagtcttata

SEQ ID NO: 1356107 - DNA, 15 bp, Homo sapiens
tttagtaagtcttat

SEQ ID NO: 1356108 - DNA, 15 bp, Homo sapiens
atttagtaagtctta

SEQ ID NO: 1356109 - DNA, 15 bp, Homo sapiens
tatttagtaagtctt

SEQ ID NO: 1356110 - DNA, 15 bp, Homo sapiens
ctatttagtaagtct

SEQ ID NO: 1356111 - DNA, 15 bp, Homo sapiens
gctatttagtaagtc

SEQ ID NO: 1356112 - DNA, 15 bp, Homo sapiens
agctatttagtaagt

SEQ ID NO: 1356113 - DNA, 15 bp, Homo sapiens
tagctatttagtaag

SEQ ID NO: 1356114 - DNA, 15 bp, Homo sapiens
ctagctatttagtaa

SEQ ID NO: 1356115 - DNA, 15 bp, Homo sapiens
cctagctatttagta

SEQ ID NO: 1356116 - DNA, 15 bp, Homo sapiens
tcctagctatttagt

SEQ ID NO: 1356117 - DNA, 15 bp, Homo sapiens
atcctagctatttag

SEQ ID NO: 1356118 - DNA, 15 bp, Homo sapiens
aatcctagctattta

SEQ ID NO: 1356119 - DNA, 15 bp, Homo sapiens
aaatcctagctattt

SEQ ID NO: 1356120 - DNA, 15 bp, Homo sapiens
aaaatcctagctatt

SEQ ID NO: 1356121 - DNA, 15 bp, Homo sapiens
caaaatcctagctat

SEQ ID NO: 1356122 - DNA, 15 bp, Homo sapiens
gcaaaatcctagcta

SEQ ID NO: 1356123 - DNA, 15 bp, Homo sapiens
ggcaaaatcctagct

SEQ ID NO: 1356124 - DNA, 15 bp, Homo sapiens
gggcaaaatcctagc

SEQ ID NO: 1356125 - DNA, 15 bp, Homo sapiens
ggggcaaaatcctag

SEQ ID NO: 1356126 - DNA, 15 bp, Homo sapiens
gggggcaaaatccta

SEQ ID NO: 1356127 - DNA, 15 bp, Homo sapiens
tgggggcaaaatcct

SEQ ID NO: 1356128 - DNA, 15 bp, Homo sapiens
ctgggggcaaaatcc

SEQ ID NO: 1356129 - DNA, 15 bp, Homo sapiens
cctgggggcaaaatc

SEQ ID NO: 1356130 - DNA, 15 bp, Homo sapiens
acctgggggcaaaat

SEQ ID NO: 1356131 - DNA, 15 bp, Homo sapiens
tacctgggggcaaaa

SEQ ID NO: 1356132 - DNA, 15 bp, Homo sapiens
ttacctgggggcaaa

SEQ ID NO: 1356133 - DNA, 15 bp, Homo sapiens
tttacctgggggcaa

SEQ ID NO: 1356134 - DNA, 15 bp, Homo sapiens
ttttacctgggggca

SEQ ID NO: 1356135 - DNA, 15 bp, Homo sapiens
attttacctgggggc

SEQ ID NO: 1356136 - DNA, 15 bp, Homo sapiens
tattttacctggggg

SEQ ID NO: 1356137 - DNA, 15 bp, Homo sapiens
ttattttacctgggg

SEQ ID NO: 1356138 - DNA, 15 bp, Homo sapiens
tttattttacctggg

SEQ ID NO: 1356139 - DNA, 15 bp, Homo sapiens
atttattttacctgg

SEQ ID NO: 1356140 - DNA, 15 bp, Homo sapiens
aatttattttacctg

SEQ ID NO: 1356141 - DNA, 15 bp, Homo sapiens
taatttattttacct

SEQ ID NO: 1356142 - DNA, 15 bp, Homo sapiens
gtaatttattttacc

SEQ ID NO: 1356143 - DNA, 15 bp, Homo sapiens
agtaatttattttac

SEQ ID NO: 1356144 - DNA, 15 bp, Homo sapiens
cagtaatttatttta

SEQ ID NO: 1356145 - DNA, 15 bp, Homo sapiens
gcagtaatttatttt

SEQ ID NO: 1356146 - DNA, 15 bp, Homo sapiens
tgcagtaatttattt

SEQ ID NO: 1356147 - DNA, 15 bp, Homo sapiens
ttgcagtaatttatt

SEQ ID NO: 1356148 - DNA, 15 bp, Homo sapiens
attgcagtaatttat

SEQ ID NO: 1356149 - DNA, 15 bp, Homo sapiens
gattgcagtaattta

SEQ ID NO: 1356150 - DNA, 15 bp, Homo sapiens
tgattgcagtaattt

SEQ ID NO: 1356151 - DNA, 15 bp, Homo sapiens
atgattgcagtaatt

SEQ ID NO: 1356152 - DNA, 15 bp, Homo sapiens
catgattgcagtaat

SEQ ID NO: 1356153 - DNA, 15 bp, Homo sapiens
acatgattgcagtaa

SEQ ID NO: 1356154 - DNA, 15 bp, Homo sapiens
cacatgattgcagta

SEQ ID NO: 1356155 - DNA, 15 bp, Homo sapiens
acacatgattgcagt

SEQ ID NO: 1356156 - DNA, 15 bp, Homo sapiens
tacacatgattgcag

SEQ ID NO: 1356157 - DNA, 15 bp, Homo sapiens
ttacacatgattgca

SEQ ID NO: 1356158 - DNA, 15 bp, Homo sapiens
attacacatgattgc

SEQ ID NO: 1356159 - DNA, 15 bp, Homo sapiens
tattacacatgattg

SEQ ID NO: 1356160 - DNA, 15 bp, Homo sapiens
ttattacacatgatt

SEQ ID NO: 1356161 - DNA, 15 bp, Homo sapiens
attattacacatgat

SEQ ID NO: 1356162 - DNA, 15 bp, Homo sapiens
tattattacacatga

SEQ ID NO: 1356163 - DNA, 15 bp, Homo sapiens
atattattacacatg

SEQ ID NO: 1356164 - DNA, 15 bp, Homo sapiens
tatattattacacat

SEQ ID NO: 1356165 - DNA, 15 bp, Homo sapiens
gtatattattacaca

SEQ ID NO: 1356166 - DNA, 15 bp, Homo sapiens
tgtatattattacac

SEQ ID NO: 1356167 - DNA, 15 bp, Homo sapiens
ctgtatattattaca

SEQ ID NO: 1356168 - DNA, 15 bp, Homo sapiens
gctgtatattattac

SEQ ID NO: 1356169 - DNA, 15 bp, Homo sapiens
tgctgtatattatta

SEQ ID NO: 1356170 - DNA, 15 bp, Homo sapiens
ctgctgtatattatt

SEQ ID NO: 1356171 - DNA, 15 bp, Homo sapiens
actgctgtatattat

SEQ ID NO: 1356172 - DNA, 15 bp, Homo sapiens
aactgctgtatatta

SEQ ID NO: 1356173 - DNA, 15 bp, Homo sapiens
aaactgctgtatatt

SEQ ID NO: 1356174 - DNA, 15 bp, Homo sapiens
taaactgctgtatat

SEQ ID NO: 1356175 - DNA, 15 bp, Homo sapiens
ataaactgctgtata

SEQ ID NO: 1356176 - DNA, 15 bp, Homo sapiens
aataaactgctgtat

SEQ ID NO: 1356177 - DNA, 15 bp, Homo sapiens
gaataaactgctgta

SEQ ID NO: 1356178 - DNA, 15 bp, Homo sapiens
agaataaactgctgt

SEQ ID NO: 1356179 - DNA, 15 bp, Homo sapiens
tagaataaactgctg

SEQ ID NO: 1356180 - DNA, 15 bp, Homo sapiens
ttagaataaactgct

SEQ ID NO: 1356181 - DNA, 15 bp, Homo sapiens
cttagaataaactgc

SEQ ID NO: 1356182 - DNA, 15 bp, Homo sapiens
acttagaataaactg

SEQ ID NO: 1356183 - DNA, 15 bp, Homo sapiens
tacttagaataaact

SEQ ID NO: 1356184 - DNA, 15 bp, Homo sapiens
atacttagaataaac

SEQ ID NO: 1356185 - DNA, 15 bp, Homo sapiens
gatacttagaataaa

SEQ ID NO: 1356186 - DNA, 15 bp, Homo sapiens
agatacttagaataa

SEQ ID NO: 1356187 - DNA, 15 bp, Homo sapiens
gagatacttagaata

SEQ ID NO: 1356188 - DNA, 15 bp, Homo sapiens
agagatacttagaat

SEQ ID NO: 1356189 - DNA, 15 bp, Homo sapiens
tagagatacttagaa

SEQ ID NO: 1356190 - DNA, 15 bp, Homo sapiens
ttagagatacttaga

SEQ ID NO: 1356191 - DNA, 15 bp, Homo sapiens
cttagagatacttag

SEQ ID NO: 1356192 - DNA, 15 bp, Homo sapiens
tcttagagatactta

SEQ ID NO: 1356193 - DNA, 15 bp, Homo sapiens
atcttagagatactt

SEQ ID NO: 1356194 - DNA, 15 bp, Homo sapiens
aatcttagagatact

SEQ ID NO: 1356195 - DNA, 15 bp, Homo sapiens
aaatcttagagatac

SEQ ID NO: 1356196 - DNA, 15 bp, Homo sapiens
caaatcttagagata

SEQ ID NO: 1356197 - DNA, 15 bp, Homo sapiens
acaaatcttagagat

SEQ ID NO: 1356198 - DNA, 15 bp, Homo sapiens
aacaaatcttagaga

SEQ ID NO: 1356199 - DNA, 15 bp, Homo sapiens
aaacaaatcttagag

SEQ ID NO: 1356200 - DNA, 15 bp, Homo sapiens
caaacaaatcttaga

SEQ ID NO: 1356201 - DNA, 15 bp, Homo sapiens
ccaaacaaatcttag

SEQ ID NO: 1356202 - DNA, 15 bp, Homo sapiens
cccaaacaaatctta

SEQ ID NO: 1356203 - DNA, 15 bp, Homo sapiens
ccccaaacaaatctt

SEQ ID NO: 1356204 - DNA, 15 bp, Homo sapiens
tccccaaacaaatct

SEQ ID NO: 1356205 - DNA, 15 bp, Homo sapiens
ttccccaaacaaatc

SEQ ID NO: 1356206 - DNA, 15 bp, Homo sapiens
tttccccaaacaaat

SEQ ID NO: 1356207 - DNA, 15 bp, Homo sapiens
ttttccccaaacaaa

SEQ ID NO: 1356208 - DNA, 15 bp, Homo sapiens
tttttccccaaacaa

SEQ ID NO: 1356209 - DNA, 15 bp, Homo sapiens
gtttttccccaaaca

SEQ ID NO: 1356210 - DNA, 15 bp, Homo sapiens
tgtttttccccaaac

SEQ ID NO: 1356211 - DNA, 15 bp, Homo sapiens
ttgtttttccccaaa

SEQ ID NO: 1356212 - DNA, 15 bp, Homo sapiens
attgtttttccccaa

SEQ ID NO: 1356213 - DNA, 15 bp, Homo sapiens
aattgtttttcccca

SEQ ID NO: 1356214 - DNA, 15 bp, Homo sapiens
gaattgtttttcccc

SEQ ID NO: 1356215 - DNA, 15 bp, Homo sapiens
tgaattgtttttccc

SEQ ID NO: 1356216 - DNA, 15 bp, Homo sapiens
ctgaattgtttttcc

SEQ ID NO: 1356217 - DNA, 15 bp, Homo sapiens
tctgaattgtttttc

SEQ ID NO: 1356218 - DNA, 15 bp, Homo sapiens
atctgaattgttttt

SEQ ID NO: 1356219 - DNA, 15 bp, Homo sapiens
tatctgaattgtttt

SEQ ID NO: 1356220 - DNA, 15 bp, Homo sapiens
ctatctgaattgttt

SEQ ID NO: 1356221 - DNA, 15 bp, Homo sapiens
tctatctgaattgtt

SEQ ID NO: 1356222 - DNA, 15 bp, Homo sapiens
ctctatctgaattgt

SEQ ID NO: 1356223 - DNA, 15 bp, Homo sapiens
tctctatctgaattg

SEQ ID NO: 1356224 - DNA, 15 bp, Homo sapiens
atctctatctgaatt

SEQ ID NO: 1356225 - DNA, 15 bp, Homo sapiens
aatctctatctgaat

SEQ ID NO: 1356226 - DNA, 15 bp, Homo sapiens
aaatctctatctgaa

SEQ ID NO: 1356227 - DNA, 15 bp, Homo sapiens
aaaatctctatctga

SEQ ID NO: 1356228 - DNA, 15 bp, Homo sapiens
caaaatctctatctg

SEQ ID NO: 1356229 - DNA, 15 bp, Homo sapiens
acaaaatctctatct

SEQ ID NO: 1356230 - DNA, 15 bp, Homo sapiens
aacaaaatctctatc

SEQ ID NO: 1356231 - DNA, 15 bp, Homo sapiens
aaacaaaatctctat

SEQ ID NO: 1356232 - DNA, 15 bp, Homo sapiens
aaaacaaaatctcta

SEQ ID NO: 1356233 - DNA, 15 bp, Homo sapiens
taaaacaaaatctct

SEQ ID NO: 1356234 - DNA, 15 bp, Homo sapiens
ataaaacaaaatctc

SEQ ID NO: 1356235 - DNA, 15 bp, Homo sapiens
tataaaacaaaatct

SEQ ID NO: 1356236 - DNA, 15 bp, Homo sapiens
gtataaaacaaaatc

SEQ ID NO: 1356237 - DNA, 15 bp, Homo sapiens
tgtataaaacaaaat

SEQ ID NO: 1356238 - DNA, 15 bp, Homo sapiens
ttgtataaaacaaaa

SEQ ID NO: 1356239 - DNA, 15 bp, Homo sapiens
tttgtataaaacaaa

SEQ ID NO: 1356240 - DNA, 15 bp, Homo sapiens
gtttgtataaaacaa

SEQ ID NO: 1356241 - DNA, 15 bp, Homo sapiens
tgtttgtataaaaca

SEQ ID NO: 1356242 - DNA, 15 bp, Homo sapiens
atgtttgtataaaac

SEQ ID NO: 1356243 - DNA, 15 bp, Homo sapiens
catgtttgtataaaa

SEQ ID NO: 1356244 - DNA, 15 bp, Homo sapiens
tcatgtttgtataaa

SEQ ID NO: 1356245 - DNA, 15 bp, Homo sapiens
gtcatgtttgtataa

SEQ ID NO: 1356246 - DNA, 15 bp, Homo sapiens
agtcatgtttgtata

SEQ ID NO: 1356247 - DNA, 15 bp, Homo sapiens
aagtcatgtttgtat

SEQ ID NO: 1356248 - DNA, 15 bp, Homo sapiens
aaagtcatgtttgta

SEQ ID NO: 1356249 - DNA, 15 bp, Homo sapiens
gaaagtcatgtttgt

SEQ ID NO: 1356250 - DNA, 15 bp, Homo sapiens
tgaaagtcatgtttg

SEQ ID NO: 1356251 - DNA, 15 bp, Homo sapiens
ctgaaagtcatgttt

SEQ ID NO: 1356252 - DNA, 15 bp, Homo sapiens
gctgaaagtcatgtt

SEQ ID NO: 1356253 - DNA, 15 bp, Homo sapiens
tgctgaaagtcatgt

SEQ ID NO: 1356254 - DNA, 15 bp, Homo sapiens
ttgctgaaagtcatg

SEQ ID NO: 1356255 - DNA, 15 bp, Homo sapiens
cttgctgaaagtcat

SEQ ID NO: 1356256 - DNA, 15 bp, Homo sapiens
acttgctgaaagtca

SEQ ID NO: 1356257 - DNA, 15 bp, Homo sapiens
cacttgctgaaagtc

SEQ ID NO: 1356258 - DNA, 15 bp, Homo sapiens
tcacttgctgaaagt

SEQ ID NO: 1356259 - DNA, 15 bp, Homo sapiens
atcacttgctgaaag

SEQ ID NO: 1356260 - DNA, 15 bp, Homo sapiens
aatcacttgctgaaa

SEQ ID NO: 1356261 - DNA, 15 bp, Homo sapiens
taatcacttgctgaa

SEQ ID NO: 1356262 - DNA, 15 bp, Homo sapiens
gtaatcacttgctga

SEQ ID NO: 1356263 - DNA, 15 bp, Homo sapiens
agtaatcacttgctg

SEQ ID NO: 1356264 - DNA, 15 bp, Homo sapiens
tagtaatcacttgct

SEQ ID NO: 1356265 - DNA, 15 bp, Homo sapiens
gtagtaatcacttgc

SEQ ID NO: 1356266 - DNA, 15 bp, Homo sapiens
tgtagtaatcacttg

SEQ ID NO: 1356267 - DNA, 15 bp, Homo sapiens
ctgtagtaatcactt

SEQ ID NO: 1356268 - DNA, 15 bp, Homo sapiens
tctgtagtaatcact

SEQ ID NO: 1356269 - DNA, 15 bp, Homo sapiens
ttctgtagtaatcac

SEQ ID NO: 1356270 - DNA, 15 bp, Homo sapiens
tttctgtagtaatca

SEQ ID NO: 1356271 - DNA, 15 bp, Homo sapiens
atttctgtagtaatc

SEQ ID NO: 1356272 - DNA, 15 bp, Homo sapiens
tatttctgtagtaat

SEQ ID NO: 1356273 - DNA, 15 bp, Homo sapiens
gtatttctgtagtaa

SEQ ID NO: 1356274 - DNA, 15 bp, Homo sapiens
tgtatttctgtagta

SEQ ID NO: 1356275 - DNA, 15 bp, Homo sapiens
gtgtatttctgtagt

SEQ ID NO: 1356276 - DNA, 15 bp, Homo sapiens
tgtgtatttctgtag

SEQ ID NO: 1356277 - DNA, 15 bp, Homo sapiens
atgtgtatttctgta

SEQ ID NO: 1356278 - DNA, 15 bp, Homo sapiens
tatgtgtatttctgt

SEQ ID NO: 1356279 - DNA, 15 bp, Homo sapiens
atatgtgtatttctg

SEQ ID NO: 1356280 - DNA, 15 bp, Homo sapiens
catatgtgtatttct

SEQ ID NO: 1356281 - DNA, 15 bp, Homo sapiens
ccatatgtgtatttc

SEQ ID NO: 1356282 - DNA, 15 bp, Homo sapiens
cccatatgtgtattt

SEQ ID NO: 1356283 - DNA, 15 bp, Homo sapiens
tcccatatgtgtatt

SEQ ID NO: 1356284 - DNA, 15 bp, Homo sapiens
atcccatatgtgtat

SEQ ID NO: 1356285 - DNA, 15 bp, Homo sapiens
tatcccatatgtgta

SEQ ID NO: 1356286 - DNA, 15 bp, Homo sapiens
atatcccatatgtgt

SEQ ID NO: 1356287 - DNA, 15 bp, Homo sapiens
aatatcccatatgtg

SEQ ID NO: 1356288 - DNA, 15 bp, Homo sapiens
aaatatcccatatgt

SEQ ID NO: 1356289 - DNA, 15 bp, Homo sapiens
aaaatatcccatatg

SEQ ID NO: 1356290 - DNA, 15 bp, Homo sapiens
caaaatatcccatat

SEQ ID NO: 1356291 - DNA, 15 bp, Homo sapiens
tcaaaatatcccata

SEQ ID NO: 1356292 - DNA, 15 bp, Homo sapiens
gtcaaaatatcccat

SEQ ID NO: 1356293 - DNA, 15 bp, Homo sapiens
tgtcaaaatatccca

SEQ ID NO: 1356294 - DNA, 15 bp, Homo sapiens
atgtcaaaatatccc

SEQ ID NO: 1356295 - DNA, 15 bp, Homo sapiens
aatgtcaaaatatcc

SEQ ID NO: 1356296 - DNA, 15 bp, Homo sapiens
caatgtcaaaatatc

SEQ ID NO: 1356297 - DNA, 15 bp, Homo sapiens
ccaatgtcaaaatat

SEQ ID NO: 1356298 - DNA, 15 bp, Homo sapiens
cccaatgtcaaaata

SEQ ID NO: 1356299 - DNA, 15 bp, Homo sapiens
tcccaatgtcaaaat

SEQ ID NO: 1356300 - DNA, 15 bp, Homo sapiens
atcccaatgtcaaaa

SEQ ID NO: 1356301 - DNA, 15 bp, Homo sapiens
aatcccaatgtcaaa

SEQ ID NO: 1356302 - DNA, 15 bp, Homo sapiens
caatcccaatgtcaa

SEQ ID NO: 1356303 - DNA, 15 bp, Homo sapiens
acaatcccaatgtca

SEQ ID NO: 1356304 - DNA, 15 bp, Homo sapiens
tacaatcccaatgtc

SEQ ID NO: 1356305 - DNA, 15 bp, Homo sapiens
ttacaatcccaatgt

SEQ ID NO: 1356306 - DNA, 15 bp, Homo sapiens
tttacaatcccaatg

SEQ ID NO: 1356307 - DNA, 15 bp, Homo sapiens
ctttacaatcccaat

SEQ ID NO: 1356308 - DNA, 15 bp, Homo sapiens
cctttacaatcccaa

SEQ ID NO: 1356309 - DNA, 15 bp, Homo sapiens
acctttacaatccca

SEQ ID NO: 1356310 - DNA, 15 bp, Homo sapiens
gacctttacaatccc

SEQ ID NO: 1356311 - DNA, 15 bp, Homo sapiens
tgacctttacaatcc

SEQ ID NO: 1356312 - DNA, 15 bp, Homo sapiens
ttgacctttacaatc

SEQ ID NO: 1356313 - DNA, 15 bp, Homo sapiens
tttgacctttacaat

SEQ ID NO: 1356314 - DNA, 15 bp, Homo sapiens
atttgacctttacaa

SEQ ID NO: 1356315 - DNA, 15 bp, Homo sapiens
catttgacctttaca

SEQ ID NO: 1356316 - DNA, 15 bp, Homo sapiens
tcatttgacctttac

SEQ ID NO: 1356317 - DNA, 15 bp, Homo sapiens
atcatttgaccttta

SEQ ID NO: 1356318 - DNA, 15 bp, Homo sapiens
catcatttgaccttt

SEQ ID NO: 1356319 - DNA, 15 bp, Homo sapiens
ccatcatttgacctt

SEQ ID NO: 1356320 - DNA, 15 bp, Homo sapiens
tccatcatttgacct

SEQ ID NO: 1356321 - DNA, 15 bp, Homo sapiens
ttccatcatttgacc

SEQ ID NO: 1356322 - DNA, 15 bp, Homo sapiens
tttccatcatttgac

SEQ ID NO: 1356323 - DNA, 15 bp, Homo sapiens
atttccatcatttga

SEQ ID NO: 1356324 - DNA, 15 bp, Homo sapiens
tatttccatcatttg

SEQ ID NO: 1356325 - DNA, 15 bp, Homo sapiens
ctatttccatcattt

SEQ ID NO: 1356326 - DNA, 15 bp, Homo sapiens
actatttccatcatt

SEQ ID NO: 1356327 - DNA, 15 bp, Homo sapiens
gactatttccatcat

SEQ ID NO: 1356328 - DNA, 15 bp, Homo sapiens
agactatttccatca

SEQ ID NO: 1356329 - DNA, 15 bp, Homo sapiens
gagactatttccatc

SEQ ID NO: 1356330 - DNA, 15 bp, Homo sapiens
ggagactatttccat

SEQ ID NO: 1356331 - DNA, 15 bp, Homo sapiens
tggagactatttcca

SEQ ID NO: 1356332 - DNA, 15 bp, Homo sapiens
ttggagactatttcc

SEQ ID NO: 1356333 - DNA, 15 bp, Homo sapiens
tttggagactatttc

SEQ ID NO: 1356334 - DNA, 15 bp, Homo sapiens
atttggagactattt

SEQ ID NO: 1356335 - DNA, 15 bp, Homo sapiens
tatttggagactatt

SEQ ID NO: 1356336 - DNA, 15 bp, Homo sapiens
ttatttggagactat

SEQ ID NO: 1356337 - DNA, 15 bp, Homo sapiens
tttatttggagacta

SEQ ID NO: 1356338 - DNA, 15 bp, Homo sapiens
ttttatttggagact

SEQ ID NO: 1356339 - DNA, 15 bp, Homo sapiens
tttttatttggagac

SEQ ID NO: 1356340 - DNA, 15 bp, Homo sapiens
ttttttatttggaga

SEQ ID NO: 1356341 - DNA, 15 bp, Homo sapiens
cttttttatttggag

SEQ ID NO: 1356342 - DNA, 15 bp, Homo sapiens
gcttttttatttgga

SEQ ID NO: 1356343 - DNA, 15 bp, Homo sapiens
tgcttttttatttgg

SEQ ID NO: 1356344 - DNA, 15 bp, Homo sapiens
gtgcttttttatttg

SEQ ID NO: 1356345 - DNA, 15 bp, Homo sapiens
tgtgcttttttattt

SEQ ID NO: 1356346 - DNA, 15 bp, Homo sapiens
ctgtgcttttttatt

SEQ ID NO: 1356347 - DNA, 15 bp, Homo sapiens
tctgtgcttttttat

SEQ ID NO: 1356348 - DNA, 15 bp, Homo sapiens
atctgtgctttttta

SEQ ID NO: 1356349 - DNA, 15 bp, Homo sapiens
aatctgtgctttttt

SEQ ID NO: 1356350 - DNA, 15 bp, Homo sapiens
aaatctgtgcttttt

SEQ ID NO: 1356351 - DNA, 15 bp, Homo sapiens
gaaatctgtgctttt

SEQ ID NO: 1356352 - DNA, 15 bp, Homo sapiens
agaaatctgtgcttt

SEQ ID NO: 1356353 - DNA, 15 bp, Homo sapiens
gagaaatctgtgctt

SEQ ID NO: 1356354 - DNA, 15 bp, Homo sapiens
ggagaaatctgtgct

SEQ ID NO: 1356355 - DNA, 15 bp, Homo sapiens
aggagaaatctgtgc

SEQ ID NO: 1356356 - DNA, 15 bp, Homo sapiens
aaggagaaatctgtg

SEQ ID NO: 1356357 - DNA, 15 bp, Homo sapiens
aaaggagaaatctgt

SEQ ID NO: 1356358 - DNA, 15 bp, Homo sapiens
aaaaggagaaatctg

SEQ ID NO: 1356359 - DNA, 15 bp, Homo sapiens
gaaaaggagaaatct

SEQ ID NO: 1356360 - DNA, 15 bp, Homo sapiens
agaaaaggagaaatc

SEQ ID NO: 1356361 - DNA, 15 bp, Homo sapiens
tagaaaaggagaaat

SEQ ID NO: 1356362 - DNA, 15 bp, Homo sapiens
ttagaaaaggagaaa

SEQ ID NO: 1356363 - DNA, 15 bp, Homo sapiens
tttagaaaaggagaa

SEQ ID NO: 1356364 - DNA, 15 bp, Homo sapiens
ttttagaaaaggaga

SEQ ID NO: 1356365 - DNA, 15 bp, Homo sapiens
tttttagaaaaggag

SEQ ID NO: 1356366 - DNA, 15 bp, Homo sapiens
ctttttagaaaagga

SEQ ID NO: 1356367 - DNA, 15 bp, Homo sapiens
actttttagaaaagg

SEQ ID NO: 1356368 - DNA, 15 bp, Homo sapiens
cactttttagaaaag

SEQ ID NO: 1356369 - DNA, 15 bp, Homo sapiens
acactttttagaaaa

SEQ ID NO: 1356370 - DNA, 15 bp, Homo sapiens
aacactttttagaaa

SEQ ID NO: 1356371 - DNA, 15 bp, Homo sapiens
aaacactttttagaa

SEQ ID NO: 1356372 - DNA, 15 bp, Homo sapiens
taaacactttttaga

SEQ ID NO: 1356373 - DNA, 15 bp, Homo sapiens
ataaacactttttag

SEQ ID NO: 1356374 - DNA, 15 bp, Homo sapiens
aataaacacttttta

SEQ ID NO: 1356375 - DNA, 15 bp, Homo sapiens
aaataaacacttttt

SEQ ID NO: 1356376 - DNA, 15 bp, Homo sapiens
taaataaacactttt

SEQ ID NO: 1356377 - DNA, 15 bp, Homo sapiens
ataaataaacacttt

SEQ ID NO: 1356378 - DNA, 15 bp, Homo sapiens
gataaataaacactt

SEQ ID NO: 1356379 - DNA, 15 bp, Homo sapiens
ggataaataaacact

SEQ ID NO: 1356380 - DNA, 15 bp, Homo sapiens
tggataaataaacac

SEQ ID NO: 1356381 - DNA, 15 bp, Homo sapiens
atggataaataaaca

SEQ ID NO: 1356382 - DNA, 15 bp, Homo sapiens
tatggataaataaac

SEQ ID NO: 1356383 - DNA, 15 bp, Homo sapiens
ttatggataaataaa

SEQ ID NO: 1356384 - DNA, 15 bp, Homo sapiens
cttatggataaataa

SEQ ID NO: 1356385 - DNA, 15 bp, Homo sapiens
tcttatggataaata

SEQ ID NO: 1356386 - DNA, 15 bp, Homo sapiens
ttcttatggataaat

SEQ ID NO: 1356387 - DNA, 15 bp, Homo sapiens
tttcttatggataaa

SEQ ID NO: 1356388 - DNA, 15 bp, Homo sapiens
atttcttatggataa

SEQ ID NO: 1356389 - DNA, 15 bp, Homo sapiens
catttcttatggata

SEQ ID NO: 1356390 - DNA, 15 bp, Homo sapiens
ccatttcttatggat

SEQ ID NO: 1356391 - DNA, 15 bp, Homo sapiens
cccatttcttatgga

SEQ ID NO: 1356392 - DNA, 15 bp, Homo sapiens
ccccatttcttatgg

SEQ ID NO: 1356393 - DNA, 15 bp, Homo sapiens
accccatttcttatg

SEQ ID NO: 1356394 - DNA, 15 bp, Homo sapiens
caccccatttcttat

SEQ ID NO: 1356395 - DNA, 15 bp, Homo sapiens
tcaccccatttctta

SEQ ID NO: 1356396 - DNA, 15 bp, Homo sapiens
ttcaccccatttctt

SEQ ID NO: 1356397 - DNA, 15 bp, Homo sapiens
tttcaccccatttct

SEQ ID NO: 1356398 - DNA, 15 bp, Homo sapiens
ctttcaccccatttc

SEQ ID NO: 1356399 - DNA, 15 bp, Homo sapiens
actttcaccccattt

SEQ ID NO: 1356400 - DNA, 15 bp, Homo sapiens
tactttcaccccatt

SEQ ID NO: 1356401 - DNA, 15 bp, Homo sapiens
ctactttcaccccat

SEQ ID NO: 1356402 - DNA, 15 bp, Homo sapiens
tctactttcacccca

SEQ ID NO: 1356403 - DNA, 15 bp, Homo sapiens
ttctactttcacccc

SEQ ID NO: 1356404 - DNA, 15 bp, Homo sapiens
attctactttcaccc

SEQ ID NO: 1356405 - DNA, 15 bp, Homo sapiens
cattctactttcacc

SEQ ID NO: 1356406 - DNA, 15 bp, Homo sapiens
tcattctactttcac

SEQ ID NO: 1356407 - DNA, 15 bp, Homo sapiens
ttcattctactttca

SEQ ID NO: 1356408 - DNA, 15 bp, Homo sapiens
cttcattctactttc

SEQ ID NO: 1356409 - DNA, 15 bp, Homo sapiens
tcttcattctacttt

SEQ ID NO: 1356410 - DNA, 15 bp, Homo sapiens
atcttcattctactt

SEQ ID NO: 1356411 - DNA, 15 bp, Homo sapiens
gatcttcattctact

SEQ ID NO: 1356412 - DNA, 15 bp, Homo sapiens
tgatcttcattctac

SEQ ID NO: 1356413 - DNA, 15 bp, Homo sapiens
ctgatcttcattcta

SEQ ID NO: 1356414 - DNA, 15 bp, Homo sapiens
tctgatcttcattct

SEQ ID NO: 1356415 - DNA, 15 bp, Homo sapiens
ctctgatcttcattc

SEQ ID NO: 1356416 - DNA, 15 bp, Homo sapiens
actctgatcttcatt

SEQ ID NO: 1356417 - DNA, 15 bp, Homo sapiens
aactctgatcttcat

SEQ ID NO: 1356418 - DNA, 15 bp, Homo sapiens
gaactctgatcttca

SEQ ID NO: 1356419 - DNA, 15 bp, Homo sapiens
agaactctgatcttc

SEQ ID NO: 1356420 - DNA, 15 bp, Homo sapiens
tagaactctgatctt

SEQ ID NO: 1356421 - DNA, 15 bp, Homo sapiens
ttagaactctgatct

SEQ ID NO: 1356422 - DNA, 15 bp, Homo sapiens
gttagaactctgatc

SEQ ID NO: 1356423 - DNA, 15 bp, Homo sapiens
ggttagaactctgat

SEQ ID NO: 1356424 - DNA, 15 bp, Homo sapiens
tggttagaactctga

SEQ ID NO: 1356425 - DNA, 15 bp, Homo sapiens
ctggttagaactctg

SEQ ID NO: 1356426 - DNA, 15 bp, Homo sapiens
cctggttagaactct

SEQ ID NO: 1356427 - DNA, 15 bp, Homo sapiens
gcctggttagaactc

SEQ ID NO: 1356428 - DNA, 15 bp, Homo sapiens
agcctggttagaact

SEQ ID NO: 1356429 - DNA, 15 bp, Homo sapiens
aagcctggttagaac

SEQ ID NO: 1356430 - DNA, 15 bp, Homo sapiens
taagcctggttagaa

SEQ ID NO: 1356431 - DNA, 15 bp, Homo sapiens
ataagcctggttaga

SEQ ID NO: 1356432 - DNA, 15 bp, Homo sapiens
cataagcctggttag

SEQ ID NO: 1356433 - DNA, 15 bp, Homo sapiens
tcataagcctggtta

SEQ ID NO: 1356434 - DNA, 15 bp, Homo sapiens
ttcataagcctggtt

SEQ ID NO: 1356435 - DNA, 15 bp, Homo sapiens
attcataagcctggt

SEQ ID NO: 1356436 - DNA, 15 bp, Homo sapiens
aattcataagcctgg

SEQ ID NO: 1356437 - DNA, 15 bp, Homo sapiens
taattcataagcctg

SEQ ID NO: 1356438 - DNA, 15 bp, Homo sapiens
ttaattcataagcct

SEQ ID NO: 1356439 - DNA, 15 bp, Homo sapiens
cttaattcataagcc

SEQ ID NO: 1356440 - DNA, 15 bp, Homo sapiens
acttaattcataagc

SEQ ID NO: 1356441 - DNA, 15 bp, Homo sapiens
tacttaattcataag

SEQ ID NO: 1356442 - DNA, 15 bp, Homo sapiens
ctacttaattcataa

SEQ ID NO: 1356443 - DNA, 15 bp, Homo sapiens
actacttaattcata

SEQ ID NO: 1356444 - DNA, 15 bp, Homo sapiens
aactacttaattcat

SEQ ID NO: 1356445 - DNA, 15 bp, Homo sapiens
caactacttaattca

SEQ ID NO: 1356446 - DNA, 15 bp, Homo sapiens
acaactacttaattc

SEQ ID NO: 1356447 - DNA, 15 bp, Homo sapiens
cacaactacttaatt

SEQ ID NO: 1356448 - DNA, 15 bp, Homo sapiens
gcacaactacttaat

SEQ ID NO: 1356449 - DNA, 15 bp, Homo sapiens
tgcacaactacttaa

SEQ ID NO: 1356450 - DNA, 15 bp, Homo sapiens
ctgcacaactactta

SEQ ID NO: 1356451 - DNA, 15 bp, Homo sapiens
actgcacaactactt

SEQ ID NO: 1356452 - DNA, 15 bp, Homo sapiens
gactgcacaactact

SEQ ID NO: 1356453 - DNA, 15 bp, Homo sapiens
ggactgcacaactac

SEQ ID NO: 1356454 - DNA, 15 bp, Homo sapiens
aggactgcacaacta

SEQ ID NO: 1356455 - DNA, 15 bp, Homo sapiens
caggactgcacaact

SEQ ID NO: 1356456 - DNA, 15 bp, Homo sapiens
ccaggactgcacaac

SEQ ID NO: 1356457 - DNA, 15 bp, Homo sapiens
tccaggactgcacaa

SEQ ID NO: 1356458 - DNA, 15 bp, Homo sapiens
gtccaggactgcaca

SEQ ID NO: 1356459 - DNA, 15 bp, Homo sapiens
tgtccaggactgcac

SEQ ID NO: 1356460 - DNA, 15 bp, Homo sapiens
ttgtccaggactgca

SEQ ID NO: 1356461 - DNA, 15 bp, Homo sapiens
tttgtccaggactgc

SEQ ID NO: 1356462 - DNA, 15 bp, Homo sapiens
atttgtccaggactg

SEQ ID NO: 1356463 - DNA, 15 bp, Homo sapiens
tatttgtccaggact

SEQ ID NO: 1356464 - DNA, 15 bp, Homo sapiens
ttatttgtccaggac

SEQ ID NO: 1356465 - DNA, 15 bp, Homo sapiens
cttatttgtccagga

SEQ ID NO: 1356466 - DNA, 15 bp, Homo sapiens
tcttatttgtccagg

SEQ ID NO: 1356467 - DNA, 15 bp, Homo sapiens
atcttatttgtccag

SEQ ID NO: 1356468 - DNA, 15 bp, Homo sapiens
catcttatttgtcca

SEQ ID NO: 1356469 - DNA, 15 bp, Homo sapiens
tcatcttatttgtcc

SEQ ID NO: 1356470 - DNA, 15 bp, Homo sapiens
gtcatcttatttgtc

SEQ ID NO: 1356471 - DNA, 15 bp, Homo sapiens
tgtcatcttatttgt

SEQ ID NO: 1356472 - DNA, 15 bp, Homo sapiens
gtgtcatcttatttg

SEQ ID NO: 1356473 - DNA, 15 bp, Homo sapiens
ggtgtcatcttattt

SEQ ID NO: 1356474 - DNA, 15 bp, Homo sapiens
aggtgtcatcttatt

SEQ ID NO: 1356475 - DNA, 15 bp, Homo sapiens
gaggtgtcatcttat

SEQ ID NO: 1356476 - DNA, 15 bp, Homo sapiens
agaggtgtcatctta

SEQ ID NO: 1356477 - DNA, 15 bp, Homo sapiens
cagaggtgtcatctt

SEQ ID NO: 1356478 - DNA, 15 bp, Homo sapiens
acagaggtgtcatct

SEQ ID NO: 1356479 - DNA, 15 bp, Homo sapiens
cacagaggtgtcatc

SEQ ID NO: 1356480 - DNA, 15 bp, Homo sapiens
ccacagaggtgtcat

SEQ ID NO: 1356481 - DNA, 15 bp, Homo sapiens
accacagaggtgtca

SEQ ID NO: 1356482 - DNA, 15 bp, Homo sapiens
aaccacagaggtgtc

SEQ ID NO: 1356483 - DNA, 15 bp, Homo sapiens
gaaccacagaggtgt

SEQ ID NO: 1356484 - DNA, 15 bp, Homo sapiens
agaaccacagaggtg

SEQ ID NO: 1356485 - DNA, 15 bp, Homo sapiens
cagaaccacagaggt

SEQ ID NO: 1356486 - DNA, 15 bp, Homo sapiens
acagaaccacagagg

SEQ ID NO: 1356487 - DNA, 15 bp, Homo sapiens
aacagaaccacagag

SEQ ID NO: 1356488 - DNA, 15 bp, Homo sapiens
gaacagaaccacaga

SEQ ID NO: 1356489 - DNA, 15 bp, Homo sapiens
agaacagaaccacag

SEQ ID NO: 1356490 - DNA, 15 bp, Homo sapiens
gagaacagaaccaca

SEQ ID NO: 1356491 - DNA, 15 bp, Homo sapiens
agagaacagaaccac

SEQ ID NO: 1356492 - DNA, 15 bp, Homo sapiens
aagagaacagaacca

SEQ ID NO: 1356493 - DNA, 15 bp, Homo sapiens
taagagaacagaacc

SEQ ID NO: 1356494 - DNA, 15 bp, Homo sapiens
ataagagaacagaac

SEQ ID NO: 1356495 - DNA, 15 bp, Homo sapiens
cataagagaacagaa

SEQ ID NO: 1356496 - DNA, 15 bp, Homo sapiens
acataagagaacaga

SEQ ID NO: 1356497 - DNA, 15 bp, Homo sapiens
cacataagagaacag

SEQ ID NO: 1356498 - DNA, 15 bp, Homo sapiens
acacataagagaaca

SEQ ID NO: 1356499 - DNA, 15 bp, Homo sapiens
gacacataagagaac

SEQ ID NO: 1356500 - DNA, 15 bp, Homo sapiens
ggacacataagagaa

SEQ ID NO: 1356501 - DNA, 15 bp, Homo sapiens
tggacacataagaga

SEQ ID NO: 1356502 - DNA, 15 bp, Homo sapiens
ctggacacataagag

SEQ ID NO: 1356503 - DNA, 15 bp, Homo sapiens
cctggacacataaga

SEQ ID NO: 1356504 - DNA, 15 bp, Homo sapiens
ccctggacacataag

SEQ ID NO: 1356505 - DNA, 15 bp, Homo sapiens
tccctggacacataa

SEQ ID NO: 1356506 - DNA, 15 bp, Homo sapiens
ttccctggacacata

SEQ ID NO: 1356507 - DNA, 15 bp, Homo sapiens
tttccctggacacat

SEQ ID NO: 1356508 - DNA, 15 bp, Homo sapiens
atttccctggacaca

SEQ ID NO: 1356509 - DNA, 15 bp, Homo sapiens
catttccctggacac

SEQ ID NO: 1356510 - DNA, 15 bp, Homo sapiens
tcatttccctggaca

SEQ ID NO: 1356511 - DNA, 15 bp, Homo sapiens
gtcatttccctggac

SEQ ID NO: 1356512 - DNA, 15 bp, Homo sapiens
tgtcatttccctgga

SEQ ID NO: 1356513 - DNA, 15 bp, Homo sapiens
ttgtcatttccctgg

SEQ ID NO: 1356514 - DNA, 15 bp, Homo sapiens
attgtcatttccctg

SEQ ID NO: 1356515 - DNA, 15 bp, Homo sapiens
tattgtcatttccct

SEQ ID NO: 1356516 - DNA, 15 bp, Homo sapiens
ttattgtcatttccc

SEQ ID NO: 1356517 - DNA, 15 bp, Homo sapiens
gttattgtcatttcc

SEQ ID NO: 1356518 - DNA, 15 bp, Homo sapiens
tgttattgtcatttc

SEQ ID NO: 1356519 - DNA, 15 bp, Homo sapiens
gtgttattgtcattt

SEQ ID NO: 1356520 - DNA, 15 bp, Homo sapiens
ggtgttattgtcatt

SEQ ID NO: 1356521 - DNA, 15 bp, Homo sapiens
gggtgttattgtcat

SEQ ID NO: 1356522 - DNA, 15 bp, Homo sapiens
tgggtgttattgtca

SEQ ID NO: 1356523 - DNA, 15 bp, Homo sapiens
gtgggtgttattgtc

SEQ ID NO: 1356524 - DNA, 15 bp, Homo sapiens
ggtgggtgttattgt

SEQ ID NO: 1356525 - DNA, 15 bp, Homo sapiens
tggtgggtgttattg

SEQ ID NO: 1356526 - DNA, 15 bp, Homo sapiens
gtggtgggtgttatt

SEQ ID NO: 1356527 - DNA, 15 bp, Homo sapiens
ggtggtgggtgttat

SEQ ID NO: 1356528 - DNA, 15 bp, Homo sapiens
tggtggtgggtgtta

SEQ ID NO: 1356529 - DNA, 15 bp, Homo sapiens
ctggtggtgggtgtt

SEQ ID NO: 1356530 - DNA, 15 bp, Homo sapiens
gctggtggtgggtgt

SEQ ID NO: 1356531 - DNA, 15 bp, Homo sapiens
tgctggtggtgggtg

SEQ ID NO: 1356532 - DNA, 15 bp, Homo sapiens
gtgctggtggtgggt

SEQ ID NO: 1356533 - DNA, 15 bp, Homo sapiens
ggtgctggtggtggg

SEQ ID NO: 1356534 - DNA, 15 bp, Homo sapiens
tggtgctggtggtgg

SEQ ID NO: 1356535 - DNA, 15 bp, Homo sapiens
gtggtgctggtggtg

SEQ ID NO: 1356536 - DNA, 15 bp, Homo sapiens
ggtggtgctggtggt

SEQ ID NO: 1356537 - DNA, 15 bp, Homo sapiens
gggtggtgctggtgg

SEQ ID NO: 1356538 - DNA, 15 bp, Homo sapiens
agggtggtgctggtg

SEQ ID NO: 1356539 - DNA, 15 bp, Homo sapiens
cagggtggtgctggt

SEQ ID NO: 1356540 - DNA, 15 bp, Homo sapiens
acagggtggtgctgg

SEQ ID NO: 1356541 - DNA, 15 bp, Homo sapiens
cacagggtggtgctg

SEQ ID NO: 1356542 - DNA, 15 bp, Homo sapiens
gcacagggtggtgct

SEQ ID NO: 1356543 - DNA, 15 bp, Homo sapiens
agcacagggtggtgc

SEQ ID NO: 1356544 - DNA, 15 bp, Homo sapiens
gagcacagggtggtg

SEQ ID NO: 1356545 - DNA, 15 bp, Homo sapiens
ggagcacagggtggt

SEQ ID NO: 1356546 - DNA, 15 bp, Homo sapiens
gggagcacagggtgg

SEQ ID NO: 1356547 - DNA, 15 bp, Homo sapiens
ggggagcacagggtg

SEQ ID NO: 1356548 - DNA, 15 bp, Homo sapiens
tggggagcacagggt

SEQ ID NO: 1356549 - DNA, 15 bp, Homo sapiens
gtggggagcacaggg

SEQ ID NO: 1356550 - DNA, 15 bp, Homo sapiens
ggtggggagcacagg

SEQ ID NO: 1356551 - DNA, 15 bp, Homo sapiens
aggtggggagcacag

SEQ ID NO: 1356552 - DNA, 15 bp, Homo sapiens
aaggtggggagcaca

SEQ ID NO: 1356553 - DNA, 15 bp, Homo sapiens
gaaggtggggagcac

SEQ ID NO: 1356554 - DNA, 15 bp, Homo sapiens
ggaaggtggggagca

SEQ ID NO: 1356555 - DNA, 15 bp, Homo sapiens
aggaaggtggggagc

SEQ ID NO: 1356556 - DNA, 15 bp, Homo sapiens
gaggaaggtggggag

SEQ ID NO: 1356557 - DNA, 15 bp, Homo sapiens
tgaggaaggtgggga

SEQ ID NO: 1356558 - DNA, 15 bp, Homo sapiens
gtgaggaaggtgggg

SEQ ID NO: 1356559 - DNA, 15 bp, Homo sapiens
tgtgaggaaggtggg

SEQ ID NO: 1356560 - DNA, 15 bp, Homo sapiens
ctgtgaggaaggtgg

SEQ ID NO: 1356561 - DNA, 15 bp, Homo sapiens
actgtgaggaaggtg

SEQ ID NO: 1356562 - DNA, 15 bp, Homo sapiens
tactgtgaggaaggt

SEQ ID NO: 1356563 - DNA, 15 bp, Homo sapiens
atactgtgaggaagg

SEQ ID NO: 1356564 - DNA, 15 bp, Homo sapiens
aatactgtgaggaag

SEQ ID NO: 1356565 - DNA, 15 bp, Homo sapiens
taatactgtgaggaa

SEQ ID NO: 1356566 - DNA, 15 bp, Homo sapiens
ttaatactgtgagga

SEQ ID NO: 1356567 - DNA, 15 bp, Homo sapiens
attaatactgtgagg

SEQ ID NO: 1356568 - DNA, 15 bp, Homo sapiens
aattaatactgtgag

SEQ ID NO: 1356569 - DNA, 15 bp, Homo sapiens
gaattaatactgtga

SEQ ID NO: 1356570 - DNA, 15 bp, Homo sapiens
tgaattaatactgtg

SEQ ID NO: 1356571 - DNA, 15 bp, Homo sapiens
ttgaattaatactgt

SEQ ID NO: 1356572 - DNA, 15 bp, Homo sapiens
attgaattaatactg

SEQ ID NO: 1356573 - DNA, 15 bp, Homo sapiens
tattgaattaatact

SEQ ID NO: 1356574 - DNA, 15 bp, Homo sapiens
gtattgaattaatac

SEQ ID NO: 1356575 - DNA, 15 bp, Homo sapiens
agtattgaattaata

SEQ ID NO: 1356576 - DNA, 15 bp, Homo sapiens
tagtattgaattaat

SEQ ID NO: 1356577 - DNA, 15 bp, Homo sapiens
ttagtattgaattaa

SEQ ID NO: 1356578 - DNA, 15 bp, Homo sapiens
cttagtattgaatta

SEQ ID NO: 1356579 - DNA, 15 bp, Homo sapiens
gcttagtattgaatt

SEQ ID NO: 1356580 - DNA, 15 bp, Homo sapiens
tgcttagtattgaat

SEQ ID NO: 1356581 - DNA, 15 bp, Homo sapiens
gtgcttagtattgaa

SEQ ID NO: 1356582 - DNA, 15 bp, Homo sapiens
tgtgcttagtattga

SEQ ID NO: 1356583 - DNA, 15 bp, Homo sapiens
ttgtgcttagtattg

SEQ ID NO: 1356584 - DNA, 15 bp, Homo sapiens
gttgtgcttagtatt

SEQ ID NO: 1356585 - DNA, 15 bp, Homo sapiens
tgttgtgcttagtat

SEQ ID NO: 1356586 - DNA, 15 bp, Homo sapiens
ctgttgtgcttagta

SEQ ID NO: 1356587 - DNA, 15 bp, Homo sapiens
actgttgtgcttagt

SEQ ID NO: 1356588 - DNA, 15 bp, Homo sapiens
tactgttgtgcttag

SEQ ID NO: 1356589 - DNA, 15 bp, Homo sapiens
atactgttgtgctta

SEQ ID NO: 1356590 - DNA, 15 bp, Homo sapiens
catactgttgtgctt

SEQ ID NO: 1356591 - DNA, 15 bp, Homo sapiens
acatactgttgtgct

SEQ ID NO: 1356592 - DNA, 15 bp, Homo sapiens
tacatactgttgtgc

SEQ ID NO: 1356593 - DNA, 15 bp, Homo sapiens
atacatactgttgtg

SEQ ID NO: 1356594 - DNA, 15 bp, Homo sapiens
catacatactgttgt

SEQ ID NO: 1356595 - DNA, 15 bp, Homo sapiens
tcatacatactgttg

SEQ ID NO: 1356596 - DNA, 15 bp, Homo sapiens
ttcatacatactgtt

SEQ ID NO: 1356597 - DNA, 15 bp, Homo sapiens
cttcatacatactgt

SEQ ID NO: 1356598 - DNA, 15 bp, Homo sapiens
gcttcatacatactg

SEQ ID NO: 1356599 - DNA, 15 bp, Homo sapiens
agcttcatacatact

SEQ ID NO: 1356600 - DNA, 15 bp, Homo sapiens
tagcttcatacatac

SEQ ID NO: 1356601 - DNA, 15 bp, Homo sapiens
gtagcttcatacata

SEQ ID NO: 1356602 - DNA, 15 bp, Homo sapiens
ggtagcttcatacat

SEQ ID NO: 1356603 - DNA, 15 bp, Homo sapiens
aggtagcttcataca

SEQ ID NO: 1356604 - DNA, 15 bp, Homo sapiens
aaggtagcttcatac

SEQ ID NO: 1356605 - DNA, 15 bp, Homo sapiens
aaaggtagcttcata

SEQ ID NO: 1356606 - DNA, 15 bp, Homo sapiens
aaaaggtagcttcat

SEQ ID NO: 1356607 - DNA, 15 bp, Homo sapiens
taaaaggtagcttca

SEQ ID NO: 1356608 - DNA, 15 bp, Homo sapiens
ataaaaggtagcttc

SEQ ID NO: 1356609 - DNA, 15 bp, Homo sapiens
tataaaaggtagctt

SEQ ID NO: 1356610 - DNA, 15 bp, Homo sapiens
ttataaaaggtagct

SEQ ID NO: 1356611 - DNA, 15 bp, Homo sapiens
attataaaaggtagc

SEQ ID NO: 1356612 - DNA, 15 bp, Homo sapiens
aattataaaaggtag

SEQ ID NO: 1356613 - DNA, 15 bp, Homo sapiens
aaattataaaaggta

SEQ ID NO: 1356614 - DNA, 15 bp, Homo sapiens
aaaattataaaaggt

SEQ ID NO: 1356615 - DNA, 15 bp, Homo sapiens
gaaaattataaaagg

SEQ ID NO: 1356616 - DNA, 15 bp, Homo sapiens
tgaaaattataaaag

SEQ ID NO: 1356617 - DNA, 15 bp, Homo sapiens
ttgaaaattataaaa

SEQ ID NO: 1356618 - DNA, 15 bp, Homo sapiens
cttgaaaattataaa

SEQ ID NO: 1356619 - DNA, 15 bp, Homo sapiens
acttgaaaattataa

SEQ ID NO: 1356620 - DNA, 15 bp, Homo sapiens
cacttgaaaattata

SEQ ID NO: 1356621 - DNA, 15 bp, Homo sapiens
gcacttgaaaattat

SEQ ID NO: 1356622 - DNA, 15 bp, Homo sapiens
tgcacttgaaaatta

SEQ ID NO: 1356623 - DNA, 15 bp, Homo sapiens
ttgcacttgaaaatt

SEQ ID NO: 1356624 - DNA, 15 bp, Homo sapiens
attgcacttgaaaat

SEQ ID NO: 1356625 - DNA, 15 bp, Homo sapiens
tattgcacttgaaaa

SEQ ID NO: 1356626 - DNA, 15 bp, Homo sapiens
ctattgcacttgaaa

SEQ ID NO: 1356627 - DNA, 15 bp, Homo sapiens
tctattgcacttgaa

SEQ ID NO: 1356628 - DNA, 15 bp, Homo sapiens
ttctattgcacttga

SEQ ID NO: 1356629 - DNA, 15 bp, Homo sapiens
tttctattgcacttg

SEQ ID NO: 1356630 - DNA, 15 bp, Homo sapiens
atttctattgcactt

SEQ ID NO: 1356631 - DNA, 15 bp, Homo sapiens
catttctattgcact

SEQ ID NO: 1356632 - DNA, 15 bp, Homo sapiens
ccatttctattgcac

SEQ ID NO: 1356633 - DNA, 15 bp, Homo sapiens
tccatttctattgca

SEQ ID NO: 1356634 - DNA, 15 bp, Homo sapiens
ttccatttctattgc

SEQ ID NO: 1356635 - DNA, 15 bp, Homo sapiens
cttccatttctattg

SEQ ID NO: 1356636 - DNA, 15 bp, Homo sapiens
tcttccatttctatt

SEQ ID NO: 1356637 - DNA, 15 bp, Homo sapiens
atcttccatttctat

SEQ ID NO: 1356638 - DNA, 15 bp, Homo sapiens
tatcttccatttcta

SEQ ID NO: 1356639 - DNA, 15 bp, Homo sapiens
gtatcttccatttct

SEQ ID NO: 1356640 - DNA, 15 bp, Homo sapiens
agtatcttccatttc

SEQ ID NO: 1356641 - DNA, 15 bp, Homo sapiens
tagtatcttccattt

SEQ ID NO: 1356642 - DNA, 15 bp, Homo sapiens
ttagtatcttccatt

SEQ ID NO: 1356643 - DNA, 15 bp, Homo sapiens
attagtatcttccat

SEQ ID NO: 1356644 - DNA, 15 bp, Homo sapiens
tattagtatcttcca

SEQ ID NO: 1356645 - DNA, 15 bp, Homo sapiens
atattagtatcttcc

SEQ ID NO: 1356646 - DNA, 15 bp, Homo sapiens
aatattagtatcttc

SEQ ID NO: 1356647 - DNA, 15 bp, Homo sapiens
taatattagtatctt

SEQ ID NO: 1356648 - DNA, 15 bp, Homo sapiens
ataatattagtatct

SEQ ID NO: 1356649 - DNA, 15 bp, Homo sapiens
aataatattagtatc

SEQ ID NO: 1356650 - DNA, 15 bp, Homo sapiens
taataatattagtat

SEQ ID NO: 1356651 - DNA, 15 bp, Homo sapiens
ctaataatattagta

SEQ ID NO: 1356652 - DNA, 15 bp, Homo sapiens
tctaataatattagt

SEQ ID NO: 1356653 - DNA, 15 bp, Homo sapiens
ttctaataatattag

SEQ ID NO: 1356654 - DNA, 15 bp, Homo sapiens
cttctaataatatta

SEQ ID NO: 1356655 - DNA, 15 bp, Homo sapiens
acttctaataatatt

SEQ ID NO: 1356656 - DNA, 15 bp, Homo sapiens
cacttctaataatat

SEQ ID NO: 1356657 - DNA, 15 bp, Homo sapiens
gcacttctaataata

SEQ ID NO: 1356658 - DNA, 15 bp, Homo sapiens
tgcacttctaataat

SEQ ID NO: 1356659 - DNA, 15 bp, Homo sapiens
ttgcacttctaataa

SEQ ID NO: 1356660 - DNA, 15 bp, Homo sapiens
cttgcacttctaata

SEQ ID NO: 1356661 - DNA, 15 bp, Homo sapiens
acttgcacttctaat

SEQ ID NO: 1356662 - DNA, 15 bp, Homo sapiens
aacttgcacttctaa

SEQ ID NO: 1356663 - DNA, 15 bp, Homo sapiens
taacttgcacttcta

SEQ ID NO: 1356664 - DNA, 15 bp, Homo sapiens
ctaacttgcacttct

SEQ ID NO: 1356665 - DNA, 15 bp, Homo sapiens
cctaacttgcacttc

SEQ ID NO: 1356666 - DNA, 15 bp, Homo sapiens
ccctaacttgcactt

SEQ ID NO: 1356667 - DNA, 15 bp, Homo sapiens
tccctaacttgcact

SEQ ID NO: 1356668 - DNA, 15 bp, Homo sapiens
ctccctaacttgcac

SEQ ID NO: 1356669 - DNA, 15 bp, Homo sapiens
tctccctaacttgca

SEQ ID NO: 1356670 - DNA, 15 bp, Homo sapiens
ttctccctaacttgc

SEQ ID NO: 1356671 - DNA, 15 bp, Homo sapiens
cttctccctaacttg

SEQ ID NO: 1356672 - DNA, 15 bp, Homo sapiens
tcttctccctaactt

SEQ ID NO: 1356673 - DNA, 15 bp, Homo sapiens
atcttctccctaact

SEQ ID NO: 1356674 - DNA, 15 bp, Homo sapiens
catcttctccctaac

SEQ ID NO: 1356675 - DNA, 15 bp, Homo sapiens
acatcttctccctaa

SEQ ID NO: 1356676 - DNA, 15 bp, Homo sapiens
aacatcttctcccta

SEQ ID NO: 1356677 - DNA, 15 bp, Homo sapiens
gaacatcttctccct

SEQ ID NO: 1356678 - DNA, 15 bp, Homo sapiens
agaacatcttctccc

SEQ ID NO: 1356679 - DNA, 15 bp, Homo sapiens
cagaacatcttctcc

SEQ ID NO: 1356680 - DNA, 15 bp, Homo sapiens
tcagaacatcttctc

SEQ ID NO: 1356681 - DNA, 15 bp, Homo sapiens
ctcagaacatcttct

SEQ ID NO: 1356682 - DNA, 15 bp, Homo sapiens
tctcagaacatcttc

SEQ ID NO: 1356683 - DNA, 15 bp, Homo sapiens
atctcagaacatctt

SEQ ID NO: 1356684 - DNA, 15 bp, Homo sapiens
gatctcagaacatct

SEQ ID NO: 1356685 - DNA, 15 bp, Homo sapiens
ggatctcagaacatc

SEQ ID NO: 1356686 - DNA, 15 bp, Homo sapiens
aggatctcagaacat

SEQ ID NO: 1356687 - DNA, 15 bp, Homo sapiens
gaggatctcagaaca

SEQ ID NO: 1356688 - DNA, 15 bp, Homo sapiens
agaggatctcagaac

SEQ ID NO: 1356689 - DNA, 15 bp, Homo sapiens
gagaggatctcagaa

SEQ ID NO: 1356690 - DNA, 15 bp, Homo sapiens
tgagaggatctcaga

SEQ ID NO: 1356691 - DNA, 15 bp, Homo sapiens
atgagaggatctcag

SEQ ID NO: 1356692 - DNA, 15 bp, Homo sapiens
gatgagaggatctca

SEQ ID NO: 1356693 - DNA, 15 bp, Homo sapiens
tgatgagaggatctc

SEQ ID NO: 1356694 - DNA, 15 bp, Homo sapiens
ctgatgagaggatct

SEQ ID NO: 1356695 - DNA, 15 bp, Homo sapiens
cctgatgagaggatc

SEQ ID NO: 1356696 - DNA, 15 bp, Homo sapiens
acctgatgagaggat

SEQ ID NO: 1356697 - DNA, 15 bp, Homo sapiens
aacctgatgagagga

SEQ ID NO: 1356698 - DNA, 15 bp, Homo sapiens
aaacctgatgagagg

SEQ ID NO: 1356699 - DNA, 15 bp, Homo sapiens
aaaacctgatgagag

SEQ ID NO: 1356700 - DNA, 15 bp, Homo sapiens
aaaaacctgatgaga

SEQ ID NO: 1356701 - DNA, 15 bp, Homo sapiens
taaaaacctgatgag

SEQ ID NO: 1356702 - DNA, 15 bp, Homo sapiens
ataaaaacctgatga

SEQ ID NO: 1356703 - DNA, 15 bp, Homo sapiens
tataaaaacctgatg

SEQ ID NO: 1356704 - DNA, 15 bp, Homo sapiens
gtataaaaacctgat

SEQ ID NO: 1356705 - DNA, 15 bp, Homo sapiens
tgtataaaaacctga

SEQ ID NO: 1356706 - DNA, 15 bp, Homo sapiens
atgtataaaaacctg

SEQ ID NO: 1356707 - DNA, 15 bp, Homo sapiens
tatgtataaaaacct

SEQ ID NO: 1356708 - DNA, 15 bp, Homo sapiens
ttatgtataaaaacc

SEQ ID NO: 1356709 - DNA, 15 bp, Homo sapiens
tttatgtataaaaac

SEQ ID NO: 1356710 - DNA, 15 bp, Homo sapiens
ctttatgtataaaaa

SEQ ID NO: 1356711 - DNA, 15 bp, Homo sapiens
actttatgtataaaa

SEQ ID NO: 1356712 - DNA, 15 bp, Homo sapiens
gactttatgtataaa

SEQ ID NO: 1356713 - DNA, 15 bp, Homo sapiens
ggactttatgtataa

SEQ ID NO: 1356714 - DNA, 15 bp, Homo sapiens
tggactttatgtata

SEQ ID NO: 1356715 - DNA, 15 bp, Homo sapiens
atggactttatgtat

SEQ ID NO: 1356716 - DNA, 15 bp, Homo sapiens
gatggactttatgta

SEQ ID NO: 1356717 - DNA, 15 bp, Homo sapiens
tgatggactttatgt

SEQ ID NO: 1356718 - DNA, 15 bp, Homo sapiens
atgatggactttatg

SEQ ID NO: 1356719 - DNA, 15 bp, Homo sapiens
aatgatggactttat

SEQ ID NO: 1356720 - DNA, 15 bp, Homo sapiens
taatgatggacttta

SEQ ID NO: 1356721 - DNA, 15 bp, Homo sapiens
ttaatgatggacttt

SEQ ID NO: 1356722 - DNA, 15 bp, Homo sapiens
attaatgatggactt

SEQ ID NO: 1356723 - DNA, 15 bp, Homo sapiens
cattaatgatggact

SEQ ID NO: 1356724 - DNA, 15 bp, Homo sapiens
gcattaatgatggac

SEQ ID NO: 1356725 - DNA, 15 bp, Homo sapiens
tgcattaatgatgga

SEQ ID NO: 1356726 - DNA, 15 bp, Homo sapiens
ttgcattaatgatgg

SEQ ID NO: 1356727 - DNA, 15 bp, Homo sapiens
attgcattaatgatg

SEQ ID NO: 1356728 - DNA, 15 bp, Homo sapiens
aattgcattaatgat

SEQ ID NO: 1356729 - DNA, 15 bp, Homo sapiens
aaattgcattaatga

SEQ ID NO: 1356730 - DNA, 15 bp, Homo sapiens
gaaattgcattaatg

SEQ ID NO: 1356731 - DNA, 15 bp, Homo sapiens
tgaaattgcattaat

SEQ ID NO: 1356732 - DNA, 15 bp, Homo sapiens
atgaaattgcattaa

SEQ ID NO: 1356733 - DNA, 15 bp, Homo sapiens
aatgaaattgcatta

SEQ ID NO: 1356734 - DNA, 15 bp, Homo sapiens
aaatgaaattgcatt

SEQ ID NO: 1356735 - DNA, 15 bp, Homo sapiens
gaaatgaaattgcat

SEQ ID NO: 1356736 - DNA, 15 bp, Homo sapiens
ggaaatgaaattgca

SEQ ID NO: 1356737 - DNA, 15 bp, Homo sapiens
aggaaatgaaattgc

SEQ ID NO: 1356738 - DNA, 15 bp, Homo sapiens
caggaaatgaaattg

SEQ ID NO: 1356739 - DNA, 15 bp, Homo sapiens
ccaggaaatgaaatt

SEQ ID NO: 1356740 - DNA, 15 bp, Homo sapiens
cccaggaaatgaaat

SEQ ID NO: 1356741 - DNA, 15 bp, Homo sapiens
tcccaggaaatgaaa

SEQ ID NO: 1356742 - DNA, 15 bp, Homo sapiens
atcccaggaaatgaa

SEQ ID NO: 1356743 - DNA, 15 bp, Homo sapiens
aatcccaggaaatga

SEQ ID NO: 1356744 - DNA, 15 bp, Homo sapiens
aaatcccaggaaatg

SEQ ID NO: 1356745 - DNA, 15 bp, Homo sapiens
gaaatcccaggaaat

SEQ ID NO: 1356746 - DNA, 15 bp, Homo sapiens
tgaaatcccaggaaa

SEQ ID NO: 1356747 - DNA, 15 bp, Homo sapiens
ttgaaatcccaggaa

SEQ ID NO: 1356748 - DNA, 15 bp, Homo sapiens
tttgaaatcccagga

SEQ ID NO: 1356749 - DNA, 15 bp, Homo sapiens
atttgaaatcccagg

SEQ ID NO: 1356750 - DNA, 15 bp, Homo sapiens
aatttgaaatcccag

SEQ ID NO: 1356751 - DNA, 15 bp, Homo sapiens
aaatttgaaatccca

SEQ ID NO: 1356752 - DNA, 15 bp, Homo sapiens
aaaatttgaaatccc

SEQ ID NO: 1356753 - DNA, 15 bp, Homo sapiens
aaaaatttgaaatcc

SEQ ID NO: 1356754 - DNA, 15 bp, Homo sapiens
aaaaaatttgaaatc

SEQ ID NO: 1356755 - DNA, 15 bp, Homo sapiens
caaaaaatttgaaat

SEQ ID NO: 1356756 - DNA, 15 bp, Homo sapiens
acaaaaaatttgaaa

SEQ ID NO: 1356757 - DNA, 15 bp, Homo sapiens
aacaaaaaatttgaa

SEQ ID NO: 1356758 - DNA, 15 bp, Homo sapiens
taacaaaaaatttga

SEQ ID NO: 1356759 - DNA, 15 bp, Homo sapiens
ttaacaaaaaatttg

SEQ ID NO: 1356760 - DNA, 15 bp, Homo sapiens
tttaacaaaaaattt

SEQ ID NO: 1356761 - DNA, 15 bp, Homo sapiens
gtttaacaaaaaatt

SEQ ID NO: 1356762 - DNA, 15 bp, Homo sapiens
agtttaacaaaaaat

SEQ ID NO: 1356763 - DNA, 15 bp, Homo sapiens
gagtttaacaaaaaa

SEQ ID NO: 1356764 - DNA, 15 bp, Homo sapiens
ggagtttaacaaaaa

SEQ ID NO: 1356765 - DNA, 15 bp, Homo sapiens
tggagtttaacaaaa

SEQ ID NO: 1356766 - DNA, 15 bp, Homo sapiens
atggagtttaacaaa

SEQ ID NO: 1356767 - DNA, 15 bp, Homo sapiens
aatggagtttaacaa

SEQ ID NO: 1356768 - DNA, 15 bp, Homo sapiens
caatggagtttaaca

SEQ ID NO: 1356769 - DNA, 15 bp, Homo sapiens
gcaatggagtttaac

SEQ ID NO: 1356770 - DNA, 15 bp, Homo sapiens
agcaatggagtttaa

SEQ ID NO: 1356771 - DNA, 15 bp, Homo sapiens
cagcaatggagttta

SEQ ID NO: 1356772 - DNA, 15 bp, Homo sapiens
ccagcaatggagttt

SEQ ID NO: 1356773 - DNA, 15 bp, Homo sapiens
cccagcaatggagtt

SEQ ID NO: 1356774 - DNA, 15 bp, Homo sapiens
ccccagcaatggagt

SEQ ID NO: 1356775 - DNA, 15 bp, Homo sapiens
accccagcaatggag

SEQ ID NO: 1356776 - DNA, 15 bp, Homo sapiens
caccccagcaatgga

SEQ ID NO: 1356777 - DNA, 15 bp, Homo sapiens
tcaccccagcaatgg

SEQ ID NO: 1356778 - DNA, 15 bp, Homo sapiens
ttcaccccagcaatg

SEQ ID NO: 1356779 - DNA, 15 bp, Homo sapiens
tttcaccccagcaat

SEQ ID NO: 1356780 - DNA, 15 bp, Homo sapiens
ttttcaccccagcaa

SEQ ID NO: 1356781 - DNA, 15 bp, Homo sapiens
attttcaccccagca

SEQ ID NO: 1356782 - DNA, 15 bp, Homo sapiens
gattttcaccccagc

SEQ ID NO: 1356783 - DNA, 15 bp, Homo sapiens
agattttcaccccag

SEQ ID NO: 1356784 - DNA, 15 bp, Homo sapiens
aagattttcacccca

SEQ ID NO: 1356785 - DNA, 15 bp, Homo sapiens
caagattttcacccc

SEQ ID NO: 1356786 - DNA, 15 bp, Homo sapiens
gcaagattttcaccc

SEQ ID NO: 1356787 - DNA, 15 bp, Homo sapiens
tgcaagattttcacc

SEQ ID NO: 1356788 - DNA, 15 bp, Homo sapiens
ctgcaagattttcac

SEQ ID NO: 1356789 - DNA, 15 bp, Homo sapiens
actgcaagattttca

SEQ ID NO: 1356790 - DNA, 15 bp, Homo sapiens
cactgcaagattttc

SEQ ID NO: 1356791 - DNA, 15 bp, Homo sapiens
acactgcaagatttt

SEQ ID NO: 1356792 - DNA, 15 bp, Homo sapiens
tacactgcaagattt

SEQ ID NO: 1356793 - DNA, 15 bp, Homo sapiens
ttacactgcaagatt

SEQ ID NO: 1356794 - DNA, 15 bp, Homo sapiens
attacactgcaagat

SEQ ID NO: 1356795 - DNA, 15 bp, Homo sapiens
gattacactgcaaga

SEQ ID NO: 1356796 - DNA, 15 bp, Homo sapiens
tgattacactgcaag

SEQ ID NO: 1356797 - DNA, 15 bp, Homo sapiens
ttgattacactgcaa

SEQ ID NO: 1356798 - DNA, 15 bp, Homo sapiens
cttgattacactgca

SEQ ID NO: 1356799 - DNA, 15 bp, Homo sapiens
tcttgattacactgc

SEQ ID NO: 1356800 - DNA, 15 bp, Homo sapiens
gtcttgattacactg

SEQ ID NO: 1356801 - DNA, 15 bp, Homo sapiens
tgtcttgattacact

SEQ ID NO: 1356802 - DNA, 15 bp, Homo sapiens
atgtcttgattacac

SEQ ID NO: 1356803 - DNA, 15 bp, Homo sapiens
aatgtcttgattaca

SEQ ID NO: 1356804 - DNA, 15 bp, Homo sapiens
taatgtcttgattac

SEQ ID NO: 1356805 - DNA, 15 bp, Homo sapiens
ttaatgtcttgatta

SEQ ID NO: 1356806 - DNA, 15 bp, Homo sapiens
tttaatgtcttgatt

SEQ ID NO: 1356807 - DNA, 15 bp, Homo sapiens
ttttaatgtcttgat

SEQ ID NO: 1356808 - DNA, 15 bp, Homo sapiens
tttttaatgtcttga

SEQ ID NO: 1356809 - DNA, 15 bp, Homo sapiens
gtttttaatgtcttg

SEQ ID NO: 1356810 - DNA, 15 bp, Homo sapiens
agtttttaatgtctt

SEQ ID NO: 1356811 - DNA, 15 bp, Homo sapiens
cagtttttaatgtct

SEQ ID NO: 1356812 - DNA, 15 bp, Homo sapiens
tcagtttttaatgtc

SEQ ID NO: 1356813 - DNA, 15 bp, Homo sapiens
ttcagtttttaatgt

SEQ ID NO: 1356814 - DNA, 15 bp, Homo sapiens
cttcagtttttaatg

SEQ ID NO: 1356815 - DNA, 15 bp, Homo sapiens
acttcagtttttaat

SEQ ID NO: 1356816 - DNA, 15 bp, Homo sapiens
aacttcagtttttaa

SEQ ID NO: 1356817 - DNA, 15 bp, Homo sapiens
aaacttcagttttta

SEQ ID NO: 1356818 - DNA, 15 bp, Homo sapiens
aaaacttcagttttt

SEQ ID NO: 1356819 - DNA, 15 bp, Homo sapiens
gaaaacttcagtttt

SEQ ID NO: 1356820 - DNA, 15 bp, Homo sapiens
tgaaaacttcagttt

SEQ ID NO: 1356821 - DNA, 15 bp, Homo sapiens
ttgaaaacttcagtt

SEQ ID NO: 1356822 - DNA, 15 bp, Homo sapiens
gttgaaaacttcagt

SEQ ID NO: 1356823 - DNA, 15 bp, Homo sapiens
agttgaaaacttcag

SEQ ID NO: 1356824 - DNA, 15 bp, Homo sapiens
tagttgaaaacttca

SEQ ID NO: 1356825 - DNA, 15 bp, Homo sapiens
atagttgaaaacttc

SEQ ID NO: 1356826 - DNA, 15 bp, Homo sapiens
tatagttgaaaactt

SEQ ID NO: 1356827 - DNA, 15 bp, Homo sapiens
atatagttgaaaact

SEQ ID NO: 1356828 - DNA, 15 bp, Homo sapiens
gatatagttgaaaac

SEQ ID NO: 1356829 - DNA, 15 bp, Homo sapiens
tgatatagttgaaaa

SEQ ID NO: 1356830 - DNA, 15 bp, Homo sapiens
gtgatatagttgaaa

SEQ ID NO: 1356831 - DNA, 15 bp, Homo sapiens
ggtgatatagttgaa

SEQ ID NO: 1356832 - DNA, 15 bp, Homo sapiens
tggtgatatagttga

SEQ ID NO: 1356833 - DNA, 15 bp, Homo sapiens
ttggtgatatagttg

SEQ ID NO: 1356834 - DNA, 15 bp, Homo sapiens
attggtgatatagtt

SEQ ID NO: 1356835 - DNA, 15 bp, Homo sapiens
aattggtgatatagt

SEQ ID NO: 1356836 - DNA, 15 bp, Homo sapiens
aaattggtgatatag

SEQ ID NO: 1356837 - DNA, 15 bp, Homo sapiens
taaattggtgatata

SEQ ID NO: 1356838 - DNA, 15 bp, Homo sapiens
ttaaattggtgatat

SEQ ID NO: 1356839 - DNA, 15 bp, Homo sapiens
tttaaattggtgata

SEQ ID NO: 1356840 - DNA, 15 bp, Homo sapiens
ttttaaattggtgat

SEQ ID NO: 1356841 - DNA, 15 bp, Homo sapiens
attttaaattggtga

SEQ ID NO: 1356842 - DNA, 15 bp, Homo sapiens
aattttaaattggtg

SEQ ID NO: 1356843 - DNA, 15 bp, Homo sapiens
aaattttaaattggt

SEQ ID NO: 1356844 - DNA, 15 bp, Homo sapiens
caaattttaaattgg

SEQ ID NO: 1356845 - DNA, 15 bp, Homo sapiens
ccaaattttaaattg

SEQ ID NO: 1356846 - DNA, 15 bp, Homo sapiens
gccaaattttaaatt

SEQ ID NO: 1356847 - DNA, 15 bp, Homo sapiens
ggccaaattttaaat

SEQ ID NO: 1356848 - DNA, 15 bp, Homo sapiens
aggccaaattttaaa

SEQ ID NO: 1356849 - DNA, 15 bp, Homo sapiens
caggccaaattttaa

SEQ ID NO: 1356850 - DNA, 15 bp, Homo sapiens
tcaggccaaatttta

SEQ ID NO: 1356851 - DNA, 15 bp, Homo sapiens
atcaggccaaatttt

SEQ ID NO: 1356852 - DNA, 15 bp, Homo sapiens
gatcaggccaaattt

SEQ ID NO: 1356853 - DNA, 15 bp, Homo sapiens
tgatcaggccaaatt

SEQ ID NO: 1356854 - DNA, 15 bp, Homo sapiens
atgatcaggccaaat

SEQ ID NO: 1356855 - DNA, 15 bp, Homo sapiens
catgatcaggccaaa

SEQ ID NO: 1356856 - DNA, 15 bp, Homo sapiens
ccatgatcaggccaa

SEQ ID NO: 1356857 - DNA, 15 bp, Homo sapiens
gccatgatcaggcca

SEQ ID NO: 1356858 - DNA, 15 bp, Homo sapiens
tgccatgatcaggcc

SEQ ID NO: 1356859 - DNA, 15 bp, Homo sapiens
ctgccatgatcaggc

SEQ ID NO: 1356860 - DNA, 15 bp, Homo sapiens
gctgccatgatcagg

SEQ ID NO: 1356861 - DNA, 15 bp, Homo sapiens
tgctgccatgatcag

SEQ ID NO: 1356862 - DNA, 15 bp, Homo sapiens
atgctgccatgatca

SEQ ID NO: 1356863 - DNA, 15 bp, Homo sapiens
catgctgccatgatc

SEQ ID NO: 1356864 - DNA, 15 bp, Homo sapiens
gcatgctgccatgat

SEQ ID NO: 1356865 - DNA, 15 bp, Homo sapiens
tgcatgctgccatga

SEQ ID NO: 1356866 - DNA, 15 bp, Homo sapiens
ttgcatgctgccatg

SEQ ID NO: 1356867 - DNA, 15 bp, Homo sapiens
tttgcatgctgccat

SEQ ID NO: 1356868 - DNA, 15 bp, Homo sapiens
atttgcatgctgcca

SEQ ID NO: 1356869 - DNA, 15 bp, Homo sapiens
catttgcatgctgcc

SEQ ID NO: 1356870 - DNA, 15 bp, Homo sapiens
gcatttgcatgctgc

SEQ ID NO: 1356871 - DNA, 15 bp, Homo sapiens
tgcatttgcatgctg

SEQ ID NO: 1356872 - DNA, 15 bp, Homo sapiens
ctgcatttgcatgct

SEQ ID NO: 1356873 - DNA, 15 bp, Homo sapiens
actgcatttgcatgc

SEQ ID NO: 1356874 - DNA, 15 bp, Homo sapiens
aactgcatttgcatg

SEQ ID NO: 1356875 - DNA, 15 bp, Homo sapiens
caactgcatttgcat

SEQ ID NO: 1356876 - DNA, 15 bp, Homo sapiens
acaactgcatttgca

SEQ ID NO: 1356877 - DNA, 15 bp, Homo sapiens
aacaactgcatttgc

SEQ ID NO: 1356878 - DNA, 15 bp, Homo sapiens
caacaactgcatttg

SEQ ID NO: 1356879 - DNA, 15 bp, Homo sapiens
acaacaactgcattt

SEQ ID NO: 1356880 - DNA, 15 bp, Homo sapiens
tacaacaactgcatt

SEQ ID NO: 1356881 - DNA, 15 bp, Homo sapiens
atacaacaactgcat

SEQ ID NO: 1356882 - DNA, 15 bp, Homo sapiens
gatacaacaactgca

SEQ ID NO: 1356883 - DNA, 15 bp, Homo sapiens
tgatacaacaactgc

SEQ ID NO: 1356884 - DNA, 15 bp, Homo sapiens
atgatacaacaactg

SEQ ID NO: 1356885 - DNA, 15 bp, Homo sapiens
aatgatacaacaact

SEQ ID NO: 1356886 - DNA, 15 bp, Homo sapiens
aaatgatacaacaac

SEQ ID NO: 1356887 - DNA, 15 bp, Homo sapiens
caaatgatacaacaa

SEQ ID NO: 1356888 - DNA, 15 bp, Homo sapiens
ccaaatgatacaaca

SEQ ID NO: 1356889 - DNA, 15 bp, Homo sapiens
accaaatgatacaac

SEQ ID NO: 1356890 - DNA, 15 bp, Homo sapiens
gaccaaatgatacaa

SEQ ID NO: 1356891 - DNA, 15 bp, Homo sapiens
agaccaaatgataca

SEQ ID NO: 1356892 - DNA, 15 bp, Homo sapiens
aagaccaaatgatac

SEQ ID NO: 1356893 - DNA, 15 bp, Homo sapiens
taagaccaaatgata

SEQ ID NO: 1356894 - DNA, 15 bp, Homo sapiens
ataagaccaaatgat

SEQ ID NO: 1356895 - DNA, 15 bp, Homo sapiens
aataagaccaaatga

SEQ ID NO: 1356896 - DNA, 15 bp, Homo sapiens
aaataagaccaaatg

SEQ ID NO: 1356897 - DNA, 15 bp, Homo sapiens
caaataagaccaaat

SEQ ID NO: 1356898 - DNA, 15 bp, Homo sapiens
tcaaataagaccaaa

SEQ ID NO: 1356899 - DNA, 15 bp, Homo sapiens
atcaaataagaccaa

SEQ ID NO: 1356900 - DNA, 15 bp, Homo sapiens
gatcaaataagacca

SEQ ID NO: 1356901 - DNA, 15 bp, Homo sapiens
agatcaaataagacc

SEQ ID NO: 1356902 - DNA, 15 bp, Homo sapiens
tagatcaaataagac

SEQ ID NO: 1356903 - DNA, 15 bp, Homo sapiens
gtagatcaaataaga

SEQ ID NO: 1356904 - DNA, 15 bp, Homo sapiens
agtagatcaaataag

SEQ ID NO: 1356905 - DNA, 15 bp, Homo sapiens
aagtagatcaaataa

SEQ ID NO: 1356906 - DNA, 15 bp, Homo sapiens
gaagtagatcaaata

SEQ ID NO: 1356907 - DNA, 15 bp, Homo sapiens
agaagtagatcaaat

SEQ ID NO: 1356908 - DNA, 15 bp, Homo sapiens
aagaagtagatcaaa

SEQ ID NO: 1356909 - DNA, 15 bp, Homo sapiens
gaagaagtagatcaa

SEQ ID NO: 1356910 - DNA, 15 bp, Homo sapiens
tgaagaagtagatca

SEQ ID NO: 1356911 - DNA, 15 bp, Homo sapiens
atgaagaagtagatc

SEQ ID NO: 1356912 - DNA, 15 bp, Homo sapiens
gatgaagaagtagat

SEQ ID NO: 1356913 - DNA, 15 bp, Homo sapiens
tgatgaagaagtaga

SEQ ID NO: 1356914 - DNA, 15 bp, Homo sapiens
atgatgaagaagtag

SEQ ID NO: 1356915 - DNA, 15 bp, Homo sapiens
aatgatgaagaagta

SEQ ID NO: 1356916 - DNA, 15 bp, Homo sapiens
gaatgatgaagaagt

SEQ ID NO: 1356917 - DNA, 15 bp, Homo sapiens
tgaatgatgaagaag

SEQ ID NO: 1356918 - DNA, 15 bp, Homo sapiens
ttgaatgatgaagaa

SEQ ID NO: 1356919 - DNA, 15 bp, Homo sapiens
tttgaatgatgaaga

SEQ ID NO: 1356920 - DNA, 15 bp, Homo sapiens
atttgaatgatgaag

SEQ ID NO: 1356921 - DNA, 15 bp, Homo sapiens
catttgaatgatgaa

SEQ ID NO: 1356922 - DNA, 15 bp, Homo sapiens
tcatttgaatgatga

SEQ ID NO: 1356923 - DNA, 15 bp, Homo sapiens
ctcatttgaatgatg

SEQ ID NO: 1356924 - DNA, 15 bp, Homo sapiens
cctcatttgaatgat

SEQ ID NO: 1356925 - DNA, 15 bp, Homo sapiens
acctcatttgaatga

SEQ ID NO: 1356926 - DNA, 15 bp, Homo sapiens
cacctcatttgaatg

SEQ ID NO: 1356927 - DNA, 15 bp, Homo sapiens
tcacctcatttgaat

SEQ ID NO: 1356928 - DNA, 15 bp, Homo sapiens
gtcacctcatttgaa

SEQ ID NO: 1356929 - DNA, 15 bp, Homo sapiens
agtcacctcatttga

SEQ ID NO: 1356930 - DNA, 15 bp, Homo sapiens
cagtcacctcatttg

SEQ ID NO: 1356931 - DNA, 15 bp, Homo sapiens
ccagtcacctcattt

SEQ ID NO: 1356932 - DNA, 15 bp, Homo sapiens
accagtcacctcatt

SEQ ID NO: 1356933 - DNA, 15 bp, Homo sapiens
gaccagtcacctcat

SEQ ID NO: 1356934 - DNA, 15 bp, Homo sapiens
tgaccagtcacctca

SEQ ID NO: 1356935 - DNA, 15 bp, Homo sapiens
atgaccagtcacctc

SEQ ID NO: 1356936 - DNA, 15 bp, Homo sapiens
aatgaccagtcacct

SEQ ID NO: 1356937 - DNA, 15 bp, Homo sapiens
aaatgaccagtcacc

SEQ ID NO: 1356938 - DNA, 15 bp, Homo sapiens
taaatgaccagtcac

SEQ ID NO: 1356939 - DNA, 15 bp, Homo sapiens
ttaaatgaccagtca

SEQ ID NO: 1356940 - DNA, 15 bp, Homo sapiens
cttaaatgaccagtc

SEQ ID NO: 1356941 - DNA, 15 bp, Homo sapiens
ccttaaatgaccagt

SEQ ID NO: 1356942 - DNA, 15 bp, Homo sapiens
cccttaaatgaccag

SEQ ID NO: 1356943 - DNA, 15 bp, Homo sapiens
ccccttaaatgacca

SEQ ID NO: 1356944 - DNA, 15 bp, Homo sapiens
tccccttaaatgacc

SEQ ID NO: 1356945 - DNA, 15 bp, Homo sapiens
atccccttaaatgac

SEQ ID NO: 1356946 - DNA, 15 bp, Homo sapiens
aatccccttaaatga

SEQ ID NO: 1356947 - DNA, 15 bp, Homo sapiens
gaatccccttaaatg

SEQ ID NO: 1356948 - DNA, 15 bp, Homo sapiens
tgaatccccttaaat

SEQ ID NO: 1356949 - DNA, 15 bp, Homo sapiens
atgaatccccttaaa

SEQ ID NO: 1356950 - DNA, 15 bp, Homo sapiens
catgaatccccttaa

SEQ ID NO: 1356951 - DNA, 15 bp, Homo sapiens
ccatgaatcccctta

SEQ ID NO: 1356952 - DNA, 15 bp, Homo sapiens
gccatgaatcccctt

SEQ ID NO: 1356953 - DNA, 15 bp, Homo sapiens
tgccatgaatcccct

SEQ ID NO: 1356954 - DNA, 15 bp, Homo sapiens
ctgccatgaatcccc

SEQ ID NO: 1356955 - DNA, 15 bp, Homo sapiens
actgccatgaatccc

SEQ ID NO: 1356956 - DNA, 15 bp, Homo sapiens
cactgccatgaatcc

SEQ ID NO: 1356957 - DNA, 15 bp, Homo sapiens
ccactgccatgaatc

SEQ ID NO: 1356958 - DNA, 15 bp, Homo sapiens
tccactgccatgaat

SEQ ID NO: 1356959 - DNA, 15 bp, Homo sapiens
atccactgccatgaa

SEQ ID NO: 1356960 - DNA, 15 bp, Homo sapiens
aatccactgccatga

SEQ ID NO: 1356961 - DNA, 15 bp, Homo sapiens
aaatccactgccatg

SEQ ID NO: 1356962 - DNA, 15 bp, Homo sapiens
gaaatccactgccat

SEQ ID NO: 1356963 - DNA, 15 bp, Homo sapiens
tgaaatccactgcca

SEQ ID NO: 1356964 - DNA, 15 bp, Homo sapiens
ttgaaatccactgcc

SEQ ID NO: 1356965 - DNA, 15 bp, Homo sapiens
attgaaatccactgc

SEQ ID NO: 1356966 - DNA, 15 bp, Homo sapiens
gattgaaatccactg

SEQ ID NO: 1356967 - DNA, 15 bp, Homo sapiens
tgattgaaatccact

SEQ ID NO: 1356968 - DNA, 15 bp, Homo sapiens
ctgattgaaatccac

SEQ ID NO: 1356969 - DNA, 15 bp, Homo sapiens
tctgattgaaatcca

SEQ ID NO: 1356970 - DNA, 15 bp, Homo sapiens
ttctgattgaaatcc

SEQ ID NO: 1356971 - DNA, 15 bp, Homo sapiens
cttctgattgaaatc

SEQ ID NO: 1356972 - DNA, 15 bp, Homo sapiens
accttctgattgaaa

SEQ ID NO: 1356973 - DNA, 15 bp, Homo sapiens
gaccttctgattgaa

SEQ ID NO: 1356974 - DNA, 15 bp, Homo sapiens
tgaccttctgattga

SEQ ID NO: 1356975 - DNA, 15 bp, Homo sapiens
ttgaccttctgattg

SEQ ID NO: 1356976 - DNA, 15 bp, Homo sapiens
tttgaccttctgatt

SEQ ID NO: 1356977 - DNA, 15 bp, Homo sapiens
ttttgaccttctgat

SEQ ID NO: 1356978 - DNA, 15 bp, Homo sapiens
gttttgaccttctga

SEQ ID NO: 1356979 - DNA, 15 bp, Homo sapiens
tgttttgaccttctg

SEQ ID NO: 1356980 - DNA, 15 bp, Homo sapiens
ttgttttgaccttct

SEQ ID NO: 1356981 - DNA, 15 bp, Homo sapiens
attgttttgaccttc

SEQ ID NO: 1356982 - DNA, 15 bp, Homo sapiens
aattgttttgacctt

SEQ ID NO: 1356983 - DNA, 15 bp, Homo sapiens
taattgttttgacct

SEQ ID NO: 1356984 - DNA, 15 bp, Homo sapiens
gtaattgttttgacc

SEQ ID NO: 1356985 - DNA, 15 bp, Homo sapiens
ggtaattgttttgac

SEQ ID NO: 1356986 - DNA, 15 bp, Homo sapiens
aggtaattgttttga

SEQ ID NO: 1356987 - DNA, 15 bp, Homo sapiens
caggtaattgttttg

SEQ ID NO: 1356988 - DNA, 15 bp, Homo sapiens
acaggtaattgtttt

SEQ ID NO: 1356989 - DNA, 15 bp, Homo sapiens
aacaggtaattgttt

SEQ ID NO: 1356990 - DNA, 15 bp, Homo sapiens
aaacaggtaattgtt

SEQ ID NO: 1356991 - DNA, 15 bp, Homo sapiens
aaaacaggtaattgt

SEQ ID NO: 1356992 - DNA, 15 bp, Homo sapiens
taaaacaggtaattg

SEQ ID NO: 1356993 - DNA, 15 bp, Homo sapiens
ttaaaacaggtaatt

SEQ ID NO: 1356994 - DNA, 15 bp, Homo sapiens
tttaaaacaggtaat

SEQ ID NO: 1356995 - DNA, 15 bp, Homo sapiens
atttaaaacaggtaa

SEQ ID NO: 1356996 - DNA, 15 bp, Homo sapiens
catttaaaacaggta

SEQ ID NO: 1356997 - DNA, 15 bp, Homo sapiens
acatttaaaacaggt

SEQ ID NO: 1356998 - DNA, 15 bp, Homo sapiens
aacatttaaaacagg

SEQ ID NO: 1356999 - DNA, 15 bp, Homo sapiens
taacatttaaaacag

SEQ ID NO: 1357000 - DNA, 15 bp, Homo sapiens
ataacatttaaaaca

SEQ ID NO: 1357001 - DNA, 15 bp, Homo sapiens
cataacatttaaaac

SEQ ID NO: 1357002 - DNA, 15 bp, Homo sapiens
ccataacatttaaaa

SEQ ID NO: 1357003 - DNA, 15 bp, Homo sapiens
tccataacatttaaa

SEQ ID NO: 1357004 - DNA, 15 bp, Homo sapiens
ttccataacatttaa

SEQ ID NO: 1357005 - DNA, 15 bp, Homo sapiens
tttccataacattta

SEQ ID NO: 1357006 - DNA, 15 bp, Homo sapiens
atttccataacattt

SEQ ID NO: 1357007 - DNA, 15 bp, Homo sapiens
tatttccataacatt

SEQ ID NO: 1357008 - DNA, 15 bp, Homo sapiens
ttatttccataacat

SEQ ID NO: 1357009 - DNA, 15 bp, Homo sapiens
gttatttccataaca

SEQ ID NO: 1357010 - DNA, 15 bp, Homo sapiens
ggttatttccataac

SEQ ID NO: 1357011 - DNA, 15 bp, Homo sapiens
tggttatttccataa

SEQ ID NO: 1357012 - DNA, 15 bp, Homo sapiens
ctggttatttccata

SEQ ID NO: 1357013 - DNA, 15 bp, Homo sapiens
gctggttatttccat

SEQ ID NO: 1357014 - DNA, 15 bp, Homo sapiens
agctggttatttcca

SEQ ID NO: 1357015 - DNA, 15 bp, Homo sapiens
aagctggttatttcc

SEQ ID NO: 1357016 - DNA, 15 bp, Homo sapiens
gaagctggttatttc

SEQ ID NO: 1357017 - DNA, 15 bp, Homo sapiens
tgaagctggttattt

SEQ ID NO: 1357018 - DNA, 15 bp, Homo sapiens
ttgaagctggttatt

SEQ ID NO: 1357019 - DNA, 15 bp, Homo sapiens
gttgaagctggttat

SEQ ID NO: 1357020 - DNA, 15 bp, Homo sapiens
agttgaagctggtta

SEQ ID NO: 1357021 - DNA, 15 bp, Homo sapiens
aagttgaagctggtt

SEQ ID NO: 1357022 - DNA, 15 bp, Homo sapiens
aaagttgaagctggt

SEQ ID NO: 1357023 - DNA, 15 bp, Homo sapiens
gaaagttgaagctgg

SEQ ID NO: 1357024 - DNA, 15 bp, Homo sapiens
ggaaagttgaagctg

SEQ ID NO: 1357025 - DNA, 15 bp, Homo sapiens
gggaaagttgaagct

SEQ ID NO: 1357026 - DNA, 15 bp, Homo sapiens
ggggaaagttgaagc

SEQ ID NO: 1357027 - DNA, 15 bp, Homo sapiens
gtggggaaagttgaa

SEQ ID NO: 1357028 - DNA, 15 bp, Homo sapiens
ggtggggaaagttga

SEQ ID NO: 1357029 - DNA, 15 bp, Homo sapiens
aggtggggaaagttg

SEQ ID NO: 1357030 - DNA, 15 bp, Homo sapiens
caggtggggaaagtt

SEQ ID NO: 1357031 - DNA, 15 bp, Homo sapiens
gcaggtggggaaagt

SEQ ID NO: 1357032 - DNA, 15 bp, Homo sapiens
tgcaggtggggaaag

SEQ ID NO: 1357033 - DNA, 15 bp, Homo sapiens
ctgcaggtggggaaa

SEQ ID NO: 1357034 - DNA, 15 bp, Homo sapiens
tctgcaggtggggaa

SEQ ID NO: 1357035 - DNA, 15 bp, Homo sapiens
ttctgcaggtgggga

SEQ ID NO: 1357036 - DNA, 15 bp, Homo sapiens
cttctgcaggtgggg

SEQ ID NO: 1357037 - DNA, 15 bp, Homo sapiens
tcttctgcaggtggg

SEQ ID NO: 1357038 - DNA, 15 bp, Homo sapiens
gtcttctgcaggtgg

SEQ ID NO: 1357039 - DNA, 15 bp, Homo sapiens
cgtcttctgcaggtg

SEQ ID NO: 1357040 - DNA, 15 bp, Homo sapiens
acgtcttctgcaggt

SEQ ID NO: 1357041 - DNA, 15 bp, Homo sapiens
aacgtcttctgcagg

SEQ ID NO: 1357042 - DNA, 15 bp, Homo sapiens
aaacgtcttctgcag

SEQ ID NO: 1357043 - DNA, 15 bp, Homo sapiens
caaacgtcttctgca

SEQ ID NO: 1357044 - DNA, 15 bp, Homo sapiens
tcaaacgtcttctgc

SEQ ID NO: 1357045 - DNA, 15 bp, Homo sapiens
gtcaaacgtcttctg

SEQ ID NO: 1357046 - DNA, 15 bp, Homo sapiens
tgtcaaacgtcttct

SEQ ID NO: 1357047 - DNA, 15 bp, Homo sapiens
gtgtcaaacgtcttc

SEQ ID NO: 1357048 - DNA, 15 bp, Homo sapiens
tgtgtcaaacgtctt

SEQ ID NO: 1357049 - DNA, 15 bp, Homo sapiens
ctgtgtcaaacgtct

SEQ ID NO: 1357050 - DNA, 15 bp, Homo sapiens
gctgtgtcaaacgtc

SEQ ID NO: 1357051 - DNA, 15 bp, Homo sapiens
tgctgtgtcaaacgt

SEQ ID NO: 1357052 - DNA, 15 bp, Homo sapiens
ttgctgtgtcaaacg

SEQ ID NO: 1357053 - DNA, 15 bp, Homo sapiens
cttgctgtgtcaaac

SEQ ID NO: 1357054 - DNA, 15 bp, Homo sapiens
acttgctgtgtcaaa

SEQ ID NO: 1357055 - DNA, 15 bp, Homo sapiens
aacttgctgtgtcaa

SEQ ID NO: 1357056 - DNA, 15 bp, Homo sapiens
caacttgctgtgtca

SEQ ID NO: 1357057 - DNA, 15 bp, Homo sapiens
acaacttgctgtgtc

SEQ ID NO: 1357058 - DNA, 15 bp, Homo sapiens
aacaacttgctgtgt

SEQ ID NO: 1357059 - DNA, 15 bp, Homo sapiens
aaacaacttgctgtg

SEQ ID NO: 1357060 - DNA, 15 bp, Homo sapiens
caaacaacttgctgt

SEQ ID NO: 1357061 - DNA, 15 bp, Homo sapiens
acaaacaacttgctg

SEQ ID NO: 1357062 - DNA, 15 bp, Homo sapiens
tacaaacaacttgct

SEQ ID NO: 1357063 - DNA, 15 bp, Homo sapiens
ctacaaacaacttgc

SEQ ID NO: 1357064 - DNA, 15 bp, Homo sapiens
tctacaaacaacttg

SEQ ID NO: 1357065 - DNA, 15 bp, Homo sapiens
ctctacaaacaactt

SEQ ID NO: 1357066 - DNA, 15 bp, Homo sapiens
actctacaaacaact

SEQ ID NO: 1357067 - DNA, 15 bp, Homo sapiens
gactctacaaacaac

SEQ ID NO: 1357068 - DNA, 15 bp, Homo sapiens
tgactctacaaacaa

SEQ ID NO: 1357069 - DNA, 15 bp, Homo sapiens
ctgactctacaaaca

SEQ ID NO: 1357070 - DNA, 15 bp, Homo sapiens
actgactctacaaac

SEQ ID NO: 1357071 - DNA, 15 bp, Homo sapiens
aactgactctacaaa

SEQ ID NO: 1357072 - DNA, 15 bp, Homo sapiens
taactgactctacaa

SEQ ID NO: 1357073 - DNA, 15 bp, Homo sapiens
ataactgactctaca

SEQ ID NO: 1357074 - DNA, 15 bp, Homo sapiens
aataactgactctac

SEQ ID NO: 1357075 - DNA, 15 bp, Homo sapiens
gaataactgactcta

SEQ ID NO: 1357076 - DNA, 15 bp, Homo sapiens
agaataactgactct

SEQ ID NO: 1357077 - DNA, 15 bp, Homo sapiens
aagaataactgactc

SEQ ID NO: 1357078 - DNA, 15 bp, Homo sapiens
aaagaataactgact

SEQ ID NO: 1357079 - DNA, 15 bp, Homo sapiens
aaaagaataactgac

SEQ ID NO: 1357080 - DNA, 15 bp, Homo sapiens
taaaagaataactga

SEQ ID NO: 1357081 - DNA, 15 bp, Homo sapiens
gtaaaagaataactg

SEQ ID NO: 1357082 - DNA, 15 bp, Homo sapiens
tgtaaaagaataact

SEQ ID NO: 1357083 - DNA, 15 bp, Homo sapiens
atgtaaaagaataac

SEQ ID NO: 1357084 - DNA, 15 bp, Homo sapiens
tatgtaaaagaataa

SEQ ID NO: 1357085 - DNA, 15 bp, Homo sapiens
ctatgtaaaagaata

SEQ ID NO: 1357086 - DNA, 15 bp, Homo sapiens
gctatgtaaaagaat

SEQ ID NO: 1357087 - DNA, 15 bp, Homo sapiens
cagctatgtaaaaga

SEQ ID NO: 1357088 - DNA, 15 bp, Homo sapiens
tcagctatgtaaaag

SEQ ID NO: 1357089 - DNA, 15 bp, Homo sapiens
gtcagctatgtaaaa

SEQ ID NO: 1357090 - DNA, 15 bp, Homo sapiens
tgtcagctatgtaaa

SEQ ID NO: 1357091 - DNA, 15 bp, Homo sapiens
gtgtcagctatgtaa

SEQ ID NO: 1357092 - DNA, 15 bp, Homo sapiens
agtgtcagctatgta

SEQ ID NO: 1357093 - DNA, 15 bp, Homo sapiens
cagtgtcagctatgt

SEQ ID NO: 1357094 - DNA, 15 bp, Homo sapiens
tcagtgtcagctatg

SEQ ID NO: 1357095 - DNA, 15 bp, Homo sapiens
ctcagtgtcagctat

SEQ ID NO: 1357096 - DNA, 15 bp, Homo sapiens
gctcagtgtcagcta

SEQ ID NO: 1357097 - DNA, 15 bp, Homo sapiens
agctcagtgtcagct

SEQ ID NO: 1357098 - DNA, 15 bp, Homo sapiens
gagctcagtgtcagc

SEQ ID NO: 1357099 - DNA, 15 bp, Homo sapiens
ggagctcagtgtcag

SEQ ID NO: 1357100 - DNA, 15 bp, Homo sapiens
tggagctcagtgtca

SEQ ID NO: 1357101 - DNA, 15 bp, Homo sapiens
ctggagctcagtgtc

SEQ ID NO: 1357102 - DNA, 15 bp, Homo sapiens
gctggagctcagtgt

SEQ ID NO: 1357103 - DNA, 15 bp, Homo sapiens
agctggagctcagtg

SEQ ID NO: 1357104 - DNA, 15 bp, Homo sapiens
tagctggagctcagt

SEQ ID NO: 1357105 - DNA, 15 bp, Homo sapiens
atagctggagctcag

SEQ ID NO: 1357106 - DNA, 15 bp, Homo sapiens
catagctggagctca

SEQ ID NO: 1357107 - DNA, 15 bp, Homo sapiens
acatagctggagctc

SEQ ID NO: 1357108 - DNA, 15 bp, Homo sapiens
cacatagctggagct

SEQ ID NO: 1357109 - DNA, 15 bp, Homo sapiens
gcacatagctggagc

SEQ ID NO: 1357110 - DNA, 15 bp, Homo sapiens
agcacatagctggag

SEQ ID NO: 1357111 - DNA, 15 bp, Homo sapiens
cagcacatagctgga

SEQ ID NO: 1357112 - DNA, 15 bp, Homo sapiens
ccagcacatagctgg

SEQ ID NO: 1357113 - DNA, 15 bp, Homo sapiens
cccagcacatagctg

SEQ ID NO: 1357114 - DNA, 15 bp, Homo sapiens
acccagcacatagct

SEQ ID NO: 1357115 - DNA, 15 bp, Homo sapiens
cacccagcacatagc

SEQ ID NO: 1357116 - DNA, 15 bp, Homo sapiens
ccacccagcacatag

SEQ ID NO: 1357117 - DNA, 15 bp, Homo sapiens
cccacccagcacata

SEQ ID NO: 1357118 - DNA, 15 bp, Homo sapiens
tcccacccagcacat

SEQ ID NO: 1357119 - DNA, 15 bp, Homo sapiens
gtcccacccagcaca

SEQ ID NO: 1357120 - DNA, 15 bp, Homo sapiens
tgtcccacccagcac

SEQ ID NO: 1357121 - DNA, 15 bp, Homo sapiens
ttgtcccacccagca

SEQ ID NO: 1357122 - DNA, 15 bp, Homo sapiens
cttgtcccacccagc

SEQ ID NO: 1357123 - DNA, 15 bp, Homo sapiens
ccttgtcccacccag

SEQ ID NO: 1357124 - DNA, 15 bp, Homo sapiens
accttgtcccaccca

SEQ ID NO: 1357125 - DNA, 15 bp, Homo sapiens
gaccttgtcccaccc

SEQ ID NO: 1357126 - DNA, 15 bp, Homo sapiens
ggaccttgtcccacc

SEQ ID NO: 1357127 - DNA, 15 bp, Homo sapiens
gggaccttgtcccac

SEQ ID NO: 1357128 - DNA, 15 bp, Homo sapiens
agggaccttgtccca

SEQ ID NO: 1357129 - DNA, 15 bp, Homo sapiens
aagggaccttgtccc

SEQ ID NO: 1357130 - DNA, 15 bp, Homo sapiens
aaagggaccttgtcc

SEQ ID NO: 1357131 - DNA, 15 bp, Homo sapiens
caaagggaccttgtc

SEQ ID NO: 1357132 - DNA, 15 bp, Homo sapiens
ccaaagggaccttgt

SEQ ID NO: 1357133 - DNA, 15 bp, Homo sapiens
accaaagggaccttg

SEQ ID NO: 1357134 - DNA, 15 bp, Homo sapiens
taccaaagggacctt

SEQ ID NO: 1357135 - DNA, 15 bp, Homo sapiens
gtaccaaagggacct

SEQ ID NO: 1357136 - DNA, 15 bp, Homo sapiens
tgtaccaaagggacc

SEQ ID NO: 1357137 - DNA, 15 bp, Homo sapiens
gtgtaccaaagggac

SEQ ID NO: 1357138 - DNA, 15 bp, Homo sapiens
tgtgtaccaaaggga

SEQ ID NO: 1357139 - DNA, 15 bp, Homo sapiens
ttgtgtaccaaaggg

SEQ ID NO: 1357140 - DNA, 15 bp, Homo sapiens
attgtgtaccaaagg

SEQ ID NO: 1357141 - DNA, 15 bp, Homo sapiens
tattgtgtaccaaag

SEQ ID NO: 1357142 - DNA, 15 bp, Homo sapiens
ctattgtgtaccaaa

SEQ ID NO: 1357143 - DNA, 15 bp, Homo sapiens
gctattgtgtaccaa

SEQ ID NO: 1357144 - DNA, 15 bp, Homo sapiens
tgctattgtgtacca

SEQ ID NO: 1357145 - DNA, 15 bp, Homo sapiens
atgctattgtgtacc

SEQ ID NO: 1357146 - DNA, 15 bp, Homo sapiens
tatgctattgtgtac

SEQ ID NO: 1357147 - DNA, 15 bp, Homo sapiens
ctatgctattgtgta

SEQ ID NO: 1357148 - DNA, 15 bp, Homo sapiens
tctatgctattgtgt

SEQ ID NO: 1357149 - DNA, 15 bp, Homo sapiens
ttctatgctattgtg

SEQ ID NO: 1357150 - DNA, 15 bp, Homo sapiens
attctatgctattgt

SEQ ID NO: 1357151 - DNA, 15 bp, Homo sapiens
tattctatgctattg

SEQ ID NO: 1357152 - DNA, 15 bp, Homo sapiens
gtattctatgctatt

SEQ ID NO: 1357153 - DNA, 15 bp, Homo sapiens
tgtattctatgctat

SEQ ID NO: 1357154 - DNA, 15 bp, Homo sapiens
ttgtattctatgcta

SEQ ID NO: 1357155 - DNA, 15 bp, Homo sapiens
gttgtattctatgct

SEQ ID NO: 1357156 - DNA, 15 bp, Homo sapiens
agttgtattctatgc

SEQ ID NO: 1357157 - DNA, 15 bp, Homo sapiens
gagttgtattctatg

SEQ ID NO: 1357158 - DNA, 15 bp, Homo sapiens
tgagttgtattctat

SEQ ID NO: 1357159 - DNA, 15 bp, Homo sapiens
ctgagttgtattcta

SEQ ID NO: 1357160 - DNA, 15 bp, Homo sapiens
gctgagttgtattct

SEQ ID NO: 1357161 - DNA, 15 bp, Homo sapiens
tgctgagttgtattc

SEQ ID NO: 1357162 - DNA, 15 bp, Homo sapiens
ttgctgagttgtatt

SEQ ID NO: 1357163 - DNA, 15 bp, Homo sapiens
attgctgagttgtat

SEQ ID NO: 1357164 - DNA, 15 bp, Homo sapiens
tattgctgagttgta

SEQ ID NO: 1357165 - DNA, 15 bp, Homo sapiens
ttattgctgagttgt

SEQ ID NO: 1357166 - DNA, 15 bp, Homo sapiens
tttattgctgagttg

SEQ ID NO: 1357167 - DNA, 15 bp, Homo sapiens
ttttattgctgagtt

SEQ ID NO: 1357168 - DNA, 15 bp, Homo sapiens
tttttattgctgagt

SEQ ID NO: 1357169 - DNA, 15 bp, Homo sapiens
ctttttattgctgag

SEQ ID NO: 1357170 - DNA, 15 bp, Homo sapiens
cctttttattgctga

SEQ ID NO: 1357171 - DNA, 15 bp, Homo sapiens
tcctttttattgctg

SEQ ID NO: 1357172 - DNA, 15 bp, Homo sapiens
ttcctttttattgct

SEQ ID NO: 1357173 - DNA, 15 bp, Homo sapiens
attcctttttattgc

SEQ ID NO: 1357174 - DNA, 15 bp, Homo sapiens
cattcctttttattg

SEQ ID NO: 1357175 - DNA, 15 bp, Homo sapiens
tcattcctttttatt

SEQ ID NO: 1357176 - DNA, 15 bp, Homo sapiens
ttcattcctttttat

SEQ ID NO: 1357177 - DNA, 15 bp, Homo sapiens
gttcattccttttta

SEQ ID NO: 1357178 - DNA, 15 bp, Homo sapiens
ggttcattccttttt

SEQ ID NO: 1357179 - DNA, 15 bp, Homo sapiens
tggttcattcctttt

SEQ ID NO: 1357180 - DNA, 15 bp, Homo sapiens
gtggttcattccttt

SEQ ID NO: 1357181 - DNA, 15 bp, Homo sapiens
agtggttcattcctt

SEQ ID NO: 1357182 - DNA, 15 bp, Homo sapiens
cagtggttcattcct

SEQ ID NO: 1357183 - DNA, 15 bp, Homo sapiens
gcagtggttcattcc

SEQ ID NO: 1357184 - DNA, 15 bp, Homo sapiens
tgcagtggttcattc

SEQ ID NO: 1357185 - DNA, 15 bp, Homo sapiens
atgcagtggttcatt

SEQ ID NO: 1357186 - DNA, 15 bp, Homo sapiens
catgcagtggttcat

SEQ ID NO: 1357187 - DNA, 15 bp, Homo sapiens
ccatgcagtggttca

SEQ ID NO: 1357188 - DNA, 15 bp, Homo sapiens
tccatgcagtggttc

SEQ ID NO: 1357189 - DNA, 15 bp, Homo sapiens
ttccatgcagtggtt

SEQ ID NO: 1357190 - DNA, 15 bp, Homo sapiens
attccatgcagtggt

SEQ ID NO: 1357191 - DNA, 15 bp, Homo sapiens
tattccatgcagtgg

SEQ ID NO: 1357192 - DNA, 15 bp, Homo sapiens
ttattccatgcagtg

SEQ ID NO: 1357193 - DNA, 15 bp, Homo sapiens
gttattccatgcagt

SEQ ID NO: 1357194 - DNA, 15 bp, Homo sapiens
ggttattccatgcag

SEQ ID NO: 1357195 - DNA, 15 bp, Homo sapiens
aggttattccatgca

SEQ ID NO: 1357196 - DNA, 15 bp, Homo sapiens
caggttattccatgc

SEQ ID NO: 1357197 - DNA, 15 bp, Homo sapiens
ccaggttattccatg

SEQ ID NO: 1357198 - DNA, 15 bp, Homo sapiens
tccaggttattccat

SEQ ID NO: 1357199 - DNA, 15 bp, Homo sapiens
atccaggttattcca

SEQ ID NO: 1357200 - DNA, 15 bp, Homo sapiens
catccaggttattcc

SEQ ID NO: 1357201 - DNA, 15 bp, Homo sapiens
tcatccaggttattc

SEQ ID NO: 1357202 - DNA, 15 bp, Homo sapiens
ttcatccaggttatt

SEQ ID NO: 1357203 - DNA, 15 bp, Homo sapiens
gttcatccaggttat

SEQ ID NO: 1357204 - DNA, 15 bp, Homo sapiens
ggttcatccaggtta

SEQ ID NO: 1357205 - DNA, 15 bp, Homo sapiens
aggttcatccaggtt

SEQ ID NO: 1357206 - DNA, 15 bp, Homo sapiens
gaggttcatccaggt

SEQ ID NO: 1357207 - DNA, 15 bp, Homo sapiens
tgaggttcatccagg

SEQ ID NO: 1357208 - DNA, 15 bp, Homo sapiens
ttgaggttcatccag

SEQ ID NO: 1357209 - DNA, 15 bp, Homo sapiens
cttgaggttcatcca

SEQ ID NO: 1357210 - DNA, 15 bp, Homo sapiens
ccttgaggttcatcc

SEQ ID NO: 1357211 - DNA, 15 bp, Homo sapiens
tccttgaggttcatc

SEQ ID NO: 1357212 - DNA, 15 bp, Homo sapiens
ttccttgaggttcat

SEQ ID NO: 1357213 - DNA, 15 bp, Homo sapiens
tttccttgaggttca

SEQ ID NO: 1357214 - DNA, 15 bp, Homo sapiens
atttccttgaggttc

SEQ ID NO: 1357215 - DNA, 15 bp, Homo sapiens
aatttccttgaggtt

SEQ ID NO: 1357216 - DNA, 15 bp, Homo sapiens
taatttccttgaggt

SEQ ID NO: 1357217 - DNA, 15 bp, Homo sapiens
ataatttccttgagg

SEQ ID NO: 1357218 - DNA, 15 bp, Homo sapiens
cataatttccttgag

SEQ ID NO: 1357219 - DNA, 15 bp, Homo sapiens
gcataatttccttga

SEQ ID NO: 1357220 - DNA, 15 bp, Homo sapiens
ggcataatttccttg

SEQ ID NO: 1357221 - DNA, 15 bp, Homo sapiens
tggcataatttcctt

SEQ ID NO: 1357222 - DNA, 15 bp, Homo sapiens
ttggcataatttcct

SEQ ID NO: 1357223 - DNA, 15 bp, Homo sapiens
tttggcataatttcc

SEQ ID NO: 1357224 - DNA, 15 bp, Homo sapiens
atttggcataatttc

SEQ ID NO: 1357225 - DNA, 15 bp, Homo sapiens
catttggcataattt

SEQ ID NO: 1357226 - DNA, 15 bp, Homo sapiens
tcatttggcataatt

SEQ ID NO: 1357227 - DNA, 15 bp, Homo sapiens
ttcatttggcataat

SEQ ID NO: 1357228 - DNA, 15 bp, Homo sapiens
tttcatttggcataa

SEQ ID NO: 1357229 - DNA, 15 bp, Homo sapiens
ttttcatttggcata

SEQ ID NO: 1357230 - DNA, 15 bp, Homo sapiens
attttcatttggcat

SEQ ID NO: 1357231 - DNA, 15 bp, Homo sapiens
tattttcatttggca

SEQ ID NO: 1357232 - DNA, 15 bp, Homo sapiens
ctattttcatttggc

SEQ ID NO: 1357233 - DNA, 15 bp, Homo sapiens
gctattttcatttgg

SEQ ID NO: 1357234 - DNA, 15 bp, Homo sapiens
ggctattttcatttg

SEQ ID NO: 1357235 - DNA, 15 bp, Homo sapiens
tggctattttcattt

SEQ ID NO: 1357236 - DNA, 15 bp, Homo sapiens
ttggctattttcatt

SEQ ID NO: 1357237 - DNA, 15 bp, Homo sapiens
attggctattttcat

SEQ ID NO: 1357238 - DNA, 15 bp, Homo sapiens
gattggctattttca

SEQ ID NO: 1357239 - DNA, 15 bp, Homo sapiens
agattggctattttc

SEQ ID NO: 1357240 - DNA, 15 bp, Homo sapiens
gagattggctatttt

SEQ ID NO: 1357241 - DNA, 15 bp, Homo sapiens
tgagattggctattt

SEQ ID NO: 1357242 - DNA, 15 bp, Homo sapiens
ttgagattggctatt

SEQ ID NO: 1357243 - DNA, 15 bp, Homo sapiens
tttgagattggctat

SEQ ID NO: 1357244 - DNA, 15 bp, Homo sapiens
ctttgagattggcta

SEQ ID NO: 1357245 - DNA, 15 bp, Homo sapiens
cctttgagattggct

SEQ ID NO: 1357246 - DNA, 15 bp, Homo sapiens
tcctttgagattggc

SEQ ID NO: 1357247 - DNA, 15 bp, Homo sapiens
atcctttgagattgg

SEQ ID NO: 1357248 - DNA, 15 bp, Homo sapiens
aatcctttgagattg

SEQ ID NO: 1357249 - DNA, 15 bp, Homo sapiens
caatcctttgagatt

SEQ ID NO: 1357250 - DNA, 15 bp, Homo sapiens
tcaatcctttgagat

SEQ ID NO: 1357251 - DNA, 15 bp, Homo sapiens
atcaatcctttgaga

SEQ ID NO: 1357252 - DNA, 15 bp, Homo sapiens
aatcaatcctttgag

SEQ ID NO: 1357253 - DNA, 15 bp, Homo sapiens
gaatcaatcctttga

SEQ ID NO: 1357254 - DNA, 15 bp, Homo sapiens
agaatcaatcctttg

SEQ ID NO: 1357255 - DNA, 15 bp, Homo sapiens
aagaatcaatccttt

SEQ ID NO: 1357256 - DNA, 15 bp, Homo sapiens
taagaatcaatcctt

SEQ ID NO: 1357257 - DNA, 15 bp, Homo sapiens
ctaagaatcaatcct

SEQ ID NO: 1357258 - DNA, 15 bp, Homo sapiens
actaagaatcaatcc

SEQ ID NO: 1357259 - DNA, 15 bp, Homo sapiens
cactaagaatcaatc

SEQ ID NO: 1357260 - DNA, 15 bp, Homo sapiens
tcactaagaatcaat

SEQ ID NO: 1357261 - DNA, 15 bp, Homo sapiens
atcactaagaatcaa

SEQ ID NO: 1357262 - DNA, 15 bp, Homo sapiens
aatcactaagaatca

SEQ ID NO: 1357263 - DNA, 15 bp, Homo sapiens
aaatcactaagaatc

SEQ ID NO: 1357264 - DNA, 15 bp, Homo sapiens
aaaatcactaagaat

SEQ ID NO: 1357265 - DNA, 15 bp, Homo sapiens
taaaatcactaagaa

SEQ ID NO: 1357266 - DNA, 15 bp, Homo sapiens
ataaaatcactaaga

SEQ ID NO: 1357267 - DNA, 15 bp, Homo sapiens
aataaaatcactaag

SEQ ID NO: 1357268 - DNA, 15 bp, Homo sapiens
aaataaaatcactaa

SEQ ID NO: 1357269 - DNA, 15 bp, Homo sapiens
taaataaaatcacta

SEQ ID NO: 1357270 - DNA, 15 bp, Homo sapiens
ataaataaaatcact

SEQ ID NO: 1357271 - DNA, 15 bp, Homo sapiens
cataaataaaatcac

SEQ ID NO: 1357272 - DNA, 15 bp, Homo sapiens
ccataaataaaatca

SEQ ID NO: 1357273 - DNA, 15 bp, Homo sapiens
tccataaataaaatc

SEQ ID NO: 1357274 - DNA, 15 bp, Homo sapiens
ttccataaataaaat

SEQ ID NO: 1357275 - DNA, 15 bp, Homo sapiens
gttccataaataaaa

SEQ ID NO: 1357276 - DNA, 15 bp, Homo sapiens
tgttccataaataaa

SEQ ID NO: 1357277 - DNA, 15 bp, Homo sapiens
atgttccataaataa

SEQ ID NO: 1357278 - DNA, 15 bp, Homo sapiens
aatgttccataaata

SEQ ID NO: 1357279 - DNA, 15 bp, Homo sapiens
gaatgttccataaat

SEQ ID NO: 1357280 - DNA, 15 bp, Homo sapiens
tgaatgttccataaa

SEQ ID NO: 1357281 - DNA, 15 bp, Homo sapiens
atgaatgttccataa

SEQ ID NO: 1357282 - DNA, 15 bp, Homo sapiens
catgaatgttccata

SEQ ID NO: 1357283 - DNA, 15 bp, Homo sapiens
tcatgaatgttccat

SEQ ID NO: 1357284 - DNA, 15 bp, Homo sapiens
ttcatgaatgttcca

SEQ ID NO: 1357285 - DNA, 15 bp, Homo sapiens
tttcatgaatgttcc

SEQ ID NO: 1357286 - DNA, 15 bp, Homo sapiens
atttcatgaatgttc

SEQ ID NO: 1357287 - DNA, 15 bp, Homo sapiens
tatttcatgaatgtt

SEQ ID NO: 1357288 - DNA, 15 bp, Homo sapiens
ttatttcatgaatgt

SEQ ID NO: 1357289 - DNA, 15 bp, Homo sapiens
gttatttcatgaatg

SEQ ID NO: 1357290 - DNA, 15 bp, Homo sapiens
tgttatttcatgaat

SEQ ID NO: 1357291 - DNA, 15 bp, Homo sapiens
atgttatttcatgaa

SEQ ID NO: 1357292 - DNA, 15 bp, Homo sapiens
tatgttatttcatga

SEQ ID NO: 1357293 - DNA, 15 bp, Homo sapiens
ttatgttatttcatg

SEQ ID NO: 1357294 - DNA, 15 bp, Homo sapiens
attatgttatttcat

SEQ ID NO: 1357295 - DNA, 15 bp, Homo sapiens
aattatgttatttca

SEQ ID NO: 1357296 - DNA, 15 bp, Homo sapiens
taattatgttatttc

SEQ ID NO: 1357297 - DNA, 15 bp, Homo sapiens
ataattatgttattt

SEQ ID NO: 1357298 - DNA, 15 bp, Homo sapiens
cataattatgttatt

SEQ ID NO: 1357299 - DNA, 15 bp, Homo sapiens
ccataattatgttat

SEQ ID NO: 1357300 - DNA, 15 bp, Homo sapiens
tccataattatgtta

SEQ ID NO: 1357301 - DNA, 15 bp, Homo sapiens
ctccataattatgtt

SEQ ID NO: 1357302 - DNA, 15 bp, Homo sapiens
gctccataattatgt

SEQ ID NO: 1357303 - DNA, 15 bp, Homo sapiens
agctccataattatg

SEQ ID NO: 1357304 - DNA, 15 bp, Homo sapiens
cagctccataattat

SEQ ID NO: 1357305 - DNA, 15 bp, Homo sapiens
ccagctccataatta

SEQ ID NO: 1357306 - DNA, 15 bp, Homo sapiens
tccagctccataatt

SEQ ID NO: 1357307 - DNA, 15 bp, Homo sapiens
ctccagctccataat

SEQ ID NO: 1357308 - DNA, 15 bp, Homo sapiens
tctccagctccataa

SEQ ID NO: 1357309 - DNA, 15 bp, Homo sapiens
ttctccagctccata

SEQ ID NO: 1357310 - DNA, 15 bp, Homo sapiens
attctccagctccat

SEQ ID NO: 1357311 - DNA, 15 bp, Homo sapiens
cattctccagctcca

SEQ ID NO: 1357312 - DNA, 15 bp, Homo sapiens
ccattctccagctcc

SEQ ID NO: 1357313 - DNA, 15 bp, Homo sapiens
cccattctccagctc

SEQ ID NO: 1357314 - DNA, 15 bp, Homo sapiens
acccattctccagct

SEQ ID NO: 1357315 - DNA, 15 bp, Homo sapiens
aacccattctccagc

SEQ ID NO: 1357316 - DNA, 15 bp, Homo sapiens
aaacccattctccag

SEQ ID NO: 1357317 - DNA, 15 bp, Homo sapiens
caaacccattctcca

SEQ ID NO: 1357318 - DNA, 15 bp, Homo sapiens
acaaacccattctcc

SEQ ID NO: 1357319 - DNA, 15 bp, Homo sapiens
tacaaacccattctc

SEQ ID NO: 1357320 - DNA, 15 bp, Homo sapiens
ctacaaacccattct

SEQ ID NO: 1357321 - DNA, 15 bp, Homo sapiens
actacaaacccattc

SEQ ID NO: 1357322 - DNA, 15 bp, Homo sapiens
aactacaaacccatt

SEQ ID NO: 1357323 - DNA, 15 bp, Homo sapiens
caactacaaacccat

SEQ ID NO: 1357324 - DNA, 15 bp, Homo sapiens
gcaactacaaaccca

SEQ ID NO: 1357325 - DNA, 15 bp, Homo sapiens
ggcaactacaaaccc

SEQ ID NO: 1357326 - DNA, 15 bp, Homo sapiens
tggcaactacaaacc

SEQ ID NO: 1357327 - DNA, 15 bp, Homo sapiens
ctggcaactacaaac

SEQ ID NO: 1357328 - DNA, 15 bp, Homo sapiens
cctggcaactacaaa

SEQ ID NO: 1357329 - DNA, 15 bp, Homo sapiens
ccctggcaactacaa

SEQ ID NO: 1357330 - DNA, 15 bp, Homo sapiens
cccctggcaactaca

SEQ ID NO: 1357331 - DNA, 15 bp, Homo sapiens
acccctggcaactac

SEQ ID NO: 1357332 - DNA, 15 bp, Homo sapiens
aacccctggcaacta

SEQ ID NO: 1357333 - DNA, 15 bp, Homo sapiens
taacccctggcaact

SEQ ID NO: 1357334 - DNA, 15 bp, Homo sapiens
ctaacccctggcaac

SEQ ID NO: 1357335 - DNA, 15 bp, Homo sapiens
cctaacccctggcaa

SEQ ID NO: 1357336 - DNA, 15 bp, Homo sapiens
ccctaacccctggca

SEQ ID NO: 1357337 - DNA, 15 bp, Homo sapiens
tccctaacccctggc

SEQ ID NO: 1357338 - DNA, 15 bp, Homo sapiens
atccctaacccctgg

SEQ ID NO: 1357339 - DNA, 15 bp, Homo sapiens
gatccctaacccctg

SEQ ID NO: 1357340 - DNA, 15 bp, Homo sapiens
tgatccctaacccct

SEQ ID NO: 1357341 - DNA, 15 bp, Homo sapiens
atgatccctaacccc

SEQ ID NO: 1357342 - DNA, 15 bp, Homo sapiens
tatgatccctaaccc

SEQ ID NO: 1357343 - DNA, 15 bp, Homo sapiens
ctatgatccctaacc

SEQ ID NO: 1357344 - DNA, 15 bp, Homo sapiens
actatgatccctaac

SEQ ID NO: 1357345 - DNA, 15 bp, Homo sapiens
cactatgatccctaa

SEQ ID NO: 1357346 - DNA, 15 bp, Homo sapiens
ccactatgatcccta

SEQ ID NO: 1357347 - DNA, 15 bp, Homo sapiens
tccactatgatccct

SEQ ID NO: 1357348 - DNA, 15 bp, Homo sapiens
ttccactatgatccc

SEQ ID NO: 1357349 - DNA, 15 bp, Homo sapiens
cttccactatgatcc

SEQ ID NO: 1357350 - DNA, 15 bp, Homo sapiens
ccttccactatgatc

SEQ ID NO: 1357351 - DNA, 15 bp, Homo sapiens
cccttccactatgat

SEQ ID NO: 1357352 - DNA, 15 bp, Homo sapiens
tcccttccactatga

SEQ ID NO: 1357353 - DNA, 15 bp, Homo sapiens
atcccttccactatg

SEQ ID NO: 1357354 - DNA, 15 bp, Homo sapiens
tatcccttccactat

SEQ ID NO: 1357355 - DNA, 15 bp, Homo sapiens
ctatcccttccacta

SEQ ID NO: 1357356 - DNA, 15 bp, Homo sapiens
tctatcccttccact

SEQ ID NO: 1357357 - DNA, 15 bp, Homo sapiens
ttctatcccttccac

SEQ ID NO: 1357358 - DNA, 15 bp, Homo sapiens
cttctatcccttcca

SEQ ID NO: 1357359 - DNA, 15 bp, Homo sapiens
acttctatcccttcc

SEQ ID NO: 1357360 - DNA, 15 bp, Homo sapiens
cacttctatcccttc

SEQ ID NO: 1357361 - DNA, 15 bp, Homo sapiens
ccacttctatccctt

SEQ ID NO: 1357362 - DNA, 15 bp, Homo sapiens
accacttctatccct

SEQ ID NO: 1357363 - DNA, 15 bp, Homo sapiens
caccacttctatccc

SEQ ID NO: 1357364 - DNA, 15 bp, Homo sapiens
tcaccacttctatcc

SEQ ID NO: 1357365 - DNA, 15 bp, Homo sapiens
gtcaccacttctatc

SEQ ID NO: 1357366 - DNA, 15 bp, Homo sapiens
agtcaccacttctat

SEQ ID NO: 1357367 - DNA, 15 bp, Homo sapiens
tagtcaccacttcta

SEQ ID NO: 1357368 - DNA, 15 bp, Homo sapiens
atagtcaccacttct

SEQ ID NO: 1357369 - DNA, 15 bp, Homo sapiens
tatagtcaccacttc

SEQ ID NO: 1357370 - DNA, 15 bp, Homo sapiens
ttatagtcaccactt

SEQ ID NO: 1357371 - DNA, 15 bp, Homo sapiens
tttatagtcaccact

SEQ ID NO: 1357372 - DNA, 15 bp, Homo sapiens
ctttatagtcaccac

SEQ ID NO: 1357373 - DNA, 15 bp, Homo sapiens
tctttatagtcacca

SEQ ID NO: 1357374 - DNA, 15 bp, Homo sapiens
atctttatagtcacc

SEQ ID NO: 1357375 - DNA, 15 bp, Homo sapiens
catctttatagtcac

SEQ ID NO: 1357376 - DNA, 15 bp, Homo sapiens
acatctttatagtca

SEQ ID NO: 1357377 - DNA, 15 bp, Homo sapiens
gacatctttatagtc

SEQ ID NO: 1357378 - DNA, 15 bp, Homo sapiens
tgacatctttatagt

SEQ ID NO: 1357379 - DNA, 15 bp, Homo sapiens
ctgacatctttatag

SEQ ID NO: 1357380 - DNA, 15 bp, Homo sapiens
actgacatctttata

SEQ ID NO: 1357381 - DNA, 15 bp, Homo sapiens
gactgacatctttat

SEQ ID NO: 1357382 - DNA, 15 bp, Homo sapiens
tgactgacatcttta

SEQ ID NO: 1357383 - DNA, 15 bp, Homo sapiens
gtgactgacatcttt

SEQ ID NO: 1357384 - DNA, 15 bp, Homo sapiens
tgtgactgacatctt

SEQ ID NO: 1357385 - DNA, 15 bp, Homo sapiens
atgtgactgacatct

SEQ ID NO: 1357386 - DNA, 15 bp, Homo sapiens
catgtgactgacatc

SEQ ID NO: 1357387 - DNA, 15 bp, Homo sapiens
tcatgtgactgacat

SEQ ID NO: 1357388 - DNA, 15 bp, Homo sapiens
gtcatgtgactgaca

SEQ ID NO: 1357389 - DNA, 15 bp, Homo sapiens
tgtcatgtgactgac

SEQ ID NO: 1357390 - DNA, 15 bp, Homo sapiens
ctgtcatgtgactga

SEQ ID NO: 1357391 - DNA, 15 bp, Homo sapiens
tctgtcatgtgactg

SEQ ID NO: 1357392 - DNA, 15 bp, Homo sapiens
ctctgtcatgtgact

SEQ ID NO: 1357393 - DNA, 15 bp, Homo sapiens
actctgtcatgtgac

SEQ ID NO: 1357394 - DNA, 15 bp, Homo sapiens
gactctgtcatgtga

SEQ ID NO: 1357395 - DNA, 15 bp, Homo sapiens
tgactctgtcatgtg

SEQ ID NO: 1357396 - DNA, 15 bp, Homo sapiens
atgactctgtcatgt

SEQ ID NO: 1357397 - DNA, 15 bp, Homo sapiens
catgactctgtcatg

SEQ ID NO: 1357398 - DNA, 15 bp, Homo sapiens
acatgactctgtcat

SEQ ID NO: 1357399 - DNA, 15 bp, Homo sapiens
cacatgactctgtca

SEQ ID NO: 1357400 - DNA, 15 bp, Homo sapiens
tcacatgactctgtc

SEQ ID NO: 1357401 - DNA, 15 bp, Homo sapiens
tcatcacatgactct

SEQ ID NO: 1357402 - DNA, 15 bp, Homo sapiens
atcatcacatgactc

SEQ ID NO: 1357403 - DNA, 15 bp, Homo sapiens
catcatcacatgact

SEQ ID NO: 1357404 - DNA, 15 bp, Homo sapiens
ccatcatcacatgac

SEQ ID NO: 1357405 - DNA, 15 bp, Homo sapiens
accatcatcacatga

SEQ ID NO: 1357406 - DNA, 15 bp, Homo sapiens
taccatcatcacatg

SEQ ID NO: 1357407 - DNA, 15 bp, Homo sapiens
gtaccatcatcacat

SEQ ID NO: 1357408 - DNA, 15 bp, Homo sapiens
tgtaccatcatcaca

SEQ ID NO: 1357409 - DNA, 15 bp, Homo sapiens
ttgtaccatcatcac

SEQ ID NO: 1357410 - DNA, 15 bp, Homo sapiens
attgtaccatcatca

SEQ ID NO: 1357411 - DNA, 15 bp, Homo sapiens
aattgtaccatcatc

SEQ ID NO: 1357412 - DNA, 15 bp, Homo sapiens
taattgtaccatcat

SEQ ID NO: 1357413 - DNA, 15 bp, Homo sapiens
ttaattgtaccatca

SEQ ID NO: 1357414 - DNA, 15 bp, Homo sapiens
cttaattgtaccatc

SEQ ID NO: 1357415 - DNA, 15 bp, Homo sapiens
acttaattgtaccat

SEQ ID NO: 1357416 - DNA, 15 bp, Homo sapiens
cacttaattgtacca

SEQ ID NO: 1357417 - DNA, 15 bp, Homo sapiens
acacttaattgtacc

SEQ ID NO: 1357418 - DNA, 15 bp, Homo sapiens
gacacttaattgtac

SEQ ID NO: 1357419 - DNA, 15 bp, Homo sapiens
agacacttaattgta

SEQ ID NO: 1357420 - DNA, 15 bp, Homo sapiens
aagacacttaattgt

SEQ ID NO: 1357421 - DNA, 15 bp, Homo sapiens
caagacacttaattg

SEQ ID NO: 1357422 - DNA, 15 bp, Homo sapiens
tcaagacacttaatt

SEQ ID NO: 1357423 - DNA, 15 bp, Homo sapiens
atcaagacacttaat

SEQ ID NO: 1357424 - DNA, 15 bp, Homo sapiens
aatcaagacacttaa

SEQ ID NO: 1357425 - DNA, 15 bp, Homo sapiens
caatcaagacactta

SEQ ID NO: 1357426 - DNA, 15 bp, Homo sapiens
acaatcaagacactt

SEQ ID NO: 1357427 - DNA, 15 bp, Homo sapiens
tacaatcaagacact

SEQ ID NO: 1357428 - DNA, 15 bp, Homo sapiens
ctacaatcaagacac

SEQ ID NO: 1357429 - DNA, 15 bp, Homo sapiens
actacaatcaagaca

SEQ ID NO: 1357430 - DNA, 15 bp, Homo sapiens
tactacaatcaagac

SEQ ID NO: 1357431 - DNA, 15 bp, Homo sapiens
ctactacaatcaaga

SEQ ID NO: 1357432 - DNA, 15 bp, Homo sapiens
actactacaatcaag

SEQ ID NO: 1357433 - DNA, 15 bp, Homo sapiens
cactactacaatcaa

SEQ ID NO: 1357434 - DNA, 15 bp, Homo sapiens
acactactacaatca

SEQ ID NO: 1357435 - DNA, 15 bp, Homo sapiens
aacactactacaatc

SEQ ID NO: 1357436 - DNA, 15 bp, Homo sapiens
aaacactactacaat

SEQ ID NO: 1357437 - DNA, 15 bp, Homo sapiens
taaacactactacaa

SEQ ID NO: 1357438 - DNA, 15 bp, Homo sapiens
gtaaacactactaca

SEQ ID NO: 1357439 - DNA, 15 bp, Homo sapiens
tgtaaacactactac

SEQ ID NO: 1357440 - DNA, 15 bp, Homo sapiens
atgtaaacactacta

SEQ ID NO: 1357441 - DNA, 15 bp, Homo sapiens
catgtaaacactact

SEQ ID NO: 1357442 - DNA, 15 bp, Homo sapiens
tcatgtaaacactac

SEQ ID NO: 1357443 - DNA, 15 bp, Homo sapiens
ctcatgtaaacacta

SEQ ID NO: 1357444 - DNA, 15 bp, Homo sapiens
cctcatgtaaacact

SEQ ID NO: 1357445 - DNA, 15 bp, Homo sapiens
gcctcatgtaaacac

SEQ ID NO: 1357446 - DNA, 15 bp, Homo sapiens
agcctcatgtaaaca

SEQ ID NO: 1357447 - DNA, 15 bp, Homo sapiens
tagcctcatgtaaac

SEQ ID NO: 1357448 - DNA, 15 bp, Homo sapiens
ttagcctcatgtaaa

SEQ ID NO: 1357449 - DNA, 15 bp, Homo sapiens
tttagcctcatgtaa

SEQ ID NO: 1357450 - DNA, 15 bp, Homo sapiens
gtttagcctcatgta

SEQ ID NO: 1357451 - DNA, 15 bp, Homo sapiens
tgtttagcctcatgt

SEQ ID NO: 1357452 - DNA, 15 bp, Homo sapiens
atgtttagcctcatg

SEQ ID NO: 1357453 - DNA, 15 bp, Homo sapiens
catgtttagcctcat

SEQ ID NO: 1357454 - DNA, 15 bp, Homo sapiens
acatgtttagcctca

SEQ ID NO: 1357455 - DNA, 15 bp, Homo sapiens
cacatgtttagcctc

SEQ ID NO: 1357456 - DNA, 15 bp, Homo sapiens
tcacatgtttagcct

SEQ ID NO: 1357457 - DNA, 15 bp, Homo sapiens
atcacatgtttagcc

SEQ ID NO: 1357458 - DNA, 15 bp, Homo sapiens
tatcacatgtttagc

SEQ ID NO: 1357459 - DNA, 15 bp, Homo sapiens
ttatcacatgtttag

SEQ ID NO: 1357460 - DNA, 15 bp, Homo sapiens
tttatcacatgttta

SEQ ID NO: 1357461 - DNA, 15 bp, Homo sapiens
ctttatcacatgttt

SEQ ID NO: 1357462 - DNA, 15 bp, Homo sapiens
actttatcacatgtt

SEQ ID NO: 1357463 - DNA, 15 bp, Homo sapiens
aactttatcacatgt

SEQ ID NO: 1357464 - DNA, 15 bp, Homo sapiens
caactttatcacatg

SEQ ID NO: 1357465 - DNA, 15 bp, Homo sapiens
acaactttatcacat

SEQ ID NO: 1357466 - DNA, 15 bp, Homo sapiens
tacaactttatcaca

SEQ ID NO: 1357467 - DNA, 15 bp, Homo sapiens
atacaactttatcac

SEQ ID NO: 1357468 - DNA, 15 bp, Homo sapiens
tatacaactttatca

SEQ ID NO: 1357469 - DNA, 15 bp, Homo sapiens
ctatacaactttatc

SEQ ID NO: 1357470 - DNA, 15 bp, Homo sapiens
gctatacaactttat

SEQ ID NO: 1357471 - DNA, 15 bp, Homo sapiens
ggctatacaacttta

SEQ ID NO: 1357472 - DNA, 15 bp, Homo sapiens
gggctatacaacttt

SEQ ID NO: 1357473 - DNA, 15 bp, Homo sapiens
agggctatacaactt

SEQ ID NO: 1357474 - DNA, 15 bp, Homo sapiens
tagggctatacaact

SEQ ID NO: 1357475 - DNA, 15 bp, Homo sapiens
atagggctatacaac

SEQ ID NO: 1357476 - DNA, 15 bp, Homo sapiens
tatagggctatacaa

SEQ ID NO: 1357477 - DNA, 15 bp, Homo sapiens
atatagggctataca

SEQ ID NO: 1357478 - DNA, 15 bp, Homo sapiens
tatatagggctatac

SEQ ID NO: 1357479 - DNA, 15 bp, Homo sapiens
atatatagggctata

SEQ ID NO: 1357480 - DNA, 15 bp, Homo sapiens
tatatatagggctat

SEQ ID NO: 1357481 - DNA, 15 bp, Homo sapiens
gtatatatagggcta

SEQ ID NO: 1357482 - DNA, 15 bp, Homo sapiens
tgtatatatagggct

SEQ ID NO: 1357483 - DNA, 15 bp, Homo sapiens
gtgtatatatagggc

SEQ ID NO: 1357484 - DNA, 15 bp, Homo sapiens
tgtgtatatataggg

SEQ ID NO: 1357485 - DNA, 15 bp, Homo sapiens
gtgtgtatatatagg

SEQ ID NO: 1357486 - DNA, 15 bp, Homo sapiens
tgtgtgtatatatag

SEQ ID NO: 1357487 - DNA, 15 bp, Homo sapiens
tgtgtgtgtatatat

SEQ ID NO: 1357488 - DNA, 15 bp, Homo sapiens
atgtgtgtgtatata

SEQ ID NO: 1357489 - DNA, 15 bp, Homo sapiens
tatgtgtgtgtatat

SEQ ID NO: 1357490 - DNA, 15 bp, Homo sapiens
gtatgtgtgtgtata

SEQ ID NO: 1357491 - DNA, 15 bp, Homo sapiens
tgtatgtgtgtgtat

SEQ ID NO: 1357492 - DNA, 15 bp, Homo sapiens
atgtatgtgtgtgta

SEQ ID NO: 1357493 - DNA, 15 bp, Homo sapiens
catgcatgtatgtgt

SEQ ID NO: 1357494 - DNA, 15 bp, Homo sapiens
acatgcatgtatgtg

SEQ ID NO: 1357495 - DNA, 15 bp, Homo sapiens
tacatgcatgtatgt

SEQ ID NO: 1357496 - DNA, 15 bp, Homo sapiens
atacatgcatgtatg

SEQ ID NO: 1357497 - DNA, 15 bp, Homo sapiens
tatacatgcatgtat

SEQ ID NO: 1357498 - DNA, 15 bp, Homo sapiens
ttatacatgcatgta

SEQ ID NO: 1357499 - DNA, 15 bp, Homo sapiens
gttatacatgcatgt

SEQ ID NO: 1357500 - DNA, 15 bp, Homo sapiens
agttatacatgcatg

SEQ ID NO: 1357501 - DNA, 15 bp, Homo sapiens
cagttatacatgcat

SEQ ID NO: 1357502 - DNA, 15 bp, Homo sapiens
gcagttatacatgca

SEQ ID NO: 1357503 - DNA, 15 bp, Homo sapiens
agcagttatacatgc

SEQ ID NO: 1357504 - DNA, 15 bp, Homo sapiens
cagcagttatacatg

SEQ ID NO: 1357505 - DNA, 15 bp, Homo sapiens
tcagcagttatacat

SEQ ID NO: 1357506 - DNA, 15 bp, Homo sapiens
ttcagcagttataca

SEQ ID NO: 1357507 - DNA, 15 bp, Homo sapiens
tttcagcagttatac

SEQ ID NO: 1357508 - DNA, 15 bp, Homo sapiens
gtttcagcagttata

SEQ ID NO: 1357509 - DNA, 15 bp, Homo sapiens
ggtttcagcagttat

SEQ ID NO: 1357510 - DNA, 15 bp, Homo sapiens
aggtttcagcagtta

SEQ ID NO: 1357511 - DNA, 15 bp, Homo sapiens
caggtttcagcagtt

SEQ ID NO: 1357512 - DNA, 15 bp, Homo sapiens
tcaggtttcagcagt

SEQ ID NO: 1357513 - DNA, 15 bp, Homo sapiens
ttcaggtttcagcag

SEQ ID NO: 1357514 - DNA, 15 bp, Homo sapiens
attcaggtttcagca

SEQ ID NO: 1357515 - DNA, 15 bp, Homo sapiens
tattcaggtttcagc

SEQ ID NO: 1357516 - DNA, 15 bp, Homo sapiens
ttattcaggtttcag

SEQ ID NO: 1357517 - DNA, 15 bp, Homo sapiens
cttattcaggtttca

SEQ ID NO: 1357518 - DNA, 15 bp, Homo sapiens
gcttattcaggtttc

SEQ ID NO: 1357519 - DNA, 15 bp, Homo sapiens
agcttattcaggttt

SEQ ID NO: 1357520 - DNA, 15 bp, Homo sapiens
gagcttattcaggtt

SEQ ID NO: 1357521 - DNA, 15 bp, Homo sapiens
agagcttattcaggt

SEQ ID NO: 1357522 - DNA, 15 bp, Homo sapiens
tagagcttattcagg

SEQ ID NO: 1357523 - DNA, 15 bp, Homo sapiens
gtagagcttattcag

SEQ ID NO: 1357524 - DNA, 15 bp, Homo sapiens
tgtagagcttattca

SEQ ID NO: 1357525 - DNA, 15 bp, Homo sapiens
ctgtagagcttattc

SEQ ID NO: 1357526 - DNA, 15 bp, Homo sapiens
tctgtagagcttatt

SEQ ID NO: 1357527 - DNA, 15 bp, Homo sapiens
atctgtagagcttat

SEQ ID NO: 1357528 - DNA, 15 bp, Homo sapiens
aatctgtagagctta

SEQ ID NO: 1357529 - DNA, 15 bp, Homo sapiens
caatctgtagagctt

SEQ ID NO: 1357530 - DNA, 15 bp, Homo sapiens
acaatctgtagagct

SEQ ID NO: 1357531 - DNA, 15 bp, Homo sapiens
tacaatctgtagagc

SEQ ID NO: 1357532 - DNA, 15 bp, Homo sapiens
ctacaatctgtagag

SEQ ID NO: 1357533 - DNA, 15 bp, Homo sapiens
gctacaatctgtaga

SEQ ID NO: 1357534 - DNA, 15 bp, Homo sapiens
tgctacaatctgtag

SEQ ID NO: 1357535 - DNA, 15 bp, Homo sapiens
ctgctacaatctgta

SEQ ID NO: 1357536 - DNA, 15 bp, Homo sapiens
actgctacaatctgt

SEQ ID NO: 1357537 - DNA, 15 bp, Homo sapiens
cactgctacaatctg

SEQ ID NO: 1357538 - DNA, 15 bp, Homo sapiens
acactgctacaatct

SEQ ID NO: 1357539 - DNA, 15 bp, Homo sapiens
gacactgctacaatc

SEQ ID NO: 1357540 - DNA, 15 bp, Homo sapiens
ggacactgctacaat

SEQ ID NO: 1357541 - DNA, 15 bp, Homo sapiens
tggacactgctacaa

SEQ ID NO: 1357542 - DNA, 15 bp, Homo sapiens
atggacactgctaca

SEQ ID NO: 1357543 - DNA, 15 bp, Homo sapiens
aatggacactgctac

SEQ ID NO: 1357544 - DNA, 15 bp, Homo sapiens
aaatggacactgcta

SEQ ID NO: 1357545 - DNA, 15 bp, Homo sapiens
gaaatggacactgct

SEQ ID NO: 1357546 - DNA, 15 bp, Homo sapiens
agaaatggacactgc

SEQ ID NO: 1357547 - DNA, 15 bp, Homo sapiens
aagaaatggacactg

SEQ ID NO: 1357548 - DNA, 15 bp, Homo sapiens
caagaaatggacact

SEQ ID NO: 1357549 - DNA, 15 bp, Homo sapiens
ccaagaaatggacac

SEQ ID NO: 1357550 - DNA, 15 bp, Homo sapiens
accaagaaatggaca

SEQ ID NO: 1357551 - DNA, 15 bp, Homo sapiens
aaccaagaaatggac

SEQ ID NO: 1357552 - DNA, 15 bp, Homo sapiens
aaaccaagaaatgga

SEQ ID NO: 1357553 - DNA, 15 bp, Homo sapiens
aaaaccaagaaatgg

SEQ ID NO: 1357554 - DNA, 15 bp, Homo sapiens
aaaaaccaagaaatg

SEQ ID NO: 1357555 - DNA, 15 bp, Homo sapiens
taaaaaccaagaaat

SEQ ID NO: 1357556 - DNA, 15 bp, Homo sapiens
ataaaaaccaagaaa

SEQ ID NO: 1357557 - DNA, 15 bp, Homo sapiens
tataaaaaccaagaa

SEQ ID NO: 1357558 - DNA, 15 bp, Homo sapiens
atataaaaaccaaga

SEQ ID NO: 1357559 - DNA, 15 bp, Homo sapiens
aatataaaaaccaag

SEQ ID NO: 1357560 - DNA, 15 bp, Homo sapiens
caatataaaaaccaa

SEQ ID NO: 1357561 - DNA, 15 bp, Homo sapiens
acaatataaaaacca

SEQ ID NO: 1357562 - DNA, 15 bp, Homo sapiens
tacaatataaaaacc

SEQ ID NO: 1357563 - DNA, 15 bp, Homo sapiens
atacaatataaaaac

SEQ ID NO: 1357564 - DNA, 15 bp, Homo sapiens
aatacaatataaaaa

SEQ ID NO: 1357565 - DNA, 15 bp, Homo sapiens
taatacaatataaaa

SEQ ID NO: 1357566 - DNA, 15 bp, Homo sapiens
gtaatacaatataaa

SEQ ID NO: 1357567 - DNA, 15 bp, Homo sapiens
tgtaatacaatataa

SEQ ID NO: 1357568 - DNA, 15 bp, Homo sapiens
ctgtaatacaatata

SEQ ID NO: 1357569 - DNA, 15 bp, Homo sapiens
actgtaatacaatat

SEQ ID NO: 1357570 - DNA, 15 bp, Homo sapiens
aactgtaatacaata

SEQ ID NO: 1357571 - DNA, 15 bp, Homo sapiens
caactgtaatacaat

SEQ ID NO: 1357572 - DNA, 15 bp, Homo sapiens
acaactgtaatacaa

SEQ ID NO: 1357573 - DNA, 15 bp, Homo sapiens
cacaactgtaataca

SEQ ID NO: 1357574 - DNA, 15 bp, Homo sapiens
gcacaactgtaatac

SEQ ID NO: 1357575 - DNA, 15 bp, Homo sapiens
tgcacaactgtaata

SEQ ID NO: 1357576 - DNA, 15 bp, Homo sapiens
atgcacaactgtaat

SEQ ID NO: 1357577 - DNA, 15 bp, Homo sapiens
catgcacaactgtaa

SEQ ID NO: 1357578 - DNA, 15 bp, Homo sapiens
tcatgcacaactgta

SEQ ID NO: 1357579 - DNA, 15 bp, Homo sapiens
gtcatgcacaactgt

SEQ ID NO: 1357580 - DNA, 15 bp, Homo sapiens
tgtcatgcacaactg

SEQ ID NO: 1357581 - DNA, 15 bp, Homo sapiens
gtgtcatgcacaact

SEQ ID NO: 1357582 - DNA, 15 bp, Homo sapiens
agtgtcatgcacaac

SEQ ID NO: 1357583 - DNA, 15 bp, Homo sapiens
tagtgtcatgcacaa

SEQ ID NO: 1357584 - DNA, 15 bp, Homo sapiens
ttagtgtcatgcaca

SEQ ID NO: 1357585 - DNA, 15 bp, Homo sapiens
attagtgtcatgcac

SEQ ID NO: 1357586 - DNA, 15 bp, Homo sapiens
cattagtgtcatgca

SEQ ID NO: 1357587 - DNA, 15 bp, Homo sapiens
acattagtgtcatgc

SEQ ID NO: 1357588 - DNA, 15 bp, Homo sapiens
aacattagtgtcatg

SEQ ID NO: 1357589 - DNA, 15 bp, Homo sapiens
caacattagtgtcat

SEQ ID NO: 1357590 - DNA, 15 bp, Homo sapiens
ccaacattagtgtca

SEQ ID NO: 1357591 - DNA, 15 bp, Homo sapiens
accaacattagtgtc

SEQ ID NO: 1357592 - DNA, 15 bp, Homo sapiens
taccaacattagtgt

SEQ ID NO: 1357593 - DNA, 15 bp, Homo sapiens
ttaccaacattagtg

SEQ ID NO: 1357594 - DNA, 15 bp, Homo sapiens
tttaccaacattagt

SEQ ID NO: 1357595 - DNA, 15 bp, Homo sapiens
ctttaccaacattag

SEQ ID NO: 1357596 - DNA, 15 bp, Homo sapiens
tctttaccaacatta

SEQ ID NO: 1357597 - DNA, 15 bp, Homo sapiens
ctctttaccaacatt

SEQ ID NO: 1357598 - DNA, 15 bp, Homo sapiens
actctttaccaacat

SEQ ID NO: 1357599 - DNA, 15 bp, Homo sapiens
cactctttaccaaca

SEQ ID NO: 1357600 - DNA, 15 bp, Homo sapiens
ccactctttaccaac

SEQ ID NO: 1357601 - DNA, 15 bp, Homo sapiens
tccactctttaccaa

SEQ ID NO: 1357602 - DNA, 15 bp, Homo sapiens
ctccactctttacca

SEQ ID NO: 1357603 - DNA, 15 bp, Homo sapiens
cctccactctttacc

SEQ ID NO: 1357604 - DNA, 15 bp, Homo sapiens
tcctccactctttac

SEQ ID NO: 1357605 - DNA, 15 bp, Homo sapiens
ttcctccactcttta

SEQ ID NO: 1357606 - DNA, 15 bp, Homo sapiens
cttcctccactcttt

SEQ ID NO: 1357607 - DNA, 15 bp, Homo sapiens
ccttcctccactctt

SEQ ID NO: 1357608 - DNA, 15 bp, Homo sapiens
cccttcctccactct

SEQ ID NO: 1357609 - DNA, 15 bp, Homo sapiens
acccttcctccactc

SEQ ID NO: 1357610 - DNA, 15 bp, Homo sapiens
cacccttcctccact

SEQ ID NO: 1357611 - DNA, 15 bp, Homo sapiens
gcacccttcctccac

SEQ ID NO: 1357612 - DNA, 15 bp, Homo sapiens
tgcacccttcctcca

SEQ ID NO: 1357613 - DNA, 15 bp, Homo sapiens
atgcacccttcctcc

SEQ ID NO: 1357614 - DNA, 15 bp, Homo sapiens
catgcacccttcctc

SEQ ID NO: 1357615 - DNA, 15 bp, Homo sapiens
tcatgcacccttcct

SEQ ID NO: 1357616 - DNA, 15 bp, Homo sapiens
ctcatgcacccttcc

SEQ ID NO: 1357617 - DNA, 15 bp, Homo sapiens
tctcatgcacccttc

SEQ ID NO: 1357618 - DNA, 15 bp, Homo sapiens
gtctcatgcaccctt

SEQ ID NO: 1357619 - DNA, 15 bp, Homo sapiens
agtctcatgcaccct

SEQ ID NO: 1357620 - DNA, 15 bp, Homo sapiens
aagtctcatgcaccc

SEQ ID NO: 1357621 - DNA, 15 bp, Homo sapiens
aaagtctcatgcacc

SEQ ID NO: 1357622 - DNA, 15 bp, Homo sapiens
gaaagtctcatgcac

SEQ ID NO: 1357623 - DNA, 15 bp, Homo sapiens
ggaaagtctcatgca

SEQ ID NO: 1357624 - DNA, 15 bp, Homo sapiens
aggaaagtctcatgc

SEQ ID NO: 1357625 - DNA, 15 bp, Homo sapiens
caggaaagtctcatg

SEQ ID NO: 1357626 - DNA, 15 bp, Homo sapiens
acaggaaagtctcat

SEQ ID NO: 1357627 - DNA, 15 bp, Homo sapiens
cacaggaaagtctca

SEQ ID NO: 1357628 - DNA, 15 bp, Homo sapiens
gcacaggaaagtctc

SEQ ID NO: 1357629 - DNA, 15 bp, Homo sapiens
tgcacaggaaagtct

SEQ ID NO: 1357630 - DNA, 15 bp, Homo sapiens
atgcacaggaaagtc

SEQ ID NO: 1357631 - DNA, 15 bp, Homo sapiens
aatgcacaggaaagt

SEQ ID NO: 1357632 - DNA, 15 bp, Homo sapiens
aaatgcacaggaaag

SEQ ID NO: 1357633 - DNA, 15 bp, Homo sapiens
gaaatgcacaggaaa

SEQ ID NO: 1357634 - DNA, 15 bp, Homo sapiens
agaaatgcacaggaa

SEQ ID NO: 1357635 - DNA, 15 bp, Homo sapiens
aagaaatgcacagga

SEQ ID NO: 1357636 - DNA, 15 bp, Homo sapiens
aaagaaatgcacagg

SEQ ID NO: 1357637 - DNA, 15 bp, Homo sapiens
caaagaaatgcacag

SEQ ID NO: 1357638 - DNA, 15 bp, Homo sapiens
gcaaagaaatgcaca

SEQ ID NO: 1357639 - DNA, 15 bp, Homo sapiens
tgcaaagaaatgcac

SEQ ID NO: 1357640 - DNA, 15 bp, Homo sapiens
ttgcaaagaaatgca

SEQ ID NO: 1357641 - DNA, 15 bp, Homo sapiens
gttgcaaagaaatgc

SEQ ID NO: 1357642 - DNA, 15 bp, Homo sapiens
tgttgcaaagaaatg

SEQ ID NO: 1357643 - DNA, 15 bp, Homo sapiens
atgttgcaaagaaat

SEQ ID NO: 1357644 - DNA, 15 bp, Homo sapiens
tatgttgcaaagaaa

SEQ ID NO: 1357645 - DNA, 15 bp, Homo sapiens
gtatgttgcaaagaa

SEQ ID NO: 1357646 - DNA, 15 bp, Homo sapiens
agtatgttgcaaaga

SEQ ID NO: 1357647 - DNA, 15 bp, Homo sapiens
cagtatgttgcaaag

SEQ ID NO: 1357648 - DNA, 15 bp, Homo sapiens
acagtatgttgcaaa

SEQ ID NO: 1357649 - DNA, 15 bp, Homo sapiens
cacagtatgttgcaa

SEQ ID NO: 1357650 - DNA, 15 bp, Homo sapiens
tcacagtatgttgca

SEQ ID NO: 1357651 - DNA, 15 bp, Homo sapiens
ttcacagtatgttgc

SEQ ID NO: 1357652 - DNA, 15 bp, Homo sapiens
attcacagtatgttg

SEQ ID NO: 1357653 - DNA, 15 bp, Homo sapiens
gattcacagtatgtt

SEQ ID NO: 1357654 - DNA, 15 bp, Homo sapiens
agattcacagtatgt

SEQ ID NO: 1357655 - DNA, 15 bp, Homo sapiens
tagattcacagtatg

SEQ ID NO: 1357656 - DNA, 15 bp, Homo sapiens
atagattcacagtat

SEQ ID NO: 1357657 - DNA, 15 bp, Homo sapiens
tatagattcacagta

SEQ ID NO: 1357658 - DNA, 15 bp, Homo sapiens
ttatagattcacagt

SEQ ID NO: 1357659 - DNA, 15 bp, Homo sapiens
attatagattcacag

SEQ ID NO: 1357660 - DNA, 15 bp, Homo sapiens
aattatagattcaca

SEQ ID NO: 1357661 - DNA, 15 bp, Homo sapiens
taattatagattcac

SEQ ID NO: 1357662 - DNA, 15 bp, Homo sapiens
ataattatagattca

SEQ ID NO: 1357663 - DNA, 15 bp, Homo sapiens
aataattatagattc

SEQ ID NO: 1357664 - DNA, 15 bp, Homo sapiens
aaataattatagatt

SEQ ID NO: 1357665 - DNA, 15 bp, Homo sapiens
gaaataattatagat

SEQ ID NO: 1357666 - DNA, 15 bp, Homo sapiens
tgaaataattataga

SEQ ID NO: 1357667 - DNA, 15 bp, Homo sapiens
ttgaaataattatag

SEQ ID NO: 1357668 - DNA, 15 bp, Homo sapiens
cttgaaataattata

SEQ ID NO: 1357669 - DNA, 15 bp, Homo sapiens
tcttgaaataattat

SEQ ID NO: 1357670 - DNA, 15 bp, Homo sapiens
atcttgaaataatta

SEQ ID NO: 1357671 - DNA, 15 bp, Homo sapiens
tatcttgaaataatt

SEQ ID NO: 1357672 - DNA, 15 bp, Homo sapiens
atatcttgaaataat

SEQ ID NO: 1357673 - DNA, 15 bp, Homo sapiens
aatatcttgaaataa

SEQ ID NO: 1357674 - DNA, 15 bp, Homo sapiens
caatatcttgaaata

SEQ ID NO: 1357675 - DNA, 15 bp, Homo sapiens
tcaatatcttgaaat

SEQ ID NO: 1357676 - DNA, 15 bp, Homo sapiens
atcaatatcttgaaa

SEQ ID NO: 1357677 - DNA, 15 bp, Homo sapiens
tatcaatatcttgaa

SEQ ID NO: 1357678 - DNA, 15 bp, Homo sapiens
ttatcaatatcttga

SEQ ID NO: 1357679 - DNA, 15 bp, Homo sapiens
attatcaatatcttg

SEQ ID NO: 1357680 - DNA, 15 bp, Homo sapiens
gattatcaatatctt

SEQ ID NO: 1357681 - DNA, 15 bp, Homo sapiens
agattatcaatatct

SEQ ID NO: 1357682 - DNA, 15 bp, Homo sapiens
aagattatcaatatc

SEQ ID NO: 1357683 - DNA, 15 bp, Homo sapiens
caagattatcaatat

SEQ ID NO: 1357684 - DNA, 15 bp, Homo sapiens
acaagattatcaata

SEQ ID NO: 1357685 - DNA, 15 bp, Homo sapiens
gacaagattatcaat

SEQ ID NO: 1357686 - DNA, 15 bp, Homo sapiens
tgacaagattatcaa

SEQ ID NO: 1357687 - DNA, 15 bp, Homo sapiens
ttgacaagattatca

SEQ ID NO: 1357688 - DNA, 15 bp, Homo sapiens
tttgacaagattatc

SEQ ID NO: 1357689 - DNA, 15 bp, Homo sapiens
ttttgacaagattat

SEQ ID NO: 1357690 - DNA, 15 bp, Homo sapiens
tttttgacaagatta

SEQ ID NO: 1357691 - DNA, 15 bp, Homo sapiens
ttttttgacaagatt

SEQ ID NO: 1357692 - DNA, 15 bp, Homo sapiens
cttttttgacaagat

SEQ ID NO: 1357693 - DNA, 15 bp, Homo sapiens
tcttttttgacaaga

SEQ ID NO: 1357694 - DNA, 15 bp, Homo sapiens
atcttttttgacaag

SEQ ID NO: 1357695 - DNA, 15 bp, Homo sapiens
tatcttttttgacaa

SEQ ID NO: 1357696 - DNA, 15 bp, Homo sapiens
ttatcttttttgaca

SEQ ID NO: 1357697 - DNA, 15 bp, Homo sapiens
cttatcttttttgac

SEQ ID NO: 1357698 - DNA, 15 bp, Homo sapiens
acttatcttttttga

SEQ ID NO: 1357699 - DNA, 15 bp, Homo sapiens
aacttatcttttttg

SEQ ID NO: 1357700 - DNA, 15 bp, Homo sapiens
gaacttatctttttt

SEQ ID NO: 1357701 - DNA, 15 bp, Homo sapiens
tgaacttatcttttt

SEQ ID NO: 1357702 - DNA, 15 bp, Homo sapiens
gtgaacttatctttt

SEQ ID NO: 1357703 - DNA, 15 bp, Homo sapiens
agtgaacttatcttt

SEQ ID NO: 1357704 - DNA, 15 bp, Homo sapiens
cagtgaacttatctt

SEQ ID NO: 1357705 - DNA, 15 bp, Homo sapiens
gcagtgaacttatct

SEQ ID NO: 1357706 - DNA, 15 bp, Homo sapiens
agcagtgaacttatc

SEQ ID NO: 1357707 - DNA, 15 bp, Homo sapiens
gagcagtgaacttat

SEQ ID NO: 1357708 - DNA, 15 bp, Homo sapiens
agagcagtgaactta

SEQ ID NO: 1357709 - DNA, 15 bp, Homo sapiens
gagagcagtgaactt

SEQ ID NO: 1357710 - DNA, 15 bp, Homo sapiens
ggagagcagtgaact

SEQ ID NO: 1357711 - DNA, 15 bp, Homo sapiens
tggagagcagtgaac

SEQ ID NO: 1357712 - DNA, 15 bp, Homo sapiens
ctggagagcagtgaa

SEQ ID NO: 1357713 - DNA, 15 bp, Homo sapiens
cctggagagcagtga

SEQ ID NO: 1357714 - DNA, 15 bp, Homo sapiens
tcctggagagcagtg

SEQ ID NO: 1357715 - DNA, 15 bp, Homo sapiens
ctcctggagagcagt

SEQ ID NO: 1357716 - DNA, 15 bp, Homo sapiens
gctcctggagagcag

SEQ ID NO: 1357717 - DNA, 15 bp, Homo sapiens
agctcctggagagca

SEQ ID NO: 1357718 - DNA, 15 bp, Homo sapiens
tagctcctggagagc

SEQ ID NO: 1357719 - DNA, 15 bp, Homo sapiens
ttagctcctggagag

SEQ ID NO: 1357720 - DNA, 15 bp, Homo sapiens
tttagctcctggaga

SEQ ID NO: 1357721 - DNA, 15 bp, Homo sapiens
ttttagctcctggag

SEQ ID NO: 1357722 - DNA, 15 bp, Homo sapiens
cttttagctcctgga

SEQ ID NO: 1357723 - DNA, 15 bp, Homo sapiens
acttttagctcctgg

SEQ ID NO: 1357724 - DNA, 15 bp, Homo sapiens
gacttttagctcctg

SEQ ID NO: 1357725 - DNA, 15 bp, Homo sapiens
tgacttttagctcct

SEQ ID NO: 1357726 - DNA, 15 bp, Homo sapiens
ctgacttttagctcc

SEQ ID NO: 1357727 - DNA, 15 bp, Homo sapiens
cctgacttttagctc

SEQ ID NO: 1357728 - DNA, 15 bp, Homo sapiens
gcctgacttttagct

SEQ ID NO: 1357729 - DNA, 15 bp, Homo sapiens
tgcctgacttttagc

SEQ ID NO: 1357730 - DNA, 15 bp, Homo sapiens
atgcctgacttttag

SEQ ID NO: 1357731 - DNA, 15 bp, Homo sapiens
gatgcctgactttta

SEQ ID NO: 1357732 - DNA, 15 bp, Homo sapiens
ggatgcctgactttt

SEQ ID NO: 1357733 - DNA, 15 bp, Homo sapiens
gggatgcctgacttt

SEQ ID NO: 1357734 - DNA, 15 bp, Homo sapiens
agggatgcctgactt

SEQ ID NO: 1357735 - DNA, 15 bp, Homo sapiens
cagggatgcctgact

SEQ ID NO: 1357736 - DNA, 15 bp, Homo sapiens
tcagggatgcctgac

SEQ ID NO: 1357737 - DNA, 15 bp, Homo sapiens
atcagggatgcctga

SEQ ID NO: 1357738 - DNA, 15 bp, Homo sapiens
gatcagggatgcctg

SEQ ID NO: 1357739 - DNA, 15 bp, Homo sapiens
agatcagggatgcct

SEQ ID NO: 1357740 - DNA, 15 bp, Homo sapiens
gagatcagggatgcc

SEQ ID NO: 1357741 - DNA, 15 bp, Homo sapiens
ggagatcagggatgc

SEQ ID NO: 1357742 - DNA, 15 bp, Homo sapiens
gggagatcagggatg

SEQ ID NO: 1357743 - DNA, 15 bp, Homo sapiens
ggggagatcagggat

SEQ ID NO: 1357744 - DNA, 15 bp, Homo sapiens
tggggagatcaggga

SEQ ID NO: 1357745 - DNA, 15 bp, Homo sapiens
ctggggagatcaggg

SEQ ID NO: 1357746 - DNA, 15 bp, Homo sapiens
gctggggagatcagg

SEQ ID NO: 1357747 - DNA, 15 bp, Homo sapiens
ggctggggagatcag

SEQ ID NO: 1357748 - DNA, 15 bp, Homo sapiens
gggctggggagatca

SEQ ID NO: 1357749 - DNA, 15 bp, Homo sapiens
tgggctggggagatc

SEQ ID NO: 1357750 - DNA, 15 bp, Homo sapiens
gtgggctggggagat

SEQ ID NO: 1357751 - DNA, 15 bp, Homo sapiens
tgtgggctggggaga

SEQ ID NO: 1357752 - DNA, 15 bp, Homo sapiens
ctgtgggctggggag

SEQ ID NO: 1357753 - DNA, 15 bp, Homo sapiens
cctgtgggctgggga

SEQ ID NO: 1357754 - DNA, 15 bp, Homo sapiens
tcctgtgggctgggg

SEQ ID NO: 1357755 - DNA, 15 bp, Homo sapiens
ttcctgtgggctggg

SEQ ID NO: 1357756 - DNA, 15 bp, Homo sapiens
tttcctgtgggctgg

SEQ ID NO: 1357757 - DNA, 15 bp, Homo sapiens
gtttcctgtgggctg

SEQ ID NO: 1357758 - DNA, 15 bp, Homo sapiens
tgtttcctgtgggct

SEQ ID NO: 1357759 - DNA, 15 bp, Homo sapiens
ctgtttcctgtgggc

SEQ ID NO: 1357760 - DNA, 15 bp, Homo sapiens
actgtttcctgtggg

SEQ ID NO: 1357761 - DNA, 15 bp, Homo sapiens
tactgtttcctgtgg

SEQ ID NO: 1357762 - DNA, 15 bp, Homo sapiens
ctactgtttcctgtg

SEQ ID NO: 1357763 - DNA, 15 bp, Homo sapiens
cctactgtttcctgt

SEQ ID NO: 1357764 - DNA, 15 bp, Homo sapiens
acctactgtttcctg

SEQ ID NO: 1357765 - DNA, 15 bp, Homo sapiens
aacctactgtttcct

SEQ ID NO: 1357766 - DNA, 15 bp, Homo sapiens
gaacctactgtttcc

SEQ ID NO: 1357767 - DNA, 15 bp, Homo sapiens
ggaacctactgtttc

SEQ ID NO: 1357768 - DNA, 15 bp, Homo sapiens
tggaacctactgttt

SEQ ID NO: 1357769 - DNA, 15 bp, Homo sapiens
ctggaacctactgtt

SEQ ID NO: 1357770 - DNA, 15 bp, Homo sapiens
actggaacctactgt

SEQ ID NO: 1357771 - DNA, 15 bp, Homo sapiens
gactggaacctactg

SEQ ID NO: 1357772 - DNA, 15 bp, Homo sapiens
tgactggaacctact

SEQ ID NO: 1357773 - DNA, 15 bp, Homo sapiens
atgactggaacctac

SEQ ID NO: 1357774 - DNA, 15 bp, Homo sapiens
tatgactggaaccta

SEQ ID NO: 1357775 - DNA, 15 bp, Homo sapiens
ctatgactggaacct

SEQ ID NO: 1357776 - DNA, 15 bp, Homo sapiens
tctatgactggaacc

SEQ ID NO: 1357777 - DNA, 15 bp, Homo sapiens
ttctatgactggaac

SEQ ID NO: 1357778 - DNA, 15 bp, Homo sapiens
tttctatgactggaa

SEQ ID NO: 1357779 - DNA, 15 bp, Homo sapiens
atttctatgactgga

SEQ ID NO: 1357780 - DNA, 15 bp, Homo sapiens
catttctatgactgg

SEQ ID NO: 1357781 - DNA, 15 bp, Homo sapiens
gcatttctatgactg

SEQ ID NO: 1357782 - DNA, 15 bp, Homo sapiens
ggcatttctatgact

SEQ ID NO: 1357783 - DNA, 15 bp, Homo sapiens
gggcatttctatgac

SEQ ID NO: 1357784 - DNA, 15 bp, Homo sapiens
ggggcatttctatga

SEQ ID NO: 1357785 - DNA, 15 bp, Homo sapiens
tggggcatttctatg

SEQ ID NO: 1357786 - DNA, 15 bp, Homo sapiens
ttggggcatttctat

SEQ ID NO: 1357787 - DNA, 15 bp, Homo sapiens
tttggggcatttcta

SEQ ID NO: 1357788 - DNA, 15 bp, Homo sapiens
atttggggcatttct

SEQ ID NO: 1357789 - DNA, 15 bp, Homo sapiens
aatttggggcatttc

SEQ ID NO: 1357790 - DNA, 15 bp, Homo sapiens
aaatttggggcattt

SEQ ID NO: 1357791 - DNA, 15 bp, Homo sapiens
gaaatttggggcatt

SEQ ID NO: 1357792 - DNA, 15 bp, Homo sapiens
tgaaatttggggcat

SEQ ID NO: 1357793 - DNA, 15 bp, Homo sapiens
ttgaaatttggggca

SEQ ID NO: 1357794 - DNA, 15 bp, Homo sapiens
tttgaaatttggggc

SEQ ID NO: 1357795 - DNA, 15 bp, Homo sapiens
gtttgaaatttgggg

SEQ ID NO: 1357796 - DNA, 15 bp, Homo sapiens
ggtttgaaatttggg

SEQ ID NO: 1357797 - DNA, 15 bp, Homo sapiens
gggtttgaaatttgg

SEQ ID NO: 1357798 - DNA, 15 bp, Homo sapiens
agggtttgaaatttg

SEQ ID NO: 1357799 - DNA, 15 bp, Homo sapiens
gagggtttgaaattt

SEQ ID NO: 1357800 - DNA, 15 bp, Homo sapiens
agagggtttgaaatt

SEQ ID NO: 1357801 - DNA, 15 bp, Homo sapiens
tagagggtttgaaat

SEQ ID NO: 1357802 - DNA, 15 bp, Homo sapiens
ctagagggtttgaaa

SEQ ID NO: 1357803 - DNA, 15 bp, Homo sapiens
gctagagggtttgaa

SEQ ID NO: 1357804 - DNA, 15 bp, Homo sapiens
ggctagagggtttga

SEQ ID NO: 1357805 - DNA, 15 bp, Homo sapiens
aggctagagggtttg

SEQ ID NO: 1357806 - DNA, 15 bp, Homo sapiens
caggctagagggttt

SEQ ID NO: 1357807 - DNA, 15 bp, Homo sapiens
tcaggctagagggtt

SEQ ID NO: 1357808 - DNA, 15 bp, Homo sapiens
gtcaggctagagggt

SEQ ID NO: 1357809 - DNA, 15 bp, Homo sapiens
agtcaggctagaggg

SEQ ID NO: 1357810 - DNA, 15 bp, Homo sapiens
aagtcaggctagagg

SEQ ID NO: 1357811 - DNA, 15 bp, Homo sapiens
aaagtcaggctagag

SEQ ID NO: 1357812 - DNA, 15 bp, Homo sapiens
gaaagtcaggctaga

SEQ ID NO: 1357813 - DNA, 15 bp, Homo sapiens
agaaagtcaggctag

SEQ ID NO: 1357814 - DNA, 15 bp, Homo sapiens
aagaaagtcaggcta

SEQ ID NO: 1357815 - DNA, 15 bp, Homo sapiens
taagaaagtcaggct

SEQ ID NO: 1357816 - DNA, 15 bp, Homo sapiens
ctaagaaagtcaggc

SEQ ID NO: 1357817 - DNA, 15 bp, Homo sapiens
cctaagaaagtcagg

SEQ ID NO: 1357818 - DNA, 15 bp, Homo sapiens
ccctaagaaagtcag

SEQ ID NO: 1357819 - DNA, 15 bp, Homo sapiens
tccctaagaaagtca

SEQ ID NO: 1357820 - DNA, 15 bp, Homo sapiens
gtccctaagaaagtc

SEQ ID NO: 1357821 - DNA, 15 bp, Homo sapiens
agtccctaagaaagt

SEQ ID NO: 1357822 - DNA, 15 bp, Homo sapiens
gagtccctaagaaag

SEQ ID NO: 1357823 - DNA, 15 bp, Homo sapiens
cgagtccctaagaaa

SEQ ID NO: 1357824 - DNA, 15 bp, Homo sapiens
gcgagtccctaagaa

SEQ ID NO: 1357825 - DNA, 15 bp, Homo sapiens
ggcgagtccctaaga

SEQ ID NO: 1357826 - DNA, 15 bp, Homo sapiens
gggcgagtccctaag

SEQ ID NO: 1357827 - DNA, 15 bp, Homo sapiens
agggcgagtccctaa

SEQ ID NO: 1357828 - DNA, 15 bp, Homo sapiens
cagggcgagtcccta

SEQ ID NO: 1357829 - DNA, 15 bp, Homo sapiens
acagggcgagtccct

SEQ ID NO: 1357830 - DNA, 15 bp, Homo sapiens
aacagggcgagtccc

SEQ ID NO: 1357831 - DNA, 15 bp, Homo sapiens
caacagggcgagtcc

SEQ ID NO: 1357832 - DNA, 15 bp, Homo sapiens
acaacagggcgagtc

SEQ ID NO: 1357833 - DNA, 15 bp, Homo sapiens
aacaacagggcgagt

SEQ ID NO: 1357834 - DNA, 15 bp, Homo sapiens
aaacaacagggcgag

SEQ ID NO: 1357835 - DNA, 15 bp, Homo sapiens
gaaacaacagggcga

SEQ ID NO: 1357836 - DNA, 15 bp, Homo sapiens
agaaacaacagggcg

SEQ ID NO: 1357837 - DNA, 15 bp, Homo sapiens
tagaaacaacagggc

SEQ ID NO: 1357838 - DNA, 15 bp, Homo sapiens
ctagaaacaacaggg

SEQ ID NO: 1357839 - DNA, 15 bp, Homo sapiens
cctagaaacaacagg

SEQ ID NO: 1357840 - DNA, 15 bp, Homo sapiens
acctagaaacaacag

SEQ ID NO: 1357841 - DNA, 15 bp, Homo sapiens
tacctagaaacaaca

SEQ ID NO: 1357842 - DNA, 15 bp, Homo sapiens
gtacctagaaacaac

SEQ ID NO: 1357843 - DNA, 15 bp, Homo sapiens
agtacctagaaacaa

SEQ ID NO: 1357844 - DNA, 15 bp, Homo sapiens
aagtacctagaaaca

SEQ ID NO: 1357845 - DNA, 15 bp, Homo sapiens
aaagtacctagaaac

SEQ ID NO: 1357846 - DNA, 15 bp, Homo sapiens
gaaagtacctagaaa

SEQ ID NO: 1357847 - DNA, 15 bp, Homo sapiens
tgaaagtacctagaa

SEQ ID NO: 1357848 - DNA, 15 bp, Homo sapiens
ttgaaagtacctaga

SEQ ID NO: 1357849 - DNA, 15 bp, Homo sapiens
cttgaaagtacctag

SEQ ID NO: 1357850 - DNA, 15 bp, Homo sapiens
ccttgaaagtaccta

SEQ ID NO: 1357851 - DNA, 15 bp, Homo sapiens
tccttgaaagtacct

SEQ ID NO: 1357852 - DNA, 15 bp, Homo sapiens
atccttgaaagtacc

SEQ ID NO: 1357853 - DNA, 15 bp, Homo sapiens
aatccttgaaagtac

SEQ ID NO: 1357854 - DNA, 15 bp, Homo sapiens
gaatccttgaaagta

SEQ ID NO: 1357855 - DNA, 15 bp, Homo sapiens
ggaatccttgaaagt

SEQ ID NO: 1357856 - DNA, 15 bp, Homo sapiens
aggaatccttgaaag

SEQ ID NO: 1357857 - DNA, 15 bp, Homo sapiens
gaggaatccttgaaa

SEQ ID NO: 1357858 - DNA, 15 bp, Homo sapiens
tgaggaatccttgaa

SEQ ID NO: 1357859 - DNA, 15 bp, Homo sapiens
gtgaggaatccttga

SEQ ID NO: 1357860 - DNA, 15 bp, Homo sapiens
tgtgaggaatccttg

SEQ ID NO: 1357861 - DNA, 15 bp, Homo sapiens
gtgtgaggaatcctt

SEQ ID NO: 1357862 - DNA, 15 bp, Homo sapiens
tgtgtgaggaatcct

SEQ ID NO: 1357863 - DNA, 15 bp, Homo sapiens
gtgtgtgaggaatcc

SEQ ID NO: 1357864 - DNA, 15 bp, Homo sapiens
cgtgtgtgaggaatc

SEQ ID NO: 1357865 - DNA, 15 bp, Homo sapiens
acgtgtgtgaggaat

SEQ ID NO: 1357866 - DNA, 15 bp, Homo sapiens
aacgtgtgtgaggaa

SEQ ID NO: 1357867 - DNA, 15 bp, Homo sapiens
caacgtgtgtgagga

SEQ ID NO: 1357868 - DNA, 15 bp, Homo sapiens
gcaacgtgtgtgagg

SEQ ID NO: 1357869 - DNA, 15 bp, Homo sapiens
ggcaacgtgtgtgag

SEQ ID NO: 1357870 - DNA, 15 bp, Homo sapiens
aggcaacgtgtgtga

SEQ ID NO: 1357871 - DNA, 15 bp, Homo sapiens
aaggcaacgtgtgtg

SEQ ID NO: 1357872 - DNA, 15 bp, Homo sapiens
gaaggcaacgtgtgt

SEQ ID NO: 1357873 - DNA, 15 bp, Homo sapiens
agaaggcaacgtgtg

SEQ ID NO: 1357874 - DNA, 15 bp, Homo sapiens
aagaaggcaacgtgt

SEQ ID NO: 1357875 - DNA, 15 bp, Homo sapiens
gaagaaggcaacgtg

SEQ ID NO: 1357876 - DNA, 15 bp, Homo sapiens
agaagaaggcaacgt

SEQ ID NO: 1357877 - DNA, 15 bp, Homo sapiens
aagaagaaggcaacg

SEQ ID NO: 1357878 - DNA, 15 bp, Homo sapiens
gaagaagaaggcaac

SEQ ID NO: 1357879 - DNA, 15 bp, Homo sapiens
ggaagaagaaggcaa

SEQ ID NO: 1357880 - DNA, 15 bp, Homo sapiens
aggaagaagaaggca

SEQ ID NO: 1357881 - DNA, 15 bp, Homo sapiens
gaggaagaagaaggc

SEQ ID NO: 1357882 - DNA, 15 bp, Homo sapiens
tgaggaagaagaagg

SEQ ID NO: 1357883 - DNA, 15 bp, Homo sapiens
ttgaggaagaagaag

SEQ ID NO: 1357884 - DNA, 15 bp, Homo sapiens
attgaggaagaagaa

SEQ ID NO: 1357885 - DNA, 15 bp, Homo sapiens
gattgaggaagaaga

SEQ ID NO: 1357886 - DNA, 15 bp, Homo sapiens
agattgaggaagaag

SEQ ID NO: 1357887 - DNA, 15 bp, Homo sapiens
tagattgaggaagaa

SEQ ID NO: 1357888 - DNA, 15 bp, Homo sapiens
gtagattgaggaaga

SEQ ID NO: 1357889 - DNA, 15 bp, Homo sapiens
tgtagattgaggaag

SEQ ID NO: 1357890 - DNA, 15 bp, Homo sapiens
atgtagattgaggaa

SEQ ID NO: 1357891 - DNA, 15 bp, Homo sapiens
aatgtagattgagga

SEQ ID NO: 1357892 - DNA, 15 bp, Homo sapiens
caatgtagattgagg

SEQ ID NO: 1357893 - DNA, 15 bp, Homo sapiens
gcaatgtagattgag

SEQ ID NO: 1357894 - DNA, 15 bp, Homo sapiens
ggcaatgtagattga

SEQ ID NO: 1357895 - DNA, 15 bp, Homo sapiens
aggcaatgtagattg

SEQ ID NO: 1357896 - DNA, 15 bp, Homo sapiens
caggcaatgtagatt

SEQ ID NO: 1357897 - DNA, 15 bp, Homo sapiens
acaggcaatgtagat

SEQ ID NO: 1357898 - DNA, 15 bp, Homo sapiens
aacaggcaatgtaga

SEQ ID NO: 1357899 - DNA, 15 bp, Homo sapiens
caacaggcaatgtag

SEQ ID NO: 1357900 - DNA, 15 bp, Homo sapiens
acaacaggcaatgta

SEQ ID NO: 1357901 - DNA, 15 bp, Homo sapiens
cacaacaggcaatgt

SEQ ID NO: 1357902 - DNA, 15 bp, Homo sapiens
tcacaacaggcaatg

SEQ ID NO: 1357903 - DNA, 15 bp, Homo sapiens
atcacaacaggcaat

SEQ ID NO: 1357904 - DNA, 15 bp, Homo sapiens
tatcacaacaggcaa

SEQ ID NO: 1357905 - DNA, 15 bp, Homo sapiens
gtatcacaacaggca

SEQ ID NO: 1357906 - DNA, 15 bp, Homo sapiens
ggtatcacaacaggc

SEQ ID NO: 1357907 - DNA, 15 bp, Homo sapiens
tggtatcacaacagg

SEQ ID NO: 1357908 - DNA, 15 bp, Homo sapiens
gtggtatcacaacag

SEQ ID NO: 1357909 - DNA, 15 bp, Homo sapiens
agtggtatcacaaca

SEQ ID NO: 1357910 - DNA, 15 bp, Homo sapiens
aagtggtatcacaac

SEQ ID NO: 1357911 - DNA, 15 bp, Homo sapiens
gaagtggtatcacaa

SEQ ID NO: 1357912 - DNA, 15 bp, Homo sapiens
ggaagtggtatcaca

SEQ ID NO: 1357913 - DNA, 15 bp, Homo sapiens
gggaagtggtatcac

SEQ ID NO: 1357914 - DNA, 15 bp, Homo sapiens
tgggaagtggtatca

SEQ ID NO: 1357915 - DNA, 15 bp, Homo sapiens
ctgggaagtggtatc

SEQ ID NO: 1357916 - DNA, 15 bp, Homo sapiens
actgggaagtggtat

SEQ ID NO: 1357917 - DNA, 15 bp, Homo sapiens
aactgggaagtggta

SEQ ID NO: 1357918 - DNA, 15 bp, Homo sapiens
gaactgggaagtggt

SEQ ID NO: 1357919 - DNA, 15 bp, Homo sapiens
agaactgggaagtgg

SEQ ID NO: 1357920 - DNA, 15 bp, Homo sapiens
gagaactgggaagtg

SEQ ID NO: 1357921 - DNA, 15 bp, Homo sapiens
tgagaactgggaagt

SEQ ID NO: 1357922 - DNA, 15 bp, Homo sapiens
ctgagaactgggaag

SEQ ID NO: 1357923 - DNA, 15 bp, Homo sapiens
tctgagaactgggaa

SEQ ID NO: 1357924 - DNA, 15 bp, Homo sapiens
ctctgagaactggga

SEQ ID NO: 1357925 - DNA, 15 bp, Homo sapiens
gctctgagaactggg

SEQ ID NO: 1357926 - DNA, 15 bp, Homo sapiens
agctctgagaactgg

SEQ ID NO: 1357927 - DNA, 15 bp, Homo sapiens
cagctctgagaactg

SEQ ID NO: 1357928 - DNA, 15 bp, Homo sapiens
acagctctgagaact

SEQ ID NO: 1357929 - DNA, 15 bp, Homo sapiens
gacagctctgagaac

SEQ ID NO: 1357930 - DNA, 15 bp, Homo sapiens
agacagctctgagaa

SEQ ID NO: 1357931 - DNA, 15 bp, Homo sapiens
cagacagctctgaga

SEQ ID NO: 1357932 - DNA, 15 bp, Homo sapiens
tcagacagctctgag

SEQ ID NO: 1357933 - DNA, 15 bp, Homo sapiens
ctcagacagctctga

SEQ ID NO: 1357934 - DNA, 15 bp, Homo sapiens
tctcagacagctctg

SEQ ID NO: 1357935 - DNA, 15 bp, Homo sapiens
ttctcagacagctct

SEQ ID NO: 1357936 - DNA, 15 bp, Homo sapiens
gttctcagacagctc

SEQ ID NO: 1357937 - DNA, 15 bp, Homo sapiens
cgttctcagacagct

SEQ ID NO: 1357938 - DNA, 15 bp, Homo sapiens
gcgttctcagacagc

SEQ ID NO: 1357939 - DNA, 15 bp, Homo sapiens
ggcgttctcagacag

SEQ ID NO: 1357940 - DNA, 15 bp, Homo sapiens
tggcgttctcagaca

SEQ ID NO: 1357941 - DNA, 15 bp, Homo sapiens
ttggcgttctcagac

SEQ ID NO: 1357942 - DNA, 15 bp, Homo sapiens
gttggcgttctcaga

SEQ ID NO: 1357943 - DNA, 15 bp, Homo sapiens
agttggcgttctcag

SEQ ID NO: 1357944 - DNA, 15 bp, Homo sapiens
gagttggcgttctca

SEQ ID NO: 1357945 - DNA, 15 bp, Homo sapiens
agagttggcgttctc

SEQ ID NO: 1357946 - DNA, 15 bp, Homo sapiens
cagagttggcgttct

SEQ ID NO: 1357947 - DNA, 15 bp, Homo sapiens
acagagttggcgttc

SEQ ID NO: 1357948 - DNA, 15 bp, Homo sapiens
gacagagttggcgtt

SEQ ID NO: 1357949 - DNA, 15 bp, Homo sapiens
agacagagttggcgt

SEQ ID NO: 1357950 - DNA, 15 bp, Homo sapiens
aagacagagttggcg

SEQ ID NO: 1357951 - DNA, 15 bp, Homo sapiens
gaagacagagttggc

SEQ ID NO: 1357952 - DNA, 15 bp, Homo sapiens
tgaagacagagttgg

SEQ ID NO: 1357953 - DNA, 15 bp, Homo sapiens
ttgaagacagagttg

SEQ ID NO: 1357954 - DNA, 15 bp, Homo sapiens
attgaagacagagtt

SEQ ID NO: 1357955 - DNA, 15 bp, Homo sapiens
tattgaagacagagt

SEQ ID NO: 1357956 - DNA, 15 bp, Homo sapiens
atattgaagacagag

SEQ ID NO: 1357957 - DNA, 15 bp, Homo sapiens
gatattgaagacaga

SEQ ID NO: 1357958 - DNA, 15 bp, Homo sapiens
tgatattgaagacag

SEQ ID NO: 1357959 - DNA, 15 bp, Homo sapiens
atgatattgaagaca

SEQ ID NO: 1357960 - DNA, 15 bp, Homo sapiens
gatgatattgaagac

SEQ ID NO: 1357961 - DNA, 15 bp, Homo sapiens
tgatgatattgaaga

SEQ ID NO: 1357962 - DNA, 15 bp, Homo sapiens
atgatgatattgaag

SEQ ID NO: 1357963 - DNA, 15 bp, Homo sapiens
gatgatgatattgaa

SEQ ID NO: 1357964 - DNA, 15 bp, Homo sapiens
ggatgatgatattga

SEQ ID NO: 1357965 - DNA, 15 bp, Homo sapiens
gggatgatgatattg

SEQ ID NO: 1357966 - DNA, 15 bp, Homo sapiens
agggatgatgatatt

SEQ ID NO: 1357967 - DNA, 15 bp, Homo sapiens
gagggatgatgatat

SEQ ID NO: 1357968 - DNA, 15 bp, Homo sapiens
tgagggatgatgata

SEQ ID NO: 1357969 - DNA, 15 bp, Homo sapiens
ttgagggatgatgat

SEQ ID NO: 1357970 - DNA, 15 bp, Homo sapiens
cttgagggatgatga

SEQ ID NO: 1357971 - DNA, 15 bp, Homo sapiens
tcttgagggatgatg

SEQ ID NO: 1357972 - DNA, 15 bp, Homo sapiens
ctcttgagggatgat

SEQ ID NO: 1357973 - DNA, 15 bp, Homo sapiens
gctcttgagggatga

SEQ ID NO: 1357974 - DNA, 15 bp, Homo sapiens
agctcttgagggatg

SEQ ID NO: 1357975 - DNA, 15 bp, Homo sapiens
aagctcttgagggat

SEQ ID NO: 1357976 - DNA, 15 bp, Homo sapiens
taagctcttgaggga

SEQ ID NO: 1357977 - DNA, 15 bp, Homo sapiens
ctaagctcttgaggg

SEQ ID NO: 1357978 - DNA, 15 bp, Homo sapiens
tctaagctcttgagg

SEQ ID NO: 1357979 - DNA, 15 bp, Homo sapiens
gtctaagctcttgag

SEQ ID NO: 1357980 - DNA, 15 bp, Homo sapiens
ggtctaagctcttga

SEQ ID NO: 1357981 - DNA, 15 bp, Homo sapiens
aggtctaagctcttg

SEQ ID NO: 1357982 - DNA, 15 bp, Homo sapiens
aaggtctaagctctt

SEQ ID NO: 1357983 - DNA, 15 bp, Homo sapiens
caaggtctaagctct

SEQ ID NO: 1357984 - DNA, 15 bp, Homo sapiens
gcaaggtctaagctc

SEQ ID NO: 1357985 - DNA, 15 bp, Homo sapiens
ggcaaggtctaagct

SEQ ID NO: 1357986 - DNA, 15 bp, Homo sapiens
gggcaaggtctaagc

SEQ ID NO: 1357987 - DNA, 15 bp, Homo sapiens
tgggcaaggtctaag

SEQ ID NO: 1357988 - DNA, 15 bp, Homo sapiens
atgggcaaggtctaa

SEQ ID NO: 1357989 - DNA, 15 bp, Homo sapiens
catgggcaaggtcta

SEQ ID NO: 1357990 - DNA, 15 bp, Homo sapiens
ccatgggcaaggtct

SEQ ID NO: 1357991 - DNA, 15 bp, Homo sapiens
tccatgggcaaggtc

SEQ ID NO: 1357992 - DNA, 15 bp, Homo sapiens
ttccatgggcaaggt

SEQ ID NO: 1357993 - DNA, 15 bp, Homo sapiens
gttccatgggcaagg

SEQ ID NO: 1357994 - DNA, 15 bp, Homo sapiens
agttccatgggcaag

SEQ ID NO: 1357995 - DNA, 15 bp, Homo sapiens
tagttccatgggcaa

SEQ ID NO: 1357996 - DNA, 15 bp, Homo sapiens
gtagttccatgggca

SEQ ID NO: 1357997 - DNA, 15 bp, Homo sapiens
ggtagttccatgggc

SEQ ID NO: 1357998 - DNA, 15 bp, Homo sapiens
tggtagttccatggg

SEQ ID NO: 1357999 - DNA, 15 bp, Homo sapiens
ctggtagttccatgg

SEQ ID NO: 1358000 - DNA, 15 bp, Homo sapiens
tctggtagttccatg

SEQ ID NO: 1358001 - DNA, 15 bp, Homo sapiens
ttctggtagttccat

SEQ ID NO: 1358002 - DNA, 15 bp, Homo sapiens
cttctggtagttcca

SEQ ID NO: 1358003 - DNA, 15 bp, Homo sapiens
ccttctggtagttcc

SEQ ID NO: 1358004 - DNA, 15 bp, Homo sapiens
tccttctggtagttc

SEQ ID NO: 1358005 - DNA, 15 bp, Homo sapiens
atccttctggtagtt

SEQ ID NO: 1358006 - DNA, 15 bp, Homo sapiens
tatccttctggtagt

SEQ ID NO: 1358007 - DNA, 15 bp, Homo sapiens
atatccttctggtag

SEQ ID NO: 1358008 - DNA, 15 bp, Homo sapiens
tatatccttctggta

SEQ ID NO: 1358009 - DNA, 15 bp, Homo sapiens
ctatatccttctggt

SEQ ID NO: 1358010 - DNA, 15 bp, Homo sapiens
tctatatccttctgg

SEQ ID NO: 1358011 - DNA, 15 bp, Homo sapiens
ctctatatccttctg

SEQ ID NO: 1358012 - DNA, 15 bp, Homo sapiens
cctctatatccttct

SEQ ID NO: 1358013 - DNA, 15 bp, Homo sapiens
gcctctatatccttc

SEQ ID NO: 1358014 - DNA, 15 bp, Homo sapiens
tgcctctatatcctt

SEQ ID NO: 1358015 - DNA, 15 bp, Homo sapiens
atgcctctatatcct

SEQ ID NO: 1358016 - DNA, 15 bp, Homo sapiens
tatgcctctatatcc

SEQ ID NO: 1358017 - DNA, 15 bp, Homo sapiens
atatgcctctatatc

SEQ ID NO: 1358018 - DNA, 15 bp, Homo sapiens
catatgcctctatat

SEQ ID NO: 1358019 - DNA, 15 bp, Homo sapiens
gcatatgcctctata

SEQ ID NO: 1358020 - DNA, 15 bp, Homo sapiens
ggcatatgcctctat

SEQ ID NO: 1358021 - DNA, 15 bp, Homo sapiens
tggcatatgcctcta

SEQ ID NO: 1358022 - DNA, 15 bp, Homo sapiens
ctggcatatgcctct

SEQ ID NO: 1358023 - DNA, 15 bp, Homo sapiens
actggcatatgcctc

SEQ ID NO: 1358024 - DNA, 15 bp, Homo sapiens
gactggcatatgcct

SEQ ID NO: 1358025 - DNA, 15 bp, Homo sapiens
agactggcatatgcc

SEQ ID NO: 1358026 - DNA, 15 bp, Homo sapiens
aagactggcatatgc

SEQ ID NO: 1358027 - DNA, 15 bp, Homo sapiens
aaagactggcatatg

SEQ ID NO: 1358028 - DNA, 15 bp, Homo sapiens
aaaagactggcatat

SEQ ID NO: 1358029 - DNA, 15 bp, Homo sapiens
gaaaagactggcata

SEQ ID NO: 1358030 - DNA, 15 bp, Homo sapiens
ggaaaagactggcat

SEQ ID NO: 1358031 - DNA, 15 bp, Homo sapiens
tggaaaagactggca

SEQ ID NO: 1358032 - DNA, 15 bp, Homo sapiens
atggaaaagactggc

SEQ ID NO: 1358033 - DNA, 15 bp, Homo sapiens
gatggaaaagactgg

SEQ ID NO: 1358034 - DNA, 15 bp, Homo sapiens
ggatggaaaagactg

SEQ ID NO: 1358035 - DNA, 15 bp, Homo sapiens
gggatggaaaagact

SEQ ID NO: 1358036 - DNA, 15 bp, Homo sapiens
agggatggaaaagac

SEQ ID NO: 1358037 - DNA, 15 bp, Homo sapiens
aagggatggaaaaga

SEQ ID NO: 1358038 - DNA, 15 bp, Homo sapiens
aaagggatggaaaag

SEQ ID NO: 1358039 - DNA, 15 bp, Homo sapiens
aaaagggatggaaaa

SEQ ID NO: 1358040 - DNA, 15 bp, Homo sapiens
gaaaagggatggaaa

SEQ ID NO: 1358041 - DNA, 15 bp, Homo sapiens
tgaaaagggatggaa

SEQ ID NO: 1358042 - DNA, 15 bp, Homo sapiens
gtgaaaagggatgga

SEQ ID NO: 1358043 - DNA, 15 bp, Homo sapiens
tgtgaaaagggatgg

SEQ ID NO: 1358044 - DNA, 15 bp, Homo sapiens
gtgtgaaaagggatg

SEQ ID NO: 1358045 - DNA, 15 bp, Homo sapiens
agtgtgaaaagggat

SEQ ID NO: 1358046 - DNA, 15 bp, Homo sapiens
aagtgtgaaaaggga

SEQ ID NO: 1358047 - DNA, 15 bp, Homo sapiens
gaagtgtgaaaaggg

SEQ ID NO: 1358048 - DNA, 15 bp, Homo sapiens
tgaagtgtgaaaagg

SEQ ID NO: 1358049 - DNA, 15 bp, Homo sapiens
gtgaagtgtgaaaag

SEQ ID NO: 1358050 - DNA, 15 bp, Homo sapiens
tgtgaagtgtgaaaa

SEQ ID NO: 1358051 - DNA, 15 bp, Homo sapiens
gtgtgaagtgtgaaa

SEQ ID NO: 1358052 - DNA, 15 bp, Homo sapiens
ggtgtgaagtgtgaa

SEQ ID NO: 1358053 - DNA, 15 bp, Homo sapiens
aggtgtgaagtgtga

SEQ ID NO: 1358054 - DNA, 15 bp, Homo sapiens
aaggtgtgaagtgtg

SEQ ID NO: 1358055 - DNA, 15 bp, Homo sapiens
aaaggtgtgaagtgt

SEQ ID NO: 1358056 - DNA, 15 bp, Homo sapiens
taaaggtgtgaagtg

SEQ ID NO: 1358057 - DNA, 15 bp, Homo sapiens
ctaaaggtgtgaagt

SEQ ID NO: 1358058 - DNA, 15 bp, Homo sapiens
tctaaaggtgtgaag

SEQ ID NO: 1358059 - DNA, 15 bp, Homo sapiens
atctaaaggtgtgaa

SEQ ID NO: 1358060 - DNA, 15 bp, Homo sapiens
tatctaaaggtgtga

SEQ ID NO: 1358061 - DNA, 15 bp, Homo sapiens
atatctaaaggtgtg

SEQ ID NO: 1358062 - DNA, 15 bp, Homo sapiens
gatatctaaaggtgt

SEQ ID NO: 1358063 - DNA, 15 bp, Homo sapiens
ggatatctaaaggtg

SEQ ID NO: 1358064 - DNA, 15 bp, Homo sapiens
tggatatctaaaggt

SEQ ID NO: 1358065 - DNA, 15 bp, Homo sapiens
ttggatatctaaagg

SEQ ID NO: 1358066 - DNA, 15 bp, Homo sapiens
attggatatctaaag

SEQ ID NO: 1358067 - DNA, 15 bp, Homo sapiens
gattggatatctaaa

SEQ ID NO: 1358068 - DNA, 15 bp, Homo sapiens
tgattggatatctaa

SEQ ID NO: 1358069 - DNA, 15 bp, Homo sapiens
ttgattggatatcta

SEQ ID NO: 1358070 - DNA, 15 bp, Homo sapiens
gttgattggatatct

SEQ ID NO: 1358071 - DNA, 15 bp, Homo sapiens
tgttgattggatatc

SEQ ID NO: 1358072 - DNA, 15 bp, Homo sapiens
ctgttgattggatat

SEQ ID NO: 1358073 - DNA, 15 bp, Homo sapiens
gctgttgattggata

SEQ ID NO: 1358074 - DNA, 15 bp, Homo sapiens
ggctgttgattggat

SEQ ID NO: 1358075 - DNA, 15 bp, Homo sapiens
aggctgttgattgga

SEQ ID NO: 1358076 - DNA, 15 bp, Homo sapiens
aaggctgttgattgg

SEQ ID NO: 1358077 - DNA, 15 bp, Homo sapiens
gaaggctgttgattg

SEQ ID NO: 1358078 - DNA, 15 bp, Homo sapiens
agaaggctgttgatt

SEQ ID NO: 1358079 - DNA, 15 bp, Homo sapiens
gagaaggctgttgat

SEQ ID NO: 1358080 - DNA, 15 bp, Homo sapiens
tgagaaggctgttga

SEQ ID NO: 1358081 - DNA, 15 bp, Homo sapiens
gtgagaaggctgttg

SEQ ID NO: 1358082 - DNA, 15 bp, Homo sapiens
tgtgagaaggctgtt

SEQ ID NO: 1358083 - DNA, 15 bp, Homo sapiens
ctgtgagaaggctgt

SEQ ID NO: 1358084 - DNA, 15 bp, Homo sapiens
tctgtgagaaggctg

SEQ ID NO: 1358085 - DNA, 15 bp, Homo sapiens
gtctgtgagaaggct

SEQ ID NO: 1358086 - DNA, 15 bp, Homo sapiens
ggtctgtgagaaggc

SEQ ID NO: 1358087 - DNA, 15 bp, Homo sapiens
tggtctgtgagaagg

SEQ ID NO: 1358088 - DNA, 15 bp, Homo sapiens
atggtctgtgagaag

SEQ ID NO: 1358089 - DNA, 15 bp, Homo sapiens
catggtctgtgagaa

SEQ ID NO: 1358090 - DNA, 15 bp, Homo sapiens
acatggtctgtgaga

SEQ ID NO: 1358091 - DNA, 15 bp, Homo sapiens
gacatggtctgtgag

SEQ ID NO: 1358092 - DNA, 15 bp, Homo sapiens
ggacatggtctgtga

SEQ ID NO: 1358093 - DNA, 15 bp, Homo sapiens
aggacatggtctgtg

SEQ ID NO: 1358094 - DNA, 15 bp, Homo sapiens
gaggacatggtctgt

SEQ ID NO: 1358095 - DNA, 15 bp, Homo sapiens
agaggacatggtctg

SEQ ID NO: 1358096 - DNA, 15 bp, Homo sapiens
cagaggacatggtct

SEQ ID NO: 1358097 - DNA, 15 bp, Homo sapiens
tcagaggacatggtc

SEQ ID NO: 1358098 - DNA, 15 bp, Homo sapiens
ctcagaggacatggt

SEQ ID NO: 1358099 - DNA, 15 bp, Homo sapiens
cctcagaggacatgg

SEQ ID NO: 1358100 - DNA, 15 bp, Homo sapiens
gcctcagaggacatg

SEQ ID NO: 1358101 - DNA, 15 bp, Homo sapiens
tgcctcagaggacat

SEQ ID NO: 1358102 - DNA, 15 bp, Homo sapiens
ttgcctcagaggaca

SEQ ID NO: 1358103 - DNA, 15 bp, Homo sapiens
tttgcctcagaggac

SEQ ID NO: 1358104 - DNA, 15 bp, Homo sapiens
gtttgcctcagagga

SEQ ID NO: 1358105 - DNA, 15 bp, Homo sapiens
ggtttgcctcagagg

SEQ ID NO: 1358106 - DNA, 15 bp, Homo sapiens
tggtttgcctcagag

SEQ ID NO: 1358107 - DNA, 15 bp, Homo sapiens
ctggtttgcctcaga

SEQ ID NO: 1358108 - DNA, 15 bp, Homo sapiens
gctggtttgcctcag

SEQ ID NO: 1358109 - DNA, 15 bp, Homo sapiens
tgctggtttgcctca

SEQ ID NO: 1358110 - DNA, 15 bp, Homo sapiens
gtgctggtttgcctc

SEQ ID NO: 1358111 - DNA, 15 bp, Homo sapiens
tgtgctggtttgcct

SEQ ID NO: 1358112 - DNA, 15 bp, Homo sapiens
atgtgctggtttgcc

SEQ ID NO: 1358113 - DNA, 15 bp, Homo sapiens
aatgtgctggtttgc

SEQ ID NO: 1358114 - DNA, 15 bp, Homo sapiens
taatgtgctggtttg

SEQ ID NO: 1358115 - DNA, 15 bp, Homo sapiens
ttaatgtgctggttt

SEQ ID NO: 1358116 - DNA, 15 bp, Homo sapiens
tttaatgtgctggtt

SEQ ID NO: 1358117 - DNA, 15 bp, Homo sapiens
atttaatgtgctggt

SEQ ID NO: 1358118 - DNA, 15 bp, Homo sapiens
tatttaatgtgctgg

SEQ ID NO: 1358119 - DNA, 15 bp, Homo sapiens
gtatttaatgtgctg

SEQ ID NO: 1358120 - DNA, 15 bp, Homo sapiens
agtatttaatgtgct

SEQ ID NO: 1358121 - DNA, 15 bp, Homo sapiens
gagtatttaatgtgc

SEQ ID NO: 1358122 - DNA, 15 bp, Homo sapiens
ggagtatttaatgtg

SEQ ID NO: 1358123 - DNA, 15 bp, Homo sapiens
gggagtatttaatgt

SEQ ID NO: 1358124 - DNA, 15 bp, Homo sapiens
ggggagtatttaatg

SEQ ID NO: 1358125 - DNA, 15 bp, Homo sapiens
gggggagtatttaat

SEQ ID NO: 1358126 - DNA, 15 bp, Homo sapiens
tgggggagtatttaa

SEQ ID NO: 1358127 - DNA, 15 bp, Homo sapiens
ctgggggagtattta

SEQ ID NO: 1358128 - DNA, 15 bp, Homo sapiens
actgggggagtattt

SEQ ID NO: 1358129 - DNA, 15 bp, Homo sapiens
aactgggggagtatt

SEQ ID NO: 1358130 - DNA, 15 bp, Homo sapiens
gaactgggggagtat

SEQ ID NO: 1358131 - DNA, 15 bp, Homo sapiens
ggaactgggggagta

SEQ ID NO: 1358132 - DNA, 15 bp, Homo sapiens
tggaactgggggagt

SEQ ID NO: 1358133 - DNA, 15 bp, Homo sapiens
gtggaactgggggag

SEQ ID NO: 1358134 - DNA, 15 bp, Homo sapiens
ggtggaactggggga

SEQ ID NO: 1358135 - DNA, 15 bp, Homo sapiens
tggtggaactggggg

SEQ ID NO: 1358136 - DNA, 15 bp, Homo sapiens
atggtggaactgggg

SEQ ID NO: 1358137 - DNA, 15 bp, Homo sapiens
catggtggaactggg

SEQ ID NO: 1358138 - DNA, 15 bp, Homo sapiens
acatggtggaactgg

SEQ ID NO: 1358139 - DNA, 15 bp, Homo sapiens
gacatggtggaactg

SEQ ID NO: 1358140 - DNA, 15 bp, Homo sapiens
tgacatggtggaact

SEQ ID NO: 1358141 - DNA, 15 bp, Homo sapiens
gtgacatggtggaac

SEQ ID NO: 1358142 - DNA, 15 bp, Homo sapiens
agtgacatggtggaa

SEQ ID NO: 1358143 - DNA, 15 bp, Homo sapiens
tagtgacatggtgga

SEQ ID NO: 1358144 - DNA, 15 bp, Homo sapiens
ttagtgacatggtgg

SEQ ID NO: 1358145 - DNA, 15 bp, Homo sapiens
gttagtgacatggtg

SEQ ID NO: 1358146 - DNA, 15 bp, Homo sapiens
agttagtgacatggt

SEQ ID NO: 1358147 - DNA, 15 bp, Homo sapiens
cagttagtgacatgg

SEQ ID NO: 1358148 - DNA, 15 bp, Homo sapiens
acagttagtgacatg

SEQ ID NO: 1358149 - DNA, 15 bp, Homo sapiens
tacagttagtgacat

SEQ ID NO: 1358150 - DNA, 15 bp, Homo sapiens
gtacagttagtgaca

SEQ ID NO: 1358151 - DNA, 15 bp, Homo sapiens
ggtacagttagtgac

SEQ ID NO: 1358152 - DNA, 15 bp, Homo sapiens
aggtacagttagtga

SEQ ID NO: 1358153 - DNA, 15 bp, Homo sapiens
caggtacagttagtg

SEQ ID NO: 1358154 - DNA, 15 bp, Homo sapiens
ccaggtacagttagt

SEQ ID NO: 1358155 - DNA, 15 bp, Homo sapiens
accaggtacagttag

SEQ ID NO: 1358156 - DNA, 15 bp, Homo sapiens
aaccaggtacagtta

SEQ ID NO: 1358157 - DNA, 15 bp, Homo sapiens
aaaccaggtacagtt

SEQ ID NO: 1358158 - DNA, 15 bp, Homo sapiens
gaaaccaggtacagt

SEQ ID NO: 1358159 - DNA, 15 bp, Homo sapiens
ggaaaccaggtacag

SEQ ID NO: 1358160 - DNA, 15 bp, Homo sapiens
tggaaaccaggtaca

SEQ ID NO: 1358161 - DNA, 15 bp, Homo sapiens
ctggaaaccaggtac

SEQ ID NO: 1358162 - DNA, 15 bp, Homo sapiens
tctggaaaccaggta

SEQ ID NO: 1358163 - DNA, 15 bp, Homo sapiens
ttctggaaaccaggt

SEQ ID NO: 1358164 - DNA, 15 bp, Homo sapiens
cttctggaaaccagg

SEQ ID NO: 1358165 - DNA, 15 bp, Homo sapiens
acttctggaaaccag

SEQ ID NO: 1358166 - DNA, 15 bp, Homo sapiens
gacttctggaaacca

SEQ ID NO: 1358167 - DNA, 15 bp, Homo sapiens
ggacttctggaaacc

SEQ ID NO: 1358168 - DNA, 15 bp, Homo sapiens
aggacttctggaaac

SEQ ID NO: 1358169 - DNA, 15 bp, Homo sapiens
aaggacttctggaaa

SEQ ID NO: 1358170 - DNA, 15 bp, Homo sapiens
aaaggacttctggaa

SEQ ID NO: 1358171 - DNA, 15 bp, Homo sapiens
aaaaggacttctgga

SEQ ID NO: 1358172 - DNA, 15 bp, Homo sapiens
caaaaggacttctgg

SEQ ID NO: 1358173 - DNA, 15 bp, Homo sapiens
tcaaaaggacttctg

SEQ ID NO: 1358174 - DNA, 15 bp, Homo sapiens
ctcaaaaggacttct

SEQ ID NO: 1358175 - DNA, 15 bp, Homo sapiens
tctcaaaaggacttc

SEQ ID NO: 1358176 - DNA, 15 bp, Homo sapiens
atctcaaaaggactt

SEQ ID NO: 1358177 - DNA, 15 bp, Homo sapiens
gatctcaaaaggact

SEQ ID NO: 1358178 - DNA, 15 bp, Homo sapiens
agatctcaaaaggac

SEQ ID NO: 1358179 - DNA, 15 bp, Homo sapiens
cagatctcaaaagga

SEQ ID NO: 1358180 - DNA, 15 bp, Homo sapiens
tcagatctcaaaagg

SEQ ID NO: 1358181 - DNA, 15 bp, Homo sapiens
ttcagatctcaaaag

SEQ ID NO: 1358182 - DNA, 15 bp, Homo sapiens
tttcagatctcaaaa

SEQ ID NO: 1358183 - DNA, 15 bp, Homo sapiens
ctttcagatctcaaa

SEQ ID NO: 1358184 - DNA, 15 bp, Homo sapiens
tctttcagatctcaa

SEQ ID NO: 1358185 - DNA, 15 bp, Homo sapiens
ttctttcagatctca

SEQ ID NO: 1358186 - DNA, 15 bp, Homo sapiens
tttctttcagatctc

SEQ ID NO: 1358187 - DNA, 15 bp, Homo sapiens
atttctttcagatct

SEQ ID NO: 1358188 - DNA, 15 bp, Homo sapiens
catttctttcagatc

SEQ ID NO: 1358189 - DNA, 15 bp, Homo sapiens
tcatttctttcagat

SEQ ID NO: 1358190 - DNA, 15 bp, Homo sapiens
atcatttctttcaga

SEQ ID NO: 1358191 - DNA, 15 bp, Homo sapiens
tatcatttctttcag

SEQ ID NO: 1358192 - DNA, 15 bp, Homo sapiens
ttatcatttctttca

SEQ ID NO: 1358193 - DNA, 15 bp, Homo sapiens
attatcatttctttc

SEQ ID NO: 1358194 - DNA, 15 bp, Homo sapiens
tattatcatttcttt

SEQ ID NO: 1358195 - DNA, 15 bp, Homo sapiens
gtattatcatttctt

SEQ ID NO: 1358196 - DNA, 15 bp, Homo sapiens
ggtattatcatttct

SEQ ID NO: 1358197 - DNA, 15 bp, Homo sapiens
gggtattatcatttc

SEQ ID NO: 1358198 - DNA, 15 bp, Homo sapiens
agggtattatcattt

SEQ ID NO: 1358199 - DNA, 15 bp, Homo sapiens
gagggtattatcatt

SEQ ID NO: 1358200 - DNA, 15 bp, Homo sapiens
ggagggtattatcat

SEQ ID NO: 1358201 - DNA, 15 bp, Homo sapiens
cggagggtattatca

SEQ ID NO: 1358202 - DNA, 15 bp, Homo sapiens
tcggagggtattatc

SEQ ID NO: 1358203 - DNA, 15 bp, Homo sapiens
ctcggagggtattat

SEQ ID NO: 1358204 - DNA, 15 bp, Homo sapiens
gctcggagggtatta

SEQ ID NO: 1358205 - DNA, 15 bp, Homo sapiens
tgctcggagggtatt

SEQ ID NO: 1358206 - DNA, 15 bp, Homo sapiens
ttgctcggagggtat

SEQ ID NO: 1358207 - DNA, 15 bp, Homo sapiens
cttgctcggagggta

SEQ ID NO: 1358208 - DNA, 15 bp, Homo sapiens
ccttgctcggagggt

SEQ ID NO: 1358209 - DNA, 15 bp, Homo sapiens
gccttgctcggaggg

SEQ ID NO: 1358210 - DNA, 15 bp, Homo sapiens
tgccttgctcggagg

SEQ ID NO: 1358211 - DNA, 15 bp, Homo sapiens
ttgccttgctcggag

SEQ ID NO: 1358212 - DNA, 15 bp, Homo sapiens
tttgccttgctcgga

SEQ ID NO: 1358213 - DNA, 15 bp, Homo sapiens
ttttgccttgctcgg

SEQ ID NO: 1358214 - DNA, 15 bp, Homo sapiens
tttttgccttgctcg

SEQ ID NO: 1358215 - DNA, 15 bp, Homo sapiens
gtttttgccttgctc

SEQ ID NO: 1358216 - DNA, 15 bp, Homo sapiens
tgtttttgccttgct

SEQ ID NO: 1358217 - DNA, 15 bp, Homo sapiens
ttgtttttgccttgc

SEQ ID NO: 1358218 - DNA, 15 bp, Homo sapiens
tttgtttttgccttg

SEQ ID NO: 1358219 - DNA, 15 bp, Homo sapiens
ctttgtttttgcctt

SEQ ID NO: 1358220 - DNA, 15 bp, Homo sapiens
actttgtttttgcct

SEQ ID NO: 1358221 - DNA, 15 bp, Homo sapiens
tactttgtttttgcc

SEQ ID NO: 1358222 - DNA, 15 bp, Homo sapiens
gtactttgtttttgc

SEQ ID NO: 1358223 - DNA, 15 bp, Homo sapiens
agtactttgtttttg

SEQ ID NO: 1358224 - DNA, 15 bp, Homo sapiens
gagtactttgttttt

SEQ ID NO: 1358225 - DNA, 15 bp, Homo sapiens
ggagtactttgtttt

SEQ ID NO: 1358226 - DNA, 15 bp, Homo sapiens
tggagtactttgttt

SEQ ID NO: 1358227 - DNA, 15 bp, Homo sapiens
gtggagtactttgtt

SEQ ID NO: 1358228 - DNA, 15 bp, Homo sapiens
ggtggagtactttgt

SEQ ID NO: 1358229 - DNA, 15 bp, Homo sapiens
tggtggagtactttg

SEQ ID NO: 1358230 - DNA, 15 bp, Homo sapiens
ctggtggagtacttt

SEQ ID NO: 1358231 - DNA, 15 bp, Homo sapiens
tctggtggagtactt

SEQ ID NO: 1358232 - DNA, 15 bp, Homo sapiens
ttctggtggagtact

SEQ ID NO: 1358233 - DNA, 15 bp, Homo sapiens
attctggtggagtac

SEQ ID NO: 1358234 - DNA, 15 bp, Homo sapiens
cattctggtggagta

SEQ ID NO: 1358235 - DNA, 15 bp, Homo sapiens
gcattctggtggagt

SEQ ID NO: 1358236 - DNA, 15 bp, Homo sapiens
ggcattctggtggag

SEQ ID NO: 1358237 - DNA, 15 bp, Homo sapiens
aggcattctggtgga

SEQ ID NO: 1358238 - DNA, 15 bp, Homo sapiens
taggcattctggtgg

SEQ ID NO: 1358239 - DNA, 15 bp, Homo sapiens
ttaggcattctggtg

SEQ ID NO: 1358240 - DNA, 15 bp, Homo sapiens
tttaggcattctggt

SEQ ID NO: 1358241 - DNA, 15 bp, Homo sapiens
atttaggcattctgg

SEQ ID NO: 1358242 - DNA, 15 bp, Homo sapiens
gatttaggcattctg

SEQ ID NO: 1358243 - DNA, 15 bp, Homo sapiens
tgatttaggcattct

SEQ ID NO: 1358244 - DNA, 15 bp, Homo sapiens
ctgatttaggcattc

SEQ ID NO: 1358245 - DNA, 15 bp, Homo sapiens
cctgatttaggcatt

SEQ ID NO: 1358246 - DNA, 15 bp, Homo sapiens
ccctgatttaggcat

SEQ ID NO: 1358247 - DNA, 15 bp, Homo sapiens
tccctgatttaggca

SEQ ID NO: 1358248 - DNA, 15 bp, Homo sapiens
ttccctgatttaggc

SEQ ID NO: 1358249 - DNA, 15 bp, Homo sapiens
cttccctgatttagg

SEQ ID NO: 1358250 - DNA, 15 bp, Homo sapiens
ccttccctgatttag

SEQ ID NO: 1358251 - DNA, 15 bp, Homo sapiens
accttccctgattta

SEQ ID NO: 1358252 - DNA, 15 bp, Homo sapiens
aaccttccctgattt

SEQ ID NO: 1358253 - DNA, 15 bp, Homo sapiens
gaaccttccctgatt

SEQ ID NO: 1358254 - DNA, 15 bp, Homo sapiens
ggaaccttccctgat

SEQ ID NO: 1358255 - DNA, 15 bp, Homo sapiens
gggaaccttccctga

SEQ ID NO: 1358256 - DNA, 15 bp, Homo sapiens
tgggaaccttccctg

SEQ ID NO: 1358257 - DNA, 15 bp, Homo sapiens
ttgggaaccttccct

SEQ ID NO: 1358258 - DNA, 15 bp, Homo sapiens
cttgggaaccttccc

SEQ ID NO: 1358259 - DNA, 15 bp, Homo sapiens
tcttgggaaccttcc

SEQ ID NO: 1358260 - DNA, 15 bp, Homo sapiens
ttcttgggaaccttc

SEQ ID NO: 1358261 - DNA, 15 bp, Homo sapiens
cttcttgggaacctt

SEQ ID NO: 1358262 - DNA, 15 bp, Homo sapiens
ccttcttgggaacct

SEQ ID NO: 1358263 - DNA, 15 bp, Homo sapiens
accttcttgggaacc

SEQ ID NO: 1358264 - DNA, 15 bp, Homo sapiens
caccttcttgggaac

SEQ ID NO: 1358265 - DNA, 15 bp, Homo sapiens
ccaccttcttgggaa

SEQ ID NO: 1358266 - DNA, 15 bp, Homo sapiens
accaccttcttggga

SEQ ID NO: 1358267 - DNA, 15 bp, Homo sapiens
caccaccttcttggg

SEQ ID NO: 1358268 - DNA, 15 bp, Homo sapiens
gcaccaccttcttgg

SEQ ID NO: 1358269 - DNA, 15 bp, Homo sapiens
agcaccaccttcttg

SEQ ID NO: 1358270 - DNA, 15 bp, Homo sapiens
aagcaccaccttctt

SEQ ID NO: 1358271 - DNA, 15 bp, Homo sapiens
caagcaccaccttct

SEQ ID NO: 1358272 - DNA, 15 bp, Homo sapiens
tcaagcaccaccttc

SEQ ID NO: 1358273 - DNA, 15 bp, Homo sapiens
gtcaagcaccacctt

SEQ ID NO: 1358274 - DNA, 15 bp, Homo sapiens
agtcaagcaccacct

SEQ ID NO: 1358275 - DNA, 15 bp, Homo sapiens
cagtcaagcaccacc

SEQ ID NO: 1358276 - DNA, 15 bp, Homo sapiens
ccagtcaagcaccac

SEQ ID NO: 1358277 - DNA, 15 bp, Homo sapiens
cccagtcaagcacca

SEQ ID NO: 1358278 - DNA, 15 bp, Homo sapiens
tcccagtcaagcacc

SEQ ID NO: 1358279 - DNA, 15 bp, Homo sapiens
gtcccagtcaagcac

SEQ ID NO: 1358280 - DNA, 15 bp, Homo sapiens
agtcccagtcaagca

SEQ ID NO: 1358281 - DNA, 15 bp, Homo sapiens
aagtcccagtcaagc

SEQ ID NO: 1358282 - DNA, 15 bp, Homo sapiens
gaagtcccagtcaag

SEQ ID NO: 1358283 - DNA, 15 bp, Homo sapiens
tgaagtcccagtcaa

SEQ ID NO: 1358284 - DNA, 15 bp, Homo sapiens
ttgaagtcccagtca

SEQ ID NO: 1358285 - DNA, 15 bp, Homo sapiens
cttgaagtcccagtc

SEQ ID NO: 1358286 - DNA, 15 bp, Homo sapiens
tcttgaagtcccagt

SEQ ID NO: 1358287 - DNA, 15 bp, Homo sapiens
atcttgaagtcccag

SEQ ID NO: 1358288 - DNA, 15 bp, Homo sapiens
tatcttgaagtccca

SEQ ID NO: 1358289 - DNA, 15 bp, Homo sapiens
gtatcttgaagtccc

SEQ ID NO: 1358290 - DNA, 15 bp, Homo sapiens
tgtatcttgaagtcc

SEQ ID NO: 1358291 - DNA, 15 bp, Homo sapiens
ctgtatcttgaagtc

SEQ ID NO: 1358292 - DNA, 15 bp, Homo sapiens
cctgtatcttgaagt

SEQ ID NO: 1358293 - DNA, 15 bp, Homo sapiens
tcctgtatcttgaag

SEQ ID NO: 1358294 - DNA, 15 bp, Homo sapiens
ctcctgtatcttgaa

SEQ ID NO: 1358295 - DNA, 15 bp, Homo sapiens
tctcctgtatcttga

SEQ ID NO: 1358296 - DNA, 15 bp, Homo sapiens
ttctcctgtatcttg

SEQ ID NO: 1358297 - DNA, 15 bp, Homo sapiens
tttctcctgtatctt

SEQ ID NO: 1358298 - DNA, 15 bp, Homo sapiens
gtttctcctgtatct

SEQ ID NO: 1358299 - DNA, 15 bp, Homo sapiens
agtttctcctgtatc

SEQ ID NO: 1358300 - DNA, 15 bp, Homo sapiens
gagtttctcctgtat

SEQ ID NO: 1358301 - DNA, 15 bp, Homo sapiens
agagtttctcctgta

SEQ ID NO: 1358302 - DNA, 15 bp, Homo sapiens
gagagtttctcctgt

SEQ ID NO: 1358303 - DNA, 15 bp, Homo sapiens
agagagtttctcctg

SEQ ID NO: 1358304 - DNA, 15 bp, Homo sapiens
tagagagtttctcct

SEQ ID NO: 1358305 - DNA, 15 bp, Homo sapiens
ctagagagtttctcc

SEQ ID NO: 1358306 - DNA, 15 bp, Homo sapiens
tctagagagtttctc

SEQ ID NO: 1358307 - DNA, 15 bp, Homo sapiens
atctagagagtttct

SEQ ID NO: 1358308 - DNA, 15 bp, Homo sapiens
tatctagagagtttc

SEQ ID NO: 1358309 - DNA, 15 bp, Homo sapiens
ctatctagagagttt

SEQ ID NO: 1358310 - DNA, 15 bp, Homo sapiens
tctatctagagagtt

SEQ ID NO: 1358311 - DNA, 15 bp, Homo sapiens
ttctatctagagagt

SEQ ID NO: 1358312 - DNA, 15 bp, Homo sapiens
tttctatctagagag

SEQ ID NO: 1358313 - DNA, 15 bp, Homo sapiens
ctttctatctagaga

SEQ ID NO: 1358314 - DNA, 15 bp, Homo sapiens
cctttctatctagag

SEQ ID NO: 1358315 - DNA, 15 bp, Homo sapiens
tcctttctatctaga

SEQ ID NO: 1358316 - DNA, 15 bp, Homo sapiens
ttcctttctatctag

SEQ ID NO: 1358317 - DNA, 15 bp, Homo sapiens
cttcctttctatcta

SEQ ID NO: 1358318 - DNA, 15 bp, Homo sapiens
gcttcctttctatct

SEQ ID NO: 1358319 - DNA, 15 bp, Homo sapiens
tgcttcctttctatc

SEQ ID NO: 1358320 - DNA, 15 bp, Homo sapiens
ttgcttcctttctat

SEQ ID NO: 1358321 - DNA, 15 bp, Homo sapiens
cttgcttcctttcta

SEQ ID NO: 1358322 - DNA, 15 bp, Homo sapiens
tcttgcttcctttct

SEQ ID NO: 1358323 - DNA, 15 bp, Homo sapiens
ttcttgcttcctttc

SEQ ID NO: 1358324 - DNA, 15 bp, Homo sapiens
cttcttgcttccttt

SEQ ID NO: 1358325 - DNA, 15 bp, Homo sapiens
ccttcttgcttcctt

SEQ ID NO: 1358326 - DNA, 15 bp, Homo sapiens
tccttcttgcttcct

SEQ ID NO: 1358327 - DNA, 15 bp, Homo sapiens
ttccttcttgcttcc

SEQ ID NO: 1358328 - DNA, 15 bp, Homo sapiens
gttccttcttgcttc

SEQ ID NO: 1358329 - DNA, 15 bp, Homo sapiens
agttccttcttgctt

SEQ ID NO: 1358330 - DNA, 15 bp, Homo sapiens
gagttccttcttgct

SEQ ID NO: 1358331 - DNA, 15 bp, Homo sapiens
ggagttccttcttgc

SEQ ID NO: 1358332 - DNA, 15 bp, Homo sapiens
tggagttccttcttg

SEQ ID NO: 1358333 - DNA, 15 bp, Homo sapiens
ctggagttccttctt

SEQ ID NO: 1358334 - DNA, 15 bp, Homo sapiens
cctggagttccttct

SEQ ID NO: 1358335 - DNA, 15 bp, Homo sapiens
gcctggagttccttc

SEQ ID NO: 1358336 - DNA, 15 bp, Homo sapiens
tgcctggagttcctt

SEQ ID NO: 1358337 - DNA, 15 bp, Homo sapiens
ttgcctggagttcct

SEQ ID NO: 1358338 - DNA, 15 bp, Homo sapiens
tttgcctggagttcc

SEQ ID NO: 1358339 - DNA, 15 bp, Homo sapiens
ctttgcctggagttc

SEQ ID NO: 1358340 - DNA, 15 bp, Homo sapiens
cctttgcctggagtt

SEQ ID NO: 1358341 - DNA, 15 bp, Homo sapiens
ccctttgcctggagt

SEQ ID NO: 1358342 - DNA, 15 bp, Homo sapiens
gccctttgcctggag

SEQ ID NO: 1358343 - DNA, 15 bp, Homo sapiens
tgccctttgcctgga

SEQ ID NO: 1358344 - DNA, 15 bp, Homo sapiens
gtgccctttgcctgg

SEQ ID NO: 1358345 - DNA, 15 bp, Homo sapiens
ggtgccctttgcctg

SEQ ID NO: 1358346 - DNA, 15 bp, Homo sapiens
tggtgccctttgcct

SEQ ID NO: 1358347 - DNA, 15 bp, Homo sapiens
ctggtgccctttgcc

SEQ ID NO: 1358348 - DNA, 15 bp, Homo sapiens
actggtgccctttgc

SEQ ID NO: 1358349 - DNA, 15 bp, Homo sapiens
cactggtgccctttg

SEQ ID NO: 1358350 - DNA, 15 bp, Homo sapiens
acactggtgcccttt

SEQ ID NO: 1358351 - DNA, 15 bp, Homo sapiens
cacactggtgccctt

SEQ ID NO: 1358352 - DNA, 15 bp, Homo sapiens
gcacactggtgccct

SEQ ID NO: 1358353 - DNA, 15 bp, Homo sapiens
tgcacactggtgccc

SEQ ID NO: 1358354 - DNA, 15 bp, Homo sapiens
ttgcacactggtgcc

SEQ ID NO: 1358355 - DNA, 15 bp, Homo sapiens
tttgcacactggtgc

SEQ ID NO: 1358356 - DNA, 15 bp, Homo sapiens
ctttgcacactggtg

SEQ ID NO: 1358357 - DNA, 15 bp, Homo sapiens
cctttgcacactggt

SEQ ID NO: 1358358 - DNA, 15 bp, Homo sapiens
gcctttgcacactgg

SEQ ID NO: 1358359 - DNA, 15 bp, Homo sapiens
tgcctttgcacactg

SEQ ID NO: 1358360 - DNA, 15 bp, Homo sapiens
gtgcctttgcacact

SEQ ID NO: 1358361 - DNA, 15 bp, Homo sapiens
agtgcctttgcacac

SEQ ID NO: 1358362 - DNA, 15 bp, Homo sapiens
cagtgcctttgcaca

SEQ ID NO: 1358363 - DNA, 15 bp, Homo sapiens
tcagtgcctttgcac

SEQ ID NO: 1358364 - DNA, 15 bp, Homo sapiens
ctcagtgcctttgca

SEQ ID NO: 1358365 - DNA, 15 bp, Homo sapiens
tctcagtgcctttgc

SEQ ID NO: 1358366 - DNA, 15 bp, Homo sapiens
ctctcagtgcctttg

SEQ ID NO: 1358367 - DNA, 15 bp, Homo sapiens
tctctcagtgccttt

SEQ ID NO: 1358368 - DNA, 15 bp, Homo sapiens
ctctctcagtgcctt

SEQ ID NO: 1358369 - DNA, 15 bp, Homo sapiens
gctctctcagtgcct

SEQ ID NO: 1358370 - DNA, 15 bp, Homo sapiens
tgctctctcagtgcc

SEQ ID NO: 1358371 - DNA, 15 bp, Homo sapiens
gtgctctctcagtgc

SEQ ID NO: 1358372 - DNA, 15 bp, Homo sapiens
tgtgctctctcagtg

SEQ ID NO: 1358373 - DNA, 15 bp, Homo sapiens
atgtgctctctcagt

SEQ ID NO: 1358374 - DNA, 15 bp, Homo sapiens
aatgtgctctctcag

SEQ ID NO: 1358375 - DNA, 15 bp, Homo sapiens
aaatgtgctctctca

SEQ ID NO: 1358376 - DNA, 15 bp, Homo sapiens
taaatgtgctctctc

SEQ ID NO: 1358377 - DNA, 15 bp, Homo sapiens
ctaaatgtgctctct

SEQ ID NO: 1358378 - DNA, 15 bp, Homo sapiens
gctaaatgtgctctc

SEQ ID NO: 1358379 - DNA, 15 bp, Homo sapiens
ggctaaatgtgctct

SEQ ID NO: 1358380 - DNA, 15 bp, Homo sapiens
tggctaaatgtgctc

SEQ ID NO: 1358381 - DNA, 15 bp, Homo sapiens
ttggctaaatgtgct

SEQ ID NO: 1358382 - DNA, 15 bp, Homo sapiens
cttggctaaatgtgc

SEQ ID NO: 1358383 - DNA, 15 bp, Homo sapiens
ccttggctaaatgtg

SEQ ID NO: 1358384 - DNA, 15 bp, Homo sapiens
tccttggctaaatgt

SEQ ID NO: 1358385 - DNA, 15 bp, Homo sapiens
ttccttggctaaatg

SEQ ID NO: 1358386 - DNA, 15 bp, Homo sapiens
cttccttggctaaat

SEQ ID NO: 1358387 - DNA, 15 bp, Homo sapiens
tcttccttggctaaa

SEQ ID NO: 1358388 - DNA, 15 bp, Homo sapiens
ctcttccttggctaa

SEQ ID NO: 1358389 - DNA, 15 bp, Homo sapiens
tctcttccttggcta

SEQ ID NO: 1358390 - DNA, 15 bp, Homo sapiens
ctctcttccttggct

SEQ ID NO: 1358391 - DNA, 15 bp, Homo sapiens
cctctcttccttggc

SEQ ID NO: 1358392 - DNA, 15 bp, Homo sapiens
acctctcttccttgg

SEQ ID NO: 1358393 - DNA, 15 bp, Homo sapiens
cacctctcttccttg

SEQ ID NO: 1358394 - DNA, 15 bp, Homo sapiens
ccacctctcttcctt

SEQ ID NO: 1358395 - DNA, 15 bp, Homo sapiens
cccacctctcttcct

SEQ ID NO: 1358396 - DNA, 15 bp, Homo sapiens
acccacctctcttcc

SEQ ID NO: 1358397 - DNA, 15 bp, Homo sapiens
gacccacctctcttc

SEQ ID NO: 1358398 - DNA, 15 bp, Homo sapiens
tgacccacctctctt

SEQ ID NO: 1358399 - DNA, 15 bp, Homo sapiens
atgacccacctctct

SEQ ID NO: 1358400 - DNA, 15 bp, Homo sapiens
aatgacccacctctc

SEQ ID NO: 1358401 - DNA, 15 bp, Homo sapiens
taatgacccacctct

SEQ ID NO: 1358402 - DNA, 15 bp, Homo sapiens
ataatgacccacctc

SEQ ID NO: 1358403 - DNA, 15 bp, Homo sapiens
aataatgacccacct

SEQ ID NO: 1358404 - DNA, 15 bp, Homo sapiens
caataatgacccacc

SEQ ID NO: 1358405 - DNA, 15 bp, Homo sapiens
ccaataatgacccac

SEQ ID NO: 1358406 - DNA, 15 bp, Homo sapiens
tccaataatgaccca

SEQ ID NO: 1358407 - DNA, 15 bp, Homo sapiens
ctccaataatgaccc

SEQ ID NO: 1358408 - DNA, 15 bp, Homo sapiens
actccaataatgacc

SEQ ID NO: 1358409 - DNA, 15 bp, Homo sapiens
cactccaataatgac

SEQ ID NO: 1358410 - DNA, 15 bp, Homo sapiens
acactccaataatga

SEQ ID NO: 1358411 - DNA, 15 bp, Homo sapiens
aacactccaataatg

SEQ ID NO: 1358412 - DNA, 15 bp, Homo sapiens
caacactccaataat

SEQ ID NO: 1358413 - DNA, 15 bp, Homo sapiens
acaacactccaataa

SEQ ID NO: 1358414 - DNA, 15 bp, Homo sapiens
aacaacactccaata

SEQ ID NO: 1358415 - DNA, 15 bp, Homo sapiens
caacaacactccaat

SEQ ID NO: 1358416 - DNA, 15 bp, Homo sapiens
ccaacaacactccaa

SEQ ID NO: 1358417 - DNA, 15 bp, Homo sapiens
tccaacaacactcca

SEQ ID NO: 1358418 - DNA, 15 bp, Homo sapiens
ctccaacaacactcc

SEQ ID NO: 1358419 - DNA, 15 bp, Homo sapiens
tctccaacaacactc

SEQ ID NO: 1358420 - DNA, 15 bp, Homo sapiens
ctctccaacaacact

SEQ ID NO: 1358421 - DNA, 15 bp, Homo sapiens
cctctccaacaacac

SEQ ID NO: 1358422 - DNA, 15 bp, Homo sapiens
ccctctccaacaaca

SEQ ID NO: 1358423 - DNA, 15 bp, Homo sapiens
gccctctccaacaac

SEQ ID NO: 1358424 - DNA, 15 bp, Homo sapiens
ggccctctccaacaa

SEQ ID NO: 1358425 - DNA, 15 bp, Homo sapiens
tggccctctccaaca

SEQ ID NO: 1358426 - DNA, 15 bp, Homo sapiens
ctggccctctccaac

SEQ ID NO: 1358427 - DNA, 15 bp, Homo sapiens
cctggccctctccaa

SEQ ID NO: 1358428 - DNA, 15 bp, Homo sapiens
acctggccctctcca

SEQ ID NO: 1358429 - DNA, 15 bp, Homo sapiens
cacctggccctctcc

SEQ ID NO: 1358430 - DNA, 15 bp, Homo sapiens
ccacctggccctctc

SEQ ID NO: 1358431 - DNA, 15 bp, Homo sapiens
cccacctggccctct

SEQ ID NO: 1358432 - DNA, 15 bp, Homo sapiens
ccccacctggccctc

SEQ ID NO: 1358433 - DNA, 15 bp, Homo sapiens
tccccacctggccct

SEQ ID NO: 1358434 - DNA, 15 bp, Homo sapiens
ttccccacctggccc

SEQ ID NO: 1358435 - DNA, 15 bp, Homo sapiens
cttccccacctggcc

SEQ ID NO: 1358436 - DNA, 15 bp, Homo sapiens
tcttccccacctggc

SEQ ID NO: 1358437 - DNA, 15 bp, Homo sapiens
atcttccccacctgg

SEQ ID NO: 1358438 - DNA, 15 bp, Homo sapiens
catcttccccacctg

SEQ ID NO: 1358439 - DNA, 15 bp, Homo sapiens
acatcttccccacct

SEQ ID NO: 1358440 - DNA, 15 bp, Homo sapiens
cacatcttccccacc

SEQ ID NO: 1358441 - DNA, 15 bp, Homo sapiens
tcacatcttccccac

SEQ ID NO: 1358442 - DNA, 15 bp, Homo sapiens
ttcacatcttcccca

SEQ ID NO: 1358443 - DNA, 15 bp, Homo sapiens
attcacatcttcccc

SEQ ID NO: 1358444 - DNA, 15 bp, Homo sapiens
aattcacatcttccc

SEQ ID NO: 1358445 - DNA, 15 bp, Homo sapiens
caattcacatcttcc

SEQ ID NO: 1358446 - DNA, 15 bp, Homo sapiens
ccaattcacatcttc

SEQ ID NO: 1358447 - DNA, 15 bp, Homo sapiens
tccaattcacatctt

SEQ ID NO: 1358448 - DNA, 15 bp, Homo sapiens
gtccaattcacatct

SEQ ID NO: 1358449 - DNA, 15 bp, Homo sapiens
ggtccaattcacatc

SEQ ID NO: 1358450 - DNA, 15 bp, Homo sapiens
tggtccaattcacat

SEQ ID NO: 1358451 - DNA, 15 bp, Homo sapiens
gtggtccaattcaca

SEQ ID NO: 1358452 - DNA, 15 bp, Homo sapiens
tgtggtccaattcac

SEQ ID NO: 1358453 - DNA, 15 bp, Homo sapiens
ctgtggtccaattca

SEQ ID NO: 1358454 - DNA, 15 bp, Homo sapiens
cctgtggtccaattc

SEQ ID NO: 1358455 - DNA, 15 bp, Homo sapiens
ccctgtggtccaatt

SEQ ID NO: 1358456 - DNA, 15 bp, Homo sapiens
gccctgtggtccaat

SEQ ID NO: 1358457 - DNA, 15 bp, Homo sapiens
agccctgtggtccaa

SEQ ID NO: 1358458 - DNA, 15 bp, Homo sapiens
cagccctgtggtcca

SEQ ID NO: 1358459 - DNA, 15 bp, Homo sapiens
gcagccctgtggtcc

SEQ ID NO: 1358460 - DNA, 15 bp, Homo sapiens
agcagccctgtggtc

SEQ ID NO: 1358461 - DNA, 15 bp, Homo sapiens
cagcagccctgtggt

SEQ ID NO: 1358462 - DNA, 15 bp, Homo sapiens
tcagcagccctgtgg

SEQ ID NO: 1358463 - DNA, 15 bp, Homo sapiens
atcagcagccctgtg

SEQ ID NO: 1358464 - DNA, 15 bp, Homo sapiens
aatcagcagccctgt

SEQ ID NO: 1358465 - DNA, 15 bp, Homo sapiens
aaatcagcagccctg

SEQ ID NO: 1358466 - DNA, 15 bp, Homo sapiens
aaaatcagcagccct

SEQ ID NO: 1358467 - DNA, 15 bp, Homo sapiens
gaaaatcagcagccc

SEQ ID NO: 1358468 - DNA, 15 bp, Homo sapiens
tgaaaatcagcagcc

SEQ ID NO: 1358469 - DNA, 15 bp, Homo sapiens
ttgaaaatcagcagc

SEQ ID NO: 1358470 - DNA, 15 bp, Homo sapiens
tttgaaaatcagcag

SEQ ID NO: 1358471 - DNA, 15 bp, Homo sapiens
ctttgaaaatcagca

SEQ ID NO: 1358472 - DNA, 15 bp, Homo sapiens
actttgaaaatcagc

SEQ ID NO: 1358473 - DNA, 15 bp, Homo sapiens
gactttgaaaatcag

SEQ ID NO: 1358474 - DNA, 15 bp, Homo sapiens
ggactttgaaaatca

SEQ ID NO: 1358475 - DNA, 15 bp, Homo sapiens
tggactttgaaaatc

SEQ ID NO: 1358476 - DNA, 15 bp, Homo sapiens
atggactttgaaaat

SEQ ID NO: 1358477 - DNA, 15 bp, Homo sapiens
catggactttgaaaa

SEQ ID NO: 1358478 - DNA, 15 bp, Homo sapiens
acatggactttgaaa

SEQ ID NO: 1358479 - DNA, 15 bp, Homo sapiens
gacatggactttgaa

SEQ ID NO: 1358480 - DNA, 15 bp, Homo sapiens
ggacatggactttga

SEQ ID NO: 1358481 - DNA, 15 bp, Homo sapiens
aggacatggactttg

SEQ ID NO: 1358482 - DNA, 15 bp, Homo sapiens
gaggacatggacttt

SEQ ID NO: 1358483 - DNA, 15 bp, Homo sapiens
ggaggacatggactt

SEQ ID NO: 1358484 - DNA, 15 bp, Homo sapiens
tggaggacatggact

SEQ ID NO: 1358485 - DNA, 15 bp, Homo sapiens
atggaggacatggac

SEQ ID NO: 1358486 - DNA, 15 bp, Homo sapiens
catggaggacatgga

SEQ ID NO: 1358487 - DNA, 15 bp, Homo sapiens
ccatggaggacatgg

SEQ ID NO: 1358488 - DNA, 15 bp, Homo sapiens
gccatggaggacatg

SEQ ID NO: 1358489 - DNA, 15 bp, Homo sapiens
cgccatggaggacat

SEQ ID NO: 1358490 - DNA, 15 bp, Homo sapiens
gcgccatggaggaca

SEQ ID NO: 1358491 - DNA, 15 bp, Homo sapiens
ggcgccatggaggac

SEQ ID NO: 1358492 - DNA, 15 bp, Homo sapiens
tggcgccatggagga

SEQ ID NO: 1358493 - DNA, 15 bp, Homo sapiens
atggcgccatggagg

SEQ ID NO: 1358494 - DNA, 15 bp, Homo sapiens
catggcgccatggag

SEQ ID NO: 1358495 - DNA, 15 bp, Homo sapiens
acatggcgccatgga

SEQ ID NO: 1358496 - DNA, 15 bp, Homo sapiens
cacatggcgccatgg

SEQ ID NO: 1358497 - DNA, 15 bp, Homo sapiens
tcacatggcgccatg

SEQ ID NO: 1358498 - DNA, 15 bp, Homo sapiens
atcacatggcgccat

SEQ ID NO: 1358499 - DNA, 15 bp, Homo sapiens
tatcacatggcgcca

SEQ ID NO: 1358500 - DNA, 15 bp, Homo sapiens
ttatcacatggcgcc

SEQ ID NO: 1358501 - DNA, 15 bp, Homo sapiens
cttatcacatggcgc

SEQ ID NO: 1358502 - DNA, 15 bp, Homo sapiens
acttatcacatggcg

SEQ ID NO: 1358503 - DNA, 15 bp, Homo sapiens
tacttatcacatggc

SEQ ID NO: 1358504 - DNA, 15 bp, Homo sapiens
atacttatcacatgg

SEQ ID NO: 1358505 - DNA, 15 bp, Homo sapiens
gatacttatcacatg

SEQ ID NO: 1358506 - DNA, 15 bp, Homo sapiens
tgatacttatcacat

SEQ ID NO: 1358507 - DNA, 15 bp, Homo sapiens
atgatacttatcaca

SEQ ID NO: 1358508 - DNA, 15 bp, Homo sapiens
tatgatacttatcac

SEQ ID NO: 1358509 - DNA, 15 bp, Homo sapiens
ctatgatacttatca

SEQ ID NO: 1358510 - DNA, 15 bp, Homo sapiens
gctatgatacttatc

SEQ ID NO: 1358511 - DNA, 15 bp, Homo sapiens
ggctatgatacttat

SEQ ID NO: 1358512 - DNA, 15 bp, Homo sapiens
tggctatgatactta

SEQ ID NO: 1358513 - DNA, 15 bp, Homo sapiens
ctggctatgatactt

SEQ ID NO: 1358514 - DNA, 15 bp, Homo sapiens
tctggctatgatact

SEQ ID NO: 1358515 - DNA, 15 bp, Homo sapiens
gtctggctatgatac

SEQ ID NO: 1358516 - DNA, 15 bp, Homo sapiens
tgtctggctatgata

SEQ ID NO: 1358517 - DNA, 15 bp, Homo sapiens
gtgtctggctatgat

SEQ ID NO: 1358518 - DNA, 15 bp, Homo sapiens
tgtgtctggctatga

SEQ ID NO: 1358519 - DNA, 15 bp, Homo sapiens
ttgtgtctggctatg

SEQ ID NO: 1358520 - DNA, 15 bp, Homo sapiens
gttgtgtctggctat

SEQ ID NO: 1358521 - DNA, 15 bp, Homo sapiens
agttgtgtctggcta

SEQ ID NO: 1358522 - DNA, 15 bp, Homo sapiens
tagttgtgtctggct

SEQ ID NO: 1358523 - DNA, 15 bp, Homo sapiens
atagttgtgtctggc

SEQ ID NO: 1358524 - DNA, 15 bp, Homo sapiens
tatagttgtgtctgg

SEQ ID NO: 1358525 - DNA, 15 bp, Homo sapiens
atatagttgtgtctg

SEQ ID NO: 1358526 - DNA, 15 bp, Homo sapiens
tatatagttgtgtct

SEQ ID NO: 1358527 - DNA, 15 bp, Homo sapiens
ttatatagttgtgtc

SEQ ID NO: 1358528 - DNA, 15 bp, Homo sapiens
cttatatagttgtgt

SEQ ID NO: 1358529 - DNA, 15 bp, Homo sapiens
tcttatatagttgtg

SEQ ID NO: 1358530 - DNA, 15 bp, Homo sapiens
ttcttatatagttgt

SEQ ID NO: 1358531 - DNA, 15 bp, Homo sapiens
gttcttatatagttg

SEQ ID NO: 1358532 - DNA, 15 bp, Homo sapiens
ggttcttatatagtt

SEQ ID NO: 1358533 - DNA, 15 bp, Homo sapiens
tggttcttatatagt

SEQ ID NO: 1358534 - DNA, 15 bp, Homo sapiens
gtggttcttatatag

SEQ ID NO: 1358535 - DNA, 15 bp, Homo sapiens
agtggttcttatata

SEQ ID NO: 1358536 - DNA, 15 bp, Homo sapiens
cagtggttcttatat

SEQ ID NO: 1358537 - DNA, 15 bp, Homo sapiens
gcagtggttcttata

SEQ ID NO: 1358538 - DNA, 15 bp, Homo sapiens
tgcagtggttcttat

SEQ ID NO: 1358539 - DNA, 15 bp, Homo sapiens
gtgcagtggttctta

SEQ ID NO: 1358540 - DNA, 15 bp, Homo sapiens
agtgcagtggttctt

SEQ ID NO: 1358541 - DNA, 15 bp, Homo sapiens
gagtgcagtggttct

SEQ ID NO: 1358542 - DNA, 15 bp, Homo sapiens
agagtgcagtggttc

SEQ ID NO: 1358543 - DNA, 15 bp, Homo sapiens
cagagtgcagtggtt

SEQ ID NO: 1358544 - DNA, 15 bp, Homo sapiens
acagagtgcagtggt

SEQ ID NO: 1358545 - DNA, 15 bp, Homo sapiens
gacagagtgcagtgg

SEQ ID NO: 1358546 - DNA, 15 bp, Homo sapiens
tgacagagtgcagtg

SEQ ID NO: 1358547 - DNA, 15 bp, Homo sapiens
gtgacagagtgcagt

SEQ ID NO: 1358548 - DNA, 15 bp, Homo sapiens
tgtgacagagtgcag

SEQ ID NO: 1358549 - DNA, 15 bp, Homo sapiens
gtgtgacagagtgca

SEQ ID NO: 1358550 - DNA, 15 bp, Homo sapiens
agtgtgacagagtgc

SEQ ID NO: 1358551 - DNA, 15 bp, Homo sapiens
tagtgtgacagagtg

SEQ ID NO: 1358552 - DNA, 15 bp, Homo sapiens
ttagtgtgacagagt

SEQ ID NO: 1358553 - DNA, 15 bp, Homo sapiens
cttagtgtgacagag

SEQ ID NO: 1358554 - DNA, 15 bp, Homo sapiens
ccttagtgtgacaga

SEQ ID NO: 1358555 - DNA, 15 bp, Homo sapiens
cccttagtgtgacag

SEQ ID NO: 1358556 - DNA, 15 bp, Homo sapiens
gcccttagtgtgaca

SEQ ID NO: 1358557 - DNA, 15 bp, Homo sapiens
agcccttagtgtgac

SEQ ID NO: 1358558 - DNA, 15 bp, Homo sapiens
aagcccttagtgtga

SEQ ID NO: 1358559 - DNA, 15 bp, Homo sapiens
taagcccttagtgtg

SEQ ID NO: 1358560 - DNA, 15 bp, Homo sapiens
gtaagcccttagtgt

SEQ ID NO: 1358561 - DNA, 15 bp, Homo sapiens
tgtaagcccttagtg

SEQ ID NO: 1358562 - DNA, 15 bp, Homo sapiens
gtgtaagcccttagt

SEQ ID NO: 1358563 - DNA, 15 bp, Homo sapiens
agtgtaagcccttag

SEQ ID NO: 1358564 - DNA, 15 bp, Homo sapiens
gagtgtaagccctta

SEQ ID NO: 1358565 - DNA, 15 bp, Homo sapiens
tgagtgtaagccctt

SEQ ID NO: 1358566 - DNA, 15 bp, Homo sapiens
atgagtgtaagccct

SEQ ID NO: 1358567 - DNA, 15 bp, Homo sapiens
gatgagtgtaagccc

SEQ ID NO: 1358568 - DNA, 15 bp, Homo sapiens
ggatgagtgtaagcc

SEQ ID NO: 1358569 - DNA, 15 bp, Homo sapiens
aggatgagtgtaagc

SEQ ID NO: 1358570 - DNA, 15 bp, Homo sapiens
caggatgagtgtaag

SEQ ID NO: 1358571 - DNA, 15 bp, Homo sapiens
tcaggatgagtgtaa

SEQ ID NO: 1358572 - DNA, 15 bp, Homo sapiens
ctcaggatgagtgta

SEQ ID NO: 1358573 - DNA, 15 bp, Homo sapiens
tctcaggatgagtgt

SEQ ID NO: 1358574 - DNA, 15 bp, Homo sapiens
gtctcaggatgagtg

SEQ ID NO: 1358575 - DNA, 15 bp, Homo sapiens
tgtctcaggatgagt

SEQ ID NO: 1358576 - DNA, 15 bp, Homo sapiens
gtgtctcaggatgag

SEQ ID NO: 1358577 - DNA, 15 bp, Homo sapiens
ggtgtctcaggatga

SEQ ID NO: 1358578 - DNA, 15 bp, Homo sapiens
aggtgtctcaggatg

SEQ ID NO: 1358579 - DNA, 15 bp, Homo sapiens
caggtgtctcaggat

SEQ ID NO: 1358580 - DNA, 15 bp, Homo sapiens
ccaggtgtctcagga

SEQ ID NO: 1358581 - DNA, 15 bp, Homo sapiens
tccaggtgtctcagg

SEQ ID NO: 1358582 - DNA, 15 bp, Homo sapiens
ttccaggtgtctcag

SEQ ID NO: 1358583 - DNA, 15 bp, Homo sapiens
gttccaggtgtctca

SEQ ID NO: 1358584 - DNA, 15 bp, Homo sapiens
agttccaggtgtctc

SEQ ID NO: 1358585 - DNA, 15 bp, Homo sapiens
gagttccaggtgtct

SEQ ID NO: 1358586 - DNA, 15 bp, Homo sapiens
ggagttccaggtgtc

SEQ ID NO: 1358587 - DNA, 15 bp, Homo sapiens
tggagttccaggtgt

SEQ ID NO: 1358588 - DNA, 15 bp, Homo sapiens
gtggagttccaggtg

SEQ ID NO: 1358589 - DNA, 15 bp, Homo sapiens
ggtggagttccaggt

SEQ ID NO: 1358590 - DNA, 15 bp, Homo sapiens
aggtggagttccagg

SEQ ID NO: 1358591 - DNA, 15 bp, Homo sapiens
caggtggagttccag

SEQ ID NO: 1358592 - DNA, 15 bp, Homo sapiens
gcaggtggagttcca

SEQ ID NO: 1358593 - DNA, 15 bp, Homo sapiens
ggcaggtggagttcc

SEQ ID NO: 1358594 - DNA, 15 bp, Homo sapiens
aggcaggtggagttc

SEQ ID NO: 1358595 - DNA, 15 bp, Homo sapiens
caggcaggtggagtt

SEQ ID NO: 1358596 - DNA, 15 bp, Homo sapiens
ccaggcaggtggagt

SEQ ID NO: 1358597 - DNA, 15 bp, Homo sapiens
gccaggcaggtggag

SEQ ID NO: 1358598 - DNA, 15 bp, Homo sapiens
agccaggcaggtgga

SEQ ID NO: 1358599 - DNA, 15 bp, Homo sapiens
aagccaggcaggtgg

SEQ ID NO: 1358600 - DNA, 15 bp, Homo sapiens
taagccaggcaggtg

SEQ ID NO: 1358601 - DNA, 15 bp, Homo sapiens
ctaagccaggcaggt

SEQ ID NO: 1358602 - DNA, 15 bp, Homo sapiens
gctaagccaggcagg

SEQ ID NO: 1358603 - DNA, 15 bp, Homo sapiens
tgctaagccaggcag

SEQ ID NO: 1358604 - DNA, 15 bp, Homo sapiens
ctgctaagccaggca

SEQ ID NO: 1358605 - DNA, 15 bp, Homo sapiens
cctgctaagccaggc

SEQ ID NO: 1358606 - DNA, 15 bp, Homo sapiens
gcctgctaagccagg

SEQ ID NO: 1358607 - DNA, 15 bp, Homo sapiens
ggcctgctaagccag

SEQ ID NO: 1358608 - DNA, 15 bp, Homo sapiens
gggcctgctaagcca

SEQ ID NO: 1358609 - DNA, 15 bp, Homo sapiens
agggcctgctaagcc

SEQ ID NO: 1358610 - DNA, 15 bp, Homo sapiens
gagggcctgctaagc

SEQ ID NO: 1358611 - DNA, 15 bp, Homo sapiens
agagggcctgctaag

SEQ ID NO: 1358612 - DNA, 15 bp, Homo sapiens
cagagggcctgctaa

SEQ ID NO: 1358613 - DNA, 15 bp, Homo sapiens
gcagagggcctgcta

SEQ ID NO: 1358614 - DNA, 15 bp, Homo sapiens
tgcagagggcctgct

SEQ ID NO: 1358615 - DNA, 15 bp, Homo sapiens
ctgcagagggcctgc

SEQ ID NO: 1358616 - DNA, 15 bp, Homo sapiens
gctgcagagggcctg

SEQ ID NO: 1358617 - DNA, 15 bp, Homo sapiens
tgctgcagagggcct

SEQ ID NO: 1358618 - DNA, 15 bp, Homo sapiens
ctgctgcagagggcc

SEQ ID NO: 1358619 - DNA, 15 bp, Homo sapiens
actgctgcagagggc

SEQ ID NO: 1358620 - DNA, 15 bp, Homo sapiens
cactgctgcagaggg

SEQ ID NO: 1358621 - DNA, 15 bp, Homo sapiens
gcactgctgcagagg

SEQ ID NO: 1358622 - DNA, 15 bp, Homo sapiens
agcactgctgcagag

SEQ ID NO: 1358623 - DNA, 15 bp, Homo sapiens
cagcactgctgcaga

SEQ ID NO: 1358624 - DNA, 15 bp, Homo sapiens
gcagcactgctgcag

SEQ ID NO: 1358625 - DNA, 15 bp, Homo sapiens
tgcagcactgctgca

SEQ ID NO: 1358626 - DNA, 15 bp, Homo sapiens
atgcagcactgctgc

SEQ ID NO: 1358627 - DNA, 15 bp, Homo sapiens
gatgcagcactgctg

SEQ ID NO: 1358628 - DNA, 15 bp, Homo sapiens
agatgcagcactgct

SEQ ID NO: 1358629 - DNA, 15 bp, Homo sapiens
cagatgcagcactgc

SEQ ID NO: 1358630 - DNA, 15 bp, Homo sapiens
acagatgcagcactg

SEQ ID NO: 1358631 - DNA, 15 bp, Homo sapiens
cacagatgcagcact

SEQ ID NO: 1358632 - DNA, 15 bp, Homo sapiens
tcacagatgcagcac

SEQ ID NO: 1358633 - DNA, 15 bp, Homo sapiens
ctcacagatgcagca

SEQ ID NO: 1358634 - DNA, 15 bp, Homo sapiens
tctcacagatgcagc

SEQ ID NO: 1358635 - DNA, 15 bp, Homo sapiens
atctcacagatgcag

SEQ ID NO: 1358636 - DNA, 15 bp, Homo sapiens
catctcacagatgca

SEQ ID NO: 1358637 - DNA, 15 bp, Homo sapiens
tcatctcacagatgc

SEQ ID NO: 1358638 - DNA, 15 bp, Homo sapiens
atcatctcacagatg

SEQ ID NO: 1358639 - DNA, 15 bp, Homo sapiens
aatcatctcacagat

SEQ ID NO: 1358640 - DNA, 15 bp, Homo sapiens
caatcatctcacaga

SEQ ID NO: 1358641 - DNA, 15 bp, Homo sapiens
tcaatcatctcacag

SEQ ID NO: 1358642 - DNA, 15 bp, Homo sapiens
ctcaatcatctcaca

SEQ ID NO: 1358643 - DNA, 15 bp, Homo sapiens
cctcaatcatctcac

SEQ ID NO: 1358644 - DNA, 15 bp, Homo sapiens
tcctcaatcatctca

SEQ ID NO: 1358645 - DNA, 15 bp, Homo sapiens
ttcctcaatcatctc

SEQ ID NO: 1358646 - DNA, 15 bp, Homo sapiens
cttcctcaatcatct

SEQ ID NO: 1358647 - DNA, 15 bp, Homo sapiens
ccttcctcaatcatc

SEQ ID NO: 1358648 - DNA, 15 bp, Homo sapiens
gccttcctcaatcat

SEQ ID NO: 1358649 - DNA, 15 bp, Homo sapiens
agccttcctcaatca

SEQ ID NO: 1358650 - DNA, 15 bp, Homo sapiens
tagccttcctcaatc

SEQ ID NO: 1358651 - DNA, 15 bp, Homo sapiens
ttagccttcctcaat

SEQ ID NO: 1358652 - DNA, 15 bp, Homo sapiens
cttagccttcctcaa

SEQ ID NO: 1358653 - DNA, 15 bp, Homo sapiens
tcttagccttcctca

SEQ ID NO: 1358654 - DNA, 15 bp, Homo sapiens
atcttagccttcctc

SEQ ID NO: 1358655 - DNA, 15 bp, Homo sapiens
catcttagccttcct

SEQ ID NO: 1358656 - DNA, 15 bp, Homo sapiens
ccatcttagccttcc

SEQ ID NO: 1358657 - DNA, 15 bp, Homo sapiens
cccatcttagccttc

SEQ ID NO: 1358658 - DNA, 15 bp, Homo sapiens
ccccatcttagcctt

SEQ ID NO: 1358659 - DNA, 15 bp, Homo sapiens
gccccatcttagcct

SEQ ID NO: 1358660 - DNA, 15 bp, Homo sapiens
ggccccatcttagcc

SEQ ID NO: 1358661 - DNA, 15 bp, Homo sapiens
tggccccatcttagc

SEQ ID NO: 1358662 - DNA, 15 bp, Homo sapiens
gtggccccatcttag

SEQ ID NO: 1358663 - DNA, 15 bp, Homo sapiens
agtggccccatctta

SEQ ID NO: 1358664 - DNA, 15 bp, Homo sapiens
aagtggccccatctt

SEQ ID NO: 1358665 - DNA, 15 bp, Homo sapiens
taagtggccccatct

SEQ ID NO: 1358666 - DNA, 15 bp, Homo sapiens
ttaagtggccccatc

SEQ ID NO: 1358667 - DNA, 15 bp, Homo sapiens
cttaagtggccccat

SEQ ID NO: 1358668 - DNA, 15 bp, Homo sapiens
gcttaagtggcccca

SEQ ID NO: 1358669 - DNA, 15 bp, Homo sapiens
agcttaagtggcccc

SEQ ID NO: 1358670 - DNA, 15 bp, Homo sapiens
gagcttaagtggccc

SEQ ID NO: 1358671 - DNA, 15 bp, Homo sapiens
ggagcttaagtggcc

SEQ ID NO: 1358672 - DNA, 15 bp, Homo sapiens
tggagcttaagtggc

SEQ ID NO: 1358673 - DNA, 15 bp, Homo sapiens
ttggagcttaagtgg

SEQ ID NO: 1358674 - DNA, 15 bp, Homo sapiens
attggagcttaagtg

SEQ ID NO: 1358675 - DNA, 15 bp, Homo sapiens
cattggagcttaagt

SEQ ID NO: 1358676 - DNA, 15 bp, Homo sapiens
acattggagcttaag

SEQ ID NO: 1358677 - DNA, 15 bp, Homo sapiens
cacattggagcttaa

SEQ ID NO: 1358678 - DNA, 15 bp, Homo sapiens
acacattggagctta

SEQ ID NO: 1358679 - DNA, 15 bp, Homo sapiens
aacacattggagctt

SEQ ID NO: 1358680 - DNA, 15 bp, Homo sapiens
gaacacattggagct

SEQ ID NO: 1358681 - DNA, 15 bp, Homo sapiens
tgaacacattggagc

SEQ ID NO: 1358682 - DNA, 15 bp, Homo sapiens
gtgaacacattggag

SEQ ID NO: 1358683 - DNA, 15 bp, Homo sapiens
tgtgaacacattgga

SEQ ID NO: 1358684 - DNA, 15 bp, Homo sapiens
ctgtgaacacattgg

SEQ ID NO: 1358685 - DNA, 15 bp, Homo sapiens
tctgtgaacacattg

SEQ ID NO: 1358686 - DNA, 15 bp, Homo sapiens
atctgtgaacacatt

SEQ ID NO: 1358687 - DNA, 15 bp, Homo sapiens
aatctgtgaacacat

SEQ ID NO: 1358688 - DNA, 15 bp, Homo sapiens
caatctgtgaacaca

SEQ ID NO: 1358689 - DNA, 15 bp, Homo sapiens
acaatctgtgaacac

SEQ ID NO: 1358690 - DNA, 15 bp, Homo sapiens
gacaatctgtgaaca

SEQ ID NO: 1358691 - DNA, 15 bp, Homo sapiens
ggacaatctgtgaac

SEQ ID NO: 1358692 - DNA, 15 bp, Homo sapiens
aggacaatctgtgaa

SEQ ID NO: 1358693 - DNA, 15 bp, Homo sapiens
aaggacaatctgtga

SEQ ID NO: 1358694 - DNA, 15 bp, Homo sapiens
taaggacaatctgtg

SEQ ID NO: 1358695 - DNA, 15 bp, Homo sapiens
ttaaggacaatctgt

SEQ ID NO: 1358696 - DNA, 15 bp, Homo sapiens
cttaaggacaatctg

SEQ ID NO: 1358697 - DNA, 15 bp, Homo sapiens
gcttaaggacaatct

SEQ ID NO: 1358698 - DNA, 15 bp, Homo sapiens
agcttaaggacaatc

SEQ ID NO: 1358699 - DNA, 15 bp, Homo sapiens
tagcttaaggacaat

SEQ ID NO: 1358700 - DNA, 15 bp, Homo sapiens
ttagcttaaggacaa

SEQ ID NO: 1358701 - DNA, 15 bp, Homo sapiens
tttagcttaaggaca

SEQ ID NO: 1358702 - DNA, 15 bp, Homo sapiens
ctttagcttaaggac

SEQ ID NO: 1358703 - DNA, 15 bp, Homo sapiens
tctttagcttaagga

SEQ ID NO: 1358704 - DNA, 15 bp, Homo sapiens
gtctttagcttaagg

SEQ ID NO: 1358705 - DNA, 15 bp, Homo sapiens
tgtctttagcttaag

SEQ ID NO: 1358706 - DNA, 15 bp, Homo sapiens
atgtctttagcttaa

SEQ ID NO: 1358707 - DNA, 15 bp, Homo sapiens
catgtctttagctta

SEQ ID NO: 1358708 - DNA, 15 bp, Homo sapiens
acatgtctttagctt

SEQ ID NO: 1358709 - DNA, 15 bp, Homo sapiens
cacatgtctttagct

SEQ ID NO: 1358710 - DNA, 15 bp, Homo sapiens
acacatgtctttagc

SEQ ID NO: 1358711 - DNA, 15 bp, Homo sapiens
aaagagagaagagtc

SEQ ID NO: 1358712 - DNA, 15 bp, Homo sapiens
aaaagagagaagagt

SEQ ID NO: 1358713 - DNA, 15 bp, Homo sapiens
gaaaagagagaagag

SEQ ID NO: 1358714 - DNA, 15 bp, Homo sapiens
agaaaagagagaaga

SEQ ID NO: 1358715 - DNA, 15 bp, Homo sapiens
aagaaaagagagaag

SEQ ID NO: 1358716 - DNA, 15 bp, Homo sapiens
gaagaaaagagagaa

SEQ ID NO: 1358717 - DNA, 15 bp, Homo sapiens
tgaagaaaagagaga

SEQ ID NO: 1358718 - DNA, 15 bp, Homo sapiens
atgaagaaaagagag

SEQ ID NO: 1358719 - DNA, 15 bp, Homo sapiens
aatgaagaaaagaga

SEQ ID NO: 1358720 - DNA, 15 bp, Homo sapiens
taatgaagaaaagag

SEQ ID NO: 1358721 - DNA, 15 bp, Homo sapiens
ctaatgaagaaaaga

SEQ ID NO: 1358722 - DNA, 15 bp, Homo sapiens
actaatgaagaaaag

SEQ ID NO: 1358723 - DNA, 15 bp, Homo sapiens
gactaatgaagaaaa

SEQ ID NO: 1358724 - DNA, 15 bp, Homo sapiens
agactaatgaagaaa

SEQ ID NO: 1358725 - DNA, 15 bp, Homo sapiens
cagactaatgaagaa

SEQ ID NO: 1358726 - DNA, 15 bp, Homo sapiens
ccagactaatgaaga

SEQ ID NO: 1358727 - DNA, 15 bp, Homo sapiens
gccagactaatgaag

SEQ ID NO: 1358728 - DNA, 15 bp, Homo sapiens
agccagactaatgaa

SEQ ID NO: 1358729 - DNA, 15 bp, Homo sapiens
tagccagactaatga

SEQ ID NO: 1358730 - DNA, 15 bp, Homo sapiens
ctagccagactaatg

SEQ ID NO: 1358731 - DNA, 15 bp, Homo sapiens
gctagccagactaat

SEQ ID NO: 1358732 - DNA, 15 bp, Homo sapiens
tgctagccagactaa

SEQ ID NO: 1358733 - DNA, 15 bp, Homo sapiens
ctgctagccagacta

SEQ ID NO: 1358734 - DNA, 15 bp, Homo sapiens
actgctagccagact

SEQ ID NO: 1358735 - DNA, 15 bp, Homo sapiens
gactgctagccagac

SEQ ID NO: 1358736 - DNA, 15 bp, Homo sapiens
agactgctagccaga

SEQ ID NO: 1358737 - DNA, 15 bp, Homo sapiens
tagactgctagccag

SEQ ID NO: 1358738 - DNA, 15 bp, Homo sapiens
atagactgctagcca

SEQ ID NO: 1358739 - DNA, 15 bp, Homo sapiens
aatagactgctagcc

SEQ ID NO: 1358740 - DNA, 15 bp, Homo sapiens
aaatagactgctagc

SEQ ID NO: 1358741 - DNA, 15 bp, Homo sapiens
aaaatagactgctag

SEQ ID NO: 1358742 - DNA, 15 bp, Homo sapiens
caaaatagactgcta

SEQ ID NO: 1358743 - DNA, 15 bp, Homo sapiens
acaaaatagactgct

SEQ ID NO: 1358744 - DNA, 15 bp, Homo sapiens
aacaaaatagactgc

SEQ ID NO: 1358745 - DNA, 15 bp, Homo sapiens
taacaaaatagactg

SEQ ID NO: 1358746 - DNA, 15 bp, Homo sapiens
ttaacaaaatagact

SEQ ID NO: 1358747 - DNA, 15 bp, Homo sapiens
attaacaaaatagac

SEQ ID NO: 1358748 - DNA, 15 bp, Homo sapiens
gattaacaaaataga

SEQ ID NO: 1358749 - DNA, 15 bp, Homo sapiens
tgattaacaaaatag

SEQ ID NO: 1358750 - DNA, 15 bp, Homo sapiens
atgattaacaaaata

SEQ ID NO: 1358751 - DNA, 15 bp, Homo sapiens
aaatgattaacaaaa

SEQ ID NO: 1358752 - DNA, 15 bp, Homo sapiens
taaatgattaacaaa

SEQ ID NO: 1358753 - DNA, 15 bp, Homo sapiens
ttaaatgattaacaa

SEQ ID NO: 1358754 - DNA, 15 bp, Homo sapiens
tttaaatgattaaca

SEQ ID NO: 1358755 - DNA, 15 bp, Homo sapiens
ttttaaatgattaac

SEQ ID NO: 1358756 - DNA, 15 bp, Homo sapiens
tttttaaatgattaa

SEQ ID NO: 1358757 - DNA, 15 bp, Homo sapiens
ttttttaaatgatta

SEQ ID NO: 1358758 - DNA, 15 bp, Homo sapiens
tttttttaaatgatt

SEQ ID NO: 1358759 - DNA, 15 bp, Homo sapiens
ttttttttaaatgat

SEQ ID NO: 1358760 - DNA, 15 bp, Homo sapiens
gttttttttaaatga

SEQ ID NO: 1358761 - DNA, 15 bp, Homo sapiens
tgttttttttaaatg

SEQ ID NO: 1358762 - DNA, 15 bp, Homo sapiens
ctgttttttttaaat

SEQ ID NO: 1358763 - DNA, 15 bp, Homo sapiens
gctgttttttttaaa

SEQ ID NO: 1358764 - DNA, 15 bp, Homo sapiens
agctgttttttttaa

SEQ ID NO: 1358765 - DNA, 15 bp, Homo sapiens
gagctgtttttttta

SEQ ID NO: 1358766 - DNA, 15 bp, Homo sapiens
ggagctgtttttttt

SEQ ID NO: 1358767 - DNA, 15 bp, Homo sapiens
aggagctgttttttt

SEQ ID NO: 1358768 - DNA, 15 bp, Homo sapiens
caggagctgtttttt

SEQ ID NO: 1358769 - DNA, 15 bp, Homo sapiens
ccaggagctgttttt

SEQ ID NO: 1358770 - DNA, 15 bp, Homo sapiens
tccaggagctgtttt

SEQ ID NO: 1358771 - DNA, 15 bp, Homo sapiens
atccaggagctgttt

SEQ ID NO: 1358772 - DNA, 15 bp, Homo sapiens
aatccaggagctgtt

SEQ ID NO: 1358773 - DNA, 15 bp, Homo sapiens
gaatccaggagctgt

SEQ ID NO: 1358774 - DNA, 15 bp, Homo sapiens
tgaatccaggagctg

SEQ ID NO: 1358775 - DNA, 15 bp, Homo sapiens
atgaatccaggagct

SEQ ID NO: 1358776 - DNA, 15 bp, Homo sapiens
aatgaatccaggagc

SEQ ID NO: 1358777 - DNA, 15 bp, Homo sapiens
caatgaatccaggag

SEQ ID NO: 1358778 - DNA, 15 bp, Homo sapiens
tcaatgaatccagga

SEQ ID NO: 1358779 - DNA, 15 bp, Homo sapiens
gtcaatgaatccagg

SEQ ID NO: 1358780 - DNA, 15 bp, Homo sapiens
agtcaatgaatccag

SEQ ID NO: 1358781 - DNA, 15 bp, Homo sapiens
aagtcaatgaatcca

SEQ ID NO: 1358782 - DNA, 15 bp, Homo sapiens
aaagtcaatgaatcc

SEQ ID NO: 1358783 - DNA, 15 bp, Homo sapiens
aaaagtcaatgaatc

SEQ ID NO: 1358784 - DNA, 15 bp, Homo sapiens
aaaaagtcaatgaat

SEQ ID NO: 1358785 - DNA, 15 bp, Homo sapiens
aaaaaagtcaatgaa

SEQ ID NO: 1358786 - DNA, 15 bp, Homo sapiens
gaaaaaagtcaatga

SEQ ID NO: 1358787 - DNA, 15 bp, Homo sapiens
agaaaaaagtcaatg

SEQ ID NO: 1358788 - DNA, 15 bp, Homo sapiens
gagaaaaaagtcaat

SEQ ID NO: 1358789 - DNA, 15 bp, Homo sapiens
ggagaaaaaagtcaa

SEQ ID NO: 1358790 - DNA, 15 bp, Homo sapiens
aggagaaaaaagtca

SEQ ID NO: 1358791 - DNA, 15 bp, Homo sapiens
aaggagaaaaaagtc

SEQ ID NO: 1358792 - DNA, 15 bp, Homo sapiens
gaaggagaaaaaagt

SEQ ID NO: 1358793 - DNA, 15 bp, Homo sapiens
tgaaggagaaaaaag

SEQ ID NO: 1358794 - DNA, 15 bp, Homo sapiens
ctgaaggagaaaaaa

SEQ ID NO: 1358795 - DNA, 15 bp, Homo sapiens
actgaaggagaaaaa

SEQ ID NO: 1358796 - DNA, 15 bp, Homo sapiens
aactgaaggagaaaa

SEQ ID NO: 1358797 - DNA, 15 bp, Homo sapiens
gaactgaaggagaaa

SEQ ID NO: 1358798 - DNA, 15 bp, Homo sapiens
agaactgaaggagaa

SEQ ID NO: 1358799 - DNA, 15 bp, Homo sapiens
cagaactgaaggaga

SEQ ID NO: 1358800 - DNA, 15 bp, Homo sapiens
gcagaactgaaggag

SEQ ID NO: 1358801 - DNA, 15 bp, Homo sapiens
agcagaactgaagga

SEQ ID NO: 1358802 - DNA, 15 bp, Homo sapiens
gagcagaactgaagg

SEQ ID NO: 1358803 - DNA, 15 bp, Homo sapiens
agagcagaactgaag

SEQ ID NO: 1358804 - DNA, 15 bp, Homo sapiens
cagagcagaactgaa

SEQ ID NO: 1358805 - DNA, 15 bp, Homo sapiens
tcagagcagaactga

SEQ ID NO: 1358806 - DNA, 15 bp, Homo sapiens
ctcagagcagaactg

SEQ ID NO: 1358807 - DNA, 15 bp, Homo sapiens
gctcagagcagaact

SEQ ID NO: 1358808 - DNA, 15 bp, Homo sapiens
agctcagagcagaac

SEQ ID NO: 1358809 - DNA, 15 bp, Homo sapiens
aagctcagagcagaa

SEQ ID NO: 1358810 - DNA, 15 bp, Homo sapiens
taagctcagagcaga

SEQ ID NO: 1358811 - DNA, 15 bp, Homo sapiens
ctaagctcagagcag

SEQ ID NO: 1358812 - DNA, 15 bp, Homo sapiens
actaagctcagagca

SEQ ID NO: 1358813 - DNA, 15 bp, Homo sapiens
aactaagctcagagc

SEQ ID NO: 1358814 - DNA, 15 bp, Homo sapiens
taactaagctcagag

SEQ ID NO: 1358815 - DNA, 15 bp, Homo sapiens
ataactaagctcaga

SEQ ID NO: 1358816 - DNA, 15 bp, Homo sapiens
aataactaagctcag

SEQ ID NO: 1358817 - DNA, 15 bp, Homo sapiens
aaataactaagctca

SEQ ID NO: 1358818 - DNA, 15 bp, Homo sapiens
gaaataactaagctc

SEQ ID NO: 1358819 - DNA, 15 bp, Homo sapiens
agaaataactaagct

SEQ ID NO: 1358820 - DNA, 15 bp, Homo sapiens
aagaaataactaagc

SEQ ID NO: 1358821 - DNA, 15 bp, Homo sapiens
caagaaataactaag

SEQ ID NO: 1358822 - DNA, 15 bp, Homo sapiens
acaagaaataactaa

SEQ ID NO: 1358823 - DNA, 15 bp, Homo sapiens
gacaagaaataacta

SEQ ID NO: 1358824 - DNA, 15 bp, Homo sapiens
agacaagaaataact

SEQ ID NO: 1358825 - DNA, 15 bp, Homo sapiens
aagacaagaaataac

SEQ ID NO: 1358826 - DNA, 15 bp, Homo sapiens
gaagacaagaaataa

SEQ ID NO: 1358827 - DNA, 15 bp, Homo sapiens
agaagacaagaaata

SEQ ID NO: 1358828 - DNA, 15 bp, Homo sapiens
cagaagacaagaaat

SEQ ID NO: 1358829 - DNA, 15 bp, Homo sapiens
gcagaagacaagaaa

SEQ ID NO: 1358830 - DNA, 15 bp, Homo sapiens
agcagaagacaagaa

SEQ ID NO: 1358831 - DNA, 15 bp, Homo sapiens
tagcagaagacaaga

SEQ ID NO: 1358832 - DNA, 15 bp, Homo sapiens
ctagcagaagacaag

SEQ ID NO: 1358833 - DNA, 15 bp, Homo sapiens
gctagcagaagacaa

SEQ ID NO: 1358834 - DNA, 15 bp, Homo sapiens
agctagcagaagaca

SEQ ID NO: 1358835 - DNA, 15 bp, Homo sapiens
aagctagcagaagac

SEQ ID NO: 1358836 - DNA, 15 bp, Homo sapiens
aaaagctagcagaag

SEQ ID NO: 1358837 - DNA, 15 bp, Homo sapiens
taaaagctagcagaa

SEQ ID NO: 1358838 - DNA, 15 bp, Homo sapiens
ttaaaagctagcaga

SEQ ID NO: 1358839 - DNA, 15 bp, Homo sapiens
tttaaaagctagcag

SEQ ID NO: 1358840 - DNA, 15 bp, Homo sapiens
atttaaaagctagca

SEQ ID NO: 1358841 - DNA, 15 bp, Homo sapiens
aatttaaaagctagc

SEQ ID NO: 1358842 - DNA, 15 bp, Homo sapiens
aaatttaaaagctag

SEQ ID NO: 1358843 - DNA, 15 bp, Homo sapiens
gaaatttaaaagcta

SEQ ID NO: 1358844 - DNA, 15 bp, Homo sapiens
agaaatttaaaagct

SEQ ID NO: 1358845 - DNA, 15 bp, Homo sapiens
aagaaatttaaaagc

SEQ ID NO: 1358846 - DNA, 15 bp, Homo sapiens
aaagaaatttaaaag

SEQ ID NO: 1358847 - DNA, 15 bp, Homo sapiens
caaagaaatttaaaa

SEQ ID NO: 1358848 - DNA, 15 bp, Homo sapiens
gcaaagaaatttaaa

SEQ ID NO: 1358849 - DNA, 15 bp, Homo sapiens
agcaaagaaatttaa

SEQ ID NO: 1358850 - DNA, 15 bp, Homo sapiens
gagcaaagaaattta

SEQ ID NO: 1358851 - DNA, 15 bp, Homo sapiens
agagcaaagaaattt

SEQ ID NO: 1358852 - DNA, 15 bp, Homo sapiens
aagagcaaagaaatt

SEQ ID NO: 1358853 - DNA, 15 bp, Homo sapiens
caagagcaaagaaat

SEQ ID NO: 1358854 - DNA, 15 bp, Homo sapiens
acaagagcaaagaaa

SEQ ID NO: 1358855 - DNA, 15 bp, Homo sapiens
aacaagagcaaagaa

SEQ ID NO: 1358856 - DNA, 15 bp, Homo sapiens
aaacaagagcaaaga

SEQ ID NO: 1358857 - DNA, 15 bp, Homo sapiens
gaaacaagagcaaag

SEQ ID NO: 1358858 - DNA, 15 bp, Homo sapiens
agaaacaagagcaaa

SEQ ID NO: 1358859 - DNA, 15 bp, Homo sapiens
gagaaacaagagcaa

SEQ ID NO: 1358860 - DNA, 15 bp, Homo sapiens
agagaaacaagagca

SEQ ID NO: 1358861 - DNA, 15 bp, Homo sapiens
tagagaaacaagagc

SEQ ID NO: 1358862 - DNA, 15 bp, Homo sapiens
ctagagaaacaagag

SEQ ID NO: 1358863 - DNA, 15 bp, Homo sapiens
actagagaaacaaga

SEQ ID NO: 1358864 - DNA, 15 bp, Homo sapiens
aactagagaaacaag

SEQ ID NO: 1358865 - DNA, 15 bp, Homo sapiens
taactagagaaacaa

SEQ ID NO: 1358866 - DNA, 15 bp, Homo sapiens
ataactagagaaaca

SEQ ID NO: 1358867 - DNA, 15 bp, Homo sapiens
aataactagagaaac

SEQ ID NO: 1358868 - DNA, 15 bp, Homo sapiens
aaataactagagaaa

SEQ ID NO: 1358869 - DNA, 15 bp, Homo sapiens
aaaataactagagaa

SEQ ID NO: 1358870 - DNA, 15 bp, Homo sapiens
taaaataactagaga

SEQ ID NO: 1358871 - DNA, 15 bp, Homo sapiens
ttaaaataactagag

SEQ ID NO: 1358872 - DNA, 15 bp, Homo sapiens
attaaaataactaga

SEQ ID NO: 1358873 - DNA, 15 bp, Homo sapiens
aattaaaataactag

SEQ ID NO: 1358874 - DNA, 15 bp, Homo sapiens
caattaaaataacta

SEQ ID NO: 1358875 - DNA, 15 bp, Homo sapiens
acaattaaaataact

SEQ ID NO: 1358876 - DNA, 15 bp, Homo sapiens
cacaattaaaataac

SEQ ID NO: 1358877 - DNA, 15 bp, Homo sapiens
tcacaattaaaataa

SEQ ID NO: 1358878 - DNA, 15 bp, Homo sapiens
atcacaattaaaata

SEQ ID NO: 1358879 - DNA, 15 bp, Homo sapiens
catcacaattaaaat

SEQ ID NO: 1358880 - DNA, 15 bp, Homo sapiens
acatcacaattaaaa

SEQ ID NO: 1358881 - DNA, 15 bp, Homo sapiens
aacatcacaattaaa

SEQ ID NO: 1358882 - DNA, 15 bp, Homo sapiens
taacatcacaattaa

SEQ ID NO: 1358883 - DNA, 15 bp, Homo sapiens
ctaacatcacaatta

SEQ ID NO: 1358884 - DNA, 15 bp, Homo sapiens
cctaacatcacaatt

SEQ ID NO: 1358885 - DNA, 15 bp, Homo sapiens
ccctaacatcacaat

SEQ ID NO: 1358886 - DNA, 15 bp, Homo sapiens
accctaacatcacaa

SEQ ID NO: 1358887 - DNA, 15 bp, Homo sapiens
taccctaacatcaca

SEQ ID NO: 1358888 - DNA, 15 bp, Homo sapiens
ataccctaacatcac

SEQ ID NO: 1358889 - DNA, 15 bp, Homo sapiens
aataccctaacatca

SEQ ID NO: 1358890 - DNA, 15 bp, Homo sapiens
caataccctaacatc

SEQ ID NO: 1358891 - DNA, 15 bp, Homo sapiens
tcaataccctaacat

SEQ ID NO: 1358892 - DNA, 15 bp, Homo sapiens
atcaataccctaaca

SEQ ID NO: 1358893 - DNA, 15 bp, Homo sapiens
gatcaataccctaac

SEQ ID NO: 1358894 - DNA, 15 bp, Homo sapiens
agatcaataccctaa

SEQ ID NO: 1358895 - DNA, 15 bp, Homo sapiens
aagatcaatacccta

SEQ ID NO: 1358896 - DNA, 15 bp, Homo sapiens
taagatcaataccct

SEQ ID NO: 1358897 - DNA, 15 bp, Homo sapiens
ctaagatcaataccc

SEQ ID NO: 1358898 - DNA, 15 bp, Homo sapiens
tctaagatcaatacc

SEQ ID NO: 1358899 - DNA, 15 bp, Homo sapiens
atctaagatcaatac

SEQ ID NO: 1358900 - DNA, 15 bp, Homo sapiens
gatctaagatcaata

SEQ ID NO: 1358901 - DNA, 15 bp, Homo sapiens
agatctaagatcaat

SEQ ID NO: 1358902 - DNA, 15 bp, Homo sapiens
aagatctaagatcaa

SEQ ID NO: 1358903 - DNA, 15 bp, Homo sapiens
aaagatctaagatca

SEQ ID NO: 1358904 - DNA, 15 bp, Homo sapiens
gaaagatctaagatc

SEQ ID NO: 1358905 - DNA, 15 bp, Homo sapiens
ggaaagatctaagat

SEQ ID NO: 1358906 - DNA, 15 bp, Homo sapiens
gggaaagatctaaga

SEQ ID NO: 1358907 - DNA, 15 bp, Homo sapiens
cgggaaagatctaag

SEQ ID NO: 1358908 - DNA, 15 bp, Homo sapiens
gcgggaaagatctaa

SEQ ID NO: 1358909 - DNA, 15 bp, Homo sapiens
agcgggaaagatcta

SEQ ID NO: 1358910 - DNA, 15 bp, Homo sapiens
aagcgggaaagatct

SEQ ID NO: 1358911 - DNA, 15 bp, Homo sapiens
aaagcgggaaagatc

SEQ ID NO: 1358912 - DNA, 15 bp, Homo sapiens
gaaagcgggaaagat

SEQ ID NO: 1358913 - DNA, 15 bp, Homo sapiens
agaaagcgggaaaga

SEQ ID NO: 1358914 - DNA, 15 bp, Homo sapiens
gagaaagcgggaaag

SEQ ID NO: 1358915 - DNA, 15 bp, Homo sapiens
ggagaaagcgggaaa

SEQ ID NO: 1358916 - DNA, 15 bp, Homo sapiens
aggagaaagcgggaa

SEQ ID NO: 1358917 - DNA, 15 bp, Homo sapiens
caggagaaagcggga

SEQ ID NO: 1358918 - DNA, 15 bp, Homo sapiens
acaggagaaagcggg

SEQ ID NO: 1358919 - DNA, 15 bp, Homo sapiens
cacaggagaaagcgg

SEQ ID NO: 1358920 - DNA, 15 bp, Homo sapiens
ccacaggagaaagcg

SEQ ID NO: 1358921 - DNA, 15 bp, Homo sapiens
cccacaggagaaagc

SEQ ID NO: 1358922 - DNA, 15 bp, Homo sapiens
gcccacaggagaaag

SEQ ID NO: 1358923 - DNA, 15 bp, Homo sapiens
tgcccacaggagaaa

SEQ ID NO: 1358924 - DNA, 15 bp, Homo sapiens
atgcccacaggagaa

SEQ ID NO: 1358925 - DNA, 15 bp, Homo sapiens
aatgcccacaggaga

SEQ ID NO: 1358926 - DNA, 15 bp, Homo sapiens
aaatgcccacaggag

SEQ ID NO: 1358927 - DNA, 15 bp, Homo sapiens
taaatgcccacagga

SEQ ID NO: 1358928 - DNA, 15 bp, Homo sapiens
ctaaatgcccacagg

SEQ ID NO: 1358929 - DNA, 15 bp, Homo sapiens
gctaaatgcccacag

SEQ ID NO: 1358930 - DNA, 15 bp, Homo sapiens
cgctaaatgcccaca

SEQ ID NO: 1358931 - DNA, 15 bp, Homo sapiens
gcgctaaatgcccac

SEQ ID NO: 1358932 - DNA, 15 bp, Homo sapiens
agcgctaaatgccca

SEQ ID NO: 1358933 - DNA, 15 bp, Homo sapiens
tagcgctaaatgccc

SEQ ID NO: 1358934 - DNA, 15 bp, Homo sapiens
atagcgctaaatgcc

SEQ ID NO: 1358935 - DNA, 15 bp, Homo sapiens
tatagcgctaaatgc

SEQ ID NO: 1358936 - DNA, 15 bp, Homo sapiens
ttatagcgctaaatg

SEQ ID NO: 1358937 - DNA, 15 bp, Homo sapiens
tttatagcgctaaat

SEQ ID NO: 1358938 - DNA, 15 bp, Homo sapiens
atttatagcgctaaa

SEQ ID NO: 1358939 - DNA, 15 bp, Homo sapiens
aatttatagcgctaa

SEQ ID NO: 1358940 - DNA, 15 bp, Homo sapiens
aaatttatagcgcta

SEQ ID NO: 1358941 - DNA, 15 bp, Homo sapiens
gaaatttatagcgct

SEQ ID NO: 1358942 - DNA, 15 bp, Homo sapiens
ggaaatttatagcgc

SEQ ID NO: 1358943 - DNA, 15 bp, Homo sapiens
gggaaatttatagcg

SEQ ID NO: 1358944 - DNA, 15 bp, Homo sapiens
agggaaatttatagc

SEQ ID NO: 1358945 - DNA, 15 bp, Homo sapiens
gagggaaatttatag

SEQ ID NO: 1358946 - DNA, 15 bp, Homo sapiens
agagggaaatttata

SEQ ID NO: 1358947 - DNA, 15 bp, Homo sapiens
tagagggaaatttat

SEQ ID NO: 1358948 - DNA, 15 bp, Homo sapiens
ttagagggaaattta

SEQ ID NO: 1358949 - DNA, 15 bp, Homo sapiens
tttagagggaaattt

SEQ ID NO: 1358950 - DNA, 15 bp, Homo sapiens
atttagagggaaatt

SEQ ID NO: 1358951 - DNA, 15 bp, Homo sapiens
catttagagggaaat

SEQ ID NO: 1358952 - DNA, 15 bp, Homo sapiens
gcatttagagggaaa

SEQ ID NO: 1358953 - DNA, 15 bp, Homo sapiens
agcatttagagggaa

SEQ ID NO: 1358954 - DNA, 15 bp, Homo sapiens
cagcatttagaggga

SEQ ID NO: 1358955 - DNA, 15 bp, Homo sapiens
gcagcatttagaggg

SEQ ID NO: 1358956 - DNA, 15 bp, Homo sapiens
agcagcatttagagg

SEQ ID NO: 1358957 - DNA, 15 bp, Homo sapiens
aagcagcatttagag

SEQ ID NO: 1358958 - DNA, 15 bp, Homo sapiens
aaagcagcatttaga

SEQ ID NO: 1358959 - DNA, 15 bp, Homo sapiens
taaagcagcatttag

SEQ ID NO: 1358960 - DNA, 15 bp, Homo sapiens
ctaaagcagcattta

SEQ ID NO: 1358961 - DNA, 15 bp, Homo sapiens
gctaaagcagcattt

SEQ ID NO: 1358962 - DNA, 15 bp, Homo sapiens
agctaaagcagcatt

SEQ ID NO: 1358963 - DNA, 15 bp, Homo sapiens
cagctaaagcagcat

SEQ ID NO: 1358964 - DNA, 15 bp, Homo sapiens
acagctaaagcagca

SEQ ID NO: 1358965 - DNA, 15 bp, Homo sapiens
cacagctaaagcagc

SEQ ID NO: 1358966 - DNA, 15 bp, Homo sapiens
acacagctaaagcag

SEQ ID NO: 1358967 - DNA, 15 bp, Homo sapiens
tacacagctaaagca

SEQ ID NO: 1358968 - DNA, 15 bp, Homo sapiens
gtacacagctaaagc

SEQ ID NO: 1358969 - DNA, 15 bp, Homo sapiens
ggtacacagctaaag

SEQ ID NO: 1358970 - DNA, 15 bp, Homo sapiens
tggtacacagctaaa

SEQ ID NO: 1358971 - DNA, 15 bp, Homo sapiens
ctggtacacagctaa

SEQ ID NO: 1358972 - DNA, 15 bp, Homo sapiens
cctggtacacagcta

SEQ ID NO: 1358973 - DNA, 15 bp, Homo sapiens
ccctggtacacagct

SEQ ID NO: 1358974 - DNA, 15 bp, Homo sapiens
tccctggtacacagc

SEQ ID NO: 1358975 - DNA, 15 bp, Homo sapiens
atccctggtacacag

SEQ ID NO: 1358976 - DNA, 15 bp, Homo sapiens
aatccctggtacaca

SEQ ID NO: 1358977 - DNA, 15 bp, Homo sapiens
gaatccctggtacac

SEQ ID NO: 1358978 - DNA, 15 bp, Homo sapiens
agaatccctggtaca

SEQ ID NO: 1358979 - DNA, 15 bp, Homo sapiens
aagaatccctggtac

SEQ ID NO: 1358980 - DNA, 15 bp, Homo sapiens
caagaatccctggta

SEQ ID NO: 1358981 - DNA, 15 bp, Homo sapiens
acaagaatccctggt

SEQ ID NO: 1358982 - DNA, 15 bp, Homo sapiens
tacaagaatccctgg

SEQ ID NO: 1358983 - DNA, 15 bp, Homo sapiens
gtacaagaatccctg

SEQ ID NO: 1358984 - DNA, 15 bp, Homo sapiens
tgtacaagaatccct

SEQ ID NO: 1358985 - DNA, 15 bp, Homo sapiens
atgtacaagaatccc

SEQ ID NO: 1358986 - DNA, 15 bp, Homo sapiens
aatgtacaagaatcc

SEQ ID NO: 1358987 - DNA, 15 bp, Homo sapiens
caatgtacaagaatc

SEQ ID NO: 1358988 - DNA, 15 bp, Homo sapiens
acaatgtacaagaat

SEQ ID NO: 1358989 - DNA, 15 bp, Homo sapiens
cacaatgtacaagaa

SEQ ID NO: 1358990 - DNA, 15 bp, Homo sapiens
acacaatgtacaaga

SEQ ID NO: 1358991 - DNA, 15 bp, Homo sapiens
gacacaatgtacaag

SEQ ID NO: 1358992 - DNA, 15 bp, Homo sapiens
agacacaatgtacaa

SEQ ID NO: 1358993 - DNA, 15 bp, Homo sapiens
aagacacaatgtaca

SEQ ID NO: 1358994 - DNA, 15 bp, Homo sapiens
aaagacacaatgtac

SEQ ID NO: 1358995 - DNA, 15 bp, Homo sapiens
caaagacacaatgta

SEQ ID NO: 1358996 - DNA, 15 bp, Homo sapiens
acaaagacacaatgt

SEQ ID NO: 1358997 - DNA, 15 bp, Homo sapiens
aacaaagacacaatg

SEQ ID NO: 1358998 - DNA, 15 bp, Homo sapiens
gaacaaagacacaat

SEQ ID NO: 1358999 - DNA, 15 bp, Homo sapiens
agaacaaagacacaa

SEQ ID NO: 1359000 - DNA, 15 bp, Homo sapiens
gagaacaaagacaca

SEQ ID NO: 1359001 - DNA, 15 bp, Homo sapiens
tgagaacaaagacac

SEQ ID NO: 1359002 - DNA, 15 bp, Homo sapiens
atgagaacaaagaca

SEQ ID NO: 1359003 - DNA, 15 bp, Homo sapiens
aatgagaacaaagac

SEQ ID NO: 1359004 - DNA, 15 bp, Homo sapiens
caatgagaacaaaga

SEQ ID NO: 1359005 - DNA, 15 bp, Homo sapiens
ccaatgagaacaaag

SEQ ID NO: 1359006 - DNA, 15 bp, Homo sapiens
accaatgagaacaaa

SEQ ID NO: 1359007 - DNA, 15 bp, Homo sapiens
aaccaatgagaacaa

SEQ ID NO: 1359008 - DNA, 15 bp, Homo sapiens
aaaccaatgagaaca

SEQ ID NO: 1359009 - DNA, 15 bp, Homo sapiens
gaaaccaatgagaac

SEQ ID NO: 1359010 - DNA, 15 bp, Homo sapiens
tgaaaccaatgagaa

SEQ ID NO: 1359011 - DNA, 15 bp, Homo sapiens
ttgaaaccaatgaga

SEQ ID NO: 1359012 - DNA, 15 bp, Homo sapiens
tttgaaaccaatgag

SEQ ID NO: 1359013 - DNA, 15 bp, Homo sapiens
ctttgaaaccaatga

SEQ ID NO: 1359014 - DNA, 15 bp, Homo sapiens
tctttgaaaccaatg

SEQ ID NO: 1359015 - DNA, 15 bp, Homo sapiens
ttctttgaaaccaat

SEQ ID NO: 1359016 - DNA, 15 bp, Homo sapiens
gttctttgaaaccaa

SEQ ID NO: 1359017 - DNA, 15 bp, Homo sapiens
agttctttgaaacca

SEQ ID NO: 1359018 - DNA, 15 bp, Homo sapiens
aagttctttgaaacc

SEQ ID NO: 1359019 - DNA, 15 bp, Homo sapiens
taagttctttgaaac

SEQ ID NO: 1359020 - DNA, 15 bp, Homo sapiens
ataagttctttgaaa

SEQ ID NO: 1359021 - DNA, 15 bp, Homo sapiens
aataagttctttgaa

SEQ ID NO: 1359022 - DNA, 15 bp, Homo sapiens
aaataagttctttga

SEQ ID NO: 1359023 - DNA, 15 bp, Homo sapiens
taaataagttctttg

SEQ ID NO: 1359024 - DNA, 15 bp, Homo sapiens
ataaataagttcttt

SEQ ID NO: 1359025 - DNA, 15 bp, Homo sapiens
aataaataagttctt

SEQ ID NO: 1359026 - DNA, 15 bp, Homo sapiens
aaataaataagttct

SEQ ID NO: 1359027 - DNA, 15 bp, Homo sapiens
gaaataaataagttc

SEQ ID NO: 1359028 - DNA, 15 bp, Homo sapiens
agaaataaataagtt

SEQ ID NO: 1359029 - DNA, 15 bp, Homo sapiens
cagaaataaataagt

SEQ ID NO: 1359030 - DNA, 15 bp, Homo sapiens
gcagaaataaataag

SEQ ID NO: 1359031 - DNA, 15 bp, Homo sapiens
ggcagaaataaataa

SEQ ID NO: 1359032 - DNA, 15 bp, Homo sapiens
aggcagaaataaata

SEQ ID NO: 1359033 - DNA, 15 bp, Homo sapiens
aaggcagaaataaat

SEQ ID NO: 1359034 - DNA, 15 bp, Homo sapiens
taaggcagaaataaa

SEQ ID NO: 1359035 - DNA, 15 bp, Homo sapiens
ttaaggcagaaataa

SEQ ID NO: 1359036 - DNA, 15 bp, Homo sapiens
attaaggcagaaata

SEQ ID NO: 1359037 - DNA, 15 bp, Homo sapiens
aattaaggcagaaat

SEQ ID NO: 1359038 - DNA, 15 bp, Homo sapiens
aaattaaggcagaaa

SEQ ID NO: 1359039 - DNA, 15 bp, Homo sapiens
gaaattaaggcagaa

SEQ ID NO: 1359040 - DNA, 15 bp, Homo sapiens
tgaaattaaggcaga

SEQ ID NO: 1359041 - DNA, 15 bp, Homo sapiens
atgaaattaaggcag

SEQ ID NO: 1359042 - DNA, 15 bp, Homo sapiens
aatgaaattaaggca

SEQ ID NO: 1359043 - DNA, 15 bp, Homo sapiens
taatgaaattaaggc

SEQ ID NO: 1359044 - DNA, 15 bp, Homo sapiens
ataatgaaattaagg

SEQ ID NO: 1359045 - DNA, 15 bp, Homo sapiens
aataatgaaattaag

SEQ ID NO: 1359046 - DNA, 15 bp, Homo sapiens
aaataatgaaattaa

SEQ ID NO: 1359047 - DNA, 15 bp, Homo sapiens
taaataatgaaatta

SEQ ID NO: 1359048 - DNA, 15 bp, Homo sapiens
gtaaataatgaaatt

SEQ ID NO: 1359049 - DNA, 15 bp, Homo sapiens
ggtaaataatgaaat

SEQ ID NO: 1359050 - DNA, 15 bp, Homo sapiens
gggtaaataatgaaa

SEQ ID NO: 1359051 - DNA, 15 bp, Homo sapiens
tgggtaaataatgaa

SEQ ID NO: 1359052 - DNA, 15 bp, Homo sapiens
ctgggtaaataatga

SEQ ID NO: 1359053 - DNA, 15 bp, Homo sapiens
actgggtaaataatg

SEQ ID NO: 1359054 - DNA, 15 bp, Homo sapiens
tactgggtaaataat

SEQ ID NO: 1359055 - DNA, 15 bp, Homo sapiens
ctactgggtaaataa

SEQ ID NO: 1359056 - DNA, 15 bp, Homo sapiens
actactgggtaaata

SEQ ID NO: 1359057 - DNA, 15 bp, Homo sapiens
gactactgggtaaat

SEQ ID NO: 1359058 - DNA, 15 bp, Homo sapiens
tgactactgggtaaa

SEQ ID NO: 1359059 - DNA, 15 bp, Homo sapiens
atgactactgggtaa

SEQ ID NO: 1359060 - DNA, 15 bp, Homo sapiens
aatgactactgggta

SEQ ID NO: 1359061 - DNA, 15 bp, Homo sapiens
gaatgactactgggt

SEQ ID NO: 1359062 - DNA, 15 bp, Homo sapiens
tgaatgactactggg

SEQ ID NO: 1359063 - DNA, 15 bp, Homo sapiens
ctgaatgactactgg

SEQ ID NO: 1359064 - DNA, 15 bp, Homo sapiens
cctgaatgactactg

SEQ ID NO: 1359065 - DNA, 15 bp, Homo sapiens
tcctgaatgactact

SEQ ID NO: 1359066 - DNA, 15 bp, Homo sapiens
ctcctgaatgactac

SEQ ID NO: 1359067 - DNA, 15 bp, Homo sapiens
actcctgaatgacta

SEQ ID NO: 1359068 - DNA, 15 bp, Homo sapiens
tactcctgaatgact

SEQ ID NO: 1359069 - DNA, 15 bp, Homo sapiens
ctactcctgaatgac

SEQ ID NO: 1359070 - DNA, 15 bp, Homo sapiens
gctactcctgaatga

SEQ ID NO: 1359071 - DNA, 15 bp, Homo sapiens
agctactcctgaatg

SEQ ID NO: 1359072 - DNA, 15 bp, Homo sapiens
aagctactcctgaat

SEQ ID NO: 1359073 - DNA, 15 bp, Homo sapiens
caagctactcctgaa

SEQ ID NO: 1359074 - DNA, 15 bp, Homo sapiens
acaagctactcctga

SEQ ID NO: 1359075 - DNA, 15 bp, Homo sapiens
aacaagctactcctg

SEQ ID NO: 1359076 - DNA, 15 bp, Homo sapiens
gaacaagctactcct

SEQ ID NO: 1359077 - DNA, 15 bp, Homo sapiens
tgaacaagctactcc

SEQ ID NO: 1359078 - DNA, 15 bp, Homo sapiens
ctgaacaagctactc

SEQ ID NO: 1359079 - DNA, 15 bp, Homo sapiens
actgaacaagctact

SEQ ID NO: 1359080 - DNA, 15 bp, Homo sapiens
aactgaacaagctac

SEQ ID NO: 1359081 - DNA, 15 bp, Homo sapiens
aaactgaacaagcta

SEQ ID NO: 1359082 - DNA, 15 bp, Homo sapiens
gaaactgaacaagct

SEQ ID NO: 1359083 - DNA, 15 bp, Homo sapiens
ggaaactgaacaagc

SEQ ID NO: 1359084 - DNA, 15 bp, Homo sapiens
tggaaactgaacaag

SEQ ID NO: 1359085 - DNA, 15 bp, Homo sapiens
atggaaactgaacaa

SEQ ID NO: 1359086 - DNA, 15 bp, Homo sapiens
catggaaactgaaca

SEQ ID NO: 1359087 - DNA, 15 bp, Homo sapiens
acatggaaactgaac

SEQ ID NO: 1359088 - DNA, 15 bp, Homo sapiens
tacatggaaactgaa

SEQ ID NO: 1359089 - DNA, 15 bp, Homo sapiens
ctacatggaaactga

SEQ ID NO: 1359090 - DNA, 15 bp, Homo sapiens
actacatggaaactg

SEQ ID NO: 1359091 - DNA, 15 bp, Homo sapiens
aactacatggaaact

SEQ ID NO: 1359092 - DNA, 15 bp, Homo sapiens
caactacatggaaac

SEQ ID NO: 1359093 - DNA, 15 bp, Homo sapiens
acaactacatggaaa

SEQ ID NO: 1359094 - DNA, 15 bp, Homo sapiens
tacaactacatggaa

SEQ ID NO: 1359095 - DNA, 15 bp, Homo sapiens
atacaactacatgga

SEQ ID NO: 1359096 - DNA, 15 bp, Homo sapiens
catacaactacatgg

SEQ ID NO: 1359097 - DNA, 15 bp, Homo sapiens
ccatacaactacatg

SEQ ID NO: 1359098 - DNA, 15 bp, Homo sapiens
accatacaactacat

SEQ ID NO: 1359099 - DNA, 15 bp, Homo sapiens
aaccatacaactaca

SEQ ID NO: 1359100 - DNA, 15 bp, Homo sapiens
aaaccatacaactac

SEQ ID NO: 1359101 - DNA, 15 bp, Homo sapiens
aaaaccatacaacta

SEQ ID NO: 1359102 - DNA, 15 bp, Homo sapiens
caaaaccatacaact

SEQ ID NO: 1359103 - DNA, 15 bp, Homo sapiens
tcaaaaccatacaac

SEQ ID NO: 1359104 - DNA, 15 bp, Homo sapiens
ctcaaaaccatacaa

SEQ ID NO: 1359105 - DNA, 15 bp, Homo sapiens
actcaaaaccataca

SEQ ID NO: 1359106 - DNA, 15 bp, Homo sapiens
cactcaaaaccatac

SEQ ID NO: 1359107 - DNA, 15 bp, Homo sapiens
tcactcaaaaccata

SEQ ID NO: 1359108 - DNA, 15 bp, Homo sapiens
ctcactcaaaaccat

SEQ ID NO: 1359109 - DNA, 15 bp, Homo sapiens
actcactcaaaacca

SEQ ID NO: 1359110 - DNA, 15 bp, Homo sapiens
aactcactcaaaacc

SEQ ID NO: 1359111 - DNA, 15 bp, Homo sapiens
aaactcactcaaaac

SEQ ID NO: 1359112 - DNA, 15 bp, Homo sapiens
gaaactcactcaaaa

SEQ ID NO: 1359113 - DNA, 15 bp, Homo sapiens
agaaactcactcaaa

SEQ ID NO: 1359114 - DNA, 15 bp, Homo sapiens
aagaaactcactcaa

SEQ ID NO: 1359115 - DNA, 15 bp, Homo sapiens
taagaaactcactca

SEQ ID NO: 1359116 - DNA, 15 bp, Homo sapiens
ttaagaaactcactc

SEQ ID NO: 1359117 - DNA, 15 bp, Homo sapiens
attaagaaactcact

SEQ ID NO: 1359118 - DNA, 15 bp, Homo sapiens
gattaagaaactcac

SEQ ID NO: 1359119 - DNA, 15 bp, Homo sapiens
ggattaagaaactca

SEQ ID NO: 1359120 - DNA, 15 bp, Homo sapiens
aggattaagaaactc

SEQ ID NO: 1359121 - DNA, 15 bp, Homo sapiens
caggattaagaaact

SEQ ID NO: 1359122 - DNA, 15 bp, Homo sapiens
tcaggattaagaaac

SEQ ID NO: 1359123 - DNA, 15 bp, Homo sapiens
ctcaggattaagaaa

SEQ ID NO: 1359124 - DNA, 15 bp, Homo sapiens
actcaggattaagaa

SEQ ID NO: 1359125 - DNA, 15 bp, Homo sapiens
aactcaggattaaga

SEQ ID NO: 1359126 - DNA, 15 bp, Homo sapiens
gaactcaggattaag

SEQ ID NO: 1359127 - DNA, 15 bp, Homo sapiens
agaactcaggattaa

SEQ ID NO: 1359128 - DNA, 15 bp, Homo sapiens
tagaactcaggatta

SEQ ID NO: 1359129 - DNA, 15 bp, Homo sapiens
ttagaactcaggatt

SEQ ID NO: 1359130 - DNA, 15 bp, Homo sapiens
attagaactcaggat

SEQ ID NO: 1359131 - DNA, 15 bp, Homo sapiens
aattagaactcagga

SEQ ID NO: 1359132 - DNA, 15 bp, Homo sapiens
aaattagaactcagg

SEQ ID NO: 1359133 - DNA, 15 bp, Homo sapiens
caaattagaactcag

SEQ ID NO: 1359134 - DNA, 15 bp, Homo sapiens
tcaaattagaactca

SEQ ID NO: 1359135 - DNA, 15 bp, Homo sapiens
atcaaattagaactc

SEQ ID NO: 1359136 - DNA, 15 bp, Homo sapiens
aatcaaattagaact

SEQ ID NO: 1359137 - DNA, 15 bp, Homo sapiens
caatcaaattagaac

SEQ ID NO: 1359138 - DNA, 15 bp, Homo sapiens
gcaatcaaattagaa

SEQ ID NO: 1359139 - DNA, 15 bp, Homo sapiens
tgcaatcaaattaga

SEQ ID NO: 1359140 - DNA, 15 bp, Homo sapiens
gtgcaatcaaattag

SEQ ID NO: 1359141 - DNA, 15 bp, Homo sapiens
agtgcaatcaaatta

SEQ ID NO: 1359142 - DNA, 15 bp, Homo sapiens
cagtgcaatcaaatt

SEQ ID NO: 1359143 - DNA, 15 bp, Homo sapiens
acagtgcaatcaaat

SEQ ID NO: 1359144 - DNA, 15 bp, Homo sapiens
cacagtgcaatcaaa

SEQ ID NO: 1359145 - DNA, 15 bp, Homo sapiens
ccacagtgcaatcaa

SEQ ID NO: 1359146 - DNA, 15 bp, Homo sapiens
accacagtgcaatca

SEQ ID NO: 1359147 - DNA, 15 bp, Homo sapiens
gaccacagtgcaatc

SEQ ID NO: 1359148 - DNA, 15 bp, Homo sapiens
agaccacagtgcaat

SEQ ID NO: 1359149 - DNA, 15 bp, Homo sapiens
cagaccacagtgcaa

SEQ ID NO: 1359150 - DNA, 15 bp, Homo sapiens
tcagaccacagtgca

SEQ ID NO: 1359151 - DNA, 15 bp, Homo sapiens
ctcagaccacagtgc

SEQ ID NO: 1359152 - DNA, 15 bp, Homo sapiens
tctcagaccacagtg

SEQ ID NO: 1359153 - DNA, 15 bp, Homo sapiens
ctctcagaccacagt

SEQ ID NO: 1359154 - DNA, 15 bp, Homo sapiens
tctctcagaccacag

SEQ ID NO: 1359155 - DNA, 15 bp, Homo sapiens
gtctctcagaccaca

SEQ ID NO: 1359156 - DNA, 15 bp, Homo sapiens
agtctctcagaccac

SEQ ID NO: 1359157 - DNA, 15 bp, Homo sapiens
cagtctctcagacca

SEQ ID NO: 1359158 - DNA, 15 bp, Homo sapiens
acagtctctcagacc

SEQ ID NO: 1359159 - DNA, 15 bp, Homo sapiens
aacagtctctcagac

SEQ ID NO: 1359160 - DNA, 15 bp, Homo sapiens
aaacagtctctcaga

SEQ ID NO: 1359161 - DNA, 15 bp, Homo sapiens
caaacagtctctcag

SEQ ID NO: 1359162 - DNA, 15 bp, Homo sapiens
acaaacagtctctca

SEQ ID NO: 1359163 - DNA, 15 bp, Homo sapiens
aacaaacagtctctc

SEQ ID NO: 1359164 - DNA, 15 bp, Homo sapiens
taacaaacagtctct

SEQ ID NO: 1359165 - DNA, 15 bp, Homo sapiens
ataacaaacagtctc

SEQ ID NO: 1359166 - DNA, 15 bp, Homo sapiens
cataacaaacagtct

SEQ ID NO: 1359167 - DNA, 15 bp, Homo sapiens
tcataacaaacagtc

SEQ ID NO: 1359168 - DNA, 15 bp, Homo sapiens
atcataacaaacagt

SEQ ID NO: 1359169 - DNA, 15 bp, Homo sapiens
aatcataacaaacag

SEQ ID NO: 1359170 - DNA, 15 bp, Homo sapiens
aaatcataacaaaca

SEQ ID NO: 1359171 - DNA, 15 bp, Homo sapiens
gaaatcataacaaac

SEQ ID NO: 1359172 - DNA, 15 bp, Homo sapiens
ggaaatcataacaaa

SEQ ID NO: 1359173 - DNA, 15 bp, Homo sapiens
tggaaatcataacaa

SEQ ID NO: 1359174 - DNA, 15 bp, Homo sapiens
atggaaatcataaca

SEQ ID NO: 1359175 - DNA, 15 bp, Homo sapiens
aatggaaatcataac

SEQ ID NO: 1359176 - DNA, 15 bp, Homo sapiens
gaatggaaatcataa

SEQ ID NO: 1359177 - DNA, 15 bp, Homo sapiens
agaatggaaatcata

SEQ ID NO: 1359178 - DNA, 15 bp, Homo sapiens
aagaatggaaatcat

SEQ ID NO: 1359179 - DNA, 15 bp, Homo sapiens
aaagaatggaaatca

SEQ ID NO: 1359180 - DNA, 15 bp, Homo sapiens
aaaagaatggaaatc

SEQ ID NO: 1359181 - DNA, 15 bp, Homo sapiens
caaaagaatggaaat

SEQ ID NO: 1359182 - DNA, 15 bp, Homo sapiens
gcaaaagaatggaaa

SEQ ID NO: 1359183 - DNA, 15 bp, Homo sapiens
tgcaaaagaatggaa

SEQ ID NO: 1359184 - DNA, 15 bp, Homo sapiens
atgcaaaagaatgga

SEQ ID NO: 1359185 - DNA, 15 bp, Homo sapiens
aatgcaaaagaatgg

SEQ ID NO: 1359186 - DNA, 15 bp, Homo sapiens
aaatgcaaaagaatg

SEQ ID NO: 1359187 - DNA, 15 bp, Homo sapiens
caaatgcaaaagaat

SEQ ID NO: 1359188 - DNA, 15 bp, Homo sapiens
gcaaatgcaaaagaa

SEQ ID NO: 1359189 - DNA, 15 bp, Homo sapiens
agcaaatgcaaaaga

SEQ ID NO: 1359190 - DNA, 15 bp, Homo sapiens
cagcaaatgcaaaag

SEQ ID NO: 1359191 - DNA, 15 bp, Homo sapiens
tcagcaaatgcaaaa

SEQ ID NO: 1359192 - DNA, 15 bp, Homo sapiens
ctcagcaaatgcaaa

SEQ ID NO: 1359193 - DNA, 15 bp, Homo sapiens
cctcagcaaatgcaa

SEQ ID NO: 1359194 - DNA, 15 bp, Homo sapiens
tcctcagcaaatgca

SEQ ID NO: 1359195 - DNA, 15 bp, Homo sapiens
ctcctcagcaaatgc

SEQ ID NO: 1359196 - DNA, 15 bp, Homo sapiens
actcctcagcaaatg

SEQ ID NO: 1359197 - DNA, 15 bp, Homo sapiens
cactcctcagcaaat

SEQ ID NO: 1359198 - DNA, 15 bp, Homo sapiens
acactcctcagcaaa

SEQ ID NO: 1359199 - DNA, 15 bp, Homo sapiens
aacactcctcagcaa

SEQ ID NO: 1359200 - DNA, 15 bp, Homo sapiens
aaacactcctcagca

SEQ ID NO: 1359201 - DNA, 15 bp, Homo sapiens
aaaacactcctcagc

SEQ ID NO: 1359202 - DNA, 15 bp, Homo sapiens
caaaacactcctcag

SEQ ID NO: 1359203 - DNA, 15 bp, Homo sapiens
gcaaaacactcctca

SEQ ID NO: 1359204 - DNA, 15 bp, Homo sapiens
agcaaaacactcctc

SEQ ID NO: 1359205 - DNA, 15 bp, Homo sapiens
gagcaaaacactcct

SEQ ID NO: 1359206 - DNA, 15 bp, Homo sapiens
ggagcaaaacactcc

SEQ ID NO: 1359207 - DNA, 15 bp, Homo sapiens
gggagcaaaacactc

SEQ ID NO: 1359208 - DNA, 15 bp, Homo sapiens
tgggagcaaaacact

SEQ ID NO: 1359209 - DNA, 15 bp, Homo sapiens
ttgggagcaaaacac

SEQ ID NO: 1359210 - DNA, 15 bp, Homo sapiens
attgggagcaaaaca

SEQ ID NO: 1359211 - DNA, 15 bp, Homo sapiens
aattgggagcaaaac

SEQ ID NO: 1359212 - DNA, 15 bp, Homo sapiens
taattgggagcaaaa

SEQ ID NO: 1359213 - DNA, 15 bp, Homo sapiens
ataattgggagcaaa

SEQ ID NO: 1359214 - DNA, 15 bp, Homo sapiens
cataattgggagcaa

SEQ ID NO: 1359215 - DNA, 15 bp, Homo sapiens
acataattgggagca

SEQ ID NO: 1359216 - DNA, 15 bp, Homo sapiens
cacataattgggagc

SEQ ID NO: 1359217 - DNA, 15 bp, Homo sapiens
ccacataattgggag

SEQ ID NO: 1359218 - DNA, 15 bp, Homo sapiens
accacataattggga

SEQ ID NO: 1359219 - DNA, 15 bp, Homo sapiens
gaccacataattggg

SEQ ID NO: 1359220 - DNA, 15 bp, Homo sapiens
tgaccacataattgg

SEQ ID NO: 1359221 - DNA, 15 bp, Homo sapiens
ttgaccacataattg

SEQ ID NO: 1359222 - DNA, 15 bp, Homo sapiens
attgaccacataatt

SEQ ID NO: 1359223 - DNA, 15 bp, Homo sapiens
aattgaccacataat

SEQ ID NO: 1359224 - DNA, 15 bp, Homo sapiens
aaattgaccacataa

SEQ ID NO: 1359225 - DNA, 15 bp, Homo sapiens
aaaattgaccacata

SEQ ID NO: 1359226 - DNA, 15 bp, Homo sapiens
taaaattgaccacat

SEQ ID NO: 1359227 - DNA, 15 bp, Homo sapiens
ctaaaattgaccaca

SEQ ID NO: 1359228 - DNA, 15 bp, Homo sapiens
tctaaaattgaccac

SEQ ID NO: 1359229 - DNA, 15 bp, Homo sapiens
ttctaaaattgacca

SEQ ID NO: 1359230 - DNA, 15 bp, Homo sapiens
attctaaaattgacc

SEQ ID NO: 1359231 - DNA, 15 bp, Homo sapiens
tattctaaaattgac

SEQ ID NO: 1359232 - DNA, 15 bp, Homo sapiens
ttattctaaaattga

SEQ ID NO: 1359233 - DNA, 15 bp, Homo sapiens
cttattctaaaattg

SEQ ID NO: 1359234 - DNA, 15 bp, Homo sapiens
acttattctaaaatt

SEQ ID NO: 1359235 - DNA, 15 bp, Homo sapiens
cacttattctaaaat

SEQ ID NO: 1359236 - DNA, 15 bp, Homo sapiens
acacttattctaaaa

SEQ ID NO: 1359237 - DNA, 15 bp, Homo sapiens
cacacttattctaaa

SEQ ID NO: 1359238 - DNA, 15 bp, Homo sapiens
tcacacttattctaa

SEQ ID NO: 1359239 - DNA, 15 bp, Homo sapiens
atcacacttattcta

SEQ ID NO: 1359240 - DNA, 15 bp, Homo sapiens
catcacacttattct

SEQ ID NO: 1359241 - DNA, 15 bp, Homo sapiens
acatcacacttattc

SEQ ID NO: 1359242 - DNA, 15 bp, Homo sapiens
cacatcacacttatt

SEQ ID NO: 1359243 - DNA, 15 bp, Homo sapiens
ccacatcacacttat

SEQ ID NO: 1359244 - DNA, 15 bp, Homo sapiens
accacatcacactta

SEQ ID NO: 1359245 - DNA, 15 bp, Homo sapiens
caccacatcacactt

SEQ ID NO: 1359246 - DNA, 15 bp, Homo sapiens
gcaccacatcacact

SEQ ID NO: 1359247 - DNA, 15 bp, Homo sapiens
agcaccacatcacac

SEQ ID NO: 1359248 - DNA, 15 bp, Homo sapiens
cagcaccacatcaca

SEQ ID NO: 1359249 - DNA, 15 bp, Homo sapiens
tcagcaccacatcac

SEQ ID NO: 1359250 - DNA, 15 bp, Homo sapiens
ctcagcaccacatca

SEQ ID NO: 1359251 - DNA, 15 bp, Homo sapiens
tctcagcaccacatc

SEQ ID NO: 1359252 - DNA, 15 bp, Homo sapiens
ttctcagcaccacat

SEQ ID NO: 1359253 - DNA, 15 bp, Homo sapiens
tttctcagcaccaca

SEQ ID NO: 1359254 - DNA, 15 bp, Homo sapiens
ttttctcagcaccac

SEQ ID NO: 1359255 - DNA, 15 bp, Homo sapiens
tttttctcagcacca

SEQ ID NO: 1359256 - DNA, 15 bp, Homo sapiens
atttttctcagcacc

SEQ ID NO: 1359257 - DNA, 15 bp, Homo sapiens
catttttctcagcac

SEQ ID NO: 1359258 - DNA, 15 bp, Homo sapiens
acatttttctcagca

SEQ ID NO: 1359259 - DNA, 15 bp, Homo sapiens
tacatttttctcagc

SEQ ID NO: 1359260 - DNA, 15 bp, Homo sapiens
atacatttttctcag

SEQ ID NO: 1359261 - DNA, 15 bp, Homo sapiens
tatacatttttctca

SEQ ID NO: 1359262 - DNA, 15 bp, Homo sapiens
atatacatttttctc

SEQ ID NO: 1359263 - DNA, 15 bp, Homo sapiens
aatatacatttttct

SEQ ID NO: 1359264 - DNA, 15 bp, Homo sapiens
gaatatacatttttc

SEQ ID NO: 1359265 - DNA, 15 bp, Homo sapiens
agaatatacattttt

SEQ ID NO: 1359266 - DNA, 15 bp, Homo sapiens
cagaatatacatttt

SEQ ID NO: 1359267 - DNA, 15 bp, Homo sapiens
acagaatatacattt

SEQ ID NO: 1359268 - DNA, 15 bp, Homo sapiens
aacagaatatacatt

SEQ ID NO: 1359269 - DNA, 15 bp, Homo sapiens
taacagaatatacat

SEQ ID NO: 1359270 - DNA, 15 bp, Homo sapiens
gtaacagaatataca

SEQ ID NO: 1359271 - DNA, 15 bp, Homo sapiens
agtaacagaatatac

SEQ ID NO: 1359272 - DNA, 15 bp, Homo sapiens
aagtaacagaatata

SEQ ID NO: 1359273 - DNA, 15 bp, Homo sapiens
aaagtaacagaatat

SEQ ID NO: 1359274 - DNA, 15 bp, Homo sapiens
caaagtaacagaata

SEQ ID NO: 1359275 - DNA, 15 bp, Homo sapiens
ccaaagtaacagaat

SEQ ID NO: 1359276 - DNA, 15 bp, Homo sapiens
cccaaagtaacagaa

SEQ ID NO: 1359277 - DNA, 15 bp, Homo sapiens
ccccaaagtaacaga

SEQ ID NO: 1359278 - DNA, 15 bp, Homo sapiens
accccaaagtaacag

SEQ ID NO: 1359279 - DNA, 15 bp, Homo sapiens
caccccaaagtaaca

SEQ ID NO: 1359280 - DNA, 15 bp, Homo sapiens
ccaccccaaagtaac

SEQ ID NO: 1359281 - DNA, 15 bp, Homo sapiens
tccaccccaaagtaa

SEQ ID NO: 1359282 - DNA, 15 bp, Homo sapiens
ctccaccccaaagta

SEQ ID NO: 1359283 - DNA, 15 bp, Homo sapiens
tctccaccccaaagt

SEQ ID NO: 1359284 - DNA, 15 bp, Homo sapiens
ctctccaccccaaag

SEQ ID NO: 1359285 - DNA, 15 bp, Homo sapiens
actctccaccccaaa

SEQ ID NO: 1359286 - DNA, 15 bp, Homo sapiens
aactctccaccccaa

SEQ ID NO: 1359287 - DNA, 15 bp, Homo sapiens
gaactctccacccca

SEQ ID NO: 1359288 - DNA, 15 bp, Homo sapiens
agaactctccacccc

SEQ ID NO: 1359289 - DNA, 15 bp, Homo sapiens
cagaactctccaccc

SEQ ID NO: 1359290 - DNA, 15 bp, Homo sapiens
acagaactctccacc

SEQ ID NO: 1359291 - DNA, 15 bp, Homo sapiens
tacagaactctccac

SEQ ID NO: 1359292 - DNA, 15 bp, Homo sapiens
ctacagaactctcca

SEQ ID NO: 1359293 - DNA, 15 bp, Homo sapiens
tctacagaactctcc

SEQ ID NO: 1359294 - DNA, 15 bp, Homo sapiens
atctacagaactctc

SEQ ID NO: 1359295 - DNA, 15 bp, Homo sapiens
catctacagaactct

SEQ ID NO: 1359296 - DNA, 15 bp, Homo sapiens
acatctacagaactc

SEQ ID NO: 1359297 - DNA, 15 bp, Homo sapiens
gacatctacagaact

SEQ ID NO: 1359298 - DNA, 15 bp, Homo sapiens
agacatctacagaac

SEQ ID NO: 1359299 - DNA, 15 bp, Homo sapiens
tagacatctacagaa

SEQ ID NO: 1359300 - DNA, 15 bp, Homo sapiens
atagacatctacaga

SEQ ID NO: 1359301 - DNA, 15 bp, Homo sapiens
aatagacatctacag

SEQ ID NO: 1359302 - DNA, 15 bp, Homo sapiens
taatagacatctaca

SEQ ID NO: 1359303 - DNA, 15 bp, Homo sapiens
ctaatagacatctac

SEQ ID NO: 1359304 - DNA, 15 bp, Homo sapiens
cctaatagacatcta

SEQ ID NO: 1359305 - DNA, 15 bp, Homo sapiens
acctaatagacatct

SEQ ID NO: 1359306 - DNA, 15 bp, Homo sapiens
gacctaatagacatc

SEQ ID NO: 1359307 - DNA, 15 bp, Homo sapiens
ggacctaatagacat

SEQ ID NO: 1359308 - DNA, 15 bp, Homo sapiens
cggacctaatagaca

SEQ ID NO: 1359309 - DNA, 15 bp, Homo sapiens
gcggacctaatagac

SEQ ID NO: 1359310 - DNA, 15 bp, Homo sapiens
agcggacctaataga

SEQ ID NO: 1359311 - DNA, 15 bp, Homo sapiens
aagcggacctaatag

SEQ ID NO: 1359312 - DNA, 15 bp, Homo sapiens
caagcggacctaata

SEQ ID NO: 1359313 - DNA, 15 bp, Homo sapiens
tcaagcggacctaat

SEQ ID NO: 1359314 - DNA, 15 bp, Homo sapiens
atcaagcggacctaa

SEQ ID NO: 1359315 - DNA, 15 bp, Homo sapiens
gatcaagcggaccta

SEQ ID NO: 1359316 - DNA, 15 bp, Homo sapiens
ggatcaagcggacct

SEQ ID NO: 1359317 - DNA, 15 bp, Homo sapiens
aggatcaagcggacc

SEQ ID NO: 1359318 - DNA, 15 bp, Homo sapiens
caggatcaagcggac

SEQ ID NO: 1359319 - DNA, 15 bp, Homo sapiens
tcaggatcaagcgga

SEQ ID NO: 1359320 - DNA, 15 bp, Homo sapiens
ctcaggatcaagcgg

SEQ ID NO: 1359321 - DNA, 15 bp, Homo sapiens
actcaggatcaagcg

SEQ ID NO: 1359322 - DNA, 15 bp, Homo sapiens
aactcaggatcaagc

SEQ ID NO: 1359323 - DNA, 15 bp, Homo sapiens
aaactcaggatcaag

SEQ ID NO: 1359324 - DNA, 15 bp, Homo sapiens
taaactcaggatcaa

SEQ ID NO: 1359325 - DNA, 15 bp, Homo sapiens
ttaaactcaggatca

SEQ ID NO: 1359326 - DNA, 15 bp, Homo sapiens
cttaaactcaggatc

SEQ ID NO: 1359327 - DNA, 15 bp, Homo sapiens
acttaaactcaggat

SEQ ID NO: 1359328 - DNA, 15 bp, Homo sapiens
gacttaaactcagga

SEQ ID NO: 1359329 - DNA, 15 bp, Homo sapiens
agacttaaactcagg

SEQ ID NO: 1359330 - DNA, 15 bp, Homo sapiens
aagacttaaactcag

SEQ ID NO: 1359331 - DNA, 15 bp, Homo sapiens
gaagacttaaactca

SEQ ID NO: 1359332 - DNA, 15 bp, Homo sapiens
tgaagacttaaactc

SEQ ID NO: 1359333 - DNA, 15 bp, Homo sapiens
ttgaagacttaaact

SEQ ID NO: 1359334 - DNA, 15 bp, Homo sapiens
attgaagacttaaac

SEQ ID NO: 1359335 - DNA, 15 bp, Homo sapiens
tattgaagacttaaa

SEQ ID NO: 1359336 - DNA, 15 bp, Homo sapiens
atattgaagacttaa

SEQ ID NO: 1359337 - DNA, 15 bp, Homo sapiens
gatattgaagactta

SEQ ID NO: 1359338 - DNA, 15 bp, Homo sapiens
ggatattgaagactt

SEQ ID NO: 1359339 - DNA, 15 bp, Homo sapiens
aggatattgaagact

SEQ ID NO: 1359340 - DNA, 15 bp, Homo sapiens
aaggatattgaagac

SEQ ID NO: 1359341 - DNA, 15 bp, Homo sapiens
caaggatattgaaga

SEQ ID NO: 1359342 - DNA, 15 bp, Homo sapiens
acaaggatattgaag

SEQ ID NO: 1359343 - DNA, 15 bp, Homo sapiens
aacaaggatattgaa

SEQ ID NO: 1359344 - DNA, 15 bp, Homo sapiens
taacaaggatattga

SEQ ID NO: 1359345 - DNA, 15 bp, Homo sapiens
ttaacaaggatattg

SEQ ID NO: 1359346 - DNA, 15 bp, Homo sapiens
attaacaaggatatt

SEQ ID NO: 1359347 - DNA, 15 bp, Homo sapiens
aattaacaaggatat

SEQ ID NO: 1359348 - DNA, 15 bp, Homo sapiens
aaattaacaaggata

SEQ ID NO: 1359349 - DNA, 15 bp, Homo sapiens
aaaattaacaaggat

SEQ ID NO: 1359350 - DNA, 15 bp, Homo sapiens
gaaaattaacaagga

SEQ ID NO: 1359351 - DNA, 15 bp, Homo sapiens
agaaaattaacaagg

SEQ ID NO: 1359352 - DNA, 15 bp, Homo sapiens
cagaaaattaacaag

SEQ ID NO: 1359353 - DNA, 15 bp, Homo sapiens
acagaaaattaacaa

SEQ ID NO: 1359354 - DNA, 15 bp, Homo sapiens
gacagaaaattaaca

SEQ ID NO: 1359355 - DNA, 15 bp, Homo sapiens
agacagaaaattaac

SEQ ID NO: 1359356 - DNA, 15 bp, Homo sapiens
gagacagaaaattaa

SEQ ID NO: 1359357 - DNA, 15 bp, Homo sapiens
cgagacagaaaatta

SEQ ID NO: 1359358 - DNA, 15 bp, Homo sapiens
tcgagacagaaaatt

SEQ ID NO: 1359359 - DNA, 15 bp, Homo sapiens
atcgagacagaaaat

SEQ ID NO: 1359360 - DNA, 15 bp, Homo sapiens
catcgagacagaaaa

SEQ ID NO: 1359361 - DNA, 15 bp, Homo sapiens
tcatcgagacagaaa

SEQ ID NO: 1359362 - DNA, 15 bp, Homo sapiens
atcatcgagacagaa

SEQ ID NO: 1359363 - DNA, 15 bp, Homo sapiens
gatcatcgagacaga

SEQ ID NO: 1359364 - DNA, 15 bp, Homo sapiens
agatcatcgagacag

SEQ ID NO: 1359365 - DNA, 15 bp, Homo sapiens
cagatcatcgagaca

SEQ ID NO: 1359366 - DNA, 15 bp, Homo sapiens
acagatcatcgagac

SEQ ID NO: 1359367 - DNA, 15 bp, Homo sapiens
gacagatcatcgaga

SEQ ID NO: 1359368 - DNA, 15 bp, Homo sapiens
agacagatcatcgag

SEQ ID NO: 1359369 - DNA, 15 bp, Homo sapiens
tagacagatcatcga

SEQ ID NO: 1359370 - DNA, 15 bp, Homo sapiens
ttagacagatcatcg

SEQ ID NO: 1359371 - DNA, 15 bp, Homo sapiens
attagacagatcatc

SEQ ID NO: 1359372 - DNA, 15 bp, Homo sapiens
tattagacagatcat

SEQ ID NO: 1359373 - DNA, 15 bp, Homo sapiens
atattagacagatca

SEQ ID NO: 1359374 - DNA, 15 bp, Homo sapiens
aatattagacagatc

SEQ ID NO: 1359375 - DNA, 15 bp, Homo sapiens
caatattagacagat

SEQ ID NO: 1359376 - DNA, 15 bp, Homo sapiens
tcaatattagacaga

SEQ ID NO: 1359377 - DNA, 15 bp, Homo sapiens
gtcaatattagacag

SEQ ID NO: 1359378 - DNA, 15 bp, Homo sapiens
tgtcaatattagaca

SEQ ID NO: 1359379 - DNA, 15 bp, Homo sapiens
ctgtcaatattagac

SEQ ID NO: 1359380 - DNA, 15 bp, Homo sapiens
actgtcaatattaga

SEQ ID NO: 1359381 - DNA, 15 bp, Homo sapiens
cactgtcaatattag

SEQ ID NO: 1359382 - DNA, 15 bp, Homo sapiens
ccactgtcaatatta

SEQ ID NO: 1359383 - DNA, 15 bp, Homo sapiens
cccactgtcaatatt

SEQ ID NO: 1359384 - DNA, 15 bp, Homo sapiens
ccccactgtcaatat

SEQ ID NO: 1359385 - DNA, 15 bp, Homo sapiens
accccactgtcaata

SEQ ID NO: 1359386 - DNA, 15 bp, Homo sapiens
caccccactgtcaat

SEQ ID NO: 1359387 - DNA, 15 bp, Homo sapiens
acaccccactgtcaa

SEQ ID NO: 1359388 - DNA, 15 bp, Homo sapiens
aacaccccactgtca

SEQ ID NO: 1359389 - DNA, 15 bp, Homo sapiens
taacaccccactgtc

SEQ ID NO: 1359390 - DNA, 15 bp, Homo sapiens
ttaacaccccactgt

SEQ ID NO: 1359391 - DNA, 15 bp, Homo sapiens
tttaacaccccactg

SEQ ID NO: 1359392 - DNA, 15 bp, Homo sapiens
ctttaacaccccact

SEQ ID NO: 1359393 - DNA, 15 bp, Homo sapiens
actttaacaccccac

SEQ ID NO: 1359394 - DNA, 15 bp, Homo sapiens
gactttaacacccca

SEQ ID NO: 1359395 - DNA, 15 bp, Homo sapiens
agactttaacacccc

SEQ ID NO: 1359396 - DNA, 15 bp, Homo sapiens
gagactttaacaccc

SEQ ID NO: 1359397 - DNA, 15 bp, Homo sapiens
ggagactttaacacc

SEQ ID NO: 1359398 - DNA, 15 bp, Homo sapiens
aggagactttaacac

SEQ ID NO: 1359399 - DNA, 15 bp, Homo sapiens
taggagactttaaca

SEQ ID NO: 1359400 - DNA, 15 bp, Homo sapiens
gtaggagactttaac

SEQ ID NO: 1359401 - DNA, 15 bp, Homo sapiens
agtaggagactttaa

SEQ ID NO: 1359402 - DNA, 15 bp, Homo sapiens
tagtaggagacttta

SEQ ID NO: 1359403 - DNA, 15 bp, Homo sapiens
atagtaggagacttt

SEQ ID NO: 1359404 - DNA, 15 bp, Homo sapiens
aatagtaggagactt

SEQ ID NO: 1359405 - DNA, 15 bp, Homo sapiens
taatagtaggagact

SEQ ID NO: 1359406 - DNA, 15 bp, Homo sapiens
ataatagtaggagac

SEQ ID NO: 1359407 - DNA, 15 bp, Homo sapiens
aataatagtaggaga

SEQ ID NO: 1359408 - DNA, 15 bp, Homo sapiens
taataatagtaggag

SEQ ID NO: 1359409 - DNA, 15 bp, Homo sapiens
ataataatagtagga

SEQ ID NO: 1359410 - DNA, 15 bp, Homo sapiens
cataataatagtagg

SEQ ID NO: 1359411 - DNA, 15 bp, Homo sapiens
acataataatagtag

SEQ ID NO: 1359412 - DNA, 15 bp, Homo sapiens
cacataataatagta

SEQ ID NO: 1359413 - DNA, 15 bp, Homo sapiens
ccacataataatagt

SEQ ID NO: 1359414 - DNA, 15 bp, Homo sapiens
cccacataataatag

SEQ ID NO: 1359415 - DNA, 15 bp, Homo sapiens
tcccacataataata

SEQ ID NO: 1359416 - DNA, 15 bp, Homo sapiens
ctcccacataataat

SEQ ID NO: 1359417 - DNA, 15 bp, Homo sapiens
actcccacataataa

SEQ ID NO: 1359418 - DNA, 15 bp, Homo sapiens
gactcccacataata

SEQ ID NO: 1359419 - DNA, 15 bp, Homo sapiens
agactcccacataat

SEQ ID NO: 1359420 - DNA, 15 bp, Homo sapiens
tagactcccacataa

SEQ ID NO: 1359421 - DNA, 15 bp, Homo sapiens
gtagactcccacata

SEQ ID NO: 1359422 - DNA, 15 bp, Homo sapiens
cgtagactcccacat

SEQ ID NO: 1359423 - DNA, 15 bp, Homo sapiens
acgtagactcccaca

SEQ ID NO: 1359424 - DNA, 15 bp, Homo sapiens
gacgtagactcccac

SEQ ID NO: 1359425 - DNA, 15 bp, Homo sapiens
agacgtagactccca

SEQ ID NO: 1359426 - DNA, 15 bp, Homo sapiens
aagacgtagactccc

SEQ ID NO: 1359427 - DNA, 15 bp, Homo sapiens
aaagacgtagactcc

SEQ ID NO: 1359428 - DNA, 15 bp, Homo sapiens
aaaagacgtagactc

SEQ ID NO: 1359429 - DNA, 15 bp, Homo sapiens
aaaaagacgtagact

SEQ ID NO: 1359430 - DNA, 15 bp, Homo sapiens
caaaaagacgtagac

SEQ ID NO: 1359431 - DNA, 15 bp, Homo sapiens
acaaaaagacgtaga

SEQ ID NO: 1359432 - DNA, 15 bp, Homo sapiens
tacaaaaagacgtag

SEQ ID NO: 1359433 - DNA, 15 bp, Homo sapiens
ctacaaaaagacgta

SEQ ID NO: 1359434 - DNA, 15 bp, Homo sapiens
cctacaaaaagacgt

SEQ ID NO: 1359435 - DNA, 15 bp, Homo sapiens
acctacaaaaagacg

SEQ ID NO: 1359436 - DNA, 15 bp, Homo sapiens
cacctacaaaaagac

SEQ ID NO: 1359437 - DNA, 15 bp, Homo sapiens
acacctacaaaaaga

SEQ ID NO: 1359438 - DNA, 15 bp, Homo sapiens
gacacctacaaaaag

SEQ ID NO: 1359439 - DNA, 15 bp, Homo sapiens
agacacctacaaaaa

SEQ ID NO: 1359440 - DNA, 15 bp, Homo sapiens
tagacacctacaaaa

SEQ ID NO: 1359441 - DNA, 15 bp, Homo sapiens
ttagacacctacaaa

SEQ ID NO: 1359442 - DNA, 15 bp, Homo sapiens
cttagacacctacaa

SEQ ID NO: 1359443 - DNA, 15 bp, Homo sapiens
tcttagacacctaca

SEQ ID NO: 1359444 - DNA, 15 bp, Homo sapiens
atcttagacacctac

SEQ ID NO: 1359445 - DNA, 15 bp, Homo sapiens
gatcttagacaccta

SEQ ID NO: 1359446 - DNA, 15 bp, Homo sapiens
agatcttagacacct

SEQ ID NO: 1359447 - DNA, 15 bp, Homo sapiens
aagatcttagacacc

SEQ ID NO: 1359448 - DNA, 15 bp, Homo sapiens
caagatcttagacac

SEQ ID NO: 1359449 - DNA, 15 bp, Homo sapiens
gcaagatcttagaca

SEQ ID NO: 1359450 - DNA, 15 bp, Homo sapiens
agcaagatcttagac

SEQ ID NO: 1359451 - DNA, 15 bp, Homo sapiens
aagcaagatcttaga

SEQ ID NO: 1359452 - DNA, 15 bp, Homo sapiens
aaagcaagatcttag

SEQ ID NO: 1359453 - DNA, 15 bp, Homo sapiens
taaagcaagatctta

SEQ ID NO: 1359454 - DNA, 15 bp, Homo sapiens
ataaagcaagatctt

SEQ ID NO: 1359455 - DNA, 15 bp, Homo sapiens
cataaagcaagatct

SEQ ID NO: 1359456 - DNA, 15 bp, Homo sapiens
tcataaagcaagatc

SEQ ID NO: 1359457 - DNA, 15 bp, Homo sapiens
ttcataaagcaagat

SEQ ID NO: 1359458 - DNA, 15 bp, Homo sapiens
attcataaagcaaga

SEQ ID NO: 1359459 - DNA, 15 bp, Homo sapiens
gattcataaagcaag

SEQ ID NO: 1359460 - DNA, 15 bp, Homo sapiens
agattcataaagcaa

SEQ ID NO: 1359461 - DNA, 15 bp, Homo sapiens
cagattcataaagca

SEQ ID NO: 1359462 - DNA, 15 bp, Homo sapiens
ccagattcataaagc

SEQ ID NO: 1359463 - DNA, 15 bp, Homo sapiens
cccagattcataaag

SEQ ID NO: 1359464 - DNA, 15 bp, Homo sapiens
acccagattcataaa

SEQ ID NO: 1359465 - DNA, 15 bp, Homo sapiens
tacccagattcataa

SEQ ID NO: 1359466 - DNA, 15 bp, Homo sapiens
gtacccagattcata

SEQ ID NO: 1359467 - DNA, 15 bp, Homo sapiens
agtacccagattcat

SEQ ID NO: 1359468 - DNA, 15 bp, Homo sapiens
gagtacccagattca

SEQ ID NO: 1359469 - DNA, 15 bp, Homo sapiens
ggagtacccagattc

SEQ ID NO: 1359470 - DNA, 15 bp, Homo sapiens
aggagtacccagatt

SEQ ID NO: 1359471 - DNA, 15 bp, Homo sapiens
aaggagtacccagat

SEQ ID NO: 1359472 - DNA, 15 bp, Homo sapiens
gaaggagtacccaga

SEQ ID NO: 1359473 - DNA, 15 bp, Homo sapiens
agaaggagtacccag

SEQ ID NO: 1359474 - DNA, 15 bp, Homo sapiens
cagaaggagtaccca

SEQ ID NO: 1359475 - DNA, 15 bp, Homo sapiens
tcagaaggagtaccc

SEQ ID NO: 1359476 - DNA, 15 bp, Homo sapiens
ttcagaaggagtacc

SEQ ID NO: 1359477 - DNA, 15 bp, Homo sapiens
gttcagaaggagtac

SEQ ID NO: 1359478 - DNA, 15 bp, Homo sapiens
agttcagaaggagta

SEQ ID NO: 1359479 - DNA, 15 bp, Homo sapiens
tagttcagaaggagt

SEQ ID NO: 1359480 - DNA, 15 bp, Homo sapiens
gtagttcagaaggag

SEQ ID NO: 1359481 - DNA, 15 bp, Homo sapiens
tgtagttcagaagga

SEQ ID NO: 1359482 - DNA, 15 bp, Homo sapiens
ctgtagttcagaagg

SEQ ID NO: 1359483 - DNA, 15 bp, Homo sapiens
cctgtagttcagaag

SEQ ID NO: 1359484 - DNA, 15 bp, Homo sapiens
ccctgtagttcagaa

SEQ ID NO: 1359485 - DNA, 15 bp, Homo sapiens
tccctgtagttcaga

SEQ ID NO: 1359486 - DNA, 15 bp, Homo sapiens
gtccctgtagttcag

SEQ ID NO: 1359487 - DNA, 15 bp, Homo sapiens
agtccctgtagttca

SEQ ID NO: 1359488 - DNA, 15 bp, Homo sapiens
aagtccctgtagttc

SEQ ID NO: 1359489 - DNA, 15 bp, Homo sapiens
gaagtccctgtagtt

SEQ ID NO: 1359490 - DNA, 15 bp, Homo sapiens
agaagtccctgtagt

SEQ ID NO: 1359491 - DNA, 15 bp, Homo sapiens
gagaagtccctgtag

SEQ ID NO: 1359492 - DNA, 15 bp, Homo sapiens
ggagaagtccctgta

SEQ ID NO: 1359493 - DNA, 15 bp, Homo sapiens
gggagaagtccctgt

SEQ ID NO: 1359494 - DNA, 15 bp, Homo sapiens
agggagaagtccctg

SEQ ID NO: 1359495 - DNA, 15 bp, Homo sapiens
gagggagaagtccct

SEQ ID NO: 1359496 - DNA, 15 bp, Homo sapiens
tgagggagaagtccc

SEQ ID NO: 1359497 - DNA, 15 bp, Homo sapiens
gtgagggagaagtcc

SEQ ID NO: 1359498 - DNA, 15 bp, Homo sapiens
agtgagggagaagtc

SEQ ID NO: 1359499 - DNA, 15 bp, Homo sapiens
gagtgagggagaagt

SEQ ID NO: 1359500 - DNA, 15 bp, Homo sapiens
tgagtgagggagaag

SEQ ID NO: 1359501 - DNA, 15 bp, Homo sapiens
atgagtgagggagaa

SEQ ID NO: 1359502 - DNA, 15 bp, Homo sapiens
aatgagtgagggaga

SEQ ID NO: 1359503 - DNA, 15 bp, Homo sapiens
aaatgagtgagggag

SEQ ID NO: 1359504 - DNA, 15 bp, Homo sapiens
gaaatgagtgaggga

SEQ ID NO: 1359505 - DNA, 15 bp, Homo sapiens
tgaaatgagtgaggg

SEQ ID NO: 1359506 - DNA, 15 bp, Homo sapiens
atgaaatgagtgagg

SEQ ID NO: 1359507 - DNA, 15 bp, Homo sapiens
catgaaatgagtgag

SEQ ID NO: 1359508 - DNA, 15 bp, Homo sapiens
tcatgaaatgagtga

SEQ ID NO: 1359509 - DNA, 15 bp, Homo sapiens
ctcatgaaatgagtg

SEQ ID NO: 1359510 - DNA, 15 bp, Homo sapiens
cctcatgaaatgagt

SEQ ID NO: 1359511 - DNA, 15 bp, Homo sapiens
gcctcatgaaatgag

SEQ ID NO: 1359512 - DNA, 15 bp, Homo sapiens
ggcctcatgaaatga

SEQ ID NO: 1359513 - DNA, 15 bp, Homo sapiens
tggcctcatgaaatg

SEQ ID NO: 1359514 - DNA, 15 bp, Homo sapiens
ctggcctcatgaaat

SEQ ID NO: 1359515 - DNA, 15 bp, Homo sapiens
gctggcctcatgaaa

SEQ ID NO: 1359516 - DNA, 15 bp, Homo sapiens
tgctggcctcatgaa

SEQ ID NO: 1359517 - DNA, 15 bp, Homo sapiens
atgctggcctcatga

SEQ ID NO: 1359518 - DNA, 15 bp, Homo sapiens
gatgctggcctcatg

SEQ ID NO: 1359519 - DNA, 15 bp, Homo sapiens
tgatgctggcctcat

SEQ ID NO: 1359520 - DNA, 15 bp, Homo sapiens
atgatgctggcctca

SEQ ID NO: 1359521 - DNA, 15 bp, Homo sapiens
gatgatgctggcctc

SEQ ID NO: 1359522 - DNA, 15 bp, Homo sapiens
ggatgatgctggcct

SEQ ID NO: 1359523 - DNA, 15 bp, Homo sapiens
aggatgatgctggcc

SEQ ID NO: 1359524 - DNA, 15 bp, Homo sapiens
caggatgatgctggc

SEQ ID NO: 1359525 - DNA, 15 bp, Homo sapiens
ggtatcaggatgatg

SEQ ID NO: 1359526 - DNA, 15 bp, Homo sapiens
tggtatcaggatgat

SEQ ID NO: 1359527 - DNA, 15 bp, Homo sapiens
ttggtatcaggatga

SEQ ID NO: 1359528 - DNA, 15 bp, Homo sapiens
tttggtatcaggatg

SEQ ID NO: 1359529 - DNA, 15 bp, Homo sapiens
ttttggtatcaggat

SEQ ID NO: 1359530 - DNA, 15 bp, Homo sapiens
gttttggtatcagga

SEQ ID NO: 1359531 - DNA, 15 bp, Homo sapiens
ggttttggtatcagg

SEQ ID NO: 1359532 - DNA, 15 bp, Homo sapiens
aggttttggtatcag

SEQ ID NO: 1359533 - DNA, 15 bp, Homo sapiens
caggttttggtatca

SEQ ID NO: 1359534 - DNA, 15 bp, Homo sapiens
ccaggttttggtatc

SEQ ID NO: 1359535 - DNA, 15 bp, Homo sapiens
gccaggttttggtat

SEQ ID NO: 1359536 - DNA, 15 bp, Homo sapiens
tgccaggttttggta

SEQ ID NO: 1359537 - DNA, 15 bp, Homo sapiens
ctgccaggttttggt

SEQ ID NO: 1359538 - DNA, 15 bp, Homo sapiens
tctgccaggttttgg

SEQ ID NO: 1359539 - DNA, 15 bp, Homo sapiens
ctctgccaggttttg

SEQ ID NO: 1359540 - DNA, 15 bp, Homo sapiens
tctctgccaggtttt

SEQ ID NO: 1359541 - DNA, 15 bp, Homo sapiens
gtctctgccaggttt

SEQ ID NO: 1359542 - DNA, 15 bp, Homo sapiens
tgtctctgccaggtt

SEQ ID NO: 1359543 - DNA, 15 bp, Homo sapiens
gtgtctctgccaggt

SEQ ID NO: 1359544 - DNA, 15 bp, Homo sapiens
tgtgtctctgccagg

SEQ ID NO: 1359545 - DNA, 15 bp, Homo sapiens
ttgtgtctctgccag

SEQ ID NO: 1359546 - DNA, 15 bp, Homo sapiens
gttgtgtctctgcca

SEQ ID NO: 1359547 - DNA, 15 bp, Homo sapiens
tgttgtgtctctgcc

SEQ ID NO: 1359548 - DNA, 15 bp, Homo sapiens
ttgttgtgtctctgc

SEQ ID NO: 1359549 - DNA, 15 bp, Homo sapiens
gttgttgtgtctctg

SEQ ID NO: 1359550 - DNA, 15 bp, Homo sapiens
tgttgttgtgtctct

SEQ ID NO: 1359551 - DNA, 15 bp, Homo sapiens
ttgttgttgtgtctc

SEQ ID NO: 1359552 - DNA, 15 bp, Homo sapiens
tttgttgttgtgtct

SEQ ID NO: 1359553 - DNA, 15 bp, Homo sapiens
ttttgttgttgtgtc

SEQ ID NO: 1359554 - DNA, 15 bp, Homo sapiens
tttttgttgttgtgt

SEQ ID NO: 1359555 - DNA, 15 bp, Homo sapiens
ttttttgttgttgtg

SEQ ID NO: 1359556 - DNA, 15 bp, Homo sapiens
tttttttgttgttgt

SEQ ID NO: 1359557 - DNA, 15 bp, Homo sapiens
ttttttttgttgttg

SEQ ID NO: 1359558 - DNA, 15 bp, Homo sapiens
tttttttttgttgtt

SEQ ID NO: 1359559 - DNA, 15 bp, Homo sapiens
atttttttttgttgt

SEQ ID NO: 1359560 - DNA, 15 bp, Homo sapiens
aatttttttttgttg

SEQ ID NO: 1359561 - DNA, 15 bp, Homo sapiens
aaatttttttttgtt

SEQ ID NO: 1359562 - DNA, 15 bp, Homo sapiens
gaaatttttttttgt

SEQ ID NO: 1359563 - DNA, 15 bp, Homo sapiens
tgaaatttttttttg

SEQ ID NO: 1359564 - DNA, 15 bp, Homo sapiens
ctgaaattttttttt

SEQ ID NO: 1359565 - DNA, 15 bp, Homo sapiens
cctgaaatttttttt

SEQ ID NO: 1359566 - DNA, 15 bp, Homo sapiens
gcctgaaattttttt

SEQ ID NO: 1359567 - DNA, 15 bp, Homo sapiens
ggcctgaaatttttt

SEQ ID NO: 1359568 - DNA, 15 bp, Homo sapiens
tggcctgaaattttt

SEQ ID NO: 1359569 - DNA, 15 bp, Homo sapiens
ggatattggcctgaa

SEQ ID NO: 1359570 - DNA, 15 bp, Homo sapiens
gggatattggcctga

SEQ ID NO: 1359571 - DNA, 15 bp, Homo sapiens
agggatattggcctg

SEQ ID NO: 1359572 - DNA, 15 bp, Homo sapiens
cagggatattggcct

SEQ ID NO: 1359573 - DNA, 15 bp, Homo sapiens
tcagggatattggcc

SEQ ID NO: 1359574 - DNA, 15 bp, Homo sapiens
atcagggatattggc

SEQ ID NO: 1359575 - DNA, 15 bp, Homo sapiens
catcagggatattgg

SEQ ID NO: 1359576 - DNA, 15 bp, Homo sapiens
tcatcagggatattg

SEQ ID NO: 1359577 - DNA, 15 bp, Homo sapiens
ttcatcagggatatt

SEQ ID NO: 1359578 - DNA, 15 bp, Homo sapiens
gttcatcagggatat

SEQ ID NO: 1359579 - DNA, 15 bp, Homo sapiens
tgttcatcagggata

SEQ ID NO: 1359580 - DNA, 15 bp, Homo sapiens
atgttcatcagggat

SEQ ID NO: 1359581 - DNA, 15 bp, Homo sapiens
aatgttcatcaggga

SEQ ID NO: 1359582 - DNA, 15 bp, Homo sapiens
caatgttcatcaggg

SEQ ID NO: 1359583 - DNA, 15 bp, Homo sapiens
gcatcaatgttcatc

SEQ ID NO: 1359584 - DNA, 15 bp, Homo sapiens
cgcatcaatgttcat

SEQ ID NO: 1359585 - DNA, 15 bp, Homo sapiens
tcgcatcaatgttca

SEQ ID NO: 1359586 - DNA, 15 bp, Homo sapiens
ttcgcatcaatgttc

SEQ ID NO: 1359587 - DNA, 15 bp, Homo sapiens
tttcgcatcaatgtt

SEQ ID NO: 1359588 - DNA, 15 bp, Homo sapiens
ttttcgcatcaatgt

SEQ ID NO: 1359589 - DNA, 15 bp, Homo sapiens
attttcgcatcaatg

SEQ ID NO: 1359590 - DNA, 15 bp, Homo sapiens
gattttcgcatcaat

SEQ ID NO: 1359591 - DNA, 15 bp, Homo sapiens
ggattttcgcatcaa

SEQ ID NO: 1359592 - DNA, 15 bp, Homo sapiens
aggattttcgcatca

SEQ ID NO: 1359593 - DNA, 15 bp, Homo sapiens
gaggattttcgcatc

SEQ ID NO: 1359594 - DNA, 15 bp, Homo sapiens
tgaggattttcgcat

SEQ ID NO: 1359595 - DNA, 15 bp, Homo sapiens
ttgaggattttcgca

SEQ ID NO: 1359596 - DNA, 15 bp, Homo sapiens
attgaggattttcgc

SEQ ID NO: 1359597 - DNA, 15 bp, Homo sapiens
tattgaggattttcg

SEQ ID NO: 1359598 - DNA, 15 bp, Homo sapiens
ttattgaggattttc

SEQ ID NO: 1359599 - DNA, 15 bp, Homo sapiens
tttattgaggatttt

SEQ ID NO: 1359600 - DNA, 15 bp, Homo sapiens
ttttattgaggattt

SEQ ID NO: 1359601 - DNA, 15 bp, Homo sapiens
attttattgaggatt

SEQ ID NO: 1359602 - DNA, 15 bp, Homo sapiens
tattttattgaggat

SEQ ID NO: 1359603 - DNA, 15 bp, Homo sapiens
gtattttattgagga

SEQ ID NO: 1359604 - DNA, 15 bp, Homo sapiens
agtattttattgagg

SEQ ID NO: 1359605 - DNA, 15 bp, Homo sapiens
cagtattttattgag

SEQ ID NO: 1359606 - DNA, 15 bp, Homo sapiens
ccagtattttattga

SEQ ID NO: 1359607 - DNA, 15 bp, Homo sapiens
gccagtattttattg

SEQ ID NO: 1359608 - DNA, 15 bp, Homo sapiens
tgccagtattttatt

SEQ ID NO: 1359609 - DNA, 15 bp, Homo sapiens
ttgccagtattttat

SEQ ID NO: 1359610 - DNA, 15 bp, Homo sapiens
ctggattcggtttgc

SEQ ID NO: 1359611 - DNA, 15 bp, Homo sapiens
gctggattcggtttg

SEQ ID NO: 1359612 - DNA, 15 bp, Homo sapiens
tgctggattcggttt

SEQ ID NO: 1359613 - DNA, 15 bp, Homo sapiens
ctgctggattcggtt

SEQ ID NO: 1359614 - DNA, 15 bp, Homo sapiens
gctgctggattcggt

SEQ ID NO: 1359615 - DNA, 15 bp, Homo sapiens
tgctgctggattcgg

SEQ ID NO: 1359616 - DNA, 15 bp, Homo sapiens
gtgctgctggattcg

SEQ ID NO: 1359617 - DNA, 15 bp, Homo sapiens
tgtgctgctggattc

SEQ ID NO: 1359618 - DNA, 15 bp, Homo sapiens
atgtgctgctggatt

SEQ ID NO: 1359619 - DNA, 15 bp, Homo sapiens
gatgtgctgctggat

SEQ ID NO: 1359620 - DNA, 15 bp, Homo sapiens
tgatgtgctgctgga

SEQ ID NO: 1359621 - DNA, 15 bp, Homo sapiens
ttgatgtgctgctgg

SEQ ID NO: 1359622 - DNA, 15 bp, Homo sapiens
tttgatgtgctgctg

SEQ ID NO: 1359623 - DNA, 15 bp, Homo sapiens
ttttgatgtgctgct

SEQ ID NO: 1359624 - DNA, 15 bp, Homo sapiens
tttttgatgtgctgc

SEQ ID NO: 1359625 - DNA, 15 bp, Homo sapiens
tctttttgatgtgct

SEQ ID NO: 1359626 - DNA, 15 bp, Homo sapiens
ttctttttgatgtgc

SEQ ID NO: 1359627 - DNA, 15 bp, Homo sapiens
attctttttgatgtg

SEQ ID NO: 1359628 - DNA, 15 bp, Homo sapiens
tattctttttgatgt

SEQ ID NO: 1359629 - DNA, 15 bp, Homo sapiens
atattctttttgatg

SEQ ID NO: 1359630 - DNA, 15 bp, Homo sapiens
gatattctttttgat

SEQ ID NO: 1359631 - DNA, 15 bp, Homo sapiens
ggatattctttttga

SEQ ID NO: 1359632 - DNA, 15 bp, Homo sapiens
tggatattctttttg

SEQ ID NO: 1359633 - DNA, 15 bp, Homo sapiens
gtggatattcttttt

SEQ ID NO: 1359634 - DNA, 15 bp, Homo sapiens
ggtggatattctttt

SEQ ID NO: 1359635 - DNA, 15 bp, Homo sapiens
cggtggatattcttt

SEQ ID NO: 1359636 - DNA, 15 bp, Homo sapiens
acggtggatattctt

SEQ ID NO: 1359637 - DNA, 15 bp, Homo sapiens
cacggtggatattct

SEQ ID NO: 1359638 - DNA, 15 bp, Homo sapiens
tcacggtggatattc

SEQ ID NO: 1359639 - DNA, 15 bp, Homo sapiens
atcacggtggatatt

SEQ ID NO: 1359640 - DNA, 15 bp, Homo sapiens
gatcacggtggatat

SEQ ID NO: 1359641 - DNA, 15 bp, Homo sapiens
tgatcacggtggata

SEQ ID NO: 1359642 - DNA, 15 bp, Homo sapiens
gtgatcacggtggat

SEQ ID NO: 1359643 - DNA, 15 bp, Homo sapiens
cgtgatcacggtgga

SEQ ID NO: 1359644 - DNA, 15 bp, Homo sapiens
acgtgatcacggtgg

SEQ ID NO: 1359645 - DNA, 15 bp, Homo sapiens
aacgtgatcacggtg

SEQ ID NO: 1359646 - DNA, 15 bp, Homo sapiens
caacgtgatcacggt

SEQ ID NO: 1359647 - DNA, 15 bp, Homo sapiens
gcaacgtgatcacgg

SEQ ID NO: 1359648 - DNA, 15 bp, Homo sapiens
agcaacgtgatcacg

SEQ ID NO: 1359649 - DNA, 15 bp, Homo sapiens
aagcaacgtgatcac

SEQ ID NO: 1359650 - DNA, 15 bp, Homo sapiens
aaagcaacgtgatca

SEQ ID NO: 1359651 - DNA, 15 bp, Homo sapiens
gaaagcaacgtgatc

SEQ ID NO: 1359652 - DNA, 15 bp, Homo sapiens
tgaaagcaacgtgat

SEQ ID NO: 1359653 - DNA, 15 bp, Homo sapiens
atgaaagcaacgtga

SEQ ID NO: 1359654 - DNA, 15 bp, Homo sapiens
gatgaaagcaacgtg

SEQ ID NO: 1359655 - DNA, 15 bp, Homo sapiens
ggatgaaagcaacgt

SEQ ID NO: 1359656 - DNA, 15 bp, Homo sapiens
tggatgaaagcaacg

SEQ ID NO: 1359657 - DNA, 15 bp, Homo sapiens
atggatgaaagcaac

SEQ ID NO: 1359658 - DNA, 15 bp, Homo sapiens
tatggatgaaagcaa

SEQ ID NO: 1359659 - DNA, 15 bp, Homo sapiens
ctatggatgaaagca

SEQ ID NO: 1359660 - DNA, 15 bp, Homo sapiens
cctatggatgaaagc

SEQ ID NO: 1359661 - DNA, 15 bp, Homo sapiens
tcctatggatgaaag

SEQ ID NO: 1359662 - DNA, 15 bp, Homo sapiens
atcctatggatgaaa

SEQ ID NO: 1359663 - DNA, 15 bp, Homo sapiens
catcctatggatgaa

SEQ ID NO: 1359664 - DNA, 15 bp, Homo sapiens
gcatcctatggatga

SEQ ID NO: 1359665 - DNA, 15 bp, Homo sapiens
tgcatcctatggatg

SEQ ID NO: 1359666 - DNA, 15 bp, Homo sapiens
ttgcatcctatggat

SEQ ID NO: 1359667 - DNA, 15 bp, Homo sapiens
cttgcatcctatgga

SEQ ID NO: 1359668 - DNA, 15 bp, Homo sapiens
ccttgcatcctatgg

SEQ ID NO: 1359669 - DNA, 15 bp, Homo sapiens
gccttgcatcctatg

SEQ ID NO: 1359670 - DNA, 15 bp, Homo sapiens
agccttgcatcctat

SEQ ID NO: 1359671 - DNA, 15 bp, Homo sapiens
cagccttgcatccta

SEQ ID NO: 1359672 - DNA, 15 bp, Homo sapiens
tcagccttgcatcct

SEQ ID NO: 1359673 - DNA, 15 bp, Homo sapiens
atcagccttgcatcc

SEQ ID NO: 1359674 - DNA, 15 bp, Homo sapiens
aatcagccttgcatc

SEQ ID NO: 1359675 - DNA, 15 bp, Homo sapiens
gaatcagccttgcat

SEQ ID NO: 1359676 - DNA, 15 bp, Homo sapiens
tgaatcagccttgca

SEQ ID NO: 1359677 - DNA, 15 bp, Homo sapiens
ttgaatcagccttgc

SEQ ID NO: 1359678 - DNA, 15 bp, Homo sapiens
gttgaatcagccttg

SEQ ID NO: 1359679 - DNA, 15 bp, Homo sapiens
tgttgaatcagcctt

SEQ ID NO: 1359680 - DNA, 15 bp, Homo sapiens
atgttgaatcagcct

SEQ ID NO: 1359681 - DNA, 15 bp, Homo sapiens
tatgttgaatcagcc

SEQ ID NO: 1359682 - DNA, 15 bp, Homo sapiens
ctatgttgaatcagc

SEQ ID NO: 1359683 - DNA, 15 bp, Homo sapiens
cctatgttgaatcag

SEQ ID NO: 1359684 - DNA, 15 bp, Homo sapiens
gcctatgttgaatca

SEQ ID NO: 1359685 - DNA, 15 bp, Homo sapiens
tgcctatgttgaatc

SEQ ID NO: 1359686 - DNA, 15 bp, Homo sapiens
atgcctatgttgaat

SEQ ID NO: 1359687 - DNA, 15 bp, Homo sapiens
tatgcctatgttgaa

SEQ ID NO: 1359688 - DNA, 15 bp, Homo sapiens
atatgcctatgttga

SEQ ID NO: 1359689 - DNA, 15 bp, Homo sapiens
gatatgcctatgttg

SEQ ID NO: 1359690 - DNA, 15 bp, Homo sapiens
tgatatgcctatgtt

SEQ ID NO: 1359691 - DNA, 15 bp, Homo sapiens
ttgatatgcctatgt

SEQ ID NO: 1359692 - DNA, 15 bp, Homo sapiens
attgatatgcctatg

SEQ ID NO: 1359693 - DNA, 15 bp, Homo sapiens
tattgatatgcctat

SEQ ID NO: 1359694 - DNA, 15 bp, Homo sapiens
atattgatatgccta

SEQ ID NO: 1359695 - DNA, 15 bp, Homo sapiens
tatattgatatgcct

SEQ ID NO: 1359696 - DNA, 15 bp, Homo sapiens
gtatattgatatgcc

SEQ ID NO: 1359697 - DNA, 15 bp, Homo sapiens
cgtatattgatatgc

SEQ ID NO: 1359698 - DNA, 15 bp, Homo sapiens
acgtatattgatatg

SEQ ID NO: 1359699 - DNA, 15 bp, Homo sapiens
tacgtatattgatat

SEQ ID NO: 1359700 - DNA, 15 bp, Homo sapiens
ttacgtatattgata

SEQ ID NO: 1359701 - DNA, 15 bp, Homo sapiens
attacgtatattgat

SEQ ID NO: 1359702 - DNA, 15 bp, Homo sapiens
gattacgtatattga

SEQ ID NO: 1359703 - DNA, 15 bp, Homo sapiens
ggattacgtatattg

SEQ ID NO: 1359704 - DNA, 15 bp, Homo sapiens
tggattacgtatatt

SEQ ID NO: 1359705 - DNA, 15 bp, Homo sapiens
atggattacgtatat

SEQ ID NO: 1359706 - DNA, 15 bp, Homo sapiens
gatggattacgtata

SEQ ID NO: 1359707 - DNA, 15 bp, Homo sapiens
tgatggattacgtat

SEQ ID NO: 1359708 - DNA, 15 bp, Homo sapiens
gtgatggattacgta

SEQ ID NO: 1359709 - DNA, 15 bp, Homo sapiens
tgtgatggattacgt

SEQ ID NO: 1359710 - DNA, 15 bp, Homo sapiens
atgtgatggattacg

SEQ ID NO: 1359711 - DNA, 15 bp, Homo sapiens
tatgtgatggattac

SEQ ID NO: 1359712 - DNA, 15 bp, Homo sapiens
ttatgtgatggatta

SEQ ID NO: 1359713 - DNA, 15 bp, Homo sapiens
tttatgtgatggatt

SEQ ID NO: 1359714 - DNA, 15 bp, Homo sapiens
gtttatgtgatggat

SEQ ID NO: 1359715 - DNA, 15 bp, Homo sapiens
tgtttatgtgatgga

SEQ ID NO: 1359716 - DNA, 15 bp, Homo sapiens
ctgtttatgtgatgg

SEQ ID NO: 1359717 - DNA, 15 bp, Homo sapiens
tctgtttatgtgatg

SEQ ID NO: 1359718 - DNA, 15 bp, Homo sapiens
ttctgtttatgtgat

SEQ ID NO: 1359719 - DNA, 15 bp, Homo sapiens
gttctgtttatgtga

SEQ ID NO: 1359720 - DNA, 15 bp, Homo sapiens
ggttctgtttatgtg

SEQ ID NO: 1359721 - DNA, 15 bp, Homo sapiens
tggttctgtttatgt

SEQ ID NO: 1359722 - DNA, 15 bp, Homo sapiens
ttggttctgtttatg

SEQ ID NO: 1359723 - DNA, 15 bp, Homo sapiens
attggttctgtttat

SEQ ID NO: 1359724 - DNA, 15 bp, Homo sapiens
cattggttctgttta

SEQ ID NO: 1359725 - DNA, 15 bp, Homo sapiens
ccattggttctgttt

SEQ ID NO: 1359726 - DNA, 15 bp, Homo sapiens
gccattggttctgtt

SEQ ID NO: 1359727 - DNA, 15 bp, Homo sapiens
tgccattggttctgt

SEQ ID NO: 1359728 - DNA, 15 bp, Homo sapiens
ttgccattggttctg

SEQ ID NO: 1359729 - DNA, 15 bp, Homo sapiens
tttgccattggttct

SEQ ID NO: 1359730 - DNA, 15 bp, Homo sapiens
ttttgccattggttc

SEQ ID NO: 1359731 - DNA, 15 bp, Homo sapiens
tttttgccattggtt

SEQ ID NO: 1359732 - DNA, 15 bp, Homo sapiens
gtttttgccattggt

SEQ ID NO: 1359733 - DNA, 15 bp, Homo sapiens
ggtttttgccattgg

SEQ ID NO: 1359734 - DNA, 15 bp, Homo sapiens
tggtttttgccattg

SEQ ID NO: 1359735 - DNA, 15 bp, Homo sapiens
gtggtttttgccatt

SEQ ID NO: 1359736 - DNA, 15 bp, Homo sapiens
tgtggtttttgccat

SEQ ID NO: 1359737 - DNA, 15 bp, Homo sapiens
gtgtggtttttgcca

SEQ ID NO: 1359738 - DNA, 15 bp, Homo sapiens
cgtgtggtttttgcc

SEQ ID NO: 1359739 - DNA, 15 bp, Homo sapiens
tcgtgtggtttttgc

SEQ ID NO: 1359740 - DNA, 15 bp, Homo sapiens
atcgtgtggtttttg

SEQ ID NO: 1359741 - DNA, 15 bp, Homo sapiens
aatcgtgtggttttt

SEQ ID NO: 1359742 - DNA, 15 bp, Homo sapiens
taatcgtgtggtttt

SEQ ID NO: 1359743 - DNA, 15 bp, Homo sapiens
ataatcgtgtggttt

SEQ ID NO: 1359744 - DNA, 15 bp, Homo sapiens
gataatcgtgtggtt

SEQ ID NO: 1359745 - DNA, 15 bp, Homo sapiens
agataatcgtgtggt

SEQ ID NO: 1359746 - DNA, 15 bp, Homo sapiens
gagataatcgtgtgg

SEQ ID NO: 1359747 - DNA, 15 bp, Homo sapiens
tgagataatcgtgtg

SEQ ID NO: 1359748 - DNA, 15 bp, Homo sapiens
ttgagataatcgtgt

SEQ ID NO: 1359749 - DNA, 15 bp, Homo sapiens
attgagataatcgtg

SEQ ID NO: 1359750 - DNA, 15 bp, Homo sapiens
tattgagataatcgt

SEQ ID NO: 1359751 - DNA, 15 bp, Homo sapiens
ctattgagataatcg

SEQ ID NO: 1359752 - DNA, 15 bp, Homo sapiens
aaaggccttttctgc

SEQ ID NO: 1359753 - DNA, 15 bp, Homo sapiens
caaaggccttttctg

SEQ ID NO: 1359754 - DNA, 15 bp, Homo sapiens
tcaaaggccttttct

SEQ ID NO: 1359755 - DNA, 15 bp, Homo sapiens
atcaaaggccttttc

SEQ ID NO: 1359756 - DNA, 15 bp, Homo sapiens
tatcaaaggcctttt

SEQ ID NO: 1359757 - DNA, 15 bp, Homo sapiens
ttatcaaaggccttt

SEQ ID NO: 1359758 - DNA, 15 bp, Homo sapiens
attttatcaaaggcc

SEQ ID NO: 1359759 - DNA, 15 bp, Homo sapiens
aattttatcaaaggc

SEQ ID NO: 1359760 - DNA, 15 bp, Homo sapiens
aaattttatcaaagg

SEQ ID NO: 1359761 - DNA, 15 bp, Homo sapiens
taaattttatcaaag

SEQ ID NO: 1359762 - DNA, 15 bp, Homo sapiens
ttaaattttatcaaa

SEQ ID NO: 1359763 - DNA, 15 bp, Homo sapiens
gttaaattttatcaa

SEQ ID NO: 1359764 - DNA, 15 bp, Homo sapiens
tgttaaattttatca

SEQ ID NO: 1359765 - DNA, 15 bp, Homo sapiens
gtgttaaattttatc

SEQ ID NO: 1359766 - DNA, 15 bp, Homo sapiens
ggtgttaaattttat

SEQ ID NO: 1359767 - DNA, 15 bp, Homo sapiens
cggtgttaaatttta

SEQ ID NO: 1359768 - DNA, 15 bp, Homo sapiens
gcggtgttaaatttt

SEQ ID NO: 1359769 - DNA, 15 bp, Homo sapiens
agcggtgttaaattt

SEQ ID NO: 1359770 - DNA, 15 bp, Homo sapiens
aagcggtgttaaatt

SEQ ID NO: 1359771 - DNA, 15 bp, Homo sapiens
gaagcggtgttaaat

SEQ ID NO: 1359772 - DNA, 15 bp, Homo sapiens
tgaagcggtgttaaa

SEQ ID NO: 1359773 - DNA, 15 bp, Homo sapiens
atgaagcggtgttaa

SEQ ID NO: 1359774 - DNA, 15 bp, Homo sapiens
catgaagcggtgtta

SEQ ID NO: 1359775 - DNA, 15 bp, Homo sapiens
gcatgaagcggtgtt

SEQ ID NO: 1359776 - DNA, 15 bp, Homo sapiens
agcatgaagcggtgt

SEQ ID NO: 1359777 - DNA, 15 bp, Homo sapiens
tagcatgaagcggtg

SEQ ID NO: 1359778 - DNA, 15 bp, Homo sapiens
ttagcatgaagcggt

SEQ ID NO: 1359779 - DNA, 15 bp, Homo sapiens
tttagcatgaagcgg

SEQ ID NO: 1359780 - DNA, 15 bp, Homo sapiens
ttttagcatgaagcg

SEQ ID NO: 1359781 - DNA, 15 bp, Homo sapiens
tttttagcatgaagc

SEQ ID NO: 1359782 - DNA, 15 bp, Homo sapiens
agagtttttagcatg

SEQ ID NO: 1359783 - DNA, 15 bp, Homo sapiens
gagagtttttagcat

SEQ ID NO: 1359784 - DNA, 15 bp, Homo sapiens
tgagagtttttagca

SEQ ID NO: 1359785 - DNA, 15 bp, Homo sapiens
ttgagagtttttagc

SEQ ID NO: 1359786 - DNA, 15 bp, Homo sapiens
attgagagtttttag

SEQ ID NO: 1359787 - DNA, 15 bp, Homo sapiens
tattgagagttttta

SEQ ID NO: 1359788 - DNA, 15 bp, Homo sapiens
ttattgagagttttt

SEQ ID NO: 1359789 - DNA, 15 bp, Homo sapiens
tttattgagagtttt

SEQ ID NO: 1359790 - DNA, 15 bp, Homo sapiens
gtttattgagagttt

SEQ ID NO: 1359791 - DNA, 15 bp, Homo sapiens
agtttattgagagtt

SEQ ID NO: 1359792 - DNA, 15 bp, Homo sapiens
tagtttattgagagt

SEQ ID NO: 1359793 - DNA, 15 bp, Homo sapiens
ctagtttattgagag

SEQ ID NO: 1359794 - DNA, 15 bp, Homo sapiens
cctagtttattgaga

SEQ ID NO: 1359795 - DNA, 15 bp, Homo sapiens
catcaatacctagtt

SEQ ID NO: 1359796 - DNA, 15 bp, Homo sapiens
ccatcaatacctagt

SEQ ID NO: 1359797 - DNA, 15 bp, Homo sapiens
tccatcaatacctag

SEQ ID NO: 1359798 - DNA, 15 bp, Homo sapiens
ttccatcaataccta

SEQ ID NO: 1359799 - DNA, 15 bp, Homo sapiens
gttccatcaatacct

SEQ ID NO: 1359800 - DNA, 15 bp, Homo sapiens
cgttccatcaatacc

SEQ ID NO: 1359801 - DNA, 15 bp, Homo sapiens
acgttccatcaatac

SEQ ID NO: 1359802 - DNA, 15 bp, Homo sapiens
tacgttccatcaata

SEQ ID NO: 1359803 - DNA, 15 bp, Homo sapiens
atacgttccatcaat

SEQ ID NO: 1359804 - DNA, 15 bp, Homo sapiens
gatacgttccatcaa

SEQ ID NO: 1359805 - DNA, 15 bp, Homo sapiens
agatacgttccatca

SEQ ID NO: 1359806 - DNA, 15 bp, Homo sapiens
gagatacgttccatc

SEQ ID NO: 1359807 - DNA, 15 bp, Homo sapiens
tgagatacgttccat

SEQ ID NO: 1359808 - DNA, 15 bp, Homo sapiens
ttgagatacgttcca

SEQ ID NO: 1359809 - DNA, 15 bp, Homo sapiens
tttgagatacgttcc

SEQ ID NO: 1359810 - DNA, 15 bp, Homo sapiens
ttttgagatacgttc

SEQ ID NO: 1359811 - DNA, 15 bp, Homo sapiens
attttgagatacgtt

SEQ ID NO: 1359812 - DNA, 15 bp, Homo sapiens
aattttgagatacgt

SEQ ID NO: 1359813 - DNA, 15 bp, Homo sapiens
taattttgagatacg

SEQ ID NO: 1359814 - DNA, 15 bp, Homo sapiens
ataattttgagatac

SEQ ID NO: 1359815 - DNA, 15 bp, Homo sapiens
tataattttgagata

SEQ ID NO: 1359816 - DNA, 15 bp, Homo sapiens
ttataattttgagat

SEQ ID NO: 1359817 - DNA, 15 bp, Homo sapiens
cttataattttgaga

SEQ ID NO: 1359818 - DNA, 15 bp, Homo sapiens
tcttataattttgag

SEQ ID NO: 1359819 - DNA, 15 bp, Homo sapiens
ctcttataattttga

SEQ ID NO: 1359820 - DNA, 15 bp, Homo sapiens
gctcttataattttg

SEQ ID NO: 1359821 - DNA, 15 bp, Homo sapiens
agctcttataatttt

SEQ ID NO: 1359822 - DNA, 15 bp, Homo sapiens
tagctcttataattt

SEQ ID NO: 1359823 - DNA, 15 bp, Homo sapiens
atagctcttataatt

SEQ ID NO: 1359824 - DNA, 15 bp, Homo sapiens
aatagctcttataat

SEQ ID NO: 1359825 - DNA, 15 bp, Homo sapiens
aaatagctcttataa

SEQ ID NO: 1359826 - DNA, 15 bp, Homo sapiens
taaatagctcttata

SEQ ID NO: 1359827 - DNA, 15 bp, Homo sapiens
ttcataaatagctct

SEQ ID NO: 1359828 - DNA, 15 bp, Homo sapiens
tttcataaatagctc

SEQ ID NO: 1359829 - DNA, 15 bp, Homo sapiens
ttttcataaatagct

SEQ ID NO: 1359830 - DNA, 15 bp, Homo sapiens
tttttcataaatagc

SEQ ID NO: 1359831 - DNA, 15 bp, Homo sapiens
gtttttcataaatag

SEQ ID NO: 1359832 - DNA, 15 bp, Homo sapiens
ggtttttcataaata

SEQ ID NO: 1359833 - DNA, 15 bp, Homo sapiens
gggtttttcataaat

SEQ ID NO: 1359834 - DNA, 15 bp, Homo sapiens
tgggtttttcataaa

SEQ ID NO: 1359835 - DNA, 15 bp, Homo sapiens
gtgggtttttcataa

SEQ ID NO: 1359836 - DNA, 15 bp, Homo sapiens
tgtgggtttttcata

SEQ ID NO: 1359837 - DNA, 15 bp, Homo sapiens
ctgtgggtttttcat

SEQ ID NO: 1359838 - DNA, 15 bp, Homo sapiens
gctgtgggtttttca

SEQ ID NO: 1359839 - DNA, 15 bp, Homo sapiens
ggctgtgggtttttc

SEQ ID NO: 1359840 - DNA, 15 bp, Homo sapiens
atatgatattggctg

SEQ ID NO: 1359841 - DNA, 15 bp, Homo sapiens
aatatgatattggct

SEQ ID NO: 1359842 - DNA, 15 bp, Homo sapiens
caatatgatattggc

SEQ ID NO: 1359843 - DNA, 15 bp, Homo sapiens
tcaatatgatattgg

SEQ ID NO: 1359844 - DNA, 15 bp, Homo sapiens
ttcaatatgatattg

SEQ ID NO: 1359845 - DNA, 15 bp, Homo sapiens
attcaatatgatatt

SEQ ID NO: 1359846 - DNA, 15 bp, Homo sapiens
cattcaatatgatat

SEQ ID NO: 1359847 - DNA, 15 bp, Homo sapiens
ccattcaatatgata

SEQ ID NO: 1359848 - DNA, 15 bp, Homo sapiens
cccattcaatatgat

SEQ ID NO: 1359849 - DNA, 15 bp, Homo sapiens
gcccattcaatatga

SEQ ID NO: 1359850 - DNA, 15 bp, Homo sapiens
tgcccattcaatatg

SEQ ID NO: 1359851 - DNA, 15 bp, Homo sapiens
ttgcccattcaatat

SEQ ID NO: 1359852 - DNA, 15 bp, Homo sapiens
cttgcccattcaata

SEQ ID NO: 1359853 - DNA, 15 bp, Homo sapiens
tcttgcccattcaat

SEQ ID NO: 1359854 - DNA, 15 bp, Homo sapiens
ctcttgcccattcaa

SEQ ID NO: 1359855 - DNA, 15 bp, Homo sapiens
gctcttgcccattca

SEQ ID NO: 1359856 - DNA, 15 bp, Homo sapiens
agctcttgcccattc

SEQ ID NO: 1359857 - DNA, 15 bp, Homo sapiens
cagctcttgcccatt

SEQ ID NO: 1359858 - DNA, 15 bp, Homo sapiens
ccagctcttgcccat

SEQ ID NO: 1359859 - DNA, 15 bp, Homo sapiens
tccagctcttgccca

SEQ ID NO: 1359860 - DNA, 15 bp, Homo sapiens
ttccagctcttgccc

SEQ ID NO: 1359861 - DNA, 15 bp, Homo sapiens
cttccagctcttgcc

SEQ ID NO: 1359862 - DNA, 15 bp, Homo sapiens
gcttccagctcttgc

SEQ ID NO: 1359863 - DNA, 15 bp, Homo sapiens
tgcttccagctcttg

SEQ ID NO: 1359864 - DNA, 15 bp, Homo sapiens
atgcttccagctctt

SEQ ID NO: 1359865 - DNA, 15 bp, Homo sapiens
aatgcttccagctct

SEQ ID NO: 1359866 - DNA, 15 bp, Homo sapiens
gaatgcttccagctc

SEQ ID NO: 1359867 - DNA, 15 bp, Homo sapiens
tttttcaaagggaat

SEQ ID NO: 1359868 - DNA, 15 bp, Homo sapiens
gtttttcaaagggaa

SEQ ID NO: 1359869 - DNA, 15 bp, Homo sapiens
tgtttttcaaaggga

SEQ ID NO: 1359870 - DNA, 15 bp, Homo sapiens
ctgtttttcaaaggg

SEQ ID NO: 1359871 - DNA, 15 bp, Homo sapiens
tctgtttttcaaagg

SEQ ID NO: 1359872 - DNA, 15 bp, Homo sapiens
atctgtttttcaaag

SEQ ID NO: 1359873 - DNA, 15 bp, Homo sapiens
gatctgtttttcaaa

SEQ ID NO: 1359874 - DNA, 15 bp, Homo sapiens
tgatctgtttttcaa

SEQ ID NO: 1359875 - DNA, 15 bp, Homo sapiens
ttgatctgtttttca

SEQ ID NO: 1359876 - DNA, 15 bp, Homo sapiens
cttgatctgtttttc

SEQ ID NO: 1359877 - DNA, 15 bp, Homo sapiens
tcttgatctgttttt

SEQ ID NO: 1359878 - DNA, 15 bp, Homo sapiens
gtcttgatctgtttt

SEQ ID NO: 1359879 - DNA, 15 bp, Homo sapiens
tgtcttgatctgttt

SEQ ID NO: 1359880 - DNA, 15 bp, Homo sapiens
ttgtcttgatctgtt

SEQ ID NO: 1359881 - DNA, 15 bp, Homo sapiens
gttgtcttgatctgt

SEQ ID NO: 1359882 - DNA, 15 bp, Homo sapiens
cgttgtcttgatctg

SEQ ID NO: 1359883 - DNA, 15 bp, Homo sapiens
tcgttgtcttgatct

SEQ ID NO: 1359884 - DNA, 15 bp, Homo sapiens
atcgttgtcttgatc

SEQ ID NO: 1359885 - DNA, 15 bp, Homo sapiens
catcgttgtcttgat

SEQ ID NO: 1359886 - DNA, 15 bp, Homo sapiens
gcatcgttgtcttga

SEQ ID NO: 1359887 - DNA, 15 bp, Homo sapiens
ggcatcgttgtcttg

SEQ ID NO: 1359888 - DNA, 15 bp, Homo sapiens
gggcatcgttgtctt

SEQ ID NO: 1359889 - DNA, 15 bp, Homo sapiens
agggcatcgttgtct

SEQ ID NO: 1359890 - DNA, 15 bp, Homo sapiens
gagggcatcgttgtc

SEQ ID NO: 1359891 - DNA, 15 bp, Homo sapiens
agagggcatcgttgt

SEQ ID NO: 1359892 - DNA, 15 bp, Homo sapiens
gagagggcatcgttg

SEQ ID NO: 1359893 - DNA, 15 bp, Homo sapiens
agagagggcatcgtt

SEQ ID NO: 1359894 - DNA, 15 bp, Homo sapiens
gagagagggcatcgt

SEQ ID NO: 1359895 - DNA, 15 bp, Homo sapiens
tgagagagggcatcg

SEQ ID NO: 1359896 - DNA, 15 bp, Homo sapiens
tgccagaacttccaa

SEQ ID NO: 1359897 - DNA, 15 bp, Homo sapiens
ctgccagaacttcca

SEQ ID NO: 1359898 - DNA, 15 bp, Homo sapiens
cctgccagaacttcc

SEQ ID NO: 1359899 - DNA, 15 bp, Homo sapiens
ccctgccagaacttc

SEQ ID NO: 1359900 - DNA, 15 bp, Homo sapiens
gccctgccagaactt

SEQ ID NO: 1359901 - DNA, 15 bp, Homo sapiens
tgccctgccagaact

SEQ ID NO: 1359902 - DNA, 15 bp, Homo sapiens
ttgccctgccagaac

SEQ ID NO: 1359903 - DNA, 15 bp, Homo sapiens
attgccctgccagaa

SEQ ID NO: 1359904 - DNA, 15 bp, Homo sapiens
gattgccctgccaga

SEQ ID NO: 1359905 - DNA, 15 bp, Homo sapiens
tgattgccctgccag

SEQ ID NO: 1359906 - DNA, 15 bp, Homo sapiens
ctgattgccctgcca

SEQ ID NO: 1359907 - DNA, 15 bp, Homo sapiens
cctgattgccctgcc

SEQ ID NO: 1359908 - DNA, 15 bp, Homo sapiens
gcctgattgccctgc

SEQ ID NO: 1359909 - DNA, 15 bp, Homo sapiens
gtttctttctcttgc

SEQ ID NO: 1359910 - DNA, 15 bp, Homo sapiens
tgtttctttctcttg

SEQ ID NO: 1359911 - DNA, 15 bp, Homo sapiens
ttgtttctttctctt

SEQ ID NO: 1359912 - DNA, 15 bp, Homo sapiens
tttgtttctttctct

SEQ ID NO: 1359913 - DNA, 15 bp, Homo sapiens
ctttgtttctttctc

SEQ ID NO: 1359914 - DNA, 15 bp, Homo sapiens
cctttgtttctttct

SEQ ID NO: 1359915 - DNA, 15 bp, Homo sapiens
ccctttgtttctttc

SEQ ID NO: 1359916 - DNA, 15 bp, Homo sapiens
gccctttgtttcttt

SEQ ID NO: 1359917 - DNA, 15 bp, Homo sapiens
tgccctttgtttctt

SEQ ID NO: 1359918 - DNA, 15 bp, Homo sapiens
atgccctttgtttct

SEQ ID NO: 1359919 - DNA, 15 bp, Homo sapiens
aatgccctttgtttc

SEQ ID NO: 1359920 - DNA, 15 bp, Homo sapiens
gaatgccctttgttt

SEQ ID NO: 1359921 - DNA, 15 bp, Homo sapiens
tgaatgccctttgtt

SEQ ID NO: 1359922 - DNA, 15 bp, Homo sapiens
ttgaatgccctttgt

SEQ ID NO: 1359923 - DNA, 15 bp, Homo sapiens
tttgaatgccctttg

SEQ ID NO: 1359924 - DNA, 15 bp, Homo sapiens
atttgaatgcccttt

SEQ ID NO: 1359925 - DNA, 15 bp, Homo sapiens
tatttgaatgccctt

SEQ ID NO: 1359926 - DNA, 15 bp, Homo sapiens
ctatttgaatgccct

SEQ ID NO: 1359927 - DNA, 15 bp, Homo sapiens
cctatttgaatgccc

SEQ ID NO: 1359928 - DNA, 15 bp, Homo sapiens
tcctatttgaatgcc

SEQ ID NO: 1359929 - DNA, 15 bp, Homo sapiens
ttcctatttgaatgc

SEQ ID NO: 1359930 - DNA, 15 bp, Homo sapiens
cttcctatttgaatg

SEQ ID NO: 1359931 - DNA, 15 bp, Homo sapiens
catttgacttcctct

SEQ ID NO: 1359932 - DNA, 15 bp, Homo sapiens
ccatttgacttcctc

SEQ ID NO: 1359933 - DNA, 15 bp, Homo sapiens
accatttgacttcct

SEQ ID NO: 1359934 - DNA, 15 bp, Homo sapiens
gaccatttgacttcc

SEQ ID NO: 1359935 - DNA, 15 bp, Homo sapiens
agaccatttgacttc

SEQ ID NO: 1359936 - DNA, 15 bp, Homo sapiens
gagaccatttgactt

SEQ ID NO: 1359937 - DNA, 15 bp, Homo sapiens
agagaccatttgact

SEQ ID NO: 1359938 - DNA, 15 bp, Homo sapiens
cagagaccatttgac

SEQ ID NO: 1359939 - DNA, 15 bp, Homo sapiens
acagagaccatttga

SEQ ID NO: 1359940 - DNA, 15 bp, Homo sapiens
aacagagaccatttg

SEQ ID NO: 1359941 - DNA, 15 bp, Homo sapiens
aaacagagaccattt

SEQ ID NO: 1359942 - DNA, 15 bp, Homo sapiens
caaacagagaccatt

SEQ ID NO: 1359943 - DNA, 15 bp, Homo sapiens
tcaaacagagaccat

SEQ ID NO: 1359944 - DNA, 15 bp, Homo sapiens
ttcaaacagagacca

SEQ ID NO: 1359945 - DNA, 15 bp, Homo sapiens
cttcaaacagagacc

SEQ ID NO: 1359946 - DNA, 15 bp, Homo sapiens
tcttcaaacagagac

SEQ ID NO: 1359947 - DNA, 15 bp, Homo sapiens
atcttcaaacagaga

SEQ ID NO: 1359948 - DNA, 15 bp, Homo sapiens
catcttcaaacagag

SEQ ID NO: 1359949 - DNA, 15 bp, Homo sapiens
tcatcttcaaacaga

SEQ ID NO: 1359950 - DNA, 15 bp, Homo sapiens
gtcatcttcaaacag

SEQ ID NO: 1359951 - DNA, 15 bp, Homo sapiens
atgtcatcttcaaac

SEQ ID NO: 1359952 - DNA, 15 bp, Homo sapiens
catgtcatcttcaaa

SEQ ID NO: 1359953 - DNA, 15 bp, Homo sapiens
tcatgtcatcttcaa

SEQ ID NO: 1359954 - DNA, 15 bp, Homo sapiens
atcatgtcatcttca

SEQ ID NO: 1359955 - DNA, 15 bp, Homo sapiens
aatcatgtcatcttc

SEQ ID NO: 1359956 - DNA, 15 bp, Homo sapiens
caatcatgtcatctt

SEQ ID NO: 1359957 - DNA, 15 bp, Homo sapiens
acaatcatgtcatct

SEQ ID NO: 1359958 - DNA, 15 bp, Homo sapiens
tacaatcatgtcatc

SEQ ID NO: 1359959 - DNA, 15 bp, Homo sapiens
atacaatcatgtcat

SEQ ID NO: 1359960 - DNA, 15 bp, Homo sapiens
tatacaatcatgtca

SEQ ID NO: 1359961 - DNA, 15 bp, Homo sapiens
atatacaatcatgtc

SEQ ID NO: 1359962 - DNA, 15 bp, Homo sapiens
aatatacaatcatgt

SEQ ID NO: 1359963 - DNA, 15 bp, Homo sapiens
aaatatacaatcatg

SEQ ID NO: 1359964 - DNA, 15 bp, Homo sapiens
caaatatacaatcat

SEQ ID NO: 1359965 - DNA, 15 bp, Homo sapiens
ccaaatatacaatca

SEQ ID NO: 1359966 - DNA, 15 bp, Homo sapiens
tccaaatatacaatc

SEQ ID NO: 1359967 - DNA, 15 bp, Homo sapiens
ttccaaatatacaat

SEQ ID NO: 1359968 - DNA, 15 bp, Homo sapiens
tttccaaatatacaa

SEQ ID NO: 1359969 - DNA, 15 bp, Homo sapiens
ttttccaaatataca

SEQ ID NO: 1359970 - DNA, 15 bp, Homo sapiens
gttttccaaatatac

SEQ ID NO: 1359971 - DNA, 15 bp, Homo sapiens
ggttttccaaatata

SEQ ID NO: 1359972 - DNA, 15 bp, Homo sapiens
gggttttccaaatat

SEQ ID NO: 1359973 - DNA, 15 bp, Homo sapiens
ggggttttccaaata

SEQ ID NO: 1359974 - DNA, 15 bp, Homo sapiens
tggggttttccaaat

SEQ ID NO: 1359975 - DNA, 15 bp, Homo sapiens
atggggttttccaaa

SEQ ID NO: 1359976 - DNA, 15 bp, Homo sapiens
gatggggttttccaa

SEQ ID NO: 1359977 - DNA, 15 bp, Homo sapiens
cgatggggttttcca

SEQ ID NO: 1359978 - DNA, 15 bp, Homo sapiens
acgatggggttttcc

SEQ ID NO: 1359979 - DNA, 15 bp, Homo sapiens
atgagacgatggggt

SEQ ID NO: 1359980 - DNA, 15 bp, Homo sapiens
gatgagacgatgggg

SEQ ID NO: 1359981 - DNA, 15 bp, Homo sapiens
ggatgagacgatggg

SEQ ID NO: 1359982 - DNA, 15 bp, Homo sapiens
gggatgagacgatgg

SEQ ID NO: 1359983 - DNA, 15 bp, Homo sapiens
tgggatgagacgatg

SEQ ID NO: 1359984 - DNA, 15 bp, Homo sapiens
ttgggatgagacgat

SEQ ID NO: 1359985 - DNA, 15 bp, Homo sapiens
tttgggatgagacga

SEQ ID NO: 1359986 - DNA, 15 bp, Homo sapiens
ttttgggatgagacg

SEQ ID NO: 1359987 - DNA, 15 bp, Homo sapiens
attttgggatgagac

SEQ ID NO: 1359988 - DNA, 15 bp, Homo sapiens
gattttgggatgaga

SEQ ID NO: 1359989 - DNA, 15 bp, Homo sapiens
agattttgggatgag

SEQ ID NO: 1359990 - DNA, 15 bp, Homo sapiens
gagattttgggatga

SEQ ID NO: 1359991 - DNA, 15 bp, Homo sapiens
ggagattttgggatg

SEQ ID NO: 1359992 - DNA, 15 bp, Homo sapiens
aggagattttgggat

SEQ ID NO: 1359993 - DNA, 15 bp, Homo sapiens
aaggagattttggga

SEQ ID NO: 1359994 - DNA, 15 bp, Homo sapiens
gttgctgaagttgct

SEQ ID NO: 1359995 - DNA, 15 bp, Homo sapiens
tgttgctgaagttgc

SEQ ID NO: 1359996 - DNA, 15 bp, Homo sapiens
atgttgctgaagttg

SEQ ID NO: 1359997 - DNA, 15 bp, Homo sapiens
gatgttgctgaagtt

SEQ ID NO: 1359998 - DNA, 15 bp, Homo sapiens
agatgttgctgaagt

SEQ ID NO: 1359999 - DNA, 15 bp, Homo sapiens
gagatgttgctgaag

SEQ ID NO: 1360000 - DNA, 15 bp, Homo sapiens
tgagatgttgctgaa

SEQ ID NO: 1360001 - DNA, 15 bp, Homo sapiens
ctgagatgttgctga

SEQ ID NO: 1360002 - DNA, 15 bp, Homo sapiens
cctgagatgttgctg

SEQ ID NO: 1360003 - DNA, 15 bp, Homo sapiens
tcctgagatgttgct

SEQ ID NO: 1360004 - DNA, 15 bp, Homo sapiens
atcctgagatgttgc

SEQ ID NO: 1360005 - DNA, 15 bp, Homo sapiens
tatcctgagatgttg

SEQ ID NO: 1360006 - DNA, 15 bp, Homo sapiens
ttatcctgagatgtt

SEQ ID NO: 1360007 - DNA, 15 bp, Homo sapiens
tttatcctgagatgt

SEQ ID NO: 1360008 - DNA, 15 bp, Homo sapiens
ttttatcctgagatg

SEQ ID NO: 1360009 - DNA, 15 bp, Homo sapiens
tttttatcctgagat

SEQ ID NO: 1360010 - DNA, 15 bp, Homo sapiens
atttttatcctgaga

SEQ ID NO: 1360011 - DNA, 15 bp, Homo sapiens
gatttttatcctgag

SEQ ID NO: 1360012 - DNA, 15 bp, Homo sapiens
tgatttttatcctga

SEQ ID NO: 1360013 - DNA, 15 bp, Homo sapiens
ttgatttttatcctg

SEQ ID NO: 1360014 - DNA, 15 bp, Homo sapiens
gttgatttttatcct

SEQ ID NO: 1360015 - DNA, 15 bp, Homo sapiens
cgttgatttttatcc

SEQ ID NO: 1360016 - DNA, 15 bp, Homo sapiens
acgttgatttttatc

SEQ ID NO: 1360017 - DNA, 15 bp, Homo sapiens
gacgttgatttttat

SEQ ID NO: 1360018 - DNA, 15 bp, Homo sapiens
agacgttgattttta

SEQ ID NO: 1360019 - DNA, 15 bp, Homo sapiens
gagacgttgattttt

SEQ ID NO: 1360020 - DNA, 15 bp, Homo sapiens
tgagacgttgatttt

SEQ ID NO: 1360021 - DNA, 15 bp, Homo sapiens
ctgagacgttgattt

SEQ ID NO: 1360022 - DNA, 15 bp, Homo sapiens
cctgagacgttgatt

SEQ ID NO: 1360023 - DNA, 15 bp, Homo sapiens
tcctgagacgttgat

SEQ ID NO: 1360024 - DNA, 15 bp, Homo sapiens
atcctgagacgttga

SEQ ID NO: 1360025 - DNA, 15 bp, Homo sapiens
tatcctgagacgttg

SEQ ID NO: 1360026 - DNA, 15 bp, Homo sapiens
gtatcctgagacgtt

SEQ ID NO: 1360027 - DNA, 15 bp, Homo sapiens
tgtatcctgagacgt

SEQ ID NO: 1360028 - DNA, 15 bp, Homo sapiens
ttgtatcctgagacg

SEQ ID NO: 1360029 - DNA, 15 bp, Homo sapiens
aataggaatgcttgt

SEQ ID NO: 1360030 - DNA, 15 bp, Homo sapiens
gaataggaatgcttg

SEQ ID NO: 1360031 - DNA, 15 bp, Homo sapiens
tgaataggaatgctt

SEQ ID NO: 1360032 - DNA, 15 bp, Homo sapiens
gtgaataggaatgct

SEQ ID NO: 1360033 - DNA, 15 bp, Homo sapiens
ggtgaataggaatgc

SEQ ID NO: 1360034 - DNA, 15 bp, Homo sapiens
tggtgaataggaatg

SEQ ID NO: 1360035 - DNA, 15 bp, Homo sapiens
ttggtgaataggaat

SEQ ID NO: 1360036 - DNA, 15 bp, Homo sapiens
tttggtgaataggaa

SEQ ID NO: 1360037 - DNA, 15 bp, Homo sapiens
gtttggtgaatagga

SEQ ID NO: 1360038 - DNA, 15 bp, Homo sapiens
tgtttggtgaatagg

SEQ ID NO: 1360039 - DNA, 15 bp, Homo sapiens
ctgtttggtgaatag

SEQ ID NO: 1360040 - DNA, 15 bp, Homo sapiens
tctgtttggtgaata

SEQ ID NO: 1360041 - DNA, 15 bp, Homo sapiens
ctctgtttggtgaat

SEQ ID NO: 1360042 - DNA, 15 bp, Homo sapiens
tctctgtttggtgaa

SEQ ID NO: 1360043 - DNA, 15 bp, Homo sapiens
ctctctgtttggtga

SEQ ID NO: 1360044 - DNA, 15 bp, Homo sapiens
gctctctgtttggtg

SEQ ID NO: 1360045 - DNA, 15 bp, Homo sapiens
ggctctctgtttggt

SEQ ID NO: 1360046 - DNA, 15 bp, Homo sapiens
tggctctctgtttgg

SEQ ID NO: 1360047 - DNA, 15 bp, Homo sapiens
ggcaattgtgaatgg

SEQ ID NO: 1360048 - DNA, 15 bp, Homo sapiens
tggcaattgtgaatg

SEQ ID NO: 1360049 - DNA, 15 bp, Homo sapiens
gtggcaattgtgaat

SEQ ID NO: 1360050 - DNA, 15 bp, Homo sapiens
tgtggcaattgtgaa

SEQ ID NO: 1360051 - DNA, 15 bp, Homo sapiens
ttgtggcaattgtga

SEQ ID NO: 1360052 - DNA, 15 bp, Homo sapiens
tttgtggcaattgtg

SEQ ID NO: 1360053 - DNA, 15 bp, Homo sapiens
ctttgtggcaattgt

SEQ ID NO: 1360054 - DNA, 15 bp, Homo sapiens
tctttgtggcaattg

SEQ ID NO: 1360055 - DNA, 15 bp, Homo sapiens
ctctttgtggcaatt

SEQ ID NO: 1360056 - DNA, 15 bp, Homo sapiens
tctctttgtggcaat

SEQ ID NO: 1360057 - DNA, 15 bp, Homo sapiens
ttctctttgtggcaa

SEQ ID NO: 1360058 - DNA, 15 bp, Homo sapiens
attctctttgtggca

SEQ ID NO: 1360059 - DNA, 15 bp, Homo sapiens
tattctctttgtggc

SEQ ID NO: 1360060 - DNA, 15 bp, Homo sapiens
ttattctctttgtgg

SEQ ID NO: 1360061 - DNA, 15 bp, Homo sapiens
tttattctctttgtg

SEQ ID NO: 1360062 - DNA, 15 bp, Homo sapiens
tctaggtattttatt

SEQ ID NO: 1360063 - DNA, 15 bp, Homo sapiens
ttctaggtattttat

SEQ ID NO: 1360064 - DNA, 15 bp, Homo sapiens
tttctaggtatttta

SEQ ID NO: 1360065 - DNA, 15 bp, Homo sapiens
atttctaggtatttt

SEQ ID NO: 1360066 - DNA, 15 bp, Homo sapiens
tatttctaggtattt

SEQ ID NO: 1360067 - DNA, 15 bp, Homo sapiens
gtatttctaggtatt

SEQ ID NO: 1360068 - DNA, 15 bp, Homo sapiens
tgtatttctaggtat

SEQ ID NO: 1360069 - DNA, 15 bp, Homo sapiens
ttgtatttctaggta

SEQ ID NO: 1360070 - DNA, 15 bp, Homo sapiens
gttgtatttctaggt

SEQ ID NO: 1360071 - DNA, 15 bp, Homo sapiens
agttgtatttctagg

SEQ ID NO: 1360072 - DNA, 15 bp, Homo sapiens
aagttgtatttctag

SEQ ID NO: 1360073 - DNA, 15 bp, Homo sapiens
taagttgtatttcta

SEQ ID NO: 1360074 - DNA, 15 bp, Homo sapiens
gtaagttgtatttct

SEQ ID NO: 1360075 - DNA, 15 bp, Homo sapiens
tgtaagttgtatttc

SEQ ID NO: 1360076 - DNA, 15 bp, Homo sapiens
ttgtaagttgtattt

SEQ ID NO: 1360077 - DNA, 15 bp, Homo sapiens
cttgtaagttgtatt

SEQ ID NO: 1360078 - DNA, 15 bp, Homo sapiens
ccttgtaagttgtat

SEQ ID NO: 1360079 - DNA, 15 bp, Homo sapiens
cccttgtaagttgta

SEQ ID NO: 1360080 - DNA, 15 bp, Homo sapiens
tcccttgtaagttgt

SEQ ID NO: 1360081 - DNA, 15 bp, Homo sapiens
catttgtttgtgtcc

SEQ ID NO: 1360082 - DNA, 15 bp, Homo sapiens
ccatttgtttgtgtc

SEQ ID NO: 1360083 - DNA, 15 bp, Homo sapiens
tccatttgtttgtgt

SEQ ID NO: 1360084 - DNA, 15 bp, Homo sapiens
ttccatttgtttgtg

SEQ ID NO: 1360085 - DNA, 15 bp, Homo sapiens
tttccatttgtttgt

SEQ ID NO: 1360086 - DNA, 15 bp, Homo sapiens
ttttccatttgtttg

SEQ ID NO: 1360087 - DNA, 15 bp, Homo sapiens
tttttccatttgttt

SEQ ID NO: 1360088 - DNA, 15 bp, Homo sapiens
gtttttccatttgtt

SEQ ID NO: 1360089 - DNA, 15 bp, Homo sapiens
tgtttttccatttgt

SEQ ID NO: 1360090 - DNA, 15 bp, Homo sapiens
atgtttttccatttg

SEQ ID NO: 1360091 - DNA, 15 bp, Homo sapiens
aatgtttttccattt

SEQ ID NO: 1360092 - DNA, 15 bp, Homo sapiens
gaatgtttttccatt

SEQ ID NO: 1360093 - DNA, 15 bp, Homo sapiens
ggaatgtttttccat

SEQ ID NO: 1360094 - DNA, 15 bp, Homo sapiens
tggaatgtttttcca

SEQ ID NO: 1360095 - DNA, 15 bp, Homo sapiens
atggaatgtttttcc

SEQ ID NO: 1360096 - DNA, 15 bp, Homo sapiens
acatggaatgttttt

SEQ ID NO: 1360097 - DNA, 15 bp, Homo sapiens
aacatggaatgtttt

SEQ ID NO: 1360098 - DNA, 15 bp, Homo sapiens
gaacatggaatgttt

SEQ ID NO: 1360099 - DNA, 15 bp, Homo sapiens
tgaacatggaatgtt

SEQ ID NO: 1360100 - DNA, 15 bp, Homo sapiens
atgaacatggaatgt

SEQ ID NO: 1360101 - DNA, 15 bp, Homo sapiens
catgaacatggaatg

SEQ ID NO: 1360102 - DNA, 15 bp, Homo sapiens
ccatgaacatggaat

SEQ ID NO: 1360103 - DNA, 15 bp, Homo sapiens
tccatgaacatggaa

SEQ ID NO: 1360104 - DNA, 15 bp, Homo sapiens
atccatgaacatgga

SEQ ID NO: 1360105 - DNA, 15 bp, Homo sapiens
tatccatgaacatgg

SEQ ID NO: 1360106 - DNA, 15 bp, Homo sapiens
ctatccatgaacatg

SEQ ID NO: 1360107 - DNA, 15 bp, Homo sapiens
cctatccatgaacat

SEQ ID NO: 1360108 - DNA, 15 bp, Homo sapiens
tcctatccatgaaca

SEQ ID NO: 1360109 - DNA, 15 bp, Homo sapiens
ttcctatccatgaac

SEQ ID NO: 1360110 - DNA, 15 bp, Homo sapiens
cttcctatccatgaa

SEQ ID NO: 1360111 - DNA, 15 bp, Homo sapiens
gtatggccattttaa

SEQ ID NO: 1360112 - DNA, 15 bp, Homo sapiens
agtatggccatttta

SEQ ID NO: 1360113 - DNA, 15 bp, Homo sapiens
cagtatggccatttt

SEQ ID NO: 1360114 - DNA, 15 bp, Homo sapiens
gcagtatggccattt

SEQ ID NO: 1360115 - DNA, 15 bp, Homo sapiens
ggcagtatggccatt

SEQ ID NO: 1360116 - DNA, 15 bp, Homo sapiens
gggcagtatggccat

SEQ ID NO: 1360117 - DNA, 15 bp, Homo sapiens
tgggcagtatggcca

SEQ ID NO: 1360118 - DNA, 15 bp, Homo sapiens
ttgggcagtatggcc

SEQ ID NO: 1360119 - DNA, 15 bp, Homo sapiens
tttgggcagtatggc

SEQ ID NO: 1360120 - DNA, 15 bp, Homo sapiens
ctttgggcagtatgg

SEQ ID NO: 1360121 - DNA, 15 bp, Homo sapiens
cctttgggcagtatg

SEQ ID NO: 1360122 - DNA, 15 bp, Homo sapiens
tcctttgggcagtat

SEQ ID NO: 1360123 - DNA, 15 bp, Homo sapiens
ttcctttgggcagta

SEQ ID NO: 1360124 - DNA, 15 bp, Homo sapiens
attcctttgggcagt

SEQ ID NO: 1360125 - DNA, 15 bp, Homo sapiens
aattcctttgggcag

SEQ ID NO: 1360126 - DNA, 15 bp, Homo sapiens
aaattcctttgggca

SEQ ID NO: 1360127 - DNA, 15 bp, Homo sapiens
taaattcctttgggc

SEQ ID NO: 1360128 - DNA, 15 bp, Homo sapiens
ataaattcctttggg

SEQ ID NO: 1360129 - DNA, 15 bp, Homo sapiens
tataaattcctttgg

SEQ ID NO: 1360130 - DNA, 15 bp, Homo sapiens
ctataaattcctttg

SEQ ID NO: 1360131 - DNA, 15 bp, Homo sapiens
tctataaattccttt

SEQ ID NO: 1360132 - DNA, 15 bp, Homo sapiens
atctataaattcctt

SEQ ID NO: 1360133 - DNA, 15 bp, Homo sapiens
aatctataaattcct

SEQ ID NO: 1360134 - DNA, 15 bp, Homo sapiens
gaatctataaattcc

SEQ ID NO: 1360135 - DNA, 15 bp, Homo sapiens
tgaatctataaattc

SEQ ID NO: 1360136 - DNA, 15 bp, Homo sapiens
cgatggggatagcat

SEQ ID NO: 1360137 - DNA, 15 bp, Homo sapiens
tcgatggggatagca

SEQ ID NO: 1360138 - DNA, 15 bp, Homo sapiens
ctcgatggggatagc

SEQ ID NO: 1360139 - DNA, 15 bp, Homo sapiens
gctcgatggggatag

SEQ ID NO: 1360140 - DNA, 15 bp, Homo sapiens
agctcgatggggata

SEQ ID NO: 1360141 - DNA, 15 bp, Homo sapiens
tagctcgatggggat

SEQ ID NO: 1360142 - DNA, 15 bp, Homo sapiens
gtagctcgatgggga

SEQ ID NO: 1360143 - DNA, 15 bp, Homo sapiens
ggtagctcgatgggg

SEQ ID NO: 1360144 - DNA, 15 bp, Homo sapiens
tggtagctcgatggg

SEQ ID NO: 1360145 - DNA, 15 bp, Homo sapiens
atggtagctcgatgg

SEQ ID NO: 1360146 - DNA, 15 bp, Homo sapiens
aatggtagctcgatg

SEQ ID NO: 1360147 - DNA, 15 bp, Homo sapiens
caatggtagctcgat

SEQ ID NO: 1360148 - DNA, 15 bp, Homo sapiens
tcaatggtagctcga

SEQ ID NO: 1360149 - DNA, 15 bp, Homo sapiens
gtcaatggtagctcg

SEQ ID NO: 1360150 - DNA, 15 bp, Homo sapiens
agtcaatggtagctc

SEQ ID NO: 1360151 - DNA, 15 bp, Homo sapiens
aagtcaatggtagct

SEQ ID NO: 1360152 - DNA, 15 bp, Homo sapiens
aaagtcaatggtagc

SEQ ID NO: 1360153 - DNA, 15 bp, Homo sapiens
gaaagtcaatggtag

SEQ ID NO: 1360154 - DNA, 15 bp, Homo sapiens
agaaagtcaatggta

SEQ ID NO: 1360155 - DNA, 15 bp, Homo sapiens
aagaaagtcaatggt

SEQ ID NO: 1360156 - DNA, 15 bp, Homo sapiens
gaagaaagtcaatgg

SEQ ID NO: 1360157 - DNA, 15 bp, Homo sapiens
tgaagaaagtcaatg

SEQ ID NO: 1360158 - DNA, 15 bp, Homo sapiens
gtgaagaaagtcaat

SEQ ID NO: 1360159 - DNA, 15 bp, Homo sapiens
tgtgaagaaagtcaa

SEQ ID NO: 1360160 - DNA, 15 bp, Homo sapiens
tttttttctaattct

SEQ ID NO: 1360161 - DNA, 15 bp, Homo sapiens
gtttttttctaattc

SEQ ID NO: 1360162 - DNA, 15 bp, Homo sapiens
agtttttttctaatt

SEQ ID NO: 1360163 - DNA, 15 bp, Homo sapiens
cagtttttttctaat

SEQ ID NO: 1360164 - DNA, 15 bp, Homo sapiens
gcagtttttttctaa

SEQ ID NO: 1360165 - DNA, 15 bp, Homo sapiens
agcagtttttttcta

SEQ ID NO: 1360166 - DNA, 15 bp, Homo sapiens
aagcagtttttttct

SEQ ID NO: 1360167 - DNA, 15 bp, Homo sapiens
aaagcagtttttttc

SEQ ID NO: 1360168 - DNA, 15 bp, Homo sapiens
taaagcagttttttt

SEQ ID NO: 1360169 - DNA, 15 bp, Homo sapiens
ttaaagcagtttttt

SEQ ID NO: 1360170 - DNA, 15 bp, Homo sapiens
tttaaagcagttttt

SEQ ID NO: 1360171 - DNA, 15 bp, Homo sapiens
ctttaaagcagtttt

SEQ ID NO: 1360172 - DNA, 15 bp, Homo sapiens
actttaaagcagttt

SEQ ID NO: 1360173 - DNA, 15 bp, Homo sapiens
aactttaaagcagtt

SEQ ID NO: 1360174 - DNA, 15 bp, Homo sapiens
gaactttaaagcagt

SEQ ID NO: 1360175 - DNA, 15 bp, Homo sapiens
tgaactttaaagcag

SEQ ID NO: 1360176 - DNA, 15 bp, Homo sapiens
atgaactttaaagca

SEQ ID NO: 1360177 - DNA, 15 bp, Homo sapiens
tatgaactttaaagc

SEQ ID NO: 1360178 - DNA, 15 bp, Homo sapiens
atatgaactttaaag

SEQ ID NO: 1360179 - DNA, 15 bp, Homo sapiens
catatgaactttaaa

SEQ ID NO: 1360180 - DNA, 15 bp, Homo sapiens
gttccatatgaactt

SEQ ID NO: 1360181 - DNA, 15 bp, Homo sapiens
ggttccatatgaact

SEQ ID NO: 1360182 - DNA, 15 bp, Homo sapiens
tggttccatatgaac

SEQ ID NO: 1360183 - DNA, 15 bp, Homo sapiens
ttggttccatatgaa

SEQ ID NO: 1360184 - DNA, 15 bp, Homo sapiens
tttggttccatatga

SEQ ID NO: 1360185 - DNA, 15 bp, Homo sapiens
ttttggttccatatg

SEQ ID NO: 1360186 - DNA, 15 bp, Homo sapiens
tttttggttccatat

SEQ ID NO: 1360187 - DNA, 15 bp, Homo sapiens
ttttttggttccata

SEQ ID NO: 1360188 - DNA, 15 bp, Homo sapiens
attttttggttccat

SEQ ID NO: 1360189 - DNA, 15 bp, Homo sapiens
tattttttggttcca

SEQ ID NO: 1360190 - DNA, 15 bp, Homo sapiens
ctattttttggttcc

SEQ ID NO: 1360191 - DNA, 15 bp, Homo sapiens
gctattttttggttc

SEQ ID NO: 1360192 - DNA, 15 bp, Homo sapiens
ggctattttttggtt

SEQ ID NO: 1360193 - DNA, 15 bp, Homo sapiens
gggctattttttggt

SEQ ID NO: 1360194 - DNA, 15 bp, Homo sapiens
tgggctattttttgg

SEQ ID NO: 1360195 - DNA, 15 bp, Homo sapiens
atgggctattttttg

SEQ ID NO: 1360196 - DNA, 15 bp, Homo sapiens
tatgggctatttttt

SEQ ID NO: 1360197 - DNA, 15 bp, Homo sapiens
atatgggctattttt

SEQ ID NO: 1360198 - DNA, 15 bp, Homo sapiens
tatatgggctatttt

SEQ ID NO: 1360199 - DNA, 15 bp, Homo sapiens
ctatatgggctattt

SEQ ID NO: 1360200 - DNA, 15 bp, Homo sapiens
gctatatgggctatt

SEQ ID NO: 1360201 - DNA, 15 bp, Homo sapiens
ggctatatgggctat

SEQ ID NO: 1360202 - DNA, 15 bp, Homo sapiens
tggctatatgggcta

SEQ ID NO: 1360203 - DNA, 15 bp, Homo sapiens
ttggctatatgggct

SEQ ID NO: 1360204 - DNA, 15 bp, Homo sapiens
cttggctatatgggc

SEQ ID NO: 1360205 - DNA, 15 bp, Homo sapiens
tcttggctatatggg

SEQ ID NO: 1360206 - DNA, 15 bp, Homo sapiens
gtcttggctatatgg

SEQ ID NO: 1360207 - DNA, 15 bp, Homo sapiens
tgtcttggctatatg

SEQ ID NO: 1360208 - DNA, 15 bp, Homo sapiens
ttgtcttggctatat

SEQ ID NO: 1360209 - DNA, 15 bp, Homo sapiens
attgtcttggctata

SEQ ID NO: 1360210 - DNA, 15 bp, Homo sapiens
gattgtcttggctat

SEQ ID NO: 1360211 - DNA, 15 bp, Homo sapiens
ggattgtcttggcta

SEQ ID NO: 1360212 - DNA, 15 bp, Homo sapiens
aggattgtcttggct

SEQ ID NO: 1360213 - DNA, 15 bp, Homo sapiens
taggattgtcttggc

SEQ ID NO: 1360214 - DNA, 15 bp, Homo sapiens
ttaggattgtcttgg

SEQ ID NO: 1360215 - DNA, 15 bp, Homo sapiens
cttaggattgtcttg

SEQ ID NO: 1360216 - DNA, 15 bp, Homo sapiens
gcttaggattgtctt

SEQ ID NO: 1360217 - DNA, 15 bp, Homo sapiens
tgcttaggattgtct

SEQ ID NO: 1360218 - DNA, 15 bp, Homo sapiens
ttgcttaggattgtc

SEQ ID NO: 1360219 - DNA, 15 bp, Homo sapiens
tttgcttaggattgt

SEQ ID NO: 1360220 - DNA, 15 bp, Homo sapiens
ttttgcttaggattg

SEQ ID NO: 1360221 - DNA, 15 bp, Homo sapiens
tttttgcttaggatt

SEQ ID NO: 1360222 - DNA, 15 bp, Homo sapiens
ctttttgcttaggat

SEQ ID NO: 1360223 - DNA, 15 bp, Homo sapiens
tctttttgcttagga

SEQ ID NO: 1360224 - DNA, 15 bp, Homo sapiens
ttctttttgcttagg

SEQ ID NO: 1360225 - DNA, 15 bp, Homo sapiens
gttctttttgcttag

SEQ ID NO: 1360226 - DNA, 15 bp, Homo sapiens
tgttctttttgctta

SEQ ID NO: 1360227 - DNA, 15 bp, Homo sapiens
ttgttctttttgctt

SEQ ID NO: 1360228 - DNA, 15 bp, Homo sapiens
tttgttctttttgct

SEQ ID NO: 1360229 - DNA, 15 bp, Homo sapiens
ctttgttctttttgc

SEQ ID NO: 1360230 - DNA, 15 bp, Homo sapiens
gctttgttctttttg

SEQ ID NO: 1360231 - DNA, 15 bp, Homo sapiens
agctttgttcttttt

SEQ ID NO: 1360232 - DNA, 15 bp, Homo sapiens
ttgatgcctccagct

SEQ ID NO: 1360233 - DNA, 15 bp, Homo sapiens
cttgatgcctccagc

SEQ ID NO: 1360234 - DNA, 15 bp, Homo sapiens
gcttgatgcctccag

SEQ ID NO: 1360235 - DNA, 15 bp, Homo sapiens
agcttgatgcctcca

SEQ ID NO: 1360236 - DNA, 15 bp, Homo sapiens
tagcttgatgcctcc

SEQ ID NO: 1360237 - DNA, 15 bp, Homo sapiens
gtagcttgatgcctc

SEQ ID NO: 1360238 - DNA, 15 bp, Homo sapiens
ggtagcttgatgcct

SEQ ID NO: 1360239 - DNA, 15 bp, Homo sapiens
aggtagcttgatgcc

SEQ ID NO: 1360240 - DNA, 15 bp, Homo sapiens
caggtagcttgatgc

SEQ ID NO: 1360241 - DNA, 15 bp, Homo sapiens
tcaggtagcttgatg

SEQ ID NO: 1360242 - DNA, 15 bp, Homo sapiens
gtcaggtagcttgat

SEQ ID NO: 1360243 - DNA, 15 bp, Homo sapiens
agtcaggtagcttga

SEQ ID NO: 1360244 - DNA, 15 bp, Homo sapiens
aagtcaggtagcttg

SEQ ID NO: 1360245 - DNA, 15 bp, Homo sapiens
gaagtcaggtagctt

SEQ ID NO: 1360246 - DNA, 15 bp, Homo sapiens
tgaagtcaggtagct

SEQ ID NO: 1360247 - DNA, 15 bp, Homo sapiens
ttgaagtcaggtagc

SEQ ID NO: 1360248 - DNA, 15 bp, Homo sapiens
tttgaagtcaggtag

SEQ ID NO: 1360249 - DNA, 15 bp, Homo sapiens
gtttgaagtcaggta

SEQ ID NO: 1360250 - DNA, 15 bp, Homo sapiens
agtttgaagtcaggt

SEQ ID NO: 1360251 - DNA, 15 bp, Homo sapiens
tagtttgaagtcagg

SEQ ID NO: 1360252 - DNA, 15 bp, Homo sapiens
gttactgtagccttg

SEQ ID NO: 1360253 - DNA, 15 bp, Homo sapiens
ggttactgtagcctt

SEQ ID NO: 1360254 - DNA, 15 bp, Homo sapiens
tggttactgtagcct

SEQ ID NO: 1360255 - DNA, 15 bp, Homo sapiens
ttggttactgtagcc

SEQ ID NO: 1360256 - DNA, 15 bp, Homo sapiens
tttggttactgtagc

SEQ ID NO: 1360257 - DNA, 15 bp, Homo sapiens
ttttggttactgtag

SEQ ID NO: 1360258 - DNA, 15 bp, Homo sapiens
gttttggttactgta

SEQ ID NO: 1360259 - DNA, 15 bp, Homo sapiens
tgttttggttactgt

SEQ ID NO: 1360260 - DNA, 15 bp, Homo sapiens
ctgttttggttactg

SEQ ID NO: 1360261 - DNA, 15 bp, Homo sapiens
gctgttttggttact

SEQ ID NO: 1360262 - DNA, 15 bp, Homo sapiens
tgctgttttggttac

SEQ ID NO: 1360263 - DNA, 15 bp, Homo sapiens
atgctgttttggtta

SEQ ID NO: 1360264 - DNA, 15 bp, Homo sapiens
catgctgttttggtt

SEQ ID NO: 1360265 - DNA, 15 bp, Homo sapiens
ccatgctgttttggt

SEQ ID NO: 1360266 - DNA, 15 bp, Homo sapiens
accatgctgttttgg

SEQ ID NO: 1360267 - DNA, 15 bp, Homo sapiens
atctgttttggtacc

SEQ ID NO: 1360268 - DNA, 15 bp, Homo sapiens
tatctgttttggtac

SEQ ID NO: 1360269 - DNA, 15 bp, Homo sapiens
ttatctgttttggta

SEQ ID NO: 1360270 - DNA, 15 bp, Homo sapiens
tttatctgttttggt

SEQ ID NO: 1360271 - DNA, 15 bp, Homo sapiens
atttatctgttttgg

SEQ ID NO: 1360272 - DNA, 15 bp, Homo sapiens
tatttatctgttttg

SEQ ID NO: 1360273 - DNA, 15 bp, Homo sapiens
ctatttatctgtttt

SEQ ID NO: 1360274 - DNA, 15 bp, Homo sapiens
tctatttatctgttt

SEQ ID NO: 1360275 - DNA, 15 bp, Homo sapiens
ttctatttatctgtt

SEQ ID NO: 1360276 - DNA, 15 bp, Homo sapiens
gttctatttatctgt

SEQ ID NO: 1360277 - DNA, 15 bp, Homo sapiens
tgttctatttatctg

SEQ ID NO: 1360278 - DNA, 15 bp, Homo sapiens
ttgttctatttatct

SEQ ID NO: 1360279 - DNA, 15 bp, Homo sapiens
attgttctatttatc

SEQ ID NO: 1360280 - DNA, 15 bp, Homo sapiens
cattgttctatttat

SEQ ID NO: 1360281 - DNA, 15 bp, Homo sapiens
ccattgttctattta

SEQ ID NO: 1360282 - DNA, 15 bp, Homo sapiens
tccattgttctattt

SEQ ID NO: 1360283 - DNA, 15 bp, Homo sapiens
ttccattgttctatt

SEQ ID NO: 1360284 - DNA, 15 bp, Homo sapiens
tttccattgttctat

SEQ ID NO: 1360285 - DNA, 15 bp, Homo sapiens
ttttccattgttcta

SEQ ID NO: 1360286 - DNA, 15 bp, Homo sapiens
cttttccattgttct

SEQ ID NO: 1360287 - DNA, 15 bp, Homo sapiens
tcttttccattgttc

SEQ ID NO: 1360288 - DNA, 15 bp, Homo sapiens
ttcttttccattgtt

SEQ ID NO: 1360289 - DNA, 15 bp, Homo sapiens
gttcttttccattgt

SEQ ID NO: 1360290 - DNA, 15 bp, Homo sapiens
tgttcttttccattg

SEQ ID NO: 1360291 - DNA, 15 bp, Homo sapiens
ctgttcttttccatt

SEQ ID NO: 1360292 - DNA, 15 bp, Homo sapiens
tctgttcttttccat

SEQ ID NO: 1360293 - DNA, 15 bp, Homo sapiens
ctctgttcttttcca

SEQ ID NO: 1360294 - DNA, 15 bp, Homo sapiens
cctctgttcttttcc

SEQ ID NO: 1360295 - DNA, 15 bp, Homo sapiens
gcctctgttcttttc

SEQ ID NO: 1360296 - DNA, 15 bp, Homo sapiens
ggcctctgttctttt

SEQ ID NO: 1360297 - DNA, 15 bp, Homo sapiens
aggcctctgttcttt

SEQ ID NO: 1360298 - DNA, 15 bp, Homo sapiens
gaggcctctgttctt

SEQ ID NO: 1360299 - DNA, 15 bp, Homo sapiens
tgaggcctctgttct

SEQ ID NO: 1360300 - DNA, 15 bp, Homo sapiens
ctgaggcctctgttc

SEQ ID NO: 1360301 - DNA, 15 bp, Homo sapiens
attatttctgaggcc

SEQ ID NO: 1360302 - DNA, 15 bp, Homo sapiens
cattatttctgaggc

SEQ ID NO: 1360303 - DNA, 15 bp, Homo sapiens
gcattatttctgagg

SEQ ID NO: 1360304 - DNA, 15 bp, Homo sapiens
ggcattatttctgag

SEQ ID NO: 1360305 - DNA, 15 bp, Homo sapiens
tggcattatttctga

SEQ ID NO: 1360306 - DNA, 15 bp, Homo sapiens
gtggcattatttctg

SEQ ID NO: 1360307 - DNA, 15 bp, Homo sapiens
tgtggcattatttct

SEQ ID NO: 1360308 - DNA, 15 bp, Homo sapiens
gtgtggcattatttc

SEQ ID NO: 1360309 - DNA, 15 bp, Homo sapiens
tgtgtggcattattt

SEQ ID NO: 1360310 - DNA, 15 bp, Homo sapiens
atgtgtggcattatt

SEQ ID NO: 1360311 - DNA, 15 bp, Homo sapiens
gatgtgtggcattat

SEQ ID NO: 1360312 - DNA, 15 bp, Homo sapiens
agatgtgtggcatta

SEQ ID NO: 1360313 - DNA, 15 bp, Homo sapiens
tagatgtgtggcatt

SEQ ID NO: 1360314 - DNA, 15 bp, Homo sapiens
gtagatgtgtggcat

SEQ ID NO: 1360315 - DNA, 15 bp, Homo sapiens
tgtagatgtgtggca

SEQ ID NO: 1360316 - DNA, 15 bp, Homo sapiens
ttgtagatgtgtggc

SEQ ID NO: 1360317 - DNA, 15 bp, Homo sapiens
tcagatggttgtaga

SEQ ID NO: 1360318 - DNA, 15 bp, Homo sapiens
atcagatggttgtag

SEQ ID NO: 1360319 - DNA, 15 bp, Homo sapiens
gatcagatggttgta

SEQ ID NO: 1360320 - DNA, 15 bp, Homo sapiens
agatcagatggttgt

SEQ ID NO: 1360321 - DNA, 15 bp, Homo sapiens
aagatcagatggttg

SEQ ID NO: 1360322 - DNA, 15 bp, Homo sapiens
aaagatcagatggtt

SEQ ID NO: 1360323 - DNA, 15 bp, Homo sapiens
caaagatcagatggt

SEQ ID NO: 1360324 - DNA, 15 bp, Homo sapiens
tcaaagatcagatgg

SEQ ID NO: 1360325 - DNA, 15 bp, Homo sapiens
gtcaaagatcagatg

SEQ ID NO: 1360326 - DNA, 15 bp, Homo sapiens
tgtcaaagatcagat

SEQ ID NO: 1360327 - DNA, 15 bp, Homo sapiens
ttgtcaaagatcaga

SEQ ID NO: 1360328 - DNA, 15 bp, Homo sapiens
tttgtcaaagatcag

SEQ ID NO: 1360329 - DNA, 15 bp, Homo sapiens
gtttgtcaaagatca

SEQ ID NO: 1360330 - DNA, 15 bp, Homo sapiens
ggtttgtcaaagatc

SEQ ID NO: 1360331 - DNA, 15 bp, Homo sapiens
aggtttgtcaaagat

SEQ ID NO: 1360332 - DNA, 15 bp, Homo sapiens
caggtttgtcaaaga

SEQ ID NO: 1360333 - DNA, 15 bp, Homo sapiens
tcaggtttgtcaaag

SEQ ID NO: 1360334 - DNA, 15 bp, Homo sapiens
ctcaggtttgtcaaa

SEQ ID NO: 1360335 - DNA, 15 bp, Homo sapiens
tctcaggtttgtcaa

SEQ ID NO: 1360336 - DNA, 15 bp, Homo sapiens
ttctcaggtttgtca

SEQ ID NO: 1360337 - DNA, 15 bp, Homo sapiens
tttctcaggtttgtc

SEQ ID NO: 1360338 - DNA, 15 bp, Homo sapiens
ttttctcaggtttgt

SEQ ID NO: 1360339 - DNA, 15 bp, Homo sapiens
tttttctcaggtttg

SEQ ID NO: 1360340 - DNA, 15 bp, Homo sapiens
gtttttctcaggttt

SEQ ID NO: 1360341 - DNA, 15 bp, Homo sapiens
tgtttttctcaggtt

SEQ ID NO: 1360342 - DNA, 15 bp, Homo sapiens
ttgtttttctcaggt

SEQ ID NO: 1360343 - DNA, 15 bp, Homo sapiens
cttgtttttctcagg

SEQ ID NO: 1360344 - DNA, 15 bp, Homo sapiens
gcttgtttttctcag

SEQ ID NO: 1360345 - DNA, 15 bp, Homo sapiens
tgcttgtttttctca

SEQ ID NO: 1360346 - DNA, 15 bp, Homo sapiens
ttgcttgtttttctc

SEQ ID NO: 1360347 - DNA, 15 bp, Homo sapiens
attgcttgtttttct

SEQ ID NO: 1360348 - DNA, 15 bp, Homo sapiens
cattgcttgtttttc

SEQ ID NO: 1360349 - DNA, 15 bp, Homo sapiens
ccattgcttgttttt

SEQ ID NO: 1360350 - DNA, 15 bp, Homo sapiens
cccattgcttgtttt

SEQ ID NO: 1360351 - DNA, 15 bp, Homo sapiens
ccccattgcttgttt

SEQ ID NO: 1360352 - DNA, 15 bp, Homo sapiens
tccccattgcttgtt

SEQ ID NO: 1360353 - DNA, 15 bp, Homo sapiens
tctttccccattgct

SEQ ID NO: 1360354 - DNA, 15 bp, Homo sapiens
ttctttccccattgc

SEQ ID NO: 1360355 - DNA, 15 bp, Homo sapiens
attctttccccattg

SEQ ID NO: 1360356 - DNA, 15 bp, Homo sapiens
aattctttccccatt

SEQ ID NO: 1360357 - DNA, 15 bp, Homo sapiens
gaattctttccccat

SEQ ID NO: 1360358 - DNA, 15 bp, Homo sapiens
ggaattctttcccca

SEQ ID NO: 1360359 - DNA, 15 bp, Homo sapiens
gggaattctttcccc

SEQ ID NO: 1360360 - DNA, 15 bp, Homo sapiens
agggaattctttccc

SEQ ID NO: 1360361 - DNA, 15 bp, Homo sapiens
tagggaattctttcc

SEQ ID NO: 1360362 - DNA, 15 bp, Homo sapiens
atagggaattctttc

SEQ ID NO: 1360363 - DNA, 15 bp, Homo sapiens
aatagggaattcttt

SEQ ID NO: 1360364 - DNA, 15 bp, Homo sapiens
aaatagggaattctt

SEQ ID NO: 1360365 - DNA, 15 bp, Homo sapiens
taaatagggaattct

SEQ ID NO: 1360366 - DNA, 15 bp, Homo sapiens
ttaaatagggaattc

SEQ ID NO: 1360367 - DNA, 15 bp, Homo sapiens
attaaatagggaatt

SEQ ID NO: 1360368 - DNA, 15 bp, Homo sapiens
gtttattaaataggg

SEQ ID NO: 1360369 - DNA, 15 bp, Homo sapiens
tgtttattaaatagg

SEQ ID NO: 1360370 - DNA, 15 bp, Homo sapiens
ctgtttattaaatag

SEQ ID NO: 1360371 - DNA, 15 bp, Homo sapiens
actgtttattaaata

SEQ ID NO: 1360372 - DNA, 15 bp, Homo sapiens
cactgtttattaaat

SEQ ID NO: 1360373 - DNA, 15 bp, Homo sapiens
acactgtttattaaa

SEQ ID NO: 1360374 - DNA, 15 bp, Homo sapiens
aacactgtttattaa

SEQ ID NO: 1360375 - DNA, 15 bp, Homo sapiens
caacactgtttatta

SEQ ID NO: 1360376 - DNA, 15 bp, Homo sapiens
ccaacactgtttatt

SEQ ID NO: 1360377 - DNA, 15 bp, Homo sapiens
cccaacactgtttat

SEQ ID NO: 1360378 - DNA, 15 bp, Homo sapiens
tcccaacactgttta

SEQ ID NO: 1360379 - DNA, 15 bp, Homo sapiens
ttcccaacactgttt

SEQ ID NO: 1360380 - DNA, 15 bp, Homo sapiens
tttcccaacactgtt

SEQ ID NO: 1360381 - DNA, 15 bp, Homo sapiens
ttttcccaacactgt

SEQ ID NO: 1360382 - DNA, 15 bp, Homo sapiens
gttttcccaacactg

SEQ ID NO: 1360383 - DNA, 15 bp, Homo sapiens
agttttcccaacact

SEQ ID NO: 1360384 - DNA, 15 bp, Homo sapiens
ctttctgcatatggc

SEQ ID NO: 1360385 - DNA, 15 bp, Homo sapiens
gctttctgcatatgg

SEQ ID NO: 1360386 - DNA, 15 bp, Homo sapiens
agctttctgcatatg

SEQ ID NO: 1360387 - DNA, 15 bp, Homo sapiens
cagctttctgcatat

SEQ ID NO: 1360388 - DNA, 15 bp, Homo sapiens
tcagctttctgcata

SEQ ID NO: 1360389 - DNA, 15 bp, Homo sapiens
ttcagctttctgcat

SEQ ID NO: 1360390 - DNA, 15 bp, Homo sapiens
tttcagctttctgca

SEQ ID NO: 1360391 - DNA, 15 bp, Homo sapiens
gtttcagctttctgc

SEQ ID NO: 1360392 - DNA, 15 bp, Homo sapiens
agtttcagctttctg

SEQ ID NO: 1360393 - DNA, 15 bp, Homo sapiens
cagtttcagctttct

SEQ ID NO: 1360394 - DNA, 15 bp, Homo sapiens
ccagtttcagctttc

SEQ ID NO: 1360395 - DNA, 15 bp, Homo sapiens
tccagtttcagcttt

SEQ ID NO: 1360396 - DNA, 15 bp, Homo sapiens
atccagtttcagctt

SEQ ID NO: 1360397 - DNA, 15 bp, Homo sapiens
gatccagtttcagct

SEQ ID NO: 1360398 - DNA, 15 bp, Homo sapiens
ggatccagtttcagc

SEQ ID NO: 1360399 - DNA, 15 bp, Homo sapiens
cttttgtataaggtg

SEQ ID NO: 1360400 - DNA, 15 bp, Homo sapiens
acttttgtataaggt

SEQ ID NO: 1360401 - DNA, 15 bp, Homo sapiens
aacttttgtataagg

SEQ ID NO: 1360402 - DNA, 15 bp, Homo sapiens
taacttttgtataag

SEQ ID NO: 1360403 - DNA, 15 bp, Homo sapiens
ttaacttttgtataa

SEQ ID NO: 1360404 - DNA, 15 bp, Homo sapiens
gttaacttttgtata

SEQ ID NO: 1360405 - DNA, 15 bp, Homo sapiens
agttaacttttgtat

SEQ ID NO: 1360406 - DNA, 15 bp, Homo sapiens
gagttaacttttgta

SEQ ID NO: 1360407 - DNA, 15 bp, Homo sapiens
tgagttaacttttgt

SEQ ID NO: 1360408 - DNA, 15 bp, Homo sapiens
ttgagttaacttttg

SEQ ID NO: 1360409 - DNA, 15 bp, Homo sapiens
cttgagttaactttt

SEQ ID NO: 1360410 - DNA, 15 bp, Homo sapiens
tcttgagttaacttt

SEQ ID NO: 1360411 - DNA, 15 bp, Homo sapiens
atcttgagttaactt

SEQ ID NO: 1360412 - DNA, 15 bp, Homo sapiens
catcttgagttaact

SEQ ID NO: 1360413 - DNA, 15 bp, Homo sapiens
ccatcttgagttaac

SEQ ID NO: 1360414 - DNA, 15 bp, Homo sapiens
tctttaatccatctt

SEQ ID NO: 1360415 - DNA, 15 bp, Homo sapiens
gtctttaatccatct

SEQ ID NO: 1360416 - DNA, 15 bp, Homo sapiens
agtctttaatccatc

SEQ ID NO: 1360417 - DNA, 15 bp, Homo sapiens
aagtctttaatccat

SEQ ID NO: 1360418 - DNA, 15 bp, Homo sapiens
gtttaagtctttaat

SEQ ID NO: 1360419 - DNA, 15 bp, Homo sapiens
tgtttaagtctttaa

SEQ ID NO: 1360420 - DNA, 15 bp, Homo sapiens
atgtttaagtcttta

SEQ ID NO: 1360421 - DNA, 15 bp, Homo sapiens
gatgtttaagtcttt

SEQ ID NO: 1360422 - DNA, 15 bp, Homo sapiens
tgatgtttaagtctt

SEQ ID NO: 1360423 - DNA, 15 bp, Homo sapiens
ctgatgtttaagtct

SEQ ID NO: 1360424 - DNA, 15 bp, Homo sapiens
tctgatgtttaagtc

SEQ ID NO: 1360425 - DNA, 15 bp, Homo sapiens
gtctgatgtttaagt

SEQ ID NO: 1360426 - DNA, 15 bp, Homo sapiens
ggtctgatgtttaag

SEQ ID NO: 1360427 - DNA, 15 bp, Homo sapiens
aggtctgatgtttaa

SEQ ID NO: 1360428 - DNA, 15 bp, Homo sapiens
aaggtctgatgttta

SEQ ID NO: 1360429 - DNA, 15 bp, Homo sapiens
taaggtctgatgttt

SEQ ID NO: 1360430 - DNA, 15 bp, Homo sapiens
ttaaggtctgatgtt

SEQ ID NO: 1360431 - DNA, 15 bp, Homo sapiens
tttaaggtctgatgt

SEQ ID NO: 1360432 - DNA, 15 bp, Homo sapiens
gtttaaggtctgatg

SEQ ID NO: 1360433 - DNA, 15 bp, Homo sapiens
ggtttaaggtctgat

SEQ ID NO: 1360434 - DNA, 15 bp, Homo sapiens
tggtttaaggtctga

SEQ ID NO: 1360435 - DNA, 15 bp, Homo sapiens
atggtttaaggtctg

SEQ ID NO: 1360436 - DNA, 15 bp, Homo sapiens
tatggtttaaggtct

SEQ ID NO: 1360437 - DNA, 15 bp, Homo sapiens
ttatggtttaaggtc

SEQ ID NO: 1360438 - DNA, 15 bp, Homo sapiens
tttatggtttaaggt

SEQ ID NO: 1360439 - DNA, 15 bp, Homo sapiens
ttttatggtttaagg

SEQ ID NO: 1360440 - DNA, 15 bp, Homo sapiens
tttttatggtttaag

SEQ ID NO: 1360441 - DNA, 15 bp, Homo sapiens
gtttttatggtttaa

SEQ ID NO: 1360442 - DNA, 15 bp, Homo sapiens
ggtttttatggttta

SEQ ID NO: 1360443 - DNA, 15 bp, Homo sapiens
tctaggttttcttct

SEQ ID NO: 1360444 - DNA, 15 bp, Homo sapiens
gtctaggttttcttc

SEQ ID NO: 1360445 - DNA, 15 bp, Homo sapiens
tgtctaggttttctt

SEQ ID NO: 1360446 - DNA, 15 bp, Homo sapiens
ttgtctaggttttct

SEQ ID NO: 1360447 - DNA, 15 bp, Homo sapiens
attgtctaggttttc

SEQ ID NO: 1360448 - DNA, 15 bp, Homo sapiens
tattgtctaggtttt

SEQ ID NO: 1360449 - DNA, 15 bp, Homo sapiens
gtattgtctaggttt

SEQ ID NO: 1360450 - DNA, 15 bp, Homo sapiens
ggtattgtctaggtt

SEQ ID NO: 1360451 - DNA, 15 bp, Homo sapiens
tggtattgtctaggt

SEQ ID NO: 1360452 - DNA, 15 bp, Homo sapiens
atggtattgtctagg

SEQ ID NO: 1360453 - DNA, 15 bp, Homo sapiens
aatggtattgtctag

SEQ ID NO: 1360454 - DNA, 15 bp, Homo sapiens
gaatggtattgtcta

SEQ ID NO: 1360455 - DNA, 15 bp, Homo sapiens
tgaatggtattgtct

SEQ ID NO: 1360456 - DNA, 15 bp, Homo sapiens
ctgaatggtattgtc

SEQ ID NO: 1360457 - DNA, 15 bp, Homo sapiens
cctgaatggtattgt

SEQ ID NO: 1360458 - DNA, 15 bp, Homo sapiens
tgcctatgtcctgaa

SEQ ID NO: 1360459 - DNA, 15 bp, Homo sapiens
atgcctatgtcctga

SEQ ID NO: 1360460 - DNA, 15 bp, Homo sapiens
catgcctatgtcctg

SEQ ID NO: 1360461 - DNA, 15 bp, Homo sapiens
ccatgcctatgtcct

SEQ ID NO: 1360462 - DNA, 15 bp, Homo sapiens
cccatgcctatgtcc

SEQ ID NO: 1360463 - DNA, 15 bp, Homo sapiens
gcccatgcctatgtc

SEQ ID NO: 1360464 - DNA, 15 bp, Homo sapiens
tgcccatgcctatgt

SEQ ID NO: 1360465 - DNA, 15 bp, Homo sapiens
ttgcccatgcctatg

SEQ ID NO: 1360466 - DNA, 15 bp, Homo sapiens
tttgcccatgcctat

SEQ ID NO: 1360467 - DNA, 15 bp, Homo sapiens
ctttgcccatgccta

SEQ ID NO: 1360468 - DNA, 15 bp, Homo sapiens
tctttgcccatgcct

SEQ ID NO: 1360469 - DNA, 15 bp, Homo sapiens
gtctttgcccatgcc

SEQ ID NO: 1360470 - DNA, 15 bp, Homo sapiens
attttgttgccattg

SEQ ID NO: 1360471 - DNA, 15 bp, Homo sapiens
gattttgttgccatt

SEQ ID NO: 1360472 - DNA, 15 bp, Homo sapiens
ggattttgttgccat

SEQ ID NO: 1360473 - DNA, 15 bp, Homo sapiens
tggattttgttgcca

SEQ ID NO: 1360474 - DNA, 15 bp, Homo sapiens
ttggattttgttgcc

SEQ ID NO: 1360475 - DNA, 15 bp, Homo sapiens
tttggattttgttgc

SEQ ID NO: 1360476 - DNA, 15 bp, Homo sapiens
ttttggattttgttg

SEQ ID NO: 1360477 - DNA, 15 bp, Homo sapiens
attttggattttgtt

SEQ ID NO: 1360478 - DNA, 15 bp, Homo sapiens
aattttggattttgt

SEQ ID NO: 1360479 - DNA, 15 bp, Homo sapiens
caattttggattttg

SEQ ID NO: 1360480 - DNA, 15 bp, Homo sapiens
tcaattttggatttt

SEQ ID NO: 1360481 - DNA, 15 bp, Homo sapiens
gtcaattttggattt

SEQ ID NO: 1360482 - DNA, 15 bp, Homo sapiens
tgtcaattttggatt

SEQ ID NO: 1360483 - DNA, 15 bp, Homo sapiens
ttgtcaattttggat

SEQ ID NO: 1360484 - DNA, 15 bp, Homo sapiens
tttgtcaattttgga

SEQ ID NO: 1360485 - DNA, 15 bp, Homo sapiens
atttgtcaattttgg

SEQ ID NO: 1360486 - DNA, 15 bp, Homo sapiens
catttgtcaattttg

SEQ ID NO: 1360487 - DNA, 15 bp, Homo sapiens
ccatttgtcaatttt

SEQ ID NO: 1360488 - DNA, 15 bp, Homo sapiens
cccatttgtcaattt

SEQ ID NO: 1360489 - DNA, 15 bp, Homo sapiens
tcccatttgtcaatt

SEQ ID NO: 1360490 - DNA, 15 bp, Homo sapiens
atcccatttgtcaat

SEQ ID NO: 1360491 - DNA, 15 bp, Homo sapiens
gatcccatttgtcaa

SEQ ID NO: 1360492 - DNA, 15 bp, Homo sapiens
agatcccatttgtca

SEQ ID NO: 1360493 - DNA, 15 bp, Homo sapiens
tttagatcccatttg

SEQ ID NO: 1360494 - DNA, 15 bp, Homo sapiens
atttagatcccattt

SEQ ID NO: 1360495 - DNA, 15 bp, Homo sapiens
tatttagatcccatt

SEQ ID NO: 1360496 - DNA, 15 bp, Homo sapiens
ttatttagatcccat

SEQ ID NO: 1360497 - DNA, 15 bp, Homo sapiens
tttatttagatccca

SEQ ID NO: 1360498 - DNA, 15 bp, Homo sapiens
gtttatttagatccc

SEQ ID NO: 1360499 - DNA, 15 bp, Homo sapiens
agtttatttagatcc

SEQ ID NO: 1360500 - DNA, 15 bp, Homo sapiens
tagtttatttagatc

SEQ ID NO: 1360501 - DNA, 15 bp, Homo sapiens
ttagtttatttagat

SEQ ID NO: 1360502 - DNA, 15 bp, Homo sapiens
tttagtttatttaga

SEQ ID NO: 1360503 - DNA, 15 bp, Homo sapiens
ctttagtttatttag

SEQ ID NO: 1360504 - DNA, 15 bp, Homo sapiens
tctttagtttattta

SEQ ID NO: 1360505 - DNA, 15 bp, Homo sapiens
ttctttagtttattt

SEQ ID NO: 1360506 - DNA, 15 bp, Homo sapiens
gttctttagtttatt

SEQ ID NO: 1360507 - DNA, 15 bp, Homo sapiens
agttctttagtttat

SEQ ID NO: 1360508 - DNA, 15 bp, Homo sapiens
aagttctttagttta

SEQ ID NO: 1360509 - DNA, 15 bp, Homo sapiens
gaagttctttagttt

SEQ ID NO: 1360510 - DNA, 15 bp, Homo sapiens
agaagttctttagtt

SEQ ID NO: 1360511 - DNA, 15 bp, Homo sapiens
cagaagttctttagt

SEQ ID NO: 1360512 - DNA, 15 bp, Homo sapiens
gcagaagttctttag

SEQ ID NO: 1360513 - DNA, 15 bp, Homo sapiens
tgcagaagttcttta

SEQ ID NO: 1360514 - DNA, 15 bp, Homo sapiens
gtgcagaagttcttt

SEQ ID NO: 1360515 - DNA, 15 bp, Homo sapiens
tgtgcagaagttctt

SEQ ID NO: 1360516 - DNA, 15 bp, Homo sapiens
ctgtgcagaagttct

SEQ ID NO: 1360517 - DNA, 15 bp, Homo sapiens
gctgtgcagaagttc

SEQ ID NO: 1360518 - DNA, 15 bp, Homo sapiens
tgctgtgcagaagtt

SEQ ID NO: 1360519 - DNA, 15 bp, Homo sapiens
ttgctgtgcagaagt

SEQ ID NO: 1360520 - DNA, 15 bp, Homo sapiens
cagtttcttttgctg

SEQ ID NO: 1360521 - DNA, 15 bp, Homo sapiens
acagtttcttttgct

SEQ ID NO: 1360522 - DNA, 15 bp, Homo sapiens
gacagtttcttttgc

SEQ ID NO: 1360523 - DNA, 15 bp, Homo sapiens
cgacagtttcttttg

SEQ ID NO: 1360524 - DNA, 15 bp, Homo sapiens
acgacagtttctttt

SEQ ID NO: 1360525 - DNA, 15 bp, Homo sapiens
gacgacagtttcttt

SEQ ID NO: 1360526 - DNA, 15 bp, Homo sapiens
tgacgacagtttctt

SEQ ID NO: 1360527 - DNA, 15 bp, Homo sapiens
ctgacgacagtttct

SEQ ID NO: 1360528 - DNA, 15 bp, Homo sapiens
tctgacgacagtttc

SEQ ID NO: 1360529 - DNA, 15 bp, Homo sapiens
ctctgacgacagttt

SEQ ID NO: 1360530 - DNA, 15 bp, Homo sapiens
actctgacgacagtt

SEQ ID NO: 1360531 - DNA, 15 bp, Homo sapiens
cactctgacgacagt

SEQ ID NO: 1360532 - DNA, 15 bp, Homo sapiens
tcactctgacgacag

SEQ ID NO: 1360533 - DNA, 15 bp, Homo sapiens
ttcactctgacgaca

SEQ ID NO: 1360534 - DNA, 15 bp, Homo sapiens
gttcactctgacgac

SEQ ID NO: 1360535 - DNA, 15 bp, Homo sapiens
tgttcactctgacga

SEQ ID NO: 1360536 - DNA, 15 bp, Homo sapiens
ctgttcactctgacg

SEQ ID NO: 1360537 - DNA, 15 bp, Homo sapiens
cctgttcactctgac

SEQ ID NO: 1360538 - DNA, 15 bp, Homo sapiens
acctgttcactctga

SEQ ID NO: 1360539 - DNA, 15 bp, Homo sapiens
tacctgttcactctg

SEQ ID NO: 1360540 - DNA, 15 bp, Homo sapiens
ttacctgttcactct

SEQ ID NO: 1360541 - DNA, 15 bp, Homo sapiens
gttacctgttcactc

SEQ ID NO: 1360542 - DNA, 15 bp, Homo sapiens
ggttacctgttcact

SEQ ID NO: 1360543 - DNA, 15 bp, Homo sapiens
aggttacctgttcac

SEQ ID NO: 1360544 - DNA, 15 bp, Homo sapiens
caggttacctgttca

SEQ ID NO: 1360545 - DNA, 15 bp, Homo sapiens
gcaggttacctgttc

SEQ ID NO: 1360546 - DNA, 15 bp, Homo sapiens
tgcaggttacctgtt

SEQ ID NO: 1360547 - DNA, 15 bp, Homo sapiens
ctgcaggttacctgt

SEQ ID NO: 1360548 - DNA, 15 bp, Homo sapiens
tctgcaggttacctg

SEQ ID NO: 1360549 - DNA, 15 bp, Homo sapiens
ttctgcaggttacct

SEQ ID NO: 1360550 - DNA, 15 bp, Homo sapiens
attctgcaggttacc

SEQ ID NO: 1360551 - DNA, 15 bp, Homo sapiens
cattctgcaggttac

SEQ ID NO: 1360552 - DNA, 15 bp, Homo sapiens
ccattctgcaggtta

SEQ ID NO: 1360553 - DNA, 15 bp, Homo sapiens
cccattctgcaggtt

SEQ ID NO: 1360554 - DNA, 15 bp, Homo sapiens
tcccattctgcaggt

SEQ ID NO: 1360555 - DNA, 15 bp, Homo sapiens
ctcccattctgcagg

SEQ ID NO: 1360556 - DNA, 15 bp, Homo sapiens
tctcccattctgcag

SEQ ID NO: 1360557 - DNA, 15 bp, Homo sapiens
ttctcccattctgca

SEQ ID NO: 1360558 - DNA, 15 bp, Homo sapiens
tttctcccattctgc

SEQ ID NO: 1360559 - DNA, 15 bp, Homo sapiens
ataaaaattttctcc

SEQ ID NO: 1360560 - DNA, 15 bp, Homo sapiens
gataaaaattttctc

SEQ ID NO: 1360561 - DNA, 15 bp, Homo sapiens
agataaaaattttct

SEQ ID NO: 1360562 - DNA, 15 bp, Homo sapiens
tagataaaaattttc

SEQ ID NO: 1360563 - DNA, 15 bp, Homo sapiens
atagataaaaatttt

SEQ ID NO: 1360564 - DNA, 15 bp, Homo sapiens
gatagataaaaattt

SEQ ID NO: 1360565 - DNA, 15 bp, Homo sapiens
agatagataaaaatt

SEQ ID NO: 1360566 - DNA, 15 bp, Homo sapiens
tagatagataaaaat

SEQ ID NO: 1360567 - DNA, 15 bp, Homo sapiens
atagatagataaaaa

SEQ ID NO: 1360568 - DNA, 15 bp, Homo sapiens
gatagatagataaaa

SEQ ID NO: 1360569 - DNA, 15 bp, Homo sapiens
agatagatagataaa

SEQ ID NO: 1360570 - DNA, 15 bp, Homo sapiens
tagatagatagataa

SEQ ID NO: 1360571 - DNA, 15 bp, Homo sapiens
atagatagatagata

SEQ ID NO: 1360572 - DNA, 15 bp, Homo sapiens
gatagatagatagat

SEQ ID NO: 1360573 - DNA, 15 bp, Homo sapiens
agatagatagataga

SEQ ID NO: 1360574 - DNA, 15 bp, Homo sapiens
cagatagatagatag

SEQ ID NO: 1360575 - DNA, 15 bp, Homo sapiens
tcagatagatagata

SEQ ID NO: 1360576 - DNA, 15 bp, Homo sapiens
gtcagatagatagat

SEQ ID NO: 1360577 - DNA, 15 bp, Homo sapiens
tgtcagatagataga

SEQ ID NO: 1360578 - DNA, 15 bp, Homo sapiens
ttgtcagatagatag

SEQ ID NO: 1360579 - DNA, 15 bp, Homo sapiens
tttgtcagatagata

SEQ ID NO: 1360580 - DNA, 15 bp, Homo sapiens
ctttgtcagatagat

SEQ ID NO: 1360581 - DNA, 15 bp, Homo sapiens
tctttgtcagataga

SEQ ID NO: 1360582 - DNA, 15 bp, Homo sapiens
ctctttgtcagatag

SEQ ID NO: 1360583 - DNA, 15 bp, Homo sapiens
gctctttgtcagata

SEQ ID NO: 1360584 - DNA, 15 bp, Homo sapiens
agctctttgtcagat

SEQ ID NO: 1360585 - DNA, 15 bp, Homo sapiens
tagctctttgtcaga

SEQ ID NO: 1360586 - DNA, 15 bp, Homo sapiens
atagctctttgtcag

SEQ ID NO: 1360587 - DNA, 15 bp, Homo sapiens
aatagctctttgtca

SEQ ID NO: 1360588 - DNA, 15 bp, Homo sapiens
taatagctctttgtc

SEQ ID NO: 1360589 - DNA, 15 bp, Homo sapiens
ataatagctctttgt

SEQ ID NO: 1360590 - DNA, 15 bp, Homo sapiens
gataatagctctttg

SEQ ID NO: 1360591 - DNA, 15 bp, Homo sapiens
ggataatagctcttt

SEQ ID NO: 1360592 - DNA, 15 bp, Homo sapiens
tggataatagctctt

SEQ ID NO: 1360593 - DNA, 15 bp, Homo sapiens
ctggataatagctct

SEQ ID NO: 1360594 - DNA, 15 bp, Homo sapiens
tctggataatagctc

SEQ ID NO: 1360595 - DNA, 15 bp, Homo sapiens
ttctggataatagct

SEQ ID NO: 1360596 - DNA, 15 bp, Homo sapiens
attctggataatagc

SEQ ID NO: 1360597 - DNA, 15 bp, Homo sapiens
gattctggataatag

SEQ ID NO: 1360598 - DNA, 15 bp, Homo sapiens
agattctggataata

SEQ ID NO: 1360599 - DNA, 15 bp, Homo sapiens
tagattctggataat

SEQ ID NO: 1360600 - DNA, 15 bp, Homo sapiens
gtagattctggataa

SEQ ID NO: 1360601 - DNA, 15 bp, Homo sapiens
tgtagattctggata

SEQ ID NO: 1360602 - DNA, 15 bp, Homo sapiens
ttgtagattctggat

SEQ ID NO: 1360603 - DNA, 15 bp, Homo sapiens
cttgtagattctgga

SEQ ID NO: 1360604 - DNA, 15 bp, Homo sapiens
ccttgtagattctgg

SEQ ID NO: 1360605 - DNA, 15 bp, Homo sapiens
tccttgtagattctg

SEQ ID NO: 1360606 - DNA, 15 bp, Homo sapiens
ttccttgtagattct

SEQ ID NO: 1360607 - DNA, 15 bp, Homo sapiens
gttccttgtagattc

SEQ ID NO: 1360608 - DNA, 15 bp, Homo sapiens
agttccttgtagatt

SEQ ID NO: 1360609 - DNA, 15 bp, Homo sapiens
aagttccttgtagat

SEQ ID NO: 1360610 - DNA, 15 bp, Homo sapiens
taagttccttgtaga

SEQ ID NO: 1360611 - DNA, 15 bp, Homo sapiens
ttaagttccttgtag

SEQ ID NO: 1360612 - DNA, 15 bp, Homo sapiens
tttaagttccttgta

SEQ ID NO: 1360613 - DNA, 15 bp, Homo sapiens
gtttaagttccttgt

SEQ ID NO: 1360614 - DNA, 15 bp, Homo sapiens
cgtttaagttccttg

SEQ ID NO: 1360615 - DNA, 15 bp, Homo sapiens
tcgtttaagttcctt

SEQ ID NO: 1360616 - DNA, 15 bp, Homo sapiens
ttcgtttaagttcct

SEQ ID NO: 1360617 - DNA, 15 bp, Homo sapiens
attcgtttaagttcc

SEQ ID NO: 1360618 - DNA, 15 bp, Homo sapiens
aattcgtttaagttc

SEQ ID NO: 1360619 - DNA, 15 bp, Homo sapiens
aaattcgtttaagtt

SEQ ID NO: 1360620 - DNA, 15 bp, Homo sapiens
taaattcgtttaagt

SEQ ID NO: 1360621 - DNA, 15 bp, Homo sapiens
gtaaattcgtttaag

SEQ ID NO: 1360622 - DNA, 15 bp, Homo sapiens
tgtaaattcgtttaa

SEQ ID NO: 1360623 - DNA, 15 bp, Homo sapiens
atgtaaattcgttta

SEQ ID NO: 1360624 - DNA, 15 bp, Homo sapiens
catgtaaattcgttt

SEQ ID NO: 1360625 - DNA, 15 bp, Homo sapiens
tcatgtaaattcgtt

SEQ ID NO: 1360626 - DNA, 15 bp, Homo sapiens
ttcatgtaaattcgt

SEQ ID NO: 1360627 - DNA, 15 bp, Homo sapiens
tttcatgtaaattcg

SEQ ID NO: 1360628 - DNA, 15 bp, Homo sapiens
ttttcatgtaaattc

SEQ ID NO: 1360629 - DNA, 15 bp, Homo sapiens
tttttcatgtaaatt

SEQ ID NO: 1360630 - DNA, 15 bp, Homo sapiens
ttttttcatgtaaat

SEQ ID NO: 1360631 - DNA, 15 bp, Homo sapiens
tttttttcatgtaaa

SEQ ID NO: 1360632 - DNA, 15 bp, Homo sapiens
gtttttttcatgtaa

SEQ ID NO: 1360633 - DNA, 15 bp, Homo sapiens
tgtttttttcatgta

SEQ ID NO: 1360634 - DNA, 15 bp, Homo sapiens
ttgtttttttcatgt

SEQ ID NO: 1360635 - DNA, 15 bp, Homo sapiens
tttgtttttttcatg

SEQ ID NO: 1360636 - DNA, 15 bp, Homo sapiens
gtttgtttttttcat

SEQ ID NO: 1360637 - DNA, 15 bp, Homo sapiens
tgtttgtttttttca

SEQ ID NO: 1360638 - DNA, 15 bp, Homo sapiens
ttgtttgtttttttc

SEQ ID NO: 1360639 - DNA, 15 bp, Homo sapiens
gttgtttgttttttt

SEQ ID NO: 1360640 - DNA, 15 bp, Homo sapiens
ggttgtttgtttttt

SEQ ID NO: 1360641 - DNA, 15 bp, Homo sapiens
gggttgtttgttttt

SEQ ID NO: 1360642 - DNA, 15 bp, Homo sapiens
ggggttgtttgtttt

SEQ ID NO: 1360643 - DNA, 15 bp, Homo sapiens
tggggttgtttgttt

SEQ ID NO: 1360644 - DNA, 15 bp, Homo sapiens
atggggttgtttgtt

SEQ ID NO: 1360645 - DNA, 15 bp, Homo sapiens
gatggggttgtttgt

SEQ ID NO: 1360646 - DNA, 15 bp, Homo sapiens
tgatggggttgtttg

SEQ ID NO: 1360647 - DNA, 15 bp, Homo sapiens
ttgatggggttgttt

SEQ ID NO: 1360648 - DNA, 15 bp, Homo sapiens
tttgatggggttgtt

SEQ ID NO: 1360649 - DNA, 15 bp, Homo sapiens
ttttgatggggttgt

SEQ ID NO: 1360650 - DNA, 15 bp, Homo sapiens
tttttgatggggttg

SEQ ID NO: 1360651 - DNA, 15 bp, Homo sapiens
ctttttgatggggtt

SEQ ID NO: 1360652 - DNA, 15 bp, Homo sapiens
actttttgatggggt

SEQ ID NO: 1360653 - DNA, 15 bp, Homo sapiens
cactttttgatgggg

SEQ ID NO: 1360654 - DNA, 15 bp, Homo sapiens
ccactttttgatggg

SEQ ID NO: 1360655 - DNA, 15 bp, Homo sapiens
cccactttttgatgg

SEQ ID NO: 1360656 - DNA, 15 bp, Homo sapiens
tcccactttttgatg

SEQ ID NO: 1360657 - DNA, 15 bp, Homo sapiens
ctcccactttttgat

SEQ ID NO: 1360658 - DNA, 15 bp, Homo sapiens
actcccactttttga

SEQ ID NO: 1360659 - DNA, 15 bp, Homo sapiens
aactcccactttttg

SEQ ID NO: 1360660 - DNA, 15 bp, Homo sapiens
caactcccacttttt

SEQ ID NO: 1360661 - DNA, 15 bp, Homo sapiens
tcaactcccactttt

SEQ ID NO: 1360662 - DNA, 15 bp, Homo sapiens
ttcaactcccacttt

SEQ ID NO: 1360663 - DNA, 15 bp, Homo sapiens
gttcaactcccactt

SEQ ID NO: 1360664 - DNA, 15 bp, Homo sapiens
tgttcaactcccact

SEQ ID NO: 1360665 - DNA, 15 bp, Homo sapiens
atcccctccctgtgt

SEQ ID NO: 1360666 - DNA, 15 bp, Homo sapiens
gatcccctccctgtg

SEQ ID NO: 1360667 - DNA, 15 bp, Homo sapiens
tgatcccctccctgt

SEQ ID NO: 1360668 - DNA, 15 bp, Homo sapiens
atgatcccctccctg

SEQ ID NO: 1360669 - DNA, 15 bp, Homo sapiens
aatgatcccctccct

SEQ ID NO: 1360670 - DNA, 15 bp, Homo sapiens
caatgatcccctccc

SEQ ID NO: 1360671 - DNA, 15 bp, Homo sapiens
gcaatgatcccctcc

SEQ ID NO: 1360672 - DNA, 15 bp, Homo sapiens
tgcaatgatcccctc

SEQ ID NO: 1360673 - DNA, 15 bp, Homo sapiens
gtgcaatgatcccct

SEQ ID NO: 1360674 - DNA, 15 bp, Homo sapiens
tgtgcaatgatcccc

SEQ ID NO: 1360675 - DNA, 15 bp, Homo sapiens
gtgtgcaatgatccc

SEQ ID NO: 1360676 - DNA, 15 bp, Homo sapiens
agtgtgcaatgatcc

SEQ ID NO: 1360677 - DNA, 15 bp, Homo sapiens
cagtgtgcaatgatc

SEQ ID NO: 1360678 - DNA, 15 bp, Homo sapiens
ccagtgtgcaatgat

SEQ ID NO: 1360679 - DNA, 15 bp, Homo sapiens
cccagtgtgcaatga

SEQ ID NO: 1360680 - DNA, 15 bp, Homo sapiens
tcccagtgtgcaatg

SEQ ID NO: 1360681 - DNA, 15 bp, Homo sapiens
gtcccagtgtgcaat

SEQ ID NO: 1360682 - DNA, 15 bp, Homo sapiens
ggtcccagtgtgcaa

SEQ ID NO: 1360683 - DNA, 15 bp, Homo sapiens
aggtcccagtgtgca

SEQ ID NO: 1360684 - DNA, 15 bp, Homo sapiens
caggtcccagtgtgc

SEQ ID NO: 1360685 - DNA, 15 bp, Homo sapiens
acaggtcccagtgtg

SEQ ID NO: 1360686 - DNA, 15 bp, Homo sapiens
gacaggtcccagtgt

SEQ ID NO: 1360687 - DNA, 15 bp, Homo sapiens
cgacaggtcccagtg

SEQ ID NO: 1360688 - DNA, 15 bp, Homo sapiens
tcgacaggtcccagt

SEQ ID NO: 1360689 - DNA, 15 bp, Homo sapiens
ctcgacaggtcccag

SEQ ID NO: 1360690 - DNA, 15 bp, Homo sapiens
cctcgacaggtccca

SEQ ID NO: 1360691 - DNA, 15 bp, Homo sapiens
acctcgacaggtccc

SEQ ID NO: 1360692 - DNA, 15 bp, Homo sapiens
aacctcgacaggtcc

SEQ ID NO: 1360693 - DNA, 15 bp, Homo sapiens
caacctcgacaggtc

SEQ ID NO: 1360694 - DNA, 15 bp, Homo sapiens
ccaacctcgacaggt

SEQ ID NO: 1360695 - DNA, 15 bp, Homo sapiens
cccaacctcgacagg

SEQ ID NO: 1360696 - DNA, 15 bp, Homo sapiens
acccaacctcgacag

SEQ ID NO: 1360697 - DNA, 15 bp, Homo sapiens
cacccaacctcgaca

SEQ ID NO: 1360698 - DNA, 15 bp, Homo sapiens
ccacccaacctcgac

SEQ ID NO: 1360699 - DNA, 15 bp, Homo sapiens
gccacccaacctcga

SEQ ID NO: 1360700 - DNA, 15 bp, Homo sapiens
agccacccaacctcg

SEQ ID NO: 1360701 - DNA, 15 bp, Homo sapiens
tagccacccaacctc

SEQ ID NO: 1360702 - DNA, 15 bp, Homo sapiens
ctagccacccaacct

SEQ ID NO: 1360703 - DNA, 15 bp, Homo sapiens
cctagccacccaacc

SEQ ID NO: 1360704 - DNA, 15 bp, Homo sapiens
ccctagccacccaac

SEQ ID NO: 1360705 - DNA, 15 bp, Homo sapiens
cccctagccacccaa

SEQ ID NO: 1360706 - DNA, 15 bp, Homo sapiens
tcccctagccaccca

SEQ ID NO: 1360707 - DNA, 15 bp, Homo sapiens
ctcccctagccaccc

SEQ ID NO: 1360708 - DNA, 15 bp, Homo sapiens
cctcccctagccacc

SEQ ID NO: 1360709 - DNA, 15 bp, Homo sapiens
ccctcccctagccac

SEQ ID NO: 1360710 - DNA, 15 bp, Homo sapiens
tccctcccctagcca

SEQ ID NO: 1360711 - DNA, 15 bp, Homo sapiens
atccctcccctagcc

SEQ ID NO: 1360712 - DNA, 15 bp, Homo sapiens
tatccctcccctagc

SEQ ID NO: 1360713 - DNA, 15 bp, Homo sapiens
ctatccctcccctag

SEQ ID NO: 1360714 - DNA, 15 bp, Homo sapiens
ttctcctaatgctat

SEQ ID NO: 1360715 - DNA, 15 bp, Homo sapiens
tttctcctaatgcta

SEQ ID NO: 1360716 - DNA, 15 bp, Homo sapiens
atggtttgctgcacc

SEQ ID NO: 1360717 - DNA, 15 bp, Homo sapiens
gatggtttgctgcac

SEQ ID NO: 1360718 - DNA, 15 bp, Homo sapiens
tgatggtttgctgca

SEQ ID NO: 1360719 - DNA, 15 bp, Homo sapiens
atgatggtttgctgc

SEQ ID NO: 1360720 - DNA, 15 bp, Homo sapiens
catgatggtttgctg

SEQ ID NO: 1360721 - DNA, 15 bp, Homo sapiens
ccatgatggtttgct

SEQ ID NO: 1360722 - DNA, 15 bp, Homo sapiens
gccatgatggtttgc

SEQ ID NO: 1360723 - DNA, 15 bp, Homo sapiens
tgccatgatggtttg

SEQ ID NO: 1360724 - DNA, 15 bp, Homo sapiens
atgccatgatggttt

SEQ ID NO: 1360725 - DNA, 15 bp, Homo sapiens
catgccatgatggtt

SEQ ID NO: 1360726 - DNA, 15 bp, Homo sapiens
acatgccatgatggt

SEQ ID NO: 1360727 - DNA, 15 bp, Homo sapiens
cacatgccatgatgg

SEQ ID NO: 1360728 - DNA, 15 bp, Homo sapiens
acacatgccatgatg

SEQ ID NO: 1360729 - DNA, 15 bp, Homo sapiens
tacacatgccatgat

SEQ ID NO: 1360730 - DNA, 15 bp, Homo sapiens
atacacatgccatga

SEQ ID NO: 1360731 - DNA, 15 bp, Homo sapiens
tatacacatgccatg

SEQ ID NO: 1360732 - DNA, 15 bp, Homo sapiens
gtatacacatgccat

SEQ ID NO: 1360733 - DNA, 15 bp, Homo sapiens
ggtatacacatgcca

SEQ ID NO: 1360734 - DNA, 15 bp, Homo sapiens
aggtatacacatgcc

SEQ ID NO: 1360735 - DNA, 15 bp, Homo sapiens
taggtatacacatgc

SEQ ID NO: 1360736 - DNA, 15 bp, Homo sapiens
ataggtatacacatg

SEQ ID NO: 1360737 - DNA, 15 bp, Homo sapiens
cataggtatacacat

SEQ ID NO: 1360738 - DNA, 15 bp, Homo sapiens
acataggtatacaca

SEQ ID NO: 1360739 - DNA, 15 bp, Homo sapiens
tacataggtatacac

SEQ ID NO: 1360740 - DNA, 15 bp, Homo sapiens
tttacataggtatac

SEQ ID NO: 1360741 - DNA, 15 bp, Homo sapiens
ttttacataggtata

SEQ ID NO: 1360742 - DNA, 15 bp, Homo sapiens
tttttacataggtat

SEQ ID NO: 1360743 - DNA, 15 bp, Homo sapiens
ttttttacataggta

SEQ ID NO: 1360744 - DNA, 15 bp, Homo sapiens
gttttttacataggt

SEQ ID NO: 1360745 - DNA, 15 bp, Homo sapiens
ggttttttacatagg

SEQ ID NO: 1360746 - DNA, 15 bp, Homo sapiens
aggttttttacatag

SEQ ID NO: 1360747 - DNA, 15 bp, Homo sapiens
caggttttttacata

SEQ ID NO: 1360748 - DNA, 15 bp, Homo sapiens
gcaggttttttacat

SEQ ID NO: 1360749 - DNA, 15 bp, Homo sapiens
tgcaggttttttaca

SEQ ID NO: 1360750 - DNA, 15 bp, Homo sapiens
gtgcaggttttttac

SEQ ID NO: 1360751 - DNA, 15 bp, Homo sapiens
cgtgcaggtttttta

SEQ ID NO: 1360752 - DNA, 15 bp, Homo sapiens
acgtgcaggtttttt

SEQ ID NO: 1360753 - DNA, 15 bp, Homo sapiens
aacgtgcaggttttt

SEQ ID NO: 1360754 - DNA, 15 bp, Homo sapiens
gaacgtgcaggtttt

SEQ ID NO: 1360755 - DNA, 15 bp, Homo sapiens
agaacgtgcaggttt

SEQ ID NO: 1360756 - DNA, 15 bp, Homo sapiens
cagaacgtgcaggtt

SEQ ID NO: 1360757 - DNA, 15 bp, Homo sapiens
gcagaacgtgcaggt

SEQ ID NO: 1360758 - DNA, 15 bp, Homo sapiens
tgcagaacgtgcagg

SEQ ID NO: 1360759 - DNA, 15 bp, Homo sapiens
gtgcagaacgtgcag

SEQ ID NO: 1360760 - DNA, 15 bp, Homo sapiens
tgtgcagaacgtgca

SEQ ID NO: 1360761 - DNA, 15 bp, Homo sapiens
atgtgcagaacgtgc

SEQ ID NO: 1360762 - DNA, 15 bp, Homo sapiens
catgtgcagaacgtg

SEQ ID NO: 1360763 - DNA, 15 bp, Homo sapiens
acatgtgcagaacgt

SEQ ID NO: 1360764 - DNA, 15 bp, Homo sapiens
tacatgtgcagaacg

SEQ ID NO: 1360765 - DNA, 15 bp, Homo sapiens
gtacatgtgcagaac

SEQ ID NO: 1360766 - DNA, 15 bp, Homo sapiens
ggtacatgtgcagaa

SEQ ID NO: 1360767 - DNA, 15 bp, Homo sapiens
caagttctggggtac

SEQ ID NO: 1360768 - DNA, 15 bp, Homo sapiens
tcaagttctggggta

SEQ ID NO: 1360769 - DNA, 15 bp, Homo sapiens
ttcaagttctggggt

SEQ ID NO: 1360770 - DNA, 15 bp, Homo sapiens
cttcaagttctgggg

SEQ ID NO: 1360771 - DNA, 15 bp, Homo sapiens
acttcaagttctggg

SEQ ID NO: 1360772 - DNA, 15 bp, Homo sapiens
tacttcaagttctgg

SEQ ID NO: 1360773 - DNA, 15 bp, Homo sapiens
atacttcaagttctg

SEQ ID NO: 1360774 - DNA, 15 bp, Homo sapiens
aatacttcaagttct

SEQ ID NO: 1360775 - DNA, 15 bp, Homo sapiens
taatacttcaagttc

SEQ ID NO: 1360776 - DNA, 15 bp, Homo sapiens
ttaatacttcaagtt

SEQ ID NO: 1360777 - DNA, 15 bp, Homo sapiens
tttaatacttcaagt

SEQ ID NO: 1360778 - DNA, 15 bp, Homo sapiens
ttttaatacttcaag

SEQ ID NO: 1360779 - DNA, 15 bp, Homo sapiens
tttttaatacttcaa

SEQ ID NO: 1360780 - DNA, 15 bp, Homo sapiens
ttttttaatacttca

SEQ ID NO: 1360781 - DNA, 15 bp, Homo sapiens
tttttttaatacttc

SEQ ID NO: 1360782 - DNA, 15 bp, Homo sapiens
ttttttttaatactt

SEQ ID NO: 1360783 - DNA, 15 bp, Homo sapiens
tttttttttaatact

SEQ ID NO: 1360784 - DNA, 15 bp, Homo sapiens
ttttttttttaatac

SEQ ID NO: 1360785 - DNA, 15 bp, Homo sapiens
attttttttttaata

SEQ ID NO: 1360786 - DNA, 15 bp, Homo sapiens
tgattttttttttaa

SEQ ID NO: 1360787 - DNA, 15 bp, Homo sapiens
atgatttttttttta

SEQ ID NO: 1360788 - DNA, 15 bp, Homo sapiens
catgatttttttttt

SEQ ID NO: 1360789 - DNA, 15 bp, Homo sapiens
acatgattttttttt

SEQ ID NO: 1360790 - DNA, 15 bp, Homo sapiens
tacatgatttttttt

SEQ ID NO: 1360791 - DNA, 15 bp, Homo sapiens
atacatgattttttt

SEQ ID NO: 1360792 - DNA, 15 bp, Homo sapiens
aatacatgatttttt

SEQ ID NO: 1360793 - DNA, 15 bp, Homo sapiens
aaatacatgattttt

SEQ ID NO: 1360794 - DNA, 15 bp, Homo sapiens
aaaatacatgatttt

SEQ ID NO: 1360795 - DNA, 15 bp, Homo sapiens
aaaaatacatgattt

SEQ ID NO: 1360796 - DNA, 15 bp, Homo sapiens
aaaaaatacatgatt

SEQ ID NO: 1360797 - DNA, 15 bp, Homo sapiens
aaaaaaatacatgat

SEQ ID NO: 1360798 - DNA, 15 bp, Homo sapiens
gaaaaaaatacatga

SEQ ID NO: 1360799 - DNA, 15 bp, Homo sapiens
agaaaaaaatacatg

SEQ ID NO: 1360800 - DNA, 15 bp, Homo sapiens
gagaaaaaaatacat

SEQ ID NO: 1360801 - DNA, 15 bp, Homo sapiens
ggagaaaaaaataca

SEQ ID NO: 1360802 - DNA, 15 bp, Homo sapiens
tggagaaaaaaatac

SEQ ID NO: 1360803 - DNA, 15 bp, Homo sapiens
ctggagaaaaaaata

SEQ ID NO: 1360804 - DNA, 15 bp, Homo sapiens
actggagaaaaaaat

SEQ ID NO: 1360805 - DNA, 15 bp, Homo sapiens
cactggagaaaaaaa

SEQ ID NO: 1360806 - DNA, 15 bp, Homo sapiens
tcactggagaaaaaa

SEQ ID NO: 1360807 - DNA, 15 bp, Homo sapiens
atcactggagaaaaa

SEQ ID NO: 1360808 - DNA, 15 bp, Homo sapiens
aatcactggagaaaa

SEQ ID NO: 1360809 - DNA, 15 bp, Homo sapiens
aaatcactggagaaa

SEQ ID NO: 1360810 - DNA, 15 bp, Homo sapiens
caaatcactggagaa

SEQ ID NO: 1360811 - DNA, 15 bp, Homo sapiens
acaaatcactggaga

SEQ ID NO: 1360812 - DNA, 15 bp, Homo sapiens
cacaaatcactggag

SEQ ID NO: 1360813 - DNA, 15 bp, Homo sapiens
tcacaaatcactgga

SEQ ID NO: 1360814 - DNA, 15 bp, Homo sapiens
ttcacaaatcactgg

SEQ ID NO: 1360815 - DNA, 15 bp, Homo sapiens
cttcacaaatcactg

SEQ ID NO: 1360816 - DNA, 15 bp, Homo sapiens
gcttcacaaatcact

SEQ ID NO: 1360817 - DNA, 15 bp, Homo sapiens
agcttcacaaatcac

SEQ ID NO: 1360818 - DNA, 15 bp, Homo sapiens
tagcttcacaaatca

SEQ ID NO: 1360819 - DNA, 15 bp, Homo sapiens
atagcttcacaaatc

SEQ ID NO: 1360820 - DNA, 15 bp, Homo sapiens
aatagcttcacaaat

SEQ ID NO: 1360821 - DNA, 15 bp, Homo sapiens
aaatagcttcacaaa

SEQ ID NO: 1360822 - DNA, 15 bp, Homo sapiens
aaaatagcttcacaa

SEQ ID NO: 1360823 - DNA, 15 bp, Homo sapiens
aaaaatagcttcaca

SEQ ID NO: 1360824 - DNA, 15 bp, Homo sapiens
taaaaatagcttcac

SEQ ID NO: 1360825 - DNA, 15 bp, Homo sapiens
ttaaaaatagcttca

SEQ ID NO: 1360826 - DNA, 15 bp, Homo sapiens
gttaaaaatagcttc

SEQ ID NO: 1360827 - DNA, 15 bp, Homo sapiens
tgttaaaaatagctt

SEQ ID NO: 1360828 - DNA, 15 bp, Homo sapiens
gtgttaaaaatagct

SEQ ID NO: 1360829 - DNA, 15 bp, Homo sapiens
tgtgttaaaaatagc

SEQ ID NO: 1360830 - DNA, 15 bp, Homo sapiens
gtgtgttaaaaatag

SEQ ID NO: 1360831 - DNA, 15 bp, Homo sapiens
tgtgtgttaaaaata

SEQ ID NO: 1360832 - DNA, 15 bp, Homo sapiens
atgtgtgttaaaaat

SEQ ID NO: 1360833 - DNA, 15 bp, Homo sapiens
gatgtgtgttaaaaa

SEQ ID NO: 1360834 - DNA, 15 bp, Homo sapiens
agatgtgtgttaaaa

SEQ ID NO: 1360835 - DNA, 15 bp, Homo sapiens
tagatgtgtgttaaa

SEQ ID NO: 1360836 - DNA, 15 bp, Homo sapiens
atagatgtgtgttaa

SEQ ID NO: 1360837 - DNA, 15 bp, Homo sapiens
catagatgtgtgtta

SEQ ID NO: 1360838 - DNA, 15 bp, Homo sapiens
tcatagatgtgtgtt

SEQ ID NO: 1360839 - DNA, 15 bp, Homo sapiens
atcatagatgtgtgt

SEQ ID NO: 1360840 - DNA, 15 bp, Homo sapiens
tatcatagatgtgtg

SEQ ID NO: 1360841 - DNA, 15 bp, Homo sapiens
gtatcatagatgtgt

SEQ ID NO: 1360842 - DNA, 15 bp, Homo sapiens
agtatcatagatgtg

SEQ ID NO: 1360843 - DNA, 15 bp, Homo sapiens
cagtatcatagatgt

SEQ ID NO: 1360844 - DNA, 15 bp, Homo sapiens
acagtatcatagatg

SEQ ID NO: 1360845 - DNA, 15 bp, Homo sapiens
tacagtatcatagat

SEQ ID NO: 1360846 - DNA, 15 bp, Homo sapiens
ttacagtatcataga

SEQ ID NO: 1360847 - DNA, 15 bp, Homo sapiens
attacagtatcatag

SEQ ID NO: 1360848 - DNA, 15 bp, Homo sapiens
tattacagtatcata

SEQ ID NO: 1360849 - DNA, 15 bp, Homo sapiens
atattacagtatcat

SEQ ID NO: 1360850 - DNA, 15 bp, Homo sapiens
catattacagtatca

SEQ ID NO: 1360851 - DNA, 15 bp, Homo sapiens
acatattacagtatc

SEQ ID NO: 1360852 - DNA, 15 bp, Homo sapiens
aacatattacagtat

SEQ ID NO: 1360853 - DNA, 15 bp, Homo sapiens
aaacatattacagta

SEQ ID NO: 1360854 - DNA, 15 bp, Homo sapiens
aaaacatattacagt

SEQ ID NO: 1360855 - DNA, 15 bp, Homo sapiens
taaaacatattacag

SEQ ID NO: 1360856 - DNA, 15 bp, Homo sapiens
ttaaaacatattaca

SEQ ID NO: 1360857 - DNA, 15 bp, Homo sapiens
attaaaacatattac

SEQ ID NO: 1360858 - DNA, 15 bp, Homo sapiens
cattaaaacatatta

SEQ ID NO: 1360859 - DNA, 15 bp, Homo sapiens
acattaaaacatatt

SEQ ID NO: 1360860 - DNA, 15 bp, Homo sapiens
aacattaaaacatat

SEQ ID NO: 1360861 - DNA, 15 bp, Homo sapiens
aaacattaaaacata

SEQ ID NO: 1360862 - DNA, 15 bp, Homo sapiens
taaacattaaaacat

SEQ ID NO: 1360863 - DNA, 15 bp, Homo sapiens
ttaaacattaaaaca

SEQ ID NO: 1360864 - DNA, 15 bp, Homo sapiens
tttaaacattaaaac

SEQ ID NO: 1360865 - DNA, 15 bp, Homo sapiens
atttaaacattaaaa

SEQ ID NO: 1360866 - DNA, 15 bp, Homo sapiens
aatttaaacattaaa

SEQ ID NO: 1360867 - DNA, 15 bp, Homo sapiens
aaatttaaacattaa

SEQ ID NO: 1360868 - DNA, 15 bp, Homo sapiens
taaatttaaacatta

SEQ ID NO: 1360869 - DNA, 15 bp, Homo sapiens
ttaaatttaaacatt

SEQ ID NO: 1360870 - DNA, 15 bp, Homo sapiens
attaaatttaaacat

SEQ ID NO: 1360871 - DNA, 15 bp, Homo sapiens
aattaaatttaaaca

SEQ ID NO: 1360872 - DNA, 15 bp, Homo sapiens
taattaaatttaaac

SEQ ID NO: 1360873 - DNA, 15 bp, Homo sapiens
ttaattaaatttaaa

SEQ ID NO: 1360874 - DNA, 15 bp, Homo sapiens
attaattaaatttaa

SEQ ID NO: 1360875 - DNA, 15 bp, Homo sapiens
aattaattaaattta

SEQ ID NO: 1360876 - DNA, 15 bp, Homo sapiens
aaattaattaaattt

SEQ ID NO: 1360877 - DNA, 15 bp, Homo sapiens
taaattaattaaatt

SEQ ID NO: 1360878 - DNA, 15 bp, Homo sapiens
ttaaattaattaaat

SEQ ID NO: 1360879 - DNA, 15 bp, Homo sapiens
attaaattaattaaa

SEQ ID NO: 1360880 - DNA, 15 bp, Homo sapiens
tattaaattaattaa

SEQ ID NO: 1360881 - DNA, 15 bp, Homo sapiens
ttattaaattaatta

SEQ ID NO: 1360882 - DNA, 15 bp, Homo sapiens
attattaaattaatt

SEQ ID NO: 1360883 - DNA, 15 bp, Homo sapiens
cattattaaattaat

SEQ ID NO: 1360884 - DNA, 15 bp, Homo sapiens
acattattaaattaa

SEQ ID NO: 1360885 - DNA, 15 bp, Homo sapiens
aacattattaaatta

SEQ ID NO: 1360886 - DNA, 15 bp, Homo sapiens
taacattattaaatt

SEQ ID NO: 1360887 - DNA, 15 bp, Homo sapiens
gtaacattattaaat

SEQ ID NO: 1360888 - DNA, 15 bp, Homo sapiens
cgtaacattattaaa

SEQ ID NO: 1360889 - DNA, 15 bp, Homo sapiens
acgtaacattattaa

SEQ ID NO: 1360890 - DNA, 15 bp, Homo sapiens
tacgtaacattatta

SEQ ID NO: 1360891 - DNA, 15 bp, Homo sapiens
atacgtaacattatt

SEQ ID NO: 1360892 - DNA, 15 bp, Homo sapiens
aatacgtaacattat

SEQ ID NO: 1360893 - DNA, 15 bp, Homo sapiens
aaatacgtaacatta

SEQ ID NO: 1360894 - DNA, 15 bp, Homo sapiens
taaatacgtaacatt

SEQ ID NO: 1360895 - DNA, 15 bp, Homo sapiens
ttaaatacgtaacat

SEQ ID NO: 1360896 - DNA, 15 bp, Homo sapiens
attaaatacgtaaca

SEQ ID NO: 1360897 - DNA, 15 bp, Homo sapiens
tattaaatacgtaac

SEQ ID NO: 1360898 - DNA, 15 bp, Homo sapiens
atattaaatacgtaa

SEQ ID NO: 1360899 - DNA, 15 bp, Homo sapiens
aatattaaatacgta

SEQ ID NO: 1360900 - DNA, 15 bp, Homo sapiens
caatattaaatacgt

SEQ ID NO: 1360901 - DNA, 15 bp, Homo sapiens
acaatattaaatacg

SEQ ID NO: 1360902 - DNA, 15 bp, Homo sapiens
tacaatattaaatac

SEQ ID NO: 1360903 - DNA, 15 bp, Homo sapiens
ttacaatattaaata

SEQ ID NO: 1360904 - DNA, 15 bp, Homo sapiens
cttacaatattaaat

SEQ ID NO: 1360905 - DNA, 15 bp, Homo sapiens
ccttacaatattaaa

SEQ ID NO: 1360906 - DNA, 15 bp, Homo sapiens
accttacaatattaa

SEQ ID NO: 1360907 - DNA, 15 bp, Homo sapiens
taccttacaatatta

SEQ ID NO: 1360908 - DNA, 15 bp, Homo sapiens
ttaccttacaatatt

SEQ ID NO: 1360909 - DNA, 15 bp, Homo sapiens
attaccttacaatat

SEQ ID NO: 1360910 - DNA, 15 bp, Homo sapiens
aattaccttacaata

SEQ ID NO: 1360911 - DNA, 15 bp, Homo sapiens
aaattaccttacaat

SEQ ID NO: 1360912 - DNA, 15 bp, Homo sapiens
gaaattaccttacaa

SEQ ID NO: 1360913 - DNA, 15 bp, Homo sapiens
ggaaattaccttaca

SEQ ID NO: 1360914 - DNA, 15 bp, Homo sapiens
gggaaattaccttac

SEQ ID NO: 1360915 - DNA, 15 bp, Homo sapiens
ggggaaattacctta

SEQ ID NO: 1360916 - DNA, 15 bp, Homo sapiens
aggggaaattacctt

SEQ ID NO: 1360917 - DNA, 15 bp, Homo sapiens
gaggggaaattacct

SEQ ID NO: 1360918 - DNA, 15 bp, Homo sapiens
agaggggaaattacc

SEQ ID NO: 1360919 - DNA, 15 bp, Homo sapiens
aagaggggaaattac

SEQ ID NO: 1360920 - DNA, 15 bp, Homo sapiens
aaagaggggaaatta

SEQ ID NO: 1360921 - DNA, 15 bp, Homo sapiens
caaagaggggaaatt

SEQ ID NO: 1360922 - DNA, 15 bp, Homo sapiens
gcaaagaggggaaat

SEQ ID NO: 1360923 - DNA, 15 bp, Homo sapiens
agcaaagaggggaaa

SEQ ID NO: 1360924 - DNA, 15 bp, Homo sapiens
gagcaaagaggggaa

SEQ ID NO: 1360925 - DNA, 15 bp, Homo sapiens
ggagcaaagagggga

SEQ ID NO: 1360926 - DNA, 15 bp, Homo sapiens
aggagcaaagagggg

SEQ ID NO: 1360927 - DNA, 15 bp, Homo sapiens
aaggagcaaagaggg

SEQ ID NO: 1360928 - DNA, 15 bp, Homo sapiens
aaaggagcaaagagg

SEQ ID NO: 1360929 - DNA, 15 bp, Homo sapiens
aaaaggagcaaagag

SEQ ID NO: 1360930 - DNA, 15 bp, Homo sapiens
aaaaaggagcaaaga

SEQ ID NO: 1360931 - DNA, 15 bp, Homo sapiens
aaaaaaggagcaaag

SEQ ID NO: 1360932 - DNA, 15 bp, Homo sapiens
aaaaaaaggagcaaa

SEQ ID NO: 1360933 - DNA, 15 bp, Homo sapiens
aaaaaaaaggagcaa

SEQ ID NO: 1360934 - DNA, 15 bp, Homo sapiens
aaaaaaaaaggagca

SEQ ID NO: 1360935 - DNA, 15 bp, Homo sapiens
gaaaaaaaaaggagc

SEQ ID NO: 1360936 - DNA, 15 bp, Homo sapiens
agaaaaaaaaaggag

SEQ ID NO: 1360937 - DNA, 15 bp, Homo sapiens
taagaaagaaaaaaa

SEQ ID NO: 1360938 - DNA, 15 bp, Homo sapiens
ctaagaaagaaaaaa

SEQ ID NO: 1360939 - DNA, 15 bp, Homo sapiens
gctaagaaagaaaaa

SEQ ID NO: 1360940 - DNA, 15 bp, Homo sapiens
agctaagaaagaaaa

SEQ ID NO: 1360941 - DNA, 15 bp, Homo sapiens
tagctaagaaagaaa

SEQ ID NO: 1360942 - DNA, 15 bp, Homo sapiens
atagctaagaaagaa

SEQ ID NO: 1360943 - DNA, 15 bp, Homo sapiens
aatagctaagaaaga

SEQ ID NO: 1360944 - DNA, 15 bp, Homo sapiens
aaatagctaagaaag

SEQ ID NO: 1360945 - DNA, 15 bp, Homo sapiens
gaaatagctaagaaa

SEQ ID NO: 1360946 - DNA, 15 bp, Homo sapiens
agaaatagctaagaa

SEQ ID NO: 1360947 - DNA, 15 bp, Homo sapiens
cagaaatagctaaga

SEQ ID NO: 1360948 - DNA, 15 bp, Homo sapiens
ccagaaatagctaag

SEQ ID NO: 1360949 - DNA, 15 bp, Homo sapiens
tccagaaatagctaa

SEQ ID NO: 1360950 - DNA, 15 bp, Homo sapiens
gtccagaaatagcta

SEQ ID NO: 1360951 - DNA, 15 bp, Homo sapiens
ggtccagaaatagct

SEQ ID NO: 1360952 - DNA, 15 bp, Homo sapiens
aggtccagaaatagc

SEQ ID NO: 1360953 - DNA, 15 bp, Homo sapiens
gaggtccagaaatag

SEQ ID NO: 1360954 - DNA, 15 bp, Homo sapiens
agaggtccagaaata

SEQ ID NO: 1360955 - DNA, 15 bp, Homo sapiens
tagaggtccagaaat

SEQ ID NO: 1360956 - DNA, 15 bp, Homo sapiens
ctagaggtccagaaa

SEQ ID NO: 1360957 - DNA, 15 bp, Homo sapiens
actagaggtccagaa

SEQ ID NO: 1360958 - DNA, 15 bp, Homo sapiens
aactagaggtccaga

SEQ ID NO: 1360959 - DNA, 15 bp, Homo sapiens
gaactagaggtccag

SEQ ID NO: 1360960 - DNA, 15 bp, Homo sapiens
agaactagaggtcca

SEQ ID NO: 1360961 - DNA, 15 bp, Homo sapiens
gagaactagaggtcc

SEQ ID NO: 1360962 - DNA, 15 bp, Homo sapiens
agagaactagaggtc

SEQ ID NO: 1360963 - DNA, 15 bp, Homo sapiens
tagagaactagaggt

SEQ ID NO: 1360964 - DNA, 15 bp, Homo sapiens
atagagaactagagg

SEQ ID NO: 1360965 - DNA, 15 bp, Homo sapiens
tatagagaactagag

SEQ ID NO: 1360966 - DNA, 15 bp, Homo sapiens
atatagagaactaga

SEQ ID NO: 1360967 - DNA, 15 bp, Homo sapiens
tatatagagaactag

SEQ ID NO: 1360968 - DNA, 15 bp, Homo sapiens
gtatatagagaacta

SEQ ID NO: 1360969 - DNA, 15 bp, Homo sapiens
agtatatagagaact

SEQ ID NO: 1360970 - DNA, 15 bp, Homo sapiens
aagtatatagagaac

SEQ ID NO: 1360971 - DNA, 15 bp, Homo sapiens
aaagtatatagagaa

SEQ ID NO: 1360972 - DNA, 15 bp, Homo sapiens
aaaagtatatagaga

SEQ ID NO: 1360973 - DNA, 15 bp, Homo sapiens
aaaaagtatatagag

SEQ ID NO: 1360974 - DNA, 15 bp, Homo sapiens
aaaaaagtatataga

SEQ ID NO: 1360975 - DNA, 15 bp, Homo sapiens
aaaaaaagtatatag

SEQ ID NO: 1360976 - DNA, 15 bp, Homo sapiens
aaaaaaaagtatata

SEQ ID NO: 1360977 - DNA, 15 bp, Homo sapiens
aaaaaaaaagtatat

SEQ ID NO: 1360978 - DNA, 15 bp, Homo sapiens
aaaaaaaaaagtata

SEQ ID NO: 1360979 - DNA, 15 bp, Homo sapiens
aaaaaaaaaaagtat

SEQ ID NO: 1360980 - DNA, 15 bp, Homo sapiens
tcttgtctcaaaaaa

SEQ ID NO: 1360981 - DNA, 15 bp, Homo sapiens
ctcttgtctcaaaaa

SEQ ID NO: 1360982 - DNA, 15 bp, Homo sapiens
actcttgtctcaaaa

SEQ ID NO: 1360983 - DNA, 15 bp, Homo sapiens
aactcttgtctcaaa

SEQ ID NO: 1360984 - DNA, 15 bp, Homo sapiens
aaactcttgtctcaa

SEQ ID NO: 1360985 - DNA, 15 bp, Homo sapiens
aaaactcttgtctca

SEQ ID NO: 1360986 - DNA, 15 bp, Homo sapiens
caaaactcttgtctc

SEQ ID NO: 1360987 - DNA, 15 bp, Homo sapiens
gcaaaactcttgtct

SEQ ID NO: 1360988 - DNA, 15 bp, Homo sapiens
agcaaaactcttgtc

SEQ ID NO: 1360989 - DNA, 15 bp, Homo sapiens
gagcaaaactcttgt

SEQ ID NO: 1360990 - DNA, 15 bp, Homo sapiens
agagcaaaactcttg

SEQ ID NO: 1360991 - DNA, 15 bp, Homo sapiens
aagagcaaaactctt

SEQ ID NO: 1360992 - DNA, 15 bp, Homo sapiens
caagagcaaaactct

SEQ ID NO: 1360993 - DNA, 15 bp, Homo sapiens
gacaagagcaaaact

SEQ ID NO: 1360994 - DNA, 15 bp, Homo sapiens
cgacaagagcaaaac

SEQ ID NO: 1360995 - DNA, 15 bp, Homo sapiens
ggcgacaagagcaaa

SEQ ID NO: 1360996 - DNA, 15 bp, Homo sapiens
gggcgacaagagcaa

SEQ ID NO: 1360997 - DNA, 15 bp, Homo sapiens
tgggcgacaagagca

SEQ ID NO: 1360998 - DNA, 15 bp, Homo sapiens
ctgagattgcaccat

SEQ ID NO: 1360999 - DNA, 15 bp, Homo sapiens
cagctgagattgcac

SEQ ID NO: 1361000 - DNA, 15 bp, Homo sapiens
tcagctgagattgca

SEQ ID NO: 1361001 - DNA, 15 bp, Homo sapiens
gtcagctgagattgc

SEQ ID NO: 1361002 - DNA, 15 bp, Homo sapiens
agtcagctgagattg

SEQ ID NO: 1361003 - DNA, 15 bp, Homo sapiens
cagtcagctgagatt

SEQ ID NO: 1361004 - DNA, 15 bp, Homo sapiens
gcagtcagctgagat

SEQ ID NO: 1361005 - DNA, 15 bp, Homo sapiens
tgcagtcagctgaga

SEQ ID NO: 1361006 - DNA, 15 bp, Homo sapiens
ttgcagtcagctgag

SEQ ID NO: 1361007 - DNA, 15 bp, Homo sapiens
gttgcagtcagctga

SEQ ID NO: 1361008 - DNA, 15 bp, Homo sapiens
ggttgcagtcagctg

SEQ ID NO: 1361009 - DNA, 15 bp, Homo sapiens
aggttgcagtcagct

SEQ ID NO: 1361010 - DNA, 15 bp, Homo sapiens
gaggttgcagtcagc

SEQ ID NO: 1361011 - DNA, 15 bp, Homo sapiens
agaggttgcagtcag

SEQ ID NO: 1361012 - DNA, 15 bp, Homo sapiens
aagaggttgcagtca

SEQ ID NO: 1361013 - DNA, 15 bp, Homo sapiens
gaagaggttgcagtc

SEQ ID NO: 1361014 - DNA, 15 bp, Homo sapiens
ggaagaggttgcagt

SEQ ID NO: 1361015 - DNA, 15 bp, Homo sapiens
aggaagaggttgcag

SEQ ID NO: 1361016 - DNA, 15 bp, Homo sapiens
gaggaagaggttgca

SEQ ID NO: 1361017 - DNA, 15 bp, Homo sapiens
ggaggaagaggttgc

SEQ ID NO: 1361018 - DNA, 15 bp, Homo sapiens
aggaggaagaggttg

SEQ ID NO: 1361019 - DNA, 15 bp, Homo sapiens
caggaggaagaggtt

SEQ ID NO: 1361020 - DNA, 15 bp, Homo sapiens
ccaggaggaagaggt

SEQ ID NO: 1361021 - DNA, 15 bp, Homo sapiens
cccaggaggaagagg

SEQ ID NO: 1361022 - DNA, 15 bp, Homo sapiens
acccaggaggaagag

SEQ ID NO: 1361023 - DNA, 15 bp, Homo sapiens
aacccaggaggaaga

SEQ ID NO: 1361024 - DNA, 15 bp, Homo sapiens
gaacccaggaggaag

SEQ ID NO: 1361025 - DNA, 15 bp, Homo sapiens
tgaacccaggaggaa

SEQ ID NO: 1361026 - DNA, 15 bp, Homo sapiens
tggcaggagaatcac

SEQ ID NO: 1361027 - DNA, 15 bp, Homo sapiens
gtggcaggagaatca

SEQ ID NO: 1361028 - DNA, 15 bp, Homo sapiens
tgtggcaggagaatc

SEQ ID NO: 1361029 - DNA, 15 bp, Homo sapiens
ctgtggcaggagaat

SEQ ID NO: 1361030 - DNA, 15 bp, Homo sapiens
gctgtggcaggagaa

SEQ ID NO: 1361031 - DNA, 15 bp, Homo sapiens
ggctgtggcaggaga

SEQ ID NO: 1361032 - DNA, 15 bp, Homo sapiens
aggctgtggcaggag

SEQ ID NO: 1361033 - DNA, 15 bp, Homo sapiens
gaggctgtggcagga

SEQ ID NO: 1361034 - DNA, 15 bp, Homo sapiens
ggaggctgtggcagg

SEQ ID NO: 1361035 - DNA, 15 bp, Homo sapiens
gggaggctgtggcag

SEQ ID NO: 1361036 - DNA, 15 bp, Homo sapiens
cgggaggctgtggca

SEQ ID NO: 1361037 - DNA, 15 bp, Homo sapiens
acgggaggctgtggc

SEQ ID NO: 1361038 - DNA, 15 bp, Homo sapiens
cacgggaggctgtgg

SEQ ID NO: 1361039 - DNA, 15 bp, Homo sapiens
acacgggaggctgtg

SEQ ID NO: 1361040 - DNA, 15 bp, Homo sapiens
aacacgggaggctgt

SEQ ID NO: 1361041 - DNA, 15 bp, Homo sapiens
caacacgggaggctg

SEQ ID NO: 1361042 - DNA, 15 bp, Homo sapiens
gcaacacgggaggct

SEQ ID NO: 1361043 - DNA, 15 bp, Homo sapiens
agcaacacgggaggc

SEQ ID NO: 1361044 - DNA, 15 bp, Homo sapiens
cagcaacacgggagg

SEQ ID NO: 1361045 - DNA, 15 bp, Homo sapiens
ccagcaacacgggag

SEQ ID NO: 1361046 - DNA, 15 bp, Homo sapiens
cccagcaacacggga

SEQ ID NO: 1361047 - DNA, 15 bp, Homo sapiens
tcccagcaacacggg

SEQ ID NO: 1361048 - DNA, 15 bp, Homo sapiens
atcccagcaacacgg

SEQ ID NO: 1361049 - DNA, 15 bp, Homo sapiens
aatcccagcaacacg

SEQ ID NO: 1361050 - DNA, 15 bp, Homo sapiens
taatcccagcaacac

SEQ ID NO: 1361051 - DNA, 15 bp, Homo sapiens
gtaatcccagcaaca

SEQ ID NO: 1361052 - DNA, 15 bp, Homo sapiens
ttgtaatcccagcaa

SEQ ID NO: 1361053 - DNA, 15 bp, Homo sapiens
acatgcttgtaatcc

SEQ ID NO: 1361054 - DNA, 15 bp, Homo sapiens
cacatgcttgtaatc

SEQ ID NO: 1361055 - DNA, 15 bp, Homo sapiens
gcacatgcttgtaat

SEQ ID NO: 1361056 - DNA, 15 bp, Homo sapiens
ggcacatgcttgtaa

SEQ ID NO: 1361057 - DNA, 15 bp, Homo sapiens
tggcacatgcttgta

SEQ ID NO: 1361058 - DNA, 15 bp, Homo sapiens
gtggcacatgcttgt

SEQ ID NO: 1361059 - DNA, 15 bp, Homo sapiens
ggtggcacatgcttg

SEQ ID NO: 1361060 - DNA, 15 bp, Homo sapiens
tggtggcacatgctt

SEQ ID NO: 1361061 - DNA, 15 bp, Homo sapiens
gtggtggcacatgct

SEQ ID NO: 1361062 - DNA, 15 bp, Homo sapiens
ggccaggcgtggtgg

SEQ ID NO: 1361063 - DNA, 15 bp, Homo sapiens
tggccaggcgtggtg

SEQ ID NO: 1361064 - DNA, 15 bp, Homo sapiens
atggccaggcgtggt

SEQ ID NO: 1361065 - DNA, 15 bp, Homo sapiens
aatggccaggcgtgg

SEQ ID NO: 1361066 - DNA, 15 bp, Homo sapiens
aaatggccaggcgtg

SEQ ID NO: 1361067 - DNA, 15 bp, Homo sapiens
aaaatggccaggcgt

SEQ ID NO: 1361068 - DNA, 15 bp, Homo sapiens
aaaaatggccaggcg

SEQ ID NO: 1361069 - DNA, 15 bp, Homo sapiens
aaaaaatggccaggc

SEQ ID NO: 1361070 - DNA, 15 bp, Homo sapiens
aaaaaaatggccagg

SEQ ID NO: 1361071 - DNA, 15 bp, Homo sapiens
aaaaaaaatggccag

SEQ ID NO: 1361072 - DNA, 15 bp, Homo sapiens
caaaaaaaatggcca

SEQ ID NO: 1361073 - DNA, 15 bp, Homo sapiens
acaaaaaaaatggcc

SEQ ID NO: 1361074 - DNA, 15 bp, Homo sapiens
tacaaaaaaaatggc

SEQ ID NO: 1361075 - DNA, 15 bp, Homo sapiens
atacaaaaaaaatgg

SEQ ID NO: 1361076 - DNA, 15 bp, Homo sapiens
aatacaaaaaaaatg

SEQ ID NO: 1361077 - DNA, 15 bp, Homo sapiens
aaatacaaaaaaaat

SEQ ID NO: 1361078 - DNA, 15 bp, Homo sapiens
ttaaatacaaaaaaa

SEQ ID NO: 1361079 - DNA, 15 bp, Homo sapiens
attaaatacaaaaaa

SEQ ID NO: 1361080 - DNA, 15 bp, Homo sapiens
tattaaatacaaaaa

SEQ ID NO: 1361081 - DNA, 15 bp, Homo sapiens
ctattaaatacaaaa

SEQ ID NO: 1361082 - DNA, 15 bp, Homo sapiens
actattaaatacaaa

SEQ ID NO: 1361083 - DNA, 15 bp, Homo sapiens
cactattaaatacaa

SEQ ID NO: 1361084 - DNA, 15 bp, Homo sapiens
tcactattaaataca

SEQ ID NO: 1361085 - DNA, 15 bp, Homo sapiens
gtcactattaaatac

SEQ ID NO: 1361086 - DNA, 15 bp, Homo sapiens
cgtcactattaaata

SEQ ID NO: 1361087 - DNA, 15 bp, Homo sapiens
tcgtcactattaaat

SEQ ID NO: 1361088 - DNA, 15 bp, Homo sapiens
ctcgtcactattaaa

SEQ ID NO: 1361089 - DNA, 15 bp, Homo sapiens
cctcgtcactattaa

SEQ ID NO: 1361090 - DNA, 15 bp, Homo sapiens
acctcgtcactatta

SEQ ID NO: 1361091 - DNA, 15 bp, Homo sapiens
aacctcgtcactatt

SEQ ID NO: 1361092 - DNA, 15 bp, Homo sapiens
aaacctcgtcactat

SEQ ID NO: 1361093 - DNA, 15 bp, Homo sapiens
gaaacctcgtcacta

SEQ ID NO: 1361094 - DNA, 15 bp, Homo sapiens
tgaaacctcgtcact

SEQ ID NO: 1361095 - DNA, 15 bp, Homo sapiens
gtgaaacctcgtcac

SEQ ID NO: 1361096 - DNA, 15 bp, Homo sapiens
ggtgaaacctcgtca

SEQ ID NO: 1361097 - DNA, 15 bp, Homo sapiens
gggtcaggagtttga

SEQ ID NO: 1361098 - DNA, 15 bp, Homo sapiens
ggggtcaggagtttg

SEQ ID NO: 1361099 - DNA, 15 bp, Homo sapiens
tggggtcaggagttt

SEQ ID NO: 1361100 - DNA, 15 bp, Homo sapiens
ctggggtcaggagtt

SEQ ID NO: 1361101 - DNA, 15 bp, Homo sapiens
cctggggtcaggagt

SEQ ID NO: 1361102 - DNA, 15 bp, Homo sapiens
acctggggtcaggag

SEQ ID NO: 1361103 - DNA, 15 bp, Homo sapiens
cacctggggtcagga

SEQ ID NO: 1361104 - DNA, 15 bp, Homo sapiens
tcacctggggtcagg

SEQ ID NO: 1361105 - DNA, 15 bp, Homo sapiens
atcacctggggtcag

SEQ ID NO: 1361106 - DNA, 15 bp, Homo sapiens
gatcacctggggtca

SEQ ID NO: 1361107 - DNA, 15 bp, Homo sapiens
ggatcacctggggtc

SEQ ID NO: 1361108 - DNA, 15 bp, Homo sapiens
tggatcacctggggt

SEQ ID NO: 1361109 - DNA, 15 bp, Homo sapiens
gtggatcacctgggg

SEQ ID NO: 1361110 - DNA, 15 bp, Homo sapiens
ggtggatcacctggg

SEQ ID NO: 1361111 - DNA, 15 bp, Homo sapiens
aggtggatcacctgg

SEQ ID NO: 1361112 - DNA, 15 bp, Homo sapiens
gaggccgaggcaggt

SEQ ID NO: 1361113 - DNA, 15 bp, Homo sapiens
agcagtggctcacgc

SEQ ID NO: 1361114 - DNA, 15 bp, Homo sapiens
gagcagtggctcacg

SEQ ID NO: 1361115 - DNA, 15 bp, Homo sapiens
ggagcagtggctcac

SEQ ID NO: 1361116 - DNA, 15 bp, Homo sapiens
actgggagcagtggc

SEQ ID NO: 1361117 - DNA, 15 bp, Homo sapiens
gactgggagcagtgg

SEQ ID NO: 1361118 - DNA, 15 bp, Homo sapiens
ggactgggagcagtg

SEQ ID NO: 1361119 - DNA, 15 bp, Homo sapiens
aggactgggagcagt

SEQ ID NO: 1361120 - DNA, 15 bp, Homo sapiens
gaggactgggagcag

SEQ ID NO: 1361121 - DNA, 15 bp, Homo sapiens
agaggactgggagca

SEQ ID NO: 1361122 - DNA, 15 bp, Homo sapiens
tagaggactgggagc

SEQ ID NO: 1361123 - DNA, 15 bp, Homo sapiens
atagaggactgggag

SEQ ID NO: 1361124 - DNA, 15 bp, Homo sapiens
tatagaggactggga

SEQ ID NO: 1361125 - DNA, 15 bp, Homo sapiens
atatagaggactggg

SEQ ID NO: 1361126 - DNA, 15 bp, Homo sapiens
tatatagaggactgg

SEQ ID NO: 1361127 - DNA, 15 bp, Homo sapiens
gtatatagaggactg

SEQ ID NO: 1361128 - DNA, 15 bp, Homo sapiens
agtatatagaggact

SEQ ID NO: 1361129 - DNA, 15 bp, Homo sapiens
cagtatatagaggac

SEQ ID NO: 1361130 - DNA, 15 bp, Homo sapiens
acagtatatagagga

SEQ ID NO: 1361131 - DNA, 15 bp, Homo sapiens
aacagtatatagagg

SEQ ID NO: 1361132 - DNA, 15 bp, Homo sapiens
aaacagtatatagag

SEQ ID NO: 1361133 - DNA, 15 bp, Homo sapiens
aaaacagtatataga

SEQ ID NO: 1361134 - DNA, 15 bp, Homo sapiens
taaaacagtatatag

SEQ ID NO: 1361135 - DNA, 15 bp, Homo sapiens
ttaaaacagtatata

SEQ ID NO: 1361136 - DNA, 15 bp, Homo sapiens
cttaaaacagtatat

SEQ ID NO: 1361137 - DNA, 15 bp, Homo sapiens
acttaaaacagtata

SEQ ID NO: 1361138 - DNA, 15 bp, Homo sapiens
gacttaaaacagtat

SEQ ID NO: 1361139 - DNA, 15 bp, Homo sapiens
tgacttaaaacagta

SEQ ID NO: 1361140 - DNA, 15 bp, Homo sapiens
ttgacttaaaacagt

SEQ ID NO: 1361141 - DNA, 15 bp, Homo sapiens
gttgacttaaaacag

SEQ ID NO: 1361142 - DNA, 15 bp, Homo sapiens
agttgacttaaaaca

SEQ ID NO: 1361143 - DNA, 15 bp, Homo sapiens
aagttgacttaaaac

SEQ ID NO: 1361144 - DNA, 15 bp, Homo sapiens
taagttgacttaaaa

SEQ ID NO: 1361145 - DNA, 15 bp, Homo sapiens
ataagttgacttaaa

SEQ ID NO: 1361146 - DNA, 15 bp, Homo sapiens
aataagttgacttaa

SEQ ID NO: 1361147 - DNA, 15 bp, Homo sapiens
taataagttgactta

SEQ ID NO: 1361148 - DNA, 15 bp, Homo sapiens
ttaataagttgactt

SEQ ID NO: 1361149 - DNA, 15 bp, Homo sapiens
cttaataagttgact

SEQ ID NO: 1361150 - DNA, 15 bp, Homo sapiens
tcttaataagttgac

SEQ ID NO: 1361151 - DNA, 15 bp, Homo sapiens
atcttaataagttga

SEQ ID NO: 1361152 - DNA, 15 bp, Homo sapiens
aatcttaataagttg

SEQ ID NO: 1361153 - DNA, 15 bp, Homo sapiens
taatcttaataagtt

SEQ ID NO: 1361154 - DNA, 15 bp, Homo sapiens
gtaatcttaataagt

SEQ ID NO: 1361155 - DNA, 15 bp, Homo sapiens
ggtaatcttaataag

SEQ ID NO: 1361156 - DNA, 15 bp, Homo sapiens
gggtaatcttaataa

SEQ ID NO: 1361157 - DNA, 15 bp, Homo sapiens
agggtaatcttaata

SEQ ID NO: 1361158 - DNA, 15 bp, Homo sapiens
tagggtaatcttaat

SEQ ID NO: 1361159 - DNA, 15 bp, Homo sapiens
ttagggtaatcttaa

SEQ ID NO: 1361160 - DNA, 15 bp, Homo sapiens
tttagggtaatctta

SEQ ID NO: 1361161 - DNA, 15 bp, Homo sapiens
ttttagggtaatctt

SEQ ID NO: 1361162 - DNA, 15 bp, Homo sapiens
attttagggtaatct

SEQ ID NO: 1361163 - DNA, 15 bp, Homo sapiens
aattttagggtaatc

SEQ ID NO: 1361164 - DNA, 15 bp, Homo sapiens
aaattttagggtaat

SEQ ID NO: 1361165 - DNA, 15 bp, Homo sapiens
aaaattttagggtaa

SEQ ID NO: 1361166 - DNA, 15 bp, Homo sapiens
aaaaattttagggta

SEQ ID NO: 1361167 - DNA, 15 bp, Homo sapiens
caaaaattttagggt

SEQ ID NO: 1361168 - DNA, 15 bp, Homo sapiens
gcaaaaattttaggg

SEQ ID NO: 1361169 - DNA, 15 bp, Homo sapiens
agcaaaaattttagg

SEQ ID NO: 1361170 - DNA, 15 bp, Homo sapiens
cagcaaaaattttag

SEQ ID NO: 1361171 - DNA, 15 bp, Homo sapiens
ccagcaaaaatttta

SEQ ID NO: 1361172 - DNA, 15 bp, Homo sapiens
accagcaaaaatttt

SEQ ID NO: 1361173 - DNA, 15 bp, Homo sapiens
taccagcaaaaattt

SEQ ID NO: 1361174 - DNA, 15 bp, Homo sapiens
ataccagcaaaaatt

SEQ ID NO: 1361175 - DNA, 15 bp, Homo sapiens
aataccagcaaaaat

SEQ ID NO: 1361176 - DNA, 15 bp, Homo sapiens
aaataccagcaaaaa

SEQ ID NO: 1361177 - DNA, 15 bp, Homo sapiens
aaaataccagcaaaa

SEQ ID NO: 1361178 - DNA, 15 bp, Homo sapiens
taaaataccagcaaa

SEQ ID NO: 1361179 - DNA, 15 bp, Homo sapiens
ttaaaataccagcaa

SEQ ID NO: 1361180 - DNA, 15 bp, Homo sapiens
attaaaataccagca

SEQ ID NO: 1361181 - DNA, 15 bp, Homo sapiens
aattaaaataccagc

SEQ ID NO: 1361182 - DNA, 15 bp, Homo sapiens
taattaaaataccag

SEQ ID NO: 1361183 - DNA, 15 bp, Homo sapiens
ttaattaaaatacca

SEQ ID NO: 1361184 - DNA, 15 bp, Homo sapiens
tttaattaaaatacc

SEQ ID NO: 1361185 - DNA, 15 bp, Homo sapiens
atttaattaaaatac

SEQ ID NO: 1361186 - DNA, 15 bp, Homo sapiens
aatttaattaaaata

SEQ ID NO: 1361187 - DNA, 15 bp, Homo sapiens
aaatttaattaaaat

SEQ ID NO: 1361188 - DNA, 15 bp, Homo sapiens
taaatttaattaaaa

SEQ ID NO: 1361189 - DNA, 15 bp, Homo sapiens
ataaatttaattaaa

SEQ ID NO: 1361190 - DNA, 15 bp, Homo sapiens
tataaatttaattaa

SEQ ID NO: 1361191 - DNA, 15 bp, Homo sapiens
atataaatttaatta

SEQ ID NO: 1361192 - DNA, 15 bp, Homo sapiens
gatataaatttaatt

SEQ ID NO: 1361193 - DNA, 15 bp, Homo sapiens
ggatataaatttaat

SEQ ID NO: 1361194 - DNA, 15 bp, Homo sapiens
tggatataaatttaa

SEQ ID NO: 1361195 - DNA, 15 bp, Homo sapiens
atggatataaattta

SEQ ID NO: 1361196 - DNA, 15 bp, Homo sapiens
tatggatataaattt

SEQ ID NO: 1361197 - DNA, 15 bp, Homo sapiens
ttatggatataaatt

SEQ ID NO: 1361198 - DNA, 15 bp, Homo sapiens
tttatggatataaat

SEQ ID NO: 1361199 - DNA, 15 bp, Homo sapiens
atttatggatataaa

SEQ ID NO: 1361200 - DNA, 15 bp, Homo sapiens
aatttatggatataa

SEQ ID NO: 1361201 - DNA, 15 bp, Homo sapiens
taatttatggatata

SEQ ID NO: 1361202 - DNA, 15 bp, Homo sapiens
ttaatttatggatat

SEQ ID NO: 1361203 - DNA, 15 bp, Homo sapiens
attaatttatggata

SEQ ID NO: 1361204 - DNA, 15 bp, Homo sapiens
aattaatttatggat

SEQ ID NO: 1361205 - DNA, 15 bp, Homo sapiens
caattaatttatgga

SEQ ID NO: 1361206 - DNA, 15 bp, Homo sapiens
tcaattaatttatgg

SEQ ID NO: 1361207 - DNA, 15 bp, Homo sapiens
atcaattaatttatg

SEQ ID NO: 1361208 - DNA, 15 bp, Homo sapiens
tatcaattaatttat

SEQ ID NO: 1361209 - DNA, 15 bp, Homo sapiens
atatcaattaattta

SEQ ID NO: 1361210 - DNA, 15 bp, Homo sapiens
tatatcaattaattt

SEQ ID NO: 1361211 - DNA, 15 bp, Homo sapiens
atatatcaattaatt

SEQ ID NO: 1361212 - DNA, 15 bp, Homo sapiens
aatatatcaattaat

SEQ ID NO: 1361213 - DNA, 15 bp, Homo sapiens
taatatatcaattaa

SEQ ID NO: 1361214 - DNA, 15 bp, Homo sapiens
ttaatatatcaatta

SEQ ID NO: 1361215 - DNA, 15 bp, Homo sapiens
attaatatatcaatt

SEQ ID NO: 1361216 - DNA, 15 bp, Homo sapiens
aattaatatatcaat

SEQ ID NO: 1361217 - DNA, 15 bp, Homo sapiens
aaattaatatatcaa

SEQ ID NO: 1361218 - DNA, 15 bp, Homo sapiens
taaattaatatatca

SEQ ID NO: 1361219 - DNA, 15 bp, Homo sapiens
ttaaattaatatatc

SEQ ID NO: 1361220 - DNA, 15 bp, Homo sapiens
cttaaattaatatat

SEQ ID NO: 1361221 - DNA, 15 bp, Homo sapiens
tcttaaattaatata

SEQ ID NO: 1361222 - DNA, 15 bp, Homo sapiens
ttcttaaattaatat

SEQ ID NO: 1361223 - DNA, 15 bp, Homo sapiens
attcttaaattaata

SEQ ID NO: 1361224 - DNA, 15 bp, Homo sapiens
aattcttaaattaat

SEQ ID NO: 1361225 - DNA, 15 bp, Homo sapiens
taattcttaaattaa

SEQ ID NO: 1361226 - DNA, 15 bp, Homo sapiens
ataattcttaaatta

SEQ ID NO: 1361227 - DNA, 15 bp, Homo sapiens
aataattcttaaatt

SEQ ID NO: 1361228 - DNA, 15 bp, Homo sapiens
taataattcttaaat

SEQ ID NO: 1361229 - DNA, 15 bp, Homo sapiens
ttaataattcttaaa

SEQ ID NO: 1361230 - DNA, 15 bp, Homo sapiens
gttaataattcttaa

SEQ ID NO: 1361231 - DNA, 15 bp, Homo sapiens
tgttaataattctta

SEQ ID NO: 1361232 - DNA, 15 bp, Homo sapiens
gtgttaataattctt

SEQ ID NO: 1361233 - DNA, 15 bp, Homo sapiens
ggtgttaataattct

SEQ ID NO: 1361234 - DNA, 15 bp, Homo sapiens
aggtgttaataattc

SEQ ID NO: 1361235 - DNA, 15 bp, Homo sapiens
aaggtgttaataatt

SEQ ID NO: 1361236 - DNA, 15 bp, Homo sapiens
aaaggtgttaataat

SEQ ID NO: 1361237 - DNA, 15 bp, Homo sapiens
taaaggtgttaataa

SEQ ID NO: 1361238 - DNA, 15 bp, Homo sapiens
gtaaaggtgttaata

SEQ ID NO: 1361239 - DNA, 15 bp, Homo sapiens
tgtaaaggtgttaat

SEQ ID NO: 1361240 - DNA, 15 bp, Homo sapiens
ttgtaaaggtgttaa

SEQ ID NO: 1361241 - DNA, 15 bp, Homo sapiens
gttgtaaaggtgtta

SEQ ID NO: 1361242 - DNA, 15 bp, Homo sapiens
tgttgtaaaggtgtt

SEQ ID NO: 1361243 - DNA, 15 bp, Homo sapiens
atgttgtaaaggtgt

SEQ ID NO: 1361244 - DNA, 15 bp, Homo sapiens
gatgttgtaaaggtg

SEQ ID NO: 1361245 - DNA, 15 bp, Homo sapiens
tgatgttgtaaaggt

SEQ ID NO: 1361246 - DNA, 15 bp, Homo sapiens
atgatgttgtaaagg

SEQ ID NO: 1361247 - DNA, 15 bp, Homo sapiens
gatgatgttgtaaag

SEQ ID NO: 1361248 - DNA, 15 bp, Homo sapiens
agatgatgttgtaaa

SEQ ID NO: 1361249 - DNA, 15 bp, Homo sapiens
aagatgatgttgtaa

SEQ ID NO: 1361250 - DNA, 15 bp, Homo sapiens
taagatgatgttgta

SEQ ID NO: 1361251 - DNA, 15 bp, Homo sapiens
ataagatgatgttgt

SEQ ID NO: 1361252 - DNA, 15 bp, Homo sapiens
gataagatgatgttg

SEQ ID NO: 1361253 - DNA, 15 bp, Homo sapiens
ggataagatgatgtt

SEQ ID NO: 1361254 - DNA, 15 bp, Homo sapiens
tggataagatgatgt

SEQ ID NO: 1361255 - DNA, 15 bp, Homo sapiens
atggataagatgatg

SEQ ID NO: 1361256 - DNA, 15 bp, Homo sapiens
tatggataagatgat

SEQ ID NO: 1361257 - DNA, 15 bp, Homo sapiens
atatggataagatga

SEQ ID NO: 1361258 - DNA, 15 bp, Homo sapiens
tatatggataagatg

SEQ ID NO: 1361259 - DNA, 15 bp, Homo sapiens
gtatatggataagat

SEQ ID NO: 1361260 - DNA, 15 bp, Homo sapiens
agtatatggataaga

SEQ ID NO: 1361261 - DNA, 15 bp, Homo sapiens
tagtatatggataag

SEQ ID NO: 1361262 - DNA, 15 bp, Homo sapiens
ttagtatatggataa

SEQ ID NO: 1361263 - DNA, 15 bp, Homo sapiens
attagtatatggata

SEQ ID NO: 1361264 - DNA, 15 bp, Homo sapiens
cattagtatatggat

SEQ ID NO: 1361265 - DNA, 15 bp, Homo sapiens
gcattagtatatgga

SEQ ID NO: 1361266 - DNA, 15 bp, Homo sapiens
agcattagtatatgg

SEQ ID NO: 1361267 - DNA, 15 bp, Homo sapiens
tagcattagtatatg

SEQ ID NO: 1361268 - DNA, 15 bp, Homo sapiens
atagcattagtatat

SEQ ID NO: 1361269 - DNA, 15 bp, Homo sapiens
gatagcattagtata

SEQ ID NO: 1361270 - DNA, 15 bp, Homo sapiens
tgatagcattagtat

SEQ ID NO: 1361271 - DNA, 15 bp, Homo sapiens
gtgatagcattagta

SEQ ID NO: 1361272 - DNA, 15 bp, Homo sapiens
agtgatagcattagt

SEQ ID NO: 1361273 - DNA, 15 bp, Homo sapiens
aagtgatagcattag

SEQ ID NO: 1361274 - DNA, 15 bp, Homo sapiens
gaagtgatagcatta

SEQ ID NO: 1361275 - DNA, 15 bp, Homo sapiens
tgaagtgatagcatt

SEQ ID NO: 1361276 - DNA, 15 bp, Homo sapiens
atgaagtgatagcat

SEQ ID NO: 1361277 - DNA, 15 bp, Homo sapiens
aatgaagtgatagca

SEQ ID NO: 1361278 - DNA, 15 bp, Homo sapiens
aaatgaagtgatagc

SEQ ID NO: 1361279 - DNA, 15 bp, Homo sapiens
taaatgaagtgatag

SEQ ID NO: 1361280 - DNA, 15 bp, Homo sapiens
ataaatgaagtgata

SEQ ID NO: 1361281 - DNA, 15 bp, Homo sapiens
aataaatgaagtgat

SEQ ID NO: 1361282 - DNA, 15 bp, Homo sapiens
gaataaatgaagtga

SEQ ID NO: 1361283 - DNA, 15 bp, Homo sapiens
tgaataaatgaagtg

SEQ ID NO: 1361284 - DNA, 15 bp, Homo sapiens
ctgaataaatgaagt

SEQ ID NO: 1361285 - DNA, 15 bp, Homo sapiens
cctgaataaatgaag

SEQ ID NO: 1361286 - DNA, 15 bp, Homo sapiens
acctgaataaatgaa

SEQ ID NO: 1361287 - DNA, 15 bp, Homo sapiens
tacctgaataaatga

SEQ ID NO: 1361288 - DNA, 15 bp, Homo sapiens
atacctgaataaatg

SEQ ID NO: 1361289 - DNA, 15 bp, Homo sapiens
gatacctgaataaat

SEQ ID NO: 1361290 - DNA, 15 bp, Homo sapiens
agatacctgaataaa

SEQ ID NO: 1361291 - DNA, 15 bp, Homo sapiens
aagatacctgaataa

SEQ ID NO: 1361292 - DNA, 15 bp, Homo sapiens
aaagatacctgaata

SEQ ID NO: 1361293 - DNA, 15 bp, Homo sapiens
aaaagatacctgaat

SEQ ID NO: 1361294 - DNA, 15 bp, Homo sapiens
taaaagatacctgaa

SEQ ID NO: 1361295 - DNA, 15 bp, Homo sapiens
ataaaagatacctga

SEQ ID NO: 1361296 - DNA, 15 bp, Homo sapiens
tataaaagatacctg

SEQ ID NO: 1361297 - DNA, 15 bp, Homo sapiens
atataaaagatacct

SEQ ID NO: 1361298 - DNA, 15 bp, Homo sapiens
aatataaaagatacc

SEQ ID NO: 1361299 - DNA, 15 bp, Homo sapiens
gaatataaaagatac

SEQ ID NO: 1361300 - DNA, 15 bp, Homo sapiens
agaatataaaagata

SEQ ID NO: 1361301 - DNA, 15 bp, Homo sapiens
aagaatataaaagat

SEQ ID NO: 1361302 - DNA, 15 bp, Homo sapiens
aaagaatataaaaga

SEQ ID NO: 1361303 - DNA, 15 bp, Homo sapiens
taaagaatataaaag

SEQ ID NO: 1361304 - DNA, 15 bp, Homo sapiens
ctaaagaatataaaa

SEQ ID NO: 1361305 - DNA, 15 bp, Homo sapiens
actaaagaatataaa

SEQ ID NO: 1361306 - DNA, 15 bp, Homo sapiens
tactaaagaatataa

SEQ ID NO: 1361307 - DNA, 15 bp, Homo sapiens
ctactaaagaatata

SEQ ID NO: 1361308 - DNA, 15 bp, Homo sapiens
cctactaaagaatat

SEQ ID NO: 1361309 - DNA, 15 bp, Homo sapiens
tcctactaaagaata

SEQ ID NO: 1361310 - DNA, 15 bp, Homo sapiens
atcctactaaagaat

SEQ ID NO: 1361311 - DNA, 15 bp, Homo sapiens
gatcctactaaagaa

SEQ ID NO: 1361312 - DNA, 15 bp, Homo sapiens
agatcctactaaaga

SEQ ID NO: 1361313 - DNA, 15 bp, Homo sapiens
aagatcctactaaag

SEQ ID NO: 1361314 - DNA, 15 bp, Homo sapiens
taagatcctactaaa

SEQ ID NO: 1361315 - DNA, 15 bp, Homo sapiens
ataagatcctactaa

SEQ ID NO: 1361316 - DNA, 15 bp, Homo sapiens
tataagatcctacta

SEQ ID NO: 1361317 - DNA, 15 bp, Homo sapiens
gtataagatcctact

SEQ ID NO: 1361318 - DNA, 15 bp, Homo sapiens
agtataagatcctac

SEQ ID NO: 1361319 - DNA, 15 bp, Homo sapiens
aagtataagatccta

SEQ ID NO: 1361320 - DNA, 15 bp, Homo sapiens
aaagtataagatcct

SEQ ID NO: 1361321 - DNA, 15 bp, Homo sapiens
gaaagtataagatcc

SEQ ID NO: 1361322 - DNA, 15 bp, Homo sapiens
agaaagtataagatc

SEQ ID NO: 1361323 - DNA, 15 bp, Homo sapiens
gagaaagtataagat

SEQ ID NO: 1361324 - DNA, 15 bp, Homo sapiens
ggagaaagtataaga

SEQ ID NO: 1361325 - DNA, 15 bp, Homo sapiens
tggagaaagtataag

SEQ ID NO: 1361326 - DNA, 15 bp, Homo sapiens
atggagaaagtataa

SEQ ID NO: 1361327 - DNA, 15 bp, Homo sapiens
tatggagaaagtata

SEQ ID NO: 1361328 - DNA, 15 bp, Homo sapiens
ttatggagaaagtat

SEQ ID NO: 1361329 - DNA, 15 bp, Homo sapiens
attatggagaaagta

SEQ ID NO: 1361330 - DNA, 15 bp, Homo sapiens
cattatggagaaagt

SEQ ID NO: 1361331 - DNA, 15 bp, Homo sapiens
ccattatggagaaag

SEQ ID NO: 1361332 - DNA, 15 bp, Homo sapiens
accattatggagaaa

SEQ ID NO: 1361333 - DNA, 15 bp, Homo sapiens
gaccattatggagaa

SEQ ID NO: 1361334 - DNA, 15 bp, Homo sapiens
ggaccattatggaga

SEQ ID NO: 1361335 - DNA, 15 bp, Homo sapiens
aggaccattatggag

SEQ ID NO: 1361336 - DNA, 15 bp, Homo sapiens
taggaccattatgga

SEQ ID NO: 1361337 - DNA, 15 bp, Homo sapiens
ataggaccattatgg

SEQ ID NO: 1361338 - DNA, 15 bp, Homo sapiens
cataggaccattatg

SEQ ID NO: 1361339 - DNA, 15 bp, Homo sapiens
ccataggaccattat

SEQ ID NO: 1361340 - DNA, 15 bp, Homo sapiens
tccataggaccatta

SEQ ID NO: 1361341 - DNA, 15 bp, Homo sapiens
atccataggaccatt

SEQ ID NO: 1361342 - DNA, 15 bp, Homo sapiens
aatccataggaccat

SEQ ID NO: 1361343 - DNA, 15 bp, Homo sapiens
gaatccataggacca

SEQ ID NO: 1361344 - DNA, 15 bp, Homo sapiens
agaatccataggacc

SEQ ID NO: 1361345 - DNA, 15 bp, Homo sapiens
aagaatccataggac

SEQ ID NO: 1361346 - DNA, 15 bp, Homo sapiens
aaagaatccatagga

SEQ ID NO: 1361347 - DNA, 15 bp, Homo sapiens
caaagaatccatagg

SEQ ID NO: 1361348 - DNA, 15 bp, Homo sapiens
acaaagaatccatag

SEQ ID NO: 1361349 - DNA, 15 bp, Homo sapiens
aacaaagaatccata

SEQ ID NO: 1361350 - DNA, 15 bp, Homo sapiens
taacaaagaatccat

SEQ ID NO: 1361351 - DNA, 15 bp, Homo sapiens
ttaacaaagaatcca

SEQ ID NO: 1361352 - DNA, 15 bp, Homo sapiens
cttaacaaagaatcc

SEQ ID NO: 1361353 - DNA, 15 bp, Homo sapiens
ccttaacaaagaatc

SEQ ID NO: 1361354 - DNA, 15 bp, Homo sapiens
accttaacaaagaat

SEQ ID NO: 1361355 - DNA, 15 bp, Homo sapiens
taccttaacaaagaa

SEQ ID NO: 1361356 - DNA, 15 bp, Homo sapiens
ttaccttaacaaaga

SEQ ID NO: 1361357 - DNA, 15 bp, Homo sapiens
attaccttaacaaag

SEQ ID NO: 1361358 - DNA, 15 bp, Homo sapiens
aattaccttaacaaa

SEQ ID NO: 1361359 - DNA, 15 bp, Homo sapiens
aaattaccttaacaa

SEQ ID NO: 1361360 - DNA, 15 bp, Homo sapiens
gaaattaccttaaca

SEQ ID NO: 1361361 - DNA, 15 bp, Homo sapiens
agaaattaccttaac

SEQ ID NO: 1361362 - DNA, 15 bp, Homo sapiens
tagaaattaccttaa

SEQ ID NO: 1361363 - DNA, 15 bp, Homo sapiens
atagaaattacctta

SEQ ID NO: 1361364 - DNA, 15 bp, Homo sapiens
catagaaattacctt

SEQ ID NO: 1361365 - DNA, 15 bp, Homo sapiens
acatagaaattacct

SEQ ID NO: 1361366 - DNA, 15 bp, Homo sapiens
tacatagaaattacc

SEQ ID NO: 1361367 - DNA, 15 bp, Homo sapiens
ctacatagaaattac

SEQ ID NO: 1361368 - DNA, 15 bp, Homo sapiens
tctacatagaaatta

SEQ ID NO: 1361369 - DNA, 15 bp, Homo sapiens
atctacatagaaatt

SEQ ID NO: 1361370 - DNA, 15 bp, Homo sapiens
tatctacatagaaat

SEQ ID NO: 1361371 - DNA, 15 bp, Homo sapiens
ctatctacatagaaa

SEQ ID NO: 1361372 - DNA, 15 bp, Homo sapiens
actatctacatagaa

SEQ ID NO: 1361373 - DNA, 15 bp, Homo sapiens
aactatctacataga

SEQ ID NO: 1361374 - DNA, 15 bp, Homo sapiens
aaactatctacatag

SEQ ID NO: 1361375 - DNA, 15 bp, Homo sapiens
taaactatctacata

SEQ ID NO: 1361376 - DNA, 15 bp, Homo sapiens
ataaactatctacat

SEQ ID NO: 1361377 - DNA, 15 bp, Homo sapiens
tataaactatctaca

SEQ ID NO: 1361378 - DNA, 15 bp, Homo sapiens
atataaactatctac

SEQ ID NO: 1361379 - DNA, 15 bp, Homo sapiens
aatataaactatcta

SEQ ID NO: 1361380 - DNA, 15 bp, Homo sapiens
gaatataaactatct

SEQ ID NO: 1361381 - DNA, 15 bp, Homo sapiens
tgaatataaactatc

SEQ ID NO: 1361382 - DNA, 15 bp, Homo sapiens
atgaatataaactat

SEQ ID NO: 1361383 - DNA, 15 bp, Homo sapiens
tatgaatataaacta

SEQ ID NO: 1361384 - DNA, 15 bp, Homo sapiens
ctatgaatataaact

SEQ ID NO: 1361385 - DNA, 15 bp, Homo sapiens
gctatgaatataaac

SEQ ID NO: 1361386 - DNA, 15 bp, Homo sapiens
ggctatgaatataaa

SEQ ID NO: 1361387 - DNA, 15 bp, Homo sapiens
aggctatgaatataa

SEQ ID NO: 1361388 - DNA, 15 bp, Homo sapiens
aaggctatgaatata

SEQ ID NO: 1361389 - DNA, 15 bp, Homo sapiens
aaaggctatgaatat

SEQ ID NO: 1361390 - DNA, 15 bp, Homo sapiens
caaaggctatgaata

SEQ ID NO: 1361391 - DNA, 15 bp, Homo sapiens
ccaaaggctatgaat

SEQ ID NO: 1361392 - DNA, 15 bp, Homo sapiens
tccaaaggctatgaa

SEQ ID NO: 1361393 - DNA, 15 bp, Homo sapiens
atccaaaggctatga

SEQ ID NO: 1361394 - DNA, 15 bp, Homo sapiens
tatccaaaggctatg

SEQ ID NO: 1361395 - DNA, 15 bp, Homo sapiens
ttatccaaaggctat

SEQ ID NO: 1361396 - DNA, 15 bp, Homo sapiens
attatccaaaggcta

SEQ ID NO: 1361397 - DNA, 15 bp, Homo sapiens
tattatccaaaggct

SEQ ID NO: 1361398 - DNA, 15 bp, Homo sapiens
atattatccaaaggc

SEQ ID NO: 1361399 - DNA, 15 bp, Homo sapiens
gatattatccaaagg

SEQ ID NO: 1361400 - DNA, 15 bp, Homo sapiens
tgatattatccaaag

SEQ ID NO: 1361401 - DNA, 15 bp, Homo sapiens
atgatattatccaaa

SEQ ID NO: 1361402 - DNA, 15 bp, Homo sapiens
tatgatattatccaa

SEQ ID NO: 1361403 - DNA, 15 bp, Homo sapiens
atatgatattatcca

SEQ ID NO: 1361404 - DNA, 15 bp, Homo sapiens
aatatgatattatcc

SEQ ID NO: 1361405 - DNA, 15 bp, Homo sapiens
aaatatgatattatc

SEQ ID NO: 1361406 - DNA, 15 bp, Homo sapiens
aaaatatgatattat

SEQ ID NO: 1361407 - DNA, 15 bp, Homo sapiens
gaaaatatgatatta

SEQ ID NO: 1361408 - DNA, 15 bp, Homo sapiens
agaaaatatgatatt

SEQ ID NO: 1361409 - DNA, 15 bp, Homo sapiens
tagaaaatatgatat

SEQ ID NO: 1361410 - DNA, 15 bp, Homo sapiens
atagaaaatatgata

SEQ ID NO: 1361411 - DNA, 15 bp, Homo sapiens
gatagaaaatatgat

SEQ ID NO: 1361412 - DNA, 15 bp, Homo sapiens
agatagaaaatatga

SEQ ID NO: 1361413 - DNA, 15 bp, Homo sapiens
cagatagaaaatatg

SEQ ID NO: 1361414 - DNA, 15 bp, Homo sapiens
tcagatagaaaatat

SEQ ID NO: 1361415 - DNA, 15 bp, Homo sapiens
atcagatagaaaata

SEQ ID NO: 1361416 - DNA, 15 bp, Homo sapiens
aatcagatagaaaat

SEQ ID NO: 1361417 - DNA, 15 bp, Homo sapiens
aaatcagatagaaaa

SEQ ID NO: 1361418 - DNA, 15 bp, Homo sapiens
aaaatcagatagaaa

SEQ ID NO: 1361419 - DNA, 15 bp, Homo sapiens
aaaaatcagatagaa

SEQ ID NO: 1361420 - DNA, 15 bp, Homo sapiens
caaaaatcagataga

SEQ ID NO: 1361421 - DNA, 15 bp, Homo sapiens
gcaaaaatcagatag

SEQ ID NO: 1361422 - DNA, 15 bp, Homo sapiens
agcaaaaatcagata

SEQ ID NO: 1361423 - DNA, 15 bp, Homo sapiens
tagcaaaaatcagat

SEQ ID NO: 1361424 - DNA, 15 bp, Homo sapiens
ttagcaaaaatcaga

SEQ ID NO: 1361425 - DNA, 15 bp, Homo sapiens
attagcaaaaatcag

SEQ ID NO: 1361426 - DNA, 15 bp, Homo sapiens
tattagcaaaaatca

SEQ ID NO: 1361427 - DNA, 15 bp, Homo sapiens
atattagcaaaaatc

SEQ ID NO: 1361428 - DNA, 15 bp, Homo sapiens
tatattagcaaaaat

SEQ ID NO: 1361429 - DNA, 15 bp, Homo sapiens
ttatattagcaaaaa

SEQ ID NO: 1361430 - DNA, 15 bp, Homo sapiens
tttatattagcaaaa

SEQ ID NO: 1361431 - DNA, 15 bp, Homo sapiens
ttttatattagcaaa

SEQ ID NO: 1361432 - DNA, 15 bp, Homo sapiens
tttttatattagcaa

SEQ ID NO: 1361433 - DNA, 15 bp, Homo sapiens
atttttatattagca

SEQ ID NO: 1361434 - DNA, 15 bp, Homo sapiens
tatttttatattagc

SEQ ID NO: 1361435 - DNA, 15 bp, Homo sapiens
gtatttttatattag

SEQ ID NO: 1361436 - DNA, 15 bp, Homo sapiens
agtatttttatatta

SEQ ID NO: 1361437 - DNA, 15 bp, Homo sapiens
tagtatttttatatt

SEQ ID NO: 1361438 - DNA, 15 bp, Homo sapiens
ttagtatttttatat

SEQ ID NO: 1361439 - DNA, 15 bp, Homo sapiens
cttagtatttttata

SEQ ID NO: 1361440 - DNA, 15 bp, Homo sapiens
acttagtatttttat

SEQ ID NO: 1361441 - DNA, 15 bp, Homo sapiens
aacttagtattttta

SEQ ID NO: 1361442 - DNA, 15 bp, Homo sapiens
taacttagtattttt

SEQ ID NO: 1361443 - DNA, 15 bp, Homo sapiens
ttaacttagtatttt

SEQ ID NO: 1361444 - DNA, 15 bp, Homo sapiens
attaacttagtattt

SEQ ID NO: 1361445 - DNA, 15 bp, Homo sapiens
aattaacttagtatt

SEQ ID NO: 1361446 - DNA, 15 bp, Homo sapiens
aaattaacttagtat

SEQ ID NO: 1361447 - DNA, 15 bp, Homo sapiens
taaattaacttagta

SEQ ID NO: 1361448 - DNA, 15 bp, Homo sapiens
ttaaattaacttagt

SEQ ID NO: 1361449 - DNA, 15 bp, Homo sapiens
tttaaattaacttag

SEQ ID NO: 1361450 - DNA, 15 bp, Homo sapiens
gtttaaattaactta

SEQ ID NO: 1361451 - DNA, 15 bp, Homo sapiens
agtttaaattaactt

SEQ ID NO: 1361452 - DNA, 15 bp, Homo sapiens
aagtttaaattaact

SEQ ID NO: 1361453 - DNA, 15 bp, Homo sapiens
caagtttaaattaac

SEQ ID NO: 1361454 - DNA, 15 bp, Homo sapiens
gcaagtttaaattaa

SEQ ID NO: 1361455 - DNA, 15 bp, Homo sapiens
agcaagtttaaatta

SEQ ID NO: 1361456 - DNA, 15 bp, Homo sapiens
tagcaagtttaaatt

SEQ ID NO: 1361457 - DNA, 15 bp, Homo sapiens
ttagcaagtttaaat

SEQ ID NO: 1361458 - DNA, 15 bp, Homo sapiens
tttagcaagtttaaa

SEQ ID NO: 1361459 - DNA, 15 bp, Homo sapiens
gtttagcaagtttaa

SEQ ID NO: 1361460 - DNA, 15 bp, Homo sapiens
tgtttagcaagttta

SEQ ID NO: 1361461 - DNA, 15 bp, Homo sapiens
atgtttagcaagttt

SEQ ID NO: 1361462 - DNA, 15 bp, Homo sapiens
aatgtttagcaagtt

SEQ ID NO: 1361463 - DNA, 15 bp, Homo sapiens
gaatgtttagcaagt

SEQ ID NO: 1361464 - DNA, 15 bp, Homo sapiens
tgaatgtttagcaag

SEQ ID NO: 1361465 - DNA, 15 bp, Homo sapiens
atgaatgtttagcaa

SEQ ID NO: 1361466 - DNA, 15 bp, Homo sapiens
tatgaatgtttagca

SEQ ID NO: 1361467 - DNA, 15 bp, Homo sapiens
atatgaatgtttagc

SEQ ID NO: 1361468 - DNA, 15 bp, Homo sapiens
aatatgaatgtttag

SEQ ID NO: 1361469 - DNA, 15 bp, Homo sapiens
taatatgaatgttta

SEQ ID NO: 1361470 - DNA, 15 bp, Homo sapiens
ctaatatgaatgttt

SEQ ID NO: 1361471 - DNA, 15 bp, Homo sapiens
actaatatgaatgtt

SEQ ID NO: 1361472 - DNA, 15 bp, Homo sapiens
aactaatatgaatgt

SEQ ID NO: 1361473 - DNA, 15 bp, Homo sapiens
aaactaatatgaatg

SEQ ID NO: 1361474 - DNA, 15 bp, Homo sapiens
aaaactaatatgaat

SEQ ID NO: 1361475 - DNA, 15 bp, Homo sapiens
aaaaactaatatgaa

SEQ ID NO: 1361476 - DNA, 15 bp, Homo sapiens
taaaaactaatatga

SEQ ID NO: 1361477 - DNA, 15 bp, Homo sapiens
ataaaaactaatatg

SEQ ID NO: 1361478 - DNA, 15 bp, Homo sapiens
tataaaaactaatat

SEQ ID NO: 1361479 - DNA, 15 bp, Homo sapiens
ctataaaaactaata

SEQ ID NO: 1361480 - DNA, 15 bp, Homo sapiens
actataaaaactaat

SEQ ID NO: 1361481 - DNA, 15 bp, Homo sapiens
aactataaaaactaa

SEQ ID NO: 1361482 - DNA, 15 bp, Homo sapiens
aaactataaaaacta

SEQ ID NO: 1361483 - DNA, 15 bp, Homo sapiens
taaactataaaaact

SEQ ID NO: 1361484 - DNA, 15 bp, Homo sapiens
ataaactataaaaac

SEQ ID NO: 1361485 - DNA, 15 bp, Homo sapiens
aataaactataaaaa

SEQ ID NO: 1361486 - DNA, 15 bp, Homo sapiens
gaataaactataaaa

SEQ ID NO: 1361487 - DNA, 15 bp, Homo sapiens
tgaataaactataaa

SEQ ID NO: 1361488 - DNA, 15 bp, Homo sapiens
atgaataaactataa

SEQ ID NO: 1361489 - DNA, 15 bp, Homo sapiens
catgaataaactata

SEQ ID NO: 1361490 - DNA, 15 bp, Homo sapiens
tcatgaataaactat

SEQ ID NO: 1361491 - DNA, 15 bp, Homo sapiens
ttcatgaataaacta

SEQ ID NO: 1361492 - DNA, 15 bp, Homo sapiens
attcatgaataaact

SEQ ID NO: 1361493 - DNA, 15 bp, Homo sapiens
aattcatgaataaac

SEQ ID NO: 1361494 - DNA, 15 bp, Homo sapiens
gaattcatgaataaa

SEQ ID NO: 1361495 - DNA, 15 bp, Homo sapiens
agaattcatgaataa

SEQ ID NO: 1361496 - DNA, 15 bp, Homo sapiens
aagaattcatgaata

SEQ ID NO: 1361497 - DNA, 15 bp, Homo sapiens
aaagaattcatgaat

SEQ ID NO: 1361498 - DNA, 15 bp, Homo sapiens
aaaagaattcatgaa

SEQ ID NO: 1361499 - DNA, 15 bp, Homo sapiens
aaaaagaattcatga

SEQ ID NO: 1361500 - DNA, 15 bp, Homo sapiens
aaaaaagaattcatg

SEQ ID NO: 1361501 - DNA, 15 bp, Homo sapiens
taaaaaagaattcat

SEQ ID NO: 1361502 - DNA, 15 bp, Homo sapiens
ataaaaaagaattca

SEQ ID NO: 1361503 - DNA, 15 bp, Homo sapiens
cataaaaaagaattc

SEQ ID NO: 1361504 - DNA, 15 bp, Homo sapiens
acataaaaaagaatt

SEQ ID NO: 1361505 - DNA, 15 bp, Homo sapiens
aacataaaaaagaat

SEQ ID NO: 1361506 - DNA, 15 bp, Homo sapiens
aaacataaaaaagaa

SEQ ID NO: 1361507 - DNA, 15 bp, Homo sapiens
caaacataaaaaaga

SEQ ID NO: 1361508 - DNA, 15 bp, Homo sapiens
tcaaacataaaaaag

SEQ ID NO: 1361509 - DNA, 15 bp, Homo sapiens
atcaaacataaaaaa

SEQ ID NO: 1361510 - DNA, 15 bp, Homo sapiens
catcaaacataaaaa

SEQ ID NO: 1361511 - DNA, 15 bp, Homo sapiens
acatcaaacataaaa

SEQ ID NO: 1361512 - DNA, 15 bp, Homo sapiens
tacatcaaacataaa

SEQ ID NO: 1361513 - DNA, 15 bp, Homo sapiens
ttacatcaaacataa

SEQ ID NO: 1361514 - DNA, 15 bp, Homo sapiens
tttacatcaaacata

SEQ ID NO: 1361515 - DNA, 15 bp, Homo sapiens
atttacatcaaacat

SEQ ID NO: 1361516 - DNA, 15 bp, Homo sapiens
tatttacatcaaaca

SEQ ID NO: 1361517 - DNA, 15 bp, Homo sapiens
ttatttacatcaaac

SEQ ID NO: 1361518 - DNA, 15 bp, Homo sapiens
attatttacatcaaa

SEQ ID NO: 1361519 - DNA, 15 bp, Homo sapiens
aattatttacatcaa

SEQ ID NO: 1361520 - DNA, 15 bp, Homo sapiens
taattatttacatca

SEQ ID NO: 1361521 - DNA, 15 bp, Homo sapiens
ataattatttacatc

SEQ ID NO: 1361522 - DNA, 15 bp, Homo sapiens
cataattatttacat

SEQ ID NO: 1361523 - DNA, 15 bp, Homo sapiens
acataattatttaca

SEQ ID NO: 1361524 - DNA, 15 bp, Homo sapiens
gacataattatttac

SEQ ID NO: 1361525 - DNA, 15 bp, Homo sapiens
tgacataattattta

SEQ ID NO: 1361526 - DNA, 15 bp, Homo sapiens
atgacataattattt

SEQ ID NO: 1361527 - DNA, 15 bp, Homo sapiens
aatgacataattatt

SEQ ID NO: 1361528 - DNA, 15 bp, Homo sapiens
aaatgacataattat

SEQ ID NO: 1361529 - DNA, 15 bp, Homo sapiens
aaaatgacataatta

SEQ ID NO: 1361530 - DNA, 15 bp, Homo sapiens
gaaaatgacataatt

SEQ ID NO: 1361531 - DNA, 15 bp, Homo sapiens
tgaaaatgacataat

SEQ ID NO: 1361532 - DNA, 15 bp, Homo sapiens
ttgaaaatgacataa

SEQ ID NO: 1361533 - DNA, 15 bp, Homo sapiens
tttgaaaatgacata

SEQ ID NO: 1361534 - DNA, 15 bp, Homo sapiens
atttgaaaatgacat

SEQ ID NO: 1361535 - DNA, 15 bp, Homo sapiens
tatttgaaaatgaca

SEQ ID NO: 1361536 - DNA, 15 bp, Homo sapiens
ttatttgaaaatgac

SEQ ID NO: 1361537 - DNA, 15 bp, Homo sapiens
attatttgaaaatga

SEQ ID NO: 1361538 - DNA, 15 bp, Homo sapiens
tattatttgaaaatg

SEQ ID NO: 1361539 - DNA, 15 bp, Homo sapiens
ttattatttgaaaat

SEQ ID NO: 1361540 - DNA, 15 bp, Homo sapiens
gttattatttgaaaa

SEQ ID NO: 1361541 - DNA, 15 bp, Homo sapiens
tgttattatttgaaa

SEQ ID NO: 1361542 - DNA, 15 bp, Homo sapiens
ttgttattatttgaa

SEQ ID NO: 1361543 - DNA, 15 bp, Homo sapiens
attgttattatttga

SEQ ID NO: 1361544 - DNA, 15 bp, Homo sapiens
aattgttattatttg

SEQ ID NO: 1361545 - DNA, 15 bp, Homo sapiens
gaattgttattattt

SEQ ID NO: 1361546 - DNA, 15 bp, Homo sapiens
agaattgttattatt

SEQ ID NO: 1361547 - DNA, 15 bp, Homo sapiens
cagaattgttattat

SEQ ID NO: 1361548 - DNA, 15 bp, Homo sapiens
acagaattgttatta

SEQ ID NO: 1361549 - DNA, 15 bp, Homo sapiens
gacagaattgttatt

SEQ ID NO: 1361550 - DNA, 15 bp, Homo sapiens
agacagaattgttat

SEQ ID NO: 1361551 - DNA, 15 bp, Homo sapiens
gagacagaattgtta

SEQ ID NO: 1361552 - DNA, 15 bp, Homo sapiens
agagacagaattgtt

SEQ ID NO: 1361553 - DNA, 15 bp, Homo sapiens
aagagacagaattgt

SEQ ID NO: 1361554 - DNA, 15 bp, Homo sapiens
gaagagacagaattg

SEQ ID NO: 1361555 - DNA, 15 bp, Homo sapiens
ggaagagacagaatt

SEQ ID NO: 1361556 - DNA, 15 bp, Homo sapiens
gggaagagacagaat

SEQ ID NO: 1361557 - DNA, 15 bp, Homo sapiens
agggaagagacagaa

SEQ ID NO: 1361558 - DNA, 15 bp, Homo sapiens
aagggaagagacaga

SEQ ID NO: 1361559 - DNA, 15 bp, Homo sapiens
gaagggaagagacag

SEQ ID NO: 1361560 - DNA, 15 bp, Homo sapiens
agaagggaagagaca

SEQ ID NO: 1361561 - DNA, 15 bp, Homo sapiens
tagaagggaagagac

SEQ ID NO: 1361562 - DNA, 15 bp, Homo sapiens
ttagaagggaagaga

SEQ ID NO: 1361563 - DNA, 15 bp, Homo sapiens
attagaagggaagag

SEQ ID NO: 1361564 - DNA, 15 bp, Homo sapiens
aattagaagggaaga

SEQ ID NO: 1361565 - DNA, 15 bp, Homo sapiens
gaattagaagggaag

SEQ ID NO: 1361566 - DNA, 15 bp, Homo sapiens
agaattagaagggaa

SEQ ID NO: 1361567 - DNA, 15 bp, Homo sapiens
aagaattagaaggga

SEQ ID NO: 1361568 - DNA, 15 bp, Homo sapiens
taagaattagaaggg

SEQ ID NO: 1361569 - DNA, 15 bp, Homo sapiens
ataagaattagaagg

SEQ ID NO: 1361570 - DNA, 15 bp, Homo sapiens
aataagaattagaag

SEQ ID NO: 1361571 - DNA, 15 bp, Homo sapiens
gaataagaattagaa

SEQ ID NO: 1361572 - DNA, 15 bp, Homo sapiens
agaataagaattaga

SEQ ID NO: 1361573 - DNA, 15 bp, Homo sapiens
aagaataagaattag

SEQ ID NO: 1361574 - DNA, 15 bp, Homo sapiens
aaagaataagaatta

SEQ ID NO: 1361575 - DNA, 15 bp, Homo sapiens
taaagaataagaatt

SEQ ID NO: 1361576 - DNA, 15 bp, Homo sapiens
ataaagaataagaat

SEQ ID NO: 1361577 - DNA, 15 bp, Homo sapiens
aataaagaataagaa

SEQ ID NO: 1361578 - DNA, 15 bp, Homo sapiens
aaataaagaataaga

SEQ ID NO: 1361579 - DNA, 15 bp, Homo sapiens
taaataaagaataag

SEQ ID NO: 1361580 - DNA, 15 bp, Homo sapiens
ataaataaagaataa

SEQ ID NO: 1361581 - DNA, 15 bp, Homo sapiens
aataaataaagaata

SEQ ID NO: 1361582 - DNA, 15 bp, Homo sapiens
aaataaataaagaat

SEQ ID NO: 1361583 - DNA, 15 bp, Homo sapiens
aaaataaataaagaa

SEQ ID NO: 1361584 - DNA, 15 bp, Homo sapiens
gaaaataaataaaga

SEQ ID NO: 1361585 - DNA, 15 bp, Homo sapiens
agaaaataaataaag

SEQ ID NO: 1361586 - DNA, 15 bp, Homo sapiens
aagaaaataaataaa

SEQ ID NO: 1361587 - DNA, 15 bp, Homo sapiens
taagaaaataaataa

SEQ ID NO: 1361588 - DNA, 15 bp, Homo sapiens
ataagaaaataaata

SEQ ID NO: 1361589 - DNA, 15 bp, Homo sapiens
tataagaaaataaat

SEQ ID NO: 1361590 - DNA, 15 bp, Homo sapiens
ctataagaaaataaa

SEQ ID NO: 1361591 - DNA, 15 bp, Homo sapiens
gctataagaaaataa

SEQ ID NO: 1361592 - DNA, 15 bp, Homo sapiens
tgctataagaaaata

SEQ ID NO: 1361593 - DNA, 15 bp, Homo sapiens
atgctataagaaaat

SEQ ID NO: 1361594 - DNA, 15 bp, Homo sapiens
tatgctataagaaaa

SEQ ID NO: 1361595 - DNA, 15 bp, Homo sapiens
ctatgctataagaaa

SEQ ID NO: 1361596 - DNA, 15 bp, Homo sapiens
tctatgctataagaa

SEQ ID NO: 1361597 - DNA, 15 bp, Homo sapiens
ttctatgctataaga

SEQ ID NO: 1361598 - DNA, 15 bp, Homo sapiens
tttctatgctataag

SEQ ID NO: 1361599 - DNA, 15 bp, Homo sapiens
ctttctatgctataa

SEQ ID NO: 1361600 - DNA, 15 bp, Homo sapiens
cctttctatgctata

SEQ ID NO: 1361601 - DNA, 15 bp, Homo sapiens
tcctttctatgctat

SEQ ID NO: 1361602 - DNA, 15 bp, Homo sapiens
atcctttctatgcta

SEQ ID NO: 1361603 - DNA, 15 bp, Homo sapiens
tatcctttctatgct

SEQ ID NO: 1361604 - DNA, 15 bp, Homo sapiens
gtatcctttctatgc

SEQ ID NO: 1361605 - DNA, 15 bp, Homo sapiens
agtatcctttctatg

SEQ ID NO: 1361606 - DNA, 15 bp, Homo sapiens
tagtatcctttctat

SEQ ID NO: 1361607 - DNA, 15 bp, Homo sapiens
atagtatcctttcta

SEQ ID NO: 1361608 - DNA, 15 bp, Homo sapiens
catagtatcctttct

SEQ ID NO: 1361609 - DNA, 15 bp, Homo sapiens
acatagtatcctttc

SEQ ID NO: 1361610 - DNA, 15 bp, Homo sapiens
tacatagtatccttt

SEQ ID NO: 1361611 - DNA, 15 bp, Homo sapiens
gtacatagtatcctt

SEQ ID NO: 1361612 - DNA, 15 bp, Homo sapiens
agtacatagtatcct

SEQ ID NO: 1361613 - DNA, 15 bp, Homo sapiens
cagtacatagtatcc

SEQ ID NO: 1361614 - DNA, 15 bp, Homo sapiens
acagtacatagtatc

SEQ ID NO: 1361615 - DNA, 15 bp, Homo sapiens
tacagtacatagtat

SEQ ID NO: 1361616 - DNA, 15 bp, Homo sapiens
gtacagtacatagta

SEQ ID NO: 1361617 - DNA, 15 bp, Homo sapiens
ggtacagtacatagt

SEQ ID NO: 1361618 - DNA, 15 bp, Homo sapiens
tggtacagtacatag

SEQ ID NO: 1361619 - DNA, 15 bp, Homo sapiens
ttggtacagtacata

SEQ ID NO: 1361620 - DNA, 15 bp, Homo sapiens
tttggtacagtacat

SEQ ID NO: 1361621 - DNA, 15 bp, Homo sapiens
atttggtacagtaca

SEQ ID NO: 1361622 - DNA, 15 bp, Homo sapiens
tatttggtacagtac

SEQ ID NO: 1361623 - DNA, 15 bp, Homo sapiens
ctatttggtacagta

SEQ ID NO: 1361624 - DNA, 15 bp, Homo sapiens
actatttggtacagt

SEQ ID NO: 1361625 - DNA, 15 bp, Homo sapiens
tactatttggtacag

SEQ ID NO: 1361626 - DNA, 15 bp, Homo sapiens
ctactatttggtaca

SEQ ID NO: 1361627 - DNA, 15 bp, Homo sapiens
actactatttggtac

SEQ ID NO: 1361628 - DNA, 15 bp, Homo sapiens
tactactatttggta

SEQ ID NO: 1361629 - DNA, 15 bp, Homo sapiens
ttactactatttggt

SEQ ID NO: 1361630 - DNA, 15 bp, Homo sapiens
tttactactatttgg

SEQ ID NO: 1361631 - DNA, 15 bp, Homo sapiens
ctttactactatttg

SEQ ID NO: 1361632 - DNA, 15 bp, Homo sapiens
tctttactactattt

SEQ ID NO: 1361633 - DNA, 15 bp, Homo sapiens
atctttactactatt

SEQ ID NO: 1361634 - DNA, 15 bp, Homo sapiens
aatctttactactat

SEQ ID NO: 1361635 - DNA, 15 bp, Homo sapiens
caatctttactacta

SEQ ID NO: 1361636 - DNA, 15 bp, Homo sapiens
acaatctttactact

SEQ ID NO: 1361637 - DNA, 15 bp, Homo sapiens
cacaatctttactac

SEQ ID NO: 1361638 - DNA, 15 bp, Homo sapiens
ccacaatctttacta

SEQ ID NO: 1361639 - DNA, 15 bp, Homo sapiens
gccacaatctttact

SEQ ID NO: 1361640 - DNA, 15 bp, Homo sapiens
ggccacaatctttac

SEQ ID NO: 1361641 - DNA, 15 bp, Homo sapiens
tggccacaatcttta

SEQ ID NO: 1361642 - DNA, 15 bp, Homo sapiens
atggccacaatcttt

SEQ ID NO: 1361643 - DNA, 15 bp, Homo sapiens
gatggccacaatctt

SEQ ID NO: 1361644 - DNA, 15 bp, Homo sapiens
ggatggccacaatct

SEQ ID NO: 1361645 - DNA, 15 bp, Homo sapiens
aggatggccacaatc

SEQ ID NO: 1361646 - DNA, 15 bp, Homo sapiens
aaggatggccacaat

SEQ ID NO: 1361647 - DNA, 15 bp, Homo sapiens
caaggatggccacaa

SEQ ID NO: 1361648 - DNA, 15 bp, Homo sapiens
acaaggatggccaca

SEQ ID NO: 1361649 - DNA, 15 bp, Homo sapiens
aacaaggatggccac

SEQ ID NO: 1361650 - DNA, 15 bp, Homo sapiens
aaacaaggatggcca

SEQ ID NO: 1361651 - DNA, 15 bp, Homo sapiens
aaaacaaggatggcc

SEQ ID NO: 1361652 - DNA, 15 bp, Homo sapiens
caaaacaaggatggc

SEQ ID NO: 1361653 - DNA, 15 bp, Homo sapiens
acaaaacaaggatgg

SEQ ID NO: 1361654 - DNA, 15 bp, Homo sapiens
cacaaaacaaggatg

SEQ ID NO: 1361655 - DNA, 15 bp, Homo sapiens
acacaaaacaaggat

SEQ ID NO: 1361656 - DNA, 15 bp, Homo sapiens
gacacaaaacaagga

SEQ ID NO: 1361657 - DNA, 15 bp, Homo sapiens
agacacaaaacaagg

SEQ ID NO: 1361658 - DNA, 15 bp, Homo sapiens
cagacacaaaacaag

SEQ ID NO: 1361659 - DNA, 15 bp, Homo sapiens
tcagacacaaaacaa

SEQ ID NO: 1361660 - DNA, 15 bp, Homo sapiens
gtcagacacaaaaca

SEQ ID NO: 1361661 - DNA, 15 bp, Homo sapiens
ggtcagacacaaaac

SEQ ID NO: 1361662 - DNA, 15 bp, Homo sapiens
aggtcagacacaaaa

SEQ ID NO: 1361663 - DNA, 15 bp, Homo sapiens
aaggtcagacacaaa

SEQ ID NO: 1361664 - DNA, 15 bp, Homo sapiens
taaggtcagacacaa

SEQ ID NO: 1361665 - DNA, 15 bp, Homo sapiens
ttaaggtcagacaca

SEQ ID NO: 1361666 - DNA, 15 bp, Homo sapiens
tttaaggtcagacac

SEQ ID NO: 1361667 - DNA, 15 bp, Homo sapiens
ctttaaggtcagaca

SEQ ID NO: 1361668 - DNA, 15 bp, Homo sapiens
actttaaggtcagac

SEQ ID NO: 1361669 - DNA, 15 bp, Homo sapiens
tactttaaggtcaga

SEQ ID NO: 1361670 - DNA, 15 bp, Homo sapiens
atactttaaggtcag

SEQ ID NO: 1361671 - DNA, 15 bp, Homo sapiens
gatactttaaggtca

SEQ ID NO: 1361672 - DNA, 15 bp, Homo sapiens
agatactttaaggtc

SEQ ID NO: 1361673 - DNA, 15 bp, Homo sapiens
gagatactttaaggt

SEQ ID NO: 1361674 - DNA, 15 bp, Homo sapiens
ggagatactttaagg

SEQ ID NO: 1361675 - DNA, 15 bp, Homo sapiens
tggagatactttaag

SEQ ID NO: 1361676 - DNA, 15 bp, Homo sapiens
atggagatactttaa

SEQ ID NO: 1361677 - DNA, 15 bp, Homo sapiens
aatggagatacttta

SEQ ID NO: 1361678 - DNA, 15 bp, Homo sapiens
taatggagatacttt

SEQ ID NO: 1361679 - DNA, 15 bp, Homo sapiens
ttaatggagatactt

SEQ ID NO: 1361680 - DNA, 15 bp, Homo sapiens
cttaatggagatact

SEQ ID NO: 1361681 - DNA, 15 bp, Homo sapiens
acttaatggagatac

SEQ ID NO: 1361682 - DNA, 15 bp, Homo sapiens
tacttaatggagata

SEQ ID NO: 1361683 - DNA, 15 bp, Homo sapiens
gtacttaatggagat

SEQ ID NO: 1361684 - DNA, 15 bp, Homo sapiens
cgtacttaatggaga

SEQ ID NO: 1361685 - DNA, 15 bp, Homo sapiens
tcgtacttaatggag

SEQ ID NO: 1361686 - DNA, 15 bp, Homo sapiens
atcgtacttaatgga

SEQ ID NO: 1361687 - DNA, 15 bp, Homo sapiens
catcgtacttaatgg

SEQ ID NO: 1361688 - DNA, 15 bp, Homo sapiens
acatcgtacttaatg

SEQ ID NO: 1361689 - DNA, 15 bp, Homo sapiens
aacatcgtacttaat

SEQ ID NO: 1361690 - DNA, 15 bp, Homo sapiens
aaacatcgtacttaa

SEQ ID NO: 1361691 - DNA, 15 bp, Homo sapiens
caaacatcgtactta

SEQ ID NO: 1361692 - DNA, 15 bp, Homo sapiens
gcaaacatcgtactt

SEQ ID NO: 1361693 - DNA, 15 bp, Homo sapiens
agcaaacatcgtact

SEQ ID NO: 1361694 - DNA, 15 bp, Homo sapiens
gagcaaacatcgtac

SEQ ID NO: 1361695 - DNA, 15 bp, Homo sapiens
agagcaaacatcgta

SEQ ID NO: 1361696 - DNA, 15 bp, Homo sapiens
tagagcaaacatcgt

SEQ ID NO: 1361697 - DNA, 15 bp, Homo sapiens
ctagagcaaacatcg

SEQ ID NO: 1361698 - DNA, 15 bp, Homo sapiens
gctagagcaaacatc

SEQ ID NO: 1361699 - DNA, 15 bp, Homo sapiens
ggctagagcaaacat

SEQ ID NO: 1361700 - DNA, 15 bp, Homo sapiens
aggctagagcaaaca

SEQ ID NO: 1361701 - DNA, 15 bp, Homo sapiens
aaggctagagcaaac

SEQ ID NO: 1361702 - DNA, 15 bp, Homo sapiens
aaaggctagagcaaa

SEQ ID NO: 1361703 - DNA, 15 bp, Homo sapiens
aaaaggctagagcaa

SEQ ID NO: 1361704 - DNA, 15 bp, Homo sapiens
caaaaggctagagca

SEQ ID NO: 1361705 - DNA, 15 bp, Homo sapiens
tcaaaaggctagagc

SEQ ID NO: 1361706 - DNA, 15 bp, Homo sapiens
atcaaaaggctagag

SEQ ID NO: 1361707 - DNA, 15 bp, Homo sapiens
tatcaaaaggctaga

SEQ ID NO: 1361708 - DNA, 15 bp, Homo sapiens
atatcaaaaggctag

SEQ ID NO: 1361709 - DNA, 15 bp, Homo sapiens
catatcaaaaggcta

SEQ ID NO: 1361710 - DNA, 15 bp, Homo sapiens
acatatcaaaaggct

SEQ ID NO: 1361711 - DNA, 15 bp, Homo sapiens
tacatatcaaaaggc

SEQ ID NO: 1361712 - DNA, 15 bp, Homo sapiens
ctacatatcaaaagg

SEQ ID NO: 1361713 - DNA, 15 bp, Homo sapiens
gctacatatcaaaag

SEQ ID NO: 1361714 - DNA, 15 bp, Homo sapiens
agctacatatcaaaa

SEQ ID NO: 1361715 - DNA, 15 bp, Homo sapiens
aagctacatatcaaa

SEQ ID NO: 1361716 - DNA, 15 bp, Homo sapiens
gaagctacatatcaa

SEQ ID NO: 1361717 - DNA, 15 bp, Homo sapiens
agaagctacatatca

SEQ ID NO: 1361718 - DNA, 15 bp, Homo sapiens
tagaagctacatatc

SEQ ID NO: 1361719 - DNA, 15 bp, Homo sapiens
atagaagctacatat

SEQ ID NO: 1361720 - DNA, 15 bp, Homo sapiens
tatagaagctacata

SEQ ID NO: 1361721 - DNA, 15 bp, Homo sapiens
ctatagaagctacat

SEQ ID NO: 1361722 - DNA, 15 bp, Homo sapiens
tctatagaagctaca

SEQ ID NO: 1361723 - DNA, 15 bp, Homo sapiens
ctctatagaagctac

SEQ ID NO: 1361724 - DNA, 15 bp, Homo sapiens
actctatagaagcta

SEQ ID NO: 1361725 - DNA, 15 bp, Homo sapiens
aactctatagaagct

SEQ ID NO: 1361726 - DNA, 15 bp, Homo sapiens
taactctatagaagc

SEQ ID NO: 1361727 - DNA, 15 bp, Homo sapiens
ttaactctatagaag

SEQ ID NO: 1361728 - DNA, 15 bp, Homo sapiens
tttaactctatagaa

SEQ ID NO: 1361729 - DNA, 15 bp, Homo sapiens
gtttaactctataga

SEQ ID NO: 1361730 - DNA, 15 bp, Homo sapiens
tgtttaactctatag

SEQ ID NO: 1361731 - DNA, 15 bp, Homo sapiens
ttgtttaactctata

SEQ ID NO: 1361732 - DNA, 15 bp, Homo sapiens
cttgtttaactctat

SEQ ID NO: 1361733 - DNA, 15 bp, Homo sapiens
ccttgtttaactcta

SEQ ID NO: 1361734 - DNA, 15 bp, Homo sapiens
gccttgtttaactct

SEQ ID NO: 1361735 - DNA, 15 bp, Homo sapiens
ggccttgtttaactc

SEQ ID NO: 1361736 - DNA, 15 bp, Homo sapiens
aggccttgtttaact

SEQ ID NO: 1361737 - DNA, 15 bp, Homo sapiens
caggccttgtttaac

SEQ ID NO: 1361738 - DNA, 15 bp, Homo sapiens
ccaggccttgtttaa

SEQ ID NO: 1361739 - DNA, 15 bp, Homo sapiens
gccaggccttgttta

SEQ ID NO: 1361740 - DNA, 15 bp, Homo sapiens
ggccaggccttgttt

SEQ ID NO: 1361741 - DNA, 15 bp, Homo sapiens
gggccaggccttgtt

SEQ ID NO: 1361742 - DNA, 15 bp, Homo sapiens
agggccaggccttgt

SEQ ID NO: 1361743 - DNA, 15 bp, Homo sapiens
gagggccaggccttg

SEQ ID NO: 1361744 - DNA, 15 bp, Homo sapiens
ggagggccaggcctt

SEQ ID NO: 1361745 - DNA, 15 bp, Homo sapiens
tggagggccaggcct

SEQ ID NO: 1361746 - DNA, 15 bp, Homo sapiens
ctggagggccaggcc

SEQ ID NO: 1361747 - DNA, 15 bp, Homo sapiens
cctggagggccaggc

SEQ ID NO: 1361748 - DNA, 15 bp, Homo sapiens
tcctggagggccagg

SEQ ID NO: 1361749 - DNA, 15 bp, Homo sapiens
ttcctggagggccag

SEQ ID NO: 1361750 - DNA, 15 bp, Homo sapiens
tttcctggagggcca

SEQ ID NO: 1361751 - DNA, 15 bp, Homo sapiens
atttcctggagggcc

SEQ ID NO: 1361752 - DNA, 15 bp, Homo sapiens
aatttcctggagggc

SEQ ID NO: 1361753 - DNA, 15 bp, Homo sapiens
aaatttcctggaggg

SEQ ID NO: 1361754 - DNA, 15 bp, Homo sapiens
aaaatttcctggagg

SEQ ID NO: 1361755 - DNA, 15 bp, Homo sapiens
aaaaatttcctggag

SEQ ID NO: 1361756 - DNA, 15 bp, Homo sapiens
taaaaatttcctgga

SEQ ID NO: 1361757 - DNA, 15 bp, Homo sapiens
ctaaaaatttcctgg

SEQ ID NO: 1361758 - DNA, 15 bp, Homo sapiens
tctaaaaatttcctg

SEQ ID NO: 1361759 - DNA, 15 bp, Homo sapiens
ttctaaaaatttcct

SEQ ID NO: 1361760 - DNA, 15 bp, Homo sapiens
tttctaaaaatttcc

SEQ ID NO: 1361761 - DNA, 15 bp, Homo sapiens
gtttctaaaaatttc

SEQ ID NO: 1361762 - DNA, 15 bp, Homo sapiens
ggtttctaaaaattt

SEQ ID NO: 1361763 - DNA, 15 bp, Homo sapiens
tggtttctaaaaatt

SEQ ID NO: 1361764 - DNA, 15 bp, Homo sapiens
atggtttctaaaaat

SEQ ID NO: 1361765 - DNA, 15 bp, Homo sapiens
tatggtttctaaaaa

SEQ ID NO: 1361766 - DNA, 15 bp, Homo sapiens
ttatggtttctaaaa

SEQ ID NO: 1361767 - DNA, 15 bp, Homo sapiens
tttatggtttctaaa

SEQ ID NO: 1361768 - DNA, 15 bp, Homo sapiens
atttatggtttctaa

SEQ ID NO: 1361769 - DNA, 15 bp, Homo sapiens
gatttatggtttcta

SEQ ID NO: 1361770 - DNA, 15 bp, Homo sapiens
agatttatggtttct

SEQ ID NO: 1361771 - DNA, 15 bp, Homo sapiens
aagatttatggtttc

SEQ ID NO: 1361772 - DNA, 15 bp, Homo sapiens
gaagatttatggttt

SEQ ID NO: 1361773 - DNA, 15 bp, Homo sapiens
tgaagatttatggtt

SEQ ID NO: 1361774 - DNA, 15 bp, Homo sapiens
atgaagatttatggt

SEQ ID NO: 1361775 - DNA, 15 bp, Homo sapiens
gatgaagatttatgg

SEQ ID NO: 1361776 - DNA, 15 bp, Homo sapiens
tgatgaagatttatg

SEQ ID NO: 1361777 - DNA, 15 bp, Homo sapiens
ttgatgaagatttat

SEQ ID NO: 1361778 - DNA, 15 bp, Homo sapiens
cttgatgaagattta

SEQ ID NO: 1361779 - DNA, 15 bp, Homo sapiens
acttgatgaagattt

SEQ ID NO: 1361780 - DNA, 15 bp, Homo sapiens
cacttgatgaagatt

SEQ ID NO: 1361781 - DNA, 15 bp, Homo sapiens
acacttgatgaagat

SEQ ID NO: 1361782 - DNA, 15 bp, Homo sapiens
aacacttgatgaaga

SEQ ID NO: 1361783 - DNA, 15 bp, Homo sapiens
aaacacttgatgaag

SEQ ID NO: 1361784 - DNA, 15 bp, Homo sapiens
aaaacacttgatgaa

SEQ ID NO: 1361785 - DNA, 15 bp, Homo sapiens
aaaaacacttgatga

SEQ ID NO: 1361786 - DNA, 15 bp, Homo sapiens
caaaaacacttgatg

SEQ ID NO: 1361787 - DNA, 15 bp, Homo sapiens
tcaaaaacacttgat

SEQ ID NO: 1361788 - DNA, 15 bp, Homo sapiens
atcaaaaacacttga

SEQ ID NO: 1361789 - DNA, 15 bp, Homo sapiens
tatcaaaaacacttg

SEQ ID NO: 1361790 - DNA, 15 bp, Homo sapiens
atatcaaaaacactt

SEQ ID NO: 1361791 - DNA, 15 bp, Homo sapiens
aatatcaaaaacact

SEQ ID NO: 1361792 - DNA, 15 bp, Homo sapiens
gaatatcaaaaacac

SEQ ID NO: 1361793 - DNA, 15 bp, Homo sapiens
agaatatcaaaaaca

SEQ ID NO: 1361794 - DNA, 15 bp, Homo sapiens
aagaatatcaaaaac

SEQ ID NO: 1361795 - DNA, 15 bp, Homo sapiens
aaagaatatcaaaaa

SEQ ID NO: 1361796 - DNA, 15 bp, Homo sapiens
taaagaatatcaaaa

SEQ ID NO: 1361797 - DNA, 15 bp, Homo sapiens
ttaaagaatatcaaa

SEQ ID NO: 1361798 - DNA, 15 bp, Homo sapiens
gttaaagaatatcaa

SEQ ID NO: 1361799 - DNA, 15 bp, Homo sapiens
agttaaagaatatca

SEQ ID NO: 1361800 - DNA, 15 bp, Homo sapiens
tagttaaagaatatc

SEQ ID NO: 1361801 - DNA, 15 bp, Homo sapiens
ttagttaaagaatat

SEQ ID NO: 1361802 - DNA, 15 bp, Homo sapiens
tttagttaaagaata

SEQ ID NO: 1361803 - DNA, 15 bp, Homo sapiens
ctttagttaaagaat

SEQ ID NO: 1361804 - DNA, 15 bp, Homo sapiens
actttagttaaagaa

SEQ ID NO: 1361805 - DNA, 15 bp, Homo sapiens
tactttagttaaaga

SEQ ID NO: 1361806 - DNA, 15 bp, Homo sapiens
ttactttagttaaag

SEQ ID NO: 1361807 - DNA, 15 bp, Homo sapiens
gttactttagttaaa

SEQ ID NO: 1361808 - DNA, 15 bp, Homo sapiens
tgttactttagttaa

SEQ ID NO: 1361809 - DNA, 15 bp, Homo sapiens
ttgttactttagtta

SEQ ID NO: 1361810 - DNA, 15 bp, Homo sapiens
attgttactttagtt

SEQ ID NO: 1361811 - DNA, 15 bp, Homo sapiens
aattgttactttagt

SEQ ID NO: 1361812 - DNA, 15 bp, Homo sapiens
caattgttactttag

SEQ ID NO: 1361813 - DNA, 15 bp, Homo sapiens
tcaattgttacttta

SEQ ID NO: 1361814 - DNA, 15 bp, Homo sapiens
atcaattgttacttt

SEQ ID NO: 1361815 - DNA, 15 bp, Homo sapiens
tatcaattgttactt

SEQ ID NO: 1361816 - DNA, 15 bp, Homo sapiens
atatcaattgttact

SEQ ID NO: 1361817 - DNA, 15 bp, Homo sapiens
tatatcaattgttac

SEQ ID NO: 1361818 - DNA, 15 bp, Homo sapiens
ttatatcaattgtta

SEQ ID NO: 1361819 - DNA, 15 bp, Homo sapiens
attatatcaattgtt

SEQ ID NO: 1361820 - DNA, 15 bp, Homo sapiens
aattatatcaattgt

SEQ ID NO: 1361821 - DNA, 15 bp, Homo sapiens
taattatatcaattg

SEQ ID NO: 1361822 - DNA, 15 bp, Homo sapiens
ttaattatatcaatt

SEQ ID NO: 1361823 - DNA, 15 bp, Homo sapiens
tttaattatatcaat

SEQ ID NO: 1361824 - DNA, 15 bp, Homo sapiens
atttaattatatcaa

SEQ ID NO: 1361825 - DNA, 15 bp, Homo sapiens
tatttaattatatca

SEQ ID NO: 1361826 - DNA, 15 bp, Homo sapiens
ttatttaattatatc

SEQ ID NO: 1361827 - DNA, 15 bp, Homo sapiens
attatttaattatat

SEQ ID NO: 1361828 - DNA, 15 bp, Homo sapiens
aattatttaattata

SEQ ID NO: 1361829 - DNA, 15 bp, Homo sapiens
aaattatttaattat

SEQ ID NO: 1361830 - DNA, 15 bp, Homo sapiens
aaaattatttaatta

SEQ ID NO: 1361831 - DNA, 15 bp, Homo sapiens
aaaaattatttaatt

SEQ ID NO: 1361832 - DNA, 15 bp, Homo sapiens
aaaaaattatttaat

SEQ ID NO: 1361833 - DNA, 15 bp, Homo sapiens
gaaaaaattatttaa

SEQ ID NO: 1361834 - DNA, 15 bp, Homo sapiens
agaaaaaattattta

SEQ ID NO: 1361835 - DNA, 15 bp, Homo sapiens
gagaaaaaattattt

SEQ ID NO: 1361836 - DNA, 15 bp, Homo sapiens
agagaaaaaattatt

SEQ ID NO: 1361837 - DNA, 15 bp, Homo sapiens
tagagaaaaaattat

SEQ ID NO: 1361838 - DNA, 15 bp, Homo sapiens
atagagaaaaaatta

SEQ ID NO: 1361839 - DNA, 15 bp, Homo sapiens
aatagagaaaaaatt

SEQ ID NO: 1361840 - DNA, 15 bp, Homo sapiens
taatagagaaaaaat

SEQ ID NO: 1361841 - DNA, 15 bp, Homo sapiens
ttaatagagaaaaaa

SEQ ID NO: 1361842 - DNA, 15 bp, Homo sapiens
attaatagagaaaaa

SEQ ID NO: 1361843 - DNA, 15 bp, Homo sapiens
cattaatagagaaaa

SEQ ID NO: 1361844 - DNA, 15 bp, Homo sapiens
tcattaatagagaaa

SEQ ID NO: 1361845 - DNA, 15 bp, Homo sapiens
ttcattaatagagaa

SEQ ID NO: 1361846 - DNA, 15 bp, Homo sapiens
attcattaatagaga

SEQ ID NO: 1361847 - DNA, 15 bp, Homo sapiens
aattcattaatagag

SEQ ID NO: 1361848 - DNA, 15 bp, Homo sapiens
caattcattaataga

SEQ ID NO: 1361849 - DNA, 15 bp, Homo sapiens
tcaattcattaatag

SEQ ID NO: 1361850 - DNA, 15 bp, Homo sapiens
ttcaattcattaata

SEQ ID NO: 1361851 - DNA, 15 bp, Homo sapiens
attcaattcattaat

SEQ ID NO: 1361852 - DNA, 15 bp, Homo sapiens
aattcaattcattaa

SEQ ID NO: 1361853 - DNA, 15 bp, Homo sapiens
taattcaattcatta

SEQ ID NO: 1361854 - DNA, 15 bp, Homo sapiens
gtaattcaattcatt

SEQ ID NO: 1361855 - DNA, 15 bp, Homo sapiens
tgtaattcaattcat

SEQ ID NO: 1361856 - DNA, 15 bp, Homo sapiens
atgtaattcaattca

SEQ ID NO: 1361857 - DNA, 15 bp, Homo sapiens
aatgtaattcaattc

SEQ ID NO: 1361858 - DNA, 15 bp, Homo sapiens
taatgtaattcaatt

SEQ ID NO: 1361859 - DNA, 15 bp, Homo sapiens
ttaatgtaattcaat

SEQ ID NO: 1361860 - DNA, 15 bp, Homo sapiens
attaatgtaattcaa

SEQ ID NO: 1361861 - DNA, 15 bp, Homo sapiens
tattaatgtaattca

SEQ ID NO: 1361862 - DNA, 15 bp, Homo sapiens
atattaatgtaattc

SEQ ID NO: 1361863 - DNA, 15 bp, Homo sapiens
tatattaatgtaatt

SEQ ID NO: 1361864 - DNA, 15 bp, Homo sapiens
atatattaatgtaat

SEQ ID NO: 1361865 - DNA, 15 bp, Homo sapiens
aatatattaatgtaa

SEQ ID NO: 1361866 - DNA, 15 bp, Homo sapiens
taatatattaatgta

SEQ ID NO: 1361867 - DNA, 15 bp, Homo sapiens
ataatatattaatgt

SEQ ID NO: 1361868 - DNA, 15 bp, Homo sapiens
aataatatattaatg

SEQ ID NO: 1361869 - DNA, 15 bp, Homo sapiens
taataatatattaat

SEQ ID NO: 1361870 - DNA, 15 bp, Homo sapiens
ttaataatatattaa

SEQ ID NO: 1361871 - DNA, 15 bp, Homo sapiens
attaataatatatta

SEQ ID NO: 1361872 - DNA, 15 bp, Homo sapiens
tattaataatatatt

SEQ ID NO: 1361873 - DNA, 15 bp, Homo sapiens
atattaataatatat

SEQ ID NO: 1361874 - DNA, 15 bp, Homo sapiens
gatattaataatata

SEQ ID NO: 1361875 - DNA, 15 bp, Homo sapiens
tgatattaataatat

SEQ ID NO: 1361876 - DNA, 15 bp, Homo sapiens
ttgatattaataata

SEQ ID NO: 1361877 - DNA, 15 bp, Homo sapiens
tttgatattaataat

SEQ ID NO: 1361878 - DNA, 15 bp, Homo sapiens
atttgatattaataa

SEQ ID NO: 1361879 - DNA, 15 bp, Homo sapiens
aatttgatattaata

SEQ ID NO: 1361880 - DNA, 15 bp, Homo sapiens
caatttgatattaat

SEQ ID NO: 1361881 - DNA, 15 bp, Homo sapiens
acaatttgatattaa

SEQ ID NO: 1361882 - DNA, 15 bp, Homo sapiens
gacaatttgatatta

SEQ ID NO: 1361883 - DNA, 15 bp, Homo sapiens
agacaatttgatatt

SEQ ID NO: 1361884 - DNA, 15 bp, Homo sapiens
aagacaatttgatat

SEQ ID NO: 1361885 - DNA, 15 bp, Homo sapiens
aaagacaatttgata

SEQ ID NO: 1361886 - DNA, 15 bp, Homo sapiens
taaagacaatttgat

SEQ ID NO: 1361887 - DNA, 15 bp, Homo sapiens
ataaagacaatttga

SEQ ID NO: 1361888 - DNA, 15 bp, Homo sapiens
cataaagacaatttg

SEQ ID NO: 1361889 - DNA, 15 bp, Homo sapiens
acataaagacaattt

SEQ ID NO: 1361890 - DNA, 15 bp, Homo sapiens
aacataaagacaatt

SEQ ID NO: 1361891 - DNA, 15 bp, Homo sapiens
aaacataaagacaat

SEQ ID NO: 1361892 - DNA, 15 bp, Homo sapiens
aaaacataaagacaa

SEQ ID NO: 1361893 - DNA, 15 bp, Homo sapiens
aaaaacataaagaca

SEQ ID NO: 1361894 - DNA, 15 bp, Homo sapiens
taaaaacataaagac

SEQ ID NO: 1361895 - DNA, 15 bp, Homo sapiens
ttaaaaacataaaga

SEQ ID NO: 1361896 - DNA, 15 bp, Homo sapiens
cttaaaaacataaag

SEQ ID NO: 1361897 - DNA, 15 bp, Homo sapiens
tcttaaaaacataaa

SEQ ID NO: 1361898 - DNA, 15 bp, Homo sapiens
atcttaaaaacataa

SEQ ID NO: 1361899 - DNA, 15 bp, Homo sapiens
aatcttaaaaacata

SEQ ID NO: 1361900 - DNA, 15 bp, Homo sapiens
caatcttaaaaacat

SEQ ID NO: 1361901 - DNA, 15 bp, Homo sapiens
tcaatcttaaaaaca

SEQ ID NO: 1361902 - DNA, 15 bp, Homo sapiens
ttcaatcttaaaaac

SEQ ID NO: 1361903 - DNA, 15 bp, Homo sapiens
attcaatcttaaaaa

SEQ ID NO: 1361904 - DNA, 15 bp, Homo sapiens
gattcaatcttaaaa

SEQ ID NO: 1361905 - DNA, 15 bp, Homo sapiens
tgattcaatcttaaa

SEQ ID NO: 1361906 - DNA, 15 bp, Homo sapiens
atgattcaatcttaa

SEQ ID NO: 1361907 - DNA, 15 bp, Homo sapiens
catgattcaatctta

SEQ ID NO: 1361908 - DNA, 15 bp, Homo sapiens
gcatgattcaatctt

SEQ ID NO: 1361909 - DNA, 15 bp, Homo sapiens
agcatgattcaatct

SEQ ID NO: 1361910 - DNA, 15 bp, Homo sapiens
aagcatgattcaatc

SEQ ID NO: 1361911 - DNA, 15 bp, Homo sapiens
taagcatgattcaat

SEQ ID NO: 1361912 - DNA, 15 bp, Homo sapiens
ttaagcatgattcaa

SEQ ID NO: 1361913 - DNA, 15 bp, Homo sapiens
attaagcatgattca

SEQ ID NO: 1361914 - DNA, 15 bp, Homo sapiens
aattaagcatgattc

SEQ ID NO: 1361915 - DNA, 15 bp, Homo sapiens
taattaagcatgatt

SEQ ID NO: 1361916 - DNA, 15 bp, Homo sapiens
ataattaagcatgat

SEQ ID NO: 1361917 - DNA, 15 bp, Homo sapiens
tataattaagcatga

SEQ ID NO: 1361918 - DNA, 15 bp, Homo sapiens
ttataattaagcatg

SEQ ID NO: 1361919 - DNA, 15 bp, Homo sapiens
attataattaagcat

SEQ ID NO: 1361920 - DNA, 15 bp, Homo sapiens
aattataattaagca

SEQ ID NO: 1361921 - DNA, 15 bp, Homo sapiens
aaattataattaagc

SEQ ID NO: 1361922 - DNA, 15 bp, Homo sapiens
aaaattataattaag

SEQ ID NO: 1361923 - DNA, 15 bp, Homo sapiens
gaaaattataattaa

SEQ ID NO: 1361924 - DNA, 15 bp, Homo sapiens
tgaaaattataatta

SEQ ID NO: 1361925 - DNA, 15 bp, Homo sapiens
atgaaaattataatt

SEQ ID NO: 1361926 - DNA, 15 bp, Homo sapiens
tatgaaaattataat

SEQ ID NO: 1361927 - DNA, 15 bp, Homo sapiens
ttatgaaaattataa

SEQ ID NO: 1361928 - DNA, 15 bp, Homo sapiens
tttatgaaaattata

SEQ ID NO: 1361929 - DNA, 15 bp, Homo sapiens
ttttatgaaaattat

SEQ ID NO: 1361930 - DNA, 15 bp, Homo sapiens
attttatgaaaatta

SEQ ID NO: 1361931 - DNA, 15 bp, Homo sapiens
tattttatgaaaatt

SEQ ID NO: 1361932 - DNA, 15 bp, Homo sapiens
atattttatgaaaat

SEQ ID NO: 1361933 - DNA, 15 bp, Homo sapiens
gtatattttatgaaa

SEQ ID NO: 1361934 - DNA, 15 bp, Homo sapiens
agtatattttatgaa

SEQ ID NO: 1361935 - DNA, 15 bp, Homo sapiens
cagtatattttatga

SEQ ID NO: 1361936 - DNA, 15 bp, Homo sapiens
acagtatattttatg

SEQ ID NO: 1361937 - DNA, 15 bp, Homo sapiens
tacagtatattttat

SEQ ID NO: 1361938 - DNA, 15 bp, Homo sapiens
ttacagtatatttta

SEQ ID NO: 1361939 - DNA, 15 bp, Homo sapiens
tttacagtatatttt

SEQ ID NO: 1361940 - DNA, 15 bp, Homo sapiens
ttttacagtatattt

SEQ ID NO: 1361941 - DNA, 15 bp, Homo sapiens
attttacagtatatt

SEQ ID NO: 1361942 - DNA, 15 bp, Homo sapiens
aattttacagtatat

SEQ ID NO: 1361943 - DNA, 15 bp, Homo sapiens
aaattttacagtata

SEQ ID NO: 1361944 - DNA, 15 bp, Homo sapiens
caaattttacagtat

SEQ ID NO: 1361945 - DNA, 15 bp, Homo sapiens
ccaaattttacagta

SEQ ID NO: 1361946 - DNA, 15 bp, Homo sapiens
gccaaattttacagt

SEQ ID NO: 1361947 - DNA, 15 bp, Homo sapiens
agccaaattttacag

SEQ ID NO: 1361948 - DNA, 15 bp, Homo sapiens
tagccaaattttaca

SEQ ID NO: 1361949 - DNA, 15 bp, Homo sapiens
ctagccaaattttac

SEQ ID NO: 1361950 - DNA, 15 bp, Homo sapiens
gctagccaaatttta

SEQ ID NO: 1361951 - DNA, 15 bp, Homo sapiens
agctagccaaatttt

SEQ ID NO: 1361952 - DNA, 15 bp, Homo sapiens
cagctagccaaattt

SEQ ID NO: 1361953 - DNA, 15 bp, Homo sapiens
tcagctagccaaatt

SEQ ID NO: 1361954 - DNA, 15 bp, Homo sapiens
ctcagctagccaaat

SEQ ID NO: 1361955 - DNA, 15 bp, Homo sapiens
tctcagctagccaaa

SEQ ID NO: 1361956 - DNA, 15 bp, Homo sapiens
atctcagctagccaa

SEQ ID NO: 1361957 - DNA, 15 bp, Homo sapiens
aatctcagctagcca

SEQ ID NO: 1361958 - DNA, 15 bp, Homo sapiens
aaatctcagctagcc

SEQ ID NO: 1361959 - DNA, 15 bp, Homo sapiens
aaaatctcagctagc

SEQ ID NO: 1361960 - DNA, 15 bp, Homo sapiens
taaaatctcagctag

SEQ ID NO: 1361961 - DNA, 15 bp, Homo sapiens
gtaaaatctcagcta

SEQ ID NO: 1361962 - DNA, 15 bp, Homo sapiens
agtaaaatctcagct

SEQ ID NO: 1361963 - DNA, 15 bp, Homo sapiens
aagtaaaatctcagc

SEQ ID NO: 1361964 - DNA, 15 bp, Homo sapiens
caagtaaaatctcag

SEQ ID NO: 1361965 - DNA, 15 bp, Homo sapiens
gcaagtaaaatctca

SEQ ID NO: 1361966 - DNA, 15 bp, Homo sapiens
tgcaagtaaaatctc

SEQ ID NO: 1361967 - DNA, 15 bp, Homo sapiens
ttgcaagtaaaatct

SEQ ID NO: 1361968 - DNA, 15 bp, Homo sapiens
gttgcaagtaaaatc

SEQ ID NO: 1361969 - DNA, 15 bp, Homo sapiens
tgttgcaagtaaaat

SEQ ID NO: 1361970 - DNA, 15 bp, Homo sapiens
atgttgcaagtaaaa

SEQ ID NO: 1361971 - DNA, 15 bp, Homo sapiens
gatgttgcaagtaaa

SEQ ID NO: 1361972 - DNA, 15 bp, Homo sapiens
agatgttgcaagtaa

SEQ ID NO: 1361973 - DNA, 15 bp, Homo sapiens
cagatgttgcaagta

SEQ ID NO: 1361974 - DNA, 15 bp, Homo sapiens
gcagatgttgcaagt

SEQ ID NO: 1361975 - DNA, 15 bp, Homo sapiens
tgcagatgttgcaag

SEQ ID NO: 1361976 - DNA, 15 bp, Homo sapiens
gtgcagatgttgcaa

SEQ ID NO: 1361977 - DNA, 15 bp, Homo sapiens
ggtgcagatgttgca

SEQ ID NO: 1361978 - DNA, 15 bp, Homo sapiens
tggtgcagatgttgc

SEQ ID NO: 1361979 - DNA, 15 bp, Homo sapiens
ttggtgcagatgttg

SEQ ID NO: 1361980 - DNA, 15 bp, Homo sapiens
attggtgcagatgtt

SEQ ID NO: 1361981 - DNA, 15 bp, Homo sapiens
tattggtgcagatgt

SEQ ID NO: 1361982 - DNA, 15 bp, Homo sapiens
ttattggtgcagatg

SEQ ID NO: 1361983 - DNA, 15 bp, Homo sapiens
gttattggtgcagat

SEQ ID NO: 1361984 - DNA, 15 bp, Homo sapiens
ggttattggtgcaga

SEQ ID NO: 1361985 - DNA, 15 bp, Homo sapiens
tggttattggtgcag

SEQ ID NO: 1361986 - DNA, 15 bp, Homo sapiens
atggttattggtgca

SEQ ID NO: 1361987 - DNA, 15 bp, Homo sapiens
gatggttattggtgc

SEQ ID NO: 1361988 - DNA, 15 bp, Homo sapiens
tgatggttattggtg

SEQ ID NO: 1361989 - DNA, 15 bp, Homo sapiens
atgatggttattggt

SEQ ID NO: 1361990 - DNA, 15 bp, Homo sapiens
aatgatggttattgg

SEQ ID NO: 1361991 - DNA, 15 bp, Homo sapiens
caatgatggttattg

SEQ ID NO: 1361992 - DNA, 15 bp, Homo sapiens
tcaatgatggttatt

SEQ ID NO: 1361993 - DNA, 15 bp, Homo sapiens
ttcaatgatggttat

SEQ ID NO: 1361994 - DNA, 15 bp, Homo sapiens
tttcaatgatggtta

SEQ ID NO: 1361995 - DNA, 15 bp, Homo sapiens
atttcaatgatggtt

SEQ ID NO: 1361996 - DNA, 15 bp, Homo sapiens
aatttcaatgatggt

SEQ ID NO: 1361997 - DNA, 15 bp, Homo sapiens
caatttcaatgatgg

SEQ ID NO: 1361998 - DNA, 15 bp, Homo sapiens
ccaatttcaatgatg

SEQ ID NO: 1361999 - DNA, 15 bp, Homo sapiens
gccaatttcaatgat

SEQ ID NO: 1362000 - DNA, 15 bp, Homo sapiens
ggccaatttcaatga

SEQ ID NO: 1362001 - DNA, 15 bp, Homo sapiens
aggccaatttcaatg

SEQ ID NO: 1362002 - DNA, 15 bp, Homo sapiens
taggccaatttcaat

SEQ ID NO: 1362003 - DNA, 15 bp, Homo sapiens
ataggccaatttcaa

SEQ ID NO: 1362004 - DNA, 15 bp, Homo sapiens
tataggccaatttca

SEQ ID NO: 1362005 - DNA, 15 bp, Homo sapiens
ttataggccaatttc

SEQ ID NO: 1362006 - DNA, 15 bp, Homo sapiens
attataggccaattt

SEQ ID NO: 1362007 - DNA, 15 bp, Homo sapiens
aattataggccaatt

SEQ ID NO: 1362008 - DNA, 15 bp, Homo sapiens
aaattataggccaat

SEQ ID NO: 1362009 - DNA, 15 bp, Homo sapiens
aaaattataggccaa

SEQ ID NO: 1362010 - DNA, 15 bp, Homo sapiens
gaaaattataggcca

SEQ ID NO: 1362011 - DNA, 15 bp, Homo sapiens
tgaaaattataggcc

SEQ ID NO: 1362012 - DNA, 15 bp, Homo sapiens
atgaaaattataggc

SEQ ID NO: 1362013 - DNA, 15 bp, Homo sapiens
tatgaaaattatagg

SEQ ID NO: 1362014 - DNA, 15 bp, Homo sapiens
atatgaaaattatag

SEQ ID NO: 1362015 - DNA, 15 bp, Homo sapiens
catatgaaaattata

SEQ ID NO: 1362016 - DNA, 15 bp, Homo sapiens
acatatgaaaattat

SEQ ID NO: 1362017 - DNA, 15 bp, Homo sapiens
cacatatgaaaatta

SEQ ID NO: 1362018 - DNA, 15 bp, Homo sapiens
acacatatgaaaatt

SEQ ID NO: 1362019 - DNA, 15 bp, Homo sapiens
cacacatatgaaaat

SEQ ID NO: 1362020 - DNA, 15 bp, Homo sapiens
gcacacatatgaaaa

SEQ ID NO: 1362021 - DNA, 15 bp, Homo sapiens
agcacacatatgaaa

SEQ ID NO: 1362022 - DNA, 15 bp, Homo sapiens
cagcacacatatgaa

SEQ ID NO: 1362023 - DNA, 15 bp, Homo sapiens
tcagcacacatatga

SEQ ID NO: 1362024 - DNA, 15 bp, Homo sapiens
ctcagcacacatatg

SEQ ID NO: 1362025 - DNA, 15 bp, Homo sapiens
actcagcacacatat

SEQ ID NO: 1362026 - DNA, 15 bp, Homo sapiens
aactcagcacacata

SEQ ID NO: 1362027 - DNA, 15 bp, Homo sapiens
aaactcagcacacat

SEQ ID NO: 1362028 - DNA, 15 bp, Homo sapiens
taaactcagcacaca

SEQ ID NO: 1362029 - DNA, 15 bp, Homo sapiens
ataaactcagcacac

SEQ ID NO: 1362030 - DNA, 15 bp, Homo sapiens
cataaactcagcaca

SEQ ID NO: 1362031 - DNA, 15 bp, Homo sapiens
acataaactcagcac

SEQ ID NO: 1362032 - DNA, 15 bp, Homo sapiens
cacataaactcagca

SEQ ID NO: 1362033 - DNA, 15 bp, Homo sapiens
acacataaactcagc

SEQ ID NO: 1362034 - DNA, 15 bp, Homo sapiens
gacacataaactcag

SEQ ID NO: 1362035 - DNA, 15 bp, Homo sapiens
ggacacataaactca

SEQ ID NO: 1362036 - DNA, 15 bp, Homo sapiens
gggacacataaactc

SEQ ID NO: 1362037 - DNA, 15 bp, Homo sapiens
agggacacataaact

SEQ ID NO: 1362038 - DNA, 15 bp, Homo sapiens
gagggacacataaac

SEQ ID NO: 1362039 - DNA, 15 bp, Homo sapiens
tgagggacacataaa

SEQ ID NO: 1362040 - DNA, 15 bp, Homo sapiens
atgagggacacataa

SEQ ID NO: 1362041 - DNA, 15 bp, Homo sapiens
gatgagggacacata

SEQ ID NO: 1362042 - DNA, 15 bp, Homo sapiens
agatgagggacacat

SEQ ID NO: 1362043 - DNA, 15 bp, Homo sapiens
gagatgagggacaca

SEQ ID NO: 1362044 - DNA, 15 bp, Homo sapiens
tgagatgagggacac

SEQ ID NO: 1362045 - DNA, 15 bp, Homo sapiens
ctgagatgagggaca

SEQ ID NO: 1362046 - DNA, 15 bp, Homo sapiens
actgagatgagggac

SEQ ID NO: 1362047 - DNA, 15 bp, Homo sapiens
tactgagatgaggga

SEQ ID NO: 1362048 - DNA, 15 bp, Homo sapiens
atactgagatgaggg

SEQ ID NO: 1362049 - DNA, 15 bp, Homo sapiens
aatactgagatgagg

SEQ ID NO: 1362050 - DNA, 15 bp, Homo sapiens
taatactgagatgag

SEQ ID NO: 1362051 - DNA, 15 bp, Homo sapiens
gtaatactgagatga

SEQ ID NO: 1362052 - DNA, 15 bp, Homo sapiens
tgtaatactgagatg

SEQ ID NO: 1362053 - DNA, 15 bp, Homo sapiens
gtgtaatactgagat

SEQ ID NO: 1362054 - DNA, 15 bp, Homo sapiens
agtgtaatactgaga

SEQ ID NO: 1362055 - DNA, 15 bp, Homo sapiens
cagtgtaatactgag

SEQ ID NO: 1362056 - DNA, 15 bp, Homo sapiens
ccagtgtaatactga

SEQ ID NO: 1362057 - DNA, 15 bp, Homo sapiens
gccagtgtaatactg

SEQ ID NO: 1362058 - DNA, 15 bp, Homo sapiens
ggccagtgtaatact

SEQ ID NO: 1362059 - DNA, 15 bp, Homo sapiens
aggccagtgtaatac

SEQ ID NO: 1362060 - DNA, 15 bp, Homo sapiens
gaggccagtgtaata

SEQ ID NO: 1362061 - DNA, 15 bp, Homo sapiens
tgaggccagtgtaat

SEQ ID NO: 1362062 - DNA, 15 bp, Homo sapiens
atgaggccagtgtaa

SEQ ID NO: 1362063 - DNA, 15 bp, Homo sapiens
catgaggccagtgta

SEQ ID NO: 1362064 - DNA, 15 bp, Homo sapiens
tcatgaggccagtgt

SEQ ID NO: 1362065 - DNA, 15 bp, Homo sapiens
ttcatgaggccagtg

SEQ ID NO: 1362066 - DNA, 15 bp, Homo sapiens
tttcatgaggccagt

SEQ ID NO: 1362067 - DNA, 15 bp, Homo sapiens
atttcatgaggccag

SEQ ID NO: 1362068 - DNA, 15 bp, Homo sapiens
catttcatgaggcca

SEQ ID NO: 1362069 - DNA, 15 bp, Homo sapiens
tcatttcatgaggcc

SEQ ID NO: 1362070 - DNA, 15 bp, Homo sapiens
ctcatttcatgaggc

SEQ ID NO: 1362071 - DNA, 15 bp, Homo sapiens
actcatttcatgagg

SEQ ID NO: 1362072 - DNA, 15 bp, Homo sapiens
aactcatttcatgag

SEQ ID NO: 1362073 - DNA, 15 bp, Homo sapiens
taactcatttcatga

SEQ ID NO: 1362074 - DNA, 15 bp, Homo sapiens
ctaactcatttcatg

SEQ ID NO: 1362075 - DNA, 15 bp, Homo sapiens
tctaactcatttcat

SEQ ID NO: 1362076 - DNA, 15 bp, Homo sapiens
ttctaactcatttca

SEQ ID NO: 1362077 - DNA, 15 bp, Homo sapiens
tttctaactcatttc

SEQ ID NO: 1362078 - DNA, 15 bp, Homo sapiens
ttttctaactcattt

SEQ ID NO: 1362079 - DNA, 15 bp, Homo sapiens
attttctaactcatt

SEQ ID NO: 1362080 - DNA, 15 bp, Homo sapiens
gattttctaactcat

SEQ ID NO: 1362081 - DNA, 15 bp, Homo sapiens
agattttctaactca

SEQ ID NO: 1362082 - DNA, 15 bp, Homo sapiens
aagattttctaactc

SEQ ID NO: 1362083 - DNA, 15 bp, Homo sapiens
gaagattttctaact

SEQ ID NO: 1362084 - DNA, 15 bp, Homo sapiens
ggaagattttctaac

SEQ ID NO: 1362085 - DNA, 15 bp, Homo sapiens
gggaagattttctaa

SEQ ID NO: 1362086 - DNA, 15 bp, Homo sapiens
agggaagattttcta

SEQ ID NO: 1362087 - DNA, 15 bp, Homo sapiens
aagggaagattttct

SEQ ID NO: 1362088 - DNA, 15 bp, Homo sapiens
aaagggaagattttc

SEQ ID NO: 1362089 - DNA, 15 bp, Homo sapiens
aaaagggaagatttt

SEQ ID NO: 1362090 - DNA, 15 bp, Homo sapiens
aaaaagggaagattt

SEQ ID NO: 1362091 - DNA, 15 bp, Homo sapiens
aaaaaagggaagatt

SEQ ID NO: 1362092 - DNA, 15 bp, Homo sapiens
aaaaaaagggaagat

SEQ ID NO: 1362093 - DNA, 15 bp, Homo sapiens
taaaaaaagggaaga

SEQ ID NO: 1362094 - DNA, 15 bp, Homo sapiens
gtaaaaaaagggaag

SEQ ID NO: 1362095 - DNA, 15 bp, Homo sapiens
agtaaaaaaagggaa

SEQ ID NO: 1362096 - DNA, 15 bp, Homo sapiens
tagtaaaaaaaggga

SEQ ID NO: 1362097 - DNA, 15 bp, Homo sapiens
gtagtaaaaaaaggg

SEQ ID NO: 1362098 - DNA, 15 bp, Homo sapiens
agtagtaaaaaaagg

SEQ ID NO: 1362099 - DNA, 15 bp, Homo sapiens
aagtagtaaaaaaag

SEQ ID NO: 1362100 - DNA, 15 bp, Homo sapiens
aaagtagtaaaaaaa

SEQ ID NO: 1362101 - DNA, 15 bp, Homo sapiens
gaaagtagtaaaaaa

SEQ ID NO: 1362102 - DNA, 15 bp, Homo sapiens
agaaagtagtaaaaa

SEQ ID NO: 1362103 - DNA, 15 bp, Homo sapiens
cagaaagtagtaaaa

SEQ ID NO: 1362104 - DNA, 15 bp, Homo sapiens
tcagaaagtagtaaa

SEQ ID NO: 1362105 - DNA, 15 bp, Homo sapiens
ttcagaaagtagtaa

SEQ ID NO: 1362106 - DNA, 15 bp, Homo sapiens
tttcagaaagtagta

SEQ ID NO: 1362107 - DNA, 15 bp, Homo sapiens
ttttcagaaagtagt

SEQ ID NO: 1362108 - DNA, 15 bp, Homo sapiens
gttttcagaaagtag

SEQ ID NO: 1362109 - DNA, 15 bp, Homo sapiens
agttttcagaaagta

SEQ ID NO: 1362110 - DNA, 15 bp, Homo sapiens
gagttttcagaaagt

SEQ ID NO: 1362111 - DNA, 15 bp, Homo sapiens
agagttttcagaaag

SEQ ID NO: 1362112 - DNA, 15 bp, Homo sapiens
aagagttttcagaaa

SEQ ID NO: 1362113 - DNA, 15 bp, Homo sapiens
aaagagttttcagaa

SEQ ID NO: 1362114 - DNA, 15 bp, Homo sapiens
gaaagagttttcaga

SEQ ID NO: 1362115 - DNA, 15 bp, Homo sapiens
tgaaagagttttcag

SEQ ID NO: 1362116 - DNA, 15 bp, Homo sapiens
atgaaagagttttca

SEQ ID NO: 1362117 - DNA, 15 bp, Homo sapiens
tatgaaagagttttc

SEQ ID NO: 1362118 - DNA, 15 bp, Homo sapiens
ttatgaaagagtttt

SEQ ID NO: 1362119 - DNA, 15 bp, Homo sapiens
cttatgaaagagttt

SEQ ID NO: 1362120 - DNA, 15 bp, Homo sapiens
tcttatgaaagagtt

SEQ ID NO: 1362121 - DNA, 15 bp, Homo sapiens
atcttatgaaagagt

SEQ ID NO: 1362122 - DNA, 15 bp, Homo sapiens
catcttatgaaagag

SEQ ID NO: 1362123 - DNA, 15 bp, Homo sapiens
tcatcttatgaaaga

SEQ ID NO: 1362124 - DNA, 15 bp, Homo sapiens
ttcatcttatgaaag

SEQ ID NO: 1362125 - DNA, 15 bp, Homo sapiens
tttcatcttatgaaa

SEQ ID NO: 1362126 - DNA, 15 bp, Homo sapiens
ttttcatcttatgaa

SEQ ID NO: 1362127 - DNA, 15 bp, Homo sapiens
gttttcatcttatga

SEQ ID NO: 1362128 - DNA, 15 bp, Homo sapiens
agttttcatcttatg

SEQ ID NO: 1362129 - DNA, 15 bp, Homo sapiens
tagttttcatcttat

SEQ ID NO: 1362130 - DNA, 15 bp, Homo sapiens
gtagttttcatctta

SEQ ID NO: 1362131 - DNA, 15 bp, Homo sapiens
ggtagttttcatctt

SEQ ID NO: 1362132 - DNA, 15 bp, Homo sapiens
tggtagttttcatct

SEQ ID NO: 1362133 - DNA, 15 bp, Homo sapiens
atggtagttttcatc

SEQ ID NO: 1362134 - DNA, 15 bp, Homo sapiens
aatggtagttttcat

SEQ ID NO: 1362135 - DNA, 15 bp, Homo sapiens
aaatggtagttttca

SEQ ID NO: 1362136 - DNA, 15 bp, Homo sapiens
gaaatggtagttttc

SEQ ID NO: 1362137 - DNA, 15 bp, Homo sapiens
agaaatggtagtttt

SEQ ID NO: 1362138 - DNA, 15 bp, Homo sapiens
aagaaatggtagttt

SEQ ID NO: 1362139 - DNA, 15 bp, Homo sapiens
caagaaatggtagtt

SEQ ID NO: 1362140 - DNA, 15 bp, Homo sapiens
gcaagaaatggtagt

SEQ ID NO: 1362141 - DNA, 15 bp, Homo sapiens
tgcaagaaatggtag

SEQ ID NO: 1362142 - DNA, 15 bp, Homo sapiens
ttgcaagaaatggta

SEQ ID NO: 1362143 - DNA, 15 bp, Homo sapiens
cttgcaagaaatggt

SEQ ID NO: 1362144 - DNA, 15 bp, Homo sapiens
acttgcaagaaatgg

SEQ ID NO: 1362145 - DNA, 15 bp, Homo sapiens
aacttgcaagaaatg

SEQ ID NO: 1362146 - DNA, 15 bp, Homo sapiens
aaacttgcaagaaat

SEQ ID NO: 1362147 - DNA, 15 bp, Homo sapiens
caaacttgcaagaaa

SEQ ID NO: 1362148 - DNA, 15 bp, Homo sapiens
tcaaacttgcaagaa

SEQ ID NO: 1362149 - DNA, 15 bp, Homo sapiens
ctcaaacttgcaaga

SEQ ID NO: 1362150 - DNA, 15 bp, Homo sapiens
actcaaacttgcaag

SEQ ID NO: 1362151 - DNA, 15 bp, Homo sapiens
gactcaaacttgcaa

SEQ ID NO: 1362152 - DNA, 15 bp, Homo sapiens
tgactcaaacttgca

SEQ ID NO: 1362153 - DNA, 15 bp, Homo sapiens
ctgactcaaacttgc

SEQ ID NO: 1362154 - DNA, 15 bp, Homo sapiens
tctgactcaaacttg

SEQ ID NO: 1362155 - DNA, 15 bp, Homo sapiens
atctgactcaaactt

SEQ ID NO: 1362156 - DNA, 15 bp, Homo sapiens
gatctgactcaaact

SEQ ID NO: 1362157 - DNA, 15 bp, Homo sapiens
tgatctgactcaaac

SEQ ID NO: 1362158 - DNA, 15 bp, Homo sapiens
atgatctgactcaaa

SEQ ID NO: 1362159 - DNA, 15 bp, Homo sapiens
gatgatctgactcaa

SEQ ID NO: 1362160 - DNA, 15 bp, Homo sapiens
agatgatctgactca

SEQ ID NO: 1362161 - DNA, 15 bp, Homo sapiens
cagatgatctgactc

SEQ ID NO: 1362162 - DNA, 15 bp, Homo sapiens
acagatgatctgact

SEQ ID NO: 1362163 - DNA, 15 bp, Homo sapiens
cacagatgatctgac

SEQ ID NO: 1362164 - DNA, 15 bp, Homo sapiens
acacagatgatctga

SEQ ID NO: 1362165 - DNA, 15 bp, Homo sapiens
tacacagatgatctg

SEQ ID NO: 1362166 - DNA, 15 bp, Homo sapiens
ttacacagatgatct

SEQ ID NO: 1362167 - DNA, 15 bp, Homo sapiens
attacacagatgatc

SEQ ID NO: 1362168 - DNA, 15 bp, Homo sapiens
cattacacagatgat

SEQ ID NO: 1362169 - DNA, 15 bp, Homo sapiens
ccattacacagatga

SEQ ID NO: 1362170 - DNA, 15 bp, Homo sapiens
cccattacacagatg

SEQ ID NO: 1362171 - DNA, 15 bp, Homo sapiens
gcccattacacagat

SEQ ID NO: 1362172 - DNA, 15 bp, Homo sapiens
agcccattacacaga

SEQ ID NO: 1362173 - DNA, 15 bp, Homo sapiens
cagcccattacacag

SEQ ID NO: 1362174 - DNA, 15 bp, Homo sapiens
tcagcccattacaca

SEQ ID NO: 1362175 - DNA, 15 bp, Homo sapiens
ttcagcccattacac

SEQ ID NO: 1362176 - DNA, 15 bp, Homo sapiens
gttcagcccattaca

SEQ ID NO: 1362177 - DNA, 15 bp, Homo sapiens
ggttcagcccattac

SEQ ID NO: 1362178 - DNA, 15 bp, Homo sapiens
aggttcagcccatta

SEQ ID NO: 1362179 - DNA, 15 bp, Homo sapiens
taggttcagcccatt

SEQ ID NO: 1362180 - DNA, 15 bp, Homo sapiens
ctaggttcagcccat

SEQ ID NO: 1362181 - DNA, 15 bp, Homo sapiens
tctaggttcagccca

SEQ ID NO: 1362182 - DNA, 15 bp, Homo sapiens
ttctaggttcagccc

SEQ ID NO: 1362183 - DNA, 15 bp, Homo sapiens
cttctaggttcagcc

SEQ ID NO: 1362184 - DNA, 15 bp, Homo sapiens
gcttctaggttcagc

SEQ ID NO: 1362185 - DNA, 15 bp, Homo sapiens
agcttctaggttcag

SEQ ID NO: 1362186 - DNA, 15 bp, Homo sapiens
aagcttctaggttca

SEQ ID NO: 1362187 - DNA, 15 bp, Homo sapiens
aaagcttctaggttc

SEQ ID NO: 1362188 - DNA, 15 bp, Homo sapiens
taaagcttctaggtt

SEQ ID NO: 1362189 - DNA, 15 bp, Homo sapiens
ctaaagcttctaggt

SEQ ID NO: 1362190 - DNA, 15 bp, Homo sapiens
cctaaagcttctagg

SEQ ID NO: 1362191 - DNA, 15 bp, Homo sapiens
acctaaagcttctag

SEQ ID NO: 1362192 - DNA, 15 bp, Homo sapiens
aacctaaagcttcta

SEQ ID NO: 1362193 - DNA, 15 bp, Homo sapiens
taacctaaagcttct

SEQ ID NO: 1362194 - DNA, 15 bp, Homo sapiens
ataacctaaagcttc

SEQ ID NO: 1362195 - DNA, 15 bp, Homo sapiens
tataacctaaagctt

SEQ ID NO: 1362196 - DNA, 15 bp, Homo sapiens
ctataacctaaagct

SEQ ID NO: 1362197 - DNA, 15 bp, Homo sapiens
tctataacctaaagc

SEQ ID NO: 1362198 - DNA, 15 bp, Homo sapiens
atctataacctaaag

SEQ ID NO: 1362199 - DNA, 15 bp, Homo sapiens
gatctataacctaaa

SEQ ID NO: 1362200 - DNA, 15 bp, Homo sapiens
agatctataacctaa

SEQ ID NO: 1362201 - DNA, 15 bp, Homo sapiens
tagatctataaccta

SEQ ID NO: 1362202 - DNA, 15 bp, Homo sapiens
ctagatctataacct

SEQ ID NO: 1362203 - DNA, 15 bp, Homo sapiens
gctagatctataacc

SEQ ID NO: 1362204 - DNA, 15 bp, Homo sapiens
agctagatctataac

SEQ ID NO: 1362205 - DNA, 15 bp, Homo sapiens
tagctagatctataa

SEQ ID NO: 1362206 - DNA, 15 bp, Homo sapiens
ttagctagatctata

SEQ ID NO: 1362207 - DNA, 15 bp, Homo sapiens
cttagctagatctat

SEQ ID NO: 1362208 - DNA, 15 bp, Homo sapiens
acttagctagatcta

SEQ ID NO: 1362209 - DNA, 15 bp, Homo sapiens
gacttagctagatct

SEQ ID NO: 1362210 - DNA, 15 bp, Homo sapiens
agacttagctagatc

SEQ ID NO: 1362211 - DNA, 15 bp, Homo sapiens
gagacttagctagat

SEQ ID NO: 1362212 - DNA, 15 bp, Homo sapiens
agagacttagctaga

SEQ ID NO: 1362213 - DNA, 15 bp, Homo sapiens
aagagacttagctag

SEQ ID NO: 1362214 - DNA, 15 bp, Homo sapiens
gaagagacttagcta

SEQ ID NO: 1362215 - DNA, 15 bp, Homo sapiens
agaagagacttagct

SEQ ID NO: 1362216 - DNA, 15 bp, Homo sapiens
aagaagagacttagc

SEQ ID NO: 1362217 - DNA, 15 bp, Homo sapiens
caagaagagacttag

SEQ ID NO: 1362218 - DNA, 15 bp, Homo sapiens
gcaagaagagactta

SEQ ID NO: 1362219 - DNA, 15 bp, Homo sapiens
tgcaagaagagactt

SEQ ID NO: 1362220 - DNA, 15 bp, Homo sapiens
gtgcaagaagagact

SEQ ID NO: 1362221 - DNA, 15 bp, Homo sapiens
ggtgcaagaagagac

SEQ ID NO: 1362222 - DNA, 15 bp, Homo sapiens
tggtgcaagaagaga

SEQ ID NO: 1362223 - DNA, 15 bp, Homo sapiens
ttggtgcaagaagag

SEQ ID NO: 1362224 - DNA, 15 bp, Homo sapiens
attggtgcaagaaga

SEQ ID NO: 1362225 - DNA, 15 bp, Homo sapiens
aattggtgcaagaag

SEQ ID NO: 1362226 - DNA, 15 bp, Homo sapiens
aaattggtgcaagaa

SEQ ID NO: 1362227 - DNA, 15 bp, Homo sapiens
aaaattggtgcaaga

SEQ ID NO: 1362228 - DNA, 15 bp, Homo sapiens
taaaattggtgcaag

SEQ ID NO: 1362229 - DNA, 15 bp, Homo sapiens
ctaaaattggtgcaa

SEQ ID NO: 1362230 - DNA, 15 bp, Homo sapiens
gctaaaattggtgca

SEQ ID NO: 1362231 - DNA, 15 bp, Homo sapiens
tgctaaaattggtgc

SEQ ID NO: 1362232 - DNA, 15 bp, Homo sapiens
gtgctaaaattggtg

SEQ ID NO: 1362233 - DNA, 15 bp, Homo sapiens
agtgctaaaattggt

SEQ ID NO: 1362234 - DNA, 15 bp, Homo sapiens
aagtgctaaaattgg

SEQ ID NO: 1362235 - DNA, 15 bp, Homo sapiens
aaagtgctaaaattg

SEQ ID NO: 1362236 - DNA, 15 bp, Homo sapiens
aaaagtgctaaaatt

SEQ ID NO: 1362237 - DNA, 15 bp, Homo sapiens
gaaaagtgctaaaat

SEQ ID NO: 1362238 - DNA, 15 bp, Homo sapiens
tgaaaagtgctaaaa

SEQ ID NO: 1362239 - DNA, 15 bp, Homo sapiens
gtgaaaagtgctaaa

SEQ ID NO: 1362240 - DNA, 15 bp, Homo sapiens
tgtgaaaagtgctaa

SEQ ID NO: 1362241 - DNA, 15 bp, Homo sapiens
ctgtgaaaagtgcta

SEQ ID NO: 1362242 - DNA, 15 bp, Homo sapiens
actgtgaaaagtgct

SEQ ID NO: 1362243 - DNA, 15 bp, Homo sapiens
aactgtgaaaagtgc

SEQ ID NO: 1362244 - DNA, 15 bp, Homo sapiens
gaactgtgaaaagtg

SEQ ID NO: 1362245 - DNA, 15 bp, Homo sapiens
ggaactgtgaaaagt

SEQ ID NO: 1362246 - DNA, 15 bp, Homo sapiens
tggaactgtgaaaag

SEQ ID NO: 1362247 - DNA, 15 bp, Homo sapiens
ctggaactgtgaaaa

SEQ ID NO: 1362248 - DNA, 15 bp, Homo sapiens
tctggaactgtgaaa

SEQ ID NO: 1362249 - DNA, 15 bp, Homo sapiens
ttctggaactgtgaa

SEQ ID NO: 1362250 - DNA, 15 bp, Homo sapiens
tttctggaactgtga

SEQ ID NO: 1362251 - DNA, 15 bp, Homo sapiens
atttctggaactgtg

SEQ ID NO: 1362252 - DNA, 15 bp, Homo sapiens
aatttctggaactgt

SEQ ID NO: 1362253 - DNA, 15 bp, Homo sapiens
aaatttctggaactg

SEQ ID NO: 1362254 - DNA, 15 bp, Homo sapiens
caaatttctggaact

SEQ ID NO: 1362255 - DNA, 15 bp, Homo sapiens
acaaatttctggaac

SEQ ID NO: 1362256 - DNA, 15 bp, Homo sapiens
gacaaatttctggaa

SEQ ID NO: 1362257 - DNA, 15 bp, Homo sapiens
ggacaaatttctgga

SEQ ID NO: 1362258 - DNA, 15 bp, Homo sapiens
tggacaaatttctgg

SEQ ID NO: 1362259 - DNA, 15 bp, Homo sapiens
atggacaaatttctg

SEQ ID NO: 1362260 - DNA, 15 bp, Homo sapiens
aatggacaaatttct

SEQ ID NO: 1362261 - DNA, 15 bp, Homo sapiens
aaatggacaaatttc

SEQ ID NO: 1362262 - DNA, 15 bp, Homo sapiens
aaaatggacaaattt

SEQ ID NO: 1362263 - DNA, 15 bp, Homo sapiens
taaaatggacaaatt

SEQ ID NO: 1362264 - DNA, 15 bp, Homo sapiens
ataaaatggacaaat

SEQ ID NO: 1362265 - DNA, 15 bp, Homo sapiens
aataaaatggacaaa

SEQ ID NO: 1362266 - DNA, 15 bp, Homo sapiens
gaataaaatggacaa

SEQ ID NO: 1362267 - DNA, 15 bp, Homo sapiens
tgaataaaatggaca

SEQ ID NO: 1362268 - DNA, 15 bp, Homo sapiens
ttgaataaaatggac

SEQ ID NO: 1362269 - DNA, 15 bp, Homo sapiens
tttgaataaaatgga

SEQ ID NO: 1362270 - DNA, 15 bp, Homo sapiens
gtttgaataaaatgg

SEQ ID NO: 1362271 - DNA, 15 bp, Homo sapiens
agtttgaataaaatg

SEQ ID NO: 1362272 - DNA, 15 bp, Homo sapiens
aagtttgaataaaat

SEQ ID NO: 1362273 - DNA, 15 bp, Homo sapiens
taagtttgaataaaa

SEQ ID NO: 1362274 - DNA, 15 bp, Homo sapiens
ataagtttgaataaa

SEQ ID NO: 1362275 - DNA, 15 bp, Homo sapiens
aataagtttgaataa

SEQ ID NO: 1362276 - DNA, 15 bp, Homo sapiens
caataagtttgaata

SEQ ID NO: 1362277 - DNA, 15 bp, Homo sapiens
ccaataagtttgaat

SEQ ID NO: 1362278 - DNA, 15 bp, Homo sapiens
gccaataagtttgaa

SEQ ID NO: 1362279 - DNA, 15 bp, Homo sapiens
tgccaataagtttga

SEQ ID NO: 1362280 - DNA, 15 bp, Homo sapiens
atgccaataagtttg

SEQ ID NO: 1362281 - DNA, 15 bp, Homo sapiens
catgccaataagttt

SEQ ID NO: 1362282 - DNA, 15 bp, Homo sapiens
gcatgccaataagtt

SEQ ID NO: 1362283 - DNA, 15 bp, Homo sapiens
tgcatgccaataagt

SEQ ID NO: 1362284 - DNA, 15 bp, Homo sapiens
ctgcatgccaataag

SEQ ID NO: 1362285 - DNA, 15 bp, Homo sapiens
actgcatgccaataa

SEQ ID NO: 1362286 - DNA, 15 bp, Homo sapiens
cactgcatgccaata

SEQ ID NO: 1362287 - DNA, 15 bp, Homo sapiens
acactgcatgccaat

SEQ ID NO: 1362288 - DNA, 15 bp, Homo sapiens
aacactgcatgccaa

SEQ ID NO: 1362289 - DNA, 15 bp, Homo sapiens
aaacactgcatgcca

SEQ ID NO: 1362290 - DNA, 15 bp, Homo sapiens
aaaacactgcatgcc

SEQ ID NO: 1362291 - DNA, 15 bp, Homo sapiens
taaaacactgcatgc

SEQ ID NO: 1362292 - DNA, 15 bp, Homo sapiens
gtaaaacactgcatg

SEQ ID NO: 1362293 - DNA, 15 bp, Homo sapiens
tgtaaaacactgcat

SEQ ID NO: 1362294 - DNA, 15 bp, Homo sapiens
atgtaaaacactgca

SEQ ID NO: 1362295 - DNA, 15 bp, Homo sapiens
catgtaaaacactgc

SEQ ID NO: 1362296 - DNA, 15 bp, Homo sapiens
tcatgtaaaacactg

SEQ ID NO: 1362297 - DNA, 15 bp, Homo sapiens
atcatgtaaaacact

SEQ ID NO: 1362298 - DNA, 15 bp, Homo sapiens
aatcatgtaaaacac

SEQ ID NO: 1362299 - DNA, 15 bp, Homo sapiens
taatcatgtaaaaca

SEQ ID NO: 1362300 - DNA, 15 bp, Homo sapiens
ataatcatgtaaaac

SEQ ID NO: 1362301 - DNA, 15 bp, Homo sapiens
aataatcatgtaaaa

SEQ ID NO: 1362302 - DNA, 15 bp, Homo sapiens
gaataatcatgtaaa

SEQ ID NO: 1362303 - DNA, 15 bp, Homo sapiens
agaataatcatgtaa

SEQ ID NO: 1362304 - DNA, 15 bp, Homo sapiens
aagaataatcatgta

SEQ ID NO: 1362305 - DNA, 15 bp, Homo sapiens
taagaataatcatgt

SEQ ID NO: 1362306 - DNA, 15 bp, Homo sapiens
ataagaataatcatg

SEQ ID NO: 1362307 - DNA, 15 bp, Homo sapiens
aataagaataatcat

SEQ ID NO: 1362308 - DNA, 15 bp, Homo sapiens
taataagaataatca

SEQ ID NO: 1362309 - DNA, 15 bp, Homo sapiens
ataataagaataatc

SEQ ID NO: 1362310 - DNA, 15 bp, Homo sapiens
tataataagaataat

SEQ ID NO: 1362311 - DNA, 15 bp, Homo sapiens
atataataagaataa

SEQ ID NO: 1362312 - DNA, 15 bp, Homo sapiens
aatataataagaata

SEQ ID NO: 1362313 - DNA, 15 bp, Homo sapiens
taatataataagaat

SEQ ID NO: 1362314 - DNA, 15 bp, Homo sapiens
ataatataataagaa

SEQ ID NO: 1362315 - DNA, 15 bp, Homo sapiens
tataatataataaga

SEQ ID NO: 1362316 - DNA, 15 bp, Homo sapiens
ttataatataataag

SEQ ID NO: 1362317 - DNA, 15 bp, Homo sapiens
tttataatataataa

SEQ ID NO: 1362318 - DNA, 15 bp, Homo sapiens
gtttataatataata

SEQ ID NO: 1362319 - DNA, 15 bp, Homo sapiens
agtttataatataat

SEQ ID NO: 1362320 - DNA, 15 bp, Homo sapiens
aagtttataatataa

SEQ ID NO: 1362321 - DNA, 15 bp, Homo sapiens
taagtttataatata

SEQ ID NO: 1362322 - DNA, 15 bp, Homo sapiens
ataagtttataatat

SEQ ID NO: 1362323 - DNA, 15 bp, Homo sapiens
aataagtttataata

SEQ ID NO: 1362324 - DNA, 15 bp, Homo sapiens
aaataagtttataat

SEQ ID NO: 1362325 - DNA, 15 bp, Homo sapiens
aaaataagtttataa

SEQ ID NO: 1362326 - DNA, 15 bp, Homo sapiens
taaaataagtttata

SEQ ID NO: 1362327 - DNA, 15 bp, Homo sapiens
ataaaataagtttat

SEQ ID NO: 1362328 - DNA, 15 bp, Homo sapiens
tataaaataagttta

SEQ ID NO: 1362329 - DNA, 15 bp, Homo sapiens
atataaaataagttt

SEQ ID NO: 1362330 - DNA, 15 bp, Homo sapiens
gatataaaataagtt

SEQ ID NO: 1362331 - DNA, 15 bp, Homo sapiens
agatataaaataagt

SEQ ID NO: 1362332 - DNA, 15 bp, Homo sapiens
cagatataaaataag

SEQ ID NO: 1362333 - DNA, 15 bp, Homo sapiens
acagatataaaataa

SEQ ID NO: 1362334 - DNA, 15 bp, Homo sapiens
cacagatataaaata

SEQ ID NO: 1362335 - DNA, 15 bp, Homo sapiens
tcacagatataaaat

SEQ ID NO: 1362336 - DNA, 15 bp, Homo sapiens
gtcacagatataaaa

SEQ ID NO: 1362337 - DNA, 15 bp, Homo sapiens
agtcacagatataaa

SEQ ID NO: 1362338 - DNA, 15 bp, Homo sapiens
tagtcacagatataa

SEQ ID NO: 1362339 - DNA, 15 bp, Homo sapiens
atagtcacagatata

SEQ ID NO: 1362340 - DNA, 15 bp, Homo sapiens
aatagtcacagatat

SEQ ID NO: 1362341 - DNA, 15 bp, Homo sapiens
aaatagtcacagata

SEQ ID NO: 1362342 - DNA, 15 bp, Homo sapiens
gaaatagtcacagat

SEQ ID NO: 1362343 - DNA, 15 bp, Homo sapiens
ggaaatagtcacaga

SEQ ID NO: 1362344 - DNA, 15 bp, Homo sapiens
gggaaatagtcacag

SEQ ID NO: 1362345 - DNA, 15 bp, Homo sapiens
agggaaatagtcaca

SEQ ID NO: 1362346 - DNA, 15 bp, Homo sapiens
aagggaaatagtcac

SEQ ID NO: 1362347 - DNA, 15 bp, Homo sapiens
taagggaaatagtca

SEQ ID NO: 1362348 - DNA, 15 bp, Homo sapiens
ataagggaaatagtc

SEQ ID NO: 1362349 - DNA, 15 bp, Homo sapiens
aataagggaaatagt

SEQ ID NO: 1362350 - DNA, 15 bp, Homo sapiens
aaataagggaaatag

SEQ ID NO: 1362351 - DNA, 15 bp, Homo sapiens
gaaataagggaaata

SEQ ID NO: 1362352 - DNA, 15 bp, Homo sapiens
atgaaataagggaaa

SEQ ID NO: 1362353 - DNA, 15 bp, Homo sapiens
aatgaaataagggaa

SEQ ID NO: 1362354 - DNA, 15 bp, Homo sapiens
gaatgaaataaggga

SEQ ID NO: 1362355 - DNA, 15 bp, Homo sapiens
agaatgaaataaggg

SEQ ID NO: 1362356 - DNA, 15 bp, Homo sapiens
cagaatgaaataagg

SEQ ID NO: 1362357 - DNA, 15 bp, Homo sapiens
ccagaatgaaataag

SEQ ID NO: 1362358 - DNA, 15 bp, Homo sapiens
cccagaatgaaataa

SEQ ID NO: 1362359 - DNA, 15 bp, Homo sapiens
acccagaatgaaata

SEQ ID NO: 1362360 - DNA, 15 bp, Homo sapiens
aacccagaatgaaat

SEQ ID NO: 1362361 - DNA, 15 bp, Homo sapiens
aaacccagaatgaaa

SEQ ID NO: 1362362 - DNA, 15 bp, Homo sapiens
aaaacccagaatgaa

SEQ ID NO: 1362363 - DNA, 15 bp, Homo sapiens
taaaacccagaatga

SEQ ID NO: 1362364 - DNA, 15 bp, Homo sapiens
ataaaacccagaatg

SEQ ID NO: 1362365 - DNA, 15 bp, Homo sapiens
cataaaacccagaat

SEQ ID NO: 1362366 - DNA, 15 bp, Homo sapiens
acataaaacccagaa

SEQ ID NO: 1362367 - DNA, 15 bp, Homo sapiens
tacataaaacccaga

SEQ ID NO: 1362368 - DNA, 15 bp, Homo sapiens
atacataaaacccag

SEQ ID NO: 1362369 - DNA, 15 bp, Homo sapiens
aatacataaaaccca

SEQ ID NO: 1362370 - DNA, 15 bp, Homo sapiens
aaatacataaaaccc

SEQ ID NO: 1362371 - DNA, 15 bp, Homo sapiens
aaaatacataaaacc

SEQ ID NO: 1362372 - DNA, 15 bp, Homo sapiens
gaaaatacataaaac

SEQ ID NO: 1362373 - DNA, 15 bp, Homo sapiens
tgaaaatacataaaa

SEQ ID NO: 1362374 - DNA, 15 bp, Homo sapiens
atgaaaatacataaa

SEQ ID NO: 1362375 - DNA, 15 bp, Homo sapiens
aatgaaaatacataa

SEQ ID NO: 1362376 - DNA, 15 bp, Homo sapiens
aaatgaaaatacata

SEQ ID NO: 1362377 - DNA, 15 bp, Homo sapiens
taaatgaaaatacat

SEQ ID NO: 1362378 - DNA, 15 bp, Homo sapiens
ataaatgaaaataca

SEQ ID NO: 1362379 - DNA, 15 bp, Homo sapiens
aataaatgaaaatac

SEQ ID NO: 1362380 - DNA, 15 bp, Homo sapiens
aaataaatgaaaata

SEQ ID NO: 1362381 - DNA, 15 bp, Homo sapiens
aaaataaatgaaaat

SEQ ID NO: 1362382 - DNA, 15 bp, Homo sapiens
aaaaataaatgaaaa

SEQ ID NO: 1362383 - DNA, 15 bp, Homo sapiens
taaaaataaatgaaa

SEQ ID NO: 1362384 - DNA, 15 bp, Homo sapiens
ttaaaaataaatgaa

SEQ ID NO: 1362385 - DNA, 15 bp, Homo sapiens
tttaaaaataaatga

SEQ ID NO: 1362386 - DNA, 15 bp, Homo sapiens
ttttaaaaataaatg

SEQ ID NO: 1362387 - DNA, 15 bp, Homo sapiens
tttttaaaaataaat

SEQ ID NO: 1362388 - DNA, 15 bp, Homo sapiens
taatttttaaaaata

SEQ ID NO: 1362389 - DNA, 15 bp, Homo sapiens
ctaatttttaaaaat

SEQ ID NO: 1362390 - DNA, 15 bp, Homo sapiens
gctaatttttaaaaa

SEQ ID NO: 1362391 - DNA, 15 bp, Homo sapiens
ggctaatttttaaaa

SEQ ID NO: 1362392 - DNA, 15 bp, Homo sapiens
aggctaatttttaaa

SEQ ID NO: 1362393 - DNA, 15 bp, Homo sapiens
aaggctaatttttaa

SEQ ID NO: 1362394 - DNA, 15 bp, Homo sapiens
caaggctaattttta

SEQ ID NO: 1362395 - DNA, 15 bp, Homo sapiens
gcaaggctaattttt

SEQ ID NO: 1362396 - DNA, 15 bp, Homo sapiens
ggcaaggctaatttt

SEQ ID NO: 1362397 - DNA, 15 bp, Homo sapiens
tggcaaggctaattt

SEQ ID NO: 1362398 - DNA, 15 bp, Homo sapiens
atggcaaggctaatt

SEQ ID NO: 1362399 - DNA, 15 bp, Homo sapiens
tatggcaaggctaat

SEQ ID NO: 1362400 - DNA, 15 bp, Homo sapiens
gtatggcaaggctaa

SEQ ID NO: 1362401 - DNA, 15 bp, Homo sapiens
cgtatggcaaggcta

SEQ ID NO: 1362402 - DNA, 15 bp, Homo sapiens
acgtatggcaaggct

SEQ ID NO: 1362403 - DNA, 15 bp, Homo sapiens
aacgtatggcaaggc

SEQ ID NO: 1362404 - DNA, 15 bp, Homo sapiens
caacgtatggcaagg

SEQ ID NO: 1362405 - DNA, 15 bp, Homo sapiens
tcaacgtatggcaag

SEQ ID NO: 1362406 - DNA, 15 bp, Homo sapiens
atcaacgtatggcaa

SEQ ID NO: 1362407 - DNA, 15 bp, Homo sapiens
aatcaacgtatggca

SEQ ID NO: 1362408 - DNA, 15 bp, Homo sapiens
gaatcaacgtatggc

SEQ ID NO: 1362409 - DNA, 15 bp, Homo sapiens
agaatcaacgtatgg

SEQ ID NO: 1362410 - DNA, 15 bp, Homo sapiens
aagaatcaacgtatg

SEQ ID NO: 1362411 - DNA, 15 bp, Homo sapiens
gaagaatcaacgtat

SEQ ID NO: 1362412 - DNA, 15 bp, Homo sapiens
agaagaatcaacgta

SEQ ID NO: 1362413 - DNA, 15 bp, Homo sapiens
aagaagaatcaacgt

SEQ ID NO: 1362414 - DNA, 15 bp, Homo sapiens
caagaagaatcaacg

SEQ ID NO: 1362415 - DNA, 15 bp, Homo sapiens
acaagaagaatcaac

SEQ ID NO: 1362416 - DNA, 15 bp, Homo sapiens
aacaagaagaatcaa

SEQ ID NO: 1362417 - DNA, 15 bp, Homo sapiens
aaacaagaagaatca

SEQ ID NO: 1362418 - DNA, 15 bp, Homo sapiens
caaacaagaagaatc

SEQ ID NO: 1362419 - DNA, 15 bp, Homo sapiens
acaaacaagaagaat

SEQ ID NO: 1362420 - DNA, 15 bp, Homo sapiens
gacaaacaagaagaa

SEQ ID NO: 1362421 - DNA, 15 bp, Homo sapiens
agacaaacaagaaga

SEQ ID NO: 1362422 - DNA, 15 bp, Homo sapiens
aagacaaacaagaag

SEQ ID NO: 1362423 - DNA, 15 bp, Homo sapiens
aaagacaaacaagaa

SEQ ID NO: 1362424 - DNA, 15 bp, Homo sapiens
aaaagacaaacaaga

SEQ ID NO: 1362425 - DNA, 15 bp, Homo sapiens
gaaaagacaaacaag

SEQ ID NO: 1362426 - DNA, 15 bp, Homo sapiens
tgaaaagacaaacaa

SEQ ID NO: 1362427 - DNA, 15 bp, Homo sapiens
ttgaaaagacaaaca

SEQ ID NO: 1362428 - DNA, 15 bp, Homo sapiens
gttgaaaagacaaac

SEQ ID NO: 1362429 - DNA, 15 bp, Homo sapiens
cgttgaaaagacaaa

SEQ ID NO: 1362430 - DNA, 15 bp, Homo sapiens
tcgttgaaaagacaa

SEQ ID NO: 1362431 - DNA, 15 bp, Homo sapiens
ttcgttgaaaagaca

SEQ ID NO: 1362432 - DNA, 15 bp, Homo sapiens
cttcgttgaaaagac

SEQ ID NO: 1362433 - DNA, 15 bp, Homo sapiens
ccttcgttgaaaaga

SEQ ID NO: 1362434 - DNA, 15 bp, Homo sapiens
tccttcgttgaaaag

SEQ ID NO: 1362435 - DNA, 15 bp, Homo sapiens
ctccttcgttgaaaa

SEQ ID NO: 1362436 - DNA, 15 bp, Homo sapiens
tctccttcgttgaaa

SEQ ID NO: 1362437 - DNA, 15 bp, Homo sapiens
atctccttcgttgaa

SEQ ID NO: 1362438 - DNA, 15 bp, Homo sapiens
aatctccttcgttga

SEQ ID NO: 1362439 - DNA, 15 bp, Homo sapiens
aaatctccttcgttg

SEQ ID NO: 1362440 - DNA, 15 bp, Homo sapiens
aaaatctccttcgtt

SEQ ID NO: 1362441 - DNA, 15 bp, Homo sapiens
caaaatctccttcgt

SEQ ID NO: 1362442 - DNA, 15 bp, Homo sapiens
ccaaaatctccttcg

SEQ ID NO: 1362443 - DNA, 15 bp, Homo sapiens
accaaaatctccttc

SEQ ID NO: 1362444 - DNA, 15 bp, Homo sapiens
aaccaaaatctcctt

SEQ ID NO: 1362445 - DNA, 15 bp, Homo sapiens
aaaccaaaatctcct

SEQ ID NO: 1362446 - DNA, 15 bp, Homo sapiens
gaaaccaaaatctcc

SEQ ID NO: 1362447 - DNA, 15 bp, Homo sapiens
tgaaaccaaaatctc

SEQ ID NO: 1362448 - DNA, 15 bp, Homo sapiens
atgaaaccaaaatct

SEQ ID NO: 1362449 - DNA, 15 bp, Homo sapiens
aatgaaaccaaaatc

SEQ ID NO: 1362450 - DNA, 15 bp, Homo sapiens
aaatgaaaccaaaat

SEQ ID NO: 1362451 - DNA, 15 bp, Homo sapiens
taaatgaaaccaaaa

SEQ ID NO: 1362452 - DNA, 15 bp, Homo sapiens
ataaatgaaaccaaa

SEQ ID NO: 1362453 - DNA, 15 bp, Homo sapiens
cataaatgaaaccaa

SEQ ID NO: 1362454 - DNA, 15 bp, Homo sapiens
gcataaatgaaacca

SEQ ID NO: 1362455 - DNA, 15 bp, Homo sapiens
tgcataaatgaaacc

SEQ ID NO: 1362456 - DNA, 15 bp, Homo sapiens
atgcataaatgaaac

SEQ ID NO: 1362457 - DNA, 15 bp, Homo sapiens
tatgcataaatgaaa

SEQ ID NO: 1362458 - DNA, 15 bp, Homo sapiens
atatgcataaatgaa

SEQ ID NO: 1362459 - DNA, 15 bp, Homo sapiens
aatatgcataaatga

SEQ ID NO: 1362460 - DNA, 15 bp, Homo sapiens
aaatatgcataaatg

SEQ ID NO: 1362461 - DNA, 15 bp, Homo sapiens
taaatatgcataaat

SEQ ID NO: 1362462 - DNA, 15 bp, Homo sapiens
ataaatatgcataaa

SEQ ID NO: 1362463 - DNA, 15 bp, Homo sapiens
tataaatatgcataa

SEQ ID NO: 1362464 - DNA, 15 bp, Homo sapiens
ttataaatatgcata

SEQ ID NO: 1362465 - DNA, 15 bp, Homo sapiens
tttataaatatgcat

SEQ ID NO: 1362466 - DNA, 15 bp, Homo sapiens
atttataaatatgca

SEQ ID NO: 1362467 - DNA, 15 bp, Homo sapiens
tatttataaatatgc

SEQ ID NO: 1362468 - DNA, 15 bp, Homo sapiens
gtatttataaatatg

SEQ ID NO: 1362469 - DNA, 15 bp, Homo sapiens
agtatttataaatat

SEQ ID NO: 1362470 - DNA, 15 bp, Homo sapiens
aagtatttataaata

SEQ ID NO: 1362471 - DNA, 15 bp, Homo sapiens
aaagtatttataaat

SEQ ID NO: 1362472 - DNA, 15 bp, Homo sapiens
taaagtatttataaa

SEQ ID NO: 1362473 - DNA, 15 bp, Homo sapiens
ttaaagtatttataa

SEQ ID NO: 1362474 - DNA, 15 bp, Homo sapiens
tttaaagtatttata

SEQ ID NO: 1362475 - DNA, 15 bp, Homo sapiens
gtttaaagtatttat

SEQ ID NO: 1362476 - DNA, 15 bp, Homo sapiens
agtttaaagtattta

SEQ ID NO: 1362477 - DNA, 15 bp, Homo sapiens
cagtttaaagtattt

SEQ ID NO: 1362478 - DNA, 15 bp, Homo sapiens
tcagtttaaagtatt

SEQ ID NO: 1362479 - DNA, 15 bp, Homo sapiens
ttcagtttaaagtat

SEQ ID NO: 1362480 - DNA, 15 bp, Homo sapiens
cttcagtttaaagta

SEQ ID NO: 1362481 - DNA, 15 bp, Homo sapiens
ccttcagtttaaagt

SEQ ID NO: 1362482 - DNA, 15 bp, Homo sapiens
cccttcagtttaaag

SEQ ID NO: 1362483 - DNA, 15 bp, Homo sapiens
acccttcagtttaaa

SEQ ID NO: 1362484 - DNA, 15 bp, Homo sapiens
tacccttcagtttaa

SEQ ID NO: 1362485 - DNA, 15 bp, Homo sapiens
ctacccttcagttta

SEQ ID NO: 1362486 - DNA, 15 bp, Homo sapiens
actacccttcagttt

SEQ ID NO: 1362487 - DNA, 15 bp, Homo sapiens
tactacccttcagtt

SEQ ID NO: 1362488 - DNA, 15 bp, Homo sapiens
ttactacccttcagt

SEQ ID NO: 1362489 - DNA, 15 bp, Homo sapiens
tttactacccttcag

SEQ ID NO: 1362490 - DNA, 15 bp, Homo sapiens
ttttactacccttca

SEQ ID NO: 1362491 - DNA, 15 bp, Homo sapiens
cttttactacccttc

SEQ ID NO: 1362492 - DNA, 15 bp, Homo sapiens
gcttttactaccctt

SEQ ID NO: 1362493 - DNA, 15 bp, Homo sapiens
tgcttttactaccct

SEQ ID NO: 1362494 - DNA, 15 bp, Homo sapiens
atgcttttactaccc

SEQ ID NO: 1362495 - DNA, 15 bp, Homo sapiens
gatgcttttactacc

SEQ ID NO: 1362496 - DNA, 15 bp, Homo sapiens
agatgcttttactac

SEQ ID NO: 1362497 - DNA, 15 bp, Homo sapiens
gagatgcttttacta

SEQ ID NO: 1362498 - DNA, 15 bp, Homo sapiens
tgagatgcttttact

SEQ ID NO: 1362499 - DNA, 15 bp, Homo sapiens
atgagatgcttttac

SEQ ID NO: 1362500 - DNA, 15 bp, Homo sapiens
catgagatgctttta

SEQ ID NO: 1362501 - DNA, 15 bp, Homo sapiens
acatgagatgctttt

SEQ ID NO: 1362502 - DNA, 15 bp, Homo sapiens
gacatgagatgcttt

SEQ ID NO: 1362503 - DNA, 15 bp, Homo sapiens
tgacatgagatgctt

SEQ ID NO: 1362504 - DNA, 15 bp, Homo sapiens
ttgacatgagatgct

SEQ ID NO: 1362505 - DNA, 15 bp, Homo sapiens
gttgacatgagatgc

SEQ ID NO: 1362506 - DNA, 15 bp, Homo sapiens
tgttgacatgagatg

SEQ ID NO: 1362507 - DNA, 15 bp, Homo sapiens
atgttgacatgagat

SEQ ID NO: 1362508 - DNA, 15 bp, Homo sapiens
tatgttgacatgaga

SEQ ID NO: 1362509 - DNA, 15 bp, Homo sapiens
atatgttgacatgag

SEQ ID NO: 1362510 - DNA, 15 bp, Homo sapiens
catatgttgacatga

SEQ ID NO: 1362511 - DNA, 15 bp, Homo sapiens
tcatatgttgacatg

SEQ ID NO: 1362512 - DNA, 15 bp, Homo sapiens
ctcatatgttgacat

SEQ ID NO: 1362513 - DNA, 15 bp, Homo sapiens
cctcatatgttgaca

SEQ ID NO: 1362514 - DNA, 15 bp, Homo sapiens
ccctcatatgttgac

SEQ ID NO: 1362515 - DNA, 15 bp, Homo sapiens
tccctcatatgttga

SEQ ID NO: 1362516 - DNA, 15 bp, Homo sapiens
gtccctcatatgttg

SEQ ID NO: 1362517 - DNA, 15 bp, Homo sapiens
tgtccctcatatgtt

SEQ ID NO: 1362518 - DNA, 15 bp, Homo sapiens
atgtccctcatatgt

SEQ ID NO: 1362519 - DNA, 15 bp, Homo sapiens
tatgtccctcatatg

SEQ ID NO: 1362520 - DNA, 15 bp, Homo sapiens
ctatgtccctcatat

SEQ ID NO: 1362521 - DNA, 15 bp, Homo sapiens
tctatgtccctcata

SEQ ID NO: 1362522 - DNA, 15 bp, Homo sapiens
atctatgtccctcat

SEQ ID NO: 1362523 - DNA, 15 bp, Homo sapiens
tatctatgtccctca

SEQ ID NO: 1362524 - DNA, 15 bp, Homo sapiens
ttatctatgtccctc

SEQ ID NO: 1362525 - DNA, 15 bp, Homo sapiens
tttatctatgtccct

SEQ ID NO: 1362526 - DNA, 15 bp, Homo sapiens
ttttatctatgtccc

SEQ ID NO: 1362527 - DNA, 15 bp, Homo sapiens
attttatctatgtcc

SEQ ID NO: 1362528 - DNA, 15 bp, Homo sapiens
tattttatctatgtc

SEQ ID NO: 1362529 - DNA, 15 bp, Homo sapiens
ttattttatctatgt

SEQ ID NO: 1362530 - DNA, 15 bp, Homo sapiens
attattttatctatg

SEQ ID NO: 1362531 - DNA, 15 bp, Homo sapiens
tattattttatctat

SEQ ID NO: 1362532 - DNA, 15 bp, Homo sapiens
atattattttatcta

SEQ ID NO: 1362533 - DNA, 15 bp, Homo sapiens
aatattattttatct

SEQ ID NO: 1362534 - DNA, 15 bp, Homo sapiens
aaatattattttatc

SEQ ID NO: 1362535 - DNA, 15 bp, Homo sapiens
gtaaatattatttta

SEQ ID NO: 1362536 - DNA, 15 bp, Homo sapiens
tgtaaatattatttt

SEQ ID NO: 1362537 - DNA, 15 bp, Homo sapiens
ctgtaaatattattt

SEQ ID NO: 1362538 - DNA, 15 bp, Homo sapiens
cctgtaaatattatt

SEQ ID NO: 1362539 - DNA, 15 bp, Homo sapiens
tcctgtaaatattat

SEQ ID NO: 1362540 - DNA, 15 bp, Homo sapiens
ttcctgtaaatatta

SEQ ID NO: 1362541 - DNA, 15 bp, Homo sapiens
tttcctgtaaatatt

SEQ ID NO: 1362542 - DNA, 15 bp, Homo sapiens
ttttcctgtaaatat

SEQ ID NO: 1362543 - DNA, 15 bp, Homo sapiens
attttcctgtaaata

SEQ ID NO: 1362544 - DNA, 15 bp, Homo sapiens
aattttcctgtaaat

SEQ ID NO: 1362545 - DNA, 15 bp, Homo sapiens
aaattttcctgtaaa

SEQ ID NO: 1362546 - DNA, 15 bp, Homo sapiens
taaattttcctgtaa

SEQ ID NO: 1362547 - DNA, 15 bp, Homo sapiens
gtaaattttcctgta

SEQ ID NO: 1362548 - DNA, 15 bp, Homo sapiens
tgtaaattttcctgt

SEQ ID NO: 1362549 - DNA, 15 bp, Homo sapiens
ctgtaaattttcctg

SEQ ID NO: 1362550 - DNA, 15 bp, Homo sapiens
gctgtaaattttcct

SEQ ID NO: 1362551 - DNA, 15 bp, Homo sapiens
agctgtaaattttcc

SEQ ID NO: 1362552 - DNA, 15 bp, Homo sapiens
aagctgtaaattttc

SEQ ID NO: 1362553 - DNA, 15 bp, Homo sapiens
aaagctgtaaatttt

SEQ ID NO: 1362554 - DNA, 15 bp, Homo sapiens
caaagctgtaaattt

SEQ ID NO: 1362555 - DNA, 15 bp, Homo sapiens
tcaaagctgtaaatt

SEQ ID NO: 1362556 - DNA, 15 bp, Homo sapiens
ttcaaagctgtaaat

SEQ ID NO: 1362557 - DNA, 15 bp, Homo sapiens
attcaaagctgtaaa

SEQ ID NO: 1362558 - DNA, 15 bp, Homo sapiens
tattcaaagctgtaa

SEQ ID NO: 1362559 - DNA, 15 bp, Homo sapiens
gtattcaaagctgta

SEQ ID NO: 1362560 - DNA, 15 bp, Homo sapiens
tgtattcaaagctgt

SEQ ID NO: 1362561 - DNA, 15 bp, Homo sapiens
atgtattcaaagctg

SEQ ID NO: 1362562 - DNA, 15 bp, Homo sapiens
aatgtattcaaagct

SEQ ID NO: 1362563 - DNA, 15 bp, Homo sapiens
aaatgtattcaaagc

SEQ ID NO: 1362564 - DNA, 15 bp, Homo sapiens
taaatgtattcaaag

SEQ ID NO: 1362565 - DNA, 15 bp, Homo sapiens
ataaatgtattcaaa

SEQ ID NO: 1362566 - DNA, 15 bp, Homo sapiens
gataaatgtattcaa

SEQ ID NO: 1362567 - DNA, 15 bp, Homo sapiens
tgataaatgtattca

SEQ ID NO: 1362568 - DNA, 15 bp, Homo sapiens
gtgataaatgtattc

SEQ ID NO: 1362569 - DNA, 15 bp, Homo sapiens
tgtgataaatgtatt

SEQ ID NO: 1362570 - DNA, 15 bp, Homo sapiens
ttgtgataaatgtat

SEQ ID NO: 1362571 - DNA, 15 bp, Homo sapiens
tttgtgataaatgta

SEQ ID NO: 1362572 - DNA, 15 bp, Homo sapiens
ttttgtgataaatgt

SEQ ID NO: 1362573 - DNA, 15 bp, Homo sapiens
gttttgtgataaatg

SEQ ID NO: 1362574 - DNA, 15 bp, Homo sapiens
tgttttgtgataaat

SEQ ID NO: 1362575 - DNA, 15 bp, Homo sapiens
ttgttttgtgataaa

SEQ ID NO: 1362576 - DNA, 15 bp, Homo sapiens
tttgttttgtgataa

SEQ ID NO: 1362577 - DNA, 15 bp, Homo sapiens
ctttgttttgtgata

SEQ ID NO: 1362578 - DNA, 15 bp, Homo sapiens
tctttgttttgtgat

SEQ ID NO: 1362579 - DNA, 15 bp, Homo sapiens
atctttgttttgtga

SEQ ID NO: 1362580 - DNA, 15 bp, Homo sapiens
catctttgttttgtg

SEQ ID NO: 1362581 - DNA, 15 bp, Homo sapiens
tcatctttgttttgt

SEQ ID NO: 1362582 - DNA, 15 bp, Homo sapiens
gtcatctttgttttg

SEQ ID NO: 1362583 - DNA, 15 bp, Homo sapiens
ggtcatctttgtttt

SEQ ID NO: 1362584 - DNA, 15 bp, Homo sapiens
tggtcatctttgttt

SEQ ID NO: 1362585 - DNA, 15 bp, Homo sapiens
ttggtcatctttgtt

SEQ ID NO: 1362586 - DNA, 15 bp, Homo sapiens
tttggtcatctttgt

SEQ ID NO: 1362587 - DNA, 15 bp, Homo sapiens
ttttggtcatctttg

SEQ ID NO: 1362588 - DNA, 15 bp, Homo sapiens
tttttggtcatcttt

SEQ ID NO: 1362589 - DNA, 15 bp, Homo sapiens
atttttggtcatctt

SEQ ID NO: 1362590 - DNA, 15 bp, Homo sapiens
aatttttggtcatct

SEQ ID NO: 1362591 - DNA, 15 bp, Homo sapiens
aaatttttggtcatc

SEQ ID NO: 1362592 - DNA, 15 bp, Homo sapiens
caaatttttggtcat

SEQ ID NO: 1362593 - DNA, 15 bp, Homo sapiens
tcaaatttttggtca

SEQ ID NO: 1362594 - DNA, 15 bp, Homo sapiens
ctcaaatttttggtc

SEQ ID NO: 1362595 - DNA, 15 bp, Homo sapiens
gctcaaatttttggt

SEQ ID NO: 1362596 - DNA, 15 bp, Homo sapiens
agctcaaatttttgg

SEQ ID NO: 1362597 - DNA, 15 bp, Homo sapiens
cagctcaaatttttg

SEQ ID NO: 1362598 - DNA, 15 bp, Homo sapiens
tcagctcaaattttt

SEQ ID NO: 1362599 - DNA, 15 bp, Homo sapiens
ttcagctcaaatttt

SEQ ID NO: 1362600 - DNA, 15 bp, Homo sapiens
gttcagctcaaattt

SEQ ID NO: 1362601 - DNA, 15 bp, Homo sapiens
tgttcagctcaaatt

SEQ ID NO: 1362602 - DNA, 15 bp, Homo sapiens
atgttcagctcaaat

SEQ ID NO: 1362603 - DNA, 15 bp, Homo sapiens
aatgttcagctcaaa

SEQ ID NO: 1362604 - DNA, 15 bp, Homo sapiens
gaatgttcagctcaa

SEQ ID NO: 1362605 - DNA, 15 bp, Homo sapiens
tgaatgttcagctca

SEQ ID NO: 1362606 - DNA, 15 bp, Homo sapiens
ttgaatgttcagctc

SEQ ID NO: 1362607 - DNA, 15 bp, Homo sapiens
gttgaatgttcagct

SEQ ID NO: 1362608 - DNA, 15 bp, Homo sapiens
agttgaatgttcagc

SEQ ID NO: 1362609 - DNA, 15 bp, Homo sapiens
gagttgaatgttcag

SEQ ID NO: 1362610 - DNA, 15 bp, Homo sapiens
tgagttgaatgttca

SEQ ID NO: 1362611 - DNA, 15 bp, Homo sapiens
ttgagttgaatgttc

SEQ ID NO: 1362612 - DNA, 15 bp, Homo sapiens
tttgagttgaatgtt

SEQ ID NO: 1362613 - DNA, 15 bp, Homo sapiens
ctttgagttgaatgt

SEQ ID NO: 1362614 - DNA, 15 bp, Homo sapiens
cctttgagttgaatg

SEQ ID NO: 1362615 - DNA, 15 bp, Homo sapiens
tcctttgagttgaat

SEQ ID NO: 1362616 - DNA, 15 bp, Homo sapiens
atcctttgagttgaa

SEQ ID NO: 1362617 - DNA, 15 bp, Homo sapiens
tatcctttgagttga

SEQ ID NO: 1362618 - DNA, 15 bp, Homo sapiens
ttatcctttgagttg

SEQ ID NO: 1362619 - DNA, 15 bp, Homo sapiens
tttatcctttgagtt

SEQ ID NO: 1362620 - DNA, 15 bp, Homo sapiens
atttatcctttgagt

SEQ ID NO: 1362621 - DNA, 15 bp, Homo sapiens
tatttatcctttgag

SEQ ID NO: 1362622 - DNA, 15 bp, Homo sapiens
ctatttatcctttga

SEQ ID NO: 1362623 - DNA, 15 bp, Homo sapiens
tctatttatcctttg

SEQ ID NO: 1362624 - DNA, 15 bp, Homo sapiens
ctctatttatccttt

SEQ ID NO: 1362625 - DNA, 15 bp, Homo sapiens
gctctatttatcctt

SEQ ID NO: 1362626 - DNA, 15 bp, Homo sapiens
tgctctatttatcct

SEQ ID NO: 1362627 - DNA, 15 bp, Homo sapiens
ttgctctatttatcc

SEQ ID NO: 1362628 - DNA, 15 bp, Homo sapiens
tttgctctatttatc

SEQ ID NO: 1362629 - DNA, 15 bp, Homo sapiens
gtttgctctatttat

SEQ ID NO: 1362630 - DNA, 15 bp, Homo sapiens
ggtttgctctattta

SEQ ID NO: 1362631 - DNA, 15 bp, Homo sapiens
gggtttgctctattt

SEQ ID NO: 1362632 - DNA, 15 bp, Homo sapiens
tgggtttgctctatt

SEQ ID NO: 1362633 - DNA, 15 bp, Homo sapiens
ttgggtttgctctat

SEQ ID NO: 1362634 - DNA, 15 bp, Homo sapiens
tttgggtttgctcta

SEQ ID NO: 1362635 - DNA, 15 bp, Homo sapiens
ctttgggtttgctct

SEQ ID NO: 1362636 - DNA, 15 bp, Homo sapiens
tctttgggtttgctc

SEQ ID NO: 1362637 - DNA, 15 bp, Homo sapiens
ttctttgggtttgct

SEQ ID NO: 1362638 - DNA, 15 bp, Homo sapiens
tttctttgggtttgc

SEQ ID NO: 1362639 - DNA, 15 bp, Homo sapiens
atttctttgggtttg

SEQ ID NO: 1362640 - DNA, 15 bp, Homo sapiens
catttctttgggttt

SEQ ID NO: 1362641 - DNA, 15 bp, Homo sapiens
tcatttctttgggtt

SEQ ID NO: 1362642 - DNA, 15 bp, Homo sapiens
ctcatttctttgggt

SEQ ID NO: 1362643 - DNA, 15 bp, Homo sapiens
cctcatttctttggg

SEQ ID NO: 1362644 - DNA, 15 bp, Homo sapiens
tcctcatttctttgg

SEQ ID NO: 1362645 - DNA, 15 bp, Homo sapiens
ttcctcatttctttg

SEQ ID NO: 1362646 - DNA, 15 bp, Homo sapiens
cttcctcatttcttt

SEQ ID NO: 1362647 - DNA, 15 bp, Homo sapiens
tcttcctcatttctt

SEQ ID NO: 1362648 - DNA, 15 bp, Homo sapiens
ttcttcctcatttct

SEQ ID NO: 1362649 - DNA, 15 bp, Homo sapiens
tttcttcctcatttc

SEQ ID NO: 1362650 - DNA, 15 bp, Homo sapiens
ttttcttcctcattt

SEQ ID NO: 1362651 - DNA, 15 bp, Homo sapiens
attttcttcctcatt

SEQ ID NO: 1362652 - DNA, 15 bp, Homo sapiens
tattttcttcctcat

SEQ ID NO: 1362653 - DNA, 15 bp, Homo sapiens
ttattttcttcctca

SEQ ID NO: 1362654 - DNA, 15 bp, Homo sapiens
attattttcttcctc

SEQ ID NO: 1362655 - DNA, 15 bp, Homo sapiens
tattattttcttcct

SEQ ID NO: 1362656 - DNA, 15 bp, Homo sapiens
ttattattttcttcc

SEQ ID NO: 1362657 - DNA, 15 bp, Homo sapiens
tttattattttcttc

SEQ ID NO: 1362658 - DNA, 15 bp, Homo sapiens
ttttattattttctt

SEQ ID NO: 1362659 - DNA, 15 bp, Homo sapiens
aattttattattttc

SEQ ID NO: 1362660 - DNA, 15 bp, Homo sapiens
taattttattatttt

SEQ ID NO: 1362661 - DNA, 15 bp, Homo sapiens
ttaattttattattt

SEQ ID NO: 1362662 - DNA, 15 bp, Homo sapiens
attaattttattatt

SEQ ID NO: 1362663 - DNA, 15 bp, Homo sapiens
cattaattttattat

SEQ ID NO: 1362664 - DNA, 15 bp, Homo sapiens
ccattaattttatta

SEQ ID NO: 1362665 - DNA, 15 bp, Homo sapiens
gccattaattttatt

SEQ ID NO: 1362666 - DNA, 15 bp, Homo sapiens
tgccattaattttat

SEQ ID NO: 1362667 - DNA, 15 bp, Homo sapiens
ttgccattaatttta

SEQ ID NO: 1362668 - DNA, 15 bp, Homo sapiens
tttgccattaatttt

SEQ ID NO: 1362669 - DNA, 15 bp, Homo sapiens
ttttgccattaattt

SEQ ID NO: 1362670 - DNA, 15 bp, Homo sapiens
tttttgccattaatt

SEQ ID NO: 1362671 - DNA, 15 bp, Homo sapiens
atttttgccattaat

SEQ ID NO: 1362672 - DNA, 15 bp, Homo sapiens
catttttgccattaa

SEQ ID NO: 1362673 - DNA, 15 bp, Homo sapiens
tcatttttgccatta

SEQ ID NO: 1362674 - DNA, 15 bp, Homo sapiens
ttcatttttgccatt

SEQ ID NO: 1362675 - DNA, 15 bp, Homo sapiens
attcatttttgccat

SEQ ID NO: 1362676 - DNA, 15 bp, Homo sapiens
cattcatttttgcca

SEQ ID NO: 1362677 - DNA, 15 bp, Homo sapiens
tcattcatttttgcc

SEQ ID NO: 1362678 - DNA, 15 bp, Homo sapiens
ctcattcatttttgc

SEQ ID NO: 1362679 - DNA, 15 bp, Homo sapiens
tctcattcatttttg

SEQ ID NO: 1362680 - DNA, 15 bp, Homo sapiens
atctcattcattttt

SEQ ID NO: 1362681 - DNA, 15 bp, Homo sapiens
gatctcattcatttt

SEQ ID NO: 1362682 - DNA, 15 bp, Homo sapiens
cgatctcattcattt

SEQ ID NO: 1362683 - DNA, 15 bp, Homo sapiens
tcgatctcattcatt

SEQ ID NO: 1362684 - DNA, 15 bp, Homo sapiens
ttcgatctcattcat

SEQ ID NO: 1362685 - DNA, 15 bp, Homo sapiens
tttcgatctcattca

SEQ ID NO: 1362686 - DNA, 15 bp, Homo sapiens
ttttcgatctcattc

SEQ ID NO: 1362687 - DNA, 15 bp, Homo sapiens
gttttcgatctcatt

SEQ ID NO: 1362688 - DNA, 15 bp, Homo sapiens
ggttttcgatctcat

SEQ ID NO: 1362689 - DNA, 15 bp, Homo sapiens
tggttttcgatctca

SEQ ID NO: 1362690 - DNA, 15 bp, Homo sapiens
gtggttttcgatctc

SEQ ID NO: 1362691 - DNA, 15 bp, Homo sapiens
tgtggttttcgatct

SEQ ID NO: 1362692 - DNA, 15 bp, Homo sapiens
ttgtggttttcgatc

SEQ ID NO: 1362693 - DNA, 15 bp, Homo sapiens
gttgtggttttcgat

SEQ ID NO: 1362694 - DNA, 15 bp, Homo sapiens
tgttgtggttttcga

SEQ ID NO: 1362695 - DNA, 15 bp, Homo sapiens
ttgttgtggttttcg

SEQ ID NO: 1362696 - DNA, 15 bp, Homo sapiens
tttgttgtggttttc

SEQ ID NO: 1362697 - DNA, 15 bp, Homo sapiens
ttttgttgtggtttt

SEQ ID NO: 1362698 - DNA, 15 bp, Homo sapiens
tttttgttgtggttt

SEQ ID NO: 1362699 - DNA, 15 bp, Homo sapiens
atttttgttgtggtt

SEQ ID NO: 1362700 - DNA, 15 bp, Homo sapiens
aatttttgttgtggt

SEQ ID NO: 1362701 - DNA, 15 bp, Homo sapiens
caatttttgttgtgg

SEQ ID NO: 1362702 - DNA, 15 bp, Homo sapiens
ccaatttttgttgtg

SEQ ID NO: 1362703 - DNA, 15 bp, Homo sapiens
accaatttttgttgt

SEQ ID NO: 1362704 - DNA, 15 bp, Homo sapiens
gaccaatttttgttg

SEQ ID NO: 1362705 - DNA, 15 bp, Homo sapiens
tgaccaatttttgtt

SEQ ID NO: 1362706 - DNA, 15 bp, Homo sapiens
ttgaccaatttttgt

SEQ ID NO: 1362707 - DNA, 15 bp, Homo sapiens
tttgaccaatttttg

SEQ ID NO: 1362708 - DNA, 15 bp, Homo sapiens
ttttgaccaattttt

SEQ ID NO: 1362709 - DNA, 15 bp, Homo sapiens
gttttgaccaatttt

SEQ ID NO: 1362710 - DNA, 15 bp, Homo sapiens
agttttgaccaattt

SEQ ID NO: 1362711 - DNA, 15 bp, Homo sapiens
cagttttgaccaatt

SEQ ID NO: 1362712 - DNA, 15 bp, Homo sapiens
tcagttttgaccaat

SEQ ID NO: 1362713 - DNA, 15 bp, Homo sapiens
gtcagttttgaccaa

SEQ ID NO: 1362714 - DNA, 15 bp, Homo sapiens
tgtcagttttgacca

SEQ ID NO: 1362715 - DNA, 15 bp, Homo sapiens
ttgtcagttttgacc

SEQ ID NO: 1362716 - DNA, 15 bp, Homo sapiens
attgtcagttttgac

SEQ ID NO: 1362717 - DNA, 15 bp, Homo sapiens
aattgtcagttttga

SEQ ID NO: 1362718 - DNA, 15 bp, Homo sapiens
aaattgtcagttttg

SEQ ID NO: 1362719 - DNA, 15 bp, Homo sapiens
taaattgtcagtttt

SEQ ID NO: 1362720 - DNA, 15 bp, Homo sapiens
ataaattgtcagttt

SEQ ID NO: 1362721 - DNA, 15 bp, Homo sapiens
tataaattgtcagtt

SEQ ID NO: 1362722 - DNA, 15 bp, Homo sapiens
gtataaattgtcagt

SEQ ID NO: 1362723 - DNA, 15 bp, Homo sapiens
agtataaattgtcag

SEQ ID NO: 1362724 - DNA, 15 bp, Homo sapiens
aagtataaattgtca

SEQ ID NO: 1362725 - DNA, 15 bp, Homo sapiens
aaagtataaattgtc

SEQ ID NO: 1362726 - DNA, 15 bp, Homo sapiens
aaaagtataaattgt

SEQ ID NO: 1362727 - DNA, 15 bp, Homo sapiens
gaaaagtataaattg

SEQ ID NO: 1362728 - DNA, 15 bp, Homo sapiens
tgaaaagtataaatt

SEQ ID NO: 1362729 - DNA, 15 bp, Homo sapiens
ttgaaaagtataaat

SEQ ID NO: 1362730 - DNA, 15 bp, Homo sapiens
tttgaaaagtataaa

SEQ ID NO: 1362731 - DNA, 15 bp, Homo sapiens
ctttgaaaagtataa

SEQ ID NO: 1362732 - DNA, 15 bp, Homo sapiens
tctttgaaaagtata

SEQ ID NO: 1362733 - DNA, 15 bp, Homo sapiens
ttctttgaaaagtat

SEQ ID NO: 1362734 - DNA, 15 bp, Homo sapiens
gttctttgaaaagta

SEQ ID NO: 1362735 - DNA, 15 bp, Homo sapiens
agttctttgaaaagt

SEQ ID NO: 1362736 - DNA, 15 bp, Homo sapiens
aagttctttgaaaag

SEQ ID NO: 1362737 - DNA, 15 bp, Homo sapiens
aaagttctttgaaaa

SEQ ID NO: 1362738 - DNA, 15 bp, Homo sapiens
aaaagttctttgaaa

SEQ ID NO: 1362739 - DNA, 15 bp, Homo sapiens
taaaagttctttgaa

SEQ ID NO: 1362740 - DNA, 15 bp, Homo sapiens
gtaaaagttctttga

SEQ ID NO: 1362741 - DNA, 15 bp, Homo sapiens
tgtaaaagttctttg

SEQ ID NO: 1362742 - DNA, 15 bp, Homo sapiens
atgtaaaagttcttt

SEQ ID NO: 1362743 - DNA, 15 bp, Homo sapiens
tatgtaaaagttctt

SEQ ID NO: 1362744 - DNA, 15 bp, Homo sapiens
gtatgtaaaagttct

SEQ ID NO: 1362745 - DNA, 15 bp, Homo sapiens
tgtatgtaaaagttc

SEQ ID NO: 1362746 - DNA, 15 bp, Homo sapiens
atgtatgtaaaagtt

SEQ ID NO: 1362747 - DNA, 15 bp, Homo sapiens
catgtatgtaaaagt

SEQ ID NO: 1362748 - DNA, 15 bp, Homo sapiens
acatgtatgtaaaag

SEQ ID NO: 1362749 - DNA, 15 bp, Homo sapiens
aacatgtatgtaaaa

SEQ ID NO: 1362750 - DNA, 15 bp, Homo sapiens
taacatgtatgtaaa

SEQ ID NO: 1362751 - DNA, 15 bp, Homo sapiens
ataacatgtatgtaa

SEQ ID NO: 1362752 - DNA, 15 bp, Homo sapiens
gataacatgtatgta

SEQ ID NO: 1362753 - DNA, 15 bp, Homo sapiens
agataacatgtatgt

SEQ ID NO: 1362754 - DNA, 15 bp, Homo sapiens
gagataacatgtatg

SEQ ID NO: 1362755 - DNA, 15 bp, Homo sapiens
agagataacatgtat

SEQ ID NO: 1362756 - DNA, 15 bp, Homo sapiens
aagagataacatgta

SEQ ID NO: 1362757 - DNA, 15 bp, Homo sapiens
caagagataacatgt

SEQ ID NO: 1362758 - DNA, 15 bp, Homo sapiens
tcaagagataacatg

SEQ ID NO: 1362759 - DNA, 15 bp, Homo sapiens
ctcaagagataacat

SEQ ID NO: 1362760 - DNA, 15 bp, Homo sapiens
cctcaagagataaca

SEQ ID NO: 1362761 - DNA, 15 bp, Homo sapiens
gcctcaagagataac

SEQ ID NO: 1362762 - DNA, 15 bp, Homo sapiens
tgcctcaagagataa

SEQ ID NO: 1362763 - DNA, 15 bp, Homo sapiens
atgcctcaagagata

SEQ ID NO: 1362764 - DNA, 15 bp, Homo sapiens
tatgcctcaagagat

SEQ ID NO: 1362765 - DNA, 15 bp, Homo sapiens
ctatgcctcaagaga

SEQ ID NO: 1362766 - DNA, 15 bp, Homo sapiens
gctatgcctcaagag

SEQ ID NO: 1362767 - DNA, 15 bp, Homo sapiens
ggctatgcctcaaga

SEQ ID NO: 1362768 - DNA, 15 bp, Homo sapiens
aggctatgcctcaag

SEQ ID NO: 1362769 - DNA, 15 bp, Homo sapiens
aaggctatgcctcaa

SEQ ID NO: 1362770 - DNA, 15 bp, Homo sapiens
caaggctatgcctca

SEQ ID NO: 1362771 - DNA, 15 bp, Homo sapiens
tcaaggctatgcctc

SEQ ID NO: 1362772 - DNA, 15 bp, Homo sapiens
ttcaaggctatgcct

SEQ ID NO: 1362773 - DNA, 15 bp, Homo sapiens
attcaaggctatgcc

SEQ ID NO: 1362774 - DNA, 15 bp, Homo sapiens
aattcaaggctatgc

SEQ ID NO: 1362775 - DNA, 15 bp, Homo sapiens
taattcaaggctatg

SEQ ID NO: 1362776 - DNA, 15 bp, Homo sapiens
ataattcaaggctat

SEQ ID NO: 1362777 - DNA, 15 bp, Homo sapiens
tataattcaaggcta

SEQ ID NO: 1362778 - DNA, 15 bp, Homo sapiens
atataattcaaggct

SEQ ID NO: 1362779 - DNA, 15 bp, Homo sapiens
aatataattcaaggc

SEQ ID NO: 1362780 - DNA, 15 bp, Homo sapiens
gaatataattcaagg

SEQ ID NO: 1362781 - DNA, 15 bp, Homo sapiens
ggaatataattcaag

SEQ ID NO: 1362782 - DNA, 15 bp, Homo sapiens
tggaatataattcaa

SEQ ID NO: 1362783 - DNA, 15 bp, Homo sapiens
ttggaatataattca

SEQ ID NO: 1362784 - DNA, 15 bp, Homo sapiens
attggaatataattc

SEQ ID NO: 1362785 - DNA, 15 bp, Homo sapiens
tattggaatataatt

SEQ ID NO: 1362786 - DNA, 15 bp, Homo sapiens
gtattggaatataat

SEQ ID NO: 1362787 - DNA, 15 bp, Homo sapiens
agtattggaatataa

SEQ ID NO: 1362788 - DNA, 15 bp, Homo sapiens
aagtattggaatata

SEQ ID NO: 1362789 - DNA, 15 bp, Homo sapiens
taagtattggaatat

SEQ ID NO: 1362790 - DNA, 15 bp, Homo sapiens
ctaagtattggaata

SEQ ID NO: 1362791 - DNA, 15 bp, Homo sapiens
tctaagtattggaat

SEQ ID NO: 1362792 - DNA, 15 bp, Homo sapiens
gtctaagtattggaa

SEQ ID NO: 1362793 - DNA, 15 bp, Homo sapiens
agtctaagtattgga

SEQ ID NO: 1362794 - DNA, 15 bp, Homo sapiens
aagtctaagtattgg

SEQ ID NO: 1362795 - DNA, 15 bp, Homo sapiens
aaagtctaagtattg

SEQ ID NO: 1362796 - DNA, 15 bp, Homo sapiens
aaaagtctaagtatt

SEQ ID NO: 1362797 - DNA, 15 bp, Homo sapiens
aaaaagtctaagtat

SEQ ID NO: 1362798 - DNA, 15 bp, Homo sapiens
aaaaaagtctaagta

SEQ ID NO: 1362799 - DNA, 15 bp, Homo sapiens
aaaaaaagtctaagt

SEQ ID NO: 1362800 - DNA, 15 bp, Homo sapiens
taaaaaaagtctaag

SEQ ID NO: 1362801 - DNA, 15 bp, Homo sapiens
ttaaaaaaagtctaa

SEQ ID NO: 1362802 - DNA, 15 bp, Homo sapiens
tttaaaaaaagtcta

SEQ ID NO: 1362803 - DNA, 15 bp, Homo sapiens
ttttaaaaaaagtct

SEQ ID NO: 1362804 - DNA, 15 bp, Homo sapiens
tttttaaaaaaagtc

SEQ ID NO: 1362805 - DNA, 15 bp, Homo sapiens
ttttttaaaaaaagt

SEQ ID NO: 1362806 - DNA, 15 bp, Homo sapiens
cttttttaaaaaaag

SEQ ID NO: 1362807 - DNA, 15 bp, Homo sapiens
tcttttttaaaaaaa

SEQ ID NO: 1362808 - DNA, 15 bp, Homo sapiens
atcttttttaaaaaa

SEQ ID NO: 1362809 - DNA, 15 bp, Homo sapiens
catcttttttaaaaa

SEQ ID NO: 1362810 - DNA, 15 bp, Homo sapiens
ccatcttttttaaaa

SEQ ID NO: 1362811 - DNA, 15 bp, Homo sapiens
cccatcttttttaaa

SEQ ID NO: 1362812 - DNA, 15 bp, Homo sapiens
tcccatcttttttaa

SEQ ID NO: 1362813 - DNA, 15 bp, Homo sapiens
atcccatctttttta

SEQ ID NO: 1362814 - DNA, 15 bp, Homo sapiens
aatcccatctttttt

SEQ ID NO: 1362815 - DNA, 15 bp, Homo sapiens
aaatcccatcttttt

SEQ ID NO: 1362816 - DNA, 15 bp, Homo sapiens
aaaatcccatctttt

SEQ ID NO: 1362817 - DNA, 15 bp, Homo sapiens
aaaaatcccatcttt

SEQ ID NO: 1362818 - DNA, 15 bp, Homo sapiens
taaaaatcccatctt

SEQ ID NO: 1362819 - DNA, 15 bp, Homo sapiens
ataaaaatcccatct

SEQ ID NO: 1362820 - DNA, 15 bp, Homo sapiens
cataaaaatcccatc

SEQ ID NO: 1362821 - DNA, 15 bp, Homo sapiens
acataaaaatcccat

SEQ ID NO: 1362822 - DNA, 15 bp, Homo sapiens
cacataaaaatccca

SEQ ID NO: 1362823 - DNA, 15 bp, Homo sapiens
acacataaaaatccc

SEQ ID NO: 1362824 - DNA, 15 bp, Homo sapiens
aacacataaaaatcc

SEQ ID NO: 1362825 - DNA, 15 bp, Homo sapiens
aaacacataaaaatc

SEQ ID NO: 1362826 - DNA, 15 bp, Homo sapiens
caaacacataaaaat

SEQ ID NO: 1362827 - DNA, 15 bp, Homo sapiens
gcaaacacataaaaa

SEQ ID NO: 1362828 - DNA, 15 bp, Homo sapiens
agcaaacacataaaa

SEQ ID NO: 1362829 - DNA, 15 bp, Homo sapiens
aagcaaacacataaa

SEQ ID NO: 1362830 - DNA, 15 bp, Homo sapiens
aaagcaaacacataa

SEQ ID NO: 1362831 - DNA, 15 bp, Homo sapiens
aaaagcaaacacata

SEQ ID NO: 1362832 - DNA, 15 bp, Homo sapiens
caaaagcaaacacat

SEQ ID NO: 1362833 - DNA, 15 bp, Homo sapiens
ccaaaagcaaacaca

SEQ ID NO: 1362834 - DNA, 15 bp, Homo sapiens
accaaaagcaaacac

SEQ ID NO: 1362835 - DNA, 15 bp, Homo sapiens
aaccaaaagcaaaca

SEQ ID NO: 1362836 - DNA, 15 bp, Homo sapiens
aaaccaaaagcaaac

SEQ ID NO: 1362837 - DNA, 15 bp, Homo sapiens
aaaaccaaaagcaaa

SEQ ID NO: 1362838 - DNA, 15 bp, Homo sapiens
aaaaaccaaaagcaa

SEQ ID NO: 1362839 - DNA, 15 bp, Homo sapiens
caaaaaccaaaagca

SEQ ID NO: 1362840 - DNA, 15 bp, Homo sapiens
acaaaaaccaaaagc

SEQ ID NO: 1362841 - DNA, 15 bp, Homo sapiens
aacaaaaaccaaaag

SEQ ID NO: 1362842 - DNA, 15 bp, Homo sapiens
aaacaaaaaccaaaa

SEQ ID NO: 1362843 - DNA, 15 bp, Homo sapiens
aaaacaaaaaccaaa

SEQ ID NO: 1362844 - DNA, 15 bp, Homo sapiens
taaaaaacaaaaacc

SEQ ID NO: 1362845 - DNA, 15 bp, Homo sapiens
ttaaaaaacaaaaac

SEQ ID NO: 1362846 - DNA, 15 bp, Homo sapiens
cttaaaaaacaaaaa

SEQ ID NO: 1362847 - DNA, 15 bp, Homo sapiens
cacttaaaaaacaaa

SEQ ID NO: 1362848 - DNA, 15 bp, Homo sapiens
acacttaaaaaacaa

SEQ ID NO: 1362849 - DNA, 15 bp, Homo sapiens
tacacttaaaaaaca

SEQ ID NO: 1362850 - DNA, 15 bp, Homo sapiens
ctacacttaaaaaac

SEQ ID NO: 1362851 - DNA, 15 bp, Homo sapiens
tctacacttaaaaaa

SEQ ID NO: 1362852 - DNA, 15 bp, Homo sapiens
ctctacacttaaaaa

SEQ ID NO: 1362853 - DNA, 15 bp, Homo sapiens
tctctacacttaaaa

SEQ ID NO: 1362854 - DNA, 15 bp, Homo sapiens
ctctctacacttaaa

SEQ ID NO: 1362855 - DNA, 15 bp, Homo sapiens
actctctacacttaa

SEQ ID NO: 1362856 - DNA, 15 bp, Homo sapiens
aactctctacactta

SEQ ID NO: 1362857 - DNA, 15 bp, Homo sapiens
aaactctctacactt

SEQ ID NO: 1362858 - DNA, 15 bp, Homo sapiens
aaaactctctacact

SEQ ID NO: 1362859 - DNA, 15 bp, Homo sapiens
aaaaactctctacac

SEQ ID NO: 1362860 - DNA, 15 bp, Homo sapiens
caaaaactctctaca

SEQ ID NO: 1362861 - DNA, 15 bp, Homo sapiens
ccaaaaactctctac

SEQ ID NO: 1362862 - DNA, 15 bp, Homo sapiens
accaaaaactctcta

SEQ ID NO: 1362863 - DNA, 15 bp, Homo sapiens
taccaaaaactctct

SEQ ID NO: 1362864 - DNA, 15 bp, Homo sapiens
ttaccaaaaactctc

SEQ ID NO: 1362865 - DNA, 15 bp, Homo sapiens
cttaccaaaaactct

SEQ ID NO: 1362866 - DNA, 15 bp, Homo sapiens
ccttaccaaaaactc

SEQ ID NO: 1362867 - DNA, 15 bp, Homo sapiens
tccttaccaaaaact

SEQ ID NO: 1362868 - DNA, 15 bp, Homo sapiens
ttccttaccaaaaac

SEQ ID NO: 1362869 - DNA, 15 bp, Homo sapiens
tttccttaccaaaaa

SEQ ID NO: 1362870 - DNA, 15 bp, Homo sapiens
ttttccttaccaaaa

SEQ ID NO: 1362871 - DNA, 15 bp, Homo sapiens
gttttccttaccaaa

SEQ ID NO: 1362872 - DNA, 15 bp, Homo sapiens
tgttttccttaccaa

SEQ ID NO: 1362873 - DNA, 15 bp, Homo sapiens
gtgttttccttacca

SEQ ID NO: 1362874 - DNA, 15 bp, Homo sapiens
tgtgttttccttacc

SEQ ID NO: 1362875 - DNA, 15 bp, Homo sapiens
ttgtgttttccttac

SEQ ID NO: 1362876 - DNA, 15 bp, Homo sapiens
cttgtgttttcctta

SEQ ID NO: 1362877 - DNA, 15 bp, Homo sapiens
tcttgtgttttcctt

SEQ ID NO: 1362878 - DNA, 15 bp, Homo sapiens
ctcttgtgttttcct

SEQ ID NO: 1362879 - DNA, 15 bp, Homo sapiens
cctcttgtgttttcc

SEQ ID NO: 1362880 - DNA, 15 bp, Homo sapiens
gcctcttgtgttttc

SEQ ID NO: 1362881 - DNA, 15 bp, Homo sapiens
cgcctcttgtgtttt

SEQ ID NO: 1362882 - DNA, 15 bp, Homo sapiens
tcgcctcttgtgttt

SEQ ID NO: 1362883 - DNA, 15 bp, Homo sapiens
ctcgcctcttgtgtt

SEQ ID NO: 1362884 - DNA, 15 bp, Homo sapiens
cctcgcctcttgtgt

SEQ ID NO: 1362885 - DNA, 15 bp, Homo sapiens
tcctcgcctcttgtg

SEQ ID NO: 1362886 - DNA, 15 bp, Homo sapiens
gtcctcgcctcttgt

SEQ ID NO: 1362887 - DNA, 15 bp, Homo sapiens
tgtcctcgcctcttg

SEQ ID NO: 1362888 - DNA, 15 bp, Homo sapiens
atgtcctcgcctctt

SEQ ID NO: 1362889 - DNA, 15 bp, Homo sapiens
aatgtcctcgcctct

SEQ ID NO: 1362890 - DNA, 15 bp, Homo sapiens
aaatgtcctcgcctc

SEQ ID NO: 1362891 - DNA, 15 bp, Homo sapiens
aaaatgtcctcgcct

SEQ ID NO: 1362892 - DNA, 15 bp, Homo sapiens
caaaatgtcctcgcc

SEQ ID NO: 1362893 - DNA, 15 bp, Homo sapiens
tcaaaatgtcctcgc

SEQ ID NO: 1362894 - DNA, 15 bp, Homo sapiens
ctcaaaatgtcctcg

SEQ ID NO: 1362895 - DNA, 15 bp, Homo sapiens
cctcaaaatgtcctc

SEQ ID NO: 1362896 - DNA, 15 bp, Homo sapiens
acctcaaaatgtcct

SEQ ID NO: 1362897 - DNA, 15 bp, Homo sapiens
cacctcaaaatgtcc

SEQ ID NO: 1362898 - DNA, 15 bp, Homo sapiens
tcacctcaaaatgtc

SEQ ID NO: 1362899 - DNA, 15 bp, Homo sapiens
ttcacctcaaaatgt

SEQ ID NO: 1362900 - DNA, 15 bp, Homo sapiens
cttcacctcaaaatg

SEQ ID NO: 1362901 - DNA, 15 bp, Homo sapiens
tcttcacctcaaaat

SEQ ID NO: 1362902 - DNA, 15 bp, Homo sapiens
gtcttcacctcaaaa

SEQ ID NO: 1362903 - DNA, 15 bp, Homo sapiens
tgtcttcacctcaaa

SEQ ID NO: 1362904 - DNA, 15 bp, Homo sapiens
atgtcttcacctcaa

SEQ ID NO: 1362905 - DNA, 15 bp, Homo sapiens
aatgtcttcacctca

SEQ ID NO: 1362906 - DNA, 15 bp, Homo sapiens
aaatgtcttcacctc

SEQ ID NO: 1362907 - DNA, 15 bp, Homo sapiens
aaaatgtcttcacct

SEQ ID NO: 1362908 - DNA, 15 bp, Homo sapiens
caaaatgtcttcacc

SEQ ID NO: 1362909 - DNA, 15 bp, Homo sapiens
tcaaaatgtcttcac

SEQ ID NO: 1362910 - DNA, 15 bp, Homo sapiens
gtcaaaatgtcttca

SEQ ID NO: 1362911 - DNA, 15 bp, Homo sapiens
agtcaaaatgtcttc

SEQ ID NO: 1362912 - DNA, 15 bp, Homo sapiens
tagtcaaaatgtctt

SEQ ID NO: 1362913 - DNA, 15 bp, Homo sapiens
ctagtcaaaatgtct

SEQ ID NO: 1362914 - DNA, 15 bp, Homo sapiens
gctagtcaaaatgtc

SEQ ID NO: 1362915 - DNA, 15 bp, Homo sapiens
tgctagtcaaaatgt

SEQ ID NO: 1362916 - DNA, 15 bp, Homo sapiens
ttgctagtcaaaatg

SEQ ID NO: 1362917 - DNA, 15 bp, Homo sapiens
tttgctagtcaaaat

SEQ ID NO: 1362918 - DNA, 15 bp, Homo sapiens
ttttgctagtcaaaa

SEQ ID NO: 1362919 - DNA, 15 bp, Homo sapiens
gttttgctagtcaaa

SEQ ID NO: 1362920 - DNA, 15 bp, Homo sapiens
cgttttgctagtcaa

SEQ ID NO: 1362921 - DNA, 15 bp, Homo sapiens
acgttttgctagtca

SEQ ID NO: 1362922 - DNA, 15 bp, Homo sapiens
tacgttttgctagtc

SEQ ID NO: 1362923 - DNA, 15 bp, Homo sapiens
ttacgttttgctagt

SEQ ID NO: 1362924 - DNA, 15 bp, Homo sapiens
cttacgttttgctag

SEQ ID NO: 1362925 - DNA, 15 bp, Homo sapiens
ccttacgttttgcta

SEQ ID NO: 1362926 - DNA, 15 bp, Homo sapiens
accttacgttttgct

SEQ ID NO: 1362927 - DNA, 15 bp, Homo sapiens
caccttacgttttgc

SEQ ID NO: 1362928 - DNA, 15 bp, Homo sapiens
ccaccttacgttttg

SEQ ID NO: 1362929 - DNA, 15 bp, Homo sapiens
tccaccttacgtttt

SEQ ID NO: 1362930 - DNA, 15 bp, Homo sapiens
ctccaccttacgttt

SEQ ID NO: 1362931 - DNA, 15 bp, Homo sapiens
gctccaccttacgtt

SEQ ID NO: 1362932 - DNA, 15 bp, Homo sapiens
agctccaccttacgt

SEQ ID NO: 1362933 - DNA, 15 bp, Homo sapiens
cagctccaccttacg

SEQ ID NO: 1362934 - DNA, 15 bp, Homo sapiens
acagctccaccttac

SEQ ID NO: 1362935 - DNA, 15 bp, Homo sapiens
tacagctccacctta

SEQ ID NO: 1362936 - DNA, 15 bp, Homo sapiens
atacagctccacctt

SEQ ID NO: 1362937 - DNA, 15 bp, Homo sapiens
aatacagctccacct

SEQ ID NO: 1362938 - DNA, 15 bp, Homo sapiens
caatacagctccacc

SEQ ID NO: 1362939 - DNA, 15 bp, Homo sapiens
acaatacagctccac

SEQ ID NO: 1362940 - DNA, 15 bp, Homo sapiens
aacaatacagctcca

SEQ ID NO: 1362941 - DNA, 15 bp, Homo sapiens
gaacaatacagctcc

SEQ ID NO: 1362942 - DNA, 15 bp, Homo sapiens
agaacaatacagctc

SEQ ID NO: 1362943 - DNA, 15 bp, Homo sapiens
aagaacaatacagct

SEQ ID NO: 1362944 - DNA, 15 bp, Homo sapiens
taagaacaatacagc

SEQ ID NO: 1362945 - DNA, 15 bp, Homo sapiens
ataagaacaatacag

SEQ ID NO: 1362946 - DNA, 15 bp, Homo sapiens
aataagaacaataca

SEQ ID NO: 1362947 - DNA, 15 bp, Homo sapiens
caataagaacaatac

SEQ ID NO: 1362948 - DNA, 15 bp, Homo sapiens
tcaataagaacaata

SEQ ID NO: 1362949 - DNA, 15 bp, Homo sapiens
ttcaataagaacaat

SEQ ID NO: 1362950 - DNA, 15 bp, Homo sapiens
tttcaataagaacaa

SEQ ID NO: 1362951 - DNA, 15 bp, Homo sapiens
ttttcaataagaaca

SEQ ID NO: 1362952 - DNA, 15 bp, Homo sapiens
tttttcaataagaac

SEQ ID NO: 1362953 - DNA, 15 bp, Homo sapiens
atttttcaataagaa

SEQ ID NO: 1362954 - DNA, 15 bp, Homo sapiens
catttttcaataaga

SEQ ID NO: 1362955 - DNA, 15 bp, Homo sapiens
ccatttttcaataag

SEQ ID NO: 1362956 - DNA, 15 bp, Homo sapiens
accatttttcaataa

SEQ ID NO: 1362957 - DNA, 15 bp, Homo sapiens
taccatttttcaata

SEQ ID NO: 1362958 - DNA, 15 bp, Homo sapiens
ataccatttttcaat

SEQ ID NO: 1362959 - DNA, 15 bp, Homo sapiens
gataccatttttcaa

SEQ ID NO: 1362960 - DNA, 15 bp, Homo sapiens
tgataccatttttca

SEQ ID NO: 1362961 - DNA, 15 bp, Homo sapiens
gtgataccatttttc

SEQ ID NO: 1362962 - DNA, 15 bp, Homo sapiens
tgtgataccattttt

SEQ ID NO: 1362963 - DNA, 15 bp, Homo sapiens
atgtgataccatttt

SEQ ID NO: 1362964 - DNA, 15 bp, Homo sapiens
tatgtgataccattt

SEQ ID NO: 1362965 - DNA, 15 bp, Homo sapiens
gtatgtgataccatt

SEQ ID NO: 1362966 - DNA, 15 bp, Homo sapiens
agtatgtgataccat

SEQ ID NO: 1362967 - DNA, 15 bp, Homo sapiens
aagtatgtgatacca

SEQ ID NO: 1362968 - DNA, 15 bp, Homo sapiens
caagtatgtgatacc

SEQ ID NO: 1362969 - DNA, 15 bp, Homo sapiens
acaagtatgtgatac

SEQ ID NO: 1362970 - DNA, 15 bp, Homo sapiens
aacaagtatgtgata

SEQ ID NO: 1362971 - DNA, 15 bp, Homo sapiens
aaacaagtatgtgat

SEQ ID NO: 1362972 - DNA, 15 bp, Homo sapiens
taaacaagtatgtga

SEQ ID NO: 1362973 - DNA, 15 bp, Homo sapiens
ttaaacaagtatgtg

SEQ ID NO: 1362974 - DNA, 15 bp, Homo sapiens
cttaaacaagtatgt

SEQ ID NO: 1362975 - DNA, 15 bp, Homo sapiens
ccttaaacaagtatg

SEQ ID NO: 1362976 - DNA, 15 bp, Homo sapiens
cccttaaacaagtat

SEQ ID NO: 1362977 - DNA, 15 bp, Homo sapiens
tcccttaaacaagta

SEQ ID NO: 1362978 - DNA, 15 bp, Homo sapiens
ctcccttaaacaagt

SEQ ID NO: 1362979 - DNA, 15 bp, Homo sapiens
actcccttaaacaag

SEQ ID NO: 1362980 - DNA, 15 bp, Homo sapiens
tactcccttaaacaa

SEQ ID NO: 1362981 - DNA, 15 bp, Homo sapiens
ttactcccttaaaca

SEQ ID NO: 1362982 - DNA, 15 bp, Homo sapiens
cttactcccttaaac

SEQ ID NO: 1362983 - DNA, 15 bp, Homo sapiens
gcttactcccttaaa

SEQ ID NO: 1362984 - DNA, 15 bp, Homo sapiens
agcttactcccttaa

SEQ ID NO: 1362985 - DNA, 15 bp, Homo sapiens
gagcttactccctta

SEQ ID NO: 1362986 - DNA, 15 bp, Homo sapiens
agagcttactccctt

SEQ ID NO: 1362987 - DNA, 15 bp, Homo sapiens
tagagcttactccct

SEQ ID NO: 1362988 - DNA, 15 bp, Homo sapiens
gtagagcttactccc

SEQ ID NO: 1362989 - DNA, 15 bp, Homo sapiens
cgtagagcttactcc

SEQ ID NO: 1362990 - DNA, 15 bp, Homo sapiens
ccgtagagcttactc

SEQ ID NO: 1362991 - DNA, 15 bp, Homo sapiens
accgtagagcttact

SEQ ID NO: 1362992 - DNA, 15 bp, Homo sapiens
gaccgtagagcttac

SEQ ID NO: 1362993 - DNA, 15 bp, Homo sapiens
tgaccgtagagctta

SEQ ID NO: 1362994 - DNA, 15 bp, Homo sapiens
ctgaccgtagagctt

SEQ ID NO: 1362995 - DNA, 15 bp, Homo sapiens
gctgaccgtagagct

SEQ ID NO: 1362996 - DNA, 15 bp, Homo sapiens
ggctgaccgtagagc

SEQ ID NO: 1362997 - DNA, 15 bp, Homo sapiens
aggctgaccgtagag

SEQ ID NO: 1362998 - DNA, 15 bp, Homo sapiens
caggctgaccgtaga

SEQ ID NO: 1362999 - DNA, 15 bp, Homo sapiens
tcaggctgaccgtag

SEQ ID NO: 1363000 - DNA, 15 bp, Homo sapiens
ttcaggctgaccgta

SEQ ID NO: 1363001 - DNA, 15 bp, Homo sapiens
attcaggctgaccgt

SEQ ID NO: 1363002 - DNA, 15 bp, Homo sapiens
tattcaggctgaccg

SEQ ID NO: 1363003 - DNA, 15 bp, Homo sapiens
ctattcaggctgacc

SEQ ID NO: 1363004 - DNA, 15 bp, Homo sapiens
cctattcaggctgac

SEQ ID NO: 1363005 - DNA, 15 bp, Homo sapiens
acctattcaggctga

SEQ ID NO: 1363006 - DNA, 15 bp, Homo sapiens
aacctattcaggctg

SEQ ID NO: 1363007 - DNA, 15 bp, Homo sapiens
gaacctattcaggct

SEQ ID NO: 1363008 - DNA, 15 bp, Homo sapiens
tgaacctattcaggc

SEQ ID NO: 1363009 - DNA, 15 bp, Homo sapiens
ttgaacctattcagg

SEQ ID NO: 1363010 - DNA, 15 bp, Homo sapiens
cttgaacctattcag

SEQ ID NO: 1363011 - DNA, 15 bp, Homo sapiens
acttgaacctattca

SEQ ID NO: 1363012 - DNA, 15 bp, Homo sapiens
aacttgaacctattc

SEQ ID NO: 1363013 - DNA, 15 bp, Homo sapiens
aaacttgaacctatt

SEQ ID NO: 1363014 - DNA, 15 bp, Homo sapiens
aaaacttgaacctat

SEQ ID NO: 1363015 - DNA, 15 bp, Homo sapiens
caaaacttgaaccta

SEQ ID NO: 1363016 - DNA, 15 bp, Homo sapiens
ccaaaacttgaacct

SEQ ID NO: 1363017 - DNA, 15 bp, Homo sapiens
gccaaaacttgaacc

SEQ ID NO: 1363018 - DNA, 15 bp, Homo sapiens
agccaaaacttgaac

SEQ ID NO: 1363019 - DNA, 15 bp, Homo sapiens
gagccaaaacttgaa

SEQ ID NO: 1363020 - DNA, 15 bp, Homo sapiens
ggagccaaaacttga

SEQ ID NO: 1363021 - DNA, 15 bp, Homo sapiens
aggagccaaaacttg

SEQ ID NO: 1363022 - DNA, 15 bp, Homo sapiens
gaggagccaaaactt

SEQ ID NO: 1363023 - DNA, 15 bp, Homo sapiens
agaggagccaaaact

SEQ ID NO: 1363024 - DNA, 15 bp, Homo sapiens
cagaggagccaaaac

SEQ ID NO: 1363025 - DNA, 15 bp, Homo sapiens
gcagaggagccaaaa

SEQ ID NO: 1363026 - DNA, 15 bp, Homo sapiens
agcagaggagccaaa

SEQ ID NO: 1363027 - DNA, 15 bp, Homo sapiens
aagcagaggagccaa

SEQ ID NO: 1363028 - DNA, 15 bp, Homo sapiens
taagcagaggagcca

SEQ ID NO: 1363029 - DNA, 15 bp, Homo sapiens
ataagcagaggagcc

SEQ ID NO: 1363030 - DNA, 15 bp, Homo sapiens
aataagcagaggagc

SEQ ID NO: 1363031 - DNA, 15 bp, Homo sapiens
aaataagcagaggag

SEQ ID NO: 1363032 - DNA, 15 bp, Homo sapiens
caaataagcagagga

SEQ ID NO: 1363033 - DNA, 15 bp, Homo sapiens
gcaaataagcagagg

SEQ ID NO: 1363034 - DNA, 15 bp, Homo sapiens
agcaaataagcagag

SEQ ID NO: 1363035 - DNA, 15 bp, Homo sapiens
cagcaaataagcaga

SEQ ID NO: 1363036 - DNA, 15 bp, Homo sapiens
acagcaaataagcag

SEQ ID NO: 1363037 - DNA, 15 bp, Homo sapiens
cacagcaaataagca

SEQ ID NO: 1363038 - DNA, 15 bp, Homo sapiens
acacagcaaataagc

SEQ ID NO: 1363039 - DNA, 15 bp, Homo sapiens
aacacagcaaataag

SEQ ID NO: 1363040 - DNA, 15 bp, Homo sapiens
taacacagcaaataa

SEQ ID NO: 1363041 - DNA, 15 bp, Homo sapiens
ataacacagcaaata

SEQ ID NO: 1363042 - DNA, 15 bp, Homo sapiens
gataacacagcaaat

SEQ ID NO: 1363043 - DNA, 15 bp, Homo sapiens
agataacacagcaaa

SEQ ID NO: 1363044 - DNA, 15 bp, Homo sapiens
gagataacacagcaa

SEQ ID NO: 1363045 - DNA, 15 bp, Homo sapiens
tgagataacacagca

SEQ ID NO: 1363046 - DNA, 15 bp, Homo sapiens
ctgagataacacagc

SEQ ID NO: 1363047 - DNA, 15 bp, Homo sapiens
cctgagataacacag

SEQ ID NO: 1363048 - DNA, 15 bp, Homo sapiens
gcctgagataacaca

SEQ ID NO: 1363049 - DNA, 15 bp, Homo sapiens
agcctgagataacac

SEQ ID NO: 1363050 - DNA, 15 bp, Homo sapiens
cagcctgagataaca

SEQ ID NO: 1363051 - DNA, 15 bp, Homo sapiens
acagcctgagataac

SEQ ID NO: 1363052 - DNA, 15 bp, Homo sapiens
gacagcctgagataa

SEQ ID NO: 1363053 - DNA, 15 bp, Homo sapiens
agacagcctgagata

SEQ ID NO: 1363054 - DNA, 15 bp, Homo sapiens
tagacagcctgagat

SEQ ID NO: 1363055 - DNA, 15 bp, Homo sapiens
ttagacagcctgaga

SEQ ID NO: 1363056 - DNA, 15 bp, Homo sapiens
cttagacagcctgag

SEQ ID NO: 1363057 - DNA, 15 bp, Homo sapiens
gcttagacagcctga

SEQ ID NO: 1363058 - DNA, 15 bp, Homo sapiens
ggcttagacagcctg

SEQ ID NO: 1363059 - DNA, 15 bp, Homo sapiens
aggcttagacagcct

SEQ ID NO: 1363060 - DNA, 15 bp, Homo sapiens
gaggcttagacagcc

SEQ ID NO: 1363061 - DNA, 15 bp, Homo sapiens
tgaggcttagacagc

SEQ ID NO: 1363062 - DNA, 15 bp, Homo sapiens
ctgaggcttagacag

SEQ ID NO: 1363063 - DNA, 15 bp, Homo sapiens
actgaggcttagaca

SEQ ID NO: 1363064 - DNA, 15 bp, Homo sapiens
aactgaggcttagac

SEQ ID NO: 1363065 - DNA, 15 bp, Homo sapiens
aaactgaggcttaga

SEQ ID NO: 1363066 - DNA, 15 bp, Homo sapiens
atgagaaaactgagg

SEQ ID NO: 1363067 - DNA, 15 bp, Homo sapiens
aatgagaaaactgag

SEQ ID NO: 1363068 - DNA, 15 bp, Homo sapiens
aaatgagaaaactga

SEQ ID NO: 1363069 - DNA, 15 bp, Homo sapiens
caaatgagaaaactg

SEQ ID NO: 1363070 - DNA, 15 bp, Homo sapiens
acaaatgagaaaact

SEQ ID NO: 1363071 - DNA, 15 bp, Homo sapiens
tacaaatgagaaaac

SEQ ID NO: 1363072 - DNA, 15 bp, Homo sapiens
ttacaaatgagaaaa

SEQ ID NO: 1363073 - DNA, 15 bp, Homo sapiens
gttacaaatgagaaa

SEQ ID NO: 1363074 - DNA, 15 bp, Homo sapiens
tgttacaaatgagaa

SEQ ID NO: 1363075 - DNA, 15 bp, Homo sapiens
atgttacaaatgaga

SEQ ID NO: 1363076 - DNA, 15 bp, Homo sapiens
catgttacaaatgag

SEQ ID NO: 1363077 - DNA, 15 bp, Homo sapiens
ccatgttacaaatga

SEQ ID NO: 1363078 - DNA, 15 bp, Homo sapiens
tccatgttacaaatg

SEQ ID NO: 1363079 - DNA, 15 bp, Homo sapiens
ctccatgttacaaat

SEQ ID NO: 1363080 - DNA, 15 bp, Homo sapiens
tctccatgttacaaa

SEQ ID NO: 1363081 - DNA, 15 bp, Homo sapiens
atctccatgttacaa

SEQ ID NO: 1363082 - DNA, 15 bp, Homo sapiens
aatctccatgttaca

SEQ ID NO: 1363083 - DNA, 15 bp, Homo sapiens
taatctccatgttac

SEQ ID NO: 1363084 - DNA, 15 bp, Homo sapiens
ataatctccatgtta

SEQ ID NO: 1363085 - DNA, 15 bp, Homo sapiens
tataatctccatgtt

SEQ ID NO: 1363086 - DNA, 15 bp, Homo sapiens
ctataatctccatgt

SEQ ID NO: 1363087 - DNA, 15 bp, Homo sapiens
actataatctccatg

SEQ ID NO: 1363088 - DNA, 15 bp, Homo sapiens
cactataatctccat

SEQ ID NO: 1363089 - DNA, 15 bp, Homo sapiens
ccactataatctcca

SEQ ID NO: 1363090 - DNA, 15 bp, Homo sapiens
accactataatctcc

SEQ ID NO: 1363091 - DNA, 15 bp, Homo sapiens
aaccactataatctc

SEQ ID NO: 1363092 - DNA, 15 bp, Homo sapiens
aaaccactataatct

SEQ ID NO: 1363093 - DNA, 15 bp, Homo sapiens
gaaaccactataatc

SEQ ID NO: 1363094 - DNA, 15 bp, Homo sapiens
agaaaccactataat

SEQ ID NO: 1363095 - DNA, 15 bp, Homo sapiens
tagaaaccactataa

SEQ ID NO: 1363096 - DNA, 15 bp, Homo sapiens
gtagaaaccactata

SEQ ID NO: 1363097 - DNA, 15 bp, Homo sapiens
ggtagaaaccactat

SEQ ID NO: 1363098 - DNA, 15 bp, Homo sapiens
aggtagaaaccacta

SEQ ID NO: 1363099 - DNA, 15 bp, Homo sapiens
gaggtagaaaccact

SEQ ID NO: 1363100 - DNA, 15 bp, Homo sapiens
tgaggtagaaaccac

SEQ ID NO: 1363101 - DNA, 15 bp, Homo sapiens
ctgaggtagaaacca

SEQ ID NO: 1363102 - DNA, 15 bp, Homo sapiens
tctgaggtagaaacc

SEQ ID NO: 1363103 - DNA, 15 bp, Homo sapiens
ctctgaggtagaaac

SEQ ID NO: 1363104 - DNA, 15 bp, Homo sapiens
tctctgaggtagaaa

SEQ ID NO: 1363105 - DNA, 15 bp, Homo sapiens
ctctctgaggtagaa

SEQ ID NO: 1363106 - DNA, 15 bp, Homo sapiens
gctctctgaggtaga

SEQ ID NO: 1363107 - DNA, 15 bp, Homo sapiens
tgctctctgaggtag

SEQ ID NO: 1363108 - DNA, 15 bp, Homo sapiens
ctgctctctgaggta

SEQ ID NO: 1363109 - DNA, 15 bp, Homo sapiens
actgctctctgaggt

SEQ ID NO: 1363110 - DNA, 15 bp, Homo sapiens
gactgctctctgagg

SEQ ID NO: 1363111 - DNA, 15 bp, Homo sapiens
tgactgctctctgag

SEQ ID NO: 1363112 - DNA, 15 bp, Homo sapiens
atgactgctctctga

SEQ ID NO: 1363113 - DNA, 15 bp, Homo sapiens
catgactgctctctg

SEQ ID NO: 1363114 - DNA, 15 bp, Homo sapiens
ctcatgactgctctc

SEQ ID NO: 1363115 - DNA, 15 bp, Homo sapiens
tctcatgactgctct

SEQ ID NO: 1363116 - DNA, 15 bp, Homo sapiens
ttctcatgactgctc

SEQ ID NO: 1363117 - DNA, 15 bp, Homo sapiens
attctcatgactgct

SEQ ID NO: 1363118 - DNA, 15 bp, Homo sapiens
aattctcatgactgc

SEQ ID NO: 1363119 - DNA, 15 bp, Homo sapiens
taattctcatgactg

SEQ ID NO: 1363120 - DNA, 15 bp, Homo sapiens
ttaattctcatgact

SEQ ID NO: 1363121 - DNA, 15 bp, Homo sapiens
tttaattctcatgac

SEQ ID NO: 1363122 - DNA, 15 bp, Homo sapiens
atttaattctcatga

SEQ ID NO: 1363123 - DNA, 15 bp, Homo sapiens
catttaattctcatg

SEQ ID NO: 1363124 - DNA, 15 bp, Homo sapiens
tcatttaattctcat

SEQ ID NO: 1363125 - DNA, 15 bp, Homo sapiens
ctcatttaattctca

SEQ ID NO: 1363126 - DNA, 15 bp, Homo sapiens
tctcatttaattctc

SEQ ID NO: 1363127 - DNA, 15 bp, Homo sapiens
atctcatttaattct

SEQ ID NO: 1363128 - DNA, 15 bp, Homo sapiens
gatctcatttaattc

SEQ ID NO: 1363129 - DNA, 15 bp, Homo sapiens
tgatctcatttaatt

SEQ ID NO: 1363130 - DNA, 15 bp, Homo sapiens
ttgatctcatttaat

SEQ ID NO: 1363131 - DNA, 15 bp, Homo sapiens
tttgatctcatttaa

SEQ ID NO: 1363132 - DNA, 15 bp, Homo sapiens
atttgatctcattta

SEQ ID NO: 1363133 - DNA, 15 bp, Homo sapiens
tatttgatctcattt

SEQ ID NO: 1363134 - DNA, 15 bp, Homo sapiens
ttatttgatctcatt

SEQ ID NO: 1363135 - DNA, 15 bp, Homo sapiens
cttatttgatctcat

SEQ ID NO: 1363136 - DNA, 15 bp, Homo sapiens
ccttatttgatctca

SEQ ID NO: 1363137 - DNA, 15 bp, Homo sapiens
accttatttgatctc

SEQ ID NO: 1363138 - DNA, 15 bp, Homo sapiens
aaccttatttgatct

SEQ ID NO: 1363139 - DNA, 15 bp, Homo sapiens
taaccttatttgatc

SEQ ID NO: 1363140 - DNA, 15 bp, Homo sapiens
ctaaccttatttgat

SEQ ID NO: 1363141 - DNA, 15 bp, Homo sapiens
actaaccttatttga

SEQ ID NO: 1363142 - DNA, 15 bp, Homo sapiens
cactaaccttatttg

SEQ ID NO: 1363143 - DNA, 15 bp, Homo sapiens
ccactaaccttattt

SEQ ID NO: 1363144 - DNA, 15 bp, Homo sapiens
accactaaccttatt

SEQ ID NO: 1363145 - DNA, 15 bp, Homo sapiens
aaccactaaccttat

SEQ ID NO: 1363146 - DNA, 15 bp, Homo sapiens
aaaccactaacctta

SEQ ID NO: 1363147 - DNA, 15 bp, Homo sapiens
gaaaccactaacctt

SEQ ID NO: 1363148 - DNA, 15 bp, Homo sapiens
agaaaccactaacct

SEQ ID NO: 1363149 - DNA, 15 bp, Homo sapiens
tagaaaccactaacc

SEQ ID NO: 1363150 - DNA, 15 bp, Homo sapiens
gtagaaaccactaac

SEQ ID NO: 1363151 - DNA, 15 bp, Homo sapiens
ggtagaaaccactaa

SEQ ID NO: 1363152 - DNA, 15 bp, Homo sapiens
taccttatttgatct

SEQ ID NO: 1363153 - DNA, 15 bp, Homo sapiens
ataccttatttgatc

SEQ ID NO: 1363154 - DNA, 15 bp, Homo sapiens
tataccttatttgat

SEQ ID NO: 1363155 - DNA, 15 bp, Homo sapiens
atataccttatttga

SEQ ID NO: 1363156 - DNA, 15 bp, Homo sapiens
tatataccttatttg

SEQ ID NO: 1363157 - DNA, 15 bp, Homo sapiens
ttatataccttattt

SEQ ID NO: 1363158 - DNA, 15 bp, Homo sapiens
gttatataccttatt

SEQ ID NO: 1363159 - DNA, 15 bp, Homo sapiens
tgttatataccttat

SEQ ID NO: 1363160 - DNA, 15 bp, Homo sapiens
atgttatatacctta

SEQ ID NO: 1363161 - DNA, 15 bp, Homo sapiens
catgttatatacctt

SEQ ID NO: 1363162 - DNA, 15 bp, Homo sapiens
gcatgttatatacct

SEQ ID NO: 1363163 - DNA, 15 bp, Homo sapiens
agcatgttatatacc

SEQ ID NO: 1363164 - DNA, 15 bp, Homo sapiens
aagcatgttatatac

SEQ ID NO: 1363165 - DNA, 15 bp, Homo sapiens
taagcatgttatata

SEQ ID NO: 1363166 - DNA, 15 bp, Homo sapiens
ctaagcatgttatat

SEQ ID NO: 1363167 - DNA, 15 bp, Homo sapiens
actaagcatgttata

SEQ ID NO: 1363168 - DNA, 15 bp, Homo sapiens
cactaagcatgttat

SEQ ID NO: 1363169 - DNA, 15 bp, Homo sapiens
acactaagcatgtta

SEQ ID NO: 1363170 - DNA, 15 bp, Homo sapiens
tacactaagcatgtt

SEQ ID NO: 1363171 - DNA, 15 bp, Homo sapiens
ttacactaagcatgt

SEQ ID NO: 1363172 - DNA, 15 bp, Homo sapiens
tttacactaagcatg

SEQ ID NO: 1363173 - DNA, 15 bp, Homo sapiens
ctttacactaagcat

SEQ ID NO: 1363174 - DNA, 15 bp, Homo sapiens
actttacactaagca

SEQ ID NO: 1363175 - DNA, 15 bp, Homo sapiens
aactttacactaagc

SEQ ID NO: 1363176 - DNA, 15 bp, Homo sapiens
gaactttacactaag

SEQ ID NO: 1363177 - DNA, 15 bp, Homo sapiens
tgaactttacactaa

SEQ ID NO: 1363178 - DNA, 15 bp, Homo sapiens
ctgaactttacacta

SEQ ID NO: 1363179 - DNA, 15 bp, Homo sapiens
actgaactttacact

SEQ ID NO: 1363180 - DNA, 15 bp, Homo sapiens
tactgaactttacac

SEQ ID NO: 1363181 - DNA, 15 bp, Homo sapiens
ttactgaactttaca

SEQ ID NO: 1363182 - DNA, 15 bp, Homo sapiens
tttactgaactttac

SEQ ID NO: 1363183 - DNA, 15 bp, Homo sapiens
atttactgaacttta

SEQ ID NO: 1363184 - DNA, 15 bp, Homo sapiens
tatttactgaacttt

SEQ ID NO: 1363185 - DNA, 15 bp, Homo sapiens
atatttactgaactt

SEQ ID NO: 1363186 - DNA, 15 bp, Homo sapiens
aatatttactgaact

SEQ ID NO: 1363187 - DNA, 15 bp, Homo sapiens
taatatttactgaac

SEQ ID NO: 1363188 - DNA, 15 bp, Homo sapiens
ctaatatttactgaa

SEQ ID NO: 1363189 - DNA, 15 bp, Homo sapiens
gctaatatttactga

SEQ ID NO: 1363190 - DNA, 15 bp, Homo sapiens
agctaatatttactg

SEQ ID NO: 1363191 - DNA, 15 bp, Homo sapiens
gagctaatatttact

SEQ ID NO: 1363192 - DNA, 15 bp, Homo sapiens
agagctaatatttac

SEQ ID NO: 1363193 - DNA, 15 bp, Homo sapiens
gagagctaatattta

SEQ ID NO: 1363194 - DNA, 15 bp, Homo sapiens
ggagagctaatattt

SEQ ID NO: 1363195 - DNA, 15 bp, Homo sapiens
gggagagctaatatt

SEQ ID NO: 1363196 - DNA, 15 bp, Homo sapiens
agggagagctaatat

SEQ ID NO: 1363197 - DNA, 15 bp, Homo sapiens
gagggagagctaata

SEQ ID NO: 1363198 - DNA, 15 bp, Homo sapiens
agagggagagctaat

SEQ ID NO: 1363199 - DNA, 15 bp, Homo sapiens
gagagggagagctaa

SEQ ID NO: 1363200 - DNA, 15 bp, Homo sapiens
agagagggagagcta

SEQ ID NO: 1363201 - DNA, 15 bp, Homo sapiens
gagagagggagagct

SEQ ID NO: 1363202 - DNA, 15 bp, Homo sapiens
agagagagggagagc

SEQ ID NO: 1363203 - DNA, 15 bp, Homo sapiens
tagagagagagagag

SEQ ID NO: 1363204 - DNA, 15 bp, Homo sapiens
atagagagagagaga

SEQ ID NO: 1363205 - DNA, 15 bp, Homo sapiens
gatagagagagagag

SEQ ID NO: 1363206 - DNA, 15 bp, Homo sapiens
agatagagagagaga

SEQ ID NO: 1363207 - DNA, 15 bp, Homo sapiens
gagatagagagagag

SEQ ID NO: 1363208 - DNA, 15 bp, Homo sapiens
agagatagagagaga

SEQ ID NO: 1363209 - DNA, 15 bp, Homo sapiens
tagagatagagagag

SEQ ID NO: 1363210 - DNA, 15 bp, Homo sapiens
atagagatagagaga

SEQ ID NO: 1363211 - DNA, 15 bp, Homo sapiens
aatagagatagagag

SEQ ID NO: 1363212 - DNA, 15 bp, Homo sapiens
aaatagagatagaga

SEQ ID NO: 1363213 - DNA, 15 bp, Homo sapiens
gaaatagagatagag

SEQ ID NO: 1363214 - DNA, 15 bp, Homo sapiens
agaaatagagataga

SEQ ID NO: 1363215 - DNA, 15 bp, Homo sapiens
gagaaatagagatag

SEQ ID NO: 1363216 - DNA, 15 bp, Homo sapiens
agagaaatagagata

SEQ ID NO: 1363217 - DNA, 15 bp, Homo sapiens
cagagaaatagagat

SEQ ID NO: 1363218 - DNA, 15 bp, Homo sapiens
ccagagaaatagaga

SEQ ID NO: 1363219 - DNA, 15 bp, Homo sapiens
cccagagaaatagag

SEQ ID NO: 1363220 - DNA, 15 bp, Homo sapiens
tcccagagaaataga

SEQ ID NO: 1363221 - DNA, 15 bp, Homo sapiens
gtcccagagaaatag

SEQ ID NO: 1363222 - DNA, 15 bp, Homo sapiens
agtcccagagaaata

SEQ ID NO: 1363223 - DNA, 15 bp, Homo sapiens
aagtcccagagaaat

SEQ ID NO: 1363224 - DNA, 15 bp, Homo sapiens
taagtcccagagaaa

SEQ ID NO: 1363225 - DNA, 15 bp, Homo sapiens
ctaagtcccagagaa

SEQ ID NO: 1363226 - DNA, 15 bp, Homo sapiens
actaagtcccagaga

SEQ ID NO: 1363227 - DNA, 15 bp, Homo sapiens
cactaagtcccagag

SEQ ID NO: 1363228 - DNA, 15 bp, Homo sapiens
tcactaagtcccaga

SEQ ID NO: 1363229 - DNA, 15 bp, Homo sapiens
ttcactaagtcccag

SEQ ID NO: 1363230 - DNA, 15 bp, Homo sapiens
tttcactaagtccca

SEQ ID NO: 1363231 - DNA, 15 bp, Homo sapiens
atttcactaagtccc

SEQ ID NO: 1363232 - DNA, 15 bp, Homo sapiens
catttcactaagtcc

SEQ ID NO: 1363233 - DNA, 15 bp, Homo sapiens
tcatttcactaagtc

SEQ ID NO: 1363234 - DNA, 15 bp, Homo sapiens
ttcatttcactaagt

SEQ ID NO: 1363235 - DNA, 15 bp, Homo sapiens
attcatttcactaag

SEQ ID NO: 1363236 - DNA, 15 bp, Homo sapiens
aattcatttcactaa

SEQ ID NO: 1363237 - DNA, 15 bp, Homo sapiens
taattcatttcacta

SEQ ID NO: 1363238 - DNA, 15 bp, Homo sapiens
gtaattcatttcact

SEQ ID NO: 1363239 - DNA, 15 bp, Homo sapiens
tgtaattcatttcac

SEQ ID NO: 1363240 - DNA, 15 bp, Homo sapiens
atgtaattcatttca

SEQ ID NO: 1363241 - DNA, 15 bp, Homo sapiens
aatgtaattcatttc

SEQ ID NO: 1363242 - DNA, 15 bp, Homo sapiens
aaatgtaattcattt

SEQ ID NO: 1363243 - DNA, 15 bp, Homo sapiens
taaatgtaattcatt

SEQ ID NO: 1363244 - DNA, 15 bp, Homo sapiens
ttaaatgtaattcat

SEQ ID NO: 1363245 - DNA, 15 bp, Homo sapiens
tttaaatgtaattca

SEQ ID NO: 1363246 - DNA, 15 bp, Homo sapiens
atttaaatgtaattc

SEQ ID NO: 1363247 - DNA, 15 bp, Homo sapiens
tatttaaatgtaatt

SEQ ID NO: 1363248 - DNA, 15 bp, Homo sapiens
gtatttaaatgtaat

SEQ ID NO: 1363249 - DNA, 15 bp, Homo sapiens
tgtatttaaatgtaa

SEQ ID NO: 1363250 - DNA, 15 bp, Homo sapiens
gtgtatttaaatgta

SEQ ID NO: 1363251 - DNA, 15 bp, Homo sapiens
ggtgtatttaaatgt

SEQ ID NO: 1363252 - DNA, 15 bp, Homo sapiens
aggtgtatttaaatg

SEQ ID NO: 1363253 - DNA, 15 bp, Homo sapiens
aaggtgtatttaaat

SEQ ID NO: 1363254 - DNA, 15 bp, Homo sapiens
aaaggtgtatttaaa

SEQ ID NO: 1363255 - DNA, 15 bp, Homo sapiens
gaaaggtgtatttaa

SEQ ID NO: 1363256 - DNA, 15 bp, Homo sapiens
ggaaaggtgtattta

SEQ ID NO: 1363257 - DNA, 15 bp, Homo sapiens
tggaaaggtgtattt

SEQ ID NO: 1363258 - DNA, 15 bp, Homo sapiens
atggaaaggtgtatt

SEQ ID NO: 1363259 - DNA, 15 bp, Homo sapiens
catggaaaggtgtat

SEQ ID NO: 1363260 - DNA, 15 bp, Homo sapiens
acatggaaaggtgta

SEQ ID NO: 1363261 - DNA, 15 bp, Homo sapiens
gacatggaaaggtgt

SEQ ID NO: 1363262 - DNA, 15 bp, Homo sapiens
ggacatggaaaggtg

SEQ ID NO: 1363263 - DNA, 15 bp, Homo sapiens
tggacatggaaaggt

SEQ ID NO: 1363264 - DNA, 15 bp, Homo sapiens
ttggacatggaaagg

SEQ ID NO: 1363265 - DNA, 15 bp, Homo sapiens
cttggacatggaaag

SEQ ID NO: 1363266 - DNA, 15 bp, Homo sapiens
tcttggacatggaaa

SEQ ID NO: 1363267 - DNA, 15 bp, Homo sapiens
ttcttggacatggaa

SEQ ID NO: 1363268 - DNA, 15 bp, Homo sapiens
tttcttggacatgga

SEQ ID NO: 1363269 - DNA, 15 bp, Homo sapiens
ttttcttggacatgg

SEQ ID NO: 1363270 - DNA, 15 bp, Homo sapiens
cttttcttggacatg

SEQ ID NO: 1363271 - DNA, 15 bp, Homo sapiens
tcttttcttggacat

SEQ ID NO: 1363272 - DNA, 15 bp, Homo sapiens
ttcttttcttggaca

SEQ ID NO: 1363273 - DNA, 15 bp, Homo sapiens
tttcttttcttggac

SEQ ID NO: 1363274 - DNA, 15 bp, Homo sapiens
ttttcttttcttgga

SEQ ID NO: 1363275 - DNA, 15 bp, Homo sapiens
attttcttttcttgg

SEQ ID NO: 1363276 - DNA, 15 bp, Homo sapiens
gattttcttttcttg

SEQ ID NO: 1363277 - DNA, 15 bp, Homo sapiens
agattttcttttctt

SEQ ID NO: 1363278 - DNA, 15 bp, Homo sapiens
aagattttcttttct

SEQ ID NO: 1363279 - DNA, 15 bp, Homo sapiens
caagattttcttttc

SEQ ID NO: 1363280 - DNA, 15 bp, Homo sapiens
gcaagattttctttt

SEQ ID NO: 1363281 - DNA, 15 bp, Homo sapiens
tgcaagattttcttt

SEQ ID NO: 1363282 - DNA, 15 bp, Homo sapiens
gtgcaagattttctt

SEQ ID NO: 1363283 - DNA, 15 bp, Homo sapiens
tgtgcaagattttct

SEQ ID NO: 1363284 - DNA, 15 bp, Homo sapiens
ttgtgcaagattttc

SEQ ID NO: 1363285 - DNA, 15 bp, Homo sapiens
tttgtgcaagatttt

SEQ ID NO: 1363286 - DNA, 15 bp, Homo sapiens
gtttgtgcaagattt

SEQ ID NO: 1363287 - DNA, 15 bp, Homo sapiens
agtttgtgcaagatt

SEQ ID NO: 1363288 - DNA, 15 bp, Homo sapiens
tagtttgtgcaagat

SEQ ID NO: 1363289 - DNA, 15 bp, Homo sapiens
ctagtttgtgcaaga

SEQ ID NO: 1363290 - DNA, 15 bp, Homo sapiens
cctagtttgtgcaag

SEQ ID NO: 1363291 - DNA, 15 bp, Homo sapiens
tcctagtttgtgcaa

SEQ ID NO: 1363292 - DNA, 15 bp, Homo sapiens
ttcctagtttgtgca

SEQ ID NO: 1363293 - DNA, 15 bp, Homo sapiens
attcctagtttgtgc

SEQ ID NO: 1363294 - DNA, 15 bp, Homo sapiens
cattcctagtttgtg

SEQ ID NO: 1363295 - DNA, 15 bp, Homo sapiens
ccattcctagtttgt

SEQ ID NO: 1363296 - DNA, 15 bp, Homo sapiens
accattcctagtttg

SEQ ID NO: 1363297 - DNA, 15 bp, Homo sapiens
taccattcctagttt

SEQ ID NO: 1363298 - DNA, 15 bp, Homo sapiens
gtaccattcctagtt

SEQ ID NO: 1363299 - DNA, 15 bp, Homo sapiens
agtaccattcctagt

SEQ ID NO: 1363300 - DNA, 15 bp, Homo sapiens
aagtaccattcctag

SEQ ID NO: 1363301 - DNA, 15 bp, Homo sapiens
gaagtaccattccta

SEQ ID NO: 1363302 - DNA, 15 bp, Homo sapiens
tgaagtaccattcct

SEQ ID NO: 1363303 - DNA, 15 bp, Homo sapiens
ctgaagtaccattcc

SEQ ID NO: 1363304 - DNA, 15 bp, Homo sapiens
actgaagtaccattc

SEQ ID NO: 1363305 - DNA, 15 bp, Homo sapiens
tactgaagtaccatt

SEQ ID NO: 1363306 - DNA, 15 bp, Homo sapiens
atactgaagtaccat

SEQ ID NO: 1363307 - DNA, 15 bp, Homo sapiens
aatactgaagtacca

SEQ ID NO: 1363308 - DNA, 15 bp, Homo sapiens
taatactgaagtacc

SEQ ID NO: 1363309 - DNA, 15 bp, Homo sapiens
ttaatactgaagtac

SEQ ID NO: 1363310 - DNA, 15 bp, Homo sapiens
attaatactgaagta

SEQ ID NO: 1363311 - DNA, 15 bp, Homo sapiens
aattaatactgaagt

SEQ ID NO: 1363312 - DNA, 15 bp, Homo sapiens
aaattaatactgaag

SEQ ID NO: 1363313 - DNA, 15 bp, Homo sapiens
aaaattaatactgaa

SEQ ID NO: 1363314 - DNA, 15 bp, Homo sapiens
taaaattaatactga

SEQ ID NO: 1363315 - DNA, 15 bp, Homo sapiens
ttaaaattaatactg

SEQ ID NO: 1363316 - DNA, 15 bp, Homo sapiens
attaaaattaatact

SEQ ID NO: 1363317 - DNA, 15 bp, Homo sapiens
aattaaaattaatac

SEQ ID NO: 1363318 - DNA, 15 bp, Homo sapiens
gaattaaaattaata

SEQ ID NO: 1363319 - DNA, 15 bp, Homo sapiens
agaattaaaattaat

SEQ ID NO: 1363320 - DNA, 15 bp, Homo sapiens
gagaattaaaattaa

SEQ ID NO: 1363321 - DNA, 15 bp, Homo sapiens
agagaattaaaatta

SEQ ID NO: 1363322 - DNA, 15 bp, Homo sapiens
gagagaattaaaatt

SEQ ID NO: 1363323 - DNA, 15 bp, Homo sapiens
tgagagaattaaaat

SEQ ID NO: 1363324 - DNA, 15 bp, Homo sapiens
ttgagagaattaaaa

SEQ ID NO: 1363325 - DNA, 15 bp, Homo sapiens
tttgagagaattaaa

SEQ ID NO: 1363326 - DNA, 15 bp, Homo sapiens
ttttgagagaattaa

SEQ ID NO: 1363327 - DNA, 15 bp, Homo sapiens
tttttgagagaatta

SEQ ID NO: 1363328 - DNA, 15 bp, Homo sapiens
atttttgagagaatt

SEQ ID NO: 1363329 - DNA, 15 bp, Homo sapiens
catttttgagagaat

SEQ ID NO: 1363330 - DNA, 15 bp, Homo sapiens
acatttttgagagaa

SEQ ID NO: 1363331 - DNA, 15 bp, Homo sapiens
tacatttttgagaga

SEQ ID NO: 1363332 - DNA, 15 bp, Homo sapiens
ttacatttttgagag

SEQ ID NO: 1363333 - DNA, 15 bp, Homo sapiens
cttacatttttgaga

SEQ ID NO: 1363334 - DNA, 15 bp, Homo sapiens
tcttacatttttgag

SEQ ID NO: 1363335 - DNA, 15 bp, Homo sapiens
atcttacatttttga

SEQ ID NO: 1363336 - DNA, 15 bp, Homo sapiens
tatcttacatttttg

SEQ ID NO: 1363337 - DNA, 15 bp, Homo sapiens
ttatcttacattttt

SEQ ID NO: 1363338 - DNA, 15 bp, Homo sapiens
attatcttacatttt

SEQ ID NO: 1363339 - DNA, 15 bp, Homo sapiens
aattatcttacattt

SEQ ID NO: 1363340 - DNA, 15 bp, Homo sapiens
taattatcttacatt

SEQ ID NO: 1363341 - DNA, 15 bp, Homo sapiens
ataattatcttacat

SEQ ID NO: 1363342 - DNA, 15 bp, Homo sapiens
aataattatcttaca

SEQ ID NO: 1363343 - DNA, 15 bp, Homo sapiens
caataattatcttac

SEQ ID NO: 1363344 - DNA, 15 bp, Homo sapiens
acaataattatctta

SEQ ID NO: 1363345 - DNA, 15 bp, Homo sapiens
tacaataattatctt

SEQ ID NO: 1363346 - DNA, 15 bp, Homo sapiens
atacaataattatct

SEQ ID NO: 1363347 - DNA, 15 bp, Homo sapiens
aatacaataattatc

SEQ ID NO: 1363348 - DNA, 15 bp, Homo sapiens
taatacaataattat

SEQ ID NO: 1363349 - DNA, 15 bp, Homo sapiens
ataatacaataatta

SEQ ID NO: 1363350 - DNA, 15 bp, Homo sapiens
cataatacaataatt

SEQ ID NO: 1363351 - DNA, 15 bp, Homo sapiens
acataatacaataat

SEQ ID NO: 1363352 - DNA, 15 bp, Homo sapiens
cacataatacaataa

SEQ ID NO: 1363353 - DNA, 15 bp, Homo sapiens
acacataatacaata

SEQ ID NO: 1363354 - DNA, 15 bp, Homo sapiens
aacacataatacaat

SEQ ID NO: 1363355 - DNA, 15 bp, Homo sapiens
taacacataatacaa

SEQ ID NO: 1363356 - DNA, 15 bp, Homo sapiens
ctaacacataataca

SEQ ID NO: 1363357 - DNA, 15 bp, Homo sapiens
actaacacataatac

SEQ ID NO: 1363358 - DNA, 15 bp, Homo sapiens
tactaacacataata

SEQ ID NO: 1363359 - DNA, 15 bp, Homo sapiens
ttactaacacataat

SEQ ID NO: 1363360 - DNA, 15 bp, Homo sapiens
cttactaacacataa

SEQ ID NO: 1363361 - DNA, 15 bp, Homo sapiens
tcttactaacacata

SEQ ID NO: 1363362 - DNA, 15 bp, Homo sapiens
ctcttactaacacat

SEQ ID NO: 1363363 - DNA, 15 bp, Homo sapiens
actcttactaacaca

SEQ ID NO: 1363364 - DNA, 15 bp, Homo sapiens
aactcttactaacac

SEQ ID NO: 1363365 - DNA, 15 bp, Homo sapiens
aaactcttactaaca

SEQ ID NO: 1363366 - DNA, 15 bp, Homo sapiens
taaactcttactaac

SEQ ID NO: 1363367 - DNA, 15 bp, Homo sapiens
gtaaactcttactaa

SEQ ID NO: 1363368 - DNA, 15 bp, Homo sapiens
ggtaaactcttacta

SEQ ID NO: 1363369 - DNA, 15 bp, Homo sapiens
gggtaaactcttact

SEQ ID NO: 1363370 - DNA, 15 bp, Homo sapiens
tgggtaaactcttac

SEQ ID NO: 1363371 - DNA, 15 bp, Homo sapiens
ttgggtaaactctta

SEQ ID NO: 1363372 - DNA, 15 bp, Homo sapiens
tttgggtaaactctt

SEQ ID NO: 1363373 - DNA, 15 bp, Homo sapiens
atttgggtaaactct

SEQ ID NO: 1363374 - DNA, 15 bp, Homo sapiens
aatttgggtaaactc

SEQ ID NO: 1363375 - DNA, 15 bp, Homo sapiens
gaatttgggtaaact

SEQ ID NO: 1363376 - DNA, 15 bp, Homo sapiens
tgaatttgggtaaac

SEQ ID NO: 1363377 - DNA, 15 bp, Homo sapiens
ctgaatttgggtaaa

SEQ ID NO: 1363378 - DNA, 15 bp, Homo sapiens
tctgaatttgggtaa

SEQ ID NO: 1363379 - DNA, 15 bp, Homo sapiens
atctgaatttgggta

SEQ ID NO: 1363380 - DNA, 15 bp, Homo sapiens
aatctgaatttgggt

SEQ ID NO: 1363381 - DNA, 15 bp, Homo sapiens
aaatctgaatttggg

SEQ ID NO: 1363382 - DNA, 15 bp, Homo sapiens
taaatctgaatttgg

SEQ ID NO: 1363383 - DNA, 15 bp, Homo sapiens
ttaaatctgaatttg

SEQ ID NO: 1363384 - DNA, 15 bp, Homo sapiens
tttaaatctgaattt

SEQ ID NO: 1363385 - DNA, 15 bp, Homo sapiens
ctttaaatctgaatt

SEQ ID NO: 1363386 - DNA, 15 bp, Homo sapiens
actttaaatctgaat

SEQ ID NO: 1363387 - DNA, 15 bp, Homo sapiens
tactttaaatctgaa

SEQ ID NO: 1363388 - DNA, 15 bp, Homo sapiens
ctactttaaatctga

SEQ ID NO: 1363389 - DNA, 15 bp, Homo sapiens
actactttaaatctg

SEQ ID NO: 1363390 - DNA, 15 bp, Homo sapiens
tactactttaaatct

SEQ ID NO: 1363391 - DNA, 15 bp, Homo sapiens
atactactttaaatc

SEQ ID NO: 1363392 - DNA, 15 bp, Homo sapiens
tatactactttaaat

SEQ ID NO: 1363393 - DNA, 15 bp, Homo sapiens
ttatactactttaaa

SEQ ID NO: 1363394 - DNA, 15 bp, Homo sapiens
cttatactactttaa

SEQ ID NO: 1363395 - DNA, 15 bp, Homo sapiens
ccttatactacttta

SEQ ID NO: 1363396 - DNA, 15 bp, Homo sapiens
gccttatactacttt

SEQ ID NO: 1363397 - DNA, 15 bp, Homo sapiens
tgccttatactactt

SEQ ID NO: 1363398 - DNA, 15 bp, Homo sapiens
ctgccttatactact

SEQ ID NO: 1363399 - DNA, 15 bp, Homo sapiens
actgccttatactac

SEQ ID NO: 1363400 - DNA, 15 bp, Homo sapiens
aactgccttatacta

SEQ ID NO: 1363401 - DNA, 15 bp, Homo sapiens
aaactgccttatact

SEQ ID NO: 1363402 - DNA, 15 bp, Homo sapiens
gaaactgccttatac

SEQ ID NO: 1363403 - DNA, 15 bp, Homo sapiens
tgaaactgccttata

SEQ ID NO: 1363404 - DNA, 15 bp, Homo sapiens
ttgaaactgccttat

SEQ ID NO: 1363405 - DNA, 15 bp, Homo sapiens
tttgaaactgcctta

SEQ ID NO: 1363406 - DNA, 15 bp, Homo sapiens
atttgaaactgcctt

SEQ ID NO: 1363407 - DNA, 15 bp, Homo sapiens
gatttgaaactgcct

SEQ ID NO: 1363408 - DNA, 15 bp, Homo sapiens
tgatttgaaactgcc

SEQ ID NO: 1363409 - DNA, 15 bp, Homo sapiens
gtgatttgaaactgc

SEQ ID NO: 1363410 - DNA, 15 bp, Homo sapiens
tgtgatttgaaactg

SEQ ID NO: 1363411 - DNA, 15 bp, Homo sapiens
ctgtgatttgaaact

SEQ ID NO: 1363412 - DNA, 15 bp, Homo sapiens
cctgtgatttgaaac

SEQ ID NO: 1363413 - DNA, 15 bp, Homo sapiens
acctgtgatttgaaa

SEQ ID NO: 1363414 - DNA, 15 bp, Homo sapiens
cacctgtgatttgaa

SEQ ID NO: 1363415 - DNA, 15 bp, Homo sapiens
tcacctgtgatttga

SEQ ID NO: 1363416 - DNA, 15 bp, Homo sapiens
ttcacctgtgatttg

SEQ ID NO: 1363417 - DNA, 15 bp, Homo sapiens
tttcacctgtgattt

SEQ ID NO: 1363418 - DNA, 15 bp, Homo sapiens
ttttcacctgtgatt

SEQ ID NO: 1363419 - DNA, 15 bp, Homo sapiens
tttttcacctgtgat

SEQ ID NO: 1363420 - DNA, 15 bp, Homo sapiens
atttttcacctgtga

SEQ ID NO: 1363421 - DNA, 15 bp, Homo sapiens
aatttttcacctgtg

SEQ ID NO: 1363422 - DNA, 15 bp, Homo sapiens
aaatttttcacctgt

SEQ ID NO: 1363423 - DNA, 15 bp, Homo sapiens
taaatttttcacctg

SEQ ID NO: 1363424 - DNA, 15 bp, Homo sapiens
ctaaatttttcacct

SEQ ID NO: 1363425 - DNA, 15 bp, Homo sapiens
actaaatttttcacc

SEQ ID NO: 1363426 - DNA, 15 bp, Homo sapiens
cactaaatttttcac

SEQ ID NO: 1363427 - DNA, 15 bp, Homo sapiens
tcactaaatttttca

SEQ ID NO: 1363428 - DNA, 15 bp, Homo sapiens
gtcactaaatttttc

SEQ ID NO: 1363429 - DNA, 15 bp, Homo sapiens
tgtcactaaattttt

SEQ ID NO: 1363430 - DNA, 15 bp, Homo sapiens
ttgtcactaaatttt

SEQ ID NO: 1363431 - DNA, 15 bp, Homo sapiens
tttgtcactaaattt

SEQ ID NO: 1363432 - DNA, 15 bp, Homo sapiens
ttttgtcactaaatt

SEQ ID NO: 1363433 - DNA, 15 bp, Homo sapiens
tttttgtcactaaat

SEQ ID NO: 1363434 - DNA, 15 bp, Homo sapiens
ctttttgtcactaaa

SEQ ID NO: 1363435 - DNA, 15 bp, Homo sapiens
gctttttgtcactaa

SEQ ID NO: 1363436 - DNA, 15 bp, Homo sapiens
agctttttgtcacta

SEQ ID NO: 1363437 - DNA, 15 bp, Homo sapiens
cagctttttgtcact

SEQ ID NO: 1363438 - DNA, 15 bp, Homo sapiens
tcagctttttgtcac

SEQ ID NO: 1363439 - DNA, 15 bp, Homo sapiens
atcagctttttgtca

SEQ ID NO: 1363440 - DNA, 15 bp, Homo sapiens
catcagctttttgtc

SEQ ID NO: 1363441 - DNA, 15 bp, Homo sapiens
acatcagctttttgt

SEQ ID NO: 1363442 - DNA, 15 bp, Homo sapiens
tacatcagctttttg

SEQ ID NO: 1363443 - DNA, 15 bp, Homo sapiens
ctacatcagcttttt

SEQ ID NO: 1363444 - DNA, 15 bp, Homo sapiens
tctacatcagctttt

SEQ ID NO: 1363445 - DNA, 15 bp, Homo sapiens
ttctacatcagcttt

SEQ ID NO: 1363446 - DNA, 15 bp, Homo sapiens
attctacatcagctt

SEQ ID NO: 1363447 - DNA, 15 bp, Homo sapiens
cattctacatcagct

SEQ ID NO: 1363448 - DNA, 15 bp, Homo sapiens
tcattctacatcagc

SEQ ID NO: 1363449 - DNA, 15 bp, Homo sapiens
atcattctacatcag

SEQ ID NO: 1363450 - DNA, 15 bp, Homo sapiens
gatcattctacatca

SEQ ID NO: 1363451 - DNA, 15 bp, Homo sapiens
agatcattctacatc

SEQ ID NO: 1363452 - DNA, 15 bp, Homo sapiens
gagatcattctacat

SEQ ID NO: 1363453 - DNA, 15 bp, Homo sapiens
agagatcattctaca
